United States Patent Application Publication US 2017/0009304 A1 - sequence listing, part 25

SEQ ID NO: 517890 - DNA, 98 bp, Homo sapiens
gaaaatctgggctaagtgctggcaagagcgatgtctactacttcagggatttccacaagatcaaattcgattgtggcccatgcaagcaaggagtaatg

SEQ ID NO: 517891 - DNA, 83 bp, Homo sapiens
attgaacttactccacccagagggatgataccggggactctccagagccatgactagatccaatggattctgcgatgctgtct

SEQ ID NO: 517892 - DNA, 75 bp, Homo sapiens
tgtgacagtaacagtacttgggatcccccagttccaaagtgtcttaaaggacttcctccgtcaggcagctggcag

SEQ ID NO: 517893 - DNA, 75 bp, Homo sapiens
ctggaagctgagggcacgtgtttgcggttcagccctttgatgaccgcagcagatgagcagaactacattctccga

SEQ ID NO: 517894 - DNA, 83 bp, Homo sapiens
ccctcccgcagcctgcctttccttccccctcggaaaatggttcccactgccgggcgaggctccataaaaatacagactcacca

SEQ ID NO: 517895 - DNA, 90 bp, Homo sapiens
tcatttctcttgagtaaatacctaaaagtgggcttgctggttccatgccattgcagtgtcaactaggcctcagttacttttcagtttgcc

SEQ ID NO: 517896 - DNA, 89 bp, Homo sapiens
gtcgggcggggcggcggcgctgacaggacttcattgacttaactagagagaccagaccaaggacaaaagatcgcagtggactgtatgtg

SEQ ID NO: 517897 - DNA, 88 bp, Homo sapiens
cgcactcctccgcatccctctttaacagggctagtgacatttgaagatgtagctgtggatttcacccaggaggagtggcagtacctga

SEQ ID NO: 517898 - DNA, 75 bp, Homo sapiens
gactgctttggggagtatgtggaaccgcaggactgcagggtctctccagacttaattcagtgcacaaatgagatg

SEQ ID NO: 517899 - DNA, 100 bp, Homo sapiens
gagtccctggagaaggggacgcggagggcgactgccgagggtctcagcgggatctggagtcaggggaaaatcatcagcgtgttagcattttctttgacta

SEQ ID NO: 517900 - DNA, 82 bp, Homo sapiens
tcggcggtcgtcactggcagggcctcctcgagctccacggacatggaatgggcaaagaagtggggaatctgctactggaaaa

SEQ ID NO: 517901 - DNA, 98 bp, Homo sapiens
ttatgaatataaatacaaaagagaaataagtcagcacaacatcaatcctcatcaaggaaatgctatacttgaaaaggctgttgaagccaaggaaaaac

SEQ ID NO: 517902 - DNA, 75 bp, Homo sapiens
gatactgacctgtaaatcatcctttaggttaacgaagcccttgtcatttgctgattgtgttggggatgagctgcc

SEQ ID NO: 517903 - DNA, 104 bp, Homo sapiens
caaacagcccgcccgaccccgtcccgaccctggccgccccgagcggagcctggaggtgctggagaatctggtaaaagcaccattgtgaagcagatgaggatcct

SEQ ID NO: 517904 - DNA, 101 bp, Homo sapiens
tagaaaacggcgagagtgggcgagaacgtccactgcgggccggcgaaagctggtggaccaggtgctctgaggctggcgtacagacacagcacgtgcgacgg

SEQ ID NO: 517905 - DNA, 98 bp, Homo sapiens
gaggaaacagccagaccgagagcagcctgccggggcggagttgatggagaaccttgtgacctgtctttgaatataacctggtatctgaaaagcgctga

SEQ ID NO: 517906 - DNA, 110 bp, Homo sapiens
aagcctggaatggttggcaagtcgaacaaagtcagctttctccaatctttctacatcccagaaatgtgaatggcataaagtatcacgctaagaatggtcacagaacacag

SEQ ID NO: 517907 - DNA, 90 bp, Homo sapiens
ccactacagttcatcaacatcaactacgtccctctgaagatgaggagcgggaaggcctcctgcaccctggagaccgtgtgggaagacaag

SEQ ID NO: 517908 - DNA, 110 bp, Homo sapiens
cggggggcgagtaagccagcggcaggaccagcgggcgggggcccacgagtgagaagccctaccactgcaactgggacggctgcggctggaagtttgcgcgctcagacgag

SEQ ID NO: 517909 - DNA, 50 bp, Homo sapiens
cggcggcggcggcgattgggtaccgaggtctcagctgagtctgctctgat

SEQ ID NO: 517910 - DNA, 82 bp, Homo sapiens
tgctgtcgctggggacgtgcctgggcctggcctgtgtggacaacagtgagtatatgcggaatggagacttcttacccaccag

SEQ ID NO: 517911 - DNA, 101 bp, Homo sapiens
gttggtagagggtttgagtccgcatcgccacagctgaaggctgcgagggactaagagcagatgtcccagaagcttttgttgacaattccagtttccgaaca

SEQ ID NO: 517912 - DNA, 100 bp, Homo sapiens
aggatttggtttcagcatgtccttctctgaatgatgaatacttttactactgtgacaacattaacggttgtggtatgagaaccctggggtgttctccccg

SEQ ID NO: 517913 - DNA, 75 bp, Homo sapiens
tgatctgaacggggcgcacttcgacccggaagtttacctagacaaggtggaaactaattctaagccagactgctg

SEQ ID NO: 517914 - DNA, 100 bp, Homo sapiens
ggacagcgacgacgcggaggcagagaagggaacgcccggcccagccccgtccaggtcaagacctcgtctccgttctcatagtcgtagcagtgaaaggtcc

SEQ ID NO: 517915 - DNA, 89 bp, Homo sapiens
ttttgacaactgggatgagagctatgactattggcatatctttttcttgcacatcaaggaggccctcttggcaggccacctcttgtgtt

SEQ ID NO: 517916 - DNA, 83 bp, Homo sapiens
cggccctgcagaagctggaggaggcagaaaaagctgcagatgagagtgagagtaacaaatgtggcaattattttggatctatc

SEQ ID NO: 517917 - DNA, 100 bp, Homo sapiens
agaatccattgagatgtcccatcaagctctatgatttctacctcttcaaatgggtctcattctgtcgcacaggttggcgtgcagtggtgtgatctcagct

SEQ ID NO: 517918 - DNA, 100 bp, Homo sapiens
gcacaaactaattaaaggagtcgagagacttatctccggacaacaagcttcagggagctcgcattctcttgtgttcgtgttgccctcgtgcccatcaagt

SEQ ID NO: 517919 - DNA, 100 bp, Homo sapiens
gtttcttaagaagaattctagccatacattgttacaggtgtcagttgtacccgaggcgttctcagcagcagcaagtacctgtggtggatttccaggctga

SEQ ID NO: 517920 - DNA, 74 bp, Homo sapiens
ggcagaccagcaactcccctactggatttatgttgaaattgagcgtgcgcgactgactaaaacattagcaacta

SEQ ID NO: 517921 - DNA, 51 bp, Homo sapiens
tggcacatcagattgactgagattgtcctcgtgtgcaagctgaacacaagg

SEQ ID NO: 517922 - DNA, 100 bp, Homo sapiens
gccttgtgtgtccgactcggcagcagtgtattggtaaaggttttcaaggtgtcatgaaaagatggggatttaaaggccagcctgctacgcatggtcaaac

SEQ ID NO: 517923 - DNA, 87 bp, Homo sapiens
gagcttggttaacttgggagaaagtttcatctgtggatggagtattggttgatgataattagaagcatgctttccactgaacttccc

SEQ ID NO: 517924 - DNA, 83 bp, Homo sapiens
tggagaaaaccctcagaagaatttaatggatatctgtaactaaatgaccatggaatctggagccgagaaccagcagagtggag

SEQ ID NO: 517925 - DNA, 96 bp, Homo sapiens
tgagcatgaggttttccaatcaggtcatggaaaatggaagatttgcaaaatacaaatattttacccatgtcatgatcaataagacagatatgctaa

SEQ ID NO: 517926 - DNA, 100 bp, Homo sapiens
actttccagccttgtttttcagcagctttgaggaaaagtataggcgctgaagtttaagaaggtttctctgctggggtggagtgatgggggcataaccgca

SEQ ID NO: 517927 - DNA, 97 bp, Homo sapiens
aaatgaccaccatgttgcaaaaggttaaagtattgcacaatcagctggtccttttccacaatgccattgccgcttactttgctgggaatcagaagca

SEQ ID NO: 517928 - DNA, 98 bp, Homo sapiens
cacctgaagaagattgtacatcagtcacagacctgcccaatgcctttgatggaccaattaccataattgatgcgatgaagagagttgaagaaatcaaa

SEQ ID NO: 517929 - DNA, 100 bp, Homo sapiens
ccgagaaccgtcagtttgagccagatggaaaacaaaaagtcctttctcctgattcaccaaaaaataaaatactgactaccatcactgtgatgagattcct

SEQ ID NO: 517930 - DNA, 111 bp, Homo sapiens
ggaaaaagcaagctgaagacatcaagaagatcttcgagttcaaagagaccctcggaacgtgtggacactgccagcggctgcagccgacttggaatgacctgggagacaaat

SEQ ID NO: 517931 - DNA, 100 bp, Homo sapiens
ttccaactgtcgaaatggttatcaaagtgtttgttgctacatcttctgggtccatagcggtgtccttcttcacatcattatggaatcacccatttttcac

SEQ ID NO: 517932 - DNA, 75 bp, Homo sapiens
gaaacatgaagagctttctataaatagcaatccaggctgggagtgggggctcacacctggaatcccagcactttg

SEQ ID NO: 517933 - DNA, 100 bp, Homo sapiens
cccgagcagcgtcatgtaccccttggagaagatccagccctcagaagcataaaagctgtccgcagaaccagccctgcaggtactttaggagaaaagccag

SEQ ID NO: 517934 - DNA, 100 bp, Homo sapiens
tgatgatgaagatattgatgacgtggtgtattcgaaggctgccagtgtaccgaaagttgagactgtaaagtcagacaacaaggatgacgacatcgatatt

SEQ ID NO: 517935 - DNA, 75 bp, Homo sapiens
aatttgccaaactgaacgaatgtcccttagatccaggtggtgaaattgcctctacctttgatcacccagaactgg

SEQ ID NO: 517936 - DNA, 97 bp, Homo sapiens
agacatgagcacaggtgagcgggagatgtcctggatcgctgatacctatgccagcaccatagggcactatgtggaaccgtcccaaaatgtcccttgc

SEQ ID NO: 517937 - DNA, 51 bp, Homo sapiens
tatgcgcaagaacctggagaaggacccccgggtgcttgatgccatgctccc

SEQ ID NO: 517938 - DNA, 82 bp, Homo sapiens
gttcaagtttagagtggaattcgtgtgttgtacagacccttaagagcaatgttgatcccagggatgatgtatttggatatcc

SEQ ID NO: 517939 - DNA, 90 bp, Homo sapiens
gcgtggtgtggccctgttacgacagctgcccgcgggcccagcctgacgccatctcacgcctgctggagtgattacagtggcgagatcttg

SEQ ID NO: 517940 - DNA, 74 bp, Homo sapiens
ggagtacgtcgttcccgctgcgctaggggaagcgggcagactacgtctactttgagaactcctccagcaaccca

SEQ ID NO: 517941 - DNA, 110 bp, Homo sapiens
ctacttccattccagaaagatggcatcatttttgccctcaaaagaaatggcaggtctgccatcatggatgttctcgcagaagcaaatggcacctttgccttaaacctttt

SEQ ID NO: 517942 - DNA, 96 bp, Homo sapiens
tggctttgtacggcttagaggacttccctttggatgtagcaaggaagaaattgttcagttcttctcaggtgattatgggagtgctattgagacact

SEQ ID NO: 517943 - DNA, 82 bp, Homo sapiens
aaagagcctgcccgaagcctttggatcagcatgcaggactatgctgttagtaaagtggagatccttcagggtttggtgagtg

SEQ ID NO: 517944 - DNA, 51 bp, Homo sapiens
ctggcggcctgcgcagccacctcaagtctcaaatatctatcagtgtagaag

SEQ ID NO: 517945 - DNA, 97 bp, Homo sapiens
tccttattattcttctgtttattagcattatcttgacttttaaggcttatctaattaactgtgtttggaactgctataaatacatcaacaaccgaaa

SEQ ID NO: 517946 - DNA, 80 bp, Homo sapiens
aacagcagatttcccaagagcagcggaaaatgatccagtcacaggagaatgtactactcatcacctcccacctgtgaaag

SEQ ID NO: 517947 - DNA, 88 bp, Homo sapiens
gctcacgcgcctctacgactgccagaagggacttcctcgcccgaagagcgcgggcacagcaacgcagatgcggcaaagctccagctgg

SEQ ID NO: 517948 - DNA, 90 bp, Homo sapiens
ttttaaagcagcctagcactagaagcaatggctgccatccggaagaaactggtgattgttggtgatggagcctgtggaaagacatgcttg

SEQ ID NO: 517949 - DNA, 83 bp, Homo sapiens
cttcctgtgtggttttaccgcccagagagcgtcatggacctggcacttgcacctcctgcgccgccgccccccatccaaggata

SEQ ID NO: 517950 - DNA, 75 bp, Homo sapiens
cccaccttagcctcctaagtagctgggaccacaggccctagactggagctggttacagacggaagaagaagagca

SEQ ID NO: 517951 - DNA, 51 bp, Homo sapiens
cgacgaccgacagggtggtgaaagattccattggccgtgacatccccaaaa

SEQ ID NO: 517952 - DNA, 101 bp, Homo sapiens
gaaataatagaacaagggatagatttagtgagataattcgagataatactggcattttggagtgtgttaaagaaggaattggaagagtgataggcatggga

SEQ ID NO: 517953 - DNA, 100 bp, Homo sapiens
gcaggaaaaggacggcactgagaagcggggccggggcaggccgcgcaagcagcctccgctcatcatactggctagtggtggaccccaagctttagtaaat

SEQ ID NO: 517954 - DNA, 90 bp, Homo sapiens
cttatgtacaagatttaaaaagcatcgtagaggcttgagtttgaagaaacagaagaacctgattttactgcattatgtcagaaattaaag

SEQ ID NO: 517955 - DNA, 75 bp, Homo sapiens
caatgcccaagacattataaacgtgtttgatttcaccaccatagacttgacatctgagactgatgaaattccaga

SEQ ID NO: 517956 - DNA, 95 bp, Homo sapiens
ggaaaaggaggatctggggacccggatcagccgcctgacccggcgggtggaggagatcaaggtcttgggcgtctttggtactggcttttttaggg

SEQ ID NO: 517957 - DNA, 100 bp, Homo sapiens
tcgtgaccctcagcgccggtgcatgtcgatgatacaacttcagtattaaaggaggaacatgttacaacctttgaagatgaaggatcctatataattcaag

SEQ ID NO: 517958 - DNA, 90 bp, Homo sapiens
ccttgaggtgttacaccagcctgtccggacccgctgtggccacgttgccggtggtggtgtgcacattgagccccggtatagacagttccc

SEQ ID NO: 517959 - DNA, 98 bp, Homo sapiens
acaagattgcttgcaacaattgttatgcttgtttggagcaggtatgttaagaagttaggggattttgctaagccggagaatattgacttggccgtgca

SEQ ID NO: 517960 - DNA, 74 bp, Homo sapiens
ctttatctgtggcatgcaactggacgctgtgcagagctgcaagtccgtatcactgaggctgtggccacagccac

SEQ ID NO: 517961 - DNA, 90 bp, Homo sapiens
ggaacatgacgcaggtgcaggtgtctcttctcgccctggcggggaagggacccagacatggagctgcgggaagaagcctggtctccgggg

SEQ ID NO: 517962 - DNA, 98 bp, Homo sapiens
ccggagaagagaaactaaaaggacagtagaaaaggcttttccagtttgcataatagatctgaaactggacaatgtcctgttggaccacgagggtcact

SEQ ID NO: 517963 - DNA, 83 bp, Homo sapiens
cgggagtgttcgttgtgccagcgactaaaaagagattggccggtcgactgaaagccccattgattttgtagtaactgacacgg

SEQ ID NO: 517964 - DNA, 50 bp, Homo sapiens
cctggctacacgggcagatactgccaagtcttcgagtgcttcgactgacc

SEQ ID NO: 517965 - DNA, 98 bp, Homo sapiens
gaaaatgatttctgccacagaaggtcccgtgaaggccagagaagtccaaaagggcacaagagactatagtccccggcagatggcagttcgcgagaagg

SEQ ID NO: 517966 - DNA, 71 bp, Homo sapiens
cctgggcatggcctggaacctctcctaaaattctcgcattgatctggagaacattgtgtactacaaggacg

SEQ ID NO: 517967 - DNA, 100 bp, Homo sapiens
tggtgtttgtggcctcgatggtgttaggagaatgccgacagatgtcctcttcgagtcaaatcgggacctggctgcaggtgctggagaccatcggtgtgct

SEQ ID NO: 517968 - DNA, 100 bp, Homo sapiens
cagctgtgtactttgccctcagcatctcccttcatgtctgggtcatgattaataaagaactcttcagaattcctggtgtttcatcatatatacgactaag

SEQ ID NO: 517969 - DNA, 101 bp, Homo sapiens
gttcgggacatagagaatctgaaggcaggcactgtggccccaggaggggtgagcggcccttccccagcccagctgggagccccagccctcggtgggcagca

SEQ ID NO: 517970 - DNA, 87 bp, Homo sapiens
tggcggccccgacatcttcctgcacatctctgagttggatggcaagcatgtggtgtttggcaaagtgaaagaaggcatgaatattgt

SEQ ID NO: 517971 - DNA, 75 bp, Homo sapiens
tccgtctggatcacggatgtaggaagtgagtcagatgtaatgggaagaggccatgcacgcctggtgcatgttgaa

SEQ ID NO: 517972 - DNA, 75 bp, Homo sapiens
tgaaattacttgaccaagttgtccctccagctggtggtggtgctccaaattactaccccaacagctttggtgctc

SEQ ID NO: 517973 - DNA, 100 bp, Homo sapiens
ccctactgcggtcaacgtgaccagtgcatcccatgctgtggctccccttcaggaaataaagcagggaaatgaataagcgtctaacagaagaacaagccag

SEQ ID NO: 517974 - DNA, 73 bp, Homo sapiens
ctacgcgtccctttgggtttagcacgatgagctcaatcggcactggggtgaagcaaaaaatttattgccatat

SEQ ID NO: 517975 - DNA, 73 bp, Homo sapiens
aaattggtattgttggattgccaaatgttgggagattccaggtatccattacttggccagccactgcagtaca

SEQ ID NO: 517976 - DNA, 76 bp, Homo sapiens
gtcttccagagcgtgaagatcaagatcgagctgcggtgcaaccctgggcagtttgcgtgtcgcagcggcaccatcc

SEQ ID NO: 517977 - DNA, 100 bp, Homo sapiens
cactggcggccgaggtagaggcagtggcgcttgagttggtcgggggcagcggcaggctgctgacttgagtaaaccaatagataaaaggatatacaaagga

SEQ ID NO: 517978 - DNA, 90 bp, Homo sapiens
gtgctggccagtgagcccatcccgttctctgatttgcagcagggactggatatcttagaccgaagctcagaattgattcattctggggag

SEQ ID NO: 517979 - DNA, 82 bp, Homo sapiens
gagcgcccctccgagctggggttggacgctgccagtttgcacagcagcagcattttgaaagcgaagcagaagccgtagaatc

SEQ ID NO: 517980 - DNA, 83 bp, Homo sapiens
gcgcgcctgcgacctgcccgcctggttcctccgtgtcacaaagcagtacctgccccacgtggcgcgcctctgtctgatcagca

SEQ ID NO: 517981 - DNA, 100 bp, Homo sapiens
ctgaggaggagaggacagaggtgcctggggcaacctccaccttgacggttccagtgatctcggaagctgaaaaggcaaaacagaagatagctccagtttt

SEQ ID NO: 517982 - DNA, 100 bp, Homo sapiens
ccgagactctccttgcttggaattctgcccactctgcggagttagcagtcacgacctccagcacaggtactccaaagattcaggtttactcacgtcatcc

SEQ ID NO: 517983 - DNA, 100 bp, Homo sapiens
ggaatggccgtcttcgggttcgtcctcttcttggtgctgtggctgatgcatttcatggctatcatctacacgggcagagttaccagggcaggttatctcc

SEQ ID NO: 517984 - DNA, 97 bp, Homo sapiens
gagctacatggccccctggtttagggagggaaatgggtcctgatgaatatgaagagatggaagaagaggaggaggaggaagaggaggaagacgagga

SEQ ID NO: 517985 - DNA, 100 bp, Homo sapiens
gggaggtctcgtggtgcttaaggcctgtgactacagtgacccaaatcagaacagaactgaaactgactcggaaggcagcctatgtgagatacttcaatag

SEQ ID NO: 517986 - DNA, 100 bp, Homo sapiens
ctttatgggagcatgggttaccagcgacgcaccctgccagcgatctgtacatgagacccaggaattatttccaaagcaagattcatatgctgaaggggta

SEQ ID NO: 517987 - DNA, 74 bp, Homo sapiens
gtgacatccgaggtgcctttctccaaaaggttgtttacattcagagctctatcaataagaggaatacatattac

SEQ ID NO: 517988 - DNA, 100 bp, Homo sapiens
cagatcagaggtagtcggacctttcccgctggcgcgcagcctcagctaggtgccagcgagatttcagattcctgtaaacctctaaagaaaaggagtcgcg

SEQ ID NO: 517989 - DNA, 75 bp, Homo sapiens
gacagagacgtgaagcactgaatggtccccgcactcccggtgaagaacttgaatggtactgggccggtccatccg

SEQ ID NO: 517990 - DNA, 99 bp, Homo sapiens
ggaagacttcaacaaattctgcacctttgtcttggcctatgctggctacatcccttatccgaaggaggatgaagcctgctgggagcgtgaatgacatgg

SEQ ID NO: 517991 - DNA, 74 bp, Homo sapiens
gaaccctccttctcaatcttggaacagcacccccttctttaagtgtggacaacagtgagtatatgcggaatgga

SEQ ID NO: 517992 - DNA, 101 bp, Homo sapiens
acctccacaagtcgtccgagtaggaaccaagaaaacttcttttgtcaactttacagatatctgtaaacttgctacagttgaaactccagcagcgccggacc

SEQ ID NO: 517993 - DNA, 51 bp, Homo sapiens
cgcgggggagccccgggagccgcacggacttgaaagaggagattgatattc

SEQ ID NO: 517994 - DNA, 100 bp, Homo sapiens
atagtgcctatgtgctcctaccagatggagaggatgttcaacaccactcggatcccgggcaaggacacagagccccacctcctgcgcacgataacccctg

SEQ ID NO: 517995 - DNA, 50 bp, Homo sapiens
ggagggtcctctcagtgattaaggaaaccacccctactcctaatcccccg

SEQ ID NO: 517996 - DNA, 51 bp, Homo sapiens
cgttgctggtgcgagtcctttgtctgtagtgggaagtcttcatgagctcag

SEQ ID NO: 517997 - DNA, 51 bp, Homo sapiens
cagagttgccctttacattgcaatttccgttactatggcaatgacggcagg

SEQ ID NO: 517998 - DNA, 75 bp, Homo sapiens
ggcattttggggcagaatacagagatatggaatcaggtttatggtcaaggtttaaaaagaaatgttttaagctca

SEQ ID NO: 517999 - DNA, 100 bp, Homo sapiens
aaggccctcaacatcccggagcagctgccacaatgggacatgtgcaaatggtgtcggacggcatgacaggcagcaatcctgtgtcccctgcctcatccag

SEQ ID NO: 518000 - DNA, 100 bp, Homo sapiens
aggagctgcaggagggccagcgctgcgtggtcattctgcccgactcagtgcggaactacatggggtgatcgctgagctgaaggtgcgcagggacccccag

SEQ ID NO: 518001 - DNA, 97 bp, Homo sapiens
agggacggacgtcagcaaagaggccgccaacatgatcctggtggatgatgacttctcagccatcattgtttcctgaggttataggcgggtgtttgag

SEQ ID NO: 518002 - DNA, 83 bp, Homo sapiens
cgctcctgccggcagctccaaccatgggaggccgcgtctttctcgagccatcatcaaccactttaaccccaaaattgagtcct

SEQ ID NO: 518003 - DNA, 75 bp, Homo sapiens
aaagattcttccaggcagagttgcagatttgtcttagaatgctatgctggactttgtgttcacagtagatgaccc

SEQ ID NO: 518004 - DNA, 82 bp, Homo sapiens
tccgtggccttagctgtgctcgcgctactctctctttctggcctggaggctatccagcgttcaagtgctggggccggcagtg

SEQ ID NO: 518005 - DNA, 100 bp, Homo sapiens
gcggccagcgcctgagcccgcccttgatcttcgctgtggcatggcggacgaggggaagtcgtacagcggtgcaggcctggggtagtctcctgtctggaca

SEQ ID NO: 518006 - DNA, 98 bp, Homo sapiens
tgcagtctcccgaattccagtcacttttcacagaaggactgaagagtctgacaggtatataaagaacaggttttagaacctatgctaaatggaacaga

SEQ ID NO: 518007 - DNA, 83 bp, Homo sapiens
agaaaagagataccaaagtcgggactatcgatgatggtcagaatggcggcagcggagcatcgtcattcttcaggattgccctg

SEQ ID NO: 518008 - DNA, 74 bp, Homo sapiens
tgagattggcctggatgcagctgcccttcctggacagtctccagcttgtacctcatatcagatgactccgcaag

SEQ ID NO: 518009 - DNA, 80 bp, Homo sapiens
ccgatgtcgtgttcgcaagcatcctagcagccttctccaaagccacatgtccaggagcacaacgggcacgtgttcgccag

SEQ ID NO: 518010 - DNA, 98 bp, Homo sapiens
ccccaggctttttatggctgtgagacacgttaaaatttcaggattttaggtgatgggcaagtcagaaagtcagatggatataactgatatcaacactc

SEQ ID NO: 518011 - DNA, 100 bp, Homo sapiens
ctacaactccagctccgtctattcctttgggtcagaatggcggcagtggagcatcgtcattcttcaggattgccctactggccctacctcacagctgaaa

SEQ ID NO: 518012 - DNA, 103 bp, Homo sapiens
ctcgatcttgggacccaccgctgccctcagctccgagtccagggcgaggttaagaatgtctgaggggtcaggcggtgctggcaagatggctgcacttgagaag

SEQ ID NO: 518013 - DNA, 75 bp, Homo sapiens
agcacttggtctctaccagtgggactttgccagttatgatattctcagctcatgatggagcagtccaagaagtcc

SEQ ID NO: 518014 - DNA, 80 bp, Homo sapiens
cccgaccctggccgccccgagcggagcctggaggtgctcttacagcctgttccaagtgtggcttaatccgtctccaccac

SEQ ID NO: 518015 - DNA, 96 bp, Homo sapiens
gaagtgccccttagcgggtgggggaagctggtaggcacgggcggctccgcagtgaccggactcgggggaggtagacatagctgacattgagaatga

SEQ ID NO: 518016 - DNA, 98 bp, Homo sapiens
tccatatgttgagattctacttattcatcagtttgttgtgcttgtcaagatcagtggaaagctcatgatggcattattttaaaagtagattggaactc

SEQ ID NO: 518017 - DNA, 75 bp, Homo sapiens
tccgccgtccgtatcgaccacgccccggaccttccgcggccagagagttcaacctggtcattgctatcatctgta

SEQ ID NO: 518018 - DNA, 100 bp, Homo sapiens
ctcatactctgttatagataaacaaggctgtacagacttctgcttctgggaaggcctcaggaaacttaccatcatggcggaaggcgaaggggaagctggc

SEQ ID NO: 518019 - DNA, 75 bp, Homo sapiens
taccacctgcgggagatcatcatctgcacctaccgccaggttgacatcatggacatatgtgagtccatcctggag

SEQ ID NO: 518020 - DNA, 100 bp, Homo sapiens
tggacgtccttcgccacaggccaggatgggtggaagtgaaggagtaattctgaattgctcagctctgcagagtttattgcatttgctgagtagcccaaag

SEQ ID NO: 518021 - DNA, 90 bp, Homo sapiens
agtccctgtgctaggatttttcatcatagctgtgctgatgagcgctcaggaatcatgggctatcaaaggacactctggacttcagccaac

SEQ ID NO: 518022 - DNA, 75 bp, Homo sapiens
tggaagtctatctttacactcccacagcagccaaaccagaagtgtgatgccattagtgtattggagaaagaacat

SEQ ID NO: 518023 - DNA, 100 bp, Homo sapiens
ttgtgtcctgagatcaaatggcacttcattggccacctacagaaacaaaatgtcaacaaattgatggaagtcacagcttggaggaaaccagtttgcacta

SEQ ID NO: 518024 - DNA, 78 bp, Homo sapiens
ctacagcttcaccaaggagccggaatgcatccatgtgatgaggagcgcctggaccatgctgctgagcgcctactggca

SEQ ID NO: 518025 - DNA, 75 bp, Homo sapiens
cctacgcagagctcatcgtccttggtggcaagtgcaggcagctgtcccggttatgccggaatcgttgcaggtgag

SEQ ID NO: 518026 - DNA, 96 bp, Homo sapiens
gagagatggtcaggtctggagctcgaccgggccagtacctgtttgaaaatggtagaatagataacatttttactgagccctattccagatttatga

SEQ ID NO: 518027 - DNA, 75 bp, Homo sapiens
tttaattttagggtcctttatatagaagggagagtaggaaaggctataaaggtctcatatgatgagtggaacaga

SEQ ID NO: 518028 - DNA, 51 bp, Homo sapiens
agtgaccgagaccgcggccgggaccgagggggataaaaacattcagatggc

SEQ ID NO: 518029 - DNA, 100 bp, Homo sapiens
gaaccgcctcaccgttctgcccccagaactagctggccaaatttcgcagtctcctgtgcacagcggagggtgaagcagcagcttttctggtgagcaatca

SEQ ID NO: 518030 - DNA, 75 bp, Homo sapiens
caatccattccatgggttttattcacaggttaagagcaggcttatgtgatcgctgtgcagtaactgaagaacata

SEQ ID NO: 518031 - DNA, 97 bp, Homo sapiens
cctcggcctctcaaagtgctgggattacaggccacgacatcaacggtgccctggagccctccaacatagacaccagcatcctggaggagtacatcag

SEQ ID NO: 518032 - DNA, 50 bp, Homo sapiens
cttacaatgacactaaaatctggaagcattgacatttcctccttcttctg

SEQ ID NO: 518033 - DNA, 50 bp, Homo sapiens
gcggagctcccccaagagccggaaagatgaggaaactgaggcttggtgaa

SEQ ID NO: 518034 - DNA, 51 bp, Homo sapiens
cactgcagaggtgctggagctggcagaatagcctaacatggcagaccagag

SEQ ID NO: 518035 - DNA, 100 bp, Homo sapiens
cgggtgtgagagtccgtaaggagcagcttccaggatcctgagatccggagcagccggggtcggagcggatatgaaaaacagtagctccgtatcgaataca

SEQ ID NO: 518036 - DNA, 83 bp, Homo sapiens
tgcgggtgcctttgaaaatcaacgacaacttgagcacagcagcctcccgcgacgatgcccctcaacgttagcttcaccaacag

SEQ ID NO: 518037 - DNA, 82 bp, Homo sapiens
tcttacgtctgcggaagtgcagctgcctcagttcttagcgcaggctgtgcgtttgtcacattttctacaagggcaatggcac

SEQ ID NO: 518038 - DNA, 76 bp, Homo sapiens
atcaggaacggggtgctctacgtcacggagaagctgaccccgcactacatctacccaccagccatcgtgcagccca

SEQ ID NO: 518039 - DNA, 100 bp, Homo sapiens
ctgaacttaaaaagcagtctaaacctgtgaccacccctgaagaaattgcacagggtgtgtccgcagccggccaggtggtatccctgaaggtgtggctgat

SEQ ID NO: 518040 - DNA, 100 bp, Homo sapiens
aagctctacgttcgtgacatcaaacctcctgttgggccatttccgagaactcccatcagtttctgtatagtgtaaaagaaatacaggtatcaggatgaag

SEQ ID NO: 518041 - DNA, 100 bp, Homo sapiens
cccttccacgtcatccgcatcaacaagatgttgtcctgtgctggggctgacaggactccattattacagtctttgattggtctttttgagttacccgaag

SEQ ID NO: 518042 - DNA, 89 bp, Homo sapiens
attgctgtaaaagtgccttctgtttttaagcttctaattaaagagaaacccgggatggacgtggccgacgcctacgtgactttcgtccg

SEQ ID NO: 518043 - DNA, 83 bp, Homo sapiens
agcagcgcccgtctgcttcgggcctctggaatttagcgctcgcccagctagccgcagaaaccaatagagccatggcgactccc

SEQ ID NO: 518044 - DNA, 75 bp, Homo sapiens
agtggttgtgtggtcgcgtctcggaaaccggtagcgcttgcagcatgggtttggaaatcccttgtctccaggttg

SEQ ID NO: 518045 - DNA, 82 bp, Homo sapiens
agggtcgctttgctgtacatcgtattacacctgaggaggccaagatttgatgaggcgccaagaagaacttcggaggatggaa

SEQ ID NO: 518046 - DNA, 99 bp, Homo sapiens
cggacgaagtggcctctgtctaccagagctaccagcctcagacaatggacctcagatagcctatgttcgggacttcaaagcaaaggttcagtatttccg

SEQ ID NO: 518047 - DNA, 82 bp, Homo sapiens
acgacgttccatctgtggaaggacctaccaaccaggagttttttgagaaccctgcttttcgtcccgatgggctgaaactcta

SEQ ID NO: 518048 - DNA, 98 bp, Homo sapiens
cctcaagagaatatcagcagtaggtgtgtgtcccggcatggatatccggaacaacctcactaggttgcatgagctggagaattgctctgtcatcgaag

SEQ ID NO: 518049 - DNA, 100 bp, Homo sapiens
tagactgatcaaatcgaggagtgaatctgatttgtctcagcctgaatcagatgaagagggttacgcactgatgctaaagaaaacccttatggcgaggatg

SEQ ID NO: 518050 - DNA, 82 bp, Homo sapiens
cggatcactaccgctactgagagccaggtcagcccaaggccaaccccactgtcactctgttcccgccctcctctgaggagct

SEQ ID NO: 518051 - DNA, 100 bp, Homo sapiens
ggcacttcattggccacctacagaaacaaaatgtcaacaaattgatggttgtggaagatatcaataagcgcagagagccgctccccagcctggaggctgt

SEQ ID NO: 518052 - DNA, 98 bp, Homo sapiens
gcaccaaagccagttgattgtcagagggcggcgactggcggcgcgatggacctgaccgggctcctgctggacgaagaaggcaccttctccctcgccgg

SEQ ID NO: 518053 - DNA, 75 bp, Homo sapiens
gagtccaagactgagaaatggatggaacgaatacacctcaatgtctctggtgaacaacctcgacccagatctgcg

SEQ ID NO: 518054 - DNA, 75 bp, Homo sapiens
tggaattttggcatcaaggacaaacccaccttcatcaaaggggttgccaaggaaagtgtactgcagttttacccg

SEQ ID NO: 518055 - DNA, 98 bp, Homo sapiens
tgattctccaagacctactgtccactctgattcaggcctctgacagctcttggaaggtgatttgaagatattaaagctagaaattggaactagaaaat

SEQ ID NO: 518056 - DNA, 100 bp, Homo sapiens
cgctggaaagtcggccaagaaagacaaagacccagtgaacaaatccgggggcaaggccaaaaagaaggagctctgtctgaatggctggctgaccaccccg

SEQ ID NO: 518057 - DNA, 98 bp, Homo sapiens
atctccaatgattcagaactcacgtccgtcgctgctgcaaccccaagatgtcggagacacggtggaaacgcttatgactttgctaccaggacttgctg

SEQ ID NO: 518058 - DNA, 95 bp, Homo sapiens
aaaaactctctcagcggctttctgaactagattggttccgccatggagtcatagttgcagctgactccagggctacagcgggtgcttacattgcc

SEQ ID NO: 518059 - DNA, 100 bp, Homo sapiens
ctcccggcccggcgaactaactggagcacggagctgcagccggttgggccggtgtactttcccggaatgaatctgaagtctgctgcagtaaaacacagaa

SEQ ID NO: 518060 - DNA, 87 bp, Homo sapiens
ctgtaagaaaggccttagtaggcctttctaagtctcctaaaggatgtgcggagcgtgctttggacaccatgaattttgatgttataa

SEQ ID NO: 518061 - DNA, 100 bp, Homo sapiens
gaatccgcccgcaagagcgagccgcctgccccggtgcgcagacagagctattccagcaccagcagaggtctctgctggtggttctgaagccaaacctctg

SEQ ID NO: 518062 - DNA, 100 bp, Homo sapiens
ctgaagctgacatcactgagctctgccgggacatgttctccaaaatggccacttacctgactggggaactgacgggatcagttccatgacaagacccctt

SEQ ID NO: 518063 - DNA, 83 bp, Homo sapiens
gtgccgccgtcgcccaggatgggctgggaatgaagcgatgtagccttttaaacatccggctccgggttcgagcagagtactgc

SEQ ID NO: 518064 - DNA, 101 bp, Homo sapiens
ctgcccgcccgctgcctgcctgcctggcatctctctctcccgcggaatcccgactgtgcctgggaaggtgaccctgcagaaggatgctcagaacctgatcg

SEQ ID NO: 518065 - DNA, 75 bp, Homo sapiens
agccggagcgcggagcccggctcccgcaccatggaggaggacgacagctacggtgacttaagagattaaaattaa

SEQ ID NO: 518066 - DNA, 98 bp, Homo sapiens
ccagcacctacccaccaccatcccggcagggagcaatagctatcaaccggtccccatcaccatccccaaagaaggcctggtgactcgactccggtatc

SEQ ID NO: 518067 - DNA, 83 bp, Homo sapiens
gcttagacgctggatttttttcgggtagtggaaaaccaggtgtcgtgaaaactacccctaaaagccaaaatgggaaaggaaaa

SEQ ID NO: 518068 - DNA, 82 bp, Homo sapiens
ttcggtggactccttcggcagtccacccaccgccgccgcctcccaggtgaccatggaggaagaagatgagtctcgagggaag

SEQ ID NO: 518069 - DNA, 98 bp, Homo sapiens
aatccagaacgttctgaggctccagaagattcgccatgaagtcagcgtaaataatgtaacacataaactgtgcagtaaccattgctttaataagtaca

SEQ ID NO: 518070 - DNA, 50 bp, Homo sapiens
ccatgcaccagtttcgccaggacacagagtggtgaaggaggagatctcgg

SEQ ID NO: 518071 - DNA, 108 bp, Homo sapiens
ccagattccggagaccggcctgaggaagtcctgtgggacggccaccctggagaacgtacatgggctgcatcgaggttctccgctctatgcgctccctggactttaaca

SEQ ID NO: 518072 - DNA, 76 bp, Homo sapiens
taaggattccaagtaactcttatttggatggttttgcaagaataagacttgaccaagaccgactgccagtaatagg

SEQ ID NO: 518073 - DNA, 75 bp, Homo sapiens
gaggctgtcagaaagctggcttatcagagtttacccctcaatcccaaacctttcctcaatggactaacaggaaag

SEQ ID NO: 518074 - DNA, 100 bp, Homo sapiens
ttttaaatcagcttatagttcttttgtaaatctctttcgttttaacaaaggaatggtttgcagtgtatgtggaacttaatcagcaaattgcagcactctt

SEQ ID NO: 518075 - DNA, 90 bp, Homo sapiens
tggagcgcttctttaagggctacgggaagatcctggaggtggatctgaagaacggaaggacagaataacgggctcccagattcacaagcc

SEQ ID NO: 518076 - DNA, 100 bp, Homo sapiens
cggcgccggcccagcagctgcagccgcagcctgtggctgtgcagggccccgagccggcccgggtcgagtcaaataaagtgcccgtggtgcagccatccca

SEQ ID NO: 518077 - DNA, 96 bp, Homo sapiens
tcagatatggcagaagtgaagtcaatgttccgggaagttcttccaaagcaagacggaggacatccgcttggagccagatctatacgaagcctgcaa

SEQ ID NO: 518078 - DNA, 75 bp, Homo sapiens
gagagcgccccagggcaagccccgctccggccaacaaatttggaatccagatatgacactaaaaagttatttcaa

SEQ ID NO: 518079 - DNA, 100 bp, Homo sapiens
gcgctgcacccgcaccctgcaggccgagggacgtgccaagaagcgcaagattgagaaaatcatgagttctattggagaagggattgacttttctcaggaa

SEQ ID NO: 518080 - DNA, 100 bp, Homo sapiens
taccttcagtgcacacaacaggagagaggagaaagaagaaacgctagtaattccaagcctgtgtatattcacgccacctgggataaaggaaggaaaaccc

SEQ ID NO: 518081 - DNA, 82 bp, Homo sapiens
aggcctcggactccgcggccggcccggcgcggcccagcgccctcaggtctatcagccacagtctctgcaagtttccaagagc

SEQ ID NO: 518082 - DNA, 80 bp, Homo sapiens
gccgctgcgggcccgctccgacgcggaagaaggggcttgttccctgcaactaccttgaaccagttgagctgcggatccac

SEQ ID NO: 518083 - DNA, 100 bp, Homo sapiens
ctgtggaatatgagtgatgacaaaccctttctatgtactgcgcctggatgtggccaggagaagatggtataaactggtccatcagtgacaaagacattga

SEQ ID NO: 518084 - DNA, 83 bp, Homo sapiens
cccgagtccgcgggaagatggcggcgccgctcatccccctctcccagcagacatcaacgagtgtgcaacaccgtcgaaagtgt

SEQ ID NO: 518085 - DNA, 50 bp, Homo sapiens
cgccaccacccactccggacacagctcctccgcctctgatgcagaatttg

SEQ ID NO: 518086 - DNA, 90 bp, Homo sapiens
gtttgaacaaaaaagtggtgcagtttttgatgaaattgtagagaactaccccatatcatgtgaacctcctcctggctggctatgatgagc

SEQ ID NO: 518087 - DNA, 50 bp, Homo sapiens
ggtacatctgaaagccgggaaatgaaatgcactcggtgatggaaagagag

SEQ ID NO: 518088 - DNA, 83 bp, Homo sapiens
cttgccttgagtcagtgcgccgctctccagcccgcttgaacgcttcctgcctgacacagctcacttcaagaagtgcacaatgt

SEQ ID NO: 518089 - DNA, 83 bp, Homo sapiens
tgggaacccgcggtggagcgggacacgaacgtgggtggcccagttgaaatccttcccttcctctaccttggaagtgcctacca

SEQ ID NO: 518090 - DNA, 90 bp, Homo sapiens
ttagccggagtgagaagcaagaaggccctggacacagcaatatctctgggctttcacaggatgaagtggcacacactctaactgaaagca

SEQ ID NO: 518091 - DNA, 100 bp, Homo sapiens
gagcatactttggaccctgttttcagaaagcaggaagatgaagtcctcagtacattctgaagaagatgattttgttccagagctacatagaaatgtacac

SEQ ID NO: 518092 - DNA, 100 bp, Homo sapiens
acacctgtgttcagggatgacgtttgctttttcatcagccagtcagagacgagttgtactgctgtcacaggaaatggacgctggattacaagcatggcag

SEQ ID NO: 518093 - DNA, 74 bp, Homo sapiens
ggagggcgatgaaacgtttcaataaaggggtccatgaggacacacacaagcctcctgacaaggtgatccgggcg

SEQ ID NO: 518094 - DNA, 82 bp, Homo sapiens
tgcagtccgagaacgccgcgctgcgcatctccaacagcgacctgagcggcagtccagaacgtgggcaacatggacacgccgg

SEQ ID NO: 518095 - DNA, 80 bp, Homo sapiens
caaccatggagccttcctgtggcaggagagacaacaaagcgctattatcctaaggtgcagaccctgatagtcgtgatcat

SEQ ID NO: 518096 - DNA, 89 bp, Homo sapiens
gctgaggcggctgggcctagggtgcagcgggcgcgtctgcggctggtgttggcgcatctctaggattcaagatgaccaacgaagaacct

SEQ ID NO: 518097 - DNA, 50 bp, Homo sapiens
atgagaagatcaagaaggatgccagagactgctgctactttgaaacgtac

SEQ ID NO: 518098 - DNA, 98 bp, Homo sapiens
cgactttctgagagagcaaagctgcctgctgtttcccggggagatcatgaaacgaggtcgccttcccagcagcagtgaggattctgacgacaatggca

SEQ ID NO: 518099 - DNA, 83 bp, Homo sapiens
cgagaccacagccaccactattctagcatccgtgaaggagcagtatctcctgcctgcaattgttcatattaaccaccagccat

SEQ ID NO: 518100 - DNA, 153 bp, Homo sapiens
ttccggagtggggaagacctgcgtcctttttcgtttttcggatgatgccttcaatactacctttatttccaccatagggaactgggaacagccaggtgccccaaagcaaatacgcggagctgctggccatcattgaagagctggggaaggaga

SEQ ID NO: 518101 - DNA, 100 bp, Homo sapiens
gccgccgacccgccgagcaaaatgcctctacggcagacacatgcaggccaacccagaaccaccgaagaagaataatgacaaatcgaaaaagatcagccgg

SEQ ID NO: 518102 - DNA, 100 bp, Homo sapiens
agacaggagggattctggtgtaggggcctctctgaccaggccaaacaggtttggagacttgaaggaggacaaagtgacgcgtcatgatggagccagctca

SEQ ID NO: 518103 - DNA, 100 bp, Homo sapiens
cgcagaggagtgtcccgagactgcagaggcgaagtgcgcggcgcccaggcctcccagcagcagtcccgagcagaggcaaggatcaaaagacccagctgag

SEQ ID NO: 518104 - DNA, 110 bp, Homo sapiens
tgaaaataggttctgatgttgaattattactcagaacatctgttatacaaggtattcacacagaccacaatacactgaactatctgttatagtccctgggtcaagacaac

SEQ ID NO: 518105 - DNA, 100 bp, Homo sapiens
ctgcaatggaaatgatcactaggcaatttcagccttgcaaatctaacagctggagataagatgggtagactgctacttcccttttacacatccttccttt

SEQ ID NO: 518106 - DNA, 100 bp, Homo sapiens
ctgcgcgaagctggccaaagcctgcccagacggctcacctgtgcgggatggaacaaaagtacttacagatcatcagtatttggagaggacaccactatgt

SEQ ID NO: 518107 - DNA, 74 bp, Homo sapiens
cttgttatcagtgatggctcttctctggaagatcttgtgaatttagcttgggttaaatcatataacatctgctt

SEQ ID NO: 518108 - DNA, 83 bp, Homo sapiens
cgcaagctgcttgcccagaagtaccatgacaacgcccaattaatcacgtgcccgtggttgacacgagctgtgtccccagctgt

SEQ ID NO: 518109 - DNA, 100 bp, Homo sapiens
aagccagagccgcctgccatgccccagccagtccccacagcataacaggccattgagaaactagtcgctcttctcaacacgctggacaggtggattgatg

SEQ ID NO: 518110 - DNA, 99 bp, Homo sapiens
gccgcagtaccagacctgggaggagttcagccgcgctgccgagaagctttacctcgctgaccctatgaagaaaatgtgccagaggaacttcaagaacca

SEQ ID NO: 518111 - DNA, 110 bp, Homo sapiens
gatctggaggagcagttgtctgatgaagagaaggttatgatgtgattgctcaagcccaatctgggactgggaaaacggccacatttgccatatcgattctgcagcagatt

SEQ ID NO: 518112 - DNA, 149 bp, Homo sapiens
caagtccccagctgggggccctgtgtagacctggagtggacacgcccctccttcccttcatgattcgtttgtagcgcagtatgatgagctgccgcactacccaggcatcgtggatggccccgcagccctggctagcttcccagagacag

SEQ ID NO: 518113 - DNA, 98 bp, Homo sapiens
ggatctccaacatggcagccttttccttagaacaccaaagattgtctctggcaaaggagacggtggctcagggagtaaaggaaggccagttgagcaaa

SEQ ID NO: 518114 - DNA, 90 bp, Homo sapiens
cccgcgggtaactgggccgttgccgccgtccgcgctcggcccccgcggagaggaatgatcaccaagacacacaaagtagaccttgggctc

SEQ ID NO: 518115 - DNA, 98 bp, Homo sapiens
tggtccaggccttccagtacacagacgagcatggggaagggaagtgctcagcggctgcactggacgtcctcgccaatgtcttccgggaggaactgctg

SEQ ID NO: 518116 - DNA, 75 bp, Homo sapiens
tgtggcattgcttaatgatataccacagtcaacagaacaggtcactgaactgatgcaggagcagtcatacctgaa

SEQ ID NO: 518117 - DNA, 100 bp, Homo sapiens
cggccctcaccgccctcaccacccctatccagacggctgcccttcaagtaccaattacacccatgctaatttggtggataaggcattgcagctcttgaag

SEQ ID NO: 518118 - DNA, 100 bp, Homo sapiens
aaccagggtgggggctacggaggtggttatgacaactatggaggagcaacagcggcgggagcgggagcagcggaagctgcaggagaaggagcagcagcgg

SEQ ID NO: 518119 - DNA, 98 bp, Homo sapiens
acatgacgcaggtgcaggtgtctcttctcgccctggcggggaagctgagctgactgctgcccactttggaggaggcggtgggctccttcacaagaaga

SEQ ID NO: 518120 - DNA, 112 bp, Homo sapiens
gaggactgtgcatctttatgataattggatcaaagatgctggccgaatacatcaagcaatggtaacatctttaaatgaagataatgaaagtgtaactgttgaatggatagaa

SEQ ID NO: 518121 - DNA, 74 bp, Homo sapiens
aagcgaagtggagagcgccagagtaatggcttaggagatctgaggaggatgaagagaaagaagaggatattgaa

SEQ ID NO: 518122 - DNA, 100 bp, Homo sapiens
ggggaagaggaagaagggctccaccatggagcgctggggacccgaagctgccagtactgtaccaagtggagcggacacgaacagggtcgagcttctcggt

SEQ ID NO: 518123 - DNA, 75 bp, Homo sapiens
gtgagactcacctcaccgtattttttgccaagcatttacagccgaacaataccagcaacatcaacagcaactggc

SEQ ID NO: 518124 - DNA, 98 bp, Homo sapiens
gaggctctggatggaagccatggatggccgggaacctgcagcttggatcttaaaagcaagagcgctaacagaaatggtatacatagatgaaattgatg

SEQ ID NO: 518125 - DNA, 74 bp, Homo sapiens
aaatatctgttaacagactgcttttacacctacgatgtacagttacccagcacgtgtacctcctcctcctccta

SEQ ID NO: 518126 - DNA, 100 bp, Homo sapiens
ggtggaatatgccaaggaaaaactggagagcttcatcaaaaatagtgatagctttgataagacctcagcagccatgtcgaagccccatagtgaagccggg

SEQ ID NO: 518127 - DNA, 100 bp, Homo sapiens
gatgttttcacctcctgtgagcagtgggaaaaatggaccaacttctttggcaagtggacattttactggctcaagtcatttggatccaggattcctagca

SEQ ID NO: 518128 - DNA, 100 bp, Homo sapiens
ccaactgccagtgtcaagcaccccatgaaaaactgaccattgctcaggcccgcttaggaacaccaggggtgcacagagcgttttgtatgtagtccagatg

SEQ ID NO: 518129 - DNA, 101 bp, Homo sapiens
agaggtagaggacgatactctgaccgttttagtagtcgcagacctcgaaatgatagacgctttatttgaaggtagacgcatcgaatttgcagaacaaataa

SEQ ID NO: 518130 - DNA, 100 bp, Homo sapiens
ttctaggctgcaggcagctcgaggacccgcggccccgccccggctcggcctggcagggccacctcctccccagcccctcctgcagcgtctctgctccgga

SEQ ID NO: 518131 - DNA, 82 bp, Homo sapiens
ccgacaccaggggcaccgcgtgcagccggtgaaggacactgcccacgactttcgggtgccaacatcgcctctggtgaggaag

SEQ ID NO: 518132 - DNA, 82 bp, Homo sapiens
ccgcactgagtcaacagactgagcgcgtccaggcctgacagctctgcggctcgggccctgagtgacctatggaatgacaagc

SEQ ID NO: 518133 - DNA, 100 bp, Homo sapiens
tgtcttttttgggcgccatgctgaggggaaggttggcgtgcagtggtgtgatctcagctcattgcaacctctgcctcccggactcaagcaatcctcccac

SEQ ID NO: 518134 - DNA, 75 bp, Homo sapiens
aaccaaacaaccagaagaagtatttgatgtcttagagaaacttggagaaggatggggtcgaggatttggtctttt

SEQ ID NO: 518135 - DNA, 98 bp, Homo sapiens
cctttccaacatccagagctgcatcattccttggggcaaaatgtggacaagggttttcaaatggaacattttgatgcatcacttagtacctatttcaa

SEQ ID NO: 518136 - DNA, 80 bp, Homo sapiens
cgcaagctgagcgagctgtcagagcccggggacggcgaggccctcatgtaccacacggttacaaaagtggatgaaaccag

SEQ ID NO: 518137 - DNA, 50 bp, Homo sapiens
cggttctctacttccaacagaagttcacttagcagccatggaaggccacc

SEQ ID NO: 518138 - DNA, 82 bp, Homo sapiens
cgccgatttggccgcctggattgtgttgtcaacaacgctggccaccttcaaggagcagggacaagttacaggaatgttctcc

SEQ ID NO: 518139 - DNA, 101 bp, Homo sapiens
ttattactggcagcatgtatatcttttacaaatggacacctaccagggaacggagatgtgtatcaagaaaggctggcacgtttagaaaatgataaagaatc

SEQ ID NO: 518140 - DNA, 75 bp, Homo sapiens
ccaccaccatctccatcacccaccaacaacaccacaataatccacagccaaggaagtaccattggcacaaactgc

SEQ ID NO: 518141 - DNA, 90 bp, Homo sapiens
tagtgctgagatcctgagacaatggtggaaatggatattgttgaaaaactggtgaaaatgataccttgtgagcatgaagacctgctgaat

SEQ ID NO: 518142 - DNA, 75 bp, Homo sapiens
ttgatgacatactcagtgtggcctccgtgcgtccagctgtcttgcagggttccgagtctgaggaagacataacct

SEQ ID NO: 518143 - DNA, 100 bp, Homo sapiens
cgtattgaatgaaagacccagtgcaaagacatcaccatgaacactagcaaaatgtgaacataatttgagcaagccagaatttaacccaacgtcaatcaaa

SEQ ID NO: 518144 - DNA, 100 bp, Homo sapiens
gccgaggtgactgcagagcggctcgcgaggagatgttgcagtaaagatcctaaaggttgtcgacccaaccccagagcaattccaggccttcaggaatgag

SEQ ID NO: 518145 - DNA, 75 bp, Homo sapiens
acccaggagaagccgcccaaagaactgtggccataaaatgcagtaaaaacaaatccagttcccaagaagctgtac

SEQ ID NO: 518146 - DNA, 75 bp, Homo sapiens
tcttcgatatcctggtggctggcagtatgcttgaggctaagaatattgtacacaaagattcttgatgttcttgag

SEQ ID NO: 518147 - DNA, 100 bp, Homo sapiens
caggagctgtagagaggaccccggtacatctgaaagccgggaaatgtttggtgccctggttgtcagatgttggaaagcagtaggacggaacatactcttc

SEQ ID NO: 518148 - DNA, 100 bp, Homo sapiens
aaagctgtctgtgaaattaaaggaagaagaacgaatggttgagatgtttctggaatatcaaaatcaacattctagtatgccagtagaaaaaaatatcact

SEQ ID NO: 518149 - DNA, 82 bp, Homo sapiens
ggaggaggcgcagccggacatttagccgctcatcttcggcaagccggcggagctgcagcgcagggtgagtgctgacagccag

SEQ ID NO: 518150 - DNA, 90 bp, Homo sapiens
gtttgtggcaagacaagctcagaactgagaagctgtcaccacagggaactacagcctgtccagtgtgctgcccaacgcccccgacatggc

SEQ ID NO: 518151 - DNA, 74 bp, Homo sapiens
aagctgccctgagacggtgtcccgccgaaagcggggatctgatgagcttctttcttctggcatcattaacggac

SEQ ID NO: 518152 - DNA, 100 bp, Homo sapiens
ggctcgggtcgccggagccgcgccccaccccgccagctccagagccacgtacggcccacccttcctccattctgagcacataaaaaccccacactcagcc

SEQ ID NO: 518153 - DNA, 100 bp, Homo sapiens
ttagaggctcccggagtgtatgtctttggagaacttctggagctggccaacgtgcaggaggagatgttgcagtaaagatcctaaaggttgtcgacccaac

SEQ ID NO: 518154 - DNA, 101 bp, Homo sapiens
ttagagatcgttttgatggatatatcttccttgacagcaaagaaaagaggcacagttagatgaagaaggacagtttcttgtcagaataatatatgatgact

SEQ ID NO: 518155 - DNA, 74 bp, Homo sapiens
cgagagcgtgaccgagagcgcgaatatcgtcatcgttagaagatggcattggagtcaagagagattataaacag

SEQ ID NO: 518156 - DNA, 100 bp, Homo sapiens
aggagatcccggccccaaaggcagcagggactttccgtgacatttctgaagatctgaaatcttcagtaggttgatgtggtttcctctgcagtgatttttc

SEQ ID NO: 518157 - DNA, 100 bp, Homo sapiens
gtttggagaggccttatggtaatgtcggccattgagaaattgttgaggcaggttttatggcaattggatatattccgacgaagcttgcgggttttgactg

SEQ ID NO: 518158 - DNA, 100 bp, Homo sapiens
aggagcccagacaccagccccccaccatggaaattcgaaatgagtcccatgactatcctcatagagtggccaagtttccagaaaacagaaatcgaaacag

SEQ ID NO: 518159 - DNA, 109 bp, Homo sapiens
cgagacccgccctaaccacactatttatatcaacaacctcaatgagaagatcaagaaggatgccccaggccgccgcggccccgcagcgctggtctccgaagtcttcgag

SEQ ID NO: 518160 - DNA, 80 bp, Homo sapiens
tacaaccaggtaccaagtgctgctggatggactggttctccaggacttaaccaccaccatgtcgagcaaaagaacaaaga

SEQ ID NO: 518161 - DNA, 75 bp, Homo sapiens
ggacctgacagccgggtcagagaaatacactttcgggaaatggcctctaaatcctggctgaattttttaaccttc

SEQ ID NO: 518162 - DNA, 50 bp, Homo sapiens
gtaattggagccaagaaatgagtatagattctgctgaagtgatccagtct

SEQ ID NO: 518163 - DNA, 101 bp, Homo sapiens
ggaagcgcggggcggcggcgaaaggacggaatgtatcctgtcaggtataatgtcagtgaatggcaagaaagttcttcatatggatcgaaacccttactacg

SEQ ID NO: 518164 - DNA, 83 bp, Homo sapiens
cgcggaccggcgtccccggcgcgaagaggctggactcggattcgttgcctgagcagcccctgtcaaagggaacaggaagcagt

SEQ ID NO: 518165 - DNA, 82 bp, Homo sapiens
accaagaaaacttcttttgtcaactttacagatatctgtaaactttgggatgaatgggttccggagagcagagtactcaaat

SEQ ID NO: 518166 - DNA, 100 bp, Homo sapiens
gaaagccaacggcgaggactgcctcaaccaggtggatcttgaacgcaccttcacgtttcgaaattcaaagcagacctactcagggattcccatcatcgtg

SEQ ID NO: 518167 - DNA, 75 bp, Homo sapiens
cgacggcttcacagtcctctccaccaagagcctcttccttggccagaagattactcttgtctctgctgctcctgg

SEQ ID NO: 518168 - DNA, 98 bp, Homo sapiens
gcgccctctgcattgggggcatgtccgtgaaagagcagatggagaccatccgacactcactcctgggggcaaagcggcgcaggccggagtggccgtgg

SEQ ID NO: 518169 - DNA, 100 bp, Homo sapiens
tggtggatgttcaccctgaagacacccagcttgacgcaaacatgcagatctttgtgaagaccctcactggcaaaaccatcacccttgaggtcgagcccag

SEQ ID NO: 518170 - DNA, 75 bp, Homo sapiens
ctgaccacgagcttttcctccaggcctttgagaaggagaaggcagagcccccccaggctatgaatgccctgatgc

SEQ ID NO: 518171 - DNA, 90 bp, Homo sapiens
cacagttcgaggggccaaggcagaagaaatcttggagaagggtctaaaggtgaggaagaggatggagatgaagatgaggaagctgagtca

SEQ ID NO: 518172 - DNA, 75 bp, Homo sapiens
cacgggaagacatgacacccctgaacctgtggatctgggcccccagagccgggagctgaccctcaaagtgctgag

SEQ ID NO: 518173 - DNA, 73 bp, Homo sapiens
gtagaggatgattattgtatttcgccgtcaacaggccctgagacgggagttaaaggagaaagaatattctgtc

SEQ ID NO: 518174 - DNA, 82 bp, Homo sapiens
cctcagcaccgacagccgacgcgcagatagcagagccatccttgggggggatatgagactttctactcggaatatcctgagt

SEQ ID NO: 518175 - DNA, 74 bp, Homo sapiens
gaagaacagaattcgaatgcccaccaaagaagatgagttacagaatgtctgaaggggacagtgtgggagaatcc

SEQ ID NO: 518176 - DNA, 74 bp, Homo sapiens
cgccactacagttcatcaacatcaactacgtccctctgaaggaaagagagaagttacgtgaagaaaagcgaaag

SEQ ID NO: 518177 - DNA, 90 bp, Homo sapiens
cttcgtcagaggagcaaaagaggagaaacatcagatggagtgaggaagtcagttcacaaggtctttgcttccatgcttggagagaatgaa

SEQ ID NO: 518178 - DNA, 96 bp, Homo sapiens
ctcctccccgcggggcgtgcagctccgaagctctttggacctagcaggttcggcggccgggctgacctcaagagaatttgcaagacaatagttgag

SEQ ID NO: 518179 - DNA, 50 bp, Homo sapiens
gcggcatagcacccgtggtgcatgataagccaatggacacgtcagtgtta

SEQ ID NO: 518180 - DNA, 90 bp, Homo sapiens
cagctttacaaaccctgaatttataactgatggtctaccatcacggcaacagtgcgacgggcggccattacactacagacgtcttccaga

SEQ ID NO: 518181 - DNA, 98 bp, Homo sapiens
ggggacattattgcgcgtggaacggctgcttttggaaggtatcatttatcactgtgatcttaccaaagaggagctggagccaagagttttccgagagg

SEQ ID NO: 518182 - DNA, 75 bp, Homo sapiens
ggctgtatgattaggccacaatcttcaatgagtaaacatattcctcggaaggagagttttacatggaagtggctt

SEQ ID NO: 518183 - DNA, 100 bp, Homo sapiens
ggatattaaagtgaaattttctgaccctggacagcctatggtgtcatctttaagaaatgaaaagcgaggctcatcatatctcatctctgccccagaaggt

SEQ ID NO: 518184 - DNA, 100 bp, Homo sapiens
ccctggaagcagcagctcaccgaggacggggactctgagaaagatcagtctaaagaaaaggagaagaaagtgaaaaaaacaattccttcctgggctaccc

SEQ ID NO: 518185 - DNA, 75 bp, Homo sapiens
cggattctggaaggcctggggccccaggtggagctggcccgggtaatggcaactattggagtgaccaggggactt

SEQ ID NO: 518186 - DNA, 75 bp, Homo sapiens
ggcgaacccgcggcgcaataacgatgaatgatttcggaatcaagaatatggaccaggtagcccctgtggctaaca

SEQ ID NO: 518187 - DNA, 75 bp, Homo sapiens
cagatcgacaagtccgggagctgggcggccatttaccagcactgccagtgaaagatgtagaagataaacctgaac

SEQ ID NO: 518188 - DNA, 96 bp, Homo sapiens
ttaacgaatggggttgtgatggcccaggttcttcaaaagattggagtcattgggcgaagctgggccatgctgtttgccagtggaggcttccaggtg

SEQ ID NO: 518189 - DNA, 96 bp, Homo sapiens
tggcttctacacggcccaacacctgctaaaggttcaaaaacttcagcgagcagctctgaagaatcctgtgaaatgtgccgtttcctctaaatacca

SEQ ID NO: 518190 - DNA, 50 bp, Homo sapiens
ggaaccacattatggatctttcagccagactgccttccgggtcactgcca

SEQ ID NO: 518191 - DNA, 83 bp, Homo sapiens
cccagctgtgcggagctaggacgcggaacatcccagaggccagcatcaacatgcagttgtgaaaaacttcaggacaaaaatgt

SEQ ID NO: 518192 - DNA, 82 bp, Homo sapiens
taacagttcaagaaattgctgttctcaaaaaatgtggacacagacttgccaggcagcctggggcagagtgaagagaagcccg

SEQ ID NO: 518193 - DNA, 75 bp, Homo sapiens
gcatcatcgaggagacgctcgcgctcaagttcgagaacgcggccgccggatctcacattcttgaaggtggcattg

SEQ ID NO: 518194 - DNA, 90 bp, Homo sapiens
agaaaatcgtcttatagttgagaatttatcctcaagagtcagctggcaggtacaggtttgcagattccgccagcagcacagcaagctcta

SEQ ID NO: 518195 - DNA, 100 bp, Homo sapiens
agaggacgcggccaggcgattcggtgaagcgattcctgcaggcgttggttcccctctttgacctggttaaccagcttcgtggcatcctcaagcttctgca

SEQ ID NO: 518196 - DNA, 83 bp, Homo sapiens
gttgcctatccagaagaaaatacactactcatcaaggaagaaccagatctccaagaaggagaagcttctctcgcagccggagc

SEQ ID NO: 518197 - DNA, 90 bp, Homo sapiens
gggagccacgcagaggacgccggaacaccctggaagccgagaaatgttaccggtattgtaagaacaagccgtacccaaagtctcgcttct

SEQ ID NO: 518198 - DNA, 97 bp, Homo sapiens
aggaattattggcatcaacttggtggagaatagaaggcaaatggagccaaaaacctgtatatcatctccgtgaaggggatcaagggacggctgaaca

SEQ ID NO: 518199 - DNA, 74 bp, Homo sapiens
ccgagtgggagaaaagatcctcttcattaggattgtcagcagcctgctgcctccgtaccgccacagtgctcaca

SEQ ID NO: 518200 - DNA, 90 bp, Homo sapiens
caccagccttgcacctgaagaccccacctttcctgtacaagccagctgccatgttgtgagcacataccacatagctccatggagatgccc

SEQ ID NO: 518201 - DNA, 89 bp, Homo sapiens
tgtcatgcttgttcacttccgaaatgttgacttcaactatgctactaaagattgtgttcagtgtggacccctccgagggcagccctggt

SEQ ID NO: 518202 - DNA, 101 bp, Homo sapiens
tcctttcactcaggatgacacccttggactggaaaactcacacccggtctggacacagaaagagaaaggaaagtctagacagtgacttgtatgctgaactc

SEQ ID NO: 518203 - DNA, 75 bp, Homo sapiens
tttggatgaaggagtaggacttgtgcattcaaacatagcaactgaggacatgtattcctctgagaaaccttggac

SEQ ID NO: 518204 - DNA, 100 bp, Homo sapiens
gaggctaactccacccttcaacccaaatgtggatgatcctttcaaaaataaagccttgttatttagcaacaacacgcaagagttgcatccggatcctttc

SEQ ID NO: 518205 - DNA, 75 bp, Homo sapiens
ggaagaggagaaggaaattgtcccgaatccctgcaggttaacgtccctaaaacccgccggactttctgtaagaag

SEQ ID NO: 518206 - DNA, 76 bp, Homo sapiens
gcagctctgctgagagagtgcaagccgtggggatgtacagttacccagcacgtgtacctcctcctcctcctattgc

SEQ ID NO: 518207 - DNA, 50 bp, Homo sapiens
cttgaacccattgtcacccctccgacaggccgacggtcgcaaggtcctac

SEQ ID NO: 518208 - DNA, 98 bp, Homo sapiens
aacaaccgcatcatcgaggagacgctcgcgctcaagttcgagaacgcggccgccgggggtgttgggctcttcattggtgtggatctgatcaaagatga

SEQ ID NO: 518209 - DNA, 100 bp, Homo sapiens
ctttgatctctgctttgggggccgaaggcagttctgcaagaggagctattctgatcttgatattccaatgtctgtgggaataattgacacaaggacgaat

SEQ ID NO: 518210 - DNA, 75 bp, Homo sapiens
aggacgagccgtggtacgaccaccaggacctccagcaagctgaattcttgccgccaggatggggaaacagaacag

SEQ ID NO: 518211 - DNA, 100 bp, Homo sapiens
tggccagtctgtggaagaagctatcagatacactctgtgcagttttagagagagacacactcagtattcgagaaagtcgactttttggagctgttgtacg

SEQ ID NO: 518212 - DNA, 82 bp, Homo sapiens
gctgaggcggccgcggggcccgagcgcagggtttccaggcctgaggtgcccgccctggccccaggagaatgaaccagccgca

SEQ ID NO: 518213 - DNA, 83 bp, Homo sapiens
cttcgctatggtgccttatgcaatattatgagcctcaaacaatttgtgagcatctccagtacttgtttgccttgttgcaaaac

SEQ ID NO: 518214 - DNA, 87 bp, Homo sapiens
ccatgttcaatcaccactgtccaaattcagaagctcagaacgctggactctccctttgcaggttcttgggtgtctctggggagtccc

SEQ ID NO: 518215 - DNA, 101 bp, Homo sapiens
cgttgcgtgccctacttcaaggataagggcgacagcaacagctctgccggctggaagggtgtttctgtggcctgggactggttagcaccaacaagtcctgc

SEQ ID NO: 518216 - DNA, 50 bp, Homo sapiens
gcctccagagtagctgggaatacagccagcaatagaacatcagatagcca

SEQ ID NO: 518217 - DNA, 85 bp, Homo sapiens
ggctgaacggtcaaagacattcacaacatggatgtacaagttgtgcaaagtgaggaagattactgtgggagtgaagggaatccct

SEQ ID NO: 518218 - DNA, 100 bp, Homo sapiens
tggataccccagaatgaccttctaggtgcagtagacattgttgcaatcatgatcggcaatctgaaaggcacaaaaattctgcaatctattcaaagaggca

SEQ ID NO: 518219 - DNA, 97 bp, Homo sapiens
ccgccgcgcgaggaaatggccgaggagccggagccgcagcttgctcacttccgacagagaaaaacaaaaggtgacagttcgcattcggagaaaaaga

SEQ ID NO: 518220 - DNA, 75 bp, Homo sapiens
tggattaccttgcaccttatgccaaggatgtggcagataaccagatagactctggggacctgatggagtgtctga

SEQ ID NO: 518221 - DNA, 50 bp, Homo sapiens
ttcttcgtgaggctgctcttcgagcgaaaccatcatagcctttgcctggg

SEQ ID NO: 518222 - DNA, 75 bp, Homo sapiens
ggataatcactaaattctgccgaaaggactgaggaacggtgcctggaaaagcaaatccagtttgctgatgacatg

SEQ ID NO: 518223 - DNA, 75 bp, Homo sapiens
cgcacctttgccgtgtacctcaatagcactggctaccggacaggcccagtctgactctgtctgtaatacctgatt

SEQ ID NO: 518224 - DNA, 75 bp, Homo sapiens
gcagaaagcaggcgaacccgcggcgcaataacgatttatcagcaagactgttgaacgcataactgcccaagatgc

SEQ ID NO: 518225 - DNA, 100 bp, Homo sapiens
gagttcctgctgacttacgcttgtttgagaacctacttttcccaaaccaaccccagcagcccaacagtagatgctcagtgtcaccaactggagacctcac

SEQ ID NO: 518226 - DNA, 105 bp, Homo sapiens
tctccctcaggagaacgagtcatgttcatgggaaactcaatctgggtgtgaaacctctgactatgtgaagatacggtgggaagatgactgaccgcaagacaggaa

SEQ ID NO: 518227 - DNA, 95 bp, Homo sapiens
aggacccccaggcggcgttagagcaattctgtggtgttcttggtcacacatttatggagtttctgaagggcagtggagattactgccaggcacag

SEQ ID NO: 518228 - DNA, 75 bp, Homo sapiens
ccgatccagcctgcggagcctgtggggcaggcgtcgggtttggagttcaagtcggtagccgacagcgttctgttt

SEQ ID NO: 518229 - DNA, 82 bp, Homo sapiens
cggcgcgaagaggctggactcggattcgttgcctgaggtgtagaatgagccaaggagactcaaacccagcagctattccgca

SEQ ID NO: 518230 - DNA, 100 bp, Homo sapiens
ctgggagcttgctgcagcttcagcctggagatttgaaaaagagaattgaatctctgatagacagagactatatggagagagacaaagacaatccgaatca

SEQ ID NO: 518231 - DNA, 82 bp, Homo sapiens
accgagttccacaagaaggactgcggggacctggtggccatcgcaactgaagcagcagcgggacaagctgaggcagtaccag

SEQ ID NO: 518232 - DNA, 111 bp, Homo sapiens
ggcagaggctgcgcagagaatggagagctgtgtctgaggagccttggaacattcacccaggacctccaagcagaaacgcccctgggggacctgtggcatcatgacttctgg

SEQ ID NO: 518233 - DNA, 90 bp, Homo sapiens
gaagaatcaaacttcctgaatctgatagcagtgaagatgaagcaaacttccttgataacatgcttttgcgaagtgcaggaaaattaaatg

SEQ ID NO: 518234 - DNA, 76 bp, Homo sapiens
ggagtgcgtgggggaccggctgttggcggcattttgaaagcgaagcagaagccgtagaatcagcggcgagcctgtt

SEQ ID NO: 518235 - DNA, 100 bp, Homo sapiens
gcaagagcgatgtctactacttcaggtggcccaccagcacgaatgagaaaccagaaacggataactgggatgcatgggcagcccagccctctctcaccgt

SEQ ID NO: 518236 - DNA, 100 bp, Homo sapiens
cagaatttcaacagaggttcattctcaagagagatgatgccagtatggaccgagatgataaccaggtacgagtgcttccatatccatttacccaccattg

SEQ ID NO: 518237 - DNA, 83 bp, Homo sapiens
ctcttagcagcgcgcggagaagaacggggagccaggaaggtggacttttaaatattctccactgaagcaaatgctgcaacaat

SEQ ID NO: 518238 - DNA, 90 bp, Homo sapiens
ggaaagtctgggttcagtctttagagaagaaagctgaagacttgagttcattaaatggtcagctgcagatattgtcagcatgtgctttgt

SEQ ID NO: 518239 - DNA, 87 bp, Homo sapiens
ccggccggctgcgaagacgcggtgggccgcccctccggccatcgaagacggcaatttggaggaaatggaagaggaagtacggcttaa

SEQ ID NO: 518240 - DNA, 100 bp, Homo sapiens
cagcagaactaaagaaagctttaaaagaaaaagaaaacagattattattgcaacaaagaggcaaatttctggagatgtgcaatgatctcttagctagagt

SEQ ID NO: 518241 - DNA, 98 bp, Homo sapiens
tccctgtgggtggacgtggttggtgattggcaggatcctggtatccgctaacaggtcagattgtcaagcatggagatatcaagtgtgtactaaatgaa

SEQ ID NO: 518242 - DNA, 74 bp, Homo sapiens
gctcctgctgtgcttcgtgctcctgtgcggagtagtggagtgtgatgtgaaggattatggggacctgccctttg

SEQ ID NO: 518243 - DNA, 100 bp, Homo sapiens
ttctgctcaccaacagatgaagacagatgcaccaacgagatatgaattgagaattcgttatttgccaaaaggatttctaaaccagtttactgaagataag

SEQ ID NO: 518244 - DNA, 96 bp, Homo sapiens
ccgtgcgggacgcgggcgccaggaccggccgaacgcagagaaactggcgatggaatatgagaggagccctctggaaagaaaaggacagaccctgtg

SEQ ID NO: 518245 - DNA, 93 bp, Homo sapiens
gaaagaggcgaagcgagagcggaggccgcactccagcactgcgcagggaccgacaatgcagatcttcgtgaagactctgactggtaagaccat

SEQ ID NO: 518246 - DNA, 114 bp, Homo sapiens
ttccagcatattttgcgagtactcaacaccaacatcgatgggcggcggaaaatagcctttgccatcactgccattaagctggtgccgacaagaaagccgaggctggggctgggt

SEQ ID NO: 518247 - DNA, 96 bp, Homo sapiens
ttaatggacaaaaacatgagtcaatatgtattgtggcattcaaatcctagcactctgggagaggaaggtgtcttgctgcaggtaactaatgaagaa

SEQ ID NO: 518248 - DNA, 100 bp, Homo sapiens
gcggccttggatacctggccgcgggatgctgggcggcgtcaggttgaaaaagatcatctagcaaagccttttttcccagctacatataaggaatttgaaa

SEQ ID NO: 518249 - DNA, 50 bp, Homo sapiens
ccacgcctgccccagggaaccgcacagactaccaccctcatcatcagtat

SEQ ID NO: 518250 - DNA, 100 bp, Homo sapiens
ccagcagatggcggatgccctgcagtacctgcagaaggtctctggagacatcttcagcaggtgaacttccacagcccccggagtggccagaggtgctggg

SEQ ID NO: 518251 - DNA, 98 bp, Homo sapiens
ggcgcgcacaggctgtagcaggttccggcggacggcgttgcgaagaatcatagtgaaagattcgttttcattgcagagtggtatgatccaaatgcttc

SEQ ID NO: 518252 - DNA, 74 bp, Homo sapiens
catctacaaccttcgatctcctgacgacaagtctggaaaagtttgaaattccagtaaaaattcgtttgagtcct

SEQ ID NO: 518253 - DNA, 100 bp, Homo sapiens
caaggacaaggaggaaattgtgatctgcgatcgagcctcggtcaaggaggcgagcagacctgaacggcagcaacatggagacagtgatcgggcgagggct

SEQ ID NO: 518254 - DNA, 90 bp, Homo sapiens
accgaggcagcggcggcacctgccggccgagtacctgcagatgaaatggcccctcctcgatgtcccctccagcgccacagtcaaggacac

SEQ ID NO: 518255 - DNA, 75 bp, Homo sapiens
gcgctactcctggcagtgcgtcaatcagagcgtcctgtgcggtaaactacgaactgggagttctgaagaatgggt

SEQ ID NO: 518256 - DNA, 100 bp, Homo sapiens
ctatacaaactaatggaaggatacagctatgcaaatatagaacactaaagtgttacatgacagatgtatgaggtgcgtatagcagcaaaattcatcattc

SEQ ID NO: 518257 - DNA, 82 bp, Homo sapiens
tctcgacctgctaacagaactggaccttttcgttccagtgtctcgccccatcctcaccctcagggttcccagggcccaggct

SEQ ID NO: 518258 - DNA, 100 bp, Homo sapiens
atgatgacttctcagccatcatatacttggtgcttgaaaaactgaagaaggaagacgctgaccgaattcatatattcagttcttttttctataaacgcct

SEQ ID NO: 518259 - DNA, 75 bp, Homo sapiens
ataatttttgattctgattggaatcctcagaatgatcttcaggtatctggccaggaacagtcttcacggggacaa

SEQ ID NO: 518260 - DNA, 100 bp, Homo sapiens
tccttcagatcatcctcgggccagcacaatattcctcagtaaatctcagacggacggctcgtgaagaagaaatgactgcaaaagtaagggacctgcagac

SEQ ID NO: 518261 - DNA, 82 bp, Homo sapiens
ctacggaccttaaaatacccgcaacagccccttcgtcccaagaggatacgaagcgttttcggcttcctgcccggagctgtgc

SEQ ID NO: 518262 - DNA, 90 bp, Homo sapiens
gcagcaccatcccagccctggggcctgctgactgcccaaggcaaactatgaacaaagcaagaaagacccccaccagacattgcccctgga

SEQ ID NO: 518263 - DNA, 96 bp, Homo sapiens
cagcggtctgcgcctggcagcagtaattcgccaaaatgacgaacacaaagggaaagaggagaggcacccgatatatgttctctaggccttttagaa

SEQ ID NO: 518264 - DNA, 100 bp, Homo sapiens
cccttctccacttgaccaggctggttctgggatcctggctgctacaaatagtactgaattgggaattatggaaccatcttctccaaatcctagccctgtg

SEQ ID NO: 518265 - DNA, 90 bp, Homo sapiens
ggatgaagctgctgctgggcatcgccttgctggcctacgtcgcctgacttgtcttacaaggaccggcactggcatgaagcctgtttccac

SEQ ID NO: 518266 - DNA, 100 bp, Homo sapiens
cccctggtggatggcgaggatgagaggcctgatcttttggccagaaggagattaaaaagatgcccctcaagatggctgtgcctgtcagctgcatggagct

SEQ ID NO: 518267 - DNA, 75 bp, Homo sapiens
ggcctacgcagagctcatcgtccttggaaggccaccccttcaggtctgtcagtactgggtgccacggatccagct

SEQ ID NO: 518268 - DNA, 80 bp, Homo sapiens
tttaaacttaaggaaagagtgggaaagtgagggcctggttgcagtatgcttgaaatctgggatgtggaagacccttccaa

SEQ ID NO: 518269 - DNA, 82 bp, Homo sapiens
cttgaactggtgctgtctgggcttcatagcattcgcctactccgtgaagattgtcactgctgttccaagggcacacgcagag

SEQ ID NO: 518270 - DNA, 95 bp, Homo sapiens
ttacagacaaataaaaagaagtgttaagaattgcctttgggactctgaaggctgaagattcctgaatttgacaacttgtacctggatatgaatgg

SEQ ID NO: 518271 - DNA, 96 bp, Homo sapiens
ttggtacattagtgggggaagacaaatatggaaacaaatactatgaagacaacaagcaattttttggtgtggatgaggtcaccattgtcaacattt

SEQ ID NO: 518272 - DNA, 100 bp, Homo sapiens
gtccacctccaccaaaacccaacagaccaccaaatgttgacctgacgaaattccacaaaacctcttctggaaacagccatccggctgtccttagagcaag

SEQ ID NO: 518273 - DNA, 97 bp, Homo sapiens
ggagctgcgctcggcgggcggacgcggtgtcgtgtgggagccaatgggagatgggaagaaaatcatttccttggctgataaccatatcctgctgtgg

SEQ ID NO: 518274 - DNA, 75 bp, Homo sapiens
tcagcatggcccaggctcctgctgacccgggcagagaaggaaaagagcactggttgccattggtacccatgattt

SEQ ID NO: 518275 - DNA, 50 bp, Homo sapiens
gaaagattctgccagaagaagagtgagcaagaagaacccatcaggtgatt

SEQ ID NO: 518276 - DNA, 97 bp, Homo sapiens
aattcttatagccattcttatagttgtaaggttacaatggccaacattggaataaatggaaatcattctctggaaacctgtgaaacaacactttttg

SEQ ID NO: 518277 - DNA, 76 bp, Homo sapiens
atggcggcggcgtctgtctctgcggcttctggttctcacttgtcggcggctgttgaagagtgaacttggatcattc

SEQ ID NO: 518278 - DNA, 82 bp, Homo sapiens
tttggaggagttccctgacaaaggcttcttctttgcctttggagctgtgttcagactgcatcacagtgcttccgatacaagc

SEQ ID NO: 518279 - DNA, 74 bp, Homo sapiens
gggagacggctgttgtaaaatggtactccaaagattcaggtttactcacgtcatccagcagagaatggaaagtc

SEQ ID NO: 518280 - DNA, 75 bp, Homo sapiens
ggtgccctctccttttcgtttccggaaacatgatcagtcgcatcgaatacattcattcaaagaacttcatccacc

SEQ ID NO: 518281 - DNA, 74 bp, Homo sapiens
gcaggagcgatggcagcgaccgatatagctcgccaggtgattgctcgctgtaagcagctcatctgtgaccccag

SEQ ID NO: 518282 - DNA, 95 bp, Homo sapiens
agagagtctccgggtccctggaaagactatgtcttcagcagtggtgcagttatatgcagcagatcggaactgtatgtggtcaaagaagtgcagtg

SEQ ID NO: 518283 - DNA, 101 bp, Homo sapiens
acccgagaacgtgcgggaagagaagatcatcgagcatttcaaacggcggaagcccggctcgctgcaaaacgggcggcccgcgcggaggctcgcgagatccg

SEQ ID NO: 518284 - DNA, 97 bp, Homo sapiens
aacaagttcaaccaggtggagagtgataagcttcgaatggacagagccatccctgacacccggcatgaccaatataaagatgaagcgcagctgtata

SEQ ID NO: 518285 - DNA, 96 bp, Homo sapiens
tttagcgcatcatgtgatccggattagcctgaggcctgctcagtcgttcctaatgaataaaaatcaagtgccaaagcttcagccccagataactat

SEQ ID NO: 518286 - DNA, 75 bp, Homo sapiens
ctatcgggagaaagtggagtccgagctgagatccatctgcaccacggtgctgcatctggctattaagtgccactg

SEQ ID NO: 518287 - DNA, 107 bp, Homo sapiens
gcaaaggcaggggaggaagccacctcgaggacccagatgatgtggtaccagttggccaaagaagagcctggtgttggtgcatgtgctttggactagcatttatgctt

SEQ ID NO: 518288 - DNA, 75 bp, Homo sapiens
tcgggtgcgctgctcaaggacacggtctacaccgacttcgacgaggagcagggacatggcatctctccggctgca

SEQ ID NO: 518289 - DNA, 101 bp, Homo sapiens
gccccgtgtcctgcaggtattgggagatccacagctaagacaccgggacctcctggaagccaaaaatgatgctcctggagaggtggtaccctctggggaat

SEQ ID NO: 518290 - DNA, 100 bp, Homo sapiens
acacagtgtcagaattacaaggtgagatcagccgcccggccaagctatcttctcgctagcaggtgtggcggggcaccctggcccgcatgcggtacaaaag

SEQ ID NO: 518291 - DNA, 100 bp, Homo sapiens
cggcacagagagggcctgggagcttgctgcagcttcaggtctcggcgcggaagatggccggcggcgtggacggccccatcgggatcccgttccccgacca

SEQ ID NO: 518292 - DNA, 76 bp, Homo sapiens
cctcccctagcttcactcaatgttagtaaggatgagcagcagcaagagatggccgcttctgccgccttcatagacc

SEQ ID NO: 518293 - DNA, 98 bp, Homo sapiens
tttgctacagcatcccacattaagtcaacggagtccatagaggccactgtattctattgaagaacatgtctaacagtaacactactcaagagaccctg

SEQ ID NO: 518294 - DNA, 100 bp, Homo sapiens
atcttcacaatacagtggcgttacttgttttgcattcagatgtctcatcccaaaggaatgttgaaacggccatcattcaagcaaatcatttcaatcctgg

SEQ ID NO: 518295 - DNA, 100 bp, Homo sapiens
gtatcctaatggtgtatttcccaaaggacaagaatgcgaatacccacccacacaagatggtgtgaacacagcaggtgtgagatgtcatcttggaagacag

SEQ ID NO: 518296 - DNA, 75 bp, Homo sapiens
tgaggcctccccagccacgctttctgtacagcctgcagaactctgggccttgattggttgagtcaagtgagctga

SEQ ID NO: 518297 - DNA, 50 bp, Homo sapiens
cttcgagccatcccagaaccacagccaagccgagcctcttgaagccattc

SEQ ID NO: 518298 - DNA, 75 bp, Homo sapiens
atggagactgacgactgttctcggtcccggcacagggaccagcgtgatgggagtatttgatttctgacactggag

SEQ ID NO: 518299 - DNA, 75 bp, Homo sapiens
caaagcaataccaggatagctgttgtttcagagaaaggatcaagtcttccataccagggaccaggccaaaaccag

SEQ ID NO: 518300 - DNA, 89 bp, Homo sapiens
aaggagggtcctctcagtgattaagaccgacaaggagcagctgacagcagaggccaaggagctgcgccaaaaggtcaagtacctgcagg

SEQ ID NO: 518301 - DNA, 83 bp, Homo sapiens
cgaagttccggcgcatcctccacaccgacaccatctggaggaggcgttgccgtgagggtgaaatgacaatggatgctctgttg

SEQ ID NO: 518302 - DNA, 98 bp, Homo sapiens
gagagagcgagctgagtggttgtgtggtcgcgtctcggaaaccggtagcgcttgcagcatgtgtgtggaccagttgacaaagatccaaactgaattac

SEQ ID NO: 518303 - DNA, 83 bp, Homo sapiens
gttgaaaatggacgagtaatcgcctgctttgattcattgaaagaatcccgttctgcttccagaagtggaagtgctcacggatc

SEQ ID NO: 518304 - DNA, 100 bp, Homo sapiens
aaggtccaaaaaaactccagctgtgaaagcaacataaatgatgccagcctgttattgcgctccaggccactatcactccagccaacctcagtatcgccca

SEQ ID NO: 518305 - DNA, 100 bp, Homo sapiens
cttcggccggcctgagccccagagtcagctcccctttctcgcccagcgcccccaggccgctcccggggctcacgtacagaacctgctaaggccatcaaac

SEQ ID NO: 518306 - DNA, 50 bp, Homo sapiens
ggaagccctgcggatggccaacgtggcagcaccgacagtaaatggttcac

SEQ ID NO: 518307 - DNA, 82 bp, Homo sapiens
gttcattgaattatggcatagatcttgggaaaattgcgagctggaagtcgagtgtgctactcaactcaggagatttggagac

SEQ ID NO: 518308 - DNA, 98 bp, Homo sapiens
tttgctctgctcttccaacaccagtggaagatgatcacatcccagacgtaaaattcatcctgatcagaaaaatattaatgcctatgttgtgtttaagg

SEQ ID NO: 518309 - DNA, 82 bp, Homo sapiens
cccagtccctgaaagcattaccgggttcgctaggctcacagataggctcgaggagagagcatcctcagataagaatgtagac

SEQ ID NO: 518310 - DNA, 60 bp, Homo sapiens
tggacgaagccttcaaatccatcaagctcatcaaaagctgaagaaacacttaaattctgg

SEQ ID NO: 518311 - DNA, 82 bp, Homo sapiens
gaacttcgttgcttgcttgcctgtgcgcgcgtgcgcggacatggcctcaaacggatgatgacctggaagaaggtgaagtgaa

SEQ ID NO: 518312 - DNA, 75 bp, Homo sapiens
actgaaacaaatgaagttcaaggatttctctttgggaaactaaaagactaaggtgtcagtatgttcttcaagctg

SEQ ID NO: 518313 - DNA, 49 bp, Homo sapiens
ttcctgtacagcctgcagaactgactttccttatcccagttgattgtgc

SEQ ID NO: 518314 - DNA, 75 bp, Homo sapiens
gtacccaagcatgcaaaggaaggaaatggtttccaagggaccaatttatttctcgttgctgctcatgaaattggc

SEQ ID NO: 518315 - DNA, 51 bp, Homo sapiens
gcagggttgtcgagctgctctgcaggcgtggtgaccaagatgaagatgcag

SEQ ID NO: 518316 - DNA, 100 bp, Homo sapiens
tgacgctatcaactgcagagattggtgatactgtgcttgtccaccgagttcacagttatttagagcgtcatggtcttatcaacttcggcatctataagag

SEQ ID NO: 518317 - DNA, 100 bp, Homo sapiens
cgtcactgtcgggtcggcgagccacgggggccgccgcagcaccatggcgaccaccgtcagcactcagcgcgggccgaaaccaatagagccatggcgactc

SEQ ID NO: 518318 - DNA, 98 bp, Homo sapiens
ggcggggggagccggagccgcctgggatgttcaacatggaaggtctttaatgtaactttaaatggttcaccaaaggatgctctaatggatgacagcga

SEQ ID NO: 518319 - DNA, 101 bp, Homo sapiens
atggcgtcgtattttgggcattcagtggctgtcactgacgtcaacggggatgggtggctgagcatcggagtggagttcgtggggaactgcgtggtgctctt

SEQ ID NO: 518320 - DNA, 100 bp, Homo sapiens
ggctccaacagggatgcgctgagcgatttcttcgaggtggagtcggagctgggacggttttgacacaagggcgcatatcttcaaagcacctagtacctcc

SEQ ID NO: 518321 - DNA, 82 bp, Homo sapiens
gaaggaggaggcacccacaggctgctgggaggagagcataagggttacacatcattttggaatgactgtatatcatctggat

SEQ ID NO: 518322 - DNA, 82 bp, Homo sapiens
gccgaacttcagggtttccaccgttcgttcaaggtgaggcggaaccaaccctcctggccatgggaggggccgtggtggacga

SEQ ID NO: 518323 - DNA, 82 bp, Homo sapiens
ctcaccgagacggcgatccgggcgctcgagacttaccagagccacaaggaggccccgtgtgggccgcggcccggccctcacc

SEQ ID NO: 518324 - DNA, 100 bp, Homo sapiens
gcatccagtaccaagagttggtgggagacgggtgaggtacaggctcagtctgcggccaagactccgtcctgcaaggtttgaattcctcagcaacatctac

SEQ ID NO: 518325 - DNA, 83 bp, Homo sapiens
gtgcctttgaaaatcaacgacaacttgagcacagttggaatcgaagcctcttaaaatggcagatgacttggacttcgagacag

SEQ ID NO: 518326 - DNA, 75 bp, Homo sapiens
ccgattactcggtgcgagccctttcggatctgcagtttgttaaggccaaacgtaccaagaaagtcgggatcgtcg

SEQ ID NO: 518327 - DNA, 75 bp, Homo sapiens
gtggggagatgaacccaacctagtgggtgtaatacatcatgaactgcagggtatagacacgtgtggccgtttacg

SEQ ID NO: 518328 - DNA, 96 bp, Homo sapiens
ctgtggagttggaagggcaggatgaaaaccaagaaggagattttgaagatgcagatacccaggtgctgtctgaggtctgtgggcaggacatcacca

SEQ ID NO: 518329 - DNA, 75 bp, Homo sapiens
ctttacaagcatgtgatgagaagcaattatgagactctcgtctctctagagctgctgcccaaagggagcaaggag

SEQ ID NO: 518330 - DNA, 101 bp, Homo sapiens
gcgactattctccgggagccgtccgtgtcaccgccggaacctggcgcagacccagagtcccagagaaagaggacagtgcagaatgtcctggatctccggca

SEQ ID NO: 518331 - DNA, 100 bp, Homo sapiens
attgggcagtgttacagtgcactcttctgaacctgaagtcagaattcctgagaataatcctgtacactgggtagctacattgaatgtgggatcaggcggg

SEQ ID NO: 518332 - DNA, 73 bp, Homo sapiens
cgccgagtatggcgccagcccggagcaggttgcagacctgccgggaagagcacaagaagaaacacccggactc

SEQ ID NO: 518333 - DNA, 74 bp, Homo sapiens
cgagctgggggcgcagagcgcgggaggcggcggcggcgcggagcccagacttgcacacctacccctgtggagcg

SEQ ID NO: 518334 - DNA, 75 bp, Homo sapiens
aagtcatcgggtgtctctggaggtaaaccagcacaaacgtgcagatatctgatagccctttccgttgcactcaag

SEQ ID NO: 518335 - DNA, 83 bp, Homo sapiens
ggcggcggcggcaacatggcagagaccgcggccggagtgggccgcttcaagaccaagtttggtgcacctcgatttggaggaag

SEQ ID NO: 518336 - DNA, 100 bp, Homo sapiens
tacgagtctgtgctgtgtgtgaagccagacgtcagcgtctaccggattccgccccgggcctccaaccgcggttacagggttaccatccattgacccatca

SEQ ID NO: 518337 - DNA, 100 bp, Homo sapiens
acaccccggaagctgggaaatggtatctcagcgtttgagtcagccaggagtagcaataggtttggcttggactcccttaggtggagaaatcatgttcgtg

SEQ ID NO: 518338 - DNA, 50 bp, Homo sapiens
agacctcagcttccctcgggaggggctggagtgtagtggcacgatctcgg

SEQ ID NO: 518339 - DNA, 50 bp, Homo sapiens
tgaccgagaccgcggccgggaccgagggacacagaatttccaggtgttgt

SEQ ID NO: 518340 - DNA, 104 bp, Homo sapiens
aaggtcccatttccactgaccctccgttttaagcctatgttacagcaaggaatcgagctactcacattagatgcatcctgacggagtctcactctgtcgcccag

SEQ ID NO: 518341 - DNA, 83 bp, Homo sapiens
tgcagctatcgtggacgtcactggccctggtggggattgacagccacgggaaggacccattccaacaatctcgtaaaacatgg

SEQ ID NO: 518342 - DNA, 50 bp, Homo sapiens
gttaaggattccaagtaactcttatttgtctcatataatggcagcaaagg

SEQ ID NO: 518343 - DNA, 100 bp, Homo sapiens
cttttcatgagtgttcctgtggtctctgcacctcctttctgtatccgttacagcactgatgtgagtgtagatgaagtaaaagctttggcttctctgatga

SEQ ID NO: 518344 - DNA, 100 bp, Homo sapiens
gtgccttttgcctcccaccgtgattctgaggcctccccaaccatgtgcaattctgaaaatgtgtgtctgacatgcaagctcagtggggcagagacccgtg

SEQ ID NO: 518345 - DNA, 100 bp, Homo sapiens
atctctcaggagccctttgttcccaagaaagagaagaaatcagttgctgatgattgcccgccacctccggcccccttccctcaccgcatggtggagctga

SEQ ID NO: 518346 - DNA, 83 bp, Homo sapiens
ctcaggcggcaccctgtccccgaggaggggaccatgacacagctctacagattctcccctgcccctggagaaggaggagcagg

SEQ ID NO: 518347 - DNA, 74 bp, Homo sapiens
atgtgcttggtggagcagctgcctgggagaatgttgactctactgcaggtcagtgtggggccggaaacaactgg

SEQ ID NO: 518348 - DNA, 75 bp, Homo sapiens
ttttgtggcttccttcgttattggagccaggcctacaccccaggctctgaagggctccaagaagctggtgctgtc

SEQ ID NO: 518349 - DNA, 101 bp, Homo sapiens
cgacacgtcccccgggcgccactgcagagcctgtccgtcagtccctaggtatccgcactgctcagggcacggggtcactctggtgcccattgaggagttca

SEQ ID NO: 518350 - DNA, 101 bp, Homo sapiens
attattccaaagggtatttgagactgactgaatcaggtctggaacattattgaaatgcttcacgaggctgacattgtggtcctaggctcacctaagccaga

SEQ ID NO: 518351 - DNA, 83 bp, Homo sapiens
ccttcggcagtccacccaccgccgccgcctcccaggttcttcttcagcactgtggcctcggccacagctggcatgctctgcct

SEQ ID NO: 518352 - DNA, 97 bp, Homo sapiens
cgccaagcaagtgctctacgtgcctgtcaagaccacggctaggcagctggaagagaaagaccgagtgctaaagaagcaggatgcattctacaaagaa

SEQ ID NO: 518353 - DNA, 101 bp, Homo sapiens
ctctgatccagttgggtgacagaggtcctgggcctatgtcaagaagtgcaaaaacaacatgtgtccaaatcggggattggtgagccagctgctggaatggg

SEQ ID NO: 518354 - DNA, 99 bp, Homo sapiens
gtccctactacgatgcaatcctgagttatccggtgttggctcctgctgcttactatgaccaaactggtgcccttgtagtgaatgcaggcgcgagaaatg

SEQ ID NO: 518355 - DNA, 100 bp, Homo sapiens
ctggcccgtttctacactgtcaccgagccccagcgacacccgaggggctacacagtatataaggtcaccgcccgggttggacgtgataagtatgagcctg

SEQ ID NO: 518356 - DNA, 96 bp, Homo sapiens
cgccggtgctctgacctggctgtcctgcgggagcctgtgcctgctggggctttcttgatcatggatggtgaagatataccagatttttcaagttta

SEQ ID NO: 518357 - DNA, 82 bp, Homo sapiens
aatcaacttgactcaagattgactctacagactcagaagatgatgctaacagtgtttctgctttgggacaaccatacatcta

SEQ ID NO: 518358 - DNA, 75 bp, Homo sapiens
agatgataccatgaagagaagtttacaggccctctattgccaactgttaagctcactcagtaacttgatggattt

SEQ ID NO: 518359 - DNA, 100 bp, Homo sapiens
cctccagtggccggctccggaggcttggtgactccagtggcccagattatggtgacaagctgaacatggagctgagtgagaaatacaagctggacaaaga

SEQ ID NO: 518360 - DNA, 75 bp, Homo sapiens
acgggatccagagcgccgcgcacttcgtcatgttcttcgcgccctggtaactaggatttctacctcaaccgcgag

SEQ ID NO: 518361 - DNA, 100 bp, Homo sapiens
cggccggggagaaggtgttgttgccggagctgagaccgggcggccacagtccgcagggatgaacctcgagttgctggagttttcaggagttgaaaatgac

SEQ ID NO: 518362 - DNA, 82 bp, Homo sapiens
gttgctgctgcacattaggttgcagtatgtggccagttatttgcctcagtaaaagaatccaggtgaacttgagagaattaga

SEQ ID NO: 518363 - DNA, 101 bp, Homo sapiens
accagtcactatccacaatttagaggagtatctaagagtggagcagttctggaggttttatagccacatggtacgtcctggggacctgacaggccacagtg

SEQ ID NO: 518364 - DNA, 100 bp, Homo sapiens
tgtcgacttggtcccgtcagccggaccccacctggacggctggggccacttgtggtcgccgggaggtggaaaacgaagctcattcccaacgtgcaaagcc

SEQ ID NO: 518365 - DNA, 74 bp, Homo sapiens
tggaggagcagttgtctgatgaagagaaggagtctactcttcatcttgtgttgagacttcgtggtggtgctaag

SEQ ID NO: 518366 - DNA, 100 bp, Homo sapiens
gacaacgagaaactggacaaccaacggctcaagaatttcaagaacaaaggccgcgacttggagacaagttggatggcttgaggactggtactaaaaggaa

SEQ ID NO: 518367 - DNA, 100 bp, Homo sapiens
ttgtgcaactgccagtctaaaaattgatatagatggatggagtggaaccctggcttccccttgagcatcgatgccaaatgccacaaggatttaccccgtg

SEQ ID NO: 518368 - DNA, 100 bp, Homo sapiens
gggattctggcatcagggaggctttcagccggagaagcgagtttcagctgaacccttaggagaaatcttgagagtggacagcaattgtgaagatcgccag

SEQ ID NO: 518369 - DNA, 50 bp, Homo sapiens
gtgaatttccatgtcaacatagtcctgctggactgtgctgctgccatctc

SEQ ID NO: 518370 - DNA, 99 bp, Homo sapiens
ttgatgaaatctacataaagactaaaacattttaccaattttgcattgtttgtttgaaattgcattgacgactggtaggtgagctcgtgaaacaatatg

SEQ ID NO: 518371 - DNA, 75 bp, Homo sapiens
tttatctgttcagcgcctcacgaaatccaaaggttttcctttggaatatggataaatacaccatgatacggaaac

SEQ ID NO: 518372 - DNA, 100 bp, Homo sapiens
gggggagccccgggagccgcacggtctcatctgagtagcagcttcctgccctccttcttggagataagtcgggcttttggtgagacagactttcccaacc

SEQ ID NO: 518373 - DNA, 50 bp, Homo sapiens
gaagctcccgccctagtggggccccacgcaatacttcatcctgctgatcc

SEQ ID NO: 518374 - DNA, 75 bp, Homo sapiens
ttcatcatggataactgtgaggagctaatccctgaatatctgagtatctgatgtgtagccatgcagaagacctac

SEQ ID NO: 518375 - DNA, 83 bp, Homo sapiens
gggagctggacggcgagcgcgagcggcgcgagaaaatcatcgtgttcctgtgttacggggcccgcctcaacaagtgggtgctg

SEQ ID NO: 518376 - DNA, 75 bp, Homo sapiens
tttgccgtgacaacaccgttcccccagccgggctggctgatcaccagttcctcttaggaaccggtgaacctcagg

SEQ ID NO: 518377 - DNA, 109 bp, Homo sapiens
catgaagaggaggatccacctggagctgaggaaccggaccccggcagctgattttttatcaagcagaaatgcatcgaacaacgagaatcaagatcactgagctaaatcc

SEQ ID NO: 518378 - DNA, 100 bp, Homo sapiens
gaagttgaattgaaggttcttccagttattttaccaagaaaatggtttgcacgactttgaacatatactatccatgctgatgggacaggatccaatatga

SEQ ID NO: 518379 - DNA, 98 bp, Homo sapiens
acgaacatatatactcagaaacaagagcctcctaagaagcatttatataactctgcagccttcaaagctcgaaccaaagctagaagcaaatgtcgaga

SEQ ID NO: 518380 - DNA, 75 bp, Homo sapiens
ggaagctgatgctgctggacgccactttccggggtgcacagcaagtggatttccctggggaaagtcttcactcag

SEQ ID NO: 518381 - DNA, 49 bp, Homo sapiens
tgtgactccagccagagcccccccacggcagcctggcatcctcgctaca

SEQ ID NO: 518382 - DNA, 75 bp, Homo sapiens
aaaagtgatcgaccagagctaacaggtgccaaagtggtggtatctggtggtcttttagataaccctgaacttcgt

SEQ ID NO: 518383 - DNA, 75 bp, Homo sapiens
ctgtaccggcagatcctcaggggcaagtacagttactctggggagctcacccgacgactgccacccatcaaagaa

SEQ ID NO: 518384 - DNA, 107 bp, Homo sapiens
ggaaagggagacggcgagacgcgcagcgccggcgcccgggagacccaggaggagcccgcaggcagacttctgcgttatgacccggctgctgggctacgtggaccccc

SEQ ID NO: 518385 - DNA, 82 bp, Homo sapiens
ggagcatgtcgaccccggcccggaggaggctcatgcgggatttcaagcggggcagaaccccttcgagctggccttctcccta

SEQ ID NO: 518386 - DNA, 100 bp, Homo sapiens
gaaacctcaggacttgagtaacagcaacatggcccctggcagctcgtggttggcaagagcacgaacccgtggtcagatgcaacgtcctgcctcatgcatt

SEQ ID NO: 518387 - DNA, 76 bp, Homo sapiens
tttatcctggtcatcttctatttccaaagtcttattagtaggtaagaaacagctgctcctccacctccaccccagc

SEQ ID NO: 518388 - DNA, 98 bp, Homo sapiens
taccggcggcggcgcgcagcgtgtcaggcggagagacccgccgccagaatgtggcagatcagattgcatttcaagctgctggtggattaacagccctt

SEQ ID NO: 518389 - DNA, 103 bp, Homo sapiens
gcggagccaggaggggaagcgatggctgggcccgcgtggatctctaaggaccaagaatcgccttcagccctgtctggtgcatccttggcagaaagtgaggagg

SEQ ID NO: 518390 - DNA, 102 bp, Homo sapiens
atcaacgctgagacagaccggctggaggctcgcaagaaagccaagaacaagcagctgggccatgaggaaggacagagcgggatgccaccagcttgtccaaag

SEQ ID NO: 518391 - DNA, 82 bp, Homo sapiens
agccgcaccatgccgctcctaagcctgcacagccgcggcggcagcagcagtgagagatccagcacacggaagacatggagaa

SEQ ID NO: 518392 - DNA, 100 bp, Homo sapiens
ggccctgtaaactcttgtcaaggcaaggtcccctccttctttacagatgctgagaggcgatctgtgttagatgctgcacagattgttggcctaaactgtt

SEQ ID NO: 518393 - DNA, 75 bp, Homo sapiens
ggtgaaactgaccacagtgctcaccacccaccaccactggttgcccccaagtttcctggcagtgtgtgatactga

SEQ ID NO: 518394 - DNA, 50 bp, Homo sapiens
cgagtcaacaaccgcttcgagctgttacagaatgtctgaaggggacagtg

SEQ ID NO: 518395 - DNA, 75 bp, Homo sapiens
caacaaggacggagacgccggcgtgggcagcggccactgggagctgaggttctacaaactgcatgagcgcaagtg

SEQ ID NO: 518396 - DNA, 88 bp, Homo sapiens
aatattcttccttgccaggtgcctgtctggaaggccagatacacatttgtcactgtgcagaccatttctggaactggagccttaagga

SEQ ID NO: 518397 - DNA, 82 bp, Homo sapiens
cggccggggtccaggtcggaaatgtagccagtggggccgccaggtcttccccagggaggtcctgaactacacagctgagaac

SEQ ID NO: 518398 - DNA, 100 bp, Homo sapiens
gtgcagtcttatcgaaggatgtgcatgaaggacagcctcttctcaatggaatgtctgaatctgaacaggctcttaaaggtacttctcagattaaattact

SEQ ID NO: 518399 - DNA, 50 bp, Homo sapiens
ccgggactccctggaaacctagaaatgccgttggacataccagatggtcg

SEQ ID NO: 518400 - DNA, 74 bp, Homo sapiens
aacaagtgaccaacagttgaatcaaagtatggacacaggggatcatcgtcttgctcttcttttatctcagtttg

SEQ ID NO: 518401 - DNA, 89 bp, Homo sapiens
ctcccgggagtcgctgtggcaaaagtaacaaatgtggcaattattttggatctatcacctgtcatcataactggcttctgcttgtcatc

SEQ ID NO: 518402 - DNA, 50 bp, Homo sapiens
catcaagtggcatccatcataaggtgtggcagagaagacacagcttctga

SEQ ID NO: 518403 - DNA, 100 bp, Homo sapiens
gtgggtttcccgcagccctggcgcagacgcgtgggctccgtggcgatgcgggaattcccgtactgattagtcaacagtggaaaatctgaagagatgcaag

SEQ ID NO: 518404 - DNA, 119 bp, Homo sapiens
ctgctacaggagctgagagaccctaccctcactttccgtctgcttggctcccccaggttcttgggtgtctctggggagtccctgggccagaccttcctccagactccagcccacctctt

SEQ ID NO: 518405 - DNA, 96 bp, Homo sapiens
ccagcttggagaaccaccgcatcaagagcttcaagaacaagggccgcgatgtggaagtcctgctcaggttccaatgatgtccccaaatggttctgt

SEQ ID NO: 518406 - DNA, 51 bp, Homo sapiens
cagtatcaacggagtctccggggttaaaaatctgtaagagcctgattttag

SEQ ID NO: 518407 - DNA, 100 bp, Homo sapiens
cgatgagctcgggagtccaccatcgctctgcaagccgcagtttgtgaagtgtggatatgcaggctctaactttccagaacacatcttcccagctttggtt

SEQ ID NO: 518408 - DNA, 75 bp, Homo sapiens
acggagagaaggcggcgcgggaggtgaagttgctgctgttgggtgctgggtaggccaggtttcagcatcgcagac

SEQ ID NO: 518409 - DNA, 95 bp, Homo sapiens
aaatgcctgaacgccttggcgtctcttcgacatgccaaatggtttcagaagatgaatttgctgtcatgttttgtggaatgagggaccgttgagct

SEQ ID NO: 518410 - DNA, 100 bp, Homo sapiens
catgccttcgctgcgatgcctgtataacccagggactggcgcactcacagctttccagggattcaaggatatttctcttgagaggtttatacatggtgga

SEQ ID NO: 518411 - DNA, 75 bp, Homo sapiens
atactttggttacctatgtacctgttaccactttcaaaaccacagatgaagatatccttgctaaaggaaaacagt

SEQ ID NO: 518412 - DNA, 73 bp, Homo sapiens
ggagaaggagaggagcgagctgaggaagaggaagctgttggctgaagtgtcaagtctggcaccatctttgaca

SEQ ID NO: 518413 - DNA, 75 bp, Homo sapiens
ggcgacatggagccattgaagggaacaacacccttgatggcttttaaggataccggaaaaacacccgtggagccg

SEQ ID NO: 518414 - DNA, 100 bp, Homo sapiens
cggagcccaccaagttctgggaagtttatgaaggcgagcgtgccatgacaaaggataacaacctgcttggcaagtttgaactcacaggcatacctcctgc

SEQ ID NO: 518415 - DNA, 100 bp, Homo sapiens
acatattccagtaatggtggatgaagttgttcattgtttgtcaccacaaaaaggacagaccaagaggatgctggtggaaaagatgggccgagaagctgtg

SEQ ID NO: 518416 - DNA, 98 bp, Homo sapiens
gttgagcgggctttttggaagtttgtggcggaggtgaggccgaggtgactgcagagcggctcgcgaggacgtggcccagtggaacatcgggagcctcc

SEQ ID NO: 518417 - DNA, 75 bp, Homo sapiens
agaaaaagggccagtgtctcccaggactcagcccaggagagtgttattactcgagatattcatcgtacatttccc

SEQ ID NO: 518418 - DNA, 75 bp, Homo sapiens
acaaagctgttgtctcagggagcacagaagactcctagaagtaccccaccccacccctgctccttggaggacaac

SEQ ID NO: 518419 - DNA, 100 bp, Homo sapiens
ccgccgtcccccagctgcgcaaccctaggaactctcggtgcaatcgcttccatactaagggcctggcttgaccagtgtgcagaagacttccgagagcccc

SEQ ID NO: 518420 - DNA, 100 bp, Homo sapiens
aggcgattccgcagtccccccgttccctggaggtcctgtggaatgattttaacctttgagaccaagaacccgtcggaattagcagaacgtttgcgctctg

SEQ ID NO: 518421 - DNA, 74 bp, Homo sapiens
tcttggccatcctggaactgctaaaccaccggcatgttctttggttcagcacccagtcccatgggtggaatctc

SEQ ID NO: 518422 - DNA, 97 bp, Homo sapiens
cagcgacccaccatggagacccgctacaacctgaagagtccgggacttcactatgaccctgtacctgcggcattactggaaggatgagaggctagct

SEQ ID NO: 518423 - DNA, 49 bp, Homo sapiens
gcagctgaagccgctgcccctgctacagcactggtgaccccggcagccc

SEQ ID NO: 518424 - DNA, 82 bp, Homo sapiens
gcctagcgtcctggaattacttcaatcaagaactgtggctgcaccatctgtcttcatcttcccgccatctgatgagcagttg

SEQ ID NO: 518425 - DNA, 95 bp, Homo sapiens
ctctgcagccacatactatccgtttgttcaggaaccaccagtgacagaaaatcatttctcaagaagttcagttgctgcaggtgggcaaaagggaa

SEQ ID NO: 518426 - DNA, 124 bp, Homo sapiens
tttcggaagcaaggtggtttgctcgtgattgcatttgattgcaaggagacagggtactccaaagattcaggtttactcacgtcatccagcagagaatggaaagtcaaatttcctgaattgctat

SEQ ID NO: 518427 - DNA, 100 bp, Homo sapiens
atccttctcacgttcagccggcgtataccaacccaccccacatggcccacgtacctcagatgcagaaacagaggcccagagagatgaatagcctgcctgg

SEQ ID NO: 518428 - DNA, 111 bp, Homo sapiens
atttcacagcactctgggcgaaaattggatgtgaaaatgaagccagaccgaggttgtatcagagtaagatggacggtagctttgattgtgattgtggtgagctggagccac

SEQ ID NO: 518429 - DNA, 95 bp, Homo sapiens
gtttgcattgtcttggctgttgagtgaagaaaaagagcaggaagtcattacatggagagcgacttgcagttgtggaggtacagtgtgaacggctg

SEQ ID NO: 518430 - DNA, 100 bp, Homo sapiens
aagaaatttaaggaggtggccgaggcatatgaagtgctgtctgacagcccggaacttgcctgtttggctccccaaccaggacgagccccttcctggcagc

SEQ ID NO: 518431 - DNA, 101 bp, Homo sapiens
ttctcgacctgctaacagaactggaccttttcggtcctctggtgatgttcttgagacgttcaatttcttagaaaatgccgatgacagtgatgaagatgagg

SEQ ID NO: 518432 - DNA, 75 bp, Homo sapiens
ctgggccgccagcctcggcaccgtcctttcctttctccctcgcgttagggagctcactcagtgggtttgatgtgg

SEQ ID NO: 518433 - DNA, 50 bp, Homo sapiens
gcaggactgcgccgcgtcttcctcaagcgccatcatgaccgggtcctata

SEQ ID NO: 518434 - DNA, 90 bp, Homo sapiens
gatggcttactgcctgacaaattgttatcaggaatcccaataaccctgtttaaagaggaatggagattgccactgtccatttagattaat

SEQ ID NO: 518435 - DNA, 128 bp, Homo sapiens
tttttcgtcttttgccaagaatctggttatgatacaatcttgcgtgtcctgggctctaatgtcagagaatttctacagggagatacttcaggggattaccggaagattctgctgaagatctgtggtgg

SEQ ID NO: 518436 - DNA, 75 bp, Homo sapiens
agaaattgctgaagaactcgcaagctcctacgaaagaaagctcatcgaggtattagaaaactactcggatgctcc

SEQ ID NO: 518437 - DNA, 91 bp, Homo sapiens
gctggagtcagtggaagacggagctggtcggcccgaaggtgtggacactgccagcggctgcagccgacttggaatgacctgggagacaaat

SEQ ID NO: 518438 - DNA, 100 bp, Homo sapiens
cctcaatgactgccctctaaaggaagaggtgaatctggattgggaaagtcgacattaatcaactcattattcctcacagatttgtattctccagagtatc

SEQ ID NO: 518439 - DNA, 137 bp, Homo sapiens
gaggacttcccctccgtggtgacagcctctgggtcctcggtcggtacagtctctgcacctcgcgccccagcaggtagaagaccatgatggagaaggtgatgtggctggagatgatgatgatgacgatgatgattcac

SEQ ID NO: 518440 - DNA, 75 bp, Homo sapiens
gatggctctgaagaggtcaaagaaacgtgggtgtctgccctgcagcagggggcaggggtgcgggatggagcggca

SEQ ID NO: 518441 - DNA, 76 bp, Homo sapiens
agaaccaaaggctattggatcagctcagcaggttgctgatgattcctctgatcatgtcagtactttatgtctgggc

SEQ ID NO: 518442 - DNA, 74 bp, Homo sapiens
ggccgcactgggaccccggaatcccgcgcgctgcccacgattcgcttctgagggagctgtcaccatgcctcact

SEQ ID NO: 518443 - DNA, 100 bp, Homo sapiens
gccacctgtgcccacccagaatcactgaagggtcagagcattttctctgtgccaccagagagtttcgtgtgcgatggagatcttataacaatttttgata

SEQ ID NO: 518444 - DNA, 74 bp, Homo sapiens
aggacaatcatgcccataagaactctaaactgttcagaggactattttaacaaagggaaaaatgagcctgagga

SEQ ID NO: 518445 - DNA, 75 bp, Homo sapiens
aactcctctctatagtcaactccttcaagcatataagtggtcaaacaaggtggtgaatttgcgagaagctgaacg

SEQ ID NO: 518446 - DNA, 51 bp, Homo sapiens
cctaatggcagtgccctgacagatgaaattgcatctgatggtctcaagggt

SEQ ID NO: 518447 - DNA, 50 bp, Homo sapiens
gggtgatcatgtatgagatgctcatcggcacagatgaggagagcatcctg

SEQ ID NO: 518448 - DNA, 50 bp, Homo sapiens
acgccctcaatctgctcttttgggtgatgcaggttctgaatgctgatgcc

SEQ ID NO: 518449 - DNA, 101 bp, Homo sapiens
cacggagttcgggggatggcacagaatgggatgttcctcctgctgatcaagagaagctttttatccagaagttacgtcagtgttgcgtcctctttgacttt

SEQ ID NO: 518450 - DNA, 98 bp, Homo sapiens
aatgagtctggaaaactgggccaaagcagtgaaacgctccatgaattggtccttgaatgggcaagagggcacatgaagtacggcgtcctccacattca

SEQ ID NO: 518451 - DNA, 50 bp, Homo sapiens
aaagaccctttgcacaaatcaagtcttctcattcacaggttaaggctacc

SEQ ID NO: 518452 - DNA, 140 bp, Homo sapiens
ctcctgcaagatactgagagattgaagcatgctctggaaatgttcccagaacattgcacgatgcctcctgccaaacatcatgtcaatggcaacagaacagtcgaacctttcccagagggaacacagatggctgtatttgg

SEQ ID NO: 518453 - DNA, 75 bp, Homo sapiens
cgccatgtcgggttattcgagtgaccgagaccgcggccgggaccgaggcttttcctggatgattccaaaatgaag

SEQ ID NO: 518454 - DNA, 84 bp, Homo sapiens
aaaccagtggtaaatgtcagctacaggccagcttatgaccagttgctggatttgtgcgactcggtgaaggatgatgcccggagg

SEQ ID NO: 518455 - DNA, 74 bp, Homo sapiens
atccgctttgacgtgatggtgaacggcaagtcttggacagtaaagcaccaaaaccagaagacattgatgaggaa

SEQ ID NO: 518456 - DNA, 90 bp, Homo sapiens
gctaatgtttaatgagggagaggagttcagtttagaagagatcaagcaggcaactggaatagacccgaccgcatgtctgtcatggacctc

SEQ ID NO: 518457 - DNA, 75 bp, Homo sapiens
ccggcaaatgctgcaggaactggtgaacgcaggatgcgaccagcaaactctggcctgttctattctgactgcgct

SEQ ID NO: 518458 - DNA, 101 bp, Homo sapiens
ttctgcagccactgcaccgacttcatctgagccctcatcctgcaagtctctcggaaacacctccctgagtggcccctccatccactgcccctctgctgcag

SEQ ID NO: 518459 - DNA, 75 bp, Homo sapiens
cgctcttgacagccaggtaccaggtaaaataccatgaagattttgaaaaaacaaaggggagaggctttactcccg

SEQ ID NO: 518460 - DNA, 75 bp, Homo sapiens
cagaggactttcttccagcttctgctgtccttctttgtggagagcaaggcagtataccttaaatggcaagaagga

SEQ ID NO: 518461 - DNA, 99 bp, Homo sapiens
ttggtttcaaggttaactacaaaggttaagtatacccaaggtggacttgaaaacctcgaactttcaagaaagtattttgcacaggcattgaaactgaac

SEQ ID NO: 518462 - DNA, 75 bp, Homo sapiens
taaagactgttgtgaacagggatgtacctaatttggtaagtcacatagaagagatgctccagacagcctacaaca

SEQ ID NO: 518463 - DNA, 83 bp, Homo sapiens
ctaaacttggcaccaagtatggttaatccctatatcctgaagaagaacatgatcctcatgacaaatcatttctatgcagcgat

SEQ ID NO: 518464 - DNA, 98 bp, Homo sapiens
atccttcacccatctgaagggaggaaatagtggcaggtgacagtctgcatgtgcagttttcagacatctttccaggaacagcgtgaggaggacagaag

SEQ ID NO: 518465 - DNA, 75 bp, Homo sapiens
ttgtctgcaaacagtggtatcgacttatcaaagaaattccagtgtagaagttggcataagtagccaggaaaagat

SEQ ID NO: 518466 - DNA, 100 bp, Homo sapiens
aagtgaagaaggcgcatcactcccagctgcgcaaagcttgcgaggtggcgttaggtagcagttttacaacatcatcaggaatatatacaggaaataattc

SEQ ID NO: 518467 - DNA, 112 bp, Homo sapiens
gctcggagaaacaggcgccgcgggctccgcgcccggccggacccgggcccgagggtttccaggcctgaggtgcccgccctggccccaggagaatgaaccagccgcagaggat

SEQ ID NO: 518468 - DNA, 82 bp, Homo sapiens
ctcactttcggcggagggaccaaggtggagatcaaaccaatggctgccatccggaagaaactggtgattgttggtgatggag

SEQ ID NO: 518469 - DNA, 100 bp, Homo sapiens
gcggccgccgcggccaccgaagccaccgcggccacggagaagggcgagaagaagaaggaggaaacttttgagaagaactttgaaagagaaacccataaaa

SEQ ID NO: 518470 - DNA, 90 bp, Homo sapiens
tgctgtactttatatgatatgcttgcttctattaaaagtggtgatgaacttcaggatgaggagtgggaatagctttgcgaaaaatgggcg

SEQ ID NO: 518471 - DNA, 51 bp, Homo sapiens
gcaacttctggatgaaacttctgcagcaaaatttggtttctctaatattac

SEQ ID NO: 518472 - DNA, 88 bp, Homo sapiens
gctgcgctcgcgcccggatccctcaggttttggctacgggcctccacctccaccgccagatcagtttgcccctccgggggttcctcct

SEQ ID NO: 518473 - DNA, 90 bp, Homo sapiens
ccgaacttcagggtttccaccgttcgttcaagcattttgaaagcgaagcagaagccgtagaatcagcggcgagcctgttgaaagaaccca

SEQ ID NO: 518474 - DNA, 100 bp, Homo sapiens
agggggagctcagagtgacccaaattctcaaagaaaagtttccacgagctacagctataaaagtcactgacatttcaggcggcagagtacaacatctttg

SEQ ID NO: 518475 - DNA, 100 bp, Homo sapiens
cgtgctggagagaccccgcggctgggcgttcatctaccacgctttcgtagttttccagaaaaagaccttctgcactgtccatctaaggatgcaattgaag

SEQ ID NO: 518476 - DNA, 80 bp, Homo sapiens
gggaggtgttcgagaacgaccccgagacggtgtttcccattaaacactaccaggacaaaatcaggccttacatccagctg

SEQ ID NO: 518477 - DNA, 83 bp, Homo sapiens
tagtgtcatcggttcggtaaagtttctgttctctggggttgtagaaggtgatttagctgccatagaagcatacaagtcatcag

SEQ ID NO: 518478 - DNA, 87 bp, Homo sapiens
atacaagattgattgctgctgctacttctgtatatctccacggtgaaagatccattcattgatatttcacttcctataatagaagaa

SEQ ID NO: 518479 - DNA, 101 bp, Homo sapiens
aaaacactatcccagggagtgcaagcttagagcgtctggccaagaatcagaggaagtgggacttatcaaactggtttcaaagcacagagctcaagtaattt

SEQ ID NO: 518480 - DNA, 74 bp, Homo sapiens
cctaagagaactatggcaacatcaggtgactgtcccagaagtgaatcgcaggattttctgccgtctcttggcaa

SEQ ID NO: 518481 - DNA, 75 bp, Homo sapiens
aggacctgggcaagaggaacagacacagggctgttgataatcaggtgtatgtggccacagcctctcctgcccggg

SEQ ID NO: 518482 - DNA, 83 bp, Homo sapiens
ttagaggaccactagttggaccccatcctcgtgctggaggaacagacaatgcagatcttcgtgaagactctgactggtaagac

SEQ ID NO: 518483 - DNA, 100 bp, Homo sapiens
aggcactcctaggggacataaaattagtgattactttgaggccatatgaaatggaggcaatttgtttatcagtctgagtctccagaactcctgaattttt

SEQ ID NO: 518484 - DNA, 76 bp, Homo sapiens
cagaaagagtcaacagcagtggcaacaggaatggaagttggatacactttgtgacttgtacgagacactgaccatt

SEQ ID NO: 518485 - DNA, 99 bp, Homo sapiens
attaccctctgatgtgaatgaagggaaaactgtttttatcaggtctcctaaaaacccagaacagaagatcattaagagagtgattgctcttgaaggaga

SEQ ID NO: 518486 - DNA, 100 bp, Homo sapiens
tttggagggaaagaaagagccctggactgtgaagagtgaggagaccatagctgcacagccagatggctgatcactgggaaactgcacctcgtcacatgat

SEQ ID NO: 518487 - DNA, 98 bp, Homo sapiens
ccctgaggctgcaccaagtggcgaaggagccggctccaaggagctgactgctgggcaggaacgtctctcaggagaaagagtggaagagaaaattgtga

SEQ ID NO: 518488 - DNA, 100 bp, Homo sapiens
acaatgaactgctagacctcccagatactatagttgcattaaaatcctcccctactgaaagaaacggaggccaggataactgtagagcagcaaatttcag

SEQ ID NO: 518489 - DNA, 100 bp, Homo sapiens
catgcccgagttcatggccaacctcaggctcaggtggcccgaggcagccgggatgacagctctccccaggaatcctgctgcctgctgagaaacatggtca

SEQ ID NO: 518490 - DNA, 74 bp, Homo sapiens
ccctggagaactacatcaccgctctgcaggctgttcctcctcggtcacccacaaaagctgtatataatgccaga

SEQ ID NO: 518491 - DNA, 121 bp, Homo sapiens
atctgtgtgctggccatcatcgtacccattcccaagtcccacgaggcggctgaagccgacgtagcttctctgaacagacgcatccagctggttgaggaagagttggatcgtgcccaggagc

SEQ ID NO: 518492 - DNA, 100 bp, Homo sapiens
tgaccacaggcaacgagagcctggacatcaccatcgtcaggcacctccagtactgcacccaactcgtgcaggttttagtattaaagcagtgccattccag

SEQ ID NO: 518493 - DNA, 100 bp, Homo sapiens
gtgtcgtttttccttgagctgaacgtcttgcaacagtggccgcacgcataggaagggcccagcctcacctacgagacctgcagccccccgaccagctgag

SEQ ID NO: 518494 - DNA, 100 bp, Homo sapiens
gccttgaggcagaacccagatccgaaatacccctgcaagaacagaattatctggtacactggctttctcaaaggactattgcaagtctttgcacacatag

SEQ ID NO: 518495 - DNA, 100 bp, Homo sapiens
cggaccgggcctccggaggcaggttcggctggaaggaaccgctctcgcttcgtcctacacttgcgcaaatgtctccgggaatctggaaacatcaaagctg

SEQ ID NO: 518496 - DNA, 100 bp, Homo sapiens
tctttggagaacttctggagctggccaacgtgcaggagggtgatcagcccatgacctaaacctccagacaaaataaaacggaaaatttgctagaatcaag

SEQ ID NO: 518497 - DNA, 75 bp, Homo sapiens
tcaacatcctcctggccaccgactcctacaagtttcactgttacatgccttgaagtgatgaggaggtttctgtta

SEQ ID NO: 518498 - DNA, 51 bp, Homo sapiens
caccgctctggccagggtgcttttggaaaccaccctcagcgtgcctttccc

SEQ ID NO: 518499 - DNA, 98 bp, Homo sapiens
ctgaagtcagttgttgcatcaaatacttcatatttggcttcaatgtcatattttggtggctgacaagattttgaaaaagaaagaataccctctttata

SEQ ID NO: 518500 - DNA, 101 bp, Homo sapiens
acttctcagcctccagaactctcaaagcttggattctgccgtgccactcacgaatggcgacacagaagacgatgctgacaaaatgcacgttgatagggagt

SEQ ID NO: 518501 - DNA, 75 bp, Homo sapiens
gggcaccaccctccatgcctttgcagggaaatgtttcaacgtgcgcaagcgttgcggcggcgggcagaggactac

SEQ ID NO: 518502 - DNA, 80 bp, Homo sapiens
ccgcttcgatcgcctcgcgccggctgctctttccgggtcaaaatgcagatcttcgtgaaaacccttaccggcaagaccat

SEQ ID NO: 518503 - DNA, 88 bp, Homo sapiens
tcagcctcctgagtagctgggattacaggtctggaggctcgtcaccaacttcctcttcttcgggcccctgggattcagcttcttcttc

SEQ ID NO: 518504 - DNA, 75 bp, Homo sapiens
gtggaataggtgtatcaagtaatggtgcaaagcctgaagtcatatataccagaagttctgagattgaagagctga

SEQ ID NO: 518505 - DNA, 98 bp, Homo sapiens
gatttacaaactggccaagaagggccttactccttcacagatcgccccgtcgcagaatttagtctcaaaggaaacttcaaccacagcactgcaggcct

SEQ ID NO: 518506 - DNA, 100 bp, Homo sapiens
cggattccagggaagttatacgtaatgatcattttatagaaatcactgatgaccagtttgactttcatacatactgtatgaggaagattacccttagatc

SEQ ID NO: 518507 - DNA, 83 bp, Homo sapiens
tgtcctccgggacggagatggagccgtggtccttcccaatgaggagccagcaccgctctttgaccttgccatgcttgccttag

SEQ ID NO: 518508 - DNA, 104 bp, Homo sapiens
ggccccgagccccgtggatccgctggagcggagccggccgtacgcggtgctgcgagggcagaacctgggatctgtgccagttcagaagcaggcgagcctcttcc

SEQ ID NO: 518509 - DNA, 100 bp, Homo sapiens
gcaccccagtcagaaacgggaccctgaagctgggatttagaattcagcttagagaactatcaacacaggacaatgcaagcccatgagctgttccggtatt

SEQ ID NO: 518510 - DNA, 80 bp, Homo sapiens
gctacaacctgaagagtccggcccaagaagatgaaaggattgttcttgttgacaacaaatgtaagtgtgcccggattact

SEQ ID NO: 518511 - DNA, 114 bp, Homo sapiens
cattggatttaaaagacagtcctcgtcagcactgactttcagctatggaatcgagtctctggtaagaagagtgaaagcaaagaagccaagaagtctgaagaaccaagaattcgg

SEQ ID NO: 518512 - DNA, 90 bp, Homo sapiens
tgaaaatgattttgaagttattggaagataaaaatggagaggtacagaatttagctgtcaaatggatacatcattcactctttggggacg

SEQ ID NO: 518513 - DNA, 100 bp, Homo sapiens
aaggtgtacttgcaagaaacctcaggacttgagtaacagcaacatggtacatcaggaacgtctctatcaagaatacaatttcagcaaggctgagggccat

SEQ ID NO: 518514 - DNA, 82 bp, Homo sapiens
aggaaggcccagccttcgcggcccgccagcccgcggcgccatggctcacgtcggctcccgcaagcgctcgaggagtcgcagc

SEQ ID NO: 518515 - DNA, 97 bp, Homo sapiens
ctcatgttctgggacttaggagggcaggaagagctgcagtctttgtgggacaaggactggactcgggccatatccgtggtgccgtcaacatgccttt

SEQ ID NO: 518516 - DNA, 75 bp, Homo sapiens
ggagaacatccgctgcctgcaggactgccgcgagtgcactggaggcatgttctcacaataccttcatgaaaatgc

SEQ ID NO: 518517 - DNA, 82 bp, Homo sapiens
atcaaaaatagtgatagctttgataatgacttttttgaacgaaccattctgtgcaacagccttgtgtggagttgtgctgtga

SEQ ID NO: 518518 - DNA, 100 bp, Homo sapiens
cgttccgctgttctgggaacagccagggcttcaggataaagggaagtggaggctggacactcactcggcgaatagaagacctgtgggaacttcatccgtc

SEQ ID NO: 518519 - DNA, 82 bp, Homo sapiens
gtcagagcccgccagaccttcctctgaaggcaaagtgacctgtgacaatgcagatcttcgtgaagactctgactggtaagac

SEQ ID NO: 518520 - DNA, 75 bp, Homo sapiens
atttcgatattgaagtgtcaaaatccatagatggaaaagatggagccatgtggctagaaatcctcctcacttcag

SEQ ID NO: 518521 - DNA, 100 bp, Homo sapiens
cgcagcccacgctcatgatcgacttcctcacccgcgcctgcgacctcggggccaccaaggacatggggaagatgctggggggtgacgaggagaaggaccc

SEQ ID NO: 518522 - DNA, 108 bp, Homo sapiens
gtctggagtaaacaacagaagaactgagctatttttgaaagaacatgaccaccttcgaaaacaaaagactgcatgctggcgaatggcaaactggatgaggattacgag

SEQ ID NO: 518523 - DNA, 82 bp, Homo sapiens
tcagtcgatcagccgaaatcatgctgtgttaactgctaacttttctgtaaccaacctgtctgaccagtgcacaggacttcag

SEQ ID NO: 518524 - DNA, 98 bp, Homo sapiens
gccgagctgacctgcctcaacgaggcctcggtcctgcacaacctccgggagcggtactactccggcctcatctactaatccagtccctcatagcactg

SEQ ID NO: 518525 - DNA, 82 bp, Homo sapiens
gttggttcagactcgctcagccttaaacttgcaaaaataattctagcaggaactctaatgatccaggacaaagaagttaccc

SEQ ID NO: 518526 - DNA, 100 bp, Homo sapiens
tttgttcacctgattgaaattggaaatggtcttgtcacctttcaacttcgaggactggaattccgagtgccctgtactctgtggggatgacggcagtggg

SEQ ID NO: 518527 - DNA, 75 bp, Homo sapiens
cggagaccccgcgccgacggctgctcaaacatcagggattactacagcatcccatttcccacacccactactccg

SEQ ID NO: 518528 - DNA, 98 bp, Homo sapiens
cgcagagacttctactggctgcgctcctttctggccggaggcctccggtgtggctgtctctgatggtgtcatcaaggtgttcaacgacatgaaggtgc

SEQ ID NO: 518529 - DNA, 83 bp, Homo sapiens
ccacagcaggggaagactgaggtgaccccggccgctcaggcttgggcactgtttaaaggaaagttccgagaaggcatcgacaa

SEQ ID NO: 518530 - DNA, 100 bp, Homo sapiens
tgtgatggcccggggaattgatattcctgaagtcaactgggttttgcagtatgaccctcccagcaatgcaagtgagaaagatcagtctaaagaaaaggag

SEQ ID NO: 518531 - DNA, 74 bp, Homo sapiens
gaaccaaggttctacactgcccctcagctataggtaactaggatttctacctcaaccgcgagacctatgcaagg

SEQ ID NO: 518532 - DNA, 74 bp, Homo sapiens
gcagactacatggcatctaccataggggaattccgatgctgaagatcgtgtttgcaggccatgagcatctctct

SEQ ID NO: 518533 - DNA, 75 bp, Homo sapiens
caggacttgacgttcctgacgaagcaggagatcctcctatcctgaaggacacagccctgcagaaagtgaagcgtg

SEQ ID NO: 518534 - DNA, 98 bp, Homo sapiens
cggaagagtggattatttggtcactgaggaagagatcaatcttaccagagggccctcagaaagtggtggagagagagctggatgctcttttggaacag

SEQ ID NO: 518535 - DNA, 100 bp, Homo sapiens
cggcaggggggccggcacatccaggccatcaggtgctggactatatggaagtacatgaaggactatttccccatctcgaacacagatatgtagaactctt

SEQ ID NO: 518536 - DNA, 75 bp, Homo sapiens
ttttggcctaccctccaaagaaaagtgggtaattccagaattgattggccataccattgtcactgtattactgct

SEQ ID NO: 518537 - DNA, 98 bp, Homo sapiens
caaaattggggacaaaaacaaagtcactatttgggacttggcagaaggtgaagtggagctggaggagtactacccggccttcctggacatggtgcgga

SEQ ID NO: 518538 - DNA, 75 bp, Homo sapiens
aagaaagctgctgttatcatcatggctgtagagcttggacagcttttagcagctacatgcaaagaacttccaggc

SEQ ID NO: 518539 - DNA, 88 bp, Homo sapiens
aagtcgcaacatccagtttgaggcctttcacgtttttaaggttcgtgctggccgtgggcagcgccgtctttgatgccatgttcaacgg

SEQ ID NO: 518540 - DNA, 90 bp, Homo sapiens
tgaggacaaacagaagattctggacaagtgtaatgaaattatcaactggcttgataagaatcaggaaggaggctgcagtgtgccagtagc

SEQ ID NO: 518541 - DNA, 100 bp, Homo sapiens
taaaagacagtcctcgtcagcactgactttcagctatggaatcggactctccttcagcaactccagaagcttcagactttggtgatgggcaaggtttctc

SEQ ID NO: 518542 - DNA, 75 bp, Homo sapiens
gcgcggcagagtccccgtacgcctacagtaacggactcgctcagcagcagcctgaaaacttgctacaagtatctc

SEQ ID NO: 518543 - DNA, 101 bp, Homo sapiens
tcaccttgtcaccaatttcctgcccgggatcccagagctacccttcttggagcccacagggtacactcagaagaagccttgtttttactggcaacctgtta

SEQ ID NO: 518544 - DNA, 100 bp, Homo sapiens
tatccaccatgtgggaggaggaaaatcatcttatcagacgaaggcaaaatgtatggtggagtgtgttactcttggggctggaatgagcatggcatgtgcg

SEQ ID NO: 518545 - DNA, 98 bp, Homo sapiens
cgcccaggagaggctgcgagccctcttttccatgggggctgcagatggcaggattttcataatatatgtagtatgagttccacatcttggcctcttac

SEQ ID NO: 518546 - DNA, 100 bp, Homo sapiens
atatgcactggattactggtcaaaaggtcaactaaaagcattgtttctagaacatgaggtgtaatctagctcctgtggtggagtttgctgcagatgtggg

SEQ ID NO: 518547 - DNA, 88 bp, Homo sapiens
aacatcacgcccttcggcgccgaccaggtggcggctttgaaatacatcccatctgtcctgcatgatgtagaaatggtctttgatgcga

SEQ ID NO: 518548 - DNA, 100 bp, Homo sapiens
cgctccggggcttctgcagcgccgatggctccgacccgctctggccttatgtttgatcatcggccaaggtcctggcgagaactgcctctgcggctagctg

SEQ ID NO: 518549 - DNA, 73 bp, Homo sapiens
tgttcagcacttctttcagcgatatgaagttaaatccagctgcatatctatgtgagactgaattttcctctta

SEQ ID NO: 518550 - DNA, 83 bp, Homo sapiens
gtcaaatgtctagaaagggatgataagagccttcacgtaaatgggtccagtcatgcctcccagtaagaagccagaaagctcag

SEQ ID NO: 518551 - DNA, 88 bp, Homo sapiens
agccgcgaaccgagcgggcggcgggcgcgcgcaccatgggggagaaacccgggaccagggagtgcctgcagggcaccatccgcaacag

SEQ ID NO: 518552 - DNA, 75 bp, Homo sapiens
agctgctcctttggttgaatccccaggcccttgttggggcacaaggtggcagggagatatacttcccaattcatc

SEQ ID NO: 518553 - DNA, 75 bp, Homo sapiens
cgagtccggaggggctgccgcgggagcatcctgaggttagcattacacttctcccagtggagcccatgacttctg

SEQ ID NO: 518554 - DNA, 75 bp, Homo sapiens
gccgtctcgctctgggtctccaggcccgcgaccgtccgccagtcgtcccgaggaatactcccccagttgcaagag

SEQ ID NO: 518555 - DNA, 75 bp, Homo sapiens
gggacaaagtgctcttctatggccggaagattatgcggaaggagtctgccgtgcacccgagggagattttcaagc

SEQ ID NO: 518556 - DNA, 98 bp, Homo sapiens
aaaagccaagaggaggacagttcgctacacagcaatgcatcgagagacgagttctcgccatattggccaggctgatctcaaactcctgggctcaagta

SEQ ID NO: 518557 - DNA, 80 bp, Homo sapiens
tgctgcaccgacctcgacgtcttgcctgtgtcccacttgttcgcggcctatagcacatgattaagtaccggtacatcccg

SEQ ID NO: 518558 - DNA, 100 bp, Homo sapiens
agtgggcgcagaagcgttgtcactgcagcaactgctggttcagaagcagggattgtcgatcagtcacaacaagcataccaagaagcttttgaaatcagca

SEQ ID NO: 518559 - DNA, 98 bp, Homo sapiens
gctcctccagctaccggcccaaggccatctacctggacatcgatggacgcattcagaaggctactgcagcactggggtgtcagttgttggtccgaccc

SEQ ID NO: 518560 - DNA, 98 bp, Homo sapiens
agactcatgcctggctctgtggaaaaggcagcggaggaggaaatggcaggtcctaatcaactctgcattcgccgctggactaccaagcatgtagctgt

SEQ ID NO: 518561 - DNA, 100 bp, Homo sapiens
gacttcaggaagagaggaactccgcaccgtttgatcaggattcccaggtgtgactttgcagttcctggtccagaactttacacagaaaaggtgctcaaag

SEQ ID NO: 518562 - DNA, 83 bp, Homo sapiens
agaaggacccacggcgtctgttcgaaggatgaccgagtgggagacagcagcaccagcggtggcagagaccccagacatcaagc

SEQ ID NO: 518563 - DNA, 109 bp, Homo sapiens
tgacttctgccttcaagctggatttcctcccggacatgatggtcgagggccgcctgctcgttcctgacagaatacagcccacctgaggatattgaccataaggactcat

SEQ ID NO: 518564 - DNA, 100 bp, Homo sapiens
cttcatacttaccttggtggagtgaagttggtagctggcagtgttgtgatggcttttgaagaagtatgcccggacagaatagatctgattcataaaaatt

SEQ ID NO: 518565 - DNA, 100 bp, Homo sapiens
cgagcggcgagccggagcgcggagcccggctcccgcaccatggaggaggacgacagctacgaccagagtgaactccgagcaggaacacttcctcattgtc

SEQ ID NO: 518566 - DNA, 82 bp, Homo sapiens
gcgcccagcggattctacattgcctccggaggtgagaagccctaccactgcaactgggacggctgcggctggaagtttgcgc

SEQ ID NO: 518567 - DNA, 75 bp, Homo sapiens
tccacaaggtgaaggaggagatcatcgacggccggagcatctcaggggctacacgctttgctggaggaacggatt

SEQ ID NO: 518568 - DNA, 75 bp, Homo sapiens
gcaaactgatcccactcatttttgaagtaactctgtactatactggcaattgctggagaagattttgcaattgtt

SEQ ID NO: 518569 - DNA, 76 bp, Homo sapiens
gagtgagagatggaacccgaagaagaaaggattcgttacagccagagattgtgcagggagactgaccctagacaaa

SEQ ID NO: 518570 - DNA, 102 bp, Homo sapiens
gattgcaactttgagtcagacctgtaggcctgatagactgattaaaccacagatattctcccaggagtacatcaacctcctgctgtccatgtatttcttcgt

SEQ ID NO: 518571 - DNA, 78 bp, Homo sapiens
gtggaggtggtgtccccactgagctcttggaagagaggtgctggagaatctggtaaaagcaccattgtgaagcagatg

SEQ ID NO: 518572 - DNA, 83 bp, Homo sapiens
cgagcaggctgagcgatacgacgagcttccctgggtgcatctccagggtgtgcaggacggggacttggaggccgacacagagc

SEQ ID NO: 518573 - DNA, 50 bp, Homo sapiens
cttttggatcgtatccacaatcctgggggaacacacctgaaactagagga

SEQ ID NO: 518574 - DNA, 100 bp, Homo sapiens
gttgaattttcagggcggatttgtgaatctcacatttaccaaggaatactcccccagttgcaagaggcgcaggaccgtggaagacttcaacaaattctgc

SEQ ID NO: 518575 - DNA, 100 bp, Homo sapiens
ccctgctgttcctgccatcacggtacctcatggcagggccaggttccagcagtgaggaggatgaggcctctcacagcggtggcagcggagatgaagcccc

SEQ ID NO: 518576 - DNA, 97 bp, Homo sapiens
caaccgggccgtgccccagatgcccaccgggatggagaaggaggaggaatcgacttaattcagtgcacaaatgagatgaatgtgaacatcccacagt

SEQ ID NO: 518577 - DNA, 98 bp, Homo sapiens
tctacgctgcggggatgcagcccgcaccctggggccccgggttcccgtgtcagtggctatgatgacacctcaagttatcactccccagcaaatgcagc

SEQ ID NO: 518578 - DNA, 75 bp, Homo sapiens
ctccatcatcacatgaccaaagcattcctcttctatggtgacttaagagattaaaattaatttggttgctgttgg

SEQ ID NO: 518579 - DNA, 75 bp, Homo sapiens
cgaggatgcaccttcccctgccttggaaagatctctcgcatggatccccacagatggtacggagggatatcgggc

SEQ ID NO: 518580 - DNA, 82 bp, Homo sapiens
ttcgggcagatcttccggccggacaacttcgttttcggcaccatgactcctgtgaggatgcagcactccctggcaggtcaga

SEQ ID NO: 518581 - DNA, 99 bp, Homo sapiens
gctcgctgggagagaggtacctctccttttccctctccctttccctaaggatgctgatatgctaactggtgatgagcaagtatggaaggaagttcaaga

SEQ ID NO: 518582 - DNA, 100 bp, Homo sapiens
ctatggaatgtaagaccccgactcttcctggtgaagcatctgatgcacgttccatccggcgctcagctgggcttgagctatgtttccagtgtcctctggg

SEQ ID NO: 518583 - DNA, 100 bp, Homo sapiens
cagaagaagtcacaagacaagggtcctaaaacaggatcagtaaagaaggaaaaagcagtaaagccagaggaagaaaacccgcctagtgccaagcaaccct

SEQ ID NO: 518584 - DNA, 50 bp, Homo sapiens
tggacatcgatggacgcattcagaaggagttaacactgcttggaaaacca

SEQ ID NO: 518585 - DNA, 103 bp, Homo sapiens
gaagtttcttgcaaaccacactaacatattactggcatcttcaatctgatacctgtttccgaagtttacactgtgctggactgagtttgtagacatgaaggtc

SEQ ID NO: 518586 - DNA, 100 bp, Homo sapiens
aggattccaagtaactcttatttgataacaacgaacttgatgcaagtgataggtttgccaaggtcagacctctcatcatccggatgaactgcaatttcca

SEQ ID NO: 518587 - DNA, 100 bp, Homo sapiens
attctccacaagcggagacacgggaagcacgcgaggctgcccggagtccggataagccgggcgggagcccctcggccagctttaccactcctgaaggccc

SEQ ID NO: 518588 - DNA, 100 bp, Homo sapiens
ccactcgagcgccgacatgctgggcaggggtgcagccaggcgggatttcagaagttgattgcaaagatgcactggaaatgatctgtaacttagaatctga

SEQ ID NO: 518589 - DNA, 80 bp, Homo sapiens
gcaaggaccccaaagagtgctgcaagttcatgtgtctggacccagcaggatcaggcaaaaatgatcatgccgaaaaagtg

SEQ ID NO: 518590 - DNA, 100 bp, Homo sapiens
ggcagacgggcgtcttctacctgacgctcgtcctcatcctggtcactagcggactcttcttcgccttcgaaacaagtttgccttctcctatgttttccag

SEQ ID NO: 518591 - DNA, 107 bp, Homo sapiens
tgggctcagagcaaggatgcgtgaaattgtccatattcagattggccagtgtggcaaccagatcggagccaagggccaagaccagcttcaagtctccatggtaccag

SEQ ID NO: 518592 - DNA, 50 bp, Homo sapiens
tgaatgagcgttccagcttctccataatggagtgaagaaagtgaagtgtt

SEQ ID NO: 518593 - DNA, 75 bp, Homo sapiens
gacggggaccagcagctgtcgccgccgctctcagatgcatttttgtagaagcattttgaggatgaatgtttgcaa

SEQ ID NO: 518594 - DNA, 90 bp, Homo sapiens
gagacactggcattggaacttcctgttctgatagcgtggaagaggctgacccgcggctgattgagtccctctcccagatgctgtccatgg

SEQ ID NO: 518595 - DNA, 90 bp, Homo sapiens
ctcaaatatgcagcaaagattacaccaagatctgtgctgaccacaggaattggatctactagtgcaggacattagctgtcagcacgcagc

SEQ ID NO: 518596 - DNA, 100 bp, Homo sapiens
gatcaaaggataaacttgaccaggtttccagtgaaataaattgttgatccatttcagatacttgtggcagcaaacaaagcagttcacctctacaaactgg

SEQ ID NO: 518597 - DNA, 98 bp, Homo sapiens
cagagccccatattcgagccccgtggaatcccgcggcccccagccagagccagcatgcagaacaggaccctccattttccatatccaggaaaatgtga

SEQ ID NO: 518598 - DNA, 97 bp, Homo sapiens
gttcccggcttccggggagatgaaggacccataggccaccaggggccgattggccaagaagggatacccacccaccatcccagggtctacaacatcc

SEQ ID NO: 518599 - DNA, 100 bp, Homo sapiens
tctccagcctgctgcgcaggataaaaggcaaactcttcacctggcataagatgcacatttttctgctctggagccgggaatgaaatattcttgagttctt

SEQ ID NO: 518600 - DNA, 95 bp, Homo sapiens
cagtgctagatggagatagatatatgtagagagagcaacatgtgggggagtggtactaaggatcaagtatactgttaaaagaaaacaaaaaccca

SEQ ID NO: 518601 - DNA, 75 bp, Homo sapiens
cgtctcggtagcagccttcgccacgccggggtcttcagttgtgaaatagggagtgtttcccttcttaatcataaa

SEQ ID NO: 518602 - DNA, 98 bp, Homo sapiens
gggcgcccggccggctgcggtccgtgcggaggctgagccggccgcgggcgcgaccggaggcagaatgaaatgaatgatgtgcctttctttgatatcca

SEQ ID NO: 518603 - DNA, 98 bp, Homo sapiens
gcggacaaaacgccaggcggatctcagaaggccagttcaaagatttggagcaagaggtggtggtggccttcccccgaagaaatttggtaatcctgggg

SEQ ID NO: 518604 - DNA, 80 bp, Homo sapiens
cacaggaagacctgcaccactgtcgccttcacacaggtgaactcggatcatagacggtatttctatgtaaacgaacagtc

SEQ ID NO: 518605 - DNA, 88 bp, Homo sapiens
agttgcaaacaaatgtcagatcccagtggttcagcactgagtcatgcttgcttctgctacgcactgatttgttctattccagttttca

SEQ ID NO: 518606 - DNA, 75 bp, Homo sapiens
ctgcatgttacctacttggtgtctggcagtctcattcagaatggacattccagcttctaccgagtcttcccccac

SEQ ID NO: 518607 - DNA, 74 bp, Homo sapiens
tggaaacaccatggctgcggcggcccagctctctctgacacaggacgagcctgtggagtgggagacacctgacc

SEQ ID NO: 518608 - DNA, 100 bp, Homo sapiens
atgtcaaatactttgcacaggaagctataagtgttccctgacatcgtggagttctgcgaggccatggccaacgccgggaagaccgtaattgtggctgcac

SEQ ID NO: 518609 - DNA, 75 bp, Homo sapiens
actccctggaaacctagaaatgtgatttgccttcaaggaaactggggagtcagaaaattgggaactcatatcaac

SEQ ID NO: 518610 - DNA, 74 bp, Homo sapiens
ctttggcaaagctggggattggccagctgactgctcaggaagtaaaatcggagagaagatgactgaggaggagg

SEQ ID NO: 518611 - DNA, 98 bp, Homo sapiens
cgaaaggcagccgcggatcgccgcgctcagcgacaaacaaatatggctcgtggacagcagaaaattcagtctcagcagaaaaatgccaaaaagcaagc

SEQ ID NO: 518612 - DNA, 75 bp, Homo sapiens
caaagaccccccagtacaaggccagcctgcaggagctgctgggccaggagaaggaccctgatgcttggtgtgacc

SEQ ID NO: 518613 - DNA, 75 bp, Homo sapiens
caacaagctgtaccaggacgaaaaggcaaaataatcctatggtgaaaaaaatcaacaagataatctctgcttgag

SEQ ID NO: 518614 - DNA, 87 bp, Homo sapiens
ggatgttggcggtccctgtgacctgtggagacacggccagatctgccctccactgaagtgagtagtgaatatagtatggacaaggca

SEQ ID NO: 518615 - DNA, 82 bp, Homo sapiens
ccgggccgtgctgcttatggcggcgctggagagggggcgctgagctgttggggtttttagaacttcagccataaaaatgggc

SEQ ID NO: 518616 - DNA, 50 bp, Homo sapiens
cggtgatgccacagccggctccatccctgtcccaaagatgccctccgagc

SEQ ID NO: 518617 - DNA, 82 bp, Homo sapiens
ggtgcggcgggtcctggccgaaggcacctcggaactgaacccattctccgacccccgccagtttgaccgctccttccccacg

SEQ ID NO: 518618 - DNA, 90 bp, Homo sapiens
tgaacatgaatgaccacggctttgtggtgcgtgctctggaggaggccaacgccgacctggaagtgaagatccgtgactggtaccagaggc

SEQ ID NO: 518619 - DNA, 99 bp, Homo sapiens
gaatgggcggatctcatatcttcacttggcaaactcaacaagaccctctttcccagctgcccgctcctcagcacccgaagattcgcctgtacaacgcag

SEQ ID NO: 518620 - DNA, 73 bp, Homo sapiens
tcctgctcctgctcatggacgacatcccgcccaatgacccccgcatcaagaaccaagccgactgcatcccgtt

SEQ ID NO: 518621 - DNA, 75 bp, Homo sapiens
aactttggccctgcgcctcgtccagcctaggttccacccttttctgggaacataacggaggagatgatggatcag

SEQ ID NO: 518622 - DNA, 100 bp, Homo sapiens
ccatcctcgtgctggaggaacagggccaattcctgtccccccagcagcatggcatcgtgtgctgaaccctctgagccctctgccccactgcccgccgggg

SEQ ID NO: 518623 - DNA, 50 bp, Homo sapiens
ggaagctgtttacccggattgggtttgcagtacccgaagccctgagcaca

SEQ ID NO: 518624 - DNA, 73 bp, Homo sapiens
tttttggacctgaaacagaaattctggaacacctatatgagccaacacagatctatagatttcttcgaactcg

SEQ ID NO: 518625 - DNA, 100 bp, Homo sapiens
ctaccttgcgagccgtcttccccaggcctgcgtccgagtctccgccgctgcgggcccgctccgacgcggaagggaaagaatcatgtgatgtacagcttta

SEQ ID NO: 518626 - DNA, 83 bp, Homo sapiens
cgggagggagactgttgttcccggagatgcggcgcgcaggtgctggagaatctggtaaaagcaccattgtgaagcagatgagg

SEQ ID NO: 518627 - DNA, 100 bp, Homo sapiens
aaaacttgttgctgcaagtcaagctgccttaggcttataacatcacatttaaaagcatctcagccgtcccctctcccaggctgtgtcattcagcaccccc

SEQ ID NO: 518628 - DNA, 100 bp, Homo sapiens
tacaagatttaacctgtcatcaagacctgggattttggtgtgtcaaatcaacagtgccttgacatctttccacactgctttggaacttgcagtagaccag

SEQ ID NO: 518629 - DNA, 100 bp, Homo sapiens
ttccggtgtggaggctatgtagctggtgcgctgctcacggccattcactgcccatgctgagcgcctctcacacaggcttggagaaccccctgcctgagcg

SEQ ID NO: 518630 - DNA, 100 bp, Homo sapiens
tcacaacaagatcccgccgcggtggctgaactgtccccggcgcggccagccggtggcaggtgggccatgcacagacacagctcatgtctcattaatcaca

SEQ ID NO: 518631 - DNA, 75 bp, Homo sapiens
cgtggtccttctccatattcgaggttttaatataactgcaggagttgatgaagaaacaggatttgtttatggagg

SEQ ID NO: 518632 - DNA, 100 bp, Homo sapiens
cgtggatttggggatggctataatgggtatggaggaggacctggaggggctatctgatgggttagagtgcctttgagaagaaatcagtggatactggatt

SEQ ID NO: 518633 - DNA, 96 bp, Homo sapiens
acagcatggacagcgactgcgaggtgctgggaggatgaacatggtttcatctccagggagttccacaggaaataccggatcccagctgatgtagac

SEQ ID NO: 518634 - DNA, 89 bp, Homo sapiens
tgaggctgttgggccaggccagtcatgctagaacgcctagttccccgagagcgttcagacagtgggggctcaagctcagagccatttga

SEQ ID NO: 518635 - DNA, 75 bp, Homo sapiens
agcagccggtgtaaatgttgagcctttttggcctggcttgtttgcaaagctttctacaagttctgattaaagtca

SEQ ID NO: 518636 - DNA, 89 bp, Homo sapiens
cttggatcaccatggaaacagcaacgttctctatgggcagcaccgtttctatggaacccaaaaagtgactgcagatgagctgtggaaag

SEQ ID NO: 518637 - DNA, 90 bp, Homo sapiens
gtctccgagtccctcaactctctacgctttgcctccaagcaacagccaactcagtttataaatccagaaacacctggctatgttggattt

SEQ ID NO: 518638 - DNA, 80 bp, Homo sapiens
cagcaccgcacgccctgcaagggaggccagcgttaatgactgccattgatggaagacatgatgtttgtatccgtgtagaa

SEQ ID NO: 518639 - DNA, 95 bp, Homo sapiens
tgggtttatctcaaggcctgagtagccggtaacaaacgagggttcccgggattggaccgacgcagccatgatcaaagttttgacattccagacag

SEQ ID NO: 518640 - DNA, 75 bp, Homo sapiens
gagatgtggagttacgcagcaaaggtgctgaggaacctctaatcatctcccatggatttgtgatcagcgttgcag

SEQ ID NO: 518641 - DNA, 99 bp, Homo sapiens
agatgaccacactccaggaatgccagtgcatcttttgcacagctagagtgtgacgcaggaaaggaggcctcccaaacttgcctttatgtcaagaggtgt

SEQ ID NO: 518642 - DNA, 98 bp, Homo sapiens
cttggatcgtccactgggaccaactgccacaataccaactaaacagacaggatgcaccacatctagtaaaggtgctggagaatctggtaaaagcacca

SEQ ID NO: 518643 - DNA, 101 bp, Homo sapiens
gcttctcaacttacagatgggacttcacctatagatcatatggactagaggcttttaccagatttcttaaaactgaattcagtgaagaaaatattgaattt

SEQ ID NO: 518644 - DNA, 100 bp, Homo sapiens
tcatcacggacgagaactggagagaactgctggaaggagactggatgatagaattcaacttgtactggacagactggaatagagaagctcctaaaattga

SEQ ID NO: 518645 - DNA, 75 bp, Homo sapiens
attccttacccagtgaagaatctacagctgctttacaggtcccccagcctcctgccaccatcattcagcagctcc

SEQ ID NO: 518646 - DNA, 90 bp, Homo sapiens
agcagcaccaaatccaagatggcggccagcaggaggctgatgaaggcctgtctcctccctcctacacatttccagctcctgctgcagtta

SEQ ID NO: 518647 - DNA, 50 bp, Homo sapiens
tgcacccagaggaccaggcggcgggaaacctcaaatgaattctgaagggg

SEQ ID NO: 518648 - DNA, 126 bp, Homo sapiens
ctttcattgtcttttccgcccgcttcgatcgcctcgcgccggctgctctttccgggtttggtgcacctcgatttggaggaagtagggcagggcccttatctggaaagaagtttggaaaccctgggg

SEQ ID NO: 518649 - DNA, 100 bp, Homo sapiens
tctggctctgaaggcgaacgcttcgctggccatttaggagctctgctcaaagccagacggtgtaatcctgagagattcacatggtgttgcacaagtacgt

SEQ ID NO: 518650 - DNA, 90 bp, Homo sapiens
gctgcacctctacctgtggctctttctgctgggcctgcccttcaccctctacatggtgctggagaatctggtaaaagcaccattgtgaag

SEQ ID NO: 518651 - DNA, 75 bp, Homo sapiens
ggccgcggagcgccagctcaatgaatacggcaagaagaagctgaaatacctgccctacaatcaccagcacgaata

SEQ ID NO: 518652 - DNA, 75 bp, Homo sapiens
cgctctcgtctggtttgatcacaagacgggcaagggccgtgcaggcctgcccagctgccagcggtggcccccata

SEQ ID NO: 518653 - DNA, 98 bp, Homo sapiens
aacttaaagacaggtatcctcggaaacggtttgtggctggagtaggagcaaacagcaaaatagcctaacatggcagaccagagacagcgctcactgtc

SEQ ID NO: 518654 - DNA, 118 bp, Homo sapiens
cccagcaggccgagggaggaagtagcgtggagccggtgccgagccggggcgaagctggatcccctaggcccagattgccttcctgcagggagaaaggaagggccaagaaaatttgaag

SEQ ID NO: 518655 - DNA, 83 bp, Homo sapiens
gccgctctgggatcccggccaccagcaattgtccggccccttcccagctgcctgcctgccctagccagctcccaggtgaagag

SEQ ID NO: 518656 - DNA, 90 bp, Homo sapiens
gttcagtgtttttctattcatgattggacatgtcctagacatcacttagaggagaagccgtacaagtgctcagagtgcagcaaggccttc

SEQ ID NO: 518657 - DNA, 50 bp, Homo sapiens
aaggaatatgtttttgctgactccaaaatgtggacgagtgcagctccggg

SEQ ID NO: 518658 - DNA, 50 bp, Homo sapiens
tatgtacctgttaccactttcaaaaagacggggtttcgccatgttggcca

SEQ ID NO: 518659 - DNA, 101 bp, Homo sapiens
cgagactgcagagggagtagtgcgatcctgcgcgcgggggaactagctggagggcaaggcgggaacacacatccacgacagcgatggcagttccagcagca

SEQ ID NO: 518660 - DNA, 89 bp, Homo sapiens
ggagcaggagctggcgtctctggagaaagttaaacacagtgggaatatcacttttgatgagattgtcaacattgctcgacagatgcggc

SEQ ID NO: 518661 - DNA, 100 bp, Homo sapiens
gttgcccagggaggaagaagaagaggaggaggacgatgacgaggaggaaaaggcccctgtgacctgaagcgcaacaggaaaggagagaagaatggcaagg

SEQ ID NO: 518662 - DNA, 50 bp, Homo sapiens
ttcgacatcctggccgtgctgcaggtattagaaaactactcggatgctcc

SEQ ID NO: 518663 - DNA, 100 bp, Homo sapiens
atgaaatgatgtccccaaggactaggccacgcagatcctgtccctggaggctgtaatttggagttcgatttagatattgatcccaacatttacttggagt

SEQ ID NO: 518664 - DNA, 51 bp, Homo sapiens
cttcagagacatgagaagattcatactgctacagatgcaaaagagcgacag

SEQ ID NO: 518665 - DNA, 75 bp, Homo sapiens
ctggatgggggaccacaagatcctcatcgacagattacagagtcacgggagacaccgttctgtgttactgctgtg

SEQ ID NO: 518666 - DNA, 83 bp, Homo sapiens
tctactggctgtacatgaagaagtcaaaatgacttcaaacctgcttctattgacacttcttctgaaggataccttgaggttgg

SEQ ID NO: 518667 - DNA, 83 bp, Homo sapiens
ctgctacagatctgtctcttccttacaatgacaatgcagatcttcgtgaagactctgactggtaagaccatcaccctcgaggt

SEQ ID NO: 518668 - DNA, 74 bp, Homo sapiens
tgagacagggcacaccaaactccatctggttgaattgaccaaagcaatggtgatggagaagcctagtcccctgc

SEQ ID NO: 518669 - DNA, 100 bp, Homo sapiens
ccgtttccaccgaggaaaaggaatcgtatcgtatgtccgctatccagaacctccactctttcggtgaccagaagtcagcagcttcccagaagccccgaag

SEQ ID NO: 518670 - DNA, 101 bp, Homo sapiens
gaacaacccgttcttgcctcaggccagtcgcctccaggccaagagggatccttcacccgtgtctgatctttaatctcatgaagtacgacagctacagccgc

SEQ ID NO: 518671 - DNA, 80 bp, Homo sapiens
cggagctgggtctggagacgccgtggcagcctgaacggagtgtgcgacggattgggagcctgtcaggattggagctgctt

SEQ ID NO: 518672 - DNA, 80 bp, Homo sapiens
gagagatggagatgggcagacggattcatttagagctgcggaacaggacgccctctgattttggtgccctggttgtcaga

SEQ ID NO: 518673 - DNA, 75 bp, Homo sapiens
ctccgaaccccttcatgcccaaatcccggaaactccagcgtgtctccagccgtgatgatatcatcaagttgaatc

SEQ ID NO: 518674 - DNA, 117 bp, Homo sapiens
ggccggccggtgccagcacctttcggcttctgagacggcggcagcagcggcattcaggatatgggccctcacattttccaaacctgtccatctgctaactattttgactgcagagcc

SEQ ID NO: 518675 - DNA, 93 bp, Homo sapiens
gtttctcttctgcagaaaaagaggctcttcctcctcctcccgcgacgctggaaaggcagctcatcatgcagagtgaaatgagggaaagacaaa

SEQ ID NO: 518676 - DNA, 83 bp, Homo sapiens
cagccgggacccagccagccctgcgcctcgcgccgtcgcgcatgcgtcctggaagaaaaagtcagcactttttgaagtgtctg

SEQ ID NO: 518677 - DNA, 82 bp, Homo sapiens
aacggcaaagttttgcagatcttcaacaagaggacccaggagaaattcgccctcaaaactgtaaattcacctgtcacccaga

SEQ ID NO: 518678 - DNA, 100 bp, Homo sapiens
tgttcgggcagctggagtgtacgggcccgcgggccacggccatgcagcccctggagatgcctgaggaaacccagacccaagaccaaccgatggaggagga

SEQ ID NO: 518679 - DNA, 100 bp, Homo sapiens
tctgaaggtggatagcaatggtgtgatcacagtaaagcctgacttcacgggcctcaaaggaccctacagacctacctggtggttctgtgccttcccctac

SEQ ID NO: 518680 - DNA, 90 bp, Homo sapiens
gacggcaaactgagcaacttcaaaacagcagccgagagcttcaagggcaagatccccctccaccacagcagcagccaccgccaccaccac

SEQ ID NO: 518681 - DNA, 101 bp, Homo sapiens
aaggaaccctatgtttattagagtagcaactgtggcagacacagatgatcaccgggtaaaagtgaaaatggcattacggacatcaggacatctcttactgg

SEQ ID NO: 518682 - DNA, 75 bp, Homo sapiens
ctacaaagtcacattcaacgccgccacactgaagaaaattctcattttgtttgtcccgctggctggaagcctggc

SEQ ID NO: 518683 - DNA, 83 bp, Homo sapiens
ccgctggcagccgcggatctcaccgccgctcaggcttcagataaaccagtcgatcattttctgtaactcctctcagcgagttg

SEQ ID NO: 518684 - DNA, 100 bp, Homo sapiens
gctacggtctacaagatctgcgcctggatgcagctcttggcaggtctgaatttcctgctgctgttcacaaagatgctttttatctttaactttttgtttt

SEQ ID NO: 518685 - DNA, 82 bp, Homo sapiens
gaaacatcaaagctggattagaacatctgttttcggctttgtgagaaaccttaccatcaaacacgatggccagcaacgttac

SEQ ID NO: 518686 - DNA, 82 bp, Homo sapiens
ctgtaaataatacccgagaggaaataggcccggcaggagtgtggccatctggggccgtgtggtatttgccactcaggagaca

SEQ ID NO: 518687 - DNA, 80 bp, Homo sapiens
acatgcccgctcacctgcgctgtgatgcctgcagagctgtggcttaccaggaagtgaccgatcctgagaaaggatttata

SEQ ID NO: 518688 - DNA, 100 bp, Homo sapiens
gcagatcctggaccaggttgagctgcgcgcaggctgtccatcttgagtggcctcttcccacccagtggtggctctgccttcatcctgggccacgacgtcc

SEQ ID NO: 518689 - DNA, 97 bp, Homo sapiens
gtgagagagagctattagagattgtgaagaagaatttcgatctccgccctggggtcattgtcaggaagctttcactgtctacaaactgcattgaaaa

SEQ ID NO: 518690 - DNA, 100 bp, Homo sapiens
gtggggactgcacgtagcccggcgctcggcatggctctcctggtgctcgtcatccgtccttggctcaggatttggagagcttgcaccaccaaaaatggca

SEQ ID NO: 518691 - DNA, 87 bp, Homo sapiens
tttccacctcctgacacaacaccactcagtaccttacaggtgaccagctgcggagcgagtcgtccccagaagcttacatccgctgcc

SEQ ID NO: 518692 - DNA, 100 bp, Homo sapiens
tgccatttatgtgatggcaaaggatgctgaaaacgccattcaacagatgggtggccagtggcttggtggaagacaaatcagaactaactgggcaacccga

SEQ ID NO: 518693 - DNA, 97 bp, Homo sapiens
aaaagagaaattttagcacaactccggacacttgttttccagtgtgatcttacccttaaagctgtgatctgcaactctttcaccatctgtaatgcgg

SEQ ID NO: 518694 - DNA, 100 bp, Homo sapiens
atacaccatcaaaattcctgtccaaggacaaactcttcaagccttcctttgatgtgaaggtggctacagtttcagaaaagtcacgtataatggaactgga

SEQ ID NO: 518695 - DNA, 75 bp, Homo sapiens
gggccctgccctgggctggaacgaccctgacatatctgaagagatggattaagaatgctttggattaaggattgt

SEQ ID NO: 518696 - DNA, 75 bp, Homo sapiens
ccgtgtctgaagtcttcaggcgagctcaccacatgctacagataaagtggagaattttcatgaagaacatgaaaa

SEQ ID NO: 518697 - DNA, 100 bp, Homo sapiens
gccggttttatgagtgggaaccatttgcagaagatataagagttcggaccgcccagcacacaaggtcagcatgctgctcctctgtcacgctctcgctata

SEQ ID NO: 518698 - DNA, 74 bp, Homo sapiens
ttctctgactctaattgatgcactggacaccttgctgggcaagtgtccagagaatggctgggatgaaagtacac

SEQ ID NO: 518699 - DNA, 50 bp, Homo sapiens
agaacctggcacttatatcctccctggatattctctaagccgctttcatc

SEQ ID NO: 518700 - DNA, 99 bp, Homo sapiens
tggtctacatcctgcgggtgcctttgaaaatcaacgacaacttgagcacagggttttggccaaattgggcgagggcacaaaataaccacttaccccttc

SEQ ID NO: 518701 - DNA, 89 bp, Homo sapiens
tctgtgctgggctggctctggctcttatcttcggcgctttaattttcaaatgctgatcccataatgcatcctcaagtggtcatcttaag

SEQ ID NO: 518702 - DNA, 74 bp, Homo sapiens
gcagagtctgataagccagtggtgattggttccatcagacatgtggttcagctcatttataatagctttgccca

SEQ ID NO: 518703 - DNA, 75 bp, Homo sapiens
cacacagtctactatcaccgacaggtgtgactgcacagaaaagttacaaaacaaatttgactttttgcgctcaca

SEQ ID NO: 518704 - DNA, 74 bp, Homo sapiens
ccgccgcccctcaccagacagatcgctgtcaaaaccctagattcacagtctgagaatgaggcttcaccagtaaa

SEQ ID NO: 518705 - DNA, 58 bp, Homo sapiens
tagcaccccgagaaccgtcagtttgagccagatggaatatattaaaggaatctgtgaa

SEQ ID NO: 518706 - DNA, 82 bp, Homo sapiens
cgagcactaatatttaagaaagaagatgttaactttcagtcatggctccgatcttcatcttgaagaagagtgacattgggtg

SEQ ID NO: 518707 - DNA, 75 bp, Homo sapiens
tcatttgctggccatcggattgggcttcccagtgatcctgtccatcgaggagcactgcagcgtggagcaacagcg

SEQ ID NO: 518708 - DNA, 90 bp, Homo sapiens
gagaacgcgcccaagtggcggggactactggtgcctgcgctgaaaaagcgttttacgatgggataatgagacagatgtctctcaactgga

SEQ ID NO: 518709 - DNA, 82 bp, Homo sapiens
tgtgcgcgctggcgctgagcctgcagccggccctgccgaggacgggaggggcaagctgcggccaaccaaggccaagagcgag

SEQ ID NO: 518710 - DNA, 101 bp, Homo sapiens
gtttccagtgacaggcaggagccagggcggagaggcagagacctgtcggccatggagcctaatgatagtaccagtaccgctgtggaggagcctgacagctt

SEQ ID NO: 518711 - DNA, 100 bp, Homo sapiens
ttgccatttcgctgggatttttgggtggtgcaaagagaccaaatgagagggttgacactgtatcagaaaaaccaagggaagaaccagtactaaaagagga

SEQ ID NO: 518712 - DNA, 76 bp, Homo sapiens
cacactgccctgggactagtgcactccaaaaggaattcttcatttgtctcctgatgtttatcaagagatggaagcc

SEQ ID NO: 518713 - DNA, 75 bp, Homo sapiens
ttcccgagttgctgcagcagcaggaggaggaccgcagcaaggttcgttaccgtgaacgcatcaccattcttcgag

SEQ ID NO: 518714 - DNA, 83 bp, Homo sapiens
cataaagtcacctactgtaccagagtttcagatacagatccacgggttttagaaaaacaagaattacagcagccaacctatgt

SEQ ID NO: 518715 - DNA, 75 bp, Homo sapiens
ataagtcaaaggaggaatttgcctcttctacagatagagctgttaagaagcatcagatggtgaaggagaaggaga

SEQ ID NO: 518716 - DNA, 50 bp, Homo sapiens
ggagtctgcactcttcagtctttgcagattttaggtgatgggcaagtcag

SEQ ID NO: 518717 - DNA, 100 bp, Homo sapiens
agtggttatagccagtccacggacacttcaggctatggccagagcagctattcttcttatggccagagccagaacaaccatgctcgacagctgaccaagg

SEQ ID NO: 518718 - DNA, 96 bp, Homo sapiens
gcgggagacagcggtgacaggagcagcggccgggagcccttagggaggcagccaatggagatcttcgtggatgatgagacgaagttgacgctgcat

SEQ ID NO: 518719 - DNA, 90 bp, Homo sapiens
tttggtcactgaggaagagatcaatcttaccagagggccctcagtgatcctggtggagggattgaaatgtctgagttcatccgagaggcc

SEQ ID NO: 518720 - DNA, 90 bp, Homo sapiens
ctggaggatttggagagtgaacttgatgaccctggacaaccgccattttgcagactctgatcacagtgaaacgttccatgggaacttggg

SEQ ID NO: 518721 - DNA, 99 bp, Homo sapiens
aagcagtggtgggttccatgtgatggtggagtaggaggcaggtctccgcgctggcccgagataacttcttccgctgtggtgtgctgtatgaggactccc

SEQ ID NO: 518722 - DNA, 100 bp, Homo sapiens
tcgacatcaccacggagaaccagtaccggctgacctcgctgtacgccgagcacccaggcgactgcctcatcttcaaggttgctccgactgtgtgttccag

SEQ ID NO: 518723 - DNA, 90 bp, Homo sapiens
gcaatggtatgggaaaattgtttgcagaaggatgaaaaggctttattgccaaactattttatttggagagaagcaagcatctttgcctct

SEQ ID NO: 518724 - DNA, 100 bp, Homo sapiens
ctaccactgcaggaggtcccgcctgctcaacacgccgggtggaagtgctgcatcagtaaatgctaattttgctcattttgataacttccccaaatcctcc

SEQ ID NO: 518725 - DNA, 100 bp, Homo sapiens
gaagaagggaaggcgcgagtgaggaaaggaggtactgtagaagaagaagatggagtgtgggagaatggactttcctatgaatgccgtactctgcttttca

SEQ ID NO: 518726 - DNA, 75 bp, Homo sapiens
tgaaccctagagccttcccagaggaacgctactacaggtgaaatgacaatggatgctctgttggctcgattgaaa

SEQ ID NO: 518727 - DNA, 88 bp, Homo sapiens
gattgttacagcaaaattgtagataagctgtcctctgcaaaccccaccatggtattacagcttgttgaagatgcatatagactaccgg

SEQ ID NO: 518728 - DNA, 75 bp, Homo sapiens
atcgacgtcatcggggtgaccaagggcaaaggctacaaaggtgatttgaagatattaaagctagaaattggaact

SEQ ID NO: 518729 - DNA, 90 bp, Homo sapiens
aatggttacatatccaatgcaaactactcagtgaagaagtgcatcttcttactcttcatcaaccttatctcagggatctccagaaccgat

SEQ ID NO: 518730 - DNA, 95 bp, Homo sapiens
cgtggtcatcatctgcgcctgccgcagcgcggccatcgactcctgcatcgccgtcaccgatcgttctgaagtctccagcctgagttcagaggccc

SEQ ID NO: 518731 - DNA, 74 bp, Homo sapiens
tggaggaagcagtcccgcaggaagctctggattaatcgaattacagctgctagccaggaacatggactgaagta

SEQ ID NO: 518732 - DNA, 82 bp, Homo sapiens
tgccctgcagtacctgcagaaggtctctggagacatcttcagcagcagaaaaatatggctcaggagactaaccagaccccgg

SEQ ID NO: 518733 - DNA, 75 bp, Homo sapiens
cccaccaggcaccactgaccaggacctaatcaagctgtgccaaccttgtctgtgagacggaagttttactaaaag

SEQ ID NO: 518734 - DNA, 90 bp, Homo sapiens
actctgcgtcaggtcacccagcagagatcagcaatccttggctcactgaggaggtttgtgcgacttcatgatagcatatcagaagagggc

SEQ ID NO: 518735 - DNA, 75 bp, Homo sapiens
agaagtggatttgggagacatttaggagggacccctcatggtgactgaagcccttaagccatactcttcaggagg

SEQ ID NO: 518736 - DNA, 100 bp, Homo sapiens
gactagtgatgtttattgggtcttacaagctcaaaagccaaaagtctctgagaacgactttgaagatctgttgtccaatcaaggcttctcctccaggtct

SEQ ID NO: 518737 - DNA, 82 bp, Homo sapiens
ttacttcatgttcacccgcgggggaccctactggcaggaggtcaaggtggaagtccaagaatccgagtggaggctcaccgag

SEQ ID NO: 518738 - DNA, 76 bp, Homo sapiens
catcgatctctccatcccttccgaggcccgacttcggctattcagcttgaccctgaagaaactcgtcatgctaaaa

SEQ ID NO: 518739 - DNA, 50 bp, Homo sapiens
gccgtcagcgagggcgccgagcaacttcgatggagtcttactctgtcgcc

SEQ ID NO: 518740 - DNA, 74 bp, Homo sapiens
tggcaagcgagcaatttccacctctgtgtgtgtacgagctcatggcctgggcagtttttaaagggaagtttaaa

SEQ ID NO: 518741 - DNA, 87 bp, Homo sapiens
ccaaggtacagtcgccgcgtgcggagcttgttactggttacttgaggtacttggaaggctccatcgcccctgaagacaaaggaagct

SEQ ID NO: 518742 - DNA, 100 bp, Homo sapiens
gggcacgtctatgatccaggccctggccatgacggtggccgagatccccgtgttcctgtacacgacgtttgggcaggagaatggggtactaagagaaaag

SEQ ID NO: 518743 - DNA, 82 bp, Homo sapiens
ggacagcgccttcctcaacgacgcggacatggtcatgagctttgtgaacctggatggagtatggctcttgttgcccaagctg

SEQ ID NO: 518744 - DNA, 100 bp, Homo sapiens
taagacaccgggacctcctggaagccaaaaatggaatcacttaaccctgaaagtcttgtgagaagacatggcgagaagtggagtcaagcacacaccatga

SEQ ID NO: 518745 - DNA, 75 bp, Homo sapiens
aaacgatgcagcaactattttaagagaactagaagaatccatcaacagcatcaagtccagactaagcaaaagtgg

SEQ ID NO: 518746 - DNA, 101 bp, Homo sapiens
aaccagaccagggaggccaacgtggggtcatcatcaacactgccagtgtggctgccttcgagggtcagggagaaggactcagaattgaaccagaagcggcc

SEQ ID NO: 518747 - DNA, 83 bp, Homo sapiens
gagactcgccggccgagggtggccctaggggcagcgagcaagacagcaagcaggtgtcccgacccaggctaagcttgagcatg

SEQ ID NO: 518748 - DNA, 75 bp, Homo sapiens
acaagtactcggcaagttgtcaggtattatgatgacacattcccctccatgaaggagcagatggttttcgagaaa

SEQ ID NO: 518749 - DNA, 131 bp, Homo sapiens
cgggatcgtgaccgagaccgtgaccgagagcgtgaccgagagcgcgaatatcgtcatcgttagaaggttctccgtggaggagccagccaacgtcctttgaccccaaaccagaaccagcagggacagcaaac

SEQ ID NO: 518750 - DNA, 100 bp, Homo sapiens
gtccagtaccagaatgtcccaaggaacacctgggcaacagaatattggtcaagttgctgaccttgaatgttgttacagatcttataacagtcggtttaaa

SEQ ID NO: 518751 - DNA, 100 bp, Homo sapiens
ggaaaacttgctgcggttgctcaaggcgcggcaattgcaaaaaagcaagcttggggctagtttgtgaaataggtcttcgttgccgtacatattatgtatt

SEQ ID NO: 518752 - DNA, 75 bp, Homo sapiens
aagacgccgggactccctggaaacctagaaatggcttcctgtgtccagtaccggttagtggtccgggatgtgaac

SEQ ID NO: 518753 - DNA, 125 bp, Homo sapiens
gaccgaccctcacagaagctgctgaaattcctgaataagcactacaatctggagaccacagtcccacaggagaaccggagccttaccatcaaacttcggaaacggaagccagagaaaaaggtaga

SEQ ID NO: 518754 - DNA, 98 bp, Homo sapiens
ctctgggagcagaagggaggctccaagacctcatcaacaattaagatttacactgactgggccaaccactacctagcaaaatcaggccacaagcggct

SEQ ID NO: 518755 - DNA, 83 bp, Homo sapiens
ccaattcggtggaacgaggacgcggactgcgaaggcagacaggggcaagtgtccgagtggtgaatcagctacttacagagatg

SEQ ID NO: 518756 - DNA, 83 bp, Homo sapiens
cttgggactggagaaatgttcatggtatcaattttgtcagtcctgttcgaaaccaaggggatctgaaacttgtggaaaagccg

SEQ ID NO: 518757 - DNA, 100 bp, Homo sapiens
gccaagtatccgccagtcaataggaagtacgagtgggatgttggaaattactattatggacaaggccacccaatgaagcctcaccgaatccgcatgactc

SEQ ID NO: 518758 - DNA, 75 bp, Homo sapiens
tcagagatattacagtttacaggctgactactggaaggcttgtacagcatatgtggattttatgatttctgtggc

SEQ ID NO: 518759 - DNA, 75 bp, Homo sapiens
ctggtcgccatcaagaaagtattgcaggacaagagatttaaggtgtgatgaatgcagactctgctaccattttgg

SEQ ID NO: 518760 - DNA, 75 bp, Homo sapiens
gatgactgtgaaggagttcaggcagctggccaacagtggcaaaagccaagtacaagaagctggagaagcgatgag

SEQ ID NO: 518761 - DNA, 74 bp, Homo sapiens
acagtggaaaggaaccgttctggatcaggtttgggtacccagaccccacctacctgacccgggtgcaagaggag

SEQ ID NO: 518762 - DNA, 111 bp, Homo sapiens
acaaaaagctctgttgaccaccaaccagcttcctcaaccagatgttttcccattgttcaaggacaaaggtggctggagagagatatgtctacaagtttgtgtgtgatccag

SEQ ID NO: 518763 - DNA, 87 bp, Homo sapiens
cgtggaataggtgtatcaagtaatggtgcaaagcctgaaggcaggtgtttgtttgccagtggcagtccatttgggccagtgaaactt

SEQ ID NO: 518764 - DNA, 90 bp, Homo sapiens
cctgtcggctcacaagataatagccagctccccagaaatgaacctgcccacggtgtccgcgctcaggacagggtcttactctgtcaccca

SEQ ID NO: 518765 - DNA, 99 bp, Homo sapiens
cttccagctcctgaggaacatgcaggtggtattaaagataatcaaacattatcaagaagaaggacaaggaactgaagttgttcaaggagtgcttttggg

SEQ ID NO: 518766 - DNA, 82 bp, Homo sapiens
acaagagcttccgcggtgtcattctgacctcggaccaggaatcaccttcaagcctatgtcgtgaggctttggcagaaattaa

SEQ ID NO: 518767 - DNA, 100 bp, Homo sapiens
ccgtgtgtacttatcctggatgatgccaccagtgccctggatgcaaacagccagttacagaatggcatcctcaggggcgtgtaccctggcagccccacca

SEQ ID NO: 518768 - DNA, 51 bp, Homo sapiens
catcatgtgtgtcagcatgagagatcctttctctgctactgtagatgctgt

SEQ ID NO: 518769 - DNA, 124 bp, Homo sapiens
gtttacaccgactagcgcgggcccgttgcggctgcaggcaccatggaccgagcccccacggagcagctagtatgttcaacacaccaggaatgcagagcttgttgcaacaaataactgaaaaccc

SEQ ID NO: 518770 - DNA, 83 bp, Homo sapiens
aaaggggcagatcgccggcaccacgagagcccggcccgcctgtgtggacgttggaatcgaagcctcttaaaatggcagatgac

SEQ ID NO: 518771 - DNA, 105 bp, Homo sapiens
gtgactcaagaaaaactcatcacctggagtccgtgtaagctcggcgacagccctagcagcgaggccaaaacaggcctccccatggccacccatggaccagtcggc

SEQ ID NO: 518772 - DNA, 100 bp, Homo sapiens
gtggccgcgcgaccgacggccgcctcacctgcccgctgtgccaaaaaagcttgtggtgaaggggggcaaaaaaaagaagcaagttctgaagttcactctt

SEQ ID NO: 518773 - DNA, 96 bp, Homo sapiens
gctcgtccagagtctgcggacagcgcacgtccagccacagcctggcagctctgatcaggaaagtgaggaacagcaacaattccggaacattttcaa

SEQ ID NO: 518774 - DNA, 75 bp, Homo sapiens
ctgggcgtggcggccgggatgacccacagttggcaaacatgaattgactgggcataaagtagctgtgaagatact

SEQ ID NO: 518775 - DNA, 98 bp, Homo sapiens
gtggctgatggtggacactgtcataggagaagggtgattctgggggtccacttgtctgtaatggtgtgcttcaaggtatcacatcatggggccctgag

SEQ ID NO: 518776 - DNA, 82 bp, Homo sapiens
cagtttgagtccccttgcccgctccttcagcaggagcattggtttgaaaaggccctacgagacaagaagggcttcatcatca

SEQ ID NO: 518777 - DNA, 51 bp, Homo sapiens
gggagaacggaaaactcccaacttcctgatttataatcgcttagatacaaa

SEQ ID NO: 518778 - DNA, 58 bp, Homo sapiens
attccaagtaactcttatttggacgtgttcctcatgatccggcgccacaagaccacca

SEQ ID NO: 518779 - DNA, 88 bp, Homo sapiens
gcagctcatgaaactggatgaacaagggctgagatctgtatctgtggacctgaatgttgatccctcgcttcagattgacatacctgat

SEQ ID NO: 518780 - DNA, 88 bp, Homo sapiens
gctccttcaagcctccaccacctcgcagccggggaggcaactggagcgaaaccagcgacagctcactaccctgggaaatcttacacct

SEQ ID NO: 518781 - DNA, 100 bp, Homo sapiens
tctcgccaaagccgctctgggcaagcccattgcagatgcaaaggctcctgagaagcgggcctcaccatccaagccagcttctgccccagcctccagatct

SEQ ID NO: 518782 - DNA, 100 bp, Homo sapiens
ctccgagatgagccctataatgaaaagatgtgtgtattgaggcttatacaagttattcggtcagttgagaaaattgaaaaaatcttaaactctcaaagtt

SEQ ID NO: 518783 - DNA, 75 bp, Homo sapiens
gaaccatggggactgtgcacgcccggagtgatcagcagctggactgtgccttggacctaatgaggcgcctgcctc

SEQ ID NO: 518784 - DNA, 116 bp, Homo sapiens
gtcatgttcaagaagttcaagaacggcttaacttccttaggtttgatgatcgtggacggagtgattacgatggcattggcagccgtggtgacagaagtggctttggcaaatttgaa

SEQ ID NO: 518785 - DNA, 100 bp, Homo sapiens
ttctgaacatgcacccccagcagccaccagcaggtaattaagaatcgttttcatcgtgtgttcctaccctcccactcactggacactgtgtccccatctg

SEQ ID NO: 518786 - DNA, 87 bp, Homo sapiens
caagtggaataaaaaccaacatcaagtcggcttccatgcatccctaccagcgaagccctacaggtggcaactactagcccaactgcc

SEQ ID NO: 518787 - DNA, 87 bp, Homo sapiens
ccctaagaagacagcttgaacctaggacttgaactgccatgtcctctgaagaaggaaagctcttcgtgggagggctcaactttaaca

SEQ ID NO: 518788 - DNA, 100 bp, Homo sapiens
tagagctgccagaggttccctccgagccccttcctgagaagatcccagtacatcgacgccatcagcaacaagcagggcgagctggagaattacgtgtccg

SEQ ID NO: 518789 - DNA, 83 bp, Homo sapiens
gggagaagcagcgcctgttcccggggcagatccaggttcaggtcgcgtggggcaggcagtggcgctgcgggccaaggccttcg

SEQ ID NO: 518790 - DNA, 83 bp, Homo sapiens
cctgaacggagtgtgcgacggattgggaggtgagaagccctaccactgcaactgggacggctgcggctggaagtttgcgcgct

SEQ ID NO: 518791 - DNA, 90 bp, Homo sapiens
gtttgtgaaagaaaggacagagattgaactcagctatgcaaagcaactcagagcccccctccatgcgcctgaaggcccgacccagcagcc

SEQ ID NO: 518792 - DNA, 100 bp, Homo sapiens
cagcctagagagcggttaaaaaaccctaatgctcctatgttaccgccacctaaaaacaaagaggattttgagaagacacgaagatcgattgagaagttat

SEQ ID NO: 518793 - DNA, 100 bp, Homo sapiens
aaacatgaccgctgagcccatgaggatccaaactactggatacaggtgcatcgcttggaacatggagatggaggaatactagaccttgatgacattcttt

SEQ ID NO: 518794 - DNA, 100 bp, Homo sapiens
tctacctggaggtctccactctggtcagcaagtatccagacatcaggtcgcgtggggcaggcagtggcgctgcgggccaaggccttcggcttcaacgtgc

SEQ ID NO: 518795 - DNA, 50 bp, Homo sapiens
gtcccagtgccgggagcgcatcaaggcacaactacaagagcggaatgacc

SEQ ID NO: 518796 - DNA, 51 bp, Homo sapiens
ggcgtgcgcggacggtgtgcgggattgacttggcctctacttcttgttaag

SEQ ID NO: 518797 - DNA, 98 bp, Homo sapiens
ctgagccgggcggggtcccgctgcactcgtcctggaccttctggctcgacaggtttctgagtcccttcaacatgatcctgggaggaatcgtggtggtg

SEQ ID NO: 518798 - DNA, 75 bp, Homo sapiens
atgcccctcaggctggaacttgccctgtctcctcgcagatgaggtttaactatagatcaacacatcatcttgcat

SEQ ID NO: 518799 - DNA, 100 bp, Homo sapiens
ttggggggatggttccatcatggcgtcaatgcaggagcttgatcctggatagtgtttgtatgatgtgcacacgtctctgcaaatgcttgtttgaagattg

SEQ ID NO: 518800 - DNA, 101 bp, Homo sapiens
cctcgcgctgcaaggatgctcctgggatttcggagaggccgcaggagtcatttcaggagaaggcagagcccccccaggctatgaatgccctgatgcggttg

SEQ ID NO: 518801 - DNA, 82 bp, Homo sapiens
gaactctttgatgttgtggctaatcccttggtcaatgacctcattcatggcaaaaatggtcagatgtaccaacagtaccagc

SEQ ID NO: 518802 - DNA, 82 bp, Homo sapiens
cgccgcgggacctctccgggccatgggatgaccagtgtcccagtgaaggaacgagtgaaggtgtctcagaactggagactgg

SEQ ID NO: 518803 - DNA, 74 bp, Homo sapiens
ggaagatgataaagatgcagccaaggtcttagcagaagatggttccacttccaaacatgagttccaggccgaga

SEQ ID NO: 518804 - DNA, 98 bp, Homo sapiens
ccagaatgctccctctccaaaggatctaaggaccaaagctgacagtttctttacttggtggctagaggtgcaggtagctaatttaacaagtccacagc

SEQ ID NO: 518805 - DNA, 75 bp, Homo sapiens
cacaaggtgtacgatttgaccaaatttctggaagaggttaaacccatccagagtaatggctgcggccttacccag

SEQ ID NO: 518806 - DNA, 75 bp, Homo sapiens
aggcagctgagaaatgctgtgtctgtggtcacttgattttggagaagtttttaatgttgaagatcagaaaagaga

SEQ ID NO: 518807 - DNA, 75 bp, Homo sapiens
agcctgttatagtgcccatgtatgcagcaggattgtttattcccatgccagtgctatatggagtgtttctttata

SEQ ID NO: 518808 - DNA, 100 bp, Homo sapiens
gcggcgaccaagatcaggaacctgccctgaaaatccatcctctcagtattggaaggaagtggcagaaaaacggagaaaggcgctgtatgaagcacttaag

SEQ ID NO: 518809 - DNA, 100 bp, Homo sapiens
tgtccctgaatggctttggtggcatctgcctaacgttcacttcactcacggatgtctggagccaggattgttggtcatttgactcatgccttgaagcaag

SEQ ID NO: 518810 - DNA, 75 bp, Homo sapiens
cccctcggaactcgggcatcatggcctcagactttgtgcccattgacctagacgagtggtgggcgcagcagttcc

SEQ ID NO: 518811 - DNA, 130 bp, Homo sapiens
gaactattacagaattctgcactgaagcaagctgtccagtcatgtctgcaggtccgagttccagtctcatcagattttccatgtcctggtggtggcagcagcctttgtccacttctatggagtctccaac

SEQ ID NO: 518812 - DNA, 90 bp, Homo sapiens
tgtgaaaatgttggactatatataacagatcatgcacagggtgccaagtaccggggctccatccatgacttcccaggctttgaccccaac

SEQ ID NO: 518813 - DNA, 129 bp, Homo sapiens
ggaaattcatccagagggtccaggccatgaagagtcctgaccacaatggggaggacaacttcgcccgggacttcatgaaaatggacccaagtggggtcaaagtgctggaaacagcagaggacatccagg

SEQ ID NO: 518814 - DNA, 100 bp, Homo sapiens
cgacactctgaagcagcgacggcacagcgggaagaatgtgatcgaactgtgagaatttggaaggctcgcaatttgcaagatggtcagatctctgacacag

SEQ ID NO: 518815 - DNA, 130 bp, Homo sapiens
gttagtgggagatccttgttgccgtcccttcgcctccttcaccgccgcagaccccttcaagttctagtcatgcaaaccgctgcaagaaggccccagtgaagagctgcacggagtgtgtccgtgtggataa

SEQ ID NO: 518816 - DNA, 51 bp, Homo sapiens
gcctagcgtcctggaattacttcaatcaagatcttgactggttcttatgat

SEQ ID NO: 518817 - DNA, 82 bp, Homo sapiens
ctttgaatcatctctacagagaactgaaatttcttcttgtaccgaggagaaggcattgtatatgggacactagaggaggtgt

SEQ ID NO: 518818 - DNA, 50 bp, Homo sapiens
gaaaacaacttcgagggcagagttatgaagacagtatggagtttccagac

SEQ ID NO: 518819 - DNA, 90 bp, Homo sapiens
ggaactgatggcgttcctgttacctctcatcattgtgttaatggtgaagcacagcgattccctatgctattgcggcagcacctcccgaga

SEQ ID NO: 518820 - DNA, 87 bp, Homo sapiens
tgggccctgaggctgcaccaagtggcgaaggagccggctccaaggactccagaagacctttccagattcgtggttgagctgcagcag

SEQ ID NO: 518821 - DNA, 50 bp, Homo sapiens
gtagtcctgggagcacagcagaagtggctttctctacgtgctgttgtctc

SEQ ID NO: 518822 - DNA, 75 bp, Homo sapiens
tgtttgtggatcgctgtgatcgtcacttggttctagagccttctttccgccaggcctttcccaataccaaccgct

SEQ ID NO: 518823 - DNA, 74 bp, Homo sapiens
atggctgccctcctcctgcttccctggctcatgttgctcacaggatcgacgagaacgtgctaggagcccagctg

SEQ ID NO: 518824 - DNA, 100 bp, Homo sapiens
attcgatgtctatatttaagtatctccgctacttcactcgcactatccttgatgctaggtcaaaatgcagatcttcgtgaaaacccttaccggcaagacc

SEQ ID NO: 518825 - DNA, 100 bp, Homo sapiens
ccacatcctccgcgccttcgtcaactctcagatccaagggcacaaggagggtgactatgaccagagcaggaccaaagtgctgcacatgagcctgaacccc

SEQ ID NO: 518826 - DNA, 83 bp, Homo sapiens
cttccatgcagcctgccttaccgcaatgtagtagaaaagtgtgttactcatgcctcccgtgctgagagagctttactgattga

SEQ ID NO: 518827 - DNA, 101 bp, Homo sapiens
gcttcctctggccacaggagcctgctcacctgattgggacaccctagcagtactggtaactgcgtcattgattggctggtatccaaccagtctgttaggaa

SEQ ID NO: 518828 - DNA, 82 bp, Homo sapiens
gcctcacgcacctgagccccgaggagaaggcgctgaggagattcgagtggtgaatgcatttcgtagttctttatatgaaggg

SEQ ID NO: 518829 - DNA, 96 bp, Homo sapiens
ggcagaatttgggagctgtttattgcagcactgttgtgccctctgatggctttcctcggagacgggtggcatggggagcagctagaacaatgcaga

SEQ ID NO: 518830 - DNA, 83 bp, Homo sapiens
ccaagctcctcccgtccctggccaaggctcaggaaatgaaggaccatatggtcagcccaacagccgtagcatttttggagagg

SEQ ID NO: 518831 - DNA, 50 bp, Homo sapiens
gaaactcgctcgccttcagaagacagatctcacattcttgaaggtggcat

SEQ ID NO: 518832 - DNA, 100 bp, Homo sapiens
gacccctcagtatatggatacggagtacaaaaacggcccttggatgatggagcgctggataaaacaagccttagaagaagggatgactcaaacatcatct

SEQ ID NO: 518833 - DNA, 75 bp, Homo sapiens
ttgcacatccccacatcaatgcactgccaatggtttttagaacttcagccataaaaatgggcagaattttccttg

SEQ ID NO: 518834 - DNA, 76 bp, Homo sapiens
gagacacagctcttctgtgagcaggctcttgctgatgagaatgagtttgtgcgtgacaccgccctgcgcgcgggcc

SEQ ID NO: 518835 - DNA, 74 bp, Homo sapiens
gaggcttaaggtcttcagcggggcgctccaggaggcactcacagggggatatgagactttctactcggaatatc

SEQ ID NO: 518836 - DNA, 97 bp, Homo sapiens
gggtcgtaaaacttgaaaatggtgaaatagagaccattgcccggtttggttcgggcccttgcagccctcgggaccaaggatcacgtcatgactccgg

SEQ ID NO: 518837 - DNA, 76 bp, Homo sapiens
tgaagaagcttgggctcacttccacaaatgtagatcgacacttgagaaagctggatcaggaactggctaagtttaa

SEQ ID NO: 518838 - DNA, 74 bp, Homo sapiens
tgaaagcctggaagaacattagaaccaccatgaggaggtctcctctgagcctccggcctccataagacccaaaa

SEQ ID NO: 518839 - DNA, 89 bp, Homo sapiens
acgtcccgctctccccagcatttccacagacctggtgacagagctgaatgaacctctctccaatgaagatcgaaatctcctctctgtgg

SEQ ID NO: 518840 - DNA, 100 bp, Homo sapiens
aagggacgacgctcgcggaagcagaggtttgggatgaggacggggacttggttgccttttccagtgacgaggaattgacaatggccatgtcctacgtgaa

SEQ ID NO: 518841 - DNA, 100 bp, Homo sapiens
caggactgctctcctactacacggcagcactcgtcggaggcaccaccatgatcatcggccacgtcctgcccgacaaggagacctcccttgtggacgctta

SEQ ID NO: 518842 - DNA, 101 bp, Homo sapiens
agcctcccaagtagctggggttacagacctctggtgccccggggagcccccaaacaccccctgagcgtcatgactctggtggttccctgcccctgacaccg

SEQ ID NO: 518843 - DNA, 50 bp, Homo sapiens
gacatgagatggtggatgaacccccaggaatgattatcggacactgcgcc

SEQ ID NO: 518844 - DNA, 82 bp, Homo sapiens
ctgtgacgaaggtgctaccatcgtgagagtaaggttcatgaagatttgcccgttttcttctaaaagttctatagttttagct

SEQ ID NO: 518845 - DNA, 80 bp, Homo sapiens
cttgctcgtgcactttacacacatgagtacctggagtagaacagaaaaattattatgtctgtgttcccttgggactcatt

SEQ ID NO: 518846 - DNA, 78 bp, Homo sapiens
tcagccgcaagtacccgtccatcatagtcaactgcgtggaagagaagtaccttctccaggcaaattccgttcccctgc

SEQ ID NO: 518847 - DNA, 98 bp, Homo sapiens
ggaattgtactttgagaaggggtcaaagattctaaactgcctgcatataaggatctcggtaaaaatctaccattccctacatattttcctgatggaga

SEQ ID NO: 518848 - DNA, 72 bp, Homo sapiens
aaatccgcaagaccatcatgcagggtgagaactctgtctcagtcgacgggaagtgcagtgactccacgctac

SEQ ID NO: 518849 - DNA, 100 bp, Homo sapiens
ctggaaatgagtcttcaagctctgtaagacatgtgacgatggcttaatagaatttaccacagttactttagagtctccgaaagcatggctggtggaggcc

SEQ ID NO: 518850 - DNA, 51 bp, Homo sapiens
tccctacacggtctcctgggtcaagagtgatcagcagctggactgtgcctt

SEQ ID NO: 518851 - DNA, 83 bp, Homo sapiens
cgggatttgggtcgcagttcttgtttgtggatcgctgtgatcgtcacttggtcacagccaagactgcctttctatttatttta

SEQ ID NO: 518852 - DNA, 98 bp, Homo sapiens
acagtttcgaaggcacatttaccagggctttcagtccagtgtaaagctgttggagcgcgggagcaaaggtaaagaatgatgtaatgcgctggctgctc

SEQ ID NO: 518853 - DNA, 50 bp, Homo sapiens
ccggcctggagctcccagggccgaggatactggtatcgggatgacacagg

SEQ ID NO: 518854 - DNA, 100 bp, Homo sapiens
gtgctcacctgcaccggctgcgaggagcagggagctcctcaaagagctcaggaacggacaggacatggaggagacatcacagctttcccagatcgggagg

SEQ ID NO: 518855 - DNA, 100 bp, Homo sapiens
ctttgagatcgcttcagctcgcatcgaggagagaaaagtctctaagtttgtggtttcagaaaagggatccctaacatcagaagagtttgctaagcttgtg

SEQ ID NO: 518856 - DNA, 121 bp, Homo sapiens
ccctagtcccccgcagtcccccgagactcgccgagcgccgttgctgagccctgcaaatagcagacaacagtgagctgggacggagacaagctccagtgtgtgcagaagggtgagaaggagg

SEQ ID NO: 518857 - DNA, 90 bp, Homo sapiens
ctagaagatgacgaagacatgacacttacaagatggacagggatgataattgggcctccaagagtggaacaggaggattttgtaatggaa

SEQ ID NO: 518858 - DNA, 82 bp, Homo sapiens
cttaaaagcaaaatctgctagcatcaggtggctgactgttcttgggatgaaacaataaagatctatgaccctgcttgtctta

SEQ ID NO: 518859 - DNA, 100 bp, Homo sapiens
tagcacctcttcctcaggaaatgtccaccactgtttctcatcatcaccaaacggtgtaatcctgagagattcacatggtgttgcacaagtacgttttgtg

SEQ ID NO: 518860 - DNA, 73 bp, Homo sapiens
aaggactgcggcctcttctgaggggcagcggggcctggcgggatgaggctgggaggcggcagaatgcagccag

SEQ ID NO: 518861 - DNA, 98 bp, Homo sapiens
cggagacttggatgaggtgaaagactatgtggccaagggaactacagcctgtccagtgtgctgcccaacgcccccgacatggcgcagttcaagcaggg

SEQ ID NO: 518862 - DNA, 100 bp, Homo sapiens
cccaactcctgagatggaagcagcgagacgttccctgtgctttagactggagcaaggtacgtcagcctgtcatatgcatcaacaaccatgtattttgttc

SEQ ID NO: 518863 - DNA, 75 bp, Homo sapiens
gcgacggcgtcgggagagcgcgcctagccggctcgcgatgtaatgttcaagctcagaaatgccttatgtggatcg

SEQ ID NO: 518864 - DNA, 100 bp, Homo sapiens
caagcctccccaaccccaccatcccaccaaagggggctgctgaccgagagagctcactcagccagccagatccaggctcctggaagaaccatgtccggca

SEQ ID NO: 518865 - DNA, 76 bp, Homo sapiens
ggacagtatgtggatgtcacagccaaaacgtataagcagtttagccaaattttgaagaacattggagaaaatgaag

SEQ ID NO: 518866 - DNA, 101 bp, Homo sapiens
ggccctcgggctgcgggagccgggctaggacgccgagcggtgactccccgccgctcccgggggccgtgacggtatcacatcggtatcctcgaattcaaagt

SEQ ID NO: 518867 - DNA, 96 bp, Homo sapiens
ttcagagagaggaagccgaaaacaccctgcaatctttcagacaggaagagcctaggctggatgtcttgatcaataacgcagggatcttccagtgcc

SEQ ID NO: 518868 - DNA, 74 bp, Homo sapiens
aagctctaagtacactcgtcttgaatagatatgagggaaggcaccattggagatatggctatcctgggtataac

SEQ ID NO: 518869 - DNA, 75 bp, Homo sapiens
gtccttggaactgtggtccatggtaaagttttacagggttaaagcacgaattgggagctctcagcgacatcacca

SEQ ID NO: 518870 - DNA, 50 bp, Homo sapiens
gttttgccggaggagcccctcaggccgctgaccccgcactacatctaccc

SEQ ID NO: 518871 - DNA, 87 bp, Homo sapiens
gaagcagccgatccagcctgcggagcctgtggggcaggaatttgagagcgtattttgcggtaaaactggccgaaggctaaagctgac

SEQ ID NO: 518872 - DNA, 50 bp, Homo sapiens
ccctgccaggctcttcatccaagaattcaattcgtcataatctgtcccta

SEQ ID NO: 518873 - DNA, 98 bp, Homo sapiens
ggtactatgcaggaaagaattaccactaccaagaagggatctatcacctctgtacagtatgagaataatgttatcactattgatctggttcaaaattc

SEQ ID NO: 518874 - DNA, 51 bp, Homo sapiens
gcccagtgccaatgcatcttctgtactctgctcacccgacgactgccaccc

SEQ ID NO: 518875 - DNA, 101 bp, Homo sapiens
gccgaggcctgggacagctaccgcagcatgagcgaaagctacacgctggagggaactgtacctggggaatgaattgtaggtttatacaccctggagtgaac

SEQ ID NO: 518876 - DNA, 82 bp, Homo sapiens
gctgagcctgcagccggccctgccggaccatggccaacctggagcgcaccttcatcgccatcaagccggacggcgtgcagcg

SEQ ID NO: 518877 - DNA, 96 bp, Homo sapiens
ccgggggcggccacggtgatgagccgggcctggcggacgcggcgccatcgcagtcagagttgcatgctgagaatttgaaaaatgaagatgatgtag

SEQ ID NO: 518878 - DNA, 82 bp, Homo sapiens
ctcctcgcaaagcgtcgagatcccgggcgggggcaccgagggctaccacgttctgcgggtattaatctctggagaagacaca

SEQ ID NO: 518879 - DNA, 82 bp, Homo sapiens
aaaatgtttccatttttcaagtgtcaaatctaagattctgatccttgccagctcctaaaacctatggtagcatgaaagatga

SEQ ID NO: 518880 - DNA, 75 bp, Homo sapiens
ttaactacagacccagtctctgccaacaactccgaagtcaagcccgcactctgattacctttgctggaatgatac

SEQ ID NO: 518881 - DNA, 83 bp, Homo sapiens
gctcagagatccaagtgcgcgccctggcgggtccggaccaagttttccaagagataacttcaccaagatgtccagtgataggc

SEQ ID NO: 518882 - DNA, 75 bp, Homo sapiens
ctgtgacatgtctgatcccttgctcccatccctgcagcatgaacaaggaaataaagtctttgcttttgctttttg

SEQ ID NO: 518883 - DNA, 100 bp, Homo sapiens
cgcgacacggagactaggtggcagcacccctgcagtggaccatgagtcggtaatgcccactgaggacctctgggagccatgtcagacgaatctgcctcag

SEQ ID NO: 518884 - DNA, 90 bp, Homo sapiens
gcaagctgcaaagacggaaatagagaagcttcagatcttacagactctttcagcacctacgaaaaatttagaacagcaggtgaatcacag

SEQ ID NO: 518885 - DNA, 100 bp, Homo sapiens
ttcaaatcccagtgggttaaaccagcacacaaggaaccgtcaagggcagtcatcagatccaccatctgcttcaacgcttccaaactacaaaaactttaaa

SEQ ID NO: 518886 - DNA, 100 bp, Homo sapiens
aaagctatggacaacgtgacggtccggcagggggagagcgccaccctcagggaaaaagttggattgttaaaagaagttatgaagattttcgggtacttga

SEQ ID NO: 518887 - DNA, 75 bp, Homo sapiens
cacaaaacctcagtcatcgtcacgagtcctgagtcggttaagaatatggttgagccccttatacccacgaattgc

SEQ ID NO: 518888 - DNA, 100 bp, Homo sapiens
tggatctcttatccatcacatgggggaccagttactctccacaagaaaattcacacaaccacagtgctcttcatagttcaaattcacattcttctaatcc

SEQ ID NO: 518889 - DNA, 98 bp, Homo sapiens
cggaatctgtctcctgatcatcattcagttgttgggaaggtcttggaaattactgaactaccagatggaataactcgcatggaagctgaaaagctttt

SEQ ID NO: 518890 - DNA, 75 bp, Homo sapiens
atgcacgttccatccggcgctcagctgggcttgagctcttcacagatggaatcacaaataaacttattggctgtt

SEQ ID NO: 518891 - DNA, 75 bp, Homo sapiens
gaggaccttgtcgctcatttggcagaagggaaatcagtcagcttggtttacagtcgtggcttccaacatcctccc

SEQ ID NO: 518892 - DNA, 75 bp, Homo sapiens
aaactaagactcacatctacaagcaatgaactgtcaaataaagtgcccgtggtgcagccatcccatgcggtccat

SEQ ID NO: 518893 - DNA, 97 bp, Homo sapiens
agcagcaacttcgaaaggcgatgttggaaaaagacggaaagttggtgagatggcaaagcagtatatagagaaaagtcttttggttccagaccatgtg

SEQ ID NO: 518894 - DNA, 75 bp, Homo sapiens
cgccgagtcgcgcggaggcggaggcttgggaccagaagctttgtatgcagctgtaaataagaaacctacctcggc

SEQ ID NO: 518895 - DNA, 101 bp, Homo sapiens
gggagcttttgttggggcgacagctgctcctggctacatagctccaggcagaatccagagaccacatttgaagtatatgttgaagtggcctatcccaggac

SEQ ID NO: 518896 - DNA, 75 bp, Homo sapiens
tcatcctttacgagcacggcctcttgcgctacgccctggatgagatggaggatctcctgatgcagtccagcaaag

SEQ ID NO: 518897 - DNA, 91 bp, Homo sapiens
ggaggaaggaggagcagcagactcggacgtggacgcctttttccggacagatgcagcagcttttttatgagaattacgagcagaacaaaaa

SEQ ID NO: 518898 - DNA, 96 bp, Homo sapiens
cttggtacaaggagtatatcatgaaaattctacttcaaagactcactgtccaatctacctggtcaacgtgtccagtatctcggctggtgacgttat

SEQ ID NO: 518899 - DNA, 100 bp, Homo sapiens
ccggaacctcaagaaggaggtcagccgggtgctgtgcaagcggtgcggaccaagaagctgataattgatgtgatccggaaccagccagggaacacattga

SEQ ID NO: 518900 - DNA, 98 bp, Homo sapiens
caggcagcgacaagattgtcctgttggtgtgtaaccgagcctgcactgggcaacaagggaaaaggaagtgtttggattgtgagctatttcagaactgt

SEQ ID NO: 518901 - DNA, 80 bp, Homo sapiens
gggccgaactggccctggactacctctgcaggagcgcctggaccatgctgctgagcgcctactggcacggcctccacccg

SEQ ID NO: 518902 - DNA, 75 bp, Homo sapiens
ctcttcctcaggaaatgtccaccactgtttctcatcatcaccaaacgcatcttcatgatacagttaagaggaatc

SEQ ID NO: 518903 - DNA, 100 bp, Homo sapiens
cttctgcaagaaacatggatttgatccacaaagtcccctttgtgttcacataatgctgtcaggaactgtgaccaagtggccataaaatgcagtaaaaaca

SEQ ID NO: 518904 - DNA, 74 bp, Homo sapiens
tggatacttttctagtgaacagtttcagaaagtgctttctctctgtggacatgaggattggattagaggagtgg

SEQ ID NO: 518905 - DNA, 100 bp, Homo sapiens
aagaccatcatgctgcgcggccttcccatcaccatcacagagagcgatatcctgataacttaagtgactctctcttttccggtgatgaagaaaatgctgg

SEQ ID NO: 518906 - DNA, 82 bp, Homo sapiens
cagtgacgggtctggagtgcgtgggggaccggctgttggcgggacccacccgaggacgggtcaccatggctttggagcacct

SEQ ID NO: 518907 - DNA, 88 bp, Homo sapiens
tgtatactccacaggaaatgaaacagggcttccgagtggacctgccaatcaagtcggcccgctaccgtggccagtacaacacctatcc

SEQ ID NO: 518908 - DNA, 83 bp, Homo sapiens
cgtggtgctgcaggttgtcagcgatgccggctctggcttggcaactcttgtgaaatttcatagatctcgtcgcttactgggag

SEQ ID NO: 518909 - DNA, 100 bp, Homo sapiens
ccaatggccacctttcctgtgccatatgatttgcctccagaactgtatggaagtaaagggagtcgtcgcatggtggatgtcatggacgtgaacacacaga

SEQ ID NO: 518910 - DNA, 98 bp, Homo sapiens
acagccctgtcagataagagaccaaactatggggaaatccctgttcaagggggacttgatctcatcttcatgccaggccttgggtttgacaaacatgg

SEQ ID NO: 518911 - DNA, 80 bp, Homo sapiens
ccctgtacgggtgcctggcctcgcttctgtcccagtgtggcacattggttgacctttgccagggcccccaccttcggcat

SEQ ID NO: 518912 - DNA, 90 bp, Homo sapiens
gttcggcctgccatgtggaaaatgatgcttaatatcgatgccctgaatctgtggaggctagtccagcagttaatgagaagagcgtgtatt

SEQ ID NO: 518913 - DNA, 75 bp, Homo sapiens
aatgggaagccaagtgccatcttcaaaatttcaggtcttaaatctggagaccaagacacattccaccccagtggg

SEQ ID NO: 518914 - DNA, 83 bp, Homo sapiens
tgtcggctccggcgggacgggcggttctgcgtacccctctcctgcctacaccaactaatgttacaattgaatcctataacatg

SEQ ID NO: 518915 - DNA, 75 bp, Homo sapiens
cgacctgcagggccagccctacggcggacctacgtgggcgccatgcccgggaagatcatccagtgtttgaagaag

SEQ ID NO: 518916 - DNA, 82 bp, Homo sapiens
gaaacaagaaaatggactccctggctgctggagagttgaatgccagccaccagccatggttaataaaggtatccatggagaa

SEQ ID NO: 518917 - DNA, 98 bp, Homo sapiens
cccctacccacgctgaacgagagggacacggagcagacttcccaagtaagaagcggaagaggagccgctggaaccaagacacaatggaacagaagaca

SEQ ID NO: 518918 - DNA, 82 bp, Homo sapiens
agaagagcggcggctggaccacttctctgtcgacggctatgacagttctggagccttcacgtaaatgggtccagtcatgcct

SEQ ID NO: 518919 - DNA, 75 bp, Homo sapiens
cgtacattatgaagacattcgggaaaatggacttcctccgtcaggcagctggcaggacctgaaggatcacatgcg

SEQ ID NO: 518920 - DNA, 100 bp, Homo sapiens
cctgtggagacacggccagatctgccctccaaatatgacagatacctagcatctagcaaaataatggcagctgcttaccttgaccccaacttgaatcaca

SEQ ID NO: 518921 - DNA, 75 bp, Homo sapiens
aggataattgggatgatgacaatgtagaggatgacttctctaatcagttacggagccctctggcacaaatggaag

SEQ ID NO: 518922 - DNA, 83 bp, Homo sapiens
actggggggactgattccaagacaaggcgcccaccccacagagcaagttttctgaaacgtcaaattgtggctactaatttgcc

SEQ ID NO: 518923 - DNA, 100 bp, Homo sapiens
ggatgagggggaagggcctcaaagccagaagacaaagcacagttgcttctagaccaagaggctgaatcagcatcccaaaagatagaagatggtaaaaccc

SEQ ID NO: 518924 - DNA, 100 bp, Homo sapiens
cagcagctgtcgccgccgctctcagtgatgaatcaccaacaccagcagcagatggcccccagtaccctgagccagcagaaccaccccactcagaacccac

SEQ ID NO: 518925 - DNA, 83 bp, Homo sapiens
ccgtatcaagccaagaacagcccaatctcctttctgggcaaacgttccaagcatctatattggaaagcgactgagcacaccct

SEQ ID NO: 518926 - DNA, 100 bp, Homo sapiens
gaaaattttccttgacctttaggtgcttttatattcatctcaaaaacaaaattctgaactcaggacttggcaagagacaaggagaaggccttaggatcta

SEQ ID NO: 518927 - DNA, 98 bp, Homo sapiens
tacgagctgctggagcgcgtggaggagccggtgctgcagaaccagatccgggagcacgtcatcgccatcgaagggcgccctgcgtccggcagaggagg

SEQ ID NO: 518928 - DNA, 75 bp, Homo sapiens
ctggggtgtttgactccatttcaagtaggaaggagtctcgctctcagtcaaaatctccaacgggaactcctgctc

SEQ ID NO: 518929 - DNA, 75 bp, Homo sapiens
ggctacctgtgaacagtacgcagtgaatgttgtaagaatgattgatgttggctgatattggagtgctcattcaca

SEQ ID NO: 518930 - DNA, 51 bp, Homo sapiens
tttgtttcaggaaagccctgagcagaaagctgcggcatgtttaccttcctg

SEQ ID NO: 518931 - DNA, 88 bp, Homo sapiens
ggcaggggcggaggcggaggcagaggtggaggcgctttgaaaggtggctgccataacagccttaaggtgaccagcagccccgccattg

SEQ ID NO: 518932 - DNA, 75 bp, Homo sapiens
tgagggcttcagtgcagacgcagtggtggccctggagcagtatgccagcaaggacagtcattttgtttactcatt

SEQ ID NO: 518933 - DNA, 100 bp, Homo sapiens
cagagggcgggggtcctcgccgggaccctcctgtgggcccaggggtttaagaaaatctacgaagaaacgcagtgagtctccacctgctgagctccccagt

SEQ ID NO: 518934 - DNA, 50 bp, Homo sapiens
gtggttgctgaccagttgaaaggggatcctcttggtgtatgacatcacca

SEQ ID NO: 518935 - DNA, 75 bp, Homo sapiens
tattacatcgtggagctctctgaaaacaaagttgattcaagtcagttgagacgccagttgtgtggaggaagtcag

SEQ ID NO: 518936 - DNA, 83 bp, Homo sapiens
gtgggggaccggctgttggcgggtggaaatgagttctcaacagtttcctcggttaggagccccttctaccgggctgagccagg

SEQ ID NO: 518937 - DNA, 75 bp, Homo sapiens
ggaacgaggcaaggagctaaagcagcgtgcgttcagccctggggacacctgctccacttcaccttttgccatgag

SEQ ID NO: 518938 - DNA, 87 bp, Homo sapiens
ggtctctggctccctcctcccagggccaggcgccgctcagaacgatggagtgaaggtacctgagcgcaggaaccatggtcttcattg

SEQ ID NO: 518939 - DNA, 86 bp, Homo sapiens
tgggcaccgcggatctggggccgtcctcaggtgacttaagagattaaaattaatttggttgctgttggttctgaacaaataatgag

SEQ ID NO: 518940 - DNA, 105 bp, Homo sapiens
aggctgcctataatcaagtaaaaacaatagctcaaggaaacctttccaacacagatgtccaagctgccaaagtccttggtataaatgaatggcagaatacggggt

SEQ ID NO: 518941 - DNA, 75 bp, Homo sapiens
aacattcagcaagcacatagtggagcaaatggtggctttcattgggggctatctgatgggttagagtgcctttga

SEQ ID NO: 518942 - DNA, 74 bp, Homo sapiens
aaggcctaagaattttggcattggtcatcgtattgaggaagttcctgaacttcctttggtagttgaagataaag

SEQ ID NO: 518943 - DNA, 75 bp, Homo sapiens
gccgtggtgcgactcatccacctccggctgaagctccaggagctgaagaaatctgacccggtcgtctcgtaccgc

SEQ ID NO: 518944 - DNA, 98 bp, Homo sapiens
gtccttactggatcagaccaacgtgaattgaatcacagcagttcagaaagaggaaactggattcaggtcttgttgcagtaggagaaagagcacaaaag

SEQ ID NO: 518945 - DNA, 74 bp, Homo sapiens
agcccaggagaggaaggagcggctgcggcgcgcgctggaaggatgaaaactttcggaagagaaagttgcctgtg

SEQ ID NO: 518946 - DNA, 97 bp, Homo sapiens
gagaagaacctctcataccctcggagtctactcttcatcttgtgttgagacttcgtggtggtgctaagaaaaggaagaagaagtcttacaccactcc

SEQ ID NO: 518947 - DNA, 82 bp, Homo sapiens
ctgctttgacactagtcttgaatacaatattggtaaaggttttcaaggtgtcatgaaaagatggggatttaaaggccagcct

SEQ ID NO: 518948 - DNA, 50 bp, Homo sapiens
ttgtagccataagtggacttgcagcagaagatgtcgttttcattggacct

SEQ ID NO: 518949 - DNA, 100 bp, Homo sapiens
tgaaaattcacccttgtagagtcattcctgcctttgagcggactcccttttaagtgaccaaaatcatctgtgcccagcagtgctccgggcgctgccgtgg

SEQ ID NO: 518950 - DNA, 95 bp, Homo sapiens
caggcgtgtgtcactgcgcccagccaataggagctctgaacccaaaaagagcagcattcttcgctgagcgttatgaatcatgggaagatgatcaa

SEQ ID NO: 518951 - DNA, 98 bp, Homo sapiens
atgcgaattccacattctcatgcatttattgatctgactgaagattttacagcaggtgaccaagaatatggcccaggtgaccaaagccctggacaagg

SEQ ID NO: 518952 - DNA, 87 bp, Homo sapiens
acacatgaaagacttcctcaaggactacagtatgcacttaatgtccctatggttgaaaaagaaggttatctgcaaaaagctaaaatt

SEQ ID NO: 518953 - DNA, 98 bp, Homo sapiens
agtcagaactgaatgttgaagaagtggtaaatgacaggagctggaaggtcagtttaggggctggtgcaaaggatgagttgcacattgttgaagcagag

SEQ ID NO: 518954 - DNA, 98 bp, Homo sapiens
ctttatctgtgatagaattgctgcttaaaaaacttgaagaaatgactgctgtccatgcaggcaacataaacttcaagtgggatcctaaaagtctagag

SEQ ID NO: 518955 - DNA, 83 bp, Homo sapiens
tcacgaccggaggggggactcgcagccttaccagccatcactggtgcaagctatatttaacggagatcctgatgaagttcgag

SEQ ID NO: 518956 - DNA, 100 bp, Homo sapiens
ccagaccttgtttttgctttctcagtttggcagtggcgagtaagaaaagaagctatgatgggtctggctcagctttataagaaatactgtcttcatggtg

SEQ ID NO: 518957 - DNA, 75 bp, Homo sapiens
ggtaaattgatcaggatttttggcctaccctccaaagaaaagggtttgaaagtattcttgaagggctgtttggac

SEQ ID NO: 518958 - DNA, 82 bp, Homo sapiens
agcgaccaaagcgcctgaggaccggcaacatggtgcggtcggggaataaggtgtttggagaagagggattgaccctgaatct

SEQ ID NO: 518959 - DNA, 99 bp, Homo sapiens
atcggattcctcagctacgaggaggcgctgaggagagattgttcagattccattctgtggggaaattgactgtgaggactggatcaaaaagaccactgc

SEQ ID NO: 518960 - DNA, 98 bp, Homo sapiens
ctcagcaacctgacaattctgtcgtgtcccgataatctcagtgataccttgaagaagctgaagataacagctgttgacaagactgaggatagtttaga

SEQ ID NO: 518961 - DNA, 100 bp, Homo sapiens
ctaaagaaaattatgtctggaaatatgactttggtagatgaactaagtggaatgcagctgggcggcaccttcctacttctgcccagccacagccctcccc

SEQ ID NO: 518962 - DNA, 100 bp, Homo sapiens
cctgaggaagactcagaaacacagcctgatgaggaggaagaagaagaagaagaaaaagtttctcaaccagaggagaagactgatatagaagggaccttat

SEQ ID NO: 518963 - DNA, 75 bp, Homo sapiens
gtttttgccacacttaacagatgtccaaaaagactcctgactgctgagcccatcatcttcgtttcggacagagca

SEQ ID NO: 518964 - DNA, 50 bp, Homo sapiens
tggagaagtccccttatgaccagaaaaatgtgatgagccacttgtctctg

SEQ ID NO: 518965 - DNA, 95 bp, Homo sapiens
ctcccggggaaatgtaccgtccagcgagttgcagatctacacttggtgaccatggaggctggtggcctccccttggagctgtggcgcatgatctt

SEQ ID NO: 518966 - DNA, 80 bp, Homo sapiens
ttgaggccaataccaccgtcggccgcatccgtttccacgactttctgggagactcgcggtgtccgtgggggacgtgaggc

SEQ ID NO: 518967 - DNA, 125 bp, Homo sapiens
aggacatcttcatttacagagcaacttgatgaaggtacacccaatagagaggcagaggcaaggctggcagcaaaacgggctgcccgggcagaagcaagagatatacgcatgagagaactggaacg

SEQ ID NO: 518968 - DNA, 101 bp, Homo sapiens
agagaaacccactgaagacgtctgcgtgagaatagagaccaccgagaaggatatggccctgaagccacatgagcggaaggagaagtgggagcgtcgtctca

SEQ ID NO: 518969 - DNA, 100 bp, Homo sapiens
ctttgccatcgacatatttcctgtcaccaacaaagatttcaggttacaggaatacttaaagatgctggagtaaacaatttaacaattcaagtggaaaagg

SEQ ID NO: 518970 - DNA, 100 bp, Homo sapiens
actgcagaaaggctatctgaagaaaagtagaaggaaaaacagaacgttgcaaactctggaaaaaaacttgggtctctggacactatgggcacacgactcc

SEQ ID NO: 518971 - DNA, 75 bp, Homo sapiens
cgctgcctggaaaggaagtaccaggacttgcacaggtactccaaagattcaggtttactcacgtcatccagcaga

SEQ ID NO: 518972 - DNA, 74 bp, Homo sapiens
ttgggctgccctgatcatcctgctgctccccggaagtaaatatgcagaggacatttttggagagctctttactc

SEQ ID NO: 518973 - DNA, 100 bp, Homo sapiens
gggcagcgggggagcagcgagcgggcttccgcgagccggagaaggcacaggcctgtcccgggtcccggcagacagcggtggcctacccgagcgcagtgtg

SEQ ID NO: 518974 - DNA, 104 bp, Homo sapiens
aaaatagttatggcgactttcagaaacaatcacatgaagactaaagcatctgtcagaaaagaacttagtgatttggcccgtgaccctccagcacaatgttctgc

SEQ ID NO: 518975 - DNA, 90 bp, Homo sapiens
cggcggcgctggggcccccagaagtgatcgctcagctggagaacgcggctaaagttctgatggtgaccattgtgaggtagatattttgtt

SEQ ID NO: 518976 - DNA, 113 bp, Homo sapiens
atttgtttaatcagtgcaagcgaaattaagggaaaatggatgtagaaaatgagcagatactgaatgtaaaccctgcaggaagaaggtagataatgactataatgcccttcgag

SEQ ID NO: 518977 - DNA, 83 bp, Homo sapiens
cgtttccgcagacagaagtggggagaagcggaggcctccggtgtggctgtctctgatggtgtcatcaaggtgttcaacgacat

SEQ ID NO: 518978 - DNA, 90 bp, Homo sapiens
tatagtgaaacccaagagctactgaggacagaaattgttaatcctctgagaatcgcgagcttcggcctcggctctgtaccatgaagaagg

SEQ ID NO: 518979 - DNA, 80 bp, Homo sapiens
agaatatatcctctaaatctgatgttcagcgtcttccatttctttcaagctcaaatctttcactggatgttttgaggggt

SEQ ID NO: 518980 - DNA, 80 bp, Homo sapiens
ctgtcttcggtggactccttcggcagtccacccaccgccgccgcctcccagggatccatatggctttggagacagtcgag

SEQ ID NO: 518981 - DNA, 89 bp, Homo sapiens
catgcaccatattcacatgttgcgcacagtgcaaaaaaatgcaaaatacgtgtgtttagcaaataaaaactgcccagtggacaagcgtc

SEQ ID NO: 518982 - DNA, 82 bp, Homo sapiens
gctttcctgggttgcttctggcggccatggtgttgctgctgtactccttctccggagccttcacgtaaatgggtccagtcat

SEQ ID NO: 518983 - DNA, 74 bp, Homo sapiens
agttaaaggatgaattactgaaattgctttggtgaagcacgtgcagtctaaaggatacccaaatgaacgttttg

SEQ ID NO: 518984 - DNA, 75 bp, Homo sapiens
cacttaccaagaattattatactgtggctggttggaaggaaaatcatgcaacattcatgagcgaactaaaaaatc

SEQ ID NO: 518985 - DNA, 98 bp, Homo sapiens
gtgctcacagctgcccattgcctaaagaacgatgaagaacgatacagatacagggaatatgcagaaagaggttatgagcgtcacagagcaagtcgaga

SEQ ID NO: 518986 - DNA, 100 bp, Homo sapiens
ctaaggaatgccaggctctggagggtcgctcctgcccctcctaaagctgaagccaaagcgaaggctttaaaggccaagaaggcagtgttgaaaggtgtcc

SEQ ID NO: 518987 - DNA, 90 bp, Homo sapiens
agatgctgcaaaacgtgactccccacaataaattattcaggacagggagttgaccaactgcaaagagtgattgacaccatcaaaaccaac

SEQ ID NO: 518988 - DNA, 73 bp, Homo sapiens
ctggcggcccccagccgccgcccacgcagcagggacagcagcagaccatctccattgccaaggccggcattct

SEQ ID NO: 518989 - DNA, 82 bp, Homo sapiens
catattctgtctgtccacgatagtgccaggcctatgttggagaggttgacggatatattcagacgttacgacacggatcagg

SEQ ID NO: 518990 - DNA, 75 bp, Homo sapiens
ccctcaggaaaagtggcagtggatgatagtgaggtctccagtccccagatttctgtgcatcctctctcatgcaaa

SEQ ID NO: 518991 - DNA, 87 bp, Homo sapiens
cggtgagcgcgtttcccgcctgagcgcaactagcggcgggtcgtgggcacctccagagactgatggagaggcagaaacggaaggcgg

SEQ ID NO: 518992 - DNA, 76 bp, Homo sapiens
tgaagagggaagacacgcggaaacaggggcgagaggtcaatgatcttaaaagaaaatctccttcagatctttggaa

SEQ ID NO: 518993 - DNA, 89 bp, Homo sapiens
gaagtccatccccatctgtaccctgaagaacttccctaatgccatcgagcacaccctgcagcgccgcaaagagaagcgagaaccggacc

SEQ ID NO: 518994 - DNA, 125 bp, Homo sapiens
gtgaggacgcggcagcccgtggagtcggctgagggaaaagcgaggcaaggcaggcgggaaacatggtagaatggtgcttacctcaagatattgaccttgaaggtgttgagttcaagtctatggcc

SEQ ID NO: 518995 - DNA, 74 bp, Homo sapiens
atggtgaaacaccactgaagcattgccaagaaacctctgtagaggagcaggatgcaaccgacaggctgtggccg

SEQ ID NO: 518996 - DNA, 83 bp, Homo sapiens
ccctacttcaaggataagggcgacagcaacagctctgccggctggaaggtgcagtctttgcaagccacatttggaacttttga

SEQ ID NO: 518997 - DNA, 101 bp, Homo sapiens
cttccctggcaagattcttctgaattgtgctgccttggccaaaagagattttgatgcaattacagatcctataatgaaagccaaaatggtggcccttaaag

SEQ ID NO: 518998 - DNA, 75 bp, Homo sapiens
gccgatccagcctgcggagcctgtggggcaggtcctgtgggaatggccgctgctgctgctgtggcaacaggaaag

SEQ ID NO: 518999 - DNA, 97 bp, Homo sapiens
atcgatggcctactggggataacattcatgcagaacatcagatcccagattacaggaatgcagtaatcgtggccaagtctccagcctcggcgaagag

SEQ ID NO: 519000 - DNA, 75 bp, Homo sapiens
gaccaactggcaacagaaaatgaaaagtagtgtggcacagataaaacatcaggcactggccaagatgatgctgat

SEQ ID NO: 519001 - DNA, 100 bp, Homo sapiens
tgccaccagtcagccatcgtgctgggggacctgaagcttaggaagttcgtcttctccacggaggagagatgccccttggtgtggccactgcaaggctctg

SEQ ID NO: 519002 - DNA, 75 bp, Homo sapiens
ggatcgctgtgatcgtcacttggtgattacgtttttgaagaagaaggacaagttcatcagcctggtgttgaagca

SEQ ID NO: 519003 - DNA, 82 bp, Homo sapiens
ctgcaaatttcactttggacacgtgagtcagagacttaattcagtgcacaaatgagatgaatgtgaacatcccacagttggc

SEQ ID NO: 519004 - DNA, 98 bp, Homo sapiens
gcaaaggcttctatggtactggcgagacattcctcttctccttctccccacagctgaagggtaagaaggtggatggctctgtaaatgcctatgccata

SEQ ID NO: 519005 - DNA, 75 bp, Homo sapiens
gatgagaactggttctacacgcgagctggaactgtggctgcaccatctgtcttcatcttcccgccatctgatgag

SEQ ID NO: 519006 - DNA, 75 bp, Homo sapiens
gggacagtgctcaccgagcacgtggcggccgccgagctgggcgcgcgcgatgtgtctgggaagctgaggatctgg

SEQ ID NO: 519007 - DNA, 88 bp, Homo sapiens
agaagagcccagctagcaccttcgccctctccagccaggtacctgtatcccacgttcatcgatgccctgcgggacctggacgatgccc

SEQ ID NO: 519008 - DNA, 90 bp, Homo sapiens
ggagatgctgggcagacacatcgtagcagtgttgcccgagattgacccggttttaaaaagttgcagaaagaagaaaggaaagggaaagaa

SEQ ID NO: 519009 - DNA, 50 bp, Homo sapiens
tacagcgatggggacacagaaggtcaccccagctctgatctttgccatca

SEQ ID NO: 519010 - DNA, 99 bp, Homo sapiens
ccccttcctagaaggaccaagatggcagcagtgactctgctggctttggcgtatacacaggctggtgcagtggtgtcatcttggctcagtgcagcctcg

SEQ ID NO: 519011 - DNA, 98 bp, Homo sapiens
gaacgcccgtgccgcgtctccgcgttcccagcccgggtccccgcgttcacagccccagcgcagttactgcaacaaggaggtatacaataaggagaatc

SEQ ID NO: 519012 - DNA, 80 bp, Homo sapiens
gctgcgtgtagcacctaggtgattctgatgcacactcaaatttgacaggtgctggagaatctggtaaaagcaccattgtg

SEQ ID NO: 519013 - DNA, 75 bp, Homo sapiens
tgaagcacggggaacgggtcggatgaagctgcacacatacatgtaagagaagcaaaaatgtcagatgatatcagg

SEQ ID NO: 519014 - DNA, 100 bp, Homo sapiens
caattgtccacggcagcaccaaccaccaactctggatttactctttgagctgttgagagatgtgacgaaaacaccagtacgctgggagcggactcttgga

SEQ ID NO: 519015 - DNA, 82 bp, Homo sapiens
aaccatttgcttttctggggagtcctggcggtttttattaaggctgttcatgtgaaagattgtcctgggtcacataatgcca

SEQ ID NO: 519016 - DNA, 131 bp, Homo sapiens
gtggcgagctgaggtggaggcaggctgcggcagacggcgacagtggcggcggcgccatggcagggcttgcaggtaagtaaggaggtctctgtaccatggctcgtacaaagcagactgcccgcaaatcgacc

SEQ ID NO: 519017 - DNA, 100 bp, Homo sapiens
ctggccgcctctgccgcagctggagatctttgatggaaaacagattccacagagaatggttgatggatggaatgctttcttctttgataaaacagaagaa

SEQ ID NO: 519018 - DNA, 83 bp, Homo sapiens
gggctgaagcgactgagtccgcgatggaggccgccatggcatcagatgaaggcaaactttttgttggagggctgagttttgac

SEQ ID NO: 519019 - DNA, 100 bp, Homo sapiens
agctgggatctatgagtggaaaggtgaccaagcccaaagaggagaaagatgcttctaagggtgctacagaatattttagaaacagaaaatgaatattcta

SEQ ID NO: 519020 - DNA, 96 bp, Homo sapiens
aggacaccagcaagctgttcaatgaggagctcatctacatgcactggatgaacacggtggtgaattactgcggccccttcgagtatgaagtcggct

SEQ ID NO: 519021 - DNA, 96 bp, Homo sapiens
attggtattcagttaccgcctccgtagttacaaggattgtggagaatattgaaaaaccactcaagaaggttattattgaagaaactggtaatttga

SEQ ID NO: 519022 - DNA, 98 bp, Homo sapiens
gaattaggtggtctgactaccagtggctctgcagaggtgttgacttcaaaatcaaaactgtagagctaagaggaaagaaaattagattacagatctgg

SEQ ID NO: 519023 - DNA, 101 bp, Homo sapiens
cgaagaagactcccccacatctgggtaatattaacggctgctatttgaactattacttttttcttctggctgctattcaaggagctaccctcctgcttttc

SEQ ID NO: 519024 - DNA, 75 bp, Homo sapiens
tcctacttcattgcccctgatgtaactggactcccaacaatacccgagagtaatggatggctcactggaatgccg

SEQ ID NO: 519025 - DNA, 100 bp, Homo sapiens
tgagcggttgtggtcattgtgagggagatgcagttaaagacttgatgcttcgctttctgggtgaaaaagctgcagcaaagagacaagtcctaaatgccga

SEQ ID NO: 519026 - DNA, 97 bp, Homo sapiens
aacagaaattctggaacacctatatgacctggaatggccaaatatcaaggtgaagttcaaagtttgaaactggatgatgattcagttatagaaggag

SEQ ID NO: 519027 - DNA, 131 bp, Homo sapiens
ggggctgggcatcaacggcaaagttttgcagatcttcaacaagaggacccaggagaaattcgccctcaaaacaatgcagatcttcgtgaagactctgactggtaagaccatcaccctcgaggttgagccca

SEQ ID NO: 519028 - DNA, 73 bp, Homo sapiens
ggaaccttcactaaccagatccaggcactgtgcatccccacctttcagctcctagaacagcagaatggtctcc

SEQ ID NO: 519029 - DNA, 74 bp, Homo sapiens
aactgatgacgggggagcttccttattctcacatcaacaaccgagatcagacctcaattactgtttttcaggaa

SEQ ID NO: 519030 - DNA, 75 bp, Homo sapiens
atgcaccttcccctgccttggaaagagttcaagctgaagaagatgtggaaaagtcccaatggaactatccggaac

SEQ ID NO: 519031 - DNA, 100 bp, Homo sapiens
gccctgtgtgacaccaagataagtaacgcccggaggctgtttgatgtcctgcacgagcccttcttgaaagtaccctgatgaccccagctgccaaggaaac

SEQ ID NO: 519032 - DNA, 75 bp, Homo sapiens
gctattgtcacacctttgaaaccaggatttaagcgagagcctcactggttcccaggacatcaacctgaactggat

SEQ ID NO: 519033 - DNA, 78 bp, Homo sapiens
aattgaagaaaaaagtaaactacttgaaaaatttagccttgttcaaaaagagtggaaggaatgaaggccagctgaatg

SEQ ID NO: 519034 - DNA, 90 bp, Homo sapiens
gctaaaaaccccggagtcttcctgatccatggacccgatgaacatagacacagatgatgttgaatttgaagtatcatcggaccgacggac

SEQ ID NO: 519035 - DNA, 100 bp, Homo sapiens
tccgcatcgtcgtcctccccgaccgcgtcctgcagcagctgccagtggagccgcctgtgtatgagtttagagtcaaagaatctagcatcatagctccagc

SEQ ID NO: 519036 - DNA, 75 bp, Homo sapiens
agacatacggcgagtggaatcgggctgcatggctggcaaaactgctgttgtgtgtaggaaatttctttggctcca

SEQ ID NO: 519037 - DNA, 95 bp, Homo sapiens
agccccgcttgaggccgccagcgtgccttctgcagactgtgagcagaaaaggtactttgtggactatcggagagtgcttgtctgtggaggaaacg

SEQ ID NO: 519038 - DNA, 74 bp, Homo sapiens
cattgacatggtgatggctgctcagcctcgaagggcctcccattggccaaacacagcagcaaaccagaggacaa

SEQ ID NO: 519039 - DNA, 83 bp, Homo sapiens
cagccgatccagcctgcggagcctgtggggcagagcccataggcagcatgtcatccatggaagtgaacgtggacatgctggag

SEQ ID NO: 519040 - DNA, 96 bp, Homo sapiens
tccgtggcaaccaaagacgggcgcctatcagtacacaataaggtttttcccaaatggatatgccttcgccactggctctgatgatgccacttgccg

SEQ ID NO: 519041 - DNA, 100 bp, Homo sapiens
ctcccaaggtgctgggattacaggtggtttcatggccccctgaacagggcggatgcagagagcctcctgtccctctgcaaggaaggcagctacctagtgc

SEQ ID NO: 519042 - DNA, 129 bp, Homo sapiens
ctgcgggctgagcggcgagtttccgatttaaagctgagctgcgaggaaaatggcggcgggaggaacctgttttgttcactggaacaatgaggaaaaacctggatccctttaatgagcacacggatgagg

SEQ ID NO: 519043 - DNA, 100 bp, Homo sapiens
caagcagatgggtctgcatgggttacatttatttcgttcacccctgtcaacaggttgttggaaaggacaccaatgtcatgttggtggctttggcagcaaa

SEQ ID NO: 519044 - DNA, 82 bp, Homo sapiens
ctgccacagcggcttcgagctctcctctgatggcaggacctgccaagccccctctctgaagaatgcagccttcctaggtcca

SEQ ID NO: 519045 - DNA, 75 bp, Homo sapiens
aagaaaagagaagaaccagaatttcctgagccttccaaacattactgcaacaaggaggtatacaataaggagaat

SEQ ID NO: 519046 - DNA, 75 bp, Homo sapiens
tgtggcatggcggacgaggggaagtcgtacagcgggaccttggtagctaatgtccgaagaaagtgactctctgag

SEQ ID NO: 519047 - DNA, 90 bp, Homo sapiens
gcaagtggattttctacgtgtttctctgctttggcgtcctgtacgtgaagctcggagctcccctgaacagcagctgcagcagccatggcc

SEQ ID NO: 519048 - DNA, 87 bp, Homo sapiens
tgataggggggttccatctcccaacttgtccatgttttgattcccaccatggccatcacccagtttcggttatttaaattttgtacc

SEQ ID NO: 519049 - DNA, 74 bp, Homo sapiens
ctctgaaatgagtgaggaaaaacgagccaaacttcgtgaaattgagattactttctatgaagacaaaaattttc

SEQ ID NO: 519050 - DNA, 75 bp, Homo sapiens
ctatccttcagcttttggatccattacaggcccagcccactgggaggcagtggatgtggtgggccaggctggcaa

SEQ ID NO: 519051 - DNA, 100 bp, Homo sapiens
cgcaaccattgacgccatgtcgggttattcgagtgaccgagaccgcggccgggaccgaggatgtggacgagtgctcactagcagaaaaaacctgtgtgag

SEQ ID NO: 519052 - DNA, 100 bp, Homo sapiens
tcagaaggagctagctgaaataacccttgatcctcctcctaattgcagaaagggactaaggctcctcaggctgcaggaaagattcacacagattttgaaa

SEQ ID NO: 519053 - DNA, 98 bp, Homo sapiens
tgacggctgagacatgagatcttcagcctccaggctctccagtttttcgtcgagagattcactatggaatcgccacaagtatatggttatgatgactt

SEQ ID NO: 519054 - DNA, 100 bp, Homo sapiens
ctcaccctctgggtcatcgaccaagctggtgtcatagatgaagattatagaggaaatgttggtgttgtactgtttaattttggcaaagaaaagtttgaag

SEQ ID NO: 519055 - DNA, 75 bp, Homo sapiens
cttgggacctgaccatcctgctgtgaaatccgggtccccggccgtgctggcattcgcaaaggagaagtcttttgg

SEQ ID NO: 519056 - DNA, 100 bp, Homo sapiens
tcaacaacattggcgatgcctcctcgctcatccgagccaccattgaacctagaagtcggaatccggaagaagatcgaacatgacgtggtgatgaaagcca

SEQ ID NO: 519057 - DNA, 75 bp, Homo sapiens
aggtgttcgagaacgaccccgagacgcgtccgtctccaagagagtatgaagagagtgcgtctgtagggcagggaa

SEQ ID NO: 519058 - DNA, 82 bp, Homo sapiens
ggaggtttggcagatggagaacctgatcgaacttcggaaacccagcgtttgctggcagaaccagttcctggcatcaaagccg

SEQ ID NO: 519059 - DNA, 75 bp, Homo sapiens
gggccctgaaaaacggagacttggatgaggtgaaagactatgtggccaaggagatggaataaactgagactgcag

SEQ ID NO: 519060 - DNA, 98 bp, Homo sapiens
ctcatttcgggtttggaagaggatcagtatggcatgcccctggccatcttcacaaagggttcacctttagatgttcttaaagatgaaagggttcagta

SEQ ID NO: 519061 - DNA, 74 bp, Homo sapiens
cacacccaatggacagcatgcctcaccaagtcacatgacaagcaatgagggcagaagtgcagttgaccaagcag

SEQ ID NO: 519062 - DNA, 60 bp, Homo sapiens
tcatgggcgcctcggccgccatggtcttcagcggtccgcgggagagctgtggggcttggt

SEQ ID NO: 519063 - DNA, 145 bp, Homo sapiens
cgtgaagaaagtgggaaaggttggcgctaatggtcagaatgctgctgggccctctgcagattctgtaactgaaaaaaggcagagtgcttattcactttggaagcgcactcgcaggagcagaagaagagagtgtgctggtgcctgt

SEQ ID NO: 519064 - DNA, 75 bp, Homo sapiens
aactgtttgtagccctcgtccagacgccccaaacaaacaacgaagttatacggaagcgtctcctcattgatggag

SEQ ID NO: 519065 - DNA, 75 bp, Homo sapiens
ggacaagtcggtcattgagctcagccgacagggcaaagaggttcaaatctgaacatcaatgatgtactagggaac

SEQ ID NO: 519066 - DNA, 82 bp, Homo sapiens
tacaggctcttctcgttttactgaaaaaggcacctcctcagataacactgaggttgcatatttaaagacacttaccaaggaa

SEQ ID NO: 519067 - DNA, 78 bp, Homo sapiens
tcagtgtattcgttctgtgcctgaactcaaagatgcccttaaaaggccagtgaagaagcaaaggaagacatgaaaatt

SEQ ID NO: 519068 - DNA, 100 bp, Homo sapiens
cttcgttgataccccagccaggcacatccctgattcctctggtcttagtacccactgtgtctatggttggaaagcatttgggcgcaagaaaggatcatcc

SEQ ID NO: 519069 - DNA, 76 bp, Homo sapiens
tcgggccagggacacggctcaccgtgctaggtacatgtcccagagcaagcacacggaggcccgggagctcatgtac

SEQ ID NO: 519070 - DNA, 75 bp, Homo sapiens
tatagtagtggacacatgggcactttctttgcctttatggagaaaaaggcagagaacagcattgacttcatcagc

SEQ ID NO: 519071 - DNA, 97 bp, Homo sapiens
ccacctaccccagcggccagatcggcttcatgctgtgcagcaagaacccgtctcttcaagaaaatgaggaggaggagattgggaacctagagcttgc

SEQ ID NO: 519072 - DNA, 87 bp, Homo sapiens
atttttgacagcagctgtatatcttctaagattccgctcctcaccaccatcaggctgctttgctggctctgcaagaaaatggactag

SEQ ID NO: 519073 - DNA, 97 bp, Homo sapiens
ccgcccccttggccactgatcccccgaagagcttctgtcgccgctctaggtgctcttaaagttccgtacagataaaggaagagatcccagttctgat

SEQ ID NO: 519074 - DNA, 74 bp, Homo sapiens
cttctcagaaattttggatatggagccttatgtggaacataaaggccctcgggaccaaggatcacgtcatgact

SEQ ID NO: 519075 - DNA, 100 bp, Homo sapiens
tctgtagcatcaatgagtcagacaagcggtggtgaggcaggctcgcctcctccagctgttgttgctgctgacgaatccttagtactgtggaaaagagcag

SEQ ID NO: 519076 - DNA, 83 bp, Homo sapiens
ggagcaagcgggcgagggcagcgccctaagcaggtctatcagccacagtctctgcaagtttccaagagcagcagaaaatgaac

SEQ ID NO: 519077 - DNA, 82 bp, Homo sapiens
ggggtagcgggagtgatgtctgtggggccgccggcggcccggcttcagacggcgggcgctaacaccaccgacaaggagctag

SEQ ID NO: 519078 - DNA, 75 bp, Homo sapiens
ggggatggacctccagatttccttactggtctcctctgagcctccggcctccataagacccaaaacagatgacac

SEQ ID NO: 519079 - DNA, 82 bp, Homo sapiens
cactgaagacgtctgcgtgagaatagagaccaccgagggtgtccttctgtgctgaacatgtccgtaggaatgccctggcact

SEQ ID NO: 519080 - DNA, 98 bp, Homo sapiens
atggcgagcgactccccggctcgaagcctggatgaaatagatctctcggctctgagggtcctcctcgactggattaatgacgtgctggtggaggagag

SEQ ID NO: 519081 - DNA, 83 bp, Homo sapiens
ggcagcagcccagacgcggcacagagagggcctgggagcttgctgcagcttcaggtatcacctcttctgggctcaagatggac

SEQ ID NO: 519082 - DNA, 90 bp, Homo sapiens
gccccctccgaaaactgggccatggagcactatggagatgaccgccatggccacggaggacccccagagcgccacggccgggactcccgt

SEQ ID NO: 519083 - DNA, 49 bp, Homo sapiens
tttttttaatgtggttggaacaactgagagttgtaaagatgtggcacct

SEQ ID NO: 519084 - DNA, 96 bp, Homo sapiens
caggaccgcaagtcccgtcttatgggacttgaggccctcaagaaactcccatcaagactgaagcagacgttttggcagaaaaccaggttcttgata

SEQ ID NO: 519085 - DNA, 100 bp, Homo sapiens
cccaccgccgccttcttggcgcgaccccaacccagccccaggatctaccgaacagaaagggacaaagggacattgtatgagctcaccttcaaaggggacc

SEQ ID NO: 519086 - DNA, 90 bp, Homo sapiens
gcggcagcgagttgaactttaggagagctgtgttctctgcagattctaagctccgagctctgtccagtggtgggagtattacatcccctc

SEQ ID NO: 519087 - DNA, 51 bp, Homo sapiens
ccaaactgtatatgagcccagagcagcaacaggaacaagatcctaccaacc

SEQ ID NO: 519088 - DNA, 100 bp, Homo sapiens
caactggatttggaagcagaattccattttactcatctcataatgactttcaagataaacctctcataatgaaggcccccgctgtgcttgcacctggcat

SEQ ID NO: 519089 - DNA, 75 bp, Homo sapiens
ctgccaccatcttcgacttgagcgaagttttatgcaaggagcatcagatccatgctgctgctgactcggagcccc

SEQ ID NO: 519090 - DNA, 100 bp, Homo sapiens
ctggatcttatggaggtctgacattcaaggatatttatctaaaaattcttcttttgagtgccagtaaagctacttttccaggtatgtgggagagaacaat

SEQ ID NO: 519091 - DNA, 100 bp, Homo sapiens
gggacagccctgtcccactcactctttcccctgccgctcctgccggcagctccaaccatgggaggccgcgtctttctcgtatctccagatgaaatggcca

SEQ ID NO: 519092 - DNA, 100 bp, Homo sapiens
aggattgagtctctggggagcccctcaaaagcctgataagctccgaagaagtatgcctaacctagcccggatgccaagtacaactgccattagtagcaac

SEQ ID NO: 519093 - DNA, 82 bp, Homo sapiens
cagttttgaaatcgacacacaaagaatagagttgagcctgtgggacacttcggcttcggaaccaaaaagaagcttcccagag

SEQ ID NO: 519094 - DNA, 100 bp, Homo sapiens
gtttccaggaagttcagagagaacagatcgcccaggaccacaccgcagcgtaactgcaggcctctcagcgaaaaagggggaaagcaaagacccgggtgtg

SEQ ID NO: 519095 - DNA, 50 bp, Homo sapiens
ggcctctccagccatgtggaactgtggtcctggctctgccatatgacacc

SEQ ID NO: 519096 - DNA, 100 bp, Homo sapiens
cggccggcaaccgagggacccgcgtccagcacatcccgctctgggctttaaacgtgacccctcgcctcgactcgccctgccctgtgaaaatgttggtgct

SEQ ID NO: 519097 - DNA, 100 bp, Homo sapiens
gttcgtgaaagctttctgcccagagctcctggaccaatgcatcttcccaccaccttaaaccactgcgtacacagactttactaaaagagtacaaagaaag

SEQ ID NO: 519098 - DNA, 50 bp, Homo sapiens
gctagtcctggtggatctgcagtacgaagttttagaaagagcgttttcgc

SEQ ID NO: 519099 - DNA, 100 bp, Homo sapiens
ccgtgaccgagagcgtgaccgagagcgcgaatatcgtcatcgttagaagggcctactctaggtgcggtacttcactatagtttataaaagatggtccctg

SEQ ID NO: 519100 - DNA, 74 bp, Homo sapiens
ggttcatggaatagttgtctacactggacatgacaccaagctgatgcaggttattcagcaaagaaatgaagaat

SEQ ID NO: 519101 - DNA, 76 bp, Homo sapiens
ttgtagagatgacaacactgataaaatccactcattgctgcaagttgtcctcgaagaaggtacaattgcttttaaa

SEQ ID NO: 519102 - DNA, 75 bp, Homo sapiens
tttcggccctgggaccaaagtggatatcaaacatcatggaagggaagtggttgctgtgtatgttactggtgcttg

SEQ ID NO: 519103 - DNA, 90 bp, Homo sapiens
cacgggctgcggacaccaagggttgctagaaaatcctgccttgcttcgttgggcctatgcaagaacaataaatgtctatcctaatttcag

SEQ ID NO: 519104 - DNA, 83 bp, Homo sapiens
gaactcaaggtcttcatagaccagaaccttagtcccgggaaagggaaggtggccatccagaaggaggacttgcagaagtacca

SEQ ID NO: 519105 - DNA, 110 bp, Homo sapiens
ggcctcggccaagaagataatcgtcaagcacgtgacggtcatcggcggcgggctgatgggcgccggcattgcccaggtccagtggcattgcagagcacggatggttgcag

SEQ ID NO: 519106 - DNA, 75 bp, Homo sapiens
tgaccaggacctaatcaagctgtgccaaccttcatggctcagttccacgaaaagatctaccagatgctgaagaac

SEQ ID NO: 519107 - DNA, 100 bp, Homo sapiens
gctctgctcttcctcagcagacttctcgttaaatgcatcttctgcagacaccgggttaagagggtctctggagcctgcatccagtgttcctacggtcgct

SEQ ID NO: 519108 - DNA, 100 bp, Homo sapiens
agaacatccaaggttccattaaatacatcatgcttaaccctagttcacgaatcaaggctcaggcccgatgtcaccgcataggccagagcaaagctgtgaa

SEQ ID NO: 519109 - DNA, 101 bp, Homo sapiens
cccagccagcatcccggtcaacacgcggtacctgaacctgcaagagaacggcatccagggaactgctcgcagaaagaagaaggtggttcatagaacagcca

SEQ ID NO: 519110 - DNA, 75 bp, Homo sapiens
cacagctgctgattcattgtttgaccgacagggcaagccgattttttcagttgatattcaccctgacgggaccaa

SEQ ID NO: 519111 - DNA, 100 bp, Homo sapiens
tttctgacgagtatcacgtgatccggcacgccatgaacctggaggccgtgaacacctacgaagggatggattgataactttaatggaccaagtggtctct

SEQ ID NO: 519112 - DNA, 82 bp, Homo sapiens
ttcgcgtctctctgctgcggcgcggggaccgctgtgctctcgcctcctgctcttcatggatgaagcagacgccttccttcgg

SEQ ID NO: 519113 - DNA, 90 bp, Homo sapiens
aagaaagaaaattagagtgaatgtagttgcaccagaaaaatatggtgttatccctaagaaatgcttccctgaatcttatacaacagaggc

SEQ ID NO: 519114 - DNA, 90 bp, Homo sapiens
gaaggacgtgcagatgctgcaggacgccatcagcaagatggaccccaccagctatgccaagaccaagacgagagccgaggtgcggggcgg

SEQ ID NO: 519115 - DNA, 100 bp, Homo sapiens
ttttcgaggaagccctggaaaaatatgggaaggatttcacggacattcagcaagattttcttgtctttaaccgaactgtcacactgaaggaagacccagg

SEQ ID NO: 519116 - DNA, 50 bp, Homo sapiens
gaccatccaggacctgcgggacaaggttctgtacagagtaatgagatgtg

SEQ ID NO: 519117 - DNA, 90 bp, Homo sapiens
accttccggagcttctcagaagacagagggttttcttttgaggtacaatgccagggagtactacgaccacctgcccgagctgaagcaggc

SEQ ID NO: 519118 - DNA, 75 bp, Homo sapiens
cctcagcatctcccttcatgtctgggtcatgtcattcctggaagcagcgagcttgatgagccaagtgtcgtaccg

SEQ ID NO: 519119 - DNA, 49 bp, Homo sapiens
gccggcgcttacctctgctacaggggtgctgttggcccaaaggttgccc

SEQ ID NO: 519120 - DNA, 75 bp, Homo sapiens
aagaactggctcaagaaatttgcctcgaaaaccaagataaggagccccgtggaatcatccctttagagaatctga

SEQ ID NO: 519121 - DNA, 90 bp, Homo sapiens
ctggacttcttcatcagaacaagtgatagttttgacaacaaattattttccatcacctggcattactttacatgagcgtttctcaacaat

SEQ ID NO: 519122 - DNA, 75 bp, Homo sapiens
ccctcagccctgtggctgggggcagagctcaggaatcctatgaggatggttgtgaggattatcctactctatcag

SEQ ID NO: 519123 - DNA, 80 bp, Homo sapiens
atacctcttgggactgggctcgatttgagcccaagaagatgaaaggattgttcttgttgacaacaaatgtaagtgtgccc

SEQ ID NO: 519124 - DNA, 83 bp, Homo sapiens
cgcaaggtcgccctcaaggccatgatcaaaactgtgtcccggcatggatatccggaacaacctcactaggttgcatgagctgg

SEQ ID NO: 519125 - DNA, 100 bp, Homo sapiens
ctgacgtctcccacttccgcttccatctcatgggcctcctgagtgacccagaattaggtccagcagcagctgatggcttctctctgctcatgtctgactg

SEQ ID NO: 519126 - DNA, 78 bp, Homo sapiens
atacgagctgctgtgaataggcgcatcagaggggttgagaatgcttgcaccaagcttgtccaggcagctcagatgctt

SEQ ID NO: 519127 - DNA, 80 bp, Homo sapiens
cgccagcctcggcaccgtcctttcctttctccctcgcgttaggtatcgagaaccttccctgcgaacttcagaggaacttc

SEQ ID NO: 519128 - DNA, 97 bp, Homo sapiens
gatggtggttcctgctgccctcaaggtcgtgcgtctgaagcctacaagaaaggccaaatacctcaccaagaaaacccaggcagccagcgtggaggct

SEQ ID NO: 519129 - DNA, 96 bp, Homo sapiens
gctccaagccagatatggtacaggactgtcaacgaaacctggcacggctcttgcttccgatcctgctcacactaaaatatgaaccacaaacacaca

SEQ ID NO: 519130 - DNA, 82 bp, Homo sapiens
ttgtttgtggatcgctgtgatcgtcacttggtggtgcgcgtgggcagggcgcggggacatggggcccgacatggagctgccc

SEQ ID NO: 519131 - DNA, 82 bp, Homo sapiens
gagagggcagcacgcgctgtgggttccagcaacagatagaaatgctttaagttcactctggggaaagctggcctctgaaatc

SEQ ID NO: 519132 - DNA, 75 bp, Homo sapiens
cggcagcgcggacccgcccggagatgagagtctcactctgtccttcaggctgtgagtgcagtctcctgatcttgg

SEQ ID NO: 519133 - DNA, 89 bp, Homo sapiens
gagcatgacccagcgtccacacacaaatccacacgccctgtgaagaaggtctccaggtgagaactctgtctcagtcgacgggaagtgca

SEQ ID NO: 519134 - DNA, 83 bp, Homo sapiens
cgcggcgctctggctctggctgtgcgcgctggcgctgagcctgcagccggccctgccgggaaccctactctggaaactgtcag

SEQ ID NO: 519135 - DNA, 75 bp, Homo sapiens
aatatggtggaaaaaggaatcattgacccaacaaagtggagagactttgctaaagaagtggatgggttacttcga

SEQ ID NO: 519136 - DNA, 75 bp, Homo sapiens
agggacacaactgccacaagccggacacgtgtatctcgggggagctttgtgccttgatggatcaagttcatcata

SEQ ID NO: 519137 - DNA, 100 bp, Homo sapiens
gccgactgctgcctggtctgcaaagaagtcctttcaagtctctaggactggactcttcctaagcaagtccggcagcctgcttctgcaaagtggtacgatc

SEQ ID NO: 519138 - DNA, 50 bp, Homo sapiens
gtgcagtccattgctgtagctgacaatgtccagaggaggtttatgaccct

SEQ ID NO: 519139 - DNA, 83 bp, Homo sapiens
aaataccactatcttcctgaagtgcaaacaatttacattttcttatgaaaatgaagtctgcaaacaagattactttattaaat

SEQ ID NO: 519140 - DNA, 74 bp, Homo sapiens
gggactgtgctgtcaaaccatgtcaatctgagccttcacgtaaatgggtccagtcatgcctcccagtaagaagc

SEQ ID NO: 519141 - DNA, 87 bp, Homo sapiens
ggcttgtcaagtccatcgagatcccccggcctgtggacggcgtcgaggtgcccggctgcggaaagggcgccatgttttggaagtttg

SEQ ID NO: 519142 - DNA, 82 bp, Homo sapiens
tgttgcttccttcttcatattgaagaacttcaaccccacagtatatttgtcaggatacgaatcaggttctcttcaagtgctg

SEQ ID NO: 519143 - DNA, 83 bp, Homo sapiens
tagatcacatactccaagaagacaccaaatgatttctcagtatcactaaaagcacaagggaaaaacaagcattttaaagtcca

SEQ ID NO: 519144 - DNA, 80 bp, Homo sapiens
taatatacacgtgaaatttgaaaactgtacattcgaaatactttcagagctctttcattcatcctgacaatggccagaga

SEQ ID NO: 519145 - DNA, 75 bp, Homo sapiens
agtttgagaaacctggatctgcgatctgtttgtgtgacattctgaaagttcccaaacctgaacctataccagagc

SEQ ID NO: 519146 - DNA, 116 bp, Homo sapiens
agcgatccgagggactgcgccgcccggacggcctgcagagcgctgccatcatgagggggatatgagactttctactcggaatatcctgagtgttgcgtggatgtaaaacccatttc

SEQ ID NO: 519147 - DNA, 75 bp, Homo sapiens
aacgattcaacccgggggagctcagatgagttttgatcatcctgagaaaaatgggccttggcctgcagacccaat

SEQ ID NO: 519148 - DNA, 75 bp, Homo sapiens
atatgaagagacatgagatggtggaagaatccccaggaaaattgcctaagaattatgacccaaaagttaccccag

SEQ ID NO: 519149 - DNA, 101 bp, Homo sapiens
ccaggactggacctccgctggcacccctgagtgcctccctgccagcatgcttgagagttcaaaccggcttgatgaagaacacaggctaattgccaggtatg

SEQ ID NO: 519150 - DNA, 100 bp, Homo sapiens
gctggttggccctgtgatccctcaagactggtccacggagtgtatgaccacaaacagccatcaagtttttctcaaaatctgaggagctgctacggaaagc

SEQ ID NO: 519151 - DNA, 100 bp, Homo sapiens
caaccatccgtgtggtgtccatggacagagactaccacgtggcatgttaccactgtgaggtgggatgctatggaatatgatgagaagctggcccgtttcc

SEQ ID NO: 519152 - DNA, 51 bp, Homo sapiens
ttgagtccaagttcaaccaagccattttggaatcgaagcctcttaaaatgg

SEQ ID NO: 519153 - DNA, 90 bp, Homo sapiens
gccggaggagtcagctgtgtgtccagaacgtgccatggagacgcttaacgaacactctgctccagccaaggtggtgagggcagctgttcc

SEQ ID NO: 519154 - DNA, 51 bp, Homo sapiens
catcttccatcctgagaatgcaggagtggagcaactgctgtagtccaagca

SEQ ID NO: 519155 - DNA, 98 bp, Homo sapiens
gaacatgtatggagacctggtcatggacacagtccctgaaaaggtggttgtgtcaaaccgattggtgacatctccatgctgtattgtcacaagcacat

SEQ ID NO: 519156 - DNA, 100 bp, Homo sapiens
gggatgtcgtctcagcagtgctcgggcgcaggacccttgaacatctgtgaagaaatgactattctgcatggaggcttcttgctggccgagcagctgttcc

SEQ ID NO: 519157 - DNA, 101 bp, Homo sapiens
gcaccgcagcactggagctgtcctgaaggtactctcgcaggaaatgggaattctacttgtgtgggctcattggtgggcagtattacttatgggaattgctc

SEQ ID NO: 519158 - DNA, 75 bp, Homo sapiens
ccaggtcacacactgttgcagcacagcatcctgaggttagcattacacttctcccagtggagcccatgacttctg

SEQ ID NO: 519159 - DNA, 83 bp, Homo sapiens
gtttgagtccgcatcgccacagctgaaggctgcgagggactaagagcagatgctgggattacaagcgtgagctaccacaccca

SEQ ID NO: 519160 - DNA, 113 bp, Homo sapiens
ctgtgtgatgcttttgatatctggggccaagggacaatggtcaccgtctcttcaggtcacagtgtccatgtaactaactcctggttaagaggatatggatagaaggcacatgt

SEQ ID NO: 519161 - DNA, 101 bp, Homo sapiens
gtgagaggagatcatgctcctacctggggaagtcgagacaacatgagtgtgattttgatctgttttccaaatgcacccaaagtatcgccagaagcagtgaa

SEQ ID NO: 519162 - DNA, 90 bp, Homo sapiens
gccggaggagtctcagagctgtcagaaaggtctcagctgagtctgctctgatcacccaacaagacctagctccccagcagagagcggccc

SEQ ID NO: 519163 - DNA, 101 bp, Homo sapiens
tgataagcttcgaatggacagagccatccctgacacccggcatgaccagaggcaagtgaggcctatctggttggcctttttgaagacaccaacctgtgtgc

SEQ ID NO: 519164 - DNA, 100 bp, Homo sapiens
cggatcgccgcgctcagcgacaaacaagatctcatctggccaccgcgttctggaagaggcgagagggagagcgtgcgcgagaggagagagacggcggggg

SEQ ID NO: 519165 - DNA, 90 bp, Homo sapiens
ctttattttgaccacctgatgtccagggtggtgccactccagattgttcagttcaagggaatgaagaattcagaataattttggtaaatg

SEQ ID NO: 519166 - DNA, 82 bp, Homo sapiens
tgcacacaggaaaatgtttctgcacaactaaaggaataaaaggtgaccaatgccaattgccatggtaggggaggagtgtgta

SEQ ID NO: 519167 - DNA, 50 bp, Homo sapiens
gatcacaagttgcatgttgactttaggcttgtgaaaaaacagttgaagaa

SEQ ID NO: 519168 - DNA, 96 bp, Homo sapiens
cttttgatgatcatgatacagttgataaaattgttggttgtgtgcctttcttggagcagcctgcagcagccttcgtgcgtctgaatgaggctgtac

SEQ ID NO: 519169 - DNA, 76 bp, Homo sapiens
gtggaaagtgaccctcacctccagatgggggctgctcagacactgccaggatccggatcacctgtttgaaaccatc

SEQ ID NO: 519170 - DNA, 83 bp, Homo sapiens
gggacctcactgagaagtattttgctctgcgaaacatcatccagaagggaactctaatgatccaggacaaagaagttaccctg

SEQ ID NO: 519171 - DNA, 75 bp, Homo sapiens
ccaggtccaccacctgctccatttgcaagcaaagtccaatccactgccgatatctttggtgacgaagaaggagat

SEQ ID NO: 519172 - DNA, 75 bp, Homo sapiens
caacccgcagagacttctactggctgcgctcctttctggccggagctccttgctcggattgaacgtatggaaagg

SEQ ID NO: 519173 - DNA, 100 bp, Homo sapiens
ggcggaggaactgagacgtttcgaattccagggccgagatggacgaaaaaatgtggttccttgtgttctctctgtaaatggggacctagaccgaggcatg

SEQ ID NO: 519174 - DNA, 100 bp, Homo sapiens
taagcctcgacttagaagctaccgagttaccctaagaaaggtagctacagcaagctgggtagcaggcagatccaaaggatatcatgaagtttccagggcc

SEQ ID NO: 519175 - DNA, 74 bp, Homo sapiens
tcagcttcggagaatggagtcttccatcaatcatatctcacagaatgaactctggaagcccagccagggacaat

SEQ ID NO: 519176 - DNA, 100 bp, Homo sapiens
tgccagccctgacgggacagagccagggcactcaccaggctgcaagaacagtgctgggacggtgatcgttggctcctacttgattgcacacggtttcttc

SEQ ID NO: 519177 - DNA, 88 bp, Homo sapiens
cttcctggagcggctggaagcgcggggcggccgggagggggcagtcctcgccggcgagttcagcctttaccactcctgaaggccctaa

SEQ ID NO: 519178 - DNA, 100 bp, Homo sapiens
agtttttggcaccatatactactttttccagaattcatacaaagagtacatatctgaagagatggattaagaatgctttggattaaggattgtggagcac

SEQ ID NO: 519179 - DNA, 82 bp, Homo sapiens
cggacttctcctgtaggaagtttcctcgcatttctcagaatcccacgtggcgaagtctcgattttggaattatgccagaccg

SEQ ID NO: 519180 - DNA, 75 bp, Homo sapiens
gtggtggtgactatctgaagaagcctgggggcgcgcacaactacgggattggcgccgccgcctgcgtgtactttg

SEQ ID NO: 519181 - DNA, 75 bp, Homo sapiens
tgcagaaggtctctggagacatcttcagcaggcctatgagctgtccacgctgacagggacacaggtgctgttgct

SEQ ID NO: 519182 - DNA, 100 bp, Homo sapiens
aagctgtccagttacactctgaggatattaaaccctgtacccaagcctgtcatcaaaattgagaagatagaagacatggatgacaactgttatctgaaac

SEQ ID NO: 519183 - DNA, 75 bp, Homo sapiens
ggaagggacaccgagggaccaaagggcgtctctggcatctctatcccctatgaggcaccacgtaagacctcctgc

SEQ ID NO: 519184 - DNA, 100 bp, Homo sapiens
gccgactctgggcggcgaggaaggcgtctcccggccgagccattttgcaggaggtgctggacgcagacctgagcaacgaggccttcccgttctccaccca

SEQ ID NO: 519185 - DNA, 101 bp, Homo sapiens
tggcaggatgtctgaaggggttgtcctcacttctgtgcaacttcactaagtccatggaagaaggtggatgcccggagcataccagtgttagcaaaatggca

SEQ ID NO: 519186 - DNA, 108 bp, Homo sapiens
agcaccgcagccttgggcctcgcgccggctatggccgtgccctggggctgagccctcagcacaggaagtcctggagaacctgaaggaccgctggtaccaggcggacag

SEQ ID NO: 519187 - DNA, 100 bp, Homo sapiens
cctaaccatgccggagacctgtagataccagcctttcaaaccagtggtttgtgatgaaaatggttccaagggctatggatttgtacactttgagacgcag

SEQ ID NO: 519188 - DNA, 100 bp, Homo sapiens
accgcggtgggattccagctgtctgattaatgagaaacataatgtattttgctccagaaacatgacaaggaggactttcctgcctcttggagatcagagg

SEQ ID NO: 519189 - DNA, 75 bp, Homo sapiens
ggaaacaatggcatttacagaaagagtcaacagcagtggcaacagatttacagccagttacttactcagaacctg

SEQ ID NO: 519190 - DNA, 112 bp, Homo sapiens
ctctctgaggacatctctgcaaaggccccagcggcccagggagaaaacatggagatatgaatgactgtgtggagcagaacccaccttctcccagctcagctttggactgtga

SEQ ID NO: 519191 - DNA, 100 bp, Homo sapiens
tgaatgactatcctaaatttaaggaatggaagttggatacactttgtgacttgtacgagacactgaccattacacaggctgttatttttctcaatacgag

SEQ ID NO: 519192 - DNA, 100 bp, Homo sapiens
tcagcctcccgagtggctgggattacagcccctctgaaatcaaagagatcttgcatctggctggactcaatgagctggaggtgattcccttggtgcagac

SEQ ID NO: 519193 - DNA, 50 bp, Homo sapiens
ggagctaatccctgaatatctgaacttgatcctgctccctcggtgtctgc

SEQ ID NO: 519194 - DNA, 100 bp, Homo sapiens
tgaactaccctgagaatgggtggactcccggagaggattcctaccgagagtggatacaggatccaaactactggatacaggtgcatcgcttggaacatgg

SEQ ID NO: 519195 - DNA, 106 bp, Homo sapiens
ttccgatcgacccggtaccaagaaggggagtgcccgcggcaggccgctttgtagttcagaatgtttctgcacagaaagatggagaaaaatctagagtaaaagtcaa

SEQ ID NO: 519196 - DNA, 82 bp, Homo sapiens
gatgggatccagctgttagtcgggtaggcatagtgtgccggtccaacaaaagcccttgggtctgtttgacttgttcaagtgt

SEQ ID NO: 519197 - DNA, 88 bp, Homo sapiens
gtgaccgggatagagaaaggagctcagatcgtaataaggatcgcagtcgatcaagtttgctgaatggtgcttagagtatggagaacat

SEQ ID NO: 519198 - DNA, 82 bp, Homo sapiens
ttcattagcactttacaagcccagctcagccagacacaggcagagcaagctgcacaggttccagtcctttggatcaagttga

SEQ ID NO: 519199 - DNA, 100 bp, Homo sapiens
cacagatgatttccaacaaggatgagatggtgcacagatgtattcataaaggaagacattagatccagccattgtggccaccaggctctgtggacccatc

SEQ ID NO: 519200 - DNA, 50 bp, Homo sapiens
caggaagcagaatattccttatatgggttagtcagcaacataaaatcaac

SEQ ID NO: 519201 - DNA, 98 bp, Homo sapiens
ctgaggtggcagcctatgaattcactactctgaccactgtgcctggtgtcatcagatacaaaggtgccaagatccagattgcccccgaggaattagca

SEQ ID NO: 519202 - DNA, 98 bp, Homo sapiens
agcccgctgagcaggatgaggatccgaaatgtggcagcaaatctctgtgtggacagcaagcatggagccaccggaacagagctgaggctggacatctg

SEQ ID NO: 519203 - DNA, 100 bp, Homo sapiens
gctgtggctgtgcgacctgcagggactggcagacccgtagctaagacgccaggatttcctggaagcagagaaatggtgaattatgtaacctcattacgct

SEQ ID NO: 519204 - DNA, 75 bp, Homo sapiens
agctcctggcaaaactgcgctttctggctgaggaggagagaagatgactgaggaggaggtggagaccgttctggc

SEQ ID NO: 519205 - DNA, 100 bp, Homo sapiens
agagaatgacctagcaaaagttgatgatcttccccctgaacctgcacttgttgccaagtcttccatcttactagatgtgaaaccttgggatgatgagaca

SEQ ID NO: 519206 - DNA, 50 bp, Homo sapiens
gctgttgctggacccctggcagggtctggccagcatgacccagaacttag

SEQ ID NO: 519207 - DNA, 75 bp, Homo sapiens
cgccgctgccccggctgcctcctccctgaggtccttaatcacttgcataaaaagttgaagaacatgtcaaagaag

SEQ ID NO: 519208 - DNA, 115 bp, Homo sapiens
gtaggatttccgggagaggctgctgtggaggctgaggaggcggcggcggagatctggaatagcctaacatggcagaccagagacagcgctcactgtctacctctggggagtcatt

SEQ ID NO: 519209 - DNA, 97 bp, Homo sapiens
gaaacttttgttggaggaagaaccaacaaccagtcatggtcagggacaaactctgcctgggcgagtccttttcctgcgttatgtcgttcagacccta

SEQ ID NO: 519210 - DNA, 100 bp, Homo sapiens
cggtttgggaccttgaacaaggcaaatatggttttgggtttcatcaccttaaatggttttgaaccaatgaaggtgtattcccttaaaaagacggacagcc

SEQ ID NO: 519211 - DNA, 99 bp, Homo sapiens
acctggagccctggctgccgctaaagcagccaaatatggcatccgtgtcattctggaccttactcccaactaccggggtgagaactcgtggttctccac

SEQ ID NO: 519212 - DNA, 107 bp, Homo sapiens
gtttcttggagtccacttccaattccaaggtaaagagaaatgtgtatgaccttacaagtatccccgttcgccaccaattatgggagggctggccaacttctgctaca

SEQ ID NO: 519213 - DNA, 75 bp, Homo sapiens
gtggaacttgttggaaatggaacatacgggcaagtttataagctctgggtgaaccaggaggatgaggtggaggag

SEQ ID NO: 519214 - DNA, 107 bp, Homo sapiens
aactaaactccaaatattagagcttagagaaaaccagttaaaaatgttgcctaaggctgctgctcagagcaaattaggtcactacacagatgcgataaaggattgtg

SEQ ID NO: 519215 - DNA, 82 bp, Homo sapiens
aacgtgctgatgaccctcgagggagacatcaggctgggtgccaaatgtgacatccagatgacccagtctccttccaccctgt

SEQ ID NO: 519216 - DNA, 100 bp, Homo sapiens
tgaagctcaagggactgtgtccaccctcaggcatgctggaagatggactgccctccaatggtgtgccccgatctacagccccaggtggaatacccaaccc

SEQ ID NO: 519217 - DNA, 82 bp, Homo sapiens
ccccaaatgtctgactctgactctcggactgagaaacgcaaggtgatgatgaacagtctacacagatggctgcaagttggga

SEQ ID NO: 519218 - DNA, 100 bp, Homo sapiens
tttgtcctggaaggaaaaagatctaaagtcacccggcggccaaaggccagtgactaccaacgtttggaccagaagatccgagggaagggcttcgactggc

SEQ ID NO: 519219 - DNA, 74 bp, Homo sapiens
gtttctgtcaggatgaattggcagagcttgacccaggcactatatcgtcgtcctccccgcagtcaggctgccca

SEQ ID NO: 519220 - DNA, 100 bp, Homo sapiens
aattacccttcatattggagactacaatatggatggctatccagacgctctggtcatactaaagaacacatctggaagtcattcctgtattccatcaacc

SEQ ID NO: 519221 - DNA, 75 bp, Homo sapiens
gctggaaacttcgctatcatggagatcgtgataaagtcatcccactcgctattcctcagtgtggaaaatgcagaa

SEQ ID NO: 519222 - DNA, 83 bp, Homo sapiens
tttggagtgtgcgtgcgcgccgagcgtttaagctatgaagaaggacatccctcacactctgaaacagatctccttcagagaca

SEQ ID NO: 519223 - DNA, 74 bp, Homo sapiens
cagtcccgggcgggccgtcgcgggagaggtttacccaaggtccagcctagcccctaggcaccatgtcggacagt

SEQ ID NO: 519224 - DNA, 82 bp, Homo sapiens
aagaaatctctagactcagatgagagtgaggatgaagaagatgactaccaggctggagcattggatttgctaaaggagctta

SEQ ID NO: 519225 - DNA, 109 bp, Homo sapiens
gcctcaatgacaagatgtttgagcatgacttccgttggactgatggcagcacactggtacgttgaagatggagaacaactgatgtcaagacacattttggttgtaaggg

SEQ ID NO: 519226 - DNA, 82 bp, Homo sapiens
ggagatcacaccccgacggcagtccatgacggtgaagaagggagaggtctcggcgcggaagatggccggcggcgtggacggc

SEQ ID NO: 519227 - DNA, 75 bp, Homo sapiens
gaaacacaagaccttcgtggaaaaatacgagaaacagatcaagcactttggaagaagaaaggtggggcgaagcca

SEQ ID NO: 519228 - DNA, 75 bp, Homo sapiens
cacctggcacctgggagagccagcccgccaggggccgcctctgtcatctcactagacatttgaggaacctcctgc

SEQ ID NO: 519229 - DNA, 90 bp, Homo sapiens
gaatccaagagatgagagaggacccaacatggggcagaagcttgaaatcctcattaaagatactctcggaaatgtggctttagataatct

SEQ ID NO: 519230 - DNA, 100 bp, Homo sapiens
cccacggccgcctccggagcccgacgcgatccctgcatgtcactgagtccaccatgctttacagaagaagacagatttagtctggaagctcttcaaacaa

SEQ ID NO: 519231 - DNA, 83 bp, Homo sapiens
agaagtccttcttcgccaaatacgggttggccggagacctacgacatgaatacctcggagcccaagacggagcaggaaagcat

SEQ ID NO: 519232 - DNA, 75 bp, Homo sapiens
ctgcggcggggcggacggtcgcgcggcggcaggcacaggtcctctcagggtgcgccatcattgtccgaggtcagc

SEQ ID NO: 519233 - DNA, 82 bp, Homo sapiens
ccacctgcccggtgcccgaggaggcagccaagctcgtagcctgccactccgtgcggtttggaaatcccttgtctccaggttg

SEQ ID NO: 519234 - DNA, 97 bp, Homo sapiens
gaagaggggcaagcggccgtctcccctcgcacaccagaatggtagataacgcagatcatctctggaaaggatattgatccgcctcatgtaaagtatg

SEQ ID NO: 519235 - DNA, 74 bp, Homo sapiens
aaatagcgtctgagatcataggattactgatgctggaggatgaaaactcctcctctactaatctctgtgtggaa

SEQ ID NO: 519236 - DNA, 90 bp, Homo sapiens
ggcggcgccctgaagaagtgcaagagcagaggccttctctagaccttgccaagatggcacagactagacgcttgaagcaaagctgccatc

SEQ ID NO: 519237 - DNA, 100 bp, Homo sapiens
ttgaaagccttgaagtacttgtttagattcatcatccaatcccgagtgctctacttgagagctggtggagttgagatctataatggagatcgtaaaataa

SEQ ID NO: 519238 - DNA, 133 bp, Homo sapiens
cttcctcctcctcctccacctccggcttttgggggatcactgtcctctctcggcagcagggtgaggtggctttgaccccgggttgcccggccagcacgaccgaggaggtggctggacagctggaggatgaacg

SEQ ID NO: 519239 - DNA, 82 bp, Homo sapiens
gtgttcaccaaaacaccagcatggtgtaccagctttggctagatgatgctcagcaggtgtcttctgcggaggtgcgcatcgg

SEQ ID NO: 519240 - DNA, 80 bp, Homo sapiens
aacgacgttccatctgtggaaggacctaccaaccaggacttgaactgccatgtcctctgaagaaggaaagctcttcgtgg

SEQ ID NO: 519241 - DNA, 98 bp, Homo sapiens
tgagctccggcagagcgtgtctgaggccgtgcggggctccgtggtgctgaacatgttcttcaagtatacatggaataactttttgcatacacaagtgg

SEQ ID NO: 519242 - DNA, 74 bp, Homo sapiens
agctatacagctgctattaggcagtccctgagacggcgggcaacagcatcggcaggaacgccatggccgtcccc

SEQ ID NO: 519243 - DNA, 100 bp, Homo sapiens
ctgcagtccgagaacgccgcgctgcgcatctccaacagcgacctgagcgaccattcctcaagaattttgtatccaaggcccaaaagtttgttacccaaga

SEQ ID NO: 519244 - DNA, 100 bp, Homo sapiens
cctccttctcccggcgcctcaagcggaagcatgcaaggatctcgtggctcctgtccgtgatcgtaaactgaatacactggtgcagatctccgtaatccac

SEQ ID NO: 519245 - DNA, 97 bp, Homo sapiens
tctgactgccaatttccataagtggagcctctccgtgaaggatatgggccctcacattttccaaacctgtccatctgctaactattttgactgcaga

SEQ ID NO: 519246 - DNA, 100 bp, Homo sapiens
cagtctgtgacctgccccttctctttacgaacatgcttgccaactcagccagcgtgaggatcctcatcaagggaggcaaggtggtgaacgatgactgcac

SEQ ID NO: 519247 - DNA, 80 bp, Homo sapiens
ccaagctcgtagcctgccactccgtgcgcctccaggcccaaggtcagcatcccactgtcagccatcattgaggtccgcac

SEQ ID NO: 519248 - DNA, 76 bp, Homo sapiens
aagcagtgcttcgtggtgactgaaaaaggtgggaaagtctgtgtctcatgagaacaaagaacaagattcttattca

SEQ ID NO: 519249 - DNA, 75 bp, Homo sapiens
gccaagtggaataaaaaccaacatcaagtcggcttccatgcatccctaccagcgattgtgattgaggaaggtggc

SEQ ID NO: 519250 - DNA, 100 bp, Homo sapiens
cctagctccagccgcaatgccattaccagttcctacagctccactcgaggcatctcacaggagtggagtcaacatatcaatggagcaagtcacagtcgtc

SEQ ID NO: 519251 - DNA, 100 bp, Homo sapiens
ctccctgctccgcagcgacatcaccaagctggaggtggacgccatcgtcaacgccgaggtacagccccgtggtggaggccggctcggacatggtcttccg

SEQ ID NO: 519252 - DNA, 75 bp, Homo sapiens
cgcgtccccagagagcgccctgagagaacagggtggccgcttggtccaggctgatcagctgaccgaagaacagat

SEQ ID NO: 519253 - DNA, 50 bp, Homo sapiens
gtcggcacctgaaggacatggagatttaaccacttatgatacagtgaaac

SEQ ID NO: 519254 - DNA, 49 bp, Homo sapiens
ctcagggtgccagacctcatcgtactccaaagattcaggtttactcacg

SEQ ID NO: 519255 - DNA, 90 bp, Homo sapiens
gtggaattcgtgaaacttgtccgtgccaaatttcctgaacacaccattatgagagaagaagaaggaggttcctgctgtgccagaaaccct

SEQ ID NO: 519256 - DNA, 82 bp, Homo sapiens
ctcagttggaagcagccgatccagcctgcggagcctgtggggcaggaatcattaaccaatggcaacaggaatccaaggataa

SEQ ID NO: 519257 - DNA, 75 bp, Homo sapiens
ccgcagtcgtgcaggatctgaaggagctatttgagaaagtcaaagaagtttgtccaaatgtgcatgagaagatca

SEQ ID NO: 519258 - DNA, 100 bp, Homo sapiens
taccgggcctgcttgtatgctggagtcaagattgcggggactaatgccgaggtcatgcctgcccaggctgaaactaaattttacaatggtctcttgtttt

SEQ ID NO: 519259 - DNA, 100 bp, Homo sapiens
ccaaggaaaaatcgagcagaaagaatgtctttcaggaaatgtaccttctccgaatgcacctttaaagcgggtattagcctatacaggctgttttagtcga

SEQ ID NO: 519260 - DNA, 75 bp, Homo sapiens
ggcgggtttgctcccaacatcctggagaataaagaagatttgttcccgacaaggagttttctggttcagaccgta

SEQ ID NO: 519261 - DNA, 100 bp, Homo sapiens
tctgaaaactgaggaatttgaagtgaccaaaacagcaggtacaggtttgcagattccgccagcagcacagcaagctctacagatgagtggctctttggca

SEQ ID NO: 519262 - DNA, 75 bp, Homo sapiens
gggccggcagaggcgccgcagcgtcggagcaatgcaaggctaagccgggtacttcgtactggatttcgaggctgg

SEQ ID NO: 519263 - DNA, 50 bp, Homo sapiens
tggagagggggcgctgagctgttgggagagtaaaacttgtctcggcacag

SEQ ID NO: 519264 - DNA, 100 bp, Homo sapiens
ggaagcaatgtttgaacaaactcgaagaacagctgtggaaagaagttgcaaaacactggctccccccacccgctgcctgcggttttgtttctgttaaaac

SEQ ID NO: 519265 - DNA, 88 bp, Homo sapiens
gggagattcatcgaggtgccctgctctgaggactacgacagtcaccgcaggttcgaagcgtatctggtgcaggccgtgagagcagcgg

SEQ ID NO: 519266 - DNA, 90 bp, Homo sapiens
cggtccgcgagccaccgaggcccagtgcggcaccttcccgtctgatgctggcgttgtgcgtatggtgccctgacgtctgtccacgtgggc

SEQ ID NO: 519267 - DNA, 74 bp, Homo sapiens
tcttagccaactgagaggaaaagagaaataccatttcagacatgccaagagtctcactgtcacccaggctggag

SEQ ID NO: 519268 - DNA, 97 bp, Homo sapiens
cagaagatcactatgttgagttcagtaagcactcccaggatcgggtcatcggcacaaaaggagacattgcccacaggagaaggcagagcccccccag

SEQ ID NO: 519269 - DNA, 51 bp, Homo sapiens
gcgcctatcagtacacaataagggtagaagaccatgatggagaaggtgatg

SEQ ID NO: 519270 - DNA, 75 bp, Homo sapiens
ggcgggagaactcactgaggatgaggtggagacaattggcgatgcctacatggtggtgtcagggctccctgtgcg

SEQ ID NO: 519271 - DNA, 98 bp, Homo sapiens
ttataaatacgatgttgcagctcagccctgaagaaaagggaaaacttgctgcggttgctcaagagagaacatatgatgagctgttactgggagcagcc

SEQ ID NO: 519272 - DNA, 88 bp, Homo sapiens
agcaaaggatgagcggaaccttggaaaagccttcaagatggtcagcaaggccagcagtccacagcccaggtcaaagtccagtcccgcc

SEQ ID NO: 519273 - DNA, 75 bp, Homo sapiens
tgacaagaaaccattcaagtgtttcactcctaaaggttcatctctcaagaggaaggaacagagccacagagaaaa

SEQ ID NO: 519274 - DNA, 82 bp, Homo sapiens
acaagtttgcagatcgggagcgcaaggtcgccctcaaggccatgatcaaaacactctgtttgctggctacacggacaacctg

SEQ ID NO: 519275 - DNA, 107 bp, Homo sapiens
ggggagagctgtttgtgggccagctgccctctgaggagatggtcatgacagtaagactttgaccccgacgcaggcttcagtgattgccgcggatcagaagcctgagc

SEQ ID NO: 519276 - DNA, 83 bp, Homo sapiens
cgacaacatctcttctgaactcaagaccaggaatcccttggcaccatgtcctgtgtgcattataaattttcctctaaactcaa

SEQ ID NO: 519277 - DNA, 74 bp, Homo sapiens
agccaccttcagtatctcagtcctccagtgtttggatattcaggcgcagcccagcctcgaaatgcagaacgacg

SEQ ID NO: 519278 - DNA, 98 bp, Homo sapiens
catctacctaggcctctcacaagtggacatcttcaataaggagctactgctaatccccatccacctggaggtgcattggtccctcatctctgttgatg

SEQ ID NO: 519279 - DNA, 89 bp, Homo sapiens
ctgtatttccccatggccttcctcctcgctttgtgatgcaggtgaagaaacataagcagttaatgctagaatctatcatcagaggcctg

SEQ ID NO: 519280 - DNA, 96 bp, Homo sapiens
atgatgactaatttggttatggccaaggaccgcttacaacttctagttctggacatggcaagacatgtgccactctatcgggcactgctggaattg

SEQ ID NO: 519281 - DNA, 100 bp, Homo sapiens
cgacgacttctacatcctgggcagtgggctgggcagctgcaatgactctccgcacggtattattgtcattgcaagcactattggcagctgcagagccaga

SEQ ID NO: 519282 - DNA, 75 bp, Homo sapiens
tgtggcagctgcaaagttttcttcaaaagagcagtggaagatggtatacctcaagtttactatttcggcccttgt

SEQ ID NO: 519283 - DNA, 100 bp, Homo sapiens
catttatcaccttctgtggaaaggaagctgcacaggaagccgtgaaactgttgtggacatcggatacccaaggagacgaagctgaagcaggagaaggagg

SEQ ID NO: 519284 - DNA, 75 bp, Homo sapiens
gtccccagccctgcctctccctgggctctggtggaacggcacatgtgtgatggggacattgttatcttcaaccgg

SEQ ID NO: 519285 - DNA, 90 bp, Homo sapiens
gcgccgcccctccgtccctccgccccgcggcgcaggttagctttatacgtctacgaatatttactgcacgtaggagcacagaaatctgca

SEQ ID NO: 519286 - DNA, 100 bp, Homo sapiens
ctccactggaagagaacgtctccgagtccctcaactctctacgctttgcctccaagcgcgagcccagcattgacctgctgcaggccttcgtggagcactg

SEQ ID NO: 519287 - DNA, 75 bp, Homo sapiens
atacatcaaggaacaccacaccacgggcctcacatggagcaaaacagtaaagtcagtgataaatcttttgtttgc

SEQ ID NO: 519288 - DNA, 97 bp, Homo sapiens
tcgccgctgcagccctagtgactgcggcctgcatcccgggggtcctgatgacaacttaattgaaggtggaggaacaaaatttgtctgcaaacctgga

SEQ ID NO: 519289 - DNA, 98 bp, Homo sapiens
cgtgatagacctggatgtcttcctgaagaatggaggaaaaattactgtccctgacaaaacttctctagagttgctctgtcagggatgttctggtgata

SEQ ID NO: 519290 - DNA, 82 bp, Homo sapiens
tccaaagagaccatggcagcctgcagctaggactttaatgtggactcccattattgtcccagttgtttagaaaatatgccat

SEQ ID NO: 519291 - DNA, 100 bp, Homo sapiens
gtcatgctttcaacgtggagtttgatgactctcaggacaaagcagggttttgttcctgagtcgatgtttgaccgccttctcactgggcctgtagtgcggg

SEQ ID NO: 519292 - DNA, 74 bp, Homo sapiens
ctccaaagaagatgactatgaaagtgacgcagctacaattgtccagaaatgttagagacggggtttcaccgtgt

SEQ ID NO: 519293 - DNA, 75 bp, Homo sapiens
gcccgagcggctgctggggacggcggggaccgatgccatggacaatattaccaggcagaaccaattctacgatac

SEQ ID NO: 519294 - DNA, 103 bp, Homo sapiens
gacgactgggaccgggacctgctgctggacccggcctgggagaagcagcagcgcaagccacttccgagtggatccagttctttaaggaagccggcattcctcc

SEQ ID NO: 519295 - DNA, 75 bp, Homo sapiens
ttcatttagagtacagattttataaacagcttggcagtgcaggtgtgcaactgaggaacatggctcaagaaacta

SEQ ID NO: 519296 - DNA, 100 bp, Homo sapiens
ttcggtctcctggggtcggcgccgagtgggaggatggcggaagattttttatcaagcagaaatgcatcgaacaacgagaatcaagatcactgagctaaat

SEQ ID NO: 519297 - DNA, 96 bp, Homo sapiens
agccgatgcttgccgatgttgtcttcgaaattcaagttcagtgatgttgagatgggagaaattatcatgggaaacattgagcttactcgttatact

SEQ ID NO: 519298 - DNA, 90 bp, Homo sapiens
gttggatcttgctcagtctctgtcagaggaagatcccttgatcctgagactccagcaggatgtcttatcaacagcagcagtgcaagcagc

SEQ ID NO: 519299 - DNA, 90 bp, Homo sapiens
aggcaacagaatcatgtctttcagagcagcatgatcagcatgtttataaagctgtgcagtgacttctatgttttgggttgatgctgaatt

SEQ ID NO: 519300 - DNA, 50 bp, Homo sapiens
ccatctctggctccagggaatgtgagattttagggaacccagcctctgca

SEQ ID NO: 519301 - DNA, 98 bp, Homo sapiens
tggaagcggatcgaagtgatggccctgcccaaaccgggcggggcccacagcctaggtatgacatggagagcacagacaacggggcttccaactcagag

SEQ ID NO: 519302 - DNA, 75 bp, Homo sapiens
ctgttctaagtgccttaagagaggatcgcccaatccacatgcttttccaggccccttcacagatgtagtcactac

SEQ ID NO: 519303 - DNA, 83 bp, Homo sapiens
cagcgactcctggagatagactccgtaggccctgggaggagcggggacactgaggacctctctccaaattggcctctcaactc

SEQ ID NO: 519304 - DNA, 58 bp, Homo sapiens
gtgctcgtcgggagtgatcacctaccctacagggctgaagcagtgcctactcgacaga

SEQ ID NO: 519305 - DNA, 90 bp, Homo sapiens
agatgatagacagtgcccggaagcagggttggattgagattgttggatgtgctgatcgttcctgttatgacctctcctgtcatgcacgag

SEQ ID NO: 519306 - DNA, 100 bp, Homo sapiens
tttgttcatttctaatcaactatgctagacagctgcaagctgaaaagtgcctgcaatttgccatttatttgtaataagatacactgcctctaggactggg

SEQ ID NO: 519307 - DNA, 58 bp, Homo sapiens
cgccaagaagcacggcaccaaaaacaagcgcggaaccctcttcataaatcaaactcag

SEQ ID NO: 519308 - DNA, 100 bp, Homo sapiens
aagcggaccccggcccaggcggccttcgagaaaatgcaggagaagcgggtggtagctgagcacccagatgcttcaggtgaggagattgaagagctgctca

SEQ ID NO: 519309 - DNA, 100 bp, Homo sapiens
acttgacaagcctatagaatcggagaaataactttatttggactgagagctggagaatgagaataggacctgagagtatattgggctaaggaggagaggt

SEQ ID NO: 519310 - DNA, 98 bp, Homo sapiens
tcggacgtgcagtaccaagtgtcgatctttgtgaccatgccctgcacatatcgcatgatgagctatgaaccactggagcagcccacactggcttgatg

SEQ ID NO: 519311 - DNA, 85 bp, Homo sapiens
agcagtttacacatctcacccaattcaggttctctacttttagagtcgaaaataaatcctaacactgcataccagaaacaacagg

SEQ ID NO: 519312 - DNA, 98 bp, Homo sapiens
tgatcgactcggacacagaggacagcggcagcgacgagaacctggatcagagtacaggggctcaggtccaggtggcaggggatatgctacccaactca

SEQ ID NO: 519313 - DNA, 49 bp, Homo sapiens
ttgttaactacaacagaccatctggagaaggaagccaacatccttttgg

SEQ ID NO: 519314 - DNA, 100 bp, Homo sapiens
ggaagatgacgcccgggcccggaaggtatgagaagagctctcgtttcatgaaagttggctatgagagagattttttgcgatacttacagagcttacttgc

SEQ ID NO: 519315 - DNA, 100 bp, Homo sapiens
gggctcggcgcccggcggggactgcagtggcactgctgagctatttgcaacctgtgccaagaaggatatcagggtgtggcacacatcatccaacagggag

SEQ ID NO: 519316 - DNA, 82 bp, Homo sapiens
gcgaggaaaatggcggcgggaggggcataaggaaatggtggcaggcacttcctcctaacaagaaggaagtagttaaagaaaa

SEQ ID NO: 519317 - DNA, 90 bp, Homo sapiens
gggctggccaacttctgctacagacgactcagataaagtagccaatatttggtgcagcttcaatgtctttctgaagattaaggatatttt

SEQ ID NO: 519318 - DNA, 82 bp, Homo sapiens
aagttccggcacaccgaggctcggccgccccgccgcgaggtgcacattcaggttcccgagcacaaacatcaagataacgttc

SEQ ID NO: 519319 - DNA, 87 bp, Homo sapiens
ccatggacttcaacatgaagaagctggcgtcggacgcgggcatcttcttcacccgggcggtgcagaagcaaggtctcgctgtgttac

SEQ ID NO: 519320 - DNA, 89 bp, Homo sapiens
gaaaaatcacgggctgtccaggaactgtcggaacagaaccaaaggctattggatcagctcagcagggacttggatgttgtgggtgatgg

SEQ ID NO: 519321 - DNA, 50 bp, Homo sapiens
gcggaggaaggactcctcgctctatatagtttcaccagtgatcattaaag

SEQ ID NO: 519322 - DNA, 82 bp, Homo sapiens
ttttgagaggggaagatggggacaaagccgctccacctcccatgtcggcacagggatcaaaggaagcagttccaggtactgg

SEQ ID NO: 519323 - DNA, 95 bp, Homo sapiens
gggcagctgatgtctcagccctccacggcctccaacagcttacctgagccagccaagaagagggatcatagacggtatttctatgtaaacgaaca

SEQ ID NO: 519324 - DNA, 83 bp, Homo sapiens
gcccccggcccgcgctgcccgcactcctggtcctgctcggggctctgttcccagacagaaccaagttgtattgttagacacac

SEQ ID NO: 519325 - DNA, 112 bp, Homo sapiens
gaaatgtgtcttgttgcatttggtaatttagcagaacttggtgaccaagaatatggcccaggtgaccaaagccctggacaaggccctgagcaccatggacctgcagaaggtc

SEQ ID NO: 519326 - DNA, 100 bp, Homo sapiens
ccccaaattatgatgatgatgatgatgaacgagctgatgatactctcttcatgatgaaggaattggctggtgccaaggaactgcaagcacatgttgacca

SEQ ID NO: 519327 - DNA, 98 bp, Homo sapiens
ttgatggagggtggatggtggatgttagagaggatgccctaaatgagaccagggaatcagagacaaagctgaaggagctcccaggagtgtgcaatgag

SEQ ID NO: 519328 - DNA, 51 bp, Homo sapiens
gtgtgacaaacagagatatcatttgtcagttggcactacgagatgcacttt

SEQ ID NO: 519329 - DNA, 100 bp, Homo sapiens
gtggaaaggctctcagtgaaaaagggcataattggaatatcatttggagaaagtgtcatggaagttctgcgtccacagcttataagaattgatggccgga

SEQ ID NO: 519330 - DNA, 90 bp, Homo sapiens
cgacaccgcgagctatatctgcgcgtggagctgagtgacgtacagccacataaagaagatccctaatagtcatttctcaacaattatata

SEQ ID NO: 519331 - DNA, 90 bp, Homo sapiens
attccaagtaactcttatttgattggctctaccagtgcacctggacagggaggaatcctggctcagcgggagtttgacaggcgattctcc

SEQ ID NO: 519332 - DNA, 100 bp, Homo sapiens
cttgatggtttctatagagcctggcaccaagtggaatattacaggtcccaatattgaagcccatggatcttatggtagaagcgagtccacggcgaatttt

SEQ ID NO: 519333 - DNA, 75 bp, Homo sapiens
tcatggtatcaattttgtcagtcctgttcgaaaccaaggattcactccttctccagttgcacagccacacccttc

SEQ ID NO: 519334 - DNA, 100 bp, Homo sapiens
actggctgttgaccctgttcaggcctcggtgaaggtttggtgcacctcgatttggaggaagtagggcagggcccttatctggaaagaagtttggaaaccc

SEQ ID NO: 519335 - DNA, 74 bp, Homo sapiens
ttgcatcttcctctggctctacagcgatggcccactgcgtgaccttggttcagctgtccatttcctgtgaccat

SEQ ID NO: 519336 - DNA, 100 bp, Homo sapiens
tgttagaaggagcacagttattgaccagattccttttctggcagtagcaagagcacttggctcttcagaggtgttcctgcccccagaccccatctttgcc

SEQ ID NO: 519337 - DNA, 98 bp, Homo sapiens
caattaccttaccgactaatatccagaggagaataatttggaagactgttgtggaggccagtaatagtagccatgagtctcgtattggtctagctgag

SEQ ID NO: 519338 - DNA, 90 bp, Homo sapiens
cgaaaatggagcacgtccaggctgaccacgagcttttcctccaggcctttgagaaaaaattgtatggcgacttcttgagctggaagctag

SEQ ID NO: 519339 - DNA, 75 bp, Homo sapiens
gaaggtgttattgggaaaattcaacttcattcaggagggcttatcgagacaaattgaagttttggacccattgtg

SEQ ID NO: 519340 - DNA, 100 bp, Homo sapiens
ggaaagaagttgcaaaacactgggcttatctccacactgtaatggtagtgattgtggatattcatctagcatggaagggagtgaaacaggttctcgggag

SEQ ID NO: 519341 - DNA, 97 bp, Homo sapiens
gcccctgagtgtgcgtgcgtgcccggctaccaggaagatgctaatgggaactgccaaaaggtgagttctgcatcctggtacttcctcaatgtatttg

SEQ ID NO: 519342 - DNA, 83 bp, Homo sapiens
ggactacgtctgtgcggctgcgtggggctcggccgcgcggactgaaggagactgaaggtgtcccgacccaggctaagcttgag

SEQ ID NO: 519343 - DNA, 124 bp, Homo sapiens
aggcgagggtgcgatggcgcggagcccgggacgcgcgtacgccctgctgcttctcctgatcttcagtcgtgctggtgaagcctgcaaaaaggtgatacttaatgtaccttctaaactagaggca

SEQ ID NO: 519344 - DNA, 80 bp, Homo sapiens
caaagtttcatttctttaccttgaaacgtgaaagtaaatcagtgagatcagtgtgatcctttcaaggatgatccttttgg

SEQ ID NO: 519345 - DNA, 74 bp, Homo sapiens
tctcaggaatctggtctcattggctgggagaaccaccacagacgacgagctagaagagatgctggagagcggga

SEQ ID NO: 519346 - DNA, 90 bp, Homo sapiens
gccttttgcctcccaccgtgattctgaggcctccccaaccatgtgcaattgccgccgcccaccgcccgccgccatggggctgaaggccgc

SEQ ID NO: 519347 - DNA, 75 bp, Homo sapiens
ggcaaactccccatccagctccagcttaattggcttagtgtcgacttcaataattggaaagactgggaagatgat

SEQ ID NO: 519348 - DNA, 75 bp, Homo sapiens
cacatcaccctgacctgcttacgcccaggtggaagttaaacgagctgagcctcgggacagcaagagccaagcgcc

SEQ ID NO: 519349 - DNA, 100 bp, Homo sapiens
gctaaacgtgggtttcttactaaggacgagctgatcaagtatatgactgaagaaggcatgaggatgacgttcaacacttcaaggtcatgcgagacaacaa

SEQ ID NO: 519350 - DNA, 83 bp, Homo sapiens
ccaaggaaaaactggagagcttcatcaaaaatagtgatagctttgataaagagtgataatgaactctcaagtggaacaggtga

SEQ ID NO: 519351 - DNA, 75 bp, Homo sapiens
gtcgccatcaagaaagtattgcaggacaagagatttaagtgctcaacaggaaccttggattatattttacaacgc

SEQ ID NO: 519352 - DNA, 100 bp, Homo sapiens
ccacccctgaagaaattgcacagaaaaggtggacaagtcctattttcaagagaagatgacttttaacagttttgaaggatctaaaacttgtgtacctgca

SEQ ID NO: 519353 - DNA, 96 bp, Homo sapiens
tgggcatggcagacaaatctgtagctattgacctgaaaagtggttctggaaaagtgtaccaaggccctgcaaaaggtgctgctgatacaacaatca

SEQ ID NO: 519354 - DNA, 100 bp, Homo sapiens
cttgaaagccttcttgttgcaggctctgcgctgggtgaaattcgatgctactgtgatgctgcccactgtgtagccactggttatatgtgtaaatctgagc

SEQ ID NO: 519355 - DNA, 51 bp, Homo sapiens
cggggctcttcctcacagccattgaccaagatcactccatggatgaaatga

SEQ ID NO: 519356 - DNA, 97 bp, Homo sapiens
cctggcctgggaccacacgcagaacagccggcagctgagcctggtggcctccgttctcttggcccaggtgcacagcgacttcaccgcggcagccacc

SEQ ID NO: 519357 - DNA, 75 bp, Homo sapiens
gacaggtggcgacggcagaggagggcttctgaggagaatggcctgcctcacacgtcagccagaacccagctgccc

SEQ ID NO: 519358 - DNA, 80 bp, Homo sapiens
acgtgcagcctgggaactacatcctcaaggatgtctccaatacaacgacagcccagaagaggaagtgcagccagacccag

SEQ ID NO: 519359 - DNA, 75 bp, Homo sapiens
gggggttgctgacccagaggagagttctccaaacatgatcgtttactgcaaagataccagaaggccctattgatc

SEQ ID NO: 519360 - DNA, 75 bp, Homo sapiens
ttggatccttgtgggcatgatccataatcggtttcaaggtatagcccagtggtttccaaccttgctatgcatcag

SEQ ID NO: 519361 - DNA, 100 bp, Homo sapiens
aaatcttcaacataataagatatttgtgaaccaagaatcttactctgtcacccagtctggaatgcagtagcaagattttggcccactgcagcctcaacct

SEQ ID NO: 519362 - DNA, 145 bp, Homo sapiens
gctgaaccgcttcctgggggactatgtggagaacctgaacaagtcccagctgaagctgggcatctggggcggtactccaaagattcaggtttactcacgtcatccagcagagaatggaaagtcaaatttcctgaattgctatgtg

SEQ ID NO: 519363 - DNA, 131 bp, Homo sapiens
agatgaacagactagccactttgcattgactggaaacaatggcatttacagaaagagtcaacagcagtggcaacagctaaaagatggcggcaaggcagcccaggcaaatgtaagaataggcgatgtggttc

SEQ ID NO: 519364 - DNA, 80 bp, Homo sapiens
ctccagctccctacccatccgccaggagccctcttccttcaggagcttactccacgggaacagcctctagataatctgag

SEQ ID NO: 519365 - DNA, 95 bp, Homo sapiens
gccgtggtgcgcaccgagcccttccaggacggctacagcctgtgcccgggccgggagctgggcagaggctcacaggacacctgcatgcccaaggc

SEQ ID NO: 519366 - DNA, 98 bp, Homo sapiens
agatcgtcaccaaccgtgatgacgtccagggctatgccgccaagaccgtctttgagtgtgtttcctgtaacaaatcgttcaagaaactctggtccctt

SEQ ID NO: 519367 - DNA, 100 bp, Homo sapiens
ggaccctaatttgagaagtgcagggaccagttactctccacaagaaaattcacacaaccacagtgctcttcatagttcaaattcacattcttctaatcca

SEQ ID NO: 519368 - DNA, 87 bp, Homo sapiens
catttggaaaaacactagagacagacggctggcaggtaaaatgtcggttccaggaccttaccaggcggccactgggccttcctcagc

SEQ ID NO: 519369 - DNA, 100 bp, Homo sapiens
ggaccatggcggagccgcctcgggctgagtcatcactagagagtgggaagggcagcagcagcagagaatccaaaccctaaagctgatatcacaaagtacc

SEQ ID NO: 519370 - DNA, 100 bp, Homo sapiens
aaacaccagcaagccgtgagagagaataccagcatccaggggcgtgaactgtcagatgaagaagtgggaggtggggaagacagggctccagctaccacag

SEQ ID NO: 519371 - DNA, 76 bp, Homo sapiens
cgtgcggggctccgtggtgctgagcctcagcttaagggtatagttaccaagctatacagccgacaaggctaccact

SEQ ID NO: 519372 - DNA, 97 bp, Homo sapiens
ttgaacttaatacagcaagaaagaccatcaagtttaccagatggaggagctaaagattttgtccgacacttacactgttgagaaagtggaagttcat

SEQ ID NO: 519373 - DNA, 100 bp, Homo sapiens
cccatgttacccacaattccactctctgccttctctgaccccaagaagaccaaaccatcccacggctccaagacctgcgaccgcatcaagcagtccgcca

SEQ ID NO: 519374 - DNA, 75 bp, Homo sapiens
atggcgaccaccgtcagcactcagcgcgggccgttgcagagtgggcaggatcttaagacccgataggtgcagaac

SEQ ID NO: 519375 - DNA, 96 bp, Homo sapiens
actttcgccagcccgtgccgcgagcgcggcctgcaggaggtccggcctctttggcctacccccgttggctccgctgccccaggtcgatgagtcccc

SEQ ID NO: 519376 - DNA, 97 bp, Homo sapiens
tgaagagcgacaagccgctggcagccgcggatctcaccgccgctcaggggccaattcctgtccccccagcagcatggcatcgtgtgctgaaccctct

SEQ ID NO: 519377 - DNA, 100 bp, Homo sapiens
ctgagaacaacttaaacggcgattttagtgaagttgacgctcaagagcagattttagtccatggagaacagaatgaaatggccagattgaaagcagcact

SEQ ID NO: 519378 - DNA, 83 bp, Homo sapiens
gtcttgaaacacaaatggtttttgcaatggcaccagcatgatatcattgatcattcctcccaaagaccagatttcacgagtgg

SEQ ID NO: 519379 - DNA, 100 bp, Homo sapiens
gaacccaacctagtgggtgtaatacatcatgaactgcaggtgtcgatatatagtatctggttttatgacaagaatgactgtcaccgcatagcaaaactca

SEQ ID NO: 519380 - DNA, 75 bp, Homo sapiens
ccaagatgcatggacccagctcagcgggacgcgccgctggagaatgaagattgtcttcgcagttttaccgactta

SEQ ID NO: 519381 - DNA, 82 bp, Homo sapiens
ctgaccctccgccaggcaaaaggaaggggagcttttggaagagtcccagatggaagcgaccaggctccggcagaaggcagag

SEQ ID NO: 519382 - DNA, 51 bp, Homo sapiens
tccatttctcctattgaggagtcaacagatgcccgagtggtaaaagacatg

SEQ ID NO: 519383 - DNA, 98 bp, Homo sapiens
cctcctcctcctccccaccaccaccatctccatcacccaccaacaacaccacaataatccacagccaagccagatgaattatactttgaggaaggtga

SEQ ID NO: 519384 - DNA, 100 bp, Homo sapiens
ccccgccgcggccatggaggacgagcggaaaaacggagcctacgatcgcccaggaccacaccgcagcgtaactgcaggcctctcagcgaaaaagggggaa

SEQ ID NO: 519385 - DNA, 98 bp, Homo sapiens
tccctgctgagatgcgcaaattcactccccagtacaaagcctagatctgttgatcttagtaacaatgaagcatcctctagcaatggcttcttgggaac

SEQ ID NO: 519386 - DNA, 88 bp, Homo sapiens
agcaggagctggaggaggagccgccgccgccagaatttcgctaaggagtttgtgatcagtgatcggaaggagctggaggaagatttca

SEQ ID NO: 519387 - DNA, 100 bp, Homo sapiens
ttgatatctgccctgtaggtgccctaacctctaagccctatgcctttactgcccggccttgggaaacaaggtcaataactgggagatggacaaactagag

SEQ ID NO: 519388 - DNA, 100 bp, Homo sapiens
tggaccctggaaaacctggccctcttcaatttctgacaaaagatgagtgtgggtcagagagccaaactgactatatctccagattatgcctatggtgcca

SEQ ID NO: 519389 - DNA, 73 bp, Homo sapiens
gagtatagggaggacgtgggcccattcattgcaggaacagggcggatacctgaccaactcgtgatcctagaca

SEQ ID NO: 519390 - DNA, 83 bp, Homo sapiens
caccaacagatgaagacagatgcaccaacgaggaagggaaaaggccgaggcatcagcgtgtgaagaccgcaaagacgatcccg

SEQ ID NO: 519391 - DNA, 83 bp, Homo sapiens
agaacggccatatttatgtgtgtgggaggactttcgactgcattttagaaatatttcaagaattatggattgtgttggttgtt

SEQ ID NO: 519392 - DNA, 100 bp, Homo sapiens
cttcagaagagtgtactgtcgcatggggagtctgtaacacttcgattttcagaattcctcctgggaatgctgactccttgcttggtgccctgatgcttct

SEQ ID NO: 519393 - DNA, 75 bp, Homo sapiens
atagtggcaggtgacagtctgcatgtgcagttttcagttgtcgagatgtccacagaaggaggatttggtggtact

SEQ ID NO: 519394 - DNA, 80 bp, Homo sapiens
gctggatgagctgctgaagcccaccgaattagacgatgcagtttcaaggaaaactaaaattcctgtttggacagaagaag

SEQ ID NO: 519395 - DNA, 51 bp, Homo sapiens
cgcggatcgccgcgctcagcgacaaacaagacagagcgggatgccaccagc

SEQ ID NO: 519396 - DNA, 87 bp, Homo sapiens
cctgcggacgctgcagataagttacgacgcagacatggatttgattgacatactttggaggcaagatatagatcttggagtaagtcg

SEQ ID NO: 519397 - DNA, 98 bp, Homo sapiens
gaaacaaagggcttcacagagaaggtggaggaactgcaatgtctggtggagaacagaaaccagagaggtactatgtgggtgtggacgttggaacaggc

SEQ ID NO: 519398 - DNA, 90 bp, Homo sapiens
gttttggggattccactctccagtgtaatgattattgacaacaggcatttccggagagttcttttgaagtcacttcagaaggatctacat

SEQ ID NO: 519399 - DNA, 90 bp, Homo sapiens
aggaaaaagcagtaaagccagaggaaggttggtgttcgaggaagagacattgttgttcttggtgtggagaagaagtcagtggccaaactg

SEQ ID NO: 519400 - DNA, 99 bp, Homo sapiens
gagattcatggcgtcgtttgcagcaagtcagctcaggccaaatttgagtttcatcatggtgactatgaaaaacagtttctgcatgtactgagccgcaag

SEQ ID NO: 519401 - DNA, 75 bp, Homo sapiens
gaaccagatgtcaaaactgatttcagaaatgcatagttttatccaggctagtaaagaaatccttttggctttttc

SEQ ID NO: 519402 - DNA, 100 bp, Homo sapiens
ctggtgaaagtcccatattctgtgggggcccctgaagccactgatggaagccacactaccggggcatcggaccatgaacccctgtcctgtatgggagcag

SEQ ID NO: 519403 - DNA, 98 bp, Homo sapiens
tcacgaatgcttgaagacagagatttattcgtaatgcgactcaaagctgcacggcagtctgtttatgaggaggcagtgggctttggaagactttgaaa

SEQ ID NO: 519404 - DNA, 75 bp, Homo sapiens
gcttcagtatgagctgcagtacaggaaccggggagacccctgggctgtgttatcaggaactgttgccgttattac

SEQ ID NO: 519405 - DNA, 100 bp, Homo sapiens
agtacttctcatggataaagagacgataacagcatacaggttttccccccccaccccgtcatgtacagctgaatcatgcagaatttgaagatcaagatga

SEQ ID NO: 519406 - DNA, 100 bp, Homo sapiens
ctgcggccggagcgggcggctgagacaaaggcgacggaactctaatgaatcattgattgaccagcactattttaccagttggaatgaatgatcagaaatg

SEQ ID NO: 519407 - DNA, 82 bp, Homo sapiens
ctctccgcaccgcggcttaaatgatgtattttgtgatcgcagcgatgaaagcagaagatggctgtgccacccacgtatgccg

SEQ ID NO: 519408 - DNA, 90 bp, Homo sapiens
cgccgctgaggccggaaggagctagacggcggtcgggtcactctgtgagactgctgggtcagaaaaaggataatggaaggcggcttgggg

SEQ ID NO: 519409 - DNA, 74 bp, Homo sapiens
gctgttcgacgtgcggcccgaatgccagcgcctcttctaccggggcaagcagccaacaagtcccaaatttggaa

SEQ ID NO: 519410 - DNA, 100 bp, Homo sapiens
ctgccttgtaattcttaatcagcctttggacaactattttcgtcatctttggaacaaaggtgctggagaatctggtaaaagcaccattgtgaagcagatg

SEQ ID NO: 519411 - DNA, 100 bp, Homo sapiens
aagtcagagctgcacaaagggaaaggaattcctagaggacctgtgcaacaacctcttgaggatcgaatcttcactcccgctgtctcagcagtctacagca

SEQ ID NO: 519412 - DNA, 99 bp, Homo sapiens
agaaaccataggcaatcttatagaagaatgtggagaaataaggttattgacctggaaagatgttcttcacataatgggaaaaaaacaaaaacagctttt

SEQ ID NO: 519413 - DNA, 100 bp, Homo sapiens
tgtggccttctgcgacgcgcagtccacgcaggagatccatgagaagggctggattctggatggcatccctgagacgcgtgagcaggctctgaggatccag

SEQ ID NO: 519414 - DNA, 74 bp, Homo sapiens
gcaggctgagtatgagacgcaagtcaaaggtgctggcatcggccccaccattcagattggggaggagacggtga

SEQ ID NO: 519415 - DNA, 75 bp, Homo sapiens
gattccccccacgcggcggcgccgcctgtttacgtccattttcgctgcgtggtgtttcatccattcctagatgag

SEQ ID NO: 519416 - DNA, 100 bp, Homo sapiens
gccaaacagcccagctcgcgcttcagcgtcccggcgccgtcgcgccactcctccgaattctggctgtgactcagtcactgacactgagcctgaggacgag

SEQ ID NO: 519417 - DNA, 99 bp, Homo sapiens
ttgcatttcctcgtcgagcgcaacccaaggtgtaattacttcaagcctccaggatggcaatccagttccgttcgctcttccccttggcattgcctggga

SEQ ID NO: 519418 - DNA, 98 bp, Homo sapiens
ggatgaaaggccccagctgggggctccttgccaccagtgctgtgtcttaagagctgccatcccggctggataacgaaggaggcccaacttcattcaat

SEQ ID NO: 519419 - DNA, 95 bp, Homo sapiens
gccaagtttctccgcaacaagatggatgtgcccagcaagtacaaggtcgccccacggctgaattctcggtgataaaggcgcccactggaccctcc

SEQ ID NO: 519420 - DNA, 75 bp, Homo sapiens
gccacctcgagctgcggtagcagcgactcatgagagcgcggccggaggacaggtgctggagaatctggtaaaagc

SEQ ID NO: 519421 - DNA, 87 bp, Homo sapiens
gcggcggtggcgagaggtgcggcgaaggaggcagaggcacttatgcttgtcaggagccaagttacaccctgtttaaccctgccttca

SEQ ID NO: 519422 - DNA, 100 bp, Homo sapiens
aagaaggaaaacatgacgtctccagccaaattcaaaaaggataaggagatcatagcagagtacgatactcaggtcaaagaatacgagccatcatgggaag

SEQ ID NO: 519423 - DNA, 75 bp, Homo sapiens
gaatggcatccagagagaggctctttgaactttggatgctttattgtacaaaggatgagctttctgatgttagcc

SEQ ID NO: 519424 - DNA, 73 bp, Homo sapiens
accgcgcgaacctcgctagctcgcaggccgcgccgggaccaggcatgtggcgtcatagtagaattaatcaaaa

SEQ ID NO: 519425 - DNA, 98 bp, Homo sapiens
ggagatcctgcatagccttcacagagagtccagttgccaagcacctccttttgtggctcgggagacgctaagggcctggcaagagaagaatcacccct

SEQ ID NO: 519426 - DNA, 80 bp, Homo sapiens
aaaagctgcagatgagagtgagagggaaaaagacctcgatgaagttctgcagacccactcagtgtttgtaaatgtttcta

SEQ ID NO: 519427 - DNA, 100 bp, Homo sapiens
cgaccagtcggccgccgccgctggccccggggatccgaagaggaagggcggtccgggctccacacttagcttcgtattcgtggacaccgtagggatgcca

SEQ ID NO: 519428 - DNA, 90 bp, Homo sapiens
acgagctagagttgccatttcgctgggatttttgggtggtgcaaaggaaaatggttctcctgaagaacatgcaatctatgtttgggatca

SEQ ID NO: 519429 - DNA, 75 bp, Homo sapiens
tggcaaggtgctggcgaacccgcggcggacttacgtcacgcctcctggcacagggaagaaggagaaagggccaac

SEQ ID NO: 519430 - DNA, 101 bp, Homo sapiens
tgtcgagttcccaaaaagctccgcaggggctgtagggaggtttccacttgagcggcacagtgacagaacctgcaatacaatcggagccagaaactgtttgc

SEQ ID NO: 519431 - DNA, 99 bp, Homo sapiens
gaagaggaaattaactatctgtacttataagaatttacatagtacatgacgaagttaaggataaagcttttgaactagaactcagctgggttggtgaat

SEQ ID NO: 519432 - DNA, 106 bp, Homo sapiens
ggacccatcatttctagtctccctcagctgttgagcagctcctgtcttcgttcctggctagaacaagacacctcctgtccaacatgcagaatgtctcttaatattg

SEQ ID NO: 519433 - DNA, 88 bp, Homo sapiens
aagatgataaagcatgtcagggaacttgctgagcaactattcaaaaatgtaccagcatcaagatgatttatggtaataaggtactcag

SEQ ID NO: 519434 - DNA, 104 bp, Homo sapiens
gatgacaccggagtttgacgaagaggtggtttttgaggtgctgctggtgagtagcagccggtacccagaccagtggattgtcccaggaggaggaatggaacccg

SEQ ID NO: 519435 - DNA, 75 bp, Homo sapiens
gtggagacgtggtactcagcaagctcgagttaaagttggatgtgctggaacagggtgaatcgaaacgcatcaccc

SEQ ID NO: 519436 - DNA, 80 bp, Homo sapiens
acccataatcggaatgtgatcacagagcctatttacccagaagtagtccatatgtccactgcttttaaggccctgcactg

SEQ ID NO: 519437 - DNA, 130 bp, Homo sapiens
ggatcggggcgcaagcggctccccaaccgggagcggctcacggcggaggacgacgcgctcaaccagatcgcgcgggagggcgttgaagggcaagattaagaaggaaagctccaagagggagctgctttcc

SEQ ID NO: 519438 - DNA, 97 bp, Homo sapiens
gataggcaggttaccatcactggatctgctgccagcattagcctggctcaatatctaatcaatgtcaggttcatgggcgggggtggtgagagctgca

SEQ ID NO: 519439 - DNA, 100 bp, Homo sapiens
aaaatgcacaaactatggcttacaacatcacacccctgcgcagggccacagtggaatgtgtgaaagatcagctcggcttgcccttcccctgcttgtgccg

SEQ ID NO: 519440 - DNA, 76 bp, Homo sapiens
ggaacttctgcccagctctccttgagagtaaaacttgtctcggcacagagtcaagtaaagaaagccaacatacagt

SEQ ID NO: 519441 - DNA, 80 bp, Homo sapiens
gcccagagactgctgagcccgtccgtccgccgccaccacccactccggacacagagcgggacaaggagaaccggcatcgg

SEQ ID NO: 519442 - DNA, 50 bp, Homo sapiens
aagaatgaagccgcggaccctcacggatcccaagtgatggtggtttcctc

SEQ ID NO: 519443 - DNA, 100 bp, Homo sapiens
atcggaagccggttggggtgtgagaggttttctcgctctagacgccatggagttggtgctggtcttcctctgcagcctgctggcccccatggtcctggcc

SEQ ID NO: 519444 - DNA, 90 bp, Homo sapiens
ctgatttcttttgcaaccctctgcattccatctctatgagccaccatgtcctccagtcgcagctggatactctgctccaggggcaggaga

SEQ ID NO: 519445 - DNA, 100 bp, Homo sapiens
aagcaattgcacgagccaagcatatggaaatgtctctaaaagtagtaatcaagtcagaggattatatgacttttatctgcctagagaagaactatggatc

SEQ ID NO: 519446 - DNA, 80 bp, Homo sapiens
aagattcttggataccacagtatcataaaattcctctaaatgcaatcagacctattgtgaccgcctggtgcaggacacgc

SEQ ID NO: 519447 - DNA, 88 bp, Homo sapiens
tttttgcatgagatgcttctggacaggccataggaaaaggatacagagtagagtttcatgaacctgaaacttggtggaaatttgatcc

SEQ ID NO: 519448 - DNA, 95 bp, Homo sapiens
ctgctgctcttggtccagctggtcgcggggcgctgcggtctagcgggcgcggcgggcggcgcgcagagagatgttctgccttactcaatacgggt

SEQ ID NO: 519449 - DNA, 76 bp, Homo sapiens
gaaaaagtcgatctggagcttttcccctccccggaatgtgacagtgatgataacatgggtgccaaaaatacttcaa

SEQ ID NO: 519450 - DNA, 87 bp, Homo sapiens
tctgttctatcttcccatcataaaaaagctgtggaaaatctctgttctcacaaagtctccccaatgctctacaagcaactgcgtcag

SEQ ID NO: 519451 - DNA, 90 bp, Homo sapiens
atgaagccccaccaggagctaaaaaaggtttttctttggactcagggaaaggtattgtttctaaagatgagatcacttttgtatctggtg

SEQ ID NO: 519452 - DNA, 100 bp, Homo sapiens
cggaagacgctgtgtgtggacggaattcgggaccgactgacggccggccggcttcccggaactggaagtgagtggaccaagatctcaggatccaagttta

SEQ ID NO: 519453 - DNA, 100 bp, Homo sapiens
gcctgtcgctggagcacaaaagagtctccgcggtggaggtctgcgttgctcttgcttttcctcgctggggtgtacgagacatattgatgtctttgactgt

SEQ ID NO: 519454 - DNA, 100 bp, Homo sapiens
gaatatgccaaggaaaaactggagagcttcatcaaaaatagtgatagctttgataaggtgtcgtagtcattcttcagcacaattcttaattggagaccaa

SEQ ID NO: 519455 - DNA, 100 bp, Homo sapiens
aactgaaacatgaaaacatcgtggccctgtacgacttccagatttggtcgtattgggcgcctggtcaccagggctgcttttaactctggtaaagtggata

SEQ ID NO: 519456 - DNA, 74 bp, Homo sapiens
gagaaccgggcgaaggcgatggggtgagacgagagaagagcggacatttaggaactggatgaactccctgggtg

SEQ ID NO: 519457 - DNA, 100 bp, Homo sapiens
ccaaagcacagttttaccgagtgaacctgcggaccctgagcggctactacaaccagagtgaggcctctccaaagacaacaggccctccctctgccctccc

SEQ ID NO: 519458 - DNA, 100 bp, Homo sapiens
tgaccaaggaggagtgcctcaagaaatgtgccactgtcacagtcgacattactctgaagggacgcacagttatcgtgaagggccccagaggaaccctgcg

SEQ ID NO: 519459 - DNA, 76 bp, Homo sapiens
tgttctggctttctttgcagcaagcgatggcatagtaaatgaaaacttggcttccgaagatcttctcaaggaacac

SEQ ID NO: 519460 - DNA, 88 bp, Homo sapiens
atcagttacacaaccaatgcatttcctggagaatatatccctactgtggcttccgttacaagatgaggtctgtgtatgctcacttccc

SEQ ID NO: 519461 - DNA, 100 bp, Homo sapiens
gatatttaccaggtgtcctacttctcatttaagctactcaagaaagagtgcccaattccaaatgtacaggacctgtatgaggctggagagaagaaatggg

SEQ ID NO: 519462 - DNA, 83 bp, Homo sapiens
ctctcctccttcttcctcaactatctcgctgacacgcagggaaagcaggcaggatgggagagtcgccgatagaaccacctctt

SEQ ID NO: 519463 - DNA, 75 bp, Homo sapiens
cttttggactccctattgtatttgccagagcacatctggaagatgagaatgtgcctactgctcctgatcctccaa

SEQ ID NO: 519464 - DNA, 100 bp, Homo sapiens
tgatgatgaccgtcaccaactggttcaagttggcctcattcagcttgggcaggagcaggtgctaatccagcccctcaacaactcccagggcccattcagt

SEQ ID NO: 519465 - DNA, 100 bp, Homo sapiens
gaaactcttcgactacttcaaccaggaggttttccgagacaacaacggcaccgcggttgacatcatggacatatgtgagtccatcctggagaggaagcgg

SEQ ID NO: 519466 - DNA, 76 bp, Homo sapiens
ctggattccatgtagagacccctggagatagcatagaagccaatgtggaaaatgcagaggtgcacgttcagcaagc

SEQ ID NO: 519467 - DNA, 83 bp, Homo sapiens
tggagcagcgaaaacgtggttgtagagttccgtgactcccagctggagaatgctggaggagaccttaaggatggccaccacca

SEQ ID NO: 519468 - DNA, 100 bp, Homo sapiens
taataatgcccgtgtttggcattgcaacaccgtttcacattgccacaatcaagctgtctgtgatcctggaaacatacgtgtgactgaagctcccaaacac

SEQ ID NO: 519469 - DNA, 50 bp, Homo sapiens
cgagatcttccgccactacgagacctccggctagcctgtttcagccacct

SEQ ID NO: 519470 - DNA, 75 bp, Homo sapiens
ggcggcctgaccagccaggagagcaccatggaacgccagaagccaggtactgaacgacacctgggtctccttccc

SEQ ID NO: 519471 - DNA, 90 bp, Homo sapiens
aacagattgcaaatcagactggaagatgggatgttctgttcttgaaggactgtgtaggcccagaagtggagaaagcctgtgccaacccag

SEQ ID NO: 519472 - DNA, 100 bp, Homo sapiens
ccttccaccccacgcagccctcccacgtcgcaggaaagaccacagcaagattctttcattcgtctcctcctagcctgggggaccaggctcgaactgaccc

SEQ ID NO: 519473 - DNA, 97 bp, Homo sapiens
catggcttctggggacctttacgaggatcacagaagaactgcagcttcctggggagcagtttcacctccacaggcatcgcttcatactcctcactgt

SEQ ID NO: 519474 - DNA, 75 bp, Homo sapiens
agtgttcaccatcctggccccggaaggcagagctgcaaccctcttgtcctctttgaagcagaaattgaaaagtac

SEQ ID NO: 519475 - DNA, 83 bp, Homo sapiens
cgcgccgtgcaactgctcatcctggcctacgtcatcgggtcttgggcgtctttggtactggcttttttaggggtctgcctggg

SEQ ID NO: 519476 - DNA, 82 bp, Homo sapiens
tgaagggcaaggaaagcagcatagagaatgagatagccgtcctgagaaaataacgaaggaggcccaacttcattcaataagg

SEQ ID NO: 519477 - DNA, 100 bp, Homo sapiens
agcaaatatgcaaggagattcttccatcacttgctcagagagacaagagagacacctccaacttcgacaaagagttcaccagacagcctgtggaactgac

SEQ ID NO: 519478 - DNA, 50 bp, Homo sapiens
ggaacgctcacggactgtgtggaatctatggatttcctgaaatatgttgt

SEQ ID NO: 519479 - DNA, 90 bp, Homo sapiens
tgaagactgggggccgcaggcgcgctagatctattaatgagatgaagcggttggaagaaatgtcaaatatgtttcagagctctggagtcc

SEQ ID NO: 519480 - DNA, 100 bp, Homo sapiens
gtggaagctgggccagggattgggaaaatctcttcagggcacttctggatccagctgtgtgatagccgcactaggaaatacctggagtcacagtgtgaat

SEQ ID NO: 519481 - DNA, 76 bp, Homo sapiens
ttaggagaaactaacaagaggaacacggtagatctagaaggaaaatcacctcggcagtgtttgaaggaaggatact

SEQ ID NO: 519482 - DNA, 51 bp, Homo sapiens
gttaattcaacagttcaccaccattaccggatgtccttacggacctgtcag

SEQ ID NO: 519483 - DNA, 100 bp, Homo sapiens
ctcctcagtgcgaagaagctgcagccgcacctggccaagggttaccacattctcatctggagccaggaggaagccaggacacggaagtgagagacactaa

SEQ ID NO: 519484 - DNA, 75 bp, Homo sapiens
agtcactctccttttcagccccaaactacagaccttggttgcatgtacaagttatttagtcgtgtgccaaatggt

SEQ ID NO: 519485 - DNA, 100 bp, Homo sapiens
aagattaaaaagtatggagctgctatggtggtcatggcttttgatgaagaaggacagcactcctggaagcctgcactttccgtagaccttaaaatctcag

SEQ ID NO: 519486 - DNA, 100 bp, Homo sapiens
accaggttgtcactgattcgtagatcaatgctgctttacaactgggtcttggagaaagagagataagtgacttgcttcgggggatacatcgagttcaaac

SEQ ID NO: 519487 - DNA, 50 bp, Homo sapiens
ctccggggaggtcacctgacgaggaggagtgttgaagcctggaaatcccc

SEQ ID NO: 519488 - DNA, 83 bp, Homo sapiens
ccccgcgccgctcgcgcagccatgtccgaggagaagcccaaggcctgtttaaagaagaaaacccgtatgctagatttgaaaac

SEQ ID NO: 519489 - DNA, 83 bp, Homo sapiens
tcaaaggagttgtatttagtgtgacgactgttgacctgaaaagtatgatgggggatgatgaagatgcctgtagtgacaccgag

SEQ ID NO: 519490 - DNA, 100 bp, Homo sapiens
taactgaagtggagcttctggcatttacatcaggaagtcgagataacatgagtattgtactagtttgcttttcaaatgctcccaaggtctcagatgaagc

SEQ ID NO: 519491 - DNA, 101 bp, Homo sapiens
ataactttcgacacacctgtagacgttcgccaggtaaagggcccagatattacactgtcaaaactttacaagttaattgaagagtcttgtccacagctggc

SEQ ID NO: 519492 - DNA, 98 bp, Homo sapiens
caaatccaggtcgcgatcgaagagtccccccaagtctcctgaagaggaaggagcggtgtcctcttaagaaaatgggtgaagttgaacaaattgctatg

SEQ ID NO: 519493 - DNA, 83 bp, Homo sapiens
gtcgtatagaaaaacaaccagtgctgcgacccttggaactaaaaacttttctcaaagttgatttcctcctctgatgctcctct

SEQ ID NO: 519494 - DNA, 75 bp, Homo sapiens
atagatgtttatgtcagccaactggggaaagtggaattgaaatcccataaaggtacttttaggttgaaatacgcc

SEQ ID NO: 519495 - DNA, 50 bp, Homo sapiens
cagtgggcttgggaaacgctccgagacagcctccccatggccacccatgg

SEQ ID NO: 519496 - DNA, 80 bp, Homo sapiens
cgagctccagccgaaggagaagggggggccaattcctgtccccccagcagcatggcatcgtgtgctgaaccctctgagcc

SEQ ID NO: 519497 - DNA, 98 bp, Homo sapiens
actgtggggacaacagtgacgaagagaactgtctcctggtgaccgagcacccgcctccgggcatcttcaactgagatctctttgctgccactttcctc

SEQ ID NO: 519498 - DNA, 78 bp, Homo sapiens
tggccggacagggccgcctgtcgccgggcataatcaccagcaacacccgggacaataatacgggggccacctaccccc

SEQ ID NO: 519499 - DNA, 87 bp, Homo sapiens
gtgacatctgtgggtttaatccaacagaagaaggaagcgagcagctgcaaagcatctaatagaacgctactaccaccagttaactga

SEQ ID NO: 519500 - DNA, 90 bp, Homo sapiens
cgactgggagcagaggaagccttgaggacctactcacagataggaattgaaggaggaagttaagtcttcagagcctactgaggatgtgga

SEQ ID NO: 519501 - DNA, 96 bp, Homo sapiens
aaaaactactctggctgactgtcttatatctagcaatggaatcatctccagccgcctagcaggcaagtattaaaggtggaagaaggtccatatctt

SEQ ID NO: 519502 - DNA, 50 bp, Homo sapiens
gaccagcctcttctgaaacactgggatgacacccccaaccatggttgtga

SEQ ID NO: 519503 - DNA, 101 bp, Homo sapiens
gaccagatgcgctccttcggcatgaccccagtgctgcctgcattcgcggggcatgttcccgaggctgtcaccagtggaggtgaagccggtgctgccaagag

SEQ ID NO: 519504 - DNA, 100 bp, Homo sapiens
cggattacactcctgcttccagacgacaagtcggtactttgtttgcaagaagttcaagaagatcattatggagcagagatcaggccaagtttggaatcac

SEQ ID NO: 519505 - DNA, 100 bp, Homo sapiens
ggtgctgaaccagatgatgaagagtatcaggaatttgaagagatgctggaacatgcagagtctgcacaacgacaagactctgggacgatgaagaagccgc

SEQ ID NO: 519506 - DNA, 98 bp, Homo sapiens
cgacttggacatctgagctgtcactgccgaaaacaggccgcaagagagttctctcctgcgctatggtggaaacctgtccctccaaagtgccatgagtg

SEQ ID NO: 519507 - DNA, 109 bp, Homo sapiens
cgaagggaatcgcaaggctcttccctgaccattttctactgtccctgcgcgagttgcagagtgggcaggatcttaagacccgataggtgcagaacccatctggacacgg

SEQ ID NO: 519508 - DNA, 51 bp, Homo sapiens
atactagccttatcctctatgagcacttttctgtagaaggtcagttggaat

SEQ ID NO: 519509 - DNA, 100 bp, Homo sapiens
gacagagggaatttaagaaacatccacagcagcgactggcccaagttctttgaaaagccggaaatcactgtggaaaatcttcccagttatttcagacttc

SEQ ID NO: 519510 - DNA, 75 bp, Homo sapiens
tcaatccgctctactggaatgtgtaatagctcttcaagtctgcaataaaaaatggcctccaacaaaactacattg

SEQ ID NO: 519511 - DNA, 100 bp, Homo sapiens
agctctgggcctcggcttttggtggggagataaaatccattgctgctaagtactccggttcccagcttctgcaaaaggcaatgaatcgctccctggctaa

SEQ ID NO: 519512 - DNA, 50 bp, Homo sapiens
tctgtttttaagcttctaattaaagaggtggttgtgtcaaaccgattggt

SEQ ID NO: 519513 - DNA, 101 bp, Homo sapiens
tgtctcgaagaaagtgcgcagcctgcaagattgtggtgcacacgccctgcatcgagcagctggagaagattatcaagaatgatctgtgggttaaccctcta

SEQ ID NO: 519514 - DNA, 100 bp, Homo sapiens
aagaatttcgatctccgccctggggtcattgtcaggtctcctctgagcctccggcctccataagacccaaaacagatgacacctcttcccagtcccccgc

SEQ ID NO: 519515 - DNA, 75 bp, Homo sapiens
ctaaagaagcctaatgaagacatgtgcttagcagaccaaaaggcactcttaaaagacccattttacatgggcttg

SEQ ID NO: 519516 - DNA, 98 bp, Homo sapiens
ctcatctcgctcggctgcgggaaatcgggctgaagcgactgagtccgcgatggagacatatctgaagagatggattaagaatgctttggattaaggat

SEQ ID NO: 519517 - DNA, 49 bp, Homo sapiens
gaaaaaggaagattggactatgctaagtagagacgggtttcaccatgtt

SEQ ID NO: 519518 - DNA, 101 bp, Homo sapiens
gggccgcgccgccaccgtctgaactaggatgtcccgacatgaagaattaaacaaccaccatgtcgagcaaaaaggcaaagaccaagaccaccaagaagcgc

SEQ ID NO: 519519 - DNA, 90 bp, Homo sapiens
gacaaaagccaagaggaggacagttcgctacacagcaatgcatcgaggttggactccatgaaagaattgcacaaaacaaatcgacagcag

SEQ ID NO: 519520 - DNA, 88 bp, Homo sapiens
agctcgtctcctgccttgagtcctttgtgtcctaccagaatcggcagtcctgtgtgacgggggctgttgggggccagcaggaggatga

SEQ ID NO: 519521 - DNA, 96 bp, Homo sapiens
atcagaaacgctccctctacgtcagctcgatcaagtcatccgccaaagaagcctgtccagtttggaactgttcctctcctgtgcacagaaacagtt

SEQ ID NO: 519522 - DNA, 82 bp, Homo sapiens
gcgggaagagaagatcatcgagcatttcaaacggtttttcgttggaatatacgttgcacatttatggcgattctgagtgtga

SEQ ID NO: 519523 - DNA, 75 bp, Homo sapiens
gatccgcccacagacctcaaattcaaagtgcaatgcgtgttttactatctaaattaccaagaccatggattgtgg

SEQ ID NO: 519524 - DNA, 75 bp, Homo sapiens
ggcagtgagctcggccggcaaccgagggacccgcgtccagagttgtggaaagtaaaaatgtagccctaccaaaag

SEQ ID NO: 519525 - DNA, 51 bp, Homo sapiens
tggacgccgagtggaggaacctcctgggggccccagtgcaggtcccagaga

SEQ ID NO: 519526 - DNA, 73 bp, Homo sapiens
tccaactctctaacatgtttaaccctcaaacgcatgaatcatacaaaactcaatatagagcaatgtttgtaat

SEQ ID NO: 519527 - DNA, 100 bp, Homo sapiens
atctttgctcctccctgcaactaactccattcttaattggtttggttgggatgttccagtaattctgagaaattcagaagagacccagttcagcacaaga

SEQ ID NO: 519528 - DNA, 75 bp, Homo sapiens
ttcaagataacccgtggaattgaagcagttggtggcaaattaagataggagcatgctgctatgtggaatgttcag

SEQ ID NO: 519529 - DNA, 106 bp, Homo sapiens
gacacgctgcgctaccaggccaacaactgccccatctgccggctgctgtgttaacagggcacaaccattatgtgatgtgtgctcagttccaccccacagaagactt

SEQ ID NO: 519530 - DNA, 100 bp, Homo sapiens
gcagcaccaccttgtggagtacatggaacgccgactagctgctttagaggatgaagaggcagtgaagaagctgacagtaaatcctggcaccaagtccaag

SEQ ID NO: 519531 - DNA, 75 bp, Homo sapiens
aaaagtaatgttaacaataacccagctacaaagagccatccaggagcatcctgttgttctgctgcctagtcatcg

SEQ ID NO: 519532 - DNA, 90 bp, Homo sapiens
ataataccaagaaagccccacttgggcaattgaaggaacagactaaaaatcgtgtcctggaaggaaactacaggtactaccagggatttt

SEQ ID NO: 519533 - DNA, 99 bp, Homo sapiens
tcaagcaggttttaaatcaagatttaacattccaacacataaaaattatttatccaacagctcctcccaggcagaagatcctgaaggagaaggctgtgc

SEQ ID NO: 519534 - DNA, 82 bp, Homo sapiens
ctcgggagccgcaaggcgagagctgcaaagaacactctgctccagccaaggtggtgagggcagctgttcctaaacagcgcaa

SEQ ID NO: 519535 - DNA, 100 bp, Homo sapiens
tgttcaatacacctcccacctgtcctcaggcatatcaaagagcactgcagcctgtggtgttgaggctcacagcgatgccatccagccctgccacatcaga

SEQ ID NO: 519536 - DNA, 75 bp, Homo sapiens
ggatggattaaacgatgatgattttgaaccttacttgagtccacaggcagtttgaagagaacacatgaagaagag

SEQ ID NO: 519537 - DNA, 75 bp, Homo sapiens
ttcgctccggtcctcggatcccgagcgcggggaggcagaccggaggagataagcaaggacctcagagccacactg

SEQ ID NO: 519538 - DNA, 100 bp, Homo sapiens
ggacaacctgtttgaaataataacaagctccaggaccttctacgtacagggcctgggatacaacagtgatgagataaggcctcggactttactgatcgaa

SEQ ID NO: 519539 - DNA, 75 bp, Homo sapiens
aaaaatgctattaatatcgaagagctctttcaaggaatcagtgaccaagaatatggcccaggtgaccaaagccct

SEQ ID NO: 519540 - DNA, 89 bp, Homo sapiens
tttgtcagtgcacaaaatggcgccctacagcctactggtgactcggctgcagagtcgcacctatctgggcatgtccacacttcgagacc

SEQ ID NO: 519541 - DNA, 90 bp, Homo sapiens
caacggagttttatgagcaggagagcatcaccccgccgcagcagtcttactactttgaccgcgatgatgtggctttgaagaactttgcca

SEQ ID NO: 519542 - DNA, 98 bp, Homo sapiens
tcagtttggggcatctccgcggtccggcccggggccccgggatctcggctgtccttcctcccgttattttaccaagaaaatggtttgcacgactttga

SEQ ID NO: 519543 - DNA, 100 bp, Homo sapiens
tctgaagcggcggccagagaagagtcaagggcacgagcatcgggggagccaggaagtgggacggaaagtgacacttctccagacttccacaatcaggaaa

SEQ ID NO: 519544 - DNA, 114 bp, Homo sapiens
agtgaactagtctccctgcagaatgcctctcaccacttagaacccaacatggatttgatcaacctgctcacgacagatgtacagaagattttaagaaatgcaaggaaactacct

SEQ ID NO: 519545 - DNA, 82 bp, Homo sapiens
ggcaccggatcaccaagacggagggggatatgagactttctactcggaatatcctgagtgttgcgtggatgtaaaacccatt

SEQ ID NO: 519546 - DNA, 74 bp, Homo sapiens
cagagttcaaggaggccttccagctgtttgaccgaacaggccgcaccaggatgtcggacaccgaggagcaggaa

SEQ ID NO: 519547 - DNA, 75 bp, Homo sapiens
ccgtgacaaaatgtgttccatggtcaaaaaatggcaggagtataacatgtatggctggtgggtgggagaactgaa

SEQ ID NO: 519548 - DNA, 100 bp, Homo sapiens
cagaaggagctggaggatgcctactggaaggacgacgacaaacacgtcatgaggaaggagcagcgcaagcaatctgcacatcgtgctgccacacgaggct

SEQ ID NO: 519549 - DNA, 82 bp, Homo sapiens
accggctcctgctcaagatctcagagaaggaggaggtgaccacgcgcgagggtgcggggggcaatggcactgcagctctggg

SEQ ID NO: 519550 - DNA, 75 bp, Homo sapiens
ggctcactccctttcctctgctgccgctcggtcacgcttggggtcacgggcgtcagcggtccagggaaggaagca

SEQ ID NO: 519551 - DNA, 100 bp, Homo sapiens
tgtgagcagggtctgcacgaaataaagctcctgggcaaggggacgtctgcagctgagctactccagagcaaataagcatggacctcaagaatgaattgat

SEQ ID NO: 519552 - DNA, 97 bp, Homo sapiens
aggttactcgcacgcggatttggctggcgtcccgcaacatacatatgatagttgagaaagacacatattctgatcatgaagaaataaacacaagtta

SEQ ID NO: 519553 - DNA, 82 bp, Homo sapiens
ggggatggcgcatcacacaccaaagcaaacggggattcagcgtccgatcctttggaacagggactcacgtgaagcttccagg

SEQ ID NO: 519554 - DNA, 90 bp, Homo sapiens
tgataataacataattcacagggatgtgaagagactaaggtgtcagtatgttcttcaagctgctctgctcctgggcccaagctattctcc

SEQ ID NO: 519555 - DNA, 100 bp, Homo sapiens
cgcacttttccagctcgagccctcacgaggccgtgggtacgaccggaagccgcaggaaagatgaatgggagggctgattttcgagagccgaatgcagagg

SEQ ID NO: 519556 - DNA, 83 bp, Homo sapiens
gtcgagttcccaaaaagctccgcaggggctgtagggaggtaccgctggctgcccagtaggagaggaggagtatcaggatttgg

SEQ ID NO: 519557 - DNA, 99 bp, Homo sapiens
ccggggacggcgaggccctcatgtaccacacgacagtaaggattgtatcctggagccgctttccctgccagaaagtccaggtggcaccaccactttaga

SEQ ID NO: 519558 - DNA, 96 bp, Homo sapiens
aagtccccggagaactctaccctggaggagattctggggcagtatcaacggagtctccggggctttcaaggatatgctgtattcagctcaggacca

SEQ ID NO: 519559 - DNA, 75 bp, Homo sapiens
cacgctgcagttggccttcatcgacttgagacaagtacggaatggccacatcaaaagaatcactgataatgacat

SEQ ID NO: 519560 - DNA, 90 bp, Homo sapiens
accgcaggctgaccccgcagcggccgggctgtcgcggcccccacctcaggcccagtgcccgagccatggcactgcctcggacgctggggg

SEQ ID NO: 519561 - DNA, 100 bp, Homo sapiens
gaagattcatacgcagctggcagatattatcatagttgctgcagcctttctgagaaaagtctacagcattctttctctgcaggttctcttaactacagtg

SEQ ID NO: 519562 - DNA, 75 bp, Homo sapiens
tatctgtgataaagttggtcagtctcgcactggaatggtggtttggcctggagtgatgatgcagatggaggccgg

SEQ ID NO: 519563 - DNA, 51 bp, Homo sapiens
actccagtgcctccgacgcctcctgatgaaaactctcccaccatgtcgcag

SEQ ID NO: 519564 - DNA, 103 bp, Homo sapiens
ctcgggcgccccgcagccccccaacatcctgctcctgctcatggacgacatgtgaagttcatttccaatccgccctccatggtggcagcggggagcgtggtgg

SEQ ID NO: 519565 - DNA, 101 bp, Homo sapiens
taccaggcgaagctggccgagcaggctgagcgatacgacgggcagagcggcttgggtaaatccaccttaatcaacaccctcttcaaatccaaaatcagccg

SEQ ID NO: 519566 - DNA, 91 bp, Homo sapiens
ccaaggtctctcgcgggcgggagaacggaaaactcccaacttcctgcctcttagcaaatatccggctgtgatcaatgatatttcattctgg

SEQ ID NO: 519567 - DNA, 97 bp, Homo sapiens
cgcccgcgggttcatctgcaagtgccctgcggacagggtgcaggcagatgacctggtgaagatgctcttcagcccagaagagatggacctctcccag

SEQ ID NO: 519568 - DNA, 82 bp, Homo sapiens
ccagtttgaggagctgctgcagaacgggagccgccacttcgaggactgggaaataatgcaaaaggtgtcccaaggctcctga

SEQ ID NO: 519569 - DNA, 102 bp, Homo sapiens
agacctactgcagccacgcgggcgagcggctgtgtggatgtcggcgaagccgcgggcgagacaatgcagatcttcgtgaagactctgactggtaagaccatc

SEQ ID NO: 519570 - DNA, 89 bp, Homo sapiens
atcatggttggcagcggaggcgttggcaagtcagccctgacgcttcagttcatgtatgacgaggttttagctaaagaagatactgaggc

SEQ ID NO: 519571 - DNA, 82 bp, Homo sapiens
gcccgggagctgtcggccccggcccgactctatcacaagaagctggacaagatcgagggcgtgttcgagcggccgagcgacg

SEQ ID NO: 519572 - DNA, 76 bp, Homo sapiens
ctaccagtgggcgaagcccaagcccctgtcccctacgtcctacatgagggccctcatctttgtgtcccatggagcc

SEQ ID NO: 519573 - DNA, 87 bp, Homo sapiens
tcaggctggaacttgccctgtctcctcgcagatgaggtctgagggtcatttatgcctgcccgttcgatatacacattcctttccaga

SEQ ID NO: 519574 - DNA, 95 bp, Homo sapiens
agatgtgaatgagcaggttatgcaggtattaggacctgaagacctccagaggagtcgtaagaaagcagtgggagttgaagtcattgtcaagtgct

SEQ ID NO: 519575 - DNA, 80 bp, Homo sapiens
cttcgatgtgcgagactttggaaagtctcacagaaagttctccgctcccagacatgggtccctcggcttcctgcctcgga

SEQ ID NO: 519576 - DNA, 100 bp, Homo sapiens
aagaatggctcattttctgggttaagtctccttgaaagattgagttcttggtttcgactcagaaaacatatggtgctgacctggccagtgtggattttca

SEQ ID NO: 519577 - DNA, 98 bp, Homo sapiens
agtgccccacaccaccgcactgtcgctgcccgcctgccctgaggagtccccgctgcttgatttcattcatacctgtgaaaagctctgccatgaaggag

SEQ ID NO: 519578 - DNA, 82 bp, Homo sapiens
ttggactgagtcctgcaggacacagatgacagtcatgtccctttccagggacctcaaggacgactttcacagtgacacggta

SEQ ID NO: 519579 - DNA, 100 bp, Homo sapiens
ccgcaagcccggctcggcccggccctgctctgttctgcccggaggagccgcccgcattgcggcctcatttgctgtcaagcttttcaaagcatggatggca

SEQ ID NO: 519580 - DNA, 50 bp, Homo sapiens
ggggaagaaattgaagacgttggaggttggtgatgacaaaactgtgaagc

SEQ ID NO: 519581 - DNA, 95 bp, Homo sapiens
ttcgacctggagctgggccaggccgtggagattgaaaaggaagatcaggccaaccccaaagaagaagtgaccaaggaggagtttaaactgaatga

SEQ ID NO: 519582 - DNA, 100 bp, Homo sapiens
catgagtattcttaaacaatgtggacaagaagcagcactgctgatagaatatgatgtctcagtaatgggttggccttcattccacgatgtgatcaattct

SEQ ID NO: 519583 - DNA, 131 bp, Homo sapiens
gggagccgggctaggacgccgagcggtgactccccgccgctcccgggggccgtgacgtgagccccatgcacggttctatgcagctcagatagtgctaacattcgagtacctccattcactagacctcatct

SEQ ID NO: 519584 - DNA, 80 bp, Homo sapiens
ctatctcctccctcttctcccgactatttggcaagaagcagatgcgcattttgatgggcagtcatggatcaggtaatgca

SEQ ID NO: 519585 - DNA, 75 bp, Homo sapiens
tcagaagccagtctccatcctgttctcatgtcagaggcaccggaggagattgtatttcgttactaccacaaactc

SEQ ID NO: 519586 - DNA, 75 bp, Homo sapiens
attgccctggcagagggaacctacccagtccattgctgcctgctacaagtgcatactccttccacgttactgcag

SEQ ID NO: 519587 - DNA, 100 bp, Homo sapiens
cagaaaactgcagttcatgtgctaaacttttggtgcttaaatccagctgtgagtccagagcctaaggaccagactttgaaaatgattaaaattttaagtg

SEQ ID NO: 519588 - DNA, 51 bp, Homo sapiens
gcgcctgcacttagccccgcgcccgaggcaacatgagtgagaatgaggaag

SEQ ID NO: 519589 - DNA, 75 bp, Homo sapiens
gaccgaggcgcctcgctggggcggggaccttgccttgcccggggaattgaatgatctggcacgggaccctccagc

SEQ ID NO: 519590 - DNA, 88 bp, Homo sapiens
gagtagccatgtgccatatgatttatcggaaggttttgatgatgatggttcagaatttcatgaacatatatttctggagaaacacctg

SEQ ID NO: 519591 - DNA, 100 bp, Homo sapiens
ggatggtagtcaaggtctgggcaagagaaaaagggtaaaactaagcagtggcaccaaagatgcggaaaacgccatgcggtacataaatgggacgcgtctg

SEQ ID NO: 519592 - DNA, 74 bp, Homo sapiens
gcgcgctgttttctaatcacgtggctgccacccagggtgcggaggcagcaaatgttacaggtcctggtggtgtt

SEQ ID NO: 519593 - DNA, 100 bp, Homo sapiens
tggccatcaccgagcaccctgagaacttcaagttagagcagccagcgggtacagaatggattttggaagagggagtcaccactggacctccaaggaagcc

SEQ ID NO: 519594 - DNA, 75 bp, Homo sapiens
ctaaatatatccgtaggaatggagagggaccggatctcagtgccggtggtggtgtgcacattgagccccggtata

SEQ ID NO: 519595 - DNA, 75 bp, Homo sapiens
ttgatgcttctgggccaccatttgccagggcctcgctcgaggactcacaccacccggcaagaactgctcactacg

SEQ ID NO: 519596 - DNA, 97 bp, Homo sapiens
cacggcaagaagccagtcaaagagaaccagagtgagggcaagggactccccatccccaggatgtcaacctcagtccctcaaggccatacctggaccc

SEQ ID NO: 519597 - DNA, 98 bp, Homo sapiens
gttgactccgggggcgcggcgaggagcaacagcatttgatcgagctgatccgccagcgggagacagaggcggcgctggagtttgcacagactcagctg

SEQ ID NO: 519598 - DNA, 90 bp, Homo sapiens
catggtatggaagtataacattgttacactggacagattaattctctgcctgtacaggcagaaaactacctggcactgtgggagactgag

SEQ ID NO: 519599 - DNA, 100 bp, Homo sapiens
ggagagctgggagacacaggagtaatgcagattcccaaaaacctcctcgaaatgacctttgagaagcagtgttgccacaaactatatggtggtcaagaag

SEQ ID NO: 519600 - DNA, 83 bp, Homo sapiens
aatttcacggcaggatcctgttacatacatttcagaaacagttttctggatatgccgcagaaggatccgtgccagaagcaagc

SEQ ID NO: 519601 - DNA, 90 bp, Homo sapiens
gcgagctgagtggttgtgtggtcgcgtctcggaaaccggtagcgcttgcagcatgctcgaaggtccatgtgttttgcaaattcaaaaaat

SEQ ID NO: 519602 - DNA, 112 bp, Homo sapiens
gtgaagagttgtcccagctcggcccgcgggggagccccgggagccgcacggtatgccattttgaagactgagacgttggagttttatcctagaggataaaggaaatctttgg

SEQ ID NO: 519603 - DNA, 100 bp, Homo sapiens
atcttgttggtgcttcctcatgtattgaagaattccaatcccagttcatttttgtgtgagttcttgatacgaatgaaaggccaagagtttgttgatgaga

SEQ ID NO: 519604 - DNA, 97 bp, Homo sapiens
aacatattgactgtatttgggctgcagcacaggacatagctcgccttttgcaagaaaaggagttacaggaagagaaaaagagaaagaaacactttcc

SEQ ID NO: 519605 - DNA, 74 bp, Homo sapiens
cgaaggtggacctgagcacctccaccgactggaaggaggcgaaatgagaacacaaagttatacctcaatttact

SEQ ID NO: 519606 - DNA, 88 bp, Homo sapiens
agatggaacccgaagaagaaaggattcgttacagccagagattggtgccagatgcaattaaaaagtgtcagagggctggaattactgt

SEQ ID NO: 519607 - DNA, 130 bp, Homo sapiens
ctttgatgacctatgttcaagatcaaaatgaagactgcctttacttaaacatctacgtgcccacggaagatggcccagctgtggtccctcaccagtattatggagttactccctggggagtctaccctgc

SEQ ID NO: 519608 - DNA, 90 bp, Homo sapiens
ccttctcctggagacgcaactcaaggtgttggagcgggccggagagaagtagagtgggctgcgaggagaaggaaacaggcctttcggagg

SEQ ID NO: 519609 - DNA, 100 bp, Homo sapiens
gcaccattgaagttaaccggtgtaggagaagaaatccgcagaagcttattaaagttaagcatgactatatgaaggaagaggaaggttttcctgaagatga

SEQ ID NO: 519610 - DNA, 82 bp, Homo sapiens
ccagtccagggccactagcccatcgtccgccaactgcagctcaccatggatgatgatatcgccgcgctcgtcgtcgacaacg

SEQ ID NO: 519611 - DNA, 101 bp, Homo sapiens
ggcgattccagagagcggcggaaaggataagcctcgacttagaagctaccgagttaccctaagaaagtaatcaagatgattaccaactggttcgaaaactt

SEQ ID NO: 519612 - DNA, 82 bp, Homo sapiens
tggctccggaggccagcggccgggatagccccggcggagcccgcagcttccctgccgacaaatttacatgtattggagacca

SEQ ID NO: 519613 - DNA, 51 bp, Homo sapiens
gtctcccggaggagcgcgcacctttgtgaagtgtggatatgcaggctctaa

SEQ ID NO: 519614 - DNA, 80 bp, Homo sapiens
ggcctcccttttcatcaggacgggaaggatattagaaatggctactccccagtcaattttcatctttgcaatctgcattt

SEQ ID NO: 519615 - DNA, 100 bp, Homo sapiens
tcgactgtttgagcccggaagcgcagaagctgttgcccagaagattgttgccacaaggaagaagcagcagctgtccataggaccctgcaagtcgctacct

SEQ ID NO: 519616 - DNA, 75 bp, Homo sapiens
agttacgcttgtacagtggaaaccagcccaagctacaaaagtggtggagtctaccatggctcaagaatctcccaa

SEQ ID NO: 519617 - DNA, 100 bp, Homo sapiens
cggagacatctagtggaagcggcaagcagagaaaacctgccaatcaagatgagtatgggcgtgaattacccttcactaagtcggctcatctcaccaatcc

SEQ ID NO: 519618 - DNA, 83 bp, Homo sapiens
ctcagatctgtggagcagatccgatggagaggctgagctgctccaggacttggggtgttggagcgggccggagagaagtagag

SEQ ID NO: 519619 - DNA, 82 bp, Homo sapiens
agttggttactccattcgatttgaagactgcagtagtgcaaaaaccattcttaagtttactcctggcttgggggcattagga

SEQ ID NO: 519620 - DNA, 74 bp, Homo sapiens
ctcttcctctcggagctcaccggatttataacgacagaagtatgcgacctaaagtcatgtggcacctccttcga

SEQ ID NO: 519621 - DNA, 74 bp, Homo sapiens
aagatctgggtgcccgtggaccacaggccctcgttgcccagatgttcaaaccttgtactactcagctgatcaca

SEQ ID NO: 519622 - DNA, 100 bp, Homo sapiens
gcccgccctgcgccccgctctgctgtgggcgctgctggcgctctggctgtgctgcgcggcccccgcgcatggatacttttgtggaactctatgggaacaa

SEQ ID NO: 519623 - DNA, 75 bp, Homo sapiens
cgccgggacaccctggaagcctagaaatgaggaaaggagcagtggcttccggttgaagccaccaacgctgatcca

SEQ ID NO: 519624 - DNA, 49 bp, Homo sapiens
cccggcagtacggcaaatatggcggaggatttttttcccaggaagccat

SEQ ID NO: 519625 - DNA, 100 bp, Homo sapiens
attccaagtaactcttatttgatgtatcctccactcctcgctggccaccatcctgctgcccaacagaagaagctcttctgtctccgatttcctgaacggt

SEQ ID NO: 519626 - DNA, 100 bp, Homo sapiens
cctggctgccttgagaggtcacttctgcctttccagtgacaaaatggtgtgggctgtaatccccttgcacaaaccggccggagtaaattgcagaatcaaa

SEQ ID NO: 519627 - DNA, 100 bp, Homo sapiens
ggcctctttagtgagatggaatatattactgtgggtgataaatatgtgtcacaatttaatcggaatgtgaaaaaacttggagacacatacccaagtatct

SEQ ID NO: 519628 - DNA, 100 bp, Homo sapiens
ggtcatgggccattttctcacatgtttgatggacgatttattccacttgctcgcccggaggtgaaatggacggaaactgagtcaagaagagtatgaacgg

SEQ ID NO: 519629 - DNA, 118 bp, Homo sapiens
aaaaaaatgaatcaaaagaaaatctctaaatgcagattccagaaaaattacagcacatctcagtgaatttgcaagtgatgtggaccctccaaaggacacaattgtgaagaacattacc

SEQ ID NO: 519630 - DNA, 74 bp, Homo sapiens
taccataaacacatcaccttgatttttaatcccacgaacccgaaaacagtggccaaatgtcaggtaactcccag

SEQ ID NO: 519631 - DNA, 50 bp, Homo sapiens
tgtgtgttaggagcatgcagaccaatgtgcagcggaactgctgcctgacg

SEQ ID NO: 519632 - DNA, 100 bp, Homo sapiens
cttttcccttacctcgacccttttgattccgcctcacagttgatggagccaggtaaaatatacccaggaccataaacagatgaaaggtagaccaagtctg

SEQ ID NO: 519633 - DNA, 82 bp, Homo sapiens
gttcctattgggccatcttggctccaccaccctgatcaccgaagtggccttggagtacaacaactgtcatggggaccaggtg

SEQ ID NO: 519634 - DNA, 71 bp, Homo sapiens
tcgcggctctaacggggctttctacaagatgaggacggggacttggttgccttttccagtgacgaggaatt

SEQ ID NO: 519635 - DNA, 75 bp, Homo sapiens
cctgcttttgaagctggattatgtacagggaaccagcggggaaactgaggctcggggtggagcgcaggattgtgg

SEQ ID NO: 519636 - DNA, 142 bp, Homo sapiens
aggaagaaaattttccttgacctttaggtgcttttatattcatctcaaaaacaaaattctgaactcaggacttggcaattttaagcagggtctgaaaacccttggtgttttggagaaaattcaggcttatccagaagcattt

SEQ ID NO: 519637 - DNA, 83 bp, Homo sapiens
agaagactgagagtcaccacaaggccaagggaacttctgcaatgtcccatcaacctctcagctgcctcactgaaaaggaggac

SEQ ID NO: 519638 - DNA, 93 bp, Homo sapiens
cacattgagagcaaaatctacaagatgatgcagggaggaggctcctgttccaaagagtgcacttattcctgtaattcccatcaccaaatcaac

SEQ ID NO: 519639 - DNA, 75 bp, Homo sapiens
ctggagccatgaaggccttgtgctgaccaagctgctcacctcggacagagcgggatgccaccagcttgtccaaag

SEQ ID NO: 519640 - DNA, 80 bp, Homo sapiens
caagtatgggtctccgtacaccaaaaactcaggcttcgccacctgcgtgcaaatgacttttttgaacgaaccattctgtg

SEQ ID NO: 519641 - DNA, 99 bp, Homo sapiens
aggcggaggacaaggccaagagggccaagggcaaaggccgagttagttgaatccatggacatgaaacccacagatatagagggttggcccggtgcagtg

SEQ ID NO: 519642 - DNA, 100 bp, Homo sapiens
cagaaagtggacattgaccaatgctcaagtgatggctggttttcaggaactcataaatgccacctcaacaattcagaggatttaaaccggatgaggagtg

SEQ ID NO: 519643 - DNA, 82 bp, Homo sapiens
tttgtcgccagaaggaagatggcggatctggaggagcagttgtctgatgaagagaagatgctgtgagagaagtaaggaaata

SEQ ID NO: 519644 - DNA, 75 bp, Homo sapiens
ccgcgagccccgccgccgttatgaacatccgcaatgcgaggagttctagtaactcatgttctgtacttgaagctg

SEQ ID NO: 519645 - DNA, 74 bp, Homo sapiens
atctcctcgtctcccgctccgccctcccttttccctggtgctatggtctttagaattgggtcactggatttctg

SEQ ID NO: 519646 - DNA, 83 bp, Homo sapiens
aagctgccaaatatgatctaaaatacataggactagatgggaacattgcctgctttgcggttgtggaacaggaaatgaaaaag

SEQ ID NO: 519647 - DNA, 108 bp, Homo sapiens
cagatttacgtacccctgggacaagacttctccactgaattgctgtgatgggcagaatctgtttacgaaagacgtgacagtgatcgagggagaggttgcgaccatcag

SEQ ID NO: 519648 - DNA, 97 bp, Homo sapiens
ccctccgggggtaaaagagatcaccgacaagatcaccacggacgagatgatcaaacgcctgaaggatgtgatggtggcaggtgggatggagagcatg

SEQ ID NO: 519649 - DNA, 100 bp, Homo sapiens
gctgcctgcccccggaggtgcccacgcagctgcctggacaagcctgatcacttgaacggacatatcaagcaggtgcacacttctgagcggcctcacaagt

SEQ ID NO: 519650 - DNA, 75 bp, Homo sapiens
acggcccctctggaccgcctcaaggtcttcatgcaggtcctggtgaacgccatcatcaacagtggtccccgggag

SEQ ID NO: 519651 - DNA, 112 bp, Homo sapiens
cggatacgatagaaaatgtaaaggccaagatccaggataaggaagaaactgttcaggttccattatcaaaacgagcaaaatttgttggacctggtggctataacttaaaaaa

SEQ ID NO: 519652 - DNA, 75 bp, Homo sapiens
cgaagaagctgcagccgcacctggccaaggtactgtaagattgatgttaaaggcatggtgttcaccccacttcat

SEQ ID NO: 519653 - DNA, 73 bp, Homo sapiens
acacaaccgaatacaaactccgtaccttacaggtctccccgctggacaatgttctgcggggagtgtctccagc

SEQ ID NO: 519654 - DNA, 90 bp, Homo sapiens
cgttgtggtgcgctgtcttcccgcttgcgtcagggacctgcccgactcagtgggcaattgaaggaacagactaaaaatcgtgtcctggaa

SEQ ID NO: 519655 - DNA, 100 bp, Homo sapiens
actaccactgccagcacagctgttgcagagagtttgaggagacaatggatgcactccaggctgacatcgaccagctggaggcagagaaggcagaactaaa

SEQ ID NO: 519656 - DNA, 88 bp, Homo sapiens
gttgagaaaatgggagcagttttcatggatgcccctgtttctggtggtgaaaggtgtagcagtcactcggcctacacccacagcatcg

SEQ ID NO: 519657 - DNA, 100 bp, Homo sapiens
cagcccgagtcccagaaggcggcgatcctgggctgcgggcaaggcggtatcctgcaccccatgtaacataccaattggaaccccagtgagcggctatgct

SEQ ID NO: 519658 - DNA, 100 bp, Homo sapiens
gtacgccctcatggggaaaatctccccggtgactttcagtgtgaagcctcagtttaggtcatctggtggttcagaacactcaacagagggctctgtatcc

SEQ ID NO: 519659 - DNA, 95 bp, Homo sapiens
tgaaagacgtgctgaacgtcttgattggggtcgtgtctgccacgttttcgctctgccagatggctcgcccaagaacgatgacggacacaagactg

SEQ ID NO: 519660 - DNA, 75 bp, Homo sapiens
agtgctgggattacaggcgtgagcctccgcgcccggccgacctgcctagagctggaacgttacctccagagcgag

SEQ ID NO: 519661 - DNA, 50 bp, Homo sapiens
aatgacatctcgctgtaatgcagtgggagttttatgtgctgaaagagttg

SEQ ID NO: 519662 - DNA, 98 bp, Homo sapiens
accatgtttgacaagacgcggctgccgtacgtggccctcgatgtgctctgcgtgttgctggatttcttctggtgaatacattcagatgtctggtcgtg

SEQ ID NO: 519663 - DNA, 90 bp, Homo sapiens
cggcattccgggctcgaaggctgtgcggtctgccaggagctgcggccccgtccggcccgggctggttatcctgaatacatgtctaacaat

SEQ ID NO: 519664 - DNA, 102 bp, Homo sapiens
ccggagaaccgcggggacagcagccggccagccggggggcactgcccgcccgggctctgttgagacatttgggaaatgatgaagtgcacattgtttggtcag

SEQ ID NO: 519665 - DNA, 100 bp, Homo sapiens
gggaaatggccgctgtgtggttgcaacggagataaattcccggaaccgcgattcggcgtgtcaggtttttgactaaaggccagaatgcattggtagagct

SEQ ID NO: 519666 - DNA, 98 bp, Homo sapiens
tcgaacgctcggttaagattaatcccatgcagagtgactcctctttcttcccagagtgtggtgattcaccatggccagacccaggaatacgtgctcaa

SEQ ID NO: 519667 - DNA, 100 bp, Homo sapiens
gggtcgccctcaaccagctgtcactgcaggagctgcagaccatcagcaatccaggagtggctgaaggagggcccaccccctgccagccctgcccagctgc

SEQ ID NO: 519668 - DNA, 100 bp, Homo sapiens
gggggtcagccccccgcccggccagccgccccgtccgggagggaagatgaagggcttctccctgctggccgagccccaggagttctgggtggacaacagc

SEQ ID NO: 519669 - DNA, 95 bp, Homo sapiens
cgcaaacagcacaggccatcaaatgcagaattcacaagatccaatcccttgtccttaaaagatctcttccctgaagaacaggctgaaaaaggtct

SEQ ID NO: 519670 - DNA, 50 bp, Homo sapiens
gtactatgtcaacacgaccaccaatgattttaggtgatgggcaagtcaga

SEQ ID NO: 519671 - DNA, 82 bp, Homo sapiens
ctgaagcgactgagtccgcgatggaggagatggcagcagaaaaggccaaagcagcagccggggaggccaaagtgaaaaagca

SEQ ID NO: 519672 - DNA, 76 bp, Homo sapiens
gctgaggctacctgtgaacagtacgcagtgaatgttgatcggaaactccatggtacagctcagcaactgctccagg

SEQ ID NO: 519673 - DNA, 100 bp, Homo sapiens
gaaccaattgttttacagtctgttccgcatgatcgttataataaggaggaagttaagtcttcagagcctactgaggatgtggagcccaaagaggctgaag

SEQ ID NO: 519674 - DNA, 99 bp, Homo sapiens
ttcctacacagcctgctgaagaagcagcacgaaagagagaggtccgtctaatgaagaacaggagagcctgacaaggagctgaatcctaagaagaagatt

SEQ ID NO: 519675 - DNA, 100 bp, Homo sapiens
aagaaagtggtgaatcccctgtttgagaaaaggcctaagaattttggcattgctgaccctctggtgggcagcatcgccacacagtacatgaccaacagag

SEQ ID NO: 519676 - DNA, 100 bp, Homo sapiens
agtgcaacaagtcccacttccgaaaccacaagtttgccgatgtagattcttcaagtttacactcctagcatcattgtttcttctctctctcaaccttcac

SEQ ID NO: 519677 - DNA, 98 bp, Homo sapiens
gcggctgcgagagtggcagaggagctggcggagagcggcctgcgggcgatcgggccgagctttttaaagatgacatcaggtatctgttgacaatggac

SEQ ID NO: 519678 - DNA, 80 bp, Homo sapiens
ccgcgggacccggacggcgacgacgggggaatgtggcgctggatccggcagcagctgatcactttgggaagcagtgacat

SEQ ID NO: 519679 - DNA, 90 bp, Homo sapiens
gcggccaggacgacgaggagcagggcctgactgcgcagacaaaacctgctacaaccccctcttcaactacgaggacatgcaggagatcac

SEQ ID NO: 519680 - DNA, 83 bp, Homo sapiens
ctgggcgtggcggccgggatgacccacaggtctcttgccctgtgcagcttcctgcagactggacttgcaaagtccagcctgta

SEQ ID NO: 519681 - DNA, 90 bp, Homo sapiens
caggctccggcttccgtcccggacagagcccgtggtcgcgcaggtgctggagaatctggtaaaagcaccattgtgaagcagatgaggatc

SEQ ID NO: 519682 - DNA, 100 bp, Homo sapiens
acaaagtcagcccaggcagacctccagtcatccgtccttggctcaggatttggagagcttgcaccaccaaaaatggcaaacatcaccagctcccagattt

SEQ ID NO: 519683 - DNA, 113 bp, Homo sapiens
ctgagtacctgaaccggcacctgcacacctggatccaggataacggaggctgggtcaaaatgcagatcttcgtgaaaacccttaccggcaagaccatcacccttgaggtggag

SEQ ID NO: 519684 - DNA, 100 bp, Homo sapiens
tcccaagtagctgggatcacagacctctggtgccccggggagcccccaaacaccccctgagcgtcatgactctggtggttccctgcccctgacaccgcgg

SEQ ID NO: 519685 - DNA, 59 bp, Homo sapiens
tcagctttctccaatctttctacatcccagaagagatcggcaagaagtacgatctaggc

SEQ ID NO: 519686 - DNA, 100 bp, Homo sapiens
cggcctctgagctgggatgagccgtgctcccggtggaagcaagggagcccagccggagccatgaacatatcctcccctgagagttcccctgcgcataggc

SEQ ID NO: 519687 - DNA, 80 bp, Homo sapiens
tgtttgcaggcctgggactgtcctgggccggcatgcttctggactatttccaggctggagtgcaatggcctgatctccgc

SEQ ID NO: 519688 - DNA, 96 bp, Homo sapiens
agtccctgagctgctgaggaagctttacgcctaaggagttgagcattatgaaagatgagccagaagaggctgagttaattttgcatgacgctcttc

SEQ ID NO: 519689 - DNA, 75 bp, Homo sapiens
gtgtgcccactgaggagtccaacatcaccatgcagctcctgtccaaatatgacccccagaaggaggcagagctcc

SEQ ID NO: 519690 - DNA, 51 bp, Homo sapiens
ccagcctggtgtgcttattcaggtctcgtcatggggaggttatgtgttcct

SEQ ID NO: 519691 - DNA, 101 bp, Homo sapiens
taaaaatcaccagttactttaatgagcagtagatcatctaatgcaaaattgccctcagttccaacagttgattcagtttcacaagatccggtttcaaatat

SEQ ID NO: 519692 - DNA, 75 bp, Homo sapiens
gaacggctgcctaatttacagcaaccatgaggtatccgttacagcactgatgtgagtgtagatgaagtaaaagct

SEQ ID NO: 519693 - DNA, 100 bp, Homo sapiens
tacgacaccctggacgctgcccgcagcagcatccgcgtcgttcgtatgagcgggatcgtgtgcagaagaaaaccttcaccaagtgggtcaacaagcacct

SEQ ID NO: 519694 - DNA, 83 bp, Homo sapiens
cctgcgcctccggggccggccctgcaggtccacaactcccaggcctgttgcagatctccaactcctgctttgtgtgacccccc

SEQ ID NO: 519695 - DNA, 51 bp, Homo sapiens
tacgagttgaatcattgttcaaataaggatcttctgcaggacaactggtcc

SEQ ID NO: 519696 - DNA, 96 bp, Homo sapiens
gatcttattgaatccatgttgaaaaatctatccaggattcatcccgtgtcaacaatggtaaagggagatacatctggggactataagaaagctctt

SEQ ID NO: 519697 - DNA, 90 bp, Homo sapiens
tggtacccctataatgggcagtgtctaccagatattgaaagtatgctgaggccttggattaccaccgtcaggcactggtgttgattcctc

SEQ ID NO: 519698 - DNA, 100 bp, Homo sapiens
tgtccagcctatttgcacaccatccaggagtcagtttattactggaaattcaagaacaagcagggaaggcagagcaagatggctgaatagaaccctccag

SEQ ID NO: 519699 - DNA, 100 bp, Homo sapiens
ggaagaacggtgaatttcccccgcagatatggctcgtggacagcagaaaattcagtctcagcagaaaaatgccaaaaagcaagctggacaaaagaagaaa

SEQ ID NO: 519700 - DNA, 100 bp, Homo sapiens
tggacaccaaccctgccatccgggagcagacggtcaaggatgaaaactttcggaagagaaagttgcctgtggtaagttcagttgttaaagtaaaaaaatt

SEQ ID NO: 519701 - DNA, 74 bp, Homo sapiens
tatgatggtggttggacagtcagcatttgcagactttgacaccagttggcgctccgaggcaacctttcagttca

SEQ ID NO: 519702 - DNA, 100 bp, Homo sapiens
agtaccgcctgggacggaagatcgggagcgggtccttcggagatatctacctgggtgtggacactgccagcggctgcagccgacttggaatgacctggga

SEQ ID NO: 519703 - DNA, 90 bp, Homo sapiens
cactgcgagaactgcaagaccactttgggctggaaatatatggggctggcgagggcctggcacggggctgcatagtgcctggagtcacca

SEQ ID NO: 519704 - DNA, 74 bp, Homo sapiens
gccgtggcttccccctccctacagagagatgctgtcccgtgggtgcccctgtagacaatggccctcgtgtctgc

SEQ ID NO: 519705 - DNA, 88 bp, Homo sapiens
cgtcagtccctgctctgtgcgcgcctccatctgggccatggatgggtatcgagaaccttccctgcgaacttcagaggaacttccagct

SEQ ID NO: 519706 - DNA, 100 bp, Homo sapiens
cagctgatgcccttcttcgtgtaaaatgtcggttccaggaccttaccaggcggccactgggccttcctcagcaccatccgcacctccatcctatgaagag

SEQ ID NO: 519707 - DNA, 109 bp, Homo sapiens
caggaagtggatgagttccacctcattttagagtatcaagcaggagccagcattcgaacgttcactccattttattttctggtggagccggtggatacactctcagtta

SEQ ID NO: 519708 - DNA, 96 bp, Homo sapiens
cacgatgcacttaatgaccctaaaaatggcgattctgcaaccaagcacctgaaacagcagaacctgatgttgttgttaaacgacaagaagctttag

SEQ ID NO: 519709 - DNA, 73 bp, Homo sapiens
cccgtctccgtggggctttccagagtttgctctccaaagctcggggaattgattccagctctgttaaactccg

SEQ ID NO: 519710 - DNA, 90 bp, Homo sapiens
gtttaaatggaaactggacagaaccacctcaatgcaaagaaacatgttccaaatcaagtatagatattgagaatgggtttatttctgaat

SEQ ID NO: 519711 - DNA, 50 bp, Homo sapiens
cagcgcgcggagaagaacggggagccaggcctaaaggggagtggccccag

SEQ ID NO: 519712 - DNA, 100 bp, Homo sapiens
cacaaataactccataatgtctgaaaatactgaaattgatagcagtttgaatgattgcccaaggactccagatactccaaataatgaccctcgttgttct

SEQ ID NO: 519713 - DNA, 98 bp, Homo sapiens
tacggctgaggaagcagccaagaaaaaaagacgaaagaagaagaagagcaaagggccttctgcagatgagcagcaccagcagtaagagggctccgacc

SEQ ID NO: 519714 - DNA, 139 bp, Homo sapiens
cccggaattctacaacattcctcagggatacacagtggagaagcgagagggctacccacttcggccagttcactgagacttttttgacggagagggacaaacaatccaagtggagtggaattcctcagctgctcctcaa

SEQ ID NO: 519715 - DNA, 90 bp, Homo sapiens
gctggagtacaggaggagtcctccactcacaagatcgtgaggtgctggccagtgaagaagcaaaggaagacatgaaaattgacgctcatt

SEQ ID NO: 519716 - DNA, 102 bp, Homo sapiens
agtggctgcggccgtcgcccaggagtcatcggacgccagaatctggtttacccaaggtccagcctagcccctaggcaccatgtcggacagtgatctaggtga

SEQ ID NO: 519717 - DNA, 100 bp, Homo sapiens
ctttccaacacagatgtccaagctgccaactatgctgggactcatgtatgtctactggactcagctcaacatgttccagaccttgaagtacctggccatc

SEQ ID NO: 519718 - DNA, 100 bp, Homo sapiens
aaattttcacaagaatgtttgctgaccctcatggcaaggttcaaagtcaagtgttttctgaagcaaactgtgccaatttgatcagcactcttattacaaa

SEQ ID NO: 519719 - DNA, 100 bp, Homo sapiens
cagcaacaaaaacataaagctctcagaaagagtactgattcctgtcaagcagtatccaaaggtggcctttttgaagatgtaactattagagctgggcatt

SEQ ID NO: 519720 - DNA, 88 bp, Homo sapiens
ccaacggggaggccaacgtgaagaagagtccatagaggccactgtattctattgaagaacatgtctaacagtaacactactcaagaga

SEQ ID NO: 519721 - DNA, 98 bp, Homo sapiens
cttggtgagaaacattaagacctactaccagctgaaccttagccggccgatcgaggagcagggccccctggacgtcatcatccacaagctgactgacg

SEQ ID NO: 519722 - DNA, 75 bp, Homo sapiens
tcctacgtttacctgtccatgcctggagctgctggcggatgttcagtttgccttggggcttcccttctacccagc

SEQ ID NO: 519723 - DNA, 142 bp, Homo sapiens
cacaaacagaaagttcagtggccccaataaaaataacaccagaatcttccagatactttctccataaggcgaaaagctgtgaattcctttggacaattgatgatatttatcattgtgcccagtttctacaaataaaagatgg

SEQ ID NO: 519724 - DNA, 100 bp, Homo sapiens
gcagagttctctcctgctgctcctcctgataaagtcagacctaaagccaaaaggaaagaagaaccaagctctatttttcagagacaacgtgtggatgctt

SEQ ID NO: 519725 - DNA, 75 bp, Homo sapiens
accctgcacgaggtctatgagaacaagacggacgtcatcctgatcttggaactgaacatgtttgacaagctgaac

SEQ ID NO: 519726 - DNA, 100 bp, Homo sapiens
gctgatagtctccagcgggcctggactgtgggctggtgtgtggaactggatgagccccaagagcctcaagaacccaacaaggtgcccctagaagacacag

SEQ ID NO: 519727 - DNA, 100 bp, Homo sapiens
gatcgggcgcggtactcagccttttaaagcttgagatcatggagacttacttgctagctgtccagaagatgaggctctcactccaggtgatgaatgcatg

SEQ ID NO: 519728 - DNA, 100 bp, Homo sapiens
tactgaggaagatgatggatttgtggacatcctagagagtgacttaaaggaagagccaatgttttccacccataatcctttctgccgacccctagttccc

SEQ ID NO: 519729 - DNA, 73 bp, Homo sapiens
gcggctaatgtggcttcacctggaagggtgtcaaattgagaaccaggtagatccccaccacctacagtaaaaa

SEQ ID NO: 519730 - DNA, 75 bp, Homo sapiens
atgaagttcctgatggaattaaatctgcgagctacaaggtagcctttccagtaaatatatgactcagggaaaagc

SEQ ID NO: 519731 - DNA, 100 bp, Homo sapiens
caggtcttcagggtcttccatctgaaggacagaataacgggctcccagattcacaagccccaccaagaggatcaccccaggaacgcttggaggctgagga

SEQ ID NO: 519732 - DNA, 100 bp, Homo sapiens
agcgggcccttggcgggggactctgagggaggagctggggacggcgaccctaggagaggtctccgtgaggccgggtgacgctccagaatgggagacaagc

SEQ ID NO: 519733 - DNA, 100 bp, Homo sapiens
gagccttgcaaataatagcaagatatgtaccatcatatgttgatgatgtgatcagccgcattgacaggatgtttcctgaaatgtccatccacttatccag

SEQ ID NO: 519734 - DNA, 100 bp, Homo sapiens
catgttcctggccaaccacaacaggatcacccagcacaaagacattagcaggctgctggtttcatggacctgtaccacaatgacacagagaacaccagag

SEQ ID NO: 519735 - DNA, 50 bp, Homo sapiens
cccaaggctaaaggcagagccaggtcctcagaatggttggaatgaccctc

SEQ ID NO: 519736 - DNA, 82 bp, Homo sapiens
ttcggcagtccacccaccgccgccgcctcccagtactttaggaagaatcatcaaagtaactcaggaggtgattgactaccgg

SEQ ID NO: 519737 - DNA, 75 bp, Homo sapiens
tcggcggctcaggttgtggtagaggcggaggctcaggcagcttgagaacctaaaggcagacccagaagagctttt

SEQ ID NO: 519738 - DNA, 100 bp, Homo sapiens
ctcgattaaagaggaaggggcagtgctcacatttctgggcagataatgctctaccacaagaaaatggcctctcacctggggccattgctggcattgtgat

SEQ ID NO: 519739 - DNA, 100 bp, Homo sapiens
aggccaagccttttgctcacatacaggtatggcccatctcctgtacgcttggagcgacctttggctacgtggctggccttgttatttcaccactctggat

SEQ ID NO: 519740 - DNA, 101 bp, Homo sapiens
caacgatggcgagggcgccttccatggagacgcagtgaatggtagtgtctagaaagggtatgtcccttcaagagagaggtgccaatgtccaaccggcctaa

SEQ ID NO: 519741 - DNA, 100 bp, Homo sapiens
gtgtggcgaaatcttgtttgagaaccccgatcagaatgccaaatgtgtttgcatgctgggttgtaagttctacaaatggagagttaaacacagatgaccc

SEQ ID NO: 519742 - DNA, 75 bp, Homo sapiens
aattcaggaggctccctccgggttacccccactccagagacaggggcaagtgtccgagtggtgaatcagctactt

SEQ ID NO: 519743 - DNA, 87 bp, Homo sapiens
atatttcagaaaagatccaagaccattcttcaagtttgcaaagattttaggtgatgggcaagtcagaaagtcagatggatataactg

SEQ ID NO: 519744 - DNA, 75 bp, Homo sapiens
aagtgctccgccgcccttgcctccaggtacaagtatgagttctgcccgttccacaacgtgacccagcacgagcag

SEQ ID NO: 519745 - DNA, 76 bp, Homo sapiens
tacccacagtgcttcatgagagtgatccgggccaaggtggtggggaagaagctggtaaaggaggggcccttcggca

SEQ ID NO: 519746 - DNA, 90 bp, Homo sapiens
agagcgccttggaacgccgacctgaaaccatctctgagcccaagacctaaatggccaacatgcagggactggtggaaagactggaacgag

SEQ ID NO: 519747 - DNA, 82 bp, Homo sapiens
gagtccgggagcccgagcttgaggtgaggcggaaccaaccctcctggccatgggaggggccgtggtggacgagggccccaca

SEQ ID NO: 519748 - DNA, 95 bp, Homo sapiens
gaaagagataggcgcatctctggagttgatcgttactatgtgtcaaagggtttggctgctttcttgaaggctattgggtatcttattcctcttat

SEQ ID NO: 519749 - DNA, 83 bp, Homo sapiens
gagctctcctctgatggcaggacctgccaagattttcagctgaactctcatctctcaacactggcaaatattcataagatcta

SEQ ID NO: 519750 - DNA, 82 bp, Homo sapiens
aacatgcctcaccctcatctatatcctttggcagctcacagacctagaggatcaagacataatgggagcatttttagacaag

SEQ ID NO: 519751 - DNA, 75 bp, Homo sapiens
atcagtgagctgtccctgctggaggagcgcttccggggtccatatccacgacaacatgaagctgatgcagatctc

SEQ ID NO: 519752 - DNA, 119 bp, Homo sapiens
acctgccccacagcctccagttactaagcctcttttccccagtgctggacagtgaagcgtgacattcaggaaaacgatgaagaggcagtgcaagtcaaagagcagagcatcctggaact

SEQ ID NO: 519753 - DNA, 95 bp, Homo sapiens
tttgcaagacagtttaaacccaaggctttccttaaagtttcccatgtctcaatggactcctgaatataacgagctctacaccttaaaagtggata

SEQ ID NO: 519754 - DNA, 100 bp, Homo sapiens
agttcacttgcttgacctacaaggaatctgagggtgccctcaatgagcacatgaccagcttagcttctgtcctaaagaaatgcactcggtgatggaaaga

SEQ ID NO: 519755 - DNA, 73 bp, Homo sapiens
tcaaactgactttgcagccacggagaggttatcaatactctggctgaccatcatcatcgtgggactgactttg

SEQ ID NO: 519756 - DNA, 50 bp, Homo sapiens
aacagaagcagaatcctactgtagccagattctactgcaactgaaagagc

SEQ ID NO: 519757 - DNA, 75 bp, Homo sapiens
ttgaccgctcctccaactaaccaatcttcagtcgtgctggtgaagcctgcaaaaaggtgatacttaatgtacctt

SEQ ID NO: 519758 - DNA, 100 bp, Homo sapiens
gaaatttcaacagttgcgtcacagaatacagggacaagaatccttcaagaaacaggaaaaaactcctaaaacaccaaaaggacctagttctgtagaagac

SEQ ID NO: 519759 - DNA, 82 bp, Homo sapiens
cgagaaccgtcagtttgagccagatgggcagcccaatggatccaatggtgatgaagagacctcagttgtatggcatgggcag

SEQ ID NO: 519760 - DNA, 103 bp, Homo sapiens
gatctgtaattacagctactccagcaacatcttgtccataaggctgaaccggcaagttgctccttgagggcaggacagttcttatggctttatccgttgcgta

SEQ ID NO: 519761 - DNA, 73 bp, Homo sapiens
ggacccatttgtgtccattgatctcttggagcagctggggatcatggtgaaaatggcattacggacatcagga

SEQ ID NO: 519762 - DNA, 49 bp, Homo sapiens
gtcgtttaccttttgaccactgcagggagccttttggggactgatccta

SEQ ID NO: 519763 - DNA, 75 bp, Homo sapiens
acggcttccgtgtgcatggaaagaactttcacctgatccaggccaacaaggaatgttatatgcatggagttatac

SEQ ID NO: 519764 - DNA, 87 bp, Homo sapiens
cagggtccctgaagagggaagacacgcggaaacaggccatgacgctgatggagtacctcatcaagaccggctcggagcgcgtgtcgc

SEQ ID NO: 519765 - DNA, 90 bp, Homo sapiens
ttttggcattgacatttaattttagggtcctttatatagaagggagagtagccaaagtggaacaggtgaagttcgatgccacatccatgc

SEQ ID NO: 519766 - DNA, 75 bp, Homo sapiens
cctgaaatacatccaggaaagacatggagattctcttaaaaagtgacgggaacagtaagaatgaggcttggaacg

SEQ ID NO: 519767 - DNA, 100 bp, Homo sapiens
attgtgaatcgcttctccaaacagagcttactccacgggaacagcctctagataatctgagttgttgaaaatacgaagcctgttactcgtgaacagtggc

SEQ ID NO: 519768 - DNA, 100 bp, Homo sapiens
gcctgaaagaagctacctgcaagctctatttttaccagatgctcttggctgtgcaggacagtcattttgtttactcattcagccctgttgcaggtcccaa

SEQ ID NO: 519769 - DNA, 101 bp, Homo sapiens
gtgaggctgatgaagaggaaaacagtctcgcccaagaacttcaaggtgaaaatgatcatgaagacatcagttctgctcagctgggagttccctgacaacta

SEQ ID NO: 519770 - DNA, 97 bp, Homo sapiens
ggaaatcctctgcttgacatctctgctgtagtggacaaagatttccttgataagcactgacccttgacctccggtggctcccccatctctcaggcgc

SEQ ID NO: 519771 - DNA, 95 bp, Homo sapiens
aaagcctcttctgaaggaaaagacagtgtagtcctgcaaaacattttgagagcaaacatgaacgttggagttgcccacagtgaagtgaatccaaa

SEQ ID NO: 519772 - DNA, 100 bp, Homo sapiens
cgaagctgctggataattttatcccagggtggctgaatcacggaatgggagactcatgcatctgtatgccgtgtgcgtggactgcctggaaggggttcac

SEQ ID NO: 519773 - DNA, 90 bp, Homo sapiens
ctgggctcagcgacaccgcgagctatatctgcgcgtggagctgagtgacgtacaggttaccccacagcctatccagcagctgcccctgcc

SEQ ID NO: 519774 - DNA, 75 bp, Homo sapiens
gctactctgcctcggggacgaaagcagggagcagtaatgaatgcaatggaaacaaacctcgttggaagtgacaaa

SEQ ID NO: 519775 - DNA, 49 bp, Homo sapiens
ccagctcacccactgccagcagaggtgaagcggaggctggacctggaaa

SEQ ID NO: 519776 - DNA, 88 bp, Homo sapiens
gcggcggagctgcgcctcggcccgctcttctccctgcttaacgagaaccataggtcaccttcatgctgctggaccagaacaaccgtga

SEQ ID NO: 519777 - DNA, 75 bp, Homo sapiens
tctcccctcccctagtatggaagcttcagaggatgattccgaagaagacggagaccataacaggacatttgatat

SEQ ID NO: 519778 - DNA, 75 bp, Homo sapiens
gatgagagcctgaggagccattttgagcaatggggaacgctcacggactgtgtgaataactgaagtgaagtgatg

SEQ ID NO: 519779 - DNA, 74 bp, Homo sapiens
gcgtgagtgatcactctcaatcccggcacccacatgcaggatctccaggaggtgacccaggaccttcattatga

SEQ ID NO: 519780 - DNA, 51 bp, Homo sapiens
gatgccatgctggaggagttcaagaagggctggagtatagtggcatgatca

SEQ ID NO: 519781 - DNA, 83 bp, Homo sapiens
tgagacagcagccaaacccccaggtgtgaccaattcagtgaaaggaacgaatgcgattctctggacctgtttgggactgagct

SEQ ID NO: 519782 - DNA, 60 bp, Homo sapiens
cggaggatgcagcctttggactcaaggttttgactggatcatctcgtcaaagttattcac

SEQ ID NO: 519783 - DNA, 75 bp, Homo sapiens
ctatcccagggagtgcaagcttagagcgtctggccaagaatcagaggaagtgggggcttgcttctgacatgtctg

SEQ ID NO: 519784 - DNA, 50 bp, Homo sapiens
cacagccaatgagcgccgcctgaagagcagcccgacggccatggaggctg

SEQ ID NO: 519785 - DNA, 100 bp, Homo sapiens
cgtggagacaaccatcttcattttgggagaaataactaaagatccggcactccacccagagcctctttgagtacatgaagggcattcagagcgacccgca

SEQ ID NO: 519786 - DNA, 75 bp, Homo sapiens
cgagccggggcgaagctggatcccctaggtttttcgttggaatatacgttgcacatttatggcgattctgagtgt

SEQ ID NO: 519787 - DNA, 100 bp, Homo sapiens
aagaacgagtgcgccttctcctacgactctcccacctgtcgcgaaatcgcctttcagaaattcctatagaagcatgtcactttgtttctctggaaaatct

SEQ ID NO: 519788 - DNA, 110 bp, Homo sapiens
tttcttggcccttgttcccccaaatgtctgactctgactctcggactgagaaacgcaagtaagactttgaccccgacgcaggcttcagtgattgccgcggatcagaagcc

SEQ ID NO: 519789 - DNA, 75 bp, Homo sapiens
cagaaaatgaccagcgtgtcagatttgcataaggacacaccacaaggctgaggaaaatgttggggcttttcagga

SEQ ID NO: 519790 - DNA, 96 bp, Homo sapiens
gacggcggaagcggagagcaacagcgcgccggttaaatgggccagggaaaactatcaccataacattggctcaccatattgcttacggttagcttc

SEQ ID NO: 519791 - DNA, 73 bp, Homo sapiens
gcgctctggctgtgctgcgcgacccccgcgcatgttggttgaatctggcgatgtggaacccatggatatggag

SEQ ID NO: 519792 - DNA, 108 bp, Homo sapiens
ggcggcggggaccgtccagcccagcgattctcagtcaggtccttctggcactcctctggtggaccgcccccatcggccacacttgccctgctctccagtgattctgta

SEQ ID NO: 519793 - DNA, 82 bp, Homo sapiens
ctgcggacggtggcgggcgagcggctcctctgccagagaagctggcagggcggagatgctggaccacgccgtcctgcttcag

SEQ ID NO: 519794 - DNA, 51 bp, Homo sapiens
cttcatcttctggagaaagaagagagaccatgtgaaggcaatggaagaaag

SEQ ID NO: 519795 - DNA, 75 bp, Homo sapiens
gctgttccttggccatcccaaagctattctgggggcaacagagactggtattgctcgagttccacttgctggagc

SEQ ID NO: 519796 - DNA, 75 bp, Homo sapiens
tgctcttgtgctcagtgacatcattcaggtcctggtccagtggcgggaagctgtgtcagtgcagatgtattaccg

SEQ ID NO: 519797 - DNA, 96 bp, Homo sapiens
agagagaagagggcagagccgtgcatggggctgctccccaggacctgagcaggaacctggagttttcagctggggggtcccgttggtcatcactgt

SEQ ID NO: 519798 - DNA, 100 bp, Homo sapiens
ctgaggcacaatgcctatgtcgcggcgtggcggtttgaccagaagctggaagtcctggagggtatttgggagccaaaaagaaaaagaagaaacagaagag

SEQ ID NO: 519799 - DNA, 83 bp, Homo sapiens
cagaaagagtcaacagcagtggcaacaggaatggaaactgaaagtggaaatcaggaaaaggtaatggaagaagaaagcactga

SEQ ID NO: 519800 - DNA, 100 bp, Homo sapiens
tcgaatggcgagattgagcacgtgaccaagcgggccatcagcacccccgagaacttcccaagtaagaagcggaagaggagccgctggaaccaagacacaa

SEQ ID NO: 519801 - DNA, 83 bp, Homo sapiens
ccctgagctccaggccgtgcgcatgtttgctgactacctcgcccacgagagtcggagtgcctccggagccagcgtggtggcca

SEQ ID NO: 519802 - DNA, 100 bp, Homo sapiens
gtcggagacacggtggaaacgcttatgattgaggtggtgccttctgcctctgccctgatcatcaaagccctcaaggaaccaccaagagacagaaagaaac

SEQ ID NO: 519803 - DNA, 83 bp, Homo sapiens
tgcccgaccgctttccgggagactggagtcgaaggccgtgaggtaactgcgtcattgattggctggtatccaaccagtctgtt

SEQ ID NO: 519804 - DNA, 100 bp, Homo sapiens
cttggccagatgattgtggattatgaaaaccctttaaagaagatgatggaagaatttgtaccccatagcaaggtggagcagttctggaggttttatagcc

SEQ ID NO: 519805 - DNA, 100 bp, Homo sapiens
gcccttgaaaagatgatagctttagttgctcttttggttgaacagtctcgatcagaaaggtatggctatcctgatccttcttacctgaaacgtgtcaaag

SEQ ID NO: 519806 - DNA, 90 bp, Homo sapiens
gccactgctgctccgtggagatcgtcccgcgcctgccggacgtggcccagtggaacatcgggagcctccggaccatcctggacatggtgg

SEQ ID NO: 519807 - DNA, 100 bp, Homo sapiens
ggacctttacctgtggaggcaacactggccaagaagaggaaaggtgattgtccagcggactctggctgccaagaacctgtcccatgccaaaggaggtgct

SEQ ID NO: 519808 - DNA, 100 bp, Homo sapiens
caaccgccctcctggacaaggtggccgacaacctggccatccagcttgctatgtttgacacagtgaagcgattaagagaaaaatcttgtttaattgtagc

SEQ ID NO: 519809 - DNA, 90 bp, Homo sapiens
tccagtactggagtcggcagaactggagtaaaatcctggtccctgtatgggaagcttgaacgtggggccaagacatcaagagtagagcag

SEQ ID NO: 519810 - DNA, 91 bp, Homo sapiens
ctgaaacggattgccagagaattggcagaagggcttccgttacaagatgaggtctgtgtatgctcacttccccatcaacgttgttatccag

SEQ ID NO: 519811 - DNA, 51 bp, Homo sapiens
cccaaagctattctgggggcaacagagataccccagaatcttccatgctcc

SEQ ID NO: 519812 - DNA, 100 bp, Homo sapiens
gaagcctgtggtggcagagttctatgggtcaaaagagggatacaatgtctctttgctatatgaccttgaaaatcttccggcatccaaggattccattgtg

SEQ ID NO: 519813 - DNA, 75 bp, Homo sapiens
ctgtgtaactttaacgaacagcttgaaaatgaaatgcttcggttacccacagtctttcgccagatgagaccggtg

SEQ ID NO: 519814 - DNA, 83 bp, Homo sapiens
cggtgcccgaggaggcagccaagctcgtagcctgccactccgtgctggagaccatcctgggcctcacaggagcgaccatggga

SEQ ID NO: 519815 - DNA, 51 bp, Homo sapiens
gagggagaagcacaagatcatgcacagagcatttacctgccatgacagtgg

SEQ ID NO: 519816 - DNA, 82 bp, Homo sapiens
tgtggatcgctgtgatcgtcacttgcgtttgcctcagcatggagggcggggccgcggcagccacccccacagcactgcctta

SEQ ID NO: 519817 - DNA, 75 bp, Homo sapiens
gaacaagtggtactaggattatacattgtaagaggtgacaacgttgagaaagatcagtctaaagaaaaggagaag

SEQ ID NO: 519818 - DNA, 90 bp, Homo sapiens
tggcggaggacgagctccgggatgctgtactccttgtctttgcaaacaaacagccagagactgctgctactttgaaacgtacgatagagg

SEQ ID NO: 519819 - DNA, 100 bp, Homo sapiens
gaagccatgcccctcaggctggaacttgccctgtctcctcgcagatgaggagtctccccaggacagtgctatcacccgggatattaaccgaacattccca

SEQ ID NO: 519820 - DNA, 84 bp, Homo sapiens
ccgctgctcgagctgctgctggattgaactcagagaagccgggccgcttacaaacacgcagatggcaagaagattgatggcagg

SEQ ID NO: 519821 - DNA, 76 bp, Homo sapiens
ccagcaccagcttccagttagtggatatagcacaccatccccagccaaaatacatgctacaggatttaactatcag

SEQ ID NO: 519822 - DNA, 100 bp, Homo sapiens
ctctttaccctcattggcgcttctctcctgcagtccgcctctgggccctgccggtcacttatacatctcaagaggatctggtggagaaaaagtgcttagc

SEQ ID NO: 519823 - DNA, 100 bp, Homo sapiens
gcgctgcgctcgcgcccggatccctcagatcatgatgctgccgccaccgccgccaccacggagcgagaagcccagatagacgccccggcggccccgggtc

SEQ ID NO: 519824 - DNA, 83 bp, Homo sapiens
cgctgctggcgctctggctgtgctgcgcggcccccgcgcatggtaagtaaggaggtctctgtaccatggctcgtacaaagcag

SEQ ID NO: 519825 - DNA, 78 bp, Homo sapiens
gtgacatatcgttggacccagaattgagatgccatggacaatattaccaggcagaaccaattctacgatacccaagtc

SEQ ID NO: 519826 - DNA, 74 bp, Homo sapiens
gcaggaggacggagccctaaccgcaacccgcgccgcgccgcgccgcgccgaaaactttagaaactgttcctttg

SEQ ID NO: 519827 - DNA, 75 bp, Homo sapiens
gtaaccgctacccaggaggcggagcggacaaggctccggcctgcgaggagtcaagtaagggagaattgactacgc

SEQ ID NO: 519828 - DNA, 117 bp, Homo sapiens
ccgggctcggggagccggtctatggactttccgaagacgagattgccaccaaggagccaatgaatcccattaaacaatatgtaaaggatggaaagctacgctatgtggcgaatatct

SEQ ID NO: 519829 - DNA, 95 bp, Homo sapiens
tctcgctccgtggccttagctgtgctcgcgctactctctctttctggcctggaggctatccagcctggtcagtgagaaggtcggaggggccgagg

SEQ ID NO: 519830 - DNA, 75 bp, Homo sapiens
cccagggctgagccgtgaccatgagggccatcccgaaactgtgattgttttctgtcctcatcaccgggggcatcg

SEQ ID NO: 519831 - DNA, 100 bp, Homo sapiens
gctgatgaaggcatctcgttcaggcggtgtggacacggctgcggtgggcggggtcttcgacgtctccaacgctgaccgcctgggcttctcagaggtggag

SEQ ID NO: 519832 - DNA, 88 bp, Homo sapiens
gcggggccgacgagtccggaggggctgccgcgggaggttttataggatcacattgacaaaagtaccatggagttttatgagtcagcat

SEQ ID NO: 519833 - DNA, 117 bp, Homo sapiens
cgtggggctgggcccagccggacgcgacctcagcctgcggcggctaactgccgcaattctgtggtgttcttggtcacacatttatggagtttctgaagggcagtggagattactgcc

SEQ ID NO: 519834 - DNA, 100 bp, Homo sapiens
atgtagtccagacaaagactgaatcagatggagtttcactcttgtctcccaggctggagtacaatggcatgatctcagcttactgcaacctccgtctcct

SEQ ID NO: 519835 - DNA, 90 bp, Homo sapiens
ccgcagcagcgtggaagtgcgcatggagtttgtcaggcaggccttggcgtaccttgagcagagaaactcagccaagaatgtttaaagcag

SEQ ID NO: 519836 - DNA, 100 bp, Homo sapiens
ctttttattacaagactacggagcataggaggaaaattcatcatctggtgaaaggtgtagcagtcactcggcctacacccacagcatcgaccttgtgaac

SEQ ID NO: 519837 - DNA, 49 bp, Homo sapiens
gtgctccaacccagcagtcgtcttgtcagctcatttgcagcttacattt

SEQ ID NO: 519838 - DNA, 83 bp, Homo sapiens
cacctcgctactcgcttgcctacccgccggcccgcgggtctacttcctcaaagatcatccagacttgaaacatatcgacccag

SEQ ID NO: 519839 - DNA, 74 bp, Homo sapiens
agcttctcagaagacagagggttttcttttgagtgatgtcttggcattgcccattttcaagcaggaagattcca

SEQ ID NO: 519840 - DNA, 96 bp, Homo sapiens
cggtgtaccgcggcgagaagccccagctgcactacgcgggtatgagtattatagaacaattagaccctgtatcttttagcaattacttgaagaaat

SEQ ID NO: 519841 - DNA, 82 bp, Homo sapiens
cctatgtacctgttaccactttcaaaagcaccattcctgccttaatcaatctattaaaaagttccaaaataaaactgcagtg

SEQ ID NO: 519842 - DNA, 100 bp, Homo sapiens
ctgcgggttagggggccggcgcccgcggttcagcccttacgtcgtcctgactcatctgatgaccgttatgtaatgacaaaacatgccaccatttatccaa

SEQ ID NO: 519843 - DNA, 75 bp, Homo sapiens
ccggcgcgaagaggctggactcggattcgttgcctgaggcctcatcatttctgtctcctgtttctccacttcctt

SEQ ID NO: 519844 - DNA, 90 bp, Homo sapiens
ccctcttctcctccaacccagaactggacaatctgctgccctgtgagctacaggacatggttcggaaacatttgcacagtggtcaagagg

SEQ ID NO: 519845 - DNA, 82 bp, Homo sapiens
attttgaaaatgctgcacatcccttaatagtcatctacatagaattttgattcagctaaagttccatcagatgagtattgcc

SEQ ID NO: 519846 - DNA, 82 bp, Homo sapiens
tttggatgtgggatccggttccttggtgtcatccagccttagcaaaccagagggagtatatgttgctgcagtacgggaattt

SEQ ID NO: 519847 - DNA, 74 bp, Homo sapiens
tttgaagattaatctgccagttactgcccttcctcccctttgggttctcccatgggcaggtggtctctctggat

SEQ ID NO: 519848 - DNA, 99 bp, Homo sapiens
cccgcctcgggcttgcccggcccgctgccgcccgggaagtacatggccggcctgaatctccatccgcacccggccctgacttctcaaaaagcactgcac

SEQ ID NO: 519849 - DNA, 75 bp, Homo sapiens
tatgctgccaaaattatcaacaccaaaaagctttctgctaggggcctttagatgttgttctggaaaaactttagt

SEQ ID NO: 519850 - DNA, 90 bp, Homo sapiens
ctcttgtgccctagcaccccgagaaccgtcagtttgagccagatgaaccctcggcctcaggaaagtcggacagtattcagtggctcagtc

SEQ ID NO: 519851 - DNA, 83 bp, Homo sapiens
gtgagggtgtacaaatacccctttgaattaattatggctaaacccctgcagcagctgtggaacgccatcctgctggtggccat

SEQ ID NO: 519852 - DNA, 97 bp, Homo sapiens
acagggatgagcatttggactttatccagtcacacctgcggaggttctgccttcagtacattgtggatatcaagcctgccaatatggaagagctaac

SEQ ID NO: 519853 - DNA, 100 bp, Homo sapiens
gagatcaaatggcacttcattggccacctacagaaacaaaatgtcaacaaattgatgggggcactatgaacgaagaggagcagtttgtaaacattgattt

SEQ ID NO: 519854 - DNA, 75 bp, Homo sapiens
tctcttacgtctgcggaagtgcagctgcctcagttcttagcgcaggtacctggactatgccagagtccccaatag

SEQ ID NO: 519855 - DNA, 75 bp, Homo sapiens
ttggtgggggagccctgccctcctggttcggcctccccgcgcactagaacgatactgtggcctcatgaataggaa

SEQ ID NO: 519856 - DNA, 134 bp, Homo sapiens
ggcaactcctaggatttgtcacgaatgggaagccaagtgccatcttcaaaatttcaggtcttaaatctgatcatgctttacgattatggaatatccagacggacactctggtggcaatatttggaggcgtagaa

SEQ ID NO: 519857 - DNA, 48 bp, Homo sapiens
gggggacccgctcatctacaaagactaggaggatttctacgaaaagct

SEQ ID NO: 519858 - DNA, 88 bp, Homo sapiens
tggttcaaggaagggggtcagctgcctccgggtcacagcgtgcaggatggggtgctccggaaatctgaaatagagtactatgctatgt

SEQ ID NO: 519859 - DNA, 140 bp, Homo sapiens
gtgccatcatcatggacgaggcccacgagcgctccctcaacactgacgtgctctttgggctgctccgggaggccctgaagtactctttccagacccacgaccgcctctgctttgtcatggagtacgccaacgggggcgag

SEQ ID NO: 519860 - DNA, 100 bp, Homo sapiens
caacctggcggtgctcgagtgcctgcaggatgtgagggagaaggagctggcaaacagccctgactgtccccagatgtgtgcctataagctggtgaccatc

SEQ ID NO: 519861 - DNA, 100 bp, Homo sapiens
caagactggggctgctcccatcattgatgtggtgcgatcggctttcatctgagtggcacagtaactgagctggccactgcctctgaaccagcagtgactt

SEQ ID NO: 519862 - DNA, 100 bp, Homo sapiens
tgtgaagtagatgataaagatgatgatatccttctcaaccttgtgggatgtgaaaactctgttactgaaggtgatttgaagatattaaagctagaaattg

SEQ ID NO: 519863 - DNA, 99 bp, Homo sapiens
cccacagggatagaagatgaagatgctctcattgctgatgtaaagtgacaaagcataaatcatggacaccagagaataaggtggacctcaggaatccgg

SEQ ID NO: 519864 - DNA, 74 bp, Homo sapiens
tgggacccccaggaggtgaccctgcagtataaggatgcatttatgaaagcaaatcctggctacaaatggtgtcc

SEQ ID NO: 519865 - DNA, 99 bp, Homo sapiens
gcgcaaaggctaatcccagctgctccatcactccaatcacaggcaacaactctgacaaatcaggaacatcatttacagcgagcaatttcagcacagcaa

SEQ ID NO: 519866 - DNA, 50 bp, Homo sapiens
aggactcaggagcaaatcagtaatgcattggacaaaatccggtatgaaag

SEQ ID NO: 519867 - DNA, 100 bp, Homo sapiens
tgaaaaacctgacttttatcatcatattgataatctcaggagaactctatgcagaaggtggatatttcccttaacttagatcaattaaaggaagaaattg

SEQ ID NO: 519868 - DNA, 75 bp, Homo sapiens
ttggcggcccactacccaccgtccacctggttccagagttctaaatctggaaagatctacctccatagagacgta

SEQ ID NO: 519869 - DNA, 100 bp, Homo sapiens
gtttttagtccattgactatgcagcctaatgtcccatgaagctgaggtcttgaagcagctggctgagaaacgagagcacgagaaagaagtgcttcagaag

SEQ ID NO: 519870 - DNA, 100 bp, Homo sapiens
tttatggtggctttctatggatgcctcctggcagaagtgattccagtgcctatagaggtacctcttaccagaaaggtggacccaagtggagagattgtgg

SEQ ID NO: 519871 - DNA, 82 bp, Homo sapiens
cgtccttctccactttcgccagcccgtgccgcgagcgcggcctgcaggagaaaccaaggtgtatgttggtaacctgggaact

SEQ ID NO: 519872 - DNA, 100 bp, Homo sapiens
agcatcaagatgatttatggtaataaggtgacaactgttgatagatttcaaggtcaacagaatgactatattcttctttctctggtacgaaccagggcag

SEQ ID NO: 519873 - DNA, 51 bp, Homo sapiens
caacttcgtgggaacttttacccgacttacaggaaatatgggagatagagg

SEQ ID NO: 519874 - DNA, 100 bp, Homo sapiens
gtgaatccggaatgggtgacagcgtcatcacggcattttattgtgtttggtgtataaaacagaccaagctcaagatgtaaagaagattgagaaattccac

SEQ ID NO: 519875 - DNA, 75 bp, Homo sapiens
tcaggactctcttccagcatggccgaagacacctattcacacaaatctccctggaaaaggagacatgaatgtctg

SEQ ID NO: 519876 - DNA, 88 bp, Homo sapiens
atctgcggcaggtgggcaggaggaggaagagggagaggacgaggaagagctgagtgggacaaagtgagaaagatcagtctaaagaaaa

SEQ ID NO: 519877 - DNA, 90 bp, Homo sapiens
cctgcccagcgtggtggggcagcagaagctccagagcccagacttgcaggaatttcgtgaggatatgccctccattcttgctgatgtatt

SEQ ID NO: 519878 - DNA, 75 bp, Homo sapiens
gcccgaactcccggcccgaactccagtaccttctccaggcaaattccgttcccctgcagcaccatctcctttggc

SEQ ID NO: 519879 - DNA, 100 bp, Homo sapiens
gatggaagatggaaggaaggagcgcagcgtacaaggtgaatatcttaaccagacttgccgcagaattgaacaaatttatgctggaaaaagtgactgagga

SEQ ID NO: 519880 - DNA, 83 bp, Homo sapiens
gatgagttgagtggagatgcttctgtggaagatgatgcttttatcaagattggtggaacgagaatgcctacacgcagccacag

SEQ ID NO: 519881 - DNA, 82 bp, Homo sapiens
cttgtgaacaaggatctggatatttattataagactcttgaccaaggcaccaagtctgaaggaggcagaagggaaagaacct

SEQ ID NO: 519882 - DNA, 71 bp, Homo sapiens
cgctattcagcagagagctattattccctgtattaaagcaatggctgccatccggaagaaactggtgattg

SEQ ID NO: 519883 - DNA, 75 bp, Homo sapiens
tccccagccgccatggatagcgacgacgagatggtggaggaggcggtggaaggtcaaaatgcagatcttcgtgaa

SEQ ID NO: 519884 - DNA, 75 bp, Homo sapiens
gtgaggtcgaaacaggataaaattttggaattcactatgcatgataccattggatgttacctggatatagataag

SEQ ID NO: 519885 - DNA, 51 bp, Homo sapiens
cggctcacctgtgcgggatggaacaaaagagggcttccctggaggccgcca

SEQ ID NO: 519886 - DNA, 97 bp, Homo sapiens
gtcgaaggggtgctggcgagacgggggtgatgcccacccgggcgagaaagattggtttatcttggaagctaaagggcattgctcatcctgaagatca

SEQ ID NO: 519887 - DNA, 76 bp, Homo sapiens
gtgttcgcggtcggccgccaccaggtcaccctggaagagtcgctggccgaaggaagacaactgttagttttgtggc

SEQ ID NO: 519888 - DNA, 98 bp, Homo sapiens
cccgtacagttcattccatcaacaatggcagctgctgctgcttctggactcagccctttacagctccagacaagttggatggcttgaggactggtact

SEQ ID NO: 519889 - DNA, 100 bp, Homo sapiens
aggtaatgctgctatagactcactgctgaattatgaaactgtgaagcgagaactttcaaaggcttccaaatctgatgctacttctggaatcctcaattca

SEQ ID NO: 519890 - DNA, 100 bp, Homo sapiens
catgaagaaggtggtgtgtgtggatcagcagacccccaccatccctaaccggctggctgcagacccgggccacccccttaaccctcgggactactgtggc

SEQ ID NO: 519891 - DNA, 83 bp, Homo sapiens
cgagggtttgatgaaggtggaggcagcgcggctctcaggtgaatgaaaactttgccattgatttgatagcagagcagcccgtg

SEQ ID NO: 519892 - DNA, 100 bp, Homo sapiens
cgggcctcccgtttctggctccgggctgagcttcctggagaagaggaaggtgactgtggggatcatgttgttataatgaacacaagacacattgcatttt

SEQ ID NO: 519893 - DNA, 96 bp, Homo sapiens
tgaaagtaaacctggtgactcacagaaccttgagagtgaaccacgagacgctggaactgaccaacgtagctctggcattattcgcctgcatacaat

SEQ ID NO: 519894 - DNA, 100 bp, Homo sapiens
cgcgccgtagctgcttccacgtccttgcttcacctcaggtcccttcgacagaatggacgtgatcctcctgatccctatgtgtcactgttgctactgccag

SEQ ID NO: 519895 - DNA, 75 bp, Homo sapiens
aacgccgatgagctggaagccctgcagatgtgcacagaggattccacagatgttggtgaggaggacagcttcctt

SEQ ID NO: 519896 - DNA, 100 bp, Homo sapiens
ccgaccggcacaccttcctggctggggtggcctcactgtccgagcggaggttctgggggaagagaagctgaaggagatactgaaggagcgggaacttaaa

SEQ ID NO: 519897 - DNA, 100 bp, Homo sapiens
ccaggaacaaggaagatactgtccagaaatggtttattcatagcaacttcaaggaatcctctatgtccccaggggagctgaagctgactgtgtctccttc

SEQ ID NO: 519898 - DNA, 50 bp, Homo sapiens
cagatggcagacatacatcatttaaagggcctgtctccactaactctgga

SEQ ID NO: 519899 - DNA, 96 bp, Homo sapiens
tgctgccgccgccggaggaaccttgatccccgtgctccggacaccccgggcctcgccatgggtaaccaggagccgacaacaactcctgacgcaatg

SEQ ID NO: 519900 - DNA, 75 bp, Homo sapiens
cagacttccacaagcaagtcactagtttccaaggcaggaaaggtaaagagacaaagaaagtgccttgtacagatg

SEQ ID NO: 519901 - DNA, 75 bp, Homo sapiens
gcctggtcaatatccgaaaggacacactgaggctcgtcaaccccgacacgtctctgctactggactgtggtgagg

SEQ ID NO: 519902 - DNA, 100 bp, Homo sapiens
gcaagggcgagtgaagcagtgtcacgcattttagaagaatgggaactgaaattaccattcacttttttaagtggacatattcatgaattgaggattcatg

SEQ ID NO: 519903 - DNA, 100 bp, Homo sapiens
atgataaagatgatgatatccttctcaaccttgtgggatgtgaaaactctgttactgaagagtggatcatgacccatgaagagcaccatgcagccaaaac

SEQ ID NO: 519904 - DNA, 75 bp, Homo sapiens
tcgagatcccggatcagccctgctggagccagagctctgaaaattggaaaaccaagaaggttttgatgttttgtg

SEQ ID NO: 519905 - DNA, 90 bp, Homo sapiens
cctgtgcaacaacctcttgaggatcgaatcttcactcccgctgtctcagcagtctacagcacgctgaaactgatgtaaatgtggtcatgc

SEQ ID NO: 519906 - DNA, 75 bp, Homo sapiens
gcggcgacggcggggcagcgcaccggcaggcggatttttggagcatatgcaactcatcctttcaagttcagtgac

SEQ ID NO: 519907 - DNA, 75 bp, Homo sapiens
gaatatacaggatctgattatcagtacgtaggcaagtgggatggagtaggacctcttccagactgtgctgaacca

SEQ ID NO: 519908 - DNA, 100 bp, Homo sapiens
cttcgttgcttgcttgcctgtgcgcgcgtgcgcggacatggcctcaaacggcagcctgcttctgcaaagtggtacgatcgaagggactatgtcttcattg

SEQ ID NO: 519909 - DNA, 75 bp, Homo sapiens
cagtaccttcttcaagagaaatggagcccttctccaaggaggtgctcctgtaccctggccacagcccaatcctgc

SEQ ID NO: 519910 - DNA, 78 bp, Homo sapiens
aacactttctgaagctcatgaagactgtgtaaataatatcaggagttcaaagaaggacgcagagccagccacacagcc

SEQ ID NO: 519911 - DNA, 100 bp, Homo sapiens
atcagcagaatttcaagcgaggctctgggcagagtggaccacggggagccccacgaggaaagatgaatgggagggctgattttcgagagccgaatgcaga

SEQ ID NO: 519912 - DNA, 50 bp, Homo sapiens
gccgtggtcagccgcttcgacgagcaggtcagaagaggccaagtgatgga

SEQ ID NO: 519913 - DNA, 75 bp, Homo sapiens
gcgagcagtgggaggagcaatgagaggcaatccttctctggatggtcgtcagatccgtgtggatcatgcaggcaa

SEQ ID NO: 519914 - DNA, 50 bp, Homo sapiens
tatagcgttgtgcccatgacctccagggagtgaggattctttggacacca

SEQ ID NO: 519915 - DNA, 98 bp, Homo sapiens
ttatgcagtcacaggcagctggcaaaatacatatctcagtgcattgatgagatcaagcaggagctgaagcaggacaacatagcggtgaaggcgaacgc

SEQ ID NO: 519916 - DNA, 82 bp, Homo sapiens
gaacaactcgggcgccgacgagatcggggagtgcatccgccccaacccttttccccctcgtctcctgtgagaattccccgtc

SEQ ID NO: 519917 - DNA, 76 bp, Homo sapiens
ctcggtgctgtggtgcagagctagttcctctccagctcagccgcgtaggaattgaatgatctggcacgggaccctc

SEQ ID NO: 519918 - DNA, 83 bp, Homo sapiens
ggctacgccagcggcgtcgagaggaccatcctgggtgctggccctgtgctggagacaatgcagatcttcgtgaagactctgac

SEQ ID NO: 519919 - DNA, 100 bp, Homo sapiens
cacacagcaagttcctgcttctgggacagctctactgacgccagtggaatcctgaagggcttcgacccactcctcaaccttgtgctggacggcaccattg

SEQ ID NO: 519920 - DNA, 88 bp, Homo sapiens
cctcactgaccccagagtggcagaaaggctgatgcagcagggtagtcagcagagtgcacacagcagctgtcatccctccttcgctcct

SEQ ID NO: 519921 - DNA, 100 bp, Homo sapiens
gaaatcttgttggcaaatcagatgcagctgttttaactatccctgcctgtgactttcaaggtacagtatatcagaagtatgagccgatctttttccagtc

SEQ ID NO: 519922 - DNA, 75 bp, Homo sapiens
agctggggcgcagcacctacatggagacgtatgtgtacttctatcgggagtgtcgtttgaccaggccaataacct

SEQ ID NO: 519923 - DNA, 100 bp, Homo sapiens
gaagtaccaggaggcgttggccaaggatgtatcggcaagcagtgtaaacggaggacttggggaaaaaggaccacatagtccatcgaagaagagtccttgg

SEQ ID NO: 519924 - DNA, 49 bp, Homo sapiens
atcctttggaaatgtgctcacactgttctgccggagacttccatttggc

SEQ ID NO: 519925 - DNA, 82 bp, Homo sapiens
acaagatggacaccgcggaggaagggggatatgagactttctactcggaatatcctgagtgttgcgtggatgtaaaacccat

SEQ ID NO: 519926 - DNA, 74 bp, Homo sapiens
ctgactaccctggaagtagcaggccgcatgcttggaggacgacttcaaagagggctacctggagacagtggcgg

SEQ ID NO: 519927 - DNA, 104 bp, Homo sapiens
ccacgttaatggccctcatgattggctcttacgcctcttctgccattacgttcccaggaatcaagatcagcctggatcccccaatcaagcaaggccaaactcgc

SEQ ID NO: 519928 - DNA, 83 bp, Homo sapiens
ggaatttccaaggggattcaaacttcaacagaatgtggcaaccagctacatctggtaccttggctggcattatgggaatgagg

SEQ ID NO: 519929 - DNA, 100 bp, Homo sapiens
agtggcagactgacaactgtgagacatgcacttgctacgaaacagaaatttcatgttgcaccctaatcctgcttatctgtgaaatgcagttaacacatca

SEQ ID NO: 519930 - DNA, 100 bp, Homo sapiens
agtaacgtcatggaggatgaacgacaggaatgtcgttgtctgctgggtcttcccctcttcattcccccaagattactccacatacttctcctgctcccag

SEQ ID NO: 519931 - DNA, 74 bp, Homo sapiens
ttgagaagaagagaaacaactgttttgttggtgtggatgaggtcaccattgtcaacattttgaccaaccgcagc

SEQ ID NO: 519932 - DNA, 74 bp, Homo sapiens
tgggaagcaaaggccatggcagtaatagcgtgtttatctgacacggacttcttggccaggctgactgagagatt

SEQ ID NO: 519933 - DNA, 100 bp, Homo sapiens
caaacattcaagaaaacacacagactccaactgtacaagaggagagtgaagaggaagaggttgctggatctttccaatgaagggtttacaaactgggaat

SEQ ID NO: 519934 - DNA, 83 bp, Homo sapiens
caaggacggatgatgaagtagtacagaggatttgacaggtctggaacacatgctaataaattgctcaaaaatgcttcctgctg

SEQ ID NO: 519935 - DNA, 82 bp, Homo sapiens
gagatcagccgcccggccaagctatcttctcgctagcagggactggtgattgcagctggaagtgcccatgaccgagctggcg

SEQ ID NO: 519936 - DNA, 75 bp, Homo sapiens
aggcgatcaaggccaagtatccgccagtcaataggaagtacgagtgtgaaccagaagggaaagatttcagcattc

SEQ ID NO: 519937 - DNA, 100 bp, Homo sapiens
tgatgactatgtacacacagctttatcatcggactgggcatttagctatggagacattattatcccttacttctaaacgagcaggagactggtttaaaga

SEQ ID NO: 519938 - DNA, 50 bp, Homo sapiens
cagggcaagccccgctccggccaacaactcactaccctgggaaatcttac

SEQ ID NO: 519939 - DNA, 100 bp, Homo sapiens
ccgcatcctggacagtttgctcgatggttatgacaacaggctgcgtcctggatttggggggcactgtgtttagtcttgagtcagaggaggaggaataccc

SEQ ID NO: 519940 - DNA, 98 bp, Homo sapiens
tccctgctctacaacgtgcctgcagtggccgaggagattcaggatgaagttgagcctcagcttaagggtatagttaccaagctatacagccgacaagg

SEQ ID NO: 519941 - DNA, 101 bp, Homo sapiens
gtgcggcgcttcgagaggaagggcttcaagttggtggcgctgaagctggtgcaggaaattgaagctcaagaaggtgaagatgatacctttctaacagccca

SEQ ID NO: 519942 - DNA, 100 bp, Homo sapiens
ctctgtatagagcaactgttgaactcagctgcctgtagtaatctatgccagcaattatgacaatgttagcagaccatgcagctcgtcagctgcttgattt

SEQ ID NO: 519943 - DNA, 100 bp, Homo sapiens
gaagttcgtgatagacaccacagtcttgaagactgggacatgttggatgttgatgaagatgaaaagctaactggtgaagaagaatttgaattacttgctg

SEQ ID NO: 519944 - DNA, 98 bp, Homo sapiens
aggacttcttcttcaccgccaggacctccttcttcaggagagcgccccagggcaagccccgctccggccaacaactcctgacccctgaggattaccag

SEQ ID NO: 519945 - DNA, 121 bp, Homo sapiens
tcgctttcggtctctcagcggccggtttctgcgtccgctgccgcaggttccaccgcgctccagtactggagaaaatgaaactgggattgacccatcaagatgcttggctcaataagaaaac

SEQ ID NO: 519946 - DNA, 140 bp, Homo sapiens
tcgtcagtaatgcctggaatgatgatgtctcatatgtctcaggcttccatgcagcctgccttaccgacagcacccaagaaaacctcatttggctcgctgaaggatgaagaccggattttcaccaacctgtacggccgcca

SEQ ID NO: 519947 - DNA, 51 bp, Homo sapiens
gtacatcttctgcaattactcggaccccctctggttgatggtggatcaccc

SEQ ID NO: 519948 - DNA, 82 bp, Homo sapiens
ttatgatttactggatgaactgataaaacccaccagtctaggtacagagccagatggactccttcggacaaactacagttct

SEQ ID NO: 519949 - DNA, 74 bp, Homo sapiens
gaagaagaagattaacctggagttaaggaacagatccccggaggagttggaatcgaagcctcttaaaatggcag

SEQ ID NO: 519950 - DNA, 46 bp, Homo sapiens
cgagagaatcctcaattacttcaggatggtgtgaactggttagcat

SEQ ID NO: 519951 - DNA, 74 bp, Homo sapiens
ctggtacacaactggaggtacccattccagaaatgagtccagcctctgatgaagcaggagagaaagaagccaag

SEQ ID NO: 519952 - DNA, 75 bp, Homo sapiens
ggcgctgccgctcccgggcggccgcgggcggggtggctttgcaaaatgttacgagatgacagatttgacaaataa

SEQ ID NO: 519953 - DNA, 51 bp, Homo sapiens
tctggaggctgtgcgcatgcagcacctgaacagtccacaggaagaggttga

SEQ ID NO: 519954 - DNA, 100 bp, Homo sapiens
gccttgggggtgaacctggtggtggaggaaatggaaaccaaagtcaagcatgtgataaagcagtggatcaatcttcctgtcctacaactgacaaaggatc

SEQ ID NO: 519955 - DNA, 90 bp, Homo sapiens
atgtccaaatcattaaagaactacattactattaaggccgacttcgcagaactactgctccctggagcagccaggccagggcggcagcac

SEQ ID NO: 519956 - DNA, 98 bp, Homo sapiens
ggcatgaaagccagaatggagaaggaactgttggagatgagacccttccggtcttcttttcagtattctccaagcatgacgatgagtgtgtgatcccc

SEQ ID NO: 519957 - DNA, 76 bp, Homo sapiens
ggcctccccagccacgtggaactccagtcgtctgggattgtattccaaaacttcccagtcagtctcaggagaagaa

SEQ ID NO: 519958 - DNA, 101 bp, Homo sapiens
taatctttttgccagtgaaggccaacctggcaagattcaggaggaatcagatatgtggaaaataagagaactggaaaaacagatggaagatgcttaccggg

SEQ ID NO: 519959 - DNA, 51 bp, Homo sapiens
tcttggatgaattgcttgctttggaggtggtgatgatgtccagcaactctg

SEQ ID NO: 519960 - DNA, 75 bp, Homo sapiens
ggagaaggaatgtgtgaccatttccaacgtgaacaaggggagaagaattgccttcagctccacgtcgttactgaa

SEQ ID NO: 519961 - DNA, 99 bp, Homo sapiens
ctgcttagggtgaaacaaatacctttgaggtttaaatcagatctggtgaggaaggatattatcctgaacttacagaattttgtgaaaagcatcttcaag

SEQ ID NO: 519962 - DNA, 90 bp, Homo sapiens
gaaatcctgtgtttcagtggaatgggcagaaggaggtgccacaaagggcaaagaggtggcgacatgtctaagaatgtgagccagtcacag

SEQ ID NO: 519963 - DNA, 116 bp, Homo sapiens
ggcaaatggcatcttggacaccacggctcttatcaccccaacttccgtggtttgatctgtggatgaaatgaatcatgattttcaagctcttgcattagaatctcggggaatgggag

SEQ ID NO: 519964 - DNA, 83 bp, Homo sapiens
gaagcctgtagaaaacaggaagaatttgatgttgccaacaacggctcttctcaacaaatcgctttcaaaaacctggtacagag

SEQ ID NO: 519965 - DNA, 90 bp, Homo sapiens
cctgtacagcctgcagaactcttgcagttccccacaatgatgaatggacccgatttgccaggacccttgtggaaattcgtgctaacagag

SEQ ID NO: 519966 - DNA, 75 bp, Homo sapiens
ctgttcaactttgtcctctctcaggctatagaaagcgcaattggtggtaacgcttatcaacacagcaaagtgaac

SEQ ID NO: 519967 - DNA, 73 bp, Homo sapiens
gagaccgaggggctgcgcttcctgcacaccacggatggcccactgcgtgaccttggttcagctgtccatttcc

SEQ ID NO: 519968 - DNA, 75 bp, Homo sapiens
gggagagggaacgcagctgaaagcgtgaactcaacaggaacaagatcctaccaacctctacatttctaatttgcc

SEQ ID NO: 519969 - DNA, 96 bp, Homo sapiens
aaaaggctcaacaagaaacaggagaacgggaagcctcctgccgagataaagccaccacgtctggatgctgaaaacgccattcaacagatgggtggc

SEQ ID NO: 519970 - DNA, 49 bp, Homo sapiens
cgggaacttccccaaggagctgctgaagccaatggagatcttcgtggat

SEQ ID NO: 519971 - DNA, 50 bp, Homo sapiens
ccagaaaccagagcaagttatcaaagaggaagccacttggaggatgtgct

SEQ ID NO: 519972 - DNA, 50 bp, Homo sapiens
tgggacttcccgtccgcggcgtggaggatcccgactgggcctcctacact

SEQ ID NO: 519973 - DNA, 90 bp, Homo sapiens
cgcgcagggcctgcagcgggagctggacggcgagcgcgagcggcgcgagaaagttgagaacttgttgcttagtaaccaagggaccattaa

SEQ ID NO: 519974 - DNA, 75 bp, Homo sapiens
ggggagatcacagtccatgccaagcttactgtcctccgaggacaagggcacacaactggttccgttaagcccctc

SEQ ID NO: 519975 - DNA, 74 bp, Homo sapiens
agcacgcctcttcaaagacgaggatgaatctgaggacacagatactgatggggaagaggagacatcacaacccc

SEQ ID NO: 519976 - DNA, 98 bp, Homo sapiens
ggaggggagcggagcccggagcgtcgtggaaaggatttgacgaaacgttcgagtcaaacgcagaataaagccagcaggaagaggcagcatgaggaacc

SEQ ID NO: 519977 - DNA, 126 bp, Homo sapiens
ctcctcctcctccccaccaccaccatctccatcacccaccaacaacaccacaataatccacagccaaggtgtgatgaatgcagactctgctaccattttggctgtttggatcctcctttgaaaaag

SEQ ID NO: 519978 - DNA, 75 bp, Homo sapiens
tgtatgccaagaacttctacgggggcaatggcatcgtgggagcgcagacggcaaatggatacatcttgttttttc

SEQ ID NO: 519979 - DNA, 101 bp, Homo sapiens
ggacaacaggagaggcttctacagccaggacctgcccccaggagcctctcaggggtgagcccgtggtagcagcagaagcaggcattatgggataacgattg

SEQ ID NO: 519980 - DNA, 90 bp, Homo sapiens
tttgagtctagcaagtgttattatttctgccctttgtacccttacaagctacattgtcacaggtgacattaaggggaacattaagttcta

SEQ ID NO: 519981 - DNA, 100 bp, Homo sapiens
gagaaagaggaggaggcgagaaactcccaccgacccacagaggtatatttgcttacttaaactaccatgttcctcgaacgagacgagaaatcctggagac

SEQ ID NO: 519982 - DNA, 99 bp, Homo sapiens
atcaaaaatgactttactgaagaggaggaagcccagggtttcgaaaaaacgatgaaatgaaagctatggatgttttaccaattttgaaggaaaaagttg

SEQ ID NO: 519983 - DNA, 75 bp, Homo sapiens
cagcacctcatcccctggatgggggaccacaagatcctcatcgacagcgtccgtctccaagagagtatgaagaga

SEQ ID NO: 519984 - DNA, 83 bp, Homo sapiens
acccaggcctatgccaatcagcatttcacattcctcatggttggttcaaaggctgacggggtacgggatccaccactgctttg

SEQ ID NO: 519985 - DNA, 82 bp, Homo sapiens
aggcgctgcgccgcaacgccgagcgcaccgacatctgcctgctcaaagattctgaaagtcaagaagacatcatccggaatat

SEQ ID NO: 519986 - DNA, 50 bp, Homo sapiens
aggaaaattacccggtatcgttagagtgtctttggtgcaacactaacaag

SEQ ID NO: 519987 - DNA, 100 bp, Homo sapiens
cctgcacacctggatccaggataacggaggctggaaatcgaaacgagttggctgagactcttgcactcctgaaagcacaaattgatcctgtactattgaa

SEQ ID NO: 519988 - DNA, 101 bp, Homo sapiens
gcgtgtgtcggtcgcctagtctggagaactagtcctcgactcacggctaatctagacgaaatccagatgagttcacctacattccttagagctttaatgac

SEQ ID NO: 519989 - DNA, 75 bp, Homo sapiens
tactcagtttgtaaaaacatggcggatccagaattctgaatgcgataagttgcggcatgatggctaccgcagttc

SEQ ID NO: 519990 - DNA, 100 bp, Homo sapiens
ctcgcgagcctccttcgccgcgccccacttgctcgtgcactttacacacatgagagagacaagagagacacctccaacttcgacaaagagttcaccagac

SEQ ID NO: 519991 - DNA, 82 bp, Homo sapiens
tcctgccgtccatgcggaagatcgtcgccacctggatgctggaggttttagctaaagaagatactgaggcagctattcaatc

SEQ ID NO: 519992 - DNA, 87 bp, Homo sapiens
gggattcaaatctggagtgaagttttcactgtggagaagccaggtgggaagaagccccggggcccagcgacctgacagttacaggac

SEQ ID NO: 519993 - DNA, 75 bp, Homo sapiens
ggtttcctgaagtcaccacacatagaggagagagaaaatggctgagttaaagaacacagatatgtagaactcttc

SEQ ID NO: 519994 - DNA, 100 bp, Homo sapiens
ctgccttgcataaggccataatggttaaaggtgtgcgatgactgtgtggtgttgcgtagtaacatcggaacagtgtatgagcgctggtggtacgagaagc

SEQ ID NO: 519995 - DNA, 75 bp, Homo sapiens
gcctgggaggaagcgcaagcaccccccgctcatgatggagcagtccaagaagtcctccctcatggtggcccgcag

SEQ ID NO: 519996 - DNA, 76 bp, Homo sapiens
gcagaaagcaggcgaacccgcggcgcaataacgctctcgtggcattatccttcagtggggctattggactgacttt

SEQ ID NO: 519997 - DNA, 102 bp, Homo sapiens
cgcaaactgacacctcagggacaaagagatctggacagaatcgccggacaggtgccagctgctgcccgtgctggtgccattgccccatgtgaagtcactgtg

SEQ ID NO: 519998 - DNA, 75 bp, Homo sapiens
aggcagctgtactaggactgggaacgggtcgttcttccctctttccaatagatgatggcttgcttgatgatggtc

SEQ ID NO: 519999 - DNA, 100 bp, Homo sapiens
ctgtcacagaacttccattcctgttcattcaaaacaaggtcaaatttgttggggcataaaggtgaagtggcagaagaatttggtataatcatgaaagccc

SEQ ID NO: 520000 - DNA, 75 bp, Homo sapiens
ctcccatcacctacccgcagggcctggcactggccaaggagattgacctcctgccccccgaggtctgcagtctcc

SEQ ID NO: 520001 - DNA, 75 bp, Homo sapiens
cggaggcagagcggctgccatgaggctgaggggatctggcggtggagcgctaggatcagacgcccccgcgatgac

SEQ ID NO: 520002 - DNA, 83 bp, Homo sapiens
cgcgctctgccgcgaggcgcgcgccgcgcaagtcttcttcctcaaagaacacagatatgtagaactcttcttgaattctacag

SEQ ID NO: 520003 - DNA, 100 bp, Homo sapiens
aaatgttgagcctttttggcctggcttgtttgcaaagattcgggaactggagcctctcctctgtcacagtgacaatccatctcagctcatctggacatca

SEQ ID NO: 520004 - DNA, 90 bp, Homo sapiens
gaaatacagcttggtgaagagttactagctcaagccacagtagaatgttacaatccaagaacaaatgaatggacctatgttgccaaaatg

SEQ ID NO: 520005 - DNA, 129 bp, Homo sapiens
ccgggccctcggcagggaggatgacggagctgcagtcggcactgctactgcgaagacagctggcaggcccggtatgaaagccagcggatccagctggagtcggagctggctgtgcagctggagcagcgg

SEQ ID NO: 520006 - DNA, 98 bp, Homo sapiens
tgagagtccgtaaggagcagcttccaggatcctgagatccggagcagccggggtcggagcggaaaaatccagttacactcttaaaggaattgtcagtg

SEQ ID NO: 520007 - DNA, 100 bp, Homo sapiens
cagatggacctcattcagacagaatctattaccttgggagaaaactggttgtcctggatgtttgaaaagttggtcgttgtcatggtgtgttacttcatcc

SEQ ID NO: 520008 - DNA, 83 bp, Homo sapiens
acgcaagaccatgccgaagtccgtcgtgggcctggtagacgaagttcctgatggagctgtaaagccacccacaaacaaactac

SEQ ID NO: 520009 - DNA, 100 bp, Homo sapiens
ggggagtcagttcctccccgggcccctgagccatgcccatcgcagccgccccgaaggagccagcggagctggagttcgcccaaatcatcatcatcgtcgt

SEQ ID NO: 520010 - DNA, 100 bp, Homo sapiens
tggaagcggatcgcgtggagtgacggtcacaccgcggcgggaccattgcaatttagagatgtggccatagaattctctctggaggagtggcattgcctgg

SEQ ID NO: 520011 - DNA, 73 bp, Homo sapiens
tctccgttgggtccggccgctctgcgggactctgaggaaaagctcgcaccagtgatgaacggcagcagccact

SEQ ID NO: 520012 - DNA, 82 bp, Homo sapiens
ctcatctcgctcggctgcgggaaatcgggctgaagcgactgagtccgcgatggaggagatggcgtctaccagaaggggatgg

SEQ ID NO: 520013 - DNA, 101 bp, Homo sapiens
agttcctgggaaggtggagccaccagcctctccctgggcagctgcaatgactctccgcacggtattattgtcattgcaagcactattggcagctgcagagc

SEQ ID NO: 520014 - DNA, 75 bp, Homo sapiens
ccatgggcacgtccgcaaggccttcaagagccacctgtggaaagtgaagaaggcattgaagatgactattttttg

SEQ ID NO: 520015 - DNA, 82 bp, Homo sapiens
ccaaccatgggaggccgcgtctttctcgactatcggtggtccatgtcaagtgatagttcacaagtgggagactcatctacaa

SEQ ID NO: 520016 - DNA, 75 bp, Homo sapiens
tctggcctggaggctatccagcgccgaggagtcttgtaaatgtaatggctggaaaaaccctaacccctcacccac

SEQ ID NO: 520017 - DNA, 76 bp, Homo sapiens
agactggcaagattactgatttcatcaagttcgacactggccagtgaagaagcaaaggaagacatgaaaattgacg

SEQ ID NO: 520018 - DNA, 90 bp, Homo sapiens
tcggcgtgtttggatgtactttacagattcatattcgaaggaccggggaccttggatagtaaaaccagtggcatcttcaagggggcgggg

SEQ ID NO: 520019 - DNA, 75 bp, Homo sapiens
atgaagttaaaagagcagcactccaaggagaatggtgttgaacgcgtgtgtcctgagagcctgctgcagtccagg

SEQ ID NO: 520020 - DNA, 74 bp, Homo sapiens
gggagccccgaggccccagggaccaacgtgaaggtggatgtcaccagcaaggcggtgacagaagtgctggccag

SEQ ID NO: 520021 - DNA, 90 bp, Homo sapiens
ggaggaagcccagaagcaacaagccctgcgtccgtctccaagagagtatgaagagagtgcgtctgtagggcagggaagatggcggacaag

SEQ ID NO: 520022 - DNA, 82 bp, Homo sapiens
tacaaactctgtgcctcaacaaccatttctaagtggccataggaaaaggatacagagtagagtttcatgaacctgaaacttg

SEQ ID NO: 520023 - DNA, 109 bp, Homo sapiens
cgccagcggccgagcgggcggcttcctggcctgggcgctccggtggcggcggagcccgtggaccgggagcccgtggaccgggagccggtggtgtgccaccccgacctgg

SEQ ID NO: 520024 - DNA, 90 bp, Homo sapiens
ggagaagagtaccaaggctgctagtgaacagcgacgtgattttaggtgatgggcaagtcagaaagtcagatggatataactgatatcaac

SEQ ID NO: 520025 - DNA, 100 bp, Homo sapiens
aggatcgcttcctggcagaatttgggagctgtttattgcagcactgttgtgccctctgatggtatgatgatgtcaaacgtgatgctgatgctacagttac

SEQ ID NO: 520026 - DNA, 122 bp, Homo sapiens
gagagtcccgtattctcagagtaaaagttgtttctggaattgatctcgccaaaaaggacatctttggagccagtccaagtggtaagaagttcagaagcaagcctcagttggcaaggtacctg

SEQ ID NO: 520027 - DNA, 100 bp, Homo sapiens
gatgcagagtgtttgaagatcatgtgtgaaatcctaagtggattgcagttgggagactttctcattaaggatgattacatggaagccctggccaggctcc

SEQ ID NO: 520028 - DNA, 96 bp, Homo sapiens
gttggccctgtgatccctcaagactggtccacggagtgtatgaccacaaacagccatcaaggtctctacccaccaagagccaagctggtgatacag

SEQ ID NO: 520029 - DNA, 75 bp, Homo sapiens
cttcatcaaaaatagtgatagctttgataagacgtgctgagaagcaacctggtgcaggtgaaggtggagaaagag

SEQ ID NO: 520030 - DNA, 75 bp, Homo sapiens
gcaggcgcaagcgcagagagcggaggcggtggtggtggcggccgctggccagtaatcaaaggcatgggaggttga

SEQ ID NO: 520031 - DNA, 75 bp, Homo sapiens
cgtcactgaggttgcagttggcgtgaaggcattatccaattggtttgctatttgatcttcttgcatcaagttcag

SEQ ID NO: 520032 - DNA, 96 bp, Homo sapiens
ccttggctgggatcaccaggagaaattgcagctgcatgaatcccaaaaagccatgggcctgcgcgcgagccggaactgctccaggacagagaacgc

SEQ ID NO: 520033 - DNA, 100 bp, Homo sapiens
aggggtgtggaattaccttcactctgggaaaaggcactgaagttggtatcagcagatgttgcacacaaacttggtataccttgctacaatagcagattct

SEQ ID NO: 520034 - DNA, 82 bp, Homo sapiens
cccccggagtgcggagccgaccaggttattaccccaagaaaaagccagtagaataactactgccttcattttcacccacctc

SEQ ID NO: 520035 - DNA, 100 bp, Homo sapiens
ccggcggcggcggcagcggggtccgggtccggagcgccacatgccctataaggactgccaggcaataatgaaggttcttttactgaaggatgcgaaggaa

SEQ ID NO: 520036 - DNA, 100 bp, Homo sapiens
caaagatcgcctgcaccttcaaggccaaactatgcagctttatcttcaagccaggatgaagggagactgggcaagactcttacgccccacactgcaattt

SEQ ID NO: 520037 - DNA, 82 bp, Homo sapiens
ctagcagatgtggttggaatccttgctgtgctgaatcctggctgtgtgaccccaaatgaaggatttgggggcagagcacttg

SEQ ID NO: 520038 - DNA, 83 bp, Homo sapiens
cgctgacaggggggcctggccgcgcagccgccttatgccagcctggaccatcttggaggcagtgtaggatcatggaagaactt

SEQ ID NO: 520039 - DNA, 99 bp, Homo sapiens
tactttgccacttcttcacggaccagtttcagttcgccgatgggaaacccggagaccaaatccttgcctctacggcagacacatgcaggccaacccaga

SEQ ID NO: 520040 - DNA, 100 bp, Homo sapiens
ctgactcgcctcaagcacctgcgcatcgtcatcggttttgatggacatgtttgatcaggatgacataggtttggtttctctctgtgaagatgaacctagt

SEQ ID NO: 520041 - DNA, 129 bp, Homo sapiens
gccgaaagcacaggaactgtgagggtgtttgatctcatgggaagtgaactctttgtcatttccccggtagatatagttgtaggtactccgggaagactagatgacttggtgtcaactggaaagctgaac

SEQ ID NO: 520042 - DNA, 80 bp, Homo sapiens
ttcgactatggcaacaagtacaagcggcgggtgccccggccactgaggcggctcccagctgcgttggcgacatggccgac

SEQ ID NO: 520043 - DNA, 100 bp, Homo sapiens
cacaaggaacgctgccacaactatctccagaatgtcagcatggaggctgctgggcaggtcatgagtcaccatggtctaaagacattgccctcacagagtg

SEQ ID NO: 520044 - DNA, 98 bp, Homo sapiens
aaattgttaatagaaagaagaatgtagatcaagctattaaaaatggtcaggctcttctaaaacaaaccacagatcccagtggtagctattatggccac

SEQ ID NO: 520045 - DNA, 100 bp, Homo sapiens
caaagagatccagcccccttataagccaaaagcttcctctttgatacgcaacctacggctctctgagtccttgaaaaagaaccaactctggaacgggatt

SEQ ID NO: 520046 - DNA, 74 bp, Homo sapiens
gcggctcacggcggaggacgacgcgctcaaccagatcgcgcgggaggatgacagtgatgggattccgtggtcag

SEQ ID NO: 520047 - DNA, 100 bp, Homo sapiens
aaaaagcaaatgcaaaaaataaaggaacagtttctccaacaaaaggtcccccggcagagggcagtagagatggccggcccaaggcctcggtggcgcgacc

SEQ ID NO: 520048 - DNA, 100 bp, Homo sapiens
cctcggagcaaccacccgagcagacggagtacacggagcagcggccccggccccgccaacgctgccgccgggccatggttgcttgttatccgggcaatgg

SEQ ID NO: 520049 - DNA, 50 bp, Homo sapiens
aaattactgtctcaagtgatacggaatggtctgccgaaaaccgaccgacc

SEQ ID NO: 520050 - DNA, 75 bp, Homo sapiens
cattgacatttaattttagggtcctttatatagaagggagagtagacacacaaactcgggccacttctaagagtc

SEQ ID NO: 520051 - DNA, 100 bp, Homo sapiens
cgcatgagtggcaggcccttcagccaggacggtatgccctggtagttgcaggagatattgctgtatatgccacaggaaatgctagacctacaggtggagt

SEQ ID NO: 520052 - DNA, 120 bp, Homo sapiens
gaaaaaaaccacaaatgtttttctgttttgcctgaatacatgatttaaacaagagatttccacagaagattctgatgctcacagtaccacctcaagtgcctccccagctcaatctccttg

SEQ ID NO: 520053 - DNA, 78 bp, Homo sapiens
agccgcccgctggccgggagcggagcccctgtgggtccgcgggagagctgtggggcttggtgagtgtttcgtggcctc

SEQ ID NO: 520054 - DNA, 100 bp, Homo sapiens
gtttggatcaggagttagtgataacaggtacatgtgaagattttttggcagcttagcgtggaaaccattgatcaccctgctctcatttctacctgttctg

SEQ ID NO: 520055 - DNA, 100 bp, Homo sapiens
attgaattcagggacctttcctattcggttcctgaaggaccctggtggaggaagaaaggttgcttatcaagtgtcccacaaatgaaaaaaatttctacat

SEQ ID NO: 520056 - DNA, 102 bp, Homo sapiens
caccagctccgaaatcaccaccaaggactgaagcttcaagatggctgaccaggaccctgcgggcatcagccccctccagcaaatggtggcctcaggcaccgg

SEQ ID NO: 520057 - DNA, 98 bp, Homo sapiens
tgtacaggctctttgaatatgactctgcaaaggtgtgatgaatgcagactctgctaccattttggctgtttggatcctcctttgaaaaagtctcctaa

SEQ ID NO: 520058 - DNA, 98 bp, Homo sapiens
tgagctccaggagttcgtctcttacgtctgcggaagtgcagctgcctcagttcttagcgcagcaattaccagctctggctgggtcgccacaacttgtt

SEQ ID NO: 520059 - DNA, 101 bp, Homo sapiens
aaattcatggaagatatgatgccaaagtacagagcaactgattttgttgttcctgggcctggaaaagtagagataacctacacaccaagtgacggaaccca

SEQ ID NO: 520060 - DNA, 100 bp, Homo sapiens
acctgtttaagaggcagcaggcgatgccctccacaggtatggcagttcttgcaacgatagcttttgcttttcttctcctcccgatgtgccagtatttaac

SEQ ID NO: 520061 - DNA, 75 bp, Homo sapiens
tcggggtgactcttctcaaatgccttctcatccccacatataggtaaccagttaggggccttggtacatcaaagg

SEQ ID NO: 520062 - DNA, 74 bp, Homo sapiens
tttcaaagggtggtgaagaactaaggctgtggaaaatctctgttctcacaaagtctccccaatgctctacaagc

SEQ ID NO: 520063 - DNA, 98 bp, Homo sapiens
cccctctccgggctgccgggacaactcggggcggccactcttgccaggaggcgtaagtactccaaagattcaggtttactcacgtcatccagcagaga

SEQ ID NO: 520064 - DNA, 95 bp, Homo sapiens
ctggtatgcagcatctgcctggatcggtaccagtgccccaaggttcttccttgcctgcacaccttctgtgagagaatccgaatcggaaggtgagg

SEQ ID NO: 520065 - DNA, 98 bp, Homo sapiens
agaccgctggggaaatttcccacttcctctcctgagaccaggaactcagcagagaaactttgtggtttgtatttcagcagtcagaaaaatttgcaaag

SEQ ID NO: 520066 - DNA, 75 bp, Homo sapiens
tgagggagcgttgacagggaagcagccggatggccgggtgagagcaaaactttcagcaccacttgctggcatggg

SEQ ID NO: 520067 - DNA, 73 bp, Homo sapiens
agttagagagatatatgggccacatgcagtttctctcagattggaaccattgttgacaatccagctgatttct

SEQ ID NO: 520068 - DNA, 75 bp, Homo sapiens
gacctggcctggagagacctgttcaacaagctggaggcccagagtgcgggggagatcgtggtgaaatggtttgag

SEQ ID NO: 520069 - DNA, 100 bp, Homo sapiens
tctgaagagactttcctcattgactgccgaggccccatgaatcaatgtctggtagccaccggcactcacggcagattttgacaacaaaccagtaaatggc

SEQ ID NO: 520070 - DNA, 101 bp, Homo sapiens
tcagcctcccgaatagctgggattacaggaactaagcgtcttgtagaaggaactattaatccaggagaaacctgtttaatcattgaagatgttgtcaccag

SEQ ID NO: 520071 - DNA, 74 bp, Homo sapiens
aaatttatgtggatcttcgctttggtgccataaagtggaagatagatgataagcctgtaaaaattgacaagtgg

SEQ ID NO: 520072 - DNA, 96 bp, Homo sapiens
tgtacccgcctgccatggactggatcttccagtgcatctcctaccatgcccccgaggctctgctgccatgaaggtgaagattaagtgctggaacgg

SEQ ID NO: 520073 - DNA, 108 bp, Homo sapiens
gacagccgcccctggtgcacacaccctcgtattctcctgcccttccccagtgttcgatgagtatctgaagaccacagggaagccgattgaagccagcatccgagggga

SEQ ID NO: 520074 - DNA, 98 bp, Homo sapiens
aaacccccattcattctggattggtggatctgaagtacaaaatattttccaggagagtagttatcttgatggaattagaagttttgaagtcagctgaa

SEQ ID NO: 520075 - DNA, 51 bp, Homo sapiens
tattgcacatcaatgatatcatcccagatgcaatctccctcctttgtcaag

SEQ ID NO: 520076 - DNA, 100 bp, Homo sapiens
accctcatcctggacgccctcagaaaagaggaggcggggcggctcttgtacatcgggcagaacgagtggacacacgtcaactgtgccatctggtcggcgg

SEQ ID NO: 520077 - DNA, 74 bp, Homo sapiens
agaaaaatgtaggcatcatagccattcagcagaagggggtacaggtttgcagattccgccagcagcacagcaag

SEQ ID NO: 520078 - DNA, 75 bp, Homo sapiens
gcaagcatctgggccatcttcaatgcattgctaccatttatgttcgttataagcaagttcatgctctgagtcctg

SEQ ID NO: 520079 - DNA, 100 bp, Homo sapiens
cagactcggtgctgtacccgccgaattgtcttagaagaaagaaggcaagccaccattttacccacgtaaatatatgaatatatttctgacattgaggtgt

SEQ ID NO: 520080 - DNA, 74 bp, Homo sapiens
gacgcgcgggaacaacgcgagtcggcgcgcgggacgaaggtcaaaatgcagatcttcgtgaaaacccttaccgg

SEQ ID NO: 520081 - DNA, 100 bp, Homo sapiens
aagcttcgaggcatgatggtcgactacaagaagagggcggagcggagacgggagtattatgaaaagatcatgcctgctctgtgcctgtatctgagatcat

SEQ ID NO: 520082 - DNA, 100 bp, Homo sapiens
gcgtctaggggagcgaaggctgaggtggcagcggcaggagagtccggccgcgacaggacggtgctgcaggaggcttctcacatgctttgggatatcttca

SEQ ID NO: 520083 - DNA, 90 bp, Homo sapiens
ggattctgtaacatgggaacttaaatgtacattttgccaacgagctgggaaaataaggttacttcttgctgcagattctgcgcaggatcg

SEQ ID NO: 520084 - DNA, 82 bp, Homo sapiens
tcccggttcctgtcgcgctcacctgcgccggtagcgaagaaatcgccccgggacatggatgggcgggatccccgctgtgaac

SEQ ID NO: 520085 - DNA, 117 bp, Homo sapiens
cttacctcttagcagcttcaaatgattttgcaagccgaatctggactgtggatgattatcgattacgggttcaatttcagaagcttcagcaactgcgccttacacagtaccatggag

SEQ ID NO: 520086 - DNA, 100 bp, Homo sapiens
cgctgtgtgcaaagttcctattgatggtccccccatagataatttccagcagtgttataagcgaggagggacatctggtggtccacgagcaaattcgaga

SEQ ID NO: 520087 - DNA, 100 bp, Homo sapiens
tacagcaatggctgaggaattgaatgctgtcattgtttccattgagtttatttcaatctacagaggacccagccacacctacaaggtccagagactgacg

SEQ ID NO: 520088 - DNA, 82 bp, Homo sapiens
gggggagcgcggggcgacgctggctgcagggacccggtgacagcgtgagagaacccttaggagaaatcttgagagtggacag

SEQ ID NO: 520089 - DNA, 50 bp, Homo sapiens
gaacaggcacgtttgaaagctttaaagggtctgctcttgataaaataaca

SEQ ID NO: 520090 - DNA, 98 bp, Homo sapiens
ttatggaaaggttcatggagcaagtggtttttaaatatcttcgagctgaacctgaggaccattattttttaatgtggattccaaagcatgagttgggc

SEQ ID NO: 520091 - DNA, 75 bp, Homo sapiens
cttcgccttcgtgcgcttcgaggacccccgaagctggcagggcggagatgctggaccacgccgtcctgcttcagg

SEQ ID NO: 520092 - DNA, 100 bp, Homo sapiens
tggcggatgccctgcagtacctgcagaaggtctctggagacatcttcagcaggccacagagatgctggttcacaatgcccagaacctcatgcagtctgtg

SEQ ID NO: 520093 - DNA, 100 bp, Homo sapiens
gaatcatcactggcgatctacaattggcatgcttcgagaatcaaggcttcttgctcatttgccaaaggaaatgacgagtttccagatgtcttggaatgca

SEQ ID NO: 520094 - DNA, 85 bp, Homo sapiens
gggaaatacagcaatgacctctacgaactccaggctcagctgtcgcaggccctggaggagctgggaggccagaaacaaagagcag

SEQ ID NO: 520095 - DNA, 75 bp, Homo sapiens
gtttcgggtgctggcggctgcagccggagttcaaacctaagcagctggaagggcatagaatgtcaagctaaccag

SEQ ID NO: 520096 - DNA, 75 bp, Homo sapiens
cacatcctggagatgtacgaggagatgtcggcttatttataggaattgcttgaagccagagtcatggtggatgtc

SEQ ID NO: 520097 - DNA, 100 bp, Homo sapiens
agaagtccttatacttcagttgttcagtcagattggaccctgtaaaagctgtaaaatgataacagaggaattgcgaaagcccagctacgcagagatttgt

SEQ ID NO: 520098 - DNA, 75 bp, Homo sapiens
cgacgactcacctgattaacctgctgcagttctgaccctgccaagcaacctcaagcccagcagcgaagagtcacc

SEQ ID NO: 520099 - DNA, 74 bp, Homo sapiens
cgcatcctacaccagacaccagattctcaagtttacttgtcaattgcatgtgtttgccaaagaaactagagtgc

SEQ ID NO: 520100 - DNA, 76 bp, Homo sapiens
ccaggcataaaatcatctccatattctcaggcacagagaaaggtcaatgtgcgaaatggaatgagcttgcatgact

SEQ ID NO: 520101 - DNA, 75 bp, Homo sapiens
aagcatcatccacgagttcgacccgtgattttaccaaatgttgcaagaactctggagttcttatggtagtaaaat

SEQ ID NO: 520102 - DNA, 82 bp, Homo sapiens
ttcggcagtccacccaccgccgccgcctcccaggtccggcctctttggcctacccccgttggctccgctgccccaggtcgat

SEQ ID NO: 520103 - DNA, 82 bp, Homo sapiens
aagcatggagaccctccctccaggtggctgaatatactattctagaaggaaaacttcaaaaaactctaattgacttggagaa

SEQ ID NO: 520104 - DNA, 50 bp, Homo sapiens
cctgggagcttgctgcagcttcaggttagctttatacgtctacgaatatt

SEQ ID NO: 520105 - DNA, 75 bp, Homo sapiens
tactgcctgggggctgaggatgacaaaaaagccttcatagatctttgtggagttcacctctgtgtttgactgcca

SEQ ID NO: 520106 - DNA, 50 bp, Homo sapiens
ctgcaggtgcgcaccgggaagttcaggtcctcacaagcttgaggaagggg

SEQ ID NO: 520107 - DNA, 100 bp, Homo sapiens
atgagagggatgaggacaacaaccttctgactgagaagcagaagctgcgggtgaagaagcatctgcaggacctgtccggcaggatctccagagctcggca

SEQ ID NO: 520108 - DNA, 50 bp, Homo sapiens
aaaggagactgcaccatccgttttgcagaaaaaacttcagcatgtgccag

SEQ ID NO: 520109 - DNA, 100 bp, Homo sapiens
gatcaccttcatcgtggtgcagaagaggcaccacacccggctcttctgcactgacaagaacgagcgggcagcggaggaggagaaagagatggacctcccg

SEQ ID NO: 520110 - DNA, 90 bp, Homo sapiens
gttgcggcagtcgcgtcccgggagcgtcgctgcctggtgaacgctgtttctggcaaagcctgccgtgtcttacatttgtctctctatccg

SEQ ID NO: 520111 - DNA, 101 bp, Homo sapiens
tgaaaccagaatggaccaggtcacatgtgctgcttaaaattcagggctaagcattttgggtgattttaaactagtttgaagaagacattctcagcatctgc

SEQ ID NO: 520112 - DNA, 50 bp, Homo sapiens
agctggaatgactggcaacccaggacctacaagaacagtgaggagcttcg

SEQ ID NO: 520113 - DNA, 88 bp, Homo sapiens
ccgctggagatcctttcctgcttttggtttccctggcaggggttgaactgtggagtgtgtgggacaacagctttgagcagttcattat

SEQ ID NO: 520114 - DNA, 90 bp, Homo sapiens
tgcagaatgttacattgtcgctcactctgcccatcacgtgccacatttgcttggggaaggaggatttgacagctaaggatattgaagaaa

SEQ ID NO: 520115 - DNA, 100 bp, Homo sapiens
gggaaaaggcaaaaatcccatctaccgcaactctcagttcgagagtaaagcctgcagggatcccggtgctctgtctcctgtgaagatggacggtatttca

SEQ ID NO: 520116 - DNA, 87 bp, Homo sapiens
tgacggagtcggcgagcccccgcggcgacaggtgtgttccagagaacaagccttcagacatttgctatattgacgctgagctgtcag

SEQ ID NO: 520117 - DNA, 97 bp, Homo sapiens
agctcagtgcaggtagcactgatccaggtgctgcacctgtactgtgacacttgctctgtacccatctgtcgtgagtgcacaatgggccggcatgggg

SEQ ID NO: 520118 - DNA, 98 bp, Homo sapiens
ctcgggctttgtccccttgctggctgcccctcaggacccctgctacgtggagaaaacctcggataagagataattgacgaccttgccaacctagtgga

SEQ ID NO: 520119 - DNA, 100 bp, Homo sapiens
gtcaccggcttccgcatccaagatgaagactccagaacctgggtatcaacccagcaaacattggcttcagtaccctgactatggagtctgacaaattcat

SEQ ID NO: 520120 - DNA, 74 bp, Homo sapiens
cagttgcgactgcacaatgatatgcacaaaggcatggccaggttctggagatatatcttcagattctattgacc

SEQ ID NO: 520121 - DNA, 50 bp, Homo sapiens
gaagacatgacacccctgaacctgtgtggagttcacgagggaggtggagg

SEQ ID NO: 520122 - DNA, 100 bp, Homo sapiens
ttgaccaactctttgatgatgcatccagtgaaccagaaccacagattttggattttcaaacccagcagtataaactctttccactcctggccactgccta

SEQ ID NO: 520123 - DNA, 50 bp, Homo sapiens
caggtctggagctcgaccgggccagatggctgtatgggcgaaaaagatga

SEQ ID NO: 520124 - DNA, 100 bp, Homo sapiens
tttgtcactccccggcggcagcacgaaagtaccatgattcactttaagagatttggaaactcttccctttggaattgctcttcccatcagagatgcaatt

SEQ ID NO: 520125 - DNA, 98 bp, Homo sapiens
ctcctcgccagcagccgtccggagccagccaacgagcggtacatgtcccagagcaagcacacggaggcccgggagctcatgtactcgggagccctgct

SEQ ID NO: 520126 - DNA, 75 bp, Homo sapiens
gggttgtatcgaggctataaaagcacagttttaagagagcacgttcacgtccatgttcttcccaggaaggctgga

SEQ ID NO: 520127 - DNA, 83 bp, Homo sapiens
tgacccagcctgtcctcctgttgcctgcaggccaggtatcatgatattagctggtttgacatcaagtcatttgtgagtcatca

SEQ ID NO: 520128 - DNA, 100 bp, Homo sapiens
gcttttgctacgacctcattttctgctggaactggacatggatttgattgacatactttggaggcaagatatagatcttggagtaagtcgagaagtattt

SEQ ID NO: 520129 - DNA, 101 bp, Homo sapiens
cctgtggaggccccctccctgtctggaccccggccccacctccgggtggacatcgagcagctggatccccgcggccggactcccctgcacctggccaccac

SEQ ID NO: 520130 - DNA, 75 bp, Homo sapiens
gaactatgtcctcaccctcatgaatatcccagagactgctgctactttgaaacgtacgatagaggccctgatgga

SEQ ID NO: 520131 - DNA, 82 bp, Homo sapiens
gctgtggcatggcggacgaggggaagtcgtacagcgaacaccttccaccatgaccacctcagcaagttcccacttaaataaa

SEQ ID NO: 520132 - DNA, 100 bp, Homo sapiens
tggagcaaataaaagagccctgcaatttgaagatacatgagacagcagccaaacccccagagctccagagattatattggggttgccattttgtgaagcc

SEQ ID NO: 520133 - DNA, 100 bp, Homo sapiens
cagagtggagccatggctagagtttgtttcgacgccggaccgcgtaagagacgatgatgttgggcacggaaggtggagagggattcgtggtgaaggtccg

SEQ ID NO: 520134 - DNA, 100 bp, Homo sapiens
cgcaaagcggggacccagaccctggagcctcagttggaagcagccgatccagcctgcggagcctgtggggcagcccgaccctgcccgccctggactggca

SEQ ID NO: 520135 - DNA, 98 bp, Homo sapiens
catcacgcagaaggggtgaaagagactcggtgacagatacagcacgaaagcaagagattatcaaagtcactgaacaactgatcgaagctatcaacaat

SEQ ID NO: 520136 - DNA, 75 bp, Homo sapiens
cccccagtcagtggagacttaaccaaagagactaatagggatgccaaaggaaaaatatgatcctccagatcctcg

SEQ ID NO: 520137 - DNA, 75 bp, Homo sapiens
ctaccatcgttgagagagagccttgggacggcagggatggcgagatcatgacaagatgtttaagatgagtgaaaa

SEQ ID NO: 520138 - DNA, 88 bp, Homo sapiens
tattgaaattgacaataaatgtgattttgcctatgaaaccatgggaactattgaagtacaaaggaattacatgaatgacagtcttcga

SEQ ID NO: 520139 - DNA, 75 bp, Homo sapiens
tgcagctgctggccgtggcgggtgccgagggcccggacgaggagcctggtatttcaacatcagatattctgtctt

SEQ ID NO: 520140 - DNA, 131 bp, Homo sapiens
ttcacgtacggggcaccaggcgccggcaacggctccctctcgggcgactggtaccgcaggaaccaggccggaaaagaggcataaactcggagaacccaagaccccggcctggcgtgcagccccagcagccg

SEQ ID NO: 520141 - DNA, 100 bp, Homo sapiens
tcctgggctggggctcgctgctcatcatgctcaagtcagagggcttttactcctacctgtgtaccgagccagttccagttcctagcagatttaatagacg

SEQ ID NO: 520142 - DNA, 90 bp, Homo sapiens
ggcatctataagacttcagggattacataaacctgtgtaccatgcactgatgaagtacatgcgagaagccacgccctatgtgaagaaagg

SEQ ID NO: 520143 - DNA, 98 bp, Homo sapiens
gttgcccgcgatggaccgcaccggagacgctccggactcgtcgccgcagctcgactccgcgctctcctcgccggccgccgccgcccagcctgcgcccg

SEQ ID NO: 520144 - DNA, 100 bp, Homo sapiens
caaatgttatgcaaaaataatctgtaatactaaagacaatgttttgaaaacattgaattgactcctcttgctgcaatatgtgtgaaaatatattctggag

SEQ ID NO: 520145 - DNA, 100 bp, Homo sapiens
tctggctcccagtgtatttaaacaggcaaaggacaaagtctctctaagagaagttctcctatcaacagtcaaagccggacctgtgaatcaccaaatcaag

SEQ ID NO: 520146 - DNA, 100 bp, Homo sapiens
attttgccggaatatttcaagacaccgaaagattttcagctgaactctcatctctcaacactggcaaatattcataagatctaccacacccttaataagc

SEQ ID NO: 520147 - DNA, 138 bp, Homo sapiens
agcaattgttgataccaatggaatcacggtttttggaacaaggattttggatgaagaagtttttgaggttcaaaccttgtactactcagctgatcacaagctgcttgatgggaacctactagatggacaggctgaggt

SEQ ID NO: 520148 - DNA, 50 bp, Homo sapiens
atatccgaggagccacctaaaggcaaccacacctccaaatcaaggaaggc

SEQ ID NO: 520149 - DNA, 75 bp, Homo sapiens
gccgcgctgccgagaagctttacctcgctgaccctatgaaggtctatgttaacaatgaatgggcaaccagtgttg

SEQ ID NO: 520150 - DNA, 82 bp, Homo sapiens
gatcaggagccgccgccgccatatcagaataccctctaccatctgctttggtcagggtgccgctcgaggatttaaaagcaac

SEQ ID NO: 520151 - DNA, 99 bp, Homo sapiens
ctccacccgctcgcgctccaagctccctgcggggaagaacgtgctactgctgggcctgaagacaattgtgggtgccctgattcagtctgtgaagaaact

SEQ ID NO: 520152 - DNA, 98 bp, Homo sapiens
ttgggaccaagaattcctgaaagttgaccaaggaacactttttgaactcattctgatgagcagcaccagcagtaagagggctccgaccacggcaaccc

SEQ ID NO: 520153 - DNA, 122 bp, Homo sapiens
atcatgcagatcgaactttttcatcaatttccagagcttggcgaaacagtcagcgtgatacctctgatattaaggtgtgttctactccctcttctgggaatgaagcctccccagcaaagcct

SEQ ID NO: 520154 - DNA, 100 bp, Homo sapiens
agaagctactcaaatgcagtcggcttgtcctggctcttgccctcatcctggttctggaatcctcagttcaagcatcaggacagaaaggtgtccaagtacc

SEQ ID NO: 520155 - DNA, 100 bp, Homo sapiens
gatttggccccgcaacatcttaaagatccagtccttctgtggaacttctgaacatcttttattagtggaaatattttctacacaatgaagtcaacaactt

SEQ ID NO: 520156 - DNA, 82 bp, Homo sapiens
gacaaccttggaacagaacaagaggacaggaggtgtcgttccaggtacaatgactcttcttgcttttcacctaagttgaata

SEQ ID NO: 520157 - DNA, 76 bp, Homo sapiens
ttttgatttgcatttctctgatggccagtgatggtatgagatgcaagatgctggaattacttcagactcaatgatg

SEQ ID NO: 520158 - DNA, 100 bp, Homo sapiens
ttagaatcagattatatggccgcatcttcacaactccgtcttacagagtacctggtgtgtaagaggaagctggagagtaagaaggaagccctgctgatcc

SEQ ID NO: 520159 - DNA, 100 bp, Homo sapiens
tctgaacggggcgcacttcgacccggaagtttacctagacaagacctgcaatgcttcttttgccacccgagaccgtctgcgctcccacctggcctgtcat

SEQ ID NO: 520160 - DNA, 101 bp, Homo sapiens
agtgggagcactggaagtacgggcagttgcagtgttggagctaaaattacaacagcagtgaattgaaaacagcctgcaggaagcatgagctgtatgtgagt

SEQ ID NO: 520161 - DNA, 74 bp, Homo sapiens
tgcccaagcctgtactcttgccagagctgcccacggggtggagggcttcaccagccaggaggaccaggagatgc

SEQ ID NO: 520162 - DNA, 74 bp, Homo sapiens
ccgtcatgggcgcctcggccgccatggtcttcagcgtggtctcggaaagagggtcgtggtcccgcacggatgcg

SEQ ID NO: 520163 - DNA, 95 bp, Homo sapiens
caggagtcggcggctcagttgtccatgaccctgaaggtccaggagtacccgaccctcaaggttgtggcagcactgcctgaaggtatgagaccaga

SEQ ID NO: 520164 - DNA, 74 bp, Homo sapiens
acgtgtttgcggttcagccctttgatgaccgcagcagggttccctggggatacaaggcccccaaggtccacctg

SEQ ID NO: 520165 - DNA, 50 bp, Homo sapiens
ggaaaatacacctgttgttgagatgaacctctagtcttgctttgaaaaaa

SEQ ID NO: 520166 - DNA, 100 bp, Homo sapiens
cgacaagggtgttcccgaactagagtggaacctaatccaccaatagatcaagttatacagaaaccaggagttgtacagagatttgtgaaatttcttgaaa

SEQ ID NO: 520167 - DNA, 75 bp, Homo sapiens
cctgagccctgggacctctgaagtgaacactgcagggccatttgtttcaccagtgatcattaaagaatgggcagc

SEQ ID NO: 520168 - DNA, 100 bp, Homo sapiens
gccactggacatcagaaccacattttgggtttgaagaatcttctacatggcaatgaatcgctccctggctaatgtgattcttggaggctatggcaccact

SEQ ID NO: 520169 - DNA, 98 bp, Homo sapiens
acagtgcctgccacccagactcagaccaccaccagaaccatcacctcggagacccagacaatcacagctccagatgaagatgagtgagcgggccgcct

SEQ ID NO: 520170 - DNA, 100 bp, Homo sapiens
tgtcgggaaccaccacgctcacggactgcctgcgacgttccagggtcacccccgagaggacaacaggcatctggaagtgctctctcgccactctgggtgc

SEQ ID NO: 520171 - DNA, 98 bp, Homo sapiens
gcaggagcgggtagtgccagctacggtccgcggctggggttccctcctccgtttctgtatccccacgaggtgtcatggagaaactccagctgggccca

SEQ ID NO: 520172 - DNA, 100 bp, Homo sapiens
atcctcactctctccgatactttctcccaaggacccttgaacatctgtgaagaaatgactattctgcatggaggcttcttgctggccgagcagctgttcc

SEQ ID NO: 520173 - DNA, 98 bp, Homo sapiens
atgactctgactctcatttagaaatccaaaagggagctgagcacataacgacttacacgttcaatactcacaaagcccagcataccttctgtaagaga

SEQ ID NO: 520174 - DNA, 100 bp, Homo sapiens
cttcgggcctctggaatttagcgctcgcccagctagccgcaggacatgatccacatcgcggacaccaaggtcgccaggcgttatggggatttcttcatcc

SEQ ID NO: 520175 - DNA, 106 bp, Homo sapiens
ggaagaatccactgatagaaatcatttccatcaataccggcttctacagatgacagtgcagctgagaagaaagggggaaccctccacgctggcctcatcattggaa

SEQ ID NO: 520176 - DNA, 90 bp, Homo sapiens
agacgccaagatggcgacgagtcagtatttcgacttcgcgcagggcggcggcccgcagtacaggtgctggagaatctggtaaaagcacca

SEQ ID NO: 520177 - DNA, 75 bp, Homo sapiens
ctttcttcagccgaggccgccgccgcctctccttgctgcagccatggagccctgggaggagcggggacactgagg

SEQ ID NO: 520178 - DNA, 104 bp, Homo sapiens
ccaagacctcgctggcccccatcattgtttacatcaagatcacctctcccaagcctatctcctgagctgccactttccccgtcgtccagcttatggagatgtga

SEQ ID NO: 520179 - DNA, 51 bp, Homo sapiens
ccgggaccggccgaaaggcgaggaaccggttttgagcaaaattttggactg

SEQ ID NO: 520180 - DNA, 96 bp, Homo sapiens
ttcagctaagtgtcgttgttggtccttctctaaacgaccatctgaagcatctgcttacaagcttacggcagtcccagtcctactgcacagacacag

SEQ ID NO: 520181 - DNA, 87 bp, Homo sapiens
cagctagcaccttcgccctctccagccagatatttggcatgatcttcagtatgatcttgtgctgtgctatccgcaggaaccgcgaga

SEQ ID NO: 520182 - DNA, 90 bp, Homo sapiens
gcaaaaactgctgacacagccattccatttcacttctttaaaccagaggagttacgccaggccctcatgccaaccctagaagcactgtat

SEQ ID NO: 520183 - DNA, 90 bp, Homo sapiens
ctttctggagagcatccgcaaacattcagacaaaattggagagactgccatgaagcaacgatgccctcctagctagccgtcacgggatgg

SEQ ID NO: 520184 - DNA, 90 bp, Homo sapiens
gcttgaccgagatgctgcgggcctgtcagttatcgggtgtgaccgccgccgcccagaacagctttgctgagccatcaaggtctaatggaa

SEQ ID NO: 520185 - DNA, 100 bp, Homo sapiens
tttttcagacaaggatcttgaagacatagtagggggtggagaatacaaacctgacaagggtaaagatttccgtgagggtggaagaaaatcataccatatc

SEQ ID NO: 520186 - DNA, 83 bp, Homo sapiens
atatgctggatgagctgctgaagcccaccgaattagggccatgctgcaccttacaaaacggtctccgtccgcgcggccatccc

SEQ ID NO: 520187 - DNA, 74 bp, Homo sapiens
acaatcagagatggcagcggtaaaggctctaacaagagaagagatcacagaaacgtgaggatcaagaagccgga

SEQ ID NO: 520188 - DNA, 75 bp, Homo sapiens
tggaatatgaagagacatgagatggtggaagaatccccagttaattcatctgcctacactatttacatgggaaaa

SEQ ID NO: 520189 - DNA, 83 bp, Homo sapiens
ctagcggagctcagtgtggcagctgctggcctctgggccgtattatcagaaaatccacccagcttcaccattactgtgacgtc

SEQ ID NO: 520190 - DNA, 100 bp, Homo sapiens
ggacacacacagctgcctcccggtgcgagaagaagaccccggcttgagagtgaggaatgaagccaagagtgatgaaagaagctgtatctactccatcacg

SEQ ID NO: 520191 - DNA, 75 bp, Homo sapiens
tctttgaccatcagtctgtgacctgccccttctctttacgacttggaccctctgtggaacacccgagtacctagc

SEQ ID NO: 520192 - DNA, 100 bp, Homo sapiens
cttctgagacggcggcagcagcggcattcaggcactcatcactagaaagcactcacaagagcttctgattggaagagaaagatgattagattaccctgta

SEQ ID NO: 520193 - DNA, 82 bp, Homo sapiens
ccgggcagcgccgccaccatgttcctgggcaccggggagccggccttggacacggccaccagcccctcgggttccaagatgc

SEQ ID NO: 520194 - DNA, 75 bp, Homo sapiens
gcgcagcaaagcgcccagcctgccgcctcgctgtccctgcggcttctggggctcatctacatgcactggatgaac

SEQ ID NO: 520195 - DNA, 74 bp, Homo sapiens
ggggctgctgtttctcttcgccgacggtccactcagctgttgaagaaatggatggattagatgatgttgaaaac

SEQ ID NO: 520196 - DNA, 75 bp, Homo sapiens
cccagctcttcagcattgtccgccaggcctgtgtccggagcctgagctgtgagctatcagttgagggatttgcag

SEQ ID NO: 520197 - DNA, 100 bp, Homo sapiens
tcaatatgtgccgccagtgtttccgtcagtacgcgaaggatatcggtttcattaaggccatcgaggagggcacgctggaggagatcgaagaggaggtccg

SEQ ID NO: 520198 - DNA, 100 bp, Homo sapiens
cttcgcccaggtggccggcgcttcagacatgcgtcgggatgtccaggaaatttttcgcatgaccccccacgagaagcaggtcatgatgttcagtgctacc

SEQ ID NO: 520199 - DNA, 100 bp, Homo sapiens
tccagactgaggaagacccggaaacttaggggccacgtgagccacggccacggccgcataggaccagagaagctctcgcatcccgtgacctccagacaag

SEQ ID NO: 520200 - DNA, 100 bp, Homo sapiens
atgtcacgctcccaccagcagcgcctatgagtttgtcacctggctcgatggcattaaggacgtccagatcggtgacatcgtcacagtgggcgagtgccgg

SEQ ID NO: 520201 - DNA, 101 bp, Homo sapiens
tagagaatggcatgtgcaaagatacagagagtaatcaagtcagaggattatatgacttttatctgcctagagaagaactatggatctacaacatggagact

SEQ ID NO: 520202 - DNA, 75 bp, Homo sapiens
aggtcatactgcatcagaaccatgaagaagtgttcttttgaagatgacaacatccgttccttattaaaaccttta

SEQ ID NO: 520203 - DNA, 75 bp, Homo sapiens
gcagccgatccagcctgcggagcctgtggggcagattttgacttcagcgttccaggatccatgaagcttcataat

SEQ ID NO: 520204 - DNA, 89 bp, Homo sapiens
caagtaacagtggagatagatttaccctttctaaactattagctgtaattttaaggtatacaaaactaggatatgctggaaatacagaa

SEQ ID NO: 520205 - DNA, 90 bp, Homo sapiens
ctgagattctcatacatggctataatagaaggagcaaaatgtataaagggagattctagtatacagatacctttgtctggatatggagga

SEQ ID NO: 520206 - DNA, 100 bp, Homo sapiens
cgcacacccggaagcggcggagtagagcggagcctggcgggcgtgggaacccaggccccgccgaggcggccaggcaccgctctaaagagggtctgactga

SEQ ID NO: 520207 - DNA, 50 bp, Homo sapiens
ggaacatggacgtggagaggcaggaggggatgtacgtatttttgcatgca

SEQ ID NO: 520208 - DNA, 98 bp, Homo sapiens
agccagcctgagttgggagaagagctccagagaaccagagtgaactccgagcaggaacacttcctcattgtcccttttgggcttctttacagtgaagt

SEQ ID NO: 520209 - DNA, 100 bp, Homo sapiens
ctgagccccgaggaggcagagcacaaggagatggagaacaagatcctgatttttgggctcctggaggagacggcgttggctgcctttctctcttactgcc

SEQ ID NO: 520210 - DNA, 97 bp, Homo sapiens
ttggcggaagcacttggaactcctttataagtgtcagctgtgaggaattcctcctgatcagcagagactgatctttgctggcaagcagctggaagat

SEQ ID NO: 520211 - DNA, 74 bp, Homo sapiens
cagggaacggggcatcgcggttccaacgtattggtaaaggttttcaaggtgtcatgaaaagatggggatttaaa

SEQ ID NO: 520212 - DNA, 74 bp, Homo sapiens
tccagcccacccttcccagttcctgtctacacccggcaggcaccaaagcagaaggacagcgtccctgccctgct

SEQ ID NO: 520213 - DNA, 75 bp, Homo sapiens
atggacagcatgcctcaccaagtcacatgacaagcaagaaccatggagtctggcagtaccgccgccagtgaggag

SEQ ID NO: 520214 - DNA, 82 bp, Homo sapiens
tcctcgcttgcagttcagcgaccacggttttttattggcacctcagtctcaacattttcttttcggattcatgaggaaagag

SEQ ID NO: 520215 - DNA, 96 bp, Homo sapiens
gacatccataaaaattcatcagagagcattttactactgagctgcaaagatatcatggaaatcaggacagtggcagttggaattgtggcaatcaaa

SEQ ID NO: 520216 - DNA, 90 bp, Homo sapiens
tacgtgggggacgtgccaccagaaccctacttaggggcgggatgtcactccgagaagatgaatccggcctcggcgccccctccgctcccg

SEQ ID NO: 520217 - DNA, 82 bp, Homo sapiens
cacctcgactgcgaattactgtttatgaggtggacgacatccttggagaaggcagcgacgacagcgacagcgagaagaggag

SEQ ID NO: 520218 - DNA, 90 bp, Homo sapiens
gagagagaaggaagattatcatccctccattcctggcctatggcgagaaaggctatgatccaaggattaatgtcgtgcttgctggtggcc

SEQ ID NO: 520219 - DNA, 80 bp, Homo sapiens
ctctgggtctccaggcccgcgaccgtccgccagtcgtcccgaggtggaggagaagatcaagcagacccaccgtaagtacc

SEQ ID NO: 520220 - DNA, 100 bp, Homo sapiens
ataacaaaagctgctcagagtctcaatgaacttggaaatgggtcctgatgaatatgaagagatggaagaagaggaggaggaggaagaggaggaagacgag

SEQ ID NO: 520221 - DNA, 100 bp, Homo sapiens
gtccgggctcctggacttcgcctttcccgagccctggaggtggggagaaaaggctgcagccacaggtccgcacggaaaaccaggagctccaagactgccg

SEQ ID NO: 520222 - DNA, 90 bp, Homo sapiens
ctggaaagcgtcacttggggaaaacaaggtggacccgggaagaggcgccaagcccatctttgtgtgcttgcatccaactgtgatgagcct

SEQ ID NO: 520223 - DNA, 82 bp, Homo sapiens
cccgacgccgccgcccccgccgggtgcctaagcaggcccggcgcggccccaggtgagaagccctaccactgcaactgggacg

SEQ ID NO: 520224 - DNA, 75 bp, Homo sapiens
ccctcagtgccatcattgcatcatgccaaccccgagagcttcggcctctacttcgtgctgggcgtctgcttcggc

SEQ ID NO: 520225 - DNA, 82 bp, Homo sapiens
atggacagttagtcacccacctacatgttgaggctctccagcagaactatctcctactactctttcccctgttaatcatagc

SEQ ID NO: 520226 - DNA, 75 bp, Homo sapiens
gtcgacctaaagcctgactggggcaagattcaattagcagagcctcacagacaatggccaaatgtgtcaaagctg

SEQ ID NO: 520227 - DNA, 75 bp, Homo sapiens
tgagctgcgtgagaacccgcccatgaagccagatttctcccagagacgagttgtactgctgtcacaggaaatgga

SEQ ID NO: 520228 - DNA, 74 bp, Homo sapiens
ggatgccctgcagtacctgcagaaggtctctggagacatcttcagcagctgggatagatgggcagcagaagatc

SEQ ID NO: 520229 - DNA, 98 bp, Homo sapiens
gccaaccacctgggccagtattatcaggcatggagatgctactgatgtcaggaaagctgatgtcctgaccactggagctggtaacccagtaggagaca

SEQ ID NO: 520230 - DNA, 75 bp, Homo sapiens
cctagaccggtttttagtccattgactatgcagcctaatggacagtcattttgtttactcattcagccctgttgc

SEQ ID NO: 520231 - DNA, 121 bp, Homo sapiens
cgtgagctgggccctgggccagaggcagaaaacggacggaagaaaaggtctggccgtgtggtttattgacaatcatttacaatgccgaagagtgctgtagtgagccagcacagtgggtaac

SEQ ID NO: 520232 - DNA, 89 bp, Homo sapiens
aacagtgtcgctgataccaacaaggagatctattgggaaactgattataaccactcgggcaccatcgatgcccacgagatgaggacagc

SEQ ID NO: 520233 - DNA, 51 bp, Homo sapiens
gcctcctgagtagcttggattacagaactacagttcctgaggaagaactaa

SEQ ID NO: 520234 - DNA, 82 bp, Homo sapiens
gccttgctcattttgcgcccagaagaattgggttttcttcgctacttgaaacaatccaagaagcggccagcttgatgtccgg

SEQ ID NO: 520235 - DNA, 100 bp, Homo sapiens
ggcggccgccccgggcaccgcggtgctgctggtcacggccaacgtgggctcgctcttcgacgacagcagttcagagccccagttgcagacgacttgtcct

SEQ ID NO: 520236 - DNA, 59 bp, Homo sapiens
aagtggatgaatacacagacactgacctgtacacagattcttcttgatgaactatcttc

SEQ ID NO: 520237 - DNA, 100 bp, Homo sapiens
ggccctggagcagtatgccagcaagactctgggctgggaagccctgttggcccggcgcctgccaccgccctttgtgcccacgctgtccggccgcaccgac

SEQ ID NO: 520238 - DNA, 100 bp, Homo sapiens
ctctgctgtagtggacaaagatttccttgataataaaattcagaagtactctccatctgaatctgcaaaagtatatgataaagcgataaaccgaaaaaca

SEQ ID NO: 520239 - DNA, 50 bp, Homo sapiens
cgcttccgcaccatcacctccacgcctttccgttccgaacgtccacggcg

SEQ ID NO: 520240 - DNA, 98 bp, Homo sapiens
cagaagcgggcggcgcgggggagatgaaactgttttggctgggcctacttcacctataccttctctgggaaatgtgagtgaaactgcatctggatcag

SEQ ID NO: 520241 - DNA, 58 bp, Homo sapiens
ctgcactccgcccggacccccggccccgccgtgggccctggccaacgtcaacattggg

SEQ ID NO: 520242 - DNA, 75 bp, Homo sapiens
ccttcgtacccacagtgcttcatgagagtccacctgatcccggtgtcgactcctaagaatggaatgagtagcaag

SEQ ID NO: 520243 - DNA, 80 bp, Homo sapiens
gtatcttaaaatgtatccagttttatgctgatgagagctataacttaatggtgacgatgcctggggagcctgtggacgtg

SEQ ID NO: 520244 - DNA, 96 bp, Homo sapiens
gggctgtcggtgcacgtggtggccgtgatgctgtacctgctggaccgcttcagccgatcgggtcaggcaagtccatcccgtcctgagagccccagg

SEQ ID NO: 520245 - DNA, 100 bp, Homo sapiens
ggaaaagctggatgtgctctccttgggtgtacaactatgagcctttgacacagctcaagaatgtcagagcaaattactatggaaaatacattgctctaag

SEQ ID NO: 520246 - DNA, 149 bp, Homo sapiens
cccatgagttgtgacaaatcaacacaaaccccaagtcctccttgccaggccttcaaccactatctcagtgcaatgggaatctggggtattggtgttgcaactcagaaggttaacttgaatcagattcctcttggccgagatatgcacag

SEQ ID NO: 520247 - DNA, 75 bp, Homo sapiens
ggatggcatggggcgctttggcaggcccctttgtgtgactaaatttggcaagaatatggatctgagccagtcttt

SEQ ID NO: 520248 - DNA, 90 bp, Homo sapiens
acagggagcagctcgtggctgcagtggaaggatgatcctttcaaaaataaagccttgttatttagcaacaacacgcaagagttgcatccg

SEQ ID NO: 520249 - DNA, 100 bp, Homo sapiens
aaccaagatagatgtgtcctatgaataccgcttcctggagttcacgactctgagtgctggtcttgtccagaatgccgtgtgatatcagagtttgtaattc

SEQ ID NO: 520250 - DNA, 76 bp, Homo sapiens
ggtgcccctgggcatcaccaacatagccatcgacttcggggagcagatctctctactttagttagaagatgcccca

SEQ ID NO: 520251 - DNA, 75 bp, Homo sapiens
ctggcggacatcactttagaccctccacctaattgcagatcttgatgtggaagaaatggaggactcagaaccaag

SEQ ID NO: 520252 - DNA, 110 bp, Homo sapiens
catggagctcagagcgcagccccggcgccggcggcgggaccgcggaccgatgcagacaacatatgttttacagagtcttcatttgaggattccagaaatttcaaatatta

SEQ ID NO: 520253 - DNA, 100 bp, Homo sapiens
atcgaaaaaaaaatccagaaccttgggaaactgtggaccctactgtacctcaaaaggtggacccaagtggagagattgtggaactggcgaaaggtgcatg

SEQ ID NO: 520254 - DNA, 100 bp, Homo sapiens
gcaccagcaggacccgaggccaggagccaggggcccagaaggtgtggccgacgacgatgccctcgctgaggagcgcatgcggagaggccagaacgccctg

SEQ ID NO: 520255 - DNA, 74 bp, Homo sapiens
cgacgcgcaagggctgcggagccgcgggccggcgagcgcgtcgccaccatggtgcaggcctggggtagtctcct

SEQ ID NO: 520256 - DNA, 75 bp, Homo sapiens
gatgaccagaaaattcaggtgactcctccagacctcttctcttctagccgctccatttttggctccatgctacct

SEQ ID NO: 520257 - DNA, 114 bp, Homo sapiens
cgggatcgtgaccgagaccgtgaccgagagcgtgaccgagagcgcgaatatcgtcatcgttagaagaacaaatttcaaggaatggtctttgacttcgtaaccagacaagttttt

SEQ ID NO: 520258 - DNA, 82 bp, Homo sapiens
cgcacctaaagtcgcacctgcggacgcacacagttccagggtctccctccactgctgtagtaacccgggtccggggcctcgg

SEQ ID NO: 520259 - DNA, 100 bp, Homo sapiens
ctgtctgggtctcagccgccaaagaccccgtccggtagtgccatctccctcttctacgagctctcggagaatgacttgaacttcatcaagcagagcaagg

SEQ ID NO: 520260 - DNA, 75 bp, Homo sapiens
ctgtgttccctttgccgctcctggagttcactgctgctagcagaagaaagtcttcccacaaccccattttatttc

SEQ ID NO: 520261 - DNA, 50 bp, Homo sapiens
ctggtgagtcggtgacctggcctgtgagcctcccctggtgaagacacaaa

SEQ ID NO: 520262 - DNA, 93 bp, Homo sapiens
agattttgcagaacagagatgacatgccagcccagactttcatcatttgacattgtgcagcaaagaaatggttatggagaagcccagtccgct

SEQ ID NO: 520263 - DNA, 50 bp, Homo sapiens
cctactcagtctgttctccactcctcatgtgccgctgggttagggtctcc

SEQ ID NO: 520264 - DNA, 98 bp, Homo sapiens
aaaagagggagcttctcgacctgctctataaagcctatgggatgccaccttcagcctctgcagctgaccacgtatcccacttggagaatgtgtcagag

SEQ ID NO: 520265 - DNA, 114 bp, Homo sapiens
tccattgttggagtcctgtgcacagattcacaaggacttaatctgggttggatcttctgcatttaaaatagaagaggcatcatgctgaagagggaggggaaggtccaaccttac

SEQ ID NO: 520266 - DNA, 100 bp, Homo sapiens
tctggggagcgcctcgtcgacatgagtgatgtggaggaaaacaacttcgagggcagaaaattattcttgacagaagtattttaaaagaaaaatctttacg

SEQ ID NO: 520267 - DNA, 82 bp, Homo sapiens
ccccacctggtcctcctccacctcccacatttcatcagccctggtacctgacagtgtaaagaaggagctcctacaaagaata

SEQ ID NO: 520268 - DNA, 74 bp, Homo sapiens
catgtcgggttattcgagtgaccgagaccgcggccgggaccgaggacggaatcagtccccaatgcctggaaatt

SEQ ID NO: 520269 - DNA, 122 bp, Homo sapiens
caaaccactgaggatcagattttgaagagagatatgccaccagcatttattaatggtgccaccgaacatcgcagaactgaagaatttggaggtgctcaacttttttaataaccaaatcgagg

SEQ ID NO: 520270 - DNA, 95 bp, Homo sapiens
ttcggcccgccgtgctcccaggtgcccccggcctgcgctcccatccacacgctcgggggcaatggcggcttcctgtgttctactgcacactgggc

SEQ ID NO: 520271 - DNA, 82 bp, Homo sapiens
tttcaagaaaatggatttaaacatatttccctgtggagacaatgcagatcttcgtgaagactctgactggtaagaccatcac

SEQ ID NO: 520272 - DNA, 100 bp, Homo sapiens
ctgacgaagaatttgatgaactatgttttgaatttggtctggagcttgatgaaattgctgctgagaaactaggtgaaactgagaaacttagtataatgat

SEQ ID NO: 520273 - DNA, 99 bp, Homo sapiens
caaagcttttctgatatgatgggaaatacaaatgaaccaagcacacgtgtccgaacttcacagagaatgcagttgtcttgacttcaggtctgtctgttc

SEQ ID NO: 520274 - DNA, 97 bp, Homo sapiens
tttggtctcttcggaaagactgttccaaaaacagtggataattttgtggccttagctacaggagaggtgtctttcctgaagactatcttcccgtctc

SEQ ID NO: 520275 - DNA, 90 bp, Homo sapiens
ttccaaaatagcgagtatggaaattccaaatgaggccagtaatagtagccatgagtctcgtattggtctagctgaggggttggaatccga

SEQ ID NO: 520276 - DNA, 85 bp, Homo sapiens
gcttcccaatcccactgatgaggatcagcccatggtgattttacaacgagatgctgctctccatagggatgctcatgctgtcagc

SEQ ID NO: 520277 - DNA, 100 bp, Homo sapiens
cctggagaagcagatggaaaagagcatccacaagaatctagaagcaaaaatagcccgcttccaccagcgggaggatgccatcctctatcccagctgttat

SEQ ID NO: 520278 - DNA, 76 bp, Homo sapiens
gtgatgacaaaccctttctatgtactgcgcctggatgtggccagagattcgtcagcgaactgcagctcaaagaaac

SEQ ID NO: 520279 - DNA, 75 bp, Homo sapiens
tggaaatccaggcagccaaggctatggacaagcatcacaatgaattgaatgcaggaattataaaaacagatcaaa

SEQ ID NO: 520280 - DNA, 74 bp, Homo sapiens
aatagactgcacctggctatcccaaccaggagggacgataaggccctgggctgcatcttgtacctgctgtgctt

SEQ ID NO: 520281 - DNA, 104 bp, Homo sapiens
ggggcagcgggctgcagctggcggccggaatccgcgcgcagcccggaccagcatctcagacatgtcgaaaaagatgttttgatccctaaaataatgagagaaaa

SEQ ID NO: 520282 - DNA, 75 bp, Homo sapiens
gtaaaaataagcctacgatgaactatgagaaactcagtcgtgcattaagctctggattaatcgaattacagctgc

SEQ ID NO: 520283 - DNA, 118 bp, Homo sapiens
gttggggtcaacctcactctggatggggtcaagtcctggctgaagccacggctgggacaggaagccacatgcctggagaagttccctgtgatccagcacttcaagttcgggagcctgc

SEQ ID NO: 520284 - DNA, 75 bp, Homo sapiens
cctagcttccctgtatgtgatgatgaccgtcaccaactggttcaagaagatgagaatgtgcctactgctcctgat

SEQ ID NO: 520285 - DNA, 90 bp, Homo sapiens
ccaaggcgaaagagacgctcaggcctgtctcctccctcctacacatttccagctcctgctgcagttattcctacagaagctgccatttac

SEQ ID NO: 520286 - DNA, 75 bp, Homo sapiens
gacctgagaaccttgtgctccaggctgccccataataagtgtcgtgaaaactacccctaaaagccaaaatgggaa

SEQ ID NO: 520287 - DNA, 75 bp, Homo sapiens
gaactttttcaacaaagcaaggtcaatatgcagaaaatgctcccaggtgccaaatgtgacatccagatgacccag

SEQ ID NO: 520288 - DNA, 114 bp, Homo sapiens
gaagatcaagtccctggaggagatctatctcttctccctgcctattaagggaagtgttcgccagttactacatgaaaagataagagatgcttatactcacccacaatttgtgac

SEQ ID NO: 520289 - DNA, 100 bp, Homo sapiens
gatcgccacctccatcgaacccatccgcgacttcctggccatcgttttcttcgcctccatagctgcagacctattcacagacttggaaaatgcatttcag

SEQ ID NO: 520290 - DNA, 71 bp, Homo sapiens
aggaagccctcctgctcctcctcatcagcgaatccatgtgtgattcgtcatcgagatgttcgatcctgtca

SEQ ID NO: 520291 - DNA, 75 bp, Homo sapiens
ctcgggggccgctctgggatcccggccaccagcaattgtccgtaatcaagatgattaccaactggttcgaaaact

SEQ ID NO: 520292 - DNA, 73 bp, Homo sapiens
ccgcggtccccaccgtgcagcggggcatcatcaagatgggtcgtaagagtgaggctgaaaagctcttcttgaa

SEQ ID NO: 520293 - DNA, 82 bp, Homo sapiens
ccggaggagacatcggcctctgcaggcttgccgaagaagggagggtgagaactctgtctcagtcgacgggaagtgcagtgac

SEQ ID NO: 520294 - DNA, 50 bp, Homo sapiens
gacggaaagagctacttgctgatgcctggatcaaagtggaacagctgaag

SEQ ID NO: 520295 - DNA, 75 bp, Homo sapiens
gccaactcctggaacactgactggggtgacaatggcacagaaaactgaatctgtagataacgagggagaatgaat

SEQ ID NO: 520296 - DNA, 75 bp, Homo sapiens
agtcggggttttggggacttcagctcctggtagcagcaggtggacagacgccttcgtgggcctgagcacttgcgg

SEQ ID NO: 520297 - DNA, 100 bp, Homo sapiens
ggaagacgccctggtgctcaccaagcaaggcagatgacctcagcaacccctttggacaaatgagccttagtcgccaaggttctactgaagcagctgaccc

SEQ ID NO: 520298 - DNA, 76 bp, Homo sapiens
ccaccctcgctccctctgctcttcctcccttcgctcgcaccatggcatttctcacaagagtggcaaagatacagca

SEQ ID NO: 520299 - DNA, 75 bp, Homo sapiens
attctgaagagggtctggaggagccttctcaagaacagagtgatgctattgctgagattagagccatttgtattg

SEQ ID NO: 520300 - DNA, 93 bp, Homo sapiens
ggagcccagaatgaagagatgttacccagtatcttggtgttgctgaagagcctgccgagtgcctgcgattgcaggcgcgcgccgccacgcctg

SEQ ID NO: 520301 - DNA, 78 bp, Homo sapiens
caggttgccttggaaaatgccaacgccgtgtctgaagccgagattcgggccctccaccctctacagtgagtgaagccg

SEQ ID NO: 520302 - DNA, 82 bp, Homo sapiens
tggaattgttacttagtgctgccacctgctggatgttaaaagtactactataattccttgacccagcagtacctttactggg

SEQ ID NO: 520303 - DNA, 100 bp, Homo sapiens
aaggctgcctcccgagactctccttgcttggaattctgcccactctgcggagttagcagtcacgacctccagcacaggttgcacagtgaattaaaagatg

SEQ ID NO: 520304 - DNA, 100 bp, Homo sapiens
atagtgcagaagatagaggaagtactttctggggtcttagatacagaactacgatataagccaggttgggttaacggcatggagaacagtcacccccccc

SEQ ID NO: 520305 - DNA, 102 bp, Homo sapiens
tgcctttgggaagcatgtcaccaacccggccttcaccaaactccctgttggctggatatttacagacctcgtctcagaagatacccgaaagggtaccgtccg

SEQ ID NO: 520306 - DNA, 50 bp, Homo sapiens
agccgaaacaccggtaggagcggggaggttttgagcaaaattttggactg

SEQ ID NO: 520307 - DNA, 83 bp, Homo sapiens
agttggaagcagccgatccagcctgcggagcctgtggggcaggggttggctgtgttccggccgcagagcaccgtctgcgtgag

SEQ ID NO: 520308 - DNA, 100 bp, Homo sapiens
ctgcatcctctacaacccgcagtgggcccatcttccgcacgacctcagcaaggcaagctgagctcaatgtgcagcaatggatgacgacagcctggatgag

SEQ ID NO: 520309 - DNA, 80 bp, Homo sapiens
ccactccagtcggtgttgagcacggcgagcagtctcaggcctttagtgatgatgcatccgtacccttccgaagagcagaa

SEQ ID NO: 520310 - DNA, 50 bp, Homo sapiens
tgatctccgccaccgtcttcaggccaggaaagatgaatgggagggctgat

SEQ ID NO: 520311 - DNA, 100 bp, Homo sapiens
ttcaggattatgaagtattaattcttccactgatatctcaaaaggtgatctggacaaaggaacaggtatctcaggactggggttttaaggggtgtggcag

SEQ ID NO: 520312 - DNA, 85 bp, Homo sapiens
tctactacctgctgcgctctcctttctatgaccgcttctccgaacaattgcagcatgactttcccagggccctgattttcagcac

SEQ ID NO: 520313 - DNA, 126 bp, Homo sapiens
gtggaggtgacaactacctgagatttgcaactttgtctcatctggcggatctgctagaaaaatcacgggcaattcgccaagccagagacgagaggacattccacatcttttactacatgattgctg

SEQ ID NO: 520314 - DNA, 100 bp, Homo sapiens
atcgggtggagtgtaggtcatatcgccgcgggacacttggcattcagggacgtggccatagaattccctcaggaggagtggaaatgtctggaccctgctc

SEQ ID NO: 520315 - DNA, 100 bp, Homo sapiens
tggagaagctgcatccctttgatgccggaaaatggggcaaagtgatcaatttcctaaaagataagaccatcatcatgtggaaactgaccagggatgagac

SEQ ID NO: 520316 - DNA, 85 bp, Homo sapiens
tgcggacgtggaggtggggccctggcggacctatgacttctgccgctggctacagcaaacatcattcaagatgtccagcaaaggg

SEQ ID NO: 520317 - DNA, 50 bp, Homo sapiens
ggggccttgacaacacagagtttcaaggcaaacgaatgcacgtgcagttg

SEQ ID NO: 520318 - DNA, 90 bp, Homo sapiens
gagaagatcatcgagcatttcaaacgaagctgacgggtcgcctcatgctggccgtgggaggagcagtgcttggctccctgcagtttggct

SEQ ID NO: 520319 - DNA, 83 bp, Homo sapiens
gaactagtttcccaaacagatgttaagacattcttggaagccttaccggcttcaacggaccacaccaaaatgccatctcaaat

SEQ ID NO: 520320 - DNA, 100 bp, Homo sapiens
tcctggccaccgactcctacaagattttaccaaatgttgcaagaactctggagttcttatggtagtaaaatgccggaaagaaaattctgcattgaaagaa

SEQ ID NO: 520321 - DNA, 74 bp, Homo sapiens
agcctgatctaacccctagaaacaggtatgccaatgtcttcctgcagcctgttacagatgacatagcacctggc

SEQ ID NO: 520322 - DNA, 50 bp, Homo sapiens
gagtggaccacggggagccccacgagccatgctgtgacctacaagcaaac

SEQ ID NO: 520323 - DNA, 122 bp, Homo sapiens
cgggactcggcgggtcctcctgggagtctcggaggggaccggctgtgcagcccgccctgaagatgttggcaccagcctctactttgtaaatgactccttgcagcaggtgaccttttccagct

SEQ ID NO: 520324 - DNA, 98 bp, Homo sapiens
gagagatggtcaggtctggagctcgaccgggccaggttcagaggtccaaagaggtgacattttatggatagccatggcagggactcatcagatatggg

SEQ ID NO: 520325 - DNA, 100 bp, Homo sapiens
ggtttgaagatgatgttgtgattgagtttatattcaaccagctggaagtgaagctttatgctgaaaaggtggccactagaggtctgtgtgccattgccca

SEQ ID NO: 520326 - DNA, 98 bp, Homo sapiens
tttgacgcacacggcaccaaactgtcgatcttggagaaagagggaccaaagtcactttttagaggcttgggtccaaatttggttggagttgcaccatc

SEQ ID NO: 520327 - DNA, 85 bp, Homo sapiens
tttcaagaaagcaggatggactatcattactcctccaacaccaatcatcccagacgatggacttattttgagtcacttgccaaat

SEQ ID NO: 520328 - DNA, 90 bp, Homo sapiens
cccggttccccggcccacagtgggggtgtgcaaacccgagagaactgggaactcaagaaagatcttcattgtcaccatttgcacctccag

SEQ ID NO: 520329 - DNA, 98 bp, Homo sapiens
cggggcagttcgggccggctgtcctggcgcggtctcagcggcggtggcagccgaggtgcaggatgcaagaaggcgccccccggccgggctcccgctcc

SEQ ID NO: 520330 - DNA, 83 bp, Homo sapiens
aagacgtggcagcaagcgggagtcggggatagtgtcatcggttcgtggttatagccaagaggtggtgtgctacacattaggaa

SEQ ID NO: 520331 - DNA, 83 bp, Homo sapiens
ctacgctaacctatcgggttctctctccgcgcgttcagcttgctttgaccagatcaagttctttaagtgacttttcctggtct

SEQ ID NO: 520332 - DNA, 89 bp, Homo sapiens
tcacaaaccttgtgtctcaatttggctacaaaagtgctgaattatcccaaggcaatttctgggatgggctaggctctcctccagattcc

SEQ ID NO: 520333 - DNA, 75 bp, Homo sapiens
aagacacctacccctaccagggcaagagggtggttttcctgaagcagctggctagtggcttattacttgtgactg

SEQ ID NO: 520334 - DNA, 83 bp, Homo sapiens
cctcccctgcgtcccgccaccggccgcttctgtcctcgaaaccaaggtgtatgttggtaacctgggaactggcgctggcaaag

SEQ ID NO: 520335 - DNA, 75 bp, Homo sapiens
ggctccaccccgtcgcctcgacagaaatcaatgtggactgaacataaatcacctgatggaaggacttactactac

SEQ ID NO: 520336 - DNA, 50 bp, Homo sapiens
cctacactgtcactgttggccaaggggactcgggcaagggtgccgaagat

SEQ ID NO: 520337 - DNA, 100 bp, Homo sapiens
ggaaaaccatgggctggctgtgcccaccccctcggttccagatgattttgcagacaaagaagtgacaggtcatcgtattgaggaagttcctgaacttcct

SEQ ID NO: 520338 - DNA, 75 bp, Homo sapiens
taccagtagctttaaaaaaagtgcaggcttctggctgtgatgggtcggagattcctgatgaagtgaagctgattg

SEQ ID NO: 520339 - DNA, 75 bp, Homo sapiens
gagtacctgaaccggcacctgcacacctggatccaggataacggaggctggagcggttctggtgaggttggaagg

SEQ ID NO: 520340 - DNA, 88 bp, Homo sapiens
acccatgctttatgaagcaatctgtaacttgcttcaagatcaagatttagtgaacacacatgcaggacttgaaagatgttactaataa

SEQ ID NO: 520341 - DNA, 98 bp, Homo sapiens
tgagaacaatgaactgtggaagaaggtggagaccctggagaatgccaacaggccacggcagagacaacgtgtgtaccccaagtgcacatggctgacca

SEQ ID NO: 520342 - DNA, 98 bp, Homo sapiens
gcagctccggccgcctggctccccatactagtcgccggacttaaagagagatctacttcagagccagcagtcccgccagaagaggctgagccacacac

SEQ ID NO: 520343 - DNA, 100 bp, Homo sapiens
atttggggttaggcagaaatgggatcagaaatcacaggtgtgggcccatcgctggatggatctgtcagaacacggctttgggctggccctgctcaacgac

SEQ ID NO: 520344 - DNA, 90 bp, Homo sapiens
tgctacttcatgacatcatccataccaaggagacgctgacacttgtgtttgaatatgtgcagggaggagagagcgatggcttttttcacc

SEQ ID NO: 520345 - DNA, 83 bp, Homo sapiens
gcctcgctaaggaattcccggcccctcagggccacggctttagcggtgtcttttgcggttcaggtgtgggacacagcaggtca

SEQ ID NO: 520346 - DNA, 98 bp, Homo sapiens
atgtagatgccggtaaaggggctaaaaaccccggagtcttcctgatccatggacccgatgaacatagacacagaaatgcactcggtgatggaaagaga

SEQ ID NO: 520347 - DNA, 96 bp, Homo sapiens
aaaatgtggagcccaagcaggaactgaaggaacacctttgtcctagaatattgtggagaggtactcgatcataaagagtttaaagctcgagtgaag

SEQ ID NO: 520348 - DNA, 52 bp, Homo sapiens
ccggcagccaccccgtctgggaaccgaagactcgcctctcagccgcccgccg

SEQ ID NO: 520349 - DNA, 90 bp, Homo sapiens
ctgctgcccattctctacctgaacggcgtcgtcgggccgccgcagcccgccgaaggcgcggcacacagcaagaaggaggccatcagcaaa

SEQ ID NO: 520350 - DNA, 83 bp, Homo sapiens
gtcagacgcagccgtagacaccagctccgaaatcaccaccaagtgagcaggggtgagcgcagccactgcccaacgcaaaccgt

SEQ ID NO: 520351 - DNA, 111 bp, Homo sapiens
ctccgcgttcccagcccgggtccccgcgttcacagccccagcgcaggtcaaaatgcagatcttcgtgaaaacccttaccggcaagaccatcacccttgaggtggagcccag

SEQ ID NO: 520352 - DNA, 100 bp, Homo sapiens
gaaaacaacatcatgcagtggaatgcagttatatttgggtccacgccctgccccagtgtgaagcacggggatgagtggggggaaccctcacgctgcgatg

SEQ ID NO: 520353 - DNA, 75 bp, Homo sapiens
cgccacattaaccctttcattttgtttggaagatggaccaaagcgatacagtgaataatgctacagcacgtgtaa

SEQ ID NO: 520354 - DNA, 100 bp, Homo sapiens
ctctggactccttagatgactctgtggtgggtccctcagcccttctgagctctgtgctgaacaaggcacacaagtctctgaattttgtctcaacactgct

SEQ ID NO: 520355 - DNA, 100 bp, Homo sapiens
aaaagattttgcatctagaggaattgaaattgcagaagaccctgcaaaatctcttacagagatatctacagactttgaccgttcttcaccaccactccag

SEQ ID NO: 520356 - DNA, 75 bp, Homo sapiens
tgcagtccctcgtccagccacccccagtgcctcaacctggtgttcctgctggcagacgtgtggttcggctttctg

SEQ ID NO: 520357 - DNA, 90 bp, Homo sapiens
ggccaccatgtctgcctcctggtgaaaaaggcatgggcatccagtggcgagacctcctgagtcccgtcaacgtggacgacgacttctgct

SEQ ID NO: 520358 - DNA, 75 bp, Homo sapiens
acaccaggctcaacaaagctgtctgggccaaaggaataaggaaaatggagaaccaggcacccgtgtggttgctaa

SEQ ID NO: 520359 - DNA, 100 bp, Homo sapiens
tggcatcaaagtggttaaatggattcacaacaagcccccgcctcccaacactgcttcaaaagcagtggactgtcttttggattcaaagtgggcaaaggcc

SEQ ID NO: 520360 - DNA, 100 bp, Homo sapiens
ccggctgccccacttcgacctgagctgggaggccactagcagccagttccggcccgaggacaccgactaccagcagccctccagaatacccatcatatag

SEQ ID NO: 520361 - DNA, 50 bp, Homo sapiens
ctcgagaaaattgcagctgaaggctctgccaccctctccatggcgtatgc

SEQ ID NO: 520362 - DNA, 80 bp, Homo sapiens
ttagagtttcttccctgccggaggtgggatacacggtagcatcatggtcgagggagactgcattgcttattgatccaaaa

SEQ ID NO: 520363 - DNA, 75 bp, Homo sapiens
ccgtggcccggatgcaggacagacccctcagccctgccaggagcccggaagtgggtccgcacgagacagaataga

SEQ ID NO: 520364 - DNA, 111 bp, Homo sapiens
gaatgcttgaagacagagatttattcgtaatgcgactcaaagctgcacggcagtctgtttatgaggtcatgcctcagctcctaaactacctgaaggctgacagactgggca

SEQ ID NO: 520365 - DNA, 75 bp, Homo sapiens
gaaacgaggaggagataacgcggccttgggctctgcactctcgagtggaccctgaggagctcttcaccaagctcg

SEQ ID NO: 520366 - DNA, 50 bp, Homo sapiens
gccaggtgtccatccccgtgctgaggctgaccaactgactgaagagcaga

SEQ ID NO: 520367 - DNA, 118 bp, Homo sapiens
gactcggaggtgggtccggggagcccgactcggaccgcggaggaattttcaacgtccggttcatctaatacagacactggtaaagttactgggaccttggagaccaaatacaagtggt

SEQ ID NO: 520368 - DNA, 90 bp, Homo sapiens
ggcgcctacatcctaactcgatttgctgcacttcaggtggcaagacagctccttcttcagcagcaacagcagcagcaagttagtggatta

SEQ ID NO: 520369 - DNA, 75 bp, Homo sapiens
tgcagatttgtggtgcgttctgagccgtctgtcctgcgccaagatgccacagggcccagtgggctccgggtcctg

SEQ ID NO: 520370 - DNA, 101 bp, Homo sapiens
taacagacaagacacttttcagaaagacaggaagcgttgttgacgaccatggacatcatccacgatggatttggattcatgctggcttttggagacttggt

SEQ ID NO: 520371 - DNA, 100 bp, Homo sapiens
gcacaaacagcccaccacccaaaagcaaggtgatggaggacgaggagaaggcagtggagatcttgggcaacacggaagctgctcatcctccatcccccat

SEQ ID NO: 520372 - DNA, 73 bp, Homo sapiens
atggaacagggactcactgggggtctcagacttgatccgcagtggaaaacccatcaagcctgtcaaggatttg

SEQ ID NO: 520373 - DNA, 50 bp, Homo sapiens
acaaatcccaggagcacttcacgggcccctttcctgggcgtctactggcg

SEQ ID NO: 520374 - DNA, 90 bp, Homo sapiens
ggagagttctccaaacatgatcgtttactgcaaagagtggttaatgtgttgctaacaactccactctgggtggtaaacaccagactgaag

SEQ ID NO: 520375 - DNA, 75 bp, Homo sapiens
agctctgctcatggctctcaaagaaccagcggacctgagtcttcaatgaaaggctcgattttattctccagccac

SEQ ID NO: 520376 - DNA, 74 bp, Homo sapiens
aaacaagtgtctgcttatgtcgaaaccaagcagcaacagcccttggaaagaggctaaatttttcttgacttctg

SEQ ID NO: 520377 - DNA, 97 bp, Homo sapiens
tccaagaagagctacgtagttcagtggctgtcccgcccggaccccgactcgcccatccggaagatctcgtcaattgatattcactgatggactccaa

SEQ ID NO: 520378 - DNA, 74 bp, Homo sapiens
ctacaatctaagaaggatttcagcaaatttggagcaggatgaagaactggtggatgtttctgcatctgtcttac

SEQ ID NO: 520379 - DNA, 82 bp, Homo sapiens
ttcttcactgcctctggcatggatgaggcatcagtgtttttctgaccgaagttctcatttcctgacaatggaaatggaacaa

SEQ ID NO: 520380 - DNA, 100 bp, Homo sapiens
gcttgcccggctggccctggtcatctccgaactggagggcaaggcgcagcagccagctgcagagctcatgcagaagaaaaagtcagcactttttgaagtg

SEQ ID NO: 520381 - DNA, 74 bp, Homo sapiens
tatacttgcttttgcttcagcgttctgtggttgtcaacagccttaaagaaggagaggatcagaaagagataaag

SEQ ID NO: 520382 - DNA, 100 bp, Homo sapiens
ccgggcaatattagaccatcaacagtttgactacataataaggatgatgaattgtactctacagattactttctatgaagacaaaaattttcaaggccgt

SEQ ID NO: 520383 - DNA, 100 bp, Homo sapiens
gaggacacgaggcggcgggctggagacatggaccgcggcgagcaagctccaaaaggaattcttcatttgtctcctgatgtttatcaagagatggaagcca

SEQ ID NO: 520384 - DNA, 97 bp, Homo sapiens
aaatagtgatagctttgataaagacattttaaatccaaaggatgtgattagtgtccagctggaagacactacctcttgcaaaactttttgcagccta

SEQ ID NO: 520385 - DNA, 99 bp, Homo sapiens
ccccagccgaagccggagtcgcgcggccgggagcacgggcgccggcatagtacaatgaggcagccagcggatcttggcgtttgcctcagcatggagggc

SEQ ID NO: 520386 - DNA, 82 bp, Homo sapiens
caggatctcgggctcggaacgagactgcacgatgatcaagttccagatgatcctcagtgagggataccatcctttcaatatt

SEQ ID NO: 520387 - DNA, 90 bp, Homo sapiens
cacgtgcagacatctacaaccttcgatctcctgacgagttatgatgtgattgctcaagcccaatctgggactgggaaaacggccacattt

SEQ ID NO: 520388 - DNA, 75 bp, Homo sapiens
cactttagaccctccacctaattgcagaatgtcatacccaggctatcccccaacaggctacccacctttccctgg

SEQ ID NO: 520389 - DNA, 82 bp, Homo sapiens
ctgtcttcggtggactccttcggcagtccacccaccgccgccgcctcccagctgtgccacgaccgtggctatctggtgaccc

SEQ ID NO: 520390 - DNA, 113 bp, Homo sapiens
actggttgggcggcaccgcgatcatcaggtggcagctttgagtgagcgctatgacaaattgaagctggtttggctggggttgaacgtcttcctctttgtctggtattaccggg

SEQ ID NO: 520391 - DNA, 90 bp, Homo sapiens
gtcggccagcctgagggtcctagggctgccggtcacttgctgcagggcacccgggatatatcagccatgataaagagacctccattaaat

SEQ ID NO: 520392 - DNA, 100 bp, Homo sapiens
agaccacttctccacatgaatattctgttttgctgcccgaagcttggatcagtgaatgcttgtgaaaagacctcatttatgtttctgcggcaagagttgc

SEQ ID NO: 520393 - DNA, 98 bp, Homo sapiens
ccgcctgcctccgccggctacagcgggaagagcgatgagtaacccgaagcccctagaggagtggtcacctgcctgagggcacttctgtcccaccagca

SEQ ID NO: 520394 - DNA, 75 bp, Homo sapiens
gcgggtcttgggtcctccgagagcagcagcggtgctggagaatctggtaaaagcaccattgtgaagcagatgagg

SEQ ID NO: 520395 - DNA, 50 bp, Homo sapiens
cgcagacctggtggaggtgttaaatgaaaatgccacacgctggcagctct

SEQ ID NO: 520396 - DNA, 80 bp, Homo sapiens
gaggattgtcactccaacctcttttcgctggtactgaagatttaccccccaaaaaaaattgtcaatgagaaataaagcta

SEQ ID NO: 520397 - DNA, 100 bp, Homo sapiens
ggcaaagcgaggtgtttgtgtccaatacagcacccaagaaaacctcatttggctcgctgaaggatgaagaccggattttcaccaacctgtacggccgcca

SEQ ID NO: 520398 - DNA, 83 bp, Homo sapiens
gtgtgcgtcatgcacttgaagcacctgaggaccctgctgagccctcaggaactgtggctgcaccatctgtcttcatcttcccg

SEQ ID NO: 520399 - DNA, 111 bp, Homo sapiens
tcgactcggtcctgtttcgacagcgaacatgtcgcggcctgtcagaaaatgtgccagaggaacttcaagaaccattttacacagatcagtatgaccaggaacacatcaaac

SEQ ID NO: 520400 - DNA, 75 bp, Homo sapiens
ctttgatgaaatgaaggaaagaatactgaaaattgtcactggatttaatggggtgtactctgtgtgaccgcgcct

SEQ ID NO: 520401 - DNA, 100 bp, Homo sapiens
cggcagcaagaacagagagagaggtggacagatctgagagatactgagggtgtccgcaatgttgccagtgtctgtctgcagattggctacccaactgttg

SEQ ID NO: 520402 - DNA, 100 bp, Homo sapiens
agcaattatgaaagaagtcattccttttttgaagggtccaaaactccttcctaaatatcaagtgaagtcatttcttaccccatgctgttccctggagacc

SEQ ID NO: 520403 - DNA, 101 bp, Homo sapiens
agaagaggattggaggtgtcagtgttaaaggaacctctacaacgaaggtgaagccacggaagataagagcagcggaaagagctcagtgctagaaagcctgg

SEQ ID NO: 520404 - DNA, 82 bp, Homo sapiens
accatccgttcaattggtacaaagctgatgcagatagtagaagagcttcatgctgcacgtgtgggaaaaagtgtggatttac

SEQ ID NO: 520405 - DNA, 122 bp, Homo sapiens
gctccgcagccccgggcacggcggaggcagcggagccctgggccatcggtactccaaagattcaggtttactcacgtcatccagcagagaatggaaagtcaaatttcctgaattgctatgtg

SEQ ID NO: 520406 - DNA, 100 bp, Homo sapiens
ttcctggccgagttcatgagcacatatgtcatgatggttgccatgtcaaatcttagcgaggctgtgcaggatgcagacctgctggtgtttgtcattcccc

SEQ ID NO: 520407 - DNA, 82 bp, Homo sapiens
cacggggcgcgcacgccggggaagactacaagttgtggacatcggatacccaaggagacgaagctgaagcaggagaaggagg

SEQ ID NO: 520408 - DNA, 75 bp, Homo sapiens
tagtttcaaatacaagattgattgctgctgctacttctgtattttgggcttcctgtagacacccttttcctgcgc

SEQ ID NO: 520409 - DNA, 100 bp, Homo sapiens
tacaggagaattcggtttgtaggtcgtcagaaagagggttttcagagaaagatgctgatgaggtgaaaggaatttttgtagataccaacttatacttcct

SEQ ID NO: 520410 - DNA, 100 bp, Homo sapiens
ggagtctccgcgtcccgctcgctgggagagaggtacctctccttttccctctccctttccctaagcggttcagcgaggaagaatgcctccaacccagccc

SEQ ID NO: 520411 - DNA, 100 bp, Homo sapiens
agaggacaacgcagatatagaacatttcttttatcacaacggtctggaaaatcccgaagcagaagcccgtattcatctaggcattcaagatctcgtagca

SEQ ID NO: 520412 - DNA, 50 bp, Homo sapiens
gtttggggcaagtttatacgggcaacaaaattttaacagcttctctgtgg

SEQ ID NO: 520413 - DNA, 122 bp, Homo sapiens
cgccattctcatgccttggtctccttgtccttcctaaaaaaccttcgcctcatcctaggagaggagcagctagaaggatgtcatcaatgcttcttggtgggtcatgagcaacaagactcggg

SEQ ID NO: 520414 - DNA, 100 bp, Homo sapiens
gctaggatggaaaacatatccattaaatggggttttaaatgcacagagagcaggatacaaggcagccatagttcacaatgttgattctgatgacctcatt

SEQ ID NO: 520415 - DNA, 82 bp, Homo sapiens
aatcttcaatgagtaaacatattcctgtgacttaagagattaaaattaatttggttgctgttggttctgaacaaataatgag

SEQ ID NO: 520416 - DNA, 82 bp, Homo sapiens
cgctggcgagcgccaccgcatgggtttggtgcacctcgatttggaggaagtagggcagggcccttatctggaaagaagtttg

SEQ ID NO: 520417 - DNA, 98 bp, Homo sapiens
ctggcctatgtgaaaggcggtctcagtacattcttcgaagcacaggatgccctctcagagctatttatgaagaaattgatgctcaccagcacaaagga

SEQ ID NO: 520418 - DNA, 100 bp, Homo sapiens
ataaacggagagcagcagccgcccgcttcaaccccaggggaccagaggaactcagccctgattgcggccgccagatcccacccttggacccccatgaaaa

SEQ ID NO: 520419 - DNA, 100 bp, Homo sapiens
ctggcgcctatggctctgtgtgacgtgccaaatactggtgtaagcaaacctagagtttctgacgctgtccagcccaacaactatctcatcaggacagagc

SEQ ID NO: 520420 - DNA, 75 bp, Homo sapiens
ccctgtactttgtggacttgcaggatgacttagacgactgctgaccccgcactacatctacccaccagccatcgt

SEQ ID NO: 520421 - DNA, 75 bp, Homo sapiens
aacttaatacagcaagaaagaccatcaagtttaccagtaatctgtaagtcagatgctccaacaggggatgttctt

SEQ ID NO: 520422 - DNA, 97 bp, Homo sapiens
cgggggagcgctctcggagggagcgcgctttctttggagtcggcgaaacccgggcagaagactgatttttggaaatatgtatttgggagacagtcac

SEQ ID NO: 520423 - DNA, 100 bp, Homo sapiens
ctgctgtgcctcctcctcctgtggtggaggagaaggaaagcccatcgccgaagcaccattcaagttcgacatggaattggatgacttgcctaaggaaaag

SEQ ID NO: 520424 - DNA, 98 bp, Homo sapiens
aactcagtcactggctgcaacaggaccacagtcaagacgatcatagtcactggagaccagccactaactggggcgtacacagtgaccctggatggacg

SEQ ID NO: 520425 - DNA, 100 bp, Homo sapiens
gcgcttcaggactaccgcaagaagttgcttgaacacaaggagatcgacggccgtcttaaggagtgtggctcagtacattaactttcacttttctctcttg

SEQ ID NO: 520426 - DNA, 90 bp, Homo sapiens
gcccaggaggacgactgggaccgggacctgctgctggacccggcctgggagaagcagcagcgcaaggaaacctcgacctgtctcccagtt

SEQ ID NO: 520427 - DNA, 100 bp, Homo sapiens
ctctacctggcctacttcgtgcgtgagcgaggcggctatgagaggttttcctccgagtacccagaattctgttctaaaaccaaggccctggcagccatcc

SEQ ID NO: 520428 - DNA, 87 bp, Homo sapiens
ggcatttccagcccgcccacccagaaaaagcttgtggtgaaggggggcaaaaaaaagaagcaagttctgaagttcactcttgattgc

SEQ ID NO: 520429 - DNA, 96 bp, Homo sapiens
caaatcctgtagccataaatgtctggctaatggcatttacaggaggtaaaacctggctgtgccctgttgaaatcaattctgttgcagtcatatgcg

SEQ ID NO: 520430 - DNA, 95 bp, Homo sapiens
caagaaacatctcaccaatttcaaatccggtgtgtgcagtggcctcagggatccggaaagtctaggactgaacttctcctaacatccagtaatgg

SEQ ID NO: 520431 - DNA, 83 bp, Homo sapiens
catccacacatcataaagctttaccagatgctggtttttcagcagcagacagagaagccagtctggagcttattaaactggac

SEQ ID NO: 520432 - DNA, 100 bp, Homo sapiens
acaagttgcatgaagagcatatcaatgcaggacgtacagttcagacctcccagtgccaagtgtataagcgtgtccagaattggtgggtctcactgacttc

SEQ ID NO: 520433 - DNA, 100 bp, Homo sapiens
gtcagcacaaccaatttgcattatgtcagagatggctttggattccccgttctgtgtgctgctgtctggctcctgaacccagctgtagaggtgtgtgtca

SEQ ID NO: 520434 - DNA, 75 bp, Homo sapiens
ctctggctgtgctgcgcgacccccgcgcatgaaatgacctccaccttcaacccccgagaatgtaaactgtccaag

SEQ ID NO: 520435 - DNA, 90 bp, Homo sapiens
gaattatttcgtgatatccaagaacaagcactgcaggacatggatttgattgacatactttggaggcaagatatagatcttggagtaagt

SEQ ID NO: 520436 - DNA, 74 bp, Homo sapiens
gcgaaattggtcattctcgctaacaactgcccagctttgagctacagagggccggagctggagatgtggtctct

SEQ ID NO: 520437 - DNA, 82 bp, Homo sapiens
tattttgcgaactatcttctccagcggagatggccaatgtattgtccccagtatcagaaccggaagaagaaaatgatcctga

SEQ ID NO: 520438 - DNA, 76 bp, Homo sapiens
atcttctcgacctgcttcagcctccagctctactaaaggcattcccatcaagagcaccatggacaaccccaccacc

SEQ ID NO: 520439 - DNA, 82 bp, Homo sapiens
ccgcagagggctttcttcgccgtgctggccgcggcccgcctcagcatctggtacagccgaactgtgtcagggaaaagggagg

SEQ ID NO: 520440 - DNA, 83 bp, Homo sapiens
atcgcctcccgagaagaagttgaggcgctataaatgagccgtcagactgctacagcattacctaccggtacctcgaagtgtcc

SEQ ID NO: 520441 - DNA, 75 bp, Homo sapiens
gcggctctaacggggctttctacaaggtttggtgcacctcgatttggaggaagtagggcagggcccttatctgga

SEQ ID NO: 520442 - DNA, 74 bp, Homo sapiens
aaccggaagaaactgtccgagaagcccaaaccgaacaacaacgtatccttacacagagacacagatgtacagcc

SEQ ID NO: 520443 - DNA, 90 bp, Homo sapiens
cccggagccgcgagcacccaaggtgctggagaatctggtaaaagcaccattgtgaagcagatgaggatcctgcatgttaatgggtttaat

SEQ ID NO: 520444 - DNA, 90 bp, Homo sapiens
ttcaggatgttcagctcacagagatcaaaccacttctaaatgataagtgccggtggtggtgtgcacattgagccccggtatagacagttc

SEQ ID NO: 520445 - DNA, 50 bp, Homo sapiens
taaacttgatccaaagacaatgaagttgatggagtttgcactgtagcaaa

SEQ ID NO: 520446 - DNA, 90 bp, Homo sapiens
cacggatgaggcccggcggtcgcgcctcaaccggctgtacggaatccaagctcctgacccctgaggattaccagcgatttctagacctgg

SEQ ID NO: 520447 - DNA, 103 bp, Homo sapiens
tgttctcgctccggagccgctgcacatttcgtggccacagatgtctttaattccaaaaacctggccgttcaggcacaaaagaagatcttgggtaaaatggtgt

SEQ ID NO: 520448 - DNA, 83 bp, Homo sapiens
gtggagatatggcgcaactgcggcgcgctgccccgggagacgctggccttcagggaggagctggatgtcctcaagttcttgtg

SEQ ID NO: 520449 - DNA, 146 bp, Homo sapiens
ggtgttcaaacagcactgccaaatagcagaagaataccatgaggtcaaaaaggaaatcaccctgcttgagcaaaggaagtgaaactgaaattggctgtatcatctgaaacttcatctgtgaagtccctggtggtttcctagatgac

SEQ ID NO: 520450 - DNA, 98 bp, Homo sapiens
cgctgctctgtgagcggcgggtggcagcaggggactcctgacacttccccttccccaccgaaccgcggggatggtttagacaacagtgtagcttcacc

SEQ ID NO: 520451 - DNA, 97 bp, Homo sapiens
gccaggtggctctgtacaccttcggccatcgggccaacgagtggaacgattccctgatgaggcagatgcgggaattggaggaccgatttgccagtga

SEQ ID NO: 520452 - DNA, 90 bp, Homo sapiens
ccctaggctatttctgccgggcgctccgcgaagatgcagctcaagccgatggagatcaaccccgagacaatgcagatcttcgtgaagact

SEQ ID NO: 520453 - DNA, 113 bp, Homo sapiens
ctgccgaggcgttcggtcctgctgttgcggccgctgccccagggctgcggggacggtcgcaatggaagaagagatcgccgcgctggtcattgacaatggctccggcatgtgca

SEQ ID NO: 520454 - DNA, 114 bp, Homo sapiens
ctctcacgctttctgctcaagtcctgtcctcttctgaccaaagagagtgtacctcacagccttctaggatctccagagtggacaggaatctcacttggagggaccatggagcag

SEQ ID NO: 520455 - DNA, 74 bp, Homo sapiens
gcagaagctccagagcccagacttgcagattgttcagattccattctgtggggaaattgactgtgaggactgga

SEQ ID NO: 520456 - DNA, 100 bp, Homo sapiens
aaccatgagtggttccatgatgggaagtgacatgctcctgagaaccatgtctatgcccaaaggtagagttctggataaaaacctggatgaggaagggttt

SEQ ID NO: 520457 - DNA, 100 bp, Homo sapiens
aaattatagagctaattacaactttcggggcatgtacaatcagagattcgggaactggagcctctcctctgtcacagtgacaatccatctcagctcatct

SEQ ID NO: 520458 - DNA, 99 bp, Homo sapiens
tcatggaaaagcagttgctcgaagaactcgagcgacagagacaagctgagcttgccgcacaaaaagctagagagcagtagccatcctaatggatatggg

SEQ ID NO: 520459 - DNA, 75 bp, Homo sapiens
aaaatcctttcttgaggcaagaggacaaggagcatccaagatacctgatcccagaactttgcaaacagttttacc

SEQ ID NO: 520460 - DNA, 75 bp, Homo sapiens
aggacagaatcaccagcactggctgaaggcttgaagtagaaaatgccatgatgagaaaaactattaaaaaacagg

SEQ ID NO: 520461 - DNA, 117 bp, Homo sapiens
cggctgggccggaagatcggcagcggctccttcggagacatctatctcggtactccaaagattcaggtttactcacgtcatccagcagagaatggaaagtcaaatttcctgaattgc

SEQ ID NO: 520462 - DNA, 101 bp, Homo sapiens
ggataaaaactaatgtcataaatcctgcatatgctactgaatcaggtgcaagaagtaggctggcacgacgtggccggctggttggggcgtggtggctccat

SEQ ID NO: 520463 - DNA, 82 bp, Homo sapiens
atgacatcagtttctggaagaagaagaagagcatgatcggcatgtccaccaaggcgccatgtcagaaccggctggggatgtc

SEQ ID NO: 520464 - DNA, 90 bp, Homo sapiens
ctcaacttcacgctggcgcgagccccgtcctccttcgccgccgcgcacaaccgcacgtgcagcccccaaatacatcaagatgtttgtact

SEQ ID NO: 520465 - DNA, 75 bp, Homo sapiens
cacaactccaggaaggaaaccaaggggcagacccaaaaaactgtctctagtgatccctgaaaagttccagcatat

SEQ ID NO: 520466 - DNA, 101 bp, Homo sapiens
cgcgagcgtctgggcgggtggtagtaaagatgacggcgccttgaggtaagctacaggcaacaccacttccgcgtttctcttgcgccctggtccaagatggc

SEQ ID NO: 520467 - DNA, 82 bp, Homo sapiens
ggaattctaatttgaaccatgtttggattgaagccgcctctgtattacttaccagatggctatcgtgttcaaccaggagggc

SEQ ID NO: 520468 - DNA, 98 bp, Homo sapiens
aggaacgttaagacggtgacggagaacagcaaagcctggaagcaagccgccgtggagaaggaagaactgtgctgagatcctgcaaaagttccaggtgc

SEQ ID NO: 520469 - DNA, 99 bp, Homo sapiens
ccttcagtccttagggacaccgagtgacacgcaggagcttcgggacagcctcttgaaatggcgattgaaaacctccaaaaaagcgaaggaatcacatca

SEQ ID NO: 520470 - DNA, 74 bp, Homo sapiens
gtccatgaagcagtgtttgaggcacgagagcagaagggaaacttctctcctccacccacgcctgtctcgccacc

SEQ ID NO: 520471 - DNA, 98 bp, Homo sapiens
ccgacctgtacccagcctggcaggaagactgtaatcgtggggaagccagttgagggaagttctccatgaatgtacgtcacaatgatgatgaccgacca

SEQ ID NO: 520472 - DNA, 88 bp, Homo sapiens
ttgatcaggatttttggcctaccctccaaagaaaagatttctctatgaatcatcatcaagaactctgggagaacttttgaattcataa

SEQ ID NO: 520473 - DNA, 82 bp, Homo sapiens
tggggccagggaaccctggtcaccgtctcctcaggtgtgatgaatgcagactctgctaccattttggctgtttggatcctcc

SEQ ID NO: 520474 - DNA, 98 bp, Homo sapiens
acaggccaacaatgacttcttcctccttgctgagctcctgagtgactacattcgcctcctggccatagtccgcgaccggccagccttgcagctgtatg

SEQ ID NO: 520475 - DNA, 100 bp, Homo sapiens
tgtgggatttacaggaaagctcgagccaggctgtgatctatccatactaatggaaatgtaactggaactgactctgatgataaaatcaaggaccatcaag

SEQ ID NO: 520476 - DNA, 113 bp, Homo sapiens
gggattgcctggcaggacgtgaaggggaagaggcccaccctggagtaaccctcactggagaatccagagcctgatgtgtgagaagcggatattggcggcagtgaccagtgcgg

SEQ ID NO: 520477 - DNA, 100 bp, Homo sapiens
gcctcagcctcccgggtagctgggactacaggctgctttgaatgctgcatcaagtgtctgggaggagtcccctacgcctccctggtggccaccatcctct

SEQ ID NO: 520478 - DNA, 82 bp, Homo sapiens
catcatggaatctttggatggcttacatcttcctgaatcgagcagagaaactctaatataatgccttcgtcgtctcatctct

SEQ ID NO: 520479 - DNA, 98 bp, Homo sapiens
ttaaacaggactggctacctcatttgcaggtgactcccgcggccctccaaaccatcacatgggcccgatgtcagagaggcggcatgagcagagcggcg

SEQ ID NO: 520480 - DNA, 98 bp, Homo sapiens
catgccaagcagggaactggcatccatgaaccttgatatagttgacctgcttaaaaaggccaagggcggcgactggcggcgcgatggacctgaccggg

SEQ ID NO: 520481 - DNA, 82 bp, Homo sapiens
accaggtcaaccaggctgcagctgcacaggctgcagccaccgcagctgccatgatttggagtccaggaatgagactaagcat

SEQ ID NO: 520482 - DNA, 85 bp, Homo sapiens
tgtcccgaccagttcaaggggaaattctgtgaaataggccagttcatgcaggaaccaaagatacacatcttcaatgagagaccag

SEQ ID NO: 520483 - DNA, 90 bp, Homo sapiens
gtagacaccagctccgaaatcaccaccaaggtgtctgatgatttgtgagcctcaagtgactactctgtggaatcatctgtccttgccttt

SEQ ID NO: 520484 - DNA, 100 bp, Homo sapiens
ctagtgctgagatcctgagacaatgatggactctgtgactacatgactaataaaatatggcagaaatgacaccatgcagtttccaagcccaggccttagg

SEQ ID NO: 520485 - DNA, 74 bp, Homo sapiens
aactggccggggcccagcaagtgcagacccagatccagactatatcatcatgtacatagaaaaatccaaaggat

SEQ ID NO: 520486 - DNA, 100 bp, Homo sapiens
ggagatgaagaagaagattaacctggagttaaggaacagatccccggaggagaaaccaaggtgtatgttggtaacctgggaactggcgctggcaaaggag

SEQ ID NO: 520487 - DNA, 75 bp, Homo sapiens
gtcggcggcgcccggatgggcagctgagggcgccatgttttggaagtttgacctgcacacaagctcgcacctgga

SEQ ID NO: 520488 - DNA, 83 bp, Homo sapiens
cgagcggcgcccagcccagcgcctcggccgaacccctccgcagcagatgatatcatcaagttgaatcgaaaggaagggaagaa

SEQ ID NO: 520489 - DNA, 82 bp, Homo sapiens
cgggcgagcggagcgcaacactcgcttggttggggagatcggcgcttggccggtgtggatgaggtcaccattgtcaacattt

SEQ ID NO: 520490 - DNA, 90 bp, Homo sapiens
cttatcatttaatgcataaaaactgcaatcatttttcttcagctttatcagagactcagggtttaggaactgccctgaagatattattct

SEQ ID NO: 520491 - DNA, 98 bp, Homo sapiens
atccctaagatcgacgtgtaccactacgaggtggacatcaagccggataagtgtccccgtagagtcaaccgattgcccccgaggaattagcacttgtt

SEQ ID NO: 520492 - DNA, 100 bp, Homo sapiens
aaggaccctgatgaagaccttgaacaagtctcgagagtggaaacaactctcacgaaaacagctcaggcatgtttgctgcagaagagacaggggaggcact

SEQ ID NO: 520493 - DNA, 112 bp, Homo sapiens
ctcgccggcgccccgacgggccccggagcagcggcccccggccgggtatggcgttgacggtggatgtggccgggccagcgccctggggcttccgtatcacagggggcaggga

SEQ ID NO: 520494 - DNA, 96 bp, Homo sapiens
gctgccactcccgggagcatgaaggaccgaacccaggagctccgcacggatgacgcggcatggcaagaactgcaccgcaggggccgtctacaccta

SEQ ID NO: 520495 - DNA, 100 bp, Homo sapiens
agagagagctattagagattgtgaagaagaatttcgatctccgccctggggtcattgtcaggtccggcgccagctgccagtcgaggaaccgaacccagcc

SEQ ID NO: 520496 - DNA, 50 bp, Homo sapiens
ggctctgctgaccttgtgccttgctttacattcagcccatgatgggggcc

SEQ ID NO: 520497 - DNA, 96 bp, Homo sapiens
acgacggcgccatcaccgagcgcttgatgtgcgcggagagcaatcgccgggacagctgcaagtgttctaagaacggaagcatctgggctggatgga

SEQ ID NO: 520498 - DNA, 98 bp, Homo sapiens
gggagtcgaagcgagggtctgaagttcacgactactagaaggggaggggagtggaaaggctctcagtgaaaaagggcggtggccagtttgaatactcc

SEQ ID NO: 520499 - DNA, 75 bp, Homo sapiens
cttgccgctgctgtcctgcgaccccaagcagaattcaattcgtcataatctgtccctacacagcaagttcattcg

SEQ ID NO: 520500 - DNA, 100 bp, Homo sapiens
cactttttgatcagcatttgtggggtgaatagcgaaccaagcctcttgccttactgctctgtggaaggggtgagaactttctgtgtgccagtggaatctg

SEQ ID NO: 520501 - DNA, 101 bp, Homo sapiens
cctccatccttctggatctggccaacaccaccggcacagtgacggcttcagagggtctggttggtttccaatacggtagatgcatcagtaggtctttggaa

SEQ ID NO: 520502 - DNA, 98 bp, Homo sapiens
accccatcgtcaacgggactcaggagcacacgaaagtccggctgagcgtctatggagccctgggcatttcacaaggccagaacacaaagcgtgaatcc

SEQ ID NO: 520503 - DNA, 82 bp, Homo sapiens
ccgccttcctgcagcagaggaactcctataaccaccaccagaggtggggctggtgtccgagcacttctcgcaggccccgcag

SEQ ID NO: 520504 - DNA, 82 bp, Homo sapiens
tccgattagccttttctctgccttgcttgcttgagcttcagcggaattcgaaatggtaaggggcctggataccaagaagtga

SEQ ID NO: 520505 - DNA, 152 bp, Homo sapiens
cactgggcctgtgatcgaggacataaggaactagtcacagtgttgctgcaacatagagctgacattaactgtcaggtaccaaccaagaagctgaagaaatatgagaaagaatatcagacaatgcgagagagtcagctgcaacaggaagaccc

SEQ ID NO: 520506 - DNA, 103 bp, Homo sapiens
tccggctgtaaggagccgcggcggggggaaaatggagcccttcaccaatgaaatttgaagatgctaaacttgctgctgccatctctgaagtggtttcccaaac

SEQ ID NO: 520507 - DNA, 100 bp, Homo sapiens
gttagtgtttgctggtgcagagggttcgcagctcagtaaagatgacggcgccttgaggtaagctacaggcaacaccacttccgcgtttctcttgcgccct

SEQ ID NO: 520508 - DNA, 100 bp, Homo sapiens
ctgcgcttgtcaccatcatcaccgtgcccgtggttctgctgaacaaaggcaccttcagacaaggagatgttcagccgttcagttactagcctggcaacag

SEQ ID NO: 520509 - DNA, 100 bp, Homo sapiens
ggcaaggcaactacacattgcggagagggaggctgtgctgcccaagcttcacctggatgaggactacccatgctcactcgtgggcaactggaacacgtgg

SEQ ID NO: 520510 - DNA, 100 bp, Homo sapiens
cctcatcctcaaggagactcggcggctgccctgggccactggctacgcagaggtttttaagtaccggtgaccaggcagcaaaaggcaactatgggctcct

SEQ ID NO: 520511 - DNA, 75 bp, Homo sapiens
ttacaatggagaaagagtaattcacgcagagccggctttgcagagacaccctcatttattagacccctggaggat

SEQ ID NO: 520512 - DNA, 83 bp, Homo sapiens
ccaggacagtcagtctggtactaacaatgcagaattttccagttcatatgaagaggtgatctctcaaataaatacgtcattac

SEQ ID NO: 520513 - DNA, 75 bp, Homo sapiens
tataagagcctggtgagacggagctatcggcgccgcggcaagagccagatttgctatgggatcatttatggaatg

SEQ ID NO: 520514 - DNA, 75 bp, Homo sapiens
ttgtggcacaactatttcttatgtggacttaaaggaattcagcaaaatgatgcttcaacacccaggccaggtctc

SEQ ID NO: 520515 - DNA, 88 bp, Homo sapiens
cttatatgtgatgccattccagcactggactcatggaggctgagcatttattcaggccaagtcctgtatctgccatgtctgtggcgtc

SEQ ID NO: 520516 - DNA, 89 bp, Homo sapiens
aagaaccagcaggctctgtggttcaggactcccgacttgacacgatattttttgctaagcagagatcccactggcattgttggtggtag

SEQ ID NO: 520517 - DNA, 100 bp, Homo sapiens
gaggccgccctgggcacccactaccgcgcctatctcctcaagtgccacgagctgccgttttatgggtatgatgccgccaccacctatgggcatgatgccg

SEQ ID NO: 520518 - DNA, 75 bp, Homo sapiens
ccgggagatccagaagtgaaacgccaggctctctggaggccaggagatggtccatgatgggaaaaaaagcatcag

SEQ ID NO: 520519 - DNA, 82 bp, Homo sapiens
gcccaaccagtttgaggccgagccgagacgcatccagagctttcgtgaccggggactgttctgaagcaggcctcgtggatga

SEQ ID NO: 520520 - DNA, 100 bp, Homo sapiens
ctcacctggtgtcttggttcctgcaaggtcctgcatctccagtatggaatgtatgtttggccctgtgctgtggtcctggcccagtacctttggtttcaca

SEQ ID NO: 520521 - DNA, 82 bp, Homo sapiens
ctttgaccagatcaagttctttaagtgacttttcctggtctcaaagttcaaaaacagatcttgtaccaccacttccggtgac

SEQ ID NO: 520522 - DNA, 75 bp, Homo sapiens
ctacaaggatgtgatgatggggacctatgggaacctactctcattaggccatttcataattctgaatcatgtctg

SEQ ID NO: 520523 - DNA, 75 bp, Homo sapiens
attgtgaagttcaacgagatccttattcaaattatgggtcggaatctggcagatcttcgccgtagccagtcccga

SEQ ID NO: 520524 - DNA, 100 bp, Homo sapiens
tgctgctggtccttctgtggcatcttctacaaacccatttcagaccaatgccagaggagcaacaggttaccatggcctctactgtgaggaggaatataat

SEQ ID NO: 520525 - DNA, 75 bp, Homo sapiens
gcgaagagctgcttctgtatcttaagccctgctgttcgtggcatttgccctgtgtatgttttgcctgtacagctt

SEQ ID NO: 520526 - DNA, 83 bp, Homo sapiens
gccacctactattacccccagtatctgcaagccaagaaactcagccacctgtgacaaatttgagtgtctctgttgaaaacctc

SEQ ID NO: 520527 - DNA, 117 bp, Homo sapiens
ctcagcaaagagcataatccaactcagtatgaagagcggatgaggatacagaaggctggaggaaacgtcagtgccatggtctccatgaactgatttttttgtgcagtgggcaggaag

SEQ ID NO: 520528 - DNA, 101 bp, Homo sapiens
aggagcaagaggaccctgcggactactgcaaagctctcgtggcattatccttcagtggggctattggactgacttttcttatgctgggatgtgccttagag

SEQ ID NO: 520529 - DNA, 97 bp, Homo sapiens
ccatatccgtggggccaagagtgagatcttgtacattcgcaccaatgcttcaggtacaccaggggttggaaaaaccacactaggcaaagaacttgcg

SEQ ID NO: 520530 - DNA, 90 bp, Homo sapiens
gccccatctgtcgagatcacaagttgcatgttgactttagggatgctcacaactgtattcctgagctggacagtgagacagccatgtttt

SEQ ID NO: 520531 - DNA, 75 bp, Homo sapiens
tcagccttcccagtagctggaactacagggtgcagcagttggaggaagaaaatacagagcttagaacaacagtga

SEQ ID NO: 520532 - DNA, 87 bp, Homo sapiens
aagacagccctatctttatgtatgcccctgagttcaagttcatgccaccaccgacttatactgagggcagcccaatggatccaatgg

SEQ ID NO: 520533 - DNA, 75 bp, Homo sapiens
ggctgaggcaggtggatcatgagctcctggtacagtttgttcagaatacgtccatcccattgggacaggggcttg

SEQ ID NO: 520534 - DNA, 50 bp, Homo sapiens
tgcctggaccagcttaatggttctgaattttgagactgaagaagtagaac

SEQ ID NO: 520535 - DNA, 100 bp, Homo sapiens
tccaactccaggaccctttccttctctacagaaatgccagatgtccagctgggagctccccgacctccaggagggcaagatccaagccatcagcgactcg

SEQ ID NO: 520536 - DNA, 89 bp, Homo sapiens
caaacctcctgttgggccatttccgagaactcccatcagtttctgtatagtgtaaaaggtctcaccaacggctttgggggtgcgaggag

SEQ ID NO: 520537 - DNA, 76 bp, Homo sapiens
gccaaatacatcagcttgtaggagacagagtgccggtggtggtgtgcacattgagccccggtatagacagttcccc

SEQ ID NO: 520538 - DNA, 82 bp, Homo sapiens
gctgctgcagctccgcctcctccgccgcgcagggttctccaaaaaatgtggaatcctttgcatctatgctgagacattctcc

SEQ ID NO: 520539 - DNA, 100 bp, Homo sapiens
aggaacgaggcaaggagctaaagcagcgtgcgttcagccctggggtggcagggcccagccccgaaccagacaagggacccctcaaggagcttcattctag

SEQ ID NO: 520540 - DNA, 75 bp, Homo sapiens
cacaagaacagttggccaatactggtgcccaagcctggattaaaaagaattacatgatgcgtaatgctgtgctgg

SEQ ID NO: 520541 - DNA, 75 bp, Homo sapiens
gaaaaagatgagtctgaagttatatcgcaaaatgaaacgtgctctccagtcctacaagattatcaattttgcccc

SEQ ID NO: 520542 - DNA, 100 bp, Homo sapiens
cgcggatgcactctggtggggcctggccacggcatatgcctccaaggacggggtcctcactgaggccatgatggacgcctgtgtgcaagatgctgtccag

SEQ ID NO: 520543 - DNA, 100 bp, Homo sapiens
gctagagacattgtttccattcaagagctaaaactcttctacagaaattactctcaaagaaacctgaggatcgacctaacacatctgaaatactaaggac

SEQ ID NO: 520544 - DNA, 82 bp, Homo sapiens
ctgctgacgctgctgctgcccggcctcgggggtgtgtccgcagccggccaggtggtatccctgaaggtgtggctgattgacg

SEQ ID NO: 520545 - DNA, 83 bp, Homo sapiens
tgatgtagtaattttgtatgattctgattggaatccccaagtagatcttcaggctatggacttgcaaaaacttacgtcacatc

SEQ ID NO: 520546 - DNA, 100 bp, Homo sapiens
attgatccattagggttaccagacaggcctttttatagaattctgcttggtcagaatcgtgatggcattgtgttcagcactgatgactattttcaccatc

SEQ ID NO: 520547 - DNA, 74 bp, Homo sapiens
aagacgtttcttctcttggcaagagagctctgcatcaatgcgccggccatagccacaatggtgcgcatgaatgt

SEQ ID NO: 520548 - DNA, 100 bp, Homo sapiens
caccgccatacttctgtcgccctgtcgtctgtgttgtgactgctttggacgtgggagtcacctgaaagccaggaaatggggactatccccaggccatgaa

SEQ ID NO: 520549 - DNA, 101 bp, Homo sapiens
ggagaccactttaggcgacgtcgtcatcgacttgtacaccgaagaacggccgcgtgcttacagttgaacatgagtcttcttatgattagtgagaatgtaaa

SEQ ID NO: 520550 - DNA, 100 bp, Homo sapiens
cctgcccggggccctcatggacggttggatcagggccgaaggagatacaactcgtcaacgaatcaaattcagtgatgacagagtatgcaagagtcacctt

SEQ ID NO: 520551 - DNA, 100 bp, Homo sapiens
ctggctcatcagctgtcccaggttttgctcttctagttggtagctggcagtgttgtgatggcttttgaagaagtatgcccggacagaatagatctgattc

SEQ ID NO: 520552 - DNA, 100 bp, Homo sapiens
ctaaacatctaactagaagggatacccttccatttcaaagaacagaatgctaaggaagctgtggcaagatggcactggatctttaaaacgcagtggttcc

SEQ ID NO: 520553 - DNA, 100 bp, Homo sapiens
ttgccctgaaactggttggtgaagaaggatttgtagcacttttccagccattaactccaggctctcgagaatttgaagatgttgtaaatattctccattc

SEQ ID NO: 520554 - DNA, 89 bp, Homo sapiens
gagactcgaggttttctgcatgtatctcagcgtttgagtcagccaggagtagcaataggtttggcttggactcccttaggtggagaaat

SEQ ID NO: 520555 - DNA, 100 bp, Homo sapiens
gagaatggctgtgctgacttttttatccgtggagagcgactcagggacaaaatggtagcagtagctgatgtgcagtttggccccatgagatttcatcaag

SEQ ID NO: 520556 - DNA, 51 bp, Homo sapiens
cagctgcctcagttcttagcgcagatatttggagttcttacaacatggcag

SEQ ID NO: 520557 - DNA, 75 bp, Homo sapiens
cagcatgccgctatcgaaaatgtcttcaggctggaatgaacctggaagatgagattgtggggaacctgggtgaag

SEQ ID NO: 520558 - DNA, 100 bp, Homo sapiens
agaatttgtacacatgtacaatgcccaatgcgatgctttgcatcctaaatcaggaatcacatgcagcccaactacagattcttatggaattcctcaaggt

SEQ ID NO: 520559 - DNA, 75 bp, Homo sapiens
ggaccccagaaactgatccgcaaagtgtctacctcggggcagatccggaccaagtacatagtggaatgtcatggg

SEQ ID NO: 520560 - DNA, 100 bp, Homo sapiens
ttatttattaatacctcttcgtatggagtcctttcctatcatgttttggaaggtgacaatgaaatgtgaagaagttacatttctcaaacttgaaagttag

SEQ ID NO: 520561 - DNA, 98 bp, Homo sapiens
cggagtagagcggagcctggcgggcgtgggaacccaggccccgccgaggcggccagggagagcctggggatgtacaggagatgcctgctccagaatct

SEQ ID NO: 520562 - DNA, 100 bp, Homo sapiens
ccacttcggaagcaaattcaagaagggaagactggtcagaactcaccctgagagagacctgactttcctgagagggatcatcttgtgtcatatcttagaa

SEQ ID NO: 520563 - DNA, 72 bp, Homo sapiens
gagtcccgaacctgttgcctcctgtctgcccccaaccttcccttttctagctcctccggtcatgatacatcc

SEQ ID NO: 520564 - DNA, 90 bp, Homo sapiens
actcccgcgtgaacttgtgtacaccacataacccatctgagcctcatcttcctcatctgttttgaggtgcttagatgagtacgaagatga

SEQ ID NO: 520565 - DNA, 50 bp, Homo sapiens
gtttggaatgacgacagtatgcgccacgatcatgtctctcgaagactttg

SEQ ID NO: 520566 - DNA, 75 bp, Homo sapiens
ggagtcttccatcaatcatatctcacagcttggttctacagccattgggatccagacatcagagggtgtgtgcct

SEQ ID NO: 520567 - DNA, 100 bp, Homo sapiens
ggaaacctcctacctccgttgaaaggagagccagttactaacttgactcctagaagtaccccaccccacccctgctccttggaggacaacgtgatcactg

SEQ ID NO: 520568 - DNA, 83 bp, Homo sapiens
cgcagccttgggcctcgcgccggctatggccgtgccctggggctgagccctcaggagcgcagctcagctgggctggaactgcc

SEQ ID NO: 520569 - DNA, 74 bp, Homo sapiens
gcagagattgccaatgccaagtccagagcggttagataaggtagttcctgaaatgactgagatattgaagaaaa

SEQ ID NO: 520570 - DNA, 108 bp, Homo sapiens
ctgagactcaccggaggaagcggcgcgagcgccccgccatcgtcccggccaaatttgagtccctctttaggacgtatgacaaggacatcacctttcagtattttaaga

SEQ ID NO: 520571 - DNA, 100 bp, Homo sapiens
ctgagctgagggaaccagctcctggcaccaaccagcgccagcccagcaagaaagcctcaaagggcaaggggagactgagggctactcaggctcagatatt

SEQ ID NO: 520572 - DNA, 74 bp, Homo sapiens
ttttttctaatggctattcaagggaactctaatgatccaggacaaagaagttaccctggagtatgtatcaagcc

SEQ ID NO: 520573 - DNA, 100 bp, Homo sapiens
ccggggggctgaccgcggccggacggcgccccagcaccgggcgagggagcccgcgtcgcgcggaggagctgccaaggccatgtctgttccatcatcactg

SEQ ID NO: 520574 - DNA, 74 bp, Homo sapiens
acacaaccctcgggatcacacttatgattgcaaaaaatggccccatttatgatgtagtttggaattctagttct

SEQ ID NO: 520575 - DNA, 75 bp, Homo sapiens
tgtaataggcatacacaagtgtgcattaatgggaatcgacggactgtagcttctattaagaatgaccctccttca

SEQ ID NO: 520576 - DNA, 100 bp, Homo sapiens
cttacatcttgcatcctcaagcgggcattttgtcagtgatgctgatctttgccttcttccaggaacttgtaatagctggcatcgttgagaatgaatggaa

SEQ ID NO: 520577 - DNA, 112 bp, Homo sapiens
gcgccaattacagcaaagcctggaagcttgacgcgcacctgtgcaagcacacgggggagattttgatccgatttcaaatccagaggaatgtgatagtgatccccggatctat

SEQ ID NO: 520578 - DNA, 100 bp, Homo sapiens
ctggcctcgaggccgctgctgctggcgctcctgtcgttggaaacatgttccaaatcaagtatagatattgagaatgggtttatttctgaatctcagtata

SEQ ID NO: 520579 - DNA, 50 bp, Homo sapiens
cgacgagatggtggaggaggcggtggaagatccagctatgggacacagca

SEQ ID NO: 520580 - DNA, 50 bp, Homo sapiens
aacccggcctctggacaagacgccatcatgaccgggtcctataacaactt

SEQ ID NO: 520581 - DNA, 47 bp, Homo sapiens
tatgtacctgttaccactttcaaaaaatccaagcaaaaatccctgga

SEQ ID NO: 520582 - DNA, 51 bp, Homo sapiens
ggatatatcttccttgacagcaaaggtgtggaccactacaacgaggtgaag

SEQ ID NO: 520583 - DNA, 82 bp, Homo sapiens
ttttggagttttttgcttggggactattgacagcacccaccttggtgctccccgcagccaccgccacccattggaatggcca

SEQ ID NO: 520584 - DNA, 100 bp, Homo sapiens
agaagtaaccctgctctgtggaattgcaagaatctatgagcctgccctcaagtatgtgttgtatacattggttggctttgtgggttttgtaacccattat

SEQ ID NO: 520585 - DNA, 80 bp, Homo sapiens
ccccccatgggggatcctgagtacctggctgctttcagacagagctgtgaaccaaccccgctcacggctaacaagcccac

SEQ ID NO: 520586 - DNA, 100 bp, Homo sapiens
agagggcactggacctgaacttgaagcatcagatcttgcctaaagagcagtggaccaaatatgaagagggtagggctctacttcactgggcctgtgatcg

SEQ ID NO: 520587 - DNA, 95 bp, Homo sapiens
ttcgactgctagagccgagcgaagcgcctcctcgctggggaggcagagtcctcgcgtggtctcctgcctcgagcacagcctgtgcccaggggagc

SEQ ID NO: 520588 - DNA, 75 bp, Homo sapiens
cttcggagtacctgcgctatgaagacacgcttcttctggaagaccagccaacagactaatagggatgccaaagga

SEQ ID NO: 520589 - DNA, 100 bp, Homo sapiens
agagctgcatgaagaggcacggcattcccatgagccacgttgcccggcaggacctgggcgtgaccaaggtgggccacatgaagaggatcctgtgtggcat

SEQ ID NO: 520590 - DNA, 116 bp, Homo sapiens
gaccacagtattccaaccctcctgtgcagggagaagtgatggaggtggaggagaagatcaagcagacccaccgtaagtacctgctgcaggagcagctaaagatcatcaagaaggag

SEQ ID NO: 520591 - DNA, 83 bp, Homo sapiens
gttccctcctccgtttctgtatccccacgaggagcgagcccagggcgtggtgctgaaagtgctcacaaacttcaagagcagtg

SEQ ID NO: 520592 - DNA, 86 bp, Homo sapiens
tttaattttagggtcctttatatagaagggagagtaggtcctactgctctgttggctcatgaaataggttttggaagtaaagttac

SEQ ID NO: 520593 - DNA, 100 bp, Homo sapiens
ttgggctacgcgtatgtgaacttccagcagccggcggacgaaaatgacagatggcgagacctggacaggaaatgccctcttcagattgaccaaccgagca

SEQ ID NO: 520594 - DNA, 87 bp, Homo sapiens
aataattattattaacatttattaacgatcaataaacttgatcgcattatggccagcactattaagaattaaacaaccaccatgtcg

SEQ ID NO: 520595 - DNA, 50 bp, Homo sapiens
tgcccagcggcccgccaggtcccgacaaagatcattccactcagcctggg

SEQ ID NO: 520596 - DNA, 51 bp, Homo sapiens
gaaagcttcggacctccgtgggccctggtgactgaaaactcctgaggcatt

SEQ ID NO: 520597 - DNA, 75 bp, Homo sapiens
agcatggatcttcgtaccaagagcaccggtgggccccctcatcctgtgccacagccagggtatccaggatgccaa

SEQ ID NO: 520598 - DNA, 100 bp, Homo sapiens
gaagataaaggcttgctcatacaggatgcccactttcatcaacttctctgtctgctcaacagtcagggatccatatggctttggagacagtcgagattca

SEQ ID NO: 520599 - DNA, 83 bp, Homo sapiens
gggctcgcggcgctgggttcctgacaatgcagatcttcgtgaagactctgactggtaagaccatcaccctcgaggttgagccc

SEQ ID NO: 520600 - DNA, 88 bp, Homo sapiens
ctcagccccgtcctcttgtcctcctcagcctcggggctgtgctcttggatctggaccagcagaccctgcccggagtggcccaccaggt

SEQ ID NO: 520601 - DNA, 94 bp, Homo sapiens
aaccagcatttagagctgtttatgaagcactgagaaatgtgacaaacagcatgtttggtgcttcaagaaagaagtttgtagagggggtcgacag

SEQ ID NO: 520602 - DNA, 110 bp, Homo sapiens
tttggggttgccatcggcccgtagtatgtgaaaagtgcaagcggtcttctctgtcttctttatggccagtaaaattctccagaagagatttatggcagcctcactcccag

SEQ ID NO: 520603 - DNA, 50 bp, Homo sapiens
tcccgttctctgatttgcagcagcaaaccagtccagctacgggggcccag

SEQ ID NO: 520604 - DNA, 91 bp, Homo sapiens
tgatccgagaccctcgctcccccatcaacgtggagagcttgctggtgaatgtgctggtgtccttcgtgctccccttggcactaactgcttt

SEQ ID NO: 520605 - DNA, 75 bp, Homo sapiens
tatggcttccagtggaggcattttggggcagaatacagagatatggaatcagatgatgaaccagctggaccaatg

SEQ ID NO: 520606 - DNA, 100 bp, Homo sapiens
cctgcgggagcacctggagaggggccgcggaaacctggagtggaaggaataactgaagtgaagtgatggactccgatttggagagtagtaagacgtgaaa

SEQ ID NO: 520607 - DNA, 97 bp, Homo sapiens
agaagatctaaagagaacgtctctgaaatcaagtccggatgaaggttcactggttgaggacccagttcccatctttggatatagaggtcgatggtgg

SEQ ID NO: 520608 - DNA, 99 bp, Homo sapiens
aataagcaaagaaaccaaagacaaacgattagaagatggctatttcagaatagggaatctaagggaggaaattatcaactgtgcacaaggaaaaaaata

SEQ ID NO: 520609 - DNA, 100 bp, Homo sapiens
taccaggggcagagggaccactctgacaggtctctaattaacagaagatggcaaagcccagccacagcagctatgtccttcagcagctaaacaaccaaag

SEQ ID NO: 520610 - DNA, 90 bp, Homo sapiens
ggagaacttcaggaacctgctgtcagtgggtgcttgaagtttctgggaagtcggcatccaaccctggtgcttcccttggtgccagagctt

SEQ ID NO: 520611 - DNA, 105 bp, Homo sapiens
cgacttcaactatggcagcagcgtggcctccgccaccgtgcacatccgaatggggggggccctcagcctcttggccttgaacgggctgttcatcttgattcacaa

SEQ ID NO: 520612 - DNA, 100 bp, Homo sapiens
tggtgctgctgtccaggctggtgtgctctctggtgatcaagatacagatatcttaatgcaattcagacaatgtgtccacacattcttcgctatttgacta

SEQ ID NO: 520613 - DNA, 101 bp, Homo sapiens
acaaaatgtcaacaaattgatgggcatgtttgccacagtcgcagggatatcccagcgcgcccccgtgcactggtcggagaatgtgattggggcggctgtgt

SEQ ID NO: 520614 - DNA, 83 bp, Homo sapiens
ctcatcatgatggacttggagctgccgccgccgggactcccgtcccagcaggtgtggatgaggtcaccattgtcaacattttg

SEQ ID NO: 520615 - DNA, 100 bp, Homo sapiens
ggagacggcggaagcggagagcaacagcgcgccgagtcaagggtccagagaaggaggagaagttgagacaggcggtcaagcaggtgctgaagtgtgatgt

SEQ ID NO: 520616 - DNA, 82 bp, Homo sapiens
tacgggaagaagtacgaggcggacatgtgcgtgaggagcttactccacgggaacagcctctagataatctgagttgttgaaa

SEQ ID NO: 520617 - DNA, 75 bp, Homo sapiens
gccaccgagtccggaccggagactttggggcctaactaggttcagctgaatccagaacttggtgttaagaatggc

SEQ ID NO: 520618 - DNA, 128 bp, Homo sapiens
agaagatcatgtgatgttggagtaggagggtttatcttggtgactttgggatgctgggacaatgactcattcttcccaggacactggttcttgtggcattcaggaagatggaaagctttatgtggtgg

SEQ ID NO: 520619 - DNA, 90 bp, Homo sapiens
gtggatgactccttggttaaggagggcccaatgtaaaggctgttgctactgctgtggaacagatttacccatttgtgtttgaaagcagga

SEQ ID NO: 520620 - DNA, 100 bp, Homo sapiens
tgatgaaggttttgggagcctgcaagttgttgctccgcttgttggactgctgctgcaaaacttttctatcttcatcataaaagaggagaaacagataaaa

SEQ ID NO: 520621 - DNA, 98 bp, Homo sapiens
cggcctcacactagtatcgcatgtccactatccagaacctccaatctttcggttcaaaccttgtactactcagctgatcacaagctgcttgatgggaa

SEQ ID NO: 520622 - DNA, 73 bp, Homo sapiens
gtccctggagctggtgcacaggttccagggtgaggtggctttgaccccgggttgcccggccagcacgaccgag

SEQ ID NO: 520623 - DNA, 75 bp, Homo sapiens
gccagccttcaatgtgtcctacaccaggcagcccccaaatcccggcccagatgtaaaaaaagattggtctgacca

SEQ ID NO: 520624 - DNA, 74 bp, Homo sapiens
cgggaaggagcgggcgacccggtgtgtgggccagcggagctccggtagctacagcaagctgggtagcaggcaga

SEQ ID NO: 520625 - DNA, 100 bp, Homo sapiens
gaccctggaggtgggcaaggtgatccagcaaggtcggcagagcaaggggcttacgcagaaggacctggccacggcggagtctgaaatggccctggatgct

SEQ ID NO: 520626 - DNA, 100 bp, Homo sapiens
taagcatgaaaatattgttgccctggaagacatttatgaaagcccaaatcacctgtacttggtcatgcagctcctgtgggccaaagctgaccaactcccc

SEQ ID NO: 520627 - DNA, 75 bp, Homo sapiens
ggacctcctcacgagcccaagcaagaggaggaacgacgtagaagagaggaagagatgatgattcgtcaacgtgag

SEQ ID NO: 520628 - DNA, 100 bp, Homo sapiens
ggtctgggcttctctgaggcggcgagagatggtcaggtctggagctcgaccgggccagatctggaaagcatgaagactgggctttttttcctatgtctct

SEQ ID NO: 520629 - DNA, 100 bp, Homo sapiens
gcggggagtcgcgggcgcctccgcctcagattcatgatgttgctatcaaaagttgagaaattgtcagaagaaatcatggagataatgcaaaatttaagta

SEQ ID NO: 520630 - DNA, 90 bp, Homo sapiens
ccgcggtggacacctactgcagacacaactacggggttggtgagagcttcacagtgcagcggcgagtccatcctaaggtgactgtgtatc

SEQ ID NO: 520631 - DNA, 75 bp, Homo sapiens
cttcctggcaatgatagatacatcagtgtgggaagccaagcagatacaaatgcacacttgactgaaggaggacag

SEQ ID NO: 520632 - DNA, 74 bp, Homo sapiens
accatcgtatggaaggcattcagccccactactgtcaacactggccgagtgcagggattggccggacgggctgc

SEQ ID NO: 520633 - DNA, 75 bp, Homo sapiens
aggacatcaccaaggaggagtacaaggacatcctgaggaaggccgtccacaagaaacctctgcgccatgagagcc

SEQ ID NO: 520634 - DNA, 72 bp, Homo sapiens
gagacaacaccgagtatgagaaaagctgaaacctatcaacactcttcaaaatgcaatggaatgtaccacgga

SEQ ID NO: 520635 - DNA, 100 bp, Homo sapiens
ttttagggtcctttatatagaagggagagtagagctcaggccccggggcctccagcggcaccagcggagaccacggtgagctcgtcgtccggattgccag

SEQ ID NO: 520636 - DNA, 100 bp, Homo sapiens
agtctgaaagggaaaacccccattcattctggattggtggatctgaagtacaaaatattttccagcactgctgatggttcttcagaactcaggaatcgtg

SEQ ID NO: 520637 - DNA, 98 bp, Homo sapiens
atcctccgcaatgtgtccagcctcgtcgccacccgtgaggactacaggtgaaaggtgtagcagtcactcggcctacacccacagcatcgaccttgtga

SEQ ID NO: 520638 - DNA, 82 bp, Homo sapiens
tcttcctgaagcatgtggagtatgaggtttccagccagctacgagttccagggagctctgtcctggtgaccgtgcccgggtt

SEQ ID NO: 520639 - DNA, 101 bp, Homo sapiens
cttccggagcttctcagaagacagagggttttcttttgagttgatgacagtgcaattttggattgccagttcagtgagttttatcatacgcctccacctgg

SEQ ID NO: 520640 - DNA, 73 bp, Homo sapiens
ctcagcaccctcagattgagcttccccaacctctttaaggagatgtgggttccttcgtgctgaagttagtgga

SEQ ID NO: 520641 - DNA, 75 bp, Homo sapiens
tacagaggaatagtctacaaaggaagacttgtaacctggagaagaggacgccaggaaagcatgtgcagatgcaac

SEQ ID NO: 520642 - DNA, 75 bp, Homo sapiens
aagattttaaaaaaatcccatgaggagaaggcattctaatttagccacagatccatgatgtgcagttctctggag

SEQ ID NO: 520643 - DNA, 100 bp, Homo sapiens
ctttcatgatattcatgtgctgggtgggggacgtgtaccctgtctaccagcctgtggtggagttctacttcctttcccagtacgtgtcgccagccgactc

SEQ ID NO: 520644 - DNA, 83 bp, Homo sapiens
ctgggccttgaacattccgaaactgtcaagattggcaaggaaagaccacagcaagattctttcattcgtctcctcctagcctg

SEQ ID NO: 520645 - DNA, 100 bp, Homo sapiens
ctcctcggcactgtattctttacctgcttcccaatcccactgatgaggatcagcccatgcggggatctgatgagcttctttcttctggcatcattaacgg

SEQ ID NO: 520646 - DNA, 75 bp, Homo sapiens
caactgggccgtgtataggttgtcaaaattcacaaggcaaggtgactttgaaagcaaagagaaaccaacctttgg

SEQ ID NO: 520647 - DNA, 100 bp, Homo sapiens
gctgcggtgtctgctgctattctccgagcttcgcaatgagaaattaatggacttacgaaatgaatacctgcaagcggatgaggctaataaaagacttttg

SEQ ID NO: 520648 - DNA, 87 bp, Homo sapiens
cggctgtgctcagggctcgcgggtgaccgaaaggatcatgaactagtgacctggaaagctgcagaaccttggcctgaaaatgctaca

SEQ ID NO: 520649 - DNA, 99 bp, Homo sapiens
ggaaacaaggcttccagtgccaaggttattgccgacatggaggcccaggttcacaagttgagagaagaattgatcaatgtgaactcacagcggaaacag

SEQ ID NO: 520650 - DNA, 100 bp, Homo sapiens
aggcggacgaggcggaagaccgcgcgcagggcctgcagcgggagctggacggcgagcgcgagcggcgcgagaaagtggaaaacgaagctcattcccaacg

SEQ ID NO: 520651 - DNA, 75 bp, Homo sapiens
gcgggactgcggcggcgccggcctccggggagaaacgggaccatttggatgttgctgccatacttttcagcggct

SEQ ID NO: 520652 - DNA, 100 bp, Homo sapiens
aatcatttccttggctgataaccatatcctgctgtgggatttacaggaaagctcgagccaggctgtggctgatcccaaagaactaatcaagatggtcacc

SEQ ID NO: 520653 - DNA, 100 bp, Homo sapiens
ctcgaatatcaagaaatgcagtaaccagcatgtcaataaggggtcataggtggaaaagacatggtgtgatgaatgcagactctgctaccattttggctgt

SEQ ID NO: 520654 - DNA, 60 bp, Homo sapiens
tgaagactattgtggaagaagcatccattaagggttgtggacttcctgctgaaggccatc

SEQ ID NO: 520655 - DNA, 87 bp, Homo sapiens
gccgcagctggcgcagcccacgctcatgatcgacttcctcacccgcgcctgcgacctcggtggccaaggtggaatacgtcaggaaga

SEQ ID NO: 520656 - DNA, 90 bp, Homo sapiens
cccgttaagtcccccaaagatgagatttacctgtgagatgtttcatcccaacaaggtggtgggacacacgcaggggccactagatgggag

SEQ ID NO: 520657 - DNA, 75 bp, Homo sapiens
cggcttcatcaaggtcctcgagtgggactaaaaacagcccttgtagaaagagatgatttctcatcagggaccagc

SEQ ID NO: 520658 - DNA, 100 bp, Homo sapiens
tctccaaataccagctcgacaaagatggggttgtcctctttaagaagaagttcaccatgtctattctcaagatccatgccagggagatctttgactctcg

SEQ ID NO: 520659 - DNA, 100 bp, Homo sapiens
ggaaacaattgaagaggaggaagcaaatgaaggcgttgtggaccaccaaacagaactttctaatttagccaaggaagatttacagccagttacttactca

SEQ ID NO: 520660 - DNA, 100 bp, Homo sapiens
tttctatggattaaattttttgctgatggagagctggaatctatgggattttcagctcgatacaatttcacacctgtgtatttgccggctgccagattcc

SEQ ID NO: 520661 - DNA, 98 bp, Homo sapiens
ttgaaccaggaaggaaaattcctctacatctcagagacagtctccatctatctgggtctctcacagggtgaggtggctttgaccccgggttgcccggc

SEQ ID NO: 520662 - DNA, 76 bp, Homo sapiens
ttttgccagcgataatacgcctcagacggtcctaaaatctctacacttgccaaaaaacaacagtctttatgtcctt

SEQ ID NO: 520663 - DNA, 100 bp, Homo sapiens
aaataacccaaatgaatctgtaactgctaatgccgctaccaattctccttcatgtacaagagtgccacctaccatccaggccaggcagaatattgtgaat

SEQ ID NO: 520664 - DNA, 75 bp, Homo sapiens
aaaggaatgaacatgtatttaaccaagttccaacaaaagaatgctgccgcagattctgctcctaagtgtaggaga

SEQ ID NO: 520665 - DNA, 74 bp, Homo sapiens
ttgtaatcattcaaaggataaccaaatgtgccgtgatgtatgtgaacagatgcgacctaaagtcatgtggcacc

SEQ ID NO: 520666 - DNA, 102 bp, Homo sapiens
tgacgtcatgatgccccagcgggtgaggctgcaacacgaggctgccgttcagcacccgtcgagcggagaagaaatgggtgaccgttggtgacacatccctac

SEQ ID NO: 520667 - DNA, 75 bp, Homo sapiens
ctcagcatcagcggaggctctgctgtggtcctcacccccaagggtgctgatccccaacttttaggaaaaggtcga

SEQ ID NO: 520668 - DNA, 83 bp, Homo sapiens
tggaaacacatgaaagacttcctcaaggactacagtatgcacttaatgtccctaagcatcaagtgtacctgatttgtgaacct

SEQ ID NO: 520669 - DNA, 75 bp, Homo sapiens
ctggtcctgctgcaggtggcaagctctggttcggctttccagtttggcagcagcactacaaatttcaacttcaca

SEQ ID NO: 520670 - DNA, 100 bp, Homo sapiens
ggaagagagtgccacagacacgaccagtgaaactaacaagtacatcatctggctgccagtccataatctacataccccaggatgttgtcagagccaagga

SEQ ID NO: 520671 - DNA, 100 bp, Homo sapiens
gactcggctgattcatctcttgggtgagaagatcctgggcagcctccagcagggacctgtgacaggtaccagcctccgaacctcgccatctctaccctct

SEQ ID NO: 520672 - DNA, 88 bp, Homo sapiens
gatctcctttaacctgggggcagctggtgctcaagaccgaatcggctgggcttttggcctaggattagaaaggctagccatgatcctc

SEQ ID NO: 520673 - DNA, 106 bp, Homo sapiens
ggccggaggaccacaggcttccagtacgagctggttaggaggcacagggcgtcggacctgcacgagctgtctgctcaccatggatgatgatatcgccgcgctcgtc

SEQ ID NO: 520674 - DNA, 74 bp, Homo sapiens
gtacaatctaaagtggactgcattttgatactggctccaatactacagaatgaatagaaaaaatatgacttttt

SEQ ID NO: 520675 - DNA, 98 bp, Homo sapiens
tgttgagcctttttggcctggcttgtttgcaaagggtgtccgcaatgttgccagtgtctgtctgcagattggctacccaactgttgcatcagtacccc

SEQ ID NO: 520676 - DNA, 100 bp, Homo sapiens
atagagaacacgctgtgggctggcactgtggtcgcatcaggattcactccttctccagttgcacagccacacccttcagctggccttaatgttgactttg

SEQ ID NO: 520677 - DNA, 100 bp, Homo sapiens
tgtcactagcgccgcctgctcccgcgggcccgcggacccagctgtcaggcaagattgcagccttcttcgctgagtctctgcccagtgtgggagggcagat

SEQ ID NO: 520678 - DNA, 89 bp, Homo sapiens
gaagattgctcctggagcagttgtatgtgtagaaagtgaaatcagaggagatgtaactatcggacttatccagagggggctgcaggcga

SEQ ID NO: 520679 - DNA, 90 bp, Homo sapiens
cgggacctcctggaagccaaaaatggagttccactatatagaagaagatctttatcgaacaaagaacacattgcaaagcagaattaaaga

SEQ ID NO: 520680 - DNA, 107 bp, Homo sapiens
ttgctgtgaaaataatagacaaaactcagctaaatcctaccagtctacaaaaggtggatttgtttaaaaagagtcttctgttgattcctattcacctggaagtccac

SEQ ID NO: 520681 - DNA, 100 bp, Homo sapiens
agaaaatttactggttaaggagggcctgctttcttccccgggcgatgtgcagagatctttgccaggggtcaaagcgtcgggaagcttggggtccttcatc

SEQ ID NO: 520682 - DNA, 110 bp, Homo sapiens
aaacattggaaaagaaatcctgataagaactgctttgactcacaccacccggcaagaactgctcactacggctccctgccccagaagtcacacggccggacccaagatga

SEQ ID NO: 520683 - DNA, 100 bp, Homo sapiens
ggcccctgcacgtccgcaaccttctcagcgcctatggcgaggtcggacgcgtcttctttcaggctgaggatggattaattgcctctgaaggagccataag

SEQ ID NO: 520684 - DNA, 50 bp, Homo sapiens
caatgagaacatcacttggaccaaatgattccgagaccattcgactgccc

SEQ ID NO: 520685 - DNA, 82 bp, Homo sapiens
acttcagaattgcccttgggcaaaggagccttcacgtaaatgggtccagtcatgcctcccagtaagaagccagaaagctcag

SEQ ID NO: 520686 - DNA, 88 bp, Homo sapiens
cagaaaaccgacaaccttcccagaaagtccaagctcgtgggcaaactctttgattctacaatagctgatgagggaacatggactttgg

SEQ ID NO: 520687 - DNA, 74 bp, Homo sapiens
cggcgagcgcgagcggcgcgagaaacacatacccccggcctcatgagtacctgtccccagcggatctgcccaag

SEQ ID NO: 520688 - DNA, 75 bp, Homo sapiens
ggcaccgtcattctcactttccagctgaggacacgggtgtggacactgccagcggctgcagccgacttggaatga

SEQ ID NO: 520689 - DNA, 98 bp, Homo sapiens
cggaatcgcccgaccgcacacgttgccaccctgagaatagcctaacatggcagaccagagacagcgctcactgtctacctctggggagtcattgtacc

SEQ ID NO: 520690 - DNA, 98 bp, Homo sapiens
gtgggagcggccagctaggagcgctctgtggtgcctggggctgaacgcggctttctggtagacgttacatccaagaggaaataatccaggcaaggaag

SEQ ID NO: 520691 - DNA, 85 bp, Homo sapiens
cattgaactcaacagagccaacatttcatagcaccatgtgccggtggtggtgtgcacattgagccccggtatagacagttccccc

SEQ ID NO: 520692 - DNA, 88 bp, Homo sapiens
tccatgttcacactgggtgaaggaagctgaaaccacagacatgactgagtcctccatgaagagtgtgagcagctgctggaagaggagg

SEQ ID NO: 520693 - DNA, 74 bp, Homo sapiens
ttgtaagcatacatctgccactctctaggacccttgctggaaagagacggctttggaggcctggcagcagccag

SEQ ID NO: 520694 - DNA, 82 bp, Homo sapiens
ggagaggagcatgaatggagcaaaatggcggatcatgtgcagggcgccctgcgtccggcagaggaggcgagcatcccgctca

SEQ ID NO: 520695 - DNA, 83 bp, Homo sapiens
aacaactgtactgggagagctaggatggaaaacatatccattaaatggggtcacagtaatgaaaggcagtaatagaaataagg

SEQ ID NO: 520696 - DNA, 75 bp, Homo sapiens
cctgcacgaggtctatgagaacaagacggacgtcatcctgatcttggaactcctctctacatatgacatcgtgat

SEQ ID NO: 520697 - DNA, 82 bp, Homo sapiens
agagggtgttcgactgctagagccgagcgaagcgccatctccccggttgttgtgcacagccacgaaacaaaagaacagtggc

SEQ ID NO: 520698 - DNA, 75 bp, Homo sapiens
ctccgtttcaaggttaattcgaaagtcttgtggaagatctggaagaaacagtgccggtggtggtgtgcacattga

SEQ ID NO: 520699 - DNA, 95 bp, Homo sapiens
gatgatgctgactttgatgaaggagagcacacagctgctacaaatgccgtcagtgcagttttacagctgccgatactcagtcactactggagcac

SEQ ID NO: 520700 - DNA, 80 bp, Homo sapiens
cctggacgagttcctgctcaacaaggactgaagatggaggaggaaggcacagaagataatggcctggaagacgattccag

SEQ ID NO: 520701 - DNA, 83 bp, Homo sapiens
ctcagcggcgccttgcggagggaccccactgaacagatgggtaaggatggcaggggttatgtcccagctaccatcaagatgac

SEQ ID NO: 520702 - DNA, 100 bp, Homo sapiens
tgatctggataatgtggtcaaaaagagagtcccacgaactggctgggtatacagaaatgtccagaggccggagagcgtttcagatcacatgtaccggatg

SEQ ID NO: 520703 - DNA, 75 bp, Homo sapiens
aagcaatgcttgaggctccttacaagaagggtctgttcctggtttcccagatgcataaaggaagacatatccctc

SEQ ID NO: 520704 - DNA, 80 bp, Homo sapiens
gatccagcctgcggagcctgtggggcaggtaccgttttgcagagattcgctaccatcgccctgaggagacccacaagggg

SEQ ID NO: 520705 - DNA, 75 bp, Homo sapiens
agggcaacgagcacaacaggagctacgaggagttgattggctctaccagtgcacctggacagggaggaatcctgg

SEQ ID NO: 520706 - DNA, 82 bp, Homo sapiens
gtgtacccacccgagtcggccgtgcactgcagcctgaagccgcttacaaacacgcagatggcaagaagattgatggcaggag

SEQ ID NO: 520707 - DNA, 75 bp, Homo sapiens
tggagctgccgcggcgcagccagctacagagggccggagctggagatgtggtctctgggagtcactctgtacacg

SEQ ID NO: 520708 - DNA, 100 bp, Homo sapiens
gtgtctgttcgcatcttttagaatacgctggtgtcggtgcgcacagcgcttctcttagttctgcgcatattaaatttcctattgactacccctattcacc

SEQ ID NO: 520709 - DNA, 75 bp, Homo sapiens
ccccatgatccctaagaagacagcttgaacctagtacggtggggattgcagctgctgagcagggattctggaaag

SEQ ID NO: 520710 - DNA, 50 bp, Homo sapiens
aggacaagcagtttgttgccaaggtcggtgcccactttctggaggcagtg

SEQ ID NO: 520711 - DNA, 82 bp, Homo sapiens
gccgctgcctcaggagcggaacaacgtcggcgagcgggcctaaacccaccaagggacgaatgcgcatccactgcttagagaa

SEQ ID NO: 520712 - DNA, 83 bp, Homo sapiens
cctcaactgccagtgtctcctgcgtggttgcctgttcactctgatcgtagtattggaagttctggccaaggcaatcagacaag

SEQ ID NO: 520713 - DNA, 98 bp, Homo sapiens
gagaggcggccgggccccgcgctccgccccggcctagggccttgccccgggagcccgcgagggggtattccctcagcggatactacacccatccattt

SEQ ID NO: 520714 - DNA, 90 bp, Homo sapiens
ctctgatctacgaaagtcatgttacccaacaccggatttactggtttactgtggagtttgggctctgcaaacaaggagactccataaagg

SEQ ID NO: 520715 - DNA, 90 bp, Homo sapiens
gggtgctgggacttcccgtccgcggcgtggaggacaagtcattacgttttcatttctcacaactgggctgagcacaactgaaccatgggg

SEQ ID NO: 520716 - DNA, 97 bp, Homo sapiens
ctgtcagagcctcatggagtacgagcttgggaaagtcgaggtgacggtgtttgaccctgactccctggaccctgatcgctgtgagagctgctatggt

SEQ ID NO: 520717 - DNA, 90 bp, Homo sapiens
cgccggttcgcgtctctctgctgcggcgcggggaccgctgtgctctcgcaggattcctggttttcaagcctgagctgatctctcggctgg

SEQ ID NO: 520718 - DNA, 82 bp, Homo sapiens
tgggactctgcacactcttcggcctgacgcccaccctcaatggcggagtcatgtgctgttcctggggcttggatgatgtagg

SEQ ID NO: 520719 - DNA, 82 bp, Homo sapiens
ctgctcttccaacaccagtggaagatgatcacatcccaggcttgaagtagaaaatgccatgatgagaaaaactattaaaaaa

SEQ ID NO: 520720 - DNA, 74 bp, Homo sapiens
ctaaatcttctatcaaacagattgggaacatctcagtttttctttggagatacatctagcctgattcctgtcag

SEQ ID NO: 520721 - DNA, 75 bp, Homo sapiens
gcctgggagcttgctgcagcttcagtctgcccagtcaagcccgtccaactccagctccagctcagactccagctc

SEQ ID NO: 520722 - DNA, 74 bp, Homo sapiens
gcctgttctcgggctgtttggcggaaacaaagggtcatcctttctagaaagagaaccgctgtgctatcaggagg

SEQ ID NO: 520723 - DNA, 50 bp, Homo sapiens
cggcgagcggttccttgtgggctaggagcagacaagatggagacaaattc

SEQ ID NO: 520724 - DNA, 95 bp, Homo sapiens
gaaaatgcgctcgggctggaccagcagatgccatggacaatattaccaggcagaaccaattctacgatacccaagtcatcaaacaagaaaacgag

SEQ ID NO: 520725 - DNA, 75 bp, Homo sapiens
tgccgtcttcctatccttacccgacctcagatgctcccttctgctcctggacgcgtgaccaaaaccaaagacggc

SEQ ID NO: 520726 - DNA, 98 bp, Homo sapiens
gagcgccccgccatcgtcccgtctgaagatgatgagaaactgaaaaagaggaaggagcgatttgggattgtcacaagttcagctggaactggaaccac

SEQ ID NO: 520727 - DNA, 90 bp, Homo sapiens
ccccagagtcagaagccgctatgcttcctggacagcttgcagaaccgacacattcagctaacgtattttagcaggtggagtgaggttgaa

SEQ ID NO: 520728 - DNA, 74 bp, Homo sapiens
ttaattaagcactttgatgatttaagaaatcttggtatggtttaggaatgatttattacaagcaagaaaaattc

SEQ ID NO: 520729 - DNA, 95 bp, Homo sapiens
gtctggagcaaggaaaagagccctggaatataaagagacatgagatggtagccaaacccccaggtgaccaagaatatggcccaggtgaccaaagc

SEQ ID NO: 520730 - DNA, 74 bp, Homo sapiens
gtgcgggctgctgctccagagggcggagggctgaagcagtgcctactcgacagaaccggtcatcgtacaaagaa

SEQ ID NO: 520731 - DNA, 100 bp, Homo sapiens
atttggtaatttagcagaacttgacggaaatggagagctggatttctccacttttctgaccattatgcacatgcaaataaaacaagaagacccaaagaaa

SEQ ID NO: 520732 - DNA, 100 bp, Homo sapiens
cgtgtctcagtccacccaaggtctcctcggatcgcctggagaggcactcggacctggtcttgggcgtctttggtactggcttttttaggggtctgcctgg

SEQ ID NO: 520733 - DNA, 90 bp, Homo sapiens
gctggcgcggcggaatccagggccgacccgggccggaccgaccccaggcggcggaccatggccaacctggagcgcaccttcatcgccatc

SEQ ID NO: 520734 - DNA, 98 bp, Homo sapiens
ggtgcgggcgagcgtcgacccgggccgctcctggaggaggaggtgggagtttgatgccgaccgcgatgaggatgaggtgttctatgacatcagcatgg

SEQ ID NO: 520735 - DNA, 100 bp, Homo sapiens
gaacctggctctgcttacctggtggtgaagagattcttaaccgctgacacaattaaacactgcagtggttgtctgcattcaaaagagcattctattaaag

SEQ ID NO: 520736 - DNA, 75 bp, Homo sapiens
tacccctttgaattaattatggctagttgtctgctggttctcagcttgaagaagattctgcagtccttattgatc

SEQ ID NO: 520737 - DNA, 75 bp, Homo sapiens
gtccttcccgtcagcctggcatttgacaaatgtacagcttgttcttccaaaagtcttgctgtgtggcccaggctg

SEQ ID NO: 520738 - DNA, 100 bp, Homo sapiens
actgagcctgttggaggaactggcccggaaacaggaggacgagcgggacggtatgcgggccatcctggggtcctacgacagcgagctgaccccggccgag

SEQ ID NO: 520739 - DNA, 100 bp, Homo sapiens
gagaaaagcgaaaagtagttatacccccttcatttgcatacggaaaggaaggctatgtggaacgttacaatcctcaggaaaacagatggcacactatagc

SEQ ID NO: 520740 - DNA, 101 bp, Homo sapiens
cctaccatgtcagccttcccagtagctggaactacagggtgttgaaagcagcaggggcctagaagacattaaaccgataccacagaaatacaaaggatcat

SEQ ID NO: 520741 - DNA, 83 bp, Homo sapiens
gggctgggaacccgcggtggagcgggacacgaacgtgggggatatgagactttctactcggaatatcctgagtgttgcgtgga

SEQ ID NO: 520742 - DNA, 124 bp, Homo sapiens
cgagtatcaggccagtgcgtttgggaatgtcaagctggtggtccacgactgtcccgtctggatacactgcctctaggactgggacagatagccactgagtacctgcttcaaatcaccctgcacg

SEQ ID NO: 520743 - DNA, 90 bp, Homo sapiens
caaagacatcttctggtcagagatacttcttaaagatgcatgtggtccatattctccggatgagtgcatctctttgcctgtttacacaag

SEQ ID NO: 520744 - DNA, 100 bp, Homo sapiens
ggctggacctacatgcttcctgctgtggctgtctcggaacccgtggtcctccgcttcataggctgacccgcggctgattgagtccctctcccagatgctg

SEQ ID NO: 520745 - DNA, 75 bp, Homo sapiens
cgcggtcttcgtggtgttcgtggcaggtctgcgcaggcatggcactaagtgtcccatggcacatttggccctcat

SEQ ID NO: 520746 - DNA, 71 bp, Homo sapiens
gtggaaagacttcacgtcttgccgaatgaaagcctcccgaggagcccagacagctgcagccacagctcccc

SEQ ID NO: 520747 - DNA, 100 bp, Homo sapiens
cacccgaggagttccgcccctttctggcaaagatgagggggattcttaagcctcttgttgctgtaccacatagaattcactcaacaagtagaaacgtgag

SEQ ID NO: 520748 - DNA, 90 bp, Homo sapiens
aagcagtgacggaggagcttgtaccaccggcccagtactacggggagattggcatcgggacgcccccccagtgcttcacagtcgtcttcg

SEQ ID NO: 520749 - DNA, 122 bp, Homo sapiens
tgctgtctccggcccctccccagtcagggggcccccagtgtggggacagaagggatgtgtttggccaaatgggagagtggttacaacacacgagctacaaactacaatgctggagacagaag

SEQ ID NO: 520750 - DNA, 75 bp, Homo sapiens
caatgggtagcctcaccatgaaatcacagcttcagatcactgatttggtgcttccagatgtgagttatcaggtgg

SEQ ID NO: 520751 - DNA, 83 bp, Homo sapiens
tgtgctgagcgttctaaaggaaggcgtccgttggccttcgtacccgtcttgattgaggagtcagaaataccatcagaggaggg

SEQ ID NO: 520752 - DNA, 87 bp, Homo sapiens
gcgcgagcgccccgccatcgtcccgggatcgcttacacctgagacgaactacagaacagcacgtaccagaggtggaagtccaagtca

SEQ ID NO: 520753 - DNA, 90 bp, Homo sapiens
tggataccaaggaagagaagaaggaacggaaacaaagttattttgctcgggagatgttaatctctgtggccctaggccaggtgttatccc

SEQ ID NO: 520754 - DNA, 75 bp, Homo sapiens
gcctggtgccccgcccaggaccctgacgtgggaagccatggagcagatacggctggagtgcagtggcacaatctc

SEQ ID NO: 520755 - DNA, 100 bp, Homo sapiens
atgagctcgatgcagctggccccccaggagctggcccgctggcgggaccaggaggagaaaaggatctaattacttgtttggacactgcatccaatttttt

SEQ ID NO: 520756 - DNA, 101 bp, Homo sapiens
gaaaaacttccaagcctgtatcaactctggtatggacacagcttctagtgttgctttggatcttgtggaaagtcagagaggtgattacagtgcgtgttcag

SEQ ID NO: 520757 - DNA, 98 bp, Homo sapiens
aatccgggggcaaggccaaaaagaagaaacacatttactccccaataattgtacgggaggtgatcgaggaagaagaaccaagtgaaaaatcagaggcc

SEQ ID NO: 520758 - DNA, 101 bp, Homo sapiens
ctccgggtcttccagagcgtgaagatcaagatcgataaagagttctatctgtcttctacgcgggaaaatctatgatgctctagataaccgaaccctggcta

SEQ ID NO: 520759 - DNA, 120 bp, Homo sapiens
aggggccactgctgggccctgaggctgcaccaagtggcgaaggagccggctccaaggtgtacgtgaacggagagtgggtgaccaacatcagcgagggaggcagcttcggggagctggcgc

SEQ ID NO: 520760 - DNA, 95 bp, Homo sapiens
actggctgccagtctcctatgtcccctattatctcccctgcccagagatcttgcgtgagattcaacattttggggtgaaaatcagcatagttgaa

SEQ ID NO: 520761 - DNA, 75 bp, Homo sapiens
agacaaagacccagtgaacaaatccgggggcaaggccaaaaagaaggcctgatggagagaagaaggcatatgttc

SEQ ID NO: 520762 - DNA, 75 bp, Homo sapiens
ctgtggaagaccacctgagtcaccagttaactatggtagcccacccagcattgatcaaagtggtcaaagcgttcc

SEQ ID NO: 520763 - DNA, 82 bp, Homo sapiens
tgtaatcccaacactttgggaggccgagtgtcctctatttctccatccaccgctacgagcagggtaggttctggccccacct

SEQ ID NO: 520764 - DNA, 74 bp, Homo sapiens
caagtgcaacaagtcccacttccgaaaccacaagtttgccgatgagaccagtatgatgtctgtgccatttgcct

SEQ ID NO: 520765 - DNA, 100 bp, Homo sapiens
atgtttggatggagctttgtctttgaggactttgtctctgatgagctgagaaacaaagccacccagccaatgaagagttcaaggcagcttgcctcgagat

SEQ ID NO: 520766 - DNA, 82 bp, Homo sapiens
gaaagtgcagatcgccgtggccaacgcgcaggagctgctgcaggtccgcgggagagctgtggggcttggtgagtgtttcgtg

SEQ ID NO: 520767 - DNA, 75 bp, Homo sapiens
agcagccatagttgtatatgatatcacaaatgagggtttctccaaagaaattaaaatacctaaaaccaaatatgt

SEQ ID NO: 520768 - DNA, 74 bp, Homo sapiens
cccaatcccccactctttccgccctaatggaggtctccagtttcggtggtcattgggactcccacacttaaaca

SEQ ID NO: 520769 - DNA, 50 bp, Homo sapiens
tattactggcagcatgtatatcttttgtggagtctttcattttggatcag

SEQ ID NO: 520770 - DNA, 100 bp, Homo sapiens
gcgcggtgtgggctttgggaacctgactggctgggccggaccgttaggtgcgttcttcacaaaggtggtggatgtgggtgccacctctctgaagcttgag

SEQ ID NO: 520771 - DNA, 83 bp, Homo sapiens
cagaatgcttctcagcagcaacatccccaaacagcggcgtttcacggtggcacatacatggaggcgtctaaactggatccagt

SEQ ID NO: 520772 - DNA, 98 bp, Homo sapiens
cacggacctgggacgcggagtcctgaagccggcggacggttttcgtacgggcggccgtgcgcgaggcgaggtactccaaagattcaggtttactcacg

SEQ ID NO: 520773 - DNA, 100 bp, Homo sapiens
taaatggagcaacaaggctgactataagaggggaagagatgcccgagtggtaaaagacatggcaacaggaaagtctaagggatatggctttgtctccttt

SEQ ID NO: 520774 - DNA, 82 bp, Homo sapiens
aaagcgcctttctccaggctcaaaagagtatcagaggagttgaagccaaacagccaaattctgccattaggaagtgtgtaag

SEQ ID NO: 520775 - DNA, 90 bp, Homo sapiens
gcagttctccaatgatatctacagcacctatcacttgttccctccaagacaactgaatgattcccaacctgctgagcatccgcacaccca

SEQ ID NO: 520776 - DNA, 50 bp, Homo sapiens
cttagaatctagcattcgtagtgtgtttgtcactgtgcagaccatttctg

SEQ ID NO: 520777 - DNA, 82 bp, Homo sapiens
gctcttccggaagatcaactgcagactgtcctattgcatctcaagcccaattctgtggtgttcttggtcacacatttatgga

SEQ ID NO: 520778 - DNA, 58 bp, Homo sapiens
ctcaatcttgtttgctttgacaagctccagaaactaaaacgatcactttctttcaaga

SEQ ID NO: 520779 - DNA, 48 bp, Homo sapiens
atgacatcgaagaggataaactgtggttatcactaggctaaaactgga

SEQ ID NO: 520780 - DNA, 100 bp, Homo sapiens
ataaatacctttgatctaagggttcagcctttcaatgtgacacaaggaaagtattctacaggctgctttgaatgctgcatcaagtgtctgggaggagtcc

SEQ ID NO: 520781 - DNA, 100 bp, Homo sapiens
cgcggcgggacctggccagcgctgctggcgggcgttagggatgaccgagtgggagacagcagcaccagcggtggcagagaccccagacatcaagctcttt

SEQ ID NO: 520782 - DNA, 100 bp, Homo sapiens
ggtagacctggaggtgaagctgcggatcgcccaagaaaagccagtgaaggtttgaagagtataaacccaggtgagacagcaccctctatgcgactgctgg

SEQ ID NO: 520783 - DNA, 100 bp, Homo sapiens
gatgacttggttacagtcaaaaccccagcgtttgcagaatctgtcacagagggagatgtcaggtgggagaaagcggagctgcccaagccctccatctcca

SEQ ID NO: 520784 - DNA, 100 bp, Homo sapiens
accagaggtacaggctccttcccacttcttagcagcttttctcactctgaggcctcccatcttagagtaaagcccagacggagtcttgctctgtcaccca

SEQ ID NO: 520785 - DNA, 75 bp, Homo sapiens
gtgtaacttttgatcgaactggcagacggatatttactgtggtttagattagaatccaaacaaggaaaacgaatc

SEQ ID NO: 520786 - DNA, 100 bp, Homo sapiens
cggcggcgcccggatgggcagctgagatgatgaataaggtatttggaggtactgtgcacaaaaaaagtgtcagagaagatggagttttcaacattagtgt

SEQ ID NO: 520787 - DNA, 83 bp, Homo sapiens
acaaattgtacatttgcccattctcaggaagagcttgaaaaatgtgtatatctcatgattgatatggagaaactagtcatggg

SEQ ID NO: 520788 - DNA, 90 bp, Homo sapiens
tctaaaaatgaaccaagaaaaacaaacgtcacacatgaagaacacacagcggtggaaaagaaataagcgggttttgaaaacaaaaaaaag

SEQ ID NO: 520789 - DNA, 78 bp, Homo sapiens
tgagtcccggggtaggggtctcccgcgagacatccacgacagcgatggcagttccagcagcagccaccagagcctcaa

SEQ ID NO: 520790 - DNA, 100 bp, Homo sapiens
gcggtgaagccccagcgccgggccaaggccaaggccagccggactaaaacaaagggaatgaaggatggcagcatgccgtgcattaaaagctgttttggta

SEQ ID NO: 520791 - DNA, 100 bp, Homo sapiens
tctccctctcctgccagccaagtgaagacatgcttacttccccttcaccttccttcatgatggtgttgctctcttgccattcgtggatgagcgaaggcta

SEQ ID NO: 520792 - DNA, 100 bp, Homo sapiens
ggcgtgtttgcaggcttccactacccacaggacctggcccggcccctcttccccagcacagatgctggaatgggagatggctgtgagagagaaggaggtg

SEQ ID NO: 520793 - DNA, 89 bp, Homo sapiens
ttgagcggctggcgcggttgtcctggagcaggggcgcaggtaaagctttccagtttgaatttagatgatcacgcaaagaagaaattaat

SEQ ID NO: 520794 - DNA, 82 bp, Homo sapiens
gtggaatacttagatctcgacttagattctgggaaatccacaccaccacgtaaggtgctgactgggttacttttttaaacac

SEQ ID NO: 520795 - DNA, 75 bp, Homo sapiens
cccgagttgctgcagcagcaggaggaggaccgcagcaagttgaaaacaccacacactgtgagtttgcctacctgc

SEQ ID NO: 520796 - DNA, 75 bp, Homo sapiens
ggggcctccgcagcgacaacatggaggccgtgaagaccttcaatagcgagccttgccttacacccagacaaaact

SEQ ID NO: 520797 - DNA, 80 bp, Homo sapiens
ggtggacgtggttggtgattggcaggatcctggtatccgctaacagccgcggcgagtcctttgcacatgttggcaacaca

SEQ ID NO: 520798 - DNA, 80 bp, Homo sapiens
gttgccggagctgagaccgggcggccacagtccgcagggatgaacctcgagttgctggtgacattctgaaagttcccaaa

SEQ ID NO: 520799 - DNA, 75 bp, Homo sapiens
cccagaagaggagagaactgctgtgcgtctgaagtgatggcggagggtctgggggtggtggcatctcccctaaag

SEQ ID NO: 520800 - DNA, 100 bp, Homo sapiens
tctttgtccagtgcttcggccttggtcccagcgccttcccacggagcagcactcttcaccctgcacagccttgttaggaacttgctactaccagcaccat

SEQ ID NO: 520801 - DNA, 100 bp, Homo sapiens
gaacaagaagagtgggcggcctgaagagctggtgtcctgcgcagactgtggacgctctggttttttgcatgtctgacacccatgactccacctggacctt

SEQ ID NO: 520802 - DNA, 82 bp, Homo sapiens
gagcccatggcatcatagttgtgtatgatgtgacagatcagtttggatgctcttccaagagtcacatgtccaaaccatccag

SEQ ID NO: 520803 - DNA, 98 bp, Homo sapiens
cggatgaggaaactgaggcctggagaggttaaagagacccgttcagagtcctacagtggcaggttgtacatcctggagacctgaagaattctgttgaa

SEQ ID NO: 520804 - DNA, 139 bp, Homo sapiens
tgggctcagcagcagccaataggacatgatccaggaagagcagtaagggactgagctgctgactaatagggatgccaaaggaaaaatatgatcctccagatcctcgcagaatttataccatcatgtcagcagaggaggt

SEQ ID NO: 520805 - DNA, 73 bp, Homo sapiens
gtgtctattattgacacagaattaaaggttaaagactcacagttccttcctgtgtacagcccttctgaggagg

SEQ ID NO: 520806 - DNA, 75 bp, Homo sapiens
ctccgaagatgggggatttctacgacccggagcacccgacccctgatgctggtcccaaaggcgataacatctatg

SEQ ID NO: 520807 - DNA, 96 bp, Homo sapiens
gtcgtccgcggctccggtcacgtcaccgtgctgaccggttccctgatgtgttacctgcttctgctactgatccaaactgcagaacttctcattcat

SEQ ID NO: 520808 - DNA, 82 bp, Homo sapiens
tgatcaggtggaacagattcagaaggagcaggattaccaaagggagcctccaaaggccgctgcttctagttggccatcttgg

SEQ ID NO: 520809 - DNA, 80 bp, Homo sapiens
gagaccatcgccaatgagttcagcgaccggtgcaccccgtcaaaatgcagatcttcgtgaaaacccttaccggcaagacc

SEQ ID NO: 520810 - DNA, 100 bp, Homo sapiens
ggactttcttccagcttctgctgtccttctttgtggagagcaaggcgaccatggccttgctgggtaagcgctgtgacgtccccaccaacggctgcggacc

SEQ ID NO: 520811 - DNA, 82 bp, Homo sapiens
ttggaagcctggttttggtaaaattacagaattggccaagcaattctgtggtgttcttggtcacacatttatggagtttctg

SEQ ID NO: 520812 - DNA, 97 bp, Homo sapiens
tggcgctctacgtgctgttcctcgccgacgaggagttcgacgtggtagtgtgcgaccagcatgcatatgcgctagaacttctatttgatcagttgca

SEQ ID NO: 520813 - DNA, 74 bp, Homo sapiens
agctgtctggcatgggcctctccaccgtgcctgacctgctgctgccactgtgtccacaggatgaaatgtccgag

SEQ ID NO: 520814 - DNA, 74 bp, Homo sapiens
gggcaaggactacccctttgccaggttcaataagatggattaccgggccttggtgcatgagcgagatgaggcag

SEQ ID NO: 520815 - DNA, 90 bp, Homo sapiens
cttttgcttgcagttaggtcaagtggagccattgacctcatcaacaacctgctgcaggtgaagatgcgcaaacgctacagcgtggacaaa

SEQ ID NO: 520816 - DNA, 100 bp, Homo sapiens
gttaatactttcaaagttcttacaaggcctgtgcctactacactggcacaagtggatagagaaaagatctatcagtggatcaatgagctgtccagtcctg

SEQ ID NO: 520817 - DNA, 100 bp, Homo sapiens
caggcacttatggccatttcagccaatcaacaacccctccccgtcgtaaacgctgaggaatgatgtggcaagaatgccatgatgttctttaaaaaaattc

SEQ ID NO: 520818 - DNA, 75 bp, Homo sapiens
tttctatgtactgcgcctggatgtggccagctcagaattctgcaaatgcagattttgcaaactttgatgcatttg

SEQ ID NO: 520819 - DNA, 101 bp, Homo sapiens
cagaagaggaggcagctagaagagtcccaggactcgctcagcgaagagctggcaaagctccgagcccaggtgacagaggccaagcaagaattaataaccta

SEQ ID NO: 520820 - DNA, 53 bp, Homo sapiens
ctcctggggacttctccctctctgtcaaaaaatgtggacacagacttgccagg

SEQ ID NO: 520821 - DNA, 75 bp, Homo sapiens
ccagactgtgcgcgtttgggatatttctggctggctacagcaaacatcattcaagatgtccagcaaagggagcag

SEQ ID NO: 520822 - DNA, 96 bp, Homo sapiens
ttgatgagattattattccccttaggcctctgagtacacctgaaccccccaactcaagcaaaaccggagatggggaaggggaggagttacagcccg

SEQ ID NO: 520823 - DNA, 75 bp, Homo sapiens
tctggatagcaccttatggacagtctatcaggtgtttgaaagtgtggctaagaagtatgatgtgatgaatgatat

SEQ ID NO: 520824 - DNA, 75 bp, Homo sapiens
aatgtccatccagttgggagctatgagtcctctgaaatgaacagcatagaaagaccacagcaagattctttcatt

SEQ ID NO: 520825 - DNA, 75 bp, Homo sapiens
cagattcgcagtggtcgcttcttctccttggtaagtaaggaggtctctgtaccatggctcgtacaaagcagactg

SEQ ID NO: 520826 - DNA, 50 bp, Homo sapiens
cagagattcatatgagagttatgatccaaaaggtaattctggcacttgga

SEQ ID NO: 520827 - DNA, 100 bp, Homo sapiens
aagagaatggctgtgctgacttttttatccgtggagagcgactcagggacaaaatggtctccgaattcaatcctttgacgttcaccagcgtgatcgaatg

SEQ ID NO: 520828 - DNA, 88 bp, Homo sapiens
acgagatcatcctctccactgcccgcatgaaccgggtcctcagcttccacagcgtgtctggagcaggaaaggacaaggagtccccgaa

SEQ ID NO: 520829 - DNA, 100 bp, Homo sapiens
ccatcattgatgtggtgcgatcgtatctccagatgaaatggccactgcttgatgtccaggcagggagcctccagagtagacaagccctcaaggatgcccg

SEQ ID NO: 520830 - DNA, 100 bp, Homo sapiens
gcaaaccgcagtgacccagtcaccctggatgtcctctggttcacagtgtccaccgtggaggaggagaggactctgaaccctcggctcaccctcagctgtg

SEQ ID NO: 520831 - DNA, 100 bp, Homo sapiens
agatgataaagatgatgatatccttctcaaccttgtgggatgtgaaaactctgttactgaaggatgtgtgctgtgtttggtggaatttattgtcttcgcc

SEQ ID NO: 520832 - DNA, 100 bp, Homo sapiens
cttttcttatgctgggatgtgccttagaggattatgggccactgcagaacaaattagacttgcacagatgatttcggaccataatgatgctgactttgag

SEQ ID NO: 520833 - DNA, 100 bp, Homo sapiens
aatttctgtgtgaagaacatcaagcaggcagaatttggacgccgggagattgagattgcagagcaagtattgcctaagtgtaatcttgaacatgggcggt

SEQ ID NO: 520834 - DNA, 74 bp, Homo sapiens
gtattcagcatagctattcctgttgatggtgatgaagacaggggccaccttatcttagttccagaatttagtct

SEQ ID NO: 520835 - DNA, 100 bp, Homo sapiens
agtcggctgagggaaaagcgaggcaaggcaggcggttgtattccctgaatgactataaaccacccatttcgaaagcgaaaatgacccaaattactaaggc

SEQ ID NO: 520836 - DNA, 82 bp, Homo sapiens
ggaccttaaaatacccgcaacagccccttcgtcccaagtgtggacactgccagcggctgcagccgacttggaatgacctggg

SEQ ID NO: 520837 - DNA, 75 bp, Homo sapiens
cgcagtggtcgcttcttctccttggtccacaatgtgtccttcgcctttgagctgatgctggacggaggcctcaag

SEQ ID NO: 520838 - DNA, 101 bp, Homo sapiens
gcgcagatgcgggccctgctggaccagctcatgggcacggctcgggacgccagctgaggtgggtgtcctggttggcaaagaccggtcaagtttttacgtga

SEQ ID NO: 520839 - DNA, 80 bp, Homo sapiens
gagaagacggcggtcgtgatcgacctgggagaggcctttaccaagatgaaaactttcggaagagaaagttgcctgtggta

SEQ ID NO: 520840 - DNA, 100 bp, Homo sapiens
agaaggatagacttggctttgagaaaacctttccaacctatgagagaaagagatgtgaagaaagaagacgggtcatagagatgctacattgctgattttg

SEQ ID NO: 520841 - DNA, 50 bp, Homo sapiens
caagtgctgctgccccgaggcccctggagcagttcaacatgatggagaac

SEQ ID NO: 520842 - DNA, 74 bp, Homo sapiens
ggagtcaccacatcagatacatcctactcagatatggctgctggatcagagattcatttccattgaaagttcgt

SEQ ID NO: 520843 - DNA, 100 bp, Homo sapiens
ggccttcccatcagcacagttcgtgaggtggctttactgaggcgactggaggcttttgagcatcccaatgttgtccggactactgttcgaagatttttgg

SEQ ID NO: 520844 - DNA, 88 bp, Homo sapiens
gagtacagcaagcagatgcagagatttgtggacatcggatacccaaggagacgaagctgaagcaggagaaggaggggaaaattaaccg

SEQ ID NO: 520845 - DNA, 83 bp, Homo sapiens
gggggccgctctgggatcccggccaccagcaattgtccgaataccgtagcagtaggcaggacagttccaattcaacaaaaacc

SEQ ID NO: 520846 - DNA, 75 bp, Homo sapiens
tcttgctgcagcttgcttcctccctcaggtatgaagttaagtgattcatcagaaagtggcatgctgtcccgcctg

SEQ ID NO: 520847 - DNA, 101 bp, Homo sapiens
catgatattgtacgatttctggtacagttagatgactacaggtgattttacaacgagatgctgctctccatagggatgctcatgctgtcagccacacaagt

SEQ ID NO: 520848 - DNA, 100 bp, Homo sapiens
gggggtcactgcgacgttcacagaggaacactgccggggcccaaccacaagacgactcaataggaggaagatgccttcaattaagttgcagagttctgat

SEQ ID NO: 520849 - DNA, 101 bp, Homo sapiens
gaaaatgtatggatacaacttacgtttgatgaaagatttgggcttgaagacccagaagatgacatatgcaaggtgctgataagactgtgaaaggcccagat

SEQ ID NO: 520850 - DNA, 73 bp, Homo sapiens
gatgaaaagaatgaacactgtccttcaaaacgaggaggagctaacatttgagatgcttgtactggaaccccgt

SEQ ID NO: 520851 - DNA, 80 bp, Homo sapiens
gaaccatccacacatcataaagctttaccaggagcagcagccaagctggacagatgacctgcctctctgccacctctctg

SEQ ID NO: 520852 - DNA, 74 bp, Homo sapiens
ttacgtctgcggaagtgcagctgcctcagttcttagcgcagagcaattgtatgatggctatgatgaagagtatg

SEQ ID NO: 520853 - DNA, 141 bp, Homo sapiens
attagagcgagcaaccaatatagaagttctgtcaaatacatttcagttcactaatgaagcccgagaaatgctcctgaagatctgtataaggacttcctgaccttggagcatctcatctgttacagcttccaagtggctaag

SEQ ID NO: 520854 - DNA, 98 bp, Homo sapiens
agctcctcaagaatctcgtgctcaccggtttctcccacatcgacctgtgaagatagtgatccggggagacaggaacacgggcaagacagcgctgtggc

SEQ ID NO: 520855 - DNA, 102 bp, Homo sapiens
aaagcaaccaagcaagaaaaagaggatcatctatgattcagggcttccgttacaagatgaggtctgtgtatgctcacttccccatcaacgttgttatccagg

SEQ ID NO: 520856 - DNA, 82 bp, Homo sapiens
ccgagaagtacttaaaaaaacattggaattctgcttatctaggtttgcagtcctgggaagacattgataaactaaattcatt

SEQ ID NO: 520857 - DNA, 100 bp, Homo sapiens
ggggtttgctgcatactatgttgccacaggaaggccaggagaatgtcgagatcctcccctctggggagcgaccgcaggccaaccagaagcgaatcaccac

SEQ ID NO: 520858 - DNA, 98 bp, Homo sapiens
ggtagctgggatgttagggctcagaaactcattttaaccagcagtgccagtgtcatctttgagggcgtcgatatcaagaatggaactgaagaccttcc

SEQ ID NO: 520859 - DNA, 60 bp, Homo sapiens
cagtgtggctctggatagcaccttatggacagttgttgacctcctgtactggagagacat

SEQ ID NO: 520860 - DNA, 75 bp, Homo sapiens
cgcttcctggagttcacgactctgagtgctgattgcagagggaatggcatacatcgagcggaagaactacattca

SEQ ID NO: 520861 - DNA, 73 bp, Homo sapiens
tgtactggctattggaaggaggagattctgaagataaggagtactatactggcaattgctggagaagattttg

SEQ ID NO: 520862 - DNA, 100 bp, Homo sapiens
caagaggaatttgaaggctgtttattttgtacatcccacatttcgttcaaagtgaccaaagacttgaccactcaaagtccagctccccagaacactgctc

SEQ ID NO: 520863 - DNA, 100 bp, Homo sapiens
ccagttttctctggatgacgtgggtttagatgtagattctctggtcattgagcatatccaagtgaacaaagcacctaagatgcgccgccggacctacaga

SEQ ID NO: 520864 - DNA, 100 bp, Homo sapiens
aaaaattaaaaggagagagattcgagagatgtagaagaattacagctaaaacttacaaaggctaatgaaaatgcaagttttctgcaaaaaagtattgagg

SEQ ID NO: 520865 - DNA, 100 bp, Homo sapiens
ttcagcatcgagccttgctgtgggtccctgctgggaggaagacagcgaacccctcccaccacaggatgcccagacctctgggtcactgttgcactacctg

SEQ ID NO: 520866 - DNA, 100 bp, Homo sapiens
actgtgtggagagggactgacgtgtttggagggaaatgggaatgtacacgataattaaagagtaaagttgtgctcaacgaagtccattggaatattaagc

SEQ ID NO: 520867 - DNA, 100 bp, Homo sapiens
cgatgatgtccctgcagggaaggtcacgactgctgaatatgagacgatctgcagcaccaagtcagttgcaggggaattccttcaaaaaaccaaaatttat

SEQ ID NO: 520868 - DNA, 75 bp, Homo sapiens
ggagactgcagttctctatccttcacacagataatgtacaacggccagccaattaccaaaatggcctgtggggct

SEQ ID NO: 520869 - DNA, 90 bp, Homo sapiens
tgacgcctcacaaacctccacattgcctttccgctgtgcccattgccattactcctgcaacatatctggctctctgaagcggcactacaa

SEQ ID NO: 520870 - DNA, 75 bp, Homo sapiens
tgttccgcttctccgaggacgccttcaactccacttttatctccaccatagctatcagaggactcctgaaacctg

SEQ ID NO: 520871 - DNA, 100 bp, Homo sapiens
ctgggaacagaaatcgcaattgaagaccaggactatgacttgagccagctgcagcagcctgacactgtggagcctgatgccatcaagcctgtgggaatcc

SEQ ID NO: 520872 - DNA, 75 bp, Homo sapiens
ctgaggttgtggaaaaggaagattactcagagattatagggagcatgggtatggctatcctgatccttcttacct

SEQ ID NO: 520873 - DNA, 51 bp, Homo sapiens
acgggccgcgcgtggagggtcccgaatatgagttggaagtaaagagggtgc

SEQ ID NO: 520874 - DNA, 82 bp, Homo sapiens
agcacggtgcctccgagttggcaagcttaacatcgatgtactgggcctaatcgctacgtgcctctttggctatgatgcctat

SEQ ID NO: 520875 - DNA, 75 bp, Homo sapiens
ccttccagctcgatctgctcttcgtctgcttcttcctcttcagtcaaggaaatgcttccagactgcacactttta

SEQ ID NO: 520876 - DNA, 100 bp, Homo sapiens
aagaagttagagatgacggaactcctgcttcaacagagcaagcaccagaagcaccaggcttttgaagcagagctgcatgccaacgctgaccggatccgtg

SEQ ID NO: 520877 - DNA, 100 bp, Homo sapiens
gaggaagcagccctctacattcaatccttctggagagcctgtgtggacagaagttaatcgcatcccttatacccatgacatccagagacagaattaaagc

SEQ ID NO: 520878 - DNA, 100 bp, Homo sapiens
gtagaagccaaggagctgtcctttgttttggattacataaaccagtcacccaagtgcattgcctttggaaacgaggtatcatgaactgatcactaaatat

SEQ ID NO: 520879 - DNA, 96 bp, Homo sapiens
gtgattttcctgcatggattgggagatactggatctcttccgttccctgctggcagttcatcagctggatcagccacatggtggccttactggaca

SEQ ID NO: 520880 - DNA, 99 bp, Homo sapiens
ctgatggaatccaatcctctgcttccaggacaagtcctgcgcttggggatcctctgtacgcccgttcactggtggaacaatccaaagttttaatcaaag

SEQ ID NO: 520881 - DNA, 98 bp, Homo sapiens
gttcggctgttacggacgttttataccagagagctctctaacttttatttcagtataatcaaagatagagtacagtccctgacatcacacactgcaga

SEQ ID NO: 520882 - DNA, 101 bp, Homo sapiens
gaagcggatacttatttgcctgtggatgaaaccctgattcctacaggtcaaggtcagcatctcctcgacgatcaagatctatctctcttcgtagatcaaga

SEQ ID NO: 520883 - DNA, 95 bp, Homo sapiens
aaaccaactgttatcaagagggtttgaaaaccttgtaccttatacttcaactgttagatacttggcatatcgaaattttatgattgacacgtatc

SEQ ID NO: 520884 - DNA, 90 bp, Homo sapiens
gaggaaattctgtatgttcttcgccattatattcagaacattaaccaggtggtatttgttggaaatttcttgagaattaatacgatcgcc

SEQ ID NO: 520885 - DNA, 99 bp, Homo sapiens
agtagagttagacctaccagagaaatcttagagtttcccgcaagggatgtttatgttccaaacactacttacagaaacctctgtagaggagcaggatgc

SEQ ID NO: 520886 - DNA, 115 bp, Homo sapiens
gtactaccgcagcaacatggctgacatgctttataatttcctttctgagaaaagtctacagcattctttctctgcaggttctcttaactacagtgacttcaacagtttttttata

SEQ ID NO: 520887 - DNA, 100 bp, Homo sapiens
gaaacaaactcacctttgggacaggcactcagctaaaagtggaactcagtcatgcaagacaagataatctgccttccgaaaagagtgcagcctgctcaga

SEQ ID NO: 520888 - DNA, 75 bp, Homo sapiens
ggacgaactgcacgtgtacaacacggcctgaactctttgcttccggaatccgggattgttgctgacatagaatta

SEQ ID NO: 520889 - DNA, 83 bp, Homo sapiens
cttcgatgttcttctaatactcctcctctaacatgtcagcgttattgtaatgcaaggagaactaatgccgacgtgatgaccgc

SEQ ID NO: 520890 - DNA, 82 bp, Homo sapiens
cgggacttccagacactggaaaactggatgctgcagacactgaacgaggagccagtggcaaggtgcccggcgacgactgccc

SEQ ID NO: 520891 - DNA, 100 bp, Homo sapiens
cttgggagaaagacacagtctccatcatcccagtcaagccagcgcctttagaaataaaacctttgccagaatgggaagaattacaagccccagttagatc

SEQ ID NO: 520892 - DNA, 100 bp, Homo sapiens
ggttttcttagccctctacttttcaagacaccaagtgagaggccaaccagtgttctaagaacggaagcatctgggctggatggaatttagcatcaagcag

SEQ ID NO: 520893 - DNA, 74 bp, Homo sapiens
gaggtctccttcacattctcctgaacatagaaatgtgtaattatcagaaaggacccctatggtgtagccgtggg

SEQ ID NO: 520894 - DNA, 82 bp, Homo sapiens
atgcatactccacagcacctgaaaatgtgccagaggaacttcaagaaccattttacacagatcagtatgaccaggaacacat

SEQ ID NO: 520895 - DNA, 75 bp, Homo sapiens
aggaggtcattctgccctttcttgggctgtgttcacggacaagagcgaagccaccaggggagctctctcccaaag

SEQ ID NO: 520896 - DNA, 51 bp, Homo sapiens
cagaccagtccacttttatcagggcgatgccagtccctccactccagagga

SEQ ID NO: 520897 - DNA, 82 bp, Homo sapiens
ggagttttccatgaagtgcagtcccaactaaaaggctgcgttaaaggagtgcctgtgaagaaaacggggtattgccctgagg

SEQ ID NO: 520898 - DNA, 128 bp, Homo sapiens
caacaaggctttatatgataccttctccacctttgggaacatcctctcttgcaaggtctcataacaacaaactgcagtctacagcttcttaaagttcagcgtgttaacctaacataaaacacagcaag

SEQ ID NO: 520899 - DNA, 82 bp, Homo sapiens
ggcgctcgagacttaccagagccacaagtaggcagtactcatcttggccctgggaagaaactcaagaagaagcttttgaaac

SEQ ID NO: 520900 - DNA, 96 bp, Homo sapiens
aggaaggcagcatggagaatgagattgctgtcctgcacaaccggcattttgcacagaggccgtgtcttatgcggaatacagggtgggtgtgcatgg

SEQ ID NO: 520901 - DNA, 74 bp, Homo sapiens
taagctggatattcctgtttagtaaatatctttccctagctggttccaattgtggacaagataaggaccattgc

SEQ ID NO: 520902 - DNA, 75 bp, Homo sapiens
ctcagcatggatatccaggtgctgagccaggagcagcagcctttcttctctgctttctatccgtcaagatgataa

SEQ ID NO: 520903 - DNA, 99 bp, Homo sapiens
gatgccaactccttcttcccacgctgctactgcctgggggctgaggatgacaaaaaagccttcataggttctgaatcaaacggaggatcaccgccagag

SEQ ID NO: 520904 - DNA, 100 bp, Homo sapiens
aggccgaactgctgtatgggctctgctcttgcagccaatgccggaacaggatttgctgttgctgagcctcaaatcgcaatgttttgtgggaagttaaata

SEQ ID NO: 520905 - DNA, 74 bp, Homo sapiens
catctcagctccaagactccttaaaggttgactatagtcaatggggccaatggagccaagtgtatggaaaccca

SEQ ID NO: 520906 - DNA, 98 bp, Homo sapiens
agatccaagagattcagtatcactcgctcccttgatgatcttgaggaatactcccccagttgcaagaggcgcaggaccgtggaagacttcaacaaatt

SEQ ID NO: 520907 - DNA, 88 bp, Homo sapiens
accatggagtgtcagagtgagggagatgactgctgagctccgagaggtgaacagagcccctgtccaagccttatgcatttgatcgggt

SEQ ID NO: 520908 - DNA, 100 bp, Homo sapiens
cgaaggggagccatggcggctgacagtcgggaggagaaagtaagactttgaccccgacgcaggcttcagtgattgccgcggatcagaagcctgagcactt

SEQ ID NO: 520909 - DNA, 98 bp, Homo sapiens
ggacagcaagacaggagaccttggatctgccactcactgactgtgagcttggagaccctctggaggctttcccagtgttcaagaaatatgatagaaac

SEQ ID NO: 520910 - DNA, 83 bp, Homo sapiens
ccccggcccgcgctgcccgcactcctggtcctgctcggggctctgttcccaggtttatgatttgctgtgaccgctgtgaagaa

SEQ ID NO: 520911 - DNA, 92 bp, Homo sapiens
tgcctgtcctacggccccacagcgcgctcctggagaatatgcacatcgagcagcttaaagcttttcaagccaggccaagaagctgtgaagta

SEQ ID NO: 520912 - DNA, 83 bp, Homo sapiens
gcggatggaagggaggagactcctgaccctcagaatgtctagctcaagaacaggactgctgggtttgacatctaccagccagg

SEQ ID NO: 520913 - DNA, 50 bp, Homo sapiens
ctttgaatgcatcagaaccatgcacggaaagaccgttgtttaccttgtgg

SEQ ID NO: 520914 - DNA, 100 bp, Homo sapiens
ccgacgcccatgccgggctccccatgacgggaggtcgcccggcggacagcgtggcatgagccaggagcccgggccgaggctggagtgcggtggtgtgatc

SEQ ID NO: 520915 - DNA, 100 bp, Homo sapiens
cctccggggcacctcagctcggccggggccgcagtctggccacccgcttccatgcggttcgggtccaagatgatgccgagccagcccctgggcaacaaag

SEQ ID NO: 520916 - DNA, 74 bp, Homo sapiens
taggtcccaagggtcttgtcttacgaaggacatcctggaggaagagtttgaagtttgaaatcccagaatgagga

SEQ ID NO: 520917 - DNA, 75 bp, Homo sapiens
ctgtaaccccagcactttgggaggctattgagggcacctacattgacaagaaatgccccttcactggtaatgtgt

SEQ ID NO: 520918 - DNA, 100 bp, Homo sapiens
atctctctgtctttaaaagatgaggtgacttggtgattttcctggaaaattataggaaaactcaatgtgagtagtgacactgtccagcatggtgtggaag

SEQ ID NO: 520919 - DNA, 98 bp, Homo sapiens
ttttcctcgcagaacgcctttatgcagaaggttttcagatctaggatttgaagtgaaatgctttaatgatcttaaagcagaagaactactgctcaaaa

SEQ ID NO: 520920 - DNA, 100 bp, Homo sapiens
agccttgtgggccgcttcattcatctgctgcgctctgaggaccctgaccagcagtacttggtgaaaggtgtagcagtcactcggcctacacccacagcat

SEQ ID NO: 520921 - DNA, 74 bp, Homo sapiens
tgtaccagtccctctgccccacatcctgggcccggaggctgtttgatgtcctgcacgagcccttcttgaaagta

SEQ ID NO: 520922 - DNA, 49 bp, Homo sapiens
tactgctgcacacctaaagtcaagggcaaatgttctgaaaaagactctg

SEQ ID NO: 520923 - DNA, 100 bp, Homo sapiens
ttgtgacaaatcaacacaaaccccaagtcctccttgccaggccttcaaccactatctcagtgcaatggtaagagttccctatttcattgatttgaaaaaa

SEQ ID NO: 520924 - DNA, 50 bp, Homo sapiens
tccagaacgccatcatcgaaagggaacgcccttttgcttgtgactggcag

SEQ ID NO: 520925 - DNA, 82 bp, Homo sapiens
cagggctccgccccgtcgcctggaaaggatcattttacttctccagatgaatatgatgaccctactgtgctctatgaagcca

SEQ ID NO: 520926 - DNA, 90 bp, Homo sapiens
cggctccaagttccgcggccaccagaagagcaaggggaactcgtacgacgtagaggtggtgctgcagaaccttttgatggaacaaataca

SEQ ID NO: 520927 - DNA, 100 bp, Homo sapiens
caggagagctggctgcagtaaaaatcattaaattggagcctggtacctgcacatgttgttctttgtcagtgctgtcaagtgtgtgccagggtgatccatg

SEQ ID NO: 520928 - DNA, 98 bp, Homo sapiens
cgcgccgctgccctccggctccgcgggcggcccacggcgaggtgaaaggtgtagcagtcactcggcctacacccacagcatcgaccttgtgaacccag

SEQ ID NO: 520929 - DNA, 100 bp, Homo sapiens
ctgtacgggtgcctggcctcgcttctgtcccaccatgcctttcttggacatccagaaaaggttcggccttaacatagatcgatggttgacaatccagagt

SEQ ID NO: 520930 - DNA, 100 bp, Homo sapiens
gctttataagttcagtgctgatgaattcttcataccccgggtgtggtttcagaaccgaagagccaagttccgcaggaatgagagagccatgctagccaat

SEQ ID NO: 520931 - DNA, 83 bp, Homo sapiens
aaattgccttattggaaaaacatttcttacgtggtgcgcgtgggcagggcgcggggacatggggcccgacatggagctgccca

SEQ ID NO: 520932 - DNA, 75 bp, Homo sapiens
acagtgctgcgattctggagtacctcactgcagaggtgccacatcatctcacagttcaaccaaggcttctacgac

SEQ ID NO: 520933 - DNA, 75 bp, Homo sapiens
aacccatcgacaagaaggcacctagacgagttgtactgctgtcacaggaaatggacgctggattacaagcatggc

SEQ ID NO: 520934 - DNA, 98 bp, Homo sapiens
ggagccggagcagaagcaaagaggtttcagaaaagggatccctaacatcagaagagtttgctaagcttgtgggaatgtctgtcctcctagccaaagaa

SEQ ID NO: 520935 - DNA, 90 bp, Homo sapiens
atggcttggggtctccagcgataaagtcaatcagagtggatgtatactgaagctcataaaatggtgagagaagcaaatatcaagcaggca

SEQ ID NO: 520936 - DNA, 100 bp, Homo sapiens
gtatttgtacagttgagccgaaatgcctgttctaacaaagagagcctggaaaagagtctcatcgtggaaggcaagagggaaaagaaaaaagtagagaggt

SEQ ID NO: 520937 - DNA, 100 bp, Homo sapiens
aacttcctgatctctctcgctgtgagacatgtctgagactcctgctcagtgtagcattaaggcttgcattgatgacaatgttgatatggtgaagtttctg

SEQ ID NO: 520938 - DNA, 130 bp, Homo sapiens
acccaaaccatctctgaggacacagacaacgaccttgtcccacccctcgagctctgcatcagaaccaagcctatatgaacccaatagcaatggcgagatcaaggggtccaatccagtcttcagggccaac

SEQ ID NO: 520939 - DNA, 90 bp, Homo sapiens
cctgagcaagaaggagctgaaggagctgatccagaaggagctcaccattggctcgaatggagatgtatgcatttcgattcttcatccgcc

SEQ ID NO: 520940 - DNA, 88 bp, Homo sapiens
tggggttggacttgaaggaatgccaagaataccctctaccatctgctttggtcagggtgccgctcgaggatttaaaagcaacaagaag

SEQ ID NO: 520941 - DNA, 90 bp, Homo sapiens
agcgcctcgacctcggtctgaggaaacatgccctgaactgtcacagaatgaaaccagcgctcttcagcgtcctgtgtgagatcaaagaga

SEQ ID NO: 520942 - DNA, 100 bp, Homo sapiens
gccggagcgcgcggcgggagagccgggggagcgctctcggagggagcgcgctttctttggagtcggcgaaacccgggttgagaaagtggcgacttctata

SEQ ID NO: 520943 - DNA, 110 bp, Homo sapiens
tctcccgagcgccccagtcctccccgagcttacagtggccgccgccgacagcggcatcagccctcgggccgtgtggcagttccgcaaaatgatcaagtgcgtgatcccgg

SEQ ID NO: 520944 - DNA, 98 bp, Homo sapiens
tttgtggtgattcatctggggccttatttccactttgtaattccagcgagtcgacttcccatcctgagttgccaagaaggatcaagaaggtggagaag

SEQ ID NO: 520945 - DNA, 82 bp, Homo sapiens
acctgccatccgtgacaaactggacatccttggggctgctgagacaggagatcatgaatcagacagataaaaatcaacaaga

SEQ ID NO: 520946 - DNA, 96 bp, Homo sapiens
caattatgcagaatgggacttgagagacattgattttgttgaagatgactcggacattttacatggaaacgatttgaacagcagcaaaaactctta

SEQ ID NO: 520947 - DNA, 100 bp, Homo sapiens
tggtcggcgggggcggcgtgggcaagtcggcgctcaccatccagttcatccagagctccagagattatattggggttgccattttgtgaagccatagaca

SEQ ID NO: 520948 - DNA, 98 bp, Homo sapiens
gacttgtgcacacatgtagagacctttgtatgtgtctgcaattgaactccaaggtgcagaatggtttggaaagtagctgtattcctcagtgtggccct

SEQ ID NO: 520949 - DNA, 90 bp, Homo sapiens
gcgctgttcaaacccatgaatttaagctatgaagaaggacatccctcacactctgaaacagatctccttcagagacagagttttgcagcc

SEQ ID NO: 520950 - DNA, 127 bp, Homo sapiens
gaccagcgacccaagcgccgcggttaaccacgtctcgtccacgacctccctagaaaccaaggtgtatgttggtaacctgggaactggcgctggcaaaggagagttagaaagggctttcagttattat

SEQ ID NO: 520951 - DNA, 75 bp, Homo sapiens
ccagagtggcagaaaggctgatgcagcaggcacccagattggctgaaaacttctgtgtctgccatttagctactg

SEQ ID NO: 520952 - DNA, 75 bp, Homo sapiens
tggaaatcctaatgacagtctccaaattcgcctccatctgtaccatgcccagcgacttctccgtgtcccttaaag

SEQ ID NO: 520953 - DNA, 100 bp, Homo sapiens
cgctggcagccggggagctgcaggaaccagactgggggcgagctgagcacctgtagtcaatcacacgcagaccctgagagatggttggtgccatgtggaa

SEQ ID NO: 520954 - DNA, 100 bp, Homo sapiens
ctttgaccagtttgataagcctggcgcggaacggtcgtggagaagaagagctgctgatgaggactgggacagagcgccgccctgtgctgggctgccggga

SEQ ID NO: 520955 - DNA, 100 bp, Homo sapiens
agcgggtgagaaacaaaacttctttccattgtcctgcccgtttctgcggacttgttctgaggccgaggattttttatcaagcagaaatgcatcgaacaac

SEQ ID NO: 520956 - DNA, 124 bp, Homo sapiens
cgggccgggcggtgcgcactgcgggcgcatccctgccccggcgccgtccgtgcccgcgggacctgacagccgggtcagagaggagcaggagcggcttcgcttggagcaggagcgagagcaggaa

SEQ ID NO: 520957 - DNA, 95 bp, Homo sapiens
ggagaaaatgaaagctggctcacgaacaggcaaaccacagcaacttgaaaacagtctgaatgaatttggtgaaaagtgggagttaaactctggag

SEQ ID NO: 520958 - DNA, 95 bp, Homo sapiens
ttgtagaaggttgtgaaaaaactactaggatcacgcggcatgtattgaggggtagaaatatttctgtcatggctcattcaaagactaggaccaat

SEQ ID NO: 520959 - DNA, 90 bp, Homo sapiens
gcgacgcccgggacccagattgcgggttcagcactgaacctaccagatgtatttgggttggtcgtcctcccattggaactgaaactacgg

SEQ ID NO: 520960 - DNA, 83 bp, Homo sapiens
gtgctggagaacttcgtgggccgaataccctctaccatctgctttggtcagggtgccgctcgaggatttaaaagcaacaagaa

SEQ ID NO: 520961 - DNA, 80 bp, Homo sapiens
cggccgaactccaagcgtgaccagctttctgttgggaacactcaaaggagctttgctggcagtagaacacgtgaaagacg

SEQ ID NO: 520962 - DNA, 100 bp, Homo sapiens
cgaggaggctggaggtactgagaggatggaaatcagcgcggagttaccccagacccctcagcgtctggcatctggaagcaataagtcgcctgtgtgaagc

SEQ ID NO: 520963 - DNA, 87 bp, Homo sapiens
cgctccgtggccttagctgtgctcgcgctactctctctttctggcctggaggctatccagctgttttaactcaaatgggtgatgaaa

SEQ ID NO: 520964 - DNA, 75 bp, Homo sapiens
cttcattgctccttcaggacatggggacctgttgcaatgagagtggcaaaattagcaattaatcaagggatggag

SEQ ID NO: 520965 - DNA, 50 bp, Homo sapiens
ttcctaaaggagggggaaagccaggctggacacaattggagaaactggtt

SEQ ID NO: 520966 - DNA, 131 bp, Homo sapiens
ctttggcagacatcgagaagcataatgacattgtggacagtgacagcgatgctgaggatcgaggaacgttgtctgggtctcctatggacagaagtgcgggcaaggagctttgttcctccccgatgtcaccc

SEQ ID NO: 520967 - DNA, 100 bp, Homo sapiens
tcaacctcctctggcccccggaaaacctaaccatgaagacttgaacttaatacagcaagaaagaccatcaagtttaccatgataccaagaagaagcaggg

SEQ ID NO: 520968 - DNA, 110 bp, Homo sapiens
agggacatcagtggagccttctcagacccacaggtctccaagctggctggtgtcttggtcaagcatggcatcaagaaaggtgacactgtggttatctacatgcctatgat

SEQ ID NO: 520969 - DNA, 50 bp, Homo sapiens
tgctgccctgcgcgctgctggctggttctgcggggagtgtctccagccct

SEQ ID NO: 520970 - DNA, 83 bp, Homo sapiens
ccccaacatgcctcaccctcatctatatcctttggcagctcacaggtaaacgcaaagcactgaagttgaattttgcaaatcca

SEQ ID NO: 520971 - DNA, 100 bp, Homo sapiens
agaaggcttatgaggatggctgcaagactgtcgacctaaagcctgactggggcaagctatccgtggtcctgaaccagttatgtgtgttgcatgagaaaac

SEQ ID NO: 520972 - DNA, 75 bp, Homo sapiens
gcgtttgtcactttttgtacaaaagaagcagctcaggaggctgttaaactggcagaagtcaattcatctggaaag

SEQ ID NO: 520973 - DNA, 51 bp, Homo sapiens
cgctacgccctggatgagatggctgtggaaaatctctgttctcacaaagtc

SEQ ID NO: 520974 - DNA, 82 bp, Homo sapiens
cagccgcgctgccgagaagctttacctcgctgaccctatgaaggctggctacagcaaacatcattcaagatgtccagcaaag

SEQ ID NO: 520975 - DNA, 75 bp, Homo sapiens
gttccagtcttctctaaagctgaaacaagtattggtaaaggttttcaaggtgtcatgaaaagatggggatttaaa

SEQ ID NO: 520976 - DNA, 82 bp, Homo sapiens
gtccgccgctcaccccgcggccgcaccttcccgccttctcagcacatggattaattgatgtatgttgagtttatggagctgc

SEQ ID NO: 520977 - DNA, 96 bp, Homo sapiens
gtctgcccggccaagaggcaaaggggaggttacgcagcaaaccatccagaaggacctgaaggagaagaaggagaaggtggaggagaaggcaagccg

SEQ ID NO: 520978 - DNA, 82 bp, Homo sapiens
cagaggaaaatgcaagaagactgatggagcaggcttgcaatattaaaacttaattcagtgcacaaatgagatgaatgtgaac

SEQ ID NO: 520979 - DNA, 74 bp, Homo sapiens
tggaactgaacttagctcgacggggctgaccgctctggcccagggtgttgtcgccgtgatcctgaaggcgctga

SEQ ID NO: 520980 - DNA, 74 bp, Homo sapiens
tactccagtgggaggaggactccatttagattttgaagaatgtgctcacaaattgctgaaaatggagtttcctg

SEQ ID NO: 520981 - DNA, 74 bp, Homo sapiens
caagtaaagctcttcatgcaaggaaacataagttggaggttctggaatctcagatgaaggaactgagacacaga

SEQ ID NO: 520982 - DNA, 49 bp, Homo sapiens
aactcctccagcctccagaaagtatacatggactggtacgagaagttcc

SEQ ID NO: 520983 - DNA, 101 bp, Homo sapiens
cgcccaccttcgggaggatcagcaacttgtagagacagtttcatgtggaggaaatcttttgatgaatattgggcccacactagatggcaccatttctgtag

SEQ ID NO: 520984 - DNA, 100 bp, Homo sapiens
cgggcctagaactccaaggagaaaggcggcgattgtaaaccatggctgtgtggatacaagctcagcagctccaaggagaagcccttcatcagatgcaagc

SEQ ID NO: 520985 - DNA, 75 bp, Homo sapiens
ttggatctgttgctgatgatcagaaacttatgatgtacgaggtctgcagcacttccgtggatggctcggaatgtg

SEQ ID NO: 520986 - DNA, 100 bp, Homo sapiens
gacttctggttgccaccaccttcactcacagctaccctttttgctggaggcccagtgacctggggaagaacgcaggggacacgctgcctcaggaggacct

SEQ ID NO: 520987 - DNA, 74 bp, Homo sapiens
agcgcaggagaaggtgctccagagatcttctgttcttcagcccattgcagatgcaaaggctcctgagaagcggg

SEQ ID NO: 520988 - DNA, 100 bp, Homo sapiens
attttgaggatctggactccgtttcctgccttgctctttggaccacattgtcaattcacaccgcgaccagctacatttaccaaagcctgggtgatgtgga

SEQ ID NO: 520989 - DNA, 100 bp, Homo sapiens
gcagccccggggcggcggccgaggctacagagccggcggcaggggatggcaagatagcggcgcgggagcgtaccatgtacagtgggagaaatcacagatg

SEQ ID NO: 520990 - DNA, 100 bp, Homo sapiens
cagctatatgggaacaacatacagtgacgcttcacaggggtaaccaggagccgacaacaactcctgacgcaatggttcagccttttactaccatcccatt

SEQ ID NO: 520991 - DNA, 87 bp, Homo sapiens
cagattgcccgaaagcttcagtgcattgcagaccagttccaccggcttcatgtgcagcaaatgacggtcgaaccaaacccattccaa

SEQ ID NO: 520992 - DNA, 80 bp, Homo sapiens
ttcaccgcggccatcctgcaggcacagttgccgattacagggcgtctctggccgagcctctttttgtggaaaacgacagc

SEQ ID NO: 520993 - DNA, 75 bp, Homo sapiens
cggtagctcccagcaaagcggcccagcggtgtactatgaggggctgcaggacaagctggcacagatccgcgatgc

SEQ ID NO: 520994 - DNA, 100 bp, Homo sapiens
gattatgcggatcaaacctcaccaaggccagcacataggagagatgagcttcctacagcacaacaaatgtgaatgcagaacccagcaagcgtagtcgagg

SEQ ID NO: 520995 - DNA, 90 bp, Homo sapiens
cgcctccgccgctgcctcaggagcggaacaacgtcggcgagcggggtaaagcttcagcgactgaaggagtgtggactttttgaatttcaa

SEQ ID NO: 520996 - DNA, 101 bp, Homo sapiens
aagaacaagccgtacccaaagtctcgcttctgccgaggtgtccctggccccaaggcccagaagaaatttaagcgtcttatgctgcatcggataaagtggga

SEQ ID NO: 520997 - DNA, 75 bp, Homo sapiens
cctgtttttgccaccacactccagcttggatggcttggctggaggacaagcaaattgaggacattggcaacggag

SEQ ID NO: 520998 - DNA, 114 bp, Homo sapiens
aggatatcgacgtcgtgatccagaagtccagagctgaggactgcctgtttgcagcaaaatgatgcttcaacacccaggccaggtctctgcctcggaagtgagtgcttctgccat

SEQ ID NO: 520999 - DNA, 98 bp, Homo sapiens
ccgccggccatcgactttcccgccgagggcccggaccccgaatatgacggtctcctctgagcctccggcctccataagacccaaaacagatgacacct

SEQ ID NO: 521000 - DNA, 88 bp, Homo sapiens
gatgggcccgccctcctgcagtgaccagtaatggcactttacactcggccagtactgatgcaggcactgcaggagccctgactccaca

SEQ ID NO: 521001 - DNA, 99 bp, Homo sapiens
ctggtcttcactgactttcagctagaagaaggatatgatttcttagagatcagtggcacggaagctccatccatatggaagaatgttggtgaaaagcac

SEQ ID NO: 521002 - DNA, 83 bp, Homo sapiens
cagaggtaaagcatcatttcatcacatcctgtcaaggaacacaccacagccatcagcactggaatgcaaagaccagaacaaac

SEQ ID NO: 521003 - DNA, 97 bp, Homo sapiens
tctcttcctcggcgctgcctacggaggtggcagccatctccttctcgtgagagccacgagccaaggtgggcacttgatgtcggatctcttcaacaag

SEQ ID NO: 521004 - DNA, 76 bp, Homo sapiens
ccagaagtccagagctgaggactgcctgtttgcaggtactggttttggattaggaattgttttctcacttaccttc

SEQ ID NO: 521005 - DNA, 75 bp, Homo sapiens
gtttgtagaaagaaacagcctggccaggactgcccacattcctgtaacctgtgtcagctgacaggggctctggcc

SEQ ID NO: 521006 - DNA, 75 bp, Homo sapiens
gaagagtgagataaagcctttaaatggttgtcacacttcattgtagagccatgaccaggcgaagacaatacggag

SEQ ID NO: 521007 - DNA, 51 bp, Homo sapiens
ggaacattgctgtggattcccaggtaactaaatgaccatggaatctggagc

SEQ ID NO: 521008 - DNA, 75 bp, Homo sapiens
cctcagctcccagaggatcaccagcgtggggtacaggcatccttcacctgctattgttgcaagaacagtcagaat

SEQ ID NO: 521009 - DNA, 83 bp, Homo sapiens
gtggatttgagccgccgcattttttaaccctagatctcggtttggtgcacctcgatttggaggaagtagggcagggcccttat

SEQ ID NO: 521010 - DNA, 96 bp, Homo sapiens
agcacgcgggtctgtcatcatgtcgcgttacgggcggtacggaggagcaattctgtggtgttcttggtcacacatttatggagtttctgaagggca

SEQ ID NO: 521011 - DNA, 95 bp, Homo sapiens
aactgcaggaagcagaaaaagagctaaagagaaaacaagatgacgctgaccaggacatgatgatggcagggatgttttgctacttgagaagatag

SEQ ID NO: 521012 - DNA, 100 bp, Homo sapiens
ccagtcccctgacgaggacgaggaggaggactatgagcagtggctggagatcaaagttcctggccattttctatccaagatgtggtacaacctcttaccc

SEQ ID NO: 521013 - DNA, 51 bp, Homo sapiens
aaattatttatccaacagctcctcccagacaggtgatttggcttctgcaca

SEQ ID NO: 521014 - DNA, 100 bp, Homo sapiens
aggaaagacatggagattctcttaaaaagctggagaatgctggaggagaccttaaggatggccaccaccactatgaaggagctgttgtcattctggatgc

SEQ ID NO: 521015 - DNA, 50 bp, Homo sapiens
ccgggatctcggctgtccttcctcccgactccaattccagggtttcagaa

SEQ ID NO: 521016 - DNA, 82 bp, Homo sapiens
aaatgggccacacgtgtggcacgtgagcataaaaacattgttcaccaacaacggatggcattggagtcaagagagattataa

SEQ ID NO: 521017 - DNA, 83 bp, Homo sapiens
aatacagcaagaaagaccatcaagtttaccatatgtccgtggttcagaccctgtattaaagcttttggacgacaatgggaaca

SEQ ID NO: 521018 - DNA, 82 bp, Homo sapiens
aaaggacttcatctcctcaacatggaaactaaggaacctcgagccggttactcagctgtatgtcagtgtggatgccagtacc

SEQ ID NO: 521019 - DNA, 83 bp, Homo sapiens
cttcaaaagaacaggaccccgtacgtcactaccactgtctctgctcacagtgccaaggctccatcctgagccacatccacaag

SEQ ID NO: 521020 - DNA, 110 bp, Homo sapiens
ctccatgatgtccttcatcctcaacgccctcacctggcaggcctctctgtgctgctgaaggcagatcgcttgttccacaccagctaccactcccaggcagtgcatatccg

SEQ ID NO: 521021 - DNA, 74 bp, Homo sapiens
tcatgctgtgcagcaagaacccggtgtccctgttacctgagaatgacagatggaatgaaactagagcccagctg

SEQ ID NO: 521022 - DNA, 100 bp, Homo sapiens
ttatggttttcttccttatcaaccccaccaaaactttctactataaatcccggttttggctgcttaaactgctgctacaagtgtattcatcagagtttgg

SEQ ID NO: 521023 - DNA, 100 bp, Homo sapiens
ctatcctcggtgctgtggtgcagagctagttcctctccagctcagccgcgtagattaactgctgaagtactgatcgagttctgcatttcttcaatgagga

SEQ ID NO: 521024 - DNA, 74 bp, Homo sapiens
cgctctgcctgcgcgctgctcctgctctgctacctggagacatatactgcctggactgcctggctgatgtgagc

SEQ ID NO: 521025 - DNA, 50 bp, Homo sapiens
atctgggaatgtctggcaactctggtcttgagagctgatgacaataacat

SEQ ID NO: 521026 - DNA, 95 bp, Homo sapiens
aagcagttctggaaagccgctaagcctggggccaacagcaccacagacgcagtgctactcaacaaactgcacggtaagcggccttcacccctaag

SEQ ID NO: 521027 - DNA, 89 bp, Homo sapiens
atggattctaatggaatcaggcagttttgtgtccatgtgaacaactccaaaactggacaagccaaggcatctgtagccaaagtaaacaa

SEQ ID NO: 521028 - DNA, 98 bp, Homo sapiens
tccctttggatgtagcaaggaagaaattgttcagttcttctcaggaatgatttccctgatgaaaagatccctaccctaagggaagctgttgcagagtg

SEQ ID NO: 521029 - DNA, 98 bp, Homo sapiens
atacctgctttcttcagcctatgtagacagccacaaatgggaagcaagagaaaaagaacattactgtcttggccagataaacacttactgccagaaca

SEQ ID NO: 521030 - DNA, 88 bp, Homo sapiens
agtagctgctcttccaagcaaggaagtcgacaggagcccagtttcctccaattgcagcacaagaccttccttttgttctaaaggctgg

SEQ ID NO: 521031 - DNA, 83 bp, Homo sapiens
cggggacagccagccctcgctggaccagaccatggccgcggccttcggtgtccctggccagtgtccttccacctgtccacaag

SEQ ID NO: 521032 - DNA, 73 bp, Homo sapiens
tacagcaggtcagagaacagatggaggaggagcagaaagcaatgagcttatcacaccacatgggctttttatc

SEQ ID NO: 521033 - DNA, 90 bp, Homo sapiens
cgggaccacctggaggaggtgttgaaaggggtctcctactccctccctccagtactgcgagaactgtgacacccacttccaagattccaa

SEQ ID NO: 521034 - DNA, 97 bp, Homo sapiens
cgcgggaccgcggccactggacggatacctcggagtggcggaccacaaggagtttccagatgtcttggaatgcactgtatctcatgcagtagaaaag

SEQ ID NO: 521035 - DNA, 75 bp, Homo sapiens
cagagaccttgagggatatctttcttcactcctcttcacttcttcaggttctgagcaaggttcaaccagtcaaga

SEQ ID NO: 521036 - DNA, 100 bp, Homo sapiens
ggctgtgaatgcacattgtgttctgcaaaaaacaaaaaggatagcctccggcattccaggagtcggatggtcagggctgccctttctgtcgttgtgaaat

SEQ ID NO: 521037 - DNA, 90 bp, Homo sapiens
gttcacgtgacatcaagaggaagcggaaaccagtggccacagcatctttgtctagccccagtgcagtatttgtttaccagcaacttcagt

SEQ ID NO: 521038 - DNA, 100 bp, Homo sapiens
cgagagcgtgaccgagagcgcgaatatcgtcatcgttagaaggtgggtttggaggatttgggacaacatctacaactgcaggttctgcattcagcttttc

SEQ ID NO: 521039 - DNA, 74 bp, Homo sapiens
gttttaactacagacccagtctctgccaagattgtcaccagacctgcaatctatggagcagattcggagaatta

SEQ ID NO: 521040 - DNA, 101 bp, Homo sapiens
gggtcgaggcggacgcgcggctgcgtcaggtctatgttaacaatgaatgggcaaccagtgttggggaaggagggagctttggagaacttgctttgatttat

SEQ ID NO: 521041 - DNA, 100 bp, Homo sapiens
gcctgctttgccttcgccttccaccatgatcgtagctacagcaagctgggtagcaggcagatccaaaggatatcatgaagtttccagggcctttggaaaa

SEQ ID NO: 521042 - DNA, 82 bp, Homo sapiens
ggacaatcacctttttaacaagacaaggaaacaggtatcagcatgatggtagcagaaaccttatcaccaaggtgcaggagct

SEQ ID NO: 521043 - DNA, 156 bp, Homo sapiens
taccctcgctcctcgatcgaggacgacttcaactatggcagcagcgtggcctccgccaccgtgcacatccgaatgggtactaggttttgacaagcttgcatcatgcgtgagtataagctagtcgttcttggctcaggaggcgttggaaagtctgct

SEQ ID NO: 521044 - DNA, 82 bp, Homo sapiens
ccgccgccgccgccgccgcgccgagcggaggaggaggaggaggcgaggaggagagactgagggtgtgaagacagagaatgac

SEQ ID NO: 521045 - DNA, 100 bp, Homo sapiens
caagatggacaccgcggaggaaggggatcccaacaagccctcaggattcagaagtgttaaagctcctgtcactaaagtggctgcgtcgattggaaatgct

SEQ ID NO: 521046 - DNA, 80 bp, Homo sapiens
cagagagcccaacgcctggtgctcaagactttctccgagagtaatcaagtcagaggattatatgacttttatctgcctag

SEQ ID NO: 521047 - DNA, 100 bp, Homo sapiens
aggagagacacttgtgaacattcaagtgaagcaaaagcctttcatgattatgcaagtgaaccggagcaaacgacttccgatccagtctgcgctgttgcgg

SEQ ID NO: 521048 - DNA, 51 bp, Homo sapiens
tcaagctgcgggcagatggaacgccgagccacatcgctcagacaccatggg

SEQ ID NO: 521049 - DNA, 100 bp, Homo sapiens
ttacagactactcttgtccgtggataccaggacagtcattttgtttactcattcagccctgttgcaggtcccaataaactcttcataaggttgacagaag

SEQ ID NO: 521050 - DNA, 75 bp, Homo sapiens
gagggaggaaggtggcaagatggtgttggaaagcactatggtgtggcacgtgtggttctcaaatataggcattct

SEQ ID NO: 521051 - DNA, 98 bp, Homo sapiens
ggggacttcggcggcggcgcctcaggcacctcggcccgggtctgccatcatggatgttctcgcagaagcaaatggcacctttgccttaaaccttttga

SEQ ID NO: 521052 - DNA, 100 bp, Homo sapiens
gagaaaatgcaggagaagcgggttgtcggggccaaagtggtaacgaacgcccgcagcccgggggctcgatgctatggattcgtcaccatgtcgacatctg

SEQ ID NO: 521053 - DNA, 82 bp, Homo sapiens
attcgccctgaaggccaaagtcatctaccccatcaatcagaagttccggaatgttgtaccatctttgggtaggcagacttcc

SEQ ID NO: 521054 - DNA, 74 bp, Homo sapiens
ctcgaaggcccgcggcgccccgtgctgcaggcacagaccccacaggctcctcggacactgggtccatcacctcc

SEQ ID NO: 521055 - DNA, 74 bp, Homo sapiens
ttaagtcagcccacgggatttttagcccagcccatgaaggtggataattactgtaccttcctcatggaaaaagt

SEQ ID NO: 521056 - DNA, 75 bp, Homo sapiens
gtttgatactgacctgtaaatcatcctttagggacaaagtggccttcatcacaggaggcggctctgggattgggt

SEQ ID NO: 521057 - DNA, 82 bp, Homo sapiens
ggcctttcctatgaatgtaggacgctgctcttcaaagcgatccacaatctgttagaaagtgggcctttggagtgacgctgtg

SEQ ID NO: 521058 - DNA, 90 bp, Homo sapiens
ctgcgcaccatccgcgaatggctggtgtcctggggaccgcatggtggaatcccccaaagaaggtaaagggagcaagccttccccactgtc

SEQ ID NO: 521059 - DNA, 100 bp, Homo sapiens
gcgcatgcagctgctgctgaccctggccttcaaccccgagccgctggtgctacaggtcccttcaccgatgttgtcaccaccaacctaaagcttggcaacc

SEQ ID NO: 521060 - DNA, 101 bp, Homo sapiens
atttaatgtggatgcaccatgccagaccgtggaagatttaacgaatggggttgtgatggcccaggttcttcaaaagatgtgtcattccacacatccacaaa

SEQ ID NO: 521061 - DNA, 82 bp, Homo sapiens
ggcctcatgtccttccaattgagaagttgcaaaagcttctcatttcagagagatgccaggatcctaagtgcctgccaaactt

SEQ ID NO: 521062 - DNA, 83 bp, Homo sapiens
ggggagagcctgtttgcgcagtacccccggagggcggaaggccgccgagacaatgcagatcttcgtgaagactctgactggta

SEQ ID NO: 521063 - DNA, 80 bp, Homo sapiens
gtcatttctttacccaagaatgacctgctgcagagacttgatggcctcacagaccccaccagctactacctctccagcgt

SEQ ID NO: 521064 - DNA, 75 bp, Homo sapiens
agtcacctctcaactgtgtgccaaagaattcctggaaaactcaagcaattcgtatttgacttacattctggaaaa

SEQ ID NO: 521065 - DNA, 100 bp, Homo sapiens
tgatgtctcttcttctattagcacttactgggattggtcagatagcgagtttgaatggcaggtattgttgcagcatctggcagtgagactgaggatgagg

SEQ ID NO: 521066 - DNA, 100 bp, Homo sapiens
aaatctactactgttcatggcaggcatgtttgccacagtcgcagggatatcccagcgcgcccccgtgcactggtcggagaatgtgattggggcggctgtg

SEQ ID NO: 521067 - DNA, 100 bp, Homo sapiens
agcgctgttcaaacccatgaagtgagaattatgaagatgatgacctagtaaattctgatgaggttatgaagaaaccatgtccagtacagattgttcttgc

SEQ ID NO: 521068 - DNA, 75 bp, Homo sapiens
acggagctaagagatatctgcaatgatgtactgaggcgtggagctatttcctatgacagttctgatcagactgca

SEQ ID NO: 521069 - DNA, 75 bp, Homo sapiens
cagatcctgaaagagcaagctttatttacctcatactctaccatgccatctttgtgttctttacctggacctact

SEQ ID NO: 521070 - DNA, 90 bp, Homo sapiens
tcaagtgatggctggttttcaggaactcataaatgccacctcaacaattcagaggatgagaaatactacttacggtcacttggagaagac

SEQ ID NO: 521071 - DNA, 90 bp, Homo sapiens
ttgaagaatgttcttttgttagtgacaaagatgcaagcctggcattttttgatgattgtgtagataaatgtttcatcattacgattagcc

SEQ ID NO: 521072 - DNA, 75 bp, Homo sapiens
cccggatgcaggacagacccctcagtttcagggtctagccattgccccctgcctgctgctcctgtcacagaccac

SEQ ID NO: 521073 - DNA, 100 bp, Homo sapiens
acagctgcaaggagttactgaagcatcctggtggggaagaagttttaagggaacaagctggaggtgacgctactgagaactttgaggatgtcgggcactc

SEQ ID NO: 521074 - DNA, 48 bp, Homo sapiens
taaaaggtgtcaagaagctcagaatgaggcttcgtgacggagttatca

SEQ ID NO: 521075 - DNA, 83 bp, Homo sapiens
aggaagggatctgcacacagaaatgtgccctgaactggacggacataccagtggccatgggctcgattatttgatgaacctca

SEQ ID NO: 521076 - DNA, 90 bp, Homo sapiens
aggaagtaacctcaagaatagaattccttttggggaagaaagaggacaggctgcgggaggagctgcaggactgaggtacagaggccaggg

SEQ ID NO: 521077 - DNA, 101 bp, Homo sapiens
ctgatgtccaggagtcagtgggtccactggtagcccccacccctctccgtccatggccccagatgacacttcaggttatctaccttgcctgctcctatgcc

SEQ ID NO: 521078 - DNA, 101 bp, Homo sapiens
tttttggacaacagttccttcacctcagcatttttcatggatttcaaataagtggtccaagacaagctgctgctatctgcgtgccacttactggtctcact

SEQ ID NO: 521079 - DNA, 100 bp, Homo sapiens
gtaccctaaaattagggcatgattaaggtgtcagcatttgcaggtatacaggaacagtcctagtgatgcactatttaatcaaaagacggatggatctttt

SEQ ID NO: 521080 - DNA, 101 bp, Homo sapiens
gcgggggacactgcagccggagcccgggaggggccgcgccgccaccgtctgaactaggatgtcccgacatgaaggtagatgatgagctggagatcaaggcc

SEQ ID NO: 521081 - DNA, 114 bp, Homo sapiens
gaaaaaggaagtttgtcctgtcctggatcagtttctttgtcatgtagccaagactggagaaacaatgtttaagaattgtttaagctgcatcaatggagcacatacagggagctt

SEQ ID NO: 521082 - DNA, 100 bp, Homo sapiens
gggtgtctacacacttctgatgacacctttattttaaaagctgatgttccaagcccctgaagaagatggccgaccggatcaggaagtatcagatcttgaa

SEQ ID NO: 521083 - DNA, 105 bp, Homo sapiens
ctctccctctgcccccccttccccacgcaaccccagatccatttacactttacagtggaagttaaacgagctgagcctcgggacagcaagagccaagcgccggga

SEQ ID NO: 521084 - DNA, 74 bp, Homo sapiens
cggcggatgttcatgggcagcaccatcgagccagaagcagtatttgtcctgtactatactggcaattgctggag

SEQ ID NO: 521085 - DNA, 82 bp, Homo sapiens
caaatacccctttgaattaattatggcttgagatggaagattttcgaggtatagcagaagaatcatttccaagctttctcac

SEQ ID NO: 521086 - DNA, 83 bp, Homo sapiens
ccgcccaccagttcgcccgtccccctgccccgttcacaatatcttcgtgaagactctgactggtaagaccatcaccctcgagg

SEQ ID NO: 521087 - DNA, 82 bp, Homo sapiens
ggatgcagtgaaagaaacttcctcagtaaagcatgctgtacccctcaaggatttaaactaacgaaaaatcaataaataaatg

SEQ ID NO: 521088 - DNA, 82 bp, Homo sapiens
tctgccggaagagcgccatcattgagacctacgtcatggacagccggatcggttcggactaaggatcaccgctttgaaagtg

SEQ ID NO: 521089 - DNA, 108 bp, Homo sapiens
ggattcaaatgctagcagacacggtggctactctgcctcggggacgaaagcagaataacaagcctttgtattcatttgaagataatgcagactatgtttatgatgtta

SEQ ID NO: 521090 - DNA, 82 bp, Homo sapiens
agaaaatccagtttgcttaaaaaggcgatgtaccaattttgacaactgaagacgacatggtttctcagccagcaaaaatact

SEQ ID NO: 521091 - DNA, 83 bp, Homo sapiens
gaagtctactcaacgtttccaaggtaaaacctgtttcccagcctggtggcatcctgtggaaagttggtcagctgcaacctggg

SEQ ID NO: 521092 - DNA, 75 bp, Homo sapiens
cggactcggactctggcttctgggccaattcctgtccccccagcagcatggcatcgtgtgctgaaccctctgagc

SEQ ID NO: 521093 - DNA, 100 bp, Homo sapiens
ctgcccatggtcaccaccatccaggtgatgagttatgtccccaccgtgtttgagaactacactgcgagctttgagatcgacaagcgccgcattgagctca

SEQ ID NO: 521094 - DNA, 82 bp, Homo sapiens
gttccccttgactggaagacactaaagatgatctacttgcaatggaagatgtcagtggaggctggagtgcaatggcgggatc

SEQ ID NO: 521095 - DNA, 96 bp, Homo sapiens
tatatggagataaatggaattcttttaccatcttattaattcactctgacggatgtttccagtcctaaagattagtgtcacagggttggaccccaa

SEQ ID NO: 521096 - DNA, 90 bp, Homo sapiens
ccggcttatactcccagcggggaggcgggcagctctgcccggcagaaacctgtcttcaaggatggaacattactgtggacctggtcattg

SEQ ID NO: 521097 - DNA, 146 bp, Homo sapiens
tgctgtttttgattggcgcctttctcattattataggctccctcctgctgtcaggctacatcagcaaagggtttgaagatagtgaagaggactttgattccaggtttgatacagatgatgagctttcataccggcgtgactctgtg

SEQ ID NO: 521098 - DNA, 88 bp, Homo sapiens
acgataaaggaactcaggcgcctcttcttagttgatgatttagttgattctctgaaggagggtgcatctgcccggaagactcagactc

SEQ ID NO: 521099 - DNA, 96 bp, Homo sapiens
gggacttctaaaaggaactatgtctggaagcctgtagccaccaatgtttcaagaggagcccccaccctgttcctgctgctgtctgggtgctactgg

SEQ ID NO: 521100 - DNA, 76 bp, Homo sapiens
ggaacttgccctgtctcctcgcagatgagctgaattcttgccgccaggatggggaaacagaacagcaagctgcgcc

SEQ ID NO: 521101 - DNA, 100 bp, Homo sapiens
ccaagacctgcttctcattatggaacttcttactaacctgctgtcaaaagaattcatagatttcagtgatacaggtgccatggagaactggggccttgtt

SEQ ID NO: 521102 - DNA, 100 bp, Homo sapiens
tcacagaagaagtcacaagacaagggtcctaaaacaggatcagtaaagaaggaaaaagcagtaaagccagaggaaggaaccttttgaggatggctttgca

SEQ ID NO: 521103 - DNA, 82 bp, Homo sapiens
ctgcattctgttagagcacaagcctgatgtaaatgctgacattgtgcattggctctcttggactgcccaaggctttttatct

SEQ ID NO: 521104 - DNA, 100 bp, Homo sapiens
aggacaaagtagatggcctccagaaacaaacggatggaaagaagaagtttgacaaagagagtgaaaaatattactctatccttgaaaagcatttaaattt

SEQ ID NO: 521105 - DNA, 130 bp, Homo sapiens
gccatgtcggccctcagcctcctcattctgggcctgctcacggcagtgccacctgccagctgtcagcaagacagctggaaatgatccctattgttttgtggagtttcatgagcatcgtcatgcagctgca

SEQ ID NO: 521106 - DNA, 75 bp, Homo sapiens
gagatggtgtctggagtgtacaagtccgcggagcagggggaggtggaaattggccttgcctctctgggtgcacct

SEQ ID NO: 521107 - DNA, 135 bp, Homo sapiens
gtttacttcaaagcccacagagcagtgcttgctgctttttctaactatttcaagatgatatttattcaccaaacaaggatgctttcattggatttggaggaaatgtgatcaggcaacaagtcaaggataacgcca

SEQ ID NO: 521108 - DNA, 90 bp, Homo sapiens
cgcgctccaaccgcctcctcctcctcagtaacgcgggtttgatctgtggatgaaatgaatcatgattttcaagctcttgcattagaatct

SEQ ID NO: 521109 - DNA, 75 bp, Homo sapiens
gcagtcctaccatgtcagccttcccagtagctgggaccacaggccagaaatcagcgaggagctcaaggacctgat

SEQ ID NO: 521110 - DNA, 82 bp, Homo sapiens
aaggacctgggggccgacatcatcctggacatggccaccctgaccggggctcaggaaacatttactagggacaacttttgag

SEQ ID NO: 521111 - DNA, 75 bp, Homo sapiens
gggaccatgctgcgctcagaagctgctacgcggtcctctgggtgatcagtaccagacggtgaaggccctagctga

SEQ ID NO: 521112 - DNA, 106 bp, Homo sapiens
gggatcgtgaccgagaccgtgaccgagagcgtgaccgagagcgcgaatatcgtcatcgttagaagagccctaatttgtttagaactgtaatatgcacagttaaaac

SEQ ID NO: 521113 - DNA, 95 bp, Homo sapiens
caatttctcctgctctgcagcttctgttcagatatttcacattttcaggaacaaaatgatttaaaagcattgctagaaaatctccttcaaaatat

SEQ ID NO: 521114 - DNA, 100 bp, Homo sapiens
cacttctttacttggtgcaggaaggcagtctttgctacgtacagcaaaaggtgtcattccacacatccacaaatctctgattgggaagaaaggacaacag

SEQ ID NO: 521115 - DNA, 75 bp, Homo sapiens
ggatgatgctgactttgatgaagggggtcctgatgacaacttaattgaaggtggaggaacaaaatttgtctgcaa

SEQ ID NO: 521116 - DNA, 80 bp, Homo sapiens
ccggacccaggccctggatgggactgtctatgatgtcatgtttgtcagcacagcaattctgtggtgttcttggtcacaca

SEQ ID NO: 521117 - DNA, 80 bp, Homo sapiens
ccagcagcttcgacaaagggaccatgcggaggatggcgctgtccatgatcgaggagtgcatccgccccaacccttttccc

SEQ ID NO: 521118 - DNA, 100 bp, Homo sapiens
tgaattatggcagcccagtcaaggattgatttccagagacttatgttacttgaggaagacaccaagaaggcaaagaaaaggagccagggatggctcttcc

SEQ ID NO: 521119 - DNA, 82 bp, Homo sapiens
cttgaagatggatatcagctacagactttcctgagtcagacagtgatgtgtgttctgaaattgtgaaccatgagtctagtac

SEQ ID NO: 521120 - DNA, 100 bp, Homo sapiens
cagctcacgggagcaagaacggatgaatcaggcgccaaccgtgggctttgagcaggatgttggcagccgaaccacccaccatttcatgtaccctgagagt

SEQ ID NO: 521121 - DNA, 75 bp, Homo sapiens
ggagatttcagtgcattgcctcccctgggtgctcttcatcttggaattttttgcagataacctgggtgattttct

SEQ ID NO: 521122 - DNA, 108 bp, Homo sapiens
acccacatgacagcaggagcgatggccgggatcctggagcactcggtcatgtacccggtggactcggtgaagatgccttcaattaagttgcagagttctgatggagag

SEQ ID NO: 521123 - DNA, 75 bp, Homo sapiens
cgcagctccggccgcctggctccccatactagtcgccgtctgcgctcctcagaccaccggcaggtgaacagcctg

SEQ ID NO: 521124 - DNA, 110 bp, Homo sapiens
gtttagagcaacagatcgtggatctgaaagtgacaagcattttagaaaggtcttgcaagagcaaaatccgtccctagccacacatactccaacgaagtggttaccttgtg

SEQ ID NO: 521125 - DNA, 75 bp, Homo sapiens
ctgctacctggcttcttacctcacgaacaagggagcagattaagcgagtaaaagactcggatgatgtacctatgg

SEQ ID NO: 521126 - DNA, 96 bp, Homo sapiens
cggccgcacagtgaagatggagaagcctcgattgtggtcaataacccagatttgttgatgttttgtgaccaagtttcagagtcaagtggtgagatc

SEQ ID NO: 521127 - DNA, 82 bp, Homo sapiens
gaagagcagagcggagggagccccagacacgcaaatggagctgctcctggtgaacaagctcaagtggaacctggccgcaatg

SEQ ID NO: 521128 - DNA, 75 bp, Homo sapiens
gtagtcctgggagcacagcagaagtttcctctgtgacgagggtgcaggtatctctggggactacatcgatcgcgt

SEQ ID NO: 521129 - DNA, 90 bp, Homo sapiens
ttagaactcggaggaatagtacaacaattatgagccgtcacagcctggtaagtatagaaataatcagcaactgctgtgatgagatgctgc

SEQ ID NO: 521130 - DNA, 100 bp, Homo sapiens
gagaatgctggccacagatggtgctgcccaacagtgatgactatgactccaagaaacgcaaacagcgggctggtggagagccctggggtgctaagaagcc

SEQ ID NO: 521131 - DNA, 50 bp, Homo sapiens
aagccgcagaccttgtgatattccaggctttcttctagtcaagatgagtg

SEQ ID NO: 521132 - DNA, 50 bp, Homo sapiens
ttcagctacaacatcatcttctgggctcatggatttgagatcttatgctc

SEQ ID NO: 521133 - DNA, 75 bp, Homo sapiens
ccctgtctcaattgaagaaagagcgagaagaaagttcttgcataagctcttccttttcttgttgcaattcctgca

SEQ ID NO: 521134 - DNA, 100 bp, Homo sapiens
cagaaaaactctctcagcggctttctgaactagattgggtctcctaaagcgtgcttttcaaaagtcggcatcagtccggaatattctcaggcctgtcggg

SEQ ID NO: 521135 - DNA, 74 bp, Homo sapiens
gagcaaacagaggcgctcatccacagagccacatctgttagttggtagctggcagtgttgtgatggcttttgaa

SEQ ID NO: 521136 - DNA, 75 bp, Homo sapiens
tggaacttgccctgtctcctcgcagatgaggccaagtcctgtatctgccatgtctgtggcgtccacctcaacagg

SEQ ID NO: 521137 - DNA, 100 bp, Homo sapiens
ctcgctcggctgcgggaaatcgggctgaagcgactgagtccgcgatggagatatcattctctgctggaactgggtgagaagcgtaaaggcatgttggaga

SEQ ID NO: 521138 - DNA, 73 bp, Homo sapiens
tcaccgccctcaccacccctatccagacggctgcccttcaagtaccaggttgaaaaataccggccacagaccc

SEQ ID NO: 521139 - DNA, 99 bp, Homo sapiens
cctggctagaagcagagacaccaggacagaaaagacagtgttctgctttcatggagttcacagaagagtcgaggagaatcactgcagcccccctcgccc

SEQ ID NO: 521140 - DNA, 100 bp, Homo sapiens
cggggtgccagaaggaaagcatagtgccttgtggtggaacatacaatgcaacttggaccccacaaaatatttcatcacccaattcatcagacccagatgt

SEQ ID NO: 521141 - DNA, 83 bp, Homo sapiens
gcagttcaacgagaatgaagccatccaatggatgcaggaaaactgacaatgcagatcttcgtgaagactctgactggtaagac

SEQ ID NO: 521142 - DNA, 90 bp, Homo sapiens
cattggaagatttggaacctcactgaaaattggtattgttggattgccaaatgttgggtggatccaaccgaagagaaaggggtgctccac

SEQ ID NO: 521143 - DNA, 75 bp, Homo sapiens
gagctgagaaacaaagccacccagccaatgaagcttctgcagaaagccgtcattacacctgattttgaaaaaaac

SEQ ID NO: 521144 - DNA, 75 bp, Homo sapiens
agcggcggcagcggcggcgcggaggcggctgaggtgcgagccggtacatgtcccagagcaagcacacggaggccc

SEQ ID NO: 521145 - DNA, 80 bp, Homo sapiens
gagaacccagagaagaatgaggcctttctggtttgttgataagccggggcccttcgtgggaccctgcggtcactggatca

SEQ ID NO: 521146 - DNA, 73 bp, Homo sapiens
cttcttaaaattcctctctcgacacttcgtttcttgcagaacataaattattaggaaacattaaaaatgtggc

SEQ ID NO: 521147 - DNA, 75 bp, Homo sapiens
gactgttactcacatatttacttcagatggtctgcatgctgagggaatgacagaggaagaggaagacaaacttct

SEQ ID NO: 521148 - DNA, 100 bp, Homo sapiens
aaaacatatccgagggtgtcctgttacttccaagtcatcaccagaaaggataagttctgaacgtcgaaaagaaaagtctcgagatgcagccagatctcgg

SEQ ID NO: 521149 - DNA, 82 bp, Homo sapiens
gaatagagttgagcctgtgggacacttcggtgaatgagttcacggtgatcaggaagaagttcaagtgtccgtactgcagctt

SEQ ID NO: 521150 - DNA, 100 bp, Homo sapiens
acggagctgcagtcggcactgctactgcgaagacagctggcagatcgacgacatcgcggatggcgccgtgaagcccccacccaacaagtaccccatcttt

SEQ ID NO: 521151 - DNA, 100 bp, Homo sapiens
tatgcaagttttcacttatctcgaaagcctatcagcatagttaaggtgaatcagttcagacagctgtattccaaagtcatcaatgataagcatgatgatg

SEQ ID NO: 521152 - DNA, 90 bp, Homo sapiens
cgccggtcttggggggatggttccatcatggcgtcaatgcagtggatccggattggtgccaatgtctccaacttcacttttgctcctagc

SEQ ID NO: 521153 - DNA, 99 bp, Homo sapiens
gttccaagtaccacggctatccttatagggttagtcagcaacataaaatcaacctaatgacagcagacaacttatccatctgtttttggccaaccttga

SEQ ID NO: 521154 - DNA, 89 bp, Homo sapiens
attttgagaggcgatttttcctcagccaataggaactgcatgagtgagttcatgggactcatccgaggtcactatgaggcaaagcaagg

SEQ ID NO: 521155 - DNA, 100 bp, Homo sapiens
ggattatagcctgcacaaggagaggaccggcagcaatcgatttgccaagatggcctgcacagcgtgacggcgcagtgtgtgctgcgcgtggtcatcatca

SEQ ID NO: 521156 - DNA, 87 bp, Homo sapiens
gcaagagcaaactatcagaatgggaagaacaatgtgccaaggctgaaattatcctacaaagccagagactgctgctactttgaaacg

SEQ ID NO: 521157 - DNA, 100 bp, Homo sapiens
ctactagaaggggaggggagtggaaaggctctcagtgaaaaaggctccataagttctacctcagaggttcattcaccaccaaacgtaggactaagacgta

SEQ ID NO: 521158 - DNA, 100 bp, Homo sapiens
ggcggagcagaggaaccacacgctgatcatggccgaatacatcaagcaatggtaacatctttaaatgaagataatgaaagtgtaactgttgaatggatag

SEQ ID NO: 521159 - DNA, 50 bp, Homo sapiens
cggacagagacgtgaagcactgaataaagaaggggatcaacctgaaagag

SEQ ID NO: 521160 - DNA, 100 bp, Homo sapiens
ggggtccacactgcaatgtttttgtggaacatgaacatatgatatttgtgaagtatctcctggaccccacttgaatatgatcgttggagccaatggaaca

SEQ ID NO: 521161 - DNA, 89 bp, Homo sapiens
ataggtctccctcctgtgcggccagagtttgcccccaaatacatcaagatgtttgtactggatgaagctgacgaaatgttaagccgtgg

SEQ ID NO: 521162 - DNA, 75 bp, Homo sapiens
gtggctcctgcgatggcggcggaagaggaggctgcggcgggagacaatgcagatcttcgtgaagactctgactgg

SEQ ID NO: 521163 - DNA, 75 bp, Homo sapiens
ccggacaggccttgtccggcaataccaagcggtctgtatggacccaggcttgtcaaactgtactatacacatcgt

SEQ ID NO: 521164 - DNA, 50 bp, Homo sapiens
ttcttcgtgaggctgctcttcgagcgaattgtgaaaaattgggtgagctg

SEQ ID NO: 521165 - DNA, 100 bp, Homo sapiens
cggcccgacgaggaagttttctactgtaaagtcaccaacgagatcttccgccactacgagtcttattagtaggtaagaaacagctgctcctccacctcca

SEQ ID NO: 521166 - DNA, 100 bp, Homo sapiens
tcgtgatgagttcccaatgattttaattggtaataaagcagatctggatcatcaaagacagggttacacatcattttggaatgactgtatatcatctgga

SEQ ID NO: 521167 - DNA, 82 bp, Homo sapiens
aaaaaccaaagtctcttctgctgggaaatcccagtacagatcgtcctctcagggtgcgccatcattgtccgaggtcagcctc

SEQ ID NO: 521168 - DNA, 96 bp, Homo sapiens
ccgggacgcacgctcagctgaggaggacccccaaagctcttgaatgtcgtctctcaactagccaaacggaatctgcgactgctggtcctaggccgg

SEQ ID NO: 521169 - DNA, 75 bp, Homo sapiens
tttcacagacactgatgagctgcaattggaagcagcaaatgagacgtatagatggacagagacgtatgtgcgttg

SEQ ID NO: 521170 - DNA, 105 bp, Homo sapiens
ctctcgggtccatgctgcacttgtctaccacaagcatctgaagagagttttcctgatagatctcaacagtagacaatctctatgggaagcagaaggcaaggaccc

SEQ ID NO: 521171 - DNA, 75 bp, Homo sapiens
gcggagtcggggctcctgacgaataccctctaccatctgctttggtcagggtgccgctcgaggatttaaaagcaa

SEQ ID NO: 521172 - DNA, 100 bp, Homo sapiens
ctggcccattaacaagcagctcttccggaagatcaactgcagactgtcctattgcatctcaagcccagcccttgccttttctcttgcagcaacagcccag

SEQ ID NO: 521173 - DNA, 100 bp, Homo sapiens
gcttcagcctcctgagtagctgggattacaggatgaccggaaagaagggatgaccgcgtttgtggaaaagagaaaggccaacttcaaagaccagtgagaa

SEQ ID NO: 521174 - DNA, 75 bp, Homo sapiens
acacctgcagcgcaagctgggtgccaccaagcaggagaggagagccagagaagtgacagggaagctacaggttac

SEQ ID NO: 521175 - DNA, 75 bp, Homo sapiens
tttggcattgacatttaattttagggtcctttatatagaagggagagtagccctcggaaggctcggtcacactct

SEQ ID NO: 521176 - DNA, 101 bp, Homo sapiens
cgtaccacatttccaatttgctggaaaaaatgacatccagcgacaaggactttagtgcattccactcttcgttcaacttgttttggagagattaactcgag

SEQ ID NO: 521177 - DNA, 115 bp, Homo sapiens
ccatcagagccttggtttaaaatcacaggggggacaccagacacctcacttcttacacttggctgctgccaaggggccaagggatgagctggggccctccttcccaatggcatct

SEQ ID NO: 521178 - DNA, 83 bp, Homo sapiens
gtttggacgccggcggagacgcgggcgaggtccgcgggagagctgtggggcttggtgagtgtttcgtggcctctcgggttggt

SEQ ID NO: 521179 - DNA, 75 bp, Homo sapiens
gcgagaagtcgcgggcccagcccacagcaggggtcctcactgagcagcgagtcgtcccccgtgtcctctccggcc

SEQ ID NO: 521180 - DNA, 100 bp, Homo sapiens
tttaaaataaaggacttccctgaaaaagctaaggatatctttattgaagctcacctttgtctaaataaggctgacaggacaactggatcagtttcattaa

SEQ ID NO: 521181 - DNA, 75 bp, Homo sapiens
cacaatcacacacctatgctggtagagtcagtggcccacaagaagagcattagtgccagcagtagttcccaaggg

SEQ ID NO: 521182 - DNA, 50 bp, Homo sapiens
tccggccggacaacttcgttttcggggccagcagcctcccccgatgggtc

SEQ ID NO: 521183 - DNA, 75 bp, Homo sapiens
agcatgcttagcattcgagagaacaaaattaaacaactacctgctgaaattgacttaagcccttagatgtggcgt

SEQ ID NO: 521184 - DNA, 100 bp, Homo sapiens
gcggagcggattctgcttttaggagtacccgccaacaagcgggaccgagcaggaatccgtatctgggaacagaatgtccagaggaggtttatgaccctcg

SEQ ID NO: 521185 - DNA, 75 bp, Homo sapiens
cagcgggacccggcgaagacgcgaccgcggcgcgagtcaccatgacgcagccgtagacaccagctccgaaatcac

SEQ ID NO: 521186 - DNA, 90 bp, Homo sapiens
ggagatcgagaggaaataatgaggtttgatctgtggatgaaatgaatcatgattttcaagctcttgcattagaatctcggggaatgggag

SEQ ID NO: 521187 - DNA, 82 bp, Homo sapiens
cccgccgcccggccggtgctccctggcgcagccacgcaggcgcaccgcagacagacgcaggaggagggagacgcactgatga

SEQ ID NO: 521188 - DNA, 75 bp, Homo sapiens
gaagaatctgaagagctggatcagaagacattcagcattggaatctaagggaggaaattatcaactgtgcacaag

SEQ ID NO: 521189 - DNA, 100 bp, Homo sapiens
gcagcaggaattagaacaacaaaaggtctgtgctggacccaaaggagacaacatttatgaatggaggtcaactatattgggacccccaggatctgtctat

SEQ ID NO: 521190 - DNA, 99 bp, Homo sapiens
ctcttggagcaaatgatgaagacatccggaagaaggcagaaaaagtacatgagttaaatgaagaaataggaaaactccttgctaaagccgaacagctag

SEQ ID NO: 521191 - DNA, 83 bp, Homo sapiens
cttggcccttgttcccccaaatgtctgactctgactctcggactgagaaacgcaaggcgtccgagctgggccacagcctgaac

SEQ ID NO: 521192 - DNA, 75 bp, Homo sapiens
atgggccctggcggtggacgagcaggaagctgcggctgagtcggtaatggaactgctggtccatctgaataaacg

SEQ ID NO: 521193 - DNA, 82 bp, Homo sapiens
atctcttcaatagcagttctacaccggtatcaggccataaaattttgagtagaaaaatccagaaatttgaaaatcagtatcg

SEQ ID NO: 521194 - DNA, 90 bp, Homo sapiens
ccggcttcaatatcttcacccagcatgacaaagaaacagccttggtataatagcacgttagcatcaagacgaaaacgacttactgctcat

SEQ ID NO: 521195 - DNA, 100 bp, Homo sapiens
cctggaagtagcaggccgcatgcttggagagctagagccggtgcaggccacgcagaacaagacagggaagtatgtgccgccgagcctgcgcgacggggcc

SEQ ID NO: 521196 - DNA, 75 bp, Homo sapiens
tttggcattgacatttaattttagggtcctttatatagaagggagagtagatttccacaagacggcaccctatgt

SEQ ID NO: 521197 - DNA, 87 bp, Homo sapiens
ccccgggcggcggtcgccaggtctcagggccgggggtacccgagatgcgagccacccctctggctgctcctgcgggttccctgtcca

SEQ ID NO: 521198 - DNA, 75 bp, Homo sapiens
gcaggagcagcccaagcgccttccctcacacagagctttttgtacatgccttcaaggatcaacttgtcaggagtg

SEQ ID NO: 521199 - DNA, 97 bp, Homo sapiens
agagctcagacacagagcagcagtcccctacaagtgagaaagatcagtctaaagaaaaggagaagaaagtgaaaaaaacaattccttcctgggctac

SEQ ID NO: 521200 - DNA, 80 bp, Homo sapiens
gaaatcgacacacaaagaatagagttgagcctgtgggacacttcggtgccctctggtggtcagaagatgctgtgctgtct

SEQ ID NO: 521201 - DNA, 75 bp, Homo sapiens
agaatcaagttgcaatgaaccccaccaacacagtttttgccaccaaaaccctcaacaggggcatctctgagttca

SEQ ID NO: 521202 - DNA, 50 bp, Homo sapiens
gcttgttgtctttgatactacattacaactccagcggcgccatgagcaaa

SEQ ID NO: 521203 - DNA, 74 bp, Homo sapiens
aattcttatagccattcttatagttgtaagggccacaacacacagtgatcttgttctaagagcaacaaagctgg

SEQ ID NO: 521204 - DNA, 100 bp, Homo sapiens
cacttatctgcgccccctgctggttgtgcgaaccccgggcagcccgggaaatctccaagtcagaaaggacttgattattcttagaaatgcacttgacctg

SEQ ID NO: 521205 - DNA, 75 bp, Homo sapiens
aaaccctctctctaccacgagcagcgccctgggagccctcacgagtcccggaactctaatgaatcattgattgac

SEQ ID NO: 521206 - DNA, 100 bp, Homo sapiens
atgtctcgctccgtggccttagctgtgctcgcgctactctctctttctggcctggaggctatccagcgctaaggcagctggataagcacagccaggccac

SEQ ID NO: 521207 - DNA, 100 bp, Homo sapiens
aattgtcagtctaacagaatcctgtcggagttgtagccatgccctagtgatatcagtatcaagataaaagtttggaatgggagaaaaattctcaaagcct

SEQ ID NO: 521208 - DNA, 80 bp, Homo sapiens
cgaacacgtgaaggaaaagcagctccgtccacaacgccgcttcggggctcctaggtattgttgcagcatctggcagtgag

SEQ ID NO: 521209 - DNA, 82 bp, Homo sapiens
cagctagcagagaagagaatgctggttgactacagacaaaaagctgctgcagcaggtagaattcccacaaactatctgagaa

SEQ ID NO: 521210 - DNA, 90 bp, Homo sapiens
gaaccagagcctgaaggaggacctggaccgcgtgctgagcacctccccaaccatctccaagacacaggagctgaagaagcaggtggagag

SEQ ID NO: 521211 - DNA, 50 bp, Homo sapiens
gtccagcatgaatcccgaatagggcatggtctagtggcccagtcaggacg

SEQ ID NO: 521212 - DNA, 100 bp, Homo sapiens
attaaaggctagtctcaggctggggatggctcctgtctatttcttctctctcagagactgcagaggtgaccacagtgacagtggccaacgtgggggctgc

SEQ ID NO: 521213 - DNA, 101 bp, Homo sapiens
cttccttcgctaacgcctcccggctctcgtcagcctcccgccggccgtctccttaacaccgaacaccgtatggcatttcaaatatagatacaaccattgaa

SEQ ID NO: 521214 - DNA, 100 bp, Homo sapiens
gctgctgccgacccctggcacctggcgcccagcgcgcccgtggccgctgccgcctccgccccagtttaatagaaaatggtcagcttgaaattgtgacagg

SEQ ID NO: 521215 - DNA, 100 bp, Homo sapiens
gcagatcagaggatggaggaaagagcgccagagaggcatcgttggcttcacagtatgactgatgatcctccaacaacaaaaccacttactgctcgtaaat

SEQ ID NO: 521216 - DNA, 85 bp, Homo sapiens
ataatgcaatagaagctgtggatgaatttgcttttctggaaggaagcagaatctgaaactttctgaggagagcatttgagcttca

SEQ ID NO: 521217 - DNA, 80 bp, Homo sapiens
cgcggggccatgtgcaggaccctaacgacaggcgcctccggcccatttacgattacattcagatattttggcagagactt

SEQ ID NO: 521218 - DNA, 97 bp, Homo sapiens
aaatttatgtttgtagcaggaatgtttgtctcaggaggagttacaattctctttggatgatcatagcagggttaagctagcacagcttgctgaaaag

SEQ ID NO: 521219 - DNA, 96 bp, Homo sapiens
ctggtgcctgtgcaagttgttgaggccaaacgtaccaagaaagtcgggatcgtcggtaaatacgggacccgctatggggcctccctccggaaaatg

SEQ ID NO: 521220 - DNA, 125 bp, Homo sapiens
caggccctatggggcatacctatggctttattgacctcgactcccatgcggaatctgagaaaaaggggttgattgaaagaatctatatggtacaggatattgtttcaactgttcaaaacgtcttg

SEQ ID NO: 521221 - DNA, 100 bp, Homo sapiens
acgaggcggcgccgccgggctgtggagggctcttccgtgggcggcggcttcgcgggcttggagttcgcgcggccgcaggagtcggagccgcgggcctcgg

SEQ ID NO: 521222 - DNA, 90 bp, Homo sapiens
gaaatctgaaaatgcccctggggagacacatgcacaagacagcagccaacatgcctgactctgagctattcgagctcatctctgagaacc

SEQ ID NO: 521223 - DNA, 75 bp, Homo sapiens
ggacacagtgatgaagaaagtgttagaaacagtagtggagaatcaaggtactgtgagaatagagatgtttcgaaa

SEQ ID NO: 521224 - DNA, 101 bp, Homo sapiens
gagctgaacgtcttgcaacagtggccgcacgcatagttggccagtcagtgctgaaagatgtaagcaaagtgaagaagctgaagcaatctggagagcccttc

SEQ ID NO: 521225 - DNA, 51 bp, Homo sapiens
acacctggatccaggataacggaggctggaacctgggatcctcatcgccaa

SEQ ID NO: 521226 - DNA, 74 bp, Homo sapiens
ctgggcctcccggtccgcaagcaggtctcggcgcggaagatggccggcggcgtggacggccccatcgggatccc

SEQ ID NO: 521227 - DNA, 82 bp, Homo sapiens
ttgggatcccccagttccaaagtgtcttaaagggtcctgcagttctgagcttgggttccctttgcctggacaccaaccaagc

SEQ ID NO: 521228 - DNA, 80 bp, Homo sapiens
aggacgtccatcccgtcgagaaccagtccgggatgtgggaaggattcaagatggattcatcatttttcggtggtggaaaa

SEQ ID NO: 521229 - DNA, 100 bp, Homo sapiens
tttgtacccctttttgcacactgtcagcaaaacacgtccctttgagtatctccggctcaccagccttggagttattgagacggggtttcaccatgctggc

SEQ ID NO: 521230 - DNA, 87 bp, Homo sapiens
cccgccgggagctctgaccgaggcgcctcgctggggcggggaccttgccttgcccgggatttgcttgtaaatgcatcacgaagaggc

SEQ ID NO: 521231 - DNA, 74 bp, Homo sapiens
tctccttctgccacatttgttttgagctaaatattgaggggagaagctcagtgggtgaacggaggacattggcc

SEQ ID NO: 521232 - DNA, 100 bp, Homo sapiens
agctgggcgacggcgccttcggcaaggtttacaagttggagaaggaacgagagaaggaaattagtgatgatgaggcagaggaagagaaaggtgagaaaga

SEQ ID NO: 521233 - DNA, 104 bp, Homo sapiens
ccaccatcaagctgtctaagtccaaagatttttacccagaatctggccaacctatttgtggaaatggaatggtagaacaaggtgaagaatgtgattgtggctat

SEQ ID NO: 521234 - DNA, 100 bp, Homo sapiens
tttgtaaatgtgagtggaagccatgaggccaaaggcagttgtattgatcatgatgctgcgattaatagatatagccgtttatcaaaaaaaagagaaaatg

SEQ ID NO: 521235 - DNA, 100 bp, Homo sapiens
cagctatgttagaagaaatgctgttttggccatctataccatctatagttccgatgaagttaaattccgtcaagatttaatgaatattgcgggcacaaca

SEQ ID NO: 521236 - DNA, 96 bp, Homo sapiens
ttgggatttttaaccagaagattgtcaatggctggcagctctttagtcaagagacggtgatgaagtttgtgccgcggtacagcctcgtcctagaac

SEQ ID NO: 521237 - DNA, 98 bp, Homo sapiens
ccgccgccgctgccgctgccgctgccgcacctccgtagctgactcggacagagcgggatgccaccagcttgtccaaagggaagttccaggagctcctg

SEQ ID NO: 521238 - DNA, 90 bp, Homo sapiens
gtcaaacgcagaaggactgcctcactgagcaaccaagagatccctctgtgacccagctgaccaacgccccgcagggcggcctggcggaat

SEQ ID NO: 521239 - DNA, 98 bp, Homo sapiens
agggataccacctgaattggcacaaggaactagagagcgtgctcacaaaccacacttggaagtcttgggagaggaatgcaaacggttagagcaggagc

SEQ ID NO: 521240 - DNA, 83 bp, Homo sapiens
ttacagaaagagtcaacagcagtggcaacagaacccttaggagaaatcttgagagtggacagcaattgtgaagatcgccagag

SEQ ID NO: 521241 - DNA, 90 bp, Homo sapiens
ctctgaagccgtgcccgttcttcctggagggaaagtgccgctttaaggagaactgcagtgctatgctggaaaatgagaagaagaagcgtg

SEQ ID NO: 521242 - DNA, 90 bp, Homo sapiens
acttgacccacaggattattctacaggtgaaaagtctcttccatctcccacactaacttgtgcattgactaatggaagcattgaagtcca

SEQ ID NO: 521243 - DNA, 100 bp, Homo sapiens
tcttgcctcaggccagtcgcctccaggccaagagggatccttcacccgtgtctgcctggctttctccggaccccctgtttctggaacagaggagggtcag

SEQ ID NO: 521244 - DNA, 100 bp, Homo sapiens
cagccgctcccggtgcaccagcctcactctctggtttctgagggtttcacagtcaaagccatgatgaaaaactcagtcgattcaagatgaccaacgaaga

SEQ ID NO: 521245 - DNA, 99 bp, Homo sapiens
gcattggtttggctttggctacacagcactggttgtttctggtgggatcgttggctatgtaaaaacaggttggctcccatcatctgagactccacagag

SEQ ID NO: 521246 - DNA, 83 bp, Homo sapiens
attcagcaggaaataatggaaaaagctgcaatatccaggatatccatatcaaaccagagcactatagtgaactcataaagaaa

SEQ ID NO: 521247 - DNA, 97 bp, Homo sapiens
ggagtcacagcagagctggtggattctctagaggccacagtcagcggcaagatggaatggaagttggatacactttgtgacttgtacgagacactga

SEQ ID NO: 521248 - DNA, 75 bp, Homo sapiens
ctttgggaaagccactcgaaaaggatgctggaggtcagcagattggcttcttgctaggaagctgtggtattgcct

SEQ ID NO: 521249 - DNA, 100 bp, Homo sapiens
ctccagatggcgtcttccgtgggcaacgtggccgacagcacagatatacgccagcggttaggaaaaagaccacattctccggaaaaggcttttagtagta

SEQ ID NO: 521250 - DNA, 80 bp, Homo sapiens
ggaaagtgcgtcatcctaaggaacatcgacgtgagaagccctaccactgcaactgggacggctgcggctggaagtttgcg

SEQ ID NO: 521251 - DNA, 98 bp, Homo sapiens
gaaccaccgagtccctgcccacaagaggtaccagcccacagagtatgaacatgcggccaactgtgccacccatgcttagagacggggtttcgccgtgt

SEQ ID NO: 521252 - DNA, 100 bp, Homo sapiens
gcctttgcacctaaatcctggatggaagatagcttgaacagggctgacaacatttttccttttccgggttacacatcattttggaatgactgtatatcat

SEQ ID NO: 521253 - DNA, 90 bp, Homo sapiens
aaaagagatgtggggggattctcgacctgctaacagaactggaccttttcggccatcagcatcagcaaagccatcaacacccaggaggcc

SEQ ID NO: 521254 - DNA, 50 bp, Homo sapiens
ggagcctgctccctgctcagctgcgtcgcctgcgaggccgctggccaggc

SEQ ID NO: 521255 - DNA, 96 bp, Homo sapiens
ggatgttcttcttcgagtatttgtagaaggcaaccagcaggcctttttactggagaacgtcccttgtaataatgcaagctgtgaagaggcgcgtcg

SEQ ID NO: 521256 - DNA, 75 bp, Homo sapiens
cggcaccaagaccggccacatcccagcactgcccacctctggcctcatggcggtccgagcttcgttcgagaacaa

SEQ ID NO: 521257 - DNA, 106 bp, Homo sapiens
cctagtgctcagataccatcctctcagctcctgccttacagcccgggcctagttccccgagagcgttcagacagtgggggctcaagctcagagccatttgaccgtc

SEQ ID NO: 521258 - DNA, 100 bp, Homo sapiens
gaaggcaaagggaaggtggtggacctgctggcgcaggacgccgacatcgtgtgccgctgccagctctggccctgccccatctcccagtagcttcctgccc

SEQ ID NO: 521259 - DNA, 90 bp, Homo sapiens
ggaagatgagctgtcctttcaggaaggagccattatttatgtcatcaagaagaatgacgatggctcagtagatgaaggcgtttctgaggg

SEQ ID NO: 521260 - DNA, 83 bp, Homo sapiens
cgcagggcctgcagcgggagctggacggcgagcgcgagcggcgcgagaaacgcgagcccagcattgacctgctgcaggccttc

SEQ ID NO: 521261 - DNA, 96 bp, Homo sapiens
gctactccggacgcaaagctgtcatcgtgaagtggtagacggaggagaagtccatccccaccacccaccagaaggcgacggtctccttctcccgcc

SEQ ID NO: 521262 - DNA, 74 bp, Homo sapiens
ctcggtgggggcttagcgcactggaggagcggcgggcttcagacaggagagtagttatcttgatggaattagaa

SEQ ID NO: 521263 - DNA, 98 bp, Homo sapiens
acttgctcgggcaaaagttgtgcattggcccgatcaagcctgacttctagccaagggtttgaaagtattcttgaagggctgtttggacctgcattatt

SEQ ID NO: 521264 - DNA, 50 bp, Homo sapiens
cacacagacttttgatggacaggaggaggagagacttcagcatgcaaacc

SEQ ID NO: 521265 - DNA, 100 bp, Homo sapiens
aagagcacctgcacctcaccatcatccagaactttgacagaggcaaagaaggaagacttcaagaagtcattgaaacccttctctctctggaaaagcagac

SEQ ID NO: 521266 - DNA, 90 bp, Homo sapiens
caccctctcgcctcgggtctcgggggccgctctgggatcccggccaccagcaattgtccggggtcccttcagtgttgtacgacgatgtat

SEQ ID NO: 521267 - DNA, 84 bp, Homo sapiens
cagatcaacaacgaggacctcttccccaccaacgttggacttccacagtcacctgacacggagtgaggtcgtgggttacctggg

SEQ ID NO: 521268 - DNA, 100 bp, Homo sapiens
attgctggtctcaatgtacttagaattattaatgagccaactgctgctgctattgcttacggcttagacaaaaagatgcctgaggaaacccagacccaag

SEQ ID NO: 521269 - DNA, 101 bp, Homo sapiens
gcagggtttctcaatctctgcagatggccgtacgtgtgaagatcttagcaaagcaatgtctcaagatggtgcttctcagttccaagaagtcattcggcaag

SEQ ID NO: 521270 - DNA, 90 bp, Homo sapiens
cttttcaagcgaaatcctgcaaacagattagatccaaaatacggagctggcatatacttcaccaagaacctcaaaaacctggcagagaag

SEQ ID NO: 521271 - DNA, 99 bp, Homo sapiens
ggaataccactattccaaccaagaagagccaggtcagtttaggggctggtgcaaaggatgagttgcacattgttgaagcagaggcaatgaattacgaag

SEQ ID NO: 521272 - DNA, 74 bp, Homo sapiens
aaagagcaagcctaactcaagccattggcacacagaaagcagaagccactggagaaaaacggccaagaggcaga

SEQ ID NO: 521273 - DNA, 100 bp, Homo sapiens
ccggactgcacttgcgaagggagcttggggaggaagttcttgcatacactgagggacttcacggaaaatggatgttcagcgagatacgagctgtattttc

SEQ ID NO: 521274 - DNA, 132 bp, Homo sapiens
cgggtgctgctggttagtgtgctctgagggagggtccgagccagccgctgttttgccggaggagcccctcaggccggatacagcaggccaggagcgatttcacaccatcacaacctcctactacagaggcgc

SEQ ID NO: 521275 - DNA, 96 bp, Homo sapiens
agacactgccaccctcaaggagttcacgttcatgggcgagggaacagatgagaaacccggcaatgaaagctggagtgtaatggcacaatctcggct

SEQ ID NO: 521276 - DNA, 100 bp, Homo sapiens
caggaggcggggctttcaaattcgaagaggacttcagaatggttggaaaagagactgttcaaaccactgaggatcagattttgaagagagatatgccacc

SEQ ID NO: 521277 - DNA, 75 bp, Homo sapiens
ttgtcaccacagtcatttgccatgttgctctatatgcaatcagtgctgtctactttgctggagtgatggtgcgac

SEQ ID NO: 521278 - DNA, 100 bp, Homo sapiens
gaagcacaaccacagcaagagcacctggctgatcctgcaccacaaggtgtacgatttgaccaaatttctggaagagatggagttttaacattgaatgcgg

SEQ ID NO: 521279 - DNA, 75 bp, Homo sapiens
ggtgaaggcggcatcattatcaatatgtcatctttagcaggcttgcagatgggtcaagggttgtggagagtggtc

SEQ ID NO: 521280 - DNA, 100 bp, Homo sapiens
ggggggcgagcctctcagccggccgggatggctaccacggccgagctcttcgaggacctctttgtttttagacatgaattggccataatgagactagcag

SEQ ID NO: 521281 - DNA, 82 bp, Homo sapiens
tgtgtcctaccagggagctttgccagcaggaagaattgtatttgcaacgggtagcagaattggacaaaattacttatgaaag

SEQ ID NO: 521282 - DNA, 98 bp, Homo sapiens
ctgagccaggtgaagggccccgtaaattggaaggatgcacaagttccaaggttacgtttcaagtcttcctgcgagcaattaatcagtatgcagatatg

SEQ ID NO: 521283 - DNA, 100 bp, Homo sapiens
cccgtccgtccgccgccaccacccactccggacacagcccagctcaacattggcaatgtgctccctgtgggcaccatgcctgagggtacaatcgtgtgct

SEQ ID NO: 521284 - DNA, 75 bp, Homo sapiens
tggaggatgaaagcggtctggtggagctggagctgcggggatgtcctggaacaggtggaggcctatcaagctgag

SEQ ID NO: 521285 - DNA, 82 bp, Homo sapiens
caggaattagaaggtgacgaggagggagaagacgaggatgatgcggaaattaaccccaaggctgctctttggcgtaaattgc

SEQ ID NO: 521286 - DNA, 100 bp, Homo sapiens
gacccaggcgctcgctgcttaccaagagggtcgccgcaccccaggatggatcccccagaggccagaggcacccaatgagttctatgatggagaccatgac

SEQ ID NO: 521287 - DNA, 90 bp, Homo sapiens
tgtgctcagtgacactgcgtggggttggtgccatctacatccgtcgccggccccgtgtgcgtgtggaggccctgcagagtggaggggggc

SEQ ID NO: 521288 - DNA, 88 bp, Homo sapiens
ctggctatgaaggaagatggaagattactggcttctttggagtgcttagtgcagttggtgagagcgggagccacactcaacgtctcca

SEQ ID NO: 521289 - DNA, 100 bp, Homo sapiens
tgtctttacaatgataactgagcagttgaagaagacctactttaacatcctcatcaagcccgagactttggccaagatatcaatgcttacaattgtgaag

SEQ ID NO: 521290 - DNA, 82 bp, Homo sapiens
atgttcttaacccagaagtagctgaatgtgttactccattgctgaggagtgtttggtgccctggttgtcagatgttggaaag

SEQ ID NO: 521291 - DNA, 100 bp, Homo sapiens
gcagattatatcgcatcctatggctcaaagaaagatgattatgggctttgttatgcacctaaagccatattggaagctccagaagaaagagcaccccccg

SEQ ID NO: 521292 - DNA, 75 bp, Homo sapiens
atcaagatggccatgtggcaggaaaaagcttgtggtgaaggggggcaaaaaaaagaagcaagttctgaagttcac

SEQ ID NO: 521293 - DNA, 106 bp, Homo sapiens
cagaccctggagcctcagttggaagcagccgatccagcctgcggagcctgtggggcagcgccactggcttcaccacgcggtcagacattgggcccgcccgtgatgc

SEQ ID NO: 521294 - DNA, 140 bp, Homo sapiens
gctcggggagggggcggcggcagcgggcggacggccggcgggggcggcgtgcggcctagcgtctcagctgcagccgctccggcctccttgctgttcctgggatacgccacactcagtctggcctcggggcctttgcactg

SEQ ID NO: 521295 - DNA, 90 bp, Homo sapiens
ccgcagtgggtcccggacaaggagggctccaaacgaatcctgcggtcccatgagattgtgctgccccccagtggacaagtggagacagac

SEQ ID NO: 521296 - DNA, 109 bp, Homo sapiens
cagaaagatggaaattaagcctttgcaatttgaaattatgattgacagacttgaaaaagccagttctaatcagtatctctcagaagatagaagtgtgcaagaagtacta

SEQ ID NO: 521297 - DNA, 101 bp, Homo sapiens
gacgccgccgaagaagcatcgttaaagtctctcttcaccctgccgtcatgtctaagtcagagctgaagtcacctgggagcccccctggacctgagctgccc

SEQ ID NO: 521298 - DNA, 83 bp, Homo sapiens
ctcccgagtagctagtattacagggaaaaagacctcgatgaagttctgcagacccactcagtgtttgtaaatgtttctaaagg

SEQ ID NO: 521299 - DNA, 99 bp, Homo sapiens
tccctcccagcggcgcgtgagcggcactgatttgtccctggggcggcagcgcggacccgcccggagatgaggcctcaggagtgcaagtagctgatgaag

SEQ ID NO: 521300 - DNA, 97 bp, Homo sapiens
cggaaattgttaatggaccagttaatagcccacgaagcacaagagctctggccaagtattttatttcgtccctaaacattctaactatccaccaaac

SEQ ID NO: 521301 - DNA, 100 bp, Homo sapiens
agccggagtcggggacccaggagtttcctgtgtccagcgctgccggagccgcctgagacctcacctccacccgcgacaacccagtcccctgaaagcacta

SEQ ID NO: 521302 - DNA, 111 bp, Homo sapiens
gggagaagaggattggaggtgtcagtgttaaaggaacctctacaacgaaggtgaagccacggaagataaggtggggaagaaaacatgacagaaacagatgccttctataaa

SEQ ID NO: 521303 - DNA, 89 bp, Homo sapiens
tgtgtggcaaacagtgatatcttcagcgaaagtgaaaccaggatgtcagcccaccaagaagggctcgtgtgacagatgctactgagacc

SEQ ID NO: 521304 - DNA, 50 bp, Homo sapiens
ttcctgataaggacgatgggaaccagccaatggagatcttcgtggatgat

SEQ ID NO: 521305 - DNA, 100 bp, Homo sapiens
gttccaagtctattacctggggaatgtacctgttgctaaacctgttgaaacgctaatggactccactacagcgactgctgagctgggctggatggtgcat

SEQ ID NO: 521306 - DNA, 101 bp, Homo sapiens
aagttagaaaggctcaacgagaacaagctatcagagagaagaagaaggaggttcctgctgtgccagaaacccttaagaaaaagcgaaggaatttcgcagag

SEQ ID NO: 521307 - DNA, 100 bp, Homo sapiens
ctttcgggccgctttccaggaagcagcaggatgcgccgctccactgtcggtagcaacaaggcgaaacctaaccaaactgtccctcatcttcagccacatg

SEQ ID NO: 521308 - DNA, 75 bp, Homo sapiens
tgcctcccagcaccacagtccttctgcagtccctcgtccagccacccccaggtttcagcaagcagatggtggaaa

SEQ ID NO: 521309 - DNA, 75 bp, Homo sapiens
ggcggaagcacttggaactcctttataagtgtcagctgtgagcatgaatacaactttgtctgagagccccttcaa

SEQ ID NO: 521310 - DNA, 100 bp, Homo sapiens
aagtaaagaatttgatcctcttggtccattgccacctggatgggccctgttcacagagacaccccatgacatgacagcacggacgggcgaggacgtggag

SEQ ID NO: 521311 - DNA, 71 bp, Homo sapiens
acaatccaggaaggctttgggaagctatttgtgtgcgaggatcaaagtggccataaaattttgagtagaaa

SEQ ID NO: 521312 - DNA, 50 bp, Homo sapiens
ccactgtccaacatggcaatggtcagatgtaccaacagtaccagcaacag

SEQ ID NO: 521313 - DNA, 100 bp, Homo sapiens
cggaggatcgcggagtcccaatgaaacgggcagccatggccctccacagcccgcagatcttgagccagatgattgtgcatccatttacatctttaatgta

SEQ ID NO: 521314 - DNA, 100 bp, Homo sapiens
aagcatactgcgagccctgctacattgatgtgctgatggagctccttgagcagtgcgcagatggactctggaaagccgagcgctacgagctcatcgccga

SEQ ID NO: 521315 - DNA, 83 bp, Homo sapiens
cccgcgcctttgcccccgtgcgcacccccgccccgctcaccttagccccgcgcccgaggattgtcagtggcttcgccccgagg

SEQ ID NO: 521316 - DNA, 100 bp, Homo sapiens
taacttgcatgtccagagagcagacatgaaccgcctcatcatgaactacctggtcacagcctgggagcctcgatctgaaagccaagcatcacgcaaggaa

SEQ ID NO: 521317 - DNA, 90 bp, Homo sapiens
ctattgccttattttttctcatggatgttcttcttcgagtatttgtagaagggaatgctgtctctgcaatttgagaggaggtgctcttaa

SEQ ID NO: 521318 - DNA, 101 bp, Homo sapiens
aggacacgtgcgggatagacggggacaatgaggaggagacggagcacgccaaaggtttgcagaaaaaacttcagcatgtgccaggaacacaacctcacctt

SEQ ID NO: 521319 - DNA, 83 bp, Homo sapiens
aagacgctttacccgactctttgggccgttatctcacagtcatcttagtgggatttggggaagcaacagggctgtgtggggta

SEQ ID NO: 521320 - DNA, 100 bp, Homo sapiens
cggactttcaagatgggaccaaggccgcctggccatccggtacagaatgtattgccaagtacaacttccacggcactgccgagcaggacctgcccttctg

SEQ ID NO: 521321 - DNA, 102 bp, Homo sapiens
tggcccatcttggagaaaaagtgtcccaggaactgaaagagcctctccataaagcattgcaaatgctcctgagccagtgggaagaagagcgctatcctgaag

SEQ ID NO: 521322 - DNA, 74 bp, Homo sapiens
gattgtgcagtgctcgactgtgaggatggagtggctgcaaacaaaaagatgctgcacaacaaacatgtcatggt

SEQ ID NO: 521323 - DNA, 96 bp, Homo sapiens
gtcaagcatgccttcgagatcatacacctgctcacaggcgagaactatgttgtgcttctggactccacactccccagatcccagtatgactacatc

SEQ ID NO: 521324 - DNA, 75 bp, Homo sapiens
cccttcgcgtcccctgcaccatgagctggggcaccgagctctgggattttttatcaagcagaaatgcatcgaaca

SEQ ID NO: 521325 - DNA, 85 bp, Homo sapiens
tgaccgagaccgcggccgggaccgaggatttggagcaagaggtggtggtggccttcccccgaagaaatttggtaatcctggggag

SEQ ID NO: 521326 - DNA, 50 bp, Homo sapiens
ctcgaattccagaatgatgaaattgtatcgaaagctgctttgcgtcgcag

SEQ ID NO: 521327 - DNA, 74 bp, Homo sapiens
cctgggcccgttcctggtcttctcccccagactgcaattacatgcctgtctactgttctatcaattgatttcaa

SEQ ID NO: 521328 - DNA, 82 bp, Homo sapiens
ttcttttcagtgccagtccatccatcacgaccacatttgtcatgatgacagtgacaaggcgccaagcccatctttgtgtgct

SEQ ID NO: 521329 - DNA, 90 bp, Homo sapiens
gtttaggtctcaaggcaagcctattgagttaacacctctgccgctgctaaaaggaaagaccacagcaagattctttcattcgtctcctcc

SEQ ID NO: 521330 - DNA, 50 bp, Homo sapiens
cacacaactccagtgctaactcaacagaacagggataactacatccgttc

SEQ ID NO: 521331 - DNA, 100 bp, Homo sapiens
ggatggaactgactgtgaccttggtaaggtaaaataccatgaagattttgaaaaaacaaaggggagaggctttactcccgtcgtggacgatcctgtgaca

SEQ ID NO: 521332 - DNA, 82 bp, Homo sapiens
gaccccgtcccgaccctggccgccccgagcggagcctggagtgcagggctcgcggcctggcaagaatgtacagctgacagag

SEQ ID NO: 521333 - DNA, 90 bp, Homo sapiens
ctcacccaccagaggagtggaacaaggaactagcttcatctgagcagaataaaaatcatataaataatgaactaaaaagaaaggaagagc

SEQ ID NO: 521334 - DNA, 100 bp, Homo sapiens
ataaaatacttatcagtatcttatatgttagcttgacctatgcagatcttattccaggtggctttcttcctccagaagaaataaaagaaagatttgacag

SEQ ID NO: 521335 - DNA, 100 bp, Homo sapiens
taacactccaaacagtggttatacacagtctcagttcagtgctccccgggattactctggctatcaacgggataggatttttgggccttggtctcatggg

SEQ ID NO: 521336 - DNA, 87 bp, Homo sapiens
aagaagcagtagcagtgaatctacagggacgccatcgaatccggacacagagtctgggatctaataattcagtcattttggatggac

SEQ ID NO: 521337 - DNA, 98 bp, Homo sapiens
ccgctcttcccttacagtttctttgagcagtttgtggaagcgatcaaaatcaatgtggactgaacataaatcacctgatggaaggacttactactaca

SEQ ID NO: 521338 - DNA, 74 bp, Homo sapiens
caccttatttctctgctgagtgtccagatcctccaaagacagatctggtctagtgacggagcccgcgcgcggcg

SEQ ID NO: 521339 - DNA, 100 bp, Homo sapiens
catgctttttattacaagactacggagcataggaggaaaattcatcatctgggccatgaagcccccaggaggagaatcgagcaatctttttggaagtcca

SEQ ID NO: 521340 - DNA, 97 bp, Homo sapiens
cacctgcagcgacctacccactacaatacctcttgggactgggctcgatttgagatctattaatgctttcctgattgtatatttatttatcttactg

SEQ ID NO: 521341 - DNA, 75 bp, Homo sapiens
agtcggcgtaactatcgcctgacagggacacactgaataataattctctgggcaaaaagcacagttggcaggatc

SEQ ID NO: 521342 - DNA, 105 bp, Homo sapiens
cggcgcggcgcgacaccgggctccggaaccactgcacgacggggctggacatacttctcaccactgcatgaatggacatttgaaagtgccatagccaaacacttg

SEQ ID NO: 521343 - DNA, 100 bp, Homo sapiens
gagatgcttcagagagaggaagccgaaaacaccctgcaatctttcagacaggattacggggcgctgaaagacatcgtgatcaacgcaaacccggcctccc

SEQ ID NO: 521344 - DNA, 83 bp, Homo sapiens
gttacgttgtgcctgaccgaggaactggcagcagcgaacaatccatttcacagatgaagaaacagactcagtgagcacgtgat

SEQ ID NO: 521345 - DNA, 96 bp, Homo sapiens
gatatgctgtattcagctcaggaccaggcaccttctgtggaaggactaccgaccagactcccggaaatcatgttggtaggatcccagtctttttcg

SEQ ID NO: 521346 - DNA, 100 bp, Homo sapiens
tggacttggtgtgcattaacctgccgccgcccctcaccagacagatcgctgtcaaaaccctagatatggaatgtgcagatgtcccactattaactccaag

SEQ ID NO: 521347 - DNA, 83 bp, Homo sapiens
gattggcaggagattatagctctgtatgagaaggacaacacctacttagaatgtgagcatttgatccgccatatgttggtgtt

SEQ ID NO: 521348 - DNA, 97 bp, Homo sapiens
ctgcgatggacagaataactgtcaagacaacagtgatgaggaaagctgtgaaagttctcaagttcccgatgggtcccggctcggacggtccgatggg

SEQ ID NO: 521349 - DNA, 83 bp, Homo sapiens
cagaagtccagagctgaggactgcctgtttgcaggtcgcgtggggcaggcagtggcgctgcgggccaaggccttcggcttcaa

SEQ ID NO: 521350 - DNA, 100 bp, Homo sapiens
ccctccccgggccgaagtcgccgccgctgccgccatggacgattcgggcctcatccgccgccggaggctgcaggccctgtttgtgctcttcgtcctggcc

SEQ ID NO: 521351 - DNA, 98 bp, Homo sapiens
agacggcggcggccgaaagcggagagatgctgggcgtggcggccgggatgacccacagcctgccacagtgactcaggtcactcaaggaactatccgac

SEQ ID NO: 521352 - DNA, 87 bp, Homo sapiens
ccagtcggcttgcagagactccttgctcccaggagataaccagaatttccccccaaagtagagatgctaagccaaatccagaagaac

SEQ ID NO: 521353 - DNA, 50 bp, Homo sapiens
cgggcagttgcagtgttggagctaaagtcaaaatgcagatcttcgtgaaa

SEQ ID NO: 521354 - DNA, 75 bp, Homo sapiens
gtcagaaaagagtagcctgggctgtctggaaatctgagcaatcccacagagtattgatgaggaaactgaagtttg

SEQ ID NO: 521355 - DNA, 98 bp, Homo sapiens
caagtagtggaaggagtacagggaagtctataagctttgcaacagaattacagagtatgatagcatgtaacttctaatgccagcgatagtgaaagtag

SEQ ID NO: 521356 - DNA, 88 bp, Homo sapiens
gccgcgaggaggcgcgggaggtgttcgagaacgaccccgagacgatcaggatcctcatgaccagccaaagagaagaagaattaggaag

SEQ ID NO: 521357 - DNA, 100 bp, Homo sapiens
aagaaaattggcaagagtggagacaaagagatgagcagaacctatctacaagacctcttgtgctttgactattcatgctattggacgatacagccctgat

SEQ ID NO: 521358 - DNA, 90 bp, Homo sapiens
caagcccgggagacacagtgtcagaattacaagtgctccaccacatgtggcctgggggcctactggagaagggtggagtgcagcacccag

SEQ ID NO: 521359 - DNA, 74 bp, Homo sapiens
atggggctgtttggaaagacccaggagaagccgcccaaagaactggtatcgagaaccttccctgcgaacttcag

SEQ ID NO: 521360 - DNA, 100 bp, Homo sapiens
tggccgaccacggatttgcattgccgaggacgggaccccagggcagcgaagcaggtagttagaaacaaacctgtggcaaggcaggctcctggcaaacgga

SEQ ID NO: 521361 - DNA, 89 bp, Homo sapiens
taatcagcctttggacaactattttcgtcatctttggaacaaaggaaactaaatatattttgccaactttggaaaaagaattattcttg

SEQ ID NO: 521362 - DNA, 95 bp, Homo sapiens
tacaaagaattttatacacagagacattaaaccagataacttcctaatgggtattgggcgtcactgtaataagacctttccaaagtgaaactgat

SEQ ID NO: 521363 - DNA, 82 bp, Homo sapiens
cctaaagttaggcggcactccagccccagctcggtgttacctcattttgaaagtcttgggaaacaggaaaaaattcctaaca

SEQ ID NO: 521364 - DNA, 90 bp, Homo sapiens
cgtgctactgtgcgctcgatccagcaccatggggaagcgggacaatcgggtgaatttagcctatgaaatcatcctaaccctgggacaggc

SEQ ID NO: 521365 - DNA, 100 bp, Homo sapiens
tgaagataaaagtcctgaaacagttttgcagtcgggtgataaaagaaaatgtggctgaagttacccgaagttcagcttgcagtgtaattcagaagagtta

SEQ ID NO: 521366 - DNA, 100 bp, Homo sapiens
gtcggcagcatggagggccccgacgatagcgaggtcacctttgcattgcactcagatgctgagatgaatcgtcacctgtgtgtttggctttttagacatc

SEQ ID NO: 521367 - DNA, 90 bp, Homo sapiens
tgagtcacacacaacgcttgttatgttttcatcacttctctccagaagaaaccacaacaaaggtgcttgcccatggctcctcgcttccct

SEQ ID NO: 521368 - DNA, 83 bp, Homo sapiens
agcgcaaccacgagacggccttccaagagccagccccagtgcctgctgagccgtttgacaacactacctacaagaacctgcag

SEQ ID NO: 521369 - DNA, 100 bp, Homo sapiens
gcgtgcttcaaggatgcagagtatagctcgtggtcccaagaagcatctgaagcgggtggcagctccaaagcattggatgctggataaattgaccggtgtg

SEQ ID NO: 521370 - DNA, 100 bp, Homo sapiens
gctttctgctcaagtcctgtcctcttctgaccaaagaacttgtgtatgcggatacctgcttcagtaccatcaagttaaaagcagaagatgcttctggtag

SEQ ID NO: 521371 - DNA, 50 bp, Homo sapiens
agagactttcttcatgagattgaaacagcggtcttgcgagtggctggttc

SEQ ID NO: 521372 - DNA, 75 bp, Homo sapiens
acttgaagaatatacaggatctgattatcagtacgtaggcaagagtcagcgtgggagaaattgtaacgagaaacc

SEQ ID NO: 521373 - DNA, 96 bp, Homo sapiens
caagatggaagcaggtttaaaattttacataagaagttacctttttcaggatctagtgaaaagccatttgatgtatgcggtcagagaagaagtgga

SEQ ID NO: 521374 - DNA, 83 bp, Homo sapiens
cggtgacagagtggagccatggctagaggtcagctggccgccggcacctgtgagattgtgaccttggaccgggacagcagcca

SEQ ID NO: 521375 - DNA, 90 bp, Homo sapiens
ctgaagacatgctccggggcatctttgagccctttggtaaacttttggaaaagaagaagagagtccaactcaaagatatgggagaggatt

SEQ ID NO: 521376 - DNA, 97 bp, Homo sapiens
caaagaaatccaatggatgtgtggcacaactctgcaaataaatgtgcattaccattgtttgttgcaatgaccaaaacccatgtgatagcagcctcga

SEQ ID NO: 521377 - DNA, 83 bp, Homo sapiens
ccgggcgggcgaatccgtcagctcccgcgggaggcccggcgagagaaggacccgaacatccagtcatggataaaaatgagctg

SEQ ID NO: 521378 - DNA, 75 bp, Homo sapiens
gacatgtctgagactcctgctcagtgtagcattaagccaccaaagtccttggcactgtcaaatggttcaacgtca

SEQ ID NO: 521379 - DNA, 90 bp, Homo sapiens
gcaggacccgcaacagcgcagagggattttgcctaccattttacagtatttgtcttctattttggagcctttttattggaagcagcagcc

SEQ ID NO: 521380 - DNA, 98 bp, Homo sapiens
gacggtctctgccagtataaatgcagtgacgatgctgtctttgcatttcaactacgcaacccagtgcacaatggacatgccctgttaatgcaggatac

SEQ ID NO: 521381 - DNA, 98 bp, Homo sapiens
agcggaagctgcccttcaccgcgggcgccaatggggagcagaaggactcggacacagcccttgccagcatccagccatgggggatatgaaaaccccag

SEQ ID NO: 521382 - DNA, 96 bp, Homo sapiens
ggctattggactgacttttcttatgctgggatgtgccttagaggattatggctcacaggaagtaaaagagcacagctttttcaaaggtgttgactg

SEQ ID NO: 521383 - DNA, 83 bp, Homo sapiens
caataagttcgccaaagcgacaggagctctccttcagctagattttgactttgaaaaaattcctttggaaaaacatgatgaag

SEQ ID NO: 521384 - DNA, 76 bp, Homo sapiens
ctgttctgaagcaactatacttctttgctatttccacctatgtgcagaggtacaagaaaattccccaggacacaga

SEQ ID NO: 521385 - DNA, 51 bp, Homo sapiens
gtgtatgttgtcaactatccaaaagaaatttctgaataaattggcagaaga

SEQ ID NO: 521386 - DNA, 95 bp, Homo sapiens
catggccaaagactacatggagaggatggcagcgcagcctagttgcctcgtgtgcaagctgaacacaaggaccaccatcctggcagcaacgaacc

SEQ ID NO: 521387 - DNA, 75 bp, Homo sapiens
caccccacatggcccacgtacctcaggaatcccttggcaccatgtcctgtgtgcattataaattttcctctaaac

SEQ ID NO: 521388 - DNA, 76 bp, Homo sapiens
ccgacttcgatgatcgtgtgtcggatgaggagaagaaagaaggggatcaacctgaaagagtccaaccaatcgcatc

SEQ ID NO: 521389 - DNA, 99 bp, Homo sapiens
gcggggtcgctaacccgcactctcttcggacctacgacatcgcggcttctctggcgttggccagtcagccacagctattggatgaactcccaatgatat

SEQ ID NO: 521390 - DNA, 100 bp, Homo sapiens
tctcaactactgccagaaggagtcctggtgcaaacttgccttctacctgctctccttcttctattacctgtacagtgattcgcctttgccagtctcatct

SEQ ID NO: 521391 - DNA, 87 bp, Homo sapiens
gtagctctccaggcttgcaagcgattaccagtggccataatataattgtgataatgtaataaaatcaggaaacattacctgaagcag

SEQ ID NO: 521392 - DNA, 101 bp, Homo sapiens
cgtgggcagcggggctcaggagacatgcggtctggatcggattttggaggcattgaagctgctgctgagcccgggagtcgtgatgagaggagatggattga

SEQ ID NO: 521393 - DNA, 100 bp, Homo sapiens
cagcaagttagtggattaaaatctcccaagaggaatgacaaacaaccagctcttcagggaggaaataatgctggccatacagttgttgtggattctgtgg

SEQ ID NO: 521394 - DNA, 100 bp, Homo sapiens
tgacctcgcactgggagaaaaccatgtcccggcggtacaagaaggtaccgaaagcacagtaatcactggtgtcgatattgtcatgaaccatcacctgcag

SEQ ID NO: 521395 - DNA, 101 bp, Homo sapiens
gcagaatctgtttcacacaacaactgctatttgaagtgttctaagaacggaagcatctgggctggatggaatttagcatcaagcagagtcccctttctgtt

SEQ ID NO: 521396 - DNA, 100 bp, Homo sapiens
gggcacagttgaagaagcgaccgagggactgggagtcgttagtgaggtgtcatggagaaactccagctgggcccagagattctgcagcgggaaaatccaa

SEQ ID NO: 521397 - DNA, 83 bp, Homo sapiens
cctgctgtgtgtgcttctgcgccccagggagtgcatccgccccaacccttttccccctcgtctcctgtgagaattccccgtcg

SEQ ID NO: 521398 - DNA, 50 bp, Homo sapiens
attggacggtgtgccatcaaggtggaggcttcaacggaccacaccaaaat

SEQ ID NO: 521399 - DNA, 90 bp, Homo sapiens
tcgcggtggtcaagcgggccacgcacctcgtcaccaaggccaagagcataatggcagcgtctgaggttgctggtgttgtggccaatgccc

SEQ ID NO: 521400 - DNA, 90 bp, Homo sapiens
ccaccgtcttcaatgcccatgagcctttccgccggggtacagaagaggcctcttctcaggcaaccctaccaaatcagcctgttgagaaag

SEQ ID NO: 521401 - DNA, 90 bp, Homo sapiens
tcccaaagtgctgggattgcaggcgcagaatccgcatttgctgtgatgagttgaatctcttagtgccgttctgcaatgccgagactgaca

SEQ ID NO: 521402 - DNA, 90 bp, Homo sapiens
gactgatatagaagggaccttattcgtatatcgaaggatcagcagcaggctcgtcagtctcagcttgctcaggatgagcgtgtgtcccgc

SEQ ID NO: 521403 - DNA, 75 bp, Homo sapiens
gatggaagctcaggagagcccgctcttcaacaacgtcaagctacagcacctccataaggcattagcatccctagc

SEQ ID NO: 521404 - DNA, 75 bp, Homo sapiens
cagggggactgcaaaggccaatgttggtgctggcaaaaagaagatgattgaagaatcactgaagattaaaataaa

SEQ ID NO: 521405 - DNA, 100 bp, Homo sapiens
gagccttcatagggacagccgcccctggtgcacacaccctcgtattctcctgcccttccccaggtcccgttcaagaagttcttccagttcgcagtcaaga

SEQ ID NO: 521406 - DNA, 100 bp, Homo sapiens
ggtcggggctgtgatagaccaagggctgatcacgcggcaccacctcaagaagcgggcgttgcactccaggacttgcagacgaactccaagattggggcac

SEQ ID NO: 521407 - DNA, 100 bp, Homo sapiens
gttcttctggtactggagaataataacaactataaatgttgccagagtgaaaactgcagcaaaaaatatgtgtgcacagccagagaacaacacatcacac

SEQ ID NO: 521408 - DNA, 89 bp, Homo sapiens
gccgcgcgcccgcgccctccgcgcgacgccagcaaacggggattcagcgtccgatcctttggaacagggactcacgtgaagcttccagg

SEQ ID NO: 521409 - DNA, 100 bp, Homo sapiens
tgacagggaccatcctttcaggctccatcagcctcggtgacagtgtggagatccctgccctcaaggaaacggaggtggagctgtacaacgaatttcctga

SEQ ID NO: 521410 - DNA, 50 bp, Homo sapiens
ggagtgtagagactcggaggccgaggtaaattcgaaccaccattatttca

SEQ ID NO: 521411 - DNA, 98 bp, Homo sapiens
gaaaggccgagagaagctggtcctgctcacgagagaaaaaggaggggctgtgcgaaaggacgtttaagcgtctgtaccagtatatgctgaacgccggg

SEQ ID NO: 521412 - DNA, 82 bp, Homo sapiens
atagtcaccacttcacttcacctctttctggaaaccagatggtccccatccctgctggagtatttacaatgggcacagatga

SEQ ID NO: 521413 - DNA, 75 bp, Homo sapiens
aacaaagaaatccaatggatgtgtggcacaactctgcaaataaatgtgcattgctgtggtgcttgatggcaagat

SEQ ID NO: 521414 - DNA, 83 bp, Homo sapiens
ttcttttactggcaaatagtacttcaagagcacagtcttatgtaagggtgataaaagaaaatgtggctgaagttacccgaagt

SEQ ID NO: 521415 - DNA, 146 bp, Homo sapiens
caggaggcggcaagcccggctgcagaaagagcttgcagaagcagcaaaggaacctctaccagtcgaacagcattaacagattatggaattgtgctgcttcttgatgctacagaaactgtaaaactaaataccttccttaatcgtgg

SEQ ID NO: 521416 - DNA, 74 bp, Homo sapiens
ggggacccaggagtttcctgtgtccagcgctgccggagccgcctgaggtattggcatcggtccctaaacccacg

SEQ ID NO: 521417 - DNA, 73 bp, Homo sapiens
aaaagttcatctccttctgcatccttaactgagaatgagataggtgatcttcagctttgcaaactggatgaac

SEQ ID NO: 521418 - DNA, 50 bp, Homo sapiens
gaaggagtgcagaggcatcacctgaaagtcagattctgaggaagatgaac

SEQ ID NO: 521419 - DNA, 100 bp, Homo sapiens
acctctactaaatgcctttttgtgtataaaggctttgatgcggcctggaagaattgatagaatcatctatgtgcctttaccggatgcagcaacaagaagg

SEQ ID NO: 521420 - DNA, 96 bp, Homo sapiens
ccagtgaacaacgcggacttcatcatccctgtggagattgatggggtggtccaccagatagaagagtgatggatgtcatttctcgttcacagcttt

SEQ ID NO: 521421 - DNA, 100 bp, Homo sapiens
aggacgagggccagctgacggagatggtgcagaagatggaggaggttttaaaatcaaagatgggaaaatcggagaaaattgcccttccccatggccagct

SEQ ID NO: 521422 - DNA, 82 bp, Homo sapiens
tggacttcttacccgagggggtgaacaaagagaagatcacaccactcacgctcaaggtgttggggatgtcctttgcactgac

SEQ ID NO: 521423 - DNA, 100 bp, Homo sapiens
caacgactttttccggcggctgctcatggaagatggataaagtagaactgggggacagtgacctgaagataatgttaaagaagcaccacgagaagcggaa

SEQ ID NO: 521424 - DNA, 100 bp, Homo sapiens
catgtgtgagcgggcctgcatgcacctggggcacctcaagctggtcagtgagaaggtcggaggggccgaggggaccaagctggatgatgacttcaaagag

SEQ ID NO: 521425 - DNA, 82 bp, Homo sapiens
ttcgagccatcccagaaccacagccaagggcgaccattgacgaggtggagacggacgtggtggagattgaggccaaactgga

SEQ ID NO: 521426 - DNA, 75 bp, Homo sapiens
gcgtgacagcacagagataacggccagccctgggcgaaggtgctggagaatctggtaaaagcaccattgtgaagc

SEQ ID NO: 521427 - DNA, 100 bp, Homo sapiens
ccgccaagcggctacgttcttctcggcccgccgagatggcgctcgaccccgcaggggttcagctgttgcaaaaataattggtaataatgtcaagaaactt

SEQ ID NO: 521428 - DNA, 90 bp, Homo sapiens
cgacacggtgcgcgtcaaggccctcttcgccatctcctgtttggcagttctctaccagtggaccaatcttttcatccccgtgtacctcac

SEQ ID NO: 521429 - DNA, 75 bp, Homo sapiens
tggccatggggagcctcagcggtctgcgcctggcagcaggtgtggatgaggtcaccattgtcaacattttgacca

SEQ ID NO: 521430 - DNA, 75 bp, Homo sapiens
ctgactttcagctatggaatcgaatggtgaggttctggagaattgatgaggattatccagtgcaagttgcacctt

SEQ ID NO: 521431 - DNA, 73 bp, Homo sapiens
cgacgggcgcccccgagccgccgccgctgtccggagccccacagacgccatcgtagtagaagcagggagcgga

SEQ ID NO: 521432 - DNA, 50 bp, Homo sapiens
gaaaaacacccagagaaattcaacagtagcgcagataaagtgagcccgga

SEQ ID NO: 521433 - DNA, 90 bp, Homo sapiens
cgttcaacttctgctgactctgcttcctcctccgatacttcccgcagtcgggagaaggccagtggctttgaggaatctatgaagtggaag

SEQ ID NO: 521434 - DNA, 82 bp, Homo sapiens
cgacaagccgctggcagccgcggatctcaccgccgctcagggctttccatctgatggtcccctggtgtgtgccctggaacag

SEQ ID NO: 521435 - DNA, 87 bp, Homo sapiens
cttatgattatgaggcatgggcaaaacttgatgtgaactttctaaaacgatacgcaggtagagaggaacactgggttggactgaaaa

SEQ ID NO: 521436 - DNA, 100 bp, Homo sapiens
gctttctaaaactgaaggagaagcccatgaagagatggtggattctcactgagttttgactagcggaagaaaagtgggaggatacccttgacaaatactg

SEQ ID NO: 521437 - DNA, 100 bp, Homo sapiens
ctgggattggagattccacccaaacttgctggtcactgggaggatgctggtggactgtgtgcccctggtggaggtggacgacatgatgatcatgggcaag

SEQ ID NO: 521438 - DNA, 83 bp, Homo sapiens
agatatactaaagcaggctaccaaggacagagtcagtgatttccataaattgaagcaaaaatccacattcatctcaatggaag

SEQ ID NO: 521439 - DNA, 100 bp, Homo sapiens
gatgtgagctgtgtggatgaaatcctaaaacctctgcgacttgatatcaaaagaaagctaactgctagatctgatcgagttaagagtgtggatctgcatc

SEQ ID NO: 521440 - DNA, 88 bp, Homo sapiens
catggctgccccaagagtctagtactcttccaacccaagaggagattgaaaatcttcctgccttccctcgggaaaaactgactctgcg

SEQ ID NO: 521441 - DNA, 99 bp, Homo sapiens
ctttcagcagacattagaactggatgcctcaacctctgctgttcttgatcataggtgctgctagctgaggaggggatagctcctctttcttctgcagga

SEQ ID NO: 521442 - DNA, 90 bp, Homo sapiens
cagcacctgatctgcgggaagaacgccagcggagacaagatccctggctctgccgtgctaatcttcaacgtccatgtcattgacttccac

SEQ ID NO: 521443 - DNA, 100 bp, Homo sapiens
tgctccatcaccacttcccaagatggctgatgtctcagcagaagaaaagacaccctgacgtggaataagcccagtctcagcggggtggcgcctcttcctc

SEQ ID NO: 521444 - DNA, 98 bp, Homo sapiens
agacttcttgctcatttctgagtattgtctttatatcctgacactatgaatgctacttggatgcctcttaaggttttgcacactagggaccaagaagc

SEQ ID NO: 521445 - DNA, 87 bp, Homo sapiens
aaatctgttatcatcaacaagaccagcagcaccagaattcaccttcaggccattcagaggaggaaagagaggggaatatgaagtcag

SEQ ID NO: 521446 - DNA, 75 bp, Homo sapiens
tctgtcttcggtggactccttcggcagtccacccaccgccgccgcctcccaggcccccagaactctccttccagc

SEQ ID NO: 521447 - DNA, 74 bp, Homo sapiens
gtgtgccccttctccacccagaggtacagcagggaagaactggaaactcagagaaagaaactgcccttccatct

SEQ ID NO: 521448 - DNA, 75 bp, Homo sapiens
accagagattcatctttcatgcagtgacatgttgataaaaaatgatgggcgccatgttttggaagtttgacctgc

SEQ ID NO: 521449 - DNA, 102 bp, Homo sapiens
cttacctcacctctaattagggacgaattggagaagaaggatggagctgcaagaccttcctccaaggaacctgctgccaactcgcctggcacagacatcctg

SEQ ID NO: 521450 - DNA, 50 bp, Homo sapiens
atgcatactccacagcacctgagggagaaccgaagattacaggaggccag

SEQ ID NO: 521451 - DNA, 75 bp, Homo sapiens
cttgatgagaaggacccacggcgtctgttcgaagctgaataccactagaaacatacctgtaaccagagacagctg

SEQ ID NO: 521452 - DNA, 75 bp, Homo sapiens
actcatcaggacggaagcacaggggccactcagagtcgcccgagaagatcagtttgacaacttagaaaaacacac

SEQ ID NO: 521453 - DNA, 75 bp, Homo sapiens
ctggaatatgaagagacatgagatggtggatgaacccccagggaggtggggaagacagggctccagctaccacag

SEQ ID NO: 521454 - DNA, 83 bp, Homo sapiens
atcgggaacctcttccagttggaattgaagaatattcccaagtccttcacccggggtcggcactcttcaccctcccgagccct

SEQ ID NO: 521455 - DNA, 75 bp, Homo sapiens
ggtagtagattggcctcataaagcagaaagcaagtcctattttccaccaaaagatggagtctcgctctgttgccc

SEQ ID NO: 521456 - DNA, 100 bp, Homo sapiens
cgcgcgcccctgagcctcgggctccggcccggacctgcagcctcccaggtggctgggaagatcccgactgggcctcctacactctgggcgtcttcatctg

SEQ ID NO: 521457 - DNA, 75 bp, Homo sapiens
aacttgcacaacaacgaggcaggccgaaagaaggtagaagatagcaccatgccgattcgtcgaactgtgaattct

SEQ ID NO: 521458 - DNA, 82 bp, Homo sapiens
agagggagctgtggccacctgagaagtttgcctatctggggcgcctggctcacgaggttggctggaagtaccaggcagtgac

SEQ ID NO: 521459 - DNA, 90 bp, Homo sapiens
ggctgatgggaaggagcacccaggagctgaaggtattgacctgatggacatggcttcggacatcctgcagcccaaaggagatgatgtggc

SEQ ID NO: 521460 - DNA, 101 bp, Homo sapiens
ataccgcttgcagaagggaattgaatagatgtctccctattgcctacagacctggtacctggatttttgcccgagatgattcctaccaccttactactgac

SEQ ID NO: 521461 - DNA, 71 bp, Homo sapiens
agtgacagtggaactgcggaagttgatgacagtgcaattttggattgccagttcagtgagttttatcatac

SEQ ID NO: 521462 - DNA, 100 bp, Homo sapiens
tgtggtgcctacccccatcactgcttccctcagccataacaggacactgcccatctctaagataagaacctggaaaggggactctgttggccattggaaa

SEQ ID NO: 521463 - DNA, 80 bp, Homo sapiens
ccagcctgcggagcctgtggggcagtaacagatcaactcctagcaatcatgatcggatacagcgtctgaggcaagaattt

SEQ ID NO: 521464 - DNA, 73 bp, Homo sapiens
catattggtgtcaaagtgtcactgaactaaaggctgactttccagacaacgtgagagaacgccgagccgtcgc

SEQ ID NO: 521465 - DNA, 98 bp, Homo sapiens
tgtgagcactggccagagtgaccaggctgaccagcaccagccctgatccaggtggagctggccctgctacagcgctcctaccaggacctggcctcgca

SEQ ID NO: 521466 - DNA, 83 bp, Homo sapiens
gtgtcccacttgttcgcggcctatagcatttaaatcaaacggtattgagatggattgggttatgaaacataatggtccaaatg

SEQ ID NO: 521467 - DNA, 98 bp, Homo sapiens
ccgcagtgaggtctgacgtcatttcctgccgcccacctgccgtttgctgtcattggcagcacagaagaactgaagataggcaacaagatgatgagggc

SEQ ID NO: 521468 - DNA, 122 bp, Homo sapiens
tttgatgtgactcgtcggcgaatgcaattaggaactgttctgccggaatttgaaaagtgcctggagaagagtggcagttgcattggaaacctgattagaatggaacatgtaaagatagtttg

SEQ ID NO: 521469 - DNA, 100 bp, Homo sapiens
gcaattgatcccaagttgtcgacgaccgacagggtggtgaaaggtactccaaagattcaggtttactcacgtcatccagcagagaatggaaagtcaaatt

SEQ ID NO: 521470 - DNA, 100 bp, Homo sapiens
gatatagttgctgctatacaacacaattataaaatgtcagcttttaaggatttctctatgaatcatcatcaagaactctgggagaacttttgaattcata

SEQ ID NO: 521471 - DNA, 100 bp, Homo sapiens
ctgcctcagcctcccgagaagctgggattacaggttgttcttcgtgggctcccgggagggccacctaccggaccttctgtccatgatccacattgagcgt

SEQ ID NO: 521472 - DNA, 74 bp, Homo sapiens
cttggtgtgctctgggtggcccagatgctactgggagacgaaaccagacagagggtcaagtttacagatgaccg

SEQ ID NO: 521473 - DNA, 114 bp, Homo sapiens
gctggggccgctgtgcctgctgctgagcagcgccgcggtaatctatgccagcaattatgacaatgttagcagaccatgcagctcgtcagctgcttgatttcagccaaaaactgg

SEQ ID NO: 521474 - DNA, 100 bp, Homo sapiens
cacttttgagtgcaactgccttccagtaagagatgctaaaaaccttgtacctatggaccccaatggcctgtcagatccctacgtaaaactgaaactgatt

SEQ ID NO: 521475 - DNA, 51 bp, Homo sapiens
gcctcctacgtttacctgtccatggtgcggttctcccggccggagtcagag

SEQ ID NO: 521476 - DNA, 100 bp, Homo sapiens
agccagacagctggaggaggaacttcgaaccatggaccaggccctcaagtccctgatggcctcagaggaggagaccatggtgaatccgggcagcagctcg

SEQ ID NO: 521477 - DNA, 90 bp, Homo sapiens
tggaaacagtgtagcagcattggttttccaaaaaatgtgagactttttcttggacgaattcaggcaccagaatttcctgagtttgccact

SEQ ID NO: 521478 - DNA, 100 bp, Homo sapiens
aaagccatgttcagcggccgcgtggaggtgctgaccgatgccggagggagcatttggtgcccttcagaagatttgtgaagattctgctgagattttagac

SEQ ID NO: 521479 - DNA, 50 bp, Homo sapiens
cctgaacctggaagttgtgctttttaagctgaccaggtgtatggagacca

SEQ ID NO: 521480 - DNA, 75 bp, Homo sapiens
catcaccttattctggtcccgggtgctgccacgggacctggagaaggaggatgccccccaggagaaggagcgacc

SEQ ID NO: 521481 - DNA, 100 bp, Homo sapiens
accaaagcctggccacacccctatatttcgattttgaagatgtaactgagtttctggaagaggtcattgaagccttgatattggatgaggaagttagaac

SEQ ID NO: 521482 - DNA, 100 bp, Homo sapiens
gcagaggcggcgacggtggcgcccctcctcatcatgtgaacagagtatctgtcaggcaagagctgctgtgatggtttatgatgatgccaataagaagtgg

SEQ ID NO: 521483 - DNA, 83 bp, Homo sapiens
ggaagccgtgtccggtgcccagccggtgggtagagaggaaggtcacgagaagagaatgccttctagatgcaaaatcacctcca

SEQ ID NO: 521484 - DNA, 100 bp, Homo sapiens
gagagagctgaggcagacgatgtaagatctgctgttacttcttgctgtgtgaccttggctaatggcagcattagccgctgttgggcctcctaatcctcgg

SEQ ID NO: 521485 - DNA, 83 bp, Homo sapiens
gcgtgggggcctcaagctgtcccaggacatggacacctgtgagcgctgataaagcagtttgtgtccgacgtggcctgggggga

SEQ ID NO: 521486 - DNA, 100 bp, Homo sapiens
aaatgactttctgccggtagaaaagattgctagtcatagtggctatgtgcagattgactggaagagagttgaaaaagatgtaaataaagcaaaaagacag

SEQ ID NO: 521487 - DNA, 76 bp, Homo sapiens
ggactttgaacaggtggtggatcgcattcgcagcactgtggctgagtccccagaagaccatgtctgtgttgagctg

SEQ ID NO: 521488 - DNA, 98 bp, Homo sapiens
acgctccgggccccgtacccggagagcggcaactcgcgcactcaaaggtcaatgtgacggtggactacattagaccagccagcccagccacagagaca

SEQ ID NO: 521489 - DNA, 82 bp, Homo sapiens
gagaacgaccggctcctgctcaagatctcagagaaggaggaggtgaccacgcgcgagatcacgcaggaggccggggaattca

SEQ ID NO: 521490 - DNA, 90 bp, Homo sapiens
ttgggtcacaagcgatgaaaagagcaccttgaagttggttgaatctggcgatgtggaacccatggatatggagggctgactatatacacc

SEQ ID NO: 521491 - DNA, 74 bp, Homo sapiens
gtgacatgtactgttgtggacatgcacaaaagtgaggtttccttgttgcagaatgaaagtgtagaaaaaaacaa

SEQ ID NO: 521492 - DNA, 100 bp, Homo sapiens
ccttaaatatgcatgagtcttctcaacttgaaggtcatttaaccaacctcagctttacaaaccctgaatttataactgaatcacgtcccctagagaatac

SEQ ID NO: 521493 - DNA, 75 bp, Homo sapiens
aagccaaccttctgcgaacactgtgcgggatttatgtaaccttctgtaatggaagatgattgaagacaaggggcc

SEQ ID NO: 521494 - DNA, 90 bp, Homo sapiens
cagtcgtaagaagaggtcccaatcccccactctttccgccctaatggaggtctccagtttcgcttctctccaagataaaatggcaaaccc

SEQ ID NO: 521495 - DNA, 100 bp, Homo sapiens
tccaaagtgaaagtggcggtgcggatacgacccatgaaccggcgaggcctgattgttggcaaaggcatcataagaagctggcatttatttctgttctaac

SEQ ID NO: 521496 - DNA, 50 bp, Homo sapiens
cagatgactccttttcccacccagagaactcatctcacaccaagggcata

SEQ ID NO: 521497 - DNA, 100 bp, Homo sapiens
atttctcctgaatttggaaactatttgaaaatatatgcagatgatgaacattcttaagccaattgcctttgatgttattcatttcatgtctcaactattt

SEQ ID NO: 521498 - DNA, 51 bp, Homo sapiens
cagccctacacgaaaggacctgcttctccaagcaaccttccgcctgattac

SEQ ID NO: 521499 - DNA, 124 bp, Homo sapiens
tgcgaccggacgggtctaggtgagacagaagccaaacaggaggaggaagtggaggcctcgtcacgtgttcaatatgctaaagaagtatgtccgcgcagaacagaaggacagacagcacacccta

SEQ ID NO: 521500 - DNA, 100 bp, Homo sapiens
aagaaaagcctatcgaaatcaagttgaggaatccactaaacaaatacaggttcttcaagatgccacagggcccagtgggctccgggtcctgccccagggc

SEQ ID NO: 521501 - DNA, 82 bp, Homo sapiens
gaggagtaccgcatcgcccagctgtacatgatacagacaatgcagatcttcgtgaagactctgactggtaagaccatcaccc

SEQ ID NO: 521502 - DNA, 82 bp, Homo sapiens
aagcagtgttcatggagttcattgaattatggcatagatcttgggaaaattgcgagatcctacaagccataagactttgcag

SEQ ID NO: 521503 - DNA, 75 bp, Homo sapiens
tggttcaagaaccttgacaagctcatccggctggtaaatgcgcagcacaatgttagaggtgttgtatctatggct

SEQ ID NO: 521504 - DNA, 100 bp, Homo sapiens
agggactggacggctgagctgggcatccgacacgtactgctgcctcccgcgacgatgcccctcaacgttagcttcaccaacaggaactatgacctcgact

SEQ ID NO: 521505 - DNA, 90 bp, Homo sapiens
gagaagcttcaggcagcataacacttacaggtggagccgccaccaaaatgcagattttcgtgaaaacccttacggggaagaccatcaccc

SEQ ID NO: 521506 - DNA, 100 bp, Homo sapiens
caggggttgaaatccattggggagagggacctcatctttcacaaaggccttcacaacgatgatgatgctgaagctatccttgctgcagacttcgaaattg

SEQ ID NO: 521507 - DNA, 87 bp, Homo sapiens
aaagtgaagtccctatttgaagaacttggaagtagtcgacactgtctcagtgcatcgcccaggcttctacgctgaacggttccagcg

SEQ ID NO: 521508 - DNA, 82 bp, Homo sapiens
cggcacacgcgcagccccggcctctcggcctctgccggagaaacaggaaataatgcaaaaggtgtcccaaggctcctgacca

SEQ ID NO: 521509 - DNA, 75 bp, Homo sapiens
ttctggccaacagtgttaagtataatggtgatgccacactcaatcagaaactatgctactgctgaagaggtatat

SEQ ID NO: 521510 - DNA, 100 bp, Homo sapiens
gtcaatccttgagcagagggagagcctgcccatctacaaactgaaggagcaattggtccagatcgcttgacaatatcttattgtcggagtagtggtcctg

SEQ ID NO: 521511 - DNA, 75 bp, Homo sapiens
attggagaacttgttggagtgctggtgaatcatttcaagagggaaggtattcatgtaaatcaagaattactgcaa

SEQ ID NO: 521512 - DNA, 101 bp, Homo sapiens
tcgtagcgcagaaagtgaagctgtttcgggccagcgacccgctgctcagcgtcctcatgtggggggtaaaccactcgtgctgggcctaaaggagataacat

SEQ ID NO: 521513 - DNA, 50 bp, Homo sapiens
caagagaaaaagaacattactgtcttgccagaagatacctgaaattcctg

SEQ ID NO: 521514 - DNA, 83 bp, Homo sapiens
ccaagcccgccacgccgcccagcccggccccgcccgcgccggaagagccacgccggttctggaggacacgtgccggcggcagg

SEQ ID NO: 521515 - DNA, 100 bp, Homo sapiens
aatggatgtggggtagaagaagaaaacttcgaaggcttaagagaataaaggcagccccgttgatgactgaaaatgacaaagcatccacctaacagacgag

SEQ ID NO: 521516 - DNA, 75 bp, Homo sapiens
gtcgggaaccgagtacagcgtcgggcgggggacagctcagaaaacctcacagcacgggtagctctgaacggattc

SEQ ID NO: 521517 - DNA, 87 bp, Homo sapiens
agagcctcagcaggagcctgttctcatcaccatggcaacagctcaaaaagtttccaagaagacaggaccccggtgttccacagctat

SEQ ID NO: 521518 - DNA, 90 bp, Homo sapiens
acagcaccccgggctggcgtgagggtctggaacagaatctgacagtgatgaatcagtaccagagcttgaagaacaggattccacccaggc

SEQ ID NO: 521519 - DNA, 75 bp, Homo sapiens
cgaagaagaaaggattcgttacagccagagattgtgagaatgagtccctttggaaggaggtgtcagaattacgag

SEQ ID NO: 521520 - DNA, 74 bp, Homo sapiens
ccaagccctggtgccaggtgtccatccccgtgctgagcaaaaaatcccagaagtgggatgaaatgaacatcttg

SEQ ID NO: 521521 - DNA, 75 bp, Homo sapiens
ggttctctgttgttggaagaacacagtcagtgtccaccacaaattaaagatgaacctgaagatgatggctatttt

SEQ ID NO: 521522 - DNA, 100 bp, Homo sapiens
ggcgcaggaagagccgggccgggccgagcggcgcccggagcccgcgggcctgacacgcggcgggacatgcaggcaagaagctcttctggctgccattagt

SEQ ID NO: 521523 - DNA, 82 bp, Homo sapiens
ggcagttcccgttaaccttagccacaaagtcaaaggttggatccatgccgtctacacccctgtagactctttggtgttcggc

SEQ ID NO: 521524 - DNA, 98 bp, Homo sapiens
aaaactcagctgtgcgagtccttctggaagagcaaggttggatggcaagcatgtggtgtttggcaaagtgaaagaaggcatgaatattgtggaggcca

SEQ ID NO: 521525 - DNA, 96 bp, Homo sapiens
tcagcttctctcattttctttccctgcaccaactagcagctttaccgatttgttacaactcaagcaagggccagcagaaattctcttttgacagat

SEQ ID NO: 521526 - DNA, 76 bp, Homo sapiens
cagctctcctattgaaacttgcccagatgttctcagatatggtcttaaaagttaagttgcttttacagagttaaca

SEQ ID NO: 521527 - DNA, 90 bp, Homo sapiens
ggcgggacagagcgcctgcgaccccagtcggtgctccggggaggtcacctgacgaggagatgccttcaattaagttgcagagttctgatg

SEQ ID NO: 521528 - DNA, 50 bp, Homo sapiens
atccggaggcgccagctcaaccatccaagtattttagaacatgctcaaga

SEQ ID NO: 521529 - DNA, 97 bp, Homo sapiens
gaagcagctggataaagaacaggtgtcagttgtacccgaggcgttctcagcagcagcaagtacctgtggtggatttccaggctgaactgaggcaggc

SEQ ID NO: 521530 - DNA, 90 bp, Homo sapiens
ttacaaaccagacgaaaacaaatgtgaaagagttacaatactacgtcggacagagttttgccaatgtgtatgctgatggtagcatatgtt

SEQ ID NO: 521531 - DNA, 100 bp, Homo sapiens
caggactacagtaaggctgaaatcattgaagtgcttggagtgcagaactgaaagagctttctgaaaaggatatgagcatgctcgaggagaggattaagcg

SEQ ID NO: 521532 - DNA, 100 bp, Homo sapiens
acacaagctatacatgatgtcttcagccagtataaaaacacagctcgacagtacgcctacttctataaagtcatccagcccctcatatggaaaatttgaa

SEQ ID NO: 521533 - DNA, 100 bp, Homo sapiens
taacaccttctaccccaagttcaatggtccaggttcacactagaaggccaaaacttccgcaaacatctgatgatgaaaagaaagatttttgagactgcag

SEQ ID NO: 521534 - DNA, 50 bp, Homo sapiens
cagccaacagagctgtggttggtgaggaagaggatggagatgaagatgag

SEQ ID NO: 521535 - DNA, 78 bp, Homo sapiens
gcggcgtcggcagctgctgctccgagaacccagcgggtgccgcttctccacccgaggcttccacctccaacgagccat

SEQ ID NO: 521536 - DNA, 100 bp, Homo sapiens
gcctcagcgtccgccctcaggcccgtggccgctgtccaggagctctgctctcccctccaggtgaagtattacagacacttagcacctgatcacttgctgc

SEQ ID NO: 521537 - DNA, 83 bp, Homo sapiens
cacagatgtgcagacgtgggccttggcatggtcagtgcacgcacagcgccaggccgccatggcatcagatgaaggcaaacttt

SEQ ID NO: 521538 - DNA, 100 bp, Homo sapiens
ggatcggtgggtttatctcaaggcctgagtagccggtaacaaacgagggttcccgggattggaccgacgcagccatgcccaaagagtcgattgatccaat

SEQ ID NO: 521539 - DNA, 95 bp, Homo sapiens
caagaaccttctggactaatgatgatccagctctcttggcctcctagtttctacctaatcatgtccctggtggaggccatcagcctctggaatga

SEQ ID NO: 521540 - DNA, 90 bp, Homo sapiens
cctcggctcggcgccttctgcgtctcccggctggtggggaagcctctgcgccgccggcaccatgagatataattgaccctgcaatcctgc

SEQ ID NO: 521541 - DNA, 98 bp, Homo sapiens
ggaaaatggcggacgggaaggcgggagacgagaagcctgaaaagtcgcagcgagctggagccgccggaggtaaagtcagtgataaatcttttgtttgc

SEQ ID NO: 521542 - DNA, 100 bp, Homo sapiens
ggctcagcgctctatctggtagcccaccacgatgactactgcgtatggtacagcctgcagaggaccagcccttcacatcctcagccgaagatctcacttc

SEQ ID NO: 521543 - DNA, 82 bp, Homo sapiens
ggcaggctcaggtgcagccgctgttacgttatgatgatgaagtgaagcgggtggtggcagagccggtggagttggcccaaga

SEQ ID NO: 521544 - DNA, 75 bp, Homo sapiens
tcagagatctacatcttagtatcacgcttcgtagatcagaagtcggttgtcggtctcactggactacaatcaagg

SEQ ID NO: 521545 - DNA, 96 bp, Homo sapiens
cgaattggagatcaggcttctgttcaaaatgcactgaaagactgtcagttatggctgcagcttcgattgccaatattgtaaaaagttctcttggtc

SEQ ID NO: 521546 - DNA, 90 bp, Homo sapiens
ctcagttctcgctggcagctttataggtggtcttcgagggatagcacgaggtggtctgacaggactaacacttaccagcctctatgcact

SEQ ID NO: 521547 - DNA, 132 bp, Homo sapiens
tcttggctcccagccggcggcggctcggccgcccagcgtggactccttgtccagaacagctttgctgagccatcaaggtctaatggaagcatggttcggcattcttcatctccatatgtagtatatccttcg

SEQ ID NO: 521548 - DNA, 83 bp, Homo sapiens
ccgcgagcccgctttccaccccgacctctgcccaggccgcaggtgagaagccctaccactgcaactgggacggctgcggctgg

SEQ ID NO: 521549 - DNA, 83 bp, Homo sapiens
cgggaaaggattggtcaaacaattggttatcagatccgattagaaagcaggtaatactgcattgcatgattgtgcagaatctg

SEQ ID NO: 521550 - DNA, 50 bp, Homo sapiens
ctccaacatgctggatgtcaacggcctctacacagaaactgatgaccagc

SEQ ID NO: 521551 - DNA, 82 bp, Homo sapiens
tgacccaggttacggaccggaagtgctccagaactcaaggaggtggtccaggccacgctggtggtcctggccttggccatgg

SEQ ID NO: 521552 - DNA, 88 bp, Homo sapiens
gaaagtggattttgtgcaatttgacaggtggagccgccaccaaaatgcagattttcgtgaaaacccttacggggaagaccatcaccct

SEQ ID NO: 521553 - DNA, 75 bp, Homo sapiens
cccctctcaggacaacccagatgtgcaacaaagtgcgatggtccatggctaatgaaacacagaaggttggtgcca

SEQ ID NO: 521554 - DNA, 99 bp, Homo sapiens
caatgatgagaggatgtggtggtctactctgatgtcaatcttgagggctagtctcggagtcggagagcgcgcctcgcttccagagcccccggacccggc

SEQ ID NO: 521555 - DNA, 75 bp, Homo sapiens
agtggatgaggtgaagtccacaatcaagttccaaatgaagaagatccttctggctggtggacgggtcgactacga

SEQ ID NO: 521556 - DNA, 74 bp, Homo sapiens
cggcctgcgcagccacctcaaggcctatggcatgtctgcgttacctttaaatctgataaaaggcactagaagcg

SEQ ID NO: 521557 - DNA, 100 bp, Homo sapiens
ttattcctcttcctatccaatccctgccttttgagtccaggtgtgcacgatctgattttctggagagatgtgaagaagactgggtttgtctttggcacca

SEQ ID NO: 521558 - DNA, 89 bp, Homo sapiens
gctcctggaggcggcgggatggaggcggcggccggaaatggcaactgctgacaggaagtttggcatccacctcccccagcctcctgagt

SEQ ID NO: 521559 - DNA, 88 bp, Homo sapiens
cgttagtgagaaccagagtgctcagctatcctactctgtggaggttccagcctgaactgtctgcccctgatctgcggcgatttatcga

SEQ ID NO: 521560 - DNA, 100 bp, Homo sapiens
gaaggaaatcaagggaaatccagtccaagttgaagaacctgtacgacagcatccgaaatgagcccttcaagattcctgaggatgacgggaatgacctgac

SEQ ID NO: 521561 - DNA, 102 bp, Homo sapiens
acagttaccatgggggctaatggtaaccgaaactcaaagttaatggagccaaatttaataaagtaggtcccattagtccaccacagccaccttcagtcagtg

SEQ ID NO: 521562 - DNA, 75 bp, Homo sapiens
actgaagatgccttctcagtcagttgagaatgaagagcttcgaaacttgtctttgtctggccatgtgggatttga

SEQ ID NO: 521563 - DNA, 90 bp, Homo sapiens
gtacttcacatcgtcgttcacatggggtgtttgatttcaccaccatagacttgacatctgagactgatgaaattccagatattatagctt

SEQ ID NO: 521564 - DNA, 125 bp, Homo sapiens
gacaacatcgccctgtggatgactgagtacctgaaccggcacctgcacacctggatccaggataacggaggctggtccaagtggtaagaagttcagaagcaagcctcagttggcaaggtacctgg

SEQ ID NO: 521565 - DNA, 75 bp, Homo sapiens
gttgcttctggcggccatggtgttgctgctgtactccttctccgtttcactaggccagtacctgtgggctgcttc

SEQ ID NO: 521566 - DNA, 100 bp, Homo sapiens
tcaagctttctaggccgacagctgtcctcagtcgcttggtcagatagtctaatctcagtttttcagaagtacccttagaaagaggccctcagaagagtct

SEQ ID NO: 521567 - DNA, 75 bp, Homo sapiens
gccatcggaaaccggagtgaccagaggagggacacgggtcactcaggatgtgtcaactgtctggagtggaatgag

SEQ ID NO: 521568 - DNA, 96 bp, Homo sapiens
caggccccgggcacctagagacggatggtcgcacgcatgattgtcggcatctcacagggactttgaacatgtcggggatcgccctcagcagactcg

SEQ ID NO: 521569 - DNA, 99 bp, Homo sapiens
cgccgcggggcagccgccgctcctccggggttgtggaaaggaggagaacccctgctgaaattcgagaggagtttgagcggctgcagagagagagagaag

SEQ ID NO: 521570 - DNA, 89 bp, Homo sapiens
gggcgcgcggcgccgccacaagttgcgctgctcgcgacgagggaaagcaggcaggatgggagagtcgccgatagaaccacctcttccct

SEQ ID NO: 521571 - DNA, 82 bp, Homo sapiens
cgcagagcgccgaggaggctttcctgctggtggcaaccgcctacgagacactcaaggtgatgcaggttctgaatgctgatgc

SEQ ID NO: 521572 - DNA, 100 bp, Homo sapiens
cagcctgtggattttgtggatccaaataaacagaatttgattgctgaggtttcaaccaaggtgaatgaaaactttgccattgatttgatagcagagcagc

SEQ ID NO: 521573 - DNA, 98 bp, Homo sapiens
gggagcgcgatgtggagcgcttctttaagggctacgggaagatcctggaggtggatctgaagaacggggccaattcctgtccccccagcagcatggca

SEQ ID NO: 521574 - DNA, 75 bp, Homo sapiens
gtttgtagccctcgtccagacgccccaaacaaacaatgaggatgacgatgaaccagaagaggatgaccaggaaat

SEQ ID NO: 521575 - DNA, 101 bp, Homo sapiens
agcagcagctggatattgagccggatagacctattggatatggagcctttggtgttgtctgaggaccttatcatgtccttcactgtatccatggcaatcgg

SEQ ID NO: 521576 - DNA, 50 bp, Homo sapiens
cagcttcacctccatcgcctcggagggaaatgaggcaagttatcctttgg

SEQ ID NO: 521577 - DNA, 99 bp, Homo sapiens
gtcaagaccctccagcttgcctaaataagcgggttttgaaaacaaaaaaaagaaggagtggaagagggggccaggatccaggcctccatccccacagaa

SEQ ID NO: 521578 - DNA, 100 bp, Homo sapiens
ctgtcatgtacatcatgtacttcctggctgccctcttcggctacctcaccttctacagcaaggtgcccggcgacgactgcccgctggtgtggggccagtg

SEQ ID NO: 521579 - DNA, 75 bp, Homo sapiens
ctggcgaggatgcaccttcccctgccttggaaagcacctgtggaatcctctcaagaggaacagtcattgtgtgaa

SEQ ID NO: 521580 - DNA, 101 bp, Homo sapiens
ggagaaagcttgacgtcactgacctgcttgctgatcctgtggtccggatccagagaaaacaacagcagttctgtagagagtttaaatatgaaggaatggca

SEQ ID NO: 521581 - DNA, 100 bp, Homo sapiens
cgtccctcctgacgctcagaaggatgccctgggctgctgcgtggtacagggtcttaccaggatgtgcttccagccctatacatatagccagctgcagcag

SEQ ID NO: 521582 - DNA, 82 bp, Homo sapiens
tatcatgctctggaattttggcatcaaggacaaacccaccttcatcaaaggggacttatcaaactggtttcaaagcacagag

SEQ ID NO: 521583 - DNA, 58 bp, Homo sapiens
aattttacataagaagttacctttttcaggctatgactttgcagccgtcctggagtgg

SEQ ID NO: 521584 - DNA, 76 bp, Homo sapiens
aatgttggagccgtctgcaaagtgtccccggcaagaaggacagacatggtggttctgattgcctgggagatagccc

SEQ ID NO: 521585 - DNA, 96 bp, Homo sapiens
cttaaatgtttttttcagctgggatccaaaagacagcctgtgcctactacactggcacaagtggatagagaaaagatctatcagtggatcaatgag

SEQ ID NO: 521586 - DNA, 49 bp, Homo sapiens
agacaagacacttttcagaaagacaggagtgttgaagcctggaaatccc

SEQ ID NO: 521587 - DNA, 98 bp, Homo sapiens
tcactgcagaggtgctggagctggcagattgctacgctttacatatggtccttcatttcctgcatttaaagttcccgatgaagatgccagtctgatcc

SEQ ID NO: 521588 - DNA, 97 bp, Homo sapiens
aattatttatccaacagctcctcccagggttctcatgtatcagccatcttctgtaagggtgcccagtgtgacttcggttgatcctgctgctattccg

SEQ ID NO: 521589 - DNA, 83 bp, Homo sapiens
cagcatcaactacctgcactttggggagcctaagtcctggatgccggctccaggagcagcagtggaggtcgggaacgcctcat

SEQ ID NO: 521590 - DNA, 90 bp, Homo sapiens
gcatcatgccagggagccaagcgtcctgcccggccgtggacgacatccttggagaaggcagcgacgacagcgacagcgagaagaggaggc

SEQ ID NO: 521591 - DNA, 133 bp, Homo sapiens
gattctagggttgtacaggcccacgccagacacgacgtctggcaggaacctcggcctcagaggtggaatgaatcttacttgttgaatatcttctggttactagttggattcatttgtgaaagaatcattttcc

SEQ ID NO: 521592 - DNA, 74 bp, Homo sapiens
tctgctggtcgcggcgggagtggcgtggcgcagctgccccagagcacatcagctatgtgccccagctctcaaac

SEQ ID NO: 521593 - DNA, 100 bp, Homo sapiens
agaaatcgaaacagatacagagatgtaagcccatggagttctgggaaatcgttcattcatttacagatgaacagaaaagactcttcttgcagtttacaac

SEQ ID NO: 521594 - DNA, 75 bp, Homo sapiens
tccgagccccttcctgagaagatcccagatggagaaggaggagacaacccgggagctgctgctgcccaactggca

SEQ ID NO: 521595 - DNA, 74 bp, Homo sapiens
gactgggttgaagccctgaaccaagccagcaagatcaccgtctccggcgagtgagagacctttgtcgagttctg

SEQ ID NO: 521596 - DNA, 100 bp, Homo sapiens
agccctggaatgtgaagagacatgagaccatagccaaacccccaggaggcctcatgggacctgtcaggatgatttcatctggacacgagttaacaacaga

SEQ ID NO: 521597 - DNA, 75 bp, Homo sapiens
aaaattagaagaccaacttcaaggcggtcaattagaagaggtgattcttcaggtccctcaagacccattgaaatt

SEQ ID NO: 521598 - DNA, 105 bp, Homo sapiens
ctcaagacccagagccagaccagcaggatccaactcttggaggccctgccagggcctgttcctgaacccccagttactggaacccccaggatgatgagaagcgag

SEQ ID NO: 521599 - DNA, 74 bp, Homo sapiens
agtggtcgcttcttctccttggaacctagtgctgaagacagtaaaaagggtccattgacagttgcacagaaaaa

SEQ ID NO: 521600 - DNA, 100 bp, Homo sapiens
cagcgacctgccatcctacacaactcatggcaccgtgcacgtggtcgtcaacaaccagggctgtaaagtgagggaccacatggttacacttcgtgatcaa

SEQ ID NO: 521601 - DNA, 100 bp, Homo sapiens
ccagaaagctgggagccctgcgtggaggactcagcccaggagagtgttattactcgagatattcatcgtacatttcccgcacatgattactttaaagata

SEQ ID NO: 521602 - DNA, 50 bp, Homo sapiens
ttcatggtgcggctcatcttcgagagtgttctcaggcgctgtggtctcac

SEQ ID NO: 521603 - DNA, 82 bp, Homo sapiens
agaacaagacggacgtcatcctgatcttggaactaccacgttgatgagcgaacaatatgcaatggaattgccccagaaaaag

SEQ ID NO: 521604 - DNA, 75 bp, Homo sapiens
cctccgagggaaacaagaaaacatcaaagaggtctagcaaagctatgtttccagtgtcctctgggtgtttccaag

SEQ ID NO: 521605 - DNA, 74 bp, Homo sapiens
ctcttaaaaacagaaactcatctgtccaagttcgtggcagaaaggaaccttccctgtatactgtcaaagccatc

SEQ ID NO: 521606 - DNA, 100 bp, Homo sapiens
caagaactatttgtctcagagctcggagctggacccccccatcgagtcgctgatccctgaagaccaaatagttcgggaccgagtgagatcgaagatggag

SEQ ID NO: 521607 - DNA, 100 bp, Homo sapiens
tcaggtgctgcaggcacagcccgagaaaccgcagcactacacgtcacaaggcacttaaagcattgttgaggtcattggtaggtcttcaggaagagttgct

SEQ ID NO: 521608 - DNA, 82 bp, Homo sapiens
gatgctctctggtggggcacagtgcccctgggcgctgggattgctctagcctgtaagtataatggaaaagatgaggtctgcc

SEQ ID NO: 521609 - DNA, 82 bp, Homo sapiens
acagacaaggagctcagtgacctcctggacttcagcatgggtggcccagttgaaatccttcccttcctctaccttggaagtg

SEQ ID NO: 521610 - DNA, 75 bp, Homo sapiens
ggcgcggggtccgcgcccggagcgccccgccgcgcacaggtttcatcaccttaaatggttttgaaccaatgaagg

SEQ ID NO: 521611 - DNA, 74 bp, Homo sapiens
gagaatatagtaaaaatacgcagtacagtcccagactatcaagatctccacttagggaagtgggaatcttattt

SEQ ID NO: 521612 - DNA, 90 bp, Homo sapiens
cgaaagcttctctctgtcccttggcttctgtgtggtcccagaagatatgcctcctccagtttcaagggacgtccagatcggtgacatcgt

SEQ ID NO: 521613 - DNA, 100 bp, Homo sapiens
cttaaaacagtaattggagaacttcctccagcttccagtgattctactctgctactcaagtagtggtcactatgattctgtgtactcaaaacaatttcag

SEQ ID NO: 521614 - DNA, 50 bp, Homo sapiens
aagacgttccttgaggaggtttgaaaaaaaatggcgaaaagtcttttgaa

SEQ ID NO: 521615 - DNA, 76 bp, Homo sapiens
cgcaaacccggaagcggatcgcatggagtgatggtcccaccgcagcgctcaggagcatctatcggctgcacgccaa

SEQ ID NO: 521616 - DNA, 75 bp, Homo sapiens
tggcaggagacaggctctggttacagcccatctgctggcaaggctaagattagaacagctcataggagagtcatg

SEQ ID NO: 521617 - DNA, 100 bp, Homo sapiens
tgagtgggaagaccaagacagtgcctggataccttcgaataggattatctgcctggacctgtcagaggaaatgtcactgccaaagctggagtcgttcaac

SEQ ID NO: 521618 - DNA, 100 bp, Homo sapiens
tctcgctccgtggccttagctgtgctcgcgctactctctctttctggcctggaggctatccagcgtgtttcccattaaacactaccaggacaaaatcagg

SEQ ID NO: 521619 - DNA, 82 bp, Homo sapiens
tggccgcttccagaccatggaggagaagaaagcattcatggacatgaacaagctgagtggaggcggcgggcgcaggactcgg

SEQ ID NO: 521620 - DNA, 100 bp, Homo sapiens
ttaaggtcttcagcggggcgctccaggaggcactcacagatgtgagaagggtgttatgtctctagtgaatgtcaggaactgtattcgcttctaccagacg

SEQ ID NO: 521621 - DNA, 75 bp, Homo sapiens
tggaatatgagtgatgacaaaccctttctatgtactgcgcctggatgtggccagtactaacattctgagagagcc

SEQ ID NO: 521622 - DNA, 88 bp, Homo sapiens
gggactatgattctagaacagcactccatgtagctgctgcagaggatctgacaggatggcatctgatgactttgacatagtgattgag

SEQ ID NO: 521623 - DNA, 75 bp, Homo sapiens
gcaggtgaccatggcagaactgaacgccatcattggggtggagccgccaccaaaatgcagattttcgtgaaaacc

SEQ ID NO: 521624 - DNA, 82 bp, Homo sapiens
gccgccgcgccaccatctttcgggctgccgagggtgttcttgacgattaatcaacagggcaagttaaagtcttcagagccct

SEQ ID NO: 521625 - DNA, 102 bp, Homo sapiens
acaaccgcctcccgctcctagcaggttgctactgccccgaacccgcgctgcagggaacagcggggcaaacagtgaccaagaatatggcccaggtgaccaaag

SEQ ID NO: 521626 - DNA, 75 bp, Homo sapiens
caggaagctttggatcagacttttgtgttgcagttcgggaatcccttggcaccatgtcctgtgtgcattataaat

SEQ ID NO: 521627 - DNA, 95 bp, Homo sapiens
gcttatccctgcgtagaaacgcctgccaatgctttctcatttggacccagactccagatcgggaggcccgatgagagaaagggaaagttaaggat

SEQ ID NO: 521628 - DNA, 74 bp, Homo sapiens
caaagcgctagcaacttctaccaacaacaggggttggctgtgttccggccgcagagcaccgtctgcgtgaggag

SEQ ID NO: 521629 - DNA, 135 bp, Homo sapiens
agtccgactccgaggacggggaggaggaggaggcggcgcccgcggacgcaggggcgttcaatggttactcactataaacaatatccacccaacacaagcaaagtttattcctactttgaatgccgtgaaaagaag

SEQ ID NO: 521630 - DNA, 90 bp, Homo sapiens
tcacaggagctgtagagaggaccccggtacatctgaaagccgggaaatggagcagaagttctgccagcgctatgaccagctcatggaggc

SEQ ID NO: 521631 - DNA, 74 bp, Homo sapiens
agaagccgacaaggcgttcaagcgaaaacatgaccgctgagcccatgagggtgtcttttatgaataatcaaaag

SEQ ID NO: 521632 - DNA, 74 bp, Homo sapiens
ggtgaatcccctgtttgagaaaaggcctaagaattttggcattgagccatccaaaactctgtttgtcaaaggcc

SEQ ID NO: 521633 - DNA, 100 bp, Homo sapiens
ggagtgcagaggcatcacctgaaaggatgaccgttcattaataaatttgcatctcatgcacaccagttacttcctctttgtgatggtgataacaatgttt

SEQ ID NO: 521634 - DNA, 100 bp, Homo sapiens
caccgggatcgtgaccgagaccgtgaccgagagcgtgaccgagagcgcgaatatcgtcatcgttagaagaccctgatcctgaaaatccagaacccacaac

SEQ ID NO: 521635 - DNA, 100 bp, Homo sapiens
atacagatctgcagctcatcaatgctgaggagcagacgagtggccaggcttctggggctgactcaactggttaacctcaccctacagatgaagataatag

SEQ ID NO: 521636 - DNA, 73 bp, Homo sapiens
gaaaattgcccttcgggaaatccgaatgctcaaggtccctgagtgccagaggtggtggtgttgcttatcttct

SEQ ID NO: 521637 - DNA, 100 bp, Homo sapiens
gggaagaggcccaccctggagtaaccctcactggagaatccagaggtctcctctgagcctccggcctccataagacccaaaacagatgacacctcttccc

SEQ ID NO: 521638 - DNA, 50 bp, Homo sapiens
ctaatagcccggagacaagcgagttaagtatgacattgacctgcccaaca

SEQ ID NO: 521639 - DNA, 100 bp, Homo sapiens
aacattccagacaccatggcccacctcatcagccctctgccctcccccacgggaaccatcagacatccagctctgtcacccaagctgcagtgtggtggca

SEQ ID NO: 521640 - DNA, 83 bp, Homo sapiens
ctggcattctgttagacagtgaatgtggaaaggagattgacagtcacaattttgtaataaggcatttggatttgatcccaaag

SEQ ID NO: 521641 - DNA, 100 bp, Homo sapiens
acagtgaaaaatgatgaagagcagatggaaacacatgaaagacttcctcaaggactacagtatgcacttaatgtccctatctgactgcagccatgagcag

SEQ ID NO: 521642 - DNA, 75 bp, Homo sapiens
tccccccgcatcgcctcccgtggaagcccaggcccgcttcgcaggtgctggagaatctggtaaaagcaccattgt

SEQ ID NO: 521643 - DNA, 90 bp, Homo sapiens
gatggacattttggaccagggagccctacagcgtctcttcaaaaagtgtgattcttggagcaaatacccggccagacttggatctccgag

SEQ ID NO: 521644 - DNA, 100 bp, Homo sapiens
cataaactttcctatttatgtatggagcagcaagatcttgcaggagagagagttactgcctgtgaagaaatttgaaagtgagattctggaagcaatcagc

SEQ ID NO: 521645 - DNA, 90 bp, Homo sapiens
gaagtgtgctgatgaagtcctctataagacatcgctattgcggttccgaggcagtgggaagagatgcggcccctggacatcgtcgagctg

SEQ ID NO: 521646 - DNA, 75 bp, Homo sapiens
ggcaaatcactccttcactccaaactgcatctacgatattccctgcactaggtcagacaatcccctttggggtac

SEQ ID NO: 521647 - DNA, 75 bp, Homo sapiens
ggtcgttttcccgtccccgagagcaagattcctgacattcagacaactgacttgtaactgacttataactgactt

SEQ ID NO: 521648 - DNA, 90 bp, Homo sapiens
gatgaaatgaatagacccagaaccctcatcataatgatgtaggtgcaaaaaactacagacatctctgtgctgtttattacaacaagaatc

SEQ ID NO: 521649 - DNA, 80 bp, Homo sapiens
aagactacctttttcagaaatgcgcagagcaaacatctttcaaaggttatttggaaatagcggtgcttgcagcgcttgcg

SEQ ID NO: 521650 - DNA, 50 bp, Homo sapiens
tgggaagggcagctttggcaagatctttaatctcatgaagtacgacagct

SEQ ID NO: 521651 - DNA, 95 bp, Homo sapiens
ctctacgcagaacccgggagtaggagactcagaatcgaatctcttctccctccccttcttgatccataatgagatggcatcaacatcagataaag

SEQ ID NO: 521652 - DNA, 50 bp, Homo sapiens
ggggatcttcgcactatcccaagaccatggtgaatccgggcagcagctcg

SEQ ID NO: 521653 - DNA, 100 bp, Homo sapiens
gcaccttgactatatggaatgtaaggtcccctgctaaaccagtacagacaatcactccacatggcttcaacggaccacaccaaaatgccatctcaaatgg

SEQ ID NO: 521654 - DNA, 75 bp, Homo sapiens
ggatggagtgcctccaaaggttgctgagctgaaacagctttaagagaatttcaaaggcaatatgaaaaaatggag

SEQ ID NO: 521655 - DNA, 88 bp, Homo sapiens
aaaatcaaaagaaacttttgcccttatcagtaacacctgaggcaattaagttggaatatgcaaggttggttaagttggcccaagaaga

SEQ ID NO: 521656 - DNA, 95 bp, Homo sapiens
ttaacagacaagacacttttcagaaagacagattgaggaagacacatggcagaaatactacttggaaggagtctcaaatgaaatgtacacagaat

SEQ ID NO: 521657 - DNA, 83 bp, Homo sapiens
agcccttccggatcctgcgcgcagaacaatgcagatcttcgtgaagactctgactggtaagaccatcaccctcgaggttgagc

SEQ ID NO: 521658 - DNA, 100 bp, Homo sapiens
ccgaaggaaaaggaggaattcgccgtgcccgagaatagctccgtccagcagtctccctttatggcaagattgtcatgagttatggagtaaaaagcgaaga

SEQ ID NO: 521659 - DNA, 83 bp, Homo sapiens
cttgaactggtgctgtctgggcttcatagcattcgcctactccgtgaaggctgaaggtgatgtggccgccctcaaccgacgca

SEQ ID NO: 521660 - DNA, 111 bp, Homo sapiens
gcagagctaaatgggggcctctccagggagtgctctgttcacggctccatcgctgttagttcgatacaagaggctgttttcctagcgtggcttgctgcctttggtaagaac

SEQ ID NO: 521661 - DNA, 97 bp, Homo sapiens
gggaacatggccctggagcggctctgctcggtcctcaaagggagagtcccgtattctcagagtaaaagttgtttctggaattgatctcgccaaaaag

SEQ ID NO: 521662 - DNA, 90 bp, Homo sapiens
tctcatcttgtcctacctgaagtatgccattagttcccagttgatttatgaagactctatggatctaatcgcaaagctaccttgtgttgc

SEQ ID NO: 521663 - DNA, 75 bp, Homo sapiens
tccttttcgtttccggaaacatgatctggtggctggacccagagctgacctatggctgcgccaagcccttcgtct

SEQ ID NO: 521664 - DNA, 74 bp, Homo sapiens
ctgccaaatggaacagacaagcaggttgtcttggacttccaatagtagtcagacattatcatcctgtcatacta

SEQ ID NO: 521665 - DNA, 98 bp, Homo sapiens
accaactacgagaaggccaccaatgccaatccctcccagctcttcggagcaccagcatgtttgacatgcggtgtgaggaggaggccgcggtgcagccg

SEQ ID NO: 521666 - DNA, 75 bp, Homo sapiens
tgtggaaggctctggataaggaccagtacctgcccaggaaactgtctctagtgatccctgaaaagttccagcata

SEQ ID NO: 521667 - DNA, 100 bp, Homo sapiens
gtggacgttgtctaaatttcggtagccatggcacaagaatatagtatagacacgtgtggccgtttacgctgtaggatcctcattcccactggctttgaac

SEQ ID NO: 521668 - DNA, 100 bp, Homo sapiens
catgtcattataccttcacccagcatttcatccctcgtcgaaaggattggattggcatctttagagttaaaccacagcttgaagaaaaaacaaatgagac

SEQ ID NO: 521669 - DNA, 100 bp, Homo sapiens
agcatagttaccacgtggaagagacagttgcaccaccagcaccaccttccagtagtcagctctgccgttacttccctgcttgtaagaagatggaatgtcc

SEQ ID NO: 521670 - DNA, 78 bp, Homo sapiens
tgcgggcccgctccgacgcggaaggtgtggcagttgggctcttcgtcaccaaacttcactttggaaggacatgagaaa

SEQ ID NO: 521671 - DNA, 96 bp, Homo sapiens
ggaaagacatggagattctcttaaaaaggctttgtgccttgggcaaagggcagcttactcctggaagaggactgactcaaggaccccagaacccca

SEQ ID NO: 521672 - DNA, 90 bp, Homo sapiens
ggaagacccaaaggcagcaaaaacaagagtccctctaaagcagctcaaaagatcactttgggaagcagtgacatccaacctgtatcaagt

SEQ ID NO: 521673 - DNA, 75 bp, Homo sapiens
catctccagccagagggagcgcttccgtgcccggaaccaggagcttgaggccgcagcggaggaggagaaagagat

SEQ ID NO: 521674 - DNA, 90 bp, Homo sapiens
gtccgatgctggggacaagaatgccaccaaagcaggcgatgacgagccagagtacgaggaaagaccacagcaagattctttcattcgtct

SEQ ID NO: 521675 - DNA, 100 bp, Homo sapiens
cattgaacttcccagcactcgaaagggaccgaaatggagagcaaaggacacattcagctaacgtattttagcaggtggagtgaggttgaagattcctgtg

SEQ ID NO: 521676 - DNA, 82 bp, Homo sapiens
gcgcgggggcggcgtgtcaggtggttgcggagctgctgtcccctttcctccaacccaacggcttactttcaaggaagtattt

SEQ ID NO: 521677 - DNA, 100 bp, Homo sapiens
aaccgccatctggcatcaccagccaagcagttacagatcccacagcagttttctgagtttaaccagtaatgccattcagttgccaatctcaagcaaagca

SEQ ID NO: 521678 - DNA, 87 bp, Homo sapiens
gacgcgagcccgctcccctgagtaagagtcagccagccgcggatggggagcgtgagtggcgaggttactataacaacagtaccaagg

SEQ ID NO: 521679 - DNA, 98 bp, Homo sapiens
tgctgccggcgcctcctccgcgggcgtgaaggcggcgctcctactccctccccggactccgcgggtgtgatcccctgggcccgtttgttgtcggggga

SEQ ID NO: 521680 - DNA, 87 bp, Homo sapiens
gcggccgcggagacctacctgcggcgtcggcagctgctgctccgagccaagtatcttcaagaccttctcatggagagtgtgaatttt

SEQ ID NO: 521681 - DNA, 101 bp, Homo sapiens
gtcagagccccttacccgccgccgcggccaggccccccaacatggactgtctctgtatagtgacaaccaaggttccttgtggagaagcactggtataagca

SEQ ID NO: 521682 - DNA, 83 bp, Homo sapiens
gggtgccgaggagcgggaagagttgctggggctccccacaggtgcaggaagccgccgcccagccatggacggggaggagcagc

SEQ ID NO: 521683 - DNA, 76 bp, Homo sapiens
acagagactttatcaaaaacatgattacagggacatctcaggaaacctgtccagtttaagtcgtcttggtctgaga

SEQ ID NO: 521684 - DNA, 98 bp, Homo sapiens
tcatccctctctggccactatggaattctaatttgaaccatgtttggattgaagccgcctctgtattacttaccagaaatgcactcggtgatggaaag

SEQ ID NO: 521685 - DNA, 82 bp, Homo sapiens
caagcacttcttactgtgttaaacaatctttgtttttgggaggctgaggaaggaggatcatttgagcctgggaggttaaggc

SEQ ID NO: 521686 - DNA, 74 bp, Homo sapiens
ttccccaagtagtccgatggcagcggctgcgccgaggcgcccgactcagatgatgattattctccaccgtctaa

SEQ ID NO: 521687 - DNA, 100 bp, Homo sapiens
tggcgcacctggtgcgggccctctggaccctggagtacaccccgcagcacagccgcgacttcaagtgccgcaggttcttcaaagctgcacagcattcatt

SEQ ID NO: 521688 - DNA, 100 bp, Homo sapiens
ttagggacaacaccgggacacccgcgaggccggaaaatgggaactgggaacagccaggtgccccaaagcaaatacgcggagctgctggccatcattgaag

SEQ ID NO: 521689 - DNA, 97 bp, Homo sapiens
gagaaagtccacagtcttttccggcgacagttggcgatcccactctatgatattgggcagttgcattacctgtctacctccttattgctatagtaat

SEQ ID NO: 521690 - DNA, 90 bp, Homo sapiens
tacaccaacaagtattccagaagtccaacaagagaatataatcaatcctcaagacctaacaggcctgcacagctgaccacagttgggaaa

SEQ ID NO: 521691 - DNA, 100 bp, Homo sapiens
gtttgagcgagtgttcataggagagtttgcttacacttacgctgccatgtatgacaaaggacccttccggtcctgaagattatatagacacagaatctcc

SEQ ID NO: 521692 - DNA, 100 bp, Homo sapiens
atctggaagacgcgctcctgcgccggatagtaatgatgacactgaagatgtttcactgtttgatgcggaagaggagacgactaatagaccaagaaaagcc

SEQ ID NO: 521693 - DNA, 100 bp, Homo sapiens
cagaaacttgttaaagacattattgatttatcagtcctggctagacaagtccacaccctacacggctgtgcgatgggtcgtgacactgggcctgagcttt

SEQ ID NO: 521694 - DNA, 75 bp, Homo sapiens
accatgtttggattgaagccgcctctgtattacttaccagcttgatcctctcccagaaaaggttttacagcaaag

SEQ ID NO: 521695 - DNA, 73 bp, Homo sapiens
aaggattccaagtaactcttatttggaggagctgatggatcagacatataggaggagatgaaaaggaagcagg

SEQ ID NO: 521696 - DNA, 99 bp, Homo sapiens
ttgccattcagcccaatacaactggcaaacaactttttgaccagtaccctatgatgagaggacctgatcctgctgctgctccatatagtactcagaaat

SEQ ID NO: 521697 - DNA, 98 bp, Homo sapiens
ccggcagcaccaagaggaccaatacgggcggtgctggagaatctggtaaaagcaccattgtgaagcagatgaggatcctgcatgttaatgggtttaat

SEQ ID NO: 521698 - DNA, 149 bp, Homo sapiens
ccggttcgtcgcctccttgcccgtgaccgtcgctagaactcagttgtgcgttgcggccagtcgccactgctatttggacacctcccacactgagtccccaaccccccatgactcaaattcacaccgccctcaactgcaggcgtttataa

SEQ ID NO: 521699 - DNA, 97 bp, Homo sapiens
ccggcttgccgcggcctgccgcaatggaaacatctatattctgagaagagaatctcgatgctggcctggagcagaaactgagctggaccactggagc

SEQ ID NO: 521700 - DNA, 100 bp, Homo sapiens
cacccacgcagacatcttcagccgctgccaggtggaccaggtgctctgaggctggcgtacagacacagcacgtgcgacggagtggtgttggtccgacacc

SEQ ID NO: 521701 - DNA, 82 bp, Homo sapiens
ccgtcacctacatcttccaccagcttctgggtttggtgcacctcgatttggaggaagtagggcagggcccttatctggaaag

SEQ ID NO: 521702 - DNA, 75 bp, Homo sapiens
cgcaggcgcaaggcttcaggcgacccgtactgggcctactctgggaagtgatgccgacatggtggataagaacaa

SEQ ID NO: 521703 - DNA, 145 bp, Homo sapiens
agctctatcgggacccagcggaggatggggtcaccgccctcagtgtctacctcacccccaagaccacacctcttctgtgtggtgagtggaccgcttaccccactaggtgaagatgtcagcccaggagagctgcctcagcctcatc

SEQ ID NO: 521704 - DNA, 97 bp, Homo sapiens
agatccttagtgcttcttttgaccagacaattaggaattttatggtgattacattgctgtgaacccacatttgttttccctcaatattttgggttgc

SEQ ID NO: 521705 - DNA, 109 bp, Homo sapiens
gtgctggatcacaatgaatgtctaattatcacagggttctccaaaaaatgtggaatcctttgcatctatgctgagacattctcctcttacacagatgggacctgcaaag

SEQ ID NO: 521706 - DNA, 100 bp, Homo sapiens
gcactgttagaatctgggactttcttcgttgccatgaggaaagaattctccgagatttctcacattggcaaactgagagattttcttctggaacacagga

SEQ ID NO: 521707 - DNA, 122 bp, Homo sapiens
tttgcttgagctttttctatcccgtgctcttcgtgctcttcatgttctttggaagacttcctgagctaaaggagaaaaaaaatatggtggatcgttcaaaactccttcctacttcccttcag

SEQ ID NO: 521708 - DNA, 75 bp, Homo sapiens
cgatggcacaggccagaaacaggtacatctaccctttagattccttgacctggattgaatactggcctagagaca

SEQ ID NO: 521709 - DNA, 99 bp, Homo sapiens
aaggccgtgttgtttgtctacctgggactagcagcctgcttctgcaaagtggtacgatcgaagggactatgtcttcattgaattttgtgttgaagacag

SEQ ID NO: 521710 - DNA, 99 bp, Homo sapiens
gttcggttgaaggattctgtgtgctgtcggacccagagggtgacggcgccgctaggatgaagctcgtgaggttgatggaaatcacaatcttctgacaaa

SEQ ID NO: 521711 - DNA, 100 bp, Homo sapiens
caggaagttccagctctgcgccgatctatgcacgcagatgctggagaagtccccttatgaccagggtgataaaagaaaatgtggctgaagttacccgaag

SEQ ID NO: 521712 - DNA, 83 bp, Homo sapiens
tcccttcatcctttcttcatcccaactgggcatcacatagacagtacctgtaatgagaaacagtaaagaaaacagactaagag

SEQ ID NO: 521713 - DNA, 80 bp, Homo sapiens
ctggactgagaccatctaccagtctgcaagcgtcttcaaaggagccccacatgagggggatatgagactttctactcgga

SEQ ID NO: 521714 - DNA, 75 bp, Homo sapiens
tcatgtaaagtctctcccttaatgctcagttcttagaagaccgagagagcagctctaaattgggaagcaatgccg

SEQ ID NO: 521715 - DNA, 100 bp, Homo sapiens
gcaccttgcgcttcttgcagtcggacactgcccatctctaagataagaacctggaaaggggactctgttggccattggaaattgcagaataatgtctcag

SEQ ID NO: 521716 - DNA, 100 bp, Homo sapiens
cgcatgggcgctgggatagctgtcctctttaagaagaaatttggaggggtgcaagaacttttaaatcaacatcacaatgaggacctagggcatctgtctg

SEQ ID NO: 521717 - DNA, 100 bp, Homo sapiens
gtttgtaggtcgtcagaaagaggcaacaatttgggatgaatcccaaagacattatgctgaatgggagaaatcatttttgaaacggttgtatactgtatga

SEQ ID NO: 521718 - DNA, 100 bp, Homo sapiens
ggtgcttgaggcgctgcggcaccccatccagggctgtgggacagatgatgtctaccatgttctacccactggtcacctttgtcctcctcctcatctgcat

SEQ ID NO: 521719 - DNA, 101 bp, Homo sapiens
atatggaatgttcttaacccagaagtagctgaatgtgttactccattgctgaggagtggaatcaaacattttaagtccagtgcaggatggaacaaagaaac

SEQ ID NO: 521720 - DNA, 100 bp, Homo sapiens
cagcaccgtgctgggaccaagtgtggtgtgattgacgaccggggcaagttcatctacataaccccagaggaactggccgccgtggccaacttcatccgac

SEQ ID NO: 521721 - DNA, 100 bp, Homo sapiens
atgctggatagataccgaattcttatcacaaagatggagtttcgctccgtcgcccaggctgaagtgcagtggcgtgatcttggctcgttgcaacctccac

SEQ ID NO: 521722 - DNA, 48 bp, Homo sapiens
cgacaagggttgtgtgaagacagagcatgtaacttctaatgccagcga

SEQ ID NO: 521723 - DNA, 78 bp, Homo sapiens
caatgcagtgcatattaacaagggtagattttgacctcagaaagtactactacagtaaaaagcaaagttgatgaaaga

SEQ ID NO: 521724 - DNA, 100 bp, Homo sapiens
gggcctggtgggggacgcgcttcttcccacactgtgagcctcagcagctccagccagcggacccgacggctgagagtaatctcaggggcgatataatcaa

SEQ ID NO: 521725 - DNA, 75 bp, Homo sapiens
aggccaaaaatgtgcatactcacagagttagagagagggatggtggcctaatgggattgtttgaaaaacgtcgct

SEQ ID NO: 521726 - DNA, 82 bp, Homo sapiens
tgtcggtgagcgcgtttcccgcctgagcgcaactagcggcgggtcgtgggcacctccagatctggtggctggacccagagct

SEQ ID NO: 521727 - DNA, 75 bp, Homo sapiens
gaagaagggacgccctcacaggacacctcaggacccattctggaactttcagaaaatgaagtggttggatcttat

SEQ ID NO: 521728 - DNA, 100 bp, Homo sapiens
gagaccaccatcatgctcaagtggatgaccatgggaaaggtttctcgattcagaatacgcagaacaccagcccgtcctcagctaaaccttacaccaatgg

SEQ ID NO: 521729 - DNA, 75 bp, Homo sapiens
aaaataaggaagacttgtcgggaacacagattggcacttctctgtttgatgaagagggagccaagattgtcaaag

SEQ ID NO: 521730 - DNA, 83 bp, Homo sapiens
cctgaatgccaatgtgtggtccaatgtagtgatgaagaatgcagatataatttctacagtagaatttaatcattctggagaat

SEQ ID NO: 521731 - DNA, 100 bp, Homo sapiens
cccctctgtcttttctgtgacgggagcaatgctgacctcggtttcctggacccattccgactcaggtacaccaggggttggaaaaaccacactaggcaaa

SEQ ID NO: 521732 - DNA, 100 bp, Homo sapiens
tatgcctgcccacctttcgatctgactgaatgttcattcaagttgcgagttataaggactcagcatcatgtagaagcacttgtggagcatcagaatggca

SEQ ID NO: 521733 - DNA, 50 bp, Homo sapiens
aatgactgtcctcgtaagataacagttcctgttgcatgtaaatcatgtcc

SEQ ID NO: 521734 - DNA, 118 bp, Homo sapiens
cgaagggtcagggaggaggaaattgaggtggattcacgagttgcggacaactcctttgatgccaagggcaacctcattccccatagccctgatctacctggttctcatcgctgtgggg

SEQ ID NO: 521735 - DNA, 90 bp, Homo sapiens
cagaagcctacaatgaagaactgaagaagctggagttgctcagacaggtccaggtgcaggtacagcagtctccgcaacaggtctcggctc

SEQ ID NO: 521736 - DNA, 83 bp, Homo sapiens
ccgtgttgctgatcgcctgggtggttgttggcgtgtccctgcagcgaaggatcctggtaccaggatcatctatgaccggaaat

SEQ ID NO: 521737 - DNA, 100 bp, Homo sapiens
aacactgttacgcttgccacctccatcaaggaaaaatgatctgttaaatgaagctgtcatcaggggagaagccgttccagtgtgagtttgagggctgcga

SEQ ID NO: 521738 - DNA, 100 bp, Homo sapiens
gtacacgggctaccccctgttccccggggagaatgaggtggagcagctggcctgcatcatggagaaataagcgggttttgaaaacaaaaaaaagaaggag

SEQ ID NO: 521739 - DNA, 80 bp, Homo sapiens
gatcagaccgtagcccttccggaaacctccatgctctggcaggctgccctgagcacgctcaaccccaaccccacggacag

SEQ ID NO: 521740 - DNA, 100 bp, Homo sapiens
caccactgaagtgaccgaatgaggctagacagcaacaagcagaattggcccaacaggaatggcttcaaatgcagcaagctgcccaacaagcccagcttgc

SEQ ID NO: 521741 - DNA, 96 bp, Homo sapiens
aggagacagagctactggatctcagccttgtcaaagatgccagatgtgggagacacgccaaagctcccaaggagaagacagactgctgctttggac

SEQ ID NO: 521742 - DNA, 50 bp, Homo sapiens
tctgatcacctggccaacccactgggagatggagtttcgccatgttgccc

SEQ ID NO: 521743 - DNA, 76 bp, Homo sapiens
ctgcagtgtcttccacaacctgggaaaatttctaccttgaaccgtatctgaaagaggttattcgggaaagaaaaga

SEQ ID NO: 521744 - DNA, 98 bp, Homo sapiens
gccatacatttgccgaagagcttcagaaagccccatcacaggtatatggaggagtgacctactataaccccgcccagcagcaggtgcagccaaagccc

SEQ ID NO: 521745 - DNA, 100 bp, Homo sapiens
aagcggcggaagccggtgcagaaaacggcatgaactacttggaggaccgtcgcttggtgcaccgcgacctggcagccaggaacgtactggtgaaaacacc

SEQ ID NO: 521746 - DNA, 90 bp, Homo sapiens
ccgtggccatgtgcagccgctacctccagcagtacccgcggctacgggaggagatggagcgcatcgtgaccacccacatccgggagcgcg

SEQ ID NO: 521747 - DNA, 75 bp, Homo sapiens
ggaggaaaatctgtcatttcaggatcattaattgtcacagccacagaatgtgagcaatgttcctttagttgggac

SEQ ID NO: 521748 - DNA, 90 bp, Homo sapiens
gattgctccagcagctccacacagccctctttgttggctatggacctggattcaagcatggcattgaggctgacacctttgaaaacattg

SEQ ID NO: 521749 - DNA, 100 bp, Homo sapiens
tcacctttggagggggaacaaggttaatggtcaaacccctgaacagagtatctgccaagcccgggcttccgtgatggtctacgatgacaccagtaagaaa

SEQ ID NO: 521750 - DNA, 100 bp, Homo sapiens
ctccagatggcgtcttccgtgggcaacgtggccgacagcacagtgacgcagccgccaaccatcaccaagcagtcagcgaaggatcacatcgtggaccccc

SEQ ID NO: 521751 - DNA, 75 bp, Homo sapiens
atgatccgcacccccagcatgaggcaggaggagcgctacctgttgtgattccaaagaatccctatcctgcctccg

SEQ ID NO: 521752 - DNA, 100 bp, Homo sapiens
gctgcagaaaatgatcagcttccagcttattccactaagctcaacaaatttcctgtatttaatattaatgatgacttgaatgatctgtgtaccagtgcag

SEQ ID NO: 521753 - DNA, 74 bp, Homo sapiens
aacctgtctccagtgggctctggcgcctatggctctgtgtgggtgcagattctgatgtagaaacaccatcaaac

SEQ ID NO: 521754 - DNA, 100 bp, Homo sapiens
accgggtgagctcaccgcccagcccaaaccaggagattgcgagggagcgatgcggtgcagcgcgttgagccccatatgggggttggcaggcagcagagag

SEQ ID NO: 521755 - DNA, 100 bp, Homo sapiens
ctggccatggcggctgcagctgctccgcctcccgtgaaggactgcgagattgaggatttcaaatatgcgtgcattagagaatgattttttcaattctccc

SEQ ID NO: 521756 - DNA, 100 bp, Homo sapiens
acccccacactgggtgagactcctaaagaggccgctcatcatgctgggcctgagctacagaggactggacgcatccaccagctgaggaacaaagtatcag

SEQ ID NO: 521757 - DNA, 50 bp, Homo sapiens
tccagccccagccccaagggcagagtgttcctaaacccaaaggaaagaaa

SEQ ID NO: 521758 - DNA, 50 bp, Homo sapiens
cagctggcttcttctcctggctggagccatctgcaggagctggagaggtc

SEQ ID NO: 521759 - DNA, 82 bp, Homo sapiens
gtcaaactcaacaaattgaaggttaacaccttaagagttgtagttactgaccagagcagtcattatggcgaaccttggctgc

SEQ ID NO: 521760 - DNA, 100 bp, Homo sapiens
agggaacagctggaatgggagagagagcgcagaatatcaagtgctggatacacacagttgtgtgattggtggagtgttggtgttattctttttgaaatgt

SEQ ID NO: 521761 - DNA, 90 bp, Homo sapiens
ggaggatgcggctcgtggtggatggcatggggcgctttggcagatgcagacagacatgctgaactatctggaagtccactgaaaagcaaa

SEQ ID NO: 521762 - DNA, 100 bp, Homo sapiens
atctcttctccctccccttcttggggaaagtggagatgacattggaaatcctcaacgagaaggaggccgacgagaggccagccgggaaggggcgggacga

SEQ ID NO: 521763 - DNA, 76 bp, Homo sapiens
gctctgtaggaaggaacttggttccccctccctcagcttccgccccaaaaggtaagaatgattgatgttggctgat

SEQ ID NO: 521764 - DNA, 133 bp, Homo sapiens
atggtgcagaaataccagtccccagtgagggtgtacaaatacccctttgaattaattatggctgggtatagaacaggctatgcttacaggcatcctctcattcgagagaagcctaggcacaagagtgatgtgg

SEQ ID NO: 521765 - DNA, 88 bp, Homo sapiens
agcttcacgcagctagaccccgacctgccgcgcccggagatctacgcagaccccaccaagaggctggagctgtacttccggcccaagg

SEQ ID NO: 521766 - DNA, 108 bp, Homo sapiens
agaggatctggtgtaccaggcgaagctggccgagcaggctgagcgatacgacgggagtgcatccgccccaacccttttccccctcgtctcctgtgagaattccccgtc

SEQ ID NO: 521767 - DNA, 100 bp, Homo sapiens
tcagaaagtccaagtgagctgatgttgacgctttgtcggtgtggagagtctctgcaggatgttattgacagacaatgcagatcttcgtgaagactctgac

SEQ ID NO: 521768 - DNA, 100 bp, Homo sapiens
cgggttttgccttatgaacttggtcggctcttccagctacaaactctaggtttgaaagcttcgcaaacctgggtatacttcatgtgacaaagaaaaaagt

SEQ ID NO: 521769 - DNA, 102 bp, Homo sapiens
aaggacctatgatagaacaacttagcaaaatgttctttactactaagcaccgttggtatcctcatggacggtgctggaccagggactgagcgtcccccggag

SEQ ID NO: 521770 - DNA, 98 bp, Homo sapiens
acaccaccaaactttgttcttgctcttgttttgccctcaattgtaattctgggtgattgcagtggtcatggacgtgttcacagacatcgacatcttca

SEQ ID NO: 521771 - DNA, 139 bp, Homo sapiens
ctacgacctgatcgagcgcatcgaggatttggcgctgcagaaccagatccgggagcacgtcatctccatcgaggatggcaggaaagggacacagccggcgctgatgctgggaggcctccagggatggagagtggcctgg

SEQ ID NO: 521772 - DNA, 90 bp, Homo sapiens
ctggtgctggtattggaacagtctttggcagccttatcattggttatgccagaatctttagaacacgatgttcttgatgataatacagag

SEQ ID NO: 521773 - DNA, 90 bp, Homo sapiens
gtttgccgagccttgacaggcgtggcagagggagcagtgcccgagcgcgggctgtgctgaagtttgctgctgccactggagccactccaa

SEQ ID NO: 521774 - DNA, 50 bp, Homo sapiens
ccgggacagctaccggcgcatccttatggccctgccctgggagaagccct

SEQ ID NO: 521775 - DNA, 90 bp, Homo sapiens
gcctgcagagcgcgcagtacctccggtagcatctccgcccccacttactgatactcctgacactacagcaaatgctgaaggagatttacc

SEQ ID NO: 521776 - DNA, 100 bp, Homo sapiens
gtggtgcttgccgcagccagcaactatttcaggtgcatcatttctggcatggcttcaggaagcattgtgctattttacaacgactttaaccggtggcatc

SEQ ID NO: 521777 - DNA, 98 bp, Homo sapiens
tatgattggctacagtgatggaatgcaggtctggagcatccctctttaccaacagggacgcttatgtcaactgggcagtgaattttgtgaattggaag

SEQ ID NO: 521778 - DNA, 101 bp, Homo sapiens
cgcattttttaaccctagatctcgggcagcaattgaagagaggtatggcaaagatctgctcaacctctctaggaagaagccgtgtggacagtctgaaatca

SEQ ID NO: 521779 - DNA, 82 bp, Homo sapiens
agatggggagaaggaagcgagactcatacgcaacctcaatgcaattctgtggtgttcttggtcacacatttatggagtttct

SEQ ID NO: 521780 - DNA, 74 bp, Homo sapiens
cttgccctggtcttgctcggccgatgaagtgcagaggtttttttctggaagccatgatactacaattcgattat

SEQ ID NO: 521781 - DNA, 109 bp, Homo sapiens
tcagagaagcctgtataaagatgtcatgatggagaattatggaaacctggtctcactggacatatctgaagagatggattaagaatgctttggattaaggattgtggag

SEQ ID NO: 521782 - DNA, 75 bp, Homo sapiens
cggtgctccatggatgacagcgctggcccaattatgaggagtcaaatcctaaggatccagcggcagtgacagaat

SEQ ID NO: 521783 - DNA, 90 bp, Homo sapiens
ctttttgaagcctttgcaaaatccaaggtttacactcgcacaccaaccttatatttggacttcaaattggacccaggagccaaacattcc

SEQ ID NO: 521784 - DNA, 100 bp, Homo sapiens
atgacactgttctgccctgctctgctctaacaacatttctaaagtctccagtgaatattgaattgctgaggattttgggaaaagacaaatcaaagttccc

SEQ ID NO: 521785 - DNA, 75 bp, Homo sapiens
agtttctccaaatgagctcatcctgggctgcagcagtgttgtactgctacttctataaacggacagccgtaagac

SEQ ID NO: 521786 - DNA, 74 bp, Homo sapiens
agcggaaaggagcgcgcctctttttggcttggggagctgcagcgttcggctaggcagctggaagagaaagaccg

SEQ ID NO: 521787 - DNA, 50 bp, Homo sapiens
gccttctcctccgccggtcccatacggtgatctttagacagtgactgagt

SEQ ID NO: 521788 - DNA, 100 bp, Homo sapiens
atctttacgaaaagttttattttggcaagagttggatcaacccagagctattgccttagatccttcaagtgggttctccagcatttggctcaaggcccca

SEQ ID NO: 521789 - DNA, 82 bp, Homo sapiens
ggtggcgaacggggcgagcctggaggattgtcactccaacctcttttcgctgataacgaaggaggcccaacttcattcaata

SEQ ID NO: 521790 - DNA, 90 bp, Homo sapiens
gcagatcaccgggggcgccctggaggagtccctgaagatctatgctcctctgtacttgtttatgggaaaaacagatggagactattacac

SEQ ID NO: 521791 - DNA, 75 bp, Homo sapiens
agaaggtggcagacccggtttgctgatcgccccagggatcaggagtgctgaagctgctgaaagatggcagaagaa

SEQ ID NO: 521792 - DNA, 75 bp, Homo sapiens
cctccattgttggagtcctgtgcacagattcacaaggacttaatctgggttgctggagtgcagtggcatgatctc

SEQ ID NO: 521793 - DNA, 90 bp, Homo sapiens
gctgaccccatccctgcttcctacgcatacattgggcaaaatacttcaaagggaaaaagatccatggagaaattgacattaaagtagaac

SEQ ID NO: 521794 - DNA, 90 bp, Homo sapiens
gcacgctcggatatgggggtgggcgtcttcacccccaccattgaggcccgcacagcccagtccagaaccaggtgcagatgggtctcttcc

SEQ ID NO: 521795 - DNA, 50 bp, Homo sapiens
cctcccgagtggctgggactacaggccaagaataaggagacgggtgcttt

SEQ ID NO: 521796 - DNA, 96 bp, Homo sapiens
tggctcaacaggctgaagggagaaagctgtatgtgatggcttctgtgtttgtctgtctactcctttctggattggctgtgtttttccttttccctc

SEQ ID NO: 521797 - DNA, 75 bp, Homo sapiens
aatcgacagcctcaaccttcataaacagatgtgtcagaagaattggatacaaaactccctcttgatggtggatta

SEQ ID NO: 521798 - DNA, 100 bp, Homo sapiens
gctcagccgcaagtacccgtccatcatagtcaactgcgtggaagagaagactttatattcagagcaccaatcaaattaagcaagcctggggaacttcgtg

SEQ ID NO: 521799 - DNA, 99 bp, Homo sapiens
ctatgcagtcatgtatcctgtgtttaatgaggggcaagattcttgccaagagaattaatgtgcgtattgagcacattaagcactctaagagccgagata

SEQ ID NO: 521800 - DNA, 82 bp, Homo sapiens
ccctgccggggagggcccagcgcatccgacaggtgtgggcaagagcagtttactgttgcgttttgcagacaacactttctca

SEQ ID NO: 521801 - DNA, 71 bp, Homo sapiens
aaagtgctggctggagtcgtcatgacaacagaggaggaacccgttttcactagacaagacagcaatcgcag

SEQ ID NO: 521802 - DNA, 90 bp, Homo sapiens
tgaaggttggcctgacaaattatgctgcagcatattgtactggcctgctgctggcccgcaggaactgctatgatcttctggtcagaaaga

SEQ ID NO: 521803 - DNA, 90 bp, Homo sapiens
agctctgtggtgcagtgaggataaacagattctttctgctgatgacaaaactgttcgtgaccaaagacttgaccactcaaagtccagctc

SEQ ID NO: 521804 - DNA, 100 bp, Homo sapiens
ctcttttgctgtagatccccagatcacctcgctcgacgtgttgcagcacatcctcatccgagcctttgatttgagtgggcatgaaaacagccctggaagt

SEQ ID NO: 521805 - DNA, 100 bp, Homo sapiens
tcactttgcctggacaggaggaaccctagctctgagctcttcaccctgacctatggtgccctggtcacccagctatgtaaggactatgaaaatgatgaag

SEQ ID NO: 521806 - DNA, 83 bp, Homo sapiens
cgggacccggtgtctgctcctgtcgccttcgcctcctaatccctagccactatgtttgaaggatgacctctaggaagaaagtg

SEQ ID NO: 521807 - DNA, 100 bp, Homo sapiens
catggcaggtcaaaatcagaactggtaagatttctgcatatctgatgccttcaattaagttgcagagttctgatggagagatatttgaagttgatgtgga

SEQ ID NO: 521808 - DNA, 82 bp, Homo sapiens
ggaagatccggcgcggggcacaggatccggagctggagcccccagttacagaatgtctgaaggggacagtgtgggagaatcc

SEQ ID NO: 521809 - DNA, 83 bp, Homo sapiens
gaaaaatggtggtgatggcgcgactctcgcggcccgagcggccggaccttgtcttcatctggtggctggacccagagctgacc

SEQ ID NO: 521810 - DNA, 83 bp, Homo sapiens
ggtccggggcttgccctggtcttgctcggccgatgaagtgcagaggtttttttctgccacgaaggaagacaggaggtccgagg

SEQ ID NO: 521811 - DNA, 101 bp, Homo sapiens
caatgagactgtgaacgtgctgtggaatatatggttgactttgatcaacttcaggataatttatgtcagatggagagaagatgcaaagcttcatgggatca

SEQ ID NO: 521812 - DNA, 90 bp, Homo sapiens
tccacgcccctgcccgaagcctgacccgactgcctctctcagtgagaaatgcttcggttacccacagtctttcgccagatgagaccggtg

SEQ ID NO: 521813 - DNA, 51 bp, Homo sapiens
cgggaggtcaacgaggtcatccagcagtcctgcgttaactgcggccgggag

SEQ ID NO: 521814 - DNA, 100 bp, Homo sapiens
ctcatactctgttatagataaacaagcaaacttaaactatttccagaagcttcaaaaggtcaatgcaaccaacttccaggccctggctgcagagtttgga

SEQ ID NO: 521815 - DNA, 100 bp, Homo sapiens
gaggtgacacaggaccataagccagaacttcccaaggaaagagaacgaatcgaaggacttggtgggaggttttatgaatgaagctatggctacagattcc

SEQ ID NO: 521816 - DNA, 49 bp, Homo sapiens
actctccatgccccgatgaagttgtttcccatccacataccaagctgat

SEQ ID NO: 521817 - DNA, 50 bp, Homo sapiens
ggctcatctacagtggcaagcagatggacctggacttctctgagtttgtc

SEQ ID NO: 521818 - DNA, 102 bp, Homo sapiens
agatctttcattccatccaaggcagtgaaaaactatcacattaacaattgcagattacattgacaactattggctatggagacaaaactcccctaacttggc

SEQ ID NO: 521819 - DNA, 90 bp, Homo sapiens
tggactcggtccgtggcttcggaggcaagtttggtgtccagatggacagagttgatcaggtcgtggagggcccccaagacccaacagagg

SEQ ID NO: 521820 - DNA, 100 bp, Homo sapiens
cgacgcccggcccgcagggcaggctgggctaagcagttccaagctttccatgtccaaggccctccctctcaccaaagtggttcagaatgatgcatacaca

SEQ ID NO: 521821 - DNA, 83 bp, Homo sapiens
cggcgagcggacggggtcgagtcagtgcgttcgcgcgagggcgccctgcgtccggcagaggaggcgagcatcccgctcaggtg

SEQ ID NO: 521822 - DNA, 50 bp, Homo sapiens
gcctacacgtgcagcgccagccctgaggaagttcagaagcagaaggaact

SEQ ID NO: 521823 - DNA, 100 bp, Homo sapiens
cgtagagtcgctggagcgggcggagctgtgcgagagcctcctcacttggcaatgtctcaggctgtgcagacaaacggaactcaaccattaagcaaaacat

SEQ ID NO: 521824 - DNA, 75 bp, Homo sapiens
gagccggagccgcctgggatgttcagttggcttatttggacgtctaggcagttttccagttagagggacaccgat

SEQ ID NO: 521825 - DNA, 75 bp, Homo sapiens
gccgctggcgagcgccaccgcatgggttcatctgcagaagccagcggacgcctctgttcaacttgtgggttacct

SEQ ID NO: 521826 - DNA, 83 bp, Homo sapiens
atactttgttagaaaagccaccagaatgattatgagcctagctgtgggcgttctttacgcaggacacagcgcaaacgtcagca

SEQ ID NO: 521827 - DNA, 74 bp, Homo sapiens
gccattcagcttctattacttccatacagagaaggcaacagtatggaggtgcaagtagatattgagtcaaagcc

SEQ ID NO: 521828 - DNA, 75 bp, Homo sapiens
gcgcgtcggccgccgccgggcctggacaatgcagatcttcgtgaagactctgactggtaagaccatcaccctcga

SEQ ID NO: 521829 - DNA, 75 bp, Homo sapiens
cgcatcctatggctcaaagaaagatgattatgaggtgcaaaaaaagtcttttgaagagaaatatgaagtcttcat

SEQ ID NO: 521830 - DNA, 75 bp, Homo sapiens
cgggcgccggcatagtacaatgaggcagccagcggatcttggaaactggcgatggaatatgagaggagccctctg

SEQ ID NO: 521831 - DNA, 90 bp, Homo sapiens
attggaaactctttgggaaagccactcgaaaagattatgatgatggcttttcaatgaagcatacagccaccgcccgtttccagagaaacc

SEQ ID NO: 521832 - DNA, 90 bp, Homo sapiens
aaaatggtcgccccgtccatggcctcccgagtgattgatcgtgcgattcaggcatatctcacagatttcctctgccagtttgctcagcag

SEQ ID NO: 521833 - DNA, 75 bp, Homo sapiens
aatttgctggatttaagcactgctgcactttatgagggaccttggtagctaatgtccgaagaaagtgactctctg

SEQ ID NO: 521834 - DNA, 100 bp, Homo sapiens
ttgaaggatataatggaacaatatttgcatatggacaaacatcctctgggaagacacacacaatggagcgtgaaataactaagaagttgggcaaccccaa

SEQ ID NO: 521835 - DNA, 100 bp, Homo sapiens
cgagaagtgtgccatcggagttacccacttccagctggaacaggagtacagctgtgtagtaaagatgccttctggtgaatttgcacgtatatgccgagat

SEQ ID NO: 521836 - DNA, 98 bp, Homo sapiens
ccggccgcgctcccgctgctcctgccgggtaaaggcgacacaggaggagaaccgggagctgaggagcaggtgtgaggagctccacgggaagaacctgg

SEQ ID NO: 521837 - DNA, 100 bp, Homo sapiens
cacgggtcgctccatttcgaattctgcttcaagttcccggctcccaggtttattctcccatagcatgtgggcagtgacctgggcctggtggactttaacg

SEQ ID NO: 521838 - DNA, 99 bp, Homo sapiens
gtaacctgggaggcaacaaaaagaaaatcagaggcaaaagatttagacctcggtctaattcaactgagactcagcccaaaaccatgtttgcccaagttg

SEQ ID NO: 521839 - DNA, 73 bp, Homo sapiens
aaacaaggatgttattgccaaatatactcatgaaatggccacagatgataagacgtccccaacactggactct

SEQ ID NO: 521840 - DNA, 100 bp, Homo sapiens
gcacaggaagccgtgaaactggccctggccaacgtcaacattgggagcctcatctgcaatgtaggggccggtggacctgctccagcagctggtgctgcac

SEQ ID NO: 521841 - DNA, 100 bp, Homo sapiens
aaggcagccgcggatcgccgcgctcagcgacaaacaagtcctccacttcttccaccttggctacccctgagatagcaagaccaatccttcctcttcttcc

SEQ ID NO: 521842 - DNA, 90 bp, Homo sapiens
gagaccctggccgccattggagatagtagttcctcagggaagaacagaaaagaggaaagttatatatttgagtcaaagggtgatggagga

SEQ ID NO: 521843 - DNA, 75 bp, Homo sapiens
gcctcctgagtagctgggattacaggacgaaaatgatgatgacgatgactggaacccctgcaaagcagcaggggt

SEQ ID NO: 521844 - DNA, 98 bp, Homo sapiens
agagaatgagcaaaagcaaattgacacccgtgccgcgctggtggagaagcgccttcgctatctcatggacacaggtgagacctggaaccccttcaaat

SEQ ID NO: 521845 - DNA, 75 bp, Homo sapiens
gccgccagcaccatggccagcaccatttccgcgggctgacgcacgaggcacacaggaaggaggtggagcaggtgt

SEQ ID NO: 521846 - DNA, 104 bp, Homo sapiens
gtccagtggctgaggctggacagagcacaggaggccttacatcgggaacaaatgttggaacagaagttagccacgcttcagcggctactagccatcacccaaga

SEQ ID NO: 521847 - DNA, 99 bp, Homo sapiens
ttttgatgaacaatattgaacgctatcttaaggatcgtacctagccatatggcctgctgcctctgccaatttaaaaacagcattgaggctgtctgcaag

SEQ ID NO: 521848 - DNA, 98 bp, Homo sapiens
ctgcatctgactatggcaaggatctctgtcactgagtgtacttttcccaacactggtgctcgtatcatgatgttcattggtggtcctgctactcaggg

SEQ ID NO: 521849 - DNA, 50 bp, Homo sapiens
ctggaaaaacttcttgccaaccaaacccagcgatctgctcacgagctgcc

SEQ ID NO: 521850 - DNA, 100 bp, Homo sapiens
ctcccctcagtcctgctctgaagatcctgccctgccctggggagcagctccccgagtcagcctatatgcaccagctcttgggcctcaacctcctcttcct

SEQ ID NO: 521851 - DNA, 98 bp, Homo sapiens
aacagactttttgttggatccattccgaagaataagactaaagaaaacattttggaagaattcagtaaagtcacaggatgaccatgaaagctgtggtt

SEQ ID NO: 521852 - DNA, 98 bp, Homo sapiens
gcagcagcagcagcagcattagcagcagcagcttctctcaatgctgagtagtgtattccacgtggagaaaaatggtcgctacagcatctctcggacgg

SEQ ID NO: 521853 - DNA, 101 bp, Homo sapiens
ccgggctgggctttcctcacccgggagcttgaagaaatccgcaaatgtgggatgaaaaacttccgtaacatccaggttgatgaagctaatttattgacttg

SEQ ID NO: 521854 - DNA, 74 bp, Homo sapiens
tgggggtagaggagaagttcatgaccatggtgctggcatccgcagtgtcatgcagaagtacctggaggaccggg

SEQ ID NO: 521855 - DNA, 50 bp, Homo sapiens
gccaggtgtccatccccgtgctgaggtggatgaaaatactaggaaaagtt

SEQ ID NO: 521856 - DNA, 85 bp, Homo sapiens
tctgtcttcggtggactccttcggcagtccacccaccgccgccgcctcccaggtaagtaaggaggtctctgtaccatggctcgta

SEQ ID NO: 521857 - DNA, 100 bp, Homo sapiens
gcgtgattcccgtgattgcgttacaagctttgtctccttcgacttggagtctttgtccaggacgatgcccccctcggaagcctggagaacgggacaggac

SEQ ID NO: 521858 - DNA, 82 bp, Homo sapiens
caggatatgatcaatgaagtggatgctgatggagcccctcaatagtgaagatgatgtgagtgatgaggaaggacaggaactc

SEQ ID NO: 521859 - DNA, 100 bp, Homo sapiens
caatgcccaaatggtggaagatcagggatttctggattctctacgggatctcatagcagattcaaatccaatggcctatgaaaggaggttccctacatgt

SEQ ID NO: 521860 - DNA, 100 bp, Homo sapiens
aagaaacataaattaaaagaagaattgcggcaagattacagacgttatcttactcagaggcgtggagctatttcctatgacagttctgatcagactgcat

SEQ ID NO: 521861 - DNA, 75 bp, Homo sapiens
ccaagaggaatgacaaacaaccagctcttcagccagtaatgttaaagtagagactcagagtgatgaagagaatgg

SEQ ID NO: 521862 - DNA, 88 bp, Homo sapiens
cgagccggcggcccggagtggggcggcgggttgtttacattcagagctctatcaataagaggaatacatattacagtgaattcgacaa

SEQ ID NO: 521863 - DNA, 100 bp, Homo sapiens
ccagatgagattgagcaggtttccaacaaggatgatatgaagacttccctgaagaaagttgtgaaggagatgaaggtcaccgtgtccaaagggggcgacc

SEQ ID NO: 521864 - DNA, 100 bp, Homo sapiens
cttcgggacacttacattgaagaagcagagaagtacaaaatgcaattgcaagagcagatagccgcaatggctgaaaatggtgataatgaaaagatggctg

SEQ ID NO: 521865 - DNA, 100 bp, Homo sapiens
ctcttctgtggcagtccaccccctgaggctgcttcggaggccatcgcgtgcttgatggacatgaacgcgctgctggaccgattccacaactacatcctcc

SEQ ID NO: 521866 - DNA, 83 bp, Homo sapiens
gagattccacccaaatcctcttctccaagaagatatcaaagctcagctctttgaaacatccagcaagacaggccagagtgtgg

SEQ ID NO: 521867 - DNA, 83 bp, Homo sapiens
attacagagaacctaagtctgtttgcaaagcacctgaactggagtttgggctttgcaaaactgagaacaaagccaagtcgggc

SEQ ID NO: 521868 - DNA, 100 bp, Homo sapiens
cagctccggcagcagtgtcctgtgctgatggtgttggcaggttttaatgtggaaacagtagaatataagaacatttgtttcacagtatgggatgttggtg

SEQ ID NO: 521869 - DNA, 75 bp, Homo sapiens
ctctgctcttccaacaccagtggaagatgatcacatcccagggtcattatcgttattgtgatgctctttctatgc

SEQ ID NO: 521870 - DNA, 75 bp, Homo sapiens
ccgccgcaaacagggcaacccgcagcacttgtcccagagggagctcatcacccggcgtctctggccgagcctctt

SEQ ID NO: 521871 - DNA, 100 bp, Homo sapiens
caagatccaatcccttgtccttaaaagaggcttcgtgacggagttatcagagacattgagaggcaaattcggaaaaaagaaaacattcgtcttttgggag

SEQ ID NO: 521872 - DNA, 82 bp, Homo sapiens
ccacagtggaccagctcgagtctcaagtggacaatgaccgttccccagcacaccccaccccactcagccgctcagcctccct

SEQ ID NO: 521873 - DNA, 101 bp, Homo sapiens
cgattcctgcaggcgttggttcccctctttgacctgggagaaacaaaggcagcgctgccctcgggggagcattggccctggcggaacgcagcagccgcgaa

SEQ ID NO: 521874 - DNA, 100 bp, Homo sapiens
tttaatgaaaatagatgaaccaagcactccttaccatagggttctcagaagcgagctatctctaccccagaaacccccctaacaaaaaggagtgtgtcaa

SEQ ID NO: 521875 - DNA, 73 bp, Homo sapiens
tcaaggtcgtgcgtctgaagcctacaagaaaggcgaacctcttcccggccgctctggtgcacttgggagccga

SEQ ID NO: 521876 - DNA, 82 bp, Homo sapiens
gctcggagcagcagcctctgagcaattctgtggtgttcttggtcacacatttatggagtttctgaagggcagtggagattac

SEQ ID NO: 521877 - DNA, 100 bp, Homo sapiens
gccgcaactggacggaggacatggaaggaggtttcacgtggcaggatgactatactcagtatgtgatggaccaggaacttgcagacctcccgaaaaccta

SEQ ID NO: 521878 - DNA, 100 bp, Homo sapiens
tcccgggtggcttacagacgctgccagcatcgccgccgccagggaaccttctgaccagcctcatgggctcctcagagcaggaggatggggaggagagccc

SEQ ID NO: 521879 - DNA, 85 bp, Homo sapiens
ctacactattttccaaggagaggctttcgccaaggtcttcaacacaacccctgatgacttggacctacatgtgatctatgatgtt

SEQ ID NO: 521880 - DNA, 83 bp, Homo sapiens
cgccgaggcaccgaggcactcagaggagccatggccatgcagaaaatctttgcccgggaaatcttggactccaggggcaaccc

SEQ ID NO: 521881 - DNA, 90 bp, Homo sapiens
ctgcagtggcgcctaaagtctgagagagggaagtcgcctctgtgctcactgtcagcatcaataaggccattaatacgcaggaagtggctg

SEQ ID NO: 521882 - DNA, 90 bp, Homo sapiens
gagacgctggctgcttgcggctagtggatggtaattgcctgcctcgcgctagcaggaaggattgacatgtacgtggaggggacactggat

SEQ ID NO: 521883 - DNA, 126 bp, Homo sapiens
cgagctaggtgacagcgtaccacgctgccaccatgaatgaggtgtctgtcatcaaagaaggctggctccacaagcgtgatgccatggacaatattaccaggcagaaccaattctacgatacccaag

SEQ ID NO: 521884 - DNA, 100 bp, Homo sapiens
gtatgtgccacgccgcccaggagacccctctgctgcaccacttcatggcttaagcaggtaaagcagtcactgtgaagaaaataacattttaagaaacttt

SEQ ID NO: 521885 - DNA, 100 bp, Homo sapiens
gggggatatgacaaggatggaagaggtcctatgacaggatcaagctcttgaatgtcgtctctcaactagccaaacggaatctgcgactgctggtcctagg

SEQ ID NO: 521886 - DNA, 113 bp, Homo sapiens
gaagatggttgtactgtctctccccaggatccagagtcagaggtaccagggttattttggagctgttggagcactccttgagctgttgaagatcccgtgatcattacctgggg

SEQ ID NO: 521887 - DNA, 100 bp, Homo sapiens
ctgaagactcccaccttcaggcaggattgggtagtacatgtttgtaactacctggcattgccttttgttgagagaatggatcttggagaatgtctgaaag

SEQ ID NO: 521888 - DNA, 50 bp, Homo sapiens
cttcgcaatatgactatgacaaactggtcacctgacttttgaatgccgca

SEQ ID NO: 521889 - DNA, 75 bp, Homo sapiens
ctgtggtattcgccggcacgcgaagtggccgcatccgcaagtgcaagaagaaacacacgctgctgtgccccgact

SEQ ID NO: 521890 - DNA, 101 bp, Homo sapiens
tgtatgtactggcagtattaagtttatccatcaagaatgatccaaggttttgccatcaaggggggacgatttaccaaagcccaagactgcgcctcctcctt

SEQ ID NO: 521891 - DNA, 152 bp, Homo sapiens
aggaggagtccacctggggctcccctgacagccacctgcccactttgtgatcagagccgtgttcggggagtctttcagtgtctttgctcagttcaaaagccacagaagaagttctggacgatgtgggccttcaatcttctaagatgggaata

SEQ ID NO: 521892 - DNA, 90 bp, Homo sapiens
caaggtgcaagagtccacaaagggacctgatgaagcgaagatcaaggagagaagatgactgaggaggaggtggagaccgttctggcagga

SEQ ID NO: 521893 - DNA, 100 bp, Homo sapiens
cgatgagtgcctccttcgtgccgaacggggccagcctggaagattgtcactgtaacctcttctgcctgattcgcttcaagctcagcttatcaatatgggt

SEQ ID NO: 521894 - DNA, 96 bp, Homo sapiens
attgatcctgcattggtcgtagctctttcttcacaaaaatcggggcacctgtgctggttgcacttgctttgattgaatgtggaatgaagtacgaag

SEQ ID NO: 521895 - DNA, 101 bp, Homo sapiens
tgaggatcagattttgaagagagatatgccaccagcatttattaagatgtttcgtctgaactcactttctgctttggcagaactggctgtgggttctcgat

SEQ ID NO: 521896 - DNA, 90 bp, Homo sapiens
ggtttccctcggcgtgctactgtgcgctcgatccagcaccatggggaagcgggacaatcgggtgaacctaaatcacagccacagcagctt

SEQ ID NO: 521897 - DNA, 100 bp, Homo sapiens
tgaagccaatgacagtagctggaatgacataaaaaactctggatatatatcacgagccatgtccattggagcccgttcccaatcagctcgtacttacttg

SEQ ID NO: 521898 - DNA, 96 bp, Homo sapiens
aacggttacggtcaccaggccaactggagtcagctttaagaaagatgtgccagtacatcaggaacgtctctatcaagaatacaatttcagcaaggc

SEQ ID NO: 521899 - DNA, 100 bp, Homo sapiens
ttctgctccattttttctgattatggattctgttcagaaggaagccgaattttaagtcatcgttctaggatagaggccatgtaccagccagcgctgtggt

SEQ ID NO: 521900 - DNA, 75 bp, Homo sapiens
gtcaagacatttcttcggcattctgcaacagtgctcatcatcactgtaggggacctttgaaagagctgccggaga

SEQ ID NO: 521901 - DNA, 100 bp, Homo sapiens
aggtgcaggccgttggggcggctcagaggcagataaaaatttccaatgggcaaatactggagcagctgtgtttggaacacagtcagtcggaacccagtca

SEQ ID NO: 521902 - DNA, 74 bp, Homo sapiens
gcggcggccagaggaaccccgagtccaagtggtaagaagttcagaagcaagcctcagttggcaaggtacctggg

SEQ ID NO: 521903 - DNA, 100 bp, Homo sapiens
agttctggggagcgcctcgtcgacatgagtgatgtggaggaaaacaacttcgagggcagaaaaatggacccaagtggggtcaaagtgctggaaacagcag

SEQ ID NO: 521904 - DNA, 100 bp, Homo sapiens
gatgccattgcacaagctgtgaggggcctcatcaccaaggcctagggcggctagtgaggaaactccccagacctcatcatcatctgctagaccaggtact

SEQ ID NO: 521905 - DNA, 100 bp, Homo sapiens
gcccggctctcgcaggcccccccgcgccgaccgcgttcctatggacagacgcacagacacctgcagtcctccgggcctcatatgaacaggagaaagaagc

SEQ ID NO: 521906 - DNA, 90 bp, Homo sapiens
gttccaccttcagagcgtcacggcgtacgccctcatggggaaaatctccccggtgactttcagggccgtccccatgttgcgttttccgac

SEQ ID NO: 521907 - DNA, 75 bp, Homo sapiens
atttgtggctggctggatctctggttaagaatagacccaccagcatttcgtgggatggtcttgattcagggaagc

SEQ ID NO: 521908 - DNA, 110 bp, Homo sapiens
cctcccgggtagctgggactacagttgtcatgggaggccagccgcctgctggcaaggaagatggttgattcttctgatcaatggaggccctgcagagtcctgtagtcact

SEQ ID NO: 521909 - DNA, 89 bp, Homo sapiens
ggagcatcgaggaccgtgttcaagaggaagcccgctgccttgtggaggagttgagaaaaaccaatgcttttgttaggagtgataaaccc

SEQ ID NO: 521910 - DNA, 50 bp, Homo sapiens
gctcaacaagggcctgccgcttggtggctattatcatggaaaactaattt

SEQ ID NO: 521911 - DNA, 100 bp, Homo sapiens
cacccgaatcgcagggagtcgccgctggagaggggctcggcgcccggcggggactgcagagataattgacgaccttgccaacctagtggagaacacagat

SEQ ID NO: 521912 - DNA, 98 bp, Homo sapiens
gaaagcatcttcatcttctctagtttcatcatgtatagatggagattccgatgcaggtttggcagttctctaccagtggaccaatcttttcatccccg

SEQ ID NO: 521913 - DNA, 100 bp, Homo sapiens
gggtctttaggatttgcagctccaggaagcgagatgtcgaagccgccacccaaaccagtcaaaccagactacgcgtttgttcacatggagaaggaagcag

SEQ ID NO: 521914 - DNA, 108 bp, Homo sapiens
tggtctcactgacttcaagaatgaagccacggacccttgcggggcctgcgaggtcaaccgccagaaccgagccggctactcggccctcatgctggctgcactcacctc

SEQ ID NO: 521915 - DNA, 75 bp, Homo sapiens
aacgggtcagttggcagccatcaaagttatggatgtcactgagggtcctgaggacaccgtgagccagccaggcct

SEQ ID NO: 521916 - DNA, 87 bp, Homo sapiens
aagaggctggactcggattcgttgcctgagatctgtctcgtaactgtgtaatcaaggaactagcaccacaacaggaaggtaacccag

SEQ ID NO: 521917 - DNA, 89 bp, Homo sapiens
aaagagcttgctccctacgatgagaactggttctacacgcgagctgaatccggacaatcagatagttcaaaccagcaaggagatgcgga

SEQ ID NO: 521918 - DNA, 75 bp, Homo sapiens
cctggtcatacaccagtactaccaaggacagcttttttcctgcaaggttgaactcccaccacctgatcttggacc

SEQ ID NO: 521919 - DNA, 75 bp, Homo sapiens
cacatgcaccggcagaagccgcccatcatccacagggacctcaaggtctgcgaggaacagaagtgcgaggaggag

SEQ ID NO: 521920 - DNA, 88 bp, Homo sapiens
agtcagaaactcagccactggttgccttggtaggcaataaaaggagaccaaattttgaggaaggtggaccaacatcagtagggagaaa

SEQ ID NO: 521921 - DNA, 50 bp, Homo sapiens
ggaacgcctagctcttgtcacaggaagctcataaaatggtgagagaagca

SEQ ID NO: 521922 - DNA, 82 bp, Homo sapiens
tgcatccaggagctggaggcttggcttctcagctgacagccctgcggcaacagtttgggcttcctgtagacacccttttcct

SEQ ID NO: 521923 - DNA, 100 bp, Homo sapiens
caaatatttacagtcggaggagtactcggtgaaatcctgtcctgaagactgtaagaaagcgctttcagtcggagagtagaaggcaaagcacaaaaccact

SEQ ID NO: 521924 - DNA, 95 bp, Homo sapiens
aaggtttgaaaagcagctggcctgcaaggcctgctcctgtctcagaaccttggcacttaagaactggggtctcagtatgttgcccaggctggcct

SEQ ID NO: 521925 - DNA, 75 bp, Homo sapiens
caagaaattagacaagaaacattggaaaagaaatcctgataagaactgctttgcaaatgttgaacatctggtgca

SEQ ID NO: 521926 - DNA, 99 bp, Homo sapiens
cggcagctgccccgtctgagaagatgacatgaccttgtggtagatcccagaactgaggccccaggatgacagaacaggagaccctggccctactggaag

SEQ ID NO: 521927 - DNA, 50 bp, Homo sapiens
ctattggatcagctcagcagggtttaccgacaagactgtgaaactttcgg

SEQ ID NO: 521928 - DNA, 100 bp, Homo sapiens
aagaagggcctcgttccttgtttagaggactaggccccaatttagtgggggtagccccttccaggtgctaactgccaaagaaaggaaaactcaaattgat

SEQ ID NO: 521929 - DNA, 100 bp, Homo sapiens
tttacaagttaattgaagagtcttgtccacagctggcaaattcagtgcagatcaggtttcccatccacataccaagctgatgaggatcccatcgttcttc

SEQ ID NO: 521930 - DNA, 82 bp, Homo sapiens
tgaggcggcgcggcagcggagggacggcagtctcgcgcgggagcatcgagtacagctgtccggcctccaacgagtgtgagat

SEQ ID NO: 521931 - DNA, 48 bp, Homo sapiens
aggggactgtgacacagatacagttactggcaattcctgtggaaaaat

SEQ ID NO: 521932 - DNA, 51 bp, Homo sapiens
aaaccctgtgggtgtggaagctgtgaggagtctctaccacccgtccagttt

SEQ ID NO: 521933 - DNA, 100 bp, Homo sapiens
gacccgcgtgggcaccctgcaggtggtcagacatgtcatcaactcagctgaagctccaccatgaggcgaggtggatggaggaagcgagctgaaaatgatg

SEQ ID NO: 521934 - DNA, 100 bp, Homo sapiens
gttggtgcagctgtcccctgctcgcggccaccgcaccacaggccccaggtactatactggcaattgctggagaagattttgcaattgttgcttctgatac

SEQ ID NO: 521935 - DNA, 105 bp, Homo sapiens
caatatctgtcttcggtggactccttcggcagtccacccaccgccgccgcctcccaggatgaccgagtgggagacagcagcaccagcggtggcagagaccccaga

SEQ ID NO: 521936 - DNA, 100 bp, Homo sapiens
tcaagacagtttctctgggtttgcccctctgcaaccacagaatcaggaaacccaggcccaacggcaggtggatgcaagaagaaatgttccccaaaacgac

SEQ ID NO: 521937 - DNA, 100 bp, Homo sapiens
cctctgcagcctctctgacaagtgcaatgactcagatgcatataaagatcaaatatcagtactgccaaatgaacaagacttggtgagagaagaagcccag

SEQ ID NO: 521938 - DNA, 75 bp, Homo sapiens
agtttgatgacattggagatgatgatgaagatattgatgacgtggttcatagagacttgaaacctagcaacattc

SEQ ID NO: 521939 - DNA, 97 bp, Homo sapiens
tcactgacttcaagaatgaagccacggaccctcgcggttctgccggagacttccatttggcctcaatgtgaaattaaagtagaaaatcacatctaca

SEQ ID NO: 521940 - DNA, 75 bp, Homo sapiens
gagccttcaaaagcagtgcaactggctcagtattcacagggaaagctgtgaggcattttgccaagatgatgagct

SEQ ID NO: 521941 - DNA, 82 bp, Homo sapiens
ttccgtgggcaacgtggccgacagcacagacggcgggcgctaacaccaccgacaaggagctagaggttctctccttgcacaa

SEQ ID NO: 521942 - DNA, 78 bp, Homo sapiens
cctcttattggaagattatccaaaaggaaaactgtggtatgtctgtgtgtaatggtaaaatatatatcctgggcggaa

SEQ ID NO: 521943 - DNA, 74 bp, Homo sapiens
tgactttgtcacagcccaagatagttaagtggggtatttattacagtatcaggagccaataccttgtgagcagt

SEQ ID NO: 521944 - DNA, 97 bp, Homo sapiens
gacagttaaactgtgggatcccagaactccttgtaatgctgggaccttctctcagcctgaaaaggtgaccaagaatatggcccaggtgaccaaagcc

SEQ ID NO: 521945 - DNA, 85 bp, Homo sapiens
agtctgcagttcctaagaggagctggcgcctcaggccatacctgggctatgactggattgcaggctggagtgcaatggcgggatc

SEQ ID NO: 521946 - DNA, 102 bp, Homo sapiens
ctaagcctaggagagcccgaactggagggagtgcatccgccccaacccttttccccctcgtctcctgtgagaattccccgtcggatacgagcagcgtggccg

SEQ ID NO: 521947 - DNA, 100 bp, Homo sapiens
tgtggcttcatggatgactgcaaaaatgacatcaacattctgaaatgtggcagtattcggcttggagaaaaggatgatcggctgaatgtaacagaggaac

SEQ ID NO: 521948 - DNA, 75 bp, Homo sapiens
agccactgcaagagtcaggttccgatgatcgcgctgcagataacgaaggaggcccaacttcattcaataaggagc

SEQ ID NO: 521949 - DNA, 83 bp, Homo sapiens
ctgaagagcgacaagccgctggcagccgcggatctcaccgccgctcaggaagatgctcatgaagcagcaggaccggctggagg

SEQ ID NO: 521950 - DNA, 75 bp, Homo sapiens
actgttgttactgacaagctttttgtaattgatgctttgtattcaggcaggatggggaagcagaatagcaaactg

SEQ ID NO: 521951 - DNA, 107 bp, Homo sapiens
gcagatttgaaaattcacccttgtagagtcattcctgcctttgagcggactcccttttaagggattttgtcagggagaaaaagtatcggacagaagctgagatgttt

SEQ ID NO: 521952 - DNA, 97 bp, Homo sapiens
acaaatggaaaaaaaggagtgtccagaaaagagtagcagcagtgaggaagagctgccgagacgatttggagtcaaaatatggacctgagaaaatatc

SEQ ID NO: 521953 - DNA, 101 bp, Homo sapiens
gaagatgctggaggacctgcggcgggaacagcaggccacagagctgcttgcggccaagtacaaggacattcagtcagaagaaggctgctattgaaagagag

SEQ ID NO: 521954 - DNA, 82 bp, Homo sapiens
ccagaaacccgacccagtgccgcgcagctgctggagctgccccagagcacatcagctatgtgccccagctctcaaacgacac

SEQ ID NO: 521955 - DNA, 82 bp, Homo sapiens
tggaggccccctggaaggctttaggatccagcttcctggagatgatggaggctcgcagccgtggccatgcgtccccactggc

SEQ ID NO: 521956 - DNA, 82 bp, Homo sapiens
acggtcaaggagattatgtctacgtttacagtggttggaataaaaacagggttgaatgagttccagaaagcagggttctcaa

SEQ ID NO: 521957 - DNA, 83 bp, Homo sapiens
ggaggtagcctggcccggtgggcactgtgatctcagacttccagccttcagaactcacccagtcagcttgaagagtttcaaat

SEQ ID NO: 521958 - DNA, 82 bp, Homo sapiens
ttcaggtcgtggcagagaaaaccagctgagacagggcgccacttactaggggccaaaccagtgctcctgccacctctctggc

SEQ ID NO: 521959 - DNA, 100 bp, Homo sapiens
gcttggtggagcaggagcggctgggcatcctcctgagactccggggtcagacgcccactccagggcaagttaaagtcttcagagccctgtatacgtttga

SEQ ID NO: 521960 - DNA, 82 bp, Homo sapiens
aggatgaactgaaacggattgccagagaattggcagaagatatggctcgtggacagcagaaaattcagtctcagcagaaaaa

SEQ ID NO: 521961 - DNA, 96 bp, Homo sapiens
cccggatgtggcgcggctgcgcgaggagcaggaaaaggtggaagttgatgggtcgaaactaaatgtgaccagcacgtggaacctggcttcgccctt

SEQ ID NO: 521962 - DNA, 50 bp, Homo sapiens
cggcatggctctcctggtgctcggttcatactttggaaacaaaagagctt

SEQ ID NO: 521963 - DNA, 122 bp, Homo sapiens
ctctttcgcttttgtggaactactctacggcatctggagcaactgggggattcccgaagtcttccgttttctgagaatgtgagtgctgttcaaaaattagacttttcagatacaatggtgca

SEQ ID NO: 521964 - DNA, 98 bp, Homo sapiens
cgcaccatgccgctcctaagcctgcacagccgcggcggcagcagcagtgagagctgagctcctgtgacggccacgacgggctgcggaggcaggactcc

SEQ ID NO: 521965 - DNA, 75 bp, Homo sapiens
ccgagtccgaggtctacgacgacggcaccaacaccttcttctggcacattcaggaccccgcgagccagcggctga

SEQ ID NO: 521966 - DNA, 83 bp, Homo sapiens
gcggcggcggtggcggccgctggggggatatgagactttctactcggaatatcctgagtgttgcgtggatgtaaaacccattt

SEQ ID NO: 521967 - DNA, 90 bp, Homo sapiens
atctagtgtctgacttttctagggaatccaatcaataaaattgaagactggctgcaggattgcggcctagagaaactaagactgaaagaa

SEQ ID NO: 521968 - DNA, 75 bp, Homo sapiens
ggcgcgggaggtgttcgagaacgaccccgagacggcccaattacgcagccaactgccacccgtcccttttagtgc

SEQ ID NO: 521969 - DNA, 100 bp, Homo sapiens
tgggacagagaaaacctggaaggactttacgataaaacgtgtcaattccttagcattggccgaagagttaagggacactccggacgcaggcccggccagg

SEQ ID NO: 521970 - DNA, 83 bp, Homo sapiens
ggcgctggtctgctcccagccgcaggtcaatggccagcaaggaggggggtccgagccggcggcggcggcggcagtggtggcag

SEQ ID NO: 521971 - DNA, 99 bp, Homo sapiens
gcacctcgctgctgcaggtcatcctccaagtggtcataccccggctggcggtcatttccatcaaccaggaagcggtttgacagggctgaagcagagtac

SEQ ID NO: 521972 - DNA, 76 bp, Homo sapiens
atgagaagatctccattcctgaggaggaggaacttccaggaacagaacaggccttaccgctgcgggaatcacgggg

SEQ ID NO: 521973 - DNA, 75 bp, Homo sapiens
atcagcagctccggcagcagtgtcctgtgctgatggtgttggcagtgaaagatgtcatgtatatctgcccattta

SEQ ID NO: 521974 - DNA, 50 bp, Homo sapiens
ggagacctggacttttgggtcaaaagtgaactttgaggcgctgatcatca

SEQ ID NO: 521975 - DNA, 100 bp, Homo sapiens
agaagtggtttcctttctcaccactgccattgggagattttgcagctgctgccggcaacctacaaacctgcctggcagttttgggccgggcactgcccac

SEQ ID NO: 521976 - DNA, 100 bp, Homo sapiens
gccggctgcgaagacgcggtgggccgcccctccgcttcctccagattaggccgagcacttgctgagctatttggacttcttgttaaactttgtgtgggat

SEQ ID NO: 521977 - DNA, 100 bp, Homo sapiens
gccttcacctcggtcagcagctgctctcccagccgcgccagcctcctcactggcctgccccaggtcagaatggcggcagtggagcatcgtcattcttcag

SEQ ID NO: 521978 - DNA, 75 bp, Homo sapiens
cagagacccagcagctgctgaagacagcactcaaagtctcggaagggtgctgacctggaccgggagaagaaggct

SEQ ID NO: 521979 - DNA, 89 bp, Homo sapiens
cggaaacaacgttctcccgcaaaaaatttggattgggtgcctctcaccacactgtcacactgcaagtcactgaggacaatgacagcaat

SEQ ID NO: 521980 - DNA, 101 bp, Homo sapiens
ctccggagcagcgaggtgtgcgctgactgcagcgggccgggatttaggtcctgaatatgaaggtatatttaacacttcattgcagtggatcttagaaaatg

SEQ ID NO: 521981 - DNA, 95 bp, Homo sapiens
tgagccaccgggtgagctcaccgcccagcccaaaccaggagattgcgagggagcgatgcggtgcagcgcgcatgcttttcacttccactgcatct

SEQ ID NO: 521982 - DNA, 75 bp, Homo sapiens
gagcgaacgaccaagagggtgttcgactgctagagccgagcgaagcacgttatgaagaggacatgtactggagga

SEQ ID NO: 521983 - DNA, 75 bp, Homo sapiens
gagccacacatccccgaccacttgcggcctgagtatggtgcagagcattgtagaccaaggagccatggataggag

SEQ ID NO: 521984 - DNA, 50 bp, Homo sapiens
cctcaacaagtacatcctggacaagaagaacatgtgatcatccaggccga

SEQ ID NO: 521985 - DNA, 100 bp, Homo sapiens
accaatgtgggggatgaaggtggctttgcccccaatatcctggagaacagtgaagagacgagttgtactgctgtcacaggaaatggacgctggattacaa

SEQ ID NO: 521986 - DNA, 96 bp, Homo sapiens
gtttgcagcagcaatgaggaaaatgggtgtgaagaaaggagatcgggttgttggaggaggcaaaacagattcagaatctgcagaaagcaggcactc

SEQ ID NO: 521987 - DNA, 98 bp, Homo sapiens
tagtgctaatttccaatgttccataagcgtggcaagaaaaatgggaagttctcggggtgagcccctccagactccgaataggagatcaagagtttgat

SEQ ID NO: 521988 - DNA, 111 bp, Homo sapiens
cacgggtgcagacagcaatggtgagatgagtcccgcagagctgctgcacttccagcagcaacaggccagcctcaggggaaccccttgggctgcaccccacttctgccgaat

SEQ ID NO: 521989 - DNA, 100 bp, Homo sapiens
ctggagatggaggactcaaagccacaccccagtgtccagtgtagccctactccaggcccctctcctacccagataccgatgttatactgatgtgtttttc

SEQ ID NO: 521990 - DNA, 100 bp, Homo sapiens
ttacatcagttaatagtagcaaatatgactggactggaaccatcaaacaaggctgcagaggtcaagagcaatctgaatccaaatgcaaaggagtttgttc

SEQ ID NO: 521991 - DNA, 90 bp, Homo sapiens
ctgggagcgtgctttccacgacggtgacacgcttccctggattggggctgtggcagtctgtccacatcgatgacctccggagatccaccc

SEQ ID NO: 521992 - DNA, 100 bp, Homo sapiens
tgaagcaaaagcctttcatgattatagtgatcagcagctggactgtgccttggacctaatgaggcgcctgcctccccagcaaatcgagaaaaacctcagc

SEQ ID NO: 521993 - DNA, 100 bp, Homo sapiens
gtctccgaagatttcatgtgtttgcaagatcgccagccttacaggttttacgtgaaatgaaagccattggaataggccaccagcccctcgggttccaaga

SEQ ID NO: 521994 - DNA, 91 bp, Homo sapiens
gaggagtctctgtccgggggcctggctaaggaaaccctattacctccaggttttagatggagcaggattagatattgatttccatcttgcc

SEQ ID NO: 521995 - DNA, 73 bp, Homo sapiens
tgtggagacccccctgagaggttctgctcccatgtgccagcgagatttcagattcctgtaaacctctaaagaa

SEQ ID NO: 521996 - DNA, 83 bp, Homo sapiens
cgagcggcgcccggagcccgcgggcctgacacgcggcgggacatgcaggaggagccgaggaaggtctgcttcacctacgacct

SEQ ID NO: 521997 - DNA, 80 bp, Homo sapiens
gatgaagagaggaagccaacccacaggcagcatgacacccaggacctcttggaagaggcctcggggcaggacggctctgg

SEQ ID NO: 521998 - DNA, 98 bp, Homo sapiens
gagctgcctggtcctgtctcccactgccgcagagggtttttgccaatccagaagactgtgtagcatttggcaaaggagaaaatgccaagaagtatctt

SEQ ID NO: 521999 - DNA, 101 bp, Homo sapiens
gactcattgggactgctctagatcttcactatccaatacggaaccgagctgtggcctggggttccatggagcaggtggggcgcggaggaactgagctgtgg

SEQ ID NO: 522000 - DNA, 111 bp, Homo sapiens
ccgggacccggttccccggcccacagtgggggtgtgcaaacccgagagaactggaggctcacaggacacctgcatgcccaaggcactccaccgtatgtgatcaacctggat

SEQ ID NO: 522001 - DNA, 75 bp, Homo sapiens
ctttgacaatacaggaaatgtttcttggacgaaccttgacaggatgggtgcagcgaactttccagagcacccagg

SEQ ID NO: 522002 - DNA, 75 bp, Homo sapiens
ctgatgggcacggccgaggacttcgccgaccaggtctcggcgcggaagatggccggcggcgtggacggccccatc

SEQ ID NO: 522003 - DNA, 75 bp, Homo sapiens
agaccctcactctctctgtcagaaaaatcttgccgggattgctgtccttgccattggactatggctccgattcga

SEQ ID NO: 522004 - DNA, 98 bp, Homo sapiens
ttccttcctccccacccattcctttaaatccggagggggaaaaaatcccaaggtctgcaaagaggacagtgctgctgtgagtttgacgaagtggacat

SEQ ID NO: 522005 - DNA, 74 bp, Homo sapiens
atggggcatacctatggctttattgacctcgactcccatgcgaaccccgagatgcccctgtccttcacaataag

SEQ ID NO: 522006 - DNA, 74 bp, Homo sapiens
tcctgtcatggttccccttctactacatgctgaaggttctaaggcccagcagctactacaaggattgcaagcca

SEQ ID NO: 522007 - DNA, 75 bp, Homo sapiens
attgcctcccatgaggatgtggacaaagtggcattcacaggctccactgaggtagccctggtttaccccaacaat

SEQ ID NO: 522008 - DNA, 85 bp, Homo sapiens
gaaatgcagtaaccagcatgtcaataaggggtcataggtggaaaagacatgaaactgttttggctgggcctacttcacctatacc

SEQ ID NO: 522009 - DNA, 82 bp, Homo sapiens
cctggggtctctgatgcctattattgtaaggagtgcaccatccaggagaaggacatatggctcgtggacagcagaaaattca

SEQ ID NO: 522010 - DNA, 114 bp, Homo sapiens
tcaagttctgaactgggaggtgactttgagttcatggatgatgccactgtggactactgtgcctcagaaaaccacggatgtgaacatgagtgtgtaaatgctgatggctcctac

SEQ ID NO: 522011 - DNA, 100 bp, Homo sapiens
gaggagtcagctgtgtgtccagaacgtgccatggagacgcttaacggttaagaaggcttttttgctctgtagcctggacgtactttgaagcccctcccca

SEQ ID NO: 522012 - DNA, 75 bp, Homo sapiens
ggattccaagtaactcttatttgatgtatcggcaagcagtgtaaacggaggacttggggaaaaaggaccacatag

SEQ ID NO: 522013 - DNA, 97 bp, Homo sapiens
cacaggaggaggaggatgagattcttccaaggaaagactatgagaggctgaggggatctggcggtggagcgctaggatcagacgcccccgcgatgac

SEQ ID NO: 522014 - DNA, 83 bp, Homo sapiens
tccagacagcctgcaaacatataagatctggagacccaatggccaaaagagaaacattggctactttgacaaccttaaagcgg

SEQ ID NO: 522015 - DNA, 98 bp, Homo sapiens
ctgaatcctctaaaggccccatacaatgaagtagacattggtggaaacatttattggaaaatggatataccttatttgattatgatgttggactgaat

SEQ ID NO: 522016 - DNA, 82 bp, Homo sapiens
gatcatgtctgcgagccaggattcccgggggcgacgcttcagagactgacaacctctgggctgatggggaagatggagtatc

SEQ ID NO: 522017 - DNA, 82 bp, Homo sapiens
ggagaaagcccacatcaacctggtgaggagtgtggccatctggggccgtgtggtatttgccactcaggagacatgtccctat

SEQ ID NO: 522018 - DNA, 50 bp, Homo sapiens
gcttgaggctccagtcaaaaaccattaagatgacacatttaccttctggc

SEQ ID NO: 522019 - DNA, 100 bp, Homo sapiens
tcaccgacagcacagacagaatccctgctaccagagcatttcctccctctgctatttatacacggaaagacttactacagcgatctacccatattgccac

SEQ ID NO: 522020 - DNA, 100 bp, Homo sapiens
cagttattgaatatcaagaggaggagttgttggctttcggacagtcctttctccagcccgacatccacctttttaaacaaaatctcttctacttggagac

SEQ ID NO: 522021 - DNA, 75 bp, Homo sapiens
cattggaggggatggattttttaccatgaaatatgagcctgattacatcaaccccagagccgtgcagctgggctc

SEQ ID NO: 522022 - DNA, 100 bp, Homo sapiens
cggcttaagctctcggaggagtggcagagtacgatctgaaggaggggcttctggttagcccagataaaccgagaaaactggtgtacaatagagccatgcc

SEQ ID NO: 522023 - DNA, 100 bp, Homo sapiens
cctgaaggtactctcgcaggaaatgggaattctacttgtgtgggagttgatccctgaattttattatctccctgagatgtttgtcaacttcaataattat

SEQ ID NO: 522024 - DNA, 117 bp, Homo sapiens
ccgcccgccgcagggcgctgacggtcccgcacgtctgccgctgccaccggcgcgcccgagtgctggagaatctggtaaaagcaccattgtgaagcagatgaggatcctgcatgttaa

SEQ ID NO: 522025 - DNA, 73 bp, Homo sapiens
aacatgggtctccacctcgaagctggctcagcctttgttcaggaaccgacaaatttacatgtattggagacca

SEQ ID NO: 522026 - DNA, 100 bp, Homo sapiens
gccgccgtcagcgagggcgccgagcaacttcgacaatgcagatcttcgtgaagactctgactggtaagaccatcaccctcgaggttgagcccagtgacac

SEQ ID NO: 522027 - DNA, 82 bp, Homo sapiens
tccggcagcgaaagcggtgcagacgggaggaagaaactggcgatggaatatgagaggagccctctggaaagaaaaggacaga

SEQ ID NO: 522028 - DNA, 88 bp, Homo sapiens
cccttcctcgaggcggtgtcccacctgccgcccttcttcggagccttttgtggcagatgaatatattgaacgtcttgtatggagaacc

SEQ ID NO: 522029 - DNA, 100 bp, Homo sapiens
gcacgggcggctccgcagtgaccggactcgggggaggcctttccccctggtgctcttcatcctttaccaaagagacaagcacttgaaaaaagcaatggta

SEQ ID NO: 522030 - DNA, 83 bp, Homo sapiens
ctggggctgcctgccgggcggccgggcgcggcgagcccaggaacatgcttaccctgctgatgaactcatgcctttaacctgta

SEQ ID NO: 522031 - DNA, 51 bp, Homo sapiens
cgtcagatttcctccagaggccagtggaaagggataaacagcacttccagg

SEQ ID NO: 522032 - DNA, 82 bp, Homo sapiens
ctactcgcccgccaccctgcgctgccgccgctctgaggagttaaagatgcagaggccaggatgtgggcccagccctgtgcca

SEQ ID NO: 522033 - DNA, 80 bp, Homo sapiens
ggcacaccctacgttaccgtgctcaaggtgccagaaccctgtggagcatcatgaactgggaagagtagctgagccccaga

SEQ ID NO: 522034 - DNA, 100 bp, Homo sapiens
agtgggtagttttattaacattgaggagatcaaagagattgtcaaaaggttgcaggagttcttggtttcgactcagaaaacatatggtgctgacctggcc

SEQ ID NO: 522035 - DNA, 50 bp, Homo sapiens
gtcagtatttgaggagaaagcatttgttgcttctgcaggaagcctttttg

SEQ ID NO: 522036 - DNA, 98 bp, Homo sapiens
gcatagagaacacgctgtgggctggcactgtggtcgcatcagtggatccaaacttctacagcaaaaacttacttcttttaggaaagacatacttgaaa

SEQ ID NO: 522037 - DNA, 75 bp, Homo sapiens
cttattttttctcatggatgttcttcttcgagtatttgtagaaggatggagaggagaaaacctatggtggctgtg

SEQ ID NO: 522038 - DNA, 90 bp, Homo sapiens
acacttataatgctcgcagataagcatgctagcctagaatatcctgcagtggtagagtttgctccattccagaagatagccaaaaagaag

SEQ ID NO: 522039 - DNA, 152 bp, Homo sapiens
tgacaaacattttgaagttctgcattctgacttggaaccacagatgaggtccatacttctagactggcttttagagtggatccaaacttctacagcaaaaacttacttcttttaggaaagacatacttgaaactacacaacaaaaagcttgc

SEQ ID NO: 522040 - DNA, 100 bp, Homo sapiens
caaggatattcctcatatatcatactcagattgatggacaacttttcttaattaagcaccttttgatacttcgtgaacaaattgctccatttcacactga

SEQ ID NO: 522041 - DNA, 100 bp, Homo sapiens
gtgcagatagtcgtgcagctgggagacataagtcccatgaggatcccagagttgtggcagctgagctatcagcttcccagtttgcacaattcatcaagaa

SEQ ID NO: 522042 - DNA, 50 bp, Homo sapiens
gagaaaagtctctaagtttgtggcctcagaaaacggaatctctgtctgtg

SEQ ID NO: 522043 - DNA, 83 bp, Homo sapiens
ttcagacccttctctcccctccactttctcccgggatatgttgcagtattacttgaatctgacagaggcgaatctaaagggag

SEQ ID NO: 522044 - DNA, 100 bp, Homo sapiens
ggagacacggccagatctgccctccagtaccgaggagaaggcattgtatatgggacactagaggaggtgtgggactgtgtgaagccagctgttggaggcc

SEQ ID NO: 522045 - DNA, 75 bp, Homo sapiens
catgaggacacggcggagtcggggctcggtgacgagctcatcttcttggaccctcatacaacccagacctttgtt

SEQ ID NO: 522046 - DNA, 88 bp, Homo sapiens
tgttggtccaagggaactgggtggtgaagaggttgctaggaagaggctcaatgtttgtgttttcaccagatcagtttcagagactgct

SEQ ID NO: 522047 - DNA, 98 bp, Homo sapiens
gcctgcaagttgttgctccgcttgttggactgctgctgcaaaacttttctaacttcttccttgacatggtcctttggaaagttgtgttcaaccgagac

SEQ ID NO: 522048 - DNA, 100 bp, Homo sapiens
ctggccagagcacacaccaggcactgatctcacattcttgaaggtggcattgaagagcactaagatcggaagatgagtgagcttgaccagttacggcagg

SEQ ID NO: 522049 - DNA, 101 bp, Homo sapiens
caagaccatcatcactttcattgtctcggacgtgcggggcctgggcctcccggtccgcaagcagagtgtgtggcaggccccaacatcgccgccatcgtcgg

SEQ ID NO: 522050 - DNA, 50 bp, Homo sapiens
tgtcaacttcctcttcagtcatcagtgtgtgtcaaggatgccacaatgcc

SEQ ID NO: 522051 - DNA, 100 bp, Homo sapiens
ccgagactggcgggggtggacgcccgggccgggctgcgcccgcttcttgcagatcagaccccaacaccaacaagattcttgaaaaactgtgaagaagtgg

SEQ ID NO: 522052 - DNA, 96 bp, Homo sapiens
ctgctcttcctctcgcagttctgcattctgtcgggcggtgcaaatggttatgagccttagagtttctgaactccaagtactgttgggctacgccgg

SEQ ID NO: 522053 - DNA, 100 bp, Homo sapiens
ttactccctctttaagattgcgtacccactgcagagtgctgaagacggggtagccacgagatatgatgaagatcacagtggtgatgataaagtcttcctg

SEQ ID NO: 522054 - DNA, 74 bp, Homo sapiens
tgggagccgcaccacctaacgctggccgacaacagcctggcgtccgccacgaacgacaccgtaactatccgcac

SEQ ID NO: 522055 - DNA, 73 bp, Homo sapiens
tgagcgggcggtcattcgcatcgcagtgtggacgaatgtggaacctcgctctgtggctgtgttcccttggcac

SEQ ID NO: 522056 - DNA, 100 bp, Homo sapiens
ctgagagcttagcagttaaaattcacaacatcttgtatccctatcgtttcaccaaaggaatgattcattcaatgcaggctgagggtaaaaagctgggatt

SEQ ID NO: 522057 - DNA, 75 bp, Homo sapiens
actatccgtttgttcaggaaccaccagtgacagagccccagttgtgacagcgttgaggaagatatgaatgcttct

SEQ ID NO: 522058 - DNA, 100 bp, Homo sapiens
ggaccttccacgtctgacgtgtgatctcgagagacctgcgtacattcggggtgccagaaggaaagcatagcctaagaaagctgtcaagataaaacctcac

SEQ ID NO: 522059 - DNA, 75 bp, Homo sapiens
ccgccccgaaactttcaccgcgagcggcaataccaagtttccaggcccgaagagcatcccagactattgggactc

SEQ ID NO: 522060 - DNA, 100 bp, Homo sapiens
agccgctgcccgaactcccggcccgaactccaggtggtgacggctctgggccgcgcctggcaccccgagcacttcgtttgcggaggctgttccaccgccc

SEQ ID NO: 522061 - DNA, 82 bp, Homo sapiens
tttacattcactgatgcctacagttaaccagacacaggctgaagagattctgcagacatacttgaaatccaaggagtctgtg

SEQ ID NO: 522062 - DNA, 49 bp, Homo sapiens
cacagcccgagaaaccgcagcactacactggaggagtgtctgctggacg

SEQ ID NO: 522063 - DNA, 76 bp, Homo sapiens
aaaaacggcaacgtgtaatcagaaggcacagattagaggaaggaagagatgctaatcctgaggtgacgatgacaat

SEQ ID NO: 522064 - DNA, 100 bp, Homo sapiens
ggatggaagggaggagactcctgaccctcagaatgacaatgcagatcttcgtgaagactctgactggtaagaccatcaccctcgaggttgagcccagtga

SEQ ID NO: 522065 - DNA, 96 bp, Homo sapiens
agccacagatctctgtctacagtggttcagaccgacatgctgtacaggctctgaagagcggccattcctcagattcgaagctgaacacatctccaa

SEQ ID NO: 522066 - DNA, 82 bp, Homo sapiens
tgagggcccgcgccgcatggaggccggctgaggagcgccgctgcctcgcctcggtgctggagaatctggtaaaagcaccatt

SEQ ID NO: 522067 - DNA, 82 bp, Homo sapiens
caagtgtgtgcatctggctgttagaagaattcatgctcatccggcgccaaatcttaaaggcagaccacgcaaaaagaaacca

SEQ ID NO: 522068 - DNA, 100 bp, Homo sapiens
aagaagcaaggaagctgaagcagctttcttgaatgtctacaaaagattgattgacgtcccagacagttgcatctataaaaaggtttgcccctttaatggt

SEQ ID NO: 522069 - DNA, 100 bp, Homo sapiens
acaatggatctgtatataaaaccaatatgaatttaccacttcagtgcctggcaaatgcccgagttcacatggaagaaagtgcccttgctaccagttccga

SEQ ID NO: 522070 - DNA, 77 bp, Homo sapiens
agaaaaggaatccttgggacctcttcttttggaggttcttaaatgtgaagtggaattgatggccaggatggcaaaaa

SEQ ID NO: 522071 - DNA, 100 bp, Homo sapiens
caggatggaggccgtggcgacggcgacggcggcgaaggaacccgataagggacttatgttttccgggcccagagcgctgaaatgaaggaacgagggggca

SEQ ID NO: 522072 - DNA, 116 bp, Homo sapiens
ctgccacaaaccaggccaagatccacgctgacgcagagcggaaggagacttcccaagtaagaagcggaagaggagccgctggaaccaagacacaatggaacagaagacagtgattc

SEQ ID NO: 522073 - DNA, 100 bp, Homo sapiens
tgccagccctgacgggacagagccagggcactcaccaggctgcaagaacagtgctgggactgattcttccagaccagagtttgatgccagcagcttcggc

SEQ ID NO: 522074 - DNA, 74 bp, Homo sapiens
aggaagctgagaattatccttggacttacataaagcattttggactttatgatgcctaaatcaaaggaacttgt

SEQ ID NO: 522075 - DNA, 90 bp, Homo sapiens
cacgtgcctcgaccgcataggccagttcacctgtatctgtatggcagtctgcagatctccaggggagcccaccagcctagtcaacatggc

SEQ ID NO: 522076 - DNA, 83 bp, Homo sapiens
gcatatctaagaggctgaacatgaatccacagatcagcctggtccgacccccagtggcactaacgtgggatcctcagggcgct

SEQ ID NO: 522077 - DNA, 101 bp, Homo sapiens
agacgccaggacccactggaagcctagaaatgcgagtgcggtgggcccgggcgctgtatgactttgaggccctggaggatgacgagctggggttccacagc

SEQ ID NO: 522078 - DNA, 82 bp, Homo sapiens
ccaggtgtaagcgcagaaagcaggcgaacccgcggcgcaataacgcttccccgggcgctgcctggacaggcctgcctgcgtg

SEQ ID NO: 522079 - DNA, 100 bp, Homo sapiens
gttactacaacctcgggcgtctggagcatctttccttgaagaagtacattattgacattgtggttgaaagtacagctccagcagaagctttgaaagatgg

SEQ ID NO: 522080 - DNA, 75 bp, Homo sapiens
cactcatccaccgttgcctccagcccacccacctccagggctccaaacgaatcctgcggtcccatgagattgtgc

SEQ ID NO: 522081 - DNA, 100 bp, Homo sapiens
gctgtccctactgcggtcaacgtgaccagtgcatcccatgctgtggctccccttcaggaaataaagcaggtgaaatgacaatggatgctctgttggctcg

SEQ ID NO: 522082 - DNA, 50 bp, Homo sapiens
ggaaaaatacccatggtgggcaggaagagccattggatttaatgtagaga

SEQ ID NO: 522083 - DNA, 100 bp, Homo sapiens
agatagccctggataagaacccagaaacccgacccagtgccgcgcagctgctggaggtaaagatgagccttccagctacatttgcacaacatgcaagcag

SEQ ID NO: 522084 - DNA, 100 bp, Homo sapiens
gtggattggtggtgtggcctgtgagccactgcctgacagatacacggtgtcggaggaatcctgactgctgtcatggcgtgccctctggagaaggccctgg

SEQ ID NO: 522085 - DNA, 98 bp, Homo sapiens
cttgaacagctatgcatgctgcttttgatgtctgacaacgtggatcgttgttttgaaactccaagtggtaagaagttcagaagcaagcctcagttggc

SEQ ID NO: 522086 - DNA, 100 bp, Homo sapiens
ctgcctgttactcctggtgttggcaggcactgtggccccaggaggggtgagcggcccttccccagcccagctgggagccccagccctcggtgggcagcag

SEQ ID NO: 522087 - DNA, 96 bp, Homo sapiens
atgggagcccgcgggaggcccaacggcgccgtggccaaggccgtgggagcttcctgcctgacacagctcacttcaagaagtgcacaatgtcagaac

SEQ ID NO: 522088 - DNA, 75 bp, Homo sapiens
gtggaagtccaagtcaaacgcagaaggactgcctcactgagcaaccaagagtgttggtgaaaatttgactgaccc

SEQ ID NO: 522089 - DNA, 98 bp, Homo sapiens
actgggctgcactggggcacgacaggtcatcacgctgctcaatgagctgaagcgccgtgggaagagctatttccttcgtgctaccatcagccgccgcc

SEQ ID NO: 522090 - DNA, 100 bp, Homo sapiens
aagcgggggccaggccgaaaggcccggaagcagaagggtgccgagacagaactcgtcagattcttgcctgcagctggagttggccacggccaagaacgac

SEQ ID NO: 522091 - DNA, 100 bp, Homo sapiens
gagcaagcccctaggaatctgcctgataatcgattgcattggcaatgagacaggtgttggtggaatgagcgttgcatgtgtcttgaagagaaaagcagtg

SEQ ID NO: 522092 - DNA, 75 bp, Homo sapiens
gacggggcgctgcctggcccaggcgcacacggaagtggtaaagagaaatgtgtatgaccttacaagtatccccgt

SEQ ID NO: 522093 - DNA, 96 bp, Homo sapiens
ctgtgctgaatcctggctgtgtgaccccaaagtgtgaacatggctacgcctcttcattcccgtccatgccgagcccccgactgcagcattcaaagc

SEQ ID NO: 522094 - DNA, 74 bp, Homo sapiens
gtcttggcctcggaggatgcagcctttggactcaaggaactgcaagcacatgttgaccagataactgaaatggc

SEQ ID NO: 522095 - DNA, 83 bp, Homo sapiens
cgcacccacgcccctcaccccccgagagccggcaaacgagatgctgctcagtggacggaagctgacagcgcaggaggcgtgtg

SEQ ID NO: 522096 - DNA, 98 bp, Homo sapiens
ggaacctgtactggcagccggaggtgtaggtaggaaccggaatacctcggaagccgggaaatgggggcgacgatggccttctgaggggctgggacacc

SEQ ID NO: 522097 - DNA, 83 bp, Homo sapiens
gccgatccagcctgcggagcctgtggggcagacgggacatgaaagcttttggtgtgcacgtctcatgcattgaaccaggattg

SEQ ID NO: 522098 - DNA, 100 bp, Homo sapiens
ccctggtccagtcggagagccagagtacccaaaggcaagtggaacagctctaatggggttgaagaaaaggagacttgggtggaagaggatgaactgtttc

SEQ ID NO: 522099 - DNA, 101 bp, Homo sapiens
tttaatggcgaccgatactgtggacacccttacccttctgaagaacagaaaaagcagttggcacaagacacgggactcaccatccttcaagtgaacaattg

SEQ ID NO: 522100 - DNA, 50 bp, Homo sapiens
gaaaaacctgaggctgatgacccaaagataagaccacttttttatctgag

SEQ ID NO: 522101 - DNA, 87 bp, Homo sapiens
gagaccgggctggccatgatctatgctgaccaggtgtatggagaccaggacatgcatgaggttgtgcgaaagcattgcatggactat

SEQ ID NO: 522102 - DNA, 96 bp, Homo sapiens
gcaatgaagaattccttggaaacagttattgccagtttccgaggaaccgttccatatggcctgtcattggaaattggagatacagttcagatcctg

SEQ ID NO: 522103 - DNA, 97 bp, Homo sapiens
tctgggacgcccacatcccagaggccattcccgggtcggcaaatcggagcgcggccggggcgcgcggggaatgccgaactggggaggaggcaagaaa

SEQ ID NO: 522104 - DNA, 82 bp, Homo sapiens
ccccgggacccccacgccgccgccagatcgccatggatcggatgaagaagatcaaacggcagctgtcaatgacactccgagg

SEQ ID NO: 522105 - DNA, 95 bp, Homo sapiens
attttgggtatcactggagtctgatggaaagagataggcgcatctctggagttgatcgttactatgtgtcaaagagtcttgttctgtcgcccagg

SEQ ID NO: 522106 - DNA, 50 bp, Homo sapiens
cccgggagatgcagccagtttacaggtacatgtcccagagcaagcacacg

SEQ ID NO: 522107 - DNA, 101 bp, Homo sapiens
gggctttcgccggggcccaggcccagggaccaggcggaggcgtcgcgggagcctttggggcaccacagagatgcggatcagcaaagacccgatttttgtac

SEQ ID NO: 522108 - DNA, 100 bp, Homo sapiens
caagaacctggcttttagctgaactaaggagaaagtcctacaacagtttggcgtgcaacatggggcttgagaaaggggcggcgactggcggcgcgatgga

SEQ ID NO: 522109 - DNA, 90 bp, Homo sapiens
gcggcctctagtgtctggaggaggaagtgtcagcgctactgccgcaggaatgtatcctgtcaggtataatgtcagtgaatggcaagaaag

SEQ ID NO: 522110 - DNA, 74 bp, Homo sapiens
agagacagcctcctaaatccaaaaggcttgagaaggagaaagcagaaattgaacgcatgcgaaacctgactgag

SEQ ID NO: 522111 - DNA, 74 bp, Homo sapiens
cctgagttaacggacgctaagcggggtaggggaagaaggtggtcttctgccctgttaaagaagccctggaggtg

SEQ ID NO: 522112 - DNA, 90 bp, Homo sapiens
tcctgagtggctgggactacagttgatcatggccttgccaggttggtgacagtatattgtgagcatggtcataaagctgccaaaatcaac

SEQ ID NO: 522113 - DNA, 83 bp, Homo sapiens
ttcaacccgcaccttgtgttccggaagttccaggtacatgtcccagagcaagcacacggaggcccgggagctcatgtactcgg

SEQ ID NO: 522114 - DNA, 82 bp, Homo sapiens
ctcatacaggtcggagaggtcagcaacagggacatcgtggagacggtgctcaacctggtcaaaatgcagatcttcgtgaaaa

SEQ ID NO: 522115 - DNA, 100 bp, Homo sapiens
ctgcaagtatggagctcaagttcttaattattcagaatgctgcggttttccaagaccaaaatccacacccttatcacagcccagtgccaatggagtccag

SEQ ID NO: 522116 - DNA, 75 bp, Homo sapiens
catgctgtctgttcagacttcagcttggtacacagggaatatggaggttctgcacctgtatggaagtgaggaaca

SEQ ID NO: 522117 - DNA, 51 bp, Homo sapiens
cagcgttgtctccaaactttttttcaggactttttttatgaagacatggag

SEQ ID NO: 522118 - DNA, 75 bp, Homo sapiens
cagaactttccagtcgactctcaaggaactcaaccctatgtatgaaggatatctacagcatgatgcacaggaagt

SEQ ID NO: 522119 - DNA, 51 bp, Homo sapiens
ggcttcctggcccgaaaggagagcctattttacatcctgaagtccaaactc

SEQ ID NO: 522120 - DNA, 100 bp, Homo sapiens
ttttcttaatcccaatgttgccctgaaatttatgtccaggattcaaaaagtttaggactgctaaggtctcttgtggctcagagcataatttggcaataat

SEQ ID NO: 522121 - DNA, 85 bp, Homo sapiens
tcgggaacctcttccagttggaattgaagaatattcccaagtccttcacccggttttctggatatgccgcagaaggatccgtgcc

SEQ ID NO: 522122 - DNA, 82 bp, Homo sapiens
cttggactgagtcctgcaggacacaggatgtcacatgtacttcagtttgaggataaaagcagaaaagtgaaagatgcaagca

SEQ ID NO: 522123 - DNA, 97 bp, Homo sapiens
cggcatgtcatctttgccaggactgatgcagatgcccctcctccaccagaggactgggaggagcatgtcaacagagttgtctgctggttctcagctt

SEQ ID NO: 522124 - DNA, 75 bp, Homo sapiens
cgccaggaggccgaacgcggactcgccacccggtaactctcaggagccttctccgcagttggcttcctcggtagc

SEQ ID NO: 522125 - DNA, 95 bp, Homo sapiens
accagtcaaccagccattgctgtttactggatacctggttatcaatactctggctgaccatcatcatcgtgggactgactttggtggaagtcctt

SEQ ID NO: 522126 - DNA, 75 bp, Homo sapiens
tcaagggagtcgaccccaacagcaggaatagctcccggtcatcatcagatttgaaatatttaaagtggatacaaa

SEQ ID NO: 522127 - DNA, 75 bp, Homo sapiens
agtagtcgcagacctcgaaatgatagacgagactcaccgcactgtgttaaaccagatcctacggcagtccacgac

SEQ ID NO: 522128 - DNA, 75 bp, Homo sapiens
ggactttccttacctgtttttccagctcacccactgccagcagagagctgaagaagcaggtggagagtgccgagc

SEQ ID NO: 522129 - DNA, 74 bp, Homo sapiens
agacggggtggagcccatggaatcggtcctggaggacaggtggcccacaaactctttaacaacttgaaataaat

SEQ ID NO: 522130 - DNA, 101 bp, Homo sapiens
accctctgggggtcctctctgagtcaaatccagtgacaatgcagatcttcgtgaagactctgactggtaagaccatcaccctcgaggttgagcccagtgac

SEQ ID NO: 522131 - DNA, 100 bp, Homo sapiens
cccagcggcgagtagccttttgctcccggacggacttgagggtctccatcacccaactccatgcttcgagtcctgctctctgctcagacctcccctgctc

SEQ ID NO: 522132 - DNA, 109 bp, Homo sapiens
ggcagctcctgcgcctcttctactgcactgtcctggtctgctccaaagagatctcagcgctcaccgacttctctgattgggaaaatgaggtacgttagtgttcgcgatt

SEQ ID NO: 522133 - DNA, 100 bp, Homo sapiens
gttttgggccgaggcctgggttacaagcagcaagtgcgcggttggggccactgcgaggccgttttagattcttggatctcccagtcagcttcatttcccc

SEQ ID NO: 522134 - DNA, 117 bp, Homo sapiens
cggaaaccgatctgcccgttgtgtttgtgaaacagagaaagataggcggccatggtccaaccttgaagagtgtggaaggagaacaccatgagaaagctgtggaactactcaaggctg

SEQ ID NO: 522135 - DNA, 89 bp, Homo sapiens
tgactactggggccagggaaccctggtcaccgtctcctcaggcaggtacttcccggagcgagcggggaacgcgacgtaccccagtgcgc

SEQ ID NO: 522136 - DNA, 100 bp, Homo sapiens
tttatttcctcccagaagacactccccagggcagaaatagcgaccatggcgagtaaaatgtttattggaggcttgagctgggatacaagcaaaaaagatc

SEQ ID NO: 522137 - DNA, 100 bp, Homo sapiens
caggaaagccccagccacccatcaaatcagagagaaggaatccaccttcttacgctatggcagacccttcgcaggtgttacagtcgggtgaaagaacatg

SEQ ID NO: 522138 - DNA, 75 bp, Homo sapiens
aaaatgccaacgccgtgtctgaagacatgcgtcgggatgtccaggaaatttttcgcatgaccccccacgagaagc

SEQ ID NO: 522139 - DNA, 102 bp, Homo sapiens
ggaacagagagcagcatttcagaaccaggttctccttcgaggaacagagaaaatgaaaccagcagacagaatttgtcagtctctgtagaaacgctggaaaag

SEQ ID NO: 522140 - DNA, 98 bp, Homo sapiens
caatgggctggtcaatgcatcctacaccaaactgcaggtgctttacaaggccaagtacggtccaatgtggatgtcctacttagggcctcagatgcacg

SEQ ID NO: 522141 - DNA, 75 bp, Homo sapiens
ctcaaccagaaggaggctgtggcctatgcagtcaactcctggaccactagtattcaagatggaaaaggtgatgta

SEQ ID NO: 522142 - DNA, 88 bp, Homo sapiens
gataaagaaggtgtgattgaaccagacactgatgctcctcaagaaatgggagatgaaaatgcggaggaatcagagatcattgatttct

SEQ ID NO: 522143 - DNA, 120 bp, Homo sapiens
ggttaccatcactggatctgctgccagcattagcctggctcaatatctaatcaatgtcagccctggcaggtgcccggcccgccccccaccctccggctcccagggcctgctggaggagat

SEQ ID NO: 522144 - DNA, 100 bp, Homo sapiens
atggtgtaggtgtggacatgtgggctgttggctgtatattagcagagttacttctaagggttacaggaatacttaaagatgctggagtaaacaatttaac

SEQ ID NO: 522145 - DNA, 100 bp, Homo sapiens
acctggtgcagggcctgattgaggactgccagctggcgctgcaggtgtctgacttccagcaactgctggcctgtgccagggtgcaagctgagcactggag

SEQ ID NO: 522146 - DNA, 96 bp, Homo sapiens
acagccacaaggggtcttcctgtggccctcaaacaaaaaatcactgcattacatcagcagctgctgaatgccatggtggcaaaactggggaaccgg

SEQ ID NO: 522147 - DNA, 90 bp, Homo sapiens
gtcataggtggaaaagacatggtggtggaggtggatacagcagtcggagaacatctggcagagacaaatacggaccacctgttcgtacag

SEQ ID NO: 522148 - DNA, 100 bp, Homo sapiens
cccccgtcgccgccacacccatcagcgcggctacctgctgacacggaaccctcacctcaacaagacaaatcttcctattttcaagctgaaagaatctact

SEQ ID NO: 522149 - DNA, 98 bp, Homo sapiens
tccaacctggaagggcttaggaccaaatgtgctacctccaacgacctcacacaaaaagaaatccggaccctggagcttgcaggcctctgggaagcaag

SEQ ID NO: 522150 - DNA, 82 bp, Homo sapiens
gaagacctcaccttgggggagatcgaggtcatgattgcagtatgccatcctgatgacgatggtgctcaccatcttcatcaag

SEQ ID NO: 522151 - DNA, 83 bp, Homo sapiens
ctgcggccatggcggcgactactgccaaccccggtgtggacactgccagcggctgcagccgacttggaatgacctgggagaca

SEQ ID NO: 522152 - DNA, 98 bp, Homo sapiens
gacaaatttgtggggctgggagtatttgtagacacctaccccaatgaggagaagcagcaagagggcttccgagtggacctgccaatcaagtcggcccg

SEQ ID NO: 522153 - DNA, 100 bp, Homo sapiens
tcgagagaagttgattgaccactaccttgggcacaacagcgaggaccctgctctagaaggaacgtacgccagcaacacagtcactcctggcggcaaacca

SEQ ID NO: 522154 - DNA, 114 bp, Homo sapiens
agccttcatttctctgaacatactgccttatgggacagatcaagtttgccagaacccaataaagatgccatcttccaaggcctgacgcaggaccaggggttttatacatccaaa

SEQ ID NO: 522155 - DNA, 90 bp, Homo sapiens
gatgaagtgcagaggtttttttctgccgggggccatcaagtataagaccacaggaccacgtgattcataaagaactactgtcaaaactag

SEQ ID NO: 522156 - DNA, 50 bp, Homo sapiens
cttgccggcttcaccctcctaatggcaaagcataattgatttgaaggaga

SEQ ID NO: 522157 - DNA, 74 bp, Homo sapiens
gagagtattgccagagcaagagctggatctcgtctttctattcaggcttcttcaggagaaagcaagtacactgg

SEQ ID NO: 522158 - DNA, 75 bp, Homo sapiens
atgctgtttctaatgtatgggatggtgatagagagtgctcaggaatgagatggccgggctggtgtggttgcaaat

SEQ ID NO: 522159 - DNA, 83 bp, Homo sapiens
caggccctcgttgcccagatcctgaactctttgcttccggaatccgggattgttgctgacatagaattagaaaacgtccttga

SEQ ID NO: 522160 - DNA, 75 bp, Homo sapiens
agccccagcccgcagccctcggggatgagagatgttcagttcaaccatctcactcgcttcattggcgcctgcata

SEQ ID NO: 522161 - DNA, 111 bp, Homo sapiens
cttggcccttgttcccccaaatgtctgactctgactctcggactgagaaacgcaagcaattctgtggtgttcttggtcacacatttatggagtttctgaagggcagtggag

SEQ ID NO: 522162 - DNA, 83 bp, Homo sapiens
caggcattgatctaagtgtgtgcacacaatggagctgcgggcgtctttggagacacagcgtgctcagagcagtcgactctgcg

SEQ ID NO: 522163 - DNA, 100 bp, Homo sapiens
gcacagccctgatgatggaggggctgctcagtgcttgctatcatgtgtgccccaactataccaatttccagtttggtctggtccgagagcaggaggctgg

SEQ ID NO: 522164 - DNA, 103 bp, Homo sapiens
tcctgcaaacagtcacaggcagtgggatgagcgaagttatagcaaatcaagatcataaggcagcagtttcctcagttaaccaccagaagactcgggacccgag

SEQ ID NO: 522165 - DNA, 75 bp, Homo sapiens
tggagcctcagttggaagcagccgatccagcctgcggagcctgtggggcaggttccggaagatctcaaagagttc

SEQ ID NO: 522166 - DNA, 100 bp, Homo sapiens
ggcgcctaaagtctgagagagggaagtcgcctctgtgctcgtgagtgcatggggtataagatgccagtatggacagaatagcttatgatgcttatcccca

SEQ ID NO: 522167 - DNA, 116 bp, Homo sapiens
cgggaaccatccttggaaatcctgccgcggacttctctgcacagcatccctgtgacagcttgccagcaaagcacggacagagaaggaggagaagctgagccaggcctatgcaatca

SEQ ID NO: 522168 - DNA, 100 bp, Homo sapiens
cctcggcagaagaggacatcattgatggatttgccatgaccagctttgtcacttttgaagcgctggaggtggttgtggaggcagagaatcaggttatacc

SEQ ID NO: 522169 - DNA, 75 bp, Homo sapiens
tgaagtccaaggaggaagagactgctgccaacgcagacccgtcagtgataaactgtctgcataacctgtcccgtc

SEQ ID NO: 522170 - DNA, 71 bp, Homo sapiens
tcgagaccagcctggctaacatggtgatgtgctggtgatggacgagctgggctacctgtacttccgagacc

SEQ ID NO: 522171 - DNA, 100 bp, Homo sapiens
cgtgccccgacgtacagcgggccgggaaaagtggcactgaggctctggaacttctgcccagctctccttgaaaatggacccaagtggggtcaaagtgctg

SEQ ID NO: 522172 - DNA, 75 bp, Homo sapiens
tgacgcttgatgagaaggacccacggcgtctgttcgaagattcccaggactccggctctctctgcttctgtttcc

SEQ ID NO: 522173 - DNA, 75 bp, Homo sapiens
ttatttctttggagacaaaactatgccaatagcagaccccacgttagctgaaatgggaaaaaacttgaaggaggc

SEQ ID NO: 522174 - DNA, 83 bp, Homo sapiens
ccgaattccgggagccggaccgggaccaggaccgggccccactttccagattttttatcaagcagaaatgcatcgaacaacga

SEQ ID NO: 522175 - DNA, 80 bp, Homo sapiens
tgccatgttcttcatcggtttcaccgcgctcgttatcatgtggcagaagcactatggaagcggggagaggtggtgagaga

SEQ ID NO: 522176 - DNA, 83 bp, Homo sapiens
ccaggtccgacccgcgaacccctctgggatccccgccgctctgtctacaacccgaggacagagcgggatgccaccagcttgtc

SEQ ID NO: 522177 - DNA, 97 bp, Homo sapiens
gaacagaagtacaatttccgtttcgaggagccggactcagcatcggtggatgagccacagatgctgacaaatgagaagctgtccatctttgatgcca

SEQ ID NO: 522178 - DNA, 75 bp, Homo sapiens
ggccccaactgggacttcactttggattagaatggctgaacacagaagaacctatttctgtctacaaggatctat

SEQ ID NO: 522179 - DNA, 140 bp, Homo sapiens
ctggaccctgcccagcagaatttgtatagagatgtgatgttggagaactacagaaacctggtctccctaggtggaaccgtcccaaaatgtcccttgctcagaagaaggatcgggtagctcaaaagaaggcaagcttcctc

SEQ ID NO: 522180 - DNA, 74 bp, Homo sapiens
ttgttctcaccgatcttcttgtgtcaccatgctattatgcatagaaagaactgtaagagtaaatgggtccagta

SEQ ID NO: 522181 - DNA, 75 bp, Homo sapiens
tgcacttcaggagaaagttcaggtgtctcaacaagcagcaaagtgtattccagcaatggtgtgtcctgaactgac

SEQ ID NO: 522182 - DNA, 97 bp, Homo sapiens
accagtgaaattggagcagaggaagctgaggaagttggagttgaacacttgttacggaacagcatatgccatatatgagctggctgtggcttcattt

SEQ ID NO: 522183 - DNA, 98 bp, Homo sapiens
gatgatcgtgtgtcggatgaggagaagtactatactggcaattgctggagaagattttgcaattgttgcttctgatactcgattgagtgaagggtttt

SEQ ID NO: 522184 - DNA, 83 bp, Homo sapiens
aaagtgttgagtaaacagaccaagttggatgacttcaaacctgcttctattgacacttcttctgaaggataccttgaggttgg

SEQ ID NO: 522185 - DNA, 82 bp, Homo sapiens
cccagttcctccgccaagcgcggccgccgcccccgcctcagggacccagacatggagctgcgggaagaagcctggtctccgg

SEQ ID NO: 522186 - DNA, 82 bp, Homo sapiens
agctgccctgagacggtgtcccgccgaaaggagccttcacgtaaatgggtccagtcatgcctcccagtaagaagccagaaag

SEQ ID NO: 522187 - DNA, 74 bp, Homo sapiens
tcatgtctgcgagccaggattcccgatgacagtgctgcagcccccaaaaccccctggggcatcaacatcatcaa

SEQ ID NO: 522188 - DNA, 76 bp, Homo sapiens
gcaggcttaccagtgaaagttgtggtggatgtcttaagacaagcttctaagtgtaatgaacaagtctggggtgaat

SEQ ID NO: 522189 - DNA, 96 bp, Homo sapiens
gaggaatttgtggctggctggatctctggccataggaaaaggatacagagtagagtttcatgaacctgaaacttggtggaaatttgatcctgaaga

SEQ ID NO: 522190 - DNA, 100 bp, Homo sapiens
gctgtacgcacacaccatcgcaggatgataatgaagataattcaaatgatgggacccagccatccaaaaggaggcgaatgggctcaggagatagttctag

SEQ ID NO: 522191 - DNA, 87 bp, Homo sapiens
acccaggccaatgccagggccatccacaggctccggaagcagctggtgtggctgctacaggagctgagagaccctaccctcactttc

SEQ ID NO: 522192 - DNA, 100 bp, Homo sapiens
cggcgccgctcccaagatgtcgcagacggccatgtccgaaacctacggacccattccaacaatctcgtaaaacatggtggattactatgaagttctaggc

SEQ ID NO: 522193 - DNA, 75 bp, Homo sapiens
cagaagaagctggaggccggcaaagccaaggtgtgcaactgaggaacatggctcaagaaactaatcacagccaag

SEQ ID NO: 522194 - DNA, 100 bp, Homo sapiens
ggggccagggaaccctggtcaccgtctcctcagccaaaatgaagtttaatccctttgtgacttccgaccgaagcaagaatcgcaaaaggcatttcaatgc

SEQ ID NO: 522195 - DNA, 100 bp, Homo sapiens
tgcgccaccattgcagccaaagttccctgtattgaacactgatatacaaggaatgaatagaagtcaagaaaaacagacctggtgggaaaaagccttgtac

SEQ ID NO: 522196 - DNA, 83 bp, Homo sapiens
ccagggcgtcgcagcgccgcgtgcggcccactcacgggccggaggagctcaagcacttcgaagccaaaatcgagaagcacaac

SEQ ID NO: 522197 - DNA, 82 bp, Homo sapiens
gtacaaatacccctttgaattaattatggctgctttaatccagtgtgaccagttgaggaaggagctggagaggcaggcggag

SEQ ID NO: 522198 - DNA, 76 bp, Homo sapiens
attcaggaacatgtcaagtccttttcttgagatgaggatgacatcaatgatgtgacttctatggcaggggtcaacc

SEQ ID NO: 522199 - DNA, 100 bp, Homo sapiens
aaagatgcccaggagaagctggagctggcagagaaaaaggccaccgatatcatgtttgagaccttcaacaccccagccatgtacgttgctatccaggctg

SEQ ID NO: 522200 - DNA, 101 bp, Homo sapiens
gcagggtttacagacattagcaacggaagccccgggcctcatcccaggtgtcgatacaccctgcaatacacctacccatatgcatattacatggagtccgg

SEQ ID NO: 522201 - DNA, 82 bp, Homo sapiens
aaagcagcgcccgtctgcttcgggcctctggaatttagcgctcgcccagctagccgcagaggatggcattccctgtggatat

SEQ ID NO: 522202 - DNA, 82 bp, Homo sapiens
ggccccatcgagaaatggccgcgtcggcagacctgcctagagctggaacgttacctccagagcgagccctgctatgtttcag

SEQ ID NO: 522203 - DNA, 100 bp, Homo sapiens
tgtggtccttgcgccgctgacttctccactggttcctgggcaccgaaaggctccataaaaatacagactcaccagttcctgctttgatgtgacatgtgac

SEQ ID NO: 522204 - DNA, 83 bp, Homo sapiens
ggaagacggagctggtcggcccgaagatcaatgtccgagttaccaccatggatgcagagctggagtttgcaatccagccaaat

SEQ ID NO: 522205 - DNA, 51 bp, Homo sapiens
cacacccttcaagattgctcgaggccaggtgcagacgccagaagtgagatt

SEQ ID NO: 522206 - DNA, 73 bp, Homo sapiens
tgttggattctaatgcagttcatcacatcattcatgattttcagaactgataaatttcaaacggaagagagtg

SEQ ID NO: 522207 - DNA, 100 bp, Homo sapiens
ggatacctatctaaaagaagaaaactgatggctaagtttgcatgaaaactgcactttattgcaagagttaaagttcctcgtaattttcgcttgttggaag

SEQ ID NO: 522208 - DNA, 75 bp, Homo sapiens
tattctttcccaggaaccattggataaggataaaggcggtctatgcttgcttggtgcttatgctgacagtgatga

SEQ ID NO: 522209 - DNA, 96 bp, Homo sapiens
aaagaattctccttccacaattttaatcaggtttggacatatttgactcttttccccccaggttgaattgaccaaagcaatggtgatggagaagcc

SEQ ID NO: 522210 - DNA, 127 bp, Homo sapiens
tcgggaaatgcatgtgcaaggcaggatatgaagagaaaaatggcacctgtcaagcaacaattgtgttaaatgaactcaactggacaagtgccttagatgaagttttcaaaaagaatcgcgaggaaga

SEQ ID NO: 522211 - DNA, 75 bp, Homo sapiens
ggactttgagccagtccagaccctgctgctgtcttcaaagaaggataaagataaagtttctctaaccaagacccc

SEQ ID NO: 522212 - DNA, 100 bp, Homo sapiens
tctgcatctgtatccagctcctgaacaagacatggaaggaaatgagggcaacttctgaagacttcaacaaggtgtcggtgctgaccggcatcatcaagat

SEQ ID NO: 522213 - DNA, 82 bp, Homo sapiens
cctgcctcccctgcgtcccgccaccggccgcttctgtcctcgggaaatcctcattgacgattcaatttgttgaaggccaatt

SEQ ID NO: 522214 - DNA, 100 bp, Homo sapiens
cacagagacagcagcccagtgcaatgatgaaacaggcgcctatttaatcgacagagaccccacctactttgggcctgtgctgaactacctgagacacggc

SEQ ID NO: 522215 - DNA, 101 bp, Homo sapiens
aagaatgtacaacagacagtgagtgctaaaggcccccctgaaaaacggatgagacttcagatgctgatatgctaactggtgatgagcaagtatggaaggaa

SEQ ID NO: 522216 - DNA, 50 bp, Homo sapiens
ccaccatcgagcagctgtgcagctgagtatgcccatcgtggtttctccga

SEQ ID NO: 522217 - DNA, 98 bp, Homo sapiens
tgagagcgtgggctccatcacacagcccctgcccagcagctacctgatcttcagggccgcctccgagtcagatgaatagctgaaacctttggacttca

SEQ ID NO: 522218 - DNA, 75 bp, Homo sapiens
ggccatggcgtacgcctatctcttcaagtacatcataatcggcgacacagatgccagatatacgaaacccagaag

SEQ ID NO: 522219 - DNA, 75 bp, Homo sapiens
caagaactggattcgtggcgccacaagctcattcactgtgtaggagcaggccgggctctcgccatgggtcactgt

SEQ ID NO: 522220 - DNA, 83 bp, Homo sapiens
aaatgctaagaatgatgacttgtggagcagtctgtcaaattgctgaagctgctgaaagatggcagaagaagtggtggtagtag

SEQ ID NO: 522221 - DNA, 99 bp, Homo sapiens
gcctcctgactagctgggattacagtccatgctccgagggagaggaggttgttacaaacacacattctatggaattgagagccatcgctgcatggaaac

SEQ ID NO: 522222 - DNA, 101 bp, Homo sapiens
ctccccagagacaacaccgggagcctcatctctctcctcaccctgctgtgactccaccacagaaggtcataaatgcagcccctgtgacacaaactggagat

SEQ ID NO: 522223 - DNA, 75 bp, Homo sapiens
cggccgccgtcagcgagggcgccgagcaacttcgagagaactcgatgccaccgcaacggtattggcgaaccggca

SEQ ID NO: 522224 - DNA, 75 bp, Homo sapiens
ccgagtggactaagattcaacaaactatttttgaatgaagatgaaaggcctaaagaatgtatttgacgaagcaat

SEQ ID NO: 522225 - DNA, 100 bp, Homo sapiens
acctctacctgatcccgctgagcgcccaggaccctgttccatccaaactcttgccctttgagggaccaggtaacacaagtggcaagacagccgggaaccc

SEQ ID NO: 522226 - DNA, 97 bp, Homo sapiens
cagatggctcgcgagcaaaaccaccatacctgggaccagggcgccaataacaggacttgacacagcaagcaaaagacatacagaacataacagtcca

SEQ ID NO: 522227 - DNA, 82 bp, Homo sapiens
gcaacactcgcttggttggggagatcggcgcttggccgatggggcattctcttctcccaccctcgggactttaccccagtgt

SEQ ID NO: 522228 - DNA, 74 bp, Homo sapiens
tgagaagctgtcggagcttcccaaggttgactatagtcaatggggccaatggagccaagtgtatggaaacccac

SEQ ID NO: 522229 - DNA, 75 bp, Homo sapiens
aaacgggcagggctctaggaaacatatgttacgatagcccaacttgagttggtggaaccaagtggctggattcat

SEQ ID NO: 522230 - DNA, 75 bp, Homo sapiens
tgcatgtgctgcttgacaaagagaatcaatgtgtctcgagaaaagaccggagtacactgggaagcatcaaagaag

SEQ ID NO: 522231 - DNA, 98 bp, Homo sapiens
caggaccttgaccagccgagggccatcgccttggaccccgctcacgggttatgaagacagtatggagtttccagaccatagtagacatttgctacagt

SEQ ID NO: 522232 - DNA, 50 bp, Homo sapiens
gcagtggcaaatgaaatggcgtaatcgagtgatctcttaatgagggacaa

SEQ ID NO: 522233 - DNA, 100 bp, Homo sapiens
cggcccagctctctctgacacagaacgtgcgcatcgaccccagtagcctgtccttcaacatgtggaaggagatccctatccccttctatctctccgtcta

SEQ ID NO: 522234 - DNA, 74 bp, Homo sapiens
caacctgaacgtcaccgaggagaagtaccaggaggcgttggccaaggaatggagatgtatgcatttcgattctt

SEQ ID NO: 522235 - DNA, 73 bp, Homo sapiens
taaagggaagtcatttctactggacttcatgcttagatacatgtataacaagattttggtgaccaatttggat

SEQ ID NO: 522236 - DNA, 88 bp, Homo sapiens
tgcatagttttcttcgattgttgcaacatcccttgcgagtgaggaaaccatttattacagtagtttcaccaaagtctcctcatctgca

SEQ ID NO: 522237 - DNA, 100 bp, Homo sapiens
ttccatcagtattgagccaggagttgaggtggaaggctttagggccaccatggcgcagcgcctggtgcgcgtgctgcagatctgtgctggccacgtgccc

SEQ ID NO: 522238 - DNA, 96 bp, Homo sapiens
acgttaccttacctcagagattatatgccttacctcgctgaatcatcacagccctaggaggttggatggcaagcatgtggtgtttggcaaagtgaa

SEQ ID NO: 522239 - DNA, 75 bp, Homo sapiens
gcagccgccccgtctgagaagcaggagtgcagatgtgatctcggcacaccgcaacctctgcctcttggattcaag

SEQ ID NO: 522240 - DNA, 100 bp, Homo sapiens
ctcgctcaacctgtttgatacgtataagggcaagtccttagagatccagaaacccgctggtgcagcggaactgctgcctgacgctctgcaacttcagcat

SEQ ID NO: 522241 - DNA, 51 bp, Homo sapiens
gcaccccgccagctctcgggagccagccttcaggctctacacacagatgat

SEQ ID NO: 522242 - DNA, 108 bp, Homo sapiens
cgctccggcgccggcctcgcctcctcgcagcagcgccatggtaagtaaggaggtctctgtaccatggctcgtacaaagcagactgcccgcaaatcgaccggtggtaaa

SEQ ID NO: 522243 - DNA, 74 bp, Homo sapiens
aagaagagttaaatgccctcaagtcgacaggggatgggaccctaggtgaaagaacttgtcctggacaacagtcg

SEQ ID NO: 522244 - DNA, 75 bp, Homo sapiens
caaaatgaagatggcacatggcccaggcagaccttgcagtcaaatgctccctaccctcacctcaagacgaccatg

SEQ ID NO: 522245 - DNA, 90 bp, Homo sapiens
ttttcggaaggcggctaagtcccggcagcgggaacacagagagcgaagccagacgcccagcggcagcaggatgagtgcggaggcaagcgc

SEQ ID NO: 522246 - DNA, 98 bp, Homo sapiens
aaatactggactattcagggcatttgcccagcatgtactacacagactaaacatcacacaagaaggacctaaggttacccatgcagttgttactgtac

SEQ ID NO: 522247 - DNA, 96 bp, Homo sapiens
cggatcgatgtcgccagcatagacatggtctccgaagtgaatatgggatgccagatgatatgaacttcagtgatgtaaagcaaatccatcaaacag

SEQ ID NO: 522248 - DNA, 90 bp, Homo sapiens
ccagcgtttccgaggtgaaggcgccgcgccaggccgggcgggcggcaattaagttggaatatgcaaggttggttaagttggcccaagaag

SEQ ID NO: 522249 - DNA, 50 bp, Homo sapiens
gctggggcggggaccttgccttgcccgggacggagtcttgctctgctgcc

SEQ ID NO: 522250 - DNA, 73 bp, Homo sapiens
tggatttggggatggctataatgggtatggaggaggacctggaggtggcaagaagaagccactgaaacagccc

SEQ ID NO: 522251 - DNA, 90 bp, Homo sapiens
ggtagctgtaaacctggccactggaaaacgaagctgcgccaggaggtggtggtgtgcatgcggagggacacagcgctggagacagccctc

SEQ ID NO: 522252 - DNA, 101 bp, Homo sapiens
gactgcactcgagtgtccagacctgctcgatggttgaaatcacaaagattagacacctttttagataggtgttcttcagcaccactgacaacacggttctg

SEQ ID NO: 522253 - DNA, 49 bp, Homo sapiens
cgctggtggcatccagcccctgcaggaagttggcagtatcatcggaaag

SEQ ID NO: 522254 - DNA, 100 bp, Homo sapiens
caatacgtttccattgtgatcccaccttctgggcaaagaatgtagtcaatttagcaattctgtggtgttcttggtcacacatttatggagtttctgaagg

SEQ ID NO: 522255 - DNA, 75 bp, Homo sapiens
gcgggaatgaaggccagcttccagagggctcagaagtgacaaaagagaattatcaggatggcagtccttataacc

SEQ ID NO: 522256 - DNA, 100 bp, Homo sapiens
caggggggagcagggctcactccagggtgtgggccgaagatatgctcatgtggtgttgaggaaagcagacattgacctcaccaagagggcgggagaactc

SEQ ID NO: 522257 - DNA, 75 bp, Homo sapiens
cggcgcgcgggagcgctacggccccaacgttccaagatgagatgggattctccaacatggaagatgatggcccag

SEQ ID NO: 522258 - DNA, 83 bp, Homo sapiens
acggcttgacagccctgcaccagtgcctacaccaactaatgttacaattgaatcctataacatgaaccctatcgtatattggg

SEQ ID NO: 522259 - DNA, 100 bp, Homo sapiens
ctgcagtaattgtggaaacagcttctgctctcgatgctgctccttcaaggtgcccaagtcctccatgggggccacagatactttcattcagaaaaccaag

SEQ ID NO: 522260 - DNA, 101 bp, Homo sapiens
aggtggaccggcagcagtggatcaccgccctggagctggccaaggccaaggctgtccgcgtgatgaacactcattcagccaaaattgaccaagaggcagag

SEQ ID NO: 522261 - DNA, 82 bp, Homo sapiens
aacgaggcaaggagctaaagcagcgtgcgttcagccctggggaagctgtagagaaatatgaagaagtgctacataatttgga

SEQ ID NO: 522262 - DNA, 75 bp, Homo sapiens
ccgggctcgcgcaggacgcagaagggcagtggagccaggatgaagcctgctgggagcgtgaatgacatggccctg

SEQ ID NO: 522263 - DNA, 75 bp, Homo sapiens
aagaattgaaaaatcccaacatcgttaactttttggacaggatggtgatcgctcacaccaaatccttggacccct

SEQ ID NO: 522264 - DNA, 82 bp, Homo sapiens
ccgtcccgaccctggccgccccgagcggagcctggagattatccctggcgctggagccgggccgtccccatgaactccgcac

SEQ ID NO: 522265 - DNA, 98 bp, Homo sapiens
caggagctgagcctaagccctggcggggctttgggctgtagtttattcaggatgataacatggagaagcttgaggaaattattgaaaaataccctcgt

SEQ ID NO: 522266 - DNA, 96 bp, Homo sapiens
ctgaataaaggcatcggaatgggaaacataggtcccgcagctgtcggaaaaggtaacagaagatggaactcgaaatcccaatgaaaaacctaccca

SEQ ID NO: 522267 - DNA, 93 bp, Homo sapiens
ggcggctctgcgctggccgggggcgcgggcggcggcgccggcaggaagatgtgaagttcatttccaatccgccctccatggtggcagcgggga

SEQ ID NO: 522268 - DNA, 78 bp, Homo sapiens
ccaactaccttttagagtgggatgagttttaacttctagtcatggcgaatgatcgcaggagagcacagactggaccct

SEQ ID NO: 522269 - DNA, 100 bp, Homo sapiens
ctcgtgtccatcaaaatccagatgctggatgacacccaggaggcatttgaagttccaacaaggcgcctctgtcgaagagccttctgctggtccccagtgc

SEQ ID NO: 522270 - DNA, 74 bp, Homo sapiens
ctacgggagaaaaccgggcgcaaggaatatattattcgagtgcaaagaggaatttctgtggaaaacagctggca

SEQ ID NO: 522271 - DNA, 100 bp, Homo sapiens
cgcggcgccgaggagcccatttccgtgagtcaggcatacccagatggaagtagcaaagaaaagagaagagcagcaattgcccaggccttagctggcgaag

SEQ ID NO: 522272 - DNA, 75 bp, Homo sapiens
agcaagcagggaaagagagcgccaggtgcttagcagagaccctcctggatgacttccttctcacgtacactgtct

SEQ ID NO: 522273 - DNA, 98 bp, Homo sapiens
gaatctgggcttatgggatacagctggacaagaagattatgacagattacgccccctatcctatccgcaaacaggagagccaggctcaatagggctcc

SEQ ID NO: 522274 - DNA, 82 bp, Homo sapiens
gtgatcctgcacgcccagcccgggctccagggcgccatgttttggaagtttgacctgcacacaagctcgcacctggacacgc

SEQ ID NO: 522275 - DNA, 101 bp, Homo sapiens
gcgccaagccgcggagcctccagacggaaaaatggctacaaacttcctagcacatgagaagatctggttcgacaagttcaaatatgacgacgcagaaagga

SEQ ID NO: 522276 - DNA, 96 bp, Homo sapiens
ctggataagaaatcaaaaatctggtgaaattgccggcaagagggagttaaggacattccaggcagaggcaaggtgtgtttccattgtagaaaacct

SEQ ID NO: 522277 - DNA, 100 bp, Homo sapiens
tggattgtaggaatagcaaaaagtcagactgtggagtgcactgtcacatatgagtttgcagatggggtgtacctggtgctgctcatggggctcctggagg

SEQ ID NO: 522278 - DNA, 105 bp, Homo sapiens
acgccatgtcgggttattcgagtgaccgagaccgcggccgggaccgagggtctcggcgcggaagatggccggcggcgtggacggccccatcgggatcccgttccc

SEQ ID NO: 522279 - DNA, 95 bp, Homo sapiens
taacaatggaagaaattgggaacattatcacaaagctatcatcctgccaaactccaggctcagatgtcacagggcaagactggagagttaaatca

SEQ ID NO: 522280 - DNA, 100 bp, Homo sapiens
cgggtgaaggtactggtgttgggagactcagatgcggtgacctgccagcacctgccgcagccttcgtccgggagtcgccccatctctccacgcatcgggg

SEQ ID NO: 522281 - DNA, 104 bp, Homo sapiens
caaatttttggatgatgatggatccatttctcctattgaggagtcaacggatcatagacggtatttctatgtaaacgaacagtcgggcgagtctcagtgggagt

SEQ ID NO: 522282 - DNA, 50 bp, Homo sapiens
cttacctttattggagacaaaaccgtgagactgctgctcctcgggccatt

SEQ ID NO: 522283 - DNA, 75 bp, Homo sapiens
gccgtggaagcggccaccgactactgtcagcagctgtgccagtctgttcggcacttgaagtactccttgtttaag

SEQ ID NO: 522284 - DNA, 96 bp, Homo sapiens
tgggcatccacgggggctcctctatgataatggcagataagtgtgctggaattgatgttcgtctgtgtgatgttggtgaggccatccaagaagtta

SEQ ID NO: 522285 - DNA, 87 bp, Homo sapiens
gaatcagaccatgactaccttcacctggaacatcaaccacgcccggctgatgagacggtgccgagacctcaaggccaagggaatttt

SEQ ID NO: 522286 - DNA, 100 bp, Homo sapiens
cttagcgatctatattccctttccagaagatgattccaacgccaccaattccaacctgctcatggggcattcagaatgggaccacaaacgagggccaaga

SEQ ID NO: 522287 - DNA, 113 bp, Homo sapiens
gcgcgactcgcttctttcggttctacctgggagaatccaccgccatccgccaccatgaaatttcggagtgcttcagttggggctgaggagtacatgtatgatcagacatcaag

SEQ ID NO: 522288 - DNA, 83 bp, Homo sapiens
caaacttgctggtcactgggagattggcggcagtaagcacacaatgaatgatcacctgcatgtcggcagccacgctcacggac

SEQ ID NO: 522289 - DNA, 100 bp, Homo sapiens
agtggtcgcttcttctccttggtgattgtgtccaggggggggcgctttctggaagcccccgtctcagggaatcagcagctgtctaatgacgggatgttgg

SEQ ID NO: 522290 - DNA, 75 bp, Homo sapiens
aagagcggcggctggaccacttctctgtcgacggctatgacagttctgacccaacatgagtgaagtttcctgcaa

SEQ ID NO: 522291 - DNA, 145 bp, Homo sapiens
gttcatgactgtggcggcgggtggagcctcatctttcgctgtgtattctctttggaaaaccgatgtgatgtctctaattaacagaagatggcaaagcccagccacagcagctatgtccttcagcagctaaacaaccaaagagaat

SEQ ID NO: 522292 - DNA, 100 bp, Homo sapiens
tttgaaccactggaaagtgaggaattttgaagtacaccgtggtgacattgtatcattggtgctctctatgagaacatgctggtggagctgccctttgcag

SEQ ID NO: 522293 - DNA, 100 bp, Homo sapiens
ttggagctaatcggcgcacagaaattatagaagatttggccttctactctagtacagtagtatctctattgggcggcgactggcggcgcgatggacctga

SEQ ID NO: 522294 - DNA, 75 bp, Homo sapiens
ctcggctatggagtccccatgttggggctttgttatgcacctaaagccatattggaagctccagaagaaagagca

SEQ ID NO: 522295 - DNA, 97 bp, Homo sapiens
ttgacatctgacgacgtgaaggagcagatttacaaactggccaagaagggccttactccttcacagatcgtaatgtgtgtggctggtattggacttg

SEQ ID NO: 522296 - DNA, 96 bp, Homo sapiens
tcggtggtacctgagatggaggagtcgggagcacagctgctgctgagaacggagaccaacctgggctgaagaaagaagattaaatgctgaaacatt

SEQ ID NO: 522297 - DNA, 75 bp, Homo sapiens
gctcctttatagagcctcctgtttcaagacagtggtgaccgaggattttagccacttgcccccagagcagcagcg

SEQ ID NO: 522298 - DNA, 71 bp, Homo sapiens
cagatgcggctgctgtcggaggcttttgtcatcaaaggttttgggctcaaaggccaaagtgagaagtccct

SEQ ID NO: 522299 - DNA, 90 bp, Homo sapiens
tacttcgacgaacactacgagtaccgcatttcttctgaggccctgaagaagtatcaagtgggctttgacattgcggtggtgagagcgacc

SEQ ID NO: 522300 - DNA, 78 bp, Homo sapiens
ttggcaacctcactgagttagaatcagagggtgaaaatcctatttataagagtgccgtaacaactgtggtcaatccga

SEQ ID NO: 522301 - DNA, 133 bp, Homo sapiens
ctccagagtcagctacagttatatttgcaggagatacaaatctaagggatcgagagttcttgaggccaaatctggctcctaaaaaacatcaaaggaagcttgcaccaaactctcttcagggccgcctcagaag

SEQ ID NO: 522302 - DNA, 89 bp, Homo sapiens
gtcatgctaagcagaataaaaaaaattcgtcatgctttttacttggttctctgacagcagacgaagcggatgtgatgctggtacaaccc

SEQ ID NO: 522303 - DNA, 80 bp, Homo sapiens
atggtacatgagtggctatcatactggctattatatggatcgacgagaacgtgctaggagcccagctggacgttgaggcc

SEQ ID NO: 522304 - DNA, 100 bp, Homo sapiens
cccacgatgtttcagacagtccccgacacgtcgtcttacatcaagcctcgaagcggaggatccctgtgtcccagccgggcatggccgacccccaccagct

SEQ ID NO: 522305 - DNA, 82 bp, Homo sapiens
cgctgggcgagccgtgcgatctggacgcggcgctgctgaccgacatcgaagttggaatcgaagcctcttaaaatggcagatg

SEQ ID NO: 522306 - DNA, 83 bp, Homo sapiens
ctgtccagccacctacaggcctccaggaatggctaaaaatgtttcagacctgcctagagctggaacgttacctccagagcgag

SEQ ID NO: 522307 - DNA, 100 bp, Homo sapiens
cattcagatgtggtggaatatgccaaggaaaaactggagagcttcatcaaaaatagtgatagctttgataagtggtgaagcagtattttccaatttgaag

SEQ ID NO: 522308 - DNA, 100 bp, Homo sapiens
ctgcccggcccggcccggccgccccgccgcccccgcggccccggccggaggagacagtcccacaggatcacatgttgaatggtgtaaacagcttatagct

SEQ ID NO: 522309 - DNA, 99 bp, Homo sapiens
gcgggagacgagaagcctgaaaagtcgcagcgagctggagccgccggaggagtcggatggtcagggctgccctttctgtcgttgtgaaataaaaggaac

SEQ ID NO: 522310 - DNA, 83 bp, Homo sapiens
cgatttcatgactaaccagttcattgaagactctccggaattcagatttgaaaccatatattatcttcattgcacccccttca

SEQ ID NO: 522311 - DNA, 83 bp, Homo sapiens
gcagaaagtgaggaggaaaacacccccattgttgaagatgacagcgatgcagagacctatggagaagagaatgatgaacaggg

SEQ ID NO: 522312 - DNA, 82 bp, Homo sapiens
cgtcggggcgccctctccactgcgcgcgataacgaaggaggcccaacttcattcaataaggagcctgacggatttatcccag

SEQ ID NO: 522313 - DNA, 100 bp, Homo sapiens
atcttgtagtcagaaacttgaaagagagaataaccgttgtaacatcagtcacagcatcaatgctggggtgaaaacaacacggctagaagctcattctgaa

SEQ ID NO: 522314 - DNA, 75 bp, Homo sapiens
agtagctgatcaaaccaaggatggagatgctcttagtgatcttgcattacactttctgaataaaatgaagatcat

SEQ ID NO: 522315 - DNA, 83 bp, Homo sapiens
ctacccgctctttgccgtgacaacaccgttcccccagccgggctgccaagtacatcgtgcaagtggatggtaagatagggctg

SEQ ID NO: 522316 - DNA, 83 bp, Homo sapiens
ataagaagtaatctggaatcagaaagcactacgctaaatggctgtatgggcgaaaaagatgaccgaaattcaaactcctgaaa

SEQ ID NO: 522317 - DNA, 90 bp, Homo sapiens
catcattcttctgtacaggatgcagtttctcagctggattctgagctgatggacataactaagggtggagagattcaaccagttagcgtg

SEQ ID NO: 522318 - DNA, 96 bp, Homo sapiens
agcagcccatgtacatggaagatctttattgcagagatcttcaaaccaggacaagaggaccctgccttggtgtgagagtgagggaagaggaagctg

SEQ ID NO: 522319 - DNA, 75 bp, Homo sapiens
accgcagtatcatgctggccaagaagatcatcattaaggacggaggcacgcggaatggccaaagactatgacggg

SEQ ID NO: 522320 - DNA, 75 bp, Homo sapiens
gcagcacttactcttggtccgaaatgactatgaggccagctttcatgttggcgacacagttgaaccctctcgtgg

SEQ ID NO: 522321 - DNA, 83 bp, Homo sapiens
cttctattcactaaaaccatgtgtctgaactgaagaagcttgggctcacttccacaaatggacctaatacctatcattgctgc

SEQ ID NO: 522322 - DNA, 115 bp, Homo sapiens
caagcagtcctaccatgtcagccttcccagtagctgggaccacagggcctctgaaaaatggaaccaaattctctgaggactaaagtcccagctttcttatctgatttggggaagg

SEQ ID NO: 522323 - DNA, 100 bp, Homo sapiens
tccaacagaacgacctagtatttgaatttgctagtaacgtcatggaggatgaacgacagtttggaatctgtgagtgcaacgtgtaaacagctgagccaag

SEQ ID NO: 522324 - DNA, 98 bp, Homo sapiens
acaacctgatgcagcagaagctggtggaccagaacatcttctccttctacctgagcaggtgcttttctcaaactttcctgatcctgcgggcaagctaa

SEQ ID NO: 522325 - DNA, 90 bp, Homo sapiens
gcgggccagcaacaaagtgcaagggtggagagattcaaccagttagcgtgaaagttggagataaagttcttctcccagaatatggaggca

SEQ ID NO: 522326 - DNA, 75 bp, Homo sapiens
gaccactgggatgcagtcaacctgctctgtgtccagaatagtccccaggaggcacggaacatgttacttcagaac

SEQ ID NO: 522327 - DNA, 73 bp, Homo sapiens
tgatgttggagaactacagaaacctcgtctccctgggtgcccagtcccctggaaggcagtgaaggggacggag

SEQ ID NO: 522328 - DNA, 83 bp, Homo sapiens
ggggattgacagccacgggaaggatgccggctccaggagcagcagtggaggtcgggaacgcctcattgtggagcccccgctcc

SEQ ID NO: 522329 - DNA, 98 bp, Homo sapiens
agacatcttccctgtgggctggtgttccttgactggagacaacctgcagcctcctggcaccaaagattctctttgtggccagatgggtttgtatggac

SEQ ID NO: 522330 - DNA, 75 bp, Homo sapiens
atatcctccctcagaccgccccgcaagtactcaggatcggttgatgataattagaagcatgctttccactgaact

SEQ ID NO: 522331 - DNA, 98 bp, Homo sapiens
cgaacccccaatgctgaccaaggaggagcctgttccagaactgctggaagctgagggtccctggaacactgcagtcctgagctctgggatggagcccg

SEQ ID NO: 522332 - DNA, 82 bp, Homo sapiens
cggcgcagacgcgggcgagctgcggctcggacgccagcggacacgcgggcgagacatctgaatgggactccgagtgccttac

SEQ ID NO: 522333 - DNA, 82 bp, Homo sapiens
gaaaaatcctggatctgtatgctttgagcaaggaaccctaaggactctgcaatatgaataattccctagagaacaccatctc

SEQ ID NO: 522334 - DNA, 50 bp, Homo sapiens
tatccacaatttagaggagtatctaagaggatacttgactttcagagatg

SEQ ID NO: 522335 - DNA, 51 bp, Homo sapiens
actggaaaacatcatccaggagggtgaggacgcttgagcggaagttagaag

SEQ ID NO: 522336 - DNA, 98 bp, Homo sapiens
gaaaatgactgcagcatagcacgactgaacaagcgcagcggtttgctgcggtaatcatgaggataagagagccacgaaccacggcactgattttcagt

SEQ ID NO: 522337 - DNA, 82 bp, Homo sapiens
tctgaggtccgcggcagggtcccgcatggcggcgcacaggaagcacgggagttgaccacatttggccatttcccagaagggc

SEQ ID NO: 522338 - DNA, 96 bp, Homo sapiens
gaaaatcatctgcccggcctgtgggatgcaagtgggagaacaccttccaccatgaccacctcagcaagttcccacttaaataaaggcatcaagcag

SEQ ID NO: 522339 - DNA, 101 bp, Homo sapiens
ccactccggaaatgtcactcccaccgccccaccgtacttgcaagaaagcagccccagagagtggttaagaaagtagctcaatacatggctgatgtattgga

SEQ ID NO: 522340 - DNA, 100 bp, Homo sapiens
ggatgatgaagaagacctgctggatggctcactcagtaacttgatggattttgtgaagaaaacaggcatttgcgcttcaaagtgggaatgggggaccact

SEQ ID NO: 522341 - DNA, 83 bp, Homo sapiens
ctgtaaattatgtgaaacctccaaatgtgggtgaatgaaaactttgccattgatttgatagcagagcagcccgtgagcgaggt

SEQ ID NO: 522342 - DNA, 100 bp, Homo sapiens
gtttgagaaaaggcctaagaattttggcattgttgacgccagagggaggcatcaaaaaaagattcggagcaaaactcagaattacctcaacgtgtatgcg

SEQ ID NO: 522343 - DNA, 98 bp, Homo sapiens
gaacatggactgaagtatccagcgctcattgggaatttagttaagggtggatgtgaacactgaccggaagatcagtgccaaggagatgcagcgctgga

SEQ ID NO: 522344 - DNA, 100 bp, Homo sapiens
tggagaccctcacggagctgggcgacgagctgaccctgggagacatcgacgaagcggaaggtcctggtgacggtcctggaactcttcctgccattgctgt

SEQ ID NO: 522345 - DNA, 75 bp, Homo sapiens
gatcctgcgttaatctatgactatgccattgtgctattcaaggtaatagaggacacatctcttaactgggttgct

SEQ ID NO: 522346 - DNA, 100 bp, Homo sapiens
ctcattggaggatcagctcacctgctttgctctcgatgtagcctgtgctcaaccatgtctattagagaaactgaatgaggaggcaaagcatgacaagtgc

SEQ ID NO: 522347 - DNA, 100 bp, Homo sapiens
gagcaggagcgattccgtcgccaaacagaggatggcattccctgtggatatgctggaaaattgcagccatgaggaattggaaaattctgctgaagattac

SEQ ID NO: 522348 - DNA, 50 bp, Homo sapiens
ttttttaatgtggttggaacaactgagatagaatgagtccatttaagtcc

SEQ ID NO: 522349 - DNA, 50 bp, Homo sapiens
tgtgacactgctagtgcagttgaagtttgccacctccagctgtgaaatgg

SEQ ID NO: 522350 - DNA, 90 bp, Homo sapiens
ccaatcagatcagtcttggctccctcagaagcatcgtgaaaagcctccttctggttccaaatgccccttcatgaataagttttttccagc

SEQ ID NO: 522351 - DNA, 100 bp, Homo sapiens
ggaaaaaatcccaaggtctgcaaagcactctgaataaccctgctgatcaaatggatgtgattggagtaggcggcattgactttgaagataacatcgcccg

SEQ ID NO: 522352 - DNA, 75 bp, Homo sapiens
cttttcttcaatgataagagctgtcagttttctgtggatgaagagagacaagagagacacctccaacttcgacaa

SEQ ID NO: 522353 - DNA, 83 bp, Homo sapiens
ggcagggcaagcacgggaagaagcagctggacccgctcaccatctacggcatccggtctactctgacctacgacactctccgg

SEQ ID NO: 522354 - DNA, 75 bp, Homo sapiens
cgacaagacgatccgggtaaagttccagggaggccgcgaaggtgctggagaatctggtaaaagcaccattgtgaa

SEQ ID NO: 522355 - DNA, 75 bp, Homo sapiens
cgaaaacggaagcgcagggagaaggaagaggtgtttgaaaagggttacattccgaaaagcaaatgggagatggac

SEQ ID NO: 522356 - DNA, 100 bp, Homo sapiens
atccttttttggcaagttgttacgggaatttagacttgtagcagctgaccgaagggtgctaactgccaaagaaaggaaaactcaaattgatgatagaaac

SEQ ID NO: 522357 - DNA, 128 bp, Homo sapiens
ttactggcagtggaacgacctgtggaaacctgtgatccattctcattaaataaatctctggatccaggatgagaagactgataaaagaagaagctagctgaacagctgtaaaatgcccaaatctgggt

SEQ ID NO: 522358 - DNA, 99 bp, Homo sapiens
cagcatgatgttctgaagcttgaggagcttgaagaaatccgcaaatgtgggatgaaaaacttccgtaacatccaggttgatgaagctaatttattgact

SEQ ID NO: 522359 - DNA, 51 bp, Homo sapiens
cctgaggcttggataagtggggtaaagtcagtgataaatcttttgtttgct

SEQ ID NO: 522360 - DNA, 98 bp, Homo sapiens
ccagctctgcccctatgccagccgcaactccagccagctcaccgtccacctgcgatctcacacggttgcggtatttaccagtggtggcctggatgtag

SEQ ID NO: 522361 - DNA, 75 bp, Homo sapiens
gcagcgacttcctcaaaggctactgccccctgggtgcaaaggtgagaagccctaccactgcaactgggacggctg

SEQ ID NO: 522362 - DNA, 100 bp, Homo sapiens
aatgaagacaggagcagaaatatattttgtggtgccaccaagagagttcagcaaatccactaacatccagtcatggataaaaatgagctggttcagaagg

SEQ ID NO: 522363 - DNA, 100 bp, Homo sapiens
agtgggagcactggaagtacgggcagttgcagtgttggagctaaaattcacctggcattccacctagtgctaatgcacatcagctttttcgggggtttag

SEQ ID NO: 522364 - DNA, 75 bp, Homo sapiens
actgggatttcaacctgaaagtggaggctgcgaaaataggcttgttagcagtggcacaagatcttacagaggatg

SEQ ID NO: 522365 - DNA, 75 bp, Homo sapiens
gagtggctgttgggctgaaagctcccaagagtacgttactcttcaagggagacatagatgattgtgacacactgg

SEQ ID NO: 522366 - DNA, 100 bp, Homo sapiens
cctatgaacctgactctgtggtcatgagctcaaatgatacttttcccacagcaatgcacattgctgctgcaatagaagttcatgaagtactgttaccagg

SEQ ID NO: 522367 - DNA, 104 bp, Homo sapiens
cttacagatggacctgtacgcgctgctaggcattgaggagaaggcagcggacaaagagaaatacggggttgtagaaggcaaagcgctaagtgagctgagggcca

SEQ ID NO: 522368 - DNA, 101 bp, Homo sapiens
ccagtgtaaggtttgctgcgccttgcttatttctgagtcccagaagctggcacattaccaggagcatccccccggtccttcagaatccaaacacgctttcc

SEQ ID NO: 522369 - DNA, 100 bp, Homo sapiens
tgatttgaaatcattatcagtggtcacagaagtctctaccaatggtgcttcagaagtttcatactttcagcccaagccttgtcagtactgtaacataatt

SEQ ID NO: 522370 - DNA, 89 bp, Homo sapiens
ggaacttggttccccctccctcagcttccgccccaaaaggtagtgggcagcagtcagtgacaggtgtaacctctgtggatgacagcaac

SEQ ID NO: 522371 - DNA, 150 bp, Homo sapiens
ggagccggagacgagaccagaggccgaactcgggttctgacaagatggccgggctgccccgcaggatcatcaaggttccctggttgtgaaaatacatgagataaatcatgaaggccactatcatcctccttctgcttgcacaagtttcct

SEQ ID NO: 522372 - DNA, 98 bp, Homo sapiens
gtcccttggcggcgcgagcaggaagtctgcgggccaggcatcgacatccgcaacgactatcagcagctgaagcgcctggagaactgcacggtgatcga

SEQ ID NO: 522373 - DNA, 73 bp, Homo sapiens
tgatggagaggtgcccacagctgtggccccggctcaggaaaatgtttataggaggccttagctgggacactac

SEQ ID NO: 522374 - DNA, 100 bp, Homo sapiens
cgacatccgagtgcagaacctgcaagggtctaggtgctggagtgcgcacggaggccgatgtagaggaggaggccctgaggaggaagctggaggagctgac

SEQ ID NO: 522375 - DNA, 75 bp, Homo sapiens
gaaggaaaagacagtgtagtcctgcaaaacattttgaggatgctgacaaaagtatcatcaggactttgaaggaac

SEQ ID NO: 522376 - DNA, 75 bp, Homo sapiens
aacactggagtcatcaatgccccccagaagcccatcatcttcgtttcggacagagcaaacagcaacaaggagctg

SEQ ID NO: 522377 - DNA, 100 bp, Homo sapiens
gctgtgctcgctggcaccccgaacgggttgcttcccccgctgcgagcgccgtgccgtccctgcagtgacaccgaggtgctcctagccgtctgcaccagcg

SEQ ID NO: 522378 - DNA, 90 bp, Homo sapiens
ttacaagttaattgaagagtcttgtccacagctggcaaattcagtgcagatcaggagagctattgaaattgtagagtcagatgtcaaaag

SEQ ID NO: 522379 - DNA, 50 bp, Homo sapiens
cacggaccgggggacttgcgcctgctgcgtgcccagatgcgcgacctggc

SEQ ID NO: 522380 - DNA, 75 bp, Homo sapiens
tgcctggaaaggaattgttttggcctaggatcatccagattatcaacgcctgatgactgtggcagaaggcatcac

SEQ ID NO: 522381 - DNA, 100 bp, Homo sapiens
gatgagaccaaaatcattctggtgtggtggacacaggcctattcatcaacatggctgagagagtctactttgggatgcaggatggctcagtgaacatgag

SEQ ID NO: 522382 - DNA, 116 bp, Homo sapiens
ctctctctgtcctcattgcgcccagacgggccggcccagagctcccgggtcgtctttcgtgtggccgcgagggcggcagcagcagctggatgcagagcgcctggacagctatgtga

SEQ ID NO: 522383 - DNA, 100 bp, Homo sapiens
gagttgtcggcgccgcggccgctgcggacggacgctcgcctgccggctgagtatgccgagattttgctgtcctggaggaccacaccctggctcacagcct

SEQ ID NO: 522384 - DNA, 121 bp, Homo sapiens
tcgcgaagtcgggaccatcgtcgtgaggatcgtgtgcattacaggagtcctccacttgccactgggttggatggcaagcatgtggtgtttggcaaagtgaaagaaggcatgaatattgtgg

SEQ ID NO: 522385 - DNA, 95 bp, Homo sapiens
gcttgtggtgcggcctcaccatacaggaacagggcagacgttagcgtgagtgatcactctcaatcccggttctttgaagagctggcagtagaaga

SEQ ID NO: 522386 - DNA, 74 bp, Homo sapiens
aacaccacaataatccacagccaagatctgaagaagacacttgaatcatgggtgacgttaaaaattttctgtat

SEQ ID NO: 522387 - DNA, 100 bp, Homo sapiens
gaaaaacagtagcagtttcctggtcctgttcctcatcaacaccaaggatctgcaagcatgacttcggtgctggaacctgtgttggacctcacgtacccag

SEQ ID NO: 522388 - DNA, 90 bp, Homo sapiens
caccgtcagcactcagcgcgggccgggtccacatatagcctcagttacattagctgcttatgaatgcaattcagttaattttcccgaacc

SEQ ID NO: 522389 - DNA, 100 bp, Homo sapiens
ccgtccgccttctctgtcagctctttccccgtcagcatcccagccgtgctcacggcaggtgacagcagggacatgtctcgggagatgcaggatgtagacc

SEQ ID NO: 522390 - DNA, 75 bp, Homo sapiens
atcttactgaaggcagtgaagcgaagaaaaggatcccagaaagtttcagatcgtgaaccttatagaagaaactgg

SEQ ID NO: 522391 - DNA, 87 bp, Homo sapiens
atgaggacgaagacgaccctgacaagcgcatctcgagtagtgcttgttcgcggatctggcagagcccacgtttcatagccaggaaac

SEQ ID NO: 522392 - DNA, 115 bp, Homo sapiens
aaacccattccattggagaacccaaaggaaaagcgaccaggtatctcgggggagctttgtgccttgatggatcaagttcatcatatgcagcactcaaaatggcagcatccttcgg

SEQ ID NO: 522393 - DNA, 100 bp, Homo sapiens
agtgagaaccgagtcagtgctcttacccaggaccctggctctcaagctcccacatcctggattagtgagtctcaggtttcccagacaactgaagttctga

SEQ ID NO: 522394 - DNA, 82 bp, Homo sapiens
ctgggtacaagcattcctcgtcagcaacatgctcctagcagaagcctatggatctggaggtcagcccaaggccaaccccact

SEQ ID NO: 522395 - DNA, 76 bp, Homo sapiens
ctggattctaaggcaacacttccttgaagaaacaagcttacaggttaacgtccctaaaacccgccggactttctgt

SEQ ID NO: 522396 - DNA, 82 bp, Homo sapiens
cgcgctgttggtcttgctgctagttgcgcttagcgccctctttctaggccgatctatgaggctcagccggagatttcccggg

SEQ ID NO: 522397 - DNA, 98 bp, Homo sapiens
ccaaggtccaccgagcccgcaaaaccatgtccaaaccaggaaatggacaggatggcacatttcctagaggcagaatcctacaacttccactccaagtg

SEQ ID NO: 522398 - DNA, 75 bp, Homo sapiens
tctttttcatgaggatgggtccaagggcctgtaatcccgtccaacaggtattggcatactccacacatctgtacc

SEQ ID NO: 522399 - DNA, 74 bp, Homo sapiens
aggtgacacatattctgtctgtccacgatagtgccaggcctatgttggagaaggacagaataacgggctcccag

SEQ ID NO: 522400 - DNA, 74 bp, Homo sapiens
acggagaactcaaggtcttcatagaccagaaccttagtcccgggaaagtaatctatgccagcaattatgacaat

SEQ ID NO: 522401 - DNA, 82 bp, Homo sapiens
ggaaatgcatctttatgtcagaaacacaaagcagcccaaccaaagggggagcggccgttccattgcacgctttgtgagaaag

SEQ ID NO: 522402 - DNA, 104 bp, Homo sapiens
cgaacattcaggagaatttgaaaagattatgcaactttcagaaaggcctaaagaatgtatttgacgaagcaatattggctgccctggagcctccagaaccgaag

SEQ ID NO: 522403 - DNA, 82 bp, Homo sapiens
gttgtctgtctttaaggacagactgtatgaactggacatctcgttccctcccaggtcaaaatgcagatcttcgtgaaaaccc

SEQ ID NO: 522404 - DNA, 101 bp, Homo sapiens
ggaagctgatgctgctggacgccactttccggggtgcacagcaagtgctagaacgagtaaatctgtctgcagcccagacactgagagccgctttcatcaag

SEQ ID NO: 522405 - DNA, 97 bp, Homo sapiens
tggggactgcgggcggcgctgtgtccgtcgccatgacagcttgtagattttcagtggaaactgggtatggctgtgagctcagacacttgcagatctc

SEQ ID NO: 522406 - DNA, 137 bp, Homo sapiens
ggccggaggccactgtcttctcttcctcctccaccgagtcgtgctctcgccccaacccgcgcgccaggtgctggagaatctggtaaaagcaccattgtgaagcagatgaggatcctgcatgttaatgggtttaatgg

SEQ ID NO: 522407 - DNA, 73 bp, Homo sapiens
ttggttccccctccctcagcttccgccccaaaaggtctcctctgagcctccggcctccataagacccaaaaca

SEQ ID NO: 522408 - DNA, 76 bp, Homo sapiens
cattagacttggagacacagcacacaccttttctctaagaagtaatggagaaccaggtgcatcagcgcattgcgga

SEQ ID NO: 522409 - DNA, 75 bp, Homo sapiens
cgcgcggcgcttcgggagccagcgggtgctggtggagccggacgcgggcgcagattaatgttcttcataaaccac

SEQ ID NO: 522410 - DNA, 100 bp, Homo sapiens
cgtaacccctgcacagagcagattctgaaacttcttgacaatttgcttgcgcttataaggcaagataacccctgtgacagaaggctactgttgctgtaac

SEQ ID NO: 522411 - DNA, 97 bp, Homo sapiens
ctagcaagttcaccagcatccctgcagccttctggtataccatcgtcaccatgacaacactaggccagcagccagcttcgggtgtagcctattctca

SEQ ID NO: 522412 - DNA, 100 bp, Homo sapiens
cggagaaggtgaccacctgtggtactgacgtaatcgcgctcaccaagcaggtgctgaaaggctcccggagctccgagcatcaagcattgcacagttctct

SEQ ID NO: 522413 - DNA, 74 bp, Homo sapiens
gctgatcccgagcagcgtcatgtaccccttatcgtcgtcctccccgcagtcaggctgcccatcacccaccattc

SEQ ID NO: 522414 - DNA, 75 bp, Homo sapiens
gccagcctgcagcacgagatcacccggctgaccaacgaaaacttgcaaaaatattttgattctggggattacaac

SEQ ID NO: 522415 - DNA, 96 bp, Homo sapiens
ctcttctgaacatgcacccccagcagccaccagcaggtgtctttcctgaagactatcttcccgtctcaaaatggacatgatggatccacggatgta

SEQ ID NO: 522416 - DNA, 75 bp, Homo sapiens
gtcatcttcctgtcagtctgcagctactcagagtgcagcagctgccccgagccccgtgcttggcaacattccccc

SEQ ID NO: 522417 - DNA, 74 bp, Homo sapiens
gaggaaggatgggaaacatctcacacttcatgagtctcgttcagcaggtgctggtgcaaaatcatcagatgaag

SEQ ID NO: 522418 - DNA, 100 bp, Homo sapiens
taatgcatgaaagcacatgtttcagtgccactcacataagaagtgcccgcaggacagaaggagcaagctgtggaatggtataagaaaggtattgaagaac

SEQ ID NO: 522419 - DNA, 75 bp, Homo sapiens
ctcagaactgagaagctgtcaccacaggtgcaagctggcccaggccaatggttggggcgtcatggtgtctcatcg

SEQ ID NO: 522420 - DNA, 90 bp, Homo sapiens
tggtgttacgtgccaccaaagtgacaaagggggcctttggtgacatgcttgttgacctcctgtactggagagacattaagaagactggag

SEQ ID NO: 522421 - DNA, 100 bp, Homo sapiens
agcagctggtggggctctactgcgacaaggatttttagactctgaggagcagttggagctaatccacattatggaaatggaaaccaccgaacctgagcca

SEQ ID NO: 522422 - DNA, 82 bp, Homo sapiens
ttttaatctgaccactggaccagcccattgggagttacttcagcgaagccggttgtagatgagcatgagagtgtggagcaga

SEQ ID NO: 522423 - DNA, 90 bp, Homo sapiens
tgaaatcctgctttcttttcctcagaactactatattcagtggctaaatggctccctgattcatgatattgatgatgttaagaagttcaa

SEQ ID NO: 522424 - DNA, 100 bp, Homo sapiens
cagaaacccttcaccatgttttaaagagatctcccttgagtttagaaatctggctgagaaataccaaacagtgattgccgacatttgccggagaatgggc

SEQ ID NO: 522425 - DNA, 100 bp, Homo sapiens
aaaaattacagcacatctcagtgaatttgcaagtgatggctctgagagattcctctgcgaatctgtttttagctatcaagtggcatccacgcttaaacag

SEQ ID NO: 522426 - DNA, 78 bp, Homo sapiens
gtctggctgttgggaaggaaaaagaggcattgaaacttcagcaggatgtaaggaaaaggaaacaagaaattttagaaa

SEQ ID NO: 522427 - DNA, 98 bp, Homo sapiens
acaatgctggcaactgggctctaatctcctaaagatagacagctcaaatgaattgctagacttcgggctccttgaggatattcagttttgtatgtttg

SEQ ID NO: 522428 - DNA, 134 bp, Homo sapiens
agcatcctgccccatatccagaatgaaatccatgctcagagatgccaagaagaatctagacagacaggcctttctaggggctatctgatgggttagagtgcctttgagaagaaatcagtggatactggatttgc

SEQ ID NO: 522429 - DNA, 100 bp, Homo sapiens
gcgcacattaccattaaccagtacctgcagcagtttcaccagtgatcattaaagaatgggcagcttacaaaggaaagtctcctcaaaccccggaactggt

SEQ ID NO: 522430 - DNA, 100 bp, Homo sapiens
gactacagtccctacttcaagaccatcgaggatctgaggaacaagagctctgagctcttcaccctgacctatggtgccctggtcacccagctatgtaagg

SEQ ID NO: 522431 - DNA, 50 bp, Homo sapiens
gtgatgcctgctagccaaaaggtgaagtaagaactctgctagagaggaaa

SEQ ID NO: 522432 - DNA, 75 bp, Homo sapiens
cgggacaagattcgcttctatgaggctcatcaaggtgctgtacaagaccagccataccagctgccagtggaaatc

SEQ ID NO: 522433 - DNA, 90 bp, Homo sapiens
cggcggtcgacatgttccaggtcccggatagcgagggcggccgcgccggctccagactgtccaggacggccggcagtttctaaagtatgt

SEQ ID NO: 522434 - DNA, 106 bp, Homo sapiens
ccgagccgagggtcccgagccaagccggtcgtgagtgacgatgacagtgaggaggaacaagaggaggtgatccgcaggggctggctgaccatcaacaacatcagcc

SEQ ID NO: 522435 - DNA, 100 bp, Homo sapiens
cagctgcctgctaacatagctgtttgcagttctaaggtgccaggaccattgacaccagaaatggaggcacggcaggctacacggaaaagggagcagaagg

SEQ ID NO: 522436 - DNA, 74 bp, Homo sapiens
caacatcatcattgccttcttctacccttacatggagggcgcgtccacaggcctcaggcccaggcccaaggcca

SEQ ID NO: 522437 - DNA, 101 bp, Homo sapiens
gacactttcaatagatgccagagaattggaggatcccgagtctgccatgctagatacgctggatagaacagtggttggaataaaaacagggttgaatgagt

SEQ ID NO: 522438 - DNA, 101 bp, Homo sapiens
gggccaacagcggcctctagtgtctggaggaggaagtgtcagcgctactgccgcaggtgttcagtgtgaggtggagctgatagagtccatagaggacctga

SEQ ID NO: 522439 - DNA, 97 bp, Homo sapiens
ctcgcgccggctatggccgtgccctggggctgagccctcaggttgagaacttgttgcttagtaaccaagggaccattaagctgtgtgactttggcag

SEQ ID NO: 522440 - DNA, 90 bp, Homo sapiens
ggaacatggaggaggaagaaatgaatgatggctcacagatggtgagatctcagatttcctgtgcttcatcagctagagagatgaaatcca

SEQ ID NO: 522441 - DNA, 83 bp, Homo sapiens
tcgcagtggtcgcttcttctccttggcctaccccttgctcaggttcaagaagacagtgaagaggctcattccgcatcttcttt

SEQ ID NO: 522442 - DNA, 100 bp, Homo sapiens
accaaattaagtcattttcgagaatgtgcctatggtcctgagcactgggtcacgtctagtgtcagctgtgggggccgtcaccagtctcctattgacattt

SEQ ID NO: 522443 - DNA, 82 bp, Homo sapiens
ctgacctggtcctcatgctgccgaggctgttgctgttgatctgtgggtggtggccttgtccatgtcacctgtggatgacact

SEQ ID NO: 522444 - DNA, 90 bp, Homo sapiens
ggcggatggccccaggtgtaagcgcagaaagcaggcgaacccgcggcgcaataacgtaacagatcaactcctagcaatcatgatcggata

SEQ ID NO: 522445 - DNA, 100 bp, Homo sapiens
ccaagaaaggagactaccagaaggcttatgaggatggctgcaagactgtcgacctaaagcctgactggggcaagggagaccagtgtaaatttgatcatga

SEQ ID NO: 522446 - DNA, 98 bp, Homo sapiens
ataaatcccggttttggctgcttaaactgctgggttatgatcatagctactacttcattgcaacctttattactgaccacatcagacatcatgctaaa

SEQ ID NO: 522447 - DNA, 75 bp, Homo sapiens
ttggatctggcgcttttggcacagtctacaaggtgagaagcgccactgctttgatgtcaactataattcaagtta

SEQ ID NO: 522448 - DNA, 99 bp, Homo sapiens
gccgtccccagaacgcagatcagaggtagtcggacctttcccgctggcgcgcagcctcagctagggatccatatggctttggagacagtcgagattcaa

SEQ ID NO: 522449 - DNA, 88 bp, Homo sapiens
agtggatgtcctacatctcctatgtcagatggggtttcaccatgttgcccaggctggtcttgaacacctggactcaagccatccaccc

SEQ ID NO: 522450 - DNA, 73 bp, Homo sapiens
ccttcgaaggaagcctgtggagaccctgtgtcaaggagagtggaaagcctcatttgaagagctccacgatgtg

SEQ ID NO: 522451 - DNA, 73 bp, Homo sapiens
atgccccagccagtccccacagcataacaggtgtccccctttggctgtgtgcttggcccagcagctgcctgag

SEQ ID NO: 522452 - DNA, 100 bp, Homo sapiens
acgcaggagggccagggggccggcagcaaggtgcacgaattccagacgctgtgtcagccatgtcatctgagcctcccccaccaccacagccccccaccca

SEQ ID NO: 522453 - DNA, 100 bp, Homo sapiens
cccgcctgaaaccactgccatttggacagcatgccaggccacccaggagcagctgagcaacttgtcaagaccggataccagtttcattccaggacctgac

SEQ ID NO: 522454 - DNA, 89 bp, Homo sapiens
cttcggagagagaaatgctggggtctataagaaggagaaagctcgagtcatcactgaggaagagaagaatttcaaagccttcgctagtc

SEQ ID NO: 522455 - DNA, 100 bp, Homo sapiens
catcgttcgggggagactgaagataccttcatcgctgacctggttgtggggctgtgcactgggcagaccaacgacctgacctccgtccacctgggcgtga

SEQ ID NO: 522456 - DNA, 96 bp, Homo sapiens
agcggatcgggtggagtgaaggtcacgtcgccatgatcatcaatgctgtggtactgttgattttattgagtgccctggctgatccggatcagtata

SEQ ID NO: 522457 - DNA, 124 bp, Homo sapiens
cggcactgttagaatctgggactttcttcgttgccatgaggaaagaattctccgaggtgtgaccatgaagctcatggatgaggtcgccgggatcgtggctgcacgccactgcaagaccaacatc

SEQ ID NO: 522458 - DNA, 101 bp, Homo sapiens
ctcgcaagaaagccaagaacaagcagctgggccatgaggaagccgcttacaaacacgcagatggcaagaagattgatggcaggagggtccttgtggacgtg

SEQ ID NO: 522459 - DNA, 102 bp, Homo sapiens
taagccagaccggtcctcgtttgtaccgtccctcttcaggttgttcctggtcattgagtacgtcaacggcggggacctgatgttccacatgcagaggcagag

SEQ ID NO: 522460 - DNA, 100 bp, Homo sapiens
cgaagtccccggagaactctaccctggaggagattctggggcagtatcaacggagtctccgggacaaagtagactggtgtaaccctgggatgggaaatcc

SEQ ID NO: 522461 - DNA, 100 bp, Homo sapiens
gccagcacctttcggcttctgagacggcggcagcagcggcattcagggaagatttaaaaccatgggaaaagtcaccaatacttaaaatatctgctccaca

SEQ ID NO: 522462 - DNA, 75 bp, Homo sapiens
ccggcaggctgagaaaagcgagaccgcgtgcgaggaccgagagcgcctgctcgctgtgcccccgggttatgacga

SEQ ID NO: 522463 - DNA, 90 bp, Homo sapiens
ggcgacctgggggagccgcccccgacacggcccacgcgctgcaaactcctgcccctccagcccccggggagcggggtcttcagggtacaa

SEQ ID NO: 522464 - DNA, 88 bp, Homo sapiens
caaacaccacttcttacacagcctggccctgttaggggtgccccattgcagaaagccactctggctctggattaatcgaattacagct

SEQ ID NO: 522465 - DNA, 95 bp, Homo sapiens
ctggtcttacattgctgcatcaagaaacccaagctgctgaggctctgggcgtggggaggctgagacacgggagtgcatctactacaacgccaact

SEQ ID NO: 522466 - DNA, 88 bp, Homo sapiens
ggtgatggagattttgatgtggatgatgccaaagttttattagatgacatgaaaatggagactgatattaagagaaacaaaaagactc

SEQ ID NO: 522467 - DNA, 51 bp, Homo sapiens
caacagttcaccaccattaccgtgccctgcaggagtcattaaatcaaaact

SEQ ID NO: 522468 - DNA, 74 bp, Homo sapiens
gcaccttcgcctggcccaccactcccagagggggtccactggacggggcctgagctacaacttcacccacctgg

SEQ ID NO: 522469 - DNA, 100 bp, Homo sapiens
caccccacggccgccaccaagatgagcagggcccttgcggagttccgcgtccgaggtgtgaaggcaaggtgcccggcgacgactgcccgctggtgtgggg

SEQ ID NO: 522470 - DNA, 138 bp, Homo sapiens
gtttttccgaagcctgcatttttttgtggagtggtttgaatatcgtaagcgcacgtttaaacatctcaaggatgaagtaggtgttccaggtagcaattcagctgacctattgcgctggaccactgctaccaccatgaa

SEQ ID NO: 522471 - DNA, 100 bp, Homo sapiens
gcggggaccggcggcgctggaggagcgaggcagctgtactaggactgggaacgggtaagaatgattgatgttggctgatattggagtgctcattcacatg

SEQ ID NO: 522472 - DNA, 75 bp, Homo sapiens
cgaagatgtgtggttccccaggccattgaggtgttttgtccagtctgagtcctgtgaattcttccaaccatggac

SEQ ID NO: 522473 - DNA, 100 bp, Homo sapiens
ccggcacaaggcactgggctacgtgctggacagaggctccaccggttagagagatgaccctccgtgacctcccgagcccaggactggagttgtctggaga

SEQ ID NO: 522474 - DNA, 101 bp, Homo sapiens
ggccagctgacggagatggtgcagaagatggaggagtatggtttgaagtggtgaacatggatttttctcggcttcacatgtacagtcctccccagtgtgtg

SEQ ID NO: 522475 - DNA, 50 bp, Homo sapiens
caagtaatggtgcaaagcctgaaaacctcaagaaggcatgaagccagccc

SEQ ID NO: 522476 - DNA, 100 bp, Homo sapiens
attgaagcctgctattgcaacatgggattttcaggaaatggtgtcacaatttgtgaaggcacagagtaccaagacattgagactgagaaaacctgccccg

SEQ ID NO: 522477 - DNA, 100 bp, Homo sapiens
attatatgctggaatggttccttctgcggctcagccccactgaccttggctcctgcccgccctgcggcccctgccccatcccgaagccggcagccagagg

SEQ ID NO: 522478 - DNA, 75 bp, Homo sapiens
ccaaatgaaccgcagttggaattcatccttgatcttaccaatatatttgagtccttcctgcctcagttattggcc

SEQ ID NO: 522479 - DNA, 96 bp, Homo sapiens
catggaatggattcagactcttcctctcaaaaagcaaattcaacacccaacagcttccttaatagcaaaggtagcaacagcccaggatgatataac

SEQ ID NO: 522480 - DNA, 74 bp, Homo sapiens
ttggcatttggctttgcctttctggacacagaagtatttgtgacagatggactagaggcttttaccagatttct

SEQ ID NO: 522481 - DNA, 82 bp, Homo sapiens
atccctgagctcgtcaagcagctgtcggccaagctcatcgccaacggtactccaaagattcaggtttactcacgtcatccag

SEQ ID NO: 522482 - DNA, 74 bp, Homo sapiens
cggagacaagctctgtccgcggagaggagtgggacaactcctaaagttgtgtgacttcattgagacacattacc

SEQ ID NO: 522483 - DNA, 82 bp, Homo sapiens
tcctcaacgacgcggacatggtcatgagctttgtgaacctgggcttcctgtgtccagtaccggttagtggtccgggatgtga

SEQ ID NO: 522484 - DNA, 80 bp, Homo sapiens
atcctgaggaggcagctgcggtggcagctgctgagttctcggtgaaggtggacgcggatctgtcaacatgggtaaaggag

SEQ ID NO: 522485 - DNA, 50 bp, Homo sapiens
cgggagagtagcagtgccttggaccccagttgcactggaagggtactaca

SEQ ID NO: 522486 - DNA, 88 bp, Homo sapiens
gggatcattaagaagcagatcctgaaacacctgtcccgatttgtaggatcactgggtaccatcatcataaaatgtaaagattttcgaa

SEQ ID NO: 522487 - DNA, 100 bp, Homo sapiens
gcggctcccagccacaccaagttcaggttatgggaagctggctggaagcagcggtactacaagaacaaatttgatgtggatgcagctgatgagaaattcc

SEQ ID NO: 522488 - DNA, 74 bp, Homo sapiens
cagaaacttgttaaagacattattgcagcctcgtcttacagcgtgactgcaaagaaaaagacttttgttttgca

SEQ ID NO: 522489 - DNA, 100 bp, Homo sapiens
cagaagccactggagaaaaacggccaagaggcagacctaggaaatgggtttcttcaggagaagcattaccaaaaacgctgtgtacaagtgtaaaaacggg

SEQ ID NO: 522490 - DNA, 98 bp, Homo sapiens
atctcgcactaccctgactacagctggagcgcccagaggcgagccctggtggaggaagagatgccaacaagattcagaagaactgttgaaactagcaa

SEQ ID NO: 522491 - DNA, 76 bp, Homo sapiens
ggtagcgaaggccgccgaacctgcctggctagccggcgacttgagtgacgaaggacctgaaaaacgtgttcccacc

SEQ ID NO: 522492 - DNA, 86 bp, Homo sapiens
atgaacaccaagatgaaagcagcagttttcatcatctaagtgaaaggcatttgcctggtggcctgatttattggctgaacatgcag

SEQ ID NO: 522493 - DNA, 100 bp, Homo sapiens
cgctaagagtgtttgatcttcctctgacttggtactattctctctcccagaccactctgcttcatttttgggagaaaacttctcacactatggcagccat

SEQ ID NO: 522494 - DNA, 101 bp, Homo sapiens
cggtttcgtgaggagaatttgagatcatacctcactcctgttagggatgaagagtctgaatcccaaagaaaagcaagatctagacaagcaagacaatctag

SEQ ID NO: 522495 - DNA, 88 bp, Homo sapiens
gaacccagaggtcgtggaggtggccgtggaggcagaggtggcatggggagtcagtggatcggtggggaaaatgctgcttaccctgggc

SEQ ID NO: 522496 - DNA, 78 bp, Homo sapiens
ggaacctgttgtttttgagaaggtgaaaatgggagtgggtcctgaagagcagcatcctcattgccatggctgtttaca

SEQ ID NO: 522497 - DNA, 76 bp, Homo sapiens
ggcgtcgtggccttcagcacgttaatgcaaagtactgaaatcccaccttatgtgatgaagtgtccgagcaatggtt

SEQ ID NO: 522498 - DNA, 50 bp, Homo sapiens
ccctggagacgctctgccagccaggagccaagccgccatggcctaccaca

SEQ ID NO: 522499 - DNA, 90 bp, Homo sapiens
gccctgctcgcagaattaccgcctcttctttatttgtggggacattcatggacaattctttgatttgatgaagctctttgaagtcggggg

SEQ ID NO: 522500 - DNA, 100 bp, Homo sapiens
atttatagctaagactccaggacacccctgaagccgagaaatgaattcaacaacaaattttggaacataaaaagatgatacttaaaaatgacaaaccagg

SEQ ID NO: 522501 - DNA, 73 bp, Homo sapiens
cctctgtggcctcagagcgtctgggccacactgtctgggaagaggtgcgaggaagtggctggagtggaggaag

SEQ ID NO: 522502 - DNA, 117 bp, Homo sapiens
gaagaaaatgaagaaattggaggaggtgcagaaggtggacagggtaaaagaaagagacttttttctaaagaatgtcttgcaagagcaaaatccgtccctagccacacatactccaac

SEQ ID NO: 522503 - DNA, 98 bp, Homo sapiens
cagttctatcagcccaagattcagcagtttctcagagctctggggaatgctggcagactttgtgtcccagacttctccaatgatcccctccattgttg

SEQ ID NO: 522504 - DNA, 85 bp, Homo sapiens
ccaatgcaataatcggtctgccagttgcgatgccctcacagtgctcccaaatgtgtcagaagaaacagtgtctcccaccagagca

SEQ ID NO: 522505 - DNA, 100 bp, Homo sapiens
ctccacaagcggcgccgcgccctcggcctgcacggataaggagtcaggccagggcgggatgacactcattgattctaaagcatctttaatctgccaggcg

SEQ ID NO: 522506 - DNA, 75 bp, Homo sapiens
cttggattctatccctcctggtcagtacatggattcttcacttgttaaggagaaggatgacatccagagggcaga

SEQ ID NO: 522507 - DNA, 75 bp, Homo sapiens
cgagactttcccaatgggggagacctttctgacgtggagttcgaacatccatgatagcagtcttctgtaaatcga

SEQ ID NO: 522508 - DNA, 50 bp, Homo sapiens
cgacatcgcggccttcttccgatccgactatatcatcatgtacatagaaa

SEQ ID NO: 522509 - DNA, 100 bp, Homo sapiens
gaagaatcttagagctttctggatccagttcagaggattcagagaaggtcgggtcacaaatcttcgaagagtgacatatgttgttttagatgaagcagac

SEQ ID NO: 522510 - DNA, 100 bp, Homo sapiens
cacggaccgcacgcctcttctaccgggcgccccacgggccgaagccgaaaagcacttggttctgcttcgagatggaaggacacttataggctttttaaga

SEQ ID NO: 522511 - DNA, 86 bp, Homo sapiens
atgcacttgctacgaaacagaaatttcatgttgcaccctataccagcgggcaagcagaaaacaagaggctcaagaggggcagcccc

SEQ ID NO: 522512 - DNA, 82 bp, Homo sapiens
ccgagacccgaccctgggcgtggtgcatcgaggtagatgcaaagccgcttacaaacacgcagatggcaagaagattgatggc

SEQ ID NO: 522513 - DNA, 100 bp, Homo sapiens
ccgtggaggtggcctggggagccgtggccctttcgggggaccttcgagacaaggctgtcagcccctaggatcacacctcgacacccaacccctgaacccc

SEQ ID NO: 522514 - DNA, 75 bp, Homo sapiens
cccatggcatcatagttgtgtatgatgtgacagatcaggttggatggcaagcatgtggtgtttggcaaagtgaaa

SEQ ID NO: 522515 - DNA, 98 bp, Homo sapiens
tatagccaaggaaggcttcgagaagattagcaaaggtgctaatccagtggaaatcaggagagccacttctgccccaccaacgttgggccaaccaaaag

SEQ ID NO: 522516 - DNA, 89 bp, Homo sapiens
attggcatcgagttagaagccaccagcaagaagtcagccaagagatgtgttaaaggttcaatgaaagatcacccacagcagcagccagg

SEQ ID NO: 522517 - DNA, 83 bp, Homo sapiens
ctcagattggccatgtctatcctgcaattgaagcactgaagtcattctcaaaatcagacctggtcaactggttcaaggcccat

SEQ ID NO: 522518 - DNA, 101 bp, Homo sapiens
ctcaccgacagtgccctgagggccttcgagagctaccgcgccagacaggaccaagaatcgccttcagccctgtctggtgcatccttggcagaaagtgagga

SEQ ID NO: 522519 - DNA, 99 bp, Homo sapiens
caaattccggaccccatctgagctccacaatgataacttctccctctccaccattgccgagggctctcacccaaatcaatggtacagcagttccatgaa

SEQ ID NO: 522520 - DNA, 100 bp, Homo sapiens
gcgcggtcgagatcgccatgcctacccgtgaatctggattgggaaagtcgacattaatcaactcattattcctcacagatttgtattctccagagtatcc

SEQ ID NO: 522521 - DNA, 75 bp, Homo sapiens
tgctgctattgcttacggcttagacaaaaagaaaatggtgtgaatggaacattaacttcaaatgtagcagactct

SEQ ID NO: 522522 - DNA, 98 bp, Homo sapiens
tggtcttgagtgtgtatctctacatgcgctctttgaaagcgccccggaatgacctgtcgcctgccagctctgatgtggcaccatttattgagtttctg

SEQ ID NO: 522523 - DNA, 83 bp, Homo sapiens
cgtcgccatcttggatccgcgggacaagaaaattcatgcggtgacagttaaaggatttgaacctttaattcagtttgcctaca

SEQ ID NO: 522524 - DNA, 83 bp, Homo sapiens
caatgactgcaagcacctattatggaagccattaatttgctagaaccaatgacaaacgaccccgtgaactacgtgaggcaagg

SEQ ID NO: 522525 - DNA, 100 bp, Homo sapiens
cttcgacaggaggtcatctgtccttgtgccagctcgccagaggccctcactgtggccatccggaggtatatgtctcgagtccacggtatgcaccctaaag

SEQ ID NO: 522526 - DNA, 100 bp, Homo sapiens
cagcccctctccagctcgaaatcgagtacgagagggcctccaaagtggaccagtttgtgacgcgcttcctgctgcgggagacggtgagccagctgcaagc

SEQ ID NO: 522527 - DNA, 100 bp, Homo sapiens
tgagattgactccttgaccagcatcttggctgaccttgagtgcagctccccctataagcctcggcctccacagggaacctcagaacctgttctggatcca

SEQ ID NO: 522528 - DNA, 100 bp, Homo sapiens
gtatttttcacccgagtcagcaccctcccagcaaccagtcctcacacaggtattcaggaataccaggatggcgtgcccaagattccaacagcctgtatta

SEQ ID NO: 522529 - DNA, 96 bp, Homo sapiens
cattggagtcacaatcaaagaactggatctttatctggcttactttgtccacactccggagttgaagtattgataacaccaaggaactctatcaca

SEQ ID NO: 522530 - DNA, 100 bp, Homo sapiens
gggaaggctgcgggctcggagccggagacgccgagctggggccggagattaaccaaagtgctgataatttgcacatatttcttctgatatgtggacttcg

SEQ ID NO: 522531 - DNA, 74 bp, Homo sapiens
aacgtcagcccagtggagttgccctttggtggatataagaagtcaggcgttgacccggacgacacctataatga

SEQ ID NO: 522532 - DNA, 82 bp, Homo sapiens
ggcgtcttccgtgggcaacgtggccgacagcacagacctgcctagagctggaacgttacctccagagcgagccctgctatgt

SEQ ID NO: 522533 - DNA, 75 bp, Homo sapiens
ccgcgctggtgctcaagcagaaactcgcccaggagatgaagacactgaggctcagagaggttaagtgactcagcc

SEQ ID NO: 522534 - DNA, 75 bp, Homo sapiens
gagaactacagaaacctgatcttccttgtcgttccccatcaggaagtcctcgcagaagtgcaagtcctgaaagaa

SEQ ID NO: 522535 - DNA, 75 bp, Homo sapiens
caccagcttccagttagtggatatagcacaccatccccagccagttcattttccagacactgaaagagcagaatg

SEQ ID NO: 522536 - DNA, 100 bp, Homo sapiens
tcttggtcatgtgaactgcacgataaaggaactcaggcgcctcttcttagttgatgatttagttgattctctgaagatgtgttcagagcaacattgtttt

SEQ ID NO: 522537 - DNA, 78 bp, Homo sapiens
gcagaatatgctaaacttttggccaagagaatgaaggaggctagcgaagcgtacctggtgggtctgttcgaagatacc

SEQ ID NO: 522538 - DNA, 75 bp, Homo sapiens
gatcgtccaagaaaagttcctgtgatacaagaggagagggcaatgcctgcccagatacagtactgtagtcttgaa

SEQ ID NO: 522539 - DNA, 101 bp, Homo sapiens
aaaagattcagattacgaggattatggatgaacgtaacagacagaacatacatatgatagttgagaaagacacatattctgatcatgaagaaataaacaca

SEQ ID NO: 522540 - DNA, 116 bp, Homo sapiens
tccggttcttggtgcccctgggcatcaccaacatagccatcgacttcggggagcagcaggaggattctttgtttgcatctatgccacctctttgcccaattgggagtcaccctaag

SEQ ID NO: 522541 - DNA, 75 bp, Homo sapiens
caagtgcttacagtcaggcttcgagatgcttaaggttgctccttgagggcaggacagttcttatggctttatccg

SEQ ID NO: 522542 - DNA, 75 bp, Homo sapiens
ccaagggttgtatcgaggctataaaagcacagttttaagagagggcaaacttgaagataaatcttttgactccag

SEQ ID NO: 522543 - DNA, 100 bp, Homo sapiens
cgtactttgggctccgggattcgctccgcgcccgcggttgtagcagctgccgctgcagccatagcagcagctccagaacctgggtatcaacccagcaaac

SEQ ID NO: 522544 - DNA, 82 bp, Homo sapiens
acacagacgccgctgtgggtgacaacattggctacattacctttggtcaggatttaagtttacctcaaaaatggaagatttt

SEQ ID NO: 522545 - DNA, 100 bp, Homo sapiens
acctgacgggcctgcgagggttgaagattgtgaagcaatagcctaagatgcagaaactgaggcccagcagagattgagtaacttatgcgagttgtcactc

SEQ ID NO: 522546 - DNA, 51 bp, Homo sapiens
agatagagccaaacaatcttttcaaggttttcaaatggaacattttgatgc

SEQ ID NO: 522547 - DNA, 83 bp, Homo sapiens
ttcgctggccactggttatggtgcatacttggctcagatgcacgggaacaagcagcacctgcagaaggacttcttcctgtaca

SEQ ID NO: 522548 - DNA, 146 bp, Homo sapiens
gatggcgggggcggcgggactcacggcagaagtgagctggaaggtcttggagcgaagagctcggaccaagcgctcaggtactccaaagattcaggtttactcacgtcatccagcagagaatggaaagtcaaatttcctgaattgct

SEQ ID NO: 522549 - DNA, 82 bp, Homo sapiens
gtgtaccaggcgaagctggccgagcaggctgagcgatacgacggctgcaagatcaaggccctgcgggccaagacaaacacct

SEQ ID NO: 522550 - DNA, 82 bp, Homo sapiens
tttcacgaaggcaccgacgtcatcatgctgaccaccaatcagatccgtaaggatgccggctccaggagcagcagtggaggtc

SEQ ID NO: 522551 - DNA, 75 bp, Homo sapiens
gggcagtaacacatagcgtcaaagaggtgagatgctgcagtgtgtgtcactttattcacttgaatcagaattcag

SEQ ID NO: 522552 - DNA, 50 bp, Homo sapiens
cctatgtctacctggacagtgagtattgcggaatgctgcagcactcctta

SEQ ID NO: 522553 - DNA, 98 bp, Homo sapiens
cagctttctggagcacccattttactaccagatttggaaggaacgaagttaagtaatttccaaggtgctggagaatctggtaaaagcaccattgtgaa

SEQ ID NO: 522554 - DNA, 100 bp, Homo sapiens
gcagtggcgaagggaatcgcaaggctcttccctgaccattttctactgtccctgcgcgagaacaagttgaaatcatcgcagaaggataaagttcgtcagt

SEQ ID NO: 522555 - DNA, 97 bp, Homo sapiens
tatggaattctaatttgaaccatgtttggattgaagccgcctctgtattacttaccaggtgaaaggtgtagcagtcactcggcctacacccacagca

SEQ ID NO: 522556 - DNA, 83 bp, Homo sapiens
gggaggcatggccctccaggttttgatggacctccaggtggacattgaagtggacctaattcggttttccttttaaaagcccc

SEQ ID NO: 522557 - DNA, 96 bp, Homo sapiens
gggcagaccccgctgcactcacagggaggaggaggcggcagcggcggaggaaggcggcgcaccccgagaggagcttgaagaaatccgcaaatgtgg

SEQ ID NO: 522558 - DNA, 80 bp, Homo sapiens
ctcgtttggaggcactggactacttacaaaaatgcttctcagcagtggaagccgatacctcattcgatcagatgatatga

SEQ ID NO: 522559 - DNA, 142 bp, Homo sapiens
gcagtgatggaagttcggagacatctagtggaagcggcaagcagagaaaacctgccaatcaagatgagtatgggtacagcagggaagaactggaaactcagagaaagaaactgcccttccatctacaaaagctgagtttact

SEQ ID NO: 522560 - DNA, 100 bp, Homo sapiens
aactggggagtcatctgtagccccctcagagcatgctcaccgcctggacatctttgcccacaacctggcccaggctcagaggctgcaggaggaggacttg

SEQ ID NO: 522561 - DNA, 100 bp, Homo sapiens
gaaccaaaccacaggtcatctgctaagacccaacatgagtgaagtttcctgcaagaaacgggacgactatttggaatggccagagtattttatggctgtg

SEQ ID NO: 522562 - DNA, 96 bp, Homo sapiens
aacagcgaggaagaagaggacgacgacgacgaggaagaggaggtttctgagggccggatcgtggcacccagaggctgccaggactttggctgggac

SEQ ID NO: 522563 - DNA, 82 bp, Homo sapiens
cgggtctggagtgcgtgggggaccggctgttggcgggagagagcaagccacatcagtgctcctggcagatccctgcttccag

SEQ ID NO: 522564 - DNA, 97 bp, Homo sapiens
acagccttcatttctctgaacatactgccttatgggacagatcaagtgtcatggagaaactccagctgggcccagagattctgcagcgggaaaatcc

SEQ ID NO: 522565 - DNA, 75 bp, Homo sapiens
gatggcgcagaaaccccgttgacaaggcactgctttttcatgacgtgagacggtttaagcggaagcatcttactg

SEQ ID NO: 522566 - DNA, 100 bp, Homo sapiens
ctcagcaaagtctggcgtgatcaacattttgttaagattcaggtcaaagacagcaaagtggaagatgctttctacaaaggtgaactcaggctgaatgagg

SEQ ID NO: 522567 - DNA, 130 bp, Homo sapiens
caacgagctgctggaggacgagggccagctgacggagatggtgcagaagatggaggagctcacactgctggtggtccaggtcagcatcctctactacgggggccaccttgtcatctcaggccagatgacc

SEQ ID NO: 522568 - DNA, 102 bp, Homo sapiens
tttgagaccaagaagttgctcaagtacatgaagcacaccgtggtagtatactggatgaatctcctccgaaacaacagctgcctctccaaaatgaagaattcc

SEQ ID NO: 522569 - DNA, 87 bp, Homo sapiens
caaaactgatttcagaaatgcatagttttatccagttgcgacaaccaccagttaagcgtttgagacttcgtggtgattggtcagata

SEQ ID NO: 522570 - DNA, 82 bp, Homo sapiens
cgatgacacagaacgcttgcccagcaaatgcgaaggatacaatgtctctttgctatatgaccttgaaaatcttccggcatcc

SEQ ID NO: 522571 - DNA, 75 bp, Homo sapiens
cgtgatccagaagtccagagctgaggactgcctgtttgcaggaaggaggagacagttactgtctatcccgcagac

SEQ ID NO: 522572 - DNA, 100 bp, Homo sapiens
ggcagcgtccctgtgacctggccgatgaggaagtactgagcctgttggaggaactggcccggaaacaggaggacgcccgcaccgccgccatgatgtgcga

SEQ ID NO: 522573 - DNA, 90 bp, Homo sapiens
aggtgaagagttgtcccagctcggcccgcgggggagccccgggagccgcacgtctgcgggccaggcatcgacatccgcaacgactatcag

SEQ ID NO: 522574 - DNA, 135 bp, Homo sapiens
ttgttggggccctcttgataaaaagagatgtggggggattctcgacctgctaacagaactggaccttttcggcaaagtgtttcatggatttcaaagctggaggcgccttatgtcacattcttggggctgcttaca

SEQ ID NO: 522575 - DNA, 100 bp, Homo sapiens
gcagaaggtgtcattttaagacgagtaggcgaagcaaggactgttttgaacgaagaatgtgatcagaactggtacaaggcagagcttaatggaaaagacg

SEQ ID NO: 522576 - DNA, 82 bp, Homo sapiens
cgcggtagcgaaggccgccgaacctgcctggctagccggcgacttgagtgacgaggtgcttcaaggatgaccgcatcgtctt

SEQ ID NO: 522577 - DNA, 98 bp, Homo sapiens
aaagatggagatgaacctctaacacagtggaaaggaaccgttctggatcaggtattatgactctgtccccctttgatcaaatgaagactgcctccaat

SEQ ID NO: 522578 - DNA, 98 bp, Homo sapiens
ccttctccccagaaagcccagacctggacctgcatcagggtcctgacttccagggagcccggcatttgttgctatcggggactacaatggccacgtcg

SEQ ID NO: 522579 - DNA, 82 bp, Homo sapiens
gcggaatctgggtgcagttcctgcagtaccccactctacgatcaggctgaaggtgatgtggccgccctcaaccgacgcatcc

SEQ ID NO: 522580 - DNA, 98 bp, Homo sapiens
cagcctgggcgctgacgccgcggacctccctgcgaccgtcgcggaccatgggcgacaaagggacccggtgtctttcctgaagactatcttcccgtctc

SEQ ID NO: 522581 - DNA, 74 bp, Homo sapiens
cccagtgcgccctgcacatcctccaactaaacacggcgtgatggtgggcatgggtcagaaggattcctatgtgg

SEQ ID NO: 522582 - DNA, 102 bp, Homo sapiens
aaaacacgaggtgcagaagatgaccttaacacagtagcagctggaaccatgacaggcatgttgtataaatgtacaggttctcttagaagcacaagatatggc

SEQ ID NO: 522583 - DNA, 95 bp, Homo sapiens
atggcctctggacatccgagtggagagatggctgcccaaagattgtcaatctggggagctctaagacagacctcttctatgaacgcaaaaaatac

SEQ ID NO: 522584 - DNA, 52 bp, Homo sapiens
cagccttcctcattatcagaaattaaaggttctaaatgagaagaaacttcaa

SEQ ID NO: 522585 - DNA, 106 bp, Homo sapiens
cacatcaccgacatgaagggaacaggcatcatggactgtgcgcccaaggtttttcgttggaatatacgttgcacatttatggcgattctgagtgtgagggcagact

SEQ ID NO: 522586 - DNA, 100 bp, Homo sapiens
tgacctaaatgggaaacaacaggaatgggaagctgtggtgttaatcccttttattgatgagaaaataaacagagttgtctttgttggaaactttttacgt

SEQ ID NO: 522587 - DNA, 90 bp, Homo sapiens
tggcgatggggcagcgcgagatgtggaggctcatgtcgaggtggtcataatgtcacaatctccttgcagtccaggactgggcatactcat

SEQ ID NO: 522588 - DNA, 99 bp, Homo sapiens
taaagcctcctcagccttctgagtcagcctgaaaggaacaggccgaactgctgtatgggctcttgccggtggtggtgtgcacattgagccccggtatag

SEQ ID NO: 522589 - DNA, 75 bp, Homo sapiens
ctgacatggaggatgatttcatgtgcgatgatgaggaggactacgacctggtagcagtagctgatgtgcagtttg

SEQ ID NO: 522590 - DNA, 75 bp, Homo sapiens
aaacacctttctcctgatggccagtatgtccccaggattatgtttgttggatggggagatgacatcacttgggta

SEQ ID NO: 522591 - DNA, 100 bp, Homo sapiens
ctggagaagttgttcacatagattacaatgtttgctttgaaaaaggctataccccagctttggcctgtgctcccaataaggatgtggctgattgcctggc

SEQ ID NO: 522592 - DNA, 75 bp, Homo sapiens
gtcccttcacaaggtggtttttacagaaaccaccaagttttatatgacagagataattattcagtcatctgagag

SEQ ID NO: 522593 - DNA, 82 bp, Homo sapiens
ccgctacatcttcgacctcttttacaagcggaaagccatcagcagagcccaagaagatgaaaggattgttcttgttgacaac

SEQ ID NO: 522594 - DNA, 90 bp, Homo sapiens
gccagtttggagctcctggaagagaattttctctacatgtgcacccatttaaaggactcggcttcaagggaagcagcttccaccgcatta

SEQ ID NO: 522595 - DNA, 100 bp, Homo sapiens
agggagatatgttgtgaaagaagcagtagcagtgaatctacagggacgccatcgaatccggcctggtctccaagtcctctcctaagaagcctcgtggacg

SEQ ID NO: 522596 - DNA, 83 bp, Homo sapiens
gccgcccgcttccccatcatcgccagctgcacactcttggggctctacctctttttcaaacaaaatgatgcttcaacacccag

SEQ ID NO: 522597 - DNA, 100 bp, Homo sapiens
tacagctggttcttgaagctgctgctgtcccctttcctccaacccaacggcttactttcaaggaagtatttgagaatgggaaacctaaagttgatgtttt

SEQ ID NO: 522598 - DNA, 83 bp, Homo sapiens
ggaagaagcagctggacccgctcaccatctacggcatccggtgataaagataaagtttctctaaccaagaccccaaaactgga

SEQ ID NO: 522599 - DNA, 75 bp, Homo sapiens
gcagcggctcctcaacacccctcgaagttgatgcggatgaaattaaaaggctaggaaagagatttaagaagcttg

SEQ ID NO: 522600 - DNA, 75 bp, Homo sapiens
gcttaacccaggcatttggagggtttctcatttggcctgcctggcatcctcgctacaacctcattgttgtgggcc

SEQ ID NO: 522601 - DNA, 75 bp, Homo sapiens
ccggacaagaacccggatgagggcgagaaggtgtgcaactgaggaacatggctcaagaaactaatcacagccaag

SEQ ID NO: 522602 - DNA, 83 bp, Homo sapiens
gcggtgtctgctgctattctccgagcttcgcaatggaattaaaattggcctggaagacatctgtactttatggaaacaggcgg

SEQ ID NO: 522603 - DNA, 50 bp, Homo sapiens
ctcaaccccttctcttccaaaagttttcggctttgtgagaaaccttacca

SEQ ID NO: 522604 - DNA, 100 bp, Homo sapiens
gcaaaacgaacctctatatccgaggactgcctccccacaccaccgaccaggacctggtgaagctctgtcaaccatgtgttcagagcaacattgttttgtt

SEQ ID NO: 522605 - DNA, 100 bp, Homo sapiens
ctggtgccctggaggctctgagccccggcggcgcccgggcccacgcggaacgacggggcgagatgctgagctgcctggagcacatgtaccacgacctcgg

SEQ ID NO: 522606 - DNA, 75 bp, Homo sapiens
aaaatacccgcaacagccccttcgtcccaagattctggttgatctgaaaaatgaagtttggtatcaaaaatgtca

SEQ ID NO: 522607 - DNA, 99 bp, Homo sapiens
gaagcaagcagttcagaagagccaaggaataaacatgcaatgaacccaaaaggatatgggcacggttatgaaatattttgtgttacttgtaacagttca

SEQ ID NO: 522608 - DNA, 88 bp, Homo sapiens
tctcctgccctggagctgagtggggcgctccgcttctacgacagatccgacatcgacgcagtctaccatctggaatcaagagacccat

SEQ ID NO: 522609 - DNA, 83 bp, Homo sapiens
ttacaccaaaagtggcatgatcctttgcagaaatgactacattagatgagatccgaaatggcccataccgacagctcttccac

SEQ ID NO: 522610 - DNA, 101 bp, Homo sapiens
ctgggcctgaggacatccagtctcgaataggacactgcatgttattccactcaacatatctgaagagatggattaagaatgctttggattaaggattgtgg

SEQ ID NO: 522611 - DNA, 83 bp, Homo sapiens
cgagattattgagttaaagaaggatgatcggctgaatgtaacagaggaactaacgtccaacgacaagacgaggattctcaacg

SEQ ID NO: 522612 - DNA, 100 bp, Homo sapiens
gggacgtacctggacaagcacatggaggctcagcgggccgaggaggaccaagaatcgccttcagccctgtctggtgcatccttggcagaaagtgaggagg

SEQ ID NO: 522613 - DNA, 100 bp, Homo sapiens
tcagattgtgatgaattgtgctgatattgatattattacagcttcatatgcaccagaaggagatgaaggtactgggcctaatcgctacgtgcctctttgg

SEQ ID NO: 522614 - DNA, 100 bp, Homo sapiens
atgagagccataaccagaacctgaaggaatggcgggacaagcttcggccgcgcaagaagttaccgaagtgcatgtttgggattttgttgaagaaagctgg

SEQ ID NO: 522615 - DNA, 147 bp, Homo sapiens
gcaaagcggggacccagaccctggagcctcagttggaagcagccgatccagcctgcggagcctgtggggcaggattttttatcaagcagaaatgcatcgaacaacgagaatcaagatcactgagctaaatccccacctgatgtgtgt

SEQ ID NO: 522616 - DNA, 100 bp, Homo sapiens
gccacgcatccaataccagcagcctgtgggatttattattttgaagtaaaaattgtcagtaagggaagagatggacctagaggatcaagacataatggga

SEQ ID NO: 522617 - DNA, 100 bp, Homo sapiens
ggccagctcatcgactccatggccaactccttcgtgggcacgcgctcctacatggctgccaccctggagaaatgtgccacgtgctcccagcccatcctgg

SEQ ID NO: 522618 - DNA, 83 bp, Homo sapiens
ctcctggctggaccagcactgctccctgcccatcctcaggccgaccttttccccacgactctgaaagaggacagcgttcccaa

SEQ ID NO: 522619 - DNA, 98 bp, Homo sapiens
acccgccgccgccgttggctggaggagtgacagttcatttagattctttgtattcttcttcgtctatatttgtcagtttgctgtacatgtactccaag

SEQ ID NO: 522620 - DNA, 75 bp, Homo sapiens
tggggcggcgcgacggctggtgcgcagtaagagttccctatttcattgatttgaaaaaaccacaggatcaaggtt

SEQ ID NO: 522621 - DNA, 75 bp, Homo sapiens
caagcatgatgattcttcagataacttctgtgaagctgatggaagagaggatggtgatgcaccggttacaaaaga

SEQ ID NO: 522622 - DNA, 105 bp, Homo sapiens
ctccattggatttaaaagacagtcctcgtcagcactgactttcagctatggaatcggcttgggcactgtttaaaggaaagttccgagaaggcatcgacaagccgg

SEQ ID NO: 522623 - DNA, 74 bp, Homo sapiens
agatttgtggtgcgttctgagccgtctgtcctgcgccaagtcttcccatgcacaagatgattaatacagatctt

SEQ ID NO: 522624 - DNA, 82 bp, Homo sapiens
tgacttttcccaaggtcgcccaggaaagatgaatgggagggctgattttcgagagccgaatgcagaggttccaagaccaatt

SEQ ID NO: 522625 - DNA, 75 bp, Homo sapiens
caggtgtctcttctcgccctggcggggaagttgcagagtgggcaggatcttaagacccgataggtgcagaaccca

SEQ ID NO: 522626 - DNA, 87 bp, Homo sapiens
ccagaaaccggggaccttaacaatccacctaagaaattcagaggatgaagtcattgctgtttccgaaaaggtgattgtgaagcttga

SEQ ID NO: 522627 - DNA, 100 bp, Homo sapiens
actatcgacttggagtactcgatacttgccagaactaatacagctgatgaaatacctgaccttttctgctccaggtaaataattttttactttataaaaa

SEQ ID NO: 522628 - DNA, 50 bp, Homo sapiens
accagcactgtctccaccctagagagctcttcagtatccccatcagccag

SEQ ID NO: 522629 - DNA, 80 bp, Homo sapiens
ggcagcgggacccggcgaagacgcgaccgcggcgcgagtcaccatgcgggtccatatggaatatttgctggtagggatgc

SEQ ID NO: 522630 - DNA, 83 bp, Homo sapiens
ccttaatgagcatgttgacagcatcgatgctagacagacataaccctccactgagtgaagaaatgttgcctcctggagagtgg

SEQ ID NO: 522631 - DNA, 76 bp, Homo sapiens
tgcggctactgcaagaacgagtcgggcagccgctccaatggaaagaccacagcaagattctttcattcgtctcctc

SEQ ID NO: 522632 - DNA, 100 bp, Homo sapiens
acctacaaggaatctgagggtgccctcaatgagcacatgaccagcttagcttctgtcctaaagacaaatttacatgtattggagaccagaccagaagccc

SEQ ID NO: 522633 - DNA, 99 bp, Homo sapiens
tgttcgaggatgtgtacgagctgtgcgaggtgatcggaaagaattgtcttagaagaaagaaggcaagccaccattttacccacgtaaatatatgaatat

SEQ ID NO: 522634 - DNA, 123 bp, Homo sapiens
ttgcagcggggacgcgaggacccgggctgggctttcctcacccggtgtgtcccggcatggatatccggaacaacctcactaggttgcatgagctggagaattgctctgtcatcgaaggacact

SEQ ID NO: 522635 - DNA, 96 bp, Homo sapiens
cagaatctgagtccaagaaacgtaagcataggtatcccacctgaccagcagcgtctgatatttgccggcaaacagctggaggatggccgcactctc

SEQ ID NO: 522636 - DNA, 50 bp, Homo sapiens
gctctgataacttgggttctttacaagtcgtagatttaaaggaaaaggaa

SEQ ID NO: 522637 - DNA, 83 bp, Homo sapiens
cgaggatctggaggcacagctgcagtctgacgagaggggtgagaagccctaccactgcaactgggacggctgcggctggaagt

SEQ ID NO: 522638 - DNA, 98 bp, Homo sapiens
gaggctttggagcggctaaaaacctggcgaagctgtgctcaggcccgggctggacgcagagccagagctgtccccagaggagcagagggtcctggaaa

SEQ ID NO: 522639 - DNA, 91 bp, Homo sapiens
agaagatctgcgaggagcaggaacaagccctccaggaaatgggcctgcacctcagccagcattgaagttgatatcgatgtggagcacggag

SEQ ID NO: 522640 - DNA, 100 bp, Homo sapiens
tggaaacaaatatgagtacaagttcggctttgagcttcctcagggaacgagtccctggagaggcagatgcgcgagcaggaggagcggcacgtgcgggagg

SEQ ID NO: 522641 - DNA, 51 bp, Homo sapiens
ggtaatgctggaagttataagcaagcaatatttgctgtgctcacaagcgtc

SEQ ID NO: 522642 - DNA, 100 bp, Homo sapiens
cccccagacaagatggacaccgcggaggaaggcttatgcaagcaaagatctggaggagcagttacggtctgtgtccagtgtagatgaactcatgactgta

SEQ ID NO: 522643 - DNA, 100 bp, Homo sapiens
gtctacaacccttttgagacccgggaggcgcaagcaaactgtcgagtaggagttgcagcactgaatactctagcaggctatattgactgggtgtctatga

SEQ ID NO: 522644 - DNA, 90 bp, Homo sapiens
aagattaacctggagttaaggaacagatccccggaggaggtgaaatgacaatggatgctctgttggctcgattgaaacttctgaatccag

SEQ ID NO: 522645 - DNA, 75 bp, Homo sapiens
gtcagctaggactcatgactactgaggattctgtggcagtgcccagccacaggtggaattaagaaatctggcaaa

SEQ ID NO: 522646 - DNA, 100 bp, Homo sapiens
ttcgcaaacagcacaggccatcaaatgcagaattcacaagatccaatcccttgtccttaaaaggcctccccatggccacccatggaccagtcggcattca

SEQ ID NO: 522647 - DNA, 82 bp, Homo sapiens
cagccgccaaagaccccgtccggtaggagccttcacgtaaatgggtccagtcatgcctcccagtaagaagccagaaagctca

SEQ ID NO: 522648 - DNA, 96 bp, Homo sapiens
aagcgaccgagggactgggagtcgttagtgagatcgtgaggaccagtccattctctgcacgtgagtaatctggaaggacttcctggaggaggagag

SEQ ID NO: 522649 - DNA, 131 bp, Homo sapiens
ctgtgaagtccgtccgggaaacggaggaaaaaaagagttgcgggaggctgtcggctaataacggattcactccttctccagttgcacagccacacccttcagctggccttaatgttgactttgaatctgtg

SEQ ID NO: 522650 - DNA, 96 bp, Homo sapiens
tgttttcctgagggctacaccgttttcttttgaaagagtttttcagaagaagtgaagtcaagatgaagaaccatttgcttttctggggagtcctgg

SEQ ID NO: 522651 - DNA, 105 bp, Homo sapiens
gtgaccgagaccgtgaccgagagcgtgaccgagagcgcgaatatcgtcatcgttagaagcccccggtccctgagaagcggccccctgaaatacagcatttccgca

SEQ ID NO: 522652 - DNA, 78 bp, Homo sapiens
gagggaggaaagggaggcaagaaggaagcagatgggtctaggaaagacaatccaggcaattggaattacttacttcta

SEQ ID NO: 522653 - DNA, 87 bp, Homo sapiens
agcaatcttcaagcgctatgccaagaagcgaaatgtgctcattggccattcctacgggaggaatatcagggcgaggggatcacgtgg

SEQ ID NO: 522654 - DNA, 82 bp, Homo sapiens
cagcgacccgcagtccatctgactcctgcttcccgggtgttgctcgtgatagtggctacccagagacgctggtcaacctcat

SEQ ID NO: 522655 - DNA, 100 bp, Homo sapiens
gcaggtgttattatggactttcaaacatctgaagatgacaatttattagatggtgacactgcagttgtccctcctcctatgtctccatcctccaaatctg

SEQ ID NO: 522656 - DNA, 90 bp, Homo sapiens
ctcgccgcagcctccggagaggaacagaccctcactctctctgtcagaaaaattactatactggcaattgctggagaagattttgcaatt

SEQ ID NO: 522657 - DNA, 75 bp, Homo sapiens
tttgtcttggtatactacatggcaaaatgggaaaggatacattaattgtttggtcagaagcagagaactatgatt

SEQ ID NO: 522658 - DNA, 75 bp, Homo sapiens
cggcgaacgcggagagcacgccatgaaggcctcgggcacggtacttcgtactggatttcgaggctggcatcctgc

SEQ ID NO: 522659 - DNA, 82 bp, Homo sapiens
cgagctgtgcgggcgggcggtgagcgcccatatgggggttctggagagcggggtgtgggggccgagaactactggtggcgtg

SEQ ID NO: 522660 - DNA, 98 bp, Homo sapiens
atcagtacaaaaattcttcaagaaatctaaggtaataaatctcctaatggaataagtgactatccaaagatcagagtgacagttacccgagatcagcc

SEQ ID NO: 522661 - DNA, 100 bp, Homo sapiens
ggaggacgcgcccggcgcccctgagccggccgagcggcgacggaccgcgaggtgcccctgtagacaatggccctcgtgtctgccgattcccgcattgcag

SEQ ID NO: 522662 - DNA, 100 bp, Homo sapiens
acctggagcatttgctgcagaagcgtagtcggccagagtgccggtggtggtgtgcacattgagccccggtatagacagttcccccagctgaccagatccc

SEQ ID NO: 522663 - DNA, 90 bp, Homo sapiens
agaataggaacctctacttccccaccaaaaagtggcacacactggagagatatcaggctctgtgtatgaatgacaaggataccttcagcc

SEQ ID NO: 522664 - DNA, 100 bp, Homo sapiens
ctcaaaagtcaaccgctgaagagcagatttgaaagaagccaacactaaaccacaaatatacaacaaggccattttctcaaacgagagtcagcctttaacg

SEQ ID NO: 522665 - DNA, 74 bp, Homo sapiens
agtggtcgcttcttctccttgggacaagaatccttcaagaaacaggaaaaaactcctaaaacaccaaaaggacc

SEQ ID NO: 522666 - DNA, 75 bp, Homo sapiens
acccctctccgtccatggccccagatgacacttcagtcttacacagtgtgggccatgtggtgaatgtgtacctgt

SEQ ID NO: 522667 - DNA, 50 bp, Homo sapiens
ccagggccaggcgccgctcagaacgggaaacggcatacactggagaagaa

SEQ ID NO: 522668 - DNA, 82 bp, Homo sapiens
cggcgtgttggaggtggagccacaggacctgtccataggttggatgctgtgcgtcacaatgtagcagggaccccaggcgtcg

SEQ ID NO: 522669 - DNA, 83 bp, Homo sapiens
cttcaatgagtaaacatattcctgttgacatcatggacatatgtgagtccatcctggagaggaagcggcatgacagcgaaagg

SEQ ID NO: 522670 - DNA, 75 bp, Homo sapiens
cgagagagcgaacgccagggaccctgtgcaggcctgctcctccgtttgcaagagtgtgaacatggctacgcctct

SEQ ID NO: 522671 - DNA, 100 bp, Homo sapiens
tcatctgcctttatgatgaatgcaataattctccattgagaagagagaagaacattctcgaatacctagaatggggaagatgatccctatgatcttgaag

SEQ ID NO: 522672 - DNA, 51 bp, Homo sapiens
ccaccttcgtcaatgtcatcgcgctcgatgcattctatttctcatcatttg

SEQ ID NO: 522673 - DNA, 80 bp, Homo sapiens
ggagagcctgcaggacggcgcggcagagtccccgtacgcctacagtaacggcccctgtgtccgtctgggatgaggaggag

SEQ ID NO: 522674 - DNA, 80 bp, Homo sapiens
agcaagatgcggaggctgcctcggcggagcagaggaaccacacgctgatcatgggttgtgagtcccggcccagcccctcc

SEQ ID NO: 522675 - DNA, 99 bp, Homo sapiens
gcgctgcggccgccgcctccccgctgaccccgcgggggcatgtgtccgtttcgccacatcagtggtgagaagacagttgtgtgcaaacactggctgcgt

SEQ ID NO: 522676 - DNA, 74 bp, Homo sapiens
gttccaccaggccgggaagcccatcggtgtttcacctgtctcggaaagtaacatctctggtccctgagagctgc

SEQ ID NO: 522677 - DNA, 80 bp, Homo sapiens
atgcccatcacaaataaccctatcgcagccgggagctgttaaacgtttaatgaaagaagcggcagaattgaaagatccaa

SEQ ID NO: 522678 - DNA, 75 bp, Homo sapiens
gcagccccgcacggcccgggcccacgtggatccataaagaacccagccaacccgcagagggaggggaggggctga

SEQ ID NO: 522679 - DNA, 100 bp, Homo sapiens
tgtcctgctgtctctgctgctgcttctgggtcctgctgtcccccaggagaaccaagatggagagctcaaaggatggctactgacatgcagaggaagagaa

SEQ ID NO: 522680 - DNA, 74 bp, Homo sapiens
tcgcacgctgctccggactagagaaaatgtccaccttggttctggtgatgggcagtcaaaagattctgggcccc

SEQ ID NO: 522681 - DNA, 90 bp, Homo sapiens
cgaggcggaggcgatcggtgctgattcggcgcgatttgaggagctgctgctgcaggccatggcccgtgatgagaagaattactatcaaga

SEQ ID NO: 522682 - DNA, 74 bp, Homo sapiens
cccaacatcctgctcctgctcatggacgaccctcgagtttggaagaaaacaaggcagtagtaaggaggaacagg

SEQ ID NO: 522683 - DNA, 97 bp, Homo sapiens
gcctcgaccgcataggccagttcacctgtatctgtatggcagcccagaacgatctcttcagcacatcaggcaatgagtgggtcctgctgaacctcaa

SEQ ID NO: 522684 - DNA, 75 bp, Homo sapiens
cggaaccggacccagtccctgagccgcccctacacccacagggaaaaagacctcgatgaagttctgcagacccac

SEQ ID NO: 522685 - DNA, 100 bp, Homo sapiens
tgctaaacacgtggaaagaatcaatttggggttatgatgtgattgctcaagcccaatctgggactgggaaaacggccacatttgccatatcgattctgca

SEQ ID NO: 522686 - DNA, 98 bp, Homo sapiens
gatgaccttggacacctccatgttatggacacggtctttcttattcagactcagaaccgtgctgcatactatcctcctagccaaattgctcaactaag

SEQ ID NO: 522687 - DNA, 74 bp, Homo sapiens
gcaacgagacgtggggcgtaacaaaggaggataagatcaatgccctcattaaagcagccggtgtaaatgttgag

SEQ ID NO: 522688 - DNA, 75 bp, Homo sapiens
aaggattccaagtaactcttatttggccgccatccagtcacagttggacggggtgcgcacaggcctcagccagct

SEQ ID NO: 522689 - DNA, 75 bp, Homo sapiens
aggccattcgcacaactgcccactacgatcctgccactgagtttgctaatccagactttacacaacctatctcag

SEQ ID NO: 522690 - DNA, 76 bp, Homo sapiens
ccgggcacgacctctcggacacggtgcaggcagaatagctctccagacccccagctggccatgtggtgagttcagg

SEQ ID NO: 522691 - DNA, 100 bp, Homo sapiens
gcaggaggaggtccggagactgcagcaggtggaacggcacatgtgtgatggggacattgttatcttcaaccggcagccaactctgcacaaaatgtccatg

SEQ ID NO: 522692 - DNA, 75 bp, Homo sapiens
cccacagtgggggtgtgcaaacccgagagaactggaatcatgaggaaaacttgtgtcctgaatacccagtatttt

SEQ ID NO: 522693 - DNA, 73 bp, Homo sapiens
cacgaggaacaaattgtacatttgcccattctcaggaagagcttgaaaagaaaaccgtcttcagatacagtcc

SEQ ID NO: 522694 - DNA, 51 bp, Homo sapiens
gagcggaaaaacggagcctacgtgtaaactggagttgctggtgggcagccc

SEQ ID NO: 522695 - DNA, 90 bp, Homo sapiens
gtagaattgagaaagctgcaaatccaagtggcaagaagaaactcaagatcttccagcctgataaacgtcttgtacccggaggtggagcaa

SEQ ID NO: 522696 - DNA, 83 bp, Homo sapiens
agtgaagaaggcgcatcactcccagctgcgcaaagcttgcgaggtggcgttagaacatccagtcatggataaaaatgagctgg

SEQ ID NO: 522697 - DNA, 60 bp, Homo sapiens
ggatggaggaagactcgatccgcctgcctgcgcacctgctatctggagtccatctttcac

SEQ ID NO: 522698 - DNA, 100 bp, Homo sapiens
cgcgaccgtcggtgcggaatggacagctgctggtatcaaccgggctcccagccctagaccagctcttagagggtgatgagacaggagtgatggataatct

SEQ ID NO: 522699 - DNA, 100 bp, Homo sapiens
aggcgctgagtccctgctcggctgtctcggtggtcgccgccggggtctgagcccgggaagaccgaggttttgtaatcaacccccctcagcatggtcctct

SEQ ID NO: 522700 - DNA, 75 bp, Homo sapiens
atgggggtgttccaaagagaccatggcagcctgcagctaggactttaatatacagtttatgtaacttgatggaag

SEQ ID NO: 522701 - DNA, 112 bp, Homo sapiens
aaaattgtgaactaaggccccctgcccccttttcctggtgcatgtgaagttatcaaaaacaggtgctggagaatctggtaaaagcaccattgtgaagcagatgaggatcctg

SEQ ID NO: 522702 - DNA, 143 bp, Homo sapiens
tggagatgccaacgccgcgcggttgtaactcggccctagttacctggccagggtacgcgacaattggcggagcaccgaacaagatttgtgatgaaatggagcctggaacaaactcttttcgggtagaatttcctgatttttcc

SEQ ID NO: 522703 - DNA, 74 bp, Homo sapiens
taccaaacacgattgttgtttcttggactgcagaaattggaagagagtcagcattggtaatagtgctgtgctgc

SEQ ID NO: 522704 - DNA, 90 bp, Homo sapiens
tgctgaggcagttggaagttatgacaccatggatctcttcaggcacactacagaactaaatatgcatcggatgtgatgctggtacaaccc

SEQ ID NO: 522705 - DNA, 90 bp, Homo sapiens
gtgcggcctcggctggcggcggcaccagccctccagaatacccatcatatagcccctgaggtggcatggtgatgtctccatgagggaacc

SEQ ID NO: 522706 - DNA, 120 bp, Homo sapiens
cgatacgagatcacagcggaagattctcaagagaaagtggctgatgaaatttcattcaggtatgaagagattcatttgccacgattttcattaaagcaagggatgatcccaagacgttat

SEQ ID NO: 522707 - DNA, 82 bp, Homo sapiens
attcgaagatcctagagatgcagaagatgcagtacgaggactggatggaaagtggcacaagaatggctcaactctccaaata

SEQ ID NO: 522708 - DNA, 101 bp, Homo sapiens
ctgacttcaagaatgaagccgtggaccctcacggcagagatctggctccacaaggaggcccagaaggagggctggagcaaagctgccaagctccaagggag

SEQ ID NO: 522709 - DNA, 83 bp, Homo sapiens
acagaagtacaacgtgcgatccatgcccatccgaaaggatgatgaagttcaggcagaagtcaattcatctggaaagactatct

SEQ ID NO: 522710 - DNA, 75 bp, Homo sapiens
tcctgcctcagcctccccagtagccgggattacagggtgtacaactatgagcctttgacacagctcaagaatgtc

SEQ ID NO: 522711 - DNA, 90 bp, Homo sapiens
ctcatgatagcttccaagggacaaggtgtcaacaatgtgccgaaccactcacgaattcttgtttggtgcccttgctgaactggttgataa

SEQ ID NO: 522712 - DNA, 50 bp, Homo sapiens
gcccgcggcccgcggccgccaacccagcgggtgccgcttctccacccgag

SEQ ID NO: 522713 - DNA, 88 bp, Homo sapiens
gcagtggtcgcttcttctccttggaatttaaactttgggataatgagctgcagtatgtggaccaacttctgaaagaggatgtgagaaa

SEQ ID NO: 522714 - DNA, 80 bp, Homo sapiens
taaaaacaatagctcaaggaaacctttccaacacagatgtccaagctgccaacaaaatgatgcttcaacacccaggccag

SEQ ID NO: 522715 - DNA, 114 bp, Homo sapiens
tttcactgttggacttgggagtatctccgtattctggagcagtatttcatgaagtgtctgacttccagcaactgctggcctgtgccagggtgcaagctgagcactggagtggag

SEQ ID NO: 522716 - DNA, 101 bp, Homo sapiens
cttctcaaggcagacacttaccgaaaatggcgggcagccaaggcaggcgagaagaccatctctgtggtcctacagtgccggtggtggtgtgcacattgagc

SEQ ID NO: 522717 - DNA, 75 bp, Homo sapiens
agatgatcttaaaaaaaatagctcagttaatgaaggatcaacgtatcataaaagataaagctgtacaccaagcat

SEQ ID NO: 522718 - DNA, 74 bp, Homo sapiens
tatgaccctatggaagcagaagaagctgaggatgaagaagatgatattaacctggctgcagagccaaaagtgaa

SEQ ID NO: 522719 - DNA, 98 bp, Homo sapiens
atacctttgtggtagactgcagcaaccgagaagatatttacagctctgcaaagaagtcacaccgaggagaagactcagtgggaacatccaaaaactgg

SEQ ID NO: 522720 - DNA, 100 bp, Homo sapiens
cccaggtcggcgtcggccgcgggcaagaaggctggctttccccctggtgtggtcaacattgtgcctggatttggccccacggctggggccgccattgcct

SEQ ID NO: 522721 - DNA, 100 bp, Homo sapiens
gctaatggagcaatacgtttccattgtgatcccaccttctgggcaaagaatgtagtcaatttagttgccttgttgaaggggatgctaaagaagaaatact

SEQ ID NO: 522722 - DNA, 80 bp, Homo sapiens
acttcagtcggaaagttggaacctctgacaagaccaagtactaccttcaaggttcacagcaaacaggattcctaaatgcc

SEQ ID NO: 522723 - DNA, 100 bp, Homo sapiens
agtgatttcggactttccaaagcactgcgtgctgatgaaaactactacaagggaggaagaaagggaagattttgatactagcattgagagcaaagacaca

SEQ ID NO: 522724 - DNA, 100 bp, Homo sapiens
aacacaccggagacttttggggggaaactaggtcgatggtcggcggcgcccggatgggcagctgagagatagggtctcactgtgttgttcagactggttt

SEQ ID NO: 522725 - DNA, 48 bp, Homo sapiens
cctgacagatacacggtgtcggaggagaggaagagcaagcaggccctg

SEQ ID NO: 522726 - DNA, 131 bp, Homo sapiens
gggagatcgcgcaggatttcaaaaccgacctgaggtttcagagcgcagccatcggtgcgctgcagctgccagggacctggtgagcaaagagggcttccggcgggcccggcacgtggtgggggagattcggc

SEQ ID NO: 522727 - DNA, 51 bp, Homo sapiens
tggaagcagcaaatgagacgtatatatgattctataacagactcttccaga

SEQ ID NO: 522728 - DNA, 100 bp, Homo sapiens
caaacatggcactgagtgtactctctgccagtgcaagataacaacgaacttgatgcaagtgataggtttgccaaggtcagacctctcatcatccggatga

SEQ ID NO: 522729 - DNA, 98 bp, Homo sapiens
gtatccaagacagtatgcaaggccacgacccacgagatcatggggcccaagaaaaagcacctggactattgaaaaggaagatcaggccaaccccaaag

SEQ ID NO: 522730 - DNA, 74 bp, Homo sapiens
ccctcggggcggcggactggctcgcggtgcagacaatgcagatcttcgtgaagactctgactggtaagaccatc

SEQ ID NO: 522731 - DNA, 75 bp, Homo sapiens
tccattcactgtcaccttttatggcgcactgtttcgggaggtcttaattgagcatattggaaacttggatcgggc

SEQ ID NO: 522732 - DNA, 82 bp, Homo sapiens
gggagctggacggcgagcgcgagcggcgcgagaaaatctcagtgaatatcttccggactctgccgcccagtgagaaccctga

SEQ ID NO: 522733 - DNA, 97 bp, Homo sapiens
gttcgctacacagcaatgcatcgaggaagaaggtagataatgactataatgcccttcgagaaagactcagcaccttgcctgataaattgtcttataa

SEQ ID NO: 522734 - DNA, 50 bp, Homo sapiens
ccccgggcggagagcccctctccaggatctgtgccagttcagaagcaggc

SEQ ID NO: 522735 - DNA, 98 bp, Homo sapiens
gttaaccaggttgctgctctacttttcccactgctggctaaggaagattcaactttttcagccaagaagtatgatgcgtttttggcctcagagtctct

SEQ ID NO: 522736 - DNA, 75 bp, Homo sapiens
ggagagtgatacagattcatttgaagaagatcctgaaatttccttagctgtcaaaatgcagatcttcgtgaaaac

SEQ ID NO: 522737 - DNA, 100 bp, Homo sapiens
gcaaacatagagaattctgggcttccacacaactccagtgctaactcaacagaaaacgttgtgtgacgtgatcctcatggtccaggaaagaaagatacct

SEQ ID NO: 522738 - DNA, 100 bp, Homo sapiens
cgtcgtcctggtgctgcagcggctggcgcccatgcggctctacacgctctccaagcgccactttgtcctcgtgtttgtcgtcttcttcatctgctttggc

SEQ ID NO: 522739 - DNA, 100 bp, Homo sapiens
acatcagcgaccgggagaacatagacgatgccttattggaggaactggaacgctccacccttcaggacagtgatgaatattccaacccagctcctcttcc

SEQ ID NO: 522740 - DNA, 96 bp, Homo sapiens
gaagaaaaggtgtacttgcaagaaacctcaggacttgagtaacagcaacatggcaaatcctcccccagtactggtcaacacagatagcttggaaac

SEQ ID NO: 522741 - DNA, 50 bp, Homo sapiens
ggcggcgctgctcccgggggcgacggcttggtgatccagctatttttcct

SEQ ID NO: 522742 - DNA, 133 bp, Homo sapiens
catttttggagtctcctttggtatccgcaaactctacatgaaaagtctgttaaaaatctttgcggttctgaagaaagtctccaaatacattcaagagcagaatgagaagatctatgctccacaaggcctcctc

SEQ ID NO: 522743 - DNA, 100 bp, Homo sapiens
atcaaatggcacttcattggccacctacagaaacaaaatgtcaacaaattgatggctggcaaactgatacaactcagaaactgctcaatgtcaggaaaac

SEQ ID NO: 522744 - DNA, 100 bp, Homo sapiens
cgctctgccggaggagattcgggagcccgctctgcgagatgcgcagtgggtcatttgaaccaattctccgcctccttccccagggaatctctcctgtcag

SEQ ID NO: 522745 - DNA, 90 bp, Homo sapiens
cttgaatttggtgtggaagaaataacatcagtagttcaggagcaggccatagaggtgctgacccgctccagcctagaagttgagttggcc

SEQ ID NO: 522746 - DNA, 75 bp, Homo sapiens
tctctacgccaaagaaatccagtcccgaccaggttcccagcaccatgagggcctggatcttctttctcctttgcc

SEQ ID NO: 522747 - DNA, 100 bp, Homo sapiens
ttcgccagcccaaaggcgactcgacaccgtcccagctgaagagagggctgaagaagatgcagagcagcctgaagctggtggactgtatcatcgaggtcca

SEQ ID NO: 522748 - DNA, 100 bp, Homo sapiens
cctggaccctgcccagcagaatttgtatagagatgtgatgttggagaactacagaaacctggtctccctaggaactgcaagcacatgttgaccagataac

SEQ ID NO: 522749 - DNA, 101 bp, Homo sapiens
ggcggtgtcggcagctgctgtagcgaagagagtttggcgcgatgtctcacagaaagttctccgctcccagacatgggtccctcggcttcctgcctcggaag

SEQ ID NO: 522750 - DNA, 100 bp, Homo sapiens
cagcgttctgtggttgtcaacagtaataatttttcaccatgcatcggaaaaaggtggataaccgaatccggattctcattgagaatggagtagctgagcg

SEQ ID NO: 522751 - DNA, 78 bp, Homo sapiens
tcgccaccaatggagccgtgcaggggggcggagcctactttccttattgtagaagtaaaaagaaaaaagaagcaatta

SEQ ID NO: 522752 - DNA, 100 bp, Homo sapiens
atcgccgcggggcagttcgggccggctgtcctggcgcggttcccacatcccatccccctcaccactgtgcagtgtgtatgcagtttgtgcgaaaggaaaa

SEQ ID NO: 522753 - DNA, 98 bp, Homo sapiens
cccgcggcgggcgcggagatgtggcccctggtagcggcgctgttgctgggctcggcgtgctgcgattcaaccctatgaaaagataaaggccaggggct

SEQ ID NO: 522754 - DNA, 83 bp, Homo sapiens
cctggagttaaggaacagatccccggaggagcacttgcacctcctgcgccgccgccccccatccaaggatatgccttcaagcc

SEQ ID NO: 522755 - DNA, 100 bp, Homo sapiens
aacatcgcggtgcagcgaatcaagcgggagttcaaggaggtgctgaagagcgaggagctgagtcagtgctgattctctcaaatagagcttgaaggataaa

SEQ ID NO: 522756 - DNA, 82 bp, Homo sapiens
gccgcctgcggcctggcgctgggcatagaatgtcaagctaaccaggcgtccgctacttcagaagagtgtactgtcgcatggg

SEQ ID NO: 522757 - DNA, 82 bp, Homo sapiens
cgggcacactgggctctgcagcctcatcctacagccccctagtcaaggcggataagaaggcggcacaagaaaagatgatcca

SEQ ID NO: 522758 - DNA, 100 bp, Homo sapiens
tgggactttcttcgttgccatgaggaaagaattctccgagagatcccactggcattgttggtggtaggcctgggcgggggcagcctccccctctttgtcc

SEQ ID NO: 522759 - DNA, 75 bp, Homo sapiens
ggatgtcgggacaccccggaagctgggaaatgggctgaactgtatcgggcctcagggaagtttgagctgcttgat

SEQ ID NO: 522760 - DNA, 100 bp, Homo sapiens
aacctgtgaccacccctgaagaaattgcacaggagccagatgaccaggatgccccagatgagcatgagccctctccatcagaagatgccccattatatcc

SEQ ID NO: 522761 - DNA, 83 bp, Homo sapiens
ttcagaattgagcagaaaacaacactgacagccagtgcaggagagcgacttgcagttgtggaggtacagtgtgaacggctgag

SEQ ID NO: 522762 - DNA, 100 bp, Homo sapiens
tttacatcccattccctgaagatgattctaattcaacaaatcataacttgatgaggagcttttctctggaatgtatatagatttcatggggacagatgct

SEQ ID NO: 522763 - DNA, 83 bp, Homo sapiens
ccaggagtcatcggacgccagaatctgccaagacaatgcaaactccagtgaacattcccgtgcctgtgctccggctgccccgg

SEQ ID NO: 522764 - DNA, 75 bp, Homo sapiens
ggagtccagacatctgaaacttggagaacctgaagtctggagtgtatcctctcaaggaagcaagtggatgccctg

SEQ ID NO: 522765 - DNA, 82 bp, Homo sapiens
tgtgcaactgcagctacagtggaaaaaagcaaactgctcttgatcccagggaaatcctcattgacgattcaatttgttgaag

SEQ ID NO: 522766 - DNA, 90 bp, Homo sapiens
gatgctgcaagtgaatatgccaaatactgctcagaaatattaggagttgcagctactccagatctttcagcagagatgacagaagacgag

SEQ ID NO: 522767 - DNA, 82 bp, Homo sapiens
ggaatttagcgctcgcccagctagccgcaggaagtgtggaactggtctcaatcggttgaccaccttaaggaaataggattta

SEQ ID NO: 522768 - DNA, 124 bp, Homo sapiens
gattgagccgttgccgaacgtggtggagctgtggcaggcagaagaaggggaactcctgctgcccactcagggaggaactgcgactgctcgatcttacccagaggaagctgtaccgagatgtcat

SEQ ID NO: 522769 - DNA, 100 bp, Homo sapiens
ttcactctgttcaagagacatgcactgaacttctgaagataatcgagaaataccagctaagactcaatgggaataccttggcaagcagctccagtccgag

SEQ ID NO: 522770 - DNA, 82 bp, Homo sapiens
ccctggctgcagccctcactcttcatggtcactggtgtgagttcttgatacgaatgaaaggccaagagtttgttgatgagat

SEQ ID NO: 522771 - DNA, 111 bp, Homo sapiens
atgagtttcttactcgggagctggctgaagatggctactctggagttgagctgccactgcagagccccgccatggaagacacgccgttggtgatatcgaagcagaagacgg

SEQ ID NO: 522772 - DNA, 80 bp, Homo sapiens
ttcagtactcgggcaagaccaccttcgtcaacgtgatcgcggctttcggacagtcctttctccagcccgacatccacctt

SEQ ID NO: 522773 - DNA, 100 bp, Homo sapiens
ccaaatccaagcgcgacaagaaaggagaaatccagcggtcgcaccgcccattacaagttgacctccacggtgatgctgtggctgcagaccaacaaatctg

SEQ ID NO: 522774 - DNA, 50 bp, Homo sapiens
ctttatcaggatgatgcagtaacagctgcagaaccttggcctgaaaatgc

SEQ ID NO: 522775 - DNA, 82 bp, Homo sapiens
cgaggcttcacggaggaggtggcggagcgtgctttggacaccatgaattttgatgttataaagggcaagccagtacgcatca

SEQ ID NO: 522776 - DNA, 75 bp, Homo sapiens
gattccaacaacaattccgatggcaaagccgttgccaagctatatgttctcctttcagccaagacctttcaccag

SEQ ID NO: 522777 - DNA, 87 bp, Homo sapiens
agcggatcggagctgcgcgcggaaccgtgctgccccgccccgctccacccgtgagggggaacgcccttttgcttgtgactggcaggg

SEQ ID NO: 522778 - DNA, 106 bp, Homo sapiens
gaccgtgaccgagagcgtgaccgagagcgcgaatatcgtcatcgttagaagtggaatggtgcccagcaaaagcagggagtctgtggcatctgaaggctcaaaccag

SEQ ID NO: 522779 - DNA, 101 bp, Homo sapiens
aaacctggccctcttcaatttctgacaaaagttggatgtactggaatatatacatgaaaatgaatatgttcatggtgatataaaagcagcaaatctacttt

SEQ ID NO: 522780 - DNA, 100 bp, Homo sapiens
agaccgtcctggcgcgatgcgtcaagtacactgaaattcatcctgagatgaggtactccaaagattcaggtttactcacgtcatccagcagagaatggaa

SEQ ID NO: 522781 - DNA, 100 bp, Homo sapiens
agtgggagtttgccgcccgagggggcttgaagggtatccagatgataaggcccttcataacacaaggcttttatctgcttattccgccattgatcccaga

SEQ ID NO: 522782 - DNA, 90 bp, Homo sapiens
cggagagcgcggcggagctggcccgcagtattggtaaaggttttcaaggtgtcatgaaaagatggggatttaaaggccagcctgctacgc

SEQ ID NO: 522783 - DNA, 51 bp, Homo sapiens
ccccggcggcagcacgaaagtaccatttgccattacccagggaggagcaat

SEQ ID NO: 522784 - DNA, 82 bp, Homo sapiens
atcgtgatcccggcgacatactacctctggccccgagatcagaatgccgacagatttgaccagttttgggccatcaatcgga

SEQ ID NO: 522785 - DNA, 83 bp, Homo sapiens
cagaagtacaacgtgcgatccatgcccatccgaaaggatgatgaagttcagatcaatgtccgagttaccaccatggatgcaga

SEQ ID NO: 522786 - DNA, 100 bp, Homo sapiens
taacacatctgaaaatgatgagcaaaatgctgaggatttgccttcacagttgttgatcacatagcatggtcatccactcacagcttaaaaaaatacaggg

SEQ ID NO: 522787 - DNA, 100 bp, Homo sapiens
tgctcactcccttaatctgtccgtctagaggtttggcttctacaaaccaaggttcatcatgcctagtggcgtataagaagaccccgccaccggtccctcc

SEQ ID NO: 522788 - DNA, 89 bp, Homo sapiens
gctgagtcagtgtgacagtccatatgtaaccaaatattatggatcctatctgaaggacccagatgatgtggtaccagttggccaaagaa

SEQ ID NO: 522789 - DNA, 133 bp, Homo sapiens
tgtttgaagatcatgtgtgaaatcctaagtggattgcagttgggagactttctcattaaggtcacaagctacctaactaagaagtttgctgaactacgcagccccaatgagttcaaggtgtacatgggccacg

SEQ ID NO: 522790 - DNA, 98 bp, Homo sapiens
gaaagaagccttctcaagtgggaacaaaaatgagtgtgaggcgaacagccatcccgggcactatgtgaatttgggacccaacatgagtgaagtttcct

SEQ ID NO: 522791 - DNA, 98 bp, Homo sapiens
tccatccggagcggcatgttccggggtctggatggcttgaggaccctccatctgtaggcgcgcctgcggtgaaggcttctgctcccagcccaacctgt

SEQ ID NO: 522792 - DNA, 98 bp, Homo sapiens
atcgttctatttctctagctattgccttattttttctcatggatgttcttcttcgagtatttgtagaaggtgtaaacaggaacatcgataagtagtgt

SEQ ID NO: 522793 - DNA, 121 bp, Homo sapiens
ccaagttctgcagccagtgcggagagaggctgcctcctgcagcccccatagcagaataattctgtagctcgtgcagtaatgcagtcccaaaagccacccaaaaattgtagagaagctttta

SEQ ID NO: 522794 - DNA, 75 bp, Homo sapiens
ggatattggccctttggccaggagatcatcaatgctgtggtactgttgattttattgagtgccctggctgatccg

SEQ ID NO: 522795 - DNA, 75 bp, Homo sapiens
ccaatggcacggaggcctgcgtgagggtgaggacaaaatcttcttaatcaacaagcttcactccatctacgagag

SEQ ID NO: 522796 - DNA, 100 bp, Homo sapiens
agaggtgcgatcacaactgaaactcaggttttgatggtacagtccaggtctatgatgccacatcttgggatggaacacggagccaagatggaacacggag

SEQ ID NO: 522797 - DNA, 100 bp, Homo sapiens
ctatgtggcagagcacgaggatggtgtctactggaagtactgtgagatacctgcttgccagagttaaaaatgtgtctgcaggcacacaggacgtgccttc

SEQ ID NO: 522798 - DNA, 89 bp, Homo sapiens
caagaccaaggaaaagctggcacagaccgccacgggcttcattgaggaccctgagaggaagtatcactttgagtgcagcagcgaggagc

SEQ ID NO: 522799 - DNA, 100 bp, Homo sapiens
ccagactgaggaagacccggaaacttaggggccacgtgagccacggccacggccgcataggaagctcttcgtgtggtgaagatcttacagaaccttgatc

SEQ ID NO: 522800 - DNA, 83 bp, Homo sapiens
atgaagaagaccttgaaatgcatccgctggtcgctgccggaaatggccagatgcctgaggaaacccagacccaagaccaaccg

SEQ ID NO: 522801 - DNA, 74 bp, Homo sapiens
acatggacatgagccccctgaggccccagaactatcttttcgattcaccagaccagagcacttgggcagcagcg

SEQ ID NO: 522802 - DNA, 90 bp, Homo sapiens
gtggaagatgaaatgcaggttcaagaatgtgaacctgagaaggtggaaatcagagagaggcttcagggatgacttcttagggggcagggg

SEQ ID NO: 522803 - DNA, 96 bp, Homo sapiens
gaagacttatgaacgccttgttgcccagttccccagttctggcagattctggaaactgtacattgaagcagaggatttcgaactcaacaatgaact

SEQ ID NO: 522804 - DNA, 80 bp, Homo sapiens
cagctcgtcgcgctccgcacaaagtattagaaaactactcggatgctccaatgacaccaaaacagattctgcaggtcata

SEQ ID NO: 522805 - DNA, 75 bp, Homo sapiens
cctgacgcctccattaccatgtgcccctcctgcttccagaacctgatgttgttgttaaacgacaagaagctttag

SEQ ID NO: 522806 - DNA, 75 bp, Homo sapiens
cagccgatccagcctgcggagcctgtggggcagttgaaacattgtagtcggtatatacatgacttatttccttca

SEQ ID NO: 522807 - DNA, 82 bp, Homo sapiens
ggctatcacaagctgcaccagcttctaaccgaattagccgatgaattacatatgccatctctccctgaaatgatgtttggag

SEQ ID NO: 522808 - DNA, 99 bp, Homo sapiens
caagcagggagtgagatcggttgctggaaaactctccgtctttgctaatggagtcgtgacttcaattcaggtgaccaagaatatggcccaggtgaccaa

SEQ ID NO: 522809 - DNA, 82 bp, Homo sapiens
tgaagcagaaagcaagtgaatacgagtcagaaggatgctttcattggatttggaggaaatgtgatcaggcaacaagtcaagg

SEQ ID NO: 522810 - DNA, 75 bp, Homo sapiens
aacgggcggcccctggagatgattgagccgcgcacgctacagtacaagtggtggacttgctttgtgaagagacag

SEQ ID NO: 522811 - DNA, 83 bp, Homo sapiens
attgtcccagatatagccgttggtacaaaggtctccgtgaggccgggtgacgctccagaatgggagacaagccaatttgggag

SEQ ID NO: 522812 - DNA, 87 bp, Homo sapiens
gtagagggccgactcttcccatgaaggtgctggagaatctggtaaaagcaccattgtgaagcagatgaggatcctgcatgttaatgg

SEQ ID NO: 522813 - DNA, 50 bp, Homo sapiens
gctgtggatgctctttgtctcagtgtggaaggggagtatgtcccagtgga

SEQ ID NO: 522814 - DNA, 80 bp, Homo sapiens
caggcccgtcgcagctccattaatgcaactaccattacactaagaacccttaggagaaatcttgagagtggacagcaatt

SEQ ID NO: 522815 - DNA, 58 bp, Homo sapiens
cccagatatagccgttggtacaaagcacggggtcactctggtgcccattgaggagttc

SEQ ID NO: 522816 - DNA, 99 bp, Homo sapiens
gcggctctgtgaagcggggcgaaaaggacctgcgcctgggggaccgcgtgctgaggaactgtgagagtgacactgaggaggacatcgccaggaggaaag

SEQ ID NO: 522817 - DNA, 82 bp, Homo sapiens
catgcccctcaggctggaacttgccctgtctcctcgcagatgaggcagtctgggcactgggaaacatagctggagatagctc

SEQ ID NO: 522818 - DNA, 75 bp, Homo sapiens
caggaacctgctttctctcgatgaggataacatccctccagaagatggacgagattgaggagctgcgggccgaga

SEQ ID NO: 522819 - DNA, 75 bp, Homo sapiens
acttggaatgaatccttctagagacgtccacggtgatctttagacagtgactgagtatggatcatttgaacgagg

SEQ ID NO: 522820 - DNA, 83 bp, Homo sapiens
aaggagctaaagcagcgtgcgttcagccctgggaagaaaaagtcagcactttttgaagtgtctgaggttataccagtcatgac

SEQ ID NO: 522821 - DNA, 98 bp, Homo sapiens
accgcatctggctggagccctgcattcgcggcgtgtgcagatcgaaagctgctttgcgtcgcagttggagcagcacccccaccgcaggtggcattgaa

SEQ ID NO: 522822 - DNA, 118 bp, Homo sapiens
ggcacaccagcaggagtgctgccagaaatttgaacaactttccgaatctgcaaaagaagacttaattcagtgcacaaatgagatgaatgtgaacatcccacagttggcagacagttta

SEQ ID NO: 522823 - DNA, 100 bp, Homo sapiens
ggtgcggctccaccccttccacgtcatccgcatcaacaagatgttgtcctgtgctggggctgacaggaacaccaagcggacagctgaagtgtggatggat

SEQ ID NO: 522824 - DNA, 83 bp, Homo sapiens
cagatggagaatatatggctggacagctagctgcttatggctataaaattacagctttggaggaattttttacatcacttgtg

SEQ ID NO: 522825 - DNA, 75 bp, Homo sapiens
ctgaattttacccttcaggttattcttccagttacacagtgaaaaaccttttgaatgtccaaattgtcatgaacg

SEQ ID NO: 522826 - DNA, 90 bp, Homo sapiens
tgattatcgagcaaaactttgggcctgtaatttctgttttcaaagaaatcaggaaagtaatggaccagtgaaggtgtggggaagcattaa

SEQ ID NO: 522827 - DNA, 100 bp, Homo sapiens
ttgctgttgcttggcctggtgggcccagtcctcggtgcggcgcggccaggtatcgagaaccttccctgcgaacttcagaggaacttccagctgatgcgag

SEQ ID NO: 522828 - DNA, 80 bp, Homo sapiens
cggaaaacctgaagggccttgacgatctggacgccgatgccgatgatggctgggcaggagaagtgtttgaaattgaagag

SEQ ID NO: 522829 - DNA, 100 bp, Homo sapiens
ctggagagcttcatcaaaaatagtgatagctttgataattgccaccttccagagaagaggtacgagatgacaagacaaccataaagtgtgaaacctcccc

SEQ ID NO: 522830 - DNA, 100 bp, Homo sapiens
ggcaggggctgctgcgagctcgccgggcgccctttagacgaaagtgatgaagcattgggcccaacaatgatgagttggaatgcagttgaaaagttatgcg

SEQ ID NO: 522831 - DNA, 82 bp, Homo sapiens
tttcgccgtcatgggcgcctcggccgccatggtcttcagcggggacggcaaaacagaacagaaaggcggagataaaaagagg

SEQ ID NO: 522832 - DNA, 75 bp, Homo sapiens
cggttgcgccttcttcctggacatgaccaactgcgggtcctcctcgccctggtatgatgccagcaccccatatgg

SEQ ID NO: 522833 - DNA, 100 bp, Homo sapiens
cttaaagggacagggactgctgcaacctacggggtgtacttgggaacgaggggtgaagcggcccagaattcctagaggacctgtgcaacaacctcttgag

SEQ ID NO: 522834 - DNA, 75 bp, Homo sapiens
gcctctgtcactcctggtgaccagcattcaagatcgaagagcacagaatatgtgtctgtgttaggaaacgcccac

SEQ ID NO: 522835 - DNA, 75 bp, Homo sapiens
ttggacttctcagcctccagaatggatcttactcagtgtgttacatgccaagaaaaacacattactgtaaagaag

SEQ ID NO: 522836 - DNA, 97 bp, Homo sapiens
tgtaacttctcctttaagactaaaggtgtcatggagaaactccagctgggcccagagattctgcagcgggaaaatccaaggcttatttatgccaggc

SEQ ID NO: 522837 - DNA, 80 bp, Homo sapiens
ggcaagatggcggcgcccagacaggcctggagcacgtagaattgggctatttgctgaagcttcttggtggcccttgctag

SEQ ID NO: 522838 - DNA, 90 bp, Homo sapiens
tcctactcaggtccttgactccatgaagcttaccccctcaggcaggctggcagagagcaggtctctcggccagaacacgtggatgcccac

SEQ ID NO: 522839 - DNA, 75 bp, Homo sapiens
cgtcgatcaggactggaggaagccacgtttcaacagggcggcgactggcggcgcgatggacctgaccgggctcct

SEQ ID NO: 522840 - DNA, 98 bp, Homo sapiens
agagctgtgcctcccagcaccacagtccttctgcagtccctcgtccagccacccccaggtacttcaggtcatgccttctgacagcttctttttttcca

SEQ ID NO: 522841 - DNA, 100 bp, Homo sapiens
gaatgagcctctttgatctcttccggggctttttcggctttcctggacctcggaggttaccttttcagccaagggcatctgacccgtgctatttgctgtc

SEQ ID NO: 522842 - DNA, 83 bp, Homo sapiens
ctgcaggatggcgcggccgagtccccgtacggccacccggcgggagctctgtgtgtcgtctgagcagtcgcgagaagatttcc

SEQ ID NO: 522843 - DNA, 100 bp, Homo sapiens
gtctgcggaagtgcagctgcctcagttcttagcgcaggtggaaccgtcccaaaatgtcccttgctcagaagaaggatcgggtagctcaaaagaaggcaag

SEQ ID NO: 522844 - DNA, 75 bp, Homo sapiens
tgcggccgcaccgccctccgcggccgccccctggggatccagcgagcgcggctgttcacggaagaccaggatgta

SEQ ID NO: 522845 - DNA, 75 bp, Homo sapiens
ccccaaatgtctgactctgactctcggactgagaaacgcaagaaacctctgtagaggagcaggatgcaaccgaca

SEQ ID NO: 522846 - DNA, 75 bp, Homo sapiens
gggttggggatggcgtgcagcgcaaccacgagacggccttccaaggatgaccgagtgggagacagcagcaccagc

SEQ ID NO: 522847 - DNA, 75 bp, Homo sapiens
attgagatgtcccatcaagctctatgatttctacctcttcaaatgacaatcgatcaagccagaggcattccccac

SEQ ID NO: 522848 - DNA, 108 bp, Homo sapiens
cccgcgtccgccgattcctcctccttggtcgccgcgtccttggctggcgtgttgaattgaccaaagcaatggtgatggagaagcctagtcccctgctggtcgggcggg

SEQ ID NO: 522849 - DNA, 100 bp, Homo sapiens
aacagcatcactcacctctgcagctcagtcaatgggaagatctggatctcagcctcgctttgtaccgtatggagtcctccagctgcagcccagctcaccc

SEQ ID NO: 522850 - DNA, 90 bp, Homo sapiens
gcgccggctatggccgtgccctggggctgagccctcagggagtaccctgacttctaccggaagctctacggcctcttggacccctctgtc

SEQ ID NO: 522851 - DNA, 100 bp, Homo sapiens
tgggagaatatttaatggaaaatcgcttggttaaaacctgacacttttaacagaaggtggtcttctgccctgttaaagaagccctggaggtggactggag

SEQ ID NO: 522852 - DNA, 99 bp, Homo sapiens
aagaagaagatgcctttaccgaccttttcggctttgtgagaaaccttaccatcaaacacgatggccagcaacgttaccaacaagacagatcctcgctcc

SEQ ID NO: 522853 - DNA, 75 bp, Homo sapiens
ttcctgttgattctgccattgacactatatctccattgaatcagaaggtttattacccagaactctttgtctggg

SEQ ID NO: 522854 - DNA, 50 bp, Homo sapiens
gggaccgccgccgccgccgccaccatgacggagtctcactgtgttgccca

SEQ ID NO: 522855 - DNA, 97 bp, Homo sapiens
ggtggaaacagcggatgattctggaactgggagaagatggctttaaagaatacacttcaacttttcgatgtgcctactgttttttcttgaaccctgc

SEQ ID NO: 522856 - DNA, 82 bp, Homo sapiens
ccagcccgtctcgccgccgccatggcggaccctaaatacgccgaccttcccggcattacaatgcagatcttcgtgaagactc

SEQ ID NO: 522857 - DNA, 100 bp, Homo sapiens
accgcatgttcgacaagaatctgcaggacttggtccgcggcatccgtaaccacaaggaggacgaggtacactgaggaggggacggctccgtcttcacatt

SEQ ID NO: 522858 - DNA, 82 bp, Homo sapiens
ctactgtgagtcaccagaaagggaaaccagttccacgtatagctgaactcatggacaaggtgctggagaatctggtaaaagc

SEQ ID NO: 522859 - DNA, 83 bp, Homo sapiens
caggagctagtttaccagcctgtgacaactgagtgcttccacaatgtctgtaaagaatgctgtctctgcaatttgagaggagg

SEQ ID NO: 522860 - DNA, 100 bp, Homo sapiens
ggaaccttatgtgacctggggcctctactcaatagtccccccagctttgtgtgctggtctcggggcttcatggagatgaatgggcggggggagttggtgg

SEQ ID NO: 522861 - DNA, 75 bp, Homo sapiens
tggcttctcgactcggtcctgtttcgacagcgaacatgtcgcggcctgtcagggcacacgtgtttcacgttgaca

SEQ ID NO: 522862 - DNA, 90 bp, Homo sapiens
tttcaagtcattcaaagacagatggcctgaattattggaacaactttggaaagccagagctgaaaaaaagaaactacgcaaaacgttgcg

SEQ ID NO: 522863 - DNA, 82 bp, Homo sapiens
tgaccctccgccaggcaaaaggaaggcaccatgactcctgtgaggatgcagcactccctggcaggtcagacctatgccgtgc

SEQ ID NO: 522864 - DNA, 90 bp, Homo sapiens
gagaatgagtgtaattgtaaaatctgctacagatattaataaggcagcggaaagaagaaatatgaatacggctccatcaagacccagccc

SEQ ID NO: 522865 - DNA, 96 bp, Homo sapiens
ctggactcgcgtgtagcctctctggagggtggccgtgtcgtggtgggccgggagcccggtgtcacctccattgagagatgaggtttcaccatgttg

SEQ ID NO: 522866 - DNA, 100 bp, Homo sapiens
cacttccagcgtttggcagagctgtaccatggttaccatgccatccatcgccacacggctatttagcagacatgacccacaagcagaagaagcattagca

SEQ ID NO: 522867 - DNA, 100 bp, Homo sapiens
tgagaatatagacagacctgccgacattgacatgtcatgcctgggtgcagcttctctagctggccttgctgttggtgtcccagatgacctggcactgggc

SEQ ID NO: 522868 - DNA, 100 bp, Homo sapiens
gggaaacgcagcggcatccccaggctccagcaggggaaatgctgtctgtagctgagcacttcctggagcagcagatgcacccaacagtggtgatcagtgc

SEQ ID NO: 522869 - DNA, 100 bp, Homo sapiens
tggactctgaaggccacattaaactcactgactacggcatgtgtaaggaaggagtccggttctttgtggtggattgccgtcctgcagaacaatataatgc

SEQ ID NO: 522870 - DNA, 90 bp, Homo sapiens
taccacttcctctagtgctcccttcacccagccattgtcttccaatgaggttgcccccaagtttcctggcagtgtgtgatactgaggagg

SEQ ID NO: 522871 - DNA, 100 bp, Homo sapiens
cgtgctcagcgacccgcgcaagcgcgagatcttcgaccgctacggggaggaaggtccgcgggagagctgtggggcttggtgagtgtttcgtggcctctcg

SEQ ID NO: 522872 - DNA, 80 bp, Homo sapiens
taccatggcgaggagtctctgtccgggggcctggctaaggaaaccctattacctccagcaaattgtggctactaatttgc

SEQ ID NO: 522873 - DNA, 90 bp, Homo sapiens
aggcggcggtgcgtgttgctgcgagtgggacgcgcactggtcggtgccggctcaggagccgggacatgcacatgatggtgtccaagccag

SEQ ID NO: 522874 - DNA, 99 bp, Homo sapiens
tttggaacttatgattgttaatgatcacaaaacgcccactgacaaggaactgagagagactatagcattgctgacagcccaacagactgctctggaaat

SEQ ID NO: 522875 - DNA, 90 bp, Homo sapiens
tcatccttctcacctaacactggcccacttcgatgtgttgttcttgtcgcacttagggacatcaatcaaggagaagagcttttttcaaac

SEQ ID NO: 522876 - DNA, 75 bp, Homo sapiens
tataaaagttctgaaaacacaatcttctaaataattggtgggcttggattttacaggatatcttggggattgctt

SEQ ID NO: 522877 - DNA, 80 bp, Homo sapiens
ctttgtcaccaaatgtgcctttcaggtggagctggccctgctacagcgctcctaccaggacctggcctcgcagatcaacc

SEQ ID NO: 522878 - DNA, 75 bp, Homo sapiens
aacttaccaggttatctctcaggctgctgtggttcatgccacagccaaaggttgtctaccttcataacaacaata

SEQ ID NO: 522879 - DNA, 89 bp, Homo sapiens
gcggaagatggcggccggcgaaaggagctggtgcctgtgcaagttgttgagtgttctaagaacggaagcatctgggctggatggaattt

SEQ ID NO: 522880 - DNA, 100 bp, Homo sapiens
gcgactcttacatgatgaacaaagtactgatgacagagatttaccgcattgtttctcagaagcaaatgtcagacagacgcgaaaatgacatgtctccaag

SEQ ID NO: 522881 - DNA, 90 bp, Homo sapiens
accttcaagggagtcgaccccaacagcaggaatagctcccgtcccggacatgatggcacatggaatgacaatcagctacaagaaatggcc

SEQ ID NO: 522882 - DNA, 100 bp, Homo sapiens
cggcgctaggggaacccgtgcggctggagagagagcaggttgttgccctggatgcccaaaatattgtagctgtttcatgtggagaagctcatacgttagc

SEQ ID NO: 522883 - DNA, 95 bp, Homo sapiens
tcagcactgactttcagctatggaatcggaagccgacggtttagttctgataaatattgatcatgggagcatcacctactccaagtccacggacg

SEQ ID NO: 522884 - DNA, 82 bp, Homo sapiens
ggagagagcacgagcccatcagcggacaaggcaaaatctcagcaagttcggacctctagtacaataaggcgaacctcctctt

SEQ ID NO: 522885 - DNA, 100 bp, Homo sapiens
gccagatcccaaaggaattccagagttctggtttaccatcttcagaaatgtggacatgctgagtgaattagtccagaaagacccaaatgggaccagtagt

SEQ ID NO: 522886 - DNA, 51 bp, Homo sapiens
cttcttcatcaccgccatcccgatttggagatggctatatcgtcacaatga

SEQ ID NO: 522887 - DNA, 101 bp, Homo sapiens
acagaaggaggtgcagcctcccccacgtcaccaatgtcctggcaggttacaatggtaccatctttgcatatgggcaaacaggcagcgggaagacattcact

SEQ ID NO: 522888 - DNA, 96 bp, Homo sapiens
gtcttgctcggccgatgaagtgcagaggtttttttctggtggactgtctgaatcccattaatcaccagagactttgtgtgctcttcagcagctctt

SEQ ID NO: 522889 - DNA, 100 bp, Homo sapiens
gcggctgcagatggacaacgagctcctgaggcagcaggtctgcctcagccacctccctgacgctgtcccactgtgtggatgtggtgaaggggcttctgga

SEQ ID NO: 522890 - DNA, 83 bp, Homo sapiens
acagcctatgtgggcttccacggaggtagctcgtaagctggtcatcctggagggtgagctggagagggcagaggagcgtgcgg

SEQ ID NO: 522891 - DNA, 88 bp, Homo sapiens
gccgaggctgggctgaggcgccgcggtaccatgaggcgccgtgagctgaagagacgcctgaaagctgagaagaaagtagcagagaagg

SEQ ID NO: 522892 - DNA, 100 bp, Homo sapiens
gggtatcaccgccctacacatcaaactccgggccacaggaggaaatagtttcaaatcgccactgtcaccgaaaaaggtgttgaaatagagggaccattgt

SEQ ID NO: 522893 - DNA, 82 bp, Homo sapiens
atcaaatagtggaacgtataattggtggtaatcactcaaggaaaaggaattatcagagtaacaatagttcctgttactgact

SEQ ID NO: 522894 - DNA, 82 bp, Homo sapiens
ctgggcaccagcaggacccgaggccaggagccaggggcccagaagagctgttgcgcagccattggtacctgtattggggaaa

SEQ ID NO: 522895 - DNA, 75 bp, Homo sapiens
ctgacagggtatctgaagtaaaaggggaaaatgatgcatcctgttgccagcagtaatccagctttctgtgggcct

SEQ ID NO: 522896 - DNA, 74 bp, Homo sapiens
caataaaagagacctctacttagctcagcaattcttaccttaattcagaaggagctggcggacatcactttaga

SEQ ID NO: 522897 - DNA, 50 bp, Homo sapiens
gaagacagccatcatttgaaaggtggtaattgaaactttatcagtgggag

SEQ ID NO: 522898 - DNA, 88 bp, Homo sapiens
ctaaatcataaaactttgtaagtggcagaacaaggatttgaagctggcagtctggttccaggagccggtgaaacctgaagaaggcaga

SEQ ID NO: 522899 - DNA, 142 bp, Homo sapiens
ttatgtaccacctggacctgattgaaagcgactattttggtctgagatttatggattcagcacaagtagcaagtcaatacagatttgtatgtgaagctattttgaaagtttatgaagaaggctttgttaaacccttaacaac

SEQ ID NO: 522900 - DNA, 90 bp, Homo sapiens
ctgtaacaccgccctggtgctctgcccattcaaagactccggctgcaagcacaggctcagcaaccggctttttgaggaactcgccatgga

SEQ ID NO: 522901 - DNA, 98 bp, Homo sapiens
aagtttgcctcatcatcttcagtccaacaggttactttttctcgcggcacagatgggcaagaatatcacggcatgggcatgagtagcttgaaactgct

SEQ ID NO: 522902 - DNA, 96 bp, Homo sapiens
tagctttctaaacaactctgtaatgattctcacctatgccctcatgaacggacagtcattttgtttactcattcagccctgttgcaggtcccaata

SEQ ID NO: 522903 - DNA, 101 bp, Homo sapiens
accgatgtctactccatggctctggtgctctgggaaatgacatctcgctgtaatgcagtgggagaatatgagttggaagtaaagagggtgcaagacattct

SEQ ID NO: 522904 - DNA, 97 bp, Homo sapiens
gacctgaaaagagatattgactcctgtggcagtggaaagacccaagaatgccagtcaagaagacagttgctctaggtcgtaaccagcctttgaaaaa

SEQ ID NO: 522905 - DNA, 80 bp, Homo sapiens
gccgaagctgtgcttctccatgagatggttcaggaagatttgactgaagagaaaaaaagggaactggagcataatgctga

SEQ ID NO: 522906 - DNA, 75 bp, Homo sapiens
aactccctgcagaccatgcagcaggacatgataggatctgtgccagttcagaagcaggcgagcctcttccctgat

SEQ ID NO: 522907 - DNA, 75 bp, Homo sapiens
ctcgccctctgcctgctggctgcacccgcctccgcgctcgtcagttgagcagctgaacagaggccatgccggggc

SEQ ID NO: 522908 - DNA, 100 bp, Homo sapiens
gtcttgcagtctcatatttctcctctgaaggctctggctccgctactgcatcgtgtgcttctgtccaagaggcagagagactgaaactatctgctgccgc

SEQ ID NO: 522909 - DNA, 83 bp, Homo sapiens
cctgctctcaactacaacatcgtttcaggtgagccccaagccatgtgctacattgaaacatccaacttagatggtgaaacaaa

SEQ ID NO: 522910 - DNA, 75 bp, Homo sapiens
cttggtccagtctggctgcagcaaaaagcagggcagctgcaatgactctccgcacggtattattgtcattgcaag

SEQ ID NO: 522911 - DNA, 98 bp, Homo sapiens
cgacgacgacgaggaagaggaggtttctgagatcctaattatctcatggctaatgaacgcatgaacctcatgaacatggccaagctgagtatcaaggg

SEQ ID NO: 522912 - DNA, 90 bp, Homo sapiens
gaacttttattccttccagaagcaggaaccaccaaactgttttccacagaggctgcatcaattgacattcccactagcaatggatgaggg

SEQ ID NO: 522913 - DNA, 100 bp, Homo sapiens
cagcgagagaacatatccttaggcagcatcacgtttgcagggggccccggcagggatggcaccattgacttcacacccggctcggagctgctcatcacca

SEQ ID NO: 522914 - DNA, 100 bp, Homo sapiens
ccctgaggagcgtcagccatgagcagcccgacggccatggaggctgaagagacgatggaatgccttcaggagttccctgaacatcataaaatgatcctcg

SEQ ID NO: 522915 - DNA, 90 bp, Homo sapiens
gcccgcgaccgtccgccagtcgtcccgagatggtcatcatgggccagtgctactacaacgagaccatcggcttcttctataacaacagtg

SEQ ID NO: 522916 - DNA, 95 bp, Homo sapiens
gaatcattcacagcatatcttgaaagatgtcattcctccattggaacaactggaaatggagcagtcaatgaatatgctgaattccaaccatgagt

SEQ ID NO: 522917 - DNA, 90 bp, Homo sapiens
cctgttccgcttctcagaggacgccttcaacaccaccttcatctccaccatcggacagtcattttgtttactcattcagccctgttgcag

SEQ ID NO: 522918 - DNA, 96 bp, Homo sapiens
ctacaaagactggaaactattcttagctccgtcactgactccaagttcatcccctctgtctttcagtttgggtctcttcagagctgctgtgcccag

SEQ ID NO: 522919 - DNA, 75 bp, Homo sapiens
aacccagttcctggtggcacatacagtgccctttgtattaaggatgaagcattatgggtttgtgctgtaccggac

SEQ ID NO: 522920 - DNA, 99 bp, Homo sapiens
gtatgcaaggccacgacccacgagatcatggggcccaagaaaaagcacctggactggagaagatgtcaaccggacactagaaggtggaaggaaacctct

SEQ ID NO: 522921 - DNA, 90 bp, Homo sapiens
cgcccagagccgcctggaggacccagccgaatatgtgggagtccatgtcctgcagtgtggcctgatgtaatcaaactaccatatttcaac

SEQ ID NO: 522922 - DNA, 96 bp, Homo sapiens
ggcggagtgtgctcacggctcctgctgccaccagtgtaagtattgacttgaagctgaaagaaaagccttagttggccatgctggaagaagaggatg

SEQ ID NO: 522923 - DNA, 95 bp, Homo sapiens
tacttcctttccgtgcataagaagccgaatggtttaaacttacacgaatcgctttctggaggaggaggggacccgctgcgcgattgacacgcata

SEQ ID NO: 522924 - DNA, 98 bp, Homo sapiens
ctgggatgatacaccttttccacagggaattgagttgggctacaccaagtccattgatatttggtctgtaggctgcattctggcagaaatgctttcta

SEQ ID NO: 522925 - DNA, 100 bp, Homo sapiens
ctgaaagaaggggtcatcaagatccgttcagtggccagcagagaggaggttcgtgctgtgtttgataatctgattcaattggagcatcttaacattgtta

SEQ ID NO: 522926 - DNA, 102 bp, Homo sapiens
aaggacatggctgtgcggggccggctgctcactgccctggtgctccccgacctgctgaaatacccgcagcccaaagggcagaagaagaagaagatcgtcaag

SEQ ID NO: 522927 - DNA, 83 bp, Homo sapiens
ggactccttcggcagtccacccaccgccgccgcctcccagcctcggctctgcgcacgcccatctccatcaccagctcctatgc

SEQ ID NO: 522928 - DNA, 100 bp, Homo sapiens
aaggtgatgaggttgaagatctctatgagcttttgaaacttgttaagggtcctgtattaataggaagttcacatggtggtgtcaacattgaagatgttgc

SEQ ID NO: 522929 - DNA, 76 bp, Homo sapiens
atggcgccggagctgaccccggaggaggagcagccatgtgaagacgtgcctgcctccctgttaccttccaccatga

SEQ ID NO: 522930 - DNA, 100 bp, Homo sapiens
ggggaggtcacctgacgaggagaaaaggtggacaagtcctattttcaagagaagatgacttttaacagttttgaaggatctaaaacttgtgtacctgcag

SEQ ID NO: 522931 - DNA, 100 bp, Homo sapiens
tatccagaagactccaaatgaaccgcagttggaattcatccttggggtctcgggaacagcttgcgattgcagagtttgcaagatcacttcttgttattcc

SEQ ID NO: 522932 - DNA, 75 bp, Homo sapiens
tttatcttattaaatttatgaacttacaaagtgcaaggatgggcaacactccagattcagcctcagacaacctcg

SEQ ID NO: 522933 - DNA, 100 bp, Homo sapiens
ttaatcaacctgataatgaaggctggataccactacatgcagcagcttcctgtggatatcttgatattgcagagtactaggttttgacaagcttgcatca

SEQ ID NO: 522934 - DNA, 75 bp, Homo sapiens
atacccatctttactggcatcctaaaggaaaagatcttggtctggcatttgaaataccaccacatatgaaaaacc

SEQ ID NO: 522935 - DNA, 75 bp, Homo sapiens
gacttcctcacccgcgcctgcgacctcggacccgtgcatctcttccgactctcgggcaagtgcttcagcctggtg

SEQ ID NO: 522936 - DNA, 100 bp, Homo sapiens
gccacacctagactgatgcttattagtcatcaccgttattcctactaacgtcctgtgtcactgagatgaagggcgccctaatggagatcatccagctcgc

SEQ ID NO: 522937 - DNA, 100 bp, Homo sapiens
agagacaaaattcagggcttccaggcaaagggagaagctgatatcctggccgcgctgcccagtttactgtcgtggggccagctaatcccatcctggccat

SEQ ID NO: 522938 - DNA, 100 bp, Homo sapiens
ggcctcccaccaaaaccaagcactgacatgccactcatggtttggcctgtcactgctcctcatcctcctgagccgtggtgaagacctacagagttcagac

SEQ ID NO: 522939 - DNA, 83 bp, Homo sapiens
ctccctgccaggctcttcatccaagatcgttaactgaagacaatatgcaaaattctcacatggatgaatacagaaattctagt

SEQ ID NO: 522940 - DNA, 90 bp, Homo sapiens
tatctgtcttcggtggactccttcggcagtccacccaccgccgccgcctcccagggcgaactttctgaccaagtatacaactacccagag

SEQ ID NO: 522941 - DNA, 78 bp, Homo sapiens
ggcgctctcctggctcccttctgccccagctccgtctcggcggcggcgggatacaatatcacagaagtctgtagatat

SEQ ID NO: 522942 - DNA, 74 bp, Homo sapiens
agagcttgaaagcgaagttcaggaagagtgacgcgatatgagtctcatccagtctgtgctgatctgcaggccaa

SEQ ID NO: 522943 - DNA, 88 bp, Homo sapiens
ggcgatggagctgttatttttagatacttttaaacacccgagcgctgaggtctcgctctcgaagcagacattcccgtaagagcagaag

SEQ ID NO: 522944 - DNA, 102 bp, Homo sapiens
ccctcagccagaagggctacgccagcggcgtcgagaggaccatcctgggtgctggccctgtgctggagagcaatggtggaacaaagcggcaaaagatatccc

SEQ ID NO: 522945 - DNA, 50 bp, Homo sapiens
gtcatctggcgaaagctctacgtgatgatcacagtcgtgttaaactgcaa

SEQ ID NO: 522946 - DNA, 75 bp, Homo sapiens
cagacaactaagcgaggggatcctcatgagttaagaaacatatttctacaggggtgtctgaagatgaatccagat

SEQ ID NO: 522947 - DNA, 74 bp, Homo sapiens
gaccccctgatggcccccaccttcccatccagaactgtaagagtaaatgggtccagtaattggaatgactccag

SEQ ID NO: 522948 - DNA, 103 bp, Homo sapiens
caccaggccggcaggctgagaaaagcgagaccgcgtgcgaggaccgttcaaatctgaacatcaatgatgtactagggaactactcattgactcttgttgatgc

SEQ ID NO: 522949 - DNA, 100 bp, Homo sapiens
tggcatgagaggcatgaagggattggtctatgaaacatcagttcttgatcctgatgagttttttgctccactcaagcctgttagaatcaccatggaatac

SEQ ID NO: 522950 - DNA, 100 bp, Homo sapiens
ggacaggccacgctgtccgtccgcagtaccgacgcctgcaggccgagacgcatccagagctttcgtgaccggggactgttctgaagcaggcctcgtggat

SEQ ID NO: 522951 - DNA, 75 bp, Homo sapiens
ccgagaaatgctagaaaaattgactgtatcctatgatgaagcaggagcccagcagccggggccgccctattacac

SEQ ID NO: 522952 - DNA, 82 bp, Homo sapiens
cgcgagggccctgggcaaggcccgacagttccagggtcacccccgagaggacaacaggcatctggaagtgctctctcgccac

SEQ ID NO: 522953 - DNA, 82 bp, Homo sapiens
tactcacttgtagatccagagaaagccaaagcttcttctgtaagctggatatatcccctttgtaaacagaagaggaaactga

SEQ ID NO: 522954 - DNA, 100 bp, Homo sapiens
gtgttggcgtggcccagcatctaactaacacggtttttattgacagagctctgatagttgttccttgtgcagaagaattggcagagggggtcgatttggg

SEQ ID NO: 522955 - DNA, 82 bp, Homo sapiens
tgtttcgaaaatgtgtgtgaattggatttgatcttccatatggataaggaaccctaaggactctgcaatatgaataattccc

SEQ ID NO: 522956 - DNA, 100 bp, Homo sapiens
ctgcttaggattcactgcacatcgaattaagagagcagaaggatgggaggaaggtcctcctacaggacccacgcagaggccgtcggacaacagtcacaat

SEQ ID NO: 522957 - DNA, 73 bp, Homo sapiens
gactttgacagcaagctgagcttccgggagctccactgccgcctcccaaggaggtcatcaacggaaacataaa

SEQ ID NO: 522958 - DNA, 75 bp, Homo sapiens
gaaggtggcggcgctgctgctcgggctgctcttggaggcgccttcaggaggaagaccagcagtttagaacctcat

SEQ ID NO: 522959 - DNA, 90 bp, Homo sapiens
agttggagcagtagctctgctaattgggccaaatgctcctttaatttttgaacgaggacgatactttgatgaaatcagccaggacacggg

SEQ ID NO: 522960 - DNA, 51 bp, Homo sapiens
tttcctccagagattgtggagcagatggatggccgaggctggcttcatcca

SEQ ID NO: 522961 - DNA, 98 bp, Homo sapiens
cagtggcttccggaagttcctggtccacaacgtcaaggagctggaagtgctgctgatgtgcaacaagagtcaaattgactttatcagctttaatcgat

SEQ ID NO: 522962 - DNA, 75 bp, Homo sapiens
tcactgtggtgctagatgctgctgtcgggttttaggagaagttttagcacaacttctgcttcttcccaaaaggag

SEQ ID NO: 522963 - DNA, 88 bp, Homo sapiens
cagctctgacttgaaatatagaattctggctcaggcagctgtccaaggacctgttggtacagatttcaaacccttaaatagtacccct

SEQ ID NO: 522964 - DNA, 124 bp, Homo sapiens
caacaacagcaacttgtgattggcggtgaccggatattcagttgcacatccccacatcaatgcactgccaatggttggtactaagaagtgcctttcctgacgtctctgctgcttggaaccgctt

SEQ ID NO: 522965 - DNA, 100 bp, Homo sapiens
ggacatcactttagaccctccacctaattgcaggaatcaaacattttaagtccagtgcaggatggaacaaagaaacctcagattgacagcaacaagagca

SEQ ID NO: 522966 - DNA, 100 bp, Homo sapiens
gagcgtcccggccttcatcgacatcagtgaagaagatcaggaattatccagactgccttgccactagatgaatggaagacaatgatttgaactaagggcc

SEQ ID NO: 522967 - DNA, 124 bp, Homo sapiens
gccaatgtgggatcgatgtttcaatattggaagcgctttgatttacagcagctgcagggaaatcctcattgacgattcaatttgttgaaggccaatttgtggactcctacgatccaaccataga

SEQ ID NO: 522968 - DNA, 83 bp, Homo sapiens
cgctcacctgcgctgtgatgcctgcagagctgtggcttaccaggcccagagcatgattcccatcaatgagccctatggagatg

SEQ ID NO: 522969 - DNA, 73 bp, Homo sapiens
ggagctccacgacgagctggaaaagatgagctttgatccaaaccttctccacaacaatggacataatgggtac

SEQ ID NO: 522970 - DNA, 76 bp, Homo sapiens
attggactgacttttcttatgctgggatgtgccttagaggattatgggatgcattcagtctactagcatattcaga

SEQ ID NO: 522971 - DNA, 82 bp, Homo sapiens
gaccagggacctgcccgcctgcggctgctccgggagccttcacgtaaatgggtccagtcatgcctcccagtaagaagccaga

SEQ ID NO: 522972 - DNA, 83 bp, Homo sapiens
gactttctccttcaagtacttggcagatcactctcttagcagaataactgaagtgaagtgatggactccgatttggagagtag

SEQ ID NO: 522973 - DNA, 96 bp, Homo sapiens
gactactgacactctcatcaagacctttgtgcgctcgcagaccacccaagggtctggcgtgcgtcagtacaaggctgcggctggcggagcgcaggc

SEQ ID NO: 522974 - DNA, 75 bp, Homo sapiens
cctgatatccctgaccacttcctgtgtctgtgggagcactgtgagcaaatatgttgatgaggagaactcagacgg

SEQ ID NO: 522975 - DNA, 90 bp, Homo sapiens
aaatcatccactacttcgacaaaggcaagaggtggaggagacactgaagcgactgcagagccagaagggagtgcagggaatcatcgtcgt

SEQ ID NO: 522976 - DNA, 146 bp, Homo sapiens
ctggaagctcttcagcccctgcagcccgagccgccccccgagcccgccttctccgaggcgcagaagtggattgagatccctgcatgtcactgagtccaccatgctttacagaagaagacagatttagtctggaagctcttcaaaca

SEQ ID NO: 522977 - DNA, 100 bp, Homo sapiens
ctttggatgctttattgtacaaagatgagctttgatccaaaccttctccacaacaatggacataatgggtaccctaatggtacttcagcagcactgcgtg

SEQ ID NO: 522978 - DNA, 100 bp, Homo sapiens
acagtgaagggattcaggatatacggtgcaccttggatcggaaaatagaagatcttcgacagtgcctgaacaggtacaagaaaatgcaagacacggtggt

SEQ ID NO: 522979 - DNA, 100 bp, Homo sapiens
ggtttctaaaatgatcattgaaaacttcgaggcactcaagtcctggctcagcaagactctcgagcccattgagatggaagattttcgaggtatagcagaa

SEQ ID NO: 522980 - DNA, 51 bp, Homo sapiens
ctacaagggaaattgtttatgtgcagctaaatcaagtccagcagctaaacc

SEQ ID NO: 522981 - DNA, 83 bp, Homo sapiens
gtcagccagttccgctcctgtcagttggaatcgaagcctcttaaaatggcagatgacttggacttcgagacaggagatgcagg

SEQ ID NO: 522982 - DNA, 89 bp, Homo sapiens
gccatcgttgctgccttcttcgtcaagctaccaagtcaggattgttacccccaccacctgcgctccctccaagaccttgtccatcacag

SEQ ID NO: 522983 - DNA, 76 bp, Homo sapiens
cccggggacggcgaggccctcatgtaccacacgagtcctatcaatgatttagttccctagagaaaatcagaaagta

SEQ ID NO: 522984 - DNA, 100 bp, Homo sapiens
gaccagtatgccaactacgtggtccagaagatgattgacgtggcggagccaggccagcggaagatcgtcatgcataagctgcaggtggagctggagcaag

SEQ ID NO: 522985 - DNA, 90 bp, Homo sapiens
ttttttctggagctgatcttagaaacctctgcacagaaaaaagagtctcatcgtggaaggcaagagggaaaagaaaaaagtagagaggtt

SEQ ID NO: 522986 - DNA, 75 bp, Homo sapiens
aaatcgcctgctacaaaaacaaggtcgtcggctggcggagcggcgtccgacaactgccccttcaaactcttccag

SEQ ID NO: 522987 - DNA, 82 bp, Homo sapiens
gggcctcgcgccggctatggccgtgccctggggctgagccctcagccctgccaggagcccggaagtgggtccgcacgagaca

SEQ ID NO: 522988 - DNA, 75 bp, Homo sapiens
aaacagagcttttggaatctgaacaagggtctgttcggcacttgaagtactccttgtttaagaaatcactactgg

SEQ ID NO: 522989 - DNA, 90 bp, Homo sapiens
atgtgatgttagagaactacagaaacctggccttcctgggtaaaaccttgttagccaaagcagtagcaaaccaaacctcagccactttct

SEQ ID NO: 522990 - DNA, 75 bp, Homo sapiens
ccaactgctcctgcacccgggaggactatgagtggtgtgatccctcacatccacaaatctctgattggaaagaag

SEQ ID NO: 522991 - DNA, 82 bp, Homo sapiens
ccaaacaagtgctcctacattctggccatgtgtttatactgtgggatctcccataaacaacagggccctttttccatgccag

SEQ ID NO: 522992 - DNA, 75 bp, Homo sapiens
cgttctcgtaaggacaaaacgggactggctagttaaacaaagaggctgggacgtgatgcctgggccacggcagga

SEQ ID NO: 522993 - DNA, 101 bp, Homo sapiens
tggccgtcaaggagctggacctctacctggcctacttcgtgcgtgagcgaggcacagagaagttgcccatgactctgtgatccgttttgtccaatgaacca

SEQ ID NO: 522994 - DNA, 101 bp, Homo sapiens
caaggtgggagctgaggctgatcagaactatcagaactacatcttaaggggaactgtctatcttgaccatgcaggtgccaccttgttctcccagagccagc

SEQ ID NO: 522995 - DNA, 90 bp, Homo sapiens
gtactgtgcgtatctggcgtcagtatctaccaggcaatgaacaaggcccagcttcccgatcagtggagacgttgaaggagatgattaagt

SEQ ID NO: 522996 - DNA, 48 bp, Homo sapiens
acccccacaatggggctgacgatggtaaccttacctgtctacctgaac

SEQ ID NO: 522997 - DNA, 88 bp, Homo sapiens
gacggctgtgtcgcagcctctcgggatgacaccactctgaatgcactgaacacagaaccctcaaaggctgagagtatcccacccactt

SEQ ID NO: 522998 - DNA, 98 bp, Homo sapiens
gaaactgcaggatatacagcagcgaggaggggaagagagggtttgactgccgatgtggaaatttgttttgtggacttcaccgttactctgacaagcac

SEQ ID NO: 522999 - DNA, 145 bp, Homo sapiens
ggaatatttgaagtttgctggaatgcagcaggagacaaagttggagccagtgcatcagatggttcagatgctcgtcagaagttccgctctgttctggttgaagcaacggtgaaactggatgaactggtgaagaaaattggcaaag

SEQ ID NO: 523000 - DNA, 74 bp, Homo sapiens
aagctcacctttgtctaaataaggctttgcaccatttatctcgcctgagagacctggttgatgatacgaatgga

SEQ ID NO: 523001 - DNA, 74 bp, Homo sapiens
atgatacctttctaacagcccaaaccgagaaggacatcctgctgcgacctgagctggaggaactcaggaacaaa

SEQ ID NO: 523002 - DNA, 51 bp, Homo sapiens
gaaagcaggcgaacccgcggcgcaataacgctcaaactttggaacaaatac

SEQ ID NO: 523003 - DNA, 100 bp, Homo sapiens
ggatccaggctgtacattgaataaaaagattcgaaatgcacagttagcacagtataacttcattttaggaaaatttctaccttgaaccgtatctgaaaga

SEQ ID NO: 523004 - DNA, 73 bp, Homo sapiens
tggagagcttgacattctcaaagactggtgctatgaagctagcgtcacggggttcggacgtcagatgatcgag

SEQ ID NO: 523005 - DNA, 80 bp, Homo sapiens
gctggtgccacagcccaaaccatcatttaccctatggagggttggattgagattgttggatgtgctgatcgttcctgtta

SEQ ID NO: 523006 - DNA, 88 bp, Homo sapiens
aggaagctacgtagctctgactgatggcttagggaacctcaccatcatcattgaaaccatgaacaatccatttcacagatgaagaaac

SEQ ID NO: 523007 - DNA, 75 bp, Homo sapiens
tgggtcccccgtgtcaactgaactggactgggctggcttagatgaagatgaagatgcacatgtctgggaggataa

SEQ ID NO: 523008 - DNA, 114 bp, Homo sapiens
accacatcttccaggagtgcagtcctggagtagtgcctactcctattcccatttgcagtgtactaatggtcacttgatgtgcgctggctgttttatccacctactagcagatgc

SEQ ID NO: 523009 - DNA, 82 bp, Homo sapiens
cgccgcgggacctctccgggccatggacctcctgccccccgaggtctgcagtctcctgaacccagcagccatctacgccaac

SEQ ID NO: 523010 - DNA, 50 bp, Homo sapiens
caccaatatccgacctagctttgactgcagagtcccagacccccacccct

SEQ ID NO: 523011 - DNA, 88 bp, Homo sapiens
cagtccttgctgaagagactttccgttacatgagagcactggccagagtccaggtattcgggaagtggcacagtgtgcccaggaagca

SEQ ID NO: 523012 - DNA, 100 bp, Homo sapiens
actccctccctgccccgcgctgacaggggggcctggccgcgcagccgcctggagtactcgggtactttgagttcagtggctcaccccagcctcctggtta

SEQ ID NO: 523013 - DNA, 75 bp, Homo sapiens
cgaaatgcttgctcaggctcagagggacctcacccctgagcagatggcctgatatgaaggagtcacgcctcccgc

SEQ ID NO: 523014 - DNA, 90 bp, Homo sapiens
aaatggcacctatggacaagtctataagcctcatgatgatcctgagacttgtcttgttgctgctctgagcatctggaggaacagaaaact

SEQ ID NO: 523015 - DNA, 121 bp, Homo sapiens
cgggtggggagaagaaatggggcctgggggacggtaggagcctccgtgcggagaccactgttcaaggccacaggtgctggagaatctggtaaaagcaccattgtgaagcagatgaggatcc

SEQ ID NO: 523016 - DNA, 75 bp, Homo sapiens
cgacctgggcaccagcaggacccgaggccaggagccaggggcccagaagcaagagtgagccatggagctacgtgt

SEQ ID NO: 523017 - DNA, 83 bp, Homo sapiens
aaagaatattgtactattccggatatacaagatcactgggagggtacagagaaagcactttcaaaacttcacgagtatttccc

SEQ ID NO: 523018 - DNA, 94 bp, Homo sapiens
cgacgaggaggagacgtaccggctctggaaaatccgcaagaccatcatgcaggcgatcagtgggtgaccgcggctgcgagggactttgtcatcc

SEQ ID NO: 523019 - DNA, 51 bp, Homo sapiens
agaaaaacctgaaagatgtctcaattcctcgaggtctgaacaagaaccact

SEQ ID NO: 523020 - DNA, 82 bp, Homo sapiens
aaaaccctatctcaagaacttgttaacctccggggagagctagataagctgtcattggaaggaatagtggtacaaagagctg

SEQ ID NO: 523021 - DNA, 100 bp, Homo sapiens
ccaaatgtctgactctgactctcggactgagaaacgcaagccctgaccctctattctgcaccctgtgagccaccgagactgaaccaaacccaggaagcgg

SEQ ID NO: 523022 - DNA, 100 bp, Homo sapiens
ggacaagcaggtctaccgggccacgcaccgcctgctgctgctgggtactccaaagattcaggtttactcacgtcatccagcagagaatggaaagtcaaat

SEQ ID NO: 523023 - DNA, 95 bp, Homo sapiens
gatcctgaatgggggcggcgtgcccgccggggggctagtggccacgctgcagagcctcgatactgaagtactctttcccagtgggactaagaacc

SEQ ID NO: 523024 - DNA, 75 bp, Homo sapiens
ggccaacgccgtggccagctccactgagagaaccccagggcactgtgtttagtcttgagtcagaggaggaggaat

SEQ ID NO: 523025 - DNA, 83 bp, Homo sapiens
ggcttccgcctcgtgggcggcaaggacttcgagcagcctctcgccatttcccgggtgagaagccctaccactgcaactgggac

SEQ ID NO: 523026 - DNA, 87 bp, Homo sapiens
tgcagcaggattggctgcagcagctacattagcagggaaacactactatgaagtatcctgtcatgaccaagggttatgcagggtcgg

SEQ ID NO: 523027 - DNA, 87 bp, Homo sapiens
ttggaactgtggtccatggtaaagttttacaggaactgtggctgcaccatctgtcttcatcttcccgccatctgatgagcagttgaa

SEQ ID NO: 523028 - DNA, 50 bp, Homo sapiens
gaattcaccctgttcgtctatgagagaagaagaaggaggttcctgctgtg

SEQ ID NO: 523029 - DNA, 75 bp, Homo sapiens
ctcacactggtttctcgtgcccaccagcttgtaatggagccccagacactacagctggatttcttgatgaaaatc

SEQ ID NO: 523030 - DNA, 95 bp, Homo sapiens
atggagtcagggttgatggcatagcttggagcccagagactagacttgattcattgcctccagtaatcaaatacagacagaagctgctcagttgc

SEQ ID NO: 523031 - DNA, 98 bp, Homo sapiens
gttgaaatacgggacagaattgaatcagggagatatgaagcctccaagctatgattctggcatagaatgtcaagctaaccaggcgtccgctacttcag

SEQ ID NO: 523032 - DNA, 98 bp, Homo sapiens
ttcgacaggaaaaaaatttgctggatattgatgcgccagtcactgacggtctggaaaatcccgaagcagaagcccgtattcatctaggcattcaagat

SEQ ID NO: 523033 - DNA, 101 bp, Homo sapiens
cccgcggcccccgcgccccgcgggacccggacggcgacgacgggggaatgtggcgctggatccggcagcagctggactcacaccacccggcaagaactgct

SEQ ID NO: 523034 - DNA, 98 bp, Homo sapiens
cggagcgtccgaggcctgtgtgaacgacgtttgatgcaaatgatttgtatcaggggcagaattttaacaaggtcctcagttccttagtgactctaaat

SEQ ID NO: 523035 - DNA, 96 bp, Homo sapiens
ggactccacagtattcgacatcaaatacaggcccgatgagagaaagggaaagttaaggatgctggagcagaacaatggatttctctttctctttca

SEQ ID NO: 523036 - DNA, 100 bp, Homo sapiens
ccattctagccgaggagaacctgcccttcgccaaggagatcgtctctctcatcgaggcccaaaccgccaaggagaactacgatgacccgcacaaaacccc

SEQ ID NO: 523037 - DNA, 100 bp, Homo sapiens
ggattacaggttgatgtgggagggaaatttacctaaatattctcataactccctgatggttcaagcaataaagacaaacctaacagacccggacatacat

SEQ ID NO: 523038 - DNA, 100 bp, Homo sapiens
ggggaagacctgcgtcctttttcgtttttcggatgatgccttcaatactacctttatttccaccataggcaacttcaaagtgggagttcacattgctgac

SEQ ID NO: 523039 - DNA, 100 bp, Homo sapiens
agcctgttgaaagaacccacaggtgcatttcacagcactctgggcgaaaattggatgtgaaaatgaagccagaccgagggtcctagcacagtgtctgatg

SEQ ID NO: 523040 - DNA, 82 bp, Homo sapiens
agaagaccccggcgctggtgaacggacatggatttgattgacatactttggaggcaagatatagatcttggagtaagtcgag

SEQ ID NO: 523041 - DNA, 51 bp, Homo sapiens
gtgacccggtgcagctagaagtccatatcgaaatggactcggcactactgc

SEQ ID NO: 523042 - DNA, 100 bp, Homo sapiens
gtgacagtctgcatgtgcagttttcagacaagcaaagtggatcagcaaaggctgcagtcaccagcatcttttccaaccttaatgaactgtatcctcaaaa

SEQ ID NO: 523043 - DNA, 100 bp, Homo sapiens
cgaaaggggaggccgcccccggccccgcgccccctgccccggaggcgacccctccgccggcctcggccgcggggaaggcacagcgtcaccttcgtcccct

SEQ ID NO: 523044 - DNA, 100 bp, Homo sapiens
ggaatttacaggaagagatagtgtcacctgccctacttgtcagggaacaggaagaattcctaggggtatcgaatgataacagaaggcggagtcagcataa

SEQ ID NO: 523045 - DNA, 98 bp, Homo sapiens
ccgcctgaggaggcgagctagccgggagttacaccgccaccgccagaaactaattctgaagcaagcccttatagttgtgctgcagtggtgtttcaatc

SEQ ID NO: 523046 - DNA, 90 bp, Homo sapiens
agtttgcgggactcagtcccatcactccaaggagagaaggtctgggataaaagtgaaagtggtgattggcattgtactgctagctggaag

SEQ ID NO: 523047 - DNA, 83 bp, Homo sapiens
ctatccttacccgacctcagatgctcccttctgctcctggtcagcccaaggccaaccccactgtcactctgttcccgccctcc

SEQ ID NO: 523048 - DNA, 90 bp, Homo sapiens
aaagaagaaagaaaaaggcagtgagacagattcagcccaggatcagcctgtgaaggaagagagaagggcacagttacctaagtatcaacg

SEQ ID NO: 523049 - DNA, 51 bp, Homo sapiens
gttggagattctgcggcgaatacgccagatgttgttccacaatctatgcaa

SEQ ID NO: 523050 - DNA, 96 bp, Homo sapiens
aatgctgtatccaatgctcaggtgagaggtgatagctatgaaagcggctgtttaggaagaacagataaacaacttgatgcagatgtttcccccaag

SEQ ID NO: 523051 - DNA, 73 bp, Homo sapiens
acatccagaaggagtcgaccctgcacctggtcctgcgtctgagaggttgatctttgccggaaaacagctggaa

SEQ ID NO: 523052 - DNA, 51 bp, Homo sapiens
tggaaacaagtgcgacctctcagatattagctttaccgatttgttacaact

SEQ ID NO: 523053 - DNA, 110 bp, Homo sapiens
cttatatgatgcaagatgtggcagaagaacaagaagttgagaccgagaatgtggaaacagtgtgtgcaggaacggagaataaactgagctctctctctgacctggaacag

SEQ ID NO: 523054 - DNA, 90 bp, Homo sapiens
ctgagttcctggacgtgtacaagaactgcaacggggtggtcatgatgttcgacattaccaagcagtggctctgaccaagaatgacaggag

SEQ ID NO: 523055 - DNA, 83 bp, Homo sapiens
tttctgccctgaaccagggcagaagcttatgagaccctcctggatgacttccttctcacgtacactgtcttcatgacaactga

SEQ ID NO: 523056 - DNA, 104 bp, Homo sapiens
caggtggccatcaaagtgattccccggaatcgtgtgctgggctggtcccccttgtgggctcgggatgagtttgaaggcctcttcaagcagccagcagaaaatgt

SEQ ID NO: 523057 - DNA, 75 bp, Homo sapiens
ctggctcagtattcacagggaaagctgtgaggattcttgagtatcagaacaccaccttctttggtggaacctgta

SEQ ID NO: 523058 - DNA, 75 bp, Homo sapiens
gtttacatgagcatctgtggggagaatgaaaactgccctcctggcgtggatcgagacatgtaagcagcatcatgg

SEQ ID NO: 523059 - DNA, 119 bp, Homo sapiens
acagctagtatcatgacagcagcttcagaaccagagctggcttccaggttcgtcacaaggcatcgcagaaggtttatgctatgaagcttcttagtaagtttgaaatgataaaaagatca

SEQ ID NO: 523060 - DNA, 98 bp, Homo sapiens
taagactgcatctgttcatatgagccacataactcatcagaatggttttcaagtctgtccacattttgtgggacatggaataggatcttactttcatg

SEQ ID NO: 523061 - DNA, 75 bp, Homo sapiens
gccaccacccactccggacacaggctccccacaggtgcaggaagccgccgcccagccatggacggggaggagcag

SEQ ID NO: 523062 - DNA, 90 bp, Homo sapiens
ctgctgcaccgacctcgacgtcttgcctgtgtcccacttgttcgcggcctatagagtatggtgtttgcgaaaacttgcggaagctggaga

SEQ ID NO: 523063 - DNA, 100 bp, Homo sapiens
ggaagaggacgagccttcaggagccaccacaagatccaccaccagatcagaggctcagagggatagctgggagtatggccaccctgctccacgatgcggt

SEQ ID NO: 523064 - DNA, 100 bp, Homo sapiens
gggcgagcgaggaggatggcggagtcggggctcctgacgctccagggtttgagccacaatgtgatcttcaccttggattctttgttaaaaggagacctaa

SEQ ID NO: 523065 - DNA, 101 bp, Homo sapiens
aagaaattagagaagcattccgtgtgtttgataaggacatgatccacatcgcggacaccaaggtcgccaggcgttatggggatttcttcatccgtcagatc

SEQ ID NO: 523066 - DNA, 80 bp, Homo sapiens
ctagcccgcgtgtgagcgagcagccgtgggcagcggtggagcatgagtctggctgtctttaaaccagaggagttacgcca

SEQ ID NO: 523067 - DNA, 96 bp, Homo sapiens
ccgaggctcgcgggcggcgggcccggattgtaaaccatggctgtgtggatacaagctcagcagctccaaggagaagcccttcatcagatgcaagcg

SEQ ID NO: 523068 - DNA, 100 bp, Homo sapiens
cccgcgtccgccgattcctcctccttggtcgccgcgtccttggctggcgtgctgggcttcccaatgatggttgtgtcctgcactgttgggatgtgttatc

SEQ ID NO: 523069 - DNA, 50 bp, Homo sapiens
ggagaccagaatgatgatactctggagtccaatgtgctgattgctgctaa

SEQ ID NO: 523070 - DNA, 74 bp, Homo sapiens
acgccgccatccgggaggcccagggaaggttattcagcttctcaaggctggaaaagcgaaggaagtttcctaca

SEQ ID NO: 523071 - DNA, 100 bp, Homo sapiens
taattgagtacacgttcctgttgagtacacgttcctgttatcatactggtcccaagtttgacatcgatatgatggtttcacttctgaggcaagaaaatgc

SEQ ID NO: 523072 - DNA, 83 bp, Homo sapiens
gttcgttgtgccagcgactaaaaagagggttaaagctcaaaaacgacactgaaaatcatcagcctgtgtctctttctgactta

SEQ ID NO: 523073 - DNA, 97 bp, Homo sapiens
cgacatcgccagcatcgacatggtttccgaagtcaacatgatggcagttgaattcctgcatgaactgaatgttccatttttcaaagttggatctgga

SEQ ID NO: 523074 - DNA, 75 bp, Homo sapiens
gcctccgctgccagcgacatgttcaagatgcccattcaccagaatctcaaggagctgctggccgtcagggcggag

SEQ ID NO: 523075 - DNA, 100 bp, Homo sapiens
gatgaagatgcttacaagaaacagttctctcaatacataaagaacagcgtaactccagacatggtcgagtttgagtggctgaggcagttttggtttcaag

SEQ ID NO: 523076 - DNA, 80 bp, Homo sapiens
ggagttccaccaggccgggaagcccatcgggtcaaaatgcagatcttcgtgaaaacccttaccggcaagaccatcaccct

SEQ ID NO: 523077 - DNA, 90 bp, Homo sapiens
gcttgacattacagccaagatggtgctgtcccagagacaacgagatgaactattgaccctcttgctggaatgacatctcttagtataggt

SEQ ID NO: 523078 - DNA, 100 bp, Homo sapiens
ctcaacatgaagctaccggccagggttttctttactctggggtcccggctgccctgtggcctcgctcctcggagggtacactgatgctgaagtactatga

SEQ ID NO: 523079 - DNA, 96 bp, Homo sapiens
atggggttgtagcatagaagatgtggactacaatggaaaccttccaggtctctaattaacagaagatggcaaagcccagccacagcagctatgtcc

SEQ ID NO: 523080 - DNA, 100 bp, Homo sapiens
ctgaaatttatgtccaggattcaaaaagtttaggactgctaagggttgcttttgtaatgaagaagcacttaaatactcatctactaggcaagcatggagt

SEQ ID NO: 523081 - DNA, 82 bp, Homo sapiens
tcaaaccttgcttctaggagataaaaagatgctgtgtgctgtggacccacctggggttcatggagtgggccacggggcccag

SEQ ID NO: 523082 - DNA, 97 bp, Homo sapiens
acacctcccaccatggacagcttcgacttagccctgctccaggaatgggacctcgagtcactgtgggtactagatggaaacttgagaaaggactgct

SEQ ID NO: 523083 - DNA, 74 bp, Homo sapiens
ggccgtggcccctcagccgtgtggctgctgagctctgtggagccagagcccccgctgctggaggagaaaccccc

SEQ ID NO: 523084 - DNA, 83 bp, Homo sapiens
agaaacaagccgtggaataggtgtatcaagtaatggtgcaaagcctgaacaacaaatggtcattcagaatgcttacggctatt

SEQ ID NO: 523085 - DNA, 50 bp, Homo sapiens
tttgggagaaacacagccagaaggcggatgtcagatgggctttttctaca

SEQ ID NO: 523086 - DNA, 97 bp, Homo sapiens
tcagagagctccggagtaggacttttgacagatgaccttgaatgatgccatgaggaacaaggcaaggctgtcaattacaggaagtactggagaaaat

SEQ ID NO: 523087 - DNA, 75 bp, Homo sapiens
cccccgcaaggatggcctttcctaccagagtaaaaggccaagctatgatagcaactggtggagtgataactggcc

SEQ ID NO: 523088 - DNA, 134 bp, Homo sapiens
aaggatgcagccgggaagctagtcgggagagcagcagagacacaagtcctgttcgctcttttcagcccctcgctcttgcaagcttaggatatgaaaagagctgtgtgttgttcaattgtgcagccttagctagc

SEQ ID NO: 523089 - DNA, 90 bp, Homo sapiens
ggagcatcccaggacctaccagaatctgagtctcactgtcgcccaggctgcagtgcagtggtgccatcacgcgtcactgcaacctctgcc

SEQ ID NO: 523090 - DNA, 83 bp, Homo sapiens
gaagccaacgaccacacgcaggctgaaatctctttaatgatggagggaagcaggcagacgcgagtgtctcggccatacaagat

SEQ ID NO: 523091 - DNA, 82 bp, Homo sapiens
tggtggtctgcatcaccaccggatcaacttcgacaaatagtgcaagtgaaagtgtaggaaaacatatgcttgaagcgtgcaa

SEQ ID NO: 523092 - DNA, 80 bp, Homo sapiens
cgcatttcaagaagaacaacctaactccagatatctacctaattgattgatttctcacattggcaaactgagagattttc

SEQ ID NO: 523093 - DNA, 95 bp, Homo sapiens
ggactgccaggccctccaggacacgatggggaaaaggtctaatgcatgtgcacaataaacttgtggatccactattcagtatgaaagatggaaac

SEQ ID NO: 523094 - DNA, 100 bp, Homo sapiens
gtttgctgtgtgtttgctcaaacaggtcactggaaggactgagcgcattcaggagcctggaggaactcatcttggacaacaatcagctgggggacgacct

SEQ ID NO: 523095 - DNA, 75 bp, Homo sapiens
atcccagagagcaatgatgggcctgtgaaggcccagctcatcgcccaggccattggccaggccttcgccgccgcc

SEQ ID NO: 523096 - DNA, 73 bp, Homo sapiens
tcaacccaagctttgcgattacagatgtatcggcaagcagtgtaaacggaggacttggggaaaaaggaccaca

SEQ ID NO: 523097 - DNA, 75 bp, Homo sapiens
agcatggctacttcatattttggaaagcagtttttaagacaataaaattggttctccacccaagactcctgtaag

SEQ ID NO: 523098 - DNA, 100 bp, Homo sapiens
ctgggccctgggccagaggcagaaaacggacggaagaaaaggtctggccggtcttggtatggtgactcctgtgaacgatcttagaggatctgattctatt

SEQ ID NO: 523099 - DNA, 74 bp, Homo sapiens
gatttgttaaggattccaagtaactcttatttgattctggaacttttcaaagcctgactctcttcttgaaacag

SEQ ID NO: 523100 - DNA, 100 bp, Homo sapiens
gagtgaccaggctgaccagcaccagccctgatccagatgatcatgggaacagcaatagtagtcatgtaaaaatctttttaccgaaaaagctgcttgaatg

SEQ ID NO: 523101 - DNA, 82 bp, Homo sapiens
cataatatggtgaacggccgcctggcagggcagctgcaatgactctccgcacggtattattgtcattgcaagcactattggc

SEQ ID NO: 523102 - DNA, 74 bp, Homo sapiens
agcagccaaccagcagcagccatcatggagaatgttggctaccagggtatttagcctagttggcaagcgagcaa

SEQ ID NO: 523103 - DNA, 50 bp, Homo sapiens
cacgcctgccccagggaaccgcacaggatgttgcttcagagtgtgaagtc

SEQ ID NO: 523104 - DNA, 83 bp, Homo sapiens
ctgaaattggcagatacccatttaaggtttaagtggaaaccctgcagatttagaaagaagagaagcagtgtttggaaagaatt

SEQ ID NO: 523105 - DNA, 100 bp, Homo sapiens
ctggggcctgctcccggagagatacggctatgtcgatcgaaatcgaatcttcggagtatgagcagcagcgggacaatcttgcccaacagtcattcaacat

SEQ ID NO: 523106 - DNA, 100 bp, Homo sapiens
cgggagcacactctgtgcggagactgggcggccggccgacccttcctgtcgctgacggcgactgcgggaggccagaggctgggaggcggcagaatgcagc

SEQ ID NO: 523107 - DNA, 100 bp, Homo sapiens
cagaaaaacaggatggatatgactctctgcagcgggatcaagctgtgtgcattagtacaaatggacacagagtctgggatctaataattcagtcattttg

SEQ ID NO: 523108 - DNA, 75 bp, Homo sapiens
ggaacccgggttacagcagtgagggggccacggctcaagatgaagtggctgtaattgatgaaattcaaatgatta

SEQ ID NO: 523109 - DNA, 75 bp, Homo sapiens
gtccgggtcagcattgctgtgaaacaggccactgagaatgcaaaggaggaagtgaggcgaattctggggctgctg

SEQ ID NO: 523110 - DNA, 100 bp, Homo sapiens
cagaaagtggttgcgtttcatgagtcgggccacgccttggtgggctggatgctggagcacacggaggccgtgatgaagggcctgagccaagattctgcca

SEQ ID NO: 523111 - DNA, 51 bp, Homo sapiens
caaggtcgcctacgtgcagctggcaatagccctctggaacaagacaattca

SEQ ID NO: 523112 - DNA, 100 bp, Homo sapiens
gttggaggctgaaattggcagatacccatttaaggtagatgatgagctggagatcaaggcctactatgcaggccacgtgctgggggcagccatgttccag

SEQ ID NO: 523113 - DNA, 100 bp, Homo sapiens
ggggatcagaggtccctggagtttctgcttcctccagagccaggtgcattttagtggttaccaggttgccacgtatttgaagtggtgtgagagctactcg

SEQ ID NO: 523114 - DNA, 98 bp, Homo sapiens
ggaacaacaacttgcagctcatctctattgatgaagagttaccttgtacatgcccactatgtacctcagacagagggagctgtgttagtacaactgaa

SEQ ID NO: 523115 - DNA, 75 bp, Homo sapiens
ccgacttcttgtatgcatactccacagcacctggtctattattagcagaagatttttctgcatagttggcacgct

SEQ ID NO: 523116 - DNA, 100 bp, Homo sapiens
gctgaggaggggccccagcagcccccgaaggccctatcaggacatggagtatgaaagacggatcctggtgcacctgagccgtggaggggctgaagtccag

SEQ ID NO: 523117 - DNA, 109 bp, Homo sapiens
cacatctcctccaatcgagcgtatgattttctgtacgaactgtcaagtaatccacctctggctaccatccttattcctcctcatgctcggattcaagcagctgcttcaa

SEQ ID NO: 523118 - DNA, 80 bp, Homo sapiens
aagtcctggctgaagccacggctgggacaggaagccacagcctttagatgttgttctggaaaaactttagtaatggatca

SEQ ID NO: 523119 - DNA, 50 bp, Homo sapiens
ctcgctgtgatatgtatgacgactgtcaccagggccagagagaactaaag

SEQ ID NO: 523120 - DNA, 82 bp, Homo sapiens
gtattctttacctgcttcccaatcccactgatgaggatcagcccatgcctaccttatgttcagtattttggaggtgtctctg

SEQ ID NO: 523121 - DNA, 75 bp, Homo sapiens
ggccagtaccatcgacagagcataagtacctctggcttcccctctcttcaactaaataactgaagtgaagtgatg

SEQ ID NO: 523122 - DNA, 75 bp, Homo sapiens
cggcagcgggtcttgggtcctccgagagcagcagcggttgcaacaaggacagtgtcagagcaggctgtaaaaaat

SEQ ID NO: 523123 - DNA, 98 bp, Homo sapiens
gccgattcctcctccttggtcgccgcgtccttggctggcgtgcgggcaaaactgttccgatttgcctctgagaacgatctcccagaatggaaggagcg

SEQ ID NO: 523124 - DNA, 98 bp, Homo sapiens
ctcctcgtgcctggcggcgtgggcccgggcgagcagccctgcctccggacgggcaggtgtttgtttgccagtggcagtccatttgggccagtgaaact

SEQ ID NO: 523125 - DNA, 125 bp, Homo sapiens
atgtacttctcactgtgccacgcagggtgccctgcagccacggagacgaatgtggacggccagaaggtcacggtctagatcacattctcgatccagaggaaggcgatactctcgctcacgcagca

SEQ ID NO: 523126 - DNA, 80 bp, Homo sapiens
tttgtggatcgctgtgatcgtcacttggttatggaaacaaaggacatgctttacatcgtcactgaatttgctaaaaatgg

SEQ ID NO: 523127 - DNA, 101 bp, Homo sapiens
gctaaagcaagaatgaaggtttctttgaggaacgcagcctgaatgagtccgtgcgtcctggtgcctcctacaaacggcagaatgaaggaaatcctgaaaga

SEQ ID NO: 523128 - DNA, 100 bp, Homo sapiens
tgtaggccttatgaaggacattgtaggaaaaactggtctacttcctggattgttctttctagtcgaagaattgaattttacaaagaatccaagcaacagg

SEQ ID NO: 523129 - DNA, 90 bp, Homo sapiens
gcatcaatcagctcatccgtcagctgaactagacccagatggagtctagctctgtctcctaagctacagtgaagtggcatgatctcggcc

SEQ ID NO: 523130 - DNA, 75 bp, Homo sapiens
gggaccaagctggagatcaaacgtggataagattgtggaccagctgcagcagttaatgcaggtgtatgacttggc

SEQ ID NO: 523131 - DNA, 83 bp, Homo sapiens
aagcaggactacaaccgcgaggaggacgccgcgctcttcaaggaccatggccaacctggagcgcaccttcatcgccatcaagc

SEQ ID NO: 523132 - DNA, 87 bp, Homo sapiens
cgcgggctgcggacgctcggtcccgcgctgcgcatccccgcggacgccacagcgctatgaaggatttgggggcagagcacttggcag

SEQ ID NO: 523133 - DNA, 82 bp, Homo sapiens
aaaggaagacttgtaacctggagaagagccctcaagaacctcaaatgtagagagaaaagcatctcagcaacaatggggtcgg

SEQ ID NO: 523134 - DNA, 100 bp, Homo sapiens
cagaggaggagcttgctgcagagtatgcgcctgcttcctctgcgccagaagaaggcccacctgatggagatccaggtgaacggaggcactgtggccgaga

SEQ ID NO: 523135 - DNA, 137 bp, Homo sapiens
catgctcaatgaccgccgccgcctggccctggagaactacatcaccgctctgcaggctgttcctcctcggatgccggctctggtatggaagaggtagaattaagctgggaagattatctagaagaaacagggtccac

SEQ ID NO: 523136 - DNA, 100 bp, Homo sapiens
ctctcctccctcacgggcggcggcggggccgagcgcggccctgcaggcgatgtcgccgaaaccgggctgcaggcgggatgccaaagaagagtgaatggcc

SEQ ID NO: 523137 - DNA, 75 bp, Homo sapiens
ttggactttcacaatcagagatggcagcggtaaaggtcttgttcagcgttgcgtaatcatccagaaagatgacaa

SEQ ID NO: 523138 - DNA, 51 bp, Homo sapiens
ggagtctgggagtagtacaccacgtagacccctctcctcgacgaccctgtc

SEQ ID NO: 523139 - DNA, 97 bp, Homo sapiens
ctcatcgagatggggaacaggctccgtgcagagctgggccgacccgaaaacgctgcatccaggtagtacacaaactgctctgctaccagaagaagtg

SEQ ID NO: 523140 - DNA, 75 bp, Homo sapiens
gttcttgaaaacttaagtacccagatattttatgacctggtcagacagataaataggaaaacaccagtggaaaag

SEQ ID NO: 523141 - DNA, 83 bp, Homo sapiens
ctcatggagcagcatgttggcattgacgtgctcaagagagacccgaccctgtacagatgatgtctaccgtagaaaagcctcag

SEQ ID NO: 523142 - DNA, 89 bp, Homo sapiens
cgccccgcccgcaggtgctatgctgtgggccccgctcaggtcctgtgcctcatcactgctcctgtcaccatgattctgtccagccagca

SEQ ID NO: 523143 - DNA, 101 bp, Homo sapiens
agcatttaaccagcatggctacttcatattttggaaagcagtttttaagacaagagcaatttacagcaatgagggatttatacatgaaaaatggacaagga

SEQ ID NO: 523144 - DNA, 74 bp, Homo sapiens
agtcaatggagcagagaatgatccctttgttagaccaaatttaccacaactgtggatttgccgctgcagtcacc

SEQ ID NO: 523145 - DNA, 75 bp, Homo sapiens
agattataagaagcttgggttcattgtttcagaaccttctgtggtccagaaagacatttgtggacaacatgaaaa

SEQ ID NO: 523146 - DNA, 82 bp, Homo sapiens
cgaactcgcccggccgggagccgccgcgggcaggacgcgcgctgcagaataccctctaccatctgctttggtcagggtgccg

SEQ ID NO: 523147 - DNA, 75 bp, Homo sapiens
cgctgatcgcctaacttctactgacgaagcttggaagttgcagaaggtattgtcttctaagaactctgaagcaat

SEQ ID NO: 523148 - DNA, 100 bp, Homo sapiens
catctaccagggcatctaaaccaaggaacatttatttggggctttcaagggttgaagctttgagagaagcagcaactgctgttgagcaagagaaagaaat

SEQ ID NO: 523149 - DNA, 82 bp, Homo sapiens
catcattggacccaatggctctgccaggcgggcaccacggcaggggctgagctaccctcatggaagggagaggaccgtaccg

SEQ ID NO: 523150 - DNA, 76 bp, Homo sapiens
gacatggaccgcggcgagcaagcctttctgagaaaagtctacagcattctttctctgcaggttctcttaactacag

SEQ ID NO: 523151 - DNA, 73 bp, Homo sapiens
ccgggccgcggcgtggagccgggcaggagccgcgagccagctgcgcgaaggtcagtcaccacgaacaggggca

SEQ ID NO: 523152 - DNA, 99 bp, Homo sapiens
gtggaaatccaatcttccgtaacccctgcacagagcagattctgaaacttcttgacaatttgcttgcgcttataagatgggacaccaggtccaatacca

SEQ ID NO: 523153 - DNA, 100 bp, Homo sapiens
cagaggtgggcggctttgaccgagaggctgctggagctcgtgtttggacgcgacataagcagctctatgaccaatagcacagctgccagtagacccccgg

SEQ ID NO: 523154 - DNA, 90 bp, Homo sapiens
gattctgcggggagacaagttcatccccattttccaaggggacgacagcgtcgttattggggtaccactgtgtcccgccgcgtgggcccc

SEQ ID NO: 523155 - DNA, 104 bp, Homo sapiens
tgggagatcgtgggcgagctgggcgacggcgccttcggcaaggtttacaaggctgtctgtccccagaccccagagcacgtccggcaccaccatgactgggctgt

SEQ ID NO: 523156 - DNA, 98 bp, Homo sapiens
tgcagctgcaggggctgagctggctgggcaagcgcgggccgcggaggaggtctcagggcgagaaccactgtctctgatcaacgtgcggaagaggaacg

SEQ ID NO: 523157 - DNA, 100 bp, Homo sapiens
ccgggctggcgatggaagatggaaggaaggagcgcagcggtttttcgttggaatatacgttgcacatttatggcgattctgagtgtgagggcagacttct

SEQ ID NO: 523158 - DNA, 98 bp, Homo sapiens
gtcttgtgccagctttcatcctgagttgccaatcattatcacaggttcagaagatggcactggtgaggtggattgatgatgaatcttctggcacacct

SEQ ID NO: 523159 - DNA, 75 bp, Homo sapiens
gcccgggaccgtgtgggaggcaggacttacactcttagggactatctgctgccaaactcttgactgaatatggcg

SEQ ID NO: 523160 - DNA, 80 bp, Homo sapiens
ggaggcggcggcccagccacgatggacttccttcgctgggcatctggctgggattcttgttggactaatgtacactcaag

SEQ ID NO: 523161 - DNA, 100 bp, Homo sapiens
aggatttattcgagacaaatatgagaagaagaaatacatggaccgaagtctggacatcaatgcctttagggttgaaaaagatcatctagcaaagcctttt

SEQ ID NO: 523162 - DNA, 75 bp, Homo sapiens
cgaggctgaggatgatggtagattgccaggcgccatgtcagaaccggctggggatgtccgtcagaacccatgcgg

SEQ ID NO: 523163 - DNA, 90 bp, Homo sapiens
atcgaggcgagccagagcctgcagtcccacacgatagcaaagccattgtggatgggaacctgaagctcatcttgggtctggtgtggacgc

SEQ ID NO: 523164 - DNA, 75 bp, Homo sapiens
gccttttccagtttggagagacgttcctgctcttgaggttcacagatgatacctttgatccagaacttgcagcaa

SEQ ID NO: 523165 - DNA, 95 bp, Homo sapiens
gcgatggctgggcccgcgtggatctctaagataaagcctagccatggctgctgtttattctggcatttcccttaagcttaaaagcaagacaactt

SEQ ID NO: 523166 - DNA, 83 bp, Homo sapiens
cttgctcggccgatgaagtgcagaggtttttttctgggggtgaatctctacattaagaacttggatgacactattgatgatga

SEQ ID NO: 523167 - DNA, 109 bp, Homo sapiens
cttttactctaatgaattgcacaaccccctccagacggttactcgcccaactgcctcagaggacaggtataagtgtgctagcggagtgtctagattgtcctgaattgaa

SEQ ID NO: 523168 - DNA, 100 bp, Homo sapiens
tttcctaccttggccttgagtagcaggggcctggtccccacagcccacaggatggaccaaagggggcagtcctggtatctgggatagcaaaggtcttctt

SEQ ID NO: 523169 - DNA, 51 bp, Homo sapiens
gccgagggaatgccgcccatgcaggtaaagtaccttttattcatgtgggaa

SEQ ID NO: 523170 - DNA, 100 bp, Homo sapiens
gttcaagcaaatctcctgcctcagcctcttgagtagcctgagtagctgggactaaaggtgaaaaaccttttgaatgtccaaattgtcatgaacgatttgc

SEQ ID NO: 523171 - DNA, 98 bp, Homo sapiens
ccagaagaagggaaggcgcgagtgaggaaaggaggtactgtaggttcacagcatgtccgcctcggcccctgctgcggagggggagggaacccccaccc

SEQ ID NO: 523172 - DNA, 82 bp, Homo sapiens
ttggaacttcgttgcttgcttgcctgtgcgcgcgtgcgcggacatggcctcaaacggctgaaggtgatgtggccgccctcaa

SEQ ID NO: 523173 - DNA, 80 bp, Homo sapiens
cgatggctgtaaagtgcctatgaaggtcagcccaaggccaaccccactgtcactctgttcccgccctcctctgaggagct

SEQ ID NO: 523174 - DNA, 87 bp, Homo sapiens
agaaccaacccccaaattggctgggacaggacctagatgtgaaggctggtggaggctgtgtaatgaccattggagaaatgctacgat

SEQ ID NO: 523175 - DNA, 101 bp, Homo sapiens
gggcccacggaggtcagaggggaggaggactctggagctgacagcgcgcacttcacccgcagttggtactccaaagattcaggtttactcacgtcatccag

SEQ ID NO: 523176 - DNA, 50 bp, Homo sapiens
ctgccctgtggcctcgctcctcggagggttaatttggagtggcccctgga

SEQ ID NO: 523177 - DNA, 98 bp, Homo sapiens
gactacaggcgtgcaccaccatccccagacaaatatggtctctttagaaggccttaccaaagtagttgatccttctcagctaactcctgagtttgatg

SEQ ID NO: 523178 - DNA, 82 bp, Homo sapiens
ccctccccagccccagacacggaccccgcaggggtgagccactgcgcctgatcaaggcatcaccgttgaacctcctaagagg

SEQ ID NO: 523179 - DNA, 50 bp, Homo sapiens
gttgccatgaggaaagaattctccgagagacggggtctcactatgttgcc

SEQ ID NO: 523180 - DNA, 82 bp, Homo sapiens
aacgaccagtactacgtgtacttcggcaccgtccgcgactgctatgagggggtctaatgtgatggaagagcaggacctgcgg

SEQ ID NO: 523181 - DNA, 75 bp, Homo sapiens
aaaaatatggcaaagacttcaatgacatacggcaagattttgtagatatagttgtaggtactccgggaagactag

SEQ ID NO: 523182 - DNA, 75 bp, Homo sapiens
cctagaggtcaagatcagctctggctagctgccactgcagagccccgccatggaagacacgccgttggtgatatc

SEQ ID NO: 523183 - DNA, 82 bp, Homo sapiens
ccgagttcaccaaaattcagacattgtttgtcctggttgtggtcaagactggatgatgtaactggctctctaggaagcctca

SEQ ID NO: 523184 - DNA, 100 bp, Homo sapiens
cgtcgggcaacggtggcgccgcggcaggcgacgacgaggacgggcagaacctttgctagaacaacagaggcagcagttgcttactgaacgccaaaacttc

SEQ ID NO: 523185 - DNA, 126 bp, Homo sapiens
atggataccaaggaagagaagaaggaacggaaacaaagttattttgctcggttaatgactccagagagtaagatcagattcgtccacaaagagatgggcataataccaagctggggtggcaccacc

SEQ ID NO: 523186 - DNA, 90 bp, Homo sapiens
ctgacctggtcatggcgtccagctccggcctggcgtgaggaccccccaatccgcgtgagagttgctggagaatgtaaccctaatccataa

SEQ ID NO: 523187 - DNA, 82 bp, Homo sapiens
cgctctcgggcggggcggcggcgacgcggacctgcggactagcgaacccggagttttctggatatgccgcagaaggatccgt

SEQ ID NO: 523188 - DNA, 100 bp, Homo sapiens
gccgcgggcgcccgaggggccgagcgaggtctcctctgagcctccggcctccataagacccaaaacagatgacacctcttcccagtcccccgcgccttcc

SEQ ID NO: 523189 - DNA, 50 bp, Homo sapiens
cgtgtcgtcactatgtggcccatgtgaagattttaccaaatgttgcaaga

SEQ ID NO: 523190 - DNA, 100 bp, Homo sapiens
ctatcttctgagcgtgtgccagaagatccagctttgttgaaaagcgaagccgttagtcccttaatacaaagggacaatcatatcctgattcagcccttcc

SEQ ID NO: 523191 - DNA, 75 bp, Homo sapiens
ttcggatccagatttcatgtatgaactggtgactctcctattccatctgtttcttcgggatcatcttcacctctt

SEQ ID NO: 523192 - DNA, 100 bp, Homo sapiens
ggggacacgccaaacctgagtttctacagaaatgagatccgcttcctgcccaacggacaatctctatgggaagcagaaggcaaggaccccggtcatttta

SEQ ID NO: 523193 - DNA, 82 bp, Homo sapiens
acggtggctactctgcctcggggacgaaagcagaactgtaagagtaaatgggtccagtaattggaatgactccagataagag

SEQ ID NO: 523194 - DNA, 75 bp, Homo sapiens
aacagtcctggacgaccacacgcagaccctctttcaggagcaggccgggctctcgccatgggtcactgtcgcctc

SEQ ID NO: 523195 - DNA, 101 bp, Homo sapiens
ccctaaggctgtggcatttggagaaatgggcttggattactcttacaagtgcaccacgcctgtcccagaacagcacaagaatctcgctctgtcacccaggc

SEQ ID NO: 523196 - DNA, 100 bp, Homo sapiens
attaaaccctcgaattggtacttttgatctcaaatacttttgtgaattgcgccccggattgattggatggagtcaagggtccagagaaggaggagaagtt

SEQ ID NO: 523197 - DNA, 83 bp, Homo sapiens
gtgtgtgcatctggctgttagaagaattcatgctcatccgggcccattgctagaagactgggacataatcagccccaaagatg

SEQ ID NO: 523198 - DNA, 90 bp, Homo sapiens
gaggagcagttgtctgatgaagagaagttgcagcatttgcaagaagaagcagaatagacacttcattgttccagcttctcgcttcaagct

SEQ ID NO: 523199 - DNA, 132 bp, Homo sapiens
gaaggccccagcttgaaggcctggagagccgcccagcagcacaacacagggaagcttggggaggataagttctgaacgtcgaaaagaaaagtctcgagatgcagccagatctcggcgaagtaaagaatctga

SEQ ID NO: 523200 - DNA, 100 bp, Homo sapiens
ccgagcccaaggcaattgatcccaagttgtcgacgaccgacagggtggtgaaagtgcatttgacctacctcaggatatccaaaggagaacagagggaagt

SEQ ID NO: 523201 - DNA, 101 bp, Homo sapiens
agaaaagaaagagaacaaatactccttcagatgtggaaacatgagggcttttttgcactctataaaggattttggccaaactggcttcggcttggaccctg

SEQ ID NO: 523202 - DNA, 157 bp, Homo sapiens
tacaacaggaagcaccctaatgaggagtatgccaacgtgggcaccggggagctggcagcggaggtgctcatccagcaagtatgaaaacccatggacaatcccgaatatgttgtcaatgacgagaattggcttggccccagttctgggctatttgatt

SEQ ID NO: 523203 - DNA, 83 bp, Homo sapiens
tgccctgaaaaagtatcgtcgagaagcctatcatcggagtacttcttgcaagcagagctgacaagcaacgtcttaaaaacagg

SEQ ID NO: 523204 - DNA, 75 bp, Homo sapiens
gttgatttcatcagactaaaaagttacaggctgccactgcagagccccgccatggaagacacgccgttggtgata

SEQ ID NO: 523205 - DNA, 74 bp, Homo sapiens
cttagctgtgctcgcgctactctctctttctggcctggaggctatccagcggcaacaggtttgtctatgctggc

SEQ ID NO: 523206 - DNA, 96 bp, Homo sapiens
tggtccgggtagattgggagcggaggtttgaccacatgcagcagcattcaggtgctggagaatctggtaaaagcaccattgtgaagcagatgagga

SEQ ID NO: 523207 - DNA, 100 bp, Homo sapiens
tggagaaacagctgtgtgtgataatggggcgtctgagagaagaaatggaagaaatcacacagcagcagctggtacacgacaagtactgcaaagatctcat

SEQ ID NO: 523208 - DNA, 75 bp, Homo sapiens
atgcagctgtggcatgtcaaccagcttggaattcctcctgatcagcagagactgatctttgctggcaagcagctg

SEQ ID NO: 523209 - DNA, 100 bp, Homo sapiens
tcccccacccccattctcttcaggggggcttcctctagattgacttctaaggactcttggtacatgaggaagaaacccggaaggggaagaggaaagcaaa

SEQ ID NO: 523210 - DNA, 75 bp, Homo sapiens
acctggtgaacttctcgtgtctttggaggttggccctgacaacgttcatgtggctctttccttggttgaatataa

SEQ ID NO: 523211 - DNA, 98 bp, Homo sapiens
gaagaacagatgaggcagtggagtgcactgaaggttccaatggtcctcagctgtttacaatagagcaatggggcagtcctgagaaactgcccagagct

SEQ ID NO: 523212 - DNA, 90 bp, Homo sapiens
gtgccgccttcccaggaccctcagggagagcgggcagccttccaggtggacaggccaactacacagacccccagagcaaactgcggttca

SEQ ID NO: 523213 - DNA, 82 bp, Homo sapiens
gatgaggaagtactgagcctgttggaggaactggcccggaaacaggaggacggtggtgaaggaggagatctttgatgacaat

SEQ ID NO: 523214 - DNA, 90 bp, Homo sapiens
gccgccgccgctgtcgccgccacctcctctgatctacgaaagtcatgttacccaacaccgggtgcaccgggtataatttcttcaccatat

SEQ ID NO: 523215 - DNA, 100 bp, Homo sapiens
tgatgagagcctgaggagccattttgagcaatggggaacgctcacggactgtgtgtgcattgctaaggaactgattccagaagccactgagaaatactta

SEQ ID NO: 523216 - DNA, 51 bp, Homo sapiens
ccccaccccgatttagacctgcgtatgaagtgctcctttgtgtacaagatc

SEQ ID NO: 523217 - DNA, 75 bp, Homo sapiens
ggaggagttgagaaaaaccaaggcatgatggaagtggttcattgcatgatattcaactgtcattgccatccagtc

SEQ ID NO: 523218 - DNA, 101 bp, Homo sapiens
gtcttgaagactgaaagcctgttattcaaagaggttagcagtagactgttggaagtaaggttttataggatcacattgacaaaagtaccatggagttttat

SEQ ID NO: 523219 - DNA, 100 bp, Homo sapiens
cacaactcttgtcctaccacctcagtacactggctttctcaaaggactattgcaagtctttgcacacatagctggagccatctctcctactgctgctgga

SEQ ID NO: 523220 - DNA, 90 bp, Homo sapiens
aattgctctatgtagtgccctttgttgccaaagtcttagaatctagcattcgtagtgtgaaacctgctcctccaaagccagagcccaagc

SEQ ID NO: 523221 - DNA, 101 bp, Homo sapiens
cagatcagaggctccgttccgctgttctgggaacagccagggcttcagtcagcccattaaagcagatgtcctttttattcatggccttatgggagcagcat

SEQ ID NO: 523222 - DNA, 75 bp, Homo sapiens
ccgacgagcgctgcactaacgcaggatccggctgccgaaggtcctcgccaggttgctccttcaggctggctacga

SEQ ID NO: 523223 - DNA, 76 bp, Homo sapiens
ctccagtgacacctcccagagaagttgccagtcttcagagacctgagattaaacttgaatcactgaaagaagatat

SEQ ID NO: 523224 - DNA, 131 bp, Homo sapiens
cgaagtccccggagaactctaccctggaggagattctggggcagtatcaacggagtctccggggtgatctgcaactctttcaccatctgtaatgcggagatgcaggaagttggtgttggcctatatcccag

SEQ ID NO: 523225 - DNA, 74 bp, Homo sapiens
gtcaagtcatctttggctcaagagtctgatgacttttcacagtaccaactcaaaggcttgcttaaaaagaacta

SEQ ID NO: 523226 - DNA, 73 bp, Homo sapiens
gcaaatcaaacagaaataaggtagactcaatgggtacctagtagaactgggttgtatcaagccgctctgtgat

SEQ ID NO: 523227 - DNA, 75 bp, Homo sapiens
cgggcttcatctcttgtgtggggagtttcatcctagcggttatttctcaaactctgaggctgcggagttcacaca

SEQ ID NO: 523228 - DNA, 50 bp, Homo sapiens
gagctctccagaaaattgatgcaggtcagttcaccgggacctggaggccc

SEQ ID NO: 523229 - DNA, 99 bp, Homo sapiens
gtgttctagaagccatcagaggaagacttggatcttttcatgaactcctgctggagccacccaagaaggacagaataacgggctcccagattcacaagc

SEQ ID NO: 523230 - DNA, 74 bp, Homo sapiens
aatatttccagctcatctacctcagaaatcactccaatctcaaagcttgaacagcgtttgtttgaaaatttgcg

SEQ ID NO: 523231 - DNA, 75 bp, Homo sapiens
caaagactatggtttaatgaaaatagatgaaccaagcactccttaccataggaaaggcagactacaagttactga

SEQ ID NO: 523232 - DNA, 74 bp, Homo sapiens
ttcacattttccccaatatatgggaagtctgaccgtcccgctacagtagaagacctgaagaaacttcggtatct

SEQ ID NO: 523233 - DNA, 75 bp, Homo sapiens
tttgaatttgctagtaacgtcatggaggatgaacgacagtggatggaactgaggttcaacactctggcaaaatgc

SEQ ID NO: 523234 - DNA, 59 bp, Homo sapiens
ggacaatggacctgcctgggcatagacttccttaagcccccacagaggcaaagatcgga

SEQ ID NO: 523235 - DNA, 49 bp, Homo sapiens
ccgccaccgtgcacatccgaatgggcccgggtcctttttgtgctgattg

SEQ ID NO: 523236 - DNA, 96 bp, Homo sapiens
gccggagccgcagaaacaagaggccgagccgtgtcgaagatgaaggagcatttctaccagaggcagcaccggctgcccgagccctcctgcccacag

SEQ ID NO: 523237 - DNA, 71 bp, Homo sapiens
tgacattatcaattttggggaagaggagatgaacgccctgcgaggccaggtgggtggtgagatcaatgtgg

SEQ ID NO: 523238 - DNA, 88 bp, Homo sapiens
cgggacggctgccggcctgtgtggtggactgtggcacgggtatctcaacatcaaactaactgacatcagtgtcacagaccctgagaaa

SEQ ID NO: 523239 - DNA, 90 bp, Homo sapiens
gaacggggcgagcctggaggattgtcactccaacctcttttcgctggtctaataagatgactgaagaatatccatgggatggaggttatt

SEQ ID NO: 523240 - DNA, 75 bp, Homo sapiens
gttgctggtgatccgcaattacggccccgaggtgtgggaagacatcaatacagaggaaggcatctacaaaaccgt

SEQ ID NO: 523241 - DNA, 75 bp, Homo sapiens
acgcggtgaagatagcctgcggagtgtccgggctgaacacgtgctggagaatctggtaaaagcaccattgtgaag

SEQ ID NO: 523242 - DNA, 102 bp, Homo sapiens
acccgcaaacggtgggggtcggccggggccgcttcaccacttacgaaatcagggtcaaggatgtaggtggaggatggctggaaggaagaaacatcaaaggag

SEQ ID NO: 523243 - DNA, 100 bp, Homo sapiens
gaagatgtaaagcaatatttcgagcagtttggcaagagcactgcagtttcctcctgaaggctggctccggctctccctcaataatggcagcatcacccac

SEQ ID NO: 523244 - DNA, 48 bp, Homo sapiens
tacattaggcctgacgttaaagggcttcttccgtcgtacgatccgcat

SEQ ID NO: 523245 - DNA, 112 bp, Homo sapiens
ctcttccaggactttgagccagtccagaccctgctgctgtcttcaaagaagataacgaaggaggcccaacttcattcaataaggagcctgacggatttatcccagacggtag

SEQ ID NO: 523246 - DNA, 148 bp, Homo sapiens
ttttgccagttagtagcccagaagcaaaagagacccacagatttggatgtagatacgttagccagtttacttaaatggccaaagttttctggtcttggatgagcaacgatttgcaaaagaaattcttcccaaatatttcaagcacaat

SEQ ID NO: 523247 - DNA, 83 bp, Homo sapiens
aagttttcagcctcatccagcaggcggtgacccgctaccggaaggccatcgccaagcaattctgtggtgttcttggtcacaca

SEQ ID NO: 523248 - DNA, 100 bp, Homo sapiens
ggcagcccggcagctgccggcggcgcggcgagagagcggctgacagaggggatgcgaggtaaaataccatgaagattttgaaaaaacaaaggggagaggc

SEQ ID NO: 523249 - DNA, 98 bp, Homo sapiens
agacatttgctacagcatcccacattaagtcaacggaggcaagtgaggcctatctggttggcctttttgaagacaccaacctgtgtgctatccatgcc

SEQ ID NO: 523250 - DNA, 74 bp, Homo sapiens
tgcagctggcgctgcgggcaggacaggtccgagacttatttgcccttgctcggaagaatgccccttgcatcctc

SEQ ID NO: 523251 - DNA, 75 bp, Homo sapiens
agaaaatcgtcttatagttgagaatttatcctcaagagtcagctggcagctctggattaatcgaattacagctgc

SEQ ID NO: 523252 - DNA, 75 bp, Homo sapiens
tggactctgaggaatcctatccatatgaggcaacacgtgtgaaggcaaagaagaatgctgctccattcagaagtg

SEQ ID NO: 523253 - DNA, 100 bp, Homo sapiens
ctcaggcattacttgaagctggtgccaaagtggttgcgctcgaaagtgacaaaacttttattccacatttggagagacggggtttcgccatgttggccag

SEQ ID NO: 523254 - DNA, 82 bp, Homo sapiens
ggaattgtgaagttatataaagtcttgaagtctcctaagtgtaaactacaagttctaggggacatggatgaagctggaaacc

SEQ ID NO: 523255 - DNA, 82 bp, Homo sapiens
gcggagaggcgccccccgcagcaggcttgggcactgtttaaaggaaagttccgagaaggcatcgacaagccggaccctccca

SEQ ID NO: 523256 - DNA, 80 bp, Homo sapiens
tgatagtgtgtctaagaaacatggaacagttttcttggaatccaggtcaaaatgcagatcttcgtgaaaacccttaccgg

SEQ ID NO: 523257 - DNA, 100 bp, Homo sapiens
acagatcagggaggctgtcgtggcagtccatcaaggggacccacctcaccatcacccaggagctctgcgtgcctcttgctgtgccctacctggacaaacc

SEQ ID NO: 523258 - DNA, 98 bp, Homo sapiens
gcgctgagccctacaacacccccagcggccgccggctcccccacgagacttatctaaaaacagactggttgaagttccaatggaattgtgccattttg

SEQ ID NO: 523259 - DNA, 75 bp, Homo sapiens
agatgtctgacagccctgtgtgacaccaagataagtaaccacagagctggctgttcgcaagctgcgtcaggaact

SEQ ID NO: 523260 - DNA, 90 bp, Homo sapiens
atcgtcatcagaaactgaaggcaactttgtctatcgcacaggcagagactccccctaatgggccagattgtggctatggctcctttcacc

SEQ ID NO: 523261 - DNA, 100 bp, Homo sapiens
gtgactctagggttagcagaaccatccaccaacataagtttcccattggtcactgtacacttggaaaagaaaatgtttataggaggccttagctgggaca

SEQ ID NO: 523262 - DNA, 74 bp, Homo sapiens
ccggatgcaggacagacccctcaggtgttggagcgggccggagagaagtagagtgggctgcgaggagaaggaaa

SEQ ID NO: 523263 - DNA, 75 bp, Homo sapiens
gcggagggaaaaaggaagaggagaaggaaattgtcccgaatccctgcagacagttaaatctcacacagaaacaga

SEQ ID NO: 523264 - DNA, 50 bp, Homo sapiens
atgagatggtagccaaacccccagatgccatggacaatattaccaggcag

SEQ ID NO: 523265 - DNA, 89 bp, Homo sapiens
cttggagaaagactactttggacttttgtttcaggaaagccctgagcagaaaaccctcatccctcccgtgggagccccctttggacact

SEQ ID NO: 523266 - DNA, 90 bp, Homo sapiens
cactggccgtcccggccatctcgctgcccgacgatgtccgcaggcgtgtgtcccggcatggatatccggaacaacctcactaggttgcat

SEQ ID NO: 523267 - DNA, 82 bp, Homo sapiens
gctttgtgatcgaaaccctgaccggatcccataaacactgtcgggaaatcctcattgacgattcaatttgttgaaggccaat

SEQ ID NO: 523268 - DNA, 50 bp, Homo sapiens
ccggctttggggtcaagcagattgcggcttcatatacagatagctctgat

SEQ ID NO: 523269 - DNA, 100 bp, Homo sapiens
tctcaaagttctgggattacaggcatgagccatggcacctgaccaaggaatcattgtagtcaatcattttccagttctcagccgctcagttgtgatcaag

SEQ ID NO: 523270 - DNA, 101 bp, Homo sapiens
ccagacattactacttcctaggcagaatgcttggaaagtatcagaggttctggtgatagcagtcattcacaatctcaaggggaaagatatcaacatttcac

SEQ ID NO: 523271 - DNA, 75 bp, Homo sapiens
tttatttctcgtcggcggcgccctgcaccgcgcctcgcaaaaaattttactgcaggataaaactccaggataaaa

SEQ ID NO: 523272 - DNA, 115 bp, Homo sapiens
ctgtgatcaaggctatgttgcctctgtgttaggccaatctctttccaacaactgatcctgtgggtactttgctccaagttccagaacagatctctgctcatctacctcagccagc

SEQ ID NO: 523273 - DNA, 75 bp, Homo sapiens
gaaaacatgaccgctgagcccatgagtccacaggtcctggctaccctgggaagagacaagaagtaaatgaagaaa

SEQ ID NO: 523274 - DNA, 75 bp, Homo sapiens
cttcaattaaaaaatttattaaaggaagcacacctaagtacctgtttgaaaatggtagaatagataacattttta

SEQ ID NO: 523275 - DNA, 100 bp, Homo sapiens
atcagtgacgaggtccgctacgtaaatccctttgcggcgggattttttatcaagcagaaatgcatcgaacaacgagaatcaagatcactgagctaaatcc

SEQ ID NO: 523276 - DNA, 100 bp, Homo sapiens
gtgatgaacttagcagcagctccactgaacagataagggaggatgatgaaattccactgtatctaaagggtggggtagctgatgccctcctgtatagagc

SEQ ID NO: 523277 - DNA, 73 bp, Homo sapiens
ggaaaaggcctgaagtggcactgaaatgaggcatagatgagtataacattcaggcttatccaacaacagtggt

SEQ ID NO: 523278 - DNA, 88 bp, Homo sapiens
agaagaaggccagctttgaggaaggacaaaactttcggtttgaagaataagaaaggagcaaagcaacagaagtttatcaaggctgtca

SEQ ID NO: 523279 - DNA, 100 bp, Homo sapiens
gcgctctcttcagtacagagctctctgtcctgcacaactttttcagtccttcccccaagaccaggcgccagggcgaggaagacaatggtgtaaaattggt

SEQ ID NO: 523280 - DNA, 99 bp, Homo sapiens
gagaatgggaaagttttgtgaagggtaaagatggagccttatgtttgatcatcggccaaggtcctggcgagaactgcctctgcggctagctgattttgg

SEQ ID NO: 523281 - DNA, 74 bp, Homo sapiens
gcaaaccaaggatctggggatcttcgcactatcccaagattctgatgctcacagtaccacctcaagtgcctccc

SEQ ID NO: 523282 - DNA, 83 bp, Homo sapiens
atcggccgcgggccgctgctgggagagcagtatagcatcaagttctagaggaattgggagccattgcaaatctgagggtcagg

SEQ ID NO: 523283 - DNA, 85 bp, Homo sapiens
ccaagtgcgacagccacatggagacattcttgcgctgcatcgaagcctcagtgacatcaccgaggagacagaggtggaggtccct

SEQ ID NO: 523284 - DNA, 100 bp, Homo sapiens
agcccatttagcctgggacagtaaaagtgacacttaactccgccatctgcgttttgagcactgttctcataatggagtttcctgatttggggaagcattg

SEQ ID NO: 523285 - DNA, 95 bp, Homo sapiens
gcagctggagcctcaggcggcagcgcttctaggaagaggatcacctagcccgggtagaagaggcaatcacccgtatgcttgtgtgtgccctgaaa

SEQ ID NO: 523286 - DNA, 75 bp, Homo sapiens
ctgcgaccgccctgcgcttcgtgcaccggggcggtccgttgccaaagccagagtggtgagatcaagtcggtagat

SEQ ID NO: 523287 - DNA, 75 bp, Homo sapiens
cagcctcctaagtagctgggactacaggccagcggaagcctgccacctcctatgtgcggaccaccatcaacaaga

SEQ ID NO: 523288 - DNA, 83 bp, Homo sapiens
ctggaagctactactacgtggtgcttggaaaggtgtgttccagagaacaagccttcagacatttgctatattgacgctgagct

SEQ ID NO: 523289 - DNA, 100 bp, Homo sapiens
gaaactcatcccagagttcattaagaaggtcctgcatctccagtatggaatgtatgtttggccctgtgctgtggtcctggcccagtacctttggtttcac

SEQ ID NO: 523290 - DNA, 87 bp, Homo sapiens
cgtgccgtggtgcgcatgggtatctacgtgggggccaaggtgtacttcatctacgaggtatgatctcgtgaaaccttgagagaaact

SEQ ID NO: 523291 - DNA, 98 bp, Homo sapiens
aaatggcagcgacggttcttcatcctttacgagcacggcctcttgcgctacgccctggatgagatgggtttggacagaggagccaaaggccaaatttc

SEQ ID NO: 523292 - DNA, 89 bp, Homo sapiens
ccagaatacgaggaggaagaggtggccataccgttgaccgctcctccaactaaccatgtaaacaggaacatcgataagtagtgtaaaaa

SEQ ID NO: 523293 - DNA, 75 bp, Homo sapiens
gatgacacctttattttaaaagctgatgttccaaggtactttgaactcaagtaaacaaaagggaagattttctcg

SEQ ID NO: 523294 - DNA, 87 bp, Homo sapiens
tcacccctaacttgaacttcataacactggagagtttcttgcagaacataaattattaggaaacattaaaaatgtggccaagacagc

SEQ ID NO: 523295 - DNA, 100 bp, Homo sapiens
gtcctgcgcctctcccgcccctgtctcccgctccgcagccccgggcacggcggaggcagcggagccctgggccatcggtgactgccaacagccagcccaa

SEQ ID NO: 523296 - DNA, 90 bp, Homo sapiens
aacagcctctaatatggagtatatgctgttcgggggtcttgtctggattttggttgcctcctccaatgttcctctacctctactacaagg

SEQ ID NO: 523297 - DNA, 97 bp, Homo sapiens
ggagctgctgggcgaagcacgctactacctggtgcagggcctgattgaggactgccagctggcgctgcaggcaacacttccccagatcaaaaggagc

SEQ ID NO: 523298 - DNA, 90 bp, Homo sapiens
gaaccagctggaaagcaccctgggaatcaatcttcctaagctgaagaacctctacctgtttaattagacacttcagaattttgatcacct

SEQ ID NO: 523299 - DNA, 50 bp, Homo sapiens
gctgaggatcctcttcctcctgggtcattgagactgcctcttctcaaagg

SEQ ID NO: 523300 - DNA, 90 bp, Homo sapiens
gagaactagtcctcgactcacggcatagaatgtcaagctaaccaggcgtccgctacttcagaagagtgtactgtcgcatggggagtctgt

SEQ ID NO: 523301 - DNA, 100 bp, Homo sapiens
tcgccataaagtatgcattgctcaagattctcagactgcagtctgcattagtcaccggaggcttacacacaggatagtaatgatgacactgaagatgttt

SEQ ID NO: 523302 - DNA, 100 bp, Homo sapiens
gcgaccgctgcaagcccttccactacgaccggccctggcagcgcgccacagcccgcgaagccaacgagtgcgtgggtgcggtcttgctctgttgcctagg

SEQ ID NO: 523303 - DNA, 89 bp, Homo sapiens
cccagtctgtgtctcaaatcaaccacaagctggaggtgttggagcgggccggagagaagtagagtgggctgcgaggagaaggaaacagg

SEQ ID NO: 523304 - DNA, 75 bp, Homo sapiens
cacagcagtcaagtatgtcccaaacgtctatctgactgcagccatgagcagcaatgagtgcttcaagtgtggacg

SEQ ID NO: 523305 - DNA, 75 bp, Homo sapiens
ggaaaagatcgaaaagaaacaatgactatgattcttaactccagtgatccacaagctcagaaatacatcgcggaa

SEQ ID NO: 523306 - DNA, 75 bp, Homo sapiens
tcaaggtcaaccagaggcgctttgttacgttcagccaaggtcctcgaggccacacgggttaatcgaagaaagagc

SEQ ID NO: 523307 - DNA, 100 bp, Homo sapiens
ttaagaaaatcagataacttgtactggagagaaatcctacaagtgtgaaatgcactcggtgatggaaagagagccactattctgaagaacacttggccaa

SEQ ID NO: 523308 - DNA, 101 bp, Homo sapiens
tcttcacagcacagttcctgggaaggtggagccaccagcctctccctgatgttaactcattccagcaaactacaaagtggattgatgatgtcagaacagaa

SEQ ID NO: 523309 - DNA, 75 bp, Homo sapiens
gcagtgatgaggtcaacttcttggtatatagatacttgcaagagtcaggaacttgtaatagctggcatcgttgag

SEQ ID NO: 523310 - DNA, 100 bp, Homo sapiens
tccgttccccgtcccggagctgccggcggcatgatccgacacgccggggcgcccgcgcgcggggaccccacgggaagcccccgagcgcccacagcatgaa

SEQ ID NO: 523311 - DNA, 104 bp, Homo sapiens
ctctgcctgcggggaagggagtcgccaggcggccgtcatggcggtgtcggagagccagctcaagaaaatggtgtccaagagtcttgctctgtcacccaggctgg

SEQ ID NO: 523312 - DNA, 118 bp, Homo sapiens
cttcctgtgtggttttaccgcccagagagcgtcatggacctggatgcacatgttcattgctcgctactgtgacctgttaaatgtggacatctcttgtgatgggtgtgatgagattgcc

SEQ ID NO: 523313 - DNA, 98 bp, Homo sapiens
aggacgtggtgaccctgctgaaggaagcgatccaccggcgagaggactttggcctggatgtgcctgctttccgaactctggtgggggatgactgccca

SEQ ID NO: 523314 - DNA, 50 bp, Homo sapiens
ctgaaacagtgccgacttgcaaacgctggtcattgttggtgaaagctaag

SEQ ID NO: 523315 - DNA, 96 bp, Homo sapiens
tcatcacccatctggagcaaggaaaaaaaccttcgactatgcagagacatgagatggtagccaacccctcaggaggagacatcacagctttcccag

SEQ ID NO: 523316 - DNA, 50 bp, Homo sapiens
cggctctccaagttctaccagccctacactattgggaagaagttacctgc

SEQ ID NO: 523317 - DNA, 104 bp, Homo sapiens
aggtgcaggcccggcgccgccactgccgcagccaggagatggttcgggcctagcggagccgggactggaggtgtcatggagaaactccagctgggcccagagat

SEQ ID NO: 523318 - DNA, 74 bp, Homo sapiens
cgacttcctcacccgcgcctgcgacctcggcagatcgggagcggtgccgagaaaaatttccttactagatgaca

SEQ ID NO: 523319 - DNA, 76 bp, Homo sapiens
caaacaagctcatctttggaactggcactctgcttgctgtccagccaatgattcgcctttgccagtctcatctcgt

SEQ ID NO: 523320 - DNA, 100 bp, Homo sapiens
tgacaaaaacgggatcgctttggaaacatctttaccctgttcattgggccagagtaccttctccaggcaaattccgttcccctgcagcaccatctccttt

SEQ ID NO: 523321 - DNA, 100 bp, Homo sapiens
gatgtggtccaaggaagaaattgatattttgatgaacaatattgaacgctatcttaagggatcctcaattcctgagctagcacattctgatgcttaccag

SEQ ID NO: 523322 - DNA, 90 bp, Homo sapiens
gccagaagaggcgttcgctgcgcgtgcacattccggtcaaaatgcagatcttcgtgaaaacccttaccggcaagaccatcacccttgagg

SEQ ID NO: 523323 - DNA, 95 bp, Homo sapiens
tgaaaaagtctcctaaacagacaggctacggatggatatgtcaggaatgtgattcttcatcttccaagaattggcagagggggtcgatttgggag

SEQ ID NO: 523324 - DNA, 100 bp, Homo sapiens
aaaatggcgaccggcaactactttggattcacccacagcggggcggcggcggcggcggctgcggcccaatatagggcatcgagcgcctcaaacgaaagaa

SEQ ID NO: 523325 - DNA, 100 bp, Homo sapiens
gtggttccaaagctgtgatgaatggcttggcacctggcagcaatgggcaagacaaaggtaatttcatctgtgccaaagcctccagaggacaagccagaag

SEQ ID NO: 523326 - DNA, 75 bp, Homo sapiens
tggcccgtgacctgaaggctgtcaagtatgtggagtgttctgcacttacacagttatgccccgtggtgccctgct

SEQ ID NO: 523327 - DNA, 90 bp, Homo sapiens
cctggagctctacgcctcctacgtttacctgtccatggcgtcctgcctctgcggctctgccccctgcatcctgtgcagctgctgccccgc

SEQ ID NO: 523328 - DNA, 100 bp, Homo sapiens
atctgaaagctgaaattgagaagctttgtgagaagggcagaagggcctactgcagtgcatgaaggtggtatggactcagaactctgaagtctgaggagac

SEQ ID NO: 523329 - DNA, 100 bp, Homo sapiens
aatgaggaggagatggtggaggaggctgaagaaggtgcttcctggaggggcctgccccactgttcctgtgctgagttccaggacagcctcaacttcagct

SEQ ID NO: 523330 - DNA, 73 bp, Homo sapiens
tcctgtacagcctgcagaactccatccagtccaatggatcagatgggcaagatgagacctcagccatatggcg

SEQ ID NO: 523331 - DNA, 83 bp, Homo sapiens
ctggtcaccactccggcaccagggaaatcctcattgacgattcaatttgttgaaggccaatttgtggactcctacgatccaac

SEQ ID NO: 523332 - DNA, 75 bp, Homo sapiens
cttattcacagttaccaaagctgttggcaaacatgaattgactgggcataaagtagctgtgaagatactcaatcg

SEQ ID NO: 523333 - DNA, 98 bp, Homo sapiens
ccatcccgggtggcctttaccttgctggagaaggaaatctgagaatgaagatgacagcgagtgggaagatgtggatgatgagaagggagatagcaatg

SEQ ID NO: 523334 - DNA, 90 bp, Homo sapiens
agacaatgaaaacagagttcctacatgtgaagagagcccgcggttcccttcaaaaagcggctgcaagatctggaggtgcgggagaaggag

SEQ ID NO: 523335 - DNA, 100 bp, Homo sapiens
gccctggccgctcacccgtggaaagtacaggtcctgacagctgttgaagctttatatcaaactacatacccagaatatctccagtacatttatttggtgg

SEQ ID NO: 523336 - DNA, 100 bp, Homo sapiens
gctgcagcggtacctgaagacccgggagaagaaatcatgaccaccccaggaaaagagaactttcgcctgaaaagttacaagaacaaatctctgaatcccg

SEQ ID NO: 523337 - DNA, 90 bp, Homo sapiens
ctgcagttggatagccccgaagatgcagagttcattgttgccaaggttgcccccaagtttcctggcagtgtgtgatactgaggaggtgag

SEQ ID NO: 523338 - DNA, 74 bp, Homo sapiens
aacgatctttctaaaaacactactggaagcacaatagctgaggcaacttcagagtggacgttggattacccccc

SEQ ID NO: 523339 - DNA, 75 bp, Homo sapiens
ggaaactttggtggtagcaggaacatggggggaccatatggtggagggcctgctatggtgtgctgcggttcatca

SEQ ID NO: 523340 - DNA, 82 bp, Homo sapiens
cctactacaccgcctgggtgattctcttggaactgtggctgcaccatctgtcttcatcttcccgccatctgatgagcagttg

SEQ ID NO: 523341 - DNA, 100 bp, Homo sapiens
gaaggagctggcggacatcactttagaccctccacctaattgcaggaacacatgattctgtgcagatttgcagaccagacagctgtccagctcccacccc

SEQ ID NO: 523342 - DNA, 97 bp, Homo sapiens
tggagctgacgtgagcgaggttggtcatgtgctcggtttgcaatggattttggataaacaagatctgttgaaggagcgccaaaaggatttaaagttt

SEQ ID NO: 523343 - DNA, 88 bp, Homo sapiens
agaaattattggtacctgcaccctgcctctttcttgtcgcagtcagtttcatcatcagatagaaacagtgttacagtacttgaaaagg

SEQ ID NO: 523344 - DNA, 71 bp, Homo sapiens
agtggtcgcttcttctccttgcctttggccaccactcaacctgcaaagacttcaacatcgaaagccaaaac

SEQ ID NO: 523345 - DNA, 100 bp, Homo sapiens
aaatgataggacacagggtggtggaagatctcaaagagtatgcccccacctgttccacgtcctggaattcctccaatgactcaagcacaggctgtttcag

SEQ ID NO: 523346 - DNA, 100 bp, Homo sapiens
ggagaatcttcagccagactttaatgaagactatctagtcctggcatgggagggcaggattgtggtggtgggatttgctggaggaaacattgcttctgaa

SEQ ID NO: 523347 - DNA, 100 bp, Homo sapiens
gaagaagtggaacgttctgcgccagcgcgtggactcctgttcctatgacctggaccagagcaaacgccctggaggagcagctgaaggagcaggagctgag

SEQ ID NO: 523348 - DNA, 100 bp, Homo sapiens
ataacccagcatcaggggaaaagtttgcctatgtgccatttggagctggtttaggaatgtatgaaacacccctgttcctagctcatgaagaagagtcagg

SEQ ID NO: 523349 - DNA, 75 bp, Homo sapiens
aactgaagacggaggtgcccaaggtcagaaggaagcaccacacagagaccaagatcactccatggatgaaatgac

SEQ ID NO: 523350 - DNA, 82 bp, Homo sapiens
gctcggaggaatggcgccgccggacaatgcagatcttcgtgaagactctgactggtaagaccatcaccctcgaggttgagcc

SEQ ID NO: 523351 - DNA, 75 bp, Homo sapiens
aggataacatccctccagaagatgatggagttttcctctagttgtttaggatggagtgcaattgcacgatcttgg

SEQ ID NO: 523352 - DNA, 82 bp, Homo sapiens
ctgcaggctgagcgcgcgcagggcttccgccgactggaggatttgacaagtatgcgcccaagctggacagcccctacttccg

SEQ ID NO: 523353 - DNA, 75 bp, Homo sapiens
gcgcggggccaccatgggggcccagctcagcacggcttaatgccagaccgggagttggaggtgtccgatctcgag

SEQ ID NO: 523354 - DNA, 75 bp, Homo sapiens
tgaagatgcaaaaccagcgtggcggccgcgctctcttccaggacatcaagggtacagaagtgcaggtggatgaca

SEQ ID NO: 523355 - DNA, 88 bp, Homo sapiens
cagcccagcacctgcggagggagcgctggatggaggatgaagctgtcctggacagaggggcttccttcctcaagcatgtgtgtgatga

SEQ ID NO: 523356 - DNA, 75 bp, Homo sapiens
cgactcttctgacctccgcgcgacgtacccgccgccgccgttggctggaggtacactgaggaggggacggctccg

SEQ ID NO: 523357 - DNA, 100 bp, Homo sapiens
attcagaaggatatcgacgtcgtgatccagaagtccagagctgaggactgcctgtttgcaggattacagtttaaagacaatttctgtgatcaagttgtca

SEQ ID NO: 523358 - DNA, 98 bp, Homo sapiens
cggcaaccgctccggcaacgccaaccgctccgctgcgcgcaggctgggctgcaggctctcggctgcagcgctggagcaaatttttcagaacataaaac

SEQ ID NO: 523359 - DNA, 74 bp, Homo sapiens
cgcggccgaccatagagatgcggctcccgccggctctgggtctggaggtgctgcttggagagctgaagggcaga

SEQ ID NO: 523360 - DNA, 51 bp, Homo sapiens
gaccaagagctgaagctgatcgcttcttctgcacggtacctgagatcctgg

SEQ ID NO: 523361 - DNA, 82 bp, Homo sapiens
ggccatggcgccagcagaaatcctgaacgggaaggagatctccgcttactgtaaaatggggaaaggagaaatttgaaggtgt

SEQ ID NO: 523362 - DNA, 75 bp, Homo sapiens
agatatcttgaaaagctgccagaaaggctttcgggtcacctccagcagctcccagttcagctcacgtgattcggc

SEQ ID NO: 523363 - DNA, 77 bp, Homo sapiens
acgcaggaacggctccagcatcaagatccgtctgacagactgggctggcttagatgaagatgaagatgcacatgtct

SEQ ID NO: 523364 - DNA, 120 bp, Homo sapiens
ttccctgatccttgtgatcccaggctccaagagtccacccttcccagctcagctcagtacctcaggtaaaataccatgaagattttgaaaaaacaaaggggagaggctttactcccgtcg

SEQ ID NO: 523365 - DNA, 100 bp, Homo sapiens
gttaaacaagaagtgttcagctgtaaaacataatagaatcaagggaattcccaaactcgatgatgccaatgatgcagcacaatcagataagttcacagcc

SEQ ID NO: 523366 - DNA, 50 bp, Homo sapiens
actgtacaagctttcaaagtcaatgtgtatcaaaccgaatgataaaaaag

SEQ ID NO: 523367 - DNA, 100 bp, Homo sapiens
tgaatgagaatgaaagtttatttttaatggtggtattatggaaaattccaagtaaagaactgagggtcagattgaagctgaagagggaactacccttttc

SEQ ID NO: 523368 - DNA, 83 bp, Homo sapiens
gttttaaacagaaggtgaacctctgagcaacatttcattgaattggatgaaaatagacagagattattgcagaaatgcaagga

SEQ ID NO: 523369 - DNA, 102 bp, Homo sapiens
cacaggactgcagctccccagcacggctcacatccggttcaagccaacactttcccagcagcaaaagtccccagagcagcaagaaacagtcctggacggcaa

SEQ ID NO: 523370 - DNA, 75 bp, Homo sapiens
aaactcatcaggacggaagcacaggggccactcagagtcgcccgagaatagagacggggtttcgccatgttggcc

SEQ ID NO: 523371 - DNA, 100 bp, Homo sapiens
agatcccaaacaactggcagaatttgctaggttcagctacttcagtgttagaatttctgtcccaaaaagacaaagagagaatcaaagaaatgaagcaggc

SEQ ID NO: 523372 - DNA, 75 bp, Homo sapiens
gtgcagaagtccagggaatggctggcccagcagctgagatcacagtggcaggccatctccctgacggtcatcgag

SEQ ID NO: 523373 - DNA, 101 bp, Homo sapiens
gccaggcccgggctgcagccgcgtctgatcgccgagcgcgccgcgtagacctccgctcccccagttttcggctttgtgagaaaccttaccatcaaacacga

SEQ ID NO: 523374 - DNA, 75 bp, Homo sapiens
gcgttacaagctttgtctccttcgacttggagtctttgtccaggacgacatggatgggtgcaaaaaagagctgcc

SEQ ID NO: 523375 - DNA, 74 bp, Homo sapiens
gtaataggagagaagatctataaggatggagaacgcataatcactcaggctgatgtgtgcagaacagactgaag

SEQ ID NO: 523376 - DNA, 143 bp, Homo sapiens
gggcattgcgtttgcagcctttgtgatcggagcactcctgacgggggccttgtggtacatctattctcacacagagtcttctacattcatgctgtagaagctatgaaagtcgtgggaaactatagagtcaacactgcaaactc

SEQ ID NO: 523377 - DNA, 98 bp, Homo sapiens
agacgagaagccgccgagagccgactaccctccgggcccagtctgtctgtccgtggtggatctaagtaagactttgaccccgacgcaggcttcagtga

SEQ ID NO: 523378 - DNA, 83 bp, Homo sapiens
gcgtcgtcggcctctgggcagcagatggtttagctgcattgtcattttctatcagttctctgaccttgattggaatgttggca

SEQ ID NO: 523379 - DNA, 101 bp, Homo sapiens
acgtcaaacactccaacgattgagagcatttaaagattggaatgcagtagccctctgggcctgggatattgtggttgataactgtgccatctgcaggaacc

SEQ ID NO: 523380 - DNA, 100 bp, Homo sapiens
gttgactttagtaagccctatgtcagggtaactatggaagaagccagcagaggaactccttttgatcacttgtaaaacatgcaacagaacagtgaaacat

SEQ ID NO: 523381 - DNA, 74 bp, Homo sapiens
cgggcctagaactccaaggagaaaggcggcggttgaccagtatctctaccacatgcgcctctctgatgagaccc

SEQ ID NO: 523382 - DNA, 50 bp, Homo sapiens
ccgccttcttctgcaggagtcaggttactcactataaacaatatccaccc

SEQ ID NO: 523383 - DNA, 75 bp, Homo sapiens
ccaaccttgcgctgcatccgctcgacctcgtgaagatccgcttcgccggagtatgctgctgctgttccgctttgc

SEQ ID NO: 523384 - DNA, 96 bp, Homo sapiens
gacatggatcctgaagtggcggccctgtattttcccaaaaagtacctaatcatcgagaacttcatcccgccggaggagaagaacaagatcatgaac

SEQ ID NO: 523385 - DNA, 100 bp, Homo sapiens
cagaaggaacttgcagaaatcacattggaccctcctcccaactgtagggtcctggcggcagagaccacgtcccagcaggagcggctgcaggccatcgcag

SEQ ID NO: 523386 - DNA, 82 bp, Homo sapiens
tgcagaccggaagagacacgcggggcttcaggtggcttctggcacagcagcttaattgaccggaacctcattgattattttg

SEQ ID NO: 523387 - DNA, 50 bp, Homo sapiens
ctgactgatgcagaaaggatgaagaagcaggtcctggggaccaaggtgga

SEQ ID NO: 523388 - DNA, 75 bp, Homo sapiens
ccatttggagatcttgacaaagcctcttctgtttccaatggggaagctcttcgtgggcggtcttgactggagcac

SEQ ID NO: 523389 - DNA, 101 bp, Homo sapiens
accggagagcgcggaggcagccatggtgcggttcaagcacagataatcagcaactgctgtgatgagatgctgcctttaatgctgctgcatgtggtcaaacc

SEQ ID NO: 523390 - DNA, 100 bp, Homo sapiens
gttggaagcagccgatccagcctgcggagcctgtggggcagcttcctcatcgtcctggtctgcctcatcttcagcgtgctgtccaccatcgagcagtatg

SEQ ID NO: 523391 - DNA, 82 bp, Homo sapiens
caagaggctcctgcagacccctggcttcctgaagtactagccggacatcatgagtggctgtcgggtattcatcgggagacta

SEQ ID NO: 523392 - DNA, 51 bp, Homo sapiens
acttgaatcacctgtcgaagattcattggaagcgttgttgacgaccatgga

SEQ ID NO: 523393 - DNA, 97 bp, Homo sapiens
ttccagaacccatttaaaatcgaccgcacagaggaaccaggtgcagatgggtctcttccttcctgcccccatctctctcactcctggctcagtgcgg

SEQ ID NO: 523394 - DNA, 96 bp, Homo sapiens
tgaggatgatgcaaaggcagcaagagatgcacaggaggctggttggaaggaaaatcatgcaacattcatgagcgaactaaaaaatcttcaggcttc

SEQ ID NO: 523395 - DNA, 74 bp, Homo sapiens
attccttctcacttggcctatggaaaacggggatttccaccatctgtcccagccttgcagtctcatcctactca

SEQ ID NO: 523396 - DNA, 74 bp, Homo sapiens
ttagctgtgctcgcgctactctctctttctggcctggaggctatccagcagcctcagctcaaaggcatcgtcac

SEQ ID NO: 523397 - DNA, 100 bp, Homo sapiens
ctgtgggcaaaacttcaatcctggagcagcttctgtatgggaaccatgtagtggaccccaccaacaactgaacgctttggtcaggctgctacaatggaag

SEQ ID NO: 523398 - DNA, 100 bp, Homo sapiens
cacagttggagaaaatcggcagctgagacggccttggccggttttgcagccactcttgatgatgacaaaccttggtactccatttttcccattgacaatg

SEQ ID NO: 523399 - DNA, 83 bp, Homo sapiens
tcttgcctgtgtcccacttgttcgcggcctataggtttcccaggcagctgcagacttgaaacagttctgtctgcagaatgctc

SEQ ID NO: 523400 - DNA, 98 bp, Homo sapiens
acgaggctgccgttcagcacccgtcgagcgaggaggaagccaagaatctggtgagcgaagccatcgcagctggcatcttcaacgacctgggctccgga

SEQ ID NO: 523401 - DNA, 100 bp, Homo sapiens
cgcagccatgcccaccaccatcgagcgggagttcgaagagttggatactcagcgtcgctggcagccgctgtacttggactcacaccacccggcaagaact

SEQ ID NO: 523402 - DNA, 110 bp, Homo sapiens
ttaaggaagttttgcctgaggattgtctgtttatgatggtgaagaacatggacgtttcatggagaagcttgaaactcgtatccgtaatcacgaccgagaaattgagaaaa

SEQ ID NO: 523403 - DNA, 88 bp, Homo sapiens
acaggcacgcgccaccactcccagaagggagaattccacaagttggctgatgccaagatatttttgagcgactgcctggcatgtgaca

SEQ ID NO: 523404 - DNA, 73 bp, Homo sapiens
atacatgagacagcagccaaacccccagtaatggaacggcggtatcccaaggaggtccaggacctgtatgaaa

SEQ ID NO: 523405 - DNA, 80 bp, Homo sapiens
ctctcctgatacagcaggcgctcaccatgttccctggagcaagacactaagggcgactaccagaaagcgctgctgtacct

SEQ ID NO: 523406 - DNA, 76 bp, Homo sapiens
ttcctgctggattttaagagaggacagagcgggatgccaccagcttgtccaaagggaagttccaggagctcctggt

SEQ ID NO: 523407 - DNA, 75 bp, Homo sapiens
gaggagcctctccgcccggcagccaccccatctgggaaacacgttggtcgtcattgcctccgagcccactttagc

SEQ ID NO: 523408 - DNA, 83 bp, Homo sapiens
tacagtgaaactgaccattcagaacagacaggcccaggactccctggaggaaaagcggaagcggcagcggtctgaacgcctgg

SEQ ID NO: 523409 - DNA, 48 bp, Homo sapiens
aaatgcttatcacatggaagcagagggttttggccaaattgggcgagg

SEQ ID NO: 523410 - DNA, 100 bp, Homo sapiens
agaaaatcagccagatgctgcctctcaacttaatgtggatgcttctgggaatttagcaaaggaagcaggagggcttatcgagacaaattgaagttttgga

SEQ ID NO: 523411 - DNA, 100 bp, Homo sapiens
gagaaaagcactggcgccacggctactcctccggctgctcaggtccccaacgctccggggccatggagtttgcctatctggggcgcctggctcacgaggt

SEQ ID NO: 523412 - DNA, 100 bp, Homo sapiens
aataagttatgctatgaggatgacaaactctggagtaattggagccaagaaatgagtataggggactacatccctggcacagagacccacatggctccgg

SEQ ID NO: 523413 - DNA, 51 bp, Homo sapiens
aaggattccaagtaactcttatttgaggagaggagacgccgtgagcgggac

SEQ ID NO: 523414 - DNA, 100 bp, Homo sapiens
ccgagagcgcgaatatcgtcatcgttagaaggcatcctgctatttgaaacaaggaaagttcaagcaagcagaaacactgtacaaagagattctcactcgt

SEQ ID NO: 523415 - DNA, 74 bp, Homo sapiens
gaggatgggctgcagacacagcaggctgagcagctgcaaacccccgaaaaagacccaacatgagtgaagtttcc

SEQ ID NO: 523416 - DNA, 97 bp, Homo sapiens
atcaaagcctacttatttgatgtctgctcccatcaggacaaggagaagggcctccactaccatgccctcttcacagttctgcaggctggaaatccaa

SEQ ID NO: 523417 - DNA, 58 bp, Homo sapiens
ggaagatgtgacaactaccggagaacagctttgctgagccatcaaggtctaatggaag

SEQ ID NO: 523418 - DNA, 97 bp, Homo sapiens
gaccctccctgctgagatgcgcaaattcactccccagtacaaaggtcgtggccctgaagttcatcccaaaattggggcgctcagagaaggagctgag

SEQ ID NO: 523419 - DNA, 98 bp, Homo sapiens
taaatccaaagaggagccagttaccatgactcatccaggagaccaagacacattccaccccagtggggggtcccataccactcatggatctgaatcag

SEQ ID NO: 523420 - DNA, 101 bp, Homo sapiens
tccagtgtcccttcttccacatgaaaaggataaggggacatcacccagaagggctatgaaaagaaaaggtccaaactcctatctccttacagcccgcagac

SEQ ID NO: 523421 - DNA, 90 bp, Homo sapiens
agacagaactcgtcagattcttgcctgcaggatcccttggttccagtaccccattatctatgacattcgggccagacctcgaaaaatctc

SEQ ID NO: 523422 - DNA, 90 bp, Homo sapiens
atgaaacacaaaagtcagatttggagaatgaagctcaggaatcttgcttttaagaaaattccccagaaatcctcccatgctgtttgtaac

SEQ ID NO: 523423 - DNA, 83 bp, Homo sapiens
cgcaggtcgaggacggtcggactcccgcggcgggaggagcctgttcccctgaggtatgatctcgtgaaaccttgagagaaact

SEQ ID NO: 523424 - DNA, 80 bp, Homo sapiens
cttcctcaactatctcgctgacacgcagccacataaagaagatccctaatagtcatttctcaacaattatatagtcaact

SEQ ID NO: 523425 - DNA, 98 bp, Homo sapiens
cgggagccgtccgtgtcaccgccggaacctggcgcagtaagactttgaccccgacgcaggcttcagtgattgccgcggatcagaagcctgagcacttt

SEQ ID NO: 523426 - DNA, 100 bp, Homo sapiens
gtctgatcccttgctcccatccctgcagcatgaacaagaacagctttgctgagccatcaaggtctaatggaagcatggttcggcattcttcatctccata

SEQ ID NO: 523427 - DNA, 83 bp, Homo sapiens
gctgcgtccttatcagccgagccgctggatgaaaaagaaagtcggcgtctgttccaacagatcctttctggtgtggattattg

SEQ ID NO: 523428 - DNA, 97 bp, Homo sapiens
cgccctcaaggccatgatcaaaacctaccagccctgcttcgtcctccggagcccctgcctacgccccatgtgctcctgcaggggctggggctgctgc

SEQ ID NO: 523429 - DNA, 83 bp, Homo sapiens
gggaaaagctctcatgggtgtccaattgctaagtgggaggcaagtgaggcctatctggttggcctttttgaagacaccaacct

SEQ ID NO: 523430 - DNA, 95 bp, Homo sapiens
ggatgaggagggctctgatccccccctgccggggagggcccagcgcatccgacagaattttgatttggctgctgggctgctaccttgaaatccaa

SEQ ID NO: 523431 - DNA, 82 bp, Homo sapiens
ccacgctacgctccgttgcttctctgaatgctaaagctggactggccattatggaggaggagctgcagcattcccattgtgt

SEQ ID NO: 523432 - DNA, 83 bp, Homo sapiens
aaacaggagagacagagccttggagaggacccacccgaggacgggtcaccatggctttggagcacctggtagtgtggcatgtc

SEQ ID NO: 523433 - DNA, 99 bp, Homo sapiens
gcgacggtggcggctctcggagccggcgcgaatccggcccccgcagcgggacccggtgaagatagtgatccggggagacaggaacacgggcaagacagc

SEQ ID NO: 523434 - DNA, 50 bp, Homo sapiens
cgccgcggctcttttctaaaagtatgctgggctcttgcactgtttggtgg

SEQ ID NO: 523435 - DNA, 98 bp, Homo sapiens
cagaaactttaaatcttgagaaaagaagattgtctatcatgaaggaggacctagaagaatcccttaggatgaagctgagtcttaccaaggtagttaat

SEQ ID NO: 523436 - DNA, 101 bp, Homo sapiens
tcagcccccgcaggatggctgcccgggtcttctacctgctcctggggcctgcggcctcaccatggacccagaatgcgcccagctgctcccggctctctgtg

SEQ ID NO: 523437 - DNA, 82 bp, Homo sapiens
tggcggcgccgagcctgagccgagaaaaccaaggtgtatgttggtaacctgggaactggcgctggcaaaggagagttagaaa

SEQ ID NO: 523438 - DNA, 111 bp, Homo sapiens
gcgaggacacgggctgcaacctgcagcacatcagcgaccgggagaacatagacggagataattttatggagaaaagctcctgaaaaactgaggaaacagagaacaaacttt

SEQ ID NO: 523439 - DNA, 75 bp, Homo sapiens
ccgagaccgcggccgggaccgaggcacatggattaattgatgtatgttgagtttatggagctgccttttggtggc

SEQ ID NO: 523440 - DNA, 50 bp, Homo sapiens
cagacaactgtcctgacatgctggaacctcagaacctgttctggatccac

SEQ ID NO: 523441 - DNA, 80 bp, Homo sapiens
gcttacgcagaaggacctggccacgcatttgaagacatgctggagaacccactgaacagcacccagtggatgaatgatcc

SEQ ID NO: 523442 - DNA, 97 bp, Homo sapiens
caagagcgtgccctacttcaaggataagggtgacagcaacagctcggcgggctggaagaagctaaaccagccccagaaatatttgaaaatgaagtca

SEQ ID NO: 523443 - DNA, 89 bp, Homo sapiens
ctagcgccgctgggcctgcaggtctctgtcgagcagcggacgccggtctctgttccgcaggatgggcacctgtgctggttgcacttgct

SEQ ID NO: 523444 - DNA, 100 bp, Homo sapiens
ggcacggcgtgacctgcgcagtggcgtccgttatcctacatggctttccaccaacctgggcatcctgacctgcatcgagtgttccggaatccaccgagag

SEQ ID NO: 523445 - DNA, 100 bp, Homo sapiens
ctgtttggaaagacccaggagaagccgcccaaagaactgcatcaacaacagcaacttgtgattggcggtgaccggatattcagttgcacatccccacatc

SEQ ID NO: 523446 - DNA, 89 bp, Homo sapiens
ggctgaggagttttcaatcccagagctgaagaagaagctgttcaaacgccggcgggtgttgaatcgggagcggcgtctgaggcaccggg

SEQ ID NO: 523447 - DNA, 83 bp, Homo sapiens
ggctggagccagtgtcaaccgagtagtgtctcccggacctcttcattgcctaaaatagtcgtgcaagcactgcagtgttccca

SEQ ID NO: 523448 - DNA, 83 bp, Homo sapiens
cacacacaaacatggtgtgcctgctgaaaaaaattgaaaaggctgtggtgtctcagcgcctgacagaatctccgtgtgctttg

SEQ ID NO: 523449 - DNA, 90 bp, Homo sapiens
gtcagaagttcagttcgcccaacatggaatgacttgaggcaaaagatgtgattgaagagcatggtccttcagaaaaggcaataaacggcc

SEQ ID NO: 523450 - DNA, 100 bp, Homo sapiens
ttggaccagagccttccctgagaatgctgaagccctggtacctgacagtgtaaagaaggagctcctacaaagaataagaacattccttgctcagcatgcc

SEQ ID NO: 523451 - DNA, 74 bp, Homo sapiens
aggagatgtactgtgcttggctggaaaaccccaaaagtgtacataaggcaatagagcatatgttctacaggaga

SEQ ID NO: 523452 - DNA, 82 bp, Homo sapiens
cgtggaagctgtgagcgcccccatcccggaggtctccgccggctcccgggtcaccgacgatgagggcgcacctgctgtcctg

SEQ ID NO: 523453 - DNA, 96 bp, Homo sapiens
ggcacgaagatattactcaggatcttcgaaatcatcttgttcacaaacttataacactgcctttaaattcagatgtccccaaggtatttgcagcgt

SEQ ID NO: 523454 - DNA, 95 bp, Homo sapiens
ccctgcaaatgagcgattttggtatttcagcagaaagactttcacagagactttcttcatgagattgaaacagaagtctaccagagaggccttga

SEQ ID NO: 523455 - DNA, 82 bp, Homo sapiens
caccaacaacaccacaataatccacagccaagggagtctccggtggactgcagcgttagcaaatgcagcaagctggtgggcg

SEQ ID NO: 523456 - DNA, 131 bp, Homo sapiens
accctgcccagcagaatttgtatagagatgtgatgttggagaactacagaaacctggtctccctagggactgctgagatgtcctctattcttgaagagcgtattcttggagctgatacctctgttgatctt

SEQ ID NO: 523457 - DNA, 82 bp, Homo sapiens
tctcaatatctgtcttcggtggactccttcggcagtccacccaccgccgccgcctcccagattggcggcagtaagcacacaa

SEQ ID NO: 523458 - DNA, 122 bp, Homo sapiens
aggggaacatggcgccggggcccccgtcgttgctgccgggattttggaggccggggccgcgctgagggcgcccagctgcgattacatcattaaggagaagacagtcttgctgcagaagaagg

SEQ ID NO: 523459 - DNA, 75 bp, Homo sapiens
ccctgagtctttgaggacacagcctcgctggaggcagtttctgctgctctgttaaaagcgaaaatgaaacaattg

SEQ ID NO: 523460 - DNA, 96 bp, Homo sapiens
agccatgcactgagctggggacatgcaacaataacaggttggtcaaagaaaaagtgatgtatgaaaaagaggcaaaacaacaagaagaaaagattg

SEQ ID NO: 523461 - DNA, 101 bp, Homo sapiens
gccgccgccgcccagagactgctgagcccgtccgtccgccgccaccacccactccggacacagtgctgtccccggcataggtccatctctgcagaagccat

SEQ ID NO: 523462 - DNA, 98 bp, Homo sapiens
gagaaattgcgggatgcacgcctgtgtcctcattgctccaaactgtgttgtttcagctgtattaggtatgttcatgcggatgctcctaccaataaaac

SEQ ID NO: 523463 - DNA, 100 bp, Homo sapiens
gacagaccgacagacagacagacagctggcaagaggcagcctgggggccacagctgcttcactggcccgagataacttcttccgctgtggtgtgctgtat

SEQ ID NO: 523464 - DNA, 82 bp, Homo sapiens
ctgcaagccggtgcagcagccttcagcttttggcagcatgaaagttagcagtgtctgatgatttgtgagcctcaagtgacta

SEQ ID NO: 523465 - DNA, 100 bp, Homo sapiens
ggtgttttgaaggatctttctgagttttaccggaaaatgttggagtgccaaactgtatcttacaccaagtaatattgttctgcttactgctatagctctc

SEQ ID NO: 523466 - DNA, 75 bp, Homo sapiens
gacctcggtttcctggacccattccgactcaggaggtagatgacttctttgagcaagagaagaacttccttatta

SEQ ID NO: 523467 - DNA, 50 bp, Homo sapiens
gcgttacaaggccttctacattaccgaatatgcttttaaggctattaacc

SEQ ID NO: 523468 - DNA, 98 bp, Homo sapiens
ggacctggtacctcttttgtgaagcggcagctgaggagactccggcgctcgccatggccgacgaaaagcccaaggaccaagaatcgccttcagccctg

SEQ ID NO: 523469 - DNA, 75 bp, Homo sapiens
tgggaccttctccctgcctggacccctactattgcaacaaggttgtggcagcactgcctgaaggtatgagaccag

SEQ ID NO: 523470 - DNA, 100 bp, Homo sapiens
gtttcctccaaggccctctgaagtgcagcccataatgaaggtcttggcggcagggcctgagcccaggctgctatgacacctacaatgcggacatcgactg

SEQ ID NO: 523471 - DNA, 96 bp, Homo sapiens
ctacattcctgctcctggcgctcagcaccgctgcccaggccgaaccggtgcagttcaaggactgcggtgatgacgaacagagtgattggttctatg

SEQ ID NO: 523472 - DNA, 82 bp, Homo sapiens
cacaaagcttttgtcagccaggttcctgaatgactgctagacaccatgggctgaactttatccccgcggcagcacacttcct

SEQ ID NO: 523473 - DNA, 50 bp, Homo sapiens
aattggccttctctagaagactcttgctccatgacaattcaaaaggtgaa

SEQ ID NO: 523474 - DNA, 100 bp, Homo sapiens
gatcatccatggcaatgaccctgcagaaataactgttcaaccaactgtggaagaggcctctgacaactgcactcaagaatgtctcatctatggccattct

SEQ ID NO: 523475 - DNA, 114 bp, Homo sapiens
ggatgaagatagtttaaccaaacaaccagaagaagtatttgatgtcttagagaaacttggagaagggaaaaggggaagatagtgatgtactcagtataaatgcagatgcttatg

SEQ ID NO: 523476 - DNA, 75 bp, Homo sapiens
tggtttcacactccaccaagcatcccattacagatagaagagacccttctcaggtgcagccagagagacactagc

SEQ ID NO: 523477 - DNA, 75 bp, Homo sapiens
aagcgcagcgcaccgagtggacattttggtctttgtccgcgggaattgaatgatctggcacgggaccctccagca

SEQ ID NO: 523478 - DNA, 100 bp, Homo sapiens
cgacatctggtcccttggcattacttctatagaaatggctgaaggaaaacctccttatgctgatatacatccaatgaggccagaatttatacatatttgc

SEQ ID NO: 523479 - DNA, 90 bp, Homo sapiens
cttcatagtcttcactgtgatagtacgtcatgtccattgacagcctccagctgggctatgcggaggatgggcactgcaaaggcgacatca

SEQ ID NO: 523480 - DNA, 87 bp, Homo sapiens
agggtgaaggaggcgaattttcagttgatagttacagctcttttgaggaagcttaagcagcaatccagggaaagtgttgaagaaaaa

SEQ ID NO: 523481 - DNA, 74 bp, Homo sapiens
ttgggtgaactctagcaattacaagagccagagcccagaggtggagcagttagggagggttgtggaactggaca

SEQ ID NO: 523482 - DNA, 97 bp, Homo sapiens
aaaacaatcgtgaaacttcagaatacttcaagaatagcagaggagcagatattacaccaccatattgcctcagtagagaaacttgctttgactactt

SEQ ID NO: 523483 - DNA, 80 bp, Homo sapiens
atggtcagtgccgtttaacctttattgtggtggagtccaccccgctgtgatgctgacatcagaaggaacacagcctcaag

SEQ ID NO: 523484 - DNA, 89 bp, Homo sapiens
tcacattcttctaatccaagcaataacccaagcaaaacttcagatgcagtttggaggagaccagcctgtctacatcaacatcattagag

SEQ ID NO: 523485 - DNA, 80 bp, Homo sapiens
gaaaagctgccaagttgaaaatggacgagtaatcgcctgctttgattcattgaaagcagatgaagcatattccatcggcc

SEQ ID NO: 523486 - DNA, 75 bp, Homo sapiens
gaaatggcggagtatctggcctccatcttcggcaccgagaaagacaagcctggtctccaagtcctctcctaagaa

SEQ ID NO: 523487 - DNA, 100 bp, Homo sapiens
taaaatgatcattgaaaacttcgaggcactcaagtcctggctcagcaagactctcgagcccatgattaacacagattcctcagatccagaagactgaaat

SEQ ID NO: 523488 - DNA, 75 bp, Homo sapiens
tgctgctgcctatcttgagttctgcaaaagctcaggttaatccaggtgatgatgaacagtctacacagatggctg

SEQ ID NO: 523489 - DNA, 100 bp, Homo sapiens
ctcttgactgtcttttgtggcatgctgatgaactatagcaatgagaatgccgagaccgacccgcccgcccgcggccccgcagcagctccaagaaggaacc

SEQ ID NO: 523490 - DNA, 100 bp, Homo sapiens
cgagaggaccaacggagcgctgaggcgggcgttttcttggatgaattgcttgctttggaggaatgggtaccacagaccatgtcatcgtcctggcgtccac

SEQ ID NO: 523491 - DNA, 100 bp, Homo sapiens
tggcctgggggcccgagaagcttcctctcagttttttcaagggggaacatggcaaaggtgttcagtttcatccttgttaccaccgctctgacaatgggca

SEQ ID NO: 523492 - DNA, 90 bp, Homo sapiens
gcacgctggactggatttattcagtggtgtttgatatacagaggaaagtcacctataggaacctgagcacctggtatacagagcttcggg

SEQ ID NO: 523493 - DNA, 100 bp, Homo sapiens
cgcttcgaggccgctttggcgccaaatcctgaggtctctaattaacagaagatggcaaagcccagccacagcagctatgtccttcagcagctaaacaacc

SEQ ID NO: 523494 - DNA, 75 bp, Homo sapiens
catgatgccccacttggtgaatggagatgcagctcagcaggccccttcacagatgtagtcactacaaatcttaaa

SEQ ID NO: 523495 - DNA, 99 bp, Homo sapiens
ggaagtcgagaaactgagagagcagctctctcaggcagaggctctactacccgaaggatagtgcccgaagttgctgcttggcatagatgagcctcagct

SEQ ID NO: 523496 - DNA, 100 bp, Homo sapiens
cacctcagcactatcccaagactgctggcaacaggaattcctcctgatcagcagagactgatctttgctggcaagcagctggaagatggacgtactttgt

SEQ ID NO: 523497 - DNA, 100 bp, Homo sapiens
ggagctctgcagtgggggcgtaaaggctggcagcctccccgggtgcctccgcggattcggggaaactgcaaggcttatttcaggcagcattggagctcag

SEQ ID NO: 523498 - DNA, 50 bp, Homo sapiens
aaaatcacagctttgagtgagaaacagatacagtttatgtaacttgatgg

SEQ ID NO: 523499 - DNA, 122 bp, Homo sapiens
gaagcttgtgattggctacgggcaactggtttcccccagtatgcacagctttatgaaggctgcaagaaagcgtaagattgccattcgaaaagcccaggggaaaaatgtggaggccattcggg

SEQ ID NO: 523500 - DNA, 75 bp, Homo sapiens
attagtcatgcaataaatgttctggttttaaaaaatacatatctggttttgggctggtgaattaccatatctccg

SEQ ID NO: 523501 - DNA, 74 bp, Homo sapiens
gaccactgtgggaacctcatgagcatgcacaacgtcaaggacagtcattttgtttactcattcagccctgttgc

SEQ ID NO: 523502 - DNA, 82 bp, Homo sapiens
agctctgcagccacatactatccgtttgttcaggaaccaccagtgacagattggtgcttcccgtgctgctgttgatgctggc

SEQ ID NO: 523503 - DNA, 97 bp, Homo sapiens
gtactggagtgatgagtttggttcttggcaggaatatggaagacagggatgattcagacaaacatagcttccaaaactcaaaaggatgtcatcagaa

SEQ ID NO: 523504 - DNA, 51 bp, Homo sapiens
aggccattgaccgcttcaatggcattattcagtggaagagagggaagacca

SEQ ID NO: 523505 - DNA, 57 bp, Homo sapiens
gctgcggccgccgcggaataataagccggagcctgtgtggtgcccctatctccttgt

SEQ ID NO: 523506 - DNA, 96 bp, Homo sapiens
ggttcgggcttgtcaggttctagatgccttcaattaagttgcagagttctgatggagagatatttgaagttgatgtggaaattgccaaacaatctg

SEQ ID NO: 523507 - DNA, 74 bp, Homo sapiens
cggcggccacggaggcaccatgaagaagtcttactcaggcttgaccactatgctatcatcaagtttccgctgac

SEQ ID NO: 523508 - DNA, 82 bp, Homo sapiens
cggagacgcgcaggatgccacacgaagagctgccgtcgctgcagagaccccgctatggctaacccgagcaacttcccgagaa

SEQ ID NO: 523509 - DNA, 95 bp, Homo sapiens
aaatgccacgagacctgtaacgcctccaagggagcacctactgtgccaccatggtccagcactgtgaagccctcaaccggtctgtccaagttgta

SEQ ID NO: 523510 - DNA, 82 bp, Homo sapiens
atttgacattattgtcctaagtgttgctagtgatatctcgctaacaggaggctcagtagtacagagaatacggctgcctgat

SEQ ID NO: 523511 - DNA, 100 bp, Homo sapiens
aatatgaagaggcattatttatgaccttttctatggaaagatacagtctcgctgtgatgcccaggctggagtgcaatggcgtgattttggctcactgcaa

SEQ ID NO: 523512 - DNA, 90 bp, Homo sapiens
aggggcgaagaggacgagggggccaaggcttcctccgggtgtgccggtccaacaaaagcccttgggtctgtttgacttgttcaagtgtcc

SEQ ID NO: 523513 - DNA, 100 bp, Homo sapiens
gatgaatcaagcgagactcaaagtcctcagagcaagagatgaccttatcacaaggctccaggaagaaaagcgccagcgagacctggactgggaccggcgg

SEQ ID NO: 523514 - DNA, 50 bp, Homo sapiens
gagaaatggagcccttctccaagaatgtgacagtgatgataacatgggtg

SEQ ID NO: 523515 - DNA, 74 bp, Homo sapiens
accaattatgggagggctggccaacttctgctacagacgactcagtgcaaagtgatctaacattacagagtaac

SEQ ID NO: 523516 - DNA, 82 bp, Homo sapiens
tgacagtagagggacctcctcccaaagatgtggggcatgaggacactggccactccttgcatgactacaaggaagctctgat

SEQ ID NO: 523517 - DNA, 90 bp, Homo sapiens
atcctggagagcctgcaggacggcgcggcagagtccccgtacgcctacagtaacgcctgacatttaccccggtaactgctgggcatttaa

SEQ ID NO: 523518 - DNA, 50 bp, Homo sapiens
gtacaagatttaaaaagcatcgtagagcaattctgtggtgttcttggtca

SEQ ID NO: 523519 - DNA, 75 bp, Homo sapiens
attcagtctacggctggggccgtcccagttcgcaatgagaaagagagatggctaatgaatggcgcttgatgacag

SEQ ID NO: 523520 - DNA, 101 bp, Homo sapiens
cgatgaagtgattcaagttaatcatcagactgtggatcctggtgcacctgagccgtggaggggctgaagtccagatctttgctcctgacgtccctcagatg

SEQ ID NO: 523521 - DNA, 90 bp, Homo sapiens
gccagtggcaatgacccagacccggacgacccccattgctgagccagcggagctgcttggtatatgaatgacctaaaggtacaaataaag

SEQ ID NO: 523522 - DNA, 90 bp, Homo sapiens
gtctgtgtaagaagtactccagggaaacctcccagactggcacagcctccaggttggcgggctcatctgcgctggggttctgtgcgccat

SEQ ID NO: 523523 - DNA, 90 bp, Homo sapiens
catgggattttttaccaaggaagaatggttaaagggaatgacttcattacaatcttcctcagaactgtgatcctaacattcccctagttg

SEQ ID NO: 523524 - DNA, 55 bp, Homo sapiens
caccgcgcactcggagatgcagccgctggttacttcctcagaatgttggcctcct

SEQ ID NO: 523525 - DNA, 100 bp, Homo sapiens
gataccaaaacagtcttggaccaagctctcagagtatgtcaggtgctgcagggtgcacagctgatcgccgtggcctcctcggaccccgcggcggcgggcg

SEQ ID NO: 523526 - DNA, 82 bp, Homo sapiens
gccggcctagcgtcctggaattacttcaatcaagtggccagcatcgaaatgttcagccttttagtgatgaagatgcatcaat

SEQ ID NO: 523527 - DNA, 100 bp, Homo sapiens
cttcaacttctgctttggccctggagttcccatgccctggtgtcttctaccagttcttaggtaatgattgatgaatccctttcatccgatgaccctgatt

SEQ ID NO: 523528 - DNA, 75 bp, Homo sapiens
ggcagaagatggctgtggagagcccgtccgacagcgctgagtggaggccatagtggagtttgactaccaggccca

SEQ ID NO: 523529 - DNA, 83 bp, Homo sapiens
aacttcctgcaggactccaaggtcattttcgtggagaaagccccagagagcgcctgctcgctgtgcccccgggttatgacgac

SEQ ID NO: 523530 - DNA, 51 bp, Homo sapiens
gtttcatctgccactgccccaagccttgttcgggagtctagcagttctcgc

SEQ ID NO: 523531 - DNA, 75 bp, Homo sapiens
acaacacagggaagcttggggagggtaacaagatgctcaactatagtgctcccagtgcagggggttgcctgctgg

SEQ ID NO: 523532 - DNA, 99 bp, Homo sapiens
gtgaagtcctacagagttatcaggttccagaccctgccttctcttctgaaagtatgcctgggtggagaagtactttggccctgactttctggagcagat

SEQ ID NO: 523533 - DNA, 87 bp, Homo sapiens
gcgcctcgggcgcggctccgcagtgagcccaccaagaaggaagcggggaccctcacaatgatcccaatgctcagggggatgccttca

SEQ ID NO: 523534 - DNA, 80 bp, Homo sapiens
cgggaaatctccaagtcagaaagctactcccgagcccggagaggacccacgcgtgacccgggccaagtacttcattcgag

SEQ ID NO: 523535 - DNA, 90 bp, Homo sapiens
aataatagcaaacatcgatggcctactggggataacattcatgcagaacatcaggccaggacgactggaatgggaccaggccgtcgctga

SEQ ID NO: 523536 - DNA, 99 bp, Homo sapiens
gaaaacttgaaactaatcctgatattaagccatcaaatgtggaacctatggaaaaggcactgaagtggcagcagcatcagggattgcttcctcctggta

SEQ ID NO: 523537 - DNA, 95 bp, Homo sapiens
ggaaaattttctcctttgtgccagtggggtggagagattcaaccagttagcgtgaaagttggagataaagttcttctcccagaatatggaggcac

SEQ ID NO: 523538 - DNA, 90 bp, Homo sapiens
gtggcaaacagctgtataaactcttgtaaacaggtttggcagttctctaccagtggaccaatcttttcatccccgtgtacctcaccatca

SEQ ID NO: 523539 - DNA, 73 bp, Homo sapiens
gagtcttgtgaaatcgcgtggactgcaacacccagcagcgcgccacaatggtgcgcatgaatgtcctggcaga

SEQ ID NO: 523540 - DNA, 75 bp, Homo sapiens
taaagattccagagaagcctgtgaacaaaatccaagtattttagaacatgctcaagaggtgagcacttaacaata

SEQ ID NO: 523541 - DNA, 82 bp, Homo sapiens
ccttgttcccccaaatgtctgactctgactctcggactgagaaacgcaaggagaactacgatgacccgcacaaaacccctgc

SEQ ID NO: 523542 - DNA, 94 bp, Homo sapiens
ttcactgtggattcaggcgcttccgagcctcacctttattctctcagcacactgcagagtatgctcaggtaatcaaaatgttgggaaatggacg

SEQ ID NO: 523543 - DNA, 75 bp, Homo sapiens
cggagctgcctggaggcggccgcactcggtttggtgccctggttgtcagatgttggaaagcagtaggacggaaca

SEQ ID NO: 523544 - DNA, 75 bp, Homo sapiens
gtcgtcacggaggacgggaaaatccagcagcagcactgcaggagtttgtgaccaagaacttcaagagtcaagaca

SEQ ID NO: 523545 - DNA, 100 bp, Homo sapiens
aagaagaaccggaagaaactgtccgagaagcccaaagatgagttccacccgttcatcgaggccctgctgcctcacgtccgcgccttcgcctacacctggt

SEQ ID NO: 523546 - DNA, 75 bp, Homo sapiens
cctggtgctggtgggtaacaaaattgatctggaacagttccgccagagttgtctgctggttctcagcttgaagaa

SEQ ID NO: 523547 - DNA, 101 bp, Homo sapiens
ccagcgcagcgacggggcgctgcctggcccaggcgcacacggaagtgctgctctgttaaaagcgaaaatgaaacaattgcctgcggcaacagttcgactcc

SEQ ID NO: 523548 - DNA, 75 bp, Homo sapiens
ctctgggagcctagaatgcatcagtgcccttgtggcgaatggggctcacgtcgaaccaaaatccacacccttatc

SEQ ID NO: 523549 - DNA, 50 bp, Homo sapiens
gtagcctgctgtcgcccagccgcggaacgggattttccaacagaaaccat

SEQ ID NO: 523550 - DNA, 101 bp, Homo sapiens
cggatctcaccgccgctcaggtcctattttgtaacggattatgatccaaccattgaagattcttacacaaagcagtgtgtgatagatgacagagcagcccg

SEQ ID NO: 523551 - DNA, 100 bp, Homo sapiens
gcggagtgggcgatgccagcgtgccaggacaaatgatgcgaaggttggtacattagtgggggaagacaaatatggaaacaaatactatgaagacaacaag

SEQ ID NO: 523552 - DNA, 83 bp, Homo sapiens
ccgcgaggaggcgcgggaggtgttcgagaacgaccccgagacggatgcctaaatcaaaggaacttgtttcttcaagctcttct

SEQ ID NO: 523553 - DNA, 97 bp, Homo sapiens
tcctccttttggatgtaccttctcttctggcatggattccgtgaaggaacaacacctaaacccaagagggcagctgttgcagcatccagttcatctt

SEQ ID NO: 523554 - DNA, 100 bp, Homo sapiens
tcttacaagaatctagagaatgagcttgaattgacaaaaatggacaaaatgtcctttgttgaaaaatatgagaaaactacttcagcagtttatgatgtag

SEQ ID NO: 523555 - DNA, 101 bp, Homo sapiens
cagtgtttcgtgtgcgctcagtgcttccagcagttcccagaaggactcttctatgaggtactaggttttgacaagcttgcatcatgcgtgagtataagcta

SEQ ID NO: 523556 - DNA, 83 bp, Homo sapiens
gctgcatgaaaggcgcatcgtgattatctcgagcaaattaagcactgtttattttaggacagtggaacttatagaagagccta

SEQ ID NO: 523557 - DNA, 82 bp, Homo sapiens
tggcctgggcgctccggtggcggcggagctgcgtgcccagatgcgcgacctggcacggggcatgttcgtctttggctacgac

SEQ ID NO: 523558 - DNA, 98 bp, Homo sapiens
ccagggtcaccatcaaaatggaatgtaaccctagccaggtgaatggctcaaggtggaagattgctctgctgtgaatcgtgcccagcttccttccaccc

SEQ ID NO: 523559 - DNA, 113 bp, Homo sapiens
cagaccgaaccggcgctcctgcccccggggtgacgcgcagctcccagccggctgaaggtgatgtggccgccctcaaccgacgcatccagctcgttgaggaggagttggacagg

SEQ ID NO: 523560 - DNA, 100 bp, Homo sapiens
gggttgtatatagccatgaatggagaaggttacctctacccatcagtatttgaaccagaccatacaggatgatgcatccacaggggagcgttctctgaac

SEQ ID NO: 523561 - DNA, 75 bp, Homo sapiens
agagtaccgcttggagatcctagagtggatgtgtacccggtgggatgctatggaatatgatgagaagctggcccg

SEQ ID NO: 523562 - DNA, 76 bp, Homo sapiens
gactgtgagacgacaggctgtggatgtgtcccccctgcgccgtgtgaaccagaatggcttcagttctgtgcaggcc

SEQ ID NO: 523563 - DNA, 75 bp, Homo sapiens
gtttcttactcgggagctggctgaagatggctactctggagttgaggggtccctgtgaaggtgaccaacgtcaag

SEQ ID NO: 523564 - DNA, 82 bp, Homo sapiens
tttctattttccctacgaaaaacagatctttttaaggcaccatgactcctgtgaggatgcagcactccctggcaggtcagac

SEQ ID NO: 523565 - DNA, 137 bp, Homo sapiens
ggaggggacgtcacatgtcattataccttcacccagcatttcatccctcgtcgaaaggattggattggcatctttagagtgtcagttgtacccgaggcgttctcagcagcagcaagtacctgtggtggatttccagg

SEQ ID NO: 523566 - DNA, 100 bp, Homo sapiens
gttcaagttcacttattgcctatgctgtattccataatatacagaaatctccagaggacagttaatgattggacgtcatccaatgagaaagcagtgatgt

SEQ ID NO: 523567 - DNA, 100 bp, Homo sapiens
tgggtgttgacctatgaaactgctctgcagcagatattgagaaataggagttcagaagcactaccacaggaagagcaagaaggaagtggaagtgaggaga

SEQ ID NO: 523568 - DNA, 76 bp, Homo sapiens
aattcaaaaaggataaggagatcatagcagagtacgatactcaggtcaaagtgttaagtccaaaagtgctgggcat

SEQ ID NO: 523569 - DNA, 75 bp, Homo sapiens
gaaactgctttctaaaacaccagaactcaacctgttccaagatgagatgggattctccaacatggaagatgatgg

SEQ ID NO: 523570 - DNA, 146 bp, Homo sapiens
gctgcggggcgctgactgccggctgcttccctgggctgggcgtcagccgccaccggcagcagcagcaccaccggacgtgaccatgcagcaggtggccaggacagtggctaaagtggagctctcagaccacgtgtgtgatgtggtgt

SEQ ID NO: 523571 - DNA, 98 bp, Homo sapiens
gccgctgcagccaccaccgccaccatgtcctaccaaggcaagaagaacatcccgcggatcacgaatatcctccgaatcctaaatctagagctccaagg

SEQ ID NO: 523572 - DNA, 101 bp, Homo sapiens
gatctacaggatttatcaaatcgagtcactgtcaaatcttttagagaaatctcgggttgttaaacagccaagaggtgaaagaaacttccatgtgttctatc

SEQ ID NO: 523573 - DNA, 82 bp, Homo sapiens
agcgcttgatgtgcgcggagagcaatcgccgggacagctgcaagggcttgtcaatgaggcagatcagattcaggttcgacgg

SEQ ID NO: 523574 - DNA, 115 bp, Homo sapiens
ctcacaatgaggctccctgctcagctcctggggctgctaatgctctgggtctctggttcccgtgtcagtggctatgatgacacctcaagttatcactccccagcaaatgcagcag

SEQ ID NO: 523575 - DNA, 100 bp, Homo sapiens
tccttgtatgccatagtattgtgcaacatgttggcagataaattgaacatgactccagaagaagctgaaaggtggattgtaaatttgattagaaatgcaa

SEQ ID NO: 523576 - DNA, 122 bp, Homo sapiens
gtggcttaaactcttggcatttggctttgcctttctggacacagaagtatttgtgacagagccttagatcgtctgtcagtgaaggaattcgggcagttgatgaacgaatgtctaaacaagag

SEQ ID NO: 523577 - DNA, 98 bp, Homo sapiens
tacaagctctctcttgagccgctgccttgttaccagctggagcttgacgcaggttcagccgtctgtatatctccccagatacctgaaactgaccacct

SEQ ID NO: 523578 - DNA, 82 bp, Homo sapiens
cctcaagtcctggctggccaagttactggagccgatcgatctagggcagccctgcagaggtacctgttctactgtaatcgct

SEQ ID NO: 523579 - DNA, 74 bp, Homo sapiens
cgtggtggaaaacctggctggcctcaagtacagggtcatcaagggcaaaatccctcactttaaggaggttatca

SEQ ID NO: 523580 - DNA, 98 bp, Homo sapiens
gcatcacaggccgcgtctttgacgacatatctgaagagatggattaagaatgctttggattaaggattgtggagcacatttcaatcattttaggattg

SEQ ID NO: 523581 - DNA, 90 bp, Homo sapiens
gcatgcctcaccaagtcacatgacaagcataatatatttggtctgcggcctgtcgattatacagatgatgaaagtatgaaatcgctattg

SEQ ID NO: 523582 - DNA, 100 bp, Homo sapiens
ctctgccctatgaacagcttaagcacttttaccgaaaaccttctccccagcatgacgacagagatgatggtgtggattattgggccaaaagaggaagagg

SEQ ID NO: 523583 - DNA, 82 bp, Homo sapiens
gattaatccagtgccgcctggaggcagccggtccaacggcgtgatggtgggcatgggtcagaaggattcctatgtgggcgac

SEQ ID NO: 523584 - DNA, 101 bp, Homo sapiens
cgggaggagcctgttcccctgagcacgcactcctggctttaaagtttatacttgcatttgccatacctgataagccacggcatatccagatgaaactagcc

SEQ ID NO: 523585 - DNA, 99 bp, Homo sapiens
cacatggtgtgggccgacatcaagagctgcgagatccaacaggttctccgtggaggagccagccaacgtcctttgaccccaaaccagaaccagcaggga

SEQ ID NO: 523586 - DNA, 82 bp, Homo sapiens
ggcacatggcccaggcagaccttgcagtcaaaagacgagttgtactgctgtcacaggaaatggacgctggattacaagcatg

SEQ ID NO: 523587 - DNA, 90 bp, Homo sapiens
ctgatctccatgtcctgttgtggggcttttacagcctttgggatccacctgatggctggccgagtaccccagggagctgatcgaatagca

SEQ ID NO: 523588 - DNA, 75 bp, Homo sapiens
tgggaccgggacctgctgctggacccggcctgggagaagcagcagcgcaaggttctacatgaaacattttctcaa

SEQ ID NO: 523589 - DNA, 100 bp, Homo sapiens
atcagcgtggaggacctgtggaaggcatggaagtcatcagaaggtgggatgtgtgtgggctgaaattccgagctgcggttgtgcatgagaatacaccctt

SEQ ID NO: 523590 - DNA, 82 bp, Homo sapiens
ccccggtgtgcctcggcagccttgcgctgctctaatggtccggacttccgtgtgtggtgcgcgtgggcagggcgcggggaca

SEQ ID NO: 523591 - DNA, 75 bp, Homo sapiens
ggccaatccttgtacatcctcagctcgctgttggcagaggctgcatgcagggcatggtgccctacctgcctgagc

SEQ ID NO: 523592 - DNA, 75 bp, Homo sapiens
gagaaattggccatggaagctttggagcagtgtattttacctctgtgagtgaaagccttcagagggaagctgcta

SEQ ID NO: 523593 - DNA, 75 bp, Homo sapiens
agctcacccactgccagcagagaattttgtggccaaggcccatggctctccacgggtgtactggctggggctgaa

SEQ ID NO: 523594 - DNA, 100 bp, Homo sapiens
ttaactagagaaggaaacgggactaaactggcgggctccgtggaagcgtggccggcagcgtcccggacgaggagtatcccagtcgacatcagtgacagtg

SEQ ID NO: 523595 - DNA, 137 bp, Homo sapiens
gtcctctgagaagtcaagattctgtctttaactctattcaatcaaatactggaagaagccagggtggttggagacatgccacaaaatgttgaatgaagataggcagcgttggcaaggagagtttctgaaacttccac

SEQ ID NO: 523596 - DNA, 50 bp, Homo sapiens
atcatgtctgcgagccaggattcccgatgaaggatttgggggcagagcac

SEQ ID NO: 523597 - DNA, 83 bp, Homo sapiens
ccgaccctggccgccccgagcggagcctggaggttcgtgctggccgtgggcagcgccgtctttgatgccatgttcaacggggg

SEQ ID NO: 523598 - DNA, 100 bp, Homo sapiens
tgagttcgaggcaatcctggacacggtggatccgaacagagtggagactgctgcacggactctggaaccatgaacatatttgatcgaaagatcaactttg

SEQ ID NO: 523599 - DNA, 75 bp, Homo sapiens
ctccgcagcaagatggcggacgagaaggacagggaaggttgtgaccgagattcccgacgagagagactgagggga

SEQ ID NO: 523600 - DNA, 100 bp, Homo sapiens
gcacgcctccctcatccggaccatcatcggcgatggtctcctgatcctggctgataagctccagggccccttttcctttgagctgacggccgagtccatt

SEQ ID NO: 523601 - DNA, 90 bp, Homo sapiens
gctttgtctatcttcttccttaggaaaccaaggctaagaatattgtacacaaagattcttgatgttcttgaggaaatccctaaaaatgca

SEQ ID NO: 523602 - DNA, 90 bp, Homo sapiens
catgttcacgtgacatcaagaggaagcggaaaccagtggccacagcatctttgtctagccccagtgcagacagagctttttgtacatgcc

SEQ ID NO: 523603 - DNA, 75 bp, Homo sapiens
tttcacccattattggttagtgggaggctgagaataccagaaaatgtaaggtactcaactgtgtggggtactaca

SEQ ID NO: 523604 - DNA, 50 bp, Homo sapiens
gtttccgttaagctggacaacagtttttggtgttgagccagacttgacca

SEQ ID NO: 523605 - DNA, 75 bp, Homo sapiens
gagccctggaccattatctcacccttcgaagggttaaagcacgaattgggagctctcagcgacatcaccagtcag

SEQ ID NO: 523606 - DNA, 83 bp, Homo sapiens
actcatttggataaagaccaagaagtgggattactggattatatgaacccagtgacttgattgtaaaaatttacagagcggaa

SEQ ID NO: 523607 - DNA, 87 bp, Homo sapiens
tgacgttttccacaggcatcaaaatggagaatttagttgagagcaaacaccacaagcttgcccggagtttaagaagtggaccttctg

SEQ ID NO: 523608 - DNA, 76 bp, Homo sapiens
gacattcagagttgtttcctccatttgctaaaggaatagtgtttgacagtgatctgacacaaacacagctgaagca

SEQ ID NO: 523609 - DNA, 100 bp, Homo sapiens
agatttaacatatgagctgacagtcaaaagttcggaacagacagatggctgagagctagcaaggaaaactcaggaccatgatggctcagtttcccacagc

SEQ ID NO: 523610 - DNA, 98 bp, Homo sapiens
cgtgggctccacgttcttacttggaaaagggtatccaacactcacagccttccagtgatacattgcttttggaagtagtgaaacaagtaaaagttagt

SEQ ID NO: 523611 - DNA, 100 bp, Homo sapiens
cgccggccccatgaggagggacgtgaacggagtgaccaagagcaggtttgaggtccttccaaccctcctgctaccatgaagattgcagtgattggacaga

SEQ ID NO: 523612 - DNA, 100 bp, Homo sapiens
agaaaatgcaaactgaaacctgggaaacagtgcagattggctcgacatcgaaaaatagtggaacctgaagtggtaggagagagtgactcagaagtagaag

SEQ ID NO: 523613 - DNA, 96 bp, Homo sapiens
gagcaccacaggcgcccgaaggccggaacagcataagcagtactataatggatgtagacagcacaatttccagtgggcgttcaactccagcaatga

SEQ ID NO: 523614 - DNA, 50 bp, Homo sapiens
gcagaggaaccacacgctgatcatgcagcagccgctcttctaaaacattc

SEQ ID NO: 523615 - DNA, 83 bp, Homo sapiens
ctggtgattgctgcggtgtttgaccgagacataaactgcagaagagcagcctctgttgggcccgaaggcatcctgcagaacgg

SEQ ID NO: 523616 - DNA, 73 bp, Homo sapiens
tacctggcattgccttttgttgaggggatcatcgtcttgctcttcttttatctcagtttgtgggtagccagtc

SEQ ID NO: 523617 - DNA, 73 bp, Homo sapiens
gccgccgggcccgggcatggtggtctggggcaacgcggaagtttgcagaaaaaacttcagcatgtgccaggaa

SEQ ID NO: 523618 - DNA, 90 bp, Homo sapiens
cccgaggccgtggctgaggtgaagagcttatgcagaggccaggatgtgggcccagccctgtgccaggaggctggctggaataaaggtaca

SEQ ID NO: 523619 - DNA, 90 bp, Homo sapiens
tggaggtgcgatggccaagtggactgcgacaacggctcagacgagcaaggctgtcaggctgacccgcggctgattgagtccctctcccag

SEQ ID NO: 523620 - DNA, 75 bp, Homo sapiens
tgcccgccctggccgctcgccgcccgcccgcccgacggagacggggttatggttttgtgaaattcacagatgaac

SEQ ID NO: 523621 - DNA, 101 bp, Homo sapiens
ctctttgtctgggtcagtcaagaaccatttccaaacaaggacatggagggaaggcttcctaagatagaagaggagttatgggaagaagaatttattgaacg

SEQ ID NO: 523622 - DNA, 90 bp, Homo sapiens
atcaaagacgtaatcaaagacggcaacgcgcttatcagcgctatgagaaagcgatcgcctcaccggcccatcctccaagccggactgccg

SEQ ID NO: 523623 - DNA, 98 bp, Homo sapiens
caggacctggggccaaaagccaagtgttaagtccaaaagtgctgggcattgccatcgctcggtatgacttctgtgcaagagatatgagagagttgtcc

SEQ ID NO: 523624 - DNA, 76 bp, Homo sapiens
cccccgcgtccctgcgaccgccgcggcgaagatggcgaaagggcgtgtggttgcgcctgaggaagatacttttctg

SEQ ID NO: 523625 - DNA, 100 bp, Homo sapiens
aggcgctctgcacaggaagctgcaggcacagaaaactgaatctgtagataacgagggagaatgaattgtcatgaaaaattggggttgattttatgtatct

SEQ ID NO: 523626 - DNA, 100 bp, Homo sapiens
ccttgaaggaccgaaaatggcagatattcaaaacgtcagcaaccaaaggcaccggccttgatgaggcaatggaatggtgtggaaacaggaagagaactag

SEQ ID NO: 523627 - DNA, 59 bp, Homo sapiens
atgcgactcaaagctgcacggcagtctgtttatgagataatgctctaccacaagaaaat

SEQ ID NO: 523628 - DNA, 75 bp, Homo sapiens
aacacctgaaggtgaagaacatcatccagtggcagacactgaaaataaaaggaagactcgccagccagatgccaa

SEQ ID NO: 523629 - DNA, 100 bp, Homo sapiens
actgaaacgatcctctcatctcagcctccaaaagtgctggcattacaggtggagtatcacttcctctctccctacgtatctccaaaagagtctcctttcc

SEQ ID NO: 523630 - DNA, 100 bp, Homo sapiens
caggacacagagactttatcaaaaacatgattacagggacatctcagttttgggaggtgatcagcgatgagcacggcatcgaccccacgggcacctacca

SEQ ID NO: 523631 - DNA, 83 bp, Homo sapiens
ctccgacggcggtccatcctgaactcccccactggaaaggattctgaaagaaatgaagtcagccctcagaaatgaagttgact

SEQ ID NO: 523632 - DNA, 100 bp, Homo sapiens
cccagagcgcactcaccaactccacgggaggcaaggcctgacaggctgaagtcacctggaaggggaccgaatgccatggacaatattaccaggcagaacc

SEQ ID NO: 523633 - DNA, 98 bp, Homo sapiens
tcttcatcaccttcgtggtcgtctggtcctactacgcgtacgtggtggagctctgcgtgtataagctccgaagaagtatgcctaacctagcccggatg

SEQ ID NO: 523634 - DNA, 100 bp, Homo sapiens
aatacaaatcatggagccgctggggtcccttttgcctcagatactattttgaagtacaagccagctgccatgttgtgagcacataccacatagctccatg

SEQ ID NO: 523635 - DNA, 98 bp, Homo sapiens
cccagtagacctgtctgcctccttttagtgtcctctgagctcctgtccgttgcagcccagacactcctgagctcagacaccaaggctccggggagcag

SEQ ID NO: 523636 - DNA, 89 bp, Homo sapiens
ttcaaagtggcccagtatgtggtacgggaagaagaaatgggggtctatcatttggcaagtgtacgcttacgtgatctatgtctaaaact

SEQ ID NO: 523637 - DNA, 76 bp, Homo sapiens
tttctttgcagcaagcgatggcatagtaaatgaaaacttggatctgccactgtgaaggagatgatgagagccccct

SEQ ID NO: 523638 - DNA, 100 bp, Homo sapiens
gcgcctcaatgaccggattgagatgtggagttacgcagcaaagcaaattatgcgcacagccatgaagtataacctgggattggacctgagaacagctgcc

SEQ ID NO: 523639 - DNA, 90 bp, Homo sapiens
gctacaaaaatcaatctcagggctacaaccagtggcagcagggtccatgctgtgacctacaagcaaactaaatagccaacatttctgaac

SEQ ID NO: 523640 - DNA, 100 bp, Homo sapiens
ctgcagctcagaaaggaacatactctcaaaatatttacttatatcaattcctggacacagagctgcagcccttggatgaggcagtcttgcagcaaaagcc

SEQ ID NO: 523641 - DNA, 82 bp, Homo sapiens
gaacatttctgagtcctcacgaaactatttcagggccttggacaagttgttactgactatgttcatggggatgccttgcaga

SEQ ID NO: 523642 - DNA, 101 bp, Homo sapiens
gcgagatcttcgaccgctacggggaggaaggggttgctgtggcactgaagcaagctatgactctggaatttaaagtttatcaacaccaggtggtggccaac

SEQ ID NO: 523643 - DNA, 100 bp, Homo sapiens
attgactatggtctctccggctaccagaagactggactttatgagtataaagtctttggtgttctggaggactgctcaccaactctactggcagacatct

SEQ ID NO: 523644 - DNA, 100 bp, Homo sapiens
ggtgctgcagatggtgctgaggatggagaacccaccaagccccgctaggagccacctagactggatgcagagcatgaacatctgctcaaattaatgacca

SEQ ID NO: 523645 - DNA, 100 bp, Homo sapiens
atgacagcagcttcagaaccagagctggcttccagaaatatggctacacacacctttctgcaggagagctgcttcgtgatgaaaggaagaacccagattc

SEQ ID NO: 523646 - DNA, 84 bp, Homo sapiens
cttttctctcgggcttcatctcttgtgtggggagtttcatcctagcgggaactgtggctgcaccatctgtcttcatcttcccgc

SEQ ID NO: 523647 - DNA, 100 bp, Homo sapiens
tggagcccagtgatgccttcatgttctcaggtctcaaacaggtattgttgcagcatctggcagtgagactgaggatgaggacagcatggacattcccttg

SEQ ID NO: 523648 - DNA, 96 bp, Homo sapiens
aaataaatgcacgtctctcttcagctcactgaccatctgcctacctcccgttaatggaaccgcgactcacagacttcattatcctggcagtatggg

SEQ ID NO: 523649 - DNA, 82 bp, Homo sapiens
ctttggtctgttgtgctggcttggtgacgctcacagtgctgggaaggaatctatccaagcaaattgtggctactaatttgcc

SEQ ID NO: 523650 - DNA, 97 bp, Homo sapiens
ctttgatattgatgtgaacgcctctgtgtttgaaacaaacattcgagcttttacaaagttgatcacagtaaatggacaagaatatcatcttcaactt

SEQ ID NO: 523651 - DNA, 100 bp, Homo sapiens
ctaagcgaggggatcctcatgagttaagaaacatatttctacagacctgtcatttactccatcctttatagtgatgctacaggacgaagaggaatggata

SEQ ID NO: 523652 - DNA, 100 bp, Homo sapiens
ccagtaccggctgacctcgctgtacgccgagcacccaggcgactgcctcatcttcaagggcgtctctggccgagcctctttttgtggaaaacgacagcag

SEQ ID NO: 523653 - DNA, 83 bp, Homo sapiens
ctgcaacaggcacttctccccacaacccgaaaacagtggccaaatgtcaggtaactcccagaagaaatgttctccaaaaacgc

SEQ ID NO: 523654 - DNA, 75 bp, Homo sapiens
accgtgggcagcttcgtgtgcaccacctgctccggcctcctgtactccaaagattcaggtttactcacgtcatcc

SEQ ID NO: 523655 - DNA, 98 bp, Homo sapiens
tgtacttgccgccgtcccggctcacctggcggtgcccgaggagtagtcgctggagtccgcgcctccctgggcctatatgaacccaatagcaatggcga

SEQ ID NO: 523656 - DNA, 75 bp, Homo sapiens
gagagcgctgcaggtgcgcaccgggaagttcagggttcatagtggcgtcatgcacgcagactcctgcaagttccc

SEQ ID NO: 523657 - DNA, 90 bp, Homo sapiens
caggaagcgcgagaccaggacggcgcgggaactctacgccaacgtggtgctggggccattgcaatcatggaagtagctcacggcaaagat

SEQ ID NO: 523658 - DNA, 100 bp, Homo sapiens
ggaggaaggaacgaggcaaggagctaaagcagcgtgcgttcagccctggggtctctaattaacagaagatggcaaagcccagccacagcagctatgtcct

SEQ ID NO: 523659 - DNA, 49 bp, Homo sapiens
gtctgctttatgaaatgttttcaggatccgagaacgctctaagcctgtc

SEQ ID NO: 523660 - DNA, 97 bp, Homo sapiens
agcgaacgaccaagagggtgttcgactgctagagccgagcgaagcgtgtggacactgccagcggctgcagccgacttggaatgacctgggagacaaa

SEQ ID NO: 523661 - DNA, 111 bp, Homo sapiens
atgcttcctgctgtggctgtctcggaacccgtggtcctccgcttcatctgttccatttcctccaagtcaccggcttacagcaaaagaagtgtttgataatgatggaaaacc

SEQ ID NO: 523662 - DNA, 100 bp, Homo sapiens
caccaaggagatttggagcccattttagaggcatctgttctatcttcccatcataaaaaaagactctgacctgtttttgttggacacccgtgtagtatgg

SEQ ID NO: 523663 - DNA, 88 bp, Homo sapiens
gtgctggtgtctgagtggatggggacctgcctgctggtgatcttagacctgatcccgtatgaaagcatcgtggtgacccgagcactgg

SEQ ID NO: 523664 - DNA, 82 bp, Homo sapiens
agatcgttttgatggatatatcttccttgacagcaaaggagtccaatgtgctgattgctgctaacagtcagggtacaattaa

SEQ ID NO: 523665 - DNA, 100 bp, Homo sapiens
agttcaaggaggccttccagctgtttgaccgaacaggttccaaataagtttcgctatccattctactatgagatgtgttggtatgtgttggagcgctatg

SEQ ID NO: 523666 - DNA, 100 bp, Homo sapiens
aaagtcccttattgattggccaacaatcaacagggtggaattgcgtttgttgccataaaaggagcatttaaagtttacttcaaacagcagcaatatttac

SEQ ID NO: 523667 - DNA, 96 bp, Homo sapiens
tacaagcagcactgcaggacaccctcctcctccagcacccttgcctactccccgcgggacgaggaggacagcatgagctgaaaccaccaatgggtg

SEQ ID NO: 523668 - DNA, 90 bp, Homo sapiens
gtatcttttagccatgatggactgcatgttgcaagccttgctgatgataacagttgcaccaccagcaccaccttccagtagtcagctctg

SEQ ID NO: 523669 - DNA, 74 bp, Homo sapiens
aaccttgctccgagagggagtcctcgcggacgtcagccaagccgtactctgacagctgtgcacgatgccatcct

SEQ ID NO: 523670 - DNA, 88 bp, Homo sapiens
tccgtctagaggtttggcttctacaaaccaagggaagaagagcccagacctaggggagtatgatccacttacccaggctgacagtgat

SEQ ID NO: 523671 - DNA, 50 bp, Homo sapiens
ctcctgagtagctgggattgcagtagcacttagcacctgcccgccctcca

SEQ ID NO: 523672 - DNA, 50 bp, Homo sapiens
aattgataacaccctgtaacagctgaatctccagtctatgtgctgaagaa

SEQ ID NO: 523673 - DNA, 100 bp, Homo sapiens
cagtcaagatagcaagaaggtagaaatcatcataggtggaaaaatgctaatcactgaaagaaaacattttcggtcaggaagaattgcacaaagtatgtct

SEQ ID NO: 523674 - DNA, 95 bp, Homo sapiens
agaccatgctggccggggtgcagtaccccagctccatcaacctcacgctgcacctgggagtccaatgtgctgattgctgctaacagtcagggtac

SEQ ID NO: 523675 - DNA, 75 bp, Homo sapiens
caaggacacggtctacaccgacttcgacggcttgggcactgtttaaaggaaagttccgagaaggcatcgacaagc

SEQ ID NO: 523676 - DNA, 100 bp, Homo sapiens
gtgctggtcaagaagggtgaggacattccgttaatggttgacatcatggacatatgtgagtccatcctggagaggaagcggcatgacagcgaaaggtcta

SEQ ID NO: 523677 - DNA, 90 bp, Homo sapiens
gaaaccatcacaatgcataaaatcctggagaccaccaccttcttccaaagagcggtgtacttgtttcaggcgacctccaagaagggtatc

SEQ ID NO: 523678 - DNA, 98 bp, Homo sapiens
agcactgggctgctcatcgctgcgggcggaggaggcgccgccaagacaggcataaagaatggcgtgatgaccctgatgatctgcaatgtaagcgggga

SEQ ID NO: 523679 - DNA, 75 bp, Homo sapiens
tgaatccagtaccaaaaacgtcaacaacagttttacggagttcaaagaaggacgcagagccagccacacagcccc

SEQ ID NO: 523680 - DNA, 50 bp, Homo sapiens
accgaggggaaagtgagcttgacaggaattacatgaacgacagccttcgc

SEQ ID NO: 523681 - DNA, 100 bp, Homo sapiens
agaaaggacagcagcattgatcaatcttacagctaacatgttgtacctggaaaacaatgcccagactcaatttagtgagtggcctgttctatagcatctt

SEQ ID NO: 523682 - DNA, 75 bp, Homo sapiens
atagaattcacagaatattactatccagatggaaaggattttccaaacagaaaaggggagtgcacttcatgaagc

SEQ ID NO: 523683 - DNA, 107 bp, Homo sapiens
ctggtggcaagtattgctgtgggtgctgggacttcccgtccgcggcgtggaggacccaacatgagtgaagtttcctgcaagaaacgggacgactatttggaatggcc

SEQ ID NO: 523684 - DNA, 73 bp, Homo sapiens
atcctagaggtcaagatcagctctggctaggtgatgttctgcaccctgaacacccacaaagtggacatggaca

SEQ ID NO: 523685 - DNA, 74 bp, Homo sapiens
gttcttattccaccaggcagcaagaatacgatgccatcagtggtaatagcctgcagctggtgttttgagaagcc

SEQ ID NO: 523686 - DNA, 85 bp, Homo sapiens
gcgatcaacacgctgaacggcttgaggctccagtcaaaaaccattaaggaaagaccacagcaagattctttcattcgtctcctcc

SEQ ID NO: 523687 - DNA, 90 bp, Homo sapiens
ggtctctggagacatcttcagcagaatatggttgagccccttatacccacgaattgctgatggaacccacaaatctggagagtcgccaac

SEQ ID NO: 523688 - DNA, 98 bp, Homo sapiens
gtgtgagcagtctctggacaagatgaccacactccaggaatgccagtgcatcttttgcacagctttccctgtattgaacactgatatacaaggaatga

SEQ ID NO: 523689 - DNA, 96 bp, Homo sapiens
ccttcatcacagctggagggtccctccgaagtattcagcgcagcctcttgtgtcgggtattcaatggatcgggaaaacccattgacagaggtcctg

SEQ ID NO: 523690 - DNA, 100 bp, Homo sapiens
agggctacgccagcggcgtcgagaggaccatcctgggtgctggccctgtgctggaggctacgactggcaaagatgagggaggctgaagcggcccaggggc

SEQ ID NO: 523691 - DNA, 83 bp, Homo sapiens
tttagttcaaatttgtggtgcagccgatggaattcggctctataattcactgaagtcaagatgaaaaagagaggtttgaccct

SEQ ID NO: 523692 - DNA, 75 bp, Homo sapiens
tccgcacctcggggacattattgcgcgtggaacggctgcttttggaagtttccgttactatggcaatgacggcag

SEQ ID NO: 523693 - DNA, 98 bp, Homo sapiens
gttgaaacgctgcctggaaaggaagtaccaggacttgcacagatctacggaatccagaggcagcattgtctccaaccttccgtagtgacagcccagtg

SEQ ID NO: 523694 - DNA, 100 bp, Homo sapiens
gtcagaaaatggacatccctttccttggggaaatgcccgcagagcgtgtgaaggcaaagaagaatgctgctccattcagaagtgaagtctgctttgggaa

SEQ ID NO: 523695 - DNA, 100 bp, Homo sapiens
ggaggccaaggaccccaagctccgagaagaccggcggccaatcacagtccactttggacagtctccctttcctggtgatgatgaagaggaagtttttgac

SEQ ID NO: 523696 - DNA, 100 bp, Homo sapiens
ttcgactggtccgggacggggcgggccggtgctggagaatctggtaaaagcaccattgtgaagcagatgaggatcctgcatgttaatgggtttaatggag

SEQ ID NO: 523697 - DNA, 140 bp, Homo sapiens
cgggtcggacgcgtccggctgtggaagagagcggcggccgctcacaacatgcacagcctggcgacggctgcgtgctgttccctcgtcacaccaatgccagtgctcgagacaacaccatcaacctgatccacacgttccgg

SEQ ID NO: 523698 - DNA, 100 bp, Homo sapiens
gcgggaggcccgggcggcgcgggcgcgggcgctgcggcgggacagctcgacgcgcaggcagcggaggaggagaaagagatggacctcccggactcggcct

SEQ ID NO: 523699 - DNA, 51 bp, Homo sapiens
atctcactgtacaagagctgcacggttcctggtttcagagaagatgaccga

SEQ ID NO: 523700 - DNA, 100 bp, Homo sapiens
ggcaggcttcgaagagctacagaatatgctccaaagaagaggaagcgctatagaaatgaagggagtcccagccctagacagtccccgaagcgccggcgtg

SEQ ID NO: 523701 - DNA, 75 bp, Homo sapiens
aagagcatcacagccaaggaagccctcatctgcccaagacaggaagatgtcacccaagcgcatagctaaaagaag

SEQ ID NO: 523702 - DNA, 100 bp, Homo sapiens
aatctctccaaccaggaacaaacacctgccttgcaatattaggcttggacttaaggatcagcaggagagagaaatcattcacgttctcatggattgctgc

SEQ ID NO: 523703 - DNA, 100 bp, Homo sapiens
gaacagagcagaaatcaaattgaagagagcagttgaagaagtgaagaaattattggtacctgcagctttacaggaagtatggtgctggcatctgcttggc

SEQ ID NO: 523704 - DNA, 75 bp, Homo sapiens
cttgagatgctaggaagacttggtgtggcaaaggagcagagaactttgacaagttcttcacacgaggacagcccg

SEQ ID NO: 523705 - DNA, 73 bp, Homo sapiens
tggacgagccccttgggaagaatgatggggcggtggcgggcaccaggggcattgacgttgtgaggaataaaat

SEQ ID NO: 523706 - DNA, 75 bp, Homo sapiens
agccgatccagcctgcggagcctgtggggcagggacccagacatggagctgcgggaagaagcctggtctccgggg

SEQ ID NO: 523707 - DNA, 100 bp, Homo sapiens
aaggggatgaggacgacgatgaagtcagtgaggaggccccagagaagaagagggagaagcccaagtctcttcgcaccacagcacccagtcatgccaagtt

SEQ ID NO: 523708 - DNA, 100 bp, Homo sapiens
gtagatgctcctgtcgctccttcagacaaagttggttgaatctggcgatgtggaacccatggatatggagggctgactatatacaccatgttttttcctg

SEQ ID NO: 523709 - DNA, 89 bp, Homo sapiens
ggccggggacctggacaacccccctaagaagttccgtgacctcctgccccccgaggtctgcagtctcctgaacccagcagccatctacg

SEQ ID NO: 523710 - DNA, 100 bp, Homo sapiens
ctggattttggagagactttggatttgggatgacgtgtcagtatcggtcagacttcatcaatataggcatccgtgtcattctggaccttactcccaacta

SEQ ID NO: 523711 - DNA, 98 bp, Homo sapiens
ccggaggctggtggagactccctgcatccaggacagtctgattctgtttctggcgtctgcatacgcaagtccccaactcgctgaggagagctgttcag

SEQ ID NO: 523712 - DNA, 100 bp, Homo sapiens
gaaaagtgggactggatgctacaaactgtttgaggataactgacttaaaatctgggtggtgaagcagtattttccaatttgaagattcatttgaaggtgg

SEQ ID NO: 523713 - DNA, 100 bp, Homo sapiens
gagtctcaatatctgtcttcggtggactccttcggcagtccacccaccgccgccgcctcccagagcctcagctcaaaggcatcgtcaccaaactgttctg

SEQ ID NO: 523714 - DNA, 78 bp, Homo sapiens
ttatggaaggatatctgttcaaacgagccagcaatgccttcaaaacttggaacagtgcacagccagagaacaacacat

SEQ ID NO: 523715 - DNA, 100 bp, Homo sapiens
gaggagcgggcgagaagctgccgccgaacgacaggacgttggggcggcctggctccctcagggtccctgatgggcctgggtgacattatctcacagcagc

SEQ ID NO: 523716 - DNA, 75 bp, Homo sapiens
ctctgggggccatgtggaaactacataaggatctggcgacatggccagaaaggctctcaagcttgcttcgtggac

SEQ ID NO: 523717 - DNA, 101 bp, Homo sapiens
tgtatggggccgtaggaaccggctccggggccccgataacgggccgcccccacagcaccccgggctggcgtgagtaccatgcggagaccatcaagaatgtg

SEQ ID NO: 523718 - DNA, 100 bp, Homo sapiens
ctggatctgtatgctttgagcaagcttatgttcctgaggaagaattgaaggcagcagaaatagatgaagagcacgtggaggatgacgggctgtctttgga

SEQ ID NO: 523719 - DNA, 99 bp, Homo sapiens
aagacggagggtgatggcgagagcgagaggacccagtcccacatctcccaggttgctgaaaagccaggagtcaaaatgactgagcgctttgactgccac

SEQ ID NO: 523720 - DNA, 96 bp, Homo sapiens
gtgtggaaagaagaggaaccagaaaagaatgtttgtgaagttctggcttgaatctcgtgccgggagggagaataccaggttttgctggaactgtac

SEQ ID NO: 523721 - DNA, 109 bp, Homo sapiens
cttagaggacttccctttggatgtagcaaggaagaaattgttcagttcttctcaggaggagatgttaaagtaacccatcttgcaggacgacattgaagattggtcttct

SEQ ID NO: 523722 - DNA, 80 bp, Homo sapiens
ggatgtgatgctggagaactgcaggaacctggcctcactagataatttgcaagtaccttttgagtgaagaagaggaccac

SEQ ID NO: 523723 - DNA, 90 bp, Homo sapiens
aaacttgatgagtggatgccaacaaaacacttttcaggattagaagaggctgtgtatagaaacatacaagcttgcaaggagcttgcccaa

SEQ ID NO: 523724 - DNA, 73 bp, Homo sapiens
ttgtctcctttttcaacaaatgggtgcctcgagtctttattggtaaagattgtataggcggatgcagtgatct

SEQ ID NO: 523725 - DNA, 90 bp, Homo sapiens
ggccgagcaggctgagcgatacgacgggctcttccgtgggcggcggcttcgcgggcttggagttcgcgcggccgcaggagtcggagccgc

SEQ ID NO: 523726 - DNA, 100 bp, Homo sapiens
ccacttccagtgaggagctgccaaagaaggaggctccgtacacgcttgtgggaatgggtactgttcaaaaaggaatgccccacaagtgttaccatggcaa

SEQ ID NO: 523727 - DNA, 100 bp, Homo sapiens
ccctgaagccctggaggtgcacgtggacacagctgtgatcagtccccaggatcccacgcttctcatcggctcctccctgctggccacctgctcagtgcac

SEQ ID NO: 523728 - DNA, 75 bp, Homo sapiens
gttggatctacactttctcaagcactgtgatcttcaaatctctacattaatcatactcctccaccactgtccaag

SEQ ID NO: 523729 - DNA, 100 bp, Homo sapiens
acggaatcatattcatcatggacgtgatgttggtgtgttcacatttgatcatggcatgattgagaggatccagaatccagatctctggaatagctaccag

SEQ ID NO: 523730 - DNA, 82 bp, Homo sapiens
ggagcacccagaagcagggacagggagctggttggggaggaccagaaatcagccttatgtttgatcatcggccaaggtcctg

SEQ ID NO: 523731 - DNA, 83 bp, Homo sapiens
gttggccaaggcctgttggtccatccagagtgccctgggcgctgcctatggcacagccaagagcggtaccggcattgcggcca

SEQ ID NO: 523732 - DNA, 100 bp, Homo sapiens
gacgttatcggaaaggtctgccttacaagggacaccatagcctctcaccctaaggagtcccagctgaaagacaatcctgccttctccatgctgaatgact

SEQ ID NO: 523733 - DNA, 98 bp, Homo sapiens
tcctggctccaaagctgcagttccaggtccttgaatgggcaagagggcacatgaagtacggcgtcctccacattcacggcctctacacggacccctgc

SEQ ID NO: 523734 - DNA, 82 bp, Homo sapiens
tgccaaggaaaaactggagagcttcatcaaaaatagtgatagctttgataacctttctgagaaaagtctacagcattctttc

SEQ ID NO: 523735 - DNA, 75 bp, Homo sapiens
cttagctgtgctcgcgctactctctctttctggcctggaggctatccagctactttaggaagaatcatcaaagta

SEQ ID NO: 523736 - DNA, 82 bp, Homo sapiens
gtcgggacaccccggaagctgggaaatggctgagaagaaagccaaggtcattgcaggaatgaatgctgtggaagaaaaccag

SEQ ID NO: 523737 - DNA, 100 bp, Homo sapiens
ggcaacttggcacttagaaccgcagcagggacgtcggtttgctatcgggactcggcgaggacgatttgggaatggatgatgaaggagatgatgacccagt

SEQ ID NO: 523738 - DNA, 100 bp, Homo sapiens
ctatccgagagtttgcagcaaagatcattgaagtgatgtcttggcattgcccattttcaagcaggaagattccagccttccattggatggtgaaacagag

SEQ ID NO: 523739 - DNA, 74 bp, Homo sapiens
atgccgtcttctgccctaacctgacagaggtgtcatccacaggcaacgcagagacggggtttcgccatgttggc

SEQ ID NO: 523740 - DNA, 56 bp, Homo sapiens
gcttcagtcccagtgcagggacctcaaggtttctagagccatctgggctttccggg

SEQ ID NO: 523741 - DNA, 87 bp, Homo sapiens
ctgtttctctgctgcaccgacctcgacgtcttgcctgtgtcccacttgttcgcggcctataggtggtgttcccactgatgaagagca

SEQ ID NO: 523742 - DNA, 80 bp, Homo sapiens
ccagcatcaaccaggaggcgttggtgctcacggccaaggccacgctggagcagttcaacatgatggagaacgccatcagc

SEQ ID NO: 523743 - DNA, 82 bp, Homo sapiens
gtgcccgaggaggcagccaagctcgtggcctgcctctgcgtgcagcccagccctgaccctgctgctggtggacgaggcctgc

SEQ ID NO: 523744 - DNA, 74 bp, Homo sapiens
aagttcttgggacaaacttcatttggaaagtggagaatgaggacatgaataaagaccagatcttgctggaaaaa

SEQ ID NO: 523745 - DNA, 90 bp, Homo sapiens
agcacagcaaacccgccgggatcaaagtgtaccagtcggcagcatgggtggaaccgtcccaaaatgtcccttgctcagaagaaggatcgg

SEQ ID NO: 523746 - DNA, 101 bp, Homo sapiens
gcccggttttatggtgcagagattgtctcggctcttgagtacttgcactcgcgggacgtggtataccgcgacatcaaggacctgcaagcgcaggaccgagc

SEQ ID NO: 523747 - DNA, 100 bp, Homo sapiens
tggcaatgttactatagaaaatattcatcaacctagagctgccaagaagcattcttcatctaaagataagctccctgtgctgtcaggaatctacaggact

SEQ ID NO: 523748 - DNA, 100 bp, Homo sapiens
cgcaaggccggagaaggccgccgggcccgggcatggtggtctggggcaacgcggaaggtagctttggatatgttaaatcctcatgttactttgcctgttt

SEQ ID NO: 523749 - DNA, 75 bp, Homo sapiens
cgggcagtttgtcgaacgatgttggactcatagtcactgccagaaagagaccccatccttggtggtccccttgga

SEQ ID NO: 523750 - DNA, 101 bp, Homo sapiens
cccactgaagcccccgggcccactggtgccacctgaccagcaggacaaagtccagtgcctctgtgtcctttgtcccaatagtaacaactccctcctggcct

SEQ ID NO: 523751 - DNA, 100 bp, Homo sapiens
tgcccttagtggccgtcttttgcctctttctctcaggctttcctacaactcatgcccagcagcagcaagcaggtctatgctccatcagcaagcactgccg

SEQ ID NO: 523752 - DNA, 99 bp, Homo sapiens
caaggcggccctggctgggggaaccactatgatcaaagtgcctagctgccactccatttatatgaggcaagaaggcttcctggctcatcccagcagaac

SEQ ID NO: 523753 - DNA, 98 bp, Homo sapiens
tttgtaacttttgatgatcatgatacagttgataaaattgttgctcagaattctgcaaatgcagattttgcaaactttgatgcatttggacagtctag

SEQ ID NO: 523754 - DNA, 82 bp, Homo sapiens
agaaggtcgcgaaggcagtaccgtttcctcagcggcggcctggtggagttgacagaagagatcctgaagctgctgatggaac

SEQ ID NO: 523755 - DNA, 82 bp, Homo sapiens
gtctggatccccgcccaggaagcccctctgaagcctcctcgccgccgtttctgagaagtatatttaaagttggagttcgttg

SEQ ID NO: 523756 - DNA, 73 bp, Homo sapiens
tcctgtcctggctggcttcgaaaggaaggcaacagcccccaggggagcaaccagggagtcaaaatcacaccgg

SEQ ID NO: 523757 - DNA, 101 bp, Homo sapiens
aaactgcaaggaaaagttgaatgatgtatttgatcctgattctacccaagtacatatgatttcagctgcaatggcagttgtcactcagcccagtccatcag

SEQ ID NO: 523758 - DNA, 82 bp, Homo sapiens
ccacagcagtcttccccagcaccccaccagaggccgagcaggagctccgcgtggcccagacagagtttgaccggcaagcaga

SEQ ID NO: 523759 - DNA, 74 bp, Homo sapiens
caccacgataatgcagttcttattactaggtcgaagaattccatccactgacgccaacctgccatctggcggta

SEQ ID NO: 523760 - DNA, 100 bp, Homo sapiens
aagaattggtatttcaaatgaccaccatgttgcaaaaggatggatgacatccagctctgcaaggacatcatggacttgaagcaggagctgcagaacttgg

SEQ ID NO: 523761 - DNA, 100 bp, Homo sapiens
gcaaaatttgccgaacgagggttcgcagaaaggtggggcagagctcatctgacgtggcatcaggcagtgctcggaatgtgaccaggcagggagcagtgac

SEQ ID NO: 523762 - DNA, 50 bp, Homo sapiens
tgatggtgtagcgctttaggggaagcgcaatgtccctgctcttctctcga

SEQ ID NO: 523763 - DNA, 74 bp, Homo sapiens
tgccagctccaggtccagagatccctgtggacagccaccgagaattatatccagatcgagagacagaagattct

SEQ ID NO: 523764 - DNA, 100 bp, Homo sapiens
gcgctgccgctgctgctgctgctgctgcgcctgggccagatcttcagtcgtgctggtgaagcctgcaaaaaggtgatacttaatgtaccttctaaactag

SEQ ID NO: 523765 - DNA, 51 bp, Homo sapiens
atcatcttgggctactcctacaagagggacctggattctagctgcccgagc

SEQ ID NO: 523766 - DNA, 82 bp, Homo sapiens
caacaatatcattctccttcaagggaataaaattttctaagctggcatattgtatagtacagtttctggagaaagatccttc

SEQ ID NO: 523767 - DNA, 75 bp, Homo sapiens
taagcgtggtgatgtgatttacattcttagcaaggaagatgagaatgtgcctactgctcctgatcctccaagtca

SEQ ID NO: 523768 - DNA, 75 bp, Homo sapiens
atggctgggggcgggccgctgcacaagttcctggtcggcaagaggttgatctttgctgggaaacagctggaagat

SEQ ID NO: 523769 - DNA, 49 bp, Homo sapiens
tattgtatttgccagagcacatctgattgcagagggaatggcatacatc

SEQ ID NO: 523770 - DNA, 85 bp, Homo sapiens
ccaagcagccaaccatgctcaacttcggtgcctctctccagcagactgcggacaggcgacactaacaggtgaagatctcgggaga

SEQ ID NO: 523771 - DNA, 100 bp, Homo sapiens
ggaccatcgagacctgttcttgaatacatcgatctggtctgtggtgatgatgaaaaccctagcgcctattatagtgatgctggctacagcaaacatcatt

SEQ ID NO: 523772 - DNA, 90 bp, Homo sapiens
ggtgagagcgatgaggtcggagtgattcccagtaaacgcagaagagacgctcaaaccgccaagttaagcgaaaaaaatatacagaggacc

SEQ ID NO: 523773 - DNA, 100 bp, Homo sapiens
tgttggtgtcagaaaccacaggcgaatccataactctgataagccgtacagcaacagcttgaagaagaggcagctaaacctcctgagcctgagaagcccg

SEQ ID NO: 523774 - DNA, 97 bp, Homo sapiens
tacaactcgcccaccacgtccagcttcaccacgcggctgcacaactgcaggaacaccgtcacgctgctggaggagttactgtaaaatggggaaagga

SEQ ID NO: 523775 - DNA, 100 bp, Homo sapiens
cggccgcgggagcctcgtggctgcgtcaccgccgcccccccagacaagatggacaccgcggaggaaggtcttaaagaaagtgcagaagagatggtcaaaa

SEQ ID NO: 523776 - DNA, 90 bp, Homo sapiens
acaccagctatgcccccgtggccaccgcctccagcttgccaccaaagacctgcgactttgctcaggtgaaaggtgtagcagtcactcggc

SEQ ID NO: 523777 - DNA, 83 bp, Homo sapiens
tctgtgggttacgccatctttaagagagcacagtccctggaggacccattggagggcaaaccagagttactctgaggaacgag

SEQ ID NO: 523778 - DNA, 97 bp, Homo sapiens
aaacgcaggaccattgagagctactgtcaggatgtcctaagacgccaggaggagtttgagcataagactatgtatagccaggacaggcatgttgatg

SEQ ID NO: 523779 - DNA, 100 bp, Homo sapiens
gtaagacgggatattctcttctgtgctgtcaagggaaatctactttcttcaatgtgttaaccaatagtcaggcttcagcagaaaacttcccgttctgcac

SEQ ID NO: 523780 - DNA, 98 bp, Homo sapiens
aaaaaggcaaaagtggatgagtttccgctttgtggccacatggtgtcagatgaatatgagcagctgtcctctgaaggctctcactgacctatgaacga

SEQ ID NO: 523781 - DNA, 82 bp, Homo sapiens
ctggctcggagcagcagcctctgaggatgatcggctgaatgtaacagaggaactaacgtccaacgacaagacgaggattctc

SEQ ID NO: 523782 - DNA, 83 bp, Homo sapiens
ctgtgctcgctggcaccccgaacgggttgcttcccccgctgcgagaacccagcgggtgccgcttctccacccgaggcttccac

SEQ ID NO: 523783 - DNA, 101 bp, Homo sapiens
gcgcggggcctccgcgcccccggctgctgctcacgccccgcccgggagccagcagccagacccggtccgtttggaatgcctgggatggtgccgccgcatgt

SEQ ID NO: 523784 - DNA, 90 bp, Homo sapiens
aaaaaggagcttgccttctgagctttgtaccaaagacctgggaaaaattgctgtgctaaggagacagcaacgtatgataaaaaatcgaga

SEQ ID NO: 523785 - DNA, 100 bp, Homo sapiens
gcgcgtccgcgctctgcagcgggaggtcctcgtcgcctctcgtctccagccagctgtgtcagcgtgttatgatgccgtcccgtaccaacctggctactgg

SEQ ID NO: 523786 - DNA, 100 bp, Homo sapiens
gaaatcatgtcaagcgaagccttgaaaaagctgccctgagacggtgtcccgccgaaaggacctgaaggagaagaaggagaaggtggaggagaaggcaagc

SEQ ID NO: 523787 - DNA, 100 bp, Homo sapiens
gtcggtgaccgcgcgactcggcgcccgcccgcgaactattccatggcagtatatcttgtaaaacagttgtcctcaacagttcttcttcagaggttacgag

SEQ ID NO: 523788 - DNA, 97 bp, Homo sapiens
agcccccggatcagcctgcctctgggtgcactacatcctccaggaggtggtgatgggtgggatggtgttggaaacaaacatgaatgaaatcgtggct

SEQ ID NO: 523789 - DNA, 90 bp, Homo sapiens
ctgccacggtctgcccacccaacgcgaagacggtaacccgtgtgactttgactgggagccaggcagtcccagcgaagagcaggagcagga

SEQ ID NO: 523790 - DNA, 105 bp, Homo sapiens
gcggcggaccgtcccgcgcggggcacgatgttgaacatgtggaaggtgcgcgagctggtggacaaagcatgccttcaattaagttgcagagttctgatggagaga

SEQ ID NO: 523791 - DNA, 98 bp, Homo sapiens
tgcgactccggagacagcccaaatatcctcggaagagcgctcccaggagaaacaagtggtgaaaacaggaatgagaacgaggagtcaacctcaaaggc

SEQ ID NO: 523792 - DNA, 97 bp, Homo sapiens
ctcaagaagcagctccacgaaaggcagccgcggatcgccgcgctcagcgacaaacaatgtggcaaaggagcagagaactttgacaagttcttcacac

SEQ ID NO: 523793 - DNA, 100 bp, Homo sapiens
tcagtgggaagcatgtcgtctttatcgctcaggcagcctggcatcctcgctacaacctcattgttgtgggccgatacccagatcctaatttcaaaagttg

SEQ ID NO: 523794 - DNA, 75 bp, Homo sapiens
aacgagtgcaagcagctgtccgagtcccaggtcaagagcctctgcgagaaggcatttggctttatgtcccgagtt

SEQ ID NO: 523795 - DNA, 50 bp, Homo sapiens
gtcctgagtccggatgaactgttcaaatctgaacatcaatgatgtactag

SEQ ID NO: 523796 - DNA, 51 bp, Homo sapiens
tctacatagacgacaccctgacggaattgaatgatctggcacgggaccctc

SEQ ID NO: 523797 - DNA, 83 bp, Homo sapiens
gtcgagcagcggacgccggtctctgttccgcaggatggctatgtggttgatgttgcagaatgatgagccggaggacttcgtta

SEQ ID NO: 523798 - DNA, 98 bp, Homo sapiens
gcagctccttacaggaaagggccaatgtgaacctcgatgtccctttgcaagaattcttccatctctatgacaacaagcccattttagctttctggaga

SEQ ID NO: 523799 - DNA, 75 bp, Homo sapiens
acgcatggaatatttgcttgtgatggagtactatcccaatgggataattctatttaaagaaaaagccaaggaagc

SEQ ID NO: 523800 - DNA, 103 bp, Homo sapiens
ccgccaagagcgacgccgccgtgtgcccaacggtcggtgtccccggctgaggcagcgcggccgcagcagcccttacgaggatgtcgtccaggaaagattgtgc

SEQ ID NO: 523801 - DNA, 96 bp, Homo sapiens
gcgcctgcctgctccgccccagacctgtcggcgaaagggccaaagcccccttctgcacagcagcaaaccacaccactttctcctgggccacagcca

SEQ ID NO: 523802 - DNA, 75 bp, Homo sapiens
tcggcgggggcctggatcatccacccgtacagcgacttcagtttgtttcgacgccggaccgcgtaagagacgatg

SEQ ID NO: 523803 - DNA, 121 bp, Homo sapiens
acttcttcgtagacattgtctcccaagacaacttcctcaccagcaccttacagatggcccactgcgtgaccttggttcagctgtccatttcctgtgaccatctcattgacaaggacatcgg

SEQ ID NO: 523804 - DNA, 50 bp, Homo sapiens
caggtttattctcccatagcatgtggtacatgtcccagagcaagcacacg

SEQ ID NO: 523805 - DNA, 74 bp, Homo sapiens
ggaggtggagttgctgcccttccggagtccgccccgtgaggagaatggtggatatggacaagagcggtgaagta

SEQ ID NO: 523806 - DNA, 110 bp, Homo sapiens
cagagtatggctgcagaggatccatctgtcttagcaaggctgtcatcacaaggatggcattccctgtggatatgctggaaaattgcagccatgaggaattggaaaattct

SEQ ID NO: 523807 - DNA, 100 bp, Homo sapiens
gccggccgacccttcctgtcgctgacggcgactgcgggaggccaggtggtttttccccatcatcggccacatgggcatctgcacatccacaggagtcatt

SEQ ID NO: 523808 - DNA, 82 bp, Homo sapiens
acgcagctgacgaagctcgggacaggatcaaccggttcctcccaggcggcaagtaagactttgaccccgacgcaggcttcag

SEQ ID NO: 523809 - DNA, 74 bp, Homo sapiens
gatcatgaacttcttttggccaagctcaaggttgttattgatgccttcagattgatcaatgctaatatgatggt

SEQ ID NO: 523810 - DNA, 75 bp, Homo sapiens
agcttatggatggagaccaaacatccagatctggagtgccggcacaggttatcaatactctggctgaccatcatc

SEQ ID NO: 523811 - DNA, 89 bp, Homo sapiens
agggacagccgcccctggtgcacacaccctcgtattctcctgcccttccccaggcgccatgtcagaaccggctggggatgtccgtcaga

SEQ ID NO: 523812 - DNA, 75 bp, Homo sapiens
actttccatttgccttcctgggtgaacatgtcaaaccttttaagccagagaaagcaaaagaaattatcatgtctt

SEQ ID NO: 523813 - DNA, 82 bp, Homo sapiens
ctttgattgaatacttacataatgcattggaacatgacatgagattaagtttggaccattttcagaaaaatgtgatattact

SEQ ID NO: 523814 - DNA, 51 bp, Homo sapiens
ggatgcaccttcccctgccttggaaagtgaaaggcagttttgccttatcct

SEQ ID NO: 523815 - DNA, 96 bp, Homo sapiens
gatcaacctggagctctacgcctcctacgtttacctgtccatgaatcccacgtggcgaagtctcgattttggaattatgccagaccgtcttgatac

SEQ ID NO: 523816 - DNA, 100 bp, Homo sapiens
ttcctggagggaggagctccctggggttttactctaaagggtggcctggagcacggagaaccattaatcatctctaagtcatcagtgagttctgcctcag

SEQ ID NO: 523817 - DNA, 87 bp, Homo sapiens
gcacgtgggcacggaccaattcgggaacaaatactactacatcccgcagtacaagaactggagagattcagaatggacagtttagaa

SEQ ID NO: 523818 - DNA, 98 bp, Homo sapiens
cgctgcacggcccaccggcggcagtctaccgccaggcccacagcctgctctgcagcttcctgccatggtcgggcatctcttccaagagtggcatcgag

SEQ ID NO: 523819 - DNA, 100 bp, Homo sapiens
ccatgggccagtgcggcatcacctcctccaagaccgtgctggtctttctcaacctcatcttctggctgcagaaccttggcctgaaaatgctacattatat

SEQ ID NO: 523820 - DNA, 96 bp, Homo sapiens
gggccccgcgagtgccatggcggccgccctgggagcgagcggaggagcaggcgccggagatggctcgttcggaacaccacctggatacggctgcgc

SEQ ID NO: 523821 - DNA, 78 bp, Homo sapiens
ctctgggagcctagaatgcatcagtgcccttgtggcgaatggggctcacgtcgagttggtgaagatcttcggcaagat

SEQ ID NO: 523822 - DNA, 75 bp, Homo sapiens
cgagctcgatccgctgctcgcacgggagccagctgggtgctgccccagagcacatcagctatgtgccccagctct

SEQ ID NO: 523823 - DNA, 98 bp, Homo sapiens
ttcgcctccaggatgcgctgagccctacaacacccccagcggccgccggctcccccacgaggtatctctcctaaatgtgtgatcaaggaattaccacc

SEQ ID NO: 523824 - DNA, 88 bp, Homo sapiens
ggaaaggctggatgcaacttgtgattttgatttatcacatttctggagcaagtacaaaagggttcaaagacaccagtcagtatgtagt

SEQ ID NO: 523825 - DNA, 82 bp, Homo sapiens
ggcctcaccatacaggaacagggcagacgttagcgtgagtgatcactctcaatcccggctgttaaacgtttaatgaaagaag

SEQ ID NO: 523826 - DNA, 75 bp, Homo sapiens
ccgctttccgggagactggagtcgaaggccgtgaggacagtcattttgtttactcattcagccctgttgcaggtc

SEQ ID NO: 523827 - DNA, 100 bp, Homo sapiens
gagagctggaattctataatatgggaagctgcccgggagtgtcgcaggaagaagaaagaatatgtcaaatgtcttgaaaatcgtgtggctgtgcttgaaa

SEQ ID NO: 523828 - DNA, 100 bp, Homo sapiens
ccatgcaggtcaccctgaagaccctccagcagcagaccttcaagatagacattgaccccgaggagacggttgtccttctattcaggccactcttcgtttt

SEQ ID NO: 523829 - DNA, 100 bp, Homo sapiens
tgtggcaccgcgagctccgcaaagataaatactgcaacaactgtagctgacttaaagtcaataataaatgaatgctataactaccttgagttaattggat

SEQ ID NO: 523830 - DNA, 97 bp, Homo sapiens
cgagtctcaaaggtgttcctggatttgaccattcctcaagaattttgtatccaaggcccaaaagtttgttacccaagatgatgaatgctgacatgga

SEQ ID NO: 523831 - DNA, 125 bp, Homo sapiens
gcagtttccggtgggctcttctctcaactggcctcatgttcttttatcacttcagcgtcttgcagatcctcggcctgtctccctgggtagctgattcctagttgtggtgggaaatctcagtccga

SEQ ID NO: 523832 - DNA, 82 bp, Homo sapiens
accggcccattacgatgccaagcagttgaagaaggccatggagattgaaaatggaagccctgactgacagggaacatggaat

SEQ ID NO: 523833 - DNA, 100 bp, Homo sapiens
aggccacgccggccgcgcgcgccagcaagaagatcctgctgcccgagcccaggcttctcgtcagtgcctcgcaggatggtaaacttatcatctgggacag

SEQ ID NO: 523834 - DNA, 100 bp, Homo sapiens
tgggccgctgggagccgttattggctgccgttaaggaccgttacgtttcccgggttggaaaagagactgttcaaaccactgaggatcagattttgaagag

SEQ ID NO: 523835 - DNA, 90 bp, Homo sapiens
ccctttagccatgtggatacctacggagcacgagaaatacggcgtggacaggcaaatgtacactggggaccaccatgttcacgtgacatc

SEQ ID NO: 523836 - DNA, 111 bp, Homo sapiens
cggcagggtcccgcatggcggcgcacaggaagcacggttgtgaactaaaggccgacaaagattatcactttaaggtggataatgatgaaaatgagcaccagttatctttaa

SEQ ID NO: 523837 - DNA, 100 bp, Homo sapiens
ttgtttcgccccacggccaagcccgccgcgggccggcgtgcgctggtcactgaggcccaggtcgccgccgcggcgcgtagagatgaggtttcaccgtgtt

SEQ ID NO: 523838 - DNA, 82 bp, Homo sapiens
gacgacagcgtcctcgaagccaccagctcccgggacccgctcagcgatgttttggctacgggcctccacctccaccgccaga

SEQ ID NO: 523839 - DNA, 83 bp, Homo sapiens
cctggcctgcccggacgagttcgatgacttcgtcacctatgaggcgatcagtgggtgaccgcggctgcgagggactttgtcat

SEQ ID NO: 523840 - DNA, 90 bp, Homo sapiens
gtgctggtgtctgagtggatggggacctgcctgctggttttagctgacgctgtctcacgcctggtcctgggtaagtttggtgacctgacc

SEQ ID NO: 523841 - DNA, 90 bp, Homo sapiens
agctgcggaaacggcgggtttcccaggacctggaagtggtcatgaatgaaaaacttcagcactgcatggaactaacagatctaatgcgga

SEQ ID NO: 523842 - DNA, 100 bp, Homo sapiens
ctgcgttgtgaggggtgtcagctcagggaaagcaggcaggatgggagagtcgccgatagaaccacctcttccctgcctcctgggcttgggggaagcttga

SEQ ID NO: 523843 - DNA, 100 bp, Homo sapiens
ggtgccttcccctggaagctcgtccccacagctgcagatggaggagatgtataagaaagctcatgctgctatacgagagaatccagtctatgaaaagaag

SEQ ID NO: 523844 - DNA, 100 bp, Homo sapiens
ttccaagaggaatcctcggcagataaactggactgtcctctacagaaggaagcacaaaaagggacagtcggatgtgggctctcttgatgagaagatgaag

SEQ ID NO: 523845 - DNA, 74 bp, Homo sapiens
attgcctgcggaaagatcgtgtcgcacacgcacctcggagtgtgaagttccatttccaagaggcatgaaagggc

SEQ ID NO: 523846 - DNA, 105 bp, Homo sapiens
ttgtcataagggtgttggccttgccagggccttcctgggtgaggcgaagaagggaaggatgatgactttgagttcactggcagccacctgacagtaaggaatggc

SEQ ID NO: 523847 - DNA, 100 bp, Homo sapiens
caccggtgttccaactgtttaaagtacttggttttaatgctcgtcagcgaaaagcctttcttaatgcaattatgcgatatggtatgccacctcaggatgc

SEQ ID NO: 523848 - DNA, 51 bp, Homo sapiens
gctttctgctgccgcccgcaagcagagattcccgctgcagcaggagagcgg

SEQ ID NO: 523849 - DNA, 99 bp, Homo sapiens
gaggagcacatgccattctggcagttttttgtaagactctgtggtattgttggaggaatcttttcaacaacagctggacctaccatgaaagacttctga

SEQ ID NO: 523850 - DNA, 83 bp, Homo sapiens
ttggcacacatggttaaggaacaggaggaaaccattcagagacagaaagaatttactttcaggttttcttacctaaagggagc

SEQ ID NO: 523851 - DNA, 90 bp, Homo sapiens
aaaaactcttcaacactgttattgtaaacaaaggtcttcgccttgatcgtgttctcctgcatctatggtgagggctacagcaatgcccac

SEQ ID NO: 523852 - DNA, 75 bp, Homo sapiens
gggtgaagtttgaaagcatcatgcccagattatcagtggatttttgaaaggtggttgctccttatcaaaccttat

SEQ ID NO: 523853 - DNA, 87 bp, Homo sapiens
caagcgaaaacatgaccgctgagcccatgagacatggatgggtgcaaaaaagagctgccccgcttgcaagagccggaggaggacgag

SEQ ID NO: 523854 - DNA, 52 bp, Homo sapiens
caacagagtgagctccagagtcagctacctgaccgacgttgaccgcatcgcc

SEQ ID NO: 523855 - DNA, 100 bp, Homo sapiens
attacacctggcgggagctctggtcaggatgaccagtgtcccagtgaaggaacgagtgaaggtgtctcagaactggagactggggcgctgccgagagggg

SEQ ID NO: 523856 - DNA, 73 bp, Homo sapiens
ctgattcggcgcgatttgaggagctgctgctgcaggagggcatcctggctgtttcacccgtggacttgaactt

SEQ ID NO: 523857 - DNA, 97 bp, Homo sapiens
cctcgcagtcaacaagacccggcaggaccaggactccccgcacagtctgaccgacttgcgaatcaccaggctgttaaacgtttaatgaaagaagcgg

SEQ ID NO: 523858 - DNA, 96 bp, Homo sapiens
cattccaaagtctttggaaaagacacaaagatagttggttgccactttaggtctattccagtgaatgaaaaagacaccttaacatatttcatctac

SEQ ID NO: 523859 - DNA, 126 bp, Homo sapiens
cctggccctgcaggtctacggagttgaggtgcccgccgaggtcgaggctgagaagccgtggtggcagatcctgactgctgtcatggcgtgccctctggagaaggccctggatgtgatggtgtccac

SEQ ID NO: 523860 - DNA, 95 bp, Homo sapiens
tcgccgcggggcagttcgggccggctgtcctggcgcgaattaaacaaccaccatgtcgagcaaaaaggcaaagaccaagaccaccaagaagcgcc

SEQ ID NO: 523861 - DNA, 72 bp, Homo sapiens
cgctcactgcacgccagaacctgaggagagaatggcatgccagtctacgcctgcaagctctcagaccgggaa

SEQ ID NO: 523862 - DNA, 86 bp, Homo sapiens
ggagtcctgccagctgtccggcgctgggataatttctgctgctgaaacattgacattgcatccatctagtaaaattgctaaagaaa

SEQ ID NO: 523863 - DNA, 101 bp, Homo sapiens
aaaccattaacatgagattagattgtgttcaagaactacttcaagatgaggaactattttttggacttcaatcagacacacgatagtaaggagcatttagc

SEQ ID NO: 523864 - DNA, 90 bp, Homo sapiens
cgacgcgtgcttcgtggcccggcaccgttccgcggacgtgctcggacccattccaacaatctcgtaaaacatggtggattactatgaagt

SEQ ID NO: 523865 - DNA, 99 bp, Homo sapiens
ccccaggggaccagaggaactcagccctgattgcggtgaaaggaaagcaagccaggatggatatttacgacactcaaaccttgggggttgtggtctttg

SEQ ID NO: 523866 - DNA, 50 bp, Homo sapiens
cttcatcctaggcagctgtgggtcagtgaagcccaggaggacctgggggg

SEQ ID NO: 523867 - DNA, 98 bp, Homo sapiens
attgtctttatatcctgacactatgaatgctacttggatgcctcttaagatgcatggagtcatctcccacatttctctagccctgacctggttaataa

SEQ ID NO: 523868 - DNA, 100 bp, Homo sapiens
cgccgtcggcagcaagaacagagagagaggtggacagatctgagagatactgagtcattgaaattatgagactatcattcaaatggaagcattatagttc

SEQ ID NO: 523869 - DNA, 149 bp, Homo sapiens
gtgaatttggacaacgaaatagacaatggactccatcccactgaggaccgtttccacttgagcggcacagtgacagaacctgcaatacaatcggagccagaaactgtttgcaacgtggccatcagctttgatcgttgcaagattacctc

SEQ ID NO: 523870 - DNA, 96 bp, Homo sapiens
cccgcgcgcgcgaccggccggtgcgccgcggcccgcggtgtgaccatgaagctcatggatgaggtcgccgggatcgtggctgcacgccactgcaag

SEQ ID NO: 523871 - DNA, 110 bp, Homo sapiens
aaccatttcttccctttcctcttgacactgcagctgcagtcaacctcttccccaatttcaatgcggatttaagtgccctgtatgctcaaaatttgtatcctcagatgaaa

SEQ ID NO: 523872 - DNA, 100 bp, Homo sapiens
ttcaaattggacttaagtctgaatttcggcagaatttagaatttatagagcggcagcacgcaaagaacaggtattactactaccaccggcagtaccgccg

SEQ ID NO: 523873 - DNA, 75 bp, Homo sapiens
aaaccgagcaagtagagagcaagaggaagtcagggggaaatgagagaatttccgctgcctgtgcactcatgaaaa

SEQ ID NO: 523874 - DNA, 75 bp, Homo sapiens
taattttctcttccacactgtcttgatagaagaagtaggacttccaatagtagtcagacattatcatcctgtcat

SEQ ID NO: 523875 - DNA, 89 bp, Homo sapiens
ttgcagagacagctcaacacggcacttccacagcatgaagcgtgccagctctctgaatgtccttaacgtgggtggcaaggctgctgaag

SEQ ID NO: 523876 - DNA, 82 bp, Homo sapiens
ggagatgggcagacggattcatttagagctgcggaacaggacgccctctgatacaaatttacatgtattggagaccagacca

SEQ ID NO: 523877 - DNA, 74 bp, Homo sapiens
aaacactttctgaagctcatgaagactgtgtaaataatatcaggggcgtgaatactttttctcccgaaggaaga

SEQ ID NO: 523878 - DNA, 100 bp, Homo sapiens
gcatggttttcctggcgctctacgtgctgttcctcgccgacgaggagttcgacgtggtagtgtgcgaccaggccgcattgacaggaagattgagttcccc

SEQ ID NO: 523879 - DNA, 98 bp, Homo sapiens
gaaagcaaacagaaatttgtgctcaaaacccccaaggaggagctgacaagcacaagtgtggaacacatcattgtcaatcctaatgctgcctatgacaa

SEQ ID NO: 523880 - DNA, 100 bp, Homo sapiens
gaagacgagggggcgtctgaggaggaagacctggaagacagatctggctgaagggtatgtgattggcagctgtattaaacacattccaatcgcaggacga

SEQ ID NO: 523881 - DNA, 100 bp, Homo sapiens
gatgcatctgctgctagagttgccctcgctgtgcagcgcattgctgagtctcacctgcagtctatcagcaatttgaatgagaaccaggcctcagaggagg

SEQ ID NO: 523882 - DNA, 74 bp, Homo sapiens
ttacgtggctattgtctttgaaagcaacagctcctaccttggacgggaggtgatgtgtccaatctagatcccaa

SEQ ID NO: 523883 - DNA, 102 bp, Homo sapiens
ctctgaggcccacgcagggcctagggtgggaagatggcaggtgggggcggcgacctgagcaccagttgctgccaaacaaggtgaatccgacccagagaggaa

SEQ ID NO: 523884 - DNA, 75 bp, Homo sapiens
tttgaccgagacataaactgcagaagagcagcctctgtaaagatgagccttccagctacatttgcacaacatgca

SEQ ID NO: 523885 - DNA, 74 bp, Homo sapiens
cgatttcagcatcggggcagacaccgccctgaacactatcaccgacagttgcatgctgagaatttgaaaaatga

SEQ ID NO: 523886 - DNA, 75 bp, Homo sapiens
ggcgatgatccggcattaaggagctgggatcatcctccgtctcagttggttgaatctggcgatgtggaacccatg

SEQ ID NO: 523887 - DNA, 87 bp, Homo sapiens
ggacatgagccccctgaggccccagaactatcttttcgataagtaatggaacatcatctgtgatcgtctccagaaagaggccatcag

SEQ ID NO: 523888 - DNA, 100 bp, Homo sapiens
gagacactgaagcgactgcagagccagaagggagtgcagggaatcatcgtcgtgaacacagaagatccgagagactgaggtcatcgacccccaggacctc

SEQ ID NO: 523889 - DNA, 90 bp, Homo sapiens
aagcgattgggcgcggggccccagggggcacaagaagtccggaaccatcccttcttccaggtccccttcccctgagcccatctacaatag

SEQ ID NO: 523890 - DNA, 74 bp, Homo sapiens
tcaccatcgtcagcctcatgtacttcgcctttaccaggaccgtataatagacgctggccccaaaggaaactact

SEQ ID NO: 523891 - DNA, 98 bp, Homo sapiens
atcagctttgaagtgggagcccagttggaagcccgggaccgtttaaaaaactgctgtgagttctttggaattgtgaacattcttttgaaatatggagc

SEQ ID NO: 523892 - DNA, 100 bp, Homo sapiens
tataccaccacggtgccatcatcagccctgcaggtaatgtgaggctacaggagatgatggcaacaatgtgccaggaacgtggagcccggctttttgctac

SEQ ID NO: 523893 - DNA, 101 bp, Homo sapiens
gggacagttttattgttgttgtttgttatctcaattaccaccatcattgtcattttccttaacagaaatgggacgtcggtcatcagatactgaagaagaaa

SEQ ID NO: 523894 - DNA, 100 bp, Homo sapiens
tccagcgccggcctcctcagtgcgaagaagctgcagccgcacctggccaaggcggatgcagtggtgcagtatgacgtggagctgattgcactaatccgag

SEQ ID NO: 523895 - DNA, 100 bp, Homo sapiens
ggaaacccaaattgtagctgacgaagcattttgcaacgcagttcggagttattatgagctcctctggtgcaagtgtggtagctattgacaacaaaatcga

SEQ ID NO: 523896 - DNA, 100 bp, Homo sapiens
cctctcagaagagtgagagagagctattagagattgtgaagaagaatttcgatctccgccctggggtcattgtcagatgtccagctcgccgctgtccaag

SEQ ID NO: 523897 - DNA, 75 bp, Homo sapiens
ggctgtgcagttcccgcggcagcacggaggcctggaggctgatgaagacttccggggcaggcgtcaggaggcacc

SEQ ID NO: 523898 - DNA, 100 bp, Homo sapiens
ccggccacagcctgcagcggagcccacgagaggcagcgccatggcggagcagacctactcgtgccaatggagatcttcgtggatgatgagacgaagttga

SEQ ID NO: 523899 - DNA, 98 bp, Homo sapiens
gcagactaaaaagagagcggtctatgagtgaaaatgctgttcgccaaaatggacagctggtcagaaatgattctctgcattttgttcccaacatcacc

SEQ ID NO: 523900 - DNA, 99 bp, Homo sapiens
tatgctctgtctgcagttctggaccagaatacctcaaacgtctaccattacagtggtcaccatcagaaaagctaagtttgctgtatagtgaggatcagg

SEQ ID NO: 523901 - DNA, 83 bp, Homo sapiens
caaccataaagacatcttaattgggcacgaaagaggatttgcctcaaagggcactgcaaaaattgaacagaggaatcccaagg

SEQ ID NO: 523902 - DNA, 98 bp, Homo sapiens
tccagtgagtccagctcctctgacagcgaagactccgaaacaggctttagaatccaaattagcagcttgcaggaattttgcaaaggaccaagcatcac

SEQ ID NO: 523903 - DNA, 98 bp, Homo sapiens
agtgttcaccatcctggccccggaagccaccagtggtaaaaacagagatggtaacaatttctgatgcctcacaaaggacagaaatctccaccaaggaa

SEQ ID NO: 523904 - DNA, 75 bp, Homo sapiens
gtccacagccttctctcgcgcctgatgagcattttcccaacagagccgagaactgtggctgcaccatctgtcttc

SEQ ID NO: 523905 - DNA, 101 bp, Homo sapiens
taagacgccaggacccactggaagcctagaaatggttacagcaactccatgtaaagatgatggtgatgcaaggatttcagccaattcctgtctcagcatgg

SEQ ID NO: 523906 - DNA, 100 bp, Homo sapiens
gtcagagtcaaaacagagcttttggaatctgaacaaggggttcctgatgttattagcagcataaggcaattatctaaagcggccatgaaagaggatgcca

SEQ ID NO: 523907 - DNA, 75 bp, Homo sapiens
tcccgggctccgggaaaactacactggccagcctacagacctggtacctggatttttgcccgagatgattcctac

SEQ ID NO: 523908 - DNA, 100 bp, Homo sapiens
aatgaagcaagtttacctaacacgtctttgcaaggtgtcttcatctgctgctggttcaccatcctttacctcccaagtcagagcaccacagtctcctcct

SEQ ID NO: 523909 - DNA, 50 bp, Homo sapiens
tggagagttcactggaccggagcctcagagaaccgtgaaagctctgtatg

SEQ ID NO: 523910 - DNA, 73 bp, Homo sapiens
attttgctatgtctctgagctgcgaggcctgctggtgggtacccttgatgttgtgttggactccagcgcccgg

SEQ ID NO: 523911 - DNA, 105 bp, Homo sapiens
agacagaacggatgatttatctggtgacagaatatgctagtggaggggaaatatttggccgggatagaaaatcgtcagctggacacagtaaatttctttttgaag

SEQ ID NO: 523912 - DNA, 83 bp, Homo sapiens
gcgccaagcaggtcaccatgacggagctgaacgccatcatcggggtgacgcagctggaccagaggctggcactcatcaccgac

SEQ ID NO: 523913 - DNA, 126 bp, Homo sapiens
aaaagatccctggaatatgaagggacacagtacggtagtcaaacccccaggtcagaagagatcaattctacagaaatttccagtggttctgttgaggctttatggaattcagcatgtcaaaattca

SEQ ID NO: 523914 - DNA, 75 bp, Homo sapiens
gcggcgctggagagggggcgctgagctgttggggaaatggagttgttttttccttcaagtggaggttgtgggccg

SEQ ID NO: 523915 - DNA, 100 bp, Homo sapiens
tggatctggcagtcggtcatccacctgctgcagatggggcaggtgtggagataaatttgcgcctcattttggtaagcggaaaaacaaaagagttcctgtt

SEQ ID NO: 523916 - DNA, 98 bp, Homo sapiens
aaatctcgagatgatagtcaactaaatggagattctagtgctttgcttgagtacgagacccaatctagtgcagaagccaaatttgtgaagcagctaga

SEQ ID NO: 523917 - DNA, 90 bp, Homo sapiens
gaaacatcaaagctggattagaacatctgggaagatttaggattcagatttatatcggaacaggtcagtcaccacccccccatcagtgcg

SEQ ID NO: 523918 - DNA, 90 bp, Homo sapiens
tcgggtgggagtgacccgattttccagggctgacgcgccactatgtagcgggtttcgggcgggccacgcgtgcgggacaggaacccaacc

SEQ ID NO: 523919 - DNA, 80 bp, Homo sapiens
caggtggatcacgaggtcaggagatcgagaccatcctggctaacacgcatcctaatgtcctatgatcacgtggaactcac

SEQ ID NO: 523920 - DNA, 75 bp, Homo sapiens
cagcactggactcatggaggctgagcatttattcagatgggtccgctgtgtgcagaggctccatgggatgtgttg

SEQ ID NO: 523921 - DNA, 83 bp, Homo sapiens
aggaaccagatatcttgaaaagctgccagaaaggttttcacctcaaatggccccacggtgatcatgcccacctggttctgctc

SEQ ID NO: 523922 - DNA, 98 bp, Homo sapiens
gagaactgcgcagacctggtggaggtgttaaatgaaaatcatggaagggaagtggttgctgtgtatgttactggtgcttggaactgctattgttgagg

SEQ ID NO: 523923 - DNA, 51 bp, Homo sapiens
cgacagcacagacagaatccctgctaccaatgatccagatcctgatgatgg

SEQ ID NO: 523924 - DNA, 100 bp, Homo sapiens
ctgtcttcggtggactccttcggcagtccacccaccgccgccgcctcccaggaacccaagacagaccaggatgaggagcattgccggaaagtcaacgagt

SEQ ID NO: 523925 - DNA, 80 bp, Homo sapiens
ttctctgtcagctctttccccgtcagcatcccagccgtgctcacgggtttccaggcctgaggtgcccgccctggccccag

SEQ ID NO: 523926 - DNA, 75 bp, Homo sapiens
gggaaatcgggctgaagcgactgagtccgcgatggagctcatggaatgctgtgtaaatgccctggtgacatcatt

SEQ ID NO: 523927 - DNA, 98 bp, Homo sapiens
cgagctcagttatggcacacacagtgggacctagacaaagggagagggtgaccgacatcccaactaggtgtctgatgatttgtgagcctcaagtgact

SEQ ID NO: 523928 - DNA, 100 bp, Homo sapiens
atgttgtggtcaagtgcctcacccctttctacaaggagggcaagtttgcttccaaggaccgtgtttcttcgcctcgcctccctggtggtcctgctcttct

SEQ ID NO: 523929 - DNA, 100 bp, Homo sapiens
ggccaatgtgggatcgatgtttcaatattggaagcgctttgatttacagcagctgcagatggactcaccctgtcacccaggttggactgcactggcctca

SEQ ID NO: 523930 - DNA, 102 bp, Homo sapiens
aggctgacgaccgccagagccgtctctgggactctgcaggcacttcccgagcccccgcaagctatatgttctcctttcagccaagacctttcaccagtgcag

SEQ ID NO: 523931 - DNA, 98 bp, Homo sapiens
tgcaccgcgtctccctcgggagccggcgtgcccacccggacttgtccttctacctcaccacctttggttcaaatggtgaaagacgatgacccctcctg

SEQ ID NO: 523932 - DNA, 75 bp, Homo sapiens
tcggcgcccggcggggactgcagtttgctaatccagactttacacaacctatctcagaagttgtagatgaagtaa

SEQ ID NO: 523933 - DNA, 75 bp, Homo sapiens
ctaatgccatcttcaaagcctttgctatgatcattgacaaactggaagaggtggctcgtaagttggtgatcattg

SEQ ID NO: 523934 - DNA, 103 bp, Homo sapiens
tgactggcacagtggagaaaccgcctcgaaaacggagaagcaggtcactgctgaaactcaagagaaagaagacgttatcacacatttgcaagagaaggttgca

SEQ ID NO: 523935 - DNA, 75 bp, Homo sapiens
ccggtgtcggagcagcggctgtggcgcggcggccgcgagcacacagcaagaaggaggccatcagcaaactgggaa

SEQ ID NO: 523936 - DNA, 75 bp, Homo sapiens
ttcttccagagccaaggaggaagggttgtccgggaaatctgaaatagagtactatgctatgttggctaaaactgg

SEQ ID NO: 523937 - DNA, 136 bp, Homo sapiens
ctgtgagaacagatgtggccgtcctgcggtaccagccaccccctgagtatggggtaacgaggctgcttctgatgcttggaagatatcctctcagccacaaagatggtaataaatctttgcctcccacagttcagac

SEQ ID NO: 523938 - DNA, 100 bp, Homo sapiens
ctgggtgaagtgctccgccgcccttgcctccagccgctgccatggcccagacactgcagatggagatcccgaacttcggcaacagcatcctggagtgcct

SEQ ID NO: 523939 - DNA, 100 bp, Homo sapiens
gcaggctccgagccttcagcagaggcggcagcctggagagtcgaagcagcagctctcgctccagaagcttcactttgagcttacaagaccctatgaaaaa

SEQ ID NO: 523940 - DNA, 99 bp, Homo sapiens
cggctacatgagcgacagtgacctcatgggcaagaccatgacggaggatgatgacatcactaccggaaacagatgattatgctgagattatagatgaag

SEQ ID NO: 523941 - DNA, 98 bp, Homo sapiens
atcgggaacctcttccagttggaattgaagaatattcccaagtccttcacccgggatatgacatgtctacatttattaggcggtatagtagatattta

SEQ ID NO: 523942 - DNA, 96 bp, Homo sapiens
taaggtccagctggtcaccgacagggatcacttcatccgaaccctcagcctcaagccgctgctcttcgtatatttgccttccctccatgatctcca

SEQ ID NO: 523943 - DNA, 75 bp, Homo sapiens
cgcgcggccaagccatgctcggccccagggcgaactttctgaccaagtatacaactacccagagggcctaggaga

SEQ ID NO: 523944 - DNA, 100 bp, Homo sapiens
ataatgatgaagaagatccttcaaaattaaaagaggagcagcatggcatttcagtcactggtttgcagagtccagttaattgctggccctcggagagtgg

SEQ ID NO: 523945 - DNA, 83 bp, Homo sapiens
ctcaagatggcggacaaaacgccaggcggatctcagaaggccagttcaaagcaaaaaatcccagaagtgggatgaaatgaaca

SEQ ID NO: 523946 - DNA, 90 bp, Homo sapiens
gttgtcaaggtggcctaccaggaggccaggggtgtcgccatgctctggattaatcgaattacagctgctagccaggaacatggactgaag

SEQ ID NO: 523947 - DNA, 75 bp, Homo sapiens
gacagagacaagctgagcttgccgcacaaaaagctagagagggacaggcattagagcccaaacaggatgctttcc

SEQ ID NO: 523948 - DNA, 96 bp, Homo sapiens
gcaaaacgaggacgaagtgcagaatgcctacatactaccaggtgtattgtacgagcattgaaagatccaaatgcatttctttttgaccaccttctt

SEQ ID NO: 523949 - DNA, 98 bp, Homo sapiens
acatcaagattctgaatctggtgatgaacttagcagcagctccactgaacagataagggtgacaaccaaagccaagcaactgaaggattcagtgacct

SEQ ID NO: 523950 - DNA, 99 bp, Homo sapiens
gccggggcaggggcggaggcggaggcagaggtggaggcgctttgaaaggaatggccaacctgctgacgggccccaaacggaacctgatggccctggccc

SEQ ID NO: 523951 - DNA, 90 bp, Homo sapiens
cgagccgcgaggagcgcactccgtggccccgatggagcggtacaaagatcaaggaatcaacatttaccgaaagccacccatctacaaaca

SEQ ID NO: 523952 - DNA, 75 bp, Homo sapiens
ggacaacgcagatatagaacatttcttttatcacagtcgaacaagtaaaattacttgaccgattcagtaccagca

SEQ ID NO: 523953 - DNA, 95 bp, Homo sapiens
tagcaacgatgttagttcttcagattttgaagaagggccgtcgaggaaaaggtatgaggatacatgggctgcacttcacagaagagccaaagact

SEQ ID NO: 523954 - DNA, 100 bp, Homo sapiens
gctgctcagcccaggcgaccgtcttgcatctgaagaagttcatcgccaaaaaactcaacctttcatcctttaacgagatgtgtttgatgggcatttgctg

SEQ ID NO: 523955 - DNA, 75 bp, Homo sapiens
gaagaaatagttacctatgatcgtgggagacctccacagaacccttccagcaagctgtcttctaaagcaaacaag

SEQ ID NO: 523956 - DNA, 74 bp, Homo sapiens
attgctggtgctgggacttggagtatggatatacctccgcgctctggcagctcctcttccgtgtgctctcgcca

SEQ ID NO: 523957 - DNA, 87 bp, Homo sapiens
ctccacaccgacaccatctggaggaggcgttgccgtgaggatcactccaagaactgaggcccctgtcagcagtgtcagtaatagttt

SEQ ID NO: 523958 - DNA, 98 bp, Homo sapiens
cgaggccaggagcttgcctttccgtgtactaatggtcacttgatgtgcgctggctgttttatccacctactagcagatgcccggctgaaggaggagca

SEQ ID NO: 523959 - DNA, 90 bp, Homo sapiens
gacaatggacttctggctttggccactttacttcctgccaggtgctggagaatctggtaaaagcaccattgtgaagcagatgaggatcct

SEQ ID NO: 523960 - DNA, 82 bp, Homo sapiens
tttacaagaaaaccacctaaatatgaaagattcatcaggccaatggcccagactctcacagtatggaggcaagctgataaac

SEQ ID NO: 523961 - DNA, 88 bp, Homo sapiens
cggcgttcttccgctggctcagccgcaagtacccgtccatcatagtcaactgcgtggaagagaaggagctgtccaagatcacgatgcc

SEQ ID NO: 523962 - DNA, 90 bp, Homo sapiens
ggtttgtacaagacatgcgcctcatcttccagaaccacagggcctcttacaagcaaacggggattcagcgtccgatcctttggaacaggg

SEQ ID NO: 523963 - DNA, 75 bp, Homo sapiens
acacttacatgccatggccttctacgttgtgaaaatgcacctgtggaatcctctcaagaggaacagtcattgtgt

SEQ ID NO: 523964 - DNA, 83 bp, Homo sapiens
gctctggctgtgctgcgcgacccccgcgcatgcagtacttctggaatagaaattctaaacattagcctgccgaacaactggat

SEQ ID NO: 523965 - DNA, 75 bp, Homo sapiens
gtccccacagcccacaggatggaccaaagggggcaggttcttgatagtccacaatgggtgaaccacagcaagtga

SEQ ID NO: 523966 - DNA, 101 bp, Homo sapiens
caatttgccaacgtgctcaccatggagcccatcgtgctgcagtacgtgcctcatgatcgcttcaacaagaatgtcttcctgtcccagtctcatatttccct

SEQ ID NO: 523967 - DNA, 99 bp, Homo sapiens
atgctgaatttctttgtcaccgaatgctatttgctttctagaagagaaggccaagcagggtctcctgaaaagcctctctccgatctgggccgtctctcc

SEQ ID NO: 523968 - DNA, 50 bp, Homo sapiens
ctgccatagtctctggacaaaggcagaggtggaggagacactgaagcgac

SEQ ID NO: 523969 - DNA, 101 bp, Homo sapiens
ggtgtctagcccagtggaccttctgaaggaagatgagaatgtgcctactgctcctgatcctccaagtcaacatttacgtgggcatgggacaggcttttgct

SEQ ID NO: 523970 - DNA, 75 bp, Homo sapiens
ggtgaagttgaagaagtactctcatggagacaagcagtgggagacatttagtgaacgctcttcaagctcacaaac

SEQ ID NO: 523971 - DNA, 101 bp, Homo sapiens
gcagcagccgcccgcttcaaccccaggggaccagaggaactcagccctgattgcggataaaagaatcagagtgtctcaacccttgacaagaggaccaagtg

SEQ ID NO: 523972 - DNA, 98 bp, Homo sapiens
tgactggccctgtttcctgcttacttctgttgggacaggccttgcatcctgtgctgccaactccatcaatcaggcaacagcattattgagaaaagccc

SEQ ID NO: 523973 - DNA, 90 bp, Homo sapiens
gaccagaaggagatcggtgacctccgtgcccagcagcagcagtaacgaatccagaaaactctggagagcccttcagagcatacacaccac

SEQ ID NO: 523974 - DNA, 98 bp, Homo sapiens
ggcaactatgtttggatgttggatctacactttctcaagcactgtgatcttcaaatgctcgcttctcatatgtgcggatgaaatatcttttcttttcc

SEQ ID NO: 523975 - DNA, 75 bp, Homo sapiens
cagaatccatcgaacaattgaattaatgtactctgacaaatctatgatacaaaccatggcaaaagttataaccac

SEQ ID NO: 523976 - DNA, 97 bp, Homo sapiens
ggaacgtacagacatgcaaagtaaagtggtgatgtggaaacagctgtaaaatttgcaactcagcttattgacctgggagcagacattagtttgcgga

SEQ ID NO: 523977 - DNA, 74 bp, Homo sapiens
aatcagctggagaaggagaagtggagaagaaatcagtcagccgcagccgagcccaggaagtgcgtcccctccgt

SEQ ID NO: 523978 - DNA, 82 bp, Homo sapiens
gagcctgagctcgaggcccggctggcgcacctgggcgtgcagaaacctctgtagaggagcaggatgcaaccgacaggctgtg

SEQ ID NO: 523979 - DNA, 100 bp, Homo sapiens
gcaccaggctcatcctgtccatcgtgtgcctgatgatcacgcagctggctggcttcagtggaccagtgaaaggtgtagcagtcactcggcctacacccac

SEQ ID NO: 523980 - DNA, 75 bp, Homo sapiens
agagcaagcgcggggaaccaaggagacgctcctggcactgcagataatggctgtgtttaatcagaagtctgtctc

SEQ ID NO: 523981 - DNA, 98 bp, Homo sapiens
ttaaatgccctcaagtcgacaggggatgggaccctaggttcatctgcagaagccagcggacgcctctgttcaacttgtgggttacctggctcatgaga

SEQ ID NO: 523982 - DNA, 100 bp, Homo sapiens
cagtgatgtctcttcttctattagcacttactgggattggtcagatagcgagtttgaatggcaggttttgaggttttgctgaagatattcctgaagaatc

SEQ ID NO: 523983 - DNA, 143 bp, Homo sapiens
aggagttgtcctttgctgaagacactgaagagtgcaggaagcatataaatgactgggtggcagagaagactgaaggtgtgagatcaaccatgagttccgttgcagttttgacccaagagagttttgctgaacaccgaagtggg

SEQ ID NO: 523984 - DNA, 74 bp, Homo sapiens
cagagggaggcggcactggtctcgacgtggggcggccagcgatgaagccggtctctaattaacagaagatggca

SEQ ID NO: 523985 - DNA, 82 bp, Homo sapiens
cgccccctcctgaggaggacccagagcaggacagcggcccggaggacctgcctctcgtcagaattcaattcgtcataatctg

SEQ ID NO: 523986 - DNA, 100 bp, Homo sapiens
aaaacaaaattctgaactcaggacttggcaacacccagtcagcttgaagagtttcaaatggaccctaccactgagaaatcaagatggcagtctactatgg

SEQ ID NO: 523987 - DNA, 90 bp, Homo sapiens
ggagcagctgcgtgagtggagatgctttcagtggtggagaatggactggacccccaggctgccatcccgtgcacagccagagaacaacac

SEQ ID NO: 523988 - DNA, 146 bp, Homo sapiens
gagagctggttgccttggctccctgtagctatagcagccgcggcggttaagtatgcggcgccaggagctctcaggggagactgtcactagcgtgaccagcttggccccactacagcccaagaagggcaagaggcagaaggagaagc

SEQ ID NO: 523989 - DNA, 82 bp, Homo sapiens
ttcgcagtggtcgcttcttctccttgacaatgcagatcttcgtgaagactctgactggtaagaccatcaccctcgaggttga

SEQ ID NO: 523990 - DNA, 75 bp, Homo sapiens
cagagacaggcgttcgaggagatcatcctgcagtcctccacctcctggatgccctcccaatgctgctcagcttgc

SEQ ID NO: 523991 - DNA, 74 bp, Homo sapiens
cttttccacaaccagtttataagtgctgttaaatatgtgggtttagatgtagattctctggtcattgagcatat

SEQ ID NO: 523992 - DNA, 78 bp, Homo sapiens
agagcgctacaaggatggggtggtgaccatcggctgtgtggatatgtgttgagacggattctccgccgagctgtccga

SEQ ID NO: 523993 - DNA, 100 bp, Homo sapiens
tgacgagccagaagagccaccagcccacaggcccgagagggagttcaggaaccgcctccctgagtcatccgtccttggctcaggatttggagagcttgca

SEQ ID NO: 523994 - DNA, 95 bp, Homo sapiens
aaaccatcaggaacctggactgtataagcccgacaacaagctcaaatacgtcaccaaatggcagaggacagcaaagcagattactcatccattct

SEQ ID NO: 523995 - DNA, 100 bp, Homo sapiens
ttgttgccatcaatgaccccttcattgacctcaactacatggttacattggcgaatttgaaatcattgatgaccacagagctgggaaaattgttgtgaac

SEQ ID NO: 523996 - DNA, 75 bp, Homo sapiens
caacaataagaaactcctgggccgcgtgaaggccttcgataggtggacccaagtggagagattgtggaactggcg

SEQ ID NO: 523997 - DNA, 100 bp, Homo sapiens
atgaaggcgtgaaggcatgctttgagagatccaacgaataccagctgattgactgtgcacaataacacttagcctgtgatgaggagagagtggaagaagc

SEQ ID NO: 523998 - DNA, 75 bp, Homo sapiens
tcaggcctgaccgggataagctccaggttcgatacaagaggctgttttcctagcgtggcttgctgcctttggtaa

SEQ ID NO: 523999 - DNA, 100 bp, Homo sapiens
ctcgggcctctggccaacagggcatggggacatcatatcagggtcggcactcttcaccctcccgagccctgcccgtctcggccccatgcccccaccagtc

SEQ ID NO: 524000 - DNA, 88 bp, Homo sapiens
agcaggctctgcgggaggtggagcacctgaagagatgccagcagctcagcctcacaggccaaagcatcagcaccagaacgcacaccca

SEQ ID NO: 524001 - DNA, 75 bp, Homo sapiens
catgattgtgaggcctccccagccatgtggaactgagcaatgggtaaccaaatgagtgttccccaaagagttgaa

SEQ ID NO: 524002 - DNA, 75 bp, Homo sapiens
ccaacgcgaagacggtaacccgtgtgactttgactggaaatctgataccagcatcagtgatttcctcagtgaaga

SEQ ID NO: 524003 - DNA, 75 bp, Homo sapiens
cggctttgcatcggaaatcagctctacagttcagagaagatggcgaattagaagatggtgaaatagacgatgcag

SEQ ID NO: 524004 - DNA, 98 bp, Homo sapiens
tccctgttagtgtttgctggtgcagagggttcgcagctcagacatatggcatccaggagaaagatgtcttgccccttctccagataatggaaaacttt

SEQ ID NO: 524005 - DNA, 88 bp, Homo sapiens
tttattgaagctcacctttgtctaaataagctattgagggcacctacattgacaagaaatgccccttcactggtaatgtgtccattcg

SEQ ID NO: 524006 - DNA, 90 bp, Homo sapiens
atgctaatgtcagcagacagattgaggacactgtattatacggttactataatccgtggccgttcacatggtttcaaggcacaatgagac

SEQ ID NO: 524007 - DNA, 101 bp, Homo sapiens
ttaagaaggggtcaaagtttagctgctcgagatcgaggagccttggaatggatggctttggccaaccagttggcattcttggacgccctgccacagcatat

SEQ ID NO: 524008 - DNA, 100 bp, Homo sapiens
ggccaagtactagtgaaaccatacatagacgagaagctatggagatattttgcatagaatgaaggatctctgcagatacatgaacaactttgatagtgaa

SEQ ID NO: 524009 - DNA, 83 bp, Homo sapiens
aatgtattccaccacctccgccagttaagaggaaaaagtggttatagccaagaggtggtgtgctacacattaggaaatatccc

SEQ ID NO: 524010 - DNA, 100 bp, Homo sapiens
gtctgctgctattctccgagcttcgcaatgatgactttcacacgacctgccaatcacagacaactcacttttgaagaaattgccaaaagtgctaaaatca

SEQ ID NO: 524011 - DNA, 83 bp, Homo sapiens
gaccggatcccataaacactgtcgggctcacacagtcgacaaaagaaaacgtttttcttgggagatgggcagaagctgaagga

SEQ ID NO: 524012 - DNA, 80 bp, Homo sapiens
aatattggaagcgctttgatttacagcagctgcagatgatggacttccaaaaccagaactaatatcctggattgaacacg

SEQ ID NO: 524013 - DNA, 100 bp, Homo sapiens
cttcgagatggacggatgctcatcaagctgctggaggtcctctctggagagaggctggttccctacggtcttatccaccagccctgctgcccatggtggc

SEQ ID NO: 524014 - DNA, 83 bp, Homo sapiens
cttccccacgcaaccccagatccatttacactttacattcaaatctgaacatcaatgatgtactagggaactactcattgact

SEQ ID NO: 524015 - DNA, 76 bp, Homo sapiens
aaccacctcgagcggctgctggacgaagttgctgatcatctgggctgtgatccacaaacccggttctttgtccctc

SEQ ID NO: 524016 - DNA, 89 bp, Homo sapiens
cctgagacacggcaagctggtgattaacaaagacctcgcggaggaagaacgagcctctgactccaggttatcatggattcccagcgcgg

SEQ ID NO: 524017 - DNA, 90 bp, Homo sapiens
actggaaccgcttccgagacgtcgcctgcgaggccgctggccaggcctgagcctctgccaccatggccattgtgcagactctgccagtgc

SEQ ID NO: 524018 - DNA, 90 bp, Homo sapiens
cagtgggtccactggtagcccccacccctctccgtccatggccccagatgacacttcagtgtaaggcaaacattggtgggcaccgatctt

SEQ ID NO: 524019 - DNA, 100 bp, Homo sapiens
gaacaggccgggcaccaaggcgcaggaaacccagcgtttgctggcagaaccagttcctggcatcaaagccgaaccagatgagagcaacgcccgttatttt

SEQ ID NO: 524020 - DNA, 100 bp, Homo sapiens
gatggccgtgatgcgcaaagtctccttcctgcacaggaaggacgtcctcgtggatgattcaacagccacacaaagcagcaacattttttggatgcattgg

SEQ ID NO: 524021 - DNA, 82 bp, Homo sapiens
aggaatagattctcttgaccatgtgacatctgatgctgtggaacttgcaaatcgaagaatcctcactatggatgggctcatt

SEQ ID NO: 524022 - DNA, 98 bp, Homo sapiens
gagctgaccgtcagcaccaggagcagcgaggcactcatcctgcacgccggcgagtgccagcgttatggatgctatgtgatcaaaaaatacagtttgac

SEQ ID NO: 524023 - DNA, 100 bp, Homo sapiens
cttgatggagactattgataagcagcgagaagagatggccaagagcagcaggtctccaggatagctgcttatgcctacagtgcactttctcagatccgtg

SEQ ID NO: 524024 - DNA, 90 bp, Homo sapiens
gtttgacaacatgttctccagtgctaatgtttggtcagctggctgtgtactggcagagctcctcttgggccagcccatcttccctgggga

SEQ ID NO: 524025 - DNA, 76 bp, Homo sapiens
ggttctgctgcttcgaaagctgtgtcacatttgaagacgagcactgaggatgaggaaccaactgaagaatatgaaa

SEQ ID NO: 524026 - DNA, 80 bp, Homo sapiens
gctttcgcatttgggaccctgcaggagacaagaggagcagcagcggcaccgcccctcaccctggagggtcctgtacaatc

SEQ ID NO: 524027 - DNA, 139 bp, Homo sapiens
acctgagctgaaatggcagacgatctcggagacgagtggtgggagaaccagccgactggagcaggcagcagcccagatctctctggttaataacttcttgaagtatgggttaaatgagcttaaactgtgcttccgagta

SEQ ID NO: 524028 - DNA, 82 bp, Homo sapiens
gggcattctccatctccttgcagtgatgcagccaacacgaacggttgtcatgtgtaacacaactttcgatcaccgcgaaaac

SEQ ID NO: 524029 - DNA, 51 bp, Homo sapiens
gtgcgaaaagatctgcaaaattttctcaagagttttgctcttattgcccag

SEQ ID NO: 524030 - DNA, 75 bp, Homo sapiens
gcaagctctttgacacacagcagttcttgtcaggttatgaagacagtatggagtttccagaccatagtagacatt

SEQ ID NO: 524031 - DNA, 98 bp, Homo sapiens
cgtgtattcatggagtatggacccaacttccccagtgtgtggcaacattttgtgattttccaaaaataaaccatggaattctatatgatgaagaaaaa

SEQ ID NO: 524032 - DNA, 74 bp, Homo sapiens
cttgggccagagttccaggggctctgggagtggctgccaggcatccagggcattgtggatgcctaccgccaagc

SEQ ID NO: 524033 - DNA, 50 bp, Homo sapiens
cgccagaatttaccgccagcacggacctgaaggagaagaaggagaaggtg

SEQ ID NO: 524034 - DNA, 83 bp, Homo sapiens
ggaaagggaagagatgatttctccatcctgaacgtgcagcgatgcagcagcttttttatgagaattacgagcagaacaaaaag

SEQ ID NO: 524035 - DNA, 83 bp, Homo sapiens
cgacaagccgctggcagccgcggatctcaccgccgctcaggctgtgagccgtgagctttgaggcggtgggatgtgtcagcaga

SEQ ID NO: 524036 - DNA, 100 bp, Homo sapiens
tggttacagctgtttccacgtgcggtgctcgtcgggagtgatcacctaccctacaggctgacagagtacttcttggtggtcctggtagcttttattggca

SEQ ID NO: 524037 - DNA, 103 bp, Homo sapiens
gggatccgacttgccggcagaacttacgctgcgggaccccgggcactgttgctgctgcgggagatgccaaagacctggatcagctgggccgaaataagatcac

SEQ ID NO: 524038 - DNA, 100 bp, Homo sapiens
cctgagagaggaccagcggccagagcctcagtgactgccaccctggaggacagggcacaacaaccgtttctgttgtcgccgtgatcctgaaggcgctgac

SEQ ID NO: 524039 - DNA, 75 bp, Homo sapiens
tgcgttgacacgtcttatttaatccacatcataggaacgaatgcaggaatttgggaactgagctgtgcaagtgct

SEQ ID NO: 524040 - DNA, 82 bp, Homo sapiens
gagaaactcgggcaacctttgagtatcctgagctccagctggaccctaaattggatcctcttcctgctgagagtcccctaat

SEQ ID NO: 524041 - DNA, 83 bp, Homo sapiens
cgcggctcttcccgcccgccttccgccgtctcttcgagttcttcgtgctgctcaaggatcatccagcagctcgtcaacggcat

SEQ ID NO: 524042 - DNA, 107 bp, Homo sapiens
ccttcccacaggctctctccgctcgattttgtcaccgttatgtgggaagcgaatccagatgaccagtgtcccagtgaaggaacgagtgaaggtgtctcagaactgga

SEQ ID NO: 524043 - DNA, 90 bp, Homo sapiens
acagcaagccctactgagcgtgctcccctctgagactggagtgagagggtcttctggatcgccacgacgggagcagcaatgggaatccgc

SEQ ID NO: 524044 - DNA, 73 bp, Homo sapiens
atgggaaaatcctttgatgggttgggcatcaacatttcctccttcttcacccctgaaaccatatccaaagaag

SEQ ID NO: 524045 - DNA, 100 bp, Homo sapiens
cctgtccgtcgatgcaccgaaaaggcatattctcaagatgcctacctgaaaggcaacgaagcttatagcggcaatgcccgcaatatacctgaacctccac

SEQ ID NO: 524046 - DNA, 100 bp, Homo sapiens
agagtgcgggctgtggacggcagccggcactccaactggaccgtcaccaacacccgcttctctgtggatgaagggaaggtgaagaaggagctggaccctg

SEQ ID NO: 524047 - DNA, 105 bp, Homo sapiens
gggcactgccatgctgtatgaactcattgagggcactgaaggctttgtggaactacctgagccagaagggagtcaatagcgacgccatctgggagaagataaagg

SEQ ID NO: 524048 - DNA, 100 bp, Homo sapiens
aaatgtccaaaatgtaactggagagaaagtgggcaacttttggaaccaggccccgtccccatgcctcggggtgcagtgtgcatttggggcgacgtgtgct

SEQ ID NO: 524049 - DNA, 83 bp, Homo sapiens
ccagaccctggagcctcagttggaagcagccgatccagcctgcggagcctgtggggcagttaccggtattgtaagaacaagcc

SEQ ID NO: 524050 - DNA, 145 bp, Homo sapiens
cctgcccttccccaagaggaaaacacaggagaggaaggaatggctgctggtctcctcacagctgggccccgggaactagccagctgtggatggagtaagaaggagaaacacagtcttgcccctaacgttgtggcctttacccgga

SEQ ID NO: 524051 - DNA, 101 bp, Homo sapiens
aagaaggccctgagtcaaagaagatgcctcgaactaaacaaattcatcccagaaatctaagagaacttacgatttccaacggccccaaaaaccactcggtc

SEQ ID NO: 524052 - DNA, 96 bp, Homo sapiens
ggttgctacgggaacaatacactgaggtcagaatggcggcagtggagcatcgtcattcttcaggattgccctactggccctacctcacagctgaaa

SEQ ID NO: 524053 - DNA, 100 bp, Homo sapiens
gctttatgtcctcgaagatcagaccgagaggtttgtaaaagaatggacttggtctgccagagaatgttgaatcagggatttctgaaagtggagaggtacc

SEQ ID NO: 524054 - DNA, 75 bp, Homo sapiens
ccagaagggaaggaagagagcctagctacagagccagccccagaatcttctgctgactctcaacttttcctggaa

SEQ ID NO: 524055 - DNA, 75 bp, Homo sapiens
ccgctgtccaattcccaggaggcgggtctaccctgaactgcagatcaccaatgtggtagaagccaaccaaccagt

SEQ ID NO: 524056 - DNA, 95 bp, Homo sapiens
gtcgcttctgcccaagatgaggagcccctggcctgcccggacgagttcgatgacttcgtcacctatgaggtgaaaggtgtagcagtcactcggcc

SEQ ID NO: 524057 - DNA, 100 bp, Homo sapiens
ctggaggacacacctaaacatgtggaatcccaatgccgtggaactgtcaccgctgttcccagacacacttattctgggtctggagatccgggtgaaggtc

SEQ ID NO: 524058 - DNA, 80 bp, Homo sapiens
cggcgaggccctcatgtaccacacggatgcttgaagcccacatgcagagctacaagggcaatgaccctcttggtgaatgg

SEQ ID NO: 524059 - DNA, 101 bp, Homo sapiens
aatgcaagggccacctgttcctcagttccaaccacaggttggagttgctgtgggtgagctgctgtggtctgtagccaagcatgctgtggtcggatctgccc

SEQ ID NO: 524060 - DNA, 100 bp, Homo sapiens
agaaggtggtgtgtgtggatcagcagacccccaccatccctaaccggctggctgcagacccggatatcacgcagcagcacctctgtgaccccctgacggt

SEQ ID NO: 524061 - DNA, 50 bp, Homo sapiens
ctgccgttggctatagcaaatgccccagttactccacaggatccgctgaa

SEQ ID NO: 524062 - DNA, 75 bp, Homo sapiens
gctgccacctttacaagaaaactggataaagtggccagtgtgtacgaagccccgggctttttcctggacctggag

SEQ ID NO: 524063 - DNA, 89 bp, Homo sapiens
cctttggatgtagcaaggaagaaattgttcagttcttctcagacctttccaaagtgaaactgatgagatttgatgatccactgttgggg

SEQ ID NO: 524064 - DNA, 100 bp, Homo sapiens
gaccaagaaagctcctcccccgtcctccgttagctaattaaaacatttttcagggacgtagccatccagagccaatgttttcagttgcaccaagcttagc

SEQ ID NO: 524065 - DNA, 100 bp, Homo sapiens
aggagctggagcggcagcagaaggaggtggagtctttcattttggatcaggatgatttggaaaatccaatgctggaaacagcttccaagttgctcttatc

SEQ ID NO: 524066 - DNA, 144 bp, Homo sapiens
cattgcaaacaggcctgctttactagactgtgccttctttgggtctcctctcccaaccatcgagtggaaatctgaaatagagtactatgctatgttggctaaaactggtgtccatcactacagtggcaataatattgaactggg

SEQ ID NO: 524067 - DNA, 100 bp, Homo sapiens
aaataagccgttttttgacatctgtacttcaagaaagaaaaggaacggctgtagtagatctctctgggaatggcgacccctcctcaatttgtactgtaat

SEQ ID NO: 524068 - DNA, 97 bp, Homo sapiens
accatccgcggcgcgggagacgagccggccgtcccgggccgggggacccgcccgccatggccaccaagccccgcagcgcctccaccccagagacccg

SEQ ID NO: 524069 - DNA, 75 bp, Homo sapiens
tttctttggagacaaaactatgccagtaagaattgtgacaaaggccagtcttttttcattgacgccccagattcc

SEQ ID NO: 524070 - DNA, 73 bp, Homo sapiens
ccagccctgccctggcgtccgtgctgctggccttgctgctgagcgctggcagagaggctgatgacatcgtgaa

SEQ ID NO: 524071 - DNA, 50 bp, Homo sapiens
aaattatctctggtgctgcagctctgtacaattcaacagtgttgtgatgc

SEQ ID NO: 524072 - DNA, 76 bp, Homo sapiens
ggaagaccatcagaagcagagccagcagggagatcttgtgcgaaaactcaaagaagataaagcaccccaagtagac

SEQ ID NO: 524073 - DNA, 100 bp, Homo sapiens
aaaggtggccgtctctgcctaagtaccgatgcagcagccccacagaccatggtcatgccaggtcagaggaaagtgtttgacctcccttttgggagctgcc

SEQ ID NO: 524074 - DNA, 100 bp, Homo sapiens
ccggcctcgccatgaggctcttcctgtcgctcccggtcctggtggtggttctgtcgatcgtcttggaaggcttcctggactgggtccccaagaagatgca

SEQ ID NO: 524075 - DNA, 100 bp, Homo sapiens
ccgtgagtcgcctggggaggccacaggacacaggattggttttcacagaattccatggactttaactgctgaaccaatgatgcactgattttgtcacttg

SEQ ID NO: 524076 - DNA, 100 bp, Homo sapiens
cttcatgcactctgtcaagctgagagttctatatgaagggaaagaacggcttattccaggatgtgaagtgatcctagccacaccctatggtcgctgtgcc

SEQ ID NO: 524077 - DNA, 100 bp, Homo sapiens
atgaaccagccgggcggcgcggcggctccgcagagagtccggagggctgtgctaccccaagaagaggaaggatcagggggtgggcaactggtaactgaag

SEQ ID NO: 524078 - DNA, 100 bp, Homo sapiens
cttttgtagagaagtgctgcaaggctgacgataaggagacctgctttgccgaggagggggtgagtggtgcactgacagtgcttatgaaggacgcaatcaa

SEQ ID NO: 524079 - DNA, 50 bp, Homo sapiens
gtgtaatacatcatgaactgcagggtctgccatcatggatgttctcgcag

SEQ ID NO: 524080 - DNA, 100 bp, Homo sapiens
ccctggaatatgaagcaacatgagatggtggatgaacccacagggagttctgggaaatcgttcattcatttacagatgaacagaaaagactcttcttgca

SEQ ID NO: 524081 - DNA, 80 bp, Homo sapiens
acgccgagcacccaggcgactgcctcatcttcaaggctaccggctctctgaccagttccacgacatcctcattcgaaagt

SEQ ID NO: 524082 - DNA, 73 bp, Homo sapiens
acgtctgcggaagtgcagctgcctcagttcttagcgcaggttagcatggcctcattgaaagaactagatcaaa

SEQ ID NO: 524083 - DNA, 75 bp, Homo sapiens
gcacggactgctggagatggtggagtccgtcatggaaattaatctcactaatgactaccgtgtcagcggaggagt

SEQ ID NO: 524084 - DNA, 101 bp, Homo sapiens
gtctgcttacgagggctcctcccttcagctttggtccctcggggcgtctgggcagcctacgctttccgacaaattgagtggcagcaataatgcgaacaaaa

SEQ ID NO: 524085 - DNA, 74 bp, Homo sapiens
aaaaagcaagagtttgttatatagcagattactacagcatcccatttcccacacccactactccgctgactggg

SEQ ID NO: 524086 - DNA, 82 bp, Homo sapiens
cccgccgcctagcaaagactattaccagttactggtcacccggtctcaggtggaaatgagttctcaacagtttcctcggtta

SEQ ID NO: 524087 - DNA, 100 bp, Homo sapiens
tggattctgctcagaggaacttgtactgggatgtgatgatggagaactacagcaacttactctcactggtggggatcagcagtatacttgtgttataaaa

SEQ ID NO: 524088 - DNA, 82 bp, Homo sapiens
cggagcccaaacccggggcaggcgggcagctgtgcccgggcggcacggccaggagcagctgatgagccagatccgggagacg

SEQ ID NO: 524089 - DNA, 100 bp, Homo sapiens
tggtctcctactcccagatgcatccgtgtcaggaaagtggcttatccaatggttgctgcctattctgcaagcaagtttgctttggatgggttcttctcct

SEQ ID NO: 524090 - DNA, 100 bp, Homo sapiens
cgctacgagggcatcctctacaccatcgacaccgaaaactccaccgtagcccttgccaaagatcagcttgaacgggtctttttacgacttggccatgctg

SEQ ID NO: 524091 - DNA, 51 bp, Homo sapiens
gcgaggaaaatggcggcgggaggctactgttggattgattcgaaatcttgc

SEQ ID NO: 524092 - DNA, 100 bp, Homo sapiens
taccacttaaggacattgtggcaatcatcctgaatgaatttagagccaaactgtccaaggctttggcaaacaacgactatcgtctattccacaagatgag

SEQ ID NO: 524093 - DNA, 80 bp, Homo sapiens
agcaaacaggtcattgtgagagaattctcacaggcttatcactggaggagctgcagcatcgacaggtctccgggcgctgg

SEQ ID NO: 524094 - DNA, 89 bp, Homo sapiens
cggatggaagggaggagactcctgaccctcagaatgattgccaccaaggagccaatgaatcccattaaacaatatgtaaaggatggaaa

SEQ ID NO: 524095 - DNA, 100 bp, Homo sapiens
atctacatgttactcatcacgatagcaaccatatttccttcacaaacagaaaatgaatgaaaataaagatactgattcaaagaaaagtgaagaatacgaa

SEQ ID NO: 524096 - DNA, 83 bp, Homo sapiens
aaaagcagctccgtccacaacgccgcttcggggctcctagaattaaacaaccaccatgtcgagcaaaaaggcaaagaccaaga

SEQ ID NO: 524097 - DNA, 100 bp, Homo sapiens
gtgcagaatgttacattgtcgctcactctgcccatcacgtgccacatttgcttggggaaggttgaagaagcctcagcggaggcgatacggcctcctcgcc

SEQ ID NO: 524098 - DNA, 120 bp, Homo sapiens
catcaaaaagtgattaagcagagaatggagaagaaggttgattccagaaatatggctacacacacctttctgcaggagagctgcttcgtgatgaaaggaagaacccagattcacagtatg

SEQ ID NO: 524099 - DNA, 98 bp, Homo sapiens
cttctgctgcttggattccagttcgtctgcccacagccctccactcaacacaggaagtaccaaggcttccgggtccagctggaatccatgaagaagct

SEQ ID NO: 524100 - DNA, 75 bp, Homo sapiens
gaggacttgaagcagaaagcaagtgaatacgagtcagaaggccccttcacagatgtagtcactacaaatcttaaa

SEQ ID NO: 524101 - DNA, 76 bp, Homo sapiens
atgggaaattctctgctgagagaaaacaggtcgctattaaagcatgaagactttctgaaacctgccctagagctgg

SEQ ID NO: 524102 - DNA, 100 bp, Homo sapiens
cctggactcgtttaaaagatgccacctggtttgaggacttgggaaggaatggagtcagccgaccagacctgcctagagctggaacgttacctccagagcg

SEQ ID NO: 524103 - DNA, 100 bp, Homo sapiens
cttgcttgggatcctttatcctggtcatcttctatttccaaagtatgttgcacccagctaaagatcatcaccctggtaaaactttgccagagaacccagc

SEQ ID NO: 524104 - DNA, 75 bp, Homo sapiens
aggaacaaacacctgccttgcaatattaggtgttggagcgggccggagagaagtagagtgggctgcgaggagaag

SEQ ID NO: 524105 - DNA, 50 bp, Homo sapiens
ttctagaagttgaagttacaaagtgttgttacagatcttataacagtcgg

SEQ ID NO: 524106 - DNA, 73 bp, Homo sapiens
cagcttgagcagtttgttaaggaatgaggttacaggcagactcagtgggatcctcctacttgggaaagcccag

SEQ ID NO: 524107 - DNA, 102 bp, Homo sapiens
gcgccctctactcagcatggatatccaggtgctgagccaggagcagcagcctttctaggcgccctcgcccccgccgcccgcagaggccccgaaggagccgct

SEQ ID NO: 524108 - DNA, 96 bp, Homo sapiens
cgctgtgctgggcgccccgggagagcggcgccaccggaaccgctgggagtgtccactcgccttccaccagcatggcaacgtcttcacagtaccgcc

SEQ ID NO: 524109 - DNA, 90 bp, Homo sapiens
gagtcgcaccaaccggccgcctctgtccctttcccggatggagacgaagtcgcagacgtcggtgacactcagcatcgtccactgccctcc

SEQ ID NO: 524110 - DNA, 82 bp, Homo sapiens
cgaatgacccggagtgtggacaacgtccagttcctgccctttctcaccacggaagtcaagacagagcgggatgccaccagct

SEQ ID NO: 524111 - DNA, 83 bp, Homo sapiens
atgctttaatacagaaccagcatccaccaccaaagatccctgacaagcagttagatgaaagggaacacacaatagaagagtgg

SEQ ID NO: 524112 - DNA, 88 bp, Homo sapiens
tctctgcagcaagaggaaaggaaagatgtgttcgggtttttctagaacacggagtctaacaggcaaccagccaagttgaaccttctca

SEQ ID NO: 524113 - DNA, 83 bp, Homo sapiens
ctggtcacttccccaccggaggtttatcacaaggattttttatcaagcagaaatgcatcgaacaacgagaatcaagatcactg

SEQ ID NO: 524114 - DNA, 75 bp, Homo sapiens
aggtcccagagaaggttaatttacctaatcaaggtcacacgaatatggtgcacctgaagattgggaactcaaaac

SEQ ID NO: 524115 - DNA, 100 bp, Homo sapiens
accctcaacagaatggggaaggggagcctgtcacattatttgaggtggtgaaactggggaaaagtgcaatgcaggtggcagatatctacctagcatctca

SEQ ID NO: 524116 - DNA, 98 bp, Homo sapiens
tggtatgaaacaagcaaccacctctggctagtggtggaactctgcacagatgatgctgaataatcccctatttgctggaaatcctcagcttcaagaac

SEQ ID NO: 524117 - DNA, 97 bp, Homo sapiens
ggacacgaggcggcgggctggagacatggaccgcggcgagcaagatctcccttgagtttagaaatctggctgagaaataccaaacagtgattgccga

SEQ ID NO: 524118 - DNA, 75 bp, Homo sapiens
ggatattcagttgcacatccccacatcaatgcactgccaatggtgaaagaactcttttcttctttgggagtcgaa

SEQ ID NO: 524119 - DNA, 100 bp, Homo sapiens
aaccgaggggtccaccgacctcccgttagcccctgagagccgggtggaccctgaggtccttcacagcctgcagaagatgggtgtgaacctgacacgcagc

SEQ ID NO: 524120 - DNA, 50 bp, Homo sapiens
gttcagcagcgcggcagagtcatggggctgtgctccattgaagtgacttg

SEQ ID NO: 524121 - DNA, 100 bp, Homo sapiens
tccccaagtagtccgatggcagcggctgcgccgaggcgcccgactcagatttttaaagagcgagaagaagatttgaggcgtttgtctcgcccattggaat

SEQ ID NO: 524122 - DNA, 80 bp, Homo sapiens
ccaacaccttcctgtgcagtcctgttggaatttgcagttgtgaaaaacttcaggacaaaaatgtttcatttaaggacttg

SEQ ID NO: 524123 - DNA, 82 bp, Homo sapiens
aattgatttgctcttacgtatttgtgtgacttgactcttcaaacacaaaggttgaaatcacaaagattagacacctttttag

SEQ ID NO: 524124 - DNA, 75 bp, Homo sapiens
gaacacagtattgaaatgcatttgccttatacagctaaagccatggaaagccagtgaaactgaaattgcattctt

SEQ ID NO: 524125 - DNA, 75 bp, Homo sapiens
caacatagagctgacattaactgtcaggctgagttggctgtcattcttaaatttgtgctggaccatgaggacggg

SEQ ID NO: 524126 - DNA, 100 bp, Homo sapiens
ggtaaccctggcagagatggtgctcgtggtgctgacggccaacctggtgctaaaggcgaacctggtgatgctggtgctaaaggcgatgctggtccccctg

SEQ ID NO: 524127 - DNA, 100 bp, Homo sapiens
tgcgtggtagaattccagttcatgctgccgtcctcccacccaaaccggactccaacctgtctgtgcacacagaaaacccggacctcactccctgcttcca

SEQ ID NO: 524128 - DNA, 98 bp, Homo sapiens
ctggaccacggcgcagacgcgggcgagctgcggctcggacgccagcggacacgcgggcgagcccgtggaccgggagcccgtggaccgggagccggtgg

SEQ ID NO: 524129 - DNA, 99 bp, Homo sapiens
taccactcacactgtacttccagggagacaccgattataagaagagaaactcagcgctggggaagaagatggactcaccctgtcacccaggttggactg

SEQ ID NO: 524130 - DNA, 74 bp, Homo sapiens
atttgttaaggattccaagtaactcttatttggttttcaagatggcagcatctatgcatggtcagcccagtcct

SEQ ID NO: 524131 - DNA, 97 bp, Homo sapiens
tgccggtggtgcgagtcttcggagcgaccccggcagatgactcaaggagaactacatctagtgctgtaacggaaactggccctcctgcaatgccaag

SEQ ID NO: 524132 - DNA, 75 bp, Homo sapiens
agctcgttggcagtagcagcttatgaggatggtggctttttctcaagtatattttccagtctgtttggaactcgg

SEQ ID NO: 524133 - DNA, 100 bp, Homo sapiens
taccctggcattgccgacaggatgcagaaggagatcactgccctggcacccagcacaatgaagatcaaggacctccacaaaaagtactcgtacatccgca

SEQ ID NO: 524134 - DNA, 75 bp, Homo sapiens
aaccgacaaccttcccagaaagtccaagctcgtgcattgatctggtagccttgctccagaagcctgttcctcaca

SEQ ID NO: 524135 - DNA, 83 bp, Homo sapiens
ggcggcgctggagagggggcgctgagctgttgggaacatccagtcatggataaaaatgagctggttcagaaggccaaactggc

SEQ ID NO: 524136 - DNA, 101 bp, Homo sapiens
agcagccgccggagcccgagtggatcggggacggagagagcacgagcccatcaggaatatgtgtgtcttctgatcaaaatcatttccgaggagaaattgag

SEQ ID NO: 524137 - DNA, 75 bp, Homo sapiens
gaatgttcttagctgtcatgtttaaaaatacttctgcttcgttacctcaaaatggttatgctcctgttgaatttt

SEQ ID NO: 524138 - DNA, 98 bp, Homo sapiens
cctccgagccaggccgccgcaaagcaggcctgtttaaagaagaaaacccgtatgctagatttgaaaacaactaaagcgctccagcacatcagtcccga

SEQ ID NO: 524139 - DNA, 100 bp, Homo sapiens
attgcacttgtgcgaacaaagcttttctgatatgatgggaaatacaaatgaaccaagcacacgtgtccgagatttctctctgatcaaacggacagttcag

SEQ ID NO: 524140 - DNA, 100 bp, Homo sapiens
acacatggctagacaatgctttggtgctagatgccctgatgcgagtggccaatgaggagtcagagcacaatcaaggtctctgagcggcccctgatgttcc

SEQ ID NO: 524141 - DNA, 75 bp, Homo sapiens
gacgttcggccaagggaccaaggtggaaatcaaacgtgtggaaacaggaagagaactagaactggaagtaaagca

SEQ ID NO: 524142 - DNA, 100 bp, Homo sapiens
gacggtagcagcagcatggccgcgatctatgggggtgtagaggggctccggatggtggagacgctgagcaacttgctgcgctccgtggtggccctgtcgc

SEQ ID NO: 524143 - DNA, 75 bp, Homo sapiens
agtccacccaccgccgccgcctcccaggatctctctaggagctgacactcgaaccttcacgacccattcggattt

SEQ ID NO: 524144 - DNA, 96 bp, Homo sapiens
ctggcatggagcgggaactggaaaacatcatccaggaggtggggaagctgaggcaggaagccctttagtcacttgccgaaggccacgctgttaccc

SEQ ID NO: 524145 - DNA, 100 bp, Homo sapiens
aagcatgccctgaaaaagtatcgtcgagaagcctatcatcggaagtgcattttcagctgagcacctcaaacttcaactccagaaggaatccctaaatgag

SEQ ID NO: 524146 - DNA, 75 bp, Homo sapiens
cgaggccttcaagtgcatgatgtgcgatgtgcggaagggcacctccacccggtgctgctacccccgtatgatgat

SEQ ID NO: 524147 - DNA, 80 bp, Homo sapiens
gacagtgaatgtggaaaggagattgacagtcacaattttgtaataagtattgaatttgaccgggattgtgactattttgc

SEQ ID NO: 524148 - DNA, 90 bp, Homo sapiens
gcgatggggccaacagcggcctctagtgtctggaggaggaagtgtcagcgctactgccgcagaatgctgcttctaaattacttgggcaaa

SEQ ID NO: 524149 - DNA, 101 bp, Homo sapiens
ccggagtgagcggagtagcgagtcggcaacccggaggtggacacgctttgcctggaggatttgcatgcgtttattgcgcaggccttgtgcctccaaggaaa

SEQ ID NO: 524150 - DNA, 75 bp, Homo sapiens
ctaaatgtggcagcggaaggggccagagctagaatgccaattcctgtccagttgatcgaactctatttaagtgca

SEQ ID NO: 524151 - DNA, 75 bp, Homo sapiens
gacctcagctcccagaggatcaccagcgtggtgctcctgcgggaagaagtgtcgcggctccaggaggaagttcac

SEQ ID NO: 524152 - DNA, 89 bp, Homo sapiens
ctttgttcgattgtataacacagaatcacaaagtttcagaaagaagtgcttcaaagtttccaggaatatggatctactggaacagccca

SEQ ID NO: 524153 - DNA, 82 bp, Homo sapiens
aatgatagtgatgaagcttttgaatgtattattctcactaaggttggttactatactattccatctatggatgaccttgcta

SEQ ID NO: 524154 - DNA, 96 bp, Homo sapiens
tatcactgctgttcatgatagctttgttgcagttggaaaagatgcccccggcttttgaacacttgcagcaattagaattaataaagcccatggaaa

SEQ ID NO: 524155 - DNA, 98 bp, Homo sapiens
ttactgaaggccgtcttaaagttacgttgttagaatgtagcaggtacatgatgttgattgatggcacaaatgaagtttttatgattgatagagacaat

SEQ ID NO: 524156 - DNA, 75 bp, Homo sapiens
caacaaagatgcctatacttgtgcaagaatgtttacccttgcggaagttgcatcacttaatgacattcagccaac

SEQ ID NO: 524157 - DNA, 51 bp, Homo sapiens
tcaaaggacctgcccccagagagagtatgggcactaggaaaagacttcttc

SEQ ID NO: 524158 - DNA, 82 bp, Homo sapiens
ctcagccttcaggactctcttccagcatggccgaagacacctattcacacacaaaatgatgcttcaacacccaggccaggtc

SEQ ID NO: 524159 - DNA, 100 bp, Homo sapiens
gcagctccggcggcagcaacattgactacgaggaatggcggcggctgccgcaggacctgcagcatcccagagggtacagctctgccggggggggaaaaag

SEQ ID NO: 524160 - DNA, 96 bp, Homo sapiens
ggagcggcaggatgcaggaggagctggcgtgggagaccgacggcctgtatgtggtagaagaccaaagaagagatgagctaggaccatccacctgcc

SEQ ID NO: 524161 - DNA, 90 bp, Homo sapiens
ggcggagaaggatgacaccggagtttgacgaagaggtggtttttgaggccgtttggaaccagtgagccctcagatcgtaaacctgggaaa

SEQ ID NO: 524162 - DNA, 96 bp, Homo sapiens
taaaaaacatatccgagggtgtcctgttacttccaagtcatcaccagaaaggcaaggggagagccagttgcgcagagccctgcaaccagcagtcca

SEQ ID NO: 524163 - DNA, 100 bp, Homo sapiens
atcaggacaaactggcttctctcaagaggcagttgcaacaactgcaagaagccctggcctcccacgactacatcctgaagattgtgcccacggtttatga

SEQ ID NO: 524164 - DNA, 75 bp, Homo sapiens
caaggagagcatgtcggaggctgatcgcgcccagaagagaggaggttcagatgagcccctgctgacttgagagag

SEQ ID NO: 524165 - DNA, 97 bp, Homo sapiens
ctgcccacgattcgcttctgaggcccggaggctgtttgatgtcctgcacgagcccttcttgaaagtaccctgatgaccccagctgccaaggaaaccc

SEQ ID NO: 524166 - DNA, 100 bp, Homo sapiens
gcggttctactggagaccactttaggcgacgtcgtcatcgacttgtacaccgaagaacggccgcgtgctgtccgtacctggcggtgaaaatcacccctgc

SEQ ID NO: 524167 - DNA, 74 bp, Homo sapiens
gcgagaccctgtggtggcttattactgagtacgagacccaatctagtgcagaagccaaatttgtgaagcagcta

SEQ ID NO: 524168 - DNA, 51 bp, Homo sapiens
gcctagcgtcctggaattacttcaatcaatgatgcagcttggtttaacgaa

SEQ ID NO: 524169 - DNA, 75 bp, Homo sapiens
tttaactaatcctgaggacttcatccggtcaccatctacctattcttcaaatgggtaaagcatcaagtcgaatat

SEQ ID NO: 524170 - DNA, 101 bp, Homo sapiens
caaaacttcaagccaaacatcaagcagaatgtgatttgcttgaagatatgaggaaccttcagaagtttagtctttttggagacataagtgttctacaacag

SEQ ID NO: 524171 - DNA, 83 bp, Homo sapiens
aatgactgtccgaaacatcgcctccatctgtaatatgatgttcctcctgctgatcaagagaagctttttatccagaagttacg

SEQ ID NO: 524172 - DNA, 100 bp, Homo sapiens
cagagcttggaaggatgcttcagctcatcttaggctgtgctgtgaactgtgaacagaagcaagcgctaagctgcaacgaaaacgacgcagagcacctgga

SEQ ID NO: 524173 - DNA, 90 bp, Homo sapiens
cagccgatgcaccgagtccagcccaggaaaatggagagaagaccacgtggccttaaaccaactgctgcaactctgtgtgcaggatgattc

SEQ ID NO: 524174 - DNA, 75 bp, Homo sapiens
gaggaagactcgatccgcctgcctgcgcacctgcggtgtgctgatctgcaaaccctggacacaatgcagccaatt

SEQ ID NO: 524175 - DNA, 100 bp, Homo sapiens
gatgccgattacccacttcgagtcctttattgtggagggcttccgttacaagatgaggtctgtgtatgctcacttccccatcaacgttgttatccaggag

SEQ ID NO: 524176 - DNA, 96 bp, Homo sapiens
tggatgtgaaaatgaagccagaccgagattgagaaaatcatgagttctattggagaagggattgacttttctcaggaacggcagaagatctcaggt

SEQ ID NO: 524177 - DNA, 82 bp, Homo sapiens
gaggagcggccggagtcagcgatggtgcccggcgaggagaaccaactggtcccgaaagagagctgtaactgaagttcgtgaa

SEQ ID NO: 524178 - DNA, 100 bp, Homo sapiens
gaagacccagaggacactaaccaaggaagaattttaaatcgtttctccaaagacattggacacttggatgatttgctgccgctgacgtttttagatttca

SEQ ID NO: 524179 - DNA, 51 bp, Homo sapiens
tttcagattgcgaagagcgccgctgagtttccacggccactccagtgccaa

SEQ ID NO: 524180 - DNA, 100 bp, Homo sapiens
cggaagtttgctcattcactcagagactttaagtttgagtttatcggtgatgctgtgacagatgatgaacgatgcatagaatatgcttttaaggctatta

SEQ ID NO: 524181 - DNA, 100 bp, Homo sapiens
caccaaggagaatctggaggggacactgaggagacgttccctaaggttgcccccaagtttcctggcagtgtgtgatactgaggaggtgagcttgtttctg

SEQ ID NO: 524182 - DNA, 101 bp, Homo sapiens
atgtggatcaagcaggttttaaatcaagatttaacattccaacacataaaaattatttatccaacagctcctcccagatggttcccctcatcagccaagcc

SEQ ID NO: 524183 - DNA, 100 bp, Homo sapiens
gctatggatttcaatccctccgtatgcacatgtgggtagaggacgtgttagacaagttcatgaggaacgtcaaggtcgtgggaaataaaaggcagttcta

SEQ ID NO: 524184 - DNA, 83 bp, Homo sapiens
taagaatgcgagtattcttttaaaggaacttgatctggaaaagttcacagaagaaaagcttggccaggctgagaagacagaat

SEQ ID NO: 524185 - DNA, 100 bp, Homo sapiens
gaccgccatggcgttcctcaaactccgtgaccagtcaggtcaattcagtgaagatatgatacccacagtgggcttcaacatgaggaaggtaactaaaggt

SEQ ID NO: 524186 - DNA, 75 bp, Homo sapiens
gaagacttaaaggcagacgaaccatcaagtgaggaaagtgatctaggactcagaattcatgattgaagaaatgca

SEQ ID NO: 524187 - DNA, 73 bp, Homo sapiens
agacttttaagcttcccttaacgccagtctttgaagggcttgccttcaagagtgtttctcaggagctatcaga

SEQ ID NO: 524188 - DNA, 100 bp, Homo sapiens
caagagaacacaagaagtgctttaagaggaatcccagtcagaagttccagcctgccactgttctctgatgccatgccagcaccaactcaactgttttttc

SEQ ID NO: 524189 - DNA, 100 bp, Homo sapiens
tcggaagagcgctcccaggagaaacaaccagaagatcagctgccatgttacttgactcacaccaaccctagagtggatgagattgtccttaagaaccttc

SEQ ID NO: 524190 - DNA, 100 bp, Homo sapiens
gtgtctgtgccgcctaccaggcagagcctgaggaagctgaagcagaggtttcccagggatcgcttacacctgagacgaactacagaacagcacgtaccag

SEQ ID NO: 524191 - DNA, 100 bp, Homo sapiens
gcggagagcaatcgccgggacagctgcaagagtccctgtgaagcaggaagagtgagggcaggttcactgcagctcagcagcatgtctgcagggaattcat

SEQ ID NO: 524192 - DNA, 100 bp, Homo sapiens
cttgaaagtgcctgccaaagccaagctcaccaaactgaagatgccttctcagtcagttgagtgagtcaaggtctcttaagtctccaagctaaacaggagt

SEQ ID NO: 524193 - DNA, 78 bp, Homo sapiens
ggaactcaaacagcagatgcaggactttccgtgacatttctgaagatctgaaatcttcagtaggttgatgtggtttcc

SEQ ID NO: 524194 - DNA, 51 bp, Homo sapiens
atcacaatgaatgtctaattatcacagtggccacagatgtctttaattcca

SEQ ID NO: 524195 - DNA, 100 bp, Homo sapiens
tgtgaagaggcaaatcatgcgctttgcaatgaaatctcgaaggggacctcatgtccctgtgggacacaatgcccccaagatagcagaatcctatttccag

SEQ ID NO: 524196 - DNA, 75 bp, Homo sapiens
cgcctgggggtgcgcgcctgcgacctgcccgcctgggtactccaaagattcaggtttactcacgtcatccagcag

SEQ ID NO: 524197 - DNA, 100 bp, Homo sapiens
tgtttgagaattacacggccagttttgaaatcgacacacaaagaatagagttgagcctgtgggacacttcgggaatactcccccagttgcaagaggcgca

SEQ ID NO: 524198 - DNA, 100 bp, Homo sapiens
ccgtgtactcgggaatccggcacaaggcactgggctacgtgctggacaggactatttaagaaacaactgaggcatcagaccaactttccccacaagtcct

SEQ ID NO: 524199 - DNA, 100 bp, Homo sapiens
cgctacgagggtcagttctgcgagtatgacaacttccagtgtccccgcacttccgggttcctctgcaatgatgcagaggccaggatgtgggcccagccct

SEQ ID NO: 524200 - DNA, 97 bp, Homo sapiens
cggaacgtgggcatcagggagaaggactattggacctgctttgaggtcaacgagagggaggaggcagactgggatggaaaggtgtctgagattaaga

SEQ ID NO: 524201 - DNA, 80 bp, Homo sapiens
tggctccctggctggccagcctctgcttggcatccccttgctggacagtggctgtggatcttcaccaaggttgtgctgga

SEQ ID NO: 524202 - DNA, 100 bp, Homo sapiens
cgactctcggtcgtgcagcggcggcgagcgctcgcgagcggctgcgggacgcgaggtttccggagcttggggcttccttggtcgcacccaccacctgcct

SEQ ID NO: 524203 - DNA, 100 bp, Homo sapiens
caaagaatggattttttcagggatataaccgactgacctggatagtagttgttcttcagagccccccaaaattaaacgaggtcagttcagatgccaacag

SEQ ID NO: 524204 - DNA, 83 bp, Homo sapiens
ggcgggggcgcccgggccgtgagggccttggaaccggaggggcgtgatggtgggcatgggtcagaaggattcctatgtgggcg

SEQ ID NO: 524205 - DNA, 100 bp, Homo sapiens
cttcctcacccgcgcctgcgacctcggaatccctttgcccacgtccagctgaagccgacagtgaccaacgacaggtctgcccccctcctcagctgatggc

SEQ ID NO: 524206 - DNA, 82 bp, Homo sapiens
acagatccagagtgttactggcttacaaattggattgaggcatttttagatgaattcactaactggtcaagaataaatccca

SEQ ID NO: 524207 - DNA, 83 bp, Homo sapiens
gaggacgcgcccgccaccgacatctactttgctttatcctgtggataaacgcagagtgaacgagtttggggagtcctacgagg

SEQ ID NO: 524208 - DNA, 82 bp, Homo sapiens
gtcttcggtggactccttcggcagtccacccaccgccgccgcctcccaggagtggagtcaacatatcaatggagcaagtcac

SEQ ID NO: 524209 - DNA, 87 bp, Homo sapiens
cccaggcctgaactgggaacagccccaggcagcgaggctgtccaggacaggtactccccgctggccgagcagttctcccaccagttc

SEQ ID NO: 524210 - DNA, 82 bp, Homo sapiens
gggatctcggtgctgcagacggcgagacctcctgcacagtgcctccggagccagcgtggtggccatagacaacaagatcgaa

SEQ ID NO: 524211 - DNA, 100 bp, Homo sapiens
accgacaagaaaccgtggtcaggaccgagggtggccctcaggccaatgggcacattgagagcaatggtgcagctcagtggaagatgatgacaaccagaag

SEQ ID NO: 524212 - DNA, 50 bp, Homo sapiens
acaggatggagactacgagtttccaaggaagtatcgcctggggatgctgg

SEQ ID NO: 524213 - DNA, 96 bp, Homo sapiens
gaatctgttgacaagattctgaaagctgaacagagaattctggcactgcactgggtaggaaaaaggctaatagctcgtcagcttgctaaaatccat

SEQ ID NO: 524214 - DNA, 100 bp, Homo sapiens
ctttttgaagcctttgcaaaagattttttatcaagcagaaatgcatcgaacaacgagaatcaagatcactgagctaaatccccacctgatgtgtgtgctt

SEQ ID NO: 524215 - DNA, 75 bp, Homo sapiens
cgctgtccctgaatggctttggtggcatctgcctaacgttcacttcactcacggcctgaaacaaccagagagcta

SEQ ID NO: 524216 - DNA, 84 bp, Homo sapiens
gctgacagtgtcaaaacctttctccaggaccttgccagaatcagacactcctctaatttacaaagcagtgcccagctggtttgt

SEQ ID NO: 524217 - DNA, 74 bp, Homo sapiens
tggatgtcgagaacggtgcttctatggcaggatatggtacgtcagcctgtcatatgcatcaacaaccatgtatt

SEQ ID NO: 524218 - DNA, 74 bp, Homo sapiens
tagcgtctggagggcgatcttgtcctgtggttacgatcttcactttgagagagattgggtctctccacattgcc

SEQ ID NO: 524219 - DNA, 82 bp, Homo sapiens
ctcatcttcgtggggcgtgaggagtgtgagctcatgctacaggtggtctacatagcctgctccttcaccacggtctggttga

SEQ ID NO: 524220 - DNA, 100 bp, Homo sapiens
cagaaaacggacggaagaaaaggtctggccgaacatcagctttccaaaccagatgtggtatctcagttagaggaggcagaagatttctggccagtggaga

SEQ ID NO: 524221 - DNA, 74 bp, Homo sapiens
gactactggggccagggaaccctggtcaccgtctcctcagtgtaaggagaggatgaggcccgtgaaaaaggcac

SEQ ID NO: 524222 - DNA, 50 bp, Homo sapiens
ggtgcagctagaagtccatatcgcaaaccgtggggaactgtgggtcagag

SEQ ID NO: 524223 - DNA, 139 bp, Homo sapiens
gttgaatgagaaccctacttgcctaaatgaggaatgtctttcctaccatctaaaatacgaaggtttctggctggatacatggcccctgaagtacttgatgaaaccattaatatgaaacactttgactcctttaaatgtg

SEQ ID NO: 524224 - DNA, 100 bp, Homo sapiens
tattaaagagcacaatggacaggtggataatattaatgcagctgtgatggatttgaaaaaaaagaagatccgcagtctaagtgaagaggtcaaaatagga

SEQ ID NO: 524225 - DNA, 98 bp, Homo sapiens
gctggggcgccacgagcaggtggtggagcggctgctggaaacgcaagacggtgccgagaagcagctgcgaggttttgcacactagggaccaagaagcc

SEQ ID NO: 524226 - DNA, 98 bp, Homo sapiens
tcccaagtagctgggactgcaggccttttctgatgccattaaaaaatggcaggagctatcaccagaaaccagtggaaaaaggaaaaagagaaaagaaa

SEQ ID NO: 524227 - DNA, 97 bp, Homo sapiens
gtgggacttcatcttgtgatcgtagtcaactactggattttctgtctggcaaacagtatgcagtaggtgatgaaactgatctttctataccaacatc

SEQ ID NO: 524228 - DNA, 100 bp, Homo sapiens
aaagaacaggaagaagactgctgcaggcagggcatcagtggtttttgtggacagaaccctggatctcacaggttttcctcctccaccaggcgctccacct

SEQ ID NO: 524229 - DNA, 100 bp, Homo sapiens
gtaacaacacccgttttggcattgctgctaagtacatgctggattgtagaacttctctctctgaagctgaagagggaactacccttttcattccgatcaa

SEQ ID NO: 524230 - DNA, 100 bp, Homo sapiens
cgaggatgtgtccctggactttggaaacgaggaggagctggcctttaggaaagccaagatcaggctggcagtgatggggccaagattgggaactgcccat

SEQ ID NO: 524231 - DNA, 87 bp, Homo sapiens
caaaatctcaacttcatgtacatagaagttgataaagtaacagagagggctcaggcagctgtccaaggacctgttggtacagatttc

SEQ ID NO: 524232 - DNA, 96 bp, Homo sapiens
aatctaaaaagccctcagtaccagagacagaagcagatggattcgtccttttaggattcactccttctccagttgcacagccacacccttcagctg

SEQ ID NO: 524233 - DNA, 80 bp, Homo sapiens
gaccatgacctttaacaaccagctgaccactgtccacaaccagggtccaaattccaagcctgtagtgtccttcattgctg

SEQ ID NO: 524234 - DNA, 92 bp, Homo sapiens
tggaactgtgtttgggagcctcatcattggttatgccaggcctaatttgtagatatcctcaagaagattatgagtcattctcactaccggaa

SEQ ID NO: 524235 - DNA, 82 bp, Homo sapiens
ccgagagagtgaggagccagacgacaagcacacactatggcgctgaaacggattaataaggccaagaataaaatctttatga

SEQ ID NO: 524236 - DNA, 89 bp, Homo sapiens
gttggcggatggaagggaggagactcctgaccctcagaatggtgacaaccaaagccaagcaactgaaggattcagtgacctgctcccca

SEQ ID NO: 524237 - DNA, 100 bp, Homo sapiens
cagcctgaacggagtgtgcgacggattgggaggactgaaatgcaactgcagaagcaacatgtgaccttttagagatgcttgtgggactgcataaagtgaa

SEQ ID NO: 524238 - DNA, 100 bp, Homo sapiens
agcgaacacgaaccatccaaggactcattgacttcatcaaaaagtttcttaaacttgtggcctcagaacagttgaaacgtatgtttgtgggatactcttg

SEQ ID NO: 524239 - DNA, 125 bp, Homo sapiens
actggggagtcttgagggacccccgactccaagcgcgaaaaccccggatggtgaggagcagccgacattggaggcagtggaaccgcatctttcgctggaagtgccatgacatcgtgaagtccaag

SEQ ID NO: 524240 - DNA, 74 bp, Homo sapiens
ttgtggatcgctgtgatcgtcacttgactccttttcggactcagtcagcctgcacccaggtgattaaaaagctt

SEQ ID NO: 524241 - DNA, 75 bp, Homo sapiens
aagtcatttctactggacttcatgcttagatacatgtataacaaggcctatgaagaatacaccagcaagctagat

SEQ ID NO: 524242 - DNA, 98 bp, Homo sapiens
catgttggacgatatctaatattacagctggaaatagggcacagatccagggacctggaagccagagcacagaatgagttcttccgggctttcttcag

SEQ ID NO: 524243 - DNA, 74 bp, Homo sapiens
aaatgttagagaagaaagacagctttgtggaagaggctaaatttggccgaagatggaccaaaatttcaaagcta

SEQ ID NO: 524244 - DNA, 100 bp, Homo sapiens
gccctggaatgggtgttgctcttaggatgtatcccctcaagctggtaatcctggtggacctggacctggtggtcgaggaagaggtagaggtcaaggcaac

SEQ ID NO: 524245 - DNA, 100 bp, Homo sapiens
gcagggctctagagaccacgtgaagtctcctcgatagtcgccatgtcctcagcacaggaacagatggctgtcttaatgtcattgatgtgcagacaggaat

SEQ ID NO: 524246 - DNA, 100 bp, Homo sapiens
attcagaaaaggttctttatacagcaggcaagcagctaatcattaaacctcttcaaccaaatgctaaagttttgcagatggctgtatgggcgaaaaagat

SEQ ID NO: 524247 - DNA, 100 bp, Homo sapiens
gggcgccagctctgcaggagaggcctctgagaaggaacccttgaaacctgtgactgcggtgcccgcctctgtgacgagctcacgggccagtgcatctgcc

SEQ ID NO: 524248 - DNA, 82 bp, Homo sapiens
gcgaggtccgcgcagcccagcgcagccatattctttccaccatggccagacgcccccggaacagcagggcctggcacttcgt

SEQ ID NO: 524249 - DNA, 50 bp, Homo sapiens
tgaacctaaagccatgtcccaggaacactacaaggcctgttagagaagaa

SEQ ID NO: 524250 - DNA, 75 bp, Homo sapiens
gaacggctgaaggccctacgggagaaaaccgggcgcaagtctgaaatggttgtgacaaataatctcttggatctg

SEQ ID NO: 524251 - DNA, 83 bp, Homo sapiens
ctcaattacacttcgactctcaaagcaataccaggatagctgttgtttcagagaaagaaaaggaagatggcgccatttctacc

SEQ ID NO: 524252 - DNA, 82 bp, Homo sapiens
catcactgcacctgatgacaaggacctgcagtgctgcagatacctcaagaagaacatgctgctaatggtccagaacttctga

SEQ ID NO: 524253 - DNA, 100 bp, Homo sapiens
cggcccttgggtcactcttcccagaggacagcctgaggtgttggagtggggcctcccaaaggatcaggttattctggtacaagttaacccaggagaagca

SEQ ID NO: 524254 - DNA, 101 bp, Homo sapiens
ggattccatttttgagtatttcaacactgctcctcttgcacatgacctgacatttagaagcatgtttgtcaacagacccgccctcggaatcctgcctccgg

SEQ ID NO: 524255 - DNA, 100 bp, Homo sapiens
ggaattggctgactatttttatcctttttcccctgaagctcgtagagaaatgtgatgctggcccgcgagagacattgatgcattttgctgtgcggctggg

SEQ ID NO: 524256 - DNA, 51 bp, Homo sapiens
caaaaaaaatcattgattcccttgagttatacattggctcttcaaagacgt

SEQ ID NO: 524257 - DNA, 83 bp, Homo sapiens
ggcggcttggacgactcggagagccgcaaattgtggctactaatttgccccctgaagatcaagatggctctggggatgactct

SEQ ID NO: 524258 - DNA, 75 bp, Homo sapiens
gtcaacgaatcatccacgcacctgcagctctgctgagagagtgcaagccgtgggaaagcggcagcccagaatctc

SEQ ID NO: 524259 - DNA, 100 bp, Homo sapiens
aaagagatgtggggggattctcgacctgctaacagaactggaccttttcgcacgcactcctggctttaaagtttatacttgcatttgccatacctgataa

SEQ ID NO: 524260 - DNA, 100 bp, Homo sapiens
gctcctgcctcccagagaggggagccggcgaggatcaaaatcttcgaaggagggtcaaatttgtcaagatgtccacaatcccgagacactttggcctgaa

SEQ ID NO: 524261 - DNA, 144 bp, Homo sapiens
gaagacctgcgtcctttttcgtttttcggatgatgccttcaatactacctttatttccaccataggtgtctgacttccagcaactgctggcctgtgccagggtgcaagctgagcactggagtggagttttcctgtggagaggag

SEQ ID NO: 524262 - DNA, 100 bp, Homo sapiens
ttggagtgtcttgtgaagtcattgatctgaggactataataccttgggatgtggacacaatttgtaagctttggctagatcagagtctaagagagatgga

SEQ ID NO: 524263 - DNA, 100 bp, Homo sapiens
caacagcgaggaagaagaggacgacgacgacgaggaagaggaggtttctgaggttcaagggcagacggggtttttgaggaggattcgcaaattgacatag

SEQ ID NO: 524264 - DNA, 90 bp, Homo sapiens
gacctctcggacacggtgcaggcaggccctgggcagtgacggggttcgggtgaccatggagagtgcgctcaccgcccgtgaccgggtggg

SEQ ID NO: 524265 - DNA, 83 bp, Homo sapiens
gccgtagacaccagctccgaaatcaccaccaagcagttggaattgatcacaccttttcagttgtacttcaatcctgaattaat

SEQ ID NO: 524266 - DNA, 100 bp, Homo sapiens
cggggctgtccaggcacgcgaggcccctcagaacccttaggagaaatcttgagagtggacagcaattgtgaagatcgccagagagttctgtgtttcatca

SEQ ID NO: 524267 - DNA, 100 bp, Homo sapiens
gagaagactcgaacggctcccacagccgggcgttgggggaaagtgggctcgggatgagtttgaaggcctcttcaagcagccagcagaaaatgtcaaccag

SEQ ID NO: 524268 - DNA, 100 bp, Homo sapiens
aaaaccacaaatgtttttctgttttgcctgaatacatgatttaaacaagagatttccacagaagtgtttcaggctgcatgtaccaagtagttcagacgat

SEQ ID NO: 524269 - DNA, 100 bp, Homo sapiens
cgggaccccagcgcgggcggcggcggctgggcgggagccccagaggtacgcaggccccatggagcgggcaggggcagagagcatcctggccaaccgctcg

SEQ ID NO: 524270 - DNA, 75 bp, Homo sapiens
cggccacccattgatttgatgcataaaggcagctttgaaacagatcatggggttgacagcagcattttccagaat

SEQ ID NO: 524271 - DNA, 100 bp, Homo sapiens
gacacaccttagatcctgtcttggtgtattctggaggtcgaatggtcacatatgaacatctccgagaggttgtgtttggcaaaagtgaagatgagcatta

SEQ ID NO: 524272 - DNA, 75 bp, Homo sapiens
gcacgagtcattgtttggatctgttgctgatgatcagaaacttatgatattcaattagcagagcctcacagacaa

SEQ ID NO: 524273 - DNA, 127 bp, Homo sapiens
tgtttgattttactcatccatgtgaccatgaggaaatgagagaaatgcttacacacagaaatgttcatgaccaagaaccccaccatgcgcttgggcagcctgactcagggaggcgagcacgccatct

SEQ ID NO: 524274 - DNA, 96 bp, Homo sapiens
ctaagaatacattttatgaaacattaccagtggcaattaatggaaatggacccaccaagacatatctgaagagatggattaagaatgctttggatt

SEQ ID NO: 524275 - DNA, 74 bp, Homo sapiens
ctctggataaggaccagtacctgcccaggaaactgggcgcaaaccagaagaagagggtgtggaagataacgggc

SEQ ID NO: 524276 - DNA, 89 bp, Homo sapiens
cagatatatacagatggtccaggagaagctttgaaggctgtgaagatgctttgggaaaatggaattaatggcattttagcagatgaaat

SEQ ID NO: 524277 - DNA, 82 bp, Homo sapiens
cgcgggccaggagagcgctcggcgggttttaaaatcaaagatgggaaaatcggagaaaattgcccttccccatggccagctt

SEQ ID NO: 524278 - DNA, 51 bp, Homo sapiens
atagaggccaaccaacctttggagggttcacctttagatgttcttaaagat

SEQ ID NO: 524279 - DNA, 100 bp, Homo sapiens
tcccaatgccggtgacacaacagtattacagtatgatgacatctgtaaaatagactttggaacacatataagtgctcgatcaagtcatccgccaaagaag

SEQ ID NO: 524280 - DNA, 86 bp, Homo sapiens
agatgggaaagttattgaacggctgggccagagcgtggttgctgaccagttgaaaggacaatttcaaaggatcagtttgaaaagaa

SEQ ID NO: 524281 - DNA, 90 bp, Homo sapiens
ctgttaatcctcacgaccacctcatgaggtccgaataaatactggaaagaataccactttaaaattcagtgaaaagaaagaagaagccaa

SEQ ID NO: 524282 - DNA, 100 bp, Homo sapiens
cgtgaccgagagcgcgaatatcgtcatcgttagaagggttattttggagctgttggagcactccttgagctgttgaagatcccgtgatcattacctgggg

SEQ ID NO: 524283 - DNA, 98 bp, Homo sapiens
cccaaatggttctgtgcctcctatctatgtgcctcctggatatgccccacaggcgatgcaaaaactttctggatggagctagaagatgatggaaaagt

SEQ ID NO: 524284 - DNA, 90 bp, Homo sapiens
atccgggccgtgaacgaaagcagtgacggaggagcttgtaccaccgccgctgccatggcccagacactgcagatggagatcccgaacttc

SEQ ID NO: 524285 - DNA, 74 bp, Homo sapiens
gatagaagtcggaggaaatactggttcttgaaccgaagactcataatgatttttgtccctgagtcatggaagac

SEQ ID NO: 524286 - DNA, 75 bp, Homo sapiens
ccgcaagcaaggcaaaccccagcacttaagcaaacgggaattctcgccagttggaattgatcacaccttttcagt

SEQ ID NO: 524287 - DNA, 100 bp, Homo sapiens
atgagattttgggggacaaatacccaaactatatcaagactttagaaacagatccatactgggcacagatggagccaggttctgcagtgggtgctctgtg

SEQ ID NO: 524288 - DNA, 100 bp, Homo sapiens
catgacgtccatccatttcgtggttcacccgctgccgggcaccgaggaccagctcaatgacaggttccagcaacagatagaaatgctttaagttcactct

SEQ ID NO: 524289 - DNA, 75 bp, Homo sapiens
caaaacaccagatgatgaccctgagcaaggaaaatctgaggtcttcaggcagtgacagtggtgggagcagcagca

SEQ ID NO: 524290 - DNA, 115 bp, Homo sapiens
aagctgcggcgagtcctgagcggccaggacgacgaggagcagggcctgactgcgcagttcgggaccgagtgagatcgaagatggagagagacatcttggcagaagtgaatcaccc

SEQ ID NO: 524291 - DNA, 75 bp, Homo sapiens
atacccacagtgggcttcaacatgaggaaggtaactaaaggaccatggccaacctggagcgcaccttcatcgcca

SEQ ID NO: 524292 - DNA, 100 bp, Homo sapiens
gagcaagccatcaagcacttgaagaaattatggatccggatgagcaattggaaacccttcatgaagcactgaaactactgccacctgctcactgcgaaac

SEQ ID NO: 524293 - DNA, 100 bp, Homo sapiens
ggagcacgggcaaggcggagagtgacggagtcggcgagcccccgcggcgacaggactttctgcagggcgactgcaccaaagcgaaacagaagctgaactg

SEQ ID NO: 524294 - DNA, 95 bp, Homo sapiens
ctatatgtatcaccacccaacatcagcagccagcatcttctttattgaggaagtcgtgcagtttctagacaagaagcatccaaaccactatcaag

SEQ ID NO: 524295 - DNA, 75 bp, Homo sapiens
agcaatatctctgggctttcacagacccaacatgagtgaagtttcctgcaagaaacgggacgactatttggaatg

SEQ ID NO: 524296 - DNA, 90 bp, Homo sapiens
cattatgcatgccccctcccagtgaccccaggctttttatggctgtgagacacgttaaaatttcagggcacttaagtattcatcgaagag

SEQ ID NO: 524297 - DNA, 100 bp, Homo sapiens
agtagatggcctccagaaacaaacgctgcctgccttgtgcttggctgtatgattttccctgatggctgggactcagatgaagtaaaacggatgtgtggag

SEQ ID NO: 524298 - DNA, 100 bp, Homo sapiens
cgggaataacacaccggagacttttggggggaaactaggtcgatggtcggcggcgcccggatgggcagctgagagaccttttaatcaaagtgaagtttgg

SEQ ID NO: 524299 - DNA, 100 bp, Homo sapiens
cttcaggagagagataaaaaggagacccctcttccgctcctgttttatactgcttccatatttacaaattcagtaattggatcataacgagacttctgcg

SEQ ID NO: 524300 - DNA, 73 bp, Homo sapiens
tatgatgggcatgtccgcttcgaccttcccccacaaggtatttgaaatatctcaccaaaaaatatttgaagaa

SEQ ID NO: 524301 - DNA, 74 bp, Homo sapiens
gaaatacggcaccagattggaaacacactgatccggtatggacctgtctgccaatcaggacgaggagaccgacc

SEQ ID NO: 524302 - DNA, 100 bp, Homo sapiens
cgaggaaccgcccaacatggcctcggaggggaggaagccgcagcccaaggaggtcgtcacttgccgggaaggtggctcgggccaggctgcactcaaaacc

SEQ ID NO: 524303 - DNA, 50 bp, Homo sapiens
ctcccgagtagcttggactacagataaacaggggtcacatgacgacagaa

SEQ ID NO: 524304 - DNA, 100 bp, Homo sapiens
ccgagacatggccaaagactacatggagaggatggcagcgcagcctagttgtgttctaatcttaggcgcttcaggcggagttggtacttttgctatacag

SEQ ID NO: 524305 - DNA, 96 bp, Homo sapiens
actgaccattgctgctgcaggatttgcagaaattggcccctggttacgggagttcagagcgaagaatgctgtggatttctcgcagttaacatttga

SEQ ID NO: 524306 - DNA, 100 bp, Homo sapiens
tgtaatcagcttcttaccaaatacagaagttcacagaagaaaagcttggccaggctgagaagacagaattggatgctcacttagagaacctccttagcaa

SEQ ID NO: 524307 - DNA, 50 bp, Homo sapiens
cttgggtcctccgagagcagcagcgcctgtcctgggggaacagagaggcc

SEQ ID NO: 524308 - DNA, 50 bp, Homo sapiens
cgatcctctcaatcaaaataagaatactctgaaacatatttcccagtggc

SEQ ID NO: 524309 - DNA, 100 bp, Homo sapiens
aagaagggcaaagaaaaggagccagggacggctcttcctcagcggagtttaagagagctgtgaaagtagcaacaggacaagaactctcaaacaatatttt

SEQ ID NO: 524310 - DNA, 98 bp, Homo sapiens
tggaggcttgcactcgcaagagaagtagcttccctctgtgtgaggaaaggatagaaatgttcaggacatcatcatacaggctcctcatctacaaagtt

SEQ ID NO: 524311 - DNA, 90 bp, Homo sapiens
ggggcctcaaacgtggagatcaactcctctctgttaatggagtggggctatcaaggactcacaaactgcatgatggccgccctgccggag

SEQ ID NO: 524312 - DNA, 75 bp, Homo sapiens
cggccagagcgccggcaagagctcggtgctggagaacttcgtgggccgcagtggacgtcagctcagcgaggtctt

SEQ ID NO: 524313 - DNA, 51 bp, Homo sapiens
cccgcccccgactcgccgagccagtcttcccgaggctgctgtccatgacac

SEQ ID NO: 524314 - DNA, 90 bp, Homo sapiens
ctgaaaagtcgcagcgagctggagccgccggaggagacgcaggtcagaatggaaatgggctgcagaccgggcagctattgtcagccgctg

SEQ ID NO: 524315 - DNA, 78 bp, Homo sapiens
cagtggtcgcttcttctccttggatttttttcccaggaagccatcccgtcagaggggttcaagtgatgaaagttggca

SEQ ID NO: 524316 - DNA, 74 bp, Homo sapiens
tcgccatggccgacgaaaagcccaagactgcctctgtcaccgggtccctccacccttgtctcctgtgcggccag

SEQ ID NO: 524317 - DNA, 83 bp, Homo sapiens
gcctatgaccagcaagaggatggggccctggatgagggggaagggcctcaaagccagaagccgtactctgacagctgtgcacg

SEQ ID NO: 524318 - DNA, 100 bp, Homo sapiens
gagaactcagcgaggattctgagagatgtcattgctgggagaggtatccactcaaaggtgaagtctgcaaagctgcttgaggttctgaatgctatggagg

SEQ ID NO: 524319 - DNA, 97 bp, Homo sapiens
actcctcatcggtctacatggtggccatacattctggatataggtctttcagagccttgaagaccaccatttggaagtggtggcgtttttcagggaa

SEQ ID NO: 524320 - DNA, 90 bp, Homo sapiens
ctcgatgtgaatatatattatgtctgcctgttctcccctcgtcggtggctaagtctgaggatagccagaccccccaaacaaggcttgaat

SEQ ID NO: 524321 - DNA, 51 bp, Homo sapiens
aagattgggcagtcactggggagaactcaccaggagactaaagtccatcaa

SEQ ID NO: 524322 - DNA, 75 bp, Homo sapiens
cagccaagccacatggaggccgctcattttggtgacctggttggaaagacttcaaatcatgcaatagttcttgcc

SEQ ID NO: 524323 - DNA, 102 bp, Homo sapiens
acttcgcggtggtcaagcgggccacgcacctcgtcaccaaggccaaggttgcaaaacttcctcaagttgttcaacagcaaacacccgtggccagcatccagc

SEQ ID NO: 524324 - DNA, 82 bp, Homo sapiens
cagctcaaccgcttcgtgcaactctccgggcggccgcacctgccagacattatacaacgtgaaggctgagatctttccccct

SEQ ID NO: 524325 - DNA, 96 bp, Homo sapiens
gcttcttctttcagctgttcgttcaaggctatgccctgcaactgcaccagttacaggtggtggaggtggatacagcagtcggagaacatctggcag

SEQ ID NO: 524326 - DNA, 90 bp, Homo sapiens
ctgcatccaatggatgctgcccagagatcgcagcatatcaaaagccacctgagctgaagattcccttgagaacaagtactgtcctgtggt

SEQ ID NO: 524327 - DNA, 75 bp, Homo sapiens
cccacaactgcctggtccgcgaggattctgctatgtagaattcgatgaagtggattcccttaaggaagccttgac

SEQ ID NO: 524328 - DNA, 82 bp, Homo sapiens
gcaaggagctaaagcagcgtgcgttcagccctggggattcctaccggaagcaggtggtcattgatggggagacgtgcctgtt

SEQ ID NO: 524329 - DNA, 100 bp, Homo sapiens
acttgacctaaagaccattgcacttcgtgcccgaaacgccgaatataatcccaagggtcataacccgactgctggatttccctgaggcaatggtcctccc

SEQ ID NO: 524330 - DNA, 82 bp, Homo sapiens
ccgaagatggtggcggctactcctcctgtctctgctttctatccgtcaagatgataaagtcgtgtgcccgagaaccaaagaa

SEQ ID NO: 524331 - DNA, 100 bp, Homo sapiens
ggccgttgagaatggcaccgtctgccgagtttataggcaagcaataaacagcaagatgtttgaggtggatatgaaaattgctgcaatgcatgtaaaaaga

SEQ ID NO: 524332 - DNA, 98 bp, Homo sapiens
gtacctcactgcagaggtgctggagctggcaggctgaccaactgactgaagagcagattgcaggtgagaaatactcagctagattgtacccattagat

SEQ ID NO: 524333 - DNA, 100 bp, Homo sapiens
gagcgtgtggatttgagccgccgcattttttaaccctagatctcgattagtgatgatgaaccaggttatgaccttgatttattttgcatacctaatcatt

SEQ ID NO: 524334 - DNA, 97 bp, Homo sapiens
cagaaattatgttgaattccaaggaagcgttgttgacgaccatggacatcatccacgatggatttggattcatgctggcttttggagacttggtgtg

SEQ ID NO: 524335 - DNA, 75 bp, Homo sapiens
ctagaatcaaggatttcagcaacaatgcctctgttcaaactcccagatccaccgtgggcgccctgctggcatctg

SEQ ID NO: 524336 - DNA, 90 bp, Homo sapiens
gtctactaatggacagttagtcacccacctacatgttgagtattggtaaaggttttcaaggtgtcatgaaaagatggggatttaaaggcc

SEQ ID NO: 524337 - DNA, 100 bp, Homo sapiens
cggcagacgaggcgtgttccccgataacttcgtgaagttacttccaccggactttgaaaaggaagggaatgttttgatggtacagtccaggtctatgatg

SEQ ID NO: 524338 - DNA, 51 bp, Homo sapiens
cctttatgaagatattcttgagggttttagctaaagaagatactgaggcag

SEQ ID NO: 524339 - DNA, 80 bp, Homo sapiens
gagtagcagccgcaactggacggaggacatggaaggaggttttgggatttgagattgacgcggtgaactctgtccagttt

SEQ ID NO: 524340 - DNA, 96 bp, Homo sapiens
ctcactgtgatgatgaagcatggtaaagaattctccggaaatcctatcaaggtctcatttgctactcgccgggcagactttaatcggggtggtggc

SEQ ID NO: 524341 - DNA, 100 bp, Homo sapiens
caacaatgagcaactgcccatgctgggccggcgccctggggccccggagaggaaatctgaaatagagtactatgctatgttggctaaaactggtgtccat

SEQ ID NO: 524342 - DNA, 98 bp, Homo sapiens
tgggatcttcttcactgcctctggcatggatgaggttgcagagcctgaggcctgtgatcagatgtacgagagcttagcgcgactccattcaaactact

SEQ ID NO: 524343 - DNA, 100 bp, Homo sapiens
ttagcaggacggccatcgagatcgtggtgcagatggccgcggccaacggggcaattaagttggaatatgcaaggttggttaagttggcccaagaagacac

SEQ ID NO: 524344 - DNA, 50 bp, Homo sapiens
gagcagaactacggcgagcggaattggagcgttattcagtatattaatgt

SEQ ID NO: 524345 - DNA, 102 bp, Homo sapiens
cgcgaaccgcagtatcatgctggccaagaagatcatcattaaggacggaggcacgagctctgagctcttcaccctgacctatggtgccctggtcacccagct

SEQ ID NO: 524346 - DNA, 100 bp, Homo sapiens
ctgtttgccctgaacatcatgaattcccaagaaggaggtgaaaggtgtagcagtcactcggcctacacccacagcatcgaccttgtgaacccagcgacct

SEQ ID NO: 524347 - DNA, 75 bp, Homo sapiens
ctttgatggaggtgaaaaggccctcatcggcttcagcacctgggcctgtgaagcctccctggcctgctccacctg

SEQ ID NO: 524348 - DNA, 100 bp, Homo sapiens
atgctatatctgaatctgcttacagatgcatgcttcaagggagtggagcaactgctgtagtccaagcagcttattgtgcccctaaaaaggagaaagtggc

SEQ ID NO: 524349 - DNA, 100 bp, Homo sapiens
gccacagcgacgccggcgccgagggacaccgcagtatgaggcagaggtgtcgtgaaaactacccctaaaagccaaaatgggaaaggaaaagactcatatc

SEQ ID NO: 524350 - DNA, 100 bp, Homo sapiens
caagcatactccggaagaaacctgccacagatggaatcctcactatggatgggctcattgaggacattaagcatcggcggtattatgagaagccatgccg

SEQ ID NO: 524351 - DNA, 82 bp, Homo sapiens
atgctcagagatgccaagaagaatctagacagacaggcctttctagcaggctctccccggaggctcagccccctctgctccc

SEQ ID NO: 524352 - DNA, 82 bp, Homo sapiens
ccgactcttgtatcatgagcattggatttgatcacatgggaagcagttcaggtacttttgaagcattctgcagatgttaatg

SEQ ID NO: 524353 - DNA, 100 bp, Homo sapiens
ggttcaaggctcagctgaaggacccgcagggccccgggccaggtctgttgcggttctcccacttttccataagcagaacaagaaccaaatcaaacgtctt

SEQ ID NO: 524354 - DNA, 83 bp, Homo sapiens
gtacggtttggacggcgctgtggacgggcgaaggaaagtacagacaatgcagatcttcgtgaagactctgactggtaagacca

SEQ ID NO: 524355 - DNA, 75 bp, Homo sapiens
gattgtgacatatcgttggacccagaattgagggtgagatgaaagaggcaagatttaagaagctgggcaaaaact

SEQ ID NO: 524356 - DNA, 96 bp, Homo sapiens
agccctgcagcgcctggtgaagaagcctgtgcccaagctcatcgagaagtgctggaccgaggacgaagtggcctcccgaggagcccagacagctgc

SEQ ID NO: 524357 - DNA, 100 bp, Homo sapiens
ccgcccacttggatcattaaggtgaagaaacctcaggtcgtcaaagtcctacattttagctttcagtgctgaacttccttctcccttaaattattataaa

SEQ ID NO: 524358 - DNA, 75 bp, Homo sapiens
tgattggagtcccatcaccaaagcttcaagttcccagtgtgttcaaggaggagatgttaaagtaacccatcttgc

SEQ ID NO: 524359 - DNA, 102 bp, Homo sapiens
tgaacatcgagatcatccgcaacaccctctacaaggtgccttatgcccgctcagaggcccacctcacagagctgctggaggagatatgtgaccggatgaagg

SEQ ID NO: 524360 - DNA, 100 bp, Homo sapiens
ggatctgaagagctatggtgaaacaccactgaagcattgccaaggtcagcccaaggctgccccctcggtcactctgttcccgccctcctctgaggagctt

SEQ ID NO: 524361 - DNA, 83 bp, Homo sapiens
ctcagttggaagcagccgatccagcctgcggagcctgtggggcagagcctgagcccttgtgaagccggcaatgacaagtctgt

SEQ ID NO: 524362 - DNA, 100 bp, Homo sapiens
actccggtcctgcacgccctgtctgaaggccaacattgagcgtctggaggagggccatgtgtccttcaagcccagcttagaccaacagcgttcatgccca

SEQ ID NO: 524363 - DNA, 100 bp, Homo sapiens
gacctttaaatcctttggcttctggtcaagagctgaactagagaaacatggttataagatggagacttcatagcatccagaagaagtgttgaagtaacct

SEQ ID NO: 524364 - DNA, 50 bp, Homo sapiens
gcatcttcctctggctctacagcgaatgttgtaccatctttgggtaggca

SEQ ID NO: 524365 - DNA, 98 bp, Homo sapiens
gctcatccgtcagctgaactagacccagggacttgcggttaatcgaagtcactgagaccatttgcaagaggctcctggattatagcctgcacaaggag

SEQ ID NO: 524366 - DNA, 75 bp, Homo sapiens
caagaaggccctggacacagcaatatctctgggctttcacagggaaatgtgtccttctcatgtccacagccacag

SEQ ID NO: 524367 - DNA, 75 bp, Homo sapiens
tcggaagggtctttgttccctgcagccctcccacgagtgattctcatcagttccgtgtaatggcagctgtccttc

SEQ ID NO: 524368 - DNA, 83 bp, Homo sapiens
gcttcttctggtccacagtgcccggggcagggcgaggagggctcaacgggacccaggtggagtctgtacagctcaaagtcaac

SEQ ID NO: 524369 - DNA, 100 bp, Homo sapiens
cgggcagcgtgggtgagcggcgcagcggcggcagcggagagcgagagaggggagcagggtcacctgtctgtgtgcccagtttgaagccgtcctgcagcat

SEQ ID NO: 524370 - DNA, 100 bp, Homo sapiens
cggaccccccggatctgacggggcgggacctggcgccaccttgcaggaaatatatcctggacaattccagccatctctctgtcacaaattcatagccttg

SEQ ID NO: 524371 - DNA, 83 bp, Homo sapiens
agtcctggtggtgtcggccaagttcgaggggaaaccgctgcttcagagacacagcgggctgacgcacgaggcacacaggaagg

SEQ ID NO: 524372 - DNA, 78 bp, Homo sapiens
ggcgccgttctacacaggaacacagcgcttttcaaggaattgaatgatctggcacgggaccctccagcacagtgttca

SEQ ID NO: 524373 - DNA, 75 bp, Homo sapiens
atcctttacgagcacggcctcttgcgctacgccctggatgagatggtctcggacagcccgggagacgagccctcg

SEQ ID NO: 524374 - DNA, 83 bp, Homo sapiens
gagtactcctttctggactatgtgatgggaggctgtcagatcaacttcactctgtttgacaaggccaacaaacaccacttctt

SEQ ID NO: 524375 - DNA, 98 bp, Homo sapiens
tttctgcaggccccacgagtgggaggtgctgagccgctcaggctcttgcagccaatgccggaacaggatttgctgttgctgagcctcaaatcgcaatg

SEQ ID NO: 524376 - DNA, 75 bp, Homo sapiens
ttatgatctacctaccaatcgtgaaaactatattcacagagtccctggcacctggagaatctgccactgctgtaa

SEQ ID NO: 524377 - DNA, 100 bp, Homo sapiens
ggaagagccggggccgtggctgacatggagcaggtcttgaggaccggcccagctcaggctcctggggcagcggcgaccagagcagctcctcctttgaccc

SEQ ID NO: 524378 - DNA, 51 bp, Homo sapiens
gcaaccagccttctagggcggcggagctgggagtgtccactcgccttccac

SEQ ID NO: 524379 - DNA, 75 bp, Homo sapiens
tcagcgcttttgcctgcagttgaggctttatggtcacttggtacatatgaccgtggtctccggcagcaacgtgac

SEQ ID NO: 524380 - DNA, 98 bp, Homo sapiens
gcgaccgccacggagcagtgggttctggtggagatggtacaggcgctttacgaggaaagaccacagcaagattctttcattcgtctcctcctagcctg

SEQ ID NO: 524381 - DNA, 141 bp, Homo sapiens
taaagagaaaagagaaaaggagaaggataaagggaaggacaaggaattacataacatcaaacgtggaatcttgtggaagaagaatgaagttgctgattatgaagctacaacattttccatcttctataacaacactctgtt

SEQ ID NO: 524382 - DNA, 98 bp, Homo sapiens
ctttgtccgcgggtcagtacggcccctgggtccacgtggcgcgaaagtaggagatcagcctctgtggactcggtgcttctcctggcaagtaaacccca

SEQ ID NO: 524383 - DNA, 75 bp, Homo sapiens
gcggcagctgaggcggaggctgacgaggaggcggatcccccggcgtcaggccaagtcctgtatctgccatgtctg

SEQ ID NO: 524384 - DNA, 100 bp, Homo sapiens
gctgctcaaatatggaccacaacagcagagaaggactgctgtgtaagctatggtggcatgtggtaccttaaagggacagtacagtcttgacaatagtagc

SEQ ID NO: 524385 - DNA, 75 bp, Homo sapiens
gctggccgagcaggcggagcgctacgacgacatggcctccgctatgaaggcggttccagcaacagatagaaatgc

SEQ ID NO: 524386 - DNA, 90 bp, Homo sapiens
aaaaagctccaggattctgacagggatgttgcgaagctttgggatgcgacatcagcaaatgagaggaaaagcattaatgtgaaacagttc

SEQ ID NO: 524387 - DNA, 82 bp, Homo sapiens
tctcttatccatggaatcagagggtgcattcaaattactgtggaatacacgatcctgcctgcgtggtttactgtaataccag

SEQ ID NO: 524388 - DNA, 75 bp, Homo sapiens
agcgcgcggagaagaacggggagccaggacagagcgggatgccaccagcttgtccaaagggaagttccaggagct

SEQ ID NO: 524389 - DNA, 50 bp, Homo sapiens
aaaatctccccggtgactttcagaggctgggaggcggcagaatgcagcca

SEQ ID NO: 524390 - DNA, 82 bp, Homo sapiens
gagcatctgcaaagaaggttaaatcaggatggctggataaactctctcctcaagggatatgtttatatgaagtccaagaatg

SEQ ID NO: 524391 - DNA, 83 bp, Homo sapiens
aggagttcgagcagatcgacaagtccgggagctgggcggccatttaccaggcgccatgtcagaaccggctggggatgtccgtc

SEQ ID NO: 524392 - DNA, 51 bp, Homo sapiens
cttctacagtcattgatggcagtcgaatacgtcgcctacagccacacgggc

SEQ ID NO: 524393 - DNA, 100 bp, Homo sapiens
ttacgtcagttgtaaattacagagaacctaagtctgtttgcaaagcacctgaactgactcctcgtgaagtggcccagcaggctgtggatgcggatgtgca

SEQ ID NO: 524394 - DNA, 100 bp, Homo sapiens
gtggacatctgctgccggaaggggtcccgaagccccctgcaggaactctacaacccaatccagcttgagaatgccagactgtcatcagagatgaatactt

SEQ ID NO: 524395 - DNA, 90 bp, Homo sapiens
gcataagtacctctggcttcccctctcttcaactaagacacctatggctgccgatgaaggctcagcagagaaacaggcaggagaggccca

SEQ ID NO: 524396 - DNA, 75 bp, Homo sapiens
acatctggattgtagccataagtggactttggccctcagattctcagcttgattctaaggaactttcagctggtt

SEQ ID NO: 524397 - DNA, 101 bp, Homo sapiens
ggccagttcctgccgtctgctcttctgcctcttgatctccgccaccgtcttcaggccagatgccagaagtgggtggagaactgtaggagagcagacttaga

SEQ ID NO: 524398 - DNA, 51 bp, Homo sapiens
attctggccaacagtgttaagtataatggatgctgtatgattatgttgaaa

SEQ ID NO: 524399 - DNA, 74 bp, Homo sapiens
cgtcaatcagagcgtcctgtgcggtggtctgtttttctggggggccaccaacacctcccgtgaatctaccatgt

SEQ ID NO: 524400 - DNA, 78 bp, Homo sapiens
tggtgaggcaacagcaggcctttcctcacgccagaacaatgacatttcagcctttgcacacgcagccccgctccctga

SEQ ID NO: 524401 - DNA, 100 bp, Homo sapiens
agctcatgaaagaaatcttagataagaaggttgagaaggtgtcgtgaaaactacccctaaaagccaaaatgggaaaggaaaagactcatatcaacattgt

SEQ ID NO: 524402 - DNA, 80 bp, Homo sapiens
caagctggtgattaacaaagacctcgcggaggaaggtcagcccaaggccaaccccactgtcactctgttcccgccctcct

SEQ ID NO: 524403 - DNA, 80 bp, Homo sapiens
ggattgtgtctgcttggtgtggagccatgaagagcactacaaacaccactggtttcccgaaaagccgtccaagggctccg

SEQ ID NO: 524404 - DNA, 90 bp, Homo sapiens
tggcggatctggaggagcagttgtctgatgaagagaagatgaagatgacgccaacagactcggggagaaggtgatcctgcgggagcaggt

SEQ ID NO: 524405 - DNA, 75 bp, Homo sapiens
ccgctgctccctggccggtcatttcagaaggacagaataacgggctcccagattcacaagccccaccaagaggat

SEQ ID NO: 524406 - DNA, 50 bp, Homo sapiens
agtcactgatgaaaggaatggcagtgagaaagatcagtctaaagaaaagg

SEQ ID NO: 524407 - DNA, 50 bp, Homo sapiens
cagagctcgggtctccggggaccgaggtttccctatttggatccacctaa

SEQ ID NO: 524408 - DNA, 75 bp, Homo sapiens
agcaacatatgggaattagagcaccagtcagccataatggcaggtgaagaaattaatgaagactatccagtagaa

SEQ ID NO: 524409 - DNA, 75 bp, Homo sapiens
tgcagaacttcacgtgtctggaccgcccggcgctggactcgctgatccgggagttcatgatcaagtgttgcccac

SEQ ID NO: 524410 - DNA, 75 bp, Homo sapiens
tttttaaagcttcaaaatcctaagactcagcactgttgcggggatacatgaagaagatggccatctgcaaaccag

SEQ ID NO: 524411 - DNA, 110 bp, Homo sapiens
atctgctcttccaagccctgggccgcacctacatgccagatgcccctcgaaatctccagctgtcactccccagggaagcagaaggtgtgattgtaggccactgggctcct

SEQ ID NO: 524412 - DNA, 83 bp, Homo sapiens
tgtccttcgagcggctgttgcaggacccgctgggcctggcttacttcactgctctgagttccttggatgaagacgatcccaat

SEQ ID NO: 524413 - DNA, 100 bp, Homo sapiens
gaaggtgtcagcatctggaatcctatcctactctggcagcccatcccggtgcacacagttcctctttctgaagatcagaatgttctcctgggcagcgttg

SEQ ID NO: 524414 - DNA, 93 bp, Homo sapiens
ggagcttggtttcgggatctcggtgctgcagacggcgagacctcctgcacaggaagctcttcgtgggcggtcttgactggagcacgacccaag

SEQ ID NO: 524415 - DNA, 101 bp, Homo sapiens
tcaaggatccggggatcaaagagcagtgggggttgctgacccagaggagagttctccaaacatgatcgtttactgcaaacacccttacccttctgaagaac

SEQ ID NO: 524416 - DNA, 83 bp, Homo sapiens
acaggcagagtgctgatgtgaaaaataccacgacaaaaccaccctaatttattgctaaacatgggtgcatttttggataaacc

SEQ ID NO: 524417 - DNA, 89 bp, Homo sapiens
ccggcgccatgtccagcgctcggacccccctacccacgctgaacgagagggacacggagcaggtgtgcaactgaggaacatggctcaag

SEQ ID NO: 524418 - DNA, 146 bp, Homo sapiens
tgagagttcaaagattctttgtagcagacactgcaaatgaagctctcgaggctgctaagagactaaggggcaaggacaccatactgttcagcgaccccactcttcctagtggacagaggtcgagatccccactgctgaagtttgtc

SEQ ID NO: 524419 - DNA, 100 bp, Homo sapiens
cgggggcgtacaggcgcagcggccgcagcagcagcggcagtcacaggcacatcagcaaagaggcactggctcaggcgatcagggaagccagagagcagca

SEQ ID NO: 524420 - DNA, 105 bp, Homo sapiens
agatcccagaaggggagcgcgttgacttcgatcaccttgcagagtgaagtcaagcccatcctagagaagctgacccaggaccaggatgtggacgtcaaatacttt

SEQ ID NO: 524421 - DNA, 100 bp, Homo sapiens
atggccaggatgctatagcattgtcagtgtgtctactgcagatatttcatcaaataaggatgatgaagaaaactctatgcacactacggttgtgttgttt

SEQ ID NO: 524422 - DNA, 75 bp, Homo sapiens
gtgcagtccattgctgtagctgacatacaaactggactctcaggacaaaacgacaccagccaaaccagcagcccc

SEQ ID NO: 524423 - DNA, 100 bp, Homo sapiens
cgaggaccgcacggaggaggagcaggagcgcggagccgcgagccccgagccccgagcccggcgcctggctgagtactgtccagaccaaaacgaagaagac

SEQ ID NO: 524424 - DNA, 101 bp, Homo sapiens
cagaacagttaatcctcaatttaagcctgatctaacccctagaaacagggaagtcgagacaacatgagtgtgattttgatctgttttccaaatgcacccaa

SEQ ID NO: 524425 - DNA, 75 bp, Homo sapiens
gtccggagctagctggatcctctaggcagatgtgattttgaagatacagctcagtaccgggcctcggcgatgaat

SEQ ID NO: 524426 - DNA, 83 bp, Homo sapiens
cccgctccgccctcccttttccctggtgaaatgacaatggatgctctgttggctcgattgaaacttctgaatccagatgacct

SEQ ID NO: 524427 - DNA, 51 bp, Homo sapiens
gcccagaagactgcgctgctgcaggacggtcgtagttcccccgctccctgg

SEQ ID NO: 524428 - DNA, 50 bp, Homo sapiens
ggaccagctcatgggcacggctcgggacgctggcttggctttttcagagg

SEQ ID NO: 524429 - DNA, 100 bp, Homo sapiens
cacgggaattaagaatcagtcgtgggtttgatttggcctcattcaatccacatggcatcagcactttcatagacaacggcagtagtctcctgactggccc

SEQ ID NO: 524430 - DNA, 95 bp, Homo sapiens
aaggtgctaatagtagctggccatcacaactggattgtagctgcatatgcccattttgctgtgtgttacaggccggattcagaagccagccagag

SEQ ID NO: 524431 - DNA, 50 bp, Homo sapiens
tgcacacggcactcgagtgtgagaattatatccagatcgagagacagaag

SEQ ID NO: 524432 - DNA, 100 bp, Homo sapiens
gcagggacccgttgaacaactctggggcctagccgcccgtgactctcacactgtctcctgcatgacgggtggcgcctcccgcagcttcccttctctctcc

SEQ ID NO: 524433 - DNA, 75 bp, Homo sapiens
gacccatcttgtacagcaactggctgtcaaaggttcactggttgaggacccagttcccatctttggatatagagg

SEQ ID NO: 524434 - DNA, 75 bp, Homo sapiens
ggacttcaccactgcctcggaatgggaaaggtactggcacagcacggccacctatgccatagccactgaggtgag

SEQ ID NO: 524435 - DNA, 102 bp, Homo sapiens
aatttgctggatttaagcactgctgcactttatgagcctccatccctgtgagatcactgccctgagccaatccctacagcccttacggaagctgccttttag

SEQ ID NO: 524436 - DNA, 106 bp, Homo sapiens
cagccccgcgctcgtctttggggccaccggtcgcccccgcctccgggacctgcggggagggcccgcgagagagaaaaggccaaccttgctgttaccctctgcaatg

SEQ ID NO: 524437 - DNA, 97 bp, Homo sapiens
gcaccattcctaggctgggagcaaaacggtgacggatggtggcaccatcaagcaaaagatcttcaccttcgacgccatgttctccaccaactactca

SEQ ID NO: 524438 - DNA, 51 bp, Homo sapiens
ctgggtcagcaaccgaattccagtttgactctacagtattggacctgcgag

SEQ ID NO: 524439 - DNA, 97 bp, Homo sapiens
cgaactgggaggcccctttgaccagatgaacggagtggccggagacaatgcagatcttcgtgaagactctgactggtaagaccatcaccctcgaggt

SEQ ID NO: 524440 - DNA, 51 bp, Homo sapiens
gccaggaagccgggagtccgagacccgggactggactcgggccatatccgt

SEQ ID NO: 524441 - DNA, 75 bp, Homo sapiens
aggaacgaggcaaggagctaaagcagcgtgcgttcagccctgggctttcggaaaatgtgattgatcgaatgaagg

SEQ ID NO: 524442 - DNA, 96 bp, Homo sapiens
ccatggaggaccccttctttgtggtgaaagggttgtctgcattcaaaagagcattctattaaagctaccttaatttggcgcttatttttcttaatc

SEQ ID NO: 524443 - DNA, 75 bp, Homo sapiens
cccagttctggcagattctggaaactgtacattgaagcagagggcatggatgatacacaggtgcgaagtgctgct

SEQ ID NO: 524444 - DNA, 100 bp, Homo sapiens
accagtttcaagcagtattaagagtaaatgtacaaaattggacagctgtacatgatcagcaaacacagccatgaacagagtgaccggggagaaggggtgg

SEQ ID NO: 524445 - DNA, 89 bp, Homo sapiens
cttttctacaaactctgtgcctcaacaaccatttctaagtggaatactttcaagtcatcccaaatatggttccatccctaaacttatac

SEQ ID NO: 524446 - DNA, 98 bp, Homo sapiens
ggggcctccctgctgagctcgcggctcacgctgagagggacacgcagtgacgagcggccgaagcagctttgcggaatagccaggtctggctgggtcgg

SEQ ID NO: 524447 - DNA, 100 bp, Homo sapiens
cgcggcgccgacatcaattacgccaatgtggacggactcactgccctgcaccaggagtcagagtattcatcgaaaagaaagcacagctaacacttttagg

SEQ ID NO: 524448 - DNA, 90 bp, Homo sapiens
gttcgaactgtctcaccacttccctgcagctcccatattgctatatggagatttgccaaaaaataaagaaaatataatatatttagcaaa

SEQ ID NO: 524449 - DNA, 74 bp, Homo sapiens
cgacgtggctattgtgaaggagggttggctgcacaaacgaggggggcaacaacgccggccacacggtggtggtg

SEQ ID NO: 524450 - DNA, 87 bp, Homo sapiens
cgtttttccttgagctgaacgtcttgcaacagtggccgcacgcatagccgccgccatgtctgcgcatctgcaatggatggtcgtgcg

SEQ ID NO: 524451 - DNA, 96 bp, Homo sapiens
tataaactaggagacaagatccatggattcaccgtaaaccagcacttttcaggattagaagaggctgtgtatagaaacatacaagcttgcaaggag

SEQ ID NO: 524452 - DNA, 82 bp, Homo sapiens
ccctctgcccccccttccccacgcaaccccagatccatttacactttacagaagaggatcacctagcccgggtagaagaggc

SEQ ID NO: 524453 - DNA, 82 bp, Homo sapiens
gctatcatcccagcagtggagttcagcccactactctgaaccagggtaattatgtgctggatcgagatgacctggtggaggc

SEQ ID NO: 524454 - DNA, 74 bp, Homo sapiens
tcggccccaggttctctgcagatgcagtaccagcagagcatgcaggttggatttggtctagggagtcccagaaa

SEQ ID NO: 524455 - DNA, 75 bp, Homo sapiens
tgtgcgcgcctccatctgggccatggatggtgatcctgccatgaagcagtttctgctgtacttggatgagtccaa

SEQ ID NO: 524456 - DNA, 100 bp, Homo sapiens
tcttataaatctggatatgtctattctgaactcaacttctgaaatttacagaaacaaactacatctcagggtctctaattaacagaagatggcaaagccc

SEQ ID NO: 524457 - DNA, 100 bp, Homo sapiens
agcttatgtcaaccgacttgacctcttagatcaggctgcagagactgcaagtctggaagaacagctgcaaggatggggagaagtgatgctgatggctgat

SEQ ID NO: 524458 - DNA, 80 bp, Homo sapiens
tgggatgttacgtggccggaatcattcccttggctgttaatttctcagagattccgaagaggctcaatctgtaaatcctt

SEQ ID NO: 524459 - DNA, 95 bp, Homo sapiens
cagcatcaggcaagtggctggatggtattcgaaaatggtattacaatgctgcaggattcaataaactggatgatgaagaacgagagcttcaaatg

SEQ ID NO: 524460 - DNA, 98 bp, Homo sapiens
cccggtctgaagggtctggctggtgagccaggttttaaagaaactaatctggattcactccctctggttgatacccactcaaaaaggacacttctgat

SEQ ID NO: 524461 - DNA, 88 bp, Homo sapiens
tccgagccagcgagccagcgagccgccgacccgccgagcaaaatgaggcggggtttcaccatgttgcccagactggtcttgaactcct

SEQ ID NO: 524462 - DNA, 75 bp, Homo sapiens
cagtggattactactttattcaagatgacggaagcagatttaaggtttatggaactgtctttcacataaaccatg

SEQ ID NO: 524463 - DNA, 75 bp, Homo sapiens
aagcagcagagtttctacaaatgctagaagctatcaaagcccttgaagtcagcatgtagagcgcatgaagtacag

SEQ ID NO: 524464 - DNA, 100 bp, Homo sapiens
tgaacttcgaaacgtgataagaagcacctggatgagacatttgctacagcatcccacattaagtcaacgacggagtcttgctctgtctcccaggctggag

SEQ ID NO: 524465 - DNA, 50 bp, Homo sapiens
cagctcccccgcctcggggagggcaccagtttcactgttacatgccttga

SEQ ID NO: 524466 - DNA, 76 bp, Homo sapiens
cgctgagaaggacgcgcagtccatctctctcagattgtgaataagtggaatacagctctcattggccttatgacat

SEQ ID NO: 524467 - DNA, 97 bp, Homo sapiens
tatgggcagtgggattttgggactcgcctttgccctggcaaacactggaatcctactttttctagtgcccttttttcaatccttcctgcgattggct

SEQ ID NO: 524468 - DNA, 75 bp, Homo sapiens
tcgctcggctgcgggaaatcgggctgaagcgactgagtccgcgatggagctcgcaaaggatctccttcatccctc

SEQ ID NO: 524469 - DNA, 75 bp, Homo sapiens
gcaccctttttgtcagattatcaggatgaggagcaaatttttcagaacataaaacaagaatatagtcgttatcag

SEQ ID NO: 524470 - DNA, 100 bp, Homo sapiens
ggccaatgttggtgctggcaaaaagtggataaagcaacatttatggttggcagctatggacctcggcctgaggagtatgagttcctcactccagttgagg

SEQ ID NO: 524471 - DNA, 100 bp, Homo sapiens
tgtacacatgcggggattaccttacagagctactgagaatgacatttataatggatttatgggattcattggtctggtcggggagccaggaatcgtggga

SEQ ID NO: 524472 - DNA, 99 bp, Homo sapiens
agaaatcctactccacccataggaagacccacgtccacacctactcctcctcaggatgtagtaactggagttagtcccctgctcttcaggaaactcagt

SEQ ID NO: 524473 - DNA, 108 bp, Homo sapiens
ttgggagtgtgactgcctgttcatgcagagagatgtgtacatatcccacgtgaggaaggagcacgggaagacctagaggatcaagacataatgggagcatttttagac

SEQ ID NO: 524474 - DNA, 80 bp, Homo sapiens
ccactccgtcccccgcgggtctgctctgtgtgccatggacggattacaccaccaccttcactgtcagatccacttaaaga

SEQ ID NO: 524475 - DNA, 101 bp, Homo sapiens
gcccatcactgtggcccacatcgtggtggaggcggcctctctggcagcagacatcagccacgcatctgaccttgttggtgatggcccgctccctctcccca

SEQ ID NO: 524476 - DNA, 75 bp, Homo sapiens
aaaaacatatccgagggtgtcctgttacttccaagtcatcaccagaaaggtggaataacactcccatggatgaag

SEQ ID NO: 524477 - DNA, 75 bp, Homo sapiens
tggaacaaagttgcccactcatttaactgcacgccaatagaagctatcatggtgaacttacttcagattgtgcgg

SEQ ID NO: 524478 - DNA, 82 bp, Homo sapiens
ggtgcccgaggaggcagccaagctcgtggcctgcctctgcgtgcataacgaaggaggcccaacttcattcaataaggagcct

SEQ ID NO: 524479 - DNA, 50 bp, Homo sapiens
caggaggccttcaccctctgctctggggtggctgtgccagtgtcattgtg

SEQ ID NO: 524480 - DNA, 75 bp, Homo sapiens
tgttatggccgctgctgtcgctatggagacaggactatggtgcagccctgcggggcctgtgcgaagacgccctgg

SEQ ID NO: 524481 - DNA, 75 bp, Homo sapiens
taataataataattccagcttctacacaggaaagaccacagcaagattctttcattcgtctcctcctagcctggg

SEQ ID NO: 524482 - DNA, 75 bp, Homo sapiens
taaagacacttatcttgcccaagagctggcaagccctcgcagggagcctggtagcaggggccggaagcacagtag

SEQ ID NO: 524483 - DNA, 100 bp, Homo sapiens
cggtgccctcccgggcggcgaccggggcctgggtccacgccgagggcaggacgaacttcaccaggccacggcgtatgcctccaaggacggggtcctgacc

SEQ ID NO: 524484 - DNA, 82 bp, Homo sapiens
aaaacgtggtgctttgtcgcgagtctcaagtgtccatcttgcagtccttgtttggagagttttgcaggcaactttgagggaa

SEQ ID NO: 524485 - DNA, 80 bp, Homo sapiens
ggtcccactctcagtaccatctcagccctcctggatgagctcaggtgattatcctgaaccatccaggccaaataagcgcc

SEQ ID NO: 524486 - DNA, 97 bp, Homo sapiens
acggagtttgggcatcctgcagccattaatgatcccaagatagcatggaaagctcacctgatgggcccagccggctgcacgatgaacctgcgcaaga

SEQ ID NO: 524487 - DNA, 101 bp, Homo sapiens
ttgacttccataagcagcagccactgttcgtctctggaggagatgactataagattaaggctggaggacgtgtgccagtgttagacacactcatagaactt

SEQ ID NO: 524488 - DNA, 101 bp, Homo sapiens
gtttgctcagccatctgctttgctgtccaagtacaagaagctggagaagcgatgagaaacttatttctatgggacagagtcttttttttttaatgtggaag

SEQ ID NO: 524489 - DNA, 83 bp, Homo sapiens
tagattgtgcagtgctcgactgtgaggatggagtggctgcaaacaaaaagggagtgcatccgccccaacccttttccccctcg

SEQ ID NO: 524490 - DNA, 83 bp, Homo sapiens
accacaggccctcgttgcccagattaccatggggcgcaagttggaccctacgaaggagaagcgggggccaggccgaaaggccc

SEQ ID NO: 524491 - DNA, 101 bp, Homo sapiens
cgaggccctgctgcacgacctcagctcccagaggatcaccagcgtgggtgatgcagaagatggggaagaatatgatgacccttttgctgggcctccagaca

SEQ ID NO: 524492 - DNA, 105 bp, Homo sapiens
acctgattacctgtctggagcaaggaaaagagccctggaatatgaagagacatgagatggtagctaaacatttagtagagacggggtttcactatgttggccagg

SEQ ID NO: 524493 - DNA, 100 bp, Homo sapiens
gcctattgtgggacgttgtgatcatgtaaaataccatgaagattttgaaaaaacaaaggggagaggctttactcccgtcgtggacgatcctgtgacagag

SEQ ID NO: 524494 - DNA, 75 bp, Homo sapiens
attaccttgcaccttatgccaaggaagagagaagggcacagttacctaagtatcaacgtaatcttcctcggccag

SEQ ID NO: 524495 - DNA, 100 bp, Homo sapiens
caagaaaccccgccatggaggcttcattctggacgaggctgcatgctgatcccattttcaatgaagaattgcttccagttactttgtaactgccaggtcc

SEQ ID NO: 524496 - DNA, 75 bp, Homo sapiens
gccatcactatacacaacgttccagagataattgacgaccttgccaacctagtggagaacacagatgaaaaactt

SEQ ID NO: 524497 - DNA, 51 bp, Homo sapiens
gcagttacagcagcaggaagatgggtggggacgcacatccgcgccaagagg

SEQ ID NO: 524498 - DNA, 101 bp, Homo sapiens
ggacgcgcgcagcccgcccgcccggcgaccagcaagcatatcgcacggatgactgccatccctgggttttgccagtagtgaagaaagtggagcagaagatt

SEQ ID NO: 524499 - DNA, 90 bp, Homo sapiens
aacaagcgggaccgagcaggaatccgtatctgggaacaggtggcacctctgagcatgagaagctgtgccgggcccgggaccagtgccggg

SEQ ID NO: 524500 - DNA, 75 bp, Homo sapiens
cctgcctggccattgcgagcggcatctacctactggtgtgccgggagcagtttgtccgcttgcacagcgagccca

SEQ ID NO: 524501 - DNA, 75 bp, Homo sapiens
gttttattcagcggcagtggtgctttcccgaatctcagaatgccattttaccaaatgttgcaagaactctggagt

SEQ ID NO: 524502 - DNA, 101 bp, Homo sapiens
gccctgagtctgaggacaagtacaggaaaattaacgaagatattgatctaatgatcagcaggcaaagattgtgtcctgcaccactcttcacgaccccaggc

SEQ ID NO: 524503 - DNA, 96 bp, Homo sapiens
cggcggcgggaggcggaggcgagggtgcgatggcgcggagcccgggacgcgcgtacgccctgctgcttctcctgctgagatctgtatctgtggacc

SEQ ID NO: 524504 - DNA, 82 bp, Homo sapiens
gagagagactgaaaaagaaaaattgtttgaaacctccagcactcgcacaggcaccacactgtaactcgaggcatcaccaaag

SEQ ID NO: 524505 - DNA, 96 bp, Homo sapiens
ggcgagtcctgagcggccaggacgacgaggagcagggcctgactgcgcaggtgacggccacccacggactctgtcacttgctgggattcacacacg

SEQ ID NO: 524506 - DNA, 75 bp, Homo sapiens
ccagatgacggctgaaaaattcctttaaaaagccagggaggagtggatgcgggccatccagatggtcgccaacag

SEQ ID NO: 524507 - DNA, 100 bp, Homo sapiens
accatctccatcacccaccaacaacaccacaataatccacagccaaggtcgtccttggtggaaggaaccatgaactggcatctccccctcttcctcttgg

SEQ ID NO: 524508 - DNA, 75 bp, Homo sapiens
gcgcaggagcctcccggagctggttccgtggggaccccactgcctggagtacaggtgcgcattgtctcagaaaac

SEQ ID NO: 524509 - DNA, 100 bp, Homo sapiens
gccacgggtcggcccgagtgcttcctcacaactctaagaaggagctgatgtggaggagcagctgagacagttcaagatgacgaccacagtagccacagac

SEQ ID NO: 524510 - DNA, 90 bp, Homo sapiens
gagtcctctcttcaaccagatactcacacttcagcagtccatcaagcaactgaagggtcaagaagagagaagggcacagttacctaagta

SEQ ID NO: 524511 - DNA, 75 bp, Homo sapiens
gcagggcttccgccgactggaggagtcgtcctctcagcatgggggtcccgcggcctcagccctgggcgctggggc

SEQ ID NO: 524512 - DNA, 100 bp, Homo sapiens
gtagtggaaatattcttgttgaacttgatgagagaacgtttgtctgcctgatgagagccacttgggttaagaaactacctgtgaatagtcatcatttctg

SEQ ID NO: 524513 - DNA, 76 bp, Homo sapiens
ttgaccgacacctccaccctacaagtactgaaaaggcacaggtattgttgcagcatctggcagtgagactgaggat

SEQ ID NO: 524514 - DNA, 90 bp, Homo sapiens
cctgggtctacgataacgcgcttttgctcctcctgaagtgtctttggtccaacgttgttccagggtgaagttgaacaaattgctatgatg

SEQ ID NO: 524515 - DNA, 82 bp, Homo sapiens
acgactgggaccgggacctgctgctggacccggcctgggagaagcagcagcgcaagtgtctccagaacgctatagctatggc

SEQ ID NO: 524516 - DNA, 104 bp, Homo sapiens
tcgacaccgaaaactccaccgtagcccttgccaaaggtgaaatgacaatggatgctctgttggctcgattgaaacttctgaatccagatgaccttagagaagaa

SEQ ID NO: 524517 - DNA, 90 bp, Homo sapiens
aaggatgcaaattctccagaatttcaagcacaaccccaaaattaacaccatcttcatatccaagatcttcgcaaatactgtggacaatgc

SEQ ID NO: 524518 - DNA, 75 bp, Homo sapiens
ctgctgcccgcgtccgaggctcgcgggcggcgggcccggatctgcgagtgaagagggacgagggaaaagaaacaa

SEQ ID NO: 524519 - DNA, 75 bp, Homo sapiens
cgcagtggtcgcttcttctccttggtggagccgccaccaaaatgcagattttcgtgaaaacccttacggggaaga

SEQ ID NO: 524520 - DNA, 52 bp, Homo sapiens
gcctcaagtgcttctgcattacaggctggttgatatgtgaagagccaacctg

SEQ ID NO: 524521 - DNA, 100 bp, Homo sapiens
gcgagattccggacaaggagttccagaatgtcatgacctacctcaccagcatccccagctcatatgttagatttgatatcattcgaaggatcctaaccaa

SEQ ID NO: 524522 - DNA, 100 bp, Homo sapiens
gaggaaggatgcagagagaaaggagaggttcggctttccagtttggcagcagcactacaaatttcaacttcacaaacaacagtccatcaggagtgttcac

SEQ ID NO: 524523 - DNA, 78 bp, Homo sapiens
tttgaggagctgctgcagaacgggagccgccacttcgaggactgggtttttgtcatccattggagggacactgtatga

SEQ ID NO: 524524 - DNA, 100 bp, Homo sapiens
tctacaaaaagacctgctagagccattattgccccacaatacctgaaattccaccaaagcgtggagaactcaaaacggagcttttgggactgaaagaaag

SEQ ID NO: 524525 - DNA, 88 bp, Homo sapiens
agacaacactcgatggctggaggcctctgttgtaggcaagatcaacaaaggcagcacgctggctcttctcctgaacttcctcgcctgc

SEQ ID NO: 524526 - DNA, 75 bp, Homo sapiens
ggaccagcagaggtgttggctttgcaaggtacatgtcccagagcaagcacacggaggcccgggagctcatgtact

SEQ ID NO: 524527 - DNA, 98 bp, Homo sapiens
gcatgcaggactgccagcgggagctccagagcctgctggtggaggaggagaacgtatttaccgggcagtcaaagatctattcctacatgagcccgaac

SEQ ID NO: 524528 - DNA, 90 bp, Homo sapiens
gtaagaagaaaaagagcaaagataagaagagaaaaagagaagatgaagaaacccagcttgatatgttgacactttttcaaaaatggcaat

SEQ ID NO: 524529 - DNA, 100 bp, Homo sapiens
cacaaatgtacccccagtacacttactactatcctcattatctccaaaccaagctataatgatccagccttttatgaagaatgcaaaatggaatacctga

SEQ ID NO: 524530 - DNA, 96 bp, Homo sapiens
cgccgcttttctacatcgcggtggtctttacctgcttcatcgtgaccaccggcctggtattgggatgccaaaagaatgcaatggtgtaaagattcc

SEQ ID NO: 524531 - DNA, 83 bp, Homo sapiens
cttcgtgctcttcatgttctttggaaccagaataaaagctacttggccgtaaggctaaaagaccaagatctgagagattcaag

SEQ ID NO: 524532 - DNA, 88 bp, Homo sapiens
gagaccaataaaaataaactgcttgaacatcctttgactggttagccagttggtgttggtattaggagatctgcacatcccacaccgg

SEQ ID NO: 524533 - DNA, 100 bp, Homo sapiens
tgccagaccgtggaagatttaacgaatggggttgtgatggcccaggttcttcaaaagatgcatgtgggcacattccatgacagtacaggattatcaggat

SEQ ID NO: 524534 - DNA, 87 bp, Homo sapiens
ggaattgtggatggttcggggagcattggagctgcagtgggccagagaatggatcttggagaatgtctgaaagtccatgacctggct

SEQ ID NO: 524535 - DNA, 82 bp, Homo sapiens
gaggctttggagcggctaaaaacctgattttttatcaagcagaaatgcatcgaacaacgagaatcaagatcactgagctaaa

SEQ ID NO: 524536 - DNA, 74 bp, Homo sapiens
gctgagagatcctgacataaatccttgtttgtcggaattacatgaacgacagccttcgcaccgacgtcttcgtg

SEQ ID NO: 524537 - DNA, 99 bp, Homo sapiens
tccatcttcatgagtactccaagaagatggttcagttgactattgcaaaggattccagtcctctactaaatgaagtttcttcttcccttattggaactg

SEQ ID NO: 524538 - DNA, 82 bp, Homo sapiens
gcaaatgctgtgagttccttgttagcgtccgtctccaagagagtatgaagagagtgcgtctgtagggcagggaagatggcgg

SEQ ID NO: 524539 - DNA, 75 bp, Homo sapiens
agagagagaggtggacagatctgagagatactgagtggaggccatagtggagtttgactaccaggcccagcacga

SEQ ID NO: 524540 - DNA, 75 bp, Homo sapiens
ggcagaatacagagatatggaatcagctctcgtggcattatccttcagtggggctattggactgacttttcttat

SEQ ID NO: 524541 - DNA, 100 bp, Homo sapiens
gagcggagcctcctcgggaccaggaaagaccacagcaagattctttcattcgtctcctcctagcctgggggaccaggctcgaactgaccctggacatcaa

SEQ ID NO: 524542 - DNA, 75 bp, Homo sapiens
cttttgcttccaaatacaagctgtatagttgcatttgctggtctggcctttgcgtccttctacctggcagggaag

SEQ ID NO: 524543 - DNA, 97 bp, Homo sapiens
gcgtggagtgcggccggatgacccacaaccatcccacagggccagtggggagtgacggcagcagaggaagaggaggaaaataagaggattggagaat

SEQ ID NO: 524544 - DNA, 100 bp, Homo sapiens
ggagctgctggctggagaggagggtggacgaagctctctccagaaagacatcctgagaggacttggcaggtaaatgagctggatggtatcccgttgatcc

SEQ ID NO: 524545 - DNA, 100 bp, Homo sapiens
ggaaccagaatctctccaaagaaattcctcaaacagaatttcacacagggtattccatggagaatgagggggaaatttgcagtggtgagaaaatgtataa

SEQ ID NO: 524546 - DNA, 98 bp, Homo sapiens
attccaagtctggacagcatcaagaattattacaggtattttgaagctgtacagctgagctctcagcagcgcattcatgttgacctttttgacttgga

SEQ ID NO: 524547 - DNA, 96 bp, Homo sapiens
aaaaagccctcagtaccagagacagaagcagatggattcgtccttttaggacaacttgcctttgatgattttcaagagagttgtgctatgatgtgg

SEQ ID NO: 524548 - DNA, 75 bp, Homo sapiens
cctcagtgttgatctcacctatgatattcagtctttcacagatacagactgcttctcggaggagtgccgctctgt

SEQ ID NO: 524549 - DNA, 83 bp, Homo sapiens
ccttgcagtcgcctgctgctgtcgtcgggagggttatgtaccgaaggactctaccgtgtcagcgggaataaaactgaccaaga

SEQ ID NO: 524550 - DNA, 101 bp, Homo sapiens
cggggaggccaacgtgaagaatggaaggagcctgggagaggccaggcctccccggactgctagcctgcttttcctggggtccctggagccggaggaagaac

SEQ ID NO: 524551 - DNA, 75 bp, Homo sapiens
gactttctcatccaagactgagtggagggtcaggttggacaagctgcatactctgcttccaaggggggaatagtg

SEQ ID NO: 524552 - DNA, 100 bp, Homo sapiens
cctcacggtcctcctggctgtgctcatatacacctggtaaagtgaatgccgaagacagaagatttggatgatacaccactgactttctttgtttggaata

SEQ ID NO: 524553 - DNA, 100 bp, Homo sapiens
ggagctgtctccccctttgggatgctgggaatgaactggaagaagttcgggaactcagagtttgacccccccggacccaatgtggccaccaccactgtca

SEQ ID NO: 524554 - DNA, 87 bp, Homo sapiens
tggtgccgagcagcggcgccaggagcccgtgcgcggcccgggcagccgcgctttcccagttaaacccatccagagtaatggctgcgg

SEQ ID NO: 524555 - DNA, 75 bp, Homo sapiens
caagcagttcagaagagccaaggaataaacatgcaatgaacccaaaagggtacagtatatcagaagtatgagccg

SEQ ID NO: 524556 - DNA, 83 bp, Homo sapiens
gaagacactgctggacaggatggttcacctgctgagtcgagatcttcttactattccacctggtttcaagaaaggcatggact

SEQ ID NO: 524557 - DNA, 83 bp, Homo sapiens
tcgagaagtccggaagcttgtggcgctgaaaacgaacgatgagctttgatccaaaccttctccacaacaatggacataatggg

SEQ ID NO: 524558 - DNA, 100 bp, Homo sapiens
gcagcgaggtcgcggcaggttcgaggctgttagagagtgccatgagtggaaaatacctgcacgatgacttcgccctgccctgcccaccggggctgaaaat

SEQ ID NO: 524559 - DNA, 89 bp, Homo sapiens
ccttaacccaaggaagtgactcaaactgtgagaacttcagctgagtcagtgctgattctctcaaatagagcttgaaggataaatcttca

SEQ ID NO: 524560 - DNA, 52 bp, Homo sapiens
ccaccgtgcacatccgaatggtagaaaacccctttggtgaaacatttggaaa

SEQ ID NO: 524561 - DNA, 88 bp, Homo sapiens
gcctctcagccggccgggatggctaccacggccgagctcttcgagcgtttagtcacatcaagaaatagaacagaattcagccatggcc

SEQ ID NO: 524562 - DNA, 73 bp, Homo sapiens
ccggctgaggagcgccgctgcctcgcctcggtggaggtcctgattgccataagcagcctcacgtctccgctgc

SEQ ID NO: 524563 - DNA, 95 bp, Homo sapiens
cttcaggctctgctcagcgcagcttggcaggttggattagcttttcaaaacagaaattcttggaaagaattaaatgacattgcatcgaagccctc

SEQ ID NO: 524564 - DNA, 100 bp, Homo sapiens
cgaaaacaagtccgacagtgagaatggttatggtggagaattcagactttaccccctcacaagtaggatgtctctttaccttccttgctcggcagcttgc

SEQ ID NO: 524565 - DNA, 101 bp, Homo sapiens
ctttctcctcattgaagctatgcagtatttctttggcatcactgcagctagtaatttgccttctggattctacgagacaatgtgattacacctcgagacac

SEQ ID NO: 524566 - DNA, 100 bp, Homo sapiens
cggcggatctggacacccagcggtctgacatcgcgacgctgctcaaaacctcgctccggaaaggggacacctgaaaagcaaactcaagttcctgcctcct

SEQ ID NO: 524567 - DNA, 82 bp, Homo sapiens
cgacgcggacagcgggctggagcctgacgagctggcgggtgtggacactgccagcggctgcagccgacttggaatgacctgg

SEQ ID NO: 524568 - DNA, 98 bp, Homo sapiens
gaaagaatgacccaggcagaggaggaatcccgcaaccgaagcacaaaagttatcaaacccggtggaccatatgtaggctcgtgctgtcttggaaagag

SEQ ID NO: 524569 - DNA, 90 bp, Homo sapiens
ggtgaaagccaacgcaatgttcggtgcgggggacgaggacgacaccgatttcctctcgccgagcggcggaatcttctgctgactctcaac

SEQ ID NO: 524570 - DNA, 75 bp, Homo sapiens
tttacatcagcaccctcaaaacaggaaactttgagggaaattttgagtcactggaccttgcggaatttgctaaga

SEQ ID NO: 524571 - DNA, 88 bp, Homo sapiens
aaagcaaggcatgcggacacacgccgtctctgtgtcaggaaggaaaatcacctcggcagtgtttgaaggaaggatactgcaactcttt

SEQ ID NO: 524572 - DNA, 90 bp, Homo sapiens
tggacattttactggctcaaggaaatttacctaaatattctcataactccctgatggttcaagcaataaagacaaacctaacagacccgg

SEQ ID NO: 524573 - DNA, 50 bp, Homo sapiens
ctcatggaggctgagcatttattcaggtctaccaggtccagaaggtcctc

SEQ ID NO: 524574 - DNA, 82 bp, Homo sapiens
cgtggagatatggcgcaactgcggcgcggaactctaatgatccaggacaaagaagttaccctggagtatgtatcaagcctgg

SEQ ID NO: 524575 - DNA, 51 bp, Homo sapiens
acaccccggaagctgggaaatggggacggcaaaacagaacagaaaggcgga

SEQ ID NO: 524576 - DNA, 71 bp, Homo sapiens
ctgcctgagagatctccaagaattacagaggagaccttgcctattttgatggacttagtgagactattctt

SEQ ID NO: 524577 - DNA, 90 bp, Homo sapiens
tgctcatcggcccctcgtcggaggagccgttcccttcggccgtcacttaccttatcccatatcacacaactggtcctcagccataacaag

SEQ ID NO: 524578 - DNA, 109 bp, Homo sapiens
catgtgctgaaatgtttgacgacactgatggtttggttagagcagccagcgggtacagaatggattttggaagagggagtcaccactggacctccaaggaagccacgtg

SEQ ID NO: 524579 - DNA, 75 bp, Homo sapiens
acatggagtgtgaagctggatgctttgggccagattatgttgtatgtggatggaatgaatggagtaataaaccgc

SEQ ID NO: 524580 - DNA, 100 bp, Homo sapiens
tccctggccctcatgtacgagtccgagaaggttggggtcgcctcttccgagctggcgaagaaccatgacatggtggtggtgtctcccatcctggaacgag

SEQ ID NO: 524581 - DNA, 51 bp, Homo sapiens
gttctcgctgaccgcgctagctgcacccagtcagcttgaagagtttcaaat

SEQ ID NO: 524582 - DNA, 74 bp, Homo sapiens
ggctccccgtcgtcctggtgctgcagcgtgctggacccaaaggagacaacatttatgaatggaggtcaactata

SEQ ID NO: 524583 - DNA, 50 bp, Homo sapiens
attcgcagtggtcgcttcttctccttgaaaaggtggacaagtcctatttt

SEQ ID NO: 524584 - DNA, 75 bp, Homo sapiens
atctcaaggcacacctgcgaacccacacaggtcatcatcagatttgaaatatttaaagtggatacaaaactattt

SEQ ID NO: 524585 - DNA, 90 bp, Homo sapiens
gttaaggattccaagtaactcttatttgctgcccaaactccaaaatgatggtagagaattgaccaagaaaaataaagaaatctgttaaca

SEQ ID NO: 524586 - DNA, 88 bp, Homo sapiens
gagccgtgatatgttccagttgcacatttcctgcaaggactccaaagtggtgagaacaccttccaccatgaccacctcagcaagttcc

SEQ ID NO: 524587 - DNA, 83 bp, Homo sapiens
cagaagtccagagctgaggactgcctgtttgcagtgtctccagaacgctatagctatggcacctccagctcttcaaagaggac

SEQ ID NO: 524588 - DNA, 52 bp, Homo sapiens
atcctcccacctcagcttcctgattagacgttgtcctggagacgaacctggc

SEQ ID NO: 524589 - DNA, 95 bp, Homo sapiens
tgatgtagtttcctgacctctgacacgtattgtctcaagattaaaggactttgttcttcttcagaagagaaaactgaagaaggaggaatggctgt

SEQ ID NO: 524590 - DNA, 116 bp, Homo sapiens
cagattttctccaattaaccagatcttgccctggtgcagacaagacttagtcatgcggaaatatgaactttgctcgaaggaattcctgcaatcagtgcaatgagcctagaccagag

SEQ ID NO: 524591 - DNA, 75 bp, Homo sapiens
ggcacctggcgcccagcgcgcccgtggccgctgccgcctccgccccagtaactctcaggagccttctccgcagtt

SEQ ID NO: 524592 - DNA, 92 bp, Homo sapiens
cctgcccaacttctgcgggatcttcaaccacctcgagcggctgctggacgaaggtcaaaatgcagatcttcgtgaaaacccttaccggcaag

SEQ ID NO: 524593 - DNA, 82 bp, Homo sapiens
ctggacggcgagcgcgagcggcgcgagaaagcactatgctgggccttcctaccacttgtgtgtggcttggtagtggcctagg

SEQ ID NO: 524594 - DNA, 100 bp, Homo sapiens
agactcactagatagtgttttatttttaaagaagattaacacgtgctggcaggaccactgcagacaaatgaaatatggctacacacacctttctgcagga

SEQ ID NO: 524595 - DNA, 100 bp, Homo sapiens
caatgacgcccacgcagccagaatcctttagcagtgggtcccaggacgtgcaccagaaaagagcctgtcctgggggaacagagaggccctgcggtggcta

SEQ ID NO: 524596 - DNA, 50 bp, Homo sapiens
ccgtgttcgacatcctggccgtgctgcagatgatgataattccgaagaag

SEQ ID NO: 524597 - DNA, 116 bp, Homo sapiens
cttggagagaggagaacgaacatcttctggacctttgtccaggtgctggagaatctggtaaaagcaccattgtgaagcagatgaggatcctgcatgttaatgggtttaatggagag

SEQ ID NO: 524598 - DNA, 50 bp, Homo sapiens
ctgagcctgacgcgggccgcgcgggtgcccgtggttgacacgagctgtgt

SEQ ID NO: 524599 - DNA, 90 bp, Homo sapiens
cacgtcagcaccatggccagcttcctgaagagaccatttgtttgtgactatgaagggtgtggcaaggccttcatcagggactaccatctg

SEQ ID NO: 524600 - DNA, 87 bp, Homo sapiens
ggcagtggttcttatagccctggagtgacctactcgcccgtcagtggttataataagccaaatttgtatcctactgtggggcttcaa

SEQ ID NO: 524601 - DNA, 100 bp, Homo sapiens
ctccgttccccgtcccggagctgccggcggcatgatccgacacgccggggcgcccgcgcgcggggaccccacggggttttataggatcacattgacaaaa

SEQ ID NO: 524602 - DNA, 78 bp, Homo sapiens
acgccatgtcgggttattcgagtgaccgagaccgcggccgggaccgagggctgtgcaggaaccacccagacacccgca

SEQ ID NO: 524603 - DNA, 82 bp, Homo sapiens
ggagttcgtctcttacgtctgcggaagtgcagctgcctcagttcttagcgcagacagtgggagtagctcaccgttacccaag

SEQ ID NO: 524604 - DNA, 87 bp, Homo sapiens
ggcgctcggcatccaggacgttccctcccccgatccaagttggaattagcatcctctcggggtattctaccttgtaaatactgttat

SEQ ID NO: 524605 - DNA, 75 bp, Homo sapiens
agtttacagttcattttttgcttggtttggaaaaatttcattagagattggctcacagtggttgattgatcaacc

SEQ ID NO: 524606 - DNA, 82 bp, Homo sapiens
gaacagagagagaggtggacagatctgagagatactgagcaggaggccactgtctgcagctcccgtgaagatgtccactcca

SEQ ID NO: 524607 - DNA, 90 bp, Homo sapiens
gttaccaatggtgaaactacatgttcagaaagttcacaggtggctgttggtctttagtaagggtgctgtcttccctgtctgatccttagc

SEQ ID NO: 524608 - DNA, 82 bp, Homo sapiens
agcgttcacctctctgcgcccaaacggatctacctgcctagagctggaacgttacctccagagcgagccctgctatgtttca

SEQ ID NO: 524609 - DNA, 89 bp, Homo sapiens
cgctggaagaggctggtggacgaccggtggctgtggcgacatgtcgacctgacgctctacacgtttggccctttcctggatgctaagca

SEQ ID NO: 524610 - DNA, 100 bp, Homo sapiens
atttccctgtactatactggagagaaaggtcaaaatcaagactatagaggtggaaagaatagcacttggagtggtttgatgatctgatggccaacattcc

SEQ ID NO: 524611 - DNA, 98 bp, Homo sapiens
gtcatgaaagagattccttgcagagacagctcaacacggcacttccacaggaatagccaggccagaagaaggaaggcctgtggtgagtgggacaggaa

SEQ ID NO: 524612 - DNA, 87 bp, Homo sapiens
cagcaccacctatggatcttgctcctttgcctgcaaacctctatccagtcagttcgctgctattcccatgggtcacaggagacagat

SEQ ID NO: 524613 - DNA, 100 bp, Homo sapiens
ggtgaagctcgagtgcaaccccacagcccgcatctaccggaagcactttctcggcaaggtgacatctgttcccgagctgttcctgactgcagtgaagctc

SEQ ID NO: 524614 - DNA, 100 bp, Homo sapiens
ggaagatgcaaaaccagagatagacaatgcaaatacatttgggggcaaagattttgcagaaaagaagtccacagcaaaggccctggaagatgtaaaggca

SEQ ID NO: 524615 - DNA, 75 bp, Homo sapiens
ctggcaagcaagattataatcaggaagtggatgcctccatttttaagtggactaaagaggatggacatagaactt

SEQ ID NO: 524616 - DNA, 74 bp, Homo sapiens
caccatctccatcacccaccaacaacaccacaataatccacagccaagcatcaagatggtgctcatgtggacca

SEQ ID NO: 524617 - DNA, 97 bp, Homo sapiens
tgctgtcttcgtgggaggcgccgtgagttcgccgctggtggctccggggagttctgggaaatcgttcattcatttacagatgaacagaaaagactct

SEQ ID NO: 524618 - DNA, 50 bp, Homo sapiens
gagacggagctgctccttagatgtactaatggtcacttgatgtgcgctgg

SEQ ID NO: 524619 - DNA, 74 bp, Homo sapiens
gcagagtggataaagaactgggagaaatcagggagaggcgaattattttgatgcatacgaaagagatggtacaa

SEQ ID NO: 524620 - DNA, 100 bp, Homo sapiens
aagaacaacagtcaggccaagccttctgcctgtgatggtgcccctgaccccacagctggggccagcattgacgatgagaactgttggcatttggatgaag

SEQ ID NO: 524621 - DNA, 50 bp, Homo sapiens
ctctgtgcagctgtgtgacctcagatctgactgcagccatgagcagcaat

SEQ ID NO: 524622 - DNA, 75 bp, Homo sapiens
tcaaatccgtgtcggagtccttacaggatagagggaggaatcagcagcttggaaattcaagcacgtgatctggcg

SEQ ID NO: 524623 - DNA, 100 bp, Homo sapiens
cccggccggagctgggtctggagacgccgtggcagcctgaacggagtgtgcgacggattgggagcctgcaggatgtttcctcaatgaggggaaggctgct

SEQ ID NO: 524624 - DNA, 74 bp, Homo sapiens
agattcgcagtggtcgcttcttctccttgggaccatgggctgtggctgcagctcacacccggaagatgactgga

SEQ ID NO: 524625 - DNA, 100 bp, Homo sapiens
aaatttttatcaaagttaatggatcagttagaagctattccagttcttcagacaaacaatggtccaagtctaacaggattgactactatagcagctcatc

SEQ ID NO: 524626 - DNA, 50 bp, Homo sapiens
atacagtcgcctctgacaagccaggacgcgctccaggagatatataatca

SEQ ID NO: 524627 - DNA, 82 bp, Homo sapiens
gaccggacccaggccctggatgggactgtctatgatgtcatgtttgtcagcacaggtgagaagccctaccactgcaactggg

SEQ ID NO: 524628 - DNA, 100 bp, Homo sapiens
agcaaggcagaaccaccccagtgcacctccctggcctggtctgctgatggccagtactacgagatgtcctacggcttgaacatcgagatgcacaaacagg

SEQ ID NO: 524629 - DNA, 98 bp, Homo sapiens
tttaattttagggtcctttatatagaagggagagtaggccaggagtggtggctcacacctgtaatcccagctctgggaggccaaggccagtggattgc

SEQ ID NO: 524630 - DNA, 100 bp, Homo sapiens
tgcagaaagccaggaccaagagacaggcagctcaccagggtggacaaatcgccagagatgtgactgaaatatgagttggcgaggaagaagatatagacca

SEQ ID NO: 524631 - DNA, 101 bp, Homo sapiens
gtgctatgctgtgggccccgctcaggatgaatttttagatgtgatctactggttccgacagatcattgctgtggtcctgggtgtcatttggggagttttgc

SEQ ID NO: 524632 - DNA, 100 bp, Homo sapiens
tttgggggctgtagcccccccagtcagtggagacttaaccaaagaggctcacagaacatttcctgcctgttgctcacactctgttgtccacagcataccc

SEQ ID NO: 524633 - DNA, 96 bp, Homo sapiens
gctgggattggaactgtgtttgggagcctcatcattggttatgccaggcagtactacgagatgctttacaacacagctgacgagctcctgaacctg

SEQ ID NO: 524634 - DNA, 100 bp, Homo sapiens
aaaagccgaagaccccttcaagaccatcagccttagcatattgctatcactgcgcgcaaaaaggccattatggacacactcacctattgattttcattta

SEQ ID NO: 524635 - DNA, 98 bp, Homo sapiens
aaaagcatattttcacatgggaaaagccaacctggccctgaagaactacagtgtggaataaaacatcagcttcgagttcacttgtcttttggattgga

SEQ ID NO: 524636 - DNA, 89 bp, Homo sapiens
cgagtcggaggaggacgaggacttggaaggtgcaacacgcaggactacatctggcacaaggggatgcgctgcgagtccatcatcaccga

SEQ ID NO: 524637 - DNA, 100 bp, Homo sapiens
tgaaaaaacgccagccaagaagcatgtgcgactgcaggagagcaccctcatcacatgtgtggattctgggattctcagagtctggcatgacaaggacaag

SEQ ID NO: 524638 - DNA, 82 bp, Homo sapiens
tctgaggcgacggccgcggctgcacagacacgatgaggcgagtggtacgacagagcaagtttcggcatgtatttgggcaagc

SEQ ID NO: 524639 - DNA, 50 bp, Homo sapiens
ctcccgagtggctgggattacagggatgattctctgaacgactgtcggat

SEQ ID NO: 524640 - DNA, 100 bp, Homo sapiens
agtgggattcagatccatcagggaccaaaacctgcattgataccaaggaaggcatcctgcagtattgccaagaagcatcctctggtatcacgattccaaa

SEQ ID NO: 524641 - DNA, 100 bp, Homo sapiens
taaccatgaagacttgaacttaatacagcaagaaagaccatcaagtttaccagtgaggccgcaggcggtgctctgggtccgggagcgctgtccccagcat

SEQ ID NO: 524642 - DNA, 50 bp, Homo sapiens
atctttgtctagccccagtgcaggtcctatggcagcgtatacaaagctat

SEQ ID NO: 524643 - DNA, 77 bp, Homo sapiens
tttgctcctccctgcaactaactccattcttaattggtggttatccatgaagacttcattcagtcttgctttgatcg

SEQ ID NO: 524644 - DNA, 100 bp, Homo sapiens
tgagaaataaggacaaaagccaagaggaggacagttcgctacacagcaatgcatcgagagaacactaaactctacatctcccttcccgagcaaggagctg

SEQ ID NO: 524645 - DNA, 83 bp, Homo sapiens
agaaaatcggcagctgagacggccttggccggctgaccccgcactacatctacccaccagccatcgtgcagcccagcgtggtg

SEQ ID NO: 524646 - DNA, 80 bp, Homo sapiens
gctccagcagtccccaccacaggccccgttgcccatggctgtcagccggtgtggacactgccagcggctgcagccgactt

SEQ ID NO: 524647 - DNA, 98 bp, Homo sapiens
cgcgcccttcctcggcgggccggactggtatatcgatacagcaaatgctttggagcaagaaactaaactggggttacgacggtttgaagtttgtgaca

SEQ ID NO: 524648 - DNA, 74 bp, Homo sapiens
gaggagtcctccacctcgtcgcagccctctgcccgaggagatgctcagctacgcccgggatgacacccattacc

SEQ ID NO: 524649 - DNA, 121 bp, Homo sapiens
gggagaaggagggccaagatggcggaagcggaggagtctccaggagacccggggacagcatcgcccaggcccctggcatcaacttctaactcatctcgccaggagaggcctccagtgaaac

SEQ ID NO: 524650 - DNA, 82 bp, Homo sapiens
ccttcggcagtccacccaccgccgccgcctcccaggtggacgacccaccggagcccgtgtacgcgaacatagagaggcagcc

SEQ ID NO: 524651 - DNA, 100 bp, Homo sapiens
cagaggagaaactcgctcgccttcagaagacagctgtgttggggtggaagaggaggaggcgcccgacatcgacatataccactgcccaaactgtgagaaa

SEQ ID NO: 524652 - DNA, 50 bp, Homo sapiens
gccggccgcgggcgcgaccggaggcaggaatgtatcctgtcaggtataat

SEQ ID NO: 524653 - DNA, 100 bp, Homo sapiens
atgacagcagctgtcacaaatgttgggcatgctgttagcagggtgactgacgaagtcttcaacttcctgctggtgtggtattactgcaccctgaccattc

SEQ ID NO: 524654 - DNA, 90 bp, Homo sapiens
ggagcgactcttacatgatgaacaaagtactgatgacagcaagagcctcctgatctagcagccaagactccccctgacctttggccatgt

SEQ ID NO: 524655 - DNA, 50 bp, Homo sapiens
atcacgcccttcggcgccgaccagttctgcacggagctaaaccagccgac

SEQ ID NO: 524656 - DNA, 100 bp, Homo sapiens
atacactgggtagaggagagcccagtataccatctaacagaattaaaacagacggtgctgagatacaatcttgcttgaccgtttgggacatcaatcttcc

SEQ ID NO: 524657 - DNA, 100 bp, Homo sapiens
accgtgttcttcgacattgccgtcgacggcgagcccttgggccgcgtctcctttgagctcagtaaacgctctgccactgacctgtgtggcaggaatgatg

SEQ ID NO: 524658 - DNA, 101 bp, Homo sapiens
gggcaagtggctggagaaacaagaacaggcagccttaagtgccttgaaacaattttctgaacaaggactggatccaatcgatggagcaatgaatatcgaaa

SEQ ID NO: 524659 - DNA, 97 bp, Homo sapiens
tccccggggacacctcggcacgcagcggagatgcctctttttgccaccaatcccttcgatcaggatgttggggagtcctcagcactgcctcttctat

SEQ ID NO: 524660 - DNA, 75 bp, Homo sapiens
atgaaaaaaatgcattatgtggaccctgaccatgtaaagtttgtgaagtgtggatatgcaggctctaactttcca

SEQ ID NO: 524661 - DNA, 100 bp, Homo sapiens
cctctctcgtcgccgctgccgccgccgcagctgccaaaatgaaaattgcctaagaattatgacccaaaagttaccccagatccagaaagatggctgccaa

SEQ ID NO: 524662 - DNA, 82 bp, Homo sapiens
acttggaatgaatccttctagagacgtccacggtcctctccacccggatcctggccatgaaggcctcgctctgcaagctgtc

SEQ ID NO: 524663 - DNA, 100 bp, Homo sapiens
tcctaaaggagatggaagtgatgtaccatcatgggtagcctttgataaacaggtgtcatcaatcttacagaagaagtgctgtgggtcaaagtgaatataa

SEQ ID NO: 524664 - DNA, 74 bp, Homo sapiens
aaatagttctacgaggagtgaccaatgatcaggttgacccttcacctagtgtgttaattgtaacctacaaggag

SEQ ID NO: 524665 - DNA, 100 bp, Homo sapiens
gaggtccctcagcaaagatggtacaaaagagtctttggaggatgcggctttgatgggtgccgtgagcgatgtggagatgcaggaacactatgatgagttt

SEQ ID NO: 524666 - DNA, 100 bp, Homo sapiens
aaattgccaaaaacagaggagcaagatacaggcttggaccagagctggaaatatggtgacatacaaatggctgagctatacactaggggttcatgttaac

SEQ ID NO: 524667 - DNA, 75 bp, Homo sapiens
tgtttcttggactgcagaaattggaagagtttgacacctatagatccaagaaagagagtgaacgtctggtccagt

SEQ ID NO: 524668 - DNA, 100 bp, Homo sapiens
gccgtccgtgcccgcgggacctgacagccgggtcagaggtgcaatggatgagcttcatagtctggatccaagaaggcaagagttattggaagctagattt

SEQ ID NO: 524669 - DNA, 75 bp, Homo sapiens
aagcgggccacgcacctcgtcaccaaggccaagtcagcaggatggacctggagatgtcagggctgaagaccctgg

SEQ ID NO: 524670 - DNA, 90 bp, Homo sapiens
gcccagatgctggagaaggccggctgccaggtcctgggaactccaacaagggagcaaatcagagaaatgaacccaaactacacagaattt

SEQ ID NO: 524671 - DNA, 72 bp, Homo sapiens
agccacaatgatcctgccaagaatcctccagggtttgactgccgatgtggaaatttgttttgtggacttcac

SEQ ID NO: 524672 - DNA, 75 bp, Homo sapiens
ctatgtacctgttaccactttcaaaatatgtgaggaactgccctctccagcaagtacatcatcacctgtctccca

SEQ ID NO: 524673 - DNA, 96 bp, Homo sapiens
agagatgccaagaagaatctagacagacaggcctttctagttgttgacctcctgtactggagagacattaagaagactggagtggtgtttggtgcc

SEQ ID NO: 524674 - DNA, 90 bp, Homo sapiens
aagcaggaaaataaaactcttttgaaagttgtgggtcagctgaccagaaggagcgatatatagttatcagcaaagtagatgaagaagaac

SEQ ID NO: 524675 - DNA, 100 bp, Homo sapiens
ttcatgcctgtagaaatgagaatgacagctgtgataaaaaaaaaattcatctgggcggtatctggaacttgggatcactacttgtgtgatgtgacatggg

SEQ ID NO: 524676 - DNA, 90 bp, Homo sapiens
caagttcctgtctttctactgcaagagcccagtacccctcagaccagagaatagctactcagagttgctgtttctccttgagatgctttt

SEQ ID NO: 524677 - DNA, 75 bp, Homo sapiens
gaggttccctccgagccccttcctgagaagatcccaggatcagtttgacaacttagaaaaacacacacagtgggg

SEQ ID NO: 524678 - DNA, 51 bp, Homo sapiens
catcactcagcacattggtgcctttcttggaaatagttgacaaacagggac

SEQ ID NO: 524679 - DNA, 82 bp, Homo sapiens
ggaggaggaggcgaggaggagagactgtggataatattaatgcagctgtgatggatttgaaaaaaaagaagatccgcagtct

SEQ ID NO: 524680 - DNA, 75 bp, Homo sapiens
gaaacacttcctataaatctcgcccaaacaggaaaggtcctgtatggtggaagagtcggggaccctcgaatccca

SEQ ID NO: 524681 - DNA, 75 bp, Homo sapiens
attcttcaactcctaccagccagatcaacacaattgatacaacaccttacgagttacccgttctgctgcccccag

SEQ ID NO: 524682 - DNA, 96 bp, Homo sapiens
ctcccaaccgcacctgggactgcgtcctggtcaaccccaggaactcacagagtggattccgacggagcccgtggctggtgaggccgcagagcaggg

SEQ ID NO: 524683 - DNA, 95 bp, Homo sapiens
tcgtcgagaagcctatcatcgatacgtcggtaacctttccagagatgtgacagaagctctaattctgcaactctttagccagattggaccttgta

SEQ ID NO: 524684 - DNA, 82 bp, Homo sapiens
acagattccagcttcggaacaagagaccctggaagatgagaatgtgcctactgctcctgatcctccaagtcaacatttacgt

SEQ ID NO: 524685 - DNA, 87 bp, Homo sapiens
ccgaagaagcttcgaggatctggtagcagcactgtctggagatgcacgacggtgcctggacatctgcaggcgtgccacagagatctg

SEQ ID NO: 524686 - DNA, 100 bp, Homo sapiens
tgagactgctccagaagtggagaccagcagaactccaccagatttccaagccatggggttgaagaaagggatgtttttcaacccagacccttatctgaag

SEQ ID NO: 524687 - DNA, 100 bp, Homo sapiens
cagccgcctccgaagatgggggatttctacgacccggagcacccgacccctgactccagataggaatccacaaaacataagggttcaagcctctcaaccc

SEQ ID NO: 524688 - DNA, 112 bp, Homo sapiens
cgtaccttggctgtccctccttggattgagtaccagcatcacaagcctcctttcaccaacgtgcataaggcaaatccaatacgcaagtaccagggtctggagataaagtcaa

SEQ ID NO: 524689 - DNA, 96 bp, Homo sapiens
atgtactgtgcttggctggaaaaccccaaaagtgtacataaggaagcccttagtgtatacaaggaagcaattcagaaaatgccaaggcagtttgcc

SEQ ID NO: 524690 - DNA, 90 bp, Homo sapiens
tggtgaagaaaatgctttatttttgtggcaggcatctgtgggatctgtaatagaaatgtgtgatgaatgcagactctgctaccattttgg

SEQ ID NO: 524691 - DNA, 87 bp, Homo sapiens
gggaaaacccccattcattctggattggtggatctgaagtacaaaatattttccagctgtccagaccaaaacgaagaagacgttagc

SEQ ID NO: 524692 - DNA, 82 bp, Homo sapiens
ccagcatgaagaccccggcggacacagtttgtttcgacgccggaccgcgtaagagacgatgatgttgggcacggaaggtgga

SEQ ID NO: 524693 - DNA, 100 bp, Homo sapiens
aagagctgaccgaggcccagaagggctttcaggatgtggaggcccaggccgccacctgcaaccacactgtggtttcaagtgccccatttgctccaagtct

SEQ ID NO: 524694 - DNA, 83 bp, Homo sapiens
cggatttactggaccccagtgtgaaagagaacacaccacagccatcagcactggaatgcaaagaccagaacaaacagaaggaa

SEQ ID NO: 524695 - DNA, 87 bp, Homo sapiens
aaattgaaggaatttccccgtaccgcagcccccgggcacgacctctcggacacggtgcaggcagacatccacgacagcgatggcagt

SEQ ID NO: 524696 - DNA, 95 bp, Homo sapiens
gtctccgcgtcccgctcgctgggagagaggtacctctccttttccctctccctttccctaagaagcatcaagtgtacctgatttgtgaacctatc

SEQ ID NO: 524697 - DNA, 50 bp, Homo sapiens
ggacccctactattgcaacaagggtgtcaaattgagaaccaggtagatcc

SEQ ID NO: 524698 - DNA, 50 bp, Homo sapiens
cgaggacgctggagcccagcaaggtcagatgggcagacctggaagagaag

SEQ ID NO: 524699 - DNA, 75 bp, Homo sapiens
ggcggtagcgcaggggagattacttttctggaagtactatactggcaattgctggagaagattttgcaattgttg

SEQ ID NO: 524700 - DNA, 96 bp, Homo sapiens
acgagatatttatggaggggactatgagaggtttggactgccaggctgggctgtggcttcaagaggcttcgtgacggagttatcagagacattgag

SEQ ID NO: 524701 - DNA, 75 bp, Homo sapiens
ttcgcgtctctctgctgcggcgcggggaccgctgtgctctcggatgaagcctgctgggagcgtgaatgacatggc

SEQ ID NO: 524702 - DNA, 80 bp, Homo sapiens
ggccattggagagctggaaagcattggggagcttttctcaagggcagctgtgctgagaatacagcaaagaagctgaatat

SEQ ID NO: 524703 - DNA, 100 bp, Homo sapiens
gacaaaatgcagccgagaactccgctcgttctgtgcgttctcctgtcccaggtacctttgacaggagcgtgaccctgctggaggtgtgcgggagctggcc

SEQ ID NO: 524704 - DNA, 100 bp, Homo sapiens
cttcggaaaggaggatgaacgagggtccaccagcatcagccccccgaggggacctgatgttcctgctggacagctcagccagcgtctctcactacgagtt

SEQ ID NO: 524705 - DNA, 76 bp, Homo sapiens
cgggccccccaacacctactacgagggcggctacttcaagctatgggaggtctcctcgggggagctgctgctctcc

SEQ ID NO: 524706 - DNA, 75 bp, Homo sapiens
ttcatgggcgtcatgaataacatgcggaaacagacttaattcagtgcacaaatgagatgaatgtgaacatcccac

SEQ ID NO: 524707 - DNA, 96 bp, Homo sapiens
aggcggccgtcagcaacctcgtccggtttgactttggggacaccatggtccaccaggccatccacaccatcgagtactgcctgggctgcatctcca

SEQ ID NO: 524708 - DNA, 100 bp, Homo sapiens
tccatatgaccccattggcctcccgatggtgccctaggtggaatccagctgtagctggaaccactataacatgcagtacgcactagcagtttccaagcag

SEQ ID NO: 524709 - DNA, 82 bp, Homo sapiens
ttctggcacctcaacggctgatgatttctggtgtggtggacacaggcctattcatcaacatggctgagagagtctactttgg

SEQ ID NO: 524710 - DNA, 75 bp, Homo sapiens
agaatgggattctgaccatctcacatgccacaggtcctcatagaagatcttcagaaaacactggagaagggaagc

SEQ ID NO: 524711 - DNA, 100 bp, Homo sapiens
cccgggagtgccgtgcgccgcagcccgggcccaggccccggcagcgcctgggacaaggcatcagtgtttttctgaccgaagttctcatttcctgacaatg

SEQ ID NO: 524712 - DNA, 75 bp, Homo sapiens
ggaccatgcggcggctgccattgccaaggctggcattccgggcgaggcggctttgcacaaggtggacattcccag

SEQ ID NO: 524713 - DNA, 75 bp, Homo sapiens
ctgcagcaagcgggagaccaggagctcctccaccaggccaaagacttcggcaggaaactttatggtgatgttcct

SEQ ID NO: 524714 - DNA, 74 bp, Homo sapiens
agaagacaatatcatgcaagtgtggcaaatgagagaaaaggaacagttccgtaagctctttattggtggcttaa

SEQ ID NO: 524715 - DNA, 100 bp, Homo sapiens
tccattgaacttcccagcactcgaaagggaccgaaatggagagcaaagccgattacacctcaacaagaaggcaactgacaaacagccttatagcaagctc

SEQ ID NO: 524716 - DNA, 83 bp, Homo sapiens
cggacagccgcgcgctgagggtctcggggcgggcgccgcgggacctctccgggccatggccccttggatctcccttcgtggag

SEQ ID NO: 524717 - DNA, 75 bp, Homo sapiens
caaagccaaaagaaatttcagaaattcaacgtttaaattatgaacagcacttaaatatagatccggtggtatgga

SEQ ID NO: 524718 - DNA, 110 bp, Homo sapiens
atggaaacgactcctcggccgagctgagtgaggactgactgcattgcacagatgatggatatttacgtatgtttgaaacgaccatcctggatggtggacaataaaagaat

SEQ ID NO: 524719 - DNA, 82 bp, Homo sapiens
catcaaattcttgaccaatctaggacctgtactccggctggttggcagcagcccttggtaccaacctgcaggtccagttctg

SEQ ID NO: 524720 - DNA, 98 bp, Homo sapiens
ctgcagaaggtctctggagacatcttcagcagctccccgcagccaccgccacccattggaatggccaacaggggacctgcatatggcctgagccggga

SEQ ID NO: 524721 - DNA, 100 bp, Homo sapiens
gttttccggtgtatatgtagccatccaggcagttctgactttgtacgctcaaggatggtgccatgacaatggtgtgaactacaagattggagagaagtgg

SEQ ID NO: 524722 - DNA, 99 bp, Homo sapiens
ccagcctgcacgcgctggctccgggtgacagccgcgcgcctcggccagtgcaccaattccagctggacatcactgtgaaaatgggacgggataaagtcc

SEQ ID NO: 524723 - DNA, 98 bp, Homo sapiens
caggtggaccccaagaagaccattcagatgggatctttccggatcaatccagatggcagccagtcagtggtggaggtgaaaattatctcagtgaacga

SEQ ID NO: 524724 - DNA, 90 bp, Homo sapiens
attgcgagcggcatctacctactgattgcccgtgaggcagaggctgccatctaccacttgcaattatttgaggaactccgccgcctggcg

SEQ ID NO: 524725 - DNA, 82 bp, Homo sapiens
ccagatgtctttaactgccaagcaccaggaagagagaagggcacagttacctaagtatcaacgtaatcttcctcggccagga

SEQ ID NO: 524726 - DNA, 90 bp, Homo sapiens
cgcgggagaatgcaggctgcgtgctggtacgtgcttttcctcctgcagcccaccgtctacttgatattctctaagccgctttcatcatgg

SEQ ID NO: 524727 - DNA, 75 bp, Homo sapiens
ctcggaaaccggtagcgcttgcagcatggtttgtcctggttgtggtcaagactggatgatgtaactggctctcta

SEQ ID NO: 524728 - DNA, 100 bp, Homo sapiens
ctcttgttggcatttgaagcggctgaaagtgtaggcatcaaacccagcctgtacaagcccaccaccaacagcagttgtaaggctgccctggaggaaccga

SEQ ID NO: 524729 - DNA, 75 bp, Homo sapiens
ctggaggacgccatcaggacagcctggagatttgaaaaagagaattgaatctctgatagacagagactatatgga

SEQ ID NO: 524730 - DNA, 75 bp, Homo sapiens
cgtcctcatcgggcttatgttcgagagtgaaccagaggaaatgcctccagaagcaaagatgaggatgaagaatat

SEQ ID NO: 524731 - DNA, 100 bp, Homo sapiens
gggaacatggacatgaagaggaggatccacctggagctgaggaaccggaccccggcagctatcccggccccgggttccggggtctcctttcacatccaga

SEQ ID NO: 524732 - DNA, 105 bp, Homo sapiens
gccgcgcgctgagggtctcggggcgggcgccgcgggacctctccgggccatgggttttaaaatcaaagatgggaaaatcggagaaaattgcccttccccatggcc

SEQ ID NO: 524733 - DNA, 92 bp, Homo sapiens
gccggcatcgtctttccgtcctctgaggcgacggccgcggctgcacaggtgaaatgacaatggatgctctgttggctcgattgaaacttctg

SEQ ID NO: 524734 - DNA, 100 bp, Homo sapiens
atggctcaaagaaagatgattatggcagctgcaatgactctccgcacggtattattgtcattgcaagcactattggcagctgcagagccagatgatccac

SEQ ID NO: 524735 - DNA, 83 bp, Homo sapiens
ggggaggattgatgtcccttcagcatcatgcagccgccgccgaggaaggcagctgacacacaagagttcaggaccaaactgca

SEQ ID NO: 524736 - DNA, 100 bp, Homo sapiens
tggattggagtgaaccggagaccccgaaaacggaagcgcagggagaaggaagaggtgtttgaaaaggtatgtcgagagtaccaacgtggcaattgcaacc

SEQ ID NO: 524737 - DNA, 83 bp, Homo sapiens
gtctgtgtcaaacatccatatcataagtggaattttggagatattcaaaggtgcctggaatacttattaagaaacgatgcaaa

SEQ ID NO: 524738 - DNA, 100 bp, Homo sapiens
tggaaacctgatgatctcagaagggcattttgcatctgaaaccatacgggtggaagttgatgggtcgaaactaaatgtgaccagcacgtggaacctggct

SEQ ID NO: 524739 - DNA, 100 bp, Homo sapiens
gcactatgctgctgcctcagggatgaaagcctgtgtagagcatgttacaccagacagctatattccatgccttgcagacctgtgcaaagcactatgggaa

SEQ ID NO: 524740 - DNA, 121 bp, Homo sapiens
aacgaaaacgtagggaccacatcaaagacagctttcacagtttgcgggactcagtcccatcactccaaggagagaaggcagaggtggaggagacactgaagcgactgcagagccagaaggg

SEQ ID NO: 524741 - DNA, 87 bp, Homo sapiens
tacacacagtcatgaccctagaacagcaggtaatgtacatgggtgaagaacatctatttagtgtggagcagataacagccatgttgt

SEQ ID NO: 524742 - DNA, 100 bp, Homo sapiens
ttcttccaagaaaccaacattcccaacagccaccaccaccaccagatgcgtgaccacaggcaagtgctcagctccctgctgtctggggccctggctggtg

SEQ ID NO: 524743 - DNA, 83 bp, Homo sapiens
ctgcaggcggcccactggcagttcgagctgctgatgcaaggaatcccctgggctcccgtccactccactgctgaccagcccat

SEQ ID NO: 524744 - DNA, 100 bp, Homo sapiens
aagtttgccaacgatggtagcttcttgcagcagtttctgaagttgcagaaggcacagaccagcacagctatcaagcccagagagagacgtggagagggac

SEQ ID NO: 524745 - DNA, 74 bp, Homo sapiens
caagaacggcggtacccgggtggttaaacttcgcaaaatggatattatcaactcactggtaacaacagtattca

SEQ ID NO: 524746 - DNA, 152 bp, Homo sapiens
ggtcatttcagatgactatcagactgagaacaaaatcctgggtgtacactgtctccatcacattgtgcttaatgtgaggtgaacaagaaggaggtggtggaggctgtgaccattgtagagacaccacccatggtggttgtgggcattgtggg

SEQ ID NO: 524747 - DNA, 100 bp, Homo sapiens
aaggagggtgaaaggaacgtccacctgcacacaaagcaaagcagttgagagcttagctgaagcaggtggctctgaaatccagcgggtgaaagaagatgct

SEQ ID NO: 524748 - DNA, 75 bp, Homo sapiens
gaggcctccccagacatgtggaactggatgacttgtcaagctcgaacatcatatactgaagatgaagttctttgg

SEQ ID NO: 524749 - DNA, 90 bp, Homo sapiens
gcgagctgtttgacccctttgacctcttcgatgtgcgagactttggaaagccaccaattaccctagttatgggcccatcatctcacctgg

SEQ ID NO: 524750 - DNA, 82 bp, Homo sapiens
gttggaagcccgggaccgtttaaaaaactgacttggtggtggcagtcaacggggtctggatcctcgtggagacatttatgct

SEQ ID NO: 524751 - DNA, 95 bp, Homo sapiens
tctcccgcccctgtctcccgctccgcagccccgggcacggcggaggcagcggagccctgggccatcggtacatgtcccagagcaagcacacggag

SEQ ID NO: 524752 - DNA, 100 bp, Homo sapiens
ggcctcacagttcagcgactgcagctcagccaaggccaggggagacctgggtgccttcagcagaggtttgtccagaggggttgcgtttatccggtttgac

SEQ ID NO: 524753 - DNA, 76 bp, Homo sapiens
gttgtgtctgccactcggctgccggaggccgaaggtaagaatgattgatgttggctgatattggagtgctcattca

SEQ ID NO: 524754 - DNA, 97 bp, Homo sapiens
tggaatcttggccaaaatcgtggcatcacacccatgttgcagctcattcgccacatcaccaaggaccccagtgacaggaccaggatgtccctcatct

SEQ ID NO: 524755 - DNA, 101 bp, Homo sapiens
aaaaagaaataactcagctgaagcatcaggtgaaaggtgtagcagtcactcggcctacacccacagcatcgaccttgtgaacccagcgacctgactgcctt

SEQ ID NO: 524756 - DNA, 98 bp, Homo sapiens
aataggaggcaaaatgttggataaatatatctatggagcacaggctgtattcatcaccaaagaaaaaacttacaccaatgcagaaatcggttagtcca

SEQ ID NO: 524757 - DNA, 75 bp, Homo sapiens
aaacctgcagaagaactggcttcgggaattttaccaggctaagtcctatcagccatggaaacaccattgctctct

SEQ ID NO: 524758 - DNA, 100 bp, Homo sapiens
gcaccctccaatggcatcaccatgtacggggccacgcagtcacagagtgacatgagtgatcagcagctggactgtgccttggacctaatgaggcgcctgc

SEQ ID NO: 524759 - DNA, 50 bp, Homo sapiens
gagaccgcggccgggaccgaggcagaaaaatatggctcaggagactaacc

SEQ ID NO: 524760 - DNA, 90 bp, Homo sapiens
caaccggcagcagcgctgccgccgcgtcctcagccaccgctccctcttcccacgataaagaaatgggggctccgagcagtcaagaagaac

SEQ ID NO: 524761 - DNA, 100 bp, Homo sapiens
ttcttctacaaattctttcaggagtttacccaagaaccattggtggagatagaagattgttaaaggaaatgggctggcaggaagacagtgaaaatgatga

SEQ ID NO: 524762 - DNA, 95 bp, Homo sapiens
cagatcagtgacaaccatgctggtttgcttcagactggttatgaagacagtatggagtttccagaccatagtagacatttgctacagtgtctgag

SEQ ID NO: 524763 - DNA, 100 bp, Homo sapiens
gacagtttgaggatgcagatgttgatcactgaaaatgatttatgcaagtttaaggtacctgtttcccaggcaactactgatcaggcatttctggacccca

SEQ ID NO: 524764 - DNA, 75 bp, Homo sapiens
atgcggtcactgaggcagagatccagcagctgaaaagaaagacctgaaggccttcattctcgtcagtggtccggc

SEQ ID NO: 524765 - DNA, 87 bp, Homo sapiens
gagccggagccgcctgggatgttcagtgtccctggccagtgtccttccacctgtccacaagcatggggaacatcttcgccaacctct

SEQ ID NO: 524766 - DNA, 90 bp, Homo sapiens
ggcgatggcggcggcggcgggagctgcagcggcggcggccgccgagacagtggccaagaacaaggaccagggcacctatgaggattatgt

SEQ ID NO: 524767 - DNA, 101 bp, Homo sapiens
aaagtgaagaaagtgatcataggagaaaaccatttcaggaacttgctactaccagcaccatgccctaccaatatccagcactgaccccggagcagaagaag

SEQ ID NO: 524768 - DNA, 74 bp, Homo sapiens
cgacggctacagctacggaagccgcatgcccagcccacggacttcgacttcctcaaagtcatcggcaaagggaa

SEQ ID NO: 524769 - DNA, 100 bp, Homo sapiens
gcggcttcctatgctatctctcttccgaggttctcacagagttcaggtgaatcaggtctaggaaaatcgactctcataaacagcctattcctaactgatc

SEQ ID NO: 524770 - DNA, 82 bp, Homo sapiens
cctggagggcgagttctcggtcaccatgtggtcctcaggatgaaattgattctgcagtaaagatgttggtgtcattaaaaat

SEQ ID NO: 524771 - DNA, 100 bp, Homo sapiens
caactccctcaaggactgcctttcctgatggagtctcccaggcgggaatgcaatggtgcgatctcgacttcactgcaatcttcacctcccgggttcgagc

SEQ ID NO: 524772 - DNA, 100 bp, Homo sapiens
acattttggaccagggagccctacagcgtctcttcaaaaaggttccaagttccccatcaagtggacagccccagaagctgccctctttggcagattcacc

SEQ ID NO: 524773 - DNA, 97 bp, Homo sapiens
ggcttcagtgcagacgcagtggtggccctggagcagtatgccagcaagggagaagccggagacccagggccccctggactacctgcctactcccctc

SEQ ID NO: 524774 - DNA, 85 bp, Homo sapiens
cgggagtggcaccatggacctgcccttccaggcctgtcgtgagttcaccacgcacgtcaccaacctcctccaggagcagagcagg

SEQ ID NO: 524775 - DNA, 75 bp, Homo sapiens
tttggcattgacatttaattttagggtcctttatatagaagggagagtaggacctgatcccaaccttgaagaaag

SEQ ID NO: 524776 - DNA, 90 bp, Homo sapiens
tgtgtcctggttgagggtctccagggttctttggggcccgagccaaggctaagtcgaaatgtggcccaaccttcttcccctgtgccagcg

SEQ ID NO: 524777 - DNA, 100 bp, Homo sapiens
cttggccgaaagggttgtagacatggcggccatcaggatcagtgtgcgtgtgaccaccatggatgcagagctggagtttgccatccagcccaacaccacc

SEQ ID NO: 524778 - DNA, 85 bp, Homo sapiens
cccaccgtgcagcggggcatcatcaagatgtcccctccagggcaggtgactgaggccgtgaaggtggccattgacgtcgggtacc

SEQ ID NO: 524779 - DNA, 82 bp, Homo sapiens
ccgggacagctaccggcgcatccttatggtctctaattaacagaagatggcaaagcccagccacagcagctatgtccttcag

SEQ ID NO: 524780 - DNA, 99 bp, Homo sapiens
cagatgcaagcaatgaggaatacagcctgtgggtttatcagtgcaacagcctggattgacatgtacgtggaggggacactggatctgctggaactgctt

SEQ ID NO: 524781 - DNA, 74 bp, Homo sapiens
gaaaagactcaggacggacaagcacagtcttcggaagataacatttgacaacaaggcccatagtggaagaatta

SEQ ID NO: 524782 - DNA, 96 bp, Homo sapiens
tttcactccaaccagaaagatgttgcacagagcattgaggatcaccatcaggaagtgattggtttctgcagagagaatggtttccatggcttggtt

SEQ ID NO: 524783 - DNA, 90 bp, Homo sapiens
cgcaacccatactattcggacagatggcacagaaaccgctgcgcctggctggagcggctctgggctccggaatcgcccgcagccggtact

SEQ ID NO: 524784 - DNA, 100 bp, Homo sapiens
ttcgagtgaccgagaccgcggccgggaccgaggatccgagtgaagcctgacaggaccggtgtggtcacggatggtgtgaagcactccatgaaccccttct

SEQ ID NO: 524785 - DNA, 75 bp, Homo sapiens
ccgccgtctgctgttacctctttgagaaagatcagtctaaagaaaaggagaagaaagtgaaaaaaacaattcctt

SEQ ID NO: 524786 - DNA, 83 bp, Homo sapiens
gtaaaccaagaagaaatccacagatttagttcttgctgtccccggcataggtccatctctgcagaagccatttcaggagtacc

SEQ ID NO: 524787 - DNA, 95 bp, Homo sapiens
tccatatttaagtagtctgcttcagcctttttcagatgtgttcagagcaacattgttttgttgacacaagcatttagaagaaagtttgtgattcc

SEQ ID NO: 524788 - DNA, 90 bp, Homo sapiens
catgtcttggagaaaacccatatatccgaatgattgctgctctctgaacactatagtcgtcgaatctcacaagcgtacggtctgatgaat

SEQ ID NO: 524789 - DNA, 123 bp, Homo sapiens
ccgagatgtctcgctccgtggccttagctgtgctcgcgctactctctctttctggcctggaggctatccagcgtacatgtcccagagcaagcacacggaggcccgggagctcatgtactcggg

SEQ ID NO: 524790 - DNA, 82 bp, Homo sapiens
agttccagtacatggggaagcgatacatagccaggatgtaatccctgttcattactacttaatacctccaccaacaaagact

SEQ ID NO: 524791 - DNA, 90 bp, Homo sapiens
agaccaagggacccctcaaacaaaaacagccaagcttttctgccaaaaaggcaaaagtcaacaactctagcttaattggagtaggctata

SEQ ID NO: 524792 - DNA, 75 bp, Homo sapiens
gggagggccaccaatgggacaagtttgtggagaaaaacagcgctttgagaagttgatggaacatttcaggaatga

SEQ ID NO: 524793 - DNA, 51 bp, Homo sapiens
aactgcagaggttcctctacagcaaggtggggaagctgaggcaggaagccc

SEQ ID NO: 524794 - DNA, 98 bp, Homo sapiens
gtctactgcaacttcaagtagtggaaggagtacagggaagtctataagctttgcaacagaattacagagtatgataccccaggcaggcacagtcttcc

SEQ ID NO: 524795 - DNA, 83 bp, Homo sapiens
cgcatgtgatcactctgggactcgtggggctgcagcaccgtttgaacgccatgaccctgtggatgggagaattactgagaggc

SEQ ID NO: 524796 - DNA, 82 bp, Homo sapiens
attccacagtgtcctctggaaaatggttttaaaatcaaagatgggaaaatcggagaaaattgcccttccccatggccagctt

SEQ ID NO: 524797 - DNA, 83 bp, Homo sapiens
cagcgtgcgttcagccctgggttgcaagaatgtagtaactctgatcagctacaaggaaaggaggaaagagtaaatgaagaaag

SEQ ID NO: 524798 - DNA, 80 bp, Homo sapiens
tctgcggccatggcggcgactactgccaaccccgatcacccggaagttcaggctgaattctgaaggcaaacttgagcaga

SEQ ID NO: 524799 - DNA, 83 bp, Homo sapiens
tcacatcccagatctcccactgcctaagtctctaattaacagaagatggcaaagcccagccacagcagctatgtccttcagca

SEQ ID NO: 524800 - DNA, 83 bp, Homo sapiens
cccagccatgtcatcttatctacgaaatgattcagacatgcggctcatgcagggggatgagatatgcctgcggtacaaagggg

SEQ ID NO: 524801 - DNA, 98 bp, Homo sapiens
gacatatgaaggactcattgatgaaatttatggcattcagaacaggcagcaaggcgaaccccatccctactcactggagctcagctttgatttttaac

SEQ ID NO: 524802 - DNA, 50 bp, Homo sapiens
ctcagatcctgcaaagtcctattgtgccggctgcggaagagatatcaaga

SEQ ID NO: 524803 - DNA, 50 bp, Homo sapiens
taccaattgaagaaccgctgtagcatcgccctgagcaactggtggtttgt

SEQ ID NO: 524804 - DNA, 75 bp, Homo sapiens
accctaataaggagccatggagaaaaatggatcttagggcgggatccacagcaccattgtttactgaccagccag

SEQ ID NO: 524805 - DNA, 90 bp, Homo sapiens
agagtttaaacagccaaaacagttcattcatattcagctgaatttgggtggtttgaaggatcacataaaggagatccagagatgccggcg

SEQ ID NO: 524806 - DNA, 51 bp, Homo sapiens
tgcttttcctcgctggggtgtacgactctttttgatcagaacaatgctgca

SEQ ID NO: 524807 - DNA, 75 bp, Homo sapiens
gaatgtgacacggacaaggatagttttggctgatgtggcttatttcaaaacctttgtccctcagttccaggaggc

SEQ ID NO: 524808 - DNA, 50 bp, Homo sapiens
ctttctcaacctcatcttctgggaaaaatggacattttcctctcccccta

SEQ ID NO: 524809 - DNA, 98 bp, Homo sapiens
tcctgacacacttggataccacccagcagatgattgctaattccttgaaggacaataccaccctcttgacccagacagagaaagagctggacccagat

SEQ ID NO: 524810 - DNA, 75 bp, Homo sapiens
ttcgccagcccgtgccgcgagcgcggcctgcaggagatgcaagtgctgctggaccaggcgggctgctgtatcgtg

SEQ ID NO: 524811 - DNA, 80 bp, Homo sapiens
gggccctggaaggggaaggaatcgtggagcagtactatatgtctgcgcgccacatggcgctgtccaaggcctttccagag

SEQ ID NO: 524812 - DNA, 98 bp, Homo sapiens
gggcagggacagcacgcacataatccccggggagaacccctttgatggagggtatctttcagatgaaggcattgaagcttgcacaagctctccagaca

SEQ ID NO: 524813 - DNA, 110 bp, Homo sapiens
atcgtgtgcctgatgatcacgcagctggctggcttcagtggaccactctggcaggctgccctgagcacgctcaaccccaaccccacggacagctgtcccctctacctgaa

SEQ ID NO: 524814 - DNA, 92 bp, Homo sapiens
cgcgtccgccgattcctcctccttggtcgccgcgtccttggctggcgtgccgccatggcatcagatgaaggcaaactttttgttggagggct

SEQ ID NO: 524815 - DNA, 83 bp, Homo sapiens
ctacagtcaagcaaaggacctggtcgtgatgagaggagatggattgaaaagcagaacagagcaacaagagcacaaagaaaaaa

SEQ ID NO: 524816 - DNA, 89 bp, Homo sapiens
gaacttttgacacggctttggaaacgacgtcatgtgttaggatgtgatggtggcaggtgggatggagagcatgtccaatgttccatatg

SEQ ID NO: 524817 - DNA, 90 bp, Homo sapiens
tgtgtgcagaggggattcaacttcaatttttctgcagtggctctgggtccagccccttacttaaagaatgctgtgtcctctgaagaaacc

SEQ ID NO: 524818 - DNA, 51 bp, Homo sapiens
atggcagcctgcagctaggactttaatgagaggagtcactcacaatttttg

SEQ ID NO: 524819 - DNA, 98 bp, Homo sapiens
ggtgtcccacctttttgggaagggcttccgagtggacctgccaatcaagtcggcccgctaccgtggccagtacaacacctatcccatcaagctcttct

SEQ ID NO: 524820 - DNA, 75 bp, Homo sapiens
gccttcctgggctgcatgggctctatcaaggaaaacaagtgtctgcttatgtcgaaaacaaccctttttgctgca

SEQ ID NO: 524821 - DNA, 100 bp, Homo sapiens
caatccgctctactggaatgtgagcctggaaacctggccggcgtcaggcacatcatcctggtcctctcaggaaaggggggcgttgggaaaagcaccatct

SEQ ID NO: 524822 - DNA, 90 bp, Homo sapiens
ctggggtccgtcaccgacctttggggaactgtttctccacagacactacccaaagcagtccttcactacagtggcagacagacctgaaaa

SEQ ID NO: 524823 - DNA, 75 bp, Homo sapiens
agtttttttgaagaagcaggatgctgatctaaacgtggaaaaacaacatggccaatctttcctaagctgctcagc

SEQ ID NO: 524824 - DNA, 90 bp, Homo sapiens
tctcctttaatgagtcggccgccgacaatctgaaacttaagacgaacaccaatcagggtcttcaggcctggaagattgaagacattccag

SEQ ID NO: 524825 - DNA, 98 bp, Homo sapiens
atttgttaaggattccaagtaactcttatttgggatgtcagagacgcccatgctcccatcctccctcatgctgctgaacacagcccacgagtatttgg

SEQ ID NO: 524826 - DNA, 75 bp, Homo sapiens
cgcgactccccccgggcccaaagatattagaaatggctactccccagtcaattttcatctttgcaatctgcattt

SEQ ID NO: 524827 - DNA, 100 bp, Homo sapiens
tgacggccaccaagattgccaggatggccgggacgaggccaattgccgtcgtggttcaattccagaattctttcatattatgaaaagaaagtttaccaac

SEQ ID NO: 524828 - DNA, 135 bp, Homo sapiens
ccagtagaatatgggatgatggagatgacttttgtatcttcagtgaatcaaggcgcccttccaggctgggaagagatgctgatttctgcgataaaatcagtaggtacattttttggaatgttcgctatgtgccag

SEQ ID NO: 524829 - DNA, 90 bp, Homo sapiens
gatatggctgctactgtgggcttggggataaagggatccccgtggatgacactgacaggtgtgattccaatccagggcgggatcctgaac

SEQ ID NO: 524830 - DNA, 90 bp, Homo sapiens
gcgctgcgctcgcgcccggatccctcaggatcttgctctgttgcccaggctggagggcagtggtggagtcatagctcatcaaaagctcaa

SEQ ID NO: 524831 - DNA, 100 bp, Homo sapiens
acgtaaaaggcctctataaaagggccagagctggggagattaaagacgcagtaaaacgcaggactcttcccgcttggattcgcgaaggtcttgaaaaaat

SEQ ID NO: 524832 - DNA, 90 bp, Homo sapiens
cttctgaagaaattattagtcctgaatccaataaagagaggcagcttggaacagctaccaagggggtgccagctggaaacagtgacacag

SEQ ID NO: 524833 - DNA, 90 bp, Homo sapiens
cgaggctgaggcgagaaacgaggggaatcccggaggcaagacacttgaggagaggcgctccagcctggacgctgagattgactccttgac

SEQ ID NO: 524834 - DNA, 74 bp, Homo sapiens
cctgcggcgtcggcagctgctgctccgaggttgatgccggcccaggatggatcagacctgtgaactacccagaa

SEQ ID NO: 524835 - DNA, 74 bp, Homo sapiens
agaagtgaaaaatggggagaaggatatccagacagccctaagtaaatccatttcggatggccactcgtggcatg

SEQ ID NO: 524836 - DNA, 101 bp, Homo sapiens
agcgaataaagtttatcacgccggggtactaggttttgacaagcttgcatcatgcgtgagtataagctagtcgttcttggctcaggaggcgttggaaagtc

SEQ ID NO: 524837 - DNA, 75 bp, Homo sapiens
catgcaggaggcctttctggtccaggagatacgtatccaaggcctggatgttcctaaactgagagagcactgcag

SEQ ID NO: 524838 - DNA, 100 bp, Homo sapiens
ttggctctttatggattccactgaatagattatgtggcgtctctggggagacctgtggcttctcggtatgctgatggtctgtttccacagctctacagag

SEQ ID NO: 524839 - DNA, 101 bp, Homo sapiens
actgtgctcggttcgcgaaagccattgctgacgaccaggtggtggacataatgcgagttaacgtggacaaggttctggaaagagaccagaagctctctgag

SEQ ID NO: 524840 - DNA, 98 bp, Homo sapiens
ccccgtcgcgccccccactctgaactcaagtcaccgtggagctccgccgccccgaaactttcaccgcgagcggtgagcaagaagaacccatcaggtga

SEQ ID NO: 524841 - DNA, 50 bp, Homo sapiens
tttatattgcttaggctactgtgcaaggatgatgctgaaaggaataacaa

SEQ ID NO: 524842 - DNA, 97 bp, Homo sapiens
catgtcaagccactcttcaatatggaagataagagacgagttgtactgctgtcacaggaaatggacgctggattacaagcatggcagctcaggcagc

SEQ ID NO: 524843 - DNA, 100 bp, Homo sapiens
gcagtgcttccatggcagaggacctctgccggaagagcgccatcattgagacctacgtcatggacagccggatcgacccagcctccggctgtgaccccca

SEQ ID NO: 524844 - DNA, 99 bp, Homo sapiens
gttcacgcacgggatccagagcgccgcgcacttcgtcatgttcttcgcgccctgaaacgcttcgttaagggactcaggcagtacgggaagaacttcttc

SEQ ID NO: 524845 - DNA, 75 bp, Homo sapiens
agcaatggggaacgctcacggactgtgtgtgagtgagatcattggccgagacctgagtggcttccctgcacctcc

SEQ ID NO: 524846 - DNA, 76 bp, Homo sapiens
aacctttccaacacagatgtccaagctgccaaaaattcatggccaagcaaagaaaggaaaaggagcagaatgaggc

SEQ ID NO: 524847 - DNA, 82 bp, Homo sapiens
gtgcagcggggagggacgccctctgccttcgaccggatcctggtgctgccttcacctgcctggagactgccttccgcctgga

SEQ ID NO: 524848 - DNA, 75 bp, Homo sapiens
acgaccgaggcggcacacaggtccattggaaatgctaaaacaaccaggaatgataatagcagccgttttgggaag

SEQ ID NO: 524849 - DNA, 97 bp, Homo sapiens
gagcagtcattagaattctcgcttgttctgcaaatccttattccccaaatccaccagctgaagtaagagaaacttgcccaggccaaagaagagaacg

SEQ ID NO: 524850 - DNA, 74 bp, Homo sapiens
gcatgagggtcggaccccagtaccaggcggtggtgcccgacttcgaccccggtcagaaagcaacattgaatgca

SEQ ID NO: 524851 - DNA, 75 bp, Homo sapiens
ctgaaccctaataaggagccatggagaaaaatggatcttaggataatgagcttcagtccccaagatctgcgaaga

SEQ ID NO: 524852 - DNA, 73 bp, Homo sapiens
ggagagggagggcaccgctgtcgtcgggtgtgagatggcagacaggtttgcaggaaaccctcagaaagggggc

SEQ ID NO: 524853 - DNA, 100 bp, Homo sapiens
gcaaacgacttctcccttctttgaactggaccccgcgagcaccagagtcggcgtaactatcgcctgacaggggaagacatgtaaggaatttgcataagac

SEQ ID NO: 524854 - DNA, 98 bp, Homo sapiens
gaaggaatttgttcacttgttgaacttctcgttcagttggcaagtactgccaaatctgtcgaaagggagataatgaagaactgcttcttctttgtgat

SEQ ID NO: 524855 - DNA, 75 bp, Homo sapiens
ggacctgcgctgactaggtccggggaagggttctccaaaaaatgtggaatcctttgcatctatgctgagacattc

SEQ ID NO: 524856 - DNA, 99 bp, Homo sapiens
ggacgatctgccactgacagctgtcccgccctacaggctgcgggtgatcgcagaagcctacgctaccaaagacatagggcctgattacattccaacaga

SEQ ID NO: 524857 - DNA, 100 bp, Homo sapiens
ccatgaggtcaaaaaggaaatcaccctgcttgagcaaaggaagaaacttggatttaactggccagaagcaggtattcaaagcagagaacaatccctgggt

SEQ ID NO: 524858 - DNA, 98 bp, Homo sapiens
gtggttgccctgtctgtcgtctgccggccggcccggaccctggacaccatccagctggctttcaagatactctctaagtggtggaggaacttcatccc

SEQ ID NO: 524859 - DNA, 101 bp, Homo sapiens
ctccaggctgaccccttgagcagcagtcagcacagcagggtggcagcactggaagcatcaggaaccctggctgctctctaccctgtggccttcagcagcca

SEQ ID NO: 524860 - DNA, 88 bp, Homo sapiens
cgcgccgtgcaactgctcatcctggcctacgtcatcggaaactggcgatggaatatgagaggagccctctggaaagaaaaggacagac

SEQ ID NO: 524861 - DNA, 100 bp, Homo sapiens
gtctcctctcaagaaatctcaagatattaaagttactgctgttaaaaaggaagaaatgttggctatttggcgatgagaggtggtgaacagtgaccatact

SEQ ID NO: 524862 - DNA, 50 bp, Homo sapiens
atctggaggtggtgaagctaatcaaatggaacgtgtgaaagaagaattgt

SEQ ID NO: 524863 - DNA, 100 bp, Homo sapiens
ccgggcccttcctcgaggcggtgtcccacctgccgcccttcttcggtatccagtcggaattctttattaacaccacccgagcaggtccagggacattatc

SEQ ID NO: 524864 - DNA, 100 bp, Homo sapiens
tggcaatgagagaagaagacaatcgcagtggaaaactgagtaatgctgcctttttatatggtcttggtttggtctacttccattataatgcatttcagtg

SEQ ID NO: 524865 - DNA, 80 bp, Homo sapiens
caccagggcgcgcagccgggccggcccgaccccaccggccatacggtttttagaacttcagccataaaaatgggcagaat

SEQ ID NO: 524866 - DNA, 100 bp, Homo sapiens
ccgcaaccattgacgccatgtcgggttattcgagtgaccgagaccgcggccgggaccgagggtgagcacctgcggatctgtccccagggctacacctgct

SEQ ID NO: 524867 - DNA, 50 bp, Homo sapiens
ctgatcgtcctgctgctgatggtgtgcgagcccataggcagcatgtcatc

SEQ ID NO: 524868 - DNA, 82 bp, Homo sapiens
actacggacctgtctgggtctcagccgccaaagaccccgtccggtagatgtgaagttcatttccaatccgccctccatggtg

SEQ ID NO: 524869 - DNA, 82 bp, Homo sapiens
ggacattctgaagggaggcaaggaggcggactgagcgctcccaattgggctcaccatggatgatgatatcgccgcgctcgtc

SEQ ID NO: 524870 - DNA, 90 bp, Homo sapiens
gtctgttagagttcgaaaagctgagaatcctcagtgtttgctagatgtgcaagacatcatcacaaggaatcagaaggctggtgtgtttaa

SEQ ID NO: 524871 - DNA, 98 bp, Homo sapiens
gttcaacctcagcgctctgaagcctgtttaaagaagaaaacccgtatgctagatttgaaaacaactaaagcgctccagcacatcagtcccgacgcttc

SEQ ID NO: 524872 - DNA, 75 bp, Homo sapiens
ggattctaaggcaacacttccttgaagaaacaagcttacagagccataagtgtgatccttggtgacaggtggaag

SEQ ID NO: 524873 - DNA, 98 bp, Homo sapiens
ccatgattgtgaggccttcccagccacgtggaactagacgaggtctcactatattgaccaggctggtcttgaactcctggccttaagcgatcctcctg

SEQ ID NO: 524874 - DNA, 96 bp, Homo sapiens
gggactgggtgcctctggcgtgcagaagcttctctcttggagtttgacctggatgtggttgctgtggtgaacgacacagtcggaactatgatgacc

SEQ ID NO: 524875 - DNA, 74 bp, Homo sapiens
tgccgggcaccgaggaccagctcaatgacagagatatgaatcaggttcttgatgcctatgaaaataagaagcca

SEQ ID NO: 524876 - DNA, 98 bp, Homo sapiens
gcaccatcatccacctcaagtacccgctgaactgctccgatcccactagtgagagccacccctttgctgtgaagttgcttgcgctctgtaagaaagaa

SEQ ID NO: 524877 - DNA, 100 bp, Homo sapiens
gcacgtcttccagctgcgcacggctgactggcgcctctacctcttccaggcaccgctcctggctggtgccccccgggagctcgctgtgcccgatggctac

SEQ ID NO: 524878 - DNA, 100 bp, Homo sapiens
ctgcaaccgggccgcatctggacggggcgccgcgcggcggagccgacgccgggacgactgggtttggattcagaagaggattattatacaccacaaaagg

SEQ ID NO: 524879 - DNA, 50 bp, Homo sapiens
atttccagatgccttgttcaacagattcagaatggacagtttagaagaac

SEQ ID NO: 524880 - DNA, 98 bp, Homo sapiens
ggctttggggaggagtccagggagcccagcacaggatgatcctttcaaaaataaagccttgttatttagcaacaacacgcaagagttgcatccggatc

SEQ ID NO: 524881 - DNA, 100 bp, Homo sapiens
agacatttgcctgtagagccagaggagttgcaaagacgggctaggcatcttgagaaaaaattcctggaaaacccagctgatgccttcacactcacctcca

SEQ ID NO: 524882 - DNA, 75 bp, Homo sapiens
aagaagcagccgccagttgggatcaaatgtgagcctatggatcaagcaagtccgcatgcaacaccatcgactctt

SEQ ID NO: 524883 - DNA, 98 bp, Homo sapiens
tcctgcaaaagtggaagcgaagccgaaaaaggcagcagcgaagactctgtgttgatccagacgctggccgagatgaccccaggaatgttccttgacct

SEQ ID NO: 524884 - DNA, 87 bp, Homo sapiens
gatgaatatgaccctatggaagcagaagaagctgaggatgaagaagatgggttaaagcacgaattgggagctctcagcgacatcacc

SEQ ID NO: 524885 - DNA, 120 bp, Homo sapiens
cgccctgttccccgcgctgcggcctggcggcttccaggcgcactaccgcggtgagaagccctaccactgcaactgggacggctgcggctggaagtttgcgcgctcagacgagctcacgcg

SEQ ID NO: 524886 - DNA, 95 bp, Homo sapiens
attcttacatcaagaggaaagattagactctgtgattcctcctaaggagtggaagccaagacagtgctatgatgacattgataatttgctcattc

SEQ ID NO: 524887 - DNA, 96 bp, Homo sapiens
cctggagagtccattcgagaaaagtgtgtcccggcatggatatccggaacaacctcactaggttgcatgagctggagaattgctctgtcatcgaag

SEQ ID NO: 524888 - DNA, 100 bp, Homo sapiens
ggcatgcccattggctgttatctagccttatctatgacagctgtgggccacagatttaaagtgtcaggaggacttcctttgatgcatgtgagaatttctg

SEQ ID NO: 524889 - DNA, 80 bp, Homo sapiens
tgaagagctggaaactatcatggacagagagaaagaagctgaatagccaggccagaagaaggaaggcctgtggtgagtgg

SEQ ID NO: 524890 - DNA, 85 bp, Homo sapiens
acccacgaatctgcccacccctcctgtaacccagcctgtttcacttcttgaatccacactggtgatagaccatacaaatgtgcac

SEQ ID NO: 524891 - DNA, 95 bp, Homo sapiens
accttattaatctcagggaactggatgtcagcaagaatggctacccacctttctgttctgagacccctcaagagacatataagaaggtgatgaac

SEQ ID NO: 524892 - DNA, 100 bp, Homo sapiens
gcggtgtgaagagagttcgcctgagccagatcccagatgtctttggtggacttgggaaagaggttgctagaagcagcaagaaaaggccaagatgatgaag

SEQ ID NO: 524893 - DNA, 75 bp, Homo sapiens
aacttcggacatagaggccaaccaacctttggaggaagatgagaatgtgcctactgctcctgatcctccaagtca

SEQ ID NO: 524894 - DNA, 74 bp, Homo sapiens
gaaaacaagttctgtgtttgaagacccagtcatcagttctggtgttgtttgggaggtgaaaccaaagcagaaat

SEQ ID NO: 524895 - DNA, 100 bp, Homo sapiens
gagaccccaaaggctatgtccaagacctgctccgctcccagagccgggacctcaaggtgatgaccgacctggaggacaagaacgagtggaagaactgcat

SEQ ID NO: 524896 - DNA, 98 bp, Homo sapiens
ccagcagagacagcaccaggggtcagcagggggccagctcaggacacacagacccagctggaactcggagtggcaaaattctattcagaagaatgcag

SEQ ID NO: 524897 - DNA, 88 bp, Homo sapiens
ggcggtgaacgagcgcgtgcagcaggctgtggcgcggcggccgcgggtccctgtgcgttttattgcgacctgccggtgggaactttgt

SEQ ID NO: 524898 - DNA, 101 bp, Homo sapiens
cgctggggtcgtggctgcgtcctctaggccaggatatggaatattatcttgtaaaatggaaaggatggccagattctacaaatacttgggaacctttgcaa

SEQ ID NO: 524899 - DNA, 50 bp, Homo sapiens
ccacacatcataaagctttaccagattctcattcagattgtggatgcctc

SEQ ID NO: 524900 - DNA, 100 bp, Homo sapiens
ggttagtggatgacagatgtgtggtgcacccagaggccggggaccttgccaaccctcccaagaagttcagagactattgcccagaagaaaagatgtttgg

SEQ ID NO: 524901 - DNA, 100 bp, Homo sapiens
gtgagggtgtacaaatacccctttgaattaattatggctgatttacaaaaggtgcaggtatgagcaggtctgaagactaacattttgtgaagttgtaaaa

SEQ ID NO: 524902 - DNA, 75 bp, Homo sapiens
gctttcccgaatctcagaatgccgcttgtaaacatataacataaaaatggcttccaaaagagctctggtcatcct

SEQ ID NO: 524903 - DNA, 80 bp, Homo sapiens
cacctgctggggacctgtttgacatcatccctccccagcgggtccatatggaatatttgctggtagggatgcctccagag

SEQ ID NO: 524904 - DNA, 74 bp, Homo sapiens
attgctgtgctgtttgatgcagttgatcactgatattccactcttgttactcctggatggagcacctctgatag

SEQ ID NO: 524905 - DNA, 100 bp, Homo sapiens
ctgcagcagcgccgccttttgtgctgcggccgcggagcccccgaggagttcaaagaaggacgcagagccagccacacagccccacaggtcctctttagcc

SEQ ID NO: 524906 - DNA, 103 bp, Homo sapiens
cactatttgttgagaaatgtgtggaatttattgaagatacaggctgaggttcaactatgctacctggaagcacaaagagatgctgttgagcagatgtccctca

SEQ ID NO: 524907 - DNA, 100 bp, Homo sapiens
gtctcatcaaggtgaacgggcggcccctggagatgattgagccgcgcacgctacagtacaaggtcctggaccggatcaaaggctcactgctgccccggcc

SEQ ID NO: 524908 - DNA, 100 bp, Homo sapiens
ctggataaagatgcaccggttccttttgcagggcttttttgaagaagaagaaggtaaagagtatatttataaagagcctaagctgacaggtctgtccgag

SEQ ID NO: 524909 - DNA, 83 bp, Homo sapiens
tcggcgccgcggctcttttctaaaagtttgagccccatatgggggttggcaggcagcagagaggcccctttcaaggtgttcgg

SEQ ID NO: 524910 - DNA, 100 bp, Homo sapiens
catcttctgggatttagtctgtcattgaaattatgagactatcattcaaatggaagcattatagttcttcggaaccattatgatctcaaaacgaaaggag

SEQ ID NO: 524911 - DNA, 75 bp, Homo sapiens
cggacgccgtggcccttgggagagagcaccttgtctcagtgcatccatgctgctgccgcactgctctaccccttc

SEQ ID NO: 524912 - DNA, 88 bp, Homo sapiens
aacggagagcgtagtgaccatcatagcccccctccatgcgcctgaaggcccgacccagcagccctggcttttccgtgcttacctgcag

SEQ ID NO: 524913 - DNA, 73 bp, Homo sapiens
gaccacataagcaaggaggccccagagccagtttgacaactttaaacgggtcttcaaggtggtagaggaaatg

SEQ ID NO: 524914 - DNA, 75 bp, Homo sapiens
tgcatactcacagagttagagagagggatggtgcctctaaagagagcaatcactacacttatggctgggattttg

SEQ ID NO: 524915 - DNA, 97 bp, Homo sapiens
actcagtattgcaccatgaagagatgattgggaaagctgggggagtgtctctgtcaaactgtcaaagctcgaaaaacagcagcagaggaaagaaaag

SEQ ID NO: 524916 - DNA, 100 bp, Homo sapiens
gagctctatagtcggagtggagaactgcaagccctgcatgaattccccaatgacatcttcacaaacgaggatagaagacaaggtgcggtggtcctccatg

SEQ ID NO: 524917 - DNA, 50 bp, Homo sapiens
gtcttcctcctccgccgttgacaggttcaaaatgagcctgtttggaacaa

SEQ ID NO: 524918 - DNA, 90 bp, Homo sapiens
ttaatggctgacaactcacagcctgaaaatgaaaaggaagcttcaggtggagacagcccgaaggtgaatgagtggcaggatgactggccg

SEQ ID NO: 524919 - DNA, 74 bp, Homo sapiens
ggagagctgttgtccctccgctatgaccttactatcttcttggaaacagaattgttctacaaaggtatccgccc

SEQ ID NO: 524920 - DNA, 82 bp, Homo sapiens
tccaaccacgacggggccgacgagacctcaggctgaattcggtcagaagagaatccatctgaatagccagtttccaggcacc

SEQ ID NO: 524921 - DNA, 76 bp, Homo sapiens
ttcaagatgtgttacttattcctgttattggacccagatttcaacactacacttgcacaatgtctttgaaaccaag

SEQ ID NO: 524922 - DNA, 98 bp, Homo sapiens
ccgatcctctccgtgggagccagcgagcctctctccctgatcttacgtgctcaagttgaggtactaaagaaaattgacattccatctgtctttattgg

SEQ ID NO: 524923 - DNA, 100 bp, Homo sapiens
ccggctgtcgctgacccaggagaagctgcctgtctacatcagcctgggctgcagcgcgctgccgccgcggggccggcagatcttgcattacgatgtttgg

SEQ ID NO: 524924 - DNA, 75 bp, Homo sapiens
gagccagcgagccacgggagcgagccagattttgcaagaacgaggctcaaggatgtgagggacacagtattgaca

SEQ ID NO: 524925 - DNA, 96 bp, Homo sapiens
atcgcggtgcagcgaatcaagcgggagttcaaggaggtgctgaagagcgaggagagctctcaacgaaatgtggaagtgtcagaacatgcttcggag

SEQ ID NO: 524926 - DNA, 90 bp, Homo sapiens
atctcgctcggctgcgggaaatcgggctgaagcgactgagtccgcgatggagccattaactcctgcgccctgggcaatggcggctgccag

SEQ ID NO: 524927 - DNA, 100 bp, Homo sapiens
cacttcttcccaagacagtgaattagaatgcccgaagtgacgaaaccaagtttaagccaaccaacggccgccagcccaattggcagctctccatcgccac

SEQ ID NO: 524928 - DNA, 101 bp, Homo sapiens
caagattttgaagaagcttgtcgaggatcttctgcaggacaactggtccttatcacagccagggtgaccacagaaaggactgcaggaacctgcctatattt

SEQ ID NO: 524929 - DNA, 100 bp, Homo sapiens
tggcggatctggaggagcagttgtctgatgaagagaagaaaaatggctacaaacttcctagcacatgagaagatctggttcgacaagttcaaatatgacg

SEQ ID NO: 524930 - DNA, 76 bp, Homo sapiens
caggtcctgagatcacccacccggcgcggcaacagtgcaggtaagaatgattgatgttggctgatattggagtgct

SEQ ID NO: 524931 - DNA, 74 bp, Homo sapiens
ttgaagacaatcgtcacttatacaggtatgtgtaatcctcgaaattatagtgacacacctccaacttcaaagag

SEQ ID NO: 524932 - DNA, 73 bp, Homo sapiens
tgctgcttggagccggcaccttgggttgcaatgtagctaggacgttgatgacagggtctcactctgtcaccca

SEQ ID NO: 524933 - DNA, 80 bp, Homo sapiens
agtggtcgcttcttctccttggatgttgagaaagagaaggaaacccacagttacctcagcaaagaggagatcaaagagaa

SEQ ID NO: 524934 - DNA, 111 bp, Homo sapiens
agaaaaaccatctcagaaaaaggaaaatgggcaatcgtcataaatttccgactgaaggtctctccagtgtagttcgaaatgtgtttgactttgattcctacaacaatgaca

SEQ ID NO: 524935 - DNA, 73 bp, Homo sapiens
ccatctacaaagaattctccttccacaattttaatcagtgtgctcactgatccgcctccagggccaccgccat

SEQ ID NO: 524936 - DNA, 100 bp, Homo sapiens
ccaacttcgtcctccggttgcgggggcggtgcgggcaaacctcgcgaggagaagaggacggccctgagcaagtcaccggactttgctgaggagttgaggt

SEQ ID NO: 524937 - DNA, 100 bp, Homo sapiens
tccggcttctgctgttgctcttctccgccgcggcactgatccccacagtcctccacaagcaacccagagaagtgtgtctctgtctgctagagcttggccg

SEQ ID NO: 524938 - DNA, 100 bp, Homo sapiens
agcggaggctgtagtggggctggtggtgcttccaactgcgggacaggaagtggccgtagcggcttgttggataaggatgaagatttgataaagtggaagg

SEQ ID NO: 524939 - DNA, 82 bp, Homo sapiens
ctggcgccgggtcccgcggggaaatacctggagtagaacagaaaaattattatgtctgtgttcccttgggactcattggaaa

SEQ ID NO: 524940 - DNA, 100 bp, Homo sapiens
gcgccccgcgcggcccgcccggatcgtggcctctcgagagcaagctgcctgccttgtgcttggctgtatgattttccctgatggctgggactcagatgaa

SEQ ID NO: 524941 - DNA, 100 bp, Homo sapiens
cagtcgactctggtactctggaagataacacctattatacagatttacttcagatgaagctggataacttaaagtaagaatgattgatgttggctgatat

SEQ ID NO: 524942 - DNA, 82 bp, Homo sapiens
tcgctggcaccccgaacgggttgcttcccccgctgcgaggattttttatcaagcagaaatgcatcgaacaacgagaatcaag

SEQ ID NO: 524943 - DNA, 100 bp, Homo sapiens
gggagccccacccatgtaccagctctataagcggacgtttcctgtgctgcttcgacttgcgtgtgatgttgatcagaaattccaacagaatgggtttcct

SEQ ID NO: 524944 - DNA, 74 bp, Homo sapiens
ggaggacggagccctaaccgcaacccgcgccgcgccgcgccgcgccggttcagcttgttggtttagatgaggag

SEQ ID NO: 524945 - DNA, 75 bp, Homo sapiens
ctggcctgttgcagccatggtgcattgcagttgcgtgttgttcagaaagaaataagcgggttttgaaaacaaaaa

SEQ ID NO: 524946 - DNA, 82 bp, Homo sapiens
cgggtttgggctggaggtcgccatggggcgaggcagcggcaccttcgagcgtctcctaggcagaagctcctcctggggtaga

SEQ ID NO: 524947 - DNA, 100 bp, Homo sapiens
ctgcgggcgaggagggcacaaggccaggttcccaagagctcagggagctctacccagtgctgatgcgggccttgcaggtggtgccgcgggagctcagcac

SEQ ID NO: 524948 - DNA, 75 bp, Homo sapiens
gccaaaatcacagctttgagtgagaaacaggacatgttcacattacagacttcaacatagcgacggtagtgaaag

SEQ ID NO: 524949 - DNA, 100 bp, Homo sapiens
ggccaagggctcaaggacaacaagagaacctgcaaccgtttccgcctcctgctagagcggcgaaccgtgggcagtgagctggagcagttcagcatggaga

SEQ ID NO: 524950 - DNA, 74 bp, Homo sapiens
tggcccagcagctgagatcacaggcaacatattgctgaacgttctgattccacccaatatgccatgtacgcgaa

SEQ ID NO: 524951 - DNA, 101 bp, Homo sapiens
tccacacgaaaccagatttgcctgaaaatggctcggccaagttcaagtctgccatcatggatgttctcgcagaagcaaatggcacctttgccttaaacctt

SEQ ID NO: 524952 - DNA, 50 bp, Homo sapiens
gaattaaagacaagaaggtttccaatcagtactatactggcaattgctgg

SEQ ID NO: 524953 - DNA, 90 bp, Homo sapiens
cagccgggagcagtcggaaggggttggagcgagggtccggagaagcattggcagacccgaggtgcacatcctcatgggctcctgttacaa

SEQ ID NO: 524954 - DNA, 76 bp, Homo sapiens
aattgtccaagccctgaatgccaatgtgtggtccaatgtagtgatgaagaatgcagagtctccttggaggtgacat

SEQ ID NO: 524955 - DNA, 59 bp, Homo sapiens
cctgctgggcttcgtccagatcgggaagggaattagtggtgggcccttggaaaaccact

SEQ ID NO: 524956 - DNA, 96 bp, Homo sapiens
gaaaggagcaagcctaaacgtcagaaatccagtactaaactttctgagcttcatgacaatcaggacggtcttgtgccttgccaaactgaagcccga

SEQ ID NO: 524957 - DNA, 75 bp, Homo sapiens
aggagtacttacaggttatgcactttgacaccctgctagatggcaagaaacctattggaattcgagacttaatta

SEQ ID NO: 524958 - DNA, 48 bp, Homo sapiens
ctgctgctgctgctgctgctgcagcagcaacagcaacagcagcagcag

SEQ ID NO: 524959 - DNA, 101 bp, Homo sapiens
gaagtatctgtaattcctgaatatttctcaggacctggtactccattaactggaaatgcagccactgaagaagaccattcctcaagaattttgtatccaag

SEQ ID NO: 524960 - DNA, 99 bp, Homo sapiens
aaaagtgtaatgaaaacaaatgacattgttcgatacagggtgtatgaggaagaagtctggaagaagaggaagaggaaagaaaaggagtcagggatggcc

SEQ ID NO: 524961 - DNA, 140 bp, Homo sapiens
gccctttaagtttatgctaggcaagcaggaggtgatccgaggctgggaagaaggggttgcccagagaatccaggagtcctgccaaagtggcaccaagtggctggtggagacccaggtgaaggccaggaggcggaagagag

SEQ ID NO: 524962 - DNA, 100 bp, Homo sapiens
aggcgtcgccgcatcccggacggtacttctgccactgctgctccgtggagatcgtcccgcgcctgccgataccggggagaccacgacgctgcctcctggg

SEQ ID NO: 524963 - DNA, 96 bp, Homo sapiens
caggaagggaacgtggaaagcgcatacaggaccctaaacagagcatcctggccagaacaagccaaggagccaagacgagagggacacacggacaaa

SEQ ID NO: 524964 - DNA, 100 bp, Homo sapiens
tcctgtgcagcgttataagatgctcatcccgcagctgaaggagagtctacagtggaatcccccaaagaaggtaaagggagcaagccttccccactgtctg

SEQ ID NO: 524965 - DNA, 75 bp, Homo sapiens
cagtaccagcgtttcacctaccttcccgccaacgagcggttctggtgaggttggaaggatgcagccacccggttg

SEQ ID NO: 524966 - DNA, 83 bp, Homo sapiens
aggcagacagcgagtggcgacgataaactgaaggctcagaagaggatgataaagaaaatgataagaccgaagaaatgccaaat

SEQ ID NO: 524967 - DNA, 82 bp, Homo sapiens
gaaactagcagcattatgcagaaactgaagaaaatgagaagccgcatggatgaaaaggttctcatgtatcagccatcttctg

SEQ ID NO: 524968 - DNA, 82 bp, Homo sapiens
ctacggtcctcacggccggcgcttacctctgctacaggctgcggttggatttctcacgatgtccagtgttatctccatgtct

SEQ ID NO: 524969 - DNA, 88 bp, Homo sapiens
gacagagctctgatagttgttccttgtgcagaaggggagtttatcaaagctttgtatgagtccgatgagaactgtgaagtggatccca

SEQ ID NO: 524970 - DNA, 83 bp, Homo sapiens
ttttgaaatcgacacacaaagaatagagttgagcctgtgggacacttcgggatggtactggggaagtatgactgttaatgaag

SEQ ID NO: 524971 - DNA, 90 bp, Homo sapiens
aactcgtgtccatcaaaatccagatgctggatgacacccaggaggcatttgaagttccaggtgtcaaattgagaaccaggtagatcccca

SEQ ID NO: 524972 - DNA, 82 bp, Homo sapiens
aaaggaatcgtatcgtatgtccgctatccagaacctccactctttcgaatccacattcatctcaatggaaggatcctgcctt

SEQ ID NO: 524973 - DNA, 83 bp, Homo sapiens
gctccctctgctcttcctcccttcgctcgcaccatgcaaactgtcatcaggagcttaaataggacagattttcacggcagtgg

SEQ ID NO: 524974 - DNA, 100 bp, Homo sapiens
ccacaggtgctaaagagagcagtaccctgatggagtcccttgcaggcgagaaccactgtctctgatcaacgtgcggaagaggaacgtggaatctggggaa

SEQ ID NO: 524975 - DNA, 74 bp, Homo sapiens
tgttttggatgcattctagaacacaggatgcagcacagaatgttggtagttcaaactgtattactttaatggaa

SEQ ID NO: 524976 - DNA, 75 bp, Homo sapiens
ctgtgtggattcttcagaaagtgaacttggcattttagatctaattcaaatacgcatctgggcccggaaagatgc

SEQ ID NO: 524977 - DNA, 75 bp, Homo sapiens
agacaggaggcagtagccaaacacccaggtgagcactgtgaggtgagtgctcgctcaggccgttgcaccccgggt

SEQ ID NO: 524978 - DNA, 100 bp, Homo sapiens
ggcgctccaccggcgtggtcaacatccctgccgcagagttggttagtctgctgctaattggaattgctgcgtggggcattggcttcgggctgatttccag

SEQ ID NO: 524979 - DNA, 75 bp, Homo sapiens
aaataaccacttaccccttctcaccgaggaagagcgggagaaagggcattgaatgccccagaggagcccgaaacc

SEQ ID NO: 524980 - DNA, 100 bp, Homo sapiens
gtcatggccgcagccagagcctgcccaactccctggactatacgcagacttcagatcccggacgccacgtgtcttctgggactctcctactcattgcttg

SEQ ID NO: 524981 - DNA, 83 bp, Homo sapiens
aaagaatgggagtcaagttgctttgtggaaaaaactcactggggatactacacctggccaaactttatgaaaactttatcagt

SEQ ID NO: 524982 - DNA, 113 bp, Homo sapiens
cgggatcgtgaccgagaccgtgaccgagagcgtgaccgagagcgcgaatatcgtcatcgttagaagatgagattgtggggaacctgggtgaaggcacctttggcaaggtggtg

SEQ ID NO: 524983 - DNA, 100 bp, Homo sapiens
ccggcctcctcagtgcgaagaagctgcagccgcacctggccaaggctccccctccggggctccgcgggacactggatctccaggttatccgcgtgcggat

SEQ ID NO: 524984 - DNA, 75 bp, Homo sapiens
ctggttagatcagtataattcatctgcagatacttgtactcatgcttattggggcattgacgttgtgaggaataa

SEQ ID NO: 524985 - DNA, 100 bp, Homo sapiens
gtggatttggggatggctataatgggtatggaggaggacctggaggcttcacaggctgctcaagaagccgagatcaatgccagaaaagccaaaaactctg

SEQ ID NO: 524986 - DNA, 98 bp, Homo sapiens
ggacaccgacgcgctcatctgctggagcccgcatttttgaaacattggggttgttggagtggttggattttccctggaattgagtgagaaattcagaa

SEQ ID NO: 524987 - DNA, 98 bp, Homo sapiens
ataaaacatcattggaaaacacattcattcataacactgggaaaacagggtggtgatgaagagtaaatcaaagagtttagcagaatgcttcccatatg

SEQ ID NO: 524988 - DNA, 74 bp, Homo sapiens
agcagaccttcaagatagacattgaccccgaggagacggaaacatgttcaaccaaatggcaaagtgggtgaaac

SEQ ID NO: 524989 - DNA, 87 bp, Homo sapiens
ccccacccattcctttaaatccggagggggaaaaaatcccaaggtctgcaaaggaaacatgccctgaactgtcacagaatgaaacca

SEQ ID NO: 524990 - DNA, 90 bp, Homo sapiens
gtcttgaatgactggaaactgattggaaactctttgggaaagccactcgaaaagttaataacgacatgatagtcactgacaacaacggtg

SEQ ID NO: 524991 - DNA, 100 bp, Homo sapiens
tggctctggtgctctgggaaatgacatctcgctgtaatgcagtgggagtaatgcctgaaaactcaaactttccatatcggcggtatgaccggctccctcc

SEQ ID NO: 524992 - DNA, 103 bp, Homo sapiens
gagcgctgcgcggcgcggcggccgggccctcgagacggggacgcatgagtctgagattcttccattcccgaatccagagaggaacttcgtccttccagaagag

SEQ ID NO: 524993 - DNA, 98 bp, Homo sapiens
agctcactacagaaaggatgagagaagaagagaatgaaggaatagttcaactacgaatactaagaacccaggatgtgatggtggcaggtgggatggag

SEQ ID NO: 524994 - DNA, 75 bp, Homo sapiens
tacacctcatccctgtacgggtgcctggcctcgcttctgtcccagtatcagtttttggaagaagcttttcaaaat

SEQ ID NO: 524995 - DNA, 90 bp, Homo sapiens
cggacgccgacatcatcagccgctgccaggtgatgtgtccaatctagatcccaacttctcatttgaaggcaccaaactggatgtggggaa

SEQ ID NO: 524996 - DNA, 76 bp, Homo sapiens
gtacaacttccccgcaggcggcgtgggcatgggcatgtacaacaccgacgagaaaaacgttgacctcttggcgaga

SEQ ID NO: 524997 - DNA, 75 bp, Homo sapiens
gagaagctggcatctgtgtccaacctggtcactgtgtttgagaatagcagatggcggcagctatgccatccacga

SEQ ID NO: 524998 - DNA, 83 bp, Homo sapiens
ggaggagctgtgcagccgcgaggaggcgcgggaggtgttcgagaacgaccccgagacggatgatcggctgaatgtaacagagg

SEQ ID NO: 524999 - DNA, 75 bp, Homo sapiens
ctgcccaccatacagaagtccttactgaggagtccagagaatgttattgaaaatatgagggaaggcaccattgga

SEQ ID NO: 525000 - DNA, 90 bp, Homo sapiens
caagtttgcagatcgggagcgcaaggtcgccctcaaggccatgatcaaaacgcatctgcagcatgtggggcggctcccactattccacct

SEQ ID NO: 525001 - DNA, 100 bp, Homo sapiens
gtgcccttcgccttcgtgcgcttcgaggacccccggtaattccagtgaattctgcaggctctcctgttggggatgtgccattcatccgatcaggattgct

SEQ ID NO: 525002 - DNA, 51 bp, Homo sapiens
agttggttctggaggcggcggacgcggaggggcctttacaacaactaaacg

SEQ ID NO: 525003 - DNA, 150 bp, Homo sapiens
aaacagcactgccaaatagcagaagaataccatgaggtcaaaaaggaaatcaccctgcttgagcaaaggaattatagctgaggtggtaccagtttaagaagtgagaacttcttcactgactgaaatttgcatatcaatccaaatcattgt

SEQ ID NO: 525004 - DNA, 82 bp, Homo sapiens
tgaaccgcgcggccgaaccctccggttctccaacggaggagctttttaacctctttccggtgaggtgggaactcatcttcat

SEQ ID NO: 525005 - DNA, 100 bp, Homo sapiens
cggggggcacgcagctgaagctcatcatgaccttccagaattacgggcaagcgctgttcaaacccatgaagtcctgaacgaggctgtgggggccctgatg

SEQ ID NO: 525006 - DNA, 101 bp, Homo sapiens
cttatgttgtctaattaacaaagaaccacagaattctggacaatcaaaacttaactcctggatacaggtgccaagctctcctgatgaaatgtgttctgccc

SEQ ID NO: 525007 - DNA, 75 bp, Homo sapiens
tccaagcagcaatccaaaagagtctcaaggatccttcaaataacttcaggtcactcagcctctgaagaagcttcg

SEQ ID NO: 525008 - DNA, 75 bp, Homo sapiens
gccgcgtcgaagacatggaccagggctacggaggcataatcaccagcaacacccgggacaataatacgggggcca

SEQ ID NO: 525009 - DNA, 50 bp, Homo sapiens
tgctccgtcgcccttgcctccagtgagatggaagattttcgaggtatagc

SEQ ID NO: 525010 - DNA, 100 bp, Homo sapiens
tgatatcggtggtaacgacggcctcagcaggcggggaagatgaaagggtgtggttcccaacaaaggtcagtttcccttggctgtgggagcccaggagttg

SEQ ID NO: 525011 - DNA, 100 bp, Homo sapiens
aagccctcctgaagcggcgcatacggaaaattatgtttgagaccttcaacaccccggccatgtacgtggccatccaggccgtgctgtccctctacgcctc

SEQ ID NO: 525012 - DNA, 51 bp, Homo sapiens
tatgtttgccagtggtttattttacaggcaagcaccggaagcaccccggcg

SEQ ID NO: 525013 - DNA, 98 bp, Homo sapiens
cgagaaaccgcagcactacacggagcgtggctgtgctgtctgcagagcagaaccacaaggttgacacgtccgtccactacaacattcctgagctgcag

SEQ ID NO: 525014 - DNA, 51 bp, Homo sapiens
ccaccaatagtcccagttatgctccagctgagagcagcaccaacaccaccc

SEQ ID NO: 525015 - DNA, 82 bp, Homo sapiens
ttcgatcgcctcgcgccggctgctctttccgggatgaccgagtgggagacagcagcaccagcggtggcagagaccccagaca

SEQ ID NO: 525016 - DNA, 100 bp, Homo sapiens
acctggatctcatcaaaaaggacaccagcaagctgttcaatgaggaggtctgggaggggctgaacgtggtgaagacaggccgagtgatgcttggggagac

SEQ ID NO: 525017 - DNA, 100 bp, Homo sapiens
aaaagatctaaagtcacccggcggccaaaggccagtgactaccaacgtttggaccagaaggccgccatggcatcagatgaaggcaaactttttgttggag

SEQ ID NO: 525018 - DNA, 74 bp, Homo sapiens
cggaacagccacagcagcctcccaaggagtctgcaagttgataacggaggagatgatggatcaggcaaatgata

SEQ ID NO: 525019 - DNA, 100 bp, Homo sapiens
cctaagagatctgcaccttcaggaccagttcgcagtagcagtggaatgggaggaagagagtgttattgtaaccctttgggctcaatccatgatcgttgta

SEQ ID NO: 525020 - DNA, 96 bp, Homo sapiens
tgaacctcaaactgaatcctctaaaggccccatacaatgaagtagacattggtggaaacatttaatgtgtcatgaagctttgtcacatatctgggt

SEQ ID NO: 525021 - DNA, 97 bp, Homo sapiens
cctccccagccatgtggaactaacgggcagctgctgctgcagtgggaggaggtaagttacccggatcgcctgtctccaggccctcacctagcctggt

SEQ ID NO: 525022 - DNA, 75 bp, Homo sapiens
gttcgaggtggtgggactcaccgctctggccagggtgcttttggaaacatgtggcccggccagataagatttcag

SEQ ID NO: 525023 - DNA, 100 bp, Homo sapiens
ggggaaagtgctaaagccgctgagcttcctgcctgacacagctcacttcaagaagtgcacaatgtcagaacgtggaattaagtgggcttgtgaatattgt

SEQ ID NO: 525024 - DNA, 75 bp, Homo sapiens
accaataattttcaaggaagaaaatcttagggttatcagtgagctgaatggaaaaaacattgaagacgtcattgc

SEQ ID NO: 525025 - DNA, 90 bp, Homo sapiens
cggctgctccccggtggcccaggcctcggactccgcggccggcccggcgcggcccagcgccctcagcgtttagtgggctacagatggcat

SEQ ID NO: 525026 - DNA, 89 bp, Homo sapiens
ggcgccgggtcccgcggggaaagatgtgatggagctgcttgaagaagatctcacatgccctatttgttgtagtctgtttgatgatccac

SEQ ID NO: 525027 - DNA, 100 bp, Homo sapiens
cttccctcggtctgggcttctctgaggcggcgagagatggtcaggtctggagctcgaccgggccaggtgcggattgatgagtacgattactccaagccca

SEQ ID NO: 525028 - DNA, 75 bp, Homo sapiens
ggttgtggatcccattcagagtgtaaaaggaaaggtgaccaagaatatggcccaggtgaccaaagccctggacaa

SEQ ID NO: 525029 - DNA, 76 bp, Homo sapiens
aaccggggcgaatcatggcggccgccaaggcctctccttccgatgaaaagagaaaggaagaatggactacagccac

SEQ ID NO: 525030 - DNA, 100 bp, Homo sapiens
agctgatggaacgcgtgatgatggagtttgtgagggaaacctgctcccaggagttgaaccccctacagaagctaagcagcatggacccggccatgctgga

SEQ ID NO: 525031 - DNA, 101 bp, Homo sapiens
gacatctatacccatctggtcaaatctctgcaggaatcagacagatcagccaaatggccgatgacacagtggcagaactggacaggcatctggcagtgaag

SEQ ID NO: 525032 - DNA, 96 bp, Homo sapiens
tagctttaggcagcttacaactcacaagtgcatgggagattcctgcatcttttgcgctctcaaggtgatggaatatgagaataggattcgagccta

SEQ ID NO: 525033 - DNA, 97 bp, Homo sapiens
ctggccctgatcatcctgctgggcttcgtccagatcgggaagggttggcgctgtacgtttatgagtacctgctgcacatcggtgcccagaagtcagc

SEQ ID NO: 525034 - DNA, 100 bp, Homo sapiens
ccgggacgcggagcccggagctggggcgacgaggcgattgcgggggcctgggctagctaagtaatcatttgtttgaagaacttgccatggatgtgtacga

SEQ ID NO: 525035 - DNA, 98 bp, Homo sapiens
atgaatctctgaacatcatcataaatgcccttgagggaaagctacttgatcaaacatccgatagtcacaaatttgaaaccgtgcttcagaatcccagc

SEQ ID NO: 525036 - DNA, 51 bp, Homo sapiens
cgcagtggtcgcttcttctccttggtgtcctgtgccctgaccctacaagat

SEQ ID NO: 525037 - DNA, 74 bp, Homo sapiens
atatatccgcagggttcggatgagaccagcaggtttggatgcatctgctcagactacttctcatgaactcacca

SEQ ID NO: 525038 - DNA, 50 bp, Homo sapiens
atcaccttgatttttaatcccacggccctagcacaaaacacagatcttaa

SEQ ID NO: 525039 - DNA, 100 bp, Homo sapiens
aagaagttgggccatcgaggtgtggacgcatccggcgaaaccacctacaagaaggctgaagtgcaatggcatgatctcggcttactgcaacctccgcctc

SEQ ID NO: 525040 - DNA, 82 bp, Homo sapiens
gaagaaaggaggtcattgaaggaggccctggcttaggcatgtcctctggatgaagacactgtttgaagagatcaaagcatca

SEQ ID NO: 525041 - DNA, 74 bp, Homo sapiens
cgaggctgcggtgtctgctgctattctccgagcttcgcaatgcttcagctttagctgcagctgcctctgttcag

SEQ ID NO: 525042 - DNA, 98 bp, Homo sapiens
aacagcatagagccaatcacattttgcacaagggcagtcaccatgaaaggaaactactaaagttcctggggaagcaaagtagaatttcataagaacaa

SEQ ID NO: 525043 - DNA, 75 bp, Homo sapiens
ttcgccttcgttgagttcgaggacccgcgatttttgcacgataagaatagcagggaattcctctactacaggaag

SEQ ID NO: 525044 - DNA, 98 bp, Homo sapiens
agcgcccggattggggatgagtatgcggaggacagctctgatgaggaggtgaacctggccctgcctgtgttcttcatcctggcctgcctcttcctgat

SEQ ID NO: 525045 - DNA, 88 bp, Homo sapiens
tactccctcttcaacttgtacatgagcaagctggagaagatgcagggttggtaacaaggaagatgctgagaaggaagtagctatttct

SEQ ID NO: 525046 - DNA, 74 bp, Homo sapiens
cagtctacgagcttgagagaattctgaacagggctgaagggtatgtgattggcagctgtattaaacacattcca

SEQ ID NO: 525047 - DNA, 100 bp, Homo sapiens
cagcctgaccagtggctctgttttcccacaacaggtgtctttcctgaagactatcttcccgtctcaaaatggacatgatggatccacggatgtacagcag

SEQ ID NO: 525048 - DNA, 83 bp, Homo sapiens
agcatgcggaaggcattgctgggagcctgaaaactgtgaatggtccgagctatacctgtggacattggtttctccattgaaga

SEQ ID NO: 525049 - DNA, 98 bp, Homo sapiens
tttgcagttcctgtcaccgcctcttccctccgtgagcgctggcctgggggaaccaaggccccctgatgttgaggtctggagcccccaactcccttgac

SEQ ID NO: 525050 - DNA, 90 bp, Homo sapiens
catcatcacggatgctgtgaaccaggtgggaaagcagtgccactctccgcttcacagatgccccctgccaagatgtcagtgatgctgccg

SEQ ID NO: 525051 - DNA, 100 bp, Homo sapiens
cggcgcaccatgtcatcgtcaccgtgcccttaggtactgggcctaatcgctacgtgcctctttggctatgatgcctatgtcaccttccccgttcggcagc

SEQ ID NO: 525052 - DNA, 99 bp, Homo sapiens
ttcctacctaaaccagtcatatggcatggacaatcacagtggtggtggtgggggtagcagaactgataaatttcaaacggaagagagtggcagcattta

SEQ ID NO: 525053 - DNA, 100 bp, Homo sapiens
aaggctccttcagtgagcaaggcatcaacgagtttctcagattctcattcagattgtggatgcctcgtcagtcatcacttgggatttcgacgtgtgcaaa

SEQ ID NO: 525054 - DNA, 104 bp, Homo sapiens
aagcagggcagcagtgctctggaggtggcagaatcacagctggtgttaacgaggtttttcgttggaatatacgttgcacatttatggcgattctgagtgtgagg

SEQ ID NO: 525055 - DNA, 139 bp, Homo sapiens
cttcgtttagttgcgctccatggacagatcaacgaacctggacattgaggagctcaagaatcttttagctgaaaaagtagagcagctgatggaatggagttccagacgctcaatcttccgaatgaatggtgataaattc

SEQ ID NO: 525056 - DNA, 100 bp, Homo sapiens
cttcggccatggaagctgccggcagccctgcggctacggagacaggtgctggagaatctggtaaaagcaccattgtgaagcagatgaggatcctgcatgt

SEQ ID NO: 525057 - DNA, 100 bp, Homo sapiens
cactgatcccccgaagagcttctgtcgccgctctaggagagaagaagaaggaggttcctgctgtgccagaaacccttaagaaaaagcgaaggaatttcgc

SEQ ID NO: 525058 - DNA, 82 bp, Homo sapiens
gcagttcttgtttgtggatcgctgtgatcgtcacttggtaccgggaagccagtgttgaagtgatggagataatgtctcgttt

SEQ ID NO: 525059 - DNA, 74 bp, Homo sapiens
gcgggcggccggtcgggcggggcggcggcgctgacaggcctctccttccgatgaaaagagaaaggaagaatgga

SEQ ID NO: 525060 - DNA, 76 bp, Homo sapiens
ctcgagtctacctggatgaaaactacaaatcccaggagcacttcacggtgtgcattgtgcagaagcgggacacgga

SEQ ID NO: 525061 - DNA, 82 bp, Homo sapiens
gcgagctctgctagcgcaggccagatgagcagcaccagcagtaagagggctccgaccacggcaacccagaggctgaagcagg

SEQ ID NO: 525062 - DNA, 95 bp, Homo sapiens
ccaccatgtcagacgcagccgtagacaccagctccgaaatcaccaccaagggaaagcaggcaggatgggagagtcgccgatagaaccacctcttc

SEQ ID NO: 525063 - DNA, 74 bp, Homo sapiens
agggagagccgccggaagtattgacggaaagcttgaattacctacatggttcctaaagagaaagatgaaatggt

SEQ ID NO: 525064 - DNA, 75 bp, Homo sapiens
gcagaccagaatgcaccctattttaaacccaaagtaaaggtatctttcaacttagaccatgctcagcctccaagc

SEQ ID NO: 525065 - DNA, 101 bp, Homo sapiens
cgtggacgccgccgaagaagcatcgttaaagtctctcttcaccctgccgtcatgtctaagtcagagaagaagaaaggagggcgcgggctaatgaccgagaa

SEQ ID NO: 525066 - DNA, 82 bp, Homo sapiens
cgcggcggcagcagcagtgagagaaagatccccagcaggccctcaaggagctggctaagatgtgtatcctggccgactgcac

SEQ ID NO: 525067 - DNA, 74 bp, Homo sapiens
gttccaggcacgttaccggcagctggccataggaaaaggatacagagtagagtttcatgaacctgaaacttggt

SEQ ID NO: 525068 - DNA, 83 bp, Homo sapiens
gtccagctcgcccagctcgcccagcgtccgccgcgcctcggccaagggggaaaaaaatagtggctttgatgtcctctaccata

SEQ ID NO: 525069 - DNA, 90 bp, Homo sapiens
gaagagttgtcccagctcggcccgcgggggagccccgggagccgcacggccatgtagggcaggaccgggtggactttggccagactgagc

SEQ ID NO: 525070 - DNA, 75 bp, Homo sapiens
ctggagggaaagtgccgctttaaggagaactgcagcagcagtgttgtactgctacttctataaacggacagccgt

SEQ ID NO: 525071 - DNA, 98 bp, Homo sapiens
ccatggacgacgaggaggagacgtaccggctctggaaaatccgcaagaccatcatgcagacaatgcagatcttcgtgaagactctgactggtaagacc

SEQ ID NO: 525072 - DNA, 100 bp, Homo sapiens
gttttcagaggcatagaatcttcaggaaaatactggagttcctgagatctcaaggcaattaagttggaatatgcaaggttggttaagttggcccaagaag

SEQ ID NO: 525073 - DNA, 50 bp, Homo sapiens
cgcgaccagaccggcccccccgagttcctgggcttcccgatggactcgag

SEQ ID NO: 525074 - DNA, 82 bp, Homo sapiens
gtttttcgaagatgtagtgtggcaggatttgattactgccatgaagaaaatggtgagacatggaatccattaaaattgcatt

SEQ ID NO: 525075 - DNA, 82 bp, Homo sapiens
ggcgccctacagcctactggtgactcggctgcagatgttaaaaagtgctctgggtgatcggattaaagaaaagactgaccat

SEQ ID NO: 525076 - DNA, 100 bp, Homo sapiens
ttaataatgacaatctcctcagggaaggggcagcacaatagaaaatgctgctgaagaacctagagtcttatgtattatacaagatactactaattcaaag

SEQ ID NO: 525077 - DNA, 83 bp, Homo sapiens
ctgtcgccttcgcctcctaatccctagccactatggtttacaaaggaggaaaacgacttcttctagatttttttttcagtttc

SEQ ID NO: 525078 - DNA, 87 bp, Homo sapiens
gcccacagctgcctacagaaccgtcccaaaatatggcaaagaaacctattctgaggctgctctttggcgtaaattgcaatcgattag

SEQ ID NO: 525079 - DNA, 100 bp, Homo sapiens
ccgggggctgctcagactcaatgacatggcgtccaccgatgacggcacactacagtcccgactagggccaagccacagacattgccatccaggcagagga

SEQ ID NO: 525080 - DNA, 100 bp, Homo sapiens
gcagggaccagcagttactgggaagagacattttaaatccaaaggatgtgattagtgtccagctggaagacactacctcttgcaaaactttttgcagcct

SEQ ID NO: 525081 - DNA, 97 bp, Homo sapiens
tcggccccgcgcccgcccaggggtcgctgtcgcctgctgctggctcctcactgcatgttggcagataaattgaacatgactccagaagaagctgaaa

SEQ ID NO: 525082 - DNA, 75 bp, Homo sapiens
ctccagtgatgacgcaggccttaaggagaaagtttcagggtgtccgcaatgttgccagtgtctgtctgcagattg

SEQ ID NO: 525083 - DNA, 75 bp, Homo sapiens
cttaaattcaagaaggagccctgtcccagagcaaatttttcagaacataaaacaagaatatagtcgttatcagag

SEQ ID NO: 525084 - DNA, 100 bp, Homo sapiens
gttttcagcatatgtagtacttcagaggaagaattaaggggcatgttggtgcatttaactacaaaaccagagcatctgctgcacccaagcctgagccggt

SEQ ID NO: 525085 - DNA, 101 bp, Homo sapiens
ggagtgatcgtcaataacaccgagagggcagcaggatgggtgtggaagcagtgatggcacttttggaggggaccccagataccccagcctgtgtagtgagc

SEQ ID NO: 525086 - DNA, 51 bp, Homo sapiens
ctggatggcacctgagatgatcaacgataatgttaattcaagactctcgaa

SEQ ID NO: 525087 - DNA, 73 bp, Homo sapiens
ccgggcccggcgccgccgcccgcagtgtcaacctgtgtctgctgctgactggtccaaggatattcgaacttgc

SEQ ID NO: 525088 - DNA, 50 bp, Homo sapiens
ccaagaccatccctggctgctggtcaggcagcagttgagtgaaatgaaga

SEQ ID NO: 525089 - DNA, 75 bp, Homo sapiens
cgcgagttcctgcgcggctgcggggcttccctgcggctggagctcatatgttagatttgatatcattcgaaggat

SEQ ID NO: 525090 - DNA, 125 bp, Homo sapiens
ggacgctccgtggatgaggctctgcggctggtccaggccttccagtacacagacgagcatggggaagagcatgaataatctttcatttagtgagctatgttgcctcttctgctgtccaccttgtc

SEQ ID NO: 525091 - DNA, 100 bp, Homo sapiens
atgacccatgctctggagtggcccagcctaactgcccagtggcttccagatgtaaccagtggactgcccctgatggtgattattcataaatcctggtgtg

SEQ ID NO: 525092 - DNA, 100 bp, Homo sapiens
catccagaatgagaacacgatgccacgcgtgctggaggcgctgctgccgctgaagggcctagaggagcgtgtggcagccgccgtggacctgatcatcaag

SEQ ID NO: 525093 - DNA, 98 bp, Homo sapiens
aaactggaagatctgagatctaaagctaaaattgcctttggacagtctatggatctacattataccaataacgagaaaaagcttgtggtgaagggggg

SEQ ID NO: 525094 - DNA, 100 bp, Homo sapiens
tgatgtggtaggaaaaatccgcagagaaattcagaacctcaagcttttcaggcatcctcatataattaaactactccccatccccaggatgtcaacctca

SEQ ID NO: 525095 - DNA, 87 bp, Homo sapiens
gtgacttgcagtcatcatccattaccacaaaattagatgaataatacggcagctagtccaatgtctactgcaacttcaagtagtgga

SEQ ID NO: 525096 - DNA, 100 bp, Homo sapiens
gcagcaggaccgacggcagacccagcagccagagagtgaaagttttcggctttgtgagaaaccttaccatcaaacacgatggccagcaacgttaccaaca

SEQ ID NO: 525097 - DNA, 100 bp, Homo sapiens
ctgggcatcaccttctggaatgtcctgatgagctcattgagagaaccatgatggtcaattgccatgcacacttctgggagatacaactcgtcaacgaatc

SEQ ID NO: 525098 - DNA, 83 bp, Homo sapiens
taccattcagatggtgactatgtgcctaagtgtctagagagctgagtgggttgcctcggatcggccaggcctggatatcagcg

SEQ ID NO: 525099 - DNA, 83 bp, Homo sapiens
tgtggaactgaacttagctcgacggggctgaccgctctggcccagggtgacaatgcagatcttcgtgaagactctgactggta

SEQ ID NO: 525100 - DNA, 83 bp, Homo sapiens
accacatagacatttacgcggatgtcggcgaagagttcaaccaggagaacgtatttaccgggcagtcaaagatctattcctac

SEQ ID NO: 525101 - DNA, 98 bp, Homo sapiens
atttctgagtattgtctttatatcctgacactatgaatgctacttggatgcctcttaaggtttctgtgtggagacagtagaatataaaaataacacct

SEQ ID NO: 525102 - DNA, 75 bp, Homo sapiens
gagaggctgggccaactccagcacgggctgcgggacaggctttcatgagaaggacaagaagccatattgccgaaa

SEQ ID NO: 525103 - DNA, 100 bp, Homo sapiens
agacacggcttcccccaaggaatatacagcggatgtgatgctggtacaacccagagtagaatttattctgtctttcattgaccacattgctggagatgag

SEQ ID NO: 525104 - DNA, 75 bp, Homo sapiens
cctcgccccatttgcgacagcatttgctacctgctccagctggaaacattgcccaaagaagacctcatcaagttt

SEQ ID NO: 525105 - DNA, 100 bp, Homo sapiens
taccagtcttccctggcaagattcttctgaattgtgctgccttggccaaaagagatacagtttatgtaacttgatggaagaaaatggaattactccaaaa

SEQ ID NO: 525106 - DNA, 96 bp, Homo sapiens
ccctgctgaaatcgctgggctgcagattggagacaagatcatgcaggtgtgcggccgcctgagcccgagccaggagcactagagagggagggggaa

SEQ ID NO: 525107 - DNA, 75 bp, Homo sapiens
tcgaggtggactatgaggctatccgcagcgagatggagcagctcaaggagcttcttccagaccagctggtcttgc

SEQ ID NO: 525108 - DNA, 75 bp, Homo sapiens
gtcgaccccggcccggaggaggctcatgcgggatttcaagcggagagaacattgaaagtattctctaagctattt

SEQ ID NO: 525109 - DNA, 75 bp, Homo sapiens
tcggccgtcaccttctccagctccttcattccccagcagtctattatcctcccagtccacaacgctgaaccgtgg

SEQ ID NO: 525110 - DNA, 120 bp, Homo sapiens
ccgagccgcagccgagcggccgtgggcccgggcggcgggcggagacgtgggcgccctccccgccaaggcccgtgcgagaaatggaggcaaacgaccattttaactttactggccttcccc

SEQ ID NO: 525111 - DNA, 100 bp, Homo sapiens
tcgtctggtccctgttcaacaccctcttcttgaactggtgctgtctgggcttcatagcattcgcctactccgtgaagtcctgtgcctcctgattgctgag

SEQ ID NO: 525112 - DNA, 83 bp, Homo sapiens
ccagtgacgggtctggagtgcgtgggggaccggctgttggcgggccctgggctgcatcttgtacctgctgtgcttccggcagc

SEQ ID NO: 525113 - DNA, 97 bp, Homo sapiens
ccagctgaaagaggaaggtcttctttatactgcagtgatattggacctgatcccaaccttgaagaaagtcctaaaagaaaaaatattacatatgagg

SEQ ID NO: 525114 - DNA, 101 bp, Homo sapiens
ccgcctccgcctcccaggatgagctgagagcttcaggatggttcgtactaagacatggaccctgaagaagcactttgttggctatcctactaatagtgact

SEQ ID NO: 525115 - DNA, 82 bp, Homo sapiens
ctcttgatgaagaggctttcaaagtacagattgaccgactcatcagtcacggggccgacatcctgaagcctgtaatgctcag

SEQ ID NO: 525116 - DNA, 101 bp, Homo sapiens
ttacacccgaggtccctctttggggtggctctttgctaagtgctgctgttgcttcccgtgtagagggccctcatctttgtgtcccatggagccggagagca

SEQ ID NO: 525117 - DNA, 82 bp, Homo sapiens
gcgccccgcctcccccgtccggtccctctctccacggtaagggcaattctgtggtgttcttggtcacacatttatggagttt

SEQ ID NO: 525118 - DNA, 100 bp, Homo sapiens
gttttcgcctgcagctgctcaccggcaagaaattatagagcagcttctatcaaatattttccacaaggagaaaaatgagtcagccatagtcagtgcaatc

SEQ ID NO: 525119 - DNA, 105 bp, Homo sapiens
gggacggcaactctgatgaccgggtcttgttggatctgtctgccttcctcaagaggcaccttctctttcatcatcgaaacctggagagaggagttaggagaccag

SEQ ID NO: 525120 - DNA, 100 bp, Homo sapiens
gttcgcgtctctctgctgcggcgcggggaccgctgtgctctcggtggaagaagactacctgtttgaaaaagcagaagtcaacttttgggccgagaccctg

SEQ ID NO: 525121 - DNA, 82 bp, Homo sapiens
cttggactgagtcctgcaggacacaggacacagctctctgcctccatgtcaccacctttgaaggactgactgattccctcgg

SEQ ID NO: 525122 - DNA, 100 bp, Homo sapiens
cagcgcccctggtaactgacaaggaggccaggaagaaggttctcaaacaaggaaagaccacagcaagattctttcattcgtctcctcctagcctggggga

SEQ ID NO: 525123 - DNA, 100 bp, Homo sapiens
gacgtgcggcccagcgagttggtcggtcccggggtcacccgctacgggaagcaggcctcgccacagtgttcacttggcaagaagagtgcttcaattagaa

SEQ ID NO: 525124 - DNA, 82 bp, Homo sapiens
gaacgggacgcggaactggtgtaccctggtggacgtgcacccagaggaccaggcggcggatcagtggtcaattggtcaggac

SEQ ID NO: 525125 - DNA, 100 bp, Homo sapiens
tattcttcgcactataggaaaagaagccttttcatatcctcagaaacagatcagggagctgattttggatggatctttacagttgatccaggaaggtctc

SEQ ID NO: 525126 - DNA, 100 bp, Homo sapiens
ccacgtcacgcacacgctcggcgctgcgatccgcgcatataacgacggccgaagccctgcagcccacgctacagccggagatgcagctcgagcacggggc

SEQ ID NO: 525127 - DNA, 50 bp, Homo sapiens
gtttctaggaaaggccggacaccagctcaccatggatgatgatatcgccg

SEQ ID NO: 525128 - DNA, 82 bp, Homo sapiens
agcactcggcactggccacttgcaggaatactcccccagttgcaagaggcgcaggaccgtggaagacttcaacaaattctgc

SEQ ID NO: 525129 - DNA, 75 bp, Homo sapiens
gggggagcggcgttggaggccaccgtttccaggtcttcagaactactagcagataatttggggggacttcatatt

SEQ ID NO: 525130 - DNA, 82 bp, Homo sapiens
tttattccacgaggaggagtacctggaaattagagccaaagagttcaagacacgtctggggatctttcttcacaaatcagag

SEQ ID NO: 525131 - DNA, 100 bp, Homo sapiens
actgggagggcaacgagcacaacaggagctacgaggagttggcactcaaggagttgcccctggtcctgtaattggacttcaggcaccatctactggtctt

SEQ ID NO: 525132 - DNA, 74 bp, Homo sapiens
atcctatggctcaaagaaagatgattattgggaagccgtgtccgccttttaagattgtgattctggatgaagca

SEQ ID NO: 525133 - DNA, 75 bp, Homo sapiens
ggaagtgaaaacctccggctccagcgacaggctacgtgtgcgccatctattccagaggggagcttcaccacttca

SEQ ID NO: 525134 - DNA, 98 bp, Homo sapiens
tccggcatgcaaaatctggaggtacagcacttcacgttgcagctgctaaaggctatacggaagttttaaaatggcgtcttttcagtctactctaccta

SEQ ID NO: 525135 - DNA, 78 bp, Homo sapiens
cagaaaggagaacaccttatttcagtgattcgcctttgccagtctcatctcgtgtctgctttgttaagttccatgatc

SEQ ID NO: 525136 - DNA, 83 bp, Homo sapiens
tagcagctgttgggccaactacacagaccttactccccttagaacagggatatctgtgtttgccttacatggcattgcagcag

SEQ ID NO: 525137 - DNA, 90 bp, Homo sapiens
gtattctcagagtaaaagttgtttctggaattgatctcgccaaaaaggacatctttggagccagtgaattttgaagattgcaccggtcga

SEQ ID NO: 525138 - DNA, 98 bp, Homo sapiens
acaaatgctctccacccctagagttcttggatgactctgactctcatttagaaatccaaaagttgtggaagaaggactctgggaaaatggcctttcct

SEQ ID NO: 525139 - DNA, 50 bp, Homo sapiens
gggacaccccggaagctgggaaatgaaaagcacttggttctgcttcgaga

SEQ ID NO: 525140 - DNA, 50 bp, Homo sapiens
gaaagcaagtgaatacgagtcagaaggctgcaaccccaccctatggatga

SEQ ID NO: 525141 - DNA, 96 bp, Homo sapiens
attatagcacaatatcaacctgaagacacatcaccttcactttgggatatggaatttgataagcagttagccacagaatatgaacaaccccttgag

SEQ ID NO: 525142 - DNA, 76 bp, Homo sapiens
cagagatgcaaaaatgcaccctactccagcatcgcaccccaagaaaccagtgaactttgaggcgctgatcatcacc

SEQ ID NO: 525143 - DNA, 74 bp, Homo sapiens
tatccagtttgagccatcggatctaagatccaaaagatttcttctggtgaatacattcagatgtctggtcgtgc

SEQ ID NO: 525144 - DNA, 100 bp, Homo sapiens
tcaggagctgaagccctttgtgactgcaatctcgaggttttgaacgaagaatgtgatcagaactggtacaaggcagagcttaatggaaaagacggcttca

SEQ ID NO: 525145 - DNA, 100 bp, Homo sapiens
ctgtgcccgggcctgcaccatgagcgtcccggccttcatcgacatcagtgaagaagatcaggtatgactgattttcccaaaatattttgtgaaacttctc

SEQ ID NO: 525146 - DNA, 83 bp, Homo sapiens
ggagttgtctgtgcagatgtacgcccaagccgccctggatggagactcccagtgctactatatcggggccacagatgatgcag

SEQ ID NO: 525147 - DNA, 75 bp, Homo sapiens
gaaatcttagataagaaggttgagaaggtgacatttacaaagaggaaatttgggttgatgaagaaggcttatgag

SEQ ID NO: 525148 - DNA, 100 bp, Homo sapiens
gaactcgatttatatttggcatactttgtgcatgcagcaggaataagacgagttggaagaagacctgatcaacaacttcagggtgaagggaaaataattg

SEQ ID NO: 525149 - DNA, 115 bp, Homo sapiens
acaaaaccaagcgaggccaggccgctctggaccgtctcaaggtgtttgagaagtcccccctgcgggtgaagaacttcgggatctggctgcgctatgactcccggagcggcaccca

SEQ ID NO: 525150 - DNA, 97 bp, Homo sapiens
gaagatcagctgcagacaactgaggaatcctttgcaaaggaactgttgaaaaaatgtcatcaatgtgtcgaaaccattgtgaaggctaaagaccagc

SEQ ID NO: 525151 - DNA, 75 bp, Homo sapiens
ctgggacccaggctgagagcgcccagagcaacagatcagacactcctctaatttacaaagcagtgcccagctggt

SEQ ID NO: 525152 - DNA, 95 bp, Homo sapiens
gtccgattagccttttctctgccttgcttgcttgagcttcagcggaattcgaaatgtgcctccggagccagcgtggtggccatagacaacaagat

SEQ ID NO: 525153 - DNA, 87 bp, Homo sapiens
ccccgaactccaggacagcatccaggcctcattggacagcattcgaggtgtggacactgccagcggctgcagccgacttggaatgac

SEQ ID NO: 525154 - DNA, 80 bp, Homo sapiens
gcacttggagtccggacatctgaaacttgcccaagaagatgaaaggattgttcttgttgacaacaaatgtaagtgtgccc

SEQ ID NO: 525155 - DNA, 75 bp, Homo sapiens
aaaatttcaaagtaaaggatattattagaattctgccatgcaaacctctggggccggagagtctcctgcttcgtg

SEQ ID NO: 525156 - DNA, 73 bp, Homo sapiens
gggagcacagggagttcaagctagacaagaagtaccagaggccacaggaaatggtggagtcaatgaagaaagt

SEQ ID NO: 525157 - DNA, 49 bp, Homo sapiens
ggagggcaagaagggcaagaagcccccggtccctgagaagcggccccct

SEQ ID NO: 525158 - DNA, 100 bp, Homo sapiens
acaataagtgtgtgtcctgtatgtctgagaaaccaggaacctacaagcagcaattggcgcctattatgactttgagagcccaaacatcagtgtgccctct

SEQ ID NO: 525159 - DNA, 75 bp, Homo sapiens
accttacccggatgatggcatggggtcttcgatgccaagaacatgatggctgcctgtgacccccgccacggccga

SEQ ID NO: 525160 - DNA, 90 bp, Homo sapiens
ggacaagaaactggtggtggttttcggaggcacagggaagaaggagaaagggccaacccctgaagaagcaatacagaaactgaaggagac

SEQ ID NO: 525161 - DNA, 100 bp, Homo sapiens
ccgagggactgggagtcgttagtgagacatttatgcagtgtgtgattctttctaaaacaactccctggaagagaggacatttaattcaacaatttattgg

SEQ ID NO: 525162 - DNA, 100 bp, Homo sapiens
cttcattgatctccccacgctgcaggtgtgggcccatcgctggatggatctgtcagaacacggctttgggctggccctgctcaacgactgcaagtatggc

SEQ ID NO: 525163 - DNA, 101 bp, Homo sapiens
tggaatcccagaggaaactgacggagacgcagatgtggacttgaaagaagctgcagcggaggaaggcgaggtgttcctgatccaagcagaaccctgttatt

SEQ ID NO: 525164 - DNA, 113 bp, Homo sapiens
cacgctgctaggctaccttgctgatgacctcacatggtgtggtgaattcaacacttccagacacttggtggggttcccacacaagctcctccacctcttgaagcaacttcatc

SEQ ID NO: 525165 - DNA, 100 bp, Homo sapiens
caccatcccattgctggtcctcctggggatggatgactcttgacctgaccaacggtgcagatgggatgctggccacaagctccaatgggtctcagtacag

SEQ ID NO: 525166 - DNA, 102 bp, Homo sapiens
gccatggggcaccggaccctggtcctgccctgggtgctgctgaccttgtgtgtcactgcgggaagccatcttcgacaagagcacagggaaggttgttttgaa

SEQ ID NO: 525167 - DNA, 75 bp, Homo sapiens
aatgtcagggaccttctggatattttacgggaaagaggaacttgtaatagctggcatcgttgagaatgaatggaa

SEQ ID NO: 525168 - DNA, 88 bp, Homo sapiens
gccaacccatgagagtcgaattggagaacttgttggagtgctggtgaatcatttcaagagtactatactggcaattgctggagaagat

SEQ ID NO: 525169 - DNA, 82 bp, Homo sapiens
cctgtctacatcattatggaactggtttcagctccctgtgctgtcaggaatctacaggacttggctcgtatttacattcgac

SEQ ID NO: 525170 - DNA, 100 bp, Homo sapiens
tgcctgcgggggaccactggcacctgagtgacctcggccagctgcagtccagctccagctaccaggatttcttcaagaagttcttatatgagccattgcc

SEQ ID NO: 525171 - DNA, 100 bp, Homo sapiens
cactgctggacgcctctgggcaatcttaccctcctgggaactgagagagagcgatcgtcttctgatcaaaggaggtaaaattgttaatgatgaccagtcg

SEQ ID NO: 525172 - DNA, 145 bp, Homo sapiens
cgggcctgggcaggcggagcagggccttggaccccgcggcgcccctcggcctcggagcaacgagcgcagcgccggtactccaaagattcaggtttactcacgtcatccagcagagaatggaaagtcaaatttcctgaattgctat

SEQ ID NO: 525173 - DNA, 98 bp, Homo sapiens
tttgggactgtaagaggatggacaaaggagctggtgctgagcgtgaaggggttgccccgtctcgcccgattcctgcctaaggtcatgctggccctgct

SEQ ID NO: 525174 - DNA, 82 bp, Homo sapiens
tcggggaacacacggactacaaccagggcctggtgctgcctatgccgcttacaaacacgcagatggcaagaagattgatggc

SEQ ID NO: 525175 - DNA, 120 bp, Homo sapiens
tacaccattggcaaggagatcattgacctcgtgttggaccgaattcgcaagctgtggatgattcaacagccacacaaagcagcaacattttttggatgcattgggatagataaatttggg

SEQ ID NO: 525176 - DNA, 100 bp, Homo sapiens
cgcagcttggtctcagaggagcatcgctggggagcttactccacgggaacagcctctagataatctgagttgttgaaaatacgaagcctgttactcgtga

SEQ ID NO: 525177 - DNA, 75 bp, Homo sapiens
tcttatcagacgaaggcaaaatgtatgaaggggacgaactggtagtacctgaaacatcagataatagtcggaaac

SEQ ID NO: 525178 - DNA, 98 bp, Homo sapiens
ggatattcgcatgcctggggttacacctaaacagagcagcccgacggccatggaggctgaagagacgatggaatgccttcaggagttccctgaacatc

SEQ ID NO: 525179 - DNA, 75 bp, Homo sapiens
cttcaagcagcgccgcaccttcggttacaggaggttccagtggcatcgggaagtgcattgctatcgagtgctata

SEQ ID NO: 525180 - DNA, 50 bp, Homo sapiens
gatcctggaccccatcttcaagtggttcgcacagacagtttaaaaggccg

SEQ ID NO: 525181 - DNA, 90 bp, Homo sapiens
cgacgaccgacagggtggtgaaagagccctgaggatgatgacaggaaggtccgaaggagagaaaaaaaccgagttgctgctcagagaagt

SEQ ID NO: 525182 - DNA, 83 bp, Homo sapiens
gacagattcgcagtggtcgcttcttctccttggtcatcatcagatttgaaatatttaaagtggatacaaaactatttcagcaa

SEQ ID NO: 525183 - DNA, 71 bp, Homo sapiens
tatttgcaaaacagagatccagggatgcagtggaaactaatgagaagagttaaacacagtgggaatatcac

SEQ ID NO: 525184 - DNA, 74 bp, Homo sapiens
aaagaggtcccagaagacgcctagtacaccacgaagggtcacacaaggtgacttgatggagggtgagctctatt

SEQ ID NO: 525185 - DNA, 50 bp, Homo sapiens
gtacctcacagcttagacctgtccaggtgtaaatccaaaccgcttccaac

SEQ ID NO: 525186 - DNA, 112 bp, Homo sapiens
cgcctgcggacctaactagctccaggttaggccgagctttgcgggaaagcagcgtgccggtggtggtgtgcacattgagccccggtatagacagttcccccagctgaccaga

SEQ ID NO: 525187 - DNA, 100 bp, Homo sapiens
agcaaatggagaatggcatgctggtgacggacagtgcagggaagcaactgcagagtttctacagcagtataatcactacaaatccaatgtggagattttc

SEQ ID NO: 525188 - DNA, 96 bp, Homo sapiens
taaagatgatgatgacattgacctctttggatctgatgatgaggaggaaagtgatatcaaatgggcctctcgctgggacacttacctgaccatgag

SEQ ID NO: 525189 - DNA, 75 bp, Homo sapiens
ggccaggggaccaagctggagatcaaacttgctggatttgtgcgactcggtgaaggatgatgcccggagggtgat

SEQ ID NO: 525190 - DNA, 73 bp, Homo sapiens
ttgattacagcggcctcagggttcaggcaatgcaaataagatgaccactgagcagtttacaggagatcatact

SEQ ID NO: 525191 - DNA, 100 bp, Homo sapiens
gtaccctctatgaaaaacagaatggaaaagagtcttctgggaaatcctcattgacgattcaatttgttgaaggccaatttgtggactcctacgatccaac

SEQ ID NO: 525192 - DNA, 98 bp, Homo sapiens
ggtggaaagcatttcggctcagctggaggaggccagctctacaggcgctagttgctacattgcctgatgatgttcagcctgggcctgatttttatgga

SEQ ID NO: 525193 - DNA, 101 bp, Homo sapiens
aagactttactgaagtttatcttattaaatttatgaacttacaaagtgcaagggacttcactgtgactttgcttgcctgatgttccaatacttagtaaata

SEQ ID NO: 525194 - DNA, 82 bp, Homo sapiens
cgagtgaggaaaggaggtactgtaggtaggagcaacggtgggaatgccctctgaggaatgcagtgatgtccatcagtcacct

SEQ ID NO: 525195 - DNA, 96 bp, Homo sapiens
ggagctggtcgccgccgcggccgcctggaattgtgggagttgtgtctgccactcggctgccggaggccgaagctgaaactagaggaccgttctgtg

SEQ ID NO: 525196 - DNA, 100 bp, Homo sapiens
ggaaaatatctgttaacagactgcttttacacctacggtcatgatcagagttcgactcttgcccaacactctgttgaactgactttacccaatcatcatc

SEQ ID NO: 525197 - DNA, 100 bp, Homo sapiens
gcggccgcgacgctatggcgcactggagtaccctgttcctggcagtcatgatgatgggcagcgcccgagtggcggagctgctgctgctccacggcgcgga

SEQ ID NO: 525198 - DNA, 82 bp, Homo sapiens
tgtgtatgaggaacctccagagcaggagaccttctacgagcagcccccactgggacccagacatggagctgcgggaagaagc

SEQ ID NO: 525199 - DNA, 83 bp, Homo sapiens
aggagctgcgggagcgagagtgcgtgtggcggccgccgggtcctggccctgggcgctgcctatggcacagccaagagcggtac

SEQ ID NO: 525200 - DNA, 75 bp, Homo sapiens
accttccggagcttctcagaagacagagggttttcttttgaggatgtgtttcacatggtagttgaagtaccacgc

SEQ ID NO: 525201 - DNA, 100 bp, Homo sapiens
agccattcccaaatgccccaaggatgaagaacggagacggaagagagaagggcacagttacctaagtatcaacgtaatcttcctcggccaggacaggccc

SEQ ID NO: 525202 - DNA, 75 bp, Homo sapiens
ttttgtgctgccagcaagaaatgatcagtagcaccagtgtttatggtctcctgagcaataagactaagccagtcg

SEQ ID NO: 525203 - DNA, 99 bp, Homo sapiens
ttgagacggagctaagagatatctgcaatgatgtactggtccccagtctatgtgaggatctcctgtcttctgttgaccagccactgaaaattgccagag

SEQ ID NO: 525204 - DNA, 90 bp, Homo sapiens
caacatgctgctcaacaacggcttcagggagtcggaccagcttttcaaacaatacagacatctcaacagtgagcatgcgctggacgatag

SEQ ID NO: 525205 - DNA, 75 bp, Homo sapiens
tatcaacagacgggagactgaacttgaggcctatcatggtcaccatcaagcactggaagtgttggtacagtcttt

SEQ ID NO: 525206 - DNA, 95 bp, Homo sapiens
tcattttgactgaaaaagcgaaggacttttttcaggcagaaaacaagtctcgtctggacgatttctcactatgtgcaatagacactttggcagtg

SEQ ID NO: 525207 - DNA, 100 bp, Homo sapiens
ttaaagatatcagcctgtctgactacaaaggtgactgtggaagaggtcatgaccacaactgcatatctggaccttttcctgcgtagcatctccgagccag

SEQ ID NO: 525208 - DNA, 75 bp, Homo sapiens
aaagctgctgatttgaagaacctctttggcaaatatggaaagttaaagaagagtgtaagagtcctaaagctgagt

SEQ ID NO: 525209 - DNA, 100 bp, Homo sapiens
tctggaggatggggtggatgggaggaaggaaaatcacctcggcagtgtttgaaggaaggatactgcaactctttgaagtacgcattttttgagtgtaaaa

SEQ ID NO: 525210 - DNA, 96 bp, Homo sapiens
ggcgggtggcatggcggagaaggatgacaccggagtttgacgaagaggtggtttttgagctgggagtgtccactcgccttccaccagcatggcaac

SEQ ID NO: 525211 - DNA, 80 bp, Homo sapiens
caccgacatggcccggaggcagcagaagcaaaatgatgcttcaacacccaggccaggtctctgcctcggaagtgagtgct

SEQ ID NO: 525212 - DNA, 75 bp, Homo sapiens
agcccgtccgtccgccgccaccacccactccggacacaggtcacgaacgagatcacgccggtgctgtcgtactcc

SEQ ID NO: 525213 - DNA, 99 bp, Homo sapiens
atatgcaaaaggaaagcaaggagaaccagtggttgggagtcagtgttcggagccaggggcctgggggcaagattgtttgaaacaaagagtcctcttcgt

SEQ ID NO: 525214 - DNA, 75 bp, Homo sapiens
cgccctcctgctgcctccccggagctcccgggccagtagctattgacctgttgtattggcgggacatcaagcaga

SEQ ID NO: 525215 - DNA, 90 bp, Homo sapiens
acacgttggtacagggctccagaaattatgttgaattccaagaaaacggtccggatgtaccccttccagattcacagcatcgctctctcc

SEQ ID NO: 525216 - DNA, 90 bp, Homo sapiens
agacattatctgccagttaagattattcttaaaactctggtgccagctattcaacagaaaagaacggtggcttttctaaaccaatttgtg

SEQ ID NO: 525217 - DNA, 83 bp, Homo sapiens
ccacagtatgatcaggataatctaaagtcatacggagatgaagaagaagagccagccttgcattgctaccatttatgttcgtt

SEQ ID NO: 525218 - DNA, 100 bp, Homo sapiens
ccccgcgaccactggcacattcttgctgacaggaaaatatatgcagatgatgaacattcttaagccaattgcctttgatgttattcatttcatgtctcaa

SEQ ID NO: 525219 - DNA, 75 bp, Homo sapiens
tcgtggaggtggccgtggaggcagaggtggcatggggtgctggagaatctggtaaaagcaccattgtgaagcaga

SEQ ID NO: 525220 - DNA, 100 bp, Homo sapiens
ctccattcccgggaggggggagcggcgttggaggccaccgtttccagatgatatcatcaagttgaatcgaaaggaagggaagaagcagaattttccaaga

SEQ ID NO: 525221 - DNA, 97 bp, Homo sapiens
ccactcggcttcatcaaggtcctcgagtgggtgcaagttttgaaactgcttttgaatttgtctgaaaatccagccatgacagaaggacttctccgtg

SEQ ID NO: 525222 - DNA, 82 bp, Homo sapiens
cccgaactccaggacagcatccaggcctcattggacagcattcgagatgaggacggggacttggttgccttttccagtgacg

SEQ ID NO: 525223 - DNA, 90 bp, Homo sapiens
aaggaagaatgtctcatgttcgagtctggggctgtcgctgtgctctgcttgttagcagtggcacaagatcttacagaggatgaagaaaca

SEQ ID NO: 525224 - DNA, 98 bp, Homo sapiens
ccccctatccctccccctaaaccagctcacagaaatagcaaccctgtcattgtttgtcagaggaatggctgtgaatggatgcctggaaggaccatcct

SEQ ID NO: 525225 - DNA, 100 bp, Homo sapiens
aacagctcagcttggagatgccagaaaccatgtgaaaaggcaccttgggatgagggaatacaagtgtcatgtctgtggagcggttctggtgaggttggaa

SEQ ID NO: 525226 - DNA, 90 bp, Homo sapiens
ataaggacaaaagccaagaggaggacagttcgctacacagcaatgcatcgagccaaaacctattgatgtacaagtcattacacaccacat

SEQ ID NO: 525227 - DNA, 80 bp, Homo sapiens
cgctgggtgcgtggggctgcctcgccgcgtctcgccacgtccttcagtgaatctacagacctattttctcaggagctcag

SEQ ID NO: 525228 - DNA, 83 bp, Homo sapiens
cgagaaaagattttctattacttcagcaacagtccttcaaagctgctgatgcaaggaatcccctgggctcccgtccactccac

SEQ ID NO: 525229 - DNA, 88 bp, Homo sapiens
cttcgtcccctttgatccctgtgtgctgaagagttgtgaaagattttcaagactatatggaacctgaagaaggttgtcaaggttcccc

SEQ ID NO: 525230 - DNA, 101 bp, Homo sapiens
tgagttctcccgccctcttggtgagaatccacgccagtacaagatcccagactggttcttgaacagacagaaggatgtaaaggatggaaaatacagccagg

SEQ ID NO: 525231 - DNA, 100 bp, Homo sapiens
ggttgctgctcagtctgtaacggcagagaacgtttgtctgcctgatgagagccacttgggttaagaaactacctgtgaatagtcatcatttctgtccttc

SEQ ID NO: 525232 - DNA, 100 bp, Homo sapiens
attgtgtctgccagcagggtttctcaatctctgcagatggccgtacgtgtgaaggacctcggacagtgatccaccctaaagcaagaattattgcggaagc

SEQ ID NO: 525233 - DNA, 100 bp, Homo sapiens
gtccgccccgcgagcacagagcctcgcctttgccgatccgccgcccgtccacacccgccgccaggtgatggtaatgcccgaaggagcagacacggtgtcc

SEQ ID NO: 525234 - DNA, 90 bp, Homo sapiens
gcggcggcagcggcggcggcgcccgcgggtggtataaaatggcggatttcgaagagttgaggaaaatcctgacttccgagaaatccgctc

SEQ ID NO: 525235 - DNA, 97 bp, Homo sapiens
gaggaactgttgatatagccagagcccgaaaagaagattactctgcaacagctaaaggacatagctcgccttttgcaagaaaaggagttacaggaag

SEQ ID NO: 525236 - DNA, 83 bp, Homo sapiens
atcatcttcaacttgtagacacagccgggcaacagtatcctggtgtgaaccagctatcctccagtataggaggattgagtctt

SEQ ID NO: 525237 - DNA, 100 bp, Homo sapiens
ttgaaattaccaactgctttcctttccctcagcacacagaggatgatgctgactttgatgaaggagaaacctcaattatttttccaatgcttatgcagct

SEQ ID NO: 525238 - DNA, 100 bp, Homo sapiens
ccagggatcccacccccgcagtttccaggatttcctccacctgtacctccagcacttttcaggattagaagaggctgtgtatagaaacatacaagcttgc

SEQ ID NO: 525239 - DNA, 76 bp, Homo sapiens
aaccaggcctgggctggagtgttacattcagttcctggactccgtgtcaagccagcgcctttagaaataaaacctt

SEQ ID NO: 525240 - DNA, 90 bp, Homo sapiens
gaacgggcctgtcgaagtgcgcctgacaggtgtcttctctttagggatggtgaggttggaaaaaggctcctgtaaccctcctccaggatg

SEQ ID NO: 525241 - DNA, 50 bp, Homo sapiens
ggaagttctgcataagcatggcgccaagggacatgagagatggctttaga

SEQ ID NO: 525242 - DNA, 97 bp, Homo sapiens
acaggatcattaaacagcaagggctcgtggatggcctgttcgacatgggcggtgagtattactgcttcgcttccgacatcacctgctcctttcccgc

SEQ ID NO: 525243 - DNA, 74 bp, Homo sapiens
caagttaaggtccaaaaaaactccagctgtgaaagcaacataaatgcttggatttacactgggcaacgtggttg

SEQ ID NO: 525244 - DNA, 76 bp, Homo sapiens
caggaagatgcctttgggaagcatgtcaccaacccggccttcaccaaactccctcttcaaaagcagtggactgtct

SEQ ID NO: 525245 - DNA, 82 bp, Homo sapiens
aaggcctctctcctgatacagcaggcgctcaccatgttccctggagagttaaacatgaagtttctggagagacagtggtatt

SEQ ID NO: 525246 - DNA, 100 bp, Homo sapiens
gagatctcaactgaacaggaacctgaagactacatctctgtaatccagagtatcatattcaaagctgttccatttcctccaagtcaccggcttacagcaa

SEQ ID NO: 525247 - DNA, 95 bp, Homo sapiens
cggagaaaaagttgaagcgttatgccatttcataattctgaatcatgtctgataacggagaactggaagataagcctccagcacctcctgtgcga

SEQ ID NO: 525248 - DNA, 98 bp, Homo sapiens
agacgatctgcacttcgcattttggcattgacatttaattttagggtcctttatatagaagggagagtagtcaaggcggataagaaggcggcacaaga

SEQ ID NO: 525249 - DNA, 98 bp, Homo sapiens
ttgagttttatcattttcgttaagtgaccgtgcgcagcgctgtaacttgataagacagaggcaaccacaaagcttcatgacatggtagaccaactgga

SEQ ID NO: 525250 - DNA, 75 bp, Homo sapiens
atggctaccacggccgagctcttcgaggagctatgaagacatgattggtgaggaggtgccatcggatcaatacta

SEQ ID NO: 525251 - DNA, 95 bp, Homo sapiens
cctgcgggtgcctttgaaaatcaacgacaacttgagcacaggtcctctcagggtgcgccatcattgtccgaggtcagcctcgtggtgggcctcct

SEQ ID NO: 525252 - DNA, 100 bp, Homo sapiens
tggaacgggactttgcagaaatgtgtgcagactacatggcatctaccatagggtgctctggtctggggtctctctgtgaaacacaatcctcagaaagtgg

SEQ ID NO: 525253 - DNA, 83 bp, Homo sapiens
aacggtgcttctatggcaggatatggattttttatcaagcagaaatgcatcgaacaacgagaatcaagatcactgagctaaat

SEQ ID NO: 525254 - DNA, 49 bp, Homo sapiens
cggagaagcaggagccctactcggcagatgacagatttgaagatctgga

SEQ ID NO: 525255 - DNA, 75 bp, Homo sapiens
aagactgaattccagtgatccaagtctcataggaacagcatatgccatatatgagctggctgtggcttcatttcc

SEQ ID NO: 525256 - DNA, 98 bp, Homo sapiens
cattgtcatctcgaacagtatcttcttcttcgctccctagcttagaagaggaacagtggagacaactggattccactcaaaaggagcaatactgggat

SEQ ID NO: 525257 - DNA, 97 bp, Homo sapiens
agccaagtgaaaggcactatcgagattggaaccacagaagatcctcagacagattctaagcctcctgagggattgttaggattccacacagactggc

SEQ ID NO: 525258 - DNA, 90 bp, Homo sapiens
attcagcgcatcggcagcggcacctacggcgacgtctacaagggattaaagcctgtggtttccacagaagcaccacctatcatatttgcc

SEQ ID NO: 525259 - DNA, 75 bp, Homo sapiens
cggagcttcgcgacggcagcggcaagaagctgtcaaagctcgaaaaacagcagcagaggaaagaaaagaccagag

SEQ ID NO: 525260 - DNA, 73 bp, Homo sapiens
tgatttcatcctcaagtttccgcacaggcctccaccgctatgtctggctggtttacgagcaggacaggccgct

SEQ ID NO: 525261 - DNA, 81 bp, Homo sapiens
agagctctccgggttccccggctcgcggggcccggcgaagggcaggactctccttcagcaactccagaagcttcagacttt

SEQ ID NO: 525262 - DNA, 80 bp, Homo sapiens
ggaaaaggctaatggcacaactgtccacgtaggcattcaccccagcaagtacaaagtggttgtccccaaaattggaaaca

SEQ ID NO: 525263 - DNA, 82 bp, Homo sapiens
agactacctttttcagaaatgcgcagagcaaacatctttcaaagctcttggataagcacaagaatacagagagcatggtgga

SEQ ID NO: 525264 - DNA, 98 bp, Homo sapiens
actgatagcttatggttctccattgtgatgaaagcacatggtacaggcaggggaaatggaaggtgatgcagtcgaagccattgtggaggagtccgaaa

SEQ ID NO: 525265 - DNA, 50 bp, Homo sapiens
cgaaagggcagtacagactttggcagctcctacagaagaagggaaaaaag

SEQ ID NO: 525266 - DNA, 100 bp, Homo sapiens
tcatgttccatgctgctgacgtcacatggagcacagaaatcaatgttagcagatagccagcccatacaagatcgtatgtctggtcgtgctggaagaagag

SEQ ID NO: 525267 - DNA, 75 bp, Homo sapiens
tgggggagcagttttccttgagcggagattcaggttttttcagggcaggatagcgtgtgccaatgtcctcagtga

SEQ ID NO: 525268 - DNA, 97 bp, Homo sapiens
ggactcgcatcttgcccgaagccgggcggaggagagctcaagctaagagcgcttcgaccatcactgcccctgggtggggaattgtgttggaaagagg

SEQ ID NO: 525269 - DNA, 75 bp, Homo sapiens
ccccggcgcgaagaggctggactcggattcgttgcctgaggaaatatattcttccctctctcctgcctttatgag

SEQ ID NO: 525270 - DNA, 51 bp, Homo sapiens
agctgggtgcagacgccgtggcgctgtgttcaagaaggaagtgtatcttca

SEQ ID NO: 525271 - DNA, 75 bp, Homo sapiens
aagaaacagtgctttctgaaacaacaaagccaaacttccattggtcaggaacaatggcgctgtcttcagtggcac

SEQ ID NO: 525272 - DNA, 100 bp, Homo sapiens
caccggcatttcgtccaaggccatgggcatcatgaattcgtttgtgaacgacattttcgagcgcatcgcaggtgcgcgtggaattcatggacgacacgag

SEQ ID NO: 525273 - DNA, 75 bp, Homo sapiens
atttaaccaagttccaacaaaagaatgctgccgcagatgcctttgaagatgagaaacccccaaagaagagccttc

SEQ ID NO: 525274 - DNA, 75 bp, Homo sapiens
ggaggacacacctaaacatgtggaatcccaatgccgataggaaccaaggctttagccttctcaactcattgactg

SEQ ID NO: 525275 - DNA, 75 bp, Homo sapiens
gggcagttcgggccggctgtcctggcgcggatacatgatcccttaattcaggctcaggctgaagaactgacccac

SEQ ID NO: 525276 - DNA, 123 bp, Homo sapiens
atgggtcttatcaaaagcaaagaaagatgacatggatgaggaaatttcaatatacgatggttttacagaaggcgacacatgttgttcagagtgaagtggacaaatatgtagatgatattatga

SEQ ID NO: 525277 - DNA, 100 bp, Homo sapiens
ccctggtcccggagtcgccgctgggcctgtccgctggcgtcatgttccaagagcctctgagttcctgccttttttcatctctgaatccccaccattggcc

SEQ ID NO: 525278 - DNA, 74 bp, Homo sapiens
cccgaccaccggagaattcctggggcgcaccgccaagagctgggatgtggtggtacagtgggagctattctgac

SEQ ID NO: 525279 - DNA, 96 bp, Homo sapiens
caatgctgcaagaagaacctgtgattgtaaaaccaatgccaggaaaaccaaatacacaaaaccctccacggagagactatggaaatgatattagac

SEQ ID NO: 525280 - DNA, 100 bp, Homo sapiens
ggggacctctggatcccagtgaagagcttcgactccaagatatgtgtcacaaagatgtctacacggaactgccagggaatggactcagtgatcaaacccc

SEQ ID NO: 525281 - DNA, 100 bp, Homo sapiens
gggaagaggaggcggaaaaggacgcaaagttctccggcgagcaggttacgggcaggacttgagtggcttcggacagggcttctcagaccccagccagcag

SEQ ID NO: 525282 - DNA, 75 bp, Homo sapiens
tggtgtatgttgtcaactatccaaaagttccaagatgagatgggattctccaacatggaagatgatggcccagaa

SEQ ID NO: 525283 - DNA, 100 bp, Homo sapiens
aagcagaattatacctagaagtctactaatggacagttagtcacccacctacatgttgagggctgctataacaaagtaccacaaactgggtggctccaag

SEQ ID NO: 525284 - DNA, 90 bp, Homo sapiens
gctacttctcagctttaccatccctggaggagacctggcagcagaataggaaggagattcgcttgctttgcacagaggctgagccacagg

SEQ ID NO: 525285 - DNA, 90 bp, Homo sapiens
tatacctagaagtctactaatggacagttagtcacccacctacatgttgagctcaaactggaggattataaggatcgcctgaaaagtgga

SEQ ID NO: 525286 - DNA, 98 bp, Homo sapiens
tttagagaagcactctttcttggactgcttcatggcatttggaagcgggaagttccagtgtcctgcaagaaactgttttggctgggcctacttcacct

SEQ ID NO: 525287 - DNA, 100 bp, Homo sapiens
tgatcccttgctcccatccctgcagcatgaacaaggagcggcctattgccaattcatggacatgctcttccctggctgcattagtttgaagaaagtaaaa

SEQ ID NO: 525288 - DNA, 74 bp, Homo sapiens
gctcacctgtgcgggatggaacaaaagctcaagcctggagaaagaattgaaatcagaaaaagagcaaagacagg

SEQ ID NO: 525289 - DNA, 112 bp, Homo sapiens
gcgagagtttgtggaagatggcgcctgttgtgacagggcaacagcattattgagaaaagcccttacagaagagtgtggccgtaggtcagctattcacagtagtgaatcatct

SEQ ID NO: 525290 - DNA, 90 bp, Homo sapiens
gcagcagcggccaggatgaatcccaggtgctctggagctggatggtgaaggtggattacggaacaacaacgagaaagacatggccctcac

SEQ ID NO: 525291 - DNA, 83 bp, Homo sapiens
cctcgcgccggctatggccgtgccctggggctgagccctcaggatgaaacaggcgcctatttaatcgacagagaccccaccta

SEQ ID NO: 525292 - DNA, 100 bp, Homo sapiens
ccgtgcccagcttcggtagcgagtggttctgtgattcgcctttgccagtctcatctcgtgtctgctttgttaagttccatgatccagactcagcagttgt

SEQ ID NO: 525293 - DNA, 100 bp, Homo sapiens
aaacagaagaagcttgaggaaatgactcggactgaacaagagggattgttcaagtttagaagaatacaacattgccgcagcattactccctttgaccagt

SEQ ID NO: 525294 - DNA, 50 bp, Homo sapiens
ggagagttctgcatgttgattctttttcacagcatatggtcctgattatg

SEQ ID NO: 525295 - DNA, 97 bp, Homo sapiens
atagcctttgccatcactgccattaaggaactgatttcatctgaaattgaagagacaatcagagaaaaactatagaccactcatgatggttgttata

SEQ ID NO: 525296 - DNA, 100 bp, Homo sapiens
gcgaaaggctattgttgcagaccgggcaaatccagatcccaacacttgccttggagtgtttggcctcagtttgtacacaacagagagggatcttcgtgaa

SEQ ID NO: 525297 - DNA, 97 bp, Homo sapiens
gcgcgaagctggccaaagcctgcccagacggctcacctgtgcgggatggaacaaaagatgagaccccgctttctacaccaaccgcaagagacagcct

SEQ ID NO: 525298 - DNA, 75 bp, Homo sapiens
gcggatcttcaacctcaactgctggttttaaaatcaaagatgggaaaatcggagaaaattgcccttccccatggc

SEQ ID NO: 525299 - DNA, 86 bp, Homo sapiens
tgtctaaatttcggtagccatggcacaagaatataatgagacccacccatcggagccaggctttgaaggaactgaccgcagtgtgc

SEQ ID NO: 525300 - DNA, 82 bp, Homo sapiens
cccaagacacccacatggaaacggacctgctcagcagcctgccccttcccagctgcctgcctgccctagccagctcccaggt

SEQ ID NO: 525301 - DNA, 50 bp, Homo sapiens
ggaatgtctgtcctcctagccaaagaaagctctatcgtccgagctttgtg

SEQ ID NO: 525302 - DNA, 95 bp, Homo sapiens
catcagaactcacctttgatttccagattgaatcaatagggatgctgagaacttgctggagtcacagccactgggatcctttctcatcagggtca

SEQ ID NO: 525303 - DNA, 75 bp, Homo sapiens
ccacggtcaagcgatctgctggcctcggcctctcaagacaggggcaagtgtccgagtggtgaatcagctacttac

SEQ ID NO: 525304 - DNA, 100 bp, Homo sapiens
ccgccttctctgtcagctctttccccgtcagcatcccagccgtgctcacggttatgaagacagtatggagtttccagaccatagtagacatttgctacag

SEQ ID NO: 525305 - DNA, 83 bp, Homo sapiens
aaaagattggatcaggaccatgtgagattctccttccagaactcctgtcttggtaggatctgatgaatttgacaaatgtctca

SEQ ID NO: 525306 - DNA, 80 bp, Homo sapiens
agaggagcagcccccggagacagcggcacagaggtgcttctgccagaaaatgatgcatcctgttgccagcagtaatccag

SEQ ID NO: 525307 - DNA, 120 bp, Homo sapiens
gtggccgtggctgacactaaagactttgtagccatcaacccgagtgcagtttcgatggaaaatgaaggttctctttgtaaagaatccttttctggtcaagtttcttcttcatcactcatg

SEQ ID NO: 525308 - DNA, 83 bp, Homo sapiens
cacctctcgccgcacatgtttggagtgagcagtgaagattcagaagattctgattttcaggaatcaggagttagtgaagaagt

SEQ ID NO: 525309 - DNA, 74 bp, Homo sapiens
gcggccacccgagacgcggcgcgcacgctccggcctgcgtctctgctttctatccgtcaagatgataaagtcgt

SEQ ID NO: 525310 - DNA, 100 bp, Homo sapiens
catgagggaaatcgtgcacttgcaggccgggcagtgcggcaaccaaatcggcgccaaggcccgggtggaacgcatggagcagttccagaaggagaaggag

SEQ ID NO: 525311 - DNA, 100 bp, Homo sapiens
ccgagaagtacttaaaaaaacattggaattctgcttatctagggtcatcgagcagctcggtgggaagcagctggtcatgaaccacatgcatcatgaagac

SEQ ID NO: 525312 - DNA, 74 bp, Homo sapiens
ccagaacgacctgatgggcacggccgaggacttcgccgaccaggcctccggtgtggctgtctctgatggtgtca

SEQ ID NO: 525313 - DNA, 96 bp, Homo sapiens
cctgtacagcctgcagaactgaggctgctggaatcttccctcatttcattatcccgttatgatggagcaggatccagagagcacccaatttaccca

SEQ ID NO: 525314 - DNA, 75 bp, Homo sapiens
ttcaatactacctttatttccaccatagtgactgcagatgagctgtggaaaggcgctttagcagagactggtgct

SEQ ID NO: 525315 - DNA, 74 bp, Homo sapiens
gcaggccctgtatagtgtgcaacaacagagttatgcccagccaagtcttcagtatatccaggggcaacagattt

SEQ ID NO: 525316 - DNA, 100 bp, Homo sapiens
ctgaggaccaagctgtcattaacaggtttattcagtcaccatgaagctgctgctgctgcacccggccttccagagctgcctcctgctgaccctgcttggc

SEQ ID NO: 525317 - DNA, 112 bp, Homo sapiens
gacaggacaccatgctcaaagccatgttcagcggccgcgtggaggtgctgaccgatgccggaggatcttctgcaggacaactggtccttatcacagccagggtgaccacaga

SEQ ID NO: 525318 - DNA, 82 bp, Homo sapiens
gaggcgctcctcttgtcatcccactcagcgccatgtcctggatgttcaagagagccctaatttgtttagaactgtaatatgc

SEQ ID NO: 525319 - DNA, 75 bp, Homo sapiens
cggcgatatggaagaggagggcaagaagggcaagaagtgtgtcccggcatggatatccggaacaacctcactagg

SEQ ID NO: 525320 - DNA, 100 bp, Homo sapiens
ttgcaatgaggttcgagacatgtgttcttttgacaacgaacagctcttcaccatgaaatggatagatgaggaaggctgtcagcttctttgggcaaagact

SEQ ID NO: 525321 - DNA, 101 bp, Homo sapiens
gcagacgcgggccagcctcagcaccgacagccgacgcgcagatagcagagccatccttggggatgatcacggacgtgcagctcgccatcttcgccaacatg

SEQ ID NO: 525322 - DNA, 74 bp, Homo sapiens
cttttatacactcttagtgctgtccaggaaactagcagagttgttcacatcatggattttcaacgagggaaaaa

SEQ ID NO: 525323 - DNA, 100 bp, Homo sapiens
acagactcaggtaactgttcagaaaattggaaaggaaattgaagaaaaactaagactcacatctacaagcaatgaactgatgccagaagtgggtggagaa

SEQ ID NO: 525324 - DNA, 100 bp, Homo sapiens
gaaagagtggatttcagcctgcacggatggtcttgaaacacaaatggtttttgcatcagtgagcctccttcagctcccatctctcctcggatgaacaagg

SEQ ID NO: 525325 - DNA, 100 bp, Homo sapiens
aagtgattttgaattttttggcagcagaagggcgactgagtactcaacatattgactgtatttgggctgcagcacagttcacagacattgggaccttcga

SEQ ID NO: 525326 - DNA, 90 bp, Homo sapiens
gtgacatccttcagagacctcattcatgaccaagatgaagatgaggaggaagaggaaggccagaggcatgatgggcccacctcctggtat

SEQ ID NO: 525327 - DNA, 100 bp, Homo sapiens
gtgtgattgagactgacattgaggaaagaagcagctatgaagaccagggggttcagctttccaagacaaagggcactgaccatccgtgcactgccaataa

SEQ ID NO: 525328 - DNA, 82 bp, Homo sapiens
ttaccgctgctgcccctgctgtcgctcctggtcggcgcgtggctcaagctagggtgaaaatgggatggaggattgtgtcatg

SEQ ID NO: 525329 - DNA, 51 bp, Homo sapiens
tggaggagtcccgctcgaagctaggcctactctgtgtatgatgaagacatt

SEQ ID NO: 525330 - DNA, 98 bp, Homo sapiens
ggacacttggaaattgaacaagcgtcacttgacaagcctatagaatcggattcagggagcttccagcatgatgtggctgcaaagcccgaggaaggctt

SEQ ID NO: 525331 - DNA, 98 bp, Homo sapiens
aaagcctctgggagcagaagggaggctccaagacctcatcaacaattaaggagcatggggaagtgattgactgtgtgcaggagctgagccactccgtg

SEQ ID NO: 525332 - DNA, 71 bp, Homo sapiens
gagtttccgatttaaagctgagctgcgaggaaaatggcggcgggaggcttcattgaggaccctgagaggaa

SEQ ID NO: 525333 - DNA, 90 bp, Homo sapiens
gtcaggaggagctactatagaagaactaactgagggtaagatgataatgcaagataaattggaaaaagaaaggaatgatgctaaaaatgc

SEQ ID NO: 525334 - DNA, 83 bp, Homo sapiens
gtcgccctcaaggccatgatcaaaactcccgggtcacagtgaagcatctcgaagagattgtagagaagctaaaaggagaactt

SEQ ID NO: 525335 - DNA, 82 bp, Homo sapiens
aagaagtgataggagggctctgtagggtggcccagttgaaatccttcccttcctctaccttggaagtgcctaccatgcatcc

SEQ ID NO: 525336 - DNA, 75 bp, Homo sapiens
caacaattcttgacccctcctcgacccacgaccgccaggtactgtcctagatgttaaggacacaacattgagcaa

SEQ ID NO: 525337 - DNA, 83 bp, Homo sapiens
cacaaccatcgcagttggaagcccatggggcaggtgcagcggaactgctgcctgacgctctgcaacttcagcatccccgagga

SEQ ID NO: 525338 - DNA, 100 bp, Homo sapiens
gtgtgcattgacaacgtactcagaagattatgttccaccatatgattatcagccacatgccattacatttatgtggatacctcctttggcaagcaggggg

SEQ ID NO: 525339 - DNA, 100 bp, Homo sapiens
tgtcgggtcggcgagccacgggggccgccgcagcaccatggcgaccaccgtcagcactcagcgcgggccggtaagtaaggaggtctctgtaccatggctc

SEQ ID NO: 525340 - DNA, 50 bp, Homo sapiens
ggaaagagagcgccaggtgcttagcagattttcagctgaactctcatctc

SEQ ID NO: 525341 - DNA, 90 bp, Homo sapiens
cggatcgccgcgctcagcgacaaacaagacggggaggtttactgcatcgacgcgcggttctacgggaacgtcagccggttcatcaaccac

SEQ ID NO: 525342 - DNA, 131 bp, Homo sapiens
gcagaactcctctatgatgaagaagaccttgaaatgcatccgctggtcgctgccggaaatggccagtacgtcatgtccattgacagcctccagctgggctatgcggaggatgggcactgcaaaggcgacat

SEQ ID NO: 525343 - DNA, 50 bp, Homo sapiens
ccggacctcgcttacctgcatgctggtgtcccaccggccttccgggttcc

SEQ ID NO: 525344 - DNA, 100 bp, Homo sapiens
agaagcgggcggcgcgggggagatggaatggtcctcgtccgaagtgagaatgggcagttgttaatgattcctcagcaggccttggcccagatgcaggcgc

SEQ ID NO: 525345 - DNA, 73 bp, Homo sapiens
agttcagaagaggtttggctttccagagggcagtgtagagctggttgtcttcttgcctgccctgtgtcgtaaa

SEQ ID NO: 525346 - DNA, 96 bp, Homo sapiens
ctattactcgttgctgaacgtgcgcagggagaaattgcaggtgctgcagtgtctgaaatttccgggcctttctcaacagaggatgtagccagcaac

SEQ ID NO: 525347 - DNA, 100 bp, Homo sapiens
cacgatgctgggaggcctggggaagctggctgccgaaggcctggcccaccgcaccgagaaggccaccgagggagccagaagctgccacttttgctagaga

SEQ ID NO: 525348 - DNA, 75 bp, Homo sapiens
cagaggaagccttgaggacctactcacagataggaattgaaggtgctggagaatctggtaaaagcaccattgtga

SEQ ID NO: 525349 - DNA, 90 bp, Homo sapiens
gtcctgccgtccatgcggaagatcgtcgccacctggatgctggagctgtggaaagtgaagaaggcattgaagatgactattttttggaga

SEQ ID NO: 525350 - DNA, 100 bp, Homo sapiens
tcgttgcggccatcgccctgccggaccgcgcctcaggctcccccagatgattgagtcgaatgacatttcagaggagacgatcaggacgaaggaaactgtg

SEQ ID NO: 525351 - DNA, 75 bp, Homo sapiens
gctggacgatgccttggagcctcggcagagcgggaagctgagccgagagctggactttgtcagccaccacgtccg

SEQ ID NO: 525352 - DNA, 82 bp, Homo sapiens
ttcagcctgagtgcctcagaagctgccaccttgtttggttaatttggagtggcccctggagtcagtttcctacaccatccga

SEQ ID NO: 525353 - DNA, 75 bp, Homo sapiens
atgacgtgaacatccagtttcctgataaggacgatgggaaccagactctctgcctccgccaaaatttaattaaat

SEQ ID NO: 525354 - DNA, 96 bp, Homo sapiens
atggaaaactgggtcgagcggtttcttttggctcacaattatcctagagtgaggacttactgcagaatccgcaacggtgagaatggaatacatttt

SEQ ID NO: 525355 - DNA, 138 bp, Homo sapiens
tagcttgtctcttcagtcccagttgacagcttctgaacgtttccaagagaatagttcggatcattcagtcacagaagatcttattagacggaatgctgaacacaacgactgtgtcattttttccctggaggaactctc

SEQ ID NO: 525356 - DNA, 50 bp, Homo sapiens
ctcagcctcatgagtagctgggattacagtgatcagcctttgagcctttc

SEQ ID NO: 525357 - DNA, 82 bp, Homo sapiens
cttccgcaacctggagaacgccaagcgcttcgccatcgacatagatggagttttaacattgaatgcggagaacactaattat

SEQ ID NO: 525358 - DNA, 100 bp, Homo sapiens
aaccagatcggctcagcagagaggaaaaatgttgagtggtgattttatgcaatggcttcaagccacagttcttcaccagtgcctcaaggaagcagcagtg

SEQ ID NO: 525359 - DNA, 75 bp, Homo sapiens
ggcggctcggggtgctctactggaaggattatgtgctggccgtggaggcgtatcattcggttatcaagtattacc

SEQ ID NO: 525360 - DNA, 51 bp, Homo sapiens
gacgggctcttccggcgctatgggaacttaaggcatacagaacgatggagt

SEQ ID NO: 525361 - DNA, 100 bp, Homo sapiens
cagccaccagcaccccagccacccccagctcttcagcattgtccgccaggcctgtgtccggagcctgagctgtgagcacctggctgcagtggaagaaaga

SEQ ID NO: 525362 - DNA, 100 bp, Homo sapiens
gccgcccagaacctgtacgagaagacatacctgcccgctgtagatgagaaactcagactttgctgttccagccaacatgcgctgtggggtgcagacaccc

SEQ ID NO: 525363 - DNA, 82 bp, Homo sapiens
actcagccatttactaactgtgtgaccttagattgtcactgctgttccaagggcacacgcagagggatttggaattcctgga

SEQ ID NO: 525364 - DNA, 50 bp, Homo sapiens
agaagctggaggccggcaaagccaaggctggaggctcccaggtgattttc

SEQ ID NO: 525365 - DNA, 98 bp, Homo sapiens
atctgataatcaagtgattcactgggaaatagaggataatcaggttgcagaggcagtgttaacatcccaactgaaagcacatcaagagaaaccaaatt

SEQ ID NO: 525366 - DNA, 82 bp, Homo sapiens
cttcgggacaagattcgcttctatgagggtcttgaggaccggcccagctcaggctcctggggcagcggcgaccagagcagct

SEQ ID NO: 525367 - DNA, 104 bp, Homo sapiens
ggagatctctctcatctcgctcggctgcgggaaatcgggctgaagcgactgagtccgcgatggaggcagaagctcctcctggggtagagacagatcttattgat

SEQ ID NO: 525368 - DNA, 100 bp, Homo sapiens
agccacggtgtggcagctgctctgaaccaggacctggacccggacccaaagtgccatgtctttaatgaagcagaatctggtaatataagtcaaaagtctg

SEQ ID NO: 525369 - DNA, 101 bp, Homo sapiens
taaagattttccagggaagttttggaggaccaactttatatgaaaatcctcactaccagtcaccaaacatgattgggaaaatgaggtacgttagtgttcgc

SEQ ID NO: 525370 - DNA, 98 bp, Homo sapiens
ccaatatcgaactgaagaaaggagggaaggatataccagtcactatccacaatttagaggagtatctaagagtaaaatgccaacagtggtgtctccgg

SEQ ID NO: 525371 - DNA, 101 bp, Homo sapiens
tataagtatacagcatctgtcctcatagcaggttacattggcgaatttgaaatcattgatgaccacagagctgggaaaattgttgtgaacctcacaggcag

SEQ ID NO: 525372 - DNA, 74 bp, Homo sapiens
cgggacccgcccgcccgcgggagcattgatctggtagccttgctccagaagcctgttcctcacagtcaagcctc

SEQ ID NO: 525373 - DNA, 74 bp, Homo sapiens
tgggtccacgccgagggcaggacgaacttcaccaggtcatcatcagatttgaaatatttaaagtggatacaaaa

SEQ ID NO: 525374 - DNA, 105 bp, Homo sapiens
atttaagagagctctggacaagctggaatgcatccaagagaatccctcaacatgctggttgtgaccgagattcccgacgagagagactgaggggaagagaggaag

SEQ ID NO: 525375 - DNA, 75 bp, Homo sapiens
tgtgggaccttcagccgtgaactgggggatatgagactttctactcggaatatcctgagtgttgcgtggatgtaa

SEQ ID NO: 525376 - DNA, 74 bp, Homo sapiens
aaactcatcaggacggaagcacaggggccactcagagtcgcccgagaaggattggagtttggaatcctgccttc

SEQ ID NO: 525377 - DNA, 75 bp, Homo sapiens
gagactgatttgcaacccttccgggaagccatagctctgcatgaatatactgatgataatgctctgattcctaag

SEQ ID NO: 525378 - DNA, 104 bp, Homo sapiens
ggagcccggttaggaagaatggagttggcgactcgctaccagctcggtcaaggagtgtgatgactggcgagcagatggctgccttccatccatcgtccaccccc

SEQ ID NO: 525379 - DNA, 100 bp, Homo sapiens
ctgagctacagagactgaagaggactcaggagcaaatcagtaatctgtccaatgtgaaagaaaacccattgaagtatcacgagaaaaatcttccaactgt

SEQ ID NO: 525380 - DNA, 75 bp, Homo sapiens
cttctatgacggagaatccgtttcaggaaaggtactggttcttgcacctacaagagagttggcaaatcaagtaag

SEQ ID NO: 525381 - DNA, 74 bp, Homo sapiens
tctgctcgagatgatgaggaattggtccatgacgggctctacgagtgcattctctgtgcctgctgtagcaccag

SEQ ID NO: 525382 - DNA, 50 bp, Homo sapiens
gtcaggttcttccgccacctcccagccagatcacccggaagttcaggctg

SEQ ID NO: 525383 - DNA, 98 bp, Homo sapiens
tcatcgtcacgagtcctgagtcggttaaggactttgtttggagaagctgcctatttcttcttctaccagtaatctccatgtggaccgggaacaggatg

SEQ ID NO: 525384 - DNA, 90 bp, Homo sapiens
cgcggagcgaagtgaagggtggcccaggtggggccaggctgactgaaagtggagactgctgcacggactctggaaccatgaacatatttg

SEQ ID NO: 525385 - DNA, 75 bp, Homo sapiens
ggaaggtgcgcgagctggtggacaaagctctcaggaggaggtctgcgatttgctccatgccgcacccttccaaaa

SEQ ID NO: 525386 - DNA, 98 bp, Homo sapiens
tgggaggccgaggcgggcagatcacgaggtgctgccggggcagcgggaggtggctggacccatcgcatctaaaactggcccaggacacttggtgtatg

SEQ ID NO: 525387 - DNA, 83 bp, Homo sapiens
aaggaagcgacctgcaaccgacgagttgaccaggacagcgctttgcacaacgatctccagatcctcaaagagaaagaaggagc

SEQ ID NO: 525388 - DNA, 100 bp, Homo sapiens
ccggaatcccgcgcgctgcccacgattcgcttctgaggcagaagattttcgcaagctctggaaaactccacctcgagagaaagcaggcttccttcaccac

SEQ ID NO: 525389 - DNA, 96 bp, Homo sapiens
gcgtgcgctggtcactgaggcccaggtcgccgccgcggcgcgtaaagcccaatctgcaggtgttgcgagcccgattctctgagatcacaccccatg

SEQ ID NO: 525390 - DNA, 75 bp, Homo sapiens
agacgtcgctgaggggcttgcctgaagcgaggggttgtttacattcagagctctatcaataagaggaatacatat

SEQ ID NO: 525391 - DNA, 85 bp, Homo sapiens
cggacggactacgagtaccagcactccaatttgtatgccatatcaggtctcttgcagctgaatggggtaaatatggaatgcgatt

SEQ ID NO: 525392 - DNA, 100 bp, Homo sapiens
cacgagtgggaatttgctccagcacttcacggactgcaagcgaggcacttgctaactcttggtggaagatagatgataagcctgtaaaaattgacaagtg

SEQ ID NO: 525393 - DNA, 101 bp, Homo sapiens
ggaggaggcgaggaggagagactttccagggtctccctccactgctgtagtaacccgggtccggggcctcggtggtgctcctgatgcccctcacccacccc

SEQ ID NO: 525394 - DNA, 91 bp, Homo sapiens
tcatccatgtgaccatgaggaaatgagagaaatgcttacacacagaaatgtaacagggggtatcacagaagagcagtttcagacacatcag

SEQ ID NO: 525395 - DNA, 75 bp, Homo sapiens
ggaccaagagaacaatgggaaccagtctttcaaaatgtggtcattgggactcccacacttaaacaaagaaaggaa

SEQ ID NO: 525396 - DNA, 100 bp, Homo sapiens
tggggctgagcaaggcctacgtaggccagaagagcagcttcacagtagactgcagcaaagcagttccagcgccaggggcttcagcagacccagcagcagc

SEQ ID NO: 525397 - DNA, 97 bp, Homo sapiens
catcaccaactggtggaagatggggactaggcaccctgcacaccctgcacaggttgatgaaaagcccagaaccttgatgacagattgtctggttata

SEQ ID NO: 525398 - DNA, 98 bp, Homo sapiens
ctgggatcccatcaccctccacggccgtccgtccagtgaataaccctataccttccaatttgaaatcagaagcaaaaaaggctgccaaaatattaaga

SEQ ID NO: 525399 - DNA, 82 bp, Homo sapiens
tggatcgctgtgatcgtcacttggccgactcgcgggccgctgcacccaccgccaaggacaaaaggagcccagcgctactagc

SEQ ID NO: 525400 - DNA, 83 bp, Homo sapiens
cttcggcagtccacccaccgccgccgcctcccaggttgggacagcgtcttcgctgctgctggatagtcgtgttttcggggatc

SEQ ID NO: 525401 - DNA, 82 bp, Homo sapiens
attgaactcgagttggaagaggcgagtccggtctcaaaatggagggaaatcctcattgacgattcaatttgttgaaggccaa

SEQ ID NO: 525402 - DNA, 50 bp, Homo sapiens
ttttcttatgcttataagagtggaacagctctgcttatgataatgtcaac

SEQ ID NO: 525403 - DNA, 100 bp, Homo sapiens
ctagtaacccgcgaaatgatgggatagcgttgcaaatccttaaaagagtcttaacgtcacatcgatcagacaacaacatggcaggaccccaggaaggcca

SEQ ID NO: 525404 - DNA, 100 bp, Homo sapiens
cattatagcctcaaactcccaggctcaagcaatcctaccatgtcagccttcccagtagctggaactacagcttcaaacatacccatatagataaaccaga

SEQ ID NO: 525405 - DNA, 76 bp, Homo sapiens
ccctaccctctgatgcaccaccagatgccaccacctcatccaccccagccaggactacgtggttctgctgcctagc

SEQ ID NO: 525406 - DNA, 74 bp, Homo sapiens
cgccgtggctcgacggagaccagctaggctggtgtcccggccccagcagtttgatgtcatggtgatgcccaatc

SEQ ID NO: 525407 - DNA, 100 bp, Homo sapiens
gaaagtctatggagcttaccttctaactgtggcagaggtaaaacttcgagatgatcaatatacactggaacacatgcatgcttttggaatgtataattac

SEQ ID NO: 525408 - DNA, 75 bp, Homo sapiens
cagaccgtttgtgtgcaatgccccgggctgtggacagcaatcatcctcttccagtggtagcgtgtttgggtctgg

SEQ ID NO: 525409 - DNA, 88 bp, Homo sapiens
gtcctccagtgtttggatattcagatatgcacccaatgtccagggagcgtgcaaaatttgtcaaaagtggccttttattgtaaaacga

SEQ ID NO: 525410 - DNA, 88 bp, Homo sapiens
cttcattgatgccacaaccataatagaatgtctacattcctaaattccatcttctaaaccaaaactcattgctcagctggagcgaggg

SEQ ID NO: 525411 - DNA, 75 bp, Homo sapiens
cccagttttccagccaccagtgggatgatgtttgcattgagactccttgcattccgccagatacacaaagttcta

SEQ ID NO: 525412 - DNA, 108 bp, Homo sapiens
gacttggtgtgcattaacctgccgccgcccctcaccagacagatcgctgtcaaaaccctaggtccacattggccaactgtattcaactgacaagctgatcattgagaa

SEQ ID NO: 525413 - DNA, 87 bp, Homo sapiens
ggtcatcgaaggctaccgggcccagcacagccagcaccgcacgccctgcaagggagcaactgcttcgagaacgacagcagatggcca

SEQ ID NO: 525414 - DNA, 48 bp, Homo sapiens
gttccagaactgctggaagctgaggttttgcacactagggaccaagaa

SEQ ID NO: 525415 - DNA, 126 bp, Homo sapiens
gatgcaagtgtgcccccaagtgatgggcagaaggagagaaggtgttttggatgcattctagaacacagagccccacagtcttcgttacaacctcatggtgctgtcccaggatggatctgtgcagtc

SEQ ID NO: 525416 - DNA, 100 bp, Homo sapiens
tcttccgtcacttagctgaccatgggcaactttctgggatccagcgagcgacatggtggtcaagaagaatacgtcttatcttatgaaccagtgaatcaac

SEQ ID NO: 525417 - DNA, 75 bp, Homo sapiens
ataggattttattgcacaaaggcaacggtgactttcaaaagagaaatagcccggaaacttgcaaatcctaagcaa

SEQ ID NO: 525418 - DNA, 75 bp, Homo sapiens
cagctctgaaaactcatcctggtcagagttcagaaggacatgtggagtataagatgcgtctgaagaagcatcgct

SEQ ID NO: 525419 - DNA, 83 bp, Homo sapiens
ttctctgctgcaccgacctcgacgtcttgcctgtgtcccacttgttcgcggcctatagggaatgaactacatctcagtctaag

SEQ ID NO: 525420 - DNA, 82 bp, Homo sapiens
acatcgtcttcagcaagatcaattacagaatgtctgaaggggacagtgtgggagaatccgtccatgggaaaccttcggtggt

SEQ ID NO: 525421 - DNA, 100 bp, Homo sapiens
accaagcactctagatgccctcaactatgctctccgctgtgtccacagcgttcaaggagttggcctgggccctgccctggagttttgtattgctgtcaac

SEQ ID NO: 525422 - DNA, 100 bp, Homo sapiens
cttgccacctggttcagcttggccagatcgagcggagaaatgtgtctgcgagattaatctctcatggccgctgcacaagaacctggcttttagctgaact

SEQ ID NO: 525423 - DNA, 100 bp, Homo sapiens
gcggcggtggcggcggcggcagctgcagtgacatgtccagcatgaatcccgaatagtaagaatgattgatgttggctgatattggagtgctcattcacat

SEQ ID NO: 525424 - DNA, 100 bp, Homo sapiens
gacatgtgggcagggatccgcaacaatgacgggaacttagtcattgacagtgttcggctaatgaatgagttcactaatatgccagtacctccaaaacccc

SEQ ID NO: 525425 - DNA, 100 bp, Homo sapiens
ggagattccctgggcctgcaggaagcccttccgcggaccgaaagactgcagctgaatatgtaaaatctcgactcccagaggcccttaaacagcatcttca

SEQ ID NO: 525426 - DNA, 100 bp, Homo sapiens
cgcttggtgtcctcctggcctcagcaacctgacaattctgtcgtgtcccgtttcaccagtgatcattaaagaatgggcagcttacaaaggaaagtctcct

SEQ ID NO: 525427 - DNA, 85 bp, Homo sapiens
ggacaaagagcccctcatcgagctcttcgtcaagacctgcctagagctggaacgttacctccagagcgagccctgctatgtttca

SEQ ID NO: 525428 - DNA, 82 bp, Homo sapiens
cagtggcaaacctcagcccaccacttccagaacactgatcatgacaaccaacaatcaggtcttgagtcaccacgtccgaata

SEQ ID NO: 525429 - DNA, 100 bp, Homo sapiens
gcggcccagcgagttggtcggtcccggggtcacccgctacgggaagcaggcctcgccacagggaaacactactatgaagtatcctgtcatgaccaagggt

SEQ ID NO: 525430 - DNA, 83 bp, Homo sapiens
ggattccagagctggtgcaaaggatagaaaaatgccatatagaagatttggactttgcaggctgaagtgcagtggcgtgatct

SEQ ID NO: 525431 - DNA, 100 bp, Homo sapiens
caccgtcgtcagcgccacgtccctcgtgcctacaccaaaccccatctctgggaaagccacagtatccgagcgtgtggcacccacgatcacaggaaacctg

SEQ ID NO: 525432 - DNA, 100 bp, Homo sapiens
agctgcggagcatgtcgaccccggcccggaggaggctcatgcgggatttcaagcggttgaaatcacaaagattagacacctttttagataggtgttcttc

SEQ ID NO: 525433 - DNA, 82 bp, Homo sapiens
tgaaagtgaaaatgttagaagaactcgtgagccggattgatggtcatagagctgcccaacatccagaaggtcgaagtgtacc

SEQ ID NO: 525434 - DNA, 90 bp, Homo sapiens
ccgaagagctgccgcgacgcccggcccgcagggcagggaacagaaggccaagaggaacagccagtgggtacccaccctgcccaacagctc

SEQ ID NO: 525435 - DNA, 75 bp, Homo sapiens
tgtgactggggcaggaccatcaggtctcggcgcggaagatggccggcggcgtggacggccccatcgggatcccgt

SEQ ID NO: 525436 - DNA, 50 bp, Homo sapiens
gccaaagtcactgctgttaacaaggatggagctcaacaggacctgtcggg

SEQ ID NO: 525437 - DNA, 100 bp, Homo sapiens
ccggaacgggtgccgggacggatcaccgtacggccgaacgcgacccgaggaggcggaagagcggcgccggctccactttgaggctctgatgaacattcca

SEQ ID NO: 525438 - DNA, 83 bp, Homo sapiens
tgcagccagtactctatatgaacaatccgtctggatcacggatgtaggaagtggaatactcccccagttgcaagaggcgcagg

SEQ ID NO: 525439 - DNA, 82 bp, Homo sapiens
gaggaaggaacgaggcaaggagctaaagcagcgtgcgttcagccctgggatattgaaatggattccaggcgtgtgcctcgag

SEQ ID NO: 525440 - DNA, 75 bp, Homo sapiens
attaaaaggtgtcaagaagctcagaatgagttttgggactggaattaaataaagacagagatgttgaaagaatcc

SEQ ID NO: 525441 - DNA, 100 bp, Homo sapiens
cagaacccacaaaaactcctggcagaacaagtagcactctctcagaagatcagatgagccgtcttgccaaggttgatgacaacaagaaactaggagaatg

SEQ ID NO: 525442 - DNA, 90 bp, Homo sapiens
ctctttactccatgtgtgggacattcattgcggaataacatcggaggagaagcatatatagcagtgacgaggatgatgaggactttgaga

SEQ ID NO: 525443 - DNA, 75 bp, Homo sapiens
caagcgcaatgctctactgaaatggtgccagaagaagacacaaggttatgcggatctaacttggcaagatgagca

SEQ ID NO: 525444 - DNA, 75 bp, Homo sapiens
acactggagtagaagtctctgatattggaagccaagggagaaaactggttgtcctggatgtttgaaaagttggtc

SEQ ID NO: 525445 - DNA, 99 bp, Homo sapiens
gcagcacttccacagccaagtgcgggagtccacgccatgaagatggacctacagctaaaaaattaaagactgagcaagggggagcccacttcagcgtct

SEQ ID NO: 525446 - DNA, 82 bp, Homo sapiens
gacatcgacgccgcctggcaggccctgcgcaccaggtgcgcgcggagccatggttatcatgtcggagttcagcgcggacccc

SEQ ID NO: 525447 - DNA, 75 bp, Homo sapiens
gaagcttcaacttgtgcacaaaagtgttgtgcatttaatgatagatgaggtctcactctgtcacacaagttggag

SEQ ID NO: 525448 - DNA, 75 bp, Homo sapiens
ccggagtacgtcgttcccgctgcgctaggggaagcgggcaggatgtacagttacccagcacgtgtacctcctcct

SEQ ID NO: 525449 - DNA, 100 bp, Homo sapiens
tcatcatcatctacttcacaggaattgccatttggtaagatgatcatgcaggataaactggagaaggagcggaatgatgctaagaacgcagtggaggaat

SEQ ID NO: 525450 - DNA, 100 bp, Homo sapiens
ggccccagcagcccccgaaggccctatcaggacatggagtatgaaagacggtttccaatacttatctacaggaatcgccatgaccccagctctgagggag

SEQ ID NO: 525451 - DNA, 83 bp, Homo sapiens
gacggattcatttagagctgcggaacaggacgccctctgatcaattctgtggtgttcttggtcacacatttatggagtttctg

SEQ ID NO: 525452 - DNA, 106 bp, Homo sapiens
accgggatcgtgaccgagaccgtgaccgagagcgtgaccgagagcgcgaatatcgtcatcgttagaagcaaagccttctagacaagctcagtggaatctgaagggc

SEQ ID NO: 525453 - DNA, 100 bp, Homo sapiens
ggagaccggaccgaagacggaccgtgccgggaagagatctctttcccagggccatggcgaacccgaagctgctgggaatggggctaagcgaggcggaggc

SEQ ID NO: 525454 - DNA, 75 bp, Homo sapiens
tacaactaccgctgctggaccacaaaccgctgccagaaaagtcaaacatgtgttgacatcaaggacaacgtggtg

SEQ ID NO: 525455 - DNA, 101 bp, Homo sapiens
tggttataaattatgatctacctaccaatcgtgaaaactatattcacagatgcgagtgtctctctggcttatgtggtttccccgtgtgtgaggtgggatcc

SEQ ID NO: 525456 - DNA, 90 bp, Homo sapiens
ccatctctgaccactggagccagaacctctcccagttcttccctgaggccatcagcttcattggtgcagacatggccaagtccaagaacc

SEQ ID NO: 525457 - DNA, 98 bp, Homo sapiens
ccctgaagcccaccggtccccaacgcatcatgccagggagccaagcgtcctgcccggccgtgacttaagagattaaaattaatttggttgctgttggt

SEQ ID NO: 525458 - DNA, 83 bp, Homo sapiens
ctcgctggaccagaccatggccgcggccttcggattatatctgtccaagatgcgagtctggttttatcgaggagcttccggaa

SEQ ID NO: 525459 - DNA, 83 bp, Homo sapiens
agctgggagccatcacgcccagctagccatcttctaattttcattccttcaaaggtgttggagcgggccggagagaagtagag

SEQ ID NO: 525460 - DNA, 74 bp, Homo sapiens
gactctcggctatggagtccccatgttggttatgatgtgattgctcaagcccaatctgggactgggaaaacggc

SEQ ID NO: 525461 - DNA, 100 bp, Homo sapiens
gttctcggggcctccctgctgagctcgcggctcacgctgagagggacacgcagtgacgagcggccgaagcagctttgcgagtccctgcaggaagcatcac

SEQ ID NO: 525462 - DNA, 96 bp, Homo sapiens
cggcggctgtcccctgccggggccgccctactctggggcttcctgctccagctggtggaatatgtgatcaagtgtgacatgtcagctctgcagaag

SEQ ID NO: 525463 - DNA, 90 bp, Homo sapiens
ggaagggcagctgggcacgccttccagaccgaggtgcacttcctggagcagcagaacaagctgctggagacaaagctgcagttcttccag

SEQ ID NO: 525464 - DNA, 101 bp, Homo sapiens
gttggcacacatggttaaggaacaggaggaaaccattcagagggttggggtctgctaggtccccggaatgagttgtttgacgcagccaaataccgagtgct

SEQ ID NO: 525465 - DNA, 82 bp, Homo sapiens
ccagcagaatttgtatagagatgtgatgttggagaactacagaaacctggtctccctaggtcaaagccatttttcttcatcc

SEQ ID NO: 525466 - DNA, 89 bp, Homo sapiens
gcggaacccgtgggcctgtggactgcagcctcggcggtcagcaggccgtgacttggcgagcacgaccctccccgggtaccctccacacg

SEQ ID NO: 525467 - DNA, 100 bp, Homo sapiens
aagagaggtggatctgtgagggaaaagacccaataggataactcaagttactggcttatatttggcaccctttaccctgcgtattattcctacaaggctg

SEQ ID NO: 525468 - DNA, 131 bp, Homo sapiens
ttgtactatcctcggtgctgtggtgcagagctagttcctctccagctcagccgcgtagtgggcagctgatgacacacttgggcagtgactttcccccaggggctggggtgctggatgtcatgtatgagtcc

SEQ ID NO: 525469 - DNA, 100 bp, Homo sapiens
agaaaagtggaggccaaggcgtgagaattcctcaatgactgccctctaaaggaagagaatgggatggtaacaaaggatttgacaagactaaaaacacttc

SEQ ID NO: 525470 - DNA, 75 bp, Homo sapiens
ctggtacttcagctaagacaccctctgaggaccgctcaggaagtggcagcgaagaagactgagccccgacattcc

SEQ ID NO: 525471 - DNA, 74 bp, Homo sapiens
ttctgtcagctttctcattcctagattgatgcagattgcttaattccttgaggatctgtgccagttcagaagca

SEQ ID NO: 525472 - DNA, 75 bp, Homo sapiens
caaaagacaggctcttcacctgaagacattcaatccacgtcaaggaagagccagtgattgcagaggatgaagact

SEQ ID NO: 525473 - DNA, 100 bp, Homo sapiens
attccagacaccatggcccacctcatcagccctctgccctcccccacgggaaccatcagcgcccatgtccgcgagaagcccgacgaccccctgaactact

SEQ ID NO: 525474 - DNA, 100 bp, Homo sapiens
tggaatcaaggggtgtggaattaccttcactctgggaaaaggcactgaagttggaggctggtggcatgttgtcctcaatctcgacactactatcgccatc

SEQ ID NO: 525475 - DNA, 74 bp, Homo sapiens
cgggacgctgcacctcccgcgccgcacggtggacgaggaatactcccccagttgcaagaggcgcaggaccgtgg

SEQ ID NO: 525476 - DNA, 49 bp, Homo sapiens
ccggaaccgcgattcggcgtgtcaggtgaggacaccagtgatgaattct

SEQ ID NO: 525477 - DNA, 75 bp, Homo sapiens
cgcggctgggcgttcatctaccacgctttcgtcagtctgagctatcagctgaagaaagtccagaaaaattaggaa

SEQ ID NO: 525478 - DNA, 100 bp, Homo sapiens
ggccagcgcaggtggaggcggggctagcgaggcactgaggtcgcctgcgaggccgctggccaggcctgagcctctgccaccatggccattgtgcagactc

SEQ ID NO: 525479 - DNA, 100 bp, Homo sapiens
gggcagtcatggtcccagaaacgtcactatcaagaagctattgacctgaaaagtggttctggaaaagtgtaccaaggccctgcaaaaggtgctgctgata

SEQ ID NO: 525480 - DNA, 75 bp, Homo sapiens
ccagaatttcctgcgctgttccacctcattcaacttcagagacaagaggagcagcagcggcaccgcccctcaccc

SEQ ID NO: 525481 - DNA, 100 bp, Homo sapiens
tcacagaaatgacatcaacattaagagactggggaaccatgtggaaacaactctatgtgggtgatattcatgaggatttttgcagcgtttgcagaaaaag

SEQ ID NO: 525482 - DNA, 98 bp, Homo sapiens
ggacacgaagctgcatgtgtttgacgcaacggaatggccaaagactatgacgggtcttcctagcacatcagggacaactgccagtgtggtcatcattc

SEQ ID NO: 525483 - DNA, 97 bp, Homo sapiens
ccgcagcgcagtgacagtgcagaaccccggcgcggcccttggtgtatgcaacagcgttattgcaacaggctaacgaaaacagacaaaattcaactgg

SEQ ID NO: 525484 - DNA, 100 bp, Homo sapiens
catggtgttcaccccacttcatcagcgtacataagttatctcttcttttggacccttattttatgccataatgcattcacagctctgatggagggcaaaa

SEQ ID NO: 525485 - DNA, 83 bp, Homo sapiens
cggggttagccactgctggctgcttccagtgttcgccgagagacaatgcagatcttcgtgaagactctgactggtaagaccat

SEQ ID NO: 525486 - DNA, 97 bp, Homo sapiens
tgggatccacacagctcagaacagttggatcttgctcagtctctgtcagaggaagatcccttggtgccattgagaaacagaaattggtgtatatttt

SEQ ID NO: 525487 - DNA, 100 bp, Homo sapiens
tattctcttcttagtcagtgtatctaccgtcatcgtaaagattatgacaaatcacaacttgtagagcatggacaaggacagcccggaggtccaccaggac

SEQ ID NO: 525488 - DNA, 83 bp, Homo sapiens
aaagaatatgatgagaagaatagctgtgtgaagcattggaggtgatccttttaatggaacagattttattgactgcctcgaaa

SEQ ID NO: 525489 - DNA, 100 bp, Homo sapiens
ccagccaatgcattcagaagccaaaatgcacaaggccaatcagcccccccacggtgtcccccaactctctctctacgaacatttcaacagcccacatccc

SEQ ID NO: 525490 - DNA, 100 bp, Homo sapiens
cttctgtcatgagaagtggcgatcaaaattgattactgacagccctgtcctaggagcacaacgtccgagaaatgctcagcttgactgctccaaattggag

SEQ ID NO: 525491 - DNA, 100 bp, Homo sapiens
agaacatctgccatcaaggcccttaatgctacaggacaagcaaacctcagcctggaggcacttttccagctctgtgcctcagacaaaattctggagtttg

SEQ ID NO: 525492 - DNA, 100 bp, Homo sapiens
ggctgccccacttcgacctgagctgggaggccactagcagccagttccggcccgaggacaccgactaccagcaggctaccggctctctgaccagttccac

SEQ ID NO: 525493 - DNA, 75 bp, Homo sapiens
gtcactgcagctgaagccgctgcccctgctacaggttctgtacagagtaatgagatgtgtgacggctgcaaacca

SEQ ID NO: 525494 - DNA, 100 bp, Homo sapiens
tgacactgctgttcttatcactaggtatttaaaccatgtcagagctgcctcaccacaggaccttgctggaggctatacttcttctcttgcttgtcacaga

SEQ ID NO: 525495 - DNA, 101 bp, Homo sapiens
aggaggcaatggagggccaccaaactttgggaccaacactcagagcgtcgccaacatcatgccctaaactggcatccggccttgctgggagaataatgtcg

SEQ ID NO: 525496 - DNA, 75 bp, Homo sapiens
agcctcccaagtagctgggattgcagatatggcaatgacccttggccagtctctgggaactaaactcctgggatg

SEQ ID NO: 525497 - DNA, 83 bp, Homo sapiens
tttgttccctgcagccctcccacggtgagaagccctaccactgcaactgggacggctgcggctggaagtttgcgcgctcagac

SEQ ID NO: 525498 - DNA, 100 bp, Homo sapiens
cgccggcttacgtgcggcagggctgtgaggcccgccgctcgcatgagcacctcatacggctgcttctggagaaggaccaaactcttacccaggatctact

SEQ ID NO: 525499 - DNA, 114 bp, Homo sapiens
accaacactcctagccaatggtggtcatggagtagaagggagcgatactacagctatcttcactgagatttgccagcaggatgaagctagtcaccactgagcctgccatcaatg

SEQ ID NO: 525500 - DNA, 50 bp, Homo sapiens
accccagcccctctccagctcgaaatcgagaagggagcactggctttgct

SEQ ID NO: 525501 - DNA, 100 bp, Homo sapiens
ctcgaatgggcacacctgtgtagactgggacagggagaaattacttgaagcttggatgtccaacccggagaactgctgccaacgatcaggtgttcaaatg

SEQ ID NO: 525502 - DNA, 82 bp, Homo sapiens
cccaaagacgctaaacgtgccctactctgccccgggggagagccgcggcgagtcctttgcacatgttggcaacacacgcatc

SEQ ID NO: 525503 - DNA, 87 bp, Homo sapiens
ccggcggcgctggaggagcgaggcagctgtactaggactgggaacggcttacaagagcagtgattcccaggctttctcagcaatgta

SEQ ID NO: 525504 - DNA, 75 bp, Homo sapiens
cgcctgatgggtcgaggcggacgcgcggctgcgtcagactgcttttggcttctggatgccctcctccagtacaca

SEQ ID NO: 525505 - DNA, 101 bp, Homo sapiens
cggcgagtaagatggaagatgaggaggtcgctgagagctgggaagaggcggcagacagcggggactcacaccacccggcaagaactgctcactacggctcc

SEQ ID NO: 525506 - DNA, 50 bp, Homo sapiens
gggcacaccaaactccatctgctgctggaggactggactgctactactac

SEQ ID NO: 525507 - DNA, 100 bp, Homo sapiens
cctgagacagattgggaggtgtatctgagggagactgcaaatgctattgtcagtcagcaaactccacaaagattgataggcagcagtttgaagaaacagt

SEQ ID NO: 525508 - DNA, 139 bp, Homo sapiens
cggtccgtgcgagaggaccaacggagcgctgaggcgggcgttttcttggatgaattgcttgctttggagatctgacaggatggcatctgatgactttgacatagtgattgaggccatgctggaagctccctataaaaaa

SEQ ID NO: 525509 - DNA, 100 bp, Homo sapiens
gagactactggccgaaggggcgtctgcggctctccgccgtccccagccctgcctctccctgggctctggcattggccgctggaccaacccccagtaccgg

SEQ ID NO: 525510 - DNA, 75 bp, Homo sapiens
cacgccctttacctgcgtttcctggatgctcttaaaggaggttcagcaacatcagatgaccatgaatttgatcca

SEQ ID NO: 525511 - DNA, 95 bp, Homo sapiens
gtgcgaagaagctgcagccgcacctggccaaggcactgaccctcttgccgcaaagctgcacagcatcctcactgatgaggcgtttgagttttact

SEQ ID NO: 525512 - DNA, 75 bp, Homo sapiens
gcgattatggacccggccgaggcggtgctgcaagagaaggcactcaagtttatgatcatgaatcggttcagtggt

SEQ ID NO: 525513 - DNA, 75 bp, Homo sapiens
gttggagctttgcagctgacctacatctcgaagggcttaccacccaaaagatgggaggcagaagatacccacctg

SEQ ID NO: 525514 - DNA, 82 bp, Homo sapiens
aaatagtaggagaatcaaatgataaactgcgaggacagagccactgggttgagcaatgtttaaagcgtttgaaaaacatgaa

SEQ ID NO: 525515 - DNA, 75 bp, Homo sapiens
aaaaatccagaagtacaagcagtctgacgtccctggcaactgttcagaaaacccctgtcagaacggaggcacttg

SEQ ID NO: 525516 - DNA, 100 bp, Homo sapiens
cagattcgcagtggtcgcttcttctccttggtgtcatggagaaactccagctgggcccagagattctgcagcgggaaaatccaaggcttatttatgccag

SEQ ID NO: 525517 - DNA, 96 bp, Homo sapiens
ttggttaacttgggagaaagtttcatctgtggatggagtattggactggaaggatcaccagcacatatgcggccagtcagcagctgtcaccgtcca

SEQ ID NO: 525518 - DNA, 78 bp, Homo sapiens
gcccttgttcccccaaatgtctgactctgactctcggactgagaaacgcaaggacttgggaccctggaggactgacgc

SEQ ID NO: 525519 - DNA, 75 bp, Homo sapiens
ctggcaaaaacagcaagtggagtcaatcagcttgttgatttagagatgtttatgattacttccgagctgtcctgc

SEQ ID NO: 525520 - DNA, 78 bp, Homo sapiens
cccaagaccgagacctacgtggaggcaaacatggggctgaaccccagctcgcgggctgacgcacgaggcacacaggaa

SEQ ID NO: 525521 - DNA, 100 bp, Homo sapiens
cgccgcggccgccgcagccatgaccgtggagttcgaggagtgcgtcaaggactccccgcgcttcaggttggagcaaaacgtcccactcactggaggcacc

SEQ ID NO: 525522 - DNA, 98 bp, Homo sapiens
ggtgacctggcattagcactaatgatcacttacaaggacgaccaggccaagcttaagaagttctcctgtgcctcctgttggctctctttgcatctggc

SEQ ID NO: 525523 - DNA, 76 bp, Homo sapiens
ggtttctaccatgaatgaaatgaagagttattctcaagctgtcacaggagacagtcattttgtttactcattcagc

SEQ ID NO: 525524 - DNA, 96 bp, Homo sapiens
cgcagccacagcgcccacttctttgagtttctcaccaaggagctagccctgggccaggaccgatccaggtgattgagaatgatagagccagcagag

SEQ ID NO: 525525 - DNA, 100 bp, Homo sapiens
cctgaaatacatccaggaaagacatggagattctcttaaaaagggtgattctgggggcccacttgtctgtaatggtgtgcttcaaggtatcacgtcatgg

SEQ ID NO: 525526 - DNA, 101 bp, Homo sapiens
cacctgcgggaggagatcctcagcggcgccttgcggagggaccccaatggattaattgcctctgaaggagccataagtcccgatttcttcaatgattacca

SEQ ID NO: 525527 - DNA, 91 bp, Homo sapiens
caagtatggcaacatgacagaggaccatgtgatgcacctgctccagggtgtccgcaatgttgccagtgtctgtctgcagattggctaccca

SEQ ID NO: 525528 - DNA, 80 bp, Homo sapiens
ccccggcccaagggcgacttctccagccgggcccgcgaagtgtttccaacatggctagatccatcagaaactgaagccgt

SEQ ID NO: 525529 - DNA, 82 bp, Homo sapiens
tcagaggagtacttcgccacttactttaatgagaagatctccattcctgaggaggagattaagacatcagttatttgggcaa

SEQ ID NO: 525530 - DNA, 75 bp, Homo sapiens
aaatcctccttcagcctcctggcgcccatccgcagcaaggacgtccgcagcagcttttcttgcctggagaagagg

SEQ ID NO: 525531 - DNA, 100 bp, Homo sapiens
ggaggaagaagttgtgaaggacggcaggccaaagtgagacggggttttgccacattggccaagctgatctcgaactcctggcttcaagtgatccacccac

SEQ ID NO: 525532 - DNA, 100 bp, Homo sapiens
gccggagctgggcgcggattcgccgaggcaccgaggcactcagaggagagtcctgtgtatggaaactcacatgagtcagctcagtctagaagggtagtaa

SEQ ID NO: 525533 - DNA, 100 bp, Homo sapiens
tttgacccctttgacctcttcgatgtgcgagactttggaaaggctcgtggtcccaagaagcatctgaagcgggtggcagctccaaagcattggatgctgg

SEQ ID NO: 525534 - DNA, 87 bp, Homo sapiens
gagagtgacggagtcggcgagcccccgcggcgacagtgaaactggaacgccaagctgaagaagaacgaatacggaagcacaaagcag

SEQ ID NO: 525535 - DNA, 100 bp, Homo sapiens
cgcattttggcattgacatttaattttagggtcctttatatagaagggagacaagatggaaagttgccttttgttcctccggaggaagaatttattatgg

SEQ ID NO: 525536 - DNA, 98 bp, Homo sapiens
gagcaggagaagctgagcctttctggacagaccaacctgtcagtgctgcaagagaacagtctcaagtccgggaagggggcagctgccatgatcccagg

SEQ ID NO: 525537 - DNA, 100 bp, Homo sapiens
aatggtcaaaaaacatttgatttttggaaggatatagttgctgctatacaacacaattataaaatgtcagcttttaaggacaaaacctgctacaaccccc

SEQ ID NO: 525538 - DNA, 71 bp, Homo sapiens
gacattacatgttccctccaaactagatgccgagaaacttgttggtagagcttcttggacacttaatgatt

SEQ ID NO: 525539 - DNA, 100 bp, Homo sapiens
tggacggggaatcaagagacccggtttctaatccctgctctgtcactaacaagctgcgtgatcttcgaacagctttgctgagccatcaaggtctaatgga

SEQ ID NO: 525540 - DNA, 75 bp, Homo sapiens
ctgcgatcccgggtcatctccagatgctagggttatggggaaagaagccctcgtggatggaggaagaagatttat

SEQ ID NO: 525541 - DNA, 93 bp, Homo sapiens
ccgccctgttccccgcgctgcggcctggcggcttccaggcgcactaccgcgcggggatctgacgagcttttctctacttgtgtcactaacgga

SEQ ID NO: 525542 - DNA, 96 bp, Homo sapiens
gctttcacaaattacagcagtctgaatcgagctcagctaacctttgaatatctgcacacaaattcgcaatgtctacttcgatctgaagtctagagg

SEQ ID NO: 525543 - DNA, 83 bp, Homo sapiens
tctttgacgtccagaagaccaagtacctgcagatcctgacctctctgatgagatggatcggccctggccaacgtcaacattgg

SEQ ID NO: 525544 - DNA, 100 bp, Homo sapiens
aaaatggtgataatgaaaagatggctgccctggaggccaaaatctgtcatcaaattgagatttccttgatagctgccgtgccagtactctattggctgag

SEQ ID NO: 525545 - DNA, 74 bp, Homo sapiens
ggtgtctacagtgttctcgacttcgtcgctggtgcggctctatgagtggacaacagagaaggagctgcgcactg

SEQ ID NO: 525546 - DNA, 74 bp, Homo sapiens
cctaagattacttcacaaatcctgctgatcttaagaagagaatagaatctttaattgaccgggactacatggaa

SEQ ID NO: 525547 - DNA, 96 bp, Homo sapiens
ccgacgagcgctgcactaacgcaggatccggctgccgaaggtcctcgccaggtgtcatggagaaactccagctgggcccagagattctgcagcggg

SEQ ID NO: 525548 - DNA, 75 bp, Homo sapiens
gccgtggctatgttcgtgtccgatttccgcaaagagttctacgaggtggtccaaaccagccctcgtcactcccca

SEQ ID NO: 525549 - DNA, 103 bp, Homo sapiens
ctgctcatcgtttgcgacgttccctcagcctctgcccaaagaaagaaggaggaattgaatgatctggcacgggaccctccagcacagtgttcagcaggtcctg

SEQ ID NO: 525550 - DNA, 90 bp, Homo sapiens
tccaggctgggagcatccccttagcagcagcctctggtcggccctcctccacgctgacttccgggtctcactctcccacgcctgtaagaa

SEQ ID NO: 525551 - DNA, 75 bp, Homo sapiens
gctggccgacaacagcctggcgtccgccacggcaggtgacagcagggacatgtctcgggagatgcaggatgtaga

SEQ ID NO: 525552 - DNA, 75 bp, Homo sapiens
cgctcatgcatatttgagacaacatctggatggttggggagaacggtactccaaagattcaggtttactcacgtc

SEQ ID NO: 525553 - DNA, 98 bp, Homo sapiens
gccattgtcggctactgcgacgccaaatacgtctgggcagccacggccgggggcgtctttcagagcattacgcttcagaagctgcttaccatggaccc

SEQ ID NO: 525554 - DNA, 82 bp, Homo sapiens
gcatttggagtttatgcacttgagccacttatcaggaaaccccatctttgctgaaaaggagcatttagacagcacccgtggc

SEQ ID NO: 525555 - DNA, 90 bp, Homo sapiens
ctgttttctcactgtacttctgggtaaactggagaagagcttcaactctgttcacctgcttgcagggccggtgcgcttgctcccatccat

SEQ ID NO: 525556 - DNA, 104 bp, Homo sapiens
cgagaagctgctccggcctagcctggcggagctccacgacgagctggaaaaggtgggagacctccacagaacccttccagcaagctgtcttctaaagcaaacaa

SEQ ID NO: 525557 - DNA, 101 bp, Homo sapiens
tgggaagtgaggtgaaaagcttctgcagcgagaagtgctttgcggcctgccgacgagcctacttcaagagaaataaggacaagaccagcgctctgagcctg

SEQ ID NO: 525558 - DNA, 82 bp, Homo sapiens
tttgggatttgcattgatgaaacaggacgagattgaggagctgcgggccgagatgctggagatgcgggacgtctatatggag

SEQ ID NO: 525559 - DNA, 75 bp, Homo sapiens
gggaaatggctcatccacaccaagaatcagccacagacggaacaagcatgcagccttgagagaacctgggaaatt

SEQ ID NO: 525560 - DNA, 102 bp, Homo sapiens
atggaccaacttctttggcaagtggacattttactggctcaactctattaccaggttttaaacttcgccatgatcgtgtcttctgcactcatgatatggaaa

SEQ ID NO: 525561 - DNA, 98 bp, Homo sapiens
tagctggcattgctattcctgcaatgattattggcattcctgtgtatgtgggccgcaaggttttcctttggaatatggataaatacaccatgatacgg

SEQ ID NO: 525562 - DNA, 98 bp, Homo sapiens
cccaccgtggcctcccaaagtgctgagattaaagggattttatattggaagacatggatcttgctgccaacgagatcagcatttatgacaaactttca

SEQ ID NO: 525563 - DNA, 100 bp, Homo sapiens
ggaccatcctgctggtcagcactgcggctgattgaaacatcccaattagagccggagatagcccaggccacgagcagccggacagtggtgtacaacaagg

SEQ ID NO: 525564 - DNA, 104 bp, Homo sapiens
aagatcaccgtgacatccgaggtgcctttctccaaaagattcaagaaatccatggtgaaaggtttggattcctatgaagaaaaggaggataaagtgatcaagga

SEQ ID NO: 525565 - DNA, 75 bp, Homo sapiens
gctgaggcggcgcggcagcggagggacggcagtctcgcgcgccaagaagtatgatgcgtttttggcctcagagtc

SEQ ID NO: 525566 - DNA, 76 bp, Homo sapiens
ctgggatccacataatggagacattctgatggaatttggtcttgaatccagataatagttttgaaatactggttga

SEQ ID NO: 525567 - DNA, 100 bp, Homo sapiens
cttgtacctggtgttcggttatggagcctctctcctctgcaacctgataggatttggctacccagcctacatctcgtcttgccccagaagctgcgggcac

SEQ ID NO: 525568 - DNA, 90 bp, Homo sapiens
ctcaaactctatttgccaaaggaaacttgccttatcaccttcttgcttgcagatgctgaagaataccagcctcctatatggaaatcatac

SEQ ID NO: 525569 - DNA, 95 bp, Homo sapiens
cttagctgtgctcgcgctactctctctttctggcctggaggctatccagcagctccacgcaggagatcggtgaggagctgatcaacggagtcatc

SEQ ID NO: 525570 - DNA, 75 bp, Homo sapiens
agtgtaccctccaaatagcaaatgtacttggaaaatcacagtttgaggaaccactggccaacctgttaaatgaac

SEQ ID NO: 525571 - DNA, 87 bp, Homo sapiens
gcacacagcctgcgcaccgacatgcacatcagtggagtgtttgccaccaagattgatcagggaccatgaaaagaaacttgtgcttca

SEQ ID NO: 525572 - DNA, 100 bp, Homo sapiens
cctgtgtgacaccaagataagtaacgtcccaagctctttaaggagcccagtagtaaatcaaacaagccgattattcacaatgccatatcccattgctgcc

SEQ ID NO: 525573 - DNA, 97 bp, Homo sapiens
tgattagcttcgcagtctggaaagctttaggagttcacagtgtattgcactatgtggagaaacccagcacatttatcagtgacatcatcaactgcgg

SEQ ID NO: 525574 - DNA, 75 bp, Homo sapiens
gaaatcggcaaaagatgagcccaggaaaagggaatcccagcccctcaggatcaatggtgttaaggtatacactga

SEQ ID NO: 525575 - DNA, 98 bp, Homo sapiens
ctgccttccttgcagaggccatggaggacgaggagagacagaagaagctggaggccggcaaagccaagctttgaagaaagatgacaccacctttgatg

SEQ ID NO: 525576 - DNA, 75 bp, Homo sapiens
ctctgatccgcaagcatgctcagaccttcattgctctgtgtgccaccggatatgtgatggcgtccagtttggagc

SEQ ID NO: 525577 - DNA, 98 bp, Homo sapiens
caagctccacattggtctgttagagttcgaaaagctgagaatcctcagtgtttgctagggacagatatggcttttctaaagactgctttggaaatggc

SEQ ID NO: 525578 - DNA, 75 bp, Homo sapiens
tgcaagattctctcctgaagtcccagagttccaggaccgcacgctccgaggaggaccgggacggcctatgggatg

SEQ ID NO: 525579 - DNA, 75 bp, Homo sapiens
agtaacccgtttgccgacccggatctcaacaatcccttcaagaatgttgtaccatctttgggtaggcagacttcc

SEQ ID NO: 525580 - DNA, 88 bp, Homo sapiens
catagttcattttatgtgggaggatgttcagcagcgcggcagagtcatggggaaagacccaaatgggaccagtagtttgccaactgga

SEQ ID NO: 525581 - DNA, 82 bp, Homo sapiens
cggcggcgccgggtggtggttaaaccatgttaaggaggattttacagaggctatgtgatgatgatgccatttaaacgacagg

SEQ ID NO: 525582 - DNA, 100 bp, Homo sapiens
aaggccctgcccccagccctgcaggttcagcagcgtggctggaacgcctgagatccaggaactgaaggcggctgcagaactgaggtccaggctgcggact

SEQ ID NO: 525583 - DNA, 100 bp, Homo sapiens
tggaaaacctggccctcttcaatttctgacaaaagttatgtcacgcatctgatgaagcgaattcagagaggcccagtaagaggtatctccatcaagctgc

SEQ ID NO: 525584 - DNA, 100 bp, Homo sapiens
gtgacgtgttctccaaataccagctcgacaaagatggggttgtcctctttaagaaggagactacaactcaggagcagctggatgagatggaagagatccc

SEQ ID NO: 525585 - DNA, 100 bp, Homo sapiens
aatttacagaagattgtagatgatcccaaagctttaaaaacattgacatttaagttggttcctgatgttattagcagcataaggcaattatctaaagcgg

SEQ ID NO: 525586 - DNA, 83 bp, Homo sapiens
cgttgtggtgcgctgtcttcccgcttgcgtcagggacctgcccgactcagtgtttccctgaaacctgggctcttgaagacgca

SEQ ID NO: 525587 - DNA, 75 bp, Homo sapiens
atgcgacctctccatgcagtcagtggaagtggcggcctgtagtggtggagacacgcccagtggatgatcctactg

SEQ ID NO: 525588 - DNA, 98 bp, Homo sapiens
gtgtcctgggacttctctgatggcgagaggctgcggctgtaccaggattttttatcaagcagaaatgcatcgaacaacgagaatcaagatcactgagc

SEQ ID NO: 525589 - DNA, 125 bp, Homo sapiens
taaaattgacagagaggggaaaccccgtaaagtggttggttgcagttgtgtagtagttaagcattgggaatggtaccacctcccgaaaatgtcagaatgaattctgttaatttcaagaacattct

SEQ ID NO: 525590 - DNA, 100 bp, Homo sapiens
ctcatagcagctgcctgccagaatggaagcatacagatctgggaccgaaatttgacttctgaatcaccatcttattctcctcagcctcagccatttccac

SEQ ID NO: 525591 - DNA, 100 bp, Homo sapiens
gagggagcggcgccccctcccccctccggcgcggaccccgcgtgcgccttgctcgcccgcagccccgagaccgcagctcaagagggccagcagtgaggac

SEQ ID NO: 525592 - DNA, 75 bp, Homo sapiens
cggatattcagttgcacatccccacatcaatgcactgccaatgctttacattcagcccatgatgggggccggcct

SEQ ID NO: 525593 - DNA, 97 bp, Homo sapiens
aatttgaagatacatgagacagcagccaaacccccaggtttcaggctctgtataactatactcccaggaatgaagatgagctggagctcagagaaag

SEQ ID NO: 525594 - DNA, 75 bp, Homo sapiens
tttccgaacaggagcccccctccacagcgccgtccctgcactccaggcactggggagctccccagcagcgggagg

SEQ ID NO: 525595 - DNA, 50 bp, Homo sapiens
ttcatccctatgtggaaaacgaaattaagctgctcagcaaggaactgcgg

SEQ ID NO: 525596 - DNA, 100 bp, Homo sapiens
gaggaggttgcccagaagaaaaaggaatctgagaaaaaggggttgattgaaagaatctatatggtacaggatattgtttcaactgttcaaaacgtcttgg

SEQ ID NO: 525597 - DNA, 50 bp, Homo sapiens
agcatatcaatgcaggacgtacagttcagagctacagagacttctgaagt

SEQ ID NO: 525598 - DNA, 83 bp, Homo sapiens
cggcagtttcgtgagcgacctcagcaggtcaccgacgatgagggcgcacctgctgtcctggagcttccgatctctgttcgggg

SEQ ID NO: 525599 - DNA, 90 bp, Homo sapiens
tgagacggtgtcccgccgaaaggttctggagacagcctgtatttcttggatcttggcttccttccatcttcaaagccaacgatgaccagt

SEQ ID NO: 525600 - DNA, 90 bp, Homo sapiens
gtggaggtggagccgcccccagatcggccagtccgagcgtgccggacacagccaggtttttctctgtcagtgcagttgctatgttgcaga

SEQ ID NO: 525601 - DNA, 75 bp, Homo sapiens
gggaggggccttcctggtgctgcccctgggcaaggttgataacactgatgctgaggggaggctcatactggctga

SEQ ID NO: 525602 - DNA, 75 bp, Homo sapiens
gtttcctaaagttcgtgaatctcaacttgaaattgagagtcagattgacagaatctgtgaaatgggagaagtgat

SEQ ID NO: 525603 - DNA, 100 bp, Homo sapiens
gctgctgttgatgctggctttgttcccaatgacatgcaagttggacagacgggaaaaatagtagcaccaaacggaaagatgctgaaggatgggagaccgt

SEQ ID NO: 525604 - DNA, 75 bp, Homo sapiens
agaagacgaggatgatgcggaaattaaccccaaggtgctggagaatctggtaaaagcaccattgtgaagcagatg

SEQ ID NO: 525605 - DNA, 88 bp, Homo sapiens
ttggattggtgggatgtttcggaatgggcattgtcgccaattttcaggtaaagtgttgagagaggagaaccagtgcattgctcctgtg

SEQ ID NO: 525606 - DNA, 100 bp, Homo sapiens
cacgtgcgggatagacggggacaatgaggaggagacggagcacgccaaagggtaagaatgattgatgttggctgatattggagtgctcattcacatgaag

SEQ ID NO: 525607 - DNA, 82 bp, Homo sapiens
cgccatgtcgggttattcgagtgaccgagaccgcggccgggaccgaggctgcagcagaaggccgtggctagtgagatcttca

SEQ ID NO: 525608 - DNA, 83 bp, Homo sapiens
tggcggagcaggaggatgggcggttatggaaacaaaggacatgctttacatcgtcactgaatttgctaaaaatggagaaatgt

SEQ ID NO: 525609 - DNA, 99 bp, Homo sapiens
ttactccctctaataaaaccccaaggtagccctgggcagccttttccatggcctggatgtggtattccttcagccaacctccttgacgttactgtaccc

SEQ ID NO: 525610 - DNA, 82 bp, Homo sapiens
cccgcgtccgccgattcctcctccttggtcgccgcgtccttggctggcgttactgtaagattgatgttaaaggcatggtgtt

SEQ ID NO: 525611 - DNA, 96 bp, Homo sapiens
ggcggcgctggcggcggccctgggacccgcggaagccggcatgctggagaagctggagttcgaggacgaaggtttgcctgcaatgagatttcattc

SEQ ID NO: 525612 - DNA, 83 bp, Homo sapiens
gcacgagctgtgaggggattcacttgtgtgcggaactcctcggaaccatgtcttccgtgtgtgctaagatcgtgcagctcctg

SEQ ID NO: 525613 - DNA, 83 bp, Homo sapiens
gtcagttgtaaattacagagaacctaagtctgtttgcaaagcacctgaactgttatggctgcagcttcgattgccaatattgt

SEQ ID NO: 525614 - DNA, 100 bp, Homo sapiens
cggggcccgagtggttatctgcgacaaggatgggcggctgtgagtgtggaccccttctatgagatgctggcagcgagaaagaagcggatttcagtcaaga

SEQ ID NO: 525615 - DNA, 75 bp, Homo sapiens
atctgggcatgagaccccttctcccaggaggggaggccaagactaaggggctgcagagcggggtggacattggcg

SEQ ID NO: 525616 - DNA, 100 bp, Homo sapiens
cgaaggccctatcaggacatggagtatgaaagacgaaagtgaagtcactgcttttgctgtcttggatcaagaccagaaagaaattattgataccaatgga

SEQ ID NO: 525617 - DNA, 103 bp, Homo sapiens
cctgcagcgggagctggacggcgagcgcgagcggcgcgagaaagtgctggagaatctggtaaaagcaccattgtgaagcagatgaggatcctgcatgttaatg

SEQ ID NO: 525618 - DNA, 49 bp, Homo sapiens
cccatcaccatcacagagagcgatttgaggagctcaagcttgggaaaat

SEQ ID NO: 525619 - DNA, 50 bp, Homo sapiens
cagctccgaaatcaccaccaagccagctgaggtgggtgtcctggttggca

SEQ ID NO: 525620 - DNA, 88 bp, Homo sapiens
ttttatgactgttgtggttcctctcatcattggacaggttgctgcagcaactggtcacacagtagtgttggtagaccagacagaggac

SEQ ID NO: 525621 - DNA, 100 bp, Homo sapiens
ccgggcccggggccaccggctgtgtcgaggccgaagccgtgaatcgtgccatcaccatcgccaaccagaccaactgcccgctgtatatcaccaaggtgat

SEQ ID NO: 525622 - DNA, 51 bp, Homo sapiens
ctttgacaatacaggaaatgtttgttcttgggtgtctctggggagtccctg

SEQ ID NO: 525623 - DNA, 50 bp, Homo sapiens
ctaatcccaaatttgcagagcatggagagctgaactagagaaacatggtt

SEQ ID NO: 525624 - DNA, 95 bp, Homo sapiens
ggtcgctgctgcacccaaactttgcaaggaattcggtccagaggattacggcgaagagacaggggcaagtgtccgagtggtgaatcagctactta

SEQ ID NO: 525625 - DNA, 90 bp, Homo sapiens
gaacaagagaagacctcagatgtgaagtccattaaagatccacttcctcatgatactgtcttctaactgggcttacttaaaggatgcgag

SEQ ID NO: 525626 - DNA, 100 bp, Homo sapiens
aaactaaaagatgtcacaaaggaaaacgaggaaagtcccaggatgactactgtgtcaagcatggattccgtgaaggaacaacacctaaacccaagagggc

SEQ ID NO: 525627 - DNA, 116 bp, Homo sapiens
gtgccgggacctctgggcgctgtggctgctgctgaaggccggcgcagaacccttaggagaaatcttgagagtggacagcaattgtgaagatcgccagagagttctgtgtttcatca

SEQ ID NO: 525628 - DNA, 101 bp, Homo sapiens
caaaaactgagcagcaaccttgggggacctggatcatcacggactcccccaactggaaggcatttgacattatcacagactgacatggcagcattaacagg

SEQ ID NO: 525629 - DNA, 74 bp, Homo sapiens
ctcgagcctgaaggaccctgagaaagggtgtccgcaatgttgccagtgtctgtctgcagattggctacccaact

SEQ ID NO: 525630 - DNA, 96 bp, Homo sapiens
caccagagtcggcgtaactatcgcctgacagggtatctgaagtaaaagggggcttgttgattggtgctggctgtgccctctaccccttgggctggg

SEQ ID NO: 525631 - DNA, 100 bp, Homo sapiens
gtgctgatggctcccttggcgaaggagtctgtttttcaacccaggaagctcctgggcaacgtgctggtctgtgtgctggcccatcactttggcaaagaat

SEQ ID NO: 525632 - DNA, 75 bp, Homo sapiens
gaagagccaaggaataaacatgcaatgaacccaaaagggtgtgatccctcacatccacaaatctctgattggaaa

SEQ ID NO: 525633 - DNA, 95 bp, Homo sapiens
acatgttctctcggtttgggcggatcatcaactcgcgggtcctcgtggatcagactacaggattatatctgtccaagatgcgagtctggttttat

SEQ ID NO: 525634 - DNA, 100 bp, Homo sapiens
ttcactgcaggaccaggcacgaaagttcaaaccttgtactactcagctgatcacaagctgcttgatgggaacctactagatggacaggctgaggtgtttg

SEQ ID NO: 525635 - DNA, 82 bp, Homo sapiens
ttgcgcgtggaacggctgcttttggaagattatcaacgcctgatgactgtggcagaaggcatcaccacacttttgttcccat

SEQ ID NO: 525636 - DNA, 90 bp, Homo sapiens
acttgattacccgttaagtcccccaaagatgagatttacctgtgagatgtttcatcccaacagacatccccttgaatttttacggaatca

SEQ ID NO: 525637 - DNA, 87 bp, Homo sapiens
tagtggatgctcagatcagagacctgcagaggacctcaacatccgagtggaaaggatcttcatcatctgggccatcagcagttggtt

SEQ ID NO: 525638 - DNA, 121 bp, Homo sapiens
ctaaaatgaaagccatcattcatcttactcttcttgctctcctttctgtaaacacagggtcatccgagagttggctgcgagggcgctgcacaacctggcccagcaggcacccgagttcagc

SEQ ID NO: 525639 - DNA, 100 bp, Homo sapiens
gcgcactgaggaggcggcggccgacggtggcggcgggatgcaggaccaagaatcgccttcagccctgtctggtgcatccttggcagaaagtgaggaggaa

SEQ ID NO: 525640 - DNA, 75 bp, Homo sapiens
gaggagactccggcgctcgccatggccgacgaaaagcccaaggacggtaataacggaagaattcaaagtgcctga

SEQ ID NO: 525641 - DNA, 100 bp, Homo sapiens
atcgtgtgagcgtcgccgacacctctgagataaaagggcccctttcgactagcctctgctgaaaggtcttccgaccccgaactccaccggaggcaattgc

SEQ ID NO: 525642 - DNA, 88 bp, Homo sapiens
gcagaatacctttacagaggttaaaattgattgtgttcacctattgaaaattaaaaagacattttgtttatgtaaaagattaacagaa

SEQ ID NO: 525643 - DNA, 98 bp, Homo sapiens
gcagcgcgccagcaggatggcccacaagcagatctactactcggacaagtacttcgacgaacactacgagtaccggcaaggggagagccagttgcgca

SEQ ID NO: 525644 - DNA, 100 bp, Homo sapiens
ccgggagcctcttcggcttctcgctggccatgcactggcaactgcagcccgaggacaagcggctttccagatttcggaaggttcacgagtgttgccgaca

SEQ ID NO: 525645 - DNA, 100 bp, Homo sapiens
gcttgactcccccaaggccgaggtccgcggccaggtgctggcgccgctgcccctccacggaggaggagatgttaaagtaacccatcttgcaggacgacat

SEQ ID NO: 525646 - DNA, 75 bp, Homo sapiens
taaaacaccacgatgaaaagaaatacctgtgatttgctttctcggagcaaaagtttttttgtagcatcagatcca

SEQ ID NO: 525647 - DNA, 102 bp, Homo sapiens
tccgggtggagttcagtgaaagggcagatccaaaatacggagctggcatatacttcaccaagaacctcaaaaacctggcagagaaggccaagaaaatctctg

SEQ ID NO: 525648 - DNA, 100 bp, Homo sapiens
aaaaaaggccggcggcgggtggacgcggcgcgcgaggacccgagccaggcggggacaggacggcggggcgagccagattgatcattcttagaagagctgc

SEQ ID NO: 525649 - DNA, 101 bp, Homo sapiens
ttgacacacctcatggtatatttgcagccagtactctatatgaacaatccgtctggatcacggatgtaggaagtgttgaccacgttgttcctgagcctggg

SEQ ID NO: 525650 - DNA, 119 bp, Homo sapiens
gaaaacgaacttcccacgtttgctatgttgccctttggagacaaaacaagggagaagatgtcaaccggacactagaaggtggaaggaaacctcttcattatgcagcagattgtgggcag

SEQ ID NO: 525651 - DNA, 73 bp, Homo sapiens
gaggatctcttctaacatccagaagatcacacagtgttgtacaaacccgtagtgctgatgaaccaatgacaac

SEQ ID NO: 525652 - DNA, 95 bp, Homo sapiens
acaacatggaccgggccgcggtccagaccaacatgagagacggaaatgtttcaacgtgcgcaagcgttgcggcggcgggcagaggactactacag

SEQ ID NO: 525653 - DNA, 106 bp, Homo sapiens
gcccctgagctgggcgagaggtgccaagggagcttctgtcccgaggaccaggggatgcgaagggacctgaaggagaagaaggagaaggtggaggagaaggcaagcc

SEQ ID NO: 525654 - DNA, 108 bp, Homo sapiens
cgccgcaccaggtcttgtagcagcgcctcctcgtaatctatgccagcaattatgacaatgttagcagaccatgcagctcgtcagctgcttgatttcagccaaaaactg

SEQ ID NO: 525655 - DNA, 82 bp, Homo sapiens
gtcaaggtggcctaccaggaggccaggggtgtcgccatgggcgatgagggtggagagcgggtgctacagcagcgctggacct

SEQ ID NO: 525656 - DNA, 90 bp, Homo sapiens
cggcggaggctttggcagctcgggactgagtgcaagagagaagaagaaggaggttcctgctgtgccagaaacccttaagaaaaagcgaag

SEQ ID NO: 525657 - DNA, 98 bp, Homo sapiens
gagaatatattttatctggctcagatgacaccaaattagtaattagtaatccttacagcagaaagtattgaatttgaccgggattgtgactattttgc

SEQ ID NO: 525658 - DNA, 75 bp, Homo sapiens
cgagtcctgtactggactgcatcaggccgcgtctcctcagggaggcactggctacaattaggcttctcgacgtcc

SEQ ID NO: 525659 - DNA, 80 bp, Homo sapiens
aatgacagcggcgaggagaacgtcccgctggatctgacccgaggaaataatgcaaaaggtgtcccaaggctcctgaccag

SEQ ID NO: 525660 - DNA, 51 bp, Homo sapiens
aaatgcagctacagctgtggctctacagcatgtcccaaattaccatacaac

SEQ ID NO: 525661 - DNA, 75 bp, Homo sapiens
atgatggaagttcatttaagtcaccagacacagctgaacatgaactaaatctggcaagaaaaatgagggaatgga

SEQ ID NO: 525662 - DNA, 83 bp, Homo sapiens
ctcacaatgaggctccctgctcagctcctggggctgctaatgctctgggtctctggaagtacgcagccatctcctcttcggag

SEQ ID NO: 525663 - DNA, 90 bp, Homo sapiens
tgctgaatggcaatggcacaaagttctctcgatcagggcatacatctttcttcgacaaaggcatcaagatggtgctcatgtggaccagtg

SEQ ID NO: 525664 - DNA, 85 bp, Homo sapiens
tgttacaaattgaaggtttctggctatttagcagacatgacccacaagcagaagaagcattagcaaagaggaggggaagaaacag

SEQ ID NO: 525665 - DNA, 101 bp, Homo sapiens
agcggcactctgcccttccagagcaagcatggagcaacaggatcagagcatgaaggaagggggtgtccgcaatgttgccagtgtctgtctgcagattggct

SEQ ID NO: 525666 - DNA, 116 bp, Homo sapiens
tgctccgaaaagtcgaccaccctatagaccaagaattggagacgcatgctgtgccaaatacacaattatatcaacatgccccctttcctgttgctggaagccgtctgtgttttcct

SEQ ID NO: 525667 - DNA, 75 bp, Homo sapiens
cgctctgcggcgggtgtccctaaactagcagtttagggtgtcagctgatgccattaataatgctgcaggctttgg

SEQ ID NO: 525668 - DNA, 75 bp, Homo sapiens
atttaatgaagaaaagaaaggaatccgtaaagacccatttctctatgagaaatatatgcaagaggcacgaagttt

SEQ ID NO: 525669 - DNA, 100 bp, Homo sapiens
gccccagcagcccccgaaggccctatcaggacatggagtatgaaagacggtttctgcctcaatgctcaagcagtttcccaacagtggcctgagtccaggt

SEQ ID NO: 525670 - DNA, 83 bp, Homo sapiens
gaaagatctaccttctggaagctactactacgtggtgcttggaaagggtttggattcaggatttgttcctagtgtccaagatt

SEQ ID NO: 525671 - DNA, 101 bp, Homo sapiens
cagattaaaacgagaaattgagaaaaggagaggagcacagattcaggcagcaatgctcttaaagttccgtacagataaaggaagagatcccagttctgata

SEQ ID NO: 525672 - DNA, 49 bp, Homo sapiens
tgagatgattgccaaacccccagatgttcggttactgcttaataatgac

SEQ ID NO: 525673 - DNA, 50 bp, Homo sapiens
gtcactcataagcgcgctcaagataacagtgtatcatgtatgccactgat

SEQ ID NO: 525674 - DNA, 76 bp, Homo sapiens
tacctgattacttgttacccatttgtgcaggaaaaccagtccaataggagctcttgtccctggcaaagcgaaagcg

SEQ ID NO: 525675 - DNA, 75 bp, Homo sapiens
ccccagcagcccccgaaggccctatcaggacatggagtatgaaagacgaggatgccagcccccatcagattgcgg

SEQ ID NO: 525676 - DNA, 100 bp, Homo sapiens
atcctgaagaagtgtgttggcctgtcctcgtcccgccgcgccggcctctgctgcaccaactgccacacgaccaacaccacgctgtggcggcggaactcgg

SEQ ID NO: 525677 - DNA, 100 bp, Homo sapiens
actgaaagatatcagcaccttggaacctttgaattgcggcgagcagtaagaagcagcgtgtggaaaagggagacgattgttcatcaacatgagtatggac

SEQ ID NO: 525678 - DNA, 100 bp, Homo sapiens
agcggtggctgggcaaggccgaggagtgcgattcccgtgcctggtacgcaggtatctgcatgtaaaatcttcagctggtggatggtgacttttgaagaac

SEQ ID NO: 525679 - DNA, 83 bp, Homo sapiens
tccactttcgccagcccgtgccgcgagcgcggcctgcaggaggcggtgcgtctttctacgtgaataggattttgtggctggcc

SEQ ID NO: 525680 - DNA, 90 bp, Homo sapiens
gaaaaactggagagcttcatcaaaaatagtgatagctttgataaatggagtcatcagaacccactgtgaggaagtgacttctccttgagg

SEQ ID NO: 525681 - DNA, 100 bp, Homo sapiens
ctgccgtctcttaccagccagccccaccaagtgctggccagtgagcccatcccgttctctgatttgcagcaggtactggttttggattaggaattgtttt

SEQ ID NO: 525682 - DNA, 74 bp, Homo sapiens
cctgccggggccgccctactctggggcttcctgctccagctgttttcagtgtggacagcagatgaaggaattga

SEQ ID NO: 525683 - DNA, 90 bp, Homo sapiens
tctgttggattctaatgcagttcatcacatcattcatgattttcaggtggacattgaagtggacctaattcggttttccttttaaaagcc

SEQ ID NO: 525684 - DNA, 82 bp, Homo sapiens
acctcaagaccgagaacctcctgctggatggcaacatggacatcaagctggcaggtacaatggcttggtgaccggcacgagg

SEQ ID NO: 525685 - DNA, 75 bp, Homo sapiens
acattgtattgagaacaatatagatttgcaggtgatagaaattgaagatgcttcacccaccaagtgtccaataac

SEQ ID NO: 525686 - DNA, 80 bp, Homo sapiens
gatgcggttttcctcgcagaacgcctttatgcagaagctccctgtgctgtcaggaatctacaggacttggctcgtattta

SEQ ID NO: 525687 - DNA, 98 bp, Homo sapiens
cggcttccgacgtgcagcctggcagtgcagtggatgaagtggcacacactctaactgaaagcagagtattaaagaacactagacatccctttttaaca

SEQ ID NO: 525688 - DNA, 90 bp, Homo sapiens
aaataagggcaatgcagttttcatgtgtgtaagctccctgtgctgtcaggaatctacaggacttggctcgtatttacattcgacgcacac

SEQ ID NO: 525689 - DNA, 75 bp, Homo sapiens
cctgcggccaattcggtggaacgaggacgcggactgcgaaggcagtgccggtggtggtgtgcacattgagccccg

SEQ ID NO: 525690 - DNA, 80 bp, Homo sapiens
tccaaaagcagcgaggtattcaccacattcaagcaggagatggaaaagatgccacacgctggcagctctgaccagcccca

SEQ ID NO: 525691 - DNA, 100 bp, Homo sapiens
acaccaactacctgtcggcctgcagcttcaccaactctgacatgcagaccaccgctgaaacttcacttctacacagaggctttctttcccagaaacccag

SEQ ID NO: 525692 - DNA, 90 bp, Homo sapiens
gaagaatgaggtgttcttggacgtcatcgagtctgtcaacctcttgctcatgatggagcagtccaagaagtcctccctcatggtggcccg

SEQ ID NO: 525693 - DNA, 88 bp, Homo sapiens
ccggagtggacgtgtcttttgaaactgctgctctttcacttctcaggcgtcaccgagagctcagccaagctctactccaggaagtgaa

SEQ ID NO: 525694 - DNA, 95 bp, Homo sapiens
gtctttgaggacacagcctcgctggaggcagtttctgtgtactaatggtcacttgatgtgcgctggctgttttatccacctactagcagatgccc

SEQ ID NO: 525695 - DNA, 75 bp, Homo sapiens
gcggaggcagaggtggaggcgctttgaaagaatgtggccccgtcccagagcaccacccgagacatcaggagccca

SEQ ID NO: 525696 - DNA, 100 bp, Homo sapiens
cttggaaaaaaatatttttggagaagaatccaatgagtttactaatgactgggcctgccgaccatgcccgcgggcgtgcccatgtccacctacctgaaaa

SEQ ID NO: 525697 - DNA, 100 bp, Homo sapiens
ggagcggccggagtcagcgatggtgcccggcgaggagaaccaactggtcccgaaagagatcactggcgttatccttcttgcagttggcatttggggcaag

SEQ ID NO: 525698 - DNA, 100 bp, Homo sapiens
gccagcgaagagatctacattaaccagctggaagccctgttgctgaccttcacggcatggtgcaactcccacctgcggaaggcaggcacacagatcgaga

SEQ ID NO: 525699 - DNA, 96 bp, Homo sapiens
ctctcccagcctggagcagccggaccagcccagaaggcagcggcggcccaggccagcattcccgcaggggggccctcagcctcttggccttgaacg

SEQ ID NO: 525700 - DNA, 97 bp, Homo sapiens
aactctggtatggacacagcttctagtgttgctttggatcttgtggaaagtcagagtgtcatggagaaactccagctgggcccagagattctgcagc

SEQ ID NO: 525701 - DNA, 74 bp, Homo sapiens
ctggttctggaatcctcagttcaaggtattaacaagtaaaggtgacgcgtgggccaagtacatggcagaagtga

SEQ ID NO: 525702 - DNA, 100 bp, Homo sapiens
gatagagagggcattcaaagatgaatatatggtcaatttggtcagagctccagaagttcctgtactttacctcgtgtgggcctttattcctgaatcttgg

SEQ ID NO: 525703 - DNA, 75 bp, Homo sapiens
tgggagaaggcggggagcgagcacgtgctggaaacccaccttttgccagaccaactgccagagttttctctgggt

SEQ ID NO: 525704 - DNA, 82 bp, Homo sapiens
aaattcgttgatgttctggtggattatggatcagatccaaatcaagaaccatggagtctggcagtaccgccgccagtgagga

SEQ ID NO: 525705 - DNA, 83 bp, Homo sapiens
ctgaagctgaggacacacccaggaaaagactcaggacggacaagcacagtcttcggaaggacacattcagctaacgtatttta

SEQ ID NO: 525706 - DNA, 100 bp, Homo sapiens
gaagacactgcgactccggagacagcccaaatatcctcggaagagcgctcccaggagaaacaagtgacaaccagggcatccccatcatgtccagcatcaa

SEQ ID NO: 525707 - DNA, 75 bp, Homo sapiens
gcatgtcctcagtgcaatgctgaatacctaatagtttttccaaaattgggtgctggagaatctggtaaaagcacc

SEQ ID NO: 525708 - DNA, 48 bp, Homo sapiens
gcggaggcgcctcctgtctcagcttggttctacagccattgggatcca

SEQ ID NO: 525709 - DNA, 82 bp, Homo sapiens
cgacgacgccggcgactgcggcgctgcagcggagacggaaggctcgggaggcggcgccatatatggctcgtggacagcagaa

SEQ ID NO: 525710 - DNA, 73 bp, Homo sapiens
agagtttgaggtgtacggacctatcaaaagatccttccttcagaagggaaatttctgagggtcaggaagggga

SEQ ID NO: 525711 - DNA, 114 bp, Homo sapiens
agccggaggaggaggggagaggcctggaggacaccaacatgattgaagataaaactttccaagtccttggtaatctttacagcgagggagactgcacttacctgaaatgttctg

SEQ ID NO: 525712 - DNA, 80 bp, Homo sapiens
ggactgatctccatgtcctgttgtggggcttttacagcctttgggctgacattttggatgtcaatcagatatttaaagat

SEQ ID NO: 525713 - DNA, 82 bp, Homo sapiens
ctgtattggtctcctgctcctagaggtgacttaagagattaaaattaatttggttgctgttggttctgaacaaataatgagt

SEQ ID NO: 525714 - DNA, 101 bp, Homo sapiens
gcccggagcaagcggagctcccccaagagccggaaagaaaaatggctacaaacttcctagcacatgagaagatctggttcgacaagttcaaatatgacgac

SEQ ID NO: 525715 - DNA, 90 bp, Homo sapiens
gcattcgcccctgaagcccctcagcgactcagaccctgacagtgacaaagcagatactgggggccatggagtctcaggtgggggggggcc

SEQ ID NO: 525716 - DNA, 90 bp, Homo sapiens
acgtgcccttgagactcggcacgagcaggaacacctccccgctgctgtggtacttctactcagccctgccccgcggcctgggctgcagcc

SEQ ID NO: 525717 - DNA, 82 bp, Homo sapiens
atgggggtgaagctggagatatttcggacaatgcagatcttcgtgaagactctgactggtaagaccatcaccctcgaggttg

SEQ ID NO: 525718 - DNA, 101 bp, Homo sapiens
atggccgtgggtgccctgcaccatgaccctgagcactggccaagcccggagaccttcaaccctgaaagtggtttgatgataagaacccaatttgggccggg

SEQ ID NO: 525719 - DNA, 100 bp, Homo sapiens
gccaccaggttggagggcctaccaccaagctggtacaaggtgttcgtccggaagctccggaaggcttatgggaagagcgagtggaacactgtagagcgtt

SEQ ID NO: 525720 - DNA, 100 bp, Homo sapiens
ttaaacccttggaaaatttccggaaggaacaaataggcttcaccaagtttgcaggcctttcagatatatccatctcacaagacatccccgtagaaggaga

SEQ ID NO: 525721 - DNA, 75 bp, Homo sapiens
gtgtccctgaccatggctccctgcagtaccctttaacggaagaagaaattgtcgagacgaataacatgaggtcat

SEQ ID NO: 525722 - DNA, 100 bp, Homo sapiens
ctgtttctctgctgcaccgacctcgacgtcttgcctgtgtcccacttgttcgcggcctatagctacgagttccagggagctctgtcctggtgaccgtgcc

SEQ ID NO: 525723 - DNA, 100 bp, Homo sapiens
accaaatttgactacctgaaggaggaggaatacctgaacagtattttgcaacatgcaaaagattttaaggaatatcatcggtctgtggccggaaagatcc

SEQ ID NO: 525724 - DNA, 76 bp, Homo sapiens
caagaattcatctctgaagttacagctcaaatagctataactgtaccaaagacatggaagaaaccaaaagatcgga

SEQ ID NO: 525725 - DNA, 90 bp, Homo sapiens
catctccatcacccaccaacaacaccacaataatccacagccaagcatgcttttcacttccactgcatctctcgctggctcaaaacacga

SEQ ID NO: 525726 - DNA, 75 bp, Homo sapiens
aggccaacgacctgtttgagagtgggaacatgacgcaggtgcaggtgttttccgagtacttcaaggagctggagg

SEQ ID NO: 525727 - DNA, 75 bp, Homo sapiens
tcatcgagctgtccgacaaccctggcgtccatgagcctggtacttctcccagcagctggtctcttacagttacag

SEQ ID NO: 525728 - DNA, 74 bp, Homo sapiens
ctccaacagcttacctgagccagccaagaagagatattttggggactttgaaaaaagaattcctcgtgaagaga

SEQ ID NO: 525729 - DNA, 100 bp, Homo sapiens
gaggccctcagcttgtctgcactggcagtgacgatggcacagttaaggactggtctttgatgtgtccaaatgagtgtcctggtctggatgaggtttgggg

SEQ ID NO: 525730 - DNA, 100 bp, Homo sapiens
caaggagaatggctatgtgaccatgtcggtgggaaaagtctttcaccctgagtgttgccagggacggcagtatctctttgtgtgaccctggcggcttatg

SEQ ID NO: 525731 - DNA, 88 bp, Homo sapiens
ttttcctagtgctgatgaaactgatggtaacctcccaggagctggagtcagatggcagcactatggaggactattcacaggaggactg

SEQ ID NO: 525732 - DNA, 92 bp, Homo sapiens
cagaactacaggggctctggccatcttcgtggaaagaccacagcaagattctttcattcgtctcctcctagcctgggggaccaggctcgaac

SEQ ID NO: 525733 - DNA, 88 bp, Homo sapiens
ccagctaacaaacttgctaaaggaaataggttattcatgagatttgctacaaaagaaaacatccagtacagacctttctgatatccct

SEQ ID NO: 525734 - DNA, 105 bp, Homo sapiens
agcagctcttccggaagatcaactgcagactgtcctattgcatctcaagccctggctgtcccaactccttgattaaagagctccatcacttcaggattctgggag

SEQ ID NO: 525735 - DNA, 75 bp, Homo sapiens
tacagaaattgaaaggcttcaaagctagcaggtttgacgcagaaggacaagccttagatggtgtttccatctctg

SEQ ID NO: 525736 - DNA, 74 bp, Homo sapiens
tggcaattctgaagaaactatggaggttaaaactcttggaaaactggaacggttgaattttagagtggggtttt

SEQ ID NO: 525737 - DNA, 75 bp, Homo sapiens
gtttggcatctgtggccgagttgctgttgccgggtgatagttggagcggagactaccagcatctcagacatgtcg

SEQ ID NO: 525738 - DNA, 74 bp, Homo sapiens
acacttctgatgacacctttattttaaaagctgatgttccaagaggcgtggagctatttcctatgacagttctg

SEQ ID NO: 525739 - DNA, 75 bp, Homo sapiens
gacaggcagtttgataacctcaaaccttcaggaggttacataacagaaccaagatccaattccctggagaatttt

SEQ ID NO: 525740 - DNA, 50 bp, Homo sapiens
caaggctgagggacgagaacgagaaatcctggctgacattgacttctcca

SEQ ID NO: 525741 - DNA, 82 bp, Homo sapiens
ggcggaggaacaaaggcgacccaagacacccagagagggacaggttttaaaatcaaagatgggaaaatcggagaaaattgcc

SEQ ID NO: 525742 - DNA, 89 bp, Homo sapiens
tggaagcagccgatccagcctgcggagcctgtggggcagcaaggacacccaggcccattattttcctccagcctccatggaccacagtc

SEQ ID NO: 525743 - DNA, 98 bp, Homo sapiens
ctgcatgcacgagccaggaactgcgcagcctcttcgagcgccgcggacgcgtcatcgagtgtgacgtggtgaaagggacatgagagatggctttagaa

SEQ ID NO: 525744 - DNA, 74 bp, Homo sapiens
ctacaggatggcttggccttgcacataaggcaagaaaaatctcgttgggaagtcctccaacaagaacaacggct

SEQ ID NO: 525745 - DNA, 100 bp, Homo sapiens
ctgtcaaaaacatgaacttaacacctctgaaattgaggaagaagagcacttttcaggattagaagaggctgtgtatagaaacatacaagcttgcaaggag

SEQ ID NO: 525746 - DNA, 83 bp, Homo sapiens
tggaccttggacattcagacttcagaatggtctggagcccggcactgtggtcataacagagcaggcagtggatacctgcttca

SEQ ID NO: 525747 - DNA, 105 bp, Homo sapiens
tcaccttcaacaaccccaccacggagttccggtacaagctcctgcgggccggcggggtgagaagccctaccactgcaactgggacggctgcggctggaagtttgc

SEQ ID NO: 525748 - DNA, 129 bp, Homo sapiens
tctccccaaccctctgcttggacagcccccacacgagcacgagatgcttcgccacccagttttcgtggtgtctatcgaagatccctttgaccaggatgactggggagcttggcagaagttcacagccag

SEQ ID NO: 525749 - DNA, 101 bp, Homo sapiens
acctctgggttcagcttttgccaagcttcagcgagttggaagactttgttgaagacttgaagaaggactccacggcagccagccgattggttactctgaaa

SEQ ID NO: 525750 - DNA, 102 bp, Homo sapiens
aggaccttctgattagtccacagtcttcctctatagatcctcagtttgtggtctgccagctaaaggtgaagatatattcctccaattcaggacccacacgac

SEQ ID NO: 525751 - DNA, 99 bp, Homo sapiens
cttcagccttgatgacggccatcttcccccggatcacagaagaactgcagcttcctggggagcagtttcacctccacaggcatcgcttcatactcctca

SEQ ID NO: 525752 - DNA, 75 bp, Homo sapiens
tctcactgtcaccagcctccagaatcatcacattccacttctaaaaggagctttaaagatggcctggttgaacgt

SEQ ID NO: 525753 - DNA, 98 bp, Homo sapiens
gaatgcagccgtgtgacagtaactgaacattggtctaaagtctttccaaaaggtcaaggttcacaaggctttacaggaagtatggtgctggcatctgc

SEQ ID NO: 525754 - DNA, 50 bp, Homo sapiens
ctgcctacagttttcacaaatctgcctcagttttctttctaggacaggtg

SEQ ID NO: 525755 - DNA, 100 bp, Homo sapiens
agatcccgggcggtggcttcctttccgccactgcccaaactgctgaagcagctcccgcgaggaccacccgaacccagtgacttgattgtaaaaatttaca

SEQ ID NO: 525756 - DNA, 82 bp, Homo sapiens
gcgtctgcccggccaagaggcaaaggggaggttacgcagcaaaccatccagaaggaagtcctgacggccacgctggatctgg

SEQ ID NO: 525757 - DNA, 89 bp, Homo sapiens
gtggagatgcttctgtggaagatgatgcttttatcaagggtcaactgtatttgttggtaacggaccaggggtttcttactgaagagaaa

SEQ ID NO: 525758 - DNA, 51 bp, Homo sapiens
aggcattgttctaattgatgcacataaggaaggaatgcagctcatttcaga

SEQ ID NO: 525759 - DNA, 100 bp, Homo sapiens
aaacatgttgtctgccccctacatgagaagcatgatgcagtcactaagccagaatcctgaccttgctgcacagggtccacatatagcctcagttacatta

SEQ ID NO: 525760 - DNA, 75 bp, Homo sapiens
aatgggcatggctcgtatgttttatcataaaagtcacagcttggaggaaaccagtttgcactatttgatgaggaa

SEQ ID NO: 525761 - DNA, 98 bp, Homo sapiens
gacccgctgctcagcgtcctcatgtggggggtaaaccactcgaactccatccggcacaacctgtcactgcatagtcgattcatgcgggtccagaatga

SEQ ID NO: 525762 - DNA, 75 bp, Homo sapiens
ctaatttgaaccatgtttggattgaagccgcctctgtattacttaccagcttccccgggcgctgcctggacaggc

SEQ ID NO: 525763 - DNA, 100 bp, Homo sapiens
ctgcgggtgcggcacctggaggaggagaaccgagcttatatagaattggtgataggatcacaacttctgaggtcccagcaagagtcctaacatctagcag

SEQ ID NO: 525764 - DNA, 100 bp, Homo sapiens
ttggacctaatgaggcgcctgcctccccagcaaatcgagaaaaacctcagcgacctgatcgacctgtagccggatcgagctgggagatgtgacaccacac

SEQ ID NO: 525765 - DNA, 109 bp, Homo sapiens
atgggcctttccagcccgtggtccttctccatattcgagagaaactcttgctactcagttggatctagcagaaacaaaagctgagtctgagcagttggcgcgaggcctt

SEQ ID NO: 525766 - DNA, 100 bp, Homo sapiens
ggaagattacttccccagtgttcccgacaacgccgagctggtgctgctcaccttgggccaggcctggcagggctgaggaacagcacagcatgctgggctc

SEQ ID NO: 525767 - DNA, 82 bp, Homo sapiens
catagagctgacattaactgtcagacgctctgctgttgcccgtattcaggagttcttcagacggagaaaagaaaggaaagaa

SEQ ID NO: 525768 - DNA, 51 bp, Homo sapiens
gcgatggccgtggccgtggggagaccgtctccaagagtcgaagctaaacca

SEQ ID NO: 525769 - DNA, 114 bp, Homo sapiens
tcccagcgtcgctccggacgctgccaacctgttctccaccgtcgctcgacttccacctctaagactcccacgtgtacattccaagcagagtggccctcatccttcagaatgtgg

SEQ ID NO: 525770 - DNA, 83 bp, Homo sapiens
agtgctcgcttcccttcgggggctttcgcgaatcccgaggcaatctcggaggcgttggttgaatctggcgatgtggaacccat

SEQ ID NO: 525771 - DNA, 83 bp, Homo sapiens
cagctggggtctacatcttcattcagagcatagcaggactggctggaccgccccttgcagccaataatttctgaagatcagac

SEQ ID NO: 525772 - DNA, 83 bp, Homo sapiens
tcccgaaagcgacgttcggccaccggaggagcgggagccaagcaggtctcaccaacggctttgggggtgcgaggagcgagcag

SEQ ID NO: 525773 - DNA, 51 bp, Homo sapiens
ggtttactggagtaggtgttagtaagatgccgctcctacgaggactgctgt

SEQ ID NO: 525774 - DNA, 100 bp, Homo sapiens
caaggctttggcaaagctggggattggccagctgactgctcaggaagtaaaatcggagcgcctggaccatgctgctgagcgcctactggcacggcctcca

SEQ ID NO: 525775 - DNA, 82 bp, Homo sapiens
gcggaggcggaggcagaggtggaggcgctttgaaaggagcccagcagccggggccgccctattacaccgacccaggaggacc

SEQ ID NO: 525776 - DNA, 75 bp, Homo sapiens
acggcattccagtgtgtcctcaagtggctggacggaccggtaattaggcagagggggagagacttgatgccaaaa

SEQ ID NO: 525777 - DNA, 100 bp, Homo sapiens
aacaagccgtggaataggtgtatcaagtaatggtgcaaagcctgaagctattcaagatctctggcagtggaggaagtctctttaagaaaatagtttaaac

SEQ ID NO: 525778 - DNA, 82 bp, Homo sapiens
ggcagtggccctggtggaagacttgcagaaagaacctggaagacagaggctggagggttatatcctgtgttgtgacctcatg

SEQ ID NO: 525779 - DNA, 90 bp, Homo sapiens
cagacttatgctggaactgggttttagcaaggtggatttgacatggaagtgaaaggttggggtggagaagatgttcatctttatcgaaaa

SEQ ID NO: 525780 - DNA, 74 bp, Homo sapiens
ggccttcctggtgctgcccctgggcaagctcctggacttctagggatctcagccgtggctgaggccacccccag

SEQ ID NO: 525781 - DNA, 120 bp, Homo sapiens
gagcggagacctggagttgtttgacttagtggaggaggtgcagctcaacttctaccagttcctcggggtgcagcaggattttttatcaagcagaaatgcatcgaacaacgagaatcaaga

SEQ ID NO: 525782 - DNA, 94 bp, Homo sapiens
cgacaagccgctggcagccgcggatctcaccgccgctcagggtggaagttaaacgagctgagcctcgggacagcaagagccaagcgccgggaca

SEQ ID NO: 525783 - DNA, 75 bp, Homo sapiens
actcaatggacgaagtacaaagccacattttcagcatttacacccaggaggcaggtggaagtcatcataaagttt

SEQ ID NO: 525784 - DNA, 82 bp, Homo sapiens
catcatcagacaactacaggcctgctctctggttccagctgacacagccagtgtaagcagcctgagtctgtctacaggacac

SEQ ID NO: 525785 - DNA, 51 bp, Homo sapiens
tagccccgtgggtgaggcggtctatcagattctacctttgtcacccaggcg

SEQ ID NO: 525786 - DNA, 100 bp, Homo sapiens
aggaatcgtatcgtatgtccgctatccagaacctccactctttcgcctacagacctggtacctggatttttgcccgagatgattcctaccaccttactac

SEQ ID NO: 525787 - DNA, 75 bp, Homo sapiens
cctcagatgctcccttctgctcctgataagcagaagacatctttaggattcttttgtgtgtttggaacagagaga

SEQ ID NO: 525788 - DNA, 82 bp, Homo sapiens
ccaggatctcgggctcggaacgagactgcacgaagcctccccagctttctgaggatgatatctggctaaaaagcgagggaga

SEQ ID NO: 525789 - DNA, 99 bp, Homo sapiens
ggagcataagaaaaggatagccctggaagcaaggcctcttctaagccaggagggtatcactgggatacatcagattggatgccaagcgttcctctgccg

SEQ ID NO: 525790 - DNA, 75 bp, Homo sapiens
ccgggcccaggtcccttcctccagacatgattggaagtcagcagctccagcctgcatgttcccagatcacctgta

SEQ ID NO: 525791 - DNA, 50 bp, Homo sapiens
gccgaggactccagcacaccgaggggaagcagtgggacttgcagttccct

SEQ ID NO: 525792 - DNA, 123 bp, Homo sapiens
tggcctagcacgtggaattcgcgaagctgccaaagccttagacaaatttggccagaccccagtacaagaaagactcagctgcctggccaagaacaactctatctatgttgtggcaaatattgg

SEQ ID NO: 525793 - DNA, 90 bp, Homo sapiens
gtcatggtgatgggtattacagatgtagatgataaaatcatcaaaagagccaatgagattgaccctcttgctggaatgacatctcttagt

SEQ ID NO: 525794 - DNA, 74 bp, Homo sapiens
ggacgaccggtggctgtggcgacatgtcgacctgacgctctacacgggcggcagggtcaggccatcacgctggt

SEQ ID NO: 525795 - DNA, 109 bp, Homo sapiens
taatattgtagatgaaacactgaagatgctcgatgagagttttcagtggaggaaagaaatttctgtcaatgatatcaatgaatgcttggaggacaagagtgtttgccag

SEQ ID NO: 525796 - DNA, 117 bp, Homo sapiens
agaaacatcttcgagatttcggcgaggagcatcccttctatgacagatgcctgtgaggagccaccaacatttgaagctatggagctcattggtaaaccaaaaccctactatgagatt

SEQ ID NO: 525797 - DNA, 75 bp, Homo sapiens
ctgcagagccagatgatccacaggatgctgtagtagcaaatcaggttggtttgttggaccttgaactcaatcggc

SEQ ID NO: 525798 - DNA, 100 bp, Homo sapiens
aacttgggagaaagtttcatctgtggatggagtattgtcttgtttctggcgctggagacatcaagcttactaaagacacaggagttgacgatcagccctg

SEQ ID NO: 525799 - DNA, 100 bp, Homo sapiens
cggaagcttcgaggcatgatggtcgactacaagaagagggcggagcggagacgggagtattatgaaaagatccatcatggcagaacaggatgtggaaaac

SEQ ID NO: 525800 - DNA, 51 bp, Homo sapiens
ctgtttgaataaggagccgagctttatattctctaagccgctttcatcatg

SEQ ID NO: 525801 - DNA, 83 bp, Homo sapiens
cgtgagaattcctcaatgactgccctctaaaggaagaggaactgtggctgcaccatctgtcttcatcttcccgccatctgatg

SEQ ID NO: 525802 - DNA, 71 bp, Homo sapiens
tctccgccatgcaaggctggcgcgtctccatggaggaagatgagaagtttttgtctgaagtttttgcacaa

SEQ ID NO: 525803 - DNA, 98 bp, Homo sapiens
tggcctttaaaaatgacatcagtttctggaagaagaagaagagcatgatcggcatgtccaccaaggcaggaggaggcctcggtggtaccagaagagga

SEQ ID NO: 525804 - DNA, 100 bp, Homo sapiens
cactgcagaggtgctggagctggcaggttacaatggccaacattggaataaatggaaatcattctctggaaacctgtgaaacaacactttttgctctccg

SEQ ID NO: 525805 - DNA, 74 bp, Homo sapiens
gcacaccaaacagagcctgcaggtgatcggccataaaattttgagtagaaaaatccagaaatttgaaaatcagt

SEQ ID NO: 525806 - DNA, 83 bp, Homo sapiens
ccgtcgcccaggagtcatcggacgccagaatctggcccgatgagagaaagggaaagttaaggatgctggagcagaacaatgga

SEQ ID NO: 525807 - DNA, 87 bp, Homo sapiens
caacttcagtgccaccgctctcacggcaggtggcacgggcgccaaggtgcgggagtatgagttaagaaaaaacaacttctcagatac

SEQ ID NO: 525808 - DNA, 100 bp, Homo sapiens
gaagttctaccggggccacagcgacgacatcatcagatatgaggccccaggattcctggcgaggtcctcctccccttttccagcagcaaaggtttgacag

SEQ ID NO: 525809 - DNA, 80 bp, Homo sapiens
gtgaagtggcaggaggaggaggaggggctccggctggtctgtggtgagggcacactacaaagagtatcttgtgagcctca

SEQ ID NO: 525810 - DNA, 82 bp, Homo sapiens
tggcggatggccccaggtgtaagcgcagaaagcaggcgaacccgcggcgcaataacgctctagccggcccggtccttggact

SEQ ID NO: 525811 - DNA, 83 bp, Homo sapiens
gagcctcagttggaagcagccgatccagcctgcggagcctgtggggcaggccaccagcttgggctccccacggagggcagcaa

SEQ ID NO: 525812 - DNA, 101 bp, Homo sapiens
ccaagttgggggctcagaggggagtcatcatgagcgatgttaccattgtgaaagaaggttgggttcagaagaggggtaccctcttagtggcatgggtttac

SEQ ID NO: 525813 - DNA, 74 bp, Homo sapiens
tgtgattagcttcgcagtctggaaagctttaggagttcacagtaaaaccacagcttttggaccctaaaaggtct

SEQ ID NO: 525814 - DNA, 100 bp, Homo sapiens
tggcgcctggtggacagcaaaggctttgatgaatacatgaaggagctagaaattcagagacgatcatgaaatttttgaaaatggggaacattagtcagga

SEQ ID NO: 525815 - DNA, 51 bp, Homo sapiens
gtctccatgccaggggacatctcaggaaggcagcctggaggaggtggccat

SEQ ID NO: 525816 - DNA, 75 bp, Homo sapiens
ctggcggggcttcccacccagcagcaaacggccagtgttggttcttcagaatgaagcactttatccacagcggcg

SEQ ID NO: 525817 - DNA, 75 bp, Homo sapiens
ccaggctgaccacgagcttttcctccaggcctttgagagatgagaacaagttgagcagtgccaacggccatgaag

SEQ ID NO: 525818 - DNA, 132 bp, Homo sapiens
ccgagctcgcctgcatctactcggccctcattctgcacgacgatgaggtgacagtcacgacatgccaccattagggcttcatttccctgcagtcttctttaaataccaaaactgccctgggaaggataagac

SEQ ID NO: 525819 - DNA, 74 bp, Homo sapiens
cggtccgcccgtcggtctgcagcgcggctgaggccagaactgcacgttccaactgcacggtcccaatgggacag

SEQ ID NO: 525820 - DNA, 100 bp, Homo sapiens
tagttttgaaggcccttgtgaagggagaccagtatgatgtctgtgccatttgcctggatgaatatgaggatggggacaagctgcgggtactcccctgtgc

SEQ ID NO: 525821 - DNA, 90 bp, Homo sapiens
gaaactgttattcgggcattctacggagggagatattcttgagccaaatatcatgcagcttcgtgacagactttgtagagcacaaggaga

SEQ ID NO: 525822 - DNA, 106 bp, Homo sapiens
tccgcccaggcgcagatgcgggccctgctggaccagctcatgggcacggctcgggacgatgcctgctctgtgcctgtatctgagatcatcgccgttgaggaaacag

SEQ ID NO: 525823 - DNA, 100 bp, Homo sapiens
aacagatgctaatttgggaaaaagctccaggattctgacagggatgttgcgaagatgctttcttcacatgtcgaaaaaatgtccttctggcgaacagctc

SEQ ID NO: 525824 - DNA, 75 bp, Homo sapiens
aattgaaaacatctcccaatgaagaggcttcgtgacggagttatcagagacattgagaggcaaattcggaaaaaa

SEQ ID NO: 525825 - DNA, 75 bp, Homo sapiens
ccgagaaagcccgctgggaggccgagcgcgccgagttacagaggtggggctggtgtccgagcacttctcgcaggc

SEQ ID NO: 525826 - DNA, 98 bp, Homo sapiens
ttaaaaaaggaaaccccggagagcgagagcgcgaaggaaatctggccgccgccgccgcgagcgctcccggaaagtccatcagcttgataatggaggag

SEQ ID NO: 525827 - DNA, 82 bp, Homo sapiens
agtgattccccggaatcgtgtgctgggctggtcccccttgctgtctgcttttctgtggagactgcgggttgcagacaccagc

SEQ ID NO: 525828 - DNA, 100 bp, Homo sapiens
ctgcagcctcggtggccccgacatgattccttacttctccgccaacgcggtcatctcgcagaacgccatcaaccagctgatacttctagaattactggct

SEQ ID NO: 525829 - DNA, 98 bp, Homo sapiens
ctgaccgagaagtgcttctccagggaaggcaaactctactgcaagaacgacttcttccggacacaatgtttgcacgaggactgaagaggaaatgtgtt

SEQ ID NO: 525830 - DNA, 75 bp, Homo sapiens
gccatgggcaacctgcagatcgactttgccgacccctccagagcgtttcaggaaaatgccagtgaagggaaggcc

SEQ ID NO: 525831 - DNA, 97 bp, Homo sapiens
ttcactaccgtagaagaccttggctccaagatactcctcacctgctccttgaatgacagcgccacagaggtcacaagctacctaactaagaagtttg

SEQ ID NO: 525832 - DNA, 83 bp, Homo sapiens
atgcaatggtctcaatctctggaaaaacttcttgccaaccaaagataaggagccccgtggaatcatccctttagagaatctga

SEQ ID NO: 525833 - DNA, 75 bp, Homo sapiens
ggagtcaatggcaggaaacaagccagccaatgcagtcctgcacaaagaccgagtgacggttctctacaggagcaa

SEQ ID NO: 525834 - DNA, 51 bp, Homo sapiens
ggacaacagaacaatattggaatggtggccgaagaactggagtattcttgt

SEQ ID NO: 525835 - DNA, 100 bp, Homo sapiens
tcggcttgtagagagattgcagaagaaggtagataatgactataatgcccttcgagaaagactcagcaccttgcctgataaattgtcttataatataatg

SEQ ID NO: 525836 - DNA, 74 bp, Homo sapiens
ctgcacatgtatgacagtgacaaggttcccgatatggatgatgaagaaggagaaggagaagaagatgatgatga

SEQ ID NO: 525837 - DNA, 100 bp, Homo sapiens
ttatgatttactggatgaactgataaaacccaccagtctaggattcgcccgtccttccagttggagagttctcggagccatttgtacatttcatcactca

SEQ ID NO: 525838 - DNA, 75 bp, Homo sapiens
ctggtccaggccttccagtacacagacgagcatggggaagtggtggtgaccgcggtggcttcaaaaattttggtg

SEQ ID NO: 525839 - DNA, 83 bp, Homo sapiens
cgtggccggagcggcccgcgcctgggctgccggcacttcgcggcagcagcctcccgcgacgatgcccctcaacgttagcttca

SEQ ID NO: 525840 - DNA, 101 bp, Homo sapiens
aggccacacggcagccacgggggcagccgtcgcagtcgccgtcccacacgggctgcggacaccaagggttgctagtggggaagaaaacatgacagaaacag

SEQ ID NO: 525841 - DNA, 100 bp, Homo sapiens
gtcccggccctgagcgcactctggagggattctggcatcagggaggctttcagccggagaagcgagtttcagctggggaagatggtgaaaggaatgggag

SEQ ID NO: 525842 - DNA, 74 bp, Homo sapiens
gcctgaactcaaagatgcccttaaaagggtggttctcttcccaaagtggaagccaaattcatcaattatgtgaa

SEQ ID NO: 525843 - DNA, 99 bp, Homo sapiens
cagagccatcttcttcaatcggatcggtggagtgcagcaggacactatcctggccgagggccttcacttcaggtccaaattaactgtgctacagatgac

SEQ ID NO: 525844 - DNA, 90 bp, Homo sapiens
tgatggcccggcatgggttaccgctgctgcccctgctgtcgctcctggtcggcgcgtggctcaagctagacttcagattttcctgtcctt

SEQ ID NO: 525845 - DNA, 75 bp, Homo sapiens
ggcagggaaaacctacaggtggtgtgtgtgtggccgcagcaagaagcagttcctggtccagaactttacacagaa

SEQ ID NO: 525846 - DNA, 75 bp, Homo sapiens
ccggagcatcccccagccagatggagaagcttcccaagctcttccttcagtcccacgactacagtctgtattcct

SEQ ID NO: 525847 - DNA, 97 bp, Homo sapiens
agaagatcgaaaattaaacctcagtattctttctaccagcagttgcatgaacaaaaaaagtcagaaaaattctttaaagttctctatgatcgaatga

SEQ ID NO: 525848 - DNA, 100 bp, Homo sapiens
gagggaaaaaggagaaagttaactgaattggtgacacttcgggtctctcacagaggaaggaggatattctacgaagctgggggagctgggactcgagcca

SEQ ID NO: 525849 - DNA, 96 bp, Homo sapiens
aaaggaaccttcattaacagatgccattccctctcacccaagagaactgagtccaggaacacctgccttgttcagtgaagccgctgcccatctaaa

SEQ ID NO: 525850 - DNA, 100 bp, Homo sapiens
ctgagggggcgcgaggggaacggaggccagagctgcggcatagaatgtcaagctaaccaggcgtccgctacttcagaagagtgtactgtcgcatggggag

SEQ ID NO: 525851 - DNA, 50 bp, Homo sapiens
tagaaaaggagttgttgagagtagcaggtgtccgcaatgttgccagtgtc

SEQ ID NO: 525852 - DNA, 100 bp, Homo sapiens
gttggtttaaagcgattttttcctaagagtttactggattctgtcaaggccaaatttgagtttcatcatggtgactatgaaaaacagtttctgcatgtac

SEQ ID NO: 525853 - DNA, 100 bp, Homo sapiens
ctgccaagctggatcttgatgcgggacttcagtcctagtggcattttcggagcgtttcaaagagattctgaaagtcaagaagacatcatccggaatattg

SEQ ID NO: 525854 - DNA, 100 bp, Homo sapiens
ctattgtggttgaacaatggacagtcctggaagaaagaaaccttgactggttccccaggatgagagccatgtcattggtcagcagtgattctgaaggaga

SEQ ID NO: 525855 - DNA, 83 bp, Homo sapiens
gcttggtgtcctcctggcctcagcaacctgacaattctgtcgtgtcccgggcgccatgttttggaagtttgacctgcacacaa

SEQ ID NO: 525856 - DNA, 100 bp, Homo sapiens
tttgggactgctgtgcctcctcctcctgtggtggaggagaaggaaaggttatcaatactctggctgaccatcatcatcgtgggactgactttggtggaag

SEQ ID NO: 525857 - DNA, 103 bp, Homo sapiens
ctgggggctgcggcctagaggtccgggcttggagttcgcctcagacgcggtggagccgccggagtctgagaaggtgcgaagcccagcggtgcagagtccagca

SEQ ID NO: 525858 - DNA, 52 bp, Homo sapiens
aatacccagttcattgagaatgatgagctttctgatgttagccaaggcggat

SEQ ID NO: 525859 - DNA, 100 bp, Homo sapiens
gtcctgagatcaaatggcacttcattggccacctacagaaacaaaatgtcaacaaattgatggtatccctctgaagaagatatgatcgaatgggccaaga

SEQ ID NO: 525860 - DNA, 100 bp, Homo sapiens
gaagcccagtcttccgaaatgcggtgctcagctctagcctctcggaatttgtcttcttcagtggaaaccccgagaagactgatcagttcttcagttctaa

SEQ ID NO: 525861 - DNA, 100 bp, Homo sapiens
gagtttgctaaatttgaaaaggagaaaatgaatgccaaatgggacacggctgtttatatcactggaaaagaagttttcagcttcaaaatggtttcttaca

SEQ ID NO: 525862 - DNA, 97 bp, Homo sapiens
ttagaagtggtgatgcaagaagtttctaggaaaggccggacaccagaatggtagtcgaagaagaacaccaggtggagtttttctgaatctcttgaaa

SEQ ID NO: 525863 - DNA, 96 bp, Homo sapiens
ggaaaacgtggacgtgaaggaggaatggcaggacgaagatcttcccaggtcacagagatgcggcggaccctgacgcctgccagctccccagtgtcc

SEQ ID NO: 525864 - DNA, 99 bp, Homo sapiens
aatatctccaaatctgtgtccttcactgtgaagtcaggagtgagggcagtggctcagagatgcccttcacctcccatgatcaatctgatctcggttggg

SEQ ID NO: 525865 - DNA, 95 bp, Homo sapiens
aacgtggatgacaagaagacgtccaatctgagcgtgctgcggacggcgctgcggtacatccaggtgtggaaacaggaagagaactagaactggaa

SEQ ID NO: 525866 - DNA, 100 bp, Homo sapiens
ggcacctggcgcccagcgcgcccgtggccgctgccgcctccgccccagtgtcaactgttagccacgcagatgccgattgctttgtgtgtgtcttcctgag

SEQ ID NO: 525867 - DNA, 100 bp, Homo sapiens
gatcctgttccttcgaagagggcccagggttgttcacctgcccaaaaattgtgtcttgagccactgccaaaaaatatggtgtctcgtctttgtgaatcta

SEQ ID NO: 525868 - DNA, 101 bp, Homo sapiens
agacaggaaagcctacgattgcatgcttcaaggtggccacagggcagccccatgagggctccagctactcttcgaggaaggactgtcagatggctctgaag

SEQ ID NO: 525869 - DNA, 75 bp, Homo sapiens
cttttccttattcttctgatgtggatccaggtaaagtgaatgccgaagacagaagatttggatgatacaccactg

SEQ ID NO: 525870 - DNA, 97 bp, Homo sapiens
ccggcagcgggacccggcgaagacgcgaccgcggcgcgagtcaccatgaagatgctgtggacaattatcgagatagactaacagaataccccttcta

SEQ ID NO: 525871 - DNA, 97 bp, Homo sapiens
aatcctgccttctccatgctgaatgactcggatgatgatgtgatttatggcgccccatcatctccatctgctggggtcaccgggattcgaggctgtt

SEQ ID NO: 525872 - DNA, 100 bp, Homo sapiens
cgggtacgcgccgcccggcgcgcacaggctgtagcaggttccggcggacggcgttgcgaagtgaacagagtatctgtcaggcaagagctgctgtgatggt

SEQ ID NO: 525873 - DNA, 90 bp, Homo sapiens
ctgaccgtgggctggaggaacagaagcggaacagccacagcagcctcccaaggagtctgcaagttgggaagtgttcgccagttactacat

SEQ ID NO: 525874 - DNA, 50 bp, Homo sapiens
aggcacagctggaaatgatggtgcaagagcttttgacctttatgaacaaa

SEQ ID NO: 525875 - DNA, 95 bp, Homo sapiens
atttaatggaaaatcgcttggttaaaacctgacacttttaacagatgtcagtattgaatatggtggtgaggcgtgaccctggcaacactgaacct

SEQ ID NO: 525876 - DNA, 80 bp, Homo sapiens
tgaaaggcaaagaacaagagaagacctcagatgtgaagtccattaaagaggaaagaatgttttggaatctgatgcctttt

SEQ ID NO: 525877 - DNA, 100 bp, Homo sapiens
gcgtccgcctcaggggccatggcgaagcacgagcagatcctggtcctcgatccgcccacagacctcaaattcaaaggtatgtgtaatcctcgaaattata

SEQ ID NO: 525878 - DNA, 115 bp, Homo sapiens
ggccgctgtgtggttgcaacggagataaattcccggaaccgcgattcggcgtgtcagttctggacatggcaagacatgtgccactctatcgggcactgctggaattgcttcgggc

SEQ ID NO: 525879 - DNA, 90 bp, Homo sapiens
attgtggttggcttctgttacgctaggaatatggcaaaccattagtgccagcagtagttcccaagggctgtctcagccatccacccagac

SEQ ID NO: 525880 - DNA, 117 bp, Homo sapiens
aaaaatgggcccacctcagcccttcggaattttcccaacttcagaaatatgctgagtggagaagatgtcaaccggacactagaaggtggaaggaaacctcttcattatgcagcagat

SEQ ID NO: 525881 - DNA, 98 bp, Homo sapiens
catccctgaagccgggaaatgctgatgaacttattagtcctaaagacattgatcctgtccagcgctatgtcccactaaaggatcaacgtaacgtgagc

SEQ ID NO: 525882 - DNA, 100 bp, Homo sapiens
caagatgaggctgtgggacctgcagcagctgagaaaggagctcggggactcccccaaagacaaggaaggcagcaacaactcatctccagtggattttgta

SEQ ID NO: 525883 - DNA, 50 bp, Homo sapiens
ataaactcaaccccttctcttccaaaagagatgatccctggatccgttct

SEQ ID NO: 525884 - DNA, 129 bp, Homo sapiens
attgtgcagctgcaggaactctctttgaggctgaagagctgcttcaccaaggattatgaagagcatgacaagcaaatccagtttgctgatgacatgcaggagttcaccaaattccccaccaaaactggc

SEQ ID NO: 525885 - DNA, 98 bp, Homo sapiens
gacctgtgcaaagactctccctatgaattgaagaaagccctttcttttcagaagacacatttagacaatcaccattcacctccaattcaaaagaactg

SEQ ID NO: 525886 - DNA, 74 bp, Homo sapiens
ttagttacttcctgtctagagttgtagcttccacctgacttttaatacaggcaggctatgatgttaatattaaa

SEQ ID NO: 525887 - DNA, 82 bp, Homo sapiens
ttcacaataagagcagaggatggaacacttcagtgcattcaagatgatttcaagctttttagatcagcaagccatcctgttt

SEQ ID NO: 525888 - DNA, 100 bp, Homo sapiens
tcggccaggtggctccaaggagaggaagcagtgatgcattgaggatttaagcgagagcctcactggttcccaggacatcaacctgaactggatcctcccc

SEQ ID NO: 525889 - DNA, 98 bp, Homo sapiens
tttctaccttgtatgcctcaatttgctggatttaagcactgctgcactttatgagtgcattccactcttcgttcaacttgttttggagagattaactc

SEQ ID NO: 525890 - DNA, 87 bp, Homo sapiens
atggcggaggcttcgagtgacccgggtgccgaggagcgggaagagttgctggggacgagattgaggagctgcgggccgagatgctgg

SEQ ID NO: 525891 - DNA, 100 bp, Homo sapiens
ccagccagagggggccgacactactgtgtcgatggtcctagaacaattggagattcatacgcacacaaagaacctcaacccttacctcacaccagacaca

SEQ ID NO: 525892 - DNA, 75 bp, Homo sapiens
gattccttgggcaatggtgaatttgaaaagtgatatatctggccaagagatgaaccttcttctgatgaagtcgtt

SEQ ID NO: 525893 - DNA, 87 bp, Homo sapiens
gggccccgggacctgggctgggaacccgcggtggagcgggacacgaacgtgattttgagaagagggggaaaaaggaagtttgtcctg

SEQ ID NO: 525894 - DNA, 100 bp, Homo sapiens
catcaaatactcgttgagggcaagtgttgtttctaaacttgactcttgtggtgagaggacaaaactttcggtttgaagaataagaaaggagcaaagcaac

SEQ ID NO: 525895 - DNA, 98 bp, Homo sapiens
cgcggtggcggcgctgccgcctgaagtgcgggcgcagctggcggagctggagctggagctctcggaggaagtttcaggcacctgcaagagagacctgc

SEQ ID NO: 525896 - DNA, 100 bp, Homo sapiens
catagacatttacgcggatgtcggcgaagagttcaaccagcgtttgcctcagcatggagggcggggccgcggcagccacccccacagcactgccttacta

SEQ ID NO: 525897 - DNA, 83 bp, Homo sapiens
tgcagagctagttcctctccagctcagccgcttgatattcactgatggactccaaagaatcattaactcctggtagagaagaa

SEQ ID NO: 525898 - DNA, 74 bp, Homo sapiens
agcctagaacgcacctcctctgggcacctttgatgattacttggagttattcctgcagtttggttatgtgagcc

SEQ ID NO: 525899 - DNA, 98 bp, Homo sapiens
gagcgtgaccgagagcgcgaatatcgtcatcgttagaaggcacagaaaactgaatctgtagataacgagggagaatgaattgtcatgaaaaattgggg

SEQ ID NO: 525900 - DNA, 100 bp, Homo sapiens
gagattatgaccttaacatcagtgggatgccaagtccccacttaaaagtggaccagacagcagtgcatagtaagaacgaaggctcagtgcccaccatgat

SEQ ID NO: 525901 - DNA, 82 bp, Homo sapiens
attaatcccagacacccgctgatcagagacatgcttcgacgaattaaggacttggcagatgaacttgctcttgttgatgtca

SEQ ID NO: 525902 - DNA, 75 bp, Homo sapiens
gaacaccatggtcatcggaggctatgctgatggagagaggtcccgcagcccccggaagccaatagactccctcag

SEQ ID NO: 525903 - DNA, 100 bp, Homo sapiens
acccaaggagagaagtccccagagcccaggaggcaacatctgatgcttgaagcccacatgcagagctacaagggcaatgaccctcttggtgaatgggaaa

SEQ ID NO: 525904 - DNA, 75 bp, Homo sapiens
atctgaactgtttcctgctgttgtgaagaatgtggccagtaaaaatattgaggactcagcccaaaaccatgtttg

SEQ ID NO: 525905 - DNA, 75 bp, Homo sapiens
gtgtttaaagctatccagccggagaactccgagctgcaactaaattaactgaggaaaagtatgaactgaaagagg

SEQ ID NO: 525906 - DNA, 100 bp, Homo sapiens
cggaaggcgagtgccaggagggagagatcctggccacaggcagtacggcatggtgctcgagtattgttacaatcacatttgacgtaccaggaaatgcaaa

SEQ ID NO: 525907 - DNA, 75 bp, Homo sapiens
ctccgacttgccatggtcgtctttgtctgccgctgcagtgagaagaggagtttgttactttaaacagaggctgaa

SEQ ID NO: 525908 - DNA, 100 bp, Homo sapiens
ggtgcagaggcagatcaaatcattgaatatcttaagcagcaagtttctctacttaaggagaaagatggttttcttgagaagctaaattccatggaattca

SEQ ID NO: 525909 - DNA, 100 bp, Homo sapiens
cagatataacccaagagcatgaaagaagtatggcttatggactgctgattggcatccaggatgggtacctatcactgctccaggacagcggggaggtacg

SEQ ID NO: 525910 - DNA, 100 bp, Homo sapiens
ggccgggacccggttccccggcccacagtgggggtgtgcaaacccgagagaactggagtggcattctgcatttctgtggcttccaagtcttagaacctca

SEQ ID NO: 525911 - DNA, 75 bp, Homo sapiens
ccaaccagcagccatacccccagttcatggccaccgtggtgtataaggttatagtgtcaagtgtgagtactcggc

SEQ ID NO: 525912 - DNA, 50 bp, Homo sapiens
caagacactgctgataaggatgatatgattctataacagactcttccaga

SEQ ID NO: 525913 - DNA, 97 bp, Homo sapiens
tagtaaggatgggaccttgtttgcctggggcaatggagaaaagaattacatgaatgacagtcttcgaaccaatgtgtttgttcgatttcaaccagag

SEQ ID NO: 525914 - DNA, 100 bp, Homo sapiens
cgaggccgcagagctaaatgggggcctctccagggagtgctctgttcacggctccatcgctgttaacccaacatgagtgaagtttcctgcaagaaacggg

SEQ ID NO: 525915 - DNA, 83 bp, Homo sapiens
ccaaaacacactggaaacaaacagtatttctactggaaaaaccattttcagttaaagcaggactctcatagtgatgatgatac

SEQ ID NO: 525916 - DNA, 82 bp, Homo sapiens
tgagcggaaaggggcccggcgtctgcctcgagactgaagaccgcaattctgtggtgttcttggtcacacatttatggagttt

SEQ ID NO: 525917 - DNA, 98 bp, Homo sapiens
ccgactactgtcagcagctgtgccagcataagctgtggccatgactactgaagtaggctctgtgtctgaagtgaagaaggactctagccagttaggaa

SEQ ID NO: 525918 - DNA, 100 bp, Homo sapiens
gacattagctattttggttacccttcttttcgtcgttcatcactttccaggctaggctcatctcgagggctgctaaggaagcaaaaaaggctaagcaagc

SEQ ID NO: 525919 - DNA, 76 bp, Homo sapiens
ggcgaaggtcgtattgaatggtgttgtagtgcagtcattggagaaatcgatgaagaaacagattctgcgcttgatt

SEQ ID NO: 525920 - DNA, 83 bp, Homo sapiens
cgcgcgccggcggcaccatgaagtcagcggaggaaggcccagcgcttgagaagtcggaggccaaggccgggccggtgcccaag

SEQ ID NO: 525921 - DNA, 97 bp, Homo sapiens
tcaaactcccaggctcaagcagtcctaccatgtcagccttcccagtagctgggaccacagcgagttcctggggaaaaccccagggcaaaacgctcag

SEQ ID NO: 525922 - DNA, 97 bp, Homo sapiens
gtcagcctcatgtacttcgcctttaccaggtgtcatggagaaactccagctgggcccagagattctgcagcgggaaaatccaaggcttatttatgcc

SEQ ID NO: 525923 - DNA, 100 bp, Homo sapiens
tggaactgctctggcagtcatcgtgcctgaaggagtacatgccctttatgaagatattcttgagggtacaagcgagctggtgatgctgagtctggagctg

SEQ ID NO: 525924 - DNA, 75 bp, Homo sapiens
aaaaagcctcccccatcaccccaacctacagtctgtaagtacactgttcacgaccagtgtgccatgaaagccctg

SEQ ID NO: 525925 - DNA, 75 bp, Homo sapiens
ttctccgtcgattaaagagccatctgtggtgccaattgaaggctttatcctgtggataaacgcagagtgaacgag

SEQ ID NO: 525926 - DNA, 98 bp, Homo sapiens
gatgcagccacggaaaccgtgacaactgccatgtcacaagaaaatacctgccagtcaacagcataagcttaaatcgtctcagaaggacaaggtccgcc

SEQ ID NO: 525927 - DNA, 75 bp, Homo sapiens
atcgttgctgccttcttcgtcaagggtgcaaatagctatgggcaacttggcctcggccataaggaagatgtgctg

SEQ ID NO: 525928 - DNA, 100 bp, Homo sapiens
tgcgcagcctcttcgagcgccgcggacgcgtcatcgagtgtgacgtggtgaaaggcctccggtgtggctgtctctgatggtgtcatcaaggtgttcaacg

SEQ ID NO: 525929 - DNA, 90 bp, Homo sapiens
gtcggtgaccgcgcgactcggcgcccgcccgcgggagtgcatccgccccaacccttttccccctcgtctcctgtgagaattccccgtcgg

SEQ ID NO: 525930 - DNA, 101 bp, Homo sapiens
tgattgcagcccatggcaacagcctccggggcattgtcaagcatctggaggaatttctacaagtgtgaaagaattagaaaacttcaggaacttgttacaga

SEQ ID NO: 525931 - DNA, 100 bp, Homo sapiens
gaggtggtagagggcatggatatctctactcgctccaaaggtgtggatgaggtcaccattgtcaacattttgaccaaccgcagcaatgcacagagacagg

SEQ ID NO: 525932 - DNA, 100 bp, Homo sapiens
ccagcctaacctggcccggctggctgctggtgggaggccggcgactgagtaagaacaccttccaccatgaccacctcagcaagttcccacttaaataaag

SEQ ID NO: 525933 - DNA, 100 bp, Homo sapiens
actgccctacgtgctcaccgacatcgcggcctccttcaccctgctggttggcatctacttcccttccgtgaccgatgatccaggccatccaggtgctgcg

SEQ ID NO: 525934 - DNA, 82 bp, Homo sapiens
ggaggtgctgggagcgagttggctgtgtcattggcacccccttctatgtgatggagtactgcccaggtctcatctacaaaga

SEQ ID NO: 525935 - DNA, 100 bp, Homo sapiens
tacctgcagaaggtctctggagacatcttcagcagtggcagaatgagaaatttagaaaagaacatgtttacaaaagaagctttagctttggcttggcgat

SEQ ID NO: 525936 - DNA, 50 bp, Homo sapiens
catccgcatgtataaggccgagcaccgaacaagatttgtgatgaaatgga

SEQ ID NO: 525937 - DNA, 90 bp, Homo sapiens
ggtggggcggcgcctctactacaaactgggccggaagctctgccggagagactatctcaggttctgtggacaatcacaatgggaatccaa

SEQ ID NO: 525938 - DNA, 75 bp, Homo sapiens
gctcccctcgcccgcccgggccgccagggccgttgctccagggagaactgcaaatatcttcatccacccccacat

SEQ ID NO: 525939 - DNA, 75 bp, Homo sapiens
actttctggcttttgaaaggctccttcttcaggaacggaaaacagttcttccttcaaagcatgcagtacctgaag

SEQ ID NO: 525940 - DNA, 75 bp, Homo sapiens
ctactgctgcctctgtcactcctggtgaccagcattcaagttgataagcaatacaaatcggtaacaaaaccaaag

SEQ ID NO: 525941 - DNA, 97 bp, Homo sapiens
ccttggaaaaactggcctcatattttgtgtacacagtccctgtacagggtttctgacctgtgtttgtgaatagcacaatggaagaagctggactttg

SEQ ID NO: 525942 - DNA, 98 bp, Homo sapiens
gcgacctatggccgtggctaccccggatttgctccaagctatggctatcagttcccaggtgatgatgaacagtctacacagatggctgcaagttggga

SEQ ID NO: 525943 - DNA, 75 bp, Homo sapiens
aaatgctccttctcctggagacgcaactcaaggcctgcaggacaagctgaacaagagggacaaagaggtgacagc

SEQ ID NO: 525944 - DNA, 82 bp, Homo sapiens
ctagagcagactcagaatgagctcaccagggagctgaaactcaagaagatgatccctatgatcttgaagatgtttctgcaca

SEQ ID NO: 525945 - DNA, 75 bp, Homo sapiens
ctaagatcatcacatatataagaagtttcttagatgagctgggattcctagagccacatgctaaatgccctttat

SEQ ID NO: 525946 - DNA, 100 bp, Homo sapiens
ccggcaccatggagtcaccttttagcccgggactctttcacaggctggatgaagattggggtatcacatcggtatcctcgaattcaaagtatcaaagtac

SEQ ID NO: 525947 - DNA, 100 bp, Homo sapiens
gggcagggaagtgtggtttggattccatcagtctgttcggcctgccatgtggaaaatgatgcttaatatcgatggcaccgaccgtcacgagctaacttcc

SEQ ID NO: 525948 - DNA, 83 bp, Homo sapiens
ggccaattgagattcggagttaaaacagtacctggagtagaacagaaaaattattatgtctgtgttcccttgggactcattgg

SEQ ID NO: 525949 - DNA, 83 bp, Homo sapiens
cggattcgccgaggcaccgaggcactcagaggaggcccaagtctgttttggtggtctgagaggaaaaaagatgagcttctaaa

SEQ ID NO: 525950 - DNA, 100 bp, Homo sapiens
ctgcctgacttggaccctggaaaacctggccctcttcaatttctgacaaaaggtactaggttttgacaagcttgcatcatgcgtgagtataagctagtcg

SEQ ID NO: 525951 - DNA, 100 bp, Homo sapiens
aagaaggaggagtgggggaggcgaacagtctcgttgctgcctctgtgtacgctgaggggggagtcttctcacaagactttcaggattaagcgattcctgg

SEQ ID NO: 525952 - DNA, 88 bp, Homo sapiens
gctggaccgtcgccttgctcctcgccgcggcggggactgcagcttggaagctcgaagtctggctgtggccatgggagatacagtagtg

SEQ ID NO: 525953 - DNA, 58 bp, Homo sapiens
cctaccagtgggtgcccttccatgggggttaaagaattgcccacccttaaggatatgg

SEQ ID NO: 525954 - DNA, 75 bp, Homo sapiens
ttataggagaactgggcgacggagcctttgggaaagtgtacaagcacttgcacctcctgcgccgccgccccccat

SEQ ID NO: 525955 - DNA, 83 bp, Homo sapiens
cctggtcctgctcggggctctgttcccagcgcgagcttcggcctcggctctgtaccatgaagaagggccccagtggctatggc

SEQ ID NO: 525956 - DNA, 82 bp, Homo sapiens
gaacgtccactgcgggccggcgaaagctggtcccgcggcagtgctggtggccatggttcccgtagccagaaggagttgccca

SEQ ID NO: 525957 - DNA, 90 bp, Homo sapiens
tggtgctctacatccttctggcttcatcttggaagcgcccagagccggggatcctgaccgacagacagagcctgccaggcagcatcacta

SEQ ID NO: 525958 - DNA, 96 bp, Homo sapiens
ctaaggccaccatgaatgccatccgggaagagcgggaccggctccggaggaggctgggaagttatcaattccaaaccagatgaaagacccaggctc

SEQ ID NO: 525959 - DNA, 50 bp, Homo sapiens
gaggaggtatgcctggactgggccaggacatccataaaaattcatcagag

SEQ ID NO: 525960 - DNA, 112 bp, Homo sapiens
cccaggccgcccgccctcgcgcctcgccggcccctcccccggtcgccgcggctgccgcgccgccgctgcagatgtcttatgtctccagaaaattcagatccacaattccact

SEQ ID NO: 525961 - DNA, 117 bp, Homo sapiens
tctgccgctcctcctccatggctgaccgctccagccgcctgctggagagcctggaccagctggagctcagaatgtgacagtgatgataacatgggtgccaaaaatacttcaatagga

SEQ ID NO: 525962 - DNA, 100 bp, Homo sapiens
acagatgcaacagttattggaaaaggttgtcttattcaagcaagttcacacaaaagatgttggacaatttctacaattttgcttcatcatttgctgtctc

SEQ ID NO: 525963 - DNA, 82 bp, Homo sapiens
caggctgttccctaagaaggtctgcccaggactcagagcataatggcagcgtctgaggttgctggtgttgtggccaatgccc

SEQ ID NO: 525964 - DNA, 100 bp, Homo sapiens
gtcgctgatccctgaagaccaaataggtatgtgacgcattcccagactcttcagccaactgagcatcagcttcttcacagcaattgggtcctgattaatg

SEQ ID NO: 525965 - DNA, 98 bp, Homo sapiens
cggaggctcgcgagatccgcatgaaggagctggagcggcagcagaaggaggtgccgtggccagcacagaagtgaagatgaagttacaagaatttgtcc

SEQ ID NO: 525966 - DNA, 75 bp, Homo sapiens
agctaggcttctaccagaaggggaggagacgttggaatcagatgaagttggtatgtggcttcattctggaacctc

SEQ ID NO: 525967 - DNA, 97 bp, Homo sapiens
tcgtggttagtttgggcactgttgatgtactgaagcagcatatcaatcccaataagacatgtcgcatcctgagtctcagctggcatccctctggtac

SEQ ID NO: 525968 - DNA, 90 bp, Homo sapiens
gggatggtgaaatggatgatagtcgagcatgctacaagtgaaaactgatgagaaactgaatgtgtctgatgagaatacagcaagttgccc

SEQ ID NO: 525969 - DNA, 50 bp, Homo sapiens
cgaatctttccaaaggagatgcccgacaatgcagatcttcgtgaagactc

SEQ ID NO: 525970 - DNA, 98 bp, Homo sapiens
gctgtggaaagaagttgcaaaacactgggcccctggccccaacatggcccgtcgctctcagagctcctcgcagggggacaacccactggcacccgggt

SEQ ID NO: 525971 - DNA, 96 bp, Homo sapiens
ccccgccatcgctgcctcggaccccgccaccaaggctgaccggttccctgatgtgttacctgcttctgctactgatccaaactgcagaacttctca

SEQ ID NO: 525972 - DNA, 98 bp, Homo sapiens
cggttccccggcccacagtgggggtgtgcaaacccgagagaactggtcaacattggcctgtgcccgagcgtctgctctctgcttgaattttaacagca

SEQ ID NO: 525973 - DNA, 83 bp, Homo sapiens
agtccctcgccgcttggaaagtgcagccttctacagccaagctctactccaggaagtgaaaatgtgctgcctcgagagccgct

SEQ ID NO: 525974 - DNA, 80 bp, Homo sapiens
aaagcctgcccagacggctcacctgtgcgggatggaacaaaaggtcgctcaagccctcagttagaccctttgagaaaaag

SEQ ID NO: 525975 - DNA, 99 bp, Homo sapiens
gaaatggcgattgagacgctgcaaaagtctgacggtctgtccactcacagaagctctcttctcaacagccatattgtcagcagcctgctgcctccgtac

SEQ ID NO: 525976 - DNA, 101 bp, Homo sapiens
agatggcggatgccctgcagtacctgcagaaggtctctggagacatcttcagcaggtgatttccatggtgatggtggctgtgggtgtctacgctcggctaa

SEQ ID NO: 525977 - DNA, 82 bp, Homo sapiens
agctaatgtctacctcgaatcaaaggcatttcggccgtggaaccccaggctcggaggactgggtgtgagcgctgcccgggag

SEQ ID NO: 525978 - DNA, 90 bp, Homo sapiens
ggccggtgccagcacctttcggcttctgagacggcggcagcagcggcattcaggacagaactgtaccgctctctttttggccagctccac

SEQ ID NO: 525979 - DNA, 75 bp, Homo sapiens
atgtggctgcaggacctctgtcagagaatgaaacactcatcgcatgcttttctgcaattagataaaaaaggacca

SEQ ID NO: 525980 - DNA, 90 bp, Homo sapiens
ctgaaacggattgccagagaattggcagaagtgtactaatggtcacttgatgtgcgctggctgttttatccacctactagcagatgcccg

SEQ ID NO: 525981 - DNA, 75 bp, Homo sapiens
gccggttcgcgtctctctgctgcggcgcggggaccgctgtgctctcgctacctgaacgacctggagcgtattgca

SEQ ID NO: 525982 - DNA, 75 bp, Homo sapiens
tcaattcaaaggacctgcccccagagagaccaaaactggacaagccaaggcatctgtagccaaagtaaacaaatc

SEQ ID NO: 525983 - DNA, 74 bp, Homo sapiens
ctttgctttgccaggaatcattaaaaaggaaaaagatgcagaatctgtctttgtctgttcaccagttggctgct

SEQ ID NO: 525984 - DNA, 100 bp, Homo sapiens
agcagcattactttgctgtgaatgtgaagaatcagaaatctttactgattccaatgctgattcaccccaagagtggccgttcctaccacgaggagttcaa

SEQ ID NO: 525985 - DNA, 50 bp, Homo sapiens
gcacatctcagtgaatttgcaagtgatgttgcaagagcaattgaattact

SEQ ID NO: 525986 - DNA, 75 bp, Homo sapiens
ggaggaggcgattgcctatggccggaagctgggcgggacgctgccaaggtctgcagagaattcaccgagcgtgag

SEQ ID NO: 525987 - DNA, 75 bp, Homo sapiens
gtagttctcaatgcatcatgtcaggcagcttatgatgccaatttgtcccatgctaaacaagcattgaggaagcag

SEQ ID NO: 525988 - DNA, 95 bp, Homo sapiens
atgtttgacaagacgcggctgccgtacgtggccctcgatgtgctctgcgtgttgctgggttatgaagacagtatggagtttccagaccatagtag

SEQ ID NO: 525989 - DNA, 100 bp, Homo sapiens
tgaggagcgggatctaacccaggagcagacagagaagctgctgcagtttcagccccaagactagcatctaccaactcctcagtcctgggggcggacttgc

SEQ ID NO: 525990 - DNA, 136 bp, Homo sapiens
caaggtcaacaaggacaacaatgagatcgtggacaagatcatgggcaaaggacagatccagggccatgctgcaccttacaaaacggtctccgtccgcgcggccatcccgtccaccatcctccggcttccagctgcg

SEQ ID NO: 525991 - DNA, 99 bp, Homo sapiens
ctgcagtgacatgtccagcatgaatcccgaatagtactctctgaagatggcagaagctcaccaagctgtggcctttcagttcacggtcactccggacgg

SEQ ID NO: 525992 - DNA, 100 bp, Homo sapiens
accattgcagagcatgccccggttggacactgctttctgcagaaagccaaacttggccctgctggcaacaaagtcatcagtccctctgaagacaggaaac

SEQ ID NO: 525993 - DNA, 96 bp, Homo sapiens
cctgaagttggcactgcagcagacagctccctgggcaccaggcagctaacagacatatctgaagagatggattaagaatgctttggattaaggatt

SEQ ID NO: 525994 - DNA, 98 bp, Homo sapiens
ctgcccagctgcctgcccccggaggtgcccacgcagctgcctggacaagctgaacaactttttaaagcaacaatgagttacctccttggagggggcat

SEQ ID NO: 525995 - DNA, 100 bp, Homo sapiens
gcttctttgtcaccataggagacatggacgaagccttcaaatccatcaagctcatcaaaagatactagctcagtcatgtactgaaatcctagaattgcag

SEQ ID NO: 525996 - DNA, 108 bp, Homo sapiens
ctctggggttccctactcccctgctatccccaacaagaggaaagacacacctaccaagaagccagtcaagcggccaggtctgtgcagacttttgcagacaaatcaaaa

SEQ ID NO: 525997 - DNA, 74 bp, Homo sapiens
cgaccattgagctcaaggccctcaggctgctgaacttccagaggcagacgaaggccttcatccaccacgagctg

SEQ ID NO: 525998 - DNA, 100 bp, Homo sapiens
cttccttgcagccgcgcctcggccccatggacgccctgtgcggttccggggagctcggctccaagttctgggaacaagatcactcaaggtgaaggataat

SEQ ID NO: 525999 - DNA, 74 bp, Homo sapiens
gcctgaaaagtcgcagcgagctggagccgccggagctgatgactatcagccagttcgtctgctcagtaaacctg

SEQ ID NO: 526000 - DNA, 90 bp, Homo sapiens
ctctgtgattgaagaagtcggctctgggctccagtgcgggaatcacacacatacctcagaatcccaaggactgcagcaaagccaaaaagc

SEQ ID NO: 526001 - DNA, 100 bp, Homo sapiens
cgagtcccccggagtccgactcgctacgcgggtcttgcgagatatctggccgcctctgccgcagctggaggtaatgagagatccaaacaccaagcgctcc

SEQ ID NO: 526002 - DNA, 82 bp, Homo sapiens
caacgcctttcccggagagtacatccccaccgtgagtgtacctcacagccttctaggatctccagagtggacaggaatctca

SEQ ID NO: 526003 - DNA, 50 bp, Homo sapiens
tagagccgagcgaaaaggcgaagaacccgaaaacagtggccaaatgtcag

SEQ ID NO: 526004 - DNA, 100 bp, Homo sapiens
acctgcagcctggggatcacctgactgacatcaccttaaaggtggcagctgcctgtggaggaaccgattgtgtccacagatgaggtcatcttcccactca

SEQ ID NO: 526005 - DNA, 75 bp, Homo sapiens
aatggcaagcgcagcaacaacagagagcacgtgctatgacatggtgcattacggccactccaaccagctgcgcca

SEQ ID NO: 526006 - DNA, 98 bp, Homo sapiens
gacagattcgacaaggcaatacaaagcagcgtatcgatgagtttgaagcaatttgcagcatgagaaagccgaactagaacagcatcttgaacaagagc

SEQ ID NO: 526007 - DNA, 50 bp, Homo sapiens
agaccaccctgggcaacacactgccccagagcacatcagctatgtgcccc

SEQ ID NO: 526008 - DNA, 95 bp, Homo sapiens
agtagcaaatgaagctgaatttatcctgagcaggcagagagcagaagatattcacagacatgcggaatttgagtgatcttgagcctgaatggctg

SEQ ID NO: 526009 - DNA, 100 bp, Homo sapiens
atcatatcattaggtctaccatttggcaaagtaactaatcttttgatgttgaaaggaaaaagccagacattaccagaaacatctttaccaaattatgcca

SEQ ID NO: 526010 - DNA, 100 bp, Homo sapiens
aataacttaaaagcagcgtgcctggttacagctgtttccacgtgcggtgctcgtcgggagtgatcacctaccctacaggaaagctcatcatctgcaatgt

SEQ ID NO: 526011 - DNA, 87 bp, Homo sapiens
cagcggagagcgagagaggggagcaggcaaggatatcctgaaggatactatagttccaaaagtggatggagcagtcagagcgattac

SEQ ID NO: 526012 - DNA, 101 bp, Homo sapiens
ccctaacggtggtggagaacccaaagggtgccttcaccagggatggaagaggcaggctgcagcagagagatgcagagttctttcacacgtcgtgacttaaa

SEQ ID NO: 526013 - DNA, 75 bp, Homo sapiens
aacttcaaggaacatcatcagctgcagaggatggagatgaagatgaggaagctgagtcagctacgggcaagcggg

SEQ ID NO: 526014 - DNA, 75 bp, Homo sapiens
cgccgctgccgcttccaccacagactacgtctactttgagaactcctccagcaacccatacctgatccggagaat

SEQ ID NO: 526015 - DNA, 100 bp, Homo sapiens
gggaagtcgtgcacgaacaccaagggcttccgaagtctggaagacatccgcagccaggcctccctgacaacccagcaggccatcggcctgaagcattaca

SEQ ID NO: 526016 - DNA, 74 bp, Homo sapiens
gcgcgggccgggccggcgtggctgctgctggcaatctggttcttccctgtggaacagtagagacctagtctgcc

SEQ ID NO: 526017 - DNA, 100 bp, Homo sapiens
atgtgctgctgttcctacaacattggccgggcgtggaacaagccctgtgaacagtgtcccatcccaagtacagctggtgtcatagatgaagattatagag

SEQ ID NO: 526018 - DNA, 75 bp, Homo sapiens
ttgtttcgtagcagagaacagctctttgcatccggagagtggacaagaaagtgtctttccgatagccgttcctgg

SEQ ID NO: 526019 - DNA, 90 bp, Homo sapiens
tgtcgctcttgtgccctagcaccccgagaaccgtcagtttgagccagatggcctgtctcctccctcctacacatttccagctcctgctgc

SEQ ID NO: 526020 - DNA, 90 bp, Homo sapiens
agattgttctatgaaaacaagcaaatcgagtgcacctgggatgacaaaaagtcatagtggtgtgacaagcctggtgagtggctactccat

SEQ ID NO: 526021 - DNA, 100 bp, Homo sapiens
gaggacagcatggatgggctggagacaacagaaacagaaacgattgtggaaacagcagataaacactgttgatgtgttaactacgatgggagctattcct

SEQ ID NO: 526022 - DNA, 74 bp, Homo sapiens
caggaatatcgagagcgtcatgaacccgagctatagagaaaggagatgagttggagtcattcgttgcccagttt

SEQ ID NO: 526023 - DNA, 101 bp, Homo sapiens
gtgggagttagcgaggcgaccacgaaaacggtgaaggtcggaaccgacagcctcctccgagaaggataaaataccatgaggagtttgagaagagccgcatg

SEQ ID NO: 526024 - DNA, 100 bp, Homo sapiens
cacaatgatttctccagtgctcatcttgttctcgagttttctctgccatgttgctattgcaggacggatagctttccacagccccaccaccaggatcaag

SEQ ID NO: 526025 - DNA, 83 bp, Homo sapiens
agaggacctggaggccatccggctgcgggaggaggccatcctgcagatggagccctgggcgctgcctatggcacagccaagag

SEQ ID NO: 526026 - DNA, 90 bp, Homo sapiens
cggccatgctcgtggtgccgcaggcagttgccaccttccagagaagaggtacgagatgacaagacaaccataaagtgtgaaacctccccg

SEQ ID NO: 526027 - DNA, 74 bp, Homo sapiens
acctggatccaggataacggaggctggttgccttagaagtggtgagatgggaagctgcagttggaagaccctgg

SEQ ID NO: 526028 - DNA, 100 bp, Homo sapiens
cgcatacacaatcccgggcatgggcggcaactctttgatgtactactataatgggaaagcgttaatgaaggagttcccccttctgagtatgttcaatatc

SEQ ID NO: 526029 - DNA, 90 bp, Homo sapiens
ctgcacttagccccgcgcccgagctccagaacctgggtatcaacccagcaaacattggcttcagtaccctgactatggagtctgacaaat

SEQ ID NO: 526030 - DNA, 100 bp, Homo sapiens
tggctgtcagcctggtgctcctctatctattcccaaatgctggaaaatcctctttgctaagttgtgtttctcatgcaaaacctgcaattgcagattacgc

SEQ ID NO: 526031 - DNA, 88 bp, Homo sapiens
gacagccctgccccccaaggaagcgtgcaaatgccagaaagaggatttggccagagcgttttgtgtgtcatggagaaactccagctgg

SEQ ID NO: 526032 - DNA, 75 bp, Homo sapiens
ccataccactatttgttgagaaatgtgtggaatttattgaagatacagtcattgaaattatgagactatcattca

SEQ ID NO: 526033 - DNA, 76 bp, Homo sapiens
gatctcaagaaccttttcagcaagtatgggaagaattcttccatctctatgacaacaagcccattttagctttctg

SEQ ID NO: 526034 - DNA, 82 bp, Homo sapiens
gtgcatcatccacggggtgctgcagatcctgttccagccctgggcgctgcctatggcacagccaagagcggtaccggcattg

SEQ ID NO: 526035 - DNA, 100 bp, Homo sapiens
tggacacgttctggtacaagttcctgaagcgggagccgggaggagagctctcctgggaaggagacaaggagaaggccttaggatctactgggggagtccg

SEQ ID NO: 526036 - DNA, 50 bp, Homo sapiens
ctccatcccattgacagaaaagccagaggccaagaagagtaagacggccg

SEQ ID NO: 526037 - DNA, 100 bp, Homo sapiens
tcggctacagcttcggcggcgaaggtcagcgccgacggcagccggcacctgacggcgtgaccgacccgagccggaaaactacatctcagacccaactatc

SEQ ID NO: 526038 - DNA, 75 bp, Homo sapiens
gtcgacaccctgaaggttgtgactgaggaggtcaccaccaccaccacacacgaaagcaagagattatcaaagtca

SEQ ID NO: 526039 - DNA, 117 bp, Homo sapiens
ggattgaatgctctagttcagctaagtgtcgttgttggtccttctctaaacgaccatctgaagcatctgcttacaagccatgctacaagtgaaaactgatgagaaactgaatgtgtc

SEQ ID NO: 526040 - DNA, 82 bp, Homo sapiens
tgatgtgaaaaataccacgacaaaaccaccctaatctcagtggttcaatagcatccccagatgtcaaattaaatcttggtgg

SEQ ID NO: 526041 - DNA, 90 bp, Homo sapiens
tggaaaacgccagcatagaacctggcatatggcgctgagatgcgtctggagagccagagggcctgcctgaaggaatcacctgagcctgtc

SEQ ID NO: 526042 - DNA, 90 bp, Homo sapiens
cacatccgatgcaccctttttgtcagattatcaggatgagggctgatcaggctgccaaggtagagaagatgcgccagagcgtcctcgagg

SEQ ID NO: 526043 - DNA, 82 bp, Homo sapiens
cctggcgtgcactccgcacctcggggacattattgcgcgtggaacggctgcttttggaagctggccagctcagcgtccctgg

SEQ ID NO: 526044 - DNA, 80 bp, Homo sapiens
ataaaaacagagtccgatgaaaggaatgggtctgggaccttaacagggagccatggaatgggtaccacagaccatgtcat

SEQ ID NO: 526045 - DNA, 75 bp, Homo sapiens
ggactcattggaaattgtacagtgacatcttctgggatttagtctggtggggagcattaagcgggaaatgacctt

SEQ ID NO: 526046 - DNA, 100 bp, Homo sapiens
ttgggaagagaaagaaaatgccgaaggcactcagacaggtcctctcagggtgcgccatcattgtccgaggtcagcctcgtggtgggcctcctcctgagcg

SEQ ID NO: 526047 - DNA, 97 bp, Homo sapiens
accagtcctgcctctgttgtagaagacatgtggtgtatataaagtttgtgatcgttggcggacattttgatcattgagactgaaaatatgatggacc

SEQ ID NO: 526048 - DNA, 98 bp, Homo sapiens
caggaccatcttgcgactctttgatgacctggccatgtttgtctacactaagcaatatggcctgggggcacaggacgtgagcctgcacttcgtgctct

SEQ ID NO: 526049 - DNA, 100 bp, Homo sapiens
tacagtgcagtcttatcgaaggatgtgcatgaaggacagcctcttctcaatggtgctggagaatctggtaaaagcaccattgtgaagcagatgaggatcc

SEQ ID NO: 526050 - DNA, 100 bp, Homo sapiens
caccggctgccccacttcgacctgagctgggaggccactagcagccagttccggcccgaggacaccgactaccagcagaggaagctgtccccgctgtctg

SEQ ID NO: 526051 - DNA, 83 bp, Homo sapiens
gtgcgggctgtgagagggggagcgtggagcctccgaggccgagacaatgcagatcttcgtgaagactctgactggtaagacca

SEQ ID NO: 526052 - DNA, 75 bp, Homo sapiens
tttggcccttttggggaacacaccgtgaacgccagttggattgcagttcaggccctgagacgggagttaaaggag

SEQ ID NO: 526053 - DNA, 101 bp, Homo sapiens
ggtcggcccggtccccgccgcacccagcccagattcaggtttactcacgtcatccagcagagaatggaaagtcaaatttcctgaattgctatgtgtctggg

SEQ ID NO: 526054 - DNA, 100 bp, Homo sapiens
gtaaagttcacgtggtcttcagcacagagcgctacaacccagagattagaagcccaggacccaggaaggagacacaggaaatttattcaaagtccccacg

SEQ ID NO: 526055 - DNA, 75 bp, Homo sapiens
atcgcagttggaagcccatggggcagtctgcgctcctcagaccaccggcaggtgaacagcctgatgcagaccgag

SEQ ID NO: 526056 - DNA, 90 bp, Homo sapiens
ggagcagcagcagctccagcaggcgctggctcctgctcagccttcatctcgaaattctgcctcagcaacaacccctctaagtggaaactc

SEQ ID NO: 526057 - DNA, 100 bp, Homo sapiens
atccaggagtggttcaccctggtcaacaagaagaacgctctcatccggaggcaggaccagctgcagctgctgagcctgaacgaactgcgggtgttgctgc

SEQ ID NO: 526058 - DNA, 90 bp, Homo sapiens
cgctcacaacatgcacagcctggcgacggctgcgggttttttgattaactcaaaaccagagaatgcctgtgaacccatagtgcctccacc

SEQ ID NO: 526059 - DNA, 88 bp, Homo sapiens
gcctctcaatcccagtctcatgcttccagcctggataatgattgagccacctgtccagatttggacacctcccacactgagtccccaa

SEQ ID NO: 526060 - DNA, 100 bp, Homo sapiens
ggcgctggcggcctgcgcagccacctcaaggttttgcacactagggaccaagaagccctcggggacactgctgagaaaagactgccgaagggaagaccag

SEQ ID NO: 526061 - DNA, 98 bp, Homo sapiens
cgcgcggctcggagccctggaagcagcagctcaccgaggacggggactcccactgaggcggctcccagctgcgttggcgacatggccgacacccccag

SEQ ID NO: 526062 - DNA, 85 bp, Homo sapiens
agaaattctggaacacctatatgtacacaatgttgtcaggacaggttcccttccaatctcatgaccgaagtttgacgtgtaccag

SEQ ID NO: 526063 - DNA, 75 bp, Homo sapiens
ggcattttggggcagaatacagagatatggaatcagacgaagttatacggaagcgtctcctcattgatggagatg

SEQ ID NO: 526064 - DNA, 115 bp, Homo sapiens
atgctgggatgtgccttagaggattatggtcagatacagagttttgggataagatgcaagcagaatgggaagaaatggctcggaggaactggatatctgagaaccaagaagccca

SEQ ID NO: 526065 - DNA, 100 bp, Homo sapiens
cgactctcaccatcatcaagacggaaaaagtcgatctggagcttttcccctccccgggtcgtcaaagtcctacattttagctttcagtgctgaacttcct

SEQ ID NO: 526066 - DNA, 100 bp, Homo sapiens
caggggagaaacaaggcgccttggagttcaggtcgcctgcgaggccgctggccaggcctgagcctctgccaccatggccattgtgcagactctgccagtg

SEQ ID NO: 526067 - DNA, 75 bp, Homo sapiens
ggtcgccaggtctcagggccgggggtacccgaggccgagacgcatccagagctttcgtgaccggggactgttctg

SEQ ID NO: 526068 - DNA, 100 bp, Homo sapiens
tccagcgggagggggaagtcgaagactgcgcgtgctcaggagcgcggagcggcccgctgagcgcagaggtcccacgacagtgatgtccgagggcgcccgg

SEQ ID NO: 526069 - DNA, 99 bp, Homo sapiens
ggaagaggcattgaggactttccttacctgtttttccagctcacccactgccagcagagagtcatgtgctgttcctggggcttggatgatgtaggggaa

SEQ ID NO: 526070 - DNA, 119 bp, Homo sapiens
cagctccttggggtttccggctgcagggcggtaaggatttcaacatgcctctgacaatctctagtaatgaagaaggagccccacaggaaggaattctggaagatatgcctgtggatcct

SEQ ID NO: 526071 - DNA, 83 bp, Homo sapiens
gtttaaggatcggggtatactggatacactcaagccatcactggtgcaagctatatttaacggagatcctgatgaagttcgag

SEQ ID NO: 526072 - DNA, 82 bp, Homo sapiens
gcgagccgaccatgtcttcatttgcttccacaagaaccgcgaggacagagatgtccagctcgccgctgtccaagaaacgtcg

SEQ ID NO: 526073 - DNA, 83 bp, Homo sapiens
gcgtccccggcgcgaagaggctggactcggattcgttgcctgagttgagtcagcagatactggagttatttgaaacatgtcag

SEQ ID NO: 526074 - DNA, 100 bp, Homo sapiens
caggagacgccaaggaaagatgggacctcccggcccagatctattaatgagatgaagcggttggaagaaatgtcaaatatgtttcagagctctggagtcc

SEQ ID NO: 526075 - DNA, 75 bp, Homo sapiens
gcgcttgaggacttggaggtcctgtctaggtaggtagccatccaagcttcctgaaggaggttcgagatcacatgc

SEQ ID NO: 526076 - DNA, 101 bp, Homo sapiens
agaggaagacggggcggaagaccaagatcatcgagatgaacactcctatgccaccttcaccagctgtacaagtgcagggccagcctaacagttctcagcct

SEQ ID NO: 526077 - DNA, 75 bp, Homo sapiens
gcccagcgcctcggccgaacccctccgcagcagtgatgtcttggcattgcccattttcaagcaggaagattccag

SEQ ID NO: 526078 - DNA, 99 bp, Homo sapiens
gggaggtagcatccgttggatatccacaccatccttctcgctgcagggaatagccaggtctggctgggtcggcacaacctgtttgagcctgaagacaca

SEQ ID NO: 526079 - DNA, 100 bp, Homo sapiens
ccggcccctccagctgccccctgtgtggcaaacctttcttgagctcaggtactccaaagattcaggtttactcacgtcatccagcagagaatggaaagtc

SEQ ID NO: 526080 - DNA, 75 bp, Homo sapiens
cgccatcaggctcaacgaggaactcaaagtggatgaggaaaacttaattcagtgcacaaatgagatgaatgtgaa

SEQ ID NO: 526081 - DNA, 100 bp, Homo sapiens
cctgagcctggtgagccacgcgcctggggaggctctggcccgggctccgcgtacttcctgttcagattaccgagtatatgcggcaggcgggatgggcctg

SEQ ID NO: 526082 - DNA, 100 bp, Homo sapiens
attctggggcagtatcaacggagtctccgggcatttcagcaggaacttgatgcaaggcatgacaaatatgagagacttgtgaaacttagtcgggatataa

SEQ ID NO: 526083 - DNA, 101 bp, Homo sapiens
cgggttgatttttaaagcttcaaaatcctaagactcagcactgttgcgggagtcttggtctgtcacccaacctggagtgcaatggtgccatctcggctggc

SEQ ID NO: 526084 - DNA, 101 bp, Homo sapiens
ggccgatggcaatgtcttcaccactgggttcagccgcatgagcgagcggcagctggctctctggaatccgatctgggacataggaggacaaccccgatttc

SEQ ID NO: 526085 - DNA, 76 bp, Homo sapiens
ccgcacccgctcccggcgcctgccggagaggccagtataaccccgttttcacacgaatggccccttcacatatttg

SEQ ID NO: 526086 - DNA, 100 bp, Homo sapiens
ccagagcatcatttgcaggaaggatgcaccccactccgagggcgacatgcacacgctgaccggaaaggagattgagattgacattgaacctacagacaag

SEQ ID NO: 526087 - DNA, 90 bp, Homo sapiens
atttgatttccggagtcagtcattttactgtcaagacatttcttcggcattctgcaacaggaaatgcaacctcaccacaagtacaaagac

SEQ ID NO: 526088 - DNA, 75 bp, Homo sapiens
aaagaagtctttacaccgccaatccacttcctgtggcaactacagggttgtatgaagcatgtcgttaccttgcag

SEQ ID NO: 526089 - DNA, 101 bp, Homo sapiens
aggaagctgtggagttggtccagtatgcttactttaagaaggttcaagaacatgaagactcgggtgactcagaagtggagaatgaagcaaaaggtaatttt

SEQ ID NO: 526090 - DNA, 88 bp, Homo sapiens
ggagcaacagaaggactcacctgtgttttgccgcttctttcacttcaggagatcctgtttgaccaaactcagagatcaattaaggcac

SEQ ID NO: 526091 - DNA, 74 bp, Homo sapiens
aggtggccggttcttggtgggatctgagcagaagactgtgcagtctttgtaactgatgaagagcaaggctttgt

SEQ ID NO: 526092 - DNA, 88 bp, Homo sapiens
gccggccacgccgagtgtcgcccgcagccacgcggaggcggcggggagccgcgcgcggcagcccacagcccccatcccgtagcccttc

SEQ ID NO: 526093 - DNA, 88 bp, Homo sapiens
tgaataatgactttcctccaagagcacattgcctggtaagatgtgccggtggtggtgtgcacattgagccccggtatagacagttccc

SEQ ID NO: 526094 - DNA, 58 bp, Homo sapiens
tctggcttcttttctgaagtgttcaagggagaaaactggttgtcctggatgtttgaaa

SEQ ID NO: 526095 - DNA, 90 bp, Homo sapiens
ccgaggtgtaaggatcggtggaatctctggtatctttaaatctcatgactatcgaaaaggagcaggctggcacagagaagaggacatgcg

SEQ ID NO: 526096 - DNA, 98 bp, Homo sapiens
gggcacctcagtatcccagtgcattcccatcctcgctcccacctgtcagccttctaccccatgagaaagaccagtttgaacgccatgaccctgtggat

SEQ ID NO: 526097 - DNA, 75 bp, Homo sapiens
cctggatgccatcatcacacaggtttgtctgccattgtggatttcctgggcagagtggagtgaaggtgccaaaag

SEQ ID NO: 526098 - DNA, 50 bp, Homo sapiens
gcaaaccagaatttgacttttagtaagtggccagagcccccttcccaggc

SEQ ID NO: 526099 - DNA, 118 bp, Homo sapiens
ataaactgaaatgccttgaggacggtgaggatccagaagtcattccggagaatactgacctggtgactttgggttactccacaggatccgctgaacataggatgttgccacaaaatct

SEQ ID NO: 526100 - DNA, 74 bp, Homo sapiens
agcagacaccctcctcaaccgggttaagaagctgccttgtcagatcaccaggtcaatgagctgaaggagaaagg

SEQ ID NO: 526101 - DNA, 101 bp, Homo sapiens
ccaggactgcgcccccgggagcgggcgcccagaggaggaggaagccaagaatctggtgagcgaagccatcgcagctggcatcttcaacgacctgggctccg

SEQ ID NO: 526102 - DNA, 74 bp, Homo sapiens
attagcttcgcagtctggaaagctttaggagttcacagttttcagtcattcagtcagtaccgctgtaagactgc

SEQ ID NO: 526103 - DNA, 90 bp, Homo sapiens
taaattatactactgaagaatgtgacatgaaaaaaatgcattatgtggaccctgaccatgtaaaggtatgatctcgtgaaatcttgagag

SEQ ID NO: 526104 - DNA, 90 bp, Homo sapiens
agcacgaattccgccggcgttgcaaaaattggatgcagagtttcagaaaagactggaaaagaataaaattgctgcagaggagcagaccgc

SEQ ID NO: 526105 - DNA, 74 bp, Homo sapiens
aaatctcctgaaattgctgcttccctctggcagtcattggaatacactcaggccatttgtgtaggaccagaaaa

SEQ ID NO: 526106 - DNA, 100 bp, Homo sapiens
ctagtcaagagccaccgcctgcagcaacagggagctgccaccaccgtgtactgtgctgctgtcccagaactggagggtctgggagggatgtacttcaaca

SEQ ID NO: 526107 - DNA, 100 bp, Homo sapiens
cgtccgtatcgaccacgccccggaccttccgcggccagaggtggtcattgggactcccacacttaaacaaagaaaggaaattctgcaagtgattacctcg

SEQ ID NO: 526108 - DNA, 51 bp, Homo sapiens
tgattctcttccttcaaatccaataggaggagatgttaaagtaacccatct

SEQ ID NO: 526109 - DNA, 83 bp, Homo sapiens
aggaaatgcttcgaaataatgaatccaaaatccttcatttacaggtactccaaagattcaggtttactcacgtcatccagcag

SEQ ID NO: 526110 - DNA, 90 bp, Homo sapiens
tgccgggggagcggggccttccacaccccctccgtgggtgtgtggactgaatgtgggcccagttggcgtcattctgctttgacctaaaca

SEQ ID NO: 526111 - DNA, 51 bp, Homo sapiens
cgacgcgctggtgcacttcgcgctgctccagtgatccacaagctcagaaat

SEQ ID NO: 526112 - DNA, 98 bp, Homo sapiens
ttcgatccgggacggccggtcaggctcgccgccgagctggtctcggcgcggaagatggccggcggcgtggacggccccatcgggatcccgttccccga

SEQ ID NO: 526113 - DNA, 97 bp, Homo sapiens
aacttgcagaaatcacattggaccctcctcccaactgtagtgggtgaatttgtaagtgatgtcctgctagttccagaaaagtgccagtttttccaca

SEQ ID NO: 526114 - DNA, 98 bp, Homo sapiens
aaagtgagcagtccagaaagcggcttatcgaacagagccgggagttcaagaagaacactccagaggaggccactgtctgcagctcccgtgaagatgtc

SEQ ID NO: 526115 - DNA, 100 bp, Homo sapiens
cttgcaacttctgacaaaccccattccgctttgccagaagagaaatggagaaggtagaggagatgccacataaaccacagaaagatgaagatctgacaca

SEQ ID NO: 526116 - DNA, 132 bp, Homo sapiens
ccagattcccatggaagcgccgcgatgttcgccccccggctgctggatttccagaagacgaaatacgcgaggttccgtggggaccccactgcctggagtacaggtgcgcattgtctcagaaaacccacagag

SEQ ID NO: 526117 - DNA, 90 bp, Homo sapiens
ggcttgtgaaatcatgcctctgcaaagagtattgggaaagggtcgttgtggtgcatagacccagagtatagacaaaatctaattcaggct

SEQ ID NO: 526118 - DNA, 100 bp, Homo sapiens
aaatctggagggactccaacttcaatggaacatcatttacagcgagcaatttcagcacagcaagtgtttagagaaaaaaaagagagtatggtcattcctg

SEQ ID NO: 526119 - DNA, 83 bp, Homo sapiens
ggcgcggattcgccgaggcaccgaggcactcagaggaggcctccaggcccaaggtcagcatcccactgtcagccatcattgag

SEQ ID NO: 526120 - DNA, 76 bp, Homo sapiens
gggagattgagattgcagagcaagactttgagaatcactacaagaaaaactccttgtggtgaaggttctaagacgt

SEQ ID NO: 526121 - DNA, 75 bp, Homo sapiens
actttcctggcacaggagacttgagggtgattgctgaagaattatctggcaatgacgactatgttgagcttgcat

SEQ ID NO: 526122 - DNA, 87 bp, Homo sapiens
atgataccagcaactggtctattatatcatttaaaccacatggctatctaaagaggaggcctgtgcaacctgtgcccagacagggcc

SEQ ID NO: 526123 - DNA, 75 bp, Homo sapiens
atatggaaacaaatactatgaagacaacaagcaattttttgcttcttggacacttaatgattgttggcaagaaat

SEQ ID NO: 526124 - DNA, 100 bp, Homo sapiens
agcagagggagttggcccggaagcgggagcaggagcgaagacgccgggaagccatgccatggacaatattaccaggcagaaccaattctacgatacccaa

SEQ ID NO: 526125 - DNA, 75 bp, Homo sapiens
gtaaccgccttgaagagctgatgaaggtttcctatcctgggagcaggagagtgtgcctatttgaatgacaaaggt

SEQ ID NO: 526126 - DNA, 100 bp, Homo sapiens
tgcctgagcccgtgcctgtcttcagatcttcacagcacagttcctgggaaggtggagccaccagcctctccctgattctggacaatcaggaagtccaagc

SEQ ID NO: 526127 - DNA, 75 bp, Homo sapiens
ggcccgcgggggagccccgggagccgcacgtgggcctttggagtgacgctgtgggaactcatgactctgggccag

SEQ ID NO: 526128 - DNA, 75 bp, Homo sapiens
ctgtctgtcatgtatgagagactgagacaagagatgagtcctgccggcggtgaccatcttccaacatagggatat

SEQ ID NO: 526129 - DNA, 75 bp, Homo sapiens
cctttataccatctttattgtggccacaaagagctccaaacgagaatggaagccgctggaggaccgtagctgcac

SEQ ID NO: 526130 - DNA, 100 bp, Homo sapiens
ccattgggaagggcagctttggcaagctcttggagtttgacaaggagttgtctgtctttaaggacagactgtatgaactggacatctcgttccctcccag

SEQ ID NO: 526131 - DNA, 74 bp, Homo sapiens
ggaagtcacctatgaagccatcgtggacggagggagagatgacatgctggacgtggagaccgatgcctacatcc

SEQ ID NO: 526132 - DNA, 100 bp, Homo sapiens
ccttcgtacccacagtgcttcatgagaggatcttacacatttgttccatggcttctcagctttaaaaggggaagtgccctagaagaaaaagagaataaaa

SEQ ID NO: 526133 - DNA, 75 bp, Homo sapiens
cgtgtggccaacgagctcaacgccaggcgccgctcctttacagagctcttcagtatccccatcagccagtttccg

SEQ ID NO: 526134 - DNA, 101 bp, Homo sapiens
attactggctactgcatcttatgatactcgagtatatatctgggatccacataatggagacattctgatggaatttggctaattgtaaagtctgctttgtg

SEQ ID NO: 526135 - DNA, 48 bp, Homo sapiens
gatgatttcggaacctggagaaaatatccgcaaacgattaattctgtc

SEQ ID NO: 526136 - DNA, 97 bp, Homo sapiens
cgccattatgggcagtgggattttgggactcgcctttgccctggcaaacactggaatcctactttttctatgctgtctttgcaggtgccatgcctac

SEQ ID NO: 526137 - DNA, 100 bp, Homo sapiens
gggctgtgaaccctggcgaccactgcttctccgtgggcagcattggcgaccagcgcttcacgggtgatgaattagaagacaatggaaagaatttctacga

SEQ ID NO: 526138 - DNA, 106 bp, Homo sapiens
accggtaggagcggggaggtgggtactacacaaccgtctccagccttggtctgagtggactgtcctgcagctgaaggaagaggatcaccttccaagacaaaacagt

SEQ ID NO: 526139 - DNA, 50 bp, Homo sapiens
cttttccctctccctttccctaagggatcactacttgtgtgatgtgacat

SEQ ID NO: 526140 - DNA, 73 bp, Homo sapiens
gcgggaccagatcatccgcgtgaagcggttgaaactctggaaaaattagtggagctgacacagaagctatttg

SEQ ID NO: 526141 - DNA, 83 bp, Homo sapiens
gagctgctgctggattgaactcagagaagccgggggttttcagagaaagatgctgatgaggtgaaaggaatttttgtagatac

SEQ ID NO: 526142 - DNA, 98 bp, Homo sapiens
tggttgaatacctccctctccactcccatcttcaggtgtcactgcaaagataaaagccattgaagcaaaactgaaaatgatggcggaaaatcctgatg

SEQ ID NO: 526143 - DNA, 98 bp, Homo sapiens
aaaaagaaactggagccaccatcaagctgtctaagtccaaagatttttacccagttctacatcaaacagttcgttaactgcagacgtaaattctggat

SEQ ID NO: 526144 - DNA, 98 bp, Homo sapiens
cgggatcgtgaccgagaccgtgaccgagagcgtgaccgagagcgcgaatatcgtcatcgttagaaggaggctgcattgaggcgtgagcaaaagaagtt

SEQ ID NO: 526145 - DNA, 76 bp, Homo sapiens
caacgaatcatccacgcacctgcagctctgctgagagagtgcaagccgtgggaccagagtgaactccgagcaggaa

SEQ ID NO: 526146 - DNA, 100 bp, Homo sapiens
ggcgcgggaggtgttcgagaacgaccccgagacggtcagaagagatcaattctacagaaatttccagtggttctgttgaggctttatggaattcagcatg

SEQ ID NO: 526147 - DNA, 82 bp, Homo sapiens
ctggcctggtgccatgacaacaagtcccggctccggaagatgaaggcgccatgtcagaaccggctggggatgtccgtcagaa

SEQ ID NO: 526148 - DNA, 90 bp, Homo sapiens
atgagatccaaaggcagggcaaggaaactggccacaacttcagctttagctgcagctgcctctgttcagccacttgcaacacaatgtttc

SEQ ID NO: 526149 - DNA, 98 bp, Homo sapiens
ttccagttgcacatttcctgcaaggactccaaagtggtgaggaatcatcatgttggttggctggttactgggaaaagatatcctggaaatgtttacta

SEQ ID NO: 526150 - DNA, 75 bp, Homo sapiens
cagaaatcactaaatactactctgaggggcttagaaattaacaggtggaagcatcagttcacagcagtaatgcac

SEQ ID NO: 526151 - DNA, 75 bp, Homo sapiens
agctttgcagctgacctacatctcgaagtaacaacatgctgtaccccaaggaagacaaggagaaccgcattctgc

SEQ ID NO: 526152 - DNA, 100 bp, Homo sapiens
ggacatcctggaagctgggaaatggattacaaggcagaggaagacccagcaaaatttaaatctatcaaaacaggccgaggacccttgggccccaattgga

SEQ ID NO: 526153 - DNA, 98 bp, Homo sapiens
attgctaatgagatgattgaggcagccaaggacactcatgaggaccatgatacttccactgagaatacagacgagtccaaccatgaccctcagtttga

SEQ ID NO: 526154 - DNA, 98 bp, Homo sapiens
acccgtacttgaagccctacgccgtggacttccagcgcagagcctgccttctggtacaagatgcctgtggaatgttcggtgaagtgcacttggagttc

SEQ ID NO: 526155 - DNA, 90 bp, Homo sapiens
ggagtaatcaatattaatgagcgtgctgataatggatcaactcctatgcataaagttcacacaaaagatgttggacaatttctacaattt

SEQ ID NO: 526156 - DNA, 82 bp, Homo sapiens
ggccactgctgggccctgaggctgcaccaagtggcgaaggagccggctccaaggaactgtggctgcaccatctgtcttcatc

SEQ ID NO: 526157 - DNA, 74 bp, Homo sapiens
gttagattgagtcttactgagagactggggaaacgaaaattttcagcagaataatgcatatactgccatgtcag

SEQ ID NO: 526158 - DNA, 82 bp, Homo sapiens
cagatccagagtgttactggcttacaaattggattgagtgcctccggagccagcgtggtggccatagacaacaagatcgaac

SEQ ID NO: 526159 - DNA, 90 bp, Homo sapiens
ggcaggtgacagtctgcatgtgcagttttcaggaaagagcatctacggtgagcgcttccccgatgagaacttcaaactgaagcactacgg

SEQ ID NO: 526160 - DNA, 82 bp, Homo sapiens
gcgggattccggcgccgctctccgagctcgatccgctgctcgcacgggagccagctgggtgcctgatcctgcctgaagatgg

SEQ ID NO: 526161 - DNA, 100 bp, Homo sapiens
tctggtccctgctcttccacttcaaggagacaacggccacacactgtgggaaactaattctgaagcaagcccttatagttgtgctgcagtggtgtttcaa

SEQ ID NO: 526162 - DNA, 46 bp, Homo sapiens
tttctgaatgagacccaaacgcaggaatccttgcagcctttcctgg

SEQ ID NO: 526163 - DNA, 82 bp, Homo sapiens
cggatctcaccgccgctcaggttggcgttccgggccgcgtggcggtgaatgccttggctgtaggagaacccggaacggcctc

SEQ ID NO: 526164 - DNA, 83 bp, Homo sapiens
gtgaaagtgcagatcgccgtggccaacgcgcaggagctgctgcaggttttaaaatcaaagatgggaaaatcggagaaaattgc

SEQ ID NO: 526165 - DNA, 97 bp, Homo sapiens
actggctgcgctcctttctggccggagcttcaaaagcagtggactgtcttttggattcaaagtgggcaaaggccaagaaaggagaggaagctttatt

SEQ ID NO: 526166 - DNA, 82 bp, Homo sapiens
tccacttaatgactgtctcacattggccggcaacttgttccaggccctcagtctccgaggaggatctcaaggtcctgttttc

SEQ ID NO: 526167 - DNA, 100 bp, Homo sapiens
ctcagcctcacaagtaactgggattatacaggtcaaagattctaaactgcctgcatataaggatctcggtaaaaatctaccattccctacatattttcct

SEQ ID NO: 526168 - DNA, 82 bp, Homo sapiens
cagccacagatctctgtctacagtggttcagaccgacatgctgtacaggtgaagaaggtcattgtatatttaggtagagata

SEQ ID NO: 526169 - DNA, 100 bp, Homo sapiens
cagtcctcgtcagcactgactttcagctatggaatcggcaaatccagttccaaggttcagaccactcctagcaaacctggcggtgaccgctatatccccc

SEQ ID NO: 526170 - DNA, 75 bp, Homo sapiens
ccctgtcatcttctaaacagagcagcagcagcagagatgataacatgtttcagacgctctgctgttgcccgtatt

SEQ ID NO: 526171 - DNA, 100 bp, Homo sapiens
tacactgtacatgctttttattacaagactacggagcataggaggaaaattcatcatctgatctgtgtcgagggcaatattgcaagtgggaagacgacat

SEQ ID NO: 526172 - DNA, 74 bp, Homo sapiens
aagttcaagcagctgcttgccggccccaacacggaccttggttcgaaaacatggccaaaagaaatgccgagaag

SEQ ID NO: 526173 - DNA, 85 bp, Homo sapiens
gccagccccacctcaacaaccagcagctaatcacattttctcacagaacattctagtatgccagtagaaaaaaatatcactttag

SEQ ID NO: 526174 - DNA, 100 bp, Homo sapiens
caaggcgacgaaccttggagagaggagaacgaacatcttctggacctttgtccagggtacaggcatccttcacctgctattgttgcaagaacagtcagaa

SEQ ID NO: 526175 - DNA, 80 bp, Homo sapiens
gtgaagatggcggcagccgaggccgcgaactgcatcatggaggttgtggcagcactgcctgaaggtatgagaccagattc

SEQ ID NO: 526176 - DNA, 98 bp, Homo sapiens
gtcgtttaccttttgaccactgcaggtttccccacttgctctggagcgggactgtgctgaagaccatgctggacatcctgcagaccctgtcactgtca

SEQ ID NO: 526177 - DNA, 74 bp, Homo sapiens
caagatgcggaggctgcctcggcggagcagaggaaccacacgctgatcatggttgaagcactggacaatgccac

SEQ ID NO: 526178 - DNA, 75 bp, Homo sapiens
gcccagtcagcaaaggttcagccctccaaggatccagtttatggaaaaggaaaacttggagaaatccagggactt

SEQ ID NO: 526179 - DNA, 100 bp, Homo sapiens
gaaaaatccgcagagaaattcagaacctcaagcttttcaggcatcctcatataattaaactgtcaccctcagctacggtgtctttgaggggaaactcaac

SEQ ID NO: 526180 - DNA, 99 bp, Homo sapiens
ataagaaaacacatctttacacactaattcacacaaaagatgttggacaatttctacaattttgcttcatcatttgctgtctctcaggcccagatgaca

SEQ ID NO: 526181 - DNA, 75 bp, Homo sapiens
atcaccaaatggaaagttaatcgaagaggttttaaaatcaaagatgggaaaatcggagaaaattgcccttcccca

SEQ ID NO: 526182 - DNA, 50 bp, Homo sapiens
ttctgaactcaggacttggcaagcagctgagcctgaggtggaggtggagg

SEQ ID NO: 526183 - DNA, 83 bp, Homo sapiens
gggagggaggacctggtccagcttcccttcctcaaataaggaaattgacacctggcgtggaccgcctggcccggtgcaccatg

SEQ ID NO: 526184 - DNA, 75 bp, Homo sapiens
cagcaaccagttgctatttctagcgcaccagcatttgttctgggaggtgatcagtgatgaacatggcatcgaccc

SEQ ID NO: 526185 - DNA, 83 bp, Homo sapiens
cagcagcagaccttcaagatccgcatggagcctgacgagacgggggatatgagactttctactcggaatatcctgagtgttgc

SEQ ID NO: 526186 - DNA, 90 bp, Homo sapiens
tgcaaattgaaactcgaaagcccgcaaattaacggggtgtctctctcctgatgaagagagggctctgaactcctacttcgagcctccggt

SEQ ID NO: 526187 - DNA, 82 bp, Homo sapiens
ccaggatctcgggctcggaacgagactgcacgggaaagaatatggcaaagctgatgcaagatgggtttattttgatccaacc

SEQ ID NO: 526188 - DNA, 100 bp, Homo sapiens
ggattacaggcacgcgccaccactcccagacagatccagttgagtatgtggaaaacatgtgtgagaacatgcagctgtacccattgcaggacattctcac

SEQ ID NO: 526189 - DNA, 75 bp, Homo sapiens
cctgcatcgagcagctggagaaggacagagcgggatgccaccagcttgtccaaagggaagttccaggagctcctg

SEQ ID NO: 526190 - DNA, 75 bp, Homo sapiens
gatgctggaaaactgtgggctcctggtatctctggcaaccatgtccaagggacctgcagttggtattgatcttgg

SEQ ID NO: 526191 - DNA, 87 bp, Homo sapiens
cgcctgggggcaccgctgccgttccgagcttcaaggttactgactttttatgatgtttggtggctatgagactatagaagcatacga

SEQ ID NO: 526192 - DNA, 100 bp, Homo sapiens
ggaccatccgctctccctgcgctctccgcaccgcggcttaaatgatgtattttgtgatcgcagcgatgaaaggttaatttggagtggcccctggagtcag

SEQ ID NO: 526193 - DNA, 102 bp, Homo sapiens
caaggaattacataacatcaaacgtgggaaaatgtttataggaggccttagctgggacactacaaagaaagatctgaaggactacttttccaaatttggtga

SEQ ID NO: 526194 - DNA, 132 bp, Homo sapiens
cggccggcgggaccataagggcttaactcatatatttaacccccctccaaaaaggctaccagggcatggtggacggaggctcaaacatcgcagaggccgactgggagagtgtctccagcatcctgcaagtgg

SEQ ID NO: 526195 - DNA, 100 bp, Homo sapiens
tgcgactccgccgcgatggtgacccggttcctgggcccacgctaccgggagctggtcaagaactggaagcaatgaggctccccaagaacacacctgagga

SEQ ID NO: 526196 - DNA, 98 bp, Homo sapiens
agaagaggtcccaatcccccactctttccgccctaatggaggtctccagtttcggaaagaccacagcaagattctttcattcgtctcctcctagcctg

SEQ ID NO: 526197 - DNA, 74 bp, Homo sapiens
cgtgacatccgaggtgcctttctccaaaaggagaagtgccagaaagcccggaagcaaggaaggaaagtgaccaa

SEQ ID NO: 526198 - DNA, 100 bp, Homo sapiens
gaacgatgctgccaacagccgcctcatcataacgcaagttaggcgggattatttgaaagccaaaagatatcgctcacttttgggaactcggtggaggaac

SEQ ID NO: 526199 - DNA, 95 bp, Homo sapiens
atcatgggagaaaaccagacctccacttccaaggatatagagcagattcctaaccagcataatgctggagccgggagccaccaacctgcagtttt

SEQ ID NO: 526200 - DNA, 82 bp, Homo sapiens
ttctggccccaccaactgttcaagacaggggcaagtgtccgagtggtgaatcagctacttacagagatggatggtctggaag

SEQ ID NO: 526201 - DNA, 87 bp, Homo sapiens
agcccttgaacagctatgcatgctgcttttgatgtctgacaacgtggatcgttgttttgaaacgccgctacctgtctgaggaacccg

SEQ ID NO: 526202 - DNA, 82 bp, Homo sapiens
gtgccgcgtctccgcgttcccagcccgggtccccgcgttcacagccccagcgcaggtctcagctgagtctgctctgatcacc

SEQ ID NO: 526203 - DNA, 49 bp, Homo sapiens
tggaggaggtatgcctggactgggccagtttgtgaagtgtggatatgca

SEQ ID NO: 526204 - DNA, 50 bp, Homo sapiens
cgtcaacaagctgtaccaggacgaaaaggtggagtctttcattttggatc

SEQ ID NO: 526205 - DNA, 75 bp, Homo sapiens
gtgggtgccaaagtcttcctcatctacgagctatcaagcccagagagagacgtggagagggacgtcttcctgtat

SEQ ID NO: 526206 - DNA, 100 bp, Homo sapiens
gaccacagtgctcaccacccaccaccactggtgtgaggacttctgcatcttacagtcagcacagaacacactgagacttgaatcaagtcagcaacagagc

SEQ ID NO: 526207 - DNA, 75 bp, Homo sapiens
gccactgagtgcctacttcatcaactcctcgcataacacctatctcactggtgcccaggccttctggttggtagc

SEQ ID NO: 526208 - DNA, 98 bp, Homo sapiens
aactttcaacaaatgaggagaaagtagatacagatgatcccccttctactgaattagtttctggaggatctgataatcaagtgattcactgggaaata

SEQ ID NO: 526209 - DNA, 100 bp, Homo sapiens
gtaaatgttggtgcacatgaaatttccaatatattagattcacagtatgttcatgcggatgctcctaccaataaaacactggctgggctggtggtgcagc

SEQ ID NO: 526210 - DNA, 100 bp, Homo sapiens
ccgcctgggacttcgcctctgctctcttcttcgccagcacgctgatcaccaccgtgggtttacccaaggtccagcctagcccctaggcaccatgtcggac

SEQ ID NO: 526211 - DNA, 90 bp, Homo sapiens
cctgtctgaagagaagatgcccctgctgacactctacctgctcctcttctggctctcaggtccagcaagactatgaatctctgttccaaa

SEQ ID NO: 526212 - DNA, 75 bp, Homo sapiens
ggcaagcgcagcaacaacagagagcacgtggccctgtttgtgctcttcgtcctggcctacatccacatcgtcttc

SEQ ID NO: 526213 - DNA, 100 bp, Homo sapiens
ggtcacttcatgcctgtcctgggatttggcacctatgcgcctgcagaggcctaatgggattgtttgaaaaacgtcgcttcaggaaattcctagtgtatgt

SEQ ID NO: 526214 - DNA, 74 bp, Homo sapiens
cggagctagctggatcctctaggcagcagacggactggactgagccctggctcatggggctggccaccttccac

SEQ ID NO: 526215 - DNA, 49 bp, Homo sapiens
ggaaagacctcagagtgttctcaatggcaagtttggggcctacatgcag

SEQ ID NO: 526216 - DNA, 90 bp, Homo sapiens
ctggaactgcacaaactggccactgacaaaaatgacccccatccatgaagctcatgactgctctggtgaatgttgccttaaacctcagta

SEQ ID NO: 526217 - DNA, 90 bp, Homo sapiens
ctgttgaaaaaatttccagtgagtctcgtttcctctcagtccatccacccttcatggggccagagccctctctccagaatctgagcagca

SEQ ID NO: 526218 - DNA, 52 bp, Homo sapiens
agacctcctcctccacaggggagacagaggcttttaaagaagcagttttttc

SEQ ID NO: 526219 - DNA, 76 bp, Homo sapiens
atatgggtcgaccattccaaaaaaatcggtatcgaaggatgatcgcagtgatgtggagagcagctcagaggaagaa

SEQ ID NO: 526220 - DNA, 100 bp, Homo sapiens
cgaagatgatactatctatgaaggagaattttcagatgactggactcttagtggaaagattacatcaaatatggactctgtgggtcgaatacaaatgcga

SEQ ID NO: 526221 - DNA, 100 bp, Homo sapiens
ggaaatggagggcatcttcaaccacaaagccaagaaggatcaagaaggtggagaagaaaagaaatctgtgcaaaagaaaaaagtaaaagagttaaaggtg

SEQ ID NO: 526222 - DNA, 83 bp, Homo sapiens
gtctccggcagcagcggcctcgccgccgcccgtctcctgtcgcgcagcttcctccgtacaagaatattccacagatgtccttt

SEQ ID NO: 526223 - DNA, 100 bp, Homo sapiens
cattgaatgggctgaagtggtgatcaatgtgaacaatattctcaagacttcattagaggggtggtagactcggaggatctccctctaaacatatcccgtg

SEQ ID NO: 526224 - DNA, 100 bp, Homo sapiens
gaaaaggagttcgagcagatcgacaagtccgggagctgggcggccatttaccagcttgctttgaccagatcaagttctttaagtgacttttcctggtctc

SEQ ID NO: 526225 - DNA, 80 bp, Homo sapiens
aacggcttacgaaaatttgtgcaacacatcaagaaagaagctcattcacacagaagacccatttaatgatgaacatcagg

SEQ ID NO: 526226 - DNA, 101 bp, Homo sapiens
ggtctggaggagccttctcaagaacagagggcgccaatgcttcggcattagagaaagagattggtccagaacagtttccggtcaatgagcactattttgga

SEQ ID NO: 526227 - DNA, 98 bp, Homo sapiens
ttcaaagatgcactgcagagagcccggcagtttcaggtatgtcccaaaagtctgtgtgtgtctactcctggacatcgcactgatctttttcagaggga

SEQ ID NO: 526228 - DNA, 90 bp, Homo sapiens
tgccccacgggtgtgcagctgcaggacaacggcaggacgtgtaaggcagggtctccttggcagctgtattctggagtctggatgttgctc

SEQ ID NO: 526229 - DNA, 82 bp, Homo sapiens
caacttattaatagaaccaaacatgtgcaacaacgactttcagacacagaggagtatgttgcaagtgagggtgaagaagatc

SEQ ID NO: 526230 - DNA, 100 bp, Homo sapiens
gacatgcctcacccgaggatattaaaaaggcaactgataaatttcaaacggaagagagtggcagcatttagaaagaatctaattgaaatgtctgaactgg

SEQ ID NO: 526231 - DNA, 100 bp, Homo sapiens
acgcaggaaagccccagccacccatcaaatcagagagaaggaatccaccttcttacgctatggcaggtcaaaatgcagatcttcgtgaaaacccttaccg

SEQ ID NO: 526232 - DNA, 75 bp, Homo sapiens
tctgcggaagtgcagctgcctcagttcttagcgcagtgccctgcaggagtcattaaatcaaaacttcatgctgat

SEQ ID NO: 526233 - DNA, 100 bp, Homo sapiens
attggtgccatcacagcatgtgtggagcccatgagctgctacatggagcacaggcaagaccagtatgaagagctgaaggacgaggccacctcctgcagcc

SEQ ID NO: 526234 - DNA, 75 bp, Homo sapiens
tgcagatcgggagcgcaaggtcgccctcaaggccatgatcaaaacgcatagaatgtcaagctaaccaggcgtccg

SEQ ID NO: 526235 - DNA, 98 bp, Homo sapiens
agcctggagtctgcgaaggccgggacccggttccccggcccacagtgggggtgtgcaaacccgagagaactgggtcattcctgtcccaatcagctgct

SEQ ID NO: 526236 - DNA, 100 bp, Homo sapiens
gctgtaatgttccaggacacctgccatcatggagggttatccagcacctggaggatacctgctacctgtcgctgaaaattttgttccccctctgttggat

SEQ ID NO: 526237 - DNA, 100 bp, Homo sapiens
ctttgtctgctccctgcctcgaaattgtacaactccgctgagcagctcttccatctcaacttcagaggactgtctttctcttttcagttagactcatgga

SEQ ID NO: 526238 - DNA, 100 bp, Homo sapiens
tcgctggtttgtgctcaagggggatcagctctattatttcaaagatgaagatgaaaccaagcccttggatgttcacggaagaccagggtgtagatgacag

SEQ ID NO: 526239 - DNA, 112 bp, Homo sapiens
catcaccctggacaaagtctgcaacatggctagagactgccgggactggtcagatgaacccatcaaagagtgcggccactttggagttgtctaccacggagaatacatagac

SEQ ID NO: 526240 - DNA, 75 bp, Homo sapiens
tgcaggaaccacattatggatctttgtatgatgaagaattggcccagggtgacggggctgaccgggagctgagaa

SEQ ID NO: 526241 - DNA, 100 bp, Homo sapiens
aggtagtcagacgacaaagaaagcatcagccatatccatcaaacttggatcaagtggtgtcctgatgtcagaagaagaagtgtttgaacttgttcctgat

SEQ ID NO: 526242 - DNA, 100 bp, Homo sapiens
ctggaaggtgacagatgaatgcatccaaatcatggggggtatgggcttcatgaaggaagatcccagtgtctgagtgaactaacagtcctgctttcagcca

SEQ ID NO: 526243 - DNA, 84 bp, Homo sapiens
acacatttacatactcctccagacctaccagaaggctatgatcggagcacagtgctacttggaatgttcagctctgactcagaa

SEQ ID NO: 526244 - DNA, 100 bp, Homo sapiens
gagcgacagcagaaggctccgcctgcggcgagagggctacaccgtgcaggtgaacgtgaacgactatctggatatttactgcccgcactacaacagctcg

SEQ ID NO: 526245 - DNA, 95 bp, Homo sapiens
aaaatcagtgctgcctgtgggaagcccgccctggttggagctgcagtttcctaccagtttggtcctcagaatggttggaatgaccctccagcttt

SEQ ID NO: 526246 - DNA, 50 bp, Homo sapiens
ggagaacctgcggcggccggagcggggatagtggtcctagaagaatgtca

SEQ ID NO: 526247 - DNA, 75 bp, Homo sapiens
cattcctcacctgtgaaactgtgatttttgcctgggctattggtggagaggagaatacttatctctggcgcacat

SEQ ID NO: 526248 - DNA, 75 bp, Homo sapiens
tggcggccggcgaaaggagctggtgcctgtgcaagttgttgaggacttccaatagtagtcagacattatcatcct

SEQ ID NO: 526249 - DNA, 76 bp, Homo sapiens
cactggggattctgagctttggctactccagtttcccacgacacgtggtgtggggatgatgtgctcattgagtgaa

SEQ ID NO: 526250 - DNA, 100 bp, Homo sapiens
atccggacccccgcaaggtcaacctgggagtgggagtcacccacaaaagctgtatataatgccagacattggaatcatccagattcagaagaactgcctg

SEQ ID NO: 526251 - DNA, 75 bp, Homo sapiens
agcatgttgggcgccccggacgagagctccgtgcgggtggctgtcagactattgcccagaagaaaagatgtttgg

SEQ ID NO: 526252 - DNA, 82 bp, Homo sapiens
gaagccgactgccccacagacctggaaatggccgcccccaaaggccaagaaactggaggcggcccactttgacgaaaagaag

SEQ ID NO: 526253 - DNA, 106 bp, Homo sapiens
aaagatgatgaatctgaaaggaaatccggaattatcacagaggttatgtaccgaaggactctaccgtgtcagcgggaataaaactgaccaagacaatattcaaaag

SEQ ID NO: 526254 - DNA, 100 bp, Homo sapiens
ccgaggcgggtggatcatgaggtcaggagatcgagaccatcctggctaacaaggatgctttcattggatttggaggaaatgtgatcaggcaacaagtcaa

SEQ ID NO: 526255 - DNA, 75 bp, Homo sapiens
ccgcagagtccgcggcgccaccgctcgccctccagacagctgattttacttctagagttatatagtcccagagat

SEQ ID NO: 526256 - DNA, 100 bp, Homo sapiens
agggacagggaacagccagacgagagcttcagccatcacgaggatgatttcggaacctggagaaaatgtctcctagtaggacaaggaaagcccagcaagc

SEQ ID NO: 526257 - DNA, 90 bp, Homo sapiens
ccttcgagtcgttcttgctcttcgagggcgagaagaaattcgtgtgagggatgacaagatgcctttggcgcaccttgcaatagctgttga

SEQ ID NO: 526258 - DNA, 75 bp, Homo sapiens
aagcacctgcacatccacactccgctgctcgacaggatcatcaaaattttttgagactcctcacagaaactgaag

SEQ ID NO: 526259 - DNA, 75 bp, Homo sapiens
cggggaggcagcgcgggatcccagcctcaggcgtgcgcggacggtgtgcggattttgagaagagggggaaaaagg

SEQ ID NO: 526260 - DNA, 75 bp, Homo sapiens
tgaagagatcgactacaaggagatcgaggtggaagaggtcttggatgtgctggatctgtgtgtggttgttcttca

SEQ ID NO: 526261 - DNA, 100 bp, Homo sapiens
ggtcaccacgcaccgactatgtcgcctgccaccgagccgggcccacctccccaccaaggaagattcctggtcgggtggcttccagtggtcttcagtctgt

SEQ ID NO: 526262 - DNA, 106 bp, Homo sapiens
gagccttcatagggacagccgcccctggtgcacacaccctcgtattctcctgcccttccccagtggattctgctgcgaaccggagaccatggccaaaccagcacag

SEQ ID NO: 526263 - DNA, 80 bp, Homo sapiens
cgttcggccaagggaccaaggtggaaatcaaacagttgagcgttatgatgaagctgctcagctcggaggatgaggttctg

SEQ ID NO: 526264 - DNA, 100 bp, Homo sapiens
tgcaagactgtcgacctaaagcctgactggggcaaggcacctggcgtcctcgcagatcaatcgtgtttgcgagctggggggctgaggagtttgggctcat

SEQ ID NO: 526265 - DNA, 100 bp, Homo sapiens
tcatccctaagcaggagagaagctactaaaggtggctgaatccacagaggagcctgctggttctaatcggggacagtatcctgaggattcctcaagtgat

SEQ ID NO: 526266 - DNA, 100 bp, Homo sapiens
tcttcacacagctgcttccattggccagtatgaagtggtgaaggagtgtgtgcagcggcgttcgtggcattcagggatgtggctgtgtacttcacccagg

SEQ ID NO: 526267 - DNA, 100 bp, Homo sapiens
gggcaagctccagagcctgccggaaggctccctcggtcgcgagtatctccgtttcctggatgtgaacctgcaggacaagttcgagcatcttaaaatgatt

SEQ ID NO: 526268 - DNA, 80 bp, Homo sapiens
accattttggcagctactaaccgtccagataggatagacaaggaaactgttaaggcagcaataatagaagagcagaaacg

SEQ ID NO: 526269 - DNA, 100 bp, Homo sapiens
acagtgatggccaccggttggcgagctttgcacagaccctacaggaaaccctgaaaggttgaaatcacaaagattagacacctttttagataggtgttct

SEQ ID NO: 526270 - DNA, 50 bp, Homo sapiens
caacaggctctgtccaatatgatgggcactgtgccccgactgcggcctcg

SEQ ID NO: 526271 - DNA, 101 bp, Homo sapiens
cgaagggggctgcagcggagatccgagagcagggggatggggcagaggacgaggagtgggtcctggacccaagccagaagcctctgcaaagcttccttcca

SEQ ID NO: 526272 - DNA, 75 bp, Homo sapiens
ttcacaacctcggtttagttccacccaccgagtggcagaggtgccatgctatgtgtttgatgaagagttgaggaa

SEQ ID NO: 526273 - DNA, 97 bp, Homo sapiens
gcccctcaggacccctgctacgtggagaaaacctcggataagttgttttgcagccaggtccatcatttggaaatcaggaaggcttgtgtctcatata

SEQ ID NO: 526274 - DNA, 98 bp, Homo sapiens
cgacggcggctcggacgccgactcggaggtgggtccggggagcccgactcggaccgcggagacaatgcagatcttcgtgaagactctgactggtaaga

SEQ ID NO: 526275 - DNA, 90 bp, Homo sapiens
aactcgactttggagaaaccaccgtgctggaccgcttttacaatgcagcactgtatcaagaactgcctcctgagataaaggagcgatccc

SEQ ID NO: 526276 - DNA, 88 bp, Homo sapiens
ggaccccagggcagcgaagcagaaattggcgtgttagccaaggctttcattgaccaagggaaactcatcccagatgatgtcatgactc

SEQ ID NO: 526277 - DNA, 95 bp, Homo sapiens
ctagaaaaattgactgtatcctatgatgaagcaggccttggatggtatactgtaaattcagcatatggagataccattatcataccttgccgact

SEQ ID NO: 526278 - DNA, 75 bp, Homo sapiens
ccttttcctggtgcatgtgaagttatcaaaaacaggtttcccaacagtgatgtcacaagattgaccacattgatc

SEQ ID NO: 526279 - DNA, 100 bp, Homo sapiens
tagccactacctcctctttggggccccaggaacctataattggaagggtgaggccgcagcgtttgatgacgagtggcggcgggagacctcccgattccgg

SEQ ID NO: 526280 - DNA, 113 bp, Homo sapiens
cgggaagacgaccaagcgggagcgggagcgggagcgggagccggagcgagagcgcgcgggcgcggccgacaggtttgaagtgttgacattccttttgttgtgttacaatgctg

SEQ ID NO: 526281 - DNA, 96 bp, Homo sapiens
ccaaccagcagcagccatcatggaggaggaagatgaagattttgaagaagaaagtgatgatgatgatactgcagctcttcttgcagaactggaaaa

SEQ ID NO: 526282 - DNA, 115 bp, Homo sapiens
gggaagatggcgaaggtctcagagctttacgatgtcacttgggaaggatgaagatgagctggattcccacaccatggtgaagactagtgtggagagtgtgggcaccatgcgggcc

SEQ ID NO: 526283 - DNA, 48 bp, Homo sapiens
cgcctcctcctcctcagtaacgcggtggaatgcagtagccctctgggc

SEQ ID NO: 526284 - DNA, 85 bp, Homo sapiens
aagtgcatgatgtgcgatgtgcggaagggcacctccacccgcttgacaactggtcatttctacaaacatttaattatacgttata

SEQ ID NO: 526285 - DNA, 50 bp, Homo sapiens
cgagatttgaaagagctcagacatctgatatgtgcagcgggggctacagc

SEQ ID NO: 526286 - DNA, 80 bp, Homo sapiens
caacggggaggccaacgtgaagaagttgacatcatggacatatgtgagtccatcctggagaggaagcggcatgacagcga

SEQ ID NO: 526287 - DNA, 96 bp, Homo sapiens
cagcagtcacgcaaacaacttatcagtagtgacttacagtaagaaaggcctaaagaatgtatttgacgaagcaatattggctgccctggagcctcc

SEQ ID NO: 526288 - DNA, 97 bp, Homo sapiens
atgcagtctcatgggcagtggtttgagatcacaaaatttgtccaggatagacatagagctagaagaaacagacttcgtaaagatcaacttaagaaac

SEQ ID NO: 526289 - DNA, 98 bp, Homo sapiens
ctggggccacttgtggtcgccgggagtgtgttacaggcaacaatggcagtgagagcagtcctgctactaccggtgcactgtccacggggtcacctccc

SEQ ID NO: 526290 - DNA, 100 bp, Homo sapiens
caacctcgccccttgcaacaaaggcagactgagcgccagagaggacgtttccaactcaaagcattgaatgccccagaggagcccgaaacctcccaggctt

SEQ ID NO: 526291 - DNA, 82 bp, Homo sapiens
ctacgaagtctgtgacattcctcagtgttcagaaggaactgtggctgcaccatctgtcttcatcttcccgccatctgatgag

SEQ ID NO: 526292 - DNA, 87 bp, Homo sapiens
cacacggtcaactccaggcacgaggccagcctgaagttgtacaagaagttttcatgggctgagctgctgagttcagcctgggaactg

SEQ ID NO: 526293 - DNA, 100 bp, Homo sapiens
agtctaaaggagcccatcgtgcgggtcttgcaaagagtgcttgtgatttcacgtatttttgctgaactcgtaaaagagacacttggatggtggattaacc

SEQ ID NO: 526294 - DNA, 114 bp, Homo sapiens
cccagaagtgatcgctcagctggagaacgcggctaaagttctgatgatgccttcaattaagttgcagagttctgatggagagatatttgaagttgatgtggaaattgccaaaca

SEQ ID NO: 526295 - DNA, 87 bp, Homo sapiens
gcgttccgggagcgccaacccctccagcaagagtgagccatggagctacgtgtggggaacaagtaccgcctgggacggaagatcggg

SEQ ID NO: 526296 - DNA, 82 bp, Homo sapiens
gcagatcgggagcgcaaggtcgccctcaaggccatgatcaaaacctcttggagcagtcggagtggcagccaacaaacgtgga

SEQ ID NO: 526297 - DNA, 100 bp, Homo sapiens
cccgcctgaactaccctgagaatgggtggactcccggagaggattcctaccgagagtggatacaggatcctcagtcttccacaatgaaccctgtttacag

SEQ ID NO: 526298 - DNA, 124 bp, Homo sapiens
attctgaacttaccgactggctgagagtgaatggagctgatgaagacactataagccgggatttgaggtctcaaagaagaaaaaaggctctagaaatttctcatcagtggtatcagtacaagag

SEQ ID NO: 526299 - DNA, 96 bp, Homo sapiens
gccgacggcctgtccggcactgctgaagatgcaacaaggagacgcgcctttgccctggtctctcaagcgtatacttcaatcatcgccgatgatttt

SEQ ID NO: 526300 - DNA, 96 bp, Homo sapiens
gaaggaacgaggcaaggagctaaagcagcgtgcgttcagccctgggaacatgaaaggctcccggagcagcgctgactcctccaggaaacactgagg

SEQ ID NO: 526301 - DNA, 73 bp, Homo sapiens
ttagctcagcaattcttaccttggaaacaaaggacccatcgcaaatgttttccatgctgatctccaaagtggt

SEQ ID NO: 526302 - DNA, 100 bp, Homo sapiens
cccgtttctgcggacttgttctgaggccgaggtgtcatggagaaactccagctgggcccagagattctgcagcgggaaaatccaaggcttatttatgcca

SEQ ID NO: 526303 - DNA, 75 bp, Homo sapiens
accatggctgactacctgctgtacaccctcaacaaacaccagcgctttggaagctggcagggcggagatgctgga

SEQ ID NO: 526304 - DNA, 100 bp, Homo sapiens
aaaaaaaatgtacccttgaccaagctttcagaggtattctagaagaagaaattagccgagactgtctgaagctgggcccacctgctgagggagaagtcgt

SEQ ID NO: 526305 - DNA, 75 bp, Homo sapiens
ctaacagagaaagcagtaaaatggtcacagcagtttaattggttggggtcagataagaagaggagtgacaatcaa

SEQ ID NO: 526306 - DNA, 100 bp, Homo sapiens
tttgacctcttattcgtaacattactgtggataatagagttaaatgtcctccaaaagctggggaaagctgatgagacaaaagacgaacagttcgaagaat

SEQ ID NO: 526307 - DNA, 100 bp, Homo sapiens
gttgttgagcagagggaaagggataggagaaggatgtggactgcagtgctgcagtgccaggtgccagcgagatttcagattcctgtaaacctctaaagaa

SEQ ID NO: 526308 - DNA, 75 bp, Homo sapiens
cggcgccatcttcccgaccgcgagccgtccagcaattctgtggtgttcttggtcacacatttatggagtttctga

SEQ ID NO: 526309 - DNA, 75 bp, Homo sapiens
gaaaatgtcccaaaggatcctcaagaggagatgatggcggggaatggaaattggggagaatgtgcacatttacct

SEQ ID NO: 526310 - DNA, 75 bp, Homo sapiens
gggagggttcgaggccaatgatgggagaccaccgggatgggcagtaagactttgaccccgacgcaggcttcagtg

SEQ ID NO: 526311 - DNA, 80 bp, Homo sapiens
ggaccttcgagacaaggctgtcagcccctaggcgacgttgtggacgtttaccagcgggagttcctggcgctgcgcgatcg

SEQ ID NO: 526312 - DNA, 51 bp, Homo sapiens
gcttgacagctgcaaggagttactgaagacattacaagaagcggtgccaag

SEQ ID NO: 526313 - DNA, 74 bp, Homo sapiens
tccattgagaagagagaagaacattctcgaatacctagaatggggtgttcaaagctgaaacaggagagaaactt

SEQ ID NO: 526314 - DNA, 50 bp, Homo sapiens
gctaaatggctccctgattcatgatagaaaactacctgctacgaaatcac

SEQ ID NO: 526315 - DNA, 88 bp, Homo sapiens
ggaatcctcaacagatgccactgtaagtggggagagaagctgctcaggcagctttccacggagcaggctgttctgcaagagtcgctgg

SEQ ID NO: 526316 - DNA, 109 bp, Homo sapiens
tctctgagacccggaggaggttcgaagctgagtatgtgacagatagctgatcagcttccttgggttttgctgatgacacaagagagctttgcctgaagatggaaacact

SEQ ID NO: 526317 - DNA, 50 bp, Homo sapiens
ggattccaagtaactcttatttgtcttattgttacaggtatcgctgtgct

SEQ ID NO: 526318 - DNA, 74 bp, Homo sapiens
tttttaacataattttagcaaggcaacaagcacaagttgaggtagttcctgaaatgactgagatattgaagaaa

SEQ ID NO: 526319 - DNA, 100 bp, Homo sapiens
cgctgccccggctgcctcctccctgagatgacacacaataatttttggttgaagaagatagaaatcagtgtttcagaagcagaaaaacgaactggaagaa

SEQ ID NO: 526320 - DNA, 71 bp, Homo sapiens
ctgtagtaattggggacaatgtgatcatccttggagagagatgcgcagcccagcctcgaaatgcagaacga

SEQ ID NO: 526321 - DNA, 50 bp, Homo sapiens
ggagctcgtccagctgcgtgcctaggaaatctggcattttttaaagtttg

SEQ ID NO: 526322 - DNA, 98 bp, Homo sapiens
gacaccttcgcaccctaggaggtgtagggaggtgctcatgaagacggctctgggttttccagtttttgctgcagagggtttaaagcttacttccagtg

SEQ ID NO: 526323 - DNA, 75 bp, Homo sapiens
agttcctggtgatattgtagaaattgctggaatttgctgattcccttggaattccgtttttggaaaccagtgcta

SEQ ID NO: 526324 - DNA, 120 bp, Homo sapiens
agctgggatctatgagtggaaaggtgaccaagcccaaagaggagaaagatgcttctaagggtgtcatggagaaactccagctgggcccagagattctgcagcgggaaaatccaaggctta

SEQ ID NO: 526325 - DNA, 75 bp, Homo sapiens
cgtgtcctccgtgggagcccgagacatgtgcattgccattgcgatttctcttctcatgatcctgatatgtgctat

SEQ ID NO: 526326 - DNA, 99 bp, Homo sapiens
cttcgaaaactgaagcagatgttgaacaacaagatcccctgggggccgacgccttcctgccggcgctgaccgaggaactcatctggagcccggacattg

SEQ ID NO: 526327 - DNA, 100 bp, Homo sapiens
gataactacaaaagactcagagactatataagtagcttaaagatgacaccttgcattccctatttagtcagttattctggggaaacccaactgccatgtt

SEQ ID NO: 526328 - DNA, 75 bp, Homo sapiens
ggaaagttgaaggggacatgtatgaatctgcaaacaatcgagtccctgtcccaccaattttgggtttttatcaaa

SEQ ID NO: 526329 - DNA, 83 bp, Homo sapiens
catttaaccagcatggctacttcatattttggaaagcagtttttaagacaagttccctctcccagcctgtgctgactcagcca

SEQ ID NO: 526330 - DNA, 50 bp, Homo sapiens
acaccctggaagccgagaaatgtaaaatgtttattggaggcttgagctgg

SEQ ID NO: 526331 - DNA, 98 bp, Homo sapiens
ggacacactatggtgcttcagccaagtgaaaggcactatcgagattggaaccacagaaggtcggattgtttgtgctgaacgaactgtcctcttgcttc

SEQ ID NO: 526332 - DNA, 74 bp, Homo sapiens
ccggaagctgagtttttatccgccattctcaagcacaacctgggtgaggctctgtcattgcttaatggatcagc

SEQ ID NO: 526333 - DNA, 82 bp, Homo sapiens
aatgccaagacagtggagtgggactggaaactgctcacctatgtcatggaggaagaggagtgtggccatctggggccgtgtg

SEQ ID NO: 526334 - DNA, 90 bp, Homo sapiens
gttacttcaacagttccctgtcgctggcagacaaggagcccttcgaagatgctcttcgcgtgcctccacctccccagtcggtgtccatgg

SEQ ID NO: 526335 - DNA, 82 bp, Homo sapiens
cgtgtttgtagaagtggctttgtggaatattcccatctcctgcctcctaatagctttgaggctgaggaaactgaaacccaga

SEQ ID NO: 526336 - DNA, 75 bp, Homo sapiens
gcgcgagcttgaacgcagcgtgctcttcatcacggtcatggacaagctgcgcctggagatccgcgccatggatga

SEQ ID NO: 526337 - DNA, 87 bp, Homo sapiens
acgccgcaccaggtcttgtagcagcgcctcctcggtgctggagaatctggtaaaagcaccattgtgaagcagatgaggatcctgcat

SEQ ID NO: 526338 - DNA, 97 bp, Homo sapiens
aatatatttgtactggagatttccctcctggaaccaaaggaaatacatttgtacacgatcccaagcctgtggacatctctacagcaatgagtgaacg

SEQ ID NO: 526339 - DNA, 83 bp, Homo sapiens
ttagccctctacttttcaagacaccaagtgagaggccaaccaggccccttcacagatgtagtcactacaaatcttaaattgcg

SEQ ID NO: 526340 - DNA, 51 bp, Homo sapiens
gcagcaaccgcagcagcagccttcagggtctccgtctctccaccgggggct

SEQ ID NO: 526341 - DNA, 90 bp, Homo sapiens
cttcctttacctcaagaaagtgatccagactactcagcacaggtttctggtcctcataccgtgtggttgagtgaaatcaaaacttccacg

SEQ ID NO: 526342 - DNA, 75 bp, Homo sapiens
gaggatgagcctgcagagcgcgcagtacctccgaccgcgctgagcacgttcttccaagaaaccaacattcccaac

SEQ ID NO: 526343 - DNA, 90 bp, Homo sapiens
acgtggagcagtgcttggagcatgaagcacagaatgaaaagcacctttgaagaatcgtaagccatgaatgatgacgggccgaagggagtg

SEQ ID NO: 526344 - DNA, 95 bp, Homo sapiens
ccgtgaaccccatcgagagcctggacacctggaccgagtttgtggagggaaagaataaggctgttttggagtcagcggaagatcaccaaggccag

SEQ ID NO: 526345 - DNA, 87 bp, Homo sapiens
ataattctttttatgtgcgaacatgtaacaagaatccaaagaaaacaaaatggtggtatcatggtgtggaaacaggaagagaactag

SEQ ID NO: 526346 - DNA, 100 bp, Homo sapiens
ctcatcttgaagcccagaataagattaagggttgtacaggctctttgaatatgactctgcaaaggagtctaccatggctcaagaatctcccaaaaattca

SEQ ID NO: 526347 - DNA, 110 bp, Homo sapiens
agtcattgaattatgtcacaattggaggtgaaacctgtggctgccttgcccatgaaatcttgatctgatgaagcaagctgctcttgggagctgccctgtgaggaggccca

SEQ ID NO: 526348 - DNA, 75 bp, Homo sapiens
ctgcagcaaccgagaagatatttacagctctgcaaagaagatctatgaggctcagccggagatttcccgggcatt

SEQ ID NO: 526349 - DNA, 75 bp, Homo sapiens
tgatagcttatggttctccattgtgatgaaagcacatggtacaggccaaatttgagtttcatcatggtgactatg

SEQ ID NO: 526350 - DNA, 101 bp, Homo sapiens
ctgccaccaggagccggcgctgcgcggggaaatggccgagggaatgccgcccatgcagccaggtaccccgcctctctgcaatgcgtgaacatcaacatctc

SEQ ID NO: 526351 - DNA, 78 bp, Homo sapiens
ctcagcctcccgaggagctgggactacagaaatcatagcccactaatgagttttggagccagctttgtcagttttttg

SEQ ID NO: 526352 - DNA, 87 bp, Homo sapiens
ggcgttggaggccaccgtttccaggttgaaaggattgttgacaaaaggaaaaataaaaaagggaagacagagtatttggttcggtgg

SEQ ID NO: 526353 - DNA, 83 bp, Homo sapiens
ctcaccgccctgcactgctacagacaatgcagatcttcgtgaagactctgactggtaagaccatcaccctcgaggttgagccc

SEQ ID NO: 526354 - DNA, 96 bp, Homo sapiens
ttcatccgacaccctcttcaattctcccaagtcgctctttctgggaaaagttatagatatgagggaaggcaccattggagatatggctatcctggg

SEQ ID NO: 526355 - DNA, 100 bp, Homo sapiens
ggacgacgacgacgaggaagaggaggtttctgaggatttggagtggatcagttacgagatgacaatctagaaacttattggcaatcagatggttcccagc

SEQ ID NO: 526356 - DNA, 100 bp, Homo sapiens
agatgccttccctctctgttttgtctgtgtgcacagaggaatcatcacctccaaatactggtcccacgaaatttggagacagacaacttgtcacgcatac

SEQ ID NO: 526357 - DNA, 100 bp, Homo sapiens
ctggacccggaccggttttggccttatttagtgtctctgacaaaaccggccttgtggaatttgcaagaaacctgaccgctcttggtttgaatctggtcgc

SEQ ID NO: 526358 - DNA, 82 bp, Homo sapiens
ccggggacagccagccctcgctggaccagaccatggccgcggccttcggttccccaaggactctagcacctggactgtggac

SEQ ID NO: 526359 - DNA, 100 bp, Homo sapiens
ttcatgttggcctttggatctctgattgcatctatgtggattctttttggaggttatgttgctaaagaaaaagcggatggtggttcctgctgccctcaag

SEQ ID NO: 526360 - DNA, 75 bp, Homo sapiens
ctagctgctgctcttagggaccctgtggctaggtgcgcggatggaaatccagtaactattggtacttcagagatg

SEQ ID NO: 526361 - DNA, 98 bp, Homo sapiens
ctgcgatgtcatcaccctgatgggcacaccgtctggcacagctgagccctatgatggcaccaagggtggagagattcaaccagttagcgtgaaagttg

SEQ ID NO: 526362 - DNA, 100 bp, Homo sapiens
agcattagaacatcacagaagtgaaatacaggctgaacaggacagaaagaatgcagtaatagtggccttgtcttcaaaatcatgggatgtagagactgca

SEQ ID NO: 526363 - DNA, 100 bp, Homo sapiens
tcgtggctaaacaggtactgctggcaagacttcaaggactgcattcgtaggcaaaggttgacccaatcaaagataaaagaaaatcgacagcaaatcgttc

SEQ ID NO: 526364 - DNA, 74 bp, Homo sapiens
ccacacctccggaccgagggacgcgggccggaaggtggtggtcgtacgctgtgaaggcatcaacatttctggca

SEQ ID NO: 526365 - DNA, 96 bp, Homo sapiens
ctggacgggtacctggaccttctcagggagaaccagctcctcccaggatgacgatgtcgataccaagaagcagaagaccgacgaggatgactagac

SEQ ID NO: 526366 - DNA, 100 bp, Homo sapiens
tggctgtaacttacgtgtactttaccaacgagctgaagcaggttattctcgttcaagttaatccaggtgagactttcacaataagagcagaggatggaac

SEQ ID NO: 526367 - DNA, 50 bp, Homo sapiens
tgcgcccccgggagcgggcgcccagagaggaattacggaggttgagctgg

SEQ ID NO: 526368 - DNA, 83 bp, Homo sapiens
ctccgcaccccggggtcccaggaagggcggcccagggccaccagatgcctccacccagaaaggtcagatgtgggagagttcca

SEQ ID NO: 526369 - DNA, 96 bp, Homo sapiens
ttaatactgtgaagggaaaggcactggaagtggctgagtacctgaccccggtcctcaaggatcccctaacaacagtgagagagcaatgcgagcagt

SEQ ID NO: 526370 - DNA, 100 bp, Homo sapiens
atttggcccattggtttcaccacctattcgtccatctctaagtgaaggccatgaccacaatgtttcttcagtagccatcatgcccaatggagatcatata

SEQ ID NO: 526371 - DNA, 100 bp, Homo sapiens
cgcgcgggtctccgtggaagtccgtttcgtgagcagcgccaagaatccaagctgaacagcataaggaaggacattcttgcacacgtgcaaaatgagtgct

SEQ ID NO: 526372 - DNA, 80 bp, Homo sapiens
gcaaagcgcccagcctgccgcctcgctgtccctgcggcttctgggggtgtcgtgaaaactacccctaaaagccaaaatgg

SEQ ID NO: 526373 - DNA, 83 bp, Homo sapiens
gtggactgcacggcccactccgacgtgtgctccgcccagggggtgcgaggataccccacacaatgcagatcttcgtgaagact

SEQ ID NO: 526374 - DNA, 82 bp, Homo sapiens
tgccgcacccttgaaaggaggcccctgccgtgtggacccgtaaaataaaatgggtgattgaattactcagatatgaagatca

SEQ ID NO: 526375 - DNA, 82 bp, Homo sapiens
cggcgagcgcgagcggcgcgagaaacctcaggcccagagccagcacgagacatccgctgcgagttctgtggtgagttcttcg

SEQ ID NO: 526376 - DNA, 90 bp, Homo sapiens
caagtattacgcggtgggcgacatcgacccgcagccctggcctcccacgactacatcctgaagattgtgcccacggtttatgaggacaag

SEQ ID NO: 526377 - DNA, 75 bp, Homo sapiens
gccagccagactctgggtcgcccttgcctgcagaggagcctctcctcctcccagttctcctctggatcgcagtca

SEQ ID NO: 526378 - DNA, 100 bp, Homo sapiens
gcggcagcagccgctctgagggcgcctgctcaggtgatatttctgggggagataaatccaagaaaggggtaaaacggaagaagatttcagaagagagtgg

SEQ ID NO: 526379 - DNA, 75 bp, Homo sapiens
ccgcggtgctgctggtcacggccaacgtgggctcgctcttcgacgacttttggaaaatatgtcccatggagcaca

SEQ ID NO: 526380 - DNA, 100 bp, Homo sapiens
gacggtacttctgccactgctgctccgtggagatcgtcccgcgcctgccggttgaaatcacaaagattagacacctttttagataggtgttcttcagcac

SEQ ID NO: 526381 - DNA, 82 bp, Homo sapiens
ggaaaaccagatccagaaactggaggagtcccgctcgaagctagcattcccatggtttggcatggacatcggtggaacgctg

SEQ ID NO: 526382 - DNA, 100 bp, Homo sapiens
tagcggcaccctcaagtttgcgaaaccacaccaaactcctggttggtgatgagagggggagaatattctgctggtctgcagatgggtaggaagagagagg

SEQ ID NO: 526383 - DNA, 74 bp, Homo sapiens
acggctgaaggccctacgggagaaaaccgggcgcaagactgaggctgatgtgaatccaaaggcctatccccttg

SEQ ID NO: 526384 - DNA, 101 bp, Homo sapiens
cctgcgtcatcaacttaggcggatctagtgaaaagccatttgatgtatgcggtcagagaagaagtggaggtcctcaaagagcaaatcaaagaactaataga

SEQ ID NO: 526385 - DNA, 100 bp, Homo sapiens
ggccgcgagcagaccggcctggaagcctacgccctggggctggacaccgtccatgagactggggcagcagcaggggcaggtacagagcacctcagccgcc

SEQ ID NO: 526386 - DNA, 100 bp, Homo sapiens
catccttgtctgtgaagctaaactcaatgctgctgtgtgggaagaagatttgtaaagaaaactcttagatctgttaccattgggatgataacctgaggac

SEQ ID NO: 526387 - DNA, 75 bp, Homo sapiens
agcagagttttgattaccactgacctgctggtgcactgtgaagagttcatccccgagtttgagaagcaataccca

SEQ ID NO: 526388 - DNA, 100 bp, Homo sapiens
caacggccaacttcggcaagatccagatcgggatttacgtggagatcaagcgcagcgatgcctaccgtatgtgaacgggagctgtgtgtgtttgcttttc

SEQ ID NO: 526389 - DNA, 80 bp, Homo sapiens
atacggcttcactggcgcccaggtgggcaagttgccgtgcctggagatctcacaggccaagactaaggggctgcagagcg

SEQ ID NO: 526390 - DNA, 83 bp, Homo sapiens
cgaggctcggccgccccgccgcgagcctcctggatgaggaagtgagccgcactctcaacgcggagacccctaagtcatccccc

SEQ ID NO: 526391 - DNA, 51 bp, Homo sapiens
ggcaggtcatgagtcaccatgaaatacatgctacaggatttaactatcaga

SEQ ID NO: 526392 - DNA, 82 bp, Homo sapiens
ctcattgccctcaccatcgccctcttcaccatctatgtcctctggacgctgacaggggcaagtgtccgagtggtgaatcagc

SEQ ID NO: 526393 - DNA, 95 bp, Homo sapiens
actgaaaaactgaggatgattgttagctccacgagtgcaaactgcagtcaccaagtaaaacaaaaaatctgctgatattgtaatttgtgatgaag

SEQ ID NO: 526394 - DNA, 98 bp, Homo sapiens
agaggaaaggagcagtggcttccggttgaagccaccaacgctgatccacggccaagcccccagcgcaggaaagaccacagcaagattctttcattcgt

SEQ ID NO: 526395 - DNA, 75 bp, Homo sapiens
ggagcagcacttccacagccaagtgcgggagtccacggtttctgacgtagaagagcttacccctccagagcatct

SEQ ID NO: 526396 - DNA, 113 bp, Homo sapiens
cggcctgtgtctgtgtgaggctggctacgtgggcccgcggtgcgagcagcgcctatcactgtcccagcttctggatgaaatgcgggaggaccaggagcatcagggggcactcg

SEQ ID NO: 526397 - DNA, 82 bp, Homo sapiens
gaagagacaggacgcgggaccgtgcagccgacaggacaacaacaggctggagttgttgcccatcctcctgcagtgcctccaa

SEQ ID NO: 526398 - DNA, 76 bp, Homo sapiens
ggaataaggaagcgacctgcaaccgacgacccaacatgagtgaagtttcctgcaagaaacgggacgactatttgga

SEQ ID NO: 526399 - DNA, 50 bp, Homo sapiens
ccgccaccacccactccggacacagacccctttgctgatgcaagtaaggg

SEQ ID NO: 526400 - DNA, 100 bp, Homo sapiens
atgatgaccgtcaccaactggttcaagttatgtctagagaagatatttccacactggtttcccttttcaagagctttatcgggagctgaagcagtcaatg

SEQ ID NO: 526401 - DNA, 100 bp, Homo sapiens
aacgacagccgcttcactgacctaccccctggacctggtcagagcgcggatggccgtaaccccgaaggaaatggtttgggatgctctgacagacaattac

SEQ ID NO: 526402 - DNA, 75 bp, Homo sapiens
gcgcattggaaagaagcgaccgcggcggctgggtaaagcatcaagtcgaatatttgggtctgaaagagaacattc

SEQ ID NO: 526403 - DNA, 100 bp, Homo sapiens
tggagtccaggcgctcgcgtcacaggaaatgcctatactgccctcctcactcacttccggtggcaggtgtacttttgcatgtgatgggagatgccctggg

SEQ ID NO: 526404 - DNA, 75 bp, Homo sapiens
agcgcgagagagcgcggccctcaggagcaaggcgactaatagggatgccaaaggaaaaatatgatcctccagatc

SEQ ID NO: 526405 - DNA, 100 bp, Homo sapiens
ggagactggatgatagaattaaaaattgtatggcgacttcttgagctggaagctagaggaaacccttgcccagttccctttgcagcctgggaaggtggcc

SEQ ID NO: 526406 - DNA, 100 bp, Homo sapiens
agtggagcgtgtcctgaaggagttccaccaggccgggaagcccatcgggaaagaccacagcaagattctttcattcgtctcctcctagcctgggggacca

SEQ ID NO: 526407 - DNA, 82 bp, Homo sapiens
ttctggaagaagaagaagagcatgatcggcatgtccaccaaggcaggttatgaagacagtatggagtttccagaccatagta

SEQ ID NO: 526408 - DNA, 92 bp, Homo sapiens
gtgaggggagcacttcctggacccaggaagggagagtcttcttccaagatttgtattgaacgatgtcttgagaggggaaagagtagtggtag

SEQ ID NO: 526409 - DNA, 87 bp, Homo sapiens
cagacttctgtacagaagagagttgtccagtgatgtcagctggcccaaagaaagaatacccacctcatgtccaaaaagttgaaatta

SEQ ID NO: 526410 - DNA, 100 bp, Homo sapiens
gacacctaccaggtggacggcacggacgacagaagcgactttggtgagactctggctggacggcagtctggaaacgaccaatgagatcttggactctgcc

SEQ ID NO: 526411 - DNA, 90 bp, Homo sapiens
cggacgctgagcggagcagctgcgccacgatgttgtgactgtgacagactcactggggtttgtacatgctggggaggagccttcctttca

SEQ ID NO: 526412 - DNA, 74 bp, Homo sapiens
ctcagacacagagcagcagtcccctacaagtaatcagttcaagaagttccctcagatgacctcatatcaccgga

SEQ ID NO: 526413 - DNA, 75 bp, Homo sapiens
cccagatgatctatccctcctgaaactctaccctccaggggatgaggaaggcatcacgttgggtggtttccattt

SEQ ID NO: 526414 - DNA, 50 bp, Homo sapiens
ggcagaaatagcgaccatggcgagccttatgccagcctggaccatcttgg

SEQ ID NO: 526415 - DNA, 100 bp, Homo sapiens
aaagctgttttggaactgtcaggtacctcaaagctggcttttcatggcctgccactgaaaatcaagaaagaaccccacagtccatgttcagaaatcagct

SEQ ID NO: 526416 - DNA, 88 bp, Homo sapiens
tcctcagaagaaaaatgggtcttgatccagcttgtcaggtcccagcatttgagggtgatgatggattctgtgtgtttgagagcaacgc

SEQ ID NO: 526417 - DNA, 98 bp, Homo sapiens
cgcggcggcgtgtgcgcccctcagaggaaccagactagcatttctcagtgggttccagtatgcagccgattgatacctgtgtctcctacccaaggaca

SEQ ID NO: 526418 - DNA, 90 bp, Homo sapiens
gggtattggatgattcgtagctgagactccgctacacccctgaagtggggaaatggtgccctacgagacgctgaacaaacgctttcgcgc

SEQ ID NO: 526419 - DNA, 75 bp, Homo sapiens
gtatgaccctcccagcaatgcaagctttggacatcagacagtgcaggagaagaatgtgatgcggcagaaggggct

SEQ ID NO: 526420 - DNA, 75 bp, Homo sapiens
ggacccgccacgccaggaggcggcagcctcaagtactacagccttccagcagccttcccagacccacagatcaca

SEQ ID NO: 526421 - DNA, 71 bp, Homo sapiens
tgatgtcaaatggttgctggggctggcagcaaagctgggagatccgggagctgcagtcccagatctcggac

SEQ ID NO: 526422 - DNA, 100 bp, Homo sapiens
actcgggaggaccagggaagcagtgaaaatgatgagagatggaacactgaaaggttttgaccagaccattaatttgattttggatgaaagccatgaacga

SEQ ID NO: 526423 - DNA, 97 bp, Homo sapiens
aggaggaagcctcttaaccgagccttgtaggctgaaattgcaggtggaaaggaatttggacaatttcctagaggaagttctggcttctggactgcac

SEQ ID NO: 526424 - DNA, 82 bp, Homo sapiens
gtagagtcgctggagcgggcggagctgtgcgagagcctcctcacttggatagagctttggagccaaacccttctgatgatcc

SEQ ID NO: 526425 - DNA, 75 bp, Homo sapiens
gacgagccgtggtacgaccaccaggacctccagcaagtctcctttagcattggaaacaccaaatcgggtatcctt

SEQ ID NO: 526426 - DNA, 100 bp, Homo sapiens
tatgaggaagagatcaaggtcctttccgacaagctgaaggaggtccatggggccgatgtatgggagatgaatgtggtcccggaggcatccaaacgagggc

SEQ ID NO: 526427 - DNA, 100 bp, Homo sapiens
cggacactttgttattggagaaacatgcagattatatcgcatcctatggctcaaagaaagatgattataggagaattctgcctaagccaactcgaaaaag

SEQ ID NO: 526428 - DNA, 83 bp, Homo sapiens
ctctttctggcctggaggctatccagccaaaagactgttgaagtagagagcattttgcccagctcactcggattctttgctgg

SEQ ID NO: 526429 - DNA, 100 bp, Homo sapiens
cctgaatgtggtcgatgccaaaggaagatccttggagtaccttaacatggggaatcttcttaaagttttgacatgcacagaccttgagcaggggccaaat

SEQ ID NO: 526430 - DNA, 86 bp, Homo sapiens
tcaaagtgggagggatccttgtcatgccactggaagagaaggcaatttttacccagaaaagcaagccggggcctgacccgttggac

SEQ ID NO: 526431 - DNA, 100 bp, Homo sapiens
ttgtggtgttttctatcccagttctttggcttttactaaaaatggacgcctggcaaccaaatgcaccttggtgtggagtcaaaagtacacatgctggatc

SEQ ID NO: 526432 - DNA, 98 bp, Homo sapiens
tgcgttgtaaatgccaccaccattgtccagaagactcagtcaacaatatttgcagctaaaagatggcggcaaggcagcccaggcaaatgtaagaatag

SEQ ID NO: 526433 - DNA, 104 bp, Homo sapiens
aataatgcgagctgcttccgaaggctgaccgagtgcttcctgagccccatactatactggcaattgctggagaagattttgcaattgttgcttctgatactcga

SEQ ID NO: 526434 - DNA, 101 bp, Homo sapiens
tgtctccccgatctacggggctgacatcagcggctctttgtatgatgacgtcgccgccctggagaggcaggtgtttgacttcctgggctaccagtgggcgc

SEQ ID NO: 526435 - DNA, 117 bp, Homo sapiens
agccaaattcaaaaaggataaggagatcatagcagagtacgatactcaggtcaaagctcattgctatggacagtgctatcaccctgtggcagttccttcttcagctcctgcagaagc

SEQ ID NO: 526436 - DNA, 87 bp, Homo sapiens
aggcggagaggcacggaggagccgctggggctgccgccacggccgcccggaggcatttgtaaaggatgttcatgaagattcaataac

SEQ ID NO: 526437 - DNA, 100 bp, Homo sapiens
caaggaggtttacaaaatagacatgccgcccttcttcccctccgaaacttacctgtggcccatacctgcttcaatcaactttgccttcccccctacaaga

SEQ ID NO: 526438 - DNA, 95 bp, Homo sapiens
ctccagaagatgctgcgaaagctgaaggagcaaggacaccgagtgctcatcttctcgcaggttcattaaagaagcggaagcagaatgaggctgcc

SEQ ID NO: 526439 - DNA, 75 bp, Homo sapiens
ctgaccgctgccgcccagcacgtccaggcgctgttcttgctggctggtgccccagggcctggagaggtctgaaga

SEQ ID NO: 526440 - DNA, 75 bp, Homo sapiens
ctcaagtcaccgtggagctccgccgccccgaaactttcaccgcgagcggatccagacatttaatgtggatgcacc

SEQ ID NO: 526441 - DNA, 100 bp, Homo sapiens
ctgaggaagatgaagaccagagaaaccctgcaaaggagtccctagagacacctagtaatggggtattccctcagcggatactacacccatccatttcaag

SEQ ID NO: 526442 - DNA, 50 bp, Homo sapiens
cagaaatggaagtaccagcagaagccgattacacctcaacaagaaggcaa

SEQ ID NO: 526443 - DNA, 75 bp, Homo sapiens
aaatggatttggaaggactgcgctgcaggaaagaccacagcaagattctttcattcgtctcctcctagcctgggg

SEQ ID NO: 526444 - DNA, 74 bp, Homo sapiens
gctgccttcattgagtttaaagggacaggattgcccttccgtcaagaaagtattgtgttttatggaccatgtgc

SEQ ID NO: 526445 - DNA, 110 bp, Homo sapiens
tgtcgcctgcccgatggacgagcctcccgggaagcccctcagctgtgaggagaaggaaaagagggccaagatcagtcagggaaccaaggtcccggaagaaaagacgacca

SEQ ID NO: 526446 - DNA, 75 bp, Homo sapiens
cttaaagggctgagagcttgagggcagcagcccctgtcaaagggaacaggaagcagtccacggagggtgacgccc

SEQ ID NO: 526447 - DNA, 90 bp, Homo sapiens
gagtggaagctcttcatctacaacccgaccaccggagaattcctggggcgcaccgccaagagctgggggtgcaaaacgtccatgttccca

SEQ ID NO: 526448 - DNA, 71 bp, Homo sapiens
aatatgtgacaagagtatgtggccttgcaacttttgcttcagcgcctgctcctggtcatcactaaccagat

SEQ ID NO: 526449 - DNA, 51 bp, Homo sapiens
caaccttctcattcagacacacgtgatggaatggggagaagatattaaagc

SEQ ID NO: 526450 - DNA, 98 bp, Homo sapiens
caccatcaagctgtctaagtccaaagatttttacccagaggggcttctgaacaatgccagggatacaagtgtcatggatactctaccactgaatggta

SEQ ID NO: 526451 - DNA, 92 bp, Homo sapiens
cacgggcctccgaagagctgccgcgacgcccggcccgcagggcagaaaccaccatcatgggttcgggtcccatagaccccaaagaacttctc

SEQ ID NO: 526452 - DNA, 100 bp, Homo sapiens
tgcctcaaggatgtcatatctatgagtaccgcgagagcaacaaaccgagcgtgtgccactggacctcagtcctcgcctggaggagacgctggacttcggc

SEQ ID NO: 526453 - DNA, 74 bp, Homo sapiens
tgttgtaagtaaagaaacaagcagatggtatccaggtttcatgatggaaatggcttcatgggatggaggaattt

SEQ ID NO: 526454 - DNA, 90 bp, Homo sapiens
tgtttgaaaagagtacaggacttcctcacaaaggtggtaagttttcttcatacagttcttttgtgtgacaaactggatttcagcacggcg

SEQ ID NO: 526455 - DNA, 100 bp, Homo sapiens
ttccaccaggccgggaagcccatcggaaaaatggctacaaacttcctagcacatgagaagatctggttcgacaagttcaaatatgacgacgcagaaagga

SEQ ID NO: 526456 - DNA, 90 bp, Homo sapiens
cctcttcgagcgccgcggacgcgtcatcgagtgtgacgtggtgaaagaaactggcgatggaatatgagaggagccctctggaaagaaaag

SEQ ID NO: 526457 - DNA, 74 bp, Homo sapiens
ccgccgctgccaacgtcgagcggcgacggctgatttgtcaaagatgaaagtgaccttatcagctttggatactt

SEQ ID NO: 526458 - DNA, 101 bp, Homo sapiens
cccagctcctgcccagccagctcctcagcccccacctgccaaagtcagcaagttgtcactcagcccagtccatcagtttctcagcccagtacttctcagag

SEQ ID NO: 526459 - DNA, 100 bp, Homo sapiens
ctgctgttctccaagcagttcatgcaccagggcaacgtggctgagaccacccgatgagcagcaccagcagtaagagggctccgaccacggcaacccagag

SEQ ID NO: 526460 - DNA, 83 bp, Homo sapiens
gtccttctccactttcgccagcccgtgccgcgagcgcggcctgcaggagtctggggagcagggaggagccctgtgccctgtcc

SEQ ID NO: 526461 - DNA, 101 bp, Homo sapiens
ttttatgttgctgatgaacaacttagaatggagtataaagtttcttaaacaattaggtctacatcctaactggcaattcgttgatgtatatggaatggatc

SEQ ID NO: 526462 - DNA, 83 bp, Homo sapiens
gagagcctttcatcccagctttctaatctacagaaagaggaagccagttgagggaagttctccatgaatgtacgtcacaatga

SEQ ID NO: 526463 - DNA, 98 bp, Homo sapiens
tgggatacagctggacaagaagattatgacagattacgccccctatcctatccgcaaacacacaacaagccgctctactcctttgaagacaatgcaga

SEQ ID NO: 526464 - DNA, 100 bp, Homo sapiens
ccagcagccatcgccagcagggcatcacaggacctgatcccaaccttgaagaaagtcctaaaagaaaaaatattacatatgaggaattaaggaataagaa

SEQ ID NO: 526465 - DNA, 124 bp, Homo sapiens
cactgctatgctccagaacttcaaagggaaggtcattgtcatcgtggggcatgtggcaaaacacacagctgaggagagcctgacaaggagctgaatcctaagaagaagatttgggagcagatcc

SEQ ID NO: 526466 - DNA, 71 bp, Homo sapiens
gctatgcaaatatagaacactaaagtgttacatgacagatgtatgagtctgcgctcctcagaccaccggca

SEQ ID NO: 526467 - DNA, 100 bp, Homo sapiens
gacaggaactacgtcccggggaagatgaggtttcgcataagctcttggagatgtacaggaaggagctgctcctgaagcgcacggtggccaaggagcttgc

SEQ ID NO: 526468 - DNA, 74 bp, Homo sapiens
tgtcttcggtggactccttcggcagtccacccaccgccgccgcctcccagtcgaggggagctgcagcgggagtc

SEQ ID NO: 526469 - DNA, 82 bp, Homo sapiens
ctcgatcttgggacccaccgctgccctcagctccgagtccagggcgaggtgagcgagtgctgtgctttcatgggcctcttct

SEQ ID NO: 526470 - DNA, 87 bp, Homo sapiens
agagcctcgcctttgccgatccgccgcccgtccacacccgccgccagtaaaatgtttattggaggcttgagctgggatacaagcaaa

SEQ ID NO: 526471 - DNA, 82 bp, Homo sapiens
gatacttgggactacacaaaccccaatctcagtggacaaggtcggcagcttcactcccgagggtgccgcgagcccaggcggc

SEQ ID NO: 526472 - DNA, 75 bp, Homo sapiens
tccaggccgtggtcagccgcttcgacgagcaggagcttactccacgggaacagcctctagataatctgagttgtt

SEQ ID NO: 526473 - DNA, 100 bp, Homo sapiens
cctgacaaaattaggattgcaactggacagatagctggcgtggataaagatggaaggatagtttctaatggtgatgaacaattggaaaaagccatggaag

SEQ ID NO: 526474 - DNA, 90 bp, Homo sapiens
gaggaggcgagctagccgggagttacaccgccaccgccagatcagtgctaacatcttccgtacacttcctccaagtgataatccagattt

SEQ ID NO: 526475 - DNA, 125 bp, Homo sapiens
ccatctttcttgatgaccttggaacaaatctaaaagaagctgccagacttggtattcacaccattaaggtggatgaaactcagtttaagaagatcctcggctacatcaacacggggaagcaagag

SEQ ID NO: 526476 - DNA, 83 bp, Homo sapiens
tgggagaacatccgctgcctgcaggactgccgcgagtgcactggaggcatggtatggtttaggaatgatttattacaagcaag

SEQ ID NO: 526477 - DNA, 75 bp, Homo sapiens
caccactcaaaactgtaatactaaatgtgttaccataccaaggtaacacgtacacagacctctcggccggaatct

SEQ ID NO: 526478 - DNA, 74 bp, Homo sapiens
cagagatgtgatgttggagaactatagcaatctggttttcttggaggtggagaaaacccggtgccagcacgagc

SEQ ID NO: 526479 - DNA, 74 bp, Homo sapiens
ggaaacctgggggctccctggacaactccgagcagctggtcagtgagaaggtcggaggggccgaggggaccaag

SEQ ID NO: 526480 - DNA, 100 bp, Homo sapiens
atcaggcagccttcaggactttgggctagaaagacttgagttagacaagcagcagcacacgcctccctacctcatggcgacagaaaatggagcagttgag

SEQ ID NO: 526481 - DNA, 82 bp, Homo sapiens
cgtcagcatcccagccgtgctcacgggagtgcatccgccccaacccttttccccctcgtctcctgtgagaattccccgtcgg

SEQ ID NO: 526482 - DNA, 108 bp, Homo sapiens
ccagaccctggagcctcagttggaagcagccgatccagcctgcggagcctgtggggcagtgtttggccagcgcttggatgagactgtggcctatgaacagaaattcgg

SEQ ID NO: 526483 - DNA, 104 bp, Homo sapiens
tctgccaaaatttgccatccgagggatgctgaaaacctttgggcttcatggagtcgtcttagatgttgattcagtggacccccaaaagtacaagggcatattta

SEQ ID NO: 526484 - DNA, 90 bp, Homo sapiens
cgcattgtggcgtgctggagtttgtggctgatgagggcatctgctacctcccacactggggccgcctttttgcctatcctgacactcacc

SEQ ID NO: 526485 - DNA, 100 bp, Homo sapiens
tatggaagctctgcggtcatacaaccaggagtttgcagacctgacagacgctgctgcccgcaacgcggagctgctccgccaggccaagcacgaagccaac

SEQ ID NO: 526486 - DNA, 88 bp, Homo sapiens
ggtggaggcgccgcaagcgctgagctgtccctttccccccaacacatcgcttgacatctgaagaagtatttgatttggatgggatacc

SEQ ID NO: 526487 - DNA, 109 bp, Homo sapiens
ggacaatgaagactattactcgttgctgaacgtgcgcagggagcttactccatctggaagcatttctcttatcaaatcaatgcatttaattaaaaaccctgtgaagacc

SEQ ID NO: 526488 - DNA, 75 bp, Homo sapiens
ccatgcccctcaggctggaacttgccctgtctcctcgcagatgaggccaagatgctgaattatcagggacacttt

SEQ ID NO: 526489 - DNA, 100 bp, Homo sapiens
gtaggtaatgctgctgtatcctcagttgactcattcactcagtaatatatttggtctgcggcctgtcgattatacagatgatgaaagtatgaaatcgcta

SEQ ID NO: 526490 - DNA, 74 bp, Homo sapiens
ccatggcggagcagacctactcgtggttcatgcagcatcccaagaactttggcctgatcgcatcattcctggag

SEQ ID NO: 526491 - DNA, 96 bp, Homo sapiens
tacggaagctgagctgcagagttagccggcatctgacagaaaaatgtggatgaaaatactaggaaaagtttatttaagttacgttctacatgggat

SEQ ID NO: 526492 - DNA, 140 bp, Homo sapiens
agattgaactttattgtgaacaggtagagtacctgttgttgcagagttattttctgagtcagtttcaggccatccagctgagccgagatgggcagtacctgctcacaggaggagacagaggagtggtcgtggtccggcag

SEQ ID NO: 526493 - DNA, 90 bp, Homo sapiens
gcagttgcaaaatattcaggagaccgtcgttgccttgtatttccagagaacagattttaggtgatgggcaagtcagaaagtcagatggat

SEQ ID NO: 526494 - DNA, 75 bp, Homo sapiens
gagccagcaccccttcggaaaaactttaccggtcttgttgcagtaggagaaagagcacaaaagaggtctgggaac

SEQ ID NO: 526495 - DNA, 75 bp, Homo sapiens
ggacgccaatggcatgttgagctttcccaatctaaaccagagactctccaacatgtgccttctgaccatacaaat

SEQ ID NO: 526496 - DNA, 97 bp, Homo sapiens
ggcccccacctttcctcaggagtcatttctgttccgcacaggcctgctgaactgggtgctttatatagggccttctctgactaccagatccagcaga

SEQ ID NO: 526497 - DNA, 75 bp, Homo sapiens
cagcttctctgtgaagcctttaaagcagaagcaaattgtcgtgtatgagaggtgtgaaaagctgcggcccacgct

SEQ ID NO: 526498 - DNA, 128 bp, Homo sapiens
ctcgcactaccctgactacagctggagcgcccagaggcgagccctggtggaggaagaggccactgctgaagccaacaacttagcagctgcagcctctgccaaggacatttattataacaacatggaag

SEQ ID NO: 526499 - DNA, 71 bp, Homo sapiens
ccgctgccgctgctgctggtgttagcgctcagtcaagatcacccggaagttcaggctgaattctgaaggca

SEQ ID NO: 526500 - DNA, 72 bp, Homo sapiens
ggactgcagtttctacacagcaagggcatcatttacagtgcctatgaagtcatcaagctaaaaggatatacc

SEQ ID NO: 526501 - DNA, 100 bp, Homo sapiens
ctcttctcggaactggctaaaatagctccgtaaatgggccgagcgcaacacggaggggataccgctcactaccaggccatgtcaaaggacgccctgaatc

SEQ ID NO: 526502 - DNA, 100 bp, Homo sapiens
aagtaggagtcgcaggagcagccgcagtagatctcgaagtatctcaaaaagtcgctcccggtgaaggtaggcaatgaagttgctacaggaacaggaccta

SEQ ID NO: 526503 - DNA, 50 bp, Homo sapiens
aatcaataaagactgtttatagaggaagttgccattgccccaaatggagc

SEQ ID NO: 526504 - DNA, 100 bp, Homo sapiens
cactgtattatacggttactataagtatctgcacaaccaccactgcatttttgcactttttcttcctggcttcattctgttgggttttgactgaggcgtg

SEQ ID NO: 526505 - DNA, 100 bp, Homo sapiens
cagtcccaaaggggctggagatgccaccccggcaaagttcgccctagtcatttgcttcacttacagaatgtctgaaggggacagtgtgggagaatccgtc

SEQ ID NO: 526506 - DNA, 100 bp, Homo sapiens
gctctgatcacagtgaagactgcctttcagaagcaagctgggaacctgttgataagaaagagactgaggatttgaccctaaagcatggctggaggactgg

SEQ ID NO: 526507 - DNA, 83 bp, Homo sapiens
cctcaacaaacaccagcgctttgggtgagaagccctaccactgcaactgggacggctgcggctggaagtttgcgcgctcagac

SEQ ID NO: 526508 - DNA, 88 bp, Homo sapiens
aagatttcaaccactcataccatgcctgtggtgttatagcaaccatagccttcctaataagctatggagatattttgcatagaatgaa

SEQ ID NO: 526509 - DNA, 75 bp, Homo sapiens
ccctgctctgtcactaacaagctgcgtgatcttcggtgaattatgtaacctcattacgctggatgtagctcacaa

SEQ ID NO: 526510 - DNA, 75 bp, Homo sapiens
cggcgggcagaagccgcccgctctccggagctgctaagaaggacaaataagatagcagagtgaaagagcttttgt

SEQ ID NO: 526511 - DNA, 75 bp, Homo sapiens
gccgtgtggacccgtaaaataaaatggcttgcattgaaaggctctagttacagtggacttcttgaacgacatcat

SEQ ID NO: 526512 - DNA, 90 bp, Homo sapiens
aattgttgtcaatggaggctgaagtttgtgaaaaaattgggtgtttgcaaagatttaaggatgatgatgctgaagctatccttgctgcag

SEQ ID NO: 526513 - DNA, 104 bp, Homo sapiens
cccttgggtgcagatcatgatgtttaagaacatgacgccgtcacccttcctgcgattctacttagcgagtaaccagctcataaatcacatcgaacagtttttgg

SEQ ID NO: 526514 - DNA, 75 bp, Homo sapiens
gcaggtgaatggagagtagcagccggggcccaggcaaagttggccaagaattacggcatgacccgcatggacccc

SEQ ID NO: 526515 - DNA, 75 bp, Homo sapiens
atcagatccgccgacgactgcaagcagtttcgggaggagttcaaccgtgctcttgctaaaactggagctgaatct

SEQ ID NO: 526516 - DNA, 100 bp, Homo sapiens
ggcctgaacaacatagcgagaccctatctctaccataaaaaagagttctaaagttcctgttgcttcagacaatggatgagcaatcacaaggaatgcaagg

SEQ ID NO: 526517 - DNA, 83 bp, Homo sapiens
cctgactctctgaggctcattttgcagttgttgaaattgtccccgcagttttcaatcatgggggatatgagactttctactcg

SEQ ID NO: 526518 - DNA, 100 bp, Homo sapiens
ctgcgatggacagaataactgtcaagacaacagtgatgaggaaagctgtgaaagttctcaagctgctccaggctctgcaccgcctcactaggctggtggc

SEQ ID NO: 526519 - DNA, 75 bp, Homo sapiens
cctggccgaggacatcatgcgcctccgggagaactctacgaactcgacggggaccccaagaggaaggaattcctg

SEQ ID NO: 526520 - DNA, 100 bp, Homo sapiens
tagaacgaaagagaaaggaggcttatgagagagaaaaaaaagtgtgggaagagcatggtatacctcagttaccatgtgccaaagcattatacaactatga

SEQ ID NO: 526521 - DNA, 100 bp, Homo sapiens
gagaatgtaagacaggaaaataattaaatattcttaccgagtactatactggcaattgctggagaagattttgcaattgttgcttctgatactcgattga

SEQ ID NO: 526522 - DNA, 89 bp, Homo sapiens
tgggacggggtgctgcaaggggagcggctgctcaccatgtcctgcagtgacaagattgcacgggcccagtcatatatgcacagttagac

SEQ ID NO: 526523 - DNA, 78 bp, Homo sapiens
aggcagtctcgaatcctctcctggtttagggaggggaagatctctccagcgaacactgaatgagttaaaagagtatca

SEQ ID NO: 526524 - DNA, 83 bp, Homo sapiens
agaatgagaagactttgggacatttcatgagtcattcaagcaacatttctaagcttcctgcctgacacagctcacttcaagaa

SEQ ID NO: 526525 - DNA, 75 bp, Homo sapiens
cgcctctcccaggacccgcctggctgcgagatatgattttgaatgtggaaatgacgtggaactgtcttttaccaa

SEQ ID NO: 526526 - DNA, 100 bp, Homo sapiens
tgtttttcctgtcgtacgtgggacaggccacgctgtccgtccgcagtaccgacgcctgcaggtcagccatgtcatctgagcctcccccaccaccacagcc

SEQ ID NO: 526527 - DNA, 82 bp, Homo sapiens
ctacgcagatgccgacgaaatcctccaggaggagatcaaggagtacaaggtggaattcccagaggcccgaatctatgaggag

SEQ ID NO: 526528 - DNA, 100 bp, Homo sapiens
gaagatttggagaccctaaggctcttctcaagagtggaggagagcattcccattgctttatctggtagggatatcttagctagagcaaaaaatggaacag

SEQ ID NO: 526529 - DNA, 90 bp, Homo sapiens
tttcagactcagaagccgacgttcgagaggaagattcttacctctttgatctcgacaataagtgttgttacagatcttataacagtcggt

SEQ ID NO: 526530 - DNA, 51 bp, Homo sapiens
atcagagggaagatctttttcctcaattgcaacacagtcactcctggcggc

SEQ ID NO: 526531 - DNA, 100 bp, Homo sapiens
agagattggtgtttttgtgaggcagtgagacctaagacccagaacagaatgaagttgatggcagacaactatgatgatgaccatcaccattaccaccacc

SEQ ID NO: 526532 - DNA, 83 bp, Homo sapiens
gccacatactatccgtttgttcaggaaccaccagtgacagagccttcctcatcaggctgctaagggacctcattgataagcag

SEQ ID NO: 526533 - DNA, 97 bp, Homo sapiens
atgagaaagcaggggacatcgcactcctgtatctccaagagatagaaaggatggaagctgaactggagaatttccataagcagaacactcaactgga

SEQ ID NO: 526534 - DNA, 82 bp, Homo sapiens
gcaggaactcggcagaggagaaattcagacggctcccgaggaatagcctaacatggcagaccagagacagcgctcactgtct

SEQ ID NO: 526535 - DNA, 75 bp, Homo sapiens
cgggaatatatccgaagcctgaagatggttccaagtattccctatctagggtcatgtaggtacaacagcaaccaa

SEQ ID NO: 526536 - DNA, 83 bp, Homo sapiens
ctcaactggtgtcgagaagtccggaagcttgtggcgctgaaaacgaacgacacgatgaggcgagtggtacgacagagcaagtt

SEQ ID NO: 526537 - DNA, 100 bp, Homo sapiens
ataggattctacaccctacaagtcataaagtcagatcttgtgaatgaagaagcaactggacagttccatgtataccgggatgtggagacgctggtagcgg

SEQ ID NO: 526538 - DNA, 83 bp, Homo sapiens
accctctcaacacagcagcccagcagtctcagattcacttccaagcaatagatgctggcaaccagtcgctatgcagtgatgac

SEQ ID NO: 526539 - DNA, 82 bp, Homo sapiens
ggcctcgctcagggcggctgccccgggacccgcagactacatgaggaaataattgacttttataacttcatgtccccttgtc

SEQ ID NO: 526540 - DNA, 74 bp, Homo sapiens
aagaagaagatggagaagaaatagttacctatgatcataagaccatcatcatgtggaaactgaccagggatgag

SEQ ID NO: 526541 - DNA, 75 bp, Homo sapiens
tgtgcctccattcccgggaggggggagcggcgttggaggccaccgtttccagaaacgttaatggacaccagaacg

SEQ ID NO: 526542 - DNA, 51 bp, Homo sapiens
atctggaggaggcgttgccgtgagggtggattctccacagttttcctcgtg

SEQ ID NO: 526543 - DNA, 90 bp, Homo sapiens
ggggtgatttttcttctagaagagtccacggggacagctgtcgacttgctggagaagatgcttgtattggactcagataagagaattaca

SEQ ID NO: 526544 - DNA, 71 bp, Homo sapiens
gcagtcggtgaccgcgcgactcggcgcccgcccgcggaactaagcgtcttgtagaaggaactattaatcca

SEQ ID NO: 526545 - DNA, 73 bp, Homo sapiens
ttcacctcgctggagtacggaccggtgccggagagccacgcatgcgcactggatgaaaactttcggaagagaa

SEQ ID NO: 526546 - DNA, 96 bp, Homo sapiens
agaaaagaggcattttccccaaagtagcaacaaatatcatgagagcatggctcttccagcatctcacaatgaagatcagcttcgtgcaaagggtta

SEQ ID NO: 526547 - DNA, 50 bp, Homo sapiens
agatgctgtcatccgcttggcttcagaatgttgtaccatctttgggtagg

SEQ ID NO: 526548 - DNA, 73 bp, Homo sapiens
ccccatcgaagtgttgtgtaaaggctacccttccgtggtccttcagcatatctctgtgctgcagacaacacac

SEQ ID NO: 526549 - DNA, 76 bp, Homo sapiens
atgcccctcaggctggaacttgccctgtctcctcgcagatgaggaatttatgcaaatattctcatgaggttctctc

SEQ ID NO: 526550 - DNA, 98 bp, Homo sapiens
tcaactccaggcacgaggccagcctgaagttgtacaaggagacccggtgagcctccattgataaaaggttggcttccttatcttggagtggtcctgaa

SEQ ID NO: 526551 - DNA, 75 bp, Homo sapiens
aatctcgacccaagaaaaagaagaattcagatgatgctccatggagtcctaaagtagagatggggtttcgccgtg

SEQ ID NO: 526552 - DNA, 50 bp, Homo sapiens
cctggatccaggataacggaggctggacccaacatgagtgaagtttcctg

SEQ ID NO: 526553 - DNA, 75 bp, Homo sapiens
attccaagtaactcttatttgatgttttcacctcctgtgagcagtgggaaaaatggaccaacttctttggcaagt

SEQ ID NO: 526554 - DNA, 74 bp, Homo sapiens
ggagaaggctatctcaatttcatggaataactgaagtgaagtgatggactccgatttggagagtagtaagacgt

SEQ ID NO: 526555 - DNA, 101 bp, Homo sapiens
aaagaatcagaagggggcccagacccagacagaggaggagatgaccagatatgtccaggagctccaaaagcatcaggaaaatcctgccttgcttcgttggg

SEQ ID NO: 526556 - DNA, 88 bp, Homo sapiens
caaaaggctattcttcaacagatactgctgcttagaatggagaaggaaaatcagaagctccaaggctcatagatggaagggacttgcc

SEQ ID NO: 526557 - DNA, 100 bp, Homo sapiens
cgtgaacatagctttaatagggttgaagcactggacaatgccacatactttgtggatggtgtgggtcttgggggtcatcatcagcctctccaaggaagaa

SEQ ID NO: 526558 - DNA, 100 bp, Homo sapiens
aagaatacgtacaccgaatagggcgcacgggaagagcagggataattgatgaagatgaagaagttgaagctgacagaaatgttaaccatctccccagtct

SEQ ID NO: 526559 - DNA, 98 bp, Homo sapiens
ttgctacaatagcagattctaatcaaaatatgcagtctcttttaccagcagcattttggagatcaaagatgggtagaaaagatgctgctactataaaa

SEQ ID NO: 526560 - DNA, 51 bp, Homo sapiens
gtcttagagaaacttggagaagggcatttgatgaagcaattgctgaattgg

SEQ ID NO: 526561 - DNA, 51 bp, Homo sapiens
gccagcagtcaagaaacttatggaaaggcagtcatggatcaggtaatgcag

SEQ ID NO: 526562 - DNA, 82 bp, Homo sapiens
caacaatggaggccagtggctggtctcagagctcaggccccggggcctccagcggcaccagcggagaccacggtgagctcgt

SEQ ID NO: 526563 - DNA, 83 bp, Homo sapiens
ccgcgtggtcagcggggccgccaacgtcattgggcccaagatctgcctcgaggacaagatatacagggactaccgcaatcccc

SEQ ID NO: 526564 - DNA, 75 bp, Homo sapiens
ctgggtaacagatccccgttttctaataggacttatcaaactggtttcaaagcacagagctcaagtaatttacac

SEQ ID NO: 526565 - DNA, 83 bp, Homo sapiens
ctgtgccccaatggttcgatattcaaagttatcaatactctggctgaccatcatcatcgtgggactgactttggtggaagtcc

SEQ ID NO: 526566 - DNA, 100 bp, Homo sapiens
cttttgtaacttttgatgatcatgatacagttgataaaattgttggttccagcagcactgatgtgaaggaaaaccgcaatctggacaacgtgtcccccaa

SEQ ID NO: 526567 - DNA, 83 bp, Homo sapiens
gaggcagctgcggtggcagctgctgagttctcggtgaaggctaagtgagtgcagcttccggccagagcacgtgtccaggctgg

SEQ ID NO: 526568 - DNA, 50 bp, Homo sapiens
caaggatgaagccactgatggaggaggaaaaggcttctcttttacatcgt

SEQ ID NO: 526569 - DNA, 83 bp, Homo sapiens
ctcggcgctgccgtctctggaggagtactggcaacagaacggaaagatgctgaaggatgggagaccgttcagagaggaaggcc

SEQ ID NO: 526570 - DNA, 136 bp, Homo sapiens
ggaaggagacatcgaagcagggcgaggcgcagagggcgttgcggactcatgccccagtcggcagtgcggtaataaaagactagtggccttagtgcccatgcccagtgaccctccattcaatacccgaagagcctac

SEQ ID NO: 526571 - DNA, 100 bp, Homo sapiens
ctggactgaaacgatcctctcatctcagcctccaaaagtgctggcattacaggtacaggtttgcagattccgccagcagcacagcaagctctacagatga

SEQ ID NO: 526572 - DNA, 75 bp, Homo sapiens
ggacttccagcttccagaactgctacacctgatgcaggtggactcagtccagcgctggatggaagatctgaagct

SEQ ID NO: 526573 - DNA, 75 bp, Homo sapiens
acgaccgacagggtggtgaaaggttttgcgtgtgaagctgtgtggaaatgtgaaatactaccagtcacaccatta

SEQ ID NO: 526574 - DNA, 90 bp, Homo sapiens
gccaaagcaaatattcagaggctgcagctctcctaatacggttgaccagtgagatcatgaagactatgatccacaaacagtgaggcttgg

SEQ ID NO: 526575 - DNA, 71 bp, Homo sapiens
gggggaaactaggtcgatggtcggcggcgcccggatgggcagctgaggcacgtggactccctttaatccag

SEQ ID NO: 526576 - DNA, 75 bp, Homo sapiens
gaagacggtaacccgtgtgactttgactggggtggcccagttgaaatccttcccttcctctaccttggaagtgcc

SEQ ID NO: 526577 - DNA, 101 bp, Homo sapiens
atccgatactgtgacagatgccaacttataaaaccagatcgctgccatcactgctccgtctgtgataagaagacagatttctggaggagtgtgaaaatcaa

SEQ ID NO: 526578 - DNA, 73 bp, Homo sapiens
gtaatggtgcaaagcctgaatgttgtacatcagtacacagaagagacggatgtgaagacaccaagagagcaac

SEQ ID NO: 526579 - DNA, 74 bp, Homo sapiens
cgacttatgtctgttgcttatacgtatgataatctggctcctaggccaaacatggtgatccatgtgtgtgatga

SEQ ID NO: 526580 - DNA, 75 bp, Homo sapiens
gttgatgtggtacttgaagacacctgtactgttgctattgacctgaaaagtggttctggaaaagtgtaccaaggc

SEQ ID NO: 526581 - DNA, 100 bp, Homo sapiens
gcgctggccagactgacacccataccttttgggcttcagaatgcagtgttttcgatcatcaatgctgtggtactgttgattttattgagtgccctggctg

SEQ ID NO: 526582 - DNA, 101 bp, Homo sapiens
cgctcgagttcctggaccgtgagagcatcaagctcgtgtccatcggttacaggaggttccagtggcatcgggaagtgcattgctatcgagtgctataaaca

SEQ ID NO: 526583 - DNA, 75 bp, Homo sapiens
agtacctgtccactggctacctgcagattgcagagcggcgaggtgctggagaatctggtaaaagcaccattgtga

SEQ ID NO: 526584 - DNA, 80 bp, Homo sapiens
gtgagagatggaacccgaagaagaaaggattcgttacagccagagattgaagctaaaccagccccagaaatatttgaaaa

SEQ ID NO: 526585 - DNA, 75 bp, Homo sapiens
cggcttttgtctacttggctgacctcctgatgcctcacttgacccaagcactctgggactcactccatagtccag

SEQ ID NO: 526586 - DNA, 98 bp, Homo sapiens
aaagacagtgttctgctttcatggagttcacagaagagtcgaggaggaaccacgtgaatgttgagggggcgacacacaagcaggtggtggacctgatt

SEQ ID NO: 526587 - DNA, 89 bp, Homo sapiens
cgccgcagaagtatctccgaatggagccatcccccttcggcgacgtctcctcccgcctcaccacagtgctacagatgaagcatggcgac

SEQ ID NO: 526588 - DNA, 90 bp, Homo sapiens
ggatgagggcccgaaaatggtttcagcacctgtgtcaggttccaattgtggacaagataaggaccattgctcaggctgtctatggagcca

SEQ ID NO: 526589 - DNA, 98 bp, Homo sapiens
ggagatggtgacaagctcaaggcctgcgaggtttccacttgagcggcacagtgacagaacctgcaatacaatcggagccagaaactgtttgcaacgtg

SEQ ID NO: 526590 - DNA, 100 bp, Homo sapiens
gccattaaagcgcttcagtcaaaccctgcagggaaaaagaaatagtggtttcagacagtgcttcttcgggagccagaagcactgcaagttgacaaagctt

SEQ ID NO: 526591 - DNA, 75 bp, Homo sapiens
gccacatctcctgagattatttgcaattgggcagatgtgtgaggcacctgtggtgacccgagagtgggtgttgga

SEQ ID NO: 526592 - DNA, 100 bp, Homo sapiens
atctaagatggcgactgtcgaaccggactcacaccacccggcaagaactgctcactacggctccctgccccagaagtcacacggccggacccaagatgaa

SEQ ID NO: 526593 - DNA, 100 bp, Homo sapiens
agagttagagaagtgccttgaagatccagaaaaactaggatccctttttgttaaacacgtgtttgtaaaatgtatgaagaacatctgaaaagaatgaatc

SEQ ID NO: 526594 - DNA, 83 bp, Homo sapiens
ggtggctgatcttcaggatcatgcttggagcagagcatcagatccatgctgctgctgactcggagccccacagcttggcacag

SEQ ID NO: 526595 - DNA, 82 bp, Homo sapiens
accaaggaatctgcttttcaagtatgccaccaacagtgaagagaatgagtccctggaacgccagatgcgtgaaatggaagag

SEQ ID NO: 526596 - DNA, 89 bp, Homo sapiens
caaaccttcatgctattgaaatggatagtgaaatccagaaacagtttgaagagctctatgttatcaatactctggctgaccatcatcat

SEQ ID NO: 526597 - DNA, 50 bp, Homo sapiens
gagatcctgaggggcttcaaactctatacacagaatgggattttacatat

SEQ ID NO: 526598 - DNA, 100 bp, Homo sapiens
ctgtcaccaggaagtttgtgcatgaagacagcagccacatcattgctttatgtggtgtcatggagaaactccagctgggcccagagattctgcagcggga

SEQ ID NO: 526599 - DNA, 101 bp, Homo sapiens
ctatggcctccaggcttccgacggcctggtcctgtgtctatgaaggcctagacatcatcaccaacaaggtttctgcccaagagcagagaatctgccggcac

SEQ ID NO: 526600 - DNA, 75 bp, Homo sapiens
tgtgaacatcgaatcatggaatcccttgcatggctctcagttctgggaagttctggattgtttaataaccatgga

SEQ ID NO: 526601 - DNA, 48 bp, Homo sapiens
gttgagtaaacagaccaagttgggttccggtggaggaggaggttgctg

SEQ ID NO: 526602 - DNA, 75 bp, Homo sapiens
cacttcaggctatggccagagcagctattcttcttatggccagagccagaacagggtagaagataaggagtcttg

SEQ ID NO: 526603 - DNA, 100 bp, Homo sapiens
ctttgagatgacctatagattagatattcagactgacaatgatttgacaaaggaaatgtatgaaggaaaagagaatgtatcatttgaacttcaaagagac

SEQ ID NO: 526604 - DNA, 49 bp, Homo sapiens
caacatgcacagcctggcgacggctgcgtatgccagtactgaggttgat

SEQ ID NO: 526605 - DNA, 83 bp, Homo sapiens
cttggagcttcggaagaaggtagaggttctagagaacactaatagggtaagatgatggcatgcaaacactgcagtgacatttt

SEQ ID NO: 526606 - DNA, 90 bp, Homo sapiens
ctgcagaaggtctctggagacatcttcagcagttacatggacacagaacagtatgaagaagcagtacgagactatgaaaaagtataccag

SEQ ID NO: 526607 - DNA, 111 bp, Homo sapiens
gcagggggacggggaccagcagctgtcgccgccgctctcagaaaggcctaaagaatgtatttgacgaagcaatattggctgccctggagcctccagaaccgaagaagagcc

SEQ ID NO: 526608 - DNA, 75 bp, Homo sapiens
ggacgcggcgtctggtgtgcgggcgctggggcggtaaggatgagtctgccttcatggtccacccgctgacggcac

SEQ ID NO: 526609 - DNA, 90 bp, Homo sapiens
ttaaatgacagttcacataagaagttcttcgatgtatctaaacttggcaccaagtatggggctgcgatttatccagttgaaaaatccttg

SEQ ID NO: 526610 - DNA, 100 bp, Homo sapiens
ctggagaagggatggaaatacttcaacaagggaagaaatgatttcccttggggatggagacatcaggaccatgtgcccccttctgtctatgaaacctgga

SEQ ID NO: 526611 - DNA, 75 bp, Homo sapiens
catcatttttgccctcaaaagaaatggcaggcatcagttttgaatgtcaaggaatccaaagctcctgaaagaacg

SEQ ID NO: 526612 - DNA, 100 bp, Homo sapiens
agaattcaaacagatatactaaagcaggctaccaaggacagagtcagtgatttccataaattgaagcaaaatcaaagttttgacattccagacagaactt

SEQ ID NO: 526613 - DNA, 74 bp, Homo sapiens
cttacctcacctctaattagggacgaattggagaagaaggatggaggagtctccccaggacagtgctatcaccc

SEQ ID NO: 526614 - DNA, 96 bp, Homo sapiens
gatccattggtaaattgatcaggatttttggcctaccctccaaagaaaagggtctccaactgaattccttgaagagaaaatggcctaccaggaata

SEQ ID NO: 526615 - DNA, 90 bp, Homo sapiens
gaagtatgttaatttcatggtacatgagtggctatcatactggctattatatggtaatggggagagtgccaacaatttccattaataaga

SEQ ID NO: 526616 - DNA, 75 bp, Homo sapiens
gtttttatcaccacacgactgggtatatttcctctctggcctagtaaatgacaaagactcaaaagattctatgac

SEQ ID NO: 526617 - DNA, 100 bp, Homo sapiens
ttctggggaactcatgcttctagttcgacctaatggacaagtgttggacagccggagtcagtctccatggagattatctttgataacagatttcttctgg

SEQ ID NO: 526618 - DNA, 80 bp, Homo sapiens
ttatgaacgaattctcaacccctacaacttattcctgtccggagacagcctaagggggtttgttaaagttgttaagaata

SEQ ID NO: 526619 - DNA, 90 bp, Homo sapiens
acgtccagggctatgccgccaagaccgtctttgaggcaagcacgaggagcggcaggacgagcatggctacatctcccggtgcttcacgcg

SEQ ID NO: 526620 - DNA, 100 bp, Homo sapiens
ggacctttgaaggaccatattttaccacccacaacaatctgtccagtggtactgacgtaaaattcatcctgatcagaaaaatattaatgcctatgttgtg

SEQ ID NO: 526621 - DNA, 101 bp, Homo sapiens
ccaatggatgatgatcttcttaaactcttgctaccactaatgctgcagacttcacagagaatgcagttgtcttgacttcaggtctgtctgttctgttggca

SEQ ID NO: 526622 - DNA, 75 bp, Homo sapiens
gcggggggttgtcggagggattccaccaagcaggttggatggcaagcatgtggtgtttggcaaagtgaaagaagg

SEQ ID NO: 526623 - DNA, 87 bp, Homo sapiens
agccacagcgcccacttctttgagtttctcaccaaggagctagccctgggccaggaccgcaggatgaagttaaaggaagtagatcgt

SEQ ID NO: 526624 - DNA, 100 bp, Homo sapiens
cagccagctcagcagctgcaatggaaccttactcaggacttggatgttgtgggtgatggtatgcagtgtcctccttcacctttgctttttgatccttcac

SEQ ID NO: 526625 - DNA, 83 bp, Homo sapiens
gaagacgtttgtgggtgatttttccaggagaagaaggtttagattatggaggtgtagcaagacattcactactttcactgcct

SEQ ID NO: 526626 - DNA, 75 bp, Homo sapiens
cgaaataatgaatccaaaatccttcatttacaggaatactcccccagttgcaagaggcgcaggaccgtggaagac

SEQ ID NO: 526627 - DNA, 100 bp, Homo sapiens
aggaggtggcttatgaaagtgtgatgttcgcgtatttcttgacagaaacaagtcaccaagctctccagaacatgcccaaagtgctccgtgatgttgaagc

SEQ ID NO: 526628 - DNA, 100 bp, Homo sapiens
gtttgatgaaggtggaggcagcgcggctctcaggtgctgctgcatgaggaggcgggtgattctggctttgtcagtctctctcggctgggcccatctctga

SEQ ID NO: 526629 - DNA, 100 bp, Homo sapiens
tcttcacgccatagtgaagcttggaatccctcagaacactattttggtgcagactttgctgagggtgacccaggatgaagctccacccgcccttcaggat

SEQ ID NO: 526630 - DNA, 90 bp, Homo sapiens
tgttgcgggggccggacttcaagatgttcacctccacgatatttgctgtggttggattcttgggagctggatactcgtttatcatctcag

SEQ ID NO: 526631 - DNA, 100 bp, Homo sapiens
ggctacggactatgggcgaatagctctgaccacccggcgaagacccagtggcttattggctcaggaacgcaagctttgccgagatctagtccatagcaac

SEQ ID NO: 526632 - DNA, 82 bp, Homo sapiens
gctgatgaagcttctgaaccatccacacatcataaagctttaccagtcgtgcattgaggcccatgagaaggacatggagctc

SEQ ID NO: 526633 - DNA, 75 bp, Homo sapiens
gcgaactggaacccactcggggactctgccttttaccggtgtgatgaatgcagactctgctaccattttggctgt

SEQ ID NO: 526634 - DNA, 83 bp, Homo sapiens
cacccggcaactcagaaacatcaggtccaagaagcaaggtctcgctgtgttaccctggctggagtgcagtggctacttacagg

SEQ ID NO: 526635 - DNA, 50 bp, Homo sapiens
gaatattcccaagtccttcacccggcttcctgcctgacacagctcacttc

SEQ ID NO: 526636 - DNA, 95 bp, Homo sapiens
tctcagcgccgcctccctgcttcttaacaggttgaaaggattgttgacaaaaggaaaaataaaaaagggaagacagagtatttggttcggtggaa

SEQ ID NO: 526637 - DNA, 100 bp, Homo sapiens
ttctctgtatggcacagaagaatatttgattaaatctcttgatgaacagtgtgtggttggcaaaatttccaagcactggactggaattttgagagaggca

SEQ ID NO: 526638 - DNA, 83 bp, Homo sapiens
ccgatccagcctgcggagcctgtggggcaggcccctccagccagcgtcaggtgcagaatggcccctctcctgatgagatggac

SEQ ID NO: 526639 - DNA, 100 bp, Homo sapiens
gacgatgagccagagacctacgtggcagctgtgaaaaaagccatttccgaagatcccacatctggtagctgtaaaatcccagggacctgccttgaccgcc

SEQ ID NO: 526640 - DNA, 98 bp, Homo sapiens
ccaatccagaggcaagcacaatattccagaggaactctcaaacagatgatgctggactgcagccttatctggatcagatcaatgtcattgaagagcag

SEQ ID NO: 526641 - DNA, 82 bp, Homo sapiens
ggagtgcgttcggtgtgccgtgggtccgcgctgcttccacccaacttcctgttaggtcagcccaaggccaaccccactgtca

SEQ ID NO: 526642 - DNA, 50 bp, Homo sapiens
gatgtaccacctttctggcaatgagggatatctgcattacctccacctcc

SEQ ID NO: 526643 - DNA, 75 bp, Homo sapiens
cttcttcgagtatttgtagaaggtcattagatggaaaagccatcaaggtggaacaagccaccaaaccatcatttg

SEQ ID NO: 526644 - DNA, 110 bp, Homo sapiens
ggggatcccggcaagtaacatgactaaaaagaagcgggagaatctgggcgtcgctctagagatcacaatgaggacctagggcatctgtctgctgacgccccctggcctgc

SEQ ID NO: 526645 - DNA, 50 bp, Homo sapiens
atattcacaatgtatggaaacagaggtctgggataaaagtgaaagtggtg

SEQ ID NO: 526646 - DNA, 100 bp, Homo sapiens
gtgaactcattgttaagcacaagttcacgaaagcctacaaaagtgtggagaggttccttcaggaggatcaggtgtctgatgatttgtgagcctcaagtga

SEQ ID NO: 526647 - DNA, 51 bp, Homo sapiens
agtggtttctggagaagttaaagcctgaagcctttgacgacccctatgccc

SEQ ID NO: 526648 - DNA, 96 bp, Homo sapiens
gaaggaggcagaggcacttatgcttgtcaggcttcagagaactttaccagctggtcggtctttcgttgccatggataccaaggatatccctcagat

SEQ ID NO: 526649 - DNA, 100 bp, Homo sapiens
aagaaatcccagcaaataggaaaattaagtttagtagtgctcctattaagtccacagacaaacgaatttaaaggagcaaccgaggaggcacctgcgaaag

SEQ ID NO: 526650 - DNA, 50 bp, Homo sapiens
ggcctggaccttgcagccgcaatggtttggaattcacccagttgcaggcc

SEQ ID NO: 526651 - DNA, 80 bp, Homo sapiens
ctgtgagttcaacatgatagagcagagtggaccaccccatgaacctcggtctggagggtgagcgacctgcgagactcaca

SEQ ID NO: 526652 - DNA, 100 bp, Homo sapiens
taatgacttcagtttctggacatttactggctcatgatttccagatgcagtttcgaaaatggcggctaggggtggagatgggcaaagtgcaggtttacca

SEQ ID NO: 526653 - DNA, 100 bp, Homo sapiens
acaacgtgtataaagtggtccaccaacaactgtggcacacgtgggtcatgtaggacatataattccacatcattttcgttgaaaggattgttgacaaaag

SEQ ID NO: 526654 - DNA, 74 bp, Homo sapiens
tcatcccccccgacgccgtcgcggtggactgcaagtcttacaggccccagaatcagaatgcctgctcctcggaa

SEQ ID NO: 526655 - DNA, 100 bp, Homo sapiens
attctttattacatcgtggagctctctgaaaacagtgtcatggagaaactccagctgggcccagagattctgcagcgggaaaatccaaggcttatttatg

SEQ ID NO: 526656 - DNA, 80 bp, Homo sapiens
tcttgtcccagcatcttaagcagttgctttctaaccaaccactcaccaagtagttgatgtcacttggcgatattcctgca

SEQ ID NO: 526657 - DNA, 75 bp, Homo sapiens
gaccctggcacgccccagcacacgagaattggtgaaggaagagcatgttggagcttaggaaatgcatacacagca

SEQ ID NO: 526658 - DNA, 100 bp, Homo sapiens
tgagctaggtgttcccgagcagcctgacctccagtgctacaaggtgagctgcctggaaatccctgggccctctggccccaagggctaccgtggacagaag

SEQ ID NO: 526659 - DNA, 80 bp, Homo sapiens
acacagttggagaaaatcggcagctgagacggccttggccggataacctttttgaatggcacttcacggttagagggccc

SEQ ID NO: 526660 - DNA, 100 bp, Homo sapiens
tgaaaagtccaacagtcagtttaattatgatccacaagaaggtgctgtggtggttctccctgcagactctcagcagcgtttggttcagcttgtatatttc

SEQ ID NO: 526661 - DNA, 75 bp, Homo sapiens
gggctagtggccacgctgcagagcctcgccgtcatggaaatgatgagtcagaagattcagcagctcacagccctg

SEQ ID NO: 526662 - DNA, 100 bp, Homo sapiens
taaatcccaaacttcttaacccctagaccggtttttagtccattgactatgcagcctaatggtgcagtggcttctatgttttgggttgatgctgaattag

SEQ ID NO: 526663 - DNA, 75 bp, Homo sapiens
ggcgcttccccagcacaaactgacctgcttcaggcttttccccctgagagaacaaggcttgaacttctatgccaa

SEQ ID NO: 526664 - DNA, 100 bp, Homo sapiens
gcccctggcgagatgccgtgtggggaggattggctcagccacccgctgggaatcgtgcagggattcttcggttatgatggagggtggtcgcagcaaaggg

SEQ ID NO: 526665 - DNA, 74 bp, Homo sapiens
ctcatcccaggttgccttggaaaatgccaacgccgtgtctgaagggcaaacttgaagataaatcttttgactcc

SEQ ID NO: 526666 - DNA, 75 bp, Homo sapiens
cttccctctgcggccgtttgtcattcccttcctgaaggagcaggccgggctctcgccatgggtcactgtcgcctc

SEQ ID NO: 526667 - DNA, 82 bp, Homo sapiens
ccaaggcactggccaaatctgaagaagattacctggtcatgatcattgtccgtggactgggaattcccacatttcatgggag

SEQ ID NO: 526668 - DNA, 75 bp, Homo sapiens
agagaggacgtttccaactcaaaattacataccggttacggcacctccttcgtgcaaggtgtgatgcatccccag

SEQ ID NO: 526669 - DNA, 100 bp, Homo sapiens
cgcgcaccacagcccatccccagaagatcctggtcccctgctttaaccatcgaaaatgaggaagaagtctggaagaagaggaagaggaaagaaaaggagt

SEQ ID NO: 526670 - DNA, 90 bp, Homo sapiens
gcaaagtagaaaaacactatctcttctatgacggagaatccgtttcaggaaagtataaccccgttttcacacgaatggccccttcacata

SEQ ID NO: 526671 - DNA, 114 bp, Homo sapiens
cgcgcgcagggcctgcagcgggagctggacggcgagcgcgagcggcgcgagaaaatctgactgcagccatgagcagcaatgagtgcttcaagtgtggacgatctggccactggg

SEQ ID NO: 526672 - DNA, 100 bp, Homo sapiens
ccggatgttgcggacagtatgaggcaagcgcagggggacggggaccagcagctgtcgccgccgctctcaggcctctgtgtcctttgtcccaatagtaaca

SEQ ID NO: 526673 - DNA, 100 bp, Homo sapiens
aacccgaagtgcccaggatgatatttttacacaagctgtaaatatggcaggtccgagctccgatggtggtgcagcagcccccagtgcagccccaggtgca

SEQ ID NO: 526674 - DNA, 100 bp, Homo sapiens
cgacaagccgctggcagccgcggatctcaccgccgctcaggttggaatcgaagcctcttaaaatggcagatgacttggacttcgagacaggagatgcagg

SEQ ID NO: 526675 - DNA, 82 bp, Homo sapiens
tcaagcgctatgccaagaagcgaaatgtgctcattggccattcctacgggaactgtggctgcaccatctgtcttcatcttcc

SEQ ID NO: 526676 - DNA, 88 bp, Homo sapiens
tgaagaattggtatttcaaatgaccaccatgttgcaaaaggaatggaaactgaaagtggaaatcaggaaaaggtaatggaagaagaaa

SEQ ID NO: 526677 - DNA, 100 bp, Homo sapiens
cggggccccatcgagaaatggccgcgtcggcaggtcaaaatgcagatcttcgtgaaaacccttaccggcaagaccatcacccttgaggtggagcccagtg

SEQ ID NO: 526678 - DNA, 82 bp, Homo sapiens
ggatgtgtggggaggagagaacctaggtgcatggctgcctcctaatcccatagtccagaggaggcatccctaggactgcggg

SEQ ID NO: 526679 - DNA, 134 bp, Homo sapiens
ttagctgctgccgcgccttggagtccggagtaacttggccaggctggccccgagcggaactggagaaagctgaggcttggaatacacgaagactctcaaaatcggaagaagctttcagagctgttaaggtacta

SEQ ID NO: 526680 - DNA, 75 bp, Homo sapiens
gcattttgtcagtgcaaaaacaatgccagagctgtacgaccttgttaacagtgaggattctacacgtagattgtt

SEQ ID NO: 526681 - DNA, 75 bp, Homo sapiens
atttaaaggagcagccctggtgtcacctatcagtaaaagaacaccaatcagggtcttcaggcctggaagattgaa

SEQ ID NO: 526682 - DNA, 90 bp, Homo sapiens
caatcagctggcctggtttgatactgacctgtaaatcatcctttagcactcaaacccagggcatgctggaccctttcccgtagtatcggt

SEQ ID NO: 526683 - DNA, 73 bp, Homo sapiens
cagcaagacaggagaccttggatctgccactcactgactgtgaggtctatcatctcatgaagaactgctggga

SEQ ID NO: 526684 - DNA, 75 bp, Homo sapiens
cgccgcaccaggtcttgtagcagcgcctcctcggcacccaggcatgtggaatatgctcatagtggcgatgtgctt

SEQ ID NO: 526685 - DNA, 100 bp, Homo sapiens
ctgagggaattgtcctctgtggaagggactttcttttggccctaggccccttcctgcccctgtcgtcagcagggtcatggaggacgctggcggcggcgag

SEQ ID NO: 526686 - DNA, 95 bp, Homo sapiens
aaaaaacagccaccgattttgctatgtctctgagctgcgagggagaaatgcctgctgcctctccagttggctttggaatccaagaatgtgaagct

SEQ ID NO: 526687 - DNA, 100 bp, Homo sapiens
ggcattttgaggcggtcctcctagcggcctgggcgtctctggccgagcctctttttgtggaaaacgacagcagcagcagtggcctggaagacgccaccgc

SEQ ID NO: 526688 - DNA, 100 bp, Homo sapiens
gtaggcaatgattcattattgcgactgcctgtttctcgagaaactaagcttctgcagaaagccgtcattacacctgattttgaaaaaaaccactgtgttc

SEQ ID NO: 526689 - DNA, 100 bp, Homo sapiens
gtggcccttccaaataagcggcataaagcaattgagaattcaggcggggagacaaccccttccccaagaatgctgatgggactatatgctacgactccac

SEQ ID NO: 526690 - DNA, 49 bp, Homo sapiens
gacagggctctgtctcgcacttcccagcggcccttctcagcattcctgg

SEQ ID NO: 526691 - DNA, 98 bp, Homo sapiens
ccccatggacgaacactcctgcccgctgattttctccagctataaaggttccttcgttctctgagacactgtcagctttgaatgtggtacaggtggct

SEQ ID NO: 526692 - DNA, 80 bp, Homo sapiens
cgggaatatatccgaagcctgaagatggttccaagtattccctatctagatcaccgaagtggccttggagtacaacaact

SEQ ID NO: 526693 - DNA, 101 bp, Homo sapiens
ttgtgaattcacatcccaagagttggataatcttcccctccatcgaggggaatttcagagtgcctgccccggttgacatgcatgatcagagggatcggaga

SEQ ID NO: 526694 - DNA, 75 bp, Homo sapiens
cgaggggctccgggtcttccagagcgtgaagatcaagatcgaaacgcttcgttaagggactcaggcagtacggga

SEQ ID NO: 526695 - DNA, 118 bp, Homo sapiens
cttggaccccgcggcgcccctcggcctcggagcaacgagcgcagcgccggctcacagaacatttcctgcctgttgctcacactctgttgtccacagcatacccgcaccctagatggct

SEQ ID NO: 526696 - DNA, 83 bp, Homo sapiens
ggataattttgtggccttagctacaggagagtatggaagctccaaaaggaaagataccagattgatcttgatcacctctgcct

SEQ ID NO: 526697 - DNA, 50 bp, Homo sapiens
gaagtgcagaggtttttttctggcagcatggtgattcatttgatgcttcc

SEQ ID NO: 526698 - DNA, 50 bp, Homo sapiens
caccctctacgaaggcggctacttcaagatcgagctgggagcattagtac

SEQ ID NO: 526699 - DNA, 75 bp, Homo sapiens
ccgcgggtctgctctgtgtgccatggacggatataacacgtgggaaccggaggagaacatcctggaccccaggct

SEQ ID NO: 526700 - DNA, 100 bp, Homo sapiens
atatgctctgtctgcagttctggaccagaatacctcaaacgtctaccattacagtggagtagatcccataatagatcacgttcaagacagaaagacagac

SEQ ID NO: 526701 - DNA, 100 bp, Homo sapiens
tgcagctcctgaaaggagagacacttgtgaacattcaagtgaagcaaaagcctttcatgattatgaatactcccccagttgcaagaggcgcaggaccgtg

SEQ ID NO: 526702 - DNA, 75 bp, Homo sapiens
caatgaagtagacattggtggaaacatttagcaaatgttctgaaaaagactctgcatgggaatggcctgccttac

SEQ ID NO: 526703 - DNA, 80 bp, Homo sapiens
gcttccgacggcctggtcctgtgacttgcaccttcgagatcccctgtgtttacccagctggaggatgatgaacagtcgtg

SEQ ID NO: 526704 - DNA, 100 bp, Homo sapiens
tttctctctctctctctcttaagaaaggaaaatatcccaaggactaatctgatcgggtcttccttcatggaaatgaggcaagttatcctttggaaatgtg

SEQ ID NO: 526705 - DNA, 89 bp, Homo sapiens
tgttagtgctcaagagcctcattatctaccacccgagatgccccaagttgcagttgccaatacctatgcctgtaaggggctagacagga

SEQ ID NO: 526706 - DNA, 83 bp, Homo sapiens
caccgattataagaagagaaactcagcgctggggaagaagggaatgaaggatggcagcatgccgtgcattaaaagctgttttg

SEQ ID NO: 526707 - DNA, 85 bp, Homo sapiens
aaagacccaacagaatacactggacctgaaagttatgtggctcaaatgattgtgagatgattgttgaccatcagattgagacagg

SEQ ID NO: 526708 - DNA, 75 bp, Homo sapiens
gttggtggggctcaagatgtcggcatgctgggcatcttagtaaagactgaattaaacaaccaccatgtcgagcaa

SEQ ID NO: 526709 - DNA, 96 bp, Homo sapiens
cttctgcttagcacctggtgcacaggccagttctacgtcatgatgacgccccaggatgtgcttcagacaggaacacagaggacgatcgccccccgg

SEQ ID NO: 526710 - DNA, 90 bp, Homo sapiens
cttttgggttacaaaaatccagaccaggatcttatggttggtgatgaggcaagtgaattacgatcaatgttagaagttaactaccctatg

SEQ ID NO: 526711 - DNA, 100 bp, Homo sapiens
ccaaaatctgctttgaggataacctgtctaccctgaactgcagatcaccaatgtggtagaagccaaccaaccagtgaccatccagaactggtgcaagcgg

SEQ ID NO: 526712 - DNA, 100 bp, Homo sapiens
aaatccctggtgccaaaggctttagaaggttatatcacagtgaatccgatgtgcctgatgggttagatttccatatacaagtagcagaggaaaatctggg

SEQ ID NO: 526713 - DNA, 90 bp, Homo sapiens
gatttggcaattcttcgctgaagtcatcatgagctttttccaactcctgatgaaaaggaaggaaattgagaggatccagaatccagatct

SEQ ID NO: 526714 - DNA, 75 bp, Homo sapiens
acagtacctcttctgcaggtactggaaacccacaggcacacccaaggaactctaatgatccaggacaaagaagtt

SEQ ID NO: 526715 - DNA, 98 bp, Homo sapiens
accaggatctgagggaaacgcatctggaaaagatcgatgctatagaagacaaacaagggaaggttttttttccttttgcatcatggctcaatttggag

SEQ ID NO: 526716 - DNA, 100 bp, Homo sapiens
atattctttgctgcccttctggtacaccctcttatatcaggcccatcgggaaggcattcctgtcatgaggatttacgcgcacgttggaaccgaagagagc

SEQ ID NO: 526717 - DNA, 87 bp, Homo sapiens
tgcaaggagcatcccggctggagcagagccaggaaccacgtgaatgttgagggggcgacacacaagcaggtggtggacctgattcga

SEQ ID NO: 526718 - DNA, 75 bp, Homo sapiens
ccagagccaccagcgcagcgctgccatggagcccagcagcaaggtattggcatactccacacatctgtaccattc

SEQ ID NO: 526719 - DNA, 101 bp, Homo sapiens
aggaagtggtgcgattgtggttcagttggcacaaccgtacatgattgggtcaatacggttgggagccacgtgtaccagtgtgtgttgatcttggcttgatt

SEQ ID NO: 526720 - DNA, 75 bp, Homo sapiens
ggcgccccgcagccccccaacatcctgctcctgctcatggacgacaaccgtgggtaccgatggatgtggccgaga

SEQ ID NO: 526721 - DNA, 74 bp, Homo sapiens
aatagaaccaaacatgtgcaacaacgactttcagacacagagggcttttcttatccacctcatgttggattatc

SEQ ID NO: 526722 - DNA, 98 bp, Homo sapiens
catatgtggttttacacatgatgatggatacatgatctgttgtgacaaatgcagatatatgtaatcgacagtgcagacagaaaaagatttgaagagac

SEQ ID NO: 526723 - DNA, 100 bp, Homo sapiens
ctgcgctcccctaggagtgctgagcccgcggaaccgcagccatgtgacatattcgatgccatgttccctgtcactcacatcgctggggagactgttatac

SEQ ID NO: 526724 - DNA, 90 bp, Homo sapiens
cagagcttttggaatctgaacaaggggttgctccttgagggcaggacagttcttatggctttatccgttgcgtaagcacagagaggtctg

SEQ ID NO: 526725 - DNA, 100 bp, Homo sapiens
cccatcccggctgcttttgctgcgccctctcagcttcccaagaaaggtccaggtcaagacctcgtctccgttctcatagtcgtagcagtgaaaggtccag

SEQ ID NO: 526726 - DNA, 75 bp, Homo sapiens
acacatccccgaccacttgcggcctgagtatggatgccggctccaggagcagcagtggaggtcgggaacgcctca

SEQ ID NO: 526727 - DNA, 100 bp, Homo sapiens
aaaatggcgaagatcgccaagactcacgaaggcaacaagaatgggtgaatcagcaaagggaagatattgaaaggcaaaggaaacttctagccaaacgcaa

SEQ ID NO: 526728 - DNA, 100 bp, Homo sapiens
gcggcggacgcgcccgggacgcgcggcggcaccgggaggccgggccgagcgtgtgagtgaagacactcaggatggctcaaggatccggggatcaaagagc

SEQ ID NO: 526729 - DNA, 100 bp, Homo sapiens
cgccgcgcagcgccccagccacacgccggcgggcagaagccgcccgctctccgggctggcgcccatgcggctctacacgctctccaagcgccactttgtc

SEQ ID NO: 526730 - DNA, 51 bp, Homo sapiens
gggatcccggccaccagcaattgtccggagggatttgttcgtgttgaccga

SEQ ID NO: 526731 - DNA, 100 bp, Homo sapiens
tgaactcagttccatccgtaaaatatgtaaaggaccctctttgcaagttcagtgcttaacctgaccgaactggctgcccttcggcctgaccttgggaaac

SEQ ID NO: 526732 - DNA, 89 bp, Homo sapiens
ataagtacaaagctgaagagcacacagtcgtgtactaatggtcacttgatgtgcgctggctgttttatccacctactagcagatgcccg

SEQ ID NO: 526733 - DNA, 75 bp, Homo sapiens
ggcgatatggaagaggagggcaagaagggcaagaagaatgagtccctggaacgccagatgcgtgaaatggaagag

SEQ ID NO: 526734 - DNA, 98 bp, Homo sapiens
ggacacttgtccagcgagccccactgctcggggaggaggagccacggccggggacaggaattgaatgatctggcacgggaccctccagcacagtgttc

SEQ ID NO: 526735 - DNA, 82 bp, Homo sapiens
cggaggcggcgggcggaggcggcgggtgagagggtgagaagccctaccactgcaactgggacggctgcggctggaagtttgc

SEQ ID NO: 526736 - DNA, 75 bp, Homo sapiens
caggccatgggcaagatatctcagtgttctccgctctcataggtcagaaataagcgggttttgaaaacaaaaaaa

SEQ ID NO: 526737 - DNA, 83 bp, Homo sapiens
ctggctgctgagcccaaggccaaggaccccttcgctcacctgcccaagagggacccagacatggagctgcgggaagaagcctg

SEQ ID NO: 526738 - DNA, 87 bp, Homo sapiens
gctttggatcttgtggaaagtcagagcctccccatggccacccatggaccagtcggcattcacttcctcccttctgcggcccataaa

SEQ ID NO: 526739 - DNA, 73 bp, Homo sapiens
caatttcccagctgctaaaggaagaggaaggccaggtcagagcagcccaccatgggatggggagggggtggag

SEQ ID NO: 526740 - DNA, 75 bp, Homo sapiens
ttcattggaggtatcaactgtaagaagaggaaagacttgtctcagaatcatttgctgtttcaaatagagaactgt

SEQ ID NO: 526741 - DNA, 100 bp, Homo sapiens
cagaagtataatgtctcctgcataatgatcatgccccagcaccaaaggcaaggatttggacggtttctcattgatttcaaattgtattcccattggagag

SEQ ID NO: 526742 - DNA, 100 bp, Homo sapiens
aggtgtggaacttaaagaagaatggcaagatgaagattttccgatcacaagctccgggtggataaggcagctgctgcagcagcggcactacaagccaaat

SEQ ID NO: 526743 - DNA, 82 bp, Homo sapiens
ggccacgcttctcatcctggacatctgtgaaagccctgtgtaaggaatgtgtagtagaacgttgtcgcatattgcgtctgaa

SEQ ID NO: 526744 - DNA, 83 bp, Homo sapiens
cggggtcgtgaggattaagtgaggggacagcagtgtctggcacggtatcatgatattagctggtttgacatcaagtcatttgt

SEQ ID NO: 526745 - DNA, 82 bp, Homo sapiens
gtcggtctggactgatgaaaatccatatgcatgtagagcgcatgaagtacaggacaataaagcttcctacacatatcaccag

SEQ ID NO: 526746 - DNA, 98 bp, Homo sapiens
acaaggcagcttcccacagcaggttggacagttcacaggctctgaagagcggccattcctcagattcgaagctgaacacatctccaactacacagccc

SEQ ID NO: 526747 - DNA, 100 bp, Homo sapiens
ctgaaggagagggaagaagcagctatgctcgagagcctcacttcggcaaacgtggtccttgcaacaaacacagggcagctggtggaatttttgaagaaaa

SEQ ID NO: 526748 - DNA, 90 bp, Homo sapiens
ctgcgtgagtgtggtctacgagctgtttctcatctttatactcttccagctccaccgggggacggctacgtgcaggcggacgcccggggc

SEQ ID NO: 526749 - DNA, 100 bp, Homo sapiens
ctcggcatgtccttgggtttagtctggctgcacgtggtgggctccagaataccctgttttgaaccagcgcttctctgaagtagctttggaaagtagagaa

SEQ ID NO: 526750 - DNA, 74 bp, Homo sapiens
aaacatggatttgagaggccaaagtactttgttccccccgacaaggctttcttggactccgtactgttggtgta

SEQ ID NO: 526751 - DNA, 88 bp, Homo sapiens
agcacccaagatgaagatgctgttagcctttgcagtctcgacataagtttgtcatggatgcactggtagaagatgatatctgtattct

SEQ ID NO: 526752 - DNA, 100 bp, Homo sapiens
acaacaacaagttggccagggtgccctcagggctcccagacctcaagctcctccaggggctgaggaagctgccctcgaaaccctccagaagacatctgtc

SEQ ID NO: 526753 - DNA, 90 bp, Homo sapiens
caacacattcagagtggtgggcaggaagattcaggaccatcagatacttatatgaaattgccagaagacatccttacttttatgccccgg

SEQ ID NO: 526754 - DNA, 100 bp, Homo sapiens
gagaaaagggcagcagaggagaggctcctggcccagctgaacgaaaccgaggctgccttcgatgagttctgggcaaagcatcagcagaaactggagcagt

SEQ ID NO: 526755 - DNA, 75 bp, Homo sapiens
cgattcgtgaccctcagcgccggtgcatgtcgatgcaccatactggacataccttttatgtgcactgggactttt

SEQ ID NO: 526756 - DNA, 75 bp, Homo sapiens
atcacaaagatacgaatctcttaagggggcctgtagtggtggagacacgcccagtggatgatcctactgctccca

SEQ ID NO: 526757 - DNA, 100 bp, Homo sapiens
gtcatccttgtacagcaatctcctcctccactgccactacagggaagtgcatcacatgtcaggctcgggttatgtatgattttgctgctgaacctggaaa

SEQ ID NO: 526758 - DNA, 90 bp, Homo sapiens
catcggagctacagaaattagaagaacagattgcaaatcagactggaagatggaaacatgccctgaactgtcacagaatgaaaccagcgc

SEQ ID NO: 526759 - DNA, 83 bp, Homo sapiens
cgccggcctcggcggctgaggaaagcaggaggaggtggcggcggcgggaagattgctctggaactgaacccgcagtatcttcc

SEQ ID NO: 526760 - DNA, 100 bp, Homo sapiens
atcccctcgaccgctcgcgtcgcatttggccgcctccctaccggtcttgcaagagcaaaatccgtccctagccacacatactccaacgaagtggttacct

SEQ ID NO: 526761 - DNA, 100 bp, Homo sapiens
ctggtggccgccgagcagcagaaggcgcagtttactgcacaggcaattccgttccttgtgctcagatgacacaccaatggtacgacgtgctgctgcttcc

SEQ ID NO: 526762 - DNA, 83 bp, Homo sapiens
cttcctgccaggctccgttgtaggggttacagaacagtcgttcccgcctcacaacctggcttctcacggcattcagcagcagc

SEQ ID NO: 526763 - DNA, 100 bp, Homo sapiens
tccaaatctgatgtgatctctcagctggagcaagaagaggacctgtgcagggcagagcaggaggccccccgagaaaggcctaaagaatgtatttgacgaa

SEQ ID NO: 526764 - DNA, 98 bp, Homo sapiens
caaccccgaggcagggcctgaggaccgagatgaaggcgccaccgaccgggatggttcatatcatgaagatgttggttatggtgttagtgagggcctca

SEQ ID NO: 526765 - DNA, 82 bp, Homo sapiens
aggtgtacttgcaagaaacctcaggacttgagtaacagcaacatgtgggagaactgaagtccaatcagttcagtatggcaaa

SEQ ID NO: 526766 - DNA, 100 bp, Homo sapiens
ctcctaagtagctgggaccacagaaattagtgaatttccatcagaatgttgtagtgtgatggcaggaggtactctgactggatggcatgctgatgttgct

SEQ ID NO: 526767 - DNA, 98 bp, Homo sapiens
caaacgtctacactgtacatgctttttattacaagactacggagcataggaggaaaattcatcatctgcttttcaggctgcctttcgagctcaggggc

SEQ ID NO: 526768 - DNA, 100 bp, Homo sapiens
ggtgttttcgtcgtgctcagcggtgggaggaggcggaagaaaccagagcctgggagggtctctattccaatgtggcctgtccaggtacagcattgaccaa

SEQ ID NO: 526769 - DNA, 82 bp, Homo sapiens
agaggatggacgagggatgcggagagaccatatatgtcattgggcagggatcagagtttggagaatctgatgattatgtgtc

SEQ ID NO: 526770 - DNA, 95 bp, Homo sapiens
ttgatcactcctcaggtgtccagcctgctcagacattgctacaagtggttggtgtggtctctgtggctgtggccgtgattccttggatcgcaata

SEQ ID NO: 526771 - DNA, 100 bp, Homo sapiens
cccagatgtctgacagccctgtgtgacaccaagataagtaaccttagaccatgctcagcctccaagcagccttgtcatcgacaaagaatctgaagtttac

SEQ ID NO: 526772 - DNA, 90 bp, Homo sapiens
ggacagaataactgtcaagacaacagtgatgaggaaagctgtgaaagttctcaaggttatgatgtgattgctcaagcccaatctgggact

SEQ ID NO: 526773 - DNA, 100 bp, Homo sapiens
gggagccagtcagaatccagttcccatcccgccttgagccagtcaccaatgccacaggaaagaggtgtacagagccagtgggccggatggagccactggc

SEQ ID NO: 526774 - DNA, 75 bp, Homo sapiens
ccgaaaacggaagcgcagggagaaggaagaggtgtttgaaaagttttctggatatgccgcagaaggatccgtgcc

SEQ ID NO: 526775 - DNA, 100 bp, Homo sapiens
gcatctttgtctagccccagtgcaggatctagtgaaaagccatttgatgtatgcggtcagagaagaagtggaggtcctcaaagagcaaatcaaagaacta

SEQ ID NO: 526776 - DNA, 98 bp, Homo sapiens
cggtctgtcagtgagatggcttctaacaagggtcttactgaagtaacacaaagcttaaaaatggaaaatgaagagtttaagaagaggttcagtgatgc

SEQ ID NO: 526777 - DNA, 100 bp, Homo sapiens
aagctgaaggaggaccagatcaagaaggaatttgacctggacgtggtggctgtggtcaacgacacagtgggcaccatgatgacctgtgcttatgaggagc

SEQ ID NO: 526778 - DNA, 90 bp, Homo sapiens
cttgacctttaggtgcttttatattcatctcaaaaacaaaattctgaactcaggacttggcaagaattacatgaacgacagccttcgcac

SEQ ID NO: 526779 - DNA, 50 bp, Homo sapiens
agccaggactatgtgccagccagccaggaggagacatcacagctttccca

SEQ ID NO: 526780 - DNA, 75 bp, Homo sapiens
tgcacccaattcaaggcctgccgttggctatagcaaatgccccagggccctttgattgccacagccttcaccaat

SEQ ID NO: 526781 - DNA, 100 bp, Homo sapiens
tgcgtcctttttcgtttttcggatgatgccttcaatactacctttatttccaccatagactcagcccacctgcacccaggtgaaataaacagctttattg

SEQ ID NO: 526782 - DNA, 111 bp, Homo sapiens
ctgttgcgggccccgggacctgggctgggaacccgcggtggagcgggacacgaacgtggtttacccaaggtccagcctagcccctaggcaccatgtcggacagtgatctag

SEQ ID NO: 526783 - DNA, 100 bp, Homo sapiens
cagcacgcatcgaggctatggaccctgccactgtcgagcaggcatcaacttctaactcatctcgccaggagaggcctccagtgaaacccttcattctcac

SEQ ID NO: 526784 - DNA, 100 bp, Homo sapiens
aaacaacaatgaagaggtaattcacttgaacaactttcactgccatcggggacaagctccgtggtagtgattgactctgattctgatgaggaatgtcaca

SEQ ID NO: 526785 - DNA, 75 bp, Homo sapiens
gaaatggccgaggagccggagccgcagatggcccactgcgtgaccttggttcagctgtccatttcctgtgaccat

SEQ ID NO: 526786 - DNA, 90 bp, Homo sapiens
tgaaggtcccggtgctcacttggacatgccgggggccattgagactgccatggaagacttgaaaggtcacgtagctgagacttctggaga

SEQ ID NO: 526787 - DNA, 82 bp, Homo sapiens
catccgtaaccacaaggaggacgaggcaagagcggtgagcggggcgcctatgcctccttcgggagagacgcaggcgtgggcg

SEQ ID NO: 526788 - DNA, 101 bp, Homo sapiens
taagggcttaactcatatatttaacccccctccaaaaagaagagagaagggcacagttacctaagtatcaacgtaatcttcctcggccaggacaggccccc

SEQ ID NO: 526789 - DNA, 83 bp, Homo sapiens
ccgaaattgacggacaagtcttcgactacgtgaccggtaatgcatgccaggactgtgcaaagaggaagttagaagagaatgga

SEQ ID NO: 526790 - DNA, 83 bp, Homo sapiens
cgcgaacccctctgggatccccgccgctctgtctacaacccgagagttgtctgctggttctcagcttgaagaagattctgcag

SEQ ID NO: 526791 - DNA, 50 bp, Homo sapiens
ccggaaccgcgattcggcgtgtcagttttcaatggttccagcaggtcaac

SEQ ID NO: 526792 - DNA, 100 bp, Homo sapiens
gcacggcgggcggacagcatgctgagcctcctcgtctggatcctcactctctccgatactttctcccaagaatcaaaggcatgggaggttgatacctgcc

SEQ ID NO: 526793 - DNA, 74 bp, Homo sapiens
cgatggtgaacctgggccttcagaatgcctgcgatgaagccatctatcaggtttggtgcacctcgatttggagg

SEQ ID NO: 526794 - DNA, 83 bp, Homo sapiens
ggacacttttcttcagaagctggtcgccgccggcagattggctctaccagtgcacctggacagggaggaatcctggctcagcg

SEQ ID NO: 526795 - DNA, 75 bp, Homo sapiens
gccatcctgaacgtctctccctgtcctagctctgtaactgtttacaattcatggaaacagctattctcataaagt

SEQ ID NO: 526796 - DNA, 100 bp, Homo sapiens
tgggggcccccaggactctgaccggaaaaatccagttacactcttaaaggaattgtcagtgataaagtctcgatatcaaactttgtatgcccgctttaaa

SEQ ID NO: 526797 - DNA, 101 bp, Homo sapiens
gaaattgaagccattcatgcaatcttgagatcagaggtcaatgagctgaaggagaaaggcaacaaggccctgagcgtgggtaacatcgatgatgccttaca

SEQ ID NO: 526798 - DNA, 101 bp, Homo sapiens
gccgaaagagcccataatgatgtcatggaagttctgcataagcatggcgccaaggccttcggggctgtggaagccatctctgaccggatctgcatccacac

SEQ ID NO: 526799 - DNA, 75 bp, Homo sapiens
gaccctcactgcggttggtgccattcgctacaaagaattctccactttaccaatacttacaggatctgggacaca

SEQ ID NO: 526800 - DNA, 90 bp, Homo sapiens
gtgaacaaccccattctgcggaagaggaagttacttgggtccagctgtagttcctctggacgttctcgaagatgctcttcctcttcttcg

SEQ ID NO: 526801 - DNA, 51 bp, Homo sapiens
gccccagaatctcttatgttaaaggtggagccgccaccaaaatgcagattt

SEQ ID NO: 526802 - DNA, 83 bp, Homo sapiens
gcctacgcagagctcatcgtccttggaattggtggagagaaggcgcaccatgatggaagatttccggaagtaccggaaaatgg

SEQ ID NO: 526803 - DNA, 90 bp, Homo sapiens
cttcactcgcgactgacggagctgcggtggcgtctccacacggtcatcatcagatttgaaatatttaaagtggatacaaaactatttcag

SEQ ID NO: 526804 - DNA, 80 bp, Homo sapiens
accgtagtagcatcaaacaatgggtcagtgttctcggatcttagaaatgaagttgaaaaattacgcaatgaagtgaatga

SEQ ID NO: 526805 - DNA, 50 bp, Homo sapiens
tatacattgtaagaggtgacaacgtgagcatgcaaagttccccaaggttt

SEQ ID NO: 526806 - DNA, 76 bp, Homo sapiens
gccgccgccgctgccgctgccgctgccgcacctccgtagctgactcgccttgatgacttacaagccctcaagggga

SEQ ID NO: 526807 - DNA, 75 bp, Homo sapiens
tactcctccaacactggaaagcatactaaatgagccaaaagaatgcaatggtgtaaagattccagttgatgccag

SEQ ID NO: 526808 - DNA, 102 bp, Homo sapiens
gtgcccctgggcatcaccaacatagccatcgacttcggggagcaggcaatgaatcgctccctggctaatgtgattcttggaggctatggcaccacttcaaca

SEQ ID NO: 526809 - DNA, 75 bp, Homo sapiens
cactttgccatgaactgtatggactgggcacttggagtcctgcatgccaaaatcattgcagctataacattgatg

SEQ ID NO: 526810 - DNA, 76 bp, Homo sapiens
cagctccttccgcaagctctttaaaaagaagtgacctaccagttgaagattccgtgtactgctttatgcactgttt

SEQ ID NO: 526811 - DNA, 100 bp, Homo sapiens
ccgcatccagctgcgggagcagctgccccgctacctcatgggggagacgcagctgtgcaccacaaggaagaatgttggtgaaaagcacagaaaccagtga

SEQ ID NO: 526812 - DNA, 83 bp, Homo sapiens
gggtgccggccgggattcgcggcccggagctcgggaccgaactgccattggatgtccagaatcccctgtagttgataatgttg

SEQ ID NO: 526813 - DNA, 82 bp, Homo sapiens
gatccggttccttggtgtcatccagccttagcaaaccagaggaggatcagctgatttattcggaggatttgctgactttggc

SEQ ID NO: 526814 - DNA, 75 bp, Homo sapiens
ggctggagcctgacgagctggcggtgccctctggtggtcagaagatgctgtgctgtctcgttaggatgaatggat

SEQ ID NO: 526815 - DNA, 74 bp, Homo sapiens
acgcgggcgagcggggctttggacgccggtggagacgcaggcgagtgcgaagtgccagagggtggactggtccc

SEQ ID NO: 526816 - DNA, 101 bp, Homo sapiens
gttccttggccatcccaaagctattctgggggcaacagaggtacgtctgcacatgatgtgtgccacacacccaaacatagttcagattattgaagtgtttg

SEQ ID NO: 526817 - DNA, 98 bp, Homo sapiens
gaaccttcgggcaaacaggattccacagtgtcctctggaaaatgtttccaacatggctagatccatcagaaactgaagccgtggagaacgctctcggg

SEQ ID NO: 526818 - DNA, 83 bp, Homo sapiens
gcttggtggactgtcactgccacctctccgccccggactttgaccgcaaatcctgccagaaacctgtagacaaatatatcgag

SEQ ID NO: 526819 - DNA, 100 bp, Homo sapiens
ggagattctccggggacccttccgtatctgcctaggcattttgctgtctcctcctaatacggctggaggctcccaggtgattttcacaaatcctttagaa

SEQ ID NO: 526820 - DNA, 108 bp, Homo sapiens
cgtccttctccactttcgccagcccgtgccgcgagcgcggcctgcaggaggccgggctctcgccatgggtcactgtcgcctctgccacgggaagttttcctcgagaag

SEQ ID NO: 526821 - DNA, 96 bp, Homo sapiens
caggaaatggctgcagcagaacaggcagcagcagaacgcctccaggaaacagcaaaacttgtcagctcatttgcagcttacatttttggtttcttc

SEQ ID NO: 526822 - DNA, 75 bp, Homo sapiens
agcctatgtcatttcatccaccacattacttaggtcctcggcagcctgatcttctgcttcggcatctggatcctc

SEQ ID NO: 526823 - DNA, 90 bp, Homo sapiens
tgtagtacagtatccaagtggcaatagcttttctgggagaagaggctacaaggacttagtgcatcagatgtaacagaacaaattataaaa

SEQ ID NO: 526824 - DNA, 74 bp, Homo sapiens
agcattctttctttccttaggaaaaagacagtcattttgtttactcattcagccctgttgcaggtcccaataaa

SEQ ID NO: 526825 - DNA, 75 bp, Homo sapiens
ccgcctcgaaaacggagaagcagctcaaagattagaacgactccgaaaagagagacaaaaccagatcaaatgcaa

SEQ ID NO: 526826 - DNA, 50 bp, Homo sapiens
taccatctcatctcaagaatggaggtactggagaaaatgaaactgggatt

SEQ ID NO: 526827 - DNA, 88 bp, Homo sapiens
tttaagtgagagcacgatgaatacaacaaagaactttgagtctggcaaggcttataagacaacatggggagatggtggagaaaactca

SEQ ID NO: 526828 - DNA, 82 bp, Homo sapiens
cgatgtttcaatattggaagcgctttgatttacagcagctgcaggttgtgaccgagattcccgacgagagagactgagggga

SEQ ID NO: 526829 - DNA, 86 bp, Homo sapiens
agtcagtgtggaaaaactgcgctgctccatgtcttcgccaaggactgcttccccgagacaatgcagatcttcgtgaagactctgac

SEQ ID NO: 526830 - DNA, 97 bp, Homo sapiens
gaaccggatatttaagtacaatggtgggcttaattttagatacggatataatgcaggagaagctacccaccatgcggtggattctgcggtcaatgtt

SEQ ID NO: 526831 - DNA, 99 bp, Homo sapiens
acacagcaggactgagtgaagaagaacagctcgagagagcattacaagccagcctctgggaccgaggttaaacccatccagagtaatggctgcggcctt

SEQ ID NO: 526832 - DNA, 101 bp, Homo sapiens
gcccctgctgccgcccccgtcgccgccgccgccgccgccgcagcttgggaggtgctgccaccacagcccattgcagatgcaaaggctcctgagaagcgggc

SEQ ID NO: 526833 - DNA, 83 bp, Homo sapiens
gatggtgatggagattttgatgtggatgatgccaaagttttattagctgagcgggctttggacaccatgaactttgatgtgat

SEQ ID NO: 526834 - DNA, 100 bp, Homo sapiens
gtgatcataggagaaaaccatttcagagcctacctggacgtagacattactctgtcctcagaagctttccataattacatgaatgctgccatggtgcaca

SEQ ID NO: 526835 - DNA, 75 bp, Homo sapiens
gagtgattgccatttggctgaagtgtggtgtggctctgtgggtaattccagaattgattggccataccattgtca

SEQ ID NO: 526836 - DNA, 83 bp, Homo sapiens
cgggtgcctttgaaaatcaacgacaacttgagcacagatcagaccaaacattgtctggcttgcactgtaaaactagttagctg

SEQ ID NO: 526837 - DNA, 82 bp, Homo sapiens
acatttcaggaaaacagagaaagaagtgataggagggctctgtagggactggtgattgcagctggaagtgcccatgaccgag

SEQ ID NO: 526838 - DNA, 100 bp, Homo sapiens
ctggagaaagtgctgcttcattctgagaattgcctgaggttctgtccattgaggaggaagtggaagaaacagagtcttgggcgaaacctctcatccacct

SEQ ID NO: 526839 - DNA, 75 bp, Homo sapiens
acagcacggcgtggcctctcagcctcgtaagactttgaccccgacgcaggcttcagtgattgccgcggatcagaa

SEQ ID NO: 526840 - DNA, 76 bp, Homo sapiens
cgaagatgccttggaaaccatctcaattgtatgtggtagaagaccaaagaagagatgagctaggaccatccacctg

SEQ ID NO: 526841 - DNA, 90 bp, Homo sapiens
aattagttaaggtgtccaggaagaacatccaagggttatgggagctatgaggagcctgatcccaagtcgaacacccaagacacaagcttc

SEQ ID NO: 526842 - DNA, 75 bp, Homo sapiens
gttctttgtggatggacttgattctgatgagagtgtggcaaaggagcagagaactttgacaagttcttcacacga

SEQ ID NO: 526843 - DNA, 75 bp, Homo sapiens
aacgtgggctcgctcttcgacgacgtccggcctctttggcctacccccgttggctccgctgccccaggtcgatga

SEQ ID NO: 526844 - DNA, 75 bp, Homo sapiens
gatcaatccagatggcagccagtcagtggtggagctctattaccaggttttaaacttcgccatgatcgtgtcttc

SEQ ID NO: 526845 - DNA, 98 bp, Homo sapiens
ctaacatctgtgaaaccatcgtatggaaggcattcagccccactactgtcaacactggccgaggacctaccctggctggtactgtgctgggagccgct

SEQ ID NO: 526846 - DNA, 83 bp, Homo sapiens
aaacacacagactccaactgtacaagaggagagtgaagaggaagaggtaatagcctgcagctggtgttttgagaagccctact

SEQ ID NO: 526847 - DNA, 95 bp, Homo sapiens
gaaaaattcactgtggtccagaagcagatatcggtgaggcctctccatattgctgtggtgcagggtaacctgccagctgtgcaccggctggtcaa

SEQ ID NO: 526848 - DNA, 125 bp, Homo sapiens
cagggctgaggaaccatgtctccatccccgaccgccctcttctgtcttgcctcgaagcggaggatccctgtgtcccagccgggcatggccgacccccaccagcttttcgatgacacaagttcagc

SEQ ID NO: 526849 - DNA, 98 bp, Homo sapiens
aggctccaccgtttggcatcccgactgtaagcaatctacgaagaccgaggaaaagctgcggttatatcaacatgccccctttcctgttgctggaagcc

SEQ ID NO: 526850 - DNA, 75 bp, Homo sapiens
tctgagtctcacagcttgtaaagcagcagtgttgtactgctacttctataaacggacagccgtaagactaggcga

SEQ ID NO: 526851 - DNA, 75 bp, Homo sapiens
ctgcggtgtgcaagtccgactggaacagcggagctggagtttgttcagatcatcatcatcgtggtggtgatgatg

SEQ ID NO: 526852 - DNA, 100 bp, Homo sapiens
gggcgatgctggaggagctggagtgcggggcgcccggcgccaggggagccgccacagattgtcactgctgttccaagggcacacgcagagggatttggaa

SEQ ID NO: 526853 - DNA, 117 bp, Homo sapiens
ctgccaaactcagatttcctggtgcatttttaccttgtgatgcacctgggattaaccagcgaggatcagatatctggggaagatgaagtagagtgctctgacaaggacgagcccgac

SEQ ID NO: 526854 - DNA, 75 bp, Homo sapiens
ctgtgctccaggactccctcaataatgtctctaattaacagaagatggcaaagcccagccacagcagctatgtcc

SEQ ID NO: 526855 - DNA, 75 bp, Homo sapiens
attcagtgctactcccttagtaactatgcagttttaatgatagtgaaatgaacatttacattctggcaacctcag

SEQ ID NO: 526856 - DNA, 50 bp, Homo sapiens
ctcaagatgagcatcttgcaggagtgcatccgccccaacccttttccccc

SEQ ID NO: 526857 - DNA, 80 bp, Homo sapiens
cattttgcctgagttggatcacgctcgtccacccaccccgtgtaaaaataacagggagtgcatccgccccaacccttttc

SEQ ID NO: 526858 - DNA, 96 bp, Homo sapiens
aacctgtatttatcactgccttcttgggaattgcttcgtttgccattttcttatggagaactgtccttgttaattggcagagggggtcgatttggg

SEQ ID NO: 526859 - DNA, 100 bp, Homo sapiens
ccggtactgttgaaagcgacaagtggaggcgccgctctagcggccgggactctgaactatggcggggatggagaagtttatgtttgggatgtgaactcaa

SEQ ID NO: 526860 - DNA, 100 bp, Homo sapiens
gcggcggccgaaagcggagagatgctgggcgtggcggccgggatgacccacaggtatgagttaatacagaaaggagtgactgaacttagaactgttggga

SEQ ID NO: 526861 - DNA, 73 bp, Homo sapiens
aggattccgccttgttggtctgaaattcatgcaagccgcaaaagataagtaccgtgaattggctgtggaaggg

SEQ ID NO: 526862 - DNA, 100 bp, Homo sapiens
ggtaaatcgaatggaagaaggaaacccaaggttgtggtatgctgatgcttcttagagacaaggcctcactccattgcccctaggccaggcctggtgagtg

SEQ ID NO: 526863 - DNA, 74 bp, Homo sapiens
gccgcggttcccgagttgctgcagcagcaggaggaggaccgcagcaagtattaattttaaagacccacagtttg

SEQ ID NO: 526864 - DNA, 100 bp, Homo sapiens
agaacagaaggcgatcaaggccaagtatccgccagtcaataggaagtacgagtactccagcgggaggaagaagaggcctttgccagcagtcagagcagcc

SEQ ID NO: 526865 - DNA, 100 bp, Homo sapiens
cagcaacagagctgggtccgggtgtacgacatggaaggtctttaatgtaactttaaatggttcaccaaaggatgctctaatggatgacagcgatactcct

SEQ ID NO: 526866 - DNA, 75 bp, Homo sapiens
gccgacccttcctgtcgctgacggcgactgcgggaggccagataacggaggagatgatggatcaggcaaatgata

SEQ ID NO: 526867 - DNA, 100 bp, Homo sapiens
tccgaaatgttagaaaccctctcagatgatgatttcgtgaatgtagcttcactcccctcccacccggtcactccgtccagcaagcacgcagacagcaagc

SEQ ID NO: 526868 - DNA, 83 bp, Homo sapiens
cgaaggtgaagagttgtcccagctcggcccgcgggggagccccgggagccgcacggtaaggctggcctctctgcagtcagagg

SEQ ID NO: 526869 - DNA, 76 bp, Homo sapiens
agctccgcaccaaggtggagaacggacacagaagacttagatcactatgaaatgaaagaggaagagccagctgagg

SEQ ID NO: 526870 - DNA, 98 bp, Homo sapiens
ccgtccagcagatggcggatgccctgcagtacctgcagaaggtctctggagacatcttcagcaggtaaactgtcttgagccccaccctcacctgcctg

SEQ ID NO: 526871 - DNA, 50 bp, Homo sapiens
ccatccccgagcagcggtggaagctggaggcagtggagaaggtgacacag

SEQ ID NO: 526872 - DNA, 100 bp, Homo sapiens
gtgtttgaagatcatgtgtgaaatcctaagtggattgcagttgggagactttctcattaaggccctcctccagagttctgcaagtcgaaaaacccagaaa

SEQ ID NO: 526873 - DNA, 98 bp, Homo sapiens
gggcaccaaataccaggctaccatggtctacaagactctcttcgctctttgcatcttaactgcaggtgaatgacgtgccattccagaacctgacacgg

SEQ ID NO: 526874 - DNA, 88 bp, Homo sapiens
ctctcatcgctctcggcctcggcctcggcctccgacacggttccgccacacttcaccactggcagcagttggcccaacctcaccttgg

SEQ ID NO: 526875 - DNA, 50 bp, Homo sapiens
agaccttcgagcaccccaacgtggtcagcattatgccagtacatacaggc

SEQ ID NO: 526876 - DNA, 75 bp, Homo sapiens
agccagcctaactgaagatgatgtatgaaggagttggagttgttgaaaccaagattcagaatggacagtttagaa

SEQ ID NO: 526877 - DNA, 100 bp, Homo sapiens
gttgaaggtgctaccgctgacgacacccctggtggatggcgaggatgagagcttttgaagaccctgatagtgccgtcgatgaccgagatagtgactatcg

SEQ ID NO: 526878 - DNA, 98 bp, Homo sapiens
ccgggtccacaagaccttcaagtttgtcgtcgtcggggtcctgctgcaggtctttctgtggaatttggaacaattctagtttacacatgtgagaagag

SEQ ID NO: 526879 - DNA, 75 bp, Homo sapiens
acctccctggctcaagtgatctcccaccttagcctcccaactgcagacattcaatactgcctcaccttgtcaaga

SEQ ID NO: 526880 - DNA, 100 bp, Homo sapiens
taccaagatgtgatgctggagaacttcaggaacctgctgtcagtgggttcttggccttttgcctaggctggagtgcagtggcatgatcatggctcactgt

SEQ ID NO: 526881 - DNA, 83 bp, Homo sapiens
gccagggaagctctagaggcgttttttggccaagggccgcggcgagtcctttgcacatgttggcaacacacgcatccgcatcg

SEQ ID NO: 526882 - DNA, 100 bp, Homo sapiens
gcaccaccatggagaggaaggagaagaccacgcacacgcagccagcggaccgccgggagagcctgcccacctccccaccctggacgccgggcgcgtcccg

SEQ ID NO: 526883 - DNA, 51 bp, Homo sapiens
ataagaatgaagctgatcatggtcagatgcagaatcctgatacactatcag

SEQ ID NO: 526884 - DNA, 100 bp, Homo sapiens
gggaaaacgactgcccacggaggaagagtgggagtttgccgcccgagggggcttgaaggagtgctgtgcccccctcccaggaggaaaggccgggccccgc

SEQ ID NO: 526885 - DNA, 74 bp, Homo sapiens
ggagttgcaccagcgtgcccgggagtacatctacatgcattttggggagggccggtattaccgcaccaaccaca

SEQ ID NO: 526886 - DNA, 90 bp, Homo sapiens
ccaggcccagggggcgcagacaaaaagaacaagagttgaatgctcgagcccgggccctccaagctgcatctgcttcatgttcatttcggc

SEQ ID NO: 526887 - DNA, 82 bp, Homo sapiens
tgtcccaggctgttccctaagaaggtctgcccaggactcaggtgagaagccctaccactgcaactgggacggctgcggctgg

SEQ ID NO: 526888 - DNA, 75 bp, Homo sapiens
atccgctggagcggagccggccgtacgcggtgctgcgagggcagaacctgggcattctcatcaccaccatcgctt

SEQ ID NO: 526889 - DNA, 100 bp, Homo sapiens
aaaaagtgaatttcgtaaccagaagccgaagccggagaaccaaggaacacgatgaacctattctgaagcacttgaaagatattaaagtgaagttctcaga

SEQ ID NO: 526890 - DNA, 90 bp, Homo sapiens
ctcctccttggtcgccgcgtccttggctggcgtgaaactcccagtacagccagcagcaggccgggtaccagcagggtgccgcgcagcagc

SEQ ID NO: 526891 - DNA, 80 bp, Homo sapiens
cctctgccaccagggagctggacgagctgatggcttcgctgtcggatttcaaggtaactaggatttctacctcaaccgcg

SEQ ID NO: 526892 - DNA, 75 bp, Homo sapiens
aggcgccagcctggtggtgggcaaatccagtccttctgtggaacttctgaacatcttttattagtggaaatattt

SEQ ID NO: 526893 - DNA, 100 bp, Homo sapiens
ttaaagaatgcaggaatgaatatgaacgttctttacaaaatcaccaatttgaactaaagaagctgaagggtcttgctctgttgcctaggctggagtgcag

SEQ ID NO: 526894 - DNA, 82 bp, Homo sapiens
cacatcttcaggtgcctcattcacatacgtcaaggaaattgaggcctccggtgtggctgtctctgatggtgtcatcaaggtg

SEQ ID NO: 526895 - DNA, 100 bp, Homo sapiens
agagcctggagtctgcgaaggccgggacccggttccccggcccacagtgggggtgtgcaaacccgagagaactggagcccccctccatgcgcctgaaggc

SEQ ID NO: 526896 - DNA, 100 bp, Homo sapiens
ctagtcttggcggaggagccttttagatgagccccgaaaggccgggcagacaatgcagatcttcgtgaagactctgactggtaagaccatcaccctcgag

SEQ ID NO: 526897 - DNA, 100 bp, Homo sapiens
ctgctgtgtcagaggagccctcagttgctacgatggaagttaaagggaaaaagcaattcacaggaaagagtacaaagacagcacaagaaaaaaacagatt

SEQ ID NO: 526898 - DNA, 82 bp, Homo sapiens
taaagatgcagtacgccacggggccgctgctcaagttccagatttgcactattcctgatcagagaactccagttgcttcaac

SEQ ID NO: 526899 - DNA, 83 bp, Homo sapiens
aaacatttctgccaaacaaatagtgttcaggacctcggacagtgatccaccctaaagcaagaattattgcggaagccgggcca

SEQ ID NO: 526900 - DNA, 50 bp, Homo sapiens
ttctcctgcagttataccagtggggggtggagtccatgtccctggctgac

SEQ ID NO: 526901 - DNA, 100 bp, Homo sapiens
ggagttaaggacattccaggcagaggcaagggtgtggttaagagaaaaaaaaattgccattaaggaatcagcaaataggatgtctgaagtgaggatatag

SEQ ID NO: 526902 - DNA, 83 bp, Homo sapiens
gcacgatgcacacgccggacttcgcaggcccagacgacgcgcgcgcagtgcagtggaggcttgcctcttgcatcagctgagac

SEQ ID NO: 526903 - DNA, 82 bp, Homo sapiens
tttatgtgaagctgctacctctgacatggatattggaaagcgaaagagttttgggatttgagattgacgcggtgaactctgt

SEQ ID NO: 526904 - DNA, 100 bp, Homo sapiens
gggccagtctggagacagtcaagcacctcaatgacctgaagaaggagaacttcagcctcaagctgcgcatctacttcctggaggagcgcatgcaacagaa

SEQ ID NO: 526905 - DNA, 89 bp, Homo sapiens
cagatggcagccagtcagtggtggagcacagttttctgtacttccagaaatgttaccactttgtgtttcaacgatatcgcctggagcac

SEQ ID NO: 526906 - DNA, 100 bp, Homo sapiens
tggggcccgcgaggcgggcagccggggcgtccagggcctgtcctcccaaagccaactctaaggagaggagaggaagagcagttcttggggcagagttgac

SEQ ID NO: 526907 - DNA, 51 bp, Homo sapiens
gctggtcttgaactcctaacctcaggtgatctgcccacctcagcctcccaa

SEQ ID NO: 526908 - DNA, 125 bp, Homo sapiens
ggaaggggcggttggtgcggcctccattgttcgtgttttaaggcgccatgaggttccggaatgaggactacaccatacatgtgcagctgaatgactacgtggacatcatctgtccgcactatgaa

SEQ ID NO: 526909 - DNA, 98 bp, Homo sapiens
cgggttccaaacccctagccacgacatggaagaatttttgcaacgcgccaaatctaaactgtatcaaaggtgcagaatctgggacaagttgcatgaag

SEQ ID NO: 526910 - DNA, 90 bp, Homo sapiens
tcgattattagctttagtgaaatgggctaataatgctggcaaagtggaaaaatgtgcggaccctgatgctcccataagacagaaaatgcc

SEQ ID NO: 526911 - DNA, 75 bp, Homo sapiens
tcagaggtccctggagtttctgcttcctccagagccagatgaatagacctagtgctgccaacccttgttctccag

SEQ ID NO: 526912 - DNA, 111 bp, Homo sapiens
gtccctttgcctcatcccaggttgccttggaaaatgccaacgccgtgtctgaagaggagaattctgcctaagccaactcgaaaaagccgtacaaaaaataagcaaaagcgt

SEQ ID NO: 526913 - DNA, 90 bp, Homo sapiens
tacaagagaaactttatgtgcctgtaaaagaatacccagatgatagaccactatcttgttgagctcttttaaatgaagttctacttggac

SEQ ID NO: 526914 - DNA, 97 bp, Homo sapiens
aggatgcctatgtattccctggggatggcgcatcacacaccaaagattcacatgcatgggaacaactacaaacaaagcttgcttcagcatttcccag

SEQ ID NO: 526915 - DNA, 51 bp, Homo sapiens
accggtttgcaagtccttgtagagggaatgaaagctactggttgattttaa

SEQ ID NO: 526916 - DNA, 75 bp, Homo sapiens
tgcagggctccaccccgtcgcctcgacagctgcaagctttcttcctggtggcagatgacatcatggattcatccc

SEQ ID NO: 526917 - DNA, 82 bp, Homo sapiens
gatgaaaattgggaaggttccctcaagtccaaggtttctaagcatgaattgaggaacagaagaagcagagcagatgatcgga

SEQ ID NO: 526918 - DNA, 73 bp, Homo sapiens
tctaaaattaaacatcggggacctacaggttacaaagacagcacccaagaaaacctcatttggctcgctgaag

SEQ ID NO: 526919 - DNA, 80 bp, Homo sapiens
gcggccttcgaggaggtgatgatggacatcggctccacccggacaatgcagatcttcgtgaagactctgactggtaagac

SEQ ID NO: 526920 - DNA, 100 bp, Homo sapiens
ttgtttctggatgattctaagaggtgtacttttgcatgtgatgggagatgccctggggtccgtggttgtggtcatcacggccatcatattctatgtgctt

SEQ ID NO: 526921 - DNA, 90 bp, Homo sapiens
ggctgtttctgtgcttaaagccatcttccaggaagtgcatgtacaggtgtttatctcagtggatgatctggaacccccggagccccagga

SEQ ID NO: 526922 - DNA, 74 bp, Homo sapiens
ggagaaaggagattgcctcggattccgacagcaggtcgaatgagtgatttgagtgtaattggtcatccaataga

SEQ ID NO: 526923 - DNA, 75 bp, Homo sapiens
agacgatcaatcaaattcgtcaagatgcagtaaaaaccaagttttacaggaaaactccagtgattttcaatcaaa

SEQ ID NO: 526924 - DNA, 101 bp, Homo sapiens
tgcctgtgtccctgaccatggctccctgcagtaccctttaacgttgatgaggaatctggattaaaggattcagaaccagagcgaaaacgcaagaagactga

SEQ ID NO: 526925 - DNA, 100 bp, Homo sapiens
atctacctacctagcaagacttgatgtgggcgctatctccaactgtctttgcacttctgagtaagaatctgatgattgtgcacagtgacctggctgttca

SEQ ID NO: 526926 - DNA, 100 bp, Homo sapiens
ggcgaggttcgggctggttgttccgttgcgagctgcagctgcgatctctgtggtaggcccaggaaggtgggagtcaatcattttgacaagtctcctgaaa

SEQ ID NO: 526927 - DNA, 100 bp, Homo sapiens
aaattaagaaggaaatatctccattgtttttcgttggaatatacgttgcacatttatggcgattctgagtgtgagggcagacttctgccaggctcagcac

SEQ ID NO: 526928 - DNA, 80 bp, Homo sapiens
caagcagttcagaagagccaaggaataaacatgcaatgaacccaaaaggtgcccaccagaagtatgtccgacaagcctgg

SEQ ID NO: 526929 - DNA, 74 bp, Homo sapiens
gtgacatccgaggtgcctttctccaaaagctccacggtcaggcttggctgcaaaacactttattgatgtaggag

SEQ ID NO: 526930 - DNA, 98 bp, Homo sapiens
ggattacatcatccgcaacactgagcaacaagatatggatttggatatagaatttgatgtacaccttggaatagctcatacccgttgggcaacacatg

SEQ ID NO: 526931 - DNA, 107 bp, Homo sapiens
tcccctgtgtggccaagaagctggtgtgcggagatgaaggtgctggagaatctggtaaaagcaccattgtgaagcagatgaggatcctgcatgttaatgggtttaat

SEQ ID NO: 526932 - DNA, 82 bp, Homo sapiens
catttaggacccatccagataatccaggataaattcctcctctcaagagatatagatcagctatcaggaagggacttctgcc

SEQ ID NO: 526933 - DNA, 75 bp, Homo sapiens
gagcgtctggccaagaatcagaggaagtggggtcctaaaaaggtggggacgctgtggcgagaagccgggcttagc

SEQ ID NO: 526934 - DNA, 91 bp, Homo sapiens
ggaggcgaacagtctcgttgctgcctctgtgtacgctgaggggggagcatttttgaaacgttggggttgttggagtggttggattttccct

SEQ ID NO: 526935 - DNA, 98 bp, Homo sapiens
cctcggctgtcttcattctggacgttaagggcaagcctctggacgagaccagccagatgagcgacctcccggtgaaggtgatccacgtggagagtggg

SEQ ID NO: 526936 - DNA, 75 bp, Homo sapiens
gcaactattattttgccattaactggagacagaaaaccatgagctgttttccaagagcttcatctccatggaagt

SEQ ID NO: 526937 - DNA, 100 bp, Homo sapiens
cggccgatgaagtgcagaggtttttttctggcatccaggctggagaagcagaacagcacacctgagagtgactacgacaacactcccaacgacatggagc

SEQ ID NO: 526938 - DNA, 100 bp, Homo sapiens
ggagacgcgctccacagaaacccggactgagaggcagcgagaggagaatggatcttggagaatgtctgaaagtccatgacctggctttaagagcggatta

SEQ ID NO: 526939 - DNA, 100 bp, Homo sapiens
gacgccgccggcaccatgggctgctgcaccggacgctgctcgctcatctgcctctgcgcgctgcagttggcagctggaggaagtatctcacaccaggtta

SEQ ID NO: 526940 - DNA, 78 bp, Homo sapiens
ttccgtcacctccgctcccccgatcctattcccagtcgtaacccttaggagaaatcttgagagtggacagcaattgtg

SEQ ID NO: 526941 - DNA, 101 bp, Homo sapiens
aagaaactgttgaattagacccgtttcctatagatgagaaaccatacaagctgtggtcaaagttggaaattgtaatactcctaaaccaagcttctttgatt

SEQ ID NO: 526942 - DNA, 48 bp, Homo sapiens
acggcgccgagccgcggtccgagcaggtgacagcagggacatgtctcg

SEQ ID NO: 526943 - DNA, 100 bp, Homo sapiens
cgaggttggtcatgaaagagattccttgcagagacagctcaacacggcacttccacaggtcatcctgtacagttctacagcatgaataggcctgcctctc

SEQ ID NO: 526944 - DNA, 75 bp, Homo sapiens
ggttcagctctttttctgagatcatcaccaccccgacggagacttgtgacggggaggatactgaggcacacagag

SEQ ID NO: 526945 - DNA, 132 bp, Homo sapiens
ggccttggtcccagcgccttcccacggagcagcactcttcaccctgcacagccttgttaggacctgaaggagaagaaggagaaggtggaggagaaggcaagccggaaagagcgaaagaaagaagtggtggag

SEQ ID NO: 526946 - DNA, 75 bp, Homo sapiens
gggagagcggccgccgccgctgccgcttccaccacagatatgaggccccaggattcctggcgaggtcctcctccc

SEQ ID NO: 526947 - DNA, 82 bp, Homo sapiens
gccgcggtaccatgaggcgccggtgttacacataatattgcattacttcgagaggtgataatcaactcacgctttgtaaaag

SEQ ID NO: 526948 - DNA, 100 bp, Homo sapiens
cgagccaactccggagcccgctctgcgttttgttttcccctcggcactaggcagcggaggagcccgaccgacccgtcaggatggctaaaggtgaccccaa

SEQ ID NO: 526949 - DNA, 51 bp, Homo sapiens
cggaggcagagcggctgccatgagaaggtgttcgccagcctcccgcaggtg

SEQ ID NO: 526950 - DNA, 81 bp, Homo sapiens
ttgaaaggcatgaagatgcacagaaagctgtggaagagatgaatggaaaagaaataagtggtaaaatcatatttgtaggcc

SEQ ID NO: 526951 - DNA, 75 bp, Homo sapiens
gattcaagattatttgcaacagctcacgggagcaagaacgcttcttccagaccagctggtcttgcttctggagca

SEQ ID NO: 526952 - DNA, 82 bp, Homo sapiens
cttggcctcccaaagtgctgggactacaggtgtgatctaccatgcattgtctcagaaagaggcgaatgactccgatgtccag

SEQ ID NO: 526953 - DNA, 95 bp, Homo sapiens
ctctaatgctagaaaatttacagaaacactcaacaccccatgctgcattccagccaaattcccagggtgtccgcaatgttgccagtgtctgtctg

SEQ ID NO: 526954 - DNA, 51 bp, Homo sapiens
gcgtgggcgtttcgcagactcctaaggttctgtaatccaagatgtctgtaa

SEQ ID NO: 526955 - DNA, 101 bp, Homo sapiens
tgtaccatcatgggtagcctttgataaacagagttctaaagttcctgttgcttcagacaatggatgagcaatcacaaggaatgcaagggccacctgttcct

SEQ ID NO: 526956 - DNA, 75 bp, Homo sapiens
tcgtggcgtgcgacaacgcggcgcagaagcagaagctcctcctggggtagagacagatcttattgatgttggatt

SEQ ID NO: 526957 - DNA, 75 bp, Homo sapiens
ttcacagagctagccggacgtcctccgactcaaggatgaagatgagctggattcccacaccatggtgaagactag

SEQ ID NO: 526958 - DNA, 82 bp, Homo sapiens
cgagaccgcggccgggaccgagggattgattcctaaagactcatgttacgtgaggaagcagctcagaagaggaaaggaaagg

SEQ ID NO: 526959 - DNA, 75 bp, Homo sapiens
tcgcgccggctatggccgtgccctggggctgagccctcaggagggagccatggatttgctgcgggagctgaaggc

SEQ ID NO: 526960 - DNA, 100 bp, Homo sapiens
gaagcacctgcccgcgtgaggagcacctgctgagcccagccaggtcgcgtggggcaggcagtggcgctgcgggccaaggccttcggcttcaacgtgctct

SEQ ID NO: 526961 - DNA, 83 bp, Homo sapiens
gtggaggagctgtgcagccgcgaggaggcgcgggaggtgttcgagaacgaccccgagacggctgaaggtgatgtggccgccct

SEQ ID NO: 526962 - DNA, 83 bp, Homo sapiens
ctcagctccgagtccagggcgagctggtcagtgagaaggtcggaggggccgaggggaccaagctggatgatgacttcaaagag

SEQ ID NO: 526963 - DNA, 100 bp, Homo sapiens
tcgggcgctcatttcgagtgaccattccaacagatttgattgcctccagtggagatatcatcaaggcatcaagattacgcgaagaagcgcataacatggg

SEQ ID NO: 526964 - DNA, 100 bp, Homo sapiens
attttttctcatggatgttcttcttcgagtatttgtagaaggcactgttgcaagaattcaattccgtcttcctgatggttcttcctttacaaatcagttc

SEQ ID NO: 526965 - DNA, 100 bp, Homo sapiens
tagcaacgctgtggactggtgatgacaggctcttcagctccctgcaagtgaccgggcctggggaacagacaatgaccgtttgccaagtaaaattatctaa

SEQ ID NO: 526966 - DNA, 83 bp, Homo sapiens
gcgggtccagcttcaggagtactggcggaggggctggacgttccacgccaaagaccatggtgaatccgggcagcagctcgcag

SEQ ID NO: 526967 - DNA, 74 bp, Homo sapiens
tgcagaagaggagtcctttaggaagaattggcagagggggtcgatttgggaggaaaggtgtggctataaacttt

SEQ ID NO: 526968 - DNA, 74 bp, Homo sapiens
caataagagcctggtggtggcccacgcgcaggtccgggcccaccagctggtcttgccaccttgcgacgtagtga

SEQ ID NO: 526969 - DNA, 58 bp, Homo sapiens
cctgccaaactccaggctcagatgtcacagccctgctgctgaggccgcgccctccccg

SEQ ID NO: 526970 - DNA, 83 bp, Homo sapiens
cgccgcccggggcgaggcagggccagcagcaggcgggaggcttgggcactgtttaaaggaaagttccgagaaggcatcgacaa

SEQ ID NO: 526971 - DNA, 83 bp, Homo sapiens
ctttatagtcctgattcaagtgttggcggatggaagggaggagactcctgaccctcagaatgctgagtcagtgctgattctct

SEQ ID NO: 526972 - DNA, 100 bp, Homo sapiens
ttgttaccatgacagtaccctcccattcctcccatgctactgctgtgaccacctcaaacatcccagtcgggcctgccttaagtgtgaaagtaatgactga

SEQ ID NO: 526973 - DNA, 103 bp, Homo sapiens
ttcttacaacagggaagcagccctcaaggccagcggagtcttcagcacccccacaagcatgcagaatgaaatgaatgatgtgcctttctttgatatccaactg

SEQ ID NO: 526974 - DNA, 74 bp, Homo sapiens
tgggtgttttgctaccgtgaccgtttagttaacgatgaagaggagaactgacccagaatgcactgcccccatca

SEQ ID NO: 526975 - DNA, 130 bp, Homo sapiens
tgtcgcctgcagctgctcgcctgtctccgtcggaagggagcccaagctttgcagagtggcctgattccaccaagagaaggcccaggaggaagaagagaaaaagatgctgtggttactagtgccaaaaatg

SEQ ID NO: 526976 - DNA, 75 bp, Homo sapiens
gaatatgcagctcctgctgagatgtaaaagatgattatgtatttgaatgtgaagctggtactcagtatcagaaaa

SEQ ID NO: 526977 - DNA, 97 bp, Homo sapiens
atgcattgaaattcttaatgacatggtatggaagtataacattgttacactggacagattaattctctgcctgttccatgccattgcagtgtcaact

SEQ ID NO: 526978 - DNA, 100 bp, Homo sapiens
gagcatggactgttaaatcttgcacttcttctgagtgaggttttggcaagctcgggctgtggagagtttcctccgagggaccacctcctatgcagaccag

SEQ ID NO: 526979 - DNA, 98 bp, Homo sapiens
aaaagggcaagctcctgagtggatctctcagggagccaccagacaggctcctgttccaaagagtgcacttattcctgtaattcccatcaccaaatcaa

SEQ ID NO: 526980 - DNA, 77 bp, Homo sapiens
cggcaaggagagacgtcgctgaggggcttgcctgaagcgaggggatttgtactgtgttcgcagtgacctggggaacc

SEQ ID NO: 526981 - DNA, 100 bp, Homo sapiens
cccagccattggatttcctcaagctacaggagccggtgaaacctgaagaaggcagagatatggcaaacaggattggcgcttttgggtacatggagtgttc

SEQ ID NO: 526982 - DNA, 100 bp, Homo sapiens
caagctactgtgagttgctgcaaaataaagtccctttgctcgacatccgggaactgatcgaggtggatgatgtaatggaggatgattctctgcgattcgg

SEQ ID NO: 526983 - DNA, 101 bp, Homo sapiens
gagcccggggtcctccaggaccagccggtgctaatggtgctcctggactgcgaggtggtgcaggtgctgctggtcaacctggtgctaaaggagaaagagga

SEQ ID NO: 526984 - DNA, 150 bp, Homo sapiens
cgggaactcgggctttcagttgttagaccttgtccacgaggagggagaacctgaagccgcctctgcaggctcctgcaaacatagattgtctgtacaccaacaccactcacctcgaggtgaactcccgtgttgatgtggtaaagccaggaa

SEQ ID NO: 526985 - DNA, 105 bp, Homo sapiens
ggaactctttcataggagacaaacttatgtattttttaagtcacagaattcttgcttccagctgatcttaccaagatgcatctcacagaaaaccctcatccacag

SEQ ID NO: 526986 - DNA, 83 bp, Homo sapiens
cagaagggaggctccaagacctcatcaacaattaagcattttgaaagcgaagcagaagccgtagaatcagcggcgagcctgtt

SEQ ID NO: 526987 - DNA, 83 bp, Homo sapiens
ccaacgagctcaacgccaggcgccgctcctttacaggagttaacagagcagtttcataaagttgaatctcaactgaataagct

SEQ ID NO: 526988 - DNA, 100 bp, Homo sapiens
cagaccttcgcctcgccccgccggttcctcaccctcggggagcaacatgggaacttagtgatttggcccgtgaccctccagcacaatgttctgcaggtcc

SEQ ID NO: 526989 - DNA, 100 bp, Homo sapiens
tctccgttgggtccggccgctctgcgggactctgaggaaaagctcgcaccagtgcctccggagccagcgtggtggccatagacaacaagatcgaacaggc

SEQ ID NO: 526990 - DNA, 100 bp, Homo sapiens
aagaattcgccaagtatttaaagttgcctgtttcagatgtcttgagacaactttttgcactctttgacagggttgctgatcagctctgtgccaagtatag

SEQ ID NO: 526991 - DNA, 107 bp, Homo sapiens
aaaccttcagggcctctgtactggcctgtcatgtggtcaaccaggtacgacaacatggcagagctgtttgcggtggtgaagacaatgcaagccctggagaaggccta

SEQ ID NO: 526992 - DNA, 75 bp, Homo sapiens
tgttggatctacactttctcaagcactgtgatcttcaaatttactccacaggatccgctgaacataggatgttgc

SEQ ID NO: 526993 - DNA, 75 bp, Homo sapiens
aactaactcagcagcaacttaatggaaactaggggcactatgaacgaagaggagcagtttgtaaacattgatttg

SEQ ID NO: 526994 - DNA, 95 bp, Homo sapiens
tttatcagacatcactttgttcttgttctgtaaacatccgagtgcccaacagacattttgctgctgctacaaaaattttccagttcatatgaaga

SEQ ID NO: 526995 - DNA, 101 bp, Homo sapiens
atacagctgtccacttcagagctaggagagatggaactgacttggcaggagatcatgtccatcaccgagctgcagccagctgaggtgggtgtcctggttgg

SEQ ID NO: 526996 - DNA, 51 bp, Homo sapiens
ctcctaagtagctgggaccacaggttccaagaccaaagattaaattaagag

SEQ ID NO: 526997 - DNA, 100 bp, Homo sapiens
cccgactgcaactgctggattgctgcaaggctgagggacgagaacgagcaagaagatccttataggaagaaaaagcttcaggagaaaagagaaggaaatt

SEQ ID NO: 526998 - DNA, 100 bp, Homo sapiens
caatcttggagtcctgcatttggatggcatcttccctggagttcctggaaggaatcaacctactttggggataaaggattatttggtcttctggatttgg

SEQ ID NO: 526999 - DNA, 100 bp, Homo sapiens
gatccaggacctgtaaacttcatggttcggctttttgtggtgattgtgatgtttgcctggtctatagttggtatcagtcctacatcgctatcttgtgcag

SEQ ID NO: 527000 - DNA, 75 bp, Homo sapiens
acacgacgtgcgctatgggtcaggtgcccagggtggctccgtggcccgcacactcctggaagatgggacattcaa

SEQ ID NO: 527001 - DNA, 75 bp, Homo sapiens
gtgacaatgatatggaaagaaaaaaagtcttggatgatctaaccaagggagaagagaagtttacctttattgaga

SEQ ID NO: 527002 - DNA, 83 bp, Homo sapiens
aaacatccatatcataagtggaattttggagatattcaaagagttgatctctctaatgtattagatcttcatgcctttgatag

SEQ ID NO: 527003 - DNA, 96 bp, Homo sapiens
ctccttcttcaggagagcgccccagggcaagccccgctccggccaacaattccagggtctccctccactgctgtagtaacccgggtccggggcctc

SEQ ID NO: 527004 - DNA, 100 bp, Homo sapiens
cctcctcccctggctggagtgccctgcctggagggagccctcctggctgggggcaagggttggggtctgctaggtccccggaatgagttgtttgacgcag

SEQ ID NO: 527005 - DNA, 100 bp, Homo sapiens
aacctaaacatttaaaatgtgaaatgaaaggaggaaaaacagtacagatgggccaagagcttcaaggagaagtagaaataaacggtgactggcaaagagc

SEQ ID NO: 527006 - DNA, 75 bp, Homo sapiens
tgcaaagcgaggctgaagaaggccaaggctgcagaagccaaagccacgtctctagtgatccctgaaaagttccag

SEQ ID NO: 527007 - DNA, 50 bp, Homo sapiens
ctcagctctcggcgcacggcccaggtcagactatgatgactggagaccgt

SEQ ID NO: 527008 - DNA, 90 bp, Homo sapiens
ctgatcgctacttacaggataacccagcatcaggggaaaagtttgcctatgtgccatttggagctggggagtaggttgcatctttgttga

SEQ ID NO: 527009 - DNA, 90 bp, Homo sapiens
cccgactcttcctggtgaagcatctgatgcacgttccatccggcgctcagctgggcttgaggcatgtactggcattgaaaacattgacga

SEQ ID NO: 527010 - DNA, 100 bp, Homo sapiens
aggtggcgctcatgcatatttgagacaacatctggatggttggggagaacggcggtgcgtctttctacgtgaataggattttgtggctggccagatacac

SEQ ID NO: 527011 - DNA, 100 bp, Homo sapiens
aggaaatgctaccactctcatcagaggtaaagatgatgattcttttgatcggaaatcagtgtaccgaggctcgctgacacagagaaaccccaacgcgagg

SEQ ID NO: 527012 - DNA, 90 bp, Homo sapiens
gtggcatgtcctcagtgcaatgctgaatacctaatagtttttccaaaattggttcacctgtggcagatgatatcatccagcccgctgccc

SEQ ID NO: 527013 - DNA, 75 bp, Homo sapiens
ctgagccagcggagctgcttgagcccgcggagccggcgggagccgcgcgcgccgcccagccgtgcgtcatgggca

SEQ ID NO: 527014 - DNA, 83 bp, Homo sapiens
ctccagcaccctcatcgccctggccgacaagcacgcaagcaagtgaaccggagcaaacgacttccgatccagtctgcgctgtt

SEQ ID NO: 527015 - DNA, 80 bp, Homo sapiens
gattccttcaacactgtagcagagatcactgggagcaaatatccagaacagagagacaagagagacacctccaacttcga

SEQ ID NO: 527016 - DNA, 100 bp, Homo sapiens
gtgccagagaggtctctcagggcgaagtgaccccatacagctggaaatccacagagcacccaactggtcagctaactttgatgtcccaatggaaacaacc

SEQ ID NO: 527017 - DNA, 75 bp, Homo sapiens
gcacggatgactcccagcccccaacgctgggccaggagatcctggaggtttgaaggaggagtttcctgcctggta

SEQ ID NO: 527018 - DNA, 100 bp, Homo sapiens
cacacttcgcggcttcttcatgctttttcttctcaccatttctggccaaaactacaaacaagacttcgcaggctcgagaattacaagctcgggtactaaa

SEQ ID NO: 527019 - DNA, 98 bp, Homo sapiens
tctgtaggtcttctcctggtgaaaaggatcactactcttggaatcaaagataaatccaaatactgcatatcagaaacaacaggcaagtagttgtttat

SEQ ID NO: 527020 - DNA, 100 bp, Homo sapiens
gaacagttccccctggtgcagggagtggccatagccagtacagatgacggctttgtatataatttggatgcacgttcagataagccaatttttacactta

SEQ ID NO: 527021 - DNA, 75 bp, Homo sapiens
gaatcttctgggagctgaggaaccagatatcttgaaaagctgccagaaagggcgacctcggggacgcggggccaa

SEQ ID NO: 527022 - DNA, 90 bp, Homo sapiens
cacgcccatcaggtggtggtggccaagtatgcgcccagcggattctacattgcctccggaggtgaatgcccaggcccttaccagtgcctt

SEQ ID NO: 527023 - DNA, 98 bp, Homo sapiens
aaaatggagagtggagaattcatggggtgaagaccatggccacaaagacttgtgcaccatggacaattttgctgagggagatttcactgtggcggatt

SEQ ID NO: 527024 - DNA, 101 bp, Homo sapiens
tgaaaggagaagacttggattctcaggagccggtgaaacctgaagaaggcagagatatggcaaacaggattggcgcttttgggtacatggagtgttcagca

SEQ ID NO: 527025 - DNA, 100 bp, Homo sapiens
cgctcctggcgcatctggtggtcgtcatcaccttattctggtcccggatgatcatgacgcagtcctgaggtttaatggggcacccacagccaacttccaa

SEQ ID NO: 527026 - DNA, 49 bp, Homo sapiens
cagaggggtaatagagcaggcaacagctacaaatttacatgtattggag

SEQ ID NO: 527027 - DNA, 138 bp, Homo sapiens
tgctggttagtgtgctctgagggagggtccgagccagccgctgttttgccggaggagcccctcaggcctcgcaatgtatctgctgagcaaaaagatgaaaacaaagaagcaaagcctcgatccctacgcttcacctgg

SEQ ID NO: 527028 - DNA, 74 bp, Homo sapiens
tttcaagttttactgataatagttcacacaaaagatgttggacaatttctacaattttgcttcatcatttgctg

SEQ ID NO: 527029 - DNA, 90 bp, Homo sapiens
ttggaccatcccccaatcctctcatcttgtcctacctgaagtatgccattagttcccaggtttttcgttggaatatacgttgcacattta

SEQ ID NO: 527030 - DNA, 99 bp, Homo sapiens
ctcgatcagggcatacatctttcttcgacaaagggtgacagattgactgggatcccctcgcacatcctcaacagctccccatcagaccggcagattaac

SEQ ID NO: 527031 - DNA, 100 bp, Homo sapiens
ctgactgccggctgcttccctgggctgggcgtcagccgccaccggcagcagcagcaccaccggacggtattctctgaaaccaaatgaccaaatcttggct

SEQ ID NO: 527032 - DNA, 112 bp, Homo sapiens
ctgcccaacagaatttatatagagatgtgatgttggagaactacagaaacctcgtctccctggagactaaggtgtcagtatgttcttcaagctgctctgctcctgggcccaa

SEQ ID NO: 527033 - DNA, 100 bp, Homo sapiens
agcggcggtagcagcaatggactttctcctggggaacccgttcagctctccagtgggacagcgcatcggaacttctgggtcaaccagttcagagacctgc

SEQ ID NO: 527034 - DNA, 90 bp, Homo sapiens
aaagagatgaaaagtggggattttgccctgatcccacccccaaatacatcaagatgtttgtactggatgaagctgacgaaatgttaagcc

SEQ ID NO: 527035 - DNA, 74 bp, Homo sapiens
agaactgggttctggactttgggcgtcccattgccatgacgctgaccggaaaggagattgagattgacattgaa

SEQ ID NO: 527036 - DNA, 90 bp, Homo sapiens
ttttcatgagtgttcctgtggtctctgcacctcctttctcaggaggccactgtctgcagctcccgtgaagatgtccactccagacccacc

SEQ ID NO: 527037 - DNA, 100 bp, Homo sapiens
ttgaaggtttacacttgtcaacttcctcttcagtcatcagtgaaaacacagatcctggtgccgaacatgaggacagggcaggccgaaggagaaagtggaa

SEQ ID NO: 527038 - DNA, 100 bp, Homo sapiens
ctgctgctggcggctctggcttctctgctgctcccggagtccgccgccgcagaaaatgctgctcaaattccagtggctactccacaggtctctcctaaca

SEQ ID NO: 527039 - DNA, 99 bp, Homo sapiens
ctgctcacagctgcccagctgaaagccaagctcaccctggacagtatcactccgtggaggaagactgtgagactgtggctggaagccagattgtagcca

SEQ ID NO: 527040 - DNA, 75 bp, Homo sapiens
cgatccgggcgctcgagacttaccagagccacaaggaggaagttaacatccctaataggagggttctggttactg

SEQ ID NO: 527041 - DNA, 100 bp, Homo sapiens
ttcgcgcccgccgacccgcgccctgctccctctcagcacctgggcggacgggacttaagtcacaacagattatctttcatcaaggcaagttccatgagcc

SEQ ID NO: 527042 - DNA, 50 bp, Homo sapiens
ggaggccgtgaagaccttcaatagcgagaggaaggaacagagccacagag

SEQ ID NO: 527043 - DNA, 100 bp, Homo sapiens
ccacctgctcctggccgcctgcatgcacagtggctttaagatcctcaactgccaaaaggcaatggagtggaatcgatggaagccctgcccatactgagcc

SEQ ID NO: 527044 - DNA, 74 bp, Homo sapiens
tgctgtttgtattccagagactaggtgcggtctgcctgcagcctttctgccacctgtactggggctgcacccgg

SEQ ID NO: 527045 - DNA, 100 bp, Homo sapiens
gtgatccagaagtccagagctgaggactgcctgtttgcagactgaaccggccgctgacactctcggagaagattgtgtatggacacctggatgaccccgc

SEQ ID NO: 527046 - DNA, 83 bp, Homo sapiens
gataaactcaacatcgacagcattatccaacggctgctggaagtgtcacaccatgtctgaccggaaggcagtgatcaagaacg

SEQ ID NO: 527047 - DNA, 89 bp, Homo sapiens
cggttagcccgtcagtccctgctctgtgcgcgcctccatctgggccatggatggatactagagtaaaaggatggtttcttctggacaat

SEQ ID NO: 527048 - DNA, 100 bp, Homo sapiens
tgtggcttcagtagtttcaaaaggtggcctttccactggagttgcttcacttagctctacaatcaacccatgtggtggaacttgcagaaatctgtgccaa

SEQ ID NO: 527049 - DNA, 100 bp, Homo sapiens
cccaccagagaactggctcaacagattcgggaacaaaatcgatatgacttgaaaacagcaggaccacaatctcagttgcttgctggaattgttgtggata

SEQ ID NO: 527050 - DNA, 75 bp, Homo sapiens
aggagtgcctcgaaatgccagccagaaagagatcaagaaagcctattatcaggagtatctaactatcaagttgaa

SEQ ID NO: 527051 - DNA, 90 bp, Homo sapiens
ctccactagaggggtagccaagatgtccttggatcctgcagacctcacccatgacactcaaaatgatgcttcaacacccaggccaggtct

SEQ ID NO: 527052 - DNA, 120 bp, Homo sapiens
gtttgaggaatttgacagtttcctgccaggcgccatcatcggcatagcccgggagatgcagccagtttacaggttgaaatcacaaagattagacacctttttagataggtgttcttcagc

SEQ ID NO: 527053 - DNA, 75 bp, Homo sapiens
gatgtacatcaaggcctccggcagctatgcaggaggagaacatttgcctgcactgggcggcgttctccggctgcg

SEQ ID NO: 527054 - DNA, 90 bp, Homo sapiens
gtcctgctgatggcctgccggccttgccgaggagctgggcgtatctggtgttgccgatcacacaagcattctgtgtctggctgactctgc

SEQ ID NO: 527055 - DNA, 75 bp, Homo sapiens
gcccagcacgactcctcgggcagcctcaacgagaactcggagggcaccggaggcattgaagttgatatcgatgtg

SEQ ID NO: 527056 - DNA, 100 bp, Homo sapiens
aggtgggaaggtgtgtccggaggtttgcaggggtgcagtgtgtctggtcttatgaggattatttttacccaagatacttaggtaagtctcaattacttct

SEQ ID NO: 527057 - DNA, 75 bp, Homo sapiens
cttcgagcgggtgcgctgtggccttgagcacgagcggcagtccctggtacgtgagcccctttcccggcgccggca

SEQ ID NO: 527058 - DNA, 75 bp, Homo sapiens
aaatgctgtttgtattccagagactaggccctgtctctgcccctggtggtcatcgtccatggcaaccaagacaac

SEQ ID NO: 527059 - DNA, 74 bp, Homo sapiens
ctccgggacacgggtgtgcagggcgtcatgagcgcaggtgacacgcttctgagcaggggcccctggggacttca

SEQ ID NO: 527060 - DNA, 100 bp, Homo sapiens
atggtgctggccacttgcttgggatcctttatcctggtcatcttctatttccaaagaatcatattgacaggtcatgaaaatgagaccaaaagatctctgg

SEQ ID NO: 527061 - DNA, 111 bp, Homo sapiens
aaacttctgaaaaaagttgaggagcttaagaagatctgtctgcgggaggcttatgtaccaaaccaaagccgtcatcattgcaatgatcatcactgcggtggtatccatttc

SEQ ID NO: 527062 - DNA, 83 bp, Homo sapiens
ctccgtcgtggaagcaggactgcgccgcgtcttcctcaaggatattagaaatggctactccccagtcaattttcatctttgca

SEQ ID NO: 527063 - DNA, 82 bp, Homo sapiens
acatcaggtgatggataggagcaaccctgtaaaaccagccttagactatttttcaaacagaaactaaatatattttgccaac

SEQ ID NO: 527064 - DNA, 100 bp, Homo sapiens
tcaagcttgctgagccttatgggaaaataaagaattacatattgatgaggatgaaaagtcaggtaacagactgggttgacccatcatttgatgattttct

SEQ ID NO: 527065 - DNA, 98 bp, Homo sapiens
cagattcgcagtggtcgcttcttctccttgatgtcaagccctccaacatcctagtcaactcccgtggggagatcaagctctgtgactttggggtcagc

SEQ ID NO: 527066 - DNA, 95 bp, Homo sapiens
gtggacgccggatgagttgcttttaggcttgctggcccgcggggctgtccaggcacgcgaggcccctcagacaaatttacatgtattggagacca

SEQ ID NO: 527067 - DNA, 83 bp, Homo sapiens
cctgtctggccacaacttcctgcaggactccaaggtcattttcgtggagaaagccccagcgggctgacgcacgaggcacacag

SEQ ID NO: 527068 - DNA, 100 bp, Homo sapiens
gaggcggaaagatcggcagaagcagcacacagaacacctgcgtttagataatgaccagagggaggtgttacagggtcttgattatttacataccaagtgc

SEQ ID NO: 527069 - DNA, 84 bp, Homo sapiens
ctggctccccatactagtcgccgagtttatgtggccgaggcagacaagtggaattaggccttgctgcaggggacttcatttcct

SEQ ID NO: 527070 - DNA, 74 bp, Homo sapiens
ttctgctggtagatatgttaggagacgctgcaaaccgttgaaggctgctgtacaggacagattgaatgagcaag

SEQ ID NO: 527071 - DNA, 98 bp, Homo sapiens
cttccatccaccgatacatgtaccctgagatgaagagaatggatcttggagaatgtctgaaagtccatgacctggctttaagagcggattatgaaatt

SEQ ID NO: 527072 - DNA, 100 bp, Homo sapiens
tggcgagcgctggcggtgacggcgcggggtccgcgcccggagcgccccgccgcgcacagtgaggctccaggttgggctctatgctgtgtaccttctggac

SEQ ID NO: 527073 - DNA, 100 bp, Homo sapiens
cggactcaggccaggccactcgcagtacctttgtgttggatgaatttaagcgcaagtactccaatgaggacacactctctgtggcactgccatatttctg

SEQ ID NO: 527074 - DNA, 75 bp, Homo sapiens
agtgcttctaccagcccatgcccctgaaggcctcgctggagatcgagtaccaaggtttggattcaggatttgttc

SEQ ID NO: 527075 - DNA, 75 bp, Homo sapiens
gcctgggaaagtccttgctcacaggtttattacagaggtcagctgggaagagctaccactttaagtgtaactcct

SEQ ID NO: 527076 - DNA, 100 bp, Homo sapiens
cagttacaaggctgctcccgtcagctgtttcaagcacggtgtcctggacactggcaagaagctgtccgatgacaacaccatcgggaaagaggagatccag

SEQ ID NO: 527077 - DNA, 50 bp, Homo sapiens
tggagtgcctccaaaggttgctgagggagaggtgatatccagcctcagtt

SEQ ID NO: 527078 - DNA, 88 bp, Homo sapiens
agcgctggacacccagcctccaggcaaaaagggcagctagctgtagaaagagctaaacaagtagaagagttcctgcagcgaaaacggg

SEQ ID NO: 527079 - DNA, 80 bp, Homo sapiens
agatcaagcactggaaccgcttccgagacatagcctgggctggaagctcttctacgtcacaggctgcctgtttgtggctg

SEQ ID NO: 527080 - DNA, 100 bp, Homo sapiens
acaagattgggaaaatattcaagaagtgtaaaaaggggttgacatcatggacatatgtgagtccatcctggagaggaagcggcatgacagcgaaaggtct

SEQ ID NO: 527081 - DNA, 97 bp, Homo sapiens
ccaggcgcagatgcgggccctgctggaccagctcatgggcacggctcgggacgatcatgtttgagaccttcaacaccccagccatgtacgttgctat

SEQ ID NO: 527082 - DNA, 100 bp, Homo sapiens
agccccaaagcgagcgaagctagggtcgccgccactgccgcaggaggcgtgagccatgaaccagagaatcagtcagagtgctccagtgaaacagccacca

SEQ ID NO: 527083 - DNA, 98 bp, Homo sapiens
atttctcttggatttggctacacacttatagatcttctgcactgtttacaggcacaggaaaatcagaggctccttaaaaatatgttcaaaatcggtga

SEQ ID NO: 527084 - DNA, 75 bp, Homo sapiens
cgcaccctcacgggggccctcaacgcccacaacaaggcggcggtggactggtggtaagttttcttcatacagttc

SEQ ID NO: 527085 - DNA, 115 bp, Homo sapiens
tttcaaaattcaacaagatctatgaatttgattatcatctgtatggccagatgatgataattccgaagaaggcttccacactattcattcaggaaggcatgaatatgcattcagc

SEQ ID NO: 527086 - DNA, 88 bp, Homo sapiens
gcccatgaacctgttcgccacctgggaggtggacggctccagccccagctgcgtgcccagacaatgcagatcttcgtgaagactctga

SEQ ID NO: 527087 - DNA, 82 bp, Homo sapiens
gaacgtgcaggtcgccgtgcgggtccggccgctcagcaagaggccacggcgtatgcctccgaggacggggtcctgaccgagg

SEQ ID NO: 527088 - DNA, 79 bp, Homo sapiens
agggagttgaggatgcattgtccattcgaagtgttggcagtcacaggcttaagatctccttcagcgagacagccctgga

SEQ ID NO: 527089 - DNA, 82 bp, Homo sapiens
ggcgagtaagccagcggcaggaccagcgggcgggggcccacgacgccgtgccgtccctgcagtgacaccgaggtgctcctag

SEQ ID NO: 527090 - DNA, 100 bp, Homo sapiens
acgacagaaggagaatgcagaccctcgacctccagtgcagttcccaaaaaatgcatccgatgcagatttatggctcctgaacagttgcactgtaaaaaac

SEQ ID NO: 527091 - DNA, 82 bp, Homo sapiens
agggaccccccccgcgcctgcacttagccccgcgcccgagatgtgaagttcatttccaatccgccctccatggtggcagcgg

SEQ ID NO: 527092 - DNA, 90 bp, Homo sapiens
cagtgccacccaaggagaagaaggtgtgtagaccacactccaaaactgaaactgtggatggcagccatgaaggaagatcccacagtctca

SEQ ID NO: 527093 - DNA, 100 bp, Homo sapiens
gccgtgctggatgccgtgatctccagcgccggcctcctcagtgcgaagaagctgcagccgcacctggccaaggatatcagttttagagaatgtggcgtgg

SEQ ID NO: 527094 - DNA, 89 bp, Homo sapiens
ggaaatgatacaattacctgcacgacacatggaaattggactaaattaccagaatgcagggcccatctgctggcaaggctaagattaga

SEQ ID NO: 527095 - DNA, 50 bp, Homo sapiens
agatatagccgttggtacaaagacttcccaagtaagaagcggaagaggag

SEQ ID NO: 527096 - DNA, 75 bp, Homo sapiens
agtggctaaagtatcaactatcaacttttcttgatgctggttctgtgaattatgccgaatataccaactctcctt

SEQ ID NO: 527097 - DNA, 75 bp, Homo sapiens
tttagggtcctttatatagaagggagagatgctttcattggatttggaggaaatgtgatcaggcaacaagtcaag

SEQ ID NO: 527098 - DNA, 87 bp, Homo sapiens
ggcggcccagctctctctgacacagggagtgcatccgccccaacccttttccccctcgtctcctgtgagaattccccgtcggatacg

SEQ ID NO: 527099 - DNA, 100 bp, Homo sapiens
agaatctggagtgaagcacaagggattgattgaaatacccaatctttctgaggaaaatgaagtagatgacactgaggatacattaattgtttggtcagaa

SEQ ID NO: 527100 - DNA, 82 bp, Homo sapiens
cgagtggggccgggcgttgtcacggcttcctgcctgacacagctcacttcaagaagtgcacaatgtcagaacgtggaattaa

SEQ ID NO: 527101 - DNA, 101 bp, Homo sapiens
ccggcggcggcgcgcagcgtgtcaggcggagagacccgccgccagttgggatgaatgggttccggagagcagagtactcaaatacgtggacaccaatttgc

SEQ ID NO: 527102 - DNA, 75 bp, Homo sapiens
gggaaggcagtcatggctagagcagatttggaacgcagggcctgtttgccagagtggagacctttggcgacttgg

SEQ ID NO: 527103 - DNA, 83 bp, Homo sapiens
acacaatttatcattgaataagtgttttaagaaagtggacaaagagaggagtcagggttaaagcacgaattgggagctctcag

SEQ ID NO: 527104 - DNA, 51 bp, Homo sapiens
gctctcttgatttcacacattgtgcaatgtggagccgccaccaaaatgcag

SEQ ID NO: 527105 - DNA, 98 bp, Homo sapiens
ccgcttcggccacgactgggatcctacgtgcatgaagatggacgaggtcctgtacagcatcgccgagaaggtagttccaatttgccagcagaatgagt

SEQ ID NO: 527106 - DNA, 83 bp, Homo sapiens
ctggacctggttctgccttctggacaatctttccgtatcccttttactattcagcgactatgtgaattgttaacagatccaag

SEQ ID NO: 527107 - DNA, 75 bp, Homo sapiens
cacacgggcgagaagccctacgagtgcaacatctgcaaggtccgcttcaccagctgatccaccttgagatcaagc

SEQ ID NO: 527108 - DNA, 140 bp, Homo sapiens
agaatgacagcaagccctactgagcgtgctcccctctgagactggagtgagagggtcttctggagtctatgaagatcgcgctgcagcacggggaccggccactgcaggcgctctgcctgctctgcttcgctgacatccac

SEQ ID NO: 527109 - DNA, 98 bp, Homo sapiens
gaaactgaagaggctctgggcaactcaccagaaatctaagggacactgtgttcctgaaaaataagaccacagcttgccaaagagaagattgaaggatg

SEQ ID NO: 527110 - DNA, 83 bp, Homo sapiens
cgacaagatacctctcgcatgtccacctcacaggctacttcacccccctcaacaccccacagagctatgaaaccctggaggag

SEQ ID NO: 527111 - DNA, 100 bp, Homo sapiens
ccggctgcagccccaagacagagcgctactcctggcagtgcgtcaatcagagcgtcctgtgcgcgctgataaagcagtttgtgtccgacgtggcctgggg

SEQ ID NO: 527112 - DNA, 90 bp, Homo sapiens
gctattaaaaccagggctccacagttaggaggatattaccttccaaatgatgatggagaattttatcagttctgttacgttacccataag

SEQ ID NO: 527113 - DNA, 82 bp, Homo sapiens
cccttgtggcgaatggggctcacgtcgattgataaaaatggtgatgtgtgcatttctattcttcatgagcctggggaagata

SEQ ID NO: 527114 - DNA, 83 bp, Homo sapiens
ggctgctcggcttccagctcaatcctgccggttgcgccttcttcctggacatgaccaactgataaacaggggtcacatgacga

SEQ ID NO: 527115 - DNA, 83 bp, Homo sapiens
ggctgtgctgcgcggcccccgcgcatgcaaacggggattcagcgtccgatcctttggaacagggactcacgtgaagcttccag

SEQ ID NO: 527116 - DNA, 98 bp, Homo sapiens
ggcgggcgagggcgactacgaccagtgaggcggccgccgcagcccaggcgcgggggcgacgacaggagctggatggcctgttggaaatcaaccgcatg

SEQ ID NO: 527117 - DNA, 100 bp, Homo sapiens
cgcccagtacctgcgggaggtggcccagccggtgtatcaatattcagtttgaaagagattcagttgcaaaaggacccgggttttcgaaattcttcttatc

SEQ ID NO: 527118 - DNA, 96 bp, Homo sapiens
aaatgctcgtgctacctgccctggccctgctcagcgccagcggcactggctccgccgcccaaggaaaccacccctactcctaatcccccgactaca

SEQ ID NO: 527119 - DNA, 101 bp, Homo sapiens
tccttgtgataacggacaatcaggaaatgagtgatcagcagctggactgtgccttggacctaatgaggcgcctgcctccccagcaaatcgagaaaaacctc

SEQ ID NO: 527120 - DNA, 100 bp, Homo sapiens
tatgaagtcagtaatactgaatttgagaagtttgtgaactcaactggctatttgacagaggtggtccagcatgacccatgtcggggcggagcagggtatt

SEQ ID NO: 527121 - DNA, 74 bp, Homo sapiens
gcagttttgccaggtgtttgttaccttggctgcgggcctctcgggtgcttcttgtcggcttgaaaggacttggg

SEQ ID NO: 527122 - DNA, 100 bp, Homo sapiens
ctgctctgtggaagaaatgggcatgccagatgcctggaagatcagaggctcacattccaggtgagaattatgaagatgatgacctagtaaattctgatga

SEQ ID NO: 527123 - DNA, 101 bp, Homo sapiens
gctattacactcgtattctgccctctgtgcctaaagattgccccacacccatgggaaccaaaggtatgaatggagagtgttggtgtgaaacaagatcttcg

SEQ ID NO: 527124 - DNA, 98 bp, Homo sapiens
aagagcaatgcactaaaggagagaagcaatccagactccaaaatgatgcaaatcaacctgactggatttttgaatggaaaaaatgctcgagaatttat

SEQ ID NO: 527125 - DNA, 101 bp, Homo sapiens
tcggcagcggcacctacggggacgtctataagagttgctggagaatgtaaccctaatccataaaccagtgtcgttgcaaccccgtgggctgatcaataaag

SEQ ID NO: 527126 - DNA, 83 bp, Homo sapiens
tgaaccatttgtctttagtcttggcaaaggtagatcgacacttgagaaagctggatcaggaactggctaagtttaaaatggag

SEQ ID NO: 527127 - DNA, 75 bp, Homo sapiens
ccaagagcatgaaagaagtatggcttatggactggaagtggatgctttggaagaattaagcaggcagctttttct

SEQ ID NO: 527128 - DNA, 75 bp, Homo sapiens
aggacgcctcacagctcatctttcctaaaggtatctgtgcctaggtttgctgtggggattgtaataggaagaaac

SEQ ID NO: 527129 - DNA, 100 bp, Homo sapiens
cagttccttcccaatggcaactatgtttggatgttggatctacactttctcaagcactgtgatcttcaaatctgacattatctctacggtagaattcaac

SEQ ID NO: 527130 - DNA, 50 bp, Homo sapiens
tctatactgaccttattcctggatgaaaccctggcccgccagttggtgga

SEQ ID NO: 527131 - DNA, 75 bp, Homo sapiens
ccggaaacgagtaggagacaatgacttcctggaggtcaggcgttcccacagctgtgcagaacttagcgccacgcg

SEQ ID NO: 527132 - DNA, 83 bp, Homo sapiens
ccgagatgccgggggagcggggccttccacaccccctccgtgggtgtgtgaattcagaaggagctggcggacatcactttaga

SEQ ID NO: 527133 - DNA, 51 bp, Homo sapiens
acctggggcccaaagggaccataaagatcacgtggtgaggtgtgtatggct

SEQ ID NO: 527134 - DNA, 83 bp, Homo sapiens
ctgagaggaactgagacccaagcagctcagtaaagtactgctataaccagaatttggtagaaaaaggatttacttgttggggc

SEQ ID NO: 527135 - DNA, 99 bp, Homo sapiens
ccggcggagcgcgcagcgggggctgcagggccatgaagcccccaggaggagaatcgagcaatctttttggaagtccagaagaagctactccttccagca

SEQ ID NO: 527136 - DNA, 100 bp, Homo sapiens
attccaagtaactcttatttgggattcgggttcgtaactttcgagaatagtgctgatgcagacagggccagggagaaattacacggcaccgtggtagagg

SEQ ID NO: 527137 - DNA, 74 bp, Homo sapiens
gttggaagcagccgatccagcctgcggagcctgtggggcaggagtccaaaactacttacctggaagaccttcca

SEQ ID NO: 527138 - DNA, 101 bp, Homo sapiens
gtgaccacgggtgcagacagcaatggtgagatgagtcccgcagagctgctgcacttccagcagcaacagaacgacaaatcctccacccctgggctcaagtc

SEQ ID NO: 527139 - DNA, 50 bp, Homo sapiens
caagaccatcactgacgagtttgagcaggagctgggcaccaccccatggg

SEQ ID NO: 527140 - DNA, 50 bp, Homo sapiens
gagaacttcaaccaggcactcaagtactttaggaagaatcatcaaagtaa

SEQ ID NO: 527141 - DNA, 109 bp, Homo sapiens
ggaagcgaagccgaaaaaggcagcagcgaaggctaggcagctggaagagaaagaccgagtgctaaagaagcaggatgcattctacaaagaacagctggctagactggag

SEQ ID NO: 527142 - DNA, 98 bp, Homo sapiens
ctcggtgaaatcctgtcctgaagactgtaaggttacacttccaggggctccccactcagtccccagtcatctatcgacagtgagctgagtacttcaga

SEQ ID NO: 527143 - DNA, 100 bp, Homo sapiens
cttcagtctgcaagtatggagctcaagttcttaattattcagaatgctgcggttttccaagaattcttcaacgacctggatctgctcatggggccggtca

SEQ ID NO: 527144 - DNA, 102 bp, Homo sapiens
ggaatagttcaactacgaatactaagaacccaggaacgggattttccaacagaaaccattaaatttggtcctgaacgcatgtatattgattgctgggtaaaa

SEQ ID NO: 527145 - DNA, 76 bp, Homo sapiens
gtgatgatgccctattcgacagaactgatattttatattgaaatggatcctccagaaatatggctacacacacctt

SEQ ID NO: 527146 - DNA, 83 bp, Homo sapiens
cgcgcgcagggcctgcagcgggagctggacggcgagcgcgagcggcgcgagaaaatttaaggaacagtgacaccccaccccag

SEQ ID NO: 527147 - DNA, 50 bp, Homo sapiens
cagccccgcctcaacagcatcatgcaggccctggccaacgtcaacattgg

SEQ ID NO: 527148 - DNA, 95 bp, Homo sapiens
caagcactttcactgtggcaaaaatttcgggacttgagcattgaagagtacattcgggtttacaaggttgggataattcttcactattccaccct

SEQ ID NO: 527149 - DNA, 95 bp, Homo sapiens
cctaataaagatgaggaaggctccagcctgaagcgtgggtgaggtgtccagctgcccaaaggcgacagtgtttgggaaatgggaagtaatgacag

SEQ ID NO: 527150 - DNA, 90 bp, Homo sapiens
cagccccccagggaccgtctccgccctccaggaaaccaaggctctgacgcccgctctgcggcttcggtgtttgaacaggccacagtccag

SEQ ID NO: 527151 - DNA, 82 bp, Homo sapiens
gcgtgaccgagagcgcgaatatcgtcatcgttagaagatttccatggagaatgattatctgggacctcgaagaattgagagt

SEQ ID NO: 527152 - DNA, 100 bp, Homo sapiens
tggaagaaccattgttagtgaacgtggacaaagctgttgtctcagggagcacagaaggaggagagagcgatggcttttttcacccagaaggccagcccca

SEQ ID NO: 527153 - DNA, 83 bp, Homo sapiens
cgtgattgcgttacaagctttgtctccttcgacttggagtctttgtccaggacgggagttctgggaaatcgttcattcattta

SEQ ID NO: 527154 - DNA, 75 bp, Homo sapiens
cgcagcccgacgtggcgctgcacgcacggccggccaccagcaccgtcacaggtgccatgcctctgcaactcctcc

SEQ ID NO: 527155 - DNA, 100 bp, Homo sapiens
ttaagcagctaaccagcagctagccttgtagctacagaaggtctaccctgaactgcagatcaccaatgtggtagaagccaaccaaccagtgaccatccag

SEQ ID NO: 527156 - DNA, 75 bp, Homo sapiens
cgctcttcggcaacccgaagccacaggatggaggagggggatcccagcaaaggtgccttcaggacaacaactggg

SEQ ID NO: 527157 - DNA, 100 bp, Homo sapiens
agtgatggtgacatcaatgaaaggagggttctgacacgttctcacctcgcgggatggcagctgctgatttgtcccatgagatggggtctcaccgtgttgc

SEQ ID NO: 527158 - DNA, 78 bp, Homo sapiens
tggtgaatcccctgtttgagaaaaggcctaagaattttggcattggtgccgtgagcgatgtggagatgcaggaacact

SEQ ID NO: 527159 - DNA, 98 bp, Homo sapiens
tgctgatgtctggaggctgattttcctgttctctgttctccactggaaaggttggtcaaagtcactctgtacggatctcagataaaattgtacaacat

SEQ ID NO: 527160 - DNA, 75 bp, Homo sapiens
aataagctatatactttggttacctatgtacctgttaccactttcaaaaatatcagttttagagaatgtggcgtg

SEQ ID NO: 527161 - DNA, 83 bp, Homo sapiens
cagagactgaggacttaaatgaagccactgattagcaatttaaagatcctctccaagcccagaaaattcatctgaacagcctt

SEQ ID NO: 527162 - DNA, 78 bp, Homo sapiens
taaactgcttgaacatcctttgactggttagccaggcctctccttccgatgaaaagagaaaggaagaatggactacag

SEQ ID NO: 527163 - DNA, 100 bp, Homo sapiens
ccaaaatccaggggatcaagagagtaaagtggagtcttggttttctctcattatgccttttgcaacggttatcttttttgtcatgatcctggatttctac

SEQ ID NO: 527164 - DNA, 75 bp, Homo sapiens
ctcgtcagactcggagacgtctgacagtgacgatgagggatgaacacattgctttctgctcccattcatacccag

SEQ ID NO: 527165 - DNA, 74 bp, Homo sapiens
acccccgagaagtacttaaaaaaacattggaattctgcttatctagatttcctccttcttcacccctgaaacca

SEQ ID NO: 527166 - DNA, 75 bp, Homo sapiens
ctggaccttgtctgatggcttcctccaaccctcctccacagcctgccatagtctgcagatctccaggggagccca

SEQ ID NO: 527167 - DNA, 95 bp, Homo sapiens
ctgatgctctctctccagtccttgctgaagagactttccgttacatgactggaccagctattccttctgttgtggcgtatccgaaaaggagtcag

SEQ ID NO: 527168 - DNA, 96 bp, Homo sapiens
ccaggaggaagggcagcttggcagagcctcagtttttgaaatcatgaatcctgtttatagtcctggatcttctggggttccctatgcaaatgccaa

SEQ ID NO: 527169 - DNA, 75 bp, Homo sapiens
aaaagctgctacttatggaagatacaaaggttgaatggatcgcagcagttaccattgctgctgggacagctgcaa

SEQ ID NO: 527170 - DNA, 75 bp, Homo sapiens
tccatgacgcagaaactggagaatgttctgaacaacagtaaacacagtggatcattcccattctactacagtgga

SEQ ID NO: 527171 - DNA, 101 bp, Homo sapiens
agcggtgcctgagcccgtgcctgtcttcagatcttcacagcacagttcctgggaaggtggagccaccagcctctccttggcatagaatgtcaagctaacca

SEQ ID NO: 527172 - DNA, 100 bp, Homo sapiens
gtggaaatgaacttcacaagttcctcatctgggacactgctggtcaggaacgggaaacttttgagaagaactttgaaagagaaacccataaaataagtga

SEQ ID NO: 527173 - DNA, 75 bp, Homo sapiens
gggagatgactttttgcattgaaacggactggccacctctctgggccctcagggatgctgctgtccggacccctg

SEQ ID NO: 527174 - DNA, 98 bp, Homo sapiens
tctgtcgtttgaatttaggaccacctcgggaccacttaatagtgagtcttccaaccagagcttgtgcagcgtcggatccttgagtgataaagaagtag

SEQ ID NO: 527175 - DNA, 75 bp, Homo sapiens
ttgtcaaggacttcttgaaaggcaacattaagaaggagctgtttaaggtctgctcaccaggtggccagataccgc

SEQ ID NO: 527176 - DNA, 87 bp, Homo sapiens
aacgtggagatcaactcctctctgttaatggagtggtagttttggatgttgggtgtggaactggaattctctctatgtttgctgcta

SEQ ID NO: 527177 - DNA, 48 bp, Homo sapiens
ggggtgtgcaaacccgagagaactggagccggggccatccagtcttgg

SEQ ID NO: 527178 - DNA, 87 bp, Homo sapiens
agcaggccagccgatgaggacatgtgggatgagacggaattggggctgtacaaggaccctgatgctcccataagacagaaaatgccc

SEQ ID NO: 527179 - DNA, 49 bp, Homo sapiens
ggagacagccgggcgctgcaaggtatgcagtgccattcagaatcaggat

SEQ ID NO: 527180 - DNA, 75 bp, Homo sapiens
ctggggcgcagcacctacatggagacgtatgtgtacttctatcggattctcccagcaacaagctgctgtacgcca

SEQ ID NO: 527181 - DNA, 82 bp, Homo sapiens
ttcggcagtccacccaccgccgccgcctcccaggtccctgaggactttggccctgtgcgcaccgtggcagagggccacggag

SEQ ID NO: 527182 - DNA, 96 bp, Homo sapiens
ggaaccccaccaagtaggactgatcaggtcttacaattctaaaaccatgacctgtggaggcaaatacatgcaggcggtgattcagtatgggaagat

SEQ ID NO: 527183 - DNA, 100 bp, Homo sapiens
ggtacatatgacacagaaggtgtgaccccaacgaagagtggagaacggcaacccatccagatcaccatgccgttgatgcggatgaaattaaaaggctagg

SEQ ID NO: 527184 - DNA, 100 bp, Homo sapiens
aggtatggtgctgggtgcagatgcagtgtggctctggatagcaccttatggacagagttgatctctctaatgtattagatcttcatgcctttgatagtct

SEQ ID NO: 527185 - DNA, 101 bp, Homo sapiens
gtcaacacgcggtacctgaacctgcaagagaacggcatccagccgaaggtggtctggatgaagaacaagatggaaatccgtgaagatcccaagttcctgat

SEQ ID NO: 527186 - DNA, 98 bp, Homo sapiens
ttgagcacggcgagcagtctcaggcctttagtgatgatgtgatggaatggggagaagatattaaagcagtttcaaaagatgaagcagtgatgttggtg

SEQ ID NO: 527187 - DNA, 100 bp, Homo sapiens
ggttggtgtgattagcttcgcagtctggaaagctttaggagttcacagtttcaggagcgccttacaaaacaaattgctgtagcaatcacggaagccttgc

SEQ ID NO: 527188 - DNA, 76 bp, Homo sapiens
tggacacactgcctgctcttccattggctggatctctgctctggtggtgccgaagggcaacacagcagtatccgtg

SEQ ID NO: 527189 - DNA, 75 bp, Homo sapiens
ctgaggtggcagcggcaggagagtccggccgcgacaggacgctccatgatgcgttatctgggtctggaaacccaa

SEQ ID NO: 527190 - DNA, 82 bp, Homo sapiens
gactttgtggccccttcaaggccgtttgtggtctactgtcagtacaaagaggaattaagtagactggctggacagattcgaa

SEQ ID NO: 527191 - DNA, 96 bp, Homo sapiens
gagagcgcgaatatcgtcatcgttagaaggggctttgaccacgacctttgaagagcttcattttgagatcaagccccacgatgactgcacagtaga

SEQ ID NO: 527192 - DNA, 96 bp, Homo sapiens
ccggaagcggagagcggctgatcgcagtccggaggtgaggcggaactctgagtgattcgcctttgccagtctcatctcgtgtctgctttgttaagt

SEQ ID NO: 527193 - DNA, 96 bp, Homo sapiens
gaaaggtctgccttacaagggacaccatagcctctcaccctaagggccataggaaaaggatacagagtagagtttcatgaacctgaaacttggtgg

SEQ ID NO: 527194 - DNA, 82 bp, Homo sapiens
tccgtggccttagctgtgctcgcgctactctctctttctggcctggaggctatccagcgatgccggctccaggagcagcagt

SEQ ID NO: 527195 - DNA, 83 bp, Homo sapiens
agaaaaagcatccccgaggaggaagacgaatcgttaaacatcttaggtcagtgagatggaagattttcgaggtatagcagaag

SEQ ID NO: 527196 - DNA, 100 bp, Homo sapiens
gctagcgacatcactgatgagcagaaaaaggttcgggaggctgacctagtgatatttcagcaaccatgtccaagggacctgcagttggtattgatcttgg

SEQ ID NO: 527197 - DNA, 83 bp, Homo sapiens
cgaaggccaaggaatcactgaagatcggcgagggaggacagggggttcatcatggacaatgcagatcttcgtgaagactctga

SEQ ID NO: 527198 - DNA, 100 bp, Homo sapiens
ctccacatcaccgacatgaagggaacaggcatcatggactgtgcgcccaagtgcactcactcttgaggatgagaaaagaatgctgtcatatttgattaat

SEQ ID NO: 527199 - DNA, 100 bp, Homo sapiens
agctctttcgaatcaagttgtccccaacagtgggttggatggcaagcatgtggtgtttggcaaagtgaaagaaggcatgaatattgtggaggccatggag

SEQ ID NO: 527200 - DNA, 100 bp, Homo sapiens
tgttatgatggtcttactttatttcttctacaaatggttggttgaagatggggaagtatttgatttcagaggaatgagattagattggtttaggttacag

SEQ ID NO: 527201 - DNA, 98 bp, Homo sapiens
cggggcccgccgccgctcaccgcagccccctcctggcgacccgcaacttccgacttcgactccttaccttaaaagatgctggagtcatatgtaactcc

SEQ ID NO: 527202 - DNA, 101 bp, Homo sapiens
gggcagaaaagatgacagccatggaagcagagctcaaaggactgaagtacatatccatttttaaggcaactgtaaaagatgacatgcaaaaagctaaaact

SEQ ID NO: 527203 - DNA, 50 bp, Homo sapiens
cgtgaggccgtggatgcaggcattaaggaatgttttaaaggaagttgggc

SEQ ID NO: 527204 - DNA, 119 bp, Homo sapiens
agtctccagcgggcctggactgtgggctggtgtgtggaactggtctcagccttagatccaaggacagtccaaggaagtcctaagaccatggagttggtgatctgggatctgggtttgct

SEQ ID NO: 527205 - DNA, 75 bp, Homo sapiens
cagctgccacctgcctttgacctttttgaagcctttgcaaaaacttacctcaacacttcactccatggcagttcc

SEQ ID NO: 527206 - DNA, 99 bp, Homo sapiens
ggggcctgtgcggccgcccggcccggccgcggatcaggtatatgttgtcggtggctatgatgggcaaaacagacttagcagcgtagaatgttatgattc

SEQ ID NO: 527207 - DNA, 100 bp, Homo sapiens
gggtgactggaggtggctccccagtctaacaaagtgccagtggtgcagcaccctcaccatgtccaccccctcacgcctcttatcacgtacagcaatgaac

SEQ ID NO: 527208 - DNA, 141 bp, Homo sapiens
atatctcactgatccagtttctgatcctgagtttttcaagggatgccgtggaaaggaactgacaggaagcactacttgcagccatcagtgaaaaagatgcaaacattgccttgctggaattgtctgcctccaaaaagaaaa

SEQ ID NO: 527209 - DNA, 101 bp, Homo sapiens
gcaagtacccgtccatcatagtcaactgcgtggaagagaagatgacttcccagaatctacaggagtaaagcgaattgtccaagccctgaatgccaatgtgt

SEQ ID NO: 527210 - DNA, 80 bp, Homo sapiens
tgtacagcaatctcctcctccactgccactacagggaagtgcatcacatgtcagagatggtggccacacagcaggagatg

SEQ ID NO: 527211 - DNA, 75 bp, Homo sapiens
gcctgctcccggagggagacgcgctgccgaggagaacccagcgggagctgggaatcccaagtgcaaaattgcaat

SEQ ID NO: 527212 - DNA, 50 bp, Homo sapiens
agcggcagcagccccagcctcaaggccagaactacacgcagtacatccct

SEQ ID NO: 527213 - DNA, 50 bp, Homo sapiens
ctttgattctccatatcacctacagaaagtgactgagaccgaagatgata

SEQ ID NO: 527214 - DNA, 75 bp, Homo sapiens
cttatggtaatgtcggccattgagaaattgttgaggcagatctacgactctggctccactgattaccttaaccat

SEQ ID NO: 527215 - DNA, 74 bp, Homo sapiens
aagaagcagtgcctgctgcggctgggggtgctgcgccaggtagacaagggcgtggtccccctggcagggacaaa

SEQ ID NO: 527216 - DNA, 98 bp, Homo sapiens
ttagagccagcaaggccaaaccgcccagtcacccgacttcccacagtctcagcagagcaaggtccgtggtcctgtcagtggaagcccggatagcatga

SEQ ID NO: 527217 - DNA, 83 bp, Homo sapiens
cagggagccaagcgtcctgcccggccgaccttcctgcagacggtgagcagtgagaaggtccgctccactaatctcaactgctc

SEQ ID NO: 527218 - DNA, 99 bp, Homo sapiens
aggaagtactgagcctgttggaggaactggcccggaaacaggaggacggcattttggaagtgtcaaaggccagggacatccctgttgtcatcgacgcgg

SEQ ID NO: 527219 - DNA, 100 bp, Homo sapiens
gtttatgagtcgcaccaaccggccgcctctgtccctttcccggatgagcttagaaaccaagatagccaagtggaacctgcaatcaagaatgaataagaat

SEQ ID NO: 527220 - DNA, 83 bp, Homo sapiens
atttaggacgtggaatcataagcgaaacagcacactgtttgaataaagagcgagtcggcgattgtggaaaaatgtgacagact

SEQ ID NO: 527221 - DNA, 49 bp, Homo sapiens
cacctcctgacacaacaccactcataaaataaaacagggtctgttacct

SEQ ID NO: 527222 - DNA, 98 bp, Homo sapiens
ttgaacggctctttactatgcgagggcctaacaatgccactctggccttctccagaagcaaaaggagttggaaagtagtctcctgcctttagctgaaa

SEQ ID NO: 527223 - DNA, 96 bp, Homo sapiens
tggggacacgccaaacctgagtttctacagaaatgagatccgcttcctgcccaacgatggattaccgggccttggtgcatgagcgagatgaggcag

SEQ ID NO: 527224 - DNA, 75 bp, Homo sapiens
cgacctggacctgctggctcagcccctccctgcagacggcgccggcgcccagaatagcctaacatggcagaccag

SEQ ID NO: 527225 - DNA, 98 bp, Homo sapiens
agagcgctgcaggcagccagaaggaagtcaccaggagactaaagtccatcaaaaacatccagaaaattaccaagtctatgaaaatggtagcggcagca

SEQ ID NO: 527226 - DNA, 75 bp, Homo sapiens
gtcaggccaagccttctgcctgtgatggagtgggaatagctttgcgaaaaatgggcgcaatggccaagccagatt

SEQ ID NO: 527227 - DNA, 100 bp, Homo sapiens
ctgatgaagacctcaaactttctgatcttttaaaatattacttaagagaatctcaagctgctaagactctgttacggcatggtgcaaatccagatctgag

SEQ ID NO: 527228 - DNA, 100 bp, Homo sapiens
gtgatcttgatcctgacgaagtactaccacgcagacatggggaaggttctggaaagttctctgtggcgtcctcccaaaccgaaggaccctgtatctgcag

SEQ ID NO: 527229 - DNA, 90 bp, Homo sapiens
gccacccattgtgtcttctcaagaaggcggccttctgatctgtttaccacgtgagcaagcagctcggttctgtgcagagataaagtcccc

SEQ ID NO: 527230 - DNA, 100 bp, Homo sapiens
ggcggttcccgttccaccgcggagccggatgtttgccgagccttgacaggcgtggcagagggagcagtgcccgagcgcgacggagtctcactctgtcgcc

SEQ ID NO: 527231 - DNA, 100 bp, Homo sapiens
aatgatgagacgcgtgtgaatgcaacgatggaagatgtgaatgactggctgactgaactcttgctcatctctcagagatctagaacttgcctaccaagta

SEQ ID NO: 527232 - DNA, 100 bp, Homo sapiens
tatctgagggagaagcacaagatcatgcacagaggctactgggaacgttatttggaaacattcctgtggaaaaccactcttctcttccccacaatgttgc

SEQ ID NO: 527233 - DNA, 82 bp, Homo sapiens
ccggcagctggcgctggggatccctgctcttcgctctcttcctggctgcgtccctaggtacaccagaggatcgcttcctggc

SEQ ID NO: 527234 - DNA, 75 bp, Homo sapiens
agcaactccagcctgtccggctcgtcggtgtcctccgattcccaaatgctggaaaatcctctttgctaagttgtg

SEQ ID NO: 527235 - DNA, 82 bp, Homo sapiens
gctgggcaatgacatctacgtgacggataacgaaggaggcccaacttcattcaataaggagcctgacggatttatcccagac

SEQ ID NO: 527236 - DNA, 101 bp, Homo sapiens
gtggtgaaccagttcccatttctgaagaatctgaagagctggatcagaagacattcagcattgtcattcccaaaagcaagttcgtcttggtgaagttcgac

SEQ ID NO: 527237 - DNA, 90 bp, Homo sapiens
ccaaacctgtgataacctgtctcaaaaccctcctcatcatctactccttcgtcttctggattggaaacctggaagattactaccattttt

SEQ ID NO: 527238 - DNA, 91 bp, Homo sapiens
ggaagatgaggaggtcgctgagagctgggaagaggcggcagacagcgggatggctatatgcatccagttcatcctcatgtagttagaagac

SEQ ID NO: 527239 - DNA, 100 bp, Homo sapiens
tagccgggatagagaggagaaacaggatgtggacgttgatctctcagccaaaatagctgatcagcttccttgggttttgctgatgacacaagagagcttt

SEQ ID NO: 527240 - DNA, 100 bp, Homo sapiens
aagtgacgcccttggagtgaggcgagcagcacagagacggctgaaagctgagctaggaattcccttggaagagttagtgtgactctggatccagatacag

SEQ ID NO: 527241 - DNA, 100 bp, Homo sapiens
ccgtccgtccgccgccaccacccactccggacacagtcctgtgcctcctgattgctgagtgttcacctggaccttctgactaccttccctgtgctattcc

SEQ ID NO: 527242 - DNA, 82 bp, Homo sapiens
gaagaggcctgcagtgggagagcagggattttttatcaagcagaaatgcatcgaacaacgagaatcaagatcactgagctaa

SEQ ID NO: 527243 - DNA, 100 bp, Homo sapiens
ctcagagatgcctgtaccgtgatgtgacgctggagaacctggcacttatatcctccctgggtgtcatggagaaactccagctgggcccagagattctgca

SEQ ID NO: 527244 - DNA, 83 bp, Homo sapiens
cgccgctgtcgccgccacctcctctgatctacgaaagtcatgttacccaacaccgggatttttagactctgaggagcagttgg

SEQ ID NO: 527245 - DNA, 101 bp, Homo sapiens
gtcaccagctgctcctccgtcttctcaggagaccagctggtccaacgctgaagccgacgtagcttctctgaacagacgcatccagctggttgaggaagagt

SEQ ID NO: 527246 - DNA, 83 bp, Homo sapiens
attcggtggaacgaggacgcggactgcgaaggcagggtgaggtggctttgaccccgggttgcccggccagcacgaccgaggag

SEQ ID NO: 527247 - DNA, 89 bp, Homo sapiens
taaactacatacaggaaattggaaatggctggtttggaaaggcctatatgaacccaatagcaatggcgagatcaaggggtccaatccag

SEQ ID NO: 527248 - DNA, 101 bp, Homo sapiens
tcaccctgcttgagcaaaggaagtttgagtttttggaagatggaaaaggaaatatgaattgtgcttattttcataatgggaaaatgcaccctaccttctgt

SEQ ID NO: 527249 - DNA, 98 bp, Homo sapiens
gggaagatggcggctgggttcaagtatcacagcctgtacctgaaggtgaaggggaatgtgttcaaaaacaagcggattctcatggaacacatccacaa

SEQ ID NO: 527250 - DNA, 100 bp, Homo sapiens
cctctttctttttccctgtggctcagcccgttcgctggactgcaaaccgagctcccgtctgccttgcagtgccccaggatctgatggacgtctctgtaag

SEQ ID NO: 527251 - DNA, 74 bp, Homo sapiens
aaaaggcctaagaattttggcattggccctccctatcctgaagacattagctgagagtctggcaccttttaaag

SEQ ID NO: 527252 - DNA, 100 bp, Homo sapiens
tagatcatgaaagagatcctggacctatgaatatccagtttgagccatcggatctaagatccaaaagattgctacgctttacatatggtccttcatttcc

SEQ ID NO: 527253 - DNA, 75 bp, Homo sapiens
agcctctggcaggaggaagcccagaagcaacaagccctggtgctggagaatctggtaaaagcaccattgtgaagc

SEQ ID NO: 527254 - DNA, 100 bp, Homo sapiens
ggactgcaagtatacataccgtgcctgacgaaatatcacaatatttggatggatagaatgacagaagatgctcttcgcttgaatctgttgaagcggagct

SEQ ID NO: 527255 - DNA, 80 bp, Homo sapiens
atcccactcttctctggttccgagatgggaaaaaggacaccacccccgacgagcttctctcggcagtcatgaccgcggtt

SEQ ID NO: 527256 - DNA, 50 bp, Homo sapiens
agaagatcctgctgcccgagcccagtattctaccttgtaaatactgttat

SEQ ID NO: 527257 - DNA, 100 bp, Homo sapiens
ttttgtctctgctgggcctgtgtgcctggaaaggaattgttttggcctaggatcatccaggacaaagcagttccaattccagagaaaatgagtgaatggg

SEQ ID NO: 527258 - DNA, 100 bp, Homo sapiens
agaaaggaggctgtgaagaaagtgattgctgctatgaccgtggggaaggatgttagtgctaccaggatatttgcgatgtactctggaatccctctggaag

SEQ ID NO: 527259 - DNA, 82 bp, Homo sapiens
ctcctcccagtgacgggtctggagtgcgtgggggaccggctgttggcggaacccccagacctgactccggaggagcggatgg

SEQ ID NO: 527260 - DNA, 50 bp, Homo sapiens
tctacaggcgctgacggccacccctccagacatgggaaagcggaaccacc

SEQ ID NO: 527261 - DNA, 75 bp, Homo sapiens
atccaggaggaggagttgcagagtgcacttggaggctcctcagctcttcatatcccagcttttccaggaggagga

SEQ ID NO: 527262 - DNA, 100 bp, Homo sapiens
ctcttcttgggaacctacacctcttccatggctctgaaaaaattcaaaactagtccttattttccaaccacagatgttgagaaagaactggagatgcaga

SEQ ID NO: 527263 - DNA, 100 bp, Homo sapiens
tcctggcagctgagcccagtctggcagcagagtggagagatctacagaccaagtaatcaagccagtcaatgtaggagctctatcaaaatgggttgggaag

SEQ ID NO: 527264 - DNA, 100 bp, Homo sapiens
tccaacccatcaaatcaatggattttttaccattgtttcatcaacgtctaagaaacttggagaactccagctatatgttctcctttcagccaagaccttt

SEQ ID NO: 527265 - DNA, 101 bp, Homo sapiens
agctgcacaggctgcagccaccgcagctgccatgacggggtctggctctgtcacccaggctggagtgcagtggcacgattatggctcattgcagcctcgac

SEQ ID NO: 527266 - DNA, 50 bp, Homo sapiens
agcggactcttcttcgccttcgacctacagcctggctcccgcgacgccgg

SEQ ID NO: 527267 - DNA, 100 bp, Homo sapiens
gatggaagatagcttgaacagggctgacaacatttttccttttccgaaatattcccaagagactctaacttaaaagacaaattcataaagcatttcacag

SEQ ID NO: 527268 - DNA, 75 bp, Homo sapiens
ggaaaatgaagaaggaacgatctcgtaagaaggattcaaggagaggagacgccgtgagcgggacgaccagatgta

SEQ ID NO: 527269 - DNA, 100 bp, Homo sapiens
gtcagctagtatgcaggctaggcaaactggcactccacagaaggatgttattatcaagtcagatgcaccggacactttgttattggagaaacatgcagat

SEQ ID NO: 527270 - DNA, 95 bp, Homo sapiens
gctggtctttctcaacctcatcttctgggtttggtgcacctcgatttggaggaagtagggcagggcccttatctggaaagaagtttggaaaccct

SEQ ID NO: 527271 - DNA, 95 bp, Homo sapiens
tcagaaacacaaagctgttcttttcaaaatggagatcctgcatattttgatgaaaattggctaaacagaatcaaaactgaagtaggagataattg

SEQ ID NO: 527272 - DNA, 96 bp, Homo sapiens
ataccgggagactccctcgtgtccccatgtgggccacctaccagacagaagaggtggcatggaatattcacatgggagagccgcatgaggccgccc

SEQ ID NO: 527273 - DNA, 98 bp, Homo sapiens
gacaacagactctccaaccccagttgctttgccagcctggctgggctcaggagaatgaatactggattggaaaagctcaaagaagcttcagagtctgt

SEQ ID NO: 527274 - DNA, 98 bp, Homo sapiens
gtaagatactgtgcctttgctccagggcatttgtggattgtggacatcggatacccaaggagacgaagctgaagcaggagaaggaggggaaaattaac

SEQ ID NO: 527275 - DNA, 88 bp, Homo sapiens
cgtcccctgtcctgccatctgctctgaggctttctcgcttgtctctcaggctgtgggacagatgatgtctaccatgttctacccactg

SEQ ID NO: 527276 - DNA, 100 bp, Homo sapiens
gaaaaatccttcttagccattttaaagaataaagccattattgcccgtgtcacaaccttgtcagatgtagtagttggtctggaatcatttattggttctg

SEQ ID NO: 527277 - DNA, 136 bp, Homo sapiens
gccaggaagcctgtcgaggcggaaagcgtagagggagtagtcaggattctcttggaacattattacaagatgtctactgttgtggagctgaacgtcgggggtgagttccacaccaccaccctgggtaccctgagga

SEQ ID NO: 527278 - DNA, 82 bp, Homo sapiens
gcgcgtttcccgcctgagcgcaactagcggcgggtcgtgggcacctccaggttggctcaaaaacagaagttgctgagtgcaa

SEQ ID NO: 527279 - DNA, 83 bp, Homo sapiens
ctgcggggcacggccaaccgcctgttggggttcgggggcggcggcgaagcccggcaggtggtattaaagataatcaaacatta

SEQ ID NO: 527280 - DNA, 100 bp, Homo sapiens
ccacggccatcctcactcaggactccctgcagatgttcctgccccaggcaaccaagttgttaaaagccttgaaaggctacattaaacatgaggcaagaaa

SEQ ID NO: 527281 - DNA, 74 bp, Homo sapiens
gagttccacatcagtgtcatcaggctattcagcttgaccctgaagaaactcgtcatgctaaaagaaatggacaa

SEQ ID NO: 527282 - DNA, 75 bp, Homo sapiens
tatccaacaagaaaaagacctgtggctattaagataggggatggcattcctactgtatttgtggcagtggcaggc

SEQ ID NO: 527283 - DNA, 101 bp, Homo sapiens
tctttcttaaaggactgatttttagaactccacatttgagcctctcaacattgcctacagccacatctacagctcctacaggaatttcgtggggccacctc

SEQ ID NO: 527284 - DNA, 100 bp, Homo sapiens
ggctccgcgaggaaaacgagggcgtgtataatggaagctggggaggccggggagagatttcaggtatgctgctgaaagtgggaatcctctacattggtgg

SEQ ID NO: 527285 - DNA, 75 bp, Homo sapiens
attcggtctccagatttagtgaggagttttgagagcaaaatgacaacacccagaaattcagtaaatgggactttc

SEQ ID NO: 527286 - DNA, 100 bp, Homo sapiens
gacacttttgcttgcagttaggtcaagtggaggctgttcggctcttgaatcccagcgatgaaaccaggaactcactttcccgggatgccgagtctccatt

SEQ ID NO: 527287 - DNA, 100 bp, Homo sapiens
agctgttgaatatgctccagattatcaaagcttttggacttgaaattaaatggtggcagacatgtccaaggaatattgcggggatttgatccctttatga

SEQ ID NO: 527288 - DNA, 100 bp, Homo sapiens
cttccaggttacatacagcttacatcttgcatcctcaagcggctgacaaaccaagaggatttgccagaggtcttgatcctgaaagaataattggtgccac

SEQ ID NO: 527289 - DNA, 73 bp, Homo sapiens
tgcaatatgagttcacccacttgggcctggacctgtacttggagcgttctgccctaggtccaaatgttaccaa

SEQ ID NO: 527290 - DNA, 113 bp, Homo sapiens
caggcacagcacgagagccgcacctttgccgtgtacctcaatagcactggctaccggacaggatctttcatgatggtgaacagctctgggagagcctctggccagaaggccca

SEQ ID NO: 527291 - DNA, 99 bp, Homo sapiens
aaatgccaaaggaattggttatccaggctcgttatcggaaagagcaaacattgcttaagcaactgccttgcattccattggtagaaaatttgttgaagg

SEQ ID NO: 527292 - DNA, 88 bp, Homo sapiens
atattaatgccagtttagttgacatagaagaggcacaaaggagttacatcttaacacagctggaagagaagactgagaacaagttggg

SEQ ID NO: 527293 - DNA, 98 bp, Homo sapiens
ggagctggtcatcagcctggagaagctggagaatgacaagagcttccgcggtgtcattctgacctcggaggcaacgcacgggccacaggcatgttcct

SEQ ID NO: 527294 - DNA, 75 bp, Homo sapiens
ctcatctgcagtccggactcatctagcctcggagttgctgggagcctgagcacctttcgtttttcggctcagaga

SEQ ID NO: 527295 - DNA, 83 bp, Homo sapiens
ccgaggactgcctccccacaccaccgaccaggacctggtgaagctctgtcaaccacaatgcagatcttcgtgaagactctgac

SEQ ID NO: 527296 - DNA, 102 bp, Homo sapiens
gagaatgactgaggagccattgatgtgtattggcgctgttccactggctgctttgggggctcctactcttgatcctgcccttgctgcacttgggcttcctgg

SEQ ID NO: 527297 - DNA, 100 bp, Homo sapiens
gggagccctgccctcctggttcggcctccccgcgcactagaacgatcttggcatatacagaagggctgcatggaaaatggctgttcacagagatacgatc

SEQ ID NO: 527298 - DNA, 119 bp, Homo sapiens
ttcgcgcgctcgcggaaccccgtggcttccccgacgcagcccagcggcacggagaaagggggggccctcagcctcttggccttgaacgggctgttcatcttgattcacaaacacaacct

SEQ ID NO: 527299 - DNA, 101 bp, Homo sapiens
ggccagcctctgcttggcatccccttgctggacagtggctgtggcacccccagccagaacacgcagtgccagccgtgccccccaggcaccttctcagccag

SEQ ID NO: 527300 - DNA, 75 bp, Homo sapiens
cctgggaatcctcatctccactcagcgggcccaggcaatgtggctgaaggtggggggcctacttcgggggaccgg

SEQ ID NO: 527301 - DNA, 75 bp, Homo sapiens
atttacttccagttccagaatttacgtcaacttggatcaaaatatattttgggaacatgtttgacaagctgaacc

SEQ ID NO: 527302 - DNA, 88 bp, Homo sapiens
ggcaactcctgcagttcgccgtctggcaatggaaaacaatcagcagccgctcttctaaaacattcaaaccaaagaagaatatccctga

SEQ ID NO: 527303 - DNA, 124 bp, Homo sapiens
ggggctgggcgcgctcccgcggagccggagccgcagaggctcccgggctggactcaggcttctcaggattttttatcaagcagaaatgcatcgaacaacgagaatcaagatcactgagctaaat

SEQ ID NO: 527304 - DNA, 100 bp, Homo sapiens
aaatcatattatagatggagtaaagagcaaccggctgaccaagatcgagggtctgcagaacctggtgaacctgcgggagctgtaccttagccacaatggc

SEQ ID NO: 527305 - DNA, 50 bp, Homo sapiens
cgtcaataatgaaagctcttcagagggccgcgatgggcctcttggaacat

SEQ ID NO: 527306 - DNA, 75 bp, Homo sapiens
cagttggaagcagccgatccagcctgcggagcctgtggggcaggcacaggtaacagcatcatggtcatgaaaatg

SEQ ID NO: 527307 - DNA, 76 bp, Homo sapiens
cttaattcaaggtcacacaatgtcggggatggacctccagatttccttactgcagtgtttggccagcgcttggatg

SEQ ID NO: 527308 - DNA, 50 bp, Homo sapiens
ccccgccggagcagcatcatcaagagaaatccaagaccagtgacttatca

SEQ ID NO: 527309 - DNA, 100 bp, Homo sapiens
tggaagcaaaatgtccctaaaattgccaaggaactgggatttcaacctgaaagtggaggctgcgaaaatagtgatcctggtggagggattgaaatgtctg

SEQ ID NO: 527310 - DNA, 100 bp, Homo sapiens
ctcccccgcgtccctgcgaccgccgcggcgaagatgctccaggcgaggacacacctaggatgcctgggaaaagtgaaggctccagtgacctagaaaatac

SEQ ID NO: 527311 - DNA, 83 bp, Homo sapiens
cacaaagttctctcgatcagggcatacatctttcttcgacaaagggtactggctgtgatcgaacttctcaaccctcagagact

SEQ ID NO: 527312 - DNA, 100 bp, Homo sapiens
gaacagaaacccctcctcccctagcttcactcaatgttagtaagatatagaaatctctactgaagaggaaaaggatactggagatctaaaagatagctct

SEQ ID NO: 527313 - DNA, 75 bp, Homo sapiens
ggcagctacacatcttgaaagagaagctcttcctgtgagacttaattcagtgcacaaatgagatgaatgtgaaca

SEQ ID NO: 527314 - DNA, 100 bp, Homo sapiens
ggggactcgatggaccgcggctggcaagctcatgctgaagattcggttatggaccatcatttccggaagccagcaaatgatataacgtctcagctggaga

SEQ ID NO: 527315 - DNA, 100 bp, Homo sapiens
tggatgggcgggctgacctcatcctgccttgtgctcacagcttttgtcagaagtgtattgataaatggtgtgatgaatgcagactctgctaccattttgg

SEQ ID NO: 527316 - DNA, 90 bp, Homo sapiens
caaaagactgtcaggaaggcagagtgcagagaaatttattgtccagcaccaccacaaattgacaatggaataattcaaggggaacgtgac

SEQ ID NO: 527317 - DNA, 74 bp, Homo sapiens
aggaccttccacgtggattctccagacgagaggactcagcgaatgctctctacaccaaatgcctccagcagctt

SEQ ID NO: 527318 - DNA, 74 bp, Homo sapiens
ttataattggagatcctgaacaccaaagtgatctgtgaaaatggttcgctattcacttgacccggagaacccca

SEQ ID NO: 527319 - DNA, 110 bp, Homo sapiens
acttttatcacaatggccttgcaaaggccaagagaagacgcagcctacaccacaagcagcagctggagagagaccccagggttcctgattgtcctggggtgcttgattct

SEQ ID NO: 527320 - DNA, 74 bp, Homo sapiens
acgtccactgcgggccggcgaaagctgttcaaatctgaacatcaatgatgtactagggaactactcattgactc

SEQ ID NO: 527321 - DNA, 75 bp, Homo sapiens
gaggaactgcttttgagtgagatggtcccagaggcctggaggagcggactgacctacgtctaccagtggccctgg

SEQ ID NO: 527322 - DNA, 100 bp, Homo sapiens
ccagctggtggctggagcgaccccttgttctttggtggcgctggaaacttttgagaagaactttgaaagagaaacccataaaataagtgagcaaaatgat

SEQ ID NO: 527323 - DNA, 83 bp, Homo sapiens
ctgggccccgggtaggaaacgttggctggttccctgccaactacgtggaggaagattattctgaatactgctgagccctggtg

SEQ ID NO: 527324 - DNA, 75 bp, Homo sapiens
ttcccattatagtgaacagctgtatagcatttgttacacagtatgagcaattgggtgccacgccgaggggatcag

SEQ ID NO: 527325 - DNA, 101 bp, Homo sapiens
ggattttcactggacttccacaaggacagccatgggaggagaagttgccccagtgcaaggcactgcattcgacctgagaaagccagtggagcttggaaaac

SEQ ID NO: 527326 - DNA, 74 bp, Homo sapiens
cgcggcggccgcagctgccacaaaccagatgaggtgtctactgttcttcagaactttttcatgtctactacaga

SEQ ID NO: 527327 - DNA, 100 bp, Homo sapiens
gtcgcgggagcctttggggcaccacagagatgcggctctctacggcgttctgtttgagaagagcaaggaagctgccttcgccaattaccgcctgtgggag

SEQ ID NO: 527328 - DNA, 100 bp, Homo sapiens
ttcagcagcgcggcagagtcatggggatcttcagttgtggccgactccgtttctccgagattcccatgaagctggcagggttgctgcagcatccagaccc

SEQ ID NO: 527329 - DNA, 97 bp, Homo sapiens
tactcttgcttatttattggcttaaggattaaggatccccaaagtctcagacttcaatattgaagcacagattcgagaaattcaaggcaagaaggca

SEQ ID NO: 527330 - DNA, 133 bp, Homo sapiens
ggccgcgggagcctcgtggctgcgtcaccgccgcccccccagacaagatggacaccgcggaggaagcccgacttaaatctctgcaatggctaacgaagcttatccttgtccgtgtgacattggccacagactt

SEQ ID NO: 527331 - DNA, 100 bp, Homo sapiens
gcagcctggaactcctcggctcaagtgatcctcccgcctcagcctcccgagaagctggtactacagctccccgcagccaccgccacccattggaatggcc

SEQ ID NO: 527332 - DNA, 83 bp, Homo sapiens
tgtcaagacatttcttcggcattctgcaacaggttgtgaccgagattcccgacgagagagactgaggggaagagaggaaggag

SEQ ID NO: 527333 - DNA, 88 bp, Homo sapiens
tcgtgagttgctaaggatagcagacaagttcacccaacataactttcaagaggttggcgtgcagtggtgtgatctcagctcattgcaa

SEQ ID NO: 527334 - DNA, 80 bp, Homo sapiens
ccgtgacaggccaagtgcaggggccagaagacaaagtcaattccatattttctggcatccttaaatcttgtgtcaaggat

SEQ ID NO: 527335 - DNA, 100 bp, Homo sapiens
gtggaggagaaggcggcggctctctggtccgcagcggcaacagtaacgaaaaacagggctgggcatggtctagtggcccagtcaggacgcggaaacactc

SEQ ID NO: 527336 - DNA, 98 bp, Homo sapiens
ctgaaacaacccgcaaataaaggcttcagagccctgattatatcaccaacacgagaacttgccagccaggcatttgcaagtaaaatcactggcatgtt

SEQ ID NO: 527337 - DNA, 98 bp, Homo sapiens
tcatcaaaaatagtgatagctttgataagtgccctttaaggaggcagaattacgattatgcagtgtatctactaacagtgttataccatgagtcttgg

SEQ ID NO: 527338 - DNA, 100 bp, Homo sapiens
tgaagaaagctgctgatggggctgctgaggatatgggccctcacattttccaaacctgtccatctgctaactattttgactgcagagccatgtccattgg

SEQ ID NO: 527339 - DNA, 76 bp, Homo sapiens
ccaggcatatcctcctcttcatcctggagcacatcatggtgcatgatggaagtggttcattgcatgatattcaact

SEQ ID NO: 527340 - DNA, 75 bp, Homo sapiens
cacgagttaaagctattcctagaagaagagttaacagtggagacactgggtgcatgtagtctttggactggttat

SEQ ID NO: 527341 - DNA, 75 bp, Homo sapiens
cagcgatagcccagtggatggccattccagctcaagactgcagtgcagatgacgacaacttccttgtgcccatag

SEQ ID NO: 527342 - DNA, 97 bp, Homo sapiens
gctcgggagcggaaacagcggcagccagagctccagaacctgggtatcaacccagcaaacattggcttcagtaccctgactatggagtctgacaaat

SEQ ID NO: 527343 - DNA, 100 bp, Homo sapiens
gacggcgttctggatctcaaagcgtttcttaaacaattaggtctacatcctaactggcaattcgttgatgtatatggaatggatcctgaactccttagca

SEQ ID NO: 527344 - DNA, 90 bp, Homo sapiens
cgaaaacgtggttgtagagttccgtgactcccaggacgcgccagcggagctccggctccttcgccctggacgcggaggccgcggtgtgcg

SEQ ID NO: 527345 - DNA, 75 bp, Homo sapiens
gatttttgctgagaagtagttactgtgcacatgtgtagatttgcaggttgaaaggattgttgacaaaaggaaaaa

SEQ ID NO: 527346 - DNA, 98 bp, Homo sapiens
cgccgggcagcccaatgtctcctgcacgtgcaactgcaaacgctctttgttccagagcatggagatcagttatgaagacagtatggagtttccagacc

SEQ ID NO: 527347 - DNA, 100 bp, Homo sapiens
ccggagcccttgggtgaaattgttaggcgtggagagggagtgatgtcttccagactcggtgctgtacccgccgcagtgtagccaatcaagtattccaccc

SEQ ID NO: 527348 - DNA, 111 bp, Homo sapiens
attctccagggaaaggatgacatatttttggacctgaaacagaaattctggaacacctatatgggtgtcaaattgagaaccaggtagatccccaccacctacagtaaaaag

SEQ ID NO: 527349 - DNA, 75 bp, Homo sapiens
aggaacatggactgaagtatccagcgctcattgggaatttagttaagatgcaggccctgacttcctgtgagtgca

SEQ ID NO: 527350 - DNA, 75 bp, Homo sapiens
atgccctgcagtacctgcagaaggtctctggagacatcttcagcaggtggacgtgcacccagagcagcatcagcc

SEQ ID NO: 527351 - DNA, 106 bp, Homo sapiens
cagccaccctgcccccaagaaggaagtcatcatgggccggcctggaacagggtttgccttcccggattgggcctacaagccagagtcgtcccctggctcaaggcag

SEQ ID NO: 527352 - DNA, 114 bp, Homo sapiens
cggcgcccctcggcctcggagcaacgagcgcagcgccgtgcggaaacatggctcgcgaaggactgcggaccctcgtggttgcaaagaaggcgttgacagaggagcagtaccagg

SEQ ID NO: 527353 - DNA, 82 bp, Homo sapiens
aggaaattgtcccgaatccctgcagggacaagggtgtacagccccccagagtggatctctcgacaccagtaccatgcactcc

SEQ ID NO: 527354 - DNA, 75 bp, Homo sapiens
catattagtgcctgtgatggcatctttcatctaacacgtgtgataaagcggaattgggaatatatatgtagccat

SEQ ID NO: 527355 - DNA, 100 bp, Homo sapiens
ctagcaaggtgacccatgcattggttaatatcagattctgttgaccgaagagtttgtagagaaaatgttggaggatttagaagatttgacttctccagag

SEQ ID NO: 527356 - DNA, 60 bp, Homo sapiens
cggcctcagcaggcggggaagatgaaaggccttggggctctattttgcggaattggaatt

SEQ ID NO: 527357 - DNA, 75 bp, Homo sapiens
ggaaaactcgccaagggttatgtctggaatggaggaagcaacccacaggaattgaatgatctggcacgggaccct

SEQ ID NO: 527358 - DNA, 100 bp, Homo sapiens
ggagatgccaacgccgcgcggttgtaactcggccctagttacctggccagggtacgcgacaattggcggaggggagccaggaagtgggacggaaagtgac

SEQ ID NO: 527359 - DNA, 100 bp, Homo sapiens
ggaagcgctccgggcctggaatccctacgcgtccctttgggtttagcacgatgagctcaatcggcactggggaaaaccaattctgtgtcctcggaggacc

SEQ ID NO: 527360 - DNA, 97 bp, Homo sapiens
cactatttttccaaagtggtggatgaggcaatagagcatatgttctacaggagaagcatggttgtggctgattcagtttcacatataacacagcacc

SEQ ID NO: 527361 - DNA, 50 bp, Homo sapiens
ccctcagtgcaaggagtggcagtgaagtaagaactctgctagagaggaaa

SEQ ID NO: 527362 - DNA, 50 bp, Homo sapiens
aaacttgctgcggttgctcaagctgcagaaccttggcctgaaaatgctac

SEQ ID NO: 527363 - DNA, 115 bp, Homo sapiens
cccagcaagatgcggaggctgcctcggcggagcagaggaaccacacgctgatcatgcaagagtgagccatggagctacgtgtggggaacaagtaccgcctgggacggaagatcgg

SEQ ID NO: 527364 - DNA, 100 bp, Homo sapiens
gccaggagcacgtcccgccggcaggtcgcaggagccctgggagccgccgccatgggtgctggagaatctggtaaaagcaccattgtgaagcagatgagga

SEQ ID NO: 527365 - DNA, 90 bp, Homo sapiens
caagaatccaaagaaaacaaaatggtggtatcatggttttcccatcatatgattcccggtcctcctggtccccacacaactggcatccct

SEQ ID NO: 527366 - DNA, 83 bp, Homo sapiens
ccggcctctcggcctctgccggagaaacagggagatcttgtgcgaaaactcaaagaagataaagcaccccaagtagacgtaga

SEQ ID NO: 527367 - DNA, 80 bp, Homo sapiens
ctaaagctaccaaagacgtagaaagaaatcttagcaggatctggagtgggagagcaggatgggggactgatcggtgccga

SEQ ID NO: 527368 - DNA, 159 bp, Homo sapiens
gctgaagccgctgcccgcggacaagcagatcgagaccgggcccttcctcgaggcggtgtcccacctgccgcccttcttcgttggtgttggtattaggagatctgcacatcccacaccggtgcaacagtttgccagctaaattcaaaaaactcctggtgc

SEQ ID NO: 527369 - DNA, 100 bp, Homo sapiens
ctccccctgaagttcatctaagatcttcattcttcaaaggattttataaaggcccaagacttaagtaacttagaaaacactgtcgctgccttaaagagtg

SEQ ID NO: 527370 - DNA, 83 bp, Homo sapiens
ccctgctcagctcctggggctgctaatgctctgggtctctgcctagtgtgttaattgtaacctacaaggagcctgcaaaatca

SEQ ID NO: 527371 - DNA, 50 bp, Homo sapiens
ggctcgccagtcttggggacagtgtcagcatcactttgggaagcagtgac

SEQ ID NO: 527372 - DNA, 100 bp, Homo sapiens
agaattcctcttcaacctgcctgatcaaaaggtcagataccaaggctttctaaagtcaaccttttcactctgctcagcctctggatggagctctttccag

SEQ ID NO: 527373 - DNA, 75 bp, Homo sapiens
ccttagtcgtcacccttctccacttgaccaggctggatctcacccagggtggcagaaggaggccttctggagctg

SEQ ID NO: 527374 - DNA, 100 bp, Homo sapiens
ggttaagggaaagcgccgagatgacgggctttctgctgccgcccgcaagcagagtgccggctgcttcttcggtgatgaggtgaggggtagtggcgagtct

SEQ ID NO: 527375 - DNA, 100 bp, Homo sapiens
gaaaaattacagcacatctcagtgaatttgcaagtggtgattttacaacgagatgctgctctccatagggatgctcatgctgtcagccacacaagtctac

SEQ ID NO: 527376 - DNA, 101 bp, Homo sapiens
gacgccgaggcctcgggcgggggctggcccggggttccaggaaccgtccctgcccaggccagggcagccactggcgaagcccctaacccagctggatggag

SEQ ID NO: 527377 - DNA, 82 bp, Homo sapiens
aaaaacttcttgccaaccaaaaaacagttcgtgactatgagcaccagttccaccttaggctggagcaggagcgaacacagtg

SEQ ID NO: 527378 - DNA, 75 bp, Homo sapiens
cccggagctgcctggaggcggccgcactcgggactctccttcagcaactccagaagcttcagactttggtgatgg

SEQ ID NO: 527379 - DNA, 100 bp, Homo sapiens
tgcccggtttggcactgctcctgctggccgcctggacggctcgggcgctggaggaatactcccccagttgcaagaggcgcaggaccgtggaagacttcaa

SEQ ID NO: 527380 - DNA, 51 bp, Homo sapiens
caattaaggaattctttcgaggattaaataacattactactggatggaaat

SEQ ID NO: 527381 - DNA, 80 bp, Homo sapiens
ggagatgcctgacgcatctgtctgaggagcggtcagtgacgcgatggagcgggcaaggtttacccaaggtccagcctagc

SEQ ID NO: 527382 - DNA, 82 bp, Homo sapiens
cgccgctccccagggagggagtccgcagcctgaggtgtgttccagagaacaagccttcagacatttgctatattgacgctga

SEQ ID NO: 527383 - DNA, 75 bp, Homo sapiens
ggaatgccttaattgaacaatatgtgccaagagttgtaacctctgcacaacagaaagcaggaagaactattacag

SEQ ID NO: 527384 - DNA, 50 bp, Homo sapiens
gcgttggtggcgacggccgagtcaggtgtatgcaacagcgttattgcaac

SEQ ID NO: 527385 - DNA, 51 bp, Homo sapiens
gtttgacaggcgattctcccctcattttggaatgaaagctactggttgatt

SEQ ID NO: 527386 - DNA, 123 bp, Homo sapiens
ttctaaagcagaggagatcacttcagatgctgcctatgttattcaggaaatccacaggaaagtgatgtcacaaaacttcaccaactgccacaccaagattcgccatgttgatgctcatgccac

SEQ ID NO: 527387 - DNA, 75 bp, Homo sapiens
caacttcctgatagatgtacactgaaaactggacattataacattaaattgctagtgcaactactgctccatcga

SEQ ID NO: 527388 - DNA, 98 bp, Homo sapiens
aaaactattaccagttggatggacactgaaggaatcaagacagcggaatcagacagctggctctgaagcaccgacaaggcaagaatcacaagatgcgc

SEQ ID NO: 527389 - DNA, 96 bp, Homo sapiens
aaaagagctaccttttcccacgagttggagcctgaggtgcggagtttcgtgagtttttactgactcgagggtgacagaacctttctggaaggttcc

SEQ ID NO: 527390 - DNA, 50 bp, Homo sapiens
ctctgtggagatgacggttgtacaggtatttcatggaaacttggagagag

SEQ ID NO: 527391 - DNA, 78 bp, Homo sapiens
catcctggatctgtcttgtaataaactgactactctaccgcaggtttggatgcatctgctcagactacttctcatgaa

SEQ ID NO: 527392 - DNA, 98 bp, Homo sapiens
aaaaagagcaggaagtcattacatggtcccaggtgtgacaccttcagcaggtctcagggaagatggcagccctaggggacattcaggagtccccttct

SEQ ID NO: 527393 - DNA, 100 bp, Homo sapiens
caagaaggccctggacacagcaatatctctgggctttcacaggcaaatcctgatcctaactgttgtcttggagtatttgggctgagcttgtacaccacag

SEQ ID NO: 527394 - DNA, 90 bp, Homo sapiens
cggatgggggaggactgctttatggacttgcatcaggagtagcaaatggtgagaacaagaccaagattggaaagccagcttcagaggagg

SEQ ID NO: 527395 - DNA, 100 bp, Homo sapiens
gttctgcttcctgctgctctgtctcagcgccgcctccctgcttcttaacaggagtgtacctcacagccttctaggatctccagagtggacaggaatctca

SEQ ID NO: 527396 - DNA, 83 bp, Homo sapiens
cgcctgaaccgagtagaagacaagtctctgctttctatccgtcaagatgataaagtcgtgtgcccgagaaccaaagaagtctt

SEQ ID NO: 527397 - DNA, 95 bp, Homo sapiens
tcaggacaacctcttgggcagggtaacaacatccattttatacaccgcgataggaataggttggatcacaaacctatcaactctgttttacagct

SEQ ID NO: 527398 - DNA, 83 bp, Homo sapiens
agcgcctcgcgctgattctcacgggcccggctgccggcccccgctctgccctgcatggcggacaccgacctgttcatggaatg

SEQ ID NO: 527399 - DNA, 90 bp, Homo sapiens
atatcttgaaaagctgccagaaaggccaggagtggtggctcacacctgtaatcccagctctgggaggccaaggccagtggattgcttgag

SEQ ID NO: 527400 - DNA, 75 bp, Homo sapiens
tgaatgatgacccaagtatggaagccctggccaacgtcaacattgggagcctcatctgcaatgtaggggccggtg

SEQ ID NO: 527401 - DNA, 90 bp, Homo sapiens
gcgacggcggcctacgagcagctgaagctgagcctcacagtctactcagagaaaaataaaagaaggcaaaatgagtcctccccatttcca

SEQ ID NO: 527402 - DNA, 51 bp, Homo sapiens
tctccagtgtaatgattattgacaacaggaaaatcgtgaagtcgatagaaa

SEQ ID NO: 527403 - DNA, 74 bp, Homo sapiens
ataatcaccaggctaaggactgtatcgactcctttgttactcactgtgttcggctcctactccaatgtggccag

SEQ ID NO: 527404 - DNA, 82 bp, Homo sapiens
gggactacgacgtccctcaaaccttgcttctaggagataaaaagcctacagacctggtacctggatttttgcccgagatgat

SEQ ID NO: 527405 - DNA, 75 bp, Homo sapiens
gctactggtgccagaacacagagacagcagcccagtgcaatcgtggagattggtgaaagcgtgagaggggaagat

SEQ ID NO: 527406 - DNA, 75 bp, Homo sapiens
gcgagagccagggctccaaagaactcgttacagaatgtctgaaggggacagtgtgggagaatccgtccatgggaa

SEQ ID NO: 527407 - DNA, 82 bp, Homo sapiens
gcatcacggaggacggcaggactgtggccgtgggggacatcgtctgggcaaaatgatgcttcaacacccaggccaggtctct

SEQ ID NO: 527408 - DNA, 101 bp, Homo sapiens
cctcctctctgggccggaccccagcccgagcggccgaaaggagccccccgcccggatcacagctacatccgatactcccagatctgtgcaaaagcagtgag

SEQ ID NO: 527409 - DNA, 90 bp, Homo sapiens
caatccgccctggatcttcacccaggaggccccggaggaggggaccgggggcttcggaaaaccaattctgtgtcctcggaggaccacagc

SEQ ID NO: 527410 - DNA, 74 bp, Homo sapiens
gggttcctctgtgttggccaggctggtctcgaattaccgacttcagccgtgggggaaaagaccccctctccagc

SEQ ID NO: 527411 - DNA, 75 bp, Homo sapiens
ctgagactccctgtcccggaccgcagacagacagtctagcagtgcttccttggagaccctgttagcacttcttca

SEQ ID NO: 527412 - DNA, 139 bp, Homo sapiens
taaaggtactgagaaaagagaatccccttcaccagcaccgaagcctagaaaagtagagttatctgaatcgggcgctcgccgccttagtacccggagtgacccaggtagataacaagtccggtttcctgcagaagaggcc

SEQ ID NO: 527413 - DNA, 105 bp, Homo sapiens
tcagcagccaaggtgtttccaggaagttcagagagaacagctctagaggacaaaatcccagtccttggcacaaactcaggaaatggaagccggagtctgtttttt

SEQ ID NO: 527414 - DNA, 100 bp, Homo sapiens
cagtgacgagcggccgaagcagctttgcggccatgtagggcaggaccgggtggactttggccagactgagccgcacacggtgcttttccacgagccaggc

SEQ ID NO: 527415 - DNA, 75 bp, Homo sapiens
tggaaaccaagttaatcgaaaagttctcaattttgaacaagctatcaaggcagcctggcatcctcgctacaacct

SEQ ID NO: 527416 - DNA, 73 bp, Homo sapiens
tgaaagctgccatggccctggagaaaaagctgaaccaggacaccataaatcgcatccaggacctgctggctga

SEQ ID NO: 527417 - DNA, 75 bp, Homo sapiens
tgctggaagagaatggactgaacaggagacccttctactcctggagagttgaaactgtgggacagccagacagaa

SEQ ID NO: 527418 - DNA, 100 bp, Homo sapiens
aggacgccggaacaccctggaagccgagaaatggctcctgtgacgtttgatgacatcactgtgtacttactccaggaggaatgggtgctgctgagccagc

SEQ ID NO: 527419 - DNA, 98 bp, Homo sapiens
gaagagctgaggacaggagtgacaggagttctgcaggaaacccccagggcctcgccccgagatgtgggcccgctggtgtggggggccgtgggggggac

SEQ ID NO: 527420 - DNA, 98 bp, Homo sapiens
ttcccttccgcgggagggagagttaggttgatgccggcccaggatggatcagacctgtgaactacccagaagaaattgtctgctgcccttttccaatc

SEQ ID NO: 527421 - DNA, 98 bp, Homo sapiens
tggaaggtgcatctgcagtacaggatatgaagaaattgagggttcttgccatgtttatatcctggaacctggagatcctcctttgttacagcaaccac

SEQ ID NO: 527422 - DNA, 100 bp, Homo sapiens
tgtgagccagctgcggagcagtgcgtcagagtttcagaatggtcctagtgccagatcgtgtcataaaatgtgcattgatattcaacggaggcaaatctac

SEQ ID NO: 527423 - DNA, 101 bp, Homo sapiens
cgagaagacactacagcctcaaggaggtccacgtgaacttgctgctcctggaggcgcgcatgcaagccgctctgctgtacgccctccgtgccatcacccgc

SEQ ID NO: 527424 - DNA, 83 bp, Homo sapiens
cgtaacggaggcaggttggagccgctgccgtcgccatgaccccaaaatgatgcttcaacacccaggccaggtctctgcctcgg

SEQ ID NO: 527425 - DNA, 100 bp, Homo sapiens
ggcgtggaggaagaggcattgaggactttccttacctgtttttccagctcacccactgccagcagaggtttggaatttcagctgggcagcttcgatccca

SEQ ID NO: 527426 - DNA, 100 bp, Homo sapiens
catcctccacctttccgaaagcttccagcgagtcctcttatctaagtatcctaccaaaggtcctgggaactccaacaagggagcaaatcagagaaatgaa

SEQ ID NO: 527427 - DNA, 89 bp, Homo sapiens
gtttggacgccggcggagacgcgggcgagatccaggatgagaagactgataaaagaagaagctagctgaacagctgtaaaatgcccaaa

SEQ ID NO: 527428 - DNA, 99 bp, Homo sapiens
tagcatgaggaagagtcaggggcacagagagatggagagagacctagttaggtgaccaagaatatggcccaggtgaccaaagccctggacaaggccctg

SEQ ID NO: 527429 - DNA, 100 bp, Homo sapiens
agtgaattggcaccaagccttcccagttatcataaccttgaatggcgactagatgtacagaattgccaagaagatgcttttagaagaaattaaagccaat

SEQ ID NO: 527430 - DNA, 75 bp, Homo sapiens
cttctgctgactctgcttcctcctccgatacttcccgcagtcgagtaacagttacccctcaatgagcgaccccta

SEQ ID NO: 527431 - DNA, 100 bp, Homo sapiens
gcgtttcaaccaagaccaaaacatgctgaaggacatcatcaaagaatacactgatgtgtaccccgaaatcattgaacgagcaggctattccttggagaag

SEQ ID NO: 527432 - DNA, 50 bp, Homo sapiens
ctcatggaggctgagcatttattcaggcaaagattacatgaggagtggtt

SEQ ID NO: 527433 - DNA, 117 bp, Homo sapiens
gtacgggaagcagcagctctagccctggcaaacctaaccacttgcaaccctgctaatgcaaagatctagtgaaaagccatttgatgtatgcggtcagagaagaagtggaggtcctca

SEQ ID NO: 527434 - DNA, 75 bp, Homo sapiens
gctccaccctgctgcagcccctcagcaacgccgtgcagctgcccatcgaccagcgagtaaccagctcataaatca

SEQ ID NO: 527435 - DNA, 100 bp, Homo sapiens
ccagaagcgggcggcgcgggggagatggcctctggctgtacctggcagggagcagcctgccctgtctcacgctgattggctctcctaattttgggtacag

SEQ ID NO: 527436 - DNA, 100 bp, Homo sapiens
agaaaatcagtgatgtcattgaggactctgtagttgaagattataattcagtggataaaactaccacagcttgtagattttcagtggaaactgggtatgg

SEQ ID NO: 527437 - DNA, 98 bp, Homo sapiens
cgctgttctcgctccggagccgctgcacatttcgggactttgaacatgtcggggatcgccctcagcagactcgcccaggagaggaaagcatggaggaa

SEQ ID NO: 527438 - DNA, 100 bp, Homo sapiens
tgttacaagttggcttatgagtggaacatggctagcaggaatgcttactgttgcgtggttcgttattaacagcatgctacaagtgaaaactgatgagaaa

SEQ ID NO: 527439 - DNA, 82 bp, Homo sapiens
atcccaccagagcacggcaagcgcctggagcggctggccatcggttggacttggctcagtctctgggactcactcagctgca

SEQ ID NO: 527440 - DNA, 80 bp, Homo sapiens
aggctttcaatcaacccaaggtgatgcttttgctacgacctcattttctgctggaactgaacattctagtatgccagtag

SEQ ID NO: 527441 - DNA, 100 bp, Homo sapiens
ccgccatgaacctgaggggcctcttccaggacttcaacccgagagatggggtcttgccaggtcttggccaggctggtcttgaactcccggactcaagcaa

SEQ ID NO: 527442 - DNA, 100 bp, Homo sapiens
tggacagtgagctaagtgaaaggagacagtcacaaaaggacaaataccagatgatcccacctgcgcgagatgatatgcaaacatggaccaaggcatagat

SEQ ID NO: 527443 - DNA, 75 bp, Homo sapiens
gccaccagagtggaaatagtcaggtggtgaagcagtattttccaatttgaagattcatttgaaggtggctcctgc

SEQ ID NO: 527444 - DNA, 100 bp, Homo sapiens
gcagatttcttttggatagtgatgggaaaaggccgccatggcatcagatgaaggcaaactttttgttggagggctgagttttgacaccaatgagcagtcg

SEQ ID NO: 527445 - DNA, 100 bp, Homo sapiens
ctatagccacctggtttctcttgctgcaattctcattgcaagatcatcgcctccctggtttatagtagacagaccttttctgtttttcatccgacataat

SEQ ID NO: 527446 - DNA, 100 bp, Homo sapiens
cgccgctggagaccgcgggacctggcgctgcagcgagaaataagcgggttttgaaaacaaaaaaaagaaggagtggaagagggggccaggatccaggcct

SEQ ID NO: 527447 - DNA, 74 bp, Homo sapiens
gcccttcctcctctgtgcggtgctgctcagtgcagttcagaattatatccagatcgagagacagaagattctga

SEQ ID NO: 527448 - DNA, 75 bp, Homo sapiens
ggaaccagttccgatacagcacaatgggtggttctcttcccaaagtggaagccaaattcatcaattatgtgaaga

SEQ ID NO: 527449 - DNA, 75 bp, Homo sapiens
gccggagaagcgagtttcagctgatctatccatactaatggaaatgtaactggaactgactctgatgataaaatc

SEQ ID NO: 527450 - DNA, 83 bp, Homo sapiens
aggaccctgggccagcctatggagatgagtgcctggtgaagaatgtgatgggatcactagcatgtctgcggagagcggccctg

SEQ ID NO: 527451 - DNA, 50 bp, Homo sapiens
gaggctcagagcttggagacagacgatacgaaaaccggtgaggtccaaac

SEQ ID NO: 527452 - DNA, 96 bp, Homo sapiens
gctgccagtcccctgccccgggcaaagcccatctggtccgccgagcaggatattatcaactcactggtaacaacagtattcatgctcatcgtatct

SEQ ID NO: 527453 - DNA, 100 bp, Homo sapiens
gaggtacgctacgaagtctgtgacattcctcagtgttcagaaggtaagagcttctgttcgtgtgcagggaaagcagctcacagacgccgttaaaaccagc

SEQ ID NO: 527454 - DNA, 74 bp, Homo sapiens
atgtggaagccaaggactgtctgaacgtgctgaacaagagcaacgaggggttattttggagctgttggagcact

SEQ ID NO: 527455 - DNA, 100 bp, Homo sapiens
aaacgaggcactcagttggaagagtccagcaagctccgggagtgtgagctgagccctggtgtgaacagggacctgacccggcgcgttcgcaacatcaacg

SEQ ID NO: 527456 - DNA, 100 bp, Homo sapiens
ggaagccaggatgtaccacctttctggcaatgagagtctaaatggtgtttggctgaacagagcgcgtctggaacctttaagggtctattccattcatcag

SEQ ID NO: 527457 - DNA, 75 bp, Homo sapiens
ggaacgcgcgctgcgcggactgcggcgccccggtctctgctttctatccgtcaagatgataaagtcgtgtgcccg

SEQ ID NO: 527458 - DNA, 75 bp, Homo sapiens
gattccaagtaactcttatttgccgaggcctgcctggagccccagatcaccccttcctactacaccacttctgac

SEQ ID NO: 527459 - DNA, 87 bp, Homo sapiens
gtaaacgatcttctcgacctgcttcagcctccagctctactaaaggttgcagagaacacatcttagaagatgaaaaacctgaatcta

SEQ ID NO: 527460 - DNA, 80 bp, Homo sapiens
gaagctgccagtgaagaaagtaacagtgagatagagcagaaactaatctggattcactccctctggttgatacccactca

SEQ ID NO: 527461 - DNA, 97 bp, Homo sapiens
atcagccatgaggagcagaagtcagtccggctgccaacaaatggaattttcttgagcatgtttctaatcgttttgccattggaatccatggctcatg

SEQ ID NO: 527462 - DNA, 74 bp, Homo sapiens
gagtgatattgaccatgatggaatgcttgacagagatgagtttgcagttgcattcccatcaagagcaccatgga

SEQ ID NO: 527463 - DNA, 50 bp, Homo sapiens
cccagttccaaagtgtcttaaaggcttaacagcattgcgcagtgatgaag

SEQ ID NO: 527464 - DNA, 100 bp, Homo sapiens
cagaaagtcttcctacgaccgtcttttcccttagaggcaccagggagcgaagaatggtcaagaaagtggactcgaaattggaactgacacaattcagttt

SEQ ID NO: 527465 - DNA, 82 bp, Homo sapiens
gccccgcagccccccaacatcctgctcctgctcatggacgacacctcctgccccccgaggtctgcagtctcctgaacccagc

SEQ ID NO: 527466 - DNA, 82 bp, Homo sapiens
gtcctgaatgtggcttggttgtagattgtcctgggtcacataatgccagctgagcgtaaaaagccagcaagtatggaagaaa

SEQ ID NO: 527467 - DNA, 100 bp, Homo sapiens
cagggccaggttcttgatggccagtctcagcatctcttccaacagaaccaggtcctgctcaatctggaattttgtcagatcgtgaagtggtaaacctctt

SEQ ID NO: 527468 - DNA, 87 bp, Homo sapiens
gctaccgctgacgacacccctggtggatggcgaggatgagagttgcaggaccagctctgccccctaattataaaagcagtagttcag

SEQ ID NO: 527469 - DNA, 103 bp, Homo sapiens
gacagcgtgcggtctgggccttttgggcagcttttccggcctgacaacttcatctttggttggatggcaagcatgtggtgtttggcaaagtgaaagaaggcat

SEQ ID NO: 527470 - DNA, 101 bp, Homo sapiens
ccgagctgggggcgcagagcgcgggaggcggcggcggcgcggagcccaggtctgagaaagaaccccagtttaagtttatctacttcaaccacatgaatctc

SEQ ID NO: 527471 - DNA, 82 bp, Homo sapiens
ccgggggcccgtactgcacatcgtggtggtcggatttcaccacaagaagggctgccaggagaatggggtactaagagaaaag

SEQ ID NO: 527472 - DNA, 90 bp, Homo sapiens
tctcctccttcagcttcctcagtagctgggattacaggcacgcgccaccacacctggcttggaagctcgaagtctggctgtggccatggg

SEQ ID NO: 527473 - DNA, 90 bp, Homo sapiens
gtcaacagagctatcaatgttcttctggaaggaaacccagacacgatgatgaggagtctgatgaggaagctgtgaagaaaaccaacaaat

SEQ ID NO: 527474 - DNA, 90 bp, Homo sapiens
gcctactggaaggacgacgacaaacacgtcatgaggaaggagcagcgcaaggaggacaatcccaagggggagggcacagagcaggaaccc

SEQ ID NO: 527475 - DNA, 75 bp, Homo sapiens
actttggagaaaccaccgtgctggaccgcttttacaatgcagaatggcttcagttctgtgcaggccacgcagtta

SEQ ID NO: 527476 - DNA, 100 bp, Homo sapiens
ctcagctgcgaggccacgccgaattactcaaggtgatgaggacaattgatgacagaatagtacatgaattaaacactacggttccaacagcttcctttgc

SEQ ID NO: 527477 - DNA, 90 bp, Homo sapiens
caagtacattctcaggtggagacctgcgacattgactacagcaccgtgctcctcggcatgctggtgacgcaggacgtgcagctcgggctc

SEQ ID NO: 527478 - DNA, 90 bp, Homo sapiens
cctacctgcggcgtcggcagctgctgctccgagggctgaagaagatgcagagcagcctgaagctggtggactgtatcatcgaggtccacg

SEQ ID NO: 527479 - DNA, 83 bp, Homo sapiens
ggcttccaggcgcactaccgcggactttctgcagggcgactgcaccaaagcgaaacagaagctgaactggaagccccgggtcg

SEQ ID NO: 527480 - DNA, 100 bp, Homo sapiens
accagttagaagtatatatgatgacatttctagcccaggacttggatcaacacctttaacttcaagaagacaggctcgtggtcccaagaagcatctgaag

SEQ ID NO: 527481 - DNA, 83 bp, Homo sapiens
gacaaatacaactacattggtctctcccagggcaacctccgcgtccactacaaaggtatttctgggaaaagccagcttctgtt

SEQ ID NO: 527482 - DNA, 100 bp, Homo sapiens
gtgaaccagtggtagaaagcacagaaactgaggggacataatcatcactcagtagagagaaaaggaacagttccgtaagctctttattggtggcttaagc

SEQ ID NO: 527483 - DNA, 90 bp, Homo sapiens
cgatagttttagagcctatctattggaattcctcgaactccaaggttatgtaccgaaggactctaccgtgtcagcgggaataaaactgac

SEQ ID NO: 527484 - DNA, 106 bp, Homo sapiens
ctatttttttgtggagacttgctgagcaggaaacattaaagaatgtgcttcagagagaaaggaaatgaaaccaaatggaaatctggatctacacaaacgagtaaac

SEQ ID NO: 527485 - DNA, 100 bp, Homo sapiens
aggtgtgtggccccaaatcgatgtgcatgcacttacggatttactggaccccagtgtgaaagaggtgaggaccaaggatcatgtatttgataatgtcggc

SEQ ID NO: 527486 - DNA, 147 bp, Homo sapiens
aacactaagtaaggaggaaaaagagttggaaagaagaaaagaattaaagaaaatacgagtaaaatatggtttacaggctgtaggcgcatgatgtcacaagttattggaagaaatccctccaacctaggttgggacagatgaaggcgg

SEQ ID NO: 527487 - DNA, 93 bp, Homo sapiens
agaaggaacttgcagaaatcacattggaccctcctcccaactgtaggtttaactatagatcaacacatcatcttgcatctcatgggttctatg

SEQ ID NO: 527488 - DNA, 90 bp, Homo sapiens
accagaagaagtatttgatgtcttagagaaacttggagaaggacgccttctggcaagaggggagagcctctggaacagtgtacagtgggg

SEQ ID NO: 527489 - DNA, 78 bp, Homo sapiens
tgagaccatcaccaagcggtgagactatcacctatcgccaagtgctgaagacttacagtgagaaactggacaaagagc

SEQ ID NO: 527490 - DNA, 75 bp, Homo sapiens
accacttgtgcccatatgatctgtaacatggaggagctggaaaagaacattactactggatggaaatccattccg

SEQ ID NO: 527491 - DNA, 73 bp, Homo sapiens
tggtatcgtggaaggactcatgggtgagctggactaccagcttcaggaccaggacagcgtcctcttcatctcc

SEQ ID NO: 527492 - DNA, 98 bp, Homo sapiens
cgctgcgctcatggcgtcgcccggcccgagaggaagtttggcgtggtggtggttggtgttggccgagccggctccgtgcggatgagggacttgcggaa

SEQ ID NO: 527493 - DNA, 75 bp, Homo sapiens
agctttacctcgctgaccctatgaaggttgggggccgtcccgctcctaaggcaggaagatggtggccgcaaagaa

SEQ ID NO: 527494 - DNA, 101 bp, Homo sapiens
tgatgtgctcccgggtgggcctgctgatgggctgctccagagaccttaatggacagaatcaagaaacagctacgtgaatgggatgaaaatctaaaagatga

SEQ ID NO: 527495 - DNA, 97 bp, Homo sapiens
gcccagacggctcacctgtgcgggatggaacaaaagctgagatctgtatctgtggacctgaatgttgatccctcgcttcagattgacatacctgatg

SEQ ID NO: 527496 - DNA, 129 bp, Homo sapiens
cctgaggattcagcctcttcttcttcatccctcccagcacccagtgtgttgggtgcacacagtaatccatcagctgaggctctcagagaatgaaagtgtggccctgcaggaactcttggactggaggag

SEQ ID NO: 527497 - DNA, 97 bp, Homo sapiens
cagaaccctccgcagagtaaagagatgaggaaggaacagagcatttacgaaaacgaaatacgaagttgccttttatgtttaccactggagaagctgt

SEQ ID NO: 527498 - DNA, 75 bp, Homo sapiens
gctgaaggccctacgggagaaaaccgggcgcaaggaactggcccaaataaggaaggaggaaaaagagaagaaaag

SEQ ID NO: 527499 - DNA, 90 bp, Homo sapiens
gcaggtgggggccggcggggtccgtggccaggtcctggctataagtcaccatggcacagcaagctgccgataagtatctctatgtggata

SEQ ID NO: 527500 - DNA, 100 bp, Homo sapiens
gaaaaagagcaaagataagaagagaaaaagagaagaagatgaagaaaccagcttgatatgttgtgctgtgatcttggctaccatgcaagtctgaacagag

SEQ ID NO: 527501 - DNA, 100 bp, Homo sapiens
cctgcccagccccctgaacccgaggccctgcctactatctatgttgttacccccacctatgccagctgcaagctttcttcctggtggcagatgacatcat

SEQ ID NO: 527502 - DNA, 50 bp, Homo sapiens
cagatgacaactgtacagatgtcactgagaacactttttacagttggcta

SEQ ID NO: 527503 - DNA, 75 bp, Homo sapiens
ctcctgtcatgaaaattctaaaagctgtataagggcgccaatgcttcggcattagagaaagagattggtccagaa

SEQ ID NO: 527504 - DNA, 100 bp, Homo sapiens
ggatgacggacaagtgtttccggaagtgtatagggaaacctgggggctccctggacaactccgagcagttgcagagtgggcaggatcttaagacccgata

SEQ ID NO: 527505 - DNA, 82 bp, Homo sapiens
ggaattctaatttgaaccatgtttggattgaagccgcctctgtattacttaccaggcctgcattgatgagaacctggaggtg

SEQ ID NO: 527506 - DNA, 100 bp, Homo sapiens
aacctgggcggatgtcagaccagagaagagcacagaatgtaccagagagatgagccccgctagggccgccccgcgctgagagcccagccccgccgctgcc

SEQ ID NO: 527507 - DNA, 71 bp, Homo sapiens
accactattctagcatccgtgaaggagcaggacaacataacgatgcacggatgaaccttgccattgctctg

SEQ ID NO: 527508 - DNA, 100 bp, Homo sapiens
cttttattctcaagaatggtatgcacgtcagcactgtcctctgaaaaataccattgtgatgaatgactgtattatccgaggggatctggcaaatgtaaga

SEQ ID NO: 527509 - DNA, 80 bp, Homo sapiens
accaacgtggaggagctgtgggtggaaggaaaaatatattcagggggaagagatgtaatagatttcacattatggcagtt

SEQ ID NO: 527510 - DNA, 75 bp, Homo sapiens
aagatgactcggacattttacatggtacagtgggaagctgggattagccaagctgtagtgctgctgggaagcatc

SEQ ID NO: 527511 - DNA, 90 bp, Homo sapiens
gctgaaagaacagcagatggtaatgaggggccaccgagatacctctatggttcatgagcttaatagaggaggctgcggaggaggaggagg

SEQ ID NO: 527512 - DNA, 82 bp, Homo sapiens
ctgcagtggcgcctaaagtctgagagagggaagtcgcctctgtgctcaaacgctgcagcagtgctgtgacctttcgcagctg

SEQ ID NO: 527513 - DNA, 90 bp, Homo sapiens
tctttccaaaaggtcaaggttcacaaggagtacatcgatgcccaccctgagaccatcgtcctggacccgctccctgccatcagaaccctg

SEQ ID NO: 527514 - DNA, 100 bp, Homo sapiens
ctggagcagatcccccagccggctgagacaggtgctggagaatctggtaaaagcaccattgtgaagcagatgaggatcctgcatgttaatgggtttaatg

SEQ ID NO: 527515 - DNA, 83 bp, Homo sapiens
ggtctcggggcgggcgccgcgggacctctccgggccatgggttgtgaccgagattcccgacgagagagactgaggggaagaga

SEQ ID NO: 527516 - DNA, 75 bp, Homo sapiens
gggaaaccaggccttccaggaatgcccggtgctgacggacccccgctttaccgatttgttacaactcaagcaagg

SEQ ID NO: 527517 - DNA, 82 bp, Homo sapiens
agcagcctcaacctcatggccgcagactgcaaacagttatctccagaagaagaagagaaaaggagaatccgaagggaaagga

SEQ ID NO: 527518 - DNA, 98 bp, Homo sapiens
ggggcagtacaagcttacgtctctgctcttcagtacaatcctaccccttatccctctggacagaatgcaggtccaaccacgctggtataccctcaaac

SEQ ID NO: 527519 - DNA, 100 bp, Homo sapiens
tcggccgtgtctacgatgtgtcctccggccggaggcactacgagcctgggtcccactatagcggcttcgcagggccaagaccagcttcaagtctccatgg

SEQ ID NO: 527520 - DNA, 75 bp, Homo sapiens
gagcagaaggtgcaggaggtgctgaaggccaggtgtttcccattaaacactaccaggacaaaatcaggccttaca

SEQ ID NO: 527521 - DNA, 83 bp, Homo sapiens
tgacacagccctcagcgagagtgccaaccaggccttcctggcgcctgtgtctggcagagctggtgtgagacgagacaatcctg

SEQ ID NO: 527522 - DNA, 100 bp, Homo sapiens
tcgattgcatcagcaatgtggcgcacggttcgagaacatcatcgaaaattaagaaaggaggctaaaaagcggggtcacaagaagcctaggaaagacccag

SEQ ID NO: 527523 - DNA, 74 bp, Homo sapiens
ggagagcggccgccgccgctgccgcttccaccacaggttctgcttccttcggtgctgcggctgtgtgttttctg

SEQ ID NO: 527524 - DNA, 75 bp, Homo sapiens
cttagctgtgctcgcgctactctctctttctggcctggaggctatccagcatgcccagcctacagagtctgagaa

SEQ ID NO: 527525 - DNA, 75 bp, Homo sapiens
gacaagcttaataaaataaccgtccccgccagtcagaagttgagtgccggtggtggtgtgcacattgagccccgg

SEQ ID NO: 527526 - DNA, 75 bp, Homo sapiens
atggcagtgctcaaactcaccgaccagaccatcatcaaagaggggatgctgaccaaacagaacaattcattccag

SEQ ID NO: 527527 - DNA, 98 bp, Homo sapiens
gagcgagagcgcgcgggcgcggccgacaggctggacaacgttcatggctctcgggtagaacctagtgaaacggccagaatgaattctatggacaggca

SEQ ID NO: 527528 - DNA, 51 bp, Homo sapiens
gatgaccctgagcaaggaaaatctgaggatggcaatcaggaattgtttccc

SEQ ID NO: 527529 - DNA, 51 bp, Homo sapiens
gagggaacaaagcccacagcaccgagtatgtatgtaactgctctgtggttg

SEQ ID NO: 527530 - DNA, 83 bp, Homo sapiens
cagcagccaggagtcatgagcgacagcggcgagcagaactacggcgagcggacctgcctagagctggaacgttacctccagag

SEQ ID NO: 527531 - DNA, 98 bp, Homo sapiens
gttaaatgaggagaaaattatccagaggcttgtggaaatagttcatccatcgcaagaagaagatgaacctctgtgatggaggtcacagccacagacgc

SEQ ID NO: 527532 - DNA, 100 bp, Homo sapiens
gagaagtaccggctcgtggtggtcggcgggggcggcgtgggcaagtcggcgctcaccatccagttcatccaggcccttcatgctgctgccgcccctcatg

SEQ ID NO: 527533 - DNA, 75 bp, Homo sapiens
ttaatgagaagatctccattcctgaggaggaggttatcaatactctggctgaccatcatcatcgtgggactgact

SEQ ID NO: 527534 - DNA, 75 bp, Homo sapiens
taacccttgatcctcctcctaattgcagggctttaaacacgaagacctgatttgtttgtgtaaatcgttggatgt

SEQ ID NO: 527535 - DNA, 75 bp, Homo sapiens
acacaaagttctccaggggagccgactggattccaaaagggctcattgtcatccccaagccaggccagttctcca

SEQ ID NO: 527536 - DNA, 96 bp, Homo sapiens
tcagtgtactgctaatatactcggactggttgccataaaggaagcccacgacatagagaccaggcttaatgaggtggagaagctgctgaagacgat

SEQ ID NO: 527537 - DNA, 75 bp, Homo sapiens
gaggagctgctgccgcctgacggggctcccgagcacgaacactatggctatgcatcctccaacgtcagccccgcc

SEQ ID NO: 527538 - DNA, 75 bp, Homo sapiens
caagactgagactcaggagtcccaggctttccaggagagagctgatggatttacaactgagtgacagtaactttc

SEQ ID NO: 527539 - DNA, 101 bp, Homo sapiens
aagtggatcctctggccagctgactgcacttcttttttgagaaaggaaggaatatatcctgactgattttctggagagtcttggcttctgggaggaagtca

SEQ ID NO: 527540 - DNA, 100 bp, Homo sapiens
cccgtccctggattcggggctggacgcagcaagcggggcgctgtgtccccaagctccccgtcctcggactgctctggcccatttagagtctcttgcagtg

SEQ ID NO: 527541 - DNA, 75 bp, Homo sapiens
agaagtctggcaggcaaagaggacaaggagattacctggggcaattgatgttatcggtcagactataactatcag

SEQ ID NO: 527542 - DNA, 100 bp, Homo sapiens
gagagcacgagagacccgagttcatcgcctacccccatctccgcatcaggaccaagctgaaggaagaggatcaccttccaagacaaaacagtcttcatgg

SEQ ID NO: 527543 - DNA, 50 bp, Homo sapiens
actggaccgcgccggctgcgctgcaggactcagaattcatgattgaagaa

SEQ ID NO: 527544 - DNA, 82 bp, Homo sapiens
ccgcgcgcagggcctgcagcgggagctggacggcgagcgcgagcggcgcgagaaactgtgccacgaccgtggctatctggtg

SEQ ID NO: 527545 - DNA, 75 bp, Homo sapiens
agctcagccttgaaacccactcttaaatcatttctaccagttcggagagatccggacgatcactgttgtgcagag

SEQ ID NO: 527546 - DNA, 75 bp, Homo sapiens
gaagtttctgcagaggtttttgaggggaaatgcaataccttatttccagatgactcctatcagcacttctctctg

SEQ ID NO: 527547 - DNA, 82 bp, Homo sapiens
ctttgaggagctggagactatcatggaccgggagcgagaagcagtgatggtacacgaggtcccagggcaggagattgaagtg

SEQ ID NO: 527548 - DNA, 82 bp, Homo sapiens
aagctggtgtgcggagatgaagccctaccacttatgtcttggatgaagatgaacctcgattccttgaagaagttgattacag

SEQ ID NO: 527549 - DNA, 88 bp, Homo sapiens
caaatgcctcctgaggatttctgtgcctggaaaatatctgttaacagactgcttttacacctacgtcctggagctggactccatccgc

SEQ ID NO: 527550 - DNA, 82 bp, Homo sapiens
gacttccctttggatgtagcaaggaagaaattgttcagttcttctcagttgggcactgccaccctctcgtggtccaagcagc

SEQ ID NO: 527551 - DNA, 100 bp, Homo sapiens
tgccacgaagcaggaagggagatgcagcatcccagtttttggtcttctgtcaaaaacacagggatgagctgtacaggaagaggcacatacaaagaaaaga

SEQ ID NO: 527552 - DNA, 116 bp, Homo sapiens
ttcttgacctctcaatgaaagtgttgaaacaggatgggaaatattttacacaggcgagagctgttttggcaaaagttggctatccagagtttataatgaatgatactcatgttaat

SEQ ID NO: 527553 - DNA, 90 bp, Homo sapiens
cagaaacgtaaagaaatgcaattgagtttgcaaattcctctctgcccgtgactttggagaacgatggggaaactactgtaagatgtgcag

SEQ ID NO: 527554 - DNA, 82 bp, Homo sapiens
ggtatattttggaagtgtgccagaattggcacaaagcagacattcgtagagaaacatggatgaaacaggaaatctgacagta

SEQ ID NO: 527555 - DNA, 83 bp, Homo sapiens
aggacctgggcggaggccgccaagacgaagaacatgagctgcctgtggacatggaaaccatcaacctggacagagatgcagag

SEQ ID NO: 527556 - DNA, 82 bp, Homo sapiens
agagcgccgcgcacttcgtcatgttcttcgcgccctgattttgcaagaacgaggctcaaggatgtgagggacacagtattga

SEQ ID NO: 527557 - DNA, 100 bp, Homo sapiens
agtcgctggccgtggtcgccgctaggtgagtccatgacagaagaaaccctgaaaagggcaaaggagattgggttctcagataagcagatttcaaaatgcc

SEQ ID NO: 527558 - DNA, 74 bp, Homo sapiens
atggaatcaggcagttttgtgtccatgtgaacaactttaaagctgatacattcctgtgggtcaactatgcaact

SEQ ID NO: 527559 - DNA, 101 bp, Homo sapiens
tctgcatttctgctgtttcagttgtactactacaagcactatttatcaacaaaggtatggtgtggtggactttctttgagtactgggatgcaggttccaag

SEQ ID NO: 527560 - DNA, 78 bp, Homo sapiens
ggccgcgacctggttctcccggagtctacagcagcaacatcacagatgctttcctaagccagaggaagtgtgagccca

SEQ ID NO: 527561 - DNA, 100 bp, Homo sapiens
taccagtgggactttgccagttatgatattctcagggaaaagactactttgtgtgtatccattctggagagattgctccaagctatggaaccggttcacg

SEQ ID NO: 527562 - DNA, 50 bp, Homo sapiens
gctgagggcagagactctcccggttttgagcaaaattttggactgtgaag

SEQ ID NO: 527563 - DNA, 50 bp, Homo sapiens
cctcagtttaaccggatggaagaaatggtccactggtgtgtcctcccctt

SEQ ID NO: 527564 - DNA, 75 bp, Homo sapiens
cggcgctcgccatggccgacgaaaagcccaaggttggcagagtcagcatatatgattccaaaaggcaatccggga

SEQ ID NO: 527565 - DNA, 75 bp, Homo sapiens
tcgtttgccattttcttatggagaactgtccttgttggccacaagcctacagccactccaataaagatgccatac

SEQ ID NO: 527566 - DNA, 75 bp, Homo sapiens
gaggggtatgagccacacatccccgaccacttgcggcctgagtatggtgggccgccaccttgatacgttccccac

SEQ ID NO: 527567 - DNA, 75 bp, Homo sapiens
cccttatgtccactgaagaagggaggcctcactttgaactgatgcctggaaacagagatttgggattagaatcta

SEQ ID NO: 527568 - DNA, 101 bp, Homo sapiens
ctttgtcaactctgtgcacagccgatgtcgtccagtccgaaagaaaccaccttctccagcattgatattcactgatggactccaaagaatcattaactcct

SEQ ID NO: 527569 - DNA, 100 bp, Homo sapiens
ctgtacatcaaaaggatggattaaacgatgatgattttgaaccttacttgagtccacaggagttgtaagacgttcatcgccgtgttatccttgagtaaag

SEQ ID NO: 527570 - DNA, 50 bp, Homo sapiens
ttggaaaatgccaacgccgtgtctgaagaaatgctgctcatggattctcc

SEQ ID NO: 527571 - DNA, 98 bp, Homo sapiens
cttgtcaaaactcagcatgcttagcattcgagagaacaaaattaaacaactacctgctgaaattggaaagaccacagcaagattctttcattcgtctc

SEQ ID NO: 527572 - DNA, 83 bp, Homo sapiens
cgaaaagcggaaggtggcagcgctggagatcgagaagaacaagatcactcaaggtgaaggataatctactaataccagcactt

SEQ ID NO: 527573 - DNA, 80 bp, Homo sapiens
aaaattgggaaggttccctcaagtccaagcgaatagcacccagtcctgcctggcagaagatcatgcagtttggaagtttt

SEQ ID NO: 527574 - DNA, 50 bp, Homo sapiens
tgtcggttggtacagataaaactttaagttctcaacatcagcacctcggt

SEQ ID NO: 527575 - DNA, 88 bp, Homo sapiens
acgtggtgggctatggccaccttggcaatgttgtttaatgtagaaaatggaaccccagcttcacgtgaagccttgtggttgagtgagg

SEQ ID NO: 527576 - DNA, 100 bp, Homo sapiens
agcaagaggcagagaacaagaagcgttcccaggacgacagggcccggcagctgaagggtctcgagttggtgtggttggtacgggaactggtgaagagtgg

SEQ ID NO: 527577 - DNA, 75 bp, Homo sapiens
ggtgcgctgctcaaggacacggtctacaccgacttcgacggcacgggcgaaacgcccacgctgggcactctggac

SEQ ID NO: 527578 - DNA, 90 bp, Homo sapiens
ggccgcgttggggtgagaccctcacttcatccgaaactggcgatggaatatgagaggagccctctggaaagaaaaggacagaccctgtgc

SEQ ID NO: 527579 - DNA, 98 bp, Homo sapiens
tgggacaacattcagacccatttccagtcatgaaatgtcgtgtcctgaagtcatcttattctcgatcctcagctgttaagtattctggatccaaaagc

SEQ ID NO: 527580 - DNA, 98 bp, Homo sapiens
tgctctggaacaactggtgctgatggctcccttggcgaaggagtctgtttttcaacccaggaagggtgattctgggggtccacttgtctgtaatggtg

SEQ ID NO: 527581 - DNA, 82 bp, Homo sapiens
ccaaaacatcgagacgctgcagaacgcgggatatggctttagttgcccctgaagctccttcagaacaagccagaagagtttt

SEQ ID NO: 527582 - DNA, 90 bp, Homo sapiens
gctgaagatgctgccaaaagcataaccaatggcagtgatgatggagctcagccctccacctccacagaggaaggaacagagccacagaga

SEQ ID NO: 527583 - DNA, 75 bp, Homo sapiens
gtcctggtgtggcacgctctcctcctacccaggcggggtttcaccatgttgcccagactggtcttgaactcctga

SEQ ID NO: 527584 - DNA, 75 bp, Homo sapiens
ttgatgaaggcgtggatagcctgaaggcagccattcagatctggaatcaatgtgtgagaccaaaatattatctct

SEQ ID NO: 527585 - DNA, 50 bp, Homo sapiens
ctgtggatgaatttgcttttctggaaggaaggatgccaattctgcgcttc

SEQ ID NO: 527586 - DNA, 75 bp, Homo sapiens
ttcaatccagttccaaggactccacggggctgatatgcagcagaagaaagaacccgttcaggacgactctgatct

SEQ ID NO: 527587 - DNA, 75 bp, Homo sapiens
cccagccaatgaagatgaagacataggaggagccaaaaacctgtatatcatctccgtgaaggggatcaagggacg

SEQ ID NO: 527588 - DNA, 99 bp, Homo sapiens
gcctggctggggagggaccaactgctccagtgctattgacctgaaaagtggttctggaaaagtgtaccaaggccctgcaaaaggtgctgctgatacaac

SEQ ID NO: 527589 - DNA, 90 bp, Homo sapiens
ggcaggcgtgcttgtgggacacccgtttgacacggtcaaggcagcgtcctccagatcgtgtccgcccccgggcagccctaccttcgagcc

SEQ ID NO: 527590 - DNA, 99 bp, Homo sapiens
cgaacaagaggctcgctttgcagcagaaggccggggtcagaaagaaaaaagagggtcccggggccgaggcaggaggacatcagaggaagacacaccaaa

SEQ ID NO: 527591 - DNA, 96 bp, Homo sapiens
ctggaatgtctttgactttgtcactgtgttgggaagtattactgatattttagtaacagagattgcggtggacagcagcaaggaatcagctgaagc

SEQ ID NO: 527592 - DNA, 73 bp, Homo sapiens
ggggcacagcggcagccatatcgccgggttcctgcagagggaggtggaggtggaggaagcgtccctgggatcg

SEQ ID NO: 527593 - DNA, 82 bp, Homo sapiens
aagggattgctggctacagcttcagaagaccgaagcgttcgtatctggaaggaaactgctgcctctgttgaggtcggtgctg

SEQ ID NO: 527594 - DNA, 75 bp, Homo sapiens
gcaagtttaatcagacctgctcacacttcagaatagagaaggatttgttaaggattccaagtaactcttatttgg

SEQ ID NO: 527595 - DNA, 74 bp, Homo sapiens
gtgccgcgcggctcggagccctggaagcagcagctcaccgaggacggggactctaccaaggatgattgcttcaa

SEQ ID NO: 527596 - DNA, 100 bp, Homo sapiens
cgcacactggatgaatggaagcatgaacacacaccgggctggttgggctcgggcccgctgtggggcgctgctgcagccgctcttcacattatgccacgcg

SEQ ID NO: 527597 - DNA, 100 bp, Homo sapiens
caagctcctacttccagaaaaagtgctcctgggactccaggataccaggatgatcctttcaaaaataaagccttgttatttagcaacaacacgcaagagt

SEQ ID NO: 527598 - DNA, 100 bp, Homo sapiens
tttatatgcagatatttcagttgcctaatgatcctccccggcgtgaaggtcatcatcgcacacaccgagaccaaaggacccttgggagactcacacctgg

SEQ ID NO: 527599 - DNA, 50 bp, Homo sapiens
aactttgcatcctgcagtccatgctggtttgatctgtggatgaaatgaat

SEQ ID NO: 527600 - DNA, 100 bp, Homo sapiens
gtccatgtgagagaagctggctgctgaaatgactgcgaaccggcttgcagagaggttaataatccagttgcatgagaaggaacagcatgttcaagatatc

SEQ ID NO: 527601 - DNA, 75 bp, Homo sapiens
tattcttcaaatggctttaccctcccagtagctccaggctcacttatgtctgtaaagatgggaaaaaaatacaag

SEQ ID NO: 527602 - DNA, 116 bp, Homo sapiens
actgcgggtcccgattgctgcagccgcttgtcagtgtgatgaagattggcacccaggtgctggagaatctggtaaaagcaccattgtgaagcagatgaggatcctgcatgttaatg

SEQ ID NO: 527603 - DNA, 99 bp, Homo sapiens
ggaaaaccccaggaagaagaccagcccttgcctgcccgacggctctcctctgactgcagcgtcactcaggcttataccagccagtttgtatcccttgtg

SEQ ID NO: 527604 - DNA, 75 bp, Homo sapiens
tccttcttcctcaactatctcgctgacacgcagcggaaggagagttttacatggaagtggcttacagaaacttgg

SEQ ID NO: 527605 - DNA, 75 bp, Homo sapiens
cgacggtccaaatttggaatgaaggagacggtaaagaacaggtccaagaaaagctcaaagaaagcaaataccagc

SEQ ID NO: 527606 - DNA, 88 bp, Homo sapiens
ggggtcatgcccatcgccatgagcatcaaggcaggcacggtggatgaggactcgtcaggctccgatgctgattcctaaagaaaagccc

SEQ ID NO: 527607 - DNA, 83 bp, Homo sapiens
cttgggccaaaggacagttagaagacagtagaaatacatatcgaatgattgaacaagatgactttgacattaacaccaggcta

SEQ ID NO: 527608 - DNA, 73 bp, Homo sapiens
cagggggcttctcgcctcaccacttcctccaggtcctgaaggacagagagacgcatcttctctccagactgcc

SEQ ID NO: 527609 - DNA, 83 bp, Homo sapiens
cctccgagccccttcctgagaagatcccagggattgctgtgcctgtgggcgaggcccaccgccacgagcctcctgttcctcac

SEQ ID NO: 527610 - DNA, 83 bp, Homo sapiens
caacaccctgctcggccagaagaaagaaagtgtcatttttattccaggccataaaattttgagtagaaaaatccagaaatttg

SEQ ID NO: 527611 - DNA, 78 bp, Homo sapiens
taccatatggcccatggaaaagattttgcatctagaggaattgaaacaaaccagtccagctacgggggcccagccagc

SEQ ID NO: 527612 - DNA, 98 bp, Homo sapiens
cagatacacctgaaaatcttcgcctgaagcagcaaagtgaattgcagagtcagccttgcagtctcatcctactcaagtgtggctctgtatccaacaac

SEQ ID NO: 527613 - DNA, 100 bp, Homo sapiens
tcgttttgatggatatatcttccttgacagcaaagatattgatgatgttaagaagttcaaaccgggttacctggaagctactcttaattggtttagatta

SEQ ID NO: 527614 - DNA, 87 bp, Homo sapiens
acgccctcatggggaaaatctccccggtgactttcaggattgatttccagagacttatgttacttgaggaagacaccaagaaggcaa

SEQ ID NO: 527615 - DNA, 82 bp, Homo sapiens
gcggcgagtttccgatttaaagctgagctgcgaggaaaatggcggcgggaggatcatggggttgacagcagcattttccaga

SEQ ID NO: 527616 - DNA, 101 bp, Homo sapiens
ggccctttgacctgcaggtattgggagatccacagccaagagccaggaccccctagaagtctagaaatgtgtgggacgacttcagcatgtctcaggccacc

SEQ ID NO: 527617 - DNA, 100 bp, Homo sapiens
cgcagcccgggcccaggccccggcagcgcctgggacaagggaggtggggaagacagggctccagctaccacaggacgggctctgggtatagccgttccag

SEQ ID NO: 527618 - DNA, 75 bp, Homo sapiens
cagcgaggaagaagaggacgacgacgacgaggaagaggaggtttctgagattgcttgcacacatttagatgtgga

SEQ ID NO: 527619 - DNA, 110 bp, Homo sapiens
cggtggaggcgtacatcactgtcgtctcatgggagaaagacactgtttcacttgtctcagaaaagaggcacagttagatgaagaaggacagtttcttgtcagaataatat

SEQ ID NO: 527620 - DNA, 83 bp, Homo sapiens
gactttggcattgtgtctggaatgctcaatgtcaaatgggaccggattgccccctgtggaataatggcaacagaaagactggc

SEQ ID NO: 527621 - DNA, 96 bp, Homo sapiens
ggctcagatctccatgacaaccaccagtcaccttcctgttggtctgcgcaggcatggcactaagtgtcccatggcacatttggccctcatggaggc

SEQ ID NO: 527622 - DNA, 75 bp, Homo sapiens
cagcctgcggagcctgtggggcaggaaatgctgtctatgatttcttcattggccgtgaattaaaccctcgaattg

SEQ ID NO: 527623 - DNA, 98 bp, Homo sapiens
ggggaaaatggcggacgggaaggcgggagacgagaagcctgaaaagtcgcagcgagctggagccgccggaggaaaaccgtcttcagatacagtcccta

SEQ ID NO: 527624 - DNA, 51 bp, Homo sapiens
tttctttggagacaaaactatgccatggaaagctcaccagagatcctaaag

SEQ ID NO: 527625 - DNA, 82 bp, Homo sapiens
ccttgccaccctcatctccaatatggtgcacctggtgacccagcatggtgaagagttcaggcgcatgctggatggacgctgg

SEQ ID NO: 527626 - DNA, 95 bp, Homo sapiens
tttatggtgcagagattgtctcggctcttgagtacttgcactcgcgggacgtggtataccgcgacatcaaggcctgtggactttctcctcgagac

SEQ ID NO: 527627 - DNA, 75 bp, Homo sapiens
tttgccagatctgcagagatcaaaacaagccctccaggaactcacatacagcaatgatgtgacttctttgccttt

SEQ ID NO: 527628 - DNA, 74 bp, Homo sapiens
acagttctgccggcagatatgtttcaagacgctgtaaacctctgaaggttatatcttaagtgtggtgctgctaa

SEQ ID NO: 527629 - DNA, 82 bp, Homo sapiens
cccgagcgcccgaggcgtctgggatggtgtgggaccggtaagactttgaccccgacgcaggcttcagtgattgccgcggatc

SEQ ID NO: 527630 - DNA, 75 bp, Homo sapiens
gcctcttcgagcgccgcggacgcgtcatcgagtgtgacgtggtgaaagacctgcctagagctggaacgttacctc

SEQ ID NO: 527631 - DNA, 98 bp, Homo sapiens
gtggaatttttcatcagagataaatatgaaaagaagaaatactacgataaaaatgccatagctattacaaatgtaaattggcaggatgaggagcagca

SEQ ID NO: 527632 - DNA, 100 bp, Homo sapiens
caaaacaaaagtggttacttctgactggtatatctgcacaggtcagtcatatcatttggatcaaaaaatagaacaatcggagttgcagccaaaaatcagg

SEQ ID NO: 527633 - DNA, 76 bp, Homo sapiens
cggcgtacgccctcatggggaaaatctccccggtgactttcagtttatgaagcatctgaagaagcagtcctagaag

SEQ ID NO: 527634 - DNA, 100 bp, Homo sapiens
cgcggccgctctgcgcgttttccgatttcttgctggttgaatacctccctctccactcccatcttcagggaattgaatgatctggcacgggaccctccag

SEQ ID NO: 527635 - DNA, 83 bp, Homo sapiens
tctcttgacaaagatggcactggacaaatccaggtgaacatccaggagatattgatgaccatgagatccctgctcagaacccc

SEQ ID NO: 527636 - DNA, 101 bp, Homo sapiens
gccacacccccagttggttgcagttccagaaattcttatgccggtctagatccaagcaaccaggccctccctatcctgaagacattagctgagagtctggc

SEQ ID NO: 527637 - DNA, 50 bp, Homo sapiens
caggattaacactgcagagtaatgatctcagtggttcaatagcatcccca

SEQ ID NO: 527638 - DNA, 83 bp, Homo sapiens
cgggcacagccttcctgtgtggttttaccgcccagagagcgtcatggacctggattaacgtcttcaaggacccagttgctgat

SEQ ID NO: 527639 - DNA, 83 bp, Homo sapiens
ctcgcccagctcgcccagcgtccgccgcgcctcggccaaggagcatattaatgaaaagtgccataaactgaaaaaccaaacat

SEQ ID NO: 527640 - DNA, 98 bp, Homo sapiens
gcagagagtcagccccaccaatatgcaaggcttcaccaagagtcttaatgccttcaacgtaggcgatgactggcagttgcagtggtgcagaatggctg

SEQ ID NO: 527641 - DNA, 100 bp, Homo sapiens
cctctggcctgtggcattgtttctggcaagtacgacagtggcatcccaccctactcaagagcctccttgaagaagcggctgcagcctcctgatttcatcg

SEQ ID NO: 527642 - DNA, 76 bp, Homo sapiens
taaagctgttttggaactgtcaggtacctcaaagcgctttatgaaggcaaagaacagatggagtttgaagaatcca

SEQ ID NO: 527643 - DNA, 100 bp, Homo sapiens
tcgactacaagaagagggcggagcggagacgggagtattatgaaaagatcgcttactgtggatttctccgtcctggagtttcttcagagaatctttctgc

SEQ ID NO: 527644 - DNA, 96 bp, Homo sapiens
aatcctgaaagccatgcagcggtctctgcgatatgataccagctattttgtggagtattttgccttggatctcctgatggagaatggggagtgccg

SEQ ID NO: 527645 - DNA, 50 bp, Homo sapiens
gaaaattcaggcaacgcctcgcgttggtgtacctggccttgggcctgacc

SEQ ID NO: 527646 - DNA, 52 bp, Homo sapiens
ccctgaccattttctactgtccctgcgcgagatgggtcatcttactctggaa

SEQ ID NO: 527647 - DNA, 100 bp, Homo sapiens
ccaaggatgagatctatgccaactgccacaagatgctgggcgaggatggccaggccaccggcgccaaggacacaaagccaatgggcaggtctggggccac

SEQ ID NO: 527648 - DNA, 82 bp, Homo sapiens
ccgcgcccgcggaaccagaccagggccgcctgggcagaatgtcacgatggacgagggcggcacgcccctgctccccgacagc

SEQ ID NO: 527649 - DNA, 83 bp, Homo sapiens
cgaagacagtccctggatcaccgacagcacagacagaatccctgctaccaacttcccaagtaagaagcggaagaggagccgct

SEQ ID NO: 527650 - DNA, 74 bp, Homo sapiens
caggatctcgggctcggaacgagactgcacgtgcctgatcaactttctagcgggagaacgatcatggaggtggt

SEQ ID NO: 527651 - DNA, 83 bp, Homo sapiens
gctgatgaagcttctgaaccatccacacatcataaagctttaccaggaggcaagtgaggcctatctggttggcctttttgaag

SEQ ID NO: 527652 - DNA, 82 bp, Homo sapiens
ctcaaagaagtttgtccttctgctattgatcctgaagatggactctcactctgtcgcccaggctggagtgcattggaacgat

SEQ ID NO: 527653 - DNA, 100 bp, Homo sapiens
ctcctgtgttttttcagactccttggaaattaaggaatgcaattctgccaccatgatggaaggaaacccagcgtttgctggcagaaccagttcctggcat

SEQ ID NO: 527654 - DNA, 75 bp, Homo sapiens
ttcgggtgtctcgtgtgtgaacatcacaggataaaagaatcagagtgtctcaacccttgacaagaggaccaagtg

SEQ ID NO: 527655 - DNA, 82 bp, Homo sapiens
gctgccccggccgcctgcgcacccggcagcaccatgacagcggagctggagtttgttcagatcatcatcatcgtggtggtga

SEQ ID NO: 527656 - DNA, 100 bp, Homo sapiens
gcaaggaacaaaatgtttgtaaattctccttttaccaagactcagattgatggacaacttttcttaattaagcaccttttgatacttcgtgaacaaattg

SEQ ID NO: 527657 - DNA, 98 bp, Homo sapiens
cctcaacatctctcagagacgaaaggatgtaaatgaagaccctggagaagatgtggccctcctctctgttagttttgaggacactgaagccacccagg

SEQ ID NO: 527658 - DNA, 90 bp, Homo sapiens
attgaattgaagaaaattgcacgtaatcacccaaatgccaaaaaatggtgtgaatggaacattaacttcaaatgtagcagactctccccg

SEQ ID NO: 527659 - DNA, 100 bp, Homo sapiens
ctgaagcgactgagtccgcgatggaggtgaggaattttaaattggaacaagagcaagaaaaaaacaaaatcttgtcagaagcactggagacgctggccac

SEQ ID NO: 527660 - DNA, 100 bp, Homo sapiens
ctcctgaaactgaaggcacagctgggtcctgatgaaagcaaacagaaatttgtgctcaaaacccccaagaatgcaatgagagccactatggaacaccatg

SEQ ID NO: 527661 - DNA, 105 bp, Homo sapiens
atcctgccatgcaggcaggccctgagcacgctgctgtgtgagcagcagctgaggcaacttctcctagaatctcaatctcagctcgatgccgccaagagcgaagcc

SEQ ID NO: 527662 - DNA, 75 bp, Homo sapiens
tcaaagcaacagaaacaaaagcaggcaaatggagtcgttgggaatgaatgaatctgaagtctgctgcagtaaaac

SEQ ID NO: 527663 - DNA, 83 bp, Homo sapiens
cagctgcgggccctgacgcgcggtgagaagccctaccactgcaactgggacggctgcggctggaagtttgcgcgctcagacga

SEQ ID NO: 527664 - DNA, 100 bp, Homo sapiens
actccggagacagcccaaatatcctcggaagagcgctcccaggagaaacaaacagagccgctaccctggaggaggggaacccaacagacgaggtccccag

SEQ ID NO: 527665 - DNA, 50 bp, Homo sapiens
aggccaatccggggcaaggaatacgctctggcaggctgccctgagcacgc

SEQ ID NO: 527666 - DNA, 100 bp, Homo sapiens
aaattgtacaatttgggattaaaaggctattacatcagagacagtggcaacaattcaggtgatgaagtattagaatggaatggaagactactgcaaggag

SEQ ID NO: 527667 - DNA, 118 bp, Homo sapiens
ctacagtggcctgaagggtgagaagcacggccgcggaagcagataccagcgtttgctgccaattgatggggcaaatgatctcttttttcagccacctccactgactcctacctccaaa

SEQ ID NO: 527668 - DNA, 96 bp, Homo sapiens
ctcctgagtagctgggactgcagatattgccaaatatcagatcataaaggacaggaattctgaagaggataaaatcgtagacagaccattaccaaa

SEQ ID NO: 527669 - DNA, 90 bp, Homo sapiens
tggacccttggagccatcctctacaggacccgctttctaccattaagggggcagctggcattttatgctatgtgggagcctatgtcttca

SEQ ID NO: 527670 - DNA, 100 bp, Homo sapiens
gaagcagctggactctctgcgggagaggctgcagcggaggcggaagcaggactcggggcacttgggcggctgccgagtgatagagcagaaggaggttccc

SEQ ID NO: 527671 - DNA, 75 bp, Homo sapiens
ggaacaggcatcatggactgtgcgcccaaggaataactcaagtcacctgtactggaaatcagtttgctgaaatta

SEQ ID NO: 527672 - DNA, 100 bp, Homo sapiens
tctgcatggaagagtttgaggacatggagagaagtctgccactacagaccatccgagagctgtttgatatgcccctggaggaaccttctagctcatccgt

SEQ ID NO: 527673 - DNA, 82 bp, Homo sapiens
gctggtgaccctgccgctggcgagcgccaccgcatggcaagagtgagccatggagctacgtgtggggaacaagtaccgcctg

SEQ ID NO: 527674 - DNA, 100 bp, Homo sapiens
gcccacccaccactgagcctcatggtactgtaataggtgttgtcatttataccggaaaagagactcgaagtgtaatgaacacatccaatccaaaaaataa

SEQ ID NO: 527675 - DNA, 89 bp, Homo sapiens
tgaacggtcggcagaagaacgggaccaccgccctcattcatgctgcagagaaggcaatgaatcgctccctggctaatgtgattcttgga

SEQ ID NO: 527676 - DNA, 74 bp, Homo sapiens
aaatgtgaagttggaaaataaattgccatctgatatgaagagaaggctactaaagacttggaacgatacaatag

SEQ ID NO: 527677 - DNA, 51 bp, Homo sapiens
ctccaaattcgcctccatctgtaccatgattgtgaaccatgcctttagtga

SEQ ID NO: 527678 - DNA, 90 bp, Homo sapiens
ggtgcaagatactatataaatcgtgatgagaggagatggattgaaaagcagaacagagcaacaagagcacaaagaaaaaaagaagaaatg

SEQ ID NO: 527679 - DNA, 90 bp, Homo sapiens
gaaaagcgctccctctaccggcggggtgaagaagcctcatcgctacagattcatgatgttgctatcaaaagttgagaaattgtcagaaga

SEQ ID NO: 527680 - DNA, 83 bp, Homo sapiens
cccagccaaggtgtcatgctgccttgtggggtgactgaggaaccccagcgactcttttatggatttttagactctgaggagca

SEQ ID NO: 527681 - DNA, 50 bp, Homo sapiens
tataaccctactccacgtctgggaaaagaagatctcccggagcagtgccc

SEQ ID NO: 527682 - DNA, 101 bp, Homo sapiens
cgcgcctggacactcgcggggcgccgacctggcaggatcgggcccgggacacccagacagatgagattgtcgcactgaagaaggtgcggatggacaaggag

SEQ ID NO: 527683 - DNA, 100 bp, Homo sapiens
agcaggcagcctcttccagtgggcagggtcagcaggcccaaacccccacagctggctttgggggcatcctggggctgggcagcctaggcctgggctctgc

SEQ ID NO: 527684 - DNA, 98 bp, Homo sapiens
ataagctatatactttggttacctatgtacctgttaccactttcaaaaagcttctcgaaacaagtctgagaagaagcgtcgggaccagttcaatgttc

SEQ ID NO: 527685 - DNA, 51 bp, Homo sapiens
atggatagtatgaatgatcaagagacgagttgtactgctgtcacaggaaat

SEQ ID NO: 527686 - DNA, 75 bp, Homo sapiens
aacaaaacattcatggagggggaaaacgagcctctgactccaggttatcatggattcccagcgcgggacagccag

SEQ ID NO: 527687 - DNA, 100 bp, Homo sapiens
ttctcaactactcatagagccccatcctcccagaggttctgccatgcaagtggcctggcgtttccttgaccatgcaggcattttccgaagaggaaaggaa

SEQ ID NO: 527688 - DNA, 100 bp, Homo sapiens
ctcaagcgatctacccaccttaccctcccaaagtggtgagattacagtgatccccccaggggtgcccgatgcccaccccagggaaggagacctgccagtg

SEQ ID NO: 527689 - DNA, 100 bp, Homo sapiens
gttcctgttacctctcatcattgtgttaatggtgaagcacagcgattcccatcactgtgtccactactatgatcttcgtaacactaaacagccaatcatg

SEQ ID NO: 527690 - DNA, 82 bp, Homo sapiens
cctgcggccaattcggtggaacgaggacgcggactgcgaaggcagttggaaaatggatataccttatttgattatgatgttg

SEQ ID NO: 527691 - DNA, 75 bp, Homo sapiens
ccttacctcatttggaaactattgtctactcacagtgatgaagtaacaggaggcctcatgggacctgtcaggatg

SEQ ID NO: 527692 - DNA, 100 bp, Homo sapiens
ctggaatttgttacgcaagtatcgccatggcgacagattatgactgctggaaggagcacgaggaagcaattagcctgaggcctgctcagtcgttcctaat

SEQ ID NO: 527693 - DNA, 101 bp, Homo sapiens
cccacacttcgcggcttcttcatgctttttcttctcaccatttctggccaaaactacaaacaagacttcgcaggcgatcagtgggtgaccgcggctgcgag

SEQ ID NO: 527694 - DNA, 100 bp, Homo sapiens
tccccttcaactcttttctctcgggcttcatctcttgtgtggggagtttcatcctagcggagacccccaacacagcaggcgcaggggccacaggcggcat

SEQ ID NO: 527695 - DNA, 144 bp, Homo sapiens
aggtggaccccaagaagaccattcagatgggatctttccggatcaatccagatggcagccagtcagtggtggaggatgggtcatcagttaaggaagttgaaacctaccaccggacacgtgctttaagatctttgagaaaagatg

SEQ ID NO: 527696 - DNA, 90 bp, Homo sapiens
ccagggcggacagcagcctcgggtgcaatcctggagccccccagtgagggttggaaaagagactgttcaaaccactgaggatcagatttt

SEQ ID NO: 527697 - DNA, 83 bp, Homo sapiens
ggaaaacagagaaagaagtgataggagggctctgtagggcaacaggtttgtctatgctggctctaactcgggcgtggtccagg

SEQ ID NO: 527698 - DNA, 80 bp, Homo sapiens
ctggaagatggacgtactttgtctgactacaatattcaaaagggccatcactgtgcatgtccccatgccctcagcaggag

SEQ ID NO: 527699 - DNA, 100 bp, Homo sapiens
cttcgcctccttcaccgccgcagaccccttcaagttctagtcatggaggctgtaaaagaattcattgagcctgaaatagacgagtcttttaaagaagatg

SEQ ID NO: 527700 - DNA, 97 bp, Homo sapiens
gcccgggacccccgggggcgcagagcaaggctaaagagctacctctttctgctgtacgctttatggaagaattgggtgagtgtgcctttggaaaaat

SEQ ID NO: 527701 - DNA, 134 bp, Homo sapiens
cttcggcctctccctgtactggaatcaggtccagggccccccaaaaccccggtggcacaaaaacctgatcagtggaccatcccctgcccggatcctctctctccacagactatggcagctggcagatggtaacg

SEQ ID NO: 527702 - DNA, 90 bp, Homo sapiens
gcgggcgcccgccgccgagccgtctcctgcagcggcccccgccggggaactctaatgatccaggacaaagaagttaccctggagtatgta

SEQ ID NO: 527703 - DNA, 101 bp, Homo sapiens
tggactctgcagagtgaagagaaaatagcaaacgatccagacggcagggagtgcatcaaaggtgtgaacacaggatgctggaggtcagcagattggcttct

SEQ ID NO: 527704 - DNA, 97 bp, Homo sapiens
ttttgatatggattatacccttgctggatctcatctggccaccgcgttctggaagaggcgagagggagagcgtgcgcgagaggagagagacggcggg

SEQ ID NO: 527705 - DNA, 83 bp, Homo sapiens
gcggatctcaccgccgctcaggggggcaagcgcgatgaagagctggttctgcccatcaactcctccctgagcgtcactctgca

SEQ ID NO: 527706 - DNA, 97 bp, Homo sapiens
agttggaatttgtgcaatgtttagccaacccaaattaccttaattttggtgaggtaacatacgtggagctcttaatggacgctgaaggaaagtcaag

SEQ ID NO: 527707 - DNA, 100 bp, Homo sapiens
ctggaggagcagttgtctgatgaagagaagctgtgttggggtggaagaggaggaggcgcccgacatcgacatataccactgcccaaactgtgagaaaacc

SEQ ID NO: 527708 - DNA, 75 bp, Homo sapiens
gctgtacatcgtattacacctgaggaggccaagacctcctgacagtgagtgagactgccaatgagccccctcaag

SEQ ID NO: 527709 - DNA, 100 bp, Homo sapiens
ctccttcccgccgccccgggccggggccggccctctcccgagctcagagagtaaatgccccacgtgtgtgctgagcaggagctgaccctggtgggccgcc

SEQ ID NO: 527710 - DNA, 82 bp, Homo sapiens
tggccacttgcttgggatcctttatcctggtcatcttctatttccaaagtttttagaacttcagccataaaaatgggcagaa

SEQ ID NO: 527711 - DNA, 100 bp, Homo sapiens
cgcggagggagcggcggccgagttctccagcctgctgcgcaggataaaaggcaaactcttcacctgggtgggattaaaaactcagcctgaatcaaaatgc

SEQ ID NO: 527712 - DNA, 75 bp, Homo sapiens
caagagtctttaaagcacggacttacacctattgcttccttcaaaatgtctactgttcacgaaatcctgtgcaag

SEQ ID NO: 527713 - DNA, 89 bp, Homo sapiens
cacccggcgcaggagcggccgcgtttcggcctcagaaattgtctaaagccccaggaaaaatggtggaaaattcaccgtcgccattgcca

SEQ ID NO: 527714 - DNA, 83 bp, Homo sapiens
ggacctcttcgacatcgaggatgacatcatctacactcaggacttcacggtgcccggcacccgagtgtacagccccccggagt

SEQ ID NO: 527715 - DNA, 95 bp, Homo sapiens
ccacggctcatcatagctggcaccagcgcctatgctcgcctcattgactacgcccgcatgagagaggtgtggtgactctgctgtctgactacgag

SEQ ID NO: 527716 - DNA, 80 bp, Homo sapiens
tgacagagctttgatagtcgtaccatatgcagaagactgcaaaattcaaaatggggctcaaggtattcgtttcatctaca

SEQ ID NO: 527717 - DNA, 101 bp, Homo sapiens
gtcgacatgagtgatgtggaggaaaacaacttcgagggcagagaagatgagaatgtgcctactgctcctgatcctccaagtcaacatttacgtgggcatgg

SEQ ID NO: 527718 - DNA, 97 bp, Homo sapiens
acgagtcggacttcctcaacaatgcgattttgcaagaacgaggctcaaggatgtgagggacacagtattgacagctgaagaaatgatttacgttttc

SEQ ID NO: 527719 - DNA, 90 bp, Homo sapiens
gcggcggcgacacgacgcgcagcagctgcagcagctcaagcacctggagtccttttactccacaggatccgctgaacataggatgttgcc

SEQ ID NO: 527720 - DNA, 100 bp, Homo sapiens
gcaagcccgacctgcgagtcatcacttcccaggcaggaaaggggttaatgcatcacttggagctgggcatccaagaagaagcagcctcatttgttttctg

SEQ ID NO: 527721 - DNA, 83 bp, Homo sapiens
ccggagcgaacgccacgccgttgggttaacacagaaatctgcctcctgggccatgccgcttctaaggcctgtttcttctcatg

SEQ ID NO: 527722 - DNA, 100 bp, Homo sapiens
caaggctttgtgggctgcgcactcagctccaccatccagcgcttctacaagaacgagggagagcacatctgcctgatccgcaaggtgaacgagaactggt

SEQ ID NO: 527723 - DNA, 100 bp, Homo sapiens
atgctacctgattgcccccgggtctcagcagcacaccgttccggaaggcaaaagccttgtatgcctgcaaagctgaacatgactcagaactttcgttcac

SEQ ID NO: 527724 - DNA, 75 bp, Homo sapiens
agccctttgatgaccgcagcaggtatctgtaattcttgcccaccaaacaagcctgcagaatctgttcagtcaaat

SEQ ID NO: 527725 - DNA, 75 bp, Homo sapiens
tgccagaggtcaacaaggttctggacaagatgaagtctttctgccaggttcctttgcccaaagactcaacaggtg

SEQ ID NO: 527726 - DNA, 75 bp, Homo sapiens
cgtcctctcgcaacgtggctgtggagcgtaagaacctgatcaccgtgtgcagaaaaagcggatggtggttcctgc

SEQ ID NO: 527727 - DNA, 50 bp, Homo sapiens
gacatcgagatcaaccgggagccgggttcttgggtgtctctggggagtcc

SEQ ID NO: 527728 - DNA, 87 bp, Homo sapiens
tatcacaagctgcaccagcttctaaccgactgcagcatatcgtgagtgatgagatctgtgtgcaggtgactgacctttacctggcag

SEQ ID NO: 527729 - DNA, 107 bp, Homo sapiens
acagagccacgtcatccgcggctacgtgggcaaccgggcggccacgttcccgctgcagatgatatcatcaagttgaatcgaaaggaagggaagaagcagaattttcc

SEQ ID NO: 527730 - DNA, 101 bp, Homo sapiens
cgccgcccagccgcgccccagccagccctgcggcagctgcacagttggggatcttcaaaccaagatagatggcttggaaaagactaactcaaagcttcaag

SEQ ID NO: 527731 - DNA, 100 bp, Homo sapiens
tagtttttcaccttagagccagcaaggccaaaccgcccagtcacccgacttcccacagtctcagcagctattgacctgaaaagtggttctggaaaagtgt

SEQ ID NO: 527732 - DNA, 82 bp, Homo sapiens
ctggctctaagatctgaatgttgtgaccactaatttggttttttgccctgacatctcttcgtcttgtgtttttacttgcatt

SEQ ID NO: 527733 - DNA, 90 bp, Homo sapiens
gcttggaatctcgagcgggaaaagtcaagtccatcatctccagaaccagctagtcttcctgcagaagatattagtgcaaactccaatggc

SEQ ID NO: 527734 - DNA, 90 bp, Homo sapiens
gggccttgataacacagagtttcaaggttgttcctcaaagtcattcaagctgtactcgccgaaggagcccccgaacggcaacgcctttcc

SEQ ID NO: 527735 - DNA, 99 bp, Homo sapiens
attatccgaaaccgcctcactggttttttgctccactcaagcctgttagaatcaccatggaatacagctccagtgggaaggccactggagaagctgatg

SEQ ID NO: 527736 - DNA, 82 bp, Homo sapiens
ccactgtggtggaggccaagctgataaaacacaagaaggggattgtcagtccgtgtttatgatccagcatccccccagcgcc

SEQ ID NO: 527737 - DNA, 90 bp, Homo sapiens
gagcagtctctgcccccgccggccggcctcaacagtctcagctgagtctgctctgatcacccaacaagacctagctccccagcagagagc

SEQ ID NO: 527738 - DNA, 50 bp, Homo sapiens
gcgcccagcgccgcgccgggaggcaagtgaaccggagcaaacgacttccg

SEQ ID NO: 527739 - DNA, 82 bp, Homo sapiens
ggctttggtccccagcgcagtgaagtggtgagcctttttgtcactgttgcagttgccaatacctatgcctgtaaggggctag

SEQ ID NO: 527740 - DNA, 83 bp, Homo sapiens
gacgggcatgccaagaagatgagaccgggggaggcgacgctaagttgctgatcgtggcgctcaccatggatgatgatatcgcc

SEQ ID NO: 527741 - DNA, 89 bp, Homo sapiens
gagactcacctccaagaagcaattgtgttttcagaccctggtttctgagaccatccgccgatttggccgcctggattgtgttgtcaaca

SEQ ID NO: 527742 - DNA, 83 bp, Homo sapiens
cgggaatatatccgaagcctgaagatggttccaagtattccctatctagcctggtccgacccccagtggcactaacgtgggat

SEQ ID NO: 527743 - DNA, 51 bp, Homo sapiens
cccccttcttcaagacccacgaggaggcactggctacaattaggcttctcg

SEQ ID NO: 527744 - DNA, 100 bp, Homo sapiens
ttcccggaatcagacggtgccccatagatggccagctttcccccgagggtcaacgagaaagagatcggtgtctcactttgtcgcccaggctggagtacag

SEQ ID NO: 527745 - DNA, 98 bp, Homo sapiens
tgctacaatttctagtcagatttcaggttcagtgacatcagaaaatgtgtccagagattacaaggtaaatgagctggatggtatcccgttgatcctgg

SEQ ID NO: 527746 - DNA, 82 bp, Homo sapiens
caccctcacttactccaggatgaggggcatggtggcaattctcatcggtgtcgtgaaaactacccctaaaagccaaaatggg

SEQ ID NO: 527747 - DNA, 75 bp, Homo sapiens
gacagaaggatgtaaaggatggaaaatacagccagggtggttctcttcccaaagtggaagccaaattcatcaatt

SEQ ID NO: 527748 - DNA, 49 bp, Homo sapiens
ataatcaatcctcaagacctaacagaatgtcaaaactggaccaatgggg

SEQ ID NO: 527749 - DNA, 108 bp, Homo sapiens
cgtggccttagctgtgctcgcgctactctctctttctggcctggaggctatccagcgtgcagaggccaagaccgttttgcccaagaaggagaaaatgaagctgaggcg

SEQ ID NO: 527750 - DNA, 50 bp, Homo sapiens
agttttcattgggcaaaatggggcagttaatctcatgctcagaagatggc

SEQ ID NO: 527751 - DNA, 50 bp, Homo sapiens
ctggtcagcaacctcaacccagaggctgcaagatcaaggccctgcgggcc

SEQ ID NO: 527752 - DNA, 100 bp, Homo sapiens
tgtcaagcgaagccttgaaaaagctgccctgagacggtgtcccgccgaaagatgtttactgaactgcaacagatgaggcaacagttaccagacatggaat

SEQ ID NO: 527753 - DNA, 96 bp, Homo sapiens
tttggatgtgggatccggttccttggtgtcatccagccttagcaaaccagagagagctcagaaatatgctcagcaagtcttgcagaaggaatgtcg

SEQ ID NO: 527754 - DNA, 90 bp, Homo sapiens
gcctcaccatacaggaacagggcagacgttagcgtgagtgatcactctcaatcccgggtcctccagcagcctgacctgagtgggttagtg

SEQ ID NO: 527755 - DNA, 75 bp, Homo sapiens
tactgttctggttatcttcatcatcatcatcatcggtaaaaccttgttagccaaagcagtagcaaaccaaacctc

SEQ ID NO: 527756 - DNA, 109 bp, Homo sapiens
aaaacacaacttgaacatcatgattaaacgctacaactctaccgctgctaccaatgccctgccataggacaggctgaggctgagtctcagtgttgccctgttcagtctg

SEQ ID NO: 527757 - DNA, 98 bp, Homo sapiens
cgttctttcgcttttttacctgccaatcaaactgctacaagacaacaccctgatctggcatggacatagatgcagaggatgctatttatggaagaaat

SEQ ID NO: 527758 - DNA, 100 bp, Homo sapiens
gtgcaacgagatggagtgggctggcgcctcgggagagcgaatcgagggcggcgggattattgcatcgagcttttagtgtcttcttattcaacaccgaaaa

SEQ ID NO: 527759 - DNA, 75 bp, Homo sapiens
ccggcaggcagtcacaagcagcagaacttcgggttagagacaactttgggtggatccatgaactctgtgtctaaa

SEQ ID NO: 527760 - DNA, 82 bp, Homo sapiens
aatacgggacagaattgaatcagggagatatgaagcctccaagctatgattctgactgtttcagactccaagccagatttgt

SEQ ID NO: 527761 - DNA, 80 bp, Homo sapiens
cccgtacgtcactaccactgtctctgctcacagtgccaagacctcctgccccccgaggtctgcagtctcctgaacccagc

SEQ ID NO: 527762 - DNA, 75 bp, Homo sapiens
gtttacaattcacaaaggaagcattgaagaccgtcttaaagaatttctggcggaaatcataagtgcgctgccatt

SEQ ID NO: 527763 - DNA, 102 bp, Homo sapiens
ctcttgccaaacagaccttgaaagacaaaactggcactgattcaaattcaacagaatcctctgaaacttccacaggtattggcatactccacacatctgtac

SEQ ID NO: 527764 - DNA, 75 bp, Homo sapiens
gaaggggcagtacaagcttacgtctctgctcttcagtacaatcctccaaaacctattgatgtacaagtcattaca

SEQ ID NO: 527765 - DNA, 99 bp, Homo sapiens
ttcacttagctctacaatcaacccatgtggatggtgaagtggatgctgaagaacttcagagatgtttgacacagtctggaattaatggaacttactctc

SEQ ID NO: 527766 - DNA, 50 bp, Homo sapiens
ccacaaagaagaaaactatccttcagactcctgagcctgcaggactttcc

SEQ ID NO: 527767 - DNA, 75 bp, Homo sapiens
ccagccccgagcgggacagcgcggcggggagcgacgacgttaaaaggatctgaacaaagtctgctcaaatctcct

SEQ ID NO: 527768 - DNA, 100 bp, Homo sapiens
agtggaaaggtgaccaagcccaaagaggagaaagatgcttctaaggaaatgaaagctcattagcatctacactgaagacgctcctgttcttcacagcttt

SEQ ID NO: 527769 - DNA, 93 bp, Homo sapiens
ccgctgctgccgccgccgcccgcgaagccggagctcgagccgcagcgggtcaaaatgcagatcttcgtgaaaacccttaccggcaagaccatc

SEQ ID NO: 527770 - DNA, 75 bp, Homo sapiens
ctagaagctgtgccgcccccgccagataaggagggttcctgcccccaggtgaacattaactttccccagctcggc

SEQ ID NO: 527771 - DNA, 123 bp, Homo sapiens
tcaggtcatctgaaccttctgagaaaacatggtcaacgtcttgaaaggagtgcttatagaatggcccccgacagctgctctcgggagccgcctcccgacacccgagccccgccggcgcctccc

SEQ ID NO: 527772 - DNA, 80 bp, Homo sapiens
ccgcccagagactgctgagcccgtccgtccgccgccaccacccactccggacacagggatctgaaacttgcccacccttc

SEQ ID NO: 527773 - DNA, 97 bp, Homo sapiens
tgttggacttgggagtatctccgtattctggagcagtatttcatgaagttaaaggtgaatccttgtttcattctaagaaaatggacctgacagtaaa

SEQ ID NO: 527774 - DNA, 76 bp, Homo sapiens
gctcagtctgcggccaagactccgtcctgcaaggttcacgcttacatcatcagctacctgaagaaggagatgccct

SEQ ID NO: 527775 - DNA, 98 bp, Homo sapiens
cggggtccgcaaggccggagaaggccgccgggcccgggcatggtggtctggggcaacgcggaaggttctggcctataggaacaagacattttcagtaa

SEQ ID NO: 527776 - DNA, 50 bp, Homo sapiens
agggaacaaagcccacagcaccggaccccagtacctgggatggagacaca

SEQ ID NO: 527777 - DNA, 75 bp, Homo sapiens
ctggaggcggcgggatggaggcggcggccgaaagacctggtggaagaggaggctgaggaggctggagtggctttg

SEQ ID NO: 527778 - DNA, 50 bp, Homo sapiens
cggaaacaaagttattttgctcgggatgaattgtaaaagcaacatcagct

SEQ ID NO: 527779 - DNA, 50 bp, Homo sapiens
gcactgcctgctcaacaagaagtgctgggctttgacaaacttcctctgtg

SEQ ID NO: 527780 - DNA, 75 bp, Homo sapiens
aatggatgttcagcagctttcacaaatagtaccaaagacacaaagaccatcaccaccatggctgaagacatgtcc

SEQ ID NO: 527781 - DNA, 75 bp, Homo sapiens
tgtgatgttggagaactacagaaacctcgtctccctggaggagaggagacgccgtgagcgggacgaccagatgta

SEQ ID NO: 527782 - DNA, 98 bp, Homo sapiens
gataccaatgatcctgaaaacagaaggaaattgaaggaacttggagttaatggtctaatttatgataggtgtggaaacaggaagagaactagaactgg

SEQ ID NO: 527783 - DNA, 88 bp, Homo sapiens
caagtccgggagctgggcggccatttaccagctgcacaacgtcaccctggcgctggagctgctgaaggacgagggcctgctcagctgc

SEQ ID NO: 527784 - DNA, 100 bp, Homo sapiens
gagcggccggaggagccatggactgcagcctcgtgcggacgctcgtgcacagatacgtctaaccataaaatcatcaatactgagaaattaaaaggggaac

SEQ ID NO: 527785 - DNA, 100 bp, Homo sapiens
atcgggccgtggaaagccgcaccaccgacctgctgactgactgggagaagaccaagcctgtcacgccccggggcccagcgacctgacagttacaggactg

SEQ ID NO: 527786 - DNA, 74 bp, Homo sapiens
tcaaatgcaagtccaagaggaggaggaggcggaggtccaagcggaaagattgtgcttcaagaagaccataggga

SEQ ID NO: 527787 - DNA, 114 bp, Homo sapiens
aagaggacagggcctccatgctttgagtggacatactgccttatacaggatgctgtgttctttgctcctttgtgaatgtctgttgctggtagctggttatgctcatgatgatga

SEQ ID NO: 527788 - DNA, 100 bp, Homo sapiens
gcgcacggacctgggacgcggagtcctgaagccggcggacggttttcgtacgggcggccgtgcgcgaggcgaggcttcaacggaccacaccaaaatgcca

SEQ ID NO: 527789 - DNA, 75 bp, Homo sapiens
gaccacatagacatttacgcggatgtcggcgaagagttcaaccagagcaatgataatgaggagcgcctacaagtt

SEQ ID NO: 527790 - DNA, 51 bp, Homo sapiens
gcggggggctgccgaaactacccagtggtagagctttgtgttcagtatgga

SEQ ID NO: 527791 - DNA, 101 bp, Homo sapiens
accgggtttctttgatgcgacctcaggaaggagatgagttccctgtattgaacactgatatacaaggaatgaatagaagtcaagaaaaacagacctggtgg

SEQ ID NO: 527792 - DNA, 100 bp, Homo sapiens
gcactggactcatggaggctgagcatttattcagacctaatctgggagcctgcaagtgacaacagcctttgcggtccttagacagcttggcctggaggag

SEQ ID NO: 527793 - DNA, 90 bp, Homo sapiens
aagagttccaggtgcttccctgcagatcctgcgcccccaaccaggtcaaagtggcaggacccaagtttcttcaccatggggatgtggtcc

SEQ ID NO: 527794 - DNA, 100 bp, Homo sapiens
attttggtgaccatatatacagtgacctggcggtgcaccctgaagaccacaaattaaataaatatcatgactggctttgggaaaatcatgaaaaattaag

SEQ ID NO: 527795 - DNA, 78 bp, Homo sapiens
gaggattgcctgaggccaggagtttgagaccagcctgaacaacatagtgatcatggagctcagcttggtctccatggg

SEQ ID NO: 527796 - DNA, 100 bp, Homo sapiens
ccgggaggcctgggctgtgacgcgcgcgccggagcggggtccgatggttctcgaaggcccgcggcgccccgtgctgcagagctctggtatcgagacttta

SEQ ID NO: 527797 - DNA, 90 bp, Homo sapiens
gatttgggcttgaagacccagaagatgacatatgcaagagaggagtcactcacaatttttgtggacaagcggaagttgagcaaacgagct

SEQ ID NO: 527798 - DNA, 98 bp, Homo sapiens
ctggccacccagagggcccttgtgtccaagaacctcaagaaggcatgaagccagcccctgcagtgccgtccacccgcccctctgggcctgcctgtggc

SEQ ID NO: 527799 - DNA, 82 bp, Homo sapiens
tcagtcactgtcagcgacagacccctcggggtgtccatcacaaaagccgagagtcagcgtgggagaaattgtaacgagaaac

SEQ ID NO: 527800 - DNA, 101 bp, Homo sapiens
ccggttgtcctcaggcgctgtcaggacatggatttgattgacatactttggaggcaagatatagatcttggagtaagtcgagaagtatttgacttcagtca

SEQ ID NO: 527801 - DNA, 100 bp, Homo sapiens
attgtatctgtttttctcagaagagaattccacaaggtggatccataaagaacccagccaacccgcagagggaggggaggggctgagctgtgaggagagc

SEQ ID NO: 527802 - DNA, 80 bp, Homo sapiens
gtgggtgttgatgaagaaattgtttatgccaaatcaactgccttacaggaaccactcgttttgactattattttatcact

SEQ ID NO: 527803 - DNA, 100 bp, Homo sapiens
ccggaagcggagagcggctgatcgcagtccggaggtgaggcggaactctgaggtttttcgttggaatatacgttgcacatttatggcgattctgagtgtg

SEQ ID NO: 527804 - DNA, 100 bp, Homo sapiens
aagggaagaagcctaaaggacagtcaaagaagcagcccagtggaaccacaaaaaggccaatttcagatggtttaggaatgtatgaaacacccctgttcct

SEQ ID NO: 527805 - DNA, 100 bp, Homo sapiens
aacggctccaattttcagctggaggaaatttcccgggctcagcttgtgtattcgtgtgccgtgagtcccactgactgcagtgctgttgagccggaggctg

SEQ ID NO: 527806 - DNA, 98 bp, Homo sapiens
tgttaccattgaagcccaggaactgtctttatctgctgtcaaggatcttgtgtgctccatagtttatcaaaaggaggcaggtggaagtcatcataaag

SEQ ID NO: 527807 - DNA, 82 bp, Homo sapiens
agaaactgaaggagatgtccacactagcaacagcttcttggacacttaatgattgttggcaagaaatgtgctgctgatctgg

SEQ ID NO: 527808 - DNA, 100 bp, Homo sapiens
catggtatatttgcagccagtactctatatgaacaatccgtctggatcacggatgtaggaagtggaactaagcgtcttgtagaaggaactattaatccag

SEQ ID NO: 527809 - DNA, 90 bp, Homo sapiens
tgtaatcccagctactcaggaggctagagtgcaatggcgcgatctcggctaacggcaacctccgcctcccagattcaagcgattctcctg

SEQ ID NO: 527810 - DNA, 50 bp, Homo sapiens
cccatcattgatgtggtgcgatcgggccagtgcctcagtttcaatccagg

SEQ ID NO: 527811 - DNA, 100 bp, Homo sapiens
ccccggcctgagaaagaaggaggagtgggggaggcgaacagtctcgttgctgcctctgtgtacgctgaggggggagggttacacatcattttggaatgac

SEQ ID NO: 527812 - DNA, 76 bp, Homo sapiens
acgccgaccggcgccgggagatcctggtgtcttgggacaaggtgcgcattcctggtgtgctgcagcgattgggagt

SEQ ID NO: 527813 - DNA, 100 bp, Homo sapiens
tagaagtggtgatgcaagaagtttctaggaaaggccggacaccaggcttgttttcctgctcagaacaaagtgacttccctgaacacatcttcattatgat

SEQ ID NO: 527814 - DNA, 74 bp, Homo sapiens
tagaagtgcttaaggaagagtgatgaagtgcttgcgctccaggcccgaaagaaaaggaccaaggccaagaagga

SEQ ID NO: 527815 - DNA, 97 bp, Homo sapiens
ggaagtggttggaaatggcacctatggacaagtctataaggtgtatgcaacagcgttattgcaacaggctaacgaaaacagacaaaattcaactgga

SEQ ID NO: 527816 - DNA, 99 bp, Homo sapiens
gctgggatgtgccttagaggattatggatcatgcaacagatgagtgaccaccgctacgacaaactcactgtgcctgatgacatagcagcaaactgtata

SEQ ID NO: 527817 - DNA, 98 bp, Homo sapiens
tgatgaaagcacaaacgtggacatgtcactcgcccagagagatgcccagtttgcagacctgacagacgctgctgcccgcaacgcggagctgctccgcc

SEQ ID NO: 527818 - DNA, 100 bp, Homo sapiens
tcaagcgatcctcccaccacctcagcctcctgagtagctggaaccatcatatgcaccagcacgcctggctaagctcttctcaaccatctgtgagtccagg

SEQ ID NO: 527819 - DNA, 82 bp, Homo sapiens
tggctcagcaagactctcgagcccatatcttgtagaaaatttcagctgtagcccttggactagaagctgaaataacagaagc

SEQ ID NO: 527820 - DNA, 100 bp, Homo sapiens
tggcatttcccatgcacctaatgctgtgaaaaccgcattttatttagcagagttttttgttaatgaagattccgaagaggctcaatctgtaaatccttct

SEQ ID NO: 527821 - DNA, 90 bp, Homo sapiens
gccgcgccgatgaacctgaccgaggtgctggagaatctggtaaaagcaccattgtgaagcagatgaggatcctgcatgttaatgggttta

SEQ ID NO: 527822 - DNA, 82 bp, Homo sapiens
ggccggctgcgaagacgcggtgggccgcccctccgtaggagctgtggcgcggggccttccaggagtctgagctatgagtggc

SEQ ID NO: 527823 - DNA, 101 bp, Homo sapiens
gactctgcaccctgcccagaggtccctcagcaaagatggtacaaaagagtctttggaggatgcggctttgatggtttctccacagacactacccaaagcag

SEQ ID NO: 527824 - DNA, 127 bp, Homo sapiens
gaatcttccaaagcgcaaagaagttatttgccgaggatctgatgacgattactctttttgcagagctctgaagggaggctgaagccgacgtagcttctctgaacagacgcatccagctggttgagga

SEQ ID NO: 527825 - DNA, 74 bp, Homo sapiens
caggcgggagggttcgaggccaatgatgggagaccaccgggatgggcaggtgtccctacctgcaccggacgacg

SEQ ID NO: 527826 - DNA, 98 bp, Homo sapiens
tcgctccggcgccggcctcgcctcctcgcagcagcgccatggcacacggaatgcagtgctgaacacggaggcgcgcacgatggcggcggaggtgctga

SEQ ID NO: 527827 - DNA, 74 bp, Homo sapiens
gtgtcatccagccttagcaaaccagaggaatcccgttctgcttccagaagtggaagtgctcacggatcggggaa

SEQ ID NO: 527828 - DNA, 51 bp, Homo sapiens
ggagaaggcagcgcgttgtacccgagatgggtgagtcaagtgaagacatag

SEQ ID NO: 527829 - DNA, 101 bp, Homo sapiens
cagccaccgcccccgccccaagccggcctaccccagatcatccaaaaacgagctcatctgcgcctttgtttagaacgcttaaaagttctgattccactagg

SEQ ID NO: 527830 - DNA, 78 bp, Homo sapiens
tggttgtgtacgttgcacccgcaaaggcgcctccttggcattataacaaaaaaagatatcctccggcatatggcccag

SEQ ID NO: 527831 - DNA, 75 bp, Homo sapiens
gatatcgacgtcgtgatccagaagtccagagctgaggactgcctgtttgcaggaccaggaatcaccttcaagcct

SEQ ID NO: 527832 - DNA, 97 bp, Homo sapiens
cgccaggactgtgatggtacaggaagggaacgtggaaagcgcatacaggaccctaaacagatgagattgtggggaacctgggtgaaggcacctttgg

SEQ ID NO: 527833 - DNA, 51 bp, Homo sapiens
ctggtcatcttctatttccaaagggcagaagcaactgcaggtgatagccct

SEQ ID NO: 527834 - DNA, 75 bp, Homo sapiens
cagaaatctacagttactcacacaaggtgaacggctgtttcctcttattcaagccatgcaccctactcttgctgg

SEQ ID NO: 527835 - DNA, 100 bp, Homo sapiens
tctgcgacatcaagccggaaaactttgccatccggagcgacttcacaggtcatgatcagagttcgactcttgcccaacactctgttgaactgactttacc

SEQ ID NO: 527836 - DNA, 100 bp, Homo sapiens
tgcttttcggactcctgatggcatgcctgtaaagaacttgcagttgaaggagtataacacaggaaatacaactggagcacgcaaagcaagcctttgtgca

SEQ ID NO: 527837 - DNA, 90 bp, Homo sapiens
acttcgaaaaatcagattgaaagactgacccgtcctggttcctcttacttcaatttgaacccatttgagttgattatggaagattcccac

SEQ ID NO: 527838 - DNA, 74 bp, Homo sapiens
ggcagtgatgagagtgacatgtactgttgtggacatgcacaaaagtgaggatatgttcaaggaatgagtgattt

SEQ ID NO: 527839 - DNA, 73 bp, Homo sapiens
agattcttccatcacttgctcaggattggattcagcatcaaaatacatctactcatattgagagctgtcgaca

SEQ ID NO: 527840 - DNA, 46 bp, Homo sapiens
aggagcacctgctggcgctaaaagatgaacccacaagatcattgag

SEQ ID NO: 527841 - DNA, 100 bp, Homo sapiens
ggattttccagcctgggcgctgacgccgcggacctccctgcgaccgtcgcggaccatgggcgacaaagggacccggaatgaattcagggcatggacggac

SEQ ID NO: 527842 - DNA, 100 bp, Homo sapiens
cagacatggggaaggttctggaaagttctctgtggcgcatgctacaagtgaaaactgatgagaaactgaatgtgtctgatgagaatacagcaagttgccc

SEQ ID NO: 527843 - DNA, 100 bp, Homo sapiens
acagctatctcgggagaaacaacaactgctacatctgttggaggagccaactagcatggaagtgcaggtggttgtgtcaaaccgattggtgacatctcca

SEQ ID NO: 527844 - DNA, 82 bp, Homo sapiens
ctttcaggcagcaacatggcaagacggtggtgggccaaatcactgtggacatgcaaattgtggctactaatttgccccctga

SEQ ID NO: 527845 - DNA, 89 bp, Homo sapiens
cccacctgcccggtgcccgaggaggcagccaagctcgtggcctgcctctgcgtgcaaccgtgggtaccgatggatgtggccgagagccc

SEQ ID NO: 527846 - DNA, 100 bp, Homo sapiens
gcacggagcggccgggcgggacaggctgaccccgcactacatctacccaccagccatcgtgcagcccagcgtggtgatcccagccgcccctgtcccgtcg

SEQ ID NO: 527847 - DNA, 74 bp, Homo sapiens
gcgccgacaccaacaagcgcaagagagacgaagtcagagcaccataacatggtgtgggaagtgaagacaaatca

SEQ ID NO: 527848 - DNA, 96 bp, Homo sapiens
gtgccggtggtgcgagtcttcggagcgaccccggcagatgaataatacggcagctagtccaatgtctactgcaacttcaagtagtggaaggagtac

SEQ ID NO: 527849 - DNA, 101 bp, Homo sapiens
agcctccccagagacaacaccgggagcctcatctctctcctcaccctgctgtgactccaccacaggatcccctaacaacagtgagagagcaatgcgagcag

SEQ ID NO: 527850 - DNA, 74 bp, Homo sapiens
ggtcggcgcctgttctcgggctgtttggcggggtacagctctgccggggggggaaaaagtggtaccattttggg

SEQ ID NO: 527851 - DNA, 98 bp, Homo sapiens
atggtgttacctggagcttaaaaagctgcacgcaagtgttaaacttctgatttttggaagtaccagcacagtgacgcttcctgaaaccttgttgtttg

SEQ ID NO: 527852 - DNA, 100 bp, Homo sapiens
gccttcggcctggtctacgtgctgaaccacgctgaggggctgggagccgcgcacaccaccatcacgtgaggttactattgaatgtaaaacaaggtactgg

SEQ ID NO: 527853 - DNA, 109 bp, Homo sapiens
atcaacaagctgaaccccaaacccaaattcttcgttctgtgcggcgacctcatccacgccatgccaggtaaaatgtcggttccaggaccttaccaggcggccactgggc

SEQ ID NO: 527854 - DNA, 83 bp, Homo sapiens
aaaactatgtacttggaggatcgaacaaaatgcatcgtgattcctgtccattggactgtaaggtttatgtaggcaatcttgga

SEQ ID NO: 527855 - DNA, 75 bp, Homo sapiens
tctttggcaagttcgaccagatcgccaaggttggtttcttcaaacggaacctgaaggagaagatggaggctggca

SEQ ID NO: 527856 - DNA, 83 bp, Homo sapiens
aagctttcagcattagcacctctttttggaagtttaaaatggaataatattacggaagaggaaggagaaaacattttctattt

SEQ ID NO: 527857 - DNA, 78 bp, Homo sapiens
aaacagggaagtgcctcaagactttgccagctcactcggatccagtctcggccctgagatctgtatctgtggacctga

SEQ ID NO: 527858 - DNA, 75 bp, Homo sapiens
cccgtccgtccgccgccaccacccactccggacacaggagcatcagatccatgctgctgctgactcggagcccca

SEQ ID NO: 527859 - DNA, 49 bp, Homo sapiens
ggacttgaattcagtgcttgggaagagattccagacattctaaatgcaa

SEQ ID NO: 527860 - DNA, 75 bp, Homo sapiens
gagaagaagaaatacatggaccgaagtctggacatcaatgcctttaggcattttgatacggacacccaggatctc

SEQ ID NO: 527861 - DNA, 98 bp, Homo sapiens
caattcttgacttgtgtattttcaactctgggatcacctgatcatttcagcaactcatgcagcaattccagaaccccgacttcccacccgaagtagag

SEQ ID NO: 527862 - DNA, 100 bp, Homo sapiens
gtacttctcgcagtccccgcgcgtggtcatccagggtttccaggcctgaggtgcccgccctggccccaggagaatgaaccagccgcagaggatggcgcct

SEQ ID NO: 527863 - DNA, 100 bp, Homo sapiens
gctgaaacgaaagggagccgccagcgcgtttggctgtgacctgacggagtatctggaaagctcgggacaggatgtactatactggcaattgctggagaag

SEQ ID NO: 527864 - DNA, 75 bp, Homo sapiens
atgtgaaacgaataacatgatggaatatgttagtagcaaagatgaagattttcttgacctttctgttgatgtgga

SEQ ID NO: 527865 - DNA, 100 bp, Homo sapiens
tcattcccagatgctgacgctttccatcaccagagattgtgcacgaggacttgaagatggggtctgatggggagagtgaccaggcttcagccacgtcctc

SEQ ID NO: 527866 - DNA, 97 bp, Homo sapiens
ggcgagaggatgaacaacaagttcgacgcgcagctggctaagagtcttgggcaggctggtgaaattgagcctgaaacagaaggaatactaacagagt

SEQ ID NO: 527867 - DNA, 118 bp, Homo sapiens
cgaagcgctggtggcgggcccgggctgcggcgtgtgcgcgcccgccagctgctccggagatacgggatcgcttacacctgagacgaactacagaacagcacgtaccagaggtggaagt

SEQ ID NO: 527868 - DNA, 82 bp, Homo sapiens
cgcacagccaggacatcctggaacctgggaaaggggtgcaaatagctatgggcaacttggcctcggccataaggaagatgtg

SEQ ID NO: 527869 - DNA, 98 bp, Homo sapiens
cctgtctctcctcgaagtcttcagcgctcaagcttctcacctggggcgggtgggttctgcaccaccctcccaccctccttcctccgtgtggacgatag

SEQ ID NO: 527870 - DNA, 100 bp, Homo sapiens
cctcggggacattattgcgcgtggaacggctgcttttggaagcagaagatggctgtgccacccacgtatgccgatcttggcaaatctgccagggatgtct

SEQ ID NO: 527871 - DNA, 75 bp, Homo sapiens
ctggtactgcctccagaacttggatcacaacattctgaaattttttggttattgtaatgatgttgatcgggagtt

SEQ ID NO: 527872 - DNA, 83 bp, Homo sapiens
cgcgaggttcgagtgttgcagagcctgcggggcaagatctgtatcatgatattagctggtttgacatcaagtcatttgtgagt

SEQ ID NO: 527873 - DNA, 83 bp, Homo sapiens
ccagcagctgtcgccgccgctctcagatgtctttggtggacttgggaaagaggttgctagaagcagcaagaaaaggccaagat

SEQ ID NO: 527874 - DNA, 75 bp, Homo sapiens
ccactgtggctcccgcatctgcctccctgccccagcccatcctctctaaccaagccgcttacaaacacgcagatg

SEQ ID NO: 527875 - DNA, 83 bp, Homo sapiens
gagaaaggtccctccacactcctggaactgtacacctattggaacccttaagttcaaatctgaacatcaatgatgtactaggg

SEQ ID NO: 527876 - DNA, 122 bp, Homo sapiens
cgagcagcgccagcggccgagcgggcggcttcctggcctgggcgctccggtggcggcggagatgatatcatcaagttgaatcgaaaggaagggaagaagcagaattttccaagactaaatag

SEQ ID NO: 527877 - DNA, 102 bp, Homo sapiens
agaatctgaacctcgtctgtattcccacttccttccagcaactggatgatgctcgcaacaaagctgacaatcaagaaaaggcaatacttaatattcaagcca

SEQ ID NO: 527878 - DNA, 75 bp, Homo sapiens
tggaaatggagggcatcttcaaccacaaaggccccttcacagatgtagtcactacaaatcttaaattgcgaaatc

SEQ ID NO: 527879 - DNA, 87 bp, Homo sapiens
atttgcacccagtcctgcagcgccagcagctggactatggcatctatgttatcaaccagtgccgagattgcagcctctgcccggccg

SEQ ID NO: 527880 - DNA, 74 bp, Homo sapiens
ggaggaaatagtggcaggtgacagtctgcatgtgcagttttcaggttcgtcacaaggcatcgcagaaggtttat

SEQ ID NO: 527881 - DNA, 85 bp, Homo sapiens
atgaggtgctgaaacagtgccgacttgcaaacgaggtctgcgggacccccagttacctggcccctgagattatcgagtgctccat

SEQ ID NO: 527882 - DNA, 90 bp, Homo sapiens
ctgccgcagctggcgcagcccacgctcatgatcgacttcctcacccgcgcctgcgacctcggcggtgcgtctttctacgtgaataggatt

SEQ ID NO: 527883 - DNA, 82 bp, Homo sapiens
tacagagtataacaatcagtgccgagcaattgtgatgagatattctgctgagtggaagcatccggtgaaagacagagatcac

SEQ ID NO: 527884 - DNA, 74 bp, Homo sapiens
cctggagcctcagttggaagcagccgatccagcctgcggagcctgtggggcagactgtgccctgtccacggtgc

SEQ ID NO: 527885 - DNA, 100 bp, Homo sapiens
gcctgccccgagccgcgggcttcccaggattgccacccaggacgatgagcggctgagatggagacgtctgcctcagccactgcctccgagaagcaagaag

SEQ ID NO: 527886 - DNA, 82 bp, Homo sapiens
ctcaccttggacacctcgcttggggggtgaatctctacattaagaacttggatgacactattgatgatgagaaattaaggaa

SEQ ID NO: 527887 - DNA, 100 bp, Homo sapiens
gtctcctgcagcggcccccgccgggactgactgcattgcacagatgatggatatttacgtatgtttgaaacgaccatcctggatggtggacaataaaaga

SEQ ID NO: 527888 - DNA, 100 bp, Homo sapiens
accgaggcgaaggggccaaccatgggaaaggagagtggatgggactcagcaagtaactggcagaagttttggtgataaagattttcggacaggtttagaa

SEQ ID NO: 527889 - DNA, 75 bp, Homo sapiens
tgacacactcttccggaaatacgaccacatgagcctcgatgacttacgagccctcaaggggaagcattttctcct

SEQ ID NO: 527890 - DNA, 82 bp, Homo sapiens
cgcgcagggcctgcagcgggagctggacggcgagcgcgagcggcgcgagaaactatacacagaatgggattttacatatgct

SEQ ID NO: 527891 - DNA, 100 bp, Homo sapiens
ccccgttgacaaggcactgctttttcatgacgatatcagttttagagaatgtggcgtggagaaattctcaaggaaagagtaaaatgctggtgatgtgctg

SEQ ID NO: 527892 - DNA, 112 bp, Homo sapiens
ggctactgcatcttatgatactcgagtatatatctgggatccacataatggagacattctgatggaatttggggcctgccttaagtgtgaaagtaatgactgatgaaagtgg

SEQ ID NO: 527893 - DNA, 100 bp, Homo sapiens
cacgagaccatcagagttgcagtctgtgacatgatggaaggaaagtgtccctgtcctgaacccctacggcagctgaaaaagttggatgaagatagtttaa

SEQ ID NO: 527894 - DNA, 75 bp, Homo sapiens
tacggaagagtgacagcatcctgattgagaggatccagaatccagatctctggaatagctaccaggcaaagaaaa

SEQ ID NO: 527895 - DNA, 75 bp, Homo sapiens
agcaaggtgcaagagtccacaaagggacctgatgaagcgaagatcaagaattacatgatgcgtaatgctgtgctg

SEQ ID NO: 527896 - DNA, 100 bp, Homo sapiens
agtccatcaagggtttccaaacactctgaatcccattctcgatcaagatcaaaatccagtgccggtggtggtgtgcacattgagccccggtatagacagt

SEQ ID NO: 527897 - DNA, 90 bp, Homo sapiens
ggccgagccctgcggcgggcgggagtacgtcatgtccattgacagcctccagctgggctatgcggaggatgggcactgcaaaggcgacat

SEQ ID NO: 527898 - DNA, 98 bp, Homo sapiens
gagaagtaattgtttttggtggatgtgccaacaacttgcttgtccatcacagagctgattggattcagcatcaaaatacatctactcatattgagagc

SEQ ID NO: 527899 - DNA, 97 bp, Homo sapiens
attgaaagttccttatttattaatacctcttcgtatggagtcctttcctatcattgacgagtagcacagcccctctatggtttagatggcagtgctg

SEQ ID NO: 527900 - DNA, 100 bp, Homo sapiens
ttccctcctcaggaagtccttttattaccaggaggtggttgtactacaatcccagagtcagacctagaagaaagatcagtagaacaagactctacagaac

SEQ ID NO: 527901 - DNA, 100 bp, Homo sapiens
gcggacaccagcctccaggcccagtgccaggagaacccccatcaaaggaagacagtgtggagcagataagtgtctgctgttgcaaaaagaagaaaacatt

SEQ ID NO: 527902 - DNA, 90 bp, Homo sapiens
ggcagcaccagaatgacaaaggcaagaacgtccgccagaggaactcttcctgaggcagcacccacactcactcctgctcagctgccgact

SEQ ID NO: 527903 - DNA, 50 bp, Homo sapiens
agaagacaaagaacctttcatcagaattttctacttctggtcatgcttac

SEQ ID NO: 527904 - DNA, 76 bp, Homo sapiens
ggcctcggcctccggcgcagcccggaaatgtccggcaagatcgagaaagcaggttcaaatggtgaaagacgatgac

SEQ ID NO: 527905 - DNA, 97 bp, Homo sapiens
tcagctcttcacagggggtagaacaagtggtactaggattatacattgtaagaggtgacaacgtattcttgttggatctagccttggagggtggctt

SEQ ID NO: 527906 - DNA, 82 bp, Homo sapiens
gcggactgcagccgcgagctcctggaggcggcgggatggaggcggcggccggcttgggcactgtttaaaggaaagttccgag

SEQ ID NO: 527907 - DNA, 78 bp, Homo sapiens
cggattccagactcgtgggggaaaggctgacctgtgaccgcatcaagcagtcagcagctggcaccaagcgtcgggtgt

SEQ ID NO: 527908 - DNA, 51 bp, Homo sapiens
ctggagcggccgccttccagcgtgtaaaatactagacagacatctggcaat

SEQ ID NO: 527909 - DNA, 100 bp, Homo sapiens
cttctgcggcgcctacctctacaaacagggctttgccatccccggctccagcttcctggtgaaaggtgtagcagtcactcggcctacacccacagcatcg

SEQ ID NO: 527910 - DNA, 50 bp, Homo sapiens
ccggaggctgggagccgcggcggcctgggatgctgtcttcgcagtgccat

SEQ ID NO: 527911 - DNA, 98 bp, Homo sapiens
cccacctcggtcaacatcaccctccgcctaggtacaggtttgcagattccgccagcagcacagcaagctctacagatgagtggctctttggcatttgg

SEQ ID NO: 527912 - DNA, 98 bp, Homo sapiens
ggcggcggcaccagcagtaacaacagcgaggaagaagaggacgacgacgacgaggaagaggaggtttctgagaaaggtcccccttctgggaaagaccg

SEQ ID NO: 527913 - DNA, 74 bp, Homo sapiens
actactacgaacaatggggaaagcttacagactgtgtggtgtgagttcttgatacgaatgaaaggccaagagtt

SEQ ID NO: 527914 - DNA, 100 bp, Homo sapiens
cctgaaacagaaattctggaacacctatatgattcgccatgaagtcagcgtaaataatgtaacacataaactgtgcagtaaccattgctttaataagtac

SEQ ID NO: 527915 - DNA, 101 bp, Homo sapiens
ggtagacttaggtctgttagaggaagacgacgagtttgaagagttccctgccgaagcacaacaagccgctctactcctttgaagacaatgcagactatgtg

SEQ ID NO: 527916 - DNA, 51 bp, Homo sapiens
cgggagccgcaaggcgagagctgcaaagttgaaaatgaactacctccacca

SEQ ID NO: 527917 - DNA, 74 bp, Homo sapiens
ggatccgggagaagcacccacaaaactagcatcctcctggaggagctcggtcttcaggcagtgacagtggtggg

SEQ ID NO: 527918 - DNA, 105 bp, Homo sapiens
gccgagcagattctacaacacatggtggaatgtatccgggaggtcaacgaggtcatccaggcctcattgctacgatttcagagtaccctggtaatagctgagcat

SEQ ID NO: 527919 - DNA, 100 bp, Homo sapiens
caagtatggggccagggatgcagacacgaaaatttggaatgggatggttggagaacttgtatatgggatccaacttagaaataatgtttcattcaagata

SEQ ID NO: 527920 - DNA, 106 bp, Homo sapiens
gattctgaccatttctcatgaacagaaacacctaggaagggagaactgacaatgcagatcttcgtgaagactctgactggtaagaccatcaccctcgaggttgagc

SEQ ID NO: 527921 - DNA, 101 bp, Homo sapiens
ccagcagggacaatgagattgtagacagcgcctcagcacaggaagtcctggagaacctgaaggaccgctggtaccaggcggacagcccccctgcagacctg

SEQ ID NO: 527922 - DNA, 50 bp, Homo sapiens
gcaggaactctacaacccaatccagccctgcgcttgctccacatcaggcc

SEQ ID NO: 527923 - DNA, 75 bp, Homo sapiens
ttggggatacagtcaacacagcctcaagaatggagtctaatggggaaggtgtcagtgtgaagaaggggcatgagc

SEQ ID NO: 527924 - DNA, 124 bp, Homo sapiens
cggttttatggtgcagagattgtctcggctcttgagtacttgcactcgcgggacgtggtataccgcgacatcaagagtgcgcccccacccctgtgtccaagtggccgcactccagacctgaagg

SEQ ID NO: 527925 - DNA, 82 bp, Homo sapiens
ctggcatcccacagcctcctcttccagaatgcctttgcgcaggttattggagtgatgagtaaagaatacataccaaagggca

SEQ ID NO: 527926 - DNA, 90 bp, Homo sapiens
gatctcttcgggagcgacgccgacagcgaagctgagcgtaaaggattttatggaagaccttgggttatggaacagagaaaagaactcttt

SEQ ID NO: 527927 - DNA, 114 bp, Homo sapiens
ggcatcccagctacgaaggatggaatcttcaatcaatcatatttcacaaggcctaaccatatgcctatgcagggacctggacccaatcaactcaatatgacaaacagttccatg

SEQ ID NO: 527928 - DNA, 75 bp, Homo sapiens
ccatgtggatacctacggagcacgagaaatacggcgtggaagtttccaagggtcacttgtgtctcgtccgtggga

SEQ ID NO: 527929 - DNA, 119 bp, Homo sapiens
tgtttctctgctgcaccgacctcgacgtcttgcctgtgtcccacttgttcgcggcctatagagctcttcagtatccccatcagccagtttccgaggtgctgagaagcacagaaactccg

SEQ ID NO: 527930 - DNA, 125 bp, Homo sapiens
ctcagatcttttctacagcttctgataatcaaccaactgttacaatcaaggtctatgaaggccataaaattttgagtagaaaaatccagaaatttgaaaatcagtatcgtggtagagagctgcca

SEQ ID NO: 527931 - DNA, 90 bp, Homo sapiens
cttgttccgaggcggccccagaggtcacagaacagaaagtgctggtggacatctcttcttgccccaagatcttcgttggaagtccccggg

SEQ ID NO: 527932 - DNA, 117 bp, Homo sapiens
ggcgagcgcccggattggggatgagtatgcggaggacagctctgatgaggagccatccgggtgacctgcataggttcctgcggggtctccaacaaggctaatgacacagcgtgggta

SEQ ID NO: 527933 - DNA, 76 bp, Homo sapiens
tcggaatgcactacaacaggaaaatcatattatagatggagtaaaggccagaaaagctgtaacaatgatgtttttc

SEQ ID NO: 527934 - DNA, 100 bp, Homo sapiens
aaaaagccctcagtaccagagacagaagcagatggattcgtccttttaggagacagtgtttcacaaaatgattttccttctgaagctcccatctccttga

SEQ ID NO: 527935 - DNA, 82 bp, Homo sapiens
tcgggcctccacacgggcctccgaagagctgccgcgacgcccggcccgcagggcaggttgtggcagcactgcctgaaggtat

SEQ ID NO: 527936 - DNA, 100 bp, Homo sapiens
caaagagggtcatctcttctattgtacctgcagcatcagaggctccttgaaatgctagatacagagaaggaactgttaaaagaaaaaataaaggaagctt

SEQ ID NO: 527937 - DNA, 97 bp, Homo sapiens
aatggaaatatggtcaacatgcatgcttctgtcaaaaacaaggttctggaaacaactgggcatatgggagtctccaagagcttttagattaccccgg

SEQ ID NO: 527938 - DNA, 76 bp, Homo sapiens
acttcctattccactggattgggaaagaccatggcaggctgaattcggtcagaagagaatccatctgaatagccag

SEQ ID NO: 527939 - DNA, 97 bp, Homo sapiens
agcggcggcggcgaagagcccgccctgtcccagtaccaggttggctatacagtgcgctttgatgatgtcacctcagaagacaccaggatcaagtttc

SEQ ID NO: 527940 - DNA, 101 bp, Homo sapiens
gaaaaaagagctttcaagacaaatggcaaacctgaagaaaaaaaccatgaagctggaacatcagatggtgagaacaagaccaagattggaaagccagcttc

SEQ ID NO: 527941 - DNA, 101 bp, Homo sapiens
ccgacccaccacccgcactgctcggccgatgaccagtccaccaaggccatcgacatccagaacgcttatttgaatgctatggcattgctggttctaccaac

SEQ ID NO: 527942 - DNA, 74 bp, Homo sapiens
ggggaaaaagcggccaaagaagtgaagctgctgctactcggctttagtcaacaatcccaaaattgaagtaatag

SEQ ID NO: 527943 - DNA, 97 bp, Homo sapiens
gccaatgacagtagctggaatgacataaaaaactctggatatatatcacggaactgtggctgcaccatctgtcttcatcttcccgccatctgatgag

SEQ ID NO: 527944 - DNA, 82 bp, Homo sapiens
ctacgccgagctgacgattatgaagactctggaagcccacaaagactcccataaggaggaacctggcttctgtatttaccat

SEQ ID NO: 527945 - DNA, 106 bp, Homo sapiens
ccgcaaacatgctccgccagatcatcggtcaggccaagaagcatccgagcgtctcctctgagcctccggcctccataagacccaaaacagatgacacctcttccca

SEQ ID NO: 527946 - DNA, 100 bp, Homo sapiens
gcagccgcgaggaggcgcgggaggtgttcgagaacgaccccgagacgagctagagccggtgcaggccacgcagaacaagacagggaagtatgtgccgccg

SEQ ID NO: 527947 - DNA, 82 bp, Homo sapiens
gagaccgcggccgggaccgaggtctggccatccctcttcaacgtcaacttgtccaagaaggttcaggaaagcatccagatcc

SEQ ID NO: 527948 - DNA, 82 bp, Homo sapiens
caaggcggagcaggccaaagtgaagaagcaaaccagtccagctacgggggcccagccagccagcagctgagtgggggttacg

SEQ ID NO: 527949 - DNA, 75 bp, Homo sapiens
ctggtcaccaggaggtggccaccaggcttctcctttccccgctggctccatctactctttgaagcttctgcccag

SEQ ID NO: 527950 - DNA, 75 bp, Homo sapiens
cggaggcagaggtggaggcgctttgaaaggtgatcccagatattgcctgtgggaatgccagttctaacagctctg

SEQ ID NO: 527951 - DNA, 97 bp, Homo sapiens
ggccctgaactgcggtgggactgcctcgactggcagcgcgggaaacgtcaaactcgaggttgtaaagctctctgaaatagtgaccttagcgaagcaa

SEQ ID NO: 527952 - DNA, 100 bp, Homo sapiens
gggaagcagtttctcggatgaactttatgtggacgtgacttacatagaactggtcatgctgctggagtggtggtcctgcacggagtgtacactgttcacg

SEQ ID NO: 527953 - DNA, 75 bp, Homo sapiens
gtgccttttgcctcccaccgtgattctgaggcctccccaaccatgtgcaattgctcagggtttggagcggccacc

SEQ ID NO: 527954 - DNA, 87 bp, Homo sapiens
gacatgagatggtagccaaacccccagtttttggctttcacccccaaccagtgaccaaagacttgaccactcaaagtccagctcccc

SEQ ID NO: 527955 - DNA, 101 bp, Homo sapiens
ggagggtcctctcagtgattaagcaaggtgcagagctagaaatgaaagacatccagggctggacagccctcttccactgtaccagcgccgggcaccagcac

SEQ ID NO: 527956 - DNA, 90 bp, Homo sapiens
cggagattgctttctggggaaggaattctcacactcaagaaagcaaatgaacttcttctgagcacaggcatgcccggcagttttctcatc

SEQ ID NO: 527957 - DNA, 82 bp, Homo sapiens
aaaatgagagatatgcatatgaatggcagagatgcctggggagtgccctgaatgagtctactcttcatcttgtgttgagact

SEQ ID NO: 527958 - DNA, 98 bp, Homo sapiens
gagaacgcctccagcggggatgacacagaagctcagggtctgagttgtgcactgcctatgatccactccacagaagttctgatttcttctctgtgcaa

SEQ ID NO: 527959 - DNA, 96 bp, Homo sapiens
gctcgatctggccctaaccacagagtcaccttgaggtggggaagctgaggcaggaagccctttagtcacttgccgaaggccacgctgttacccatg

SEQ ID NO: 527960 - DNA, 83 bp, Homo sapiens
taccaggcgaagctggccgagcaggctgagcgatacgacgctggtcagtgagaaggtcggaggggccgaggggaccaagctgg

SEQ ID NO: 527961 - DNA, 99 bp, Homo sapiens
gggagcgatgcggtgcagcgcgggggtgatcgctgagctgaaggtgcgcagggacccccaggtgagccccatgcactgcctggacgaggaaggcgatga

SEQ ID NO: 527962 - DNA, 83 bp, Homo sapiens
cttttgtgaagcggcagctgaggagactccggcgctcgccatggccgacgaaaagcccaagcaaattgtggctactaatttgc

SEQ ID NO: 527963 - DNA, 74 bp, Homo sapiens
cacataatggagacattctgatggaatttggattttgaagatgtaactgagtttctggaagaggtcattgaagc

SEQ ID NO: 527964 - DNA, 98 bp, Homo sapiens
ctcctcttcccttcgctccggcccggtgaaactgaacttataatcgtcactggattgatttgaagcctagcaacattgttgtgaaatcagactgcacc

SEQ ID NO: 527965 - DNA, 74 bp, Homo sapiens
gagtgtggaaggaccgctccaagaaaaggaccgggactttgtagccaagcagaaggaggacctggagctggcca

SEQ ID NO: 527966 - DNA, 98 bp, Homo sapiens
agcagggctgaagagaagatggaggagctggtggtggaagtgcggggctccaatggcgctttctacaaggtctgtaaacagatttggctaggattatt

SEQ ID NO: 527967 - DNA, 90 bp, Homo sapiens
cagacattcagcaggatccagacagcctctgctctagaaggctcagcagagaaggattaggcagaatctgaaggaaaagcatgctcgaca

SEQ ID NO: 527968 - DNA, 97 bp, Homo sapiens
accattcagatgggatctttccggatcaatccagatggcagccagtcagtggtggagaggacaaggatcctcaccggtggccatgcagaaagctcag

SEQ ID NO: 527969 - DNA, 100 bp, Homo sapiens
agagccgtaggcaggaccccgggacaccctggaagccaggaaatgggaggagtggatgcgggccatccagatggtcgccaacagcctcaagcagcgggcc

SEQ ID NO: 527970 - DNA, 83 bp, Homo sapiens
atagcagtggaatcaatgtaaatgcagctccattccaatccatgcaaacggatgaagatgcatcagggggcgatcaagatcag

SEQ ID NO: 527971 - DNA, 99 bp, Homo sapiens
ggcggcggcggaagatggtgccgggggtcgctggctctgctgctgccgccggcgaaggaggaggcgttgccggggaagagtgtatcacagccattggga

SEQ ID NO: 527972 - DNA, 83 bp, Homo sapiens
ctgcctccgggcacacccggctccccggacgcctcggcattgtttccaagtcgtacgagtgccgtctaaagggacaaggagcc

SEQ ID NO: 527973 - DNA, 90 bp, Homo sapiens
ggagcctttgggaaagtgtacaagctgggatctagcaattgggaggcagcagacttgggtaatgaagagagaaaacaaaagttcttgaga

SEQ ID NO: 527974 - DNA, 83 bp, Homo sapiens
gacgattatcgatgttcataccgaattcacaatggacagaagttagtggttcctggggttacaagtgtataacaagtgttgga

SEQ ID NO: 527975 - DNA, 82 bp, Homo sapiens
tctggcctggaggctatccagcatctggtggctggacccagagctgacctatggctgcgccaagcccttcgtcttcacccag

SEQ ID NO: 527976 - DNA, 100 bp, Homo sapiens
cagctcagaatgctgcggtccaggctgtcaatgcacactccaacatattgaaagccgccatggacaattctgaggttgctccttgagggcaggacagttc

SEQ ID NO: 527977 - DNA, 75 bp, Homo sapiens
tttctgagaaacaggacatacctttcgtagaggaaaccacccctactcctaatcccccgactacagaagaggaga

SEQ ID NO: 527978 - DNA, 74 bp, Homo sapiens
tcagattttggtttctacaccagatggccgccaagaacgagtcatgtttgacaaaattacatctcgaatccaga

SEQ ID NO: 527979 - DNA, 82 bp, Homo sapiens
cccagcggcagcagcagcggcgggaggagcctccgggactacatgaggaaataattgacttttataacttcatgtccccttg

SEQ ID NO: 527980 - DNA, 100 bp, Homo sapiens
agctgatgatgacagcagagagtggcagggctgaggacccaaagtcatttcccaggctggcggagacacactgatttatgtcagtacatggacaagcacc

SEQ ID NO: 527981 - DNA, 74 bp, Homo sapiens
ccgaacgggttgcttcccccgctgcgagactacatgaggaaataattgacttttataacttcatgtccccttgt

SEQ ID NO: 527982 - DNA, 131 bp, Homo sapiens
aaagataaaaatttcagtgaagaagaaagtaaagttggaagttaagggagacaaagttgaaaacaaagtgctgaatagttctgtcccaagaagaactctgaagatgattcagccttctgcatctggatctc

SEQ ID NO: 527983 - DNA, 50 bp, Homo sapiens
gaagatggtggccaggaagaacacgatcatggaagggaagtggttgctgt

SEQ ID NO: 527984 - DNA, 82 bp, Homo sapiens
ctgcgaggctcggagaaacaggcgccgcgggctccgcgcccggccggacccgggcccgagatgtggacgagtgctcactagc

SEQ ID NO: 527985 - DNA, 82 bp, Homo sapiens
ccgccctggggccggcgatgtgccaccgaggctgaggatgatggtagattgccaggcttgttagcagtggcacaagatctta

SEQ ID NO: 527986 - DNA, 100 bp, Homo sapiens
cagctttgtggctgccgtcatcaccatcaccttcaatccgctctactggaatgtggactggactcgggccatatccgtggtgccgtcaacatgcctttca

SEQ ID NO: 527987 - DNA, 82 bp, Homo sapiens
gaatacttcagaagtggggaaatgggctgcccttgagatggagttgctgcctctttggctctgcctgggttttcacttcctg

SEQ ID NO: 527988 - DNA, 82 bp, Homo sapiens
gtggaggttcctacagagattcatatgagagttatgatctgactgcagccatgagcagcaatgagtgcttcaagtgtggacg

SEQ ID NO: 527989 - DNA, 100 bp, Homo sapiens
catgatccaccggcctcggcctcccaaagtgctgggattataggcgtgagccaccgtgcctggctgaaggtaataagtatgaagtcaaggtatacactgg

SEQ ID NO: 527990 - DNA, 75 bp, Homo sapiens
cagaaggaacttgcagaaatcacattggaccctcctcccaactgtagcctaatcacacggatgctacagagagat

SEQ ID NO: 527991 - DNA, 50 bp, Homo sapiens
cgacggcgaccatagctctcctccaattaaggaacagctatatcctgctt

SEQ ID NO: 527992 - DNA, 101 bp, Homo sapiens
caagcatgaatgtccctttggccgcagtagtatagagctgaccaagatgctatgtgagatcttgaaagtgggcgagttgcactctttttgatcagaacaat

SEQ ID NO: 527993 - DNA, 90 bp, Homo sapiens
gtgcaatgcaggcagcttctcaagcaggtgaggtccagagatatatccagagaggagtggaagggctcggagacctacagccccaatact

SEQ ID NO: 527994 - DNA, 75 bp, Homo sapiens
gcaaggtggagcactggggcctggaccagcctcttctgaaacactgggagagtgataatgaactctcaagtggaa

SEQ ID NO: 527995 - DNA, 74 bp, Homo sapiens
cagccaagatcttggcaaagcttctccctcagtatttagaccagatccccgttgcgcagccatctgtcatggac

SEQ ID NO: 527996 - DNA, 100 bp, Homo sapiens
ccgtgatggaaattgtcaagaggtgcaaaaatcttagctctctcaatctctgtctgaactggatcataaatgacagcactgccagtgaaagatgtagaag

SEQ ID NO: 527997 - DNA, 101 bp, Homo sapiens
gtcacacaaagcttcagcatgtcatgtggaggccagatgctccagtgcctgatggcgaaagtgagaaaactgtagaagaaagttcagatagcgaatcttct

SEQ ID NO: 527998 - DNA, 77 bp, Homo sapiens
aatagtcttgagaggcaaattgaaatactccatctctgttggatgaacccaatcccaatagtccagcaaacagccag

SEQ ID NO: 527999 - DNA, 88 bp, Homo sapiens
gtgccactggggtctttaccaattcatcctggctctggaacaaactcttcgaggcccagagcaagagaggcatcctcaccctgaagta

SEQ ID NO: 528000 - DNA, 98 bp, Homo sapiens
tgaagtttgaaggtctttgctgccatcctttcttctctaaaattgactggaacaacattcgtaactggcctgctttcttccccgggcgatgtgcagag

SEQ ID NO: 528001 - DNA, 80 bp, Homo sapiens
cgcgggcgcggatcgaccggagcagagagctggcgagcaagggttcgggggtgattaaagctggctttgcaggagaccag

SEQ ID NO: 528002 - DNA, 83 bp, Homo sapiens
gttaagggaacgctgaggtcccgcgctccccgaccgagattctgaaggaagatttccattaggtaatttgtttaatcagtgca

SEQ ID NO: 528003 - DNA, 106 bp, Homo sapiens
caggtacctgacaatgatgagcagtttgtaccagactatcaggctgaaagttatctcagtgaccagctgctggaggtggtcggcttggaaggagccatggagatgg

SEQ ID NO: 528004 - DNA, 82 bp, Homo sapiens
gcccgtcgctggtcgtgcgacccaagcccctgcattcctgtacgggtttggtgcacctcgatttggaggaagtagggcaggg

SEQ ID NO: 528005 - DNA, 100 bp, Homo sapiens
tcgtccgtcccccgcggccggcagctcccggggcgtctggatacacaatcatcatcttactagttctctgtgttgctcgctaaccagtcccccagttcag

SEQ ID NO: 528006 - DNA, 90 bp, Homo sapiens
tcagctgaatcagagtttgcattgttaacaaggactcacaccacccggcaagaactgctcactacggctccctgccccagaagtcacacg

SEQ ID NO: 528007 - DNA, 99 bp, Homo sapiens
gcagtttgcacacctgtaaactgaagctgcaggaggaccggcgacagcaaggaatggcggcgctagatagtaaggcatcagggaagatgggaatgcgag

SEQ ID NO: 528008 - DNA, 75 bp, Homo sapiens
agacatgaaatatgcattggagggggagtacgtgctcatgatccgcgacgtgaccaccccgccgttcctggggcg

SEQ ID NO: 528009 - DNA, 100 bp, Homo sapiens
ttcctgtgcctgaacctctctttcgcttttgtggaactactctacggcatctggagcaactgctttggcgctgaccacaatgctgagcaggaagcagcag

SEQ ID NO: 528010 - DNA, 96 bp, Homo sapiens
tcacccgcactgagtcaacagactgagcgcgtccaggcctgacagctctgcggctcgggccctgagacactacaacaacaggagtgcaaacttctc

SEQ ID NO: 528011 - DNA, 82 bp, Homo sapiens
aaaatggctgagtgtcttgtcatgctagcactgcattaagtgatgcatacagcctgcaagtattcctgccacaagaaatgtg

SEQ ID NO: 528012 - DNA, 83 bp, Homo sapiens
gacgccagttactgcacggaaagcagcgtcaggagccatagtacctacagcagcactccaggacactgggtccccttggagcc

SEQ ID NO: 528013 - DNA, 75 bp, Homo sapiens
cagatgatatgcttttcctgagaatggaagcttcttgcctagagctggccttggaaggggaacgtctatgtaaat

SEQ ID NO: 528014 - DNA, 82 bp, Homo sapiens
ttccccaggcctgcgtccgagtctccgccgctgcgggcccgctccgacgcggaagactatggtcagtgcaatcagaaaattc

SEQ ID NO: 528015 - DNA, 100 bp, Homo sapiens
ctcatgttctgggacttaggagggcaggaagagctgcagtctttgtgggacaagctctccgaacagcaggatttcccaacggcagcttgggaaaaagacc

SEQ ID NO: 528016 - DNA, 101 bp, Homo sapiens
caagttggacagacgggaaaaatagtagcaccagagacatatactgcctggactgcctggctgatgtgagctagtttgtctggttgagttggatgtttaaa

SEQ ID NO: 528017 - DNA, 100 bp, Homo sapiens
ataaggacaaaagccaagaggaggacagttcgctacacagcaatgcatcgagggatcgtgggactttaccagatcggtttgtaataacacctcgaagacg

SEQ ID NO: 528018 - DNA, 100 bp, Homo sapiens
aaaaatcttaaccttcaaccatctggggaaaaggcaaaaatcccatctaccgcaactctcagttcgagagtaaaggtggaaagcggtgacacgccaaagg

SEQ ID NO: 528019 - DNA, 82 bp, Homo sapiens
gcacaatcgggcggaggtggcgctgccccttcagagctccaaacgagaatggaagccgctggaggaccgtagctgcacagac

SEQ ID NO: 528020 - DNA, 98 bp, Homo sapiens
gaaatagcagacagcgggcttgatgtgcttaaaagctgctcactgatgaacctcaaataaatttgaagagaagtcaagaaaatgaatgggtcaagagt

SEQ ID NO: 528021 - DNA, 90 bp, Homo sapiens
tacctgttaccactttcaaaagattaaagcaaggagagccaatcatgactggcaaaacacagaccagcaacgtcaccaataagaatgacc

SEQ ID NO: 528022 - DNA, 97 bp, Homo sapiens
ctctcctcatgctagtagctgccttctgctctccagcgctctcagcaccaaaatgcaatgcgggcaacagttgaacaccaggaaaatcagccttccc

SEQ ID NO: 528023 - DNA, 151 bp, Homo sapiens
gtgcacggtgtgtgactacacagcggcccagaagccacagctgctgcggcacatggaacagcatgtctccttcaagtatgaaaacccatggacaatcccgaatatgttgtcaatgacgagaattggcttggccccagttctgggctatttg

SEQ ID NO: 528024 - DNA, 98 bp, Homo sapiens
ttgtcctgacttctttccaggtgatgtcaagagtttttctaatatgggcagtaacacatagcgtcaaagagatgatgaaccaggtggaagggcagcag

SEQ ID NO: 528025 - DNA, 75 bp, Homo sapiens
gtgcgaggctagccacgcaggcggggccctggttttcggctttgtgagaaaccttaccatcaaacacgatggcca

SEQ ID NO: 528026 - DNA, 100 bp, Homo sapiens
ctcggaggcggcgggcggaggcggcgggtcgcgtggggcaggcagtggcgctgcgggccaaggccttcggcttcaacgtgctcttctacgacccttactt

SEQ ID NO: 528027 - DNA, 100 bp, Homo sapiens
aaatggtagagttttcttcaggcttaaaggttgctgcgtggttaaaaaaaatatttggagatcatcctattccacagtatgaggtgaacccacggaccac

SEQ ID NO: 528028 - DNA, 83 bp, Homo sapiens
ccagagctgaggactgcctgtttgcagcccgccggggtcagcttggtcagcgtccattccagccccaacgaccagatgctgtg

SEQ ID NO: 528029 - DNA, 75 bp, Homo sapiens
ctggagtcagtggaagacggagctggtcggcccgaagatacattatggtgccgagtggtaacatgggagtgtttg

SEQ ID NO: 528030 - DNA, 100 bp, Homo sapiens
caggagagcagtcttctgaagaattgtggctcagttttcttggaaactacttatccagacatttaatgtggatgcaccatgccagaccgtggaagattta

SEQ ID NO: 528031 - DNA, 100 bp, Homo sapiens
gcccgttggaccacagaggagcagcttctagcagtgcaagaatggcttattcagaagagcataaaggtatgccctgtggtttcatccgccagaattccgg

SEQ ID NO: 528032 - DNA, 100 bp, Homo sapiens
ttccacaaatgcagaagtaagaggatttatagatcagaatctcagtccaacaaaagatgacagtcatgtccctttccagggacctcaaggacgactttca

SEQ ID NO: 528033 - DNA, 75 bp, Homo sapiens
caagctccgagaagaccggcggccaatcacagtccactttggacaggagtggagtcaacatatcaatggagcaag

SEQ ID NO: 528034 - DNA, 100 bp, Homo sapiens
agacagaacagttaatcctcaatttaagcctgatctaacccctagaaacagttcaaaagaatgctgaaccgggagctgacacacctctcagagatgagcc

SEQ ID NO: 528035 - DNA, 75 bp, Homo sapiens
gtggactccttcggcagtccacccaccgccgccgcctcccagatccagacatttaatgtggatgcaccatgccag

SEQ ID NO: 528036 - DNA, 83 bp, Homo sapiens
tcgaaggactctatccaacctattatatatgatcacagtcgtgttaaactgcaaaatgctgagaatgattatattaatgccag

SEQ ID NO: 528037 - DNA, 76 bp, Homo sapiens
cagaaaccttatgttgcacttattcatggaattacaatgggtgggtgccggtggtggtgtgcacattgagccccgg

SEQ ID NO: 528038 - DNA, 100 bp, Homo sapiens
aagatattgagaagctttatgaagctgtaccacagcttagtaatgtgtttaagattgaggacaaaattggagaaggcacaacttcctgaatggaccatga

SEQ ID NO: 528039 - DNA, 82 bp, Homo sapiens
cggagacgcagatgtggacttgaaagaagctgcagcggaggaaggcgagcgtactgtgaaccgagaggagctgctgaaacag

SEQ ID NO: 528040 - DNA, 50 bp, Homo sapiens
ttggagaacacaaccattatggtggagagacttatccaagaacgtggctg

SEQ ID NO: 528041 - DNA, 100 bp, Homo sapiens
ctctttgagcccggaccagacagtcaggccttgaaaagaggatagaccaggctgtggaggagtggaatattgagaaggctgaggaactcagcaaccagct

SEQ ID NO: 528042 - DNA, 89 bp, Homo sapiens
ctcttgtgccctagcaccccgagaaccgtcagtttgagccagatgttcctccaggagtgatccaaaatggagcgcgggtcctgagccga

SEQ ID NO: 528043 - DNA, 100 bp, Homo sapiens
ccaggttttgccggagcgctattcttcactcgagacaagcagtttggtgccctggttgtcagatgttggaaagcagtaggacggaacatactcttcgtgg

SEQ ID NO: 528044 - DNA, 73 bp, Homo sapiens
tgcccagcgtggtggggcagcagaagctccagagcccagacttgcaggaaagaccacagcaagattctttcat

SEQ ID NO: 528045 - DNA, 113 bp, Homo sapiens
agcagctcactgcgaaaactctctatatgagtcatcgagagctacctgcctggacgatgttccacaggagcccgtgcccacgctgtggaacgagccggccgagctgccgtcgg

SEQ ID NO: 528046 - DNA, 121 bp, Homo sapiens
tgctcctcgaccccccactgatcgcgctggataaagatgcgcctctgcgatttgcagccagaagacattggacaagcaccaatagtcaatgccccagaaggtggaaaggttgacttggaag

SEQ ID NO: 528047 - DNA, 75 bp, Homo sapiens
aggagccattatttatgtcatcaagaagaatgacgatgtttgcagtcctgatgtggctcctgacctacgttggcg

SEQ ID NO: 528048 - DNA, 100 bp, Homo sapiens
atttgatttcagaggaatgagattagattggtttaggttacagcaatgaagcttggagatacatgggtggctttgcaaagagtgtttccttttctgatgt

SEQ ID NO: 528049 - DNA, 83 bp, Homo sapiens
ggagttcctccagacagtgcttcagaagcaaactctcctgaggagctatccagcccaggtaccctgacatgcccactgctgct

SEQ ID NO: 528050 - DNA, 97 bp, Homo sapiens
ggcgcgggcgcgaaggcgatccgggcgccaccccgcggtcatcggtcaccggtcgctctcaggaacagcaggttgtggcagcactgcctgaaggtat

SEQ ID NO: 528051 - DNA, 85 bp, Homo sapiens
agaaagaaagctgcggcctgtatcaccagaggagattagacgtagcagattagattttatcatgtgggcaacctgctgcaactgg

SEQ ID NO: 528052 - DNA, 87 bp, Homo sapiens
gatggttacgtgatccccaactacgatgacaggtcctgccctccggaggagcagcctcgaggctggtggttttcagagcaggaggcc

SEQ ID NO: 528053 - DNA, 50 bp, Homo sapiens
cagatgtgcaacaaagtgcgatggagtcagagtcagaagcaaaggtagat

SEQ ID NO: 528054 - DNA, 75 bp, Homo sapiens
cacagttctccatgagttggacagataccaaagagggatccaaggagctggttctgctggttggaccaaacctcg

SEQ ID NO: 528055 - DNA, 100 bp, Homo sapiens
ctgcccccttcccccacccccgactcgggcttggcgcggcggccagaggaaccccgaggttcgatacaagaggctgttttcctagcgtggcttgctgcct

SEQ ID NO: 528056 - DNA, 75 bp, Homo sapiens
tctgcgcctttctctcatcccgggaggacatgtatgcccaggactctatagagctactaacaacatctggtatcc

SEQ ID NO: 528057 - DNA, 51 bp, Homo sapiens
ctcatccaccagcagctgagcaagggagttacccagggagattatacacct

SEQ ID NO: 528058 - DNA, 75 bp, Homo sapiens
ctcgaactaaacaaattcatcccagaaatctaagaggatgccctgcacagcgtaaagaagagacttttaagaaat

SEQ ID NO: 528059 - DNA, 89 bp, Homo sapiens
ccctgggcatcacgcgcatcctagtgctctacggaaacgtattcgagaggacagaaaggccaccacagctcagaaggtgcagcagatga

SEQ ID NO: 528060 - DNA, 109 bp, Homo sapiens
tttgccagtcacctctcaactgtgtgccaaaggtctagatgttgatggaatatatcgagttagtggcaatctggcaacaatacagaagttaagatttattgtcaaccaa

SEQ ID NO: 528061 - DNA, 100 bp, Homo sapiens
cgaagtaggccgtctcgctctgggtctccaggcccgcgaccgtccgccagtcgtcccgagcaccacacactggaagcagacgctgttcatgatggacgac

SEQ ID NO: 528062 - DNA, 50 bp, Homo sapiens
cttcgcgagcgtctgggcgggtggtagggttttggccaaattgggcgagg

SEQ ID NO: 528063 - DNA, 82 bp, Homo sapiens
cactcagccctgctggacctggagaagctcccagaattcaacagagacgagttgtactgctgtcacaggaaatggacgctgg

SEQ ID NO: 528064 - DNA, 95 bp, Homo sapiens
catttgaaaccgtccagatcaacgttatccccacctctgatgattcctcagatcttcctctgatggcgctgcctccatgccatgccctctgccag

SEQ ID NO: 528065 - DNA, 75 bp, Homo sapiens
gctggttgtgcgaaccccgggcagcccgggaaatctccaagtcagaaaggaaaatcctgccttgcttcgttgggc

SEQ ID NO: 528066 - DNA, 97 bp, Homo sapiens
tgctgcacttctatggccgtaaacatccgcacttccactaatagccaagtagacaagctgaccctgtcagggagtgacagcgtcatccttggtgata

SEQ ID NO: 528067 - DNA, 82 bp, Homo sapiens
aatatctgtcttcggtggactccttcggcagtccacccaccgccgccgcctcccaggatgaaacaggcgcctatttaatcga

SEQ ID NO: 528068 - DNA, 74 bp, Homo sapiens
attctttcaagaggcagttccacccaatgactactatgcaagattgcaacacctgctcggtataccgtgacttt

SEQ ID NO: 528069 - DNA, 100 bp, Homo sapiens
cttctgctccctcgcttgtcttctcgggcttctcgccccggccgcggccgggtcctcaggatgtgataggccaggttctgcctgaagcaacaactacagc

SEQ ID NO: 528070 - DNA, 50 bp, Homo sapiens
gcagaggaggagcgcagcccggcctcgagacggggttttgccatgttgcc

SEQ ID NO: 528071 - DNA, 75 bp, Homo sapiens
gccagattgtcttggaagttccaaagttgcaacgatttctgtatggatcagctttgctcagtttgagttgtcttc

SEQ ID NO: 528072 - DNA, 87 bp, Homo sapiens
cggacggcgtggaccacatagacatttacgcggatgtcggcgaagagttcaaccagattcagaatggacagtttagaagaacctcag

SEQ ID NO: 528073 - DNA, 110 bp, Homo sapiens
tcgtgggcgagctgggcgacggcgccttcggcaaggtttacaagacttcccaagtaagaagcggaagaggagccgctggaaccaagacacaatggaacagaagacagtga

SEQ ID NO: 528074 - DNA, 115 bp, Homo sapiens
gcctgtacctgttttatacttgcttttgcttcagcgttctgtggttgtcaacaggtgtcatggagaaactccagctgggcccagagattctgcagcgggaaaatccaaggcttat

SEQ ID NO: 528075 - DNA, 82 bp, Homo sapiens
tctgaaccatccacacatcataaagctttaccaggataccgaagtgtataaagctacagtaaaagatgacctcaccaagtgg

SEQ ID NO: 528076 - DNA, 50 bp, Homo sapiens
cctcgctgtccctgcggcttctgggggtttggtgcacctcgatttggagg

SEQ ID NO: 528077 - DNA, 80 bp, Homo sapiens
tccacactctcacccaggacaaacccatttccgtccacacccgctcgtccaggtggtcttcaagctgacagagaagctga

SEQ ID NO: 528078 - DNA, 100 bp, Homo sapiens
gccctgcagtacctgcagaaggtctctggagacatcttcagcagccattgagacccagagcagcagttctgaagagatagtgcccagccctccctcgcca

SEQ ID NO: 528079 - DNA, 80 bp, Homo sapiens
gcttattttctgcttccaaaggtccagagcattcagctgtctcaaatgcaggaacatcatcttcagcgggctatttcagc

SEQ ID NO: 528080 - DNA, 110 bp, Homo sapiens
gatattatggtgaaaggcttgaggataacaccattttcatattatactgggattatggagagactaaggtgtcagtatgttcttcaagctgctctgctcctgggcccaag

SEQ ID NO: 528081 - DNA, 97 bp, Homo sapiens
catctcgctgcccgacgatgtccgcaggcgatccctttaagatgtaccatgatgatgacctggcagatttggtctttccctccagtgcgacagctga

SEQ ID NO: 528082 - DNA, 100 bp, Homo sapiens
gaccggctgaggcggcgcggcagcggagggacggcagtctcgcgcggggggattgacggtgaagatgctaatacctgcccagcatcgaccctagtgcggg

SEQ ID NO: 528083 - DNA, 74 bp, Homo sapiens
aggaaggaagctttgttcactcacacatcaactagtcaggcagtcttccgtctccagtctggcatctgccatct

SEQ ID NO: 528084 - DNA, 74 bp, Homo sapiens
tttgtggagacatcaatgtatttcttaccaaaagacactttcagggcggcgactggcggcgcgatggacctgac

SEQ ID NO: 528085 - DNA, 50 bp, Homo sapiens
gtgggcgacctcttccagaagctggtcagcccaaggccaaccccactgtc

SEQ ID NO: 528086 - DNA, 96 bp, Homo sapiens
agcgccctggcggagaagactcgaacggctcccacagccgggcgttgggggaaagccctctggaccccgaggttggaccctactgtgacacaccta

SEQ ID NO: 528087 - DNA, 100 bp, Homo sapiens
tgaaggcggccggggccgggacgccatgtccatggaggaccccttctttgtggtgaaaggaaaacccatatagacagctgccttgtaactgtcatggaag

SEQ ID NO: 528088 - DNA, 82 bp, Homo sapiens
ggcaagatttgatgctcttgtgctcagtgacatcattcaggacagtcattttgtttactcattcagccctgttgcaggtccc

SEQ ID NO: 528089 - DNA, 100 bp, Homo sapiens
gtcagacatgtgtcctacgcttcagggcaatgagcttcccctcagcctaagcttcagctttagctgcagctgcctctgttcagccacttgcaacacaatg

SEQ ID NO: 528090 - DNA, 102 bp, Homo sapiens
tggagttcttacaacatggcagacattgacaagaaacttggatttaactggccagaagcaggtattcaaagcagagaacaatccctgggtgacccccattgc

SEQ ID NO: 528091 - DNA, 113 bp, Homo sapiens
attaagcagatgctccagtttgagaaacctggatctgcgatctgtttgtggtgtggcaggtgtttccagtgccatggaccacaccttctcaacaacatcaaaagatggggaag

SEQ ID NO: 528092 - DNA, 85 bp, Homo sapiens
agtgacattaagaagatgagggaggagctggcggccagaagcagcagctaaaacccaatctcggatatactactaataggcgcgg

SEQ ID NO: 528093 - DNA, 100 bp, Homo sapiens
tctgatcctgattgcagaaccttccctgattacagaatcttggctgccctacaggctttgcggaggaagaaaagattcgaacagcagctggcacaaactg

SEQ ID NO: 528094 - DNA, 75 bp, Homo sapiens
ccaaagtggatgaggtgaagtccacaatcaagttccaaatgaagaaggtgtttgagaagtcccccctgcgggtga

SEQ ID NO: 528095 - DNA, 83 bp, Homo sapiens
ggacacagcaatatctctgggctttcacaggatagtaatgatgacactgaagatgtttcactgtttgatgcggaagaggagac

SEQ ID NO: 528096 - DNA, 83 bp, Homo sapiens
ctctgggatcccggccaccagcaattgtccggaagggaaaaggccgaggcatcagcgtgtgaagaccgcaaagacgatcccga

SEQ ID NO: 528097 - DNA, 75 bp, Homo sapiens
aacccgagagcgtggagcgggctgggccagttggaaatgcagaaatcacctgtcttctgcgtcgatcaggctggg

SEQ ID NO: 528098 - DNA, 75 bp, Homo sapiens
tactacctctggccccgagatcagaatgccgactcgctctttactgagcgtgtttgaagaagatgctggcaccct

SEQ ID NO: 528099 - DNA, 100 bp, Homo sapiens
ggaagctttactagaagctgcagtagcaggacccagtgctccataaaggataatagtttccagtacactatccctcatgatgactccttaagtggttcat

SEQ ID NO: 528100 - DNA, 75 bp, Homo sapiens
gcgagcgcgagcggcgcgagaaagccttcctgggctatgtgctgtatggagagtgccaggaggtcttgtggtggg

SEQ ID NO: 528101 - DNA, 75 bp, Homo sapiens
ggatgaccaggaatgggaaagccccagttatcgccagtgtgacccttcagaacgaaagttatatggaaaatcacc

SEQ ID NO: 528102 - DNA, 90 bp, Homo sapiens
atgctttggaaaaaattaaagcaattgggaacgagataatgtacaacggccagccaattaccaaaatggcctgtggggctgaattcagta

SEQ ID NO: 528103 - DNA, 122 bp, Homo sapiens
aaggagttcgagcagatcgacaagtccgggagctgggcggccatttaccagaaagcataacccctactgtagaactaaatgcactgtgcatgaaacttggaaaaaaaccaatgtataagcct

SEQ ID NO: 528104 - DNA, 100 bp, Homo sapiens
cagaggccgccatcaaccgccagatcaacctggagctctacgcctcctacgtttacctgtccatgatggcaggagaggagaacttcaaggaagagctcag

SEQ ID NO: 528105 - DNA, 51 bp, Homo sapiens
tctacaaaaaggtgcatataccactggttttgggatttgagattgacgcgg

SEQ ID NO: 528106 - DNA, 50 bp, Homo sapiens
ttgagataagtcaccagctacggaaggtcggtgcccactttctggaggca

SEQ ID NO: 528107 - DNA, 120 bp, Homo sapiens
agggtgacgctcgctccgctcgtcccgctcgtcatggcctacccgggatacggaggaggggggccacctacagatgctcctgcagtggacacagcagaacaagtctatatctcttccctg

SEQ ID NO: 528108 - DNA, 83 bp, Homo sapiens
catgcggaagatcgtcgccacctggatgctggagctgtgccctccccgagaggattctgtcctttcgtggacgcttctccctg

SEQ ID NO: 528109 - DNA, 100 bp, Homo sapiens
ccgcagcagatcagggaccggctgctgcaggccatcgacccccagagcaacgaaggcaacagcccccaggggagcaaccagggagtcaaaatcacaccgg

SEQ ID NO: 528110 - DNA, 96 bp, Homo sapiens
atgatgatcctaagttcattaatgttggagaaaaggcatattcatgtgctttgaagtaccatgcggagaccatcaagaatgtgcgcacagccacgg

SEQ ID NO: 528111 - DNA, 75 bp, Homo sapiens
gacagtggcggcggcgccatggcagggcttgcaggatccattccaaggagcacttcaaggagaagtatgccgtgg

SEQ ID NO: 528112 - DNA, 101 bp, Homo sapiens
tgtatcctctgcagcatccttgatgataaaccagtaaatgacgcttccattgcacacagattccatgtgatgagagagaaacatcctgaaaaattcaacag

SEQ ID NO: 528113 - DNA, 82 bp, Homo sapiens
cagcgattggacagaatttgtgaaggtatttacttatgggatgtagaaggcagaaaatattttgacttcctgagttcttaca

SEQ ID NO: 528114 - DNA, 74 bp, Homo sapiens
agcagtcctaccatgtcagccttcccagtagctgggaccacagatgacttcctgctgtacctggaccctcacta

SEQ ID NO: 528115 - DNA, 100 bp, Homo sapiens
aatggacagaatcatctagaaggacaaatgaacttcaatgcagattctagccaacataaaggattcactccttctccagttgcacagccacacccttcag

SEQ ID NO: 528116 - DNA, 75 bp, Homo sapiens
aatgaggcacctaaaaattgtataccgcagattcagtaaactgtttcacgttagacctgtaacccaaggagatgt

SEQ ID NO: 528117 - DNA, 75 bp, Homo sapiens
gccggtgcagcagccttcagcttttggcagcatgaaagttagcagatcagctcagctactatttaataaaacaaa

SEQ ID NO: 528118 - DNA, 100 bp, Homo sapiens
ccatagtacctacagcagcactccaggaagccttatcagttgtgagtgaggaccagtcgttgtttgagtgtgcctacggaacgccacacctggctaagac

SEQ ID NO: 528119 - DNA, 100 bp, Homo sapiens
catgccctttatgaagatattcttgaggatgtgcactgggaactacacctttgttccttacatgataactccacataacaaagtctactgctgtgacagc

SEQ ID NO: 528120 - DNA, 75 bp, Homo sapiens
agtgctgaaaaaatctttagaaggagcagattggcctgttctatagcatctttacagaccagttgaaatgcaacc

SEQ ID NO: 528121 - DNA, 100 bp, Homo sapiens
ccagcatgaagaggagagctggcctggggggcagcatgagaaccatctgctgcagaatcccaggggaaaggcagcatctccgaggatgagctgatcaccg

SEQ ID NO: 528122 - DNA, 83 bp, Homo sapiens
cgtccgtccgccgccaccacccactccggacacagtcctattttgtaacggattatgatccaaccattgaagattcttacaca

SEQ ID NO: 528123 - DNA, 96 bp, Homo sapiens
ggaagaggcggcagacagcggggtcaccatggagtaacaagtatgaccctcccttggaggatggggccatgccgtcagctcggctgagaaagctgg

SEQ ID NO: 528124 - DNA, 96 bp, Homo sapiens
tcagagctcccatggagacattttttcacactgtgatgcagatccatccgccctagcaaaatatgttctggctttggtaaagaaagacaaaagtga

SEQ ID NO: 528125 - DNA, 100 bp, Homo sapiens
ggagacgcagatgtggacttgaaagaagctgcagcggaggaaggcgaggctcctccattaccatccgcctcatcttgatattgttccatggacattaaat

SEQ ID NO: 528126 - DNA, 101 bp, Homo sapiens
atctcaatcaagttagcatgctttctccagctgccctatcacctgccagctcatcacaaaacttcacagagaatgcagttgtcttgacttcaggtctgtct

SEQ ID NO: 528127 - DNA, 76 bp, Homo sapiens
tcacaaagaagggattgtacagactgaacagattagtgacattctgaaagttcccaaacctgaacctataccagag

SEQ ID NO: 528128 - DNA, 115 bp, Homo sapiens
cgcctccgcccagggccacctaaggagcggaccccgcatcttcgccgtctggaaaggtactccaaagattcaggtttactcacgtcatccagcagagaatggaaagtcaaatttc

SEQ ID NO: 528129 - DNA, 74 bp, Homo sapiens
aagccttgaggacctactcacagataggaattgaaggctttgtccacccagacccactctggatcccattcaaa

SEQ ID NO: 528130 - DNA, 75 bp, Homo sapiens
cggagggaaggggaagcggcggatcctggccatgaggttggatgcctcaccttactgaaaggagacactggacct

SEQ ID NO: 528131 - DNA, 83 bp, Homo sapiens
gagcgggagttcgaagagttggatactcagcgtcgctggcagccgctgtacttgggtggcattgtgtgtcccagagtgccgga

SEQ ID NO: 528132 - DNA, 88 bp, Homo sapiens
gccctggtggaagacttgcagaaagaacctggaagacagaggctggaggctgcctctaagaatcaaacttcactcttgggagaaccac

SEQ ID NO: 528133 - DNA, 75 bp, Homo sapiens
gctggagttggtgctgggaaacccggggctaatgttgacaacaggctcgagggcgtgatggtgggcatgggtcag

SEQ ID NO: 528134 - DNA, 90 bp, Homo sapiens
gtcatggtcccagaaacgtcactatcaagaaggtcaagagcaatctgaatccaaatgcaaaggagtttgttcctggggtgaagtacggaa

SEQ ID NO: 528135 - DNA, 74 bp, Homo sapiens
gcaaccgcctacgagacactcaagattgctcgctgtaagcagctcatctgtgaccccagctacgtaaaagatcg

SEQ ID NO: 528136 - DNA, 85 bp, Homo sapiens
ttcagttcttctatgaatgaatctgctcccactggtattactgatcatattgtccaaggctcctaactgggcaactcaagattct

SEQ ID NO: 528137 - DNA, 50 bp, Homo sapiens
ccttgcccatgtctcacgcggggggatgtttttccaggacaagtgaagag

SEQ ID NO: 528138 - DNA, 100 bp, Homo sapiens
gctacttcatattttggaaagcagtttttaagacaatgccaggcttcccgtatccagcagccaccgccgcggccgcctaccgaggggcgcacctgcgagg

SEQ ID NO: 528139 - DNA, 73 bp, Homo sapiens
tggagaacaagttgctcccgttgagaagaggggccttggacaagttgttactgactatgttcatggggatgcc

SEQ ID NO: 528140 - DNA, 75 bp, Homo sapiens
caaatgcgctcagcttcaattggcttgaagtagaaaatgccatgatgagaaaaactattaaaaaacaggatgacc

SEQ ID NO: 528141 - DNA, 100 bp, Homo sapiens
cccagacccctcttctagacctcatgagcgacgcccttgtcctcgccaaaatgctcaccttgcagagcgccaagtcccgagtggccttctttgaagagct

SEQ ID NO: 528142 - DNA, 75 bp, Homo sapiens
gcacatgatggcgatacgggagctcaaagtgtgccttctcggggagtcagagtcagaagcaaaggtagatggaga

SEQ ID NO: 528143 - DNA, 82 bp, Homo sapiens
gccccgccgctgagccgtcgcggagccgcgcagccctcggagcacgcattttgaaagcgaagcagaagccgtagaatcagcg

SEQ ID NO: 528144 - DNA, 116 bp, Homo sapiens
agaaagaaggaggagtgggggaggcgaacagtctcgttgctgcctctgtgtacgctgaggggggagtttgcatttatgtcggatcctcagtgaaaataaaagccatgatagttcaa

SEQ ID NO: 528145 - DNA, 83 bp, Homo sapiens
ctgcgccggagctgggggccttagatctgcaaagcccctgagcccaaaacagtctcctactgcagcccgtccgtgcccgtgca

SEQ ID NO: 528146 - DNA, 83 bp, Homo sapiens
tgaaatgcagaaaaaagatcacaagcaactctggatgggattgcaaaatgaacccagtgacttgattgtaaaaatttacagag

SEQ ID NO: 528147 - DNA, 80 bp, Homo sapiens
ctgtagaacatgctgaaaatccatgtcataaaggtgtggatgaggtcaccattgtcaacattttgaccaaccgcagcaat

SEQ ID NO: 528148 - DNA, 50 bp, Homo sapiens
tctatgagaagaattatgtgtgtgttggagcctgtggtgctgaccgacac

SEQ ID NO: 528149 - DNA, 74 bp, Homo sapiens
cccggccaagaggcaaaggggaggttacgcagcaaaccatccagaaggtacatgtcccagagcaagcacacgga

SEQ ID NO: 528150 - DNA, 100 bp, Homo sapiens
cccgacctcgctgtgggggctcctgtttctctccgccgcgctctcgctctggccgacgagtggagaaagtttattaatgccagaagaagaatagtacagc

SEQ ID NO: 528151 - DNA, 82 bp, Homo sapiens
caggagcagccgcagcgacggcggcgacagcaggttttaaaatcaaagatgggaaaatcggagaaaattgcccttccccatg

SEQ ID NO: 528152 - DNA, 96 bp, Homo sapiens
gggctctttggatctaaacctgccactgggttcactctaggaggaacaaatacaggctattcaagatctctggcagtggaggaagtctctttaaga

SEQ ID NO: 528153 - DNA, 100 bp, Homo sapiens
aagatgaaaaggaatatgcattgaagcaaattgaaggcacaggaatatccatgtcggcttgtagagagattgcagatatgtgaacttttgcaaagcggag

SEQ ID NO: 528154 - DNA, 100 bp, Homo sapiens
cttggagctactttcatccttaggaatgttatcgaaggacaaggcttcagcaaccaggagggattgactgagatcttaacaacagcagcaacgatacatc

SEQ ID NO: 528155 - DNA, 100 bp, Homo sapiens
ggccagccacctctctcaactgtatagctatcctctttttaagggctgggagaactcaggaagcctggcagcctgcttctgcaaagtggtacgatcgaag

SEQ ID NO: 528156 - DNA, 100 bp, Homo sapiens
cccgcagtgagcagctggaggaactgttcagtcagctgcaagctttcttcctggtggcagatgacatcatggattcatcccttacccgccggggacagat

SEQ ID NO: 528157 - DNA, 83 bp, Homo sapiens
ctgggccacgcggcccggctggcctcctccggtctcctcctgcaggacagagaacaccccaatgattgctggccttgggaagg

SEQ ID NO: 528158 - DNA, 101 bp, Homo sapiens
aacaagcttcattgttttcagctaacagtaaccccagcggcaacctttggcactgcatccatgagcatgcccacaggattcggcactcctgctccctacag

SEQ ID NO: 528159 - DNA, 100 bp, Homo sapiens
atccccgcggacgccacagcgctgagctctctgctcgtgatggggatcctacctttcatacacatcagctgcacttagtagatttacggatttcctggac

SEQ ID NO: 528160 - DNA, 95 bp, Homo sapiens
agagcgacaagccgctggcagccgcggatctcaccgccgctcaggccacataaagaagatccctaatagtcatttctcaacaattatatagtcaa

SEQ ID NO: 528161 - DNA, 75 bp, Homo sapiens
ccaggaaaagactcaggacggacaagcacagtcttcggaagtcgagcaaaagatgtgataataccagcaaagcca

SEQ ID NO: 528162 - DNA, 99 bp, Homo sapiens
ctgacctggccaattctgacgccctcaaggtcgccaaggaggtggacccccaggctggatctaccatgaaagacttgtgaatccaggaagagagactga

SEQ ID NO: 528163 - DNA, 98 bp, Homo sapiens
ggaaataattaatgaccgaacagaaacccctcctcccctagcttcactcaatgttagtaagcatgattttgaagtcagaggagatgtggtcaatggaa

SEQ ID NO: 528164 - DNA, 82 bp, Homo sapiens
tggttctggaatcctcagttcaaggccagctgcgggccgtccagcggctgtgccacttctacagcgccgtcatgcccagcga

SEQ ID NO: 528165 - DNA, 82 bp, Homo sapiens
caaggactaatctgatcgggtcttccttcatacctgcctagagctggaacgttacctccagagcgagccctgctatgtttca

SEQ ID NO: 528166 - DNA, 82 bp, Homo sapiens
aatcacaagcccagcaacaccaaggtggacaagaaagttgaagtggtccaaaggcaaagttcgggacaagctcaataactta

SEQ ID NO: 528167 - DNA, 90 bp, Homo sapiens
cgcgagcgtctgggcgggtggtagttatacatgggaagctgttgataccaaaaataatgtactttataaaatcaacatctgtggaagtgt

SEQ ID NO: 528168 - DNA, 100 bp, Homo sapiens
taagactccaggaccctctggaagcctagaaatgccagagactgctgctactttgaaacgtacgatagaggccctgatggacagaggagcaatagtgagg

SEQ ID NO: 528169 - DNA, 90 bp, Homo sapiens
ggcgaaacgaggaggagataacgcggccttgggctctgggaaattcaactactgaggaggttacggcacaaaaatgtcatccagctggtg

SEQ ID NO: 528170 - DNA, 74 bp, Homo sapiens
aaatccccactcctccaagaaccaacccccaaattggctgggacagtggggacgccctactacatgtcaccgga

SEQ ID NO: 528171 - DNA, 95 bp, Homo sapiens
ctccccactctgtacaaccagaatcttctgacacagcagagtattggtgctgctggaagccagaaggaaggccatggcccaaaaggaagatatgg

SEQ ID NO: 528172 - DNA, 98 bp, Homo sapiens
agaaccatgactgtattcaggaaggcacatgaactgaagcttctgtcagaatgccaatacaagcagttgatcatgttggtggatggatttaaaggaca

SEQ ID NO: 528173 - DNA, 100 bp, Homo sapiens
gccttgtgggatctgagaaatctgaaacttaagttgcattcctttgagtcacataaggatgaaatattccagtacctccctgcacttggctattcaaaac

SEQ ID NO: 528174 - DNA, 100 bp, Homo sapiens
gttgttgggcagcattcatttcctggcagatttctcactatgtgcaatagacactttggcagtgttgtggcacaaaccattcggactcaaaaaacggatc

SEQ ID NO: 528175 - DNA, 74 bp, Homo sapiens
cccctccactcacccggcagatatccgtgaaggctctaggtgatgtggaaacagctgtaaaatttgcaactcag

SEQ ID NO: 528176 - DNA, 82 bp, Homo sapiens
tgtcagagcccggggacggcgaggccctcatgtaccacacggatggaggtttgcttctgaataacccttcggcattagctat

SEQ ID NO: 528177 - DNA, 90 bp, Homo sapiens
ttccttcacagggaccctagccaggttgaatcatgtagctgctggtctcgtttcaccaagtctgaaatcggatacctctagtaaagaaat

SEQ ID NO: 528178 - DNA, 100 bp, Homo sapiens
gggcggcgggactgcactcgagtgtccagacctgctcgatgagatcatgatgcagccgtccttttggatttctttttaataatgtgtgacccttcacctt

SEQ ID NO: 528179 - DNA, 100 bp, Homo sapiens
tggccagctgactgcacttcttttttgagaaaggaaggaatatatcctgactgattgtttgtctgccattgtggatttcctgggcagagtggagtgaagg

SEQ ID NO: 528180 - DNA, 75 bp, Homo sapiens
ctcattattttaacatttgggagaaacacagccagaagcctacaacacagcagtcccctcaggatgagcaggaaa

SEQ ID NO: 528181 - DNA, 100 bp, Homo sapiens
ctccgtcgcacccaccatgatggaagacgacgggcagccccggactcttggatgaggatcgcagtacggaacctgaccgattgcaggtgtttcacaagag

SEQ ID NO: 528182 - DNA, 82 bp, Homo sapiens
ggaccaagcctcgggagctaagagctggaagtcgagtgtgctactcaactcaggagatttggagacaaactgaacttccggc

SEQ ID NO: 528183 - DNA, 106 bp, Homo sapiens
gccctgcaggaaggacggacttcaggggcaggaatttgctgacacaatatcttccgcctggtgctgggcatatcctaagaacttacaactttcctgtattatcctg

SEQ ID NO: 528184 - DNA, 71 bp, Homo sapiens
cggctcctgggtgcatctgacagtcaattttagagaaaagattggccccattgccacaccagactacatcc

SEQ ID NO: 528185 - DNA, 125 bp, Homo sapiens
atctcatggcctacagggactttctgcagtgcctctgagaacttacgcagatcagccgacgatggcaagccggcaggtggatattgcaactcagggctggttcattggtctgatgtgtgctgttg

SEQ ID NO: 528186 - DNA, 99 bp, Homo sapiens
gaggtcatctccctgttggagcaaggagaagagccgtggtcagtggagcaggcatgtcctcaacgcacttgtccagggtgtcctgttcccaaagctgag

SEQ ID NO: 528187 - DNA, 90 bp, Homo sapiens
gcgggctccagactcgccgtggtcaagttcaccatgagagggtgcagtcgctttcaatctgaaatcaaacgcttgaaaatctcatccccg

SEQ ID NO: 528188 - DNA, 100 bp, Homo sapiens
ttatgtacactgatcgtttctgcagctgcagattctgctgttcgactctggtctaaaaagggtccagaagcaatgccctgccctaaggaagacactccca

SEQ ID NO: 528189 - DNA, 87 bp, Homo sapiens
gaaaggaaatgttaggatcactttattctgcataagcagtactataatggatgtagacagcacaatttccagtgggcgttcaactcc

SEQ ID NO: 528190 - DNA, 75 bp, Homo sapiens
atcacttaaaggagtggacattgctagcaatgagctcccaaagccatccagggttgcagataagctcccccggcc

SEQ ID NO: 528191 - DNA, 100 bp, Homo sapiens
aggctccaccgtttggcatcccgactgtaagcaatctacgaagaccgaggaaaagctgcggatgttcattgagcaaaacaagctaaagagacaaagccac

SEQ ID NO: 528192 - DNA, 98 bp, Homo sapiens
gcagatggcactttccaaagtggatgcctccggggagccccgagtgcgagatcgagcgtcctgagcgcctgaccgcagccctggatcgcctgcggcag

SEQ ID NO: 528193 - DNA, 117 bp, Homo sapiens
ctctgctatatgaaatatgggagacgacagaccgtttgtgtgcaatgccccgggctgtggacagggcagtgggcaaaacgaaccagtcgggctataacttgacctacagaggagagg

SEQ ID NO: 528194 - DNA, 100 bp, Homo sapiens
cgcactactggcccctgatccggttcttggtgcccctgggcatcaccaacatagccatcgacttcggggagcaggcccgccatgttcatagaggataaag

SEQ ID NO: 528195 - DNA, 74 bp, Homo sapiens
cttggctctcccacccaatggagatggctctaatggtggagccgccaccaaaatgcagattttcgtgaaaaccc

SEQ ID NO: 528196 - DNA, 100 bp, Homo sapiens
ccggtgccggcctagcgtcctggaattacttcaatcaagtggttattaacttggtgatgcttttggctgaaatgaaaatacaggaccgcgctgttccatc

SEQ ID NO: 528197 - DNA, 100 bp, Homo sapiens
agccccacagcctcctgagtatcctggacgcccagacatggctgtcccaggacagagcgggatgccaccagcttgtccaaagggaagttccaggagctcc

SEQ ID NO: 528198 - DNA, 100 bp, Homo sapiens
gggcgacctgcaggcagcaccggaggcccaggtctccgtgcagcccaacttccagcaggacaaggtgtccggctttgctggcccagcaagcctgataagc

SEQ ID NO: 528199 - DNA, 100 bp, Homo sapiens
ccgcgatgtcagctcagtgctgtgcgggccagggccaaaagagaaacattggctactttgacaaccttaaagcggactccaggaatatcaccaacagcat

SEQ ID NO: 528200 - DNA, 82 bp, Homo sapiens
gcggagtatctggcctccatcttcggcaccgagaaagacaaatcctgataacttaagtgactctctcttttccggtgatgaa

SEQ ID NO: 528201 - DNA, 100 bp, Homo sapiens
tgggaactccgccatgtcatccacttcgcccaacctccaggtgtgggccatgtttgaggattgccccagcattcagttctatgagtaataaatatccaca

SEQ ID NO: 528202 - DNA, 75 bp, Homo sapiens
gagccatctgtggtgccaattgaagtctccaaaaaaagttggtgatgacattgccaaggcaacgggtgactggaa

SEQ ID NO: 528203 - DNA, 75 bp, Homo sapiens
tattattgagcacctgtcagtggtattcccatgttacaacagccacaacgcactgaagctgcgcttcccggccga

SEQ ID NO: 528204 - DNA, 100 bp, Homo sapiens
ctttcaccattaagaggaaagcgatggaggagctgagcgctgatgaggtgtacaaagataatcaatgctgattcggaggacccaaaatacattatcaacg

SEQ ID NO: 528205 - DNA, 109 bp, Homo sapiens
ccaaggatctggggatcttcgcactatcccaagattctgaaagtcaagaagacatcatccggaatattgccaggcacctcgcccaggtcggggacagcatggaccgtag

SEQ ID NO: 528206 - DNA, 82 bp, Homo sapiens
agaatccaccgccatccgccaccatggtgtggacactgccagcggctgcagccgacttggaatgacctgggagacaaataca

SEQ ID NO: 528207 - DNA, 100 bp, Homo sapiens
taccaggatagctgttgtttcagagaaaggtttggtcaagcctcctctaaaacgctcccgatctgcacctgatggaggagatgaggagaaccaggagcag

SEQ ID NO: 528208 - DNA, 100 bp, Homo sapiens
ccatattcaaggcagaccataaatcaacttcttgctgaaatggatgggacggctctacatttggcctgtgccaatggtcatccagaagtagtaactctcc

SEQ ID NO: 528209 - DNA, 82 bp, Homo sapiens
cgcgacgctgctcaaaacctcgctccggaaaggggacacctggtcctcagaatggttggaatgaccctccagctttgaacag

SEQ ID NO: 528210 - DNA, 98 bp, Homo sapiens
gccaagagtgagcgagcggacccgcgatggtaatctatgccagcaattatgacaatgttagcagaccatgcagctcgtcagctgcttgatttcagcca

SEQ ID NO: 528211 - DNA, 74 bp, Homo sapiens
cgacatcaccaagctggaggtggacgccatcgtcaacgccggacaggacatccagcccaaaagagacctcaccc

SEQ ID NO: 528212 - DNA, 75 bp, Homo sapiens
aagggaggcgtcgctgattccagagagctaaagccgatgcatttctggattaaaagtggtgggggagtccctttc

SEQ ID NO: 528213 - DNA, 75 bp, Homo sapiens
ctacaagtacctgactctgaaagtcaaaggagtctttgttgctggctatgaaagcctgaaaaagaatgaaattct

SEQ ID NO: 528214 - DNA, 80 bp, Homo sapiens
ggacgctcatcagagggaagatctttttcctcaattggacctccggctagcctgtttcagccacctcgtcgtcctggcct

SEQ ID NO: 528215 - DNA, 100 bp, Homo sapiens
ccgtaaggactgcttccagggcttgatacaggagctagggcagattgccaaggctcatgagactgttgcagatgggtctcgctctgtcgcccaggctgga

SEQ ID NO: 528216 - DNA, 75 bp, Homo sapiens
gctgaaggaagctgccttgtacccacatctcccgccaggtaatagcctgcagctggtgttttgagaagccctact

SEQ ID NO: 528217 - DNA, 100 bp, Homo sapiens
acatctatgccatcacagacaccgcctacaggagtatgatgcaagataatcttgtgccgtggaaatcagaagggcaaaacgaagcagtcatgatgagaag

SEQ ID NO: 528218 - DNA, 100 bp, Homo sapiens
gaagaagaagaaacgggccgcgaaccgcagtatcatgctggccaagaagatcatcattaaggacggaggcacgatggcccgtccttaaaagaaacaacag

SEQ ID NO: 528219 - DNA, 100 bp, Homo sapiens
ttgcctgtgggacgctccgtggatgaggctctgcggctggtccaggccttccagtacacagacgagcatggggaaggtgttggagcgggccggagagaag

SEQ ID NO: 528220 - DNA, 95 bp, Homo sapiens
gcgcaagtgcctccccagtttatttccccccagacattgggtttgcctatcacagatgaacaaatccaggagatgaaatcaaacctggagaacat

SEQ ID NO: 528221 - DNA, 100 bp, Homo sapiens
tagcgctcgtctggcggagctggagaatggtggcatgaagctcaaaaaaatccaaagataagacctaatcctcatgacaccaaagtgaaaaaaaaattac

SEQ ID NO: 528222 - DNA, 50 bp, Homo sapiens
ctttgacctttttgaagcctttgcaaaaataattgtatggaagagataca

SEQ ID NO: 528223 - DNA, 95 bp, Homo sapiens
atgccaagaggaacagcagtgtaaatgactcaggcactgtctttaaacacagaggaagacattcatcgggctttccagtcgcttctcactgaagt

SEQ ID NO: 528224 - DNA, 75 bp, Homo sapiens
tacccgtccatcatagtcaactgcgtggaagagaaggtaccttctcaaaccagatttcatgaggcggcctgatcg

SEQ ID NO: 528225 - DNA, 83 bp, Homo sapiens
gtcgccgctcccgaagcttttccaggtgacttaagagattaaaattaatttggttgctgttggttctgaacaaataatgagtt

SEQ ID NO: 528226 - DNA, 83 bp, Homo sapiens
gaaggcacagctgggtcctgatgaaagcaaacagaaatttgtgctcaaaacccccaagtgttctaagaacggaagcatctggg

SEQ ID NO: 528227 - DNA, 100 bp, Homo sapiens
ctggatggtgaatttcagtcagcctcagaggttgacttctacattgataagactccccatccccaggatgtcaacctcagtccctcaaggccatacctgg

SEQ ID NO: 528228 - DNA, 75 bp, Homo sapiens
cgggaagtcgcgaccagagccattggagggcgcggggactgcaaccctaatcagtgggctcgggatgagtttgaa

SEQ ID NO: 528229 - DNA, 100 bp, Homo sapiens
ggctgctgcctcgtgtcacatctgaaactcatctgtacctcacttagaaaggtacatcaggaacgtctctatcaagaatacaatttcagcaaggctgagg

SEQ ID NO: 528230 - DNA, 73 bp, Homo sapiens
gacattgatgtggccaaggtcaacaccctgattcgtgattctaccagaaaggaatgaagaacagaaccttcag

SEQ ID NO: 528231 - DNA, 100 bp, Homo sapiens
tccaaaaacagtggataattttgtggccttagctacaggagaggagcaggggagagaagacagaagaggttggagaggtcagggaggtgccagatcatgg

SEQ ID NO: 528232 - DNA, 100 bp, Homo sapiens
gcacaccaaggagatcgacctggtcaaccgcgaccctaaacacctcaacgatgacgtggtcaagctggtcattgttggtgaaagctaaggagcaagtagg

SEQ ID NO: 528233 - DNA, 53 bp, Homo sapiens
caacgaatgaatgaacagccacgtcagggctctggctgagaacatggccaatg

SEQ ID NO: 528234 - DNA, 75 bp, Homo sapiens
ctcctgagtagctgggactgcagcagaaggtgatttactacctctgcatcttattgaaagatccagtggaaccac

SEQ ID NO: 528235 - DNA, 135 bp, Homo sapiens
ggagagcaggagccactgagatgaggaggcgtcgcgcgcgcctgtagctcgcgggcctcgcagcccgtgatgctgatgagcgagagaagtggatccatgccttagaagaaacaattcttcgacatactctccagc

SEQ ID NO: 528236 - DNA, 100 bp, Homo sapiens
tcatctacttcacaggaattgccatttggaactctaatgatccaggacaaagaagttaccctggagtatgtatcaagcctggatttttggtactgcaaac

SEQ ID NO: 528237 - DNA, 85 bp, Homo sapiens
tcaacaaggttctggacaagatgaagtctttctgccagggaggggctggagacaggtctgaggaggaggcgtcatccacggagaa

SEQ ID NO: 528238 - DNA, 90 bp, Homo sapiens
atgttggagaactatagcaatctggttttcttggatggtactgccttttaaggtctattacttaaacataagtatggctctggttcttac

SEQ ID NO: 528239 - DNA, 75 bp, Homo sapiens
ggaaaagatccctggaatatgaagagacacagtatggtagccacacccccagcattcctctgaatattgatttgc

SEQ ID NO: 528240 - DNA, 83 bp, Homo sapiens
acaagactctcttcgctctttgcatcttaactgcaggattggtccaaaggaagattttttccattgtttgaaatgtaacttat

SEQ ID NO: 528241 - DNA, 87 bp, Homo sapiens
cagccccaagacagagcgctactcctggcagtgcgtcaatcagagcgtcctgtgcggtacttcaactcccgcccccacctgtgtccc

SEQ ID NO: 528242 - DNA, 75 bp, Homo sapiens
ctgatggggccggcgagcagatgagaccgctactcacccggcaaggatggaacattactgtggacctggtcattg

SEQ ID NO: 528243 - DNA, 83 bp, Homo sapiens
gcctcagccgcttggggcccgcacggaccctctacttcagaaaggacttagaagccttacaaatacatctgtgcattcttgct

SEQ ID NO: 528244 - DNA, 75 bp, Homo sapiens
gaaattcagacggctcccgaggatggcctgatatgaaggagtcacgcctcccgcctcccggagctgcccagtggc

SEQ ID NO: 528245 - DNA, 100 bp, Homo sapiens
ctcagatgtgaagtccattaaagtttgtccacactagaaattgaaaatagagcccaagaccttcatctctttgagactttgaagactgatccagaagcct

SEQ ID NO: 528246 - DNA, 90 bp, Homo sapiens
cagggttcatctttactttttaccaaaactcaaggaagtagcacaagttgggaagagagaagggcacagttacctaagtatcaacgtaat

SEQ ID NO: 528247 - DNA, 75 bp, Homo sapiens
ggggaggcgaacagtctcgttgctgcctctgtgtacgctgaggggggagagggtgacatgccatgccgtgccaac

SEQ ID NO: 528248 - DNA, 74 bp, Homo sapiens
cttcgtgtgtacctcctgctccggcagcctagccccggagctatgtggagtctgtggcacggacagcggtggct

SEQ ID NO: 528249 - DNA, 88 bp, Homo sapiens
ccagtaatcgattacccaaagtttacaaatggagttttcagatgttttaattggttggggtcagataagaagaggagtgacaatcaag

SEQ ID NO: 528250 - DNA, 96 bp, Homo sapiens
ttacggcttcacttgaggaagttcgcaaagaaatgtgtggacctgagctgtaatgagctaagtgaagtcacattaccagaaaacctgcctcccaaa

SEQ ID NO: 528251 - DNA, 98 bp, Homo sapiens
aaaagttcagttgagaaacaagggctcaatatggaggattacggttacacatcattttggaatgactgtatatcatctggattacgtggctgtatgtt

SEQ ID NO: 528252 - DNA, 100 bp, Homo sapiens
tcgaaaaaaagatggagccctgcatatgattggctctttagctgaaatacttctgaagatgttgctaaatttgcataagaagagttggatggaaggtttg

SEQ ID NO: 528253 - DNA, 100 bp, Homo sapiens
gagaagcaagaaggccctggacacagcaatatctctgggctttcacagcggacaaacataaattgcagagattcctgactgctgacatggccctggtggc

SEQ ID NO: 528254 - DNA, 74 bp, Homo sapiens
tgagatccagaggagtggaaggctcccccttgactaaagctgccttcctggatgctctgcagaaccaggctgag

SEQ ID NO: 528255 - DNA, 100 bp, Homo sapiens
cggcgagctgtttggggggggttggcgacggcagcccgagggcggcgcaaggcctgaggcccagcacaggtacatcaggaacgtctctatcaagaataca

SEQ ID NO: 528256 - DNA, 99 bp, Homo sapiens
ttgccaatctcccaaatcaagtatacagaaaatcggtgaagagaggttttgaattcacgcttatggtagtggatcacgctgaccaccattggctacggg

SEQ ID NO: 528257 - DNA, 90 bp, Homo sapiens
accggggcgaatcatggcggccgccaaggaggaggaagccaagaatctggtgagcgaagccatcgcagctggcatcttcaacgacctggg

SEQ ID NO: 528258 - DNA, 75 bp, Homo sapiens
cccaaagccaatgggaatcacctggttcaaggcagtcgatgatgtgaagaaaggttacatcaaagcagaagaaaa

SEQ ID NO: 528259 - DNA, 144 bp, Homo sapiens
ggcccaacggctcgatcgctgcccgccgccagcatgttgggcgccccggacgagagctccgtgcgggtggctgtcagattcgcctctgaagagcacagctgtgtggaaacaggaagtcaagaaccaatgaccatttatttcacc

SEQ ID NO: 528260 - DNA, 90 bp, Homo sapiens
ctcactggcccgggccggcgcgggagggctgtgtgatggcctcggagcgcccggagccggaggtgtctttcctgaagactatcttcccgt

SEQ ID NO: 528261 - DNA, 86 bp, Homo sapiens
cgagctggggttggacgctgccagtttgcacagcagcagcaaattgtggctactaatttgccccctgaagatcaagatggctctgg

SEQ ID NO: 528262 - DNA, 75 bp, Homo sapiens
gttcctacagagattcatatgagagttatgtactatactggcaattgctggagaagattttgcaattgttgcttc

SEQ ID NO: 528263 - DNA, 75 bp, Homo sapiens
ggaagccaggttgcagggtgtccgcttcctcagaaagttcaggagccctggaaaggagaaggaataagacggcag

SEQ ID NO: 528264 - DNA, 75 bp, Homo sapiens
cctctgtggagaacacccccccatggaggcgaggagaagctaaaacttacttatgaggaaaagtgtgaaattgag

SEQ ID NO: 528265 - DNA, 75 bp, Homo sapiens
tggtctaaagtctttccaaaaggtcaaggttcacaaggtgaagtattacagacacttagcacctgatcacttgct

SEQ ID NO: 528266 - DNA, 88 bp, Homo sapiens
aacaatcttgaatcatgaagctactaaccagagccggctctttctcgattggaccagaccctgaattcttctagctcctccaatccca

SEQ ID NO: 528267 - DNA, 80 bp, Homo sapiens
agacagtgcagggaagagagaccttagaaaggatcaggactggcggcaaattcaacacccaacagcttccttaatagcaa

SEQ ID NO: 528268 - DNA, 82 bp, Homo sapiens
cgctcggctgcgggaaatcgggctgaagcgactgagtccgcgatggagatggagaaggaggagacaacccgggagctgctgc

SEQ ID NO: 528269 - DNA, 74 bp, Homo sapiens
tcgactccagcgtgctctctcggaataagacagaggtaaagggagaagatgaggaagagaacaatttggaagta

SEQ ID NO: 528270 - DNA, 98 bp, Homo sapiens
ttcgttttgtgaaaggccaatttcatgaatttcaagagagtaccattggggccttgttgtcctcctggtgcgaagagctcggccgcctgctgctgctc

SEQ ID NO: 528271 - DNA, 100 bp, Homo sapiens
catggtacacaatggttatggatttttctaccatatcagagatgacagtatgaaaagacacagactgtactctcagaactgaagttgaagtttgaaatga

SEQ ID NO: 528272 - DNA, 75 bp, Homo sapiens
atgtggtcccgacggctggccccctgatcatgctgtcacctgaagcaaggaacacagcatgggtgtcctttgatg

SEQ ID NO: 528273 - DNA, 50 bp, Homo sapiens
gctacacaggaggacttcgacaaggtcaatgtgacggtggactacattag

SEQ ID NO: 528274 - DNA, 49 bp, Homo sapiens
atcgagtctgtcaacctcttggttcctttgcccaaagactcaacaggtg

SEQ ID NO: 528275 - DNA, 83 bp, Homo sapiens
gtcccaaggaacacctgggcaacagaatattggtcaagttgctgaccttgaagctttatcctgtggataaacgcagagtgaac

SEQ ID NO: 528276 - DNA, 99 bp, Homo sapiens
cccagacctcaagtgacttggtttagagaagggcacaagattattccaagcaacagaatgtccctagctgttggtagtaagtccggttataaatttttc

SEQ ID NO: 528277 - DNA, 75 bp, Homo sapiens
ccaggctaaggactgtatcgactcctttgttactcactgtgttcggccctggtacctgacagtgtaaagaaggag

SEQ ID NO: 528278 - DNA, 98 bp, Homo sapiens
acggccagacacctggaagccggaaaatgtctattgaagacaatgaagtatatttgcctaatgatgaaatttggacctatgatattgatagtgggttg

SEQ ID NO: 528279 - DNA, 88 bp, Homo sapiens
ggaacagggcagacgttagcgtgagtgatcactctcaatcccggtggttcctctggagattaaatgtacttcacagaacctcagcgag

SEQ ID NO: 528280 - DNA, 83 bp, Homo sapiens
gcatggagtcgcccgcctcgagccagcccgccagcatgccccagtccaaaggagccttcacgtaaatgggtccagtcatgcct

SEQ ID NO: 528281 - DNA, 100 bp, Homo sapiens
agatggccagctgcagcttggacccagacatcagcattccagattgttacagagcagcaaactgggcagaaaatccagattgtgacagcacttgatcata

SEQ ID NO: 528282 - DNA, 100 bp, Homo sapiens
aagaccctctccttccaccaaggagcgcccagaggccggcgggagctccaggttcacctcctcctcctccagctggagaacctcatgctggacaaggacg

SEQ ID NO: 528283 - DNA, 50 bp, Homo sapiens
tcaagatcagcaagaacccgaaccggaagtgctggactccctggtcagca

SEQ ID NO: 528284 - DNA, 90 bp, Homo sapiens
ctcagttgtctccagctgttagccagaagcctcccttccagtcagggtgggaatgtaagacggacttagatattgcatacaaatttggaa

SEQ ID NO: 528285 - DNA, 100 bp, Homo sapiens
tgggcaactcggcctcgaacatcgtcagcccccaggaggccttgccgggccggaaggaacagacccctgtagcgggccttccggagcagtactacagcct

SEQ ID NO: 528286 - DNA, 100 bp, Homo sapiens
ccaggaggcagtaaattcttcagctgctcggacagatgaagctccccaaggagctgcaggttcaggagtccttgcaggctatggggagtagtgctgatag

SEQ ID NO: 528287 - DNA, 75 bp, Homo sapiens
gtgtgaagcggccaatggcacggaggcctgcgtgtttgatgaaatcctggaggccagtgatgggatcatggtggc

SEQ ID NO: 528288 - DNA, 75 bp, Homo sapiens
caataaccaggtgcttggcaaaatcgagcgggccattgctgttgaaggctggattctctttgtaactggagtcca

SEQ ID NO: 528289 - DNA, 101 bp, Homo sapiens
caactggcagaaggattgctttctcattatttgccagatctgcagagatcaaaacaagccctccaggaactcacgaataagtttgtggagtttgacatgaa

SEQ ID NO: 528290 - DNA, 82 bp, Homo sapiens
ggggccggcggcggcgcgcggactccgcatcccgcaccccgatggtagccgaggagctgtaagactttgaccccgacgcagg

SEQ ID NO: 528291 - DNA, 50 bp, Homo sapiens
acgacggccgctgcctaagctggaaagatgtgaaatggtctgacttcggg

SEQ ID NO: 528292 - DNA, 95 bp, Homo sapiens
gtctagttggcttgtggggaaaagatacctctttgtacgtcagaagaaactgaggcagcacaagtgcatacaccttgatagcaccaaatataaac

SEQ ID NO: 528293 - DNA, 75 bp, Homo sapiens
ctggaagtggctgagtacctgaccccggtcctcaagcacgcactcctggctttaaagtttatacttgcatttgcc

SEQ ID NO: 528294 - DNA, 100 bp, Homo sapiens
tccattggatttaaaagacagtcctcgtcagcactgactttcagctatggaatcgagctgcagagagacaaggcggcggcggctgctgtgctgggtgcag

SEQ ID NO: 528295 - DNA, 78 bp, Homo sapiens
ggctgggctgcaggctctcggctgcagcgctggcgatgccctcctagctagccgtcacgggatggagggcttcatgga

SEQ ID NO: 528296 - DNA, 100 bp, Homo sapiens
catgggaatttccaaggggattcaaacttcaacagaatgtggcaaccagcccagtgagtgcaaaaacaaaacctttaggatcaagagatgttttgccaaa

SEQ ID NO: 528297 - DNA, 78 bp, Homo sapiens
tggttctggtgggaacccaggccttggcttgataataagcatacagtatttggacgagtgactaaaggaatggaagtt

SEQ ID NO: 528298 - DNA, 90 bp, Homo sapiens
aacctactacgcacagtgctaccgccacatgctggacttgcagaagcagctgggcagatgatgtctaccgtagaaaagcctcagaaagac

SEQ ID NO: 528299 - DNA, 101 bp, Homo sapiens
aagaaactgaggcatggaaatgttaaagtgctttagcctggattgcacagcagtcaccattactttaagtactgcaaaatctcagcattggctctgctgaa

SEQ ID NO: 528300 - DNA, 75 bp, Homo sapiens
agctctacgcctcctacgtttacctgtccatggaagcgcctcttggacgcgtgtgaccgatgcccagattgcacg

SEQ ID NO: 528301 - DNA, 74 bp, Homo sapiens
aatgatttatagctaagactccaggacacccctgaagccgagaaatggagtgcctgtgaagaaaacggggtatt

SEQ ID NO: 528302 - DNA, 98 bp, Homo sapiens
ttggtgctgtggctgatgcatttcatggctatcatctacacactcatcatattcagagcccccagatgttcagcagcagttgaaccactatcagtcag

SEQ ID NO: 528303 - DNA, 82 bp, Homo sapiens
aggactcggggcctcctcctgtccccaaagagacggtggactctttcctcgacctggccagttccagggtcacccccgagag

SEQ ID NO: 528304 - DNA, 74 bp, Homo sapiens
atgactcacacccctctgagatgagactgcacagctgggctgacgccctctccaccatccggctccctcacgtc

SEQ ID NO: 528305 - DNA, 101 bp, Homo sapiens
gctggccacttgcttgggatcctttatcctggtcatcttctatttccaaagaagagctaaagatggctgaatttctagatgaccaggaaactcgactgtgt

SEQ ID NO: 528306 - DNA, 75 bp, Homo sapiens
gtgatactgaaggggtcgtcactgtactggtatagcaatcaaatgaccgagacatgggtgcccggcaccgcgccc

SEQ ID NO: 528307 - DNA, 75 bp, Homo sapiens
aaaaagacctttagaagatggaggtgtgatgaatgcagactctgctaccattttggctgtttggatcctcctttg

SEQ ID NO: 528308 - DNA, 82 bp, Homo sapiens
gtcgtcttctgtccaagttggtcgcttccctgcgccaaagaactcccccactggaaaggattctgaaagaaatgaagtcagc

SEQ ID NO: 528309 - DNA, 100 bp, Homo sapiens
cgctcggccgccttctaccaggagcctgatccgtgccgcccgccgcccggatgggaccaccagagtgctatatttggatttgacctgcattttggaattt

SEQ ID NO: 528310 - DNA, 100 bp, Homo sapiens
ctgatggcagttagcacactggtggaaggtcggattgtttgtgctgaacgaactgtcctcttgcttcagaagccccttttgagtgtggtctctggtgcaa

SEQ ID NO: 528311 - DNA, 100 bp, Homo sapiens
gccggcaaggccatctgggtcacgggctggggacacacccagtatggagacttcccaagtaagaagcggaagaggagccgctggaaccaagacacaatgg

SEQ ID NO: 528312 - DNA, 82 bp, Homo sapiens
cgggacggcggcggacctgtcgcgatgtcagggctgcgcctctctgcagcagcatggcggacaccgacctgttcatggaatg

SEQ ID NO: 528313 - DNA, 100 bp, Homo sapiens
gaagattgagctgctgatgtcagttaactctgagaagtcgtcctcttcagaaagaatccaactcaagtcggaacagctcttcaggttttctataatcttg

SEQ ID NO: 528314 - DNA, 73 bp, Homo sapiens
tgcgcctgccctggttagcaaggaaagatcctacaggaatggatcctgatgatatttggcagctgtcctccag

SEQ ID NO: 528315 - DNA, 77 bp, Homo sapiens
tatgatgtcaaggataagtctcatgacaccgacccagatgatgtggtaccagttggccaaagaagagcctggtgttg

SEQ ID NO: 528316 - DNA, 82 bp, Homo sapiens
gggagtgttcgttgtgccagcgactaaaaagagtttggtgccctggttgtcagatgttggaaagcagtaggacggaacatac

SEQ ID NO: 528317 - DNA, 83 bp, Homo sapiens
gcggattcgtcgctttcacggccatcgagccgaacctctcgcaaaaatacactttcgggaaatggcctctaaatcctggctga

SEQ ID NO: 528318 - DNA, 50 bp, Homo sapiens
gccgtcaccctcaactttcccttcagagacctgtcggccatggagcctaa

SEQ ID NO: 528319 - DNA, 95 bp, Homo sapiens
agcatgtcgaccccggcccggaggaggctcatgcgggatttcaagcgaccatggtgaatccgggcagcagctcgcagccgcccccggtgacggcc

SEQ ID NO: 528320 - DNA, 100 bp, Homo sapiens
cagaggccgaactcgggttctgacaagatggccgggctgccccgcaggatcatcaagaagctgcagttcatcatctgctgtgatagttccacaaccagag

SEQ ID NO: 528321 - DNA, 89 bp, Homo sapiens
atcagtcacgaggctcccttgacaggcggctttgcatcggaaatcagctctacagttcagggtctcactctgtcacctaggctggagtg

SEQ ID NO: 528322 - DNA, 82 bp, Homo sapiens
attatcccctccgacctcctaaaatgaaattcattacagaaatctggcacccaaatgcaggggaaatgctgtctgtagctga

SEQ ID NO: 528323 - DNA, 101 bp, Homo sapiens
cctgtgtttctccattctgttggttttatgcatctttatccaatcaagtgcccttggacaaagcctgaaaccagcttccttcaaaatgtctactgttcacg

SEQ ID NO: 528324 - DNA, 100 bp, Homo sapiens
gggcgcagcgcctgtgtcgcctctccgtgtggatctggcagtcggtcatccacctgctgcagatggggcaggtgtggagacctcccagtgccaagtgtat

SEQ ID NO: 528325 - DNA, 127 bp, Homo sapiens
gtttggggcatctccgcggtccggcccggggccccgggatctcggctgtccttcctcccgattgataggcagcagtttgaagaaacagttcgaactctaaataacctttatgcagaagcagagaagc

SEQ ID NO: 528326 - DNA, 83 bp, Homo sapiens
gggcagacgctgtgctcgctggcaccccgaacgggttgcttcccccgctgcgagaaggatatggccctgaagccacatgagcg

SEQ ID NO: 528327 - DNA, 83 bp, Homo sapiens
agcacctcatcccctggatgggggaccacaagatcctcatcgacaggtccaaccgtgactgccagatcgaccagcaccaccgg

SEQ ID NO: 528328 - DNA, 75 bp, Homo sapiens
ctggactgttctccccatggaagttcttcaaggttaaacccatccagagtaatggctgcggccttacccaggacc

SEQ ID NO: 528329 - DNA, 75 bp, Homo sapiens
ctcttcctcctcctcccgcgacgaggagctatctataagcagcctatgtgattgaggatagagcagcaggaggaa

SEQ ID NO: 528330 - DNA, 82 bp, Homo sapiens
gcctcccgggctccgggaaaactacactggccaggtgtgggcaagagcagtttactgttgcgttttgcagacaacactttct

SEQ ID NO: 528331 - DNA, 88 bp, Homo sapiens
gcggccgagctgcggcagagcgtgtctgaggtggtgcgcggctccgtgctcctggtcgcccggctcatggagatgggattttccagag

SEQ ID NO: 528332 - DNA, 87 bp, Homo sapiens
actcacagctgatgacctgctgctcgtgctgatctcagcactttcatttggacccgtggatacccattgaacagatgcttgaaacct

SEQ ID NO: 528333 - DNA, 51 bp, Homo sapiens
ggctgagcagctgcaaacccccgaaaaagtcagtgaaaggggatggaggga

SEQ ID NO: 528334 - DNA, 75 bp, Homo sapiens
cggcgagtccgcgacggtcgccgcccacggcgaggtaaatgaaattgcctttataaatacccttgaagcccagaa

SEQ ID NO: 528335 - DNA, 101 bp, Homo sapiens
gcctggtcaatttgtacctgcaggcctcctacacctacctctctctgggtcaaagaattgactgtagatccaactgctgctggtgatgttcgtccaataat

SEQ ID NO: 528336 - DNA, 83 bp, Homo sapiens
cgggccatacccaataaccaggtgcttggcaaaatcgagcgggccattggtgcgcgcggagccatggttatcatgtcggagtt

SEQ ID NO: 528337 - DNA, 100 bp, Homo sapiens
tgtctgcagcccagacactgagagccgctttcatcaaggccaggagtggtggctcacacctgtaatcccagctctgggaggccaaggccagtggattgct

SEQ ID NO: 528338 - DNA, 138 bp, Homo sapiens
tggggagccttgcaagggtgaagtgcttcgggtccagaccaaacatttccacatcaagtgtttcacctgcaaaggttcgtcacaaggcatcgcagaaggtttatgctatgaagcttcttagtaagtttgaaatgataa

SEQ ID NO: 528339 - DNA, 82 bp, Homo sapiens
tggccgcagccgctctggggcaggttttccaacctattggtggtatgtctgacagtggatcacaacttggttcaatgggtag

SEQ ID NO: 528340 - DNA, 100 bp, Homo sapiens
cccgcaggagaacgagtccctcttcactttcctcggcaagaaatgtgtggagatacaactcgtcaacgaatcaaattcagtgatgacagagtatgcaaga

SEQ ID NO: 528341 - DNA, 90 bp, Homo sapiens
tgtgatgttggagaactacagcaacctgatctcattggagttcttcatatattaaggattcattcattcatagactcatttattgaaggc

SEQ ID NO: 528342 - DNA, 100 bp, Homo sapiens
ctccagatgcagagagaggctgcgttcagactggggcactgccatcccctccgcatcatggggtctgtggaccaagaatcatggtgtcatggaaagggat

SEQ ID NO: 528343 - DNA, 101 bp, Homo sapiens
cactgtctctccgacgcaagactgtcccggcccggagctgtaggtaaaacttgcctactgatcagttacacaaccaatgcatttcctggagaatatatccc

SEQ ID NO: 528344 - DNA, 85 bp, Homo sapiens
actttgggaggctgaggcgggcggatcacgagtataagaatacattgtagctcgacattttggcaccagcccctaaagcattccc

SEQ ID NO: 528345 - DNA, 75 bp, Homo sapiens
cggaccccgcgtgcgccttgctcgcccgcagccccgagaccgcagctgtcgcctggttgggcccggaaatgggac

SEQ ID NO: 528346 - DNA, 74 bp, Homo sapiens
cctggtcggcgcgtggctcaagctaggtgaatatgcaggttttgatgagacgcagccaacagctgaatctggtg

SEQ ID NO: 528347 - DNA, 74 bp, Homo sapiens
cggagcgggagtgttcgttgtgccagcgactaaaaagaggttcgagaacttgtcttggacaattgcaaatcaaa

SEQ ID NO: 528348 - DNA, 100 bp, Homo sapiens
tgaaagcatttatcaatggaaggaaactttttggtacccctttttatccactcattggcagagaagcttctccggagtagagatgaagagagaatttcta

SEQ ID NO: 528349 - DNA, 96 bp, Homo sapiens
ctgcggagtggtagcgcgcacggcctgcgggtgagcatgggtttatgcgtcttaggcattattgtgatggcgagcaccaattctctgatgtggacc

SEQ ID NO: 528350 - DNA, 88 bp, Homo sapiens
gctgcacccacgaatctgcccacccctcctgtaacccagcctgtttcacttcttgtacgtttcaggagacggcagcgaggctaccttg

SEQ ID NO: 528351 - DNA, 100 bp, Homo sapiens
agcgaacctcacctttccagggcgcaagggccttcatcccagaataatcactgaaggatttgaagctgtgaaggaaaagcccttcattttttggaagaag

SEQ ID NO: 528352 - DNA, 100 bp, Homo sapiens
caacccggtgttcgacgtgacggcctccgaggagctgggagctgcctcagccgccccccttgctgtcgccgcagaatgcccctcacgtcgccctgggccc

SEQ ID NO: 528353 - DNA, 50 bp, Homo sapiens
atggtaacagcgtcccacaatcctgagatattaaggctaagacatactgc

SEQ ID NO: 528354 - DNA, 101 bp, Homo sapiens
tgagaacttgatcagtttgtgtcagccaccttgttctctaaaggacttgtttacactgggcatgtaaacgaaaccatggtcaggtggtctcttacctgtta

SEQ ID NO: 528355 - DNA, 99 bp, Homo sapiens
cgggaagaacctcatcgctgcgacgaaaatggaagcatcagttcacagcagtaatgcacactgtacagataagacaattgaagctgctgaagccctgct

SEQ ID NO: 528356 - DNA, 75 bp, Homo sapiens
ttaacgtgctgtgacaccagaggtctacatgttcaagtgcgtgtggcggtgctacagattgatcaagtgcatgaa

SEQ ID NO: 528357 - DNA, 100 bp, Homo sapiens
gaaagacaaagacccagtgaacaaatccgggggcaaggccaaaaagaaggattatatctgtccaagatgcgagtctggttttatcgaggagcttccggaa

SEQ ID NO: 528358 - DNA, 90 bp, Homo sapiens
gtcttccatgacaccaagttggatgccatgctggaggagttcaagaagggtgcaagtgaaagtgtaggaaaacatatgcttgaagcgtgc

SEQ ID NO: 528359 - DNA, 100 bp, Homo sapiens
gcctgtgtccctgaccatggctccctgcagtaccctttaacgaccgaccaagaccatcactatgaccgatggagactatgattatctgatcaaactcctg

SEQ ID NO: 528360 - DNA, 75 bp, Homo sapiens
agagccctacaatgtgaagatacataagatcgtagccagacccccagacgcaaacatgcagatctttgtgaagac

SEQ ID NO: 528361 - DNA, 100 bp, Homo sapiens
gctgaacctggtgttttagaggataccttggtcccagagtcatcatgaaggggtagaaatatttctgtcatggctcattcaaagactaggaccaatgatg

SEQ ID NO: 528362 - DNA, 73 bp, Homo sapiens
ctatgtccagcctatttgcacaccatccaggagtcagtttattactggaaaccctggtattgatgtcaccaca

SEQ ID NO: 528363 - DNA, 101 bp, Homo sapiens
gagggattcgtggtgaaggtccggggcttgccctggtcttgctcggccgatgaagtgcagaggtttttttctgagactttagaagacagctttccatcgac

SEQ ID NO: 528364 - DNA, 100 bp, Homo sapiens
gtcaacttctctgcagaggagatcagatcccaattttgttcgtacttttcttaccacatatcgttcattttgtaaaccacaggaattgctgagcttactg

SEQ ID NO: 528365 - DNA, 138 bp, Homo sapiens
aggatttaactatcagaatgaagatgaaaaagtcaccttgtctttccctagtactctgcaaacagattcgccatgaagtcagcgtaaataatgtaacacataaactgtgcagtaaccattgctttaataagtacagat

SEQ ID NO: 528366 - DNA, 82 bp, Homo sapiens
acttcaaagagccggatcgcaggctccctgcctactcccccaccggggatttcagttggaatcgaagcctcttaaaatggca

SEQ ID NO: 528367 - DNA, 97 bp, Homo sapiens
gcctgccaggcgctcgggggccgaactggccctggactacctctgcagctacgagttccagggagctctgtcctggtgaccgtgcccgggttatgac

SEQ ID NO: 528368 - DNA, 100 bp, Homo sapiens
agactgttatgtctttcagaatacggtaattaataatgcttgtgctactcaagccatagtgagtgtgttactgaactgtacccaccaggatgtccattta

SEQ ID NO: 528369 - DNA, 75 bp, Homo sapiens
cggcaagtaacatgactaaaaagaagcgggagaatctgggcgtcgctctagaggttcgtgaaactcaagctttga

SEQ ID NO: 528370 - DNA, 100 bp, Homo sapiens
gcctggaacagggatcgtactcgtcctgcaggatatggtcccccctaagaagcacctgctccgacaccagcctgccaacgcacagattggcctgatggag

SEQ ID NO: 528371 - DNA, 100 bp, Homo sapiens
aacagagaaagataggcggccatggtccaaccttgaagatggatggtgacagttctacaacagatgcttctcaactaggaatctctgcagactatattgg

SEQ ID NO: 528372 - DNA, 50 bp, Homo sapiens
gacagaatcaccagcactggctgaaggttactataacaacagtaccaagg

SEQ ID NO: 528373 - DNA, 83 bp, Homo sapiens
gtccgaggcccagagatgaccccttatgaaggtccggcctctttggcctacccccgttggctccgctgccccaggtcgatgag

SEQ ID NO: 528374 - DNA, 100 bp, Homo sapiens
ggcaggacactgcctggaacgcctggagcgcctcccactgcagacgtctgtccgcctccagccgctctcctctgacgccctggcaggtgcccggcccgcc

SEQ ID NO: 528375 - DNA, 75 bp, Homo sapiens
atgtgggggccgacacgactaccaacctgtgtaagtggcatttgcaagtaaaatcactggcatgttgttggaatt

SEQ ID NO: 528376 - DNA, 75 bp, Homo sapiens
agaggctggataccaaatagcagtggaaaccgtattcaaaggtggaaaggcatcctgtgactgcattggagaaaa

SEQ ID NO: 528377 - DNA, 75 bp, Homo sapiens
gactctgtgtgagggaaagaaaacaatttctcctgctctgcagcttctgttcagcatgtagagcgcatgaagtac

SEQ ID NO: 528378 - DNA, 100 bp, Homo sapiens
ggtgtctttagtgcttggattggtgggatgtttcggaatgggcattgtcgccaattttcagattcttaatgcttttcggactcctgatggcatgcctgta

SEQ ID NO: 528379 - DNA, 90 bp, Homo sapiens
cttgtaaccattttaaacaaagccgtctgtagaggatcctttccccattgaaatggtgttcacactggccctgaatcaagggaacaccag

SEQ ID NO: 528380 - DNA, 75 bp, Homo sapiens
ccagacccggacgacccccattgctgagccagcggagctgcttggctggagtgtgatggcgccatctcagccggc

SEQ ID NO: 528381 - DNA, 82 bp, Homo sapiens
gcagagggagatcgctgaccttggagagcaaaacagagcgtgacactcccaatcatctgcatgctggaaatgaggaaatggt

SEQ ID NO: 528382 - DNA, 75 bp, Homo sapiens
gccgagatgacttcagggtcttgaccgcgatagaagcagatttgggatatcctggaggtaaagcaagaattattc

SEQ ID NO: 528383 - DNA, 137 bp, Homo sapiens
acagggtccgggacagggatgtctacctggtaatagaggacttgaagcagaaagcaagtgaatacgagtcagaagttgcaggaagaggcagaggaagaggaagaggaagaggacgtggccgtggcagaggaagaggg

SEQ ID NO: 528384 - DNA, 100 bp, Homo sapiens
tcagaacagagcagaaatcaaattgaagagagcagttgaagaagtgaagaaattattggtacctgcaatgttttactgtgcctggctaactatagtcgag

SEQ ID NO: 528385 - DNA, 101 bp, Homo sapiens
gaaattccagtgactagtaatggagaagttgatgactctcgtgaacatagctttaatagggtaattatgaggaattagaaaactcaggagatacaactgtg

SEQ ID NO: 528386 - DNA, 51 bp, Homo sapiens
ctggaactggaaccacagaggatacagagtccttcagtgaatctacagacc

SEQ ID NO: 528387 - DNA, 75 bp, Homo sapiens
gtgccgcctccctccggaggtgcgcggaggcttggtgtgccaggtcagcccaaggccaaccccactgtcactctg

SEQ ID NO: 528388 - DNA, 90 bp, Homo sapiens
ggactgcagtacacaatcaaggacacagtggcctggctcaaaatggacaagaaggactactgttcgaagatttttggaagaatactgaga

SEQ ID NO: 528389 - DNA, 100 bp, Homo sapiens
cgagagctgggccccatatgctgcttgcccagcttgggaaagaggaggctgctgcaaaggaccgatcggcggttgatggtggcatcacccttgagaagga

SEQ ID NO: 528390 - DNA, 80 bp, Homo sapiens
gggaaacctgggggctccctggacaactccgagcagacctgcctagagctggaacgttacctccagagcgagccctgcta

SEQ ID NO: 528391 - DNA, 104 bp, Homo sapiens
gacccaagtgccaagttatttactttcccatcaggtttcctgatgtgagcaggtaatgagaggccctaagatcccagaggatgccataagaggaaaagtcaggg

SEQ ID NO: 528392 - DNA, 100 bp, Homo sapiens
cgcctcaacgcctccctctcctgcctcaggaatgtccacatgtcagttttccaaagaaattagaccattttcttcgtgagaaagaaatcgacgtgctgtt

SEQ ID NO: 528393 - DNA, 73 bp, Homo sapiens
ttgctccgctaaaattacagatggaattcaaggcagtgcagcaggtttattcactggatctctgaatacccag

SEQ ID NO: 528394 - DNA, 75 bp, Homo sapiens
catgctgcgcggccttcccatcaccatcacagagagcgatgtggcccacaaactctttaacaacttgaaataaat

SEQ ID NO: 528395 - DNA, 75 bp, Homo sapiens
aaatactctctgcccagcaagttcagtgactttttacttgatccatacaagtaagtacaaggtggactgtgcatg

SEQ ID NO: 528396 - DNA, 100 bp, Homo sapiens
tgtgcaatcctcacattcaagctgataggctgcgctaccggaatgtcatccagcgagtgattagggtgtccggtggagagctgtttgaccggatagtgga

SEQ ID NO: 528397 - DNA, 75 bp, Homo sapiens
agggtccctgaagagggaagacacgcggaaacagggtcccagtcctatgaggatatgagaggaatcctgtatgca

SEQ ID NO: 528398 - DNA, 96 bp, Homo sapiens
agccgaggaggagctggatgccgaagtcctggaggtgttccacccgacgcatgagtggcaggcccttcagccagaaaaccagtctatccaagacca

SEQ ID NO: 528399 - DNA, 100 bp, Homo sapiens
cagacctgccaatttaccagagataattgataacaccctgtaacagctgaaatgttatggaacagttcaatcctgggctgcgaaatttaataaacctggg

SEQ ID NO: 528400 - DNA, 75 bp, Homo sapiens
actgtgcagagatcagagtactaagagacaggaactgttgacattcagggatgtgaccatagaattctctctgga

SEQ ID NO: 528401 - DNA, 80 bp, Homo sapiens
gagctttattaccagacatgatctttcagacatatctgaagagatggattaagaatgctttggattaaggattgtggagc

SEQ ID NO: 528402 - DNA, 74 bp, Homo sapiens
tatgccctgttggttccaatgctgggattggctgcttttcgtgcccagcctggagaaggttctggagttcaaag

SEQ ID NO: 528403 - DNA, 101 bp, Homo sapiens
agacgacagttcaaacaaagaggccgcggaggagaagccggaggaggacaacgactaccaccgcagcgacgagcaggtgatatccgacatccaaagcacgt

SEQ ID NO: 528404 - DNA, 98 bp, Homo sapiens
acagatgcacgcccaagaatcttgattacaagagagacttgttttgcctcagtgttgaagccattgaaagcaagaagccaccgcagagcaagagaaca

SEQ ID NO: 528405 - DNA, 90 bp, Homo sapiens
ggcctccccttggattcagacgccgattcgcccaggtcagccaagatgggaagtcgctccttgacaagctccagcggcccttgactcccg

SEQ ID NO: 528406 - DNA, 100 bp, Homo sapiens
cgctactcctggcagtgcgtcaatcagagcgtcctgtgcggatcatccagcagctcgtcaacggcatcatcacgcccgccaccatccccagcctgggccc

SEQ ID NO: 528407 - DNA, 75 bp, Homo sapiens
aaactggagaagagcttcaactctgttcacctgcttgcaggtatatttgcttacttaaactaccatgttcctcga

SEQ ID NO: 528408 - DNA, 100 bp, Homo sapiens
ccagaagctggagatgatgctggagcagaagttagcgcttctctctcgggacctaatacctatcattgctgctctggaatataatcagtggttcacaaaa

SEQ ID NO: 528409 - DNA, 120 bp, Homo sapiens
gcgggagcagccggaacgatgccggccgtgagcctcccgcccaaggagaatgcgctcttcaagcggatcttggttgctgcagcaactggtcacacagtagtgttggtagaccagacagag

SEQ ID NO: 528410 - DNA, 83 bp, Homo sapiens
gaataaagatggaaaaatttgtctttgacatcttccagtttgcaaattaagtgggcagaccaacatccacctcagcaaaaact

SEQ ID NO: 528411 - DNA, 100 bp, Homo sapiens
ggcgggttccctccctcggcaagatgccggagtgctgggatggggtcccgcagcccccggaagccaatagactccctcagggactctcggtccctcagct

SEQ ID NO: 528412 - DNA, 98 bp, Homo sapiens
acgaaatacagaggagtcatcctcacctgttagggataaaagaatcagagtgtctcaacccttgacaagaggaccaagtgcctttattccagagaagg

SEQ ID NO: 528413 - DNA, 71 bp, Homo sapiens
cgccagcggagcgaacccgagagcgtggagcgggctgggccaggcacccaggcatgtggaatatgctcata

SEQ ID NO: 528414 - DNA, 100 bp, Homo sapiens
ggatatggcagtggacgtggatttggggatggctataatgggtatggaggaggacctggagaaggcaattctcaagttcaactactcagtgcaggaggag

SEQ ID NO: 528415 - DNA, 100 bp, Homo sapiens
gggccgacatcaagagctgcgagatccaacagagccaggactgtctccagtttggtcctcctgctgaaggggaagtggtccaagtgagatggacagacgg

SEQ ID NO: 528416 - DNA, 83 bp, Homo sapiens
gccggaggaggacaacgactaccaccgcagcgacgagcagctcaccatggatgatgatatcgccgcgctcgtcgtcgacaacg

SEQ ID NO: 528417 - DNA, 75 bp, Homo sapiens
cagaggacaagtggagcgctgagaagaggcggcctctcaagtccagcttggtgattacagtggcgagatcttgaa

SEQ ID NO: 528418 - DNA, 78 bp, Homo sapiens
ctcccgccaccgccggacttcaatgcccagtccccagctcgccagcgccaagtcctgtatctgccatgtctgtggcgt

SEQ ID NO: 528419 - DNA, 95 bp, Homo sapiens
ttcgggcgagaggaggcgagaggcgcaaagatgccatggacaatattaccaggcagaaccaattctacgatacccaagtcatcaaacaagaaaac

SEQ ID NO: 528420 - DNA, 82 bp, Homo sapiens
ctgcgggttagggggccggcgcccgcggttcagacaatgcagatcttcgtgaagactctgactggtaagaccatcaccctcg

SEQ ID NO: 528421 - DNA, 82 bp, Homo sapiens
cctaccatgtcagccttcccagtagctgggaccacagtggctatctccacgtccactgtcctgctgtgtgggctgagcgctg

SEQ ID NO: 528422 - DNA, 75 bp, Homo sapiens
gccccagccttgggggagaagcactgctgcctatgcactccatttacagttgttttgcagccaggtccatcattt

SEQ ID NO: 528423 - DNA, 100 bp, Homo sapiens
gtggaggaggcgccggaccgggggggaagcaatgcctgtgtgcccaggccatgcagcctgctgtgcctgcccaaggccaacaacagtagaagctgcaggt

SEQ ID NO: 528424 - DNA, 101 bp, Homo sapiens
gccaagggtggcggtgaggactttgaagacacatatggggagttggaattcaagaatgatgaaactgtgtataatacttctccacgtctgcttcaggaaga

SEQ ID NO: 528425 - DNA, 100 bp, Homo sapiens
gaaaaggattgaactggatgacagtgccggtggtggtgtgcacattgagccccggtatagacagttcccccagctgaccagatcccaggtgttccagagc

SEQ ID NO: 528426 - DNA, 74 bp, Homo sapiens
tgatcatcctcactggacgccacaggggcaaggagccaagttacaccctgtttaaccctgccttcaaagggacg

SEQ ID NO: 528427 - DNA, 98 bp, Homo sapiens
cgcgttcgagttctcggaggggagggggcgttagccccgcgcagccgccggcgtcgccgccatggacctagtcgagtaatcctgcctgtgtctgtaga

SEQ ID NO: 528428 - DNA, 80 bp, Homo sapiens
cttggaccagacactcgacctcctgacttttggaaagaacaaacagtggatttgaagaatcagattctggtgctactaag

SEQ ID NO: 528429 - DNA, 76 bp, Homo sapiens
gaaagattgggcaagagaagaattcagaagaaacaaaagtgccaccgaagaggaggagatgttaaagtaacccatc

SEQ ID NO: 528430 - DNA, 82 bp, Homo sapiens
gagatattgatctgaaaagaggctttggttttgtggtaaactgtcttgagccccaccctcacctgcctgtgctggcaaccag

SEQ ID NO: 528431 - DNA, 100 bp, Homo sapiens
gtgaatgcatttaaagaactagtacgcaaataccctcagagtccacgagcaagatatgggaaggcgcaggactgccattttcattaagaactgccactta

SEQ ID NO: 528432 - DNA, 51 bp, Homo sapiens
gttttatctagccacatcttggaggcaaaatttggtttctctaatattact

SEQ ID NO: 528433 - DNA, 100 bp, Homo sapiens
taaagtccagagacagagcactaattagggagaaactgcctacatccgggttaaagttgatgggcccagaagtccaagttatggaagatctcgatctcga

SEQ ID NO: 528434 - DNA, 100 bp, Homo sapiens
ggggagccggccttggacacggtgcatcatttctggcatggcttcaggaagcattgtgctattttacaacgactttaaccggtggcatcatgaataccaa

SEQ ID NO: 528435 - DNA, 100 bp, Homo sapiens
cattcagcaaagtagagttccccatggtagaatgttacctaaccaaactcctgcaaaaccacaccacctatgcctgtgatggggactatttgaatctaca

SEQ ID NO: 528436 - DNA, 82 bp, Homo sapiens
cacagtgctcaccacccaccaccactgggtcggcactcttcaccctcccgagccctgcccgtctcggccccatgcccccacc

SEQ ID NO: 528437 - DNA, 100 bp, Homo sapiens
ctgaagtcggtgtctgctgcgttcacggcaggattcggttaggagcccatcatggcgacgccccctaagcggcgggcggtggaggccacgggggagaaag

SEQ ID NO: 528438 - DNA, 90 bp, Homo sapiens
gcccgggaactgctgacgcttgatgagaaggacccacggcgtctgttcgaagtgagtgatagttgcttcaggaatcttgcagaagaccgc

SEQ ID NO: 528439 - DNA, 100 bp, Homo sapiens
cttacggcagctgagcggtgggagatggtgacaaatatcccatggaaagtgataattcatttgatctgtttgattcctcccaggcagtgacaccaaaatc

SEQ ID NO: 528440 - DNA, 75 bp, Homo sapiens
ggaacacttcagtgcattcaaggtggtatgcataattggttgtgcagtttctcttatattcctcacatatgtgct

SEQ ID NO: 528441 - DNA, 51 bp, Homo sapiens
caacctgacaattctgtcgtgtcccgacttaattcagtgcacaaatgagat

SEQ ID NO: 528442 - DNA, 50 bp, Homo sapiens
attagaggaaggagaggggccaataggaattagaaggtgacgaggaggga

SEQ ID NO: 528443 - DNA, 100 bp, Homo sapiens
agaagaaaacaagggaggagaagacaagctaaaaatgattcgggaatatcggcaaatggttggatggcaagcatgtggtgtttggcaaagtgaaagaagg

SEQ ID NO: 528444 - DNA, 96 bp, Homo sapiens
ctccatcccttccgaggcccgacttcggtcctctcagggtgcgccatcattgtccgaggtcagcctcgtggtgggcctcctcctgagcggcagatc

SEQ ID NO: 528445 - DNA, 82 bp, Homo sapiens
tcggccgcgcggactgaaggagactgaaggcagcggaggaggagaaagagatggacctcccggactcggcctcgagggtctt

SEQ ID NO: 528446 - DNA, 125 bp, Homo sapiens
cctgccgtctgctcttctgcctcttgatctccgccaccgtcttcaggccaggtgctggagaatctggtaaaagcaccattgtgaagcagatgaggatcctgcatgttaatgggtttaatggagag

SEQ ID NO: 528447 - DNA, 105 bp, Homo sapiens
tgagaccacatccatggtttctatgcccctctatgcagtcatgtatcctgtgtttaatgagatggactagaggcttttaccagatttcttaaaactgaattcagt

SEQ ID NO: 528448 - DNA, 82 bp, Homo sapiens
tccccaacaagaggaaagacacacctaccaagaagccagtcaagcggccagcctcctgcccgaaggccacctgaacctaacg

SEQ ID NO: 528449 - DNA, 94 bp, Homo sapiens
gcgggacagagcgcctgcgaccccagtcggtgctccggggaggtcacctgacgaggagggtgataaaagaaaatgtggctgaagttacccgaag

SEQ ID NO: 528450 - DNA, 90 bp, Homo sapiens
aagcactggaaccgcttccgagacgaagcggggagaggtggtgagagatgacccctgttgaggatttcattggtgtctgccacaggccgc

SEQ ID NO: 528451 - DNA, 73 bp, Homo sapiens
aaagttactcaagacagctttccagcccgtgcccaggcggaaatggtggaagcagcaggggaggatgagcggg

SEQ ID NO: 528452 - DNA, 73 bp, Homo sapiens
accctctacgaaggcggctacttcaagtgggccccatgctgattgagtttaacatgcctgtggacctggagct

SEQ ID NO: 528453 - DNA, 100 bp, Homo sapiens
cgccgcggctcttttctaaaagtccttgttgtcctcctggtgcgaagagctcggccgcctgctgctgctccgacatcagaagagccgccagagcgatccc

SEQ ID NO: 528454 - DNA, 101 bp, Homo sapiens
ctttgcagtcgacatactcggataccagcgctcagcccacctgtgattatgggcggcgactggcggcgcgatggacctgaccgggctcctgctggacgaag

SEQ ID NO: 528455 - DNA, 75 bp, Homo sapiens
gacgcatctgtctgaggagcggtcagtgacgcgatggagcgggcaaggtacttcctatttaacagacattgtgtg

SEQ ID NO: 528456 - DNA, 100 bp, Homo sapiens
ggaagtggaagtggtccccgaaggctatttcgccgctggcgtcaggactattttcacgttttaatgccgagagatgtgggcgctatctccaactgtcttt

SEQ ID NO: 528457 - DNA, 75 bp, Homo sapiens
gacaaattatgctgcagcatattgtactggcctgctgctggcccgcagggccacctacatttacatgaaggccgc

SEQ ID NO: 528458 - DNA, 98 bp, Homo sapiens
cggctcctccagctaccggcccaaggccatctacctggacatcgatggacgcattcagaaggtacaccaggggttggaaaaaccacactaggcaaaga

SEQ ID NO: 528459 - DNA, 75 bp, Homo sapiens
gagcccattttagaggcatctgttctatcttcccatcataaaaaatttcagaagctatctcctgagcagtgtgta

SEQ ID NO: 528460 - DNA, 96 bp, Homo sapiens
attcgatccgtggcctccttctccatctacagtgaagtacatgcgagaagccacgccctatgtgaagaaaggatccccagtatccgagattgggtg

SEQ ID NO: 528461 - DNA, 88 bp, Homo sapiens
cacctgagaaccatgctcaccgaccctgttatcaatactctggctgaccatcatcatcgtgggactgactttggtggaagtccttggt

SEQ ID NO: 528462 - DNA, 100 bp, Homo sapiens
cattgacactatatctccattgaatcagaagttccttcctgtgtacagcccttctgaggaggagaagaggaaccccgcgctgtatgccagcaacgtgcgg

SEQ ID NO: 528463 - DNA, 83 bp, Homo sapiens
aagaaggataattaattacacaaacccttcacagactgctctgacaatgcagatcttcgtgaagactctgactggtaagacca

SEQ ID NO: 528464 - DNA, 100 bp, Homo sapiens
tagatgttaaggacatctgcaaatctttcaccaatgctgagtatgagtttatcagctctggtctctacctagtggtgttattgcacttgtgcgaacaaag

SEQ ID NO: 528465 - DNA, 100 bp, Homo sapiens
actgccaaatagcagaagaataccatgaggtcaaaaaggaaatcaccctgcttgagcaaaggaaggcgccaatgcttcggcattagagaaagagattggt

SEQ ID NO: 528466 - DNA, 75 bp, Homo sapiens
cggggctgctggtgggccgcgtcgaagacatggaccagggctacggaggaataagacgagttggaagaagacctg

SEQ ID NO: 528467 - DNA, 75 bp, Homo sapiens
gtggccactgtggccttctgcgacgcgcagtccacgcaggagatccatgagaagatcaggatcctcatgaccagc

SEQ ID NO: 528468 - DNA, 75 bp, Homo sapiens
cagagatggcattacgaacctttggccacttgccctttttctctgagctggtggttctggctaacactgacaggg

SEQ ID NO: 528469 - DNA, 100 bp, Homo sapiens
cgctgccgccgccaccgccggggccgctgccgttgaggaggagacggaggagaccgacgttgttagtatctcaagattccaaaaccctgaaagtagatga

SEQ ID NO: 528470 - DNA, 80 bp, Homo sapiens
gacaagttcaaggccaagttcctgacagcctggaacaacgtcaagtacggttgggcccgaaggcatcctgcagaacgggg

SEQ ID NO: 528471 - DNA, 75 bp, Homo sapiens
gactgctttatgaccatattaatgcagatgaggcgttctttggcatgcatgtagggaataccggattcataaaga

SEQ ID NO: 528472 - DNA, 98 bp, Homo sapiens
aattcatgatttgttcctgtagctgaaacatacattgaatgaatctctaggactgcgtagtaaagtgctgaggaaaattgaagagctcaggaccaagg

SEQ ID NO: 528473 - DNA, 100 bp, Homo sapiens
aggacagctgttccttggccatcccaaagctattctgggggcaacagaggatgctcaagaattccttcgatgtttaatggatttgcttcatgaagaattg

SEQ ID NO: 528474 - DNA, 115 bp, Homo sapiens
attacactgtcaaaactttacaagttaattgaagagtcttgtccacagctggcaaattcagtgcagatcaggtgggggagtggtactaaggatcaagtatactgttaaaagaaaa

SEQ ID NO: 528475 - DNA, 82 bp, Homo sapiens
ccgctcccagcggccgcgattcggggaggtaggcgctgggccgaggagggtttccaggcctgaggtgcccgccctggcccca

SEQ ID NO: 528476 - DNA, 100 bp, Homo sapiens
cattaacggaccttttaccatgaatagttctactccttctacaggccccttcccagctgcctgcctgccctagccagctcccaggtgaagagactctcgg

SEQ ID NO: 528477 - DNA, 105 bp, Homo sapiens
cgggaccctccccttggaccgagccgatcgccgcggggcagttcgggccggctgtcctggcgcggcctttggaaatgcaaagacagctcataataacaattcaag

SEQ ID NO: 528478 - DNA, 75 bp, Homo sapiens
tgaaggccacattaaactcactgactacggcatgtgtaagaacattaaccaggtggtatttgttggaaatttctt

SEQ ID NO: 528479 - DNA, 120 bp, Homo sapiens
ggaactctttttgtcacgccagtatgaatctctgcccgcaacacatatcagggaagaaatgatttcccttggggatggagacatcaggaccatgtgcccccttctgtctatgaaacctgg

SEQ ID NO: 528480 - DNA, 75 bp, Homo sapiens
atcgacctggtggccttcttgggctacaaatatgtcgggacttaaccaccaccatgtcgagcaaaagaacaaaga

SEQ ID NO: 528481 - DNA, 83 bp, Homo sapiens
ctcaaaagagtccagattcaacaggctgccaataaaggagcaagatggctagggtatcctagaaggaaaacatcaccatggct

SEQ ID NO: 528482 - DNA, 100 bp, Homo sapiens
ggaatgtgcaaagtagcaattaactggtctggagggtggcatcatgcaaagaagcatacacatccctgtgatcatgagtctggctcaaagccaatttata

SEQ ID NO: 528483 - DNA, 82 bp, Homo sapiens
ctaatatttaagaaagaagatgttaactttcaggttcagaggatggcaagatccatgtctggaatggagagagcggtataaa

SEQ ID NO: 528484 - DNA, 75 bp, Homo sapiens
ttagcaaaggtgctaatccagtggaaatcaggagagatgaaacgactacaaagtgccatgacagaaggtggtgtg

SEQ ID NO: 528485 - DNA, 100 bp, Homo sapiens
aggcaggcatgattgtcactgatgattgctttcacaacaaaaatttaccatccaaacataaacagtaatggaagtatttgtctcgatattctgaggtcac

SEQ ID NO: 528486 - DNA, 75 bp, Homo sapiens
gggctgggtctcggagtgggagacgtggagtgcagctgtgtattcttattacaaccaaggcattttaccagagca

SEQ ID NO: 528487 - DNA, 98 bp, Homo sapiens
tgcggccgccgcggcattcggggaatctgcagggcagagctcgtccgcatggtgctgaatggctgaggaccttcccagtctccccagagtccgtgcct

SEQ ID NO: 528488 - DNA, 100 bp, Homo sapiens
acagcagcctccagcaaggcaaatttgacacaaaaggcatcgagagtactgacgaggcgaagatgtccttcctgcacccctgcagtggaccatgagtcgg

SEQ ID NO: 528489 - DNA, 74 bp, Homo sapiens
gtcgaggagaagtgtggtggcatcgtgggcatccagaccaagacggtgcagagagaaaaggaacagttccgtaa

SEQ ID NO: 528490 - DNA, 108 bp, Homo sapiens
gatgggcacactgtgggggtgtcctggtgcacccccagtgggtgctcacagctgcccattgcctaaagaagcagccagataagctggtggtggtatggacccgtcgga

SEQ ID NO: 528491 - DNA, 100 bp, Homo sapiens
ttttagaagaaaataagataaattcatcggtgaaattcgcttctggtaatactgtaggccatggaaatagcatctcaaaggaccaaggaagaacggtcta

SEQ ID NO: 528492 - DNA, 75 bp, Homo sapiens
ctcgatccagcaccatggggaagcgggacaatcgggtgagaatggatcttggagaatgtctgaaagtccatgacc

SEQ ID NO: 528493 - DNA, 100 bp, Homo sapiens
tcaggcctctggtatttctttctcttctgcttgcgcattaaagttttaacaggtatcagaatggcaaagcaacttaaccttccagaaaatacagatgatt

SEQ ID NO: 528494 - DNA, 73 bp, Homo sapiens
cctggtgctgatcctccagctgctgaccctctaaactggaccaggatcttaatgaagtcaaagctcgagtaga

SEQ ID NO: 528495 - DNA, 83 bp, Homo sapiens
attctggacttgccagccccacaatcataatgagccggcaggtggtccgctccagcaagttccgccacgtgtttggacagccg

SEQ ID NO: 528496 - DNA, 75 bp, Homo sapiens
gcggcctgacccagagccacttctcaccgagatgattcatgaaatataaagatgaagcgcagctgtataaagaag

SEQ ID NO: 528497 - DNA, 98 bp, Homo sapiens
aaccgcctcacccagcgcatcatccccaggtacatgtcccagagcaagcacacggaggcccgggagctcatgtactcgggagccctgctcttcttcag

SEQ ID NO: 528498 - DNA, 82 bp, Homo sapiens
tgcaatcacagacgtcacaaggtttttacaggctgaggttggtttcagcatgtatctgcttgatattggcggtggctttcct

SEQ ID NO: 528499 - DNA, 100 bp, Homo sapiens
gggccagctgacggagatggtgcagaagatggaggaggtgttcctgcatgaagccaccgtgcgcctgatggcaggagccagccccacccgcacccaccag

SEQ ID NO: 528500 - DNA, 100 bp, Homo sapiens
cgcagctggcagatattatcatagttgctgcaggaacctggcttctgtatttaccatgtacctggagcattggtttggcagctgaaccaggttgttttcc

SEQ ID NO: 528501 - DNA, 75 bp, Homo sapiens
ggaaaatctccccggtgactttcagctgctgacgacccagcgggtgagctgcgcccacatctacagtgccctaga

SEQ ID NO: 528502 - DNA, 100 bp, Homo sapiens
gttttgtttgtggatgccctgcccactactctcttaatgctgacaacaggacttgtagtggttctgccattactgcaatagccacatctgtgtgtcacgg

SEQ ID NO: 528503 - DNA, 83 bp, Homo sapiens
ctcctctagaagatttcacagcaatgctggactgcagtgactatgttctagggagacataagacatcagtcagtacatgtgag

SEQ ID NO: 528504 - DNA, 100 bp, Homo sapiens
gcaggattgctgtgtgaaaaccgagctgctgggagaaggccagaagcggactcctagaagaggggagcagcaaggatggaatgacagccgtgggccggag

SEQ ID NO: 528505 - DNA, 89 bp, Homo sapiens
ggatgctgcattccgtcaaggtcacaacagtgtctttctgatcaaggaaagaccacagcaagattctttcattcgtctcctcctagcct

SEQ ID NO: 528506 - DNA, 83 bp, Homo sapiens
ttcgacttggagtctttgtccaggacggttttaaaatcaaagatgggaaaatcggagaaaattgcccttccccatggccagct

SEQ ID NO: 528507 - DNA, 75 bp, Homo sapiens
ccggagttccgctcctgcgggcttagcaggaaagggtgcctaagggggatatgagactttctactcggaatatcc

SEQ ID NO: 528508 - DNA, 75 bp, Homo sapiens
gacagagtgaggtttctgcagacaatcaatgcctgtcaggcagttctgatgggacaattcgcctttggtcccttg

SEQ ID NO: 528509 - DNA, 97 bp, Homo sapiens
tgggggcaaggaggagaccccagggcagaggccagcattccctcccaggctgtccctcgccgccttgctacagcccccaagactgaaaaacctcccg

SEQ ID NO: 528510 - DNA, 75 bp, Homo sapiens
cggccgatgaagtgcagaggtttttttctgattgataatattgtcctgatgaaggactcagatacaggccgctct

SEQ ID NO: 528511 - DNA, 75 bp, Homo sapiens
tttccgatttaaagctgagctgcgaggaaaatggcggcgggagctgggcgccgtgtacacagaaggtgggttcgt

SEQ ID NO: 528512 - DNA, 75 bp, Homo sapiens
ccggcccccgacggctctgcagttaacgggaccagctctgcggagaaaatcatcagcgtgttagcattttctttg

SEQ ID NO: 528513 - DNA, 75 bp, Homo sapiens
gccggaactgcggcagtctctccctgccaggctcttcatccaaggatctaggggtgtttattcctgctcctatgg

SEQ ID NO: 528514 - DNA, 90 bp, Homo sapiens
tgtggcggcggcgcttacccccgagcggctcctggagtggcaggatatgggaaaatagtctccacaaaggcaattttggataagacaacg

SEQ ID NO: 528515 - DNA, 82 bp, Homo sapiens
agacagatccgggacatcatgcagggtttccaatacttatctacaggaatcgccatgaccccagctctgagggaggcaacag

SEQ ID NO: 528516 - DNA, 109 bp, Homo sapiens
gcccgttgggcactgggggacgcgggcgcgtcaggtgaagactgggggctgcaggcgcgctagacggcaccgaaagcgaaggaagctcctgctcctcctaaagccgaag

SEQ ID NO: 528517 - DNA, 100 bp, Homo sapiens
ccattctcaggaagagcttgaaaacttagagctttcacagacaacagagacgacatggcattggggcatgtgattgtgttgcttcagcaagagtggccac

SEQ ID NO: 528518 - DNA, 75 bp, Homo sapiens
acttgggaaggattctggtctgaaaccatttgaacagaaagctggtcaaaagtgcaagcctattgacgtgttcga

SEQ ID NO: 528519 - DNA, 146 bp, Homo sapiens
cgcagacaaaagacctcggggccggcctcgcaaggcgcttcccctttccagagagccagaaagaagtactccaaagattcaggtttactcacgtcatccagcagagaatggaaagtcaaatttcctgaattgctatgtgtctgggt

SEQ ID NO: 528520 - DNA, 96 bp, Homo sapiens
ttcgccagcccgtgccgcgagcgcggcctgcaggagaattcagtttgcctgttctgtatgcaagttccgtagctttgatgacgaagagatccagaa

SEQ ID NO: 528521 - DNA, 88 bp, Homo sapiens
acggtttcgtccgcatcgaggacttcatccagtttgctacggtctacggggcagagcagtttaaaaggatgcttaatcgggagctcac

SEQ ID NO: 528522 - DNA, 71 bp, Homo sapiens
caggagagctgcgccggcgagaagcggccgagccagcagcagccaaggctaagtcgaaatgtggcccaacc

SEQ ID NO: 528523 - DNA, 111 bp, Homo sapiens
ctgtggtggcaggctgggcacgaggaccatgctgggccggagcctccgagaagtgaaagtgggagatacattggatcttctcattggagaggataaagaagcaggaacaga

SEQ ID NO: 528524 - DNA, 74 bp, Homo sapiens
gtggtttttcggatcatgtctggtggctccgcggattataacaggaatgggtaccacagaccatgtcatcgtcc

SEQ ID NO: 528525 - DNA, 82 bp, Homo sapiens
agccctactgagcgtgctcccctctgagactggagtgagagggtcttctgacattccacttcttccatctattacatctctg

SEQ ID NO: 528526 - DNA, 75 bp, Homo sapiens
cggcgatgtgccaccgaggctgaggatgatggtagattgccaggttcgatacaagaggctgttttcctagcgtgg

SEQ ID NO: 528527 - DNA, 82 bp, Homo sapiens
aaacagtgatatcttcagcgaaagtgaaaccagggtgagaagccatttaaatgtgatcagtgcagttatgtggcctctaatc

SEQ ID NO: 528528 - DNA, 73 bp, Homo sapiens
ttatattcatctcaaaaacaaaattctgaactcaggacttggcaaatcagacactcctctaatttacaaagca

SEQ ID NO: 528529 - DNA, 75 bp, Homo sapiens
ctgggcgcagagagctccgcagaggcccagacagcacccaagaaaacctcatttggctcgctgaaggatgaagac

SEQ ID NO: 528530 - DNA, 107 bp, Homo sapiens
gacctgcctcctgttccgcttctcagaggacgccttcaacaccaccttcatctccaccatcggtgctggagaatctggtaaaagcaccattgtgaagcagatgagga

SEQ ID NO: 528531 - DNA, 75 bp, Homo sapiens
gcgaccgccctgcgcttcgtgcaccggggcggtccgttgccaaagccagggacaagaatccttcaagaaacagga

SEQ ID NO: 528532 - DNA, 82 bp, Homo sapiens
aaaagaggatgctggaggcacagctggagcggcgagctctgcagacttcccaagtaagaagcggaagaggagccgctggaac

SEQ ID NO: 528533 - DNA, 75 bp, Homo sapiens
tggagcatctccacccaggaacctcgccatccagaaggtgtacagcaagctgtgattcctgggaaaactaaaaaa

SEQ ID NO: 528534 - DNA, 98 bp, Homo sapiens
aaaaccaagaatgtgttcatagctcagaacgtggctagtcttcaagagcttgtaccaatattagcatgtggcaatgatgattgcagaattcacatatt

SEQ ID NO: 528535 - DNA, 74 bp, Homo sapiens
ccagacatacgatgggagagttgcagaattgaatgatctggcacgggaccctccagcacagtgttcagcaggtc

SEQ ID NO: 528536 - DNA, 115 bp, Homo sapiens
cgacaagctggggacgcgtcctcagacgcagcgtctagtccctggccatagctccgccgctgcccgcaatcatttggggaagaatctacagttgctgatggacagagtggatgaa

SEQ ID NO: 528537 - DNA, 90 bp, Homo sapiens
ctggtcttcaccaagaacttcgcagggcagctggtggaatttttgaagaaaatggaatctcgaggccccctttcgtgcgacacggttctg

SEQ ID NO: 528538 - DNA, 51 bp, Homo sapiens
cggacagccagcagcatcccagcccccaacaatggcaaccaagacatgtca

SEQ ID NO: 528539 - DNA, 99 bp, Homo sapiens
cttagctgtgctcgcgctactctctctttctggcctggaggctatccagcgtggagccttttgccagcttgaccgaggccgtgcggagctcagttcccc

SEQ ID NO: 528540 - DNA, 97 bp, Homo sapiens
atcaatacgattggaaccagcacaagtacaagtcacagtgctgtcgatatcaccaaggtggctagaagacatcgcatgtctccttttcctctgacat

SEQ ID NO: 528541 - DNA, 100 bp, Homo sapiens
ttaaagatgcatgctgatggcgataagtcattaccacagtggccagaacgtatttatcagagtccatatggagttactgctgtggatttttcaattggag

SEQ ID NO: 528542 - DNA, 101 bp, Homo sapiens
tttttcatgggccggctcccattgctccggcgcgttctcaagggcttgcagctggaaacttggatttaactggccagaagcaggtattcaaagcagagaac

SEQ ID NO: 528543 - DNA, 87 bp, Homo sapiens
tatgtccccacttcatatgtcgaagtctgtttggacaaaaatgccaaaggggcaccaccacgaggcgatttgtgggccataccaagg

SEQ ID NO: 528544 - DNA, 101 bp, Homo sapiens
ccacacccccggagccagaggaggagatcctgggatcagatgatgaggagcaagaggaccctgcggactactgcaaagtgagcatgtttttgaacacatta

SEQ ID NO: 528545 - DNA, 74 bp, Homo sapiens
gaaactggcggctgctggtagttccatgctgtctgttcagacttcagcttggtagcttactcacatagcatatt

SEQ ID NO: 528546 - DNA, 88 bp, Homo sapiens
cggactgcagccgcgagctcctggaggcggcgggatggaggcggcggccgctgataggaagatgtcttcaggaaatgctaaaattggg

SEQ ID NO: 528547 - DNA, 76 bp, Homo sapiens
ggcctgagagttgctattggaccatgtagaatgttgcaatattgtttacagggtctacatcaactattacgacatg

SEQ ID NO: 528548 - DNA, 51 bp, Homo sapiens
agattctaactccaatggcccaaaaccgtggggccaattttttaactcaga

SEQ ID NO: 528549 - DNA, 83 bp, Homo sapiens
cggcccggcccggcccggcccgccgagggccccagcgcaggagccgcgcccggacccaggacaatgcagatcttcgtgaagac

SEQ ID NO: 528550 - DNA, 106 bp, Homo sapiens
ggcccttcatggaacctgtgaagagaacagaagctccaggatattatgaagttataaggttccccatggcacctgtggaatcctctcaagaggaacagtcattgtg

SEQ ID NO: 528551 - DNA, 96 bp, Homo sapiens
cttacagacttccacaagcaagtcactaggaacattttagtggacaaaccaaatgaccaatcttcaagatggtcttcagagagcaactatcctccc

SEQ ID NO: 528552 - DNA, 82 bp, Homo sapiens
gaaagcaggaggaggtggcggcggcgggaagatgtcaaaatgcagatcttcgtgaaaacccttaccggcaagaccatcaccc

SEQ ID NO: 528553 - DNA, 99 bp, Homo sapiens
aaccaatcaaccaccttgtctggacagcagtcagcatgtatggctcccatggtgcattttaccgctataagaacagcatgggcaagagcctcccactct

SEQ ID NO: 528554 - DNA, 82 bp, Homo sapiens
gcgaggccctcatgtaccacacggtacaggtttgcagattccgccagcagcacagcaagctctacagatgagtggctctttg

SEQ ID NO: 528555 - DNA, 80 bp, Homo sapiens
ttggccacaggagacaacgttgaggtacagacagaataactgtgtagaatacattgaggatgatgaggagcacgtggaca

SEQ ID NO: 528556 - DNA, 100 bp, Homo sapiens
ggcggcggccacgccaaggacgggctgagtcatcactagagagtgggaagggcagcagcagcagagaatccaaaccctaaagctgatatcacaaagtacc

SEQ ID NO: 528557 - DNA, 75 bp, Homo sapiens
tctatggaagtcacaacagaggacacaagcaggacagatgtctcgctgtgtcgcccaggctgtaatgcagtggcg

SEQ ID NO: 528558 - DNA, 90 bp, Homo sapiens
attgggcaagagaagaattcagaagaaacaaaagtgccaccgaagagggacttcatctgcagcatcctcaccattaaaaaaagaacagcc

SEQ ID NO: 528559 - DNA, 96 bp, Homo sapiens
ctctgcccggcagaaacctgtcttcattgatatgaaccatggacaagtatattctgctgccacaaagactgtaaagtgcttcatttcaacagctga

SEQ ID NO: 528560 - DNA, 100 bp, Homo sapiens
cgggatcctctgctgcatagtttcggtcatctaaaggaggttttaaacagtataacaggtctgaaggggcgtctcgattacctgagctctctgaaggtga

SEQ ID NO: 528561 - DNA, 89 bp, Homo sapiens
aaggagccacaaagaagaaaacatttcttttaatttttaaacttggtttgaaagggttctgagcaaggttcaaccagtcaagaacaggc

SEQ ID NO: 528562 - DNA, 82 bp, Homo sapiens
gtcgccctcaaggccatgatcaaaacattggctctaccagtgcacctggacagggaggaatcctggctcagcgggagtttga

SEQ ID NO: 528563 - DNA, 75 bp, Homo sapiens
cctaccaggaggccaggggtgtcgccatggaagtcctccagaacttataccgcaccaagtcctttctgtttgtgg

SEQ ID NO: 528564 - DNA, 75 bp, Homo sapiens
accacagccaccccagcagaggccttatggatatgaccagatcgaacggttggaagtaagcagccttgcccaaac

SEQ ID NO: 528565 - DNA, 83 bp, Homo sapiens
gatggtctgggtggacctggaggaattcgaatttagagtttaatttctcagagcattctctccaggaagaatttttacagtat

SEQ ID NO: 528566 - DNA, 100 bp, Homo sapiens
accacaaccaccaccttcaagggagtcgaccccaacagcaggaatagctcccgttggaaatggaggatgaagatacaattgatgtgttccaacagcagac

SEQ ID NO: 528567 - DNA, 51 bp, Homo sapiens
aaattatggtgatgctgggggaaaatgggtttctatcttactaaaggatat

SEQ ID NO: 528568 - DNA, 97 bp, Homo sapiens
ctgggcttccacacaactccagtgctaactcaacagactatcttgctaatcatggccggttaaatgagtctgaagccaggcgaaaattctggcaaat

SEQ ID NO: 528569 - DNA, 121 bp, Homo sapiens
tcggagcccgagtccgcgggaagatggcggcgccgctcatccccctctcccagcagacaatgcagatcttcgtgaagactctgactggtaagaccatcaccctcgaggttgagcccagtga

SEQ ID NO: 528570 - DNA, 98 bp, Homo sapiens
tctgcgacctggggccctgggtgaagtgctccgtcgcccttgcctccagtgatttaaagggagtgatagtcactctgagtgatgatggtcacttgcag

SEQ ID NO: 528571 - DNA, 75 bp, Homo sapiens
agcaatctctgagaccaaggttaagaagagacatgttgaccctttcatggagacgagttgtactgctgtcacagg

SEQ ID NO: 528572 - DNA, 97 bp, Homo sapiens
aaagatctggcgatgacctacaaacagagatcttctggaaaaatcaagagtcactttccagctgaaggctgaaagaagctaccacatcttctaccag

SEQ ID NO: 528573 - DNA, 75 bp, Homo sapiens
gtggaatgcagttatatttggggaatgggtactgttcaaaaaggaatgccccacaagtgttaccatggcaaaact

SEQ ID NO: 528574 - DNA, 80 bp, Homo sapiens
ggtcgaacagttttttctaatggctattcaagccatcactggtgcaagctatatttaacggagatcctgatgaagttcga

SEQ ID NO: 528575 - DNA, 90 bp, Homo sapiens
tcaccaagctggaggtggacgccatcgtcaacgccgaccaagatcactccatggatgaaatgacagctgtggtgaaaattgaaaaaggag

SEQ ID NO: 528576 - DNA, 100 bp, Homo sapiens
ttcggccggcctgagccccagagtcagctcccctttctcgcccagcgcccccaggccgctcccggggctcacgctttacagaaaagaccatccccaatgt

SEQ ID NO: 528577 - DNA, 100 bp, Homo sapiens
agttgacacacctcatggtatatttgcagccagtactctatatgaacaatccgtctggatcacggatgtaggaagtgtgtctaatcatagtaatcttcca

SEQ ID NO: 528578 - DNA, 100 bp, Homo sapiens
ccaacatgatcttcattggtggtatcaactgccatcagggaaagccgttgcctatggtaacctgtgccgttgcactggatacaggcccataattgatgca

SEQ ID NO: 528579 - DNA, 75 bp, Homo sapiens
atccttatcagcacagcacttattccagaactgataaatttcaaacggaagagagtggcagcatttagaaagaat

SEQ ID NO: 528580 - DNA, 99 bp, Homo sapiens
ctgacaacgtggatcgttgttttgaaactttgaagaaaacaggtctgaaacaaggtcttacccccagctgcttctgaacacagtgactgccagatctcc

SEQ ID NO: 528581 - DNA, 98 bp, Homo sapiens
ccccattggcctcaaagctgttgtcggagagagccccgtctgaggtctggcagtcagagacagccgggcgcccacggcccgagcgcccacggcagcac

SEQ ID NO: 528582 - DNA, 50 bp, Homo sapiens
gttggatgtgacacataaggagcgcttttcctgtattatcgggccaaatg

SEQ ID NO: 528583 - DNA, 82 bp, Homo sapiens
tttaaagctgagctgcgaggaaaatggcggcgggagggacttgccatgaggtgttgaagccttgtttcactgagttggagag

SEQ ID NO: 528584 - DNA, 75 bp, Homo sapiens
ggacaagcacgagggcgcgctcgagacgctcctgaggttgaagccatccttgtcaatatatttggtggtatcgtc

SEQ ID NO: 528585 - DNA, 90 bp, Homo sapiens
tcatcatcaaggatcaggaccgcaagtcccgtcttatgggacttgaggccctcaagtttcagtctagaaggcttgacaggaggagctggt

SEQ ID NO: 528586 - DNA, 75 bp, Homo sapiens
tgtcgtacgtgggacaggccacgctgtccgtccgcagtaccgacgcctgcagctcattgctatggacagtgctat

SEQ ID NO: 528587 - DNA, 100 bp, Homo sapiens
ggcatatttagtcattcatttttgatcaggagaaagaagacagccatcatttgaaaggaaactctgatgaggaagaaagtgcttcagaatctgaactttg

SEQ ID NO: 528588 - DNA, 82 bp, Homo sapiens
tgaagaggagcgccagatggtggaggaatacacttatttatgaagtgtcgtgaaaactacccctaaaagccaaaatgggaaa

SEQ ID NO: 528589 - DNA, 112 bp, Homo sapiens
aaacagtgctgaagcctttaaatgcagcatctgcgatgtgaggaaaggcacctccaccagcaacagcaggtggctacccagcagttggcttttcagcagcagcttttacaga

SEQ ID NO: 528590 - DNA, 80 bp, Homo sapiens
cgaggaggccatcaccccccagcagagcgccgagctgggttgtggcagcactgcctgaaggtatgagaccagattctaat

SEQ ID NO: 528591 - DNA, 50 bp, Homo sapiens
ggtcacaccaatactgttgcagattggtatttaacatgaagtcgctccag

SEQ ID NO: 528592 - DNA, 100 bp, Homo sapiens
taacgcaggaacagaaaaccaaacaccacatgttgtctcttagaagtgggagctgaacgggcttgctttcagaaatcctccgaaaggaagaggaccccaa

SEQ ID NO: 528593 - DNA, 75 bp, Homo sapiens
agctgcacgtcctcgaacgcgaggccaacagccccgagatgtgatctccctatgttgctcaggctgcccaggctg

SEQ ID NO: 528594 - DNA, 75 bp, Homo sapiens
atttgctgacttcagcacattgtcaaagccgaccccttggtgggaagtattgccactcagtatatgaccaacaga

SEQ ID NO: 528595 - DNA, 89 bp, Homo sapiens
tggcagctggggaagtggtttggacatgcacaccaaaccctgggttagagcaaggggcacgttccgctttgaaagacctgatggctccc

SEQ ID NO: 528596 - DNA, 101 bp, Homo sapiens
gtgtcttcttagaagagcccattatttataggtagcaatgaagtgatgaggatactgatctctagaagcctgcttcaggagtagaacccacacttgttctg

SEQ ID NO: 528597 - DNA, 82 bp, Homo sapiens
caagatgtctgacatggaggatgatttcatgtgcgatgatgaggaggactacgacctggtgtcagttgtacccgaggcgttc

SEQ ID NO: 528598 - DNA, 102 bp, Homo sapiens
ggagcaagcctaaacgtcagaaatccagtactaaactttctgagcttcatgacaatcaggacggtcttgtgaactctgtcatcacacctgtgagacactcta

SEQ ID NO: 528599 - DNA, 90 bp, Homo sapiens
accacctttgagcctcttgagcctgtgaaggacactgacattcagacagcgtggacgatgaatttgaattgtccaccgtgtgtcaccggc

SEQ ID NO: 528600 - DNA, 83 bp, Homo sapiens
cagagatcaaaacaagccctccaggaactcacccttatgccagcctggaccatcttggaggcagtgtaggatcatggaagaac

SEQ ID NO: 528601 - DNA, 97 bp, Homo sapiens
agtgccaggaactcttctggggagaccccgacgtggagtgccgagattggcagattgctactctggctttactcctgggcggcgctgccatcattct

SEQ ID NO: 528602 - DNA, 90 bp, Homo sapiens
cgaggccaaaggactgaacccgcaggagcgtcacgggcgccggggcggctgccgacggcgggactgggtatgggctacgtgagttcgtgg

SEQ ID NO: 528603 - DNA, 116 bp, Homo sapiens
gaaattcatttacgacttgggcttatgttcaaagtgaacacagactatgagtctagtttaaagcaagatggattctggatatactctgagtattgtaacaaccacctggatgcttg

SEQ ID NO: 528604 - DNA, 100 bp, Homo sapiens
ggcccctgccaacctgcctgctctcctgctgttgctactactgtatggcatctacacgggcgacagcttcgtcaccccttgatggggcagcctcttcccc

SEQ ID NO: 528605 - DNA, 100 bp, Homo sapiens
cgcactgctaggggttctgctgctgggtgcggcgcgcctgccgcgcggggcagctgatcttgcatctttaatggataaaacatttgagagaaagttgcct

SEQ ID NO: 528606 - DNA, 74 bp, Homo sapiens
aggaacttacggaaaaagatgctacaattgcttctggaaacactactatgaagtatcctgtcatgaccaagggt

SEQ ID NO: 528607 - DNA, 90 bp, Homo sapiens
gggggcgccgcacgccagcgaccaggtgctggggcccggagtcacctacgtggtcaagtttaaggaagaaatctctaaacgttttaaatc

SEQ ID NO: 528608 - DNA, 75 bp, Homo sapiens
gaaaatgcaagaagactgatggagcaggcttgcaatattaaagagcaaccagggttttatgcacatgaaactggc

SEQ ID NO: 528609 - DNA, 100 bp, Homo sapiens
ttggagagtttttgcaatttgttcaacttgattatcctagaaggaaaacatcaccatggctacagaaattggttctcctcctcgttttttccatatgcca

SEQ ID NO: 528610 - DNA, 100 bp, Homo sapiens
tgaacccccacttcattgcagttgtgactgagtgtgctggtggaggggccttcctcgtcatccccctgcaccaggttgacaggactgaggtgattcgcac

SEQ ID NO: 528611 - DNA, 100 bp, Homo sapiens
ggccatgggcgacccagcccccgcccgcagcctggacgacatcgacctgtccgccctgcgggaccaggactaaaacctccagaggaacggacaatagaat

SEQ ID NO: 528612 - DNA, 97 bp, Homo sapiens
gaaattacgaaaacagcaaaatccagtagttcttctaatccaaaatgggatgaacagctaactgtgaatctacttgaaaatggatcggtttatgttg

SEQ ID NO: 528613 - DNA, 100 bp, Homo sapiens
atcccctactcgttcttcacaattctgtagggtggtcctgccatcatggctgtcctctgcaaaggtctcctcgctcattgagagaatctctgaccccaag

SEQ ID NO: 528614 - DNA, 96 bp, Homo sapiens
acggctcgatgctggacatacttgaccggggtcatcctagggaaaacactatcctctgagatcccagatcatgagagacagggtctcactatattg

SEQ ID NO: 528615 - DNA, 97 bp, Homo sapiens
acggcttcagccgcatccacgagatccagattccactgtgtaaagtaattagattcaacatagactacacgattcatttcattgaagagatgatgcc

SEQ ID NO: 528616 - DNA, 80 bp, Homo sapiens
cagcgaggaccctgctctagaaggaacgtacgccaggtatctgctgtgcgtttcagtcaacaatacagcttgtgttcgac

SEQ ID NO: 528617 - DNA, 83 bp, Homo sapiens
cactggcaagatcggctggttcctgggaggccagttaaatgtctctgacaatgcagatcttcgtgaagactctgactggtaag

SEQ ID NO: 528618 - DNA, 82 bp, Homo sapiens
gctgctgccgggttcacacgacgcgctgctgccgcgattacccggccttatgccagcctggaccatcttggaggcagtgtag

SEQ ID NO: 528619 - DNA, 90 bp, Homo sapiens
cgctgcggccaagcagaaagttgaacagaacgcggctcccagccacaccaagttcaggacagtcattttgtttactcattcagccctgtt

SEQ ID NO: 528620 - DNA, 83 bp, Homo sapiens
gctcaagggactgtgtccaccctcaggtttggtgcacctcgatttggaggaagtagggcagggcccttatctggaaagaagtt

SEQ ID NO: 528621 - DNA, 88 bp, Homo sapiens
gcggctgtcggctggtgcttggcggcagggacgatcagtcctgcgttaactgcggccgggaggctatgagcgagtgcaccggctgcca

SEQ ID NO: 528622 - DNA, 98 bp, Homo sapiens
cgggacagcggccccctggagggggcagtcccgggagaacctgcggcggccggagcggtgttgacttcaaaatcaaaactgtagagctaagaggaaag

SEQ ID NO: 528623 - DNA, 75 bp, Homo sapiens
ccgaaatgatccgcctgcctcagcctccaaagtagctgagactacagtgtctttggtgcaacactaacaaggctt

SEQ ID NO: 528624 - DNA, 75 bp, Homo sapiens
gctcaagatctcagagaaggaggaggtgaccacgcgcgagctaagggagaacattgagcaattcttcaccaaatt

SEQ ID NO: 528625 - DNA, 78 bp, Homo sapiens
gtgcacatccaggctggtcagtgtggcaaccagatcggtgccaaggagtctgtgtgaagcagcacaagcggttgaccc

SEQ ID NO: 528626 - DNA, 100 bp, Homo sapiens
ctcaatggaagcaagctttggatcaggtcacgagaagagaatgccttctagatgcaaaatcacctccaaaccagaccacttttcttgacttgcctgtttt

SEQ ID NO: 528627 - DNA, 75 bp, Homo sapiens
gaacagcctatgtgggcttccacggagtgcatttgcccagtataacatggatcagttcacgcctgtgaagataga

SEQ ID NO: 528628 - DNA, 96 bp, Homo sapiens
ttttggacctgaaacagaaattctggaacacctatatgaaaccatcaatagatgtctcacaaaacatctggaacaactgaaggcccctgtggggac

SEQ ID NO: 528629 - DNA, 75 bp, Homo sapiens
gcaatgagcttgtgttccaggtgaaggatgccttcgtgaagatcgtgaggcacgagggcaccaggaccctctgga

SEQ ID NO: 528630 - DNA, 100 bp, Homo sapiens
tagagcccagctcagcgcccggcagccttcgacgcgatgttccgccggagcttgaatcgttttgtgttacagaacatcctggacactgaaaaagaatatg

SEQ ID NO: 528631 - DNA, 50 bp, Homo sapiens
cgcaaacttgacactcaccctgaccgggagttacccagggagattataca

SEQ ID NO: 528632 - DNA, 89 bp, Homo sapiens
cgtcactgaggttgcagttggcgtgaaggttcgatctggggctaatgttctaatttgtggtccaaatggctgcggaaagagttcacttt

SEQ ID NO: 528633 - DNA, 75 bp, Homo sapiens
cctggcaccttgattttggacttcatagcctctagaactcttaaagcttttcaagccaggccaagaagctgtgaa

SEQ ID NO: 528634 - DNA, 74 bp, Homo sapiens
gaggcggcccgcttcctggaatggcaagcgcagcaacaacagagagcacgtgaaggaagaggcccagcagaagg

SEQ ID NO: 528635 - DNA, 75 bp, Homo sapiens
gccggacggcgcggtggtcgggacagactggccgttgctgtggagacgcctggtatgatctcgtgaaatcttgag

SEQ ID NO: 528636 - DNA, 75 bp, Homo sapiens
ggcaaggagctaaagcagcgtgcgttcagccctgggttagtgtgactctggatccagatacagctcatcacgaac

SEQ ID NO: 528637 - DNA, 100 bp, Homo sapiens
atcaaatctgaggtcttattttgttgagtcgaaagtgaaattttcctttggccaacgtgacagatctggaaagcatgaagactgggctttttttcctatg

SEQ ID NO: 528638 - DNA, 74 bp, Homo sapiens
gtaactgtcccctctgactaccatttctaaggtgtgatccctcacatccacaaatctctgattggaaagaaggg

SEQ ID NO: 528639 - DNA, 75 bp, Homo sapiens
ctggactttgggcgtcccattgccatgtttgaaattggcacaatggaagaagctggaatttgtgggctaggggtg

SEQ ID NO: 528640 - DNA, 75 bp, Homo sapiens
accgacagcacagacagaatccctgctaccagagttattcctgatgaagctaaagctttgtctctgttggcacca

SEQ ID NO: 528641 - DNA, 83 bp, Homo sapiens
ttcgagaacgaccccgagacgcccgcggcgccatggctcacgtcggctcccgcaagcgctcgaggagtcgcagccggtcccgg

SEQ ID NO: 528642 - DNA, 83 bp, Homo sapiens
tcctggcccaagaatgtgaagaccaactatgttgtttggggttgcatccaagaattgatgcccggagagctgatgaaaacctt

SEQ ID NO: 528643 - DNA, 90 bp, Homo sapiens
tggaatgatcatcaaacagctatggtgatgattagagacatactaatgtacatggaagccattaatttgctagaaccaatgacaaacgac

SEQ ID NO: 528644 - DNA, 50 bp, Homo sapiens
gctacggtaacgatcagtggctgcagagtttcgctcttgttgcccaggct

SEQ ID NO: 528645 - DNA, 75 bp, Homo sapiens
taccttctcatactttgttagaaaagccaccagtttggcaatgaggagcagcagctggcgtgggccaagcgggag

SEQ ID NO: 528646 - DNA, 83 bp, Homo sapiens
gaccggctgtatgattaggccacaatcttcaatgagtaaacatattcctagagcgcctgctcgctgtgcccccgggttatgac

SEQ ID NO: 528647 - DNA, 98 bp, Homo sapiens
aaaatcttagagtgtcccatctggtaaggagtgccaatggaccgatgcctgcctgtctcatccctgtgcaaatggaagtacctgtaccactgtggcca

SEQ ID NO: 528648 - DNA, 75 bp, Homo sapiens
gacttccggaagagtgtgttcgaggaggacatggccaccgtgttcccagcaggcctggccaacgtggtgacagga

SEQ ID NO: 528649 - DNA, 50 bp, Homo sapiens
ccgcgccctgcagattgtctcttgttgcctagcaacattgttttcatgtc

SEQ ID NO: 528650 - DNA, 75 bp, Homo sapiens
caaatccgtgtcggagtccttacaggtgccggggacacgggcggcaagccgtccacgcggggcggtgaccctgca

SEQ ID NO: 528651 - DNA, 100 bp, Homo sapiens
ctatggacgactccgaggaacattgagcctctgaagagccaatccattcaggatgggaaaccacgcaggcaaacgagaattaaatgccgagaaggccagt

SEQ ID NO: 528652 - DNA, 75 bp, Homo sapiens
ggaggggggagcggcgttggaggccaccgtttccagtcagaaattggctttggaaaaatggaaacctacatcaaa

SEQ ID NO: 528653 - DNA, 100 bp, Homo sapiens
ccgcagtccatctgactcctgcttcccgggtgttgctcgtgtgcgtataacccgtatatagagataattgaacaacccaggcagaggggaatgcgtttta

SEQ ID NO: 528654 - DNA, 113 bp, Homo sapiens
gctgcaccgacctcgacgtcttgcctgtgtcccacttgttcgcggcctatagggagtgcatccgccccaacccttttccccctcgtctcctgtgagaattccccgtcggatac

SEQ ID NO: 528655 - DNA, 83 bp, Homo sapiens
ggaaggggagcctgtcacattatttgaggtggtgaaactggggaaaagtgcaatgcaggaatcacctcctcatgtagaaaatt

SEQ ID NO: 528656 - DNA, 83 bp, Homo sapiens
cttcaggtcgtggcagagaaaaccagctgagacagggcgccacttactagataagaccatcatcatgtggaaactgaccaggg

SEQ ID NO: 528657 - DNA, 100 bp, Homo sapiens
ggacccggacgcgaccaggggaggcagaagggtctccgtctctccaccgggggcttcatccttccagggaggagaagagggactccagaatggctgagga

SEQ ID NO: 528658 - DNA, 98 bp, Homo sapiens
tgaagtcctacagagttatcaggttccagaccctgccttctcttctgaaagccttgtcctgccaagaagttactgatgatgaggtcttagatgcaagc

SEQ ID NO: 528659 - DNA, 101 bp, Homo sapiens
cgtggccttagctgtgctcgcgctactctctctttctggcctggaggctatccagctcactcagcctctgaagaagcttcgggttcagactcaggcagtca

SEQ ID NO: 528660 - DNA, 100 bp, Homo sapiens
ccacactttcaacagagaattcagccaggtgcacggcagcgtcagtgactgtaagaggctaaaggcagcagttcactatactgtgggttgtctttgcgag

SEQ ID NO: 528661 - DNA, 100 bp, Homo sapiens
cttgaagcaagggaccttgttatagaagccttaaagggaggttcccctgaaggatgctaaggaatacgctgaatccataggtgccatcgtggttgagaca

SEQ ID NO: 528662 - DNA, 95 bp, Homo sapiens
tacagggaagtctataagctttgcaacagaattacagagtatgatcccgagaccgaggacgagaagaagcgctttgaggaaggcaaagggcggta

SEQ ID NO: 528663 - DNA, 127 bp, Homo sapiens
ataaaaaggagcaaaagaaaaaagaatggatcaaccaagaacgtcaaacactccaacaattgagagcatttaaagatcacgtagaaaatctaattgtgtgaaagaagtagaaaaactgcaagaaaaa

SEQ ID NO: 528664 - DNA, 101 bp, Homo sapiens
ccaggttcccatggttgccggctcccctctcaggacaacccagatgtgcaacaaagtgcgatgtaagactttgaccccgacgcaggcttcagtgattgccg

SEQ ID NO: 528665 - DNA, 90 bp, Homo sapiens
acagccagcaccgcacgccctgcaagggaggcagcagcggctcccctgttgtatggacattctgcacccgaaactgatagctgagtcctg

SEQ ID NO: 528666 - DNA, 80 bp, Homo sapiens
cctctacgaaggcggctacttcaagagctagagccggtgcaggccacgcagaacaagacagggaagtatgtgccgccgag

SEQ ID NO: 528667 - DNA, 51 bp, Homo sapiens
aagcctcctgcgccggccttgcctcggagtctcctgataaagatggtcttc

SEQ ID NO: 528668 - DNA, 97 bp, Homo sapiens
cttggcatcgactgtttgcacaaggggacaaatgctaaagttttccaggataaatttgatgtgactctgctacacaccaagccagaggtagctgccc

SEQ ID NO: 528669 - DNA, 100 bp, Homo sapiens
ggcggtggggctggagaacccgaagcacctcccggcgccgggacgcttcttctatcagcttgaacgggtctttttacgacttggccatgctgaaacagat

SEQ ID NO: 528670 - DNA, 95 bp, Homo sapiens
taaatgaaggggtctagatgtaaatgtcagtggaaaggagagctaccatcactaagccaaatttgtatcctactgtggggcttcaaacaccagga

SEQ ID NO: 528671 - DNA, 90 bp, Homo sapiens
gccacctttcctgtgccatatgatttgcctccagaactgtatggaagtaaagggaagatcagttttcctgccatccaggctgctccctcc

SEQ ID NO: 528672 - DNA, 96 bp, Homo sapiens
gctggttgatcgcactatgactctggaagaagtccgcggccaggacacagttccggaaagcacagccagatcatcgaccccaagatgccccgtgtg

SEQ ID NO: 528673 - DNA, 98 bp, Homo sapiens
gtctgccatcgtccaaggaggtggcagggctccgtaggcaccaactgcaaggacccctccccctgcgggcgctcccatggcacagttcgcgttcgaga

SEQ ID NO: 528674 - DNA, 100 bp, Homo sapiens
agacgcccaaatggatgagcaagacctaaatgagcctcttgccaaagtgtcccttttaaaagatgacccagcagatggctgggatgaacttctatggagc

SEQ ID NO: 528675 - DNA, 82 bp, Homo sapiens
tcgcgccggctatggccgtgccctggggctgagccctcagttctccaaggagaagtacatcctggactcatcgccagagaaa

SEQ ID NO: 528676 - DNA, 50 bp, Homo sapiens
ttcacagcggtccggtgaccaagtcgaggctgaactccagtgcacccagt

SEQ ID NO: 528677 - DNA, 100 bp, Homo sapiens
cgagacaagttcaccccgaagtctgccggtatccgttacagcactgatgtgagtgtagatgaagtaaaagctttggcttctctgatgacatacaagtgtg

SEQ ID NO: 528678 - DNA, 74 bp, Homo sapiens
tctcaaggcaagcctattgagttaacacctctgccgctgctaaaagatacatccagaaagtgcccagaagaaac

SEQ ID NO: 528679 - DNA, 76 bp, Homo sapiens
gcccctgccggagatccctcagccctggctgcagttggaattgatcacaccttttcagttgtacttcaatcctgaa

SEQ ID NO: 528680 - DNA, 101 bp, Homo sapiens
aaccacatcctcctcctcctacacccaaaggctcccatggagagctcagatgctggcatatatgttctattctgttccttactttgtgactgcactgtatg

SEQ ID NO: 528681 - DNA, 88 bp, Homo sapiens
cggtaccttccaccagcgctccacgatgaccgtgccctggcggccaggaaagcgacgtgccctcagccagcatgacccgcctggcacg

SEQ ID NO: 528682 - DNA, 75 bp, Homo sapiens
tttaggtctcaaggcaagcctattgagttaacacctctgccgctgctaaaaggagcatattaatgaaaagtgcca

SEQ ID NO: 528683 - DNA, 75 bp, Homo sapiens
atcaggaagtcattcgcttccagaagaatcatggcacaactgaacctccattgaatactccagaaaacagggaat

SEQ ID NO: 528684 - DNA, 82 bp, Homo sapiens
ctacgtgctcacggtcaacgagcggggcaaccactgcgagtactgcttcaccagacagtgatctgacacaaacacagctgaa

SEQ ID NO: 528685 - DNA, 75 bp, Homo sapiens
ctatatttaagtatctccgctacttcactcgcactatccttgatgctaggtggatccataaagaacccagccaac

SEQ ID NO: 528686 - DNA, 50 bp, Homo sapiens
ccaccgtctggtgtctaaaccgcctcggcactcctggaaaaagtcagatg

SEQ ID NO: 528687 - DNA, 75 bp, Homo sapiens
cccaccggcctggagcgcgccgccaaggcggcgcgcgagctggagcactcgcaccctggtgggcagcagtgggac

SEQ ID NO: 528688 - DNA, 74 bp, Homo sapiens
aatcagaaggcacagattagaggaaggaagagcaatcttcctgagctcttttcgggtgccatatgaggaaatca

SEQ ID NO: 528689 - DNA, 96 bp, Homo sapiens
ctactacaaccagagcgaggccgcctgcagcgtgctctacttgacctcagtggagacagagtcactgacgggcccccaagctgtggcccgggccag

SEQ ID NO: 528690 - DNA, 100 bp, Homo sapiens
gttattcctactaacgtcctgtgtcactgagagaacgtcaggatgcagatgggcaaatgaaagagctccaggatcagctcgaagcagaacagtatttctc

SEQ ID NO: 528691 - DNA, 100 bp, Homo sapiens
acctctggattcaccaggaagaagaaaaagagatacaaatgcaccagaaagttttaaagctaaattgtgagcgcccccatggcagggacctggactcccc

SEQ ID NO: 528692 - DNA, 102 bp, Homo sapiens
aaggaatctgagggtgccctcaatgagcacatgaccagcttagcttctgtcctaaagacaggggcaagtgtccgagtggtgaatcagctacttacagagatg

SEQ ID NO: 528693 - DNA, 75 bp, Homo sapiens
cacaaatgctccttctcctggagacgcaactcaaggaggaggatgattacgacgtgatgcaggaccccgagttcc

SEQ ID NO: 528694 - DNA, 83 bp, Homo sapiens
ccgcggagcggcgcctgggccgcgccgacctggtcatgagcttcgttaacatgggaactgtggctgcaccatctgtcttcatc

SEQ ID NO: 528695 - DNA, 100 bp, Homo sapiens
cggagagttctgcatgttgattcgtcctgcaaccctggttccagtctggcaagcattgtagacctggctgctgaagactgacggggcccagggtccgctg

SEQ ID NO: 528696 - DNA, 80 bp, Homo sapiens
ccaacctgctgctggaggaggataacaagttttgtgcagattgccagtctaaagctagatgaggaagaggagcgaaggaa

SEQ ID NO: 528697 - DNA, 100 bp, Homo sapiens
tacccactggatgaacaaaactgcaccttggaaattgagagctattcctcacctattcctacctcttggccttcaatgtgtggcttctgcttgcacccgt

SEQ ID NO: 528698 - DNA, 135 bp, Homo sapiens
gtgcagtggcacctgcgcgaagctggccaaagcctgcccagacggctcacctgtgcgggatggaacaaaaggtctcctctgagcctccggcctccataagacccaaaacagatgacacctcttcccagtcccccg

SEQ ID NO: 528699 - DNA, 75 bp, Homo sapiens
tttcattccaaagtctttggaaaagacacaaaggagtcagtggatcggtggggaaaatgctgcttaccctgggcc

SEQ ID NO: 528700 - DNA, 100 bp, Homo sapiens
gagaccatttattataaagctgcaaagaagctgttgcactcaggaatgaaaattcttagccagccgaggcctgcctggagccccagatcaccccttccta

SEQ ID NO: 528701 - DNA, 75 bp, Homo sapiens
tgggagattactaccagggccggaggattaccatcaccggaacttcttggacacttaatgattgttggcaagaaa

SEQ ID NO: 528702 - DNA, 83 bp, Homo sapiens
ctcaccaagaactgtggtgtaaagcgcctgtaaaaccagattccctataaggagcccctgctggtgcaccagaactaccgggg

SEQ ID NO: 528703 - DNA, 83 bp, Homo sapiens
ttttcctgcatggattgggagatactggatgtctcagagcatgtcttcagtatcttcaaggcattctgaaaagatagctatta

SEQ ID NO: 528704 - DNA, 75 bp, Homo sapiens
ttgccaaagtactctgctggattagaattacttagcagcttctgggctggctggctgagaaactacctactcttc

SEQ ID NO: 528705 - DNA, 74 bp, Homo sapiens
tgaagagcgagaaggagcagcgccggcggctggaggattatatctgtccaagatgcgagtctggttttatcgag

SEQ ID NO: 528706 - DNA, 100 bp, Homo sapiens
catcctacagatgtgctgtaaacatcaaaagaagacggtgggatcaggagatgtggagtcaaccagccccagtctgctaaccactgacaacactcttgag

SEQ ID NO: 528707 - DNA, 98 bp, Homo sapiens
tgagctctgcacgctggggagtttgttgggagacggtctcgccacattgcccagactggtctgaaagtcttgggctcaagagatcctcccgcttccgc

SEQ ID NO: 528708 - DNA, 100 bp, Homo sapiens
cttgccttttcattttacttcatcctccaaggagttcaatcacttggcgtgacttcactacttttaagcaaaagagcatgctggaagatggactgccctc

SEQ ID NO: 528709 - DNA, 50 bp, Homo sapiens
tgcggaggctcaactaccagaccccagccccttattcacctctgatcttg

SEQ ID NO: 528710 - DNA, 74 bp, Homo sapiens
aagattagcaaaggtgctaatccagtggaaatcaggagagattggaggtggacacaaaggaagaggcagccaga

SEQ ID NO: 528711 - DNA, 100 bp, Homo sapiens
aggaacctctatgccgacatcgacgccgcctggcaggccctgcgcaccagttacatgatagatgctgcagatcgtgaaaagatagaagcttcccgaaatg

SEQ ID NO: 528712 - DNA, 145 bp, Homo sapiens
agggtcctgacgcaggcttccaaccccgtcgtctgcacgcagcccaaatccccatccgggacagtgtgcacctcaagaactctcctgatgaatgcagtgtggccaaaggcgggaagatggtgggcagcccagacaccgttgggat

SEQ ID NO: 528713 - DNA, 100 bp, Homo sapiens
gccatttctccgtcgattaaagagccatctgtggtgccaattgaagctcctgagcccgctgaacctggagcaggccgcgtacgcacgagacgccctcgcc

SEQ ID NO: 528714 - DNA, 51 bp, Homo sapiens
tgaggccctggagggagagaagaacccttaggagaaatcttgagagtggac

SEQ ID NO: 528715 - DNA, 74 bp, Homo sapiens
cagacttgattagcctgcctaccactgtagagggacttcagaagttggaggacaacagcacacctgaaccaaag

SEQ ID NO: 528716 - DNA, 75 bp, Homo sapiens
tgagactgcactgtgaaattcttctagtgtgttcttcagctttatcagagaagatggcgaattagaagatggtga

SEQ ID NO: 528717 - DNA, 75 bp, Homo sapiens
cggcggcggcggcggcggcggcgcagagcttggggcttccttggtcgcacccaccacctgcctgcccactggtca

SEQ ID NO: 528718 - DNA, 75 bp, Homo sapiens
tctgacccctgacgagcgcagcaaagagggctctatctggaaccaccagaagctggaggatcaggagcagcgggc

SEQ ID NO: 528719 - DNA, 50 bp, Homo sapiens
gggcgggcgcggatccctgcgtcccgtgcctacaccaactaatgttacaa

SEQ ID NO: 528720 - DNA, 80 bp, Homo sapiens
ggggctccgggtcttccagagcgtgaagatcaagatcggagtgtggccatctggggccgtgtggtatttgccactcagga

SEQ ID NO: 528721 - DNA, 55 bp, Homo sapiens
ccgaaggaaagacctttcagtatttgagcttttgaaagctcatgaaaatgcttta

SEQ ID NO: 528722 - DNA, 121 bp, Homo sapiens
cggctccgtcgtggaagcaggactgcgccgcgtcttcctcaagtaagactttgaccccgacgcaggcttcagtgattgccgcggatcagaagcctgagcactttggctcgagacaattaag

SEQ ID NO: 528723 - DNA, 111 bp, Homo sapiens
gtactatcctcggtgctgtggtgcagagctagttcctctccagctcagccgcgtagacaatgcagatcttcgtgaagactctgactggtaagaccatcaccctcgaggttg

SEQ ID NO: 528724 - DNA, 90 bp, Homo sapiens
ggcctatgtcaccatctcgagcaattcctctgtggacctcttcatcttgagggtggcatgatcgctctgctgctgtccatcttgtgcctg

SEQ ID NO: 528725 - DNA, 75 bp, Homo sapiens
tccaatgggcatgccccctccgggaatgcggcctcctccccctgggatgcgagaaattttggagccaagcataac

SEQ ID NO: 528726 - DNA, 75 bp, Homo sapiens
gacctgataatgaagaattattttgcaccactggatgttgtttactggaagatcattaccattagaatatttgac

SEQ ID NO: 528727 - DNA, 97 bp, Homo sapiens
tcatgctgggctcctgtgcattcttctccaaaacgtggattgaggtctcaggttcctctgccaaagatgcgcagttgtgtagcagttgagtaatgct

SEQ ID NO: 528728 - DNA, 90 bp, Homo sapiens
agatttgccaccaccttcatcatctagtcatgctgggactggggttttaaggggtgtggcaggaggttttggactcgatgagtttccacc

SEQ ID NO: 528729 - DNA, 100 bp, Homo sapiens
gaaaatcgactctcataaacagcctattcctaactgatctgtacccagaaagagtcatacctggagcagcagaaaataagacctactcatctgtgagaac

SEQ ID NO: 528730 - DNA, 74 bp, Homo sapiens
aatttcctgcgctgttccacctcattcaacttcagcagttggaattgatcacaccttttcagttgtacttcaat

SEQ ID NO: 528731 - DNA, 82 bp, Homo sapiens
ttccccctccctcagcttccgccccaaaagtgggcgacagatgcgaaagaaacgagttccagtgccaagacgggaaatgcat

SEQ ID NO: 528732 - DNA, 76 bp, Homo sapiens
tccaacagcgacttcaactactcctaccccaccaagcaagctgctctgaaaagggccatctctgctgccaacctgc

SEQ ID NO: 528733 - DNA, 97 bp, Homo sapiens
caagatttaatcaactactgtctgagctacattgcgaaaattaaactcccgaagaagagggtgactctggggggcccctgatctgcaacgggtactt

SEQ ID NO: 528734 - DNA, 101 bp, Homo sapiens
ctcaagagtgctgctgctaacgcggtccccggcacgcaccatctgttgccatcccggccggccgaggccattgcagggtaaccaggagccgacaacaactc

SEQ ID NO: 528735 - DNA, 75 bp, Homo sapiens
ggacaacagcagccctggcccaggttctgaggcccgtggtatcaatggaggaactgtggctgcaccatctgtctt

SEQ ID NO: 528736 - DNA, 75 bp, Homo sapiens
gtaaaaaacaattagagaatgaaatgatgcggggtaaaatatttggagtaccttttaatgcactgccccattctg

SEQ ID NO: 528737 - DNA, 100 bp, Homo sapiens
ttctccagaaggtggtttcgatgccatcatgcaagttgcagtttgtggaactctccagaaagagcaacagtaatggagtacatgagcactggaagtgaca

SEQ ID NO: 528738 - DNA, 98 bp, Homo sapiens
ggagccctaaccgcaacccgcgccgcgccgcgccgcgccggtgctacctttttacccacacttaagtgacgcaaaatgcccttcaatggcgagaagca

SEQ ID NO: 528739 - DNA, 111 bp, Homo sapiens
actcctcccagtgacgggtctggagtgcgtgggggaccggctgttggcggttccagggtctccctccactgctgtagtaacccgggtccggggcctcggtggtgctcctga

SEQ ID NO: 528740 - DNA, 51 bp, Homo sapiens
tttcaacctccggggccacaatagcgagggggattcccgaagtcttccgtt

SEQ ID NO: 528741 - DNA, 100 bp, Homo sapiens
gaagaaagtgcgcagcctgcaagattgtggtgcacacgccctgcatcgagcagctggagaagaaaccagcctggacaccaagtctgtgtcagaaggccac

SEQ ID NO: 528742 - DNA, 98 bp, Homo sapiens
agaattcagcacggatggaaagatggagatgaacctctaacacagtggaaaggaaccgttctggatcaggactccagttcagttgtagaatggactca

SEQ ID NO: 528743 - DNA, 100 bp, Homo sapiens
gcggtctggatcggattttggaggcattgaagctgctgctgagcccgggaggaacctctgtgatggaggtcacagccacagacgcggacgatgatgtgaa

SEQ ID NO: 528744 - DNA, 75 bp, Homo sapiens
cggccccctggagggggcagtcccgggagaacctgcggcggccggagcggtaaacactacacgtgaagagtggtg

SEQ ID NO: 528745 - DNA, 82 bp, Homo sapiens
tgggattcgcgctgctgggcacccacggagcctccggggctgagctccacgcaggagatcggtgaggagctgatcaacggag

SEQ ID NO: 528746 - DNA, 82 bp, Homo sapiens
atagacatttacgcggatgtcggcgaagagttcaaccaggctttatcctgtggataaacgcagagtgaacgagtttggggag

SEQ ID NO: 528747 - DNA, 90 bp, Homo sapiens
gctaaggatgtattgtggcttttgtttggattgcagcatgcagaattacagagtgcttgtgatttcacgtatttttgctgaactcgtaaa

SEQ ID NO: 528748 - DNA, 82 bp, Homo sapiens
agcaacatgctcctagcagaagcctatggatctggagaactcctctttcctaaaatggagtcgagtaaaaagatggactctc

SEQ ID NO: 528749 - DNA, 97 bp, Homo sapiens
cggacctcgggtcgcgcagtcagaacccttaggagaaatcttgagagtggacagcaattgtgaagatcgccagagagttctgtgtttcatcaccgcc

SEQ ID NO: 528750 - DNA, 100 bp, Homo sapiens
ttggaatttgtgcaatgtttagccaacccaaattaccttaattggaggtggggaagacagggctccagctaccacaggacgggctctgggtatagccgtt

SEQ ID NO: 528751 - DNA, 82 bp, Homo sapiens
ggattcatttagagctgcggaacaggacgccctctgatgattttttatcaagcagaaatgcatcgaacaacgagaatcaaga

SEQ ID NO: 528752 - DNA, 75 bp, Homo sapiens
ggacgttgagagaacgaggaggaaggagagaaaatggcgtccacggactcggtgaaatacctggagtgctcagct

SEQ ID NO: 528753 - DNA, 50 bp, Homo sapiens
aaaaagcgcagatttcctataaacagatttccactgtccgcaacagcccc

SEQ ID NO: 528754 - DNA, 75 bp, Homo sapiens
gatcacgtttgagtgtgctcagatatcggaaagagccagacttctcagaggtcagtctgttcaacaagtgggacc

SEQ ID NO: 528755 - DNA, 80 bp, Homo sapiens
gtgcctctggcagtgacgaggacgaagtgtccgaggttgcaaagacagttgcacagaggctcaacacagatccaatgttg

SEQ ID NO: 528756 - DNA, 82 bp, Homo sapiens
ctcagcgctcccatgatcgcccggtgccttttggctgtgcgaagcctccgcaggaatgggtaccacagaccatgtcatcgtc

SEQ ID NO: 528757 - DNA, 74 bp, Homo sapiens
agccacatactatccgtttgttcaggaaccaccagtgacagaatctttgtagaatttgatggctgtaactggaa

SEQ ID NO: 528758 - DNA, 48 bp, Homo sapiens
atgcttgctggaggatagaaagagttattcctgatgaagctaaagctt

SEQ ID NO: 528759 - DNA, 74 bp, Homo sapiens
ttgaaaaaatggttgacctcacccaggtggccggcattcacaagaaggtggcccggaccatcggcatttctgtg

SEQ ID NO: 528760 - DNA, 80 bp, Homo sapiens
cctgaagacaaggatgtgactatcccaccaaatattttggttgtgagctgggagcacagacccagtttgatgttaagaat

SEQ ID NO: 528761 - DNA, 102 bp, Homo sapiens
cggcaggagcgggtagtgccagctacggtccgcggctggggttccctcctccgtttctgtatccccacgagggatcgcttacacctgagacgaactacagaa

SEQ ID NO: 528762 - DNA, 95 bp, Homo sapiens
gagatcttccgcaacctggagaacgccaagcgcttcgccatcgacatagaaacgcttcgttaagggactcaggcagtacgggaagaacttcttca

SEQ ID NO: 528763 - DNA, 100 bp, Homo sapiens
aaaaggccagactgaacacgatgagggtgctggagaatctggtaaaagcaccattgtgaagcagatgaggatcctgcatgttaatgggtttaatggagag

SEQ ID NO: 528764 - DNA, 73 bp, Homo sapiens
tccgctcctccttcctgcaccctggggctcctgaaactcacatggagcttctaagtaggacatccttagaaac

SEQ ID NO: 528765 - DNA, 82 bp, Homo sapiens
ttaggaaatgtcttgaaagaggcacgcatttttgacaggcgacgactgtaagggcaagaggcacctcgacgcgcacacagcc

SEQ ID NO: 528766 - DNA, 75 bp, Homo sapiens
tgagaccgggggaggcgacgctaagttgctgatcgtggcgcactgggcaaaaaccattccagaaaagatggactc

SEQ ID NO: 528767 - DNA, 101 bp, Homo sapiens
cagtcatacagaggagctggccacgaaatacgagaggacatgaacaagctgagtggaggcggcgggcgcaggactcgggtggaagggggccagcttggggg

SEQ ID NO: 528768 - DNA, 101 bp, Homo sapiens
ccatggcatctaagaaatttgctgttaaactgtcaaagctcgaaaaacagcagcagaggaaagaaaagaccagagctaagggaccttctgaatcaagcaag

SEQ ID NO: 528769 - DNA, 90 bp, Homo sapiens
cactccctgtcccgcatcggggacgagctctacctggaacccttggaggacggggagggggctggagtatggcatcaggatggagccctc

SEQ ID NO: 528770 - DNA, 100 bp, Homo sapiens
gaagaccacctgagtcaccagttaactatggtagcccacccagcattggtccagagggggcaaacctctttatttaccaccttccacaggaatttggaga

SEQ ID NO: 528771 - DNA, 100 bp, Homo sapiens
ggcgctcccttgtcacgcctcgggaagcgcgcacctgccaagcagattgatgaactcccagagggcgctgtgaagcctccagcaaacaagtatcctatct

SEQ ID NO: 528772 - DNA, 76 bp, Homo sapiens
agcagaacctgactgtcggcagccagacaggcgtggtgaccaagatgaagatgcagaggaccattgtcatccgccg

SEQ ID NO: 528773 - DNA, 75 bp, Homo sapiens
gagtcagcgatggtgcccggcgaggagaaccaactggtcccgaaagaggtgggatgtgtgtgggctgaaattccg

SEQ ID NO: 528774 - DNA, 100 bp, Homo sapiens
cccgggagggcagccactccccgctggacagcgccgacgtccgggtgcacgtgccacgcacgtgcaagagaagcctgagccagtgccgctggagagccgc

SEQ ID NO: 528775 - DNA, 88 bp, Homo sapiens
aatatatatctgctgaaaatggaaagcaagaaaaatctcgttgggaagtcctccaacaagaacaacggctaatggaagagaaaaataa

SEQ ID NO: 528776 - DNA, 90 bp, Homo sapiens
cagtaagggagggcaagaagatatgaacctgagccttcagtcaagaccctccagcttgcctgcacaacttcctgaatggaccatgactcc

SEQ ID NO: 528777 - DNA, 90 bp, Homo sapiens
agatgctccagtttgagaaacctggatctgcgatctgtttgtgggagctgacacgtttctcccagcacaaagttgggagtgacaccagag

SEQ ID NO: 528778 - DNA, 101 bp, Homo sapiens
ggatttccaagggatgctggaatacaagaaggaggatgagcaaaaacttgttaagaacctgattctgggtattgttgcagcatctggcagtgagactgagg

SEQ ID NO: 528779 - DNA, 82 bp, Homo sapiens
cagcagcagccgcggtggcagtgcaaaaggctggcagtacagatttctcacattggcaaactgagagattttcttctggaac

SEQ ID NO: 528780 - DNA, 136 bp, Homo sapiens
cagtcttgtcagggcgaggctgttaacccttactgtgctgtgctcgtcaaagagtatgtcgaatcaggtctgaagaactgttgcccaattcaacagtgccagcattccaactttgttaaacctaccaacatcttaa

SEQ ID NO: 528781 - DNA, 83 bp, Homo sapiens
cttcctcctcggaatctgcaaggtgtccctggccagtgtccttccacctgtccacaagcatggggaacatcttcgccaacctc

SEQ ID NO: 528782 - DNA, 100 bp, Homo sapiens
gggcacctggtggcttcatgagcaaccgctttgtagaaaccaacctcttcctggaggagattcaggtggacccaagtggagagattgtggaactggcgaa

SEQ ID NO: 528783 - DNA, 74 bp, Homo sapiens
tttggcaaagctggggattggccagctgactgctcaggaagtaaaatcggctgttgtagtgactgatggagaga

SEQ ID NO: 528784 - DNA, 97 bp, Homo sapiens
tcaggggtaacgccttttggaggtgcatcttcctcattttcagtggtgccaagttcatatcctgctggtttaacagacacgatgaggcgagtggtac

SEQ ID NO: 528785 - DNA, 100 bp, Homo sapiens
tggggatgaaggccgagggcttcgtggatgccctgcaccgggtccggcaggcagcagaacttgctgaattcactgccaagattgcacttctagaggaagc

SEQ ID NO: 528786 - DNA, 135 bp, Homo sapiens
gcagatttttactattgatggccccctgtgcttgaagaatgtacagtctatgtttggcttctaccctcctcatctttggaagttgtcccagaagcagcccagaacaatccaggggaggaagtcacagaaactgca

SEQ ID NO: 528787 - DNA, 80 bp, Homo sapiens
ctttccgccctaatggaggtctccagtttcgcatttgcaagtgaggaagcagcacaaccctgggttttagataatttcta

SEQ ID NO: 528788 - DNA, 75 bp, Homo sapiens
gaaaagcatggctacaatgtggaacagaatttctagaatttggaatcgagtgcattttctgacatttgagtacag

SEQ ID NO: 528789 - DNA, 95 bp, Homo sapiens
cagcccaagatggccgacttcgatgatcgtgtgtcggatgaggagaagaaaacaaccctttttgctgcacatgtaagtggagctgtgcttacctt

SEQ ID NO: 528790 - DNA, 98 bp, Homo sapiens
agccaagcatgccagcacctaccgagaagctgccacaaaccaggccaagatccacgctgacgcagagcggaaggagacatatggaaagttgatcatgt

SEQ ID NO: 528791 - DNA, 136 bp, Homo sapiens
caagaccctgtgcacctctcagcaggcctttgctggacagatgaagagtgacttgtttctggatgattctaagagggtccaggtgcggaagtatggagagcagaagacgttgtttatctttcccgggctcctcccg

SEQ ID NO: 528792 - DNA, 50 bp, Homo sapiens
gcgccgcgccctcggcctgcacggtattaaaggtggaagaaggtccatat

SEQ ID NO: 528793 - DNA, 100 bp, Homo sapiens
gtctgtatcagcgtctgtcgcgctgggacccacactggcttttaaggaggacacccggacacctggaagctgggaaatgattggtgctgaagacatggac

SEQ ID NO: 528794 - DNA, 96 bp, Homo sapiens
ggtcactcttgccggccggcttcgctgcgggtttgcactgcccggttgtatatgaacacagatcaagattagagaaatccttgcaaaaagaaagac

SEQ ID NO: 528795 - DNA, 89 bp, Homo sapiens
cggctgttgccatgaggcgaggctagggaggacctcacttccccggggtgtaataatgttaactgaggaagacaactgttagttttgtg

SEQ ID NO: 528796 - DNA, 100 bp, Homo sapiens
ctcaagccttattgaagagataggaactcttggttgggataagcagtaccaagaagcaagagagacctatcttgatctggatagtaaagtgaggacttta

SEQ ID NO: 528797 - DNA, 85 bp, Homo sapiens
tgaatttgtttcacccccgtggattccagtgggcccgacagcgcaacagagcaaattggtcaggagatgttggaaaaccttagtc

SEQ ID NO: 528798 - DNA, 100 bp, Homo sapiens
cacaggtccagggcagaggaccaacatgggcattttgtttatgagcaaggtcccagcatttgagggtgatgatggattctgtgtgtttgagagcaacgcc

SEQ ID NO: 528799 - DNA, 50 bp, Homo sapiens
ctgctgcagactggagcctgagagcagttcaaggagcagggacaagttac

SEQ ID NO: 528800 - DNA, 101 bp, Homo sapiens
gccatggagggggtgctgtacaagtggaccaactatctgagcgacaatgcagatcttcgtgaagactctgactggtaagaccatcaccctcgaggttgagc

SEQ ID NO: 528801 - DNA, 90 bp, Homo sapiens
tttccttgcggaaaggatgttggcggtccctgtgacctgtggagacacggccagatctgccctccaggcaccggcagaagctggaggacc

SEQ ID NO: 528802 - DNA, 71 bp, Homo sapiens
cgcagcccaggagctcctggaagatctccgcactctggagcataatgtaattcaattcgtcataatctgtc

SEQ ID NO: 528803 - DNA, 114 bp, Homo sapiens
ctcgatctccatgactgttacctcaagtacattaacctgaaggcatctgagagagatcaaccagctttcactcctagtggaatattaactcctcatgccttgggttcaagaaat

SEQ ID NO: 528804 - DNA, 97 bp, Homo sapiens
ggaaaaggaagatgcactgactagaactgaacttgaaacacttcaaaagacttagtgataaaactgggcctgtagctcaagagaaaagttgacacct

SEQ ID NO: 528805 - DNA, 82 bp, Homo sapiens
catggcctctggcaccaccaccaccgccgtgaagggacccgagctgatccagaaagccaacggtctccacggcttcatgaat

SEQ ID NO: 528806 - DNA, 98 bp, Homo sapiens
tgctgctgctgccccggacccgggcggacgagcacgaacacacggtacttggaaaaatggacaaggattgtgaaatgaaacgcaccacactggacagc

SEQ ID NO: 528807 - DNA, 74 bp, Homo sapiens
ctatcgaaggacatgaagactaccacatgatggaatttgctgattcccttggaattccgtttttggaaaccagt

SEQ ID NO: 528808 - DNA, 90 bp, Homo sapiens
ctgtgacaaagagaacaagatccttaaagatgagatgaacaaagagattgaggcgaccggccagtggtggccgaacttgctgcctcgccc

SEQ ID NO: 528809 - DNA, 75 bp, Homo sapiens
ctcttcttcatagttacgttatactgcccctgcattgttggtattgaaaggtcaaagactctaaatggaggatct

SEQ ID NO: 528810 - DNA, 90 bp, Homo sapiens
aaaaggcccaaagagacagctcactggtggagttggcatgaacttaacagcagcagatactgtgatttttgttgacagtgactttaatcc

SEQ ID NO: 528811 - DNA, 83 bp, Homo sapiens
gccaagtttgagatcgccctgcccgtcgccaatgacagcttttcatgcaacacccaacacttataagcggaagaacacagaaa

SEQ ID NO: 528812 - DNA, 75 bp, Homo sapiens
cttcttacgccacatgtgtcacttcattgatcctgataacttaagtgactctctcttttccggtgatgaagaaaa

SEQ ID NO: 528813 - DNA, 100 bp, Homo sapiens
aggccttggatggaaattgccaacaaacttcctcaattgattgatgctcaccagcttcaagctcatgtggacaagatatcagttttagagaatgtggcgt

SEQ ID NO: 528814 - DNA, 75 bp, Homo sapiens
atacgctttgttggtggactactctcagcctactatctgtctggagaagagattgcagatggacagagagagctt

SEQ ID NO: 528815 - DNA, 82 bp, Homo sapiens
tgggatccggttccttggtgtcatccagccttagcaaaccagagctctgaccacaaagccgagctctctgtcctggctgccc

SEQ ID NO: 528816 - DNA, 100 bp, Homo sapiens
cagtaccagacctgggaggagttcagccgcgctgccgagaagctttacctcgctgaccctatgaaggtatgatctcgtgaaatcttgagagaaactgaat

SEQ ID NO: 528817 - DNA, 83 bp, Homo sapiens
agactacaagtccagacccaggagagcaaggcccagaaagaggaataagacgagttggaagaagacctgatcaacaacttcag

SEQ ID NO: 528818 - DNA, 74 bp, Homo sapiens
actggactcatggaggctgagcatttattcaggatgtggctgggccgccgggccctgtgcgctctggtccttct

SEQ ID NO: 528819 - DNA, 50 bp, Homo sapiens
aagtaaagcagatcctgggcagaaggtctacagtgaatatagagccagtc

SEQ ID NO: 528820 - DNA, 74 bp, Homo sapiens
ttcaatgaggccaccatggttctggtctcctggatcatgtgtttaattggttggggtcagataagaagaggagt

SEQ ID NO: 528821 - DNA, 82 bp, Homo sapiens
gccctttgaaagacgcttccagccccgggcatctaggaaaggtgcttgatgaggtctggggaaccaggtgcagatgggtctc

SEQ ID NO: 528822 - DNA, 83 bp, Homo sapiens
agacctggtttctagccccagctgtacctctaattgtaaccttggtttggtgccctggttgtcagatgttggaaagcagtagg

SEQ ID NO: 528823 - DNA, 90 bp, Homo sapiens
tcgcagggaggatgtcgggacaccccggaagctgggaaatgctccgacagttagttaatatgtgcatcaacccagatccagagaagcgac

SEQ ID NO: 528824 - DNA, 75 bp, Homo sapiens
ggcgcgcgaggacccgagccaggcggggacaggacggcggggcgagccagccttcaaatgtttatctggtgtgac

SEQ ID NO: 528825 - DNA, 100 bp, Homo sapiens
gaggatgggtatctactcgcgcatcaggcatgaagaagaatatctatggcaatatcgaggacctggttggatggcaagcatgtggtgtttggcaaagtga

SEQ ID NO: 528826 - DNA, 75 bp, Homo sapiens
gcaaaaaatggtggagcagtggttttgaggttttgctgaagatattcctgaagaatcatcccaggtgccacacta

SEQ ID NO: 528827 - DNA, 83 bp, Homo sapiens
cgaagaggctggactcggattcgttgcctgagctgatgttctaatcatgtcagataaagatgatattgagactccactgctaa

SEQ ID NO: 528828 - DNA, 82 bp, Homo sapiens
caagagtaacagcagcgccgtcccgtccgacagccaggcccgggagaagaagctcttcgtgggcggtcttgactggagcacg

SEQ ID NO: 528829 - DNA, 50 bp, Homo sapiens
gcagcccaacttccagcaggacaagacccgcagctcacgccacactcagg

SEQ ID NO: 528830 - DNA, 89 bp, Homo sapiens
cacggagcagagtccctcacccccaccagctgtagctgaacgtctggatggtggagaagagcaggtgttggagcgggccggagagaagt

SEQ ID NO: 528831 - DNA, 100 bp, Homo sapiens
agcagagtggaccaccccatgaacctcggtacaactggatttggaacaaatccaggtggtctctttggccaacagaatcagcagactaccagcctcttca

SEQ ID NO: 528832 - DNA, 74 bp, Homo sapiens
caggcggtatgattttgagtgtctgcaaagctgcagaaccttggcctgaaaatgctacattatatcagcaattg

SEQ ID NO: 528833 - DNA, 75 bp, Homo sapiens
ctcttctcgttttactgaaaaaggcacctcctcaggggactcagaagaagatccttgacattgccaacatgctgg

SEQ ID NO: 528834 - DNA, 88 bp, Homo sapiens
aaacagttaaaccaaaatggcgcaacgttactcaggaaaaaaagttactgtggcccatgtcctaaaaactggatatgttacaaaaata

SEQ ID NO: 528835 - DNA, 75 bp, Homo sapiens
ccggctcccgcaccatggaggaggacgacagctacggtaagaatgattgatgttggctgatattggagtgctcat

SEQ ID NO: 528836 - DNA, 76 bp, Homo sapiens
cgaaccccttcatgcccaaatcccggaaactccagcgtgtctccagccgtggttccctcggagacatggaggccag

SEQ ID NO: 528837 - DNA, 80 bp, Homo sapiens
ttgtgatgaaagcacatggtacagtccatttgacgtggaggacatgaccgcatcctcaggcgctgggaacaaggcagcag

SEQ ID NO: 528838 - DNA, 75 bp, Homo sapiens
ccgggagatccgagagctcttcagatggtttcacccaaatatcactggtgtggaggcagaaaacctactgttgac

SEQ ID NO: 528839 - DNA, 100 bp, Homo sapiens
gactacccacctagaagaggtgatgatagctttggagacagaggcaagtgaggcctatctggttggcctttttgaagacaccaacctgtgtgctatccat

SEQ ID NO: 528840 - DNA, 51 bp, Homo sapiens
tccacaacccctgcaaacttggattcagggcactccacagaaggatgttat

SEQ ID NO: 528841 - DNA, 90 bp, Homo sapiens
ggcgttgcagctaggccagcggctcggcggtgagatcgtcagcgctgactccatgcagaaagacttccgagtgcaggaactcccactggc

SEQ ID NO: 528842 - DNA, 90 bp, Homo sapiens
acggggactatggggagaaaaaagattcagattacgaggattatggatgaacgtaacagacagatttggagaccaagtatgagaccaaga

SEQ ID NO: 528843 - DNA, 100 bp, Homo sapiens
ctcagaagcatcgtgaaaagcctccttctggttccaaatggttaaagaattgcccacccttaaggatatggactttctcaacaagaaccagaaagtatat

SEQ ID NO: 528844 - DNA, 73 bp, Homo sapiens
gaataatgatgataatgtagatggcctccttgttcagttgcctcttccagaaaacatgtctcaacttagcgag

SEQ ID NO: 528845 - DNA, 100 bp, Homo sapiens
cccagcctgcacgtcgacgacagaaactatgttccaacttcctgtcaacaatcttggcagtttaagaaaagcccggaaaactgtgaaaaaaatacttagt

SEQ ID NO: 528846 - DNA, 73 bp, Homo sapiens
agcctcctgccagaactacttcctcatgattgtttcagattaacccttcctggaagaattgtagaaaatggaa

SEQ ID NO: 528847 - DNA, 100 bp, Homo sapiens
gacgtctgagactttctccttcaagtacttggcagatcactctcttagcaggagttggaacaaaaattgaccccactttgtgccgggctgacagaatggt

SEQ ID NO: 528848 - DNA, 101 bp, Homo sapiens
catcgctggatattaaaccatttcttccctttcctcttgacactgcagctgcagtcaacctcttccccaatttcaatgcgcagagagtgaggaagaagatg

SEQ ID NO: 528849 - DNA, 80 bp, Homo sapiens
ggacgagctcggagcagcagccaggtattagaaaactactcggatgctccaatgacaccaaaacagattctgcaggtcat

SEQ ID NO: 528850 - DNA, 100 bp, Homo sapiens
atctgatcgggtcttccttcatgtttttggctcttgtccaaggaagaacatgcagataactattctcacatgtcgacatgttaccgattataaaacctca

SEQ ID NO: 528851 - DNA, 82 bp, Homo sapiens
gtaaatcctgccaggcttgccgcttcatgaagtgtttaaaagtgggcatgctgaaagaagatgcctgtgaggagccaccaac

SEQ ID NO: 528852 - DNA, 100 bp, Homo sapiens
gagaattccatcatggacctgacccaactgatacagccccaggagaggaatatcagaagctctttcctgacattcccatagggtattctgggcatgaaac

SEQ ID NO: 528853 - DNA, 105 bp, Homo sapiens
ggcgcgaaccctgctgggcctccagtcaccctcgtcttgcattttcccgcgtgcgtgttctttcccagggaactccgatgaagtgttccaacaaaatgagcgagt

SEQ ID NO: 528854 - DNA, 96 bp, Homo sapiens
gagggactcatgatctttgggatagcagattgtttgcctactccaggccatcaaaccttcttctggaccaaagcaatgtggatatcactaccttcc

SEQ ID NO: 528855 - DNA, 75 bp, Homo sapiens
gagcccgagtggatcggggacggagagagcacgagcccatcagccccaaactggataccacccacatgtccatca

SEQ ID NO: 528856 - DNA, 74 bp, Homo sapiens
ctaccctggaggaattttttcttggtctgggaagatccgaggtatctcctggagaagccatctatgatgtcatt

SEQ ID NO: 528857 - DNA, 50 bp, Homo sapiens
cctgggcggcgtggaggggcagcctgatactgcaggcaaacagctcgccg

SEQ ID NO: 528858 - DNA, 51 bp, Homo sapiens
tcaggcaattattgaaagaatccccccgtgtaacatagcagtgatcctttt

SEQ ID NO: 528859 - DNA, 94 bp, Homo sapiens
ccagtgctcatcttgttctcgagttttctctgccatgttgctattgcaggacggaaaagcataacccctactgtagaactaaatgcactgtgca

SEQ ID NO: 528860 - DNA, 100 bp, Homo sapiens
gaaggcggcggcagagaacttgccggtgccagctgagagttcttactgcagaggggtccaatgtgcttgcttctccaaggatgacaagtatgtgtacgtg

SEQ ID NO: 528861 - DNA, 100 bp, Homo sapiens
gtcagagatgggagaagtcacagacggaatgatggatacaaaggttgtgcctctatgacatgattcagtccagagtaacactgatggctcagcacggatc

SEQ ID NO: 528862 - DNA, 75 bp, Homo sapiens
gtgtattctgttacatcaatcaaaaggtgctggagaatctggtaaaagcaccattgtgaagcagatgaggatcct

SEQ ID NO: 528863 - DNA, 75 bp, Homo sapiens
agccggcgcccgtggtccggccatggacgacctcgggaaaggaacacaggtctggaagaagaaaggagccatcta

SEQ ID NO: 528864 - DNA, 82 bp, Homo sapiens
tggctgcgtgaccccgacggctgcttctggaagtgtatgctgacttgtaaagtgaagaagccagtggtgctgcgggtgttct

SEQ ID NO: 528865 - DNA, 50 bp, Homo sapiens
ttgccatgtggaagaaactggcccgcctgaccggaggccagatgtgccgc

SEQ ID NO: 528866 - DNA, 89 bp, Homo sapiens
gtgaattattttaaggagacagtaaaagcattagcagattcttcagaaaagtgtgggcctcctccacctattagcaatggtgataccac

SEQ ID NO: 528867 - DNA, 98 bp, Homo sapiens
acgtccaagtctccgaacagagccacacgactcccgctggctcaatggtggagggagcaaagtcctgcacactggagtggtgtactagcggatcaagt

SEQ ID NO: 528868 - DNA, 88 bp, Homo sapiens
gcggctggccgggcccaggtcccttcctccagctgtaggtaaaacttgcctactgatcagttacacaaccaatgcatttcctggagaa

SEQ ID NO: 528869 - DNA, 82 bp, Homo sapiens
ttgacctgagggctgctattgtatatcacactaaaggctgccaccacggccccgcacccccaagccgccgacaccactgccg

SEQ ID NO: 528870 - DNA, 49 bp, Homo sapiens
ctgtagcattcaagacttcaaactgccaagctctactccaggaagtgaa

SEQ ID NO: 528871 - DNA, 101 bp, Homo sapiens
aggatgtggcttttggcagatgaagtgtgaaccaagacaagaccttggtcgacctcagacatagctagaaaaccatgagctgttttccaagagcttcatct

SEQ ID NO: 528872 - DNA, 71 bp, Homo sapiens
tcaactttcaacatctaattctaccagagagacatcctcctcatacagtgcccaaaaccgagaacgaggtg

SEQ ID NO: 528873 - DNA, 83 bp, Homo sapiens
cccgcgagcacagagcctcgcctttgccgatccgccgcccgtccacacccgccgccaggattatatctgtccaagatgcgagt

SEQ ID NO: 528874 - DNA, 100 bp, Homo sapiens
gaacaaaatacaaatcatggagccgctggggtcccttttgcctcagatactattttgaaggcatggaggagtgacggcaggaactttctgtgctctgaca

SEQ ID NO: 528875 - DNA, 124 bp, Homo sapiens
ccgagccccgcccggcccgggccatgtcggtgggcgagctctacagccaggttcgatacaagaggctgttttcctagcgtggcttgctgcctttggtaagaacatgtcgtccatcttgccattc

SEQ ID NO: 528876 - DNA, 90 bp, Homo sapiens
cggccggctgcgaagacgcggtgggccgcccctccggtgaccaagaatatggcccaggtgaccaaagccctggacaaggccctgagcacc

SEQ ID NO: 528877 - DNA, 100 bp, Homo sapiens
gctgggatgaggttacgagtagccatgtgccatatgatttatcggaaggagtcctaagcagacttaaagccaagaaaataagaagaggaaagagagaggg

SEQ ID NO: 528878 - DNA, 100 bp, Homo sapiens
tggatttgcatcttgtaatgtgtttaacaaagccacgaataacctataatgggtgtccggtggagagctgtttgaccggatagtggagaaggggttttat

SEQ ID NO: 528879 - DNA, 74 bp, Homo sapiens
ctctacttagctcagcaattcttaccttcaagcgatccccctccaagaccatcccaggcctccccagacactgc

SEQ ID NO: 528880 - DNA, 100 bp, Homo sapiens
tcgttaagggactcaggcagtacgggaagaacttcttcagaattagaaaggagctgcttcccaataaggaaacattaccttatcccatatcacacaactg

SEQ ID NO: 528881 - DNA, 100 bp, Homo sapiens
cagtgcttgacctacacaccacctctagccaactacctgctctccaaggagcatgctcgcagctcgtcaccagtggctacctctacgtgaccatcatcta

SEQ ID NO: 528882 - DNA, 100 bp, Homo sapiens
ggatctgaaagttcatcctgaacaggaaaagatatggcattcgccctgaaaatgtgattatatatggccaaagtatagggacagtaccgtctgtggatct

SEQ ID NO: 528883 - DNA, 51 bp, Homo sapiens
ctcagaagacagagggttttcttttgaggatatggaatattatcttgtaaa

SEQ ID NO: 528884 - DNA, 100 bp, Homo sapiens
cgcactgtctttctcaaggcacgaactgagctgatccttgccccaggatttgtactgtgttcgcagtgacctggggaacctgctcaaagccctgggtcgc

SEQ ID NO: 528885 - DNA, 82 bp, Homo sapiens
ctggggctcctgctgctctggttcccagggttacacatcattttggaatgactgtatatcatctggattacgtggctgtatg

SEQ ID NO: 528886 - DNA, 74 bp, Homo sapiens
ggccagagcctggtcgagccggaggaagccaccaggagcatcatgagagcatcagggacccgtcaacaggcttt

SEQ ID NO: 528887 - DNA, 74 bp, Homo sapiens
tcattcctttcctgtcccaagagtttcaccagtgatcattaaagaatgggcagcttacaaaggaaagtctcctc

SEQ ID NO: 528888 - DNA, 100 bp, Homo sapiens
aaagagatgaaaagtggggattttgccctgatcccagaaataatgaagatgtttcattttcaagaccagcagatcttgaccttattcagtcaactccctt

SEQ ID NO: 528889 - DNA, 100 bp, Homo sapiens
cttcgcaagagccacttggcaaaggaggggttataccagtataagaacatttgtcaacaggtgatggcaagatcctgtacagccagtgtggggatgtgat

SEQ ID NO: 528890 - DNA, 75 bp, Homo sapiens
cacagactgacacatctcacagtgggggatccggtgtgattaaagctggttttgctggtgatcagatccccaaat

SEQ ID NO: 528891 - DNA, 100 bp, Homo sapiens
gcgtctgctggacgcgggagacgccagcgagctggtgattggagccctgcggagagttgctggagaatgtaaccctaatccataaaccagtgtcgttgca

SEQ ID NO: 528892 - DNA, 50 bp, Homo sapiens
cacgtccaggaccacttccaggagatccccgtcgaggtcaagatcaagat

SEQ ID NO: 528893 - DNA, 75 bp, Homo sapiens
cccactgctcagagacggcgaggatattgctgcatatcgtgccaagggcaaaagtgaagcaggaaagaagggccc

SEQ ID NO: 528894 - DNA, 100 bp, Homo sapiens
gggaagaaaagctttggatgaaggagcttcaaacccaaagaggtatccgttacagcactgatgtgagtgtagatgaagtaaaagctttggcttctctgat

SEQ ID NO: 528895 - DNA, 101 bp, Homo sapiens
aaacatctctgttgaaggcttttgatccttttgagaaataaagatctgaaagaaatggcataatcttaaaacttggtgaatgaaaactttgccattgattt

SEQ ID NO: 528896 - DNA, 90 bp, Homo sapiens
gaaaggttccagtgcccaagatgaacccttaggagaaatcttgagagtggacagcaattgtgaagatcgccagagagttctgtgtttcat

SEQ ID NO: 528897 - DNA, 74 bp, Homo sapiens
agcgtgaccagtggccacctctgcagtgtcttccacaacctggatttttggaagtaccagcacagtgacgcttc

SEQ ID NO: 528898 - DNA, 97 bp, Homo sapiens
cgacgctgctggccagggtccaggtggtagaggacattgaatacctgaagttcgataaagggccgtggctcaagcaggacaatcgcactttatacca

SEQ ID NO: 528899 - DNA, 51 bp, Homo sapiens
gcactgggccgcgcatttcggcaagatgtgtcttgctgaatcagggctctc

SEQ ID NO: 528900 - DNA, 101 bp, Homo sapiens
gggtggaaaaagcagggaggttatgaggcttaataaagaaggatttaagtgccctgtatgctcaaaatttgtatcctcagatgaaatggatttgcatcttg

SEQ ID NO: 528901 - DNA, 80 bp, Homo sapiens
atgctgccttgtggggtgactgaggaaccccagcgactcttttatggaagaattcctttggctaccggaagaaaagggag

SEQ ID NO: 528902 - DNA, 52 bp, Homo sapiens
ggcgcgagtgaggaaaggaggtactgtagtgctgtccccggcataggtccat

SEQ ID NO: 528903 - DNA, 97 bp, Homo sapiens
caaggagaaaattcttaaattggagtcatatgaaatcactatgaatggccccttttggatatgtgccacgttggtctttgccatagcaattagtggg

SEQ ID NO: 528904 - DNA, 75 bp, Homo sapiens
agattttgatgtggatgatgccaaagttttattagcaagaagtctatgtgccccaggatcctggattacctgagg

SEQ ID NO: 528905 - DNA, 88 bp, Homo sapiens
gatggagatgaaggaggacgacgtttcttttctcatgtttgtacatgagaaggaaattatggcagaagatgatcaggtgtttcttatg

SEQ ID NO: 528906 - DNA, 100 bp, Homo sapiens
ccgaccccaacggcaccagccctttgcacctcgcagctaaaaacggccacatcgacatcatcaggccctggtactcctgcagctctgggcaaacctggac

SEQ ID NO: 528907 - DNA, 83 bp, Homo sapiens
atcatggcggatggccccaggtgtaagcgcagaaagcaggcgaacccgcggcgcaataacggccttgtttgtatgaagtccag

SEQ ID NO: 528908 - DNA, 100 bp, Homo sapiens
cagccgtgaccgaggggcccattcccgaggtgctcaagaactacatggacgcccagagcaagagaggcatcctcaccctgaagtaccccatcgagcacgg

SEQ ID NO: 528909 - DNA, 74 bp, Homo sapiens
cctggccctgatcatcctgctgggcttcgtccagatcgggaaggcgtcgtcccccagactacagtaatactcaa

SEQ ID NO: 528910 - DNA, 75 bp, Homo sapiens
ccaaagtgctgggattgcaggtaagtctggaaagtagatggtaacatgatgtggcaccaggataaccaagacaag

SEQ ID NO: 528911 - DNA, 76 bp, Homo sapiens
tgcggagcgggaggaggaccgaaagggtaagcaggaagagaacgacgtggtggagaagctgaacctcttcttggat

SEQ ID NO: 528912 - DNA, 100 bp, Homo sapiens
ctacatgtcctaatatgttgatggcattccagaatatctcagatgagcagtatggcatgcagctgtaccagaattatatgcatccatatcaaggtagaag

SEQ ID NO: 528913 - DNA, 75 bp, Homo sapiens
aaaccttcaggcggcccatggcaactgaaaaagactgtggatgacctgcaggccaaactgaccctggcaaaaggc

SEQ ID NO: 528914 - DNA, 100 bp, Homo sapiens
caaagtgcaacttgacgggaacttttcaactgacttttacttttgacgaccaccatgactgagatcactgctgaagaacagctgaatagatttgctggat

SEQ ID NO: 528915 - DNA, 100 bp, Homo sapiens
ctgtttgttttcttcaatcaccccaaaggtcgcgataatattattgacctcttcctttatcagccacaggaggacatgtatgcccaggactctatagagc

SEQ ID NO: 528916 - DNA, 91 bp, Homo sapiens
ggaggactctggagctgacagcgcgcacttcacccgcagttgcaattctgtggtgttcttggtcacacatttatggagtttctgaagggca

SEQ ID NO: 528917 - DNA, 83 bp, Homo sapiens
cacacatcgcgggtggctagagtctgcaagacacaacatttgcctgcaacaaggacagcggccagtggcactactttgatgac

SEQ ID NO: 528918 - DNA, 83 bp, Homo sapiens
caagatggtgaagcagatcgagagcaagattggaactagatggaaagatgttgtctccaaatgcattcgatgccactttcagc

SEQ ID NO: 528919 - DNA, 75 bp, Homo sapiens
agaaacaggagaacgggaagcctcctgccgagataaagccaccacgtctgagattgccttgcaacaggtttccat

SEQ ID NO: 528920 - DNA, 117 bp, Homo sapiens
ccgagccagcgagccagcgagccgccgacccgccgagcaaaatggggagcgtgttcaatacgtggaaacccatgtgggttgtattgttagaagatggaattgaattctataagaaga

SEQ ID NO: 528921 - DNA, 82 bp, Homo sapiens
ccgaggagaaggaggagtggattaagtgcattaaccttatgccagcctggaccatcttggaggcagtgtaggatcatggaag

SEQ ID NO: 528922 - DNA, 50 bp, Homo sapiens
caccaatactgttgcagattgatttctccacccaggtgaactcctccctc

SEQ ID NO: 528923 - DNA, 91 bp, Homo sapiens
ggggcagatggcaagtggagacagcaatctcaacttcagtttggtgccctggttgtcagatgttggaaagcagtaggacggaacatactct

SEQ ID NO: 528924 - DNA, 96 bp, Homo sapiens
gggcatcttcttcgtgaggctgctcttcgagcgaatgatttggaacaagttctacgtcaaattggcgataaggaccaaaagatccagaaccttgaa

SEQ ID NO: 528925 - DNA, 75 bp, Homo sapiens
ctgcaagaactggctcaagaaatttgcctcgaaaaccaagccggaagctgagaggaaaagccttttattttgtca

SEQ ID NO: 528926 - DNA, 100 bp, Homo sapiens
gacaatgcagcttctcttgcagtgcaggccaaccctttaaattggatcccaaaatgactcacaagaagttgaagatctccaatgatggattgcagatgga

SEQ ID NO: 528927 - DNA, 75 bp, Homo sapiens
ctgtgaagccacacagtgtccagatacgaggttccgatgaagttaaattccgtcaagatttaatgaatattgcgg

SEQ ID NO: 528928 - DNA, 82 bp, Homo sapiens
acagaactcattctcaccaataatagtctcgtggaactgcttttatgacaagaagacagcaattcacaaagccctctgtgac

SEQ ID NO: 528929 - DNA, 75 bp, Homo sapiens
ttctgtctctatgaatgtgactaccctggttacctcatatgagcccaggatgtgcgagttcaagtgctacccgag

SEQ ID NO: 528930 - DNA, 78 bp, Homo sapiens
cagcctcctgggcagccccttgcccttggacagctcttcaccaccaggagtgttccttgagaaggactatgagattta

SEQ ID NO: 528931 - DNA, 83 bp, Homo sapiens
agtgtctggaggaggaagtgtcagcgctactgccgcaggattgacttctaaggactcttggtacatgaggaagaaacccggaa

SEQ ID NO: 528932 - DNA, 74 bp, Homo sapiens
ccagctggtggctggagcgaccccttgttctttggtggcgctgtcaggaagcatctaaatatggtgtcctccgg

SEQ ID NO: 528933 - DNA, 99 bp, Homo sapiens
gcgcccgtggtccggccatggacgacctcgccgtttccctggggagatggtaaccatactctattccataaccctcatgtgaatccacttccaactggc

SEQ ID NO: 528934 - DNA, 100 bp, Homo sapiens
tgggcatcttccctgctaattatgtggagatctcactctgttgcccaggctggagtgcagtggcacaatcacagctgaccgcaaccttgacctcccaagg

SEQ ID NO: 528935 - DNA, 100 bp, Homo sapiens
tggcccaggtacgcaaggagtatgagatgctgcgcatcgagtttgagcagaatctggcggccaacgagcaggcgggagaaccgtcgtcgggccaaagagg

SEQ ID NO: 528936 - DNA, 75 bp, Homo sapiens
tgcctgcagagctgtggcttaccagagattcatgttctggagaaatgaaaatgctgtctcagtggaatgttgatt

SEQ ID NO: 528937 - DNA, 75 bp, Homo sapiens
gccatccaggaccaaccttccagttctgtctgtgaacgagacctgcctagagctggaacgttacctccagagcga

SEQ ID NO: 528938 - DNA, 75 bp, Homo sapiens
gaggagcgccggaacgccgaggcccaggtagacaagggcgtggtccccctggcagggacaaatggcgagactacc

SEQ ID NO: 528939 - DNA, 73 bp, Homo sapiens
gctccgccgcccttgcctccaggtattggcaagcttgccagtgtacctgctggtggggctgtagccgtctctg

SEQ ID NO: 528940 - DNA, 71 bp, Homo sapiens
agccgtccggagccagccaacgagcggcttcctgtttgggctgaaaggagcaaaaggaagagcaggcttcc

SEQ ID NO: 528941 - DNA, 96 bp, Homo sapiens
aaactacaatcataaagaaatccaacttaccttgtcaggaaactgaacagccaagactcctataacaattttaccaacaacaaccctggcaaccct

SEQ ID NO: 528942 - DNA, 50 bp, Homo sapiens
atactacatggcaaaatgggaaagggaccattgcaatttagagatgtggc

SEQ ID NO: 528943 - DNA, 74 bp, Homo sapiens
caaggaggtgctgaagagcgaggaggaacttagtgatttggcccgtgaccctccagcacaatgttctgcaggtc

SEQ ID NO: 528944 - DNA, 100 bp, Homo sapiens
gctgagacaagaaggaaaattagagaagatccagaccaaggcaggtgaggcgggggctcgaatggttcgtgaactctttgaaatggccagaacaaaaaaa

SEQ ID NO: 528945 - DNA, 75 bp, Homo sapiens
tctggaaccgggatggcgacgtctacactgagtcggaggcgaagttcgtgccctcgtgaggctggcatgcaggat

SEQ ID NO: 528946 - DNA, 96 bp, Homo sapiens
cgaaaagagagggaagaagcagctgccaggtgaaagacccctgacaaaagacaatcatcttctgggtacatttgatctgactggaattcctcctgc

SEQ ID NO: 528947 - DNA, 100 bp, Homo sapiens
ccagaagtccgcctggtgaagctgccgttctttaatatgctggatgagctgctgaagcccaccgaattaggttaatttggagtggcccctggagtcagtt

SEQ ID NO: 528948 - DNA, 98 bp, Homo sapiens
tttgaaaagaacaatctctttcaaatgtcaaatagcgatggatgataagacagtttttcatgaggagttcattcattaccttaaatatgttatggtgg

SEQ ID NO: 528949 - DNA, 101 bp, Homo sapiens
cgcgagcgaggcgccctagacatcttctccctcccttgcctcagatgatgatgtgcctgcagatatggttgcagaagaatcaggtcctggtgcacaaaata

SEQ ID NO: 528950 - DNA, 75 bp, Homo sapiens
ccggaagatcaactgcagactgtcctattgcatctcaagccgtgacttaagagattaaaattaatttggttgctg

SEQ ID NO: 528951 - DNA, 74 bp, Homo sapiens
gagcaggagcccggcaccccccgccgacaaggaggatcaggatcctcatgaccagccaaagagaagaagaatta

SEQ ID NO: 528952 - DNA, 100 bp, Homo sapiens
gggagacatgcagatatgttgcaggatattcaagaaagaaggattttagcatggaagacactaaactgtactgaaataaagtctttgcttttgctttttg

SEQ ID NO: 528953 - DNA, 50 bp, Homo sapiens
gtgatggagcccagatccgaatccagatgtgggcgctatctccaactgtc

SEQ ID NO: 528954 - DNA, 90 bp, Homo sapiens
cccatcaacgaatggcttttaaaaggattgttcctcatgtggttaatttggttcattctttcaaaaatgatggtctgccttcaagtacag

SEQ ID NO: 528955 - DNA, 83 bp, Homo sapiens
gacatctgctgccggaaggggtcccgaagccccctgcaggaactctacaacccaatccagaatttaattccttttcgaccttc

SEQ ID NO: 528956 - DNA, 100 bp, Homo sapiens
gttcatctaccacgctttcgtatttctctatgaatcatcatcaagaactctgggagaacttttgaattcataaccaagccaacatctccagacatgtaaa

SEQ ID NO: 528957 - DNA, 86 bp, Homo sapiens
ggattggggatgagtatgcggaggacagctctgatgaggagatgtgaagttcatttccaatccgccctccatggtggcagcgggga

SEQ ID NO: 528958 - DNA, 101 bp, Homo sapiens
ccaccacccaccttctcctttcgagaaaggatgactcacaagagtcttgtctacctctggttcctgtgcagaaagatcctggtttcgacaggggccagttc

SEQ ID NO: 528959 - DNA, 100 bp, Homo sapiens
gtttgctctgctcttccaacaccagtggaagatgatcacatcccagagaaagcaaccagcgagatgaatactgctgaggactggggcctcattttggata

SEQ ID NO: 528960 - DNA, 97 bp, Homo sapiens
tacagccgcccgggagaagatggctgccccagcagtgtccgggctctcccggcagacctactcggagtgtgaagatggcacctacagtccagagatc

SEQ ID NO: 528961 - DNA, 78 bp, Homo sapiens
aggagttcgtctcttacgtctgcggaagtgcagctgcctcagttcttagcgcagctgtgaagagggataccaaggaaa

SEQ ID NO: 528962 - DNA, 100 bp, Homo sapiens
gaaataccagtccccagtgagggtgtacaaatacccctttgaattaattatggctaatctctaggactgcgtagtaaagtgctgaggaaaattgaagagc

SEQ ID NO: 528963 - DNA, 75 bp, Homo sapiens
ccgagaacaccatcaccatgacaaccagtcaccagcctcaggacaggtaagccaagatgggtgcatacaagtaca

SEQ ID NO: 528964 - DNA, 100 bp, Homo sapiens
cgagtgcgacgcctgcaaggactggttccacggcaggaggaggaagccaagaatctggtgagcgaagccatcgcagctggcatcttcaacgacctgggct

SEQ ID NO: 528965 - DNA, 100 bp, Homo sapiens
cagcagtgatgatgaagagcctagcacctcttatactgatacaacgactgaaagacctttcattcagaagctgtttcgtcctgtggctgcagatggacag

SEQ ID NO: 528966 - DNA, 100 bp, Homo sapiens
gcaagttcagcgtgggccccgtatgctgccgtggatctgatcagctgaggcctgagacacaggaccagcgatgccctcctagctagccgtcacgggatgg

SEQ ID NO: 528967 - DNA, 97 bp, Homo sapiens
gaacttttaagtggagtggtggatcagaccaaagatggtactatactggcaattgctggagaagattttgcaattgttgcttctgatactcgattga

SEQ ID NO: 528968 - DNA, 98 bp, Homo sapiens
ctctgacccagctagccagatcccggacccaaaccatgttccctgtgaaggtgaaagtggagaaatcagggttattggggctgtgccatcggcaaagc

SEQ ID NO: 528969 - DNA, 96 bp, Homo sapiens
cgattcctcagtaaacacatctctcaccgcggaggggcaagattcttgccaagagaattaatgtgcgtattgagcacattaagcactctaagagcc

SEQ ID NO: 528970 - DNA, 100 bp, Homo sapiens
ctaatttagatcttagaaaagagttgtctgaaccaagcagcacgcgtatctatgccattgccaaggaaatgatttgcagctgagtgaatcaggaagtgac

SEQ ID NO: 528971 - DNA, 101 bp, Homo sapiens
caaagtcttctccagtgaaagtaggggagaagcggaaagctgctgatgagacgctgtgccaaacaaagacctttccaggtgtcctgagatggttctccagt

SEQ ID NO: 528972 - DNA, 115 bp, Homo sapiens
agcttcaggaggccaccaacttccctctgcggccgtttgtcattcccttcctgaagttggaatcgaagcctcttaaaatggcagatgacttggacttcgagacaggagatgcagg

SEQ ID NO: 528973 - DNA, 50 bp, Homo sapiens
tttccttatgaagaagacacaaatgtgtatatctcatgattgatatggag

SEQ ID NO: 528974 - DNA, 83 bp, Homo sapiens
tcctgatgaagttcgagcactaatatttaagaaagaagatgttaactttcaggtgagaagccctaccactgcaactgggacgg

SEQ ID NO: 528975 - DNA, 83 bp, Homo sapiens
ggcctttccagcagcctgtggatgccgtcaagctgaacctccctgttgactatagtcaatggggccaatggagccaagtgtat

SEQ ID NO: 528976 - DNA, 100 bp, Homo sapiens
agaagttagacaataccctcaaactacctccaacagctactcagggtgatgatgtaaaatctaaagattacattgttgcactacagcaccctgtgaccac

SEQ ID NO: 528977 - DNA, 97 bp, Homo sapiens
cagaaagtgcagaaggttatggtgcagcccatcaaatggtgatttctttgctaacatggtagtagatgctgtacttgctattaaatacacagacata

SEQ ID NO: 528978 - DNA, 100 bp, Homo sapiens
tgccattgtgactattgatggatttagcctttttcaatctcttcgtgcttgtcgaaatcaggtagcaaaagtggttggcacttaccatggttccccagac

SEQ ID NO: 528979 - DNA, 100 bp, Homo sapiens
tgacatctgacgacgtgaaggagcagatttacaaactggccaagaagggccttactccttcacagatcggggaagtattacaaatggaagatgatctggt

SEQ ID NO: 528980 - DNA, 75 bp, Homo sapiens
tgtctgacgatagtccaaaaactgaagaagatggtggataagcccacccagctggctctgaagcaccgacaaggc

SEQ ID NO: 528981 - DNA, 82 bp, Homo sapiens
gatctcagagaaggaggaggtgaccacgcgcgagcggctggactctattacctggcagaactgatagaagaatacacagtgg

SEQ ID NO: 528982 - DNA, 82 bp, Homo sapiens
ttgaaaagactgggcttgtccttgctggtgcatgcgtcgtcggcctctgggcagcagaaagcttatagcttcattgcaccat

SEQ ID NO: 528983 - DNA, 100 bp, Homo sapiens
tggccaaactgctctacgtccacatgttgggctaccccgcccactttggacaggtaaaagtgctgtttgtacgcaaccttgccaatactgtaacagaaga

SEQ ID NO: 528984 - DNA, 101 bp, Homo sapiens
cccaaggggattgcctggcaggacgtgaaggggaagaggcccaccctggagtaaccctcactggagaatccagaggctcctggaaccatgggcctcaggcc

SEQ ID NO: 528985 - DNA, 100 bp, Homo sapiens
accgaatcgctgtcacgccggcaggacgagattgaggagctgcgggccgagatgctggagatgcgggacgtctatatggaggaggacgtgtatcagctgc

SEQ ID NO: 528986 - DNA, 100 bp, Homo sapiens
cgctgctgctgcttctagtgctgctgctgtggctgctgcagctgggaagttatcaattccaaaccagatgaaagacccaggctcagccactgtattgcag

SEQ ID NO: 528987 - DNA, 97 bp, Homo sapiens
accccggctatcaggacagctgccagatcgcaccgtttccagaagctgcgttgccaacgtcacatcccaaaataggaagacggaagaaagtgccggg

SEQ ID NO: 528988 - DNA, 98 bp, Homo sapiens
aaatatcacagttgccacacaggccagcagaaacccaatcacatccaaagagtggtactggaaccagcattccatattggaagaagagatttctacac

SEQ ID NO: 528989 - DNA, 75 bp, Homo sapiens
catcacccccgcccctaagatcaagaaagccaagacaatgcaaactccagtgaacattcccgtgcctgtgctccg

SEQ ID NO: 528990 - DNA, 80 bp, Homo sapiens
cactccaggaatgccagtgcatcttttgcacagctgatcatgtatatgaacttctcaacaccattgatgcctgccagtgc

SEQ ID NO: 528991 - DNA, 80 bp, Homo sapiens
gggacacccgtttgacacggtcaagccctactgccaataaagggaaaataagagatgctcatcgacgaattatgctttta

SEQ ID NO: 528992 - DNA, 50 bp, Homo sapiens
ccagggttctttggggcccgaggcctgttacatgaacagaatatggcaaa

SEQ ID NO: 528993 - DNA, 75 bp, Homo sapiens
acgacatgtttatggacatcgccatgctggtggagaatcaggttctgcttggattctgctagacagacccgacaa

SEQ ID NO: 528994 - DNA, 80 bp, Homo sapiens
ccccatccgtctcttctgcagatacattgatcgcatccatatttttttcaggtacgcaataactgtttggtattttgatg

SEQ ID NO: 528995 - DNA, 100 bp, Homo sapiens
aggtccgacttccaatgctgcatgacccaccgaagatggctggtgggccagccggccgtacacttgaagcgtgacttcttcctggccaatgcgtctcggg

SEQ ID NO: 528996 - DNA, 100 bp, Homo sapiens
acagccctccatcttgcagcccagaagctataaggaagaccagatggatgagaaactaatggaacctctgaaatatgctgaacaacttcctgtagctcag

SEQ ID NO: 528997 - DNA, 100 bp, Homo sapiens
tttgtgctgctatgggaagcagctgtgtaccattcctcgcgatgctgcctactacagctatcagaataggaaaaccaattctgtgtcctcggaggaccac

SEQ ID NO: 528998 - DNA, 82 bp, Homo sapiens
acccactggacaccttcgtcccctttgatccctgtgtgctgaagaggccaaagagtgtggccagatgcaaaataagtggctg

SEQ ID NO: 528999 - DNA, 100 bp, Homo sapiens
caagaacagaacaggccctatggggcatacctatggctttattgacctcgactcccatgcggggccctggtgaaaacagatgaacaagaagtaatcaact

SEQ ID NO: 529000 - DNA, 100 bp, Homo sapiens
ttctgtatatgaaggtggtgtgttttttctggatatcacattttcatcagattatccatttaagccaccaaaggtgggcacttcctctgtggtgtaccca

SEQ ID NO: 529001 - DNA, 100 bp, Homo sapiens
agagttggattctcttatcaaggctaccatagctgggggtgaacaggccgcccgcctgaagaaactacaagagcaagagaaacaacagaaagtggagttt

SEQ ID NO: 529002 - DNA, 85 bp, Homo sapiens
gaccacagttacatgtatggagaatggctggtctcctactcccagatgcatccgtgtcagatccagacacattagtcaagctgca

SEQ ID NO: 529003 - DNA, 95 bp, Homo sapiens
agacccacagctgttaaagcaacagattttctgccgaggaactgagaggaatttggatctttcctggagtgaactgaagaaagaagttactttag

SEQ ID NO: 529004 - DNA, 76 bp, Homo sapiens
accgagagcgcgaatatcgtcatcgttagaaggtggtgccaccaccacaacagaatgatcttgagattcctgaaag

SEQ ID NO: 529005 - DNA, 90 bp, Homo sapiens
atttgagcccagctgcctggatgccttcccaaacctgaaggacttcatctcccgatttgagcatttcagcaggaacttgatgcaaggcat

SEQ ID NO: 529006 - DNA, 98 bp, Homo sapiens
acaagacaccatccagctccaagaaagtcacctttgggctgaacagaaacatgactgccgaccttctgccagaaagggggcctgttgtgcacgcttca

SEQ ID NO: 529007 - DNA, 82 bp, Homo sapiens
aaggagaggagaaaaacactagaaacatatcagcagctgttttaccttttacaggtttgtggtaaatatgccagctctagaa

SEQ ID NO: 529008 - DNA, 98 bp, Homo sapiens
caggagagctggagtcaggcggagaccgcaggctgaccccgcagcggccgggctgtcgcggcccccacctcagtagagatggggtttcgccatgttgg

SEQ ID NO: 529009 - DNA, 83 bp, Homo sapiens
cattctgtgccagacatgtcttggagaaaacccatatatccgaatgagtttacccctcaatcccaaacctttcctcaatggac

SEQ ID NO: 529010 - DNA, 98 bp, Homo sapiens
aactctgtccattgtgaacacgtggaagatgaaggagaatccagttttagaaagagcgttttcgctacgtaaagcacattcgataaaggatatggaaa

SEQ ID NO: 529011 - DNA, 98 bp, Homo sapiens
aagccttttccgttgccggtgccggcctagcgtcctggaattacttcaatcaagttctaaggcccagcagctactacaaggattgcaagccagtgatg

SEQ ID NO: 529012 - DNA, 98 bp, Homo sapiens
gaacattcctgctcttgttggcaaagagccttcacgtaaatgggtccagtcatgcctcccagtaagaagccagaaagctcaggaattagtgtctccag

SEQ ID NO: 529013 - DNA, 51 bp, Homo sapiens
aaaggatttggctttatccgcttgcatttgacattgtgcagcaaagaaatg

SEQ ID NO: 529014 - DNA, 95 bp, Homo sapiens
agtgcttcgttttgtgaaaggccaatttcatgaatttcaagagagtaccattgggggtccagaggtgtccttctaaagctggtagaggtttcacg

SEQ ID NO: 529015 - DNA, 75 bp, Homo sapiens
gatttgttaaggattccaagtaactcttatttggtggacatgttgagtgaaattaacattgctccccggattctc

SEQ ID NO: 529016 - DNA, 100 bp, Homo sapiens
gagccaaagaggagccggccgcgcgggccgggaggggacggccgccggagccgcgaggccaaatcaggatcctcatgaccagccaaagagaagaagaatt

SEQ ID NO: 529017 - DNA, 97 bp, Homo sapiens
ggcagtgaccaaggagctcttacagatggacctgtacgcgctgctaggcattgaggagaaggcagcggacaaagagctattatttcatcaaacatgt

SEQ ID NO: 529018 - DNA, 100 bp, Homo sapiens
cagatcttgaagtgtgtagaactactactttcaagaaatgctgatccaaatgttgcttgtagggaaacagaagtacctgtgcgccagcagaaatgattgc

SEQ ID NO: 529019 - DNA, 83 bp, Homo sapiens
acaagaactgccttcatccatcaccgggagcaagtgtggaagagatgcatcaacatttgtactttggaagtgttgctgaaatc

SEQ ID NO: 529020 - DNA, 80 bp, Homo sapiens
gcgtgggggaccggctgttggcggcgtccgtctccaagagagtatgaagagagtgcgtctgtagggcagggaagatggcg

SEQ ID NO: 529021 - DNA, 82 bp, Homo sapiens
ggcagattcgccaagagaagaatctaacaaacggcaaagaacttactgattcttgaggagaaagttctgccactaatgaacc

SEQ ID NO: 529022 - DNA, 100 bp, Homo sapiens
atgacgacttctccttctacatctaccatctgtactggtgggagttcaacgttcacagcaagctcaagctggctttaaaggagatagatgaagttgggga

SEQ ID NO: 529023 - DNA, 76 bp, Homo sapiens
agtctccaaattcgcctccatctgtaccatgctgagatctgtatctgtggacctgaatgttgatccctcgcttcag

SEQ ID NO: 529024 - DNA, 88 bp, Homo sapiens
ccaaagcacattcccacagagaaagtcaaggctgtggataccacggccaacgcagagagccaacagcagagagaacaactggaacgcc

SEQ ID NO: 529025 - DNA, 104 bp, Homo sapiens
ggaggaaggaacgaggcaaggagctaaagcagcgtgcgttcagccctgggtgtggacgaatgtggaacctcgctctgtggctgtgttcccttggcactccttag

SEQ ID NO: 529026 - DNA, 74 bp, Homo sapiens
cagcacactcctcgcgagcaagggagaacagatcccattccaatcgttgtcaagtatgatgtcatgggcatggg

SEQ ID NO: 529027 - DNA, 101 bp, Homo sapiens
agccaaaggggactatcctctggaggctgtgcgcatgcagcacctgaattatatccagatcgagagacagaagattctgaaagggttcaatgaaatgagag

SEQ ID NO: 529028 - DNA, 137 bp, Homo sapiens
cccgagtgccggcttctcccctacgcgctacacaagtggagctccttttcctccacctaccttcccgagtactaggttttgacaagcttgcatcatgcgtgagtataagctagtcgttcttggctcaggaggcgttg

SEQ ID NO: 529029 - DNA, 74 bp, Homo sapiens
gggtccatgggagcaagattagtggctgctaaacttgaaccgaaaagaattccaggttaccgagttggttgtta

SEQ ID NO: 529030 - DNA, 75 bp, Homo sapiens
cagggaggtccagatgaaaaagaaaagactaccgcactgaaaggatgaagccccacccgcccttcaggatgccag

SEQ ID NO: 529031 - DNA, 75 bp, Homo sapiens
gagacagaagcagatggattcgtccttttaggtcagcagcaaggacaagatggagtaaaagtccagcaagctact

SEQ ID NO: 529032 - DNA, 75 bp, Homo sapiens
ccgagctcgatccgctgctcgcacgggagccagctgggtgagatcatcttcagacaccaacgaaagtgaaataaa

SEQ ID NO: 529033 - DNA, 51 bp, Homo sapiens
tccgtctggatcacggatgtaggaagtgctgcagaaccttggcctgaaaat

SEQ ID NO: 529034 - DNA, 90 bp, Homo sapiens
tgttaggcgtggagagggagtgatgtcttccagactcggtgctgtacccgccttcaaacgatatgtcaataaacttcgaagcaagagtac

SEQ ID NO: 529035 - DNA, 98 bp, Homo sapiens
gcgattcctgtctaagaaaaggaggatttggcatccgcttcgatcctgaaattccgcaaacactacgactagagtttgctaaggcaaacacgaagatg

SEQ ID NO: 529036 - DNA, 115 bp, Homo sapiens
gcagagctgggctggacggccaatcctgcgtccgggctgtgaaagtgaagtttggcttgaaaacacattctgccagtgcaaatccaaaaagtatcaagacaggattcttctacta

SEQ ID NO: 529037 - DNA, 90 bp, Homo sapiens
cgcctacttcctggtgtcgatcgccggcctcctctacgcgctgcccacagagcagttcaacgggcagggcgccagcttcaacgggggcag

SEQ ID NO: 529038 - DNA, 83 bp, Homo sapiens
tgatgaccaagagaatgtgtcagccgatgcaccgagtccagcccaggaaaatggagagctgtgagtaccagagtgcccactgg

SEQ ID NO: 529039 - DNA, 100 bp, Homo sapiens
cagccttgtctcggccacctcaaggataatcactaaattctgccgaaaggactgaggaacggtgcctggaaaagcttcatgattgtatccaaaaaacctt

SEQ ID NO: 529040 - DNA, 86 bp, Homo sapiens
agctccaggagttcgtctcttacgtctgcggaagtgcagctgcctcagttcttagcgcaggatttctctctgatcaaacggacagt

SEQ ID NO: 529041 - DNA, 102 bp, Homo sapiens
tgatggagattttgatgtggatgatgccaaagttttattaggagtatgctgctgctgttccgctttgcgtcctcgctacaaacgcctggtggacaacatatt

SEQ ID NO: 529042 - DNA, 96 bp, Homo sapiens
gcctatccaaggacatgagcagtttacacatctcacccaattcaggatgtgtgaacctattgggtactgtacaacttcaagcctcgaaatcagata

SEQ ID NO: 529043 - DNA, 50 bp, Homo sapiens
aagggcatgatgcctccactagtctggcgtgctcctgatcagagttactc

SEQ ID NO: 529044 - DNA, 75 bp, Homo sapiens
tcagccccgacaatgtggtccggaaacaggcagaggttatatacaggcatgtagaggacttatgatcgctgctgt

SEQ ID NO: 529045 - DNA, 100 bp, Homo sapiens
gcggcggcagcaggaggacaaggacatccagatgaagggcatcatcagcaggaagatgatccctatgatcttgaagatgtttctgcacagaaatgaggga

SEQ ID NO: 529046 - DNA, 75 bp, Homo sapiens
gcgatggaataatgcccagcggcccgccaggtcccggttgcacgttttcaaaaaatacctaatggtgaaaatgag

SEQ ID NO: 529047 - DNA, 98 bp, Homo sapiens
gggaggatgtcgggacaccccggaagctgggaaatgtcaagctacaacttcaagcagaagagagaggagttgtgtctatcaaaggagtgtgtgctaac

SEQ ID NO: 529048 - DNA, 96 bp, Homo sapiens
acttcaatatttgcaggacaaaatgatcccttgaaagacagttacggctccagcccccttttggacatcgttggcggccggaaggcgaggccccgc

SEQ ID NO: 529049 - DNA, 100 bp, Homo sapiens
aaaacaatagctcaaggaaacctttccaacacagatgtccaagctgccaaggatgtggaagatccagaatacaaacctgccccagccatctttaaagatg

SEQ ID NO: 529050 - DNA, 100 bp, Homo sapiens
gccggttcagagcaaaccgcagaagttcacctctgggggacagaggaggttgctgcctggctggagcacctcagtctctgtgagtataaggacatcttca

SEQ ID NO: 529051 - DNA, 98 bp, Homo sapiens
cccggtgcagctagaagtccatatcggaaatgctctatgtacagtgaagtgtgatgagaaagtgaaagtgttttctgtccgtggaacatcctttgatg

SEQ ID NO: 529052 - DNA, 75 bp, Homo sapiens
gtttagtaataggtgactgccggaaaaaagggaactttgaatattgtcaaggtccggaccctatttgtcagtggc

SEQ ID NO: 529053 - DNA, 91 bp, Homo sapiens
gtcacagtaaggccaaaaatgtgcatactcacagagttagagagagggatggtggatttaagtgccctgtatgctcaaaatttgtatcctc

SEQ ID NO: 529054 - DNA, 100 bp, Homo sapiens
tctaatggcacagacgtgaatctgaagaatggaagtggcaaggacagaataacctgaatctgctcagagacctggctgtgcacattgcccatagcctcag

SEQ ID NO: 529055 - DNA, 82 bp, Homo sapiens
ccggagatggccggcagagccgccgagacgccgaagagcccgccgcccgcgcgagtgtttgcagtgaagctcttgcctattt

SEQ ID NO: 529056 - DNA, 97 bp, Homo sapiens
tggatgattttgagggaagaaacacagttcacagggaactctaatgatccaggacaaagaagttaccctggagtatgtatcaagcctggatttttgg

SEQ ID NO: 529057 - DNA, 75 bp, Homo sapiens
gctgcgggcccgggccatggccgccgccgatgccgaggtgagcgagtgctgtgctttcatgggcctcttctttat

SEQ ID NO: 529058 - DNA, 110 bp, Homo sapiens
cgggtccgcggcgcggtcggtcggcgcctgttctcgggctgtttggcgggggctatacaaagcggaccagcggtttgggccaggtgtcgagacctaccccgatggcagcc

SEQ ID NO: 529059 - DNA, 95 bp, Homo sapiens
ccagttttaggagaggcgccgacttcgactcttggggccagctggtggaggcgatagacgagtatcagatattttgtggaagtataatactttgt

SEQ ID NO: 529060 - DNA, 119 bp, Homo sapiens
tgggcgacccggtgtgtggcgcgcccagagccccgcgtttcagccctagggaaggatttttagactctgaggagcagttggagctaatccacattatggaaatggaaaccaccgaacct

SEQ ID NO: 529061 - DNA, 74 bp, Homo sapiens
tttctggcctggaggctatccagcgatcaactcactatcctgaaggtccattctcccaagaagaggggacagaa

SEQ ID NO: 529062 - DNA, 87 bp, Homo sapiens
tgcctccaggccgctccccacggtggtgttagcacctcagcccatcccaggaagcagtcaattatagatttcttcaaaccagcttca

SEQ ID NO: 529063 - DNA, 80 bp, Homo sapiens
gaagaacagctgtggaaagaagttgcaaaacactgggtgagaagccatacaaatgtgaattgtgtgataaaggatttgct

SEQ ID NO: 529064 - DNA, 98 bp, Homo sapiens
cggtacatctgaaagccgggaaatggcaatggatttagaagtaccggtattggccaggaacatccccgggaatgctgccgtggtgaagcatgaagtca

SEQ ID NO: 529065 - DNA, 98 bp, Homo sapiens
ccaagtaactctctgtgtgaagcacctttgaacatttcacgtgatactttgtgttcagttttttgtagcatcagatccaacagttaaaacagatcgac

SEQ ID NO: 529066 - DNA, 143 bp, Homo sapiens
agaaaacataattataggaatgaaagtgcccgtgaaagcctttgtgattctcctcatcagaatctctcaagaatgctactatcattcacgatggccatgaggagaagatggaaaatggtcagatcacacctgatggcttcctg

SEQ ID NO: 529067 - DNA, 101 bp, Homo sapiens
agcctcggcgctcacctaagccgcagggagatacacccaactgggaggtggctgtctatgttccaggaagtaaaggtgcaccttcatttgttagattatat

SEQ ID NO: 529068 - DNA, 82 bp, Homo sapiens
atatcataagtggaattttggagatattcaaagcttatgtccctgatgccaaaaatgcacctactctttcctctaactctgg

SEQ ID NO: 529069 - DNA, 74 bp, Homo sapiens
tttgggggatcactgtcctctctcggcagcaggaccaccccaggacaattcaggggaagctttaaaggaaccag

SEQ ID NO: 529070 - DNA, 80 bp, Homo sapiens
gccggtcgggcggggcggcggcgctgacagatcatggaagggaagtggttgctgtgtatgttactggtgcttggaactgc

SEQ ID NO: 529071 - DNA, 74 bp, Homo sapiens
gttaaggattccaagtaactcttatttgctgaaccttcacctagccccaggattacaaggaaaagcaccaggca

SEQ ID NO: 529072 - DNA, 85 bp, Homo sapiens
ggcccatcaccggcagaacacagcagggcggaggaaagtgcagagtaacccattagaatttaaccccgatgtcttgaagaagact

SEQ ID NO: 529073 - DNA, 100 bp, Homo sapiens
gaagagctatggtgaaacaccactgaagcattgccaaggtggctgtgaaaaacaatatcgatgtcttctacttcagctgcctcatcccactcaatgtgct

SEQ ID NO: 529074 - DNA, 80 bp, Homo sapiens
agaagaccaagacccatcatgccccagaggagaggagacgccgtgagcgggacgaccagatgtaccgagagcggctgcgc

SEQ ID NO: 529075 - DNA, 97 bp, Homo sapiens
gcggcaggagccgcggagccggcgctgagaggggctgcggccggagcgggcggctgagacaaaggcgacgatgttctcagtgcagctgagtcttggt

SEQ ID NO: 529076 - DNA, 75 bp, Homo sapiens
ggagtattaaatccagctagagaatggcatgtgcaaagatacagaggcaacttcagagtggacgttggattaccc

SEQ ID NO: 529077 - DNA, 76 bp, Homo sapiens
tgttggtagaaaaagcaagagtttgttatatagcaagtcctgtgtatggaaactcacatgagtcagctcagtctag

SEQ ID NO: 529078 - DNA, 83 bp, Homo sapiens
gcggcggcagcagcagtgagaggagaactacgatgacccgcacaaaacccctgcctccccagttgtccacatcaggggcctga

SEQ ID NO: 529079 - DNA, 75 bp, Homo sapiens
tatcactcatcacagtaacttacgctggagtcacatcagaagccgcgcagactatcaccacggctcctgatgcct

SEQ ID NO: 529080 - DNA, 96 bp, Homo sapiens
catttctccgccaattcaccttgactctgagctagaaagaccctctgttaaaggtacatctccgttcatggatgcattaacagccaatgggacaac

SEQ ID NO: 529081 - DNA, 82 bp, Homo sapiens
gcagaagtcgcgtgtctaggtgagtcgcggtgggtcctcgcttgcagttcagcgaccacggctatggctttgtggaattctt

SEQ ID NO: 529082 - DNA, 101 bp, Homo sapiens
ttgaactttattgtgaacaggtagagtacctgttgttgcagagttattttctgagtcagtttcaggacccagatgatgtggtaccagttggccaaagaaga

SEQ ID NO: 529083 - DNA, 82 bp, Homo sapiens
aaaggactgatttttagaactccacatttgaggccaagtcctgtatctgccatgtctgtggcgtccacctcaacaggctgca

SEQ ID NO: 529084 - DNA, 50 bp, Homo sapiens
gagaaacccagccgaagcatttaaaaggaatcacccttcggtcatcgtgc

SEQ ID NO: 529085 - DNA, 75 bp, Homo sapiens
cgggcgccaccgctgccacctccgcgagctcaggaatcttgcttttaagaaaattccccagaaatcctcccatgc

SEQ ID NO: 529086 - DNA, 75 bp, Homo sapiens
tagacatcatgccagggctggaaactgctgtcgtctttcaagaaaagaatgccagaggattcaacatgagcatac

SEQ ID NO: 529087 - DNA, 103 bp, Homo sapiens
ctgtgaagctggggaagacgcagaaggtgaaggtgctcacgggcacggcggaaggagagttttacatggaagtggcttacagaaacttggcgctgaggtgcag

SEQ ID NO: 529088 - DNA, 83 bp, Homo sapiens
cttaaagccagctccccggcaccacggatctgacccggatcgcaccccctccctccctggcggagcccctgaaggagctgttc

SEQ ID NO: 529089 - DNA, 100 bp, Homo sapiens
ggggagccatggcggctgacagtcgggaggagaaagcttctgaaagttctgctgaagacagtgagcaggaagatgagagaggtgctcaagacatggataa

SEQ ID NO: 529090 - DNA, 80 bp, Homo sapiens
cgccctgctccgcgtcctcagccgctacctgctgttggccaggaggctgggaagctggaggaggtgatgcaggagctgcg

SEQ ID NO: 529091 - DNA, 83 bp, Homo sapiens
ttcttgaagaaagacagatcctgtgtcacccggcaactcagaaacatcaggtccaagctctggcgacggcgcttgacgtgggc

SEQ ID NO: 529092 - DNA, 97 bp, Homo sapiens
ttctgctcaccaacagatgaagacagatgcaccaacgaggtggagcagttctggaggttttatagccacatggtacgtcctggggacctgacaggcc

SEQ ID NO: 529093 - DNA, 75 bp, Homo sapiens
caacctcctcatccagatgagtgctgtgcctctggttttcctttggaatatggataaatacaccatgatacggaa

SEQ ID NO: 529094 - DNA, 50 bp, Homo sapiens
cttcttcgagtatttgtagaaggatgatgatgtgcctgcagatatggttg

SEQ ID NO: 529095 - DNA, 88 bp, Homo sapiens
ccgctgcccgacgagcaggacttcatccaggcctacgaggaggtgcgcgagaagtacaaagccaagaaatatttttcttcatggccct

SEQ ID NO: 529096 - DNA, 90 bp, Homo sapiens
ggaggtgtcacggctgcggatgctgctcaaggccaagatggacgccgagcaggatcccagacagctcggggctccgtctctggaaacgcc

SEQ ID NO: 529097 - DNA, 75 bp, Homo sapiens
tctggggttccctatgcaaatgccaaaggaattggttatccagatggcgtcccatgtagagtgccgtcctctggg

SEQ ID NO: 529098 - DNA, 100 bp, Homo sapiens
ggcatatctagggagagtttctgtgtgatttacctcaactggatagagtactgctcttcccgaagagcaaagattctcttcctggacattctgttgccct

SEQ ID NO: 529099 - DNA, 75 bp, Homo sapiens
caagttcatggtcacggagaaggcagcctacataggcttgccgctgttccgtaacccagtgattccagtcttggc

SEQ ID NO: 529100 - DNA, 74 bp, Homo sapiens
catctgtaccctgaagaacttccctaatgccatcgagcacaccctgcaggctctgaggccatggctgcagggct

SEQ ID NO: 529101 - DNA, 85 bp, Homo sapiens
gctttctctcagaactcatcaaaaaggaagtcctgacggccacgctggatctggaggacgtccggagctacagggcggagatttc

SEQ ID NO: 529102 - DNA, 88 bp, Homo sapiens
gtagaaacaccaacaggatacattgaaagatatggaatatatgaacgctgtcgagaattggtggaagcaggttatgatgtacggcaac

SEQ ID NO: 529103 - DNA, 75 bp, Homo sapiens
gccattctggattccagaagatttaactacgtggtccggggtcccgggattcttgagctgtgcccagctgacgag

SEQ ID NO: 529104 - DNA, 83 bp, Homo sapiens
caagaagatcatcattaaggacggaggcacgacctttgggctcttggatgcataatataccagcttgtggcaggactcccacc

SEQ ID NO: 529105 - DNA, 80 bp, Homo sapiens
gcctgggtggttgttggcgtgtccctgcagcgaaggatcctggggaacgcccttttgcttgtgactggcagggctgcgac

SEQ ID NO: 529106 - DNA, 75 bp, Homo sapiens
gagccgccgcgcgcccgcgccctccgcgcgacgccaggtgtggacactgccagcggctgcagccgacttggaatg

SEQ ID NO: 529107 - DNA, 50 bp, Homo sapiens
agaacatcatttgcgggacaaggaaaaaagtaatcctcttggaaagctgg

SEQ ID NO: 529108 - DNA, 101 bp, Homo sapiens
atgaaaggcggctcgaagggatactggttcgtccttactgcggaaagcttgtcctggtataaagatgatgaggtcaaaggcaacagaactggaccaagaaa

SEQ ID NO: 529109 - DNA, 100 bp, Homo sapiens
agtgtcttctccatgctctgctgcttctggcctctgggcatcgcagccttctacttgtcccatgagatcaatgagctcagccaggtgcctcccccggtga

SEQ ID NO: 529110 - DNA, 75 bp, Homo sapiens
aagatggacgccgagcaggatcccagtgcccactcccacatccggggactggggctggacgatgccttggagcct

SEQ ID NO: 529111 - DNA, 75 bp, Homo sapiens
ttagaaggttctggtcttgcactaagatacttggcatatcgaaattttatgattgacacgtatcgtctaaacccc

SEQ ID NO: 529112 - DNA, 144 bp, Homo sapiens
aaccactgtcccaatgccatccagagctgtgcctcccagcaccacagtccttctgcagtccctcgtccagccacccccagtacgtagagaaatcgacactcttaatgaacgtttagctgctgaaggacaagcgattgatggagc

SEQ ID NO: 529113 - DNA, 74 bp, Homo sapiens
gccctcctgcagcacgtggccctgcagtttgagccaggacccctgggctgtgcttcctggaagtggtattatcc

SEQ ID NO: 529114 - DNA, 87 bp, Homo sapiens
gaggaccagcagatggccagtcacgagaacccaggtgtttgccgcctggtcctggtcgtgctgagcctgtggccagatacagctgtc

SEQ ID NO: 529115 - DNA, 100 bp, Homo sapiens
gtttaataatgatagaatgaagaccacaataaaagagacctctacttagctcagcaattcttaccttattctgctcctaagtgtaggagagaacttggtg

SEQ ID NO: 529116 - DNA, 82 bp, Homo sapiens
ctttgggcggggcggagccgagagccacactttcaagtaaaccagggagtggagcttggtttcgggatctcggtgctgcaga

SEQ ID NO: 529117 - DNA, 76 bp, Homo sapiens
ggatcttgtgaggaggatcaaaatgttggagtatgctcttaaacaggaaaggaacatgcttgccaactcagccagc

SEQ ID NO: 529118 - DNA, 100 bp, Homo sapiens
ggaaggaggcctgcaaattcatgacaggattattgagctggagaatgctggaggagaccttaaggatggccaccaccactatgaaggagctgttgtcatt

SEQ ID NO: 529119 - DNA, 74 bp, Homo sapiens
tattgagatgcagctcacatcagcaaaatggatttcaaatatgcgtgcattagagaatgattttttcaattctc

SEQ ID NO: 529120 - DNA, 99 bp, Homo sapiens
gaagaaatccgcagaagcttattaaagttaaggtcaatgcatcacgtcaagaagccaaattgacagaggagtgtgatcttctcattgagatcattcagc

SEQ ID NO: 529121 - DNA, 100 bp, Homo sapiens
cgttccccgccaaccgcaaccattgacgccatgtcgggttattcgagtgaccgagaccgcggccgggaccgagggcctgcctcgtcccctcagctttcac

SEQ ID NO: 529122 - DNA, 75 bp, Homo sapiens
tgggtcccgccgggtctgaagcctgaacagggggcagctggcattttatgctatgtgggagcctatgtcttcatc

SEQ ID NO: 529123 - DNA, 99 bp, Homo sapiens
actccattaataaaccccttggctggaagagctccttatgttggaatcgaagcctcttaaaatggcagatgacttggacttcgagacaggagatgcagg

SEQ ID NO: 529124 - DNA, 83 bp, Homo sapiens
gtggatctcaagtactaccggccaactgaagtggtcaaaatgcagatcttcgtgaaaacccttaccggcaagaccatcaccct

SEQ ID NO: 529125 - DNA, 135 bp, Homo sapiens
tttgtcttcaggatcaggttcacaagaaaccaagatcccaatcagtctagtactaagattaagttcaacctggtttgtgatcggaagcacctgaaggacaccacacagtcagtgttcatggctgggctccttgtt

SEQ ID NO: 529126 - DNA, 74 bp, Homo sapiens
accaccggccgcctcagccatggacgcgtccctggagaagctgtcgcctggttgggcccggaaatgggacgtcg

SEQ ID NO: 529127 - DNA, 96 bp, Homo sapiens
ctgcgcatccccgcggacgccacagcgctgtgctgactctggctgcccaggagctgtctaggcctgggtgcctcgggaggactccccaacctggct

SEQ ID NO: 529128 - DNA, 87 bp, Homo sapiens
cagacatggggaacagggtcacagctctcacccagatggaggacctgtatgaagacttccacatcgtgaagctgccgctgttacccc

SEQ ID NO: 529129 - DNA, 100 bp, Homo sapiens
cccctggcagtgcttagagccttcaagatgtcttatggtgaaattgaaggtaaattcttgggacctagagaagaagtaacgagtgagccacgctgtaaaa

SEQ ID NO: 529130 - DNA, 75 bp, Homo sapiens
agaaccgtttggcaatatgtacgacgcggatgagggatgggactgaggaagacccacaggcagaactggccatca

SEQ ID NO: 529131 - DNA, 83 bp, Homo sapiens
cttgaggacctactcacagataggaattgaaggagcatggggaagtgattgactgtgtgcaggagctgagccactccgtgaac

SEQ ID NO: 529132 - DNA, 75 bp, Homo sapiens
gctacacacgtgtgcccccactggccactcctcaggatagtcaggaaggaacctttgggtcagagcattcagcgt

SEQ ID NO: 529133 - DNA, 89 bp, Homo sapiens
caaacacaccttgaaccagattgatgaagtaaaggtgtggcctcaggttgtggaacttttagcaagtgctcttatggacttggtacaag

SEQ ID NO: 529134 - DNA, 90 bp, Homo sapiens
cggccgccgcccccatcatcagctcggtccagaagctggttctgtatgagactagagcttttggaccagaaaatccctttaggacacagc

SEQ ID NO: 529135 - DNA, 75 bp, Homo sapiens
tggcaagctacaataatggggccaactgactggagctctcccgtgtcagctcgtagcacagaaggtgaagagcct

SEQ ID NO: 529136 - DNA, 101 bp, Homo sapiens
caaccaggaggcagtaaattcttcagctgctcggacagatgaagctccccaaggagctgcagggctgcttccccaagcccacagtctgtaagaagggtctc

SEQ ID NO: 529137 - DNA, 100 bp, Homo sapiens
agcagtgatgtggaggtggagacccacaggagccccggacttcacctgagctacctcagttcctctgtgacgagggtgcaggtatctctggggactacat

SEQ ID NO: 529138 - DNA, 100 bp, Homo sapiens
tagtagctgccttctgctctccagcgctctcagcaccaatttctcttcagcaacgggtagcagaattggaaaaaattaatgcagaatttttacgtgcaca

SEQ ID NO: 529139 - DNA, 90 bp, Homo sapiens
gctccatcaccacttcccaagatggctgatgtctcagcagaagaaaaggagccagcaccgctctttgaccttgccatgcttgccttagat

SEQ ID NO: 529140 - DNA, 100 bp, Homo sapiens
aagtgaagatggccaccaaatcatgccccgagtgcgaccaacaggggaaaagagtttctttttacaaacgagcccaaatccttgtagcagatacgtggag

SEQ ID NO: 529141 - DNA, 100 bp, Homo sapiens
cttggagaacttcatacacttcgagatcagcatcttaacaattcatcatgtatccttacaccaagcgatgagttccagttttggatagaacaagctcacc

SEQ ID NO: 529142 - DNA, 90 bp, Homo sapiens
tcttggtccgcatcgacagtgctccaggacttggtgacttcctccagcttcacataataccattgttcttatcgcttcaatagcagttgt

SEQ ID NO: 529143 - DNA, 100 bp, Homo sapiens
gatattgacttggattttttttcagtcaagaatcccttcaaagaaatgttcactcagagccgagactgtctgaagctgggcccacctgctgagggagaag

SEQ ID NO: 529144 - DNA, 75 bp, Homo sapiens
gccccgcggccaacatgagcttcttgttaaacctccacagctgttgagaaaaaggagaaacctcttccaagactt

SEQ ID NO: 529145 - DNA, 50 bp, Homo sapiens
gccagagcccacagaagcatggaagacttcatctgcagagagaaagagac

SEQ ID NO: 529146 - DNA, 82 bp, Homo sapiens
cgggtagtcgggaggaggagagcttcacctgtcggcttggagagatccaggagcaggccgggctctcgccatgggtcactgt

SEQ ID NO: 529147 - DNA, 50 bp, Homo sapiens
cttcactgtgcgtgctgaccatggtggtgatcgtggcagaggtggccctg

SEQ ID NO: 529148 - DNA, 74 bp, Homo sapiens
atgtcttccagactcggtgctgtacccgccaaagttgaagttgatggtagtttaagtgatagccacgtatctcc

SEQ ID NO: 529149 - DNA, 100 bp, Homo sapiens
aggacattctgaaggtgctggtgtccgaccttaaccgttccaatggggtagcgctccccccattggacaagtggaagatgcaccgtggcctggcggcgag

SEQ ID NO: 529150 - DNA, 98 bp, Homo sapiens
acagtccttctgcagtccctcgtccagccacccccagagctatttatgaagaaattgatgctcaccagcacaaaggagctcaaaatgatggtgactga

SEQ ID NO: 529151 - DNA, 100 bp, Homo sapiens
gtcccggccttcatcgacatcagtgaagaagatcagtacttcctcgcgtattgctaaaggaggagttgaccacaccaaaatgagtctacatggtgctagt

SEQ ID NO: 529152 - DNA, 100 bp, Homo sapiens
caagaagtcattgaaacccttctctctctggaaaagcagactcgtactcaggagcgtctgcagcaggagcgtcctcagctggaccggctgaaaacccagc

SEQ ID NO: 529153 - DNA, 100 bp, Homo sapiens
cacgacaccggctacttctcagctttaccatccctggaggagacctggcagcagcaatggaagagttaatagttgaacttcgtctctttcttgaactcct

SEQ ID NO: 529154 - DNA, 75 bp, Homo sapiens
agtttctccatcatcccctgctttgtcttcgtggagggattcacaacactcccgtggccaatgcccattggtgag

SEQ ID NO: 529155 - DNA, 90 bp, Homo sapiens
ggattatcagcagttttatcaacaacaagctggaggattggaatctgatgcatcatctgcatcagatatgtcttgtcgttcaagacttgc

SEQ ID NO: 529156 - DNA, 100 bp, Homo sapiens
gcctgcggctctctacgtccctgcggagcagccgccttctttgaatcctggggggagccagtcatctgatgtggtgcttttgaaccactggaaagtgagg

SEQ ID NO: 529157 - DNA, 100 bp, Homo sapiens
cctagagcaggaggccaagcggcagagattgccaatgccaagtccagagcggttagataaggcccccaggagctggtgacgcaggcgcttgctgtcctcc

SEQ ID NO: 529158 - DNA, 98 bp, Homo sapiens
taccacgacccagatcccagcggaaaggagcgcgcctctttttggcttggggagctgcagcgttcgttaatagctgaatgccaacaactaaaggaaga

SEQ ID NO: 529159 - DNA, 80 bp, Homo sapiens
ctataaaaatcatggataaaaacacactagggaaatacatatcgaatgattgaacaagatgactttgacattaacaccag

SEQ ID NO: 529160 - DNA, 101 bp, Homo sapiens
ggatgaccttaaactgtatctggagacacacttgaggagagaaatgactggatcagcatactattaaatgcactgaaatcacaatcccttacctcgcagtc

SEQ ID NO: 529161 - DNA, 75 bp, Homo sapiens
atcgaccagaccatgctctccatcctgctcttcttccacaggaactgtggctgcaccatctgtcttcatcttccc

SEQ ID NO: 529162 - DNA, 100 bp, Homo sapiens
ccgaggtgttgcggacgctggccgctctgcttatgataatgtcaacaaagttcgagtagctatcaagaaaatcagcccctttgagcaccagacctactgc

SEQ ID NO: 529163 - DNA, 50 bp, Homo sapiens
gagcagtaagggactgagctgctggattacttccttaggatagattgcca

SEQ ID NO: 529164 - DNA, 100 bp, Homo sapiens
ttatttctgtgggcagacattaacattcagggtggttctcttcccaaagtggaagccaaattcatcaattatgtgaagaattgcttccggatgactgacc

SEQ ID NO: 529165 - DNA, 78 bp, Homo sapiens
agccagtgaagataatgaatgtcgaatgtgactgactagcagcttcattttgaatttgttgcatattctaaggaccca

SEQ ID NO: 529166 - DNA, 100 bp, Homo sapiens
aatgtttgacgacactgatggtttgatttgataatgggctgcattaaaagtaaagaaaacaaaagtccagccattaaatacagacctgaaaatactccag

SEQ ID NO: 529167 - DNA, 91 bp, Homo sapiens
gacgtggttggtgattggcaggatcctggtatccgctaacaggtactccaaagattcaggtttactcacgtcatccagcagagaatggaaa

SEQ ID NO: 529168 - DNA, 83 bp, Homo sapiens
tgtctagttgcaggaaaacaagctcagggctcccacggattctacattatgaatagcctaacatggcagaccagagacagcgc

SEQ ID NO: 529169 - DNA, 50 bp, Homo sapiens
ttgaagtctgggatgtagtagacaaagccttctacacagcggcgcccctg

SEQ ID NO: 529170 - DNA, 51 bp, Homo sapiens
cggcaagctggctgcgagcggctgaggtcttgggcgtctttggtactggct

SEQ ID NO: 529171 - DNA, 50 bp, Homo sapiens
gtggaggggagccaggcggccgcctcagggtcctgaggacaccgtgagcc

SEQ ID NO: 529172 - DNA, 83 bp, Homo sapiens
gaggagctgggtggtcccagcctggagctgtgccagcctgacatgggtgacttaagagattaaaattaatttggttgctgttg

SEQ ID NO: 529173 - DNA, 75 bp, Homo sapiens
actctgacggtgaccaacttattagaaaagggtgctggagaatctggtaaaagcaccattgtgaagcagatgagg

SEQ ID NO: 529174 - DNA, 98 bp, Homo sapiens
agacagtggagggagcagggagcattgcagcagccactggctttgtcaaaaaggaccagttgggcaaggttgcccccaagtttcctggcagtgtgtga

SEQ ID NO: 529175 - DNA, 119 bp, Homo sapiens
tgggaccctggattttcggacactgagcgccatggccctgcctctgctgccgggcaacagcttcaaccgcaacatggactagaggcttttaccagatttcttaaaactgaattcagtga

SEQ ID NO: 529176 - DNA, 76 bp, Homo sapiens
aatgtggaaataacggagcaacttgctaatggcaggcattttacaaggcacctacaaaggcagcacctaagcaaaa

SEQ ID NO: 529177 - DNA, 74 bp, Homo sapiens
ggacggggtcgagtcagtgcgttcgcgcgagggccaattcctgtccccccagcagcatggcatcgtgtgctgaa

SEQ ID NO: 529178 - DNA, 82 bp, Homo sapiens
agctaaagcagcgtgcgttcagccctggggaaaacgcagcacagttcccttgaccagagttctccaccccagagcggagtgt

SEQ ID NO: 529179 - DNA, 100 bp, Homo sapiens
caaatttgaaaactttgaggatgcagcactggaagaaaatggtttggctgtgataggagtatttttaaagggatcgatttgcttagtggtataatacctg

SEQ ID NO: 529180 - DNA, 74 bp, Homo sapiens
cgccaacgcggtcatctcgcagaacgccatcaaccagctacagaaccaagttgtattgttagacacactggaac

SEQ ID NO: 529181 - DNA, 113 bp, Homo sapiens
cgtgcctgtcttcagatcttcacagcacagttcctgggaaggtggagccaccagcctctccttgcggtcttgcgagtggctggttccctgcagaagagcacagaagtgatgaa

SEQ ID NO: 529182 - DNA, 82 bp, Homo sapiens
tccgccgccaccacccactccggacacaggacagaactgtaccgctctctttttggccagctccaccctcccgacgaaggcc

SEQ ID NO: 529183 - DNA, 75 bp, Homo sapiens
cattcattcatttgagcatagcaagaattgagttcttctcagactttatcacatgatggaggattcttcaataga

SEQ ID NO: 529184 - DNA, 74 bp, Homo sapiens
tcttatcaaaatctaaaccctcacaagagctgttatttatctgaaagaagcatcagatggtgaaggagaaggag

SEQ ID NO: 529185 - DNA, 100 bp, Homo sapiens
gtttttggaagtaacaagtgccaccagtctgcagatttgcaaggatgtcatggatgccctcattctggtctcctctgagcctccggcctccataagaccc

SEQ ID NO: 529186 - DNA, 75 bp, Homo sapiens
gggatgtgccttagaggattatgggtggtcagaatggcttcaacattcctcaagtcaccccatgcccagaagtag

SEQ ID NO: 529187 - DNA, 90 bp, Homo sapiens
tttctctgcagcaagaggaaaggaaagatgtgttcgggtttttctagaacacggagctctattatcaagtcctaaattttggaatgattg

SEQ ID NO: 529188 - DNA, 100 bp, Homo sapiens
gaggatttggcgctgcagaaccagatccgggagcacgtcatctccatcgaggatctgccgacaccccaggccatcgagccccaggccatcgtgcagcagg

SEQ ID NO: 529189 - DNA, 100 bp, Homo sapiens
ggactcagaggccgccatcaaccgccagatcaacctggagctctacgcctcctacgtttacctgtccatgaatatcctccgaatcctaaatctagagctc

SEQ ID NO: 529190 - DNA, 90 bp, Homo sapiens
cccgaggaagtgcaagacccgacggatgtttccagtcctaaagattagtgtcacagggttggaccccaatgccatgtactccctcctgct

SEQ ID NO: 529191 - DNA, 90 bp, Homo sapiens
cgtggtgaaggtccggggcttgccctggtcttgctcggccgatgaagtgcagaggtttttttctgatatttggagttcttacaacatggc

SEQ ID NO: 529192 - DNA, 120 bp, Homo sapiens
ctgctggtggtgttgtcgtggccggagcggcccgcgcctgggctgccggcacttcgcggcagacaatgcagatcttcgtgaagactctgactggtaagaccatcaccctcgaggttgagc

SEQ ID NO: 529193 - DNA, 75 bp, Homo sapiens
acacgccgccatccgggaggcccagggaaggtcccactctatgaccagtgggaggatgtgatgaaagggatgaag

SEQ ID NO: 529194 - DNA, 79 bp, Homo sapiens
catccctgtgctgcctggcaaagtgtaaccagaacacatgatgttttaaagaatgcaaggactaacctagagttaagga

SEQ ID NO: 529195 - DNA, 83 bp, Homo sapiens
ccgcactgtcgctgcccgcctgccctgaggagtccccgctgcttggactgttccctgatgtgggtggaggttatttcttgcca

SEQ ID NO: 529196 - DNA, 98 bp, Homo sapiens
cagagagggaatggtgcaggcaggcgctgagaaggacgcgcagtccatctctctcaggttggactccatgaaagaattgcacaaaacaaatcgacagc

SEQ ID NO: 529197 - DNA, 75 bp, Homo sapiens
cacatcctgctgtccagtcagacctcggataacaatgccctgacacctgaggataaaagaatcagagtgtctcaa

SEQ ID NO: 529198 - DNA, 101 bp, Homo sapiens
ggccgctcacccgtggaaagtacaggtcctgacagctgagccccccaagatgaacccagtggtggagccactgtcctggatgctgggcacctggctgtcgg

SEQ ID NO: 529199 - DNA, 75 bp, Homo sapiens
gcagaactgggttctggactttgggcgtcccattgccatgaatgagtccctggaacgccagatgcgtgaaatgga

SEQ ID NO: 529200 - DNA, 101 bp, Homo sapiens
tggggctgtttggaaagacccaggagaagccgcccaaagaactgaataacaagcctttgtattcatttgaagataatgcagactatgtttatgatgttatg

SEQ ID NO: 529201 - DNA, 100 bp, Homo sapiens
aaaggcctgggcctgagaactgaatcagcatggagcagatccaactaaaaagaacagagatggaaatacacctttggatttggtaaaggaaggagacaca

SEQ ID NO: 529202 - DNA, 75 bp, Homo sapiens
ggagatggtcaagaatcgctctataagatctgcaagggccgttgctccagggagaactgcaaatatcttcatcca

SEQ ID NO: 529203 - DNA, 100 bp, Homo sapiens
ctgactcctgcttcccgggtgttgctcgtggaactctaatgatccaggacaaagaagttaccctggagtatgtatcaagcctggatttttggtactgcaa

SEQ ID NO: 529204 - DNA, 83 bp, Homo sapiens
gtcccagctgcgcgtcgccaaagtgacaggcggtgcggcctccaagctctctaagatgcacctacaaaggcagcacctaagca

SEQ ID NO: 529205 - DNA, 75 bp, Homo sapiens
gcggcggatggggcacgcacagagtgcaagacgctgagcaatgcagtactatactggcaattgctggagaagatt

SEQ ID NO: 529206 - DNA, 100 bp, Homo sapiens
gccaactccaatgggcctttccagcccgtggtccttctccatattcgagttcttgccagtagtctcagtccatttcgtgaaggaagatttatagagagga

SEQ ID NO: 529207 - DNA, 100 bp, Homo sapiens
ctgctcactaccgcgcccacgtgtcctgttgtgcttcattcccacaggccgcataagccaataggagctctgaacccaaaaagagcagcattcttcgctg

SEQ ID NO: 529208 - DNA, 87 bp, Homo sapiens
tggtcttcctgctggggctcatgtttgaggacatggatttgattgacatactttggaggcaagatatagatcttggagtaagtcgag

SEQ ID NO: 529209 - DNA, 75 bp, Homo sapiens
ctgtaatagaaatgtgggcagatcaactgacatccttaaagaggagttgaagccaaacagccaaattctgccatt

SEQ ID NO: 529210 - DNA, 100 bp, Homo sapiens
ttttccgcccgcgccccaggcccttgcagatcgagatttgcgtcctagagtgggaaaaaagcagaggccagggcgccgcaaaccagtccagctacggggg

SEQ ID NO: 529211 - DNA, 100 bp, Homo sapiens
atgaagatgtttccagccctgcctcggcggaccaaaggatgatgtcagttcatacagactgtattgtgtcagtgcagattttaagtacattgatggaaat

SEQ ID NO: 529212 - DNA, 50 bp, Homo sapiens
cgggccccgagtccccagctgtggtcatgtccaaagtaatggagatgttc

SEQ ID NO: 529213 - DNA, 100 bp, Homo sapiens
tcggcacgacgcgctcgacacgcgggtgcggggcgacctcggtggcccgcaggaccagtggttttggcgagtgagaaacaacagggtgatggatggatac

SEQ ID NO: 529214 - DNA, 100 bp, Homo sapiens
acaggaacaccacttcaaaataacctaattgagtgtgaaagcccagcctccgtggttcttaatgcctcaggaggactattttcactaaagatggaaacac

SEQ ID NO: 529215 - DNA, 100 bp, Homo sapiens
aatcaatgcgtggaattctcctacacttcctatttatgaggtgattacgtttttgaagaagaaggacaagttcatcagcctggtgttgaagcacatcggc

SEQ ID NO: 529216 - DNA, 90 bp, Homo sapiens
gtggtcgcccccatgctggattcccgggctgcgtactccaacttctggtgtggaatgacttcccaggaccccaccccagctgctacacca

SEQ ID NO: 529217 - DNA, 75 bp, Homo sapiens
acccgcagactccttctccagcatgggctcgcctgtcaacgcgcaggcccgtacagaattcctacggaagaaagc

SEQ ID NO: 529218 - DNA, 100 bp, Homo sapiens
aaaacagaaccttccaaatttccttttccaactaagtgtgttcctttgcttgccacgtgtcctgcaaagacggtgccccccaggtgtgcccaatacctcc

SEQ ID NO: 529219 - DNA, 73 bp, Homo sapiens
tggtctccattatttgagatgagttacatcttggagataaacaacttgatgcagatgtttcccccaagcccac

SEQ ID NO: 529220 - DNA, 100 bp, Homo sapiens
agctcctggaactttctcatcttttcagcatctcaaccctgtggaatcttttaactcccaagccaaaatgaagtttaatccctttgtgacttccgaccga

SEQ ID NO: 529221 - DNA, 98 bp, Homo sapiens
aaggcgctcatggacggaagacccctggctctataagctgaattatggcagcccagtcaagtccagttacaacacagggatcacaacaaacacaaccg

SEQ ID NO: 529222 - DNA, 82 bp, Homo sapiens
taccctgcacagccgtcaccctcaactttcccttcagctcgccctcccctacctgcggaagagtcaagggaatgtcatcaac

SEQ ID NO: 529223 - DNA, 98 bp, Homo sapiens
tcggtgcaagaaaatccatgctggcgatgaagtgattcaagttaatcatcagactgtggtgacactgatcccaactcatgactcagaagtgatgaggg

SEQ ID NO: 529224 - DNA, 74 bp, Homo sapiens
acacacctgttgccattatagagctggaattaggcaaatatggacaggaccgtataatagacgctggccccaaa

SEQ ID NO: 529225 - DNA, 88 bp, Homo sapiens
ggaatccatgtttctggacgcggatttttggcctcatactctgttatagataaacaaggctctgggcgtggggaggctgagacacggg

SEQ ID NO: 529226 - DNA, 83 bp, Homo sapiens
cacagcctcccgcgcctcgctcagctccaacatgacaatgcagatcttcgtgaagactctgactggtaagaccatcaccctcg

SEQ ID NO: 529227 - DNA, 98 bp, Homo sapiens
cagcacccactctctgggggcaggtgggcccggtgacagattaagcctgatcaagatgacaacctcccaaaagcaccgagacttcgtggcagagccca

SEQ ID NO: 529228 - DNA, 98 bp, Homo sapiens
gagatgctgcaggtgctcaaagagaaaatgcgactcgaaggacagctggaagccttgtcactggaggcgagtcagggggactccggggggcccctcgt

SEQ ID NO: 529229 - DNA, 50 bp, Homo sapiens
gtggaatacacctgcaagcatttcacgctcacggacacagacctaattaa

SEQ ID NO: 529230 - DNA, 100 bp, Homo sapiens
ctccagagcctgccggaaggctccctcggtcgcgagtatctccgtttcctggatgtgaactggagacctttggcgacttggcctttggcgacatcttcct

SEQ ID NO: 529231 - DNA, 101 bp, Homo sapiens
caacagccaaggactgaggatgaattccagaagattgccatggcaacagcaataggatttgctataatgggattcattggcttctttgtgaaattgatcca

SEQ ID NO: 529232 - DNA, 100 bp, Homo sapiens
gcgtctcgcgggaagacttcgagtgggtctacaccgaccagccgcacgccgaccggcgccgggagatcctgggttactataacaacagtaccaaggtggc

SEQ ID NO: 529233 - DNA, 100 bp, Homo sapiens
gggaaaatggcggacgggaaggcgggagacgagaagcctgaaaagtcgcagcgagctggagccgccggagaaaaatggagtgctggcatacattgggaat

SEQ ID NO: 529234 - DNA, 50 bp, Homo sapiens
ctgcattgtcgaatggtccaaggccaaaatcctgagcatgatggaagaca

SEQ ID NO: 529235 - DNA, 100 bp, Homo sapiens
ctgggacacccgggagtcaggaaatgcccacacatcatgttcctctctcagagcatcttgacaggagggaaccatctctgtgggacccgcctctgccatg

SEQ ID NO: 529236 - DNA, 99 bp, Homo sapiens
ttcgaggtgaactggaccgagcagcagcagatggatttgacgaaacgttcgagtcaaacgcagaataaagccagcaggaagaggcagcatgaggaacca

SEQ ID NO: 529237 - DNA, 83 bp, Homo sapiens
cctgagactctgctgggggagatggaggcgaagacaagagagctcattgacgaaggggaggaccaggctggcgatgaagatga

SEQ ID NO: 529238 - DNA, 100 bp, Homo sapiens
cgtacgtgcggaaggccctcaacatcccggagcagctgccacaatgggacatgtgcaagactctgaagacctactgggtgagcaaaggcagtgcctttag

SEQ ID NO: 529239 - DNA, 83 bp, Homo sapiens
aggagctaacagagatagagcgtttggaagatctggatacctgtatgaaatttgatgctgatccagttgaattatttgaaatt

SEQ ID NO: 529240 - DNA, 100 bp, Homo sapiens
aggccggggctgttttccagagctttgccaagttcagcaaatttggagatgaaaactatgtgcaagctgtggaggagttccagtcctgccttaacctgca

SEQ ID NO: 529241 - DNA, 98 bp, Homo sapiens
ggagaatgagctgcagaagatgacccgggggcagcactctggcccccagaagcttctccacattgcccaggagctcctgcacaccgaggagacctatg

SEQ ID NO: 529242 - DNA, 75 bp, Homo sapiens
gagagaggccgcgtcctgggcagaggtgtgcaactgaggaacatggctcaagaaactaatcacagccaagtgcct

SEQ ID NO: 529243 - DNA, 95 bp, Homo sapiens
ctaagtacatgctggattgtagaacttctctctcttcttcccaagggattgttgaagaaacttctgaagagggaaactctgtacctgcttcacaa

SEQ ID NO: 529244 - DNA, 50 bp, Homo sapiens
tgggaaatccaggaagacagtaggatcctgcaaggccttgtcgatgtccg

SEQ ID NO: 529245 - DNA, 75 bp, Homo sapiens
cagagcccggggacggcgaggccctcatgtaccacacgatggactcaccctgtcacccaggttggactgcactgg

SEQ ID NO: 529246 - DNA, 98 bp, Homo sapiens
tgcaaagttccataaagaatggcccttgtggataagcacaaagtcaagagacagcgattggacagaatttgtgaagcaggggaacaggaacctgataa

SEQ ID NO: 529247 - DNA, 100 bp, Homo sapiens
ctactgcaacttcaagtagtggaaggagtacagggaagtctataagctttgcaacagaattacagagtatgatagggctctgaactcctacttcgagcct

SEQ ID NO: 529248 - DNA, 75 bp, Homo sapiens
gtcctccccgaccgcgtcctgcagcagctgccagtggagccgcctaccccgacttccggggagaggaccccgagt

SEQ ID NO: 529249 - DNA, 83 bp, Homo sapiens
gggaaggaataagcctggaagaaaaagatacaacgaactagcacaacgaggatgcagagtttgcggggtggtacagaagcgat

SEQ ID NO: 529250 - DNA, 80 bp, Homo sapiens
ctgcccgcgtccgaggctcgcgggcggcgggcccgggtgtggccgacgacgatgccctcgctgaggagcgcatgcggaga

SEQ ID NO: 529251 - DNA, 75 bp, Homo sapiens
tatttaagtacaatggtgggcttaattttaggattcactccttctccagttgcacagccacacccttcagctggc

SEQ ID NO: 529252 - DNA, 100 bp, Homo sapiens
gggtcagagtgccggaccccagcacacagaagccgagacgccaaatatcatgcagcttcgtgacagactttgtagagcacaaggagagcctgtagcagga

SEQ ID NO: 529253 - DNA, 82 bp, Homo sapiens
cgccagcatcgccaacccggactggatcaacaccggggagtctgcgggaaaaccaattctgtgtcctcggaggaccacagcc

SEQ ID NO: 529254 - DNA, 75 bp, Homo sapiens
tggagtttgtgtaaaacaaaaatattatggtctttgtgcacatttacatcaaggattactacagcatcccatttc

SEQ ID NO: 529255 - DNA, 60 bp, Homo sapiens
gtcggcgagcccccgcggcgacaggatcttcaagatgaagttcaaagggagaatactaat

SEQ ID NO: 529256 - DNA, 100 bp, Homo sapiens
ctacatcttcagacccaaccaacagaaaccgctgcctgtgagccgctgggctcagatccacctggtgaagctcttcacccagatcttcggggtcggtgtg

SEQ ID NO: 529257 - DNA, 100 bp, Homo sapiens
gatgcagagttgaatgtcttctatgaggaaagtgtgcattttgacagagatcttccagaatttgggtgacacttggacagaaacactggcctatgtgctc

SEQ ID NO: 529258 - DNA, 90 bp, Homo sapiens
gcacggccgaggctgcccagaggcgcctcctccacaccccccgccgcagcagcaccggcgacagctccgtgaagttgagaagagtcacaa

SEQ ID NO: 529259 - DNA, 75 bp, Homo sapiens
ttcccaaatcattcgctccaagttccgatctggtgtcatggctgggtgaagagcctgtggctggggtgtggtcag

SEQ ID NO: 529260 - DNA, 100 bp, Homo sapiens
cagtcgcgggttttgggccgaggcctgggttacaagcagcaagtgcgcggttggggccactgcgaggccgttttaggtaattgctctagcagatgcagtg

SEQ ID NO: 529261 - DNA, 80 bp, Homo sapiens
gccctggcggggctttgggctgtaggtattttgaaggtggcgtctcatctgtctacctctgggatctggatcatggcttt

SEQ ID NO: 529262 - DNA, 75 bp, Homo sapiens
tcaagtgttggcggatggaagggaggagactcctgaccctcagaatgggtatgctgggaaaatcagccagatgcc

SEQ ID NO: 529263 - DNA, 100 bp, Homo sapiens
ccaaaggacctttaatctgttggaaaggctcaggtgtcatggagaaactccagctgggcccagagattctgcagcgggaaaatccaaggcttatttatgc

SEQ ID NO: 529264 - DNA, 98 bp, Homo sapiens
aagagtgtatgtgatcatcgatctctcagggtcgtcgggtgaagatttattgctaaacatgggtgcatttttggataaacccaaaactgaaaaacata

SEQ ID NO: 529265 - DNA, 108 bp, Homo sapiens
cctggacgacgtgaaggagaaattcgactatggcaacaagtacaagcggcgggtgccccggcaaacggggattcagcgtccgatcctttggaacagggactcacgtga

SEQ ID NO: 529266 - DNA, 83 bp, Homo sapiens
cttggagaggccgagggtttgatgaaggtggaggcagcgcggctctcagcaaattgtggctactaatttgccccctgaagatc

SEQ ID NO: 529267 - DNA, 80 bp, Homo sapiens
cacaaaattggcctcaagttgcctcttgatcctgctgtcaaagctcgaaaaacagcagcagaggaaagaaaagaccagag

SEQ ID NO: 529268 - DNA, 75 bp, Homo sapiens
gtcaccaaacattccgcataaacgaggtggtcaaggaatgtcagatgtctttggtggacttgggaaagaggttgc

SEQ ID NO: 529269 - DNA, 74 bp, Homo sapiens
gaggccgggatggagccccgcggaggagatggtaacctgcacctcaatgtgacggcggaggccttcagcccctc

SEQ ID NO: 529270 - DNA, 83 bp, Homo sapiens
ggaagatggcggcgccgctcatccccctctcccagcaggtttggtgcacctcgatttggaggaagtagggcagggcccttatc

SEQ ID NO: 529271 - DNA, 83 bp, Homo sapiens
aaggaacactcctctgtcctcgtcatgttccacgccccatgtgctggagaatctggtaaaagcaccattgtgaagcagatgag

SEQ ID NO: 529272 - DNA, 83 bp, Homo sapiens
gctgctgaagtaatgcaatggtctcaatctctggaaaaacttcttgccaaccaaacaacaaatggtcattcagaatgcttacg

SEQ ID NO: 529273 - DNA, 75 bp, Homo sapiens
gaagtttctggtcactccccaggattatgcgcgatgatatcatcaagttgaatcgaaaggaagggaagaagcaga

SEQ ID NO: 529274 - DNA, 76 bp, Homo sapiens
ggttgttttccttctctccgtgcaacgctggcaagtctcaaagtcgccacagtctggagaggtgttggtgaatgtt

SEQ ID NO: 529275 - DNA, 82 bp, Homo sapiens
gtggacccgaaagccgctgggaaaagtctcggcgcggaagatggccggcggcgtggacggccccatcgggatcccgttcccc

SEQ ID NO: 529276 - DNA, 100 bp, Homo sapiens
gtgaccgagaccgcggccgggaccgagggaaccagcacctatgacagaagatctgctagaagagcagtctgaagttttagctaaattaggtacatcggca

SEQ ID NO: 529277 - DNA, 74 bp, Homo sapiens
gctcctggttcaacgaggccattgacttcatagggatcatagacggtatttctatgtaaacgaacagtcgggcg

SEQ ID NO: 529278 - DNA, 80 bp, Homo sapiens
caacagtttggcgtgcaacatggggcttgagaaaggatgatagaggtactgacaacaactgactctcagaaactgctaca

SEQ ID NO: 529279 - DNA, 82 bp, Homo sapiens
aacagctaaaaccttcctcaccgtgtactattcccaggactccggctctctctgcttctgtttccggtggctgctcatctgg

SEQ ID NO: 529280 - DNA, 75 bp, Homo sapiens
ggtctgtgaagccacacagtgtccagatacgaggtaggagagaagtttgctgaggaatgccttcaagcacaaagt

SEQ ID NO: 529281 - DNA, 100 bp, Homo sapiens
tggatggatggatggatggatggacgccgctgcactgcgctgcctcttgtaacagcgttcacctctgcaaacagctggtggagagtggtgccgccatttt

SEQ ID NO: 529282 - DNA, 98 bp, Homo sapiens
tgccacctgctgcacccacgaatctgcccacccctcctgtaacccagcctgtttcacttcttggtatgataagtattatcagcaacataatagttctg

SEQ ID NO: 529283 - DNA, 99 bp, Homo sapiens
atctcattccatcttcattcatgactccagacaggagacccggtgagcctccattgataaaaggttggcttccttatcttggagtggtcctgaacttac

SEQ ID NO: 529284 - DNA, 50 bp, Homo sapiens
gcggagtcgtccggagccgctgcgcgtgaaactggagccccccatgctgc

SEQ ID NO: 529285 - DNA, 100 bp, Homo sapiens
cccgggcgccgggcctcccagccgacatgtctctagtggcggaagccttcgtctcccagattgcaggtttgtggagaaaaacagcgctttgagaagttga

SEQ ID NO: 529286 - DNA, 90 bp, Homo sapiens
cagagagatttttgtggatgaagataaaacgctaagagctctgtctcacattttacaaacaccaatagagataatacaggcagattctcc

SEQ ID NO: 529287 - DNA, 59 bp, Homo sapiens
aacatctcggtgggcgtctatcagaacacagaggcgtggagcgcatcgacgagcccggc

SEQ ID NO: 529288 - DNA, 75 bp, Homo sapiens
gggcggggagaggaccatgtgagtgggctccggagcctcagcgccgcgcagactgtgatcaaccactctatgatt

SEQ ID NO: 529289 - DNA, 95 bp, Homo sapiens
ttccagtatgctggggagaagcgcaggcccccttacaggtatcgagaaccttccctgcgaacttcagaggaacttccagctgatgcgagagctgg

SEQ ID NO: 529290 - DNA, 98 bp, Homo sapiens
gtgtattccatgtgaggggaagggtccaacagtcctggtcattcagactgcagttccccaggccccaatcttcatctccttcttcattgctttgagag

SEQ ID NO: 529291 - DNA, 96 bp, Homo sapiens
gcctgggccatggaactggcggacgtgggggcggcagccagctcgcagggatcccctaacaacagtgagagagcaatgcgagcagttggagaaatg

SEQ ID NO: 529292 - DNA, 98 bp, Homo sapiens
gctgtttgagttccgattcatgcagactgaccccaactgggccaacttcctgtatgatgcctccagccaccaggtcctgagccatgctcatgaacagg

SEQ ID NO: 529293 - DNA, 75 bp, Homo sapiens
tttaatttttaaacttggtttgaaaggcaagaaactatattcagtctttgactcagatgccgaagatgaactttg

SEQ ID NO: 529294 - DNA, 85 bp, Homo sapiens
tcaaatcaaatgactcacagcagtcctaccctggtccaagcctggaaagtgaagacttcaacattccaccaattactcctccttc

SEQ ID NO: 529295 - DNA, 75 bp, Homo sapiens
gatttttggatccaacaaaaacagaccagaagattaccaagctatcatggtgaacttacttcagattgtgcggga

SEQ ID NO: 529296 - DNA, 98 bp, Homo sapiens
ggagacggtcgtagctgcggtcgcgccgagaaagcttttctgggagaagaggctacaaggacttagtgcatcagatgtaacagaacaaattataaaaa

SEQ ID NO: 529297 - DNA, 100 bp, Homo sapiens
aaaaggaagttgtgtttcgctattgcacgaagttcagcccagaggagaaactcgctcgccttcagaagacagctacaaaagaccccacagctgtagagag

SEQ ID NO: 529298 - DNA, 100 bp, Homo sapiens
cgtgagcccagccgaggtaccgctgaagaggaatcaattttggtgctgggactctggtgcccccaaccctgggcatcctcaggctttgaggagaatacac

SEQ ID NO: 529299 - DNA, 99 bp, Homo sapiens
cctgccctgcttggatagaggcctccgaacaggagtaaagaatggctgttgaacatccacaaggcacctgcaagtcctggaatcaagatgtgagaccaa

SEQ ID NO: 529300 - DNA, 74 bp, Homo sapiens
tgcgcagctccggccgcctggctccccatactagtcgccgtactatactggcaattgctggagaagattttgca

SEQ ID NO: 529301 - DNA, 98 bp, Homo sapiens
gttcctgtcctatgcactcatagattacagcaacctgcaggattccatccaggaaagtcttcaggtgttgtccaagatcttggccatcgaaaagtcag

SEQ ID NO: 529302 - DNA, 75 bp, Homo sapiens
taaatactggtttcacactccaccaagcatcccattacagatagaagagctgtcggcagtactcagtggaagggt

SEQ ID NO: 529303 - DNA, 100 bp, Homo sapiens
acggagctgcgctggcagaagttcgtcatgttctacgacagcgagtatgggaacctggactaaaacacgtgttccggtggcagattgaacaagagctttg

SEQ ID NO: 529304 - DNA, 51 bp, Homo sapiens
tgaactggaccgagcagcagcagatggactggttgccataaaggaagccca

SEQ ID NO: 529305 - DNA, 100 bp, Homo sapiens
cttggcgagaaggtgtgcatggatctgccaaattttatatttcagatttgtggaagctaccactgctaagagccatctccaccagaagcctggccagacc

SEQ ID NO: 529306 - DNA, 105 bp, Homo sapiens
gggagattcatcgaggtgccctgctctgaggactacgacagtcaccgcaggttcgaaggaagaagatggactgcggatgaggaagacagtgcagagcaacagccc

SEQ ID NO: 529307 - DNA, 101 bp, Homo sapiens
acagccgcggcggcagcagcagtgagagccatgcgcacgctgagcgaggacaccatcaggctcttcctgcagcagatcgcgggcgccatgcggcttctgca

SEQ ID NO: 529308 - DNA, 96 bp, Homo sapiens
cccgcctctgtccacactctcacccaggacaaacccatttccgtccacacccgctcgtccaggtgctggagaatctggtaaaagcaccattgtgaa

SEQ ID NO: 529309 - DNA, 97 bp, Homo sapiens
acgactattcttggacttgggaccccctcaggggaacagcgagcagatcaaaggcctccccagcccggctgccccgccttcatcatcgtcaagctga

SEQ ID NO: 529310 - DNA, 98 bp, Homo sapiens
acaagaattggcagagccacgcgtttgatggcttcgaggtgaactggaccgagcagcagcagatgccaagacaatgcaaactccagtgaacattcccg

SEQ ID NO: 529311 - DNA, 50 bp, Homo sapiens
cagcacttaagcaaacgggaattctcgcggagaagaaatgggtgaccgtt

SEQ ID NO: 529312 - DNA, 90 bp, Homo sapiens
gtaagatggaagatgaggaggtcgctgagagctgggaagaggcggcagacagcgggagttttgcggcctccaggtggtggatccaatttt

SEQ ID NO: 529313 - DNA, 100 bp, Homo sapiens
ccgcagttcatcttcctccctgtgtactttccatttgccttcctggctgagcgggctttggacaccatgaactttgatgtgattaagggaaagccaatcc

SEQ ID NO: 529314 - DNA, 100 bp, Homo sapiens
ttgcagaaaagagccgaggcctatttagtgctaatgactggcaatgtaaaacggggaaatgcagtgtgaccctcttgaatgagacagatatcttgagcca

SEQ ID NO: 529315 - DNA, 75 bp, Homo sapiens
atgtggtggtgaaaaatgaccctgaactggaccagcagatgctactatcattcacgatggccatgaggagaagat

SEQ ID NO: 529316 - DNA, 100 bp, Homo sapiens
gaggctggagggggagaacacccagaaggtggtcttctgccctgttaaagaagccctggaggtggactggagcagtgagaaagcaaaggctgctctgaag

SEQ ID NO: 529317 - DNA, 97 bp, Homo sapiens
caggaagatctgcatggtgggaaggacctgatgatacagagattcaagatttatggaaagttacctcttatttctttacgaatctcagataaaaaac

SEQ ID NO: 529318 - DNA, 82 bp, Homo sapiens
ggatcccagaaggtcgcgaaggcagtaccgtttcctcagcggcggcatgtagagcgcatgaagtacaggacaataaagcttc

SEQ ID NO: 529319 - DNA, 75 bp, Homo sapiens
aaggggcttacgcagaaggacctggccacggagggtgaggacaaaatcttcttaatcaacaagcttcactccatc

SEQ ID NO: 529320 - DNA, 90 bp, Homo sapiens
gggcaaccttccggatgactttctccgcatcctgccccagcagctggacagcatacaggggctgatgctgcagaagatgaggaagtggat

SEQ ID NO: 529321 - DNA, 96 bp, Homo sapiens
ctggctcttattgctgaaagactacccatgctatatccagaagtaattcaacagagcctccattatggcatgctgaatttaccaaagaagaattgg

SEQ ID NO: 529322 - DNA, 100 bp, Homo sapiens
gctatgcccccgtggccaccgcctccagcttgccaccaaagacctgcgactttgctcaggttgaggcctctggtgtctacgcagccagcaaagaaggtgg

SEQ ID NO: 529323 - DNA, 74 bp, Homo sapiens
ccggggccgcgctgagggcgcccagctggttttgctgttactgctcagtgtagtcacaccttgaataagaaatg

SEQ ID NO: 529324 - DNA, 75 bp, Homo sapiens
ctatttcaagatgatatttattcaccaaacaagcatcaaagctaagccagaagatttatcacattttcatcatca

SEQ ID NO: 529325 - DNA, 100 bp, Homo sapiens
ggacaggcttagtgagcaagactggccagcatatttcaaggtcccatgttgtggggttgatacatctcaaattgagcgagtaaccagctcataaatcaca

SEQ ID NO: 529326 - DNA, 100 bp, Homo sapiens
gaagaccatgttgcaggcccacagctgcctacagaaccgtcccaaaatatggcaaagaaacctattctgagctctggccaggctgccgcacctctacagg

SEQ ID NO: 529327 - DNA, 80 bp, Homo sapiens
gttcaagaaggaagtgtatcttcatacatcaccacacctgaaagcagtggattatcaaacagttttgcgggaaagtcaaa

SEQ ID NO: 529328 - DNA, 90 bp, Homo sapiens
ctcctggccatgggggacgtgctgtccacgcacctggacgacgcccggcgccagcacatcgcaggtgaacgaggtggtcttcagccccgg

SEQ ID NO: 529329 - DNA, 100 bp, Homo sapiens
gtatagctccagcgggtccccggcaaactccttccacttcaaggattacggggcgctgaaagacatcgtgatcaacgcaaacccggcctcccctcccctc

SEQ ID NO: 529330 - DNA, 82 bp, Homo sapiens
tgcattgtgggctggcgctgccgcgtgggtcagtggatctctgttgaggagctggcgcggaatctggtcatcaaggtcaaca

SEQ ID NO: 529331 - DNA, 101 bp, Homo sapiens
cgggaaatggcgactggctgaaggagctggttctgttgctgctgcgggacttgcaaccttatttctcgaaagagggcccaacaggataggcagtatttaca

SEQ ID NO: 529332 - DNA, 75 bp, Homo sapiens
ttccccggaatggagggctccgggcccaagtttgaggaggttttgcactgattgcaaaaataaagtcctccgagc

SEQ ID NO: 529333 - DNA, 100 bp, Homo sapiens
gcctgaagcacgtgaggatcccgtgcacgagtgtggcacccagcctggtccgggcaaagattgaaaatgtgcagaaaacaggtttcatcaaaggaccaat

SEQ ID NO: 529334 - DNA, 50 bp, Homo sapiens
agctttcatcattcacccttggcacacctcacagcatggaaccacaggtt

SEQ ID NO: 529335 - DNA, 75 bp, Homo sapiens
gtcaatctctttcgaagccattcagtcctcaatctccttttccttggctaccctctaccctgatgggagagtctg

SEQ ID NO: 529336 - DNA, 98 bp, Homo sapiens
accatgtcagccttcccagtagctggaactacaggcaatttcttgcaaccaccaccgaggccccgaaaagcactggtcgtcagggagctcctcccctt

SEQ ID NO: 529337 - DNA, 100 bp, Homo sapiens
gcattatagcaatcccagacctaagtttgaagattggctttgtaacaagatgatacataccttttctcgatgtgtgttatgctgtgctgaagaagtggat

SEQ ID NO: 529338 - DNA, 75 bp, Homo sapiens
ctcctgggactccaggataccaggtttactcctggcttgggggcattaggaagcactggaggctcttcgggaact

SEQ ID NO: 529339 - DNA, 75 bp, Homo sapiens
tataacaatcagtgccgagcaattgtgatgagatattctgctgagtggaagaatccacattcatctcaatggaag

SEQ ID NO: 529340 - DNA, 51 bp, Homo sapiens
ggcggccgtcagcaacctcgtccggtgctgcttttgacacaaaaacggggt

SEQ ID NO: 529341 - DNA, 75 bp, Homo sapiens
gagctgtccatggtgctgacaggtgctgccttctttcacaagctcattcagaccaataagctgaagcactacccc

SEQ ID NO: 529342 - DNA, 100 bp, Homo sapiens
gagctgtgcctcccagcaccacagtccttctgcagtccctcgtccagccacccccaggtggtcttttggtgccttaatgaagagtcggattttgaagcag

SEQ ID NO: 529343 - DNA, 100 bp, Homo sapiens
aaacaagtgcgacctctcagatattagtgagatggaagattttcgaggtatagcagaagaatcatttccaagctttctcaccaattcattatttggtaac

SEQ ID NO: 529344 - DNA, 82 bp, Homo sapiens
ggcgagcggtggtttggacgccggcggagacgcgggcgagggcagctgcaatgactctccgcacggtattattgtcattgca

SEQ ID NO: 529345 - DNA, 100 bp, Homo sapiens
gaagggagcgaaggtttttgctgcgccaacgcagtgaccgaaggctccgctcacgcccgggaaaaagaaggccgaggactggacttaagcagtggcttag

SEQ ID NO: 529346 - DNA, 100 bp, Homo sapiens
cagaatgcagaaatcatcagaaaaatgactgaagaatttgatgagtgttccttgcctgtatctccccttggttcaatagctaccagatttttggaagagg

SEQ ID NO: 529347 - DNA, 100 bp, Homo sapiens
ggttccaggtgatacagtttgcctttctgttggggatagagttcctgctgacttacgcttgtttgaggttttaaatgcacagagagcaggatacaaggca

SEQ ID NO: 529348 - DNA, 100 bp, Homo sapiens
ctcctccgttcccccctcctcccccctcccctcagcggtggctcccaagaagtccgagacacgcgccaaaccaaacaggaagcttacttttctctaccta

SEQ ID NO: 529349 - DNA, 49 bp, Homo sapiens
acctgtgaacagtacgcagtgaatgttgcatatctttttcttgcacatc

SEQ ID NO: 529350 - DNA, 83 bp, Homo sapiens
gcagaagcgggcctcccgcctccagcaggacaatattcgcacccggctgaaggcttgggcactgtttaaaggaaagttccgag

SEQ ID NO: 529351 - DNA, 98 bp, Homo sapiens
tgaggctggcttcatgaccaaggacttggctgcttgcattaaaggtttacccaacttcaggctgatgcaatcaacgcttttggagaatcactacaaaa

SEQ ID NO: 529352 - DNA, 48 bp, Homo sapiens
cagcccccattggcgagtttgagaaggctaaagatcgaattcagtatt

SEQ ID NO: 529353 - DNA, 60 bp, Homo sapiens
ggaaaatgcgctcgggctggaccagcaggcttcagggatgacttcttagggggcagggga

SEQ ID NO: 529354 - DNA, 100 bp, Homo sapiens
ttatctctggtgctgcagctctagtctccacagcctattggctcacttggacatgatgctgacttgaggcggcagcagcaggatacctgtaactccggca

SEQ ID NO: 529355 - DNA, 90 bp, Homo sapiens
cttctttccattgtcctgcccgtttctgcggacttgttctgaggccgagttgtctggcgccgggagtgagaccctaaaacaaagaagaac

SEQ ID NO: 529356 - DNA, 83 bp, Homo sapiens
ctactctctctttctggcctggaggctatccagcatggagaacttaatgttctggatgatattttaactgaagtaccagaaca

SEQ ID NO: 529357 - DNA, 75 bp, Homo sapiens
tttggtagatgagactaacatgtatgaaggtgtaggaagaatcacccacaacacaagatcagaccccaagttctg

SEQ ID NO: 529358 - DNA, 90 bp, Homo sapiens
gagggggaacaaggttaatggtcaaaccccttttcggctttgtgagaaaccttaccatcaaacacgatggccagcaacgttaccaacaag

SEQ ID NO: 529359 - DNA, 74 bp, Homo sapiens
atcacattcattttaattttgccggaatatttcaagacaccgaaaggagattacctggggcaattgatgttatc

SEQ ID NO: 529360 - DNA, 51 bp, Homo sapiens
atcccgtcagagctgaggtacttcgtgaagagacggggtttcgccatgttg

SEQ ID NO: 529361 - DNA, 100 bp, Homo sapiens
gaaaaaggctacaaagctgctttcattggaatagataagaaggctgactgcacaatcacaatggctgactcagacttcctggctttaatgactggtaaaa

SEQ ID NO: 529362 - DNA, 100 bp, Homo sapiens
aagcacaggggaaaacgaacaagttagtcgcagccagcaacgagctgtccccaatctcttcatgctggaaacagtggattctgtgaagttggcagacaaa

SEQ ID NO: 529363 - DNA, 51 bp, Homo sapiens
caaggataagtctcatgacaccgtgaaaaattagacgatttcaagaattgg

SEQ ID NO: 529364 - DNA, 100 bp, Homo sapiens
aggccgagcacaacctgagcagcgtgctggacacgggcgccgaggaggacgtcgccagcaggttttacacatccataagtagacctttttggagcctcac

SEQ ID NO: 529365 - DNA, 75 bp, Homo sapiens
atgccggcccggcggctgctgctgctgctgacgctgctgctgcccggcctcgggcaatgtctcaggctgtgcaga

SEQ ID NO: 529366 - DNA, 90 bp, Homo sapiens
cgtcctccaccgtttcctccaggacagcacctagtcgtggccggaggagtctcagagctgtcagaaagatgcctgaggaagtgcaccatg

SEQ ID NO: 529367 - DNA, 98 bp, Homo sapiens
tctgtttttaagcttctaattaaagagtaatgtgtgtggctggtattggacttgttgtattattcttcagttggatgctctctatttttagatctaaa

SEQ ID NO: 529368 - DNA, 100 bp, Homo sapiens
tcaaatggcacttcattggccacctacagaaacaaaatgtcaacaaattgatggttgggccgccgctgctcatccccatgtatttccagtaccagatcat

SEQ ID NO: 529369 - DNA, 100 bp, Homo sapiens
tctgacctggccaattctgacgccctcaaggtcgccaaggaggtggacccccagggcttgcagggtggcccccgctccgacttcgacatggcctatgagc

SEQ ID NO: 529370 - DNA, 50 bp, Homo sapiens
gccgtggacgccatcatgctgggtgtgactgaagaaatatcaaatgtttc

SEQ ID NO: 529371 - DNA, 75 bp, Homo sapiens
caagatggaggagtacgcgcgagagccttggtatgacttgctcttcatgccaccgtcctttccatttggaggaat

SEQ ID NO: 529372 - DNA, 80 bp, Homo sapiens
gcggggctccaatggcgctttctacaagggacaagaatccttcaagaaacaggaaaaaactcctaaaacaccaaaaggac

SEQ ID NO: 529373 - DNA, 127 bp, Homo sapiens
gaggcaggagaatcgcttgaacctgggaggcggaggttgtggtgagccaagagagagtctacagggagattgaacaggtgattggcccacatcgccctccagagcttcatgaccgagccaaaatgcc

SEQ ID NO: 529374 - DNA, 90 bp, Homo sapiens
caaaagattgaaggaaggtgatacaatgatggggcagcaagtggccaaacccctctgtgcccctggatccaatctcagtgtctaactcat

SEQ ID NO: 529375 - DNA, 100 bp, Homo sapiens
agtacttcttggtggtcctggtagcttttattggcaagtgtaaaccagaatacaaggttccgggattatatgtaattgactcaattgtgcgacagtctcg

SEQ ID NO: 529376 - DNA, 100 bp, Homo sapiens
gcagcttcaaaatgaagaaattgtggcatacttttttgatgcaccagagatggaccatctcccaacaactacagctactccaaaccaaacagttgctgca

SEQ ID NO: 529377 - DNA, 100 bp, Homo sapiens
gccgcctgtggcagcgcctgcgcgacgcctttcccgaggaccggtccgaactggcgcaggggccgctgcggcaaggtttggaattggccgcttcactaca

SEQ ID NO: 529378 - DNA, 46 bp, Homo sapiens
gtttgtcaccacaaaaaggacaggatcccaatgaagatacagaatg

SEQ ID NO: 529379 - DNA, 82 bp, Homo sapiens
tgggccttaccatcttcatcatgcacatcttcaagcatgctcaggttgctgcgtggttaaaaaaaatatttggagatcatcc

SEQ ID NO: 529380 - DNA, 121 bp, Homo sapiens
ttatcatttaatgcataaaaactgcaatcatttttcttcagctttatcagagctgaaaatgtgtgtctgacatgcaagctcagtggggcagagacccgtggattgctgtgccctgccctcc

SEQ ID NO: 529381 - DNA, 75 bp, Homo sapiens
taaagcggaaccggatcaccgagggcatttacggcagccactgaggcggctcccagctgcgttggcgacatggcc

SEQ ID NO: 529382 - DNA, 97 bp, Homo sapiens
gccattttcaattagcatgcgacatgcctttgtgcctttcccaggtggagccgccaccaaaatgcagattttcgtgaaaacccttacggggaagacc

SEQ ID NO: 529383 - DNA, 100 bp, Homo sapiens
agcaagaatggcagaattttctttgatgattatgttgcttgctgtgtgaagcttcgagcattgacagggatagctgggagtatggccaccctgctccacg

SEQ ID NO: 529384 - DNA, 100 bp, Homo sapiens
tcttgcagcccttcaagaaagacttgatggtctggtagaaacaccaacaggatacattgaaaggtttaccgacaagactgtgaaactttcgggatggtgg

SEQ ID NO: 529385 - DNA, 100 bp, Homo sapiens
gctgcagaagtgtcagagactgaggacttaaatgaagccactgattagcaatttaaagatcctctccaagatggctcggactcaaaagaacaaggccaca

SEQ ID NO: 529386 - DNA, 82 bp, Homo sapiens
ctgaaccatccacacatcataaagctttaccagaaattaatgcagagaactcctagttgggcaatcagttccagactccaca

SEQ ID NO: 529387 - DNA, 98 bp, Homo sapiens
gaaggaatcaaacagttttatattaatgttgagagagaggtagcctttccagtaaatatatgactcagggaaaagcctcagcgaagaggacccagcag

SEQ ID NO: 529388 - DNA, 100 bp, Homo sapiens
cttcggactgcttcgcaaggaagcggggcggctgcagcgagtaggcggcggcggaggattgttaaaggaaatgggctggcaggaagacagtgaaaatgat

SEQ ID NO: 529389 - DNA, 100 bp, Homo sapiens
tgttggcattgactattccctcatgaaggatcctgtggcttccaccagcaacctggacatggacttccggatcaagcgctcgtccatccggaagggcatg

SEQ ID NO: 529390 - DNA, 75 bp, Homo sapiens
ctgaatgcactgatgcccagcaggtgagccgttctccaaccctttggcccccgatggccacgatgtggatgatcc

SEQ ID NO: 529391 - DNA, 152 bp, Homo sapiens
ctcaccatcagggacgtgctggccgtgatcaaacactgcaaggaccccctccggctcaagtgtgtcaagcaaggttgcatcataaatacaaaggactgaagttataaaagagaaaagagaagtttgctgctaaaatgaatctgagcaatatg

SEQ ID NO: 529392 - DNA, 103 bp, Homo sapiens
gtgagcatgagatttctgaaattattgatgggctctctgagcaggagtgacagtgatgaaaagcctctcaaaggaagccttcggtcccttaatagggatatgc

SEQ ID NO: 529393 - DNA, 96 bp, Homo sapiens
tcctgccctctcgctttccctctcgcgtctctggctgcaggcctcaggagtgcaagtagctgatgaagtatgtcgcattttttatgacatgaaagt

SEQ ID NO: 529394 - DNA, 74 bp, Homo sapiens
ggagcgactgctgcccacccgacaaagggtttctctgtttaggtttccaatacttatctacaggaatcgccatg

SEQ ID NO: 529395 - DNA, 96 bp, Homo sapiens
gtggacgccgccgaagaagcatcgttaaagtctctcttcaccctgccgtcatgtctaagtcagagacgggtggacttcccgctggatcgaatccaa

SEQ ID NO: 529396 - DNA, 75 bp, Homo sapiens
atccggtcaccatctacctattcttcaaatggacaaaagatccttcatcaccgaagtgacgttttagaaacagtg

SEQ ID NO: 529397 - DNA, 74 bp, Homo sapiens
atccatttctcctattgaggagtcaacgccggattcagaagccagccagagcccacaatacagcttcgagtcat

SEQ ID NO: 529398 - DNA, 99 bp, Homo sapiens
ctgctcagctcgggccacggagaggagcagcccccggagacagcggcacagaggtgcttctgccaggcatccgtgtacaagatttgcagagaaatgtat

SEQ ID NO: 529399 - DNA, 75 bp, Homo sapiens
caaccgggccgtgccccagatgcccaccgggatggagaaggaggaggaatcggaatttcatatgcagaataaatg

SEQ ID NO: 529400 - DNA, 99 bp, Homo sapiens
cccactccttcctccgagggctgtttgggatatcttaaatacgatcataaggcactgtccaccccgctttttctccctgggttttcctggcttctcaat

SEQ ID NO: 529401 - DNA, 83 bp, Homo sapiens
agggaatacttcaagaagttcggagtggtcacgcatgaagggagcaccgtggagaagacagtggcccctacagaatgttcata

SEQ ID NO: 529402 - DNA, 82 bp, Homo sapiens
cggcgcgggcgccggcgaggagagcccgcggctgcaggatgatcggctgaatgtaacagaggaactaacgtccaacgacaag

SEQ ID NO: 529403 - DNA, 75 bp, Homo sapiens
ccggggagcactactccgagaaggaggaggaagccaagaatctggtgagcgaagccatcgcagctggcatcttca

SEQ ID NO: 529404 - DNA, 83 bp, Homo sapiens
ccgagtcctagcgcctggcctgcgcgccgctgcccgcgccacagccaaaagaatgcaatggtgtaaagattccagttgatgcc

SEQ ID NO: 529405 - DNA, 100 bp, Homo sapiens
ggcactatccttcgattaaccacatctccaattttatcatgtgggcaacctgctgcaactggttctgcctggatggacagcctgaggaggtcccaccacc

SEQ ID NO: 529406 - DNA, 75 bp, Homo sapiens
ggggaggacccagagggcaacaagggtgtccgcaatgttgccagtgtctgtctgcagattggctacccaactgtt

SEQ ID NO: 529407 - DNA, 83 bp, Homo sapiens
gcaccgcagccttgggcctcgcgccggctatggccgtgccctggggctgagccctcaggccccttcccagctgcctgcctgcc

SEQ ID NO: 529408 - DNA, 98 bp, Homo sapiens
tgcagccacatactatccgtttgttcaggaaccaccagtgacagactggaaactgacaaactagctctcccgatgagccccagcccgcttagcccgag

SEQ ID NO: 529409 - DNA, 80 bp, Homo sapiens
tggcgggtgccctggctaccatggaccatcctgctggtcagcactgcggctggtgctgactgggttacttttttaaacac

SEQ ID NO: 529410 - DNA, 75 bp, Homo sapiens
ttttccggccccctcgcgcctcccattgcagcctttgtgataactgcgtaggttggacgtgataagtatgagcct

SEQ ID NO: 529411 - DNA, 73 bp, Homo sapiens
caagatctatgaatttgattatcatctgtatggccaggatcttatggttggtgatgaggcaagtgaattacga

SEQ ID NO: 529412 - DNA, 80 bp, Homo sapiens
ctggagtttgcaatccagccaaatacaactggaaaacagctttttgatcaggcacagaaaactgaatctgtagataacga

SEQ ID NO: 529413 - DNA, 75 bp, Homo sapiens
gaatcacacgccgccatccgggaggcccagggaaggttgatctcctatcaagagtttttggcatttgaatctgtt

SEQ ID NO: 529414 - DNA, 101 bp, Homo sapiens
gtacctttcagctgcgccggccgcgaggccacggagagctcgccttggagagcccaggagcaggggagacatggattacaagggccagaagctagctgaac

SEQ ID NO: 529415 - DNA, 88 bp, Homo sapiens
ggccagccccgccgccctcgcaacctggcagccgccgccgtggaagaaactggcgatggaatatgagaggagccctctggaaagaaaa

SEQ ID NO: 529416 - DNA, 80 bp, Homo sapiens
agatgatggtgaaggccctgtcagaagagatgctgatgtagaaggccaatccttaagacaccgagacaagcggcttagtt

SEQ ID NO: 529417 - DNA, 100 bp, Homo sapiens
cggggagagcgagctcaacctcaagggccggattggcggggacccaggactgtcccctcggggcagggagcgtgcctgccagtgtagagccggtggagca

SEQ ID NO: 529418 - DNA, 83 bp, Homo sapiens
cttccttgcagcctcttctccggagcctgccctcgcaaaacccgatcttgaagaatatcaccgactacctgatcgaggaagta

SEQ ID NO: 529419 - DNA, 50 bp, Homo sapiens
caaccgcctacgagacactcaaggccatcgaagacggcaatttggaggaa

SEQ ID NO: 529420 - DNA, 75 bp, Homo sapiens
caccatctgaaaatggtgaaactaaagctgaagaggaggagatgttaaagtaacccatcttgcaggacgacattg

SEQ ID NO: 529421 - DNA, 101 bp, Homo sapiens
acaggagtggccgttatggaacgcaggaaaccacccctactcctaatcccccgactacagaagaggagaaaacggaatctaatcaggaggttgctaaccca

SEQ ID NO: 529422 - DNA, 90 bp, Homo sapiens
cccggcaggtggagccgcccgcatcagcggcctcggggaatggaagcggagaacgcgggcagttcttcagattattaaggaatcccagca

SEQ ID NO: 529423 - DNA, 100 bp, Homo sapiens
gacagcgttctgtcatctcagcaaagaatgacaaagatatccctgggccgtttggaagactttctcaacactgaggagcttcttcctcaaagtattgaaa

SEQ ID NO: 529424 - DNA, 100 bp, Homo sapiens
cggcggcctttctcctgggaagacgcccgagaccgaggacgagaagaagcgctttgaggaaggcaaagggcggtacctgcagatgaaggcgaagcgacag

SEQ ID NO: 529425 - DNA, 119 bp, Homo sapiens
caaaatttctgcattcacggagaatgcaaatatatagagcacctggaagcagtaacatgcaaatcatcagtaacgtgccagcagacagcttgattcgtacagagcgcccaccaaataag

SEQ ID NO: 529426 - DNA, 74 bp, Homo sapiens
tccagacccaatggaacatcagcaatgcttctgaaactacatctgaccagagtgatattgaaggtaggatcaga

SEQ ID NO: 529427 - DNA, 100 bp, Homo sapiens
gcgggattgatgtgcaacaagtgtctttggttataaattatgatctacctaccaatcgtgaaaactatattcacagactttgagaatcactacaagaaaa

SEQ ID NO: 529428 - DNA, 74 bp, Homo sapiens
gtcttcctttctagaaccaaagaactaaaactttcagcagaatgtcagaaaacactcgtgaaactgctcaggcc

SEQ ID NO: 529429 - DNA, 78 bp, Homo sapiens
ttcgatgtgcgagactttggaaaggaagccttggctcaagctttctggattgacatcaagcgcatggatgacccagaa

SEQ ID NO: 529430 - DNA, 100 bp, Homo sapiens
ctggagatgataaaagaactgtggatctcactgtccaaggtcacggtctagatcacattctcgatccagaggaaggcgatactctcgctcacgcagcagg

SEQ ID NO: 529431 - DNA, 89 bp, Homo sapiens
ggcggtggggactgcacgtagcccggcgctcggcatggctctcctggtgctcgctgtctctctggatcaatgagaagatgctcacagcc

SEQ ID NO: 529432 - DNA, 75 bp, Homo sapiens
gaccttccttgctttcagaatttcacccaggttctgacagtggtggacttgctttgtgaagagacagttcatgaa

SEQ ID NO: 529433 - DNA, 82 bp, Homo sapiens
cgcgaagtggccgcatccgcaagctgagctgactgctgcccactttggaggaggcggtgggctccttcacaagaagactcaa

SEQ ID NO: 529434 - DNA, 74 bp, Homo sapiens
atttcagacagcaaaaggctggaagatgtctttccggcagacattggaactggcaagggaactgaatttttcag

SEQ ID NO: 529435 - DNA, 75 bp, Homo sapiens
aaaaggacgcaaagttctccggcgagccacctgtctgtccagccacccttccacagactgaggcttgacaccgga

SEQ ID NO: 529436 - DNA, 100 bp, Homo sapiens
tggaaagtacttgtgttatttccaagatggtgacttctacgaaaaagccctggtggagctgaaggttgcagttccagtctcatcagattttccatgtcct

SEQ ID NO: 529437 - DNA, 75 bp, Homo sapiens
cttacgtctgcggaagtgcagctgcctcagttcttagcgcaggaacttacaatgtctcagaaaaatggtgggaat

SEQ ID NO: 529438 - DNA, 59 bp, Homo sapiens
tttgctatgatcattgacaaactggaagagctctccggtgtcatgaggagcttcaaaag

SEQ ID NO: 529439 - DNA, 80 bp, Homo sapiens
gagcaatgctgacctcggtttcctggacccattccgactcaggtacatcgaggaggccattgagaaactaagcaagcggc

SEQ ID NO: 529440 - DNA, 73 bp, Homo sapiens
tttaatggaaaatcgcttggttaaaacctgacacttttaacagatgctgttgatggagtaatgaatggtgaat

SEQ ID NO: 529441 - DNA, 75 bp, Homo sapiens
attcctggggcgcaccgccaagagctgggctgctcgactgatccaaaacatggatgccaccactgagccttgtac

SEQ ID NO: 529442 - DNA, 75 bp, Homo sapiens
ctttcgcttttgtggaactactctacggcatctggagcaactgttgcacactgacaagaaacagatcagtgttgg

SEQ ID NO: 529443 - DNA, 83 bp, Homo sapiens
aaggaggaagggaaccaacccactttctcggcgccgcggctcttttctaaaagtgtgatggcatcagctgagaagggaaggaa

SEQ ID NO: 529444 - DNA, 100 bp, Homo sapiens
ccgccatgggctactcagtttacagccactgcagtatcacagccagctgtccctttccccccaacacatcgcttgacatctgaagaagtatttgatttgg

SEQ ID NO: 529445 - DNA, 98 bp, Homo sapiens
tggtgcacccccagtgggtgctcacagctgcccattgcctaaagaaataacaatgaagatggtgccaaaactgctttctcctttggttaaagattggg

SEQ ID NO: 529446 - DNA, 100 bp, Homo sapiens
cacgttctttcgcttttttacctgccaatcaaactgctacaagacaacaccctgatctggcatggacatttgctctaggtcgtaaccagcctttgaaaaa

SEQ ID NO: 529447 - DNA, 100 bp, Homo sapiens
gggtgcggctccaccccttccacgtcatccgcatcaacaagatgttgtcctgtgctggggctgacaggcgagttttaaggagtcctacatggctacattt

SEQ ID NO: 529448 - DNA, 74 bp, Homo sapiens
aattctcaacagctcacaccagttccagcaacagatagaaatgctttaagttcactctggggaaagctggcctc

SEQ ID NO: 529449 - DNA, 98 bp, Homo sapiens
ggcggtatctggtgcgcttggccgggcgggctggaggctcctgcagctgcgatgcctgcccggctgaatccacctccacaatgccgctctcaggaacc

SEQ ID NO: 529450 - DNA, 90 bp, Homo sapiens
aattagagaagcattccgtgtgtttgataaggatgaccaactcttggatgatggcaagacactgggcgagtgtggcttcaccagtcaaac

SEQ ID NO: 529451 - DNA, 100 bp, Homo sapiens
atgacctcctggatgactggctccaggccctggagccctcagaatatggatggagactctgtgacctgcctgctgcctccctcaacgaccagttgcccca

SEQ ID NO: 529452 - DNA, 98 bp, Homo sapiens
ccccgccggtcacctccgcgcggacaccagtccctgaagaggaaggagaaggaatatgagcatgaaatggagcggctggcacgtgagaagattgccac

SEQ ID NO: 529453 - DNA, 83 bp, Homo sapiens
agaggctgatggacaaccaggcggagagagaaagtttaggattgggtgtgtgtgtctcctctctgaatggcactcaaatgttt

SEQ ID NO: 529454 - DNA, 75 bp, Homo sapiens
tgctaaaatggacccaatgaacatctgggatgacatcatcacaaatcggtttctagaccaactggggagattccc

SEQ ID NO: 529455 - DNA, 100 bp, Homo sapiens
cagagagagagcgcgagagatggagatgggcagacggattcatttagagctgcggaacaggacgccctctgatgtagctacagcaagctgggtagcaggc

SEQ ID NO: 529456 - DNA, 89 bp, Homo sapiens
gagcgcaagtgcctgctcctcaagatccgcggtgggaaacagttcattttgcagtgcgatggtgattctgggggtccacttgtctgtaa

SEQ ID NO: 529457 - DNA, 100 bp, Homo sapiens
gttcagtcaggtggggccggtgaagcagtgcttcgtggtgactgaaaaaggatttctccagtgatgattctaagttagaatataacgtagatgctgcaaa

SEQ ID NO: 529458 - DNA, 90 bp, Homo sapiens
gccaggaggagagcccacaggtgctaaagagagcagtaccctgatggagtcccttgcagctacaaggctttggcccaccaagtgtgtacc

SEQ ID NO: 529459 - DNA, 82 bp, Homo sapiens
gcaggtctaccgggccacgcaccgcctgctgctgctggcatgcttttcacttccactgcatctctcgctggctcaaaacacg

SEQ ID NO: 529460 - DNA, 97 bp, Homo sapiens
gggggcggctctgcgctggccgggggcgcgggcggcggcgccggcaggaaggtgatcaaagaagcctacagtggttgtagtggccccgtggattcag

SEQ ID NO: 529461 - DNA, 75 bp, Homo sapiens
gctacatctccagagtgtctggaggagggaccaaagtccagtatcagcagcgtcgccagcaggagaatatgcagc

SEQ ID NO: 529462 - DNA, 76 bp, Homo sapiens
actcagagattatagggagcatggggcattttgtcagtgatgctgatctttgccttcttccaggaacttgtaatag

SEQ ID NO: 529463 - DNA, 50 bp, Homo sapiens
aatgatgggagaacgagaaggacaggttgatggaaagttattatgctggc

SEQ ID NO: 529464 - DNA, 75 bp, Homo sapiens
gaagaggtcggcggcccctgcgggcgccagtcaggtgctggagaatctggtaaaagcaccattgtgaagcagatg

SEQ ID NO: 529465 - DNA, 129 bp, Homo sapiens
tttatcatgaccgtgttcaggcaggaaaacgtggatgattactacgacaccggcgaggaacttggcaggttcgatacaagaggctgttttcctagcgtggcttgctgcctttggtaagaacatgtcgtc

SEQ ID NO: 529466 - DNA, 100 bp, Homo sapiens
ccctgtgtcagtggcagcttcacaagaggacgtcggtgatgaaggagaagaagaaaaagaattcatttcctataacatcaacatagacattcattatggg

SEQ ID NO: 529467 - DNA, 127 bp, Homo sapiens
gctccggtcccagctcttcgcgcccctgggagggaggtgggaggctctaggctccaagacgccgtcgcttgagcaaagtacccacgtttgttcgaatgctggccccagagggagccctgaatataca

SEQ ID NO: 529468 - DNA, 49 bp, Homo sapiens
gcgacccgcagccctggcgtcgtgcggaaaatccgccagagctactttg

SEQ ID NO: 529469 - DNA, 111 bp, Homo sapiens
ctccgccgtgctggatgccgtgatctccagcgccggcctcctcagtgcgaagaagctgcagccgcacctggccaagggatcgacgagaacgtgctaggagcccagctggac

SEQ ID NO: 529470 - DNA, 96 bp, Homo sapiens
cctgatgcagtcagaagaagtagagctctattatcaagtcctaaattttggaatgattgtctcatcggcactaatgatctggaaggggttaatggt

SEQ ID NO: 529471 - DNA, 90 bp, Homo sapiens
ctggaaccattccctggcgtaaatgtgatgccgggagttctgcatcttcataaaaccagtctatccaagaccaggcacctatgttggaag

SEQ ID NO: 529472 - DNA, 88 bp, Homo sapiens
aaagaggactggtgatctacgtgtgctttttcaagggagctgataaagaacttcttcccaaaatggttgacacttactttgacaaagg

SEQ ID NO: 529473 - DNA, 98 bp, Homo sapiens
gccggctacaattggagtcagagtcccaaagacatgggaagactcattgaccaacagtctaacaagctggcaaaagaggaaatgttacaaatgatacg

SEQ ID NO: 529474 - DNA, 100 bp, Homo sapiens
cttgtcttctccactgttcctggaggaatccgagaagagcagagcggagggagccccagacacgattggtgctgaagacatggacggcttccaggcagac

SEQ ID NO: 529475 - DNA, 100 bp, Homo sapiens
gcttgtcgtcttggtgtatagagaacaaaaaacaccacagtactatcgtctatcattggatgaagtggctccggagatggtttggaaatcccttgtctcc

SEQ ID NO: 529476 - DNA, 101 bp, Homo sapiens
catggagcagccgccggcgcctaagagacaacagcagttctgtagagagtttaaatatgaaggaatggcaggacgggctaagggcacttctacccaacatt

SEQ ID NO: 529477 - DNA, 99 bp, Homo sapiens
agtggcaaacagctgtataaactcttgtaaacagctgagatctgtatctgtggacctgaatgttgatccctcgcttcagattgacatacctgatgcgct

SEQ ID NO: 529478 - DNA, 100 bp, Homo sapiens
ctgctctgggacacacctccattggatttaaaagacagtcctcgtcagcactgactttcagctatggaatcggaatttggataaagagagggcagtgcta

SEQ ID NO: 529479 - DNA, 82 bp, Homo sapiens
ggggtcggggccggctgaccaggaacctgggcgagcagcggcgggggcccgagggaacggtttgatcaccactgtccctggg

SEQ ID NO: 529480 - DNA, 50 bp, Homo sapiens
ctgcgcccagccttgatcttgagaagcagatgccacgctactaaagaagt

SEQ ID NO: 529481 - DNA, 100 bp, Homo sapiens
gaagtcaaggcagtcaagctgcggcgagataggctgaaggagaactacgttttgctgagcactgatggccctgggaggaacatcctgaagtttaagcccc

SEQ ID NO: 529482 - DNA, 100 bp, Homo sapiens
gatcatcgagctaaaatatcgtgttggaaaaagctcctcaatttctgaagagaaaggtgactctgatgatgagaaaccaaggaaaggagaaagacgatca

SEQ ID NO: 529483 - DNA, 100 bp, Homo sapiens
ctgccgcctcccgggagtgccgtgcgccgcagcccgggcccaggccccggcagcgcctgggacaaggctcctacccagagattctacccagtgaaactcc

SEQ ID NO: 529484 - DNA, 120 bp, Homo sapiens
acgctgctaggctaccttgctgatgacctcacatggtgtggtgaattcaacacttccactgatgttctaatcatgtcagataaagatgatattgagactccactgctaactgaagcagcc

SEQ ID NO: 529485 - DNA, 82 bp, Homo sapiens
cgttcacaagacttcatcacctctttgtacatcttctgcaattactcggaggtagaagaggatgatccagtgcctgagatcc

SEQ ID NO: 529486 - DNA, 90 bp, Homo sapiens
accttttccacagggaattgagttgacagaacctccactcaatacaccagaaaacagagagtatcttgcagaaattatgtttgaatcatt

SEQ ID NO: 529487 - DNA, 97 bp, Homo sapiens
ttacagccggcgaagaagaagcagtttaaaagattggaagacccgtttgagctacttcttacaaaattcctctactcctgggaagcccaaaaccggc

SEQ ID NO: 529488 - DNA, 86 bp, Homo sapiens
actacagacccagtctctgccaaggcagctgcaatgactctccgcacggtattattgtcattgcaagcactattggcagctgcaga

SEQ ID NO: 529489 - DNA, 100 bp, Homo sapiens
gctggaagtaaccccttccgggagcctagatcctgtgctttactctgaagactccacacagcaagaaggaggccatcagcaaactgggaagaggaccctc

SEQ ID NO: 529490 - DNA, 100 bp, Homo sapiens
ggcggaaagacgagttctcaaagagttgggtttctgcgtccatgtgaagcatcctcataagcctgagatcttctttgatgttgtcagcctctcaacatgg

SEQ ID NO: 529491 - DNA, 82 bp, Homo sapiens
ccggtggcgccggcgcggcttctgcctggagagcggacaaggcaaaatctcagcaagttcggacctctagtacaataaggcg

SEQ ID NO: 529492 - DNA, 100 bp, Homo sapiens
ttccttcccctcctcgccgccaccgcccaggaccgccggccgggggacgagctcggagcagcagccagtggaatcaactatgaaattataatcatagatg

SEQ ID NO: 529493 - DNA, 82 bp, Homo sapiens
aggcagagtgctgatgtgaaaaataccacgacaaaaccaccctaattgcagagggaatggcatacatcgagcggaagaacta

SEQ ID NO: 529494 - DNA, 98 bp, Homo sapiens
tgatttcaaaccttcagaaatagaagttggagtagtgacagttgaaaatcctaaattcagctctggctttctggatctgtgcttctctggtagaggaa

SEQ ID NO: 529495 - DNA, 73 bp, Homo sapiens
acgccttctacagactgcagccactgcggcccaggttcatacgttttatgaagctgtggggtacatgattggt

SEQ ID NO: 529496 - DNA, 75 bp, Homo sapiens
agcgggtccagcttcaggagtactggcggaggggctggacgttccacgccaaagaggagaaatgtctgaagtaag

SEQ ID NO: 529497 - DNA, 83 bp, Homo sapiens
ggcactgctgatgctgctttcgctggggttctggacatggcaagacatgtgccactctatcgggcactgctggaattgcttcg

SEQ ID NO: 529498 - DNA, 97 bp, Homo sapiens
tggaagaccatctacatctcccacaggaagtgtcacacagcagtcaagtatgtcccaaacgtctcaggcattgccagtggacctgagcaacagtggt

SEQ ID NO: 529499 - DNA, 88 bp, Homo sapiens
agactacaggtgttccaaagtgaccccaccaacaactgaacgctttggtcaggctgctacaatggaaggaattggggcaattggtgga

SEQ ID NO: 529500 - DNA, 74 bp, Homo sapiens
attttaagtgtggcatacaagaaagatgagacaaaaggacccagtgaaaggaatgacagcagatgactaaagcc

SEQ ID NO: 529501 - DNA, 98 bp, Homo sapiens
tggaccctggaaaacctggccctcttcaatttctgacaaaagttttcggctttgtgagaaaccttaccatcaaacacgatggccagcaacgttaccaa

SEQ ID NO: 529502 - DNA, 100 bp, Homo sapiens
tctggtgccatatgcacagcccattaatacatcatattggttggtctcgaagcataggtcatcgattcaaaagatctgggctttttggtggtgctggagt

SEQ ID NO: 529503 - DNA, 98 bp, Homo sapiens
tctggagggctgagcagtcaactcaaatgcaagtccaagaggaggaggaggcggaggtccaagcggaaaggtcaaactgtgctgaaaatatccgcaaa

SEQ ID NO: 529504 - DNA, 75 bp, Homo sapiens
ccgccctggacatcaagattaaaagagcgaataaagtttatcacgccggggttcacagcagatgaggctcgggac

SEQ ID NO: 529505 - DNA, 50 bp, Homo sapiens
gaatattaaggctctccgtacagacgttgttcatgtcaatggatatggaa

SEQ ID NO: 529506 - DNA, 80 bp, Homo sapiens
gaaacccgggcgccgccaagatgccgaactccatccggcacaacctgtcactgcatagtcgattcatgcgggtccagaat

SEQ ID NO: 529507 - DNA, 97 bp, Homo sapiens
cacaaaataaccacttaccccttctcaccgaggaagagcgggagaaaggtgggagattttgataagatctggcgagaacactgtgaggatgaagaaa

SEQ ID NO: 529508 - DNA, 100 bp, Homo sapiens
cttcgacttagccctgctccaggaatgggacctcgagtcactgtggtaaagtcagtgataaatcttttgtttgctgcatatactggagatgtgtctgcac

SEQ ID NO: 529509 - DNA, 73 bp, Homo sapiens
gcgcgggcggaggcagcagcaggcgtacctggagtagaacagaaaaattattatgtctgtgttcccttgggac

SEQ ID NO: 529510 - DNA, 82 bp, Homo sapiens
tgacgagccagtacatcaagttcatcagcgagactctgcggcgcatggaggaggaggagagcccaaatcttgtgacaaaact

SEQ ID NO: 529511 - DNA, 100 bp, Homo sapiens
gttccttttctccggcaggctcctaagcctaggagagcccgaactggaggtctaacttcaaacttgtggctgttaattcaaaactctatgccatcggagg

SEQ ID NO: 529512 - DNA, 100 bp, Homo sapiens
cgagaagtgaccccagcaaaagaaaaatattgctgtacctaaattcaagaaactaaatatattttgccaactttggaaaaagaattattcttggcagagc

SEQ ID NO: 529513 - DNA, 75 bp, Homo sapiens
ctcttctccaccacaccgggagacaatgcagatcttcgtgaagactctgactggtaagaccatcaccctcgaggt

SEQ ID NO: 529514 - DNA, 74 bp, Homo sapiens
tgaccacctccagagctaatcagatctggcaccactccttctacaatgagctgcgtgtagcacctgaagagcac

SEQ ID NO: 529515 - DNA, 82 bp, Homo sapiens
cgccggggacgcccgcgcgacgagcaggtggcggcggctgcagatgaggagcgggaaggcctcctgcaccctggagaccgtg

SEQ ID NO: 529516 - DNA, 100 bp, Homo sapiens
ctactcgcccgccaccctgcgctgccgccgctctgaggagttaaagagagcagtcatgatggcctgcactccacacaatgcaacagagtgaaggagcagg

SEQ ID NO: 529517 - DNA, 100 bp, Homo sapiens
atggataagcatgccctgaaaaagtatcgtcgagaagcctatcatcgatcgcccaggaccacaccgcagcgtaactgcaggcctctcagcgaaaaagggg

SEQ ID NO: 529518 - DNA, 75 bp, Homo sapiens
gttcaaccaggccttggaggacaagagcgtttggaaattttagcattcaggtgccaggaatgcagatgggacagc

SEQ ID NO: 529519 - DNA, 99 bp, Homo sapiens
ttcacttccctcggtctgggcttctctgaggcggcgagagatggtcaggtctggagctcgaccgggccagtgctattaccacagctactggcactccat

SEQ ID NO: 529520 - DNA, 50 bp, Homo sapiens
gtcctcgcttgcagttcagcgaccacgggagaagaaatgggtgaccgttg

SEQ ID NO: 529521 - DNA, 100 bp, Homo sapiens
ggctggaaaagagggtggaaaaagcagggaggttatgaggcttaataaagaaggttatgatgtgattgctcaagcccaatctgggactgggaaaacggcc

SEQ ID NO: 529522 - DNA, 75 bp, Homo sapiens
gactttcttccagcttctgctgtccttctttgtggagagcaaggattgatttccagagacttatgttacttgagg

SEQ ID NO: 529523 - DNA, 75 bp, Homo sapiens
gtccttggtggagtccagcgaggtggctgtcatcggcttcttcaaggacatcatccacgacccgggccgcggcgc

SEQ ID NO: 529524 - DNA, 96 bp, Homo sapiens
ctcggcagacgccttcaccagatgtagtcctcaggggaagcagcgatggatattgctgcatatcgagctaaaggaaagcctgatgcagcaaaaaag

SEQ ID NO: 529525 - DNA, 101 bp, Homo sapiens
acaacaagtttagggagtccatggccagaaaacttttggggaaactaaatatattttgccaactttggaaaaagaattattcttggcagagcacagtgacc

SEQ ID NO: 529526 - DNA, 101 bp, Homo sapiens
ctgggagagaggtacctctccttttccctctccctttccctaagttccagttcagacatcataagagatcttttagaagaagaggaagcctgggaagcatc

SEQ ID NO: 529527 - DNA, 100 bp, Homo sapiens
atgggaaggaggccgagccgggatctcaggtcctcgggggcggcggccacgccaaggacgggaagatgatccctatgatcttgaagatgtttctgcacag

SEQ ID NO: 529528 - DNA, 82 bp, Homo sapiens
ggacacggctgtgtattactgtgcgagaggcacagtgaggggagtgaaactggaacgccaagctgaagaagaacgaatacgg

SEQ ID NO: 529529 - DNA, 106 bp, Homo sapiens
gtttaataatgatagaatgaagaccacaataaaagagacctctacttagctcagcaattcttaccttgaatctggggtattggtgttgcaactcagaaggttaact

SEQ ID NO: 529530 - DNA, 74 bp, Homo sapiens
tgcgcaccaaggccctgattgtggggtgtccgcaatgttgccagtgtctgtctgcagattggctacccaactgt

SEQ ID NO: 529531 - DNA, 75 bp, Homo sapiens
gaaccaacccactttctcggcgccgcggctcttttctaaaagtgaactgccttctgttgaagaactcactattat

SEQ ID NO: 529532 - DNA, 82 bp, Homo sapiens
taggggggatagatgcaaaacccttttagagaaacccaaactcttcttcattcagacgctgttggaagctctgactgtggca

SEQ ID NO: 529533 - DNA, 82 bp, Homo sapiens
tgggtcagtccgccgctcaccccgcggccgcaccttcccgccttctcagaagcaaggtctcgctgtgttaccctggctggag

SEQ ID NO: 529534 - DNA, 51 bp, Homo sapiens
gtgacatcataattgcaccctccgacatgatctcagccccgcaggaacggc

SEQ ID NO: 529535 - DNA, 100 bp, Homo sapiens
ctgcattgatgaggcccactgcctctcccagtggtcccacaacttccggccctgctacctgcgcgtctgcaaggcgctccaggcccctgcctgtcacgag

SEQ ID NO: 529536 - DNA, 90 bp, Homo sapiens
gttgagggcccgcgccgcatggaggccggctgaggagcgccgctgcctcgcctcgggagtttgaggacatcaccaatgcgagctttcatc

SEQ ID NO: 529537 - DNA, 99 bp, Homo sapiens
ccatgaagcggcaactcgggcgactgctgctgctcctgagggtgctggaccccctgctctgcgacttcctgggtgtggatgtggaagcagccaagcggg

SEQ ID NO: 529538 - DNA, 89 bp, Homo sapiens
gatcaaatggcacttcattggccacctacagaaacaaaatgtcaacaaattgatgggttcatctcagaagaagttgttggcacctgata

SEQ ID NO: 529539 - DNA, 90 bp, Homo sapiens
tgcaaacccaacctgcatttacaagtatggagatgaaagtagcagggatatcattttcaatgcccaatacccagaactgcctcccgattt

SEQ ID NO: 529540 - DNA, 75 bp, Homo sapiens
atgtcgccgaaaccgggctgcaggcgggtcaaaaggctgagtttcaaattctggataatgtagactcaacgggag

SEQ ID NO: 529541 - DNA, 75 bp, Homo sapiens
tgagaagctggctatggttaaagcggtcagctgaaagaacactttgcacagttcggccatgtcagaaggtgcatt

SEQ ID NO: 529542 - DNA, 74 bp, Homo sapiens
ctgcgtgcggccctggattcaggggccttccagagggggcttgtacatgacagctggaatagcctccagttgag

SEQ ID NO: 529543 - DNA, 75 bp, Homo sapiens
tattatatcatttaaaccacatggctatctaaagagaattcaattcgtcataatctgtccctacacagcaagttc

SEQ ID NO: 529544 - DNA, 90 bp, Homo sapiens
cgggaaatggcgactggctgaaggagctggttctgttgctgctgcgggccgtgctggtatagaggactctaagaagtggggcatgctgtt

SEQ ID NO: 529545 - DNA, 101 bp, Homo sapiens
aagccagccagaccaggaacccaccagaaggaaccaattccggacacataacaagcagcagtgaggacaccaaaggtgggccttaatgtcctggttcagaa

SEQ ID NO: 529546 - DNA, 75 bp, Homo sapiens
gattccaagtaactcttatttgaactcccccactggaaaggattctgaaagaaatgaagtcagccctcagaaatg

SEQ ID NO: 529547 - DNA, 75 bp, Homo sapiens
tggatacctgaaaggtctcctaaccgctgcagagagtgctttcttccagagtgtcagagatggctttggattccc

SEQ ID NO: 529548 - DNA, 75 bp, Homo sapiens
ccggcgggggcggcgtgcggcctagcgtctcagcagcctcccgcgacgatgcccctcaacgttagcttcaccaac

SEQ ID NO: 529549 - DNA, 98 bp, Homo sapiens
cggagaccactgttcaaggccacagcagaggaaatggccctgagcctcacccgagcagtggcgggcggggatgaacaggtggcaatgaagtgtgccat

SEQ ID NO: 529550 - DNA, 100 bp, Homo sapiens
aataaacctgacctcctgtgggttcccaaacactaacttgtttccctgggaatttggaggtgggttcgaaaaatataaccccgttttcacacgaatggcc

SEQ ID NO: 529551 - DNA, 82 bp, Homo sapiens
ctcctgcctcagcttcccaagtaactgggactacagtctgttatgttctgaacccacacatgttttcggaaggaccagatgg

SEQ ID NO: 529552 - DNA, 88 bp, Homo sapiens
tcctgctctgtttactgtggattggatattctcaaggaaccacacatgtattaagatttgattttctaccctagcaaggatggtacga

SEQ ID NO: 529553 - DNA, 98 bp, Homo sapiens
gagagcttccagcagctgctcaatgctcggacacaggtctggagcccggcactgtggtcataacagagcaggcagtggatacctgcttcaaggcagag

SEQ ID NO: 529554 - DNA, 73 bp, Homo sapiens
gaggagggttgctagtggagaagaacccagcgggtgccgcttctccacccgaggcttccacctccaacgagcc

SEQ ID NO: 529555 - DNA, 90 bp, Homo sapiens
atgatacctttgatccagaacttgcagcaacaataggtggatggagagagaaagaaaaagccagagaggagagctggggtccacctcgag

SEQ ID NO: 529556 - DNA, 80 bp, Homo sapiens
ggagtcttccatcaatcatatctcacagggggatatgagactttctactcggaatatcctgagtgttgcgtggatgtaaa

SEQ ID NO: 529557 - DNA, 82 bp, Homo sapiens
cgaagcggatttccgattgaatgtgaccaatggggctgaggctgtgtccactgaggctaagatgactgcctttcctgattgg

SEQ ID NO: 529558 - DNA, 75 bp, Homo sapiens
ctcagtttgatgcgtcacactacgacagtgagaaaggagacgtttgatgcaaatgatttgtatcaggggcagaat

SEQ ID NO: 529559 - DNA, 100 bp, Homo sapiens
cgggacagggtcgggggacacgcaggatgagccccgcgaccactggcacattcttgctgacaggtaagaatgattgatgttggctgatattggagtgctc

SEQ ID NO: 529560 - DNA, 75 bp, Homo sapiens
cggagggggaaaaaatcccaaggtctgcaaagagcgcctggacaccggaaaaggcgattccctgagcgcctggag

SEQ ID NO: 529561 - DNA, 75 bp, Homo sapiens
tctgtccccggactgggagtttgaccgcgttgacgacggctcgcagaaaatgtctttcctccaggacccaagttt

SEQ ID NO: 529562 - DNA, 50 bp, Homo sapiens
ctgggcagtttggggaagtctggatggaataccctctaccatctgctttg

SEQ ID NO: 529563 - DNA, 83 bp, Homo sapiens
cggaattctgagcaccaaaagatgtgcactcccagcaacacccctgccacgccgcccaacttccccgatgcgctggccatgtt

SEQ ID NO: 529564 - DNA, 98 bp, Homo sapiens
ccccgggcaacgatcggaactcggacacggaaggagtcaagactgagaacaacgatcatattaatttgaaggtggcggggcaggatggttctgtggtg

SEQ ID NO: 529565 - DNA, 100 bp, Homo sapiens
caaattatggatgaacctatgggagaggaggagattaacccacaaactgcatggagggatttttgaaatcagatgagaggcagagattggccaaagaaag

SEQ ID NO: 529566 - DNA, 78 bp, Homo sapiens
aaggaccatggaaatctatgttgcccagttcagtgaaattaaggccatgaccttgcctcctttcctggagttcggtgt

SEQ ID NO: 529567 - DNA, 140 bp, Homo sapiens
ataaactcaagtcaacagaatcagagctaaaaaaaaaggaaaagcggcgtgatgaaatgctgggacttgtgcccatgagattatggatgattggccagggtatgacttgaatttattcacgtacccacagcactattatg

SEQ ID NO: 529568 - DNA, 100 bp, Homo sapiens
acgtattcctgctgttcccagaagcgaagtggagagcgccagagtaatggtgctaggaaaagaatgtcagtgattgttcgcactccatctggaaagttac

SEQ ID NO: 529569 - DNA, 75 bp, Homo sapiens
cagccatcctgggaccccaggcgtgcaggttctctttgagggttagaaaatggatttctgactggaatctcacca

SEQ ID NO: 529570 - DNA, 95 bp, Homo sapiens
agaggaagactgtctccagaattacttgggaagtaaaaatctgcgaggcttggtgtttgactttacgatgcaaattatactttgacaacttacta

SEQ ID NO: 529571 - DNA, 100 bp, Homo sapiens
tttgccctggcaaacactggaatcctactttttcttgtatgggtttcgacagaccatgatgaaattgagaatgtggccaaacaatttggtgcacaagttc

SEQ ID NO: 529572 - DNA, 50 bp, Homo sapiens
gcggatacgacccatgaaccggcgagggggcagctggcattttatgctat

SEQ ID NO: 529573 - DNA, 89 bp, Homo sapiens
aacacactcaccgggcacacggaatgggtcaccaagcttttaatctagacaacgagcaaccagattatgatatggattcagaagatgag

SEQ ID NO: 529574 - DNA, 82 bp, Homo sapiens
ttgagagtcacagaggaaggacagtggagtctggcatcttattgccaagccctataccaagtcctgttttggggcgaaagcc

SEQ ID NO: 529575 - DNA, 100 bp, Homo sapiens
cgtgggtacccctggccgtgtgtttgatatgcttaaccggagatacctgtctccccttccaccccccggggaactgaagattgtcctggccgcgacctga

SEQ ID NO: 529576 - DNA, 90 bp, Homo sapiens
aaatcgggctgaagcgactgagtccgcgatggagtttggtgaggattcatcaacctccagtatgatgtctgtgaactttgatgttcaatc

SEQ ID NO: 529577 - DNA, 100 bp, Homo sapiens
tgcgaaggccgggacccggttccccggcccacagtgggggtgtgcaaacccgagagaactggggtcccgggattcttgagctgtgcccagctgacgagct

SEQ ID NO: 529578 - DNA, 100 bp, Homo sapiens
atcatgctggccaagaagatcatcattaaggacggaggcacgactgaggctgatgtgaatccaaaggcctatccccttgccgatgcccacctcaccaaga

SEQ ID NO: 529579 - DNA, 51 bp, Homo sapiens
cgacaattgcaggatgcacagattctggctgagatatttggcaaagttctt

SEQ ID NO: 529580 - DNA, 100 bp, Homo sapiens
cgccgcctcgacccagggcccgcgggccaggagagcgctcggcgggtcctgaacgaggctgtgggggccctgatgtaccacaccatcactctcaccaggg

SEQ ID NO: 529581 - DNA, 101 bp, Homo sapiens
gggaaccctggtcaccgtctcctcagctctggaggctgccatcgagaacctcaatgaagccaagaactattttgcaaaggttgactgcaaagagcgcatca

SEQ ID NO: 529582 - DNA, 100 bp, Homo sapiens
gcagaaccagtcccttgtgtatggcaaagtggatagcttctggaagtatgagcccagaggacctggtcggcccttgtaccaaagaagaatctcatctagc

SEQ ID NO: 529583 - DNA, 100 bp, Homo sapiens
aagaaaattttccttgacctttaggtgcttttatattcatctcaaaaacaaaattctgaactcaggacttggcaaacaaatttacatgtattggagacca

SEQ ID NO: 529584 - DNA, 100 bp, Homo sapiens
gtcccatgctggtgcccagcctaggccccgagggaagacggaagaaagtgccgggaagaaagaaaaccccgtccggaccatccgcaaaaagtaagagctc

SEQ ID NO: 529585 - DNA, 100 bp, Homo sapiens
cctcgcgtcttgctgagcccggggagttaggatgacgcgagcggactatcggacaaaacctttctgctgcagcgcttgtccattttcctcaaaattcttc

SEQ ID NO: 529586 - DNA, 82 bp, Homo sapiens
actccttagatacgcacaagccaaaacctttgggatggtgttgaaactctggattctggatggctgacatgtcagactgaaa

SEQ ID NO: 529587 - DNA, 100 bp, Homo sapiens
cttttttttttttataaaggaacttacctccatctgtcttttcaaggaccctttagatcctacaagatcagtgattgtgatccgctccctggtagcagat

SEQ ID NO: 529588 - DNA, 100 bp, Homo sapiens
gtatgtgtgtgccagcgatgtccccatccgccgccgagaggaggcctatgagaatcaggtcctgaacgaggctgtgggggccctgatgtaccacaccatc

SEQ ID NO: 529589 - DNA, 100 bp, Homo sapiens
caaagttagaccttccagaacctggagtacttcttgcaagcagagctgacaagcaacgtcttaaaaacaggcgtggtgcgctgctgcgtgggacagtgca

SEQ ID NO: 529590 - DNA, 74 bp, Homo sapiens
tcttgaccatgtgacatctgatgctgtggaacttgcaaatcgaaggtgcaggcctggggtagtctcctgtctgg

SEQ ID NO: 529591 - DNA, 98 bp, Homo sapiens
cgagcggccggcaggttgggaggagcggccgaaggtgtctgacttccagcaactgctggcctgtgccagggtgcaagctgagcactggagtggagttt

SEQ ID NO: 529592 - DNA, 80 bp, Homo sapiens
cgcaggcagcatggaccacggttgctgggcggatggggagcgtctatggtcagatggactcaccctgtcacccaggttgg

SEQ ID NO: 529593 - DNA, 49 bp, Homo sapiens
aagatcatcattaaggacggaggcacggctcgcgcttcttcttcccctg

SEQ ID NO: 529594 - DNA, 136 bp, Homo sapiens
aatggattcagtttgcatctctccctcctttaaacagcttctccgggtctcagcatgggaactgcatgagtgagttcatgggactcatccgaggtcactatgaggcaaagcaaggtgggttcctgccagggggagg

SEQ ID NO: 529595 - DNA, 51 bp, Homo sapiens
gaagcagttcggttatacctgggtaagaatgattgatgttggctgatattg

SEQ ID NO: 529596 - DNA, 90 bp, Homo sapiens
cggggtcatgcccatcgccatgagcatcaaggcaggcacggtggatgaggactcgtcaggctccgagacctcagcagccatgtcgaagcc

SEQ ID NO: 529597 - DNA, 74 bp, Homo sapiens
gtcagtggaggtggagttcggataaactgttctacatctacacatccggcaccacagggctgcccaaggccgcc

SEQ ID NO: 529598 - DNA, 80 bp, Homo sapiens
accgacagcacagacagaatccctgctaccaaatatgacagatacctagcatctagcaaaataatggcagctgcttacct

SEQ ID NO: 529599 - DNA, 101 bp, Homo sapiens
tgggaataatgctgccctcccatcctcaagggccagtgggaactctaatattggctttcttcgagagtcacccagctccttcagctgagcgtaccatccag

SEQ ID NO: 529600 - DNA, 98 bp, Homo sapiens
ctgccatctggagtggatggacacacctggttgctcagacaggtatgaacgctgccgtccgtgccgtggtgcgcatgggtatctacgtgggggccaag

SEQ ID NO: 529601 - DNA, 75 bp, Homo sapiens
aaagagcaccaaaacagactgaggaggaaatgcaataccttatttccagatgactcctatcagcacttctctctg

SEQ ID NO: 529602 - DNA, 74 bp, Homo sapiens
gagactggagcccggttaggaagaatggagttggcgactcgctaccagagttgatctctctaatgtattagatc

SEQ ID NO: 529603 - DNA, 100 bp, Homo sapiens
cacaaaatcccagatctacctgacgggcctgcgagggttgaagattgtgaagcaatagcctaagattaagcctgatcaagatgacaacctcccaaaagca

SEQ ID NO: 529604 - DNA, 80 bp, Homo sapiens
gacagctgatccccatgactgctctgcttatactggctggacaggttacttttcacatagaaccatatagcaatcgagat

SEQ ID NO: 529605 - DNA, 80 bp, Homo sapiens
cacggcagccaccatggcgctcctgctgtgcttcgtgctcctgtgcggagtagtggacaatgcagatcttcgtgaagact

SEQ ID NO: 529606 - DNA, 90 bp, Homo sapiens
gccgacttcactctcctctccatcccgtatccaggcaggtaaaaatcaaggtgaccccaagaaaatggctcctcctccaaaggaggtaga

SEQ ID NO: 529607 - DNA, 96 bp, Homo sapiens
ccgcatctgcctccctgccccagcccatcctctctaaccaaggtggccagcgtgaggaagaccacggtcctggatgtcatgaggcggctgctgcag

SEQ ID NO: 529608 - DNA, 75 bp, Homo sapiens
gtctgacagccctgtgtgacaccaagataagtaaccttctagctccggacattcgacatgaaagaaatgtgattt

SEQ ID NO: 529609 - DNA, 100 bp, Homo sapiens
gtactggcctgctgctggcccgcagggcaacagcattattgagaaaagcccttacagaagagtgtggccgtaggtcagctattcacagtagtgaatcatc

SEQ ID NO: 529610 - DNA, 49 bp, Homo sapiens
ggagtatgtcaagcgagccctggaaaattgcctaagaattatgacccaa

SEQ ID NO: 529611 - DNA, 82 bp, Homo sapiens
aggaaggaacttggttccccctccctcagcttccgccccaaaaggtcaaaatgcagatcttcgtgaaaacccttaccggcaa

SEQ ID NO: 529612 - DNA, 98 bp, Homo sapiens
agccctgtgagctggaggaaaggttcgccctggtgctgcccgtggaccgggagcccgtggaccgggagccggtggtgtgccaccccgacctggaggag

SEQ ID NO: 529613 - DNA, 101 bp, Homo sapiens
gacaccgccggcggggagagaagcggatcccgtccgagccccggccccaagtaacgccgccgccccggagccgccaccgaccaagaccatcactatgaccg

SEQ ID NO: 529614 - DNA, 83 bp, Homo sapiens
cctaggcctccaccctggcaggaatcccaatttgcctccacttagtgagcggaagaatggtgggtttggaggatttgggacaa

SEQ ID NO: 529615 - DNA, 95 bp, Homo sapiens
agctgtagaccggagctgttcctattcggccatctttgctcctccctgcaactaactccattcttaattgacactgccctaaccatcatggaggt

SEQ ID NO: 529616 - DNA, 100 bp, Homo sapiens
ggacgctgtgttcccccacgaacttctgctgatggcatccgccacagactcgcgctatgggcagaaggagtcctcggatcagaacttcgactacatgttc

SEQ ID NO: 529617 - DNA, 100 bp, Homo sapiens
ttaatcttcagatttccctagtcaagaatgtccctcttccagtggaaagcccaaccatgcagacatcttgctcataaacttacagtatgtttcagaagtg

SEQ ID NO: 529618 - DNA, 97 bp, Homo sapiens
cacgcggggcgcgggccccgaaggctctccatcgaaggcaacattggattctcaaagttggattggtggaaacaatgaaccattgacaggctttaca

SEQ ID NO: 529619 - DNA, 95 bp, Homo sapiens
gcggaactgcggagttgctgggtccaccgacccttaccctcagcgagagaagtaacccatgtgtttgatgatctcagaggctcagtatccttgtc

SEQ ID NO: 529620 - DNA, 100 bp, Homo sapiens
ccaccagcagcgcctatgagtttgtcacctggctcgatggcattaagcttcggcatggaagccacgctgctgttggtggtcggctactcgcactccaagg

SEQ ID NO: 529621 - DNA, 75 bp, Homo sapiens
aacaactgctacatctgttggaggagccaactagcatggaagtgcagatgttatacatccaggctctaccagggc

SEQ ID NO: 529622 - DNA, 82 bp, Homo sapiens
gcatcttctcaacaaccctaggaggagccatatattgaagaccatgtctgggagcttctactttgtaattgttggccaccat

SEQ ID NO: 529623 - DNA, 100 bp, Homo sapiens
cggggacatcgtctccctgtacgccgagggctccgtcaatggcttcatcagcactttgggggaaatcctcattgacgattcaatttgttgaaggccaatt

SEQ ID NO: 529624 - DNA, 100 bp, Homo sapiens
cccaaaagagtattcttggatcttgcacaggaaggaattaaagaaccgcatgcacgagtctctcatgctcttcgactccatctgtaacaacaagttcttc

SEQ ID NO: 529625 - DNA, 75 bp, Homo sapiens
aagttaatgtttacggcgaagtctactcaacgtttccaagctatacacagaatgggattttacatatgctggaca

SEQ ID NO: 529626 - DNA, 74 bp, Homo sapiens
aaagagaattgcattatatattggaaatctaacatggaattggcagagggggtcgatttgggaggaaaggtgtg

SEQ ID NO: 529627 - DNA, 100 bp, Homo sapiens
agggtcaccggagcgacagaaaacttggaactaagctggaggacaccgagtactcttatgcagtccccatggaaaattatgcatagaggttacaccccag

SEQ ID NO: 529628 - DNA, 82 bp, Homo sapiens
aggcattgaggaactcaatcaaaccagtattcttttcacacagtaattcgccaaaatgacgaacacaaagggaaagaggaga

SEQ ID NO: 529629 - DNA, 80 bp, Homo sapiens
gaagttcgagcactaatatttaagaaagaagatgttaactttcagttttaaacccaatgaaggagttatcataataggag

SEQ ID NO: 529630 - DNA, 74 bp, Homo sapiens
attccaagtaactcttatttggaaggatctgagtctctccctgcggagacagccctgaagaactcctgtaacgt

SEQ ID NO: 529631 - DNA, 75 bp, Homo sapiens
gtacccggtggactcggtgaaggcatggagggatttttgaaatcagatgagaggcagagattggccaaagaaaga

SEQ ID NO: 529632 - DNA, 75 bp, Homo sapiens
tgctgctgaagatctggaagacgcgctcctgcgccgactgattcttgctattccaaatcctcttccacgttgaca

SEQ ID NO: 529633 - DNA, 75 bp, Homo sapiens
tggggttccctcctccgtttctgtatccccacgagacgcaaacatgcagatctttgtgaagaccctcactggcaa

SEQ ID NO: 529634 - DNA, 90 bp, Homo sapiens
tgtcttctgtgtggattcttcagaaagtgaacttggcattttagatctaattcaaatgcttgctttaaatcgagtaacagcatcgcaccc

SEQ ID NO: 529635 - DNA, 100 bp, Homo sapiens
gaaataacacaaggcatattggattacgtagtagaaaccaccaaaccaatttctcctgcaaaccagggtatcagaggcattactacagccgccgtttgtg

SEQ ID NO: 529636 - DNA, 75 bp, Homo sapiens
gcagttctagtcaaagaacgctttctgttcaagaggcagctgcgtatttaaaagagaagctaaaacttacttatg

SEQ ID NO: 529637 - DNA, 83 bp, Homo sapiens
cgaggaggcagccaagctcatggcctgccactgcgtgcgctgtagagggcttactagatgccacaagtggtgctgatgctgac

SEQ ID NO: 529638 - DNA, 82 bp, Homo sapiens
gaaggaacgaggcaaggagctaaagcagcgtgcgttcagccctgggctggtggagctgtctaaggctcaagatatagaagca

SEQ ID NO: 529639 - DNA, 100 bp, Homo sapiens
tgaacaggcttaagatgatgtttgagaaaggtgaaccaactcaaactaaggccaagtataaggagcgagggacggtcttggctgaggaccagctagccca

SEQ ID NO: 529640 - DNA, 75 bp, Homo sapiens
tcagcagacacgggagtttgtggagaagggcagaagatcctgaaggagaaggctgtgcccatgatagaaggctac

SEQ ID NO: 529641 - DNA, 90 bp, Homo sapiens
tgtctcgctccgtggccttagctgtgctcgcgctactctctctttctggcctggaggctatccagcacctctgtgagtgaaagccttcag

SEQ ID NO: 529642 - DNA, 101 bp, Homo sapiens
ggtgccagcacctttcggcttctgagacggcggcagcagcggcattcagcttccagagctaagctcagcatgatcaacaccatgtcaaaaatccgtggcca

SEQ ID NO: 529643 - DNA, 75 bp, Homo sapiens
atattggctgttcagaggacctcaaagactgtgactgacatcaatttgccctatcttacaatggattcttctgga

SEQ ID NO: 529644 - DNA, 76 bp, Homo sapiens
cgggagcctagatcctgtgctttactctgaagactcgcaactcatgcagcaattccagaaccccgacttcccaccc

SEQ ID NO: 529645 - DNA, 74 bp, Homo sapiens
tgcctgcagtttttcatactgttgcttcaaggacacagcttgcattgaatgaacaggcatttgaagaagttttc

SEQ ID NO: 529646 - DNA, 100 bp, Homo sapiens
gaacaggactgactccagtgatgacgcaggccttaaggagaaagtttcagtctgaaatggttgtgacaaataatctcttggatctgccgcccccctctcc

SEQ ID NO: 529647 - DNA, 96 bp, Homo sapiens
agcatgtcagctgccacccccgctaccgagagaccacgctcagcctggtcaagactgttgtcatcatcctggagtctcgctctgtcgcccaggctg

SEQ ID NO: 529648 - DNA, 107 bp, Homo sapiens
cagaaccagatccgggagcacgtcatcgccatcgaaggtgtcatggagaaactccagctgggcccagagattctgcagcgggaaaatccaaggcttatttatgccag

SEQ ID NO: 529649 - DNA, 82 bp, Homo sapiens
gctgaagggcaaggaaagcagcatagagaatgagatagccgtcctgagaaaggggaagttgctgaagttatatttgtaggtg

SEQ ID NO: 529650 - DNA, 98 bp, Homo sapiens
ggaagcaggactgcgccgcgtcttcctcaagctgtcgcctggttgggcccggaaatgggacgtcgcgctttctcagggagcgtagaagcagccagggc

SEQ ID NO: 529651 - DNA, 76 bp, Homo sapiens
gggatatacatgcatgcaccaaaacgaggacagatcgtcaacacctgcagtggcccagacatcgcacgctccgtct

SEQ ID NO: 529652 - DNA, 100 bp, Homo sapiens
gcgagctgagtggttgtgtggtcgcgtctcggaaaccggtagcgcttgcagcatgtgatgtcttggcattgcccattttcaagcaggaagattccagcct

SEQ ID NO: 529653 - DNA, 90 bp, Homo sapiens
caacgaatccttcatcagtatggtcattggtcgactgagatctgatgatatttacaaccaggactgctgcagatcaatgacaaaatcgcc

SEQ ID NO: 529654 - DNA, 125 bp, Homo sapiens
ggagcaaagcgctgagggagctcggtacgccgccgcctcgcacccgcagcctcgcgcccgccgccgcccgtccccagtatgagcccagaggacctggtcggcccttgtaccaaagaagaatctca

SEQ ID NO: 529655 - DNA, 99 bp, Homo sapiens
ggcctacagacacttctggatgttggttctctttgtcattttcaacagtctgcaggagtgctaacaggaatgaatgaaacttctgctgtaatcattgct

SEQ ID NO: 529656 - DNA, 75 bp, Homo sapiens
gggagaatctgggcgtcgctctagagtgatgggtcgttcccctatgactctgtcccttggcagcagaacaccaac

SEQ ID NO: 529657 - DNA, 100 bp, Homo sapiens
gtgctggactgcctgttggacttcttacccgagggggtgaacaaagagaagatcacaccactcacgctcaagggaaggtctgtttctctaacaacttttt

SEQ ID NO: 529658 - DNA, 123 bp, Homo sapiens
taaagttggtggttaagaaaggaaatcaaaccgaaaatgtgtatatagggggcagatggcctgtcggagccagagggcatctctctgaagcgggtcgctgtggtggaagatttctttgacatc

SEQ ID NO: 529659 - DNA, 100 bp, Homo sapiens
tgcaggtattgggagatgcacagctaagatgccaggaccacctggaagcctagaaatggacacagagcacagccaagacctgcagagtgccctcatccgg

SEQ ID NO: 529660 - DNA, 82 bp, Homo sapiens
tcccagtccgggcaagaggcggatggacacggacgtggtcaagctccaaaagttttggaaggtctccatcaagaaaacaaaa

SEQ ID NO: 529661 - DNA, 75 bp, Homo sapiens
tccagtcttgctcagctctcacaggagagggcgttcagaaagaaatgaccgcccggatgtgccactgagagcccc

SEQ ID NO: 529662 - DNA, 90 bp, Homo sapiens
cccgcgcttcgaggataccggcggaggactggaatgaaattgaccccattaaaaagaaagaccttcatcacagcaatggagaagagaaag

SEQ ID NO: 529663 - DNA, 100 bp, Homo sapiens
tgcacatcggattctggaaggcctggggccccaggtggagctgatcatggaagggaagtggttgctgtgtatgttactggtgcttggaactgctattgtt

SEQ ID NO: 529664 - DNA, 96 bp, Homo sapiens
tgaagtaacagcagcaatgaccttccctcgggaattccacctctgcgtttttccctccagggtggactccattatgctggtggaagagggcttcag

SEQ ID NO: 529665 - DNA, 75 bp, Homo sapiens
gtgttaaccaaagccagcctggcatactttgaagatcgtcatgggacattgggacctgtgcaatcactgctattc

SEQ ID NO: 529666 - DNA, 100 bp, Homo sapiens
atttcatgagagaagaaatacaggatgcctctcagctgccacctgcctttgacctttttgaagcctttgcaaaaatctgctacaacatcctggttctgtg

SEQ ID NO: 529667 - DNA, 89 bp, Homo sapiens
tatgaagcgtttacgtgtcccccctttgggagctgctcaggatgatcataaacttagccttgatgaacttcatcgtaaatatggaacag

SEQ ID NO: 529668 - DNA, 100 bp, Homo sapiens
cgacttcgatgatcgtgtgtcggatgaggagaagcttaatcttctccatacagagctggctaaacagttggcagacacaatggttctacctatcatacaa

SEQ ID NO: 529669 - DNA, 75 bp, Homo sapiens
cgtggggctcggccgcgcggactgaaggagactgaagcactgggttctaatcttcacgtcgaagtgaagggttat

SEQ ID NO: 529670 - DNA, 80 bp, Homo sapiens
aaaatgaatctgagcaatatggaatattttgtgccacacacaaaaagctatgtttccagtgtcctctgggtgtttccaag

SEQ ID NO: 529671 - DNA, 49 bp, Homo sapiens
cctttatatagaagggagagtaggccctgggaggagcggggacactgag

SEQ ID NO: 529672 - DNA, 100 bp, Homo sapiens
gatgatgagcagtttgtttctctgtatggcacagaagaatatttggaatttgctgacacaatatcttccgcctggtgctgggcatatcctaagaacttac

SEQ ID NO: 529673 - DNA, 74 bp, Homo sapiens
tgcaaattttacggatcagaaggaattcagtctccaggacattgaggaacaagcacatcatgattgacttgggg

SEQ ID NO: 529674 - DNA, 100 bp, Homo sapiens
gcaagtacccgtccatcatagtcaactgcgtggaagagaagagtcgggccacaaaaagttaaaaagtaccatccagagaagcacagaaacaggcatggca

SEQ ID NO: 529675 - DNA, 83 bp, Homo sapiens
gaaacaaagccacccagccaatgaaggtaatctttagatggtggaagatctctctaaggagtgagtatcgatcaacaaaacct

SEQ ID NO: 529676 - DNA, 100 bp, Homo sapiens
aagaagccaacagcgaggctttcagttctttggaattccattcttttccttattcttctgatgtggatccaggatttgttaaggattccaagtaactctt

SEQ ID NO: 529677 - DNA, 100 bp, Homo sapiens
atcacctgcttcatccttgtttaatgactttggtgccctcaacatctctcagagacgaaaggtgaatggaagagaatccgaagaagaaaatctcaataaa

SEQ ID NO: 529678 - DNA, 75 bp, Homo sapiens
ttgtgctgccatgtccgcaccggcaccatcctgctcggcgtctggtatctggcataatcaccagcaacacccggg

SEQ ID NO: 529679 - DNA, 100 bp, Homo sapiens
tcaagtgatcctcccacctcagcttgttttacgtaccctgggaagcaagtgtggtgactttcttcgcagccggttctgcaaagatgtcctgccaaagctg

SEQ ID NO: 529680 - DNA, 100 bp, Homo sapiens
acagctcaaacgttgaaacacccacagactgccaagtgggacaactttctggcttttgaaaggctccttcttcagaatgcatacttggaatgaatccttc

SEQ ID NO: 529681 - DNA, 75 bp, Homo sapiens
gctggacctgtgggagatgactgggaagcaaaggcgaatgctccttgtgttatatttattgatgaattagattct

SEQ ID NO: 529682 - DNA, 102 bp, Homo sapiens
ctgctggcgctctggctgtgctgcgcgacccccgcgcatggaaccacgtgaatgttgagggggcgacacacaagcaggtggtggacctgattcgagcaggcg

SEQ ID NO: 529683 - DNA, 50 bp, Homo sapiens
ggccctggctggggatgtgcgaggcttcagggatgacttcttagggggca

SEQ ID NO: 529684 - DNA, 100 bp, Homo sapiens
gtgatcattttaaacttcgcttccgaaaaaactttcaggccctgttggaggagcagggtccttttgtacaagtggatgaactgatggaaattttccgaag

SEQ ID NO: 529685 - DNA, 82 bp, Homo sapiens
cggaccctgagccagatgacaagaatcaagaactgccattggatgtccagaatcccctgtagttgataatgttgggaataag

SEQ ID NO: 529686 - DNA, 141 bp, Homo sapiens
tcatatgtgccacaggaagccatcagcagtgccatccagcttctagaagacccattacagagggtggtgggtgtctctgctgttctgggtactggattagatgaactctttgtgcaagttaccagtgctgccgaagaatat

SEQ ID NO: 529687 - DNA, 83 bp, Homo sapiens
ctggacgcggcgctctacggcctcgccacctggtacctggaagctgtgtgcccagatgtccagaccaagatagaacctgtctc

SEQ ID NO: 529688 - DNA, 100 bp, Homo sapiens
cccacaacgaatgaatgaacagccacgtcaggaaagaccacagcaagattctttcattcgtctcctcctagcctgggggaccaggctcgaactgaccctg

SEQ ID NO: 529689 - DNA, 82 bp, Homo sapiens
cttggactgagtcctgcaggacacagagctggaagtcgagtgtgctactcaactcaggagatttggagacaaactgaacttc

SEQ ID NO: 529690 - DNA, 74 bp, Homo sapiens
attagcttcgcagtctggaaagctttaggagttcacagtatggcttaatggtacaaataactccagagaccatg

SEQ ID NO: 529691 - DNA, 100 bp, Homo sapiens
cttatgcatacaggaatcccaaaattggatactgccagggaactctaatgatccaggacaaagaagttaccctggagtatgtatcaagcctggatttttg

SEQ ID NO: 529692 - DNA, 100 bp, Homo sapiens
cactgtcgcagggacaggagtactccacagaggataaatttcaacctccggggccacaatagcgagggagcttctgataattggaggtgttgcagcccgg

SEQ ID NO: 529693 - DNA, 90 bp, Homo sapiens
gggctgcagagcatggactgttaaatcttgcacttcttctgagtgaggtattccggaaggacctcatcagtgccatgaaacttccagatt

SEQ ID NO: 529694 - DNA, 97 bp, Homo sapiens
gttttaactgatgagcaatcactttggattgaagatactacaaaatcagtttatcaatatgctgcaaaagagcaccagcaggcccttgatgttcttg

SEQ ID NO: 529695 - DNA, 90 bp, Homo sapiens
ccaacctctcgtacatcggcgagggcgcctacggcatggtgtgggacctcaggatggaaaccagcagcctgcaccgcccgagaaggtcgg

SEQ ID NO: 529696 - DNA, 110 bp, Homo sapiens
tgattccctgtgttctgcttttttcattgttccactggacgctcatcagagggaagatctttttcctcaattggaattctagccacagatacacatcatccccaggattc

SEQ ID NO: 529697 - DNA, 85 bp, Homo sapiens
aacccacctaactacggaaaacctgatcccaaaattattgaaaacactcgaaggtatggaggggctcccggagggcctgcgtttc

SEQ ID NO: 529698 - DNA, 75 bp, Homo sapiens
atttacgcgccgtgtaactgtgaatctttcaaagggtctccgtctctccaccgggggcttcatccttccagggag

SEQ ID NO: 529699 - DNA, 100 bp, Homo sapiens
gagtttgtagaaaaacggagagcagctcttgaaaggtatttgaaatatctcaccaaaaaatatttgaagaagaataatctacgtgactggttgcgcgtag

SEQ ID NO: 529700 - DNA, 82 bp, Homo sapiens
cagaagtccagagctgaggactgcctgtttgcaggcccggcgcccgcctgcccgcaccctcgtcctcacagacgccacagcc

SEQ ID NO: 529701 - DNA, 75 bp, Homo sapiens
gtcctgagcttcctgcggacgtccaagctgctgcttccggatgactttaaggatgatgatgctgaagctatcctt

SEQ ID NO: 529702 - DNA, 80 bp, Homo sapiens
gggcctgcaggtctctgtcgagcagcggacgccggtctctgttccgcaggatggttgaatttagtattagtgacaaacag

SEQ ID NO: 529703 - DNA, 96 bp, Homo sapiens
cggtcaaaggatgctgagtccggagcgcctagccctaccggactacgagtatctggacagttaaatctcacacagaaacagatgagaaacaaacag

SEQ ID NO: 529704 - DNA, 74 bp, Homo sapiens
cacgggacagcatgatgattgaagaactccttgtgccatccaaagagcaggatccaaactactggatacaggtg

SEQ ID NO: 529705 - DNA, 82 bp, Homo sapiens
tccgtcccccgcgggtctgctctgtgtgccatggacggactccgccgtggtcatggaggagggaagtccgggcgaggttcct

SEQ ID NO: 529706 - DNA, 75 bp, Homo sapiens
cggggacctcgtccgagcccacccgcctttggagcaaaaaggcattgggatgaacgagccgctggtggactgtga

SEQ ID NO: 529707 - DNA, 75 bp, Homo sapiens
gaaccagccgactggagcaggcagcagcccaggaattactcaaggtgatgaggacaattgatgacagaatagtac

SEQ ID NO: 529708 - DNA, 82 bp, Homo sapiens
cccccgagcgctgctgacattgagacctggtgtcagccttacaggacaagcagctgcggatctttgaccccagaacaaagcc

SEQ ID NO: 529709 - DNA, 51 bp, Homo sapiens
ctcctgagaagctgggactacaggtttcctatcctgggagcaggagagtgt

SEQ ID NO: 529710 - DNA, 90 bp, Homo sapiens
ctgcatccttaactgagaatgagctggaaactgacaaactagctctcccgatgagccccagcccgcttagcccgagccccatccccagcc

SEQ ID NO: 529711 - DNA, 90 bp, Homo sapiens
tctggctcccttcacctcatttgtctacaccatcaaggaggaaggcctggttcttcaagggtccaccggggcttcctggcaagacaggac

SEQ ID NO: 529712 - DNA, 80 bp, Homo sapiens
acttaaaaaacagttttgcctcagcccttcgtatgcatcaaattgcaatttggaggagaggcagcacaagcagaagcctg

SEQ ID NO: 529713 - DNA, 100 bp, Homo sapiens
ccgctctgcgcttcaacagctccagcgttcagtgtcagaacagctcgccttctgagagaaattgagtggatccggagccggagatattggcctcaaggta

SEQ ID NO: 529714 - DNA, 100 bp, Homo sapiens
ggggattatggaagtttactgcatcagggatttggggtactctcagtaatattggcaaaccatgccatcaaactgctaacgtctctctttcaagacctac

SEQ ID NO: 529715 - DNA, 83 bp, Homo sapiens
cgccctgaacgaggaggccgagaggaaaggggacaactacacctttgcccaacctgggattcaaatgaaagtgaaaatgttag

SEQ ID NO: 529716 - DNA, 75 bp, Homo sapiens
ctgaaatggccaagaaacttagccagatggaccaggtgatccaccccaaatccaaggccaggccatcctctccct

SEQ ID NO: 529717 - DNA, 75 bp, Homo sapiens
ttcctgttctgatagcgtggaagctgccgggccgcaagtacagccctgggtacaacaccgaggtgggagacaagt

SEQ ID NO: 529718 - DNA, 80 bp, Homo sapiens
cttaagcttgcaactgaactccctgatgctgaacttaggaggactttatgggccaaagatgaagaggaagcctttctgga

SEQ ID NO: 529719 - DNA, 98 bp, Homo sapiens
agagttcactggatgttgctgaagaagaaatcatagacgatgatgatgatgacatcacccttacaggtactccaaagattcaggtttactcacgtcat

SEQ ID NO: 529720 - DNA, 99 bp, Homo sapiens
gtggaggacctgtggaaggcatggaagtcatcagaaggggcaaaaaggccccgagtcacttcaggtggtgtgtcagagtctcccagtggattttctaag

SEQ ID NO: 529721 - DNA, 74 bp, Homo sapiens
acaaaccctttctatgtactgcgcctggatgtggccaggaagctgcagtaaaggaagatgaagaagaagtttca

SEQ ID NO: 529722 - DNA, 100 bp, Homo sapiens
ttttttctctctctctctctcttaagaaaggaaaatatcccaaggactaatctgatcgggtcttccttcatgagtcttttagtcctgctatacagctgca

SEQ ID NO: 529723 - DNA, 124 bp, Homo sapiens
gagagaagtccccagaagagacagcacacttagcaattgccctcattattaaaggcctaggtcatggcaaaaccccaaaagatgccgcgtcagttcgagccacgcatccaataccagcagcctg

SEQ ID NO: 529724 - DNA, 100 bp, Homo sapiens
acaaagggccccttacacaccagacagcttattcttgcaggggctcttaggattgctgacaaggtagagtcagggaagacgtctgtggtagtgcattgca

SEQ ID NO: 529725 - DNA, 97 bp, Homo sapiens
aaggagagactctagacattcagagtcttgaaacagcaatcaaaaggactgaagtggggttaagactcagcaaagacccaaatatcgtcatagccaa

SEQ ID NO: 529726 - DNA, 75 bp, Homo sapiens
gcttttaaaaggaaccttagtcttttaaaggacttcctcgttctgcccatcttcctaacaaggctatggctgata

SEQ ID NO: 529727 - DNA, 75 bp, Homo sapiens
aggcagccttcccaaggaccgacgtttggagtgaaaggaagagccaatgttttccacccataatcctttctgccg

SEQ ID NO: 529728 - DNA, 75 bp, Homo sapiens
gtggaggagacggcttggaaaacggagagactggggagaatctgatgatttgaagaagagaagagagcctcacat

SEQ ID NO: 529729 - DNA, 97 bp, Homo sapiens
ctgaaacggtgcacgtactacgagacgtgtgctacatacgggctgaatgtggagagggtcttccaggacggttaaacccatccagagtaatggctgc

SEQ ID NO: 529730 - DNA, 82 bp, Homo sapiens
gatcaacctcgtcatgtcctacgcgatgttccaggtcatccagccagagcgtgcgctgtacatccaggccaacaactgcgtg

SEQ ID NO: 529731 - DNA, 75 bp, Homo sapiens
taccaggggcagagggaccactctgacagaatcctcactatggatgggctcattgaggacattaagcatcggcgg

SEQ ID NO: 529732 - DNA, 74 bp, Homo sapiens
atacttaagagaagaagttaaaacatttcagggcaagccaattatggtaaaagtcttgcagtgaaaaacccgag

SEQ ID NO: 529733 - DNA, 98 bp, Homo sapiens
tcctcttgtctacgtgctggacccgggcattgtctaaatataggagcagatctgcagatggggccaagaattacttcgaacatgaggagttaactgtg

SEQ ID NO: 529734 - DNA, 50 bp, Homo sapiens
taaagcgtttggaaaatccacaggtttgtggtaaatatgccagctctaga

SEQ ID NO: 529735 - DNA, 75 bp, Homo sapiens
gagcagactcagaatgagctcaccagggagctgaaactcaagttggtgcctgctcacccagccctcgtcaatgcc

SEQ ID NO: 529736 - DNA, 101 bp, Homo sapiens
taaaatgtatccagttttatgctgatgagagctataacttaatggttacagcaactccatgtaaagatgatggtgatgcaaggatttcagccaattcctgt

SEQ ID NO: 529737 - DNA, 100 bp, Homo sapiens
gtcagcacttgctttagctatcaaagtactaaataagaccatggatgttagtaaactctctgctgaaaaaggtgctggagaatctggtaaaagcaccatt

SEQ ID NO: 529738 - DNA, 82 bp, Homo sapiens
aggaattaacaatgtgcttgtgcctcatcaaaggctgctctttggcgtaaattgcaatcgattagggatcgtttctcagaat

SEQ ID NO: 529739 - DNA, 82 bp, Homo sapiens
agcagcgggtgggcgacctcttccagaagctgccctgggcgctgcctatggcacagccaagagcggtaccggcattgcggcc

SEQ ID NO: 529740 - DNA, 75 bp, Homo sapiens
cggctgcgtcgcccgaggcgaggaggagcgctggcgattttgtggaagtataatactttgtcattatgagatgtc

SEQ ID NO: 529741 - DNA, 101 bp, Homo sapiens
aaacagcactgccaaatagcagaagaataccatgaggtcaaaaaggaaatcaccctgcttgagcaaaggaattaatgaaggagttcccccttctgagtatg

SEQ ID NO: 529742 - DNA, 134 bp, Homo sapiens
gcgcagcgactacgaccgttcccgcgagagagatgaaagacgtcgaggggacgattggaatgacagtgccggtggtggtgtgcacattgagccccggtatagacagttcccccagctgaccagatcccaggtgt

SEQ ID NO: 529743 - DNA, 82 bp, Homo sapiens
cggctgatttagaaggaggttcaggctacggtgagccgaagatgcttcaggactgccccaaggcccgcagggaggtggagct

SEQ ID NO: 529744 - DNA, 96 bp, Homo sapiens
cttcattcataaggataaaggatttggctttatccgcttggaaacccagcgtccctatgaagaggctctcctacagaagatgtgggaaagccagga

SEQ ID NO: 529745 - DNA, 82 bp, Homo sapiens
agcacttccacagccaagtgcgggagtccacggaggattccctgggagcacccaccagctgagatctgcacatcagccacaa

SEQ ID NO: 529746 - DNA, 98 bp, Homo sapiens
gtgtgtgtgcgggcaggagaggacctcggccacactcaccgtcagggccaagaagtatgatgcgtttttggcctcagagtctctgatcaagcagattc

SEQ ID NO: 529747 - DNA, 74 bp, Homo sapiens
gcagctggcggagctggagctggagctctcggaggaacccttaggagaaatcttgagagtggacagcaattgtg

SEQ ID NO: 529748 - DNA, 75 bp, Homo sapiens
agacgaagcctttgaagaattaagagtgtattttgacctacgaattggagatgaagatgtaggccgggtgatctt

SEQ ID NO: 529749 - DNA, 100 bp, Homo sapiens
cttcaaacattcgtctcggaaaccccgcctcttacagtcacgagatcatgatgctgcgattaatagatatagccgtttatcaaaaaaaagagaaaatgac

SEQ ID NO: 529750 - DNA, 75 bp, Homo sapiens
attcgaggcggcgggggacaagtcggcgccccagagcggacgagctatttgaactgctgggacctgaaggacttg

SEQ ID NO: 529751 - DNA, 100 bp, Homo sapiens
cacggagcagcactcttcaccctgcacagccttgttagtgttggaaaaccttggacagacaattgtccccgatttgggatcactggaaagtcagcatgat

SEQ ID NO: 529752 - DNA, 51 bp, Homo sapiens
tgggtttaatccaacagaagaaggtttgtacgaagactactttatttttac

SEQ ID NO: 529753 - DNA, 107 bp, Homo sapiens
ccgctgcacatcgtcctgtggacgcgtatcgccagcacgatcccaccgcacgttcagaagtcgggtgtggtggacctcagttttgaggccgagagtcctctggcgcc

SEQ ID NO: 529754 - DNA, 50 bp, Homo sapiens
gagggggcgctgagctgttgggatcgccatggatcggatgaagaagatca

SEQ ID NO: 529755 - DNA, 95 bp, Homo sapiens
cctcggagtccttggggacggagcagcgcgtcgtggggcgagcggcaggccgccatggcatcagatgaaggcaaactttttgttggagggctgag

SEQ ID NO: 529756 - DNA, 75 bp, Homo sapiens
ttctcagaagacagagggttttcttttgagagctgacctgtcctggacgcagcataactaacgaagctgctgcag

SEQ ID NO: 529757 - DNA, 82 bp, Homo sapiens
aagcacgcaggaggagttgctgagtacaggttttcaaatggaacattttgatgcatcacttagtacctatttcaaggcattg

SEQ ID NO: 529758 - DNA, 75 bp, Homo sapiens
ccagaaggaaaccagtggccgggaagcaccagctggagcaaaatatgctgtgaattccatcaagaagaaagtcaa

SEQ ID NO: 529759 - DNA, 75 bp, Homo sapiens
ccaaatatcctcggaagagcgctcccaggagaaacaacttggtgttgtggttgccccacatacattaaagttacc

SEQ ID NO: 529760 - DNA, 85 bp, Homo sapiens
gccgccggctccgcggcgatggcgctctataacccctaccgccacgccatcacccagaccataaaatgctcccacgagcgatcgg

SEQ ID NO: 529761 - DNA, 113 bp, Homo sapiens
gtgacatccaacctgtatcaagtcttctaatctgtgaacatgtagaacttcatggaggaacacggagtgacccaaaccgaacatatggctaccatagaagcacatgcagtggc

SEQ ID NO: 529762 - DNA, 100 bp, Homo sapiens
ttcgaccttggacttctcagcctccagaatggtggacgccctgcttcatctggcccgccagaatcgggctgtggcccgcacagcccagaatgaacggtca

SEQ ID NO: 529763 - DNA, 75 bp, Homo sapiens
caatgtcacttacaacattaatcagatactgcatttaagctacccagaatggaatcctgacaatgatacaggaca

SEQ ID NO: 529764 - DNA, 75 bp, Homo sapiens
acgacctccgactactttctccttcaaggaagacataggccaaggagccagacttcctgtgttaactccttcctc

SEQ ID NO: 529765 - DNA, 75 bp, Homo sapiens
caagaccctaaagttcgtcgtcgtcatcgtcgcggtcctgctgccacacttgcacctcctgcgccgccgcccccc

SEQ ID NO: 529766 - DNA, 82 bp, Homo sapiens
ctgctcaaagctgctgccgccccttgggctaaaagaagtcccgggcccagagcccggccagcaggagcagttggtcttcggc

SEQ ID NO: 529767 - DNA, 90 bp, Homo sapiens
ctagcaatgagctcccaaagccatccaggcaaagccaaagctaattgagccactcgactatgaaaatgtcatcgtccagaagaagactca

SEQ ID NO: 529768 - DNA, 75 bp, Homo sapiens
ctgcaggcgctgtccggacagttcgacgccatctacttccacccgcctcctgacaaggtgatccgggcgggcccc

SEQ ID NO: 529769 - DNA, 83 bp, Homo sapiens
tggaatgcatccaagagaatccctcaacatgctgcaaaccagtccagctacgggggcccagccagccagcagctgagtggggg

SEQ ID NO: 529770 - DNA, 100 bp, Homo sapiens
gtttactgcatcagaaactacagggtccaaattccaagcctgtagtgtccttcattgctggtttaactgctcctcctgggagaagaatgggtcatgccgg

SEQ ID NO: 529771 - DNA, 80 bp, Homo sapiens
agcgtgattctgctgagtgtcagatagaagatggtgagatttttgcaagtattaaccagaaggacggtatggtcagtttc

SEQ ID NO: 529772 - DNA, 96 bp, Homo sapiens
catggcttcaggaaggctattgctgagaggcacggcaacctgtgcttagataagtaatgtgtgtggctggtattggacttgttgtattattcttca

SEQ ID NO: 529773 - DNA, 96 bp, Homo sapiens
atgacgtgtcagtatcggtcagacttcatcaatatagaatggagatgtatgcatttcgattcttcatccgcctgtagatgacccacagagtggaga

SEQ ID NO: 529774 - DNA, 100 bp, Homo sapiens
cgggtggcggctcgggacggaggacgcgctagtattccagcaagattatggaagagcatagctacatacaaaaggagctagatttacaaaatggtagctt

SEQ ID NO: 529775 - DNA, 75 bp, Homo sapiens
taccccggggtctatggaagtaatggaaggacccctcaacctggctggagcggctcaggcggcctcggtgcgaag

SEQ ID NO: 529776 - DNA, 100 bp, Homo sapiens
cttacttgaagcatgtctttcagagcccggcaccacccatcttgagtatctgatacgtcggtaacctttccagagatgtgacagaagctctaattctgca

SEQ ID NO: 529777 - DNA, 82 bp, Homo sapiens
tccaggacctcagcgagaaaggaagtcatcttcatcctcagaagacaggaatcgaatgttcaaacgtcatgttggggaagaa

SEQ ID NO: 529778 - DNA, 80 bp, Homo sapiens
cgggggtcttcctcctccgccgttgacagtctctgctttctatccgtcaagatgataaagtcgtgtgcccgagaaccaaa

SEQ ID NO: 529779 - DNA, 75 bp, Homo sapiens
ccgcatcgcctcccgtggaagcccaggcccgcttcgcaggttttaagctctgcagcgtcactccctggctctgaa

SEQ ID NO: 529780 - DNA, 100 bp, Homo sapiens
ctgaggagctggcattggagcaagccaagaaagaatccgaagatcagaaacgggaggtatggaaacattggaacttcaaaaggacatcaaagaagaatca

SEQ ID NO: 529781 - DNA, 50 bp, Homo sapiens
gggtcctttatatagaagggagactgctctgttaaaagcgaaaatgaaac

SEQ ID NO: 529782 - DNA, 100 bp, Homo sapiens
gagagacttctgtgcaagtttagaggaccgacagaaccaccaagtaaaacctgaaaaaaggttactaagtgatggacaacagcaccttacggaaagcctg

SEQ ID NO: 529783 - DNA, 75 bp, Homo sapiens
cgctttccgggagactggagtcgaaggccgtgagtgagaaagatcagtctaaagaaaaggagaagaaagtgaaaa

SEQ ID NO: 529784 - DNA, 98 bp, Homo sapiens
ccagagaagtgcccgaggagagttaacagttgacattcgtgaaattaaggagatccgcccagggaagacctcacgggactttgatcgctatcaagagg

SEQ ID NO: 529785 - DNA, 83 bp, Homo sapiens
cagggacctgcccgcctgcggctgctccggcaacatggccaacgccctggccagcgccacttgcgagcgctgcaagggcggct

SEQ ID NO: 529786 - DNA, 75 bp, Homo sapiens
ctcggacgcacggaccaggcccatttccctttcatctaataccaagctgctattttacacttgaagagggagcac

SEQ ID NO: 529787 - DNA, 104 bp, Homo sapiens
ggactattgacagcacccaccttggtgtggccctcagattctcagcttgattctaaggaactttcagctggttctcaatttgtaggactcatggcagttctcac

SEQ ID NO: 529788 - DNA, 73 bp, Homo sapiens
ccggcctgtgtggtggactgtggcacgggagacgatctgccgaccctctgggagaaaatccagcaagatgcaa

SEQ ID NO: 529789 - DNA, 83 bp, Homo sapiens
ctggaataaaaacagagtccgatgaaaggaatgggtctgggaccttaacagggagccatgtgacactacctgagaagcctgtt

SEQ ID NO: 529790 - DNA, 90 bp, Homo sapiens
gaaggcccagcgcttcctgcagaaggccgagaagctctacccactgccctcggcccgcgatattgatgatgttaagaagttcaaaccggg

SEQ ID NO: 529791 - DNA, 90 bp, Homo sapiens
tgaccttctgggcgtacccaggccccagctggtgccccagcccgtggaccgggagcccgtggaccgggagccggtggtgtgccaccccga

SEQ ID NO: 529792 - DNA, 100 bp, Homo sapiens
agttgcgtgaggggtttgtactatcctcggtgctgtggtgcagagctagttcctctccagctcagccgcgtaggtgatttgatgaaggctgctgcaggag

SEQ ID NO: 529793 - DNA, 98 bp, Homo sapiens
atggtcgcctgggtccctctgagccccggggcatctatgccagtgagaggcccaagtccctagatgagaccccgctttctacaccaaccgcaagagac

SEQ ID NO: 529794 - DNA, 100 bp, Homo sapiens
cgaccctctctctgtcctcattgcgcccagacgggccggcccagagctcccgggtcgtctttcgtgtggccgcgagaatcttcagctacttggagcaaca

SEQ ID NO: 529795 - DNA, 80 bp, Homo sapiens
ggacggtcgattggtctgaaattcttgaagagacaggccgggctgggatcagatgggaagtggaacctcgtcatgaccag

SEQ ID NO: 529796 - DNA, 74 bp, Homo sapiens
tgctggaaggagactggatgatagaattaactcctctttcctaaaatggagtcgagtaaaaagatggactctcc

SEQ ID NO: 529797 - DNA, 48 bp, Homo sapiens
ctacaacttcccctactgcgaagggaagccggagcttccccggcagcc

SEQ ID NO: 529798 - DNA, 83 bp, Homo sapiens
atggaatgtgctttagaagttaaaaagatgcttctgatgatctagatgacttgaacttctttaatcaaaagaaaaagaagaaa

SEQ ID NO: 529799 - DNA, 90 bp, Homo sapiens
actatcaaggcctcccagtacgttgtgtgaagagtatcattcgacaggccactctgcccttccactgcagtgccatcctggctacagccc

SEQ ID NO: 529800 - DNA, 89 bp, Homo sapiens
acagcttatttctgcttactcacttgtagatccagagaaagccaaagcccaaaagttttggaaggtctccatcaagaaaacaaaattat

SEQ ID NO: 529801 - DNA, 101 bp, Homo sapiens
cccgtgtacgtgcctgtgcctaaagactcacaccacccggcaagaactgctcactacggctccctgccccagaagtcacacggccggacccaagatgaaaa

SEQ ID NO: 529802 - DNA, 75 bp, Homo sapiens
agatcctcgactttccacccatcagcgccttccctgtcaatacgctccagattcagaatctgataattcagataa

SEQ ID NO: 529803 - DNA, 75 bp, Homo sapiens
ggtcctgctgcaggtggcaagctctgggaaatgtttcaacgtgcgcaagcgttgcggcggcgggcagaggactac

SEQ ID NO: 529804 - DNA, 100 bp, Homo sapiens
atggggatggctgacaagaacatccagtattatgagaaggactcgctcagcagcagcctgaaaacttgctacaagtatctcaatcagaccagtcgcagtt

SEQ ID NO: 529805 - DNA, 100 bp, Homo sapiens
gtgactgggcggtgccggcgccggagacgatgccgttctaatttgacaggacatgctgagaaggtgggaatagaaaattttgagctcctgaaggtcctag

SEQ ID NO: 529806 - DNA, 100 bp, Homo sapiens
gatccagcaaggtcggcagagcaaggggcttacgcagaaggacctggccacgccgcggcgagtcctttgcacatgttggcaacacacgcatccgcatcgg

SEQ ID NO: 529807 - DNA, 50 bp, Homo sapiens
ttagaaaggatcaggactggcggaatcaggaaacccaggcccaacggcag

SEQ ID NO: 529808 - DNA, 100 bp, Homo sapiens
ctgccagacccaaatactattttgcatggacgctaggtttactcctggcttgggggcattaggaagcactggaggctcttcgggaactaatggatctaac

SEQ ID NO: 529809 - DNA, 100 bp, Homo sapiens
ctcccaccctgagcagagccgccgaggatgataaacacccaggacagtttgatgaaggccggaacaactttgaaggggaggtcaccaaggagaacctgct

SEQ ID NO: 529810 - DNA, 74 bp, Homo sapiens
accgtgacctcaagacgtccaacctgctgctgagccacgccggcatcctcaagattcatgttacatgtaaagct

SEQ ID NO: 529811 - DNA, 99 bp, Homo sapiens
aattaaaaacttcagagcaaaacatcactgtaattcttgctgtagaaagcttaaacttccagttggtcgcattatgtttcagctcttctcagacatatg

SEQ ID NO: 529812 - DNA, 86 bp, Homo sapiens
acatggagatgaagaagaagattaacctggagttaaggaacagatccccggaggaggccaagtacctggcccagatcattgtgatg

SEQ ID NO: 529813 - DNA, 78 bp, Homo sapiens
gctcttcctggactcctgagcagagacacatcaccttcactttgggatatggaatttgataagcagttagccacagaa

SEQ ID NO: 529814 - DNA, 100 bp, Homo sapiens
cgaggagagccggagtcggggacccaggagtttcctgtgtccagcgctgccggagccgcctgagacagccattgatatcctgacaacagtagtacgaaat

SEQ ID NO: 529815 - DNA, 100 bp, Homo sapiens
tccaaagacgatgacaagatggtctttaagacaggacagaactgtaccgctctctttttggccagctccaccctcccgacgaaggccacggggattgaca

SEQ ID NO: 529816 - DNA, 75 bp, Homo sapiens
cttcctccagacctctcggcgcgggtgaccattgtgaggtagatattttgttctaattttccagatgaggaagct

SEQ ID NO: 529817 - DNA, 82 bp, Homo sapiens
tggtctcgctggctcaggagtgaagctgcagaccttcatggtgacttaagagattaaaattaatttggttgctgttggttct

SEQ ID NO: 529818 - DNA, 50 bp, Homo sapiens
aaagtggaagttcatcgtctgattaggctggagtgcaatggcgcgatctc

SEQ ID NO: 529819 - DNA, 102 bp, Homo sapiens
actgccagcacccacctcaccgtcatcgagagcatcagtgatgtcacgtttggagcaggggtcagttacatcgggacaccacggactccgtcgtcagccaaa

SEQ ID NO: 529820 - DNA, 90 bp, Homo sapiens
gatggctccgcaagtcccccccggagaaaaagttgaagcgttatgaagggcctgtcccagtcggctttaccctatcgacgcagcgtcccc

SEQ ID NO: 529821 - DNA, 90 bp, Homo sapiens
gaaattgttaggcgtggagagggagtgatgtcttccagactcggtgctgtacccgccgccatgggtgttgagagtgaccaggaaattgtg

SEQ ID NO: 529822 - DNA, 98 bp, Homo sapiens
gtggccggagagttctgcatgttgattcagatgcagaggatgctatttatggaagaaatggttatgattatggccagtgtcggcttcgtgtggagttc

SEQ ID NO: 529823 - DNA, 100 bp, Homo sapiens
ccgtgttcaagaggaagcccgctgccttgtggaggagttgagaaaaaccaagggcaggatgacgcaaaacacggtgattgtgaatggagttgctatggcc

SEQ ID NO: 529824 - DNA, 100 bp, Homo sapiens
tgagaccaatgaaatcgccaatgccaactcccaatctgaagaagagctggcacccgcagaccctcaggaatgtggagaaagtgtggaaggccgagcagaa

SEQ ID NO: 529825 - DNA, 75 bp, Homo sapiens
agagcgtgaccgagagcgcgaatatcgtcatcgttagaaggaggatacgaagcgttttcggcttcctgcccggag

SEQ ID NO: 529826 - DNA, 114 bp, Homo sapiens
gaatagattgttctatgaaaacaagcaaatcgagtgcacctgggatgacaaaaagtcatagtggtgtgacaagaaaaccgtcttcagatacagtccctaagcccaagagagccc

SEQ ID NO: 529827 - DNA, 82 bp, Homo sapiens
agacaaacagcccgcccgaccccgtcccgaccctggccgccccgagcggagcctggagatggttggcaatggctgataaatg

SEQ ID NO: 529828 - DNA, 75 bp, Homo sapiens
attttagatatctgccagatgaaaaaggtgtctcttttgacaagacttcagctacctggcttgctctgtccagaa

SEQ ID NO: 529829 - DNA, 90 bp, Homo sapiens
ggagcggtctcgtagcccaagaagttgcaaccagtgtggcagagagtctaagcttttgtcaaaattttatgagctggagttaaatatcca

SEQ ID NO: 529830 - DNA, 74 bp, Homo sapiens
ggagatgcttccgaactgtgggcaaaaatggcgactgctgcctcatatccgggggaatgtgggctttgtgttca

SEQ ID NO: 529831 - DNA, 112 bp, Homo sapiens
ccggctccggcttctgctgttgctcttctccgccgcggcactgatccccacaggttgacatcatggacatatgtgagtccatcctggagaggaagcggcatgacagcgaaag

SEQ ID NO: 529832 - DNA, 75 bp, Homo sapiens
ccggatcccataaacactgtcggttcttcacacacccccattcggcgtagtacccagagagctcaagatgtgtgg

SEQ ID NO: 529833 - DNA, 100 bp, Homo sapiens
cagacggctcacctgtgcgggatggaacaaaaggaactgtggaaggtgcatcagtgaagaaatggaccaatgtgtataatcatggaatctccttgctaac

SEQ ID NO: 529834 - DNA, 75 bp, Homo sapiens
acgaatgtgcaatattcaagagtgtacacatccacttttgcagaaaaaacttcagcatgtgccaggaacacaacc

SEQ ID NO: 529835 - DNA, 100 bp, Homo sapiens
gttttgtttataacttgtcagacacacaccttttccccaatgcgagctccaaagctgaaaatgtgtgtctgacatgcaagctcagtggggcagagacccg

SEQ ID NO: 529836 - DNA, 75 bp, Homo sapiens
ctggcaccagtccctgtgaagtgcagtggagcacaagcttcttgacaatgcagatcttcgtgaagactctgactg

SEQ ID NO: 529837 - DNA, 119 bp, Homo sapiens
cctgtgggacagcatttgccgtcagtgtcctggactcactcatgagcgcggcttctagtgaggacgttgccagctccccggagcgccactacacgcccttgccttctgcttccagggaa

SEQ ID NO: 529838 - DNA, 76 bp, Homo sapiens
gccgcgccctcggcctgcacggattgtcctgggtcacataatgccagctgagcgtaaaaagccagcaagtatggaa

SEQ ID NO: 529839 - DNA, 82 bp, Homo sapiens
agagaagctaactgtagaacacatcaagcatttatgcgggaggaaattgggaatctctgaacaatccgtgggctgaatacga

SEQ ID NO: 529840 - DNA, 90 bp, Homo sapiens
ctcctcctggaaaaagcaagctgaagacatcaagaagatcttcgagttcaaagagaccctcggaaccccacacatcttgctgacttcact

SEQ ID NO: 529841 - DNA, 83 bp, Homo sapiens
catgactgagtcctccatgaagaattcttctgatgtagagcgactggaaagattcttcgactcagaagatgaagactttgaaa

SEQ ID NO: 529842 - DNA, 80 bp, Homo sapiens
gacaaggggggatatgtgatcaaagcatcagaagattatcgcggaacacctgcccattaatcttgaccctgttaaaacaa

SEQ ID NO: 529843 - DNA, 80 bp, Homo sapiens
ggatggccccaggtgtaagcgcagaaagcaggcgaacccgcggcgcaataacgggtgcttcaaggatgaccgcatcgtct

SEQ ID NO: 529844 - DNA, 90 bp, Homo sapiens
cgccgaccgcgttcctatggacagacgcacagacacctgcaggttaccatagagatgaatgaaccagttcaactaacttttgcactgagg

SEQ ID NO: 529845 - DNA, 97 bp, Homo sapiens
ttctgagtcagcctgaaaggaacaggccgaactgctgtatgggctcttttgaagaaaacaggtctgaaacaaggtcttacccccagctgcttctgaa

SEQ ID NO: 529846 - DNA, 90 bp, Homo sapiens
tgagaaataaggacaaaagccaagaggaggacagttcgctacacagcaatgcatcgagcgggtatttctgtgggacttggatgaaaccat

SEQ ID NO: 529847 - DNA, 51 bp, Homo sapiens
tattaccagaacacactgacaggtggttctcttcccaaagtggaagccaaa

SEQ ID NO: 529848 - DNA, 53 bp, Homo sapiens
gttgaagactctgcctcctacaaatatgctggagtgcgatggcatgatcttgg

SEQ ID NO: 529849 - DNA, 90 bp, Homo sapiens
gtttgccaatgttggagccgtctgcaaagtgtccccggcaagaaggtcggccacacacccggagcaccgtcatcacagcggtcaagttcc

SEQ ID NO: 529850 - DNA, 100 bp, Homo sapiens
tgcggcccgcgcggagcggacgcgcgtggcgctgcccgcctgtaactgcaacctgcatgcccggcgctgccgcttcaacatggagctctacaagctttcg

SEQ ID NO: 529851 - DNA, 80 bp, Homo sapiens
cagaaatcccagccctgaaacagaggaactgtggctgcaccatctgtcttcatcttcccgccatctgatgagcagttgaa

SEQ ID NO: 529852 - DNA, 100 bp, Homo sapiens
ccccaagtggggtcggagccccggcgggcgcccccggcgatgagcccggactcgaggtggccgtgtactaatggtcacttgatgtgcgctggctgtttta

SEQ ID NO: 529853 - DNA, 100 bp, Homo sapiens
aatggctggtctcctactcccagatgcatccgtgtcaggtttcgaaaaaacgatgaaatgaaagctatggatgttttaccaattttgaaggaaaaagttg

SEQ ID NO: 529854 - DNA, 90 bp, Homo sapiens
cgccctctactggaccgacgtggtggaggacaagatctaccgcgggaagctgctggacaacggaggtgaggtccagagatatatccagag

SEQ ID NO: 529855 - DNA, 76 bp, Homo sapiens
cagctctagagctcctctctggccttgcaaagcggctatgtgactacgtttgtgacctcctcttagaagagtcaaa

SEQ ID NO: 529856 - DNA, 97 bp, Homo sapiens
ttgggctgagtaccgcggcgggcgcgagcgaggcgccctagacatcttctccctcccttgcctcagagtttgccttctgccaggtggatgcctccat

SEQ ID NO: 529857 - DNA, 100 bp, Homo sapiens
ccgggagttgggcgagtacgggctgcaggcatacactgaagtgaaaactgttaagaatagacccaccagcatttcgtgggatggtcttgattcagggaag

SEQ ID NO: 529858 - DNA, 83 bp, Homo sapiens
gagctgggcgcggattcgccgaggcaccgaggcactcagaggagaacccagtgacttgattgtaaaaatttacagagcggaat

SEQ ID NO: 529859 - DNA, 76 bp, Homo sapiens
acaacagcgaggaagaagaggacgacgacgacgaggaagaggaggtttctgaggcgtgaattacccttcactaagt

SEQ ID NO: 529860 - DNA, 75 bp, Homo sapiens
tttgaagattctacagataaatcaggaatttgagagcgtattttgcggtaaaactggccgaaggctaaagctgac

SEQ ID NO: 529861 - DNA, 75 bp, Homo sapiens
tactcttgatcctctccggctgcttggtctacggcacaggccctgtctctgcccctggtggtcatcgtccatggc

SEQ ID NO: 529862 - DNA, 83 bp, Homo sapiens
cggggctggtggggctgctgcagccggtgtcgtgaaaactacccctaaaagccaaaatgggaaaggaaaagactcatatcaac

SEQ ID NO: 529863 - DNA, 83 bp, Homo sapiens
actgatggtgctgtaaccacctcacagattccagcttcggaacaagagaccctgagtccatgttgtacttagatgggcagcgg

SEQ ID NO: 529864 - DNA, 95 bp, Homo sapiens
tgggccagctggatatctgtgagttcctgaaccatgtggaggacgggctgaaggaccactacgacatccgggtcgacaaagatgctgaattagtg

SEQ ID NO: 529865 - DNA, 100 bp, Homo sapiens
catcttcaagacctggaatgtatccgtgagaaagatcagtctaaagaaaaggagaagaaagtgaaaaaaacaattccttcctgggctaccctttctgcca

SEQ ID NO: 529866 - DNA, 75 bp, Homo sapiens
ctgatggaggaagtgctcctgctgggcctcaaggaccgcgagacaatgcagatcttcgtgaagactctgactggt

SEQ ID NO: 529867 - DNA, 100 bp, Homo sapiens
gaacttgtacagagatgtgatgttggagaactatagcaatctggttttcttgggtaactacgaggtgtccatcaagttcaatgatgagcacatcccggaa

SEQ ID NO: 529868 - DNA, 100 bp, Homo sapiens
ggaaccaggatatcaagaccaaatggccattgctgtgaattacgtgagggaaagatattgaagaggagttggacactccgagagtgcagctgttctcccc

SEQ ID NO: 529869 - DNA, 50 bp, Homo sapiens
ttccccagccatgtggaactgtacccagcataaccccattgaagagctgt

SEQ ID NO: 529870 - DNA, 100 bp, Homo sapiens
aacaaggtctgtctcctatagtcactcaagaagtcgatcgagaagttccacatcatcttatcggtgtcctcatgacttctcttgtggaccatgtccgtga

SEQ ID NO: 529871 - DNA, 96 bp, Homo sapiens
tcggagggcggcggagtgatcgtcaataacaccgagaggtgaaggaaatacaggtgctgcagaatcttctttttctcaggaggtttctagagaaca

SEQ ID NO: 529872 - DNA, 75 bp, Homo sapiens
atactactacatcccgcagtacaagaactggagagttctccagtgctgatgaagcggctttaaaagagcccatca

SEQ ID NO: 529873 - DNA, 95 bp, Homo sapiens
ggttgagcggcggcgaacatgcgcttttgacacattggaggtgccctcaccaccaatggcatcaaccctgacaccagtactgagatcggacgtgc

SEQ ID NO: 529874 - DNA, 83 bp, Homo sapiens
cgcggccgagtcgcggaggcgcctccgctgcagtcgctgcgtctccaaggcatctgcatctgggaccgacctcctgggctggc

SEQ ID NO: 529875 - DNA, 100 bp, Homo sapiens
gtggtctcttgccaaccatgaatattttgcactccagcatgccgatagttcaaacttctatatcacagaaaaggcttgcattgatgacaatgttgatatg

SEQ ID NO: 529876 - DNA, 75 bp, Homo sapiens
ccagcagccataattttaaaagttgctttgaatatggcaagagggttaaaggacgctggtcagaaacattttggg

SEQ ID NO: 529877 - DNA, 100 bp, Homo sapiens
cgtgatgcccaacatgatcttcattggtggtatcaactgccatcagggaaagccgttgcctatgactcagaaccgtgctgcatactatcctcctagccaa

SEQ ID NO: 529878 - DNA, 100 bp, Homo sapiens
tcgggtttgggctggaggtcgccatggggcgaggcagcggcaccttcgagcgtctcctagaattacatgatgcgtaatgctgtgctggcagccatggcgg

SEQ ID NO: 529879 - DNA, 115 bp, Homo sapiens
tccttcctgcagatcaccgggggcgccctggaggagtccctgaagatctatgctcctctgtacttgacttaattcagtgcacaaatgagatgaatgtgaacatcccacagttggc

SEQ ID NO: 529880 - DNA, 100 bp, Homo sapiens
ttgagggaagtctgcgatgatgaaagagattgtattgctgttttggaaagaattagcagattggccgatgattcaggtgaccaagaatatggcccaggtg

SEQ ID NO: 529881 - DNA, 82 bp, Homo sapiens
gaaaccctgcgaaggcccggagaataatgatctcctttgggaagactacgaggagaaactggctgaccaggctgtaaggacc

SEQ ID NO: 529882 - DNA, 97 bp, Homo sapiens
gttgttctccgtaaccagaaacaggttcattcattgatcttcaaagctgctgcgggcattctatgtccccttcctgtcagatcagtatacagtgtac

SEQ ID NO: 529883 - DNA, 74 bp, Homo sapiens
cggtctgctgtgaagaaggcagagagcgagcgcatcagatccacatctcaaagaagtggggcttcaccaagttc

SEQ ID NO: 529884 - DNA, 100 bp, Homo sapiens
tctcccaaagtggatccttccttaatggaagactcagggtacctgctcttccgagacttctgcctgaaccacctggaggaggccaggcccttggtggaat

SEQ ID NO: 529885 - DNA, 50 bp, Homo sapiens
tggcagcgcgggaaacgtcaaactcgagtctcggagaaatctatgtgaag

SEQ ID NO: 529886 - DNA, 100 bp, Homo sapiens
gaaagaatggctgtttcagtagcaatgtccaagtactatactggcaattgctggagaagattttgcaattgttgcttctgatactcgattgagtgaaggg

SEQ ID NO: 529887 - DNA, 100 bp, Homo sapiens
gctccattaatgcaactaccattacactaaggacacaatgtttgcacgaggactgaagaggaaatgtgttggccacgaggaagacgtggagggagccctg

SEQ ID NO: 529888 - DNA, 97 bp, Homo sapiens
cggcgcggtcttcgtggtgttcgtggcagtctgcgggccaggcatcgacatccgcaacgactatcagcagctgaagcgcctggagaactgcacggtg

SEQ ID NO: 529889 - DNA, 90 bp, Homo sapiens
aaataataccatccatgtgcaccgagaaattcacaagttaagtgggcagaccaacatccacctcagcaaaaacttcttcctgacgaatcg

SEQ ID NO: 529890 - DNA, 115 bp, Homo sapiens
aattaatctgactagactaaatgtatcttataaccacatagatgatcttagtgatatcaacatggcaggagagcccaaaccatacagaccaaaacctggaaacaagaggcccctt

SEQ ID NO: 529891 - DNA, 87 bp, Homo sapiens
gaattcgaaataatcatcaaaatatttttcattgaccctaatgaaagacctattttgtggaagtataatactttgtcattatgagat

SEQ ID NO: 529892 - DNA, 75 bp, Homo sapiens
gagggccccgctgggctggccctgcagggaccatggaatccagagctgacttcggaaccaaaaagaagcttccca

SEQ ID NO: 529893 - DNA, 90 bp, Homo sapiens
gggatttgctgatcaagtggaagagattttaagtgtggcatacaagaaagaacatcgatatattgaactcttcttgaattctactcctgg

SEQ ID NO: 529894 - DNA, 82 bp, Homo sapiens
aagaattgctgtgctgtttgatgcagttgatcactgatattccactcttagctggaagtcgagtgtgctactcaactcagga

SEQ ID NO: 529895 - DNA, 50 bp, Homo sapiens
ctttcacctgccaggttcaagtgaccaagaatatggcccaggtgaccaaa

SEQ ID NO: 529896 - DNA, 83 bp, Homo sapiens
tccgggcgctcgagacttaccagagccacaagcaaaagactgttgaagtagagagcattttgcccagctcactcggattcttt

SEQ ID NO: 529897 - DNA, 90 bp, Homo sapiens
tggaaaccagctgcacatgctaaccaacaggcacgacaagtttctggacactctccgagaggtgaaggaagagagaagggcacagttacc

SEQ ID NO: 529898 - DNA, 100 bp, Homo sapiens
ggcccccgggactccctgtgccttgcttggagctgacgccgacggtcagcaaatcacatgaacagttccctgctgtctttatatcggaaaggaaatcctg

SEQ ID NO: 529899 - DNA, 50 bp, Homo sapiens
cgcggggaccgctgtgctctcgcatctgtgttttgtgtgagcctggaccc

SEQ ID NO: 529900 - DNA, 75 bp, Homo sapiens
atttagcgctatggaagatgaccagaggactagacctgaagtttcaaagacttcaaatctcaacctgagccatcc

SEQ ID NO: 529901 - DNA, 89 bp, Homo sapiens
agtggctgtgggtattgctgcggctggtgcgtcgtcgctctaggttggactccatgaaagaattgcacaaaacaaatcgacagcagcat

SEQ ID NO: 529902 - DNA, 103 bp, Homo sapiens
tgcagcgccgtgtggcacgacacaaaaatcagagacagggtctcactgcattgcctagtctggtcacggactcctggcctcaagtgatcctcctgcctcagcc

SEQ ID NO: 529903 - DNA, 96 bp, Homo sapiens
aaaagcttgctaactcagaacctgttggcactcagactgccaaaatacagcagcagatcattcggcacaaggcaagggcactattacaaactgcat

SEQ ID NO: 529904 - DNA, 100 bp, Homo sapiens
gcaccctgcgagcaccagctcccttctcctcgccactccaaggttgcagacgaagcaggtttgggactgacaatagctgactaacatgtcctgagctgtg

SEQ ID NO: 529905 - DNA, 100 bp, Homo sapiens
atttcaacatgcctctgacaatctctagtaaatctcctgcaaagaagctgagccatgcaattagtaaatctttggggtgtgtacccacgagagaaccccc

SEQ ID NO: 529906 - DNA, 88 bp, Homo sapiens
ggggcgcgcagctgcccgccggggcgggatgccgctcctacgaggactgctgtggctccaggtgctgtgtgcgggccctctccataca

SEQ ID NO: 529907 - DNA, 98 bp, Homo sapiens
agccctgcctctccctgggctctgtgttctaagaacggaagcatctgggctggatggaatttagcatcaagcagagtcccctttctgttcagagtgtt

SEQ ID NO: 529908 - DNA, 80 bp, Homo sapiens
catttcacagcactctgggcgaaaattggatgtgaaaatgaagccagaccgaggaggaacatatgcagcagaaaaaagag

SEQ ID NO: 529909 - DNA, 98 bp, Homo sapiens
accactgctggcgctgaccttcatcacagacaacagcctggtggcagcgatgctgcaatttcacagcagttccttccttcgcgcctgtaaaacagtgg

SEQ ID NO: 529910 - DNA, 75 bp, Homo sapiens
cgtatcctgtcacttctggatgtgaggaaaagagcactggttgccattggtacccatgatttggacactttgtcg

SEQ ID NO: 529911 - DNA, 80 bp, Homo sapiens
ggtgagggtcagacggaggctccctttggatgccagtgtcagttgtcagggggggccctcagcctcttggccttgaacgg

SEQ ID NO: 529912 - DNA, 98 bp, Homo sapiens
accgaggaacgaagaaacagacattcaacatgattgcatttgaaggaagctgccaaagaatgtcgacgtcgaaagaaagaatatgtaaaatgtctgga

SEQ ID NO: 529913 - DNA, 100 bp, Homo sapiens
cagcaccccagtctttacttgaagacaaaaaggaaccattttctcagcagaagatggctgtgccacccacgtatgccgatcttggcaaatctgccaggga

SEQ ID NO: 529914 - DNA, 83 bp, Homo sapiens
atcaattgtgctgacaacacaggttattggagtgatgagtaaagaatacataccaaagggcacacgttttggacccctaatag

SEQ ID NO: 529915 - DNA, 104 bp, Homo sapiens
gtgcggggtgcgccggcagaggatccagtgttcaccatcctggccccggaagcccgagcgggaagaagttccgcagcaagccgcagctggcgcgctacctgggc

SEQ ID NO: 529916 - DNA, 51 bp, Homo sapiens
cttcaccactgcctcggaatgggaaaggagccagatgaccaagatgctcca

SEQ ID NO: 529917 - DNA, 83 bp, Homo sapiens
cccatcttcggcatgtccttcgcctgccagtcgttctgcggggagtgtctccagccctgcctgcaggtgccatccccgctgtg

SEQ ID NO: 529918 - DNA, 100 bp, Homo sapiens
ctcaaactctgaggctgcggagttcacacattgaaatctgtcatctttttcagagagaaactttcggtaatgtaatgctgcttctaaattacttgggcaa

SEQ ID NO: 529919 - DNA, 98 bp, Homo sapiens
tcataacaaagttcacaaccggacaaggaccctcacatgtgcagggtgttccttgcctgtatctccccttggttcaatagctaccagatttttggaag

SEQ ID NO: 529920 - DNA, 75 bp, Homo sapiens
cccaggaggagcaagtccgatggagaggctaagcggaggacctcaggggtggctgagctcttacctggttttcag

SEQ ID NO: 529921 - DNA, 100 bp, Homo sapiens
tggacagttagtcacccacctacatgttgagactgccactctccgcccctacctgagtgccgtgcgggccacattgcaggctgccctctgcctggagaac

SEQ ID NO: 529922 - DNA, 74 bp, Homo sapiens
ccggacccaggccctggatgggactgtctatgatgtcatgtttgtcagcacagattctggaaaccaaaatggag

SEQ ID NO: 529923 - DNA, 82 bp, Homo sapiens
ggcgtctgccctggagcagttcgtgaacagtgtccgacagctctcagctcaagaggctgacccgcggctgattgagtccctc

SEQ ID NO: 529924 - DNA, 50 bp, Homo sapiens
ggaaaatgccaacgccgtgtctgaaggtggccatgactgacctgtgccca

SEQ ID NO: 529925 - DNA, 75 bp, Homo sapiens
ggagctaaagcagcgtgcgttcagccctggggagggtgaggacaaaatcttcttaatcaacaagcttcactccat

SEQ ID NO: 529926 - DNA, 100 bp, Homo sapiens
tagtccttcagaataacctaatccccaaagtgtgtccagagttatgcaacttgacccagtcaagctgcagtttcagctcaggccacatcaaatgtcaacc

SEQ ID NO: 529927 - DNA, 100 bp, Homo sapiens
cacgctgtcgtgacatcagcgcgtcttggcgccgggtagtggagtggtcacgaccacctcagaaaatagtatcacctaaacaagaacatgaagataggaa

SEQ ID NO: 529928 - DNA, 98 bp, Homo sapiens
gtagcagccgggctggtcctgctgcgagccggcggcccggagtggggcggcggatgccatggacaatattaccaggcagaaccaattctacgataccc

SEQ ID NO: 529929 - DNA, 83 bp, Homo sapiens
tgacaaccagggccaggctcctgatggacagtctcagccccccctccaacagaatcagctctctgatgtaaaggatggagtaa

SEQ ID NO: 529930 - DNA, 75 bp, Homo sapiens
gggaaagacatcacataccttcagcacttctcacaatggatgtgagctcatttcaactcctgatcaagaccacac

SEQ ID NO: 529931 - DNA, 100 bp, Homo sapiens
gcggcggcgggagcttccgggagggcggctcgcaggacaagatcgcagaggaaggtgggcggcgggagtgcccagccgtgtgacagcatcgttgtggcgt

SEQ ID NO: 529932 - DNA, 98 bp, Homo sapiens
gccaagattcttcctgggggaagtgcggaacagacggggaagcttatggaagatctccaggcctttgtcctgagctcagtggagctccaggtgctcac

SEQ ID NO: 529933 - DNA, 83 bp, Homo sapiens
aagtaatgcaatggtctcaatctctggaaaaacttcttgccaaccaaagtgtgagatcaaccatgagttccgttgcagttttg

SEQ ID NO: 529934 - DNA, 97 bp, Homo sapiens
atttcacatcgaagccatgatttaaatatcggcgttaagtggaagacaagcattccagtgatgccagtagtttgctcccacagaatattttgtctca

SEQ ID NO: 529935 - DNA, 98 bp, Homo sapiens
caaagctcaagatggcggacaaaacgccaggcggatctcagaaggccagttcaaaggcaaggtcaaccagtgtacccaatcacgacaggaggattcag

SEQ ID NO: 529936 - DNA, 50 bp, Homo sapiens
aggcactcaaaagtggggggcaggaaagtttctcacatggtcatagagga

SEQ ID NO: 529937 - DNA, 100 bp, Homo sapiens
agattacagttgttggggttggtgctgttggcatggcctgtgccatcagtatcttaatgaaggcagcggaggaggagaaagagatggacctcccggactc

SEQ ID NO: 529938 - DNA, 75 bp, Homo sapiens
ttgagccccggaggcagagcggctgccatgtgggctgagggccatgtcagttttctgccacctacaggatagacc

SEQ ID NO: 529939 - DNA, 75 bp, Homo sapiens
ctcttacgtctgcggaagtgcagctgcctcagttcttagcgcagctggaagatctggaagttactgtagctgatc

SEQ ID NO: 529940 - DNA, 99 bp, Homo sapiens
gcaggagctggaggaggagccgccgccgccagcctgccacagtgactcaggtcactcaaggaactatccgaccagctgccaacttcgatgctataagag

SEQ ID NO: 529941 - DNA, 101 bp, Homo sapiens
tggagagggggcgctgagctgttggggctgaccccgcactacatctacccaccagccatcgtgcagcccagcgtggtgatcccagccgcccctgtcccgtc

SEQ ID NO: 529942 - DNA, 100 bp, Homo sapiens
agcgtcggagacggaggccctgccctcagagacgcgccccctagtggaagcagagtgggaagcagagtcccgatgcagtcaaagccaagttgatctctcg

SEQ ID NO: 529943 - DNA, 82 bp, Homo sapiens
ttgagggacccccattcaagttcaagttcacaattggcgtaactatggccaagatcaatcctccatgagtagtggtggtggc

SEQ ID NO: 529944 - DNA, 75 bp, Homo sapiens
gttctctggagccccagattcaacccgtgtacgtgcctgtgcctaaagttggaagtgtgaatcctgctgaaaact

SEQ ID NO: 529945 - DNA, 83 bp, Homo sapiens
gtggactccttcggcagtccacccaccgccgccgcctcccagtgagcaggggtgagcgcagccactgcccaacgcaaaccgtg

SEQ ID NO: 529946 - DNA, 82 bp, Homo sapiens
gctgagaggcgtgcagctgtggcgcgtgccgggccctggccagtatctcgtcgagggcgaggcccccagcagtgagactggc

SEQ ID NO: 529947 - DNA, 88 bp, Homo sapiens
tccagtatgaatcccacagaaaccaagatttgaagaacccaagtgattcagcagtgcacagcccctttacaaagcgccaggcttttac

SEQ ID NO: 529948 - DNA, 74 bp, Homo sapiens
tcccccccgacgccgtcgcggtggactgcaaggttaaaaatctgtaagagcctgattttagaattcaccagctc

SEQ ID NO: 529949 - DNA, 100 bp, Homo sapiens
tcttatcatgggaattaaaaaaccactccattgtaccaactcactatacattgctgtatacaatcatgaggaaagaaggattgtccaaatgtggaagatg

SEQ ID NO: 529950 - DNA, 75 bp, Homo sapiens
tcgaggggccaaggcagaagaaatcttggagaagggtctaaaggaagaggagttgtacgcatgtcagagaggttg

SEQ ID NO: 529951 - DNA, 101 bp, Homo sapiens
caagttggataaaaggaggacctctcgccaagggccccaatgagtggcacacagtctactatcaccgacaggctccccttccctgcgggcatatccgctcc

SEQ ID NO: 529952 - DNA, 75 bp, Homo sapiens
cagcgacccggggcgcacgcggaggacgcgagggggacgctgcctggccgcgaggaagctcaccagtgtgggaag

SEQ ID NO: 529953 - DNA, 100 bp, Homo sapiens
gtctcagatgaagcggtgaaaaaagattcagagttggataagcacttggaatcacgggttgaagggttaatcatctcattttagtggagccttggggttt

SEQ ID NO: 529954 - DNA, 100 bp, Homo sapiens
ctcctctcagccacctctgatcagccatggtatcggcaaggatgtggagtcctgccatgatatgggcaccacacctcctattgaggctgacactctggac

SEQ ID NO: 529955 - DNA, 95 bp, Homo sapiens
gtgaagtgagcaaatacaacccagcagtaggttattgaagacagcagccccaggagtggcaaaattctattcagaagaatgcaggccttgctttt

SEQ ID NO: 529956 - DNA, 101 bp, Homo sapiens
ccgccatcagctgttcgcgcgtcttctcctccaggactctgaagcccaaggaaccacgggccctggcagagccgagggcgggggaggcccccaggaaggtc

SEQ ID NO: 529957 - DNA, 50 bp, Homo sapiens
atttaaacaagagatttccacagaagtttgcagatggcgtgtacctggtt

SEQ ID NO: 529958 - DNA, 75 bp, Homo sapiens
gcaacgtgctgatgaccctcgagggagacatcaggctggagcgatatctgaagtggctctgatgcctttgccaca

SEQ ID NO: 529959 - DNA, 75 bp, Homo sapiens
agaaacatgcagattatatcgcatcctatggctcaaagaaagatgattatgaagttattccaacttttgacatgg

SEQ ID NO: 529960 - DNA, 83 bp, Homo sapiens
gcttcggctccgctccctgtgcgggggatatgagactttctactcggaatatcctgagtgttgcgtggatgtaaaacccattt

SEQ ID NO: 529961 - DNA, 101 bp, Homo sapiens
cctcccagaccggccgctctcccctcctctcacggcacctcccaccatgaaggatttttttcccaggaagccatcccgtcagaggggttcaagtgatgaaa

SEQ ID NO: 529962 - DNA, 100 bp, Homo sapiens
ctgagatcaaatggcacttcattggccacctacagaaacaaaatgtcaacaaattgatgggtaaataccagctgtcccctacagtgaatatgccccaaga

SEQ ID NO: 529963 - DNA, 98 bp, Homo sapiens
ccaacagagatctcttctgttctccactgctagaaaattttcagagaatccacatgtttaccagagacaccatctccctcctcctggtccccctggag

SEQ ID NO: 529964 - DNA, 100 bp, Homo sapiens
agaagatacaaagacagaccatcccagttgaatgctgtcttccaagaacagaagaaaatgatccaggcccaggtgttgatatatttaaggagtgcaaatt

SEQ ID NO: 529965 - DNA, 98 bp, Homo sapiens
cgtggctgcgtcaccgccgcccccccagacaagatggacaccgcggaggaagcatcgagagtaaacatgaggttacgatcctgggaggacttaatgaa

SEQ ID NO: 529966 - DNA, 87 bp, Homo sapiens
ttgataccattaagtgcctaattcaaatgggagcagcggtggaagcgaaggtcacggtctagatcacattctcgatccagaggaagg

SEQ ID NO: 529967 - DNA, 90 bp, Homo sapiens
gcgggaagaacaatgtattttatatcttggaccaaggctagtgacggcctgctggtgcgctggcagaacaagacgctggagagcctcata

SEQ ID NO: 529968 - DNA, 88 bp, Homo sapiens
ccgctgctgctgaggagaggagcgtcaacagcagcaccatgggtgtgggcaagagcagtttactgttgcgttttgcagacaacacttt

SEQ ID NO: 529969 - DNA, 75 bp, Homo sapiens
aaagtcatgggacccggggtttcctacttggttcggatcgggctggtggtcatcctggcttccacggtggtggcc

SEQ ID NO: 529970 - DNA, 96 bp, Homo sapiens
ggctggttacatccggcaagcgggtgacttccatcagggttctccaaaaaatgtggaatcctttgcatctatgctgagacattctcctcttacaca

SEQ ID NO: 529971 - DNA, 100 bp, Homo sapiens
ggatcttgtgtgctccatagtttatcaaaagatatggatgtaatgaggcccttgataaatgagcagaattttgatgggacatcagatgaagaacatgagc

SEQ ID NO: 529972 - DNA, 51 bp, Homo sapiens
acatcttccaccacagcttagagattatggattggatatgtctacttctgg

SEQ ID NO: 529973 - DNA, 97 bp, Homo sapiens
attatggttcttgatatggccaggttcctctacctggcatgaaatgggtagataatcacaaaggtgtttttaatgttgaagttgttgctgtttcgtc

SEQ ID NO: 529974 - DNA, 100 bp, Homo sapiens
ggaagctgaaggtggcagtgagctgcacgcaacagctgccggctctggggaggccacaagaggaagctgaatgaagaggacgccgccagcgagtccagca

SEQ ID NO: 529975 - DNA, 100 bp, Homo sapiens
ggcctttcagcctgggcagaagattgtctacaaagcctggctctgttcccagtattttgaagtcacacagtttaactgcagaaagacaattccttgcaag

SEQ ID NO: 529976 - DNA, 121 bp, Homo sapiens
ggaagctgccatctcctgatgtcaggcaggacgatggggaagacaccctgttctcggaacccaagtttgcacaggtttattacagaggtcagctgggaagagctaccactttaagtgtaac

SEQ ID NO: 529977 - DNA, 100 bp, Homo sapiens
ggcggagtggcgcccggcgaggtagcgccaggcgagagtgcagcagctgccccgagccccgtgcttggcaacattccccccaacgatgggatgccgggag

SEQ ID NO: 529978 - DNA, 83 bp, Homo sapiens
cagaaagtgaacttggcattttagatctaattcaattggctagagatttactacatccgtccttggaagaggaaaagaaaaaa

SEQ ID NO: 529979 - DNA, 74 bp, Homo sapiens
gagagaagccgcaaccagagccgccgccacggttcggagcgaccttggccgttggcctgaccatctttgtgctg

SEQ ID NO: 529980 - DNA, 51 bp, Homo sapiens
atacccctttgaattaattatggctgttactcactataaacaatatccacc

SEQ ID NO: 529981 - DNA, 90 bp, Homo sapiens
tgggaagagtggctggaggaattcagtttcttgggggctacagcatgctggccatagggattggaaccctgatctacgggcactggagca

SEQ ID NO: 529982 - DNA, 115 bp, Homo sapiens
ggtgccagcacctttcggcttctgagacggcggcagcagcggcattcagaccaatgatgcgagctcagagtcaatagcatccttctctaaacaggaggtcatgagtagctttctg

SEQ ID NO: 529983 - DNA, 100 bp, Homo sapiens
agggaccccgcgcggccctggaggccaggctgtgggagaccgagcacaaccagtgtctctgaagaagatgtctcaagtagatattctcgaacagatagaa

SEQ ID NO: 529984 - DNA, 100 bp, Homo sapiens
gaaaaaaaccttcaggcggcccatggaggaagaatacaagcgattgagtgaagcactagcagaggatgggagctacaatgccgtggggttcacttacggt

SEQ ID NO: 529985 - DNA, 100 bp, Homo sapiens
gtgacttgtttgctagacaccggaccaaaatgaggcgtaagaaacgctttgcaaagcaagcctatgaaagagacaaccagcaccaagatgaagcagaagg

SEQ ID NO: 529986 - DNA, 82 bp, Homo sapiens
actgtggatccagagacacaggcacgactagaagcattgctagaagcagcagcggtcacctttgtcccggtgtccaaggtga

SEQ ID NO: 529987 - DNA, 88 bp, Homo sapiens
acgcaccgactatgtcgcctgccaccgagccgggcccacctccccaccaaggaagacgccctgctggcggacttggagtctaccacct

SEQ ID NO: 529988 - DNA, 100 bp, Homo sapiens
cggtgagcaaatggtctccgagtcaagtagtggactggatgaaagaatggacagcaaattatggatgaacctatgggagaggaggagattaacccacaaa

SEQ ID NO: 529989 - DNA, 51 bp, Homo sapiens
tcccggagagctgacaatgatgaatctcaggagacataagacatcagtcag

SEQ ID NO: 529990 - DNA, 96 bp, Homo sapiens
gcgctcttgctcctctctccttggcctctcctgggatcggcccaaggccagttctccgcagcggagctggagtttgttcagatcatcatcatcgtg

SEQ ID NO: 529991 - DNA, 75 bp, Homo sapiens
atgcttcgtttttcgccgtcatgggcgcctcggccgccatggtcttcagcggatccctgctgccttggtgatccc

SEQ ID NO: 529992 - DNA, 75 bp, Homo sapiens
gcgatgtgcggaagggcacctccacccggagaatggtgttgaacgcgtgtgtcctgagagcctgctgcagtccag

SEQ ID NO: 529993 - DNA, 75 bp, Homo sapiens
cctgtacagcctgcaaaactgtacttcaactcccgcccccacctgtgtcccgctggctcctaagctgccccccta

SEQ ID NO: 529994 - DNA, 100 bp, Homo sapiens
tgctctgctctaacaacatttgtgattttacaacgagatgctgctctccatagggatgctcatgctgtcagccacacaagtctacaccatcttgactgtc

SEQ ID NO: 529995 - DNA, 75 bp, Homo sapiens
gtaaccccagtgaagctgccagtgaagaaagtaacagtgagatagagcaggggtttgtgaccatgactctggaaa

SEQ ID NO: 529996 - DNA, 100 bp, Homo sapiens
ctttgatctgggagcgcgatgagcctggaacggaagtgaggatcacctacagagagaaaaggaacagttccgtaagctctttattggtggcttaagcttt

SEQ ID NO: 529997 - DNA, 75 bp, Homo sapiens
gtcgtggtggtcattaagcggagatccggctgccccgggagacgctggccttcagggaggagctggatgtcctca

SEQ ID NO: 529998 - DNA, 101 bp, Homo sapiens
tgcttggcaaaatcgagcgggccattggtaatagcctgcagctggtgttttgagaagccctactgctgaaaacttaacaattttgtgtaataaaaatggag

SEQ ID NO: 529999 - DNA, 90 bp, Homo sapiens
cgcggctcgagagcgagagtcacgtcccggcgctagcccagcccgacccagctaaaagatggcggcaaggcagcccaggcaaatgtaaga

SEQ ID NO: 530000 - DNA, 144 bp, Homo sapiens
gcggagaggtccgccaggcgtacggtgccaagggattcagcctggcggacatcccctaccaggagatcgcagggatgccagatgatatgaacttcagtgatgtaaagcaaatccatcaaacagacactggcagtactttagaca

SEQ ID NO: 530001 - DNA, 100 bp, Homo sapiens
ctccaagccaaaatcacagctttgagtgagaaacagggacaatggtgacagatccaggcaccgagctccacgcaatgcccggatgtctgcaccttcgctt

SEQ ID NO: 530002 - DNA, 74 bp, Homo sapiens
agaaattaacctttgggactggaacaagactcaccatcatacccaacaagttggatggcttgaggactggtact

SEQ ID NO: 530003 - DNA, 87 bp, Homo sapiens
gcaatggaacaggcttgagaaacaggacacgtcttctgggggcccagcacgtgcttatccagttggtggcctttgctattacctgtc

SEQ ID NO: 530004 - DNA, 88 bp, Homo sapiens
acaccacaataatccacagccaaggcgggagacactatattcaatcgtgctaagctcctcaatgttggctttcaagaagccttgaagg

SEQ ID NO: 530005 - DNA, 74 bp, Homo sapiens
ggaagcggctcaatgaccatggcaagaactggcgtcacgtttacaagactggtcttctgaggacctctgccctc

SEQ ID NO: 530006 - DNA, 75 bp, Homo sapiens
gtcatcggggatgtggacgaaggggccgacctcctagggagcggcaccgggggggcgtggccccgggcttccagg

SEQ ID NO: 530007 - DNA, 100 bp, Homo sapiens
agaaaaggcccagaaagtgtcccgctccctcaccgagggggagatgaagaagggtctcgggtccctaagccacgggatttgcctgcaatggataacccag

SEQ ID NO: 530008 - DNA, 82 bp, Homo sapiens
ttaatacagcaagaaagaccatcaagtttaccaagtgaagacatttccacctggacacctgaccatgtgcctgccctgagca

SEQ ID NO: 530009 - DNA, 100 bp, Homo sapiens
cctgcaccatgagcgtcccggccttcatcgacatcagtgaagaagatcagcctatggaccagctctcattgaacactgtcttttagaaaatggattctcg

SEQ ID NO: 530010 - DNA, 101 bp, Homo sapiens
cagatcttcacagcacagttcctgggaaggtggagccaccagcctctccttggaagggaaaaggccgaggcatcagcgtgtgaagaccgcaaagacgatcc

SEQ ID NO: 530011 - DNA, 103 bp, Homo sapiens
caggtctggtgttccttacggccctctcaggctgaagagagacacggcaacattgaagaaaggttacgacagatggaagcacagttggaggagaagaatcaag

SEQ ID NO: 530012 - DNA, 75 bp, Homo sapiens
aaacttttgcccttatcagtaacacctgaggttctgagttctgtccgcacagaatgggacccactggatgttcgc

SEQ ID NO: 530013 - DNA, 90 bp, Homo sapiens
gattccaagtaactcttatttgcacacgtgtcaaagttcgactccttccacgagaacaccaggccccccatgcccatcttggagcagaag

SEQ ID NO: 530014 - DNA, 90 bp, Homo sapiens
gtactcaagggcaccagtattcccgcggtcggcagcatgggtcgggagtcacgatctgtgccatcattggcgggaccttcaccgtcgccg

SEQ ID NO: 530015 - DNA, 97 bp, Homo sapiens
tcgctagaactcagttgtgcgttgcggccagtcgccactgctcaggcttatggctatgggccatacggtggtgcgtacccgccaggaactcaagttg

SEQ ID NO: 530016 - DNA, 83 bp, Homo sapiens
gttagtgcctggtacaatatgaaccccagaatatcgaagatgaagcaaaagaacaaattcagtcccttctccatgaaatggta

SEQ ID NO: 530017 - DNA, 90 bp, Homo sapiens
cccagcggcagcagcagcggcgggaggagcctccgggctgcccatgatggggggagctttcatggactcgcccaacgaggacttcagcac

SEQ ID NO: 530018 - DNA, 75 bp, Homo sapiens
atttaattttagggtcctttatatagaagggagaggccagtgtcgttattatccttgtggagtaatagaatcaat

SEQ ID NO: 530019 - DNA, 90 bp, Homo sapiens
agaacttatcagagattgagaatgtccatggatttgtttctcattctcatatttcaccaataaaggggaagaagaggtgaaggtttcgac

SEQ ID NO: 530020 - DNA, 100 bp, Homo sapiens
ccagtgagagctgcccctcctcccccaggctgagcggaaggaggagaaaaaggcggctgcccctgctcctgaggaggagatggatgaatgtgagcaggcg

SEQ ID NO: 530021 - DNA, 101 bp, Homo sapiens
gggcgcggtgcggacctctcagcccaactaccggcctcaaggttaaacccatccagagtaatggctgcggccttacccaggaccctgggggagttgcagct

SEQ ID NO: 530022 - DNA, 75 bp, Homo sapiens
agtttaaggaccgagaagatctggtcccctacacaggggaaaaacgagagtgaagttcccagaccctacgccccg

SEQ ID NO: 530023 - DNA, 83 bp, Homo sapiens
gcaacttcgcggtggtcaagcgggccacgcacctcgtcaccaaggccaagatcatggaagggaagtggttgctgtgtatgtta

SEQ ID NO: 530024 - DNA, 82 bp, Homo sapiens
aatcgagcaggagctgacggccgccaagaagcacggcaccaaaaacaagcgcgctctggagactggaaggtccaagatcaag

SEQ ID NO: 530025 - DNA, 100 bp, Homo sapiens
gtttcacatttgctgccatgagcaaagaggaggtcgacaggcttctcgtcagtgcctcgcaggatggtaaacttatcatctgggacagctacaccaccaa

SEQ ID NO: 530026 - DNA, 100 bp, Homo sapiens
ccccacaacatggcctcctccgcctcctcctctcccgcgggcaccgaggactccgctcctgcccagcgagaatataaaaagctctttgaggaaaacaaag

SEQ ID NO: 530027 - DNA, 100 bp, Homo sapiens
ccaacttggctacagctatgccatcgatctgccaggtgaaaggtgtagcagtcactcggcctacacccacagcatcgaccttgtgaacccagcgacctga

SEQ ID NO: 530028 - DNA, 90 bp, Homo sapiens
ggagaggcagggccatgacaaggacctacagcatgactttgttcgacgagaccggccactacgtgtcctcattgacctcatacagaggac

SEQ ID NO: 530029 - DNA, 100 bp, Homo sapiens
gacagtcctcgttgtgttcggggtgggaagcccacggtctttcccagggaactccgatgaagtgttccaacaaaatgagcgagtgaaccaagaagaggat

SEQ ID NO: 530030 - DNA, 100 bp, Homo sapiens
ttaaatagattagtaactggcatagacaactatgggcagatgaggtttatataactttccaagacaaggaagttgtgcaaagcctcacagctactaagag

SEQ ID NO: 530031 - DNA, 107 bp, Homo sapiens
gcagagaggaagctgcatccaaaggccatgttatttatgaaggcaaaagtggacatatcttgtcatatgataggcaattgaaggaacagactaaaaatcgtgtcctg

SEQ ID NO: 530032 - DNA, 100 bp, Homo sapiens
ctccaggagttcgtctcttacgtctgcggaagtgcagctgcctcagttcttagcgcaggagaagaatttggattggtttcctcggatgcgagccatgtcc

SEQ ID NO: 530033 - DNA, 101 bp, Homo sapiens
ccacgagaggcagcgccatggcggagcagacctactcgtggtactaggttttgacaagcttgcatcatgcgtgagtataagctagtcgttcttggctcagg

SEQ ID NO: 530034 - DNA, 82 bp, Homo sapiens
atccacgcctttcagccaaatgccagactgattgtcatgctcagggaccctgtggagagattatgagcctcaaacaatttgt

SEQ ID NO: 530035 - DNA, 50 bp, Homo sapiens
cttagatgccatttctcctgttcagacattccagctgcagctcttgtctc

SEQ ID NO: 530036 - DNA, 100 bp, Homo sapiens
ggaaaagcgagcgatcgagcgagcgcgcgcgcgaaaactccgggcaggtcaaaatgcagatcttcgtgaaaacccttaccggcaagaccatcacccttga

SEQ ID NO: 530037 - DNA, 100 bp, Homo sapiens
cgtgcagccgcaccacattggcgtggccgtcaaggagctggacctctacctggcctacttcgtgcgtgagcgagaactgttcgtcaggtggcacaggagc

SEQ ID NO: 530038 - DNA, 82 bp, Homo sapiens
catcagcaaggtggctgaggtggctggcaaggagtacgccatcgagcaggaagtcctacaaacaagatctccacggcttctc

SEQ ID NO: 530039 - DNA, 74 bp, Homo sapiens
gatttcaacctgaaagtggaggctgcgaaaataggtgctcagaattttgatgtcatacgactatcaacttacag

SEQ ID NO: 530040 - DNA, 100 bp, Homo sapiens
gcacctggggaccacggaagcgaccgaggccttctttgccatgaccaagctctttcagtccaatgatgttgttgatcattatgaaaatcctagaaacgtg

SEQ ID NO: 530041 - DNA, 78 bp, Homo sapiens
cgggccgtgaacgaaagcagtgacggaggagcttgtaccaccggtttcccaacagtgatgtcacaagattgaccacat

SEQ ID NO: 530042 - DNA, 90 bp, Homo sapiens
ggaaacagcagatgtaccctcagtacgccacctactattacccccagtatctgcaagccaagatgtgttcagagcaacattgttttgttg

SEQ ID NO: 530043 - DNA, 75 bp, Homo sapiens
atgtttgaacaaactcgaagaacagctgtggaaagaagttgcaaaacactggaaggacagaataacgggctccca

SEQ ID NO: 530044 - DNA, 75 bp, Homo sapiens
cttggactgagtcctgcaggacacagggattcgggttcgtaactttcgagaatagtgctgatgcagacagggcca

SEQ ID NO: 530045 - DNA, 100 bp, Homo sapiens
gttgccggcaccatggagtcaccttttagcccgggactctttcacaggctggatgaagattgggatggttggcaatggctgataaatgacactttgagac

SEQ ID NO: 530046 - DNA, 75 bp, Homo sapiens
aagctgtgaagttcctttacactgggtgtgtaagaagatacaaggcagatccaaccatccccaccgtggtcctac

SEQ ID NO: 530047 - DNA, 100 bp, Homo sapiens
cctgccccagcccatcctctctaaccaagttgcactggaagggtactacaaggacaagctctttgaccagcgggagctccgctttgagattggcgagggg

SEQ ID NO: 530048 - DNA, 111 bp, Homo sapiens
cgggagttcaaggaggtgctgaagagcgaggagtgcactagtgaaattgatgaataagtcaatagaggggacagcagatgatgaagaggagggtgtaagtccagatacagc

SEQ ID NO: 530049 - DNA, 75 bp, Homo sapiens
tgttatacaaggtattcacacagaccacaatacactgagccaagattgacagacacctaatattcatgacttgag

SEQ ID NO: 530050 - DNA, 83 bp, Homo sapiens
aacctgagaaagaattaaaagccttttgtgctgatcaacttgatgtctttttacaaaaaggaacgggattttccaacagaaac

SEQ ID NO: 530051 - DNA, 100 bp, Homo sapiens
gccggcttcaggaggcccaagacaccacagaagccctccgagcccagattgactggggcgactttggggtagaggcagtgtctgaggggactgactctgg

SEQ ID NO: 530052 - DNA, 83 bp, Homo sapiens
tcgcggagccgcgcagccctcggagcacgagtccctgcaggaagcatcacccaggctggcagatcatggtagcagcagcgggg

SEQ ID NO: 530053 - DNA, 50 bp, Homo sapiens
cgagggtcaacgagaaagagatcgatccagcacacggaagacatggagaa

SEQ ID NO: 530054 - DNA, 75 bp, Homo sapiens
agccactgcagtatcacagccaggtagatataatctgtggtgatcacctgttggagcagtatcaaactctaaggg

SEQ ID NO: 530055 - DNA, 100 bp, Homo sapiens
gaagaaacgattactttagtatcaatatctgctacaacatcacattttcatgcatcattttttcaaaatagggccgaagataaccagattggattttaag

SEQ ID NO: 530056 - DNA, 100 bp, Homo sapiens
ctacaggatttatcaaatcgagtcactgtcaagaaccaacgtccaagaggcccagaagatactcaacaacagcggactccccattacttcagccattgac

SEQ ID NO: 530057 - DNA, 100 bp, Homo sapiens
ggaaggcgcatggatgctggagggcgaagacctgcgaagtccctctccagtggaagagaaagccaatacccacctcctcttgggcatgtgcttagacgcc

SEQ ID NO: 530058 - DNA, 101 bp, Homo sapiens
gctggagacatggaccgcggcgagcaaggcccgatgagagaaagggaaagttaaggatgctggagcagaacaatggatttctctttctctttcatgcaagg

SEQ ID NO: 530059 - DNA, 50 bp, Homo sapiens
acccaggaggggagaatcttcaaaggacaatgaaggccaaacagctctac

SEQ ID NO: 530060 - DNA, 82 bp, Homo sapiens
gtaaagtcagcatgagcaaaaactccaaactcctctccaccagcgccaagaggctacaagatcaagctgcagagaccattga

SEQ ID NO: 530061 - DNA, 112 bp, Homo sapiens
gtatgcatggtgtggggttggtgtgattagcttcgcagtctggaaagctttaggagttcacagtctatccgtggtcctgaaccagttatgtgtgttgcatgagaaaacgcca

SEQ ID NO: 530062 - DNA, 83 bp, Homo sapiens
ctggatgagacatttgctacagcatcccacattaagtcaacgggatggttttagattgtcatctcaagaagctgcttctagtt

SEQ ID NO: 530063 - DNA, 100 bp, Homo sapiens
ggaaacctcctcgttggactcgggatgcaagcatcagcaaaggagatttccaaaatccaggggatcaagaggtcttaattacagagcacggtgacctggg

SEQ ID NO: 530064 - DNA, 100 bp, Homo sapiens
gccgagccacagccacgatgatcgcgggctcccttctcctgttttcggctttgtgagaaaccttaccatcaaacacgatggccagcaacgttaccaacaa

SEQ ID NO: 530065 - DNA, 75 bp, Homo sapiens
attgtttgtcaccacaaaaaggacaggcttcaatggctgagaatagtatacctctatacactaccgcttccatgg

SEQ ID NO: 530066 - DNA, 101 bp, Homo sapiens
gccaggacagacgcctgaggcggccaagagcccgaacccagccctcaccttctgcgtaaagacccatgaccggctgtactacatggtggccccatctgcag

SEQ ID NO: 530067 - DNA, 51 bp, Homo sapiens
aggagctggagtggctgttcttaatgggaaaagttaaccattggatgccgc

SEQ ID NO: 530068 - DNA, 82 bp, Homo sapiens
gtttgcaatatgactttggaggaattctcggctggagagcagaagaccgaaagggagtgcatccgccccaacccttttcccc

SEQ ID NO: 530069 - DNA, 100 bp, Homo sapiens
tccacttcagcttctttgtcaccataggagacatggacgaagccttcaaatccatcaagctcatcaaaaggtcctggtccgcgccagagcccagcgcgcc

SEQ ID NO: 530070 - DNA, 82 bp, Homo sapiens
gtgtctgctcctgtcgccttcgcctcctaatccctagccactatgacatgaagagtatttctggagaagaatcatcccatgg

SEQ ID NO: 530071 - DNA, 51 bp, Homo sapiens
cctgggcctggacaatgctgggaagacggtacaggtttgcagattccgcca

SEQ ID NO: 530072 - DNA, 88 bp, Homo sapiens
atcttccaagtctcaataaaaacatccccgtcatcgagtatgagcagttcatcgcagattcagaatctgataattcagataacaacac

SEQ ID NO: 530073 - DNA, 113 bp, Homo sapiens
gcaacagagttgccctgtcaccatttctttcacaaaccttgtgtctcaatttggctacaaaagggccaggaaggaatactgggagaatcttcggatagcctcaggccggccat

SEQ ID NO: 530074 - DNA, 101 bp, Homo sapiens
gccatggccgacgaaaagcccaagccgtttcctctccctcgccggcctcggcggagattccaggccctatagaaaccaggacgtcccttagcgccaccgcc

SEQ ID NO: 530075 - DNA, 90 bp, Homo sapiens
ggcagattcctccgggcagcaggggcgtctctggccgagcctctttttgtggaaaacgacagcagcagcagtggcctggaagacgccacc

SEQ ID NO: 530076 - DNA, 50 bp, Homo sapiens
cctcccccgcatgacccccttgaatggagatgtatgcatttcgattcttc

SEQ ID NO: 530077 - DNA, 98 bp, Homo sapiens
ttcagctgcacccagatgccccaagagcaatgagcccacacgcagagctggaggacctgaaaggttgcacactgggccacagaggatccagcaaggat

SEQ ID NO: 530078 - DNA, 100 bp, Homo sapiens
cttggcttcaggaaaggagcattcagacgcttccgtcagcctcccaggatggcagcccctgacctggcccacgaggactaccccaatggcacctggctgg

SEQ ID NO: 530079 - DNA, 88 bp, Homo sapiens
tgaagttatgagctctacattgcaacagttttcaaaagttatagatgagcagcctcccgcgacgatgcccctcaacgttagcttcacc

SEQ ID NO: 530080 - DNA, 95 bp, Homo sapiens
agccctgctccaggaatgggacctcgagtcactgtggttatggccacaccgtgcccttgtcagatggaggtaaggccttctgcatcatctactcc

SEQ ID NO: 530081 - DNA, 90 bp, Homo sapiens
gccttattttttctcatggatgttcttcttcgagtatttgtagaagggcttctctatctgagatgtgcacagaaacccagacaggaccag

SEQ ID NO: 530082 - DNA, 100 bp, Homo sapiens
gctactacgtcaacaacgagtacctcaaccctgagctgcgtgagaacccgcccatgaagccagatttctcccaggaatgtggcctgctgcggaaggggac

SEQ ID NO: 530083 - DNA, 82 bp, Homo sapiens
gatcggcaagccccacactgtcccttgcaaggtgaatacagcagtccagttaatcttggtggcagcttctttggcagctcca

SEQ ID NO: 530084 - DNA, 50 bp, Homo sapiens
gccgagtgaaatcgtgcatttgcggtactaggttttgacaagcttgcatc

SEQ ID NO: 530085 - DNA, 90 bp, Homo sapiens
cttgttggtgcttcctcatgtattgaagaattccaatcccagttcatttttaacattcagaagattctcggccttgccccttcacgagcc

SEQ ID NO: 530086 - DNA, 88 bp, Homo sapiens
ctggctttctgcgccatcctgcaccgccaccggcccgacctcatgcagccagataagctggtggtggtatggacccgtcggaaccgac

SEQ ID NO: 530087 - DNA, 95 bp, Homo sapiens
caacgtgcggcgagtcatggccgacaggatgatgggcaggacagggagaggctgacctacttccagaacctgcctgagtctctgacttccctcct

SEQ ID NO: 530088 - DNA, 119 bp, Homo sapiens
gggcgcacaacgtgcctttgaagctgccgatgccagagccaggtgaactggaggagcgatttgccatcgtgctgagttgcatgctgagaatttgaaaaatgaagatgatgtagacactg

SEQ ID NO: 530089 - DNA, 82 bp, Homo sapiens
gggggaagggcctcaaagccagaaggaatgtatcctgtcaggtataatgtcagtgaatggcaagaaagttcttcatatggat

SEQ ID NO: 530090 - DNA, 100 bp, Homo sapiens
tgagtttcttcatctacaacccgcgcttctggccgcgggaaggagagccgaatttgccacatacctgaatttctgccgttccttgcgttttgacgacaag

SEQ ID NO: 530091 - DNA, 80 bp, Homo sapiens
tgttagggcgtggcctgaggcttggataagtggggttactataacaacagtaccaaggtggctgtgaaaaccctgaagcc

SEQ ID NO: 530092 - DNA, 83 bp, Homo sapiens
ctcggtggcctccgggcctggcagtcatgaagacagcccacctgaggatattgaccataaggactcatatctcattacaagaa

SEQ ID NO: 530093 - DNA, 100 bp, Homo sapiens
agcgaggaagaagaggacgacgacgacgaggaagaggaggtttctgaggctaaggcagctggataagcacagccaggccacagcccagcagctggtgcag

SEQ ID NO: 530094 - DNA, 72 bp, Homo sapiens
tgcaggaggagctgctcagctcccaggtcacccaggaactgagggattggttttcagagacatttcggaaag

SEQ ID NO: 530095 - DNA, 90 bp, Homo sapiens
atggcgccggagctgaccccggaggaggagcaggatccctctgtgacccagctgaccaacgccccgcagggcggcctggcggaattcaac

SEQ ID NO: 530096 - DNA, 100 bp, Homo sapiens
tccggccccaggtcaccgccagcacgcgcctgcttcccgtctgcgcgagtccacgcagctccccaggaattgaatgatctggcacgggaccctccagcac

SEQ ID NO: 530097 - DNA, 96 bp, Homo sapiens
tgcccaccgcgcactcggagatgcagccgctgggaaggctcccagtgcgctggatggccatcgagtcactgaattacagtgtgtacacaaccaaca

SEQ ID NO: 530098 - DNA, 75 bp, Homo sapiens
ggaacctgggcgagcagcggcgggggcccgaggggcataatcaccagcaacacccgggacaataatacgggggcc

SEQ ID NO: 530099 - DNA, 90 bp, Homo sapiens
caaaacaagctctttatgagaatggcatctaaggtggttgtgtcaaaccgattggtgacatctccatgctgtattgtcacaagcacatat

SEQ ID NO: 530100 - DNA, 96 bp, Homo sapiens
ttcgcagtggtcgcttcttctccttgcatcccagccatcactcttccacctgctccttagagaagggaagatgagtgagtcgagctcgaagtccag

SEQ ID NO: 530101 - DNA, 110 bp, Homo sapiens
ctcattcacttctagacgacaaaatgcaaaaaaggaggccaaagactttgaaaatctctaacttccaaggtcccaccaacagttcagaaacctaccacagtaaatgttcc

SEQ ID NO: 530102 - DNA, 101 bp, Homo sapiens
atgctaaatttgtgaatgctgtgtatgataccttacttaatactaatcccagatcctcaggaaaagccaaaaccgaggcccattgcccggattcgacacaa

SEQ ID NO: 530103 - DNA, 98 bp, Homo sapiens
agcccgcggccggccagccgaagatggtggcggctactcctcctgagacaagaggagcagcagcggcaccgcccctcaccctggagggtcctgtacaa

SEQ ID NO: 530104 - DNA, 75 bp, Homo sapiens
cgtctctctgctgcggcgcggggaccgctgtgctctcggtcacaagctacctaactaagaagtttgctgaactac

SEQ ID NO: 530105 - DNA, 100 bp, Homo sapiens
cgccgccgttttcgcctgcagctgctcaccggcatttggctttatgtcccgagttgccctacaagcagagaagatgaatcatcacccagaatggttcaat

SEQ ID NO: 530106 - DNA, 83 bp, Homo sapiens
ttaccgtcgccagcggagcgaacccgagagcgtggagcgggctgggccaggtgccagaaccctgtggagcatcatgaactggg

SEQ ID NO: 530107 - DNA, 146 bp, Homo sapiens
agcagtcaagcccatgaactacaaccccggttgccgctttctcctctcctaaccgttaagtgcgctaagctccacggagaagaactgctgcgtgcggcagctgtacattgacttccgcaaggacctcggctggaagtggatccacg

SEQ ID NO: 530108 - DNA, 100 bp, Homo sapiens
ctgaatgtgcccggacctgcgccttctgggtatgatctcgtgaaatcttgagagaaactgaatgacgaatgaaactattgttcctgtttcacacagaaga

SEQ ID NO: 530109 - DNA, 100 bp, Homo sapiens
ggcggcgccgccatgtccgacagcgagaagctcaacctggactcgatcatcgggcgcctgctggaagggatacctttcgtccctgcatttaaaggctttc

SEQ ID NO: 530110 - DNA, 75 bp, Homo sapiens
ggcgaaaggaacggctgaaggccctacgggagaaaaccgggcgcaagaacctgagccagcagaagagtacactga

SEQ ID NO: 530111 - DNA, 96 bp, Homo sapiens
attggaggaacttcaactatttccagtgagggcacacagcattcttattcaggttatttgttatcaaagcgtgaaggccaagcagggtctccagag

SEQ ID NO: 530112 - DNA, 116 bp, Homo sapiens
agactgtggcgcaactggtcttggtagcggaggcacccgaatgctgcccgggtgaggtcagcccaaggccaaccccactgtcactctgttcccgccctcctctgaggagctccaag

SEQ ID NO: 530113 - DNA, 82 bp, Homo sapiens
tgaacgttctttttcgcaacgggtttgccgccagaacacaggtatcatgatattagctggtttgacatcaagtcatttgtga

SEQ ID NO: 530114 - DNA, 99 bp, Homo sapiens
ggaaagttttcagaggaaataaggaaatcatggatcggatctacaaaaatgtcatgaataaagtcagtgaaatgagtagttttcaacgtaatctgttta

SEQ ID NO: 530115 - DNA, 100 bp, Homo sapiens
tttccctctgtctattattaagattaaacttgggcttcgcagtcctctcacctccataccccggatttggagggccatgaagcccccaggaggagaatcg

SEQ ID NO: 530116 - DNA, 74 bp, Homo sapiens
tgtgaagatgctgtaaaaagattgaaagcttgtggagatgtactttcctcagaatgactcttggattggtttgg

SEQ ID NO: 530117 - DNA, 90 bp, Homo sapiens
ttgattgatatatatgctgacgaggagttcaaccagctctctattggaggcatcatcattctgaaggataccagtgaagacattgaggag

SEQ ID NO: 530118 - DNA, 49 bp, Homo sapiens
gccaagcgtcctgcccggccaaaatgcttggacagaagagatgagtact

SEQ ID NO: 530119 - DNA, 102 bp, Homo sapiens
cttataaccagatgcttatcaacattcttcactacattctgaagatgaatttctacaagggaaattgtttatcctacaacacagcagtcccctcaggatgag

SEQ ID NO: 530120 - DNA, 100 bp, Homo sapiens
caagcacccacaactggaagctgatttgtcagcagttagagagatatatgggccacatgcagtttctctcagggaagcagctcgagagtgtcgtagaaag

SEQ ID NO: 530121 - DNA, 75 bp, Homo sapiens
aatgatcagtagcaccagtgtttatgacctttctgcccgtgaagtggatggctcctgagagcatctttgacaacc

SEQ ID NO: 530122 - DNA, 50 bp, Homo sapiens
agcctcatcacccggctgctggaggatcaccaaggtgatgctgctcaagg

SEQ ID NO: 530123 - DNA, 100 bp, Homo sapiens
gccgctgcacatcgtcctgtggacgcgtatcgccagcacgatcccaccgcacgttcagaagtcggatcccaagcactgcaagtccagatgcaacgggagc

SEQ ID NO: 530124 - DNA, 75 bp, Homo sapiens
ctggaagaggcatatagctctgaatctggcaatgggggcaggagctgttggagctttgcagctgacctacatctc

SEQ ID NO: 530125 - DNA, 75 bp, Homo sapiens
tgcagagttcgggcgagaggaggcgagaggcgcaaagataaggatgacattcggctgctgccgtcagcattgggt

SEQ ID NO: 530126 - DNA, 80 bp, Homo sapiens
ggcatggttgaaattgaattttgggatgaatgggttccggagagcagagtactcaaatacgtggacaccaatttgcagaa

SEQ ID NO: 530127 - DNA, 100 bp, Homo sapiens
agcctgtacctgttttatacttgcttttgcttcagcgttctgtggttgtcaacagaaccccgacatcgtcctggtgcactacctgaacgtgccggccatc

SEQ ID NO: 530128 - DNA, 99 bp, Homo sapiens
cttgcctgctgctcctcggctgcggatacctcgcccatgttctggccgagctacgagttccagggagctctgtcctggtgaccgtgcccgggttatgac

SEQ ID NO: 530129 - DNA, 100 bp, Homo sapiens
cctgggctggtgaagtacatgaactcagggccggttgtggccatgatgcaaagtacagttcgagagcacagagatggaggtcatgcaggtggaatcttca

SEQ ID NO: 530130 - DNA, 75 bp, Homo sapiens
ggggcttcaggagaattccagcggccagagcttctttgtgaggaataaaaagagacagggtttcactatgttggc

SEQ ID NO: 530131 - DNA, 101 bp, Homo sapiens
gcgggtcggacgcgtccggctgtggaagagagcggcggccgctcacaacatgcacagcctggcgacggctgcgaccatcatcaaagaggggatgctgacca

SEQ ID NO: 530132 - DNA, 100 bp, Homo sapiens
caaagaggagttattcagtgagaaagtgatgaagcattgggcccaacaatgatgagttggaatgcagttgaaaagttatgcgcaaaatctgcaaatgcca

SEQ ID NO: 530133 - DNA, 98 bp, Homo sapiens
gaggagatggatgagaggaggcggcagaacattgcttatgaatatctgtgccacttagaggaagccaaaaggcagtagcagaatcccatggtagccag

SEQ ID NO: 530134 - DNA, 51 bp, Homo sapiens
ggcagaatacagagatatggaatcagattgtgctacgatgcatttacagag

SEQ ID NO: 530135 - DNA, 100 bp, Homo sapiens
tcgcgagatccgcatgaaggagctggagcggcagcagaaggagcttctgaaccgaatctgaaattacggtccaggctaaagcagaaagtggccgaaagac

SEQ ID NO: 530136 - DNA, 101 bp, Homo sapiens
ctgagaagcttctgcagttcaagcgttggttctggtcaatagtagagaagatgagcatgacagaacgacaagatcttatggagtcttgctctgtcaccagg

SEQ ID NO: 530137 - DNA, 75 bp, Homo sapiens
ctgatggctccacgcatttcccttcgtgatttctaccactccaaacgccggctgatcttctccaagaggaagccc

SEQ ID NO: 530138 - DNA, 90 bp, Homo sapiens
cgcattcgcagcactgtggctgaggccaggcacctcattgagaagtcagtgcgtaagatcgtctccttgctggcagcgtccgaggctgag

SEQ ID NO: 530139 - DNA, 82 bp, Homo sapiens
catacaccggctgttcgaggccttgactgtagtcaccttcaggccattcagaggaggaaagagaggggaatatgaagtcagc

SEQ ID NO: 530140 - DNA, 50 bp, Homo sapiens
cgggcctgtcgaagtgcgcctgacaggagagaagtatggctacctttcac

SEQ ID NO: 530141 - DNA, 98 bp, Homo sapiens
agtgaaagacctttacaattggcttgaagtagaatttaacccattaaaactctgtgagcgagtcacaaagatattgaagatttgcccccaacagtcca

SEQ ID NO: 530142 - DNA, 100 bp, Homo sapiens
aaagtttcatctgtggatggagtattggaggaagttaagtcttcagagcctactgaggatgtggagcccaaagaggctgaagatgatgatacaggacccg

SEQ ID NO: 530143 - DNA, 83 bp, Homo sapiens
ctcgctgggagagaggtacctctccttttccctctccctttccctaaggttgaaaggattgttgacaaaaggaaaaataaaaa

SEQ ID NO: 530144 - DNA, 100 bp, Homo sapiens
accaactgttacaatcaaggtctatgaagtgcaactgcagatagaagacctgactcgtaaactgcgcacaggagacctgggcatcccccctaaccctgag

SEQ ID NO: 530145 - DNA, 100 bp, Homo sapiens
aaatatatagagcacctggaagcagtaacatgcaagttcactccagactttacctcctcctgggtaattcgggacctaagtcttgtaaccgcagcggacc

SEQ ID NO: 530146 - DNA, 83 bp, Homo sapiens
gttcgtgctgctgggattcgcgctgctgggcacccacggagcctccggggctgaggagcaggagcggcttcgcttggagcagg

SEQ ID NO: 530147 - DNA, 50 bp, Homo sapiens
cccagcactttgggatgttgagtgtcacccagctctggatgggcagcgtg

SEQ ID NO: 530148 - DNA, 76 bp, Homo sapiens
gggcagcggcagccgtgcggtgagggcggtggcgcccgcgggacctgcgccaacacaagccatcagccccatgctc

SEQ ID NO: 530149 - DNA, 83 bp, Homo sapiens
cgtcgttgtcgccccctcctcgtcgggaagaatcgtttggtctcctgccgtgcccggtgtccctggccagtgtccttccacct

SEQ ID NO: 530150 - DNA, 98 bp, Homo sapiens
ccccgctgacttcttcgtagacattgtctcccaagacaacttcctcaccagcaccttacaggcaaaggcagctcgagcatctcatctgacgtgagttc

SEQ ID NO: 530151 - DNA, 87 bp, Homo sapiens
cggttatactctgcaaggtggtgttccagtggcaaacagctgtataaactcttgtaaacaggttgtctgcattcaaaagagcattct

SEQ ID NO: 530152 - DNA, 100 bp, Homo sapiens
ttttggcattgggcacacattatggcaaggtttatttacttgatgtccaggggaacatcactcagaagtttgatgtaggttttggccaaattgggcgagg

SEQ ID NO: 530153 - DNA, 75 bp, Homo sapiens
tttgctctgctaaaaggctccttcagtgagcaaggcatcaacgagtttctcagatccagagacaatggccccgat

SEQ ID NO: 530154 - DNA, 100 bp, Homo sapiens
ctcttgggaataccttgtccatcacgtcatgggtgcagcccggaatcccgaggatgtggaccgggagcggcgagaacacgaacgcgaggagaggatgggg

SEQ ID NO: 530155 - DNA, 75 bp, Homo sapiens
cctgaagttccctcacattagccagtgtgaagacctccgaaggaccataggtgctggagaatctggtaaaagcac

SEQ ID NO: 530156 - DNA, 74 bp, Homo sapiens
gagcagcctcggttttcccaccacctccaaatcatgcaagacacagggctggctgtcaccaacaccaccatgac

SEQ ID NO: 530157 - DNA, 74 bp, Homo sapiens
agaaggttctggtttgttaaccagatgccgatagacaagattccattaatctcttcctgggagttttccatccc

SEQ ID NO: 530158 - DNA, 98 bp, Homo sapiens
cgacgccttcccggaggagtacgtgcccaccgtcttcgaccactacgcaggtgacagagttagtccttgataattgcctgtgtgtcaatggggaaatt

SEQ ID NO: 530159 - DNA, 75 bp, Homo sapiens
taaccacttaccccttctcaccgaggaagagcgggagaaaggcgggacgaccctgggacagtctccactggggca

SEQ ID NO: 530160 - DNA, 100 bp, Homo sapiens
ctcctggatcactactatgtatggaggcaaaaacattagttcacacacaaacattgttttcagatacagtttatgtaacttgatggaagaaaatggaatt

SEQ ID NO: 530161 - DNA, 98 bp, Homo sapiens
tggggactgacagtacaggagaccagaggggagccagaattgtcgagaacggtcaagaaagagtagaagttgaagaagatggccagttaaagtcctta

SEQ ID NO: 530162 - DNA, 89 bp, Homo sapiens
cccccgcaggcgcccgcggcagcgaacgagcgtttcccaaagtgtattctgcggaactagcacctactgtgttctcaacaccgtgccac

SEQ ID NO: 530163 - DNA, 76 bp, Homo sapiens
ccacagctaagacgccaggacccactggaagcctagaaatgatgaagtggccattctgcctgcccctcagaacctc

SEQ ID NO: 530164 - DNA, 50 bp, Homo sapiens
actcatggaggctgagcatttattcagatggagtctcactccgttgccca

SEQ ID NO: 530165 - DNA, 100 bp, Homo sapiens
cgggtcctcgtggatcagactacagcttgtactcccagagtacctcatccacgctttcttctgtgtcatgtttctttgtgcagcagagtggcttacactg

SEQ ID NO: 530166 - DNA, 85 bp, Homo sapiens
ccactttcgccagcccgtgccgcgagcgcggcctgcaggaggtatcgagaaccttccctgcgaacttcagaggaacttccagctg

SEQ ID NO: 530167 - DNA, 99 bp, Homo sapiens
tgatccagatggacctcattcagacagaatctattaccttggaaatgcaacctcaccacaagtacaaagaccatctttcatggactactttgataagca

SEQ ID NO: 530168 - DNA, 109 bp, Homo sapiens
aggagtcggcggctcagttgtccatgaccctgaaggtccaggagtacccgaccctcaaggactgatcctttgaaatactccagccatgactaaaagagaagcagaggag

SEQ ID NO: 530169 - DNA, 97 bp, Homo sapiens
ggcgccctccgccacgcagccggccaccgccgagacccagcacatcgccgaccaggacaaggacacactcagcattcactacctcatgctgccccgt

SEQ ID NO: 530170 - DNA, 100 bp, Homo sapiens
atcctaccatgtcagccttcccagtagctggaactacaggttctccacagacgaaggtcaatgctggcaaacctacacgttcaccagggaccccatctat

SEQ ID NO: 530171 - DNA, 75 bp, Homo sapiens
cggcgatatgatgatcctgaagtacagaaagacataaacgtgatgaacgcaccttaataaatccagatattaaag

SEQ ID NO: 530172 - DNA, 100 bp, Homo sapiens
ctgcctggtcaagtggatcctgtccagcacagccccacagggctcaggaaggtggtgaggcgggtgagcctaacccagcgcaccgacctgtaccgcaagc

SEQ ID NO: 530173 - DNA, 100 bp, Homo sapiens
tgagcatatgatctttcggtgtctatctgcactttctttgacctgaaccagatttctcttgttgagagaaacagctcatcctgctctacacatttcctca

SEQ ID NO: 530174 - DNA, 112 bp, Homo sapiens
ggaaccatctcagaagccatgcccctcaggctggaacttgccctgtctcctcgcagatgagatttgcttgtaaatgcatcacgaagaggcagcccagaatgaagaaagcaag

SEQ ID NO: 530175 - DNA, 76 bp, Homo sapiens
acatccagagctgcatcattccttggggcaaaatgtggacaagggagaccaggcacctggatgagatgaagtcggc

SEQ ID NO: 530176 - DNA, 100 bp, Homo sapiens
ttctctgggtcgctcccgggctaagcgtcggcaagttctgtagagaaactcgggcaacctttgggccatgaagcccccaggaggagaatcgagcaatctt

SEQ ID NO: 530177 - DNA, 88 bp, Homo sapiens
gcctgggacagctaccgcagcatgagcgaaagctacacgctggaggtgagtgatgaaatggtagtggagctcattgagaagaatttgg

SEQ ID NO: 530178 - DNA, 100 bp, Homo sapiens
gtcggacgcgtccggctgtggaagagagcggcggccgctcacaacatgcacagcctggcgacggctgcggcacacaagccatgccccctcttttctcttt

SEQ ID NO: 530179 - DNA, 100 bp, Homo sapiens
cttatccaaattcttccctctttatgtttttcaagggacggatacaacgactagaggagtacaagcgcaagctagccagagtttccctggtgcgcaaaga

SEQ ID NO: 530180 - DNA, 49 bp, Homo sapiens
gctacatggccccctggtttagggaggatatgttgatgatgtgatcagc

SEQ ID NO: 530181 - DNA, 90 bp, Homo sapiens
cggaaccaagccaaggcgaaagagacgctcagcatgagatactttgatagagcagccttatttgtggaagcttgcctcaagtatggagca

SEQ ID NO: 530182 - DNA, 80 bp, Homo sapiens
cagaccaaggccacttcttgcaaaccacatacacagcacaaagaatgtcagacagcaataccaagtttccaggcccgaag

SEQ ID NO: 530183 - DNA, 83 bp, Homo sapiens
ggcggcctcacatcggcggcgcctgccggcggggacaagaaggtcatcggtctctgagcggcccctgatgttcctgttggaca

SEQ ID NO: 530184 - DNA, 75 bp, Homo sapiens
gggtcggccgccgcagccatggaggccaactggaccgcgttcctgttccagcaaatcaatatgtgtggatcagaa

SEQ ID NO: 530185 - DNA, 100 bp, Homo sapiens
cggggtggtctgtctgctcctggcatgccctgccacagccactgggcagagcggcttgggtaaatccaccttaatcaacaccctcttcaaatccaaaatc

SEQ ID NO: 530186 - DNA, 90 bp, Homo sapiens
gttcgtcatggggctgtttggaaagacccaggagaagccgcccaaagaactgagcctggagacacaggccccatccttcccaatggggac

SEQ ID NO: 530187 - DNA, 100 bp, Homo sapiens
tgtaatgtctgtgaggagagagcaaggcagttcttcaggggagctggttccagcagtgccattggaactcaggagagtactgctcatttgttggtttcag

SEQ ID NO: 530188 - DNA, 53 bp, Homo sapiens
gaagaaatattgaacacaaaacttgcaggtcacagggattatggacccagaac

SEQ ID NO: 530189 - DNA, 74 bp, Homo sapiens
gcggcggcaggcggcagaggggagctggttgtcttcttgcctgccctgtgtcgtaaaatgggggtcccttactg

SEQ ID NO: 530190 - DNA, 75 bp, Homo sapiens
cccccgcttcagtcaagacctgcctagaaaaagatgatctgtactggacacacgtggagatatggccatgccacg

SEQ ID NO: 530191 - DNA, 97 bp, Homo sapiens
tgatgacgaggagacagagccccagcactcacagacctcaatgtctagtggaggtgttccgttattacactgtagactccactccactttcagttca

SEQ ID NO: 530192 - DNA, 74 bp, Homo sapiens
tacccaagtacatatgatttcagctgcaatggcagagcttttctggaaaaagaagaaaagttcaaccacctcaa

SEQ ID NO: 530193 - DNA, 97 bp, Homo sapiens
gtgtccaaccccatcacataggggtttctgttaaggaactcgatttatatttggcatactttgtgcatgcagcagcagattctgaacacaaactcga

SEQ ID NO: 530194 - DNA, 100 bp, Homo sapiens
aagcagtttcatacagacaagttgcatttgatttcacaaaagtgaagagagggtcacgatgagggcccaggctctggatgggctgccaaagggaccgtgc

SEQ ID NO: 530195 - DNA, 100 bp, Homo sapiens
caagcattcctatctttctcccggaagtcaccattggagctcatcagactgaccgtgtcttacatcagttcagagagcgggtcacagaaagtcgagagag

SEQ ID NO: 530196 - DNA, 100 bp, Homo sapiens
gtggaaaaagcagggaggttatgaggcttaataaagaagatgagctgcttcagaaagagcaaaactattcagatgacgtcttggccaacatgattagtga

SEQ ID NO: 530197 - DNA, 103 bp, Homo sapiens
ttcggtgcgggggacgaggacgacaccgatttcctctcgccgagcggcggatcagcttgaacgggtctttttacgacttggccatgctgaaacagatgaacaa

SEQ ID NO: 530198 - DNA, 96 bp, Homo sapiens
cctacacaacccgtgtattcatcccccagacgtttaaattgtgcggaaatatctagtatcaggttcttgattattacagacctctttctgaaaagc

SEQ ID NO: 530199 - DNA, 100 bp, Homo sapiens
atcagacagaacagttaatcctcaatttaagcctgatctaacccctagaaacaggtgttggagcgggccggagagaagtagagtgggctgcgaggagaag

SEQ ID NO: 530200 - DNA, 80 bp, Homo sapiens
tcactttgacgatgaggagacctggacttttgggtcaaaaggtgaaattgctcaaataatggagcaaggtgacctctcag

SEQ ID NO: 530201 - DNA, 96 bp, Homo sapiens
gtgtgcgcggtgctgctgcgcctggagtttatgtggccgaggcagacaagtggaattaggccttgctgcaggggacttcatttccttctcagtact

SEQ ID NO: 530202 - DNA, 100 bp, Homo sapiens
ggggaagaacgtgctactgctgggttctgtggatggagttataaaggaagtgaatgtgagcccatgccccacccaaccctgccagctgagcaaaggacag

SEQ ID NO: 530203 - DNA, 75 bp, Homo sapiens
cttgtatgcaggttacaaccacaggcctcaagtggaacctcagatgtgatcttcgtggtggaaagctaaatttta

SEQ ID NO: 530204 - DNA, 98 bp, Homo sapiens
cggagcatccgggcggccgcttgagatcggcgctttgagaactgagcgcatgtggagttcggaggaaaagggctcagaaaatgcatccgatgcagatt

SEQ ID NO: 530205 - DNA, 101 bp, Homo sapiens
gaacaggtgtccttctaaaatacagcacaagctacagcctgcgtccagccataacccaggagtaacatcaggccgagacgcatccagagctttcgtgaccg

SEQ ID NO: 530206 - DNA, 88 bp, Homo sapiens
aaaatcagaagtacagttttatctagccacatcttggagctgtcaaagacttcgtgattatccccctgcacaccaccccagagacatc

SEQ ID NO: 530207 - DNA, 75 bp, Homo sapiens
tggtacatgaccacctgaaggatctctggaatgatggggtctccttggcagctgtattctggagtctggatgttg

SEQ ID NO: 530208 - DNA, 100 bp, Homo sapiens
ccgcctcaggggccatggcgaagcacgagcagatcctggtcctcgatccgcccacagacctcaaattcaaagagagcgagggctggcgggagcagctggc

SEQ ID NO: 530209 - DNA, 75 bp, Homo sapiens
ccctcaggccagaggccaaggggtggccgctgccaagcagatgggcgcagttcttcatccacccactaatgatca

SEQ ID NO: 530210 - DNA, 97 bp, Homo sapiens
taacttggacacatgtggttccatcagtcaggtcattgagcagttacctcagccaaacaggacaagcagggcattgtctaaatataggagcagatct

SEQ ID NO: 530211 - DNA, 101 bp, Homo sapiens
ggctagagctggagtcgtgagcgcgcgcccgccccgctctgggaggaccgcgagggcccaccagctctgagcagatcatgaagacaggggcccttttgctt

SEQ ID NO: 530212 - DNA, 85 bp, Homo sapiens
ggcatttacagaaagagtcaacagcagtggcaacaggttcgagaacttgtcttggacaattgcaaatcaaatgatggaaaaattg

SEQ ID NO: 530213 - DNA, 100 bp, Homo sapiens
tctactggagcgacctccaggccatgttcctgcagttcctgggggaggggcgcctggaggacaccatcaggtggtggtgctcaccaacacccccctggag

SEQ ID NO: 530214 - DNA, 130 bp, Homo sapiens
cttctttgtcaccataggagacatggacgaagccttcaaatccatcaagctcatcaaaaggttatcaatactctggctgaccatcatcatcgtgggactgactttggtggaagtccttggttacatgtca

SEQ ID NO: 530215 - DNA, 50 bp, Homo sapiens
gaagaagggccgtcgaggaaaagacttctgccttgatggacaaattcaaa

SEQ ID NO: 530216 - DNA, 100 bp, Homo sapiens
agtatcttctcccctgttggaccagcagagttacagatgtagagctaaaacgactgaaggatgctttcaagaggacctgtggactctcatattacatggg

SEQ ID NO: 530217 - DNA, 82 bp, Homo sapiens
ctggacgtgccagggtcagatctcgcctccgaggaagaatgaaactagtgatcgagaagatggcctccccaaaggacatcat

SEQ ID NO: 530218 - DNA, 75 bp, Homo sapiens
gcaaatctgagcgttctcaacttggttattgtaaaaaaaggagaggagccaagagcaggcaaagaggaatctgga

SEQ ID NO: 530219 - DNA, 83 bp, Homo sapiens
ctgtcactgcaggagctgcagaccatcagtactactataattccttgacccagcagtacctttactgggatggggaaaaagag

SEQ ID NO: 530220 - DNA, 60 bp, Homo sapiens
tgctggcgcaggacgccgacatcgtgtgccgctgccagaaacatgccaagggacaagtgt

SEQ ID NO: 530221 - DNA, 100 bp, Homo sapiens
gcgcgcccagagccccgcgtttcagccctagggaagcacagacgcagtcttcagcaaggaagtgctgggaacgccctggagtgaacccaggaagatgcct

SEQ ID NO: 530222 - DNA, 99 bp, Homo sapiens
tctacactatccgggaaggagaaacccttgagttgacttgtctagtcacaggacatccacgtccacagccattgatcttatcaacaatttgctgcaagt

SEQ ID NO: 530223 - DNA, 100 bp, Homo sapiens
ttgaccccaaagttgcatttcctcgtcgagcgcaacccaaggaaagatgaatgggagggctgattttcgagagccgaatgcagaggttccaagaccaatt

SEQ ID NO: 530224 - DNA, 100 bp, Homo sapiens
cgccgaggcacaggctgctcgcggaccaccctgctccgaaaactaagtctctggatggtcgtcagatccgtgtggatcatgcaggcaagtctgctcgggg

SEQ ID NO: 530225 - DNA, 82 bp, Homo sapiens
gccgtccccaggacactgtccggatcttccctccctgccacagctccggagcaagccccagccccggcccggccataccagg

SEQ ID NO: 530226 - DNA, 87 bp, Homo sapiens
catttctaagtactttctcctactccataaagacttcaagattactacagcatcccatttcccacacccactactccgctgactggg

SEQ ID NO: 530227 - DNA, 90 bp, Homo sapiens
aaattgcagaagcctaccttgggaagggcctggagctgcagtggttgctggagctgttgtgggtaccctggttggactggggttgctggc

SEQ ID NO: 530228 - DNA, 82 bp, Homo sapiens
ccaagagaggctaaaggaagaacaacagatggatcccttcaggatcaggagcgtctgggcaagcagctcaagttacgtgcag

SEQ ID NO: 530229 - DNA, 49 bp, Homo sapiens
ctcgcgtttccacttcagagatctgcaaaagttcaaacagaccctccct

SEQ ID NO: 530230 - DNA, 100 bp, Homo sapiens
ctgcggagtcgtccggagccgctgcgcgtggcagaaatctgaagctatcatggaacaattgaagtcttttcaaataattgctcatctaaagcgtctacag

SEQ ID NO: 530231 - DNA, 100 bp, Homo sapiens
ctccgccgccccgaaactttcaccgcgagcggaaactggcgatggaatatgagaggagccctctggaaagaaaaggacagaccctgtgctttcatgaaag

SEQ ID NO: 530232 - DNA, 82 bp, Homo sapiens
ggttttcgaaattcttcttatccagagacagcactgccagtgaaagatgtagaagataaacctgaacaacaaaccagaacaa

SEQ ID NO: 530233 - DNA, 75 bp, Homo sapiens
ctcaagggactgtgtccaccctcaggtgtggacactgccagcggctgcagccgacttggaatgacctgggagaca

SEQ ID NO: 530234 - DNA, 50 bp, Homo sapiens
gatcatgatacagttgataaaattgttgtggtgcccatgtagttttagat

SEQ ID NO: 530235 - DNA, 75 bp, Homo sapiens
gaggttaaagagacccgttcagagtcctacagtggcaggtactggtcttcttggacattaatctttgaatacttg

SEQ ID NO: 530236 - DNA, 101 bp, Homo sapiens
cagatccagagtgttactggcttacaaattggattgaggtaatctgtaagtcagatgctccaacaggggatgttcttcttgatgaagctctgaagcatgtt

SEQ ID NO: 530237 - DNA, 83 bp, Homo sapiens
cagcacagtcgggggtgtaggttatgggggttattcagcttctcaaggctggaaaagcgaaggaagtttcctacaatgcacta

SEQ ID NO: 530238 - DNA, 98 bp, Homo sapiens
tatgaccaggtgctccacgaagacgaaaccacggcgaggccttcttgggcagctttgtggccagcgggatggggccctcggcctcgtcccatgggagc

SEQ ID NO: 530239 - DNA, 101 bp, Homo sapiens
accgggaagccttaaggaaggaagcagagcgccaggcattagcgcagctcgagaaggccaaggttccgagcctcactctatccctgtcctgagacaccaca

SEQ ID NO: 530240 - DNA, 90 bp, Homo sapiens
cctccttcacgcacgccctgcgcctggtgaaccaagaatatgacagatacctagcatctagcaaaataatggcagctgcttaccttgacc

SEQ ID NO: 530241 - DNA, 101 bp, Homo sapiens
ggagggccagccagtgtgcctagctcctccccaggcacgtcagtaaaaaagccggacccaaacatcaaaagttgtagatgagcatgagagtgtggagcaga

SEQ ID NO: 530242 - DNA, 89 bp, Homo sapiens
tcgacgtcgtgatccagaagtccagagctgaggactgcctgtttgcaggtggtgatgatgtccagcaactctgtgaagcaggagaagag

SEQ ID NO: 530243 - DNA, 90 bp, Homo sapiens
cacctccagcctgagggcgcaactgagaggaactgagacccaagcagctcagtaaagtgaccaagaatatggcccaggtgaccaaagccc

SEQ ID NO: 530244 - DNA, 96 bp, Homo sapiens
gaaacattatggatctgtggagctgcttctggagctatttgacagcgaagaccctcgggaacgggactacttaaaaacagtcttacacagaattta

SEQ ID NO: 530245 - DNA, 83 bp, Homo sapiens
ctagctccaggttaggccgagctttgcgggaaagcagcgaacccagcgggtgccgcttctccacccgaggcttccacctccaa

SEQ ID NO: 530246 - DNA, 73 bp, Homo sapiens
agcattcaagggatggtgaaatggatgatagtcgaggtgatctgtgaaaatggttcgctattcacttgacccg

SEQ ID NO: 530247 - DNA, 90 bp, Homo sapiens
cggcggagcttcgccaaggctggcgcagtcgggacatgagagatggctttagaagaaaaagtttctactcttcccattatgcgagagagc

SEQ ID NO: 530248 - DNA, 90 bp, Homo sapiens
cacctcgagcggctgctggacgaaggcaaagcgaaggctggagctaggagaaagcggtcatcagtacctctcagatggtttaaaaacccc

SEQ ID NO: 530249 - DNA, 75 bp, Homo sapiens
aactaccgctgctggaccacaaaccgctgccagaaaaccatcatcgtctacagactgccgtggacctggaaatgc

SEQ ID NO: 530250 - DNA, 80 bp, Homo sapiens
gaagcgggcggccccggccgcctccgcgagggcaccatggaggtgaatgcagcagttggaattgatcacaccttttcagt

SEQ ID NO: 530251 - DNA, 100 bp, Homo sapiens
actccaagtccacggacgataacgtggacattcctgatgtccccctcctggcagcccagacgtttattcagaggtctcatgaactacgatccaagattct

SEQ ID NO: 530252 - DNA, 97 bp, Homo sapiens
gtctgcggcggtgttctggtgcacccccagtgggtcctcacagctgcccactgcatcaggaactcccatcccagatctcaaagtgtttgagcgtgag

SEQ ID NO: 530253 - DNA, 100 bp, Homo sapiens
ccaatgtttgcttgtctggaaatggattatgaggtcgagctgtgtttagagtgcatcgaatgggccaagtcagagaaaagaactttcttacgccaagctt

SEQ ID NO: 530254 - DNA, 101 bp, Homo sapiens
cgcgggacggctctgtaggaaggaacttggttccccctccctcagcttccgccccaaaagttttcggctttgtgagaaaccttaccatcaaacacgatggc

SEQ ID NO: 530255 - DNA, 100 bp, Homo sapiens
gagagaggcaccgggatcgtgaccgagaccgtgaccgagagcgtgaccgagagcgcgaatatcgtcatcgttagaagagtttcgctcttgttgcccaggc

SEQ ID NO: 530256 - DNA, 100 bp, Homo sapiens
ctttcccctgagcctcagcacctgcttgtttggaagtctgctttacaagaacttgaagaattgaaacaaattgttcccaaagaatccctcgtttacttct

SEQ ID NO: 530257 - DNA, 82 bp, Homo sapiens
gaaaactcagtggattcaaaatccattaaaaatttggaacctagccatccctgccattggggctcagtattccatgtttcca

SEQ ID NO: 530258 - DNA, 97 bp, Homo sapiens
tgagactcaacatgacactcctggggtctgagcattccttgctgattaggagcaagttcagatcagctttaccaacagggacgcttatgtcaactgg

SEQ ID NO: 530259 - DNA, 100 bp, Homo sapiens
ccgccccggcgcccccgcggcccccgcggccgggccgccgcgccccgacgcccccgcgggaaggagaaggatccccagccacagcagttgccacccatgg

SEQ ID NO: 530260 - DNA, 90 bp, Homo sapiens
gttcacccgctgccgggcaccgaggaccagctcaatgacagctttcaccaacaatcaccagtggtttacacaacattgcaaggagcattg

SEQ ID NO: 530261 - DNA, 75 bp, Homo sapiens
cgcagatgcccaccggaatggagaaggaagaggagtcgacggtctggaaaatcccgaagcagaagcccgtattca

SEQ ID NO: 530262 - DNA, 101 bp, Homo sapiens
ttgatcgagctttgaatgaagcttgtgaatctgtaatccagacagcctgcaaacatataagatctggagacccaatgaggtttgtctccgaggaagaccca

SEQ ID NO: 530263 - DNA, 75 bp, Homo sapiens
cgcctccgtgtgccctggttgtgagaagacgtctgtgtcgtgcgtctatccttcactggagtctgatgatgatga

SEQ ID NO: 530264 - DNA, 75 bp, Homo sapiens
cacgacgtctggcaggaacctcggcctcagagaccctggaggaggagctatttgggaacaatgaggagagcccag

SEQ ID NO: 530265 - DNA, 100 bp, Homo sapiens
tgagctggtggacatcataggtggggaagctcaggctttacaggaagtatggtgctggcatctgcttggcttctagagagtcttacaatcgtggaggaag

SEQ ID NO: 530266 - DNA, 50 bp, Homo sapiens
cctactgcaatctactgcactcgagaactcttcatcttggcttataccta

SEQ ID NO: 530267 - DNA, 74 bp, Homo sapiens
ccagtgttcaccatcctggccccggaagggagtgcatccgccccaacccttttccccctcgtctcctgtgagaa

SEQ ID NO: 530268 - DNA, 90 bp, Homo sapiens
gccagccctcggctccgggtccacaagaccttcaagtttgtcgtcgtcggggtcctgctgcagatgaggctgccagccttgagagcacca

SEQ ID NO: 530269 - DNA, 75 bp, Homo sapiens
caagaggagcagtccagcggcatgaccattttcttcagcctccttgtcctagtttccaacatggctagatccatc

SEQ ID NO: 530270 - DNA, 97 bp, Homo sapiens
ggcgtgaactcagaagacaaggagatggtgacgactgtgaagggggtcatcaaggctgtgctggatggagtgaagtggacagaggactgcagaaaat

SEQ ID NO: 530271 - DNA, 102 bp, Homo sapiens
gcccgagcatatgcacagggtatcagccgaaccaagtactgggagtctattatcctcccagtccacaacgctgaaccgtggctggacgaatgtttgaggtct

SEQ ID NO: 530272 - DNA, 75 bp, Homo sapiens
ctggaggagttgtacggcctggcactgcgcttcttcaaaggagtccaatgtgctgattgctgctaacagtcaggg

SEQ ID NO: 530273 - DNA, 82 bp, Homo sapiens
gcggggcggagccgagagccacactttcaagtaaaccagacatagacgagtgcgcagactcggaggcctgcggggaggcgcg

SEQ ID NO: 530274 - DNA, 82 bp, Homo sapiens
ctccgtgtggacggcgggggccgagcccatgagtagggaggagaaacagaagcttgggtactctcgcctccgccagtggaac

SEQ ID NO: 530275 - DNA, 50 bp, Homo sapiens
tgaagttcaggcagcgggagcgaggaggatcagacttgttgtggaagagg

SEQ ID NO: 530276 - DNA, 83 bp, Homo sapiens
caactggcccggcaccgagttctctctgacaatgcagatcttcgtgaagactctgactggtaagaccatcaccctcgaggttg

SEQ ID NO: 530277 - DNA, 100 bp, Homo sapiens
caaagagcaactaactgatgctgacaccaaagaatatgcttttaaggctattaaccagggtggccttacatcagtagctgtcagagggaaagactgtgca

SEQ ID NO: 530278 - DNA, 75 bp, Homo sapiens
cggcccgcctctttgagaggtctcgcattaaggctctggcaggtttggtgcacctcgatttggaggaagtagggc

SEQ ID NO: 530279 - DNA, 115 bp, Homo sapiens
gccttgagtcagtgcgccgctctccagcccgcttgaacggtcttgagtcaccacgtccgaatataattcttgggttagtaatctgccaaaaaatcaaacgtcccgcaaacagtgg

SEQ ID NO: 530280 - DNA, 122 bp, Homo sapiens
ggggacccagaccctggagcctcagttggaagcagccgatccagcctgcggagcctgtggggcaggtcacggtctagatcacattctcgatccagaggaaggcgatactctcgctcacgcag

SEQ ID NO: 530281 - DNA, 88 bp, Homo sapiens
aacttccgctttggaaaccctctgcacattgcccagaagcttttccgaggtcgttccaggggtagaggaggcatgaaggatgaccgtc

SEQ ID NO: 530282 - DNA, 97 bp, Homo sapiens
ggacagcctcatcacccggctgctggaggattccagaatgactatcttgacttacccctttaaaaatcttcccactgcatcaaaatgggccctcaga

SEQ ID NO: 530283 - DNA, 89 bp, Homo sapiens
gatctgtgggactggtttgaatccttccttgatgatgaagagggctcttggtggtatcgctcaatacgctatagtggagaccagattct

SEQ ID NO: 530284 - DNA, 98 bp, Homo sapiens
gaggattttgtaatggaagggcatggcaagactccacctcctggtgaagaaagcaaacagttggcaaaagcagcttttgatgatgcaattgcagaact

SEQ ID NO: 530285 - DNA, 83 bp, Homo sapiens
ccgggccatggccgccgccgatgccgagggaaccattggaggataaactgagaaatggcccagttccatttgcctcttacaga

SEQ ID NO: 530286 - DNA, 83 bp, Homo sapiens
cgaggttcgagtgttgcagagcctgcggggcaagatcttcactcagcctctgaagaagcttcgggttcagactcaggcagtca

SEQ ID NO: 530287 - DNA, 99 bp, Homo sapiens
cacctgacccagagcctacccatgaagttctgagccatctgaagatgaagagtcccaaggccttcctaccatggcacgtagaaatgatgatatttcaga

SEQ ID NO: 530288 - DNA, 52 bp, Homo sapiens
caaggagaacaccggaagttggagaaggtgtgggccaggtcgtgctccaggt

SEQ ID NO: 530289 - DNA, 76 bp, Homo sapiens
tcatatgcaaaagatccacttaataactatgcagtcaagagaacagcccatcttcaccacccgagcgcatgtcttc

SEQ ID NO: 530290 - DNA, 100 bp, Homo sapiens
gagcggagcacagtccgccgagcacaagctccagcatcccgtcaggggttgcaggtgtgtgggaggtcagaatggcggcagcggagcatcgtcattcttc

SEQ ID NO: 530291 - DNA, 80 bp, Homo sapiens
caaagccggctacgcgctgcgaggaccttttttctatcagtgcttatgtttatgctcagaaaccacaaatggacattcac

SEQ ID NO: 530292 - DNA, 83 bp, Homo sapiens
agactgccgagcagccttgagccgacctgatggccaaaagaaaggaagaaaatttttcctctcctaaaaatgccaaaaggcca

SEQ ID NO: 530293 - DNA, 101 bp, Homo sapiens
gaagagacaggaggcagcagacggacatccaggtgacctgagcatctctgcagaccgcctgagtgagaagcgctctcccaacgactttgccttatggaagg

SEQ ID NO: 530294 - DNA, 99 bp, Homo sapiens
cactctccagcaccagcttccagttagtggatatagcacaccatccccagccagtacttatatactctggatttcccagagagtcgggtaatcagtcag

SEQ ID NO: 530295 - DNA, 50 bp, Homo sapiens
tgctgctactgtgtccagcgcagaaatcatagcccactaatgagttttgg

SEQ ID NO: 530296 - DNA, 75 bp, Homo sapiens
ccctgaacgaggaggccgagaggaaagggataaactcaagccatggagggattactgcattacatcaaccctgca

SEQ ID NO: 530297 - DNA, 75 bp, Homo sapiens
acttctagtctaaaacaggatttgactctactaatccaggcatgttacatggaattggaaaatttatagttgaaa

SEQ ID NO: 530298 - DNA, 100 bp, Homo sapiens
tttgccagagaaaggacgagcagcaagtcagggagcttaagacctggcagcctgggtgtcatggagtactacctgatggatgctgcctccttgctgcctg

SEQ ID NO: 530299 - DNA, 75 bp, Homo sapiens
tggacgcctttcagaaagtggctgacatggccaccaacacacgtgagaaagcttcttgctatctacctccaccat

SEQ ID NO: 530300 - DNA, 100 bp, Homo sapiens
atttggttatgtgcatggggtctcaggacctggaatagggtttggtggtctggaagcaatgaatagcatgggaggatttggaggagttggccgaatggga

SEQ ID NO: 530301 - DNA, 51 bp, Homo sapiens
agaaaacccacctagagcatcagttctcagatactttacgaattcttacat

SEQ ID NO: 530302 - DNA, 82 bp, Homo sapiens
ctcgactcttggcgccaccgcctcatgcactgtgtaggggccagcagcctcccccgatgggtcgtcagcaacgagggtgcct

SEQ ID NO: 530303 - DNA, 75 bp, Homo sapiens
cagcaacagtggcaatgagaccagtggaagcagcaccatcggggagacaagcaacttaggcctgggggagcccat

SEQ ID NO: 530304 - DNA, 132 bp, Homo sapiens
caaactttactttgcctcatttgaggagtgggaacaggcttcggcgaacacaaaggtactaggttttgacaagcttgcatcatgcgtgagtataagctagtcgttcttggctcaggaggcgttggaaagtct

SEQ ID NO: 530305 - DNA, 110 bp, Homo sapiens
tcaagcacacccaatggacagcatgcctcaccaagtcacatgacaagcaggcgacataccttctgttgaataccttttacaaaatggaagtgatccaaatgttaaagacc

SEQ ID NO: 530306 - DNA, 100 bp, Homo sapiens
ctgtgagggaccgtgaaatgtttggatatatgaaattacatccagaggattttcctgaagaaggtgatgtaaaattctcaaacaatgagatagataaaaa

SEQ ID NO: 530307 - DNA, 74 bp, Homo sapiens
ctggggtcccttttgcctcagatactattttgaagagccctcaggactgcccccggaccctgctctcacccctg

SEQ ID NO: 530308 - DNA, 100 bp, Homo sapiens
tactactgccgctgccaccgtggctacactctggaccccaatggcaaaacctgcagccccttcaacctggactactacacagaggttctggacctctcct

SEQ ID NO: 530309 - DNA, 82 bp, Homo sapiens
gccaagatggtgaagcagatcgagagcaaggcacgtgtggttctcaaatataggcattctgatgggaacttgtgtgttaaag

SEQ ID NO: 530310 - DNA, 100 bp, Homo sapiens
atcctagtgggggttggcttgcccatttcctctgggaatcccggaggcaagacacttgaggagaggcgctccagcctggacgctgagattgactccttga

SEQ ID NO: 530311 - DNA, 88 bp, Homo sapiens
ccccgaacggcccccaaggggcgggcgctgtgtatgattcatccagccttccagctctgttatttaaagcaagaacacttctgggagc

SEQ ID NO: 530312 - DNA, 100 bp, Homo sapiens
tgctgggatcggttcctccaggagaagttagcttcagagttctttgtggatggacttgattctgatgagagtgtgaagcctcagtttaggtcatctggtg

SEQ ID NO: 530313 - DNA, 100 bp, Homo sapiens
ccaaagggggagatatcatgctctggaattttggcatcaaggacaaacccaccttcatcaaagggacttaattcagtgcacaaatgagatgaatgtgaac

SEQ ID NO: 530314 - DNA, 83 bp, Homo sapiens
ggcgggggccaggggcccctcgcctcccctctgaggaccgaagatgagcttcctcttgcgccatgtcagaaccggctggggat

SEQ ID NO: 530315 - DNA, 90 bp, Homo sapiens
tcaaaaacactaaacgccaataatatggagacactaatcgaatgtcaatcagaggaggcaagtgaggcctatctggttggcctttttgaa

SEQ ID NO: 530316 - DNA, 75 bp, Homo sapiens
cctgtggtaacttcctaggagggaagtggatcccaaaggtttctaagcatgaattgaggaacagaagaagcagag

SEQ ID NO: 530317 - DNA, 74 bp, Homo sapiens
gggaaaccaattacaggcatgctccaaagaaaagctcctcccaacctccctcctggggtcccgccgttgttgcc

SEQ ID NO: 530318 - DNA, 99 bp, Homo sapiens
aagactagccacctttctgatacagggattgaggagactgaagaatgctgaagacaggctgatgggctcagctggtaggctccactatctcgccatgac

SEQ ID NO: 530319 - DNA, 90 bp, Homo sapiens
gaagggatgtcgtctcagcagtgctcgggcgcagcagggttaggcttgctgaggggcaggcacaggagtcctggctgagctcatggcctg

SEQ ID NO: 530320 - DNA, 115 bp, Homo sapiens
agcatcttgttcctgtaatagaaatgtgggcagatcaactgacatccttaaagcacatgcagatgacaatccaggctctccaggatgaattgcggatccagagggacctgaatca

SEQ ID NO: 530321 - DNA, 75 bp, Homo sapiens
caggactgcgcccccgggagcgggcgcccagaggttaaacccatccagagtaatggctgcggccttacccaggac

SEQ ID NO: 530322 - DNA, 100 bp, Homo sapiens
atcaaatggcacttcattggccacctacagaaacaaaatgtcaacaaattgatgggactccctggaggaaaagcggaagcggcagcggtctgaacgcctg

SEQ ID NO: 530323 - DNA, 90 bp, Homo sapiens
acccacactcattcgggttggacttgccggcgtcaccgccgcggacttcgctttgggccatgaccaggtccagctgtagttcctctggac

SEQ ID NO: 530324 - DNA, 101 bp, Homo sapiens
ataaaatcaactcatactgcaaggcaggagatgaccaggatagtgaaaagtcaaaaccagcaggctcagatggtgagcggcggggggtaaagagacagcgg

SEQ ID NO: 530325 - DNA, 82 bp, Homo sapiens
aagactccacctcctggtgaagaaagcaaacagtgctgccttcacctgcctggagactgccttccgcctggacgccctgcac

SEQ ID NO: 530326 - DNA, 75 bp, Homo sapiens
ccagtgctgataattatggcattagccatcctggagtctctaccacccgtccagtttgactggagtagcagtggc

SEQ ID NO: 530327 - DNA, 100 bp, Homo sapiens
gaatgcttctcagcagcaacatccccaaacagcggcgtttcacggtggcacatacatgcaacgcacctcttgctttttcctccaaagtatgttatgttaa

SEQ ID NO: 530328 - DNA, 76 bp, Homo sapiens
ggatctgtgtgcccacagctcctggagccccacaggtgtgatgaatgcagactctgctaccattttggctgtttgg

SEQ ID NO: 530329 - DNA, 85 bp, Homo sapiens
cgagagattgtctgtactgatagcatctaatcgatagggtctcaccatgttgcccaggctggtcttgaactcctggactcatcct

SEQ ID NO: 530330 - DNA, 98 bp, Homo sapiens
tgctgcactaaagggggctggacagacagtgacgattatagcacaatatcaacctgaagaaaaccacagcttttggaccctaaaaggtctggattgat

SEQ ID NO: 530331 - DNA, 95 bp, Homo sapiens
ttctgccatggttctcactaaaatgaaagaaaccgctgaggcttatttgggaaagaagacaagcttaccattgttcagaagcaaacagtttgcag

SEQ ID NO: 530332 - DNA, 87 bp, Homo sapiens
ccgagtggcggacgggctcccgctggccgcctcgatgcaggaggacgaacaggatgccctcttcgcttcccaagagaagtttttcca

SEQ ID NO: 530333 - DNA, 100 bp, Homo sapiens
acaactacacctttgcccaacctgggattcaaatgaaagtgaaaatgttagaagaactcgtgagccggattgatggaacatcgtcttgagcaatcccaag

SEQ ID NO: 530334 - DNA, 75 bp, Homo sapiens
aggaggtgcagatggcactttccaaagtggatgcctccggggagaattgtgagaagctggagaataattttgatg

SEQ ID NO: 530335 - DNA, 51 bp, Homo sapiens
gaggatgcgttccctggggtccgggtctcatcacaactacgtcaaggaagc

SEQ ID NO: 530336 - DNA, 100 bp, Homo sapiens
agaacttaaagaaggcctgcggcaaagagatgagcttattgaggtgtcctgcctggagacagtgtgggtatcaagagccaatgtgatccagcgccggggc

SEQ ID NO: 530337 - DNA, 95 bp, Homo sapiens
ggagtccctggacttgaaggacaagaccaagatgcagtggcagaacgtggagcacgttggtgaccagagcccctacgtcacctctgtcattctgc

SEQ ID NO: 530338 - DNA, 83 bp, Homo sapiens
aaacaaacttcagctctgaaatagaagatcttgcaaggaccgattattgaccgacctattcgaggtcgtggtggtcttggaag

SEQ ID NO: 530339 - DNA, 82 bp, Homo sapiens
ggccagttttgaaatcgacacacaaagaatagagttgagcctgtgggacacttcgggccccttcacagatgtagtcactaca

SEQ ID NO: 530340 - DNA, 50 bp, Homo sapiens
gcccaaacatctcaacttacatttaaagcaacgcacctcttgctttttcc

SEQ ID NO: 530341 - DNA, 75 bp, Homo sapiens
gtaccgcagcccccgggcacgacctctcggacacggtgcaggcagatattctctaagccgctttcatcatgggag

SEQ ID NO: 530342 - DNA, 100 bp, Homo sapiens
gccccccggcaccgcgcctgctgccgggttgcgctccgtgcacctcttgcgggtagttacttttggtgacgctgtccagttcccacaatgtatcattcct

SEQ ID NO: 530343 - DNA, 80 bp, Homo sapiens
tcaacttctaccagttcctcggggtgcagcaggatgaagtcattgctgtttccgaaaaggtgattgtgaagcttgaagac

SEQ ID NO: 530344 - DNA, 97 bp, Homo sapiens
gaaagcagttaacagtgccaccggtgttccaactgtttaaagccgagacgcatccagagctttcgtgaccggggactgttctgaagcaggcctcgtg

SEQ ID NO: 530345 - DNA, 75 bp, Homo sapiens
ccatgccgctcctaagcctgcacagccgcggcggcagcagcagtgagagggtgtacagcaagctgtgattcctgg

SEQ ID NO: 530346 - DNA, 83 bp, Homo sapiens
cagatcgaagcggatttccgattgaatggctcaggcccgatgtcaccgcataggccagagcaaagctgtgaaggtgtatcgcc

SEQ ID NO: 530347 - DNA, 82 bp, Homo sapiens
cagcgccatccccgagcagcggtggaagctggaagtgggacccatggcagccgagacctcccagtcaacagaatcatcgatg

SEQ ID NO: 530348 - DNA, 101 bp, Homo sapiens
tctatttcttgtggatattatggctaataacacaacaagtttagggagtccatggccagaaaacttttgggtcaggtcaattcagtgaagatatgataccc

SEQ ID NO: 530349 - DNA, 100 bp, Homo sapiens
cgccgctgccgcttccaccacagatcatgaatcggttcagtggtgttatgacaacttcattaactacaggtccctgatgtccgcagacaatgtacgccag

SEQ ID NO: 530350 - DNA, 90 bp, Homo sapiens
agcccatcaagaaatgaagaacgagattcagacacaggaaaacctcacagcacgggtagctctgaacggattcagctctcaggaatgtat

SEQ ID NO: 530351 - DNA, 79 bp, Homo sapiens
gcacattatgaaaagcgtcaagaagaggaggaagccatgcgtagggctgcaagaaagcgtaagattgccattcgaaaag

SEQ ID NO: 530352 - DNA, 83 bp, Homo sapiens
ggaagatcgcaccgcggacgcccgctgagcttggcgcacgggccgaccagcacatggattaattgatgtatgttgagtttatg

SEQ ID NO: 530353 - DNA, 96 bp, Homo sapiens
agcagcacatcactcactgtcagcttccaagagcctcttagcgtcaatgcagctgtagtaaccaggtataaaggtgagagttacgtgtgtgcatcc

SEQ ID NO: 530354 - DNA, 100 bp, Homo sapiens
gcaatgacagtgccaaagccagccgggccaggaccaaagccggtgatctccgagatacagaaaaatggctacaaacttcctagcacatgagaagatctgg

SEQ ID NO: 530355 - DNA, 100 bp, Homo sapiens
gataagtgtcgctttctacgtattgcaggagcctggctcaacccgtcagtgattcaagtaagactcaaggtcctgtagccacagagccagacaaggatca

SEQ ID NO: 530356 - DNA, 106 bp, Homo sapiens
agcccgcccgaccccgtcccgaccctggccgccccgagcggagcctggaggtactccaaagattcaggtttactcacgtcatccagcagagaatggaaagtcaaat

SEQ ID NO: 530357 - DNA, 82 bp, Homo sapiens
cgctcaccccgcggccgcaccttcccgccttctcagttccagtgtctcgccccatcctcaccctcagggttcccagggccca

SEQ ID NO: 530358 - DNA, 131 bp, Homo sapiens
cttgggcctgaagaacaatgactgctgtgggtgctgcggcaacgagggctgtgggaagcgatttgcgatagcagcgacagtgagctggagctgtccacggtgcgccaccagccagaggggctggaccagct

SEQ ID NO: 530359 - DNA, 74 bp, Homo sapiens
ggcacctggataaccttttgctaacaaaaacagatgatgtctttctacctaaagatattgacctagacagtgtg

SEQ ID NO: 530360 - DNA, 74 bp, Homo sapiens
cgctatgcctgcggcggagactgcatcaggctctcggagagaagatgactgaggaggaggtggagaccgttctg

SEQ ID NO: 530361 - DNA, 100 bp, Homo sapiens
gtttgaatattgtgaccacacagttctccatgagttggacagataccaaagagggtgacaaggcaactgtatgagccactagttatgcagctgattcact

SEQ ID NO: 530362 - DNA, 74 bp, Homo sapiens
tgctgctgaccctggccttcaaccccgagccgctggtgctacagtataaggatgcatttatgaaagcaaatcct

SEQ ID NO: 530363 - DNA, 75 bp, Homo sapiens
cagaaaacgagaggctcaccgcagtcgtgcaggatctgaaggaggtacaaacccgtagtgctgatgaaccaatga

SEQ ID NO: 530364 - DNA, 96 bp, Homo sapiens
attgagaaacttctgagcaacagatctaaagccctggtgttaatgaaggagttcccccttctgagtatgttcaatatccatgaaaaccttttagaa

SEQ ID NO: 530365 - DNA, 75 bp, Homo sapiens
gctgaccatggagatgtttgggaacagctccatcaagtcctcctccgcctcctcctctctgcatgcgcgtcagag

SEQ ID NO: 530366 - DNA, 90 bp, Homo sapiens
gcaggagattatagctctgtatgagaaggacaacacctacttaggaccctttgtggaggagttgtttgaagtgacatcctgttatttccc

SEQ ID NO: 530367 - DNA, 98 bp, Homo sapiens
tcacgggctgccttacgtagcagacagacagggctttgctgccaccttagagcaggcaacatttcatacaccatttagtcacctaggccaaagtccgg

SEQ ID NO: 530368 - DNA, 100 bp, Homo sapiens
cctgtttagtaaatatctttccctagctgaggcagtcaaatgcttctcagactctctgtgacatagttaggctgggcagagaccagggcagtcagctgca

SEQ ID NO: 530369 - DNA, 88 bp, Homo sapiens
gtaacccgtttgccgacccggatctcaacaatcccttcaagcaggtagatgaaactcaagagaaaaggtgtggataaatgaaactagc

SEQ ID NO: 530370 - DNA, 100 bp, Homo sapiens
tcgacaggacagaaagagtgtgcagcggattaaagctaaagacatagttcctggtgatattgtagaaattgctgacgtgaacgatcaagagagagggacc

SEQ ID NO: 530371 - DNA, 75 bp, Homo sapiens
caagcagcgacgccagcggcggagaaccgacgaaagatcccaagtgtccttcaagatatcactgtactcatgaag

SEQ ID NO: 530372 - DNA, 82 bp, Homo sapiens
tatcctcggaagagcgctcccaggagaaacaaatgtctttggtggacttgggaaagaggttgctagaagcagcaagaaaagg

SEQ ID NO: 530373 - DNA, 90 bp, Homo sapiens
gccttgatgaggcaatggaatgggcgccagcctcccagtgatggacctgactgaactccccaagtgcacggtgtgtctggagcgcatgga

SEQ ID NO: 530374 - DNA, 100 bp, Homo sapiens
agaccacatctcacaaagaaatctcgtatgtctttacctcagagaaagcaaaccaggaggaggacatccctgtgaagtttgaagaaaacaggtctgaaac

SEQ ID NO: 530375 - DNA, 75 bp, Homo sapiens
ggaaagaagatacacagcagttgtcttaaacagtccagttacaacacagggatcacaacaaacacaaccgccaca

SEQ ID NO: 530376 - DNA, 78 bp, Homo sapiens
cagaattaacaagttggattaaaaatggcaacgtagagcagtggttatgatattcctctcaaccctttaaatctgatc

SEQ ID NO: 530377 - DNA, 100 bp, Homo sapiens
tgatgggcatgtccgcttcgaccttcccccacaagataagtatgctgtgcgcttcatccctcgggagaatggcgtttacctgattgacgtcaagttcaac

SEQ ID NO: 530378 - DNA, 82 bp, Homo sapiens
gagagggggcgctgagctgttgggggctgcccctgatggggcctggcaatgactgagcaggcccagccccagaggacaagga

SEQ ID NO: 530379 - DNA, 100 bp, Homo sapiens
agacccgaaaatgttgcggagccagtctcagctagacctgtgcaaagactctccctatgaattgaagaaagatggcatccacagcgtcacggccttctgc

SEQ ID NO: 530380 - DNA, 100 bp, Homo sapiens
catcacctggtgaccatgcagtcagggaggcaatcatatgaagtttctgtcttaactgcagtaaatccacaagagagagatgcaggtcagctcctccagt

SEQ ID NO: 530381 - DNA, 74 bp, Homo sapiens
aaaaaccttcgactatgcagagacatgagatggtagccaacccctcaggttatggaggttttgatgactatggt

SEQ ID NO: 530382 - DNA, 98 bp, Homo sapiens
cctagggaagcctgccggccgggaggtacagagtaggagaagccagatcccagggcggacaacgagaagtcgtcaggagatacaactcgtcaacgaat

SEQ ID NO: 530383 - DNA, 75 bp, Homo sapiens
atctgcctgggagacagcgcagtgggcaaatccaagtaaacattataccagtgattgccaaagcagatacggttt

SEQ ID NO: 530384 - DNA, 90 bp, Homo sapiens
gaccgggagctggacctccgggcaaatggttatgagccttagagtttctgaactccaagtactgttgggctacgccgggagaaacaagca

SEQ ID NO: 530385 - DNA, 74 bp, Homo sapiens
tctcaggacaacccagatgtgcaacaaagtgcgatgcaaactgtgctcacaggagaaactagaggaatggaaat

SEQ ID NO: 530386 - DNA, 100 bp, Homo sapiens
acccatcagcgcggctacctgctgacacggaaccctcacctcaacaaggacagaggtcagatcaaggccaccccttcaggatgaccttcttttctttgag

SEQ ID NO: 530387 - DNA, 75 bp, Homo sapiens
cgtgttggaccttccggagcttctcagaagacagagggttttcttttgaggacaacttgcctttgatgattttca

SEQ ID NO: 530388 - DNA, 100 bp, Homo sapiens
gggaatcaggtctggaatactcctaaccaagaagttgcccaggtcggccacacacccggagcaccgtcatcacagcggtcaagttccttatctcggacca

SEQ ID NO: 530389 - DNA, 90 bp, Homo sapiens
ctgactcctacttcctctgtatagagcaactgttgaactcagctgcctgtaggtgctggagaatctggtaaaagcaccattgtgaagcag

SEQ ID NO: 530390 - DNA, 83 bp, Homo sapiens
agagacctcccagggacgtgcactcagaaagaggctgggaggcggcagaatgcagccagaggagggcacaggctggctgctgg

SEQ ID NO: 530391 - DNA, 75 bp, Homo sapiens
gcactttagattacctggctcttcaagcttagatgatgtttctcttgcatcaactccaaaacgtccaagtacatc

SEQ ID NO: 530392 - DNA, 100 bp, Homo sapiens
cgagcagcataatgtctgcttccactacacttttgccctcaaccgaccttgaatgcactattggctgtggggcctggggcaggagaggcccagggcgtgc

SEQ ID NO: 530393 - DNA, 100 bp, Homo sapiens
gttcttttggggtagtgtctgggatccagtacgagttgaatcattgttcaaataaggatattccccgagtccctccggtggctaatggccacccagcagt

SEQ ID NO: 530394 - DNA, 100 bp, Homo sapiens
ctggagcgaaatgaagagctgcggcggcagctggagacgctgagcgcccagcacttggagcgtgaggaagcggtggaagaagatatccccatagcgaaag

SEQ ID NO: 530395 - DNA, 75 bp, Homo sapiens
gctcctgcctcccagagaggggagccggcgaggatcaaaatcttcgaaggaggtttccctgaaacctgggctctt

SEQ ID NO: 530396 - DNA, 100 bp, Homo sapiens
tagaagaatcctgcaaaaatgtctctctatccatctctcgaagacttgaagactctaaaatagagctcaagcttgagaagagagaaccactaaagggcag

SEQ ID NO: 530397 - DNA, 100 bp, Homo sapiens
caagctcgtagcctgccactccgtgcacaatggcgatgaccactcagaaggaggcctggtggagaaccacgtggacagcaccatgaacatgttgggcggg

SEQ ID NO: 530398 - DNA, 100 bp, Homo sapiens
aaaaagcttggaaaatttatccaccagaatttgccgtggagatactttttgagctggccttgctgaacacctgagctcaacccctaccatccgactcccg

SEQ ID NO: 530399 - DNA, 98 bp, Homo sapiens
aagaatagaacttggacgatgtattggagaaggccaatttggagatgtacatcaaggcatttatatgagtccagcacgcacagaggctgggctgcggt

SEQ ID NO: 530400 - DNA, 100 bp, Homo sapiens
tctggttccatggctggagcaactgcacagacttttatatatccaatggagggatccagattagatgatcaaagatgtgctccaccacctgctaccacaa

SEQ ID NO: 530401 - DNA, 115 bp, Homo sapiens
aaagaacttgggaattctccctggggggctcgctgtatttactgggaactagtcttgcaggaagatggcccactgcgtgaccttggttcagctgtccatttcctgtgaccatctc

SEQ ID NO: 530402 - DNA, 82 bp, Homo sapiens
ccggcggcgctggaggagcgaggcagctgtactaggactgggaacggacccaacatgagtgaagtttcctgcaagaaacggg

SEQ ID NO: 530403 - DNA, 97 bp, Homo sapiens
ttccactccacaataggagacaccagctgtctgacaacatctacccggtggaggacctcgccgccacgtcggtgaccatctttcccaatgccgaact

SEQ ID NO: 530404 - DNA, 50 bp, Homo sapiens
gaagggacagactccagacgcgccaccccgggccagcacatggctcccag

SEQ ID NO: 530405 - DNA, 74 bp, Homo sapiens
gcggcgagagatggtcaggtctggagctcgaccgggccaggtatctgaacttaggactggagctgcagaaggac

SEQ ID NO: 530406 - DNA, 90 bp, Homo sapiens
cgcatcaacaagatgttgtcctgtgctggggctgacaggtacactcacgtggaagctgagtgtcctttcctgacttttgacgacctcctg

SEQ ID NO: 530407 - DNA, 100 bp, Homo sapiens
accgacggccctcagtctacctgcctacccgcgagtacccgtctgaacagatccgtccactctctcatcagtgactttaaggacccgccgactgctaaat

SEQ ID NO: 530408 - DNA, 100 bp, Homo sapiens
caagagacagcgattggacagaatttgtgaagctggttttccaagaattgatataaagcgggaagaacagaaaacagcagtcataagtatgctactcaaa

SEQ ID NO: 530409 - DNA, 83 bp, Homo sapiens
ctctgtagccttgcttctgagagtgcaggtttgttacagggtacagctctgccggggggggaaaaagtggtaccattttgggc

SEQ ID NO: 530410 - DNA, 51 bp, Homo sapiens
cggaaacaaagttattttgctcgaaaatgcttggacagaagagatgagtac

SEQ ID NO: 530411 - DNA, 98 bp, Homo sapiens
gagttatggatattctggtggggagatgaacccaacctagtgggtgtaatacatcatgaactgcagggaagtgcacggctgtctataacgtgctgccg

SEQ ID NO: 530412 - DNA, 74 bp, Homo sapiens
ccgagcgcaaggacagcgcgaggtccgcgcagcccagcgcagccatggtggaatggaagttaaggagcctcagg

SEQ ID NO: 530413 - DNA, 75 bp, Homo sapiens
gcagcacatcagcgaccgggagaacatagacggacttatcaaactggtttcaaagcacagagctcaagtaattta

SEQ ID NO: 530414 - DNA, 82 bp, Homo sapiens
cgagttctcggtcaccatgtggtcctcagcaaccatgaagttgaaggacacaaaatcaaggccaaagcagtcaagctgtggc

SEQ ID NO: 530415 - DNA, 74 bp, Homo sapiens
cgagcacataacggggttcgggtgtctcgtgtgtgaacatcacagctgccccagagcacatcagctatgtgccc

SEQ ID NO: 530416 - DNA, 90 bp, Homo sapiens
gaacgaatgggacaagatcccgtccatgaatcagggatgaactcaagcggcattacaacctgggggagtactggattgaggtggagatgg

SEQ ID NO: 530417 - DNA, 75 bp, Homo sapiens
cccagatgcgcgcgatgctggaccagttgatgggcacctcccgggacgatgatatcatcaagttgaatcgaaagg

SEQ ID NO: 530418 - DNA, 75 bp, Homo sapiens
tggagggcaaagcgtggtgcgagcaggcatctctgggaaaggacctggggctggtgaggggcccggaggagcctt

SEQ ID NO: 530419 - DNA, 100 bp, Homo sapiens
gtcatcttttcagcaagcctatatcacatgtttatgttctatgctccctaatgaagatgctattaaggaggtgttggagagcacaatggctgaacaagtc

SEQ ID NO: 530420 - DNA, 100 bp, Homo sapiens
caacgccgtgttcgacatcctggccgtgctgcagtaagactttgaccccgacgcaggcttcagtgattgccgcggatcagaagcctgagcactttggctc

SEQ ID NO: 530421 - DNA, 75 bp, Homo sapiens
tgggcctggcggccaacgtgggaccctatggctccggagacagtgcacccctcaaatgaagctggatgtagggaa

SEQ ID NO: 530422 - DNA, 98 bp, Homo sapiens
ttttgcatctggtgtgcaatgtgaagagtccttcaaaaatgccagaaatcaacgccaaggagcagtttttgcaagaaaggatcaaagtgaacggaaaa

SEQ ID NO: 530423 - DNA, 80 bp, Homo sapiens
caggaccacctggaagcctagaaatggcatacttttttgatgcaccagagatggaccatctcccaacaactacagctact

SEQ ID NO: 530424 - DNA, 75 bp, Homo sapiens
cagccaacgtacaccggggccattaccttcccctaggtcttcagaagcatcaagttttaactgtggacattggat

SEQ ID NO: 530425 - DNA, 74 bp, Homo sapiens
gctaattgggccaaatgctcctttaatttttgaacgaggtactgggcctaatcgctacgtgcctctttggctat

SEQ ID NO: 530426 - DNA, 88 bp, Homo sapiens
atcctcctggccaccgactcctacaagggtgctgataagactgtgaaaggcccagatggactgaccgcctttgaagccactgacaacc

SEQ ID NO: 530427 - DNA, 100 bp, Homo sapiens
ggagaacctcttcatcctggaggaggagcagcggatcaggctggatctatcttgggatcccatggctttctttactgggctctggggccccttcacctgt

SEQ ID NO: 530428 - DNA, 113 bp, Homo sapiens
cggctgaggaggggccccagcagcccccgaaggccctatcaggacatggagtatgaaagacgatgagaccaacaggagttgcacaggtacgatctactggaattcctaatggg

SEQ ID NO: 530429 - DNA, 99 bp, Homo sapiens
actgcggcgggcgagacgttctcagatccaggatgagaagactgataaaagaagaagctagctgaacagctgtaaaatgcccaaatctgggttcacaaa

SEQ ID NO: 530430 - DNA, 100 bp, Homo sapiens
ctgacatcgatcctcagaatgcagatgtttatcaccaccgaggacagattggatttgtcctgtatccccccagtggaggtcctgcatgggatctgatgga

SEQ ID NO: 530431 - DNA, 90 bp, Homo sapiens
tgcttgggcgcttctccgctgcgtgtaggtgaagggggcttcctgaccgagattgcccctgcggaaggcccagacgtcagcgaaaggatg

SEQ ID NO: 530432 - DNA, 74 bp, Homo sapiens
tttgacctttttgaagcctttgcaaaacttttaggacaactggaaaacacaggccctcccccagctgacaagga

SEQ ID NO: 530433 - DNA, 74 bp, Homo sapiens
gctagcggccccacagcccctgctgactcaaaacaactagacctgtcggccatggagcctaatgatagtaccag

SEQ ID NO: 530434 - DNA, 98 bp, Homo sapiens
ctcacactatgccatgatgaagaagatgcagttgccagaactgcccaaggacatcaggtcagacccagctgcttttgagtcccgcctggagaaacgca

SEQ ID NO: 530435 - DNA, 75 bp, Homo sapiens
gttatggccaaggaccgcttacaacttctagaactggaagaacagacccgtagggctctggaacttgagcaggaa

SEQ ID NO: 530436 - DNA, 97 bp, Homo sapiens
cacgggtagagattggcttcgggctgagctagcagtgagcaccttttggcccaatgaatatcagatggatcctgagcttgaaaaaaaactgaaagag

SEQ ID NO: 530437 - DNA, 88 bp, Homo sapiens
ctctctcagcctggccagtctttcccagggcttgatgggaaaaaggacttccctagaaatgccatggacaatattaccaggcagaacc

SEQ ID NO: 530438 - DNA, 89 bp, Homo sapiens
tccgctggcacccaggtgcccatgtatatttgcgtgctctcgtgagaaatctttttaatgaaggaaatgacgtttatcgggaacatgat

SEQ ID NO: 530439 - DNA, 76 bp, Homo sapiens
gagcactcggtcccaaaaaggcaaaggtcgaggtcaaggagacattctcatagacgttacactcgatccagatccc

SEQ ID NO: 530440 - DNA, 75 bp, Homo sapiens
caaataaccgttttgaaattaggacaagaattttgggcagatttgaatgccatgaacgtgtatgaaacaactgaa

SEQ ID NO: 530441 - DNA, 90 bp, Homo sapiens
catgacggcctgcttcagcagagtgagcaggttgactctgccagaacaaacgttcatgggctactggacaattggtcaggcaagaagtgg

SEQ ID NO: 530442 - DNA, 110 bp, Homo sapiens
aatacttttactactgtgacaacattaacggatttgacgggatctgaactatacacccaggcggccagcctcctgcatcctgtggtttatactaccgctatcattctcct

SEQ ID NO: 530443 - DNA, 51 bp, Homo sapiens
caacgaggagaagcactctcagcgcgtacttgctttgtaagtgatctgaag

SEQ ID NO: 530444 - DNA, 100 bp, Homo sapiens
ggaatctatgatgctgatggtgatggagattttgatgtggatgatgccaaagttttattaggaagcaagatttccagatgtagcaaatgggtttattgag

SEQ ID NO: 530445 - DNA, 90 bp, Homo sapiens
cggctgccctgtggcctcgctcctcggaggtgcacaaaacaacttgcagcagcttttcatgaggaatttgttgtgagagaagatttaatg

SEQ ID NO: 530446 - DNA, 98 bp, Homo sapiens
ctgcagctaaagttctttgtgagctggctgatctgcaagacaaagaagttggagatggaactacttcagtgatgatccagatcctgatgatggattta

SEQ ID NO: 530447 - DNA, 87 bp, Homo sapiens
ccaccagcccaaccgtgttgtatgtgagtggaggaaatacgcagcaaaccagtccagctacgggggcccagccagccagcagctgag

SEQ ID NO: 530448 - DNA, 85 bp, Homo sapiens
tttgcaccctgcttggagacggacttgcttccggctccctggtcggccagagactctcagaccatcctgatgtgaggaaaatcgg

SEQ ID NO: 530449 - DNA, 74 bp, Homo sapiens
cgacacctacgacgatcgggcctacagcagcttcggcggcggcagaggagtcgacttcaatgttcctatgaaga

SEQ ID NO: 530450 - DNA, 75 bp, Homo sapiens
atgaagctgctcgcagcaactgtgctactcctcaccatctgcagccttgaaggcattgaacctggccacatccca

SEQ ID NO: 530451 - DNA, 127 bp, Homo sapiens
gagcccgaggccggcgccggcgccggcgccgcggcctcttcggctgcggaccctgccattccggaggagtcctacatggaggaccacctgaagaacaagaaccggctggagaaggagtgggaagcgc

SEQ ID NO: 530452 - DNA, 83 bp, Homo sapiens
atgaagatgaaaatgcaatggatgctgatggtggtgatgatgatgatcaaggtacactttctccattgttctcggttcttctt

SEQ ID NO: 530453 - DNA, 50 bp, Homo sapiens
cttcccagcattcctacagatataaatagaagccacagaagaagtttctt

SEQ ID NO: 530454 - DNA, 75 bp, Homo sapiens
caactattcgcggagctggaatgactggcaacccagcagatataatttctacagtagaatttaatcattctggag

SEQ ID NO: 530455 - DNA, 100 bp, Homo sapiens
cgaacatgcgcttttgacacattggaggtgaagtggatcctaaagagaggatagcacgccaacgaaaattattacagaagaaacttggccttaatatggg

SEQ ID NO: 530456 - DNA, 82 bp, Homo sapiens
gtaccgcttatgccaggccgatcccgacctggactcagacaaggaaggtgctcgggtcttcggggcactgggtcccatcggt

SEQ ID NO: 530457 - DNA, 83 bp, Homo sapiens
ttcctgcctccagctgccaggggggacagccagccagcagcaggaggccggtggctgctggcagcggaatcccccagatcaag

SEQ ID NO: 530458 - DNA, 98 bp, Homo sapiens
gccgccgcgctccggtacacacaggagaataaaggcagccccgttgatgactgaaaatgacaaagcatccacctaacagacgaggaatcagctttgaa

SEQ ID NO: 530459 - DNA, 75 bp, Homo sapiens
ctggcaggtgtggcctgcctccgagggagccacagtagcagaaattaaaaaacaatatcgtttgctgtcacttaa

SEQ ID NO: 530460 - DNA, 83 bp, Homo sapiens
gacctgggaacctactgtggggccgcggccggaccgagcgcctcgacctcggtctgaggtactaggttttgacaagcttgcat

SEQ ID NO: 530461 - DNA, 80 bp, Homo sapiens
cttttatattcaaccaaaaatttttccaggaactgagggaagccacaggaaataagatatgtggaacggagttatgtatc

SEQ ID NO: 530462 - DNA, 83 bp, Homo sapiens
tgttcgacgtgcggcccgaatgccagcgcctcttctaccggggcaagcagtttggtgccctggttgtcagatgttggaaagca

SEQ ID NO: 530463 - DNA, 100 bp, Homo sapiens
cggccggtgctggctgcattggaatcgctgaaccgtgcagtgctcgctgccatggatgccaccaagctgcggccctccaggcactgaagcgtaagaagag

SEQ ID NO: 530464 - DNA, 100 bp, Homo sapiens
cggctgacgtctccttgcgatggagcatatccggacgaccaagaaagctcctgctgcttctgtaccccgcctgtccctcccagctgcgcagggccccttc

SEQ ID NO: 530465 - DNA, 50 bp, Homo sapiens
gaaaccatggaattgattctgccttctgcttatagtgatttaggatacta

SEQ ID NO: 530466 - DNA, 100 bp, Homo sapiens
gagcgcatggctgaggtcttggtcaccggggaacagctacggacagtggtgattatcctcttaccatgcctggacctcagtggaaaaaatttcgttcaaa

SEQ ID NO: 530467 - DNA, 100 bp, Homo sapiens
ccttaaggggggtctggaacactgtgagccgctcacagtgtctaaggatgttaaagtctttagtgaagatgggacaagcaaagtggtggagattctagca

SEQ ID NO: 530468 - DNA, 76 bp, Homo sapiens
caatttttattccacgaggaggagtacctggaaattaggtggacccaagtggagagattgtggaactggcgaaagg

SEQ ID NO: 530469 - DNA, 98 bp, Homo sapiens
acctggctgtcctgcgggagcctgtgcctgctggggaaaactcctccttaacttggtagatcatactgaagtggtcagagatttaacttttgctccag

SEQ ID NO: 530470 - DNA, 100 bp, Homo sapiens
caggtccatcaatgacatgatgagcagcatgtcagaccagaccgtccgggtgaagtattacaatgactatggtgatattattaaggaaacactgagtaaa

SEQ ID NO: 530471 - DNA, 82 bp, Homo sapiens
ctgaccctgggagacatcgacgcaaattgtggctactaatttgccccctgaagatcaagatggctctggggatgactctgac

SEQ ID NO: 530472 - DNA, 49 bp, Homo sapiens
cttttatggagacacattagttacaggctggaatgcaatagcgtggtct

SEQ ID NO: 530473 - DNA, 100 bp, Homo sapiens
tgcaccacgcccggggggacgctcttctccaccacaccgggaggtcctggcattgatgtgcctgctccagacatgagcacaggtgagcgggagatgtcct

SEQ ID NO: 530474 - DNA, 90 bp, Homo sapiens
cgacgacagaaccctgtacaatttgatagtcattcgtaatcagcaggccaaagactcagagatgttctcagtgcagctgagtcttggtga

SEQ ID NO: 530475 - DNA, 83 bp, Homo sapiens
cactgggtgaaggaagctgaaaccacagacatgactgagtcctccatgaagaggactttgaacatgtcggggatcgccctcag

SEQ ID NO: 530476 - DNA, 100 bp, Homo sapiens
ccaaagatccccgttcctggagattctgattgagccaatcgcgccgggcgaggagctcctggtctggtacaatggggaagacaaccctgagatagcagct

SEQ ID NO: 530477 - DNA, 74 bp, Homo sapiens
ccgtcaggcagaagaagaatgtgcccatcgaggaagcccccttcctaaaaaggggaggtagacatgtagcagta

SEQ ID NO: 530478 - DNA, 97 bp, Homo sapiens
tggagcttctggaaaaggaggaagtccaggctggtgtggctgcagccaacacaaagggtgatcaggaacaagccaatgaggacggggacttggttgc

SEQ ID NO: 530479 - DNA, 80 bp, Homo sapiens
caagggaccaaggtggaaatcaaacgaaagattcgaagaatctcggggatcagtggcacaagggaatccccatcgaggtc

SEQ ID NO: 530480 - DNA, 83 bp, Homo sapiens
tcctggccaccgactcctacaaggttaagacatcagaattttatagatactcccgacagctccgttacgaagttgaccaagca

SEQ ID NO: 530481 - DNA, 100 bp, Homo sapiens
ggaagccaagggagattataccaggtgcaatggatgagcttcatagtctggatccaagaaggcaagagttattggaagctagatttactggagttgcaag

SEQ ID NO: 530482 - DNA, 100 bp, Homo sapiens
tgccccacactcaccctactaccttctgtgcacatggaggatggaggcaacctgaaggtgtacaacacctcaggtattgagccccactattacatctccc

SEQ ID NO: 530483 - DNA, 75 bp, Homo sapiens
gagaaattggatcttacacttgaaatacagactgttggggaacaagagggaatctaagggaggaaattatcaact

SEQ ID NO: 530484 - DNA, 51 bp, Homo sapiens
gagcataggaggaaaattcatcatctggaattagcttaccgaaaggagatg

SEQ ID NO: 530485 - DNA, 90 bp, Homo sapiens
aggaagagtgtatgtgatcatcgatctctcagggtcgtcgggtgaagatgatagtatttctgctgcaagtacttctgatgttcaagatcg

SEQ ID NO: 530486 - DNA, 96 bp, Homo sapiens
ctggcctggcgtgcactccgcacctcggggacattattgcgcgtggaacggctgcttttggaaggagagctggaggtgtttcagaaagatggggaa

SEQ ID NO: 530487 - DNA, 76 bp, Homo sapiens
ttgaagacccagaagatgacatatgcaaggagtgaactactttatgtccaagggtatcctggatgattcgccaaag

SEQ ID NO: 530488 - DNA, 96 bp, Homo sapiens
gcagcttcaagcttaggaccacccaccatgcctatccaggaggaggaagccaagaatctggtgagcgaagccatcgcagctggcatcttcaacgac

SEQ ID NO: 530489 - DNA, 97 bp, Homo sapiens
gcagacatcaccgacttgttaaaagaagggctccaaacgaatcctgcggtcccatgagattgtgctgccccccagtggacaagtggagacagacctg

SEQ ID NO: 530490 - DNA, 116 bp, Homo sapiens
tgcggacagtatgaggcaagcgcagggggacggggaccagcagctgtcgccgccgctctcagacctgtggatgaagagccagagtcctctgaggtcgatgctgctggtcggtggcc

SEQ ID NO: 530491 - DNA, 75 bp, Homo sapiens
ccgcaacaggcgttttgcaatgcagatgtaggtatcatgatattagctggtttgacatcaagtcatttgtgagtc

SEQ ID NO: 530492 - DNA, 82 bp, Homo sapiens
agtacagcttatggtgtcactggcccagctcatcagtgtggtactgaacgacacctgggtctccttcccttcctggtctgag

SEQ ID NO: 530493 - DNA, 75 bp, Homo sapiens
gaaaaactggctgttctcaaagcttgggcagaggatatacgtggcatttcaagtgatcagttgcatagagtacta

SEQ ID NO: 530494 - DNA, 83 bp, Homo sapiens
gaggcacgagagcatcccacggtggtacccagtagcacaagcgggagatttacgaccgctatggccgggaagggctgacaggg

SEQ ID NO: 530495 - DNA, 74 bp, Homo sapiens
agcgtccggagctagctggatcctctaggcaggcctggcagctgcgattcagccacctcgtggggtatggtgct

SEQ ID NO: 530496 - DNA, 80 bp, Homo sapiens
gctgtggtccagcctgcgcggcgggaagcggcggcggcggctccagcgtcctaagaggctgaccccgcactacatctacc

SEQ ID NO: 530497 - DNA, 75 bp, Homo sapiens
aaatgatcaactattgaccatataggccaggagtggtggctcacacctgtaatcccagctctgggaggccaaggc

SEQ ID NO: 530498 - DNA, 71 bp, Homo sapiens
ggcctgattgaggactgccagctggcgctgcagatcaccgaagtggccttggagtacaacaactgtcatgg

SEQ ID NO: 530499 - DNA, 75 bp, Homo sapiens
agcaaacacacctgtctacgctacagaattaaacaaccaccatgtcgagcaaaaaggcaaagaccaagaccacca

SEQ ID NO: 530500 - DNA, 97 bp, Homo sapiens
agagcaccaagactcacagcattctttcttggcatttttgaatacgcctaccgatgctctggatcaatttgaattcagacttggttccttcaaccta

SEQ ID NO: 530501 - DNA, 50 bp, Homo sapiens
gcccctcctgaaagctgtcacccacaaggctttatcagacctaaacaagg

SEQ ID NO: 530502 - DNA, 50 bp, Homo sapiens
caaattgaaaacatctcccaatgaaggtgcagattcactttataggaaca

SEQ ID NO: 530503 - DNA, 99 bp, Homo sapiens
ctgggggttcgcgcccgccgacccgcgccctgctccctctcagcacctgggcggacgagagaagaagaaggaggttcctgctgtgccagaaacccttaa

SEQ ID NO: 530504 - DNA, 100 bp, Homo sapiens
gcggcgaagccctggactaaggagctgaagtttctctttggctcatcagccacccaggccttggacctagttgatcgacagtccatcaccttaatctcat

SEQ ID NO: 530505 - DNA, 100 bp, Homo sapiens
accaggactccaaaatggcgtcagttgatccacagaccagcatggctgccactgctgctgtgagtcccagtgactacctgcagcctgccgcctccaccac

SEQ ID NO: 530506 - DNA, 98 bp, Homo sapiens
tgaaacttcagtatgcagtccctatcatcagccagcagggggaggttatcaatactctggctgaccatcatcatcgtgggactgactttggtggaagt

SEQ ID NO: 530507 - DNA, 100 bp, Homo sapiens
acaaagttctctcgatcagggcatacatctttcttcgacaaaggggttgtgagtcccggcccagcccctccacccccctgcccccccgatgcgaccatgg

SEQ ID NO: 530508 - DNA, 83 bp, Homo sapiens
ccagaggtggaagtccaagtcaaacgcagaaggactgcctcactgagcaaccaagacaatggctgccatccggaagaaactgg

SEQ ID NO: 530509 - DNA, 50 bp, Homo sapiens
ctcgtactcgtgcgcctcgcttcgtttttccagaaaggaggagtcaagga

SEQ ID NO: 530510 - DNA, 83 bp, Homo sapiens
atggacctgtacagcatcaactacctgcactttggggagcctaagtcctgcctacagacctggtacctggatttttgcccgag

SEQ ID NO: 530511 - DNA, 74 bp, Homo sapiens
taaagctgagctgcgaggaaaatggcggcgggagggacccagacatggagctgcgggaagaagcctggtctccg

SEQ ID NO: 530512 - DNA, 100 bp, Homo sapiens
tcatatttggcttcaatgtcatattttggatgccttcaattaagttgcagagttctgatggagagatatttgaagttgatgtggaaattgccaaacaatc

SEQ ID NO: 530513 - DNA, 50 bp, Homo sapiens
cccaggaatacagctttgcattagcaatggctgccatccggaagaaactg

SEQ ID NO: 530514 - DNA, 100 bp, Homo sapiens
gttggtccaagggaactgggtggtgaagagttggaaaatggatataccttatttgattatgatgttggactgaatgatataattcagctgctagttcgcc

SEQ ID NO: 530515 - DNA, 96 bp, Homo sapiens
cggaagctggaccagaccattgctcgcaagcggatggagatccaggaggccatcaaaaagcctctgacattggctggggaacagaccagggaattg

SEQ ID NO: 530516 - DNA, 75 bp, Homo sapiens
caagatggtgcagaagaagaacgcggcttctcgtcagtgcctcgcaggatggtaaacttatcatctgggacagct

SEQ ID NO: 530517 - DNA, 97 bp, Homo sapiens
tttttgatgagagatcacatccacttacatgtgcaacgttctgactacttgaatacatttgagttcatggataaacttggagaaaacttgaagatca

SEQ ID NO: 530518 - DNA, 50 bp, Homo sapiens
ccaacacagatgtccaagctgccaagaaagaccacagcaagattctttca

SEQ ID NO: 530519 - DNA, 83 bp, Homo sapiens
ccggaagaaaagggaggagaagtttacatgtatgctagcctcaattttggcagtaagacacagcaaacatttggtagtcaaac

SEQ ID NO: 530520 - DNA, 51 bp, Homo sapiens
cgcaatgaagaagctaccaagcacctagagtgcccttccagctgtcactga

SEQ ID NO: 530521 - DNA, 87 bp, Homo sapiens
ccggggcccccgtcgttgctgccgggattttggaggccggggccgcgctgagggcgcccagctggactgggcgttcatcaacaccaa

SEQ ID NO: 530522 - DNA, 75 bp, Homo sapiens
cgtgaatggtgtctggaggagtgagagccggcagttatttacagagtatggaagacttgcgatggaagaaatcta

SEQ ID NO: 530523 - DNA, 100 bp, Homo sapiens
cgccgcggcactgatccccacaggtgtcatggagaaactccagctgggcccagagattctgcagcgggaaaatccaaggcttatttatgccaggctgagt

SEQ ID NO: 530524 - DNA, 90 bp, Homo sapiens
gggagccggtctatggactttccgaagacgaggtagttccaatttgccagcagaatgagtacagaaagagactcagaaacgacatttgac

SEQ ID NO: 530525 - DNA, 74 bp, Homo sapiens
cgaagagctgccgcgacgcccggcccgcagggcaggtggagatgctagaacgaaagtatggggggcgcctggta

SEQ ID NO: 530526 - DNA, 80 bp, Homo sapiens
caaccagcagcagccatcatggaggacacattcagctaacgtattttagcaggtggagtgaggttgaagattcctgtgac

SEQ ID NO: 530527 - DNA, 74 bp, Homo sapiens
ttacaacattaatcagatactgcatttaaggcatgttatttgaaagcaattgagacgcaaccgaactttgcagt

SEQ ID NO: 530528 - DNA, 75 bp, Homo sapiens
gcctggctctcggcggcctgatggagtaagaggggttggctgtgaatggagttctgggaaatcgttcattcattt

SEQ ID NO: 530529 - DNA, 105 bp, Homo sapiens
gtcctttcacaaaactgttcctgtgaaagcatttcctgcttttcttcagacgggcaccccggctctgccccagactggcataccaacagaggctttggtgaaggg

SEQ ID NO: 530530 - DNA, 99 bp, Homo sapiens
gccatgggaaaccgggtctgctgcggaggaagctgaaattggcgtgttagccaaggctttcattgaccaagggaaactcatcccagatgatgtcatgac

SEQ ID NO: 530531 - DNA, 75 bp, Homo sapiens
accagatcaacgtcctccgggaccggagtcagaaccctccgcagagtaaagcttcagtatcagacacagcacagc

SEQ ID NO: 530532 - DNA, 99 bp, Homo sapiens
gttcccgggattggaccgacgcagccatggatccagccgcagaagccaggatgaaggtagcctgcatcacagagcaggtcttgaccctggtcaacaaga

SEQ ID NO: 530533 - DNA, 99 bp, Homo sapiens
ctgctgatgagatttatgactgcaaggtggagcactggggcctggaccagcctcttctgaaacactggggctttcttcgagagtcacccagctccttca

SEQ ID NO: 530534 - DNA, 98 bp, Homo sapiens
cttactacaacctctgcctcctggattcaggacaggaagatgtcacccaagcgcatagctaaaagaaggtcccccccagcagatgccatccccaaaag

SEQ ID NO: 530535 - DNA, 100 bp, Homo sapiens
aatgcctggaaagtatacaatgagtgcgtgagcatctgctccctggccttcagcatggacggcatgttcctctccgcctccagcaacactgagaccgtgc

SEQ ID NO: 530536 - DNA, 73 bp, Homo sapiens
ctcgcgctgcactgtctctccgacgcaagactgtcccggcccggacatttctcttgggaagttgtgcatctga

SEQ ID NO: 530537 - DNA, 74 bp, Homo sapiens
gccagaggtcaacaaggttctggacaagatgaagtctttctgccaggcatccgaggcatctctgaggagaccac

SEQ ID NO: 530538 - DNA, 82 bp, Homo sapiens
agcacctgtcctcgccagcgcccagctggaagctgagaaaccaaggtgtatgttggtaacctgggaactggcgctggcaaag

SEQ ID NO: 530539 - DNA, 100 bp, Homo sapiens
atcctcggcggcggtggccgctagctccaaggaagggatacccacccaccatcccagggtctacaacatccacagccggaccgtcacccgctatcctgcc

SEQ ID NO: 530540 - DNA, 75 bp, Homo sapiens
cggggccagaggctcagcggctcccaggtgcgggagagagcaaatacttccctggacaagaaagccagatgaaac

SEQ ID NO: 530541 - DNA, 90 bp, Homo sapiens
tgcgactcgcggaccggcgtccccggcgcgaagaggctggactcggattcgttgcctgagatcaagcactgcgcctagcagaaattttac

SEQ ID NO: 530542 - DNA, 97 bp, Homo sapiens
tgcgtttattgcgcaggccttgtgcctccaaggaaaatccacctcgcagcttgtaaatctacagggctttaaacacgaagacctgatttgtttgtgt

SEQ ID NO: 530543 - DNA, 99 bp, Homo sapiens
cctgctacaccagcctcccaagcctcccagtgcaccttctaggagacaagcaagaacaatgctaaagtagctgtgctaggggcctctggaggcatcggg

SEQ ID NO: 530544 - DNA, 75 bp, Homo sapiens
ctgcgtatccgcactgtccagcccaagcctgactatgaagatgcagatgcctccagctattacgagtcccatggc

SEQ ID NO: 530545 - DNA, 87 bp, Homo sapiens
ccaggcgaagctggccgagcaggctgagcgatacgacgacttcccaagtaagaagcggaagaggagccgctggaaccaagacacaat

SEQ ID NO: 530546 - DNA, 90 bp, Homo sapiens
atagagcagagtggaccaccccatgaacctcgctggcaatcctttggtccagcaaggtggacagccactcatcctgacccagaatccagc

SEQ ID NO: 530547 - DNA, 90 bp, Homo sapiens
gggaaattggggtgccaccagacggagacagcttggactaccaggagaaaatatggagaagtcttgtgcaagcaaggaagaagtcaaaga

SEQ ID NO: 530548 - DNA, 80 bp, Homo sapiens
gtagaggacgtgttagacaagttcatgagtttgcagaaaaaacttcagcatgtgccaggaacacaacctcaccttgatca

SEQ ID NO: 530549 - DNA, 74 bp, Homo sapiens
caaacccaagttggttggagatgtggattttgaagatatgattctataacagactcttccagaaatgatatgaa

SEQ ID NO: 530550 - DNA, 90 bp, Homo sapiens
gagcagcagcaggcctatcgtccagaaatgattctggggaccattctgaccacatgcattactatcaggtaggctgtaacaggtggggag

SEQ ID NO: 530551 - DNA, 83 bp, Homo sapiens
attttatccaccggcactgccaagatcaggattctgaaaccttccttgtatccctcctgagacatctttgctgcaagatcgag

SEQ ID NO: 530552 - DNA, 98 bp, Homo sapiens
cgccgccaacgcgcaggtgctagcggccccttcgccctgcagggttatatcctgtgttgtgacctcatggtttaagtgggaataaagatgagtataag

SEQ ID NO: 530553 - DNA, 74 bp, Homo sapiens
cacagactcacttgtcactcactgccatagagtacagccacagccacgacagctctggattaatcgaattacag

SEQ ID NO: 530554 - DNA, 75 bp, Homo sapiens
accggcgcctcggacaccttcgagggttgggccaatggccatgtgtctcaggatcaagaggaacccgtctacctg

SEQ ID NO: 530555 - DNA, 100 bp, Homo sapiens
cctggccaattctgacgccctcaaggtcgccaaggaggtggacccccaggcgtcactggtgtaccgcctgccccagtcgtgggtggggcccaaactgccc

SEQ ID NO: 530556 - DNA, 75 bp, Homo sapiens
cacggattctgtgtagaaatccacggtgaagcatatatgcgtttaagcaaactccccgaagcagagcattggtat

SEQ ID NO: 530557 - DNA, 83 bp, Homo sapiens
cctatcaaattccttattcgacaggctcaagggctgcagcaggagttgggaggctgacttgacaggaattaagtggaaaaaat

SEQ ID NO: 530558 - DNA, 102 bp, Homo sapiens
gatgatgaggagcaagaggaccctgcggactactgcaaagcttactgcagagtgggtctgggcatctgctacgacatgcggtttgcagagcttgcacaaatc

SEQ ID NO: 530559 - DNA, 100 bp, Homo sapiens
gcgcctgctgctcccgggcagtgctttccccaagtagtccgatggctgcggctgcgccgaggcgccctactcagacggcagaatgcctccaaaggtgact

SEQ ID NO: 530560 - DNA, 75 bp, Homo sapiens
tgcaatgtttagccaacccaaattaccttaattgactgttatgaacactatccaacaattaatgatgattttaaa

SEQ ID NO: 530561 - DNA, 51 bp, Homo sapiens
ctccacctggctgaaactcaataagaaggaccacatggtgacaatgcatga

SEQ ID NO: 530562 - DNA, 90 bp, Homo sapiens
gtattctggccgataaatccctggctactagaactgaccaggtaagaagcgcaattccacactctacataaccatgttactcattgttcc

SEQ ID NO: 530563 - DNA, 75 bp, Homo sapiens
ccgggacatctgaaagccaggaaatggcctgtctccactaactctggaccctaaaacagctcacccaaatctggt

SEQ ID NO: 530564 - DNA, 73 bp, Homo sapiens
acctgcagaaggtctctggagacatcttcagcagggtttagatgtagattctctggtcattgagcatatccaa

SEQ ID NO: 530565 - DNA, 98 bp, Homo sapiens
gttcagactcagcttgtctggtattggtcggtggataattactgtaccttcctcatggaaaaagttttatttaaagtgttatttctcattgaatacta

SEQ ID NO: 530566 - DNA, 83 bp, Homo sapiens
tctggctccttcggggacatctatttggcgatcaacatcaccaacggcgaggcatgccagatttcctggagaagctgcacatg

SEQ ID NO: 530567 - DNA, 51 bp, Homo sapiens
tgcccttatggaattggacaaagacctctgtgagtgaaagccttcagaggg

SEQ ID NO: 530568 - DNA, 51 bp, Homo sapiens
ctggcaagaagcgtgcggggaccgatggtatgctgtctggctagtcctctg

SEQ ID NO: 530569 - DNA, 89 bp, Homo sapiens
gctgtacctggaggaaggaagtgcggagccagcctgagttgggagaagagctccagagagaaactactttgcttcgcactttttcatgg

SEQ ID NO: 530570 - DNA, 83 bp, Homo sapiens
ccaagcgcctctactacctctggatgtctgcctgtgtcagggaatctgcttgatgtgtacagtagtcaaggcgtggccacacc

SEQ ID NO: 530571 - DNA, 80 bp, Homo sapiens
attttagaggcatctgttctatcttcccatcataaaaaaaatgtttctccatcccagagagatgaagtaattcaatggct

SEQ ID NO: 530572 - DNA, 100 bp, Homo sapiens
cgaaaagaaaagctgtggaaaccgaaatgagactccatcggacccagtcataattgacagggtcagtttgaaaaggaggatcgagctcactgtggagtat

SEQ ID NO: 530573 - DNA, 75 bp, Homo sapiens
ctgctacctcgcccgggggcatcaggtttttctcccgctccagaaaaaatcctcagacagattctaagcctcctg

SEQ ID NO: 530574 - DNA, 80 bp, Homo sapiens
ccatctttcagcagttggcacacatggttaaggaacaggaggaaaccattcagaggaaatggaagttccagtattaccga

SEQ ID NO: 530575 - DNA, 100 bp, Homo sapiens
ctcggattaaacgccggagagagcgtgaatttgcctcggggacgcctctccaggatcaacactctgtggtaggccagaacacaggccccagtccaagtcc

SEQ ID NO: 530576 - DNA, 74 bp, Homo sapiens
cgccctggacatcaagattaaaagagcgaataaagtttatcacgccggggggcactatgaacgaagaggagcag

SEQ ID NO: 530577 - DNA, 98 bp, Homo sapiens
cgcggggcagccaggagccggggcccgagccccgcccggcccgggccatgtcggtgggcgagctctacagccagcctctgaagagccaatccattcag

SEQ ID NO: 530578 - DNA, 82 bp, Homo sapiens
aaacgggtcgcccgcgattctcagggattgatcgcctcttcaggtactccaaagattcaggtttactcacgtcatccagcag

SEQ ID NO: 530579 - DNA, 87 bp, Homo sapiens
tatcaggacatggagtatgaaagacggaattgtcttagaagaaagaaggcaagccaccattttacccacgtaaatatatgaatatat

SEQ ID NO: 530580 - DNA, 100 bp, Homo sapiens
aataaagctgttttggaactgtcaggtacctcaaagcgtgtcacgtcttgaaattttaaatgtcctcagtgactctctacctctggcagatgatgttgac

SEQ ID NO: 530581 - DNA, 98 bp, Homo sapiens
gccacgtgcagacatctacaaccttcgatctcctgacgaatgtcggtgcagatctcttgtccatgtgccagcgaaacattgccctcaacagccacctg

SEQ ID NO: 530582 - DNA, 88 bp, Homo sapiens
acgtctgctcactggagatgacacgtgcgtggggtgttgggacctggaggaacttgctttgtaccagatccagctgctgaaggacctc

SEQ ID NO: 530583 - DNA, 90 bp, Homo sapiens
cgggacaagaaaattcatgcggaacaagagtttgttcagaaacaacagcaagaattagatggctctctgaaaaagatcatccagcagcag

SEQ ID NO: 530584 - DNA, 75 bp, Homo sapiens
gccaagtatccgccagtcaataggaagtacgagtgtgacttcagctttagctgcagctgcctctgttcagccact

SEQ ID NO: 530585 - DNA, 51 bp, Homo sapiens
gggaacgcagctgaaagcgtgaactgtagtccctgtgaagcaggaagagtg

SEQ ID NO: 530586 - DNA, 98 bp, Homo sapiens
gcctccattcccgggaggggggagcggcgttggaggccaccgtttccagcaatggctgccatccggaagaaactggtgattgttggtgatggagcctg

SEQ ID NO: 530587 - DNA, 98 bp, Homo sapiens
cccaactgcgcccggtgcggcaagatcgtgtatcccacggagaaggtgaactgtctggataagctggccactgccccaacccaggcatttcactgggc

SEQ ID NO: 530588 - DNA, 90 bp, Homo sapiens
ccctgaagaccctccagcagcagaccttcaagatagacattgaccccgaggagacggatgagaacaagttgagcagtgccaacggccatg

SEQ ID NO: 530589 - DNA, 75 bp, Homo sapiens
ccttagcccttctagtagctgggactacagggcgcgtaccaccacacccaggtacccactgatggtaatgctggc

SEQ ID NO: 530590 - DNA, 82 bp, Homo sapiens
ccgcccgcgccgtgctggactccaccaacgccgacggtatcagcgccctgcaccagctacgagttccagggagctctgtcct

SEQ ID NO: 530591 - DNA, 96 bp, Homo sapiens
agtgaggaggcgtcttcctttgcatgtcagactgtgccctgtccacggtgcctcctgcatgtcctgctgccctgagctgtcccgagctaggtgaca

SEQ ID NO: 530592 - DNA, 51 bp, Homo sapiens
tactggcctgctgctggcccgcagggaaagaaggcgtcggtggattttaca

SEQ ID NO: 530593 - DNA, 75 bp, Homo sapiens
tcatctccctgctggaggtcctctcgggggacagcctgagctagagccggtgcaggccacgcagaacaagacagg

SEQ ID NO: 530594 - DNA, 100 bp, Homo sapiens
ctgtggaaagaagttgcaaaacactgggtctgaaggggcgtctcgattacctgagctctctgaaggtgaagggccttgtgctgggtccaattcacaagaa

SEQ ID NO: 530595 - DNA, 98 bp, Homo sapiens
tgggggcaagtccatctatgggaagaagttcgatgatgaaaactttatcctcaagcatacgggaccaggtgattgcatactcggaacatcgttaccgt

SEQ ID NO: 530596 - DNA, 75 bp, Homo sapiens
gccagggtccctgaagagggaagacacgcggaaacagatggtggatgcttccaaaagcatcgaagctgtccatga

SEQ ID NO: 530597 - DNA, 100 bp, Homo sapiens
gtatgcggtgcccacatgccactgggtcctcagcagtaccacctggaggagatgttaaagtaacccatcttgcaggacgacattgaagattggtcttctg

SEQ ID NO: 530598 - DNA, 100 bp, Homo sapiens
aatacttcatatttggcttcaatgtcatattttggatgttaaggacatgttcacttccagatctctcaaagctgttcagaacccttatggatgttcccac

SEQ ID NO: 530599 - DNA, 75 bp, Homo sapiens
cgccgccactgccgcaggaggcgtgaggcaggtaaaaatcaaggtgaccccaagaaaatggctcctcctccaaag

SEQ ID NO: 530600 - DNA, 82 bp, Homo sapiens
caagtatgtcagtgaggagacttgtcacatgcatcaggaccagagactcaatgatgaggcacggcggctcattgctgatttg

SEQ ID NO: 530601 - DNA, 100 bp, Homo sapiens
tatagctgccctcagctgcactgtggcaaggcttttgcttccaaatacaagctgtatagggtcctgatgaagaagctgttgtggatcttggcaaaactag

SEQ ID NO: 530602 - DNA, 98 bp, Homo sapiens
tccactctcgattgtcatgtgaagactcacacaggagaggcagatgcgaaccagaacaatgggacctcctctcaggacacagcggtgactgactccaa

SEQ ID NO: 530603 - DNA, 97 bp, Homo sapiens
gcagaatttgtatagagatgtgatgttggagaactacagaaacctggtctccctagatgagagtccggagtgttgtcatgtgaagcctgccatccag

SEQ ID NO: 530604 - DNA, 98 bp, Homo sapiens
cgggcctgaggcgaaggagcggccgggagcccgccgcgctggtagcggttcgagaacttgtcttggacaattgcaaatcaaatgatggaaaaattgag

SEQ ID NO: 530605 - DNA, 100 bp, Homo sapiens
aagaaccttgacaagctcatccggctggtaaatgcgcagaattctcttctggcctgtgagtttctcctccagaacggggcgaacgtgaaccaagcggaca

SEQ ID NO: 530606 - DNA, 130 bp, Homo sapiens
tgaatggattcccagtcaagaaatgctcagccttccaattttttaagaagcgggaaaaccagtagattcccagacatcgcgaagtgaatctgaaattgtgccaaaagttgctaaaatgactgtatctgga

SEQ ID NO: 530607 - DNA, 100 bp, Homo sapiens
ttaagcactgctgcactttatgagctgttcatagtttcaagttgagtcgaaaccatgtggactggcacagtgtggatgaagtatatctttatagtgatgc

SEQ ID NO: 530608 - DNA, 96 bp, Homo sapiens
agggagccttagctgaaaggcagcagctcatcccagaattggtgcgaaatggagatgaggagaatcccctcaaactttctccatctctggtgaaag

SEQ ID NO: 530609 - DNA, 98 bp, Homo sapiens
gaaggccgggccccgcgagtgccatggcggccgccctgggagcgagcggaggagcaggcgccggagttccatggaaaatgggagaccacctgatcctg

SEQ ID NO: 530610 - DNA, 100 bp, Homo sapiens
cgaacttagacttccggaaggactttggcgaggaggtcggatccgcagctgcttgcccggttctactatgccgacgaggagctgaaccaggtggccgcgg

SEQ ID NO: 530611 - DNA, 80 bp, Homo sapiens
atgcagaaaaaagatcacaagcaactctggatgggattgcaaaatgcactgaacctaccagatgtatttgggttggtcgt

SEQ ID NO: 530612 - DNA, 100 bp, Homo sapiens
gacatcgaaaacccggacctcgcttacctgcatgctggccagacgggtgcagggaacaactgggcgaaagggcactacacggagggcgcggagctggtgg

SEQ ID NO: 530613 - DNA, 82 bp, Homo sapiens
ctccacctcgactgcgaattactgtttatgaggttcgtgctggccgtgggcagcgccgtctttgatgccatgttcaacgggg

SEQ ID NO: 530614 - DNA, 75 bp, Homo sapiens
gagctggacgagctgatggcttcgctgtcggatttcaaggcgctgcaccagctctactatgatcccaacattgag

SEQ ID NO: 530615 - DNA, 75 bp, Homo sapiens
cgcaagcccagacaatgccggtggaggaatttgtggctggctggatctctgtactgaccaagtgccaggaagagg

SEQ ID NO: 530616 - DNA, 85 bp, Homo sapiens
acagtgagctgttcgagctggattattgcctcaaagagttttgctgctaatgggattcaagcgcatccagaaagtagtactggat

SEQ ID NO: 530617 - DNA, 51 bp, Homo sapiens
ggattttcaaatccatgttgaaaaaggcaaatttctggagatgtgcaatga

SEQ ID NO: 530618 - DNA, 100 bp, Homo sapiens
aggctgatgggaaggagcacccaggagctgaagtccctcaacaccttacactaagtcaaagcgtggccacagagaagaggagcaagaagacctgacaaag

SEQ ID NO: 530619 - DNA, 75 bp, Homo sapiens
aattgtacatttgcccattctcaggaagagcttgaaaatgcaaggatgatgctgaaaggaataacaaggcttatc

SEQ ID NO: 530620 - DNA, 100 bp, Homo sapiens
aaggcaatgatttataccatgaaatgattgaatctggtgttatcaacttaaaagatgccacctctaagaattggcagagggggtcgatttgggaggaaag

SEQ ID NO: 530621 - DNA, 100 bp, Homo sapiens
cgtagagggagctgtcgtcgccctggaagacgatcccgagttcaacgcagagcattcaccgctgacccctcaccgtcgggacctctgtagccgctctatc

SEQ ID NO: 530622 - DNA, 100 bp, Homo sapiens
ggcgacgtggtttcagatacgaaaaggactattgctgggaatattttctgtcttcaaacacactgcagaatgcgctgcagttcattaaacaatattggaa

SEQ ID NO: 530623 - DNA, 90 bp, Homo sapiens
ggaaaaacccacaaacatgttcacaacgggcatggtactccaaagattcaggtttactcacgtcatccagcagagaatggaaagtcaaat

SEQ ID NO: 530624 - DNA, 76 bp, Homo sapiens
ggaggagccatggactgcagcctcgtgcggacgctcgtgcacagatacatgttcctcctgctgatcaagagaagct

SEQ ID NO: 530625 - DNA, 154 bp, Homo sapiens
ctgctgggctccggggacactttgcgttcgggctgggagcgtgctttccacgacggtgacacgcttccctggattggccctgagagcagatggctttggagacaatcctttctatcactgtttggtagcagagattcttccagcgcccgggaag

SEQ ID NO: 530626 - DNA, 96 bp, Homo sapiens
cgggtggcggctcgggacggaggacgcgctagtgtgacagagttagtccttgataattgcctgtgtgtcaatggggaaattgaaggcctgaatgat

SEQ ID NO: 530627 - DNA, 99 bp, Homo sapiens
aggacaccggccccgagcaggtcacgaggacggagggccatgtgttgggtcagcaccatcagacatgcaagaaagcacttcagccaagcagaagggagc

SEQ ID NO: 530628 - DNA, 99 bp, Homo sapiens
agctttgtatgaacaaaaccagtctgatgtcgcctgggccatgttcctggaccggccccagcagtggctccagctcgtcctcctccccccggccctgtt

SEQ ID NO: 530629 - DNA, 98 bp, Homo sapiens
gcagcctcttctacctgcacaacgaactgggcaacatctacacgcacgacacatctgaccttcgggaaggagttcacagaagcggtggaagccaaaca

SEQ ID NO: 530630 - DNA, 83 bp, Homo sapiens
acttttcttatcagcatttatcaagtcttacaggagcatcagcacagtgttgacctaaccaatgaagaaacaactgattccac

SEQ ID NO: 530631 - DNA, 75 bp, Homo sapiens
aaacgatattatagtgatcctcgatttctcaatctctggcttaaattaacaaactttccagaaatgatgaataga

SEQ ID NO: 530632 - DNA, 76 bp, Homo sapiens
aggaaaagataactttcgacacacctgtagacgttcgccaggtaaagggaggacatgtatgcccaggactctatag

SEQ ID NO: 530633 - DNA, 82 bp, Homo sapiens
ccaacagtgtaccagcagggcgttggctatgtgcccatcacagttggaatcgaagcctcttaaaatggcagatgacttggac

SEQ ID NO: 530634 - DNA, 83 bp, Homo sapiens
cgcgcggcaggcggcgagctcgggggccgcaggtttggtgcacctcgatttggaggaagtagggcagggcccttatctggaaa

SEQ ID NO: 530635 - DNA, 74 bp, Homo sapiens
ccacatcgccttttgccacctttccctttatttccggaggggtattccctcagcggatactacacccatccatt

SEQ ID NO: 530636 - DNA, 100 bp, Homo sapiens
ctttcttccagcttctgctgtccttctttgtggagagcaagaattccgttgatgcagcaaagccgctgctgcggaaggcgatccagatctcacagcagac

SEQ ID NO: 530637 - DNA, 98 bp, Homo sapiens
aaagagcttgctccctacgatgagaactggttctacacgcgagctggccgcctgatcttcgacaacctaaagaagtccattgcctacaccctgaccag

SEQ ID NO: 530638 - DNA, 101 bp, Homo sapiens
ttcctgctcctgctcccgccgctccccgtcctgctcgcggacccaggggcgcccacgccaggtactccaaagattcaggtttactcacgtcatccagcaga

SEQ ID NO: 530639 - DNA, 101 bp, Homo sapiens
ccttgcgcagtgtgagaactgggagagagactcctggcccttccacttcctgtgcttccttgggtaagaatgattgatgttggctgatattggagtgctca

SEQ ID NO: 530640 - DNA, 75 bp, Homo sapiens
tcgtcatggggctgtttggaaagacccaggagaagccgcccaaagaactggtcccaaaccagttgtcttcctgca

SEQ ID NO: 530641 - DNA, 82 bp, Homo sapiens
ccctgcacctgcctcttcccccattctcaatgaccaggataaaaaggtggaaactctcatggtaccatcaaaaaggcaagaa

SEQ ID NO: 530642 - DNA, 82 bp, Homo sapiens
gggcaagtcccgcggctacggcttcaggcagaagaggcctggaccttggcgcacacagacccaggaacagatgagcagggat

SEQ ID NO: 530643 - DNA, 75 bp, Homo sapiens
ccggaatcccgcgcgctgcccacgattcgcttctgaggaatagcacatttcaaacctacaagaaagaagtgtgcc

SEQ ID NO: 530644 - DNA, 100 bp, Homo sapiens
ctcgctgttcgcggtgacggtggcgccgcccggggcgaggcagggccagcagcaggcgggagggatacccacccaccatcccagggtctacaacatccac

SEQ ID NO: 530645 - DNA, 82 bp, Homo sapiens
gccggactacaaggtcgcctacgtgcagctgtaagactttgaccccgacgcaggcttcagtgattgccgcggatcagaagcc

SEQ ID NO: 530646 - DNA, 100 bp, Homo sapiens
tattctaaataatttagatttggaagacatcaatgccttagattttagtgatgatgaaaaagagaaggaagccaaacagaggaaaaaatctcagattcaa

SEQ ID NO: 530647 - DNA, 51 bp, Homo sapiens
cgccaggctctctggaggccaggagatgaagctgcacacatacatgtaaga

SEQ ID NO: 530648 - DNA, 100 bp, Homo sapiens
tggccacatatatgcgaatctataagaaaggtgatattgtagacatcaagctaaagccaattcaaatactttcaaatccactgtctacatacaatcagca

SEQ ID NO: 530649 - DNA, 98 bp, Homo sapiens
gcggcggcggcggcggctgcggcccaatatagccacatgaaatgaagatcacctctgcctatctacaggacattgagaatgcctataagaaaaccttt

SEQ ID NO: 530650 - DNA, 100 bp, Homo sapiens
ctggcaaccgccccgtctgagaaagaaatcacagtgtcccaagcccaaggcggcacggagtggcccctggaaggacagcgcctacaggcagtgtctgtac

SEQ ID NO: 530651 - DNA, 82 bp, Homo sapiens
ctgtcgcggttgccaagcgctcggcgcttggcgctggcgctggccaaggcgaactccatccggcacaacctgtcactgcata

SEQ ID NO: 530652 - DNA, 75 bp, Homo sapiens
gaagtgcttcagatttaaatattgggacccctgattttagcaggatggcccaatggaatcagctacagcagcttg

SEQ ID NO: 530653 - DNA, 100 bp, Homo sapiens
gccggattacctcggtgccgatcagcggaagaccaaagaggatgagaaggacgacaagcccatccgagctgtgttggtgcaggactttcacatgtctttg

SEQ ID NO: 530654 - DNA, 78 bp, Homo sapiens
gcgcctctcgatgggcagctcgcacttgctcaacaagggcctgccgcttgtgtggacgaatgtggaacctcgctctgt

SEQ ID NO: 530655 - DNA, 115 bp, Homo sapiens
atggattcgggatgctctgagacccccattacaaaatataaactctgttcaggattttatgcgacaagcaggtgaagtaacctatgcggatgcccacaaggaacgaacaaatgag

SEQ ID NO: 530656 - DNA, 96 bp, Homo sapiens
gccaacgcacctacgctgttgttattcatttcctgcttttcacagaaaacaattttgttgcatggaagatcggtaaattcaactggaagggaacta

SEQ ID NO: 530657 - DNA, 122 bp, Homo sapiens
ccgggctgtggtcactaatgtacaggcagaaaacgagaggctcaccgcagtcgtgcaggatctgaaggagatgaagactggcccatttgcagagcactccaaccagctgtggaacatcagcg

SEQ ID NO: 530658 - DNA, 108 bp, Homo sapiens
ctactggcccctgatccggttcttggtgcccctgggcatcaccaacatagccatcgacttcggggagcagagctcccaagatggtggcaagccttttgttctctgacc

SEQ ID NO: 530659 - DNA, 100 bp, Homo sapiens
taccactatatcagataagcttgacattacagccaagatggtgctgtcccagagacaacgagatgaactgaacctagaaagattgtacaatgaatggtga

SEQ ID NO: 530660 - DNA, 75 bp, Homo sapiens
ccggccctcaccgccctcaccacccctatccagacggctgcccttcaagtaccacaaacggggattcagcgtccg

SEQ ID NO: 530661 - DNA, 100 bp, Homo sapiens
ttctgcttcttgcagtgtaccagcgcatacccgctccagcctgaggacgtcaacctgcgggtcatctcggcatgttatgttacccagagaactttccaaa

SEQ ID NO: 530662 - DNA, 100 bp, Homo sapiens
aaagctttgccagtgcacgtccatacttaactactgaatgtgaagatgtcctcttagtgcttggcagattagtactacacgttggtcgtcattgcctccg

SEQ ID NO: 530663 - DNA, 88 bp, Homo sapiens
ggtggtgcctccggactgcacttgcgaagggagcttggggaggaaattgctggactcgctgaagagagactacgcaggaaagccccag

SEQ ID NO: 530664 - DNA, 74 bp, Homo sapiens
tcctcgtcagcactgactttcagctatggaatcgacgccatccccatgatgctggcatgtgaagaccggccagt

SEQ ID NO: 530665 - DNA, 82 bp, Homo sapiens
cgctgttcagagctgtgactgcgaccctacagcttggggcctgggctcctctgaccatcctcattgagaaaggaaagtgagt

SEQ ID NO: 530666 - DNA, 88 bp, Homo sapiens
aaaatgtcaacaaattgatggttgccaaagctctgcaggaatttgacttggccttaagaggaaagaagaaaaggaagaagtttatgaa

SEQ ID NO: 530667 - DNA, 97 bp, Homo sapiens
aagaggtcccaatcccccactctttccgccctaatggaggtctccagtttcgggcagggtgccatttgccgtgcctgacaaagtgctgtggccacag

SEQ ID NO: 530668 - DNA, 87 bp, Homo sapiens
gcaataaaccaagcactctagatgccctcaactatgctctccgctgtgtccacagcgttcaaggtggaggcctgaattttgatctat

SEQ ID NO: 530669 - DNA, 60 bp, Homo sapiens
gaggaaccacacgctgatcatgctctcgaggctcctcccgctgcgggtcggcgctcgccc

SEQ ID NO: 530670 - DNA, 74 bp, Homo sapiens
agaaaccggggaccttaacaatccacctaagaaattcagaggtgatgagacaaaccatgcttctgccacatcaa

SEQ ID NO: 530671 - DNA, 100 bp, Homo sapiens
aagcccccagaaccaggcccccaactcagccatctgcggaggtcaagacctatgccagatttactggtgctccactgaaggtacacaagatcagcaaccc

SEQ ID NO: 530672 - DNA, 80 bp, Homo sapiens
gattctttgtagcagacactgcaaatgaagctctcgaggctgctaagagactaacagttccgccgagcatcctggggcct

SEQ ID NO: 530673 - DNA, 118 bp, Homo sapiens
gcggtgcgcgacctgggctggctccgggggtggcgggcgcagctgctgtgacagtcaccaggagactaaagtccatcaaaaacatccagaaaattaccaagtctatgaaaatggtagc

SEQ ID NO: 530674 - DNA, 101 bp, Homo sapiens
ggaacatgtcggagatccggaagatgggcaacaagccccacatgatccaggaaattttatgctttggatccttcattcccaaggatgaatttgttaactcg

SEQ ID NO: 530675 - DNA, 100 bp, Homo sapiens
gtgtggtcgcgtctcggaaaccggtagcgcttgcagcatggaacctacaagcagcaattggcgcctattatgactttgagagcccaaacatcagtgtgcc

SEQ ID NO: 530676 - DNA, 83 bp, Homo sapiens
cagccacagcctcccgcgcctcgctcagctccaacatgtgcctacaccaactaatgttacaattgaatcctataacatgaacc

SEQ ID NO: 530677 - DNA, 75 bp, Homo sapiens
ggcggatcggctcacgcagcttcaggacgctgtgaattcgatgatgatgtgcctgcagatatggttgcagaagaa

SEQ ID NO: 530678 - DNA, 110 bp, Homo sapiens
ttccgtttaagagaagctcaaggccgaagccgagcagaggatctaaatacaagagtggcctattggttatgagaagacagatgatgtttcagagaagacctcactggctg

SEQ ID NO: 530679 - DNA, 100 bp, Homo sapiens
acagctgaaatctcagggcagctcaaatgtggcacctggtgtctttcctgaagactatcttcccgtctcaaaatggacatgatggatccacggatgtaca

SEQ ID NO: 530680 - DNA, 107 bp, Homo sapiens
aaagatccatttcacataataaagtgccctattacatcaacgagttgaatgccaagtcgaaggagttacacctgcagatttcagaggctgggcgatcctcagaaggt

SEQ ID NO: 530681 - DNA, 82 bp, Homo sapiens
cggcgatgagctaagacgctgtttcagagcgtttgggtcctctgaggccccttgaccagatcccaccaaatattttggttgt

SEQ ID NO: 530682 - DNA, 100 bp, Homo sapiens
atgagcacacccaacgcacccctgcactactatgagaccgttcgcatggcagccatcaaagagcacccagaggcctccattcaggctgttttttcagatg

SEQ ID NO: 530683 - DNA, 75 bp, Homo sapiens
caccagaaccatcacctcggagacccagacaatcacaggtgacttcatggtcatgacgattttcttcaatgtgag

SEQ ID NO: 530684 - DNA, 75 bp, Homo sapiens
tgcgcaaattcaccaagagagacgtcttcctggagcggatttttacataccgttgctcaaaagagggctgcaaga

SEQ ID NO: 530685 - DNA, 101 bp, Homo sapiens
acatcgtcacggagtacatgagcaaggcaccttccaaaaagggaaagaagcggaaggcacaaagggaagaggaacaggaacattcaaataaagctcccagg

SEQ ID NO: 530686 - DNA, 75 bp, Homo sapiens
tgggtcctcgctgtggggcaatccgggcttgcagacgaggacatgaccgataatagcaacaatcaactggtagta

SEQ ID NO: 530687 - DNA, 75 bp, Homo sapiens
cttctgcctggtgctctgcgtcctcatcgggcttatgttcgagctgccactgcagagccccgccatggaagacac

SEQ ID NO: 530688 - DNA, 82 bp, Homo sapiens
cccgtcccactctgccctgttgctgtcgcgccgctgctggttgctgtccctgggacttgccatgaggtgttgaagccttgtt

SEQ ID NO: 530689 - DNA, 75 bp, Homo sapiens
cggggcactcaggtgtttgttactgacttaattcagtgcacaaatgagatgaatgtgaacatcccacagttggca

SEQ ID NO: 530690 - DNA, 82 bp, Homo sapiens
ctcctattgaatctgtagttgcttctggcaatatatttgttggacaatttcccagctcatagggaagtgatgctctccatgc

SEQ ID NO: 530691 - DNA, 90 bp, Homo sapiens
aaataaaggagctgctgtctggaattggcaacatctctgagagcaggaagaaccggacccggcgaacctggaagtggaccatgatttctt

SEQ ID NO: 530692 - DNA, 82 bp, Homo sapiens
acatgggtcagtcccacagctcttcagccaaatgcccattcgcaaaatatttggagtggtatgagaagtccgaagaaactca

SEQ ID NO: 530693 - DNA, 100 bp, Homo sapiens
cttaagatgacagaaggtgatttttctggtgatcgaggacttccggggtaatgacagtgatgaaatgcaggggacctgggctgcgagacaaccatccgtg

SEQ ID NO: 530694 - DNA, 49 bp, Homo sapiens
accacagccctgcggacaacaagcggcctgacttcacccagtccaatcc

SEQ ID NO: 530695 - DNA, 75 bp, Homo sapiens
ggaggaggaggagcggacgtcggcttctccccgcgggagcccccagcatggatctctggaaacatggctacagaa

SEQ ID NO: 530696 - DNA, 116 bp, Homo sapiens
cgcagagccgagtgcagaagatctgggtgcccgtggaccacaggccctcgttgcccagatgaatcaaagatcaactcccactgaggacaaatggacctgtaattccgggtgtgacg

SEQ ID NO: 530697 - DNA, 74 bp, Homo sapiens
tggatatggacgttccagagactataatggcaggacgcccgtctcctctccctgaggatttcaggtctccctgt

SEQ ID NO: 530698 - DNA, 78 bp, Homo sapiens
gaatctgagggtgccctcaatgagcacatgaccagcttagcttctgtcctaaagggcttcctgaagaatgagaaggac

SEQ ID NO: 530699 - DNA, 76 bp, Homo sapiens
ggaaggatgactatgagtatgagctattatagaaaccatgagagaattccctaaattttttacattccgagcaagg

SEQ ID NO: 530700 - DNA, 75 bp, Homo sapiens
acctacatgatctgctcttctggtgtagaaaagattatcaaggaggagatgttaaagtaacccatcttgcaggac

SEQ ID NO: 530701 - DNA, 98 bp, Homo sapiens
tggttgatgatgcagacactgttgaactctgtggtgcgcttaagattgaaaaggctgtggtgtctcagcgcctgacagaatctccgtgtgctttggtg

SEQ ID NO: 530702 - DNA, 82 bp, Homo sapiens
cgaagctggccgagcaggctgagcgatacgacgaaagaagcttccggttctgaggtcctggaggtgccatttccctctctgt

SEQ ID NO: 530703 - DNA, 74 bp, Homo sapiens
tgtggagtggtttgaatatcgtaagcgcacgtttaaacatctcaaggagttggaaaaacaacattgatccataa

SEQ ID NO: 530704 - DNA, 100 bp, Homo sapiens
ctccgggtcgctggcggcgtggacacctgagtcccggggtaggggtctcccgcgagggctttgttcgcgggggtcacagctctcatggctgcagctagcg

SEQ ID NO: 530705 - DNA, 100 bp, Homo sapiens
agccgctccgaggcggaagatgaggacgacgaggactacgtgccctatgtgccgttacggcagcgccggcagctactgctgtgatgcagatccatccgcc

SEQ ID NO: 530706 - DNA, 100 bp, Homo sapiens
ggcagcccctaagggcccttcgcgggagagcgtcgtgcacgcgggccagaggcggaatgttagttcggccggagaggaggcccgcagaaggatgagagag

SEQ ID NO: 530707 - DNA, 90 bp, Homo sapiens
ctcgcccagcggccgcgacgctatggcgcactggagtaccctgttcctggcaaccgagacatgggtgcccggcaccgcgcccgagcccac

SEQ ID NO: 530708 - DNA, 87 bp, Homo sapiens
gagcggcgttggaggccaccgtttccagcactgatagccattgggcgatacagcatgacaatagagactgtggatgtcggatggtgt

SEQ ID NO: 530709 - DNA, 80 bp, Homo sapiens
gcgcctcacgcacctgagccccgaggagaaggcgctgaggagtatcctgtggagcacccagacaaattcctgaagtttgg

SEQ ID NO: 530710 - DNA, 83 bp, Homo sapiens
tccttcagaaaaagcatccccgaggaggaagacgaatcgttaaacatctgaaagggtcaggttatcttatgatgaggcttttg

SEQ ID NO: 530711 - DNA, 100 bp, Homo sapiens
ggaaccgagccccgacaggctatgacgtagcatgagccatgagcccaagtccccttcgctagggatgctttccaccgcgaccaggaccaccgccaccgtc

SEQ ID NO: 530712 - DNA, 83 bp, Homo sapiens
ctggagtagagtcttttttcactgagggtgaaaggtgtagcagtcactcggcctacacccacagcatcgaccttgtgaaccca

SEQ ID NO: 530713 - DNA, 78 bp, Homo sapiens
aggagaatggctttggacttgcagaatgttgcagagacttgcatatgatgattgagaggatccagaatccagatctct

SEQ ID NO: 530714 - DNA, 100 bp, Homo sapiens
gtgatttctgcatttccatctgagcacgcactcctggctttaaagtttatacttgcatttgccatacctgataagccacggcatatccagatgaaactag

SEQ ID NO: 530715 - DNA, 96 bp, Homo sapiens
ccatggaggaggctagcaagcgaagctaccagttctgggatacgcagcccgtccccaagctggttggtgaggtaacatacgtggagctcttaatgg

SEQ ID NO: 530716 - DNA, 98 bp, Homo sapiens
acgtctgtctggtgataccaggggcagagggaccactctgacagctatcatggtgaacttacttcagattgtgcgggaccactgggttcatgttcttg

SEQ ID NO: 530717 - DNA, 100 bp, Homo sapiens
ttaaatgacaccaagcaaagcctacttagtttagatctccagggagctcactcagtgggtttgatgtggtggatgctggctcgggaagttctgcgcatgc

SEQ ID NO: 530718 - DNA, 114 bp, Homo sapiens
atctcgccggtgcctatcaacctccgcgtctactcgccgcacggtgtcccgcatgagatgtctgcagaatgagacttacagtgcgctgagccctggcaaaagtgaggacgttgt

SEQ ID NO: 530719 - DNA, 82 bp, Homo sapiens
cgcagggcctgcagcgggagctggacggcgagcgcgagcggcgcgagaaagtgcatggctgcctcctaatcccatagtccag

SEQ ID NO: 530720 - DNA, 100 bp, Homo sapiens
ccgaggatcaggaaaaactatggctgaagggtatgtgattggcagctgtattaaacacattccaatcgcaggacgagatataacatattttattcagcaa

SEQ ID NO: 530721 - DNA, 90 bp, Homo sapiens
ccgggcacagccttcctgtgtggttttaccgcccagagagcgtcatggacctgggtatcgagaaccttccctgcgaacttcagaggaact

SEQ ID NO: 530722 - DNA, 50 bp, Homo sapiens
tccgcttttctttcaccttcacagaggaaggatgataaagactatgcttt

SEQ ID NO: 530723 - DNA, 51 bp, Homo sapiens
tgttcttaatggcatctagaatgacagagggataaattggaagaaatcttg

SEQ ID NO: 530724 - DNA, 101 bp, Homo sapiens
tcattccaagggtacaacaaggtttaccacaatgtgagggactcagccattgcaaattgtacagatgaggttcttgggtgtctctggggagtccctgggcc

SEQ ID NO: 530725 - DNA, 100 bp, Homo sapiens
ctgggtcagcttcatcctcggcggcggtggccgctagctccaaggaagataatcacatttttgcctggggcaatggtggtaatggccgcctggcaatgac

SEQ ID NO: 530726 - DNA, 50 bp, Homo sapiens
ctccaaaagtgctgggattacagggtcgtgctgcggcagcctggcgcccg

SEQ ID NO: 530727 - DNA, 75 bp, Homo sapiens
tggagagcctgcaggacggcgcggcagagtccccgtacgcctacagtaacgatgagcgggatcgtgtgcagaaga

SEQ ID NO: 530728 - DNA, 50 bp, Homo sapiens
gtagatgatgatgtagcagaaggagaccaagacacattccaccccagtgg

SEQ ID NO: 530729 - DNA, 92 bp, Homo sapiens
gaactgttgaatcttacaaaagaaagtctggctgatgatttgaaaattgttggagtcattcgttgcccagtttgcagccaagaatgtgcaga

SEQ ID NO: 530730 - DNA, 75 bp, Homo sapiens
tgaaaaaccagattattgcatgcaatggctctattcaggatatgggccctcacattttccaaacctgtccatctg

SEQ ID NO: 530731 - DNA, 100 bp, Homo sapiens
ctgcactgtggcaaggcttttgcttccaaatacaagctgtataggtccaaactaaatgacatgatagatgctattccaaaaagtaagaagaataagagat

SEQ ID NO: 530732 - DNA, 75 bp, Homo sapiens
aaagaggagcagcatggcatttcagtcactggtttgcagagtccaggaactgactcagcacaagaagacagcttc

SEQ ID NO: 530733 - DNA, 50 bp, Homo sapiens
tgcacttccttccagcagctacacaggtgctgctgatgtagagaaggtgg

SEQ ID NO: 530734 - DNA, 75 bp, Homo sapiens
ctcctctggtatatggacaacccccagctggttttccaagaattgatataaagcgggaagaacagaaaacagcag

SEQ ID NO: 530735 - DNA, 82 bp, Homo sapiens
ttcagagcaacctctttcaggctttaataggagggagcactggcagttgctgggtaatttgaagacgacggtggagggtttg

SEQ ID NO: 530736 - DNA, 90 bp, Homo sapiens
gcggaaagcatgttgtggctgttccaatcgctcctgtttgtcttctgctttggcccaggtgctccatacttgcttgcagtgcctacgtgg

SEQ ID NO: 530737 - DNA, 50 bp, Homo sapiens
ggtgaaggtcggagtcaacggagttttgattcatcatggataatctgtca

SEQ ID NO: 530738 - DNA, 98 bp, Homo sapiens
cctgattgaggactgccagctggcgctgcaggaggaatttggctacaatgcagagacacagaaactactatgcaagaatggggaaacgctgctaggag

SEQ ID NO: 530739 - DNA, 96 bp, Homo sapiens
cttccagggagacaccgattataagaagagaaactcagcgctggggaagaagcacgtagaaaatctaattgtgtgaaagaagtagaaaaactgcaa

SEQ ID NO: 530740 - DNA, 83 bp, Homo sapiens
ccgatggtagccgaggagctggcgccatgtcagaaccggctggggatgtccgtcagaacccatgcggcagcaaggcctgccgc

SEQ ID NO: 530741 - DNA, 75 bp, Homo sapiens
gcaatatggcggaggcggaaggggaaagcctggagtcctggctcatactatactggcaattgctggagaagattt

SEQ ID NO: 530742 - DNA, 75 bp, Homo sapiens
gggacgctgctgtacgcttcctcgcttttccagggtgtccgcaatgttgccagtgtctgtctgcagattggctac

SEQ ID NO: 530743 - DNA, 100 bp, Homo sapiens
gatcctaaggtgctctgcataatcaaccctgggaaccccacagggtgaaaatcctatttataagagtgccgtaacaactgtggtcaatccgaagtatgag

SEQ ID NO: 530744 - DNA, 82 bp, Homo sapiens
tggatgtgaaaatgaagccagaccgaggcacaattctgctttcccaggaactgcatcactcaggactctgcaagtttccaga

SEQ ID NO: 530745 - DNA, 97 bp, Homo sapiens
tacaaactagtcagtgacactattggacaaagggtggatgaaattgatgctgctattcagagatcacaacagctatggacattttgaattatgtcgg

SEQ ID NO: 530746 - DNA, 86 bp, Homo sapiens
tctgccgggggaacctgtacaaggcatacatgcagctggtccaggtgcctagagaattcagaaggagctggcggacatcactttag

SEQ ID NO: 530747 - DNA, 100 bp, Homo sapiens
aggacctgtctgacgatagtccaaaaactgaagaagatggtggataagcccacccagcccccggtccctgagaagcggccccctgaaatacagcatttcc

SEQ ID NO: 530748 - DNA, 75 bp, Homo sapiens
agaggcaggaggatcccttgatgccaagagttcgagaccagctggggcaacaaaaggatgaggaagatgaggaaa

SEQ ID NO: 530749 - DNA, 80 bp, Homo sapiens
gatggcagatgttctggctacacaggaaccctggattgcttgttacagtttggcagtaatcagtccaaaccagagttcac

SEQ ID NO: 530750 - DNA, 100 bp, Homo sapiens
cgggacctctccgggccatgggtggcagtagagaagagcatcacagaagttgctcaggagctgacagagctggtggaacatcttgtagacattgtcagaa

SEQ ID NO: 530751 - DNA, 100 bp, Homo sapiens
agatagaatgcttgatatgggctttgaaccccaaataaggaagattgtggatcaaataagaactggtcgaattgacaaatcttaccctacagtatgtggc

SEQ ID NO: 530752 - DNA, 51 bp, Homo sapiens
ccggaagcagtagaagtaacatttgcaggtggagtaaccttactgagagct

SEQ ID NO: 530753 - DNA, 100 bp, Homo sapiens
ggcccactatgagacagaaggcagccgaggggctgtcaaagctccaactggaggccaccctgtggttcagttagaacctggcccattagatgaaacccag

SEQ ID NO: 530754 - DNA, 88 bp, Homo sapiens
ggccaagtacgagcgacaggagttcatctacccggagaagcaggagccctactcggcaggtggccatggtggaggtgcagctggagag

SEQ ID NO: 530755 - DNA, 101 bp, Homo sapiens
aaaaggataaggagatcatagcagagtacgatactcaggtcaaagggaggttcccctgaaggatgctaaggaatacgctgaatccataggtgccatcgtgg

SEQ ID NO: 530756 - DNA, 75 bp, Homo sapiens
cctcatagacagaacgattgatgaagtagttgaactctgttccagcctcagacaggtgcctatcagaccctggcc

SEQ ID NO: 530757 - DNA, 80 bp, Homo sapiens
ggcgacgatgccccccgggccgtcttcccctccatcgtggggcgccccaggcaccagattcttccagatgatcccgataa

SEQ ID NO: 530758 - DNA, 100 bp, Homo sapiens
cttcacactgcagaactgggttctggactttgggcgtcccattgccatgagtgctgcagcagctcccagtccagtgctaggaaacattcccccaggagat

SEQ ID NO: 530759 - DNA, 73 bp, Homo sapiens
tgcaatatggcggaggcggaaggggaaagcctggagtcctggctcagtctgggaggggctgaacgtggtgaag

SEQ ID NO: 530760 - DNA, 100 bp, Homo sapiens
aagagctgatgagaatgctggcggaggacgagctccgggatgctgtactccttgtctttgcaaacaaacaggagttgacagagctgcagtcccagatctc

SEQ ID NO: 530761 - DNA, 100 bp, Homo sapiens
tttcaagaactgccgtcttctttgcctgcactaatgaaatgggacgtcggtcatcagatactgaagaagaaagcagaagcaagagaaaaaagaaacaccg

SEQ ID NO: 530762 - DNA, 100 bp, Homo sapiens
ccagcagcatgcgattcttattgaccttggctggctacagcaaacatcattcaagatgtccagcaaagggagcagcacagatggcagaacagacttagct

SEQ ID NO: 530763 - DNA, 83 bp, Homo sapiens
cttcaaggaacgggtcggctacagggagggacccaccgtagagactaaggaaaattgcctaagaattatgacccaaaagttac

SEQ ID NO: 530764 - DNA, 97 bp, Homo sapiens
acagatgaagacgaagttgatggcctggagaagaaagatgttttgcctactgttgatccgactgcaattacatgcctgtctactgttctatcaattg

SEQ ID NO: 530765 - DNA, 89 bp, Homo sapiens
gcaaggctcactggaggcccatgtcaatggcaagctttgttgcttctgaaaacaggacagatatttctttggatgaccccaacttttgg

SEQ ID NO: 530766 - DNA, 75 bp, Homo sapiens
tcgcaccccaaaaacagtgtcgagaagaggtgctcaagctgattcaccccaagagtggccgttcctaccacgagg

SEQ ID NO: 530767 - DNA, 116 bp, Homo sapiens
ctgacaagaaccgactggaccccacgtggcaggagatgctgaaccatgctacctgcaaggtctcctctgagcctccggcctccataagacccaaaacagatgacacctcttcccag

SEQ ID NO: 530768 - DNA, 100 bp, Homo sapiens
caacgggcgggtgctggagctgttccgggccgcgcagctgccgaacgacgtggtcctacaggacagaactgtaccgctctctttttggccagctccaccc

SEQ ID NO: 530769 - DNA, 100 bp, Homo sapiens
tgctgttgcggccgctgccccagggctgcggggacgatttcacagagatgatgagagccctgggataccctcgacatatttctatggaaaatttccgtac

SEQ ID NO: 530770 - DNA, 100 bp, Homo sapiens
gaatctctgagaactactctgacaaatcagatattgaaaatgctgatgaatccagcagcagcatcctaaaacctctcaaagctgcacacatacatgtaag

SEQ ID NO: 530771 - DNA, 100 bp, Homo sapiens
ttcttcagcatggctcatattctacttcattcagaagatcaggtacacaaatgcacgcgacaggaaccagtcacccacaaaagctgtatataatgccaga

SEQ ID NO: 530772 - DNA, 100 bp, Homo sapiens
acagttgtggcaaaggagaaatggccacagggaatgggcggcggctccacctggggattcctgaggccgtgtttgtgtgtccatgaaactgggaggcgac

SEQ ID NO: 530773 - DNA, 100 bp, Homo sapiens
acacaggtgaatttaaaggagcagccctggtgtcacctatcagtaaaaggttacagaaattatctcagagattcgggcgcccattgttactgttggtgtt

SEQ ID NO: 530774 - DNA, 112 bp, Homo sapiens
cgtcgctagaactcagttgtgcgttgcggccagtcgccactgctgtggatggaagcatgcctaggggaagatctgcctcccaccacagaactggaggaggggcttaggaatg

SEQ ID NO: 530775 - DNA, 88 bp, Homo sapiens
tccagcagtccagcacggccaagtcagccacctggacggaagcggacacggatgaccaccaagggacgctgggttttgaagagttctg

SEQ ID NO: 530776 - DNA, 75 bp, Homo sapiens
tggcgctctggctgtgctgcgcgacccccgcgcatggtctcctctgagcctccggcctccataagacccaaaaca

SEQ ID NO: 530777 - DNA, 100 bp, Homo sapiens
actcagtcagaaggagaatgagtgtaattgtaaaatctgctacagctgcagacctattcacagacttggaaaatgcatttcaggggaagattgatgctgc

SEQ ID NO: 530778 - DNA, 75 bp, Homo sapiens
ctgctacttcctcgactacggcgcgctcagcctctacagtctgggcatgttatttgaaagcaattgagacgcaac

SEQ ID NO: 530779 - DNA, 89 bp, Homo sapiens
cttcgccagcaccgtgctctccaccacaggcacgtgtggttctcaaatataggcattctgatgggaacttgtgtgttaaagtaacagat

SEQ ID NO: 530780 - DNA, 75 bp, Homo sapiens
gaactgaagaagcttgggctcacttccacaaattcagccataatggcaggtgaagaaattaatgaagactatcca

SEQ ID NO: 530781 - DNA, 100 bp, Homo sapiens
agaaattccacccagtatttcaagagtcacttctttacttggtgcaggaaggcagtctttgctacgtacagcaaaaggtgccacatctgccccattcctc

SEQ ID NO: 530782 - DNA, 108 bp, Homo sapiens
ttattatggactttcaaacatctgaagatgacaatttattagatggtgacactgcagttgaatgtccagaggaggtttatgaccctcgatctctatatgaaaggctac

SEQ ID NO: 530783 - DNA, 75 bp, Homo sapiens
gaacggcatggttggagtcagaagaggaagaagcagaactgggcagggtcaaccggatgcacatcagtcccaaca

SEQ ID NO: 530784 - DNA, 83 bp, Homo sapiens
gcaaggtcgccctcaaggccatgatcaaaacttcaaaaggtgatgacctatcaacagccattctcaaacagaagaaccgtccc

SEQ ID NO: 530785 - DNA, 100 bp, Homo sapiens
ggtttctttacagtaatttcaacagaagagtgagagatggaacccgaagaagaaaggattcgttacagccagagattggaatagccaggtctggctgggt

SEQ ID NO: 530786 - DNA, 95 bp, Homo sapiens
caagaacccccaggagcagaagtccttcttcgccaaatacctctggcaggctgccctgagcacgctcaaccccaaccccacggacagctgtcccc

SEQ ID NO: 530787 - DNA, 101 bp, Homo sapiens
ttgttctgcctgacttggaccctggaaaacctggccctcttcaatttctgacaaaaggttcctgggtggagctacccatgaacagcagcaatggcaatgat

SEQ ID NO: 530788 - DNA, 82 bp, Homo sapiens
tggaggaagcacaccctgtcctatgtggacgttggcactgggaagacatatgtagagtgtgtcggtcagaaggaacacctga

SEQ ID NO: 530789 - DNA, 100 bp, Homo sapiens
tagaggggctctgggagactttgaagaccagtcctgtttgcagggaagccccacttgaaggaagaagtctaagagtgaaagttttgccgaattgacaagc

SEQ ID NO: 530790 - DNA, 50 bp, Homo sapiens
gaaggatgcagagagaaaggagaggtcaaaatgcagatcttcgtgaaaac

SEQ ID NO: 530791 - DNA, 74 bp, Homo sapiens
actacctctggccccgagatcagaatgccgattgaagatggaaaatccccaagacattttctcaagtaatggtg

SEQ ID NO: 530792 - DNA, 100 bp, Homo sapiens
gcgaaggtcgtattgaatggtgttgtagaaacaaagggtcatcctttctagaaagagaaccgctgtgctatcaggagggaaataatccaagtgccaaaga

SEQ ID NO: 530793 - DNA, 75 bp, Homo sapiens
taaaaagagatgtggggggattctcgacctgctaacagaactggaccttttcgcctacgaggacaagcagaaact

SEQ ID NO: 530794 - DNA, 101 bp, Homo sapiens
ctggttttcaggaactcataaatgccacctcaacaattcagaggtgggatgtgtgtgggctgaaattccgagctgcggttgtgcatgagaatacacccttc

SEQ ID NO: 530795 - DNA, 100 bp, Homo sapiens
cattgtttgtcaccacaaaaaggacagatttggagcaagaggtggtggtggccttcccccgaagaaatttggtaatcctggggagcgtttgcgtaaaaaa

SEQ ID NO: 530796 - DNA, 100 bp, Homo sapiens
aattgttcatattaaccaccagccatacttggaaaggggagatggcccaatcaacacagcccacttggatcagtttgaacgaatcaagaccctcggcacg

SEQ ID NO: 530797 - DNA, 100 bp, Homo sapiens
gtaaaagttccctgaggcctccccagaagcagatgctgtcgtgcttcctgtatagctgcagaactccaagttctatagaaattttagagtattcatcaga

SEQ ID NO: 530798 - DNA, 74 bp, Homo sapiens
tttcacatgggtggtaatatggagttaaaggcggtgaccaagaatatggcccaggtgaccaaagccctggacaa

SEQ ID NO: 530799 - DNA, 100 bp, Homo sapiens
gggggcggcgtgcccgccggggggctagtggccacgctgcagagcctcggcattgctaccatttatgttcgttataagcaagttcatgctctgagtcctg

SEQ ID NO: 530800 - DNA, 76 bp, Homo sapiens
ccctctgaggaccgaagatgagcttcctcttgtactccaaagattcaggtttactcacgtcatccagcagagaatg

SEQ ID NO: 530801 - DNA, 58 bp, Homo sapiens
gtgcgaagaagctgcagccgcacctggccaagggggttgtgtccactgtggtccccga

SEQ ID NO: 530802 - DNA, 51 bp, Homo sapiens
agacgcactgctacaaggtccatgacccatctggaatcaagagacccatgg

SEQ ID NO: 530803 - DNA, 107 bp, Homo sapiens
gtccttctggataaaggggccaaacccaactccagagccctgggaagtgatgccgacatggtggataagaacaagtgctgcacactctgcaacatgtcattcacttc

SEQ ID NO: 530804 - DNA, 73 bp, Homo sapiens
cggcttcctagtgagtcggcggctgatttagaaggaggttcaggctacgataatgctcggaatatttttcaat

SEQ ID NO: 530805 - DNA, 90 bp, Homo sapiens
gcatgtttgtactgagtttggtgaagaaacattatcgtctgcagttttatatgagtccctgtgaagcaggaagagtgagggcaggttcac

SEQ ID NO: 530806 - DNA, 75 bp, Homo sapiens
cttcttgcaaaaggactgttctttgtggaggagaagatcaagctgtgtgaaggtacctcagccagcatggcagcc

SEQ ID NO: 530807 - DNA, 75 bp, Homo sapiens
acagaattttcatagagctggactattggaagagccagtcttggtgctctgtgttcacctggttcatctgaggag

SEQ ID NO: 530808 - DNA, 83 bp, Homo sapiens
cccggcgcgatgcccttcaggaaaggagcatcagatccatgctgctgctgactcggagccccacagcttggcacaggctctct

SEQ ID NO: 530809 - DNA, 100 bp, Homo sapiens
tcacagtggtggtggtgggggtagcaggtgcagtggaggcttgcctcttgcatcagctgagacgccgtgccgctggcttcctgcgcagtgacaagatggc

SEQ ID NO: 530810 - DNA, 97 bp, Homo sapiens
ctacgacaggcattttacccagccgcacgcccaggatttcttgcgtgcagtttgtgaagaaaaaattaggatccccctctgtgtgcctgagcgaagc

SEQ ID NO: 530811 - DNA, 75 bp, Homo sapiens
tagaaaacacaaatatggtcacctatcagagtctgcatcccaatatcaaggacaaggtgttgtgttggagcgctc

SEQ ID NO: 530812 - DNA, 98 bp, Homo sapiens
tggcttttcccttgaggatccccagacccactccaaccgcatctatcgcatgatcaagctaggtctagggtgaagttgaacaaattgctatgatgaaa

SEQ ID NO: 530813 - DNA, 75 bp, Homo sapiens
accccacacaaggaggatctaagcagcaaggagccaaaaacctgtatatcatctccgtgaaggggatcaagggac

SEQ ID NO: 530814 - DNA, 100 bp, Homo sapiens
actagagaagaactctataaaatgttagcgcatgaggatttcaataacgagagtgacagctgacatttctcttgctaagaggtctgtcctaaataatccc

SEQ ID NO: 530815 - DNA, 82 bp, Homo sapiens
ccatgtgcaggaccctaacgacaggcgcctccggcccatttacgtttgggacccactctggaacctgaggaagtggtaaaca

SEQ ID NO: 530816 - DNA, 136 bp, Homo sapiens
cagagtctgcaagaaaacttcatcctagaccaagtgataaactgaaccctaaaacaattaatccgttgatttggagcatatgcgaacaataaaacctgaaaaacacttacggttttgccaggaaaatggttttagt

SEQ ID NO: 530817 - DNA, 83 bp, Homo sapiens
ctggttcctgcgtgctacggccctgtgggcctgggagctgcctctgaggaacacgccgcagaccatggtgaatccgggcagca

SEQ ID NO: 530818 - DNA, 100 bp, Homo sapiens
ggaaagttgcacagccacagacttctcagcacagagtggggactgccttccattgtgaagtcttcttcccaagggattgttgaagaaacttctgaagagg

SEQ ID NO: 530819 - DNA, 80 bp, Homo sapiens
aagaacttggctgccattcaagtacaggacatctgcttcagccatgactgtcgctgggttgtggtcagtactctccgggg

SEQ ID NO: 530820 - DNA, 83 bp, Homo sapiens
ctaaaggccccatacaatgaagtagacattggtggaaacatttagtcgggaaagaggttaaagaagacacgcaagtatgatat

SEQ ID NO: 530821 - DNA, 50 bp, Homo sapiens
gacatccgagcgaaagagaaagaggaaaatcctgccttgcttcgttgggc

SEQ ID NO: 530822 - DNA, 51 bp, Homo sapiens
ttaggctgtgtgtctgttacagggaaatcctcattgacgattcaatttgtt

SEQ ID NO: 530823 - DNA, 50 bp, Homo sapiens
cgcgggggagccccgggagccgcacgtgatttaaagggagtgatagtcac

SEQ ID NO: 530824 - DNA, 75 bp, Homo sapiens
ggcgttctggatctcaaagcgacctgcctagagctggaacgttacctccagagcgagccctgctatgtttcagcc

SEQ ID NO: 530825 - DNA, 80 bp, Homo sapiens
cgggaaggtgcggggagcggagccatggcctccgatcttagcaaagcaatgtctcaagatggtgcttctcagttccaaga

SEQ ID NO: 530826 - DNA, 76 bp, Homo sapiens
cattttatgttgtgtcatttcgaagggattttttatcaagcagaaatgcatcgaacaacgagaatcaagatcactg

SEQ ID NO: 530827 - DNA, 88 bp, Homo sapiens
gcttggtgtcgtttttccttgagctgaacgtcttgcaacagtggccgcacgcataggttgtggttcaccttgaaactattctaggagc

SEQ ID NO: 530828 - DNA, 74 bp, Homo sapiens
cccgatggccacgatgtggatgatcctcactccttccaccaggccaaacagcctttgatgtagcagatgaagac

SEQ ID NO: 530829 - DNA, 75 bp, Homo sapiens
gagagccggtgccctgcctgctcttggccaacaagcaggaagaaccggacccggcgaacctggaagtggaccatg

SEQ ID NO: 530830 - DNA, 83 bp, Homo sapiens
caacagtacctcattgctctttggcgactcttattggtgtcgtgaaaactacccctaaaagccaaaatgggaaaggaaaagac

SEQ ID NO: 530831 - DNA, 89 bp, Homo sapiens
cctggtccggaaacgagtaggagacaatgacttcctggaggtcaggtcagcccaaggccaaccccactgtcactctgttcccgccctcc

SEQ ID NO: 530832 - DNA, 50 bp, Homo sapiens
agaattcatgattgaagaaatgcagacccgtaatcgacaaaactttgaac

SEQ ID NO: 530833 - DNA, 96 bp, Homo sapiens
tgtatgcccctgagttcaagttcatgccaccaccgacttatactgagggtgatcccttgatgatgatggatgaggagatctcagtgattgatggag

SEQ ID NO: 530834 - DNA, 100 bp, Homo sapiens
agtgctcaagagcctcattatctaccacccgagatgccccaaggccagaacacaaagcgtgaatccggaagaaaagttcaatctggaaacatcaatgctg

SEQ ID NO: 530835 - DNA, 89 bp, Homo sapiens
tcatgccagggagccaagcgtcctgcccggccgcttgggcactgtttaaaggaaagttccgagaaggcatcgacaagccggaccctccc

SEQ ID NO: 530836 - DNA, 75 bp, Homo sapiens
gatgtggccaaggtcaacaccctgattcggggtatcatcttatttcgtccttcacatctcactaacaagtttgag

SEQ ID NO: 530837 - DNA, 88 bp, Homo sapiens
ggagagaaccagcacttctgggacgcacagagaccgtgaagattccaagttcaggagaactcgaccgctttggacatcagacagtgca

SEQ ID NO: 530838 - DNA, 90 bp, Homo sapiens
gaaataaggacaaaagccaagaggaggacagttcgctacacagcaatgcatcgaggtagttgatgtcacttggcgatattcctgcaaaca

SEQ ID NO: 530839 - DNA, 100 bp, Homo sapiens
cagatagcagagccatccttgggaacagagtgtgaggtgtgagacaagtacttcagttcaagagtgtatttaggaggtaatcccaggaagcagaaatggg

SEQ ID NO: 530840 - DNA, 100 bp, Homo sapiens
tgtacgaagttgatggcaaagaccataaggaaccaaccggtgagccctctcctaagagacccaggggaagacccaaaggcagcaaaaacaagagtccctc

SEQ ID NO: 530841 - DNA, 101 bp, Homo sapiens
ggatttgtgaatcacgccctggagttgctggtgatccgcaattacggccccgaggtgtgggaagacatcaagaatgaatctgaagtctgctgcagtaaaac

SEQ ID NO: 530842 - DNA, 100 bp, Homo sapiens
tacttttcttcaatgataagagctgtcagttttctgtggatgaagagttttcggtttggtgtggaaatagcttatgtgggagctactatcttggatgttt

SEQ ID NO: 530843 - DNA, 100 bp, Homo sapiens
tgccaatgcagctgtgaacgatcagaggcctagttccccgagagcgttcagacagtgggggctcaagctcagagccatttgaccgtcatgcacctgctat

SEQ ID NO: 530844 - DNA, 75 bp, Homo sapiens
aaggtgccggtggtgcgagtcttcggagcgaccccggcagatcctgtttgaccaaactcagagatcaattaaggc

SEQ ID NO: 530845 - DNA, 82 bp, Homo sapiens
gcctggacagagagcacgtgtatgacctctttgagaaagccgtgaaggattacatttattggactggctaaggacgatcagc

SEQ ID NO: 530846 - DNA, 100 bp, Homo sapiens
aaaaactccagctgtgaaagcaacataaatgcgcctgattaatctctctgagctgaccccatacatcttgtgttccatttgcaaaggttacttaatagat

SEQ ID NO: 530847 - DNA, 97 bp, Homo sapiens
cacgccagcgcctcgctgtacctgctcatgcgacagaacttcgagatcggccacttttcaagccggtgtgaagcccctgatgctaaccagcagttac

SEQ ID NO: 530848 - DNA, 48 bp, Homo sapiens
agggaaaacttgctgcggttgctcaagacgaagtcttgctctgtcacc

SEQ ID NO: 530849 - DNA, 78 bp, Homo sapiens
aaggacttggcctccatggtgtcagagcaaggagaagctgttggggcagggtggacaggaagcagctcagcccagcct

SEQ ID NO: 530850 - DNA, 83 bp, Homo sapiens
gcttatactcctcccagtgacgggtctggagtgcgtgggggaccggctgttggcggttgagaagctgatgtctcctcgacttc

SEQ ID NO: 530851 - DNA, 75 bp, Homo sapiens
tctgcggccaagactccgtcctgcaaggtatctcagcgtttgagtcagccaggagtagcaataggtttggcttgg

SEQ ID NO: 530852 - DNA, 100 bp, Homo sapiens
gaagatgattctaattcaacaaatcataacttggaaatgaatggggtgctgaaaggaatgctctcagaatggttttcctccgggttcctgaacctagaac

SEQ ID NO: 530853 - DNA, 99 bp, Homo sapiens
aagctgactgacgtcatccttgaagccgaccagaatgatagccagtccctggagctggtgcacaggttccaggttttataggatcacattgacaaaagt

SEQ ID NO: 530854 - DNA, 75 bp, Homo sapiens
ggcttggtgaggcaacagcaggcctttcctcacgccagaacaatgagatttaccgcattgtttctcagaagcaaa

SEQ ID NO: 530855 - DNA, 133 bp, Homo sapiens
ccgtccatcccaaaaagccaaagccacagataaaccagtggaagcaggagaagcagcaattatcgtccgagcagcgcaccgcctaggcaagccagctgacgccgggggcacagaccaccctccactgagtgcg

SEQ ID NO: 530856 - DNA, 100 bp, Homo sapiens
ctggcctccagcctgagccccagccaggacgagaggatgcggagcccgcagaacctccacagtcaagaggacgggaaatcctcattgacgattcaatttg

SEQ ID NO: 530857 - DNA, 80 bp, Homo sapiens
ggatgagatgctgaagaccatgatgtctgtttctagaaatgagttgttgcagaagcctcaagttgaagtgttatcagagg

SEQ ID NO: 530858 - DNA, 82 bp, Homo sapiens
ctgaagacaaaaatccagaagtacaagcagtctgggccatcgatgcacccctcggagctaatagcggagatgagaaacagtg

SEQ ID NO: 530859 - DNA, 82 bp, Homo sapiens
gtctgctctgtgtgccatggacgggaggcatacacggaatacctgaggagcatccactatatctcccaggtgttactagaag

SEQ ID NO: 530860 - DNA, 75 bp, Homo sapiens
aactcatctaacaaaatccaagtacgtgacttgcagcttgtcacaaggcctaaagatattggaagacctaaggct

SEQ ID NO: 530861 - DNA, 100 bp, Homo sapiens
tgcggagatctctgcctttgagctgcagaccatcctgagaagggttctagcaaagcctgtacccaagaattaaaccaagacaaaggagcttggcctgaaa

SEQ ID NO: 530862 - DNA, 50 bp, Homo sapiens
tagaattgctgcttaaaaaacttgaaggctaacagagaccctgatgctgg

SEQ ID NO: 530863 - DNA, 90 bp, Homo sapiens
ccgctgctgcccctgctgtcgctcctggtcggcgcgtggctcaagctagtcttcccatgcacaagatgattaatacagatcttagcagaa

SEQ ID NO: 530864 - DNA, 82 bp, Homo sapiens
ttggtcgccgcgtccttggctggcgtgagcaggccgggctctcgccatgggtcactgtcgcctctgccacgggaagttttcc

SEQ ID NO: 530865 - DNA, 75 bp, Homo sapiens
ctctaccagtttttataaactggtttatacagttccagtgtctcgccccatcctcaccctcagggttcccagggc

SEQ ID NO: 530866 - DNA, 75 bp, Homo sapiens
acaacaagctggaggattggaatctgatgcatcatctgcatcaggtggacccaagtggagagattgtggaactgg

SEQ ID NO: 530867 - DNA, 100 bp, Homo sapiens
ccactccccaaacaggctggctcccgtctccaggccccaaggagccacacctggaccagaccccaggaaagacacttccctctgtgaccatgaaactctg

SEQ ID NO: 530868 - DNA, 100 bp, Homo sapiens
agagcatacaattccactggaaaaactccaaccagataaagattctgggaaatcagggctccttcttaactaaaggttcttccaggttggaaagagaata

SEQ ID NO: 530869 - DNA, 83 bp, Homo sapiens
cgcagccctcccgccccggctgccgggctacggggcagatggactcggagcgccccgccggaaataatgcaaaaggtgtccca

SEQ ID NO: 530870 - DNA, 75 bp, Homo sapiens
ctcaccattgctgaagagagagacaaaagactggcggccaaacagagcaatggccgccctgctcccccaatgaaa

SEQ ID NO: 530871 - DNA, 98 bp, Homo sapiens
gtggatagaataagtgaaacacggaaactgagtatgggatctgatgatgctgcctacacacaaggtttcacaagaagtactgtggctgtatacagtac

SEQ ID NO: 530872 - DNA, 98 bp, Homo sapiens
aacaatattagcctcacctgcatagcaactggtagaccagagcctacggttacttggagacacatctctcccaaaggccctcgggaccaaggatcacg

SEQ ID NO: 530873 - DNA, 105 bp, Homo sapiens
ggggccgtggaaaccgcaaccgagggaaccgaggcagcggaggtggtggtggaggtggaggtcctggtgcttgatggtcgaggccatctcctgggccgcctggcg

SEQ ID NO: 530874 - DNA, 100 bp, Homo sapiens
agtcagcctggctgccggcttgttcttactggccctgagtctttgggggcagcctgcagaggctgcggaagtggcagtgaagctagaatctcagaaggcc

SEQ ID NO: 530875 - DNA, 82 bp, Homo sapiens
ctcaccgagacggcgatccgggcgctcgagacttaccagagccacaagatgatatcatcaagttgaatcgaaaggaagggaa

SEQ ID NO: 530876 - DNA, 100 bp, Homo sapiens
cagaggtgtttaccatgacgataagcaaccagcatttagagctgtttatgaagcactgagaaatgaattgcagtgcaacaaagtacgtgaaaatcaggtt

SEQ ID NO: 530877 - DNA, 100 bp, Homo sapiens
cctcggtgcgcggcggagagaagaggattccggcgggaactcgactcttggcgccaccgcctcatgcactgtcggagctggagtttgttcagatcatcat

SEQ ID NO: 530878 - DNA, 100 bp, Homo sapiens
atccacacaacgaccctgacctggtcatggcgtccagctccggcctggcgtgaggaccccccaatccgcgtgagacctctgctcttccaggcaagtgaac

SEQ ID NO: 530879 - DNA, 100 bp, Homo sapiens
gagatgtgaacaaagctatcaatatattgctggaagggaattcagacacaaaaatggacccaagtggggtcaaagtgctggaaacagcagaggacatcca

SEQ ID NO: 530880 - DNA, 83 bp, Homo sapiens
acccgtccatcttcgggatcttcgacgggcacgggggagagacaatgcagatcttcgtgaagactctgactggtaagaccatc

SEQ ID NO: 530881 - DNA, 74 bp, Homo sapiens
cgctgacaggggggcctggccgcgcagccgggcagcgggtggcatgagacgtgggaacatgggccacctcacac

SEQ ID NO: 530882 - DNA, 83 bp, Homo sapiens
attccaagtaactcttatttggtatcttgcaatatattcagaactctccctcctagtgacagcaatgaatttgatccagaaga

SEQ ID NO: 530883 - DNA, 100 bp, Homo sapiens
accggaaggagtgggtaaccccaaagattgctgctctctgaacactatagtcgtcgaatctcacaagcgtacggtctgatgaatgaactgttatctgagt

SEQ ID NO: 530884 - DNA, 96 bp, Homo sapiens
ggaaccatggagggtgtagaaaaaagttggtgattcaaggaaagcacattgcaatgcattatagcaatcccagacctaagtttgaagattggcttt

SEQ ID NO: 530885 - DNA, 96 bp, Homo sapiens
ctgtgctgaaaaattgtgacatttcagtacatctggtagaggccagtgaagaagcaaaggaagacatgaaaattgacgctcattcttcttcctatt

SEQ ID NO: 530886 - DNA, 75 bp, Homo sapiens
gacagtctcctgcgaaaccaggcaatggaaaaggagaacaacttcccgccactgcccaagttcatccctgtgaag

SEQ ID NO: 530887 - DNA, 100 bp, Homo sapiens
ggtgaaacccaaacaacatctcctgctattccttgggctgcctttcctgcagatttttgcactgagtggccagccgcactggacagtgacgagaaatgtg

SEQ ID NO: 530888 - DNA, 100 bp, Homo sapiens
aggtggccagccctcagcccccacatcctggcgactgtcccccagcgagcagatcacagggtagtgggcaccatcgaccagcttgtgaaacgtgtcatcg

SEQ ID NO: 530889 - DNA, 100 bp, Homo sapiens
gttttgggccgaggcctgggttacaagcagcaagtgcgcggttggggccactgcgaggccgttttaggcttacctatttctactccatgtaccaccataa

SEQ ID NO: 530890 - DNA, 96 bp, Homo sapiens
ctggtcttccctgaccccgcggccggacgacccaagcccgctgagcaggatgaggttcaactttgtggggaaacttttgggtccacgtggcaattc

SEQ ID NO: 530891 - DNA, 83 bp, Homo sapiens
ctcatcttccagctctcaagagagtctaaaaaacagtccaactcttacgatatgttcatgagaggagaagaaatattgtcagg

SEQ ID NO: 530892 - DNA, 74 bp, Homo sapiens
gcaacaaaagagaagaaaagaggtggtggtggtggacggattgtggacaaagccctagaagagccaaagtatag

SEQ ID NO: 530893 - DNA, 83 bp, Homo sapiens
gtcggaagggagcccaagctttgcagagggtaactaaggaagtggatgctacatctaaagaggccaaatccttcttcaagcag

SEQ ID NO: 530894 - DNA, 75 bp, Homo sapiens
cctacagcatggcgcccgccatggtgaacagctcggcagttgactatattgtggagtatgactatgatgctgtac

SEQ ID NO: 530895 - DNA, 90 bp, Homo sapiens
cccagcgctgtcgtgctcctctactcgcgaccgtggcagccatgtattacagctactacatgctaccggacggcacttactgcctggcgc

SEQ ID NO: 530896 - DNA, 50 bp, Homo sapiens
ttctcatctgtgtctggtggcaaaatgaaaaggatgcgcctccacttagc

SEQ ID NO: 530897 - DNA, 100 bp, Homo sapiens
atctaaagatcctaggattgctgcaggtcagcagtctccactggaaaaaaagatcttggagcttactccacgggaacagcctctagataatctgagttgt

SEQ ID NO: 530898 - DNA, 75 bp, Homo sapiens
agttatgcccaccctccaactttgcgacggaaatgtgtcatcgaaagccaggttgccttcttcctcatctctgca

SEQ ID NO: 530899 - DNA, 90 bp, Homo sapiens
ccaagaggaacagcagtgtaaatgactcaggaaaattgcctaagaattatgacccaaaagttaccccagatccagaaagatggctgccaa

SEQ ID NO: 530900 - DNA, 96 bp, Homo sapiens
ggggctgaagaagcagttctacaaggcgagccagttccagctattcttcagatgctctggattttgagacggagcacaaattggaccctgtatttg

SEQ ID NO: 530901 - DNA, 96 bp, Homo sapiens
tgtcagggatccaaacagctggctgtggatcaacttttttcagagaccttggcgataaagagaaccatggagtctggcagtaccgccgccagtgag

SEQ ID NO: 530902 - DNA, 90 bp, Homo sapiens
cgccagctggtgtccagtcagcaggagcagtgcgccctcctgagcaagcatgccagtgtggagagcgcctcttcccaccagtcctcagcc

SEQ ID NO: 530903 - DNA, 101 bp, Homo sapiens
ctcgggcatcgggcaggaactgggcgccggcgcttacagcatgagggaaatcctcattgacgattcaatttgttgaaggccaatttgtggactcctacgat

SEQ ID NO: 530904 - DNA, 80 bp, Homo sapiens
aagcagcgtgcgttcagccctggggggctttgaccacgacctttgaagagcttcattttgagatcaagccccacgatgac

SEQ ID NO: 530905 - DNA, 83 bp, Homo sapiens
aaactcttcaccaaagaattgatcacatcatgaaaggtgtgagagggttgctgttgtattgcaatcatggtgcagaaatacca

SEQ ID NO: 530906 - DNA, 88 bp, Homo sapiens
agaagaggagtcctttaggaaggcctcattgctacgatttcagagtaccctggtaatagctgagcatgcaaatgattccctagcaccc

SEQ ID NO: 530907 - DNA, 100 bp, Homo sapiens
gttacaaggcaacatgaagactttgtgtggctacatgacactcttattgaaacaacagactatgctgggcttattctgaaggaattgaagaatctgcagc

SEQ ID NO: 530908 - DNA, 100 bp, Homo sapiens
acacttagaaggagaaggcctaaaaaatgtcatttttaccaactgtgtaaaggatgaaaatgtcaagcagggaatgggtactgttcaaaaaggaatgccc

SEQ ID NO: 530909 - DNA, 100 bp, Homo sapiens
agaccattgcacttcgtgcccgaaacgccgaatataatcccaaggtgggatttgatccacaccatcacatgcgtgtgccagcaatacctccaaacctgac

SEQ ID NO: 530910 - DNA, 89 bp, Homo sapiens
ccaaatctcagcaacccctgtgcttctccccaggtccagccaatgcattcagaagccaaaatgaatcatgtcaaccctgccatggactt

SEQ ID NO: 530911 - DNA, 100 bp, Homo sapiens
tgcgggtccgggattcccagccatggcagattcctccgggcagcaggaacagaaactgttcatacttggtgcgctgtggactcttgtgataattaaccaa

SEQ ID NO: 530912 - DNA, 100 bp, Homo sapiens
cgcagcggcgcagctgatagcaggaacagaaggtctgaagaaaaccctgcgggatgagatcaatgccattctgcagaagaggattatggtgctggatgga

SEQ ID NO: 530913 - DNA, 89 bp, Homo sapiens
ccaagaacaagcagctgggccatgaggaaggatgcagaaaatgcgattgtgcatatgggcggtcagtggttgggtggtcgtcaaatccg

SEQ ID NO: 530914 - DNA, 100 bp, Homo sapiens
agtatgctcccctgctggaagtgaaggaactcctaaagcgtttctgagattaagatggaagatattttgtgtgttctgacaagagatgattgttttaaag

SEQ ID NO: 530915 - DNA, 80 bp, Homo sapiens
agcctcttggggacctgggagccccctccgagttacacctccagagccaaaagtagtccagccctgctgggagttttctg

SEQ ID NO: 530916 - DNA, 75 bp, Homo sapiens
ccgcgccgccgctacgggaccgcctgagctttctacaccggatatttggagttcttacaacatggcagacattga

SEQ ID NO: 530917 - DNA, 83 bp, Homo sapiens
gggaaccctggtcaccgtctcctcaggcgggaggcagcaccgggctcttgatggacttggcagccaatgaaaaggccgttcat

SEQ ID NO: 530918 - DNA, 96 bp, Homo sapiens
atcagaacatggacaagatcaaggttccgacgcagatcatctgggggaaacaagaccaggaatatattattcgagtgcaaagaggaatttctgtgg

SEQ ID NO: 530919 - DNA, 100 bp, Homo sapiens
agctccaaggacgccatcaagaagaagctgacaggctccaaacaggcatgcgaggtgcctttggaaagccccagggcactgtggccagggttcacattgg

SEQ ID NO: 530920 - DNA, 100 bp, Homo sapiens
tggtgaccaatggcattggccgtgtggagggcattgcagtggactggatcgcaggcagctgtgttactggagcaggaacgacagcaggagattgccaaga

SEQ ID NO: 530921 - DNA, 98 bp, Homo sapiens
ggaccgctgtggccacatccgcctggccgacttcggctcttgcctcaagctgcgggcagatggaacgagtggcgctcaggcctggctggtcacctgac

SEQ ID NO: 530922 - DNA, 139 bp, Homo sapiens
ggaaagagaagcataaacctatcttctttcattatggagggaggtttggcagatggagaacctgatcgaacttcgcctgcctagggtagttaaaagacgagtgaatgctctcaaaaacctgcaagttaaatgtgcacag

SEQ ID NO: 530923 - DNA, 98 bp, Homo sapiens
caaaagagcatatgcagcctttcaaggaaaacatggaacaatttattattcaagtgattcacaggacacagcactggtttcacgggaggatctccagg

SEQ ID NO: 530924 - DNA, 90 bp, Homo sapiens
ttcaatgatgtgtgcaataatgaatcattagtatcggacacagaaacgtataattgaaatcctcaaaggaatgcaagaattgggagtaca

SEQ ID NO: 530925 - DNA, 75 bp, Homo sapiens
cttcttaacccctagaccggtttttagtccattgactatgcagcctaatgtctattgcgtctgcagacatggatt

SEQ ID NO: 530926 - DNA, 75 bp, Homo sapiens
ctgctcccatcattgatgtggtgcgatcgcaaagccttctagacaagctcagtggaatctgaagggcccacccca

SEQ ID NO: 530927 - DNA, 100 bp, Homo sapiens
acggcctatgcccaccggaaccccaagattggatactgccaggttggatggcaagcatgtggtgtttggcaaagtgaaagaaggcatgaatattgtggag

SEQ ID NO: 530928 - DNA, 75 bp, Homo sapiens
ccccccagaaacaatacatcctggaaatgtccaaagcaggagctagagttaatgccaaagacagcaaatggttga

SEQ ID NO: 530929 - DNA, 82 bp, Homo sapiens
gccctgttccccgcgctgcggcctggcggcttccaggcgcactaccgcggtttccacttgagcggcacagtgacagaacctg

SEQ ID NO: 530930 - DNA, 73 bp, Homo sapiens
cttagtaagatgccaaaaccaaaaccacctccaaacagggatgtggtaaaaactcagaaagccaacattcatt

SEQ ID NO: 530931 - DNA, 88 bp, Homo sapiens
ccacagcttccctctcacatgataaagccaagaaatatttttcttcatggccctgatcagcaagtaaaaataggagactttggtctgg

SEQ ID NO: 530932 - DNA, 116 bp, Homo sapiens
caatgatgagaggatgtggtggtctactctgatgtcaatcttgagggctagtgcatacatagagacgtgaagccagaaaatatcctcatcacgaaacattccgtgattaagctttg

SEQ ID NO: 530933 - DNA, 100 bp, Homo sapiens
gtggtctctgggcaacaacaaggtttcagccatgccacagagctccggcagtcatgggcccgctatagcagcagttcatagcagccatcatcacccaaca

SEQ ID NO: 530934 - DNA, 100 bp, Homo sapiens
tgggctctggggtgtgtcctttatgagctgtgtacacttaaacatgctgttacttgtctgcaagacttttttggtgatgacgatgtttttattgcatgtg

SEQ ID NO: 530935 - DNA, 50 bp, Homo sapiens
gggaatggggcgggcgacaacccttcaggaaataatgcaaaaggtgtccc

SEQ ID NO: 530936 - DNA, 100 bp, Homo sapiens
cttaatcctactcagaagaacttgtacagagatgtgatgttggagaactatagcaatctggttttcttgggtgaatcctccagattccccagagactgaa

SEQ ID NO: 530937 - DNA, 90 bp, Homo sapiens
ctcacatctatgccatcacagacaccgcctacaggagtatgatgcaaggtgtttccccccgggccggcctgccgtgacgatcacagccct

SEQ ID NO: 530938 - DNA, 50 bp, Homo sapiens
gaattccatatcctcgccctggaactgctgaccaactgactgaagagcag

SEQ ID NO: 530939 - DNA, 102 bp, Homo sapiens
cagccgcggcggttaagtatgcggcgccaggagctgttatgaagacagtatggagtttccagaccatagtagacatttgctacagtgtctgagcgagcagag

SEQ ID NO: 530940 - DNA, 101 bp, Homo sapiens
ttcctccaggtttgccatcttcagtatcagcagatgttgcacacaaacttggtataccttgctacaatagcagattctaatcaaaatatgcagtctctttt

SEQ ID NO: 530941 - DNA, 82 bp, Homo sapiens
ccctgcgctgccgccgctctgaggagttaaagccgccgccatgtctgcgcatctgcaatggatggtcgtgcggaactgctcc

SEQ ID NO: 530942 - DNA, 82 bp, Homo sapiens
caggcctcattggacagcattcgaggtgtttcccattaaacactaccaggacaaaatcaggccttacatccagctgccatcg

SEQ ID NO: 530943 - DNA, 90 bp, Homo sapiens
gcgcactggagtaccctgttcctggcagattctcagcaagttacagaagtatctttgacaactcttgtgaactttgtggacattacccag

SEQ ID NO: 530944 - DNA, 82 bp, Homo sapiens
aggaggtcctgccgtccatgcggaagatcgtcgccacctggatgctggagctgtttgcagacaaggtcccaaagacagcagg

SEQ ID NO: 530945 - DNA, 50 bp, Homo sapiens
gagcagtcctctcagcccacttgcacggcctgggcagtttttaaagggaa

SEQ ID NO: 530946 - DNA, 74 bp, Homo sapiens
aaagattactcaaagcaaagaaacttaccagtgatgaggtctgggcctaatcatcttctgacagtgcactcatg

SEQ ID NO: 530947 - DNA, 50 bp, Homo sapiens
cacggccttcactgtcgtgtcggaggaatttggctacaatgcagagacac

SEQ ID NO: 530948 - DNA, 75 bp, Homo sapiens
gggtaacatggcggatgcggaaggatgaaaactttcggaagagaaagttgcctgtggtaagttcagttgttaaag

SEQ ID NO: 530949 - DNA, 100 bp, Homo sapiens
tgttgagattctacttattcatcagtttgttgtgcttgtcaagatcaggggtgatccattcatgttgcagcagtctacaaatccagcaccaggaattctg

SEQ ID NO: 530950 - DNA, 100 bp, Homo sapiens
ttttcacttatctcgaaagcctatcagcatagttaagggtagatatggattcccagtttctccagcggccagtgctccccctagtccacacagtgagacc

SEQ ID NO: 530951 - DNA, 46 bp, Homo sapiens
gggtgctctacgtcacggagaaaggttgacggatatattcagacgt

SEQ ID NO: 530952 - DNA, 90 bp, Homo sapiens
gcagattatatcgcatcctatggctcaaagaaagatgattatgtgcttttctgctttgggccaagtagcaaaagctcgattcctgcatga

SEQ ID NO: 530953 - DNA, 100 bp, Homo sapiens
caaatatcctcggaagagcgctcccaggagaaacaatttttcagaagaagtgaagtcaagatgaagaaccatttgcttttctggggagtcctggcggttt

SEQ ID NO: 530954 - DNA, 80 bp, Homo sapiens
ccgattcgtgaccctcagcgccggtgcatgtcgattactatactggcaattgctggagaagattttgcaattgttgcttc

SEQ ID NO: 530955 - DNA, 100 bp, Homo sapiens
tgagaaggttcagttggcaaaccagatatatgacttgttaatgtccatcagtgtgttggcagtttctgcttggatgagggactacctaaataatgttctc

SEQ ID NO: 530956 - DNA, 100 bp, Homo sapiens
atgtcctttcctaaggcgcccttgaaacgattcaatgacccttctggctactgggaacgttatttggaaacattcctgtggaaaaccactcttctcttcc

SEQ ID NO: 530957 - DNA, 95 bp, Homo sapiens
catccacgcctttcagccaaatgccagactgattgtcatgctcagggaccctgtggagaggtgttcgaaatccgcaccactgatgacctcactga

SEQ ID NO: 530958 - DNA, 88 bp, Homo sapiens
gagggggacctactggatgatgatgataatgaagatcggggggatgaccagctggagattcacattttacctgattgccttcattgcc

SEQ ID NO: 530959 - DNA, 89 bp, Homo sapiens
gactcccgcggcgggaggagcctgttcccctgagtttttggctttcacccccaaccagtgaccaaagacttgaccactcaaagtccagc

SEQ ID NO: 530960 - DNA, 75 bp, Homo sapiens
ctgggttgaagccctgaaccaagccagcaagatcaccattctgctcctaagtgtaggagagaacttggtgcctct

SEQ ID NO: 530961 - DNA, 83 bp, Homo sapiens
tgagaaaagccaacttagacaagaggctgcttttggttagtctgctgctaattggaattgctgcgtggggcattggcttcggg

SEQ ID NO: 530962 - DNA, 123 bp, Homo sapiens
tcctgtgacctgcatgtactgggggattcgcagggaggatgtcgggacaccccggaagctgggaaatgacccaacatgagtgaagtttcctgcaagaaacgggacgactatttggaatggcca

SEQ ID NO: 530963 - DNA, 89 bp, Homo sapiens
gtttgtatggacaggcttgtccatctgtaacttcattaagaaattttggacggtgtggaacttggagagccagcccataagaaaacggg

SEQ ID NO: 530964 - DNA, 51 bp, Homo sapiens
acaaagaaaagaacgtgcctcttccagctgccaatggctctaatgaagata

SEQ ID NO: 530965 - DNA, 82 bp, Homo sapiens
aagtggcgaaggagccggctccaagggttgtgagtcccggcccagcccctccacccccctgcccccccgatgcgaccatggg

SEQ ID NO: 530966 - DNA, 100 bp, Homo sapiens
cccgaaccggtgcccatccagtccggtgccatctgaagcccccttcccagcttcgagagctgtgcccaggagtgaacaaccagccctacctctgtgagag

SEQ ID NO: 530967 - DNA, 100 bp, Homo sapiens
accggccccgagcaggtcacgaggacggagggccatgtgttgggtcagcaccatcaggaagcagtcaattatagatttcttcaaaccagcttcaaaacaa

SEQ ID NO: 530968 - DNA, 95 bp, Homo sapiens
ccagcatcttgacatttccgtggcaaccaaagacgggcgcctatcagtacacaataaggcaaattgaaccatctttgtatcctaagttgtttcag

SEQ ID NO: 530969 - DNA, 75 bp, Homo sapiens
cactgactttcagctatggaatcggtgctgcgacaagagactttggacaaaaattgacttgagtaggtgtaaggc

SEQ ID NO: 530970 - DNA, 89 bp, Homo sapiens
ggaaaagtattgcaagcaacagtagtcgctgttggatcgggttctaaaggaaagatgacaacggcaacacgacaagaagtccttggcct

SEQ ID NO: 530971 - DNA, 73 bp, Homo sapiens
gaaaatgccaacgccgtgtctgaaggtcacggtctagatcacattctcgatccagaggaaggcgatactctcg

SEQ ID NO: 530972 - DNA, 51 bp, Homo sapiens
gcaggactatggaatttcagttgccaagcgttgtagaatgaatgaagacac

SEQ ID NO: 530973 - DNA, 96 bp, Homo sapiens
ccagcagaactatctcctactactctttcccctgttaatcatagcttgggcccacccatggccacccatggaccagtcagcttgtacttcctcccc

SEQ ID NO: 530974 - DNA, 82 bp, Homo sapiens
cgccgcgccgccatcatggacaccagccgtgtgcagcctatcaagctggccaggatggtggtgagtgccattgtggacacct

SEQ ID NO: 530975 - DNA, 100 bp, Homo sapiens
atcctctgtacgcccgttcactgcaaaatcgtgtggtgggagctatgcagctatattctgtagataggaaagtgtctcagcccattgaaggacatgcagc

SEQ ID NO: 530976 - DNA, 90 bp, Homo sapiens
cagctcgatacaatttcacacctgctttgactctcccggatcttgcagagcagtttgcccctcctgacattgccccgcctcttcttatca

SEQ ID NO: 530977 - DNA, 82 bp, Homo sapiens
gcccccgcggcggccgcgctcttcgcctggatacagatcacttggattcagtcgagtttgctttgctccgtgggaactgcac

SEQ ID NO: 530978 - DNA, 75 bp, Homo sapiens
ttataatgaagaagtggctgacttaaaggaatttagataatgggctgtgtgcaatgtaaggataaagaagcaaca

SEQ ID NO: 530979 - DNA, 101 bp, Homo sapiens
cgaggagtttgttactctgaaagccagtcggctttatcctgtggataaacgcagagtgaacgagtttggggagtcctacgaggagaaggccacgcgggcgc

SEQ ID NO: 530980 - DNA, 90 bp, Homo sapiens
cgcagccgcagaggaggagcgcagcccggcctcggtgccagcgagatttcagattcctgtaaacctctaaagaaaaggagtcgcgcctca

SEQ ID NO: 530981 - DNA, 50 bp, Homo sapiens
ttgtcactccaacctcttttcgctgagacagagtctcactcggtcaccag

SEQ ID NO: 530982 - DNA, 75 bp, Homo sapiens
tgggacttcccgtccgcggcgtggaggcttccacagcgcggcacctgtacctccggggtggcgctggggttggct

SEQ ID NO: 530983 - DNA, 98 bp, Homo sapiens
gaagggacacatgtgcaatgcaaagctcctgagaaacatgccaggttggacgtgataagtatgagcctgcagctgtttcagaacaaggtgataaaaag

SEQ ID NO: 530984 - DNA, 100 bp, Homo sapiens
catccaatgcttcagtatctcatcaagaccagcaatgcccaggctgggtcatcatcggacagccagcagcatcccagcctcgagctgtggcaggttttcg

SEQ ID NO: 530985 - DNA, 100 bp, Homo sapiens
acagagtggagaactgccttctgaaaggtggaatcctactcagaatgtgaggatttggacgtggcagagggagaggggcaggaaggttctcaacccaagg

SEQ ID NO: 530986 - DNA, 100 bp, Homo sapiens
ccttacagcagcatttctgcagagagcgcaggtaaaattaagtattcggaaagagtctatgaagcttgtatggaagcttttgatagtttgcctcttgctg

SEQ ID NO: 530987 - DNA, 97 bp, Homo sapiens
aaaaagacgaggaggacaggggcggggggcgggaggcttgccaccttcagcccccccgcgaacgcccaagttgtacacagaagaaagcccatatgag

SEQ ID NO: 530988 - DNA, 88 bp, Homo sapiens
tcttatccatcccatctcttggacagatgatgccagttaattactttgaatattcctacgagaagcaacaggcacaaggctctggtcg

SEQ ID NO: 530989 - DNA, 50 bp, Homo sapiens
aagtctctcttgtcactccaagaaaagacggcagacccccaaggagtgac

SEQ ID NO: 530990 - DNA, 101 bp, Homo sapiens
ctgcttcatccgtgagagagaataagcaacctgaaggtttggaattaaaacaaggcaggagtagggctgattggagccattgtacagtgtcgggaacatac

SEQ ID NO: 530991 - DNA, 72 bp, Homo sapiens
ccttcaaaagcccccaaaccagtgaatgcatggttgttggaagaggagcctttggagttgtttgcaaagcta

SEQ ID NO: 530992 - DNA, 78 bp, Homo sapiens
ggtcctttatatagaagggagagtagttaccaaagacgttggaagaggtggctatggacatcacctgggagaagtgga

SEQ ID NO: 530993 - DNA, 96 bp, Homo sapiens
ggcaggcgtgcttgtgggacacccgtttgacacggtcaagaatgagtccctggaacgccagatgcgtgaaatggaagagaactttgccgttgaagc

SEQ ID NO: 530994 - DNA, 100 bp, Homo sapiens
cccacattggagatgaccctggcatatttattacgaagattataccaggaggtgctgcagcagaggatggcagactcagttgctgatagtccaactccac

SEQ ID NO: 530995 - DNA, 100 bp, Homo sapiens
atacccgtgacctggggatcgctacggaccttaaaatacccgcaacagccccttcgtcccaagaacttgcatcaacaatacttcagtcatgatgtttaaa

SEQ ID NO: 530996 - DNA, 75 bp, Homo sapiens
catggtttttctggggaccagaggtaacacggcagcacagctgtccaagatgcagattgagttcataaaacaagg

SEQ ID NO: 530997 - DNA, 90 bp, Homo sapiens
gcgaggaagagcggccagttaaacctgtcgggtagaaacctcagtgaagatgctgatgaatggcaagaatcagaagaaaatgttgaacac

SEQ ID NO: 530998 - DNA, 98 bp, Homo sapiens
ctgtgtatttcaagagtaagctctcgtttgaggagactaacaattcctgttttcgccaggtcacaaggcacttaaagcattgttgaggtcattggtag

SEQ ID NO: 530999 - DNA, 100 bp, Homo sapiens
ccagtgttcaccatcctggccccggaaggctatgcccactggaagggccaagtgctgaattcagatgagctccaggagttgtacgaaggcctgaggctga

SEQ ID NO: 531000 - DNA, 103 bp, Homo sapiens
ctggagcctcagttggaagcagccgatccagcctgcggagcctgtggggcagtcactcagcctctgaagaagcttcgggttcagactcaggcagtcagtcgga

SEQ ID NO: 531001 - DNA, 97 bp, Homo sapiens
cgttataactgcctggaaggttagcgtcaaagaagttgagcaccatatgaaggcggagtatggaaagttagagtggacctacctgataaataccctt

SEQ ID NO: 531002 - DNA, 75 bp, Homo sapiens
gcctagcacctcttatactgataaaccgatgacggcgtcccctgtgtcttccccttcatattcaatgggaagagc

SEQ ID NO: 531003 - DNA, 100 bp, Homo sapiens
tggtcttcggcgacgtcgagaacgacgaggacgcgttgctgcggcgtctgcgaggcccgaggggctggtgaattaccatatctccgtcaagtgcagtaac

SEQ ID NO: 531004 - DNA, 90 bp, Homo sapiens
cgcaaatacctgaaagattgggcaagagaagaattcagaagaaacaaaagtgccaccgaagagctgcgactgatagattggggtctggca

SEQ ID NO: 531005 - DNA, 101 bp, Homo sapiens
ggggcagcggggacgcggggtctcgcggcgcctggcagcagagaccaccagaaggatctttaatctcatgaagtacgacagctacagccgcttcttaaagt

SEQ ID NO: 531006 - DNA, 100 bp, Homo sapiens
atggacaaaaacatgagtcaatatgtattgtggcattcaaatcctagcactctgggagagatggagttttaacattgaatgcggagaacactaattatgc

SEQ ID NO: 531007 - DNA, 88 bp, Homo sapiens
cctcccaggtagctgggattacaggagaactatggatttgataaaattgaggtgcgagataacggggagggtatcaaggctgttgatg

SEQ ID NO: 531008 - DNA, 100 bp, Homo sapiens
ggagaaggacgagatcatcaagttgtatagctgtatcattggcaacatgatttcgactggagcgctgctcagcgctttcgttcagctgtgccacatttcc

SEQ ID NO: 531009 - DNA, 75 bp, Homo sapiens
accagcacctggaatctaaggagtggtttgtgcagctctattaccacgggaaggaaatgtggctttagataatct

SEQ ID NO: 531010 - DNA, 82 bp, Homo sapiens
gctcaaccagcttctggtagaaatggatgcgtccagaggaccagaggttaatttattctgggaagctgttgttggatcacca

SEQ ID NO: 531011 - DNA, 75 bp, Homo sapiens
caagtctcctgaagaggaaggagcggtgtcctcttaagaaaatggtcaaatgaagcgcaacagaggggaagaaat

SEQ ID NO: 531012 - DNA, 50 bp, Homo sapiens
gattcgcagtggtcgcttcttctccttgaactgataaatttcaaacggaa

SEQ ID NO: 531013 - DNA, 75 bp, Homo sapiens
taacaaggagcatgtactggccgcagcaaaggacctgaaggagaagaaggagaaggtggaggagaaggcaagccg

SEQ ID NO: 531014 - DNA, 101 bp, Homo sapiens
tcaggactccacacaattaaccttgctggcaacccactggaggatagagattgaatacctgcttaagaagcttacagaagctatgggaggaggttggcagc

SEQ ID NO: 531015 - DNA, 89 bp, Homo sapiens
cgcggcggcaccgggaggccgggccgagcggctgtttatatcactggaaaagaagttttcagcttcaaaatggtttcttacatggatgc

SEQ ID NO: 531016 - DNA, 100 bp, Homo sapiens
gcaaggccggagaaggccgccgggcccgggcatggtggtctggggcaacgcggaagaattcaaagaagctttttcactatttgacaaagatggtgatgga

SEQ ID NO: 531017 - DNA, 75 bp, Homo sapiens
gcacggcctgcgaacccggctacactggccagtactgtgagcaggccaagaagaaagttatggccccttctaaaa

SEQ ID NO: 531018 - DNA, 98 bp, Homo sapiens
aatcagctggcctggtttgatactgacctgtaaatcatcctttaggcctcagagaaccatggctactgccaagggaatcgccataggcatcgacctgg

SEQ ID NO: 531019 - DNA, 75 bp, Homo sapiens
ggacgaggggaagtcgtacagcgtctgcatgaagaaatcagtgatttttatgaatacatgtctccaagacctgag

SEQ ID NO: 531020 - DNA, 74 bp, Homo sapiens
aggagtttgaggggtctgaagactgaaagagtcgaatggtttgttggcagccaccagtggtaaaaacagagatg

SEQ ID NO: 531021 - DNA, 88 bp, Homo sapiens
gatgatgaacatggcgaggctcaacaggacagaggaattaaggaatttgcaagagcaaatgaaggccttacaagagcagctaaaagta

SEQ ID NO: 531022 - DNA, 82 bp, Homo sapiens
aggatgcggctcgtggtggatggcatggggcgctttggcaggtgaagcaaatcatggaggaggctgtcaccaggaagtttgt

SEQ ID NO: 531023 - DNA, 90 bp, Homo sapiens
taagtttccagacaatccagagaactatgacagagactccactttcaatgtgtttgtgggaaaaggacagctgatcacagggatggacca

SEQ ID NO: 531024 - DNA, 97 bp, Homo sapiens
ggtagtaacattcctggattactcaacagatttggacacaacggaaaggttcaaaagatgtcgtgataaaggcacaggttttagctggtggtagagg

SEQ ID NO: 531025 - DNA, 100 bp, Homo sapiens
ctctgctgcaccttcgtgcaccgcgctcgcagccgctacgagcacatccccgggccgccgcggcccaggtgatctgcaactctttcaccatctgtaatgc

SEQ ID NO: 531026 - DNA, 97 bp, Homo sapiens
gcgaggaaagtctgtcattctggactgcacccctacgggaacccacgaccattatatgctggaatggttccttcttgtctttaaccgaactgtcaca

SEQ ID NO: 531027 - DNA, 82 bp, Homo sapiens
ctgatgtggagagcttgctggtgcagtgcatattggataagaagtacaagtagtactagtggtagcagtggaagctcaacta

SEQ ID NO: 531028 - DNA, 82 bp, Homo sapiens
cgacggcaaaggtgtcgtggtggtcattaagcggagatccgggggatatgagactttctactcggaatatcctgagtgttgc

SEQ ID NO: 531029 - DNA, 90 bp, Homo sapiens
gttttatgagtgggaaccatttgcagaagttaaagagaagttgactgcggatccagacagtgaaatagctacaaccagcctaagggtttc

SEQ ID NO: 531030 - DNA, 50 bp, Homo sapiens
cgcgtgcgcggacatggcctcaaacgcacatgattaagtaccggtacatc

SEQ ID NO: 531031 - DNA, 82 bp, Homo sapiens
tctgaccactctccagcaccagcttccagttagtggatatagcacaccatccccagccagttccccctaaaggactcaaaac

SEQ ID NO: 531032 - DNA, 82 bp, Homo sapiens
taatcagttgccacgttcaaacaagcagctttttgaattactttgttatgcagaaagtgtatcatgaactgatcactaaata

SEQ ID NO: 531033 - DNA, 50 bp, Homo sapiens
tggccctattgatgtctaacggcagcaacagccaactcagtttataaatc

SEQ ID NO: 531034 - DNA, 104 bp, Homo sapiens
ggcagtacaagcttacgtctctgctcttcagtacaatcctctattttgaactggagagcagtggcctgagggatgagattcggtatcactacatacacaatggg

SEQ ID NO: 531035 - DNA, 100 bp, Homo sapiens
tctcctggttaatcaagaattctctatttctgctccgtcatccatgccactttggcccgccacaataaactgttgcagcagatgctcaaaccaggatcgg

SEQ ID NO: 531036 - DNA, 80 bp, Homo sapiens
tcagcatcatgcagccgccgccgaggaagagcaggacaggctgctttggtttgtgacctccaggcaggacggccatcctc

SEQ ID NO: 531037 - DNA, 75 bp, Homo sapiens
ctccaaaccacgtcatctgatttttgtggggacattcatggacaattctttgatttgatgaagctctttgaagtc

SEQ ID NO: 531038 - DNA, 101 bp, Homo sapiens
gcaagcggagctcccccaagagccggaaagcatgacgacagagatgatggtgtggattattgggccaaaagaggaagaggtcgtggtacttttcaacgtgg

SEQ ID NO: 531039 - DNA, 76 bp, Homo sapiens
gatgattatcgtaggaggagtcctccacctcgtcgcaggtccctctggcctgcatgccaggagtcggtcaccgccc

SEQ ID NO: 531040 - DNA, 80 bp, Homo sapiens
aggaaggggttcccagaagtcagaatccaagatgagccaaagagttcaagacacgtctggggatctttcttcacaaatca

SEQ ID NO: 531041 - DNA, 100 bp, Homo sapiens
gaaaaagtaaggccaaatcaaaatcgctgcatagtaatattgcgtgaaatatctgaatctacccccgtggaagcttctccagggaaagtgaccgaggcag

SEQ ID NO: 531042 - DNA, 100 bp, Homo sapiens
gaacagaacaggccctatggggcatacctatggctttattgacctcgactcccatgcgggacagcctatttatacaaccagtgtggtcccctgaccaacg

SEQ ID NO: 531043 - DNA, 82 bp, Homo sapiens
aacttgccaatgtgcaaagctgcagaaaccacagtggtagagcttgcattgaaaggctctagttacagtggacttcttgaac

SEQ ID NO: 531044 - DNA, 75 bp, Homo sapiens
ggtcccaccggggtatcttcagccgcctccttgacagtcttcggcaggaaggcgagcccacaccttaaccgtgct

SEQ ID NO: 531045 - DNA, 75 bp, Homo sapiens
gccacaaagaagaaaacatttcttttaatttttaaacttggtttgaaagctcggggacctgcttcacaagttaca

SEQ ID NO: 531046 - DNA, 108 bp, Homo sapiens
caaactcatcggaaacatggcactgttgcctatcagaagtcaattcaaaggacctgcccccagagagaggtgtccgcaatgttgccagtgtctgtctgcagattggct

SEQ ID NO: 531047 - DNA, 75 bp, Homo sapiens
ggatgctgatagtctccagcgggcctggactgtgggctggtgtgtggaactggttctgtacagagtaatgagatg

SEQ ID NO: 531048 - DNA, 101 bp, Homo sapiens
tcaaagagaaagttcataaatacaacttagcagtcacagacaagttgaagatgaccttgccccaaactggataccacccacatgtccatcatcagtagaat

SEQ ID NO: 531049 - DNA, 88 bp, Homo sapiens
ggcccaacccaagagcgctacaaggatggggtggtgaccatcggctgtgtggatggtcctgaccaagtgcacatcaccagggagtcgg

SEQ ID NO: 531050 - DNA, 50 bp, Homo sapiens
ggaagacgcgctcctgcgccggagatacaactcgtcaacgaatcaaattc

SEQ ID NO: 531051 - DNA, 87 bp, Homo sapiens
ctgtggttttgatcatgttgttaccctcggacgtagcccggcttgtattggcctcctttggaaaatctggcaactgtggaagagact

SEQ ID NO: 531052 - DNA, 82 bp, Homo sapiens
ttcagagggaggcagagaagcagagaagccgcggcccatggagcccgccggcccggcccccggccgcctcgggccgctgctc

SEQ ID NO: 531053 - DNA, 95 bp, Homo sapiens
cgctttgcagaggacaacttcaacaacacttacatctccaccatcgatcgggctggtggtcatcctggcttccacggtggtggccatgtcggccg

SEQ ID NO: 531054 - DNA, 98 bp, Homo sapiens
atgattgggattgggccagtcttaaatatctacccatggaataaagagctgtatttgatcagagcttctcgaaacaagtctgagaagaagcgtcggga

SEQ ID NO: 531055 - DNA, 100 bp, Homo sapiens
gggaaagaaaacaatttctcctgctctgcagcttctgttcaggtactccaaagattcaggtttactcacgtcatccagcagagaatggaaagtcaaattt

SEQ ID NO: 531056 - DNA, 75 bp, Homo sapiens
catatttgttattggggagaaaatcttcagagggttccaggcccggccggagctcctggaggtgttcagcacgga

SEQ ID NO: 531057 - DNA, 109 bp, Homo sapiens
caactgctttcctttccctcagcacacagaggatgatgctgactttgatgaaggtgctggagaatctggtaaaagcaccattgtgaagcagatgaggatcctgcatgtt

SEQ ID NO: 531058 - DNA, 98 bp, Homo sapiens
tctcgctcggctgcgggaaatcgggctgaagcgactgagtccgcgatggagcggagctggagtttgttcagatcatcatcatcgtggtggtgatgatg

SEQ ID NO: 531059 - DNA, 102 bp, Homo sapiens
gagcacagtaacatacagcactttgtggagaaagtcgtcttccacttgcacgaaagctttcctaggccaaaaagaggtggatctcgagccagaggggaaagt

SEQ ID NO: 531060 - DNA, 100 bp, Homo sapiens
cttagaggacttccctttggatgtagcaaggaagaaattgttcagttcttctcagactgtcaagaacaagtatgccacatcgaagcatgctaagatcagc

SEQ ID NO: 531061 - DNA, 75 bp, Homo sapiens
ggagcgcctcgtcgacatgagtgatgtggaggaaaacaacttcgagggcagaccggcagcaaaagtggaccaaga

SEQ ID NO: 531062 - DNA, 75 bp, Homo sapiens
gcggtgacggtggcgccgcccggggcgaggcagggccagcagcaggcgggagcaattctgtggtgttcttggtca

SEQ ID NO: 531063 - DNA, 100 bp, Homo sapiens
tgatacttcaaaaattgaagctgcaatatggaaggaaattgaagcgtcgaaaaggtcttgattctgagaatgaatttggaatgtatcctgtcaggtataa

SEQ ID NO: 531064 - DNA, 100 bp, Homo sapiens
catgctcagctgcaaccggtctggcaagaaggacacctgtgccctgacctgtccctccagggcccgatttttgccagccatactaggttggagctggtct

SEQ ID NO: 531065 - DNA, 99 bp, Homo sapiens
gctgattgctatcacttctgcagaatccagtggacctaagtcaatgttagtctaccactgtacgtctggtaacctcaatccctgcaaccggagcaaaat

SEQ ID NO: 531066 - DNA, 74 bp, Homo sapiens
gggctgcgcaccacagaggaggctctccatgccagccacggcttcatgtgaaaaagcttgtggtgaaggggggc

SEQ ID NO: 531067 - DNA, 50 bp, Homo sapiens
ggaaaatgatgcttaatatcgatggttttgtgatgaaggaacctgtacag

SEQ ID NO: 531068 - DNA, 74 bp, Homo sapiens
atagatggacaagagacgatcattctgcaagcaggcaacctgaatacagggcccaagggatgcagacagtgatg

SEQ ID NO: 531069 - DNA, 98 bp, Homo sapiens
cgatggccgggatcctggagcactcggtcatgtacccggtggactcggtgaagagtgatcagcagctggactgtgccttggacctaatgaggcgcctg

SEQ ID NO: 531070 - DNA, 80 bp, Homo sapiens
cgacccttggcgcctgcccctgcaacgggagcaaattgtggctactaatttgccccctgaagatcaagatggctctgggg

SEQ ID NO: 531071 - DNA, 100 bp, Homo sapiens
acttctccccagaggaactcaaagttaaggtgttgggagatgtgattgaggtgcatggaaaacatgaagagcgccagctggctgatggtgtgaactcggg

SEQ ID NO: 531072 - DNA, 100 bp, Homo sapiens
cgcgaagcgctggtggcgggcccgggctgcggcgtgtgcgcgcccgccagctgctccggagatacgctcagagtcaagatctccactgaagttggcatca

SEQ ID NO: 531073 - DNA, 83 bp, Homo sapiens
cagagattcatctttcatgcagtgacatgttgataaaaaatgatgggatgtttcagcagcccctgagaaggaagaggaggaag

SEQ ID NO: 531074 - DNA, 100 bp, Homo sapiens
cgtcagggacacggggtgctgcgctgcgccgacggctccacctacaaggctttatcctgtggataaacgcagagtgaacgagtttggggagtcctacgag

SEQ ID NO: 531075 - DNA, 101 bp, Homo sapiens
ctctgagcccgccaagcgcggccgcacggccctcggcagcgatggcactgaaggactacgcgctagagaaggaaaaagcttgtggtgaaggggggcaaaaa

SEQ ID NO: 531076 - DNA, 100 bp, Homo sapiens
gccttctgtatcttcatggtgcggctcatcttcgagagctcatgatggagcagtccaagaagtcctccctcatggtggcccgcagtattctcaacaacaa

SEQ ID NO: 531077 - DNA, 100 bp, Homo sapiens
acggccagaaagttccgccatgagctggggcacggagctgtggttggaagatgctggctcaagtagtttagataatctactaagtagatacatctcaggc

SEQ ID NO: 531078 - DNA, 99 bp, Homo sapiens
ctggaggaaaaaaaatttatggctaaaaagggtagcttcaggttaatttggagtggcccctggagtcagtttcctacaccatccgaggccccacccagc

SEQ ID NO: 531079 - DNA, 100 bp, Homo sapiens
cggtttcaccgcgctcgttatcatgtggcagaagcactatggtcaaggtgaagatgttcttaaagggtcccagattacgtatgttacaggtgtagaaggg

SEQ ID NO: 531080 - DNA, 83 bp, Homo sapiens
ttccccaggcctgcgtccgagtctccgccgctgcgggcccgctccgacgcggaagggtgactatgaccagagcaggaccaaag

SEQ ID NO: 531081 - DNA, 145 bp, Homo sapiens
cagtggatttccttgcggaaaggatgttggcggtccctgtgacctgtggagacacggccagatctgccctccataccttccactggaagaatctcaaacagcgctacttactcaggatcagtggcaccagccaactcagctttgg

SEQ ID NO: 531082 - DNA, 100 bp, Homo sapiens
tacaattcgtggcactccacaacagatagactatgctcggcaactcatagaagaaaagattggtatttagtccatattatcgaaccaaggaaaaacttcc

SEQ ID NO: 531083 - DNA, 75 bp, Homo sapiens
gatgaatcatacaatatttcagaggtcatgtcaaaagaggtagcaacacaagtcggaatagaatggaacctgtcc

SEQ ID NO: 531084 - DNA, 96 bp, Homo sapiens
ccatcttcggctaggtcgtcacaggctccggctcatggcatcaagtggcatccatcataagtttactaaagcagtgaagcactttggggaagaggc

SEQ ID NO: 531085 - DNA, 71 bp, Homo sapiens
aaggccaagttgaccatccctatcctctatgtcaaggaaggattacggccaggagatacaaccagcacttt

SEQ ID NO: 531086 - DNA, 82 bp, Homo sapiens
aaagaacctctggtgttgaaagccatccaacatattctttacaatggatgatgtggtcaaggttggagactttgggttagtg

SEQ ID NO: 531087 - DNA, 90 bp, Homo sapiens
gctctaatattactgatgggagaatcacacctgagccagcagtcagtaatacagaaggccttgctgtgggcctggaccctgagggctatg

SEQ ID NO: 531088 - DNA, 75 bp, Homo sapiens
gccggccccatgaggagggacgtgaacggagtgaccaagagcaggtttgagcattgcactttgactatggaaaca

SEQ ID NO: 531089 - DNA, 50 bp, Homo sapiens
acaggatcttacgatggagttttggtagagagcacctaggcttaaatttg

SEQ ID NO: 531090 - DNA, 100 bp, Homo sapiens
actgttacgatccagttgaagattactggatgcacgtacagaatacattcagccgtcaggtattatacctgaagaaccttagccctcgggtgactgaaag

SEQ ID NO: 531091 - DNA, 75 bp, Homo sapiens
ttgttaaggattccaagtaactcttatttggttcttgattattacagacctctttctgaaaagcccggaattggt

SEQ ID NO: 531092 - DNA, 80 bp, Homo sapiens
tgcagccgcagcctgtggctgtgcagggccccgagccggcccgggtcgaggttgaccagatgttcgccgccttcccccct

SEQ ID NO: 531093 - DNA, 75 bp, Homo sapiens
gcggaggaactgagacgtttcgaattccagccctaccacttatgtcttggatgaagatgaacctcgattccttga

SEQ ID NO: 531094 - DNA, 100 bp, Homo sapiens
tcagatgctcccttctgctcctgatttaatgtgtgccgaccatttccttcagtgctggacaggctgctgtgaagggacatcaccttttcgctttttccaa

SEQ ID NO: 531095 - DNA, 85 bp, Homo sapiens
gggcaagtttatacgggcaacaaaggatgtgtttggccaaatgggagagtggttacaacacacgagctacaaactacaatgctgg

SEQ ID NO: 531096 - DNA, 98 bp, Homo sapiens
ctggcgcggactctggcaccaacaaaactatctctttgagagggcaggtggagcagctggcaagggagcgtgacaaggcaaggcaggacctggagagg

SEQ ID NO: 531097 - DNA, 90 bp, Homo sapiens
ctccgccaggctccgcgggatgcaccgtggtagccgagggcggaggcgacactctcagggtcacgatcgtggagtaaactgggctgcctt

SEQ ID NO: 531098 - DNA, 100 bp, Homo sapiens
tttagggtcctttatatagaagggagaagatgcgacttgctctgttgtccagacttgagtgcagtagctcaatcatagctcactgcagccttgaattccg

SEQ ID NO: 531099 - DNA, 49 bp, Homo sapiens
cgcttttctttcaccttcacagagctcgtcgtcaaggtgcacatgaatg

SEQ ID NO: 531100 - DNA, 101 bp, Homo sapiens
agatgaagaagattgtggatgccgtgatcaagtacaaggacagaacaccttccaccatgaccacctcagcaagttcccacttaaataaaggcatcaagcag

SEQ ID NO: 531101 - DNA, 117 bp, Homo sapiens
ctctctggccctgctccctccgagcgctccgccgttgcccgcctggcccctacggtctctggatggtcgtcagatccgtgtggatcatgcaggcaagtctgctcggggaaccagagg

SEQ ID NO: 531102 - DNA, 75 bp, Homo sapiens
agttaaagaggaagtccctggacacagagtcactccagaaaaatggctacaaacttcctagcacatgagaagatc

SEQ ID NO: 531103 - DNA, 83 bp, Homo sapiens
aggaggtcctgccgtccatgcggaagatcgtcgccacctggatgctggaggcgtccgagctgggccacagcctgaacgagaac

SEQ ID NO: 531104 - DNA, 98 bp, Homo sapiens
aaaaagacagtgacgacaaaacaccagatgatgaccctgagcaaggaaaatctgaggacatttgaagacagtgatttgttccatttgattggtgttat

SEQ ID NO: 531105 - DNA, 100 bp, Homo sapiens
ggagccctttaccacaacaatgaagagaaaaataggctgccagcaaacagtcttccgcaggaaggagatgtggtgtcctgtggccaggcggaaagcagtg

SEQ ID NO: 531106 - DNA, 75 bp, Homo sapiens
ctcagttggaagcagccgatccagcctgcggagcctgtggggcaggggatcctcttggtgtatgacatcaccaac

SEQ ID NO: 531107 - DNA, 108 bp, Homo sapiens
ctatgactttgaaccagcgctcaagacggaggacctgctggcaacgttttctgagttccagggggtcctgtggagatccttcccttcctctacctcggcagtgcctac

SEQ ID NO: 531108 - DNA, 75 bp, Homo sapiens
atggaaagtctgtttggatgggctgaaatacttgggtcagcagggaaatgaggcaagttatcctttggaaatgtg

SEQ ID NO: 531109 - DNA, 100 bp, Homo sapiens
gaaataacaccaccagtggtcttaaggttgaagtgtggttcagggccagtgcatattagtggacagcacttagtagcgacagtgcccagggctctgatgt

SEQ ID NO: 531110 - DNA, 74 bp, Homo sapiens
ggacgggtcccgcggcgagcgagctcctgaggtgttggagagcacaatggctgaacaagtccttcctcaggctt

SEQ ID NO: 531111 - DNA, 124 bp, Homo sapiens
cctggggcagctgaactgagcgtatgtgccacgccgcccaggagacccctctgctgcaccacttcatggggctggctgtgggcaatggactctcctcctatgagcagaatgacaactccctggt

SEQ ID NO: 531112 - DNA, 100 bp, Homo sapiens
gagcactatggagtagcgcagggtctcgagctgtggccgtggacttaggcaacagacctgtcatttactccatcctttatagtgatgctacaggacgaag

SEQ ID NO: 531113 - DNA, 97 bp, Homo sapiens
tgtgtcttggcccatgggaaccacatggatctgcctgcaaaattctgtggcatctctggaatactacctgagaatttttgtgtgccatgtcgaagaa

SEQ ID NO: 531114 - DNA, 118 bp, Homo sapiens
ctcgctccgtggccttagctgtgctcgcgctactctctctttctggcctggaggctatccagccgccatcatgaccgggtcctataacaacttcttcaggatgtttgatagagacacg

SEQ ID NO: 531115 - DNA, 75 bp, Homo sapiens
tggcccatggacctgaaggagaagcacctgacccctcctcctgtagagagtggtgctgccctctcgggatgtacc

SEQ ID NO: 531116 - DNA, 119 bp, Homo sapiens
cgcgctggagcaggagcggggccggaactggagccgaggcgcaggtggcgctgggtgctggagaatctggtaaaagcaccattgtgaagcagatgaggatcctgcatgttaatgggttt

SEQ ID NO: 531117 - DNA, 50 bp, Homo sapiens
cacaggaaaaggagcttagctgctgaattatatccagatcgagagacaga

SEQ ID NO: 531118 - DNA, 100 bp, Homo sapiens
cgcctccagcttgccaccaaagacctgcgactttgctcaggatcacagtcaccttctatatagcaccatccccaggatgcaggagccggggcagattgtg

SEQ ID NO: 531119 - DNA, 97 bp, Homo sapiens
atatctctctaccgggggaattgcaggcccatacgatttgagccaccaatgctggatttccatgaacaatcaactcacaatgaaatggagaagaata

SEQ ID NO: 531120 - DNA, 88 bp, Homo sapiens
acggccagctctaagaattcctgctacgacactgaattcaaccaggagagtcgacttcaatgttcctatgaagaacaaccagataaca

SEQ ID NO: 531121 - DNA, 75 bp, Homo sapiens
cggaggggcgggggaggcgccgggaagtcgacggcgccggcggctcctggatttttagactctgaggagcagttg

SEQ ID NO: 531122 - DNA, 100 bp, Homo sapiens
atgaaatcttgactgccatccttgcctcgctcactgcacgccagaacctgaggagagaatggcatgccaggtggctagaggtgcaggtagctaatttaac

SEQ ID NO: 531123 - DNA, 96 bp, Homo sapiens
ttggggtctacctcctgtggtttttgattcaagtcctgttctacctactgccaattggaaagatcctccaggtcctattgacaatactaagattgc

SEQ ID NO: 531124 - DNA, 100 bp, Homo sapiens
ctgaaaaggaagttttctggaatggcaacaattgtgttaaatgaactcaactggacaagtgccttagatgaagttttcaaaaagaatcgcgaggaagacc

SEQ ID NO: 531125 - DNA, 99 bp, Homo sapiens
cgacggactctccattccagaaccatggcccaatttgtccgtaaccttgtggagaagaccccggcgctggtgaacgatggctccctaatgagtagaatg

SEQ ID NO: 531126 - DNA, 90 bp, Homo sapiens
tggatgggggtcaccgtccagagccaaggtccagggggcaaggtcgtggtcaataactgggagatggacaaactagagatggaagatgca

SEQ ID NO: 531127 - DNA, 82 bp, Homo sapiens
aagatgaagaagattgtggatgccgtgatcaagtacaaggacaggagcagctgatgagccagatccgggagacgcagcagct

SEQ ID NO: 531128 - DNA, 75 bp, Homo sapiens
gagtccgcatcgccacagctgaaggctgcgagggactaagagcagagaggaaatgagtctcaaccagacagccag

SEQ ID NO: 531129 - DNA, 83 bp, Homo sapiens
atttttattgaaagatgtattgagtacattgaagccacaggatctcgaggacctggaagaagcagaggagccagacatggagg

SEQ ID NO: 531130 - DNA, 75 bp, Homo sapiens
tatctataccacatcagcttcaaaaaggcacagcctttgcagcgagcagggcagcagtgctgagaccgctccaga

SEQ ID NO: 531131 - DNA, 100 bp, Homo sapiens
ccctaaaccatcagctattgaatgaccgggcgggtgccacgtctatgtgggcttcgtgctgtgggctgctgaatgaagtcatgggaactggagctgtcag

SEQ ID NO: 531132 - DNA, 75 bp, Homo sapiens
ctacctgtcgcctcagggccggcggtactatgtcaacacgaccaccaatgtttccgttactatggcaatgacggc

SEQ ID NO: 531133 - DNA, 50 bp, Homo sapiens
tcacctctcaccgcgcatgtttggaggcacccagtcagtcagagtcagag

SEQ ID NO: 531134 - DNA, 75 bp, Homo sapiens
ctaccatgtcagccttcccagtagctgggaccacagaaatacccgcagcccaaagggcagaagaagaagaagatc

SEQ ID NO: 531135 - DNA, 101 bp, Homo sapiens
gcagccgccctggagaaacagatcggatctatctggttcaatagatgacctccccatggggacagaaggagctctgagtcctggagtgagcacatcaggga

SEQ ID NO: 531136 - DNA, 100 bp, Homo sapiens
tgagttacccagactggggaagcggatgctatcaggcgggagcatccaatcaacttcgagagcgtaggccccacctatcgtgggtcgagttgcttggcgg

SEQ ID NO: 531137 - DNA, 80 bp, Homo sapiens
tgactactggggccagggaaccctggtcaccgtctcctcagatcaggatcctcatgaccagccaaagagaagaagaatta

SEQ ID NO: 531138 - DNA, 101 bp, Homo sapiens
atttactgtcatcaagaactgtaatacttctggaatccagacagaatgtcgacttatggctttgcaggaagatagaaaaaacaagaaatggaagaagcagg

SEQ ID NO: 531139 - DNA, 75 bp, Homo sapiens
ggctcctgtggctcctgctgggcactgcaacatggtgctggagaacgtgaaggagatgtggactgaggtacccaa

SEQ ID NO: 531140 - DNA, 87 bp, Homo sapiens
tgcagcttctcctcctccaagccaggctttacttccacctgggaatctggccagagaaggtagatcatggcaaccatagaagaaatt

SEQ ID NO: 531141 - DNA, 100 bp, Homo sapiens
acaatgcggagacatctgccagtggatctccagacactttactaccatcaggtcctggcattgatgtgcctgctccagacatgagcacaggtgagcggga

SEQ ID NO: 531142 - DNA, 100 bp, Homo sapiens
ttgttcatcgtgatttaaaagctgaaaatttacttctggatgccaatctgaatatcaaaatagcaggtggaaccgtcccaaaatgtcccttgctcagaag

SEQ ID NO: 531143 - DNA, 99 bp, Homo sapiens
ctgcgcgaagctggccaaagcctgcccagacggctcacctgtgcgggatggaacaaaagagtgttgcggagataggaacatgggagagaaacaatctgg

SEQ ID NO: 531144 - DNA, 51 bp, Homo sapiens
ggtctcaggttcctctgccaaagatgtggtgaagcagtattttccaatttg

SEQ ID NO: 531145 - DNA, 75 bp, Homo sapiens
agtgtatagggaaacctgggggctccctggacaactccgagcagacggagtctcactgtgttgcccaggctggag

SEQ ID NO: 531146 - DNA, 100 bp, Homo sapiens
gagtttcatgaagagcccaaaacctattacgaactcaaaagtcaaccgctgaagagcaggcacttcaggtggcaagacagctccttcttcagcagcaaca

SEQ ID NO: 531147 - DNA, 75 bp, Homo sapiens
atacatggagtctaaaggagcccatcgtgcgggtcttgcaaagcatggcagggggcttgagatattcctttttaa

SEQ ID NO: 531148 - DNA, 98 bp, Homo sapiens
cggggcgacgctggctgcagggacccggtgacagcgtgagaggagatggtaacctgcacctcaatgtgacggcggaggccttcagcccctcgctcctg

SEQ ID NO: 531149 - DNA, 99 bp, Homo sapiens
catcgagggggcgtccgtgggccgctgcgccgcctcaccctacctgcggccgctcacgctgcattaccgccaggtcctggactcggagcaggaccctgc

SEQ ID NO: 531150 - DNA, 74 bp, Homo sapiens
atgggcacagacgggacaaggaccgtaaacgatccagtgcagtgtgccctgaaccgccctgccttctttgctga

SEQ ID NO: 531151 - DNA, 89 bp, Homo sapiens
ggggatttctgctcacctggagaagggatggaaatacttcaacaagatttgtgacccagaaggaaatctctgacctcagctgtggctct

SEQ ID NO: 531152 - DNA, 49 bp, Homo sapiens
ccaacaaagtcaaggtccccctgcagctgggccccaacgtctccatcgg

SEQ ID NO: 531153 - DNA, 103 bp, Homo sapiens
gtggttcctgcatgaagacagtggctggcggtgcctggacgtacaaggaagacaaaggcgctttggctaagctggtggaagctatcaggaccaattacaatga

SEQ ID NO: 531154 - DNA, 51 bp, Homo sapiens
ctaccgggagctggtcaagaactggtcaatgagctgaaggagaaaggcaac

SEQ ID NO: 531155 - DNA, 82 bp, Homo sapiens
cctggccgcctgcatgcacagtggctttaagatcctcaactgccaaaaggcaatgggtttgtttgtaaaaacaatggtgtgt

SEQ ID NO: 531156 - DNA, 75 bp, Homo sapiens
tgcccgcatctatagtttccagatggctctaacctcagtgattagcctgaggcctgctcagtcgttcctaatgaa

SEQ ID NO: 531157 - DNA, 98 bp, Homo sapiens
gcgggctcatcttcaggctgctgctgcccatctgcctggcagtagcttatgttcctgaggaagaattgaaggcagcagaaatagatgaagagcacgtg

SEQ ID NO: 531158 - DNA, 100 bp, Homo sapiens
gaagaaagcctcctaccttgattgcatcagggccattgcgctatccgtggtcctgaaccagttatgtgtgttgcatgagaaaacgccagtaagtgacaga

SEQ ID NO: 531159 - DNA, 98 bp, Homo sapiens
caaattgtcgccattaagaaaataactggagtgccaaggctaaaagacgaaataccaccggaactggtcgaatgaggcacctaaaaattgtataccgc

SEQ ID NO: 531160 - DNA, 51 bp, Homo sapiens
atttgtttggatatcctgaaagatcaatgatggagtctagctctgtcgccc

SEQ ID NO: 531161 - DNA, 75 bp, Homo sapiens
aggtcaccctggagcttgctgtgtacaatgcagaggttgtggtaggaaccacaaggccagagacgctgcctggag

SEQ ID NO: 531162 - DNA, 75 bp, Homo sapiens
agctgagtggttgtgtggtcgcgtctcggaaaccggtagcgcttgcagcatggtcacgagaagagaatgccttct

SEQ ID NO: 531163 - DNA, 75 bp, Homo sapiens
ttcttcagaagctggtcgccgccggcaggagagtagttatcttgatggaattagaagttttgaagtcagctgaag

SEQ ID NO: 531164 - DNA, 100 bp, Homo sapiens
atgcccttcaatcagctgggcaccctggcaggcagcaagtactataatgtggaagccatgtattgctacctgcgctgatctcacattcttgaaggtggca

SEQ ID NO: 531165 - DNA, 73 bp, Homo sapiens
cgacagagcgagcgcggcgcggggccaccatgggggcccagctcagcacggcagctgttgaagacagagctgg

SEQ ID NO: 531166 - DNA, 107 bp, Homo sapiens
tggagcaggaagctgggaaaccacaaaggaatgaatggagatttacagacagtcatctgggtggaggacacccttttgggatcagcactgaaagtgacgccatatcc

SEQ ID NO: 531167 - DNA, 100 bp, Homo sapiens
tttttattacaagactacggagcataggaggaaaattcatcatctggactgttaaagattcactccagtcagtccagtccgcagcaggccgtcctgacga

SEQ ID NO: 531168 - DNA, 50 bp, Homo sapiens
cgtcacctggagagatgcacagacagtggtggccttccagaaaggtcctg

SEQ ID NO: 531169 - DNA, 75 bp, Homo sapiens
ccggctctggtgctcccagaagagatgtgtggagttggctgttacgacatccctgtgtgatcccagaggaggggc

SEQ ID NO: 531170 - DNA, 100 bp, Homo sapiens
gtgcggacgggctgtgggagctgccggtggagccggccgagcggaggcctgagtgcacccgctgcagatggaatcttgctctcttgctcagactggagtg

SEQ ID NO: 531171 - DNA, 75 bp, Homo sapiens
aaaattaggaagactgaaaggcaaggccatttaaatgtctgcaagctttcttcctggtggcagatgacatcatgg

SEQ ID NO: 531172 - DNA, 74 bp, Homo sapiens
tcaacagagtgatggagaaaggttcgaatttttccctagattggtgtaaacagccagacgtgggccttcccaaa

SEQ ID NO: 531173 - DNA, 98 bp, Homo sapiens
gagaagcatgggaaggaggccgagccgggatctcaggtcctcgggggcggcggccacgccaaggacggttgctgatagtccaactccaccgccaccac

SEQ ID NO: 531174 - DNA, 50 bp, Homo sapiens
ccgaaggttcaattatgtggtcaaacaatcatcctcttccagtggtagcg

SEQ ID NO: 531175 - DNA, 75 bp, Homo sapiens
gcctttttgacagcttccgccgggactgcctggccgacgtggacaccaagtccgggaccatgtctggagaactac

SEQ ID NO: 531176 - DNA, 101 bp, Homo sapiens
gggggagctgcaggaggaaggtgctgtggggggaggcatgtgatgtgaatcagctgacatcatcttgacgggagccctgtgaggcggacacttaactccag

SEQ ID NO: 531177 - DNA, 82 bp, Homo sapiens
gtgtgcgcgagcgccgcagtctgctctccccgcccgcggcccgtgcaggttcgggtctggcggtacttgaagggcaaagacc

SEQ ID NO: 531178 - DNA, 98 bp, Homo sapiens
aaatgatcagaaaaagaaagaagccaaagagaaaggtacctgggttcaactaaagcgccagcgatctattgggcttcctgatgtccattcaggatatg

SEQ ID NO: 531179 - DNA, 100 bp, Homo sapiens
acatggccaacatcgcggtgcagcgaatcaagcgggagttcaaggaggtgctgaagagcgaggaggtcctcagaatggttggaatgaccctccagctttg

SEQ ID NO: 531180 - DNA, 97 bp, Homo sapiens
ttggcgagaaggtgtgcatggatctgccaaattttatatttcagatttgtggaaggcaatgaatcgctccctggctaatgtgattcttggaggctat

SEQ ID NO: 531181 - DNA, 100 bp, Homo sapiens
cgactgcagcgggtccggtgcaggtgaggggcgcgcgcctgcccagctttgcagcccccgaacgcggcctcgcacagcatcagacaacagtcagcgcttt

SEQ ID NO: 531182 - DNA, 75 bp, Homo sapiens
gcggagaggagatgcacacggcactcgagtgtgagtgccgcagtgtgtctggagaataaatgtggatatccctga

SEQ ID NO: 531183 - DNA, 100 bp, Homo sapiens
gaggtgcctggggcaacctccaccttgacggttccagcttgttcagattattatcaatacaacacatttggagaaatcctgtaagtacttggaagaattt

SEQ ID NO: 531184 - DNA, 100 bp, Homo sapiens
tccgaggaagctaaggccgcgttggggtgagaccctcacttcatccggactcaggacggggagacagccctccagctggccatcagaaaccagcttccac

SEQ ID NO: 531185 - DNA, 100 bp, Homo sapiens
gctccccctctgcctcctaggaacgccgggaaaggagcttgaagaaatccgcaaatgtgggatgaaaaacttccgtaacatccaggttgatgaagctaat

SEQ ID NO: 531186 - DNA, 83 bp, Homo sapiens
ccgccttttgaggacggcactccccggaggagaactacgatgacccgcacaaaacccctgcctccccagttgtccacatcagg

SEQ ID NO: 531187 - DNA, 101 bp, Homo sapiens
ctggcaccaaagagggcatcgagaaagctcgccatgaagtcttactcatctctgccgagcaggacttggacgaggacgactttgacgtggggaagccgaag

SEQ ID NO: 531188 - DNA, 97 bp, Homo sapiens
tgggagccatcttccagctcatctgtgtgctggccatcatcgtacccattcccaagtcccacgaggcgattgaaagtatccagctgatgatggacag

SEQ ID NO: 531189 - DNA, 83 bp, Homo sapiens
gtcatctccgcggtgtcgaggctctccctgcacagcatcgcgcagaacaaagggatcagacaatgcagatcttcgtgaagact

SEQ ID NO: 531190 - DNA, 113 bp, Homo sapiens
tccaactctgcaaaatggcccctaccaagctgcagaaaagcatttcatctttttggagggaagcaggctgctttagatccattcatactgttgaaccttctgccaaactcaac

SEQ ID NO: 531191 - DNA, 80 bp, Homo sapiens
ttggaagcagccgatccagcctgcggagcctgtggggcagttgccgaacaagcaaccggaaaagcttaataggcaatggg

SEQ ID NO: 531192 - DNA, 75 bp, Homo sapiens
cacacatgaagaacacacagcggtggaaaagttactccacaggatccgctgaacataggatgttgccacaaaatc

SEQ ID NO: 531193 - DNA, 98 bp, Homo sapiens
cgaaggtggcggcgctgctgctcgggctgctcttggaggctaccggctctctgaccagttccacgacatcctcattcgaaagtttgacaggcagggac

SEQ ID NO: 531194 - DNA, 95 bp, Homo sapiens
cgcggccgccgaagaggagcccggggccagatggcatccacagcgtcacggccttctgcaccctgcgtgtcaccatcatcacggacgacatgctg

SEQ ID NO: 531195 - DNA, 74 bp, Homo sapiens
gtcaaaaaacactccaacgattgagatcatttaaagatggtccagattcccactatggcacaaaaggattgaag

SEQ ID NO: 531196 - DNA, 90 bp, Homo sapiens
cagcatttcatccctcgtcgaaaggattggattggcatctttagagaacacatgattctgtgcagatttgcagaccagacagctgtccag

SEQ ID NO: 531197 - DNA, 74 bp, Homo sapiens
gatcagttacacaaccaatgcatttcctggagaatatatccctactgtgaacgatttgtaaccctggaccgcgg

SEQ ID NO: 531198 - DNA, 100 bp, Homo sapiens
taagcacccacgtgtcaggctttgtggtgtctgtggtatcatccgaccgtttggactggtgaggactgacaaatggtagtggtcgatatatctctgcagc

SEQ ID NO: 531199 - DNA, 75 bp, Homo sapiens
ggacctccaaggaagccacgtgcagacatctacaaccttcgatctcctgacgagccattctcaagcacaacctgg

SEQ ID NO: 531200 - DNA, 100 bp, Homo sapiens
ctatgagaggtttggactgccaggctgggctgtggcttcaagacagtgtactgaggccctaattgtgtgtgaacaagacgtttccagaatgcgtcggcaa

SEQ ID NO: 531201 - DNA, 152 bp, Homo sapiens
tttggaaaataattctgaaactggagagttacagcctgtactacctgaaggagcttcagctgcccctgaagaagagttatggagtggctgccagcaagagacagtgttcagatgtggatgatatttgttcaatatgtcaagctgaatttcag

SEQ ID NO: 531202 - DNA, 100 bp, Homo sapiens
ggaagttacacgaggttggtcatgaaagagattccttgcagagacagctcaacacggcacttccacagaataatcatgggccagactgggaagaaatctg

SEQ ID NO: 531203 - DNA, 83 bp, Homo sapiens
gccttctctgtcagctctttccccgtcagcatcccagccgtgctcacgctgagctgactgctgcccactttggaggaggcggt

SEQ ID NO: 531204 - DNA, 100 bp, Homo sapiens
ccggcctgtctgccgcgatggatgacagtaagaaggtgcttcctggaggggcctgccccactgttcctgtgctgagttccaggacagcctcaacttcagc

SEQ ID NO: 531205 - DNA, 96 bp, Homo sapiens
agaacacaagattaatcaatgtcaactgacagtgtgacaccatcgccacaacaggctcgggtctgtcctccccatatgttacctgaagatggagct

SEQ ID NO: 531206 - DNA, 50 bp, Homo sapiens
tactggcctgctgctggcccgcagggaatttttcacagacaacctatggg

SEQ ID NO: 531207 - DNA, 75 bp, Homo sapiens
gcttttggaataaaaagattcccaggatgtgagcaacacgggaccggtgaaagaagaacgtccagaaaaaatacc

SEQ ID NO: 531208 - DNA, 100 bp, Homo sapiens
aacaagttcttggcaagagaggcatcctccttgaagtatttggctgaggagttttcaatcccaattgggtaactcaaggcgtccctggagtacactgagg

SEQ ID NO: 531209 - DNA, 80 bp, Homo sapiens
gactgcccagagtccgcggccggggcgcgggaggaaattgacaatggcccttcagctatgctaggtctataatgggaagt

SEQ ID NO: 531210 - DNA, 100 bp, Homo sapiens
atatgctatgccaagctcagccccgaagtgcttcagatgtagaggcacggaatgttaacactggtgaattagcagcaattaaagtaataaaattggaacc

SEQ ID NO: 531211 - DNA, 51 bp, Homo sapiens
gtctccattactttgaacttttgaaggttacattgattacccacctagtac

SEQ ID NO: 531212 - DNA, 50 bp, Homo sapiens
aaaacaccagtttgatcatggagagggtctcactctgtcgcccaggctgg

SEQ ID NO: 531213 - DNA, 83 bp, Homo sapiens
ccgagggtcaacgagaaagagatcgaacatggcagagaagtttctggatggagaacttcctctggattccttcattgatgtct

SEQ ID NO: 531214 - DNA, 75 bp, Homo sapiens
tggacaggaaggtgcaggccctgaagatggcgtttaatgattgcttcagtttgaactaccctggcaacccctgcc

SEQ ID NO: 531215 - DNA, 100 bp, Homo sapiens
atttatgaagttttaaaggatgatgaacgaaggcagaggtacaaacccgtagtgctgatgaaccaatgacaacatttgttgtctgtaatgaatgtggaaa

SEQ ID NO: 531216 - DNA, 101 bp, Homo sapiens
tgctgctgccgctgctgggcgttggatgttgatggacagatagactctattcatctactcctgtcaccaagacaggtgcacttgcttttggatatgttggc

SEQ ID NO: 531217 - DNA, 82 bp, Homo sapiens
cttaaggtcttcagcggggcgctccaggaggcactcacagatatgtgtcacaaagatgtctacacggaactgccagggaatg

SEQ ID NO: 531218 - DNA, 100 bp, Homo sapiens
ccttgtctctcttgttcactgggtgtatcctctgcatatagaacagtgcctggcacataataggtgctgagccatttcataattctgaatcatgtctgat

SEQ ID NO: 531219 - DNA, 74 bp, Homo sapiens
ggcctgtgccaggatggtgggcagctgttgtactatcatgagccctggtggtggaagatggatatgaatttttt

SEQ ID NO: 531220 - DNA, 75 bp, Homo sapiens
cggcgctttccccgcaagatggacggtttcgccggcagtctcggagaagttgccccagtgcaaggcactgcattc

SEQ ID NO: 531221 - DNA, 82 bp, Homo sapiens
gccgccgccgccgccgccgcccggaccccggcgcgctgaatgcaggtgcgcgcggagccatggttatcatgtcggagttcag

SEQ ID NO: 531222 - DNA, 87 bp, Homo sapiens
gagcggcggtcaggaccgcccgcgtcctactgcgccaagctctgcgagccgcagactctcagcgttctcatctctcttccttcacca

SEQ ID NO: 531223 - DNA, 95 bp, Homo sapiens
cagcgtgggcctgacccgcatcctgcctcacctctacctgggctcgcagaaggacgtcctaaacaaggtaaagagaaatgtgtatgaccttacaa

SEQ ID NO: 531224 - DNA, 100 bp, Homo sapiens
ctgtgtttggaagcctccctccagctggtcaagcctcgttccaggcccagccaactcctgcagacacgaagggcctgtatttccaggcatttggaggccg

SEQ ID NO: 531225 - DNA, 83 bp, Homo sapiens
ctctgatccgcaagcatgctcagaccttcattgctctgtgtgccaccggtaaatacggcatcatctgcatggaggatttgatt

SEQ ID NO: 531226 - DNA, 75 bp, Homo sapiens
gcccacgtcccatttcgcccctcgcgtccggagtccccgtggccaggactccagaagacctttccagattcgtgg

SEQ ID NO: 531227 - DNA, 100 bp, Homo sapiens
cgagatttgcgacagcaagggggttgtccacgaggaacaaattgtacatttgcccattctcaggaagagcttgaaaaaaattacagaagacatccccgtg

SEQ ID NO: 531228 - DNA, 75 bp, Homo sapiens
ccccgggacacgcaggaacggctccagcatcaagatccgtctgacagggtacctggggaggatgcaggtctccac

SEQ ID NO: 531229 - DNA, 100 bp, Homo sapiens
cgctttcaaggctgcgctggcctgcgtgggagatgaactgagcgccaatggacaatatcaatgtcttgctgaactgtccaccagccccatcacagtctgt

SEQ ID NO: 531230 - DNA, 97 bp, Homo sapiens
agcagccggccttcgggtcgggcgtctccgccggctactgccgcttcagttctcccggtgtggccacgagtcggcatcatggcagaacaggatgtgg

SEQ ID NO: 531231 - DNA, 96 bp, Homo sapiens
cggtgaagccccagcgccgggccaaggccaaggccagccggactaaaacaaaggttaaaaggacaactctggtggatagcagaacatctgttactg

SEQ ID NO: 531232 - DNA, 76 bp, Homo sapiens
aagaggtgaagaaagagctgaactctcggaagaactggttgttaaagagcacctctgccttcttcctctgttgcca

SEQ ID NO: 531233 - DNA, 82 bp, Homo sapiens
ccgtccttctccactttcgccagcccgtgccgcgagcgcggcctgcaggaggtgagcatgggtttatgcgtcttaggcatta

SEQ ID NO: 531234 - DNA, 75 bp, Homo sapiens
ggcgactccctcaccgagtacgaagcgggcgtttgcgaaggaccgcagctgaatgcacagctagaaggttggctt

SEQ ID NO: 531235 - DNA, 88 bp, Homo sapiens
gtgctcctcgcttgcctgttccttttccacgcattttccaggataactgtgactccagaatttttccctagattggtgtaaacagcca

SEQ ID NO: 531236 - DNA, 75 bp, Homo sapiens
aagacatttcttcggcattctgcaacaggggaaagctctggcaatttaaatgacccaaataaggaggcactggct

SEQ ID NO: 531237 - DNA, 75 bp, Homo sapiens
gcttgatggatttactctggaaagaagctggtttggatcttcgccatgttcttctggactcggtaatagcaattc

SEQ ID NO: 531238 - DNA, 83 bp, Homo sapiens
cgggagggagacggctgttgtaaaatggtagctacagcaagctgggtagcaggcagatccaaaggatatcatgaagtttccag

SEQ ID NO: 531239 - DNA, 101 bp, Homo sapiens
tctcgctgggacccgcactgacagcgggaggcagagggaggaacctggacgccggaagccgggaaatgaaattttatgggagagagactctttgagagtgc

SEQ ID NO: 531240 - DNA, 50 bp, Homo sapiens
agcaatatctctgggctttcacaggagaaagaattgtgccatgaaaaatg

SEQ ID NO: 531241 - DNA, 98 bp, Homo sapiens
taacctatgcacttgtggaatgagagaaccgaggaacgaagaaacagacattcaacatgattgcatttgaaaccattcctcaagaattttgtatccaa

SEQ ID NO: 531242 - DNA, 75 bp, Homo sapiens
tggtgaattctatagccaagacgtatgttggaacaaatgcttatatggcgagaacgtttgtctgcctgatgagag

SEQ ID NO: 531243 - DNA, 85 bp, Homo sapiens
tattgttattttcccaatttttgctatactcctgttctggggacagtttggtattaaaaactatggaaatgatgttagacaaaaa

SEQ ID NO: 531244 - DNA, 83 bp, Homo sapiens
cacgtgtttgcggttcagccctttgatgaccgcagcagaaggcaattctcaagttcaactactcagtgcaggaggagagcgac

SEQ ID NO: 531245 - DNA, 80 bp, Homo sapiens
ccgcgcgcagggcctgcagcgggagctggacggcgagcgcgagcggcgcgagaaaagaaagatgctggtttcgagttttg

SEQ ID NO: 531246 - DNA, 100 bp, Homo sapiens
tcaatggcaaggctaaagaaattaatgacaataatggatagtatgaatgatcaaggatgatggcttggaaaaaagtccaatgaaaaaaaaacagaagaag

SEQ ID NO: 531247 - DNA, 75 bp, Homo sapiens
tgagaccatagccaaacccccaggtgaccattgtgaggtagatattttgttctaattttccagatgaggaagctg

SEQ ID NO: 531248 - DNA, 100 bp, Homo sapiens
caaagatttatttctcttgacaaccaagggcctccgtctggatttccaaggaagaatttcctctgaagcaccggttctgcggggagtgtctccagccctg

SEQ ID NO: 531249 - DNA, 75 bp, Homo sapiens
gctgccccggctgcctcctccctgagtggtgtgtggttgactctgtttctcgccatgtcttctcacaagactttc

SEQ ID NO: 531250 - DNA, 96 bp, Homo sapiens
ggacaccccagaagttagcatcagtgggactcggaagctccgatctcaacaagcgccatgtcagaaccggctggggatgtccgtcagaacccatgc

SEQ ID NO: 531251 - DNA, 74 bp, Homo sapiens
tatggtgagagagaggagtgcatcaaagattactcccaggtttgacagatacataccgagcatcaaatattaag

SEQ ID NO: 531252 - DNA, 100 bp, Homo sapiens
gaccttgcatactgtctcaatgatggcgagtgctttgtgatcgaaaccctgaccggatcccataaacactgtcgaggcgacaggaagaagggtattacag

SEQ ID NO: 531253 - DNA, 87 bp, Homo sapiens
gcagggcagataagccgtggacccgcctcaccgctgcagacaaaggtgtccgcaatgttgccagtgtctgtctgcagattggctacc

SEQ ID NO: 531254 - DNA, 83 bp, Homo sapiens
gagacaacaccgagtatgagaagaagctgcagtaaaggaagatgaagaagaagtttcagataagggcagtgattctgaagaag

SEQ ID NO: 531255 - DNA, 85 bp, Homo sapiens
ttgttgtcgtctcctctctggctgaactgataaatttcaaacggaagagagtggcagcatttagaaagaatctaattgaaatgtc

SEQ ID NO: 531256 - DNA, 97 bp, Homo sapiens
ggtactaggccccctgaatgtacccaaacctgcgctagagtccatgagtgtgaccatccagtgagaaagatcagtctaaagaaaaggagaagaaagt

SEQ ID NO: 531257 - DNA, 102 bp, Homo sapiens
aagaagaggatgatgaaatgtgcttgctcctcagctctgctgttttgtgcaaattcgaccatggaacctaagtgacagtgactttgtaatggatggttctca

SEQ ID NO: 531258 - DNA, 98 bp, Homo sapiens
tacagagttatcaggttccagaccctgccttctcttctgaaagcgtgcaaacgcaaagagcaagaaccaaacaaagacaggaacaattcccagaagaa

SEQ ID NO: 531259 - DNA, 100 bp, Homo sapiens
acagtgacgaagagaactgtctcctggtgaccgagcacccgcctccgggcatcttcaactgttctttcatgctggtgaatgcctctgggagacctgaggg

SEQ ID NO: 531260 - DNA, 83 bp, Homo sapiens
atatttccagcttgcctgctgatgcagacagaacagaagactttgaatatgaggcacagtctcactctcttacccaatctgga

SEQ ID NO: 531261 - DNA, 90 bp, Homo sapiens
tgttaaggattccaagtaactcttatttgtgtgtgctgacttgataagaggcgcaaaagaaaagaatctcaaagtgaaaggaccagttcg

SEQ ID NO: 531262 - DNA, 98 bp, Homo sapiens
agtgaatcatcaccaggctgcttactggaaactggatgcagcaaggaaataggatttaaccgctctctgcctcccagatgcttcaggactgccccaag

SEQ ID NO: 531263 - DNA, 96 bp, Homo sapiens
ccacagctgatgacaaaaagcttcagagttctctaaaaaaactggctgtgaataatatagctggtattgaagaggaagaggagttgtacgcatgtc

SEQ ID NO: 531264 - DNA, 75 bp, Homo sapiens
gtcagactctcccgcgcctcctggcccgcaggccggacccccttctaggagtggaatgttggctgtccgtgaaaa

SEQ ID NO: 531265 - DNA, 133 bp, Homo sapiens
atcgcgcactttttggatcggcatctagtctttccgcttcttgaatttctctctgtaaaggagaaactaattctgaagcaagcccttatagttgtgctgcagtggtgtttcaatcacaattttagtgttcgac

SEQ ID NO: 531266 - DNA, 88 bp, Homo sapiens
gatgatccacaggatgctgtagtagcaaatcaggtagctacagcaagctgggtagcaggcagatccaaaggatatcatgaagtttcca

SEQ ID NO: 531267 - DNA, 75 bp, Homo sapiens
cgccctgcgtggagccgccgccggccacccgggctgtgcagtctgtgaacgtgacccacgatgcagtgcatgcac

SEQ ID NO: 531268 - DNA, 98 bp, Homo sapiens
aacaatggcatttacagaaagagtcaacagcagtggcaacagatgctggcccgcgagagacattgatgcattttgctgtgcggctgggactgctgagg

SEQ ID NO: 531269 - DNA, 82 bp, Homo sapiens
tgtaggaaaacaagctcagggctcccagtgattctacattatggaattgattcggaaggccatgcagctaactttgtagaaa

SEQ ID NO: 531270 - DNA, 75 bp, Homo sapiens
gaagatcctggaggtggatctgaagaacgggactagaaggctgggaaaaaaggcttattatatctgacagagctc

SEQ ID NO: 531271 - DNA, 97 bp, Homo sapiens
ttttggttggtgattttgatgatagccacaaagcaagcaggggaccactgacatttagggatgtggccatagaattctctctggaggagtggcaatg

SEQ ID NO: 531272 - DNA, 83 bp, Homo sapiens
aaagagggactgccataacattcccaaaggtaatgcgatggagataagtacgaggatgtcgtccaggaaagattgtgcagatg

SEQ ID NO: 531273 - DNA, 48 bp, Homo sapiens
cgccatgacaaaagggtttacttgggataatgcaatagaagctgtgga

SEQ ID NO: 531274 - DNA, 78 bp, Homo sapiens
agcgtgaccgagagcgcgaatatcgtcatcgttagaaggaagcacctccaggagattccagacctgagtagcaacgtt

SEQ ID NO: 531275 - DNA, 101 bp, Homo sapiens
aactggaccatccggaagctgtgccacgcagcctttcttccatctgtcagacttctgaagttgcaccaactatcacatttctcgaatctccaacctcagac

SEQ ID NO: 531276 - DNA, 99 bp, Homo sapiens
tgaaccctgaagtcggtgtctgctgcgttcacggcaggattcggttagacaggggcaagtgtccgagtggtgaatcagctacttacagagatggatggt

SEQ ID NO: 531277 - DNA, 100 bp, Homo sapiens
gactggctacacctacatccttcccaagaatgtgcttaagaagttcatctgcatatctgaccttcgggcccaagacagagcgggatgccaccagcttgtc

SEQ ID NO: 531278 - DNA, 98 bp, Homo sapiens
gccggaggccattgagctgtgcacgaccacaccgctgatgaagacaaggactcacagtggctgcaaggcatcaccaaatcggcccccctgagagtgtc

SEQ ID NO: 531279 - DNA, 75 bp, Homo sapiens
ggagacgtcggttgagcggcggcgaacatgcgcttttgacacattggaggtttctagaccaactggggagattcc

SEQ ID NO: 531280 - DNA, 100 bp, Homo sapiens
gaaagagccctggatggttgtaaggaaagaaacaagcagacggtatccaggccctacatggacgcggtcgtctccctggtcactctcatgttggacacgg

SEQ ID NO: 531281 - DNA, 100 bp, Homo sapiens
agcggcagcagcagcggtagctgcccaaggagttgttgacctcctgtactggagagacattaagaagactggagtggtgtttggtgccagcctattcctg

SEQ ID NO: 531282 - DNA, 100 bp, Homo sapiens
caacaaccgtggctcacaagatgaaagagcacatccagacatttaatgtggatgcaccatgccagaccgtggaagatttaacgaatggggttgtgatggc

SEQ ID NO: 531283 - DNA, 97 bp, Homo sapiens
ccagcagccgccatggctctgctccgagtctcaaaccatgaattatgtgggacagctggctgggcaggtgattgtcactgtgaaggaactctacaag

SEQ ID NO: 531284 - DNA, 74 bp, Homo sapiens
tggaggctgtatacgaacggctctgcggcgaggagaacccaagcaaacctcactttaatcactacatgtttgaa

SEQ ID NO: 531285 - DNA, 101 bp, Homo sapiens
caagatcagcaaatctaactgaccaggttgatgataattagaagcatgctttccactgaacttcccgacaacatttgttatgcagaatgtctctgagtgag

SEQ ID NO: 531286 - DNA, 100 bp, Homo sapiens
tgatgctttatctcagtttcatgctgccgtaggcattttgttcccaacatcacctttggtcaccctgtggtagaaagccttcgaaagcagctaggccagg

SEQ ID NO: 531287 - DNA, 83 bp, Homo sapiens
tttacactggaactggacaggagctgtctgaggtgctttggaccatggtgatccacatcggcctgagcgtgaagagcttggcg

SEQ ID NO: 531288 - DNA, 100 bp, Homo sapiens
ccggattttgcggggttcgtcgggcctgtggaagaagcgccgcgcacggacttcggcagagtaagactttgaccccgacgcaggcttcagtgattgccgc

SEQ ID NO: 531289 - DNA, 98 bp, Homo sapiens
cgagctccagccgaaggagaaggggggtatgctgccccacaaaaccaagcgaggccaggccgctctggaccgtctcaaggtgtttgacggcatcccac

SEQ ID NO: 531290 - DNA, 99 bp, Homo sapiens
gtccccgccatgctgtctctagactttttggacgatgtgcggcggatgaacaagcggcaggacttcgtcttctatgctccccggctgcggattaacaag

SEQ ID NO: 531291 - DNA, 75 bp, Homo sapiens
ttatggtagaacttccttggaacaaaagtacaactggttataagcacatgtccttggccctgaataggactggca

SEQ ID NO: 531292 - DNA, 106 bp, Homo sapiens
cctgaggcctccccagccatgcagaactgtcctccacttcttccaccttggctacccctgagatagcaagaccaatccttcctcttcttcctccttctcagtctac

SEQ ID NO: 531293 - DNA, 100 bp, Homo sapiens
cggcagcatctcgctctcggagccggcgcaggtgctggagaatctggtaaaagcaccattgtgaagcagatgaggatcctgcatgttaatgggtttaatg

SEQ ID NO: 531294 - DNA, 83 bp, Homo sapiens
agccctgggaaatgcacagaaattgccaaaagggcaggctgtccctgcaggatcccacgtacggctgaatcttcagactgggg

SEQ ID NO: 531295 - DNA, 51 bp, Homo sapiens
gctgtttctcatctttatactcttccagggcgaagctgtgctcaggcccgg

SEQ ID NO: 531296 - DNA, 75 bp, Homo sapiens
aacacgatcccggggctcaagtggcttaacaaggaacttagtgatttggcccgtgaccctccagcacaatgttct

SEQ ID NO: 531297 - DNA, 74 bp, Homo sapiens
gcgctgtgtccccaagctccccgtcctcgggttgctccgactgtgtgttccaggagtggtggctctgaggtgtg

SEQ ID NO: 531298 - DNA, 100 bp, Homo sapiens
tgccttgtgggatctgagaaatctgaaacttaagttgcattcctttgagtcacataaggatgaaatattccaggaacaggagtacagctgtgtagtaaag

SEQ ID NO: 531299 - DNA, 80 bp, Homo sapiens
tcaggatctggatgctgcctgtgatcctgccctgactgccatgagcaagggtggcccttgggtagggtgaagatcccctg

SEQ ID NO: 531300 - DNA, 96 bp, Homo sapiens
cggcgcctcggccggggcgctcacggccacggcgctggtcaccggggtctgcctgggtgcaggagaacccggggaggaggcccaggctctgctgga

SEQ ID NO: 531301 - DNA, 98 bp, Homo sapiens
aaaacaagaaggacaactagccctcctactgatgaacagttgaacatgaagaatactggaaagttgctatgttttgacggagtcttgctctgtcaccc

SEQ ID NO: 531302 - DNA, 89 bp, Homo sapiens
cggcaggagggaagtgagaagcccaactaaagccccacatttgcagctcattgaaggaaagtctctaggtaacaggagaattcgagtgg

SEQ ID NO: 531303 - DNA, 75 bp, Homo sapiens
ccgcagaagcttattaaagttaagagagaaaaggaacagttccgtaagctctttattggtggcttaagctttgaa

SEQ ID NO: 531304 - DNA, 100 bp, Homo sapiens
tggaaaccaagttaatcgaaaagttctcaattttgaacaagctatcaagacagtacaatgtagattataaactggagacttacttgaagattgctaggct

SEQ ID NO: 531305 - DNA, 51 bp, Homo sapiens
aaggctattggatcagctcagcaggaaccccgagatgcccctgtccttcac

SEQ ID NO: 531306 - DNA, 97 bp, Homo sapiens
ttggatgaattgcttgctttggaggcttttaaggataccggaaaaacacccgtggagccggaggtggcaattcaccgaattcgaatcaccctaacaa

SEQ ID NO: 531307 - DNA, 55 bp, Homo sapiens
acccaccgctgccgaaatgaagtataagaaggaagaggcccagcagaagggactc

SEQ ID NO: 531308 - DNA, 73 bp, Homo sapiens
ctcacggagagcacctaccggctttctctcctttgaaaacactaagaataatgtcactgcatcagtttttact

SEQ ID NO: 531309 - DNA, 51 bp, Homo sapiens
gggactccctggaaacctagaaatggggaaggtgtggctcattgactttaa

SEQ ID NO: 531310 - DNA, 100 bp, Homo sapiens
ctgaagaagtggctgtagggagcatagctgctacactgaagatgaagcaaggcccaatgacccaggcggagatgttgcagtaaagatcctaaaggttgtc

SEQ ID NO: 531311 - DNA, 82 bp, Homo sapiens
gcccaccctggccattgcgtatttcacaggagatgcacaaaagggagatataatggatactttgcttggatccaagtcaaac

SEQ ID NO: 531312 - DNA, 74 bp, Homo sapiens
tcagatgttcattcatctggatcttcagatgcacatacatctttccaggaacagcgtgaggaggacagaagcac

SEQ ID NO: 531313 - DNA, 83 bp, Homo sapiens
catccataccaaggagacgctgacacttgtgtttgaatatgtgcgtttggcaacatattgactgcatggggattgataggcag

SEQ ID NO: 531314 - DNA, 78 bp, Homo sapiens
aaccagggggaattcaaagagctggtgcgaaaagatctgcaaaattttctcaagagtttcactcttattgcccaggct

SEQ ID NO: 531315 - DNA, 98 bp, Homo sapiens
tcatcttggctgagaactgcgaggctgccctggctcttcatctctataggggaggcaggcttttgcaaggatgctcgtcagaagttccgctctgttct

SEQ ID NO: 531316 - DNA, 100 bp, Homo sapiens
acacctcctcggaagtcggcatctctctccaacctgcattctgttgctgtgagtctaggtactccaattatgaagccagaatggatttataaagcttggg

SEQ ID NO: 531317 - DNA, 90 bp, Homo sapiens
agccagggtggacatcatggagagacagtctcatgattataactggtccttcaagctggaggcaaagctggaaaggacagtgggaaggcc

SEQ ID NO: 531318 - DNA, 74 bp, Homo sapiens
caggactcccgacttgacacgatattttttgctaagcagggtggttctcttcccaaagtggaagccaaattcat

SEQ ID NO: 531319 - DNA, 90 bp, Homo sapiens
ggacagaggtgcctggggcaacctccaccttgacggttccagtgagaagaggggatgtcctggcagcatggagtggaatccgtcctcttg

SEQ ID NO: 531320 - DNA, 100 bp, Homo sapiens
ccagccttgagcatgaagctgagatggacctgggaactccaacatatgatgaaaaccccatgaagattggggaccacaaattcagtgcccaccggattgt

SEQ ID NO: 531321 - DNA, 100 bp, Homo sapiens
tttttccctgtggctcagcccgttcgctggactgcaaaccgagctcccgtctgccttgcaggatcaggagaaggtctggggaaaataatccagagatttc

SEQ ID NO: 531322 - DNA, 100 bp, Homo sapiens
tcaggccgccatgcgggacaggacccacgagctgagacaggtgtgtgcagtggcctcagggatccggaaagtctaggactgaacttctcctaacatccag

SEQ ID NO: 531323 - DNA, 90 bp, Homo sapiens
ggggtttccggctgcagggcggtaaggatttcaacatgcctctgacaatctctagtgttttgagcaaaattttggactgtgaagcaaggc

SEQ ID NO: 531324 - DNA, 83 bp, Homo sapiens
ctggttcagcggagaataacatatcttcagaatggacagcaaattatggatgaacctatgggagaggaggagattaacccaca

SEQ ID NO: 531325 - DNA, 101 bp, Homo sapiens
agatcagcaggacgctgcgcacaacatgggcaaccacctgccgctcctgcctggcctatcatggtcaccatcaagcactggaagtgttggtacagtctttg

SEQ ID NO: 531326 - DNA, 98 bp, Homo sapiens
tcttctctggactccttagatgactctgtggtgggtccctcagcccttctgagctctgtgctgaacaaggccggatcacctcaacagtcacgtcagac

SEQ ID NO: 531327 - DNA, 111 bp, Homo sapiens
gaaaatcggtgaagagaggttttgaattcacgcttatggtagtgggaaacccagcgtttgctggcagaaccagttcctggcatcaaagccgaaccagatgagagcaacgcc

SEQ ID NO: 531328 - DNA, 100 bp, Homo sapiens
gcggaacagcaggcccgagcccaccgcgccgggccccggacgccgcgcggaaaagccataccggctctgcagcccatagtccacgacctctttgtattaa

SEQ ID NO: 531329 - DNA, 100 bp, Homo sapiens
tgaaagacagaaaaaaggagtttgaggagctcattgactccaaccacgacggcatcgtgaccgccgaggagctggagggtgattctgggggtccacttgt

SEQ ID NO: 531330 - DNA, 75 bp, Homo sapiens
ctgcaggacttggtccgcggcatccgtaaccacaaggaggacgagatcatcgtgttcctgtgttacggggcccgc

SEQ ID NO: 531331 - DNA, 83 bp, Homo sapiens
cagctacaggccagcttatgaccagcttcctgcctgacacagctcacttcaagaagtgcacaatgtcagaacgtggaattaag

SEQ ID NO: 531332 - DNA, 75 bp, Homo sapiens
tcagccttcccagtagctggaactacaggtagcaaaccatgtgatttcttctgactctatttcctcttctgccag

SEQ ID NO: 531333 - DNA, 101 bp, Homo sapiens
acccaatgctcagaaacctctccctcaagctcttttggtacaccagaaggccagaatggaacgacttcaaagagaacttgagattcaaaagaaaaagctgg

SEQ ID NO: 531334 - DNA, 50 bp, Homo sapiens
ctgaacggagtgtgcgacggattgggagtggaggccatagtggagtttga

SEQ ID NO: 531335 - DNA, 82 bp, Homo sapiens
cctcccagcccccatcgagaaaaccatctccaaagccaaagggcactgtgttggcactcactgaaaataacttcgatgacac

SEQ ID NO: 531336 - DNA, 151 bp, Homo sapiens
cacaccgtctgggactgcgacttcagcactggcaagatcggctggttcctgggaggccagttaaatgtctctgctcctttagcggcagagttttccgagtgaccttcttgatgctggctgtttctctcaccgttcccctgcttggagccat

SEQ ID NO: 531337 - DNA, 101 bp, Homo sapiens
cactttcattgtctcggacgtgcggggcctgggcctcccggtccgcaagcagtttttcagaagaagtgaagtcaagatgaagaaccatttgcttttctggg

SEQ ID NO: 531338 - DNA, 83 bp, Homo sapiens
agctacaggccagcttatgaccagatatcattctctgctggaactgggtgagaagcgtaaaggcatgttggagaagagttgca

SEQ ID NO: 531339 - DNA, 75 bp, Homo sapiens
atcaaggtcatcgaggccaacaacccattccaggctgtgcaggaagcggaaggagagttttacatggaagtggct

SEQ ID NO: 531340 - DNA, 88 bp, Homo sapiens
ctcagttggaagcagccgatccagcctgcggagcctgtggggcagactgattcttgctattccaaatcctcttccacgttgacagccc

SEQ ID NO: 531341 - DNA, 75 bp, Homo sapiens
taaaagagccctggaatgtgaagagacatgagacagtagtcaaatactcagaaacctctgtagaggagcaggatg

SEQ ID NO: 531342 - DNA, 98 bp, Homo sapiens
ccagctgtgccgcaccgaggcgagcaggagcagggaacagccaggcccagacatgtccgtccttgtaagttaaaagcttccatgggagccttccttcc

SEQ ID NO: 531343 - DNA, 90 bp, Homo sapiens
aatgcatctttatgtcagaaacacaaagcagcccaaccaaaggcctgagcccttacagccacgatggggacagcctgtctcgctcccaag

SEQ ID NO: 531344 - DNA, 98 bp, Homo sapiens
aggcagcacagatcaacatggagccccaccatggtagtcctcttcacttaaagagaggaaacttcttggtgctcaaagcaaaggagatgggcctccca

SEQ ID NO: 531345 - DNA, 74 bp, Homo sapiens
gcctacattgggagtggggcgacctgctttccttaaagtttcccatgtctcaatggactcctgaatataacgag

SEQ ID NO: 531346 - DNA, 83 bp, Homo sapiens
ggaccagcagatggccagtcacgagaacccagagccccccaagatgaacccagtggtggagccactgtcctggatgctgggca

SEQ ID NO: 531347 - DNA, 100 bp, Homo sapiens
gtacccggaggtggagcaacagaaattgaattagccaaacagatcacatcatatggagaggctggcatgactcacatcgtgcgggaagtcgacaggccgg

SEQ ID NO: 531348 - DNA, 100 bp, Homo sapiens
ggcggcgctggaggagcgaggcagctgtactaggactgggaacggattgaggaagacacatggcagaaatactacttggaaggagtctcaaatgaaatgt

SEQ ID NO: 531349 - DNA, 98 bp, Homo sapiens
cgagcggggggctctactggtcttcgcggagcacgacatggtctgctatacagctcagactctcgtccgaatcctctcacatggtggctttaggaaga

SEQ ID NO: 531350 - DNA, 96 bp, Homo sapiens
tagagaggagtataaaatccagtcctttgatgcagagacccagcagctgctgaagacagcactcaaagacaacatggacttctcaagcatgacgct

SEQ ID NO: 531351 - DNA, 75 bp, Homo sapiens
ggatgacaccggagtttgacgaagaggtggtttttgagatcaatgtccgagttaccaccatggatgcagagctgg

SEQ ID NO: 531352 - DNA, 83 bp, Homo sapiens
gtggacgtggttggtgattggcaggatcctggtatccgctaacagagctggactggccattatggaggaggagctgcagcatt

SEQ ID NO: 531353 - DNA, 100 bp, Homo sapiens
aaaaattcaaagtcgaatatcatgctggtggctctacccagaattcaattaaagtggctcaggtgtcctggggaagtgtcgctacgtttactatgggaaa

SEQ ID NO: 531354 - DNA, 100 bp, Homo sapiens
gatcgccctcagcagactcgcccaggagaggaaagcatggaggaaagaccacccatttggcctgcagttgccatcacccactgcaaccagccagctcccg

SEQ ID NO: 531355 - DNA, 83 bp, Homo sapiens
caccgaggctcggccgccccgccgcgagttgggccggtgcacaaacagcgtggtcaagtatgagctgatgcgcccctccaaca

SEQ ID NO: 531356 - DNA, 100 bp, Homo sapiens
gagcggcggaaggacagcacgagcaccccctgagacggtttaagcggaagcatcttactgccattgactgccagcatttggctcggagtcacttggctgt

SEQ ID NO: 531357 - DNA, 82 bp, Homo sapiens
ccacaaagtgaccaagaacgtgagcaagcccaggcacagccgacgccgcgggtggtgctcatcggggactcaggcgtgggca

SEQ ID NO: 531358 - DNA, 98 bp, Homo sapiens
caggattcgggcttctttgagatcagtatcaaatatttactgaaatcctggagtaatatccgactacatgacagcatctcagaggagggacaccacta

SEQ ID NO: 531359 - DNA, 75 bp, Homo sapiens
tatgttaaaggtctacagaaagaagatggttcttttgctggagatatttgggggcaaacttgaagataaatcttt

SEQ ID NO: 531360 - DNA, 75 bp, Homo sapiens
acccaaatcctcttctccaagaagctacagaagtcaagattccaaaaccaagaggcagacccaaaatggtaaaac

SEQ ID NO: 531361 - DNA, 75 bp, Homo sapiens
aggctccatggtcttgcctccttgcagttactggctgaccaacaaagttcctatcaaaagacccagcacaggtct

SEQ ID NO: 531362 - DNA, 75 bp, Homo sapiens
agtacctctttgaccgccttgcccacgagtatttcgggctgctgtggatctggaaatatcatctgcttctagaac

SEQ ID NO: 531363 - DNA, 100 bp, Homo sapiens
tgagatttccactagagcttccaagtcattgacaacaaaaacatcaaaacggcgatccaaaaattcagtggaagcttcgttccagagcccagcatgaatg

SEQ ID NO: 531364 - DNA, 82 bp, Homo sapiens
aaaggctctccttgcagctgcttagacgctggatttttttcgggtagtggaaaaccagaagctggcagggcggagatgctgg

SEQ ID NO: 531365 - DNA, 100 bp, Homo sapiens
caaccagaagaagtatttgatgtcttagagaaacttggagaagggtgctggagaatctggtaaaagcaccattgtgaagcagatgaggatcctgcatgtt

SEQ ID NO: 531366 - DNA, 59 bp, Homo sapiens
ttttattgaaagatgtattgagtacattgaagccacagtgtgtcccggcatggatatcc

SEQ ID NO: 531367 - DNA, 100 bp, Homo sapiens
gtcgaacagttttttctaatggctattcaaggaatttatctcactaatatcttgaaaacagaagaaggcaaccctgaggtcctaaaaagacatggaaaag

SEQ ID NO: 531368 - DNA, 75 bp, Homo sapiens
gacctgggcaccagcaggacccgaggccaggagccaggggcccagaaggctaagtcctatcagccatggaaacac

SEQ ID NO: 531369 - DNA, 78 bp, Homo sapiens
attcaaatcctagcactctgggagagagataatcattcaggtcttcgtgagctaaggccaaacaaacaaaaaacactt

SEQ ID NO: 531370 - DNA, 83 bp, Homo sapiens
cgcacttcgtcatgttcttcgcgccctggctgcctgctgtttcccggggagatcatgaaacgaggtcgccttcccagcagcag

SEQ ID NO: 531371 - DNA, 50 bp, Homo sapiens
gcgtgggcatcattggcttcttcaaggattacggggcgctgaaagacatc

SEQ ID NO: 531372 - DNA, 127 bp, Homo sapiens
ttcacaaaaaccttgtgaataatacaagccatatggactctgatttacagtttagaagatgagcagaggaagatcctgctcatcagacccaagatggccttggccaatgaaggcaactaccgcgagc

SEQ ID NO: 531373 - DNA, 98 bp, Homo sapiens
tgaatccatgctgaaagaatgcctggttggcagaatggccattaaacctgctgttctgaaagattttgctggagccaggtgtgatccaggatgtgcta

SEQ ID NO: 531374 - DNA, 98 bp, Homo sapiens
tgaggacacccatgaaccttcccaaagcagctggctaagagtcttgggcaggctggtgaaattgagcctgaaacagaaggaatactaacagagtatgg

SEQ ID NO: 531375 - DNA, 82 bp, Homo sapiens
atttggacaattatcctgcactttcatgtagttacttttggtgacgctgtccagttcccacaatgtatcattccttatctga

SEQ ID NO: 531376 - DNA, 75 bp, Homo sapiens
agggacggatacaacgactagagagtggtgaaaccagaacaatatctcactttcattatactacctggccagatt

SEQ ID NO: 531377 - DNA, 100 bp, Homo sapiens
gccttctgatgaatactttaagttacctacctgggcaaagtctccaccactggcatgcagtttttgtcaggctgcacagaaaagccagtcattgagctct

SEQ ID NO: 531378 - DNA, 100 bp, Homo sapiens
cctgcctggcacgtggagggaagcctggaggaggggaggagggccactgggctcccagcagcccaggttcagggaagctgcccgggagtgtcgcaggaag

SEQ ID NO: 531379 - DNA, 100 bp, Homo sapiens
cgagccttcctgctcatctccaccctgaaggacaagcgcgggacccgctatgaggcctccggtgtggctgtctctgatggtgtcatcaaggtgttcaacg

SEQ ID NO: 531380 - DNA, 75 bp, Homo sapiens
ggaggttcgcggctctaacggggctttctacaagacaccattcgcttttcacccaagatgatttgatgtcttata

SEQ ID NO: 531381 - DNA, 90 bp, Homo sapiens
cgcggcggaggacgcgcccggcgcccctgagccggccgagcggcgacggaccgcgagagctgaagaagcaggtggagagtgccgagctga

SEQ ID NO: 531382 - DNA, 83 bp, Homo sapiens
gtcagcactgactttcagctatggaatcggctgaaggtgatgtggccgccctcaaccgacgcatccagctcgttgaggaggag

SEQ ID NO: 531383 - DNA, 75 bp, Homo sapiens
gtcttctgtgtggattcttcagaaagtgaacttggcattttagatctaattcaaaggtcctgctgtactagccac

SEQ ID NO: 531384 - DNA, 75 bp, Homo sapiens
caagggctccaatttgtactctcagctggaacggcaggcctggggaagctatgcgaaattatttaaaagagcgag

SEQ ID NO: 531385 - DNA, 75 bp, Homo sapiens
gctgagacctgccgtgctgggtggtgtcgtgaaaactacccctaaaagccaaaatgggaaaggaaaagactcata

SEQ ID NO: 531386 - DNA, 75 bp, Homo sapiens
catgacacttacaagatggacagggatgataattgggcctccaagaatgctgtctttgcaggtgccatgcctaca

SEQ ID NO: 531387 - DNA, 75 bp, Homo sapiens
cgggaaagatgccagaatctggtttcaagcgattatccagtacacattgataagcttggatttacactgggcaac

SEQ ID NO: 531388 - DNA, 100 bp, Homo sapiens
tagagacttgacaatacaaaaagctgatgaagttgtttgggtacgtgcaagagttcatacaagcagagctaaaggcttttatcttgagaacatggtgtct

SEQ ID NO: 531389 - DNA, 76 bp, Homo sapiens
gctgagctgggcatccgacacgtactgctgggcgccatgttttggaagtttgacctgcacacaagctcgcacctgg

SEQ ID NO: 531390 - DNA, 100 bp, Homo sapiens
acgctccgtggatgaggctctgcggctggtccaggccttccagtacacagacgagcatggggaagatgatgaccactggatcgtcgacacagactacgac

SEQ ID NO: 531391 - DNA, 75 bp, Homo sapiens
cgtgtcctgaaggagttccaccaggccgggaagcccatcgggtagctacagcaagctgggtagcaggcagatcca

SEQ ID NO: 531392 - DNA, 83 bp, Homo sapiens
ccaattgcttggatgacagtcaccgacagaaggagctgagctcaatgtgcagcaatggatgacgacagcctggatgagcttgt

SEQ ID NO: 531393 - DNA, 98 bp, Homo sapiens
cctgggaggagttcagccgcgctgccgagaagctttacctcgctgaccctatgaaggtcaccggattgaaactgtctcaggaccttgatgatcttgcc

SEQ ID NO: 531394 - DNA, 83 bp, Homo sapiens
cgaatcgttaaacatcttaggtcagagatcgcggattcaggtgtggctctatgagcaagtgaatatgcggatagaaggctgta

SEQ ID NO: 531395 - DNA, 78 bp, Homo sapiens
cccgactccttcttcaagccgccggagcccaaatcccactcccgacagggttatgtaccgaaggactctaccgtgtca

SEQ ID NO: 531396 - DNA, 99 bp, Homo sapiens
gcggaagaaaatacaaatcacacgcataatggatgaaaggaaccgacagccaatcctgaggcaaaagaaacattttaattcactgcacattccaaaagc

SEQ ID NO: 531397 - DNA, 75 bp, Homo sapiens
attcgtaaggtccattcctgatggctctgatgccatggacaatattaccaggcagaaccaattctacgataccca

SEQ ID NO: 531398 - DNA, 100 bp, Homo sapiens
ggcagccaaaagattgaaggaaggtgatacaatgatggggcagcaagtggccaaagtcaagggtccagagaaggaggagaagttgagacaggcggtcaag

SEQ ID NO: 531399 - DNA, 129 bp, Homo sapiens
gaattcatacaacagaatttgagtggcctaagaatatgatgccgtctagttttgccatgaagcttctgaaagttctgctgaagacagtgagcaggaagatgagagaggtgctcaagacatggataataa

SEQ ID NO: 531400 - DNA, 100 bp, Homo sapiens
tgggtatggaggaggacctggaggggtttaaagccaatttgtctctcttgaggaggcctggagagaaaacttacacacagcgatgtcggttgtttgttgg

SEQ ID NO: 531401 - DNA, 96 bp, Homo sapiens
tgaggagtgtcacttccgtcaggagaggtgaggcaggctcgagtgcacggagcgtcccttccatcaggagagaagctggcagggcggagatgctgg

SEQ ID NO: 531402 - DNA, 50 bp, Homo sapiens
tccacttctaccccaccttccggacagagtttcactcctgttacccaggc

SEQ ID NO: 531403 - DNA, 100 bp, Homo sapiens
ggtgtaatcctactaaatctggagcaggagtgatttcagtccccagggtgagcagggcagcatttccttctcccactgctgctgagatggcagaaattag

SEQ ID NO: 531404 - DNA, 75 bp, Homo sapiens
cacggaccgcgcccgccgggcacacaagaatggtcactccactgaggcggctcccagctgcgttggcgacatggc

SEQ ID NO: 531405 - DNA, 75 bp, Homo sapiens
ccgggcccagatatggacgcagcagagccgggctgccaccacggccccgcacccccaagccgccgacaccactgc

SEQ ID NO: 531406 - DNA, 82 bp, Homo sapiens
tctacagaagagcttctcctcatcaactggggatgattacagttcttcctaaaaaagattaaaaggagcccaagccccatct

SEQ ID NO: 531407 - DNA, 90 bp, Homo sapiens
cctggagcggcgcagccggagtggggccgtgaggaattgaatgatctggcacgggaccctccagcacagtgttcagcaggtcctgttgga

SEQ ID NO: 531408 - DNA, 75 bp, Homo sapiens
ttggtggaatcaactgccttcaccaaaatccactatcccagcggcaacctttggcactgcatccatgagcatgcc

SEQ ID NO: 531409 - DNA, 49 bp, Homo sapiens
gggaacccaggccccgccgaggcggccagatgacgtccggttgtttgcc

SEQ ID NO: 531410 - DNA, 100 bp, Homo sapiens
caagaaccagctaagccagctgtccaggcaccctggtccactgcaggtggagccgccaccaaaatgcagattttcgtgaaaacccttacggggaagacca

SEQ ID NO: 531411 - DNA, 75 bp, Homo sapiens
gcctcccgagtggctgggattacagagtctgccccaaattctccaagaattggaagcccattgagcccaaagaaa

SEQ ID NO: 531412 - DNA, 100 bp, Homo sapiens
cagccacgagctccacgatgaggaggaaagtgctcagagacaaaaaacagctggcaaaatcttcagagccgaggcgtccactgggcaggatgccccgagg

SEQ ID NO: 531413 - DNA, 75 bp, Homo sapiens
caaatgtgagccagctgcggagcagtgcgtcagagtttcagaatctcacgggctgtgcgtgcctcaccaccgtcc

SEQ ID NO: 531414 - DNA, 98 bp, Homo sapiens
tcaggagagcgccccagggcaagccccgctccggccaacaagagttgataccaagttgaaattcactcttgagccatctttaggtcaaaatggttttc

SEQ ID NO: 531415 - DNA, 100 bp, Homo sapiens
gccaccagcgcgggcgcgggccaaggtatatgggacaggttgctcatcaactcccaacctaagtccagaaagacctccactcttcaaacagttcggatag

SEQ ID NO: 531416 - DNA, 122 bp, Homo sapiens
gaaaagtttagttttcgaagccaagaagatctgaatgagccaattaaacgagatggcaaaaaggagtgtgatattagtgactcgtccaagaagaagagagtttaatggaatgattaatggag

SEQ ID NO: 531417 - DNA, 83 bp, Homo sapiens
caggaacccgaacagttccccctggtgcagggagtggccatagtgttggagcgggccggagagaagtagagtgggctgcgagg

SEQ ID NO: 531418 - DNA, 98 bp, Homo sapiens
gcgcccgccccagccccgacctggcggggccaggacgctggttcatacactccaagatggcggcagctatgccatccacgactcccaggcccccagtc

SEQ ID NO: 531419 - DNA, 100 bp, Homo sapiens
ggaaattcccagaggactttggagaccaggtggtggctaatgccgtagcggcattatctgaaatcagtgagtctcacccaaacagcaacttacttgatct

SEQ ID NO: 531420 - DNA, 96 bp, Homo sapiens
aaaggcaagagtaacagcagcgccgtcccgtccgacagccaggcccgggagaagtcgcctgcgaggccgctggccaggcctgagcctctgccacca

SEQ ID NO: 531421 - DNA, 73 bp, Homo sapiens
gggctgtcaaatttacattaactatgagaattaagcagtattcttcagaggaggaagaagttgatcttcagac

SEQ ID NO: 531422 - DNA, 75 bp, Homo sapiens
gcagttgcgtgttgttcagaaaggtgcgtatagcagcaaaattcatcattcatgcccctcctggagaatttaatg

SEQ ID NO: 531423 - DNA, 100 bp, Homo sapiens
ctcccaagaggaatgacaaacaaccagctcttcaggtatcagtttttggaagaagcttttcaaaatcagaagggtgcaattgagaatctactggcgaaac

SEQ ID NO: 531424 - DNA, 100 bp, Homo sapiens
gcatcctcattgcagtgcggcggccctacctcggccctggcctgaccccggcggccctgcccgcccctccctccagggtctcctcactgggactgtcact

SEQ ID NO: 531425 - DNA, 101 bp, Homo sapiens
cgggcctccaggctgaatctgttcttccaggtgtcccttacccgaaacccccccagcgaaagtgaaggcagtgatggtcgcttccttatctcctacgatcg

SEQ ID NO: 531426 - DNA, 100 bp, Homo sapiens
ggggtggctctttgctaagtgctgctgttgcttcccgtgtagagctctattatcaagtcctaaattttggaatgattgtctcatcggcactaatgatctg

SEQ ID NO: 531427 - DNA, 101 bp, Homo sapiens
cctgcatccaagttcatccagggatacctgggagctgtcatcagcgccgtctccattgctatgtttccagccctctgaagcttcatcgaacagagactttt

SEQ ID NO: 531428 - DNA, 82 bp, Homo sapiens
cagcgccgtcccgtccgacagccaggcccgggagaagtggagccccctgagctgcccgctgatctgcagcactggatctcct

SEQ ID NO: 531429 - DNA, 75 bp, Homo sapiens
cagggcaccaactatgaagactctcagggcgcgatttaagaagacagaggtgctgaccttaaggaaagagccaaa

SEQ ID NO: 531430 - DNA, 100 bp, Homo sapiens
gtttgtcatcatcgttgcctttgggtccctgattctggcaaaaaatgtggaagatgtgaaatttgtcatcaattatgactaccctaactcctcagaggat

SEQ ID NO: 531431 - DNA, 100 bp, Homo sapiens
aagacagtggctggcggtgcctggacgtacaaacctttccaaagtgaaactgatgagatttgatgatccactgttggggcctcgacgagttcctgtcctg

SEQ ID NO: 531432 - DNA, 99 bp, Homo sapiens
ggaaatctggccgccgccgccgcgagcgctcccggtacagcagggaagaactggaaactcagagaaagaaactgcccttccatctacaaaagctgagtt

SEQ ID NO: 531433 - DNA, 100 bp, Homo sapiens
aactgggggatctaactggcaaccaaaggttgcaccaacaaccgcttggaatgctgcaacaatggttgatcccccaagtcccagggctgatactttattg

SEQ ID NO: 531434 - DNA, 80 bp, Homo sapiens
ctcctggcccccctgagcagaggactgtaccttgtaaggcctgagatcctgaagcatgagatgaaggtgttcttcgtgaa

SEQ ID NO: 531435 - DNA, 98 bp, Homo sapiens
cgccatggccaccacggtgacctgcacccgcttcaccgacgagtaccagctctacgaggatattggcaaggagagtcccgtattctcagagtaaaagt

SEQ ID NO: 531436 - DNA, 98 bp, Homo sapiens
aggatataaagagaaacctcaagatgtggatttaccttatcccctcaacaacttttcagtggcaagaaatggaaaggtcagtagttgcacagctgctg

SEQ ID NO: 531437 - DNA, 90 bp, Homo sapiens
attccaagtaactcttatttggctattcatgctcttatggaaaatgctgtgcaacccttactcacttctgtgggagatgctatagaggcc

SEQ ID NO: 531438 - DNA, 101 bp, Homo sapiens
agacataggccaaggagccagacttcctgtgttaactccttcctctgccactttttaccttggggacctcagcaacatggccaatctttcctaagctgctc

SEQ ID NO: 531439 - DNA, 90 bp, Homo sapiens
gcgccgttgacaagaggttcttgccagatgacaatggccacaatgctcttcttggcactactgcagtcttcagttaagcaacaagtagaa

SEQ ID NO: 531440 - DNA, 82 bp, Homo sapiens
tcaattgaagcaagagatttctgaatggtactccaaagattcaggtttactcacgtcatccagcagagaatggaaagtcaaa

SEQ ID NO: 531441 - DNA, 83 bp, Homo sapiens
ctctcaaagcaataccaggatagctgttgtttcagagaaaggattttttatcaagcagaaatgcatcgaacaacgagaatcaa

SEQ ID NO: 531442 - DNA, 90 bp, Homo sapiens
cccaaacaagtgctcctacattctgggtttcgaaaaaacgatgaaatgaaagctatggatgttttaccaattttgaaggaaaaagttgca

SEQ ID NO: 531443 - DNA, 75 bp, Homo sapiens
acaggcctgctgaactgggtgctttatatagggttgaaatcacaaagattagacacctttttagataggtgttct

SEQ ID NO: 531444 - DNA, 96 bp, Homo sapiens
tttggcaccgactaccccttcttccatgacccaccatctgtcttctacgggactgctgagatgtcctctattcttgaagagcgtattcttggagct

SEQ ID NO: 531445 - DNA, 50 bp, Homo sapiens
ggcagctgtgcccgggcggcacggccagcgagacggtcatctgttccagc

SEQ ID NO: 531446 - DNA, 74 bp, Homo sapiens
acagaaagagtcaacagcagtggcaacaggcagctgagtatgtcccagagaaggtgaagaaagcggaaaagaaa

SEQ ID NO: 531447 - DNA, 75 bp, Homo sapiens
gtgagctggaggttggagcctgaagatggcacagctctggtacagccaaagaccggagctttggagagatgaagt

SEQ ID NO: 531448 - DNA, 75 bp, Homo sapiens
agaagaccttcaagcagcgccgcaccttcgccaagtacatcgtgcaagtggatggtaagatagggctgttccgag

SEQ ID NO: 531449 - DNA, 82 bp, Homo sapiens
gcttgccgcacaaaaagctagagaggcccttccttctaccatgattatagtagcagtttattgtcctgtgatagctgctgtt

SEQ ID NO: 531450 - DNA, 82 bp, Homo sapiens
ggatcgggtggagtgtaggtcatatcgccgcgacaatgcagatcttcgtgaagactctgactggtaagaccatcaccctcga

SEQ ID NO: 531451 - DNA, 100 bp, Homo sapiens
aaaggagagcccgtcagtgccgaagatctggcgcaagcaaactgtcgagtaggagttgcagcactgaatactctagcaggctatattgactgggtgtcta

SEQ ID NO: 531452 - DNA, 74 bp, Homo sapiens
ggctgtcctctggtgagaaggtggtgaggcttcccgtcatattccagaaagcttatagcttcattgcaccatgt

SEQ ID NO: 531453 - DNA, 75 bp, Homo sapiens
tggatgaggcccaggctgatgggaaggagcacccaggagctgaagattacgctctggggaaggactgtattatgc

SEQ ID NO: 531454 - DNA, 75 bp, Homo sapiens
cgagcagtctcaggcctttagtgatgatggtccccttcccctgagcccatctacaatagcgaggggaagcggctt

SEQ ID NO: 531455 - DNA, 83 bp, Homo sapiens
cttcgaccttggacttctcagcctccagaatgatggaccacacatccccgacctacatgcttgctaacttaacccacttgcat

SEQ ID NO: 531456 - DNA, 98 bp, Homo sapiens
gaggccgggaggccgtgcccggagtgtcgtgtgggagccaatgggagatgggaagaaaatcatttccttggctgataaccatatcctgctgtgggatt

SEQ ID NO: 531457 - DNA, 88 bp, Homo sapiens
caagctctttgggaagtggagcaccgatgatgtgcagatcaatgacatttccctgcagaccatcaagtgcctgctgatccaccctaac

SEQ ID NO: 531458 - DNA, 100 bp, Homo sapiens
atgatggggagcttgaggacacttaccacgaatacttcctcgcgtattgctaaaggaggagttgaccacaccaaaatgagtctacatggtgctagtgggg

SEQ ID NO: 531459 - DNA, 97 bp, Homo sapiens
cctgacatgcaaacacgagcaccctggcatggagctgcacaggtgcagctctgtcatttccactctgctctgctgcacagaaggcagaagccctggc

SEQ ID NO: 531460 - DNA, 75 bp, Homo sapiens
gcatctcctacattagcgtctacgaccaccaagggtccaacagatacaattgctaggacgagatatgaagggacc

SEQ ID NO: 531461 - DNA, 75 bp, Homo sapiens
atgcctgaccgggagaacacgtttgtggttaaggcgagtctgtatctgtcatcaaacacacggagcccgttcctg

SEQ ID NO: 531462 - DNA, 96 bp, Homo sapiens
gttcctatttggccatcttggctcctcgcccccagttttggtgctttcgtgctacagaggcgtagttgagtagctgcagcagagatcatatggcct

SEQ ID NO: 531463 - DNA, 74 bp, Homo sapiens
atgccaaaaatggagaaatttttggcagacctgttatcctaaactaggtgagtcagcttttggtacatgtgatg

SEQ ID NO: 531464 - DNA, 100 bp, Homo sapiens
cttgggtgaactctagcaattacaaggtgccattgagaaacagaaattggtgtatattttgaacagagatgctgcagcccgacttaccatttcatctccc

SEQ ID NO: 531465 - DNA, 98 bp, Homo sapiens
ctggttgttccgttgcgagctgcagctgcgatctctgtggtaggcccaggctttggatgaagagtatttaaaagtagatgcccaatttggaggcattg

SEQ ID NO: 531466 - DNA, 96 bp, Homo sapiens
tggtcaacaaaatccacgtcagcgagtaaccagctcataaatcacatcgaacagtttttggatactaatgaaacaccgtattttatgaagagcata

SEQ ID NO: 531467 - DNA, 101 bp, Homo sapiens
cagaggatgatgctgactttgatgaagagacaaagcatggaggacacaagaatgggaggaaaggcggactctcaggaacttcattcttcacgtggtttatg

SEQ ID NO: 531468 - DNA, 96 bp, Homo sapiens
aatgctataaagccaggacttgttaaaaagatcaatagattgcctacccccattgcaggactggtcgattgagctatccacatccaggaactgaca

SEQ ID NO: 531469 - DNA, 97 bp, Homo sapiens
cgcctatctcttcaagtacatcataatcggcgacacagaaatgggacgtcggtcatcagatactgaagaagaaagcagaagcaagagaaaaaagaaa

SEQ ID NO: 531470 - DNA, 97 bp, Homo sapiens
gctcctggacttcgcctttcccgagccctggaggtggggagaaaagctgactggaaataccggcatgcaggattgatggccttatctgccattggtg

SEQ ID NO: 531471 - DNA, 80 bp, Homo sapiens
acccggaggaccgtatccccagcccactgggctacgcagcctgggactacggccagggcttcgtgaatgaggagatgatc

SEQ ID NO: 531472 - DNA, 50 bp, Homo sapiens
ctggactgctcagggtgccagacctcatctttcaccagtgatcattaaag

SEQ ID NO: 531473 - DNA, 90 bp, Homo sapiens
gcgaaccaacggttagcggtggcaggggctgactgagagcgtctgcttgcatgaagaggaaccacctcagaatatgaaaccacaatcagg

SEQ ID NO: 531474 - DNA, 50 bp, Homo sapiens
gtctggctaatggcatttacaggaggtggtgtggtgaccgcgggcctggc

SEQ ID NO: 531475 - DNA, 110 bp, Homo sapiens
gtggatgaacaagtactgatggaactaaaaacttttgatgccgaccgcgatgaggatgaggtgttctatgacatcagcatggcagttgacaacaagttatttccaaacaa

SEQ ID NO: 531476 - DNA, 100 bp, Homo sapiens
aaccatcgcagttggaagcccatggggcagacggttacctggcacgctggccacattctgcctcactcttatcagagtctgagctactggcagtgctttc

SEQ ID NO: 531477 - DNA, 100 bp, Homo sapiens
cctttaaaatctggaagcgattcaagccaagctgaccaagaagccaaagaactggctaggcaaataagctttaagtgcgggttgttgagagtgtgggaaa

SEQ ID NO: 531478 - DNA, 101 bp, Homo sapiens
cctgtggtctctgcacctcctttctaggcacatttgatatttatgtgaaatgtgatggtgttggaagatgtgttggtaactatgataatcgtgggagtttc

SEQ ID NO: 531479 - DNA, 83 bp, Homo sapiens
ccgagcgctactcgcaggaggtcttcggaggaattttgttgtcagagaataaaaggaggttgtccataattgactttaagcag

SEQ ID NO: 531480 - DNA, 49 bp, Homo sapiens
caacagcctggcgtccgccacgaactgccattggatgtccagaatcccc

SEQ ID NO: 531481 - DNA, 80 bp, Homo sapiens
gctggcatcggctttggaaatgctggtgttcatctgtgggtcatctttctgaaggattggttactaaatggtacagatct

SEQ ID NO: 531482 - DNA, 75 bp, Homo sapiens
ccccactctttccgccctaatggaggtctccagtttcgtttcagggtctagccattgccccctgcctgctgctcc

SEQ ID NO: 531483 - DNA, 75 bp, Homo sapiens
tttactgtcaagacatttcttcggcattctgcaacaggtactacattaaaccttctgaagtttcctatttgcaac

SEQ ID NO: 531484 - DNA, 95 bp, Homo sapiens
gtggtgatgcaagaagtttctaggaaaggccggacaccaggaccgtcacgacggcaccagcaacgggacggcacggttgccccagctgggcactg

SEQ ID NO: 531485 - DNA, 76 bp, Homo sapiens
acctgatataaaaaaagaaattagtgaaggagatgaagtagaggatgctcgtcagaagttccgctctgttctggtt

SEQ ID NO: 531486 - DNA, 50 bp, Homo sapiens
ggggctgtggagcggccgctgaccccggaatgaagctgataggaccttga

SEQ ID NO: 531487 - DNA, 100 bp, Homo sapiens
gctgctgaagcccaccgaattagagaagcagggccctgagcggaagaggattaagaaggagcctgtcacccggaaggccgggctgctgtttggcatgggg

SEQ ID NO: 531488 - DNA, 100 bp, Homo sapiens
cgggaggtgaatttccatgtcaacatagtcctgatgctaatcctgaggtgacgatgacaatgcttcgctggatctatacagatgagctggagttcagaga

SEQ ID NO: 531489 - DNA, 100 bp, Homo sapiens
tgctgtactccttgtctttgcaaacaaacagatgacattgtccccgagctaccgcatggacgatgggaaaatggtgaaagtgcggcgcagccggaatgcg

SEQ ID NO: 531490 - DNA, 99 bp, Homo sapiens
tctcggtcctggccgcgattttctgcaggccccacgagtgggaggtgctgagccgctcagggcgtctctggccgagcctctttttgtggaaaacgacag

SEQ ID NO: 531491 - DNA, 98 bp, Homo sapiens
atgccggaattccaagacggaatgcctcttaatgccggtgctcgagtttggcttttcattggtttcatgttgatgtttgggtcacttattgcttccat

SEQ ID NO: 531492 - DNA, 90 bp, Homo sapiens
ctctacgctgcggggatgcagcccgcaccctggggccccggtgtggcaaaggagcagagaactttgacaagttcttcacacgaggacagc

SEQ ID NO: 531493 - DNA, 83 bp, Homo sapiens
cagccacgcatctgaccttgttggtaaattcgaaccaccattatttcacccgaatgtgtacccttcggggacagtgtgcctgt

SEQ ID NO: 531494 - DNA, 82 bp, Homo sapiens
ttacgacgggttggggatggcgtgcagcgcaaccacgagacggccttccaaggctgatcagctgaccgaagaacagattgct

SEQ ID NO: 531495 - DNA, 100 bp, Homo sapiens
cgagaactcccatcagtttctgtatagtgtaaaaggttcttgggtgtctctggggagtccctgggccagaccttcctccagactccagcccacctcttcg

SEQ ID NO: 531496 - DNA, 75 bp, Homo sapiens
ttcctgtacagcctgcggaactcccacacatcatgttcctctctcagagcatcttgacaggagggaaccatctct

SEQ ID NO: 531497 - DNA, 75 bp, Homo sapiens
tgcctgtaccgtgatgtgacgctggagaacctggcacttatgtcctccctgggctacagcatgctggccataggg

SEQ ID NO: 531498 - DNA, 50 bp, Homo sapiens
tactactgtgacaacattaacggctgtaaaatacgttcacagtagtcagc

SEQ ID NO: 531499 - DNA, 100 bp, Homo sapiens
taccggctgtggctcagcatggtcagtgccgtttaacctttattgtggtggagtccaccccgctgtgatgaagacagtcagtgttgccttagttttgtgc

SEQ ID NO: 531500 - DNA, 88 bp, Homo sapiens
caggaggcggtggagcgcagagcgggcgagcgcggggcttcataaaagtcagagttcatgtttgtcaggacctaatgaagaacaacct

SEQ ID NO: 531501 - DNA, 99 bp, Homo sapiens
gttcgcgtctctctgctgcggcgcggggaccgctgtgctctcggccagaagaatgtttgaaggtgagatggcaagtttaactgccatcctgaaaacaaa

SEQ ID NO: 531502 - DNA, 80 bp, Homo sapiens
accccagtcagaccgatctgctctgctctcgtgggatcatgaaacctggtctcaacgccatcctgggacccacaggtgga

SEQ ID NO: 531503 - DNA, 98 bp, Homo sapiens
gcccaggcccagctcgtccagagtctgcggacagcgcacgtccagccgccgctcctcctcctcctcctcctcctcttctgcctcgaggacctccagct

SEQ ID NO: 531504 - DNA, 78 bp, Homo sapiens
atcatattccttcatctaccatggctcagccgggaactctgaacctcaataacgaggaaactggccaagaagcggaaa

SEQ ID NO: 531505 - DNA, 82 bp, Homo sapiens
gtgattctgggcaaagtgtggtgacttgtggattttcactggacttgcaattgtgaccaaatatattacaaagggctggaaa

SEQ ID NO: 531506 - DNA, 75 bp, Homo sapiens
tcgcccacgcccagcagcagcagcaacaggtgagtataggtgcttggagaggataaggaaatcaccctgatccaa

SEQ ID NO: 531507 - DNA, 87 bp, Homo sapiens
tagcacttcttgaccttatcaacttttttattcagtgttcaggctgtaaaggcctagaatatcctgcagtggtagagtttgctccat

SEQ ID NO: 531508 - DNA, 90 bp, Homo sapiens
gggatacagctggacaagaagattatgacagattacgccccctatcctatccgcaaacagtcatttcttcagatagctccccagctgtgg

SEQ ID NO: 531509 - DNA, 74 bp, Homo sapiens
ggagagtgagagaaaggctggaagacgaggttaatccctatatcctgaagaagaacatgatcctcatgacaaat

SEQ ID NO: 531510 - DNA, 82 bp, Homo sapiens
atcgctatgcaggtgcggaagctggtgggcactcagcaccctctgcttaccacagccaggcagaggtggaggagacactgaa

SEQ ID NO: 531511 - DNA, 100 bp, Homo sapiens
cttggagcgagctgagagctcgagcaaagtggaagatgctttctacaaaggtgaactcaggctgaatgaggaaaaattatggaagaaaagcagaacggtg

SEQ ID NO: 531512 - DNA, 50 bp, Homo sapiens
caggactgcgccgcgtcttcctcaagggctctggaacttcatccattctc

SEQ ID NO: 531513 - DNA, 98 bp, Homo sapiens
catcttaattgggcacgaaagaggtgtgatgaatgcagactctgctaccattttggctgtttggatcctcctttgaaaaagtctcctaaacagacagg

SEQ ID NO: 531514 - DNA, 101 bp, Homo sapiens
ggaacttgctgtgccacatgcaaggagttctaccagatgaagcagaccgtgctgcagctgaagcaaaaggagtcgttcacgcctactgaggagcatgtgtt

SEQ ID NO: 531515 - DNA, 75 bp, Homo sapiens
gacagtgaaaccctttgccatcgacatatttcctgtcaccaacaaagatttcagagccaggactgtctccagttt

SEQ ID NO: 531516 - DNA, 51 bp, Homo sapiens
gtcaaggataagtctcatgacaccaatgtcacgtcatctcctcagtattct

SEQ ID NO: 531517 - DNA, 96 bp, Homo sapiens
gaatggctcaaagaaaagcaaaccgatgtccaggggtcttgtgcaggacctgaaagtgaatactcccccagttgcaagaggcgcaggaccgtggaa

SEQ ID NO: 531518 - DNA, 95 bp, Homo sapiens
acccggacacctggaagctgggaaatgtatggcatgcagctgtaccagaattatatgcatccatatcaaggtagaagtggctgcagttcacagag

SEQ ID NO: 531519 - DNA, 100 bp, Homo sapiens
gcaggagaaggctggatggggccatcaacagggtccccgtgggattctaccagagggtgtggaagatcctccagaagtggaggccatagtggagtttgac

SEQ ID NO: 531520 - DNA, 75 bp, Homo sapiens
gcggcttggacgactcggagagccgatgcagacaacatatgttttacagagtcttcatttgaggattccagaaat

SEQ ID NO: 531521 - DNA, 75 bp, Homo sapiens
cttagagggcctccccaggccgcctccgcccgtgaagctgttaaacgtttaatgaaagaagcggcagaattgaaa

SEQ ID NO: 531522 - DNA, 99 bp, Homo sapiens
cagcaacagagctgggtccgggtgtacggctttcattaaagatagaaccagggacaagcaccccacgttctgctgcttccagagaagatttagtaggtc

SEQ ID NO: 531523 - DNA, 98 bp, Homo sapiens
tgcctgacctgcagctggaagtgtttgggcatcatgacggtgatgtcagctctgtcggtggccccctccaaggcccgcgagtactccaaggagggctg

SEQ ID NO: 531524 - DNA, 90 bp, Homo sapiens
agcacacccagaaacttcacacgatgcagaccccaggtcccttcaccgatgttgtcaccaccaacctaaagcttggcaacccgacagacc

SEQ ID NO: 531525 - DNA, 82 bp, Homo sapiens
ccgggagatcccaggcggtgacagagtggagccatggctagagtgcctccggagccagcgtggtggccatagacaacaagat

SEQ ID NO: 531526 - DNA, 90 bp, Homo sapiens
agagaatcaaccttctgaattcaggaggatagaatctccactgaaacatcagagtattgggaaagggtcgttgtggtgcatagacccaga

SEQ ID NO: 531527 - DNA, 87 bp, Homo sapiens
tgctaaggaagcaaaaaaggctaagcaagcatctaaaaagactgcaatggctgctgctaaggttcctttggtatcatccacaagtga

SEQ ID NO: 531528 - DNA, 100 bp, Homo sapiens
agggcttcctggacacccttaaagacctcatctccgactctaaccccatggagttggtccaggtagcaatgatgagacccttttatctgctgttgccagt

SEQ ID NO: 531529 - DNA, 80 bp, Homo sapiens
gaagagaatgcctgaagacttggatgaaaatatggattacaggttgatgtgggagaaacctctgcgccatgagagccaag

SEQ ID NO: 531530 - DNA, 98 bp, Homo sapiens
cctcccaagtagctggattacagacctggatgagccaatgctgacggtgcaccagacggtgagcgatgtgcgaggcaacttctaccaggagaagacgg

SEQ ID NO: 531531 - DNA, 90 bp, Homo sapiens
tggaaggcagtgatggtgatagtgctaatgacactgaaccagactttgcacctgaatgcaaacggaatccctgcaaaccctgcactgcca

SEQ ID NO: 531532 - DNA, 141 bp, Homo sapiens
actgtgtccaacaatgtgccgggttccgatttcagcatcggggcagacaccgccctgaacactatcaccgacattatgtttgagaccttcaacaccccggccatgtacgtggccatccaggccgtgctgtccctctacgcc

SEQ ID NO: 531533 - DNA, 100 bp, Homo sapiens
gtacgcttcgaggacttcacggagctctggagaaacatgaagttcgggactatcttctgctgggcagatgctcaaactcaaatccaaaacattgctgcat

SEQ ID NO: 531534 - DNA, 100 bp, Homo sapiens
aatatgtggatgctgtattgggaaaaggacatcaatacttcggaattgagcttcttggacacttaatgattgttggcaagaaatgtgctgctgatctggg

SEQ ID NO: 531535 - DNA, 83 bp, Homo sapiens
ctccttatccgaaccccagtcagaccgatctgctctgctctcgaagctgcacacatacatgtaagagaagcaaaaatgtcaga

SEQ ID NO: 531536 - DNA, 100 bp, Homo sapiens
tatgtccccgcaccgggctaccagcccacctacaacccggtttcttccaaggtgaaatccagtcccacctggtattcagcatcttccttctcttcttcag

SEQ ID NO: 531537 - DNA, 74 bp, Homo sapiens
agcccgcggcgaccaagatcaggaacctgccctgctttgaaagccaacacatcctcctgagaggggacaagaca

SEQ ID NO: 531538 - DNA, 100 bp, Homo sapiens
tgctgcagtgacccagaccctctcctttccctttgagaccgtgaagagaaagatgcagggtattatcatctaccgagccgcctacttcggtatctatgac

SEQ ID NO: 531539 - DNA, 75 bp, Homo sapiens
gccggaacaccctggaagccgagaaatggatctcctgtatcgaaggtctaggtcactagtggattatgaaaatgc

SEQ ID NO: 531540 - DNA, 95 bp, Homo sapiens
gaagcctggaacaaagttgcccactcatttaactgcacgccaatagaaggtcaccagaaagacctacaggggatcttagagaaagaatgaagaac

SEQ ID NO: 531541 - DNA, 80 bp, Homo sapiens
gacgcacgccactttttctctgctgatccaggagtcagtggatcggtggggaaaatgctgcttaccctgggccctgggct

SEQ ID NO: 531542 - DNA, 76 bp, Homo sapiens
ctcagcttcaggagtttggtcaaagcaaccgaaaaggagagtttcctggacttgcaattgtgaccaaatatattac

SEQ ID NO: 531543 - DNA, 100 bp, Homo sapiens
acatgcactgcccagacaattgtggacaattcttcagcttcagctgaccttgtagtgagaggtttaccgacaagactgtgaaactttcgggatggtggtg

SEQ ID NO: 531544 - DNA, 100 bp, Homo sapiens
catgaatggaggagacgtattacaacttttagctgcagtggagctagagttaattgttaaatccagtatggccacaggaggaggtccctttgaagatggc

SEQ ID NO: 531545 - DNA, 50 bp, Homo sapiens
gccgctgccgcacctccgtagctgactcgaatgataacactttgtgtcca

SEQ ID NO: 531546 - DNA, 76 bp, Homo sapiens
agaaaacacatctttacacactaaaataatcatgtacatggacagccatatacaggaccagcagcacatcacttga

SEQ ID NO: 531547 - DNA, 100 bp, Homo sapiens
ctgaagtggtttgcaacatccttcttctggataacactgtacaagctttcaaagtcaatcactggaagatcaattcttttatcatccatactttagaggc

SEQ ID NO: 531548 - DNA, 83 bp, Homo sapiens
catcctttccttgttgggctgcattcttgctttcagacagaaagcaggtgaatcaaaaactctggttttaagcaacctctcct

SEQ ID NO: 531549 - DNA, 83 bp, Homo sapiens
gagatattctactccatctcattcattgtacagggaaatcctcattgacgattcaatttgttgaaggccaatttgtggactcc

SEQ ID NO: 531550 - DNA, 100 bp, Homo sapiens
tggggctccgcgaggaaaacgagggcgtgtataatggaagctggggaggccggggagagctcacaggaggcaaagagtccgaaggtggagctgcacagcc

SEQ ID NO: 531551 - DNA, 50 bp, Homo sapiens
cggagtcggcgagcccccgcggcgacaggaggcaaaaccttcaactgagg

SEQ ID NO: 531552 - DNA, 100 bp, Homo sapiens
cagccctcgctggaccagaccatggccgcggccttcggtctgggaagggtacaatgtcgtccgcgcctcgagggccatgattggacacaccgactcggct

SEQ ID NO: 531553 - DNA, 100 bp, Homo sapiens
acagaaggcatatgaatccaaaattgattatgacaagattctggatgaaattgaagaacataacatcaaaatctatcacttacctgatgcagaatcagat

SEQ ID NO: 531554 - DNA, 98 bp, Homo sapiens
attcaatgccatgctggcagcactgaccccttcgagattagctgtggctttccaagctatgggtgccatgaaggcagaaatactcagtgtcctcagtc

SEQ ID NO: 531555 - DNA, 58 bp, Homo sapiens
tttggggcaccacagagatgcggactgtgccctgtccacggtgcctcctgcatgtcct

SEQ ID NO: 531556 - DNA, 100 bp, Homo sapiens
catgagggtgttgaaaaagactgggaatgagcaagaatggaagatcaagctgcaagtgcttgaagctgtacattggaatgcgtttacagtcattgtaatg

SEQ ID NO: 531557 - DNA, 99 bp, Homo sapiens
cacaactatttatgccaacaccatcaatacttttcggattaaatctggaaatgaaaatggagagttctacctacgaggtgagttctgcagtcagggtgt

SEQ ID NO: 531558 - DNA, 100 bp, Homo sapiens
cgaagaggctggactcggattcgttgcctgagggccatgaagcccccaggaggagaatcgagcaatctttttggaagtccagaagaagctactccttcca

SEQ ID NO: 531559 - DNA, 96 bp, Homo sapiens
cctgatcggcggccgccatgttaggagcgcagtggcggcgcaaccagccttctagggcggcggaggcaaatcctcccccagtactggtcaacacag

SEQ ID NO: 531560 - DNA, 100 bp, Homo sapiens
gaaacagactggggcagtggaaaaggtggaagagcagtgccatccattgaatgggttgaacttttcacagaaatgagccgtcagactgctacagcattac

SEQ ID NO: 531561 - DNA, 87 bp, Homo sapiens
cacaggatgctgtagtagcaaatcaggacaaagcccacaaacgctatctgctaatgagcattgaccagaggaaaaagatgctcaaaa

SEQ ID NO: 531562 - DNA, 75 bp, Homo sapiens
ccttgatcttcgctgtggcatggcggacgaggggaagtcgtacagcggttcatgaagatttgcccgttttcttct

SEQ ID NO: 531563 - DNA, 99 bp, Homo sapiens
gggactccgaaaaaacaaaacaaatatgaactatgataagctgagcagagccctgcgatactattatgacaagatctgcttggctttgaggaagagtgg

SEQ ID NO: 531564 - DNA, 80 bp, Homo sapiens
agtgttgacctatgcctctccgccactcatcaccaatgtcacgacctgcctagagctggaacgttacctccagagcgagc

SEQ ID NO: 531565 - DNA, 100 bp, Homo sapiens
agaggagcatctgaaatcaagtaatattagaatacagattctgttcatcttgctctgaaattaaataattctgaactcatggggagaaaactcagagtca

SEQ ID NO: 531566 - DNA, 100 bp, Homo sapiens
acgaatgggaagccaagtgccatcttcaaaatttcaggtcttaaatctgtcaagctgcagtttcagctcaggccacatcaaatgtcaacccaacccagcc

SEQ ID NO: 531567 - DNA, 50 bp, Homo sapiens
cgccactgccgcaggaggcgtgagattcgacggaggcgccttgcacgact

SEQ ID NO: 531568 - DNA, 98 bp, Homo sapiens
ccaggctcgcctcgactccaaatggttgaaaacagatatacaggttttgattcccaccatggccatcacccagtttcggttatttaaattttgtacct

SEQ ID NO: 531569 - DNA, 83 bp, Homo sapiens
ggaagaagtacgaggcggacatgtgcgtgaggacactcatgaggaccatgatacttccactgagaatacagacgagtccaacc

SEQ ID NO: 531570 - DNA, 100 bp, Homo sapiens
tcggcagcaagaacagagagagaggtggacagatctgagagatactgagatgaagactggcccatttgcagagcactccaaccagctgtggaacatcagc

SEQ ID NO: 531571 - DNA, 75 bp, Homo sapiens
aggacttggtcaagagcggaagcaagcacaggtgcagacccgcagctctgatgagcccatgaccacctttgttgt

SEQ ID NO: 531572 - DNA, 100 bp, Homo sapiens
caggaagttccagctctgcgccgatctatgcacgcagatgctggagaagtccccttatgaccagatacactgcctctaggactgggacagatagccactg

SEQ ID NO: 531573 - DNA, 98 bp, Homo sapiens
ttcgagtgacccgggtgccgaggagcgggaagagttgctggggtacaccaggggttggaaaaaccacactaggcaaagaacttgcgtcaaaatcagga

SEQ ID NO: 531574 - DNA, 100 bp, Homo sapiens
cttaggtatttaagtactgaaagttgcacgtgcattatttaatcacatagacaagtcaggattgaaggatagttctgtcgaagaactcaagaaaagatac

SEQ ID NO: 531575 - DNA, 100 bp, Homo sapiens
aacatctgtagcatcaatgagtcagacaagcggtggtgaggcaggctcgcctcctccagctgttgttgctgctggtgatgacacaatgactggtgatggg

SEQ ID NO: 531576 - DNA, 75 bp, Homo sapiens
agcatggagtcgcccgcctcgagccagcccgccagcatgccccagtccaaagatatcagttttagagaatgtggc

SEQ ID NO: 531577 - DNA, 75 bp, Homo sapiens
acctcgctgtacgccgagcacccaggcgactgcctcatcttcaagaaaactttagaaactgttcctttggagagg

SEQ ID NO: 531578 - DNA, 75 bp, Homo sapiens
acctggatccttggatacaggaaaccaacagtcacacatgtacattacagggcggcgactggcggcgcgatggac

SEQ ID NO: 531579 - DNA, 90 bp, Homo sapiens
atcgtgtgattgactttgatgagaacactgctctggatgatgcagaagaggagtcctttaggaaggttccaaggaatcctgatatcccaa

SEQ ID NO: 531580 - DNA, 82 bp, Homo sapiens
gtcctcagcgactcttctgacctccgcgcgacgtacccgccgccgccgttggctggagaatatatacagccctgctctggga

SEQ ID NO: 531581 - DNA, 100 bp, Homo sapiens
atggaacatgatggaggctcatttttaatgtccaaagtggaccaagatctcattatgactcagaaaaaggaaccaaatggcgagacaccatcatctttat

SEQ ID NO: 531582 - DNA, 80 bp, Homo sapiens
tcaccaggtttcggtcggccgtcagagtatccattgcaatttccagaatgtgaaagatgttgcagaagtgttccagaagt

SEQ ID NO: 531583 - DNA, 74 bp, Homo sapiens
gcattgacatttaattttagggtcctttatatagaagggagagtaggccacggcatatgcctccaaggacgggg

SEQ ID NO: 531584 - DNA, 90 bp, Homo sapiens
caggatggaggaagagtaatgaatatggcagttccaaaggcacatcggccaggttgaagctccattcataccaaagtttagaggctctgg

SEQ ID NO: 531585 - DNA, 83 bp, Homo sapiens
ccgcctgctcggcgaggaggtcgtccgggtgctgcaggcggttgtggactctctccaaggtaactaggatttctacctcaacc

SEQ ID NO: 531586 - DNA, 105 bp, Homo sapiens
ccgtgggtctgtgaagaggtcggcggcccctgcgggcgccagtcagacagcccacctgaggatattgaccataaggactcatatctcattacaagaagcatcatg

SEQ ID NO: 531587 - DNA, 75 bp, Homo sapiens
tcacatacaacctccgagaaggtcatgagagtgatgtttcctatgttattcgagatgaagtggagaagtacaacc

SEQ ID NO: 531588 - DNA, 90 bp, Homo sapiens
ctgctggagagggagatcaaggcggccatcgaagacggcaatttggaggaaatggaagaggaagtacggcttaagaagcgaaaaagacga

SEQ ID NO: 531589 - DNA, 100 bp, Homo sapiens
cagctggatattgagccggatagacctattggatatggagcctttggtgttgtctggacagaactgtaccgctctctttttggccagctccaccctcccg

SEQ ID NO: 531590 - DNA, 49 bp, Homo sapiens
cgcggtgctgcgagggcagaacctggttgtgctgcatggaaacaacctg

SEQ ID NO: 531591 - DNA, 50 bp, Homo sapiens
cagctcttcgaggagcttggcaagttaaggcggctcagaaacaagacagc

SEQ ID NO: 531592 - DNA, 100 bp, Homo sapiens
aaggagctggaggtgaccctcaggaaggagtcaagactgagaacaacgatcatattaatttgaaggtggcggggcaggatggttctgtggtgcagtttaa

SEQ ID NO: 531593 - DNA, 98 bp, Homo sapiens
gtcctgagatcaaatggcacttcattggccacctacagaaacaaaatgtcaacaaattgatggatgttgatgttagtgaagattcacctcctccccta

SEQ ID NO: 531594 - DNA, 97 bp, Homo sapiens
tgaatctttgtgtttggctgcccaggctcgcctcgactccaaatggttgaaaacagatatacagaaactatccaactctggccaatattgaaaggaa

SEQ ID NO: 531595 - DNA, 100 bp, Homo sapiens
acctaagtctgtttgcaaagcacctgaactgctgtgactaatactactgtagaggatgagactgaaacaaatgaagttcaaggatttctctttgggaaac

SEQ ID NO: 531596 - DNA, 50 bp, Homo sapiens
gaaatcttccaagtccaaggatgtatccatgttcactagcggccttacag

SEQ ID NO: 531597 - DNA, 75 bp, Homo sapiens
cctgatggccttcaagcatcccaagaaacccctgaacttccagaacctgccagaacatttggaccagttgctaca

SEQ ID NO: 531598 - DNA, 83 bp, Homo sapiens
gaggaaaacaacttcgagggcagaacttcccaagtaagaagcggaagaggagccgctggaaccaagacacaatggaacagaag

SEQ ID NO: 531599 - DNA, 51 bp, Homo sapiens
ctacaaagaagacttggtttgataagaaagaaatactgagccttgataaac

SEQ ID NO: 531600 - DNA, 75 bp, Homo sapiens
cagcatattgtactggcctgctgctggcccgcaggagtacatctcggattttcctcttaacaaacaataatctcc

SEQ ID NO: 531601 - DNA, 74 bp, Homo sapiens
cagaaactatatgccaccatggagaagcataaagaggagctgatggtacacacatggatggtgatcaaattgtt

SEQ ID NO: 531602 - DNA, 90 bp, Homo sapiens
gtagacatggaggccgtcggggagacgctgtggtgtgactggggcaggaccatcagatttggagcaagaggtggtggtggccttcccccg

SEQ ID NO: 531603 - DNA, 75 bp, Homo sapiens
gaataatatttatggagcatatattatggaacacaaactttttaacaacagtggctattcttttggaagcaggag

SEQ ID NO: 531604 - DNA, 100 bp, Homo sapiens
caagagacgatcattctgcaagcaggcaacctgaatacagaagctccaccatgaggcgaggtggatggaggaagcgagctgaaaatgatggctgggaaac

SEQ ID NO: 531605 - DNA, 136 bp, Homo sapiens
cggctgctgtcggcgctcttctacgggacctgctccttcctcatcgtgcttgtcaacaaggcgctgctgaccacctacggaccaggtgataggtttgatcgagacagaccgttgagaggacgtggaggcccgagag

SEQ ID NO: 531606 - DNA, 105 bp, Homo sapiens
agaaaagatgccctctgaatctttgtgtttggctgcccaggctcgcctcgactccaaatggttgaaaacagatatacagtttccagccagagacgacactcttcc

SEQ ID NO: 531607 - DNA, 90 bp, Homo sapiens
aagttctcagtgtttacaaaggagttgacagcacttttcaaaaacctgctggccagctcagcgtccctggaagggaagggacaactgaag

SEQ ID NO: 531608 - DNA, 95 bp, Homo sapiens
ccacgacatatacgtctgcggaaagaccattaacctgctgaagctctgctgcccccggcacctgaactcctggggggaccgtcagtcttcctctt

SEQ ID NO: 531609 - DNA, 99 bp, Homo sapiens
agggatcaaaactcattcgaaaagctaaagaggcaccattcgtacccgttgtcgagttgaactgaaaagattatgtgaaattttcacaagaatgtttgc

SEQ ID NO: 531610 - DNA, 87 bp, Homo sapiens
gtggtgggcggccagagcgccggcaagagctcggtgctcgagaatttcgtaggcagggaggctgccggcgtggaccgcgggaaggcg

SEQ ID NO: 531611 - DNA, 95 bp, Homo sapiens
gtgctggggtggagagagtcgttcgacctgctgctgagcagtaaaaatatgggcacggttatgaaatattttgtgttacttgtaacagttcaaag

SEQ ID NO: 531612 - DNA, 83 bp, Homo sapiens
gggttttcttagccctctacttttcaagacaccaagtgagaggccaaccagctttaaggaagcctcctatttcagtttctcaa

SEQ ID NO: 531613 - DNA, 100 bp, Homo sapiens
tgacagactaagagcaaagctacttccattccagaaagatggcatcatttttgccctcaaaagaaatggcagaattgctttagatttccaaagagggaat

SEQ ID NO: 531614 - DNA, 76 bp, Homo sapiens
gagccgctggggtcccttttgcctcagatactattttgaagcaagacacgctggatgcagatatccacatagagac

SEQ ID NO: 531615 - DNA, 87 bp, Homo sapiens
agaagacagaagataaagataaaccccttatttataaaggttgtctgcattcaaaagagcattctattaaagctaccttaatttggc

SEQ ID NO: 531616 - DNA, 100 bp, Homo sapiens
acatcgagatcaaccgggagccgggctaaactgtgaaaatgcagtcctcaaagagaatttgaaagtgaaaacagaagaaattaaaatgctgaagtctgac

SEQ ID NO: 531617 - DNA, 98 bp, Homo sapiens
ctgctttccccccacctgaacagaaaactgcatttgacaagcaaattgctcgaccctcgcaagaagaaaaagtagaagaaaaagaagaggataaagca

SEQ ID NO: 531618 - DNA, 74 bp, Homo sapiens
ctccgcgtcccgctcgctgggagagagggagtgcatccgccccaacccttttccccctcgtctcctgtgagaat

SEQ ID NO: 531619 - DNA, 83 bp, Homo sapiens
tgcagcatcaaagaggcaggagacaatggctttggccacagccgtcttgtgaaggaaaacctgattgactacttcatcccctt

SEQ ID NO: 531620 - DNA, 85 bp, Homo sapiens
aagccggagccgccgcaagccacacgctgagctgactgctgcccactttggaggaggcggtgggctccttcacaagaagactcaa

SEQ ID NO: 531621 - DNA, 82 bp, Homo sapiens
ccggacagccgcgcgctgagggtctcggggcgggcgccgcgggacctctccgggccatggaggccacaagaggaagctgaat

SEQ ID NO: 531622 - DNA, 75 bp, Homo sapiens
tcagacttggagccccgtaggagcaggaaatccacgatggtgattgctcacaccaaagccttggacccctcccag

SEQ ID NO: 531623 - DNA, 101 bp, Homo sapiens
ggagagtaggagacacagctttctggcgaggacctttcggagatttcttctataaaccaaaccagggaacacaacagtagatgagttaatgatgagactca

SEQ ID NO: 531624 - DNA, 90 bp, Homo sapiens
agtgatgtccaggaaggaggaggaataatatttatggagcatatattatggaacacaacacaatgaggcatatacatggacaaatcccac

SEQ ID NO: 531625 - DNA, 75 bp, Homo sapiens
ggaagggacgcccatgtggcacctcgcatgttcaaaaggcaaggtcttgctatgttgctcagactgatcttgaac

SEQ ID NO: 531626 - DNA, 100 bp, Homo sapiens
gctcgctatatttatatttcctacctggagaatgcctggactgttctccccatggaagttcttcaaggtaaacactacacgtgaagagtggtgaaaggga

SEQ ID NO: 531627 - DNA, 100 bp, Homo sapiens
caagtggtgcaggctgtggaacgggccaagcaggtgaccatggcagaactgaacgccatcattgggactgaaatcgccaagagattgaatacgatttgtg

SEQ ID NO: 531628 - DNA, 75 bp, Homo sapiens
cagcttcacctgagggatccagtggcattccagatgttgaagtgaaaggagagtgttctagctattatctcttgt

SEQ ID NO: 531629 - DNA, 90 bp, Homo sapiens
attaaagccatgcccgaggatgctaaggggcaggcatctaataggattcaggaatcaaagaatcagtgtactcaggtggtacaggaaaga

SEQ ID NO: 531630 - DNA, 100 bp, Homo sapiens
cccaacagaagctcgccaagcataatatgtatgccaaagcagcagccttctcgacagccttttactgtgaacagggattatcttgaacacataacctcca

SEQ ID NO: 531631 - DNA, 75 bp, Homo sapiens
tgtgtggtcgcgtctcggaaaccggtagcgcttgcagcatggattaagcatgaaaatattgttgccctggaagac

SEQ ID NO: 531632 - DNA, 82 bp, Homo sapiens
cctattcagaagaggacacagccatgcagatgactccttttcccacccaggtggatgaaaatactaggaaaagtttatttaa

SEQ ID NO: 531633 - DNA, 75 bp, Homo sapiens
ggcccagctgcgcctggcgcaggaggccgcccagggtcggggtctgcagcccctgaagctggactaccgcgccct

SEQ ID NO: 531634 - DNA, 100 bp, Homo sapiens
ccctatccagccccattctagaactgcattcagaggacacacttcagatggaatccttgttgcctgatgactatgtggttccccttgactggaagacact

SEQ ID NO: 531635 - DNA, 74 bp, Homo sapiens
caaataatagctgtttgtattttggctgctgcaggagccattttagttccagctcaaccaagataaaatgaatt

SEQ ID NO: 531636 - DNA, 101 bp, Homo sapiens
accggatggccactcatcagaaggactgctcgctgccatatgctacggaatccaaagaatgcagggcgtctctggccgagcctctttttgtggaaaacgac

SEQ ID NO: 531637 - DNA, 82 bp, Homo sapiens
aaaggggcagatcgccggcaccacgagagcccggcccgcctgtgtggacgcaagagtgagccatggagctacgtgtggggaa

SEQ ID NO: 531638 - DNA, 75 bp, Homo sapiens
ctggaaatcagtggtttgttactggatctgctgacagaactataaaggcttccaactgaatatgagaggaacggg

SEQ ID NO: 531639 - DNA, 75 bp, Homo sapiens
tcatctactaggcaagcatggagttggcaccccaaaagaaagccccactgtgttctccttgcctcaaaagaaaac

SEQ ID NO: 531640 - DNA, 95 bp, Homo sapiens
gtaaatgttctgagtatttgctctgatgatgaactaatgactgaaggtgaagaccagtttgatgccatcaggagttggtatcctctttgcagatt

SEQ ID NO: 531641 - DNA, 75 bp, Homo sapiens
ctcttgattatgatagttcagatgacagtgattttaaagttggagatgcctcagtcctattttgtaacggattat

SEQ ID NO: 531642 - DNA, 100 bp, Homo sapiens
aggccgcagagctaaatgggggcctctccagggagtgctctgttcacggctccatcgctgttagagcggcctattgccaattcatggacatgctcttccc

SEQ ID NO: 531643 - DNA, 100 bp, Homo sapiens
atggagagcttctttctcagtgagacctgtaaatatttgtatctggtcaattcagtgaagatatgatacccacagtgggcttcaacatgaggaaggtaac

SEQ ID NO: 531644 - DNA, 100 bp, Homo sapiens
cccgcgcctgggctgccggcacttcgcggcagattttgcaagaacgaggctcaaggatgtgagggacacagtattgacagctgaagaaatgatttacgtt

SEQ ID NO: 531645 - DNA, 101 bp, Homo sapiens
aggcccctcgcctgattgaggagtcctccgtagacgagatacttggcatatcgaaattttatgattgacacgtatcgtctaaacccccaagagtatttaac

SEQ ID NO: 531646 - DNA, 73 bp, Homo sapiens
cttgggagacacatggaaatctcatggaagagagaagggcacagttacctaagtatcaacgtaatcttcctcg

SEQ ID NO: 531647 - DNA, 50 bp, Homo sapiens
gggggaccagcccctcaccacctcccaggacaccagccatgccctttgct

SEQ ID NO: 531648 - DNA, 101 bp, Homo sapiens
gtgcgcagaaggattccgggagcacagttccgccgagtgctggagaatctggtaaaagcaccattgtgaagcagatgaggatcctgcatgttaatgggttt

SEQ ID NO: 531649 - DNA, 100 bp, Homo sapiens
ggcaccacgaacgcctttgtatgggcctaaaggccaagccgaggcctgcctggagccccagatcaccccttcctactacaccacttctgacgctgtcatt

SEQ ID NO: 531650 - DNA, 75 bp, Homo sapiens
gcttggagcacttcctattccactggattgggaaagaccatggcagatgcacccacctgcccaaagcagtgccgc

SEQ ID NO: 531651 - DNA, 88 bp, Homo sapiens
cccttgacatcaaccagttactatttgcccaaaaaggtcagtggttgagtggcttttttgactatggatctttctcagagattatgca

SEQ ID NO: 531652 - DNA, 100 bp, Homo sapiens
taaggctgatgccccaaaaggcactattacctctctagtgacccttcagctgttaaccctggttggccatgacgatcagcttgatggaccaaaatacaaa

SEQ ID NO: 531653 - DNA, 75 bp, Homo sapiens
gccagaaggctagaagaatcagacgtgctccaggaggccagaaggaaatactctattatcctcccagtccacaac

SEQ ID NO: 531654 - DNA, 83 bp, Homo sapiens
ctacccttatcccggagagctgacaatgatgaatctcactgtttttctgatcgaggctctctgaagagcataatgcagtccaa

SEQ ID NO: 531655 - DNA, 100 bp, Homo sapiens
gtaccatcatgggtagcctttgataaacagagagacaagagagacacctccaacttcgacaaagagttcaccagacagcctgtggaactgacccccactg

SEQ ID NO: 531656 - DNA, 74 bp, Homo sapiens
aaactcacatgagacaaatgcgctcagcttcaattgtatcaccttttgccatgatagcatttctttcattggac

SEQ ID NO: 531657 - DNA, 75 bp, Homo sapiens
gcaaaattcagagagattgcagaaggctattcatgctcttatggaaaatgctgtgcaacccttactcacttctgt

SEQ ID NO: 531658 - DNA, 75 bp, Homo sapiens
cgttaaagtctctcttcaccctgccgtcatgtctaagtcagagagggtgcctcagaagaggagatcagacttagc

SEQ ID NO: 531659 - DNA, 121 bp, Homo sapiens
cggaagaccgcgcgcagggcctgcagcgggagctggacggcgagcgcgagcggcgcgagaaaaccatggtgaatccgggcagcagctcgcagccgcccccggtgacggccggctccctctc

SEQ ID NO: 531660 - DNA, 90 bp, Homo sapiens
atcttgattcaaaacatctatcgtaatccccaaaacagtgcacagacggctgacggctcacactatgccttcaattaagttgcagagttc

SEQ ID NO: 531661 - DNA, 75 bp, Homo sapiens
actaagccgattttccggaaaaaggccacggcgtatgcctccgaggacggggtcctgaccgaggccatgatggac

SEQ ID NO: 531662 - DNA, 89 bp, Homo sapiens
taaaaatggcgattctgcaaccaagcacctgaaacagcaggtgtaaatgcagacaaagttggaattgaagctgccgaaatgctattagc

SEQ ID NO: 531663 - DNA, 72 bp, Homo sapiens
gctttcagccggagaagcgagtttcagctgccatgtttcctgagagactgggagttgcaggtgcacttcaaa

SEQ ID NO: 531664 - DNA, 50 bp, Homo sapiens
gggagaaggaaggcaggcagcaggcagcacgagtacacgagacaggattg

SEQ ID NO: 531665 - DNA, 75 bp, Homo sapiens
cccggaaatgtccggcaagatcgagaaagcagtgcagggctcgcggcctggcaagaatgtacagctgacagagaa

SEQ ID NO: 531666 - DNA, 124 bp, Homo sapiens
tctgcttaacccttggctccaccataaggcactgggactcggatttctctatctgatagagatgccagcacgagccgccgcttcacgccgccttccaccgcgctgagcccaggcaagatgagcg

SEQ ID NO: 531667 - DNA, 82 bp, Homo sapiens
ctttacattagcagatatactattgtactatggacttcatcgctttataacctgatggccaaaagaaaggaagaaaattttt

SEQ ID NO: 531668 - DNA, 75 bp, Homo sapiens
gtcactgcactcagttgctggcttccacttcgggcttcctttccacagaaactcatcactgctatatatgcagat

SEQ ID NO: 531669 - DNA, 100 bp, Homo sapiens
gctcaagctcatcgacttcggttcgggtgcgctgctcaaggacacggtctacaccgacttcgacggggacggcaaaacagaacagaaaggcggagataaa

SEQ ID NO: 531670 - DNA, 75 bp, Homo sapiens
gaacatccacaaggcacctgcaaggcgcatattaaatttcctattgactacccctattcaccacctaccttcaga

SEQ ID NO: 531671 - DNA, 100 bp, Homo sapiens
gccgtggcccctgcagcggaaccggacccagtccctgagccgcccctacacccacagatctcagccagcttttatgcaaagcagtttatcccagccatct

SEQ ID NO: 531672 - DNA, 100 bp, Homo sapiens
catcatctcctccaatgccctcatcctcatcgggcagacccagacccgcaacaagatggagaactgcacccagccggctgttgtcaccaaggacttctgc

SEQ ID NO: 531673 - DNA, 84 bp, Homo sapiens
accgggtgcccgctgtgtgccaggccgggtgctgggcacggtcccgcgaggtattgtactgatgatatgctgcaaagagaaatg

SEQ ID NO: 531674 - DNA, 98 bp, Homo sapiens
ctccaccgtcgcctcccactgcaaaaaggcctggtacagaacctgctaaggccatcaaacctattgatcggaagtcagtccatcagatttgctctggg

SEQ ID NO: 531675 - DNA, 100 bp, Homo sapiens
tagagtcattactaaatggggggattaccatcactgtgaacttctggtataagggaatcacttcagtcactgccattacagtgctctacttcctctctcg

SEQ ID NO: 531676 - DNA, 100 bp, Homo sapiens
agcgggagaaggcgctgcgcaagcacgctgaggaggattacattgcagtgaaggagaagtatgccaagtacctgcctcacagtgcagggcggtatgccgc

SEQ ID NO: 531677 - DNA, 98 bp, Homo sapiens
agaggacgccggaacaccctggaagccgagaaatgaacctagaagtcggaatccggaagaagatcgaacatgacgtggtgatgaaagccagcagcagc

SEQ ID NO: 531678 - DNA, 99 bp, Homo sapiens
ctactgtaaaggagatgggttagatgttttcaacttcctcaattgctttgcctcactcttctatattgcctttgtcttgaaagatatgaagcttttgcg

SEQ ID NO: 531679 - DNA, 50 bp, Homo sapiens
aatctaccagtccaatatgctaaatagagacggagtttcgctcttgttgc

SEQ ID NO: 531680 - DNA, 50 bp, Homo sapiens
cgagcaggctgagcgatacgacggctctggcttcatcatgtgcagcggca

SEQ ID NO: 531681 - DNA, 107 bp, Homo sapiens
gaaggacggaagaggccctgcggaggcggcggtgcagcgctccggttctggcctataggaacaagacattttcagtaatggaagaaggagcttccaggctggggaag

SEQ ID NO: 531682 - DNA, 80 bp, Homo sapiens
agtctggagcaggcactgagctgtctgtgcgcgaccctctttcccagctgcccgctcctcagcacccgaagattcgcctg

SEQ ID NO: 531683 - DNA, 83 bp, Homo sapiens
ggaggtgccgcgcggctcggagccctggaagcagcagctcaccgaggacggggactcccaagtttggggccaatgccatcctg

SEQ ID NO: 531684 - DNA, 90 bp, Homo sapiens
cagcatcacaagcctcctttcaccaacgtgaatgaaatttaccatgatgagtccctcggagtgcatataaatgtggtcctggtgcgcatg

SEQ ID NO: 531685 - DNA, 75 bp, Homo sapiens
caaaattcgatttgcaaatcattcagtgaatcccaactgttatgccaaaggcacctacattggatgcttcagtga

SEQ ID NO: 531686 - DNA, 98 bp, Homo sapiens
cgtttagagagtgcttccccttgccgagcactggctcttcctgctgcccacattcctgcaccccctcatgagggtagtcccagagaccaggcgatggc

SEQ ID NO: 531687 - DNA, 76 bp, Homo sapiens
agttcttccgggacatggatgacgaggagtcctggatcaaggtctgttcctggtttcccagatgcataaaggaaga

SEQ ID NO: 531688 - DNA, 98 bp, Homo sapiens
caattttacaagaaaagccatacttgttttctctggggtatgattctaatatggtgggaaagcagtgccactctccgcttcacagatgccccctgcca

SEQ ID NO: 531689 - DNA, 100 bp, Homo sapiens
ggggtgaaggcgctcatggacggaagacccctggctctataagctgaattatggcagcccagtcaaggtggaattctactaagtatcagtcggccctaca

SEQ ID NO: 531690 - DNA, 82 bp, Homo sapiens
ctcaccgatggggtctgcagcgagccattgcctttcacgtacctgcctcgcgaccatgaatatcctccgaatcctaaatcta

SEQ ID NO: 531691 - DNA, 100 bp, Homo sapiens
gccttcctgctctcctgccagatccctggcttgattcaagatggaaaaggtgatgtaaccattacaaatgatggtgctaccattctgaaacaaatgcaag

SEQ ID NO: 531692 - DNA, 100 bp, Homo sapiens
aagctctaccccgaatctcagggctcggacaccgcctggagggtcccgaaccaggaagacagcgcttccagcaacccgtttgcactccccaactctgtca

SEQ ID NO: 531693 - DNA, 82 bp, Homo sapiens
cgtcggtgggtcggggatcggtcgcctgagagagtatcctgagctccagctggaccctaaattggatcctcttcctgctgag

SEQ ID NO: 531694 - DNA, 75 bp, Homo sapiens
gaaaatatggattacaggttgatgtgggaggaacttagtgatttggcccgtgaccctccagcacaatgttctgca

SEQ ID NO: 531695 - DNA, 100 bp, Homo sapiens
gccgcggcgatgactcggacccaggtcttccaaaagcagccatgatcactcatcagcgcatatggtatggaactggcctcacttttgtaagcggattgaa

SEQ ID NO: 531696 - DNA, 83 bp, Homo sapiens
gctcaaagatcttgtctcgctggcctgcgacccagccagccagcaacctggaccgcggggatctgacgagcttttctctactt

SEQ ID NO: 531697 - DNA, 82 bp, Homo sapiens
ccccaccttgatccagcggacttacggcacttgcacctcctgcgccgccgccccccatccaaggatatgccttcaagcctcc

SEQ ID NO: 531698 - DNA, 48 bp, Homo sapiens
tcaagtttgatcttggctcaaaggcctgagaactgggaggaagctgga

SEQ ID NO: 531699 - DNA, 75 bp, Homo sapiens
tgacaatgccttggtttcaacactatcggaatggttatcaatactctggctgaccatcatcatcgtgggactgac

SEQ ID NO: 531700 - DNA, 100 bp, Homo sapiens
ccgggagagtagcagtgccttggaccccagggagaaacaaaggcagcgctgccctcgggggagcattggccctggcggaacgcagcagccgcgaaggatc

SEQ ID NO: 531701 - DNA, 100 bp, Homo sapiens
gttggcgcttggacggcgggaaccggctccggagcgagaacgcgcgttaaacccatccagagtaatggctgcggccttacccaggaccctgggggagttg

SEQ ID NO: 531702 - DNA, 76 bp, Homo sapiens
aaccatcacacaaaagcacacaaagacctcctcctccacaggggagacagagctctctatcaatatcagctcacat

SEQ ID NO: 531703 - DNA, 83 bp, Homo sapiens
cctgctcagctcctggggctgctaatgctctgggtctctgatgatatcatcaagttgaatcgaaaggaagggaagaagcagaa

SEQ ID NO: 531704 - DNA, 82 bp, Homo sapiens
gaagaggagcgccagatggtggaggaatacacttatttatgaaagctggaagtcgagtgtgctactcaactcaggagatttg

SEQ ID NO: 531705 - DNA, 101 bp, Homo sapiens
aatacagtcatggctcactgcagcctcaacctcccaagctcaagcagcaggaagatcttttgagggttcgccatcggtggtgtgaactcattgttaagcac

SEQ ID NO: 531706 - DNA, 75 bp, Homo sapiens
tgctatgaggatgacaaactctggagtaattggagccaagaaatgagtatagcctcacagaatgaggttcctgcg

SEQ ID NO: 531707 - DNA, 50 bp, Homo sapiens
gcaggcatcatccgctatgcaattggggattacaaggcagaggaagaccc

SEQ ID NO: 531708 - DNA, 150 bp, Homo sapiens
attgcaatcatggtgcagaaataccagtccccagtgagggtgtacaaatacccctttgaattaattatggctgtactccaaagattcaggtttactcacgtcatccagcagagaatggaaagtcaaatttcctgaattgctatgtgtctg

SEQ ID NO: 531709 - DNA, 90 bp, Homo sapiens
gtgggagtctccgcgtcccgctcgctgggagagagagccatttcctgcttttaagtcttggcaggaggactctgagtctggagaagctca

SEQ ID NO: 531710 - DNA, 82 bp, Homo sapiens
ctcgggcaaagcgttatgagaagctggacttccttggggagggacagatattaacctggctgcagagccaaaagtgaaccga

SEQ ID NO: 531711 - DNA, 74 bp, Homo sapiens
cagaagtccagggaatggctggcccagcagctgagatcacagccactgaagatcctggtgtcgccatgggccgc

SEQ ID NO: 531712 - DNA, 101 bp, Homo sapiens
gcgcgcctgccttctctcgccgccgggaacgggctgcaccaatggccagatttttggagcatatgcaactcatcctttcaagttcagtgaccactattatg

SEQ ID NO: 531713 - DNA, 83 bp, Homo sapiens
cctcctggccccatccgtcttcaaagccagcagtggccaggagggtgtgaagacagagaatgaccacatcaacctgaaggtgg

SEQ ID NO: 531714 - DNA, 117 bp, Homo sapiens
cagctacttgggactcctctctcaagagaagctgcaagagcaacatctttcctcaccccaaggtcgccactgggacactgtgaaccaggagtgagtcggagctgccgcgctgcccag

SEQ ID NO: 531715 - DNA, 90 bp, Homo sapiens
ctatatctcagccctcaacacgctgtggcatcctgagtgctttgtgtgccggagcactgcagtttcctcctgaaggctggctccggctct

SEQ ID NO: 531716 - DNA, 82 bp, Homo sapiens
accggggcctgggtccacgccgagggcaggacgaacttcaccaggtgctggagaatctggtaaaagcaccattgtgaagcag

SEQ ID NO: 531717 - DNA, 100 bp, Homo sapiens
cggacaagggactaatgcaagcgagacccctgccactcggatgtccataattcagcttactgctggttgcaggggggacagttctaaaaatttgtgattt

SEQ ID NO: 531718 - DNA, 97 bp, Homo sapiens
gagcaagatcggcagccctaaagtgtcatggagaaactccagctgggcccagagattctgcagcgggaaaatccaaggcttatttatgccaggctga

SEQ ID NO: 531719 - DNA, 98 bp, Homo sapiens
gcatccagctgcgggagcagctgccccgctacctcatgggggagacgcagctgtgcaccacaagtgcacgttcgaaggctgtgggaaacgcttttcac

SEQ ID NO: 531720 - DNA, 96 bp, Homo sapiens
cccagaaagagaggaagctcaagcggcaggtattatccatgcagcagaagagaaggactggaaaactgcgtactcatacttctatgaggcatttga

SEQ ID NO: 531721 - DNA, 100 bp, Homo sapiens
ccccactggatgcagctgtggaatgtcaccgtggagaatgtcaagctgaaggcgtcctcttcttccaaggcctgtaggagctgtccaggccatctccaac

SEQ ID NO: 531722 - DNA, 100 bp, Homo sapiens
cagaatcagatcacagctaaggggactgcccagctggcagatgcgttacagagcaacactggcataacagagatttgggaattcacaattgaaactgaag

SEQ ID NO: 531723 - DNA, 100 bp, Homo sapiens
acggggaccgagttggtctccaggcagcacagccctgggagtgcagattctctcagcaatggaactcttaacattcagggatgtggccatagaattctct

SEQ ID NO: 531724 - DNA, 96 bp, Homo sapiens
aaaggcttactaagtacccacttctgttggataatattgccaaatacacaggtacaggtttgcagattccgccagcagcacagcaagctctacaga

SEQ ID NO: 531725 - DNA, 75 bp, Homo sapiens
ccccaatgcggccgcgagaagcagcgggggggcaggcgatcgaaggctgatcagctgaccgaagaacagattgct

SEQ ID NO: 531726 - DNA, 80 bp, Homo sapiens
agcacctcctgctccagtaattggttcgtgctggccgtgggcagcgccgtctttgatgccatgttcaacgggggaatggc

SEQ ID NO: 531727 - DNA, 51 bp, Homo sapiens
cttgtacaccgaagaacggccgcgtgtgatcctgccatgaagcagtttctg

SEQ ID NO: 531728 - DNA, 98 bp, Homo sapiens
acaaattcctgggcacctggaaacttgtctctagtgagaactttgacgattacatgaaagctctgggtgaatctggattgggaaagtcgacattaatc

SEQ ID NO: 531729 - DNA, 102 bp, Homo sapiens
aggaagactgccacacctagactgatgcttattagtcatcaccgttattcctactaacgtcctgtgtcactgagtcactcagcctctgaagaagcttcgggt

SEQ ID NO: 531730 - DNA, 100 bp, Homo sapiens
ttcagactcgtttctacactggagaactcgtcaaagccatagttgttagaacagttatcaggaactgttgccgttattacatcagatgggagaatgattg

SEQ ID NO: 531731 - DNA, 95 bp, Homo sapiens
cgtgtgctttttcaagggagctgataaagaacttcttcccaaaatggttccctgaatgtggtttctacggaatgtatgataagatcctgcttttt

SEQ ID NO: 531732 - DNA, 82 bp, Homo sapiens
tcccacagcccctgcatgccccagtgacaagccagcaccagtccagaagcctccatccagtatcaatgtccgagttaccacc

SEQ ID NO: 531733 - DNA, 90 bp, Homo sapiens
aaataattgaaggaggtgcagcacataaggatggcaaacttcagattggagataaacttttagcatcagcagataagcagagagccctag

SEQ ID NO: 531734 - DNA, 83 bp, Homo sapiens
cacagagttagagagagggatggtgtactatactggcaattgctggagaagattttgcaattgttgcttctgatactcgattg

SEQ ID NO: 531735 - DNA, 86 bp, Homo sapiens
gtcttggctccctcagaagcatcgtgaaaagcctccttctggttccaaatggcaaatgttctgaaaaagactctgcatgggaatgg

SEQ ID NO: 531736 - DNA, 80 bp, Homo sapiens
cgcgccgtggtttttgattctggcggaagccttcccgagtcgagagaacgtgcagaactccatccggcacaacctgtcac

SEQ ID NO: 531737 - DNA, 98 bp, Homo sapiens
gaaagcaaaagatacggatcaaaaaagaaaagacatgaaaaacatactattcctttggtagtccagaaagaaacatggtgtgctctgtgcaactcccc

SEQ ID NO: 531738 - DNA, 78 bp, Homo sapiens
aacagggttcctggggcatcgacgatctccatatttcattgcaagtaccctcttatatatggactgattcttattccc

SEQ ID NO: 531739 - DNA, 89 bp, Homo sapiens
cgcagaagtcgcgtgtctaggtgagtcgcggtgggtcctcgcttgcagttcagcgaccacgacccctttgctgatgcaagtaagggtga

SEQ ID NO: 531740 - DNA, 100 bp, Homo sapiens
atcagacgaactacgaacccctggacgggagagtctgccggcggagaatataagagctttcagcagaggccaaggcagcattgcttgaatttgaagaaag

SEQ ID NO: 531741 - DNA, 100 bp, Homo sapiens
attttgttgagtcgaaagtgaaattttcctttggccaacgtgacaggtactccaaagattcaggtttactcacgtcatccagcagagaatggaaagtcaa

SEQ ID NO: 531742 - DNA, 127 bp, Homo sapiens
atttattccacccttcctgtacatcgtagcgaatcaatccgtggcgccgcactcctccgcatccctctttaacagttttgaagagacaggggacacgctctatgccccctattccacacattttcag

SEQ ID NO: 531743 - DNA, 82 bp, Homo sapiens
ggtggtgaaactggcagttgacggctcctgggactagatcccgcgagacaatgcagatcttcgtgaagactctgactggtaa

SEQ ID NO: 531744 - DNA, 100 bp, Homo sapiens
taaagatgcccattttccaccaccaagcaagcagggtaattgggatacttctggcagcgaactgagtgaaggggaattggaaaagcgcagaagaaccctt

SEQ ID NO: 531745 - DNA, 75 bp, Homo sapiens
cttagggacaacaccgggacacccgcgaggccggaaaatgtggtaagcatccgtggcattcaagacgaagatccc

SEQ ID NO: 531746 - DNA, 75 bp, Homo sapiens
gaaatttcccgggctcagcttgtgggaggtggggaagacagggctccagctaccacaggacgggctctgggtata

SEQ ID NO: 531747 - DNA, 100 bp, Homo sapiens
ggtgggtgagcggcggccacggcatcctgtgctgtgggggctacgaggaaaggtgatgcaggttctgaatgctgatgccattgttgtgaagctgaactca

SEQ ID NO: 531748 - DNA, 75 bp, Homo sapiens
atccgccagtcaataggaagtacgagttgcacgatctgattttctggagagatgtgaagaagactgggtttgtct

SEQ ID NO: 531749 - DNA, 100 bp, Homo sapiens
gctgccgccgaacgacaggacgttggggcggcctggctccctcaggtacttcgtactggatttcgaggctggcatcctgcagtattttgtgaatgagcaa

SEQ ID NO: 531750 - DNA, 90 bp, Homo sapiens
tcctgttgtaactccatgcaataaacagttcctgagtcaatttgaaatgcagtccaggaaaagccctcgggaccaaggatcacgtcatga

SEQ ID NO: 531751 - DNA, 99 bp, Homo sapiens
cgcggttgctacgcgcaccatggctggagagttttgcggcctccaggtggtggatccaatttttcattaggttttgatgaaccaacagaacaacctgtg

SEQ ID NO: 531752 - DNA, 119 bp, Homo sapiens
acggagccagcggctgaggaggggccccagcagcccccgaaggccctatcaggacatggagtatgaaagacgagttcttggagtctctgcggagtccctgggccagatctcacagtgaa

SEQ ID NO: 531753 - DNA, 75 bp, Homo sapiens
ctgaggctcagagatgggtggagtggggacagcatggcgggactatatttccatctgcgggcttcgtacacacgg

SEQ ID NO: 531754 - DNA, 100 bp, Homo sapiens
ctgttttcccctgccttccttgcagaggccatggaggacgaggagagacagaagaagctggaggccggcaaagccaagggtttgtggatgcacttagatg

SEQ ID NO: 531755 - DNA, 50 bp, Homo sapiens
tatgcagtctcttttaccagcattacagcaattggaacttgcacagatac

SEQ ID NO: 531756 - DNA, 90 bp, Homo sapiens
gagaatgtatgaagaacagtcacaggacagccggcctcagaaagtgtgtttgtgtccatttctcccagcgcaccctctgcatatctctac

SEQ ID NO: 531757 - DNA, 82 bp, Homo sapiens
gaaacacctctacctcctgcgaggcctcccgggctccgggaaaactacactggccaggagggagccatggatttgctgcggg

SEQ ID NO: 531758 - DNA, 100 bp, Homo sapiens
ccagaacaaactcaggaccttagttcccaacttcaccttcaacttgggcttctcgggcaagttctatcatactgaaagttcaggagccctggaaaggaga

SEQ ID NO: 531759 - DNA, 100 bp, Homo sapiens
ctggtctctggctccctcctcccagggccaggcgccgctcagaacggtttcgacacagccccaactgctggtacctgagaaactggactatccacacctg

SEQ ID NO: 531760 - DNA, 74 bp, Homo sapiens
tgcccgcgcacggcgctggagtactgcaagctcatcctgaggagggtgaggacaaaatcttcttaatcaacaag

SEQ ID NO: 531761 - DNA, 75 bp, Homo sapiens
tccagaagtagcatggaaatggagggcatcttcaaccacaaaggagaggagaggcagcagcatggcgagtgtcct

SEQ ID NO: 531762 - DNA, 75 bp, Homo sapiens
cagattcagttgtttgcgggcggccgggagagtagcagtgccttggaccccagtaatgggggcctagcagacatc

SEQ ID NO: 531763 - DNA, 75 bp, Homo sapiens
gggctccctcgggcacctccggtaccgctgcagccaccgcggcccccgcggaaaaatggctacaaacttcctagc

SEQ ID NO: 531764 - DNA, 75 bp, Homo sapiens
gatccacagctaagacgccaggacccactggaagcctagaaatgacatatagccatgaagtctactttgacagag

SEQ ID NO: 531765 - DNA, 100 bp, Homo sapiens
ccagagatttccacagaaggactgggatgatacaccttttccacagggaattgagttgggtatacctcagttaccatgtgccaaagcattatacaactat

SEQ ID NO: 531766 - DNA, 50 bp, Homo sapiens
cgaaagtcatgttacccaacaccggaaggctgaggagaatgcagagggtg

SEQ ID NO: 531767 - DNA, 75 bp, Homo sapiens
tgctgaagcaggctgcagactcaggcttgagagagatggcaggattttcataatatatgtagtatgagttccaca

SEQ ID NO: 531768 - DNA, 73 bp, Homo sapiens
tttgcctctgcacagtttcccaatggtggttcagtcaggtggcaaaaacattgaacttgctgtcatgaggcga

SEQ ID NO: 531769 - DNA, 96 bp, Homo sapiens
ggcggcaccaacggcaccaactattcgcggagctggaatgactggcaacccaggttcatatttggtgcttagacaaattcaaaatgaggaaacatc

SEQ ID NO: 531770 - DNA, 49 bp, Homo sapiens
accctactggcaggaggtcaagaatcaggaaacccaggcccaacggcag

SEQ ID NO: 531771 - DNA, 99 bp, Homo sapiens
atgcggggtactgctgccactgggagggctgcgcccgccatggccgaggtttcaacgccagagtgcctggtgaagaatgtgatgggatcactagcatgt

SEQ ID NO: 531772 - DNA, 74 bp, Homo sapiens
atttgactagacggtatgaatttctaagtaagggttctatggcctggatgagtctgacctcgacaaggtcttcc

SEQ ID NO: 531773 - DNA, 100 bp, Homo sapiens
ggttctgatcacatgggccctggggccacagggacaggtttggtcattttccccggagcctttgactggtttctggagtttctgtagaaaatgtttcctg

SEQ ID NO: 531774 - DNA, 83 bp, Homo sapiens
gtttctctccctctgcccccccttccccacgcaaccccagatccatttacactttacagagcatcagatccatgctgctgctg

SEQ ID NO: 531775 - DNA, 88 bp, Homo sapiens
cagctttaattggacagaaatttgcagccaactcagatttaaagcgatctagggcagccctgcagaggtacctgttctactgtaatcg

SEQ ID NO: 531776 - DNA, 51 bp, Homo sapiens
ggcctcccaaagtgctgtgattacagaactgctctacatttggcctgtgcc

SEQ ID NO: 531777 - DNA, 82 bp, Homo sapiens
agtgactcaaactgtgagaacttcagaatacagattctgttcatcttgctctgaaattaaataattctgaactcatggggag

SEQ ID NO: 531778 - DNA, 90 bp, Homo sapiens
gtagagtcgctggagcgggcggagctgtgcgagagcctcctcacttggggcgatgccagtccctccactccagaggagaacgaaaccacg

SEQ ID NO: 531779 - DNA, 75 bp, Homo sapiens
tgcagaacaacctcctggggtcccagggcgcacatgtggctgaatccacagaggagcctgctggttctaatcggg

SEQ ID NO: 531780 - DNA, 82 bp, Homo sapiens
tctgccacatcgttcggttcccacaacagcctgctcgaattacatctttacaagaggaggtgaagcatctcaaacataatct

SEQ ID NO: 531781 - DNA, 90 bp, Homo sapiens
aaggccccgcaggtgaatggagagtagcagccggggcccagagctcttcagaaaccaggctgctttcaggaacattgctgtggattccca

SEQ ID NO: 531782 - DNA, 100 bp, Homo sapiens
cagcattgctgaattcttctctgatatcttcctgtcatggttccccttctactacatgctgaagcactagaaagtttgggatttggctcttacatcagtg

SEQ ID NO: 531783 - DNA, 73 bp, Homo sapiens
ccggacatgatcctctccgcctctcgagggcaattgaaggaacagactaaaaatcgtgtcctggaaggaaact

SEQ ID NO: 531784 - DNA, 82 bp, Homo sapiens
gcttcatcaaaaatagtgatagctttgataatcagtatttacaggatgaaagtaagaccaaaagaaatagtgatctgaatct

SEQ ID NO: 531785 - DNA, 100 bp, Homo sapiens
agaacagcgacagtacaaagaagactcttgtcacactaattgccaacaacaatggaaccacgtgaatgttgagggggcgacacacaagcaggtggtggac

SEQ ID NO: 531786 - DNA, 50 bp, Homo sapiens
ccaagctccactgttcagatgcaaaggagttcatgatcaagtgttgccca

SEQ ID NO: 531787 - DNA, 80 bp, Homo sapiens
aagatgatgaaaaatatgttcctgcccacaaggagttagcgacctactggggagaagaatttggattggtttcctcggat

SEQ ID NO: 531788 - DNA, 100 bp, Homo sapiens
attcattctcgatgtcgtgctaaatcagtgataaaagaagccatggttgaaagcattgaatatagaagacagaatccatctcgttgctctgtttccctta

SEQ ID NO: 531789 - DNA, 82 bp, Homo sapiens
ttcaacaggtagaagatctagaaaggagagttgcatcagcaagtttgcaagtgaagattaagcctgatcaagatgacaacct

SEQ ID NO: 531790 - DNA, 100 bp, Homo sapiens
atagtctggagctcttccaggaggtcctcgatgggcttcctggaatattggtgtgtttatttgcatcagatgtgctggaattcatagaaatcttggggtt

SEQ ID NO: 531791 - DNA, 75 bp, Homo sapiens
gcgacttttgccgcagctcaggaagctgtccagaccaaaacgaagaagacgttagccaaacccaatataaggaat

SEQ ID NO: 531792 - DNA, 112 bp, Homo sapiens
gaaattattacttcttcatgatgctgatgtcaactcccagtctgcaacaggaaactgctgcacgagtaaatcaatcagctctggaagctgtcactccttccccatctttcca

SEQ ID NO: 531793 - DNA, 100 bp, Homo sapiens
cccatcgagtcgaagcaccgcagcctggtgcagatcatctacgacgagaaccggacacgatgaggcgagtggtacgacagagcaagtttcggcatgtatt

SEQ ID NO: 531794 - DNA, 98 bp, Homo sapiens
ccacccacagccgtgcggccagaggccatcaccatcgaggctgagccaagagctgatggcagccgccggaccacccgctatgacatcgacatgaccaa

SEQ ID NO: 531795 - DNA, 49 bp, Homo sapiens
aggacatcctggaacctgggaaagggccatcaccatcgaggctgagcca

SEQ ID NO: 531796 - DNA, 98 bp, Homo sapiens
ccgacagtcctagctaaacttcgccaactccgctgcctttgccgccaccatgcccaaaacgaatgaccagtcaacaggggacataaaagtaattggtg

SEQ ID NO: 531797 - DNA, 97 bp, Homo sapiens
cgcggaaggacgaggctgaggcgagaaacgagaccaaacctggaccacccaaaaagccgaagaccccttcaagaccatcagccttagcatattgcta

SEQ ID NO: 531798 - DNA, 74 bp, Homo sapiens
aagtcccagatacactcaggaagtgtttctcagaggctgctatccatgtccagggccaaacatgaatcctattg

SEQ ID NO: 531799 - DNA, 82 bp, Homo sapiens
cggaaagcatgttgtggctgttccaatcgctcctgtttgtcttctgctttggcccagacagttgcatctataaaaaggtttg

SEQ ID NO: 531800 - DNA, 78 bp, Homo sapiens
gcccctgctcggctgactacaggtgctggagaatctggtaaaagcaccattgtgaagcagatgaggatcctgcatgtt

SEQ ID NO: 531801 - DNA, 75 bp, Homo sapiens
tgaagataacagtgaaatatcagattcagaggatgacagttgcaaattgacttgatgcacaacatcacaaaggcg

SEQ ID NO: 531802 - DNA, 75 bp, Homo sapiens
cacagattccaccaaaagctcaggatgacgatgactattcatcatctacgagtttgcttggtcagaagaagccag

SEQ ID NO: 531803 - DNA, 100 bp, Homo sapiens
aacctgctgaaggccccaaccatcgttgggaaatcatctctaaatcccatcctctttcgaggtgttgggtaaacactcgataatctggataactgactag

SEQ ID NO: 531804 - DNA, 100 bp, Homo sapiens
gcgacgtgggcaagggcgagatcctggagagcctgcaggacggcgcggcagagtccccgtacgcctacagtaacgccttgccaacattccactaaccccc

SEQ ID NO: 531805 - DNA, 100 bp, Homo sapiens
ggaggtgagcggcactctgcccttccagagcaagcatggagcaacaggatcagagcatgaaggaagggcgtcaagggttccacactgttgggagtcgctg

SEQ ID NO: 531806 - DNA, 90 bp, Homo sapiens
acatagagtcgcagggagcccaccgggcgggcctggccaaggtttggctcagaagaaggcggccccaacagaggtgagtgtctggagcgg

SEQ ID NO: 531807 - DNA, 75 bp, Homo sapiens
cagaagactccaaatgaaccgcagttggaattcatccttggcagtgaaatcaactgtgcagaccatcactgttgg

SEQ ID NO: 531808 - DNA, 83 bp, Homo sapiens
ggtactttgaatccctattgtgtattgtgggatgactccaaaaccaattctgtggtgttcttggtcacacatttatggagttt

SEQ ID NO: 531809 - DNA, 100 bp, Homo sapiens
tgaagctccccaaggagctgcagagttccccaccaccaagttagagatgactgctgtggctgacattttcgaccgagatggggatggttacattgattat

SEQ ID NO: 531810 - DNA, 100 bp, Homo sapiens
tgaactaaggagaaagtcctacaacagtttggcgtgcaacatggggcttgagaaaggatatgtgcagcgggggctacagcgagtggggctagatccccag

SEQ ID NO: 531811 - DNA, 75 bp, Homo sapiens
tgggaagtatggctgctgcccaatgcccaacgtgcgtgctctggaggaggccaacgccgacctggaagtgaagat

SEQ ID NO: 531812 - DNA, 83 bp, Homo sapiens
gcctgtccagccagcatggaaccaaagcggatcagagagggctaccttgtgaagaaggaaataatgcaaaaggtgtcccaagg

SEQ ID NO: 531813 - DNA, 82 bp, Homo sapiens
attttattactggcagcatgtatatcttttggaagagcatggaggaaatcaagaaggtgctgctgctggtgctgggctgtgc

SEQ ID NO: 531814 - DNA, 73 bp, Homo sapiens
ttctccttcacagtaaagtggctgggcaaacttgaagataaatcttttgactccagctctttagaggatctaa

SEQ ID NO: 531815 - DNA, 100 bp, Homo sapiens
ctggagaagggagactacaaggacagcagcgactttggggcccgtcaccctcagtgatgctattgctgagattagagccatttgtattgaagaaattgga

SEQ ID NO: 531816 - DNA, 75 bp, Homo sapiens
aaaagcagtgcaactggctcagtattcacagggaaagctgtgaggcttcagtatcagacacagcacagcagccat

SEQ ID NO: 531817 - DNA, 75 bp, Homo sapiens
aggttctcacaccaggcctccggatttcagtgtgatttgactacgaacaataggagacttgaatgaaaattctgt

SEQ ID NO: 531818 - DNA, 100 bp, Homo sapiens
cgggaacaagcaaggagtcatatatccttcatatgatccatcttagtgaagaattaggatacaggtactaggttttgacaagcttgcatcatgcgtgagt

SEQ ID NO: 531819 - DNA, 82 bp, Homo sapiens
tctccattctaataacatctccattctccaggaactgtacgaaagagcagaagcgctgagtgagcctttgaccaagccagtt

SEQ ID NO: 531820 - DNA, 100 bp, Homo sapiens
tctgtcactcacttacacagtattgggaaatctgtgaaaggagaactcctggaagccccgtcttcctcctcatgcccattgcctgaccagagccaccctg

SEQ ID NO: 531821 - DNA, 100 bp, Homo sapiens
gaaaaatcttttaaagttgagttgttaaacttggaaggaggagatccctgcatgtcactgagtccaccatgctttacagaagaagacagatttagtctgg

SEQ ID NO: 531822 - DNA, 125 bp, Homo sapiens
tgtatgccccaaaagatgactacaaacataggatgttttggcgagagatgtattcagtggaggaagctggacttcctcgttctgcccatcttcctaacaaggctatggctgataacagcagtgat

SEQ ID NO: 531823 - DNA, 100 bp, Homo sapiens
gaaagtttgcagaagtggaaggagcagaacgtgagggtgtaacttacaaaaaggaatgaatctgaagtctgctgcagtaaaacacagaaggctttaaaat

SEQ ID NO: 531824 - DNA, 50 bp, Homo sapiens
tgaatctcaggagagagcagccagagtgggactccgcaaagctgaaagag

SEQ ID NO: 531825 - DNA, 124 bp, Homo sapiens
caaaaactctgatactgctcatattaagtccatagaaattacttcgatccttaatggacttcaagggctccggatatctttggtgacttgtccactccagtgtggcatcatgtggcagctgctc

SEQ ID NO: 531826 - DNA, 97 bp, Homo sapiens
cgccgagaggccgtgcgggacgcgggcgccaggaccggccgaacgcagaggaccggaagctcaccaagctggagcggcagcggttcaaggaagaggc

SEQ ID NO: 531827 - DNA, 100 bp, Homo sapiens
ctcacaagacagggaacttcaaacagttcaacatcttctgtcatatgctggagtcagccctcactcagaaaacccgcctagtgccaagcaaccctccaag

SEQ ID NO: 531828 - DNA, 75 bp, Homo sapiens
cggcggtctctgctgaagagagaagatggcgcttgacggaccagagcagataaccagcccgagtcatgcagtctt

SEQ ID NO: 531829 - DNA, 74 bp, Homo sapiens
cctgcccagacggctcacctgtgcgggatggaacaaaaggtgatctgtgaaaatggttcgctattcacttgacc

SEQ ID NO: 531830 - DNA, 98 bp, Homo sapiens
agcgggaagatggctgcagacaagcctgcagggacaagaatccttcaagaaacaggaaaaaactcctaaaacaccaaaaggacctagttctgtagaag

SEQ ID NO: 531831 - DNA, 83 bp, Homo sapiens
accctggagcctcagttggaagcagccgatccagcctgcggagcctgtggggcagggagctcataaagggaatctgcgtgaag

SEQ ID NO: 531832 - DNA, 100 bp, Homo sapiens
cggctgccggcctgtgtggtggactgtggcacgggtactatactggcaattgctggagaagattttgcaattgttgcttctgatactcgattgagtgaag

SEQ ID NO: 531833 - DNA, 103 bp, Homo sapiens
cgggtggcttccagggcaccggcggccgcggcccggactccgcggtgggcgagcgccctgtgaggaaaaggggaagatagtgatgtactcagtataaatgcag

SEQ ID NO: 531834 - DNA, 100 bp, Homo sapiens
gctaaatggctccctgattcatgtgaccatgatgaccgctgggagacaaaagaaggggcagcatccccagcccctgagactccacagcctacttcccccg

SEQ ID NO: 531835 - DNA, 125 bp, Homo sapiens
caaacctcaatggaagccttagtgtcaaggcaacacaaaaagtacctgctcaccatcatcttcaagaacttccaggagtgtgtggaccagaaggtgtaccaggctgagatggacgagctcccggc

SEQ ID NO: 531836 - DNA, 74 bp, Homo sapiens
gataagcttcgaatggacagagccatccctgacacccggcatgaccagaaagcagatggtggagctgaatatgc

SEQ ID NO: 531837 - DNA, 100 bp, Homo sapiens
tcgaatgtgggaccccagcccctctccagctcgaaatcgcctgagtgttccttccagcatgtcggagggggagtcccagacagtacttagcagtggctca

SEQ ID NO: 531838 - DNA, 75 bp, Homo sapiens
tttgctggatttaagcactgctgcactttatgagatccagaatataagaagtttttagaaacctactgtgtggag

SEQ ID NO: 531839 - DNA, 101 bp, Homo sapiens
ggaacgcgggcgcctgaaggagttgttgtctcggcagcgcccgcggagacgtgaagaggtgctggagaatctggtaaaagcaccattgtgaagcagatgag

SEQ ID NO: 531840 - DNA, 90 bp, Homo sapiens
gcgcatcaaatctgaagaaaatctacacagtacagacagtacagcttccctctgtgtgttgcagtcctgtggcattatgcatgccccctc

SEQ ID NO: 531841 - DNA, 75 bp, Homo sapiens
ctgctgcggcgcggggaccgctgtgctctcggcaacagagatgcttatttttggaaagaagttaacagcgggaga

SEQ ID NO: 531842 - DNA, 82 bp, Homo sapiens
gtccctgagccgcccctacacccacagcctcccgcgacgatgcccctcaacgttagcttcaccaacaggaactatgacctcg

SEQ ID NO: 531843 - DNA, 100 bp, Homo sapiens
caccccagaccttgccagagacctggcaaatgacatcatgacactggctcagctgtcgcaggccctggaggagctgggaggccagaaacaaagagcagac

SEQ ID NO: 531844 - DNA, 75 bp, Homo sapiens
tccacctcagctaactataaaagacttctacatgacaggtgtgatccctcacatccacaaatctctgattggaaa

SEQ ID NO: 531845 - DNA, 100 bp, Homo sapiens
ggaagagctgcacaaccaagaggtgcaaaaacgaaagcaactggagctcaggcagaggaacgaggacgcctgaaggaagagctggaagaggctcgggaca

SEQ ID NO: 531846 - DNA, 83 bp, Homo sapiens
aggggctccgggtcttccagagcgtgaagatcaagatcgtgcctccggagccagcgtggtggccatagacaacaagatcgaac

SEQ ID NO: 531847 - DNA, 80 bp, Homo sapiens
agccaaccatgctcaacttcggtgcctctctccagcagactgcggacgagattgaggagctgcgggccgagatgctggag

SEQ ID NO: 531848 - DNA, 83 bp, Homo sapiens
ctgactcatatcaaggaccagaaaggagagttgagtccacgctccatgagaatgctgaacaccatccaaagcagcaaattgag

SEQ ID NO: 531849 - DNA, 82 bp, Homo sapiens
tccagatccatcacgtggggcaggacggtcaggttctgcggggagtgtctccagccctgcctgcaggtgccatccccgctgt

SEQ ID NO: 531850 - DNA, 98 bp, Homo sapiens
atgaaggaaaattaaaagctggccaaagtgtaattggtctgcagatgggagtgagtgtcgtggactcttctgtggcaggacttggaggctgtccctac

SEQ ID NO: 531851 - DNA, 90 bp, Homo sapiens
aggagacgctgacacttgtgtttgaatatgtgaagacccttttgaggacttctttgggaatcgaaggggtccccgaggaagcagaagccg

SEQ ID NO: 531852 - DNA, 90 bp, Homo sapiens
ctggccctctcgctgttgctggtctctggctccctcctcccagggccaggcgccgctcagaacgaacggaaagatgctgaaggatgggag

SEQ ID NO: 531853 - DNA, 99 bp, Homo sapiens
atcacattggaccctcctcccaactgtaggaatcatctgctgcagtttgctttagagtcaccagccaaatctcctgcttcttcctcttcaaagaatctt

SEQ ID NO: 531854 - DNA, 51 bp, Homo sapiens
cagcaggggcgacaacagcatcagctatggagccaaaatccgggcccctca

SEQ ID NO: 531855 - DNA, 75 bp, Homo sapiens
aaggacttcgagcagcctctcgccatttcccgggttccagcaacagatagaaatgctttaagttcactctgggga

SEQ ID NO: 531856 - DNA, 80 bp, Homo sapiens
cccgcgttcacagccccagcgcaggaagcaggtcctggggaccaaggtggacgcggagcgtgacggcgtgaaggtgccca

SEQ ID NO: 531857 - DNA, 101 bp, Homo sapiens
aagcccggcgacggaggaacgcaggtctgctgccagatgtaggtgcaaaaaactacagacatctctgtgctgtttattacaacaagaatcctgggtttgag

SEQ ID NO: 531858 - DNA, 98 bp, Homo sapiens
gcttccgagccgcactcgccgatcctccaggcatgccccgctacgagctggctttaatcctgaaagccatgcagcggtggccataatataattgtgat

SEQ ID NO: 531859 - DNA, 75 bp, Homo sapiens
gtccttgctgggggttcggggagcgcttggaccccggcttctgggacgcgtcagtatgtggagggatcttttgag

SEQ ID NO: 531860 - DNA, 90 bp, Homo sapiens
catgatttaaatatcggcgttaagggcatccgcttcgatcctgaaattccgcaaacactacgactagagtttgctaaggcaaacacgaag

SEQ ID NO: 531861 - DNA, 88 bp, Homo sapiens
tcatcaggaagagaatggctgtgctgacttttttatccgtggagagcgactcagggacaaaatgatgacgtccggttgtttgccttcg

SEQ ID NO: 531862 - DNA, 75 bp, Homo sapiens
ctggagcctcagttggaagcagccgatccagcctgcggagcctgtggggcagatgttccaggtcatccagccaga

SEQ ID NO: 531863 - DNA, 90 bp, Homo sapiens
tgcaacaactggtgccgtagcaacagctctaggactcaatgcattgaccaagttcacagaagaaaagcttggccaggctgagaagacaga

SEQ ID NO: 531864 - DNA, 100 bp, Homo sapiens
aaaatattctgatgaaagcaagcattgtagaacaccattgggcagcttattcaagcacgtaaatgtgaattgaagtcaatgaaaggattctattttgcaa

SEQ ID NO: 531865 - DNA, 82 bp, Homo sapiens
tgactttcacttccagccagctgtgaagaagatgatatcatcaagttgaatcgaaaggaagggaagaagcagaattttccaa

SEQ ID NO: 531866 - DNA, 75 bp, Homo sapiens
acaaccaggcaatgctggatagataccgaattcttatcacaaaggaggagagggcagtgagagataggaatctcc

SEQ ID NO: 531867 - DNA, 75 bp, Homo sapiens
ccctttctatgtactgcgcctggatgtggccaggtgaccaagaatatggcccaggtgaccaaagccctggacaag

SEQ ID NO: 531868 - DNA, 100 bp, Homo sapiens
cgtcggggacggctgcgcgggacggctctgtaggaaggaacttggttccccctccctcagcttccgccccaaaagggacctgtgtcggcaggaccccgag

SEQ ID NO: 531869 - DNA, 100 bp, Homo sapiens
caggaaatgaagcgtgctaaagtgtctcaagcactgtttgcaaaggttgcagcaaccaaaagccaggggctatctgatgggttagagtgcctttgagaag

SEQ ID NO: 531870 - DNA, 50 bp, Homo sapiens
ggctgtgctgcgcgacccccgcgcatgatggcccactgcgtgaccttggt

SEQ ID NO: 531871 - DNA, 99 bp, Homo sapiens
acccagttccaggtagacatggaggccgtcggggagacgctgtggtgtgactggggcaggaccatcagggctctggaggccacgggcatgatgcttcgg

SEQ ID NO: 531872 - DNA, 83 bp, Homo sapiens
caaggagctaaagcagcgtgcgttcagccctgggatgcgtctgttactagagtggagagtctaccttcgtctcacatgtgcca

SEQ ID NO: 531873 - DNA, 74 bp, Homo sapiens
ctagatgaaattaagacagaacccgacaatgctcaaggacggaagaagtctatagtggctgtggagcccaggag

SEQ ID NO: 531874 - DNA, 101 bp, Homo sapiens
ccaacaccatgccgtccgccttctctgtcagctctttccccgtcagcatcccagccgtgctcacgctgtttgcagacaaggtcccaaagacagcaggttgg

SEQ ID NO: 531875 - DNA, 82 bp, Homo sapiens
gatcatcatctgcacctaccgccagcgtccgtctccaagagagtatgaagagagtgcgtctgtagggcagggaagatggcgg

SEQ ID NO: 531876 - DNA, 83 bp, Homo sapiens
gctgcctggtgcagaggatcctggaggcctgggaagccaacgaccacacgcagctgcaagatcaaggccctgcgggccaagac

SEQ ID NO: 531877 - DNA, 83 bp, Homo sapiens
cctggacccattgataactctggacttctcaaaggattttctgccgtctcttggcaaaaatggcaaataatgatgctgttctg

SEQ ID NO: 531878 - DNA, 75 bp, Homo sapiens
agcaaaaccaacgcctggctcggagcagcagcctctgaggtaaggctggcctctctgcagtcagaggtctgagct

SEQ ID NO: 531879 - DNA, 51 bp, Homo sapiens
ctgaaaacagagtggttgtctctgtgagggtcgctgtctgcccattgatag

SEQ ID NO: 531880 - DNA, 75 bp, Homo sapiens
tcccgcgcgcacctcagccgcctcctagcggcgcggcgctcgctcctacggcctgtcccaggctctctatcttct

SEQ ID NO: 531881 - DNA, 51 bp, Homo sapiens
ggcggccgtcagcaacctcgtccgggtgctggagaatctggtaaaagcacc

SEQ ID NO: 531882 - DNA, 100 bp, Homo sapiens
ggcgagtgcagccggtgacccggcgagaggcggcgccgctcccaagatgtcgcagacggccatgtccgaaacctacgacagagtctcactcccatcgccc

SEQ ID NO: 531883 - DNA, 75 bp, Homo sapiens
tcagcccctgccactagtgagatgaccacgattgagcagctgtatgtccggcaactggcagaagaggctgggaag

SEQ ID NO: 531884 - DNA, 82 bp, Homo sapiens
gcagagaggatcacagagttctgccaccgcttcctggagggcaaaatcaaggcggaaggtgctctaccagcgtgcacccagg

SEQ ID NO: 531885 - DNA, 101 bp, Homo sapiens
ccgggggagaggtccgaaagcagcagctggacacaagggtccgccaggagccaccagggggcccgaggctgggaggcggcagaatgcagccagaggagggc

SEQ ID NO: 531886 - DNA, 50 bp, Homo sapiens
ttggtcgccgcgtccttggctggcgtggccacaggagaatggtatgctgc

SEQ ID NO: 531887 - DNA, 114 bp, Homo sapiens
agggaccatggccgatcctcgcgtgagacagatcaagatcaagaccggcgtggtgaagcgttgtatcacggactgattcaccgagcccaaccgtactcaactcacatatttcta

SEQ ID NO: 531888 - DNA, 75 bp, Homo sapiens
ttgcaacaattgttatgcttggtgtgggccgaagatatgctcatgtggtgttgaggaaagcagacattgacctca

SEQ ID NO: 531889 - DNA, 96 bp, Homo sapiens
gtagaggacgatactctgaccgttttagtagtcgcagacctcgaaatgatagacggatgtctttcagtgacttcctgaggcactattcccgcctgg

SEQ ID NO: 531890 - DNA, 76 bp, Homo sapiens
gtctggtggccatcagcaagcccaggtctatggttatatttcacactatgtgctgactgtatctacagaagatatt

SEQ ID NO: 531891 - DNA, 100 bp, Homo sapiens
gcacaaaaaaccccaaccaaacaaaactcttgacagaagctgtgacaaccagaaaggatgcctcataaagagctctcagcatggcggctcctctacgtca

SEQ ID NO: 531892 - DNA, 51 bp, Homo sapiens
tttctgtgtcctactccttgcaggttcaagaacatgaagactcgggtgact

SEQ ID NO: 531893 - DNA, 51 bp, Homo sapiens
ggaagatggcgtctcccacagacggttacaacctgccatattcattcatcc

SEQ ID NO: 531894 - DNA, 50 bp, Homo sapiens
gacaacctcagaggacaacgaagtgttcgcataagccggaccaagctgag

SEQ ID NO: 531895 - DNA, 119 bp, Homo sapiens
atctgccgagaccctgcacagtttgcaaacagcttttacctgatttcaccgaagcgcatttggtcacctcctctggtgtcccgacccaggctaagcttgagcatggctgagcaggagcc

SEQ ID NO: 531896 - DNA, 75 bp, Homo sapiens
aaacacagtcttcagccctacattagatgaataatacggcagctagtccaatgtctactgcaacttcaagtagtg

SEQ ID NO: 531897 - DNA, 98 bp, Homo sapiens
gttgctcttgaagctggtgagagccctgccaggatgtggagtggacttcctagcagagcgctcctttaccctcatcgtggaggcctgggactgggaca

SEQ ID NO: 531898 - DNA, 100 bp, Homo sapiens
aaatggcggagtatctggcctccatcttcggcaccgagaaagacaaggacaagaatccttcaagaaacaggaaaaaactcctaaaacaccaaaaggacct

SEQ ID NO: 531899 - DNA, 73 bp, Homo sapiens
gtcctctccgattatgtgggctcggggcctcccaagggcacagggaatgggtactgttcaaaaaggaatgccc

SEQ ID NO: 531900 - DNA, 75 bp, Homo sapiens
acgatgtggaacccagagatgactccagccccagccccaagggcagaggtggtcttttggtgccttaatgaagag

SEQ ID NO: 531901 - DNA, 83 bp, Homo sapiens
cagatcttgactgcatttttgggaaaagacagagtaagaagactcccgagtcaaagaagtttggcagagatcacggagctaat

SEQ ID NO: 531902 - DNA, 98 bp, Homo sapiens
gccccatgctcagctccgcctttggccagccgtttccctggggagatggtaaccatactctattccataaccctcatgtgaatccacttccaactggc

SEQ ID NO: 531903 - DNA, 76 bp, Homo sapiens
cgctatgtactgggggagtggggtggatcccacaactcatttgacctttaaccttcacctgtccaagaaagagaga

SEQ ID NO: 531904 - DNA, 100 bp, Homo sapiens
aagcaagggattgctggctacagcttcagaagaccgaagcgttcgtatctggaagcacttgcacctcctgcgccgccgccccccatccaaggatatgcct

SEQ ID NO: 531905 - DNA, 80 bp, Homo sapiens
ggctgctccaggagcacagcggcatctttggcttcagcgtgtcccgtggcagtgctccttttggacttttctctaggttt

SEQ ID NO: 531906 - DNA, 74 bp, Homo sapiens
ggagatgcgtagtcttggtgttgacatggacgataaagacgatgtatgtctgattgacctgggctgcttccgag

SEQ ID NO: 531907 - DNA, 118 bp, Homo sapiens
aagagggaggcgaggaggaagaggaggcggccatgtatgaggaggagatggaaagggaagcatcaacttcaatcaggatgcgtccctcatctgcgtatccagcgaccacggcacagtg

SEQ ID NO: 531908 - DNA, 145 bp, Homo sapiens
ctgccttggacacctaggctacctgggctaccccaccctctgtgagcaggaccaggcccatgccatcacaggaatcccttggcaccatgtcctgtgtgcattataaattttcctctaaactcaactatgataccgtcacctttga

SEQ ID NO: 531909 - DNA, 83 bp, Homo sapiens
gagacttttctcagatgttggatatttgcttggaaaaacgtgtgggtacgaccttgagttttcttgaagtacaactaaggaca

SEQ ID NO: 531910 - DNA, 100 bp, Homo sapiens
tacttccaaaggcttcctgattgatggctacccgcgggaggtgcagcaaggagaagagtttgagcgacggaattccagcctggtcaccttccaagagccc

SEQ ID NO: 531911 - DNA, 100 bp, Homo sapiens
ttgattgcaagtggtacatccgagcacctccacggtccaagcgatggagaccaaaggctaccacagtctccctgaaggtctagatatggaaagacggtgg

SEQ ID NO: 531912 - DNA, 100 bp, Homo sapiens
tattgtgactactgcgatacatacctcacccatgactctatctcagtgaccagctgctggaggtggtcggcttggaaggagccatggagatggggcaaat

SEQ ID NO: 531913 - DNA, 100 bp, Homo sapiens
atgtccttaccagctttgacaatacaggaaatgtttccccatcttcccgggaagccagccgcccaccagaggagcccagcgccccgagccccacgttgcc

SEQ ID NO: 531914 - DNA, 75 bp, Homo sapiens
cgtgtatgtgccctgcgtgaaggattgtgtcacggtggagagaaactcaaaacttcctggagagaaatggaggtg

SEQ ID NO: 531915 - DNA, 50 bp, Homo sapiens
ctcatgttctccttcgtcaacgaccggaccgtctgggggccccagctccc

SEQ ID NO: 531916 - DNA, 100 bp, Homo sapiens
cgacgaatagagaaaaaagggtctgacaaaaggaccaccgtcacagatgccaaagagttgaagtttgcaagtcaaggcacaacactttcactgggcgatg

SEQ ID NO: 531917 - DNA, 98 bp, Homo sapiens
gaaaacagagaaagaagtgataggagggctctgtagagtctgtagaagaggcgacaccagggcttccaaatgaacaaccgaaaggaagatatggaaat

SEQ ID NO: 531918 - DNA, 97 bp, Homo sapiens
gcctgtgaccccagcgtgggtgaagataggatcaagatggccatgtggcagggcttctgggaacttggcagacgcagcttagagagactcaccagcg

SEQ ID NO: 531919 - DNA, 83 bp, Homo sapiens
cagcatcacaagctcagcctggacagcaacaggtctctacagcggaacaatgtcgttcttcccccaaaagcatgatttgctgc

SEQ ID NO: 531920 - DNA, 108 bp, Homo sapiens
atttttctgaagttgttcattaagacttcccagcattcctacagatataaataggttggtcaaagaaaaagtgatgtatgaaaaagaggcaaaacaacaagaagaaaa

SEQ ID NO: 531921 - DNA, 50 bp, Homo sapiens
gcgggaggcgcggcgagggcgccagttcaaatctgaacatcaatgatgta

SEQ ID NO: 531922 - DNA, 74 bp, Homo sapiens
cccccgccgctgccgccgcgacccttggcgcctgcccctgcaacgggagatgaaggatttgggggcagagcact

SEQ ID NO: 531923 - DNA, 50 bp, Homo sapiens
caggctcggagctccagacgctgggacagctacgagagtacaaggtagtg

SEQ ID NO: 531924 - DNA, 75 bp, Homo sapiens
gctgcccactggtggtcccccgctcccggggtccccggccggccaagcaggttggccttggggaggcactattag

SEQ ID NO: 531925 - DNA, 50 bp, Homo sapiens
cggcgaatggagcaggggcgcgcagacaccattcgcttttcacccaagat

SEQ ID NO: 531926 - DNA, 87 bp, Homo sapiens
ctgcgctcctttctggccggagtgaattttgaagattgcaccggtcgacaaaggacagcctatttttccctcgacacccgattcaaa

SEQ ID NO: 531927 - DNA, 83 bp, Homo sapiens
ctcatgttctgcacctcaggagggaattcagcctcagtgatgtccatgagatgcccttggaaatcacccgtagctttatccag

SEQ ID NO: 531928 - DNA, 97 bp, Homo sapiens
gtcaccacttcacttcacctctttctggaaaccaggctgaactccagtgcacccagttagacttggagcggaaactcaagttgaatgaaaatgccat

SEQ ID NO: 531929 - DNA, 96 bp, Homo sapiens
aagactcctcaacaagttgctgcaatgtctgtgtctaatctatcatggttgctgctgactcagccattctagaagttcttcagtccaacattcagc

SEQ ID NO: 531930 - DNA, 100 bp, Homo sapiens
ggagctggccgtcaacatgtcctttcctaaggcgcccttgaaacgattcaatgacccttctggtcccccacggcccttcaggatgaaagctgcggtgctg

SEQ ID NO: 531931 - DNA, 100 bp, Homo sapiens
tcacttctttacttggtgcaggaaggcagtctttgctacgtacagcaaaagtgagggtcgctgtctgcccattgatagaggccagattgtcttggaagtt

SEQ ID NO: 531932 - DNA, 75 bp, Homo sapiens
gaaccttctagcacacatatggactccagaagacctttccagattcgtggttgagctgcagcagagggagcttgc

SEQ ID NO: 531933 - DNA, 104 bp, Homo sapiens
tcaaagtgtacaacaaggatcctgcacatgcgtttaatcacacaccaaaaactatgaatggagacatgagggcatattctcaagatgcctacctgaaaggcaac

SEQ ID NO: 531934 - DNA, 94 bp, Homo sapiens
ttcgagggcagccggcgggaggaacgctcactgtcagcgcctggaaacttgctcacgtgagaagccctaccactgcaactgggacggctgcggc

SEQ ID NO: 531935 - DNA, 100 bp, Homo sapiens
tggggaaaaggcaaaaatcccatctaccgcaactctcagttcgagagtaaagagttgcatgctgagaatttgaaaaatgaagatgatgtagacactggac

SEQ ID NO: 531936 - DNA, 101 bp, Homo sapiens
aaaggcactatcgagattggaaccacagaagatcacaaaatttgtccaggatagacatagagctagaagaaacagacttcgtaaagatcaacttaagaaac

SEQ ID NO: 531937 - DNA, 75 bp, Homo sapiens
gtagtagcagtgattgttgcttttacgggcgcctgcattactcaaccaacaagtcccaaatttggaaaagctgac

SEQ ID NO: 531938 - DNA, 90 bp, Homo sapiens
attacgtgagcatcttcgtctgcagtgattggcagctcctgcggacaccaatgggaatcccaatggggaagtcgatgctggtgcttctca

SEQ ID NO: 531939 - DNA, 103 bp, Homo sapiens
tgcagaggaaagaaaagaatacattcctgattacctgccacccattgtgtcttctcaagaagttgtatcacggactgattcaccgagcccaaccgtactcaac

SEQ ID NO: 531940 - DNA, 100 bp, Homo sapiens
acagtctacaagggaaagtggcatgctgcagtacggagacagcaaggacaaccctctcaagtactggctttataaagaagaaggcgagaggagacacagg

SEQ ID NO: 531941 - DNA, 82 bp, Homo sapiens
actgttcaacacagcaatgaccaaagcaacccctgctgtacggacagcatataaatttattctgaaaaagagttccacgtcc

SEQ ID NO: 531942 - DNA, 89 bp, Homo sapiens
ggacaagtttgcagatcgggagcgcaaggtcgccctcaaggccatgatcaaaactgacgccaagtccagtgaaaggcaaagggaaagtg

SEQ ID NO: 531943 - DNA, 95 bp, Homo sapiens
tacagcaccaccagtattgccagcgtcgctggcagctcctttgggacccagatcatcgggggccgggaggtgatcccccactcgcgcccgtacat

SEQ ID NO: 531944 - DNA, 83 bp, Homo sapiens
cagcatgtgtctagaggacagcagatacaactggtctttcattcactgtccagcttcagctttagctgcagctgcctctgttc

SEQ ID NO: 531945 - DNA, 95 bp, Homo sapiens
aagaaaaggaatcctggaagaagacatgtacaacccagcatcagttacccaagtgtggcataaatgccaacgatgtgaagaaattggaagaagct

SEQ ID NO: 531946 - DNA, 100 bp, Homo sapiens
tgtgtgctttgcaagtgcttctgaaaggtttaatagactacaacttccactgtttccgaaaagctattcatgaggtttttgaggtgggtgtgacttctca

SEQ ID NO: 531947 - DNA, 83 bp, Homo sapiens
gattgagaatgtccatggatttgtttctcattctcatatttcaccaataaaggaaccctaaggactctgcaatatgaataatt

SEQ ID NO: 531948 - DNA, 75 bp, Homo sapiens
ccacatgatgatcaggtttttctggatggaaatgagacgcaaaatcgaatgaagctaatggccgacaactacgag

SEQ ID NO: 531949 - DNA, 98 bp, Homo sapiens
tgttttatttttaaagaagattaacacgtgctggcaggaccactgcagacaaatggatcttagtaagagccctaagaccatgaaaaagctgctgccca

SEQ ID NO: 531950 - DNA, 100 bp, Homo sapiens
cgatccgctgctcgcacgggagccagctgggtggtgacgcatccaaagaagacattgacactgctatgaaattaggagccggttaccccatgggcccatt

SEQ ID NO: 531951 - DNA, 82 bp, Homo sapiens
ttgcctcttctggtgtcaaagcttttggacattcctggggttttaaaatcaaagatgggaaaatcggagaaaattgcccttc

SEQ ID NO: 531952 - DNA, 100 bp, Homo sapiens
agaggcagtgatggaagttcggagacatctagtggaagcggcaagcagagaaaacctgccaatcaagatgagtatggggccggtgcataaacttctcccg

SEQ ID NO: 531953 - DNA, 100 bp, Homo sapiens
cccactctttccgccctaatggaggtctccagtttcgtctgcgctcctcagaccaccggcaggtgaacagcctgatgcagaccgaggagtgcccacctat

SEQ ID NO: 531954 - DNA, 82 bp, Homo sapiens
cctggctaagcaaaaccctgcagaacggctgcctaatttacagcaaccatgaggtgctggagaatctggtaaaagcaccatt

SEQ ID NO: 531955 - DNA, 73 bp, Homo sapiens
gtggaggcagaggtggcatgggcatgcacttaatgaagttgatcctggtgactggcagaaattcgtgaagaag

SEQ ID NO: 531956 - DNA, 90 bp, Homo sapiens
ccggggcccgggccggatgggcgctgcgggccggggcgcggaccgcggagcggccctctgcttatgataatgtcaacaaagttcgagtag

SEQ ID NO: 531957 - DNA, 100 bp, Homo sapiens
aaagctgctacttatggaagatacaaagggtatccgttacagcactgatgtgagtgtagatgaagtaaaagctttggcttctctgatgacatacaagtgt

SEQ ID NO: 531958 - DNA, 100 bp, Homo sapiens
ggccacctgaactccaagctcttcctgaacgaagtggccaagaaggagaagcagctgcggaaaatgctagaagatagcctgggctggaagctcttctacg

SEQ ID NO: 531959 - DNA, 100 bp, Homo sapiens
tgaagaagtccacccagaaggtgctagacaccaagaaggacgcactgactcgcctcaagcacctgcgcatcgtcatcgattcaggcacacaggatgaagc

SEQ ID NO: 531960 - DNA, 75 bp, Homo sapiens
gttcgggccggctgtcctggcgcggctcgctgtgatgcctcctcttttgaaagtgtgcgttgcaccttttgtgtg

SEQ ID NO: 531961 - DNA, 100 bp, Homo sapiens
acaaaattgccagaaaatctttcctctaaagtcaaactgcctcgatgacttacgagccctcaaggggaagcattttctcctggaccccttgatgccggag

SEQ ID NO: 531962 - DNA, 82 bp, Homo sapiens
ctggacttcgcctttcccgagccctggaggtggggagaaaagcagccaactcttcctgccaaataaatagagtcatcagtca

SEQ ID NO: 531963 - DNA, 147 bp, Homo sapiens
tttggtctgagatctcttacctttcaaagtggtgggatattatagatattcagaagaaggatgctgttaaaaggttgctgtttgatcaagacgcatctcttaaatctgagttcagtctgcatcctgatacaagaggaatgtgcaaag

SEQ ID NO: 531964 - DNA, 75 bp, Homo sapiens
ctggacccctactattgcaacaaggtacttcacatgactggaggttacggtgtggtgctgtggacttgtacttca

SEQ ID NO: 531965 - DNA, 76 bp, Homo sapiens
gccggcgatagcccggcgctcatgacaggtctcctttacagaaaggggcttggataaggaggaaagaccatcagaa

SEQ ID NO: 531966 - DNA, 95 bp, Homo sapiens
acgtgaaacatgtgaacactcaagtgaagcaaaagccttccatgattacgtgagcgtcctgaccaccctggagcgtaggttcaacctgcagagcg

SEQ ID NO: 531967 - DNA, 90 bp, Homo sapiens
caaacttggaggatttgataataaaaagaaggggagcgttcaattccaaacagctgctttatttggagaaataccgacctaagatgcgat

SEQ ID NO: 531968 - DNA, 108 bp, Homo sapiens
ctttgggggagacatggagaagtttatccagatgggacctgcaaaggataaactggtcattggacggatctttcatattgtggagaatgatctgtacatagattttgg

SEQ ID NO: 531969 - DNA, 100 bp, Homo sapiens
aaaaggataaggagatcatagcagagtacgatactcaggtcaaagatcgtctatgcggaaagacctctcacagacaaccacagatcattggcttcttatg

SEQ ID NO: 531970 - DNA, 115 bp, Homo sapiens
ctactatgacaaatccaagtcgttcttcgacaacatctcttctgaactcaagaccaggctgaccccgcactacatctacccaccagccatcgtgcagcccagcgtggtgatccca

SEQ ID NO: 531971 - DNA, 90 bp, Homo sapiens
ttatcggaccatttcagaggttcaccgccatcattggacccaatggctctgatcgtaaagctgaaaattgaaatcatgaaagtagacagg

SEQ ID NO: 531972 - DNA, 90 bp, Homo sapiens
ctgagtcaacagactgagcgcgtccaggcctgacagctctgcggctcgggccctgagatgttaattattcatactgcatgactgaggatt

SEQ ID NO: 531973 - DNA, 98 bp, Homo sapiens
ctcccaagtagctgggattgcaggcctgttctgccccacacagcagaaaatgcccacgatgcaataccagagtctgcatgggaccatttcaacaaccc

SEQ ID NO: 531974 - DNA, 99 bp, Homo sapiens
gagatccggagcagccggggtcggagcggattgtagatgtctttatggaatacaatctaattcagcagtgtactgcattcttgcttgatgctctgaaga

SEQ ID NO: 531975 - DNA, 80 bp, Homo sapiens
ccgggaggggcgcttcccgacgccaagaggttgacggatatattcagacgttacgacacggatcaggacggctggattca

SEQ ID NO: 531976 - DNA, 75 bp, Homo sapiens
gcaagcgtgggaacgcgggcggcgagacggcggcaggacggcggcagttccagctttacatgtggtttggctggg

SEQ ID NO: 531977 - DNA, 84 bp, Homo sapiens
aaggaacagggaatccattctttggaagaacaactcgatcgtgtcgaagaaggcatgaaccatatcaaccaagacatgaaggag

SEQ ID NO: 531978 - DNA, 106 bp, Homo sapiens
gtcccaagtcgtccccctctccgccccccaggaggggcgagagggagccgcagctgatgtcagggaggttcccctgaaggatgctaaggaatacgctgaatccata

SEQ ID NO: 531979 - DNA, 88 bp, Homo sapiens
ttgaatctcagagtgaagatgagttgacaccttttgacatgagcatccaggcccagctctggttccccggctctgggctacctgctcc

SEQ ID NO: 531980 - DNA, 100 bp, Homo sapiens
gagcgcccagcgccgcgccgggaggaatgggtaccacagaccatgtcatcgtcctggcgtccacgaaccgagctgacattttggacggtgctctgatgag

SEQ ID NO: 531981 - DNA, 75 bp, Homo sapiens
ggaaagagcaccgaagaagcttcgaggatctggcatcaacttctaactcatctcgccaggagaggcctccagtga

SEQ ID NO: 531982 - DNA, 100 bp, Homo sapiens
atgctgctggacatcaagacacgtctggagcaggagatcgccacctaccgcagcctgctcgagggccaggacgccaactactgtgtgaagacattcacag

SEQ ID NO: 531983 - DNA, 100 bp, Homo sapiens
gcttgttcagtatctcaagcccagaaagatgaattaatccttgaaggaaatgacattgagcttgtttcaaattcagcccccattcactggggagaataga

SEQ ID NO: 531984 - DNA, 83 bp, Homo sapiens
ccgtggtgcgggctctgcagcgagcgctcgatggaacctcatcccagcaattctgtggtgttcttggtcacacatttatggag

SEQ ID NO: 531985 - DNA, 100 bp, Homo sapiens
cttggagaaacaggacaacaggtggttggcatggattacagaagctgcatcctgagacccggcggttccgaggatgccagcgccatgctgaggcgcttcc

SEQ ID NO: 531986 - DNA, 96 bp, Homo sapiens
cagtgaaacactacttggtattgaatacaccacttgaggacaatatcatgactcacggtttatcaagtctgcagacctgctggaaatgaaatctgg

SEQ ID NO: 531987 - DNA, 74 bp, Homo sapiens
cggcggcagggcaagctgtgcgacgtgaccctcaagcggaatcccgactgtgcctgggaaggtgaccctgcaga

SEQ ID NO: 531988 - DNA, 76 bp, Homo sapiens
ctccctggtacctgtgtatatttctggggctacagtataaatcaaagccattctgtgaaaaactgctttcctgggt

SEQ ID NO: 531989 - DNA, 125 bp, Homo sapiens
cgagccaggataatgcaaaggaaaagaggactggagtggtttgtctgtgatggctggaagttcctctgtaccagaggccacaagaggaagctgaatgaagaggacgccgccagcgagtccagcag

SEQ ID NO: 531990 - DNA, 75 bp, Homo sapiens
caagttcatgtcacgctgggtaatgaggatttgactgtgaagggggatcatgaagatgcgaccccaggtggtaaa

SEQ ID NO: 531991 - DNA, 83 bp, Homo sapiens
ggcaaactgtcagaaaagagtagcctgggctgtctggaaatctgaggtgggaggaggagctcgccaagcgcatgaaccttcag

SEQ ID NO: 531992 - DNA, 101 bp, Homo sapiens
tacttaaaacaccacgatgaaaagaaatacctgtgatttgctttctcggagcaaaagttttccatcttgctgctgcaaaaggacacgtggaatgcctcagg

SEQ ID NO: 531993 - DNA, 83 bp, Homo sapiens
cgcccttcgccttcgttgagttcgaggacccgcgacaatgcagatcttcgtgaagactctgactggtaagaccatcaccctcg

SEQ ID NO: 531994 - DNA, 75 bp, Homo sapiens
tctcagttcagtgttggcagcaatgagcttgtgttccaggtgaaggatgatgatgacgacatgggagaggatgaa

SEQ ID NO: 531995 - DNA, 80 bp, Homo sapiens
cctcaactctgctcacccatggttttctcccgccctcccagagctcctcctgctacgctacttcctgaagaataaggtca

SEQ ID NO: 531996 - DNA, 74 bp, Homo sapiens
tgtgcttgccaggcctggctccagtccaggtgcaggtacagcagtctccgcaacaggtctcggctcagctctcc

SEQ ID NO: 531997 - DNA, 100 bp, Homo sapiens
ggcggcgccgccgggctgtggagctacgagttccagggagctctgtcctggtgaccgtgcccgggttatgacgactaatcccaaaccgaataaggcatta

SEQ ID NO: 531998 - DNA, 83 bp, Homo sapiens
acagcttatttctgcttactcacttgtagatccagagaaagccaaagcatatgactttgacactcagtatgctttcgttggtg

SEQ ID NO: 531999 - DNA, 82 bp, Homo sapiens
cccattcaagttcaagttcacaattggcgatattgacggccaagcactcctgcttctgacccttccgacggtgcaggagtgc

SEQ ID NO: 532000 - DNA, 75 bp, Homo sapiens
ctcctgttttcccggctatgccatcatggcggatggcgtgtcctgtgaagggtctcgctctcacccaggctggag

SEQ ID NO: 532001 - DNA, 82 bp, Homo sapiens
aactggtacctctccctgcagctcatgtgccctgagaatgctgatttctttccgcagtgtgacgtggtgaatttcggctcct

SEQ ID NO: 532002 - DNA, 75 bp, Homo sapiens
caaaaagggcctaaagaagatgcagggccgtaggcagccatggcgcccagccggaatggcatggtcttgaagccc

SEQ ID NO: 532003 - DNA, 75 bp, Homo sapiens
ggcaagacctctccccctcggaggcggcgggcggaggcggcggtgtactaatggtcacttgatgtgcgctggctg

SEQ ID NO: 532004 - DNA, 50 bp, Homo sapiens
gtgcgtcaatcagagcgtcctgtgcgagtccggcagcgtcttctcttgag

SEQ ID NO: 532005 - DNA, 75 bp, Homo sapiens
taacagggatagaaggactgcagatcggtggaaaactgataagccagcctgccaggagtgaagaaagctttgggc

SEQ ID NO: 532006 - DNA, 96 bp, Homo sapiens
gagccggtctatggactttccgaagacgaggctctgacgcccgctctgcggcttcggtgtttgaacaggccacagtccaggagcgcttacattcag

SEQ ID NO: 532007 - DNA, 82 bp, Homo sapiens
gcattattgatgacagtcttcatttagaacttgaaaagcagcgggagatacagatgacccaccaagaattactcagaaccct

SEQ ID NO: 532008 - DNA, 75 bp, Homo sapiens
cgcgacacggagactaggtggcaggcttgggcactgtttaaaggaaagttccgagaaggcatcgacaagccggac

SEQ ID NO: 532009 - DNA, 75 bp, Homo sapiens
gcttctgggccaccatttgccagggcctcgctcgaggttcatcaccttgctgggtctcatcctccctccggctgg

SEQ ID NO: 532010 - DNA, 100 bp, Homo sapiens
ggatgattatatcgatgcagaacacctgggtgacttccacaggttggcctcattcagcttgggcaggagcaggtgctaatccagcccctcaacaactccc

SEQ ID NO: 532011 - DNA, 90 bp, Homo sapiens
attcagaaggcacctggagaaaaggacctgaagcagattctgagtggagaagaggcccgccagagaaattgagcttctagagcctcagag

SEQ ID NO: 532012 - DNA, 87 bp, Homo sapiens
cactaaaaattatccctactacaggactgcggacaagggctggcaggatgaaaactttcggaagagaaagttgcctgtggtaagttc

SEQ ID NO: 532013 - DNA, 100 bp, Homo sapiens
gcggggcttagagctcaacccagacacctgcaggcggcttacagggagaacacagttggcctccaccgtttctgccccacagaaaacgtagcaaagatca

SEQ ID NO: 532014 - DNA, 97 bp, Homo sapiens
gacattcaaggatatttatctaaaaattcttcttttgagtgccagtaaagagagtgataatgaactctcaagtggaacaggtgatgtgtctaaggat

SEQ ID NO: 532015 - DNA, 50 bp, Homo sapiens
caggattatgaagtttttcgatgcgaagactaaatgtgttaaatgggctt

SEQ ID NO: 532016 - DNA, 101 bp, Homo sapiens
gtggggacttgtggacccagaggattttatggcacatttgccattgctgtgaattacgtgagggaaagatattgaagaggagttggacactccgagagtgc

SEQ ID NO: 532017 - DNA, 100 bp, Homo sapiens
tgcgcttccgacggggcggccgggggctcagagatccaagtgcgcgccctggcgggtccggaccaagggaacactcatagggtggaccaaaggtttcaag

SEQ ID NO: 532018 - DNA, 100 bp, Homo sapiens
tttacctcatggcctcatgtaggctataggtgggcacaaccagatcccatggctcaagctggattttatcatcagttaagtgggcagaccaacatccacc

SEQ ID NO: 532019 - DNA, 75 bp, Homo sapiens
tgaatggctttggtgggatgtgtatgaccttcacctcattaacagcttggtccagcatagtttatcagctgattc

SEQ ID NO: 532020 - DNA, 87 bp, Homo sapiens
tgtagcctttgcactaaccctgccgcaggaaacggagcctactgaacaggcacctgatgccttggagcaagcagcagacacttctag

SEQ ID NO: 532021 - DNA, 74 bp, Homo sapiens
cgggcggcccctggagatgattgagccgcgcacgctacagtacaaggtgagccaatggtggcagcagaagtagg

SEQ ID NO: 532022 - DNA, 82 bp, Homo sapiens
cgactgctagagccgagcgaagccggagcgtgctttggacaccatgaattttgatgttataaagggcaagccagtacgcatc

SEQ ID NO: 532023 - DNA, 82 bp, Homo sapiens
gctttactttttgcttcaccgacatagtcattatgccgaagagaaaggtgtcgtgaaaactacccctaaaagccaaaatggg

SEQ ID NO: 532024 - DNA, 101 bp, Homo sapiens
taaaaaactaaagcaaattaaaaacaggatgaaaaagactgattggctcttcctcaatgcttgtgtgggtgctgactgggttacttttttaaacactagga

SEQ ID NO: 532025 - DNA, 65 bp, Homo sapiens
gacctgtcgcgatgtcagggctgcgcctctctgcagcagaaccttcggctcgcgtgcttctgagc

SEQ ID NO: 532026 - DNA, 94 bp, Homo sapiens
tataagacaacaggactgaacagggagccaactgtttctttgaacagtaaatcagatttgcttgctgaaaatggtcgattaagcaatacccaag

SEQ ID NO: 532027 - DNA, 50 bp, Homo sapiens
ccgccacctacccagtgaccatgataggcaagagggcacattgggagatt

SEQ ID NO: 532028 - DNA, 75 bp, Homo sapiens
ctcttgaggatcgaatcttcactcccgctgtctcagcagtctacagcacgtcgtgagatggagaataaagaaact

SEQ ID NO: 532029 - DNA, 101 bp, Homo sapiens
caccgactcttgtatcatgagcattggatttgatcacatggggcccaacatctgtaccacgcgaggtgtgagctcctgccagcagtgcctggctgtgagcc

SEQ ID NO: 532030 - DNA, 85 bp, Homo sapiens
cagagctgcggcggcagcacgcgcgggccagccacctgggcctggccaggatcaccctcatcgattcctacgagtcttctagctt

SEQ ID NO: 532031 - DNA, 74 bp, Homo sapiens
caaagatggtacaaaagagtctttggaggatgcggctttgatggaatatgcttttaaggctattaaccagggtg

SEQ ID NO: 532032 - DNA, 100 bp, Homo sapiens
gtttcaaaagaattggccaaagaagttgagaaaatgggagcagttttcatggatgcccctgtttctggtggaggaatgcaggctcaggttggaatgccag

SEQ ID NO: 532033 - DNA, 89 bp, Homo sapiens
cggacttgcttcaggctggccaccccccatcgggagcggtgccgagaaaaatttccttactagatgacatttcatcgcaatgtccgatc

SEQ ID NO: 532034 - DNA, 83 bp, Homo sapiens
cctggatcaccgacagcacagacagaatccctgctaccagtgtctccagccaacggcttgaaccgcctgcccacaccctcccc

SEQ ID NO: 532035 - DNA, 100 bp, Homo sapiens
ccgaagtcagttccttgtggagccggagctgggcgcggattcgccgaggcaccgaggcactcagaggaggctttatcctgtggataaacgcagagtgaac

SEQ ID NO: 532036 - DNA, 98 bp, Homo sapiens
ggcctgcagccaaggaaggaggcctgcaaattcatgacaggattattgagcaattgaaacacagagcaccagctctgaggaactcgtcccaagccccc

SEQ ID NO: 532037 - DNA, 82 bp, Homo sapiens
cgtcagcactgactttcagctatggaatcgaacctgtgtgcagacacattagaaaaggattggaacaaggtaatttgaaaaa

SEQ ID NO: 532038 - DNA, 100 bp, Homo sapiens
gctcaggcgatccgcccgcctcagcttcccaaagtgttgggattataggcgtgagccactgcacctggcacaggcagtcttgattgatatggaagaaggg

SEQ ID NO: 532039 - DNA, 100 bp, Homo sapiens
ccgggatcatcaagaaacaaatcttgaagcacctctccagctcctgcctgaagagtcactaagtgtcttttctcaagaatgtcataaacaagccatgcaa

SEQ ID NO: 532040 - DNA, 75 bp, Homo sapiens
ttaaaagccttttgtgctgatcaacttgatgtctttttacaaaaagggaatctaagggaggaaattatcaactgt

SEQ ID NO: 532041 - DNA, 51 bp, Homo sapiens
gggaaggacaggcagagctaaacaaggatgtggagagcatcttgtgcgcac

SEQ ID NO: 532042 - DNA, 97 bp, Homo sapiens
tggaacaatcttttgttggattgaaacagctaatcggttttcagagaaagatgctgatgaggtgaaaggaatttttgtagataccaacttatacttc

SEQ ID NO: 532043 - DNA, 100 bp, Homo sapiens
gctctgcgccagcagctccgctcggcgcgagaggccaaagaacagacaggagcaacggcttctgtcatttatgttcctccgccttttgctgctgctgcca

SEQ ID NO: 532044 - DNA, 90 bp, Homo sapiens
cccctcggcctcggcggcagcggctgcggagaaggcgagcgaagacaaatttacatgtattggagaccagaccagaagcccttctgaatt

SEQ ID NO: 532045 - DNA, 110 bp, Homo sapiens
tgtcagtggtactgaggcagacgttgtggcggagaagggcagtggctgtagctgccctttccgtttccagggttccgaccaggttgtcccagttttggtgcatctcctgt

SEQ ID NO: 532046 - DNA, 100 bp, Homo sapiens
aaaatgagcagctgtcctcatgtctctccagcaggtcagtatgggaatcctttaaataaatatatcagacattatgaaggattatcttacaatgtggatt

SEQ ID NO: 532047 - DNA, 96 bp, Homo sapiens
tctggggaggaggaggaagaggaagaggaggatgacccacttggtccaagctctccagaaggaggtctgcccagatgcgggtctgaacctgagccc

SEQ ID NO: 532048 - DNA, 100 bp, Homo sapiens
aagcccttcgcctgcacctggccaggctgcggctggaggagtgtacctcacagccttctaggatctccagagtggacaggaatctcacttggagggacca

SEQ ID NO: 532049 - DNA, 50 bp, Homo sapiens
tcctgttcgcagctgcggcatgagaaagatcagtctaaagaaaaggagaa

SEQ ID NO: 532050 - DNA, 80 bp, Homo sapiens
tactcgcagcacttggagcgcagaaccggccgcgcccggttttaaaatcaaagatgggaaaatcggagaaaattgccctt

SEQ ID NO: 532051 - DNA, 75 bp, Homo sapiens
cgcagcagatcagggaccggctgctgcaggccatcgacccccagagcaacgaagctcttcgtgggcggtcttgac

SEQ ID NO: 532052 - DNA, 111 bp, Homo sapiens
ggccacccagcagcagcatgacttcacactgacacagactgcaggcatctatcgagctgtgcctattcgagtcaatccaagagtgagtaatgtgaagtctgtctacaaaac

SEQ ID NO: 532053 - DNA, 87 bp, Homo sapiens
aagaattaactcaaatatctcttcttaacacctacctgattctggcatacacttcaagtctggatagtcagaagtttgtgacagtgc

SEQ ID NO: 532054 - DNA, 82 bp, Homo sapiens
aggagaagatcaagaggtggagctggttgtagattatgatgaagaagctgctctggcagatggtgaagatgttccctatgag

SEQ ID NO: 532055 - DNA, 87 bp, Homo sapiens
ggatttttgcatgagacgcttctggacagcgtcaagggttccacactgttgggagtcgctgcaagaatcggacaggcgctgagcacc

SEQ ID NO: 532056 - DNA, 100 bp, Homo sapiens
ggccaatgtgggatcgatgtttcaatattggaagcgctttgatttacagcagctgcaggacgagattgaggagctgcgggccgagatgctggagatgcgg

SEQ ID NO: 532057 - DNA, 82 bp, Homo sapiens
cgggcgagctgcggctcggacgccagcggacacgcgggcgagcaccaaagactctgcacagaagcagaagaactcgcctctg

SEQ ID NO: 532058 - DNA, 106 bp, Homo sapiens
aggcttactgtggatctggattctaaggcaacacttccttgaagaaacaagcttacagctaatcacatatggctctgatagaactgaggcactgaagagaatggca

SEQ ID NO: 532059 - DNA, 75 bp, Homo sapiens
ccagtgttcaccatcctggccccggaagtctctgctggatgaaccgaatcctaacagtccagccaatagccaggc

SEQ ID NO: 532060 - DNA, 75 bp, Homo sapiens
ggaatatttggtccctggtcagtttctgctttggcggctgagccagaggccaactgcagaggaactggaacagag

SEQ ID NO: 532061 - DNA, 83 bp, Homo sapiens
tatgaaccagtgtatcccaaattgatccaaatcctgatcagtcagcagatgatagaccatcctgcccctctcgttgaaggaac

SEQ ID NO: 532062 - DNA, 100 bp, Homo sapiens
caagccagacccggacatcttcctagcttgtgccaagaggttctctccccctcctgctatggagaagaaccacacgatgagccagcacgcacagtgaggg

SEQ ID NO: 532063 - DNA, 88 bp, Homo sapiens
aaggagtacttcaaggagaattcccaccactggagctgggctgtgcagtggctacagaagaagctatatgttctcctttcagccaaga

SEQ ID NO: 532064 - DNA, 75 bp, Homo sapiens
agtgtcagtgatggcggtgaaacgtcagccgggccaagcagatagaacttcagttcactattggcgaagccatta

SEQ ID NO: 532065 - DNA, 51 bp, Homo sapiens
cccctgagatccacccaagttgtgaaaaagcttgagtctccacccccatct

SEQ ID NO: 532066 - DNA, 157 bp, Homo sapiens
tgaaacactgcagaaaggctatctgaagaaaagtagaaggaaaaacagaacgttgcaaactctggaaaaaaacttgggaaaatgtttataggaggccttagctgggacactacaaagaaagatctgaaggactacttttccaaatttggtgaagttg

SEQ ID NO: 532067 - DNA, 83 bp, Homo sapiens
gctggacctgaaggaggccggtgactttcacttccagccagctgtgaagaaggaactgtggctgcaccatctgtcttcatctt

SEQ ID NO: 532068 - DNA, 90 bp, Homo sapiens
cagattcgcagtggtcgcttcttctccttgatggaggcccattgaggcttctctgtcctccacggggaacagcattggcctaaacctgca

SEQ ID NO: 532069 - DNA, 83 bp, Homo sapiens
tctaatttgaaccatgtttggattgaagccgcctctgtattacttaccagggtttgccttcccggattgggcctacaagccag

SEQ ID NO: 532070 - DNA, 100 bp, Homo sapiens
aggaacctgggcatccctctgggccaggacgccgaggagattgcttccaagtatgatcatcaggcagaagaagatcttcgcaattggatagaagaggtga

SEQ ID NO: 532071 - DNA, 90 bp, Homo sapiens
cctccgatggcggcaccaagaggcccgggctgcgggcgctgaagaagatgggtcaaaatgcagatcttcgtgaaaacccttaccggcaag

SEQ ID NO: 532072 - DNA, 98 bp, Homo sapiens
gctcgtccatgtcggcggccaccgcgcggaggccggtgtttgacgacaaggaggacgaatcattgatcagcgattcgagaaggtttcctactttgtat

SEQ ID NO: 532073 - DNA, 101 bp, Homo sapiens
aacagggacacctggttccagctgcagcacgtggacgctgactcggaagtgcagaccatcatcaaagaggggatgctgaccaaacagaacaattcattcca

SEQ ID NO: 532074 - DNA, 75 bp, Homo sapiens
tcctccttggtcgccgcgtccttggctggcgtgaggtgcgggagacgcggcggcggcacgagcggcgcctggtgg

SEQ ID NO: 532075 - DNA, 50 bp, Homo sapiens
attcggggtgccagaaggaaagcatagatctttaatctcatgaagtacga

SEQ ID NO: 532076 - DNA, 75 bp, Homo sapiens
ggggaacacagccctaatcacagctgcacaggcagaacatccagtcatggataaaaatgagctggttcagaaggc

SEQ ID NO: 532077 - DNA, 100 bp, Homo sapiens
cgccggctcccgctcgggcggccgcggacatgtgcaggatgtccttcaaggagttacttaaagatccactctacattggactacggcagagaagagtaag

SEQ ID NO: 532078 - DNA, 87 bp, Homo sapiens
gagactggagtcgaaggccgtgaggtatttttctaagttacatgggaataggactctcggctcaaggcgtcaacatgaacagacttc

SEQ ID NO: 532079 - DNA, 50 bp, Homo sapiens
ccgcagaaagtgcctgtgcatcaggttttgattcccaccatggccatcac

SEQ ID NO: 532080 - DNA, 74 bp, Homo sapiens
tgaagacagcaccaggttccaaatcatcaatgaagcaagtaagattttctctgtgggcagttctttttgttttg

SEQ ID NO: 532081 - DNA, 83 bp, Homo sapiens
cggtattggatgattcgtatctaagactctgggacactcctgaagtcgggaaatggcgtcacaatgtagcagggaccccaggc

SEQ ID NO: 532082 - DNA, 100 bp, Homo sapiens
ccggaaggcttcaaaggctgtcgcaaggaggaagaccctgctctcagcggcccacgaggtggagttgcagcggcagaaggaggcggagaagctggagcgg

SEQ ID NO: 532083 - DNA, 111 bp, Homo sapiens
ccgccgcggagcctcctcgcccgctcccgccggcgagcaagagagagctgcaggtctctgctgccgcctagtagttccctgtcacaaagggatgccaaggcttaccgatct

SEQ ID NO: 532084 - DNA, 83 bp, Homo sapiens
cctcggccaccgagatcctgctgacgccggctagggttctccttactatgacaatgtccgccccctctcttaccctgattcgg

SEQ ID NO: 532085 - DNA, 90 bp, Homo sapiens
tgaacatgtgcttggtgtcgtttttccttgagctgaacgtcttgcaacagtggccgcacgcatagatgaagattatggaagagattcggg

SEQ ID NO: 532086 - DNA, 75 bp, Homo sapiens
cagaaaaggcagaggttcttaccgaaagcaggtttggacatggcacctttctgctgtgcctggaaaccatttacc

SEQ ID NO: 532087 - DNA, 100 bp, Homo sapiens
cggctccgtgttgtgatgacaggagaatgtgtgtgtgtcccgggcccagacgaattgtaatagctcttcaagtctgcaataaaaaatggcctccaacaaa

SEQ ID NO: 532088 - DNA, 76 bp, Homo sapiens
gtagagcctgggggagagtggatccaggtgaagggggcagagctttctgaaaaggatatgagcatgctcgaggaga

SEQ ID NO: 532089 - DNA, 50 bp, Homo sapiens
atcactacggacacaggattcatgcgatgcatcactgtaagcgataccgc

SEQ ID NO: 532090 - DNA, 76 bp, Homo sapiens
agatgacaccttgcattccctatttaggttaaaaggactactgactcaaactctgcctcttgagttcatggttcac

SEQ ID NO: 532091 - DNA, 101 bp, Homo sapiens
gacagcgacaccgagggggaggacattttcaccggcgccgcggtggtcgtctgggacaagcggctggccagggctgccgaagcctgggccacccagtgcat

SEQ ID NO: 532092 - DNA, 90 bp, Homo sapiens
catgaaggagaaatctgagcctcagcaagagaaattaaccctatacctctgacccagacaacacaggcagttctacataccggccacccc

SEQ ID NO: 532093 - DNA, 74 bp, Homo sapiens
cctgtctaaatggacaatgcatcggcaagtgtccagagaatggctgggatgaaagtacacttgaactcttttta

SEQ ID NO: 532094 - DNA, 90 bp, Homo sapiens
aacagtgttgtgccagcctacaggaggaaaggccagactcacagaagggtgtgggccgaagatatgctcatgtggtgttgaggaaagcag

SEQ ID NO: 532095 - DNA, 96 bp, Homo sapiens
ggccacaactctgcagtggaccacagcattcctgaaatacatccaggaaagacatggagattctcttaaaaaggtgccagcgagatttcagattcc

SEQ ID NO: 532096 - DNA, 50 bp, Homo sapiens
aatgacaaacaaccagctcttcaggtcaaaatgcagatcttcgtgaaaac

SEQ ID NO: 532097 - DNA, 75 bp, Homo sapiens
catccgatgcaccctttttgtcagattatcaggatgagggtgtggaaacaggaagagaactagaactggaagtaa

SEQ ID NO: 532098 - DNA, 98 bp, Homo sapiens
aggaaattgggaatgaattggatgaacaaaatgcctgtaactgcaacctgcatgcccggcgctgccgcttcaacatggagctctacaagctttcgggg

SEQ ID NO: 532099 - DNA, 100 bp, Homo sapiens
agattatgacagattacgccccctatcctatccgcaaacagatcctgttcccagtgggttttctgcaggggaagttctgattcccttagctgacgaatat

SEQ ID NO: 532100 - DNA, 83 bp, Homo sapiens
ttttcgaaagctgggtttcccgggagatcccaggcggtgacagagtggagccatggctagagatcacggatacacgactctag

SEQ ID NO: 532101 - DNA, 96 bp, Homo sapiens
atcgtcaagtctcccagcgaccccaagcaataccggtgtgaagatgccttaagaaaaaataagagcttaattgggccggatcaaaaggagtatcaa

SEQ ID NO: 532102 - DNA, 100 bp, Homo sapiens
atcaaatgacatttctattcatcatttcacatgtgatgaagaggttcaggaagatttgactgaagagaaaaaaagggaactggagcataatgctgaagag

SEQ ID NO: 532103 - DNA, 90 bp, Homo sapiens
cagcccactgtttcctacttcctgaaggcagcagctgggattgaaaagggggcccggcaaacaggaaaacgagtgtgtgctggagaaggc

SEQ ID NO: 532104 - DNA, 100 bp, Homo sapiens
ggggagacgtcggttgagcggcggcgaacatgcgcttttgacacattggagggcttcataaacttcacttaccaaatacttcaagggattcagaaacagc

SEQ ID NO: 532105 - DNA, 74 bp, Homo sapiens
aacagaaattctggaacacctatatgctgagtcagtgctgattctctcaaatagagcttgaaggataaatcttc

SEQ ID NO: 532106 - DNA, 80 bp, Homo sapiens
tggagctcacccacctgtacgcacgcttccaggtcacacacttctcctgatgctgtgtgctgtggacccacctggggttc

SEQ ID NO: 532107 - DNA, 74 bp, Homo sapiens
ctttgggcgctgtgagcggcggcgagcaggtcaaaatgcagatcttcgtgaaaacccttaccggcaagaccatc

SEQ ID NO: 532108 - DNA, 73 bp, Homo sapiens
taacgtttaccctagcaaaccagagaaaaggatgtcattatcttaggggattttggccaagggccagacagca

SEQ ID NO: 532109 - DNA, 90 bp, Homo sapiens
cgtctgtgttgtgactgctttggacgtgggagtcacctgaaagccaggaaatggtccactgtcccacgagcagaagctgtcacaaagctt

SEQ ID NO: 532110 - DNA, 115 bp, Homo sapiens
gcctactgcagcggcgggcagccgggcacctgcaagtactggatcctcgacctaggtgctggagaatctggtaaaagcaccattgtgaagcagatgaggatcctgcatgttaatg

SEQ ID NO: 532111 - DNA, 100 bp, Homo sapiens
acaaggacgatagccagagggcgttcccatggagccaggccaccagagaaacggcggagaacaattgaggatttcaacaaattctgcagttttgttttgg

SEQ ID NO: 532112 - DNA, 74 bp, Homo sapiens
ttagaactcgcgtttccacttcagagatctgatgaagaactggtggatgtttctgcatctgtcttaccagaatt

SEQ ID NO: 532113 - DNA, 98 bp, Homo sapiens
aaaggacatccaagccttcaagatgaaccgcaaggagagaagttcttatgactcctccatgtctccaggatgaatttgacaagctgaggcctctctgc

SEQ ID NO: 532114 - DNA, 95 bp, Homo sapiens
ggaaaatggccgccgccgccgccgccgcgccgagcggaggaggaggaggaggcgaggaggagagactatgctctgaacgttcttctcatcatcgt

SEQ ID NO: 532115 - DNA, 90 bp, Homo sapiens
cggaggggagggggcgttagccccgcgcagccgccggcgtcgccgccatggacctaggaattgaatgatctggcacgggaccctccagca

SEQ ID NO: 532116 - DNA, 100 bp, Homo sapiens
cggcccctggatgcacagccccggcgctgggacctcaggatggaaaccagcagcctgcaccgcccgagaaggtcggctgggtccggaaattctgcgggaa

SEQ ID NO: 532117 - DNA, 101 bp, Homo sapiens
gccggcagaggcgccgcagcgtcggagcaatgcaaggctaagccgggcatcctgtacacgtcaaagaagagcccctcgatccagaggaagctgaagggccc

SEQ ID NO: 532118 - DNA, 90 bp, Homo sapiens
catgagtatttttcgggaactcttcagatgcctgcacacccgacgaagggaacgtcatcgtttggaaagcgtcgcaataagacgcacacg

SEQ ID NO: 532119 - DNA, 75 bp, Homo sapiens
gctgtttgctcatcaacctcaactgtgattatttccattcaatacttggacctggaaacatcaaaaaagctgtcg

SEQ ID NO: 532120 - DNA, 74 bp, Homo sapiens
gcacgtggcagcgcaggaaacaggcgaggccttcttgggcagctttgtggccagcgggatggggccctcggcct

SEQ ID NO: 532121 - DNA, 113 bp, Homo sapiens
gttcgccgtgcgcaggttcttctctgtgtacctgcgcaggaagtcgcgctccaagagctccagcctgagccggctcgagagatctcggctcaccaaattccacaacctgaagg

SEQ ID NO: 532122 - DNA, 82 bp, Homo sapiens
aaggaacgaggcaaggagctaaagcagcgtgcgttcagccctgggacggcaccgaaagcgaaggaagctcctgctcctccta

SEQ ID NO: 532123 - DNA, 100 bp, Homo sapiens
gtataagaaaaaagctgctgcctatatgaagtctttgagaaagaatcatgtccctaaggaggaagctggagctccacgaggggaggggccggccatccca

SEQ ID NO: 532124 - DNA, 82 bp, Homo sapiens
ctgcccttcaccgcgggcgccaatggggagcagaaggactcggacacagaacccagcttagactagaaagtctagaagacac

SEQ ID NO: 532125 - DNA, 100 bp, Homo sapiens
cctgcaggtggagctccggcagccgccctgaacgatatcgcattcagagtgaacaatttgaagatctttggctcataaccaatgagcttattcttcgcct

SEQ ID NO: 532126 - DNA, 100 bp, Homo sapiens
gcaagagtcaccttctcaactgttgtcctcatgatgtcctttctggaactgctgctgatactttggctgtgaggcaaaaaaggagaatttatgatatcac

SEQ ID NO: 532127 - DNA, 75 bp, Homo sapiens
cccgaaagccgctgggaaaagtgaccaaaagccagccccactgtgagttgaactctttcgtgttgaccggccact

SEQ ID NO: 532128 - DNA, 51 bp, Homo sapiens
aaaaagcccagtggaggaaagagctagcatgaatacaactttgtctgagag

SEQ ID NO: 532129 - DNA, 100 bp, Homo sapiens
tggcggcgtgggcccgggcgagcagccctgcctccggacgaatgatatggaacctagcaaagctgttccactgaatgcatctaagcaagatggacctatg

SEQ ID NO: 532130 - DNA, 82 bp, Homo sapiens
acgaggggaagtcgtacagcgggaggaataagtttttttcatctgtaatttggaagccaagtcagtaacaaaatgaaaccag

SEQ ID NO: 532131 - DNA, 100 bp, Homo sapiens
cgggaggagcagcctgaacccggggctggtgggcctttctgtgtcctactccttgcagacccttcagagacttcctgttgctctgaggacactcatccca

SEQ ID NO: 532132 - DNA, 100 bp, Homo sapiens
caaagggccgagtgccatatccaggatcgaacctgcaagcacttatagacagtactcgggaaccaaatagctctgcacaaattgatattgttatctccaa

SEQ ID NO: 532133 - DNA, 75 bp, Homo sapiens
ccaggatgtaccacctttctggcaatgagatacaaactggactctcaggacaaaacgacaccagccaaaccagca

SEQ ID NO: 532134 - DNA, 90 bp, Homo sapiens
gccgcatcttcttttgcgtcgccagctgatccagtgtctctttgggccacttcaggcggggccgagcaatgcaggaggcaagagaaagct

SEQ ID NO: 532135 - DNA, 75 bp, Homo sapiens
gtttcattcgaggtttcgggccggagtccaaaactacttacctggaagaccttccaccaccccctgagtatgaat

SEQ ID NO: 532136 - DNA, 83 bp, Homo sapiens
ggtcacattcttggagctcaaggtgacaggccagagcccaggtccccaggacagtgcagttgttgacctcctgtactggagag

SEQ ID NO: 532137 - DNA, 50 bp, Homo sapiens
cctgacctccggcagatgtttggggtttgatgtaggcccaattctcaaac

SEQ ID NO: 532138 - DNA, 142 bp, Homo sapiens
gcgggaggtttggagcagatggataccgtatcgacgtggggcctccggtatgttgccgctgcgttgagccccactgtgttctccttgcctcaaaagaaaactcggcacctgttaaacttggaggctttggggtagctattca

SEQ ID NO: 532139 - DNA, 137 bp, Homo sapiens
cctggagtctgcgaaggccgggacccggttccccggcccacagtgggggtgtgcaaacccgagagaactgggttatccggtgttggctcctgctgcttactatgaccaaactggtgcccttgtagtgaatgcaggcg

SEQ ID NO: 532140 - DNA, 97 bp, Homo sapiens
aggtcccagcctgctgctcctgctactaacccacctccccctggctctggggagtcccattaccttctccaggcaaattccgttcccctgcagcacc

SEQ ID NO: 532141 - DNA, 52 bp, Homo sapiens
cgatgcaccatgctctcttacagcatgattccacctttccactgatagactc

SEQ ID NO: 532142 - DNA, 100 bp, Homo sapiens
caaaagcctcctacaagagtcctaccaaaagtgaaaaaccttttgaatgtccaaattgtcatgaacgatttgctagaaatagcactctgaaatgtcacct

SEQ ID NO: 532143 - DNA, 82 bp, Homo sapiens
aaaagcgagaccgcgtgcgaggaccgcaattctgtggtgttcttggtcacacatttatggagtttctgaagggcagtggaga

SEQ ID NO: 532144 - DNA, 100 bp, Homo sapiens
tttggagtgtgcgtgcgcgccgagcgccagctgaggtgggtgtcctggttggcaaagaccggtcaagtttttacgtgaatgggctgacacttgggggcca

SEQ ID NO: 532145 - DNA, 82 bp, Homo sapiens
tccacccaccgccgccgcctcccagaactttccatttgcagtgtgcaacagaaaaaaaaaaatgaagtaatgtgactcaagg

SEQ ID NO: 532146 - DNA, 75 bp, Homo sapiens
gaagcatctgaagaccatggatcacaaccggaaccgcagggcacagttggcgggcagctcccaggtctccatgag

SEQ ID NO: 532147 - DNA, 75 bp, Homo sapiens
cggaaacgcagacactgaactttgggcctgaatgggtaagggactgttctgaagaacctttccatttagtgatca

SEQ ID NO: 532148 - DNA, 100 bp, Homo sapiens
gaaaacagcaggcacccaagcgggcggcaggttctgcttccttcggtgctgcggctgtgtgttttctgagcgagccttgaaagagataaaagcggaagtt

SEQ ID NO: 532149 - DNA, 90 bp, Homo sapiens
cagtgaactccggtcctgcacgccctgtctgaaggccaacattgagcgtctggaggagctatcattgttaattatgcaagtaaaatgttt

SEQ ID NO: 532150 - DNA, 51 bp, Homo sapiens
acccacgggtgtgtggggcagttataaggacttactcctcagtgatattcc

SEQ ID NO: 532151 - DNA, 122 bp, Homo sapiens
caaggcaagaccgaattcagaaggatatcgacgtcgtgatccagaagtccagagctgaggactgcctgtttgcaggaaggatttgatgccctggatccctttattcccatcctggtttccaa

SEQ ID NO: 532152 - DNA, 75 bp, Homo sapiens
ggagcacacggagcactgcaggcgccggtgttctaagaacggaagcatctgggctggatggaatttagcatcaag

SEQ ID NO: 532153 - DNA, 88 bp, Homo sapiens
cctgctaacagaactggaccttttcggtttctagagagtggagcctgcttcctgggccctaggcccctcccacaatgcttgtcgccgg

SEQ ID NO: 532154 - DNA, 75 bp, Homo sapiens
tggcattgaacctgtatttccggagaacacaggctggtttgtgaatccctgataaactctgacactcttgagtgg

SEQ ID NO: 532155 - DNA, 90 bp, Homo sapiens
taaacccattgaagaaatcattgtacagaatggaaaagtaattggtgtaaaatctgaaggagaaggtcatcctaaagtatgtgaaaaatt

SEQ ID NO: 532156 - DNA, 75 bp, Homo sapiens
gcaggatattttgattggaaggactgcctgcctccaacagagtatgccaagatggaaggaagcctcatacagtga

SEQ ID NO: 532157 - DNA, 75 bp, Homo sapiens
ccaaactccaggctcagatgtcacagggaagaatatttctcagccctccgttctcaagacagatgagtgctttag

SEQ ID NO: 532158 - DNA, 100 bp, Homo sapiens
agaaattctggaacacctatatgaacacccagtgcatcccagaaggcttggagagctactacgcggagcaagactccagtgcccgggagaaattttacac

SEQ ID NO: 532159 - DNA, 75 bp, Homo sapiens
acctcgagctgcggtagcagcgactcatgagagcgcggccggaggacagaaatgcactcggtgatggaaagagag

SEQ ID NO: 532160 - DNA, 74 bp, Homo sapiens
ggttgatgagttggacagcctctctcccattctgttttgccaggccctggccaacgtcaacattgggagcctca

SEQ ID NO: 532161 - DNA, 100 bp, Homo sapiens
cctttatcctggtcatcttctatttccaaagaacaagccagctcacaccagctggaacatgggcgccatcctggaggggaagcgcagtggctttgcaccc

SEQ ID NO: 532162 - DNA, 100 bp, Homo sapiens
tatgtctccaacatggaccgcctgggggactcggaactgtggtcctggctctgccatatgacacccccgtgcccggctacatgaataacactgtcaacac

SEQ ID NO: 532163 - DNA, 100 bp, Homo sapiens
ggtgttattatggactttcaaacatctgaagatgacaatttattagatggtgacactgcagttgcttctcggacaaactatttagtggaaaaggcttaca

SEQ ID NO: 532164 - DNA, 80 bp, Homo sapiens
gcctatgaatttgctaaacttaaaagcaagctggttctctgggatataaataaggcctttgaagacctcagcaaactaat

SEQ ID NO: 532165 - DNA, 113 bp, Homo sapiens
agctgggaaagaagttatgcttgttggaattggtgacaaaatcagaggcatactttatagtactgccaaatctgtcgaaagggagataatgaagaactgcttcttctttgtga

SEQ ID NO: 532166 - DNA, 100 bp, Homo sapiens
actagctccaggttaggccgagctttgcgggaaagcagcggtacatgtcccagagcaagcacacggaggcccgggagctcatgtactcgggagccctgct

SEQ ID NO: 532167 - DNA, 95 bp, Homo sapiens
ccgtcgggaacatgccagctaacgaggacgctccccagccaggggaacatggcagtgcctgtgaggtcagaagagatcaattctacagaaatttc

SEQ ID NO: 532168 - DNA, 100 bp, Homo sapiens
gaaggagttcaaagttaataagttaagtgggcagaccaacatccacctcagcaaaaacttcttcctgacgaatcgcgccagggagcgctcagacaccttc

SEQ ID NO: 532169 - DNA, 76 bp, Homo sapiens
gaggaggcgcgggaggtgttcgagaacgaccccgagacggtagctcatcccacttcagggactatttcctctgcca

SEQ ID NO: 532170 - DNA, 100 bp, Homo sapiens
tggtgcaggaggctcactccgatttaaggtgcccgagtccacgctgatggactgccgtagaccctgagcctccaacaacaaacaaatggcagctggacaa

SEQ ID NO: 532171 - DNA, 99 bp, Homo sapiens
gtcttgtacgatggctcccccctggtgcccacgcccaatgtgctctgggacctggttgacaggataggacggctgagccaaagacctgccgtggaagag

SEQ ID NO: 532172 - DNA, 50 bp, Homo sapiens
agtgaaaccatacatagacgagatcgagacatgtaagcagcatcatggag

SEQ ID NO: 532173 - DNA, 74 bp, Homo sapiens
aacagtttgtggcaagacaagctcagaactgagaagctgtcaccacagtgtggacaacagtgagtatatgcgga

SEQ ID NO: 532174 - DNA, 80 bp, Homo sapiens
acctatatagatccccgcacaggaaaatctgccctcactattcctgatcagagaactccagttgcttcaacacacagtat

SEQ ID NO: 532175 - DNA, 83 bp, Homo sapiens
cgactacgcggccgcggagacctacctgcggcgtcggcagctgctgctccgaggcagcctgcttctgcaaagtggtacgatcg

SEQ ID NO: 532176 - DNA, 75 bp, Homo sapiens
cgaagccccctgcaggaactctacaacccaatccaggaagcaggagctggccaacagctcggatgcgaccctccc

SEQ ID NO: 532177 - DNA, 75 bp, Homo sapiens
cttatgagtacctttgtcatttggaagaagcgaagaggatgccgcagctgagcctgtcctggctgggcctcgggc

SEQ ID NO: 532178 - DNA, 50 bp, Homo sapiens
gttcgagaacgaccccgagacgaaaaacaagagctggatctcagaggatg

SEQ ID NO: 532179 - DNA, 100 bp, Homo sapiens
tttgcctgctggaacctgctgtatctactcaagagtggaagttttcacaggatttggagttccatggagtgatgagattttattttcaagataaagctgc

SEQ ID NO: 532180 - DNA, 100 bp, Homo sapiens
gcaaacaagccaatcccaggaggaaaaacggcagcacaacaagattcgcagcgtggaggggagccagctgaaggcctacctttccttagaagtgttagat

SEQ ID NO: 532181 - DNA, 75 bp, Homo sapiens
cagtcggtgaccgcgcgactcggcgcccgcccgcgcctagtgtgttaattgtaacctacaaggagcctgcaaaat

SEQ ID NO: 532182 - DNA, 80 bp, Homo sapiens
ccccagagggaaaagaagcccaaagttttaaaggccctgggaggagcggggacactgaggacctctctccaaattggcct

SEQ ID NO: 532183 - DNA, 100 bp, Homo sapiens
gaacttggctgctcgtacatgctgtcttttccaaaattctgtcattgccagcagatacataccgagcatcaaatattaaggcacccggagaacagacagt

SEQ ID NO: 532184 - DNA, 82 bp, Homo sapiens
tcctccaggaggcatctcacaacgtccccaaccagagttccgagtcacttgctgggttttcagagaaagatgctgatgaggt

SEQ ID NO: 532185 - DNA, 100 bp, Homo sapiens
ccgagaaccgtcagtttgagccagatgattctgtttctggcgtctgcatacgcaagtccccaactcgctgaggagagctgttcagctatggctgctgtca

SEQ ID NO: 532186 - DNA, 80 bp, Homo sapiens
ccgcgcacagctgctcccttcgccttcgccctttccacctcgcggcagttcgtctgatcatcggatatcatggagtctgg

SEQ ID NO: 532187 - DNA, 82 bp, Homo sapiens
ctcggtgattgaggacaagaccatcgagctcatggccctgaaagcagcagatctcacctgcattggaggatgagacgccaca

SEQ ID NO: 532188 - DNA, 100 bp, Homo sapiens
ccacaagtggccccagcccaggaacgaatctctcaggctgcatcaggatgaatgatgacccaagtatggaagtttatggctacaaatgatttgatgacgg

SEQ ID NO: 532189 - DNA, 90 bp, Homo sapiens
catttacgcggatgtcggcgaagagttcaaccaggttgccaacttggcctgttccatctcaaataatgaagaaggtgtaaagcttgttcg

SEQ ID NO: 532190 - DNA, 83 bp, Homo sapiens
ggacaatggtcaccgtctcttcaggctgaccccgcactacatctacccaccagccatcgtgcagcccagcgtggtgatcccag

SEQ ID NO: 532191 - DNA, 100 bp, Homo sapiens
ctggcggccgggagcgccgggacggggcgcgaagccggaggctccgggacgtggatacagggacttgccatgaggtgttgaagccttgtttcactgagtt

SEQ ID NO: 532192 - DNA, 100 bp, Homo sapiens
atgacaatgtagaggatgacttctctaatcagttacgaattgttcaggagacaacttttgatttgggaggagatattcatagtgggacagcattaccgac

SEQ ID NO: 532193 - DNA, 74 bp, Homo sapiens
gaggcgcgcgccatggcttctggagccgagaacagtggaggccatgtgtcttttggcagtcagtccagatggga

SEQ ID NO: 532194 - DNA, 75 bp, Homo sapiens
atgaccggcagatccgcctgtggggactggaggcccagaaacggagtgggaggagcggcgcaggcagaacattga

SEQ ID NO: 532195 - DNA, 100 bp, Homo sapiens
ttcgggctgggagcagcttcatgactacgcggagcgggagagcggccacaccatgcgaggtcatccttgtcagctcctcactcagtgaccgggaccagag

SEQ ID NO: 532196 - DNA, 100 bp, Homo sapiens
tggcaatgagacaggcctactggccgcgagcagcaagacaagagccctgtgtgagcccctcccgataaagcccccaccctctgctgtcacacagcgcaac

SEQ ID NO: 532197 - DNA, 90 bp, Homo sapiens
cagccttccagtttaagccaagcggtgtctcagggcagcagcgactctcagatcctggatctctcaaatcgcttttacaccctgatcccc

SEQ ID NO: 532198 - DNA, 75 bp, Homo sapiens
gcgcccaggaccctgttccatccaaactcttgccctttgagggaccagatgaagtgtttagaggacatgagccag

SEQ ID NO: 532199 - DNA, 103 bp, Homo sapiens
agcaggctctgtggttcaggactcccgacttgacacgatattttttgctaagcaggatggagagcaatacatcatcatctttggagaatttagcgacggcgcc

SEQ ID NO: 532200 - DNA, 100 bp, Homo sapiens
gtaactgtgcaatgctacatgtacgtggacttatatcagaccagtgtggatcttcaagaatcattgtttctaccatgaatgaaatgaagagttattctca

SEQ ID NO: 532201 - DNA, 101 bp, Homo sapiens
gctagaagaaaaggtgtacttgcaagaaacctcaggacttgagtaacagcaacatggcttcaaatccattatacagaaagcctatctccacgcacactgtg

SEQ ID NO: 532202 - DNA, 98 bp, Homo sapiens
tgggtggtctggagaccatggagaccctcacggagctgggcgacgagctgaccctgggagacatcgacggggatcccaacaagccctcaggattcaga

SEQ ID NO: 532203 - DNA, 75 bp, Homo sapiens
cctgaggagtccccgctgcttgggtgatacaattctggagactggagaagtaattccaccaatgaaagaatttcc

SEQ ID NO: 532204 - DNA, 80 bp, Homo sapiens
ttgtgagagatttctgcagtgaagattgctgtaaaaaatttcaggattggtactacaagttgctggatttgtgcgactcg

SEQ ID NO: 532205 - DNA, 75 bp, Homo sapiens
gggagtgctctgttcacggctccatcgctgttagagaggcagatgcgaaccagaacaatgggacctcctctcagg

SEQ ID NO: 532206 - DNA, 75 bp, Homo sapiens
catttacacaagaagaaaaaacctcccagcatcagtgcccagtttcaggatcacctgctgttaccagctaccacc

SEQ ID NO: 532207 - DNA, 98 bp, Homo sapiens
cagctctgaggggacccgcatcaagaaaatctccatcgaagggaacatcgcccccttacccaggaatggaacaacctccacaccatccttactatcag

SEQ ID NO: 532208 - DNA, 83 bp, Homo sapiens
tatactgcccctgcattgttggtattgaaagacttcagggtggtcgtgcgcatcgattcctgggagtcaacatctgtgtatcc

SEQ ID NO: 532209 - DNA, 75 bp, Homo sapiens
tttgttcaccgccaaccccttcgagcaagacgtgggccaagactaaggggctgcagagcggggtggacattggcg

SEQ ID NO: 532210 - DNA, 76 bp, Homo sapiens
aagaacaagaaagactccacctactatggagccaattgtacagaatttaaaccgtctctcagatgtgtacagtaga

SEQ ID NO: 532211 - DNA, 75 bp, Homo sapiens
cgccgccgccgccgccgccgccgcccgctttcggctcgggcctcaggacctgaaggagaagaaggagaaggtgga

SEQ ID NO: 532212 - DNA, 100 bp, Homo sapiens
agagaattaaagtctaactctccaaatgcctgatggaattgggactgtttcagtggaagaaaaagaaagatttgaggagataaaagagagactctcttcc

SEQ ID NO: 532213 - DNA, 75 bp, Homo sapiens
ctttgtcagcgctcctaaagcaaacgccaccattgaagtgaaagaatccagcaactatcacaagaatactcctta

SEQ ID NO: 532214 - DNA, 100 bp, Homo sapiens
accgaatgcagcgacgaaatccccctgaaggtaccgcggacctcgccccgggacagcgaggagctgagggaccctgttcgagaacttgtcttggacaatt

SEQ ID NO: 532215 - DNA, 90 bp, Homo sapiens
ctgaacgcaagaaaagctccactgtccctagtgctgctgacttgagtaaaccaatagataaaaggatatacaaaggaacacagcctactt

SEQ ID NO: 532216 - DNA, 88 bp, Homo sapiens
gggatgtgaaggactccgggtgaggccggccacgccccgcacgctggggaagctccaggctacctacacaacctggcccaggctggtc

SEQ ID NO: 532217 - DNA, 100 bp, Homo sapiens
gccaaactttgtgattcaggagaactggtcgccatcaagaaagtattgcaggacaagagatttaagtattggtaaaggttttcaaggtgtcatgaaaaga

SEQ ID NO: 532218 - DNA, 100 bp, Homo sapiens
cggggacccagaccctggagcctcagttggaagcagccgatccagcctgcggagcctgtggggcaggtccagctgcagctgctgacagccattgtgaaac

SEQ ID NO: 532219 - DNA, 100 bp, Homo sapiens
aacttagcagcagctccactgaacagataagggaaggagctcattgccaagttagatcaggcagaaaaggagaaggtggatgctgctgagctggttcggg

SEQ ID NO: 532220 - DNA, 101 bp, Homo sapiens
ggcagtatccttggggcactgtgcagggtgtttgtaaaatgtatgaagaacatctgaaaagaatgaatcccaacagtccctctatcacatatgacatcagt

SEQ ID NO: 532221 - DNA, 134 bp, Homo sapiens
ctggccactatggaattctaatttgaaccatgtttggattgaagccgcctctgtattacttaccagatgacgtccggttgtttgccttcgtgcgcttcaccaccggggatgccatgagcaagaggtccaagttt

SEQ ID NO: 532222 - DNA, 90 bp, Homo sapiens
gcaaaatgacagatcttctagaagaaggtattactgaatatggaaagtctcaattccacacgatctcatgagagaactggacctgatgat

SEQ ID NO: 532223 - DNA, 87 bp, Homo sapiens
agagatgtggggggattctcgacctgctaacagaactggaccttttcggtattacaggaataacggaagccgttaaagagatcacac

SEQ ID NO: 532224 - DNA, 100 bp, Homo sapiens
ggtggcctgagcccggccgccatcgatgaccccggtcgcggacttgcttcaggctggccaccccccggtatttgaagtataccatacaactgttttgaaa

SEQ ID NO: 532225 - DNA, 75 bp, Homo sapiens
gccccggcctctcggcctctgccggagaaacaggtacaatgactcttcttgcttttcacctaagttgaataagca

SEQ ID NO: 532226 - DNA, 82 bp, Homo sapiens
ccgggaggaaggaacgaggcaaggagctaaagcagcgtgcgttcagccctgggatggactcaccctgtcacccaggttggac

SEQ ID NO: 532227 - DNA, 100 bp, Homo sapiens
gcccaggctggacaccagcaatgagaggacccgcgtgggcaccctgcaggtggtcagacatgtcatcaactcagctgagatggggtctcgctatgttgcc

SEQ ID NO: 532228 - DNA, 82 bp, Homo sapiens
ttgtgtcttgttgcgggcaccgcagtcgccgtgaagatggcgtctaccagccggtcagcccaaggccaaccccactgtcact

SEQ ID NO: 532229 - DNA, 75 bp, Homo sapiens
cgctgatggcaagttagcaatttttgaagataagactgttaagtcaagcaccacataccgacagaccgcatgtat

SEQ ID NO: 532230 - DNA, 100 bp, Homo sapiens
cgggagtatgcagacagttttggcaaggcatctgtggctcttgtgcaatgaacatcaatggaggcaacactctagcttgcacccgaaggattgacaccaa

SEQ ID NO: 532231 - DNA, 100 bp, Homo sapiens
aatgtttcatcattactaacaggatattcctcatgacattgctgtctgaaaggtgactcttttgatggtgggacttgataatgctggtaaaaccgcaaca

SEQ ID NO: 532232 - DNA, 90 bp, Homo sapiens
cgggatcgtgaccgagaccgtgaccgagagcgtgaccgagagcgcgaatatcgtcatcgttagaaggtgctggagaatctggtaaaagca

SEQ ID NO: 532233 - DNA, 89 bp, Homo sapiens
ccaattcatagaatagactcccctggatttaagccagcctctcaacagttttaaattgccatttggcagtgaaggtgctgtctccggaa

SEQ ID NO: 532234 - DNA, 75 bp, Homo sapiens
gaattcgctaaatttgaggaagaacgcgccagagcaaaatgggacacagttgtacgtggacactataaaggtcag

SEQ ID NO: 532235 - DNA, 82 bp, Homo sapiens
ctgcacctgctgcaacttgggccccttttcagtacctggagtagaacagaaaaattattatgtctgtgttcccttgggactc

SEQ ID NO: 532236 - DNA, 82 bp, Homo sapiens
ctgatagacatgggggcctcaaacgtggagatcaactcctctctgttaatggagtggtgccaatgggtcatgtttggttaga

SEQ ID NO: 532237 - DNA, 98 bp, Homo sapiens
aagaggtagcaagaaagaaaattagagtgaatgtagttgcaccaggaggaaacaccaattggaagcctccgctcaactgtaagatttataactacctg

SEQ ID NO: 532238 - DNA, 100 bp, Homo sapiens
gttttgtttgactccagtgttaagagaagaaatgaggacatatcagtatcggaggagcatattatttaatatctagaagtctagggccagaatttggtgg

SEQ ID NO: 532239 - DNA, 96 bp, Homo sapiens
gtttccccctgttgcagggttttgtttatataactcaagttgtttggctaaattcttcaggtcatactactagatattacactggaacttcagaag

SEQ ID NO: 532240 - DNA, 82 bp, Homo sapiens
tggaatggcagtgttggagaaaaattaagagtcaaatgaattccttcgaaatgtatttgaacttggacccccagtgatgctt

SEQ ID NO: 532241 - DNA, 82 bp, Homo sapiens
agccgctggcagccgcggatctcaccgccgctcagggagaagacagactgctgctttggacctgttggtaatgatggcctga

SEQ ID NO: 532242 - DNA, 100 bp, Homo sapiens
gttgctcattcggatgtccaagagatacaaggaattgcagctcaaggtggatttgacatggaagtgaaaggttggggtggagaagatgttcatctttatc

SEQ ID NO: 532243 - DNA, 95 bp, Homo sapiens
ctttgaatgcatcagaaccatgcacgagggttgcttttacccaaagtagtggaagatcgtggtgtgcaaagaacagacgtcggaaaccttggaag

SEQ ID NO: 532244 - DNA, 110 bp, Homo sapiens
aagtgtttccggaagtgtatagggaaacctgggggctccctggacaactccgagcaggtttttagaacttcagccataaaaatgggcagaattttccttgatcatatcgg

SEQ ID NO: 532245 - DNA, 74 bp, Homo sapiens
aagaagcccaggagctgtcccagaattcagctataaagcagagtgacagaaggaagtcaaggcaccattatgac

SEQ ID NO: 532246 - DNA, 90 bp, Homo sapiens
agacacgcctggagtttgaaaggacgcaagtgaaacggctggaggtgaagatcatgacggagaaggaactcctggccgtggcttgtgagc

SEQ ID NO: 532247 - DNA, 140 bp, Homo sapiens
tgaagattcaccaaataagctatatactttggttacctatgtacctgttaccactttcaaaatcctggaatcaagatgtgagaccaagaaattatttctgaagaaagaaatttatgaaatagaatcaacccagtgggaaa

SEQ ID NO: 532248 - DNA, 99 bp, Homo sapiens
gccggcgggaccataagggcttaactcatatatttaacccccctccaaaaacatcctgaggttagcattacacttctcccagtggagcccatgacttct

SEQ ID NO: 532249 - DNA, 50 bp, Homo sapiens
acagcattaaagacgactcggaggagtctgctacaccatttttgatttgg

SEQ ID NO: 532250 - DNA, 100 bp, Homo sapiens
cgggtcatcagccactacgccgggcaggatgccacggctctgccaaggctgagaatgacaaacatctaagtgtagggcctggccaggggccagggtctgc

SEQ ID NO: 532251 - DNA, 83 bp, Homo sapiens
ctcaagaagacaggcaaggaggtggtgctggagggaaactggagcacccatcctaactgatgatgttagcctgcaggtgttca

SEQ ID NO: 532252 - DNA, 100 bp, Homo sapiens
gaagacatccatggaagtgaagatgcaaatgttccagcccatcacctcttcatgaccactgcctgccaggaggctaactacggtgccctcctccgggagc

SEQ ID NO: 532253 - DNA, 75 bp, Homo sapiens
tcacaaaagcggatgttgaaaagatactctcactctgttgcaaggctggcaaaccgtggcacaatcatggctcac

SEQ ID NO: 532254 - DNA, 49 bp, Homo sapiens
actttaccaacgagctgaagcagggccgttgctccagggagaactgcaa

SEQ ID NO: 532255 - DNA, 58 bp, Homo sapiens
ctttgatcgtcttcctcttcagccatccagacggaatcagtccccaatgcctggaaat

SEQ ID NO: 532256 - DNA, 90 bp, Homo sapiens
gttttcactcttggaagatgccatcggatgcatggaggccaaccaggtcagataccaggcccaggttccatgatgcccgggcagcacatg

SEQ ID NO: 532257 - DNA, 98 bp, Homo sapiens
ctgactacaagtccttttgccgtgaagagaaagaatggcctcctcacacacagccttggtatccagaaggttgtggcagcactgcctgaaggtatgag

SEQ ID NO: 532258 - DNA, 99 bp, Homo sapiens
ggtcccttcacccgggctccgctcttgccttctccacacttgtttggaatgtatcctgtcaggtataatgtcagtgaatggcaagaaagttcttcatat

SEQ ID NO: 532259 - DNA, 100 bp, Homo sapiens
acccagggcacaatgataaacatactggctgttgtggtgacaatgacccaattgatgtgtgtgaaattggaagcaagatctgaacagaattaagacgaac

SEQ ID NO: 532260 - DNA, 50 bp, Homo sapiens
agggacctgatgaagcgaagatcaaggaggttctgggggaagagaagctg

SEQ ID NO: 532261 - DNA, 75 bp, Homo sapiens
agattttgcatctagaggaattgaaagactaggctctaagcccctcatttcaatgaggggccatgaagacggggg

SEQ ID NO: 532262 - DNA, 90 bp, Homo sapiens
cctgccttcagctcacacatgggtctcttcttcgatgattcctatggcttctacccaggccaggtgctcattggccctgccaagatcttc

SEQ ID NO: 532263 - DNA, 98 bp, Homo sapiens
gaacgacatgctaaactcattacctccttacaaaatgacatcaacacagttaaagagaatgcagagaaaatgtcaggcctgtatccggtgtccgaggc

SEQ ID NO: 532264 - DNA, 75 bp, Homo sapiens
ctcggaaaccggtagcgcttgcagcatgaagagaagctgaatttggacgacagccagtgggaggacatccacgtt

SEQ ID NO: 532265 - DNA, 100 bp, Homo sapiens
gcccggcgccccactccgcgcagcgggttgcctccgctccccatacggcggccccagctcctctggtgcaagtgtggtagctattgacaacaaaatcgag

SEQ ID NO: 532266 - DNA, 98 bp, Homo sapiens
gaacattggtctaaagtctttccaaaaggtcaaggttcacaagagtatgccaagatggaaggaagcctcatacagtgagattaataatccgtcggtat

SEQ ID NO: 532267 - DNA, 74 bp, Homo sapiens
cgggctccggaaccactgcacgacggggctggacgtgctggagaatctggtaaaagcaccattgtgaagcagat

SEQ ID NO: 532268 - DNA, 100 bp, Homo sapiens
ctgcttttcggttccgggtcttggccccgtccttacctcacagtaccatgcggagaccatcaagaatgtgcgcacagccacggaaagctttgcttctgac

SEQ ID NO: 532269 - DNA, 100 bp, Homo sapiens
cagcagcagtcggcttctctacgcagaacccgggagtaggagactcagaatcgaatctcttctccctccccttcttggcctcctacacctacctctctct

SEQ ID NO: 532270 - DNA, 75 bp, Homo sapiens
tggataaagaccaagaagtgggattactggattatatgatgcaactgtgaaagttccttttcttaagaaatgcaa

SEQ ID NO: 532271 - DNA, 98 bp, Homo sapiens
ccggagcagccggggtcggagcggggcagcggcagtgatgacacggagctgcggtactcgtcccagtacgaggagcgcctggaccccttctcctcctt

SEQ ID NO: 532272 - DNA, 87 bp, Homo sapiens
cctactcagaagaacttgtacagagatgtgatgttggagaactatagcaatctggttttcttgggcgagaaccactgtctctgatca

SEQ ID NO: 532273 - DNA, 100 bp, Homo sapiens
cgtgagcctcccgcccaaggagaatgcgctcttcaagcggatcttggaaggtgggagtcaatcattttgacaagtctcctgaaaggaacagctagcagga

SEQ ID NO: 532274 - DNA, 76 bp, Homo sapiens
gccgaccaccatcccggtcaccacgaggaggagctcaagcacttcgaagccaaaatcgagaagcacaaccactacc

SEQ ID NO: 532275 - DNA, 132 bp, Homo sapiens
gctaacagcctgccagcccctcctcagatgcccctgccggagatccctcagccctggctgggactttgaatccaaagcaaaccatcttggtgattctggtgggactcctgtgaagacccggaggcattcctg

SEQ ID NO: 532276 - DNA, 96 bp, Homo sapiens
tgtcacgtgatcgcgaggccgcgggcgcgcgggcgcgactcggcggcggcgtcttttgtgtgatggatgtcagatgtttcctatcaatggatccag

SEQ ID NO: 532277 - DNA, 82 bp, Homo sapiens
cggtgacagagtggagccatggctagagagcactgcagtttcctcctgaaggctggctccggctctccctcaataatggcag

SEQ ID NO: 532278 - DNA, 51 bp, Homo sapiens
caggaaccaccagtgacagagctatggaacaccatatggttacagcacagc

SEQ ID NO: 532279 - DNA, 50 bp, Homo sapiens
gctgaagagtttccaaggagagatcacaaacaacatcgacccagtgggaa

SEQ ID NO: 532280 - DNA, 100 bp, Homo sapiens
cctcgaaaaaaagatggagccctgcatatgattggctctttagctgaaatacttctgaagagatactaaaagtaattgcgaccctacttcgaaattctcc

SEQ ID NO: 532281 - DNA, 100 bp, Homo sapiens
tccaggcttttacacatgcctcctaccactacaatactatcactgtgttctagaacagatcagacattttgtaatgatgcctgaaataaacactaaccac

SEQ ID NO: 532282 - DNA, 88 bp, Homo sapiens
aaaccagaagaaaacctgaatctctgagaaaattgaccctgaggtggccgccttcctgcagaagctacgaagtagagtgcagatcggt

SEQ ID NO: 532283 - DNA, 97 bp, Homo sapiens
ggagttaaggacattccaggcagaggcaagtataccaacagatgttttaaagattgtgtattctgtgggtgctcagacaacagcaggatggaattac

SEQ ID NO: 532284 - DNA, 98 bp, Homo sapiens
agcgtggactgggctggccccggaagcccccacgggctctacctgaccctgcagggcagcaggatgggtgtggaagcagtgatggcacttttggaggg

SEQ ID NO: 532285 - DNA, 82 bp, Homo sapiens
gcagtacctgcagaaggtctctggagacatcttcagcagacaggccgacggtcgcaaggtcctacggtcaagcatccgggag

SEQ ID NO: 532286 - DNA, 110 bp, Homo sapiens
tggtccgcgcccttcctcggcgggccggactgacaatgcagatcttcgtgaagactctgactggtaagaccatcaccctcgaggttgagcccagtgacaccatcgagaat

SEQ ID NO: 532287 - DNA, 98 bp, Homo sapiens
cggaaatgtccgaaggccgcagtacttgaccctgtattttgggagtcgaacggagtacacatgggcactcacatgtggaatagcacccctgcacgacg

SEQ ID NO: 532288 - DNA, 90 bp, Homo sapiens
cgcaggcaccgggagatccagaagtgaaacgccaggctctctggaggccaggagatggttaagaatgtctgaggggtcaggcggtgctgg

SEQ ID NO: 532289 - DNA, 100 bp, Homo sapiens
agatgatcctgttaactctgcctacaacatgaaactggccaagttttccttccaaattgataggcttgctatcagaggaagtggagaatgtgccttcctg

SEQ ID NO: 532290 - DNA, 100 bp, Homo sapiens
gaggttctggccaggtgccgggaggggcgctgtgtcgagggcgatccccccaaagcagcgtcccgtgctaaagggcaagttaaagtcttcagagccctgt

SEQ ID NO: 532291 - DNA, 82 bp, Homo sapiens
tgcagaaggaggtcctgccgtccatgcggaagatcgtcgccacctggatgctggagagcggttctggtgaggttggaaggat

SEQ ID NO: 532292 - DNA, 106 bp, Homo sapiens
ttgagttggtcacttgaaccttgggaatattgaggttggtgaaaaccctgtgtccttggagaaagctggttcccgttttccagagggggagcccagagcttgaaag

SEQ ID NO: 532293 - DNA, 80 bp, Homo sapiens
aagttttgggtgatggggacaacaagccaaagagaagggaatttgggaaacagtgacatttaaggatgtggctgttgacc

SEQ ID NO: 532294 - DNA, 103 bp, Homo sapiens
atcgacgtcgtgatccagaagtccagagctgaggactgcctgtttgcagcaaattgtggctactaatttgccccctgaagatcaagatggctctggggatgac

SEQ ID NO: 532295 - DNA, 100 bp, Homo sapiens
aagaagcttcaaatttattacaagaatcaaactgctcacagtatatggaaaagcatggaaataaccagcctgcaagaactggcacactgtcgagaacaaa

SEQ ID NO: 532296 - DNA, 75 bp, Homo sapiens
ctgtagttcatttgaccaaacgcattcctcctcttcctcctcctcttccagcagtgattctgactgaatacaggc

SEQ ID NO: 532297 - DNA, 123 bp, Homo sapiens
acatccgctccttgcccgagaacatccagtttgatgtttactacaagtggaggaatcagacatcattgatcttgagaaacgctattggttattgaaggctcaatcccggactggacgatttga

SEQ ID NO: 532298 - DNA, 82 bp, Homo sapiens
tcatgtggcagtggaaaatgcgctcgggctggaccagcaggttcattttccagacactgaaagagcagaatggctaaataag

SEQ ID NO: 532299 - DNA, 50 bp, Homo sapiens
agctacaaaatcaatggccggacgaaagaggaagagttcatcgattggtg

SEQ ID NO: 532300 - DNA, 100 bp, Homo sapiens
agctgctgccgccccttgggctaaaagaacccttaggagaaatcttgagagtggacagcaattgtgaagatcgccagagagttctgtgtttcatcaccgc

SEQ ID NO: 532301 - DNA, 100 bp, Homo sapiens
agagctctcaaaacctggctgttttccttcagagcactggcctccaattaggtacttggaaggctccatcgcccctgaagacaaaggaagctgctcattg

SEQ ID NO: 532302 - DNA, 98 bp, Homo sapiens
tgtcctcaccagccctcgcctcccgagtcactgcagccaacccttcagcaaggcctccggtgtggctgtctctgatggtgtcatcaaggtgttcaacg

SEQ ID NO: 532303 - DNA, 101 bp, Homo sapiens
ggtgctcttctgggacaacgcgtacgagttcaacctcagcgctctgaaagttactgtgacaacaacatactttggccactctgaacagatatcccaggaga

SEQ ID NO: 532304 - DNA, 100 bp, Homo sapiens
cggcttctcccctacgcgctacacaagtggagctccttttcctccacctaccttcccgatggccataaaatgcagtaaaaacaaatccagttcccaagaa

SEQ ID NO: 532305 - DNA, 75 bp, Homo sapiens
ggaggctgctaggagccggtcagagggatattccccgagtccctccggtggctaatggccacccagcagtttgag

SEQ ID NO: 532306 - DNA, 75 bp, Homo sapiens
aaaaacactttctgaagctcatgaagactgtgtaaataatatcaggaggctactcacagtcgaactacaactccc

SEQ ID NO: 532307 - DNA, 83 bp, Homo sapiens
gacttttatgtggtggaaagtgtgttcctacccagggtattttaaagttgatcacatcaaagggatccgggaaaaacaagaaa

SEQ ID NO: 532308 - DNA, 82 bp, Homo sapiens
gtcattgccgggaacgagcgagtcgccgctgcagccctagtgactgcggcctgcatcccggagccccctggtgaaggccatc

SEQ ID NO: 532309 - DNA, 90 bp, Homo sapiens
gccaaatttttcaaagccatagttggtaaaaacttacctgatgaagaggtgctactggcattgaagaccgtctgcaggagggagtccctg

SEQ ID NO: 532310 - DNA, 100 bp, Homo sapiens
ggcagcagcagcggcgggaggagcctccgggctcttattttagccttaaaaactcttcaggaaaaaattcatcgtttagagctggagagaacacaagctg

SEQ ID NO: 532311 - DNA, 105 bp, Homo sapiens
gcagatcctggaggatgtgcggggtgcgccggcagaggatccagtgttcaccatcctggccccggaaggtcccgcccagctgcagaccctccaggctggaggacc

SEQ ID NO: 532312 - DNA, 73 bp, Homo sapiens
ggacattatccggctcaccaaagggttcaaaatcaaaggaagcccagaagggaggtcatttttacagtgcaaa

SEQ ID NO: 532313 - DNA, 85 bp, Homo sapiens
aagggaccacggtcaccgtctcctcaggtcacagtgtccatgtaactaactcctggttaagaggatatggatagaaggcacatgt

SEQ ID NO: 532314 - DNA, 90 bp, Homo sapiens
agaacaggagagaattcttcttaagatccaagaagaactagaaaaaaagttgtttgcagggaactctaatgatccaggacaaagaagtta

SEQ ID NO: 532315 - DNA, 82 bp, Homo sapiens
gacaagccgctggcagccgcggatctcaccgccgctcaggactttaagtttgccatgtacccaccgtcgatgatcgcaactg

SEQ ID NO: 532316 - DNA, 100 bp, Homo sapiens
cctcggcgcccccggccgctaccgctcaggtgctgcaggcacagcccgagaaaccgcagcactacacaaactggcgatggaatatgagaggagccctctg

SEQ ID NO: 532317 - DNA, 75 bp, Homo sapiens
gtgatttcttctgacttgagcctgcagtgtgctgtgagagatctaccactagttcctctttagagagcaaagacc

SEQ ID NO: 532318 - DNA, 83 bp, Homo sapiens
gtgaaggggaagaggcccaccctggagtaaccctcactggagaatccagagctgctggaggaggtgaagtggcatcgatgtca

SEQ ID NO: 532319 - DNA, 101 bp, Homo sapiens
ttcgtgcccttcgcggtgtgcgtggtctccaggtttccctattacaactccctcaaggactgcctttcctgaggctgacccgcggctgattgagtccctct

SEQ ID NO: 532320 - DNA, 102 bp, Homo sapiens
tgaagctgtgcaccgaggtccgtgtggccaacgagctcaacgccaggcgccgctcctttacagatggccaccatgtctgggagatggaagcgaaaactgacc

SEQ ID NO: 532321 - DNA, 123 bp, Homo sapiens
gtgggatccacacagctcagaacagttggatcttgctcagtctctgtcagaggaagatcccttgagccagcccctgggcaacaaagtggaaatggagattgtgagcatgttggaaaaaaacgc

SEQ ID NO: 532322 - DNA, 100 bp, Homo sapiens
atgccaccaatatgccagctgtcaaagccatcatatatcagtatatggaagagcctccagggtcgtatagacctccccctcctatgggcaaaccaccagg

SEQ ID NO: 532323 - DNA, 75 bp, Homo sapiens
tgacagcaccatactggaacttcaaaaagttctgaaaacatgttgaacttggagcgtgatgcccagaagtgtgtg

SEQ ID NO: 532324 - DNA, 110 bp, Homo sapiens
aggaaacaaaattcgatttgcaaatcattcagtgaatcccaactgttatgccaaaggtgcaagtgaaagtgtaggaaaacatatgcttgaagcgtgcaacaataatctgg

SEQ ID NO: 532325 - DNA, 129 bp, Homo sapiens
ggctacagttagagtctgaagttgttaccaatggtgaaactacatgttcagaaagtattagaaaactactcggatgctccaatgacaccaaaacagattctgcaggtcatagaggcagaaggactaaag

SEQ ID NO: 532326 - DNA, 75 bp, Homo sapiens
attaagacccaattcaccacccgggaagctcctctggtgcaagtgtggtagctattgacaacaaaatcgagcaag

SEQ ID NO: 532327 - DNA, 100 bp, Homo sapiens
tctccagacttcagtaaaattgcttggttccttgtcacaagtgcagtcattggagaaatcgatgaagaaacagattctgcgcttgatttggggaatattc

SEQ ID NO: 532328 - DNA, 80 bp, Homo sapiens
caaaaggcggagctgtagccactgtagcagcaagatacagccttttcctccctctccatgaactctggaaacagtacatc

SEQ ID NO: 532329 - DNA, 100 bp, Homo sapiens
aaagctttctgcccagagctcctggaccaatgcatcttcccaccaccttaaaccactggcttcaacggaccacaccaaaatgccatctcaaatggaacac

SEQ ID NO: 532330 - DNA, 75 bp, Homo sapiens
gcacagagctgtaccagtacacggcccacgttgccaggaaccacgtgaatgttgagggggcgacacacaagcagg

SEQ ID NO: 532331 - DNA, 76 bp, Homo sapiens
cggctttcctggtcagcagcgacttgggtgtggggctggcctcgctcgtggcacctctgctgatctcacaggccat

SEQ ID NO: 532332 - DNA, 43 bp, Homo sapiens
tctgaaactacacaaggaccgtctagagcatgtttggaaagga

SEQ ID NO: 532333 - DNA, 101 bp, Homo sapiens
aaccccgaccgcgagccggacccctgctctgaccgcagggacagcaatcagacctattgctttgagagctgtgacctccattgctcgtgctctgcctggat

SEQ ID NO: 532334 - DNA, 90 bp, Homo sapiens
gaggccttccagctgtttgaccgaacagggaagctgccaaagaatgtcgacgtcgaaagaaagaatatgtaaaatgtctggagagccgag

SEQ ID NO: 532335 - DNA, 101 bp, Homo sapiens
acttaaaggcaagaagatgaggaagaaggaagcggagcaggtgctgcagaagtttgttcaaaacaagtggctgattgagagtgcctggtgaagaatgtgat

SEQ ID NO: 532336 - DNA, 100 bp, Homo sapiens
ctccggcttccgtcccggacagagcccgtggtcgcgcagagtatgtatgtaactgctctgtggttggaagcctgaatgtgaatcgctgcaaccagaccac

SEQ ID NO: 532337 - DNA, 83 bp, Homo sapiens
gagaagttgaaccagctgtgggagaaggcccagcgaatgatatcatcaagttgaatcgaaaggaagggaagaagcagaatttt

SEQ ID NO: 532338 - DNA, 90 bp, Homo sapiens
cgcttgatgtggaaatcccagtatgttccatatgatggaatcccatttgttaatgcagaagcgtaaaagatgtgttgttttcaatcaagg

SEQ ID NO: 532339 - DNA, 76 bp, Homo sapiens
ttttgtaatggaagggcatggcaagactccacctcctggtgaagaaagcaaacatgttatgtgccaagaaccttgc

SEQ ID NO: 532340 - DNA, 97 bp, Homo sapiens
gcgcccgggaggaaggaacgaggcaaggagctaaagcagcgtgcgttcagccctgggagacaagaggagcagcagcggcaccgcccctcaccctgga

SEQ ID NO: 532341 - DNA, 100 bp, Homo sapiens
ggacattccaggcagaggcaaggacttcagaaatgggcttgggaaccagctgagttcaggatcccacacctctgctgcatctcagtgtgactcagcgagt

SEQ ID NO: 532342 - DNA, 51 bp, Homo sapiens
gtctgacaacgtggatcgttgttttgaaacaatggctttgactacttacta

SEQ ID NO: 532343 - DNA, 101 bp, Homo sapiens
gggcatgtggggacctaactcctatgcatgggtgctcatgcagttggccaccgcccaggcgggcatcattctggttatgatggagggtggtcgcagcaaag

SEQ ID NO: 532344 - DNA, 82 bp, Homo sapiens
cggcttcggagcgggagtgttcgttgtgccagcgactaaaaagagatttcagagacaactgtctgaaccctgccaccccttc

SEQ ID NO: 532345 - DNA, 100 bp, Homo sapiens
tagagatgtgatgttggagaactacagaaacctggtctccctagttacctagaaaagtacgagaaagttcatcattttggggaggatgatgatgaggtac

SEQ ID NO: 532346 - DNA, 85 bp, Homo sapiens
ccggccggtccctcgcctcccggccgagctgacgctttgccctttcggatgaagcatacagatccctacgagatcaagataagga

SEQ ID NO: 532347 - DNA, 100 bp, Homo sapiens
ctcctgccagcaccttgcctggcccctccccaggctccctggacactgcgtcaagtcccctggccagcgccagccctggctcagctgtcgcaggccctgg

SEQ ID NO: 532348 - DNA, 100 bp, Homo sapiens
gcaaggggcggacggcgtctcccatcaactccccagccaggtgcagattcactttataggaacagcttcagcttcagtgatgaaaaactgaattctccaa

SEQ ID NO: 532349 - DNA, 82 bp, Homo sapiens
atcgcgtggactggaagtcacactgcggcggagtggaggcagcacagacagtgaggacgaagaagaggaggacgaggaggag

SEQ ID NO: 532350 - DNA, 100 bp, Homo sapiens
tatgctggggagaagcgcaggcccccttacagcagcgtcaccctttacaccagaaagctggcgggcactatggggaaaaaacaaaacaagaagaaagtgg

SEQ ID NO: 532351 - DNA, 82 bp, Homo sapiens
agaacgttgtccacgaggacttccaggtcacggaggaggtgaaaatgaaggatttgggggcagagcacttggcaggtcatga

SEQ ID NO: 532352 - DNA, 75 bp, Homo sapiens
gtcctgacagagttgccttttgtggttccatttgaggaacgagtaaaggtggacattgaagtggacctaattcgg

SEQ ID NO: 532353 - DNA, 90 bp, Homo sapiens
ctgacacttggcatgacagtggctctttggtgtaacgggaaactgcgctgcctgtagtaagctcatccctgcctttgagatggtgatgcg

SEQ ID NO: 532354 - DNA, 82 bp, Homo sapiens
tatgaggccagcaagcggaggtgctgggagcgagttggctgtgtggacgaatgtggaacctcgctctgtggctgtgttccct

SEQ ID NO: 532355 - DNA, 98 bp, Homo sapiens
agctggggggcagcgagacggccatcatcgtgtccatcgtcatctgcagcgtcctgctgctgctctccgtggtggatagaaaaggagggagttacact

SEQ ID NO: 532356 - DNA, 82 bp, Homo sapiens
aacagacaaagaaacactctccttctgccacatttgttttgagctaaatattgaggaacatacatatgatagttgagaaaga

SEQ ID NO: 532357 - DNA, 75 bp, Homo sapiens
atgagtacctacgctatcaggaggccctgagtgagctggccactgcagctcaaagcatgcctgtttttaaggaag

SEQ ID NO: 532358 - DNA, 100 bp, Homo sapiens
ccagaagcatgttagttcgacatcatcatcttttcttgaataaaagatgatgaatgcgagtcagatgcagaaaatgagcaaaaccatgatcctaatgttg

SEQ ID NO: 532359 - DNA, 101 bp, Homo sapiens
gccactgctgctccgtggagatcgtcccgcgcctgccgactcggtgaaatacctggagtgctcagctctcacccagagaggcctgaaaaccgtgttcgacg

SEQ ID NO: 532360 - DNA, 87 bp, Homo sapiens
aaaagcaatgcaagagtcgctttgttacacctttcaagtgtctcgatgatgccatggagagcagcaagcctggtccagtgcaggttg

SEQ ID NO: 532361 - DNA, 75 bp, Homo sapiens
ctgactggggttctgagactccctgtcccggaccgcagtgataacaatccatattcctcatttggagcaactctg

SEQ ID NO: 532362 - DNA, 90 bp, Homo sapiens
cattgcaatgcattatagcaatcccagacctaagtttgaagattggctttgtaacaagcattggcatcaacaaaagtcagaattcccggg

SEQ ID NO: 532363 - DNA, 100 bp, Homo sapiens
caagcggaagctgcccttcaccgcgggcgccaatggggagcagaaggactcggacacaggctgcaagatcaaggccctgcgggccaagacaaacacctac

SEQ ID NO: 532364 - DNA, 75 bp, Homo sapiens
gaacttcaccttttggctttcttggcctgatgctgaactctcgaggcttctggtagatgaattgagagatgcagt

SEQ ID NO: 532365 - DNA, 75 bp, Homo sapiens
aagagtcagacctcgaattagcaaaggaaacttttgcctgtttgcaaggtttcaccagagacaacacttccagca

SEQ ID NO: 532366 - DNA, 100 bp, Homo sapiens
gaacacagcagggcggaggaaagtgcaggtgattgtagagaaggctccaaaagccagggtgcctgatctggacaagaggaagtacctagtgccctctgac

SEQ ID NO: 532367 - DNA, 75 bp, Homo sapiens
gcagcctttcgcctagcgtggccttcaggttcgagaacttgtcttggacaattgcaaatcaaatgatggaaaaat

SEQ ID NO: 532368 - DNA, 46 bp, Homo sapiens
ccgtcagcactcagcgcgggccggtattgttgcagcatctggcagt

SEQ ID NO: 532369 - DNA, 51 bp, Homo sapiens
gcttcagccactctggatgcagacgtgattgcagtggtcatggacgtgttc

SEQ ID NO: 532370 - DNA, 83 bp, Homo sapiens
accagaagaaactgcaccggaaatgtgcctaccagggaagcagtgggacttgcagttccctgaagaagcagaagctgagggca

SEQ ID NO: 532371 - DNA, 82 bp, Homo sapiens
gcttgggccgccgagctggacccggaccggttttggggcctacaaatccgcactggactacaccaaacgaagtctggggatt

SEQ ID NO: 532372 - DNA, 100 bp, Homo sapiens
cggaaaagccatcgtgaaggagctcctggagctggattaatgatgttttgcagcagttttctacgtctgaaattttttatgtctctggaacccagaattt

SEQ ID NO: 532373 - DNA, 101 bp, Homo sapiens
cggcggaggcagcggagccctgggccatcgttttcggctttgtgagaaaccttaccatcaaacacgatggccagcaacgttaccaacaagacagatcctcg

SEQ ID NO: 532374 - DNA, 98 bp, Homo sapiens
caggaaagtgtaacatcagttacagaagtgttcgacctacaccacaaaatgatgctataacggtacactttaaaccaattacattaaaagcatcagaa

SEQ ID NO: 532375 - DNA, 100 bp, Homo sapiens
agaagatatttgaagtgggcgaaaatttagcccaagctgaagccgacgtagcttctctgaacagacgcatccagctggttgaggaagagttggatcgtgc

SEQ ID NO: 532376 - DNA, 82 bp, Homo sapiens
ctgcgctcaatgacagggaccaggggggcggcagcgctggacacccagcctccaggtgacttaagagattaaaattaatttg

SEQ ID NO: 532377 - DNA, 75 bp, Homo sapiens
aagaagttcagtataatcctacctatgagaccatgtttgctcctgaggacatccaggcagaaattgatgcccaca

SEQ ID NO: 532378 - DNA, 89 bp, Homo sapiens
ccagaagcgggcggcgcgggggagatgctgaaaatgtgtgtctgacatgcaagctcagtggggcagagacccgtggattgctgtgccct

SEQ ID NO: 532379 - DNA, 74 bp, Homo sapiens
tggattctcaaaacttaaattcaagaaggagccctgtcccaggtgctggagaatctggtaaaagcaccattgtg

SEQ ID NO: 532380 - DNA, 100 bp, Homo sapiens
atggagaatgaggacgagatgtcaggttgtggaaaggaggagaacccctgctgaaattcgagaggagtttgagcggctgcagagagagagagaagagagg

SEQ ID NO: 532381 - DNA, 74 bp, Homo sapiens
acccctttgacctcttcgatgtgcgagactttggaaagggctttgttcgcgggggtcacagctctcatggctgc

SEQ ID NO: 532382 - DNA, 100 bp, Homo sapiens
catagataataattatctttcagttcaagtgacaaacgtacctgtggtccctggatccagtgctactgctacaaataagcaattaatggatgcctcgaag

SEQ ID NO: 532383 - DNA, 75 bp, Homo sapiens
agtataacattagcgtgcctacagcaggtatctccaaattatccaaggccatgccagccatgtcattgcgatcca

SEQ ID NO: 532384 - DNA, 90 bp, Homo sapiens
ctctgtccagttttcaaaccacacagatacctagagatgctgcttgagtaccttcaggattacacagatagagtgaagcctctccaagat

SEQ ID NO: 532385 - DNA, 100 bp, Homo sapiens
tttttctcatggatgttcttcttcgagtatttgtagaagggaacctgaggatcagctttactatgtgaaatttttgtcactcccagaggtgagacaagcc

SEQ ID NO: 532386 - DNA, 74 bp, Homo sapiens
ttttacgcaggctgtggcagcgacgcggagtctggtgaaggcagaaattcatcagactgtagagataatgaaat

SEQ ID NO: 532387 - DNA, 50 bp, Homo sapiens
gaagaagccacccgagcggactcccgagtccagtgtgaaaaaagccagta

SEQ ID NO: 532388 - DNA, 50 bp, Homo sapiens
acaagatcttactgagattggtgtcacttttacaaagagaaagtttggat

SEQ ID NO: 532389 - DNA, 90 bp, Homo sapiens
gaaaacgtttaaagctacgatagccatgagccaggaatttcccttagggatagagttctggtcttatttgggctaagtaaccagatggtg

SEQ ID NO: 532390 - DNA, 100 bp, Homo sapiens
aagaagccgaagaaagaagaggaacagaagtggaaatgtcgtagtcgagatcgggatcggtatagacggagaaatagtcggagccgaagtccaggtcggc

SEQ ID NO: 532391 - DNA, 100 bp, Homo sapiens
cttaaaagatccaaaaaatgagacttctagcaaagattatttgccttatgttatgggctatttgtgtagcagaagcgatgctaccacctaatagttttca

SEQ ID NO: 532392 - DNA, 73 bp, Homo sapiens
ccaatgcaacagccacggaagattaagcaggaccttgcagatgcttcgggagaacctggaggaggaggccatc

SEQ ID NO: 532393 - DNA, 100 bp, Homo sapiens
ggaatgtcatccagcgagtgattagaatcagaatcataccctgagagctacaagaactccatttttcactgtgcagaggctctctgctgaagggtcaagt

SEQ ID NO: 532394 - DNA, 90 bp, Homo sapiens
gccgtcgccgccgccaccatgcccaagagaaaggcatggatgagttgatggaggtgtctttctcgcccctggcggccacaggcaagcccc

SEQ ID NO: 532395 - DNA, 96 bp, Homo sapiens
ccgagccagccgctgttttgccggaggagcccctcaggccacatccacgacagcgatggcagttccagcagcagccaccagagcctcaagagcaca

SEQ ID NO: 532396 - DNA, 153 bp, Homo sapiens
ccggaggcgagcggccgagggagcccagtcccaacttcgggccccggccccgcgcgccccggcccggccccgcgaggacggcggctccctggaccaggtgctgaaagaggccaagaggattcccgaggagatcctggggaaagtcagcatcgc

SEQ ID NO: 532397 - DNA, 50 bp, Homo sapiens
cgctgaacgagagggacacggagcagagtgatcagcagctggactgtgcc

SEQ ID NO: 532398 - DNA, 75 bp, Homo sapiens
tctggagtgcgtgggggaccggctgttggcgggccagatcagaaaagggagctcaggtaccttccagagagtgag

SEQ ID NO: 532399 - DNA, 75 bp, Homo sapiens
gggtccctgaagagggaagacacgcggaaacaggacataagcagctctatgaccaatagcacagctgccagtaga

SEQ ID NO: 532400 - DNA, 83 bp, Homo sapiens
cgctggtgcagcgatattcccaggacagcttcagcaaacactacaagtccacggtgggagacaatgcagatcttcgtgaagac

SEQ ID NO: 532401 - DNA, 50 bp, Homo sapiens
cgccgtgaagatggcgtctaccagccgggctcaaaatctccttcgccaag

SEQ ID NO: 532402 - DNA, 83 bp, Homo sapiens
ctccttttcgtttccggaaacatgggtttccaggcctgaggtgcccgccctggccccaggagaatgaaccagccgcagaggat

SEQ ID NO: 532403 - DNA, 100 bp, Homo sapiens
ctccatccagggccaccatgtctgcctcctggtgaaaaaggtggtgagccggctgggcctggactccctgtgccccttcagccctaaggagcggatcatc

SEQ ID NO: 532404 - DNA, 100 bp, Homo sapiens
aggggccagggcagagggcacctgagcggctggagagcctgttggagaaacacaaagagcggagattctggagctggctggcaatgcagcgagagacaac

SEQ ID NO: 532405 - DNA, 99 bp, Homo sapiens
ggacagttgcagcaaccttcaacaagtgcctctgaagggggtggacttatgaccaggttctccgcatccagaacattctatctgagaagcctacagtga

SEQ ID NO: 532406 - DNA, 100 bp, Homo sapiens
gaggccggacgcacctctgtttgggggtcctcagaagtcctattcctattcgtgtggaaactgcccagccagctgtggaaaagccggaaatcaagcctcc

SEQ ID NO: 532407 - DNA, 100 bp, Homo sapiens
gtcagatttcgctttgatgaatcaggtcccgaaagtgctaaaaagggggacttgatctcatcttcatgccaggccttgggtttgacaaacatggcaaccg

SEQ ID NO: 532408 - DNA, 83 bp, Homo sapiens
agtttgaagacttgctagttaggattttattactggcagcatgtatatcttttgtttttagaacttcagccataaaaatgggc

SEQ ID NO: 532409 - DNA, 75 bp, Homo sapiens
agtatgaggacgaggaccagtgggaggatggagcagaggacattctagagaaagctgctgaaaatggcctttgac

SEQ ID NO: 532410 - DNA, 83 bp, Homo sapiens
cttgtacttcaagaggaggaatcacgctcggaaacaatgggcaccatgactcctgtgaggatgcagcactccctggcaggtca

SEQ ID NO: 532411 - DNA, 82 bp, Homo sapiens
tcccgtgtccgggctacctgtttgaagagattgctagtaggtgcacgtctcatcgcacatgctggcagcctcaccaacctgg

SEQ ID NO: 532412 - DNA, 90 bp, Homo sapiens
ttttattgcatgtggaccagaaaaatttcgttatgcccaagatgactttgtcctggatcatagtgagatatactgccattggagaactgg

SEQ ID NO: 532413 - DNA, 100 bp, Homo sapiens
ctggaggaagccggaggcctgcgtggaggaggcgccccgcgcagctggctggcggagcatgagcgccccagatggtgccaagaacgaagaaggaagctcc

SEQ ID NO: 532414 - DNA, 96 bp, Homo sapiens
ggagaccggcacccagacaggtggcgaaggcagaggaatggctgccagcaacaggaaggagggggagagaataccaactccatcagttccaacgga

SEQ ID NO: 532415 - DNA, 88 bp, Homo sapiens
atgcagcaggcatcatccgctatgcaattgggaattactgggagatgtactcaaagatcggccccaggaagcagatggaatcgattcg

SEQ ID NO: 532416 - DNA, 99 bp, Homo sapiens
catcctgatgtgcagttaaaaaatctgcccttttatgatgtccttgatgttctcatcaagcccacgagtttaggaccttaaaggctttgatccaggaga

SEQ ID NO: 532417 - DNA, 82 bp, Homo sapiens
ataaacagtgccctctataggaaggtcaagctgctcaatcaagtccgggtgtctgacttccggcagcagctgctggcctgtg

SEQ ID NO: 532418 - DNA, 100 bp, Homo sapiens
cgacgggcgggtgaagatcggacactacgtgctgggcgacacgctgggcgtcggcaccttcggcaaagtgaagaaactgataaatttcaaacggaagaga

SEQ ID NO: 532419 - DNA, 149 bp, Homo sapiens
cgccgatgcccctcccacgccggctgcggtcgccctcggcgctgcctgagagagtttgcgggatttcaagggttctctacttaaaagacaatgactactgatgaaggtgccaagaacaatgaagaaagccccacagccactgttgctga

SEQ ID NO: 532420 - DNA, 100 bp, Homo sapiens
ctacgtgtgcctggtgctgctggtggccaacattttgcggatactcttctgaggccacaagaggaagctgaatgaagaggacgccgccagcgagtccagc

SEQ ID NO: 532421 - DNA, 51 bp, Homo sapiens
gacgaggccaacgcacggggagagtctggctgtacctccaagcctggccaa

SEQ ID NO: 532422 - DNA, 75 bp, Homo sapiens
agagctgcccctggacgaccaggtcatcctgctgcgggcaggaagcgccgcggagccatcaacagcaagcagctc

SEQ ID NO: 532423 - DNA, 120 bp, Homo sapiens
gcaaccattgacgccatgtcgggttattcgagtgaccgagaccgcggccgggaccgagggtgaatgaaaactttgccattgatttgatagcagagcagcccgtgagcgaggtggagactc

SEQ ID NO: 532424 - DNA, 90 bp, Homo sapiens
gggtcctttatatagaagggagagtaggaaatgcttccagactgcacacttttacttagaggacagtacatcccctagagttatatccac

SEQ ID NO: 532425 - DNA, 98 bp, Homo sapiens
tggatcttacacttgaaatacagactgttggggaacaagaggagttaaagttcctcgtaattttcgcttgttggaagaacttgaagaaggacaaaaag

SEQ ID NO: 532426 - DNA, 100 bp, Homo sapiens
aaggaggaggaggaggaggaggatgatgatgatgattcaaaggagccagcatacttcctgaacatggagagtgttgttcgccgctgcccattcttatccc

SEQ ID NO: 532427 - DNA, 87 bp, Homo sapiens
cctttcctgctagaactttcagaatctcaggcgggtgaggggatcttctctggatcaagcaatggtggtgaaaaatgtttcgcaagg

SEQ ID NO: 532428 - DNA, 100 bp, Homo sapiens
cgccgccgccgctgccgctgccgctgccgcacctccgtagctgactcggcaatccgatttacgacttttttctgggacgagagctcaaccctcgtatctg

SEQ ID NO: 532429 - DNA, 131 bp, Homo sapiens
cgggagccgggctaggacgccgagcggtgactccccgccgctcccgggggccgtgacgattcatctgaaaactacattaagatgaagacctttgaaggtttctgtgctttgcatctcgctgcaagtcaagg

SEQ ID NO: 532430 - DNA, 100 bp, Homo sapiens
ctgaattactcggaggagaaaggcaggagagatagaggcagcagaagccagggcagctgaaagacagagaccttcagacaaatttacatgtattggagac

SEQ ID NO: 532431 - DNA, 89 bp, Homo sapiens
ccatgacaaccagtcaccagcctcaggacaggtgtcctgtggcaagtgtggcaatgggttgggccacgagttcctgaacgacggcccca

SEQ ID NO: 532432 - DNA, 90 bp, Homo sapiens
ctccggggacccttccgtatctgcctaggcattttgctgtctcctcctaatacgatcaggcttcagctgtgggatactgcgggtcaggaa

SEQ ID NO: 532433 - DNA, 76 bp, Homo sapiens
ggccctcatgttcctccaccagcatggagtcatctacagatgactttgggaaattgctgctggctgaggccctcct

SEQ ID NO: 532434 - DNA, 100 bp, Homo sapiens
atgaaatatgggagacgacagaccgtttgtgtgcaatgccccgggctgtggacaggcagtgctgagccctctcatagccatcgcactgaaaatatcccag

SEQ ID NO: 532435 - DNA, 90 bp, Homo sapiens
ggggacggtaggagcctccgtgcggagaccactgttcaaggccacaggaaagaccacagcaagattctttcattcgtctcctcctagcct

SEQ ID NO: 532436 - DNA, 100 bp, Homo sapiens
ggtggtcgtccagaccgagtgttctttactttttgtttggttgaggtttcacgctagaaggtggctcagctcagatttcttttatccaagatattggaag

SEQ ID NO: 532437 - DNA, 100 bp, Homo sapiens
attctgggaggcatgaaacatctgctttgacggtggaggcaaccagtagcatcagggaaaaagttggcccaaacctgcaccactgactgctgaaatacag

SEQ ID NO: 532438 - DNA, 98 bp, Homo sapiens
cggggaccgagcctgggaggccggccggtgccagcacctttcggcttctgagacggcggcagcagcggcattcagacgtcaagctgagtgtacaaaga

SEQ ID NO: 532439 - DNA, 100 bp, Homo sapiens
caccagccgggatgccgcccgcttccccatcatcgccagctgcacactcttggggctctacctctttttcaaagttgatgaagctgtagctgtactacaa

SEQ ID NO: 532440 - DNA, 83 bp, Homo sapiens
tgaagacgtctgcgtgagaatagagaccaccgagaggactcaggagagtgcagcttgctctgtgagtgggtgacaacctcttg

SEQ ID NO: 532441 - DNA, 113 bp, Homo sapiens
ccttaaactccctaaaatctccgcagctctggttcctgttgcggccggcaaataagggcgagactgaaaaatcaagtcactcagttgaaggagcaagtacctggtttcacacc

SEQ ID NO: 532442 - DNA, 75 bp, Homo sapiens
cacgagcagcgccctgggagccctcacgagtcccggtttttagaacttcagccataaaaatgggcagaattttcc

SEQ ID NO: 532443 - DNA, 82 bp, Homo sapiens
acttcctagctgaacagcgcgaggcggcggcagcgagccgggtcccaccatggccgcgaatatgatggtggtgctaccccag

SEQ ID NO: 532444 - DNA, 82 bp, Homo sapiens
cagcagcggcgggaggagcctccgggtccacaggtcctggctaccctgggaagagacaagaagtaaatgaagaaagaggaag

SEQ ID NO: 532445 - DNA, 50 bp, Homo sapiens
ggactgagtcctgcaggacacagggcacttgatgacattagtgaaagcat

SEQ ID NO: 532446 - DNA, 73 bp, Homo sapiens
tcatttcgtgaaggagcaaggctgaagaaccagacctggactttcttaggtttctgggtgtctctggggagcc

SEQ ID NO: 532447 - DNA, 75 bp, Homo sapiens
acactaggggttcatgttaaccaggccaaacagcaattactaaagatatgtttgaagaagcactgcgtgccctgg

SEQ ID NO: 532448 - DNA, 75 bp, Homo sapiens
gaaaaattgctgagctcatgccaggagcatcaggggctgaagtgaaggctgcgccgtccagggtcccctgggcct

SEQ ID NO: 532449 - DNA, 82 bp, Homo sapiens
ctggagctgacagcgcgcacttcacccgcagttggctgcctgctgtttcccggggagatcatgaaacgaggtcgccttccca

SEQ ID NO: 532450 - DNA, 74 bp, Homo sapiens
cggggagctggcagcggaggtgctcatccagcaaggtgacttaagagattaaaattaatttggttgctgttggt

SEQ ID NO: 532451 - DNA, 100 bp, Homo sapiens
acctctgctccccacctcagagagttttggtccagtggtttacgtcttggatcttgcagatagactgatctcaaaagcctgtccatttgctgcagcagga

SEQ ID NO: 532452 - DNA, 75 bp, Homo sapiens
aaccagtcatatggcatggacaatcacagtggtggtggtgggggtagcaggaagcagtcaattatagatttcttc

SEQ ID NO: 532453 - DNA, 89 bp, Homo sapiens
tttaaaagaactacgtgttttatccaacagaatccagcaactatcacaagaatactccttagccacttcaattgggataaagagaagct

SEQ ID NO: 532454 - DNA, 96 bp, Homo sapiens
cccagaggagtaaactcagtgcgcgatcttaagcgcgcatctgtggaaacaattaaggtgaggtggctttgaccccgggttgcccggccagcacga

SEQ ID NO: 532455 - DNA, 50 bp, Homo sapiens
ggggaaggcgcctgaagaggacgaagcttttatcaaaatacaactcaaac

SEQ ID NO: 532456 - DNA, 75 bp, Homo sapiens
ggctgcgtcaccgccgcccccccagacaagatggacaccgcggaggaagctatgtgatgatgatgccatttaaac

SEQ ID NO: 532457 - DNA, 75 bp, Homo sapiens
gcgcggaccccgcgtgcgccttgctcgcccgcagccccgagaccgcagacaccattcgcttttcacccaagatga

SEQ ID NO: 532458 - DNA, 100 bp, Homo sapiens
atcttcgtctatttcatcacaaaactgtcccgggtgggaagaggaacagcctatgtgggcttccacggagacgaagagctgcccctgccactggacctgc

SEQ ID NO: 532459 - DNA, 98 bp, Homo sapiens
cggactcggcgggcatcgccctctacagccgtcgcaatggaagaagagatcgccgcgctggtcattgacaatggctccggcatgtgcaaagctggttt

SEQ ID NO: 532460 - DNA, 95 bp, Homo sapiens
gggtgtctcgcgcacgggccctcaggaaggtgctggagaatctggtaaaagcaccattgtgaagcagatgaggatcctgcatgttaatgggttta

SEQ ID NO: 532461 - DNA, 100 bp, Homo sapiens
ggatgtgaagtagatgataaagatgatgatatccttctcaaccttgtgggatgtgaaaactctgttactgaagacactttttcaaaaatggcaatggtat

SEQ ID NO: 532462 - DNA, 75 bp, Homo sapiens
cggctgcttggagcgtccgccatgaggagaagtcctctttgatacgcaacctacggctctctgagtccttgaaaa

SEQ ID NO: 532463 - DNA, 80 bp, Homo sapiens
ggaagtcatcatgggccggcctggaacagggtttggaaatcccttgtctccaggttgctgggattgacttcttgctcaat

SEQ ID NO: 532464 - DNA, 100 bp, Homo sapiens
agaagcatgggaaggaggccgagccgggatctcaggtcctcgggggcggcggccacgccaaggacgggtgaggaagatcttctcagtcctccccaggaca

SEQ ID NO: 532465 - DNA, 100 bp, Homo sapiens
tataaaaacacagctcgacagtacgcctacttctataaagtcatccagcttgttctaaagacgaaggggaactccctagtgctacaggctgtttcaggaa

SEQ ID NO: 532466 - DNA, 75 bp, Homo sapiens
tcgctgtgagacatgtctgagactcctgctcagtgtagcattaagattcagaatggacagtttagaagaacctca

SEQ ID NO: 532467 - DNA, 100 bp, Homo sapiens
agaatggagaagaaggttgattccaggtgtctgacttccagcaactgctggcctgtgccagggtgcaagctgagcactggagtggagttttcctgtggag

SEQ ID NO: 532468 - DNA, 86 bp, Homo sapiens
aaccagcctgcacgcgctggctccgggtgacagccgcgcgcctcggccaggacccggctgcccagtccctcatgatcatgaacaag

SEQ ID NO: 532469 - DNA, 143 bp, Homo sapiens
acacaccggagacttttggggggaaactaggtcgatggtcggcggcgcccggatgggcagctgaggtagctttggatatgttaaatcctcatgttactttgcctgttttttacccacatcttaagcatggtggtgtatgtgct

SEQ ID NO: 532470 - DNA, 109 bp, Homo sapiens
tgtcttctccactgttcctggaggaatccgagaagagcagagcggagggagccccagacacgatcatggaagggaagtggttgctgtgtatgttactggtgcttggaac

SEQ ID NO: 532471 - DNA, 75 bp, Homo sapiens
tactgttgcgtggttcgttattaacagggcattcttcttgagcaccgagaaaaagaatttggagacaaagtaaac

SEQ ID NO: 532472 - DNA, 90 bp, Homo sapiens
gcagattatatcgcatcctatggctcaaagaaagatgattatgcaagaaaattggatgtatattttgaatatgaagaaaaaataatgagc

SEQ ID NO: 532473 - DNA, 100 bp, Homo sapiens
tcctacgaaagcctggtccacgccgtggccggagccgtggtggcgacatgtctaagaatgtgagccagtcacagatggcaaaattgaaccaacaaatggc

SEQ ID NO: 532474 - DNA, 98 bp, Homo sapiens
ctcagactgtgcttcttgtgcaagtaatcagtctttgacaagtgatgagaagctgtcggagcttcccaagaatcttttagctgaaaaagtagagcagc

SEQ ID NO: 532475 - DNA, 125 bp, Homo sapiens
cttgggtgcattggagccttgccttgctgctctacctccaccatgccaagtctgcgctcctcagaccaccggcaggtgaacagcctgatgcagaccgaggagtgcccacctatgctagacgccac

SEQ ID NO: 532476 - DNA, 100 bp, Homo sapiens
caacattttgtgcggaattatttttgtggaaagaagatacacagcagttgtcttaaacaggtatgccattttgaagactgagacgttggagttttatcct

SEQ ID NO: 532477 - DNA, 100 bp, Homo sapiens
aacaagcaaagaaggtgataaccatgtttgtacagcgacagccggttgttatgacaatggaaaacactatcagataaatcaacagtgggagcggacctac

SEQ ID NO: 532478 - DNA, 75 bp, Homo sapiens
ctaaactagcagtttagggtgtcagaatgctgcttctaaattacttgggcaaaattgggtccaaaacgcctttga

SEQ ID NO: 532479 - DNA, 100 bp, Homo sapiens
ccgcccggcgcgagactgcggccgaagcgtggggcgcgcgtgcggaggaccaggcgcggcgcggctgcggctgagagcgcatcagcgaggaggtggggct

SEQ ID NO: 532480 - DNA, 75 bp, Homo sapiens
ccaggtgtaagcgcagaaagcaggcgaacccgcggcgcaataacggcggctatgagaggttttcctccgagtacc

SEQ ID NO: 532481 - DNA, 100 bp, Homo sapiens
gtggtggggcccaaggtccgcaagtgcctggccaacggctcctggacagatatggacacacccagccgctgtgtgaaagtaagtgaacacagtctcctgc

SEQ ID NO: 532482 - DNA, 100 bp, Homo sapiens
aaatcatggagccgctggggtcccttttgcctcagatactattttgaagagtgtgaacatggctacgcctcttcattcccgtccatgccgagcccccgac

SEQ ID NO: 532483 - DNA, 76 bp, Homo sapiens
atcaagatgatttatggtaataagagctcaaagcatgcctgtttttaaggaagtaaaggtacatctgttagaagat

SEQ ID NO: 532484 - DNA, 82 bp, Homo sapiens
gggtgccagaaggaaagcatagcagggaggagagagcgatggcttttttcacccagaaggccagccccagcggcttccccag

SEQ ID NO: 532485 - DNA, 90 bp, Homo sapiens
tgtccagcatgggagagtacatgagacgatgaagcaaagtcaccttcaggccattcagaggaggaaagagaggggaatatgaagtcagcc

SEQ ID NO: 532486 - DNA, 99 bp, Homo sapiens
cgaggaggtgatcgccaccatcttttcctccgcctggtgggtccctccctgctgcgggacagcagctgatttctctatgaatcatcatcaagaactctg

SEQ ID NO: 532487 - DNA, 100 bp, Homo sapiens
agccatcagcttcagctccagctccgctctcttcggctgccccaatccccggcagctctctcagttttctgagtttaaccagtaatgccattcagttgcc

SEQ ID NO: 532488 - DNA, 75 bp, Homo sapiens
ctttgcaaagtcttggctcataactatggtggatccatgctgtgctcacttctcaggactgtatggcttttgggg

SEQ ID NO: 532489 - DNA, 100 bp, Homo sapiens
ggatggcgtcccccgggggcccgtactgcacatcgtggtggtcggatttcaccacaagaagggctgccaggagttccatctggaatatgacaaattagaa

SEQ ID NO: 532490 - DNA, 100 bp, Homo sapiens
ccagatattacactgtcaaaactttacaagttaattgaagagtcttgtccacagctggcaaattcagtgcagatcaggacctcagcaatggagaatatcc

SEQ ID NO: 532491 - DNA, 98 bp, Homo sapiens
tgttttgcctgaatacatgatttaaacaagagatttccacagaagaaaatccattcctcgctgccgaagaattaacaggatgctctccaatgaatccc

SEQ ID NO: 532492 - DNA, 75 bp, Homo sapiens
gtgagaaccagccaatgcttcccattgattcttcttgatgaactatcttctactaaacattgggcatctatgcac

SEQ ID NO: 532493 - DNA, 80 bp, Homo sapiens
cgccggggaacttgtgagcctgcggtgaaagaatatgacagatacctagcatctagcaaaataatggcagctgcttacct

SEQ ID NO: 532494 - DNA, 90 bp, Homo sapiens
ccagcttcagatgatggggctgctccagaggacgctgacagcccacaggctgtggatgtgatcccgttttttgctccactcaagcctgtt

SEQ ID NO: 532495 - DNA, 96 bp, Homo sapiens
cttttatgctgtactgaagggaacagttctttacttgcaaaagggtgctgaaaagtcacccaccacttcagctgaccttaagtcagacaaagccaa

SEQ ID NO: 532496 - DNA, 100 bp, Homo sapiens
tgacaatgttcagcacactcaggttctttgaaggattttgcctggctggaatcattctcaccttgtatgctttacgtatctcagatgaagacatcatcaa

SEQ ID NO: 532497 - DNA, 82 bp, Homo sapiens
aagaacaaagaacagtgggaccagttgccccggctcattgctatggacagtgctatcaccctgtggcagttccttcttcagc

SEQ ID NO: 532498 - DNA, 85 bp, Homo sapiens
attttattactggcagcatgtatatcttttccagtcccacagaaccaaggtcctcaccatccccaccccccagccccacagagcc

SEQ ID NO: 532499 - DNA, 75 bp, Homo sapiens
ccatcagcaagcccaggtctatgtgatggaatggggagaagatattaaagcagtttcaaaagatgaagcagtgat

SEQ ID NO: 532500 - DNA, 100 bp, Homo sapiens
gagtatgatgcgctgctgccgtggcccttccggaacaagattgactggggcgactttggggtagaggcagtgtctgaggggactgactctggcatctctg

SEQ ID NO: 532501 - DNA, 50 bp, Homo sapiens
cgcagtggtcgcttcttctccttgtggtggctggacctcgtggaagcccc

SEQ ID NO: 532502 - DNA, 83 bp, Homo sapiens
aacaaatctgtgagcccaacagtcaatccaatgtctactgctatgcagaatgaacgaatatcctccgaatcctaaatctagag

SEQ ID NO: 532503 - DNA, 75 bp, Homo sapiens
accacggcgactggacttacgaggagcagtttaagcaggcagcctgcttctgcaaagtggtacgatcgaagggac

SEQ ID NO: 532504 - DNA, 100 bp, Homo sapiens
aattttgcactttttgatcagcatttgtggggtgaatagcgaaccaagcctcttgccttacatatatattggggctattattcccctgggagcagctgag

SEQ ID NO: 532505 - DNA, 100 bp, Homo sapiens
atgaatagcatcagattgtatgctggagattgaaactgcttctgccttggctagaggccagaattcatgagggctgtgaggagcctgctactcacaatgc

SEQ ID NO: 532506 - DNA, 88 bp, Homo sapiens
ctcgggctgtgagagaggctgcgagtaaaagaagccgattccagttcctgtatgatgttcagttccatgccattgcagtgtcaactag

SEQ ID NO: 532507 - DNA, 100 bp, Homo sapiens
caagaacatgccctggcggcggctgcagggcatttccttcgggatgtattcggctgaagagctcaacggtcttgcgagtggctggttccctgcagaagag

SEQ ID NO: 532508 - DNA, 98 bp, Homo sapiens
ttgcagcccatggagatccagttcaattatgaatctcaggaacaccaccttctgtcagatacgtaggtaacctttccagagatgtgacagaagtcctt

SEQ ID NO: 532509 - DNA, 90 bp, Homo sapiens
aaagaaacatgaagagctttctataaatagcaatccagaattcaaagaagctttttcactatttgacaaagatggtgatggaactataac

SEQ ID NO: 532510 - DNA, 75 bp, Homo sapiens
aaggaagatggcggatctggaggagcagttgtctgatgaagagaagctcgcaaaggatctccttcatccctctcc

SEQ ID NO: 532511 - DNA, 78 bp, Homo sapiens
ccaccgtctgaactaggatgtcccgacatgaagaccaagcggagcagccagctggcagtagcgccctgtaggaccccc

SEQ ID NO: 532512 - DNA, 51 bp, Homo sapiens
caattttatggattttgatgaaactgttcgagaacttgtcttggacaattg

SEQ ID NO: 532513 - DNA, 82 bp, Homo sapiens
aaacacaaagcagcccaaccaaagggtgtctggaaatgaagtatggaaatgaaatcatgaataaagacccagttttcagaat

SEQ ID NO: 532514 - DNA, 100 bp, Homo sapiens
ggacactatgcaatcacccgaaagtctccatgcagtaaacagacccagcagaacctgcccgtggtgagctcagccaagacttggctctccatgttccagc

SEQ ID NO: 532515 - DNA, 141 bp, Homo sapiens
cggtattattgtcattgcaagcactattggcagctgcagagccagatgatccacaggatgctgtagtagcaaatcaggaattgaaagatgttggccatcgtgatcagatggctgcagctagaggaatcctgcagaagaacg

SEQ ID NO: 532516 - DNA, 75 bp, Homo sapiens
gaggccccgggggcgggccggggtcaccacgcctgccccagggaaccgcacagttgatattcactgatggactcc

SEQ ID NO: 532517 - DNA, 103 bp, Homo sapiens
agggtccgagccagccgctgttttgccggaggagcccctcaggccaaaaatggctacaaacttcctagcacatgagaagatctggttcgacaagttcaaatat

SEQ ID NO: 532518 - DNA, 75 bp, Homo sapiens
cagtgatcaacatggatctcaggaacagcatatgccatatatgagctggctgtggcttcatttcccaagaagcag

SEQ ID NO: 532519 - DNA, 100 bp, Homo sapiens
acccgagcaaaccccagcaagatgcggaggctgcctcggcggagcagaggaaccacacgctgatcatgggaggtatggaaacattggaacttcaaaagga

SEQ ID NO: 532520 - DNA, 98 bp, Homo sapiens
agacactccccagggcagaaatagcgaccatggcgagggggatatgagactttctactcggaatatcctgagtgttgcgtggatgtaaaacccatttc

SEQ ID NO: 532521 - DNA, 90 bp, Homo sapiens
ccgaactctaatatgagcagcatggtagttacagatgtatatgccatgaagccactgtcaccatcaacatgcagaacacttccatcgccc

SEQ ID NO: 532522 - DNA, 82 bp, Homo sapiens
gtggatccaagatggcgacggcgatggtcagcccaaggccaaccccactgtcactctgttcccgccctcctctgaggagctc

SEQ ID NO: 532523 - DNA, 100 bp, Homo sapiens
cacaaatgtttttctgttttgcctgaatacatgatttaaacaagagatttccacagaagcttggatttacactgggcaacgtggttggaatgtatctggc

SEQ ID NO: 532524 - DNA, 87 bp, Homo sapiens
tgagaaaacctggacagaacttcatgtgtctgtggcagtcttgtaaaaagatggctacaatagactagttaatattgtgccaaagaa

SEQ ID NO: 532525 - DNA, 101 bp, Homo sapiens
ggaaggcagaagcacagagccccacaggctaagaaaatgaggcgcagcccagcctcgaaatgcagaacgacgccggcgagttcgtggacctgtacgtgccg

SEQ ID NO: 532526 - DNA, 100 bp, Homo sapiens
acatcgcggtggtctttacctgcttcatcgtgaccaccggcctggtattgggatgactatgcaatttgaagatgatgatcatggcccaccagctcctcct

SEQ ID NO: 532527 - DNA, 76 bp, Homo sapiens
gctgtggaacgggccaagcaggtgaccatggcagaactgaacgccatcattgggggacaggagagagtggcaagag

SEQ ID NO: 532528 - DNA, 75 bp, Homo sapiens
gagtgtgttgcccgggcagcggcgcgcgggaccaacgcaaggaaggatttgatgccctggatccctttattccca

SEQ ID NO: 532529 - DNA, 51 bp, Homo sapiens
attccactggattgggaaagaccatggcagctggatgaactgcagctttgc

SEQ ID NO: 532530 - DNA, 98 bp, Homo sapiens
tccgcggagatctctctcatctcgctcggctgcgggaaatcgggctgaagcgactgagtccgcgatggagctccaaatgagaagatgaagcaagtgtt

SEQ ID NO: 532531 - DNA, 97 bp, Homo sapiens
agctgatgctgcccgagaaattgaggccgttgtacaaccatccagcaggccctggggatctaaaaccaaagcgaggctccccacacagaggcagcct

SEQ ID NO: 532532 - DNA, 75 bp, Homo sapiens
ctggctgtcatgctcattgttctgaactccacggtatgtgcactgcgcgtgaccagccgggcccgcagccgcatc

SEQ ID NO: 532533 - DNA, 80 bp, Homo sapiens
cttgaacttggcctttagagcctggacaaggaaagaagtgacagagctgaatgaacctctctccaatgaagatcgaaatc

SEQ ID NO: 532534 - DNA, 100 bp, Homo sapiens
gctacgaaacagcagcggaagtagccggggagtatgcggttaatgaagttgtggcagggataaaagaatacttcaacgtaatgttgggtacccagctact

SEQ ID NO: 532535 - DNA, 49 bp, Homo sapiens
ttcgcagtggtcgcttcttctccttgtttcctccagcttatggaggcat

SEQ ID NO: 532536 - DNA, 101 bp, Homo sapiens
gcgctgcagcgtctccttcccgttctccaggtggtctgcggctccaagtatcttgtgcgaggtgagagtgcccgtgaccatgtggacctgcttgcctcttc

SEQ ID NO: 532537 - DNA, 97 bp, Homo sapiens
gagagcaggcgtgggcaagtcagagctcttcagtatccccatcagccagtttccgaggtgctgagaagcacagaaactccgcagactactcctcaga

SEQ ID NO: 532538 - DNA, 75 bp, Homo sapiens
aagatgagacgagaaagaacacgctttgttgcttctaaacctctggaggaggagaaggccaatgatgaggccaat

SEQ ID NO: 532539 - DNA, 100 bp, Homo sapiens
aaaatcccatctaccgcaactctcagttcgagagtaaaggagcgagaacccgagcagcgccatgagcaacactaccgtcgtccccagcactgcaggtccg

SEQ ID NO: 532540 - DNA, 97 bp, Homo sapiens
tagatcctagtacagatagcacagggattgtcaacattcttgtcacactgaaatttccttctactgatctccaaagatggggttttgccatgttgcc

SEQ ID NO: 532541 - DNA, 98 bp, Homo sapiens
acgtgaagctggagttcccttcccttccacagtgcaaggaagacgccgaggagatggctggccgagctctcaagcagactggcagcaggagcatcgag

SEQ ID NO: 532542 - DNA, 87 bp, Homo sapiens
cagcagcagcaagttagtggattaaaatctcccaagaggaatgacaaacaaccagctcttcagtatgccgagattttgctgtcctgg

SEQ ID NO: 532543 - DNA, 100 bp, Homo sapiens
caaatgcttgctctactagtggaaattctaatctttcacagacacagaaaaatctggtccttcatcagaactaggaaagcactgatttaaacatttggtc

SEQ ID NO: 532544 - DNA, 83 bp, Homo sapiens
ccgagaccgtcctggcgcgatgcgtcaagtacactgaaattcatcctgagatgagctttttttctcaaggtgcaatgaaagcc

SEQ ID NO: 532545 - DNA, 94 bp, Homo sapiens
gatttgttaaggattccaagtaactcttatttgatgaagtggccattctgcctgcccctcagaacctctctgtactctcaaccaacatgaagca

SEQ ID NO: 532546 - DNA, 51 bp, Homo sapiens
ttttgatgcttttgtcagtgtactgggctttggtgtcaggatgatgctggc

SEQ ID NO: 532547 - DNA, 100 bp, Homo sapiens
ctctgaggcggcgagagatggtcaggtctggagctcgaccgggccaggtcattatccagctcaggaaaacctgatgttccttgttctctgtacatgaagg

SEQ ID NO: 532548 - DNA, 100 bp, Homo sapiens
gaccaaaattgtggaaaagtcactctgggatgtttcagcagcccctgagaaggaagaggaggaagctgagggcccgctgagggcgcaggacctgagggag

SEQ ID NO: 532549 - DNA, 50 bp, Homo sapiens
aaaggaatagtcccattagcaaaggccactgcagaacaaattagacttgc

SEQ ID NO: 532550 - DNA, 75 bp, Homo sapiens
ggaagcagccgatccagcctgcggagcctgtggggcaggcagctggctaagagtcttgggcaggctggtgaaatt

SEQ ID NO: 532551 - DNA, 75 bp, Homo sapiens
ggcaaaaacttgtgagggcgaaggtcgtattgaatggtgttgtaggctaattcacctaaataagattgatcctca

SEQ ID NO: 532552 - DNA, 101 bp, Homo sapiens
aaattggaaaggaaattgaagaaaaactaagactcacatctacaagcaatgaactgaagactcagcctggatttcaaaactgaacactgaagtggtttgca

SEQ ID NO: 532553 - DNA, 75 bp, Homo sapiens
cccctgtttgagaaaaggcctaagaattttggcattggaggctgaacagtacccagggggagattcgtgtcggtc

SEQ ID NO: 532554 - DNA, 75 bp, Homo sapiens
cgcgaagcgagtcgccgtctcgtaagatgtgtgcacagacccaggccatgcagatactggtgcctctaacttcgt

SEQ ID NO: 532555 - DNA, 117 bp, Homo sapiens
aagaccgcgcgcagggcctgcagcgggagctggacggcgagcgcgagcggcgcgagaaagagccttcacgtaaatgggtccagtcatgcctcccagtaagaagccagaaagctcagg

SEQ ID NO: 532556 - DNA, 100 bp, Homo sapiens
tacttttacctacgttggcggccccagaaggaaggatatggagtaatagtactaaatcccaatgaaaactatattgaagtagaaaagccgaagatacacg

SEQ ID NO: 532557 - DNA, 74 bp, Homo sapiens
gcccggcgcccctgagccggccgagcggcgacggaccgcgagggctgaagaagatgcagagcagcctgaagctg

SEQ ID NO: 532558 - DNA, 90 bp, Homo sapiens
ttgccagacattactacttcctaggcagaatgcttggaaaggttgaaaggattgttgacaaaaggaaaaataaaaaagggaagacagagt

SEQ ID NO: 532559 - DNA, 75 bp, Homo sapiens
ggcccttacccagacctgggcgggtaacaactccgtgggtgccatccagtgccctgatagtcagttcgaatgccc

SEQ ID NO: 532560 - DNA, 83 bp, Homo sapiens
ataaagcaggactctaaaagctttgggtctgtctcgttggaaaatccagaacatacccttcctccagagaagcttccgtggat

SEQ ID NO: 532561 - DNA, 75 bp, Homo sapiens
ggggcaagtggctcggaacacagtgaagctattaagtacctcacagaagctcttcagtctatcagtgaattagag

SEQ ID NO: 532562 - DNA, 75 bp, Homo sapiens
cccagcagtaggttattgaagacagcagccccagatgccttcaattaagttgcagagttctgatggagagatatt

SEQ ID NO: 532563 - DNA, 100 bp, Homo sapiens
ctgcatcatgctgtctggagaaacagccaaaggggactatcctctggaggctgtgcgcatgcagcacctggtcttgagtcagacagagcaccagccttgg

SEQ ID NO: 532564 - DNA, 73 bp, Homo sapiens
cgggggcggcgcagttgcgaaactgagtctaacttcaaacttgtggctgttaattcaaaactctatgccatcg

SEQ ID NO: 532565 - DNA, 88 bp, Homo sapiens
atgccctgcagtacctgcagaaggtctctggagacatcttcagcaggtacgcaataactgtttggtattttgatgcagatgagagagc

SEQ ID NO: 532566 - DNA, 100 bp, Homo sapiens
cccctcccacctcgtctgggctcgcggcgtctccggggaaagccgtggccccgagggcggatccgaggtgaagcaaaaaatttattgccatatcttggac

SEQ ID NO: 532567 - DNA, 100 bp, Homo sapiens
aacagaaaatcgtcttatagttgagaatttatcctcaagagtcagctggcagattcttggtgccaccattgagaactccaggattgtcctgcagatcgac

SEQ ID NO: 532568 - DNA, 145 bp, Homo sapiens
ccttcggggccgcgggaccgccgcgtcgggagccggaagcgccgccgcctccagtccctcccaaatccgaggcgattccagaatgactatcttgacttacccctttaaaaatcttcccactgcatcaaaatgggccctcagattt

SEQ ID NO: 532569 - DNA, 100 bp, Homo sapiens
cgtctctgccctggcctgccttgtcaccattgccgcctacctctgctccagagcagcccgacggccatggaggctgaagagacgatggaatgccttcagg

SEQ ID NO: 532570 - DNA, 75 bp, Homo sapiens
ccctcgcctccggaggcggcgaggagcggcggaggaggagacccacccggtggacttgagctcgctctccagtaa

SEQ ID NO: 532571 - DNA, 95 bp, Homo sapiens
ttttaaatcaagatttaacattccaacacataaaaattatttatccaacagctcctcccagattttgtggaagtataatactttgtcattatgag

SEQ ID NO: 532572 - DNA, 83 bp, Homo sapiens
ctgccagcagaggagacaggtatatgctggtcactttcgaagagccgccctatgctatcaagagtcagcgtgggagaaattgt

SEQ ID NO: 532573 - DNA, 101 bp, Homo sapiens
tggatggggagcatcgctggctgacaggctggtcaggtacctgtttcccaggcaactactgatcaggcatttctggaccccaaaacaacaaactgatttct

SEQ ID NO: 532574 - DNA, 101 bp, Homo sapiens
gaaaaaatggttgacctcacccaggtgaaagaacttgtcctggacaacagtcggtcgaatgaaggcaaactcgaaggcctcacagatgaatttgaagaact

SEQ ID NO: 532575 - DNA, 122 bp, Homo sapiens
ctcaataatgttgtcatccatttgcttggagatgaagaccccagggtgcgacatgttgccgcagcatcactaattagtgccggtggtggtgtgcacattgagccccggtatagacagttccc

SEQ ID NO: 532576 - DNA, 101 bp, Homo sapiens
ctcaaatcttcgacaagagctagaagataattccaatcatcttacaaaactggaaactgaggcatctaatatgaaggtttgatctgtggatgaaatgaatc

SEQ ID NO: 532577 - DNA, 75 bp, Homo sapiens
cgccggccgggagaggcgcgcgccatggcttctggagccgagccctgggaggagcggggacactgaggacctctc

SEQ ID NO: 532578 - DNA, 98 bp, Homo sapiens
ggagcacggaggacggggccgggcgacctgggcaccagcaggacccgaggccaggagccaggggcccagaaggatctatcttgggatcccatggcttt

SEQ ID NO: 532579 - DNA, 75 bp, Homo sapiens
cttcactatgatgaagagagccatctttgcaacgcagccctgcctgatgtggctctgggaattcctgcagagaag

SEQ ID NO: 532580 - DNA, 110 bp, Homo sapiens
tgaagcaagtgcagatagatggccttgattaaagcaaggagagccaatcatgactggcaaaacacagaccagcaacgtcaccaataagaatgaccccaagtccatcaact

SEQ ID NO: 532581 - DNA, 100 bp, Homo sapiens
agaaccctccggcctcggtgctcgccgtcctgcggaaccgctggctgtcagacagcttcaaggagacgatccgcctcacggacacgctgggcaggctctc

SEQ ID NO: 532582 - DNA, 122 bp, Homo sapiens
ccgggaggaaggaacgaggcaaggagctaaagcagcgtgcgttcagccctgggagccagccccagtgcctgctgagccgtttgacaacactacctacaagaacctgcagcatcatgactaca

SEQ ID NO: 532583 - DNA, 75 bp, Homo sapiens
aagaggcccctggatggatgcatggggaaggtctctaattaacagaagatggcaaagcccagccacagcagctat

SEQ ID NO: 532584 - DNA, 74 bp, Homo sapiens
caccaacactgcacttaaataagggcacacctagtcagctcccctcccacccggtcactccgtccagcaagcac

SEQ ID NO: 532585 - DNA, 101 bp, Homo sapiens
gaaatgttcaagtttaccaaaagagaggcaccgctggaacactaatgaggacagacccacgaagtcaagcatgcggagtgcagccaagccctggaacccag

SEQ ID NO: 532586 - DNA, 110 bp, Homo sapiens
cttccctgtctgtgtattttgagccagcacagttaccaaaattgaacttgtctttcgcttgtgagcggttgtggtcattgtgaggagttgatccccctcatattgtgtac

SEQ ID NO: 532587 - DNA, 96 bp, Homo sapiens
catccttgcaacattactgaagaagactatcagccactaatgaagttgggaactcagaccgtaccttgcaacaagtttggaaattttagcattcag

SEQ ID NO: 532588 - DNA, 83 bp, Homo sapiens
tcgctggagatcgagtaccaaggagaaaatgtgtaattcaaagaagatactgatgtgttgaaaaaatggaatttttggtactg

SEQ ID NO: 532589 - DNA, 100 bp, Homo sapiens
cggatggtgagtgtgtcggggggcttggcggcttttctcctcagttttctggagtgctttggaggagaggtacggacattgctgcaggagaagaggttgc

SEQ ID NO: 532590 - DNA, 95 bp, Homo sapiens
tagggattctctccgttcagattgaagaggagctgatcacgcagtacctggctgagcttcggaaccccgaggagatgactcgctgtggcttctcg

SEQ ID NO: 532591 - DNA, 96 bp, Homo sapiens
actttgcacatgtaacatccctgggttgtggccatggaacagaggatgaagagacaccttctgaccagaatgtttctgtaggagtgtcacagtcaa

SEQ ID NO: 532592 - DNA, 82 bp, Homo sapiens
gaaattccagtgactagtaatggagaagttgatgactctcgtgaacatagctttaataggtctcagcaggagaagattgaca

SEQ ID NO: 532593 - DNA, 100 bp, Homo sapiens
ggtttcccagacggggtgatgactcaagacctggtccttggagaccattagtcaagccagttttctggatatgccgcagaaggatccgtgccagaagcaa

SEQ ID NO: 532594 - DNA, 75 bp, Homo sapiens
tatgccaccagaacctatcatcattaatcatgtcatcagtttaatggatcgagaagtggcgttgcttgctgaaat

SEQ ID NO: 532595 - DNA, 50 bp, Homo sapiens
cagctgcgatctctgtggtaggcccagttttacagctcccagcacagtag

SEQ ID NO: 532596 - DNA, 101 bp, Homo sapiens
gaggctccgggcacccccgagggccccgagcccgagcgccccagcccggacaatgcagatcttcgtgaagactctgactggtaagaccatcaccctcgagg

SEQ ID NO: 532597 - DNA, 74 bp, Homo sapiens
ccactgggatgcagtcaacctggtccagcagcccactgaggaaaaacgtcaagaagaggaaccaccaactgata

SEQ ID NO: 532598 - DNA, 100 bp, Homo sapiens
cacttccctcggtctgggcttctctgaggcggcgagagatggtcaggtctggagctcgaccgggccaggttgatgaaaagcccagaaccttgatgacaga

SEQ ID NO: 532599 - DNA, 75 bp, Homo sapiens
cctggctggtgcggacacaacccaatagatgttgtgactgtgacagactcactggggtttgtacatgctggggag

SEQ ID NO: 532600 - DNA, 85 bp, Homo sapiens
cgcggcggggcagaccgctggggactgcgggcggcgctgtgtccgtcgccatgacaggtcaaaatgcagatcttcgtgaaaaccc

SEQ ID NO: 532601 - DNA, 75 bp, Homo sapiens
gggggaccgcatcctggaggtaatttcgctaaggagtttgtgatcagtgatcggaaggagctggaggaagatttc

SEQ ID NO: 532602 - DNA, 80 bp, Homo sapiens
cggcggcggcggcggaggatgagcctgcagagcgcgcagtacctccggccgagtgatagctactttcacatgttcaggag

SEQ ID NO: 532603 - DNA, 99 bp, Homo sapiens
gccgagcggagacccgggagcaggagctgggcctaggtctgcgccctgggctgaagaagatgcagagcagcctgaagctggtggactgtatcatcgagg

SEQ ID NO: 532604 - DNA, 83 bp, Homo sapiens
ctccatacagaggctgtggtacttctgcgccatcatgaccgggtcctataacaacttcttcaggatgtttgatagagacacgc

SEQ ID NO: 532605 - DNA, 83 bp, Homo sapiens
gtggaatccatctacctgaacgtggagtccgtctgcacacaccgggagaggtcagagggggatatgagactttctactcggaa

SEQ ID NO: 532606 - DNA, 85 bp, Homo sapiens
gagctgaacgtggacagcctcatcacccggctgctggagggagctttcaagttgtggatggaataaaaaagaaaaatatagttct

SEQ ID NO: 532607 - DNA, 75 bp, Homo sapiens
aaaaaggtgcatataccactgatgtggacgagtgtgcaacagattcccaccagtgcaaccccacccagatctgca

SEQ ID NO: 532608 - DNA, 101 bp, Homo sapiens
gacttcttggaaagatatgccaaatttgttaaagagaggatagaaattgaacagaactatgcgaaacaattgaggacccagatgatgtggtaccagttggc

SEQ ID NO: 532609 - DNA, 110 bp, Homo sapiens
gaagaagaaatgaacagcaaggctgaagacagagtgacgggtcagtcttacgagaatatggtaactgagatcatgtcaatgggctatgaacgagagcaagtaattgcagc

SEQ ID NO: 532610 - DNA, 74 bp, Homo sapiens
ccagaacaaagcattgccagaaaacgttaagcactcaggttgaatcagaaaataaccaagaagaacagaaacag

SEQ ID NO: 532611 - DNA, 51 bp, Homo sapiens
ctgctattctccgagcttcgcaatgagacctgtcggccatggagcctaatg

SEQ ID NO: 532612 - DNA, 82 bp, Homo sapiens
gtcacgctcccaccagcagcgcctatgagtttgtcacctggctcgatggcattaagtgagttgctacagtggctggagagac

SEQ ID NO: 532613 - DNA, 98 bp, Homo sapiens
cacggatatcaaagaggccaatttctttggcaggtactggaagttggaccctgctcaggtctatgctagcgggcccaacgcatgggacacggctgtgc

SEQ ID NO: 532614 - DNA, 75 bp, Homo sapiens
tgaagaactgctttcaattctaagtgttgctccgactgtgtgttccaggagtggtggctctgaggtgtgaccctg

SEQ ID NO: 532615 - DNA, 75 bp, Homo sapiens
gcgagtgggagcaccaggatctcgggctcggaacgagactgcacggtgcggaatgactggctggacttgcgggtt

SEQ ID NO: 532616 - DNA, 87 bp, Homo sapiens
gggaaggaaatcatgtcaagcgaagccttgaaaaagctgccctgagacggtgtcccgccgaaagtttacaggcagcattaagagcag

SEQ ID NO: 532617 - DNA, 124 bp, Homo sapiens
gttctagggttctaagtgatgtccaggaaggaggaggaataatatttatggagcatatattatggaacacaagcccacccacctttgggttcctgttggacatcgatggagtgcttgtgcgggg

SEQ ID NO: 532618 - DNA, 100 bp, Homo sapiens
gttcgttttgaagtttgggcctcagcagacttgcatatatttgactgcaacccctggcgaagcggtgctgcctccagcccagagatgccgccaagatgcc

SEQ ID NO: 532619 - DNA, 83 bp, Homo sapiens
ggagaaattcgactatggcaacaagtacaagcggcgggtgccccgggtgctgttgggaacacagaggaagtgactggctgggg

SEQ ID NO: 532620 - DNA, 76 bp, Homo sapiens
ctggggctgtgctccatggcgagctggacaaatcttcctattttcaagctgaaagaatctactgttagaagaagat

SEQ ID NO: 532621 - DNA, 90 bp, Homo sapiens
ttgacaaccccaattataaaggcaaatggaagcctcctatgattgacaatcccagttaccaggttcggctttccagtttggcagcagcac

SEQ ID NO: 532622 - DNA, 100 bp, Homo sapiens
cttctcatttcactaacagaattcagaaggagctagctgaaataacccttgatcctcctcctaattgcaggtccagtggtttacgtcttggatcttgcag

SEQ ID NO: 532623 - DNA, 75 bp, Homo sapiens
caggcgtgagccaccacacctagctgagctacgaagtgaagagtgtcctcggaaaggaagtggggttgttaaatt

SEQ ID NO: 532624 - DNA, 90 bp, Homo sapiens
caggtttcgagatttgctgctaggggaccaaggatggcaaaacgacgacaggaggttctgggggaagagaagctgaaggagatactgaag

SEQ ID NO: 532625 - DNA, 75 bp, Homo sapiens
cgccaagaagcacggcaccaaaaacaagcgcgatcctgataacttaagtgactctctcttttccggtgatgaaga

SEQ ID NO: 532626 - DNA, 90 bp, Homo sapiens
ggcgccccctcccagctcccagcgattacttctctaacaggatcaccagtttgctccacaaagcacaatgtctcgatcacgacaaccccc

SEQ ID NO: 532627 - DNA, 100 bp, Homo sapiens
tgactttgtcacagcccaagatagttaagtggggaggaagacagcgaacccctcccaccacaggatgcccagacctctgggtcactgttgcactacctgc

SEQ ID NO: 532628 - DNA, 98 bp, Homo sapiens
tacgcccgcctcccgcagaccatgttccatggtgtaaaaccagtaagtgtacagcttaattctatgctttgtcctgcacctatcctgaataaagctgg

SEQ ID NO: 532629 - DNA, 83 bp, Homo sapiens
cggaaaggctattacttttgtcacacagtcaaaatgcagatcttcgtgaaaacccttaccggcaagaccatcacccttgaggt

SEQ ID NO: 532630 - DNA, 75 bp, Homo sapiens
cagcgacgccggcgccgagggacaccgcagtatgaggcagaggtgaaatgacaatggatgctctgttggctcgat

SEQ ID NO: 532631 - DNA, 73 bp, Homo sapiens
gaggttggggctttgaagaatgcagccgggcattggttcctgtcaccattgaagtagaggtgccctttgacct

SEQ ID NO: 532632 - DNA, 98 bp, Homo sapiens
gctcctcctcgcctgcgaagcatcacgtccgcttcccgacgctgagggcagccccgtccagggcctggggaaccttcagccctggatgcagggcctta

SEQ ID NO: 532633 - DNA, 74 bp, Homo sapiens
cctggccatgggcgtgaacctcaccaggaatcgagtcactggcatttacgaactcagcttatgcaaaatgtcag

SEQ ID NO: 532634 - DNA, 82 bp, Homo sapiens
actcagagtgacagagctccacagaaaagagtccgatcaagagaagtgctggatgaagaagacgacgtcgaagacgatggag

SEQ ID NO: 532635 - DNA, 100 bp, Homo sapiens
cccatgacgcatggcaacaccggattcagtgccacagagatcccttttttggagggatgactcgagatgaagatgatgatgaggaagaagaagaagaagg

SEQ ID NO: 532636 - DNA, 74 bp, Homo sapiens
gagcgagttacgagaattcccggccgctgcaaggggggcataaggaaatggtggcaggcacttcctcctaacaa

SEQ ID NO: 532637 - DNA, 75 bp, Homo sapiens
ctccccgaacctacggacaagacctccaccacgcagagaatccagcctggccgggtgctcgtccactgccgggaa

SEQ ID NO: 532638 - DNA, 82 bp, Homo sapiens
aaaaatgcggtccctgggatgccttcgcgtcttctcttccctcgggtgacttgagaccattcctcaagaattttgtatccaa

SEQ ID NO: 532639 - DNA, 74 bp, Homo sapiens
ttaactttgcgctcagacgagtaacttcggcaaagggatggggagaggttgcccccaagtttcctggcagtgtg

SEQ ID NO: 532640 - DNA, 97 bp, Homo sapiens
cggagcttcgccaaggctggcgcagtcggtgctggagaatctggtaaaagcaccattgtgaagcagatgaggatcctgcatgttaatgggtttaatg

SEQ ID NO: 532641 - DNA, 75 bp, Homo sapiens
tgagaatgggaattcatattcctgaaaatgctatacgtattggtcacgttggaatgcaaattgagcacatcattg

SEQ ID NO: 532642 - DNA, 80 bp, Homo sapiens
tgaaggctgtgataatgaggaagatcttcaaatgggcattcacaaggtggtgatcgtggcagaggtggccctggtggcat

SEQ ID NO: 532643 - DNA, 59 bp, Homo sapiens
agagatctcttctgttctccactgctaggttgaaatcacaaagattagacaccttttta

SEQ ID NO: 532644 - DNA, 97 bp, Homo sapiens
ccaaaaagcctcccccatcaccccaacctacaggtcatactccctgtcacaaactccagctgaactaacttggaggaggatcttccctgacagctct

SEQ ID NO: 532645 - DNA, 82 bp, Homo sapiens
ttttttttcaagaactgccgtcttctttgcctgcactaatgtttgaataggttggtgatgctgtgtatgcagtagattcttg

SEQ ID NO: 532646 - DNA, 98 bp, Homo sapiens
ctcgtttgctgtgcagcgtggtatggacaagattcagaatggacagtttagaagaacctcagaaaaaagtctttaaggctcgaaaaacgatgagagtg

SEQ ID NO: 532647 - DNA, 50 bp, Homo sapiens
gccctaaatttcccctttgcccggagtacctccagaggtaactgtgctca

SEQ ID NO: 532648 - DNA, 85 bp, Homo sapiens
ttgatgatgatggagaagggaacagtaaatttttgagggaagatcagttttcctgccatccaggctgctccctccttcagcaact

SEQ ID NO: 532649 - DNA, 82 bp, Homo sapiens
ctcctaagggaccacaaatacgtgatttggagagaggccctgcatcatggaaactctttctaatgcaagtggtacttttgcc

SEQ ID NO: 532650 - DNA, 100 bp, Homo sapiens
gcctctgtgactccgttatctgcaggtattgggagatgcacagctaagatgccaggaccacctggaagcctagaaatgtggattctgctgcgaaccggag

SEQ ID NO: 532651 - DNA, 75 bp, Homo sapiens
gaactgagaagctgtcaccacagttactccacaggatccgctgaacataggatgttgccacaaaatctacctcgt

SEQ ID NO: 532652 - DNA, 100 bp, Homo sapiens
catccaagtcagctgtgtggagtgttctaaccaacaaggaagagctatggatcgaagttgtaatcgtatgtcttcgcacacagagacgtcaagtttctta

SEQ ID NO: 532653 - DNA, 90 bp, Homo sapiens
ctccaaacatcgcgattaataggaggagctcatgggacacatgtagctagtatagctgctggacactttccagaagaacctgaacggaat

SEQ ID NO: 532654 - DNA, 100 bp, Homo sapiens
tgaagcgctgcggcatggcgcgcgcctgcctccaggccgtcaagtacctcatgttcgccttcaacctgctcttctgggcccagtactacggggagattgg

SEQ ID NO: 532655 - DNA, 74 bp, Homo sapiens
gaggtcgaggcggaggctttagaggtcctggatgtgcgggagaaccccaacctggtcatgccgcccaagcccgc

SEQ ID NO: 532656 - DNA, 75 bp, Homo sapiens
ccctgtaccgccggcttgccacagtccacatgtcccggaaactcagcctcctcccaagctccctgtgggtcctag

SEQ ID NO: 532657 - DNA, 90 bp, Homo sapiens
tgcccaacagaatttatatagagatgtgatgttggagaactacagaaacctcgtctccctgggtttgtttctgcgtcacatgatcttggc

SEQ ID NO: 532658 - DNA, 74 bp, Homo sapiens
acctttttcttggcgattatgtggacagaggttattttagtatagaggtattctctactgccgctgatggtcaa

SEQ ID NO: 532659 - DNA, 75 bp, Homo sapiens
ctcagcccacctgtgattatggaagcttttgtccagtgatcgaaatccaccaattgatgacttaataaaatctgg

SEQ ID NO: 532660 - DNA, 100 bp, Homo sapiens
cctcaacagttcttcttcagaggttacgagcaaagggaataaggaatccggatcattctagagctttaataactgagggcaaacccatcagacaaccaga

SEQ ID NO: 532661 - DNA, 75 bp, Homo sapiens
cgggagagtgtgcagccgagtcactactgcctgcctgcctgcctgctacgtaaacggagttccctctcgaagtcc

SEQ ID NO: 532662 - DNA, 75 bp, Homo sapiens
ccggagtgagcggagtagcgagtcggcaacccggagggttctgagcaaggttcaaccagtcaagaacaggcctta

SEQ ID NO: 532663 - DNA, 50 bp, Homo sapiens
ctggattcatatccttcgaaaacgacggtttgacatctacaggaaggtgc

SEQ ID NO: 532664 - DNA, 103 bp, Homo sapiens
ccgggagttcaagaagaacactccagagaaactagaaaaactgcttttggaattatctctacagtgaagaaacctcggccatcagaaggagatgaagattgtc

SEQ ID NO: 532665 - DNA, 75 bp, Homo sapiens
cgcaggtcctcgcggtgcgcaccgtttgcgacttggaactcgaatcatttatgacagaaagtttctgttggatcg

SEQ ID NO: 532666 - DNA, 100 bp, Homo sapiens
cgttgtgtttgtgaaacagagaaagataggcggccatggtccaaccttgaagattcagaatggacagtttagaagaacctcagaaaaaagtctttaaggc

SEQ ID NO: 532667 - DNA, 78 bp, Homo sapiens
aaggaggcaaatgaaattctgcagcgcagcaagaaggcccagctcaacattggcaatgtgctccctgtgggcaccatg

SEQ ID NO: 532668 - DNA, 101 bp, Homo sapiens
ttttaggcggtatcaaatggaaagtttttccaaatattcatctgtacagcacaaacgtgcagatatctgatagccctttccgttgcactcaagaggaagca

SEQ ID NO: 532669 - DNA, 115 bp, Homo sapiens
aatcgggttgatggacaaagagaggctgtttgagcctctgagccagatggaagcacatgagatcatagaagagcctcatatcaccatggatgcagagaagcaccccccttcaaag

SEQ ID NO: 532670 - DNA, 94 bp, Homo sapiens
gagacagcgatcgagagagaccggagaggtggagagctgcggttggatttctcacgatgtccagtgttatctccatgtctgcccctttcttcct

SEQ ID NO: 532671 - DNA, 100 bp, Homo sapiens
gatgtcctatggcttgaacattgaaatgcacaagcagaagaatcctgcaaaaatgtctctctatccatctctcgaagacttgaaggtagacaaagtaatt

SEQ ID NO: 532672 - DNA, 51 bp, Homo sapiens
caggaagcagtactattcaagagggtgatcagcccatgacctaaacctcca

SEQ ID NO: 532673 - DNA, 75 bp, Homo sapiens
ttggattgtctgcttcaagccctggctcaaaatagaagtgggaaaactcttgcctttgccatcccaatgattcat

SEQ ID NO: 532674 - DNA, 75 bp, Homo sapiens
tcgagaccaacgtggaggagctgtgggtggaagcaaggacacccaggcccattattttcctccagcctccatgga

SEQ ID NO: 532675 - DNA, 83 bp, Homo sapiens
cagcccgcccgaccccgtcccgaccctggccgccccgagcggagcctggagcccgagcgggaagaagttccgcagcaagccgc

SEQ ID NO: 532676 - DNA, 98 bp, Homo sapiens
gggagcgcaaggtcgccctcaaggccatgatcaaaacagctctgcgtgcctcttgctgtgccctacctggacaaacccccaactccgctccacttcta

SEQ ID NO: 532677 - DNA, 75 bp, Homo sapiens
cgtgaacatgccaacaaattgattgagaaaaggcgacggcggattgacagaagtatgattggagagcccacaaac

SEQ ID NO: 532678 - DNA, 99 bp, Homo sapiens
gggcatgcacgtgatactcacacagtggcttctgctcaccaacagatgaagacagatgcaccaacgagatcaatgtccgagttaccaccatggatgcag

SEQ ID NO: 532679 - DNA, 48 bp, Homo sapiens
ggtggacagatctgagagatactgaggatgaaactgattccaagacag

SEQ ID NO: 532680 - DNA, 75 bp, Homo sapiens
tccttgccaggccttcaaccactatctcagtgcaatggttccagtgtctcgccccatcctcaccctcagggttcc

SEQ ID NO: 532681 - DNA, 112 bp, Homo sapiens
tcccatggttcggaagaatttcagatacatgttttctcctgtgaaattaaagaggcagaagttgttgacatgaagtctgagggacaggccactgtaattcagcagctggaac

SEQ ID NO: 532682 - DNA, 114 bp, Homo sapiens
gcggcgcagcggccgctgtcgggctggccatggcgaggggtgcacggcggccacctgagtggcgcggcggtgtcagggaaatcctcattgacgattcaatttgttgaaggccaa

SEQ ID NO: 532683 - DNA, 82 bp, Homo sapiens
gacgctctcagctctcggcgcacggcccagaacatccagtcatggataaaaatgagctggttcagaaggccaaactggccga

SEQ ID NO: 532684 - DNA, 88 bp, Homo sapiens
cacagttgaagcctgattgcaggtattgcacatctattacaaatttcctggttatgggaggattccagcttcttgctaagcctgccat

SEQ ID NO: 532685 - DNA, 74 bp, Homo sapiens
cgtgcacttgcaggccgggcagtgcggcaaccaaatcggcgccaagccagagagatgacacgggggaaattcct

SEQ ID NO: 532686 - DNA, 99 bp, Homo sapiens
agtgctatgacaagaccaaggtcaacaaggacaacaatgagatcgtggacaagatcatgggcaaaggacagatccaggcatccccacgctcatcatgct

SEQ ID NO: 532687 - DNA, 100 bp, Homo sapiens
ggatttcccagtggaggtggtggcggtggaggacagcagcgagctggtgactggaagtgtcctaatccgtccccttcccctgagcccatctacaatagcg

SEQ ID NO: 532688 - DNA, 75 bp, Homo sapiens
tatccctgcctgtgactttcaagggccaagaccagcttcaagtctccatggtaccagaaaacaacaacctcacag

SEQ ID NO: 532689 - DNA, 100 bp, Homo sapiens
agaaaggagtgatgaatcagcccatggcttacgctgcacttccatcccacggtcaggagaactcctggaagccccgtcttcctcctcatgcccattgcct

SEQ ID NO: 532690 - DNA, 50 bp, Homo sapiens
gggacagagtctgcagcaaaaaaggccatccgagttactcatgagaccag

SEQ ID NO: 532691 - DNA, 75 bp, Homo sapiens
cagaggtgattctgcgtgtggacaacatcatcaaagcggcacccaggttatcttatgatgaggcttttgctatgg

SEQ ID NO: 532692 - DNA, 71 bp, Homo sapiens
ggccacagagagattggtgtttttgtgaggcagtgagacctaagaaaaggtgtgagcggtactgggcccag

SEQ ID NO: 532693 - DNA, 75 bp, Homo sapiens
cttgaggacttggaggtcctgtctagaaactatccaactctggccaatattgaaaggaagaagaagttaaaactt

SEQ ID NO: 532694 - DNA, 75 bp, Homo sapiens
agcagtacttggagatgatgaaattacaagtatcagatgtagaaggtggtgatggactgcagctcagaaaggaac

SEQ ID NO: 532695 - DNA, 100 bp, Homo sapiens
cgttgctggtgacagcaaaaatgacccaccaatggaagcagctggcttcactgctcagagggctctgaactcctacttcgagcctccggtggaggagagc

SEQ ID NO: 532696 - DNA, 100 bp, Homo sapiens
accagcaagatcggcaggcgagattgcctgacccaggcctgctcggccctcacagggctaagtcctatcagccatggaaacaccattgctctcttcttcc

SEQ ID NO: 532697 - DNA, 95 bp, Homo sapiens
cacctggggatgacttcctgtgcttagaaggcaaagaattcaaccggctcatccgcaacgagaaaggcgagctgtggcaagatcttgactgggtg

SEQ ID NO: 532698 - DNA, 75 bp, Homo sapiens
cgccgcccgtccacacccgccgccagtggatcaatcttcctgtcctacaactgacaaaggatcccctaaagaccc

SEQ ID NO: 532699 - DNA, 75 bp, Homo sapiens
ggtgatgagtatgactactgatgactttgtaaaaatgttttcagacagaatgttgctgcgggatgtaaaagctct

SEQ ID NO: 532700 - DNA, 83 bp, Homo sapiens
gtagacaccagctccgaaatcaccaccaaggactccatccccgtgtctacctccctccttggagacacttccgacacgacctc

SEQ ID NO: 532701 - DNA, 90 bp, Homo sapiens
gttagcaattgtcaccgcagactttgttaaggatctcaccactgagctgagttgggagctgaccattcccccagaagtacagcggatcgt

SEQ ID NO: 532702 - DNA, 97 bp, Homo sapiens
atgaagagttcattcttctgagtcaaggagaggtggaaaagctaatcaagtgcgacgaaattcaggttcctccccgggcagaagaaatcaccattcc

SEQ ID NO: 532703 - DNA, 75 bp, Homo sapiens
ctcttggtagatcacacccagctgtcacccacgtgtccatcatcgtgcaggtttgatgtgtgaataattacattg

SEQ ID NO: 532704 - DNA, 100 bp, Homo sapiens
tcctcagttccttacctacatggcactagaagaacgcttagcccaggctatggagggtgttctaaggatacattttattgaagctcaggatcttcagggg

SEQ ID NO: 532705 - DNA, 98 bp, Homo sapiens
gggggtgctgcagaggacacgaggcggcgggctggagacatggaccgcggcgagcaagtaatctatgccagcaattatgacaatgttagcagaccatg

SEQ ID NO: 532706 - DNA, 100 bp, Homo sapiens
atgtggtcattggaaaggtgttcatgcaggtctgtgagctggatattatctttaattttgaaaaggcttatttcatcctggacgagtttataataggtgg

SEQ ID NO: 532707 - DNA, 82 bp, Homo sapiens
cgggtgccgaggagcgggaagagttgctgggcacagccatgacagtgcagatcctgctgaagctggaccgcctggacctcgc

SEQ ID NO: 532708 - DNA, 88 bp, Homo sapiens
cagagataagaacaccaaccaaattgtcgccattaagaaagtgctggagaatctggtaaaagcaccattgtgaagcagatgaggatcc

SEQ ID NO: 532709 - DNA, 101 bp, Homo sapiens
ctcccaagtagctgggattgcagattaaggtcaccgttgcaggcctggctggaaaagacccagtacagtgtagccgtgatgtggtcatttgtcctgatgcc

SEQ ID NO: 532710 - DNA, 75 bp, Homo sapiens
tggggctgctgtttctcttcgccgacgtatcccagtcgacatcagtgacagtgatatgatgctgaacatcatcaa

SEQ ID NO: 532711 - DNA, 100 bp, Homo sapiens
aaacccacttcgttcaagacaggtgtttaagcgtcatcatcagatttgaaatatttaaagtggatacaaaactatttcagcaatgcagacaattaagtgt

SEQ ID NO: 532712 - DNA, 50 bp, Homo sapiens
agtccttcttcgccaaatacgtctggcggcttctctgttgacaactcagc

SEQ ID NO: 532713 - DNA, 83 bp, Homo sapiens
aaactcaacaaattgaaggttaacaccttaagagttgtagttactgaccagtggccaatccgccatggtatagttgaagattg

SEQ ID NO: 532714 - DNA, 74 bp, Homo sapiens
caacttcaagaacaggcttcgagaacatgatgattggcaggaagcacatgagcgcctggctgaattggaagaaa

SEQ ID NO: 532715 - DNA, 98 bp, Homo sapiens
gaggcttccctggttgcttagctgggtctcggccacggcgtggagagcggcaaggctccttggtaatgaccagtctaagggattaggaccagcatcag

SEQ ID NO: 532716 - DNA, 90 bp, Homo sapiens
cagctaaggtattcctggaagcagagtaaataaagctcatggcccaccagctagaaaggtttgtctacagattttgagcgttcgaagttg

SEQ ID NO: 532717 - DNA, 73 bp, Homo sapiens
acagctgcccagctgaaagccaagaggagaaggcagagcccccccaggctatgaatgccctgatgcggttgaa

SEQ ID NO: 532718 - DNA, 100 bp, Homo sapiens
accatgactaccttcacctggaacatcaaccacgcccggctgatgatggccgccctgctcccccaatgaaaggccagcttcgaagaaaagctgaaaggga

SEQ ID NO: 532719 - DNA, 75 bp, Homo sapiens
ccatcaaagctttgcgcaacgccaacctcaggcgagatgctaaatttcaacagtgccacttctgcattctctgtt

SEQ ID NO: 532720 - DNA, 101 bp, Homo sapiens
gggagaggatgcagagctgcagttggatgaagatgtgtctgggaagctgaggatctgggataccacgcagaaggagcacctgttgaagtatgagtaccagc

SEQ ID NO: 532721 - DNA, 75 bp, Homo sapiens
aaattatggatgaacctatgggagaggaggagattaacccacaaactatcttaccaatatatttgagtccttcct

SEQ ID NO: 532722 - DNA, 100 bp, Homo sapiens
cctgcctcactgccagaagctctttgtgtatgaccttcacgcagtcaagaacgacttccagaccgtagctttatgggatctgcgtaacttaaaattaaaa

SEQ ID NO: 532723 - DNA, 74 bp, Homo sapiens
ccagaagaggtttcccatctgcacctgtggataggccagcaggagatggaaccttccagaagtgggcagctgtg

SEQ ID NO: 532724 - DNA, 82 bp, Homo sapiens
ttgctactgctgcctctgtcactcctggtgaccagcattcaagaatcgagagctccagatcatgagaaagctagatcactgt

SEQ ID NO: 532725 - DNA, 100 bp, Homo sapiens
tttccactttgtaattccagcgagtcgacttcccatcctgagttgtttggcaatgaggagcagcagctggcgtgggccaagcgggagagcgagaaggcgg

SEQ ID NO: 532726 - DNA, 75 bp, Homo sapiens
gatctccatgtcctgttgtggggcttttacagcctttggctgctcagataaagaatttgatgagccagctaggaa

SEQ ID NO: 532727 - DNA, 88 bp, Homo sapiens
accctgagctgcgtgagaacccgcccatgaagccagatttctcccagattgggatcaaagccactcacattaagttaccaagaacaac

SEQ ID NO: 532728 - DNA, 83 bp, Homo sapiens
ttacagcacagccagacgttctagaagtgcaagcaggcttgacacaactctcatagactttactgacatgaagtgccaacgag

SEQ ID NO: 532729 - DNA, 90 bp, Homo sapiens
aggggcaactgaagacggaggtgcccaaggtcagaaggaagcaccacacagagacggtctggaaaatcccgaagcagaagcccgtattca

SEQ ID NO: 532730 - DNA, 90 bp, Homo sapiens
tcaagatggtggacgagcttaagagaggtgggatgcaggccctgggcaagcacctgaccagcaacagcccccgcctggtgcagaactgcc

SEQ ID NO: 532731 - DNA, 100 bp, Homo sapiens
cagattcccatggaagcgccgcgatgttcgccccccggctgctggatttccagaagacgaaatacgcgagaactcaagacatggctgcccagtgtgtcac

SEQ ID NO: 532732 - DNA, 75 bp, Homo sapiens
ctcgccgtgctcagtgcctgttacttgggcaccccgagatgaaggcttgactattgacctgaagaattttagaaa

SEQ ID NO: 532733 - DNA, 100 bp, Homo sapiens
acctcatcaccaagctgcaggccaagcacgatttactcaagcagaccctgggcgaagacttgttgagcccattaaagaaatggaagtctcgctatctgat

SEQ ID NO: 532734 - DNA, 100 bp, Homo sapiens
tggtcatatatttacagttaatgatcaattcacatccaaactacacagagtcaagattcaaacagctgcccgggaacaggcaaaggaggcgtgcaaagct

SEQ ID NO: 532735 - DNA, 83 bp, Homo sapiens
gtcccatttcgcccctcgcgtccggagtccccgtggccaggtatgggttcatagaagggcacgtggtgattccccggatccac

SEQ ID NO: 532736 - DNA, 100 bp, Homo sapiens
cctgcctcagcctcccgagtggctgggattacagtgcccatcccctccaaagccagcagcctctcagccctctccttggccaaagacagcctggtgggcg

SEQ ID NO: 532737 - DNA, 76 bp, Homo sapiens
aaataatatgtgggggccgacacgactaccaacctgtgtaagtggtgatgaaacttatcaggacatatttcgtgat

SEQ ID NO: 532738 - DNA, 70 bp, Homo sapiens
gccgcagcgcgagttgccgccgctgctgcccggggccggatcgagaagaagctggaaccactgtcacagg

SEQ ID NO: 532739 - DNA, 100 bp, Homo sapiens
ctgtaaccaagagattgtcaaatttgacctggaggtgaaggcgcttattcagccctggcctcccacgactacatcctgaagattgtgcccacggtttatg

SEQ ID NO: 532740 - DNA, 80 bp, Homo sapiens
cgagaattccgcagcccacacggtattgttgcagcatctggcagtgagactgaggatgaggacagcatggacattccctt

SEQ ID NO: 532741 - DNA, 50 bp, Homo sapiens
caaaatgtcaacaaattgatgggtggattctccacagttttcctcgtgcg

SEQ ID NO: 532742 - DNA, 111 bp, Homo sapiens
ggagcggggagagctgtttgtgggccagctgccctctgaggagatggtcatgacaggtgaaatgacaatggatgctctgttggctcgattgaaacttctgaatccagatga

SEQ ID NO: 532743 - DNA, 100 bp, Homo sapiens
agagtatggctgcagaggatccatctgtcttagcaaggctgtcatcacactgagatctgtatctgtggacctgaatgttgatccctcgcttcagattgac

SEQ ID NO: 532744 - DNA, 100 bp, Homo sapiens
tgcgggaggtcttcgtggactgggactcgaacctgaccgacccggcagtgcgggtaagccgtaactttgagctggttggacgggttaacttggatcagct

SEQ ID NO: 532745 - DNA, 74 bp, Homo sapiens
agtggcctcttataccccggactgcagaaatgccagatagcgcagcagctctgctgggcacttgctgcaaactc

SEQ ID NO: 532746 - DNA, 89 bp, Homo sapiens
aaggattttgcctggctggaatcattctcaccttgtatgctttacacttaattcagtgcacaaatgagatgaatgtgaacatcccacag

SEQ ID NO: 532747 - DNA, 96 bp, Homo sapiens
ctgctgtgagacacaatgagaaatgcttttgtgtaaaggtttattacccagaactctttgtctgggtcagtcaagaaccatttccaaacaaggaca

SEQ ID NO: 532748 - DNA, 90 bp, Homo sapiens
gttaaaggctgtgctgaagaagagccgagagggaggaaagggaggcaagaaggaagcaggattctggactctacttataatatccctaac

SEQ ID NO: 532749 - DNA, 110 bp, Homo sapiens
gcggcattttgaggcggtcctcctagcggcctgatctgttacctaaagcaataaaaaatggccagaggatcagtgtccgatgaggaaatgatggagctcagagaagcttt

SEQ ID NO: 532750 - DNA, 100 bp, Homo sapiens
ggagacaccgattataagaagagaaactcagcgctggggaagaaggattataatgatgagatcaggcaagcacagctccaggagttaacatatttgaatg

SEQ ID NO: 532751 - DNA, 83 bp, Homo sapiens
cgcgcagccatgtccgaggagaagcccaagataagaccatcatcatgtggaaactgaccagggatgagaccaactatggaatt

SEQ ID NO: 532752 - DNA, 111 bp, Homo sapiens
ccggccaggacacggtctgggccgccgaatctccggccgaagagcggcggcggcagcggcggattttttatcaagcagaaatgcatcgaacaacgagaatcaagatcactg

SEQ ID NO: 532753 - DNA, 75 bp, Homo sapiens
cacaaatgctccttctcctggagacgcaactcaagttacggcagtcccagtcctactgcacagacacagagtgtc

SEQ ID NO: 532754 - DNA, 100 bp, Homo sapiens
atatgcgcccagagatatggatcgcccaagagttgcggcgtattggagacgagtttaacgcttactatgcaaggaggaacaatccatttcacagatgaag

SEQ ID NO: 532755 - DNA, 90 bp, Homo sapiens
gacagctcattcacatggctagtgccttgcccgtctggtaaacttgtccagattgaatatgctttggctgctgtagctggaggagccccg

SEQ ID NO: 532756 - DNA, 100 bp, Homo sapiens
gaaaacctggaccaggcacgggaagatgcccaggttgcagagcctgaggcctgtgatcagatgtacgagagcttagcgcgactccattcaaactactaca

SEQ ID NO: 532757 - DNA, 88 bp, Homo sapiens
cctctgacgttccggctgctgcgcaacggccaggaggttgcagtattggagccgaaggagtaaaggtgctgcaatgatgttagctgtg

SEQ ID NO: 532758 - DNA, 85 bp, Homo sapiens
actctcagtggtcctacctggggatattatcaaatctactactgttcatggcagggttcaggataagtttgaggtgctgaattac

SEQ ID NO: 532759 - DNA, 100 bp, Homo sapiens
ggctgccgccagctcgctcgagagagagaccgagaggttcagggagctgttgctgtatggccgtaagaagcaggttcaggagaagtggcacctggtggag

SEQ ID NO: 532760 - DNA, 75 bp, Homo sapiens
gtcacactacgacagtgagaaaggaggtcatcatcagatttgaaatatttaaagtggatacaaaactatttcagc

SEQ ID NO: 532761 - DNA, 50 bp, Homo sapiens
tggacggtcactcagcctatggaggtggagccccctgagctgcccgctga

SEQ ID NO: 532762 - DNA, 100 bp, Homo sapiens
ttccttccttactttgtcttggtatactacatggcaaaatgggaaagagattcgtcagcgaactgcagctcaaagaaacctttctccaacaccagcaagc

SEQ ID NO: 532763 - DNA, 100 bp, Homo sapiens
ggcgcttcgccaagggggtgcagtacaacaaaggagaggacttgggtgaggagctgctgccacccgggctgggccaggacctgagatctcattgctactg

SEQ ID NO: 532764 - DNA, 96 bp, Homo sapiens
tatagaaatggctgaaggaaaacctccttatgctgatatacatccaatgaggtatgactatgaatatgatgaaaatggtgacagagtcgttttagg

SEQ ID NO: 532765 - DNA, 76 bp, Homo sapiens
gtttgagaaaaggcctaagaattttggcattgctccatggtgcaatgtatggaagtggaatctatcttagtccaat

SEQ ID NO: 532766 - DNA, 83 bp, Homo sapiens
ctcaccaacgccatccaggactccctgactcgatgttgaggagctcaagcttgggaaaatggtgtgcattccttgtatcgtca

SEQ ID NO: 532767 - DNA, 76 bp, Homo sapiens
tgctgaggtgaccttggccatcctgctctttgtatatgaacagaagctccagcggcgccatgagcaaatgaaaaag

SEQ ID NO: 532768 - DNA, 100 bp, Homo sapiens
cccagctgaagctgggcatctggggcgcattagtgaccagaaggatcccaaggatcgaatggttcaggttgtgaaatggtacctctcagcctttcatgcg

SEQ ID NO: 532769 - DNA, 82 bp, Homo sapiens
cagcctggaaggtgcgtgtggggctgggtctcggagtgggagacgtggagtgcagtccacgatggcccggtccctggtgtgc

SEQ ID NO: 532770 - DNA, 80 bp, Homo sapiens
gaaaggaagcaagcagttcagaagagccaaggaataaacatgcaatgaacccaaaaggttataggtatggacacagtaag

SEQ ID NO: 532771 - DNA, 100 bp, Homo sapiens
cgagagccgactaccctccgggcccagtctgtctgtccgtggtggatctaagctctgcccggatggccctagtcttcgtgtacggcaccctgaagcgggg

SEQ ID NO: 532772 - DNA, 99 bp, Homo sapiens
ggccatttatgaatgtgtggcctcaaataatgtgggagaaataagtgtatccaccagactcacagttttgcggggacaatgaaggccaaacagctctac

SEQ ID NO: 532773 - DNA, 74 bp, Homo sapiens
tgggcctgccccccgtgccagacaatgcggacctctctgggctggctattaagaataccacttgggtcgctcga

SEQ ID NO: 532774 - DNA, 83 bp, Homo sapiens
agcgaactgggtggcgaacggggcgagcctggaggattgtcactccaacctcttttcgctggattggttgccgtggtctttac

SEQ ID NO: 532775 - DNA, 100 bp, Homo sapiens
cttttcctcgctggggtgtacgttacatgctatgggaaaacttcctggaaccagaatggcagcgttaaaagccaagtataccttgctgcatgacgccgtg

SEQ ID NO: 532776 - DNA, 75 bp, Homo sapiens
ttgccgatttcatgactaaccagtagacagggtcttgttctattgtccaagctggtcttgaattcctgacctcaa

SEQ ID NO: 532777 - DNA, 105 bp, Homo sapiens
cgctccaagacgcccaagaaccaggaagccctgcggatggccaacgtggcaggtcgggtcacaaatcttcgaagagtgacatatgttgttttagatgaagcagac

SEQ ID NO: 532778 - DNA, 100 bp, Homo sapiens
cgctgtacaatggtggaagcctttgacagatgaccacctaagaaaggaggaacagaaaagtactaacattgaagatcttcatgtttctcaggcagtcaac

SEQ ID NO: 532779 - DNA, 83 bp, Homo sapiens
acaaggagctcagtgacctcctggacttcagcatggctcgggacgtgtacgaggaggccatccggacagtgatgaccgtgcgg

SEQ ID NO: 532780 - DNA, 100 bp, Homo sapiens
gccatcatggtgtttgagcatacggggaacatcccagtcaccgtcatggaggccagcataaagatgcctatcaagtgatattggatggtgtgaaaggtgg

SEQ ID NO: 532781 - DNA, 100 bp, Homo sapiens
tggcctgaagacatttcctctcctcccctctggatttctcagagacaaagcacagttgcttctagaccaagaggctgaatcagcatcccaaaagatagaa

SEQ ID NO: 532782 - DNA, 75 bp, Homo sapiens
aagggaggctccaagacctcatcaacaattaagctccaccctgaatgaagtcaacacctcctcaaccatctcctg

SEQ ID NO: 532783 - DNA, 75 bp, Homo sapiens
ggatggctactatttcaccaatctgaggctgctattccaaaaagctttcaactctcagcagttagttcatgtcac

SEQ ID NO: 532784 - DNA, 100 bp, Homo sapiens
cggaagcgcagggagaaggaagaggtgtttgaaaaggtcatccatgcctggcttattatatcatctctattgttgctgttctttttttcattcatttact

SEQ ID NO: 532785 - DNA, 96 bp, Homo sapiens
gcgaagaagcggtgacccttgtggaggatatgcagagagagcttgggagactgagacaacagcaccctccacccctgtgatccgcgctgaggactg

SEQ ID NO: 532786 - DNA, 75 bp, Homo sapiens
catgggcatgtacaacaccgacgaggagtctactcttcatcttgtgttgagacttcgtggtggtgctaagaaaag

SEQ ID NO: 532787 - DNA, 102 bp, Homo sapiens
ccacagaatagacctgaagacaaaaatccagaagtacaagcagtctgaaatgcactcggtgatggaaagagagccactattctgaagaacacttggccaaag

SEQ ID NO: 532788 - DNA, 89 bp, Homo sapiens
aaccaacgcctggctcggagcagcagcctctgagatgcctgtgaggagccaccaacatttgaagctatggagctcattggtaaaccaaa

SEQ ID NO: 532789 - DNA, 100 bp, Homo sapiens
tctgtgtgagggaaagaaaacaatttctcctgctctgcagcttctgttcaggtagcagcgatggttctgaactaagtgaagagacctcatggcctgcttt

SEQ ID NO: 532790 - DNA, 82 bp, Homo sapiens
ggaagaagaagaagagcatgatcggcatgtccaccaagggcgtgatggtgggcatgggtcagaaggattcctatgtgggcga

SEQ ID NO: 532791 - DNA, 101 bp, Homo sapiens
tctctctgccctgttggagatggaggccagtcagaatgtcacttatgagccagacttcaattctgcagaactattagccaaagagctgtaccgcgtgttcc

SEQ ID NO: 532792 - DNA, 75 bp, Homo sapiens
aatgccgccatccgggagaagctggcctgggccaagatctccagtctatgtgctgaagaagcagcagcccaagag

SEQ ID NO: 532793 - DNA, 100 bp, Homo sapiens
ctttaaagaaggcaaggagagaatgtatgaagaacagtcacaggacagccatattttcagaagacagaaacaccatggagcctgttcataaggttaaaaa

SEQ ID NO: 532794 - DNA, 75 bp, Homo sapiens
ggacgatttcctggggggcatggagtgcaccctggggcaggctgaagaactgaaactggccacccagctgaccgg

SEQ ID NO: 532795 - DNA, 87 bp, Homo sapiens
agatgccgggggagcggggccttccacaccccctccgtgggtgtgtggtctggccgtgggcctgggcttcggggcactggcagaggt

SEQ ID NO: 532796 - DNA, 51 bp, Homo sapiens
atttgttttgagctaaatattgaggatatcaaaccttccaatattcttctg

SEQ ID NO: 532797 - DNA, 99 bp, Homo sapiens
ttaaacatttctaaaagtggttcttgcaggcaggctgttaatgccactgggcacctttcagacacactttggctgatccccatcacattcctgaccatc

SEQ ID NO: 532798 - DNA, 100 bp, Homo sapiens
gttctattttccctcctcaaactgactttgcagccacggagaggtgtagacggggcactgccttcagagcaggtcctgccagcctcgctggagaggatgc

SEQ ID NO: 532799 - DNA, 50 bp, Homo sapiens
aacaagccaatcccaggaggaaaaacgatgatatcatcaagttgaatcga

SEQ ID NO: 532800 - DNA, 100 bp, Homo sapiens
ggaaacgctgtcactgtggaaacggtgagaagccctaccactgcaactgggacggctgcggctggaagtttgcgcgctcagacgagctcacgcgccacta

SEQ ID NO: 532801 - DNA, 75 bp, Homo sapiens
ctcatttctcatcaggacattctgagtaccactgttccaggagctctgagtcctttggccattccaaatgctgct

SEQ ID NO: 532802 - DNA, 100 bp, Homo sapiens
tctctcatctcgctcggctgcgggaaatcgggctgaagcgactgagtccgcgatggagctgtcgcctggttgggcccggaaatgggacgtcgcgctttct

SEQ ID NO: 532803 - DNA, 98 bp, Homo sapiens
ggagattatacatctctcatcatttcagcaacaaggaaataaattagtggcagagtaagggtgacttggtggccataaaagtcattgataagaagaga

SEQ ID NO: 532804 - DNA, 110 bp, Homo sapiens
gttcagcttccaaagagatacagggcagaggaaaatgcaagaagactgatggagcaggcttgcaatattaaagagtccaatgtgctgattgctgctaacagtcagggtac

SEQ ID NO: 532805 - DNA, 80 bp, Homo sapiens
accctggagcttgctgtgtacactgcggttggatttctcacgatgtccagtgttatctccatgtctgcccctttcttcct

SEQ ID NO: 532806 - DNA, 100 bp, Homo sapiens
cctcctgaagtgtctttggtccaacgttgttccagggtgttttgaatgctgtatcaaatgcctggggggcattccctatgcctctctgattgccaccatc

SEQ ID NO: 532807 - DNA, 98 bp, Homo sapiens
actgattcttcatccagcaaagagcacacatcatcatctgctattccaggaggtgtggatattatgctaactatatgtcagaaagcatcagcttttct

SEQ ID NO: 532808 - DNA, 101 bp, Homo sapiens
ggacaacaagtactgcgccgactgcgaggccaaaggattccctgtcaattccaattctaatggtggaaatgaactctgtccaaagatcaggattggccaag

SEQ ID NO: 532809 - DNA, 101 bp, Homo sapiens
gtgttcaaacagcactgccaaatagcagaagaataccatgaggtcaaaaaggaaatcaccctgcttgagcaaaggaaaagcctaaagaaactgttccaact

SEQ ID NO: 532810 - DNA, 98 bp, Homo sapiens
tttgtagacttggctgccaaaatcaatcaaggaggcaagtgaggcctatctggttggcctttttgaagacaccaacctgtgtgctatccatgccaaac

SEQ ID NO: 532811 - DNA, 51 bp, Homo sapiens
ctggaacaagacttcaggtcacgctcgcaattctgtggtgttcttggtcac

SEQ ID NO: 532812 - DNA, 76 bp, Homo sapiens
aagtgacctcagcagggcatccagtttcaggtttagctgtgcctcccagtgactataatgacaaggaagctgtaaa

SEQ ID NO: 532813 - DNA, 88 bp, Homo sapiens
tcatggagatgttggtgagcggagacttaaatgccgtccatggagccatgcgtgtgctgacagacttggagctgatgtctgtgctgtc

SEQ ID NO: 532814 - DNA, 83 bp, Homo sapiens
acgttcggccaagggaccaaggtggaaatcaaacgttgactatagtcaatggggccaatggagccaagtgtatggaaacccac

SEQ ID NO: 532815 - DNA, 100 bp, Homo sapiens
gaaaatctgtggcctagatcctacatctacacttggcatctattttgaagttgtcaatcaggagatggcagcagaaaaggccaaagcagcagccggggag

SEQ ID NO: 532816 - DNA, 75 bp, Homo sapiens
gccgcagacacgggacccgcttcgaggccgctttggcgccaaatcctgaggaacaagactgccaatggagactgc

SEQ ID NO: 532817 - DNA, 75 bp, Homo sapiens
ctggatccaaaatttatcacgagtattttggaggagatgttaaagtaacccatcttgcaggacgacattgaagat

SEQ ID NO: 532818 - DNA, 101 bp, Homo sapiens
cggctccatggggctcctggggctcctgagcctgctgcactcggccttcttcggggaccagcccgagcgggaagaagttccgcagcaagccgcagctggcg

SEQ ID NO: 532819 - DNA, 90 bp, Homo sapiens
gaaaatctttgcagggcacctgaactcccaaagccactgaggagaagggcaccgaggaagagaaccaatggcagaggccacatgtgcaag

SEQ ID NO: 532820 - DNA, 73 bp, Homo sapiens
ccagacatgagtatacattcagtatcatggatgaatttcaggaagaatcctgtaagtacaatcccaagtattc

SEQ ID NO: 532821 - DNA, 75 bp, Homo sapiens
attgtctgtactgatagcatctaatgagcacgtgaattgcctctgcttacgttcaggccctgtcctaaacccagc

SEQ ID NO: 532822 - DNA, 82 bp, Homo sapiens
ccctgagtcactgcctgcgcagctccggccgcctggctccccatactagtcgccgattggcggcagtaagcacacaatgaat

SEQ ID NO: 532823 - DNA, 101 bp, Homo sapiens
gtgtacaggcatcacaagatggcctaccctcctgtacttgttccaactcaagtaaacactacacgtgaagagtggtgaaagggaacattgattactgaagt

SEQ ID NO: 532824 - DNA, 82 bp, Homo sapiens
cctttatgaaccagtgtatcccaaggacatccaacgggctcatagagtggtagctgagcttcaggctgggacgtgcttcatt

SEQ ID NO: 532825 - DNA, 74 bp, Homo sapiens
aaactcaaagttgtatggattgtatagagatgaaactgttaaagatggagtcaccttatacctgctacagtcgg

SEQ ID NO: 532826 - DNA, 75 bp, Homo sapiens
ttatatgtgatgccattccagcactggactcatggaggctgagcatttattcagagtggagactgctgcacggac

SEQ ID NO: 532827 - DNA, 100 bp, Homo sapiens
agtagagatgagcagcggggtcgaggcgccctcttacaggacatttgcaaagggaccaagctgaagaaggtggccaaagcattctggatggcaatcgggg

SEQ ID NO: 532828 - DNA, 96 bp, Homo sapiens
cctgtgtgcctggaaaggaattgttttggcctaggatcatccaggctgcgggctgaactaccacaagcgctgtgccttcagcatccccaacaactg

SEQ ID NO: 532829 - DNA, 90 bp, Homo sapiens
aggtcgaggacggtcggactcccgcggcgggaggagcctgttcccctgagatgttgtgaacacaaagatgtttgaggagctcaagagccg

SEQ ID NO: 532830 - DNA, 98 bp, Homo sapiens
gtcctcctgcactgggctcctgtagaggaggctggagattccacccaaatcctcttctccaagaagcacctctgagacgtccctgtaccaggtcctgc

SEQ ID NO: 532831 - DNA, 82 bp, Homo sapiens
cacgaaggcaccgacgtcatcatgctgaccaccaatcagatccgtaaggaagcggggagaggtggtgagagatgacccctgt

SEQ ID NO: 532832 - DNA, 82 bp, Homo sapiens
gcgggggtcagcagcagcggctccgagggcgcggcggacgcagaataccctctaccatctgctttggtcagggtgccgctcg

SEQ ID NO: 532833 - DNA, 82 bp, Homo sapiens
ggcggattaattagcccaagaaacattatattcatgttttgattcccaccatggccatcacccagtttcggttatttaaatt

SEQ ID NO: 532834 - DNA, 98 bp, Homo sapiens
tcagcaaagatggtacaaaagagtctttggaggatgcggctttgatgggaccagaggagcgagagcagcaagaaccacacccagcagcaatgtcagcg

SEQ ID NO: 532835 - DNA, 50 bp, Homo sapiens
cccacttgttcgcggcctatagaactgtctcagcaaacagcagctcctct

SEQ ID NO: 532836 - DNA, 75 bp, Homo sapiens
caagatcggtgagattgccactgggtcccccgtgtcaactgaactgggtgtggccgacgacgatgccctcgctga

SEQ ID NO: 532837 - DNA, 74 bp, Homo sapiens
ttcagataacttctgtgaagctgatgcctatggaccagctctcattgaacactgtcttttagaaaatggattct

SEQ ID NO: 532838 - DNA, 100 bp, Homo sapiens
gcgacggggcgctgcctggcccaggcgcacacggaagtgatgatatcatcaagttgaatcgaaaggaagggaagaagcagaattttccaagactaaatag

SEQ ID NO: 532839 - DNA, 99 bp, Homo sapiens
ctctcttcagtcagattctgagccttcagacttctgtacagcagctgaaagaccagactggctggacagattcgaaggttgtatggttcaaacaaaaaa

SEQ ID NO: 532840 - DNA, 95 bp, Homo sapiens
cggccaagaccagcgcgagggccctgggcaaggcccgacagctctattatcaagtcctaaattttggaatgattgtctcatcggcactaatgatc

SEQ ID NO: 532841 - DNA, 75 bp, Homo sapiens
gaagaattttccaaatgaatttgcaaaacttactgtaggagcccagtttcctccaattgcagcacaagaccttcc

SEQ ID NO: 532842 - DNA, 50 bp, Homo sapiens
tgctgactatgccgagcaagatgagctggttgtcttcttgcctgccctgt

SEQ ID NO: 532843 - DNA, 97 bp, Homo sapiens
agactggtccacggagtgtatgaccacaaacagccatcaaggctttggtgaagcacgtgcagtctaaaggatacccaaatgaacgttttgaacttct

SEQ ID NO: 532844 - DNA, 100 bp, Homo sapiens
aaaacccacagaagttgtattagatgatgacagagaagatctttttgcagctctggattaatcgaattacagctgctagccaggaacatggactgaagta

SEQ ID NO: 532845 - DNA, 100 bp, Homo sapiens
tgaagcacatcgaccggcgacagcagccaggagtcatgagcgacagcggcgagcagaactacggcgagcgggaggagagacttcagcatgcaaaccttca

SEQ ID NO: 532846 - DNA, 75 bp, Homo sapiens
ctgtggctgctcctggctctgcgcaccgacaatgcagatcttcgtgaagactctgactggtaagaccatcaccct

SEQ ID NO: 532847 - DNA, 100 bp, Homo sapiens
aaaaaaccttcaggcggcccatggaagagaagccagattgctccaaggcccgctgtgaagtccagttctctccacgttgtcctgaagattctgttctgat

SEQ ID NO: 532848 - DNA, 83 bp, Homo sapiens
aacgggttgcttcccccgctgcgaggttgtgaccgagattcccgacgagagagactgaggggaagagaggaaggaggggcggg

SEQ ID NO: 532849 - DNA, 82 bp, Homo sapiens
agcattcctgaagaccccagcctgacagatctccccttcctctgacctcctgtattgacctttgatgaatgtgtagcagaag

SEQ ID NO: 532850 - DNA, 83 bp, Homo sapiens
tatacagccaggggatattattcggttgaccagaggttcaaatctgaacatcaatgatgtactagggaactactcattgactc

SEQ ID NO: 532851 - DNA, 82 bp, Homo sapiens
actcagcccagggcactgaggacgcacctgataacagcagcctggagctcctagcagccacaataactttgtagccatcctg

SEQ ID NO: 532852 - DNA, 99 bp, Homo sapiens
gaaaacatcaaagaggtctagcaaaggattccggagtttgaatccacctttgacaattgtccgaaagacgtttgaatcaacagaaaacccagatgactt

SEQ ID NO: 532853 - DNA, 100 bp, Homo sapiens
aacggacgatgtattactaagctggaaaacatggggtttcgagtgggacaaggattgatagaaagggccttaaactctggtgttgagtactactgggacc

SEQ ID NO: 532854 - DNA, 82 bp, Homo sapiens
acacggccagatctgccctccaagatgcccgagtggtaaaagacatggcaacaggaaagtctaagggatatggctttgtctc

SEQ ID NO: 532855 - DNA, 90 bp, Homo sapiens
cactgtgaaacagctttgaccataaagctgacttggaagactttgactccaaggtgcaagttggttgaatctggcgatgtggaacccatg

SEQ ID NO: 532856 - DNA, 83 bp, Homo sapiens
aaatcggcagatgttacagctgctcatgaaccacttggcaaatgcctccggagccagcgtggtggccatagacaacaagatcg

SEQ ID NO: 532857 - DNA, 99 bp, Homo sapiens
ggagcacggcttattgctcatgcagaccatggacccgcacagcggccgctggctcggtgcgcggccgcccgccgagaagcccagtcctcccgcgtgctg

SEQ ID NO: 532858 - DNA, 96 bp, Homo sapiens
cctgagtcaaagaagatgcctcgaactaaacaaattcatcccagaaatctaagagtgcagagcagagcgggcggaggaccccgggcgcgggcgcgg

SEQ ID NO: 532859 - DNA, 73 bp, Homo sapiens
aagctgagcttgccgcacaaaaagctagagagtttaccaaacgagaaccagaagatacgaaaagtgcagattc

SEQ ID NO: 532860 - DNA, 80 bp, Homo sapiens
gcagcatggccgcgatctatgggggtgtagagggaaatgcaccagtgccggagtgacgagtacaactgcagttccggcat

SEQ ID NO: 532861 - DNA, 100 bp, Homo sapiens
agggactcaggcagtacgggaagaacttcttcagaattagaaaggagctgcttcccaataaggaaacaggaacgatcagcgttggagtagatgccaccga

SEQ ID NO: 532862 - DNA, 75 bp, Homo sapiens
aggagatgtactgtgcttggctggaaaaccccaaaagtgtacataaggcatggaggagtgacggcaggaactttc

SEQ ID NO: 532863 - DNA, 100 bp, Homo sapiens
ggtgcccagagatccctggcttctgatcgcccggaagactaagaggtccagagccaaacccgtcactgaccccccagcccaggcgcccagccactcccca

SEQ ID NO: 532864 - DNA, 74 bp, Homo sapiens
gggctgttttccagagctttgccaagttcagcaaatttggagatggactcagaattcatgattgaagaaatgca

SEQ ID NO: 532865 - DNA, 89 bp, Homo sapiens
ttccagttggaattgaagaatattcccaagtccttcacccggtgccggtggtggtgtgcacattgagccccggtatagacagttccccc

SEQ ID NO: 532866 - DNA, 50 bp, Homo sapiens
caccgatttcctctcgccgagcggcggaccaagatcactccatggatgaa

SEQ ID NO: 532867 - DNA, 75 bp, Homo sapiens
actgcagaggtgctggagctggcagggtgtcgacgtgatcgtgaacgccagcagcgtggaagacatagacgcggg

SEQ ID NO: 532868 - DNA, 82 bp, Homo sapiens
cgggcctctggaatttagcgctcgcccagctagccgcagatgatgataattccgaagaaggcttccacactattcattcagg

SEQ ID NO: 532869 - DNA, 101 bp, Homo sapiens
agaggaaataaaaacagaacaggaggtggtagagggcatggatatctctactcgctccaaaggatcaaaatacttgctggatggtggactcagagaccaat

SEQ ID NO: 532870 - DNA, 101 bp, Homo sapiens
gaagaatatgggaaaattttggaagttgttggcagggaactctaatgatccaggacaaagaagttaccctggagtatgtatcaagcctggatttttggtac

SEQ ID NO: 532871 - DNA, 100 bp, Homo sapiens
accaaccagactggcggttcatggagagcaaggagaaggatcgccaggtgctggaggacttcccaacgccaatgttttcagttgcaccaagcttagccac

SEQ ID NO: 532872 - DNA, 100 bp, Homo sapiens
caccaaagaagagaaagacaaggatgaccaggaatgggaaagccccaggtttgcctgcaatgagatttcattctctacatttaaaggacatcctttctga

SEQ ID NO: 532873 - DNA, 153 bp, Homo sapiens
ttcatccctctctggccactatggaattctaatttgaaccatgtttggattgaagccgcctctgtattacttaccaggctgaaggtgatgtggccgccctcaaccgacgcatccagctcgttgaggaggagttggacagggctcaggaacgac

SEQ ID NO: 532874 - DNA, 85 bp, Homo sapiens
agactcctgcgtcctccgacttttcatgggctgaggggaacccatatggagaatgtgtatgacttctacaaaccaaatttggcct

SEQ ID NO: 532875 - DNA, 100 bp, Homo sapiens
agtggccaggctgtgaagcagtgtgcgaagatttccaatcatttctaaatatcccttttactattcagcgactatgtgaattgttaacagatccaaggag

SEQ ID NO: 532876 - DNA, 101 bp, Homo sapiens
ggagagtctgccggcggagaatataagcactgtcttggggtgaatggatgtagccttcatgtaaaaacactgtgtggagcagctttatctgcattcaaacc

SEQ ID NO: 532877 - DNA, 75 bp, Homo sapiens
cgacccggtcacacaaagcttcagcatgtcatgtggttgggttcaatatacggagagtgccctgtgccaaagcca

SEQ ID NO: 532878 - DNA, 90 bp, Homo sapiens
ctcttctggttgtgagtgctgcctgattcgtgagttgtttgttgctcagtggatatcaaagtattgcagagtgccttagcagccatccga

SEQ ID NO: 532879 - DNA, 82 bp, Homo sapiens
gaagggctggagttgttttgaatgggcgcccgtaagagaggtgggcaacccgcggcgccatggctcacgtcggctcccgcaa

SEQ ID NO: 532880 - DNA, 98 bp, Homo sapiens
tcgaaggcccgcggcgccccgtgctgcagagtggccaaatcaatgaaggtccctgtatatgagaccccagctggatggagattcttctcaaatctgat

SEQ ID NO: 532881 - DNA, 75 bp, Homo sapiens
ggtagtcggacctttcccgctggcgcgcagcctcagctaggttcttgctggtgtgaaatgactgagtacaaactg

SEQ ID NO: 532882 - DNA, 100 bp, Homo sapiens
tttttcatcctttgatcccgcggtcccttcctgtaccttgtcctcagtttgatgaaggccggaacaactttgaaggggaggtcaccaaggagaacctgct

SEQ ID NO: 532883 - DNA, 90 bp, Homo sapiens
tgtgtaaaacagcaattggagctctaaaattaaacatcggggacctacaggttacaaaggcggcttacagggagaacacagttggcctcc

SEQ ID NO: 532884 - DNA, 73 bp, Homo sapiens
gcggagcagacacagactatgcagatgggagggttttggccaaattgggcgagggcacaaaataaccacttac

SEQ ID NO: 532885 - DNA, 100 bp, Homo sapiens
aaaaattcaagaagttgaaaaacgcttttcacgtcacctggagagatgcacagcttttgccttatgaacagtcctctcttttggaactcataaagactga

SEQ ID NO: 532886 - DNA, 100 bp, Homo sapiens
ccatcacccaccaacaacaccacaataatccacagccaaggaatctggtggacagtaacaaactttggtgaaatttcaggaaccatagccattgaaatgg

SEQ ID NO: 532887 - DNA, 98 bp, Homo sapiens
aaaaaagtaaaacttgctgctgatgaagatgatgacgatgatgatgaagaggatgatgatgaagattgctctaggtcgtaaccagcctttgaaaaagg

SEQ ID NO: 532888 - DNA, 76 bp, Homo sapiens
ttcatggaagatatgatgccaaagaataacaagcctttgtattcatttgaagataatgcagactatgtttatgatg

SEQ ID NO: 532889 - DNA, 100 bp, Homo sapiens
gatgaagaagaagaggaagcaaaggaggctgaagatgaccgcacctcgagcaggagtggggatgccacgtctgcccccagcgcccggccctctgtccacc

SEQ ID NO: 532890 - DNA, 99 bp, Homo sapiens
gaccatgtttgtagatttattggctgtgggaggaatgatcgattcaactatgtggtcatgcagttgcaggttaatgactccagagagtaagatcagatt

SEQ ID NO: 532891 - DNA, 101 bp, Homo sapiens
agggcctctcggcccgtgggcttctccccgagtctccccgagtcggttggcattaagagaaagggctattgcaagacacgaagtccgagaaattgagcagc

SEQ ID NO: 532892 - DNA, 82 bp, Homo sapiens
ttaggtggcttctgggacagaattacggttctctaagtatttgcttgcagcctcgaagcggaggatccctgtgtcccagccg

SEQ ID NO: 532893 - DNA, 98 bp, Homo sapiens
tccacagagccaggggcaggaccctggccgcgtttcccgcaggaatgatttccctgatgaaaagatccctaccctaagggaagctgttgcagagtgcc

SEQ ID NO: 532894 - DNA, 82 bp, Homo sapiens
caggccaagtgcaggggccagaagacaaagtcaattccattgccggtggtggtgtgcacattgagccccggtatagacagtt

SEQ ID NO: 532895 - DNA, 82 bp, Homo sapiens
gctcttctccgccgcggcactgatccccacagtggtcccaggctgcacccatggcagaaggaggagggcagaatcatcacga

SEQ ID NO: 532896 - DNA, 97 bp, Homo sapiens
agggatgataattgggcctccaagagatctcttatacagacgcaccaaagccctcattgactatgagaactcaaacaaagctctggataaggcccgg

SEQ ID NO: 532897 - DNA, 100 bp, Homo sapiens
cgcggccggagctgtgggctgaagacaaaactgctaaggccaaggtccaacagactcctgatggatcccagcagagtccagatggcacacagcttccgtc

SEQ ID NO: 532898 - DNA, 82 bp, Homo sapiens
tgagacggtgtcccgccgaaagagctgaagaagcaggtggagagtgccgagctgaagaaccagcggctcaaggaggttttcc

SEQ ID NO: 532899 - DNA, 90 bp, Homo sapiens
agagaactcaaggtctggcagggagaaaggagcaagagaagatggcgaattagaagatggtgaaatagacgatgcaggatttgaagaaat

SEQ ID NO: 532900 - DNA, 98 bp, Homo sapiens
ggattgctgcaaggctgagggacgagaacgagctcagccagcagatctcctgaaggttctagattttcacaacttgcctgatggaataacaaagacaa

SEQ ID NO: 532901 - DNA, 100 bp, Homo sapiens
ctctcagtaaaattgcatgataaagttcataccgtagtagcatcaaacaatgggtcagtgttctcggcttgagtttgaagaaacagaagaacctgatttt

SEQ ID NO: 532902 - DNA, 82 bp, Homo sapiens
atgggacttgggattcagctccagctgagattgagagagcagaagattacttggccttggaaaaccattgcagagtgaatgg

SEQ ID NO: 532903 - DNA, 100 bp, Homo sapiens
acctcagcgctgttgcaagggatcacagagaccatattctacggggctttcagcaaatcaaagccagatgtgaaggagtccaggaaggatgtgctccctg

SEQ ID NO: 532904 - DNA, 98 bp, Homo sapiens
tctcgctccgtggccttagctgtgctcgcgctactctctctttctggcctggaggctatccagcaggtggggctggtgtccgagcacttctcgcaggc

SEQ ID NO: 532905 - DNA, 90 bp, Homo sapiens
acgggacccgcttcgaggccgctttggcgccaaatcctgagactttttaaaactgtggacttaaatgttctgcaaagtcttacacaaaag

SEQ ID NO: 532906 - DNA, 50 bp, Homo sapiens
ctttccttctggaacaccagcagcttgtgacatcacgggaggactgtacc

SEQ ID NO: 532907 - DNA, 96 bp, Homo sapiens
tcaaggcggcgcggcggccactgggcgcagcacccagaaaccaaggtgtatgttggtaacctgggaactggcgctggcaaaggagagttagaaagg

SEQ ID NO: 532908 - DNA, 83 bp, Homo sapiens
cgacgtcttgcctgtgtcccacttgttcgcggcctataggttgctcgtgggggccccgcgggcagaagcgcttccactgcaga

SEQ ID NO: 532909 - DNA, 82 bp, Homo sapiens
agaattcggccatgagccgctacatactcatcatggggctcctgtacaaggttagctttatacgtctacgaatatttactgc

SEQ ID NO: 532910 - DNA, 100 bp, Homo sapiens
ggtacatggtggtgaatgtcagtagcctctcactgaatgagcctgaagacaaggatgtgactagcgtccagcagaacggctccatctacatccacgttta

SEQ ID NO: 532911 - DNA, 100 bp, Homo sapiens
gtgcctcatgcctgtttcaatattgggttttggagacattattgtaccagtcccagaaatcctggatagaaagcactttgaccaagagggaatgtgtata

SEQ ID NO: 532912 - DNA, 83 bp, Homo sapiens
cgcctagagaagaggctgtgcttcggcgctccggctcctcagagagcctcggctagcagcctcccgcgacgatgcccctcaac

SEQ ID NO: 532913 - DNA, 82 bp, Homo sapiens
tcggcagtccacccaccgccgccgcctcccagaggctgtggccaggccagctgggctcggggagcgccagcctgagaggagc

SEQ ID NO: 532914 - DNA, 98 bp, Homo sapiens
ccaggagcctgccccgccctggggacgaagagctgcagctcctcctgtgcggagattatggagaagtctggcgaggaaggaatgcctgatcttgccca

SEQ ID NO: 532915 - DNA, 98 bp, Homo sapiens
ggcgtctcctcccgcccagcagttcctccacgcaggggctccggaatcgcccgaccgcacacgttgccaccctgagaagctgcacacatacatgtaag

SEQ ID NO: 532916 - DNA, 100 bp, Homo sapiens
gaaaatggagcccttcaccaatggttaacacagaaatctgcctcctgggccatgccgcttctaaggcctgtttcttctcatgagccccagcacaagacag

SEQ ID NO: 532917 - DNA, 98 bp, Homo sapiens
tggaaccagaggaagaaaatggcagagaatacaaatttgatgtttcgtcagagttactagagatcccagatgcagtgactggttactacctgaaccgt

SEQ ID NO: 532918 - DNA, 82 bp, Homo sapiens
tgaccaagcgcctctactacctctggatgtatgctggctatgagtttgacatctgcttcacctcagtgcagaagagagcgat

SEQ ID NO: 532919 - DNA, 90 bp, Homo sapiens
tgcggcaccggcgagccagccacggaaaagaggcgcagggagcaagaaaataaatatttagaagaactagctgagttactgtctgccaac

SEQ ID NO: 532920 - DNA, 83 bp, Homo sapiens
ggtggggaaaatggcggtgtctacagtgttctcgacttcgtcgctggttcgatacaagaggctgttttcctagcgtggcttgc

SEQ ID NO: 532921 - DNA, 100 bp, Homo sapiens
cgggagagcaagccgggcggcctgccccgccggagcagcatcatcaaggagtgctcccaccccagcccgttgctgcccagctattggaacactgtataac

SEQ ID NO: 532922 - DNA, 101 bp, Homo sapiens
gcccaaccagtcccagcgctgtcgtgctcctctactcggaaatgcttccagactgcacacttttacttagaggacagtacatcccctagagttatatccac

SEQ ID NO: 532923 - DNA, 104 bp, Homo sapiens
taacaactgtcgtgactccagagaagccgatccccatttttattgaaagatgtattgagtacattgaagccacaggtggagccgccaccaaaatgcagattttc

SEQ ID NO: 532924 - DNA, 84 bp, Homo sapiens
gccatgccggcccggcggctgctgctgctgctgacgctgctgctgcccggcctcgggagtcccctttacttggtaaatcacggc

SEQ ID NO: 532925 - DNA, 90 bp, Homo sapiens
ctcctggagaccatgcatctgaccggatgaaacaggcgcctatttaatcgacagagaccccacctactttgggcctgtgctgaactacct

SEQ ID NO: 532926 - DNA, 100 bp, Homo sapiens
cagaatactctccagctagaacaagaagtgagaaaccaagatagattcatctcgacactgaaattacagattcatgatgttgctatcaaaagttgagaaa

SEQ ID NO: 532927 - DNA, 97 bp, Homo sapiens
ctgactgttgtcattctggaggcaaagaacctgaagaagatggatgtgggtggcttatccggtgatttcctaaaaactttggaagacccagatttga

SEQ ID NO: 532928 - DNA, 82 bp, Homo sapiens
gaaaagggtcctcctgctcacagtgtgaataacagtacgagctcaactggaggcagtcctgtgcggaaatctgaagaaaaaa

SEQ ID NO: 532929 - DNA, 100 bp, Homo sapiens
gttcagaagtttgcagagataaatggtgggcaatgggcactccaatgaggcagccttgatcctccacagaaaagggtttgattgtcggttctctagcaaa

SEQ ID NO: 532930 - DNA, 84 bp, Homo sapiens
cctcctgagtggctgggactacagctatcatggtgaacttacttcagattgtgcgggaccactgggttcatgttcttgtcccta

SEQ ID NO: 532931 - DNA, 96 bp, Homo sapiens
tatcctttctgaggctcttgttgaggatcgacgagaacgtgctaggagcccagctggacgttgaggccgcccattcagagatcctcaagtacttcc

SEQ ID NO: 532932 - DNA, 74 bp, Homo sapiens
ggaggaggtgaacaaggaggaggtgaatcaacggaatgtaccaggtattgacagtgcatacctggccatggata

SEQ ID NO: 532933 - DNA, 50 bp, Homo sapiens
cgccctcaaggccatgatcaaaacctcctggggagtttgcttcacctacg

SEQ ID NO: 532934 - DNA, 80 bp, Homo sapiens
gaattgccttgaaaaagcagtggcagcactggatggggctaagtactctcattgctatggacagtgctatcaccctgtgg

SEQ ID NO: 532935 - DNA, 100 bp, Homo sapiens
gcctggcacaccgaggacatggacctgtacagcatcaactacctgcactttggggagcctaagtcctgatcctcgttcctagctgcctgccagcgtcctc

SEQ ID NO: 532936 - DNA, 82 bp, Homo sapiens
ccaagatgagcagggcccttgcggagttccgcgtccgaggtgtgaaggtctcctctgagcctccggcctccataagacccaa

SEQ ID NO: 532937 - DNA, 101 bp, Homo sapiens
ctctctgtccccggccgccatggagcagccgccggcgcctaagaggagcggcctattgccaattcatggacatgctcttccctggctgcattagtttgaag

SEQ ID NO: 532938 - DNA, 90 bp, Homo sapiens
tggggttggagatcagtgtgacaattgccccttggaacacaatccggatcagatacctggataatgtggtcaacaagcagagtgtctctc

SEQ ID NO: 532939 - DNA, 100 bp, Homo sapiens
gataatgaagaattattttgcaccactggatgttgtttactggaaaatgtttataggaggccttagctgggacactacaaagaaagatctgaaggactac

SEQ ID NO: 532940 - DNA, 100 bp, Homo sapiens
agcttcggagaatggagtcttccatcaatcatatctcacaggttgtaaagctctctgaaatagtgaccttagcgaagcaagcacatgtggatgtgaaatt

SEQ ID NO: 532941 - DNA, 76 bp, Homo sapiens
cagattcgcagtggtcgcttcttctccttggtaattttaaccaatcagatgacaacaaagattgatagaaatcagg

SEQ ID NO: 532942 - DNA, 98 bp, Homo sapiens
agctggggacgcgtcctcagacgcagcgtctagtccctggccatagctccgccgctgcccgaagctgagtatctatggtgacttggagtttatgaatg

SEQ ID NO: 532943 - DNA, 75 bp, Homo sapiens
atctttgacgaagctcacaacgtggtcccagcatttgagggtgatgatggattctgtgtgtttgagagcaacgcc

SEQ ID NO: 532944 - DNA, 74 bp, Homo sapiens
catagcattcgcctactccgtgaagaagagcccacagaacgggagaaagtggagctggcagccgagtgctgccg

SEQ ID NO: 532945 - DNA, 101 bp, Homo sapiens
gcacacatggttaaggaacaggaggaaaccattcagagcaacacagtcactcctggcggcaaaccaaacaaaaccagagtcatctggggaaaagtaactcg

SEQ ID NO: 532946 - DNA, 100 bp, Homo sapiens
tagacctgaaaatttcttccaaggttgatgcatctctctcagaggccttggacaagattcgctatgagagcctgacagacccttcgaagttggacagtgg

SEQ ID NO: 532947 - DNA, 103 bp, Homo sapiens
atgcatttaagaactttccttttctagaagagctatatttgtagagcaattgaattattggaaaaactacaaaggagtggagaagtaccaccacagaaacttc

SEQ ID NO: 532948 - DNA, 100 bp, Homo sapiens
ggatgaggctctgcggctggtccaggccttccagtacacagacgagcatggggaaggtctccagaaatgctttgggttcatctttcattgctgcaaggaa

SEQ ID NO: 532949 - DNA, 98 bp, Homo sapiens
gcgcggcgggactgcggcccgtggcggcgtgcgcggggacctgcgctgactaggtccggggaaggcttcaacggaccacaccaaaatgccatctcaaa

SEQ ID NO: 532950 - DNA, 100 bp, Homo sapiens
ctgcagagctcaggggagctgctccacatcaccgacatgaagggaacaggcatcatggactgtgcgcccaaggatcgagcggtccacggaccaggtcatc

SEQ ID NO: 532951 - DNA, 83 bp, Homo sapiens
cagcgatggaagaggatcaggagctggagagacaatgcagatcttcgtgaagactctgactggtaagaccatcaccctcgagg

SEQ ID NO: 532952 - DNA, 75 bp, Homo sapiens
ggcttccgaggagctgtacgaggaatactcccccagttgcaagaggcgcaggaccgtggaagacttcaacaaatt

SEQ ID NO: 532953 - DNA, 90 bp, Homo sapiens
caaagatgataccaggcatataagatttgatgataggcagcttaggctagatgggaacaagctgccaataatgtctgcaaaaagtgaatt

SEQ ID NO: 532954 - DNA, 75 bp, Homo sapiens
aaaattgtttgcagaaggatgaaaaggctttattgccaaacttctgcgctcctcagaccaccggcaggtgaacag

SEQ ID NO: 532955 - DNA, 50 bp, Homo sapiens
caccgttccgcggacgtgctcggatgaccgagtgggagacagcagcacca

SEQ ID NO: 532956 - DNA, 151 bp, Homo sapiens
gggagagcggatctcaggcaacctggatgctcctgagggcggcttcgatgccatcctgcagacagctgtgtgcacgtgcccggggatagaacccgtgtgcgtggacctgggtgactgggaggccaccgagcgggcgctgggcagcgtgggc

SEQ ID NO: 532957 - DNA, 76 bp, Homo sapiens
cttgaggaagcaaagagaggattgcttttgcttaaggaagctgtgaagctgtggtctaccaatctagacaactcag

SEQ ID NO: 532958 - DNA, 74 bp, Homo sapiens
ttggcgatagttccctttctagaaagcttcccaagctcttccttcagtcccacgactacagtctgtattccttg

SEQ ID NO: 532959 - DNA, 90 bp, Homo sapiens
gaaggtctctggagacatcttcagcagtgatcagggccaaagcggtcagtgagaaggaagtggactctggaaacgacatttatggcaacc

SEQ ID NO: 532960 - DNA, 100 bp, Homo sapiens
caggaggccgtcaagaagggctcgaccgcggactctgaagacctactgggtgagcaaaggcagtgcctttagtaccagcatctccaagcaagagacagag

SEQ ID NO: 532961 - DNA, 82 bp, Homo sapiens
gggcgagcggctgtgtggatgtcggcgaagccgcgggcgagtcctattttgtaacggattatgatccaaccattgaagattc

SEQ ID NO: 532962 - DNA, 82 bp, Homo sapiens
actttgaaggtggaattctcatcaacagttgtggaatatgaagccaagtacaagaagctggagaagcgatgagaaacttatt

SEQ ID NO: 532963 - DNA, 83 bp, Homo sapiens
atgaatccttctagagacgtccacgagtgcctggtgaagaatgtgatgggatcactagcatgtctgcggagagcggccctggg

SEQ ID NO: 532964 - DNA, 75 bp, Homo sapiens
ccggcgtggtcaacatccctgccgcagagacaacagtgattgactacgtgaagccctcggatctcaagaaggaca

SEQ ID NO: 532965 - DNA, 90 bp, Homo sapiens
tcaaggacattctgaaagcttcccttgcacatgtggctggctgtgaggtcgtcgtcccgcagacacacaatccagaagtcactttcctcg

SEQ ID NO: 532966 - DNA, 82 bp, Homo sapiens
cgaagctggccgagcaggctgagcgatacgacggtgctggttgccgaggagaacgtggacttccgcatccacgtggagaacc

SEQ ID NO: 532967 - DNA, 98 bp, Homo sapiens
agctccatattgcagatgaagtagagtttactgtggttcctgataacccctttaagcttcacttgattgaggagaaagtgacaggtccaacagcaaca

SEQ ID NO: 532968 - DNA, 98 bp, Homo sapiens
ccaagcttaacttttccaatgtggaatcctgggccttcattgatggaacagattaaaagggccaataaactgtttaccaatgattgtatatttctgaa

SEQ ID NO: 532969 - DNA, 98 bp, Homo sapiens
tgaaagatggcattggacttggcacagggatggtcaggaggtcctgagtcactttgagaagagtggagcctttcaggctggcatggagagcttaaggg

SEQ ID NO: 532970 - DNA, 100 bp, Homo sapiens
ccagcttgcccacgcaccccactcggcgtcgcgcggcgtgccctgcttgtcacaggtgctggagaatctggtaaaagcaccattgtgaagcagatgagga

SEQ ID NO: 532971 - DNA, 51 bp, Homo sapiens
tggcatccacgcttaaacaggtgaaacatgaatgtcaaaactggaccaatg

SEQ ID NO: 532972 - DNA, 74 bp, Homo sapiens
agaagaaaagggaaagcagcatgttggccaggatatattggttgttcaaacagatgaaactgcaaggaaaccag

SEQ ID NO: 532973 - DNA, 51 bp, Homo sapiens
tgttactccattgctgaggagtggagcatattaatgaaaagtgccataaac

SEQ ID NO: 532974 - DNA, 100 bp, Homo sapiens
gctacttctcggcgctgccgtctctggaggagtactggcaacaggtgcagattcactttataggaacagcttcagcttcagtgatgaaaaactgaattct

SEQ ID NO: 532975 - DNA, 100 bp, Homo sapiens
agataaggtggataaatgctacaaatgtgtggtaaagcagggacataccttatttgttcctacagatgcagaggttgtggtaggaaccacaaggccagag

SEQ ID NO: 532976 - DNA, 100 bp, Homo sapiens
gtcttagccctcagctgttgttgttgacattttgctaaaggctgtgggagacactcctattatgaaaacaaagaagtgggcagtagagcgaacacgaacc

SEQ ID NO: 532977 - DNA, 114 bp, Homo sapiens
ccaggccatcaagggtttccgcaatgcccctgttccccagtgaccttgattcaccaacatccagcctgcgtcgcagcccatcattgcaatcaagtggagacagagtcggtggga

SEQ ID NO: 532978 - DNA, 75 bp, Homo sapiens
actcgctcaactggagggagttcagcttcgttcagccatcaagttttatcgtagggctatgcaacttgtacctga

SEQ ID NO: 532979 - DNA, 75 bp, Homo sapiens
gacggaatgcctccatacatggaaaggaaaacctcttcagcgcaaggtgaaaccacctaagaagcaagaggaaaa

SEQ ID NO: 532980 - DNA, 101 bp, Homo sapiens
tgtgcagttgtgcactgctcgacctgagagacccatggcattcctcagggaatactttgagaggttggagaaggtagtggaggacatgctagaggacgagg

SEQ ID NO: 532981 - DNA, 101 bp, Homo sapiens
cctcccacaagggcatcctgctggaaaccgagctgacagaccccgtgcggctgacacagctgtatgagcaggcccggtgggacctgctgctggaggagatt

SEQ ID NO: 532982 - DNA, 100 bp, Homo sapiens
ggagacccgggagcaggagctgggcctaggtctgcgccctgcttaagagttggacagtggaggaccttcagaagaggctcttggccctggaccccatgat

SEQ ID NO: 532983 - DNA, 83 bp, Homo sapiens
gcccgctctgcgagatgcgcagtgggaattgaatgatctggcacgggaccctccagcacagtgttcagcaggtcctgttggag

SEQ ID NO: 532984 - DNA, 82 bp, Homo sapiens
ggtcaggctggacgtgcacgcagcccggcgggaggataaagaccaccacggaacggagctttgactgtaagatctgtgggaa

SEQ ID NO: 532985 - DNA, 100 bp, Homo sapiens
tagcatgctttctccagctgccctatcacctgccagctcatcacaaagtacatcaggaacgtctctatcaagaatacaatttcagcaaggctgagggcca

SEQ ID NO: 532986 - DNA, 90 bp, Homo sapiens
tgcactttgggttcaaggcgacattctgggaggtgatcagtgatgaacatggcatcgaccccaccggcacctaccacggggacagcgacc

SEQ ID NO: 532987 - DNA, 100 bp, Homo sapiens
gccgagacggagccggacccgccgcctcccgggaaggagtcaagactgagaacaacgatcatattaatttgaaggtggcggggcaggatggttctgtggt

SEQ ID NO: 532988 - DNA, 100 bp, Homo sapiens
cagcaaggaggaagagagttctggcctcaagaggaaagtctgattgaagaggaaactgggcagaagaagatttaaatccattgggccagaaggaatgacc

SEQ ID NO: 532989 - DNA, 82 bp, Homo sapiens
attgaggactttccttacctgtttttccagctcacccactgccagcagagttgggacccctgattttagcaggatggcccaa

SEQ ID NO: 532990 - DNA, 82 bp, Homo sapiens
gagtgctctgttcacggctccatcgctgttaatctgttagtcaagtgtattggtgaagaaaccaagtatgaaagcatcagac

SEQ ID NO: 532991 - DNA, 75 bp, Homo sapiens
cagatcgatctaagatggcgactgtcgaaccgggcagctgcaatgactctccgcacggtattattgtcattgcaa

SEQ ID NO: 532992 - DNA, 50 bp, Homo sapiens
acccagacaacaggatcgtctcgtccaagtttcaccagtgatcattaaag

SEQ ID NO: 532993 - DNA, 75 bp, Homo sapiens
gcggatgctgctcaaggccaagatggacgccgagcaggatcccagtcctaggcctacttacaagcctccagtctc

SEQ ID NO: 532994 - DNA, 75 bp, Homo sapiens
tggacaggcttgtccatctgtaacttcattaagcgatgaaatctacattgctccttcaggagtgcaaaaggaacg

SEQ ID NO: 532995 - DNA, 82 bp, Homo sapiens
aagagcttcaagaacaagggccgcgatgtggaagtcaaaatgcagatcttcgtgaaaacccttaccggcaagaccatcaccc

SEQ ID NO: 532996 - DNA, 101 bp, Homo sapiens
ttggatatgaaactggaagacatcctggacagaatttggaaaatatgccatttactgccagcgttgtgtagaaagaacgcaacaaaatggtgacagagaag

SEQ ID NO: 532997 - DNA, 96 bp, Homo sapiens
ggtcggccggggccgcttcaccacttacgaaatcagggtcaagaatgctgagatgtataaactgtcttcagagcaattccatgaggcagcctcaaa

SEQ ID NO: 532998 - DNA, 80 bp, Homo sapiens
acttggcagatcactctcttagcaggcaacatcttcgtggtcagtctctctgtggccgatatgctggtggccatctaccc

SEQ ID NO: 532999 - DNA, 82 bp, Homo sapiens
atggcgcctgtgggcacagacaaggagctcagtgacctcctggacttcagcatgggagcaccccatcggagacaagagcttc

SEQ ID NO: 533000 - DNA, 100 bp, Homo sapiens
tgtcacttccagaagaaattggacaccttagacatttgatggaacttgacctgagggcactcgctttgctcctgtcagtacacactcccaaacagttaaa

SEQ ID NO: 533001 - DNA, 136 bp, Homo sapiens
aagtggaggcccaaggacagtgaggagctgggtggtcccagcctggagctgtgccagcctgacatggctgacaaagatgttcttcctcttccccgacccacatttcaagcggacaaagcacaagtggcgaatcatc

SEQ ID NO: 533002 - DNA, 101 bp, Homo sapiens
atttgttaaggattccaagtaactcttatttgaatcaagactgtctggggcagacctgagaatctgcattttaagaagatgattctcaggcatcccgaaga

SEQ ID NO: 533003 - DNA, 100 bp, Homo sapiens
atccaggacttgtaaacaaatcttgttatgaagatgattcagaatctgataattcagataacaacacaatctttgtgcaaggacttggggagggtgtgtc

SEQ ID NO: 533004 - DNA, 96 bp, Homo sapiens
cggttgccaagcgctcggcgcttggcgctggcgctggccaaggcgggccgagaactactggtggcgtggccagaacacacggacgctgtgtgtggg

SEQ ID NO: 533005 - DNA, 75 bp, Homo sapiens
atcagcctgagcctactgatcggcgtagtcaaggctgaatcttctccatttgttgagcgacttctgaaaaagggc

SEQ ID NO: 533006 - DNA, 100 bp, Homo sapiens
atcaagctgcaggaggaggagagagaaaggagagacaattatgttcctgaggaagataaggctttcaagcagaaacaaaaagaggagcagaagaaactcg

SEQ ID NO: 533007 - DNA, 75 bp, Homo sapiens
gcatcatggtgaggctgctgcctcggttgtaccatgaagatcacccacagggtcagtatagaccttctgatttgc

SEQ ID NO: 533008 - DNA, 100 bp, Homo sapiens
atgccaaccagtgggcagatatttttcaggcctctggtgccaaatacattgtcttaacttccaaacatcatgaaggtgctggagaatctggtaaaagcac

SEQ ID NO: 533009 - DNA, 101 bp, Homo sapiens
accagtgccgctgggcacactggcttcacgccggctccgcctcaccagcaagcgcattcccaggatcagctcagctactatttaataaaacaaaatctgta

SEQ ID NO: 533010 - DNA, 128 bp, Homo sapiens
tcgtgtgcgctcagtgcttccagcagttcccagaaggactcttctatgaggaacagcatatgccatatatgagctggctgtggcttcatttcccaagaagcaggagtgacttcagtcatcccagcaat

SEQ ID NO: 533011 - DNA, 90 bp, Homo sapiens
acaggccctggcctgccttgggccggggatttaacacagacctcctgccccccgaggtctgcagtctcctgaacccagcagccatctacg

SEQ ID NO: 533012 - DNA, 100 bp, Homo sapiens
aggagggctctgatccccccctgccggggagggcccagcgcatccgacaggacgtggcccagtggaacatcgggagcctccggaccatcctggacatggt

SEQ ID NO: 533013 - DNA, 131 bp, Homo sapiens
ctggattcacgggtagagattggcttcgggctgagctagcagtgagcaccttttggcccaatgaatatcaggcctactcctccgtcccggtcagcaacatgaactcaggcctgggctccatgaactccatg

SEQ ID NO: 533014 - DNA, 96 bp, Homo sapiens
gaagaataaggagaaggataagtcgaaggggaaggcgcctgaagaggacgaagtttctccagagccaaaaacagaaatgaagaccctgagatgggc

SEQ ID NO: 533015 - DNA, 97 bp, Homo sapiens
cgacggactctccattccagaaccatggcccaatttgtccgtaaccttgtggagaagaccccggcgctggtgaacgcatctgcaaacatagagaatt

SEQ ID NO: 533016 - DNA, 75 bp, Homo sapiens
taaaaggaaaccacataccaatggaggagattcatatgggacattgtgtaaatctgactgatggggctgtcgaag

SEQ ID NO: 533017 - DNA, 140 bp, Homo sapiens
gcgagagcgagtgcctgagcaacatccgcgagttcctgcgcggctgcggggcttccctgcggctggagaaatacaggtatcaggatgaagatacacctcctcaagagcatatttccccacaaatcacaaatgaagtgata

SEQ ID NO: 533018 - DNA, 75 bp, Homo sapiens
cttatatttccctgattacagcatagctgggcctgaactgatatctgaagagagaagtggagacagcgaccagac

SEQ ID NO: 533019 - DNA, 100 bp, Homo sapiens
gtgaccaagcgggccatcagcacccccgagagttcatctgcagaagccagcggacgcctctgttcaacttgtgggttacctggctcatgagaccttgccg

SEQ ID NO: 533020 - DNA, 51 bp, Homo sapiens
cccagcagctgctccacccggcacagggacacaactcagatgggaagttca

SEQ ID NO: 533021 - DNA, 100 bp, Homo sapiens
tcggtcgaggacattattttcacacttaagagttggacagtggaggaccttcagaagaggctcttggccctggaccccatgatggagcaggagattgaag

SEQ ID NO: 533022 - DNA, 75 bp, Homo sapiens
tacatgagtggctatcatactggctattatatggttgatactgcctctccaagcccaatggaaacatctggatgt

SEQ ID NO: 533023 - DNA, 104 bp, Homo sapiens
ctgatgaagaagaagatgatgcagagtccaggggagaagatgtcaaccggacactagaaggtggaaggaaacctcttcattatgcagcagattgtgggcagctt

SEQ ID NO: 533024 - DNA, 100 bp, Homo sapiens
tagaagcctgtcgaaaaatgggggtgcctgagtgtactaatggtcacttgatgtgcgctggctgttttatccacctactagcagatgcccggctgaagga

SEQ ID NO: 533025 - DNA, 100 bp, Homo sapiens
catcagccaactgaaagaccagcaggatgtcttctgcttccgatataagatccaggccaaagggtcccctcctaaccgcaagcgtcctgctaacgagaag

SEQ ID NO: 533026 - DNA, 100 bp, Homo sapiens
ttcagtgtattcgttctgtgcctgaactcaaagatgcccttaaaagagactgacttgcataccaaatgtgtggtggatgtggatgcaaacaaggttattc

SEQ ID NO: 533027 - DNA, 78 bp, Homo sapiens
gcagatggcggatgccctgcagtacctgcagaaggtctctggagacatcttcagcagttatgcaaagggtgacctgga

SEQ ID NO: 533028 - DNA, 82 bp, Homo sapiens
cagaagtccagagctgaggactgcctgtttgcagtttgatgaaggccggaacaactttgaaggggaggtcaccaaggagaac

SEQ ID NO: 533029 - DNA, 75 bp, Homo sapiens
gcgggatggaggcggcggccgcccagctcaacattggcaatgtgctccctgtgggcaccatgcctgagggtacaa

SEQ ID NO: 533030 - DNA, 100 bp, Homo sapiens
gcgtgcttgttggagaccccaatccgcatgagcgtcctttcggtcactgaactgatgcaggagcagtcatacctgaagtctgaattgggcctgggacttg

SEQ ID NO: 533031 - DNA, 83 bp, Homo sapiens
ctcagttggaagcagccgatccagcctgcggagcctgtggggcagatcctacgggacaccttctccgagtcctgtatccggat

SEQ ID NO: 533032 - DNA, 75 bp, Homo sapiens
cctgtttcgacagcgaacatgtcgcggcctgtcaggccgtatctgaggaacagcagcctgcactcaagggcaaaa

SEQ ID NO: 533033 - DNA, 100 bp, Homo sapiens
catagcaaggcgtgtacaagatccattagctgagctagtgaaaattgagccaaagcacattggagttggaatgtatcagatggagcctcgctctgtcgcc

SEQ ID NO: 533034 - DNA, 75 bp, Homo sapiens
aacaaagaccagccagctaaccctacagaaggatgatgactttgagttcactggcagccacctgacagtaaggaa

SEQ ID NO: 533035 - DNA, 82 bp, Homo sapiens
cacctttcggcttctgagacggcggcagcagcggcattcaggagcatgagaagaggtgttggagtgttgactttaatttgat

SEQ ID NO: 533036 - DNA, 100 bp, Homo sapiens
ctgggaggtggaccggagctcgtccagctgcgtgcctaggaacaagttccagttccagtctaccacccaacacctagccagactcggctagcaactcagc

SEQ ID NO: 533037 - DNA, 88 bp, Homo sapiens
agatggcggatgccctgcagtacctgcagaaggtctctggagacatcttcagcaggcactttgaggtgaatgaccggaaggaccccca

SEQ ID NO: 533038 - DNA, 100 bp, Homo sapiens
caaatcctatgaggacctgaaggcggagcttggcaactctagggactggagccagatcactgctgctgaagtgcagtggcgcaatctcggctcactgcaa

SEQ ID NO: 533039 - DNA, 90 bp, Homo sapiens
caaggagccctacctggatgagcagagagctgtgaaatatctttggcttgcagccaacaatgggatttgtttagtgaatgaccctaggcc

SEQ ID NO: 533040 - DNA, 100 bp, Homo sapiens
cctcaggcagctatatgaagaggagtcccagccatcccctttggctctgctggcagcaacttgcagcagaattgagtcacccaatgagaacagcaacaac

SEQ ID NO: 533041 - DNA, 100 bp, Homo sapiens
cacttcttcagaaagcctccggaatctaaaaagccctcagtaccagagacagaagcagatggattcgtccttttaggatttgtacacacagatatgacga

SEQ ID NO: 533042 - DNA, 75 bp, Homo sapiens
aggagcagttgctagtggccatttacaggaatcagccacttcagttcagatcctgtttgaccaaactcagagatc

SEQ ID NO: 533043 - DNA, 51 bp, Homo sapiens
aaagcttgcgaggtggcgttagtgagatggaagattttcgaggtatagcag

SEQ ID NO: 533044 - DNA, 78 bp, Homo sapiens
gcgcctgggactgcaccgcaccgagggcgagctccaggccagcgttaatgactgccattgatggaagacatgatgttt

SEQ ID NO: 533045 - DNA, 87 bp, Homo sapiens
actcccatgcatcggctaatagcccggagacaagcgtaagttctggccactgcatttgacacgacattgggaggtagaaaatttgat

SEQ ID NO: 533046 - DNA, 75 bp, Homo sapiens
aaatgcaccccgatggagctctcgatggaaccaaggatgacagcactaattctaataggaccatctagttgcagg

SEQ ID NO: 533047 - DNA, 100 bp, Homo sapiens
gtctcaggcctttagtgatgatgctattttgaagatgaggaagaagattctagcaacgttgatttaccttacattcctgctgaaaactcaccaactcgcc

SEQ ID NO: 533048 - DNA, 101 bp, Homo sapiens
gccggcgtgggagcgccaaggccgcagcatgctacaagtgaaaactgatgagaaactgaatgtgtctgatgagaatacagcaagttgccctttgagcccca

SEQ ID NO: 533049 - DNA, 82 bp, Homo sapiens
agctattctcaggatatgacaggggtaacacccttccagatgatttttgagattgcaaaagttgagaagctcaaaccattag

SEQ ID NO: 533050 - DNA, 100 bp, Homo sapiens
cccctccccggctgccgccgccgccgcctcggccgaccagggacctgcccgcctgcggctgctccgggttcttgattattacagacctctttctgaaaag

SEQ ID NO: 533051 - DNA, 50 bp, Homo sapiens
ggaacaatcagcagccctgttcagaagatccagctccaggtcccacaggg

SEQ ID NO: 533052 - DNA, 100 bp, Homo sapiens
cgtggctgactattccggcactgcaggacacagcattgttggttttgccatgtactattttacctatgacccgtggattggcaagttattgtatcttgag

SEQ ID NO: 533053 - DNA, 90 bp, Homo sapiens
ggctgtcagcctgatactcctctatcttgggagcgatgcagcctcaatccggagcagagccacactaagtgaagacaagaagcactacat

SEQ ID NO: 533054 - DNA, 100 bp, Homo sapiens
ttggagaattacagcaacctggtttcaatggattgtcaagacattgccaataagggagctaaacagagcgggctttactttattaaacctctgaaagcta

SEQ ID NO: 533055 - DNA, 83 bp, Homo sapiens
ggcctgaagtgagtgagaggcacatgaagagtgaagacatttccacctggacacctgaccatgtgcctgccctgagcagcgag

SEQ ID NO: 533056 - DNA, 100 bp, Homo sapiens
cgaaggctaccgggcccagcacagccagcaccgcacgccctgcaagggaggtagtaatgaaggtggtgcagctgctacccgatgggcaccgtgtgaagaa

SEQ ID NO: 533057 - DNA, 88 bp, Homo sapiens
aggcggccgcggggcccgagcgcagactgcttttcaggaagccttggacgctgcaggtgataaacttgtagtagttgacttctcagcc

SEQ ID NO: 533058 - DNA, 100 bp, Homo sapiens
agatactgccttgcttttggacccaaacatatacaggtttggaataccttgtagcaggacatgaggatataagaacaggcaaactaattgtgaatatgaa

SEQ ID NO: 533059 - DNA, 100 bp, Homo sapiens
ttggatcaccagcctggctggttgcctgactctgtagcctaccatgctgatgatggcaaaacttccgagaagtcaccaccaatcaagagctgattcagaa

SEQ ID NO: 533060 - DNA, 116 bp, Homo sapiens
tgaagaggttgtttatgagtcgcaccaaccggccgcctctgtccctttcccggatgtgtactaatggtcacttgatgtgcgctggctgttttatccacctactagcagatgcccgg

SEQ ID NO: 533061 - DNA, 100 bp, Homo sapiens
acaacaaccagaccattaccgaccaaatctaccgggcaatgaactcttcgtcctttgagggtgtctctgatatagctgacctggcatttgaggtatcagg

SEQ ID NO: 533062 - DNA, 75 bp, Homo sapiens
gtggaagcaggactgcgccgcgtcttcctcaagggcgcggatggcgtcggggcgccccgaggagctgtgggaggc

SEQ ID NO: 533063 - DNA, 101 bp, Homo sapiens
gaaagtattgcaggacaagagatttaagcactcctgtaggaggcctgctgatggcatttcagaagtactctggtgagactgttcaggaaagaaaacagaag

SEQ ID NO: 533064 - DNA, 75 bp, Homo sapiens
taagcatgccctgaaaaagtatcgtcgagaagcctatcatcgttgtctgttttgatgccaagataaactttgatg

SEQ ID NO: 533065 - DNA, 100 bp, Homo sapiens
cctttcacagctatcagggaaggtcccagcacacctggaaagttctgcaaggcctcagctacagaaagcccagagacagaaagtaaactctttcatgacc

SEQ ID NO: 533066 - DNA, 100 bp, Homo sapiens
gttgacaagactgaggatagtttagaaggatgcttggattgtctgcttcaagccctggctcaaaatagcctgctggtgggtacccttgatgttgtgttgg

SEQ ID NO: 533067 - DNA, 100 bp, Homo sapiens
gcgtagctgaatccagtaccaaaaacgtcaacaacagttttacgctctctattggaggcatcatcattctgaaggataccagtgaagacattgaggagct

SEQ ID NO: 533068 - DNA, 90 bp, Homo sapiens
gtggttgctgaccagttgaaaggaaattcagttcatgaagataagaagtttcttgacaaatacatgccccagttcatgaaacatcttcat

SEQ ID NO: 533069 - DNA, 98 bp, Homo sapiens
ttcaactgtgcagaatctacaaattttgctactgtcagatggattgactatggaaaagttgccaaattggagtcagagtattcatcgaaaagaaagca

SEQ ID NO: 533070 - DNA, 99 bp, Homo sapiens
ccaagctgtttcctaccaggtcacacactgttgcagcgcaggtcccagagaactacttctatgtgccagacctgggccaggtgcctgagattgatgttc

SEQ ID NO: 533071 - DNA, 75 bp, Homo sapiens
gcgaaatgatgggatagcgttgcaaatccttaaaagagtcttaacgacccaacatgagtgaagtttcctgcaaga

SEQ ID NO: 533072 - DNA, 96 bp, Homo sapiens
ctgcgcctttctctcatcccgataaacaggggtcacatgacgacagaagccaagagggctgcaaagatggaaaagaagatgaaaattttgcttggg

SEQ ID NO: 533073 - DNA, 90 bp, Homo sapiens
tatacaagcatcttctgtcctgaatacagtatctccttaaggggaaagtgcagtgttgcccttctgaatgagacagaatcagtattgtca

SEQ ID NO: 533074 - DNA, 75 bp, Homo sapiens
gaggaatgtctttcctaccatctaaaatacgaaggtttctggctgggacagtcattttgtttactcattcagccc

SEQ ID NO: 533075 - DNA, 74 bp, Homo sapiens
gaacagattcagaaggagcaggattaccaaagggtggctatggaccgccccctgcaggaagaggagcccccccg

SEQ ID NO: 533076 - DNA, 75 bp, Homo sapiens
gcgcattgacaccaggctcaacaaagctgtctgggccaaaggaataagcaacaggtaattcagtttcagctggcc

SEQ ID NO: 533077 - DNA, 82 bp, Homo sapiens
cccggaatgacctgtcgcctgccagctctgaaggactccatgaaagatgacagaagaagttattgtgatagccaagtgggac

SEQ ID NO: 533078 - DNA, 50 bp, Homo sapiens
cttaaattgatttcaagtttgaacaagtaatctatgccagcaattatgac

SEQ ID NO: 533079 - DNA, 87 bp, Homo sapiens
tgcggaagaagtgcccgtccacgcacagcgaggaggcttccgaggaggcagaggaggaggaggtgaccacaagccacaaggaaagaa

SEQ ID NO: 533080 - DNA, 50 bp, Homo sapiens
gcagcttcggaaaggagccaatgaggcccagttcaatacaaacaagtgag

SEQ ID NO: 533081 - DNA, 101 bp, Homo sapiens
gtccttgatgcaaacacaactcagttcaagaggctgaaagagatgaacgagaggagtggaagctggacacactatgtgacttgtatgaaaccctgaccatc

SEQ ID NO: 533082 - DNA, 82 bp, Homo sapiens
cgcgaccgtccgccagtcgtcccgagatgaaggatttgggggcagagcacttggcaggtcatgaaggggtccaacttctcgg

SEQ ID NO: 533083 - DNA, 100 bp, Homo sapiens
attgacattcaaccgtacccgccaagctgtcatcacaaaagagttgattgaaattatctctggtgctgcagctctgcgacactaacaggtgaagatctcg

SEQ ID NO: 533084 - DNA, 100 bp, Homo sapiens
agggacctaaccaagggagactagttccacgattaagtgttggtgctgttagtagcaaacctactactcctactatagatggactctgtgactacatgac

SEQ ID NO: 533085 - DNA, 101 bp, Homo sapiens
ccgccgtggcgcctagagtagcgacccggggggagcgcggggcgacgctggctgcagggacccggtgacagcgtgagagatcgcccaggaccacaccgcag

SEQ ID NO: 533086 - DNA, 100 bp, Homo sapiens
ggccggtccgagtcactgtgcgtcgcctgggcccgttcctggtcttctcccccaggcgttggagaccagggccagccctggccacaccccaggctgtgtc

SEQ ID NO: 533087 - DNA, 100 bp, Homo sapiens
gagtgaggagccagacgacaagcacacactatggcgctgaaacggattaataagagcctgccagtggagacactgggcccggcatccaggatggacccag

SEQ ID NO: 533088 - DNA, 75 bp, Homo sapiens
cccaagagaagtaccatctcggtcagatgtaccaacagtaccagcaacaggccggctatggtgcacagcagccgc

SEQ ID NO: 533089 - DNA, 75 bp, Homo sapiens
attgctactgctgcctctgtcactcctggtgaccagcattcaagtacggtggggattgcagctgctgagcaggga

SEQ ID NO: 533090 - DNA, 83 bp, Homo sapiens
ccgtggagtcggctgagggaaaagcgaggcaaggcaggcggatgaggtggaaagtgagaaatggtacctgtctacagacttcc

SEQ ID NO: 533091 - DNA, 100 bp, Homo sapiens
taacagcctgccagcccctcctcagatgcccctgccggagatccctcagccctggctggtgccctacgagacgctgaacaaacgctttcgcgccgctcag

SEQ ID NO: 533092 - DNA, 100 bp, Homo sapiens
gaaagagattatatgaagcagaaaaatcaaaaagggaatcctttgggaaattatttaaggaagaaattgttgagcttccagatttggattacctgcgaac

SEQ ID NO: 533093 - DNA, 101 bp, Homo sapiens
atccaatcaagtgcccttggacaaagcctgaaaccagcggacaaggcaaaatctcagcaagttcggacctctagtacaataaggcgaacctcctctttgga

SEQ ID NO: 533094 - DNA, 50 bp, Homo sapiens
gcctccccagccatgtggaactggctctctttacctatgaaggcaacagc

SEQ ID NO: 533095 - DNA, 50 bp, Homo sapiens
gtgcccaaactgaaaaagctggatgatgccctcggccaccagccacagcg

SEQ ID NO: 533096 - DNA, 43 bp, Homo sapiens
gtgcctgcaggatgtgagggagccagagactgctgctactttg

SEQ ID NO: 533097 - DNA, 98 bp, Homo sapiens
cctgaatcttggtgtttggacataggagcttctcttttaaaaggactaaaacatgctaacatagtgctacttcatgacatcatccataccaaggagac

SEQ ID NO: 533098 - DNA, 88 bp, Homo sapiens
atggactattccctggctgcagccctcactcttcatggtcactgttccgatgaagttaaattccgtcaagatttaatgaatattgcgg

SEQ ID NO: 533099 - DNA, 82 bp, Homo sapiens
cgaaaccctgaccggatcccataaacactgtcgggttgcttttgtaatgaagaagcacttaaatactcatctactaggcaag

SEQ ID NO: 533100 - DNA, 80 bp, Homo sapiens
caggaattggatctactagtgcaggatcagttcttaagagcagccccggtaactggaggaatgggagccgttttgatgag

SEQ ID NO: 533101 - DNA, 98 bp, Homo sapiens
gaaaggagcaagagcaagatcaccgtgacatccgaggtgcctttctccaaaaggttgtgcagcctgactctgaagaagctggtggtcttcaaggagct

SEQ ID NO: 533102 - DNA, 75 bp, Homo sapiens
cccacttgctcgtgcactttacacacatgagatggactcaccctgtcacccaggttggactgcactggcctcaac

SEQ ID NO: 533103 - DNA, 75 bp, Homo sapiens
caggaccccagatgtctgacagccctgtgtgacaccaagataagtaacgaaagtaatggaccagtgaaggtgtgg

SEQ ID NO: 533104 - DNA, 98 bp, Homo sapiens
ctgaaggagcagctctaccaggaaatcatccactacttcgacaaaggcaagagttgcatgctgagaatttgaaaaatgaagatgatgtagacactgga

SEQ ID NO: 533105 - DNA, 83 bp, Homo sapiens
aagactatgagacacacaaatctaaaaggcgcgagagaatggatgatagtagtgtggacacccatatccatgcagccgcttgc

SEQ ID NO: 533106 - DNA, 100 bp, Homo sapiens
cggaggaaacagccagaccgagagcagcctgccggggcggagagcaaacgccctggaggagcagctgaaggagcaggagctgagagcctgcgagatggtc

SEQ ID NO: 533107 - DNA, 75 bp, Homo sapiens
ggggcagaggccactgagccagccagctgggatctccaccaaccccttcatgttcttccccaacggctacgcctt

SEQ ID NO: 533108 - DNA, 83 bp, Homo sapiens
ccaagccggggactaaggcgagccggagaccgagcccgaacagcaggagctgacatggacccaaatcctcgggccgccctgga

SEQ ID NO: 533109 - DNA, 100 bp, Homo sapiens
gcaagatctacgtggatgatgggcttatttctctccaggtgaagcagaaaggtcttctggccgctggtaccgacagagggcgagtagccatgtggaggaa

SEQ ID NO: 533110 - DNA, 101 bp, Homo sapiens
cgagtccggaccggagactttggggcctaactagtatacaattggaccgtggatgaggtggtacagtggctgatcacatatgtggagctgcctcagtatga

SEQ ID NO: 533111 - DNA, 74 bp, Homo sapiens
aggatcaggaccgcaagtcccgtcttatgggacttgaggccctcaagaaaaacgttgacctcttggcgagaatg

SEQ ID NO: 533112 - DNA, 98 bp, Homo sapiens
ttgggggagcacgattggatttgccgaagattaggaagaatccactgatagaaatcatttccatcaataccgggcagcagaagatgtcgttttcattg

SEQ ID NO: 533113 - DNA, 100 bp, Homo sapiens
aagagaagctcaaggccgaagccgagcagaggatctaaatacaagagtggcctattgtatccagcatggctcagaaggtaactcaagcgcagactgaaat

SEQ ID NO: 533114 - DNA, 76 bp, Homo sapiens
gtttttggcagggtgatgcagataggaggcatacaccatacatggtacagccagagtaccgaatctatgagatgaa

SEQ ID NO: 533115 - DNA, 76 bp, Homo sapiens
cggaccttgggctgaccggtctgtctggcttcagtgccggtggtggtgtgcacattgagccccggtatagacagtt

SEQ ID NO: 533116 - DNA, 83 bp, Homo sapiens
caagaacagcccaatctcctttctgggcaaacgttccaaggtcctcgatgggcttcctggaatattggtgtgtttatttgcat

SEQ ID NO: 533117 - DNA, 75 bp, Homo sapiens
cgggagagagaatgagccagagggacacgctggtgcatctgtttgccggaggattctctcgggcctagccgtcct

SEQ ID NO: 533118 - DNA, 100 bp, Homo sapiens
agaaatcagtccttcctttccgacttagtcctcgggaagaagtttcagactacaaggtacggttcctggagcagcagaacaagatgctggagaccaagtg

SEQ ID NO: 533119 - DNA, 75 bp, Homo sapiens
gacatatgaaggactcattgatgaaatttatggcattcagaacaattcatgttacatgtaaagctgtcctcattt

SEQ ID NO: 533120 - DNA, 99 bp, Homo sapiens
ttcttgccatcgccccagacatggggaacgcggcgaccgccaagaaaggcagcgaggtggagagcgttccaattgcccgggctgttcttgttgacatgg

SEQ ID NO: 533121 - DNA, 87 bp, Homo sapiens
aagaggctggactcggattcgttgcctgagggcggcgactggcggcgcgatggacctgaccgggctcctgctggacgaagaaggcac

SEQ ID NO: 533122 - DNA, 100 bp, Homo sapiens
gccccgagcattgtgggcctcatcatcttcctcctgtgcaccctcttcatcagcaggatacagacgtccctcaccagtgccagcttggggtctgcagatg

SEQ ID NO: 533123 - DNA, 51 bp, Homo sapiens
caacctcagaggacaacgaagtgttcgaatgtgacagtgatgataacatgg

SEQ ID NO: 533124 - DNA, 114 bp, Homo sapiens
gttttggctctgcgtgagtgtggtctacgagctgtttctcatctttatactcttccaggctccctggggaagggaatgcagggttgctggggctgggcccagaagcagcagcac

SEQ ID NO: 533125 - DNA, 83 bp, Homo sapiens
gccgcttctagaccctactgcggtctcggatattgccggatgtcatgtggcctgtgttttggaccgtggttcgtacctatgct

SEQ ID NO: 533126 - DNA, 75 bp, Homo sapiens
agacatcatttgggaccaagctgatgagcccttgaagcacagcaggttccaattgtggacaagataaggaccatt

SEQ ID NO: 533127 - DNA, 89 bp, Homo sapiens
gaaggcattgctatttttgcacttcagttcacatactatttatggatattcttactgattctccgggctctgcagctcttgacccggct

SEQ ID NO: 533128 - DNA, 75 bp, Homo sapiens
cttatgaatgccaacccttctcctccagaactcctcctcccacatctgatggagctaccaatcatcagatctcct

SEQ ID NO: 533129 - DNA, 90 bp, Homo sapiens
attttccattccagaaggacaaaaactctttgagtttcggagaggagtaaagagactgcttctcggaggagtgccgctctgtgatccagg

SEQ ID NO: 533130 - DNA, 100 bp, Homo sapiens
cgcctggagaggcactcggacctggtatctactgtgcgtttcagtcaacaatacagcttgtgttcgacaatattccttgatgacagcacagccatccagc

SEQ ID NO: 533131 - DNA, 100 bp, Homo sapiens
gaggaccatgctgggccggagcctccgagaagcggtatatattgcacccctaaaagccctagtacgtgaaagaatggatgattggaaagttagaatagaa

SEQ ID NO: 533132 - DNA, 75 bp, Homo sapiens
cattgctccttcaggacatggggtatcttggctatactagtggattttccttgagctgtatggtttttttcctaa

SEQ ID NO: 533133 - DNA, 75 bp, Homo sapiens
taccagcagtgcataaacgaggcgcagcgggtgaagacgcaaacatgcagatctttgtgaagaccctcactggca

SEQ ID NO: 533134 - DNA, 121 bp, Homo sapiens
ttagactgtaagaaaagaaaatagaagccatgtttcgaagacctgtattacaggtcttgaatataatcatggccaaaccttatgaatttaactggcagaaggaagttccctcctttttgca

SEQ ID NO: 533135 - DNA, 100 bp, Homo sapiens
cggacatcctggaagctgggaaatgatggggacattggttttggacctttacaacagaggatgtctgaagaagtttctttccagtctgagattaatatta

SEQ ID NO: 533136 - DNA, 100 bp, Homo sapiens
aaagaggtccgagtgacagccagtgagaagaatgagtataaaggatgggttttaactacagacccagtctctgccaagaaaatgtttataggaggcctta

SEQ ID NO: 533137 - DNA, 90 bp, Homo sapiens
cgagaggagctggcgcgagacaaggtggcgcaaacgtggaccatgctgcggatcatctactgcagccctggcctagtgcccactgcaaac

SEQ ID NO: 533138 - DNA, 75 bp, Homo sapiens
aagtagtacttcccaaaaatgccacaggtggaattaagaaatctggcaaaaagtaagctgttccttgtgcctgag

SEQ ID NO: 533139 - DNA, 96 bp, Homo sapiens
cataaatcctagtggtggactgatttcaaagggacacccactaggcgctacaggagaataaaggcagccccgttgatgactgaaaatgacaaagca

SEQ ID NO: 533140 - DNA, 100 bp, Homo sapiens
gaacagaacctgctgtcgcggccagatggctctgcttccttcctgcaaggtatgtgcaagaggtgaaataattggcgtgaaagttctaggcatattggct

SEQ ID NO: 533141 - DNA, 90 bp, Homo sapiens
cgaatcccagcggccggcgggcggcggggatatggtggtggttttaatgaaagagaaaatgttgaatatatagaaagagaagaatctgat

SEQ ID NO: 533142 - DNA, 100 bp, Homo sapiens
aggaagtgaacaagtccaagaggaccttctgattagtccacagtcttcctctatagatggagctaacacccattatggagattaaccacttttcatcagg

SEQ ID NO: 533143 - DNA, 102 bp, Homo sapiens
agcctggctgccggcttgttcttactggccctgagtctttgggggcagcctgcagaggctgcggtgaatactgctatgcatgaggcaaaacttatggaagaa

SEQ ID NO: 533144 - DNA, 83 bp, Homo sapiens
cgctcagcgagtttgccctccagagcgacctggaccaacccgccttccaacagctggtggtatcttggccaacaaacaaaact

SEQ ID NO: 533145 - DNA, 51 bp, Homo sapiens
actgcagtgaactctttaaaacacagtgacttcagatgaaagcaataaaac

SEQ ID NO: 533146 - DNA, 75 bp, Homo sapiens
gccggccgcccagacgctgcccgcgggcccggccacggcggagccaaggaaacttcctcctggccaaccctgtgt

SEQ ID NO: 533147 - DNA, 88 bp, Homo sapiens
gagaaaccgcctcgaaaacggagaagcagactgcttttcaggaagccttggacgctgcaggtgataaacttgtagtagttgacttctc

SEQ ID NO: 533148 - DNA, 88 bp, Homo sapiens
atgaatggagcaaaatggcggatcatgtgcagatttgcttgtaaatgcatcacgaagaggcagcccagaatgaagaaagcaagcagga

SEQ ID NO: 533149 - DNA, 75 bp, Homo sapiens
gccgctacaaggagatgctgaagatcatgaagagtgaagtgttgagagtcacccatgagctccaagccatgaagg

SEQ ID NO: 533150 - DNA, 92 bp, Homo sapiens
tatagattgaagtttagcgctgataaagtagacacaatgattgttcaggcaatttggtgttccaatgaattcactcaggtttctctttgagg

SEQ ID NO: 533151 - DNA, 100 bp, Homo sapiens
cggcaggtgaagcggtggtggcagaggcgcctgcggttactggccgggccgacgggtcctgagtctccagagctcgggttgccattaggggactcctgag

SEQ ID NO: 533152 - DNA, 100 bp, Homo sapiens
gtggacagaggctatttcagtatagagatattgccgatgtttctgtcaaacagtgtcagcagcggtatgaggacatgaaaaatcgtcgtgatagtgaata

SEQ ID NO: 533153 - DNA, 75 bp, Homo sapiens
tcttgggtcctccgagagcagcagcgacccaacatgagtgaagtttcctgcaagaaacgggacgactatttggaa

SEQ ID NO: 533154 - DNA, 73 bp, Homo sapiens
cagtttgcattgcagtcaacagtcgaagaaggtgtgacaagccccgccaagacagacctgcaagtcttcgtct

SEQ ID NO: 533155 - DNA, 100 bp, Homo sapiens
taactgcaaagatgctgtccgtgcgcgttgctgcggccgtggtccgcgcccttcctcggcgggccggactggaagctgcagtaaaggaagatgaagaaga

SEQ ID NO: 533156 - DNA, 89 bp, Homo sapiens
atcatctttagatacttctactcataaatcaagtgataataaactagaggagctggtttattgcagcctcctgttcgtatagtttcaca

SEQ ID NO: 533157 - DNA, 73 bp, Homo sapiens
gataatgaatgtcgaatgtgactgactagcagcttcattttgaaagccctgaagacaaggggtaacactccaa

SEQ ID NO: 533158 - DNA, 75 bp, Homo sapiens
acaccctctacgaaggcggctacttcaaggtacaaagggaatttcttgcagagctgtgttcagctgagagccagt

SEQ ID NO: 533159 - DNA, 100 bp, Homo sapiens
attcgcagtggtcgcttcttctccttgaaagtttcctacactactgaggtttaggggcactgtgaagcaaaagccacgcctcagaatcccaggcggagac

SEQ ID NO: 533160 - DNA, 98 bp, Homo sapiens
tcgttatgaaaggacagataccggtgagataacatcctacatcactgaagatgatgtggtctacagaccaggagagcccaatgacgaaagtggagcta

SEQ ID NO: 533161 - DNA, 83 bp, Homo sapiens
gagtatttcaaccataaagacatcttaattgggcacgaaagaggaatatattaaaggaatctgtgaacctgaactagaagaaa

SEQ ID NO: 533162 - DNA, 82 bp, Homo sapiens
cgagtggtctaaggcgccagactcaagatgtgtatatctcatgattgatatggagaaactagtcatgggccaaaggtcaaga

SEQ ID NO: 533163 - DNA, 75 bp, Homo sapiens
ctatgtggacagaggctatttcagtatagagctgttgcagctaattgcaaaatcccagttaacttcattgagtgg

SEQ ID NO: 533164 - DNA, 80 bp, Homo sapiens
ctcctttttacctttggttcacaacatcatcaaatgccttatgccagcctggaccatcttggaggcagtgtaggatcatg

SEQ ID NO: 533165 - DNA, 74 bp, Homo sapiens
gcagcagcccgacgcaaaccaaggatctggggatcttcgcactatcccaagctgatacagaaggcaataataaa

SEQ ID NO: 533166 - DNA, 98 bp, Homo sapiens
attggactaccgtgaggatggtgtgaccccatatatgattttctttaaggatggtttagaaatggaaaaatgtctgagatctgtatctgtggacctga

SEQ ID NO: 533167 - DNA, 90 bp, Homo sapiens
ggaataaatagagttcacgatcctgtaactgccaaacccaagttggttggagatgtggattttgaagttttccacctatttccctggata

SEQ ID NO: 533168 - DNA, 75 bp, Homo sapiens
attatcgtaggaggagtcctccacctcgtcgcagattatcgaatgtctgaaagaaaacaagaagcagctaagcac

SEQ ID NO: 533169 - DNA, 108 bp, Homo sapiens
gggtggccgaggggcttcataccagctgaagagcgacaagccgctggcagccgcggatctcaccgccgctcaggaggctgggaggcggcagaatgcagccagaggagg

SEQ ID NO: 533170 - DNA, 75 bp, Homo sapiens
gccgatgaagtgcagaggtttttttctgatgaccgtggaaaaagtacagggtattagcagattggaacaactttg

SEQ ID NO: 533171 - DNA, 100 bp, Homo sapiens
aaggtccaaaaaaactccagctgtgaaagcaacataaatgaaatgggacgtcggtcatcagatactgaagaagaaagcagaagcaagagaaaaaagaaac

SEQ ID NO: 533172 - DNA, 98 bp, Homo sapiens
cgtgacttcactacttttaagcaaaagagctatcaagtactagctccaactgcctattatgatcagactggtgccttagtggttggccctggagcaag

SEQ ID NO: 533173 - DNA, 75 bp, Homo sapiens
ccgagccagccgctgttttgccggaggagcccctcaggccttcctgagggaagacctcaattaccatgacccaac

SEQ ID NO: 533174 - DNA, 74 bp, Homo sapiens
cccgggagtaggagactcagaatcgaatctcttctccctccccttcttggctgacaaacgggctcatcataatg

SEQ ID NO: 533175 - DNA, 75 bp, Homo sapiens
cgtctttccgtcctctgaggcgacggccgcggctgcacagcaattctgtggtgttcttggtcacacatttatgga

SEQ ID NO: 533176 - DNA, 51 bp, Homo sapiens
ccagtacacagacgagcatggggaaggcatagaatgtcaagctaaccaggc

SEQ ID NO: 533177 - DNA, 100 bp, Homo sapiens
caatgaccgtgtggtgtgcgcggtggccactgcgctgcggaacatggccttggacgtcagaaataaggagctcatcggttaatgttgaagaaggaaaatg

SEQ ID NO: 533178 - DNA, 76 bp, Homo sapiens
gaatggagtgggcaggaaagcagcgggactttcagacctagaggatcaagacataatgggagcatttttagacaag

SEQ ID NO: 533179 - DNA, 100 bp, Homo sapiens
gcccgaagtgtaagcccaactacagaaatggtttcaaatgaatctgtagactaccgagctacttttccagaagcagccaagagtttgttgaagaaaccag

SEQ ID NO: 533180 - DNA, 100 bp, Homo sapiens
acaatttggaggtggcaaacagcttcgcagtcactaatgcttcatgcagcagattggaataaatatgatgaccgattgatgaaagcagcagaaagggggg

SEQ ID NO: 533181 - DNA, 82 bp, Homo sapiens
ggctccctcgggagctcatcttcgtggggcgtgaggagtgtgagctcatgctacagccctcggaaggctcggtcacactctc

SEQ ID NO: 533182 - DNA, 97 bp, Homo sapiens
cagcgctcctggcgctgctggctgcgctctgcccggcgagtcgggctctggaggaaaagaaaggtcctggtgttcctatggtgacggtgcacaacac

SEQ ID NO: 533183 - DNA, 90 bp, Homo sapiens
ggatggtggtggatgcggccaactccaatgggcctttccagcccgtggtccttctccatattcgaggccattcacctgctcttccctcta

SEQ ID NO: 533184 - DNA, 90 bp, Homo sapiens
cgtagctaagacgccaggatttcctggaagcagagaaatgagattcgtcagcgaactgcagctcaaagaaacctttctccaacaccagca

SEQ ID NO: 533185 - DNA, 100 bp, Homo sapiens
gcgcggcttcctcaacttcacgctggcgcgagccccgtcctccttcgccgccgcgcacaaccgcacgtgcagtacacctctgcgctcacctacgatgggg

SEQ ID NO: 533186 - DNA, 96 bp, Homo sapiens
tattttgggaaacatttcatgagtttccattggaaaagaagaagaagtttctctctatcagttgagggatttgcagttgataaaatggctggagag

SEQ ID NO: 533187 - DNA, 100 bp, Homo sapiens
agtactgcgttgaattgctcaacagcatcttggaagtccttagctaccaggatgcgatgatgtctgtcctcatgaacaccattgtctttgaagactgtcg

SEQ ID NO: 533188 - DNA, 97 bp, Homo sapiens
tccaaatgcacagcttgtgttcaggacagtcattttgtttactcattcagccctgttgcaggtcccaataaactcttcataaggttgacagaagcac

SEQ ID NO: 533189 - DNA, 50 bp, Homo sapiens
tggtctttctcaacctcatcttctggtatgaatgacccatattaaatcgc

SEQ ID NO: 533190 - DNA, 96 bp, Homo sapiens
caacgactctcgaccggaagctttcctgaggacctgctggagagtgacagatcttgaagatactcacagggaagatagtggtggggcatgccatcc

SEQ ID NO: 533191 - DNA, 89 bp, Homo sapiens
gaaactgaggcctggaatttgattaactcattcaaggttacccagttggtgaaagaaaagatgttgtcccggttaagagtagtttccac

SEQ ID NO: 533192 - DNA, 100 bp, Homo sapiens
aaaaaatgcagtcccctcatgccaagactagacgcttgaagcaaagctgccatcccagaagacgacatgctctcagcaacccccctgtatgggaacgttc

SEQ ID NO: 533193 - DNA, 101 bp, Homo sapiens
cagatctagccagggtgaacgcccgactgcaagctgataagaaggctgactgcacaatcacaatggctgactcagacttcctggctttaatgactggtaaa

SEQ ID NO: 533194 - DNA, 100 bp, Homo sapiens
agatgaacgccatgctggcccggaggcgcagacggggaagcggagccaacatgccagtggcccggagctgggtttgtcgcaaaacttatgtgaccccgcg

SEQ ID NO: 533195 - DNA, 87 bp, Homo sapiens
cgctcggctgcgggaaatcgggctgaagcgactgagtccgcgatggagaagccaagtacaagaagctggagaagcgatgagaaactt

SEQ ID NO: 533196 - DNA, 100 bp, Homo sapiens
cttcggcggagtctgcgcgatgggcgacccggaaaggccggaagcggccgggctggatcaggatgagcttaatcctgattatcgagatgcccaaaatgaa

SEQ ID NO: 533197 - DNA, 82 bp, Homo sapiens
atcgcctcccgagaagaagttgaggcgctatagtcatcttagtgggatttggggaagcaacagggctgtgtggggtaacctg

SEQ ID NO: 533198 - DNA, 75 bp, Homo sapiens
gttctctcgatcagggcatacatctttcttcgacaaaggaaaactttagaaactgttcctttggagaggaaaaag

SEQ ID NO: 533199 - DNA, 75 bp, Homo sapiens
ccactgctgggccctgaggctgcaccaagtggcgaaggagccggctccaagacctgcctagagctggaacgttac

SEQ ID NO: 533200 - DNA, 82 bp, Homo sapiens
gccgatccagcctgcggagcctgtggggcagcaccaatgttgttatgaattattcagagatcgagtctaaggttcgagaggc

SEQ ID NO: 533201 - DNA, 75 bp, Homo sapiens
ggaaacctggccatgcacatgaacggggagctcgttctccggaagtttgacaagtatgcgcccaagctggacagc

SEQ ID NO: 533202 - DNA, 74 bp, Homo sapiens
ggaccagtcatggagccaggctcaggttatcagtgagctgaatggaaaaaacattgaagacgtcattgcccagg

SEQ ID NO: 533203 - DNA, 83 bp, Homo sapiens
tttgtctccccgatctacggggctgacatcagcggctctttgtatgatgacagagcgcctgctcgctgtgcccccgggttatg

SEQ ID NO: 533204 - DNA, 90 bp, Homo sapiens
ccggcaccccgcagccagtaccgggcggaggcgtcagagccgcgcaccgcggacgagcaggcccagcccccaaatacatcaagatgtttg

SEQ ID NO: 533205 - DNA, 97 bp, Homo sapiens
tgcgatgctcgcagcaacccagagcccacaggctataattggagcaccatccctctctacctgccaacatcctgtattagagaacttgtggccggag

SEQ ID NO: 533206 - DNA, 75 bp, Homo sapiens
ggaagttgctgcgctctgctcggtgtcgtggcctcgcagatgcatttaaatcaaacggtattgagatggattggg

SEQ ID NO: 533207 - DNA, 90 bp, Homo sapiens
ggcctccagacactatttcattagcctcagaacgatatgataaagacgatgaagccccctctgatgacaagcccacagggtatggctcca

SEQ ID NO: 533208 - DNA, 82 bp, Homo sapiens
ctaaagcagcgtgcgttcagccctgggctctggcaggctgccctgagcacgctcaaccccaaccccacggacagctgtcccc

SEQ ID NO: 533209 - DNA, 75 bp, Homo sapiens
gcacctgcgcaacctcgccgtggccatgtgcagccgctacgcatcaactgtgaaatctgtgttagaattgattcc

SEQ ID NO: 533210 - DNA, 100 bp, Homo sapiens
agaatccattaaaaggagagctgggaggaggaaaggacttagaagccttacaaatacatctgtgcattcttgcttcagactttacaactgagggccagcc

SEQ ID NO: 533211 - DNA, 75 bp, Homo sapiens
acaagttgacagctcagttaaaagatatgaaaagaaactctcgcctgcgttatacgcagagcaatgggcgcaggc

SEQ ID NO: 533212 - DNA, 75 bp, Homo sapiens
gacctcgtgcccaaggccaaggggcggaagagcctccagcgcctggagaacaggagagatgacatgctggacgtg

SEQ ID NO: 533213 - DNA, 97 bp, Homo sapiens
gtaaatgtgccacatattcatgcaagttccacttacttacatgatcatttcgagagatgtaatgttgattgctgctgttttttatgtcagataccga

SEQ ID NO: 533214 - DNA, 100 bp, Homo sapiens
gttcaacatctgacagtgcttgcaggatctctcctggacaaatcaatcaggaacttgtaatagctggcatcgttgagaatgaatggaaaagaacgtgctc

SEQ ID NO: 533215 - DNA, 83 bp, Homo sapiens
ccaagttccccaacggctccccgtcgtcctggtgctgcagcggaagccatcttcgacaagagcacagggaaggttgttttgaa

SEQ ID NO: 533216 - DNA, 104 bp, Homo sapiens
tttagattcagctaaacgtgggtttcttactaaggacgagctgatcaagtatatgactgaagaagatctcccagctgatgacagagagtagccgggagggacta

SEQ ID NO: 533217 - DNA, 74 bp, Homo sapiens
atgaccttccctcgggaattccacctctgcgtttttccctccagcttcctggacaagatcgacgtgatcaagca

SEQ ID NO: 533218 - DNA, 75 bp, Homo sapiens
cgggctggaggctcctgcagctgcgatgcctgcccggttctgtacagagtaatgagatgtgtgacggctgcaaac

SEQ ID NO: 533219 - DNA, 87 bp, Homo sapiens
tgaagccaatgagatttgtaacaaatcggaaaagaagaccatctcaccagagcatgtcatacaaggagaagatgtatggtcttatgc

SEQ ID NO: 533220 - DNA, 82 bp, Homo sapiens
ctccaacccgcggccccggcgccaagccgccgtcatcttcttcctgtgccagcaattctgtggtgttcttggtcacacattt

SEQ ID NO: 533221 - DNA, 83 bp, Homo sapiens
acgaagcggccaagctgctcaacgttgagaaagatcagtctaaagaaaaggagaagaaagtgaaaaaaacaattccttcctgg

SEQ ID NO: 533222 - DNA, 99 bp, Homo sapiens
ttggtgagaagttaaatggcacagatcctgaagatgtcatcagaaatgcctttgcttgctttgatgaagaagcaactgttgtgttttctaataccaaag

SEQ ID NO: 533223 - DNA, 86 bp, Homo sapiens
agccacttcagtgcgagcgaggagtccatggacttcctggataagagcacagcagagaggggcagcaggatgaatgtgggcacagc

SEQ ID NO: 533224 - DNA, 75 bp, Homo sapiens
tcccactctgccctgttgctgtcgcgccgctgctggttgctgtccctggtagttgatgtcacttggcgatattcc

SEQ ID NO: 533225 - DNA, 75 bp, Homo sapiens
actcctgcccagagtggggcctgggaccccaacaaccccaacacgccgtcacgggagaaggtgagcagtattgat

SEQ ID NO: 533226 - DNA, 75 bp, Homo sapiens
agactgacgctgctctgcttcctggattcagccctcttcctaaggaatttatccagttggcgaaggactttgagg

SEQ ID NO: 533227 - DNA, 100 bp, Homo sapiens
gttttcgtacgggcggccgtgcgcgaggcgaggatggatagaatgacagaagatgctcttcgcttgaatctgttgaagcggagcttggacccagcagatg

SEQ ID NO: 533228 - DNA, 50 bp, Homo sapiens
gcctacgcagagctcatcgtccttggtgggcgtctctttggcagcaggag

SEQ ID NO: 533229 - DNA, 50 bp, Homo sapiens
cttttgtggcatcccataagttttgccaagcttcttgaaaggcctgtcta

SEQ ID NO: 533230 - DNA, 83 bp, Homo sapiens
gaagagtggagggagcgaatcgccaacacgaggctctgacgcccgctctgcggcttcggtgtttgaacaggccacagtccagg

SEQ ID NO: 533231 - DNA, 80 bp, Homo sapiens
atccatggtttctatgcccctctatgcagtcatgtatcctgtgtttaatgaggtgtccttgaatggccattttggacaaa

SEQ ID NO: 533232 - DNA, 99 bp, Homo sapiens
attgagttaatgaacttcacgcctcagcgtccagccacagcctggcagctctgatcaggaaagtgaggaacagcaacaattccggaacattttcaagca

SEQ ID NO: 533233 - DNA, 97 bp, Homo sapiens
gacccagaggttacccagcagaccatagagctgaaggaagagtgcaaagactttgtggacaaaaatgtctcaccgtgttgcccagtctggagtacaa

SEQ ID NO: 533234 - DNA, 75 bp, Homo sapiens
cgctactctctctttctggcctggaggctatccagcgttgggcccgaaggcatcctgcagaacggggctgtggac

SEQ ID NO: 533235 - DNA, 100 bp, Homo sapiens
tacagatggaaggacagcattggatttagcagatccatctgccaaagcagtgcttactgtcgcaatgtatctgctgagcaaaaagatgaaaacaaagaag

SEQ ID NO: 533236 - DNA, 100 bp, Homo sapiens
gaaagatctatagcactctggctggcaccaggaaagatgttgaagtgactaaggctttgtgtccctggtgatgttggaacattaatgatggaacatggcc

SEQ ID NO: 533237 - DNA, 77 bp, Homo sapiens
atctgcagctactgctgcatcagaagaaatggaagcggctcagccccagggcagcacatcagagacaccatggaaca

SEQ ID NO: 533238 - DNA, 90 bp, Homo sapiens
gtcatcagttgccaattgttacatacgaaactgcagaactggggctcccttgcatcttccagttacaaattcagtgccttctgcagtttc

SEQ ID NO: 533239 - DNA, 75 bp, Homo sapiens
cgtgggcagcattggcgaccagcgcttcacggaattgaatgatctggcacgggaccctccagcacagtgttcagc

SEQ ID NO: 533240 - DNA, 83 bp, Homo sapiens
tacatcgtattacacctgaggaggccaagtgttcttcagtgcacagcgaaaagcagtctaaaggagtcttcgcgaagttttca

SEQ ID NO: 533241 - DNA, 100 bp, Homo sapiens
accgggcccttcctcgaggcggtgtcccacctgccgcccttcttcgctaagtaatcatttgtttgaagaacttgccatggatgtgtacgatgaagttgac

SEQ ID NO: 533242 - DNA, 100 bp, Homo sapiens
gcaccaaatcccacagaggcatctgaggtagttgatgtcacttggcgatattcctgcaaacatgaagaggtgattgccagaagaactaaggttaaagaag

SEQ ID NO: 533243 - DNA, 100 bp, Homo sapiens
ctcttggaggctctacatctaccctttctccccagccaagagcatggctatgggagaaggaaggcaggcagcaggcagtcaagtaagggagaattgacta

SEQ ID NO: 533244 - DNA, 99 bp, Homo sapiens
cctgcttggagccatgatgctgctggaatctcctatagatccacagcctctcaggagaaatggcttccctgaggcaagtgtaacctacattcccagccc

SEQ ID NO: 533245 - DNA, 75 bp, Homo sapiens
gaaaattcgtcaagttatccgaaaatataattacgttgctatgttccagtgtctcgccccatcctcaccctcagg

SEQ ID NO: 533246 - DNA, 100 bp, Homo sapiens
gaactcaggcttcaagcgttctcgaacccttgaggggaagttaaaggctgaggcagctaaattagttccaatgggtttcaccactgcaactgaattccac

SEQ ID NO: 533247 - DNA, 71 bp, Homo sapiens
aagaagcccatctcccgccgggcgccatggcagccgtggggcctgggtcccttgtgagggtcgctgatggc

SEQ ID NO: 533248 - DNA, 80 bp, Homo sapiens
tcactggctcagctgacaacagctgtcgtctctgggactgtgaaacagcgatgtgcattttgtaagcactttggagccac

SEQ ID NO: 533249 - DNA, 100 bp, Homo sapiens
ctgtgttggagcgatatacatcagtagtaaccttggtgaaacctcatttagtaaaggctgcattgcgtcagattactgataaagctcgtgaatttggagc

SEQ ID NO: 533250 - DNA, 101 bp, Homo sapiens
gccctcttcaatttctgacaaaagatgttcatgagagcgcagtttgactatgatcccaaaaaggacaatctgatcccttgcaaggaggcgggactgaagtt

SEQ ID NO: 533251 - DNA, 75 bp, Homo sapiens
ctgaactttctggggaacagaccagttgtgggatcagtgtccttcagggatgtggctatcgatttcagcagagag

SEQ ID NO: 533252 - DNA, 75 bp, Homo sapiens
gcgaacacctcactattgatggtgtagcgctttaggggaagactgcttttggcttctggatgccctcctccagta

SEQ ID NO: 533253 - DNA, 82 bp, Homo sapiens
actgccacaaacgccgcaccaggtcttgtagcagcgcctcctcggtactccaaagattcaggtttactcacgtcatccagca

SEQ ID NO: 533254 - DNA, 100 bp, Homo sapiens
ggatcgtgaccgagaccgtgaccgagagcgtgaccgagagcgcgaatatcgtcatcgttagaagtctcttgcatggcaccaagaatgttaccaattcaag

SEQ ID NO: 533255 - DNA, 75 bp, Homo sapiens
ggaggtgcccctgcgttgtaccatccgcctgtgggacacctaccagatgcctgctctgtgcctgtatctgagatc

SEQ ID NO: 533256 - DNA, 75 bp, Homo sapiens
aaggagatgcctggcagccccgctctctgcattgagaagctgatgtctcctcgacttccaactggaaccttgaac

SEQ ID NO: 533257 - DNA, 100 bp, Homo sapiens
gatactttctgaagcatttaggtcacaagcaaacatgctgaagacatatttggtgagttgtttaatgaggctaacaacttctacatcagagcaaattctc

SEQ ID NO: 533258 - DNA, 51 bp, Homo sapiens
gtacgagttgaatcattgttcaaataagaagctgacgggtcgcctcatgct

SEQ ID NO: 533259 - DNA, 51 bp, Homo sapiens
ttccatcatggcgtcaatgcagatgccagatatacgaaacccagaaggaac

SEQ ID NO: 533260 - DNA, 101 bp, Homo sapiens
gggatgtggtatgataccagcaactggtctattatatcatttaaaccacatggctatctaaagaggcgaggaggatggccgagaccagtccaggttggaga

SEQ ID NO: 533261 - DNA, 101 bp, Homo sapiens
atttttcttctctgggaaggtgaacatttgtagcattgatttcccggatctggtaacatggcaaaagatactggctctcttgcccaagctggagtgcagtg

SEQ ID NO: 533262 - DNA, 74 bp, Homo sapiens
tctgccccagctccgtctcggcggcggcggatgccagtatggacagaatagcttatgatgcttatccccaccca

SEQ ID NO: 533263 - DNA, 80 bp, Homo sapiens
ctcggtgcagggctccaccccgtcgcctcgacagctggagcagatccgcagggacatccgagacttccggtctagcgcgg

SEQ ID NO: 533264 - DNA, 75 bp, Homo sapiens
gtcctaccatgtcagccttcccagtagctgggaccacagccccagcagcggagtgagaccctgtcaaaaaaaaaa

SEQ ID NO: 533265 - DNA, 74 bp, Homo sapiens
agaggaatggaacttatcaactggacaggccaggaacttagtgatttggcccgtgaccctccagcacaatgttc

SEQ ID NO: 533266 - DNA, 98 bp, Homo sapiens
aagaaggtgaagtttggcatgaaggtcccctcctaaccgcaagcgtcctgctaacgagaaggcaactgatgactatcattatgagaagttcaagaaaa

SEQ ID NO: 533267 - DNA, 73 bp, Homo sapiens
gcctacaaccccatgtgcacctatgtgaaccgcggacgccgcgcccaggtgctggggagtcagggaagagcac

SEQ ID NO: 533268 - DNA, 100 bp, Homo sapiens
tagaaacgtgttcgctgcccagaagaagggaaggcgcgagtgaggaaaggaggtactgtagacaaggacgagggtgaccaccccaacaacagcttcagcc

SEQ ID NO: 533269 - DNA, 98 bp, Homo sapiens
gggaaagcagcatgttggccaggatatattgtgaaactggaacgccaagctgaagaagaacgaatacggaagcacaaagcagctgctgagaaagcttt

SEQ ID NO: 533270 - DNA, 82 bp, Homo sapiens
aggaactcagccctgattgcggtatttgtggaaacattagacaaatgttttgaaaatgtctgtgagctggatttgattttcc

SEQ ID NO: 533271 - DNA, 75 bp, Homo sapiens
gccgtcatcaccatcaccttcaatccgctctactggaatgtggtgtgtgccctcttcctgattctggagaaaaat

SEQ ID NO: 533272 - DNA, 101 bp, Homo sapiens
cgagagagccggcggagtgagcagctgaaggaagagtctgaaggggagcagttcccaggtacgcaaagagaaccagtggtgtgaagagaagtgaaatgttg

SEQ ID NO: 533273 - DNA, 100 bp, Homo sapiens
gatcccgggcggcgcgctgcccgaggggagcaaggacagcgggacctggacttcaccatcgacctggacttcaagggccagctgtgcgagctgtcctgct

SEQ ID NO: 533274 - DNA, 100 bp, Homo sapiens
gctggccagccaagatgagacaaagctccctcgtgaaagatgcttctgttcctctgattgatgttacaaacctccctactcctcgaaaattccttgatac

SEQ ID NO: 533275 - DNA, 105 bp, Homo sapiens
ctcgttccgggggtgaagcctcctgcgccggccttgcctcgggtgtgttcatcctcgaggtggtgtgattcagagtgtttcttcatggaagcatggctcgggcac

SEQ ID NO: 533276 - DNA, 83 bp, Homo sapiens
gtactgggacactgccatcctcttcaccaggcagataatcttgtgccgtggaaatcagaagggcaaaacgaagcagtcatgat

SEQ ID NO: 533277 - DNA, 101 bp, Homo sapiens
tgacctggtacatcgccgagttctactgggactcttcaattaatctgacatttcacaaatccaaaattgccgtggatgaactctttacttcacttcgggat

SEQ ID NO: 533278 - DNA, 75 bp, Homo sapiens
ttgcccaatgttttgatgattggcagagacccactgtctggatcaccttcagcagtgcttatttcaacctgtgca

SEQ ID NO: 533279 - DNA, 98 bp, Homo sapiens
ggcatggttggagtcagaagaggaagaagcagaactgggcaggacagagcgggatgccaccagcttgtccaaagggaagttccaggagctcctggtgg

SEQ ID NO: 533280 - DNA, 100 bp, Homo sapiens
aagcagcagagtttctacaaatgctagaagctatcaaagcccttgaagtcagattcaagaaatccatggtgaaaggtttggattcctatgaagaaaagga

SEQ ID NO: 533281 - DNA, 101 bp, Homo sapiens
ctggacaaaatgcctgaagccaaccaactacatttgccaaatctcaattctcaaggtcatgaagaaggatatttcacagctataatgttgaagaaatcaag

SEQ ID NO: 533282 - DNA, 100 bp, Homo sapiens
tcctaccatgtcagccttcccagtagctggaactacagggatcccaacggcttcaatgactggaccttctccactgtgcgatgctggggggagagagccc

SEQ ID NO: 533283 - DNA, 75 bp, Homo sapiens
cttagacagtcgtggttcctgtgatctgtgtcctctttgcagaagaactctaagaaggagctgatgtggaggagc

SEQ ID NO: 533284 - DNA, 100 bp, Homo sapiens
ggcggcttggacgactcggagagccggtactctctgaagatggcagaagctcaccaagctgtggcctttcagttcacggtcactccggacgggattgacc

SEQ ID NO: 533285 - DNA, 73 bp, Homo sapiens
ccagatccgctgatctagtgcttctcgaaaaaaaccttcaggcggcccatggatgctactatcattcacgatg

SEQ ID NO: 533286 - DNA, 82 bp, Homo sapiens
taaaagtagagaaggatcaaggacggatgatgaagtagtacagagaaaccccagtatatcgattctcgttggctgatggaac

SEQ ID NO: 533287 - DNA, 90 bp, Homo sapiens
cgcggttggggccactgcgaggccgttttaggcatcaactgtgaaatctgtgttagaattgattcctgaattaaatgaaaaggaagaagc

SEQ ID NO: 533288 - DNA, 50 bp, Homo sapiens
ttaaggattccaagtaactcttatttgccgtaatcctccaccagggacgt

SEQ ID NO: 533289 - DNA, 75 bp, Homo sapiens
tgacgacatcatcgtctttgccttctcctgcaagcaggcaggccagcggagcctgcaccaccgtggagacaacct

SEQ ID NO: 533290 - DNA, 98 bp, Homo sapiens
ctttgcctcaaactcagctttctaccagcagacaggtggcctctgtcagcctcttgcagctgggccaggagactgacaagcttaaaaccagaaatcga

SEQ ID NO: 533291 - DNA, 75 bp, Homo sapiens
tctggatgctgacagaaacaaggtgggatcatgaaacctggtctcaacgccatcctgggacccacaggtggaggc

SEQ ID NO: 533292 - DNA, 88 bp, Homo sapiens
ctcctcttcctcttcgcttgcagatacccccgagatcgactccaggggcctgaagcccctgcaggaggacaccccacagctgatgcgc

SEQ ID NO: 533293 - DNA, 50 bp, Homo sapiens
ctcctgagtagctgggattacaggttttactgggacctgatcatgctgct

SEQ ID NO: 533294 - DNA, 90 bp, Homo sapiens
cgcgggcgcggatcgaccggagcagagagctggcgagcaaggccaggtcagagcagcccaccatgggatggggagggggtggaggctgca

SEQ ID NO: 533295 - DNA, 100 bp, Homo sapiens
atgagggacaacctctttgaaattgtaacaacgtctcgaactttctatgtgcaggttaacagaaccttctggatatttaacagatggcccaattaactat

SEQ ID NO: 533296 - DNA, 109 bp, Homo sapiens
gtcccgaaccctcctcctgctgttctcgggagccgtggccctgatccagacctgggcaggctctgtgtgctccgggatggagcaggtgtgcagagggtgagaacccagc

SEQ ID NO: 533297 - DNA, 100 bp, Homo sapiens
gcgcggcggggcctccgcggtctgctcatggcgcacagccagcggctgctcttccgaatcggcaaaacctgggcttccagaccatccaggtagaccatca

SEQ ID NO: 533298 - DNA, 78 bp, Homo sapiens
gggcacaggcagaagtgggccctgtgaccagctgcactggtttcgtggaagtaattcgccaaaatgacgaacacaaag

SEQ ID NO: 533299 - DNA, 100 bp, Homo sapiens
ggctctgaggatgagctggaggagggggttttatgaatgaagctatggctacagattccccaagaagacccagtcgttgtactggtggagttgtggttcg

SEQ ID NO: 533300 - DNA, 100 bp, Homo sapiens
tggagagggaagaaaagctttggatgaaggagcttcaaacccaaagagctggagctccgttactctcatggggactttgagaatggtatctgggtgttat

SEQ ID NO: 533301 - DNA, 98 bp, Homo sapiens
tatggtccccaggggggtcagtatggcccacaagattgggaaaatgaggtacgttagtgttcgcgattttaaaggcaaagtgctaattgatattagag

SEQ ID NO: 533302 - DNA, 100 bp, Homo sapiens
ctaaaggaagagaggaaacgcgagttggaggagaaggtcaaggcagtggaagctgctgcacaggttctggaacctctggcggtctcagattgagcagaaa

SEQ ID NO: 533303 - DNA, 98 bp, Homo sapiens
gcttggcgtccctccgggctgtgtttcggcatggagaccgaagtcccattgacacctttcccactgaccccataaaggaatcctcatggccacaagga

SEQ ID NO: 533304 - DNA, 75 bp, Homo sapiens
agtttcttactcgggagctggctgaagatggctactctggagttgaggtcttcgatgccaagaacatgatggctg

SEQ ID NO: 533305 - DNA, 82 bp, Homo sapiens
tacggaccttaaaatacccgcaacagccccttcgtcccaagtcaatatccaacacagccaacctaccctgtgcagcctcctg

SEQ ID NO: 533306 - DNA, 100 bp, Homo sapiens
gaaactgaatactccttccttcctccccacccattcctttaaatccggagggggaaaaaatcccaaggtctgcaaaggtccggcctctttggcctacccc

SEQ ID NO: 533307 - DNA, 80 bp, Homo sapiens
ccggcttcggagcgggagtgttcgttgtgccagcgactaaaaagagaagctctgaatcagggagagactgtggatctgga

SEQ ID NO: 533308 - DNA, 95 bp, Homo sapiens
tggagccactcaggtttttcctaagctcaactctagccagctaggttcctggtgctttggggattctgaaggaagatttccattaggtaatttgt

SEQ ID NO: 533309 - DNA, 90 bp, Homo sapiens
ccggccacagcctgcagcggagcccacgagaggcagcgccatggcggagcagacctactcgtgctcttgaatgtcgtctctcaactagcc

SEQ ID NO: 533310 - DNA, 100 bp, Homo sapiens
ggagcgcttgaaggagctgcggatccagacatttaatgtggatgcaccatgccagaccgtggaagatttaacgaatggggttgtgatggcccaggttctt

SEQ ID NO: 533311 - DNA, 100 bp, Homo sapiens
aaaagagatgtggggggattctcgacctgctaacagaactggaccttttcggtatctagaagagcagaagacagagaatggaaaagataaggaacagaaa

SEQ ID NO: 533312 - DNA, 100 bp, Homo sapiens
gtgtttccagcccccatttccagcaaaccagtccagctacgggggcccagccagccagcagctgagtgggggttacggaggcggctacggtggccagagc

SEQ ID NO: 533313 - DNA, 100 bp, Homo sapiens
tggaggaagccggaggcctgcgtggaggaggcgccccgcgcagctggctggcggagcatgagcgccccaggtactccaaagattcaggtttactcacgtc

SEQ ID NO: 533314 - DNA, 83 bp, Homo sapiens
tgtcgtcctcacctcgctactcgcttgcctacccgccggcccgcgggtctacttcctcaaagaaaactctcccaccatgtcgc

SEQ ID NO: 533315 - DNA, 90 bp, Homo sapiens
cttcagtttccgtccaaggtccgcctcctacctccttctgcttcgggaccatggccaacctggagcgcaccttcatcgccatcaagccgg

SEQ ID NO: 533316 - DNA, 100 bp, Homo sapiens
atggccatcggctatctgcactcccacaggcacctctaccccgagggcattggtgcccgtcagcagcaggcctttcccctggtttgatctgactgctgtg

SEQ ID NO: 533317 - DNA, 80 bp, Homo sapiens
gtgcagcctggcagtgcagtgctcaaactggaggattataaggatcgcctgaaaagtggagagcatcttaatccagacca

SEQ ID NO: 533318 - DNA, 100 bp, Homo sapiens
ggctctgggagacctgctgcacatcgtcattgacatccctatcaatgtctacaagtacacagcacatccagaaagaaggaagagctctcaatcaagaggc

SEQ ID NO: 533319 - DNA, 126 bp, Homo sapiens
ggctgctgcggaggcgttggagcgcggaaatctggaaccgggatggcgacgtctacactgagtcggaggcgaagaaactatgttccaacttcctgtcaacaatcttggcagtttaagaaaagcccg

SEQ ID NO: 533320 - DNA, 98 bp, Homo sapiens
tcaagtatatcaacaagaaatttcccaacatagatgtccgaaacagcacggacataagcagctctatgaccaatagcacagctgccagtagacccccg

SEQ ID NO: 533321 - DNA, 82 bp, Homo sapiens
cctcgcgtccggagtccccgtggccagattaactgctgaagtactgatcgagttctgcatttcttcaatgaggaactacagg

SEQ ID NO: 533322 - DNA, 51 bp, Homo sapiens
tcctgctaagccaaacagagaaggttgcccccaagtttcctggcagtgtgt

SEQ ID NO: 533323 - DNA, 75 bp, Homo sapiens
ccgagtgtttcccgcagccggccggggtccagactacgtctactttgagaactcctccagcaacccatacctgat

SEQ ID NO: 533324 - DNA, 75 bp, Homo sapiens
aaagagtaccatattgatgaagaagtgggctttgctctgccaaatccacaggaaacttttgagaagaactttgaa

SEQ ID NO: 533325 - DNA, 82 bp, Homo sapiens
gcgcaaggagggactccccgtgaacaacatcttccagcagatctcccccgtggtgcagagcagagcgggcggaggaccccgg

SEQ ID NO: 533326 - DNA, 100 bp, Homo sapiens
tgagaaggcaccatctctgttttctagcagaattcttaataagactcttccagctggagttggaggctgacgccctagtgaatttccatcagtattcttc

SEQ ID NO: 533327 - DNA, 100 bp, Homo sapiens
cgcgtggccgccatggcgcggaatgtggtgcctccggtgtggctgtctctgatggtgtcatcaaggtgttcaacgacatgaaggtgcgtaagtcttcaac

SEQ ID NO: 533328 - DNA, 75 bp, Homo sapiens
cttcctggagaactaccgtgtgtccttggctgagaaagcaagagtgagccatggagctacgtgtggggaacaagt

SEQ ID NO: 533329 - DNA, 88 bp, Homo sapiens
taacattccaacacataaaaattatttatccaacagctcctcccaggaagccagcagacctgcagaacttggctcccgggacccaccc

SEQ ID NO: 533330 - DNA, 75 bp, Homo sapiens
gttcgagcgctgttctcgctccggagccgctgcacatttcgtaggagctgtggcgcggggccttccaggagtctg

SEQ ID NO: 533331 - DNA, 82 bp, Homo sapiens
gaggagctgtgcagccgcgaggaggcgcgggaggtgttcgagaacgaccccgagacgggaagaatgacatctttggggagcc

SEQ ID NO: 533332 - DNA, 102 bp, Homo sapiens
agggaaagaggagaggcacccgatatatgttctctaggccttttagaaaacatgcaacaaatggtcattcagaatgcttacggctattaataggaaatgcag

SEQ ID NO: 533333 - DNA, 90 bp, Homo sapiens
acgtgcaaaggtttcttcaatatttatcaccctgtggacaacaacacagcattggttgacaaattgaagcgtttccagcaggagaatgaa

SEQ ID NO: 533334 - DNA, 100 bp, Homo sapiens
ggaagacctcggactttgcatccagcagataccaagccaccctggtagaacaagtaaaaagagtaaaagaaattgaagctattgaaagtgattcttttgt

SEQ ID NO: 533335 - DNA, 96 bp, Homo sapiens
tgaatacatgatttaaacaagagatttccacagaagtgcttatgaggtgatcaaactcaaaggctacacatcctgggctattggactctctgtagc

SEQ ID NO: 533336 - DNA, 98 bp, Homo sapiens
aaccctggctggggaaaagggaagtgaaaagagatctgttttcaggtctgtttctgtcgactgtggaccacttatgtgcgatccgtggaccacttgcg

SEQ ID NO: 533337 - DNA, 75 bp, Homo sapiens
actattacccccagtatctgcaagccaagctttgccctttcggatgaagcatacagatccctacgagatcaagat

SEQ ID NO: 533338 - DNA, 83 bp, Homo sapiens
cgcccccctccaccccggccgcgcccaagcgcaggggctcctcgggctcagtggcgcttctctgaagtagctttggaaagtag

SEQ ID NO: 533339 - DNA, 87 bp, Homo sapiens
tattttaacatttgggagaaacacagccagaagctcttgaatgtcgtctctcaactagccaaacggaatctgcgactgctggtccta

SEQ ID NO: 533340 - DNA, 75 bp, Homo sapiens
tccactgcctttaaccctcagcctcagagtcagatgcagggtaagaatgattgatgttggctgatattggagtgc

SEQ ID NO: 533341 - DNA, 75 bp, Homo sapiens
cctggactgtgggctggtgtgtggaactggtctcctctgagcctccggcctccataagacccaaaacagatgaca

SEQ ID NO: 533342 - DNA, 90 bp, Homo sapiens
aggactgcgcccccgggagcgggcgcccagagccatatcagcgggaacaagattggctgggagaagacgggaagccactcagagcctcag

SEQ ID NO: 533343 - DNA, 98 bp, Homo sapiens
actgtatttggagaagaatggaaagagaagactgatagagacttcgttaagttcttgaggccaaatctggctcctaaaaaacatcaaaggaagcttgc

SEQ ID NO: 533344 - DNA, 78 bp, Homo sapiens
tgaccaaggaggagtacaaggacatcctgcgcaaggccgtgcagaaggtacttcgactccgtggacatctgtaaggtg

SEQ ID NO: 533345 - DNA, 83 bp, Homo sapiens
gtcaaccatctcacacctttccaaaggacgcgaccataactctaaaagccactatcgaaaacgatcggcatcccggggtcgct

SEQ ID NO: 533346 - DNA, 88 bp, Homo sapiens
gcgcttggggatcctctgtacgcccgttcactggccgccctggtcatatggaacgtcatcctgaggttcatgggtgatctcccagagc

SEQ ID NO: 533347 - DNA, 83 bp, Homo sapiens
cttggcaggaggagcagatctagaaaacaaggtgattacgatgtgattgatctcactggagatgataaagatgatcttcagag

SEQ ID NO: 533348 - DNA, 100 bp, Homo sapiens
caggtcacgccacctctcttcttgtcaccgacgcttcctcagtatccacagatcacccggaagttcaggctgaattctgaaggcaaacttgagcagacgg

SEQ ID NO: 533349 - DNA, 83 bp, Homo sapiens
ggcagggaggatgacggagctgcagtcggcactgctactgcgaagacagctggcagaagaggactgtcagaaggacgtagaag

SEQ ID NO: 533350 - DNA, 100 bp, Homo sapiens
gcgccgcgcgttcgcgctcaagatcaacagcttgtgatgaatggaaaatactaccaaaaccaaatcttcatagagatgtcaacagatttggacactctgc

SEQ ID NO: 533351 - DNA, 100 bp, Homo sapiens
agtataatatgcgtgtggaagactacgaaccttacccggatgatggcatggggtacggcttgttcagaagaaagatacgggacatgtgtatgcaatgaaa

SEQ ID NO: 533352 - DNA, 100 bp, Homo sapiens
tggaaatactaatcgagcactttggcaagataatttgcggtaaaagcctttcagtgaatgaaatgactcttagcactttgaaagaaaaaggctacaaagc

SEQ ID NO: 533353 - DNA, 75 bp, Homo sapiens
aagaggctgaacatgaatccacagatcaggccgctacctgtctgaggaacccgagccctacctggcagtctacct

SEQ ID NO: 533354 - DNA, 80 bp, Homo sapiens
cctaactccagatatctacctaattgattgcatgtagagcgcatgaagtacaggacaataaagcttcctacacatatcac

SEQ ID NO: 533355 - DNA, 73 bp, Homo sapiens
caaatccaggtgaacatccaggagctctccctgtccagccgcctgcagctgaccctgtaccagtacaagacgt

SEQ ID NO: 533356 - DNA, 80 bp, Homo sapiens
aaggtcttcatagaccagaaccttagtcccgggaaaggcgtggattctcagatagtggaggaggacccccagccaaacag

SEQ ID NO: 533357 - DNA, 75 bp, Homo sapiens
tgatgagtcaaacatccctgcagatcttcttggaaacagaattgttctacaaaggtatccgccctgcaattaacg

SEQ ID NO: 533358 - DNA, 110 bp, Homo sapiens
caaagtcacgctcattggccggaggaagctcaccttcgacgaggaagcttataaaaatgtgctatcagttgagggatttgcagttgataaaatggctggagaggttaagg

SEQ ID NO: 533359 - DNA, 87 bp, Homo sapiens
tcccgaagccccctgcaggaactctacaacccaatccaggcacttcaaaaaacgtatcagaagatacttcgagaaaaagaaagtgct

SEQ ID NO: 533360 - DNA, 138 bp, Homo sapiens
aagatattgacgaagaaggggatgaggatgaaggtgaagaagatgaagatgatgatgaaggggaggaaggagaggaggatgaagaaggttataacgatggagaggtagatgacgaggaagatgaagaagagcttggtg

SEQ ID NO: 533361 - DNA, 83 bp, Homo sapiens
atgagcactatccacacgacaggcctacactctattcaaacagaattacctctggactacaaatttacaagattctcttcaag

SEQ ID NO: 533362 - DNA, 51 bp, Homo sapiens
gggaggaggaagatggcggcgggggcgagagacagggtcttgctatgttgc

SEQ ID NO: 533363 - DNA, 78 bp, Homo sapiens
accatgtcagccttcccagtagctgggaccacagaaatacatgctacaggatttaactatcagaatgaagatgaaaaa

SEQ ID NO: 533364 - DNA, 82 bp, Homo sapiens
ttcgttgtgccagcgactaaaaagagcatgtagagcgcatgaagtacaggacaataaagcttcctacacatatcaccaggag

SEQ ID NO: 533365 - DNA, 71 bp, Homo sapiens
ctgatggaggactacgagaagctggccagcgactacttcatcctgctcctcatcatctttctgctggagat

SEQ ID NO: 533366 - DNA, 100 bp, Homo sapiens
attagtgtaaaaacgtccgggtccaaagagagagaggacgaatccatgaaccaaccaggaccaatcaaaaccagactggctattagtcagtcacatttaa

SEQ ID NO: 533367 - DNA, 87 bp, Homo sapiens
ttgtgctcaagggggatcagctctattatttcaaagatgaagatgaaaccaagcccttggaaaatgttggggcttttcaggaagcat

SEQ ID NO: 533368 - DNA, 100 bp, Homo sapiens
cagatatgcccaagaggcagtctttggatctggaaagaatcaggaaacccaggcccaacggcaggtggatgcaagaagaaatgttccccaaaacgaccca

SEQ ID NO: 533369 - DNA, 101 bp, Homo sapiens
agggaagtagtgtcctactcaaaggagacccagactcctcttgccacgcatcagtctgaagctctagaggacaaaatcccagtccttggcacaaactcagg

SEQ ID NO: 533370 - DNA, 100 bp, Homo sapiens
cagaaggagctggcggacatcactttagaccctccacctaattgcaggttgatgccgccttacctttggacatcctaacctatgaagagaagaccttgtc

SEQ ID NO: 533371 - DNA, 100 bp, Homo sapiens
agcggggccttccacaccccctccgtgggtgtgtggtagctacagcaagctgggtagcaggcagatccaaaggatatcatgaagtttccagggcctttgg

SEQ ID NO: 533372 - DNA, 102 bp, Homo sapiens
ttgtcttgaaaagtgaaaatggttccatttccattttccctgttctcaaggtgatctttagacagtgactgagtatggatcatttgaacgaggcaactcagg

SEQ ID NO: 533373 - DNA, 75 bp, Homo sapiens
taaacgacttgttctctatcgaacaaaagtagaggccagattgattgggctgcattggcccaagcttggattgcc

SEQ ID NO: 533374 - DNA, 90 bp, Homo sapiens
ccctctctctgctgcatgcactattgctgtaaggggcaattccaaaagtcttcagatttccaaaaggaaggactgcagcagacatttctg

SEQ ID NO: 533375 - DNA, 59 bp, Homo sapiens
atttcaggagctgatattaactccatctgtcaggaggatcccctaacaacagtgagaga

SEQ ID NO: 533376 - DNA, 82 bp, Homo sapiens
gcaacccttcagcttcccagcctaccactggaccctctgctgcctctccagtggggactggatatgcacattttgtagagat

SEQ ID NO: 533377 - DNA, 100 bp, Homo sapiens
ggcccaatcatcagctgatttcctatcagggcagaattccatatcctcgccctggaactgaaacagaagaaatgtgtgtgatgcttgtctctaatttgcc

SEQ ID NO: 533378 - DNA, 50 bp, Homo sapiens
tccagcctgccgcgtgccctacgccgtgccgtccctgcagtgacaccgag

SEQ ID NO: 533379 - DNA, 76 bp, Homo sapiens
atctttaagaaattttatcttttgaaacacgttctgattaaccaaggtgttggctgcaccaattctagaagtaagc

SEQ ID NO: 533380 - DNA, 83 bp, Homo sapiens
agcctcactcctgtcaatatattcttgggactgttgccttgtgggatctgagaaatctgaaacttaagttgcattcctttgag

SEQ ID NO: 533381 - DNA, 83 bp, Homo sapiens
ccaaggatggcagcgggaccggcggctctaagtcctctttgatacgcaacctacggctctctgagtccttgaaaaagaaccaa

SEQ ID NO: 533382 - DNA, 95 bp, Homo sapiens
gtcagtcagagatccagctatcaaaggcaaatggcaacagtttagcagatactttcagaaatggatacataagaaatggctggaaatcaaatgaa

SEQ ID NO: 533383 - DNA, 100 bp, Homo sapiens
gcgcagccgccggcgtcgccgccatggacctaggagttctttcctcatcatccataaatgtcattcattgagcatgtgatcagcttctcctagatagatg

SEQ ID NO: 533384 - DNA, 77 bp, Homo sapiens
gagtccccgatgtttgtagaccttatagacattttaaatccaaaggatgtgattagtgtccagctggaagacactac

SEQ ID NO: 533385 - DNA, 96 bp, Homo sapiens
tgaacattggtctaaagtctttccaaaaggtcaaggttcacaaggactgatcctttgaaatactccagccatgactaaaagagaagcagaggagct

SEQ ID NO: 533386 - DNA, 74 bp, Homo sapiens
tgaaagactacccatgctatatccagaagtaattcaacaggcagaagaaatccttagacaagagctggagaaaa

SEQ ID NO: 533387 - DNA, 104 bp, Homo sapiens
cctgggtatgacccagagacagtaactgtgaccgtgggtcctgcggaaccaacgttgcacaagttgaccccggaatatctggagctcaaaaagtaccaggccat

SEQ ID NO: 533388 - DNA, 75 bp, Homo sapiens
ccgaattggtagctctatgaaaagtgtaggagagggtgcagtacatgttaatgacaggattgtaccacagccacc

SEQ ID NO: 533389 - DNA, 50 bp, Homo sapiens
cctcctacaccaccaattttgagtacatcaggaacgtctctatcaagaat

SEQ ID NO: 533390 - DNA, 100 bp, Homo sapiens
ttaggactcggtgtaggagatccatcgaaccactcgctcagggaagaagaagcactcctctctgaaatggatgtcacaggccaggcctttgaagacatgc

SEQ ID NO: 533391 - DNA, 75 bp, Homo sapiens
aatgcagagtcctcttgttggagttacatctactcctggaacaggtgaagccttgaaaggaaaggtcacagttca

SEQ ID NO: 533392 - DNA, 100 bp, Homo sapiens
ccagcatcagcttcgagatcctgggctttaacagcaagggagagaggtatgaaggttattgaaaaccgggccttaaaagatgaagaaaagatggaactcc

SEQ ID NO: 533393 - DNA, 90 bp, Homo sapiens
ctggaccaaacaaatgggatttcccctcatttatgtggaagctgaacagttagcagggcgaggactgattaaaggcagagatcatcttat

SEQ ID NO: 533394 - DNA, 75 bp, Homo sapiens
acactctggaccccaatggcaaaacctgcagccacttaattcagtgcacaaatgagatgaatgtgaacatcccac

SEQ ID NO: 533395 - DNA, 100 bp, Homo sapiens
acgccagcggacacgcgggcgaggaattctcaagaaatttgaggaagaagatttggatgacattttaaggaaaagattgaaggactcaagtgaaatacct

SEQ ID NO: 533396 - DNA, 88 bp, Homo sapiens
ttcccccagagctgtcgccatttccaaagcccagacttgggaactcagtacctggtctgctaaaaggtcagagtaatgcagaatgcgt

SEQ ID NO: 533397 - DNA, 51 bp, Homo sapiens
acctagtggggaccggccccagagtcccctttacttggtaaatcacggcga

SEQ ID NO: 533398 - DNA, 106 bp, Homo sapiens
caaggatgagattttgccagagaaaggacgagcagcaagtcagggagcttaaggtatctactgagcgtttcagtcaacaatacagctcgtgttcgacaatattcct

SEQ ID NO: 533399 - DNA, 98 bp, Homo sapiens
gttggcactcagactgccaaaatacagcagcagatcattcggcacaaggtctcaaagttgaggtgacccactgtggacagatgaaacgaaaataccga

SEQ ID NO: 533400 - DNA, 50 bp, Homo sapiens
cttcagaataaacagtagaaacttgagtgatgtggacgagtgctcactag

SEQ ID NO: 533401 - DNA, 74 bp, Homo sapiens
taccaagaagccagtcaagcggccaggatgccggctccaggagcagcagtggaggtcgggaacgcctcattgtg

SEQ ID NO: 533402 - DNA, 100 bp, Homo sapiens
tgacaaccaggcaatgctggatagataccgaattcttatcacaaagggtgccaaagagtttttagtaccatccagggaacctggaaagttttattctctc

SEQ ID NO: 533403 - DNA, 75 bp, Homo sapiens
ggccgcctggctccccatactagtcgccggacatgatccacatcgcggacaccaaggtcgccaggcgttatgggg

SEQ ID NO: 533404 - DNA, 119 bp, Homo sapiens
ggaaccaacccactttctcggcgccgcggctcttttctaaaagttgtctcaatgagatcttggagtcagcagatgcacccttagaagtcactgaaggattcattcagtcaatttccctg

SEQ ID NO: 533405 - DNA, 82 bp, Homo sapiens
cttgggacatgcaggacttgtatatgagtatacattggcactcttaaaagacccattttacatgggcttgtaccagaaacga

SEQ ID NO: 533406 - DNA, 80 bp, Homo sapiens
ttatggtcgatcgtcttcctactgtcttgttttttccctgcaacaggtcatacttacctggttgcttgcgcatctagtaa

SEQ ID NO: 533407 - DNA, 75 bp, Homo sapiens
atgatgcagaaatagcatgtaagctccgcccgatgggttttaaggcacagttggtggatctgaaatctgaactga

SEQ ID NO: 533408 - DNA, 98 bp, Homo sapiens
aatctggttatagatggacaagagacgatcattctgcaagcaggcaacctgaatacagggacacagcaggtcaggagagattcaacagcattacctca

SEQ ID NO: 533409 - DNA, 100 bp, Homo sapiens
tggcaatgctgaagaagtaagacaactattagagaccatggcgaggaatgaagtgattgctgacattaattgcaaagtagagaaatggtcagaaggaacg

SEQ ID NO: 533410 - DNA, 74 bp, Homo sapiens
gtggagatatggcgcaactgcggcgctgtggacgaatgtggaacctcgctctgtggctgtgttcccttggcact

SEQ ID NO: 533411 - DNA, 100 bp, Homo sapiens
cgcccctccctgagcccagcctggaggacagcagcggaatggcggcgctagatagtaaggcatcagggaagatgggaatgcgagctgtagtctattatat

SEQ ID NO: 533412 - DNA, 98 bp, Homo sapiens
cgagataccggcgccatgtccagcgctcggacccccctacccacgctgaacgagagggacacggagcaggaaccctaaggactctgcaatatgaataa

SEQ ID NO: 533413 - DNA, 110 bp, Homo sapiens
cctcagccactttctccagcctcctcaagttattcagtctcgtctcctcggtcagtggactcttattcttcaactcagcatgttcctctgtatttaaacttgaaacagat

SEQ ID NO: 533414 - DNA, 82 bp, Homo sapiens
ctcgcggaccggcgtccccggcgcgaagaggctggactcggattcgttgcctgaggatgttgcttcagagtgtgaagtcaaa

SEQ ID NO: 533415 - DNA, 85 bp, Homo sapiens
gtccggggcttgccctggtcttgctcggccgatgaagtgcagaggtttttttctggaatgtgttgttcatgaaaaactgatagaa

SEQ ID NO: 533416 - DNA, 100 bp, Homo sapiens
caagcacttcctgccgcgggcggcgcgccgcagctgcccaggccggaccgggccgggcgcccgcaggtctcctctgagcctccggcctccataagaccca

SEQ ID NO: 533417 - DNA, 80 bp, Homo sapiens
tcagcctcccgagtatctgggattacaggatgcactcctaagagaagactacctgaaaggcgtgtacactggtctagcag

SEQ ID NO: 533418 - DNA, 75 bp, Homo sapiens
cgggacaaatggacctccgtgaaggcgtccgtcctgcgcatcgcaggactttgaacatgtcggggatcgccctca

SEQ ID NO: 533419 - DNA, 96 bp, Homo sapiens
tcctgctggaccgctgtggccacatccgcctggccgacttcggctcttgcctcaagctgcgggcagatggaacgcaaggacaccacagctcttccg

SEQ ID NO: 533420 - DNA, 98 bp, Homo sapiens
cagggaagtgtggtttggattccatcagtctgttcggcctgccatgtggaaaatgatgcttaatatcgatggttgtctgcattcaaaagagcattcta

SEQ ID NO: 533421 - DNA, 100 bp, Homo sapiens
cgacgggcggtggccgcactgggaccccggaatcccgcgcgctgcccacgattcgcttctgaggggcatttgacattcaaggatgtagccatagaattct

SEQ ID NO: 533422 - DNA, 100 bp, Homo sapiens
ctccaaggagttcaatcacttggcgtgacttcactacttttaagcaaaagaagctgacatcgcgctgatcggattggccgtcatgggccagaacttaatt

SEQ ID NO: 533423 - DNA, 100 bp, Homo sapiens
tatttatccaacagctcctcccaggtagttggcaaaaaaggagaaagccactaaggtacaaaagacactggacaaccatattgcaatcagatctacagct

SEQ ID NO: 533424 - DNA, 100 bp, Homo sapiens
catctcattgattatcatctggcagcattcatcacagtgatgcttgcgaggaggcttgtatgggctctcatctcagaggatgtctccccgttcaatgttg

SEQ ID NO: 533425 - DNA, 50 bp, Homo sapiens
cccggcctgacctgtggatttttaaggatacgtagagaaatcgacactct

SEQ ID NO: 533426 - DNA, 85 bp, Homo sapiens
tgcttcctgatcaaaatggagaaggtggatgaaactcagtttaagaagatcctcggctacatcaacacggggaagcaagaggggg

SEQ ID NO: 533427 - DNA, 83 bp, Homo sapiens
ccagcaccagcgctatggcggatgatatcatcaagttgaatcgaaaggaagggaagaagcagaattttccaagactaaataga

SEQ ID NO: 533428 - DNA, 75 bp, Homo sapiens
cccagccttgcgcgtcgtcgctacctcctcggacagagtaaagccaatcccagctgaaggaatcaagtcaaatcc

SEQ ID NO: 533429 - DNA, 75 bp, Homo sapiens
ggagcagaggaagccttgaggacctactcacagataggaattgaagttgatcatggccttgccaggttggtgaca

SEQ ID NO: 533430 - DNA, 75 bp, Homo sapiens
tatgctaagaaagaatcttgtcactttagccactgctactacagaataaacagccattggactcttcaaacaaaa

SEQ ID NO: 533431 - DNA, 100 bp, Homo sapiens
caccacctgggctgtgctctccggctcccgccgccacccccgccctcgccttcgcctccgcctccgctcttcaggaagctgcagcaaggtttgaggaatt

SEQ ID NO: 533432 - DNA, 89 bp, Homo sapiens
gtcaagattgaccctctggctttggtacaagccatcgagagataccttgtagttagagaagattctagtgttccagaaactccagataa

SEQ ID NO: 533433 - DNA, 100 bp, Homo sapiens
aactaccagcagaactgtatcaaggaagtggagcagttcacccaggcttgcacccagacacgacaccatgcatctcctcggcccctggctcctgctcctg

SEQ ID NO: 533434 - DNA, 82 bp, Homo sapiens
ctgccccggcgccgtccgtgcccgcgggacctgacagccgggtcagagggggatatgagactttctactcggaatatcctga

SEQ ID NO: 533435 - DNA, 75 bp, Homo sapiens
caacaggctgccaataaaggagcaagatggctaggggtaattaataatgcttgtgctactcaagccatagtgagt

SEQ ID NO: 533436 - DNA, 82 bp, Homo sapiens
aagaacgggaacaaaactctgggagggacattgcttgggcctccagactctgtggttgatgtggggagtacagaagtcacag

SEQ ID NO: 533437 - DNA, 90 bp, Homo sapiens
acgtctttgactggaacatgctgaaattcgacactcccagttgccgggatgacctgctgagtgactacttccgaaaggccagcgatcccc

SEQ ID NO: 533438 - DNA, 107 bp, Homo sapiens
attcatcttgcaatccactattatcagaaggccctggagctccctccacttgtggtagaggctattccattccaagatgaccaaataggaacagctctggtctggag

SEQ ID NO: 533439 - DNA, 75 bp, Homo sapiens
gaaaatcattgccctgcagagtggtttacaagctgccggctcagttcggggaagctgcaggagttcggcgtgggt

SEQ ID NO: 533440 - DNA, 75 bp, Homo sapiens
aacagactttttcattggaggagaagaagggatggcagagaaggagaataaaggcagccccgttgatgactgaaa

SEQ ID NO: 533441 - DNA, 98 bp, Homo sapiens
acagccccgaggtgtgcgaagccaccaactacaagagactgtgaaaaggaagttggaaggagctcgatcaccacttaatggagaccagcagaatggtg

SEQ ID NO: 533442 - DNA, 90 bp, Homo sapiens
cttcgatcctgtgcagcgttataagatgctcatcccgcagctgaaggagagtctacagacacgaagatcgattgagaagttattagaatg

SEQ ID NO: 533443 - DNA, 100 bp, Homo sapiens
cataatctgaaggatcgctactattcaggactaatctataatcgaattctctgggttgatgagaacaatttgacagctcatgtagaggctggcataacag

SEQ ID NO: 533444 - DNA, 83 bp, Homo sapiens
gtgcttcattaccacgagataggcaatacgaaagggtatatgagtgtaacaaacgctgcaaatgtgacccaaacatgtgcaca

SEQ ID NO: 533445 - DNA, 74 bp, Homo sapiens
aagaagttatgcttgttggaattggtgacaaaatcagaggcatactttatagggtgtccgcaatgttgccagtg

SEQ ID NO: 533446 - DNA, 90 bp, Homo sapiens
cacagctaagacgccaggacccactggaagcctagaaatggcttacagcttcgccatgggctgctggcccaagaatggacttctagacat

SEQ ID NO: 533447 - DNA, 100 bp, Homo sapiens
ggcccgtgaccgctgcttcctcctcatcttccgcctctggcagaatgcactgcttgaaaagaactttccatgactggatcacagggaaaaaccgaccgag

SEQ ID NO: 533448 - DNA, 98 bp, Homo sapiens
tgacaataaccatcttattcagtgtataatggactctcagaataaaggaaagacctcagagtgttctcagacatggatttgattgacatactttggag

SEQ ID NO: 533449 - DNA, 100 bp, Homo sapiens
tgtaccttgtgacagaatatgccaaaaatggagaaatttttgttcacacaaaagatgttggacaatttctacaattttgcttcatcatttgctgtctctc

SEQ ID NO: 533450 - DNA, 90 bp, Homo sapiens
taagcatgccctgaaaaagtatcgtcgagaagcctatcatcggcttaaatcaagtgatgcttacaaaaaagcctggggcaataatcagga

SEQ ID NO: 533451 - DNA, 100 bp, Homo sapiens
cccggacagtggcagtgaaacagtgctcatctgaggaggcaggacgcagcctctccgcctctttgcttattctgctgactgaccgcctctccagccagag

SEQ ID NO: 533452 - DNA, 100 bp, Homo sapiens
ttgaatatcaagaggaggagttgttggatggcagaatagctgtgaaggcatgtgaaggcttgatgctgttagtaagtttgccagagcctgcggctgcaaa

SEQ ID NO: 533453 - DNA, 97 bp, Homo sapiens
aagaacttcttcccaaaatgggtctcagccaatttcttctccagtcatcctccagtttggtcatgcagagactcttcttccactgctttctctcatg

SEQ ID NO: 533454 - DNA, 75 bp, Homo sapiens
gctgacagccggctcacactgcgagtggaaattttgctcagccgacaaaagaaggctgaacttctaaagaagatg

SEQ ID NO: 533455 - DNA, 100 bp, Homo sapiens
tggccagcagagggcgaagtttcaagcagacttcacttgctcttgtacatgaggaatctccgtatgttatgatgaagaaaaatcatgaaatgcttgaagg

SEQ ID NO: 533456 - DNA, 89 bp, Homo sapiens
gcaaaggggaggttacgcagcaaaccatccagaagttggaatcgaagcctcttaaaatggcagatgacttggacttcgagacaggagat

SEQ ID NO: 533457 - DNA, 75 bp, Homo sapiens
agcggaaggtgatgcccaagatggaccaggcatcaagcatgatggaaccatgtgtgatacctgccgccagcaacc

SEQ ID NO: 533458 - DNA, 96 bp, Homo sapiens
caaccagaaagagattgggtacttaatgctctggtttgtcaggctggcactactagtgaagttgggccttttccagaatgctgagatggaatttga

SEQ ID NO: 533459 - DNA, 75 bp, Homo sapiens
ttttcacctggcccaatactacttcttcaccaaaggacatggatgaaaatgaaagcaaccagtctctgatgacaa

SEQ ID NO: 533460 - DNA, 51 bp, Homo sapiens
atcaagtaatggtgcaaagcctgaagacagtcattttgtttactcattcag

SEQ ID NO: 533461 - DNA, 99 bp, Homo sapiens
cacagttcctgggaaggtggagccaccagcctctccttgtgagatggaagattttcgaggtatagcagaagaatcatttccaagctttctcaccaattc

SEQ ID NO: 533462 - DNA, 100 bp, Homo sapiens
cccagcagagcccgcctgcccggctgtcgataagggagacctggtggccctgagcctccccgccggccatggtgacaccgacggccccatcagcctggac

SEQ ID NO: 533463 - DNA, 98 bp, Homo sapiens
agttacctaacggacaagggctgcaatagatggagtttcactgtgtcagccaggatggtctcgatctcctgacctcgtgatccgcccgccttggcctt

SEQ ID NO: 533464 - DNA, 83 bp, Homo sapiens
agggtgcagagcctggagagcatgccccggccccctgagcagattgactggggcgactttggggtagaggcagtgtctgaggg

SEQ ID NO: 533465 - DNA, 82 bp, Homo sapiens
cttttctcagatgttggatatttgcttggaaaaacgtgtgggtacgaccttgtacaaagtggttgtccccaaaattggaaac

SEQ ID NO: 533466 - DNA, 75 bp, Homo sapiens
ggcctggtgtagactccatctcctgcactgcgcctggccggagcaaccctcctcatctttgctaataagcaggac

SEQ ID NO: 533467 - DNA, 82 bp, Homo sapiens
gacctggtgttcgccaagatgaagggctacccacactggccggcccggagttgtctgctggttctcagcttgaagaagattc

SEQ ID NO: 533468 - DNA, 83 bp, Homo sapiens
ggacatcatgcgcctccgggagaacccgggttggcgccatgtacgccgtgtacaaacaggcgcatccgcccaccggtctggag

SEQ ID NO: 533469 - DNA, 82 bp, Homo sapiens
ctccactccgtcccccgcgggtctgctctgtgtgccatggacgggccaccagcttgggctccccacggagggcagcaagtgg

SEQ ID NO: 533470 - DNA, 100 bp, Homo sapiens
agcggatcctgcgcatcactggctactatggctaccagccctgggcagcgagctgcaaaaatgaacactgggcagcgtagggatggacctcttgtactta

SEQ ID NO: 533471 - DNA, 50 bp, Homo sapiens
cccgttaacgtctctgttagttcagaggctcacgtgatggttctatggga

SEQ ID NO: 533472 - DNA, 100 bp, Homo sapiens
tggtgcgggccctctggaccctggagtacaccccgcagcacagccgcgacttcaaggtacttggaaaaatggacaaggattgtgaaatgaaacgcaccac

SEQ ID NO: 533473 - DNA, 50 bp, Homo sapiens
cctgcacgccggcgagtgccagcgtattaaaggtggaagaaggtccatat

SEQ ID NO: 533474 - DNA, 98 bp, Homo sapiens
gatacattaaatgcaatagcccttcagtactgttgtacgctatgaagacggccaagtgggagatgcaaatattaatacacaagaaggaggcattcaca

SEQ ID NO: 533475 - DNA, 90 bp, Homo sapiens
tgcggggcgctgctggcgtgtctcctcctagtgcttcccgtctcagaggcaaactcaatacgagaattggagacccaaccagccagacag

SEQ ID NO: 533476 - DNA, 100 bp, Homo sapiens
aagactggtacacttacaacaaaccagatgtcagtctgcagggccagtacacaacaggccggggctcctcaggagtggggcttacggcagctgtgctgag

SEQ ID NO: 533477 - DNA, 114 bp, Homo sapiens
cagaaagccgcctcttggtttgcgtcctgcactgaaaggaaatgacggattttagagtaaaacttgtctcggcacagagtcaagtaaagaaagccaacatacagtggagcccct

SEQ ID NO: 533478 - DNA, 107 bp, Homo sapiens
ggggggcggctctgcgctggccgggggcgcgggcggcggcgccggcaggaaggattttttatcaagcagaaatgcatcgaacaacgagaatcaagatcactgagcta

SEQ ID NO: 533479 - DNA, 100 bp, Homo sapiens
gttgcgtttcatgagtcgggccacgccttggtgggctggatgctggagcacacggaggccgtgatgaaggcatccgtgtcattctggaccttactcccaa

SEQ ID NO: 533480 - DNA, 75 bp, Homo sapiens
aacagaacgcggctcccagccacaccaagttcagattttggtttcagtaacctcttcactcctgggcagctgctg

SEQ ID NO: 533481 - DNA, 90 bp, Homo sapiens
gtgaaacagaagaaggccagctttgaggaagaatcagacacaagtttggcagaaggaagtgtcagctgcttagatgaaagtcttggacat

SEQ ID NO: 533482 - DNA, 74 bp, Homo sapiens
cctcccaggtggagtacacggcagactcttcgttccagagcccagcatgaatggatacgcggaatttccgccca

SEQ ID NO: 533483 - DNA, 115 bp, Homo sapiens
gtgggcagcaagatctacgtggatgatgggcttatttctctccaggtgaagcagaaagggttatgtggtccgaatcagtggtgggaacgacaaacaaggtttccccatgaagcag

SEQ ID NO: 533484 - DNA, 100 bp, Homo sapiens
cggtacatcgcctcggtgcagggctccaccccgtcgcctcgacagggcttttttccagacttcaagctcccattccaacagtaagagcttcttccacatc

SEQ ID NO: 533485 - DNA, 48 bp, Homo sapiens
cggggaagccattccccaccccccagccctcgagcatgttccaaactc

SEQ ID NO: 533486 - DNA, 75 bp, Homo sapiens
gatggtgttgttggagagcgagcaggcgacctgggagacccagccagtaccgcccagacggacttcggagtggtg

SEQ ID NO: 533487 - DNA, 101 bp, Homo sapiens
cccaaatcgcagagggaagcttcaaatacacttctaatcatcctcagtacccagcagtatatgtggagtggctgaaacttctcagcaggcgcatctacact

SEQ ID NO: 533488 - DNA, 100 bp, Homo sapiens
caaaggtcatctaatctttaaaagaggccagtaatagtagccatgagtctcgtattggtctagctgaggggttggaatccgagaagaaggcagttatacc

SEQ ID NO: 533489 - DNA, 51 bp, Homo sapiens
caaagttattgccagcttcctgatgtcctgtgaagtcaacgagtgccgaaa

SEQ ID NO: 533490 - DNA, 100 bp, Homo sapiens
ggatgaagaaggtcaggatgacaaagatttctacctccggggagctgttggcttatcagacggcgatctcgatgtcgtgtttgcctcttcctctaagtgc

SEQ ID NO: 533491 - DNA, 74 bp, Homo sapiens
aaaacagtgtcgctgataccaacaagcttttctgggagaagaggctacaaggacttagtgcatcagatgtaaca

SEQ ID NO: 533492 - DNA, 100 bp, Homo sapiens
ggtaggagtggtgaagctggaacagccagaattggacccgaaaccatgcctcactgtcctaggcaagtttgctgggatggagtcaggctatgcttgcttc

SEQ ID NO: 533493 - DNA, 75 bp, Homo sapiens
ggccgaccagggacctgcccgcctgcggctgctccggagttacactgttagaccttatgatagccaagataacga

SEQ ID NO: 533494 - DNA, 101 bp, Homo sapiens
gacctgactgtggagatggcggctcagaagataaacgaggggctggaacacctcgccaaagcagagaaataggaagacatgtaaggaatttgcataagaca

SEQ ID NO: 533495 - DNA, 100 bp, Homo sapiens
cgagcctcttctgataactcaggatttacttgaaatgaaaggagattccaacctacttcagggaacatccttctgtatcagaaattcccatgtttccata

SEQ ID NO: 533496 - DNA, 90 bp, Homo sapiens
aaccacaggcatcagttggtactcgccatgaaactcaaagatcgagaggaggaagagggtaatctggaagagtttcctgacctactctgc

SEQ ID NO: 533497 - DNA, 100 bp, Homo sapiens
gagaaggaggtctggggcatggagaataactcatcagaatcatcttttgcagattcttctgtagtttcagaggtgtggtggaaaggtcttccagaaccag

SEQ ID NO: 533498 - DNA, 98 bp, Homo sapiens
ggacctaggtcgcggcgacatggtgatggcatcagctgagaagggaaggaagcccatgtgaggacactgaagaaggagtgagcagacaataagaagcc

SEQ ID NO: 533499 - DNA, 50 bp, Homo sapiens
aaaatgtggcagcgcctgaaaggaatgtccacgctgcttttatgagctgt

SEQ ID NO: 533500 - DNA, 75 bp, Homo sapiens
gtggaggctgaggaggcggcggcggagatctgggtgaccctgacgagtttggatataccctttgccatgtttgct

SEQ ID NO: 533501 - DNA, 50 bp, Homo sapiens
cgaggatcaaaatcttcgaaggaggggcagctgcaatgactctccgcacg

SEQ ID NO: 533502 - DNA, 75 bp, Homo sapiens
ttctttggtccagtttcccttatgggagtccttaaaaatgtatggtctgctggctgtgtgttggctgagctgtta

SEQ ID NO: 533503 - DNA, 75 bp, Homo sapiens
ctgccgccaccttactgcccaggtgcgcagcctggaggcacaggtaccaaacattgattttgagggactttttgg

SEQ ID NO: 533504 - DNA, 96 bp, Homo sapiens
ttgcctcggattccgacagcaggaaacccgaaccctagcggagattgccaaagtggagctggacaatatgccactccgtggaaagcagctgcgtgt

SEQ ID NO: 533505 - DNA, 75 bp, Homo sapiens
caagaacgggcacctggctgtgaccagtgtgcttttcttggagaaagaagaaaagaagaaagaaggaagaagaag

SEQ ID NO: 533506 - DNA, 82 bp, Homo sapiens
agccgatccagcctgcggagcctgtggggcagaacaatatgatacatcttcaaaaactcactcaaattctcagcaaggaacg

SEQ ID NO: 533507 - DNA, 100 bp, Homo sapiens
gcgacggccactgttctctgggacaatgcttttgcagagcctaaaaactgcttaaggttgaaaagagaaatttaagaaattgctgacggaataaaaacat

SEQ ID NO: 533508 - DNA, 50 bp, Homo sapiens
tcagatgatgaggatgctgcagttgatggattaatgaaaatcaagttcca

SEQ ID NO: 533509 - DNA, 80 bp, Homo sapiens
ggagccctcgcgacgcgcccggcccggagcccccagcgcagcggccgcggtgttgacttcaaaatcaaaactgtagagct

SEQ ID NO: 533510 - DNA, 75 bp, Homo sapiens
catgtctgcagggccagcaaggggcagaggctgacaagcgctccttcctccaggagtgatccaaaatggagcgcg

SEQ ID NO: 533511 - DNA, 88 bp, Homo sapiens
ggccgcgagaagcagcgggggggcaggcgatcgaaggtgttggagagcacaatggctgaacaagtccttcctcaggctttgtatttga

SEQ ID NO: 533512 - DNA, 90 bp, Homo sapiens
gcctgctttgccttcgccttccaccatgatcgttggtcaaagaaaaagtgatgtatgaaaaagaggcaaaacaacaagaagaaaagattg

SEQ ID NO: 533513 - DNA, 100 bp, Homo sapiens
tatcaattccatccaaatttagattattacaaagcacgaggagcagacctcatgaataaaagccggcgtttagatgccaaccatattacctcagtccccg

SEQ ID NO: 533514 - DNA, 90 bp, Homo sapiens
gggaaaaaggaagtttgtcctgtcctggatcagtttctttgtcatgtagccaagactggagaaacaatcgttgacagaaggctacgttgg

SEQ ID NO: 533515 - DNA, 100 bp, Homo sapiens
agtttttttaatgtggttggaacaactgaggatctccatccacatacaagagatggatactcctggggagatgctgatgacaggcaggggcagccttgga

SEQ ID NO: 533516 - DNA, 101 bp, Homo sapiens
caaacacctgctgatgtggcaactgctgatgctcatggtccccatggcatgggggcctcagggcagcctgcctggagggtgtttgtgaaccgaagtttagc

SEQ ID NO: 533517 - DNA, 74 bp, Homo sapiens
tttaccgcaattatggcatcctggccgatgccacggagcaagtgggccaggaagagaatggagactacacatat

SEQ ID NO: 533518 - DNA, 75 bp, Homo sapiens
gccccctatgggagggccaccaatgggacaagttattattgcagcagaactcctaaaaaatgcagatgaattagt

SEQ ID NO: 533519 - DNA, 75 bp, Homo sapiens
aaaattcaggcatttgtccaaggaagagtgttgatgggaaccattttcagcatcctgctggtgactgtcatcctt

SEQ ID NO: 533520 - DNA, 100 bp, Homo sapiens
ccttattttttctcatggatgttcttcttcgagtatttgtagaagggttaacattcaagatggtacatgctgaagccttttctcgtcctttgagtcggaa

SEQ ID NO: 533521 - DNA, 114 bp, Homo sapiens
gtccctcgcccgaggagcgcggtggcggcgtgggagggagcctctgacggcgtctggcaactactctaagagtgaggaaattagaagaaaacattgaagcagaaagagcagcgc

SEQ ID NO: 533522 - DNA, 83 bp, Homo sapiens
aggcctcccgggctccgggaaaactacactggccaggctgcaagatcaaggccctgcgggccaagacaaacacctacatcaag

SEQ ID NO: 533523 - DNA, 75 bp, Homo sapiens
caggaccccaacaataacttacagctcctccgcctctgatgcagaatttgatgctgtggttggatatttagagga

SEQ ID NO: 533524 - DNA, 97 bp, Homo sapiens
ccgaggcgagcgccgcgcgcaccactggtggtggtctgtcacgtggtgggccaggctattcagttcttggtcagcgagacgcctgccttgggtgctg

SEQ ID NO: 533525 - DNA, 75 bp, Homo sapiens
ttcagaatcgactcaagagttacatgcatcaggagcttctggaagaggtgaagaaggaattgcagaaagtgaaag

SEQ ID NO: 533526 - DNA, 82 bp, Homo sapiens
catcctgccaaactccaggctcagatgtcacagaaacacccgccgggcagcagaggtctggatggatgaatacaaaaatttc

SEQ ID NO: 533527 - DNA, 100 bp, Homo sapiens
cggaggcctcggcccggcctcatcgtgccggcttcgcgcgcgaacccggctttcgcatttgggaccctgcaggttcaaatctgaacatcaatgatgtact

SEQ ID NO: 533528 - DNA, 76 bp, Homo sapiens
cttggacctaccacttgaaaccattagtgagctgacatctccagttacagcccgaacactggaaactctgattcga

SEQ ID NO: 533529 - DNA, 139 bp, Homo sapiens
ccgggtgggctttgcctcctgctgctgctgctctgccagttcatggaggaccgcagtgcccagggtgaaacctcacctgctatccagctgcccacacctgcagtccagagcccaagccctgtcacacttttccagccca

SEQ ID NO: 533530 - DNA, 78 bp, Homo sapiens
gagtgcctgcaggatgtgagggagatcatcaatgctgtggtactgttgattttattgagtgccctggctgatccggat

SEQ ID NO: 533531 - DNA, 50 bp, Homo sapiens
cagctgcgatctctgtggtaggcccaggagaggcagatgcgaaccagaac

SEQ ID NO: 533532 - DNA, 82 bp, Homo sapiens
tgagatgaagctgtcagtcaatgcccgtgcccgcattgtggctgaagagttccttaagaataaagggactaaggctcctcag

SEQ ID NO: 533533 - DNA, 90 bp, Homo sapiens
ctcgctcggctgcgggaaatcgggctgaagcgactgagtccgcgatggaggtgaagatgcttttgatgccctccctccatctctcccacc

SEQ ID NO: 533534 - DNA, 95 bp, Homo sapiens
atggcctctcgtcggcagtgaagctcaagttgctactcgggacgctgcacctcccgcgccgcacggtggacgagaagtgagcttgtagtggacaa

SEQ ID NO: 533535 - DNA, 100 bp, Homo sapiens
cctcagcctccagagtagctgggattacaggtcagctggaactgggtccgcctggaaacccgggggccgggcccccagagggctttcgcagcctggccgc

SEQ ID NO: 533536 - DNA, 100 bp, Homo sapiens
caagagtccaagtggcacaaattctgggtccgttgtccatcacaaacaagacattgatttatatattgggactgcagggaaactgaacagccaagactcc

SEQ ID NO: 533537 - DNA, 83 bp, Homo sapiens
ggagctgcagcagcatgtaaagtcagtgacagccccattttctccacagacactacccaaagcagtccttcactacagtggca

SEQ ID NO: 533538 - DNA, 75 bp, Homo sapiens
caaatccgtgtcggagtccttacaggataagttctgaacgtcgaaaagaaaagtctcgagatgcagccagatctc

SEQ ID NO: 533539 - DNA, 90 bp, Homo sapiens
ccgaggagccgggcgcaatggagcggaagaggattatatctgtccaagatgcgagtctggttttatcgaggagcttccggaagagaccag

SEQ ID NO: 533540 - DNA, 88 bp, Homo sapiens
aagaatgggagtcaagttgctttgtggaaaaaactcactggggatactacacctggccaaagacatcaaaggccagttctggaatgat

SEQ ID NO: 533541 - DNA, 100 bp, Homo sapiens
aaaatcacagctttgagtgagaaacaggtgccacaacagaagcagattgggttcctctcgagctgtgctttggaattccactgttcagttccgaattaaa

SEQ ID NO: 533542 - DNA, 85 bp, Homo sapiens
gctcagagatccaagtgcgcgccctggcgggtccggaccaagatggcccactgcgtgaccttggttcagctgtccatttcctgtg

SEQ ID NO: 533543 - DNA, 82 bp, Homo sapiens
actacgacgtccctcaaaccttgcttctaggagataaaaagagcttggggcttccttggtcgcacccaccacctgcctgccc

SEQ ID NO: 533544 - DNA, 95 bp, Homo sapiens
cgcacgtggagtccttcaactacgctgtgcacgagggtctcggcctcgcggtgcagattgtgtcagcagctaaggtgtgtggagctgccagtgag

SEQ ID NO: 533545 - DNA, 100 bp, Homo sapiens
accgtgacaggccaagtgcaggggccagaagacaaagtcaattccatgaccagtatcagctgtgctaccgtgcggccctggagtacctcggcagctttga

SEQ ID NO: 533546 - DNA, 50 bp, Homo sapiens
caggactccaaaatggcgtcagttgtctgcgctcctcagaccaccggcag

SEQ ID NO: 533547 - DNA, 100 bp, Homo sapiens
agttaggattgaatttgatgatgaaaatgatataaatgttggtggaactaacacagctgtagcttgataatggaactatacagcgaagagacaatctctg

SEQ ID NO: 533548 - DNA, 75 bp, Homo sapiens
accgcgggcgccaatggggagcagaaggactcggacacaggggtgctggcactgtgggtcctggtgacgcacgtg

SEQ ID NO: 533549 - DNA, 82 bp, Homo sapiens
ggacacttttcttcagaagctggtcgccgccggcagagaaacttgcccaggccaaagaagagaacgtgggcttacatcagac

SEQ ID NO: 533550 - DNA, 74 bp, Homo sapiens
tgggagttcaacgttcacagcaagctcaagctggttgtgcccacgtgcctcagggccttggtagaaatggcccg

SEQ ID NO: 533551 - DNA, 89 bp, Homo sapiens
catgcctggggttacacctaaacagagacttagtgataaaactgggcctgtagctcaagagaaaagttgacacctgagaaacatctaga

SEQ ID NO: 533552 - DNA, 82 bp, Homo sapiens
cgtgaggccggcatcgtctttccgtcctctgaggcgacggccgcggctgcacagatggaaatcatattatgtagaatacttg

SEQ ID NO: 533553 - DNA, 96 bp, Homo sapiens
tggttcagtgggaaggctgtggggctgctggtgctccatctaagtggcatggtgctcaacgcctatgtgacccattactcgccagggatgaccatg

SEQ ID NO: 533554 - DNA, 100 bp, Homo sapiens
ctgcacagccatactgtcggtggagaagagggtggcagcacgcaaagggtgtccctgtccctcaaggggtcatggcctccatgttgctcgcccagcgcct

SEQ ID NO: 533555 - DNA, 75 bp, Homo sapiens
gaattctgcccttgcatttggacaaggtctggcagcaggcatgccaggtctacatgttcaagtgcgtgtggcggt

SEQ ID NO: 533556 - DNA, 100 bp, Homo sapiens
ggcgcggccgagtccccgtacggccacccggcgggggatggagaagtttatgtttgggatgtgaactcaaggaagtgccttaacagatttgttgatgaag

SEQ ID NO: 533557 - DNA, 98 bp, Homo sapiens
aacgagaccgatcctcatcagctcccaatgtgcatataaacacaatagaacctgtcaatattgatgttagccaatatacctttgctatgtgcagttat

SEQ ID NO: 533558 - DNA, 90 bp, Homo sapiens
aaatctaaaagcatggatgccatcagatactatggcgggactgagtttattgatgaactggagaccctctgtcagaagcgagccctgcag

SEQ ID NO: 533559 - DNA, 98 bp, Homo sapiens
tgcaagatggagagggagaagagcattgagatcgagaacctgcagaccaggaagccactgaggaacggcctggtgaaggacaagcgcttctgaacccc

SEQ ID NO: 533560 - DNA, 75 bp, Homo sapiens
ccgagctggaaaagctgaaaagccaggaggagatgttaaagtaacccatcttgcaggacgacattgaagattggt

SEQ ID NO: 533561 - DNA, 75 bp, Homo sapiens
gaaaatcgcttggttaaaacctgacacttttaacagagcactgcagcctgtggtgttgaggctcacagcgatgcc

SEQ ID NO: 533562 - DNA, 100 bp, Homo sapiens
agcgccatggctcactccccggtgcagtcgggcctgcccggcatgcagggtcctcactgagcagcgagtcgtcccccgtgtcctctccggccaccaacca

SEQ ID NO: 533563 - DNA, 98 bp, Homo sapiens
gctgccccaccccgttccatggctccccatcgccagccccccacgcccaccaggccctcccagtgaggccatgtgggccttaggagataagatcgcct

SEQ ID NO: 533564 - DNA, 101 bp, Homo sapiens
cgaaggtgaagccacggaagataaggttcatgaaccatcgagctccagccaatggccgctacaagccaacttgctatgaacatgctgctaactgttacaca

SEQ ID NO: 533565 - DNA, 90 bp, Homo sapiens
cccatcgtcaccgtgtgggagcgggagctgcggaaaggtggtgcttggcacttttcatttaatgtgaaattttatccaccagaccctgcc

SEQ ID NO: 533566 - DNA, 101 bp, Homo sapiens
gggcagaagatgatcatatgcttatacagaatgaatattgtaatgaggcatttcatccttcatgaagccattcaggattttgaattgcatatgagtgcttg

SEQ ID NO: 533567 - DNA, 74 bp, Homo sapiens
ggagcctcagttggaagcagccgatccagcctgcggagcctgtggggcaggttggccaagagcagcttagagga

SEQ ID NO: 533568 - DNA, 80 bp, Homo sapiens
tctgaagcaggaagtagttcagaggttcttgcgtctcctttctactctgcaagcaattcccttgactgaagacgttctca

SEQ ID NO: 533569 - DNA, 100 bp, Homo sapiens
gccacagcccggactccatcgactcccccggctcttagactactgtcaccactgactaaagaagagaaaactgcggcagagcaattcaaatttcacatgc

SEQ ID NO: 533570 - DNA, 75 bp, Homo sapiens
gaaagaatcctgctttgaactgacctcccaggataggcgcagctatgagatggatgatgatgacgacgacgatga

SEQ ID NO: 533571 - DNA, 102 bp, Homo sapiens
ctgtgagcctagggacccatttctcctcctttgacagggacatcagtggagccttctcagacccacagaacattaaccaggtggtatttgttggaaatttct

SEQ ID NO: 533572 - DNA, 76 bp, Homo sapiens
agagattgggaaccttctgcacccttctgtacccatcagtaacgatgagaactgatagtgcatcagctgacccagg

SEQ ID NO: 533573 - DNA, 51 bp, Homo sapiens
gcttgaacatcctttgactggttagccagggtggttctcttcccaaagtgg

SEQ ID NO: 533574 - DNA, 130 bp, Homo sapiens
ccaacagtgacgtgttctccaaataccagctcgacaaagatggggttgtcctctttaagaagatactgaagtactctttcccagtgggactaagaaccagcagaacagatatactttctctcaagatgtc

SEQ ID NO: 533575 - DNA, 75 bp, Homo sapiens
gtatctagaagtcgttggaaagagcaatataagggagcttgtattttgaatatgctcaaggattttctgggtgag

SEQ ID NO: 533576 - DNA, 82 bp, Homo sapiens
cctcgcttttcgaactccgcgacccgagcgcaaggtttttcacgactgaaaacaacatagcaaaataagccaagatgtctgt

SEQ ID NO: 533577 - DNA, 90 bp, Homo sapiens
ttcgacaccaaccccttcgcggacccagtggatgtaaaccccttccagatgcatcactgtaagcgataccgctcccctgaaccagacccg

SEQ ID NO: 533578 - DNA, 75 bp, Homo sapiens
ggcgcgatgcccttcaggaaaggtacaagaatattccacagatgtcctttgatgatacagaaagggagccagatc

SEQ ID NO: 533579 - DNA, 75 bp, Homo sapiens
agtcctcctaggcatcttattgatcctccagtcgagatgccgtgcgcgaaattcggaagtatgatgatgtgacgg

SEQ ID NO: 533580 - DNA, 90 bp, Homo sapiens
tggctttggctacacagcactggttgtttctggtgggatcgttggctatgtaaaaacagttatgatatgactctgacaaatgcttgtatt

SEQ ID NO: 533581 - DNA, 75 bp, Homo sapiens
tacagggctccagaaattatgttgaattccaagaccatcagccgcgccttcatgaacgggagctcggtggagcac

SEQ ID NO: 533582 - DNA, 101 bp, Homo sapiens
gatgatattggacactggagagatcattgatacaggatctgattatgaagatcagctataaggaagaccagatggatgagaaactaatggaacctctgaaa

SEQ ID NO: 533583 - DNA, 85 bp, Homo sapiens
aaaactgaagatgtgaatactctgatttatcagcaagactgttgaacgcataactgcccaagatgcctgtccctccccctccagc

SEQ ID NO: 533584 - DNA, 75 bp, Homo sapiens
ttcagcaccgcgcccatggcagagccagaccctcttagaacaagctctggtgattgaggaacagctgcgccgggc

SEQ ID NO: 533585 - DNA, 83 bp, Homo sapiens
tcaaccataaagacatcttaattgggcacgaaagaggattatattccatcacaacaagatattctgcttgccagaagacccac

SEQ ID NO: 533586 - DNA, 98 bp, Homo sapiens
atcgacgtgtccgtgatggtggggggcagcacgctggccaaggtcttcctcgatttcaaggaaagctgtcgcctggttgggcccggaaatgggacgtc

SEQ ID NO: 533587 - DNA, 100 bp, Homo sapiens
attaaaataaggaaactgtatgaatgtctgtgggcagtctcagaccagtatccttcaggggttctcttactctgatttgcggaaatttggcatcgtcttg

SEQ ID NO: 533588 - DNA, 83 bp, Homo sapiens
cctgaatgccttaagatggtgataagttcccatgatcagtggtgaaatatagtgattttcacctgtgcttccattctgaagtt

SEQ ID NO: 533589 - DNA, 100 bp, Homo sapiens
tccactggaatgggccggcaccacggactacatttctatacctcgtcaacttcaacaaaaaacatcggagcagtgtgggtccgagcaaacctgtttccca

SEQ ID NO: 533590 - DNA, 100 bp, Homo sapiens
ggcgagcggacggctgcatttacggggtctcccggagggccagagtcggatattaatgcacacgcctgtgttactggtaaacccatcagccaagggggaa

SEQ ID NO: 533591 - DNA, 83 bp, Homo sapiens
tcgtgatccagaagtccagagctgaggactgcctgtttgcaggctttatcctgtggataaacgcagagtgaacgagtttgggg

SEQ ID NO: 533592 - DNA, 82 bp, Homo sapiens
ccccaagtcgacgccgcaacccggggaaagcagagcagtcattatggcgaaccttggctgctggatgctggttctctttgtg

SEQ ID NO: 533593 - DNA, 75 bp, Homo sapiens
gcctcccgagtggctggaactacaggagggctctgagagatttcatttctgtcctgctgatgaagtctacgttca

SEQ ID NO: 533594 - DNA, 75 bp, Homo sapiens
ctccatcaggaccccagatgtctgacagccctgtgtgacaccaagataagtaacatacatactgccatgaaagaa

SEQ ID NO: 533595 - DNA, 75 bp, Homo sapiens
gccagttgtatcgacatcagtggagaacctcaggagccttggtcatcatttgatatatacacccggaaagggccg

SEQ ID NO: 533596 - DNA, 100 bp, Homo sapiens
cgtcgccgccgccgccgccgccgcagcttgggaggtgctgccaccacagctccaccgggggacggctacgtgcaggcggacgcccggggccccccggacc

SEQ ID NO: 533597 - DNA, 75 bp, Homo sapiens
ctggaggcggtggctgcggttgcgggaccggacctgaagcccggcaacctggctgtgaacgaagactgtgagctg

SEQ ID NO: 533598 - DNA, 50 bp, Homo sapiens
cctaggcagaatgcttggaaaggccacagacctccaccagcacgaagtgg

SEQ ID NO: 533599 - DNA, 88 bp, Homo sapiens
ttaggaaacatgctagaattacctggaacttcatcatcatctacttcacaggaattgccatttatggagaacatcattgcaacagtaa

SEQ ID NO: 533600 - DNA, 100 bp, Homo sapiens
tttgtttctccaaggtttgaaaagcagctggcctgcaagggggaaggatttgaaagaacagcatgatcagaaagtatgtgagagggagatgcagcgaatc

SEQ ID NO: 533601 - DNA, 75 bp, Homo sapiens
tttcagtggaggaaagaaatttctgtcaatggaagcagtcaattatagatttcttcaaaccagcttcaaaacaag

SEQ ID NO: 533602 - DNA, 75 bp, Homo sapiens
gtggaatgggtccaggccgtggtcagccgcttcgacgagcagatcgcagtggtcatgggctcctgcaccgcagga

SEQ ID NO: 533603 - DNA, 100 bp, Homo sapiens
tttgaagaattacttgacaaatcttcttaaggtgaatatgtttacaaaccaaggaacagtgatccactttaacaaccctaaagttcaggcatctctggca

SEQ ID NO: 533604 - DNA, 89 bp, Homo sapiens
ggccaagggaccaaggtggaaatcaaaccccaagaagatgaaaggattgttcttgttgacaacaaatgtaagtgtgcccggattacttc

SEQ ID NO: 533605 - DNA, 76 bp, Homo sapiens
ccatcttggtccagtctggctgcagcaaaaagcaggtactgcttctccgagatggccccagtgtgtgcggtggttg

SEQ ID NO: 533606 - DNA, 82 bp, Homo sapiens
atggccaccagtttccggacagcttcgtgctggatggccgccaagaacgagtcatgtttgacaaaattacatctcgaatcca

SEQ ID NO: 533607 - DNA, 101 bp, Homo sapiens
aaccctggaggggccttcctcatccgggagagccagaccaggagagccaacaggaaggccgggtgtgcagtcacatctctgctagcttcggagctgaccaa

SEQ ID NO: 533608 - DNA, 100 bp, Homo sapiens
acagggttactgccaaggaggcttcagtgccgagttcaccaagtacagctttatggcggtcatccactttgcggggctcaaggccgtgggcgagtcggtg

SEQ ID NO: 533609 - DNA, 82 bp, Homo sapiens
gggagcggcgttggaggccaccgtttccagacagagtttcactcctgttacccaggctggaggacaatgatgtgatctcggg

SEQ ID NO: 533610 - DNA, 90 bp, Homo sapiens
ggcggccgaccgagaacgcagcatccacggaatcatgggtaaagaaggaagacaggctgcaagaaacagtgactatgcaatagccagatt

SEQ ID NO: 533611 - DNA, 75 bp, Homo sapiens
aacctcccaagctcaagcagcaggaagatcttttgagggacagtcattttgtttactcattcagccctgttgcag

SEQ ID NO: 533612 - DNA, 100 bp, Homo sapiens
agccaaagacaagacgcaggagaaaatcgagacctcaagtaatcattcccaagcgaggccttcttgggcagctttgtggccagcgggatggggccctcgg

SEQ ID NO: 533613 - DNA, 82 bp, Homo sapiens
atgcaacgggcagctgggctgcagtgaccccgctttcctcacgcccagctattgaacaaagttttgatcaggatgagagtgg

SEQ ID NO: 533614 - DNA, 50 bp, Homo sapiens
aaaccccaaaagtgtacataagggatagctgggagtatggccaccctgct

SEQ ID NO: 533615 - DNA, 99 bp, Homo sapiens
tttatgatgctgatgcaagcattagtgctgttcacactggactccctggacatgctgccagcagtgaaggtggagccgccaccaaaatgcagattttcg

SEQ ID NO: 533616 - DNA, 80 bp, Homo sapiens
cgatgacaccattgcagaaggaataaccttcatcaagttttatgctccatggactcagaattcatgattgaagaaatgca

SEQ ID NO: 533617 - DNA, 100 bp, Homo sapiens
ttcagacgcagaccccaccgcagagtctgcagcagcccgccccgcccggcagcgagcggcgccttccaactccgggatttggacgtggcagagggagagg

SEQ ID NO: 533618 - DNA, 90 bp, Homo sapiens
gattcgcagtggtcgcttcttctccttgtggtgaagcagcgcttgcagatgtacaactcgcagcaccggtcagcaatcagctgcatccgg

SEQ ID NO: 533619 - DNA, 75 bp, Homo sapiens
tctccagtactgctggctttggaagaccccatgaattcttccatctctatgacaacaagcccattttagctttct

SEQ ID NO: 533620 - DNA, 100 bp, Homo sapiens
tactaacagttttacgatttaaaacttcgccagaattttgtttacgaaaatggggttacagaagatgtgaagatatttgttggattaaaaccaataaaaa

SEQ ID NO: 533621 - DNA, 97 bp, Homo sapiens
acagagaagaggattttggctctggcacggaaacacccgtaccttacccaactctactgctgcttccagaccaagtctcagaccagtatccttcagg

SEQ ID NO: 533622 - DNA, 75 bp, Homo sapiens
attccatcttcattcatgactccagacagagctacagagacttctgaagtggagagtctgcgacctcctcggttc

SEQ ID NO: 533623 - DNA, 82 bp, Homo sapiens
tcaagatctcagagaaggaggaggtgaccacgcgcgagcagcccctgtcaaagggaacaggaagcagtccacggagggtgac

SEQ ID NO: 533624 - DNA, 82 bp, Homo sapiens
tcaaggacacggtctacaccgacttcgacggatgaaacgaggaggaagagatagtgaccgtaattcatcagaagaaggaact

SEQ ID NO: 533625 - DNA, 100 bp, Homo sapiens
ccccaccagatcccggagatcgcccgccatggctttacttactgcggccgcccggctcttgggaaccaagggaactctcaactttggtgggatcagggtg

SEQ ID NO: 533626 - DNA, 75 bp, Homo sapiens
aatcatctttggacaaaagaaagcaagaccccgagtggaagatgccaattctcggaagcaagaagcagagtggaa

SEQ ID NO: 533627 - DNA, 83 bp, Homo sapiens
gtcgcgtgtctaggtgagtcgcggtgggtcctcgcttgcagttcagcgaccacgaattcagaaggagctggcggacatcactt

SEQ ID NO: 533628 - DNA, 111 bp, Homo sapiens
cggaacttcccgccttcaaggaccgcgtgcctgagtaccctgctaagaagactgttagaatgccctcggtaacacagaggctgagagatcctgacataaatccttgtttgt

SEQ ID NO: 533629 - DNA, 98 bp, Homo sapiens
cgagatgagcagaacctgctgcagcagaagagaaatttcagcagatttcaaggagccgccatccctgccagggaaggagaagccatccccgaagacag

SEQ ID NO: 533630 - DNA, 75 bp, Homo sapiens
tcatcaaaaatagtgatagctttgataagagagccttgaacttaggaattcttcgagatcctggatcagaaatcg

SEQ ID NO: 533631 - DNA, 75 bp, Homo sapiens
caagaggcgtttctataagaattggctccacataaacacggtttccttgaaggccgccatgcagagctgtgcttc

SEQ ID NO: 533632 - DNA, 116 bp, Homo sapiens
ggcagccgaacttgggatggtgtcagcctattacacatacatcttcactaatctggattttttatcaagcagaaatgcatcgaacaacgagaatcaagatcactgagctaaatccc

SEQ ID NO: 533633 - DNA, 83 bp, Homo sapiens
acgctggctgcagggacccggtgacagcgtgagagttactccacaggatccgctgaacataggatgttgccacaaaatctacc

SEQ ID NO: 533634 - DNA, 100 bp, Homo sapiens
acccattcaaaatggaggtgatggtagatgcctggacagattaccagatcatcattactcagcctcagaaccagagctacagagacttctgaagtggaga

SEQ ID NO: 533635 - DNA, 100 bp, Homo sapiens
tttgcctcagatactattttgaaggatgaccagtgtcccagtgaaggaacgagtgaaggtgtctcagaactggagactggggcgctgccgagaggggatt

SEQ ID NO: 533636 - DNA, 50 bp, Homo sapiens
cggcggcggctgcggcccaatataggaatactcccccagttgcaagaggc

SEQ ID NO: 533637 - DNA, 75 bp, Homo sapiens
agctgttgttgcttactcagaaaatgaagaggtcatcagaagattgagagaaagaggagaaccaatcagactatt

SEQ ID NO: 533638 - DNA, 52 bp, Homo sapiens
tttcagggaaattttaccatacagatggagtctcgctgtgtcacccaggctg

SEQ ID NO: 533639 - DNA, 50 bp, Homo sapiens
cacggctgtcaagactgctgagactgatgtggacgagtgcagctccgggc

SEQ ID NO: 533640 - DNA, 83 bp, Homo sapiens
gaaagatctaccttctggaagctactactacgtggtgcttggaaaggtatggcctcacaagtcttggtctacccaccatatgt

SEQ ID NO: 533641 - DNA, 100 bp, Homo sapiens
cttcatccttgtttaatgactttggtgccctcaacatctctcagagacgaaagatgtcatgggaacagacatgtcttggagaggtgcaccctgggatctg

SEQ ID NO: 533642 - DNA, 75 bp, Homo sapiens
cacggcaggagaccaaggaaatggcccgggatctggacaactctcctctgtccccaccttcaccaaggaccaaaa

SEQ ID NO: 533643 - DNA, 100 bp, Homo sapiens
ggtgactccccgccgctcccgggggccgtgacgggacaatgactcattcttcccaggacactggttcttgtggcattcaggaagatggaaagctttatgt

SEQ ID NO: 533644 - DNA, 75 bp, Homo sapiens
ggggaatttctcctggggctcagagtgtagatgacattaatgctgataagaatatctcttctgcacagattgttg

SEQ ID NO: 533645 - DNA, 88 bp, Homo sapiens
cgacgtggtgtgcaccggctggctgaggaaatcgcctcccgagaagaagttgaggcgctatgcgcatattaaatttcctattgactac

SEQ ID NO: 533646 - DNA, 78 bp, Homo sapiens
cgaaggtgaagagttgtcccagctcggcccgcgggggagccccgggagccgcacgcttcatcagcaatggaagtggct

SEQ ID NO: 533647 - DNA, 144 bp, Homo sapiens
gtggaagccttactccccccgtgaccccacccatcaccccctcctcttcattccgcagcagcactccgacaggaagatgagaatgtgcctactgctcctgatcctccaagtcaacatttacgtgggcatgggacaggcttttgc

SEQ ID NO: 533648 - DNA, 100 bp, Homo sapiens
tgttccacactttgactgttgaagcctcgacccacccagatgcactggttggcacagcaccggaagcagtactcagaacaagtcatacctaatgctgcag

SEQ ID NO: 533649 - DNA, 100 bp, Homo sapiens
ctggtcatcttctatttccaaacaaatggttatgagccttagagtttctgaactccaagtactgttgggctacgccgggagaaacaagcacggacgcaaa

SEQ ID NO: 533650 - DNA, 82 bp, Homo sapiens
ggggaggccaacgtgaagaacacagacgcagtcttcagcaaggaagtgctgggaacgccctggagtgaacccaggaagatgc

SEQ ID NO: 533651 - DNA, 98 bp, Homo sapiens
ttcagtttgctgtgtgtttgctcaaacagctaatggcagcattagccgctgttgggcctcctaatcctcgggcagatccagagtgctgcagtattctg

SEQ ID NO: 533652 - DNA, 99 bp, Homo sapiens
gtcgaacttcctccttgggccaaaacctcagaagaatttgttcacataaacagattgataaagcccccaccctctgctgtcacacagcgcaacaaacag

SEQ ID NO: 533653 - DNA, 97 bp, Homo sapiens
attactttggcctccagttcctcgactctgcccaggttgcgggcaagaacctgattcccgcggcagccggcagctcccgcctcaactacactgtgct

SEQ ID NO: 533654 - DNA, 75 bp, Homo sapiens
tcgactatgcagagacatgagatggtagccaacccctcagccaagtatcttcaagaccttctcatggagagtgtg

SEQ ID NO: 533655 - DNA, 75 bp, Homo sapiens
tggtcttccctgaccccgcggccggacgacccaagcccgctgagcaggatgaggttaataaaggtatccatggag

SEQ ID NO: 533656 - DNA, 100 bp, Homo sapiens
tcatcttcaagttggagcaaggagaggggccatggacattggaaggggaagccccacatcagagctgttcagatagggccagatttgagtgtgtgaattt

SEQ ID NO: 533657 - DNA, 50 bp, Homo sapiens
gaactggactccgagggaaagaggtcccattttcagtgcccaagatcccc

SEQ ID NO: 533658 - DNA, 75 bp, Homo sapiens
tggaaatgaagtataataccaagaaagccccacttgtaccaatattagcatgtggcaatgatgattgcagaattc

SEQ ID NO: 533659 - DNA, 106 bp, Homo sapiens
tgggagaacctgagggaacagccaccgatcgctgttcaaacgatatgtcaataaacttcgaagcaagagtacagttttcaaaaagaagcatcagataatagctgaa

SEQ ID NO: 533660 - DNA, 73 bp, Homo sapiens
aggattccaagtaactcttatttggaaagcgtctctagcagctgatatccccagacttggatatagttcctca

SEQ ID NO: 533661 - DNA, 75 bp, Homo sapiens
agggacagcatatcagagctttgaacagggatcatagacggtatttctatgtaaacgaacagtcgggcgagtctc

SEQ ID NO: 533662 - DNA, 98 bp, Homo sapiens
gatttcttttggatagtgatgggaaaaggctggagtgcagtaacaccactgaagctcactgtaactttgaactgctggacttggaatcctcctgctgt

SEQ ID NO: 533663 - DNA, 75 bp, Homo sapiens
tggcaatgtggcagccctgcctggaattgttcataaacacaagttcctgagaagaaaaaaggaatcttcaggaga

SEQ ID NO: 533664 - DNA, 100 bp, Homo sapiens
ttcatcatggacgtgatgttggtgtgttcacatttgatcatggcatgatgttttactgtgcctggctaactatagtcgagggggtgatggtcctatgtgt

SEQ ID NO: 533665 - DNA, 74 bp, Homo sapiens
atggactcaaaggctatcctggatctggcgacatggccagaaaggctctcaagcttgcttcgtggaccagcatg

SEQ ID NO: 533666 - DNA, 83 bp, Homo sapiens
atcgggctgaagcgactgagtccgcgatggagggccggtgcataaacttctcccgagttccatctcagtaaaagggaagcagg

SEQ ID NO: 533667 - DNA, 100 bp, Homo sapiens
cccgtctccagttcagggcaagaagagtccgcgactcctataagaaacctgatcgggaagaaattcagatgagcaatatgggatcaaacacaaaatcact

SEQ ID NO: 533668 - DNA, 75 bp, Homo sapiens
ttttcaggaggcctgatctaaggatctcagacaaatacgatgttccccatgacaagattgggaaaatattcaaga

SEQ ID NO: 533669 - DNA, 100 bp, Homo sapiens
tctctactatgattcctactctgtggatgagcgcgtggactccgacagcaaggacctgggctatcccttggagcttggctatcagaacttcctctacccc

SEQ ID NO: 533670 - DNA, 75 bp, Homo sapiens
acgtagttaaagcccactagcctaaagccgggcggactgcggggccacttagaagatgtgtatgatatttgctgg

SEQ ID NO: 533671 - DNA, 83 bp, Homo sapiens
atccattcctcccattcatgtgcctccaggttatatctcacaggttcagttggaacattggaagaaggcattcaagaagaaag

SEQ ID NO: 533672 - DNA, 120 bp, Homo sapiens
tgaactgagcgtatgtgccacgccgcccaggagacccctctgctgcaccacttcatggagaccagtatgatgtctgtgccatttgcctggatgaatatgaggatggggacaagctgcggg

SEQ ID NO: 533673 - DNA, 78 bp, Homo sapiens
acgagagaaggaaattagtgatgatgaggtagacgaagagcggcggagtgcagcgggcagtgagaaagaagaagagcc

SEQ ID NO: 533674 - DNA, 99 bp, Homo sapiens
ctggagaagggattgcccagtcagcaaaggttcagccctccaagctcaaagttatgaagtttcaggatgaattggaatctgggaaaagacctaaaaaac

SEQ ID NO: 533675 - DNA, 101 bp, Homo sapiens
gtggggctgcctcgccgcgtctcgccacggtccactcatgcctgctgagcgtgcgggccggcaaagatggctggttccagctctacagccccggaggggtg

SEQ ID NO: 533676 - DNA, 75 bp, Homo sapiens
acatctcagtgaatttgcaagtgcggcaacctttggcactgcatccatgagcatgcccacaggattcggcactcc

SEQ ID NO: 533677 - DNA, 100 bp, Homo sapiens
aacaaatacagtgacagcacaggtcacagtaaggccaaaaatgtgcatactcacagagttagagagagggatggtgttggcaaacatgaattgactgggc

SEQ ID NO: 533678 - DNA, 75 bp, Homo sapiens
cacaattccatgaatgaactgaagatcttgtagaaaatttcagctgtagcccttggactagaagctgaaataaca

SEQ ID NO: 533679 - DNA, 100 bp, Homo sapiens
gtacatgaagcacaccgtggtagtatactgaataatccagaatggctactctgatctatgttgataaggaaaatggagaaccaggcacccgtgtggttgc

SEQ ID NO: 533680 - DNA, 99 bp, Homo sapiens
gggctgtaccagggcgtgcccagagctgagccgggcaccgaggcccggagacactatgatgaaggaaggatgataaagactatgctttaaaacaaatag

SEQ ID NO: 533681 - DNA, 100 bp, Homo sapiens
atgaagctaccggccagggttttctttactctggggtcccggctgccctgtggcctcgctcctcggagggaaactaaatatattttgccaactttggaaa

SEQ ID NO: 533682 - DNA, 101 bp, Homo sapiens
caccaaggcccccaagccctccttcgtgtcgtacgtacgccctgaggactcacaccacccggcaagaactgctcactacggctccctgccccagaagtcac

SEQ ID NO: 533683 - DNA, 100 bp, Homo sapiens
agagcatctgcccaaagttcagcaatcaaggagaccgcgaaggcgtacattcccgggtgttgcttccaggagaaaccctgaacggagagctcgtcctctt

SEQ ID NO: 533684 - DNA, 90 bp, Homo sapiens
gcataataaaatcagaagatacacggaccagaggagcctggaccgctcattcggactcgtcgggcaggatcaaaatacttgctggatggt

SEQ ID NO: 533685 - DNA, 100 bp, Homo sapiens
tttactaccttggtggagagagttatccaacaattggctcgattttattctccagccaccatatttattgatgagatagactccatctgtagtcgccgag

SEQ ID NO: 533686 - DNA, 98 bp, Homo sapiens
tgctctcttagcggtagagcaaaattcctgaagacaatttcttcttccaaaatcctcggattctctacttctgctggaggagcttcccaccatctaca

SEQ ID NO: 533687 - DNA, 100 bp, Homo sapiens
cacaccaacagttgctggacagtttgaggatgcagatgttgatcactgaaaatgatttatgcaagtttaagaccaccgctgaaacttcacttctacacag

SEQ ID NO: 533688 - DNA, 75 bp, Homo sapiens
ggcaacttcgcggtggtcaagcgggccacgcacctcgtcaccaaggccaaggaaccaacgtccaagaggcccaga

SEQ ID NO: 533689 - DNA, 99 bp, Homo sapiens
atcaacatgtcaacagaattaacttctacaagaaaacttacaaacaaccccatctccagacaaaggtgcttttgagaggaagatgtcttacgattggtc

SEQ ID NO: 533690 - DNA, 73 bp, Homo sapiens
attgtgccagacctgacgaagagccttttgtgaagcatgtagagcgcatgaagtacaggacaataaagcttcc

SEQ ID NO: 533691 - DNA, 100 bp, Homo sapiens
ctgggaaacatggcgaccgagggaatgatccttactaaccacgaccatcaaatccgtgtcggagtccttacagattttgaagccagcttcataaggctat

SEQ ID NO: 533692 - DNA, 100 bp, Homo sapiens
tgctggtggtagactagggttgtttgtcttctctcaagaaatggtgttcttctctgacctgaaatacgaatgtagagctccgacagttagttaatatgtg

SEQ ID NO: 533693 - DNA, 100 bp, Homo sapiens
ctgcactctcatcgctctcggcctcggcctcggcctccgacacgagtatgaagagtgtaaagacctcataaaatttatgctgaggaatgagcgacagttc

SEQ ID NO: 533694 - DNA, 100 bp, Homo sapiens
tggtgctgaatggcatggaatcctaccaggaggtgacggtgctcagagccagaccctggtttgaggagccccccaaggctgtggaactggaggggttggc

SEQ ID NO: 533695 - DNA, 100 bp, Homo sapiens
agaagtgtgctcaaaatgtgaagcaatttgggacggaaggcaacagcccccaggggagcaaccagggagtcaaaatcacaccggaccagcagaagaggag

SEQ ID NO: 533696 - DNA, 90 bp, Homo sapiens
tgcttccaccctgaggaggcccatggagcaagataccagtcctcctgcaaggagaatccttttaaccggaagccatcacctgcagcgtcc

SEQ ID NO: 533697 - DNA, 75 bp, Homo sapiens
gagtccggacatctgaaacttgctttccagagtgttgaatcttccaccagaaaacttgatcacatcaatatctgc

SEQ ID NO: 533698 - DNA, 97 bp, Homo sapiens
acaacagcaacttgtgattggcggtgaccggatattcagttgcacatccccacatcaatgcactgccaatggagttggcatcctttggaagagttcg

SEQ ID NO: 533699 - DNA, 101 bp, Homo sapiens
gaaaaactcagtgagacacaatttatcattgaataagtgttttaagaaagtggacaaagagaggagtcagtgagatggaagattttcgaggtatagcagaa

SEQ ID NO: 533700 - DNA, 100 bp, Homo sapiens
ggtcggagtcagagcccggggctctgatgtcaccgcgcggctgcgacggcccaggagcgcgtctcggcgggagcctcaggctggggtgcagtggcgcgat

SEQ ID NO: 533701 - DNA, 100 bp, Homo sapiens
tgcaacacgagcatggcatggccccgcaggtcttcacccaggccctggagtgcatgcgcaggttgtgggactggaaaatatcttaaagtgaacagccagg

SEQ ID NO: 533702 - DNA, 50 bp, Homo sapiens
gccgaagatggcggaggtgcaggatctgtgccagttcagaagcaggcgag

SEQ ID NO: 533703 - DNA, 82 bp, Homo sapiens
gaggccggccggtgccagcacctttcggcttctgagacggcggcagcagcggcattcagggcaacaggtttgtctatgctgg

SEQ ID NO: 533704 - DNA, 100 bp, Homo sapiens
cagagaccccctgaagattcgtctgaaccaatcagagtccttgtgactggagcagctggtcaaattgcatattcactgctgtacagtattggaaatggat

SEQ ID NO: 533705 - DNA, 82 bp, Homo sapiens
gatctatgagtggaaaggtgaccaagcccaaagaggagaaagatgcttctaagggatttttagactctgaggagcagttgga

SEQ ID NO: 533706 - DNA, 90 bp, Homo sapiens
aatgcacagaaattgccaaaaggaaagaccacagcaagattctttcattcgtctcctcctagcctgggggaccaggctcgaactgaccct

SEQ ID NO: 533707 - DNA, 100 bp, Homo sapiens
aagtacccgtccatcatagtcaactgcgtggaagagaaggttgtggcagcactgcctgaaggtatgagaccagattctaatctttatggttttccatggg

SEQ ID NO: 533708 - DNA, 96 bp, Homo sapiens
cggagctgcagccggttgggccggtgtactttcccgatcgtctatgcggaaagacctctcacagacaaccacagatcattggcttcttatggcttg

SEQ ID NO: 533709 - DNA, 82 bp, Homo sapiens
ggaaatgctgcttggggatgagcatcaccagcagaaccaaaatcgtgtgtggtggcagatcctcctcttcctgcacaacctt

SEQ ID NO: 533710 - DNA, 74 bp, Homo sapiens
cctctgctgaattggatgaaagataaagcccttaaggacaagggcactgtgtttagtcttgagtcagaggagga

SEQ ID NO: 533711 - DNA, 98 bp, Homo sapiens
tcttctcccagaatatggaggcaccaaagtagttctagatgacaagcttggggccaaaaaaggaagtttgggagctcagaaactggcaaacacatgct

SEQ ID NO: 533712 - DNA, 100 bp, Homo sapiens
tggggaacgcggcgaccgccaagaaaggcagcgaggtggagagcgtcacgtgaactggaaatttcagtttattggcgtgattggcggtctctgtgtgctg

SEQ ID NO: 533713 - DNA, 98 bp, Homo sapiens
ttatttcagacatatttgatggaacaatcattagttcagtgcagtgtctgacttgtgacagggtatgagatgcaagatgctggaattacttcagactc

SEQ ID NO: 533714 - DNA, 83 bp, Homo sapiens
cccatcctgccgtccttctccactttcgccagcccgtgccgcgagcgcggcctgcaggagactccgccgtggtcatggaggag

SEQ ID NO: 533715 - DNA, 96 bp, Homo sapiens
gatattgtacgatttctggtacagttagatgactacaggttggggcaaacacaatggataatcctttgttgaaatacagtgcaaaggattacttct

SEQ ID NO: 533716 - DNA, 96 bp, Homo sapiens
agactctacaaatgtagaagctgcttttcagacaattttaacagtccctggcaatccagagatcccgatatctaggactgtccatccatccactcc

SEQ ID NO: 533717 - DNA, 75 bp, Homo sapiens
cccttctgccccagctccgtctcggcggcggcggctgatgtagaaggccaatccttaagacaccgagacaagcgg

SEQ ID NO: 533718 - DNA, 100 bp, Homo sapiens
cctcagccccaagacccagcaggcgtctgagggccccgccagcaggcgaagcagggagatgtcagactgctacacggagctggagaaggcagtcattgtc

SEQ ID NO: 533719 - DNA, 90 bp, Homo sapiens
cttgccctggtcttgctcggccgatgaagtgcagaggtttttttctgaatgtttccattggaattgttggtaaagacttggagtttacaa

SEQ ID NO: 533720 - DNA, 83 bp, Homo sapiens
tcccatcactaggagttttgctcgagaatgtgtgatattggtgatgcatctagaggcagcttatcatcgtatgcatatactct

SEQ ID NO: 533721 - DNA, 75 bp, Homo sapiens
ctggaagtgggggctctgccgcttctctccctctccggggcagaaccccttcgagctggccttctccctagacca

SEQ ID NO: 533722 - DNA, 101 bp, Homo sapiens
cgatcgttggcaacatctttttgatgtcatcggatcaaggaaggatctgagtctctccctgcggagacagccctgaagaactcctgtaacgtcaagctggc

SEQ ID NO: 533723 - DNA, 82 bp, Homo sapiens
aacgagacttttctcagatgttggatatttgcttggaaaaacgtgtgggtacgaccttggtgttaagtgtgatgcttccata

SEQ ID NO: 533724 - DNA, 100 bp, Homo sapiens
ttttgagagagttttgggaaagatctttgtagaatttgatggctgtaactggaagcaacactcctgggtaaaagttcatgctgaggaagttatcgtgctt

SEQ ID NO: 533725 - DNA, 75 bp, Homo sapiens
tggtaacactttagaaaagtaaaggcagagccagacccagggccctccagattaccccaggtttgtggagtctgt

SEQ ID NO: 533726 - DNA, 119 bp, Homo sapiens
gcaccaccctcccaccctccttcctccgtgtggacgatagagccacatccagcaccacggacagctcccgggcgcaggggaaatgctgtctgtagctgagcacttcctggagcagcaga

SEQ ID NO: 533727 - DNA, 100 bp, Homo sapiens
ctccgtgcggagaagaagctgcggccgcacctggccaaggtgccagatgcaattaaaaagtgtcagagggctggaattactgtgcggatggtcactggtg

SEQ ID NO: 533728 - DNA, 80 bp, Homo sapiens
caaatttattgtaccttatgatgtgtgggccagcaactacgtagatatgtggcaaaatctggcaaaggcagagaccaaac

SEQ ID NO: 533729 - DNA, 98 bp, Homo sapiens
ctcgattcagctattggaaagtttttttaatgtggttggaacaactgagagatgacctgatcagagccatcaagaaactaaaggcacttggcactggc

SEQ ID NO: 533730 - DNA, 75 bp, Homo sapiens
ctgcctatatttaaatatatatgtcccgactgaggatgcttagcagtgtctgcaaaaacgaatcttttcctacaa

SEQ ID NO: 533731 - DNA, 51 bp, Homo sapiens
ttaatcaaacttggacagctctctatgatgtttccattcctgaaaaaccca

SEQ ID NO: 533732 - DNA, 50 bp, Homo sapiens
agaagaagtgggagctcatctgtgatcagaggcagccttccaagttttcc

SEQ ID NO: 533733 - DNA, 100 bp, Homo sapiens
gatgatgctcagtttgatgcgtcacactacgacagtgagaaaggaggtttgtaaaagaatggacttggtctgccagagaatgttgaatcagggatttctg

SEQ ID NO: 533734 - DNA, 75 bp, Homo sapiens
gcatctccactggacactggtcagctgcaggactcatgcacacgttcaatgcccacgccgccactgacatcacgg

SEQ ID NO: 533735 - DNA, 100 bp, Homo sapiens
ttcaagatgttcttatacaagtcaacagtctagcagatcagccagtctctttcatcatcaagcagacatactcaagggggtccactggacggggcctgag

SEQ ID NO: 533736 - DNA, 98 bp, Homo sapiens
ccggagatgcctgacgcatctgtctgaggagcggtcagtgacgcgatggagcgggcaagaaggatgccctgcagtggtctcgccatccagctacagtg

SEQ ID NO: 533737 - DNA, 129 bp, Homo sapiens
atcagcttgattctcccagcgtgtcatcagtgctcccttgttttatgggctggattccacaggtgccagcgagatttcagattcctgtaaacctctaaagaaaaggagtcgcgcctcaactgatgtaga

SEQ ID NO: 533738 - DNA, 100 bp, Homo sapiens
agaagcttgggaactcctgccaaaaattgtagcacttctcacattgcaatggtttatcaggtagaagatgtgtgtgaagaagaaatgccagaagagtcag

SEQ ID NO: 533739 - DNA, 75 bp, Homo sapiens
tatggagaaaagatctacatgaccttgtcggcctacctagaggcaatctgaaagcaaatcctgtttagatgcagg

SEQ ID NO: 533740 - DNA, 101 bp, Homo sapiens
ttttcccagaggctcttcatgattctttggctcaaaggagttgtatttagtgtgacgactgttgacctgaaaagtgtttcctgaggttataggcgggtgtt

SEQ ID NO: 533741 - DNA, 98 bp, Homo sapiens
agccacccaagcttttgtatcctatggaaagtaaactgacaattcaggagacccagctggagactctccaacatgtgccttctgaccatacaaatgaa

SEQ ID NO: 533742 - DNA, 127 bp, Homo sapiens
catggagcatcgcatcgtggggcccgggccgtaccgagctaccaggctggtcttgagtcaccacgtccgaatataattcttgggttagtaatctgccaaaaaatcaaacgtcccgcaaacagtggag

SEQ ID NO: 533743 - DNA, 113 bp, Homo sapiens
agacatcaagaagatcttcgagttcaaagagaccctcggaacacagcccacctgaggatattgaccataaggactcatatctcattacaagaagcatcatggccgagccagac

SEQ ID NO: 533744 - DNA, 82 bp, Homo sapiens
gctgctcaagctcttcatcattctctgcaggtgaagatcatgacggagaaggaactcctggccgtggcttgtgagcagtttc

SEQ ID NO: 533745 - DNA, 87 bp, Homo sapiens
gggcgccgcgggacctctccgggccatggaagctccaccatgaggcgaggtggatggaggaagcgagctgaaaatgatggctgggaa

SEQ ID NO: 533746 - DNA, 100 bp, Homo sapiens
ctgagcgccatggctcactccccggtgcagtcgggcctgcccggcatgcagacaaggcgcctctgtcgaagagccttctgctggtccccagtgccctctc

SEQ ID NO: 533747 - DNA, 100 bp, Homo sapiens
cagtgccctcaaggctcggaagaatgtggagagttttctagaagcctgtcgaaaaatgggggtgcctgaggaagcggggagaggtggtgagagatgaccc

SEQ ID NO: 533748 - DNA, 74 bp, Homo sapiens
ggaggtgttcgagaacgaccccgagacggttgtctgcagagtgagattatggcgaagcattttattctttttac

SEQ ID NO: 533749 - DNA, 100 bp, Homo sapiens
tcagtgagacacaatttatcattgaataagtgttttaagaaagtggacaaagagaggagtcagcatgtagagcgcatgaagtacaggacaataaagcttc

SEQ ID NO: 533750 - DNA, 100 bp, Homo sapiens
acgctgcagttggccttcatcgacttgagacaaataacgaaggaggcccaacttcattcaataaggagcctgacggatttatcccagacggtagaacaaa

SEQ ID NO: 533751 - DNA, 98 bp, Homo sapiens
cgcggacccgcccggagatgaggccaaatttgagtccctctttaggacgtatgacaaggacatcacctttcagtattttaagagcttcaaacgagtca

SEQ ID NO: 533752 - DNA, 98 bp, Homo sapiens
cagcgccgagggcgagatcgtgcagcttcgcctcaacagcatcaagaagctgtccaccatcgccttggcccttggggttgaaaggacccgaagtgagc

SEQ ID NO: 533753 - DNA, 51 bp, Homo sapiens
aaaagattgagctgcactgtattcctactttgaataatgagatgagtacag

SEQ ID NO: 533754 - DNA, 98 bp, Homo sapiens
gcacgccggcactcgcggctgctggagccccggctggctcaccccggggccgggcagaattgggctccaggttggtggttctgtcagatgaaagcaaa

SEQ ID NO: 533755 - DNA, 100 bp, Homo sapiens
gaccagaagcctttcgcggagaaaaggctgacatgcccgtcctatatgacagatatcatggaaatcaggacagtggcagttggaattgtggcaatcaaag

SEQ ID NO: 533756 - DNA, 75 bp, Homo sapiens
cctcttcttagttgatgatttagttgattctctgaagaagtgagttgctgaatgagcttatggacagtgcaaaag

SEQ ID NO: 533757 - DNA, 75 bp, Homo sapiens
catgcacacagttcatcagttctactgccctctgcctgcgtttcttgcagaacataaattattaggaaacattaa

SEQ ID NO: 533758 - DNA, 100 bp, Homo sapiens
gaagaattcagaagaaacaaaagtgccaccgaagaggaaggccaggagaatgtcgagatcctcccctctggggagcgaccgcaggccaaccagaagcgaa

SEQ ID NO: 533759 - DNA, 98 bp, Homo sapiens
cacgggcacagtgccacagcagctgcaggtccacggcgtccagcagagtgtccccgtcacccaagaggaagctggagaagcttcgagagaaggagcgt

SEQ ID NO: 533760 - DNA, 100 bp, Homo sapiens
tggcaatgccattcttcgagaggtttgggcaaaactacccctgatccttcagctaacattagtctggatggtgtagacgttcctcttgggaccgggattt

SEQ ID NO: 533761 - DNA, 80 bp, Homo sapiens
accaaaatcaccttccatacattgactacttacacactggtgctgactgcatttgcacatggattaattgatgtatgttg

SEQ ID NO: 533762 - DNA, 100 bp, Homo sapiens
cttcgatcgcctcgcgccggctgctctttccggatgtgaagttcatttccaatccgccctccatggtggcagcggggagcgtggtggccgcagtgcaagg

SEQ ID NO: 533763 - DNA, 110 bp, Homo sapiens
cccatcctgccgtccttctccactttcgccagcccgtgccgcgagcgcggcctgcaggaggccctgtttgtgctcttcgtcctggcctacatccacatcgtcttctcccg

SEQ ID NO: 533764 - DNA, 75 bp, Homo sapiens
tcgctgttggatcgggttctaaaggaaaggcctctaagaaatatgtctccaaagaacttgccaaagagattcgtg

SEQ ID NO: 533765 - DNA, 121 bp, Homo sapiens
cttggctgatcccggaatgtaccagctggacattacattaagaaggggtcaaagtttagctgctcgagatcgaggaggattttggccccaaacagtaattatcaagatgttgagaccctct

SEQ ID NO: 533766 - DNA, 100 bp, Homo sapiens
gaaaatgaaattgaagaggtaaaagttgcttttgagataaaaaagcttgcattagacagtattggtaaaggttttcaaggtgtcatgaaaagatggggat

SEQ ID NO: 533767 - DNA, 96 bp, Homo sapiens
caccaggctgcttactggaaactggatgcagcaaggaaataggatttaaccgctctctgcctcccagggacagtatgatttggtgaaatgcctggc

SEQ ID NO: 533768 - DNA, 101 bp, Homo sapiens
cgacccctctgctcgcggccgcgcctttgagccagagcctaagcctggagacctgattgagatttttcgccctttctacagacactgggccatctatgttg

SEQ ID NO: 533769 - DNA, 51 bp, Homo sapiens
gaacatgccaggagagcaatgcaaaagccaaatttgtatcctactgtgggg

SEQ ID NO: 533770 - DNA, 99 bp, Homo sapiens
atcggcagagacaccttctggcccgcctccaagcccttgcctccagcccctgctccagatgagtatcttgtgtcccccattactggggagaagatcccc

SEQ ID NO: 533771 - DNA, 83 bp, Homo sapiens
gccacaggcacggaaacctcgcgccgaccggggccctaggcccgacgacggcaggagcaggccgggctctcgccatgggtcac

SEQ ID NO: 533772 - DNA, 135 bp, Homo sapiens
ttttcgtgctcctccttttcctcctcctctttctcctcctcctcagggctccagtcaggccgatccgctccgctcacgaacatggtccaagacaattcctgggaaagttcagttcttctcaagtgagggttctga

SEQ ID NO: 533773 - DNA, 98 bp, Homo sapiens
atgtcctcactctcgccatctggcagatcgtggaccctctgcaccggaccattgagaacactctgctccagccaaggtggtgagggcagctgttccta

SEQ ID NO: 533774 - DNA, 90 bp, Homo sapiens
atgacctcagagctctcaagcatgaacttgcctttaagctgcaggcagtgtcatcattaggctgtctttgtgccttaacagtattgatca

SEQ ID NO: 533775 - DNA, 90 bp, Homo sapiens
ggagggactgcaccttctccatcaggtgcagaaggacctgatcccaaccttgaagaaagtcctaaaagaaaaaatattacatatgaggaa

SEQ ID NO: 533776 - DNA, 100 bp, Homo sapiens
tttggcctctgtgatcctcttcgccaatcccatcagccccatgcagtgggtgggcactgtgcttgtgttcctggctttttttctcaaggtgcaatgaaag

SEQ ID NO: 533777 - DNA, 100 bp, Homo sapiens
gggtggtctggaaaggcggtagccggtgtgttggtggtcccggaacctctcgtaaaccagaaataagcgggttttgaaaacaaaaaaaagaaggagtgga

SEQ ID NO: 533778 - DNA, 100 bp, Homo sapiens
tacaagggcaaggtcagatggcagagcaagtcggaagctttgaggttcctgaagacttccaggagcgcatggagcagcagtgcatcgggtccaccacccg

SEQ ID NO: 533779 - DNA, 75 bp, Homo sapiens
ggaggcctacacgccgccgcttgtgctgcagccatgtgccatctccctcttctacgagctctcggagaatgactt

SEQ ID NO: 533780 - DNA, 83 bp, Homo sapiens
gatgaagatccattggtaaattgatcaggatttttggcctaccctccaaagaaaagttgagccccatatgggggttggcaggc

SEQ ID NO: 533781 - DNA, 87 bp, Homo sapiens
ggggaccaggacagtcgcgaggttcgagtgttgcagagcctgcggggcaagatctgggctgcagtgaacctcactctggtcactcca

SEQ ID NO: 533782 - DNA, 75 bp, Homo sapiens
cgctggcagccgctgtacttgcactccttgctcaagacccctccccagtacctacccttccaggcccccctttcc

SEQ ID NO: 533783 - DNA, 133 bp, Homo sapiens
agaatggccaccatggtaccatccgtgttgtggcccagggcctgctggactctgctggtctgctgtctgctgaccccagattccaactccacagagtgaccagagagaggacgtggctgaagacaccaaagat

SEQ ID NO: 533784 - DNA, 89 bp, Homo sapiens
ggaagcagccgatccagcctgcggagcctgtggggcaggcactatgtcgtccgaggcccagagatgaccccttatgaaggtaaggattc

SEQ ID NO: 533785 - DNA, 96 bp, Homo sapiens
gtgaaaaccgagctgctgggagaagggatcgcttacacctgagacgaactacagaacagcacgtaccagaggtggaagtccaagtcaaacgcagaa

SEQ ID NO: 533786 - DNA, 50 bp, Homo sapiens
agacaaaccccacaagcactgcatacgagccaacacagatctatagattt

SEQ ID NO: 533787 - DNA, 87 bp, Homo sapiens
acacccaggcccagctggctgtggctgtggacccttcagaccctcgggctgtgcagacccttgacctttctggctccagagagacgc

SEQ ID NO: 533788 - DNA, 76 bp, Homo sapiens
atgagatcgtggacaagatcatgggcaaaggacagatccaggtcgctcctgtggttggtccagcccagaatgcagc

SEQ ID NO: 533789 - DNA, 83 bp, Homo sapiens
ctcatccaccccaccttgtatgcaacgccccccttcacacacagtaaggtggcttctggcacagcagcttaattgaccggaac

SEQ ID NO: 533790 - DNA, 100 bp, Homo sapiens
ctgggagcccttccttgacagcccgggccgagaaggtactccaaagattcaggtttactcacgtcatccagcagagaatggaaagtcaaatttcctgaat

SEQ ID NO: 533791 - DNA, 76 bp, Homo sapiens
gtccagcacggccaagtcagccacctggacgagtcggatggcagagagcttgcgcctctttgactccatctgcaac

SEQ ID NO: 533792 - DNA, 76 bp, Homo sapiens
atcaagcagaatgtgatttgcttgaagatatgagggacacttgacattcagggacgtggccatagaattctctcag

SEQ ID NO: 533793 - DNA, 50 bp, Homo sapiens
gtaacgtcatggaggatgaacgacaggaattccgatgctgaagatcgtgt

SEQ ID NO: 533794 - DNA, 87 bp, Homo sapiens
tgcgtggggacggccgcctagagtggttcagccacaaggaggctgcaggctcgcatcgcacaccgaattcaggaacttgaaaacctt

SEQ ID NO: 533795 - DNA, 100 bp, Homo sapiens
gatgttcctccttcagctgtcacaagaccaatatttggtatactgggcacaatccatctggtggcagaccaagatcactccatggatgaaatgacagctg

SEQ ID NO: 533796 - DNA, 50 bp, Homo sapiens
tctcgatgagtcggagaagtcccatgccacctcagtatggacagcaaggt

SEQ ID NO: 533797 - DNA, 100 bp, Homo sapiens
cgaccggcaactactttggattcacccacagcggggcggcggcggcggcggctgcggcccaatataggtaaaaaagctccagttttatttaataaagaaa

SEQ ID NO: 533798 - DNA, 75 bp, Homo sapiens
tcctgtacagcctgcagaactgagaactacgatgacccgcacaaaacccctgcctccccagttgtccacatcagg

SEQ ID NO: 533799 - DNA, 100 bp, Homo sapiens
tgcggtggaaacaggcttactctgacttccctgggggcagcccaatggatccaatggtgatgaagagacctcagttgtatggcatgggcagtaaccctca

SEQ ID NO: 533800 - DNA, 101 bp, Homo sapiens
tgcagtaccccagctccatcaacctcacgctgcacctggcaatggaagagttaatagttgaacttcgtctctttcttgaactcctggaccatgaatatcta

SEQ ID NO: 533801 - DNA, 90 bp, Homo sapiens
tgaggcctggaatttgattaactcattcaaggttacccagttggagcaggacatcgagactttacatggctctgttcacgtcacgctgtg

SEQ ID NO: 533802 - DNA, 100 bp, Homo sapiens
gaagctggccgagcaggctgagcgatacgacgattctctgcaatgactgtaatggacgatccactgttcagtttcatatattaggcatgaaatgtaagat

SEQ ID NO: 533803 - DNA, 75 bp, Homo sapiens
gctgctacctgcagcgccgtgtggcacgacacaaaaatcaggtcttccactttcgccttggtgcctgtcttcgcc

SEQ ID NO: 533804 - DNA, 100 bp, Homo sapiens
tctggccacgtgcttcaacgctctgctgcccgctgtgagggaaaagagagaactcgatgccaccgcaacggtattggcgaaccggcaggatgaaagtgag

SEQ ID NO: 533805 - DNA, 100 bp, Homo sapiens
aatgagacccaaactgctcatacagaattacgcatttccacttctaatggacactgcccatctctaagataagaacctggaaaggggactctgttggcca

SEQ ID NO: 533806 - DNA, 100 bp, Homo sapiens
aagagattccttgcagagacagctcaacacggcacttccacaggagcaggggagagaagacagaagaggttggagaggtcagggaggtgccagatcatgg

SEQ ID NO: 533807 - DNA, 95 bp, Homo sapiens
ggaaaggaagtttacttatctgggtccttcaacaactggagtaaacttcccctcaccagaagacatctcaacagtgagcatgcgctggacgatag

SEQ ID NO: 533808 - DNA, 98 bp, Homo sapiens
gttcaatcaccactgtccaaattcagaagctcagaacgctggactctccctttgcaggtatgtgtagagaagtggaatctcctcaactcctcccgcct

SEQ ID NO: 533809 - DNA, 95 bp, Homo sapiens
tactcatagattgtgtaggcgttggtcttctgatagcaactttaatgtggaggcttttaggcgtttgggtaatggggtgtctgatgacctgtcaa

SEQ ID NO: 533810 - DNA, 98 bp, Homo sapiens
aatgcggcagatcttctcatattcgggaaggagctaaggtgtcgtgaaaactacccctaaaagccaaaatgggaaaggaaaagactcatatcaacatt

SEQ ID NO: 533811 - DNA, 75 bp, Homo sapiens
ggacggccaagaccagcgcgagggccctgggcaaggcccgacaggaagatgagtgtgcaggctgtacggatggaa

SEQ ID NO: 533812 - DNA, 100 bp, Homo sapiens
cagccaaacatgcaggactctagtaacccgcgaaatgatgggatagcgttgcaaatccttaaaagagtcttaacggatctcccattaaccagtcataatg

SEQ ID NO: 533813 - DNA, 82 bp, Homo sapiens
gcctggaagcctacgccctggggctggacacctgccgtattcacctggaccaacctgctggtggtggtggtggagctggatg

SEQ ID NO: 533814 - DNA, 74 bp, Homo sapiens
agaaactaaaggacattaaggaaatagtgccccttttcagagtattgaatgctttacttccaaccctaagaaaa

SEQ ID NO: 533815 - DNA, 98 bp, Homo sapiens
ggggcctgggatgagagtggggtatttatctataccacaagcaaccacatcaaatatgctgtcaccactggagtaaacatcagtctccaaagataact

SEQ ID NO: 533816 - DNA, 73 bp, Homo sapiens
tgtgatgttcgcgtatttcttgacaggtgcgtggagatgctgatcaaggagcagatgaggaaatacaaagtga

SEQ ID NO: 533817 - DNA, 83 bp, Homo sapiens
atctaccttctggaagctactactacgtggtgcttggaaagaggtgcctgatgctgttaattcctgagccttttgaagattct

SEQ ID NO: 533818 - DNA, 101 bp, Homo sapiens
atggagaggggccgtggcccctgcagcggaaccggacccagtccctgagccgcccctacacccacaggtactaggttttgacaagcttgcatcatgcgtga

SEQ ID NO: 533819 - DNA, 51 bp, Homo sapiens
gtttggacgccggcggagacgcgggcgagtgatcttccattgtttgaagca

SEQ ID NO: 533820 - DNA, 75 bp, Homo sapiens
aaaaaaaccagcattcaacttgtctgcctttggaacactttcccctgaccctgatgctcccataagacagaaaat

SEQ ID NO: 533821 - DNA, 100 bp, Homo sapiens
cgccgccgccgccgcggtttgtcgccagaaggaagatggcggatctggaggagcagttgtctgatgaagagaaggctcagcagggagctgctggatgaga

SEQ ID NO: 533822 - DNA, 82 bp, Homo sapiens
aagaccgcgcgcagggcctgcagcgggagctggacggcgagcgcgagcggcgcgagaaagagctgacatggacccaaatcct

SEQ ID NO: 533823 - DNA, 74 bp, Homo sapiens
tgcccacacccagtgacatctttgtgtcctactctactttcccagggcgtctctggccgagcctctttttgtgg

SEQ ID NO: 533824 - DNA, 100 bp, Homo sapiens
cctgcctggacccctactattgcaacaagcttcttaatgaagaggataactcagaatcatcggctatagagcagccacctacttcaaacccagcaccgca

SEQ ID NO: 533825 - DNA, 100 bp, Homo sapiens
gcaagttatggcaatgtgatcgtcatcacagtcaactatcgacttggagtactcgttggtgatggagttttgtggtgctggctctgtcaccgacctgatc

SEQ ID NO: 533826 - DNA, 90 bp, Homo sapiens
ccgtagacaccagctccgaaatcaccaccaagtgcagagcagagcgggcggaggaccccgggcgcgggcgcggacggcacgcggggcatg

SEQ ID NO: 533827 - DNA, 75 bp, Homo sapiens
gcctggaccgggtctgagcgcggctgcccaggttgacctttctgcgggagtttgacggtgagaacatgtatatga

SEQ ID NO: 533828 - DNA, 83 bp, Homo sapiens
ttcgcagtggtcgcttcttctccttgaggagaattctgcctaagccaactcgaaaaagccgtacaaaaaataagcaaaagcgt

SEQ ID NO: 533829 - DNA, 89 bp, Homo sapiens
caagccagagaagtgcccgaggagagttaacaggaagccttatcagttgtgagtgaggaccagtcgttgtttgagtgtgcctacggaac

SEQ ID NO: 533830 - DNA, 101 bp, Homo sapiens
agaggatggaacacttcagtgcattcaagctgtgctccattgaagtgacttgtgaatcagccagtgtgatggctgcgacactggctaatggtggtttctgc

SEQ ID NO: 533831 - DNA, 100 bp, Homo sapiens
ttctttcacaaaccttgtgtctcaatttggctacaaaagctggaggagcaccggaattcacagaagcagatgaagctcctacagaaaaagcagagccagc

SEQ ID NO: 533832 - DNA, 75 bp, Homo sapiens
ctcggagaccccgcgccgacggctgctcaaacatcagggagggtgtgaagacagagaatgaccacatcaacctga

SEQ ID NO: 533833 - DNA, 113 bp, Homo sapiens
ctgagttactacattgtgcgctggcagcggcagcctcaggacggctacctttaccggcacaattactgctccaaagtgcacctggaagtggtcccatgttcaaaccaaccaca

SEQ ID NO: 533834 - DNA, 130 bp, Homo sapiens
cccgctattgcgcagcgatttgttgtaagaaccgccggggacgaaacaataaagaccggaagctgagtttttatccgcctatatgaacccaatagcaatggcgagatcaaggggtccaatccagtcttca

SEQ ID NO: 533835 - DNA, 83 bp, Homo sapiens
agaagaatccgccatgggctactcagtttacagccactgcagtatcacagccagggacccgagtgtatagccctccagagtgg

SEQ ID NO: 533836 - DNA, 75 bp, Homo sapiens
tgaacccagagagttcctgcaacaacaatacaggtgtgatgaatgcagactctgctaccattttggctgtttgga

SEQ ID NO: 533837 - DNA, 76 bp, Homo sapiens
cttaataaccagcggagctgacacagccaagtcagtaacagatccaagagatggaaagagagtagcgctcaaaaag

SEQ ID NO: 533838 - DNA, 116 bp, Homo sapiens
cttctagcagtgcagggaacttgggagtactcattcctgtaatagctgtgctctccacacaaggagatgcaagtcaggtgattgggcctcttactgaaggacagagaagaaatgtg

SEQ ID NO: 533839 - DNA, 100 bp, Homo sapiens
tggacagacatgtcttcccatggagcagcccgtggagtctgaagcaatgcactgcagcaaccccaagagtggagttgtgctggctacagtggcccgaggt

SEQ ID NO: 533840 - DNA, 80 bp, Homo sapiens
agaggaaatgagttatatgtacttcttggacacttaatgattgttggcaagaaatgtgctgctgatctgggcctgaataa

SEQ ID NO: 533841 - DNA, 75 bp, Homo sapiens
agaggcaggatcatgctggctagaatctagtggacaagggtgatgatgatgcttatctgtgtattcatgaagatc

SEQ ID NO: 533842 - DNA, 100 bp, Homo sapiens
atccaaattcaaggatctagaagataaaaaagtgaatcagcagccaaatacacacaacattctgaaattttttggttattgtaatgatgttgatcgggag

SEQ ID NO: 533843 - DNA, 90 bp, Homo sapiens
ctacgtcttctcagagtacacccgttcacctcgtcaggacctggagtaccatgtgttcttctcgtgtgggccatgtttgaggattgcccc

SEQ ID NO: 533844 - DNA, 104 bp, Homo sapiens
gtcttcccgcgtccgccgattcctcctccttggtcgccgcgtccttggctggcgtggggatatgagactttctactcggaatatcctgagtgttgcgtggatgt

SEQ ID NO: 533845 - DNA, 106 bp, Homo sapiens
tccagtcctcctaggcatcttattgatcctccagtcgaggaccatggccaacctggagcgcaccttcatcgccatcaagccggacggcgtgcagcgcggcctggtg

SEQ ID NO: 533846 - DNA, 83 bp, Homo sapiens
gaggaaggaacgaggcaaggagctaaagcagcgtgcgttcagccctggggttgcgaggggcggtgttgaagaatgtgtgggcg

SEQ ID NO: 533847 - DNA, 98 bp, Homo sapiens
caaaaaagccaaggagcgggagaaatcatctttggacaaaagaaagcaagaccccgagtggaagggccgttgctccagggagaactgcaaatatcttc

SEQ ID NO: 533848 - DNA, 90 bp, Homo sapiens
ccacactaagagttgaccagtcaattctcacaggggttccaatttcatctgctgttgcaggcgtagcaataggattggtcaccaaaaccg

SEQ ID NO: 533849 - DNA, 98 bp, Homo sapiens
gatgggcagatagatgctgatgaattgcagagatgtctgacacagtctggcattgctggaggatacaaacaaaccagcctggacaccaagtctgtgtc

SEQ ID NO: 533850 - DNA, 75 bp, Homo sapiens
tgtgatgcctgcagagctgtggcttaccagttacgaaaagcggctgtactgaggacagcggtggaggccgaggtg

SEQ ID NO: 533851 - DNA, 100 bp, Homo sapiens
agagaagagcccccaggagaaaagccagtattgcttgtgctcctaacaacctgtctcttgtgatcagaatcatccagataatcaacagctgaagaatgaa

SEQ ID NO: 533852 - DNA, 97 bp, Homo sapiens
taagcatgaaaatattgttgccctggaagacatttatgaaagcccaaatcacctgtacttggtcatgcagctgtgccatgcctctgcaactcctcct

SEQ ID NO: 533853 - DNA, 100 bp, Homo sapiens
cctcagtttgtgcaggacaccgacatggaacagggactcactgggggtacatggactatatcgcacaacaggtgctagttttgagaaggcccaacaggag

SEQ ID NO: 533854 - DNA, 74 bp, Homo sapiens
cggccgtgcgtttgtggccgtccggcctccctgacatgcagctggtggagctgtctaaggctcaagatatagaa

SEQ ID NO: 533855 - DNA, 75 bp, Homo sapiens
catatcataagtggaattttggagatattcaaagttcagagtcgtgacacttcaagaggtgggcagattattcat

SEQ ID NO: 533856 - DNA, 100 bp, Homo sapiens
gaacaacctgaacgtcaccgaggagaagtaccaggaggcgttggccaagggtgaccaagaatatggcccaggtgaccaaagccctggacaaggccctgag

SEQ ID NO: 533857 - DNA, 83 bp, Homo sapiens
ctctttctggcctggaggctatccagcgtatttctgggaaaagccagcttctgtttgcactggtcttcacaactcgttacctg

SEQ ID NO: 533858 - DNA, 74 bp, Homo sapiens
aactgacttcctcacagagggatttagctgtaaggtcaaaatgcagatcttcgtgaaaacccttaccggcaaga

SEQ ID NO: 533859 - DNA, 100 bp, Homo sapiens
accagctagagaccatacagacctaccggtctgtcagtgagatggcttctaacaaggtgtaccttgaaagacttttaacatacgcagagatagatatctg

SEQ ID NO: 533860 - DNA, 100 bp, Homo sapiens
gtcaagctgccccccaagtcccaacctccggagaaaacagaggaatctccttcagcccctgcttccacagcgcggcacctgtacctccggggtggcgctg

SEQ ID NO: 533861 - DNA, 100 bp, Homo sapiens
cagtaatggtggatgaagttgttcattgtttgtcaccacaaaaaggacagacaaagggtggaggatatgaaagtgaaagtgcttacccaaatgcagaact

SEQ ID NO: 533862 - DNA, 100 bp, Homo sapiens
ctgcagaacccccagaccatcatggtggatgtgaacactgaccggaagatcagtgccaaggagatgcagcgctggatcatggagaagacggccgagcact

SEQ ID NO: 533863 - DNA, 83 bp, Homo sapiens
gccgccaccatgcccaagagaaaggagcttactccacgggaacagcctctagataatctgagttgttgaaaatacgaagcctg

SEQ ID NO: 533864 - DNA, 90 bp, Homo sapiens
ctcctgcataactgggactacaggctgcatagagcctggacctgggcactggggtgagctgagccggacaccagtcccatctaaacccca

SEQ ID NO: 533865 - DNA, 74 bp, Homo sapiens
cgcagtggtcgcttcttctccttgagctggcagcccatggggacctggtgcagagcgccgtctggagccgagat

SEQ ID NO: 533866 - DNA, 82 bp, Homo sapiens
attacatcagatgggagaatgattgtggtagttaacctgcagtacagtgaagttcaagatcgggtcatgctcactggccgcc

SEQ ID NO: 533867 - DNA, 83 bp, Homo sapiens
ctcgtggccattggcaggagggacctggctggggtcttcacggcttctctgcccaggggccagaaccgaggaggccaggaggg

SEQ ID NO: 533868 - DNA, 100 bp, Homo sapiens
gggcttcccaatggccagcccagacacccacatggaggggacagcaaacattgagaaggcaaataagggcgagactgaaaaatcaagtcactcagttgaa

SEQ ID NO: 533869 - DNA, 82 bp, Homo sapiens
cgcgagcgaacgaccaagagggtgttcgactgctagagccgagcgaagcgtgtgatgaatgcagactctgctaccattttgg

SEQ ID NO: 533870 - DNA, 100 bp, Homo sapiens
gcaaaatagagaaatataatgttccgctgaacaggcttaagatgatgtttgagaaaggtgaaccaactcaaactaagaactctctttgctcacaagttac

SEQ ID NO: 533871 - DNA, 80 bp, Homo sapiens
caagatgaaagcagcagttttcatcatctaagtgaaagttctttatagctccaagctctacagattcttcaaatatattg

SEQ ID NO: 533872 - DNA, 100 bp, Homo sapiens
cttgaagcagtatttggcaaatatggacgaatagtggaagagttaatgttctcctcagaggtggaagaatatcctgataaagagaaagaaatcaaagcct

SEQ ID NO: 533873 - DNA, 90 bp, Homo sapiens
gttttgtgaaaggccaatttcatgaatttcaagagagtaccattgggggaaagaccacagcaagattctttcattcgtctcctcctagcc

SEQ ID NO: 533874 - DNA, 50 bp, Homo sapiens
ctgttcagacttcagcttggttacgactttactccgtgacataaaagaag

SEQ ID NO: 533875 - DNA, 102 bp, Homo sapiens
cttgggacccaccgctgccctcagctccgagtccagggcgagctcaccatggatgatgatatcgccgcgctcgtcgtcgacaacggctccggcatgtgcaag

SEQ ID NO: 533876 - DNA, 132 bp, Homo sapiens
ggctccctcattaccgtcgccagcggagcgaacccgagagcgtggagcgggctgggccaggctggcagtgatggtgaaagcataggaaactgccccttttcccagaggctcttcatgattctttggctcaaa

SEQ ID NO: 533877 - DNA, 74 bp, Homo sapiens
gttgaaagtgaaatgtcatgcctctgaaaatgaagagaaagagatgacttgatgtctgcactagtttccgtaag

SEQ ID NO: 533878 - DNA, 100 bp, Homo sapiens
atagagatgtgatgttggagaactacagaaacctggtctccctaggattaaagcaaggagagccaatcatgactggcaaaacacagaccagcaacgtcac

SEQ ID NO: 533879 - DNA, 101 bp, Homo sapiens
agaccgttctgcaagcctacatcagcaatgacctcttggactgttatagccacaaccaggccaggaatagttgctgaacaccccaggcctgctgaggtccc

SEQ ID NO: 533880 - DNA, 75 bp, Homo sapiens
cgaatctccggccgaagagcggcggcggcagcggcggtgctggagaatctggtaaaagcaccattgtgaagcaga

SEQ ID NO: 533881 - DNA, 100 bp, Homo sapiens
tgaaattcgagaggagtttgagcggctgcagagagagagagaagagaggagattgcagcagcgaaccaatcccaagcatttttgaaacgttggggttgtt

SEQ ID NO: 533882 - DNA, 75 bp, Homo sapiens
gctgccatgagcaaagaggaggtcgacagccggatcgagctgggagatgtgacaccacacaatattaaacagttg

SEQ ID NO: 533883 - DNA, 100 bp, Homo sapiens
gctttttaatgggacctgtgaagcaactgaagaaaatgtttgaagcaacaagattgcttgcaacaattgttatgcttgcttctgggaacttggcagacgc

SEQ ID NO: 533884 - DNA, 83 bp, Homo sapiens
cagatgagtctctggacagctttcttatagaactagaaaagatcgcagcctgcagctgagcgcatgggagagcagcatcgtgg

SEQ ID NO: 533885 - DNA, 74 bp, Homo sapiens
gtttgaagaatcttctacatggccaacccatggccagcacagacatgatggaataaagactgagcactacaaaa

SEQ ID NO: 533886 - DNA, 75 bp, Homo sapiens
cgggagtagacagtggccggcagggcagccgggggacagctgtagtgaaggtcatgatgatgggcagcgcccgag

SEQ ID NO: 533887 - DNA, 100 bp, Homo sapiens
cagcatatatgtcaactctaccatgtgctagagacagccaacaaaatattcatggttcttgaggtggtcttcgagggatagcacgaggtggtctgacagg

SEQ ID NO: 533888 - DNA, 83 bp, Homo sapiens
cctcgctgtacgccgagcacccaggcgactgcctcatcttcaagatcgcaccccctccctccctggcggagcccctgaaggag

SEQ ID NO: 533889 - DNA, 100 bp, Homo sapiens
atagctgtatcattggcaacatgatttcggccaaatttgagtttcatcatggtgactatgaaaaacagtttctgcatgtactgagccgcaaggacaagac

SEQ ID NO: 533890 - DNA, 75 bp, Homo sapiens
cttgggtttagcaaaagttcatctccttctgcatccttaactgagaatgagtgaatggataccacgcatcaggga

SEQ ID NO: 533891 - DNA, 100 bp, Homo sapiens
cagacacggagctcctgcttccgagcttcctgttccttcaggaagtgaaatggatggagcagaatctggaaaggctggcctgccactcctcctgctatga

SEQ ID NO: 533892 - DNA, 75 bp, Homo sapiens
gtgggagaaccagccgactggagcaggcagcagcccaggtatgtcgagagtaccaacgtggcaattgcaaccgag

SEQ ID NO: 533893 - DNA, 50 bp, Homo sapiens
tggatctttgctagaaagagagccttgaaaagatcttttgaggtcgagga

SEQ ID NO: 533894 - DNA, 50 bp, Homo sapiens
tgcccactcccatggtcctgcagagaaagaaatgaccgcccggatgtgcc

SEQ ID NO: 533895 - DNA, 95 bp, Homo sapiens
ctttcatgcagtgacatgttgataaaaaatgatgcttgcctgggaccagtggcagggaccccggaacctgaaggtgctgacaaagatgacctgct

SEQ ID NO: 533896 - DNA, 75 bp, Homo sapiens
tatttagctttagttggtggtggaaaaaagccgaaataccctcccaacaaaggcaagagcggtgagcggggcgcc

SEQ ID NO: 533897 - DNA, 107 bp, Homo sapiens
ctccggaaagtgaagaagacccggaggaaactaacctcaacctctgccatcacaaggctctttcgacgtgtagcagcagctttgccgggaatggaaagcacacagga

SEQ ID NO: 533898 - DNA, 82 bp, Homo sapiens
ctccggccgaagagcggcggcggcagcggcgcctacagacctggtacctggatttttgcccgagatgattcctaccacctta

SEQ ID NO: 533899 - DNA, 75 bp, Homo sapiens
tcttcggcatcgggcgacagcaggtcacagtggacgaggtgttggcggaagcacccaccctggagccatggtcca

SEQ ID NO: 533900 - DNA, 51 bp, Homo sapiens
tgatgtggatgatgccaaagttttattagattgtcttcgcagttttaccga

SEQ ID NO: 533901 - DNA, 75 bp, Homo sapiens
gtgctcgagtgcctgcaggatgtgagggagggaaatgatcttcattggttagcatgtgccttatatgtggcttgc

SEQ ID NO: 533902 - DNA, 152 bp, Homo sapiens
cggcggggcgcgggcggccacgcggggctcctgcagcatggctgtcagcaggaaggactggtccgcgctgtccaggattggcagccaccatttgcatgtgatgttgataaacttcattttacgccacgtatccagagactgaatgaattgga

SEQ ID NO: 533903 - DNA, 95 bp, Homo sapiens
atcctacagggcccctgtactgcccagaggagaaggagatgagactgatcgtggggttgaccaacaagatggaaagaaccacgcaggatcccctg

SEQ ID NO: 533904 - DNA, 90 bp, Homo sapiens
gagcttggtttcgggatctcggtgctgcagacggcgagacctcctgcacaggaacctagaaagattgtacaatgaatggtgattctcgtg

SEQ ID NO: 533905 - DNA, 99 bp, Homo sapiens
gtcccggcgccgtcgcgccactcctccgaattattaagttcctgcaacttaactgggaactgatcaagatttcaagctaaagatggtggtgatgaacag

SEQ ID NO: 533906 - DNA, 100 bp, Homo sapiens
cctgctggaaaagcagtaggatcggccagtggcgacagcaggagctgagcctaagccctggcggggctttgggctgtagacgactgcaagaacattgcca

SEQ ID NO: 533907 - DNA, 75 bp, Homo sapiens
gacgccaggtggacacgcccatccttggacttcctgaaaatgacccaggctactatgtgggcatgtgccttgcgg

SEQ ID NO: 533908 - DNA, 100 bp, Homo sapiens
gcatggtcagtgccgtttaacctttattgtggtggagtccaccccgctgtggcttcatagagcccagtgtgcaattaaacagactcaggtaactgttcag

SEQ ID NO: 533909 - DNA, 134 bp, Homo sapiens
cctgagtggggagcagctgcgggtgttccgggagcaccggggctccgtcatctgtctggaggtgtggccgacgacgatgccctcgctgaggagcgcatgcggagaggccagaacgccctgccagcccagcctgc

SEQ ID NO: 533910 - DNA, 132 bp, Homo sapiens
tgcgtctctgtttgagaggacaaactgtggggctgggaccgcgaggtgactgtgactgaggaagagtgctctttcaccatgcctggatcacttcctttgaatgcagaagcttgctggccaaaagatgtggga

SEQ ID NO: 533911 - DNA, 50 bp, Homo sapiens
caaacttcaacagaatgtggcaaccagcatgcgtggagtggcagtgctaa

SEQ ID NO: 533912 - DNA, 75 bp, Homo sapiens
aatcacctcctctgggacgccttcctctacttctcacagttcagaatctacctgttactcgtattttggacaatc

SEQ ID NO: 533913 - DNA, 139 bp, Homo sapiens
gtgaaatcccagcatccactaagctggtgttgtcctatcgacccagctggatcgtgtaaccagtctatgggaagtgagaattttgaacagaaaatgctgaaaaaaggagggtcatggattcaagaaataaatgttgctg

SEQ ID NO: 533914 - DNA, 75 bp, Homo sapiens
gtcaaagtcaactgcaagcgagttatgtggagtttagacccagccaggtttccaatacttatctacaggaatcgc

SEQ ID NO: 533915 - DNA, 74 bp, Homo sapiens
agacagtcaagatagcaagaaggtagaaatcatcataggcatggattccgtgaaggaacaacacctaaacccaa

SEQ ID NO: 533916 - DNA, 75 bp, Homo sapiens
agacagtccctggatcaccgacagcacagacagaatccctgctaccagcaatggacctcatcatgaccgttgctg

SEQ ID NO: 533917 - DNA, 80 bp, Homo sapiens
agaaacagttctctcaatacataaagaacagcgtaactccagacatgatgatcaagcggtgctgattcacgagagtggaa

SEQ ID NO: 533918 - DNA, 87 bp, Homo sapiens
ctcggattaaacgccggagagagcgtgaatttgcctcggggacgcctctccagagctgagctcaatgtgcagcaatggatgacgaca

SEQ ID NO: 533919 - DNA, 100 bp, Homo sapiens
gtcggctcttgcgtatgtggatggcaaatgctgtaaggaatgcaaatgtatggcagatcccagaaaatggactcaccctttccctgactgaacctgtggt

SEQ ID NO: 533920 - DNA, 100 bp, Homo sapiens
aaacagtttaagtctgtatatgttcctggaaatcatacccaccagaacttgaatggaagctagcagaagttggagcaatacagactgatttggaagaaaa

SEQ ID NO: 533921 - DNA, 75 bp, Homo sapiens
ttgttctcatctcgctgcaggaggctaaagatatttgcgaggagcaggtcaacggaaatgcaataccttatttcc

SEQ ID NO: 533922 - DNA, 101 bp, Homo sapiens
atgccatcaacccccagagttcagcaggccaagcaatggggctggacacaaggtcggtggcccaaaaagagtgctgaatttttgctgcacatgcttaaaaa

SEQ ID NO: 533923 - DNA, 50 bp, Homo sapiens
ggctgatgagatgtgataaaggaacgggtatggcaatccccgaaactcac

SEQ ID NO: 533924 - DNA, 82 bp, Homo sapiens
caacaacccactcaggcacttccggtttttagaacttcagccataaaaatgggcagaattttccttgatcatatcggtggta

SEQ ID NO: 533925 - DNA, 82 bp, Homo sapiens
tggggatcgctacggaccttaaaatacccgcaacagccccttcgtcccaaacctcctgacagtgagtgagactgccaatgag

SEQ ID NO: 533926 - DNA, 100 bp, Homo sapiens
gggagccggcgaggatcaaaatcttcgaaggagggttgccttcttcctcatctctgcagtaactgtcttcatggtttcatagccttctccctgatacccc

SEQ ID NO: 533927 - DNA, 101 bp, Homo sapiens
gcagggcatgctcagcgtggccgaggagctgtgccagggtgagttctgcagtcagggtgtccgtgagggcctcatcgtgggcttcgtccactctatgtgcc

SEQ ID NO: 533928 - DNA, 88 bp, Homo sapiens
tcacctgagcaacccctctgcaggaaccgcagtgtacagtattttctccaaggtacactccgatcggaatgtatacccatcagcaggt

SEQ ID NO: 533929 - DNA, 100 bp, Homo sapiens
cttgccgttcgttcgtttccagcctcaggaatttatggtcgcctttttgaatgagataacgaaggaggcccaacttcattcaataaggagcctgacggat

SEQ ID NO: 533930 - DNA, 50 bp, Homo sapiens
tactctgttatagataaacaaggagtgggaatagctttgcgaaaaatggg

SEQ ID NO: 533931 - DNA, 74 bp, Homo sapiens
ttgtcacattcttcttgggaattactgtgaattaaacatgtggacatgaaccaaaagagcatattatggagtgc

SEQ ID NO: 533932 - DNA, 50 bp, Homo sapiens
cactcggctgccggaggccgaagagaatcacattttggaagatgtgaaca

SEQ ID NO: 533933 - DNA, 101 bp, Homo sapiens
attatggctgctgttgtccaacagaacgacctagtatttgaatttgctagtaacgtcatggaggatgaacgacagcagggagaaggttttaaggtgaaaac

SEQ ID NO: 533934 - DNA, 100 bp, Homo sapiens
cctactcccagatgcatccgtgtcagttgtgtgatagctgagctttttacagaaggtgtaccattatttgatctctctcaacttttggcttatagaaatg

SEQ ID NO: 533935 - DNA, 100 bp, Homo sapiens
agatccagaagtgaaacgccaggctctctggaggccaggagatgttaattggccttggtcctcacagctccaaaaagaaacaggatctcgataagctcta

SEQ ID NO: 533936 - DNA, 100 bp, Homo sapiens
agacagcagcgactagggctcgggcgccggcgagatgcctttgttcaccgccaaccccttcgagcaagacgtgggaatttcttcacatggctcctggaga

SEQ ID NO: 533937 - DNA, 75 bp, Homo sapiens
actgactagcagcttcattttgaagagaggagttcattacttcggaagtggtacaatttaatgatacaaaataag

SEQ ID NO: 533938 - DNA, 90 bp, Homo sapiens
ggctatcctgcgcctttccactgctctgctgcctgtggaggaaccgattgtgtccacagatgaggtcatcttcccactcaccgtttcact

SEQ ID NO: 533939 - DNA, 75 bp, Homo sapiens
gtctacttcattgctggacaggatggagttcgccagtcgagagttatggctgcagcttcgattgccaatattgta

SEQ ID NO: 533940 - DNA, 75 bp, Homo sapiens
tggaccccacggccctggaggaggagggcagcggaggaggagaaagagatggacctcccggactcggcctcgagg

SEQ ID NO: 533941 - DNA, 75 bp, Homo sapiens
ggagttcaaggaggtgctgaagagcgaggaggtgtgttccagagaacaagccttcagacatttgctatattgacg

SEQ ID NO: 533942 - DNA, 50 bp, Homo sapiens
tgtgggacttcatcttgtgatcgtaacattgagctgaaggttgaagtgga

SEQ ID NO: 533943 - DNA, 96 bp, Homo sapiens
gccgagtcactactgcctgcctgcctgcctgctacgaaccccaaaagggagattcaaaagatcctggagtttgtggggcgctccctgccagaggag

SEQ ID NO: 533944 - DNA, 100 bp, Homo sapiens
gaaaaagttcagtgggaagcatgtcgtctttatcgctcagtccagaacatacatgtgcagctggcaaggagagatgctgtgtttcacggtggatttcgcg

SEQ ID NO: 533945 - DNA, 83 bp, Homo sapiens
ggaaaactggatgctgcagacactgaacgaggagccagtggccccagaggtgatccgaatgcaggataacaacccattcagtt

SEQ ID NO: 533946 - DNA, 87 bp, Homo sapiens
tgggacccgcggaagccggcatgctggagaagctggagttcgaggacgaagctagtgagacctgcaacgacttccacccgatgttct

SEQ ID NO: 533947 - DNA, 50 bp, Homo sapiens
cttcatccagaaactgggggagggactcctcagacccctgcacaattgag

SEQ ID NO: 533948 - DNA, 50 bp, Homo sapiens
atgcagttcagtaacacacctgttttgcacagtaataagttgactcacac

SEQ ID NO: 533949 - DNA, 50 bp, Homo sapiens
gggtgggagtgacccgattttccagtgacttttttgaacgaaccattctg

SEQ ID NO: 533950 - DNA, 100 bp, Homo sapiens
tggaactcattcgcctctttttggagctgcccagttgcctgtcttttgtgaatgcaaagaaactaatggcagatcccggaaatccagacttgtatcatgt

SEQ ID NO: 533951 - DNA, 98 bp, Homo sapiens
ctggaggaggcatggagcccgaggaggagccaagtgtggcagcagttcgtgaagtctgtgaggagcccagcgacttctccgtgtcccttaaagcgtca

SEQ ID NO: 533952 - DNA, 75 bp, Homo sapiens
ggtgagcgcccatatgggggttctggagagcggggtgtgggctgcggttggatttctcacgatgtccagtgttat

SEQ ID NO: 533953 - DNA, 100 bp, Homo sapiens
tccatccacactgtgtgagcaaattggagagattgccttgatagaggactgatgtttttcactgatgagatgagttgtgtgggaccccagggtatctagc

SEQ ID NO: 533954 - DNA, 51 bp, Homo sapiens
cttatgctggctgggcccaagcgctcttcctgcagactcttttttcccgag

SEQ ID NO: 533955 - DNA, 100 bp, Homo sapiens
ccccagtgccggggagggttctgctgcttcgaaagctggtaaggcctgagaacccacaatacattatatgcaccagaaatgctagccaaaatggcagagc

SEQ ID NO: 533956 - DNA, 96 bp, Homo sapiens
atggagatgatggggatgatacagccagcgaatcttatttgcctggagaactgataaatttcaaacggaagagagtggcagcatttagaaagaatc

SEQ ID NO: 533957 - DNA, 82 bp, Homo sapiens
gtctgcatccacattgcacataaagttggacacagagtctgggatctaataattcagtcattttggatggactaaaaagaag

SEQ ID NO: 533958 - DNA, 100 bp, Homo sapiens
gcgggcgcagctggcggagctggagctggagctctcggagggctagcttgtcactttctgcaaaggtttccctcagggagcctcctgctgccaggcacca

SEQ ID NO: 533959 - DNA, 50 bp, Homo sapiens
gcacgtgcacagccagctggaggagtgtcaacagcatctccaccctggag

SEQ ID NO: 533960 - DNA, 74 bp, Homo sapiens
tcgatgaccttggacacctccatgttatggacacggtctttcttattcaggaaaatcctgccttgcttcgttgg

SEQ ID NO: 533961 - DNA, 100 bp, Homo sapiens
agagaatagatgactcaaaggaggctacggaaacaggccgagaagaacgtggagaagaaaattgacaaatacacagaggtcctcaagacccacggactcc

SEQ ID NO: 533962 - DNA, 100 bp, Homo sapiens
ggaaagacataaagaagaagtgcttgagactgctgataaagagcttggggaagcaaagaggttggaaagaaccatgactgtattcaggaaggcacatgaa

SEQ ID NO: 533963 - DNA, 94 bp, Homo sapiens
cttggtggtccaggtcttcatgctgctgtgggtgatattactggtcctggatggttcctggggctggctctgtgcctgctatccaaagaatccc

SEQ ID NO: 533964 - DNA, 98 bp, Homo sapiens
gaaattccggagatgcagactgctttcagccagcagtcaaaaggctcaacgggacccaggtggagtctgtacagctcaaagtcaacatagcccgaaaa

SEQ ID NO: 533965 - DNA, 82 bp, Homo sapiens
ctgcgttgcggctactacaacacggctgtcaagctggcgcgccagagcggcatcgaggctttatcctgtggataaacgcaga

SEQ ID NO: 533966 - DNA, 76 bp, Homo sapiens
atgtgaaaactctgttactgaagggactttcagttaccttgatgatgtcccatttaagacaggagacaaattcaaa

SEQ ID NO: 533967 - DNA, 51 bp, Homo sapiens
gtcggccggaggacaccccatcgtgcaggaagctcttcgtgggcggtcttg

SEQ ID NO: 533968 - DNA, 83 bp, Homo sapiens
tatctatgtgcctcctggatatgccccacaggggtaccaaagtctgatctcttgcacaccaaatcattaaggggccataaaga

SEQ ID NO: 533969 - DNA, 100 bp, Homo sapiens
aataaaaatttggtcaaagactgggatgcttagatcaactttagctcagcaagcttaaccagctcgaaaaagcagtggaagcagctcacacatttttcgt

SEQ ID NO: 533970 - DNA, 82 bp, Homo sapiens
ctactacgtggtgcttggaaaggtgctcgcggtgaggatcgatgacctggaccacctcccggagaccaccaccatcgacgcc

SEQ ID NO: 533971 - DNA, 89 bp, Homo sapiens
cgggcgcgggcagagcgcggcggcgcggttggaggacgagtaagtcgtgaattaaattatactcgccagaagattggagaagaggctat

SEQ ID NO: 533972 - DNA, 75 bp, Homo sapiens
tggtataaaaatggacactggagtagaagtctctgatattggaagccaagtgccaggtggagctcaacaggaaag

SEQ ID NO: 533973 - DNA, 83 bp, Homo sapiens
cgccgcgcgaggaaatggccgaggagccggagccgcaggcttcaacggaccacaccaaaatgccatctcaaatggaacacgcc

SEQ ID NO: 533974 - DNA, 74 bp, Homo sapiens
caaaagtggcatgatcctttgcagaaatgactacattaggcccgacaacaagctcaaatacgtcaccaaatggc

SEQ ID NO: 533975 - DNA, 75 bp, Homo sapiens
aaaattcaaactgtcaagcaagtgctagcaattcgaagagctactctgaaaagatcatttactcctgtatttttg

SEQ ID NO: 533976 - DNA, 75 bp, Homo sapiens
tgtctattctgaactcaacttctgaaatttacagaaacaaactacatctcaggattgagaggatccagaatccag

SEQ ID NO: 533977 - DNA, 100 bp, Homo sapiens
cctcaacgaccactttgtcaagctcatttcctggtggagctggggcctcggccaaccgtggagcggggccctccagttacagaggaggagtgggcacgcc

SEQ ID NO: 533978 - DNA, 100 bp, Homo sapiens
gcagcttattccaagctttgctagatggcgttcaggaagtggcttatattcactcaaaccagaatgtaattggatcgagcaaagctgaaaatcacatgag

SEQ ID NO: 533979 - DNA, 100 bp, Homo sapiens
aagaaagcaatttgaatttgcctgtctgggatcctcggaaaatgatgcatcctgttgccagcagtaatccagctttctgtgggcctggcaagccttcctg

SEQ ID NO: 533980 - DNA, 75 bp, Homo sapiens
gcttacgtctctgctcttcagtacaatcctctgatcctacagttaaagacttaatcggaggcttcacggctcttc

SEQ ID NO: 533981 - DNA, 83 bp, Homo sapiens
tgttgctggacacgctttttggggaactggtgtggaggcctccaggcccaaggtcagcatcccactgtcagccatcattgagg

SEQ ID NO: 533982 - DNA, 75 bp, Homo sapiens
atcatctttggattcttccccagaagcttcaagctttgcccgaagtttttacatacaaattctactagtcacacc

SEQ ID NO: 533983 - DNA, 98 bp, Homo sapiens
cgcggcgtttgggacagtgaaggaggacagcggcagaggtccagttccggccgtaccgcacagacgacttcatcacgcgcctgtactatgagacgccc

SEQ ID NO: 533984 - DNA, 101 bp, Homo sapiens
gggcagtcccgcctgcgtcccagaagtgcctgcagttcagacccttctctcccctccactttctcccggccactgaggcggctcccagctgcgttggcgac

SEQ ID NO: 533985 - DNA, 100 bp, Homo sapiens
gcagacttcagattcgtttctgagatttccttcgtccctgacatcatctctgtgcactgataataaccctgcagttccttcctcagagatcacctatggg

SEQ ID NO: 533986 - DNA, 89 bp, Homo sapiens
cttcagactgcccggagagcgcgctctgcctgccgcctgcctgcctgccactgaggtaaggcacctatatatctgtgattttcacaaaa

SEQ ID NO: 533987 - DNA, 74 bp, Homo sapiens
aaacctcgagcatctagaaaagaaaatggacctgttgtagccaagggaagagatggtgttgagtggaaaataca

SEQ ID NO: 533988 - DNA, 71 bp, Homo sapiens
accgggatggcgacgtctacactgagtcggaggcgaagggtcacctgtctgtgtgcccagtttgaagccgt

SEQ ID NO: 533989 - DNA, 75 bp, Homo sapiens
aggtgcagaagtcattttaaactatggacgactccgaggaacattgagattgggctaatggatactacagacaac

SEQ ID NO: 533990 - DNA, 51 bp, Homo sapiens
gttccagaactgctggaagctgagtctcacaccattttgctggtacagcct

SEQ ID NO: 533991 - DNA, 74 bp, Homo sapiens
gcttaaccctagttcacgaatcaaggttatcaatactctggctgaccatcatcatcgtgggactgactttggtg

SEQ ID NO: 533992 - DNA, 71 bp, Homo sapiens
ggtgctctttcatgcagacggccaaacggagcagcgtgggctgcagaagatcctggcagagtctcccccac

SEQ ID NO: 533993 - DNA, 100 bp, Homo sapiens
aaagaactccctcaagtttcatttgtgaagagtgctcgtcttcgggccgctggcattggaaaagatttcaaagagaatcccaacctcagagataactgga

SEQ ID NO: 533994 - DNA, 100 bp, Homo sapiens
aacgcaaccacagaaacaagtggtacagggaaagaatatggcaaagctgatgcaagatgggtttattttgatccaaccattgtgtctgtggaaattctga

SEQ ID NO: 533995 - DNA, 89 bp, Homo sapiens
gggacctttgactgtttccggaagactctttttagagagaataactgaagtgaagtgatggactccgatttggagagtagtaagacgtg

SEQ ID NO: 533996 - DNA, 99 bp, Homo sapiens
tttggggcagaatacagagatatggaatcagaaattacagaagacatccccgtgaagactttgaatatgaagactgtgtatgtttctgtgttaccaaca

SEQ ID NO: 533997 - DNA, 145 bp, Homo sapiens
gagcacccaggatccctcagatctgtggagcagatccgatggagaggctgagctgctccaggacttggggggtttgccaacttgttaataagatggaggagaatactggcaaggttaagcctttcaaccgaaatgacgaacagtt

SEQ ID NO: 533998 - DNA, 82 bp, Homo sapiens
gcaaggtgtccacgtcgggtcagatccgacagaagatgatggatttggacatgcttctatgaagaaatgccacatggtccga

SEQ ID NO: 533999 - DNA, 87 bp, Homo sapiens
aacgggtttggaggaccctcttcgccttcggagagcagagtcaacacggaggccctttatggtacaacctcagaaacagcaacttgg

SEQ ID NO: 534000 - DNA, 74 bp, Homo sapiens
actcattaaagtatttgttcttacatcaaattttcaggcaattagagtcagtactgctccccagcctaaaccag

SEQ ID NO: 534001 - DNA, 48 bp, Homo sapiens
cggagaccactgttcaaggccacagaaagaagcttccggttctgaggt

SEQ ID NO: 534002 - DNA, 75 bp, Homo sapiens
ccagtggtccctcacctgactgagtggcgcagtcagagataaatggaacagggagcgctgacccagctgatccag

SEQ ID NO: 534003 - DNA, 100 bp, Homo sapiens
cagccccctcctggcgacccgcaagttttaaaatcaaagatgggaaaatcggagaaaattgcccttccccatggccagcttgttcatggtatacacttgt

SEQ ID NO: 534004 - DNA, 98 bp, Homo sapiens
cgccttcgccctttccacctcgcggcagttcgtcaaagatcactgaggacttccgggccctgaggaagacggctgaggacatgaacctgttcaagacc

SEQ ID NO: 534005 - DNA, 75 bp, Homo sapiens
gcccgcgcccaacaccttctatgtaggctgctgacttgagtaaaccaatagataaaaggatatacaaaggaacac

SEQ ID NO: 534006 - DNA, 100 bp, Homo sapiens
ggccccctcgtcgtctgccccaggaatgtggacccccctgtctggtacgacaccgacgtgaagctgtttgagatacagcgggtgtgaggatgaagccgac

SEQ ID NO: 534007 - DNA, 123 bp, Homo sapiens
gaattcgccataatcaaggaaaccttttccgggtggggatctctgaaattactcagttgaatggatcgcagcagttaccattgctgctgggacagctgcaattggttatctagcttacaaaag

SEQ ID NO: 534008 - DNA, 82 bp, Homo sapiens
gacaatccagtttcctgctaatttgcagcttcctccagggcccagataaaggccactgtgaaacgcaaggtatatgaagatt

SEQ ID NO: 534009 - DNA, 75 bp, Homo sapiens
ctacgaaaaagccctggtggagctgaaggttgcagccaagaagtatgatgcgtttttggcctcagagtctctgat

SEQ ID NO: 534010 - DNA, 97 bp, Homo sapiens
gattggcttcgggctgagctagcagtgagcaccttttggcccaatgaatatcaggctgacttatccttgtataatgaattccgattgtggaaggatg

SEQ ID NO: 534011 - DNA, 100 bp, Homo sapiens
gaagagattcagccagcacactcctcgcgagcaaggtaaatatttccaactacagtctggtgatggagtctgacgcaggaaccttcttacccactgggct

SEQ ID NO: 534012 - DNA, 50 bp, Homo sapiens
gtgagagaagcaatggtacatgaggaggtcaaaatgcagatcttcgtgaa

SEQ ID NO: 534013 - DNA, 75 bp, Homo sapiens
agactacctttttcagaaatgcgcagagcaaacatctttcaaaggcctattttcacaatggagactatcctggag

SEQ ID NO: 534014 - DNA, 100 bp, Homo sapiens
tttgccaacatcttgggactggagaaatgttcatggtatcaattttgtcagtcctgttcgaaaccaaggtccacgaatcttacaagcacctgaagtcact

SEQ ID NO: 534015 - DNA, 100 bp, Homo sapiens
gggactggggggaccagtactctgccgagtgcggcggagccgaggaggtgctgctgctggcccggcggacggacctacggaggatctcgctggacacgcc

SEQ ID NO: 534016 - DNA, 100 bp, Homo sapiens
tggacttcagactggtggactgttcatcattctgttgaagaaacgcttaacccaaataactgaagtgaagtgatggactccgatttggagagtagtaaga

SEQ ID NO: 534017 - DNA, 75 bp, Homo sapiens
cgaggtgtcggcgcgggagcagcacttccacagccaagtgcgggagtccacggtttcacgtggcaggatgactat

SEQ ID NO: 534018 - DNA, 90 bp, Homo sapiens
gccttgtgtcaatggaggcacctgtcggcagactggtgacttcacttttgagtgcaactgccttccagccctgtatgatgagattcgtca

SEQ ID NO: 534019 - DNA, 101 bp, Homo sapiens
gccactagcagccagttccggcccgaggacaccgactaccagcagatgttcctcctgctgatcaagagaagctttttatccagaagttacgtcagtgttgc

SEQ ID NO: 534020 - DNA, 98 bp, Homo sapiens
tggggcctccgcgccgcggccgttagtcatgtcggggaaacagtgcttcttagtcctacgtcagcagcagtttaatgtccaggctcttgtggcggtgg

SEQ ID NO: 534021 - DNA, 75 bp, Homo sapiens
ttggccttcgtacccgtcttgattgaggtccatgactccagctcaggctgacttggagtttcttgagaatgccaa

SEQ ID NO: 534022 - DNA, 100 bp, Homo sapiens
ccgatgatgtgcagatcaatgacatttccctgcagagacacccgccatttcacccagtaagcgggcccggcctgcggaggtgggcggcatgcagctccgc

SEQ ID NO: 534023 - DNA, 100 bp, Homo sapiens
agcgagcagcccagacagcggccacctcaagtgtactaatggtcacttgatgtgcgctggctgttttatccacctactagcagatgcccggctgaaggag

SEQ ID NO: 534024 - DNA, 98 bp, Homo sapiens
catgactcccagagaggatggcatctagaagacatgcgtcgggatgtccaggaaatttttcgcatgaccccccacgagaagcaggtcatgatgttcag

SEQ ID NO: 534025 - DNA, 100 bp, Homo sapiens
tggaaatttctgaggactgcacgtatgctgatgtcaaagccctacacactgaaattaccaggaataaagactcagctgaactcacgggaatcaaatggcg

SEQ ID NO: 534026 - DNA, 75 bp, Homo sapiens
ggaatttgcagcaccatcaacagatgcccctgataaaggatacgttggaagctattttgccagccacttcattat

SEQ ID NO: 534027 - DNA, 75 bp, Homo sapiens
gccgatccagcctgcggagcctgtggggcagggaagatggagagttggaagaaggtgaattggaagatgatgggg

SEQ ID NO: 534028 - DNA, 75 bp, Homo sapiens
ccactccttcctccgagggctgtttgggacctcagcagccatgtcgaagccccatagtgaagccgggactgcctt

SEQ ID NO: 534029 - DNA, 75 bp, Homo sapiens
ttgctgccgtctcgactcgtggatgatgcctgtgaggagccaccaacatttgaagctatggagctcattggtaaa

SEQ ID NO: 534030 - DNA, 100 bp, Homo sapiens
tttggtgtggacatctgctgccggaaggggtcccgaagccccctgcaggaactctacaacccaatccagattcagaatggacagtttagaagaacctcag

SEQ ID NO: 534031 - DNA, 100 bp, Homo sapiens
tcctgctgaaaacttccgtgttctagtgaaacagaagaaggccagctttgaggaagcaccctgaaacgacagaaacaagcaatccgattccagaaaattc

SEQ ID NO: 534032 - DNA, 114 bp, Homo sapiens
tgaaaagttgatgaagatcaacctggaagcggcagagttaggtgaaatttcagacatacacaccaaattgttgagagagccagcaccgctctttgaccttgccatgcttgcctt

SEQ ID NO: 534033 - DNA, 98 bp, Homo sapiens
ctcacccaccagaggagtggaagatgacgtagctttgccaaagacttagaagctaagcagaaaatgagcttaacatcctggtttttggtgagcagtgg

SEQ ID NO: 534034 - DNA, 95 bp, Homo sapiens
gctactggccaacatacacgcccatggaagtgcacttaaccccagaagtcacggagctgctggacgtctccatggagctgggctgtttcctggct

SEQ ID NO: 534035 - DNA, 97 bp, Homo sapiens
ggagactcgcaggagcaacacgtgatgtgtctacttatcagggactcctcctattttgaggacttctccaacatctccatcttctcctcgtccgtgg

SEQ ID NO: 534036 - DNA, 99 bp, Homo sapiens
tggggctccctcgggcacctccggtaccgctgcagccaccgcggcccccgcgggctgagctcattggaagtctcacccacaagctggagaccctccagg

SEQ ID NO: 534037 - DNA, 90 bp, Homo sapiens
agggggatcagctctattatttcaaagatgaagatgaaaccaagcccttgattttcagctgaactctcatctctcaacactggcaaatat

SEQ ID NO: 534038 - DNA, 100 bp, Homo sapiens
tttgcgctacgctgagtacttgcagccctcggccaaacggccagacgccgacgtcgaccagcagagactgtggaagatagatgataagcctgtaaaaatt

SEQ ID NO: 534039 - DNA, 50 bp, Homo sapiens
gcccaggtccccttggacaaatgggtcaaaatgcagatcttcgtgaaaac

SEQ ID NO: 534040 - DNA, 74 bp, Homo sapiens
ctgggaacgaagttggttttttcaagcccatatcttgccgaaatgtacacctagctcccctgtttgacaaccct

SEQ ID NO: 534041 - DNA, 99 bp, Homo sapiens
aataaaaggcgaagggctaaatggaatgcacagaacctgctgtggaagcaggagcgagaacccgagcagcgccatgagcaacactaccgtcgtccccag

SEQ ID NO: 534042 - DNA, 74 bp, Homo sapiens
ctgcacaaccattttgacctctcagggcttcccacggcacgacatggagacctgtggttgcgaggctccctggg

SEQ ID NO: 534043 - DNA, 100 bp, Homo sapiens
gaggatgctgggaaatctcctgctcgaaataggccaaagaccgggttccagatgtggttagaagaaaatagaagtaatattttgtctgacaatcctgact

SEQ ID NO: 534044 - DNA, 100 bp, Homo sapiens
ccttgatcgaaattcctaccctgatgttgctgttggttccctctcagattcagtaactattttcaggtatgggctattccatgtatcgggaattctgggc

SEQ ID NO: 534045 - DNA, 100 bp, Homo sapiens
tcttacagaaggcagccacagtgaaatcagacatctacagcttttctatgatcatgcaggagattttaacaggtttttcgttggaatatacgttgcacat

SEQ ID NO: 534046 - DNA, 96 bp, Homo sapiens
gctttctccactgagactatcagtatcaaataatcaggaaactcgaactatctaccagtttcattacaagaattggccagaccatgatgtaccttc

SEQ ID NO: 534047 - DNA, 76 bp, Homo sapiens
agggctccctcgtgaagaacctgaaggacacactagcatctggagcataagaacagtaattattttcttcttttcc

SEQ ID NO: 534048 - DNA, 100 bp, Homo sapiens
caaatatccagattttaagcagcatgttcagataaatctgaatggaagagtgaggcacttaagtattcatcgaagagtcaccccagtagcggtgatcaca

SEQ ID NO: 534049 - DNA, 90 bp, Homo sapiens
atgaccaggaggtcttaaaagatcagaactatgtggaaattatgggaagagatgttcaagctgactggaaataccggcatgcaggattga

SEQ ID NO: 534050 - DNA, 100 bp, Homo sapiens
ttaccccggggtctatggaagtaatggaaggacccctcaacctgtgtgtaaaggttgccataaaggacaaacaagtgaaatacttcatacattacagtgg

SEQ ID NO: 534051 - DNA, 75 bp, Homo sapiens
gccgggcacggtggctcacacctatcatcccagcactttgggaagcaaaggaattcctcctgatcagcagagact

SEQ ID NO: 534052 - DNA, 90 bp, Homo sapiens
cgcggatgtcggcgaagagttcaaccagaaagatgaggtctatcttaatctggtgctggactatgttccggaaacagtatacagagttgc

SEQ ID NO: 534053 - DNA, 99 bp, Homo sapiens
aagaagaggaaatcctcttgaactcttacaccacaccttcaaaggtgttggagcgggccggagagaagtagagtgggctgcgaggagaaggaaacaggc

SEQ ID NO: 534054 - DNA, 51 bp, Homo sapiens
gaaaatcacaaggacatccatgtgcacggagggatttgttcgtgttgaccg

SEQ ID NO: 534055 - DNA, 50 bp, Homo sapiens
tggcggccagcaggaggctgatgaaggttactataacaacagtaccaagg

SEQ ID NO: 534056 - DNA, 83 bp, Homo sapiens
ccgggtcttccagagcgtgaagatcaagatcgtgcggaaacatggctcgcgaaggactgcggaccctcgtggttgcaaagaag

SEQ ID NO: 534057 - DNA, 97 bp, Homo sapiens
gaacacgcaaaggaacccgaggaacgggattggcggcagtaagcacacaatgaatgatcacctgcatgtcggcagccacgctcacggacagatccag

SEQ ID NO: 534058 - DNA, 101 bp, Homo sapiens
cgaggggctggaacacctcgccaaagcagagaaatagtatcgagtgaacttcagacctagatatgtcactaggtataagacagtgacacagttggaatgga

SEQ ID NO: 534059 - DNA, 83 bp, Homo sapiens
gctcgttctggtctgcctagtcctgggctagcttgtcactttctgcaaaggtttccctcagggagcctcctgctgccaggcac

SEQ ID NO: 534060 - DNA, 115 bp, Homo sapiens
tggagcagagccgctgggcgccggagccgaggcgagcgccgcgcgcaccactggtttccaatacttatctacaggaatcgccatgaccccagctctgagggaggcaacagcaaag

SEQ ID NO: 534061 - DNA, 98 bp, Homo sapiens
ctgccttctggacaatctttccgcccgtggctgggagtgtactaaggacagatgtggagaagtcagaaatgaagaaaatgcctgtcactgctcagagg

SEQ ID NO: 534062 - DNA, 102 bp, Homo sapiens
agtgacaggaggagaccataacccccgacagcgccatggcccagattctgccaattcgttttcaggagcatctccagtagagacggggttttgccatgttgg

SEQ ID NO: 534063 - DNA, 95 bp, Homo sapiens
agatgaggtgacttggtgattttcctggaaaattatagagacgagttgtactgctgtcacaggaaatggacgctggattacaagcatggcagctc

SEQ ID NO: 534064 - DNA, 100 bp, Homo sapiens
gcaaagctacttccattccagaaagatggcatcatttttgccctcaaaagaaatggcagagcctccattatggcatgctgaatttaccaaagaagaattg

SEQ ID NO: 534065 - DNA, 75 bp, Homo sapiens
ctgatttcctatcagggcagaattccatatcctcgccctggaactattcgaatgcaggctcaaggaagcttgttc

SEQ ID NO: 534066 - DNA, 75 bp, Homo sapiens
agctccctgtccacactccccaaggtttcccggtcctctggcgaggatcctccaaggcgtctcacatgaaccggc

SEQ ID NO: 534067 - DNA, 74 bp, Homo sapiens
catgagagcaatgcagcatgctgaagtctattacaaggtggtgtgcggaaggtggaaacttgatttgttgtgac

SEQ ID NO: 534068 - DNA, 96 bp, Homo sapiens
tgtccacgacaccggctacttctcagctttaccatccctggaggagacctggcagcaggctgctttgtaccgcctcagtggagactggaatccctt

SEQ ID NO: 534069 - DNA, 99 bp, Homo sapiens
cgggctccttcttcggattctcagtggagttttaccggccgggaacagacgggaacttccactgctgggtggagtcgtggatgaccaggccggacctgc

SEQ ID NO: 534070 - DNA, 85 bp, Homo sapiens
tggtgggaatatgtggatcctacagttactctagaattattagatggtttatttccaaagttgaagaagtcttgaatgactggaa

SEQ ID NO: 534071 - DNA, 83 bp, Homo sapiens
cctggatctgaggatgtgaaacttaaatttgaagaggagtacttcttgcaagcagagctgacaagcaacgtcttaaaaacagg

SEQ ID NO: 534072 - DNA, 100 bp, Homo sapiens
cgggtgaaggtactggtgttgggagactcaggtgtttaatgaacgctgccgaattcacttcaagcctccaaagaatgaataaagagagattctttttttt

SEQ ID NO: 534073 - DNA, 100 bp, Homo sapiens
cgtcgtgatccagaagtccagagctgaggactgcctgtttgcagttgttgacctcctgtactggagagacattaagaagactggagtggtgtttggtgcc

SEQ ID NO: 534074 - DNA, 88 bp, Homo sapiens
tccctaacgttcttgatctctgtgaagattcaaggagggcatcctggctgtttcacccgtggacttgaacttgccattggactgagct

SEQ ID NO: 534075 - DNA, 100 bp, Homo sapiens
gtcagaaactcagccactggttgccttggtaggcaataaaaatagagccacgaaccccctgaacaaggagctcgactgggccagcatcaacggcttctgc

SEQ ID NO: 534076 - DNA, 75 bp, Homo sapiens
gaaaaacagccaccttcagtatctcagtcctccagtgtttggatattcagatcttgcttctgaaatatctacctg

SEQ ID NO: 534077 - DNA, 101 bp, Homo sapiens
ggatgcagcaatgtgtgctcgaccacacaaggttgatgggcgtgtagtggaaccaaagagagctgtttctagagagcatgcagccaagcaggctgcagcct

SEQ ID NO: 534078 - DNA, 75 bp, Homo sapiens
ccgagaaccgtcagtttgagccagatgctcctgagtattggtgttccattgcttactttgaaatggatgttcagg

SEQ ID NO: 534079 - DNA, 100 bp, Homo sapiens
cagcaagattgcgagggtcccacgactcccgcctgcgtgagtgcatctccatccacgttggccaggctggtgtccagattggcaatgcctgctgggagct

SEQ ID NO: 534080 - DNA, 97 bp, Homo sapiens
gtgacaagaaaaacattgtttgaggattcctttcaacaggaaagtcgtggaaggcgctgacgctgtcccagaagaggccgtacgtggacgaggcgga

SEQ ID NO: 534081 - DNA, 75 bp, Homo sapiens
ggccatcgtggcagacctctacgagcaggagcagtacagagatgcagaggatgctatttatggaagaaatggtta

SEQ ID NO: 534082 - DNA, 99 bp, Homo sapiens
aaacaaagccacccagccaatgaagctcgatgtgctgggtgcagtgctgaaggctctgacttcagctgatggggcttcagaggagcagtcccaaaatga

SEQ ID NO: 534083 - DNA, 75 bp, Homo sapiens
acaccgggctttcttcttcttcagcgagattcctgagccgttctatccctgttgtctgcattcaaaagagcattc

SEQ ID NO: 534084 - DNA, 80 bp, Homo sapiens
agagccttggggaagacagttggaagctcagacatgacccaacatgagtgaagtttcctgcaagaaacgggacgactatt

SEQ ID NO: 534085 - DNA, 110 bp, Homo sapiens
ttgcagccatggtgcattgcagttgcgtgttgttcagaaagggtaaatgggaagttggtagctctgaaggtgatcaggctgcaggaagaagaagggacacctttcacagc

SEQ ID NO: 534086 - DNA, 95 bp, Homo sapiens
caagtgacttggagagtgtgctcttctgtggcagcacttagtcggtcggctaattggcaagcaggggcgctatgtgagttttctgaagcaaacat

SEQ ID NO: 534087 - DNA, 58 bp, Homo sapiens
agaacgaagttcttcgtcaccagctctttgctgcccccagggagctctgctgcccttg

SEQ ID NO: 534088 - DNA, 75 bp, Homo sapiens
tccggagtcagtcattttactgtcaagacatttcttcggcattctgcaacagggaacagagttcagaggcagcag

SEQ ID NO: 534089 - DNA, 100 bp, Homo sapiens
attcagaaagcagatcttgttattagtcacgcagggaagtcccacctggccatcgtgcagaaggtaaacaacgagggtgagggtgaccccttctacgagg

SEQ ID NO: 534090 - DNA, 90 bp, Homo sapiens
cgatcgaggacgacttcaactatggcagcagcgtggcctccgccaccgtgcacatccgaatggacaggcaggattgaacccaactacccc

SEQ ID NO: 534091 - DNA, 50 bp, Homo sapiens
gccttactccttcacagatcggaaggtgcaatttctcaagtcgcctgttg

SEQ ID NO: 534092 - DNA, 83 bp, Homo sapiens
tgaaaaggaagttttctggaatgggtcctcgatgggcttcctggaatattggtgtgtttatttgcatcagatgtgctggaatt

SEQ ID NO: 534093 - DNA, 74 bp, Homo sapiens
gttcctggaggaatccgagaagagcagagcggagggagccccagacacgctaggcaagttcactggcctcaaga

SEQ ID NO: 534094 - DNA, 100 bp, Homo sapiens
agccacaaccaattcatagaatagactcccctggatttaagccagcctctcaacagtctacaaataagaaacctcgaaaatctccaggtgagaagagcag

SEQ ID NO: 534095 - DNA, 97 bp, Homo sapiens
gccctgaaacgacaagcccatgttgccagcgcattatcaccaagtcacttggcaagcgtttagcaggtatcggtgatgagctacagtgccaaatttg

SEQ ID NO: 534096 - DNA, 98 bp, Homo sapiens
tgagggatggtcagactggatatttctgaagatggtgagctcctgagggcaaggcccatgcaggtcattttcagcactgcaccctggcctaacttgcc

SEQ ID NO: 534097 - DNA, 89 bp, Homo sapiens
tgtaggaaggaacttggttccccctccctcagcttccgccccaaaagatactagagtaaaaggatggtttcttctggacaattatatac

SEQ ID NO: 534098 - DNA, 83 bp, Homo sapiens
agtgactgctccccacacatagccaacatcgggcgcctggtagagcgggctgacgcacgaggcacacaggaaggaggtggagc

SEQ ID NO: 534099 - DNA, 98 bp, Homo sapiens
taaaataaaatacctggatgaggaagatgaagaggatgcccaggctgaggaagagatcaagcaagagatgaacacactgcagcagaagctgaatgagc

SEQ ID NO: 534100 - DNA, 98 bp, Homo sapiens
actacagattaaagactttctgaatggaccagtgtaaacaggaacatcgataagtagtgtaaaaacttgcacaatgaaatccgaagccaaggatggag

SEQ ID NO: 534101 - DNA, 74 bp, Homo sapiens
gattccgttggagtagaagtgtccagcgacagcttctgggaggtgggatgtgtgtgggctgaaattccgagctg

SEQ ID NO: 534102 - DNA, 100 bp, Homo sapiens
gggggctgtagcccccccagtcagtggagacttaaccaaagaggtcatcatcagatttgaaatatttaaagtggatacaaaactatttcagcaatgcaga

SEQ ID NO: 534103 - DNA, 75 bp, Homo sapiens
agaagtgggccctgtgaccagctgcactggtttcgtggaaggttcctggagagccactggtttgtgtgggtcaca

SEQ ID NO: 534104 - DNA, 100 bp, Homo sapiens
gaataagagatgtgattaatgtattccaccacctccgccagttaagaggaaaaagcaagatgagaagatgaagtgaatttatggattctggtttttctga

SEQ ID NO: 534105 - DNA, 76 bp, Homo sapiens
atttgctggccatcggattggggaagaaaaaatgctgggcatcttggtgcagcacaaagtccggagtggcgtctcg

SEQ ID NO: 534106 - DNA, 75 bp, Homo sapiens
cctctctacattccagtaacccaggcatctaataggattcaggaatcaaagaatcagtgtactcaggtggtacag

SEQ ID NO: 534107 - DNA, 51 bp, Homo sapiens
agtatccagttttccaacactagtaacagcccgtgctttgaagaagaggag

SEQ ID NO: 534108 - DNA, 75 bp, Homo sapiens
ggaccgtgctagtgacctgactgatgccttcgtggaggaccctctttgcaagttcagtgcttaacctgaccgaac

SEQ ID NO: 534109 - DNA, 83 bp, Homo sapiens
ctttggatgtagcaaggaagaaattgttcagttcttctcagccagggaaagaatagttggctggtaccacacaggccctaaac

SEQ ID NO: 534110 - DNA, 82 bp, Homo sapiens
ctcctatcgtgcagtataatgactggctggaagaggaggacagagcgggatgccaccagcttgtccaaagggaagttccagg

SEQ ID NO: 534111 - DNA, 98 bp, Homo sapiens
ccgaccccaagctctgccacgaaggtgccaccggtgttgctggaagaagccaaggatttgctctctgactggctggattctacacttggctgtgatgt

SEQ ID NO: 534112 - DNA, 103 bp, Homo sapiens
gctacgagctggctttaatcctgaaagccatgcagcggatgccagcacgagccgccgcttcacgccgccttccaccgcgctgagcccaggcaagatgagcgag

SEQ ID NO: 534113 - DNA, 75 bp, Homo sapiens
ggatttacgcgcacgttggaaccgaagagagctctgttgttgcagttccgctttgattataccaatgagagggcc

SEQ ID NO: 534114 - DNA, 83 bp, Homo sapiens
cgtggaggagctgtgcagccgcgaggaggcgcgggaggtgttcgagaacgaccccgagacgcttccgccctgcgctgccagtc

SEQ ID NO: 534115 - DNA, 96 bp, Homo sapiens
ggcgccgccgcgggcgccgggagcgagctgggagggagccgcgcgcctttgtgcgcgcgccgagaaccttctgaggaaaggaggccatacagaaat

SEQ ID NO: 534116 - DNA, 75 bp, Homo sapiens
agccgtccccggccacgcgggacgggatgccgaggaatgtgacagggctgggagtgtggccacctgccaggccgt

SEQ ID NO: 534117 - DNA, 100 bp, Homo sapiens
ccgggagaagcatgggaaggaggccgagccgggatctcaggtcctcgggggcggcggccacgccaaggacgggttgtcctttgtggagggtcttctcgaa

SEQ ID NO: 534118 - DNA, 96 bp, Homo sapiens
caggtgatggataggagcaaccctgtaaaaccagccttagactatttttcaaacatgggccggatgtatcccccgcgttctcccaagtctgctgcc

SEQ ID NO: 534119 - DNA, 82 bp, Homo sapiens
cggaccgcgcctcaggctcccccagttacagaatgtctgaaggggacagtgtgggagaatccgtccatgggaaaccttcggt

SEQ ID NO: 534120 - DNA, 60 bp, Homo sapiens
agtgtaatgattattgacaacagcctgcagactgcagagccttaatagacaaactcaaag

SEQ ID NO: 534121 - DNA, 75 bp, Homo sapiens
tgagcgatgttaccattgtgaaagaaggttgggttcagaagaggggttgtctgcattcaaaagagcattctatta

SEQ ID NO: 534122 - DNA, 75 bp, Homo sapiens
ctgtcacacacgatcctcaccgagaagaactgttttgcagaacactgaaatctatggactctaaaatggacttca

SEQ ID NO: 534123 - DNA, 100 bp, Homo sapiens
tcccagccatcacctggatttacctgttttctgggagcttcgaagtagtttatgccaacgtgacttcattcatacagatgaaccaaggatcgggatagca

SEQ ID NO: 534124 - DNA, 101 bp, Homo sapiens
agagagacagagaagactttaacagaactcaacaaatgctgtggcctttgtgtctgcccatgtaataggtttgatgaaatcctggaggccagtgatgggat

SEQ ID NO: 534125 - DNA, 82 bp, Homo sapiens
cggagaagctgtcagccagcactaggaggcgctatgaaactcaggtacatgtcccagagcaagcacacggaggcccgggagc

SEQ ID NO: 534126 - DNA, 99 bp, Homo sapiens
tgctgatcatcacccaccgagaagtccagcgggagtacaacctgaacttctcaggaagcagtactattcaagaggttatcaagtgcaaggctgcagttg

SEQ ID NO: 534127 - DNA, 50 bp, Homo sapiens
cctgactttcacagctcagtacctaagagacctcatggcctatgacagaa

SEQ ID NO: 534128 - DNA, 100 bp, Homo sapiens
caccatgatctgtggctgggataagagaggccctgtgtgtcccggcatggatatccggaacaacctcactaggttgcatgagctggagaattgctctgtc

SEQ ID NO: 534129 - DNA, 83 bp, Homo sapiens
gccgatccagcctgcggagcctgtggggcagggttctccaaaaaatgtggaatcctttgcatctatgctgagacattctcctc

SEQ ID NO: 534130 - DNA, 51 bp, Homo sapiens
aaagcatggagttggctaatggatgctggctacccacctttctgttctgag

SEQ ID NO: 534131 - DNA, 98 bp, Homo sapiens
ggttccgggccgtgtttggggagagcggcgggggaggcggcagcggagaggagctcgtgtaaatgccaaggacaacatgtggctgactccactgcacc

SEQ ID NO: 534132 - DNA, 108 bp, Homo sapiens
ggaactgagctgctcaaagacatccagctagtaaaaggcagagctgggactcatacccagattggtttatcttggaagctaaagggcattgctcatcctgaagatcag

SEQ ID NO: 534133 - DNA, 96 bp, Homo sapiens
cctggacgctggcagcagtgacagcagcagccgccagcaccgtcctggccacggtgctggagaatctggtaaaagcaccattgtgaagcagatgag

SEQ ID NO: 534134 - DNA, 75 bp, Homo sapiens
gctggggggacttatgaatgatgatgtggggaatgaaggctctgaacaagaaggaacacagagggtgcgacagcc

SEQ ID NO: 534135 - DNA, 83 bp, Homo sapiens
tgatggtgctgtaaccacctcacagattccagcttcggaacaagagaccctggtcaaaatgcagatcttcgtgaaaaccctta

SEQ ID NO: 534136 - DNA, 100 bp, Homo sapiens
ctgctgttcgagtacctgcccagaggggcccactcgctgtcccccctgccttaccagctctctgcccatctctcagtgtggaccctaaagggggaggaaa

SEQ ID NO: 534137 - DNA, 83 bp, Homo sapiens
ctttgacgtgatggtgaacggcaaggtccctggtgctgaaccgcctgcgtccagttgccagcgggggtgggaaagcccaaccg

SEQ ID NO: 534138 - DNA, 101 bp, Homo sapiens
cagctggctagactggaggagagggactctgtctactagtgacgatgtcgaagacagggaaaatgaaaagggtcgccttgaagaagcctacgagaaatgtg

SEQ ID NO: 534139 - DNA, 83 bp, Homo sapiens
cagaagcaaccttgggcttagtcccaccctttttaggcactcttgagaaatcaggaaatctggcattttttaaagtttgcgcc

SEQ ID NO: 534140 - DNA, 90 bp, Homo sapiens
ggagactggtctgggagtttggggtcaagggctgctggagcgatgtagtgggaagacggtcttccttgctggcatgcattctactcagtg

SEQ ID NO: 534141 - DNA, 85 bp, Homo sapiens
tctatgtcctgtacacaatcttcatgaaaggccatggcgagtgtcactgcggggaatgcaagtgccatgcaggttacatcgggga

SEQ ID NO: 534142 - DNA, 83 bp, Homo sapiens
cttggaatcaaagataaatccaaatactgcatatcagaaacaacagatcatcaaattgttggatggaaaacgatctcaaactg

SEQ ID NO: 534143 - DNA, 82 bp, Homo sapiens
gctgcaaaaatggaacaagttccagcacaagtgaaccttcaacaactagtactgcttcaaattatccagatgtgttaacaag

SEQ ID NO: 534144 - DNA, 74 bp, Homo sapiens
ggccttccagttcactgacaaacatggggaaggcagtcatggatcaggtaatgcagtttgttgagccaagtcgg

SEQ ID NO: 534145 - DNA, 90 bp, Homo sapiens
ttctggatggtactgatgttagtgtggacttgccagctgcctctaagaatcaaacttcactcttgggagaaccaccaaaagaaattcggc

SEQ ID NO: 534146 - DNA, 95 bp, Homo sapiens
agaaaacctgcagaagaactggcttcgggaattttaccaggtccggcctctttggcctacccccgttggctccgctgccccaggtcgatgagtcc

SEQ ID NO: 534147 - DNA, 100 bp, Homo sapiens
tggagcaaggagaagcagcatggggcccagatccctggacacttgctgggggagaggccctgagaggcatgtgcacagcctcctgacaaggtgatccggg

SEQ ID NO: 534148 - DNA, 100 bp, Homo sapiens
ttaattcttccactgatatctcaaaaggtgatctggacaaaggaacaggtatctcagaacttggagcgtgatgcccagaagtgtgtgaactggtctgtga

SEQ ID NO: 534149 - DNA, 75 bp, Homo sapiens
ttgagaactgtaacaaagctctgttggacatgattgaagaggagtccttcaataatgttaaacagtggctgcagg

SEQ ID NO: 534150 - DNA, 90 bp, Homo sapiens
ctccggcgcatcatggcggctggccgggcccaggtcccttcctccatacagaaggtggtcatggcactaggagactacatgggcgcctcc

SEQ ID NO: 534151 - DNA, 80 bp, Homo sapiens
acctcatggaatgatgccgcagatgatgccccctatgggagggccaccaatgggacaagcttctggctgtgatgggtcgg

SEQ ID NO: 534152 - DNA, 50 bp, Homo sapiens
ttggatcgggttctaaaggaaagggcaagaggattatgacagattacgac

SEQ ID NO: 534153 - DNA, 76 bp, Homo sapiens
cccccaaagatgagatttacctgtgagatgtttcatcccaacacatccacaggatttactctaaataatttgggtg

SEQ ID NO: 534154 - DNA, 96 bp, Homo sapiens
cacaccatccttctcgctgcagggtggccagtaaagctgaggagaatctgctcatggtgctggggacagacatgagtgatcggagagctgcagtca

SEQ ID NO: 534155 - DNA, 100 bp, Homo sapiens
cgtcccgcgtagacgcagtggcctccaaggtgcagacagctgtgactatgaagggggttatcaatactctggctgaccatcatcatcgtgggactgactt

SEQ ID NO: 534156 - DNA, 100 bp, Homo sapiens
gcgctcgcacctgaggcagtccctgctgtgcacctgggggtacaggaattgctgacactggaggatgttactgtggagttcacctgggaggagtggcagc

SEQ ID NO: 534157 - DNA, 75 bp, Homo sapiens
tcagtgactgaattaaaaggtgtcaagaagctcagaatgggtcacgatcgtggagtaaactgggctgccttccac

SEQ ID NO: 534158 - DNA, 100 bp, Homo sapiens
gtgaataaagccaagagagaccttggagtaattcgtcgacaggcttgttagcagtggcacaagatcttacagaggatgaagaaacagtagaagattccat

SEQ ID NO: 534159 - DNA, 100 bp, Homo sapiens
tttgaggagcactggaggaagcacaccctgtcctatgtggacgttggcactgggaaggaaagaacatggcctgtgtgcagcggacgctgatgaatctggg

SEQ ID NO: 534160 - DNA, 115 bp, Homo sapiens
gggacgaggacgaggagtcggaggagccgcgggcggcgcggcccagctcgttccaggtgagaagccctaccactgcaactgggacggctgcggctggaagtttgcgcgctcagac

SEQ ID NO: 534161 - DNA, 100 bp, Homo sapiens
atgacctttctcatctgactcgtgatctgcccatcttgttactccctagcagtgtggtaaggttgaaatcacaaagattagacacctttttagataggtg

SEQ ID NO: 534162 - DNA, 98 bp, Homo sapiens
cttcttcttcaccgccaggacctccttcttcaggagagcgccccagggcaagccccgctccggccaacaaagtggagactgctgcacggactctggaa

SEQ ID NO: 534163 - DNA, 75 bp, Homo sapiens
ggcgccgaggtggcgcacttcatgaacgccctgcgctacgatgccatgattggcaagttatgtgcccattctcaa

SEQ ID NO: 534164 - DNA, 83 bp, Homo sapiens
gacgggagcaatgctgacctcggtttcctggacccattccgactcaggtatatgtctcgagtccacggtatgcaccctaaaga

SEQ ID NO: 534165 - DNA, 82 bp, Homo sapiens
ctcgcttgcagttcagcgaccacgtgatgtcttggcattgcccattttcaagcaggaagattccagccttccattggatggt

SEQ ID NO: 534166 - DNA, 100 bp, Homo sapiens
attgaaggatttatgtcttgaagacaaaagacgcattgcaaacttaattaaagaactggccaggtgattttacaacgagatgctgctctccatagggatg

SEQ ID NO: 534167 - DNA, 98 bp, Homo sapiens
catgaggttcaacctgaaagaggtgtacaaagataatcaatgctgattcggaggacccaaaatacattatcaacgtaaagcagtttgccaagtttgtg

SEQ ID NO: 534168 - DNA, 83 bp, Homo sapiens
aaaatggctcagatgagacacttcttccatgagtcgcaatgtatctgctgagcaaaaagatgaaaacaaagaagcaaagcctc

SEQ ID NO: 534169 - DNA, 100 bp, Homo sapiens
cagagctctgatagttgttccttgtgcagaagatactagagtaaaaggatggtttcttctggacaattatatacccacatttatctgctctgtcatatat

SEQ ID NO: 534170 - DNA, 105 bp, Homo sapiens
cttcatctttacagaggaatagtctacaaaggaagacttgtaacctggagaagagaatatcctccgaatcctaaatctagagctccaaggatgctggtcattaag

SEQ ID NO: 534171 - DNA, 76 bp, Homo sapiens
cccgaaacttctgtggctgaaagaggaagccttgtgtgttgccaaagtgcaggtggaaatgggagcccaggtgttg

SEQ ID NO: 534172 - DNA, 90 bp, Homo sapiens
cttcgagcctagctgctcgcacaggactcggccacctgcccttcctgcaccgactggccagcttctcaataggtttggcatggacaagat

SEQ ID NO: 534173 - DNA, 98 bp, Homo sapiens
aagttgatataggtggacttttttacaggtaatggaacttaatcgatctgagagtttatgtcatgaaaactcattcttcatcaatgaagctttagtac

SEQ ID NO: 534174 - DNA, 82 bp, Homo sapiens
gatcgcggagtcccaatgaaacgggcagccatggccctccacagcccgcaggagcatattaatgaaaagtgccataaactga

SEQ ID NO: 534175 - DNA, 112 bp, Homo sapiens
cctggggctggaaattgcgctggaccgtcgccttgctcctcgccgcggcggggactgcaggtgagaagccctaccactgcaactgggacggctgcggctggaagtttgcgcg

SEQ ID NO: 534176 - DNA, 83 bp, Homo sapiens
ggccaacacagccggggccttggcaggctcactgagcgtggccctggacaagcttcgggcccagaagagtgacccagagcacc

SEQ ID NO: 534177 - DNA, 115 bp, Homo sapiens
ccgacactgggggcagtccgcgagccccgcactctctcgatgagtcggagaagtcccttcagaatgaccgaagaagcatgccgaacacggagtcagaaacgagcgcttgaacggg

SEQ ID NO: 534178 - DNA, 75 bp, Homo sapiens
ctcagaggagatgcaccggctcacggaaaatgtctataagaaggtagaagatagcaccatgccgattcgtcgaac

SEQ ID NO: 534179 - DNA, 75 bp, Homo sapiens
agcgcccctccgagctggggttggacgctgccagtttgcacagcagcaggtggttattaacttggtgatgctttt

SEQ ID NO: 534180 - DNA, 96 bp, Homo sapiens
ctctgggctcatgtatgatctgaaggatcaaggtggagagctgttgtccctccgctatgaccttactcctcaggcagtgccagacccagaagaggg

SEQ ID NO: 534181 - DNA, 74 bp, Homo sapiens
cctcctctcccgcgggcaccgaggactccgctcctgcccagttttttgaagaggcgcagtctactgaagcatac

SEQ ID NO: 534182 - DNA, 100 bp, Homo sapiens
attcagcatagctattcctgttgatggtgatgaagacagggctctctaaatacgtacagattctgcgataatgtgtggacttttgtactgaatgatgttg

SEQ ID NO: 534183 - DNA, 74 bp, Homo sapiens
atgaaggactcagatacaggccgctctaaaggttatggtttcatcacggtcttgtccaataagcatgtggctcc

SEQ ID NO: 534184 - DNA, 125 bp, Homo sapiens
aacgtgtactgattgcagcccatggcaacagcctccggggcattgtcaagcatctggaggatcacaaacaacatcgacccagtgggaagaatccaaatgcgcacgaggaggacactgcgggggca

SEQ ID NO: 534185 - DNA, 101 bp, Homo sapiens
agatggcgtgcttgttggagaccccaatccgcatgagcgtcctttcgaatgccagaggattcaacatgagcatacctatgcctgggcatccagtgaacttc

SEQ ID NO: 534186 - DNA, 90 bp, Homo sapiens
gctggatctgtggtcgcggctggggacgtgcgcccgcgccaccatcttcggctgaaggctcctgtgacgtttgatgacatcactgtgtac

SEQ ID NO: 534187 - DNA, 96 bp, Homo sapiens
tggagagaaatcctacaagtgtgcaaaccagtccagctacgggggcccagccagccagcagctgagtgggggttacggaggcggctacggtggcca

SEQ ID NO: 534188 - DNA, 98 bp, Homo sapiens
ccaggaacaagagttgctttggatatgactacactaactatcatgaggtttgtggtggtgtgtggtgatggggagtatatcatctacacagcaatggc

SEQ ID NO: 534189 - DNA, 100 bp, Homo sapiens
ggcttccacaccctctactccaggactgcagagtgggatgaacttgcagatatgctttgtcaacgacagtggcagtgataaggacagtgatgctgatgac

SEQ ID NO: 534190 - DNA, 84 bp, Homo sapiens
tttaatggaaaatcgcttggttaaaacctgacacttttaacaggtctctaattaacagaagatggcaaagcccagccacagcag

SEQ ID NO: 534191 - DNA, 74 bp, Homo sapiens
gttgagcacattgccaaccggagttccccaagggaacagagttcagaggcagcagaaactggagttagtgaaaa

SEQ ID NO: 534192 - DNA, 88 bp, Homo sapiens
gcatcggttaacagcctatgggtgaaatttggctttcattcatgaatgaggaggaggaagccaagaatctggtgagcgaagccatcgc

SEQ ID NO: 534193 - DNA, 100 bp, Homo sapiens
atgttgatatttgtgctgtcagctgttcatcctgataagatgcaccttgtcttacaaaacatttacaagaatgcggtggtgtcattcaaggagctgtgtg

SEQ ID NO: 534194 - DNA, 50 bp, Homo sapiens
cctggtggaggtgttaaatgaaagttgttattgatgccttcagattgatc

SEQ ID NO: 534195 - DNA, 75 bp, Homo sapiens
caactgccggacgccctatcgcaagcagtacctcctatggaagattgtaaggaacaagagcctattatggacaac

SEQ ID NO: 534196 - DNA, 83 bp, Homo sapiens
cttccctttggggagttaagttttccagacaatgcagatcttcgtgaagactctgactggtaagaccatcaccctcgaggttg

SEQ ID NO: 534197 - DNA, 100 bp, Homo sapiens
ctgccctccagaacatgctacaaaactgctccagaagtccaaggcttgcgagaaggtcatttccgtgggtcaaacggtcatcacgaagcatcggaacacc

SEQ ID NO: 534198 - DNA, 74 bp, Homo sapiens
aatggtctgctctgcgaatcggaggaaaacggcaaaccagttaaatctcagggaattcctattgtgtgtccagt

SEQ ID NO: 534199 - DNA, 112 bp, Homo sapiens
tttgcgttcgggctgggagcgtgctttccacgacggtgacacgcttccctggattgggctgttactgaggcggagacacgggtgatgattggctttctggggagagaggaag

SEQ ID NO: 534200 - DNA, 75 bp, Homo sapiens
catctacttggaaatctttgggatgctcaatgataacttgtctgcatttcaagaacaacctaccagagaccttac

SEQ ID NO: 534201 - DNA, 100 bp, Homo sapiens
aacagcgccgaggccttcaagtgcatgatgtgcgatgtgcggaagggcacctccacccgggatgacccaagatttcctacggttcgtggtgtactgagaa

SEQ ID NO: 534202 - DNA, 102 bp, Homo sapiens
gtttagctgctcgagatcgaggagattgttaaaggaaatgggctggcaggaagacagtgaaaatgatgaaacatgtgctcccttaactgaggatgaaatgag

SEQ ID NO: 534203 - DNA, 106 bp, Homo sapiens
gcgcgcagggcctgcagcgggagctggacggcgagcgcgagcggcgcgagaaaggcatcatgctggtctacgacatcaccaacgagaagtccttcgacaacatccg

SEQ ID NO: 534204 - DNA, 100 bp, Homo sapiens
tcagggcctgagcctggtgagccacgcgcctggggaggctctggcccgggctccgcgtacttcctgttcagtttgtcccgctggctggaagcctggcagt

SEQ ID NO: 534205 - DNA, 100 bp, Homo sapiens
ctggagcctcaggcggcagcgcttctagcaatggctgccatccggaagaaactggtgattgttggtgatggagcctgtggaaagacatgcttgctcatag

SEQ ID NO: 534206 - DNA, 80 bp, Homo sapiens
ggactttcttccagcttctgctgtccttctttgtggagagcaaggtgccttcaaatctcttgacaaagatggcactggac

SEQ ID NO: 534207 - DNA, 88 bp, Homo sapiens
ttctatggatgcctcctggcagaagtgattccagtgcctatagaggtacctcttaccagaaagtcccccccgaagggcgtgaccatcc

SEQ ID NO: 534208 - DNA, 75 bp, Homo sapiens
ctgagcttgccagagacgggcggcgcaaggaagatgtgcgaccctggcatgacagccttcgaacctgaggccctg

SEQ ID NO: 534209 - DNA, 76 bp, Homo sapiens
tgggggcaaagtgcaagaaggagagaccatcgaggatggggctaggagggagaagatagcattcttcacaaggcca

SEQ ID NO: 534210 - DNA, 90 bp, Homo sapiens
gccgcttcctccggggagggggataaagatcccccgccgccggcccatgaggatattgccgtgaaaggtatgatctcgtgaaatcttgag

SEQ ID NO: 534211 - DNA, 98 bp, Homo sapiens
gaactgctggggaaggcgattggcatcgatctctccatcccttccgaggcccgacttcgatcagtgtgcgtgtgaccaccatggatgcagagctggag

SEQ ID NO: 534212 - DNA, 75 bp, Homo sapiens
gaacattagcccccgggagaatatcctggtttcacttggagctgtggaatacttggctttctctgactcaagtaa

SEQ ID NO: 534213 - DNA, 97 bp, Homo sapiens
ctcaacatcccggagcagctgccacaatgggacatgtgcaaggcggagcagctggccagcctggaagctgcccagagggccgtgggagtcgggcccg

SEQ ID NO: 534214 - DNA, 75 bp, Homo sapiens
ggagaacctgcggcggccggagcgggagaagaaatgggtgaccgttggtgacacatccctacgaatctacaaatg

SEQ ID NO: 534215 - DNA, 98 bp, Homo sapiens
agaatctggctcggaggaatctcagtagggacaacaggcaggagaattatgggagcgcatttccccagggtctggagcccggcactgtggtcataaca

SEQ ID NO: 534216 - DNA, 97 bp, Homo sapiens
gactttcaaacatctgaagatgacaatttattagatggtgacactgcagttgggaaatcctcattgacgattcaatttgttgaaggccaatttgtgg

SEQ ID NO: 534217 - DNA, 75 bp, Homo sapiens
gatgcctctttttgccaccaatcccttcgatcaggatgttgcatttaaatcaaacggtattgagatggattgggt

SEQ ID NO: 534218 - DNA, 101 bp, Homo sapiens
actttctgaagctcatgaagactgtgtaaataatatcaggttgaaggggcccggccaggactcggggaagggtggcctgagagcagcgatgacctctgggg

SEQ ID NO: 534219 - DNA, 75 bp, Homo sapiens
cggagattgacaatcaatgggccatcttggacggctcagtagatgaaggcgtttctgagggcttgcctacacttc

SEQ ID NO: 534220 - DNA, 99 bp, Homo sapiens
ttctatcgggctttcggattctcccacttggaggcactgctggatgacagcaaggagttgcagcgaatcctcaggatggatttagccgactaaaacgat

SEQ ID NO: 534221 - DNA, 100 bp, Homo sapiens
tgtatctaaagaatcttttgaaaggactattaatatagcaaaaggcaattctagcctaggacaggcgacactaacaggtgaagatctcgggagaccatga

SEQ ID NO: 534222 - DNA, 75 bp, Homo sapiens
ctatagttaatcttggcgacattgacaatgatggctttgaagcggaatggccaaagactatgacgggtcttccta

SEQ ID NO: 534223 - DNA, 83 bp, Homo sapiens
gctcaagcaatcctaccatgtcagccttcccagtagctggaactacagcctccgaaagccgccaggactctgctgtgaacctg

SEQ ID NO: 534224 - DNA, 103 bp, Homo sapiens
gaggcctccctagccatgtggaactgtagtctgtagagaatgccaaatgagggaatcccccactcaagtcaaactcaggagcaagactgtttacagagtcaac

SEQ ID NO: 534225 - DNA, 82 bp, Homo sapiens
agaagaacgctctcatccggaggcaggaccagctgcagctgctagcaaaatatgctgtgaattccatcaagaagaaagtcaa

SEQ ID NO: 534226 - DNA, 75 bp, Homo sapiens
tgcggagaggcggcggccgcggcctccgcaagccggtttggtgcacctcgatttggaggaagtagggcagggccc

SEQ ID NO: 534227 - DNA, 83 bp, Homo sapiens
tatctgcagtggtgctgaaacgaccggagatactgacagatgagtgttcctctgaacaacagggagaatatctctgatcccac

SEQ ID NO: 534228 - DNA, 102 bp, Homo sapiens
ggttccagggctgtagaggaggccagtgtggctgggacaggctgagcaacggagaggggaaggcagagaggtgggatgctatggaatatgatgagaagctgg

SEQ ID NO: 534229 - DNA, 96 bp, Homo sapiens
tgcctcaggccagtcgcctccaggccaagagggatccttcacccgtgtctggtgctaaagagattgatatcgcagcgaccctggagcacttgaggg

SEQ ID NO: 534230 - DNA, 75 bp, Homo sapiens
ctggaggtggccatgtaccccttcaagaaggaactgatttcatctgaaattgaagagacaatcagagaaaaacta

SEQ ID NO: 534231 - DNA, 98 bp, Homo sapiens
cagaaagtgttactgtctggattgacccacttgatgctacacaggaatatacagggaataccttggcaagcagctccagtccgagcagccccagaccg

SEQ ID NO: 534232 - DNA, 50 bp, Homo sapiens
ctgctcatgaaccacttggcaaagttatgaagacagtatggagtttccag

SEQ ID NO: 534233 - DNA, 100 bp, Homo sapiens
ctggataccctttcagaaatttcttcaaataaacagaaccattcttatcctgtacgaggatgtcgtccaggaaagattgtgcagatgactgaagcagaag

SEQ ID NO: 534234 - DNA, 75 bp, Homo sapiens
agcgagccagcgagagggcaagcgagaagggccctgccctaaagatggcccactgcgtgaccttggttcagctgt

SEQ ID NO: 534235 - DNA, 50 bp, Homo sapiens
ctgcaagctgccaggaagactcctgagcaagaagaacccatcaggtgatt

SEQ ID NO: 534236 - DNA, 101 bp, Homo sapiens
aatggcggacgggaaggcgggagacgagaagcctgaaaagtcgcagcgagctggagccgccggagtgtccatgggctattcctcaaaatacaatatcttgt

SEQ ID NO: 534237 - DNA, 75 bp, Homo sapiens
tcaggctggtctcgaactcccgacctcagccaccacaagggcccgggccaccaggaagagcctgctgcatgtccc

SEQ ID NO: 534238 - DNA, 74 bp, Homo sapiens
agatgcggctgctgtcggaggcttttgtcatcaaaggtttttagaacttcagccataaaaatgggcagaatttt

SEQ ID NO: 534239 - DNA, 101 bp, Homo sapiens
gctccgtggatgaggctctgcggctggtccaggccttccagtacacagacgagcatggggaaggaggactacaaccagctgaggccactctcctaccccaa

SEQ ID NO: 534240 - DNA, 49 bp, Homo sapiens
aattcatcccaaggctggtctgcaagaaatggctagtgatgagctgaaa

SEQ ID NO: 534241 - DNA, 75 bp, Homo sapiens
gttaaggaacaggaggaaaccattcagaggcagcacagcattctcagaagcagtctactgagctcttccagtgca

SEQ ID NO: 534242 - DNA, 51 bp, Homo sapiens
tgacattgatccgatggtggttactgattcttctaacagagaaaatgccat

SEQ ID NO: 534243 - DNA, 100 bp, Homo sapiens
ggaagttctccagcagctgattgtaatgaatttgcccaatgttttgatgattggcagagacccactgtctggttggcaacattgtacaagtcacccagcc

SEQ ID NO: 534244 - DNA, 100 bp, Homo sapiens
cgtctgaggcaccgggtggtcggggctgtgatagaccaagggctgatcacgcggcaccacctcaagaagcgggcctttgtgtccctggtgatgttggaac

SEQ ID NO: 534245 - DNA, 80 bp, Homo sapiens
cagaaattctggaacacctatatggaatactcccccagttgcaagaggcgcaggaccgtggaagacttcaacaaattctg

SEQ ID NO: 534246 - DNA, 100 bp, Homo sapiens
ctccagatggcgtcttccgtgggcaacgtggccgacagcacagcactgtgacttctgccgtgttcaccgtgggagacaacgtggtttcaggcagcgatga

SEQ ID NO: 534247 - DNA, 100 bp, Homo sapiens
gcccttgtggcgaatggggctcacgtcgagcaaatgatactgacaggttgtgtggcatttgcgcgtcatgttggaccaacacgtgtagaagctgaacttt

SEQ ID NO: 534248 - DNA, 80 bp, Homo sapiens
cggacggcctgcagagcgctgccatcatgagacaatgcagatcttcgtgaagactctgactggtaagaccatcaccctcg

SEQ ID NO: 534249 - DNA, 75 bp, Homo sapiens
gccgggagccgccgcgggcaggacgcgcgctgcagatggactcaccctgtcacccaggttggactgcactggcct

SEQ ID NO: 534250 - DNA, 108 bp, Homo sapiens
tggtggtgcaggcgctgcgccgcaacgccgagcgcaccgacatctgcctgctcaaaggtactccaaagattcaggtttactcacgtcatccagcagagaatggaaagt

SEQ ID NO: 534251 - DNA, 80 bp, Homo sapiens
cgcgctcggcccccgcggagaggttgaaatcacaaagattagacacctttttagataggtgttcttcagcaccactgaca

SEQ ID NO: 534252 - DNA, 76 bp, Homo sapiens
cttgattggaatgttctccctgcagcagtcagcccaaaggaaggagagcctgacaaggagctgaatcctaagaaga

SEQ ID NO: 534253 - DNA, 51 bp, Homo sapiens
aggcagaggtggaggcgctttgaaagatcctaaatcccgacagctttatag

SEQ ID NO: 534254 - DNA, 74 bp, Homo sapiens
ccaaagtgccatgtctttaatgtctcctctgagcctccggcctccataagacccaaaacagatgacacctcttc

SEQ ID NO: 534255 - DNA, 75 bp, Homo sapiens
aacgcctggctcggagcagcagcctctgaggtcgcaatggaagaagagatcgccgcgctggtcattgacaatggc

SEQ ID NO: 534256 - DNA, 100 bp, Homo sapiens
ctccgggtagcccgctaggcgcgccgtccccagccccgccgccggccctcggtgcgcccggccgcctgcacccccaggctccaaccaggaatggagacgc

SEQ ID NO: 534257 - DNA, 100 bp, Homo sapiens
gtctggtagggctgagcttgcaagaggatcaacatgcctgtggtccgggggctgagtgcaggtgcccgggtctttgagtacatggccctgaacccctgca

SEQ ID NO: 534258 - DNA, 100 bp, Homo sapiens
aagataaagatgcccattttccaccaccaagcaagcaggatacctgggatgaactcctaattggtagtgtagaagtgaaaaaggtaatggcatgccccag

SEQ ID NO: 534259 - DNA, 90 bp, Homo sapiens
aggtattcttgtggatattgggcttgacagctgcaaggagttactgaaggtgtggcagctctcagaaaagaagcaaataaacgtgtgctc

SEQ ID NO: 534260 - DNA, 96 bp, Homo sapiens
ggggcggaggagagaagatgccctgtcctcagtttagatcctgataagcatcttgggaaaaccctggatcaaatggagccttatctcatagaggta

SEQ ID NO: 534261 - DNA, 100 bp, Homo sapiens
gctaaccctccccttcttcagaacagcgttttccaaagagtatgtcattttcagaggactgatttaaggctatgtgatgatgatgccatttaaacgacag

SEQ ID NO: 534262 - DNA, 88 bp, Homo sapiens
gaagtgatacacattgctgatcagctcagacacctggaagtccttaatgtcaggaccgaggtgatgagttcacatacactggaagcgg

SEQ ID NO: 534263 - DNA, 97 bp, Homo sapiens
attccgacccattcatccggaagcagacactcatcttgcttaccaatctcttgcagctggtaggtgagtgctgtcctcggctcactttcctcaagct

SEQ ID NO: 534264 - DNA, 90 bp, Homo sapiens
cagcagatggcggatgccctgcagtacctgcagaaggtctctggagacatcttcagcaggccagatgagcgtcgctttgctgtcttctcc

SEQ ID NO: 534265 - DNA, 82 bp, Homo sapiens
ccgggcgtcggggcggtaaaaggccggcagaagggaggcacttgagtctgcgctcctcagaccaccggcaggtgaacagcct

SEQ ID NO: 534266 - DNA, 50 bp, Homo sapiens
ccgaagcctaaattccaggaggtcaaacatcatcgcctggctgcggaaag

SEQ ID NO: 534267 - DNA, 101 bp, Homo sapiens
cggtcccttatatggtggagagaatctcaaaaaattatgctcttcagtacctccctgcacttggctattcaaaacgggtccatctgatgaatcctatggtt

SEQ ID NO: 534268 - DNA, 100 bp, Homo sapiens
ttctgtcagtgctgttctccaagaggcccagagacatgctgaaacatcgaaggttaaacccatccagagtaatggctgcggccttacccaggaccctggg

SEQ ID NO: 534269 - DNA, 89 bp, Homo sapiens
cggcaagtcgctgtaccacgacatctcgggtgattctgggggtccacttgtctgtaatggtgtgcttcaaggtatcacatcatggggcc

SEQ ID NO: 534270 - DNA, 75 bp, Homo sapiens
gcggggccttccacaccccctccgtgggtgtgtgagtggatgaggatgaggatgacctggaggaagaacacataa

SEQ ID NO: 534271 - DNA, 100 bp, Homo sapiens
gttgacggacaggaggcgaaatgtgcaaatgtttatgggtccgattcccatcccacttcagttcagatctcaaggaccttctacggaacctgctgcaggt

SEQ ID NO: 534272 - DNA, 89 bp, Homo sapiens
aggcgatcaaggccaagtatccgccagtcaataggaagtacgagtgtgaacaatgcagatcttcgtgaagactctgactggtaagacca

SEQ ID NO: 534273 - DNA, 90 bp, Homo sapiens
ctgacaaattatgctgcagcatattgtactggcctgctgctggcccgcagggacgaaaatgatgatgacgatgactggaacccctgcaaa

SEQ ID NO: 534274 - DNA, 100 bp, Homo sapiens
ggcttctgatcccagccgccaggcagttttacagggctctgttaacaatggcttcccagttacgactcttcgatccccagctgaaagagaagccagaaga

SEQ ID NO: 534275 - DNA, 100 bp, Homo sapiens
agaacatgtatgctatgttcttgattgcttcgctgaagaagcattgaaatatattggtttcacctggaaaaggatgaagatgatactatcaaattcctaa

SEQ ID NO: 534276 - DNA, 98 bp, Homo sapiens
aagccaaaatcgaaaagagaaaattagaactggaaagaaatcggaagcgactagagactctgcagagtgtcagatatcatttgaggatgtggctgtgg

SEQ ID NO: 534277 - DNA, 80 bp, Homo sapiens
taagaaagaagatgttaactttcagccctgtatgatgagattcgtcagtttcgcaaggcctgtggggaggctcatcttaa

SEQ ID NO: 534278 - DNA, 76 bp, Homo sapiens
tgcagggcctgattgaggactgccagctggcgctgcagattaagcctgatcaagatgacaacctcccaaaagcacc

SEQ ID NO: 534279 - DNA, 109 bp, Homo sapiens
agctcaagatgttcagaagttcatggatgctgtcaacaagaagagcagttcccaggatctgcataaaggaatcggatataacatcatccgggtacccatggccagctgt

SEQ ID NO: 534280 - DNA, 100 bp, Homo sapiens
ataacccagatagaagatgccaccgagaagctcaagatatcgtagtaaagtgttatcccgttggctggctggcttaccattgcaacttgctcatcttggc

SEQ ID NO: 534281 - DNA, 100 bp, Homo sapiens
tgttggagactttggaagacccttctgcctcccatggagggcagactgacgcttacctgactctgaccaggactattggaaatgcacttcatgcaatgaa

SEQ ID NO: 534282 - DNA, 82 bp, Homo sapiens
gttgcagctacctgcacttctagatgaaaactgctgtggttgctgctgcttcgagaaaattttttgaaaaatcagcagttct

SEQ ID NO: 534283 - DNA, 75 bp, Homo sapiens
cgccaaggaggtttacaaaatagacatgccgcccttcttcccctccgaaaagctggactggccattatggaggag

SEQ ID NO: 534284 - DNA, 83 bp, Homo sapiens
ttgggagaaagtttcatctgtggatggagtattggtacaggtttgcagattccgccagcagcacagcaagctctacagatgag

SEQ ID NO: 534285 - DNA, 90 bp, Homo sapiens
tacatcaaacttattactggcttcctcttcacctccttggctttcatgggcaccgaagtgttccctatgctgggctccgtgctgagagac

SEQ ID NO: 534286 - DNA, 96 bp, Homo sapiens
ggacgattacgagctgcaggaggtgatcggtgcgttgtagaagacaagaactcaaaggtggcctggttgaaccgttctggcatcatttttgctgga

SEQ ID NO: 534287 - DNA, 100 bp, Homo sapiens
ctgcgggccctcactgcccaccttcccctgggccaggaggtgaacttggcacagctagcacggcggtgtgcaggtatttctcaagctgccagatacgttt

SEQ ID NO: 534288 - DNA, 100 bp, Homo sapiens
tggagcctgaaaaaatgccgcagctctggtagctgaagaacatctcacagtggacgccagggtctattcctacgctctagcactgaaacatgcaaatgca

SEQ ID NO: 534289 - DNA, 100 bp, Homo sapiens
ttgatgagaaaaaaaacgtctttgtggagttctattcaagctagagccatctgtgagcctggtaaacgtgctagattgctgccctccccagctgacgggc

SEQ ID NO: 534290 - DNA, 100 bp, Homo sapiens
acaattggattcaagataaatgtgttcctcttgtccgagaaataacatttgaaaatggagaggttcgctgtgatcctgagattcaagaactgcgtcagtg

SEQ ID NO: 534291 - DNA, 80 bp, Homo sapiens
agagaagcagtgaaggagtgcagaggcatcacctgaaagactccccatccccaggatgtcaacctcagtccctcaaggcc

SEQ ID NO: 534292 - DNA, 117 bp, Homo sapiens
cttgttgctgtaccacatagaattcactcaacaagtagaaacgtgagagaagaaaaaacacgctcagagataacctttatgcagaaggggttaaaagataactttgctgatgtccag

SEQ ID NO: 534293 - DNA, 80 bp, Homo sapiens
ggtcttgctgaaagccagggaagtctggctcttgctgattgaattcctttggtgcagtttagcatgttcctctgtgttct

SEQ ID NO: 534294 - DNA, 71 bp, Homo sapiens
cgctgtgacagagacaacaccgagtatgagaagtgaatggagtgaggccctttacccgctgctgaccactc

SEQ ID NO: 534295 - DNA, 83 bp, Homo sapiens
gcaaaaaatgccaaaacttataatgagcctggctctcaagtattcaagatgcgcctgcttcctctgcgccagaagaaggccca

SEQ ID NO: 534296 - DNA, 82 bp, Homo sapiens
tctccctgacatgcaagaacagggtccagttaattggccttggtcctcacagctccaaaaagaaacaggatctcgataagct

SEQ ID NO: 534297 - DNA, 75 bp, Homo sapiens
gagaaggtggaggaatcctgatactgagcggtctggaggcggctggtggaaatccaattccccgcggagcatggc

SEQ ID NO: 534298 - DNA, 100 bp, Homo sapiens
gtgctgccgccgccagggtctgcagggcctgggccgccgctgctacctgcagcgccgtgtggcacgacacaaaaatcagtcatcttgcagctgtggcaca

SEQ ID NO: 534299 - DNA, 82 bp, Homo sapiens
cgagggtctcggcctcgcggtgcagatgatcagcaagctttgaactcaatcatgcaagatttggctgtccttcataaggcca

SEQ ID NO: 534300 - DNA, 90 bp, Homo sapiens
tgtttgctgagctggcctgtcgggaacctgatgtcctcatcttggtgggcgactcaaggatttgattttctacaagcaattgaacctgcc

SEQ ID NO: 534301 - DNA, 100 bp, Homo sapiens
ggtactgcttcctgagcaccgccagccaccggcaccaagaccggccacatcccagcactgcccacctctgataagaccatcatcatgtggaaactgacca

SEQ ID NO: 534302 - DNA, 100 bp, Homo sapiens
gttaaccaaagccagcctggcatactttgaagatcgtcatgggataacaacgaacttgatgcaagtgataggtttgccaaggtcagacctctcatcatcc

SEQ ID NO: 534303 - DNA, 74 bp, Homo sapiens
gctgaccagcaccagccctgatccagatgccagaagtgggtggagaactgtaggagagcagacttagaagataa

SEQ ID NO: 534304 - DNA, 88 bp, Homo sapiens
tttattggttattcctgcccgaagtcagaactttgacatcttgcaaagtgccatcagtaagcatttgctaccagctcaggaagcacct

SEQ ID NO: 534305 - DNA, 106 bp, Homo sapiens
ccagctgttgattgaatggaaagtctgtttggatgggctgaaatacttgggtcagcagacttgggaagatccccatgaaaaagataagagcacgaactgctttgga

SEQ ID NO: 534306 - DNA, 115 bp, Homo sapiens
cgtcattaagaagatcaatagactgtctacaccaatagcaggattgcttgtagattttcagtggaaactgggtatggctgtgagctcagacacttgcagatctcttaagtatcct

SEQ ID NO: 534307 - DNA, 96 bp, Homo sapiens
cagaacagcacgtaccagaggtggaagtccaagtcaaacgcagaaggactgcctcactgagcaaccaagatgccatttttgtgacaaggcctttat

SEQ ID NO: 534308 - DNA, 82 bp, Homo sapiens
ggcgacctggagtttgtgacgctgtgatgagctggactggccattatggaggaggagctgcagcattcccattgtgtgaatt

SEQ ID NO: 534309 - DNA, 96 bp, Homo sapiens
ccgcgaggaggcgcgggaggtgttcgagaacgaccccgagacgctgcctgtggaggaaccgattgtgtccacagatgaggtcatcttcccactcac

SEQ ID NO: 534310 - DNA, 98 bp, Homo sapiens
ccatccaggcagggggatatggttttgctgttactgctcagtgtagtcacaccttgaataagaaatggaaaaccttgggatgttgataaagctaatat

SEQ ID NO: 534311 - DNA, 75 bp, Homo sapiens
gttcattcctcttatcaaccagattacggccaaattcaaggaaggattccctatcttggacctgaggctgctttc

SEQ ID NO: 534312 - DNA, 75 bp, Homo sapiens
cttggttccgcgttccctgcacatcagggactatgcggcgcaaacatctccttcgccaaaagcaggcgccgccac

SEQ ID NO: 534313 - DNA, 100 bp, Homo sapiens
cgcttaccctccgggggtaaaagagatcaccgacaagatcaccacggacgagatgatcaaacgcctgaaggttgatgataattagaagcatgctttccac

SEQ ID NO: 534314 - DNA, 75 bp, Homo sapiens
gcgacagaagtcatggcgatgtttgagcagatgagagccaacgtgggcaagtgtcgtggacttcgtactgctagg

SEQ ID NO: 534315 - DNA, 83 bp, Homo sapiens
agatgacttcatccaggaaatggagcatggaatatacacagcccccaaatacatcaagatgtttgtactggatgaagctgacg

SEQ ID NO: 534316 - DNA, 98 bp, Homo sapiens
atatgtctacaagaaccactctctggcctttgtgggcaccaaaagtggcaagctgaagaaggcaagtatatcgcgtcaacacagcgacctgacgggac

SEQ ID NO: 534317 - DNA, 100 bp, Homo sapiens
cgggaagttcgtactgggcagaacgcgacgggtctgcggcttagggacctacaagaacagtgaggagcttcggtctcgtattgtgtctggaatcatcaca

SEQ ID NO: 534318 - DNA, 87 bp, Homo sapiens
caaagggtggagcctggacaaaatgtttacttgtctgattcatgttacatgtaaagctgtcctcatttgtgactatggacctatgga

SEQ ID NO: 534319 - DNA, 82 bp, Homo sapiens
tggactctgaccgcaaacaaggagagcctactgagcagcctgagtggctcactgatgatgtgaagaaggagaaagagaagga

SEQ ID NO: 534320 - DNA, 50 bp, Homo sapiens
gaactgatcctggacctggagaagaatgattggctgattgcaattctggc

SEQ ID NO: 534321 - DNA, 98 bp, Homo sapiens
agaaacatgcagattatatcgcatcctatggctcaaagaaagatgattattttcgtgaccttgtccagtagaaggctatttaattttcacaactgctt

SEQ ID NO: 534322 - DNA, 75 bp, Homo sapiens
aacaaactcgaagaacagctgtggaaagaagttgcaaaacactggggctgatcccttatccaacatggttctaac

SEQ ID NO: 534323 - DNA, 101 bp, Homo sapiens
gacgacgacgaggaagaggaggtttctgaggatctccaaagatgggtaaatggtgctaatgaacatggctttgtcttggtgtcttttggagctggtgtcaa

SEQ ID NO: 534324 - DNA, 110 bp, Homo sapiens
tgggtgtgccccagctttaccgcaaccaccgccaccagtccacggagggcatgagaggccacaagaggaagctgaatgaagaggacgccgccagcgagtccagcagggag

SEQ ID NO: 534325 - DNA, 74 bp, Homo sapiens
ctttgatctaagggttcagcctttcaatgtgacacaaggaaagtattctacagaggggccgtatggggtctttg

SEQ ID NO: 534326 - DNA, 140 bp, Homo sapiens
cgggggccggggccgcgctgcccgggccgcgaggacgaggcggcgccgccgggctgtggagccccaagcgtgacccagctgcagagaagctgagacggtgattcggactgactggactctggcctccaggtgtctgcacc

SEQ ID NO: 534327 - DNA, 83 bp, Homo sapiens
ggacgttcccttcacggagaaagattttgactatgtttccagtgtcctctgggtgtttccaagagcaacaagaaacgaataaa

SEQ ID NO: 534328 - DNA, 100 bp, Homo sapiens
caaacttggtgtcttttctacaaactctgtgcctcaacaaccatttctaagtgttgcctttccccatcttcctggttctgctccttcgtggcctagtctt

SEQ ID NO: 534329 - DNA, 100 bp, Homo sapiens
ggaaaatggccacagggctcctgagagccaaaaaagagaatgaagaagcagtacgacgtctcatctgggaaaagaatctaaagtttgtgatgcttcacaa

SEQ ID NO: 534330 - DNA, 100 bp, Homo sapiens
gaagatgtcggccttctgagccgactgcggtggtcaagagcttcctgcctgacacagctcacttcaagaagtgcacaatgtcagaacgtggaattaagtg

SEQ ID NO: 534331 - DNA, 100 bp, Homo sapiens
tgcttctgtagaccagctccaacaggattccatggtagctgggatgttagggctcagtgtgctggagaagagaaacgagttggcacacgcacagtgtttg

SEQ ID NO: 534332 - DNA, 98 bp, Homo sapiens
cagggacgtgatgttggagaactacaggaacctgctttctctcgatgaggataacatccctccagaagatgcctcccggcatggtgctcaaggccttc

SEQ ID NO: 534333 - DNA, 50 bp, Homo sapiens
gccacattgtggccattgggggccttgaaggtggagtataccctgggaga

SEQ ID NO: 534334 - DNA, 100 bp, Homo sapiens
caccgaagcagcgtgtcctccgtgggagcccgagggtctcacgtattgcagggaaggtttggttgtgagatcgagaataacagaagcagcggagcattct

SEQ ID NO: 534335 - DNA, 100 bp, Homo sapiens
acaaaggtgccttctgtagacactcctgctctcttccatccccatcttacagatgtattaagaagcctcaggttctgtacagagtaatgagatgtgtgac

SEQ ID NO: 534336 - DNA, 74 bp, Homo sapiens
ggctgcggctgcgccgaggcgccctactcagctataaagcgttaacagccagtgagatagaagatcttaagctg

SEQ ID NO: 534337 - DNA, 90 bp, Homo sapiens
cttctaattcaggcaatttgcaaaagtgtgaagcctcagtttaggtcatctggtggttcagaacactcaacagagggctctgtatccttg

SEQ ID NO: 534338 - DNA, 89 bp, Homo sapiens
gatcaacccagagctattgccttagatccttcaagtggattgcaaaagttgagaagctcaaaccattagaggtagagctgcgacgccta

SEQ ID NO: 534339 - DNA, 75 bp, Homo sapiens
gctggagagttgaatgccagccaccagccatggacaggtgatttggcttctgcacagttaggaggagcaccaaac

SEQ ID NO: 534340 - DNA, 90 bp, Homo sapiens
cccggcccggcccggccgccccgccgcccccgcggccccggccggaggagacagaatatgacagatacctagcatctagcaaaataatgg

SEQ ID NO: 534341 - DNA, 75 bp, Homo sapiens
cggcgagcatggcccgcgcggcgccgggcgctgactgagaagatggctgtgccacccacgtatgccgatcttggc

SEQ ID NO: 534342 - DNA, 100 bp, Homo sapiens
aacattctgcagtataaagggagcagggaaggcgggagacagcgcagtttgaatcgcggtgcgacgaaggaaccatggtgaatccgggcagcagctcgca

SEQ ID NO: 534343 - DNA, 100 bp, Homo sapiens
agctgtcctgacccagacagtgaagccactaaccctggagctagtggaggaaactgtgcaggctatggaggtggcaattttggaggtagccccggttatg

SEQ ID NO: 534344 - DNA, 75 bp, Homo sapiens
ggacggctgcgtcgcccgaggcgaggaggagcgctggcgattggaggaagattctctggcttgtcagtgtcgaat

SEQ ID NO: 534345 - DNA, 100 bp, Homo sapiens
ttggactgagtcctgcaggacacaggttgacaatggtctccaggatggtctctaccatgctatctggcctactgttttggctggcatctggatggactcc

SEQ ID NO: 534346 - DNA, 116 bp, Homo sapiens
atgcaaaatccagtcagatcaagactgtatcaagcagcaagatattttttaaaggaagtagatttcgatataggaatgaatctgaagtctgctgcagtaaaacacagaaggcttta

SEQ ID NO: 534347 - DNA, 75 bp, Homo sapiens
gatggttagcagtttttggcaatcacgtattttcaaactgaagaaatcaggggagaaacccctgcttggtggaag

SEQ ID NO: 534348 - DNA, 100 bp, Homo sapiens
gcgacaagagcagttagaaagggaacagctggaatgggagagagagcgcagaatatcaagtgctgaatatggctcaagcctggaagatgacgtggtgggg

SEQ ID NO: 534349 - DNA, 75 bp, Homo sapiens
ttctccaattaaccagatcttgccctggtgcagacaagacttagggtcagggctgtgttttttggcagagcatcc

SEQ ID NO: 534350 - DNA, 74 bp, Homo sapiens
gtgaaatcgcgtggactgcaacacccagcagcgcggaaatctactttcttcaatgtgttaaccaatagtcaggc

SEQ ID NO: 534351 - DNA, 82 bp, Homo sapiens
acaggacgaaggcgtgctgaaggagaaccaggtgcatcagcgcattgcggagctgaggaaagcaggtctgtggtcccagagg

SEQ ID NO: 534352 - DNA, 78 bp, Homo sapiens
ccttcttgctggaactccacggagagactgcctgctgttcatgtacaaggtcaggaacctttgactgcttccatgttg

SEQ ID NO: 534353 - DNA, 112 bp, Homo sapiens
ccttagctgtgctcgcgctactctctctttctggcctggaggctatccagccagcccctgtcaaagggaacaggaagcagtccacggagggtgacgccctagacccacctgc

SEQ ID NO: 534354 - DNA, 82 bp, Homo sapiens
tacagagtatctgaggatcttgtaagcatacatctgccactctctaggacccttgctgctatgtgttccaagattactgaag

SEQ ID NO: 534355 - DNA, 75 bp, Homo sapiens
cctcttttgacttggactatgactttcaacgggactattatgatagataacgaaggaggcccaacttcattcaat

SEQ ID NO: 534356 - DNA, 90 bp, Homo sapiens
taaaaggccggcagaagggaggcacttgagttgatattcactgatggactccaaagaatcattaactcctggtagagaagaaaaccccag

SEQ ID NO: 534357 - DNA, 90 bp, Homo sapiens
ccggagcctggaggaagagaaggcagctgtgactgaggcagtgcgggccctgctgatcatggaagggaagtggttgctgtgtatgttact

SEQ ID NO: 534358 - DNA, 82 bp, Homo sapiens
ggcccaggccgccccgttccccgagctgtgcaggtgtcgtgaaaactacccctaaaagccaaaatgggaaaggaaaagactc

SEQ ID NO: 534359 - DNA, 90 bp, Homo sapiens
tgtacaaatacccctttgaattaattatggctgtgctttgtaacagagccagactggtttcctatctcccaggattttgctctttagtta

SEQ ID NO: 534360 - DNA, 75 bp, Homo sapiens
gaaggaagtgcggagccagcctgagttgggagaagagctccagagattggactaaatgctcttccttcagaggat

SEQ ID NO: 534361 - DNA, 100 bp, Homo sapiens
ctttgaccgacacctccaccctacaagtactgaaaaggcacagccctggcctcccacgactacatcctgaagattgtgcccacggtttatgaggacaaga

SEQ ID NO: 534362 - DNA, 100 bp, Homo sapiens
tccggctcacaggtggagagccgcttatccggccggacgtggtggacattgtgggtggcctgctgatagcatgtgctcattttggtgcatatgtgtatgg

SEQ ID NO: 534363 - DNA, 85 bp, Homo sapiens
ggtcctcggagcaccccatccctgacgacaaaggctgtgctcttggtgaggaagttgaactgactcagcacaagaagacagcttc

SEQ ID NO: 534364 - DNA, 83 bp, Homo sapiens
ctggtttctaggacactaaacctcatggaattgaatgatctggcacgggaccctccagcacagtgttcagcaggtcctgttgg

SEQ ID NO: 534365 - DNA, 100 bp, Homo sapiens
cttccaaggacagccactgggtctttgtgaatgagtcacccacaaaagctgtatataatgccagacattggaatcatccagattcagaagaactgcctgg

SEQ ID NO: 534366 - DNA, 75 bp, Homo sapiens
acggaatgcagtttttacataagttccagcgtcccatgctcggtggccccagaaaagtcagtgtgtaggcctcag

SEQ ID NO: 534367 - DNA, 100 bp, Homo sapiens
tgccgcgccaccgagtccggaccggagactttggggcctaactagagagctcagaaatatgctcagcaagtcttgcagaaggaatgtcgtcccaagtttg

SEQ ID NO: 534368 - DNA, 90 bp, Homo sapiens
atgagaaagccaccaagaagaccaaagaaaaggagacaaggatggctcttcctcagaattcagaaggagctggcggacatcactttagac

SEQ ID NO: 534369 - DNA, 99 bp, Homo sapiens
cggagagagtcagcctctggttcagactgcagtaaccatggtctaccatcacggcaacagtgcgacgggcggccattacactacagacgtcttccagat

SEQ ID NO: 534370 - DNA, 75 bp, Homo sapiens
ccagacatggggaacgcggcgaccgccaagaaaggcagcgaggtggagagcggtttcccaggcagctgcagactt

SEQ ID NO: 534371 - DNA, 75 bp, Homo sapiens
tcctgcagcggcccccgccggatgatgccatggagagcagcaagcctggtccagtgcaggttgttttggttcaga

SEQ ID NO: 534372 - DNA, 82 bp, Homo sapiens
ggaaacgcgtgagccaggccgagagacttgtacagcaggcaaagtgtttgaaaatcaaaggaaaagaagatattgacttgga

SEQ ID NO: 534373 - DNA, 87 bp, Homo sapiens
gtcctgagatcaaatggcacttcattggccacctacagaaacaaaatgtcaacaaattgatgggtttgcatcgccagcttctatata

SEQ ID NO: 534374 - DNA, 50 bp, Homo sapiens
tggctctgaagtggggtctctgggattccatatggctctcatatcattcc

SEQ ID NO: 534375 - DNA, 98 bp, Homo sapiens
gatccgctgcgcgagctgtctcggtcccacgtgtgcggtggaatatgtgatcaagtgtgacatgtcagctctgcagaagattctgtatcgccatatgc

SEQ ID NO: 534376 - DNA, 101 bp, Homo sapiens
cgagctggagctgaagcgcaggctgcggggcgcggagtcgggagttggtgcttcccgtgctgctgttgatgctggctttgttcccaatgacatgcaagttg

SEQ ID NO: 534377 - DNA, 100 bp, Homo sapiens
gtgactctcctgacatccttagtagaaggccataggaaaaggatacagagtagagtttcatgaacctgaaacttggtggaaatttgatcctgaagaatta

SEQ ID NO: 534378 - DNA, 80 bp, Homo sapiens
tgcatttgctttataaaagaccactggatcccaagagtgaagctcagcttcaggaagtaccaccaagaacagggaaggac

SEQ ID NO: 534379 - DNA, 82 bp, Homo sapiens
agagggacgtggagcgagcgggtggaaaccaggcggccagccagctggagggtgagaatgagatggtgatcatgagacctgg

SEQ ID NO: 534380 - DNA, 75 bp, Homo sapiens
agcaagatcaccgtgacatccgaggtgcctttctccaaaagatacttggtgcttgaaaaactgaagaaggaagac

SEQ ID NO: 534381 - DNA, 87 bp, Homo sapiens
cgcagtgaagataaggaagcctggttccccgcgagcttcgtcagattatgatatgactctgacaaatgcttgtattgccttaagtca

SEQ ID NO: 534382 - DNA, 90 bp, Homo sapiens
ctttccagggagggaacaaagcccacagcaccgggagaacctgcccagccgctttaagtttaaggagtattgccccatggtgttccgaaa

SEQ ID NO: 534383 - DNA, 100 bp, Homo sapiens
gggcccggaagagcccgaggcttttttttcctccgcggtggggcgttgccatggagacgcgggcggcagggcgaactttctgaccaagtatacaactacc

SEQ ID NO: 534384 - DNA, 73 bp, Homo sapiens
agaaggatcatttgaagaatatttaaagcgtttggaaaatccacagggaccactgacaattagggatgtgact

SEQ ID NO: 534385 - DNA, 80 bp, Homo sapiens
ccttggctgctgagtggtgacagtagcccagcccgccggccagaaaaggtcacggatcgcctacagtgacgaagtacgga

SEQ ID NO: 534386 - DNA, 88 bp, Homo sapiens
aaggcggtttctagtgcaaatcccctgctcagggtcttcatccagaaacgagcctacaacacagcagtcccctcaggatgagcaggaa

SEQ ID NO: 534387 - DNA, 88 bp, Homo sapiens
cccccgcccgtctgttcgcgctgctgctgttcttcgtaggcggagtcgccgagtcgggttatgtaccgaaggactctaccgtgtcagc

SEQ ID NO: 534388 - DNA, 80 bp, Homo sapiens
ccggccggagacccgagcccatcgccgtcagccagccagggccgcgcgggagccattttgttctaatagctgtgatgatc

SEQ ID NO: 534389 - DNA, 98 bp, Homo sapiens
ccgggacccggttccccggcccacagtgggggtgtgcaaacccgagagaactggtgaacagagtatctgtcaggcaagagctgctgtgatggtttatg

SEQ ID NO: 534390 - DNA, 100 bp, Homo sapiens
gggtaatgaggatttgactgtgaaggttgaagagatggtgcagaaccacatgacttactcattacaggatgtaggcggagatgccaattggcagttggtt

SEQ ID NO: 534391 - DNA, 100 bp, Homo sapiens
tggcgccggcgacggaccagcgacccaagcgccgcggttaaccacgtctcgtccacgacctccctaggtcaaaatgcagatcttcgtgaaaacccttacc

SEQ ID NO: 534392 - DNA, 83 bp, Homo sapiens
ctaatcacagactcctatttgaagtatttgacgaaaatagactggttttaaaatcaaagatgggaaaatcggagaaaattgcc

SEQ ID NO: 534393 - DNA, 99 bp, Homo sapiens
ttttagattcagctaaacgtgggtttcttactaaggacgagctgatcaagtatatgactgaagaagatccaggatgagaagactgataaaagaagaagc

SEQ ID NO: 534394 - DNA, 51 bp, Homo sapiens
cagcacccacccaccgtggtacaggcccatgaagcttcccatcaccaacag

SEQ ID NO: 534395 - DNA, 96 bp, Homo sapiens
ctcgggtgcagcgcagctcagcgcagcgctgcggcctttcggcagccgaacggccgcggcaggagccaaaaacctgtatatcatctccgtgaaggg

SEQ ID NO: 534396 - DNA, 77 bp, Homo sapiens
gcaggacccatttgtgtccattgatctcttggagcagctggggatcatgcttgaactcagtgaaaatagaatctttg

SEQ ID NO: 534397 - DNA, 100 bp, Homo sapiens
ctggacgccgcgatcgtggggcccgcgaggcgggcagccggggcgtccagggcccagtcctatgcggagagactgcgtctgggtttggccgtcattcacg

SEQ ID NO: 534398 - DNA, 96 bp, Homo sapiens
ggtcatgagtagctttctgccagagggagggtgttacgagctgctcactgtgatagccttcatctcctcgtcctccaggcagcacaagccattgtg

SEQ ID NO: 534399 - DNA, 83 bp, Homo sapiens
aaaaaaggaggccaaagactttgatcttctcttagaaatctacagaagtataggggagccagatagtttgtatggctgtggtg

SEQ ID NO: 534400 - DNA, 98 bp, Homo sapiens
attgcattggcaatttgcaacacagtagtggtttctgctcctaaccaaccccgacaaaaggattggagcaatgatgtaagagctgaactagcaaaaac

SEQ ID NO: 534401 - DNA, 100 bp, Homo sapiens
cttgtggtagtgattgattccattactgcccaaactcttcaagttttagaaaagcataaagctgatgttgtaaaggaattaagtagactggctggacaga

SEQ ID NO: 534402 - DNA, 100 bp, Homo sapiens
attttcagggagatttggaaaaaccgctatgtggtgctgaaaggggaccagctctacatctctgagaaggaggcccagacatgtccgtccttgtaagtta

SEQ ID NO: 534403 - DNA, 75 bp, Homo sapiens
tttctggtggacaacagtgtgtttcatggggcataaggaaatggtggcaggcacttcctcctaacaagaaggaag

SEQ ID NO: 534404 - DNA, 82 bp, Homo sapiens
tttccgtttccagggttccgaccagtttggtgccctggttgtcagatgttggaaagcagtaggacggaacatactcttcgtg

SEQ ID NO: 534405 - DNA, 49 bp, Homo sapiens
gcaccgcacgccctgcaagggaggaaacttggatttaactggccagaag

SEQ ID NO: 534406 - DNA, 74 bp, Homo sapiens
gagtctgctcttcctggtccaagaaaatcacagagcggttcttccgcaacccagcgaagcccgcggaggaggac

SEQ ID NO: 534407 - DNA, 100 bp, Homo sapiens
catgggctcctcgcaaagcgtcgagatcccgggcgggggcaccgagggctaccacgttctgcggatataagagttcggaccgcccagcacacaaggtcag

SEQ ID NO: 534408 - DNA, 82 bp, Homo sapiens
tagaagatgcagcacttacttttccagtccttttccaagatgtcatttatcaggttctatatactcatcaaaagatgaagaa

SEQ ID NO: 534409 - DNA, 109 bp, Homo sapiens
gagaattatgcacctgacagcatctattacctttgccttggaatacaggagggtgataaaagaaaatgtggctgaagttacccgaagttcagcttgcagtgtaattcag

SEQ ID NO: 534410 - DNA, 100 bp, Homo sapiens
catatttttggacctgaaacagaaattctggaacacctatatgttgcagatctgatctcttctgaacacctcatcgtgtctccatccctgggaatctgac

SEQ ID NO: 534411 - DNA, 80 bp, Homo sapiens
cgcgagcgcgacgagtataagcggaggtttttagaacttcagccataaaaatgggcagaattttccttgatcatatcggt

SEQ ID NO: 534412 - DNA, 105 bp, Homo sapiens
ctggatcagtgcgagaaccaggagctcgagaccaagatgaagagacgagctgtggggatctggcactgtggttcctgcatgaagacagtggctggcggtgcctgg

SEQ ID NO: 534413 - DNA, 75 bp, Homo sapiens
tcagaaggagctggcggacatcactttagaccctccacctaattgcaggtaccactttcaaaactcagaagcagc

SEQ ID NO: 534414 - DNA, 75 bp, Homo sapiens
ggaggcgtgtacggctcaggtggagaaaggaaactggaggcgaccagtgcccagaatatcgagttcctacaggtg

SEQ ID NO: 534415 - DNA, 89 bp, Homo sapiens
ttcttggtgaagtcggccagcctgagcaagcggaggacctacgccggcctgggaagctattttgccagccacttcattatgggaggaga

SEQ ID NO: 534416 - DNA, 78 bp, Homo sapiens
acagatcctgtgtcacccggcaactcagaaacatcaggtccaagatgcagacagacatgctgaactatctggaagtcc

SEQ ID NO: 534417 - DNA, 75 bp, Homo sapiens
ccgctcagctcgagcttccctcgtggccgacggaacaatgaagatagtcaaagaggttggtcaactggcagaaac

SEQ ID NO: 534418 - DNA, 100 bp, Homo sapiens
ccgattttctgcagaagatgaagctttgagtaacattgccagagagtcaggtgacacacagtcttttgcacagaagctccagctccgggtgccctccgtg

SEQ ID NO: 534419 - DNA, 100 bp, Homo sapiens
gtgcacatcctgacttctgtgagctcattgcgcgggactagggagtggcttttcatggcctgccactgaaaatcaagaaagaaccccacagtccatgttc

SEQ ID NO: 534420 - DNA, 101 bp, Homo sapiens
gccgggggacccgcccgccatggccaccaagactgtgccctgtccacggtgcctcctgcatgtcctgctgccctgagctgtcccgagctaggtgacagcgt

SEQ ID NO: 534421 - DNA, 75 bp, Homo sapiens
ccaagccagcccgaacacaccactgcagcatctgcaacaggtctctctgaagaggctatcatggagctgaacctg

SEQ ID NO: 534422 - DNA, 100 bp, Homo sapiens
gctgtggtggccccgagcgcgagtgtgtaggtgacaggacagcggccaggcccgcccctcccctcggtcctagcagaagatgtgactcagactgcctctg

SEQ ID NO: 534423 - DNA, 82 bp, Homo sapiens
caataatatgattcctcagattatgcccagtatatccagcagggtacgaattggagcaatgttggcttatacacctctggat

SEQ ID NO: 534424 - DNA, 100 bp, Homo sapiens
tgctatgtaaggaagccaccaagaagggcaaagaaaaggagccagggacggctcttcctcaggccccagcacccgcagagcagacactgcgatgacaacg

SEQ ID NO: 534425 - DNA, 100 bp, Homo sapiens
gtggggcgcagcttcgagggccgggagctcctggtcatcgagctgtccgacaaccctggcgtccatgagcctgtgtgccatgcggagctgaatgccatca

SEQ ID NO: 534426 - DNA, 75 bp, Homo sapiens
cccagagataggagatgctattgcccggctcaaggagcctctgtgtccagatgtttgactggtttgactaccatg

SEQ ID NO: 534427 - DNA, 82 bp, Homo sapiens
ccaggatctcgggctcggaacgagactgcacgttgtatcacggactgattcaccgagcccaaccgtactcaactcacatatt

SEQ ID NO: 534428 - DNA, 74 bp, Homo sapiens
tactatccatttcaactacagatactttgaagtagaagaagctgatggtgtgtgtaactggtgtgtgcaccgtt

SEQ ID NO: 534429 - DNA, 75 bp, Homo sapiens
caaaaaatgaagctgaaggggcagatgacttacaatctctagtgatccctgaaaagttccagcatattttgcgag

SEQ ID NO: 534430 - DNA, 100 bp, Homo sapiens
ctcgggtctcgggggccgctctgggatcccggccaccagcaattgtccggatgattcaaagccgccttactcctacgcgcagctgatagttcaggcgatt

SEQ ID NO: 534431 - DNA, 100 bp, Homo sapiens
taaagaccggaagctgagtttttatccgtggccagcatcgaaatgttcagccttttagtgatgaagatgcatcaattgaaacaatgagccattgcagtgg

SEQ ID NO: 534432 - DNA, 100 bp, Homo sapiens
gaactagaacaagaagaagaggagaggaaaaaggaagagagcactgcagccagtgaaaccactgaggcgtcacctcctcctgtcgcctggccctcgccat

SEQ ID NO: 534433 - DNA, 100 bp, Homo sapiens
acttaaccgtggtgatgccttcctctggaagcagggtcctgagaacattatctgtagctgtatctccccatgtggaagttggatagcctattctacagtt

SEQ ID NO: 534434 - DNA, 100 bp, Homo sapiens
ctggtttcaagcgattatccagtacacattgataagcacaaacgtgcagatatctgatagccctttccgttgcactcaagaggaagcaagatcattagtt

SEQ ID NO: 534435 - DNA, 75 bp, Homo sapiens
aaagccaccacccaagatcagctgtttgaaattgttcctgaagatgacccccagaatgccattgtcagctcttct

SEQ ID NO: 534436 - DNA, 75 bp, Homo sapiens
tattaacaactggaggaacaggatttgcaccacgagatgtcactccagaggcttttaaagaagcagttttttcac

SEQ ID NO: 534437 - DNA, 80 bp, Homo sapiens
ggaggttcctacagagattcatatgagagttatggtacaatgactcttcttgcttttcacctaagttgaataagcaccct

SEQ ID NO: 534438 - DNA, 100 bp, Homo sapiens
ctgagcttgaccgttgcataagtcctgaagggatggatgaatgagatttacaactatgatccagaaacctaccatgcgactttgacacattcagtctttg

SEQ ID NO: 534439 - DNA, 100 bp, Homo sapiens
ggcaagatgggagccaacgtctgtcagaagcccagtggtatcctctaaagtctccagtgaatattgaattgctgaggattttgggaaaagacaaatcaaa

SEQ ID NO: 534440 - DNA, 80 bp, Homo sapiens
gatccagcctgcggagcctgtggggcagtgatcaacaaatacaagcgcagacgatttcagaaaaccaagaacctgctgac

SEQ ID NO: 534441 - DNA, 80 bp, Homo sapiens
cacactaggagatctcctcaaagaagtttgtccttctgctattgatcctgaagcggagtttaagagagctgtgaaagtag

SEQ ID NO: 534442 - DNA, 83 bp, Homo sapiens
ctcaccgcagccccctcctggcgacccgcaagtgtcgtgaaaactacccctaaaagccaaaatgggaaaggaaaagactcata

SEQ ID NO: 534443 - DNA, 82 bp, Homo sapiens
ccgagtatgcttcgtttttcgccgtcatgggcgcctcggccgccatggtcttcagcgagacaagaggagcagcagcggcacc

SEQ ID NO: 534444 - DNA, 100 bp, Homo sapiens
cactccaaagtagcctggtgtggaaattgctggacgaaaggcctcctgacaaggtgatccgggcgggccccgcaggaattttatcccctcaccggcctca

SEQ ID NO: 534445 - DNA, 106 bp, Homo sapiens
tatgactgcaaggtggagcactggggcctggaccagcctcttctgaaacactggggaaagaacatgaggttcccttggaaatcattcaagaggaagatggaagggg

SEQ ID NO: 534446 - DNA, 100 bp, Homo sapiens
gagcaggacatcttcatttacagagcaacttgatgaaggtacacccaatagagagaacattaaccaggtggtatttgttggaaatttcttgagaattaat

SEQ ID NO: 534447 - DNA, 100 bp, Homo sapiens
tgacctctctttcatgtgcagctggcgagacgcactgactctgccagaggcccagccccagaactcagaggctacagagtgcggtggcgccagcacagaa

SEQ ID NO: 534448 - DNA, 73 bp, Homo sapiens
gggagagccggatcctttcccagaagaatgagaatgagggcaattgaaggaacagactaaaaatcgtgtcctg

SEQ ID NO: 534449 - DNA, 83 bp, Homo sapiens
gagcgcgagcggcgcgagaaagccagaagcggactcctagaagaggggagcagcaaggatggaatgacagccgtgggccggag

SEQ ID NO: 534450 - DNA, 100 bp, Homo sapiens
gagcaggtgaacactgaccccaatggatctcttaagggcagtcccaagatccagagcagagatgtatgatgacgtccacagcgatggcagatactccctc

SEQ ID NO: 534451 - DNA, 50 bp, Homo sapiens
gctcaatgacaatggaggcctccctccgttatctgactggatcaagattg

SEQ ID NO: 534452 - DNA, 101 bp, Homo sapiens
cgagcgcggcccgggcgccatcgagccttggcggcggacgtgcagggaatgggtactgttcaaaaaggaatgccccacaagtgttaccatggcaaaactgg

SEQ ID NO: 534453 - DNA, 97 bp, Homo sapiens
tcgatatttgggcctttggacttgttttgtgggaagtggccaggcggatggtgagcaatggagcttcagtttcagcgactcacccgagaactggaag

SEQ ID NO: 534454 - DNA, 50 bp, Homo sapiens
cgagaaccgtcagtttgagccagatgaggctgaggggatctggcggtgga

SEQ ID NO: 534455 - DNA, 97 bp, Homo sapiens
acgtgggcaacgtacgtcagacggcagtggtggaaaagatccatgccaaggaaacgtactcccaaactaagcccaagatgcaaagtttggttcaatg

SEQ ID NO: 534456 - DNA, 74 bp, Homo sapiens
gagatgagtatgcgctgtatagaccactgcaggtttccaaggtgctattgggagctcatgcactcttggccaac

SEQ ID NO: 534457 - DNA, 50 bp, Homo sapiens
ccaggaggacacccctggtggcctgcttgtaacaaatgtggcaattattt

SEQ ID NO: 534458 - DNA, 90 bp, Homo sapiens
aaaaatctcagaatggggaaaaataaaggaatgcccaatccctcagtttgctggaaaccctcctatggtcctgatccggttccccatgca

SEQ ID NO: 534459 - DNA, 75 bp, Homo sapiens
aggcggaggctcaggcagcttgaggatgtggccaggttctgcgagccccaaagggtcagattttgttggaaagct

SEQ ID NO: 534460 - DNA, 75 bp, Homo sapiens
tcagaagaaggctgctattgaaagagagtatgcacagagagcatcagtgatgtcacgtttggagcaggggtcagt

SEQ ID NO: 534461 - DNA, 95 bp, Homo sapiens
ggcacagcatgagatccaaaggcagggcaaggaaactggccacaagatgactcactggttgtgtggaaggaagtcgatttgacccggctgtctga

SEQ ID NO: 534462 - DNA, 100 bp, Homo sapiens
gcctgattgggaagaaactcttagcgcaatggtgaaagaagaacgtccagaaaaaataccagatttaaaattattggtagagaagaaatttttggcttta

SEQ ID NO: 534463 - DNA, 98 bp, Homo sapiens
ggtgtcctcctggcctcagcaacctgacaattctgtcgtgtcccggtgtccctggccagtgtccttccacctgtccacaagcatggggaacatcttcg

SEQ ID NO: 534464 - DNA, 75 bp, Homo sapiens
ggagaatatttaatggaaaatcgcttggttaaaacctgacacttttaacaggaatgcttctagtcacaacagaca

SEQ ID NO: 534465 - DNA, 100 bp, Homo sapiens
gtcccccgggggcccgtactgcacatcgtggtggtcggatttcaccacaagaagggctgccagataatctggagctttcaaaatgtttgccaaagcaacc

SEQ ID NO: 534466 - DNA, 80 bp, Homo sapiens
acagtcgttcccgcctcacaacctggagaatacttatctctggcgcacatcactatatttggctgcctctgccagtgctg

SEQ ID NO: 534467 - DNA, 75 bp, Homo sapiens
ctcttcgcttgcagatacccccgagatcgatccaattctggtacagcagttgcgccggacatacaaatatttcaa

SEQ ID NO: 534468 - DNA, 118 bp, Homo sapiens
aacattccaacacataaaaattatttatccaacagctcctcccaggaaacttggatttaactggccagaagcaggtattcaaagcagagaacaatccctgggtgacccccattgcaga

SEQ ID NO: 534469 - DNA, 100 bp, Homo sapiens
ggctagtggagggccagctgcctgtgggggctggacatcgtcaatctggagtgccgttagctaaaggaactttgattacccactgctacaaagatcttgg

SEQ ID NO: 534470 - DNA, 75 bp, Homo sapiens
caggggtcagctgggccgcaggggcgcgcagcgcggggagctgccagggtgcttcaaggatgaccgcatcgtctt

SEQ ID NO: 534471 - DNA, 43 bp, Homo sapiens
tacatctttcttcgacaaaggcaaaaaacatttaatccttgcc

SEQ ID NO: 534472 - DNA, 83 bp, Homo sapiens
gagagagtgaggagccagacgacaagcacacactatggcgctgaaacggattaataagatgacttcaaacctgcttctattga

SEQ ID NO: 534473 - DNA, 75 bp, Homo sapiens
cattctcttggactgaacttaaatactgatagtttttcagtttccaagatggaatagttatagtgcatatcttcc

SEQ ID NO: 534474 - DNA, 75 bp, Homo sapiens
acgtcattcattctcgatgtcgtgctaaatcaccctggttgttgctatgaaacagctatgacaagacatttttat

SEQ ID NO: 534475 - DNA, 100 bp, Homo sapiens
gtggctggcgattcgtgttcgtgagggccttttctggtggagataagtaattaacatttcgaaacaggaaatgaaaggatttatatttttaaaagctata

SEQ ID NO: 534476 - DNA, 100 bp, Homo sapiens
gtgaccgtctgctcaaggtcctcttcctggtgctgggctacaccgtcctggccgggatggtcttcctcaagtggtgaggaagaggatggagatgaagatg

SEQ ID NO: 534477 - DNA, 97 bp, Homo sapiens
tcgagccggaggaagccaccaggaaacttacatgcttgctgtaactttggatgaatggaaaaagaaactggaatctcccaacagagaaattattatt

SEQ ID NO: 534478 - DNA, 75 bp, Homo sapiens
ctacgagaagaagccctactgcaacgcctccttcgagaactcatagaacggaagaccagctccttggatcccaac

SEQ ID NO: 534479 - DNA, 100 bp, Homo sapiens
tcttattctggaaaccagtgcaatgatctcctggagtttgaactacggaaagccaaggagaccattcaggccctccgagccaacctgacaaaggccgcag

SEQ ID NO: 534480 - DNA, 90 bp, Homo sapiens
cttcttgcaacaggagacaagggcggcagagttgttatttttcagcgtgaacaagaggtgtcacagatttatcagagcattgagttttct

SEQ ID NO: 534481 - DNA, 75 bp, Homo sapiens
tgggttttacttcaggttatgtacgcttctacactgagatttgtttgtgagggaacagtagaagaaaagatctta

SEQ ID NO: 534482 - DNA, 83 bp, Homo sapiens
cgcagcccccggccgcagcgcaggcagcccagcagggacttgccatgaggtgttgaagccttgtttcactgagttggagagac

SEQ ID NO: 534483 - DNA, 96 bp, Homo sapiens
ttgtgcacaacaattccaaacacgggaggcgggcccgccgcctagacccgtcagaaggttttgctagtggaagactcagaaaaatatgaaatattc

SEQ ID NO: 534484 - DNA, 100 bp, Homo sapiens
gcagatgctggagaagtccccttatgaccaggctgaccggttccctgatgtgttacctgcttctgctactgatccaaactgcagaacttctcattcatcc

SEQ ID NO: 534485 - DNA, 98 bp, Homo sapiens
ccacaaccgcgtgcgtcagattctcatggcctctgggtccaccaccttcaccaaggctttctgcctccgagatgtggcaccatagtgcggtgccctgt

SEQ ID NO: 534486 - DNA, 56 bp, Homo sapiens
acttggagtccggacatctgaaacttggaggctgggatgcagatggaaaaggccct

SEQ ID NO: 534487 - DNA, 82 bp, Homo sapiens
aaagacatcttaattgggcacgaaagagcactgccagtgaaagatgtagaagataaacctgaacaacaaaccagaacaagag

SEQ ID NO: 534488 - DNA, 89 bp, Homo sapiens
cagcaagtaaacgggcgtcccggagcctcgatggagggagcgagtcaaggccatgttctaccacgcctacgacagctacctggagaatg

SEQ ID NO: 534489 - DNA, 75 bp, Homo sapiens
ccgacgcgggaatgaagcgggcgctgggcaggggtcgggccccggctcagtggtcccaggcagctcgggtgtcgg

SEQ ID NO: 534490 - DNA, 100 bp, Homo sapiens
atgatattactgtaccgttagaagtttttgatacttcctcgcgtattgctaaaggaggagttgaccacaccaaaatgagtctacatggtgctagtggggg

SEQ ID NO: 534491 - DNA, 83 bp, Homo sapiens
aactggcttcgggaattttaccagttgcagagtgggcaggatcttaagacccgataggtgcagaacccatctggacacggaga

SEQ ID NO: 534492 - DNA, 98 bp, Homo sapiens
ggggacttgggacttgcctggcgactttggccggacttttgctaactgcggcgggcgagacgttctcaggtcactgacaaggaacaggagtttgctgc

SEQ ID NO: 534493 - DNA, 90 bp, Homo sapiens
cgagggaacagatgagaaacccggcaatgaaagttcgactagtgatagtggatggtattgcttttccatttcgtcatgacctagatgacc

SEQ ID NO: 534494 - DNA, 87 bp, Homo sapiens
tgtcccagctcggcccgcgggggagccccgggagccgcacggaacttagtgatttggcccgtgaccctccagcacaatgttctgcag

SEQ ID NO: 534495 - DNA, 50 bp, Homo sapiens
aagacattcagtgaagcttgcctgatggaggaagaacgtgcaaaacgtga

SEQ ID NO: 534496 - DNA, 87 bp, Homo sapiens
ggccatggccgccgccgatgccgagggctcattgtcatccccaagccaggccagttctccaggtggaactgtagtgtagcgacctca

SEQ ID NO: 534497 - DNA, 75 bp, Homo sapiens
ggcgcctatcagtacacaataagggatggccaggccatgttatgggatctcaacgaaggcaaacacctttacacg

SEQ ID NO: 534498 - DNA, 129 bp, Homo sapiens
ttccacccttggccacctccccaggtgatgcctgaagctcaagggactgtgtccaccctcagctttaatgcgcccaaatgtgggcggggcaaaccggctcttgtgcgacggcacacgctggaggaccgc

SEQ ID NO: 534499 - DNA, 82 bp, Homo sapiens
gcagctccagcaggcgctggctcctgctcagtggtgaaagtggtgctggaaaaacagtggctgccaaatatatcatgagcta

SEQ ID NO: 534500 - DNA, 100 bp, Homo sapiens
acgaggcgcctcgggtccccgcaccacctcctgctgccttcccgtcgccgctcccgaagcttttccaggaaagaccacagcaagattctttcattcgtct

SEQ ID NO: 534501 - DNA, 89 bp, Homo sapiens
gcaggactctttctgttcaggccagaccctctgggagcttctcagccattttccacagatcaggggtctgggaggacagctcatgagac

SEQ ID NO: 534502 - DNA, 50 bp, Homo sapiens
tcagggaagcctggcacccactgcccaactgaacagcagagaatttcaaa

SEQ ID NO: 534503 - DNA, 75 bp, Homo sapiens
gccactgacgccgggaccgggaccgccgccgccgccgccaccatgtgcccttgctaccagttccgagccagccga

SEQ ID NO: 534504 - DNA, 75 bp, Homo sapiens
ggagaagcaggagccctactcggcagggcaccgcgtccgtgctgcagcgccggtcccccaatgaggagtacgtgg

SEQ ID NO: 534505 - DNA, 100 bp, Homo sapiens
ctccattccagaaccatggcccaatttgtccgtaaccttgtggagaagaccccggcgctggtgaacggcaccatgagccaggacaccgaggtggatatga

SEQ ID NO: 534506 - DNA, 75 bp, Homo sapiens
gcagccgatccagcctgcggagcctgtggggcagatttaatccagagactgacttcactatagaacccacagttg

SEQ ID NO: 534507 - DNA, 74 bp, Homo sapiens
atgatggggcagcaagtggccaaggctgctcacagtatttggggccagagcctacgtgaatatatgtgtgtgga

SEQ ID NO: 534508 - DNA, 113 bp, Homo sapiens
gaagtatgagcttgctcacccaccagaggagtggaaggtgttgaaagcagcaggggcctagaagacattaaaccgataccacagaaatacaaaggatcattagagactattat

SEQ ID NO: 534509 - DNA, 83 bp, Homo sapiens
ccttcgcggacccagtggatgtaaaccccttccagctcgtgagtcttggcgccaaaatacatcctggggggacattgtagaag

SEQ ID NO: 534510 - DNA, 82 bp, Homo sapiens
cgcgtctctctgctgcggcgcggggaccgctgtgctctcgatgtgaagttcatttccaatccgccctccatggtggcagcgg

SEQ ID NO: 534511 - DNA, 75 bp, Homo sapiens
caatgacagaaccgcatctcaagggcagtggggccgtgcctgcaattaccagctctggctgggtcgccacaactt

SEQ ID NO: 534512 - DNA, 90 bp, Homo sapiens
ctctgaggaggagagccaggaccggcaactgaaaatcgtcgtgctgggggacggcgcctccgggaagagctttcattgttgaggttcctc

SEQ ID NO: 534513 - DNA, 100 bp, Homo sapiens
ctccggcaaccgctccggcaacgccaaccgctccgctgcgcgcaggctgggctgcaggctctcggctgcagcgctggtattcatgtgattgaacggcgtg

SEQ ID NO: 534514 - DNA, 75 bp, Homo sapiens
cggcagctgaggagactccggcgctcgccatggccgacgaaaagcccaaggctggagtgcagtggcccgatctca

SEQ ID NO: 534515 - DNA, 50 bp, Homo sapiens
cccggggccaggtgctcctgctcaggaggtggtccaggccacgctggtgg

SEQ ID NO: 534516 - DNA, 100 bp, Homo sapiens
ctaccaagatgacaaaagaagagttaaatgccctcaagtcgacaggggatgggaccctaggtttccaatacttatctacaggaatcgccatgaccccagc

SEQ ID NO: 534517 - DNA, 100 bp, Homo sapiens
ccgggaaaacctgtgtgttctccaccatagctttggactctcttgttcttgaaaacttaagtacccaggtctgggaggggctgaacgtggtgaagacagg

SEQ ID NO: 534518 - DNA, 97 bp, Homo sapiens
ggttctttgaaggattttgcctggctggaatcattctcaccttgtatgctttacgtgctggagaatctggtaaaagcaccattgtgaagcagatgag

SEQ ID NO: 534519 - DNA, 90 bp, Homo sapiens
gggcactccacagattctgttgcgaaggcagccatctttagttcgtctttcctagagagcaaatacttccctggacaagaaagccagatg

SEQ ID NO: 534520 - DNA, 75 bp, Homo sapiens
attgcaagcaacagtagtcgctgttggatcgggttctaaaggaaagggtctgtttcacccagcccggaaagtcag

SEQ ID NO: 534521 - DNA, 87 bp, Homo sapiens
actgcatgtatttgtgttgttactgatgcagagatacagcaaaagagtctacatagttcctacaacagcagccagtacccctgatgc

SEQ ID NO: 534522 - DNA, 98 bp, Homo sapiens
gatgtctggtccttcggggtgaccctgtatgagctgctgacgcactgtgactccagccagagcccccccacggatcccatgacagattctgttgtcac

SEQ ID NO: 534523 - DNA, 98 bp, Homo sapiens
agactagcagatgttctgtacagggacttcaaggatgttgaagccgccttgcatgccatgaagaacgtggcccagctcatcaacgagcggaagcggag

SEQ ID NO: 534524 - DNA, 75 bp, Homo sapiens
aagaagctgcagccgcacctggccaaggagagagcgctgtacagcatggaatgtgcgttccaccccctgttcagt

SEQ ID NO: 534525 - DNA, 100 bp, Homo sapiens
gcccaggctgatgggaaggagcacccaggagctgaagggaccactgacatttagggatgtggccatagaattctctctggaggagtggcaatgcctggac

SEQ ID NO: 534526 - DNA, 115 bp, Homo sapiens
caccttcagagcgtcacggcgtacgccctcatggggaaaatctccccggtgactttcaggtttgcctcattccgaaatcagcacatgggaccaacccagcaagtgcccacatggc

SEQ ID NO: 534527 - DNA, 100 bp, Homo sapiens
aaggaggaggacaaagagcccctcatcgagctcttcgtcaagactgaacctccattgaatactccagaaaacagggaatatactgctgaaataatgtttg

SEQ ID NO: 534528 - DNA, 98 bp, Homo sapiens
aataaaaagattcccaggatgtgagcaacacgggaccggagaaataactttatttggactgagagctggagaatgagaataggacctgagagtatatt

SEQ ID NO: 534529 - DNA, 95 bp, Homo sapiens
gaagagtggattatttggtcactgaggaagagatcaatcttaccagagggccctcagcagcacaagccagcgaggaggcagtgtcatttcgccgt

SEQ ID NO: 534530 - DNA, 90 bp, Homo sapiens
ctgtgctcgcgctactctctctttctggcctggaggctatccagctgttatagttttgccgctggactcttccctcccttcccccacccc

SEQ ID NO: 534531 - DNA, 75 bp, Homo sapiens
tgcagtacctgcagaaggtctctggagacatcttcagcaggggcctttatcatctgctggactcctggattggtt

SEQ ID NO: 534532 - DNA, 75 bp, Homo sapiens
ttcggcgctgtgaggagctggagaagaccttcatgtcttcgagagaactctgacgtgaagacgcacgggcctttt

SEQ ID NO: 534533 - DNA, 98 bp, Homo sapiens
ctcagagctctcaagcatgaacttgcctttaagctgcaggacacagcattgttggttttgccatgtactattttacctatgacccgtggattggcaag

SEQ ID NO: 534534 - DNA, 101 bp, Homo sapiens
cgaaatgccctcacaccagacctacggagggagctggaaattcctgacgttcattgatctgcccccagtgagcctttgctgtgcaaattcgctgatggagg

SEQ ID NO: 534535 - DNA, 90 bp, Homo sapiens
cgggcactccacagattctgttgcgaaggcagccatctttagttcgtctttcctagagagtttcggagcaacatcccctgtcacctggtt

SEQ ID NO: 534536 - DNA, 101 bp, Homo sapiens
agacactgtttcacttgtctcaggccctgagcctgtgcaattatttcgagagtcaaaatgtggatttccgaggcaagaaggtgatcgaactgggtgcgggg

SEQ ID NO: 534537 - DNA, 51 bp, Homo sapiens
aagctaaaattggccgatgtgaaacgggtgaggcgctcaggcaagttctgg

SEQ ID NO: 534538 - DNA, 51 bp, Homo sapiens
gctaatgagatgattgaggcagccaagaaacttcagtgctctcaagaagga

SEQ ID NO: 534539 - DNA, 98 bp, Homo sapiens
aggacttaaatgaagccactgattagcaatttaaagatcctctccaaggtggcgacatgtctaagaatgtgagccagtcacagatggcaaaattgaac

SEQ ID NO: 534540 - DNA, 101 bp, Homo sapiens
gttggtggtgagatgacgaccttagtgctggataatggagcttacaacgccaaaatcggttacagccatgaaaatgtgtcacttaattcagtgcacaaatg

SEQ ID NO: 534541 - DNA, 83 bp, Homo sapiens
ctgcgcaaagccagcgtgaccatcgttgatgataattagaagcatgctttccactgaacttcccgacaacatttgttatgcag

SEQ ID NO: 534542 - DNA, 74 bp, Homo sapiens
cggagacaagctctgtccgcggagaggagtgggacaactcctaaagggagttctgggaaatcgttcattcattt

SEQ ID NO: 534543 - DNA, 90 bp, Homo sapiens
ctctgttctaagtgccttaagagaggatcgcccaatccacatgcttttccagctgacaggcctgtcagagtatacgccgatggaatattt

SEQ ID NO: 534544 - DNA, 90 bp, Homo sapiens
ggagctggttatccaacagaagcttctggtgcccaaagaatcttatgtgaggtacttggaaggctccatcgcccctgaagacaaaggaag

SEQ ID NO: 534545 - DNA, 100 bp, Homo sapiens
atcgttcgtctggtggccttttgtccctttgcctcatcccaggttgccttggaaaatgccaacgccgtgtctgaagcagcgtacctggcaggcgctggcc

SEQ ID NO: 534546 - DNA, 82 bp, Homo sapiens
ggactgcagccgcgagctcctggaggcggcgggatggaggcggcggccggcgcctgtgtctggcagagctggtgtgagacga

SEQ ID NO: 534547 - DNA, 75 bp, Homo sapiens
ttcctcatttggcctgagcagctcagagtcaggaagtcagagcgcagacaatgcagatcttcgtgaagactctga

SEQ ID NO: 534548 - DNA, 50 bp, Homo sapiens
ggacaaggccctgctctgcagcggttccaagttccccatcaagtggacag

SEQ ID NO: 534549 - DNA, 98 bp, Homo sapiens
cgatactgagcttcttcctatttgccatgggacctggtgtccaagatgctacacgtggatccccaccagcgcctcacagctaagcaggttctgcagca

SEQ ID NO: 534550 - DNA, 100 bp, Homo sapiens
ccctggtccatcaacagggacgattacgagctgcaggaggtgatcggttaccagccagtcttgtctggtcaacagggattccaaggcctaataggagtgc

SEQ ID NO: 534551 - DNA, 100 bp, Homo sapiens
ctgacaccagcacagcaaacccgccgggatcaaagtgtaccagtcggcagcatggatctcactgatgaaaaggcctccaggtttttcacctttccgatca

SEQ ID NO: 534552 - DNA, 83 bp, Homo sapiens
tgcaccttcgcaagaagcaccagttcaagtggccctcagggcatccccgttttcgaactaaagaatattctggacatgttgca

SEQ ID NO: 534553 - DNA, 80 bp, Homo sapiens
gattttgaaccttacttgagtccacaggcaaggcccgtcagtttaggggctggtgcaaaggatgagttgcacattgttga

SEQ ID NO: 534554 - DNA, 100 bp, Homo sapiens
tgcactgccgccgggagaagcctgctctagactccggctccaggggagagggctgggctccacagagaggagcagcctcatgttggcagataaattgaac

SEQ ID NO: 534555 - DNA, 76 bp, Homo sapiens
gggggatgctgcccatcccagtggcggctgccaaggagacgaatcatgtcaaccctgccatggacttcacgcagac

SEQ ID NO: 534556 - DNA, 51 bp, Homo sapiens
accttggataccctgctttgggatctagtgaaaagccatttgatgtatgcg

SEQ ID NO: 534557 - DNA, 83 bp, Homo sapiens
ccacggccgtctctggagagcagcagcaggttacgggcaggacttgagtggcttcggacagggcttctcagaccccagccagc

SEQ ID NO: 534558 - DNA, 50 bp, Homo sapiens
ccgatgaagtgcagaggtttttttctgagagaagaagaaggaggttcctg

SEQ ID NO: 534559 - DNA, 80 bp, Homo sapiens
gttaatgtcagggaaaaagttatcagttttatagagaatacatcaactcctgtggatcgataacagcgagaatcttggag

SEQ ID NO: 534560 - DNA, 75 bp, Homo sapiens
ctggctcctttctctacacaggagggaacgatcagcgttggagtagatgccaccgacctttttgatcgctatgat

SEQ ID NO: 534561 - DNA, 50 bp, Homo sapiens
cgaggtctatggccccatgaagagtgctatgcaggttattgggatcccgc

SEQ ID NO: 534562 - DNA, 100 bp, Homo sapiens
cttcattcagatgtggtggaatatgccaaggaaaaactggagagcttcatcaaaaatagtgatagctttgataaggacaggccttcagtatttggcatca

SEQ ID NO: 534563 - DNA, 140 bp, Homo sapiens
gtctttaggatttgcagctccaggaagcgagatgtcgaagccgccacccaaaccagtcaaaccagatgttcatttggatttggaagaccgcctggcaaaatttatgaagacagaagaagccattatatactcatatggat

SEQ ID NO: 534564 - DNA, 75 bp, Homo sapiens
catacaactgaccacccaatgcagtgcatattaacaagggtagattttggatgctgaaaacgccattcaacagat

SEQ ID NO: 534565 - DNA, 100 bp, Homo sapiens
gcgaggacttccggaggaagtgaggcttttcccttctgctgttgacaagacccggattggtgtgatgaatgcagactctgctaccattttggctgtttgg

SEQ ID NO: 534566 - DNA, 82 bp, Homo sapiens
ctcatcgtttgcgacgttccctcagcctctgcccaaagaaagaaggagacgttgagaaagaagggccttaatggctgtgaca

SEQ ID NO: 534567 - DNA, 106 bp, Homo sapiens
atggccatgttggcccagcaaatgcaactagccaatgccatgatgcctggtgccccattacaacccgtggatctagtgaaaagccatttgatgtatgcggtcagag

SEQ ID NO: 534568 - DNA, 83 bp, Homo sapiens
gcaaggagctaaagcagcgtgcgttcagccctgggggctgaaatctctttaatgatggagggaagcaggcagacgcgagtgtc

SEQ ID NO: 534569 - DNA, 75 bp, Homo sapiens
gagacggagaagttgcaaatggagcaacagcagcaactgcagcagcggcagggtctgcaagtggatgatgagatt

SEQ ID NO: 534570 - DNA, 75 bp, Homo sapiens
actggtgaacgcaggatgcgaccaggttcattggcatggaaaaatgttcagtgggaggattagagttgactgaac

SEQ ID NO: 534571 - DNA, 137 bp, Homo sapiens
gagtacccgggagtggtgcgtgatgtggctaagatgctgccgactctgggcggcgaggaaggcgtctcccggacaaagaaccggcgctgcaaactgctgcccctggtgatggctgcccccctgagcatggagcatgg

SEQ ID NO: 534572 - DNA, 74 bp, Homo sapiens
ctcgaagtgcgcaaacttgacactcaccctgaccggtgacagagttagtccttgataattgcctgtgtgtcaat

SEQ ID NO: 534573 - DNA, 74 bp, Homo sapiens
acgcgccgcacggatcatggccgcagccgctctggggcaggtggtgcagcggctgacgcggatggtggggaaga

SEQ ID NO: 534574 - DNA, 100 bp, Homo sapiens
cggggagccgagctggagctgccgcggcgcagccaggtactccaaagattcaggtttactcacgtcatccagcagagaatggaaagtcaaatttcctgaa

SEQ ID NO: 534575 - DNA, 100 bp, Homo sapiens
tcgtaatgcgactcaaagctgcacggcagtctgtttatgagtgatgtcttggttcgtgtccccactgctttctggaattatgtctggaattttattcttc

SEQ ID NO: 534576 - DNA, 75 bp, Homo sapiens
gaactcggagatgcctggaatacagtaagatgaaatttgtggaatctattctgagcaacaatacaacagatgacc

SEQ ID NO: 534577 - DNA, 74 bp, Homo sapiens
tccaacagacatttatagtatgtccacctgcgtttcaaagatatgaatgaagtctccaactttgttgatggttc

SEQ ID NO: 534578 - DNA, 75 bp, Homo sapiens
cctagatggaacacatgctctgatggcaagataacccctgtgacagaaggctactgttgctgtaacaaagggcat

SEQ ID NO: 534579 - DNA, 75 bp, Homo sapiens
cgaggatccgcgggagctgcccggcagggcggagcctcccctcgcagagaggaaaatatgatgttcccaagtggc

SEQ ID NO: 534580 - DNA, 100 bp, Homo sapiens
cgccgcgctgcgcccttcggccgcctacttcggcttaaagaaagtggttattgtacaggtcatgaaccagattccctggagttcagtactgtaggaggat

SEQ ID NO: 534581 - DNA, 100 bp, Homo sapiens
gagaactgctggaaggagactggatgatagaattgttgcagtgtaggattttggaagtcctccctccatcacatcaaaatggttttgctaatggacatgt

SEQ ID NO: 534582 - DNA, 100 bp, Homo sapiens
ggacagtgtccgctcaggggcctttggacatctcttcaggcctgacaatttcatctttggccctgggaggagcggggacactgaggacctctctccaaat

SEQ ID NO: 534583 - DNA, 100 bp, Homo sapiens
gaacaattgagcaagaacaaggtgacacatattctgtctgtccacgatagtgccaggcctatgttggaggcctccggtgtggctgtctctgatggtgtca

SEQ ID NO: 534584 - DNA, 100 bp, Homo sapiens
gccttccccaggcagtggaaccttcgggctcctgtttccaatacttatctacaggaatcgccatgaccccagctctgagggaggcaacagcaaagggtat

SEQ ID NO: 534585 - DNA, 130 bp, Homo sapiens
cggagcctcccctgcagcgactcggaagattcgaggcggcgggggacaagtcggcgccccagagcggacgagaggctaagaatattgtacacaaagattcttgatgttcttgaggaaatccctaaaaatg

SEQ ID NO: 534586 - DNA, 75 bp, Homo sapiens
tgaagcagttggagtgaagattggcaatccagtgccctataatgaaggccgacaagcaaagatggcctttgtcaa

SEQ ID NO: 534587 - DNA, 90 bp, Homo sapiens
ctgaggcccacgcagggcctagggtgggaagatggcaggtgggggcggcgacctgagcaccagacgaggacctattaaacttggaatggc

SEQ ID NO: 534588 - DNA, 100 bp, Homo sapiens
gagccaaggccaagctctccaagttcagcatccccaagcagggggagattcaaccctatgaaaagataaaggccaggggcttgcctgataatatatcttc

SEQ ID NO: 534589 - DNA, 82 bp, Homo sapiens
tgctgtccatgtatttcttcgtgctgggaatcctggccctgtcccacaccatcaggcatatagttggaaagagaggggacac

SEQ ID NO: 534590 - DNA, 75 bp, Homo sapiens
gcgggagagtgagagaaaggctggaagacgagaacagtccaggctctgcagacagcatcccacctgtcccagcag

SEQ ID NO: 534591 - DNA, 82 bp, Homo sapiens
cttagaggagccatttttccaggttgggaaggagaaaatgctcaaggtgaagattgtgaagattcatcctttggagaaagtg

SEQ ID NO: 534592 - DNA, 100 bp, Homo sapiens
gattataaagcccttcagaaatacgaaaaggagaaatttgaagagatgattcaacaaagaagaagaagttggatgggataccgagattaaggatgatgtg

SEQ ID NO: 534593 - DNA, 50 bp, Homo sapiens
ccagaggctgaagcccaagcacacatgtgggcgctatctccaactgtctt

SEQ ID NO: 534594 - DNA, 50 bp, Homo sapiens
ttatgttgataagttggctgaattaaaacaacatgaaccgtgaagaccgg

SEQ ID NO: 534595 - DNA, 87 bp, Homo sapiens
gggaccttaccgttgtcccaagcttccagcagtctgagcacaacagggagtggacatccgccataacaaggaccgaaaggttcggcg

SEQ ID NO: 534596 - DNA, 83 bp, Homo sapiens
ccgggggcgccatggcgaccggagcgaacgccacgccgttggttggaatcgaagcctcttaaaatggcagatgacttggactt

SEQ ID NO: 534597 - DNA, 83 bp, Homo sapiens
cagaaactcagccactggttgccttggtaggcaataaaagggcactatgaacgaagaggagcagtttgtaaacattgatttga

SEQ ID NO: 534598 - DNA, 100 bp, Homo sapiens
gagaggatgcagagctgcagttggatgaagcatcaacaacagcaacttgtgattggcggtgaccggatattcagttgcacatccccacatcaatgcactg

SEQ ID NO: 534599 - DNA, 90 bp, Homo sapiens
cgccgcagtcttcgccaccagtgttggataaatacaaccctccagaccacttcctccctgagtcctacacctgtttcttcttgctgaagc

SEQ ID NO: 534600 - DNA, 90 bp, Homo sapiens
ctgggccgcttcctgcaagaaaacaagcagcttctgcacgacgcactggcccaggacctgcacaagatcctaagtgtgaacgtgaagtcc

SEQ ID NO: 534601 - DNA, 101 bp, Homo sapiens
ggagaggggagccggaggaggatgctcctgcctcccagagaggggagccggcgaggatcaaaatcttcgaaggaggaaaatccaagagaggtcccaagcaa

SEQ ID NO: 534602 - DNA, 75 bp, Homo sapiens
gacgctggggccgaagcagcatgtgacaccgaccagttggacaactagtggtttgaagagccagggccgtctgtc

SEQ ID NO: 534603 - DNA, 51 bp, Homo sapiens
ctggctgatactacatattccagatgggaaacactactatgaagtatcctg

SEQ ID NO: 534604 - DNA, 100 bp, Homo sapiens
ttgacaccgaggagcacatctaccatctgaaggaaatccttgcacgaggaattcttcttccattaataaatcaactcagtgatcctgattatattaatca

SEQ ID NO: 534605 - DNA, 82 bp, Homo sapiens
tgctgcttcaatgtccgcatcgcaaccaccgccctggccatctaccatgtggcaatactgaacactgcgcagcttgcagagg

SEQ ID NO: 534606 - DNA, 82 bp, Homo sapiens
agtctttttgcactgggaagtcagattcccgatctgaatcaccagagccagggacagtctcatcgaactcaaggaatcttca

SEQ ID NO: 534607 - DNA, 51 bp, Homo sapiens
cacgtacctgtcctacttgaagtaccggggtttctatgttgcactgagact

SEQ ID NO: 534608 - DNA, 100 bp, Homo sapiens
taatctttaagactggtgggaggccgaggagtgaccttcctatttcctatacaagcaaagacattccatcatgtttacagcgggaaggacttaattgcac

SEQ ID NO: 534609 - DNA, 100 bp, Homo sapiens
gcaccgcgctgcagacgaagcccgcgcgtgatcccgctccggggcacacgtgtttcacgttgacaggtttgcttgggacgctagtaaccatgggcttgct

SEQ ID NO: 534610 - DNA, 100 bp, Homo sapiens
agccgccctgcctctgcaatttcaggacaaaataacaaccactcaggaaataaaccagtccattcccagaagttgcagaatcagttcagcaagaactaga

SEQ ID NO: 534611 - DNA, 85 bp, Homo sapiens
cctacagcaccaccagtattgccagcgtcgctggacaaggtgcaacgctggttgatagaggagataatacatatggaggaaagtg

SEQ ID NO: 534612 - DNA, 51 bp, Homo sapiens
aaagttgtgtcagtgaatacaaacaggttcgtcacaaggcatcgcagaagg

SEQ ID NO: 534613 - DNA, 75 bp, Homo sapiens
gtctggctcacctgggtaggcatatggaggcgctggagattgctgcaaacttgatgatgaggagtctgatgagga

SEQ ID NO: 534614 - DNA, 82 bp, Homo sapiens
gagccgccgcgcgcccgcgccctccgcgcgacgccagggagtgcatccgccccaacccttttccccctcgtctcctgtgaga

SEQ ID NO: 534615 - DNA, 75 bp, Homo sapiens
gtctacactgagtcggaggcgaaggtttattcttcagtccaaggaagcaattcacagtcagctgttagagaagca

SEQ ID NO: 534616 - DNA, 98 bp, Homo sapiens
gctggttcctcttggaaggtgcatctgcagtacaggatatgaagaaattgagggttcttgccatgtgggatggagtaggacctcttccagactgtgct

SEQ ID NO: 534617 - DNA, 100 bp, Homo sapiens
atactgtgaattatgcaagcacagatttgcttttacaccaagtctcattcaggaacgtcgcctgataacactgcaccaccacctccccctccaaggccac

SEQ ID NO: 534618 - DNA, 82 bp, Homo sapiens
ctcccctcacccaacgtcgtgctcaagaatgggacatggacgcccggcggccaatgccttttcagttcccaccctttccaga

SEQ ID NO: 534619 - DNA, 100 bp, Homo sapiens
cactctctgggggcaggtgggcccggtgacaggtacctgaaagaattccgcacagagcagtgcccactctttgtgcaacacaaatgcacgcagcatcggc

SEQ ID NO: 534620 - DNA, 75 bp, Homo sapiens
cggaagttcccagggagaaggcagcgcgttgtacccgagtggtgccaccgaacatcgcagaactgaagaatttgg

SEQ ID NO: 534621 - DNA, 95 bp, Homo sapiens
ggtgaaactcaagatccccatggacaacaaggaggtacggttcctggagcagcagaacaagatgctggagaccaagtggagcctcctgcagcagc

SEQ ID NO: 534622 - DNA, 100 bp, Homo sapiens
gaaggaacccattgtgggcagcactgactatggcaaggacgaagactctgctgaggatgttttagaagaatgtatgtctcttcccaagctatcttcttat

SEQ ID NO: 534623 - DNA, 96 bp, Homo sapiens
actatcttctcttcaccagctcttcagatcaatatgaaccatctgctgcagaatcccaggggaaaggcagcatctccgaggatgagctgatcaccg

SEQ ID NO: 534624 - DNA, 100 bp, Homo sapiens
gggcagtgccttctatgacatggccagaacccagaactagttgcccggctggagaagattaagatacagctggccaatgaggaatataaacggatcaccc

SEQ ID NO: 534625 - DNA, 95 bp, Homo sapiens
aaaccctgtctttcaggattcctgggacacagaggtgactctgacatcattagaagcatgccagaacagactggtgaaaagtaaaccttttcacc

SEQ ID NO: 534626 - DNA, 116 bp, Homo sapiens
ccgccgcgccgccatcatggacaccagccgtgtgcagcctatcaagctggccaggacaatgcagatcttcgtgaagactctgactggtaagaccatcaccctcgaggttgagccca

SEQ ID NO: 534627 - DNA, 100 bp, Homo sapiens
ccagctacaagaaaagttagcaatgatggaaagtggggtgagagactatagcaagcaggatgatgccaataatgacccacagtggtctgaggaacagctg

SEQ ID NO: 534628 - DNA, 119 bp, Homo sapiens
ggaaataaaaacagaacaggaggtggtagagggcatggatatctctactcgctccaaagctttcttcgggaagtatcttaatgaatacaacggctcctacgtgccacccggctggaagg

SEQ ID NO: 534629 - DNA, 75 bp, Homo sapiens
accttcacccagcatttcatccctcgtcgaaaggattggattggcatctttagatttcagaagctatctcctgag

SEQ ID NO: 534630 - DNA, 100 bp, Homo sapiens
caatgtgttgttttcaactgctctgatgggttggattatttggctttgggaaaattctttaaggttttgataacattgtactggctgggaagaaaagcac

SEQ ID NO: 534631 - DNA, 82 bp, Homo sapiens
caagacaacactcgatggctggaggcctctgttgtaggcaagatcaacaaagactcagacgatgccctgctgaagatgacca

SEQ ID NO: 534632 - DNA, 100 bp, Homo sapiens
aagcgtgaggagctcttcatcgtcagcaagggaatagaacgtgtccgggctgtggccaagcggattggtgaggtccaggtggcttgtggcctgaaccaga

SEQ ID NO: 534633 - DNA, 83 bp, Homo sapiens
ccgagagccgccgacatgaagaaagacgtgcggatcctgctggtgggagaacgtcagcccaaggccaaccccactgtcactct

SEQ ID NO: 534634 - DNA, 75 bp, Homo sapiens
ctctcaacttattcccttcaattcaagtaacagttcaacagcatgatcctttactgtgtgcccaagctgcggctc

SEQ ID NO: 534635 - DNA, 90 bp, Homo sapiens
ggaagatggcggccggcgaaaggagctggtgcctgtgcaagttgttgagatttgaagaccttgcttctcatcacccactggattatgccc

SEQ ID NO: 534636 - DNA, 122 bp, Homo sapiens
ggctcgggtcgttgtggtgcgctgtcttcccgcttgcgtcagggacctgcccgactcagtgttccagggtctccctccactgctgtagtaacccgggtccggggcctcggtggtgctcctga

SEQ ID NO: 534637 - DNA, 100 bp, Homo sapiens
cgagcccggacggcgcctctcgaacgagtgtgggcgcgaggcaggacagctggcctgaagctcagagccggggcgtgcgccatggccccacactgggctg

SEQ ID NO: 534638 - DNA, 75 bp, Homo sapiens
cgatgtgcgagaactgcgcagacctggtggaggtgttaaatgaaaattgtgcttcaagaagaccatagggaagaa

SEQ ID NO: 534639 - DNA, 100 bp, Homo sapiens
tattttgcctgctacgaaaagttaaaaaagacattgagtgatgtaatccaccctgggggcaatagccatattgccaatgagacccctggagaagcccgac

SEQ ID NO: 534640 - DNA, 83 bp, Homo sapiens
tggacattcagacttcagaatgcaacatgtcatggtttagtggcctcctggtccctaaagtggatgaacggaaaacagcctgg

SEQ ID NO: 534641 - DNA, 75 bp, Homo sapiens
ctagaaaggggtctgcgggcgcaggagctggggtccgcggtctggggccggtatcatgatattagctggtttgac

SEQ ID NO: 534642 - DNA, 101 bp, Homo sapiens
ggccctggacacagcaatatctctgggctttcacaggaaagaccacagcaagattctttcattcgtctcctcctagcctgggggaccaggctcgaactgac

SEQ ID NO: 534643 - DNA, 82 bp, Homo sapiens
cgctggctctgctgctgccgccggcgaaggaggaggcgttgccggagccagcagccacccccgcccagccaacacctcccca

SEQ ID NO: 534644 - DNA, 83 bp, Homo sapiens
tttgctccacgacatgtcaacttgtctagcctggttagctgcctctgtgtaatagcctgcagctggtgttttgagaagcccta

SEQ ID NO: 534645 - DNA, 100 bp, Homo sapiens
ctatcaggacatggagtatgaaagacgcaaagcagttgagagcttagctgaagcaggtggctctgaaatccagcgggtgaaagaagatgctcgaaagaag

SEQ ID NO: 534646 - DNA, 80 bp, Homo sapiens
gagaagcgccttcgctatctcatggacacaggtgttgtctacatctactggcctaacaaaaacagtgtataatccagctg

SEQ ID NO: 534647 - DNA, 82 bp, Homo sapiens
ttataattcagtggataaaactaccacagggtttcaggaaaaagaatgtagcattgttctgttttacagaggaagcctctac

SEQ ID NO: 534648 - DNA, 74 bp, Homo sapiens
gaactgataaaacccaccagtctaggtctctaattaacagaagatggcaaagcccagccacagcagctatgtcc

SEQ ID NO: 534649 - DNA, 82 bp, Homo sapiens
ggaatcccccgctccgagcagtgtcatgcccatcacaaataaccctatcgcagccgggaggctgcagagactgcaagtctgg

SEQ ID NO: 534650 - DNA, 82 bp, Homo sapiens
cccgaactaagcagggcggtcgggggttagctttatacgtctacgaatatttactgcacgtaggagcacagaaatctgcaca

SEQ ID NO: 534651 - DNA, 90 bp, Homo sapiens
gaagaaggcgagcagggtgcgggagagccccttgcagaagacgccgtacgagcagccattgtttgatgtcctgtgactgagaaaccaggc

SEQ ID NO: 534652 - DNA, 90 bp, Homo sapiens
agagcatccgcaaacattcagacaaaattggagagactgccatgaagcaaatatgaccacattctgaagtgggaactcttccagctggct

SEQ ID NO: 534653 - DNA, 100 bp, Homo sapiens
ccaattacctgtcccaggccctccaggcgggcactgtgtggcccattggaactacttcagtttgatcacgggcagtcaaatccaacttactacatcaggc

SEQ ID NO: 534654 - DNA, 74 bp, Homo sapiens
agcgatgttaccattgtgaaagaaggttgggttcagaagagggatgagattgtggggaacctgggtgaaggcac

SEQ ID NO: 534655 - DNA, 89 bp, Homo sapiens
ttcctaataaccagctaagcaaaccagacgcactggtcaggtcagaaaaagagtgcacgccagtatcacgtacagttctttggtgacgc

SEQ ID NO: 534656 - DNA, 74 bp, Homo sapiens
gtgcccagatgctcataaggattgtcctctttctacaaaagaccaaacctggaccacccaaaaagccgaagacc

SEQ ID NO: 534657 - DNA, 82 bp, Homo sapiens
cgcgggcgagcggctgtgtggatgtcggcgaagccgcgggcgaggacactcatgaggaccatgatacttccactgagaatac

SEQ ID NO: 534658 - DNA, 75 bp, Homo sapiens
tccgccctaatggaggtctccagtttcgatatgttgatgatgtgatcagccgcattgacaggatgtttcctgaaa

SEQ ID NO: 534659 - DNA, 100 bp, Homo sapiens
ctttgagctcaaggcccagttcagccagatcctggaggaaaaatatattcagggggaagagatgtaatagatttcacattatggcagttactaaagaagc

SEQ ID NO: 534660 - DNA, 98 bp, Homo sapiens
ttggatccatttggcttttccaggcaaacccaccacgagtagctcagaagcatgtcgcttctgtggttccaggagtggaacagagttatctgctgttg

SEQ ID NO: 534661 - DNA, 83 bp, Homo sapiens
gaagatctggaagacgcgctcctgcgccgggggatatgagactttctactcggaatatcctgagtgttgcgtggatgtaaaac

SEQ ID NO: 534662 - DNA, 89 bp, Homo sapiens
ccagattaaaaattgaccgaaacccttttgctaaaggattcagagattctgggagaaacagataactcaattctatgggataatagggc

SEQ ID NO: 534663 - DNA, 98 bp, Homo sapiens
ggatttccagccagagctgagcggcgcgggctccagactcgccgtggtcaagttcaccatgagagggaggagttggagcacctgaaccaggccagcga

SEQ ID NO: 534664 - DNA, 98 bp, Homo sapiens
tgccgagttacgagtcggcgaaagcggcgggaagttcgtactgggcagaacgcgacgggtctgcggcttagggtgatgagaagctacaaggcgaccat

SEQ ID NO: 534665 - DNA, 90 bp, Homo sapiens
aaacaaatcttcaaagggaaaacatttatatttttgaatgccaaacaggttcaaaccttgtactactcagctgatcacaagctgcttgat

SEQ ID NO: 534666 - DNA, 75 bp, Homo sapiens
aagatacgaggctctaggagaggtgctcctgacctctgataaagctgcagccaatttctcagatcgttctttgct

SEQ ID NO: 534667 - DNA, 87 bp, Homo sapiens
gaggtggcagccatctccttctcggtaaattcgaaccaccattatttcacccgaatgtgtacccttcggggacagtgtgcctgtcca

SEQ ID NO: 534668 - DNA, 98 bp, Homo sapiens
ctttgacgatatttgggaacctcgctattcacactggaacagtgaaccatggagctgtatttcggtgaatatcaacatgtgcagcaggaatatggggt

SEQ ID NO: 534669 - DNA, 75 bp, Homo sapiens
cagctctcgagtcttgtgttgtcatggtgaactgaagaacaatcggggcgtggcatctctggatccagctggttt

SEQ ID NO: 534670 - DNA, 75 bp, Homo sapiens
cttcagctcatcttaggctgtgctgtgaactgtgaacagaagcaaggtatggagagtcggcttgactacactgtg

SEQ ID NO: 534671 - DNA, 75 bp, Homo sapiens
ccgagggccccgagcccgagcgccccagcccggcttgcgcgatctctggcctcttcaactgcatcaccatccacc

SEQ ID NO: 534672 - DNA, 75 bp, Homo sapiens
cagacagcatatttgagtcatttccttcgtacccacagtgcttcatgagaggagtttaccgtgaagaagctgact

SEQ ID NO: 534673 - DNA, 100 bp, Homo sapiens
gtcgtcttgatccgcatcaatgatgggggtcggccacccttggaaggcattgtttctttaccaggtactgggcctaatcgctacgtgcctctttggctat

SEQ ID NO: 534674 - DNA, 82 bp, Homo sapiens
aaaaatcccatctaccgcaactctcagttcgagagtaaagatgccatggacaatattaccaggcagaaccaattctacgata

SEQ ID NO: 534675 - DNA, 73 bp, Homo sapiens
acctgaataaaggcatcggaatgggaaacataggtcccgcaggtataccaagcttggctacgcaggcaacact

SEQ ID NO: 534676 - DNA, 98 bp, Homo sapiens
actttggtgccctcaacatctctcagagacgaaaggaagtacatttgaagaacgcaagtagagggagtgcaggaaacaagaactacaggatgtaggaa

SEQ ID NO: 534677 - DNA, 83 bp, Homo sapiens
ctctcatctcgctcggctgcgggaaatcgggctgaagcgactgagtccgcgatggagcatcccagccatcactcttccacctg

SEQ ID NO: 534678 - DNA, 82 bp, Homo sapiens
catcaactggggatgattacagttcttcctaaaaaagaatcttctgctgactctcaacttttcctggaaaaaatggatcatt

SEQ ID NO: 534679 - DNA, 100 bp, Homo sapiens
ccaaaagaccatcctgctctcaactacaacatcgtttcaggacctgcaggctgggacaatgaaaagaaaatagctattttacatgaaaattttacaaccg

SEQ ID NO: 534680 - DNA, 100 bp, Homo sapiens
attagagacaagcggtcagcagagcctcagtgctgatcgtcggagcttgggagcaggaagatgtcgaatgaacttgagtcctaaagaagacgaagagaag

SEQ ID NO: 534681 - DNA, 75 bp, Homo sapiens
ctgcagccgcctgaccacggcgactggacttacgaggagcagtttaagcaggcaccgtctgcgtcctgctgtcct

SEQ ID NO: 534682 - DNA, 75 bp, Homo sapiens
gtcagctacgggaattcagtactctgtaacacccagctaccagattcgtattttacatggagaagtgaacaaagt

SEQ ID NO: 534683 - DNA, 98 bp, Homo sapiens
cccaaccccagcagcacctcctctccctaccccctccctgaggaaattaggaacctgttggcagacttaattcagtgcacaaatgagatgaatgtgaa

SEQ ID NO: 534684 - DNA, 128 bp, Homo sapiens
agggtcgacatgttaaaacgggtcagttggcagccatcaaagttatggatgtcactgaggaacaggaaatatagtggtcattatgattagctatccaaaaggaagagaaattttggagctggtgcaaa

SEQ ID NO: 534685 - DNA, 74 bp, Homo sapiens
gggccttactccttcacagatcggatctgcctacaaactggtttgctactttaccaactggtcccaggaccggc

SEQ ID NO: 534686 - DNA, 96 bp, Homo sapiens
gaaaaattcaagaagttgaaaaacgcttttcacgtcacctggagagatgcacagtgtttatgaacctcagttgcagcaccatgtggctcaaaagaa

SEQ ID NO: 534687 - DNA, 100 bp, Homo sapiens
ggtggacctgcaggacctgcccagcgccaccatcgcctgtcacctggacccgcgcgtgttcgtggacggcctgtgccggacggagtctcggtctgtcacc

SEQ ID NO: 534688 - DNA, 100 bp, Homo sapiens
ctgctgagtcccagcagcctcttctctgccctgcacaggtgaaaacaggagtcataatgaacataattggagtcttctgtgtgtttttggctgtcaacac

SEQ ID NO: 534689 - DNA, 100 bp, Homo sapiens
caacagctccctgctcggaggcggtggcggtcttgatgcagaactttattatgtgagaaatgaccttattagtcactacgctctatcctttagtctgtta

SEQ ID NO: 534690 - DNA, 74 bp, Homo sapiens
aaagttgctggatcagtgcgagaaccaggagctcgaggacctgaaggagaagaaggagaaggtggaggagaagg

SEQ ID NO: 534691 - DNA, 100 bp, Homo sapiens
ggatggtgccacaggaggctgtgcgggccccgctccgcttcgaatgggttcgatacaagaggctgttttcctagcgtggcttgctgcctttggtaagaac

SEQ ID NO: 534692 - DNA, 99 bp, Homo sapiens
aggtttttatccaaaatgtttcatccaaatggttggttaaatctagacttaagaggctctgctcctcagaagttggacttctgaaaaatgctgaacgag

SEQ ID NO: 534693 - DNA, 82 bp, Homo sapiens
ctgggagagctaggatggaaaacatatccattaaatgggtgtggcaaaggagcagagaactttgacaagttcttcacacgag

SEQ ID NO: 534694 - DNA, 100 bp, Homo sapiens
ggctttgatcccacacagtgatcagagattgcgccctcagcgaacgaatgagaggccacacgtatgtgagttctgcagccacgccttcacccaaaaggcc

SEQ ID NO: 534695 - DNA, 132 bp, Homo sapiens
tgaaaagaaacagatggttgcaaatgtggagaaacagcttgaagaagcgaaagaactgtctaacaaagtgccagtggtgcagcaccctcaccatgtccaccccctcacgcctcttatcacgtacagcaatga

SEQ ID NO: 534696 - DNA, 100 bp, Homo sapiens
ccggcctgcagcacccgccaccgtcgccggccgcccgcacgtccgtccgtttttggctttcacccccaaccagtgaccaaagacttgaccactcaaagtc

SEQ ID NO: 534697 - DNA, 98 bp, Homo sapiens
agcgttgcagctgtggaaggagatagaaactcgacatcctggctgttacaacttctaaatgggaattatttgaccagcatgaagaatcagaagaagaa

SEQ ID NO: 534698 - DNA, 100 bp, Homo sapiens
atatgtgcaggatcaagttgcggcaccttttcagccaactctctgcaaggtcctaagggttctaagttgaataaggcccactccctcccttccaggactt

SEQ ID NO: 534699 - DNA, 119 bp, Homo sapiens
agacggcgctatgtacgccctcttcctcctggccagcctcctgggcgcgggacaagggtgtcccccacctgaagacggcaagctgggtcctgagtgatgcccctcagctgagtgtccaa

SEQ ID NO: 534700 - DNA, 74 bp, Homo sapiens
gtatgagaaggacaacacctacttagaaggcgtccagctcagcgcatgaaggtcgcctcagtgacccacagctc

SEQ ID NO: 534701 - DNA, 98 bp, Homo sapiens
aggagcatctacccatggacagacatgtcttcccatggagtgtgcaggatgacagaattcgagtcgaaaggatggataacatttattttgaatacagc

SEQ ID NO: 534702 - DNA, 75 bp, Homo sapiens
tttcagagcccggcaccacccatcttgagtatctggctcatatctggtgttagtcggccagatgaggtgctcgag

SEQ ID NO: 534703 - DNA, 98 bp, Homo sapiens
cactgtcctctaacgccatccgcgaggtgaaatgacaatggatgctctgttggctcgattgaaacttctgaatccagatgaccttagagaagaaatcg

SEQ ID NO: 534704 - DNA, 100 bp, Homo sapiens
gaaggtgatgcccaagatggaccaggactcacaccacccggcaagaactgctcactacggctccctgccccagaagtcacacggccggacccaagatgaa

SEQ ID NO: 534705 - DNA, 100 bp, Homo sapiens
gtcttcttaatgaggctcagggatgcctgtaccatgatgtgatgctggagaccttgacacttatatcctccctgggtggtgtcgggtttgacatcaactg

SEQ ID NO: 534706 - DNA, 83 bp, Homo sapiens
ccctcatccagctgatgcccttcttcgtgtgtccctggccagtgtccttccacctgtccacaagcatggggaacatcttcgcc

SEQ ID NO: 534707 - DNA, 50 bp, Homo sapiens
gtccgttctctcaggctcccgttcaggtgtcccgacccaggctaagcttg

SEQ ID NO: 534708 - DNA, 88 bp, Homo sapiens
gctgtggtacttctcgcagtccccgcgcgtggtcatccagccatcccaggcctcaggacctgagttctccgacgcccacatgacatgg

SEQ ID NO: 534709 - DNA, 100 bp, Homo sapiens
gaaagtagggcatccttcacccatctgaagggaggaaatagtggcaggtgacagtctgcatgtgcagttttcagagtcatgtgctgttcctggggcttgg

SEQ ID NO: 534710 - DNA, 100 bp, Homo sapiens
aggtacatctagcacagctcactgcagcaactttgacaaaactggaagaatttcgcagtaagacagcaacaggtggacgtctgatttatgaagctcccca

SEQ ID NO: 534711 - DNA, 73 bp, Homo sapiens
gtgaacctggcatatctgggcgccaagccgcggagcctccagacgggatgccggctccaggagcagcagtgga

SEQ ID NO: 534712 - DNA, 52 bp, Homo sapiens
caaaatgtggccacagcttttgggaaacctcaaatgaattctgaaggggaga

SEQ ID NO: 534713 - DNA, 75 bp, Homo sapiens
catcacaggactccccagagatgccaggaaggagactgtggagagccacttccgaggtcatgacgccagtcagat

SEQ ID NO: 534714 - DNA, 100 bp, Homo sapiens
gcagtggacacacagcatggagaaatccttcgcaatgtcaccatcctacgagccttggaatggatggctttggccaaccagttggcattcttggacgccc

SEQ ID NO: 534715 - DNA, 101 bp, Homo sapiens
atgtctggggctgtccctgctgcagcagcccaggagtttgatgaaggccggaacaactttgaaggggaggtcaccaaggagaacctgctggactttatcaa

SEQ ID NO: 534716 - DNA, 83 bp, Homo sapiens
cgtctctgtccccatctggttttaggttgtgaccgagattcccgacgagagagactgaggggaagagaggaaggaggggcggg

SEQ ID NO: 534717 - DNA, 75 bp, Homo sapiens
gaaagctgtgaaagttctcaagggttcccttctggagaagagtcaccgggtttggttctgtttcccctttctgct

SEQ ID NO: 534718 - DNA, 87 bp, Homo sapiens
tgaaccacagcaagttcatggtcacggagaaggcagcctacatagctcggcaagatgtcggtgaaggagggcgcacagcgcaagtgg

SEQ ID NO: 534719 - DNA, 74 bp, Homo sapiens
ttcagagccttggaagtcaacactgtcagtggagcatgaccccgcccatggtgaacgcctactactcgcccacc

SEQ ID NO: 534720 - DNA, 89 bp, Homo sapiens
tgctcgcagaattaccgcctcttctttaaggggtgtttgatgcttccctcaaaatggctggcttctatggattgtatacctggctgact

SEQ ID NO: 534721 - DNA, 89 bp, Homo sapiens
gccgcgagcagagccgcccagccctgccagctgcgccgggacggaaacccctcctggagtttccccaaagccatggacagccctagtct

SEQ ID NO: 534722 - DNA, 98 bp, Homo sapiens
ccggcccggcgcggcccagcgccctcagctgtcgcctggttgggcccggaaatgggacgtcgcgctttctcagggagcgtagaagcagccagggcctc

SEQ ID NO: 534723 - DNA, 112 bp, Homo sapiens
cgggaagtgtgaagcggccaatggcacggaggcctgcgtgcccactgctcagtggagcgtggaggacgaggaggaggccgtccacgagcaatgccagcatgagagagacagg

SEQ ID NO: 534724 - DNA, 83 bp, Homo sapiens
gcagaaggtctctggagacatcttcagcagggttgtgagtcccggcccagcccctccacccccctgcccccccgatgcgacca

SEQ ID NO: 534725 - DNA, 100 bp, Homo sapiens
ggatcaacggagagctgacctcagctgacagagaaacagcaggtttccaatacttatctacaggaatcgccatgaccccagctctgagggaggcaacagc

SEQ ID NO: 534726 - DNA, 88 bp, Homo sapiens
gggagtcgctgacgggcacgctgactggaggctggcggacaggcgacagcgacctgcggcagaaacctgtttggaggttatggatgat

SEQ ID NO: 534727 - DNA, 145 bp, Homo sapiens
cttcgattgaagcacatcgaccggcgacagcagccaggagtcatgagcgacagcggcgagcagaactacggcgagcggggccgttgctccagggagaactgcaaatatcttcatccacccccacatttaaaaacgcagttggaga

SEQ ID NO: 534728 - DNA, 100 bp, Homo sapiens
ctcggtggaggcgtacatcactgtcgtctcatgggagaaagacactgtttcacttgtctcaggtaaacgcaaagcactgaagttgaattttgcaaatcca

SEQ ID NO: 534729 - DNA, 100 bp, Homo sapiens
gaaagggaagaaggcgcggtggcaggagctgacagagtgatgggaaacgcgtgagccaggccgagaggaaaagaaagctgcattggaaaaggagcgagaa

SEQ ID NO: 534730 - DNA, 100 bp, Homo sapiens
aggcacacccggaagcggaggcggctggtgtgagcagcagaaacgggctgtaaaggcagaaaaccacgtcgtgaaactaaaacaggaaatcagtttgctc

SEQ ID NO: 534731 - DNA, 82 bp, Homo sapiens
atggagacgcacccagagaaagaggctcatcactgtcagctcctctcgggctcttggaccactgcctccttccccttctcca

SEQ ID NO: 534732 - DNA, 115 bp, Homo sapiens
agtgccagagtgaaagccagaatggcatccagagagaggctctttgaactttggatgctttattgtacaaaggaggcaaaaccttcaactgaggacttgggggataagaaggaag

SEQ ID NO: 534733 - DNA, 137 bp, Homo sapiens
actttagtatcaatatctgctacaacatcacattttcatgcatcattttttcaaaataggtttgctaatccagactttacacaacctatctcagaagttgtagatgaagtaattcagaattgtcctattgatgtcag

SEQ ID NO: 534734 - DNA, 96 bp, Homo sapiens
aaatctggaacgggtggccgattactgcgagaacaactacatacaggtgcaatggatgagcttcatagtctggatccaagaaggcaagagttattg

SEQ ID NO: 534735 - DNA, 75 bp, Homo sapiens
cgcagagtggataaagaactgggagaaatcagggagaggcgaatttactatactggcaattgctggagaagattt

SEQ ID NO: 534736 - DNA, 100 bp, Homo sapiens
tgtgaagggatggagtatctggagagaaacagcttcatccacagagatctgggccggtgcataaacttctcccgagttccatctcagtaaaagggaagca

SEQ ID NO: 534737 - DNA, 100 bp, Homo sapiens
ctgaggaagtctgcatccacattgcacataaagttggacatagagacactgcatattttaccaaggctttgactggaatggcatgctttcaaatataaac

SEQ ID NO: 534738 - DNA, 106 bp, Homo sapiens
gtccgtggcttcggaggcaagtttggtgtccagatggacagagttgatcagaatgagctgaaagccagtggtggcgaaatcaaaattcataaaatggagcaaaagg

SEQ ID NO: 534739 - DNA, 74 bp, Homo sapiens
gacggcgatccgggcgctcgagacttaccagagccacaaggtgactgccaacagccagcccaatgtcgaatcca

SEQ ID NO: 534740 - DNA, 100 bp, Homo sapiens
agaattgcctttgggactctgaaggctgaagctccagaaacatgacaaggaggactttcctgcctcttggagatcagaggaggaaatggcagcagaagcc

SEQ ID NO: 534741 - DNA, 100 bp, Homo sapiens
cgagcacctctccgcgcacatcactcccgagtggaggaagcaatacatccagtatgaggcgcttcggcacaaaatgcacggcctgccagcagggtatccc

SEQ ID NO: 534742 - DNA, 98 bp, Homo sapiens
gaccggagactttggggcctaactaggaactgcaagcacatgttgaccagataactgaaatggcagcagtaatgaggaaagccattgaaattgacgag

SEQ ID NO: 534743 - DNA, 90 bp, Homo sapiens
ggccgccgcgccaccatctttcgggctgccgagggtgttcttgacgattaatcaacaggcatgtgaaactattgaaccttcctgctagcc

SEQ ID NO: 534744 - DNA, 98 bp, Homo sapiens
tgcctcggcggagcagaggaaccacacgctgatcatggacacagcaagaggcaacattttggaagcagagggcaactctcactggaaaccaaatctcc

SEQ ID NO: 534745 - DNA, 90 bp, Homo sapiens
cagattcgcagtggtcgcttcttctccttggtctcattcaggaacgtcgcctgataacactgcaccaccacctccccctccaaggccaca

SEQ ID NO: 534746 - DNA, 102 bp, Homo sapiens
tctggcggttgtgatggccttattgagcctgcactgcttagcagcctttaaggtctaacttcaaacttgtggctgttaattcaaaactctatgccatcggag

SEQ ID NO: 534747 - DNA, 90 bp, Homo sapiens
gctgcctctgtgtacgctgaggggggagtgaaagcaagttgaatacattggtgcagaagcttcatgacttccttgcacactcatcagaag

SEQ ID NO: 534748 - DNA, 100 bp, Homo sapiens
gggggctcagagatccaagtgcgcgccctggcgggtccggaccaaggttgatccaactaatggaagaaataatggctgaaaaggaaaacaaaacaataat

SEQ ID NO: 534749 - DNA, 113 bp, Homo sapiens
gaaatacctctacagagatgtgatgctggagaactacatgaacctggcctctgtgggacttcctcgttctgcccatcttcctaacaaggctatggctgataacagcagtgatg

SEQ ID NO: 534750 - DNA, 90 bp, Homo sapiens
agctcgtaaatcccaagagttacaggctggacgtaaagaaagaagtgatgcactcaattctgcaatagataaaatgaccaagaagaccag

SEQ ID NO: 534751 - DNA, 50 bp, Homo sapiens
cagaaacagaaacgattgtggaaacagaagcctccccagctttctgagga

SEQ ID NO: 534752 - DNA, 99 bp, Homo sapiens
tgcctgcgctggtcctcagcaccagaatatgtggatcgagagaaccatatatacaactgcatataaattacctggaattttaaggtggtttgaggtcaa

SEQ ID NO: 534753 - DNA, 100 bp, Homo sapiens
aaggcattgtggaaacaactgatgggtctaggaaagacaatccaggcaattggaattacttacttctataaagaggaatggcctctgttaatagtggtcc

SEQ ID NO: 534754 - DNA, 50 bp, Homo sapiens
gtcggagcctcatggccttttcggtcatctccgcggtgtcgaggctctcc

SEQ ID NO: 534755 - DNA, 75 bp, Homo sapiens
gcgctgtgatgcctgcagagctgtggcttaccaggttttggcacaaataccagtgggaatagtatttttggaagt

SEQ ID NO: 534756 - DNA, 74 bp, Homo sapiens
cgtggtcgcagctactctagaggtggtgggtctcaacttctccagtgctactactccagagctgcttctgaaga

SEQ ID NO: 534757 - DNA, 100 bp, Homo sapiens
acatttacttaacacatcatgaaggctagtttggatgtggaggggaatagactccatctatccatatgagatatttggagttcttacaacatggcagaca

SEQ ID NO: 534758 - DNA, 101 bp, Homo sapiens
cccacgctgttccggttggcgagtgacaccactgatgacgatgatgcactcgatcagtccaaagtgtttgtgaaggtgtttactgaaattgaccggatgcc

SEQ ID NO: 534759 - DNA, 100 bp, Homo sapiens
accctcatcaagggcctgcagcggctggagtacagaggctacgactcggcaggacttaaacaggcacaatcaaaaccatctcagtcagaagtcagagcgt

SEQ ID NO: 534760 - DNA, 112 bp, Homo sapiens
acggggcgcgcgcgaagcgagcgagaaggcacggagtcgccgcggagcgcaggttttaaaatcaaagatgggaaaatcggagaaaattgcccttccccatggccagcttgtt

SEQ ID NO: 534761 - DNA, 100 bp, Homo sapiens
gctgaggccgagaacaccattgaccagctacgcctcggggccaaggatcttcaagatgaagttcaaagggagaatactaatctgcaaaaactacaggccc

SEQ ID NO: 534762 - DNA, 73 bp, Homo sapiens
tcccatcttggggtctcctgtctattctatgcaaaatggtccagtaacaccacctatgccaccgccgccgccg

SEQ ID NO: 534763 - DNA, 75 bp, Homo sapiens
ctcctcgccagcagccgtccggagccagccaacgagcgccccacaccagtgagaagcatcagcaccgtgaacttg

SEQ ID NO: 534764 - DNA, 100 bp, Homo sapiens
gtcttcagtggttctcgtctcaaactctatttgccaaaggaaacttgccttatcaccttcttgcttgcagaagacaatagatgtgcatcttcaaatgcag

SEQ ID NO: 534765 - DNA, 98 bp, Homo sapiens
aaaagtgaaattaaataggaagatcatcagtcaaggaagacccactggagaggaattcttcgtactccagacactatccgtcggttccagagtgtccc

SEQ ID NO: 534766 - DNA, 100 bp, Homo sapiens
gcttcctgaggaagcgcgggcggacgacagaggatgccgaaccactccagctcgtggtcccaagaagcatctgaagcgggtggcagctccaaagcattgg

SEQ ID NO: 534767 - DNA, 75 bp, Homo sapiens
gcgctgcctacggaggtggcagccatctccttctcggtcacagctctcatcaagctgaaggagtgtgaggatacc

SEQ ID NO: 534768 - DNA, 100 bp, Homo sapiens
ttacctaggaatgagagggacaggagtatctgaggatggagaactcagcagttggccttcattccacgatgtgatcaattctgaggcaatcacattcaca

SEQ ID NO: 534769 - DNA, 98 bp, Homo sapiens
gaccattgagaagttcgagaaggaggcggctgagacttcccaagtaagaagcggaagaggagccgctggaaccaagacacaatggaacagaagacagt

SEQ ID NO: 534770 - DNA, 75 bp, Homo sapiens
agattgggcaagagaagaattcagaagaaacaaaagtgccaccgaagagaggaggctgcggaggaggaggaggaa

SEQ ID NO: 534771 - DNA, 90 bp, Homo sapiens
ttccagctgggcctgacagagaaggctcactcaaggatcagttggctttagcaattggatgtccttacggacctgtcagcggagagtgag

SEQ ID NO: 534772 - DNA, 50 bp, Homo sapiens
ccacattcctgtgcattgaggggtctgcccaagatggaggtgtttcagga

SEQ ID NO: 534773 - DNA, 104 bp, Homo sapiens
ctagttgtgcgcttggccgcgagacactctggcagttataggaacacaaagacaatgcagatcttcgtgaagactctgactggtaagaccatcaccctcgaggt

SEQ ID NO: 534774 - DNA, 82 bp, Homo sapiens
gaggggccgcgatggagctgggggagccgggcgatgggacccaggtgagcccgggtgcccactactgcagccccactggcgc

SEQ ID NO: 534775 - DNA, 75 bp, Homo sapiens
aataccacgacaaaaccaccctagttttaaaatcaaagatgggaaaatcggagaaaattgcccttccccatggcc

SEQ ID NO: 534776 - DNA, 75 bp, Homo sapiens
acctcctcctttaccccagaacctcctttacacagtatcagaacccaacacttctacactgctgaaaaattacca

SEQ ID NO: 534777 - DNA, 50 bp, Homo sapiens
gcagcacattctggaagtttggagaacccagtgacttgattgtaaaaatt

SEQ ID NO: 534778 - DNA, 101 bp, Homo sapiens
gcatactctaaatttaaacagctatttctgataggagtcctttggaacctctcctcatgcgatgcactcaaaatgccaatcatccaggatgccctagcagt

SEQ ID NO: 534779 - DNA, 82 bp, Homo sapiens
gctcctttataatgcatgtcaggttactcactataaacaatatccacccaacacaagcaaagtttattcctactttgaatgc

SEQ ID NO: 534780 - DNA, 83 bp, Homo sapiens
cctggaatggcaagcgcagcaacaacagagagcacgtggtgcatctgcagacgcagcaggaggtgaagctgcgcatgacgggc

SEQ ID NO: 534781 - DNA, 74 bp, Homo sapiens
cctggaatcgcccaagtccctctactcgcgagacccttcctggatatggtgtaccacgcgctggacagcccgga

SEQ ID NO: 534782 - DNA, 90 bp, Homo sapiens
ggcgagcgggtgcgtctgccgcagagtcggcacctgaaggacatggagactacgcgtttgttcacatggagaaggaagcagatgccaaag

SEQ ID NO: 534783 - DNA, 100 bp, Homo sapiens
tttgcatccggagagtggacaagaaagtgcaatggatgagcttcatagtctggatccaagaaggcaagagttattggaagctagatttactggagttgca

SEQ ID NO: 534784 - DNA, 134 bp, Homo sapiens
tcaggttacttcttcctcaacaccagcaccgcagatgttgtcaaggtggcctaccaggaggccaggggtgtcgccatgtgggctcgggatgagtttgaaggcctcttcaagcagccagcagaaaatgtcaacca

SEQ ID NO: 534785 - DNA, 100 bp, Homo sapiens
aaaagaagtgttaagaattgcctttgggactctgaaggctgaaggacatcaatgcaagcttgaataagaaaaacaaattcttcctcctaagccatggcat

SEQ ID NO: 534786 - DNA, 100 bp, Homo sapiens
caaaaatcttaaccttcaaccatctggggaaaaggcaaaaatcccatctaccgcaactctcagttcgagagtaaagagtgtgaacatggctacgcctctt

SEQ ID NO: 534787 - DNA, 99 bp, Homo sapiens
gtcacagctggatgtttgcgacatcccagagagcttccagatgtttgggaaatgggaagtaatgacagctggcacctgaactaagtacttttataggca

SEQ ID NO: 534788 - DNA, 74 bp, Homo sapiens
tggcagatggcttatgaaccacagggtggctttgtccactatggtgaagtgaccaatgactttgtcatgctgaa

SEQ ID NO: 534789 - DNA, 75 bp, Homo sapiens
gacaagcacacactatggcgctgaaacggattaataaggttcattttccagacactgaaagagcagaatggctaa

SEQ ID NO: 534790 - DNA, 100 bp, Homo sapiens
cccacagtgggggtgtgcaaacccgagagaactgggaaaacgtccctttggtgtttcattgctgtacattggctgggataagcactatggctttcagctc

SEQ ID NO: 534791 - DNA, 98 bp, Homo sapiens
ccccgcgctccgccccggcctagggccttgccccgggagcccgcgaggcatctgggctgatgggccgtaccctgcaccgtgagccacccgcaggagac

SEQ ID NO: 534792 - DNA, 100 bp, Homo sapiens
tgcaccgcctgctgggagcgccgctcaaggacgtccccaccaagctcgtggccaaggcagtgccgctgcccatgacggtgagaggccactggttcctgag

SEQ ID NO: 534793 - DNA, 100 bp, Homo sapiens
cgccgctctccagcccgcttgaacgtattctaccttgtaaatactgttatttgtatatactgtaaatgatgacatcggtgggcactaaccgagcccgggg

SEQ ID NO: 534794 - DNA, 100 bp, Homo sapiens
ctctgcagcaagaggaaaggaaagatgtgttcgggtttttctagaacacggagcttatatcaaaggtgggtggatccttaggaaagcctggaagatttac

SEQ ID NO: 534795 - DNA, 100 bp, Homo sapiens
agaacggcagtttgaatcggtgctgaacaggaacaagttccagttccagtctaccacccaacacctagccagactcggctagcaactcagctgactgaag

SEQ ID NO: 534796 - DNA, 80 bp, Homo sapiens
cagcctgcggagcctgtggggcagcaggaacgaatttcatatacacctccagagagcccagtgccgagttacgcttcctc

SEQ ID NO: 534797 - DNA, 75 bp, Homo sapiens
tggatcagatctgaatccagaggctctcggaggaagagctcaggagatgggacgaggagctggccgccttcgcca

SEQ ID NO: 534798 - DNA, 50 bp, Homo sapiens
ggcctaacggaattacacttggcgagtttataccgaggtggctacagccg

SEQ ID NO: 534799 - DNA, 74 bp, Homo sapiens
ttcgcccctgaagcccctcagcgactcagaccctgacagtgacaaagcctctggacgagaccagccagatgagc

SEQ ID NO: 534800 - DNA, 101 bp, Homo sapiens
cctgcgcattgggaggccgaagggtccccgggacccgcctgctgagtggacccgggtgggtaggttcaaggtggtggtcagtgtcctgtctgcggttacga

SEQ ID NO: 534801 - DNA, 80 bp, Homo sapiens
agctgaagacatcaagaagatcttcgagttcaaagagaccctcggaacgcctgacctctcgggacacacccagccctgtg

SEQ ID NO: 534802 - DNA, 73 bp, Homo sapiens
tctcgctgccgctgggaccccgtgtcatcgcccaggccgagcacgtgtctgctgcacagagctttacatcccc

SEQ ID NO: 534803 - DNA, 108 bp, Homo sapiens
ggcagcagggcggcggcgggagcacgtcctcaagcagctggagcgggtcaaggtgagaagccctaccactgcaactgggacggctgcggctggaagtttgcgcgctca

SEQ ID NO: 534804 - DNA, 100 bp, Homo sapiens
gagcaacgccagagcccaggtgcccagaggactttcttccagcttctgctgtccttctttgtggagagcaagggccgcctgcctgtgaagtggatggcgc

SEQ ID NO: 534805 - DNA, 98 bp, Homo sapiens
ggcggcgctggcggccggcccctgggaggagtgcttccaggcggccgtgcagctggcgctgcgggcaggacaggggacacttcaaaccaaagcagtgg

SEQ ID NO: 534806 - DNA, 75 bp, Homo sapiens
gcaggtggcctggagcaagaccgctgacaagatcgagggcttctaataactgaagtgaagtgatggactccgatt

SEQ ID NO: 534807 - DNA, 90 bp, Homo sapiens
ttttttataaaggaacttacctccatctgtcttttcaagacacgatgaggcgagtggtacgacagagcaagtttcggcatgtatttgggc

SEQ ID NO: 534808 - DNA, 100 bp, Homo sapiens
agcaccttggcgaagccttgggtttctttcttaaaggactgatttttagaactccacatttgaggctgaagccgacgtagcttctctgaacagacgcatc

SEQ ID NO: 534809 - DNA, 100 bp, Homo sapiens
gaccacccagccttctgggccctccccccatggccaatggaaaacctggcgaccctaagtcagggcgtctctggccgagcctctttttgtggaaaacgac

SEQ ID NO: 534810 - DNA, 100 bp, Homo sapiens
ccgcggaagccggcatgctggagaagctggagttcgaggacgaaggtgcgttgaaaactatacaggagctcgttgtgaagaggtttttctcccaggctcc

SEQ ID NO: 534811 - DNA, 100 bp, Homo sapiens
gaccgttctggatgctagagtgagtgtgcccacctgcgtaagggggcagagacaggagctctctgctcgtgatggggatcctacctttcatacacatcag

SEQ ID NO: 534812 - DNA, 75 bp, Homo sapiens
aaagattactcaaagcaaagaaacttaccagtgatgagacgctgaccggaaaggagattgagattgacattgaac

SEQ ID NO: 534813 - DNA, 82 bp, Homo sapiens
taaagctcctcggcctcggcgtgctgcgcctccgcggctgccctgcgccaggagtccaaaactacttacctggaagaccttc

SEQ ID NO: 534814 - DNA, 83 bp, Homo sapiens
ctccttcggcagtccacccaccgccgccgcctcccagagttcaagctgaagaagatgtggaaaagtcccaatggaactatccg

SEQ ID NO: 534815 - DNA, 50 bp, Homo sapiens
gagcctgatcctatcgttttgacgccaggcgatcgccagctcgagtgcag

SEQ ID NO: 534816 - DNA, 50 bp, Homo sapiens
ctcctgagtagctgggactacagagaatgtaactggtcactacatttccc

SEQ ID NO: 534817 - DNA, 75 bp, Homo sapiens
cagaagccgagttcaacatcctcctggccaccgactcctacaaggctgatcagctgaccgaagaacagattgctg

SEQ ID NO: 534818 - DNA, 100 bp, Homo sapiens
ccctggggctgacaggaatcttctggtgtactctttttatgaaaagatgacacccccaaccatggttgtgaagatgctagcgacacatcgctgttgggag

SEQ ID NO: 534819 - DNA, 100 bp, Homo sapiens
ccgtgtatgactttgtctcccattcccgaacattcagaagattctcggccttgccccttcacgagccgccaccaagcaggcaggtggatttcttggccca

SEQ ID NO: 534820 - DNA, 100 bp, Homo sapiens
tgtggaactgctctggcagtcatcgtgcctgaaggagtacatgccctttatgaagatattcttgaggtgtcgctcttgcaatatattatcacatcaaaaa

SEQ ID NO: 534821 - DNA, 87 bp, Homo sapiens
acaagccggaagtggaagtcagattctccctgactctgctcatctggaccttttctgtgtgtctgccacccctgtgctgctgagtgg

SEQ ID NO: 534822 - DNA, 75 bp, Homo sapiens
cgtcacggcgtacgccctcatggggaaaatctccccggtgactttcaggacaaattattggattccagcacagtg

SEQ ID NO: 534823 - DNA, 80 bp, Homo sapiens
caagctccttttgtacagaacaagaaagcaatggctgaacagagatgttgtcactcagcccagtccatcagtttctcagc

SEQ ID NO: 534824 - DNA, 100 bp, Homo sapiens
ctgagcggccggcggcgcgggcccggcggcggcggcagcggggtccgggtccggagcgccacatggctatctccacgtccactgtcctgctgtgtgggct

SEQ ID NO: 534825 - DNA, 83 bp, Homo sapiens
tgccctcacaccagacctacggagggagctggaaattcctgacgttcattgatctggcaggggaaatggaaggtgatgcagtc

SEQ ID NO: 534826 - DNA, 74 bp, Homo sapiens
ccagtacacacacaagatctaccacctgcagaggttctgcggcatgaggaatttgaagaaggctgcaaagctgc

SEQ ID NO: 534827 - DNA, 75 bp, Homo sapiens
ctgaagatcaactactcctgcgaggaaaagggaatgctggcctgctggccttggcagatgttttctcagaggatt

SEQ ID NO: 534828 - DNA, 100 bp, Homo sapiens
ttgataaaaagagatgtggggggattctcgacctgctaacagaactggaccttttcggcgccccagcgggatcccagagaaggatctgcacagtgttatg

SEQ ID NO: 534829 - DNA, 75 bp, Homo sapiens
cagtggaatgggcagaaggaggtgccacaaagggcaaagagtgtttgtcaggttcaactccagccatggtttccc

SEQ ID NO: 534830 - DNA, 82 bp, Homo sapiens
cccgcctccatctgaagagggctccaggcatccggtcctggtccctgctggttggacccaaagcagcagaagatctacgacc

SEQ ID NO: 534831 - DNA, 85 bp, Homo sapiens
gggagaacctgagggaacagccaccgatcgctgactttgagaatcactacaagaaaaactccttgtggtgaaggttctaagacgt

SEQ ID NO: 534832 - DNA, 100 bp, Homo sapiens
ggcggctgggccgagtgggtgtctggtgccggcgtttgggctacggttgttgttggcgactgtgcttcaagcggaatgtttacccttgcggaagttgcat

SEQ ID NO: 534833 - DNA, 75 bp, Homo sapiens
atgggacgaaagcctttctctttcaaggtatggcctcacaagtcttggtctacccaccatatgtttatcaaactc

SEQ ID NO: 534834 - DNA, 100 bp, Homo sapiens
aagcgacaagtggaggcgccgctctagcggccgggactctgaactatggcggtttgtgaaatggctgctgacatttctgaatccagcggggctgactgca

SEQ ID NO: 534835 - DNA, 83 bp, Homo sapiens
gcgctctggctctggctgtgcgcgctggcgctgagcctgcagccggccctgccggaatttatgttgatgcagttaactccttg

SEQ ID NO: 534836 - DNA, 98 bp, Homo sapiens
ctgctctcccgcctgaaggcaccttggccaggtccccgtccattgatagcattcagaaagatcccaggatttaagtgccctgtatgctcaaaatttgt

SEQ ID NO: 534837 - DNA, 100 bp, Homo sapiens
cagatagctccttcctgtggctccagatccagaggaccatgtcattagactttggcagtgtggcactaccagtgcaaaatgaagatgaagagtatgacga

SEQ ID NO: 534838 - DNA, 88 bp, Homo sapiens
ggctgaagcgactgagtccgcgatggaggttttgcactgattgcaaaaataaagtcctccgagcatacaatatccttattggtgaact

SEQ ID NO: 534839 - DNA, 100 bp, Homo sapiens
ccgcctcatcttccaggtgctggatgctgtgaaatacctgcatgacctgggcattgtacaccgggatctcaagatctcactgatgaaaaggcctccaggt

SEQ ID NO: 534840 - DNA, 80 bp, Homo sapiens
gctgacgtggagcggtacatcgcctcggtgcagggctccaccccgtcgcctcgacaggacacctgctccacttcaccttt

SEQ ID NO: 534841 - DNA, 100 bp, Homo sapiens
gctgacagctgaggaagtctgcatccacattgcacataaagttggcggcgcggcccatgggctatttcgagctgcagctgagcgcgctgcggaacgtgaa

SEQ ID NO: 534842 - DNA, 100 bp, Homo sapiens
accttgggtgatttgttctgtatcagaagacaatatcatgcaagtgtggcaaatggtgacagagctgaatgaacctctctccaatgaagatcgaaatctc

SEQ ID NO: 534843 - DNA, 100 bp, Homo sapiens
gcacgtttgccacctagtgaccaaactgaagtctcactcttgtcaccaggctggagtgcattggcgcgatcttggctcactgcatcctctgcctcccggg

SEQ ID NO: 534844 - DNA, 97 bp, Homo sapiens
gccatgtcgggttattcgagtgaccgagaccgcggccgggaccgaggacatttatgcagtgtgtgattctttctaaaacaactccctggaagagagg

SEQ ID NO: 534845 - DNA, 100 bp, Homo sapiens
gtttcccacttgattacccgttaagtcccccaaagatgagatttacctgtgagatgtttcatcccaacagttggatacactccagattggatatttctgc

SEQ ID NO: 534846 - DNA, 82 bp, Homo sapiens
cttcattcacacttagtggcaaatggctgtcaccaactcaggaaatccttttgtactattgctcattcatacttgttcatca

SEQ ID NO: 534847 - DNA, 100 bp, Homo sapiens
ggatcctgcagaatgagcccctgccagagaggctggaggtcagaagagatcaattctacagaaatttccagtggttctgttgaggctttatggaattcag

SEQ ID NO: 534848 - DNA, 93 bp, Homo sapiens
aaaagatcagcgaggagcagcagcagctccagcaggcgctggctcctgctcaggccctttctggttactgtggctttatggcagccaaccttt

SEQ ID NO: 534849 - DNA, 130 bp, Homo sapiens
cctggaaccttcttttgtttgtcagcagccaaggtgtttccaggaagttcagagagaacaggtactaggttttgacaagcttgcatcatgcgtgagtataagctagtcgttcttggctcaggaggcgttg

SEQ ID NO: 534850 - DNA, 74 bp, Homo sapiens
ccaaaggcacaggaagaagcttgcaggagtgggaatagctttgcgaaaaatgggcgcaatggccaagccagatt

SEQ ID NO: 534851 - DNA, 82 bp, Homo sapiens
ggatctcagctccgacgcccgaggagaaggaggagtggattaagtgcattaagactgctgtgtaagctatggtggcatgtgg

SEQ ID NO: 534852 - DNA, 75 bp, Homo sapiens
ggagaagctggaagccctggagcagctgcagtcccacatcgaaggctgggagaaactggcgatggaatatgagag

SEQ ID NO: 534853 - DNA, 75 bp, Homo sapiens
ccctgatgcacgtgatgcagaagagaagcagagccatccactcctccgggtctcgctctgtatcccaggctggag

SEQ ID NO: 534854 - DNA, 100 bp, Homo sapiens
tggaaactgattggaaactctttgggaaagccactcgaaaaggaaagtaatggtccaacagacagttatgcagctatttcacaagtggatcgattgcagt

SEQ ID NO: 534855 - DNA, 98 bp, Homo sapiens
gcatgaggctccctcgaaccgccccctgaatgagttgctaaccccccagggtcccagagctgacctccgggccaaggccgtggagctggaacatgaga

SEQ ID NO: 534856 - DNA, 75 bp, Homo sapiens
ccgtgctgatcttcgatgagctctcggattccttatgcagagtggccgacttggcgagcccacaccttaaccgtg

SEQ ID NO: 534857 - DNA, 83 bp, Homo sapiens
ctgttgctgtggcagctggagagttccttcacaaaaacttggctgaagaggaaataaaaacagaacaggaggtggtagagggc

SEQ ID NO: 534858 - DNA, 88 bp, Homo sapiens
aagcgcaaccgtcggtgggtcggggatcggtcgcctgagaggatcagtctctggggaactggagaatcaagaggcaggtcttggaggg

SEQ ID NO: 534859 - DNA, 98 bp, Homo sapiens
taagccatcataccagtgccttatctgttgtggatgaatgctatcaagtaagacaagtgtttgcccagaaacttcacaaaggcctttcccgtttacgg

SEQ ID NO: 534860 - DNA, 137 bp, Homo sapiens
ccgggatcgtgaccgagaccgtgaccgagagcgtgaccgagagcgcgaatatcgtcatcgttagaagcatgctacaagtgaaaactgatgagaaactgaatgtgtctgatgagaatacagcaagttgccctttgagc

SEQ ID NO: 534861 - DNA, 75 bp, Homo sapiens
aaaatgtggccacagcttttgattgattataccggaacagagccttccagtccctgtaataaatgtttatctccg

SEQ ID NO: 534862 - DNA, 100 bp, Homo sapiens
cgtaacccctgcacagagcagattctgaaacttcttgacaatttgcttgcgcttataaggtggtcttcaagctgacagagaagctgacggaacagaagga

SEQ ID NO: 534863 - DNA, 100 bp, Homo sapiens
cttattataaatgaagatctggacagtggcacacagataccgtttattaaaagagctgtggctgtttctactttccaggtccactggtgtttggtgtacc

SEQ ID NO: 534864 - DNA, 75 bp, Homo sapiens
tcggtttttggttgggacgcagtctcttaaatatgataatcaggtcttggatgtgctggatctgtgtgtggttgt

SEQ ID NO: 534865 - DNA, 75 bp, Homo sapiens
catgtgctgaaatgtttgacgacactgatggtttggttgaaatcacaaagattagacacctttttagataggtgt

SEQ ID NO: 534866 - DNA, 98 bp, Homo sapiens
ggaggccgggcgaggccggtgaggacgcggcgggcgagcgagaggccgagggtgttccccccacactggggctcccactactgcgaggagtgacccac

SEQ ID NO: 534867 - DNA, 100 bp, Homo sapiens
tttgattcagcagactccagaggtgatcaagtgggaagaagtcagtggctacgatgaaaacctgaacaccatccgcacctaccaggtgtgcaatgtcttc

SEQ ID NO: 534868 - DNA, 98 bp, Homo sapiens
aaaatcaaccgggaccccagcttttcagaactgcagggaaacagccatcatgagagattgagaatttatcacaagttgatggtcctcaagtggaagag

SEQ ID NO: 534869 - DNA, 90 bp, Homo sapiens
gactccaggggagccgtggcctcctctccgccctagcgctgaggctttgattctgataactcttctggggaattttcagaggcaaatcag

SEQ ID NO: 534870 - DNA, 100 bp, Homo sapiens
gaccatatttcttacttccgagaagatcgtagcagtaattcaggaaccactcgttttgactattattttatcactctttgtgaaacttcacaatgttcgg

SEQ ID NO: 534871 - DNA, 82 bp, Homo sapiens
accactcattcacttctagacgacaaaatgcaaaaaaggaggccaaagactttcgctggagagcgaggtggcttcaataagc

SEQ ID NO: 534872 - DNA, 100 bp, Homo sapiens
agtttaaccaaatctcatgaaatggaaaatgtggacagtggagaaggcccagccaatgaagatgaagacataggagggaatggatccaattacacgtcaa

SEQ ID NO: 534873 - DNA, 100 bp, Homo sapiens
tcgtgaccgggatagagaaaggagctcagatcgtaataaggatcgcagtcgatcaagagacgagttgtactgctgtcacaggaaatggacgctggattac

SEQ ID NO: 534874 - DNA, 100 bp, Homo sapiens
catttagcgcatcatgtgatccgggggaacacttaagaatctgtcctcaggaatatacatgctgcaccacagaaatggaagacaagttaagccaacaaag

SEQ ID NO: 534875 - DNA, 83 bp, Homo sapiens
gtttgccacacagatcaccctgggaatcctcatctccactcagcgggcccagatcatggaagggaagtggttgctgtgtatgt

SEQ ID NO: 534876 - DNA, 100 bp, Homo sapiens
accatccgcctgtgggacacctaccagaaaaacacaccttgactttagtcagatacatcactgtctgttaaaggaaaccaagcgtgaagtggaagtctaa

SEQ ID NO: 534877 - DNA, 74 bp, Homo sapiens
cgcactgggaccccggaatcccgcgcgctgcccacgattcgcttctgagatttctcacattggcaaactgagag

SEQ ID NO: 534878 - DNA, 50 bp, Homo sapiens
ctggcaccaaccccggcagtatgagcaggggtgacagtccaaagattgac

SEQ ID NO: 534879 - DNA, 88 bp, Homo sapiens
agaaccaacccccaaattggctgggacagatgggaataactgggaacacaagtccatttggacagccctttagtcaagctggagggca

SEQ ID NO: 534880 - DNA, 82 bp, Homo sapiens
gagttctacgtgtcccccgaggatctggaggcacagctgcagtctgacgagagggtcaccttcaggccattcagaggaggaa

SEQ ID NO: 534881 - DNA, 83 bp, Homo sapiens
gtcttgactccttttgtagaagaatgtctagtagctgatggaggtttgcttctgaataacccttcggcattagctatgcatga

SEQ ID NO: 534882 - DNA, 51 bp, Homo sapiens
catgctggctgcaaagaagggactgaatatggtgcacctgaagattgggaa

SEQ ID NO: 534883 - DNA, 50 bp, Homo sapiens
ctggctaagctcatcattgttactggaaactctgatgaggaagaaagtgc

SEQ ID NO: 534884 - DNA, 83 bp, Homo sapiens
agagcttcatcaaaaatagtgatagctttgataaatgctgggctcttgcactgtttggtggaaatggtgagacaggatttgag

SEQ ID NO: 534885 - DNA, 99 bp, Homo sapiens
atcatgtcgcgttacgggcggtacggaggagctgtcggaaaaggtaacagaagatggaactcgaaatcccaatgaaaaacctacccagcaaagaagcat

SEQ ID NO: 534886 - DNA, 100 bp, Homo sapiens
ctgcgctaccaggccaacaactgccccatctgccggctgcagtcttgctttgtcgcccaggttggagtgcagtggcacgatctcggctcagtgcaacctc

SEQ ID NO: 534887 - DNA, 101 bp, Homo sapiens
cgcgagcggcagcggcggatggagctggagcagaaggtgcaggaggtgctgaaggccagatctggtggctggacccagagctgacctatggctgcgccaag

SEQ ID NO: 534888 - DNA, 51 bp, Homo sapiens
gaagaggagggcaagaagggcaagaaggtttcaggcacagaactgtatatc

SEQ ID NO: 534889 - DNA, 75 bp, Homo sapiens
ctaagactttccttgctttaatgaccttgacagttttgaggagtactagtcagctgcgtttgctttggttagcta

SEQ ID NO: 534890 - DNA, 90 bp, Homo sapiens
ggagaagttagcttcagagttctttgtggatggacttgattctgatgagaggtttgatgaacttgtgaaaaaattcaaagtcgaatatca

SEQ ID NO: 534891 - DNA, 90 bp, Homo sapiens
ctcccggccaagatgtctgacatggaggatgatttcatgtgcgatgatgaggaggactacgacctgaactattccatggcagtatatctt

SEQ ID NO: 534892 - DNA, 82 bp, Homo sapiens
ggaactaaggcggaggaactgagacgtttcgaattccagttacttgtggaaattgttgattacccggacgtcttaaaaccaa

SEQ ID NO: 534893 - DNA, 77 bp, Homo sapiens
agccatcatgtgtgtcagcatgagaggtgccgtgagcgatgtggagatgcaggaacactatgatgagttttttgagg

SEQ ID NO: 534894 - DNA, 75 bp, Homo sapiens
cgcggagcagtagccgccgtgggagggagccatgaagcattacgagctgaatttgtgatcagtcttgctgagaaa

SEQ ID NO: 534895 - DNA, 100 bp, Homo sapiens
ctcggacctggttagggtgtatgtttccccaggcacacaaactgcagtctcagaatggacaaccacaacagcaagcctggctttcacagctgcagccacc

SEQ ID NO: 534896 - DNA, 75 bp, Homo sapiens
ccgaagtacaagatctaaggctcttgtctggttgctacaagcctcaggaaaaatcagattacttgatgttggcag

SEQ ID NO: 534897 - DNA, 75 bp, Homo sapiens
cacgctgtgcttctcgcttcagaacattttctccaaaaaggtgttacagcacatgaaggccgtgcaggcagatca

SEQ ID NO: 534898 - DNA, 96 bp, Homo sapiens
ttcatttccatttctaccttgtatgcctcaatttgctggatttaagcactgctgcactttatgagatctcagtgaccagctgctggaggtggtcgg

SEQ ID NO: 534899 - DNA, 82 bp, Homo sapiens
aacaagtgtgtgcatctggctgttagaagaattcatgctcatccggtttcaggtgaaccaagattcccgagccatctttttc

SEQ ID NO: 534900 - DNA, 83 bp, Homo sapiens
ccagacactggaaaactggatgctgcagacactgaacgaggagccagtgacttaaaaggaattgtattcgtcatccagagtca

SEQ ID NO: 534901 - DNA, 100 bp, Homo sapiens
gctaccatggggctgcagctgaacatcactcaggataaggcttatgtagacatgaggaagattggcagtagccggggaatggtttctgcataccctcgac

SEQ ID NO: 534902 - DNA, 51 bp, Homo sapiens
tgcctgtaaaagaatacccagatgatgatgagtttacacacctgtacacac

SEQ ID NO: 534903 - DNA, 75 bp, Homo sapiens
ctggaggagatgaaagctttgtatgaacaaaaccagtctgatgtagcttttctggaaaaagaagaaaagttcaac

SEQ ID NO: 534904 - DNA, 87 bp, Homo sapiens
tgtggatgacatggctgagccaagggagacgccagagcatcctctgaagcagattaagatcaagcttcaggagtctccggaagacat

SEQ ID NO: 534905 - DNA, 101 bp, Homo sapiens
cgatcctctcatctcagcctccaaaagtgctggcattacaggagattccaggtatccattacttggccagccactgcagtacaatcctcctgctgttctgc

SEQ ID NO: 534906 - DNA, 83 bp, Homo sapiens
caaaggggaggttacgcagcaaaccatccagaaggaagcaggtcctggggaccaaggtggacgcggagcgtgacggcgtgaag

SEQ ID NO: 534907 - DNA, 89 bp, Homo sapiens
caagattccagatgttcctgtggaccccagtccaggtttgcctgcaatgagatttcattctctacatttaaaggacatcctttctgagc

SEQ ID NO: 534908 - DNA, 90 bp, Homo sapiens
gcggcgaaggaggcagaggcacttatgcttgtcaggcacgtgtggttctcaaatataggcattctgatgggaacttgtgtgttaaagtaa

SEQ ID NO: 534909 - DNA, 98 bp, Homo sapiens
gaaagagcttgcagaagcagcaaaggaacctctaccagtcgaacaattcctcgaggtctgaacaagaaccactgacgcagaacgtgaaaactagaagc

SEQ ID NO: 534910 - DNA, 100 bp, Homo sapiens
gtggaatcggtcaccctggagaacagcccgttggtgtggaaggaggggcggcagcttctccgacagttatcaatagtctggctgtctatcgtcatcgtga

SEQ ID NO: 534911 - DNA, 87 bp, Homo sapiens
tggggccagggaaccctggtcaccgtctcctcaggaagcggggagaggtggtgagagatgacccctgttgaggatttcattggtgtc

SEQ ID NO: 534912 - DNA, 100 bp, Homo sapiens
agcaaatgggatcaatatttcacctgatgataaccgctgtgattggaaccaggctgcatgctgctgtggcaattgcttgtgttgtaatggccttttacgt

SEQ ID NO: 534913 - DNA, 51 bp, Homo sapiens
ccgagcatcgtcaaaaacatgccaactgacttcagaaatgggcttgggaac

SEQ ID NO: 534914 - DNA, 100 bp, Homo sapiens
cttgccttctccacacttgtttgtttttggctttcacccccaaccagtgaccaaagacttgaccactcaaagtccagctccccagaacactgctcgacat

SEQ ID NO: 534915 - DNA, 80 bp, Homo sapiens
agaacgtccactgcgggccggcgaaagctggtgtggacactgccagcggctgcagccgacttggaatgacctgggagaca

SEQ ID NO: 534916 - DNA, 51 bp, Homo sapiens
gacgcctttggagtggcccccgccgccatggcatcagatgaaggcaaactt

SEQ ID NO: 534917 - DNA, 98 bp, Homo sapiens
ggagaactgagagaagacggcagagaacagggcggcgactggcggcgcgatggacctgaccgggctcctgctggacgaagaaggcaccttctccctcg

SEQ ID NO: 534918 - DNA, 90 bp, Homo sapiens
cctctggtggacatggctgcttcccgcttacccccagcgacgctaacgttaaagcagggtataaagacgctggctgtgtgtcccaacaac

SEQ ID NO: 534919 - DNA, 99 bp, Homo sapiens
acacctctgctttatgctgtacatggaaatcatgtgaaatgtgtaaagatgctcttaggtacaggtttgcagattccgccagcagcacagcaagctcta

SEQ ID NO: 534920 - DNA, 83 bp, Homo sapiens
cctgtcgctgcccgtgtgattactgagactcagcaattctgtggtgttcttggtcacacatttatggagtttctgaagggcag

SEQ ID NO: 534921 - DNA, 90 bp, Homo sapiens
cggatgctatccctggtcaaatcagagcaacaggtcaccttcaagccagtgtcctgacccagtgccttaaggttttggtgaaattagccg

SEQ ID NO: 534922 - DNA, 74 bp, Homo sapiens
aaaggtggcccagaattttccagtgccctgaaaaataaacagtgcaaccctgaaactcgtcctgttgagaaaaa

SEQ ID NO: 534923 - DNA, 100 bp, Homo sapiens
ctccaatgggcctttccagcccgtggtccttctccatattcgagatctgccgacaccccaggccatcgagccccaggccatcgtgcagcaggtcccagcc

SEQ ID NO: 534924 - DNA, 100 bp, Homo sapiens
acatcatcccacagatggctgacaggttcctgatgctataaaatctcagtaccagtttccaccccctctcattgcacccgcggccattcgggacggggag

SEQ ID NO: 534925 - DNA, 100 bp, Homo sapiens
ccgtgttcttcgacattgccgtcgacggcgagcccttgggccgcgtctcctttgagattgcagatttgaaggcagccaggcagcttgcgtctgaaatcac

SEQ ID NO: 534926 - DNA, 83 bp, Homo sapiens
catgccaatgcagctgtgaacgatcagagataacgaaggaggcccaacttcattcaataaggagcctgacggatttatcccag

SEQ ID NO: 534927 - DNA, 76 bp, Homo sapiens
gagcagaggccttctctagaccttgccaagatggcacagtccttcagcctcaagtccaaagcctggtgacatcctc

SEQ ID NO: 534928 - DNA, 75 bp, Homo sapiens
ctggaagacatttatgaaagcccaaatcacctgtacttggtcatgcagctgcaccagaatttcctgagtttgcca

SEQ ID NO: 534929 - DNA, 60 bp, Homo sapiens
gctgggtctcggagtgggagacgtggagtgcagaatccagggcctgaaaacccagaatga

SEQ ID NO: 534930 - DNA, 99 bp, Homo sapiens
ctcccaggctcaagcagtcctaccatgtcagccttcccagtagctgggaccacaggtatgaacatgctaatgatgataagagcagtttgaaatcagatc

SEQ ID NO: 534931 - DNA, 82 bp, Homo sapiens
ctttccctctcgcgtctctggctgcaggtgagaagccctaccactgcaactgggacggctgcggctggaagtttgcgcgctc

SEQ ID NO: 534932 - DNA, 98 bp, Homo sapiens
gcggatttgcgaggcgcgccctggagctgctagagatccggaagcacagccccgaggtgtgcgaagccaccaatatgtccgtggttcagaccctgtat

SEQ ID NO: 534933 - DNA, 101 bp, Homo sapiens
gtgcagcccctcagagtaccgcttggagatcctagagtggatgtgtacccgcctgcttagacgcctggtgactctcatttcgcagcaggccacgctgctgg

SEQ ID NO: 534934 - DNA, 87 bp, Homo sapiens
aaaccaacaccttcctgtgcagtcctgttggaatttgttagtaactttggaaaacagtccatgtattacaccagagttgcttcgtat

SEQ ID NO: 534935 - DNA, 50 bp, Homo sapiens
gttttgttaactttgaaactaagcagaatatgatgctttggcaaaagtga

SEQ ID NO: 534936 - DNA, 116 bp, Homo sapiens
ccgtgaccgagagcgtgaccgagagcgcgaatatcgtcatcgttagaaggatctctctaggagctgacactcgaaccttcacgacccattcggatttttccaggactcaggagtgg

SEQ ID NO: 534937 - DNA, 51 bp, Homo sapiens
gcgctggatccggcagcagctgcatgaagtagatttgtgccgaaaagaatg

SEQ ID NO: 534938 - DNA, 75 bp, Homo sapiens
taaggattccaagtaactcttatttgagcagtcagaactgaagacaacatgggtggatgtggagttcgaacctgg

SEQ ID NO: 534939 - DNA, 95 bp, Homo sapiens
gagatcaaatggcacttcattggccacctacagaaacaaaatgtcaacaaattgatgggtgttgacttcaaaatcaaaactgtagagctaagagg

SEQ ID NO: 534940 - DNA, 75 bp, Homo sapiens
gtgtgaggaggtggagagagttcggcgctcagagaggtaccagaccatgaagaaacgcttcgttaagggactcag

SEQ ID NO: 534941 - DNA, 100 bp, Homo sapiens
agcttttggcaatattggctcatatgaatggggagaggtatattcaagagcaaatgaccaagagccatgtgggtggtggttggctaaagttcggatgatg

SEQ ID NO: 534942 - DNA, 50 bp, Homo sapiens
gagactgtctcagcccatccctacaagtattcaaagcaatgagtatccca

SEQ ID NO: 534943 - DNA, 90 bp, Homo sapiens
atacagcaagaaagaccatcaagtttaccagactaccgaccagactcccggaaatcatgttggtaggatcccagtctttttcgcctggag

SEQ ID NO: 534944 - DNA, 100 bp, Homo sapiens
actgcagctcgcggtttcctggcttctagtgccgcagtgtgtctggagaataaatgtggatatccctgaggaagctaatcagaatctttcgtttggtgct

SEQ ID NO: 534945 - DNA, 100 bp, Homo sapiens
gggcatttgactctgcagtagcaaaagcattagaacatcacagaagtgaaatacaggctgaacaggacagaaagagatagaatctcactatgttgaccag

SEQ ID NO: 534946 - DNA, 78 bp, Homo sapiens
atcacgaggtcaggagatcgagaccatcctggctaacacgatccggacgctgcggctgaagatcttggcagacgcagc

SEQ ID NO: 534947 - DNA, 98 bp, Homo sapiens
cgccgtggacgccgaccgtccgggacgaggcccagtgacgagcaccatccggaagtgaaggctgatgggtacgtggacaacctcgcagaggcagtgga

SEQ ID NO: 534948 - DNA, 100 bp, Homo sapiens
ttatcaaggacggcaagctgatcaagaacaatgcctccactgactatgacctatctgacaagagcatcaaccctctggttcacagcatgtccgcctcggc

SEQ ID NO: 534949 - DNA, 75 bp, Homo sapiens
ttttccttgatggtcaaaagattaagtgatgtggagccaactgcaccgatggaggaacccacagtggtggaggag

SEQ ID NO: 534950 - DNA, 100 bp, Homo sapiens
cgaggagccatgaggcagctcccctacttcatccggccagctgtccccaagagagatgggcagtgggatttgtcaaactatcacctcttagaccttggac

SEQ ID NO: 534951 - DNA, 75 bp, Homo sapiens
gatgaagttgttcattgtttgtcaccacaaaaaggacagctccttgaggagaatgaccagctgatccgctgtatt

SEQ ID NO: 534952 - DNA, 100 bp, Homo sapiens
gcgcggcggaggacgaggaagagttgtggcgaggcagatcctgccccgtggccgcggccgtctcgtgagaagccctaccactgcaactgggacggctgcg

SEQ ID NO: 534953 - DNA, 75 bp, Homo sapiens
cagaaccaggtgcgaaacctcaaaggtgagacatggaatccattaaaattgcattatcagttaagaaatgtacgg

SEQ ID NO: 534954 - DNA, 90 bp, Homo sapiens
ctctggaccaacttgaccgtctactggaaatctgaatgctgttatcacgaaatggctagtgatgagctgaaagagatgcggaaaaacttg

SEQ ID NO: 534955 - DNA, 75 bp, Homo sapiens
acggagcgctgccctgcagcccgagcccatcaaggtgtacggacaggcagtgtagccaatcaagtattccaccca

SEQ ID NO: 534956 - DNA, 82 bp, Homo sapiens
gtgcagtgttggcctatcaggaccatcggtgtaggtctattatcctcccagtccacaacgctgaaccgtggctggacgaatg

SEQ ID NO: 534957 - DNA, 100 bp, Homo sapiens
atgggcagtttctcccgccggcgatgtgccaatgggtcatgtttggttagaaggtgacaatctacagaattctacagattccaggtgctatggacctatt

SEQ ID NO: 534958 - DNA, 82 bp, Homo sapiens
gtttgtggccgtccggcctccctgacatgcagaacaagttgaaatcatcgcagaaggataaagttcgtcagtttatgatctt

SEQ ID NO: 534959 - DNA, 80 bp, Homo sapiens
agtcacccaaacaatcggctgagaatgagaagagcaaaccagtccagctacgggggcccagccagccagcagctgagtgg

SEQ ID NO: 534960 - DNA, 98 bp, Homo sapiens
tggtgggtgttccagctggaagtaaccccttccgggagcctagatcctgtgctttactctgaagactctgaaatatgaggagttatactgcttttcat

SEQ ID NO: 534961 - DNA, 74 bp, Homo sapiens
cagagaccaacgagatcctgcacatgtctttgtgcgcacacggtcagtgggcgagtgtgtcgagtactactacc

SEQ ID NO: 534962 - DNA, 75 bp, Homo sapiens
cggcgggtacctgcggccaattcggtggaacgaggacgcggactgcgaaggcagcggagctggagtttgttcaga

SEQ ID NO: 534963 - DNA, 90 bp, Homo sapiens
gagtgagctttgccgcggcagacgcctgaggatgatgccccagctgcagttcaaagatgccttttggatggtcctagaacaattggagat

SEQ ID NO: 534964 - DNA, 75 bp, Homo sapiens
caacctgcgggtgcactacaaagggcgccaatgcttcggcattagagaaagagattggtccagaacagtttccgg

SEQ ID NO: 534965 - DNA, 75 bp, Homo sapiens
tgttaaggattccaagtaactcttatttggttgatttcccacggaatcttgccaaatctgtgactgtagagtgag

SEQ ID NO: 534966 - DNA, 82 bp, Homo sapiens
ggcggatggccccaggtgtaagcgcagaaagcaggcgaacccgcggcgcaataacggttctggaggacacgtgccggcggca

SEQ ID NO: 534967 - DNA, 102 bp, Homo sapiens
cttcaagccaaacatcaagcagaatgtgatttgcttgaagatatgagggttacatcaattgcagacaggttgaatgtggaatttgctttgatccacaaagag

SEQ ID NO: 534968 - DNA, 100 bp, Homo sapiens
aacttttaaaaagccaaagcaaatattcagaggctgcagctctcctaatacggttgaccagtgaggctctccagcagaactatctcctactactctttcc

SEQ ID NO: 534969 - DNA, 100 bp, Homo sapiens
gactcggggccccccagcctccgccaacccagactggcattgctcgggtaccacttgctggagctgctggaggccctggggttggtagggcagctggtag

SEQ ID NO: 534970 - DNA, 83 bp, Homo sapiens
tgtggatgtcggcgaagccgcgggcgaggtgaccctggcaaagatgagagtgcacatttcgtcctgcctgaaggtccaggagc

SEQ ID NO: 534971 - DNA, 100 bp, Homo sapiens
ctacctcaacctggtgcagtgcgagacgctagagggttgttggaggaagagtcttccaagagggctgaactagaaaagtggcacttggagcagcagcagg

SEQ ID NO: 534972 - DNA, 74 bp, Homo sapiens
cttggccggtgcttccaggaaaccattgggtcacagcttcagtatcagacacagcacagcagccatctgaagag

SEQ ID NO: 534973 - DNA, 88 bp, Homo sapiens
gattcgcagtggtcgcttcttctccttgggctggtgaattaccatatctccgtcaagtgcagtaaccagttcaagttggaagtgtgtc

SEQ ID NO: 534974 - DNA, 83 bp, Homo sapiens
aaaatagcagaaacagattttgagaagcgagattttcggaagagactgtctcgctctgtcacccaggctagagtgcagtggtg

SEQ ID NO: 534975 - DNA, 100 bp, Homo sapiens
ggctggcaggcaacaccttagggaaatctgaaatagagtactatgctatgttggctaaaactggtgtccatcactacagtggcaataatattgaactggg

SEQ ID NO: 534976 - DNA, 98 bp, Homo sapiens
ttcgcagaccagcccatccagatctatgagaagatcgtctctgggaaggtctcccaacatttgattcgtcctctgatgggcatgagtctggcattaca

SEQ ID NO: 534977 - DNA, 74 bp, Homo sapiens
tcctggagccccccagtgaggtgtgccatgcggagctgaatgccatcatgaacaaaaattcgaccgatgtgaaa

SEQ ID NO: 534978 - DNA, 87 bp, Homo sapiens
tgatattgtacgatttctggtacagttagatgactacagaccatggcaaaagttataaccaccgtactgaagttccctgatgatcag

SEQ ID NO: 534979 - DNA, 100 bp, Homo sapiens
gggagaccttcagccagcacctgcaggccgtgaagatcctcgccgtcagagacctcatttgggtccccaggtggcggaggagagcccggagctgctgaac

SEQ ID NO: 534980 - DNA, 83 bp, Homo sapiens
ctgtgggtgctgggacttcccgtccgcggcgtggaggccggactactttagttctgtggccacagtggtgtatcttcgcaaag

SEQ ID NO: 534981 - DNA, 100 bp, Homo sapiens
agaaagtggagtccgagctgagatccatctgcaccacggtgctggctttggacgtggaccggatggttctttacaaaatgaagaaatccgtgaaagcaat

SEQ ID NO: 534982 - DNA, 74 bp, Homo sapiens
gaagatccttattcctgtaaactactcaacatcacaaatccaggtgctggatgtgtctggggcagacatgttgg

SEQ ID NO: 534983 - DNA, 51 bp, Homo sapiens
ggctgaagcgactgagtccgcgatggagatacgtaggtaacctttccagag

SEQ ID NO: 534984 - DNA, 100 bp, Homo sapiens
caaggactcacccaaagacagggaagtggcagaaggaggccttccccgggcggagagcccctctccagctgcaggacaagttcgagcatcttaaaatgat

SEQ ID NO: 534985 - DNA, 98 bp, Homo sapiens
gagggctgagcagtcaactcaaatgcaagtccaagaggaggaggaggcggaggtccaagcggaaaggagaatggggtactaagagaaaagcacgaagc

SEQ ID NO: 534986 - DNA, 100 bp, Homo sapiens
gacgattccgtcaagagataacaacaaatgttatgcaaaaataatctgtaatactaaagacaattgaggactcagaagacaaagatgtgaagaccaagaa

SEQ ID NO: 534987 - DNA, 98 bp, Homo sapiens
cctcctccgtcatcgagcagctcttcttcgtccgtttggctacaaagtttggatcccaagcgagtcagaaggtaacagaggagaagcttctgcaccct

SEQ ID NO: 534988 - DNA, 75 bp, Homo sapiens
gactgtgggctggtgtgtggaactggaccatgcagaggagggcagggctagcatttacaaatcagtcttttccaa

SEQ ID NO: 534989 - DNA, 100 bp, Homo sapiens
ggagaaggagcgcattggccagttcgtctttgcccgggacgctaaggcagccatgaactaaagatgactcagagccatctggagaagaaacagtagaaag

SEQ ID NO: 534990 - DNA, 75 bp, Homo sapiens
agaaacagaactgaaacaactggaaactgttttggatgatcttgaccccgaggccctggccaacgtcaacattgg

SEQ ID NO: 534991 - DNA, 100 bp, Homo sapiens
tggtgacattgtatcattggtgtctattattagcagaagatttttctgcatagttggcacgctgtacctgtatcggtgtattacaatgtatgtaactaca

SEQ ID NO: 534992 - DNA, 80 bp, Homo sapiens
accagaagtttacactggaactggacagggtgtacttctctgaagtaagatgatttgtcaaaaattctgtgtggttttgt

SEQ ID NO: 534993 - DNA, 100 bp, Homo sapiens
ccccaagactgcgactctaaacggactcatgtactttgtcaggctgattcaccccaagagtggccgttcctaccacgaggagttcaaccctccaaaagag

SEQ ID NO: 534994 - DNA, 98 bp, Homo sapiens
aaaaagaaactaaaaaatggcagctctcagaatgggaagaatgagagaagtcatatgcccggcacaagggatctttcagggcacaagaatattgtggg

SEQ ID NO: 534995 - DNA, 75 bp, Homo sapiens
ttgcagctgggagcggacgaagcgcgaagctgggacccccccaagacacatatgacccaccaccccatctctgac

SEQ ID NO: 534996 - DNA, 90 bp, Homo sapiens
agactctgtgagtaaagacagcttcatcttcccagttcatcatggcttcaacatccaggaaactttgagggaaattttgagtcactggac

SEQ ID NO: 534997 - DNA, 50 bp, Homo sapiens
agcctcccgagtagctgagattacagtgtaaggcaaacattggtgggcac

SEQ ID NO: 534998 - DNA, 100 bp, Homo sapiens
gccccctgtctactggctgccttccatccaccgatacatgtaccctgagatgaagagagaaaccaatcagcttcattttcaacttcttctatgactccag

SEQ ID NO: 534999 - DNA, 88 bp, Homo sapiens
aaagagtcaacagcagtggcaacaggttgtttacattcagagctctatcaataagaggaatacatattacagtgaattcgacaaccgc

SEQ ID NO: 535000 - DNA, 92 bp, Homo sapiens
cgcgaggaggcgcgggaggtgttcgagaacgaccccgagacgggccgagaactactggtggcgtggccagaacacacggacgctgtgtgtgg

SEQ ID NO: 535001 - DNA, 98 bp, Homo sapiens
taccaggaggccaggggtgtcgccatggtaaaatatacccaggaccataaacagatgaaaggtagaccaagtctgattttagatacacctgctatgag

SEQ ID NO: 535002 - DNA, 83 bp, Homo sapiens
tcctggccctggccctgatcatcctgctgggcttcgtccagatcgggaaggatgcgagccacccctctggctgctcctgcggg

SEQ ID NO: 535003 - DNA, 75 bp, Homo sapiens
gcaaaggcgacggaatggaggaggtgcctcacggtctacatgttcaagtgcgtgtggcggtgctacagattgatc

SEQ ID NO: 535004 - DNA, 88 bp, Homo sapiens
cgccttggtgcagaagctggagctggacgtgaggagtgtcacttccgtcaggagaggttccagcagcactgatgtgaaggaaaaccgc

SEQ ID NO: 535005 - DNA, 82 bp, Homo sapiens
agaagagaaaaagagaagatgaagaaacccagcttgatatgttgtgggttgccagcgttgatgtggtggagaatgaagaggc

SEQ ID NO: 535006 - DNA, 90 bp, Homo sapiens
ggcggaggctgcggcggggcggacggtcgcgcggcggcaggcacaggatccagccgcagaagccaggatgaaggtagcctgcatcacaga

SEQ ID NO: 535007 - DNA, 100 bp, Homo sapiens
atccacctcccgagcagttttttaatccaagcacttataattttggttgctggagccatctcttcccttttcatcctcctcatcattgtcaaacttgggg

SEQ ID NO: 535008 - DNA, 90 bp, Homo sapiens
cccagcaggcctttggttctgcatcaaaaatatcaacgatgaaagagtatttgtacaaagtacgagcttatatccaaatgaagtctctga

SEQ ID NO: 535009 - DNA, 100 bp, Homo sapiens
cggcgccatgggccagtgcggcatcacctcctccaagaccgtgctggtctttctcaacctcatcttctggttggaggtccccctccccactaagtgcctc

SEQ ID NO: 535010 - DNA, 100 bp, Homo sapiens
taaatcggaggggaagtgcttctctgttttgggattttgtaaatcttctcagttggacaactagtggtttgaagagccagggccgtctgtcagtaggaag

SEQ ID NO: 535011 - DNA, 75 bp, Homo sapiens
cgcgtcgccatgatgggccatcgtccagtgctcgtgctcaggtaagaaggtggatggctctgtaaatgcctatgc

SEQ ID NO: 535012 - DNA, 83 bp, Homo sapiens
catcaggctcaacgaggaactcaaagtggatgaggaaaaaggatatggccctgaagccacatgagcggaaggagaagtgggag

SEQ ID NO: 535013 - DNA, 90 bp, Homo sapiens
gtgttcgtggccacgctgctgatcgtcctgctgctgatggtgtgcgcatactggagcatagtgaaagagtctattttgaagcttcaaact

SEQ ID NO: 535014 - DNA, 75 bp, Homo sapiens
ctgttccctaagaaggtctgcccaggactcagcccaagagttccatggcctccacttcccgccgccaacgccgag

SEQ ID NO: 535015 - DNA, 100 bp, Homo sapiens
tttcaatcattttaggattgtcaaaaggaggattgaggaggatcagatcaataatggaggcaatgccatcagagggttctcgcttcagcacaagatccgg

SEQ ID NO: 535016 - DNA, 75 bp, Homo sapiens
cagtcgcctccaggccaagagggatccttcacccgtgtctgctgtcgcctggttgggcccggaaatgggacgtcg

SEQ ID NO: 535017 - DNA, 82 bp, Homo sapiens
ccacctgtcagccttctaccccatgagaaagaccaggtgtatgtggaatttgatgatcttgaatgggataaacgagagtggg

SEQ ID NO: 535018 - DNA, 101 bp, Homo sapiens
ccctgtacaatggccgccctgtcctgggcacccagaagacctaccagtgggtgcccttccatggggagcagagtggccaaaagaacagtttattccaccat

SEQ ID NO: 535019 - DNA, 100 bp, Homo sapiens
acaccagcaccgcagatgttgtcaaggtggcctaccaggaggccaggggtgtcgccatggaacttatgctgtgctatttgattaaaccctctactatgac

SEQ ID NO: 535020 - DNA, 85 bp, Homo sapiens
attgaaggcacaggaatatccatgtcggcttgtagagagattgcactaccatgttcctggaaaactggaagaggctacagatgcg

SEQ ID NO: 535021 - DNA, 50 bp, Homo sapiens
tggtctctttgccgtctcccgatgtctactgttgtggagctgaacgtcgg

SEQ ID NO: 535022 - DNA, 100 bp, Homo sapiens
ggaagccatcgcctggccccggctctctggaccttgtctcgctcgggagcggaaacagcggcagccagagaaagctctgggtgtgcggcagtaccatgtg

SEQ ID NO: 535023 - DNA, 100 bp, Homo sapiens
tctgcattgatggatacgaatatgcctacctgaaggcaatagtactcttcagtccagatggagcagatggtgctttttacccagatgaaatacaaaggcc

SEQ ID NO: 535024 - DNA, 110 bp, Homo sapiens
atggagatggcacagacggagaagacgagggggcgtctgaggaggaagacctggaagacagatctggcccgcagccttcaggccgtgcctaggctggtgaagctcttcaa

SEQ ID NO: 535025 - DNA, 100 bp, Homo sapiens
gcccacgcaccccactcggcgtcgcgcggcgtgccctgcttgtcacagaggaaggcatcaaccacgagtgtaagctgtgcaaccagatgttcgactcccc

SEQ ID NO: 535026 - DNA, 90 bp, Homo sapiens
gctgggaggttttccgtgaattggttcattctctttaatgatgccctggtccatgcccagtcaccaggtgtcaagatgctgcaagtacat

SEQ ID NO: 535027 - DNA, 74 bp, Homo sapiens
ctgtgcttcaacaaaggacactacatcaaggactgcccccaggtcattaaatttgacggtggagaggaagtact

SEQ ID NO: 535028 - DNA, 100 bp, Homo sapiens
cccgaggagagatattttatatcccatgttctggctttctttgcagcaagcgatggcatagtaaatgaaaacttgttcctgaatgttccaatgtttcgaa

SEQ ID NO: 535029 - DNA, 101 bp, Homo sapiens
gaaggttctgtctatcagtgctgcgagaaaggaaagaaacaagtttgctctcagcggtgtggcttcctgttgtggtgcatggccccgagcccttctaatgg

SEQ ID NO: 535030 - DNA, 75 bp, Homo sapiens
gtgtcctgaaggagttccaccaggccgggaagcccatcggatggagaaggaggagacaacccgggagctgctgct

SEQ ID NO: 535031 - DNA, 102 bp, Homo sapiens
ctcactgccccggcggaggaggggcacagaggcctctactctcatctaggattttttatcaagcagaaatgcatcgaacaacgagaatcaagatcactgagc

SEQ ID NO: 535032 - DNA, 100 bp, Homo sapiens
caggattctgacaaaagtactctccgaagaggaattgacataggtccggtgtctaaaagactatggagaatttgaagttgatgatggcacttcagtccta

SEQ ID NO: 535033 - DNA, 75 bp, Homo sapiens
caagcggaaatgggagcagcaatggatgcgcttgaaaaatgtgattccttcaacacccagaatgagccagaagac

SEQ ID NO: 535034 - DNA, 75 bp, Homo sapiens
agtgaggaggagatccgagaggcgttccgtgtctttgacaagacattcactactttcactgcctaagaatcctgg

SEQ ID NO: 535035 - DNA, 83 bp, Homo sapiens
ctggcctgctgctggcccgcagggctgcctctaagaatcaaacttcactcttgggagaaccaccaaaagaaattcggctcagt

SEQ ID NO: 535036 - DNA, 100 bp, Homo sapiens
ttcggaataccctagaggaacatccggagacttcactgcccaaacaggaagtctatgatgagtacaatgttatccaagataaattctgtgggattataaa

SEQ ID NO: 535037 - DNA, 82 bp, Homo sapiens
ccgcagtgattgaagctttgataaatgaaatcttcctaagtataggtggtttttcaaggatataaccaggaaggacgcagaa

SEQ ID NO: 535038 - DNA, 100 bp, Homo sapiens
cgagctgtgcagttttagcgggtacaagatctaccccggacacgggaggcgctacgccaggaccgacgggaagaatttgccattttcagtggaaaacaag

SEQ ID NO: 535039 - DNA, 100 bp, Homo sapiens
ggaaacatggcactgttgcctatcagaagtcaattcaaaggacctgcccccagagagacatttgatgaatacagaaatatcagccaaaaggacattgtgg

SEQ ID NO: 535040 - DNA, 83 bp, Homo sapiens
ctcagcgccgctcccagccacagcctcccgcgcctcgctcagctccaacatggaaaggacttagaagccttacaaatacatct

SEQ ID NO: 535041 - DNA, 83 bp, Homo sapiens
aagaggaccagactttgttaatgaaggtgttggagagcacaatggctgaacaagtccttcctcaggctttgtatttgagcaat

SEQ ID NO: 535042 - DNA, 75 bp, Homo sapiens
gcagtacaagcttacgtctctgctcttcagtacaatcctatggcccactgcgtgaccttggttcagctgtccatt

SEQ ID NO: 535043 - DNA, 100 bp, Homo sapiens
ttcagagcagcagaagccggcgtcgtcggatgttgtgttgcccgccaccatgagctacacagctgggagtgtccactcgccttccaccagcatggcaacg

SEQ ID NO: 535044 - DNA, 74 bp, Homo sapiens
gcgagatgtcgaagccgccacccaaaccagtcaaaccagggccgttgctccagggagaactgcaaatatcttca

SEQ ID NO: 535045 - DNA, 121 bp, Homo sapiens
tgctggtctctggctccctcctcccagggccaggcgccgctcagaacgtccaatatcagatggaaatgatgcggagccttcgccatgtaaacattgatcatcttcacgtgggctggtatca

SEQ ID NO: 535046 - DNA, 100 bp, Homo sapiens
aattccttttggggaagaaagagattataagcacaccacagagactaaccagttcaggaagtgttctgattgggagtccatatacccctgcaccagcaat

SEQ ID NO: 535047 - DNA, 98 bp, Homo sapiens
aagcaagctgggatctatgagtggaaaggtgaccaagcccaaagaggagaaagatgcttctaagggtagccctaatggagaaccttgtggaaagactt

SEQ ID NO: 535048 - DNA, 75 bp, Homo sapiens
cccaccccacatggcccacgtacctcaggtgatctgtgaaaatggttcgctattcacttgacccggagaacccca

SEQ ID NO: 535049 - DNA, 87 bp, Homo sapiens
tgaccgagagcgtgaccgagagcgcgaatatcgtcatcgttagaaggggcaattccaaaagtcttcagatttccaaaaggaaggact

SEQ ID NO: 535050 - DNA, 85 bp, Homo sapiens
gcgtactttgggcttcatcatggaggactacctgcagggttgtcgagctgctctgcaggttgaatgtctccattgaatgtaagcg

SEQ ID NO: 535051 - DNA, 50 bp, Homo sapiens
ctagggtcgccggggaagcgggaattattttaggaccaggaagcagcacg

SEQ ID NO: 535052 - DNA, 101 bp, Homo sapiens
aaaaggataaggagatcatagcagagtacgatactcaggtcaaagcatgcttcatgatgatccaagcagaagaattcctgctgaaatggcattgtgcagcc

SEQ ID NO: 535053 - DNA, 90 bp, Homo sapiens
catctgcaaggtccgcttcaccaggctctccccggaggctcagccccctctgctccccatgggcaactgccaggcagggcacaacctgca

SEQ ID NO: 535054 - DNA, 97 bp, Homo sapiens
gtcttcctggagactaggctggcattttgactttgggggaccatcccgcggtcatcaagcgacgcttcaccagcgtcctggtggtgtccagtctctc

SEQ ID NO: 535055 - DNA, 100 bp, Homo sapiens
tgaggatgaagattcaccaaataagctatatactttggttacctatgtacctgttaccactttcaaaaatagcaaagccattgtggatgggaacctgaag

SEQ ID NO: 535056 - DNA, 95 bp, Homo sapiens
ccacactccccagctgcactgaccagtgtttccggcaaaaccacattcatgggacacttctccaggcatcaactgtgaaatctgtgttagaattg

SEQ ID NO: 535057 - DNA, 95 bp, Homo sapiens
gggaacaaatactactacatcccgcagtacaagaactggagaggaaggatctgagtctctccctgcggagacagccctgaagaactcctgtaacg

SEQ ID NO: 535058 - DNA, 100 bp, Homo sapiens
gtccacgttcgtgctacagaagaagggcatcgtgcgtgccaagcggcgaggcacaaatcctgaagagcccgtgggcgtggactgctcatctgtaaagaaa

SEQ ID NO: 535059 - DNA, 89 bp, Homo sapiens
aacagaaattctggaacacctatatggaaataactacgtgtttgccagattactacaagtggactcagtatctctttattaaactgtat

SEQ ID NO: 535060 - DNA, 100 bp, Homo sapiens
cgaaaatgagcctcgcgaggccgacaagagccacccggagcaggcacgtctgagaatggtggatgtggtggagaaagaagatgtgaatgaagccatcagg

SEQ ID NO: 535061 - DNA, 82 bp, Homo sapiens
tctggaggagcacaggcttctggtcaaaatgcagatcttcgtgaaaacccttaccggcaagaccatcacccttgaggtggag

SEQ ID NO: 535062 - DNA, 49 bp, Homo sapiens
gctcctgggactccaggataccaggtttcattgaaaacagatcctgcaa

SEQ ID NO: 535063 - DNA, 82 bp, Homo sapiens
tggatgacgagaatccactcaccggagagatgtcgagtgacatctatgtgaagaggtgcccgtggggcaggaggtggagggg

SEQ ID NO: 535064 - DNA, 74 bp, Homo sapiens
cggacggtacttctgccactgctgctccgtggagatcgtcccgcgcctgccgggtgtacagcaagctgtgattc

SEQ ID NO: 535065 - DNA, 103 bp, Homo sapiens
aacttatgtgaccccgcggagacccttcgagaaatctcgtctcgaccaagagctgaagctgatcgggctactacaaagttctgggaaagggaaagctcccaaa

SEQ ID NO: 535066 - DNA, 118 bp, Homo sapiens
tgggacaatatcctctgtggagaacacccccccatggaggcgaggtcaagagcaatctgaatccaaatgcaaaggagtttgttcctggggtgaagtacggaaatatttgagtagacgg

SEQ ID NO: 535067 - DNA, 51 bp, Homo sapiens
gccactagtgggtttgccagtggaatagagatgggatttcgccatgttgcc

SEQ ID NO: 535068 - DNA, 96 bp, Homo sapiens
ttgcactttcctaactcagaagtggtgcatgggcaagcatgaggatggacatgtagaggtggcacgtttgcttttggatagtggtgctcaagtgaa

SEQ ID NO: 535069 - DNA, 49 bp, Homo sapiens
gttcaagaaggccagtccaaatggaaagcaactggaacagatccagaag

SEQ ID NO: 535070 - DNA, 74 bp, Homo sapiens
tccagatggcagccagtcagtggtggagggagataacctaattactgagtgtcgctacaacacgaaagatagag

SEQ ID NO: 535071 - DNA, 100 bp, Homo sapiens
cgcaagactccactctccctacgagatcaccacagaccgctgtgggtgagcgtggaggatgctcagatgcacaccgtcaccatctggctcacagtgcgcc

SEQ ID NO: 535072 - DNA, 100 bp, Homo sapiens
cggcaaccaaatcggcgccaagttaattggccttggtcctcacagctccaaaaagaaacaggatctcgataagctctatgagctgaagtccaaagctcgg

SEQ ID NO: 535073 - DNA, 97 bp, Homo sapiens
aagaactccttgttccgacatcccaaacagctagagaccgttggatggcagcttaaccttcagatggctcactctgctcaagcaaaactaaaatctc

SEQ ID NO: 535074 - DNA, 99 bp, Homo sapiens
caccccccagcagagcgccgagctggtgggccaggtgaactatcccaaagtagcagacagctcttccttcgatgaggacagcagcgatgccttatcccc

SEQ ID NO: 535075 - DNA, 75 bp, Homo sapiens
agtgttcaccatcctggccccggaagggcaagtgtccagagaatggctgggatgaaagtacacttgaactctttt

SEQ ID NO: 535076 - DNA, 100 bp, Homo sapiens
tttactgggataattatccaaataaattgcaagcattctatccaaatgcaggatcaggcaaaaatgatcatgccgaaaaagtggcggaaaagctagaagc

SEQ ID NO: 535077 - DNA, 100 bp, Homo sapiens
ccgcgccccgggctcgcagccctcccgccccggctgccgggctacggggcagatggactcggagcgccccgccggaactgtggctgcaccatctgtcttc

SEQ ID NO: 535078 - DNA, 100 bp, Homo sapiens
cgtggtcgtccgcaccgacgaggatgctgtaattctgcccccattgagcccctacttcaagtactccgtcatgatcaacaaggccacgccctacaactac

SEQ ID NO: 535079 - DNA, 90 bp, Homo sapiens
cactgggttgcagcctatggcctgttatttgtctcaacaaaagaattccagagtcattaaaaagtatcacatggcagagattgggaaaag

SEQ ID NO: 535080 - DNA, 80 bp, Homo sapiens
ggaagagcgtcagagaagacaggaagaaaagcaagcacgtgatgaagctgtgcagcattccaaaatatgcccggtgctat

SEQ ID NO: 535081 - DNA, 75 bp, Homo sapiens
cagcactctgggcgaaaattggatgtgaaaatgaagccagaccgaggagaactatcctatccctgaaccaggccc

SEQ ID NO: 535082 - DNA, 100 bp, Homo sapiens
gtgataattgcaaaattgaaacagagcatgggactagcatcttgcagtctgttaagaggtgacagcatcagacaaatattgctatgagaaactgaatatt

SEQ ID NO: 535083 - DNA, 100 bp, Homo sapiens
cctgctgggcctcaaggaccgcgagggcactgtgtttagtcttgagtcagaggaggaggaataccctggaatcactgcagaagatagcaatgacatttac

SEQ ID NO: 535084 - DNA, 100 bp, Homo sapiens
gggtgctgcggctctgcgcggtccccgccagcgccccatcctgagccgggacttctaggcccctgactccatacaaggaatgtggaactgaggcatattt

SEQ ID NO: 535085 - DNA, 100 bp, Homo sapiens
ggactttgtcactcccacccctcttggaactagatgggtagtttatgccaacgtgacttcattcatacagatgaaccaaggatcgggatagcagtataaa

SEQ ID NO: 535086 - DNA, 97 bp, Homo sapiens
cagatacaagatttccttactgaaaccctctacaaaggcattagtcctatcttgtaaggctgtgttaggtcctctggctctagaaacagcaagagtc

SEQ ID NO: 535087 - DNA, 100 bp, Homo sapiens
aagaaacataaagtaatgaatgagatcaagaaagagaatggagaagtaaagattttgctgaaaattgctgcaatagtattattctgctccacttctagcc

SEQ ID NO: 535088 - DNA, 100 bp, Homo sapiens
aagaacctgagtcaggacgtaaatggaaccctggactttgaagaatatcctgaacatagaacgaactttttcttactacttcaggctgtcaattctcatt

SEQ ID NO: 535089 - DNA, 101 bp, Homo sapiens
actcatcggtcagcagaaaatattatgcggagtgtcacggcgtcatctacgtcattgactccaccgacgaggagaggctggctgagtccaagcaggcgttt

SEQ ID NO: 535090 - DNA, 88 bp, Homo sapiens
cctcccgaatagctgggattacaggtgagcgacctgtgagagtttatgccgatggaatatttgacttatttcactctggtcacgcccg

SEQ ID NO: 535091 - DNA, 100 bp, Homo sapiens
gcgcgcgacctccggccctgcgcgtgcgccgtggcgcggcccggctgacagtgtaaacaggaacatcgataagtagtgtaaaaacttgcacaatgaaatc

SEQ ID NO: 535092 - DNA, 96 bp, Homo sapiens
gtcttggcgattcggcccgacgagctccgctttcgctacagcatggtggcctactggagacaggctggactcagcttcctggacaagatcgacgtg

SEQ ID NO: 535093 - DNA, 90 bp, Homo sapiens
acaacatttcaaagggaatacattgccagaacttggaatactctactggacaaacatttcctccaagagagaagaagaaggaggttcctg

SEQ ID NO: 535094 - DNA, 100 bp, Homo sapiens
gagcagctggcccggctgggcccggggcgcgcagctgcccgccggggcgggagccaaggcactgatgtttgaactggaaacttcaaaacgtttaataaga

SEQ ID NO: 535095 - DNA, 75 bp, Homo sapiens
gctgtttgtattttggctgctgcaggagccattttagttattttaccaagaaaatggtttgcacgactttgaaca

SEQ ID NO: 535096 - DNA, 100 bp, Homo sapiens
tgatgtctttaatgaaaagggatggaactacattcttgagttcttctggatctgcctcagtcctgacacacagcagctcgggaaatagtctaaaacgccc

SEQ ID NO: 535097 - DNA, 50 bp, Homo sapiens
cattgtcaaggtcatcctctctgagaagtttgcctgcaatggtactgtaa

SEQ ID NO: 535098 - DNA, 82 bp, Homo sapiens
tatcggggcctttatttctcgtcggcggcgccctgcaccgcgcctcgcaaagctttatcctgtggataaacgcagagtgaac

SEQ ID NO: 535099 - DNA, 75 bp, Homo sapiens
gcatgagcgagctctaccctctgcagatctcccccgtgtcttcctatgcaggctgaacagtccaaagaagagcag

SEQ ID NO: 535100 - DNA, 98 bp, Homo sapiens
gcacctggacgacgcccggcgccagcacatcgcaggcaggtgacagcagggacatgtctcgggagatgcaggatgtagacctcgctgaggtgaagcct

SEQ ID NO: 535101 - DNA, 99 bp, Homo sapiens
cattgatgaaggaaatgctaaagcgattccaagaggaggcctaccagaaactggccagcgagaccctggaggagctggactggtgtctggaccagctag

SEQ ID NO: 535102 - DNA, 74 bp, Homo sapiens
ctggatggaagatagcttgaacagggctgacaacatttttccttttccgtacctggagtagaacagaaaaatta

SEQ ID NO: 535103 - DNA, 100 bp, Homo sapiens
tgcaggtactgggagatccatagggaggacggcggaacatctggaggctgggaaatgtgttttccaagcagtgaagcacttgccgtgttgaactgaatgc

SEQ ID NO: 535104 - DNA, 100 bp, Homo sapiens
gcaggcctttgctggacagatgaagagtgacttgtttctggatgattctaagaggtgattcccaggaggatcatttacagatagagcggctacaccagcg

SEQ ID NO: 535105 - DNA, 100 bp, Homo sapiens
tgtggatgcaaatctgagcgttctcaacttggttattgtaaaaaaaggagagtttggagctgtgatggaaggccagctcaaccaggacgactccatcctc

SEQ ID NO: 535106 - DNA, 74 bp, Homo sapiens
attacttgcatagaatgaccactttattctgcattaattcttgtgaaaatgccattgtgtgctggaaacctggc

SEQ ID NO: 535107 - DNA, 101 bp, Homo sapiens
gctaagacaccgggacctcctggaagccaaaaatgcaagaggaacagagatcaggtcttatggcaatgacccctgaacggcagaatgcatatatctcccaa

SEQ ID NO: 535108 - DNA, 51 bp, Homo sapiens
aaagatctgctaatgaatgacagggtcctaggcctacttacaagcctccag

SEQ ID NO: 535109 - DNA, 98 bp, Homo sapiens
aacgttctaaaaagaggcgaaaggaagcaagcagttcagaagagccaaggaataaacatgcaatgaacccaaaagggcttggtccagcatagtttatc

SEQ ID NO: 535110 - DNA, 119 bp, Homo sapiens
ttgaagctaaacccatatgcaaagaccatgcgccggaacaccattcttcgccaggccaggaatggactttgaacatgtcggggatcgccctcagcagactcgcccaggagaggaaagca

SEQ ID NO: 535111 - DNA, 76 bp, Homo sapiens
gccttgggcccgtaatctcacgacctccgcctgcggcctcctcgcaaaacaagattgatgaggacatgactgcccg

SEQ ID NO: 535112 - DNA, 100 bp, Homo sapiens
gaccatacccctgtccacctggcgttgctggatgagatcaaccctgaccaccccattgtggagacgctgcggcagaaggctgaggccgacaagaatgata

SEQ ID NO: 535113 - DNA, 100 bp, Homo sapiens
acatcactttagaccctccacctaattgcaggcatttggctttatgtcccgagttgccctacaagcagagaagatgaatcatcacccagaatggttcaat

SEQ ID NO: 535114 - DNA, 100 bp, Homo sapiens
cgcagatcggcgcccagcaatcacagaagccgacaaggcgttcaagcgaaaacatgaccgctgagcccatgaggtttcagtgttgactggtgggctcttg

SEQ ID NO: 535115 - DNA, 83 bp, Homo sapiens
ggccagggaaccctggtcaccgtctcctcagaggagaaggcagagcccccccaggctatgaatgccctgatgcggttgaacca

SEQ ID NO: 535116 - DNA, 100 bp, Homo sapiens
aaagacttgatggtctggtagaaacaccaacaggatacattgaaagtgatcgaactgtgagaatttggaaggctcgcaatttgcaagatggtcagatctc

SEQ ID NO: 535117 - DNA, 83 bp, Homo sapiens
ctgagtggtttttcggatcatgtctggtggctccgcggattataacagattacaccaccaccttcactgtcagatccacttaa

SEQ ID NO: 535118 - DNA, 100 bp, Homo sapiens
cctccaacttttgccctggattacagtctatgactttgaaagaagccatcaagtcttcactcatcatcctcaaacaagtaatggaggagaagctgaatgc

SEQ ID NO: 535119 - DNA, 96 bp, Homo sapiens
ctgaagatggtgaaggagctggagaagcacggagttcgggggatggcacagaatgggaggacactttgatgttctggaaaggaatagctgatgtag

SEQ ID NO: 535120 - DNA, 82 bp, Homo sapiens
aagcagccgatccagcctgcggagcctgtggggcaggtgtctgcttttggggcagagttttcatcggaggcatgcagagagt

SEQ ID NO: 535121 - DNA, 75 bp, Homo sapiens
gtcaataaggggtcataggtggaaaagacatgagacaaagcatggaggacacaagaatgggaggaaaggcggact

SEQ ID NO: 535122 - DNA, 92 bp, Homo sapiens
ccatcctgccgtccttctccactttcgccagcccgtgccgcgagcgcggcctgcaggagtcaccttcaggccattcagaggaggaaagagag

SEQ ID NO: 535123 - DNA, 83 bp, Homo sapiens
catgaccccagtgctgcctgcattcgcggggcatgttcccgaggctgtcaccaggtgagaagccctaccactgcaactgggac

SEQ ID NO: 535124 - DNA, 73 bp, Homo sapiens
aatgccttcttgctgccaattaaaactgtaggtgtgcagacggcaaatggatacatcttgttttttcatatta

SEQ ID NO: 535125 - DNA, 83 bp, Homo sapiens
gagcgcagcagtgacggcgaggaggccgaggcaaaagactggtttaaaagaattagagttcttgaaaaaacttaatgatgctg

SEQ ID NO: 535126 - DNA, 50 bp, Homo sapiens
ccacagctcctggagccccacaggtcatcatcagatttgaaatatttaaa

SEQ ID NO: 535127 - DNA, 98 bp, Homo sapiens
ttttatctccagttctgtcatcatcaccaccacacactgtgtatgataagtattatcagcaacataatagttctgggcatcttcattaagtacaagga

SEQ ID NO: 535128 - DNA, 83 bp, Homo sapiens
tccctgctcagctcctggggctgctaatgctctgggtctctgcgggtccatatggaatatttgctggtagggatgcctccaga

SEQ ID NO: 535129 - DNA, 100 bp, Homo sapiens
ggggcggtggctgtgctagacttcattcactactgcagagccaccgtgtgctgggaactaaaggatttgattgccttatgtgacaagcccaagatctgtg

SEQ ID NO: 535130 - DNA, 101 bp, Homo sapiens
ggaaggattaaaatatctccatgacaatcagatagttcaccgggacataaaggagatatgtcagtattgaattctcccagacatcagagctgtataatgca

SEQ ID NO: 535131 - DNA, 97 bp, Homo sapiens
ttccccgggacttgggaaccacttctgcctccctccctggggcgtggaggctgaggaaaaggagggatcgcttacacctgagacgaactacagaaca

SEQ ID NO: 535132 - DNA, 75 bp, Homo sapiens
atagcgtggagtgacggtgccaccgcggcgcagatggtgaattgtctttgagtcggtcacttgtcaatagctctg

SEQ ID NO: 535133 - DNA, 82 bp, Homo sapiens
gcgggtggaggtggtgtccccactgagctcttggaagagagaagtggaagcacagaccatcgaagaactaaagcaacagaaa

SEQ ID NO: 535134 - DNA, 75 bp, Homo sapiens
gggagcggagccatggcctccggggcaagattcttgccaagagaattaatgtgcgtattgagcacattaagcact

SEQ ID NO: 535135 - DNA, 75 bp, Homo sapiens
ccgcagaggattcgcagcgtgagcgccccgcagcccgctcaggaccagggagaagaaatgggtgaccgttggtga

SEQ ID NO: 535136 - DNA, 50 bp, Homo sapiens
ctgtcgaaaaatgggggtgcctgagccggatccagagcaatgtagaaggc

SEQ ID NO: 535137 - DNA, 83 bp, Homo sapiens
ctcacagtgggggtgtacgagtcggccaagttgatgaatgtgttcacgcctacatcatcagctccctcaagaaagagatgccc

SEQ ID NO: 535138 - DNA, 85 bp, Homo sapiens
caaggagctaaagcagcgtgcgttcagccctgggtgtcaacagcatctccaccctggagcctgtgagccggtgccagcgcctgag

SEQ ID NO: 535139 - DNA, 96 bp, Homo sapiens
gaagacgaaactcctgcacctgtatatagggccaagtcaattctggagacctgggtgtgggtcaagcaaccaggatgcacatgatggggaagtcaa

SEQ ID NO: 535140 - DNA, 98 bp, Homo sapiens
ctcctcttccagtttgctcatcacttagaactttggcgactgggatccacagttgcaacagtcaagttcatccgagaagtaacaccatatatcaagaa

SEQ ID NO: 535141 - DNA, 82 bp, Homo sapiens
gtttggaaagacccaggagaagccgcccaaagaactggtgaaatgacaatggatgctctgttggctcgattgaaacttctga

SEQ ID NO: 535142 - DNA, 102 bp, Homo sapiens
ctggagcctcagttggaagcagccgatccagcctgcggagcctgtggggcaggtccctggggggtgatgttgcctctgatggtgacttcctcatctttgagg

SEQ ID NO: 535143 - DNA, 50 bp, Homo sapiens
aaaaaagaaagattttagctcgaaagctgcaagaccttcctccaaggaac

SEQ ID NO: 535144 - DNA, 74 bp, Homo sapiens
gacaatgtcaagaaagaaaactcctccttgtacctagcatacggcggcatcaagaaaggagagcaattttgacc

SEQ ID NO: 535145 - DNA, 71 bp, Homo sapiens
aaaggatatgatcgtgtgtctgtgatgcgtccacagccaggagacacggcatttgttgctatcggggacta

SEQ ID NO: 535146 - DNA, 75 bp, Homo sapiens
cagacatggcgcgtcttctggagcaatgggagggggacttgatctcatcttcatgccaggccttgggtttgacaa

SEQ ID NO: 535147 - DNA, 101 bp, Homo sapiens
tccaggaatgctatgatagacgacgagaatatcaattatctgactctaccaaatagtaacagttaacctcttccacatgcagcatctgcaggctgcttccc

SEQ ID NO: 535148 - DNA, 90 bp, Homo sapiens
gctcagcgctccgccaggctctcctgctgctcgcagcggccgccgagctctcgccagatcatctgttacgtactgcaagtcagcattccg

SEQ ID NO: 535149 - DNA, 98 bp, Homo sapiens
cgttagctaattaaaacatttttcagggacgtagccatccagagaatgcaggctcaacagtaccagcagcagcgtcgaaaatttgcagctgccttctt

SEQ ID NO: 535150 - DNA, 83 bp, Homo sapiens
taacgaaccacaaatacctggctatattgtcgatgattcagtcagagtatggactttctgtcagattttgagatgatgttgca

SEQ ID NO: 535151 - DNA, 100 bp, Homo sapiens
ccctgagcctcgggctccggcccggacctgcagcctcccaggtggctgggaagaatcagcatgattcttcagaggctcttcaggttctcctctgtcattc

SEQ ID NO: 535152 - DNA, 83 bp, Homo sapiens
ctgggctcagggtatggaaccggccttctttcagccaacagacattcactcatgggggatatgagactttctactcggaatat

SEQ ID NO: 535153 - DNA, 75 bp, Homo sapiens
atcaggagcccatcgtgggctagggaagatcctccgggacctaacggcccagtctgcgctcctcagaccaccggc

SEQ ID NO: 535154 - DNA, 88 bp, Homo sapiens
caggctctctccgctcgattttgtcaccgttatgtgggaagcgaatccagttcaattcccatgaaagtgcagcacatgcaattgtttc

SEQ ID NO: 535155 - DNA, 100 bp, Homo sapiens
caaggcgtgagaattcctcaatgactgccctctaaaggaagaggtagcagtagctgatgtgcagtttggccccatgagatttcatcaagatcaacttcag

SEQ ID NO: 535156 - DNA, 100 bp, Homo sapiens
acagtgtaaaacaacagttttgcattttggaaagtaaattatgcaagctccaggaagcactgaagctgtcaccactgactaaagaagagaaaactgcggc

SEQ ID NO: 535157 - DNA, 75 bp, Homo sapiens
aggggagtggaaaggctctcagtgaaaaagggaagctgaccaaagccaagcgtttggtggtgcatgaggggagcc

SEQ ID NO: 535158 - DNA, 100 bp, Homo sapiens
ctggttctgctgcttctgggccctacgcgcggcttgcgcggaacttaggctgcggaactatgtcccggaggatgaggacctgaagaagaggagggtgccc

SEQ ID NO: 535159 - DNA, 50 bp, Homo sapiens
ctcatacatgctggtacatgctgggttctcagaggcactgtgactgactt

SEQ ID NO: 535160 - DNA, 75 bp, Homo sapiens
gcacccagaccggtttgcgtaccctattccacccctttctaaggcacaaaatgatgtgatggaaatgaagatgca

SEQ ID NO: 535161 - DNA, 100 bp, Homo sapiens
cactttccaaagtggatgcctccggggaggaaagaccacagcaagattctttcattcgtctcctcctagcctgggggaccaggctcgaactgaccctgga

SEQ ID NO: 535162 - DNA, 100 bp, Homo sapiens
tgcgacatgtggaaaatgacggttataagaccatttatttctttggagacaaaactatgccaatggactctgtgactacatgactaataaaatatggcag

SEQ ID NO: 535163 - DNA, 100 bp, Homo sapiens
gtcctctggtgagaaggtggtgaggcttcccgtcatattccaggatctgtggttgtggttccggagaatctggttgtgctgtgtgtggatgttgcaaggc

SEQ ID NO: 535164 - DNA, 82 bp, Homo sapiens
cctacttcaaggataagggcgacagcaacagctctgccggctggaagatccaggatgagaagactgataaaagaagaagcta

SEQ ID NO: 535165 - DNA, 75 bp, Homo sapiens
ccaatgtggacggactcactgccctgcaccaggctgacttatccttgtataatgaattccgattgtggaaggatg

SEQ ID NO: 535166 - DNA, 75 bp, Homo sapiens
gtggtgctgaaacgtgaagatgtgtttaaagcagtacaagtccagcggagaaattccaagattatcccctaaaac

SEQ ID NO: 535167 - DNA, 74 bp, Homo sapiens
cagacgagcaccaagaagctgagaatgctgtttcctcaggaaagatgaatgggagggctgattttcgagagccg

SEQ ID NO: 535168 - DNA, 100 bp, Homo sapiens
agctgcgatggccgtggccgtggggagaccgtctgcagagttgcagcagaaggtggaagagaatgagcacctgaggctggagctgcagatggtagagacc

SEQ ID NO: 535169 - DNA, 100 bp, Homo sapiens
cttactaagacagaaaactggtcttcatgcctacacactgtgtcaggtttctgaaggattgtcattcttgcatagcagtgtgaaaatggtgcatggaaat

SEQ ID NO: 535170 - DNA, 100 bp, Homo sapiens
ttgtagaagcagcaaataaaaaagaagtagactatgaagcaggggatattccaacagaatgggaagccctcacagggccaggggccccatcatctctgac

SEQ ID NO: 535171 - DNA, 100 bp, Homo sapiens
ctgctcttgaggttcacagatgatacctttgatccagaacttgcagcaacaataggaagaattcctttggctaccggaagaaaagggaggagaagtttac

SEQ ID NO: 535172 - DNA, 101 bp, Homo sapiens
gaagatgatgacgatgatgatgaagaggatgatgatgaagagatggcccaacagcaggccttgaggttccgaggtccggctcccccaccaaatgcagtgat

SEQ ID NO: 535173 - DNA, 75 bp, Homo sapiens
gccttgcttttggacccaaacatatacagattgaagataaaactttccaagtccttggtaatctttacagcgagg

SEQ ID NO: 535174 - DNA, 98 bp, Homo sapiens
ccgtctccaagaccgcggtcgcccccatcgagagggtcaaactgctgctgcaggattagaactaagaggacacaccagcatcggagtgtattaagccc

SEQ ID NO: 535175 - DNA, 90 bp, Homo sapiens
aggccttgactacggaggggttgccaggtacaggtttgcagattccgccagcagcacagcaagctctacagatgagtggctctttggcat

SEQ ID NO: 535176 - DNA, 100 bp, Homo sapiens
gtggatgtggatgcaaacaaggttattcttaatcctgtaaatacgaatctttccaaaggagatgcccggttgtttacattcagagctctatcaataagag

SEQ ID NO: 535177 - DNA, 51 bp, Homo sapiens
ccaccagtggagtccaggatgagctgcatgaaagcggttacgatgctggca

SEQ ID NO: 535178 - DNA, 75 bp, Homo sapiens
ggcttgtctcaactttgaatttttcagttccgccatggagtcatagttgcagctgactccagggctacagcgggt

SEQ ID NO: 535179 - DNA, 73 bp, Homo sapiens
gcacagagaagttcaagaccagcagagaccggaaggatcacatggtgctggagaatctggtaaaagcaccatt

SEQ ID NO: 535180 - DNA, 100 bp, Homo sapiens
gtcgtgatccagaagtccagagctgaggactgcctgtttgcaggaagggaatttgaaggagaagaagaatatctggagatccttggcatcaccagggagc

SEQ ID NO: 535181 - DNA, 100 bp, Homo sapiens
gtcgtatcagtctttgaaacaaacatcagagttcttgggtttattaacaaaactaggatacccaagactgaagaaacaagaagaaacctcaagtgtattg

SEQ ID NO: 535182 - DNA, 100 bp, Homo sapiens
cagacacaagtcttcactccttcctgcgagccctgaggaagccttaatgactcgcgttggagccttttgtgccaggaggaggggacctggtttctggctg

SEQ ID NO: 535183 - DNA, 51 bp, Homo sapiens
aaatacctctctagaagctattgttcaagtcttgaaaggggactataaaac

SEQ ID NO: 535184 - DNA, 78 bp, Homo sapiens
acattaatcagatactgcatttaagagcaccactaggctggacagcgacagagtgtcgtctgcctctagcacagccga

SEQ ID NO: 535185 - DNA, 120 bp, Homo sapiens
gccattgctgcccagcagctaggcatcaagtacatcgggatgaggaatgagcaagcggatggagctatgacattgaagagaggaaggttccaaaacccaagtccaagtcttatggtgcaa

SEQ ID NO: 535186 - DNA, 99 bp, Homo sapiens
gaagctggccaaagcctgcccagacggctcacctgtgcgggatggaacaaaaggaggcggctttccggaaagtagtacaagcaactatggtacgcgatc

SEQ ID NO: 535187 - DNA, 100 bp, Homo sapiens
cacctccaggatcaggatgcagaggcccgccatgttcatagaggataaagcagtagacaccctggcttacctcagtgacggtgacgcccgagctgggttg

SEQ ID NO: 535188 - DNA, 95 bp, Homo sapiens
gtgaggcaggctcgcctcctccagctgttgttgctgctggaacaagactgccaatggagactgccgcagagacccccgggagcggagccgcagcc

SEQ ID NO: 535189 - DNA, 73 bp, Homo sapiens
cccggagacagctgccccagtggaggacatggctcggaggattctgttccacatgtacgactcggacagcgac

SEQ ID NO: 535190 - DNA, 75 bp, Homo sapiens
gcgcctctcccaggacccgcctggctgcgagatatggaacccgagcgtcatgttagggtgaagcagaggacctca

SEQ ID NO: 535191 - DNA, 75 bp, Homo sapiens
atttggttacacagaacagtcagccagatcctgtttctcccaacaggatgtggtttcccacagtaaaaaacttac

SEQ ID NO: 535192 - DNA, 82 bp, Homo sapiens
ctagccaatggtggtcatggagtagaagggagcgatactacagatttgataatgggctgcattaaaagtaaagaaaacaaaa

SEQ ID NO: 535193 - DNA, 100 bp, Homo sapiens
gctgcagatgattctctacgaagtgatagtgttccatctcttcctgatgaaaaaggctcttaaagactctgaccaagtagcacagagtgatggggaggag

SEQ ID NO: 535194 - DNA, 101 bp, Homo sapiens
tgtatttcccaatcaacctggtggaataagaattctgaaaacaccatctattttgtaggagcattgcttttcgtggtgaaagaggcaatgatgaatctgcc

SEQ ID NO: 535195 - DNA, 98 bp, Homo sapiens
gccgtcatgctcatccaggcaggagttcattcaaaagtgcctgcagtctgagcctgctcgcagaccaacagccagagaacttctgttccacccagcat

SEQ ID NO: 535196 - DNA, 101 bp, Homo sapiens
tcaccttctgtggaaaggaagctgcacaggaagccgtgaaactgctgagtcagtgctgattctctcaaatagagcttgaaggataaatcttcatttttgtt

SEQ ID NO: 535197 - DNA, 73 bp, Homo sapiens
tcaagatcgagttcatcgggcagatcggcctctccttccgatgaaaagagaaaggaagaatggactacagcca

SEQ ID NO: 535198 - DNA, 100 bp, Homo sapiens
ttgcatcagcaattggcaaaatatccagctccaggtcccacaggggctcttcttccccacgaaaaagatcttattcaagttcatcatcttctcctgagag

SEQ ID NO: 535199 - DNA, 98 bp, Homo sapiens
tctttgcctatggtcagacgggctcagggaagacatacaccatgggggaggccagtgtgggcattgggatcccgtggcagttgcagcactgaagtgga

SEQ ID NO: 535200 - DNA, 98 bp, Homo sapiens
aacaatgatggagaaaaggaaccttcattaacagatgccattccctctcacccaagagatgttagtaggcaggaagaggcggagggagagctcagtga

SEQ ID NO: 535201 - DNA, 100 bp, Homo sapiens
gtggaattcgcgaagctgccaaagccttagacaagctgggctgggcgagtatctcttcgaaaggctcactctcaagcacgactaagagccttctgagccc

SEQ ID NO: 535202 - DNA, 100 bp, Homo sapiens
ctcagatcactgtataaccacccagtaccaaaggcaaatactcctgtaaatttgagtgtgaagctggataagaaatcatctccatccacaggaagcctag

SEQ ID NO: 535203 - DNA, 74 bp, Homo sapiens
gccggtgctgcagaaccagatccgggagcacgtcatcgccatcgaaggaatactcccccagttgcaagaggcgc

SEQ ID NO: 535204 - DNA, 118 bp, Homo sapiens
cggacgaggcggaagaccgcgcgcagggcctgcagcgggagctggacggcgagcgcgagcggcgcgagaaactcatgatggagcagtccaagaagtcctccctcatggtggcccgcag

SEQ ID NO: 535205 - DNA, 80 bp, Homo sapiens
ctgggacactgccatcctcttcaccaggcaggatgaggatgggacagaagaggataacagtcgtgttgaacctgttggac

SEQ ID NO: 535206 - DNA, 78 bp, Homo sapiens
aaagaaataccaaggaagactatttttgatcagcttgaacgggtctttttacgacttggccatgctgaaacagatgaa

SEQ ID NO: 535207 - DNA, 118 bp, Homo sapiens
gaccggccgctctcccctcctctcacggcacctcccaccatgaaggtggaatgaatcttacttgttgaatatcttctggttactagttggattcatttgtgaaagaatcattttcccc

SEQ ID NO: 535208 - DNA, 99 bp, Homo sapiens
ggaagttgctgggttcgttttattcagcggcagtggtgctttcccgaatctcagaatgccgaaaatgttggggcttttcaggaagcataataagattcc

SEQ ID NO: 535209 - DNA, 150 bp, Homo sapiens
ggccgactacggccgcctcagcagccggctgcaggccagagagggcctcgggaagagatgcgaggatgacaaggaagagagagaaaatccttcaaaacggagtagaattgaacgtgatatagataacaatttgatcacgtcaacaccaag

SEQ ID NO: 535210 - DNA, 82 bp, Homo sapiens
ctggagagcttcatcaaaaatagtgatagctttgataagtttctgctttgggacaaccatacatctaattccttaaagtagt

SEQ ID NO: 535211 - DNA, 75 bp, Homo sapiens
cgactgctagagccgagcgaagcaggcctgtgggagcaaatctgtgtatgacggcccggagcaggaggagtattc

SEQ ID NO: 535212 - DNA, 100 bp, Homo sapiens
attccttcccccgtcatggaaaacaactttgtggatttgacagaagcatcaggatactcaaagtggaaaggatcacagatttttggtagtttctgggtct

SEQ ID NO: 535213 - DNA, 82 bp, Homo sapiens
ctagagccttggatccaggagaacggcggctggttatccatcttggtgcatcctgacaaaaatcaagatgatgctgacagag

SEQ ID NO: 535214 - DNA, 75 bp, Homo sapiens
ctgcaccctggatggaaagcaggtgtactttcggctccatgcttccatcctgaagctcctggggaagcccgattc

SEQ ID NO: 535215 - DNA, 100 bp, Homo sapiens
gaccatcttcaagcgcctccgctcggtgcccactaacaagggacatctctacaccgttcccatccgggaacagggcaacatctacaagcccaacaacaag

SEQ ID NO: 535216 - DNA, 100 bp, Homo sapiens
gccggtcaaaatggaagtgaatccccctaaacaggagcacctgctggcgctaaaagatattgatgatgttaagaagttcaaaccgggttacctggaagct

SEQ ID NO: 535217 - DNA, 98 bp, Homo sapiens
cccctccagccttcgagtcgttcttgctcttcgagggcgagaagaagatgaacgtgaagccagagaaaatgtgaagagagagcaagatgaggcctatc

SEQ ID NO: 535218 - DNA, 74 bp, Homo sapiens
ctgccattctggattccagaagatttaactacgtggtccgggagaccaaaatcaactgtgttcgtctggctaca

SEQ ID NO: 535219 - DNA, 127 bp, Homo sapiens
gagcagagaactcggcgccgccaaacagcccagctcgcgcttcagcgtcccggcgccgtcgcgccactcctccgaatagaagcagatttgggatatcctggaggtaaagcaagaattattcataagg

SEQ ID NO: 535220 - DNA, 82 bp, Homo sapiens
accacattctccttcagtagtgcttcacttgacaaggtcctgctaagttctgaggagggtttcgggtcagtggagaaggtgg

SEQ ID NO: 535221 - DNA, 75 bp, Homo sapiens
cggaaatgaggaggagatggtggaggaggctgaaggaccagctttgtttaaaggaatcggtgaaatgctgtggtt

SEQ ID NO: 535222 - DNA, 96 bp, Homo sapiens
ttctaccagttcctcggggtgcagcaggaactcgaatcatttatgacagaaagtttctgttggatcgtcgcaattctcccatggctcagaccccac

SEQ ID NO: 535223 - DNA, 50 bp, Homo sapiens
cagtgtgttagctttccccaatgctcctcagtgggtagtgcacttccacg

SEQ ID NO: 535224 - DNA, 100 bp, Homo sapiens
acaagatctcattccatcatacagtctaggcagcaacaagaatggtagataacgcagatcatctctggaaaggatattgatccgcctcatgtaaagtatg

SEQ ID NO: 535225 - DNA, 50 bp, Homo sapiens
ggttgatcgtggattatttgagttgaaggagaagagccaggcgtgcggag

SEQ ID NO: 535226 - DNA, 97 bp, Homo sapiens
caagcggggtaaagtcctgggcacaagccagcgtcacccatggagcacatggagatggcagcacgctggctcttctcctgaacttcctcgcctgcct

SEQ ID NO: 535227 - DNA, 100 bp, Homo sapiens
gctgggctgaaaatactggagctcataacccctactccacagctgctcttgctgaagaggccagtgaagaggaacttccctctgatgttgatttgaatga

SEQ ID NO: 535228 - DNA, 76 bp, Homo sapiens
gtattaccaggtccctgaaaagctaccccccaaagtcctggagctgtgcggaatcccgactgtgcctgggaaggtg

SEQ ID NO: 535229 - DNA, 82 bp, Homo sapiens
agcagtaccctgatggagtcccttgcaggttgtgaccgagattcccgacgagagagactgaggggaagagaggaaggagggg

SEQ ID NO: 535230 - DNA, 82 bp, Homo sapiens
ggacggctcagcggtctgatgcctggagcaccactgcagccagaaagcgagagacacctatggctgccgatgaaggctcagc

SEQ ID NO: 535231 - DNA, 82 bp, Homo sapiens
agaagcaggtgcttatgatggacctaggactgctggattatattccatcacaacaagatattctgcttgccagaagacccac

SEQ ID NO: 535232 - DNA, 99 bp, Homo sapiens
ctctccttggcctctcctgggatcggcccaaggccagttctccgcagtggatctcttgagcctgtcagctgcatgtgatgccttggaccagcacaacct

SEQ ID NO: 535233 - DNA, 100 bp, Homo sapiens
cagcgcgagccccttggaggggctgctggacctcagctacccccgcacccacgcggccctgctgaaagtggcgcaaatgactggtattgctcgagttcca

SEQ ID NO: 535234 - DNA, 83 bp, Homo sapiens
ggcgtgtgcgcgcccgccagctgctccggagatacggtgtggacactgccagcggctgcagccgacttggaatgacctgggag

SEQ ID NO: 535235 - DNA, 100 bp, Homo sapiens
gcgctccaagtccatgacagctgagctcgaggaacttgtctgcagatctccaggggagcccaccagcctagtcaacatggcctcggaagacattgccaag

SEQ ID NO: 535236 - DNA, 109 bp, Homo sapiens
gcagcagagcaaagttaccggacagcaattaaacacagaaggaaatacccagactgttactacaacctcgggcgtctgacatatctgaagagatggattaagaatgctt

SEQ ID NO: 535237 - DNA, 99 bp, Homo sapiens
aaatgaaagagcgccttgggacagggggatttggaaatgtcatccgatggcacaatcagcaccagcagacgtttttgaatcaactgagagaaattacgg

SEQ ID NO: 535238 - DNA, 75 bp, Homo sapiens
tcatcagactgaccgtgtcttacatcagttcagagaggaggaagaaggcacctacgatcaaactctggagttccg

SEQ ID NO: 535239 - DNA, 135 bp, Homo sapiens
tggggccctcttgataaaaagagatgtggggggattctcgacctgctaacagaactggaccttttcgaataataataacctggatgcctgctgtgctgttctctctcaggagagtacaagatatctttatggtga

SEQ ID NO: 535240 - DNA, 107 bp, Homo sapiens
agagaaatggggatcctgttttctgtcccagcccccttcagggtggttgtgagaagcaaatgaggccgcaacaggctggagtgcagcggcgtgatctcggctcactg

SEQ ID NO: 535241 - DNA, 75 bp, Homo sapiens
ttctgctgcatgacagctatgactacgacctgcaggaacaggatgtaatccctgttcattactacttaatacctc

SEQ ID NO: 535242 - DNA, 50 bp, Homo sapiens
tcaaattcatcctcatggactgcatggaggaaatctctgacatcaaagag

SEQ ID NO: 535243 - DNA, 100 bp, Homo sapiens
tgtctgttgtgtcttgttgcgggcaccgcagtcgccgtgaagatggcgtctaccagccgatctcaggatgatggggcgcagccctgggtttgccatgcag

SEQ ID NO: 535244 - DNA, 82 bp, Homo sapiens
tctttgagggacccccattcaagttcaagttcacaattggctctctgctttctatccgtcaagatgataaagtcgtgtgccc

SEQ ID NO: 535245 - DNA, 82 bp, Homo sapiens
ccctacttcaaggataagggcgacagcaacagctctgccggctggaaggaggagatgttaaagtaacccatcttgcaggacg

SEQ ID NO: 535246 - DNA, 75 bp, Homo sapiens
gcttcagggcccggagtactagtctcaacgagagacccaagaggtgagaagccctaccactgcaactgggacggc

SEQ ID NO: 535247 - DNA, 73 bp, Homo sapiens
gtggagacacggccagatctgccctccagatccagcaagtaggcaatgaagcctatgttatagggctctcctc

SEQ ID NO: 535248 - DNA, 88 bp, Homo sapiens
gaaactccttcacatctggaagaacttgaaggtgatcccattaagatactaatgccatcactgtctcctacaatggaagaaggaaaca

SEQ ID NO: 535249 - DNA, 75 bp, Homo sapiens
tggtgcggctcatcttcgagaggttgcaatgaatgtgtatgagttatcatcagctgccggattaccttgtgagat

SEQ ID NO: 535250 - DNA, 82 bp, Homo sapiens
tgctggatggaggggattttgtcagcttgtcgtcaaggctcttgtcaggatggtgaagctgttcatcggaaacctgccccgg

SEQ ID NO: 535251 - DNA, 71 bp, Homo sapiens
cagcacaacaaatgtgaatgcagtgaacagcagagaatttcaaaggaccttgctaatatctgtaagacggc

SEQ ID NO: 535252 - DNA, 75 bp, Homo sapiens
cacgctcgtgctcatctcctactgtcccacggccaccgaagaggtggctttttctcaagtatattttccagtctg

SEQ ID NO: 535253 - DNA, 98 bp, Homo sapiens
atgagaatgacagctgtgataaaaaaaaaattcatctgggcggtatctggaacttggttctcggggtataaggcaggggtctgcaagcaagcagagga

SEQ ID NO: 535254 - DNA, 75 bp, Homo sapiens
aaacgggcgctgacctcaaccagcagactgcctgcgctgctgacttaaggccccaacaccaaacacagaagcaac

SEQ ID NO: 535255 - DNA, 75 bp, Homo sapiens
gtgcagccgagtcactactgcctgcctgcctgcctgctacgggccgcctgggcagaatgtcacgatggacgaggg

SEQ ID NO: 535256 - DNA, 90 bp, Homo sapiens
gcaatagaagctgtggatgaatttgcttttctggaagattttaccaaatgttgcaagaactctggagttcttatggtagtaaaatgccgg

SEQ ID NO: 535257 - DNA, 74 bp, Homo sapiens
aaagacagatgttactgtggttaggtttccagcctttgtggaggcccagaataagattactgtgccatttcttg

SEQ ID NO: 535258 - DNA, 100 bp, Homo sapiens
gacgcacggagcttgtctgcgccggccaggccaacgcagacccgtcagtgataaactgtctgcataacctgtcccgtcgtatcgccaccgtgctgcagca

SEQ ID NO: 535259 - DNA, 74 bp, Homo sapiens
cagagtccgcggccggggcgcgggaggccaagaataaggagacgggtgctttggctgcggccaaagtcattgaa

SEQ ID NO: 535260 - DNA, 96 bp, Homo sapiens
tggactcgcgaatacacgccccaactttccgcggagttcaaggtgcccgggaagaacccaccgtccagcaggcacagcgtcggtcagctgtctttc

SEQ ID NO: 535261 - DNA, 142 bp, Homo sapiens
tttctgaaactgctgaagatattattgctaaagaaagagaacagaatgtattgcatatgctgcaccagaactttatgaaatcttcctctcaagagcaaaagaacggtggaaaagtttcagtgaaacaagttcagagaatgat

SEQ ID NO: 535262 - DNA, 75 bp, Homo sapiens
gatcactttttgttcaaaaggaggagatgtggcaccatttattgagtttctgaaggccatacaagatggaacaat

SEQ ID NO: 535263 - DNA, 100 bp, Homo sapiens
ttgtggatattttggtggggtgaagaccccagttttgctgaccttattcaccatgacttatcagatcgttaactgaagacaatatgcaaaattctcacat

SEQ ID NO: 535264 - DNA, 82 bp, Homo sapiens
tcactccgcccggccccagccctagcgctggccgcgaccccggcgtccagaatgacagggtccagaaactggcgagccacga

SEQ ID NO: 535265 - DNA, 83 bp, Homo sapiens
gtcggcttgtcctggctcttgccctcatcctggttctggaatcctcagttcaaggcctatatgaacccaatagcaatggcgag

SEQ ID NO: 535266 - DNA, 100 bp, Homo sapiens
cagaaattcctggactttcaatcaactttgcaaagcattgccatttttgaaaaatacagtaattcttctgtatccatttgcacctctgattctgctctac

SEQ ID NO: 535267 - DNA, 78 bp, Homo sapiens
accagccgtgtgcagcctatcaagctggccaggtgtgtcccggcatggatatccggaacaacctcactaggttgcatg

SEQ ID NO: 535268 - DNA, 74 bp, Homo sapiens
aagtgcccttggacaaagcctgaaaccagagccagtcttggtgctctgtgttcacctggttcatctgaggagct

SEQ ID NO: 535269 - DNA, 110 bp, Homo sapiens
cacagtctgtggcacacccacttatgtggctccagaaatcattgctgaaactgggagcatccccccggtccttcagaatccaaacacgctttccgtcctaccaacgcagc

SEQ ID NO: 535270 - DNA, 100 bp, Homo sapiens
aagtgggggttatggtgggaggagccgatactgagcttcttcctatttgccatggatgaatgcatgatatctcttggtaaaatggcccagaagaaacaca

SEQ ID NO: 535271 - DNA, 75 bp, Homo sapiens
ggctgacaacttgttggcagctgcagacaaagagaagtgccagaaagcccggaagcaaggaaggaaagtgaccaa

SEQ ID NO: 535272 - DNA, 88 bp, Homo sapiens
ttctctgctgcaccgacctcgacgtcttgcctgtgtcccacttgttcgcggcctatagggaccctccattttccatatccaggaaaat

SEQ ID NO: 535273 - DNA, 75 bp, Homo sapiens
gcgggcaccgcagtcgccgtgaagatggcgtctaccagccgggcggcgactggcggcgcgatggacctgaccggg

SEQ ID NO: 535274 - DNA, 75 bp, Homo sapiens
tggattcaacatcaacacttgcagggaaatgatcagtctgttggataatggcagtaatgtgtgtggctggcttat

SEQ ID NO: 535275 - DNA, 75 bp, Homo sapiens
ctgcaccgacttggagctctttgctctagaggacaaaatcccagtccttggcacaaactcaggaaatggaagccg

SEQ ID NO: 535276 - DNA, 82 bp, Homo sapiens
cttctcacaatgaggctccctgctcagctcctggggctgctaatgctctgggtctctgattgaaatggcgattgagacgctg

SEQ ID NO: 535277 - DNA, 101 bp, Homo sapiens
aaaggagattgtgacatatcactgcattcaatacctagatgatgaagggatgagaccatgcagcctgcgaaaccatcctttcttgaatattttgaacaaaa

SEQ ID NO: 535278 - DNA, 75 bp, Homo sapiens
ccctcatggggaaaatctccccggtgactttcagctggatgaacatcgtactgagcaaaagaagttaaagctcct

SEQ ID NO: 535279 - DNA, 88 bp, Homo sapiens
gggaaggaagatccggcgcggggcacaggatccggagctggagcccccaggtgacggtgacgttgtaaataatatgtatgagcccaac

SEQ ID NO: 535280 - DNA, 100 bp, Homo sapiens
tgtcctgaatgtggcttggttgtaggtggatcacacaataataatgtacttgattggaccagatggtgagtttctagattattttggccagaacaagagg

SEQ ID NO: 535281 - DNA, 87 bp, Homo sapiens
ctactggctgctgtcaccctcctgggagtcctgctgcaagatgaggacggggacttggttgccttttccagtgacgaggaattgaca

SEQ ID NO: 535282 - DNA, 139 bp, Homo sapiens
agacggcgggcatggtggggcgggagaaagagctctctatacactttgttcccgggagctgtcggctggtggagtaatgggtcaggcacctcagaagatctgttttggaaacttgacgcccttcagaccttcattcggg

SEQ ID NO: 535283 - DNA, 100 bp, Homo sapiens
ctgcagggctgaagcggcggcggcggtggggactgcacgtagcccggcgctcggcatggctctcctggtgctcgatacgtcggtaacctttccagagatg

SEQ ID NO: 535284 - DNA, 75 bp, Homo sapiens
ccgagcccggcgggaccatgttcaccagcaccggctccagtgggctctggaccttggggccagcttgcggtaaga

SEQ ID NO: 535285 - DNA, 90 bp, Homo sapiens
cgccccccgaaaccccagacatcaaccagctgccgccgtccatcctgctcaaggttgaccccctgtttacagtgccagcgccaccaccgc

SEQ ID NO: 535286 - DNA, 75 bp, Homo sapiens
cgtggaggcagaggtggcatgggtcggagagcgaggagaaggttgtcacctatgaccacattgggcccaacgtct

SEQ ID NO: 535287 - DNA, 97 bp, Homo sapiens
ccagctggaagaggcggtggcggcgggtcggggcgaggtgacctacggctccttcgactacacctcgctgctgtacctctccaactacctggaggac

SEQ ID NO: 535288 - DNA, 75 bp, Homo sapiens
cgatgctgagagagagcaagcgtttcagcgcctacaattacagttcaaccttcacttgactggagacatccacgc

SEQ ID NO: 535289 - DNA, 82 bp, Homo sapiens
ggatttggaaatgtcatccgatggcacaatcaggttcaagcactgtcttcctgttggccctgacaatcatagccagcacctg

SEQ ID NO: 535290 - DNA, 100 bp, Homo sapiens
tacctgcagaaggtctctggagacatcttcagcagaaaccagtaaagacagctctggcaccaagccagccaacaagcggcccatgtcctctccagaaatg

SEQ ID NO: 535291 - DNA, 75 bp, Homo sapiens
gtcccctgcaccatgagctggggcaccgagctctggttacagaatgtctgaaggggacagtgtgggagaatccgt

SEQ ID NO: 535292 - DNA, 100 bp, Homo sapiens
tgaaataacctttgacaagattttcaatcagaaaattgacaatgcagatcttcgtgaagactctgactggtaagaccatcaccctcgaggttgagcccag

SEQ ID NO: 535293 - DNA, 100 bp, Homo sapiens
gctggaactgggttgatgttgtgaaggtggtgtgtaagaagtaccggggattcaccatccccgaggccttccggggagtgcatcggtacttgagcaatgc

SEQ ID NO: 535294 - DNA, 82 bp, Homo sapiens
ccgccccgaactaagcagggcggtcggggagatcctgaaggagctagacgagtgctacgagcgcttcagtcgcgagacagac

SEQ ID NO: 535295 - DNA, 97 bp, Homo sapiens
tggacaggcagagtgctgatgtgaaaaataccacgacaaaaccaccctagaactgtggctgcaccatctgtcttcatcttcccgccatctgatgagc

SEQ ID NO: 535296 - DNA, 100 bp, Homo sapiens
cttcaagcttaggaccacccaccatgcctatccagcattgacttccaaagactcctggcacatgaggaagaaacccagaagaggagagcaaaggagtcag

SEQ ID NO: 535297 - DNA, 50 bp, Homo sapiens
ttaagaagtacaatagcattcgcgggtgtttgtgaaccgaagtttagcaa

SEQ ID NO: 535298 - DNA, 75 bp, Homo sapiens
aaaaattgcaagagagagactattttcgttattacaaggcattaagaagaaatgcactcaccatgagcaccaact

SEQ ID NO: 535299 - DNA, 75 bp, Homo sapiens
gacgaacgtgttgtgcctgctgaggatggccggaggctcgccgacgaccttgagtgcagcagctgccccgagccc

SEQ ID NO: 535300 - DNA, 75 bp, Homo sapiens
catctcgctcggctgcgggaaatcgggctgaagcgactgagtccgcgatggagcacattttctgtgacaagtttc

SEQ ID NO: 535301 - DNA, 75 bp, Homo sapiens
cctcatcccagccatgtcatcttatctacgaaatgattcaggaaataatgcaaaaggtgtcccaaggctcctgac

SEQ ID NO: 535302 - DNA, 100 bp, Homo sapiens
gcttggcagcaaggaagaggacaggtagtggagatcctgcaatctgaaaagcagactgaaagcgggctacattgagagacctcagctgattcgagcaaaa

SEQ ID NO: 535303 - DNA, 100 bp, Homo sapiens
cagggcttcaatcaaggttataagaaaggtgcagaagtcattttaaactatggacgactccgaggaacattgagggaccgcagatgttcatggactgcag

SEQ ID NO: 535304 - DNA, 100 bp, Homo sapiens
aaattgatgtacttctgcaacaggagcgattccagttcccatcccatgtcacggatgtatctgaagaagcgaaggacctcatccagagactgatctgcag

SEQ ID NO: 535305 - DNA, 105 bp, Homo sapiens
ttattcttttgaagagtgcatttcaagctgccaaggtggagagagggattacagaaaggagaacaccttatttcaggttatgatgtgattgctcaagcccaatct

SEQ ID NO: 535306 - DNA, 88 bp, Homo sapiens
aggcatccgggccgtgctgctggggcctcccggggccggtaaagggacccaggaatgtatcctgtcaggtataatgtcagtgaatggc

SEQ ID NO: 535307 - DNA, 100 bp, Homo sapiens
gacggaggcaacggtggacacgtcattctgagagctgccactgcagagccccgccatggaagacacgccgttggtgatatcgaagcagaagacggaggtg

SEQ ID NO: 535308 - DNA, 100 bp, Homo sapiens
ctgcttcagtctgcaagtatggagctcaagttcttaattattcagaatgctgcggttttccaaggacctgctgaagttcccatgatgtcacccaatggat

SEQ ID NO: 535309 - DNA, 75 bp, Homo sapiens
cgggagcacagttccgccgaggtggccacatgttgactccccttcctggtgccacacccatgaaacccggttctg

SEQ ID NO: 535310 - DNA, 75 bp, Homo sapiens
gatgacgaactgatttctgatgatgaagcagaaggcctgtgatacttgggctgtgatcctctagagccagcttgg

SEQ ID NO: 535311 - DNA, 99 bp, Homo sapiens
gaaacatggcaggctcggatgctggattatattccatcacaacaagatattctgcttgccagaagacccaccaaaggcatccatgaatacgactttgaa

SEQ ID NO: 535312 - DNA, 50 bp, Homo sapiens
cgccatgggagccgtgactgacgatctgaacagaattaagacgaacgagc

SEQ ID NO: 535313 - DNA, 80 bp, Homo sapiens
cggtgctggaagacgaggccacagacacttctgatagtgaagacctttgcattgcagctgtaattaaagaatgccatctc

SEQ ID NO: 535314 - DNA, 98 bp, Homo sapiens
ttggctgtgttttcaatgcacaaggggaaatttggcttgcaattcatcactttgaaaaggtaaagcttgcatttccttcaacaagaaggattacagag

SEQ ID NO: 535315 - DNA, 96 bp, Homo sapiens
accccagttaagctgcgctccgggaggaatcattaaccaatggcaacaggaatccaaggataaagtgatttccctcctgttaactcatctgccttt

SEQ ID NO: 535316 - DNA, 100 bp, Homo sapiens
cttccgcagctgccgcttcagtccgaaggaggaagggaaccaacccactttctcggcgccgcggctcttttctaaaagtatccgagtgaagcctgacagg

SEQ ID NO: 535317 - DNA, 75 bp, Homo sapiens
tttgcacatgtaacatccctggggaatggatttgtaaactcaagagcttctccaaatttgattggagctactggt

SEQ ID NO: 535318 - DNA, 50 bp, Homo sapiens
ggtggatcctacatgtgccatagggtctgggaggggctgaacgtggtgaa

SEQ ID NO: 535319 - DNA, 84 bp, Homo sapiens
gcagcacccgccaccgtcgccggccgcccgcacgtccgtccgttgatattcactgatggactccaaagaatcattaactcctgg

SEQ ID NO: 535320 - DNA, 75 bp, Homo sapiens
cgtcctgaaaggccagagcatcttcttcactgggagtgcaggacacaactcagatgggaagttcatcgcccgggc

SEQ ID NO: 535321 - DNA, 75 bp, Homo sapiens
gcatggcttggagcacttcctattccactggattgggaaagaccatggcagcaacacgctagaagggtttatgaa

SEQ ID NO: 535322 - DNA, 83 bp, Homo sapiens
gtggcaggctctggactcctaaagctctggagcggaatacggttggacagaatgaactgaagattacaagtgatcaagtgata

SEQ ID NO: 535323 - DNA, 98 bp, Homo sapiens
aaaatactacagaagtacaatcattgtcgtgtgaaaatctacactttcaatcaaagcagatacaccgaggagttaaaggatttgtccgagaccttcaa

SEQ ID NO: 535324 - DNA, 75 bp, Homo sapiens
cagcccagcgattctcagtcaggatttagacaagagtcaagaggagatcaaaaaacatcatgccagcatcagtga

SEQ ID NO: 535325 - DNA, 88 bp, Homo sapiens
gtttgcgtcctgcactgaaaggaaatgacggattttaaaaagaaggggagcgttcaattccaaacagctgctttatttggagaaatac

SEQ ID NO: 535326 - DNA, 82 bp, Homo sapiens
gacttacaagagaacctcctaagagtcacccaaacaatcggctgagaatgagaagaggctggagtgcagtggcgtgatctcg

SEQ ID NO: 535327 - DNA, 100 bp, Homo sapiens
agagactcctatcaaggataaagaagaactaaatagagtttagtaacatcgtaaaaaggagtcacctaaggtcctgcgagtacaagggtcgacccccaaa

SEQ ID NO: 535328 - DNA, 90 bp, Homo sapiens
aagaaatcaaaaatctggtgaaattgccggcaagagggagttaaggacattccaggcagaggcaaggcggagtcgatctcccaaaaggag

SEQ ID NO: 535329 - DNA, 80 bp, Homo sapiens
aattcacttcagagcaatccactactgccagaccagaagatgtgttcagagcaacattgttttgttgacacaagcattta

SEQ ID NO: 535330 - DNA, 75 bp, Homo sapiens
ctgtgatgtcttcaataaatccaaatacttctgctgagatgagtgaactgagtgtggcacagaaaccagaaaaac

SEQ ID NO: 535331 - DNA, 96 bp, Homo sapiens
gacacccctgaagccgagaaatgtgttatagttttgccgctggactcttccctcccttcccccaccccatcaggatgatatgagacttgaaagaag

SEQ ID NO: 535332 - DNA, 100 bp, Homo sapiens
gtagagaggaccccggtacatctgaaagccgggaaatgaaattacagaagacatccccgtgaagactttgaatatgaagactgtgtatgtttctgtgtta

SEQ ID NO: 535333 - DNA, 75 bp, Homo sapiens
ggacaacgactaccaccgcagcgacgagcagaaccccatgcatcccagctcaaggtggtcagagctagaccttct

SEQ ID NO: 535334 - DNA, 75 bp, Homo sapiens
tggtgccaggtgtccatccccgtgctgagggtgtcaaattgagaaccaggtagatccccaccacctacagtaaaa

SEQ ID NO: 535335 - DNA, 60 bp, Homo sapiens
gaaacccacaggaggcaaccacactagtttaggtttggccgtaagctgtgtctcctggga

SEQ ID NO: 535336 - DNA, 100 bp, Homo sapiens
ggcgttgtactggtaaacctggcagggtctgaaaaacctgctggaagagacacagtaggtatcactaccattaaagttaacattcgtaatgccaattccc

SEQ ID NO: 535337 - DNA, 127 bp, Homo sapiens
gacgctcgctccgctcgtcccgctcgtcatggcctacccgggatacggaggaggggaatctgagaaaaaggggttgattgaaagaatctatatggtacaggatattgtttcaactgttcaaaacgtc

SEQ ID NO: 535338 - DNA, 83 bp, Homo sapiens
gttggctgccgtccccgctgctgtgcattggggggatatgagactttctactcggaatatcctgagtgttgcgtggatgtaaa

SEQ ID NO: 535339 - DNA, 101 bp, Homo sapiens
atgccgtccgccttctctgtcagctctttccccgtcagcatcccagccgtgctcacggtgctggagaatctggtaaaagcaccattgtgaagcagatgagg

SEQ ID NO: 535340 - DNA, 98 bp, Homo sapiens
aactctgaaaaacagagtggaggagcaagtacagcgagcaaaaaggaaccagtgatttacttgcttgggaccccctatttggaccatctcttgattca

SEQ ID NO: 535341 - DNA, 75 bp, Homo sapiens
cccatttcgccatggtgggaaatcgtcaggagcccagaaagctccaggaatcgatcccttcccactggaggcatg

SEQ ID NO: 535342 - DNA, 75 bp, Homo sapiens
ccggagccgctgcacatttcgatatctcttgtaaatgtgtaaacacggatttgccaccaaaggggaagaacaata

SEQ ID NO: 535343 - DNA, 129 bp, Homo sapiens
gtgacattatcttataaatctaaacagttctgcaaaggagccccaggaaggttcatttacacagtaacaaatgtggcaattattttggatctatcacctgtcatcataactggcttctgcttgtcatcc

SEQ ID NO: 535344 - DNA, 100 bp, Homo sapiens
tcccctggcgctacccggacatctctcagggtgccggcaccatgaagatctggacttcggagcacgtctttgacaacccaaggagatctgtgcgctggtt

SEQ ID NO: 535345 - DNA, 82 bp, Homo sapiens
ggaaagcgaggctgacagcgagatcttctggaaaaatcaagagtcactttccagctgaaggctgaaagaagctaccacatct

SEQ ID NO: 535346 - DNA, 90 bp, Homo sapiens
caaagccgaaagaggaggtccctacctgccacggataccagtcagctatccagtcagttcgctgctattcccatgggtcacaggagacag

SEQ ID NO: 535347 - DNA, 97 bp, Homo sapiens
actccttcctgctgcggttcctgcgcgcccgggatttcgatctggacctggcctggcgggtgtgcaactgaggaacatggctcaagaaactaatcac

SEQ ID NO: 535348 - DNA, 75 bp, Homo sapiens
caacaccttcctgtgcagtcctgttggaatttagtacaggggctcaggtccaggtggcaggggatatgctaccca

SEQ ID NO: 535349 - DNA, 97 bp, Homo sapiens
gcaaagtcttttgtgctcccctcccccatcaaaggaaaggggaaaatgtctcagtcgaaagacctgaaagatgtctgaaaattccagtgacagtgat

SEQ ID NO: 535350 - DNA, 100 bp, Homo sapiens
ctctttccacctgatgtgattgcaagcatcttttcttctgcatggtgggtacccccatgctgtggcacggcttcaggtaagaagagttcctgggtcaagt

SEQ ID NO: 535351 - DNA, 100 bp, Homo sapiens
ttcttctgcaggtggatcagaactgtgttcgcaattcttacgatgtcttctctttgctacgaattggaggcatatgctggagttatcagtgcacttcggg

SEQ ID NO: 535352 - DNA, 83 bp, Homo sapiens
gactggtgtcccacaggcttcaagagctggaagtcgagtgtgctactcaactcaggagatttggagacaaactgaacttccgg

SEQ ID NO: 535353 - DNA, 75 bp, Homo sapiens
gctcctctgtgtttgccgcctgggtggtagctgagcacccagatgcttcaggtgaggagattgaagagctgctca

SEQ ID NO: 535354 - DNA, 75 bp, Homo sapiens
tgaatattttgcaccctatcaagcagagcggtttcgaagacttgggttcccagtctaagtgggtgactttccaag

SEQ ID NO: 535355 - DNA, 75 bp, Homo sapiens
agaaagttgataaacatttatgtgaagaagagaacttacttcaggtggagttggcatgaacttaacagcagcaga

SEQ ID NO: 535356 - DNA, 95 bp, Homo sapiens
cttcctggagttcacgactctgagtgctgtcaggtcaattcagtgaagatatgatacccacagtgggcttcaacatgaggaaggtaactaaaggt

SEQ ID NO: 535357 - DNA, 97 bp, Homo sapiens
gctgggccgaccccagagaggcgctggacagaggaagtctctccgggaacgttggctaatggatggggcagctgcagtgccagagccatccgaagac

SEQ ID NO: 535358 - DNA, 99 bp, Homo sapiens
agaaggtgtactcctttctattttaaagagccaagcctcagagaacatgaagagtatttctggagaagaatcatcccatggagtgattatgacaaggct

SEQ ID NO: 535359 - DNA, 101 bp, Homo sapiens
caagagaacgccatcaaagaagggaaaaccagctgaggtgtccgtaaagattccagagaagcctgtgaacaaaaccacagcaccgggaagtccagtcagcg

SEQ ID NO: 535360 - DNA, 74 bp, Homo sapiens
ctcggagccctggaagcagcagctcaccgaggacggggactctgctggacccaaaggagacaacatttatgaat

SEQ ID NO: 535361 - DNA, 82 bp, Homo sapiens
gctgagcgagctgtcagagcccggggacggcgaggccctcatgtaccacacgaataccaagctgctattttacacttgaaga

SEQ ID NO: 535362 - DNA, 100 bp, Homo sapiens
ctgcccggcgcttcggcccgggccgctcaggtgcaggtcctcttcctgatggatgggaacaagccatgactcaggatggagaaatttactatataaacca

SEQ ID NO: 535363 - DNA, 90 bp, Homo sapiens
cagaagaataaggagaaggataagtcgaaggggaaggcgcctgaagaggacgaagttactaaaccaaggagatttaactgaaagacggac

SEQ ID NO: 535364 - DNA, 75 bp, Homo sapiens
catggaggtggtcctgggcaagcttgaccctcagaagacaaacatcatatctgaactaagtaaatggagacttaa

SEQ ID NO: 535365 - DNA, 90 bp, Homo sapiens
ctcccccaacacggagtcccagattgggcctgaggaagccatggagaggctgcagatggcagaccttggtctcactgagtgctgtgggaa

SEQ ID NO: 535366 - DNA, 97 bp, Homo sapiens
acagggctactcctccacaaactccagtgacagcaggagcgagaacccgagcagcgccatgagcaacactaccgtcgtccccagcactgcaggtccg

SEQ ID NO: 535367 - DNA, 96 bp, Homo sapiens
aaagctgcgcagcaccaagccaaccaagctgcggtggccgcccaggcagccgcggccgcggccacagtcatgttccaatgacaggatttacacaga

SEQ ID NO: 535368 - DNA, 100 bp, Homo sapiens
atctccctgcagtctgagcctgtggtgaccgatgcgttcctggccgtggctggccacatcttctctgcaggcaattccatcgcctccatcccagatgaag

SEQ ID NO: 535369 - DNA, 76 bp, Homo sapiens
ctccactccccagctgtgaaagggaaagctatttttgatacaccagatgaggatccaaattacaatccactacctg

SEQ ID NO: 535370 - DNA, 100 bp, Homo sapiens
gtcatctgccggcttctcggctaccagggtatcgccgtggtcatggaggagctgctgaaggtcgtcaagagcctggagaccagtatgatgtctgtgccat

SEQ ID NO: 535371 - DNA, 73 bp, Homo sapiens
accgcggcgcgagtcaccatggggctatcaacagcaggacgcccatgaattcatgcgctaccttttggaccac

SEQ ID NO: 535372 - DNA, 80 bp, Homo sapiens
cagtgattcttaatcagcgcactggcaagtgcagcgcctgtaatgtttggcgagtctgagtctgaaaagtgtcgaagaga

SEQ ID NO: 535373 - DNA, 131 bp, Homo sapiens
atccacattcatgggagtcttggcagactttgggacgtgctcaacttggtttaggagagataatcctggaaaggaaacagattcattgtctgtctgaggatgagttaagttcttctacaagttcaactgat

SEQ ID NO: 535374 - DNA, 78 bp, Homo sapiens
gactgcgccgcgtcttcctcaaggtgtgtatccacagggccacagcgacaccactggtaagtgtgtccctttgtccgg

SEQ ID NO: 535375 - DNA, 75 bp, Homo sapiens
ctggaagaaggaagttgtgaaacttaccgattccttgggaaaacaggcaggtaagaatgattgatgttggctgat

SEQ ID NO: 535376 - DNA, 75 bp, Homo sapiens
gctgctccggcctagcctggcggagctccacgacgagctggaaaagaaaaggcgacggcggattgacagaagtat

SEQ ID NO: 535377 - DNA, 75 bp, Homo sapiens
ccctcggcctcggcggcagcggctgcggagaaggcgagcgaagggggagctgatcaccttctattactattggaa

SEQ ID NO: 535378 - DNA, 98 bp, Homo sapiens
aggagcacaagtagctgctcttccaagcaaggaagtcgacagttatcttcaggcagagtgagaagctgcagcaatgtctgattttgtggaaagcgagg

SEQ ID NO: 535379 - DNA, 97 bp, Homo sapiens
ccgccggggccccgctgtccgccgcccgccgccgctggagctagagacggagcccgtggctggtgaggccgcagagcagggccaggccgggccctgc

SEQ ID NO: 535380 - DNA, 88 bp, Homo sapiens
cgccggagatgcctgacgcatctgtctgaggagcggtcagtgacgcgatggagcgggcaaggctttgaacttggcctactccagcatt

SEQ ID NO: 535381 - DNA, 50 bp, Homo sapiens
gcgggaggagcctgttcccctgagcaacatggccaacgccctggccagcg

SEQ ID NO: 535382 - DNA, 100 bp, Homo sapiens
gggcgagaacgtccactgcgggccggcgaaagctgtactatactggcaattgctggagaagattttgcaattgttgcttctgatactcgattgagtgaag

SEQ ID NO: 535383 - DNA, 98 bp, Homo sapiens
cacggggctgtccccacggggcacatactgatcgtcaacacctgcagtggcccagacatcgcacgctccgtctcctgcccactgctctcccgagatgc

SEQ ID NO: 535384 - DNA, 100 bp, Homo sapiens
gacagcaggcccaagtctgcacatcccagttctggaggtccatcagttctcaagagacgccagtgtggccgaggcctggctgcttggacaggagccgtac

SEQ ID NO: 535385 - DNA, 87 bp, Homo sapiens
ccgccgtggaggtggcgcctgccggagcttcctacaatccatcctttgaagaccaccagtttgacaagtatgcgcccaagctggaca

SEQ ID NO: 535386 - DNA, 82 bp, Homo sapiens
attgataacaccctgtaacagctgactcagagtcaagatctccactgaagttggcatcacaaatgttgatctttccaccgtg

SEQ ID NO: 535387 - DNA, 120 bp, Homo sapiens
cttccgtcaggagaggtgaggcaggctcgagtgcacggagcgtcccttccatcaggagagtacctggagtagaacagaaaaattattatgtctgtgttcccttgggactcattggaaatt

SEQ ID NO: 535388 - DNA, 74 bp, Homo sapiens
cacgcagcccggcgggaggataaagaccaccacgtctggggagcagggaggagccctgtgccctgtcccaggat

SEQ ID NO: 535389 - DNA, 99 bp, Homo sapiens
tgacttacattctggaaaactgcacagagaattccatcatggacctgacccaactgatacagccccaggagagtttatagaaggatcatttgaagaata

SEQ ID NO: 535390 - DNA, 75 bp, Homo sapiens
aaacaggacgaaggcgtgctgaaggtgtccccaggtgtcattgccaacccctttgcggcaggcatcggccaccgg

SEQ ID NO: 535391 - DNA, 83 bp, Homo sapiens
gggacaatggtcaccgtctcttcaggcgtggtgaccaagatgaagatgcagaggaccattgtcatccgccgagactatctgca

SEQ ID NO: 535392 - DNA, 100 bp, Homo sapiens
gtatgagcattctccagggaaaggatgacatatttttggacctgaaacagaaattctggaacacctatatggtggacatcgagcagctggatccccgcgg

SEQ ID NO: 535393 - DNA, 87 bp, Homo sapiens
ggaggctccgaggctcctgcgctcccgcgccgcgctcccctcgcccgcccgggccgccagaacatccatgatagcagtcttctgtaa

SEQ ID NO: 535394 - DNA, 111 bp, Homo sapiens
ataatggactctcagaataaaggaaagacctcagagtgttctcagactctggactgtcttcacactaggtggtgtgggcagcaaagcggctgcctctccagagctttcttc

SEQ ID NO: 535395 - DNA, 51 bp, Homo sapiens
gatttttagaactccacatttgagggcgaactttctgaccaagtatacaac

SEQ ID NO: 535396 - DNA, 88 bp, Homo sapiens
atttttttttggcttaacaaaacatcaaacggcatacaaatggacattatctttctggggacccagtttgccttcatgaagaaaagac

SEQ ID NO: 535397 - DNA, 50 bp, Homo sapiens
ccactgcgggccggcgaaagctgggagtgcatccgccccaacccttttcc

SEQ ID NO: 535398 - DNA, 76 bp, Homo sapiens
aggccccggcagcgcctgggacaagatcaatgaactgagccatgttcaaatccctgttatgttgatgccagatgac

SEQ ID NO: 535399 - DNA, 82 bp, Homo sapiens
ccgtcctctcccgagtttttcatatcagagtgacaagaatagtgccatggtgaatcaggaagttttgacactgcaggaaatg

SEQ ID NO: 535400 - DNA, 75 bp, Homo sapiens
cccgagaccctggcttcctaccctgccccccaggagggagacctgtcttctggttacctggatgatactaagcag

SEQ ID NO: 535401 - DNA, 83 bp, Homo sapiens
ggggaagctggtacccctgaaggagaccatcaaaggattccagcagattttggcagatgtggcaaaatctggcaaaggcagag

SEQ ID NO: 535402 - DNA, 121 bp, Homo sapiens
gtagtgcacgccgcgggcccagctgcgaccccggccccgcccccgggaccccggccatggacggattttttatcaagcagaaatgcatcgaacaacgagaatcaagatcactgagctaaat

SEQ ID NO: 535403 - DNA, 90 bp, Homo sapiens
gctgctcccggaatggttcctcttgctctttggcccgtggctccttaggaagctgggacagaaagaacaacccggagccctggaaccgcc

SEQ ID NO: 535404 - DNA, 85 bp, Homo sapiens
gaaaaataaagtgttgagtaaacagaccaagttggaagcctccccagctttctgaggatgatatctggctaaaaagcgagggaga

SEQ ID NO: 535405 - DNA, 100 bp, Homo sapiens
gtaatccccccacagaccctggaagaaagcccctctcacacagcacaagctccgggtggataaggcagctgctgcagcagcggcactacaagccaaatca

SEQ ID NO: 535406 - DNA, 129 bp, Homo sapiens
caagaatcttcaaccctttcccacaaaagctaattgagtacacgttcctgttgagtacacgttcctgttgtaaatattgcagattttcaagagaatcagtgggtgacttgtttccaggagtctgctgaa

SEQ ID NO: 535407 - DNA, 51 bp, Homo sapiens
tggttgcagttgtgtagtagttaagatgtgtcttgctgaatcagggctctc

SEQ ID NO: 535408 - DNA, 101 bp, Homo sapiens
cagctcatcaatgctgaggagcagacgagtggccaggcttctggggctgactcaactgaaatgttcccactgccaggaggcaggcgccaccttgggctgct

SEQ ID NO: 535409 - DNA, 101 bp, Homo sapiens
agttgcatatgctcggaaagttgaaggggacatgtatgaatctgcaaacaatcgaataacaacgaacttgatgcaagtgataggtttgccaaggtcagacc

SEQ ID NO: 535410 - DNA, 100 bp, Homo sapiens
gaacgcttcgctggccatttaggagctctgctcaaagccagacggccgggtgagagcaaaactttcagcaccacttgctggcatgggaaatgccaaggca

SEQ ID NO: 535411 - DNA, 74 bp, Homo sapiens
cgaagccggagctcgagccgcagcggacttcccaagtaagaagcggaagaggagccgctggaaccaagacacaa

SEQ ID NO: 535412 - DNA, 75 bp, Homo sapiens
agcccaacaccttcccccactggaaggatgataaagactatgctttaaaacaaatagaaggaactgggatctcta

SEQ ID NO: 535413 - DNA, 100 bp, Homo sapiens
gacaacattgagacagccaacagttttgctgtaacaaacgcctggtgttttgaatgctgtatcaaatgcctggggggcattccctatgcctctctgattg

SEQ ID NO: 535414 - DNA, 66 bp, Homo sapiens
accacacacatcatcagtctgagaagctcgcagaggctcagcgcaggtttgctacacttcagaatg

SEQ ID NO: 535415 - DNA, 75 bp, Homo sapiens
gtcctacgaggagggctgtcagagcctcatggagtacggtcactctgtgagactgctgggtcagaaaaaggataa

SEQ ID NO: 535416 - DNA, 95 bp, Homo sapiens
gagatcctggacctatgaatatccagtttgagccatcggatctaagatccaaaaggagagccttgaacttaggaattcttcgagatcctggatca

SEQ ID NO: 535417 - DNA, 101 bp, Homo sapiens
aggactcagactgtggaacttccgtgccccccaccctcaccaagatggtgtcaggaatgggatctaaagtggagcttctagcgacccccaggagcactgag

SEQ ID NO: 535418 - DNA, 75 bp, Homo sapiens
tctctctttctggcctggaggctatccagcgtggcacaagatctctgtaaagtagcaggcatagcaaaagttctg

SEQ ID NO: 535419 - DNA, 75 bp, Homo sapiens
gagattataagaagcttgggttcattaaaatatttacaccagcagctccagttcataccaataaagaagatcctg

SEQ ID NO: 535420 - DNA, 75 bp, Homo sapiens
cgctggggctgccgccacggccgcccggaggctcttgcagccaatgccggaacaggatttgctgttgctgagcct

SEQ ID NO: 535421 - DNA, 75 bp, Homo sapiens
ctcccgctggccgcctcgatgcaggaggacgaacagctggtgcaactattatctcagccactggagcctctgcac

SEQ ID NO: 535422 - DNA, 100 bp, Homo sapiens
tgcccatgtaagcacgccttccacagaaatttgtgatgtctggctggggtataggttattcatttcgatgtgacattgttgactattcacggtcacccac

SEQ ID NO: 535423 - DNA, 75 bp, Homo sapiens
agcgatcccaccgaagcagcgtgtcctccgtgggagcccgaggttaatcatgttatcagccctctgttggatatc

SEQ ID NO: 535424 - DNA, 74 bp, Homo sapiens
gcctctgtgccactttgcatcccacgccggaggaggcattaacgagaccgggtttggtgcacctcgatttggag

SEQ ID NO: 535425 - DNA, 100 bp, Homo sapiens
ctcgcctcctcgcagcagcgccatggcccagggccccggccagtgcccagccccgctgggagacccggccagcaccacggacggcgcccaggaagcccga

SEQ ID NO: 535426 - DNA, 100 bp, Homo sapiens
gatgatccagttggaccttttggacaggaaagtgtaacatcagttacagacttgaccacatattatcccctccacccatgccgtttcggaaatgcagcaa

SEQ ID NO: 535427 - DNA, 80 bp, Homo sapiens
tgtcaaggccatattttcaaaagtgatggttattacaactattgtggacgatgaaaggctctctgcagaggagatggatg

SEQ ID NO: 535428 - DNA, 100 bp, Homo sapiens
ctgcacccagcaagccctgtccccacccccaggggccaaaccagtgctcctgccacctctctggctgccccctagagcctgcccatcccagcctgaccaa

SEQ ID NO: 535429 - DNA, 100 bp, Homo sapiens
cgaggagctcagcatggtcatcctgctgccggatgacattgaggacgagtccacgggcctgaagaaggttaaaccacagcttgaagaaaaaacaaatgag

SEQ ID NO: 535430 - DNA, 74 bp, Homo sapiens
cgagaggctcaccgcagtcgtgcaggatctgaaggagcccaatcaattgagcagagactgatgaaaatggatca

SEQ ID NO: 535431 - DNA, 75 bp, Homo sapiens
ctttaagattgcgtacccactgcagagtgctgaagacggggtagccacgagaaacatggcatcaggtgggtggtg

SEQ ID NO: 535432 - DNA, 96 bp, Homo sapiens
atctaaagaagataaacttggcaaatgacatgcaggttcttcaaggcagaataattgcagaaaatcttcaaagaggatcttaatgatttaagaatg

SEQ ID NO: 535433 - DNA, 75 bp, Homo sapiens
ggagaagaaggaagttgtggaagagacagagtgttgctcagttacccaggctggagtgcaatggcatgatcttgg

SEQ ID NO: 535434 - DNA, 75 bp, Homo sapiens
aggcaccaccacagccgcccacttctggaaggttccatcccctgcagatgactgtccacaacctgtacctgtttg

SEQ ID NO: 535435 - DNA, 74 bp, Homo sapiens
tcatgattgagttctgtccagggggagccgtggacgccatcatgctgggtcctaggcctacttacaagcctcca

SEQ ID NO: 535436 - DNA, 98 bp, Homo sapiens
aggcctccgcttctccggcctccctgctcttaccgggagtcttttcgtctgcagatgactatagagaacatgaaccatttgaaattcattccccacaa

SEQ ID NO: 535437 - DNA, 100 bp, Homo sapiens
attggaaatacaaattatgattggaaggaactggaaaaggaaagctggcagttaaggaaaggagtaagtgaaattggagaagatgtggactatgatgagg

SEQ ID NO: 535438 - DNA, 74 bp, Homo sapiens
cggagctctggagaaacatgaagttcgggactatcttctgagaaaggggacttcttggccttggaccttggagg

SEQ ID NO: 535439 - DNA, 75 bp, Homo sapiens
ggacagttgaccttttggcaggtttgggagctgagcgaccagaaacaggcattgaacctggccacatcccaggta

SEQ ID NO: 535440 - DNA, 75 bp, Homo sapiens
caagtccgcggagcagggggaggtggtgatggctcagtgttccgagacttggttattaagtacggtgcagttgac

SEQ ID NO: 535441 - DNA, 100 bp, Homo sapiens
tacaagtggaaatccacaaggattcttttcaatacatcctaaaacagattttcagctgaactctcatctctcaacactggcaaatattcataagatctac

SEQ ID NO: 535442 - DNA, 100 bp, Homo sapiens
agccatcacagctgttcgacttcgatgatttactgaaatttgatgacctagatggaacacatgctctgatgggcctccttggcaatgcatttgatggcca

SEQ ID NO: 535443 - DNA, 101 bp, Homo sapiens
tggatctggtaggagtggcatcgcctgagcccgggacggcagcggcctggggacccagcaaggaaaaggggaagatagtgatgtactcagtataaatgcag

SEQ ID NO: 535444 - DNA, 151 bp, Homo sapiens
cggctggactgcaacctggctgtacagctcctcaagtgcaacaagtcccacttccgaaaccacaagtttgccgatgctcatagatggaagggacttgccttgtcgctgatgagactttcgacttggacttttgagtcaatgctggaatgag

SEQ ID NO: 535445 - DNA, 98 bp, Homo sapiens
aaagcttttggacattcctgggttgggccatatggtgctcttcccagtctggttcctgtacagtctgctcatgaagctgttccagcgctccacgccag

SEQ ID NO: 535446 - DNA, 100 bp, Homo sapiens
gcactgagtcgcagttatggcaccccagaactggatgaagatgatttagaagcaggatttggtgctatggagaaatttttggtagaatataagagtgcag

SEQ ID NO: 535447 - DNA, 78 bp, Homo sapiens
aagctctgcaaaaaggctctctccttggctgctccatcgacaagcaaggtctcgctgtgttaccctggctggagtgca

SEQ ID NO: 535448 - DNA, 100 bp, Homo sapiens
gaagttataacgctacacgaagaactaagaatattattagcacaagagcaccatactttgaggcttaccctgaaagaagcagatcccagttcaaaagtag

SEQ ID NO: 535449 - DNA, 100 bp, Homo sapiens
aaaatatcaggagttaatggaacacacattgtggatatcaagcctgccaatatggaagagctaacagaggtgattacagcagcagaatttcatccaaaca

SEQ ID NO: 535450 - DNA, 76 bp, Homo sapiens
ccacagctgaaggctgcgagggactaagagcagattacagcaattggaacttgcacagatacagcatagagacgct

SEQ ID NO: 535451 - DNA, 100 bp, Homo sapiens
ccgagtggagtcagctcagtcccggcagccgccgcgcgaggaaatggccgaggggccggagccacagcccctcatcctaaacctggaatctgtgatgggc

SEQ ID NO: 535452 - DNA, 83 bp, Homo sapiens
gaagagaagatccaggcctcagaggaggagaaaggccggagccagccgagctgcttccagctgccatggtgatgccaccccag

SEQ ID NO: 535453 - DNA, 82 bp, Homo sapiens
cctctggttcagctcatacaacagcttcttaggtgctggaggcctggcagaagggtccaaatcctcctggaaccctgggcca

SEQ ID NO: 535454 - DNA, 98 bp, Homo sapiens
caaaacagaataagctggagcaagtagaaaaggagttgttgagagtagcacctggcacctgtgtttgctctgtttgtaccattttactgctccatacc

SEQ ID NO: 535455 - DNA, 90 bp, Homo sapiens
gaaacacaggatgccctggatgctgcctgagcagattcacccatgcaaaccgccactgtccgaagcacccctacgccaggctgaagagag

SEQ ID NO: 535456 - DNA, 78 bp, Homo sapiens
catgaagaccccggcggacacagatccttctggagagtgcaacccagacttgcgtctccgtggacatcagaaggaagg

SEQ ID NO: 535457 - DNA, 100 bp, Homo sapiens
gaggctcctttaagacggtctacaaaggtctggacactgaaaccaccgtggaagtcgcctggtgtgaactgcagagtggagactgctgcacggactctgg

SEQ ID NO: 535458 - DNA, 100 bp, Homo sapiens
ggggttcggtgcgtgccccgacggggcgcgcgcgaagcgagcgagaaggcacggagtcgccgcggagcgcaggtgtcatggagaaactccagctgggccc

SEQ ID NO: 535459 - DNA, 75 bp, Homo sapiens
tgaacatctatgagcctgactatgccaaagctgtgtacagccgtggggagaatgctgctcggtcctcctacccct

SEQ ID NO: 535460 - DNA, 97 bp, Homo sapiens
gtttggcaatatgtacgacgcggatgaggaccctgagagatggttggtgccatgtggaaggtgattgtttcgctggtcctgttgatgcctggcccct

SEQ ID NO: 535461 - DNA, 101 bp, Homo sapiens
atgtgccttagaggattatggtgataaatgctgctcattctttctacaatggaacaacaaccctaccaatatcagatgaagatagaaccccacggaaaaga

SEQ ID NO: 535462 - DNA, 75 bp, Homo sapiens
ctttaggcgacgtcgtcatcgacttgtacaccgaagaacggccgcgtggtgactgcttagaaaactgcacagcat

SEQ ID NO: 535463 - DNA, 50 bp, Homo sapiens
cttggatgttcttggacttgacgcgagcagagatgctacagaagctgagt

SEQ ID NO: 535464 - DNA, 100 bp, Homo sapiens
ctttctgattaaaattgaaacctggcacaaaccagatcttggcacgcaggagaatggttattggggctgtgccatcggcaaagccaggcaagctgcaaag

SEQ ID NO: 535465 - DNA, 100 bp, Homo sapiens
ctacggggtcctggagcaccctgaagactcaagaccaaaagactgtcaggaaggcagagtgcagagataaggagggttcctgcccccaggtgaacattaa

SEQ ID NO: 535466 - DNA, 83 bp, Homo sapiens
gctcatgggcacggctcgggacgaaaccaaggtgtatgttggtaacctgggaactggcgctggcaaaggagagttagaaaggg

SEQ ID NO: 535467 - DNA, 75 bp, Homo sapiens
gaacagattgttcctaaaccagaagaggaggttgcccagaagaaaaagatcgacattctggtcaacaatggtgga

SEQ ID NO: 535468 - DNA, 104 bp, Homo sapiens
ccgcgctccaggggctgctgagcgcccagcggacaccggcagcgcgcggtcgacgcgggcctgagctccctccaggacccagatgatgtggtaccagttggcca

SEQ ID NO: 535469 - DNA, 50 bp, Homo sapiens
gaagccatccaatggatgcaggaaaactgatctctgacatctacattagt

SEQ ID NO: 535470 - DNA, 109 bp, Homo sapiens
cagaccctggagcctcagttggaagcagccgatccagcctgcggagcctgtggggcagtattctaccttgtaaatactgttatttgtatatactgtaaatgatgacatc

SEQ ID NO: 535471 - DNA, 82 bp, Homo sapiens
caaggagctaaagcagcgtgcgttcagccctgggaaactccccaacttttaaatcatttgaagaaaaggtcgaaaacttaaa

SEQ ID NO: 535472 - DNA, 51 bp, Homo sapiens
ccgctgtgtccacagcgttcaaggaatcatcatgttggttggctggttact

SEQ ID NO: 535473 - DNA, 80 bp, Homo sapiens
tcagcagctccctgcgggacctctcggaagccggtccctgtgcgttttattgcgacctgccggtgggaactttgtctccg

SEQ ID NO: 535474 - DNA, 83 bp, Homo sapiens
aaaagtatgatggattacagcaacagttgtcttcagtagaaagggtggatgaaaatactaggaaaagtttatttaagttacgt

SEQ ID NO: 535475 - DNA, 100 bp, Homo sapiens
gaaagataggaagacatctgcagtatcttctcccctgttggaccagcagagggcggcgactggcggcgcgatggacctgaccgggctcctgctggacgaa

SEQ ID NO: 535476 - DNA, 80 bp, Homo sapiens
ctatagaaggaaaaactctaaacgggattacactgggtaccgaggagaaggcattgtatatgggacactagaggaggtgt

SEQ ID NO: 535477 - DNA, 98 bp, Homo sapiens
caggagtttggaagcccttttcctccaaatcctgggaaaggtacccactgatggtaatgctggcctgctggctgaaccccagattgccatgttctgtg

SEQ ID NO: 535478 - DNA, 90 bp, Homo sapiens
gggaccatcgtcgtgaggatcgtgtgcattacaggagtcctccacttgccactggtgacaaatggcctacagctgtgagagcaaatggac

SEQ ID NO: 535479 - DNA, 101 bp, Homo sapiens
tgatgatgaaattcagtttgatgacattggagatgatgatgaagatattgatgaccttcccatcgacggtcagtgcgcacgttgtaatcagctgaggccat

SEQ ID NO: 535480 - DNA, 100 bp, Homo sapiens
agagacaccagcatcagaaatatgtgctggagagggaagagaaagtctttatttacagcttcatggagacctggtcagaacttcgatatgacctgccagc

SEQ ID NO: 535481 - DNA, 90 bp, Homo sapiens
gagagtatatgcgatgagtttggaactcgaatcatttatgacagaaagtttctgttggatcgtcgcaattctcccatggctcagacccca

SEQ ID NO: 535482 - DNA, 112 bp, Homo sapiens
ggccgagatgtctcgctccgtggccttagctgtgctcgcgctactctctctttctggcctggaggctatccagcactgattcttgctattccaaatcctcttccacgttgac

SEQ ID NO: 535483 - DNA, 76 bp, Homo sapiens
gggctttgctctgccaaatccacaggtcctaaaaacatcctgagtttctttggcctgccagaaagtcaccttcctg

SEQ ID NO: 535484 - DNA, 74 bp, Homo sapiens
tgtcgctcctggtcggcgcgtggctcaagctaggtcgcagcagttgtggtagaaatttctgggttagtggactc

SEQ ID NO: 535485 - DNA, 50 bp, Homo sapiens
tttgtgtccatgtgaacaactggaaatccctaagtcagccaacccctcct

SEQ ID NO: 535486 - DNA, 100 bp, Homo sapiens
tctgtgatgaggaaatggatttggccattgaagcttcagaggctgcaaggtgtgactgttgtaaatctcaaggaactcttaaagagcgagttcagtggcg

SEQ ID NO: 535487 - DNA, 96 bp, Homo sapiens
ggacgagaagccgctccggaggaaacggagcgctgccctgcagcccgagcccatcaaggtgtacggacagagcggcactgcagaggtggagctgaa

SEQ ID NO: 535488 - DNA, 75 bp, Homo sapiens
tccacattgcacataaagttgctgttggagacacagttgcagaagatgaagtggtttgtgagattgaaactgaca

SEQ ID NO: 535489 - DNA, 82 bp, Homo sapiens
gccaaaaggagcggcgcggtcttcgtggtgttcgtggcagtgatcagggccaaagcggtcagtgagaaggaagtggactctg

SEQ ID NO: 535490 - DNA, 82 bp, Homo sapiens
tttccacagtgattgatgctgcctcagcatttatgacattaacagagaacaggactatgtcaagaattctgagggtatactt

SEQ ID NO: 535491 - DNA, 101 bp, Homo sapiens
cccagcagagctacctatctatggagaaaatcattcaagtggccaagacctctgctgcacaggtgctggaccagggactgagcgtcccccggagagggtcc

SEQ ID NO: 535492 - DNA, 83 bp, Homo sapiens
tgggccagtacagcaccggcaagaccaccttcatcagttggaatcgaagcctcttaaaatggcagatgacttggacttcgaga

SEQ ID NO: 535493 - DNA, 76 bp, Homo sapiens
gaagagggaagacacgcggaaacagtggtttgggaacctggtcactatggaatggtggaatgatctttggctaaat

SEQ ID NO: 535494 - DNA, 50 bp, Homo sapiens
cagagccacacacaccatcatggtcctgtggagttgcagcagaaggaccg

SEQ ID NO: 535495 - DNA, 90 bp, Homo sapiens
gctctttgaagttgggttcaggagtgtagaattggcaaagttattgccagcttcctgcggggatctgatgagcttctttcttctggcatc

SEQ ID NO: 535496 - DNA, 50 bp, Homo sapiens
aatggttccagtatagtctctaggaaaatgtttataggaggccttagctg

SEQ ID NO: 535497 - DNA, 106 bp, Homo sapiens
cagattgcaaagagttatggatattctggtggggagatgaacccaacctagtgggtgtaatacatcatgaactgcaggaaggacagaataacgggctcccagattc

SEQ ID NO: 535498 - DNA, 89 bp, Homo sapiens
cagttcctaccttatgagctcggttttcttatgcttataagagtggaacaggctgctctttggcgtaaattgcaatcgattagggatcg

SEQ ID NO: 535499 - DNA, 75 bp, Homo sapiens
gggcagcagtggcggcagcgcccgagagaggggcctttacaacaactaaacggacaggcattccagccccacggg

SEQ ID NO: 535500 - DNA, 83 bp, Homo sapiens
gcgctatcgtgacctgcttttcggttccgggtcttggccccgtccttacctcacaggtgtcagttgtacccgaggcgttctca

SEQ ID NO: 535501 - DNA, 101 bp, Homo sapiens
tttcaacagactggacttctcaactgccattctggattccagaagatttaactacgtggtccggctctgggcgacgttgctggcagaggaaatgagaagaa

SEQ ID NO: 535502 - DNA, 90 bp, Homo sapiens
caaagctgatagagaagattcttctcaacatttctgcagactgcctcaacagagtgatagaagccccatgtgccactcccctgatctgca

SEQ ID NO: 535503 - DNA, 100 bp, Homo sapiens
gaccaaatgcaccagcacagaagtggaattgaatctgctctaaaggagaccaagaataaagccattattgcccgtgtcacaaccttgtcagatgtagtag

SEQ ID NO: 535504 - DNA, 83 bp, Homo sapiens
catgacggaggatgatgacatcactaccgggggacggcaaaacagaacagaaaggcggagataaaaagaggggtgttaaaaga

SEQ ID NO: 535505 - DNA, 100 bp, Homo sapiens
cttttgaaccactggaaagtgaggaattttgaagtacaccgtggtgacattgtatcattggtaaaacatcggagcagtgtgggtccgagcaaacctgttt

SEQ ID NO: 535506 - DNA, 74 bp, Homo sapiens
cgatttaaagctgagctgcgaggaaaatggcggcgggaggaatgtatcctgtcaggtataatgtcagtgaatgg

SEQ ID NO: 535507 - DNA, 50 bp, Homo sapiens
gccgtttccgtggaatcaggccggctggacagtcattttgtttactcatt

SEQ ID NO: 535508 - DNA, 82 bp, Homo sapiens
ccgggctggctgcggccgccctgggccgggccccaccggacgggcgaactttctgaccaagtatacaactacccagagggcc

SEQ ID NO: 535509 - DNA, 90 bp, Homo sapiens
aaattgtccatatagatattgcagatagaagtcaagttgaaccagcagatgcctttcaggaggagtactacaggacgggcaccttcccag

SEQ ID NO: 535510 - DNA, 83 bp, Homo sapiens
aagacaaaatctacttcatggctgggtccagcagaaaagaggagaatacttatctctggcgcacatcactatatttggctgcc

SEQ ID NO: 535511 - DNA, 49 bp, Homo sapiens
tggtggtcctatggggtgttgatggtcggagctcttaggcctgctgaaa

SEQ ID NO: 535512 - DNA, 100 bp, Homo sapiens
atttcttttacccatactgagtcagatatatacagatggtccaggagaagctttgaaggctgtgaagattcttgagtatcagaacaccaccttctttggt

SEQ ID NO: 535513 - DNA, 107 bp, Homo sapiens
tctcatctcgctcggctgcgggaaatcgggctgaagcgactgagtccgcgatggaggacatggatttgattgacatactttggaggcaagatatagatcttggagta

SEQ ID NO: 535514 - DNA, 75 bp, Homo sapiens
agttcatctccttctgcatccttaactgagaatgagcagaaatgatggaagaattgcatagcctggacccacgac

SEQ ID NO: 535515 - DNA, 98 bp, Homo sapiens
gtggctgtgcagggccccgagccggcccgggtcgaggacactgaagccatgaagagagcattggcctccatagactccaaactgaaccaggccaaagg

SEQ ID NO: 535516 - DNA, 90 bp, Homo sapiens
agaccatgatgtctgtttctagaaatgagttgttgcagaagcctagtatcagaaggccaggcgagactgcaacactgctcatcaccccgc

SEQ ID NO: 535517 - DNA, 90 bp, Homo sapiens
catggactgcagcctcgtgcggacgctcgtgcacagatacgttttgcgtgtgaagctgtgtggaaatgtgaaatactaccagtcacacca

SEQ ID NO: 535518 - DNA, 96 bp, Homo sapiens
cgctgatctagtgcttctcgaaaaaaaccttcaggcggcccatgggtggacaacaacacagcattggttgacaaattgaagcgtttccagcaggag

SEQ ID NO: 535519 - DNA, 90 bp, Homo sapiens
gggaggtgtatctgagggagactgcaaatgctattgtcagtcagcaaactccacaaaggtcagtcatatcatttggatcaaaaaatagaa

SEQ ID NO: 535520 - DNA, 100 bp, Homo sapiens
gctgaagccatcaaaaaacaaaacagaaaaaaacctctaggaaatgatctaggaaaatggctcccagccaacctctgataaaccctcccagcggccatca

SEQ ID NO: 535521 - DNA, 75 bp, Homo sapiens
gaaagagtcaacagcagtggcaacaggccggtctaattgaagccaacggagaactcaaggtcttcatagaccaga

SEQ ID NO: 535522 - DNA, 100 bp, Homo sapiens
ggatcggaacacagagttggaggactctgttcagcagatgtatacaaccaatcaggagcagttacaggaaattgagagactttatagagaagcttgggac

SEQ ID NO: 535523 - DNA, 99 bp, Homo sapiens
aggcacgagatgccccctcacatctatgccatcacagacaccgcctacaggagtatgatgcaagataagaccatcatcatgtggaaactgaccagggat

SEQ ID NO: 535524 - DNA, 50 bp, Homo sapiens
ctgcagacccctggcttcctctcgggttcatgacgctctcgatattcctg

SEQ ID NO: 535525 - DNA, 89 bp, Homo sapiens
acctctatctcgcttttcccctggccttctgtatcttcatggtgcggctcatcttcgagagactgctgcagtaagaatgtcttttccac

SEQ ID NO: 535526 - DNA, 100 bp, Homo sapiens
ctactggcatggagtttcatttcacgacaatgacatattctccggtcaagtgaacaagtttccaggaaaatcagttggagtggaaatgaacacccagaat

SEQ ID NO: 535527 - DNA, 100 bp, Homo sapiens
gaaacttccaacacagtttcccaaagaaaaatgggcaccaagggcaaagattgtggataatatgcctgtaacgtggtgttacgatgttgaagatggtcag

SEQ ID NO: 535528 - DNA, 74 bp, Homo sapiens
gcaaatctgagcgttctcaacttggttattgtaaaaaaaggagtttgcaccctcagatgaagagctagactctt

SEQ ID NO: 535529 - DNA, 82 bp, Homo sapiens
ttggtaaaaagactcagaaaacggcaataactgtggagatggctaatcgagacttgttaagcagtgtgagccgtgagttttc

SEQ ID NO: 535530 - DNA, 75 bp, Homo sapiens
gcaacttggagtgccagtgaatgataaagacgatattcgtattttacatggagaagtgaacaaagtgaaactgga

SEQ ID NO: 535531 - DNA, 74 bp, Homo sapiens
cgcgggctcagctctcgccgccagcgggccgcagacaaatttacatgtattggagaccagaccagaagcccttc

SEQ ID NO: 535532 - DNA, 86 bp, Homo sapiens
cgtcagcctcccgccggccgtctccttaacaccgaacaccgtgtgggcaagagcagtttactgttgcgttttgcagacaacacttt

SEQ ID NO: 535533 - DNA, 89 bp, Homo sapiens
cctgtcgcggcgcgagacctctgagccctatgagtttgtctctctggaatggctgcaaaagtggttggatgaatcaacacctaccaaac

SEQ ID NO: 535534 - DNA, 83 bp, Homo sapiens
aacggccatcactgaagagcagacccgtttgggttctccacgcattctagactcccgaagagccaggcgggcaccacggcagg

SEQ ID NO: 535535 - DNA, 48 bp, Homo sapiens
tggccccgagggcggatccgaggctgtgcaacaagttattactaacct

SEQ ID NO: 535536 - DNA, 75 bp, Homo sapiens
ttggatagcaatgatcccaatttccagatgccttgttcaacagaatgtgacagtgatgataacatgggtgccaaa

SEQ ID NO: 535537 - DNA, 100 bp, Homo sapiens
ccggcgccggcccagcagctgcagccgcagcctgtggctgtgcagggccccgagccggcccgggtcgaggcaacactggactatggaatgtattctcgag

SEQ ID NO: 535538 - DNA, 75 bp, Homo sapiens
ctggggctgtggtgcctttgggggtgatgccaggttaaaagccgaaggagtaaaggtgctgcaatgatgttagct

SEQ ID NO: 535539 - DNA, 88 bp, Homo sapiens
aaaggattcgttacagccagagattggcatgggttggaattggagcctatcccccaacccgaaggctaacagcatcatgtggttacta

SEQ ID NO: 535540 - DNA, 100 bp, Homo sapiens
gagcaccagttacacaaggacttctttatccgagcgctggattgcatgagaagctgacatagcccagagatacaggataagcaaatacccaaccctcaaa

SEQ ID NO: 535541 - DNA, 75 bp, Homo sapiens
gacagcatcgatgctagacagacagatgagctcaggtttctacaaaaatgtggtgaagattcaaaagcatgttac

SEQ ID NO: 535542 - DNA, 90 bp, Homo sapiens
ttctgcacgacgatgaggtgacagtcacggtccagggagtcggtagtaagggatggcgggacgtcaccacctttttttcggggaaagcag

SEQ ID NO: 535543 - DNA, 75 bp, Homo sapiens
tcatgactatcctcctggtggttctgtataaatacaggtgctataagtctcactctgtggcccaggctggagtac

SEQ ID NO: 535544 - DNA, 82 bp, Homo sapiens
acagcatgcttgggctcagctcacattctgggaggccagccaggctatcttagcggcacagagacgaggagaagatgtggag

SEQ ID NO: 535545 - DNA, 97 bp, Homo sapiens
gcgaatatcgtcatcgttagaagtggaatcaactatgaaattataatcatagatgatggaagcccagatggaacaagggatgttgctgaacagttgg

SEQ ID NO: 535546 - DNA, 100 bp, Homo sapiens
gcccgagaatagctccgtccagcaggatcaactcactatcctgaaggtccattctcccaagaagaggggacagaaagacagatctatttgtaagaaaggc

SEQ ID NO: 535547 - DNA, 82 bp, Homo sapiens
tgtgcgcggagagcaatcgccgggacagctgcaaggagcaggccgggctctcgccatgggtcactgtcgcctctgccacggg

SEQ ID NO: 535548 - DNA, 50 bp, Homo sapiens
gtagaggcggaggctcaggcagcttgagatgttaagggaagctaaggaga

SEQ ID NO: 535549 - DNA, 75 bp, Homo sapiens
agtggtaatggatgatgcagttcaaataactaaggtttgcagaatggcttctgattattcgagaacatgtgctag

SEQ ID NO: 535550 - DNA, 98 bp, Homo sapiens
tcgaaaatggagcacgtccaggctgaccacgagcttttcctccaggcctttgagacagcaaagtggggcaccaaggccctgtgctaagcactcataat

SEQ ID NO: 535551 - DNA, 76 bp, Homo sapiens
caaggaaccgtctttttcgctggtgaggtttgaggaactactggccaacctactaaatgaacaacatcagatagcg

SEQ ID NO: 535552 - DNA, 50 bp, Homo sapiens
ccaagttcaggagaactcgaccggaatcagagatcattgatttcttcctg

SEQ ID NO: 535553 - DNA, 76 bp, Homo sapiens
cagacataaaagcccggattcaggattcagatgaaccaggtactccaaagattcaggtttactcacgtcatccagc

SEQ ID NO: 535554 - DNA, 122 bp, Homo sapiens
ctcgaagccagctctgcagctcagccaatcagtgacatcattggaagtgtttggattgtgagctatttcagaactgttctcaggactcattattttaacatttgggagaaacacagccagaa

SEQ ID NO: 535555 - DNA, 85 bp, Homo sapiens
gaagcttactttgctgacctgataatgaagaattattttgcaccactggatgttgtttactggcctctgatgattgtcactcaga

SEQ ID NO: 535556 - DNA, 50 bp, Homo sapiens
ccgccgccgccgttggctggagatccagctatgggacacagcaggacaag

SEQ ID NO: 535557 - DNA, 82 bp, Homo sapiens
tgagaacttacctgagatttcgtcacagttactggctgaccaacaaagttcctatcaaaagacccagcacaggtcttctcat

SEQ ID NO: 535558 - DNA, 75 bp, Homo sapiens
ccaagagaaccaatggaatggagaaggcatcataggcgagtattagtggaatggctaagagatccatctcaggag

SEQ ID NO: 535559 - DNA, 74 bp, Homo sapiens
ccggggccgcgctgagggcgcccagctgatccgctttatcctcatccagaaccgggcaggcaagacgcgcctgg

SEQ ID NO: 535560 - DNA, 87 bp, Homo sapiens
cctggtcggcgcgtggctcaagctaggaagaaggtagataatgactataatgcccttcgagaaagactcagcaccttgcctgataaa

SEQ ID NO: 535561 - DNA, 83 bp, Homo sapiens
ggaggaggagcaggacgccgggcactgctgatgctgctttcgctgggggttatggaaacaaaggacatgctttacatcgtcac

SEQ ID NO: 535562 - DNA, 82 bp, Homo sapiens
tctgctgtcagagctcttgaagaagggcagcctcctgcctactagccccagactgagccgctttatggagctcatgcaggag

SEQ ID NO: 535563 - DNA, 100 bp, Homo sapiens
agggcttccggacgctggatgttgacctggacgaagtgtactgccttaacgactttgaagaagatgacacagatttcacagagatgatgagagccctggg

SEQ ID NO: 535564 - DNA, 97 bp, Homo sapiens
ggctttctgcgcgggcggcggcggcggccggagcggcgagcatggcccgcgcggcgccgggcgctgactgaggtacgaattttgcggttattaagaa

SEQ ID NO: 535565 - DNA, 100 bp, Homo sapiens
atcaatgtctggtagccaccggcactcacgaggcctttgaaattgttgttcgccatgccaagaactacaccaatgccatgttcaagaacaactacccaag

SEQ ID NO: 535566 - DNA, 74 bp, Homo sapiens
cagcgagtggcgagtagtggaaacgttgcttctgaggggagcccaaggtgaaagaaaatggcccgaaccaagca

SEQ ID NO: 535567 - DNA, 83 bp, Homo sapiens
cttagctgtgctcgcgctactctctctttctggcctggaggctatccagcaaaaggtggacaagtcctattttcaagagaaga

SEQ ID NO: 535568 - DNA, 100 bp, Homo sapiens
gtactacacaaccgtctccagccttggtctgagtggactgtcctgcagcagagcatgggggtccctcgtaccccttcacggacagtgctcttcgagcggg

SEQ ID NO: 535569 - DNA, 78 bp, Homo sapiens
ggggcccaaccacaagacgactcaataggaggaaggaataactcaagtcacctgtactggaaatcagtttgctgaaat

SEQ ID NO: 535570 - DNA, 100 bp, Homo sapiens
cactgtgactgccagctgcttccgctgcacagattattctggaaaactatgcgtaccctggtgttcttctgattggcactgactcccacacccccaatgg

SEQ ID NO: 535571 - DNA, 75 bp, Homo sapiens
cacggcgcacaaggaggtcgggcccggccctggaggtggaggcagtgcaaaccagtccagctacgggggcccagc

SEQ ID NO: 535572 - DNA, 126 bp, Homo sapiens
cccatttgctgctgcgggaccctcgaggggcagctggtttgcctcaccctggtctcagactacatgaggaaataattgacttttataacttcatgtccccttgtcctgaagaagcagctatgagaa

SEQ ID NO: 535573 - DNA, 75 bp, Homo sapiens
tctgcatccacattgcacataaagttggacgcaaagtaccacatgcagcgctgcattgactctggcctctgggtc

SEQ ID NO: 535574 - DNA, 85 bp, Homo sapiens
caccagttcgcccgtccccctgccccgttcacaatggagcatcgagtacagctgtccggcctccaacgagtgtgagatcaccaag

SEQ ID NO: 535575 - DNA, 50 bp, Homo sapiens
aggacctcctggaactggcaaggcgaagctgctctcaggggagaacccag

SEQ ID NO: 535576 - DNA, 83 bp, Homo sapiens
caggaacctcgccatccagaagtccgcgggagagctgtggggcttggtgagtgtttcgtggcctctcgggttggtcagcaccc

SEQ ID NO: 535577 - DNA, 100 bp, Homo sapiens
tgaagatgatgatgaaggggaggaaggagaggtcattaaggagtccaagcaggagcacaaggatgtgatgtgaggcaggacccacctggtggcctctgcc

SEQ ID NO: 535578 - DNA, 90 bp, Homo sapiens
gcggcgacggcgcagtgcgaagcgaaacagtgttctctgtcttcatcagaagaagaaagatttatttccatcaggagacctaaaacacca

SEQ ID NO: 535579 - DNA, 98 bp, Homo sapiens
agaaacctaagtggcaaggtgatcttgagagtgacagctcatttagaggcgagttttgaggaggtagagaacaacctgctgcatctggaagacttatg

SEQ ID NO: 535580 - DNA, 75 bp, Homo sapiens
atgaatgaggaagatcctgagaaacagcgcaggctggaggtatctcacatgatgctattgctcaagagtctaaac

SEQ ID NO: 535581 - DNA, 100 bp, Homo sapiens
aagcgcttctcaacgttcagtgcctcgaaagaacttccgtacgacctcgaggatgccatggtgttctggatcaacaaggaaactgcattcagagaatgag

SEQ ID NO: 535582 - DNA, 90 bp, Homo sapiens
gtttcggttgcacgtcacagctctggattaccttgcaccttatgccaaggtcaagtctggcaccatctttgacaacttcctcatcaccaa

SEQ ID NO: 535583 - DNA, 101 bp, Homo sapiens
ggctgcgccatggcgttggcgttggcggcgctggcggcggtcgagccggcctgcggcagccggtaccagcagctatacacagaatgggattttacatatgc

SEQ ID NO: 535584 - DNA, 98 bp, Homo sapiens
ccatgtttgacaagacgcggctgccgtacgtggccctcgatgtgctctgcgtgttgctgggccgaatacatcaagcaatggtaacatctttaaatgaa

SEQ ID NO: 535585 - DNA, 83 bp, Homo sapiens
tgagaaggactgcctgtttgcagcttcctgcctgacacagctcacttcaagaagtgcacaatgtcagaacgtggaattaagtg

SEQ ID NO: 535586 - DNA, 80 bp, Homo sapiens
cagtgacctcctggacttcagcatgctggtaggtgagtgctgtcctcggctcactttcctcaagctctccggctgccacg

SEQ ID NO: 535587 - DNA, 101 bp, Homo sapiens
tctgaagcaagccttcgtccggggtctccccacgcccaccgcccgctttgagcaaaggaccttcagcgtcatcaacctgatgtgtgagaagcggatattgg

SEQ ID NO: 535588 - DNA, 100 bp, Homo sapiens
gatcagagatcggcggagaccctcgaagtgcgcaaacttgacactcaccctgaccgtgtttctgaaagatctatccagcactccgatggccagcaacaac

SEQ ID NO: 535589 - DNA, 99 bp, Homo sapiens
ctccttcgcatccgacgcaaccggcagcagcgctgccgccgcgtcctcagccaccgctccctcttcccacggaatggcggcgctagatagtaaggcatc

SEQ ID NO: 535590 - DNA, 83 bp, Homo sapiens
ctacccagtcccaggacgtggcgcgggtctccagtgcttcaggaaggaggagaatcagaaggtcgccattgaaactattgaat

SEQ ID NO: 535591 - DNA, 83 bp, Homo sapiens
cgccgcccgtccacacccgccgccaggagcgcagctcagctgggctggaactgccctcctggaactcccccagcctacaacct

SEQ ID NO: 535592 - DNA, 98 bp, Homo sapiens
agaagccttcaaagggaccaagaaaggcactgtctaccttaccccttaccgggactccctccccagctcggtcattagtgccatcagtggacagctgc

SEQ ID NO: 535593 - DNA, 82 bp, Homo sapiens
ccaccctgaagaacctagaggatcttgttactgaataccacgggaacttttcggtgatgtttgaggcaccatcagagttaac

SEQ ID NO: 535594 - DNA, 87 bp, Homo sapiens
gaggtgctcggattctcgtagctgtgccggatgatgcagaaaccattcttttgaaagctgttttgctccaggtcatatgcctctacc

SEQ ID NO: 535595 - DNA, 101 bp, Homo sapiens
atttatagacaatgaaatgatagtgatccttggtcaaatggatagccctacacagatatttgagcatgtgttcctggggacaggcaaatggtatgaattac

SEQ ID NO: 535596 - DNA, 100 bp, Homo sapiens
tttgattttacaggagtgagcaacaaaactgaaataatcacaaccccagttgggaaatcctcattgacgattcaatttgttgaaggccaatttgtggact

SEQ ID NO: 535597 - DNA, 97 bp, Homo sapiens
gcaaggagcgccgccagctgcaggccagggagaattccatacgacataatctgtcattgaacaaatgtttccttaaagtgcctcgatctaaggatga

SEQ ID NO: 535598 - DNA, 75 bp, Homo sapiens
acagtatgagcatgaccagtggagaaggtactagtcaacctccaggaaattccacttacttggatgaccatggac

SEQ ID NO: 535599 - DNA, 50 bp, Homo sapiens
gggagcggagccatggcctccggcgtggtgaccaagatgaagatgcagag

SEQ ID NO: 535600 - DNA, 75 bp, Homo sapiens
gctggattactatcaactatctgctgggcaaattcagtcaggaagagagaagggcacagttacctaagtatcaac

SEQ ID NO: 535601 - DNA, 106 bp, Homo sapiens
gacagccgcgcgctgagggtctcggggcgggcgccgcgggacctctccgggccatggctcaccatggatgatgatatcgccgcgctcgtcgtcgacaacggctccg

SEQ ID NO: 535602 - DNA, 141 bp, Homo sapiens
ggtacctaaagcacagctaggcagctggggaaaaggcagcagtggtggagcaaaggcaagtgagactggtgtgatcagcactggaaaagatgcctgcccctgctgccacatatgaaagagtagtttacaaaaacccttccg

SEQ ID NO: 535603 - DNA, 75 bp, Homo sapiens
gtgctgaggcggaacaggccgggcaccaaggcgcagacccctgggcatactccttccttaagatgggatgagaca

SEQ ID NO: 535604 - DNA, 114 bp, Homo sapiens
gtgcggcccagcgagttggtcggtcccggggtcacccgctacgggaagcaggcctcgccacagatatcttaatgcaattcagacaatgtgtccacacattcttcgctatttgac

SEQ ID NO: 535605 - DNA, 74 bp, Homo sapiens
cagagcggagggagccccagacacggtttctctactcggacgaggtgcagattggcccggagacggtgatgacc

SEQ ID NO: 535606 - DNA, 83 bp, Homo sapiens
ctcggccgcgcggactgaaggagactgaagattcccaacctgctgagcatccgcacacccactcaggagttggggcccagctc

SEQ ID NO: 535607 - DNA, 100 bp, Homo sapiens
ctgcgggatcacctcctcggcgtgagcgacagcggcaaagatagaatttttgcggcatttgaagagctttttccagattatgtttaaaattgaaaccaag

SEQ ID NO: 535608 - DNA, 83 bp, Homo sapiens
ttcagaggccggaaaatgccctcaaacgcgccaacggcttcaacggaccacaccaaaatgccatctcaaatggaacacgccat

SEQ ID NO: 535609 - DNA, 75 bp, Homo sapiens
gtcatggcagatggagcctaccaagaaggaagctggtgaactctacaaccggatgctgaagcgtttccggcagga

SEQ ID NO: 535610 - DNA, 75 bp, Homo sapiens
tgcagcctcatcctacagccccctagatcctgaccaagatgaagcagcagggtcatgagacagccgcctgtccgg

SEQ ID NO: 535611 - DNA, 82 bp, Homo sapiens
agcaggagcccggcaccccccgccgacaaggaggatcttcgtgaagactctgactggtaagaccatcaccctcgaggttgag

SEQ ID NO: 535612 - DNA, 74 bp, Homo sapiens
aacaacaccacaataatccacagccaaggagcctcacagtctactcagagaaaaataaaagaaggcaaaatgag

SEQ ID NO: 535613 - DNA, 97 bp, Homo sapiens
atgacttctctaatcagttacggcaaaagaatggaccccagcaggaaaagcaaagcaagagaattctgctaagaagttttattctgaatctgaggaa

SEQ ID NO: 535614 - DNA, 90 bp, Homo sapiens
gcagtcccttggatattgctgtggacgcaagctaaattctgtccaacgtttaataaatcaatggaggaacagggtaaatgaactgaaaag

SEQ ID NO: 535615 - DNA, 101 bp, Homo sapiens
cgaagtaccgacccgagttatgcccaccctccaactttgcgacggaaatgtgtcatcgaaagccagttggctggggaacagaccagggaattggtggattt

SEQ ID NO: 535616 - DNA, 100 bp, Homo sapiens
tgcgacttgttaatcaaccggtcaggctggacgtgcacgcagcccggcgggaggataaagaccaccacgaccgttgaaaactgtgtgtgcattttaagga

SEQ ID NO: 535617 - DNA, 83 bp, Homo sapiens
cttattacaaaatcaaacctgcatgatggagagaccagagaagagaacaagctgttgattcctaagcagaaaatttcggaaga

SEQ ID NO: 535618 - DNA, 100 bp, Homo sapiens
agaggcgtgctaaacagacagaactgcggcttttggaacagaaagttgagcttgcgcagctggtcaatgagctgaaggagaaaggcaacaaggccctgag

SEQ ID NO: 535619 - DNA, 101 bp, Homo sapiens
cacacagccccaaacctcagagactcagacctctcatctgccagaatcagaaagaattcatcacactgtctcaccatggatgatgatatcgccgcgctcgt

SEQ ID NO: 535620 - DNA, 90 bp, Homo sapiens
gatggggccaacagcggcctctagtgtctggaggaggaagtgtcagcgctactgccgcagtccggttccagttgttggcaaaggagagga

SEQ ID NO: 535621 - DNA, 80 bp, Homo sapiens
tggtttagaaatggaaaaatgtataaactgccagggagaagaatgagaagacaggagacaaactgtttggaaagctaaat

SEQ ID NO: 535622 - DNA, 83 bp, Homo sapiens
cgcggatctcaccgccgctcaggatacgtgcttttcaacatgccttcagcactaatgactgctccaggaatgtctacattaag

SEQ ID NO: 535623 - DNA, 101 bp, Homo sapiens
ttatggcttccagtggaggcattttggggcagaatacagagatatggaatcagaaatgcactcggtgatggaaagagagccactattctgaagaacacttg

SEQ ID NO: 535624 - DNA, 74 bp, Homo sapiens
ttgagtacatcatctgtaccaacaccaatgtgaacaaaagtactttgactcaggagactacaacatggccaaag

SEQ ID NO: 535625 - DNA, 102 bp, Homo sapiens
cacgggaagaacaaagacttagactcggaagtgagctcacaatgactcaagctgccacatagtgttgattgtgaaatgccagttgaagcatatgtcctgcga

SEQ ID NO: 535626 - DNA, 96 bp, Homo sapiens
aaacgggccgcgaaccgcagtatcatgctggccaagaagatcatcattaaggacggaggcacggtgtggtcactcacctgtctaccactcccgtga

SEQ ID NO: 535627 - DNA, 98 bp, Homo sapiens
ccttatgatgactacccggtggttttcttgcctgcctatgagaatcctccagcatggattcctcctcatgagaccccaccaacaactgaacgctttgg

SEQ ID NO: 535628 - DNA, 75 bp, Homo sapiens
tcgctttgctggagcttcaattaagttcatgaggacaaggaaggaatttactgaagaagtaagaaatcttttgct

SEQ ID NO: 535629 - DNA, 89 bp, Homo sapiens
ggcgaacacgccgcggtcctcgtcgtgatccttccgctgaggaattgagaaaactaatgatgttgcatggaggtcaataccatgtatat

SEQ ID NO: 535630 - DNA, 100 bp, Homo sapiens
gcaccgaaccccagatgtgctcaagaaatgccagcagctacaagcaggggggtgtcgcctctgggatgaagcacgtggagaccaatacctacgacgtgaa

SEQ ID NO: 535631 - DNA, 90 bp, Homo sapiens
cgaacatggcacgaaagagatcaaggcatcaagcatgatggaaccatgtgtgatacctgccgccagcaaccaatcattggcattcgatgg

SEQ ID NO: 535632 - DNA, 88 bp, Homo sapiens
cgcctgagcatccccgtcatggtggtcaccctggagctcttcagcatgtccctcaatgccaagaccaaggtgcgagggcttatcgaga

SEQ ID NO: 535633 - DNA, 51 bp, Homo sapiens
ctgggaaaaggcactgaagttggagtgtatggtgaataaattcaagaaaac

SEQ ID NO: 535634 - DNA, 100 bp, Homo sapiens
ccccgcaaggatggcctttcctaccagtactatactggcaattgctggagaagattttgcaattgttgcttctgatactcgattgagtgaagggttttca

SEQ ID NO: 535635 - DNA, 100 bp, Homo sapiens
agggagaaaaggaggcagtgggcacagccgtggactatggctacttcagattcttccaggtgtcactagttccaggcgtctgctgaaagatttggaacag

SEQ ID NO: 535636 - DNA, 80 bp, Homo sapiens
ccagccgcaccatgccgctcctaagcctgcacagccgcggcggcagcagcagtgagagatgggcaccaacaaatgcgcca

SEQ ID NO: 535637 - DNA, 76 bp, Homo sapiens
accgccctggcgcccagcaccatgaagatcaagatcattgctcctcctgagcgcaagtactccgtgtggatcggcg

SEQ ID NO: 535638 - DNA, 78 bp, Homo sapiens
acacctctctacattctctgcacggctggaatgagaatcctccccgaaagtatgaagtgtaacagaacagactttacc

SEQ ID NO: 535639 - DNA, 83 bp, Homo sapiens
ggcctgagaggctgctgttctaactcgctcccagacagcccacctgaggatattgaccataaggactcatatctcattacaag

SEQ ID NO: 535640 - DNA, 73 bp, Homo sapiens
gcggccccgcagcagctccaagaaggaaccaagagaccgagacgatcctcctccaagacaaacagcggaaaat

SEQ ID NO: 535641 - DNA, 100 bp, Homo sapiens
cccgccaggggcactacgtcatccacggggaacgcctccgggaccagaaagtttgttgataagccggggcccttcgtgggaccctgcggtcactggatca

SEQ ID NO: 535642 - DNA, 100 bp, Homo sapiens
cactttgtgaaactgctttttgaaacagagaaaatagatatagtactacattttgccgcacaaacacatgtagctattgacctgaaaagtggttctggaa

SEQ ID NO: 535643 - DNA, 75 bp, Homo sapiens
agacgaaagaaagatctctgggcagccacctcccgcccctgtacctggatggccatgtgtttgcaagtcagcccc

SEQ ID NO: 535644 - DNA, 88 bp, Homo sapiens
ttgatcctgattctacccaagtacatatgatttcagctgcaatggcagtacccagtgcccctaggcgtttccgagtccggcagcccaa

SEQ ID NO: 535645 - DNA, 90 bp, Homo sapiens
ggtccatgctgcacttgtctaccacaagcatctgaagagagttttcctgatagatctcaacagtatttaggtagaagcttaggctattga

SEQ ID NO: 535646 - DNA, 100 bp, Homo sapiens
aaaagcgcctcctgcctgctgagcactgcatcaccaagaggttgctctacctgtgcatgaagcacttgacggatcgctataacatgtactactcctttgc

SEQ ID NO: 535647 - DNA, 74 bp, Homo sapiens
agtggaagcgaagccgaaaaaggcagcagcgaagggtttagatgtagattctctggtcattgagcatatccaag

SEQ ID NO: 535648 - DNA, 100 bp, Homo sapiens
cgggagcgccgagcgtcgccgccgccgccgccatgaacaactcgggcgccgacgagatcgggtctggaacgatttcatgaaccgctccggggaggagcag

SEQ ID NO: 535649 - DNA, 100 bp, Homo sapiens
aatccctcacgcgggcgcggatcgaccggagcagagagctggcgagcaagaaaccaaggtgtatgttggtaacctgggaactggcgctggcaaaggagag

SEQ ID NO: 535650 - DNA, 98 bp, Homo sapiens
gcagtggtggctatgaacccagaggtcgtggaggtggccgtggaggcagaggtggcatggggtactaccgtggtgcagtgggcgccctgctggtgtac

SEQ ID NO: 535651 - DNA, 99 bp, Homo sapiens
gaatagttgatgccctaaatgaattcagcaacatgaaccgtgaagaccggaatgtgctgcgtatgaaagaacgggaaaggcggaatcaggaaattcagc

SEQ ID NO: 535652 - DNA, 100 bp, Homo sapiens
ggggcgatgaccgtgcgctgaccctgactcactccagcaaacggggattcagcgtccgatcctttggaacagggactcacgtgaagcttccaggaccagc

SEQ ID NO: 535653 - DNA, 83 bp, Homo sapiens
ctcctacattagcgtctacgaccaccaaggctggtgagattggagagatgaaggatggagtcccagagggagcacaacttcag

SEQ ID NO: 535654 - DNA, 105 bp, Homo sapiens
ctttaggtgcttttatattcatctcaaaaacaaaattctgaactcaggacttggcaaaaaagaatggtttgtcattcattgaaacttcggccctagactctacaa

SEQ ID NO: 535655 - DNA, 87 bp, Homo sapiens
agtgaataatggggatgctggaagggagatgccctgcccgttgccctgtgatgaagaaaaacatccatgatagcagtcttctgtaaa

SEQ ID NO: 535656 - DNA, 88 bp, Homo sapiens
gcgcgccgggagagatgctgagttccagagaggtggatcgcatggtctccacgcccatcggaggcctcagctacgttcaggggtgcac

SEQ ID NO: 535657 - DNA, 88 bp, Homo sapiens
agaccgggaggatcacagagccagcatggacctccaggatatagtggctaccctgggccccaggtcagctacccacccccaccagccg

SEQ ID NO: 535658 - DNA, 75 bp, Homo sapiens
ttaatcacgatttctctcctcttgaggtgccagtcattgaaatcccaggttttggaaatctttctgctgtaacca

SEQ ID NO: 535659 - DNA, 73 bp, Homo sapiens
gccgaggcgcttctgcatctgtgggccgaggactttgtgttttatgccccacgtctgagaatcaacaagcgga

SEQ ID NO: 535660 - DNA, 90 bp, Homo sapiens
cagattttgaagctaaagttaagcaggactgagcacggaaggcatctaccgggtcagcgggaacaagtctgagatggagagtctgcagag

SEQ ID NO: 535661 - DNA, 99 bp, Homo sapiens
actggagagcttcatcaaaaatagtgatagctttgataaacgagatgatgcctattggccagaaggaaagcgtgtggcaatggaggaccgatatcgtgc

SEQ ID NO: 535662 - DNA, 75 bp, Homo sapiens
caggactaatagctggcaaatttctgttccatcagcgtttgtttggtacagtctgaaaatacagcctgttgagaa

SEQ ID NO: 535663 - DNA, 100 bp, Homo sapiens
agggaaggagggcgtccgagtcaacaaccgcttcgagctgccctccagaatacccatcatatagcccctgaggtggcatggtgatgtctccatgagggaa

SEQ ID NO: 535664 - DNA, 87 bp, Homo sapiens
cccaccatgatggaagacgacgggcagccccggactctgtttgcccaaaggaccagccaaaacctcacctcaagccacgcatatgat

SEQ ID NO: 535665 - DNA, 98 bp, Homo sapiens
cctcccaagtaactggaactacagcaggttcaggagaagtggcacctggtggaggacctgtcgcgactgctgccggagccaggcccgagcgactctcc

SEQ ID NO: 535666 - DNA, 88 bp, Homo sapiens
gtgacggtcatgatggaccccaactccacccagcgctaccggctggaagccctcaaggacaacaccatcgacttcctggagtacgtgg

SEQ ID NO: 535667 - DNA, 100 bp, Homo sapiens
gtcagacgtgaggaaggacctacctccttggtcaaagctgggatgggtctgcgctcctcagaccaccggcaggtgaacagcctgatgcagaccgaggagt

SEQ ID NO: 535668 - DNA, 100 bp, Homo sapiens
gagctcttacagatggacctgtacgcgctgctaggcattgaggagaaggcagcggacaaagagtcctcaaccactgaagaagaagcttgatgcttggctg

SEQ ID NO: 535669 - DNA, 82 bp, Homo sapiens
gcggctcctgttgctcctcgggctctcggccggcgagctgagctcaatgtgcagcaatggatgacgacagcctggatgagct

SEQ ID NO: 535670 - DNA, 50 bp, Homo sapiens
gttcaagcaattcaacaagttaactgagaaaattcatttgcaaattgccc

SEQ ID NO: 535671 - DNA, 90 bp, Homo sapiens
ggcatgacgggccctcagcatcccttctacaacagggaatccctttgcccacgtccagctgaagccgacagtgaccaacgacaggtctgc

SEQ ID NO: 535672 - DNA, 100 bp, Homo sapiens
actccgccgcgctgcgcacgcccagagtgactcctctttcttcccagagtgtggtgattcaccatggccagacccaggaatacgtgctcaagcccaagta

SEQ ID NO: 535673 - DNA, 98 bp, Homo sapiens
ttcgcgcccgccgacccgcgccctgctccctctcagcacctgggcggacggatgttgagaaagagaaggaaacccacagttacctcagcaaagaggag

SEQ ID NO: 535674 - DNA, 74 bp, Homo sapiens
ctctctcgtcgccgctgccgccgccgcagctgccaaaatgctcatgagcgctcagagagctcagaagtggcttt

SEQ ID NO: 535675 - DNA, 100 bp, Homo sapiens
ggagtttcccagaaacaggctgagttttgtttcaacgaaccaaacttttaaatggaccgggagatgttgaaacgggtacaagcataacagtacctcagaa

SEQ ID NO: 535676 - DNA, 100 bp, Homo sapiens
ctgggaggtggaccggagctcgtccagctgcgtgcctagcaaccaggctcctggtggcacacgtaagtgcaccttgcgaggcagtgagtgcaccgtcgtg

SEQ ID NO: 535677 - DNA, 82 bp, Homo sapiens
gcctctcaaagtgctggtattacagtttttgaatcagagccgacaggcacttgaattgaaaatggaaaaccctactgctggt

SEQ ID NO: 535678 - DNA, 95 bp, Homo sapiens
ctctccagcaagaaggtggcaaggagggccgcaagaacgagatgctgctgtccaaggtgaaagcgaaggcctcctgaacatccccagccgtggct

SEQ ID NO: 535679 - DNA, 82 bp, Homo sapiens
acagacagctcaggctgcccagatggtggctcccggagtccagcttccccttctcagaatcctgctcttcctccagagagat

SEQ ID NO: 535680 - DNA, 50 bp, Homo sapiens
tgcaaagagagtgacttatatgtattatacctgaagaaccttagccctcg

SEQ ID NO: 535681 - DNA, 97 bp, Homo sapiens
gcgggtgcggcgatgatcctggaggagaggccggacggcgcgggcgccggcgaggagagcccgcggctgcaggctccccacaggtgcaggaagccgc

SEQ ID NO: 535682 - DNA, 82 bp, Homo sapiens
cccaccattatttcggtgagggggcaacgctaagaaggggatactgctgtttaaggaagacagagcaggcattggataatat

SEQ ID NO: 535683 - DNA, 83 bp, Homo sapiens
ccggcaccaccgctgcaagagccggacaatgcagatcttcgtgaagactctgactggtaagaccatcaccctcgaggttgagc

SEQ ID NO: 535684 - DNA, 88 bp, Homo sapiens
gcagccgcggatctcaccgccgctcaggattgtcctgggtcacataatgccagctgagcgtaaaaagccagcaagtatggaagaaaaa

SEQ ID NO: 535685 - DNA, 100 bp, Homo sapiens
ctccattacactgctgagtcacacacaacgcttgttatgttttcatcacttctctccagaaggtaatactgcattgcatgattgtgcagaatctggaagt

SEQ ID NO: 535686 - DNA, 100 bp, Homo sapiens
ctacaagctgtggatctcttgcatattccgctccagaaattctgcttggtgatgagtatgatgcacctgcagtaggccaccaccacctatcatgacagat

SEQ ID NO: 535687 - DNA, 97 bp, Homo sapiens
ctgaggcctggctgaattacccatgctttaagaattgggatgggtccccagtgagctcctggattctgctggtgtgcctacaggggttgtggaagga

SEQ ID NO: 535688 - DNA, 73 bp, Homo sapiens
cgagttggaggagaaggtcaaggcagtggaagcagataatcaccagaatgggagtgaatgacttgtggcaaat

SEQ ID NO: 535689 - DNA, 126 bp, Homo sapiens
tttggatttagcgtttcagaattgcaattccaaaatgtgtaagacgggatattctcttctgtgctgtcaaggtgattcgcctttgccagtctcatctcgtgtctgctttgttaagttccatgatcc

SEQ ID NO: 535690 - DNA, 100 bp, Homo sapiens
gcatggcaaagactggcaaaagcacaaggattctcgctgtgacagagacaacaccgagtatgagaaggttggtacattgtgacctatgccttggggatct

SEQ ID NO: 535691 - DNA, 75 bp, Homo sapiens
tatggtgggcaaactaagccgattttccggaaaaagtcccatatgaaggctcaaaagagcggtaaagaacaacag

SEQ ID NO: 535692 - DNA, 129 bp, Homo sapiens
caaaggcatggggctgtccatgggcaccatgatctgtggctgggataagagaggccctggacagtcattttgtttactcattcagccctgttgcaggtcccaataaactcttcataaggttgacagaag

SEQ ID NO: 535693 - DNA, 90 bp, Homo sapiens
tcaccaataatagtctcgtggaactgtgtacaagtccccagagtatgagtcccttggttttgagcttactgtggagagattagtttctat

SEQ ID NO: 535694 - DNA, 83 bp, Homo sapiens
caatgcctcagaaattcattggtcatcatcagatttgaaatatttaaagtggatacaaaactatttcagcaatgcagacaatt

SEQ ID NO: 535695 - DNA, 100 bp, Homo sapiens
ggatcggggacggagagaacacgagcccatcagccccaaactggataccacccacatgtccatcatcagtagaatggataaataaattgttgtgtatgca

SEQ ID NO: 535696 - DNA, 90 bp, Homo sapiens
gcggaacctgcggggcagaggcggcggccgcagcggcgcagctgatagcaggaacaggtgttggggatgtcctttgcactgaccctgaac

SEQ ID NO: 535697 - DNA, 74 bp, Homo sapiens
aatacctcaggaacccacccaaactggtcacccctcatgacagatgacctggatggactcctgagtgagcttcc

SEQ ID NO: 535698 - DNA, 75 bp, Homo sapiens
ctgcgtggctcgtgatggtcgcctgcagcccgcactccttgaggatcgacagagtttcactcctgttacccaggc

SEQ ID NO: 535699 - DNA, 88 bp, Homo sapiens
tggacgtgctcgcgcccctggtcctgctgctcggggtccgcgcggcctccgcggagccaggactttccttatcccagttgattgtgca

SEQ ID NO: 535700 - DNA, 75 bp, Homo sapiens
cagcagaaaataaatgagctccttaaacagaaagatgtgctaaatgaggatggcttccgagtggacctgccaatc

SEQ ID NO: 535701 - DNA, 86 bp, Homo sapiens
actgctcaagcctggagactcgcaacaagatcccctatgagagtcccatcttcagcagagtaatctcaggggcgatataatcaatg

SEQ ID NO: 535702 - DNA, 73 bp, Homo sapiens
aggaatatatcctgactgattgtctcctctgagcctccggcctccataagacccaaaacagatgacacctctt

SEQ ID NO: 535703 - DNA, 50 bp, Homo sapiens
ctgggagcctgctccctgctcagctgcgccatgactgctccctgcgtctc

SEQ ID NO: 535704 - DNA, 100 bp, Homo sapiens
ccccggcccacagtgggggtgtgcaaacccgagagaactggttaaacacagtgggaatatcacttttgatgagattgtcaacattgctcgacagatgcgg

SEQ ID NO: 535705 - DNA, 101 bp, Homo sapiens
caatgctgaccaaggaggagcctgttccagaactgctggaagctgaggttggatggcaagcatgtggtgtttggcaaagtgaaagaaggcatgaatattgt

SEQ ID NO: 535706 - DNA, 102 bp, Homo sapiens
tggtgagcgtggggaatctggaagaggctggggagtctgtgtccttccagctgcagatacggagttacagacacaactgaggccccctttcaaggggatcag

SEQ ID NO: 535707 - DNA, 82 bp, Homo sapiens
cttccccatggggctggcctgcggcgcctgggcgctctgaggttcacgcctacatcatcagctccctcaagaaagagatgcc

SEQ ID NO: 535708 - DNA, 74 bp, Homo sapiens
gatgatgtaacataccaagtctatgaggaacaaggtctgggaggggctgaacgtggtgaagacaggccgagtga

SEQ ID NO: 535709 - DNA, 74 bp, Homo sapiens
ttgaaaacaagtggaatagtgctgtcttccttgatgcggttcatgctattattcagccggcagggaaaactgcg

SEQ ID NO: 535710 - DNA, 96 bp, Homo sapiens
gaggacgcgaggagccatgaggcgccagcctgcgaaggtggcggcgctgctgctcgggctgctcttggagattactcttgtctctgctgctcctgg

SEQ ID NO: 535711 - DNA, 75 bp, Homo sapiens
gctgcaaaacactttattgatgtaggagatactggctccaatactacagaatgaatagaaaaaatatgacttttt

SEQ ID NO: 535712 - DNA, 100 bp, Homo sapiens
agcagttgaagaagacctactttaacatcctcatcaagcccgagactttggccaaaatcctgcttatctgtgaaatgcagttaacacatcagctggacct

SEQ ID NO: 535713 - DNA, 75 bp, Homo sapiens
ggtcaccctttccgcccagtctttgggttgagaatctgtagtactgagaagtttctccactatcagccgagatta

SEQ ID NO: 535714 - DNA, 75 bp, Homo sapiens
ctacgcagagctcatcgtccttggccctgggaggagcggggacactgaggacctctctccaaattggcctctcaa

SEQ ID NO: 535715 - DNA, 100 bp, Homo sapiens
tcttcctcttcctctcggagctcaccggatttataacgacagaagtgtggtgttggcatgaggaaaggaggtatcttcgagggacaatcttcttcttgtg

SEQ ID NO: 535716 - DNA, 100 bp, Homo sapiens
aaagaagcagccttatatacattaggagctattgcagagaaaaatggaccacagtcatactccatggattgtgatcatagctaaatatttagcacagtgg

SEQ ID NO: 535717 - DNA, 83 bp, Homo sapiens
ggaaatcgggctgaagcgactgagtccgcgatggaggtatcatgaactgatcactaaatatgggaagttggagcctttggcag

SEQ ID NO: 535718 - DNA, 75 bp, Homo sapiens
tcgatgagacgcaggacatgctgctggagatgctggaggacatgaccacagatcactttgggaagcagtgacatc

SEQ ID NO: 535719 - DNA, 90 bp, Homo sapiens
gattggtccagaacagtttccggtcaatgagcactattttggattagtcaatgtgctggagaatctggtaaaagcaccattgtgaagcag

SEQ ID NO: 535720 - DNA, 100 bp, Homo sapiens
ggtccctgaagagggaagacacgcggaaacaggccctagcacaaaacacagatcttaaagaacgcttacgcagaatccatgccgagtctctgctcctcga

SEQ ID NO: 535721 - DNA, 148 bp, Homo sapiens
cttcttccccgcgccctgcggggctgtccaacgccttccagctccggctcccgctgcctgcaccatgtccgccagagccctggaacagctgctgacagagttggatgacttcctcaagattcttgaccaggagaacctgagcagcaca

SEQ ID NO: 535722 - DNA, 71 bp, Homo sapiens
cttccacagtgaggactgctccgtgggcttcctgcgggcctcccggccctccgccatgacccatgaggccc

SEQ ID NO: 535723 - DNA, 100 bp, Homo sapiens
ctaggggttctgctgctgggtgcggcgcgcctgccgcgcggggcagatgaagatcagcttcgtgcaaagggttatgacaaaacaccagacttcattttac

SEQ ID NO: 535724 - DNA, 90 bp, Homo sapiens
ggctttaatcctgaaagccatgcagcggctgtcgcctggttgggcccggaaatgggacgtcgcgctttctcagggagcgtagaagcagcc

SEQ ID NO: 535725 - DNA, 89 bp, Homo sapiens
aatgcgtgtattttgtggaaagttccaaactgtctgatgctgggatggcatagtcaatccaacaataagaaaagatttgaaaactggac

SEQ ID NO: 535726 - DNA, 100 bp, Homo sapiens
tgggaactctttccagcttgtgtctgctgagattggggattttgatgaagccttggacagagagcacttagcaaaaaataaatacatacctcagcaagac

SEQ ID NO: 535727 - DNA, 100 bp, Homo sapiens
ggggttgttttataaactgcctggccgaatcagccttttcacgctcaaggactcagcccaggagagtgttattactcgagatattcatcgtacatttccc

SEQ ID NO: 535728 - DNA, 75 bp, Homo sapiens
gcttatcgaacagagccgggagttcaagaagaacactccagagtctgatcccccaggaaagcagctggaaaacaa

SEQ ID NO: 535729 - DNA, 100 bp, Homo sapiens
ggcaagaagatcggctgcggcaacttcggggagctccgcctaggggccccaaggaccaaaagggcagaaaggtgagccttatgcactgcctaaagaggag

SEQ ID NO: 535730 - DNA, 82 bp, Homo sapiens
gatccgctttgacgtgatggtgaacggcaaggtgcatctgcagacgcagcaggaggtgaagctgcgcatgacgggcatggcg

SEQ ID NO: 535731 - DNA, 96 bp, Homo sapiens
ggaaagcgacaccgaggaattctatgatgcccctgaagatgtgcacctagggggcggctaccccgtgggttttccaagagataacttcaccaagat

SEQ ID NO: 535732 - DNA, 75 bp, Homo sapiens
cccatttgtgtccattgatctcttggagcagctggggatcatgtccgtggtggatgactggattgaatcatataa

SEQ ID NO: 535733 - DNA, 51 bp, Homo sapiens
gcctgggatggcctcgatcaccagagggcctagagcatgttgaaaaaataa

SEQ ID NO: 535734 - DNA, 100 bp, Homo sapiens
cttcaagctgttgctacatcgaccttttttcaggaagcccgtgcctctactactggatcaagattatgttaatttaaagaaccaaattataaaggcggaa

SEQ ID NO: 535735 - DNA, 113 bp, Homo sapiens
aaggttaaaaatcaaacagctcgaagaggataaacaccgccttcagcaacagctctctatcaatatcagctcacatcattgaaaagataattttgaagacatgttttgctgaa

SEQ ID NO: 535736 - DNA, 100 bp, Homo sapiens
caggcgccggccggctgcgaagacgcggtgggccgcccctccggaaaatgtttataggaggccttagctgggacactacaaagaaagatctgaaggacta

SEQ ID NO: 535737 - DNA, 71 bp, Homo sapiens
gtatcctgtcacttctggatgtgagaccattcctcaagaattttgtatccaaggcccaaaagtttgttacc

SEQ ID NO: 535738 - DNA, 98 bp, Homo sapiens
cacctagtcgtggccggaggagtctcagagctgtcagaaagaaacttgtggtggagaatgttgatgtgttaacacaaatgaggaccagctttgacaaa

SEQ ID NO: 535739 - DNA, 96 bp, Homo sapiens
tgaacatcgaatcatggaatcccttgcatggctctcagttggtgttcgaggaagagacattgttgttcttggtgtggagaagaagtcagtggccaa

SEQ ID NO: 535740 - DNA, 75 bp, Homo sapiens
aaactctcctgaaaaggcctgtagcctggcaaaaacggctaatggaggctggcaggacgcaacaactccatcttc

SEQ ID NO: 535741 - DNA, 75 bp, Homo sapiens
gagctgaacattactcttccagaagaggtacatcaggaacgtctctatcaagaatacaatttcagcaaggctgag

SEQ ID NO: 535742 - DNA, 121 bp, Homo sapiens
catggaaccaggtgtggaaagctgcttgagaagaggagccaaaacatcatagttgaaccgtcctggaatagaagatcttagaaatgaagttgaaaaattacgcaatgaagtgaatgaaaga

SEQ ID NO: 535743 - DNA, 75 bp, Homo sapiens
agcatgagatccaaaggcagggcaaggaaactggccacaagttcttcacacacccccattcggcgtagtacccag

SEQ ID NO: 535744 - DNA, 100 bp, Homo sapiens
ggcgctctggctgtgctgcgcgacccccgcgcatggaaagaccacagcaagattctttcattcgtctcctcctagcctgggggaccaggctcgaactgac

SEQ ID NO: 535745 - DNA, 74 bp, Homo sapiens
ttttcccaaaagacaggctcttcacctgaagatttgttcccgacaaggagttttctggttcagaccgtagacag

SEQ ID NO: 535746 - DNA, 98 bp, Homo sapiens
ggcgcggcggcggcacgatggtcatggcgtatttcgtcgagaatttttgggaatgtatcctgtcaggtataatgtcagtgaatggcaagaaagttctt

SEQ ID NO: 535747 - DNA, 50 bp, Homo sapiens
aggggccactcagagtcgcccgagaattgatcatggccttgccaggttgg

SEQ ID NO: 535748 - DNA, 88 bp, Homo sapiens
tcaaggaaaagttcgttcgcaagacccgcgagaacccggtggtacccatagatatggctcgtggacagcagaaaattcagtctcagca

SEQ ID NO: 535749 - DNA, 98 bp, Homo sapiens
gagaattggcagccgtggtgagccggtccaagtggtaagaagttcagaagcaagcctcagttggcaaggtacctgggaaatactgttgatctcagcag

SEQ ID NO: 535750 - DNA, 75 bp, Homo sapiens
gccgtgcggagcgagttacgagaattcccggccgctgcaaggggctatgacttctgccaggtcctgcagtggttt

SEQ ID NO: 535751 - DNA, 83 bp, Homo sapiens
aatgggttgttaaagaatcaggcattttggttttaggagcaattgctgaagcccaagaagatgaaaggattgttcttgttgac

SEQ ID NO: 535752 - DNA, 100 bp, Homo sapiens
ttcattcgcctcaagcccgacaccaacaaggtggcctttgtcagcgcccagaacacagggctctctttacctatgaaggcaacagcaatgacatccgcgt

SEQ ID NO: 535753 - DNA, 99 bp, Homo sapiens
ggactgcaagcacatgggactcctcgttggcagaggcagcattttttctcagaaatggtggagtcaatgaagaaagtagcagggatggatgtggagctg

SEQ ID NO: 535754 - DNA, 82 bp, Homo sapiens
gaaaagaaggggaagaagatcaaaacccaccatgccccaggggctggcaaggtttaattgcttatggatgtcattcacttgt

SEQ ID NO: 535755 - DNA, 100 bp, Homo sapiens
ccaggagggcttcgtgtatggacctcaagcgttggaggtagcagacttttcagcagaagcatgggtaggttctctctccatggggatgattttcttttgc

SEQ ID NO: 535756 - DNA, 49 bp, Homo sapiens
cagcagccggcagcagcagcggagtcactttgtggcatgtatgacagcc

SEQ ID NO: 535757 - DNA, 50 bp, Homo sapiens
ctttttgtcagattatcaggatgaggaatgacagcaattcagcaggagca

SEQ ID NO: 535758 - DNA, 90 bp, Homo sapiens
tttccagtgcagcgcggagtgggcgatgccagcgtgccagcaggaggatgcattagcacaacaggcctttgaagaggctcggagaaggac

SEQ ID NO: 535759 - DNA, 101 bp, Homo sapiens
gtttcttgtgaggacgcggcagcccgtggagtcggctgagggaaaagcgaggcaaggcaggcggccttcaaacagtggccgagctgcagaactccttgcca

SEQ ID NO: 535760 - DNA, 100 bp, Homo sapiens
tttggagtacgcccgctcccatggctttgctgctgaattcaagttggtcgaccagtccggacctcctcacgagcccaaaaactaattctgaagcaagccc

SEQ ID NO: 535761 - DNA, 83 bp, Homo sapiens
aaacagcccgcccgaccccgtcccgaccctggccgccccgagcggagcctggaggcataatcaccagcaacacccgggacaat

SEQ ID NO: 535762 - DNA, 97 bp, Homo sapiens
ccagtttatggcttccagtggaggcattttggggcagaatacagagatatggaatcaggtctcatcatccatgaaggaccctcggtgtaccgcatct

SEQ ID NO: 535763 - DNA, 100 bp, Homo sapiens
tctattaggattttatatcttactatgtttctcagcagtgtagctcatttaagaaaaactactgaatatgacagcatcagcccaaaccgggacttccagg

SEQ ID NO: 535764 - DNA, 100 bp, Homo sapiens
tcaaggcactcagctcaaatacacacacctgttgccattatagagctggaattaggcaaatatggacagtcactccatggattcctttgggcaacccaga

SEQ ID NO: 535765 - DNA, 98 bp, Homo sapiens
tgttgacagagggtacttcagtattgaaggtttctcctcttcaaaaatctgaagttgttgagatggttaagaaacaagtcaaagtcgtaacgcttgca

SEQ ID NO: 535766 - DNA, 82 bp, Homo sapiens
tggcggagctggagctggagctctcggaggcattcgttcagtcagagagcataatagaagtactgcgttttgatgatggagg

SEQ ID NO: 535767 - DNA, 83 bp, Homo sapiens
taggagatggagagactgtggagtttgatgttgttgaaggagaaaaggttcccagtctaagtgggtgactttccaagatagag

SEQ ID NO: 535768 - DNA, 90 bp, Homo sapiens
agctggaaggtcttggagcgaagagctcggaccaagcgctcagaatgatgccaatgggtggaatgatgccacctggaccaggaataccac

SEQ ID NO: 535769 - DNA, 82 bp, Homo sapiens
tcatcaacaacttacacctccaggcctcctcttccagcagcctctatctttattctacaggatccagagaatcacccgctga

SEQ ID NO: 535770 - DNA, 98 bp, Homo sapiens
ttgggcccctgtgaacctggaactagcgtcaaccttgaaggcatcgtgtggcaggaaacagaagatggttgcacagtggctcagagagtagacttgga

SEQ ID NO: 535771 - DNA, 100 bp, Homo sapiens
gcgtcaacagcagcaccatggcagggaggagagagcgatggcttttttcacccagaaggccagccccagcggcttccccagcctccggaagtgggaccac

SEQ ID NO: 535772 - DNA, 100 bp, Homo sapiens
acatgaccgagtgcgtcccggtgcccagctccgagcacgtcgccgagatcgtgggtcgccagggtactccaaagattcaggtttactcacgtcatccagc

SEQ ID NO: 535773 - DNA, 98 bp, Homo sapiens
gccgggccatgggcctcgagcccgccccgaacccccgcgagcccgccttgtctgcggcgtgactggaggcccagaccccagttattaaagcttttggc

SEQ ID NO: 535774 - DNA, 88 bp, Homo sapiens
cgaggcactcaagtcctggctcagcaagactctcgagcccatactgtttattccatggctccgttccctttcccacaattggcagagt

SEQ ID NO: 535775 - DNA, 80 bp, Homo sapiens
ttgttggaattggtgacaaaatcagaggcatactttatagctatatgttctcctttcagccaagacctttcaccagtgca

SEQ ID NO: 535776 - DNA, 75 bp, Homo sapiens
atcagatcaaccaccaaagtgggaaacattgaaatcaagactttgtgtggacagtaatgacctcacgtttccgat

SEQ ID NO: 535777 - DNA, 100 bp, Homo sapiens
gaaaatgttaaaggctgtgctgaagaagagccgagagggaggaaagggaggcaagaaggaagcaggcctttttgcaaatgtgtaacttgcctatcaaagt

SEQ ID NO: 535778 - DNA, 82 bp, Homo sapiens
gtcatgggcgcctcggccgccatggtcttcagcggccatgtagggcaggaccgggtggactttggccagactgagccgcaca

SEQ ID NO: 535779 - DNA, 100 bp, Homo sapiens
cccggaggaggttcgaagctgagtatgtgacagcttttcctccgcaaccatgtctgacaaacccgatatggctgagatcgagaaattcgataagtcgaaa

SEQ ID NO: 535780 - DNA, 90 bp, Homo sapiens
agatcaatgaacctttagatgaatttacaagcgtttcccaaagtgtattctgcggaactagcacctactgtgttctcaacaccgtgccac

SEQ ID NO: 535781 - DNA, 83 bp, Homo sapiens
ttttaatcgtgatggatccttgatagtttcaagtagctatgatggtctctgcctgattacatcaaccccagagccgtgcagct

SEQ ID NO: 535782 - DNA, 51 bp, Homo sapiens
gagctggggagcccttctgcgccacagatggtcagcaagaggatgaagcca

SEQ ID NO: 535783 - DNA, 98 bp, Homo sapiens
ctggcattgcctggggctggaatacccttctggagccatcatggagatctgggcggaccccggcaaatacgccctgatgggagctgctgcccagctgg

SEQ ID NO: 535784 - DNA, 74 bp, Homo sapiens
ttttccttctctccgtgcaacgctggcaagtctcaaagtcgccacagctatccagtcagttcgctgctattccc

SEQ ID NO: 535785 - DNA, 75 bp, Homo sapiens
ctgaaatccatctctgccacagagacagctcaggaagcaactttgagagagcaggagattcggatgggtcagatg

SEQ ID NO: 535786 - DNA, 98 bp, Homo sapiens
gcagccatgcttcagtgcgcaggaagtggggcagctgcgggcgctgcgtgccgtgttccggagccagcagcaggatagcagtgagattcacttcaaag

SEQ ID NO: 535787 - DNA, 100 bp, Homo sapiens
cttcaccttcgctaagaacccagggcagaaaggtttaggctgtggaaaatctctgttctcacaaagtctccccaatgctctacaagcaactgcgtcaggc

SEQ ID NO: 535788 - DNA, 88 bp, Homo sapiens
gatttgcaacgaattcaatgaacattcctgctcttgttggcaaacttgacaaaagtaagctgaagccaggaacaagagttgctttgga

SEQ ID NO: 535789 - DNA, 100 bp, Homo sapiens
aaaaagagaggatttgcttttgtaacttttgatgatcatgatacagttgataaaattgttggctcagattattgctactctgtattcagatcttcatgtg

SEQ ID NO: 535790 - DNA, 75 bp, Homo sapiens
tcagacgcagccgtagacaccagctccgaaatcaccaccaaggctgaaggtgatgtggccgccctcaaccgacgc

SEQ ID NO: 535791 - DNA, 100 bp, Homo sapiens
atcgtggtggagtccaccctggctgtggttcttgggtgtctctggggagtccctgggccagaccttcctccagactccagcccacctcttcggagcagct

SEQ ID NO: 535792 - DNA, 90 bp, Homo sapiens
gggttgatgaaacttacctctttgaatctgaaggtttagctcaagagggccagcagtgaggacacgctcaacaagccaggaagtaccgct

SEQ ID NO: 535793 - DNA, 50 bp, Homo sapiens
agtatgcggaggacagctctgatgaggagaccaagatacttggtagtgac

SEQ ID NO: 535794 - DNA, 51 bp, Homo sapiens
aacttgacactcaccctgaccgtgccatctccctcttctacgagctctcgg

SEQ ID NO: 535795 - DNA, 101 bp, Homo sapiens
cgtgtctgctcgccctccgacgctgctcagaaccgcatgcacgagtctctcatgctcttcgactccatctgtaacaacaagttcttcatcgatacctccat

SEQ ID NO: 535796 - DNA, 149 bp, Homo sapiens
ctcccattcacaaggcagctcgctctgggagcctagaatgcatcagtgcccttgtggcgaatggggctcacgtcgacattaacacccttgtgaagatcagcaaaagtgcaggagccatgttgaaaccgcatgcaccaaaactcattcca

SEQ ID NO: 535797 - DNA, 90 bp, Homo sapiens
gaagagttattctcaagctgtcacaggagtggcgacatgtctaagaatgtgagccagtcacagatggcaaaattgaaccaacaaatggcc

SEQ ID NO: 535798 - DNA, 100 bp, Homo sapiens
cttgctcacatccccatggcccaagtgtgtggggaactttgggaattcttctaatcaggaaacccaggcccaacggcaggtggatgcaagaagaaatgtt

SEQ ID NO: 535799 - DNA, 74 bp, Homo sapiens
gggaaggcgcctgaagaggacgaaggatcaagattataggaccggcccaagtgaggagaaacccagcaggctta

SEQ ID NO: 535800 - DNA, 134 bp, Homo sapiens
ggctggcagagcaacgggtgcccctgagtgtgcaactgaagcctgaggtctccccaacgcaggacatcaggcaggtgctccgggatcacaactgtctgcagacgctgctgcagcatctgacttcgcacagcctg

SEQ ID NO: 535801 - DNA, 82 bp, Homo sapiens
tggccctgatccagacctgggcagcgtctcgcccttttgcccaggctagagtgcagtggtgcggtcatggttcactgcagcc

SEQ ID NO: 535802 - DNA, 100 bp, Homo sapiens
acgggatctaaagggagatagagacgcgggcctctgagggcatggaagaggagatggttcgtgttacgcagtggccgtttaactggagatccagatgttt

SEQ ID NO: 535803 - DNA, 101 bp, Homo sapiens
gccagaaagttccgccatgagctggggcacggagctgtgggcctccccatggccacccatggaccagtcggcattcacttcctcccttctgcggcccataa

SEQ ID NO: 535804 - DNA, 74 bp, Homo sapiens
tggagctggtcgcagatcctgagacccggacagtggcagtgaaacagcaactagaagccatttgtgtcaaggta

SEQ ID NO: 535805 - DNA, 100 bp, Homo sapiens
cccccaacaccctctacgaaggcggctacttcaagacagagtgggaagctttggagctgacggatcaccagtgggcactagatgatgtcgaagaagagct

SEQ ID NO: 535806 - DNA, 75 bp, Homo sapiens
gtgatgaggttgaagatctctatgagcttttgaaacttgttaaggactaatggctgaaggataaatcaacatggc

SEQ ID NO: 535807 - DNA, 82 bp, Homo sapiens
attaaatggcacttttgatttccaaaatgacttcctgcggctccttcgggattttatggatccaacaatggacaacaccaag

SEQ ID NO: 535808 - DNA, 75 bp, Homo sapiens
ggagcctgacctcttacttcctgtgggcgagcccacaccttaaccgtgctcttcatcctcacctgtacgcttggc

SEQ ID NO: 535809 - DNA, 94 bp, Homo sapiens
agctgaggcacaagtcatccttgagccggaggacctccagcgcaggcagccgtgggtgattgcagtggtcatggacgtgttcacagacatcgac

SEQ ID NO: 535810 - DNA, 82 bp, Homo sapiens
gccccgggactgaggccgccctgcaccttcagcggatttggggattaggctcttttaggaacgccacagaagtatgatccca

SEQ ID NO: 535811 - DNA, 100 bp, Homo sapiens
gaaggctgcagccgcgaatgccgtaggtgaatgaactggtgcaggtagaaacgtacctccgcagtgaaggtgtgctggtgcgatactggtatcctattga

SEQ ID NO: 535812 - DNA, 83 bp, Homo sapiens
ctgcagacactgaacgaggagccagtgctgcaagctttcttcctggtggcagatgacatcatggattcatcccttacccgccg

SEQ ID NO: 535813 - DNA, 90 bp, Homo sapiens
tgtcgctcttgtgccctagcaccccgagaaccgtcagtttgagccagatgtttctccttggaccaagatgactgatggaaaactctccac

SEQ ID NO: 535814 - DNA, 88 bp, Homo sapiens
tcaaaagcctacaaaatctgagactgtcattgcttttataaggttcagattcagaacaagaaagtggacatctctaaggtctcctcca

SEQ ID NO: 535815 - DNA, 100 bp, Homo sapiens
cgaggccgggaggccgtgcccggagatagaaaatgctgctgaagaacctagagtcttatgtattatacaagatactactaattcaaagacagtgaatgaa

SEQ ID NO: 535816 - DNA, 98 bp, Homo sapiens
catttcttcgatcgcagctacgacaagggcctcgcttggtaccgacggagatgcggctgcaggaccagcaactggccagacagctcatgcgcctgcgt

SEQ ID NO: 535817 - DNA, 50 bp, Homo sapiens
gaggaattcaccctgttcgtctatggatcagcggcaaactgaagccatcc

SEQ ID NO: 535818 - DNA, 80 bp, Homo sapiens
ggccacctacagaaacaaaatgtcaacaaattgatgggcccagtttaccctcaatttaccctcttctacatcttccacat

SEQ ID NO: 535819 - DNA, 75 bp, Homo sapiens
tgtggccttaatgagcatgttgacagcatcgatgctagacagacatttgtgatttaaggacgaacaaacttcccg

SEQ ID NO: 535820 - DNA, 83 bp, Homo sapiens
ctcagctcctggggctgctaatgctctgggtctctggcccgacaacaagctcaaatacgtcaccaaatggcagaggacagcaa

SEQ ID NO: 535821 - DNA, 100 bp, Homo sapiens
acccagaagtggaagggacgctaattcgggtacccattccccaaattgatagatgtcacatgtaccctgctgcttctaaacccagactttaccactgcat

SEQ ID NO: 535822 - DNA, 75 bp, Homo sapiens
tcagaacacagtggacagtgacaaggagtataccatgctgtgtctgttatgcggcaaagccgaagatactatcag

SEQ ID NO: 535823 - DNA, 75 bp, Homo sapiens
acctcagcaacagtcccacctggtccctgtatctctcagcaacctcatccttcatctcctcgtcctccaggcagc

SEQ ID NO: 535824 - DNA, 100 bp, Homo sapiens
cctacaggaatgtcaagagcctgattgaaccagtcaaccagtctattgttgtcagtggagagagtggtgctggaaagttcacagacattgggaccttcga

SEQ ID NO: 535825 - DNA, 90 bp, Homo sapiens
tgcaggggcctcaattaatgtatctggactacgcccaagcaaggtttgatgcctatttccaccagaagaggaagcttggggtgtgactgt

SEQ ID NO: 535826 - DNA, 100 bp, Homo sapiens
gattccaagtaactcttatttggttagaattgcccctactgtcactacctggagtaacaaaactcctactgcccttcccagccatccacctgcagcctct

SEQ ID NO: 535827 - DNA, 49 bp, Homo sapiens
tgaaattgttacttcaacttctgctggtgggcagcctcacaaaaggaga

SEQ ID NO: 535828 - DNA, 101 bp, Homo sapiens
cgtggagaagcggaggaacccctccaagcactacgacactggggttgggaaatcaagcatcgtgtgtcgatttgtccaggatcactttgaccacaacatca

SEQ ID NO: 535829 - DNA, 108 bp, Homo sapiens
taatattacccattctgaagaaaaaactagccttcctttcaggttcctttcagtgctaccatgtcaccagttcgcttgcattcctccaaccccaacctttgtgcagat

SEQ ID NO: 535830 - DNA, 88 bp, Homo sapiens
ggaggattaccatcaccggaaatggaaccaagaaacctagcaatagtgtttggtcccacccttgttcgaacatcagaagacaacatga

SEQ ID NO: 535831 - DNA, 100 bp, Homo sapiens
caagcaccagattaaacaggctgtgaagaagctgtatgacattgatgtggccaaggtcaacaccctgattcgggcccagaatgtgttcagtatcttcaac

SEQ ID NO: 535832 - DNA, 82 bp, Homo sapiens
agttgaatgccagccaccagccatgggcctatgagagctacaagaagaaggactacacccaggtggactacttaatcaacgg

SEQ ID NO: 535833 - DNA, 97 bp, Homo sapiens
ccaatgagccccctcaagatgaaggtaattccttcaattcaccccgcaacctggccatggaggcaaaccagcgggttagtattgacaactggtgccg

SEQ ID NO: 535834 - DNA, 101 bp, Homo sapiens
aggcatggtgatccttcgggacaagattcgcttctatgaggagcctggcagagagcaggtgtgtgatacacgtcgtcaggtgactgaccgaggaattcagg

SEQ ID NO: 535835 - DNA, 80 bp, Homo sapiens
aaagggctgagtggtgcgggcggctccgtgagaaaggcggacaatgcagatcttcgtgaagactctgactggtaagacca

SEQ ID NO: 535836 - DNA, 100 bp, Homo sapiens
aaacaggaactcatccaagagacggtcctcccttcccaatggggaagggctgcagctgaaggagaactcgtgcgacaacgcaaaagggttgaaagccttc

SEQ ID NO: 535837 - DNA, 75 bp, Homo sapiens
cccagagtggcagaaaggctgatgcagcaggtgtggaaacaggaagagaactagaactggaagtaaagcattgaa

SEQ ID NO: 535838 - DNA, 83 bp, Homo sapiens
ggacaccttcgtcccctttgatccctgtgtgctgaagagctttccccagacatggccaacaagggtccttcctatggcatgag

SEQ ID NO: 535839 - DNA, 75 bp, Homo sapiens
aggcaagcagtgtcaatattgcagctactgcttctgagagctctgagtcagcatccaaccttaaatgatgacctg

SEQ ID NO: 535840 - DNA, 99 bp, Homo sapiens
cgcaaccatctgcggaaaggataggggggaggaagacttaacactgcaacaacagccttcatcccgcgtggagtctacccccaagcccttctcctcttc

SEQ ID NO: 535841 - DNA, 100 bp, Homo sapiens
gggcctttccgtccgagaaattctcgcagagcttacagggagcaatggaccacagaaattctgcattgaaaaagttgggaaagaaaattggctacccaga

SEQ ID NO: 535842 - DNA, 75 bp, Homo sapiens
gctggtcagtgtggcaaccagatcggtgccaagaacagatctcggcccctttccaaacactcctgatgcctcatt

SEQ ID NO: 535843 - DNA, 97 bp, Homo sapiens
ctccagagaagtagaatctgtagaccttccacactgccacctgattaaaggaattgtaatagttatgcacgagtgcgagctgtggtgatgacccgag

SEQ ID NO: 535844 - DNA, 101 bp, Homo sapiens
gtgggcttcaccatggacaagctggtgcagaacattgcgcggcagcaatggctgccatccggaagaaactggtgattgttggtgatggagcctgtggaaag

SEQ ID NO: 535845 - DNA, 100 bp, Homo sapiens
tcggccgatgaagtgcagaggtttttttctggttctgggaacactttttatttatgtcttatttatggttgaggaattcagaaaagagccagtggaaaac

SEQ ID NO: 535846 - DNA, 74 bp, Homo sapiens
tctgcaagcaggcaacctgaatacaggccacagatggtatctccagtgagtaaggatgccacggaagatctgcg

SEQ ID NO: 535847 - DNA, 100 bp, Homo sapiens
agcggacaacggagaccagacctactgcagccacgcgggcgagcggctgtgtggatgtcggcgaagccgcgggcgagatgaggacggggacttggttgcc

SEQ ID NO: 535848 - DNA, 100 bp, Homo sapiens
ctcgctgcttcccagagctttcacgaaggcaccgacgtcatcatgctgaccaccaatcagatccgtaaggaaagatgaatgggagggctgattttcgaga

SEQ ID NO: 535849 - DNA, 83 bp, Homo sapiens
ctgggacttcccgtccgcggcgtggagggaaggtgctcgggtcttcggggcactgggtcccatcggtccctcctcacctgggc

SEQ ID NO: 535850 - DNA, 75 bp, Homo sapiens
ctcttacgtctgcggaagtgcagctgcctcagttcttagcgcaggcacttcagacaccacctccaacaacacagc

SEQ ID NO: 535851 - DNA, 90 bp, Homo sapiens
ggcctcccaaagtgctgaggttacaggcatgagccaccacgcccggcctggatgtttttttttaaaaatgagcataatcgtagtatctac

SEQ ID NO: 535852 - DNA, 100 bp, Homo sapiens
cgcaactgaaagtcacgattaggactgacaataagatacctctactaagaagacagaagacttactttcatcatctgaatcaaatccaaagagtgtctga

SEQ ID NO: 535853 - DNA, 73 bp, Homo sapiens
aacatccttggagaggtcggagatgggtttaaggaccctgatgctcccataagacagaaaatgccccttgatg

SEQ ID NO: 535854 - DNA, 75 bp, Homo sapiens
cggggttcgtggcagcgctggtggtagaacatctgggaggtcccttgctgaccactggaagaagatgagctcgag

SEQ ID NO: 535855 - DNA, 101 bp, Homo sapiens
agagacccgagttcatcgcctacccccatctccgcatcaggaccaaggtggccagcatcgaaatgttcagccttttagtgatgaagatgcatcaattgaaa

SEQ ID NO: 535856 - DNA, 75 bp, Homo sapiens
gcgtggaggtcacatacctcaagaagcaggaaatatgttcaagtttgtgtccagaatttgtcagaacttgacttt

SEQ ID NO: 535857 - DNA, 97 bp, Homo sapiens
attcatttgtgactatgaacttcatgagctcttcaaggaagctaatatgccattaccaggatataaagctgatcagctgaccgaagaacagattgct

SEQ ID NO: 535858 - DNA, 82 bp, Homo sapiens
gtgctttccgcgggtctgtccgggggctccggaccctcggcgcagaaggccaatgatgaggccaatcagagtgatacaagtg

SEQ ID NO: 535859 - DNA, 75 bp, Homo sapiens
ttggatgaaaatatggattacaggttgatgtgggagcatgctacaagtgaaaactgatgagaaactgaatgtgtc

SEQ ID NO: 535860 - DNA, 107 bp, Homo sapiens
cgcatggtcagtgccatttcgcctttatcgtggtggagtccaccctggctgtggttttaaaatcaaagatgggaaaatcggagaaaattgcccttccccatggccag

SEQ ID NO: 535861 - DNA, 100 bp, Homo sapiens
gtcaggaggaacctcagaacatgggtccgtggtcgtttgtttctccaaggtttgaaaagcagctggcctgcaagacacatcatctcagagttggagcacc

SEQ ID NO: 535862 - DNA, 74 bp, Homo sapiens
gagagtctgccggcggagaatataagtttgcagaaaaaacttcagcatgtgccaggaacacaacctcaccttga

SEQ ID NO: 535863 - DNA, 100 bp, Homo sapiens
ttacggttttgagaagccttccgctattcagcagagagctattattccctgtattaaagtcatccgtccttggctcaggatttggagagcttgcaccacc

SEQ ID NO: 535864 - DNA, 74 bp, Homo sapiens
ggcgagaaaggtcccactgcagccctccaagcagagcctggagacacaggccccatccttcccaatggggacac

SEQ ID NO: 535865 - DNA, 90 bp, Homo sapiens
attcgcagtggtcgcttcttctccttgatatgttgggaaaacggattcgataaccattagcgtgtggaaccataagaaaattcacaagaa

SEQ ID NO: 535866 - DNA, 74 bp, Homo sapiens
gagagcggcggccgctcacaacatgcacagcctggcgacggctgcgaggttggaaagaaccatgactgtattca

SEQ ID NO: 535867 - DNA, 100 bp, Homo sapiens
tgggggacctgaacactaatcggcttagtgagcttgtacctccccaagtcatggaccatccaggtgggtctagtttccctgttggacaatccagccccat

SEQ ID NO: 535868 - DNA, 82 bp, Homo sapiens
tcccaaccggcctgagtcaagcaaagtactagctctgtgattagattgaattctccaacaacaacatctcagattatggcaa

SEQ ID NO: 535869 - DNA, 90 bp, Homo sapiens
tgctacgacactgaattcaaccaggaggttctctacttaaaagacaatgactactgatgaaggtgccaagaacaatgaagaaagccccac

SEQ ID NO: 535870 - DNA, 80 bp, Homo sapiens
gctgggagcagcttcatgactacgcggagcgggagagcggccacaccatgcgaggcttgggcactgtttaaaggaaagtt

SEQ ID NO: 535871 - DNA, 100 bp, Homo sapiens
ggcgttcagctgcttcaagatgaagaatgagtccctggaacgccagatgcgtgaaatggaagagaactttgccgttgaagctgctaactaccaagacact

SEQ ID NO: 535872 - DNA, 75 bp, Homo sapiens
ccttatgcactgaagaggtcttccccactgcaggagctggcttgagtattcaaagacagtagccatctgacttca

SEQ ID NO: 535873 - DNA, 73 bp, Homo sapiens
agtcattgatcccaggaaacaagagattgttgctgtggtgtgtgatgagaacggctctaagggttatgccttt

SEQ ID NO: 535874 - DNA, 132 bp, Homo sapiens
tctaagtgatgtccaggaaggaggaggaataatatttatggagcatatattatggaacacagtgtatgcaacagcgttattgcaacaggctaacgaaaacagacaaaattcaactggaaaagcatgttttgg

SEQ ID NO: 535875 - DNA, 83 bp, Homo sapiens
aaagaactttcacctgatccaggccaacaagggtggcccagttgaaatccttcccttcctctaccttggaagtgcctaccatg

SEQ ID NO: 535876 - DNA, 75 bp, Homo sapiens
gagccagctgcggagcagtgcgtcagagtttcagagcataaccttcggtggcaggacaaatcaggccagcacgca

SEQ ID NO: 535877 - DNA, 100 bp, Homo sapiens
aaccccccagtcctcatcctggatgaagccaccagcgctttggatgccgagagcgagtatctggttcaagaacatgaagactcgggtgactcagaagtgg

SEQ ID NO: 535878 - DNA, 112 bp, Homo sapiens
gacgcgcagcatggcggtggaggacgaggggctccgggtcttccagagcgtgaagatcaagatcgcctctgaagagccaatccattcaggatgggaaaccacgcaggcaaac

SEQ ID NO: 535879 - DNA, 100 bp, Homo sapiens
cacagccccaaacctcagagactcagacctctcatctgccagaatcagaaagaattcatcacactgtaccttacacataggaagctcacacctggctccg

SEQ ID NO: 535880 - DNA, 100 bp, Homo sapiens
aaagtgctgtgattacaggtgtgaaccaccatgcccagccagagatgctcaattcctgcattgcagtgtcgagatggctatgaaccctgtgtaaatgaag

SEQ ID NO: 535881 - DNA, 97 bp, Homo sapiens
acatttctctcaaagagtccaccgcaaagcagactggcatgaaatataggatttttagactctgaggagcagttggagctaatccacattatggaaa

SEQ ID NO: 535882 - DNA, 100 bp, Homo sapiens
accttctggaggtacaacctcagccagcccagtgaggcgccaccgctggctgtgatccagtttgtgtgttctctgtgcaaataccggaccttctatgagg

SEQ ID NO: 535883 - DNA, 80 bp, Homo sapiens
agaagttgctatggatacagatagtgaaaccagttctccagtctcctttagcattggaaacaccaaatcgggtatccttg

SEQ ID NO: 535884 - DNA, 100 bp, Homo sapiens
gcagcaatgaccttccctcgggaattccacctctgcgtttttccctccaggttctccagagagcgggcatccagagaggagtcctgggagagcgggcgga

SEQ ID NO: 535885 - DNA, 82 bp, Homo sapiens
tgaagcgggccaaggtgcacatcaaggtcttgaggaccggcccagctcaggctcctggggcagcggcgaccagagcagctcc

SEQ ID NO: 535886 - DNA, 75 bp, Homo sapiens
aaatttataacttgtcagcaaactactttcaggagaaaggcaagaggattatgacagattacgaccgctgagtta

SEQ ID NO: 535887 - DNA, 100 bp, Homo sapiens
aagagtcatctgctaaactccactagagtcatctctacacaccaagcaatatcatttatgctggctgaaatggcaatgaaagttgaactagctagaatga

SEQ ID NO: 535888 - DNA, 107 bp, Homo sapiens
ccggctcctgctcaagatctcagagaaggaggaggtgaccacgcgcgagacaatgcagatcttcgtgaagactctgactggtaagaccatcaccctcgaggttgagc

SEQ ID NO: 535889 - DNA, 97 bp, Homo sapiens
ggaatctatgatgctgatggtgatggagattttgatgtggatgatgccaaagttttattagcaatgtctcaggctgtgcagacaaacggaactcaac

SEQ ID NO: 535890 - DNA, 75 bp, Homo sapiens
tttcacgagtcttcaagccttcagtcttcccgaggctgctgtccatgacactgagtccagatcttcacatgaggc

SEQ ID NO: 535891 - DNA, 100 bp, Homo sapiens
cacgacctccgcctgcggcctcctcgcaaaacaagtcctattttgtaacggattatgatccaaccattgaagattcttacacaaagcagtgtgtgataga

SEQ ID NO: 535892 - DNA, 75 bp, Homo sapiens
agataaaaggggtctctgcgtctgtagttcatttgaccaaacgtacgaggagcgagtgctgaaaaaaatccgccg

SEQ ID NO: 535893 - DNA, 90 bp, Homo sapiens
cacaaataaggatgatcccaaagccaaggagaagttctcccagctggcagaagcctatgaggactcagaattcatgattgaagaaatgca

SEQ ID NO: 535894 - DNA, 100 bp, Homo sapiens
gttgacaaccatattggtatctcaattgcggggcttactgctgatgctagactgttatgggttttcggagctgccatacttcttacctctaccctaaata

SEQ ID NO: 535895 - DNA, 100 bp, Homo sapiens
cctaatattgtaaagctttatggagcctgcttgaatccactggtgctcaagaccgaatcggctgggcttttggcctaggattagaaaggctagccatgat

SEQ ID NO: 535896 - DNA, 50 bp, Homo sapiens
cagcaagctgttcaatgaggagcccctgggtggctccagctatggctacc

SEQ ID NO: 535897 - DNA, 98 bp, Homo sapiens
aacgggaagggccggcccgcctccctggccggggcgcagttcggaggttcaggctgcaagatcaaggccctgcgggccaagacaaacacctacatcaa

SEQ ID NO: 535898 - DNA, 73 bp, Homo sapiens
caagctgggcatccagggctcgtacttctgctcgcaggtagctacagcaagctgggtagcaggcagatccaaa

SEQ ID NO: 535899 - DNA, 100 bp, Homo sapiens
cacaacatgcgatgtttggaaatgatacaattacctgcacgacacatggaaattggactaaattaccagaatgcaggggagacggtggctcagggagtaa

SEQ ID NO: 535900 - DNA, 86 bp, Homo sapiens
ccaatcccccactctttccgccctaatggaggtctccagtttcgaaaatgcttggacagaagagatgagtactatttccactaagg

SEQ ID NO: 535901 - DNA, 75 bp, Homo sapiens
agccggtgccgcagctgcgatggccgtggccgtggggagaccgtctcgctgtgcttcgccgtgagccgctcgctg

SEQ ID NO: 535902 - DNA, 100 bp, Homo sapiens
aagagcacacacctcttgataaggaagctgcccttcagccgcctgctcatgcaccctgtgctggagtccctgaggaatactgaccggcagtggctgattg

SEQ ID NO: 535903 - DNA, 100 bp, Homo sapiens
acacggcagttgtgcaggaattgcttgagtccttaccagcttcttggacacttaatgattgttggcaagaaatgtgctgctgatctgggcctgaataagg

SEQ ID NO: 535904 - DNA, 118 bp, Homo sapiens
ccgtccaaaggtcttgcgttgtaaatgccaccaccattgtccagaagactcagtcaacaatatttgcagttcacaaagatgtccaaaactaatggcttatcagaagatttgatatggc

SEQ ID NO: 535905 - DNA, 83 bp, Homo sapiens
tgatatcggtggtaacgacggcctcagcaggcggggaagatgaaaggaaactaatctggattcactccctctggttgataccc

SEQ ID NO: 535906 - DNA, 75 bp, Homo sapiens
aaaaataccacgacaaaaccaccctatgctacacacgcagggccctgtcgatggcagcctttacgcgaaggtgag

SEQ ID NO: 535907 - DNA, 88 bp, Homo sapiens
gaattcctgctacgacactgaattcaaccaggagatcactggggtgatcctgctggctgttggagtctggggcaaacttactctgggc

SEQ ID NO: 535908 - DNA, 109 bp, Homo sapiens
ggaaaacctaaccatgaagacttgaacttaatacagcaagaaagaccatcaagtttaccaagtgctgagcagatcactgcactgtgcaggagttttaacgacagtcagg

SEQ ID NO: 535909 - DNA, 80 bp, Homo sapiens
ccaggcgtggactctttctatctcgagatcttcgatgagggcgaccattgacgaggtggagacggacgtggtggagattg

SEQ ID NO: 535910 - DNA, 82 bp, Homo sapiens
ctccatggacacagacctgctgtgtgtgcttctgcgccccagaggctgggaggcggcagaatgcagccagaggagggcacag

SEQ ID NO: 535911 - DNA, 98 bp, Homo sapiens
ctcgacgccacttcatgttccagtgcctcgagcgctcaggatggaggaagactcgatccgcctgcctgcgcacctgcatgtgtggtggtcctgggatg

SEQ ID NO: 535912 - DNA, 100 bp, Homo sapiens
ctccacagccccgcgcacaggcctccggtgactcgccataatcacctcaaggacttcatgctggtggtgtctatcgttattggtgtgggcggctgctggt

SEQ ID NO: 535913 - DNA, 87 bp, Homo sapiens
ccgtgaacacccatgggaggtcatgcctgatctgtacttctacagagatcctgaagagattcaaaaacatgccacaggaaagaagtc

SEQ ID NO: 535914 - DNA, 141 bp, Homo sapiens
caggtccgacacctgccgcagaacagggagctctttctgacagctggaggcgccggcggccttcacctctggaagtattggatccacttgaacaagcaaaagtggatttggtttctgcatacacattaaattcaatgtttt

SEQ ID NO: 535915 - DNA, 100 bp, Homo sapiens
ctcgtctggaagtccagtccttcctcgactttgcaccacattacttcaattatattacaaatgctgttcaacaaaagatttgtttagtgaatgaccctag

SEQ ID NO: 535916 - DNA, 90 bp, Homo sapiens
tgattgcccccgggtctcagcagcagatactgggggccatggagtctcaggtgggggggggcccggccggcccggccctgcccaacgggc

SEQ ID NO: 535917 - DNA, 97 bp, Homo sapiens
gcatggtcagtgccatttcgcctttatcgtggtggagtccaccctggctgtgcttaagagttggacagtggaggaccttcagaagaggctcttggcc

SEQ ID NO: 535918 - DNA, 107 bp, Homo sapiens
agcacctgcacctcagagtaaagctgctggacaacaccatggaaatatttgacattgagcaaaagctggcaggctgacagaggcggcctcaggacggaccttctggc

SEQ ID NO: 535919 - DNA, 98 bp, Homo sapiens
tccaggtcgaggttctgcagaaggttgtgactttagtatacaacactaccccaagcagtccttcaccatggtggcggacaccccggaaaaccttcgcc

SEQ ID NO: 535920 - DNA, 76 bp, Homo sapiens
gaataggtgtatcaagtaatggtgcaaagcctgaactctctgatgtaaaggatggagtaaatcaagcagcacctgc

SEQ ID NO: 535921 - DNA, 82 bp, Homo sapiens
aaaaggcatatttcttggggatgatgaatggagagagactgcatggggagcttctcgttttagctaaagaagatactgaggc

SEQ ID NO: 535922 - DNA, 87 bp, Homo sapiens
tgtctcgtgtgtgaacatcacaggaaattcagttcatgaagataagaagtttcttgacaaatacatgccccagttcatgaaacatct

SEQ ID NO: 535923 - DNA, 96 bp, Homo sapiens
ctgcccacccctcctgtaacccagcctgtttcacttcttgaaatgacctccaccttcaacccccgagaatgtaaactgtccaagcaagaagggcaa

SEQ ID NO: 535924 - DNA, 100 bp, Homo sapiens
cagtcaaatcactcgcctctacagccggttcaccagcctggacaaaggagagaatgggactctcagggtgaaaatcctatttataagagtgccgtaacaa

SEQ ID NO: 535925 - DNA, 107 bp, Homo sapiens
gcgaccttccttgctttcagaatttcacccaggttctgacagtgaataccagggcctggtgaagcacacaggaggctgccactgtggagcagttcgttttgaagttt

SEQ ID NO: 535926 - DNA, 82 bp, Homo sapiens
ggcatgactacatctgtcatggcatgtcgggccccaggcctgtggtgctgagcgggccttcgggagctgggaagagcaccct

SEQ ID NO: 535927 - DNA, 115 bp, Homo sapiens
gccgccgggcgccgggcgccatgagggtgcgctaggcggctgttcgtgcccgaggctgcgcagcactgaggtgaggacatagttgacggcaaggaaaaagaaggacaagaacttg

SEQ ID NO: 535928 - DNA, 141 bp, Homo sapiens
caggcccagattgagctgcggctgctggagctgatgaaccagcatgacacggagatgaagtactatatagggcatgaccattcggcccctggtagacctgttggctgtgaagaaaaagcaagagacgaagcgctccatcaa

SEQ ID NO: 535929 - DNA, 51 bp, Homo sapiens
tacggccgtgggcgatctgggggccagaaagtgaaattcgttattctacat

SEQ ID NO: 535930 - DNA, 138 bp, Homo sapiens
gcggctggagagcgaggaggagcgggtggccccgcgctgcgcccgccctcgcctcacctggcgcaggttcgagaacttgtcttggacaattgcaaatcaaatgatggaaaaattgagggcttaacagctgaatttgtg

SEQ ID NO: 535931 - DNA, 75 bp, Homo sapiens
aaaaactggagagcttcatcaaaaatagtgatagctttgataatggactaaagaggatggacatagaacttccac

SEQ ID NO: 535932 - DNA, 132 bp, Homo sapiens
cgacggaccagcgacccaagcgccgcggttaaccacgtctcgtccacgacctccctaggtccaggggcaagttcatcctactctcgagtctaatgatgatgctcttcagtatgttgaagaattaattttgca

SEQ ID NO: 535933 - DNA, 90 bp, Homo sapiens
acgaaagcctacaaaagtgtggagaggttccttcaggaggatcaggtggtaattcgaagattacctcccactttgaccaaggagcagctt

SEQ ID NO: 535934 - DNA, 123 bp, Homo sapiens
taagaattaaaagatgatgagaaataaggacaaaagccaagaggaggacagttcgctacacagcaatgcatcgagatattgatgatgttaagaagttcaaaccgggttacctggaagctactc

SEQ ID NO: 535935 - DNA, 51 bp, Homo sapiens
caagcacattaacatcagcttccacagaacacctgttcattcagacctttt

SEQ ID NO: 535936 - DNA, 128 bp, Homo sapiens
cggcgccgacatcaattacgccaatgtggacggactcactgccctgcaccagaccggccttattgtcgcctgctaccacggctttgtggataccgtggtggccttagcagagtgcccccacgttgacg

SEQ ID NO: 535937 - DNA, 51 bp, Homo sapiens
ggagaaggcagcggacaaagagctgtcaccactgactaaagaagagaaaac

SEQ ID NO: 535938 - DNA, 100 bp, Homo sapiens
ctcggacgtagcccggcttgtattgggtgtcctgatggcaaatttcaagggccacgcgcttccagggagtttcttcctgatcattgggctgtgttggtca

SEQ ID NO: 535939 - DNA, 100 bp, Homo sapiens
gtctacgacatctgcagcccggacagtttcgactacgtgaaggccctgcggcagcgcatcgcggagaccaggtacatgtcccagagcaagcacacggagg

SEQ ID NO: 535940 - DNA, 75 bp, Homo sapiens
caacatcctcctggccaccgactcctacaagatgtaaacagtgttctagtttgagatccatacaaaatctaaatt

SEQ ID NO: 535941 - DNA, 100 bp, Homo sapiens
ctgctgccatggggctcaagacccggtgtggaggcaagctgggcttcctggccaatcattcttacagtcactctcatggaatgaagaagaggtcttctga

SEQ ID NO: 535942 - DNA, 75 bp, Homo sapiens
cactcctaaaggctggtcctgccactgggacaggtgtgagttcttgatacgaatgaaaggccaagagtttgttga

SEQ ID NO: 535943 - DNA, 96 bp, Homo sapiens
gcacaggtgagcgggagatgtcctggatcgctgatacctatgccagcaccatagggcactatggtctaaaattcccaggactccacagctttgcac

SEQ ID NO: 535944 - DNA, 98 bp, Homo sapiens
ctggtggtgtcggccaagttcgaggggaaaccgctgcttcagagacacaggagcgcctgccaacggtaccgctgtccggcatgtacaataaatctgga

SEQ ID NO: 535945 - DNA, 123 bp, Homo sapiens
ttttcatactctcttaacattggataataagcttttacaaactgattttttgaatcagagccgacaggcacttgaattgaaaatggaaaaccctactgctggtggtgctgcggtgatgaggcc

SEQ ID NO: 535946 - DNA, 100 bp, Homo sapiens
cagttggtggcgtttctctcccgataccgagatatgaatttcttgaagtcacacggccgggacaatgcaaggatacacacctgctaaaactgcttaaaac

SEQ ID NO: 535947 - DNA, 82 bp, Homo sapiens
aggagctggcggagagcggcctgcgggcgatcgggccgagattacctaggaacagtacgatttggggttatcacaaataaac

SEQ ID NO: 535948 - DNA, 100 bp, Homo sapiens
cctgttgttgctatcagaactgctaaaggagagaagtttgtcatgcaggaggagttctcgataaaaactggatatgcatctaaaacaagatgtaagtcac

SEQ ID NO: 535949 - DNA, 80 bp, Homo sapiens
ctcaaggcagaatatatttgccctatctccaaaactggagccataaatttctgaataaattggcagaagaacgcagacag

SEQ ID NO: 535950 - DNA, 98 bp, Homo sapiens
ccgagcaggaggcgccatcatggttcacgcttacatcatcagctacctgaagaaggagatgccctctgtgtttgggaaggagaacaagaagaagcagc

SEQ ID NO: 535951 - DNA, 100 bp, Homo sapiens
agcacctttcggcttctgagacggcggcagcagcggcattcaggtcatttaggaaatcgtaaatcatgtgaagatgggactcttggtatttgtgcgcaat

SEQ ID NO: 535952 - DNA, 75 bp, Homo sapiens
gattgaaattatctctggtgctgcagctcttgataacaatccatattcctcatttggagcaactctggtgaggga

SEQ ID NO: 535953 - DNA, 50 bp, Homo sapiens
tctgtcccaagcaggagaacattgcagggagtaccctgacttctaccgga

SEQ ID NO: 535954 - DNA, 100 bp, Homo sapiens
cctcctggcctcagcaacctgacaattctgtcgtgtcccgacagtacaatgtagattataaactggagacttacttgaagattgctaggctatatctgga

SEQ ID NO: 535955 - DNA, 90 bp, Homo sapiens
ataatttatgaagctccgttgactaccgtggagagatcataatttggggttcaagattccagacaaatttacatgtattggagaccagac

SEQ ID NO: 535956 - DNA, 75 bp, Homo sapiens
catgaagaagaatatctatggcaatatcgaggacctggtggtgaactggctagaagggcctggatcagaacaact

SEQ ID NO: 535957 - DNA, 100 bp, Homo sapiens
ggcccggatgagtacgataccgaagcgggctgtgtgccccttctccacccagagataaacctctcataatgaaggcccccgctgtgcttgcacctggcat

SEQ ID NO: 535958 - DNA, 154 bp, Homo sapiens
cattattttgaaagcaatagtgagccaaccacctgggccagtattatcaggcatggagatgctactgatgtcaggggcttatttcaaaacctttgtccctcagttccaggaggcagcatttgccaatggaaagctctaggaaacaccagtcttg

SEQ ID NO: 535959 - DNA, 97 bp, Homo sapiens
cacacgttgtttgtcgggagatgcggccgcttcgtcctctgcagtcaagacgctgggcgcgtcgaggactgggaaatgggtcctgatgaatatgaag

SEQ ID NO: 535960 - DNA, 50 bp, Homo sapiens
ctcccgagtagctgggactgcagatgtaaacaggttacccagctgggaga

SEQ ID NO: 535961 - DNA, 98 bp, Homo sapiens
tgagacctgtcaccccgactcaacgtgagacgcaccgcccggactcaccatgctgtcgcctggttgggcccggaaatgggacgtcgcgctttctcagg

SEQ ID NO: 535962 - DNA, 50 bp, Homo sapiens
ctaagatggcgactgtcgaaccgctgttcaacggttttgtgtatagcatt

SEQ ID NO: 535963 - DNA, 74 bp, Homo sapiens
gcagacagaggtgtgctgacgacctgctacaacagaagtttttctatatgagtggagaagacagctgttaccag

SEQ ID NO: 535964 - DNA, 98 bp, Homo sapiens
agcagtccaggaatgcagtcagtctgttgatgaaactatgggcaagattcttgccaagagaattaatgtgcgtattgagcacattaagcactctaaga

SEQ ID NO: 535965 - DNA, 75 bp, Homo sapiens
gtaaaggccaagatccaggataaggaagggcattgacactgagaggcccattctgcaagtggacagctgtgtctt

SEQ ID NO: 535966 - DNA, 82 bp, Homo sapiens
gttggaagcagccgatccagcctgcggagcctgtggggcaggggtcgggccccggctcagtggtcccaggcagctcgggtgt

SEQ ID NO: 535967 - DNA, 98 bp, Homo sapiens
tgaccggggtcatcctagggaaaacactatcctctgagatcccagatcatgagggtttggtgcaattctccattaatgaagataacatttgaattccc

SEQ ID NO: 535968 - DNA, 74 bp, Homo sapiens
ctggacagcaagatgctggctgcctggaatgattttgctgctgcctcagggaaagtcagtcccacagcgtccag

SEQ ID NO: 535969 - DNA, 100 bp, Homo sapiens
ctgtgtcaaaagagcttctctccagagtagaaagccttcgttcagaaaaacctggtctatggcacaactaaaaaggtttgccgcagacccaaatacgtgt

SEQ ID NO: 535970 - DNA, 74 bp, Homo sapiens
gctctagtggcttctgaggccaagatacagcagctaatgaaggtgaagaacaaattggttttgagctagtggag

SEQ ID NO: 535971 - DNA, 100 bp, Homo sapiens
cccccgacttgtccactgaagtaacagcagcaatgaccttccctcgggaattccacctctgcgtttttccctccaggattcctccttggtcacttttcag

SEQ ID NO: 535972 - DNA, 75 bp, Homo sapiens
ggcttgccctggtcttgctcggccgatgaagtgcagaggtttttttctgaactttgtccagatccttagcaacct

SEQ ID NO: 535973 - DNA, 82 bp, Homo sapiens
ttccagcgctatcgtgacctgcttttcggttccgggtcttggccccgtccttacctcacagttacggctagatgaggctcaa

SEQ ID NO: 535974 - DNA, 100 bp, Homo sapiens
tcggggtggacttcgccctcaaggtcctcaactgggacagcaggactctggtgcgcctgcagctgtgggacatcgcggatatttggagttcttacaacat

SEQ ID NO: 535975 - DNA, 83 bp, Homo sapiens
cggcgaggccctcatgtaccacacgcttcctgggtctgcaggtccagccggctggcaccctccatgtacccaggggagattcc

SEQ ID NO: 535976 - DNA, 82 bp, Homo sapiens
aagagagcagtaccctgatggagtcccttgcagaagtcccgggcccagagcccggccagcaggagcagttggtcttcggcag

SEQ ID NO: 535977 - DNA, 100 bp, Homo sapiens
tttctttctctctacagcattgtcccagatatagccgttggtacaaaggatcatccagcagctcgtcaacggcatcatcacgcccgccaccatccccagc

SEQ ID NO: 535978 - DNA, 107 bp, Homo sapiens
ctatctgttgttgcttctttttcagggactatggcagttccaagaggaaatcagggggatatgagactttctactcggaatatcctgagtgttgcgtggatgtaaaa

SEQ ID NO: 535979 - DNA, 100 bp, Homo sapiens
aactgtccaaggctttggcaatctccagcaccctgccggtggcactactgagagacgaggtgccagggtggttcctgaaagtgcctgagccccaacttat

SEQ ID NO: 535980 - DNA, 50 bp, Homo sapiens
ttgttcctcatcgcagcagttgttttgatgttcctcctgctgatcaagag

SEQ ID NO: 535981 - DNA, 80 bp, Homo sapiens
ttaccagatcgaatctgggccaaatagaaagagtcttttattcaaaacttcagcgttctctatagtcccttgaaaaggca

SEQ ID NO: 535982 - DNA, 97 bp, Homo sapiens
ccaggcgcagctggacctcattgagaaggactatgctgaccgagaggcacgagaactctggtcccggctacaggatctcgaggacctggaagaagca

SEQ ID NO: 535983 - DNA, 83 bp, Homo sapiens
gtacagcgcccgactgctgcaggccggctacgagcccgagagggggatatgagactttctactcggaatatcctgagtgttgc

SEQ ID NO: 535984 - DNA, 50 bp, Homo sapiens
cgaaggcacaaaatgtggtgctggaaagaaggaagaggcccagcagaagg

SEQ ID NO: 535985 - DNA, 75 bp, Homo sapiens
cccgagagcaacaaagcaggcgactacagccacgtgaagaacagctttgctgagccatcaaggtctaatggaagc

SEQ ID NO: 535986 - DNA, 100 bp, Homo sapiens
aaggaagccaagttggaccgttctgatgtgactgagagagaaggttgcactgctgtgatccatcctcatctcctaaagatgcatcctgacttatctccac

SEQ ID NO: 535987 - DNA, 101 bp, Homo sapiens
cgggatctcaggtcctcgggggcggcggccacgccaaggacggatacatttcatcaatgaagccttctggacctggagtttcctatatgagaaggattttg

SEQ ID NO: 535988 - DNA, 101 bp, Homo sapiens
acatggtggccaaagtggatgaggtgaagtccacaatcaagttccaaatgaagaaggcccttctgcagaaaaatgtagagtgtgcccgtgtgtatgccgag

SEQ ID NO: 535989 - DNA, 75 bp, Homo sapiens
gcccgtactgcacatcgtggtggtcggatttcaccacaagaagggctgccagctttaccgatttgttacaactca

SEQ ID NO: 535990 - DNA, 98 bp, Homo sapiens
tcctggacttagctttgtcatgcaaagctgtcatttgctgtcgaaactatccaactctggccaatattgaaaggaagaagaagttaaaacttgaaaag

SEQ ID NO: 535991 - DNA, 100 bp, Homo sapiens
gcgatgctgcccggtttggcactgctcctgctggccgcctggacggctcgggcgctggaggctcttgcagccaatgccggaacaggatttgctgttgctg

SEQ ID NO: 535992 - DNA, 100 bp, Homo sapiens
ccagggagtgctctgttcacggctccatcgctgttagtagaatgtaagaaagctcagccgaaagaagtcatgttcccacctgggacaagaggccgggccc

SEQ ID NO: 535993 - DNA, 75 bp, Homo sapiens
cgcgaagacggtaacccgtgtgactttgactggggcgtctctggccgagcctctttttgtggaaaacgacagcag

SEQ ID NO: 535994 - DNA, 97 bp, Homo sapiens
tagatcttcttcatctggtgatcgcaaaaaaagacgaacaagatcacggtcacccgaaaggctgcaggggacagcgctggaccgtacagacctgcct

SEQ ID NO: 535995 - DNA, 82 bp, Homo sapiens
cgccacagcggcctcggcctccccttggattcagacgccgattcgcccagggtgtgactttgacagctgctattgggggtgc

SEQ ID NO: 535996 - DNA, 100 bp, Homo sapiens
acgaaagaagaagaagagcaaagggccttctgcagctgctctgttaaaagcgaaaatgaaacaattgcctgcggcaacagttcgactcctttcaagttct

SEQ ID NO: 535997 - DNA, 100 bp, Homo sapiens
tgggtggcgaacggggcgagcctggaggattgtcactccaacctcttttcgctgatggcctgatatgaaggagtcacgcctcccgcctcccggagctgcc

SEQ ID NO: 535998 - DNA, 100 bp, Homo sapiens
ccgagagcgtgaccgagagcgcgaatatcgtcatcgttagaaggaagaatgtggccattagccttcggttctggcatgggattaggaatggcttattcca

SEQ ID NO: 535999 - DNA, 51 bp, Homo sapiens
ggacccactggaagcctagaaatgttttcggctttgtgagaaaccttacca

SEQ ID NO: 536000 - DNA, 83 bp, Homo sapiens
cgccaccggccgcttctgtcctcgcctcgatgacttacgagccctcaaggggaagcattttctcctggaccccttgatgccgg

SEQ ID NO: 536001 - DNA, 74 bp, Homo sapiens
aagacctcagatgtgaagtccattaaagggaaggtggagttgcagcaagggctacgggctgtgtaccacaacat

SEQ ID NO: 536002 - DNA, 75 bp, Homo sapiens
agtggagcgtgtcctgaaggagttccaccaggccgggaagcccatcggagaggtggagaagagcgagtacttgag

SEQ ID NO: 536003 - DNA, 75 bp, Homo sapiens
cgggggcagccgctgagacggtttttcacaaggaaacccagcgtttgctggcagaaccagttcctggcatcaaag

SEQ ID NO: 536004 - DNA, 100 bp, Homo sapiens
agagcaagaccaaaatttgaacaggttaatctgttggattctaatgcagttcatcacatcattcatgattttcagaatcctggttttgacttcagtggag

SEQ ID NO: 536005 - DNA, 74 bp, Homo sapiens
gggcactgtggaaacacattcctgaacatccatgatagcagtcttctgtaaatcgaacttttcaagaattctct

SEQ ID NO: 536006 - DNA, 100 bp, Homo sapiens
attaatgattataaccggagattctcagggcaacccagatctgaattgaatgatctggcacgggaccctccagcacagtgttcagcaggtcctgttggag

SEQ ID NO: 536007 - DNA, 87 bp, Homo sapiens
gggtgtacgagtcggccaagttgatgaatgtgtcatcctgtacagttctacagcatgaataggcctgcctctcgccatactccccca

SEQ ID NO: 536008 - DNA, 74 bp, Homo sapiens
aacatcttctggacctttgtccaggtgtatggctgctgctttaaaagatgcaggtgtgcagcctgaggagatat

SEQ ID NO: 536009 - DNA, 75 bp, Homo sapiens
actccattgccgaggagctgaacaagaagttggccaacaaggtcgacactacccctaaagcaagaagaatatgag

SEQ ID NO: 536010 - DNA, 74 bp, Homo sapiens
ttagaacgatgtgaacatcgaatcatggaatcccttgcatggctctcagctgattttgtgaaaatcgctcaccc

SEQ ID NO: 536011 - DNA, 80 bp, Homo sapiens
ctgagagtcaccacaaggccaaggactcctcagacccctgcacaattgagagaaaagcccgaagaattagcgtgacctcc

SEQ ID NO: 536012 - DNA, 51 bp, Homo sapiens
cagaaattctggaacacctatatggacaactacacctttgcccaacctggg

SEQ ID NO: 536013 - DNA, 50 bp, Homo sapiens
cctatcgctaccctccgaagtccgttcgttcccacatgcagggcagcaca

SEQ ID NO: 536014 - DNA, 101 bp, Homo sapiens
acggcgccatgtccctaatctgctccagtgccgacttcctggtgacggaggtggaaaatggtggctccttgggcagcaagaagggtgtgaaccttcctggg

SEQ ID NO: 536015 - DNA, 100 bp, Homo sapiens
taactaccttctcatcttctacctcagtttctcactgcttatctacataaaaaactgacattgagattacacgagaggaggacttcacccgaattctcca

SEQ ID NO: 536016 - DNA, 96 bp, Homo sapiens
ggcttttactcctacctgtgtaccgagccagagaatagtgacagtggtacaggaaagaaagaaaaagaaaagaaaaacagaaagggcaaagacaag

SEQ ID NO: 536017 - DNA, 83 bp, Homo sapiens
agccacatactatccgtttgttcaggaaccaccagtgacagactatatgttctcctttcagccaagacctttcaccagtgcag

SEQ ID NO: 536018 - DNA, 96 bp, Homo sapiens
cgaagttggaagtgtctcttagcagcgcgcggagaagaacggggagccagatggcccccagtcccctggtgcgggtggccccacctgctcggccac

SEQ ID NO: 536019 - DNA, 100 bp, Homo sapiens
cgagatctccctctggatccttctggcctgcctcatgaagatagagcttcttcgagacaccttcacttccctgggctatgaagtccagaaattcttgcat

SEQ ID NO: 536020 - DNA, 100 bp, Homo sapiens
ccgtcggagacatgggagacccggggtcggagtttcattcattggctcccatgtactatcgaggctcagctgcagctgttatcgtgtatgatattaccaa

SEQ ID NO: 536021 - DNA, 83 bp, Homo sapiens
aatgcagtcaaagaagatggatccacctgatgaggctcagtagatgaaggcgtttctgagggcttgcctacacttcaaagcac

SEQ ID NO: 536022 - DNA, 100 bp, Homo sapiens
gaggcggcctctctggcagcagacatcagccacgcatctgaccttgttggtcattgaccacagtggcgcccgccttggtgagtatgaggacgtgtcccgg

SEQ ID NO: 536023 - DNA, 97 bp, Homo sapiens
ccgcaggcggcaggaatcctcctccggcgatagaatcctgctgcatcacagaagctggaagttctgatgttccactgaaatcacaatggaaagtctt

SEQ ID NO: 536024 - DNA, 100 bp, Homo sapiens
cgccaagctggccaacaacacgcaccagcccaagatcatctggctgaagaacaagatggatatccaaggcaaccctaagtacagagccctgactcacctg

SEQ ID NO: 536025 - DNA, 75 bp, Homo sapiens
caaggtcgccaaggaggtggacccccaggaggaggagtttggccagctctatggctatcggagggcagctggagg

SEQ ID NO: 536026 - DNA, 101 bp, Homo sapiens
cgataacgggccgcccccacagcaccccgggctggcgtgaggagatcctgctgggccgtggcttcaccttttggcagtggtttgatggtgtcctggacctc

SEQ ID NO: 536027 - DNA, 75 bp, Homo sapiens
gattggcatcgatctctccatcccttccgaggcccgacttcggttccagcaacagatagaaatgctttaagttca

SEQ ID NO: 536028 - DNA, 73 bp, Homo sapiens
ggccagatcggcttcatgctgtgcagcaagaacccggttagtggcctggaaatgaggaaatgggttgatgaac

SEQ ID NO: 536029 - DNA, 101 bp, Homo sapiens
aattatacctagaagtctactaatggacagttagtcacccacctacatgttgaggagatacaactcgtcaacgaatcaaattcagtgatgacagagtatgc

SEQ ID NO: 536030 - DNA, 121 bp, Homo sapiens
acccttagctacccacgatgtttcagacagtccccgacacgtcgtcttacatcaaggtgatgcagaagatggggaagaatatgatgacccttttgctgggcctccagacactatttcatta

SEQ ID NO: 536031 - DNA, 98 bp, Homo sapiens
agcaccatggaacgccagaagccaggctgaactgtctgcttgcttggaaggcccagctggctcagcacaaatcctttaaccgtttctccccaagaggg

SEQ ID NO: 536032 - DNA, 100 bp, Homo sapiens
cggacaagcacagtcttcggaagattgaagaattagggtctgaaggaaaagtagaagaagcccaggggatgatgaaattagttgagcaattaaaagaaga

SEQ ID NO: 536033 - DNA, 100 bp, Homo sapiens
gggcagtcggcggagcttcgccaaggctggcgcagtcggactcaaaagcttattaccacctgcttgagcaggtggctccaaaaggagatgaagaaggtgt

SEQ ID NO: 536034 - DNA, 83 bp, Homo sapiens
cttccagaagattggtggagcttgatctgaagggcaagcaagctccacatatgcggaacaaactggaaagctgaccgaatttg

SEQ ID NO: 536035 - DNA, 82 bp, Homo sapiens
aaataccaggctaccatggtctacaagactctcttcgctctttgcatcttaactgcaggtgctggagaatctggtaaaagca

SEQ ID NO: 536036 - DNA, 51 bp, Homo sapiens
ggaaggaggagattctgaagataaggagccatcatcgtctacagactgccg

SEQ ID NO: 536037 - DNA, 50 bp, Homo sapiens
ccttcttcctggacatgaccaactggtgtcatggagaaactccagctggg

SEQ ID NO: 536038 - DNA, 83 bp, Homo sapiens
ctccgacctcctaaaatgaaattcattacagaaatctggcacccaaatgctccctggaattcccatgccaccaccacctttgg

SEQ ID NO: 536039 - DNA, 75 bp, Homo sapiens
gggcgagcgaggaggatggcggagtcggggctcctgacgatcttgtggaagccctgaagccagagtatgtggcac

SEQ ID NO: 536040 - DNA, 83 bp, Homo sapiens
tccttcaggagatctgtgatgagttttcggctttgtgagaaaccttaccatcaaacacgatggccagcaacgttaccaacaag

SEQ ID NO: 536041 - DNA, 50 bp, Homo sapiens
ctgcgtcctccgacttttcatgcattgtcttcagtgttaagaaatgtgga

SEQ ID NO: 536042 - DNA, 145 bp, Homo sapiens
ctacataagcgaggctgtggaagatgctcccagctacagagggtaccgggatgcctgcaccattactggtggaatgcaagctttaggacttcacctgacagatccaagtcaacgtcttgttcagaactgtctttggactctcagg

SEQ ID NO: 536043 - DNA, 83 bp, Homo sapiens
ctcaggggtcacctattatgggttgtggatcaatggccacccagcagacaatgcagatcttcgtgaagactctgactggtaag

SEQ ID NO: 536044 - DNA, 74 bp, Homo sapiens
cgggcgccagtgcatcttctagacagtgacaataccctcccctcccttgggctggacccctctctacagctagg

SEQ ID NO: 536045 - DNA, 98 bp, Homo sapiens
tgggtataggtaccttaaatgagataagtttgttgaaagactaaaagactgctgcatagatgatgacctgatggagaagagacaggaaaatcaagacc

SEQ ID NO: 536046 - DNA, 75 bp, Homo sapiens
cagtccaccagtgcagcagaatatgatgaactcggcttcaggatatgacatgtctacatttattaggcggtatag

SEQ ID NO: 536047 - DNA, 73 bp, Homo sapiens
ggtccggcccgctgcccgcggcgccagcaccatggtcagttctacagcaacggagggcattctgggaatgcca

SEQ ID NO: 536048 - DNA, 87 bp, Homo sapiens
aagccgtggaataggtgtatcaagtaatggtgcaaagcctgaagccctggccaacgtcaacattgggagcctcatctgcaatgtagg

SEQ ID NO: 536049 - DNA, 125 bp, Homo sapiens
cctaggcgaagatccggactctgggtgttttgctaccgtgaccgtttagggcaaacttgaagataaatcttttgactccagctctttagaggatctaaagtgaccttgatggacagtggaagaaa

SEQ ID NO: 536050 - DNA, 75 bp, Homo sapiens
catgaaggtgttcgtcacccgcaggatacccgccgaggaaaaatggctacaaacttcctagcacatgagaagatc

SEQ ID NO: 536051 - DNA, 100 bp, Homo sapiens
aggtgtagagaggaccccgggacatctgaaagccaggaaatgaggtcttatgggagagagactcttagaaagtaagaaagatcatcagcatggagaaatt

SEQ ID NO: 536052 - DNA, 75 bp, Homo sapiens
gtgttggtgtggagtcacagcttgacttttgatctcgacatggcaggagctgaggcagctgcaggagcagatccg

SEQ ID NO: 536053 - DNA, 82 bp, Homo sapiens
aaaagctgccaagttgaaaatggacgagtaatcgcctgctttgattcattgaaagcttgtgacatcacgggaggactgtacc

SEQ ID NO: 536054 - DNA, 100 bp, Homo sapiens
gaaaagatgaaaaggaatatgcattgaagcaaattgaaggcacaggaatatccatgtcggcttgtagagagattgcaggccgcgatgggcctcttggaac

SEQ ID NO: 536055 - DNA, 100 bp, Homo sapiens
cgagcctctggcagggcagccttttcaatgccaactatgacgtccagagttgggatgaatgggttccggagagcagagtactcaaatacgtggacaccaa

SEQ ID NO: 536056 - DNA, 50 bp, Homo sapiens
tggcctctcagagtgctgggattacagtcccactgtggagcttccctgag

SEQ ID NO: 536057 - DNA, 101 bp, Homo sapiens
tccagaacttgcagcaacaatagatgatgctgtgtatctggacaatgagaaagaaagagaagagtatgtcctgaatgacatcggggtaattttttatggag

SEQ ID NO: 536058 - DNA, 49 bp, Homo sapiens
ctttgatttacagcagctgcaggaaaatggctttgtaaagaagtttgaa

SEQ ID NO: 536059 - DNA, 100 bp, Homo sapiens
ctcctactctacgaggaccaagcctccccatggccacccatggaccagtcggcattcacttcctcccttctgcggcccataaaagccctgggttcaggca

SEQ ID NO: 536060 - DNA, 50 bp, Homo sapiens
tcagcttttgcggcacttggagccccaaagtggaactcacccaaatgtct

SEQ ID NO: 536061 - DNA, 75 bp, Homo sapiens
aatgttccttagaaaggagcagcagctaaaccaggtggacaggtgaaatgtcagtatatctctgctgtggataaa

SEQ ID NO: 536062 - DNA, 50 bp, Homo sapiens
cctgtgagatgtttcatcccaacagaacttaaaaggagtctagaaaatcc

SEQ ID NO: 536063 - DNA, 75 bp, Homo sapiens
cgggacccggttccccggcccacagtgggggtgtgcaaacccgagagaactgggcggatggcaggatgaaacctg

SEQ ID NO: 536064 - DNA, 100 bp, Homo sapiens
ggtagagggtttgagtccgcatcgccacagctgaaggctgcgagggactaagagcagagttctccagcatttggctcaaggccccaagggcacatgtgac

SEQ ID NO: 536065 - DNA, 100 bp, Homo sapiens
tgtctcaatgaaggttgatttcatcagactaaaaagttacaggggtctccctcttttgtccaaggctggagtgtggtagtgctatcacagctgactgcag

SEQ ID NO: 536066 - DNA, 90 bp, Homo sapiens
gcggaactcgaccggatccaacccagttagttacttcctgtctagagttgtagcttccacctggtttgagcaggaagttctgggggctcc

SEQ ID NO: 536067 - DNA, 111 bp, Homo sapiens
cagagattcatctttcatgcagtgacatgttgataaaaaatgatgccaccattggttcaggcaatcttcagcggtgatccagaggagatccggatgctcatccataaaact

SEQ ID NO: 536068 - DNA, 100 bp, Homo sapiens
ctactctctctttctggcctggaggctatccagcgtgtggaagatttccttacaagggccgtgttacatgacactgttaatgattgcatttggcttgctg

SEQ ID NO: 536069 - DNA, 89 bp, Homo sapiens
tccctcagcatgggcatcaccttgatagtgggtagttacttttggtgacgctgtccagttcccacaatgtatcattccttatctgaaac

SEQ ID NO: 536070 - DNA, 73 bp, Homo sapiens
ggcagagaagaagggctgaaagcactctactcgggcaagatggaaagttgccttttgttcctccggaggaaga

SEQ ID NO: 536071 - DNA, 83 bp, Homo sapiens
gttgtgttgcccgccaccatgagctacacagaactcgccgtgtgtgtgtcagagaatgttgctcctgtgccctgagtcaacaa

SEQ ID NO: 536072 - DNA, 100 bp, Homo sapiens
aaggctctgtgaaactgtacacaacaagcatcttgatctagaaaatataacgagcatgaataatctttcatttagtgagctatgttgcctcttctgctgt

SEQ ID NO: 536073 - DNA, 98 bp, Homo sapiens
caacgcctggctcggagcagcagcctctgaggacaggtttcattaatcttgacaagccctctaacccctcttcccatgaggtggtagcctggattcga

SEQ ID NO: 536074 - DNA, 83 bp, Homo sapiens
ccagcaccgcagatgttgtcaaggtggcctaccaggaggccaggggtgtcgccatggtgggatgtgtgtgggctgaaattccg

SEQ ID NO: 536075 - DNA, 75 bp, Homo sapiens
ccctggtggatggcgaggatgagaggtaagaatgattgatgttggctgatattggagtgctcattcacatgaagt

SEQ ID NO: 536076 - DNA, 88 bp, Homo sapiens
caccttctgcgaggcctgcaagtccaccgtgggaggatttgacagctaaggatattgaagaaattattgatgagctcaaggctggcaa

SEQ ID NO: 536077 - DNA, 100 bp, Homo sapiens
cagctctgccctgtggcctctctctcccaacagcttacaggatggaaaagaatatttattccaggccaaggatgaggtgtgaacctcaaatggactgaat

SEQ ID NO: 536078 - DNA, 82 bp, Homo sapiens
ggcccaaccgccgccagcaccatggccagcaccatttccgtgtactaatggtcacttgatgtgcgctggctgttttatccac

SEQ ID NO: 536079 - DNA, 100 bp, Homo sapiens
ctctctttcccgtccgcgatgagaagaggggcaagcggccgtctcccctcgcacaccagacaatgcagatcttcgtgaagactctgactggtaagaccat

SEQ ID NO: 536080 - DNA, 95 bp, Homo sapiens
gagaaaacaagtccaaggatgaatcccagtccctgttacgggtttctggtcttcactctagcactaattgaaaaaaaaaaaatttgttttccgag

SEQ ID NO: 536081 - DNA, 101 bp, Homo sapiens
caacccttgtgggcatttgtggtgagggaaccgagtctgtgcaaagcctcctgcttattcctggtcgggtggcttccagtggtcttcagtctgtcgtgcac

SEQ ID NO: 536082 - DNA, 100 bp, Homo sapiens
aggagcagttgtctgatgaagagaagagtgaagttcccagaccctacgccccgctgtcaggcagcccgccgatcagatggaggagaacgaggtggagagc

SEQ ID NO: 536083 - DNA, 140 bp, Homo sapiens
cgggatcgtgaccgagaccgtgaccgagagcgtgaccgagagcgcgaatatcgtcatcgttagaaggaacacctcatcaaaatgcagaagcagaaactgcagatgcccccgcagcccccaccgccacaggcccagtctgc

SEQ ID NO: 536084 - DNA, 100 bp, Homo sapiens
gttggtcagaggagtcttcatgaaggtggtgaagcccaaggttgtccaagaagccctggacaaagccagagaaggccgcacctgcattgtgattgctcac

SEQ ID NO: 536085 - DNA, 99 bp, Homo sapiens
ttttgcgagtactcaacaccaacatcgatgggcggcggaaaatagcctttgccatcactgccattaaggttaaagaattgcccacccttaaggatatgg

SEQ ID NO: 536086 - DNA, 100 bp, Homo sapiens
cgccggctcccaccccggcccgaccccgacccggcccggtcaggccccatactcaggaagcaatgaggctccccaagaacacacctgaggaaaaggacag

SEQ ID NO: 536087 - DNA, 90 bp, Homo sapiens
tatcagattcacctgggagcctaacttctggaccaagcagctagcttctcttgaaagtactgaaatcccaccttatgtgatgaagtgtcc

SEQ ID NO: 536088 - DNA, 75 bp, Homo sapiens
aatcgacacacaaagaatagagttgagcctgtgggacacttcggctatgacatggtgcattacggccactccaac

SEQ ID NO: 536089 - DNA, 73 bp, Homo sapiens
cttccacgtgctacgacgccagatcctgctgccattccggaagccgactcagtattcatttaaacaagtattt

SEQ ID NO: 536090 - DNA, 100 bp, Homo sapiens
tcaaaagtcaaccgctgaagagcagtgaatggtgctgggctcgccatggctacttgtgatatcattttccttaatggtgggaagccagccaacttcttgg

SEQ ID NO: 536091 - DNA, 75 bp, Homo sapiens
aggaaacgctgtcactgtggaaacggtaatcattaccaaatgaggaggaaaggacgatgtcatcgaggctctgca

SEQ ID NO: 536092 - DNA, 75 bp, Homo sapiens
ggaagaggtctcacgaggctgtcatcaccgccatgcccaagaataaaggtatgaaaatgaaagtcttcagaatgg

SEQ ID NO: 536093 - DNA, 75 bp, Homo sapiens
agcaaggccaaagacagggagaaggttatcactgtgaatataagatgcggacaggaaggaaacctgatggctgtg

SEQ ID NO: 536094 - DNA, 100 bp, Homo sapiens
acctggagaacgcagtgctcttcgaagtggcctgggaggtggctaacaaggaaagttcaggagccctggaaaggagaaggaataagacggcaggaggaag

SEQ ID NO: 536095 - DNA, 83 bp, Homo sapiens
caaacgccgcaccaggtcttgtagcagcgcctcctcgggggatatgagactttctactcggaatatcctgagtgttgcgtgga

SEQ ID NO: 536096 - DNA, 74 bp, Homo sapiens
aacatgccaggagagcaatgcaaaaggtttatgaaggcgagcgtgccatgacaaaggataacaacctgcttggc

SEQ ID NO: 536097 - DNA, 107 bp, Homo sapiens
ctgctgcaccgacctcgacgtcttgcctgtgtcccacttgttcgcggcctatagggcgtctctggccgagcctctttttgtggaaaacgacagcagcagcagtggcc

SEQ ID NO: 536098 - DNA, 97 bp, Homo sapiens
accttgaatttggtgtggaagaaataacatcagtagttcaggaggtggctggcaggaccaagtaggtggcctaatgcctggcatcaaggtggggcgc

SEQ ID NO: 536099 - DNA, 100 bp, Homo sapiens
gaggaggcgttgcaggacagcccccaggttatgaagacagtatggagtttccagaccatagtagacatttgctacagtgtctgagcgagcagagacacca

SEQ ID NO: 536100 - DNA, 100 bp, Homo sapiens
acggaccgcgcccgccgggcacacaagaatggtcactactgtgccctgtccacggtgcctcctgcatgtcctgctgccctgagctgtcccgagctaggtg

SEQ ID NO: 536101 - DNA, 82 bp, Homo sapiens
gtgtgggcctctcatcaaggaggagactcacaggactccgtgggaaggaggcttgtttaaactacggatgcttttcaaagat

SEQ ID NO: 536102 - DNA, 95 bp, Homo sapiens
agtaaaaacaggctggtgcagacagcagagctcacaaagaaagatgtgcgggacatcctcaccccaattcagattgaagctgcttaccaccttgg

SEQ ID NO: 536103 - DNA, 98 bp, Homo sapiens
gtagaacaacagacactacacatctgtcctccacagaggctttttgtgtgttttatcatctaaaatccaatccctcgatgtacagatcagctctcaaa

SEQ ID NO: 536104 - DNA, 50 bp, Homo sapiens
aggatcaagggataaaccatgctgtatgcaggagctattcttgaagtttg

SEQ ID NO: 536105 - DNA, 90 bp, Homo sapiens
ggcgaacagtctcgttgctgcctctgtgtacgctgaggggggagaatctccctggggtgccctccccaggcagcaatgccaggatgcctg

SEQ ID NO: 536106 - DNA, 75 bp, Homo sapiens
tggcatgaggaagctgggggcatcttctccccagggtcccctcctgtgcaagcaaagcaggagccccagggcagg

SEQ ID NO: 536107 - DNA, 82 bp, Homo sapiens
caacctaagtccagaaagacctccactcttcaaacagttcggatagagaggagtccctgctgctctttggcgtaaattgcaa

SEQ ID NO: 536108 - DNA, 96 bp, Homo sapiens
ccacactggccccagagtatttgccaactatgtcttctactgacatgctttctaaaaccaatttttccaacaacaacgatttccgtgctcttctgc

SEQ ID NO: 536109 - DNA, 100 bp, Homo sapiens
ccgccgccgccggtgtgaggcggcccgtcctggctcccttgtccgggaagcccgcccaggactttccttatcccagttgattgtgcagaatacactgcct

SEQ ID NO: 536110 - DNA, 100 bp, Homo sapiens
ggaagaaaatggtttggctgtgataggagtatttttaaaggctttcagtccagtgtaaagctgttggagcgcgggagcaaaggtaaagaatgatgtaatg

SEQ ID NO: 536111 - DNA, 98 bp, Homo sapiens
tagggggcccatgccttctgatgtctacaggcgctgacggccacccctccagagctttttagatgaggaatttcctcactatgattccctgtcctgcg

SEQ ID NO: 536112 - DNA, 100 bp, Homo sapiens
gacggagaagacgagggggcgtctgaggaggaagacctggaagacagatctgagagtaaaacttgtctcggcacagagtcaagtaaagaaagccaacata

SEQ ID NO: 536113 - DNA, 82 bp, Homo sapiens
gaaaaactggatgttggtagaaaaagcaagagtttgttatatagcagttcagaggtccaaagaggtgacattttatggatag

SEQ ID NO: 536114 - DNA, 96 bp, Homo sapiens
gtcgcagcgccagacccaaggcccccgagtgagcgcgggcgccgaggaagatgaagtcctcagtacattctgaagaagatgattttgttccagagc

SEQ ID NO: 536115 - DNA, 51 bp, Homo sapiens
gttgccttgtatttccagagaacaggatttgtgtacatcaatggcagaatc

SEQ ID NO: 536116 - DNA, 74 bp, Homo sapiens
ccctcttctgcagcgtcctcaccaatgacaaccatgagtggaaaaaactaattatggttcagcactggcctgag

SEQ ID NO: 536117 - DNA, 83 bp, Homo sapiens
aaaatatggtgaactcattgtcttaggcaaagtgtgggatgctgtctcaggagatgaattgatgaccctggctcataaacaca

SEQ ID NO: 536118 - DNA, 89 bp, Homo sapiens
cggcccacagtgggggtgtgcaaacccgagagaactgggatatgaattgtctcccacggcagcagctaacttcacacgccgaaacctgg

SEQ ID NO: 536119 - DNA, 83 bp, Homo sapiens
cccgcgctggtgcagccaccctcgctccctctgctcttcctcccttcgctcgcaccatgatggttggcaatggctgataaatg

SEQ ID NO: 536120 - DNA, 98 bp, Homo sapiens
ccgacccggattggcgctgaggtggcccgtggggcagcacgaggtagaactaacattgaacttagagagaaattcatcctaccagagggagcatccca

SEQ ID NO: 536121 - DNA, 75 bp, Homo sapiens
caggcagagtgctgatgtgaaaaataccacgacaaaaccaccctagtgaaaggtgtagcagtcactcggcctaca

SEQ ID NO: 536122 - DNA, 100 bp, Homo sapiens
ggagcagttgtctgatgaagagaagaaccgtgggtaccgatggatgtggccgagagccctgaacgggatcctcactctccagaggatgaagagcagccac

SEQ ID NO: 536123 - DNA, 74 bp, Homo sapiens
ggagtcctgggcccagagccgagatgagcagaacctgctgcagcagaagaggtgctggcattgacggagtggag

SEQ ID NO: 536124 - DNA, 75 bp, Homo sapiens
ggaccagtactctgccgagtgcggcggaatacaggagtttccagaaaatataaaaaattgtaaagttttgacaat

SEQ ID NO: 536125 - DNA, 100 bp, Homo sapiens
gcttttttccttcctaggagaaatcgaggagctgcggctctaccccccggagctcgcatgtcttgggatagagagtcgacagaaattcggtaccgtagac

SEQ ID NO: 536126 - DNA, 99 bp, Homo sapiens
tcatcatcttcctgggcgatggcaacaccgtgacaggagagacgactcccttttctcctcttgtggccacttctgaatctgtgaccgaaatcacagcca

SEQ ID NO: 536127 - DNA, 60 bp, Homo sapiens
tgtactttaccaacgagctgaagcaggaaaaaactcaggctgtggaactctggcagactg

SEQ ID NO: 536128 - DNA, 80 bp, Homo sapiens
gtctggagtttatctggagtgaggtggccggttcttggtgggatctgagcagaaagaagatgctgatatgctacaacacg

SEQ ID NO: 536129 - DNA, 75 bp, Homo sapiens
cgcgaacctctgctcacgcgtgttcttctgaacctaaaggcagacccagaagagctttttacaaaactagagaaa

SEQ ID NO: 536130 - DNA, 83 bp, Homo sapiens
tgatttccggagtcagtcattttactgtcaagacatttcttcggcattctgcaacagggtgtgagatggcagacaggtttgca

SEQ ID NO: 536131 - DNA, 100 bp, Homo sapiens
ctgacctgcctgagaggttccaggggaaaaaagttgttccatgtagacatgactggcatcagactggaggtgaagttaccatttcagtatatgctaaaaa

SEQ ID NO: 536132 - DNA, 100 bp, Homo sapiens
ccggctttgcagcggggacttcggcggcggcgcctcaggcacctcggcccggcttatgttcctgaggaagaattgaaggcagcagaaatagatgaagagc

SEQ ID NO: 536133 - DNA, 90 bp, Homo sapiens
acatttgttttgagctaaatattgagggccaaaaggtgtgttttgctgacttcaagcatccctgctacaaaatggcctacttccatgaac

SEQ ID NO: 536134 - DNA, 82 bp, Homo sapiens
cccaggcccttgttggggcacaaggtggcaggaactgtggctgcaccatctgtcttcatcttcccgccatctgatgagcagt

SEQ ID NO: 536135 - DNA, 100 bp, Homo sapiens
cagctgcaccgtgcggctgctggacgacagcgagtacacctgcaccatccaggactcacaccacccggcaagaactgctcactacggctccctgccccag

SEQ ID NO: 536136 - DNA, 100 bp, Homo sapiens
cagcaaccgaattccagtttccatctgtgagaaagacacactgcagtggaaggaaacacaaagagaatgtgaaagactattatcagaaatggatggaaga

SEQ ID NO: 536137 - DNA, 98 bp, Homo sapiens
agaaaggcggcggtgcgtgttgctgcgagtgggacgcgcactggtcggtgccggctcaggagccgggttttttgaggaagagtctcgctaccactgtg

SEQ ID NO: 536138 - DNA, 75 bp, Homo sapiens
gtgcacatgaaagggagtttggttctgtagatggatacaatgtctctttgctatatgaccttgaaaatcttccgg

SEQ ID NO: 536139 - DNA, 96 bp, Homo sapiens
cggcccccaggacacgcgctgtccatccgccatgtggcccctgtggcgcctcgtgtctctgctggccctgagccaggccctgccctttgagcagag

SEQ ID NO: 536140 - DNA, 75 bp, Homo sapiens
caaagctgctgccgccccttgggctaaaaggaccatggccaacctggagcgcaccttcatcgccatcaagccgga

SEQ ID NO: 536141 - DNA, 100 bp, Homo sapiens
gggatggttccatcatggcgtcaatgcagatcctgtctacctttcatgaccaactacagttttcattgcaacgtctgccatcacagtgggaatacctatt

SEQ ID NO: 536142 - DNA, 97 bp, Homo sapiens
cagggctcgaggatgccagtttttagggccagacacttagcctgtgatgaggagagagtggaagaagcaaaactgctggtgtcccaaggagcaagta

SEQ ID NO: 536143 - DNA, 50 bp, Homo sapiens
gaagctgctgctgagcccgggaggtcactcagctctatgtgccagcatcc

SEQ ID NO: 536144 - DNA, 75 bp, Homo sapiens
acaaaactcccatcgcgtcgtggaggagtactttgtggcccccccagcccgcatcgccacatccctggatggctt

SEQ ID NO: 536145 - DNA, 88 bp, Homo sapiens
ttgacgcaatcagaaaatcaagtaaaggaacccaacagagatctcttctgttctccactgctagatgcgtgatctaaaagctgttggg

SEQ ID NO: 536146 - DNA, 95 bp, Homo sapiens
gcggggcagctgccaggaacgagggtagcaggtgagcgacctgtgagagtttatgccgatggaatatttgacttatttcactctggtcacgcccg

SEQ ID NO: 536147 - DNA, 75 bp, Homo sapiens
ccgggacatgcatcgtcccctggactctctcaagagaacatattgtgatgttcgtgcctcagagctaaaactatg

SEQ ID NO: 536148 - DNA, 75 bp, Homo sapiens
tggattcaacagcttttaggactcaggtgtgaccatgaagctcatggatgaggtcgccgggatcgtggctgcacg

SEQ ID NO: 536149 - DNA, 90 bp, Homo sapiens
aactacacctgtgtggccatctcctcgctgggcatgatcgaggccacagcccaggtcacagtgaaagatgtagaaatccctgaaaatcct

SEQ ID NO: 536150 - DNA, 96 bp, Homo sapiens
acaaaatcacatgatccgcacccccagcatgaggcaggaggagcgctacctggttcagcaaaaggatgtcactgaaattgatattttagttaagaa

SEQ ID NO: 536151 - DNA, 124 bp, Homo sapiens
cccatctccaacgtaacctcggcgccggtgacgtccctcccgctggtcaccactccggcaccaggtgctggagaatctggtaaaagcaccattgtgaagcagatgaggatcctgcatgttaatg

SEQ ID NO: 536152 - DNA, 75 bp, Homo sapiens
tgggggcccgagaagcttcctctcaggtgacgcagaagttctccctggtgattgtgcagggccacctggtgtcag

SEQ ID NO: 536153 - DNA, 95 bp, Homo sapiens
gctgctgctgctgctgcgcctgggccagaaagtgaagtcactgcttttgctgtcttggatcaagaccagaaagaaattattgataccaatggagc

SEQ ID NO: 536154 - DNA, 100 bp, Homo sapiens
cccgcctaccaccgctgtgtccgccatcccgtcaagctccatccctttgggcagacagcccatggcacaggccactcctcaggatagtcaggaaggaacc

SEQ ID NO: 536155 - DNA, 101 bp, Homo sapiens
cttcttcagacagcactgctggagttaaggagtagctcgaggtcacagccaagactgcctttctatttattttacctcagtataacattagcgtgcctaca

SEQ ID NO: 536156 - DNA, 99 bp, Homo sapiens
cgtgaccgagaccgtgaccgagagcgtgaccgagagcgcgaatatcgtcatcgttagaagtctcctctaagccatgacctcattcttaacctgactcag

SEQ ID NO: 536157 - DNA, 100 bp, Homo sapiens
caagcacgtggacctcgtgaagctgctgctgtccaagggctctgacatcaacatccgagacaacgcccgaatggaagtggatgcagatggaaatggtgct

SEQ ID NO: 536158 - DNA, 85 bp, Homo sapiens
cccagagactgctgagcccgtccgtccgccgccaccacccactccggacacaggctgaaggggatgctaagggagataaagcaaa

SEQ ID NO: 536159 - DNA, 75 bp, Homo sapiens
atagcatttttcacaacaactgatgtggaagatgtgaaatttgtcatcaattatgactaccctaactcctcagag

SEQ ID NO: 536160 - DNA, 100 bp, Homo sapiens
gtacatgcagtggcgggagaccatcagctccacggccaccctggggttcaggatcgagggaatcaagtttcaccagtgatcattaaagaatgggcagctt

SEQ ID NO: 536161 - DNA, 100 bp, Homo sapiens
ttaacaatggcgaaatgcaggcgaaatgtggaaaatttcctagaagcttgcagaaaaattggtgtacctcagttatagtgaagaaatacttggtcccatt

SEQ ID NO: 536162 - DNA, 100 bp, Homo sapiens
cagaactgctggatagtggcaggattgagatttgtgtctctgactgatgttcatgagagcgcagtttgactatgatcccaaaaaggacaatctgatccct

SEQ ID NO: 536163 - DNA, 100 bp, Homo sapiens
ggggaaggtcaccattgacagcagctatgacattgccaagatatcccagtgtgatccctcacatccacaaatctctgattggaaagaagggacagcagaa

SEQ ID NO: 536164 - DNA, 100 bp, Homo sapiens
tgtgaagattgctcctggagcagttgtatgtgtagaaagtgaaatcagaggagatgtaactatcggcaccatgagccaggacaccgaggtggatatgaag

SEQ ID NO: 536165 - DNA, 74 bp, Homo sapiens
caccagtgcagtgaggggctcagtatccgggcctcccgagaggtaatagcctgcagctggtgttttgagaagcc

SEQ ID NO: 536166 - DNA, 100 bp, Homo sapiens
aaacagcgagggggcaaagaactggggatgaaggattcagatatggactacgtccagattgatgccacaattaatgacagagcgggatgccaccagcttg

SEQ ID NO: 536167 - DNA, 82 bp, Homo sapiens
tgggaaatccacaccaccacgtaaggtactaggttttgacaagcttgcatcatgcgtgagtataagctagtcgttcttggct

SEQ ID NO: 536168 - DNA, 75 bp, Homo sapiens
aaaaaatgtggctgcaaacggcatccctatggttcaggaggccagaaatttccacctctaggaggtggtggtggc

SEQ ID NO: 536169 - DNA, 100 bp, Homo sapiens
gaaaaagttcttgggacaaacttcatttggaatgaatctgaagtctgctgcagtaaaacacagaaggctttaaaatgttttcttgcataaaattcaaaac

SEQ ID NO: 536170 - DNA, 98 bp, Homo sapiens
gtgagctcaccgcccagcccaaaccaggagattgcgagggagcgatgcggtgcagcgcgagtgcgctagatgttggaccgagtatggaatccgccatt

SEQ ID NO: 536171 - DNA, 100 bp, Homo sapiens
gcaaagagatccgtccagtctgccgcaagttcatgcaagatgagcgggctgcagatgacagcaaagaggttgagagcttccagcagctgctcaatgctcg

SEQ ID NO: 536172 - DNA, 75 bp, Homo sapiens
atggacacccacaggtcggccctgcggacccggcaggtgactttggttttaaaatcaaagatgggaaaatcggag

SEQ ID NO: 536173 - DNA, 100 bp, Homo sapiens
ggcaccggcggcccctctgcctcgcggaaaagaaacttgagttcggctctaggttccatgtccccaactacatcttcccagattttggccagaaaaagac

SEQ ID NO: 536174 - DNA, 96 bp, Homo sapiens
gtacgacagcctcaaacaggagctggagcagctcaaagagacagccacaaccaaagtcccggagatccgtgatgtaacaaggattgagcgaatcgg

SEQ ID NO: 536175 - DNA, 87 bp, Homo sapiens
gtgaggaaaggaggtactgtagtctacgcctgcaagctctcagaccgggaacatccactctacctgcgtttggtagcagggcccaga

SEQ ID NO: 536176 - DNA, 98 bp, Homo sapiens
atgatgggcagctggtccgagagttgctacccagtgacagcagcgcgacactgaagagacccctatggtgtagccgtgggtggaactgtggggcactg

SEQ ID NO: 536177 - DNA, 75 bp, Homo sapiens
ctgctattgaaagagagtatgcacagaaagcataacccctactgtagaactaaatgcactgtgcatgaaacttgg

SEQ ID NO: 536178 - DNA, 97 bp, Homo sapiens
tctctacagaagagcttctcctcatcaactggggatgattacagttcttcctaaaaaaggaaagtgaaaaggtttctgaatatccagcagtgattgt

SEQ ID NO: 536179 - DNA, 75 bp, Homo sapiens
tcatgccgagatggaccttgggcagctcagttcacaagtgaaacaaagagtcctcttcgtggaaaagaaaaaaat

SEQ ID NO: 536180 - DNA, 74 bp, Homo sapiens
tcaagaagaagaaaagacagaagccttgacttctgaagatgcctctaatggaggagtttctgagcagcacccct

SEQ ID NO: 536181 - DNA, 50 bp, Homo sapiens
tccatgtggtggtgagcaacgagggtctcgctctgtcgcccaggctggag

SEQ ID NO: 536182 - DNA, 96 bp, Homo sapiens
ttccagcactggactcatggaggctgagcatttattcagatcaactactacttcatcaacagccagggccaccccatcgaaggccttgccgtcatg

SEQ ID NO: 536183 - DNA, 100 bp, Homo sapiens
atcgggcctgtgctggccgtggtcttcataatctgcattgtcattgctatcctgctctacaagaaaaggaagaggcccagcagaagggactcgctgagcc

SEQ ID NO: 536184 - DNA, 50 bp, Homo sapiens
cagctccgaaatcaccaccaagctcctgcgccgagtgcctgaagttcgaa

SEQ ID NO: 536185 - DNA, 82 bp, Homo sapiens
gtctccttagggatctcttcaaatgagcaggaccaaggagctagagttaatgccaaagacagcaaatggttgacacctttac

SEQ ID NO: 536186 - DNA, 75 bp, Homo sapiens
cctgcaggacccatttgtgtccattgatctcttggagcagctggggatcatggtcaggtggagaaacactatcgg

SEQ ID NO: 536187 - DNA, 100 bp, Homo sapiens
gagaccgtgaccgagagcgtgaccgagagcgcgaatatcgtcatcgttagaagatgaacacctgccgcgtaactgcagccacggtcaagacggaacattg

SEQ ID NO: 536188 - DNA, 96 bp, Homo sapiens
tcaccatcaccttcaatccgctctactggaatgtggacactcatgaggaccatgatacttccactgagaatacagacgagtccaaccatgaccctc

SEQ ID NO: 536189 - DNA, 83 bp, Homo sapiens
ctgaagaggagcgccagatggtggaggaatacacttatttatgaaggacaccattcgggaccttgtcatggagaaatctgctg

SEQ ID NO: 536190 - DNA, 75 bp, Homo sapiens
aggagcaaccctgtaaaaccagccttagactatttttcaaacagtcactctgtgagactgctgggtcagaaaaag

SEQ ID NO: 536191 - DNA, 75 bp, Homo sapiens
ccgaagcccagggagagcaaggcgcgcggcgactccgggacttcaaaatgagcgtccctgactacatgcagtgtg

SEQ ID NO: 536192 - DNA, 82 bp, Homo sapiens
cccagcagtggagttcagcccactactctgaaccaggtgtggacactgccagcggctgcagccgacttggaatgacctggga

SEQ ID NO: 536193 - DNA, 100 bp, Homo sapiens
aaattgatagcagtttgaatggttctgggaaatggcttttacgttcaccggtctcaagctgcagggatcactaggtcgatttggcaaaacaatcactact

SEQ ID NO: 536194 - DNA, 50 bp, Homo sapiens
cctgcccgcgcctagaccccattcacaagtgcagccgcggagccctgtac

SEQ ID NO: 536195 - DNA, 83 bp, Homo sapiens
gctgtttatagtttggaacccagactttgcggtggaaaaggaggtctataagaaggagaaagctcgagtcatcactgaggaag

SEQ ID NO: 536196 - DNA, 75 bp, Homo sapiens
catgatcgacttcctcacccgcgcctgcgacctcgggccgcctgggcagaatgtcacgatggacgagggcggcac

SEQ ID NO: 536197 - DNA, 98 bp, Homo sapiens
gttttcagcatatgtagtacttcagaggaagaattaaggggcatgttggtgcatttaactacaaaaccagccgcagggccgtaggcagccatggcgcc

SEQ ID NO: 536198 - DNA, 75 bp, Homo sapiens
ccagcctaggttccacccttttctgggaacgtttgttgataagccggggcccttcgtgggaccctgcggtcactg

SEQ ID NO: 536199 - DNA, 75 bp, Homo sapiens
caagcggaaggtgatgcccaagatggaccagatcctcttctcatgtagacggctttcttccaagtggtggtgatg

SEQ ID NO: 536200 - DNA, 100 bp, Homo sapiens
cttggctacatcaatcctgaaatgcagatgcccaacacgaagcccctgtcgcccacccagctggtcctgtggatgggatcctctccaccctcctctagcc

SEQ ID NO: 536201 - DNA, 74 bp, Homo sapiens
aaattctgaactcaggacttggcaagtgaatcaggtctaggaaaatcgactctcataaacagcctattcctaac

SEQ ID NO: 536202 - DNA, 100 bp, Homo sapiens
tgctcctccaaggcagagcggctcccccctttcgatacaaggcagatccaaccatccccaccgtggtcctacgatcagtcctaccaatacctgggatcca

SEQ ID NO: 536203 - DNA, 75 bp, Homo sapiens
gaggggctgtgtcatagacgtccgacgtgtctggttggtacaggtcttgggcctacactggagttttatgcgctt

SEQ ID NO: 536204 - DNA, 82 bp, Homo sapiens
gttcagcaggtcctgttggagatgatagtgctgttacactaccaaactgtcagtgaacccgccgttattaaacgattgatta

SEQ ID NO: 536205 - DNA, 82 bp, Homo sapiens
tctggagtgcgtgggggaccggctgttggcgggtctgaaggggcgtctcgattacctgagctctctgaaggtgaagggcctt

SEQ ID NO: 536206 - DNA, 75 bp, Homo sapiens
aaaacaacaaatcattccagtcagatgacagttcactaagagacatcgatgagtgtgctgaagggcgccattact

SEQ ID NO: 536207 - DNA, 87 bp, Homo sapiens
tgcagtacccacctgggccaaggagggaagatgcagttattggagggtggtgaagagaggatggagacaccccaggaagaccacctc

SEQ ID NO: 536208 - DNA, 100 bp, Homo sapiens
actccctgaaatctggagtgaagaacgccgccatccagccaccattccaaggtctagcacataccgctccaagggctttgacgtcacagtgaagtacaca

SEQ ID NO: 536209 - DNA, 100 bp, Homo sapiens
ttcctaaagttcgtgaatctcaacttgtgcgtcagcaatttcctgctcctcttggttggtcaggcactgaagctcctacacaggtcactgttgaaactca

SEQ ID NO: 536210 - DNA, 100 bp, Homo sapiens
cagaccctggagcctcagttggaagcagccgatccagcctgcggagcctgtggggcagccgagcctcttgaagccattcttacagatgatgaaccagacc

SEQ ID NO: 536211 - DNA, 85 bp, Homo sapiens
ggaatttccttgtgcctccattcccgggaggggggagcggcgttggaggccaccgtttccaggcctgatcacttgaacggacata

SEQ ID NO: 536212 - DNA, 100 bp, Homo sapiens
ggcttggtgtggtgtgcggaggagctccaggcccgtcggcgcggagtcttctcattcacaggttaaggctacctttccagataatccaacagctaaatca

SEQ ID NO: 536213 - DNA, 75 bp, Homo sapiens
tctggaattggcaacatctctgagagacttaattcagtgcacaaatgagatgaatgtgaacatcccacagttggc

SEQ ID NO: 536214 - DNA, 80 bp, Homo sapiens
ctctggagtgcccccagcccagagcccgatttttacataccgttgctcaaaagagggctgcaagaagaaagagatgctgc

SEQ ID NO: 536215 - DNA, 82 bp, Homo sapiens
tggcaagagaggcatcctccttgaagtatttggctgaggagttttcaatcccaggccagccgggggaccaggctgctctctt

SEQ ID NO: 536216 - DNA, 50 bp, Homo sapiens
ctttaccgccatgctgtgccttgtaattctgttccacaggatatctgctg

SEQ ID NO: 536217 - DNA, 75 bp, Homo sapiens
ctaatcacttagagagagtctcaaaggagctgcagacagagattactgcagtttatgtgacaagcagccaatcgg

SEQ ID NO: 536218 - DNA, 82 bp, Homo sapiens
gaatcagcagctccggcagcagtgtcctgtgctgatggtgttggcagccacgaaggaagacaggaggtccgaggagaaagcg

SEQ ID NO: 536219 - DNA, 74 bp, Homo sapiens
gctgtgcttcaagacgtgttctcctgaaagccagcagatttatgggtgaatcacaagcctttgagaacagcctg

SEQ ID NO: 536220 - DNA, 100 bp, Homo sapiens
tctgcgtcgggttctgttggagtgcgttcggtgtgccgtgggtccgcgctgcttccacccaacttcctgttagatgttctcaaatagtgatgaagctgta

SEQ ID NO: 536221 - DNA, 100 bp, Homo sapiens
cagcaatgaaccagacctggcacccagagcacttcttctgctctcactgcggagaggtgtttggtgcagaaggcctcctcgaaagatgttgtcagacagc

SEQ ID NO: 536222 - DNA, 100 bp, Homo sapiens
aacaaccaagtgattcattccaaggacaggcagcccagtctggtgtttggaatgacgacagtatgattcattcagcttttccagaccaggcatcaccgag

SEQ ID NO: 536223 - DNA, 90 bp, Homo sapiens
caactgtacctgccccacagcctccagttactaagcctcttttccccagtgctggacaggctctgtcaacagactcaatagaaagactcc

SEQ ID NO: 536224 - DNA, 100 bp, Homo sapiens
catatatccaacactgcaaagcatttttatggacaacgaccacaggaatctggaattttattaaacatgcgcacataaaatccaaatcccacttgaacca

SEQ ID NO: 536225 - DNA, 75 bp, Homo sapiens
aagtgcaagagcagaggccttctctagaccttgccaagatggcacagatggggaaattgaggcagagaagccaag

SEQ ID NO: 536226 - DNA, 100 bp, Homo sapiens
ggagacgctgctgcagctccgggacacctggggccgccgaggcaaaggtgctttacaaggccaagtacggtccaatgtggatgtcctacttagggcctca

SEQ ID NO: 536227 - DNA, 101 bp, Homo sapiens
ccattctgatatctgctcatggaaatagcagtagggcactcctaaaacacctggaagggagcccagattctacctctccttccagcagtcctactttctgg

SEQ ID NO: 536228 - DNA, 90 bp, Homo sapiens
cagtaatgatattgtaaatgcgattatgtatgtgggtgccccggtggcttatgtccagcagatatttgtgaagtcctcagtgtttccctg

SEQ ID NO: 536229 - DNA, 75 bp, Homo sapiens
ctgtgccatcttgccacatcttagaagtttagttgaaatcattgaacatggtatagactatgtgatacctaaaac

SEQ ID NO: 536230 - DNA, 80 bp, Homo sapiens
atgattttgaaccttacttgagtccacaggcaaggcccgagtccaagattgatctccttgatcggaaggaggatgtgaag

SEQ ID NO: 536231 - DNA, 75 bp, Homo sapiens
ccttaatgcagcacttattaagcagtggctctgccaatgatcctgtgagtattcaggaatcactgttgcccctgg

SEQ ID NO: 536232 - DNA, 75 bp, Homo sapiens
caggactgcgccgcgtcttcctcaaggaaagagcatctacggtgagcgcttccccgatgagaacttcaaactgaa

SEQ ID NO: 536233 - DNA, 100 bp, Homo sapiens
agcaaagtgaccgttggagtttaatgagaggaatatactcatcatcagtctatttagaagaggtgatctgtgaaaatggttcgctattcacttgacccgg

SEQ ID NO: 536234 - DNA, 82 bp, Homo sapiens
gcagaaaccccgttgacaaggcactgctttttcatgacgagagtattatgagggaggccgaggacttcatgctccggacaga

SEQ ID NO: 536235 - DNA, 100 bp, Homo sapiens
cagttggtggcgtttctctcccgataccgagatatgaatttcttgaagtcacacggccgggacaatgcaagcatttgtaatcagtacagccacatcgcag

SEQ ID NO: 536236 - DNA, 50 bp, Homo sapiens
tgaaagagaagctcttcctgtgagcaggaggatgcattagcacaacaggc

SEQ ID NO: 536237 - DNA, 101 bp, Homo sapiens
gcgggccgcggctccggcatggccgggatcattaagaagcagatcctgaaacacctgtcccggtcatgctttcagaacgaaaaggcacagatgagctctat

SEQ ID NO: 536238 - DNA, 82 bp, Homo sapiens
cagacggctcacctgtgcgggatggaacaaaaggagcaggccgggctctcgccatgggtcactgtcgcctctgccacgggaa

SEQ ID NO: 536239 - DNA, 75 bp, Homo sapiens
cgggacccggtgtctgctcctgtcgccttcgcctcctaatccctagccactatgcacaggaagtcctggagaacc

SEQ ID NO: 536240 - DNA, 90 bp, Homo sapiens
gaagatgcttgtttcttcctcttccctaacgccctttccaccagtgcggactgcaggttgatgataattagaagcatgctttccactgaa

SEQ ID NO: 536241 - DNA, 50 bp, Homo sapiens
gcctgttatttgtctcaacaaaagagaaaccacccctactcctaatcccc

SEQ ID NO: 536242 - DNA, 96 bp, Homo sapiens
cctcgagaggcaggcaggggatcccggacaaagtgactgagaccgaagatgatagtgatagtgacagcgatgatgatgaagatgatgttcatgtca

SEQ ID NO: 536243 - DNA, 100 bp, Homo sapiens
aaaatttgccatccgagggatgctgaaaacctttgggcttcatggagtcgtcttagatgttgattcagtagaacatggacagcagcaattcaacttttcc

SEQ ID NO: 536244 - DNA, 75 bp, Homo sapiens
aagacaggctcttcacctgaagccccattgacaaaccttcagattctctcagtatagggaacggtgataattccc

SEQ ID NO: 536245 - DNA, 98 bp, Homo sapiens
gagggtggagagctactcaaaattctacgttagagagactgaaaagacatctaatttcattgctcggcagggtgcaaccttgacatttttgagttctg

SEQ ID NO: 536246 - DNA, 51 bp, Homo sapiens
ggtgtcctgtaaaatcacagattatggtgctggagaatctggtaaaagcac

SEQ ID NO: 536247 - DNA, 88 bp, Homo sapiens
aagtcttcacctcagcctcacctggttccttttcttaagccacccacacagaatatgcctatgggtcctggagggatgaatcagagcg

SEQ ID NO: 536248 - DNA, 99 bp, Homo sapiens
agaatcacttttactacaagatttgtaagaaacaaatttatttccaaggtgaccaagaatatggcccaggtgaccaaagccctggacaaggccctgagc

SEQ ID NO: 536249 - DNA, 75 bp, Homo sapiens
cgctacacaagtggagctccttttcctccacctaccttcccgaaggttgaaggctgcattgactcaccaccctgc

SEQ ID NO: 536250 - DNA, 74 bp, Homo sapiens
ggcgtggccagcactggctccttgatgaatctgatgttccagcagaaatccaggtgttaaaagaacccctacaa

SEQ ID NO: 536251 - DNA, 50 bp, Homo sapiens
ccctctggatgctgacagaaacaaggattaagatgttctacgaggagcat

SEQ ID NO: 536252 - DNA, 100 bp, Homo sapiens
gactgctgcaacctacggggtgtacttgggaacgaggggtgaagcggcccaggtgaggaattatatccagatcgagagacagaagattctgaaagggttc

SEQ ID NO: 536253 - DNA, 73 bp, Homo sapiens
cattgaaacctcagccaagaccagacaggctgcctctaagaatcaaacttcactcttgggagaaccaccaaaa

SEQ ID NO: 536254 - DNA, 100 bp, Homo sapiens
ttcgtgctgcccgtggccacgcagatccagcaggaggttatcaaagcctatggcttcagctgcgacggggaagcgtccgtctccaagagagtatgaagag

SEQ ID NO: 536255 - DNA, 96 bp, Homo sapiens
gaggagctggcattggagcaagccaagaaagaatccgaagatcagaaacggttcctatatgatagtggactcttcagatcacgaccctggagaaaa

SEQ ID NO: 536256 - DNA, 100 bp, Homo sapiens
gtgcatcctgccagaaaccgattgctgggaagcactgccagtgaaagatgtagaagataaacctgaacaacaaaccagaacaagagagactgacaaatca

SEQ ID NO: 536257 - DNA, 75 bp, Homo sapiens
tgcacttgcgaagggagcttggggaggaaagccttgcttcctgttttacatcacaaatctaaaaaaggacccccc

SEQ ID NO: 536258 - DNA, 75 bp, Homo sapiens
gtgaaggcgaacgcggtctgcaagctgacgtatgttgacatcatggacatatgtgagtccatcctggagaggaag

SEQ ID NO: 536259 - DNA, 101 bp, Homo sapiens
ccattgaagcccaggaactgtctttatctgctgtcaaggatcttgtgtgctccatagtttatcaaaaggtatgggctacgtgagttcgtggtgattgcccc

SEQ ID NO: 536260 - DNA, 50 bp, Homo sapiens
gactcatccccgggagtgttgacaagggcaagtattttgtaaccttccca

SEQ ID NO: 536261 - DNA, 99 bp, Homo sapiens
cagcggcgcgaagaggccgcgctgtgccaccagctgggggagctcctggccggccatgggctgaatgaggaacgcgccactggacacatgaggaagagg

SEQ ID NO: 536262 - DNA, 89 bp, Homo sapiens
ggcccttcatgagctgaaaaatctcacccagtatagctggctgttggatgggctgtcagaaatcccgatgatcttgaagcaaggtctca

SEQ ID NO: 536263 - DNA, 87 bp, Homo sapiens
ctttctggcctggaggctatccagcacagctttattaaaccgcctggagcgaattttcgaagcatgttttccttccatacttgtccc

SEQ ID NO: 536264 - DNA, 75 bp, Homo sapiens
cgccgtgctggccgcggcccgcctcagcatctggtacagccgactgtgagtaccagagtgcccactggttccaac

SEQ ID NO: 536265 - DNA, 83 bp, Homo sapiens
gcaacgccgagcgcaccgacatctgcctgctcaaagggtttgccttcccggattgggcctacaagccagagtcgtcccctggc

SEQ ID NO: 536266 - DNA, 105 bp, Homo sapiens
gtgtcagtgttaaaggaacctctacaacgaaggtgaagccacggaagataagccatcgacgagtacaagccccaggatgctaccaccaacccgtccctgatcctg

SEQ ID NO: 536267 - DNA, 99 bp, Homo sapiens
cactggcctagttcccgacttgtttctcaggtatgaaaactttcaaagacgactagcacagaaccctctcttttggaaaacataatttgaataaaataa

SEQ ID NO: 536268 - DNA, 100 bp, Homo sapiens
gaatccagtaccaaaaacgtcaacaacagttttacggtatcgagaaccttccctgcgaacttcagaggaacttccagctgatgcgagagctggaccagag

SEQ ID NO: 536269 - DNA, 100 bp, Homo sapiens
caccatggagatcttccagctcctgaggaacatgcagattctgtttctggcgtctgcatacgcaagtccccaactcgctgaggagagctgttcagctatg

SEQ ID NO: 536270 - DNA, 73 bp, Homo sapiens
tgtgcgcccttggaaacgtggtatattgaaaggttttcacttccagttactgcaacagcagaaaactgcattc

SEQ ID NO: 536271 - DNA, 98 bp, Homo sapiens
ggtcatccttgcccttgtcctcccctttcatccctatgtggaaaacgtgccaaatctttggagtgttgatggagaagttacagtagctgaacagaagc

SEQ ID NO: 536272 - DNA, 83 bp, Homo sapiens
gcgcggggaccgctgtgctctcgtgtcacccgcaactacctagactggctcacgtccatcccttggggcaagtacagcaacga

SEQ ID NO: 536273 - DNA, 100 bp, Homo sapiens
ccgccgccagggtctgcagggcctgggccgccgctgctacctgcagcgccgtgtggcacgacacaaaaatcaggttctgctccagacgagcccttaccac

SEQ ID NO: 536274 - DNA, 100 bp, Homo sapiens
ctggacaaacatttcctccaaggtatccatcacgaattgaaaaaattgactatgaggagggcaagatgttggtccattttgagcgctggagtcatcgtta

SEQ ID NO: 536275 - DNA, 100 bp, Homo sapiens
acttgctagttaggattttattactggcagcatgtatatctttttgcatctatcctttgggctctaaatcacttaataacctaatttctcctgatttgga

SEQ ID NO: 536276 - DNA, 83 bp, Homo sapiens
ctgaagaaggccaaggctgcagaagccaaagccacggttcatgctggtcctggccagcaaccaaccagagcagttcgactggg

SEQ ID NO: 536277 - DNA, 74 bp, Homo sapiens
ggaggcttgggcttgcgccgttgaaggactttccttatcccagttgattgtgcagaatacactgcctgtcgctt

SEQ ID NO: 536278 - DNA, 75 bp, Homo sapiens
tgaatttgcaaaacgacagagcatattggttctgtgggatattaataaggacattgccgagaatggctgcgcccc

SEQ ID NO: 536279 - DNA, 100 bp, Homo sapiens
catctcttctggggcaggggccagggccagactccagcgggaggaagaagaggcctttgccagcagtcagagcagccaaggggcccaatccctcacattc

SEQ ID NO: 536280 - DNA, 83 bp, Homo sapiens
ggcgctggatccggcagcagctggcagatgaagcatattccatcggccccgctccctcccagcagagctacctatctatggag

SEQ ID NO: 536281 - DNA, 95 bp, Homo sapiens
actgagagatgcggccccctcgcaggcttagaccatgctcagcctccaagcagccttgtcatcgacaaagaatctgaagtttacaagatgcttca

SEQ ID NO: 536282 - DNA, 95 bp, Homo sapiens
atgcagttcaaagtaccttgaagtgtatgcttgggattctcaatggatgctggattctaaaatttgaatgccataaaattttgagtagaaaaatc

SEQ ID NO: 536283 - DNA, 100 bp, Homo sapiens
ataccgtcaagctggccaagcacaaagagcttgctccctacgatgagaactggttctacacgcgagctggtcccaggaaggtggcgtcagcatctgcagc

SEQ ID NO: 536284 - DNA, 90 bp, Homo sapiens
gcgcttctcctcctgatgcttttgcagaccgcggtcctgcaggggcgcttgctgcgtgggaatggaagtggccccacatctcaaagaaac

SEQ ID NO: 536285 - DNA, 100 bp, Homo sapiens
tgccaactggatttttgcgctagctggaggaatgttcttgtatatttctctggctgatatgcaggtgaacagctcggagaagctgcagctgcaggagtgc

SEQ ID NO: 536286 - DNA, 90 bp, Homo sapiens
ccgatggccctgggtcctcgctgtggggcaatccgggcttgcagacgagtgaagtttagcaactgcaatggaaaaagaaaagtacaatat

SEQ ID NO: 536287 - DNA, 90 bp, Homo sapiens
ccgggctgccccgcaggatcatcaaggttcatctgcagaagccagcggacgcctctgttcaacttgtgggttacctggctcatgagacct

SEQ ID NO: 536288 - DNA, 75 bp, Homo sapiens
acacccatcacccacatctcacagaggagaacatttgcctgcactgggcggcgttctccggctgcgtggacatag

SEQ ID NO: 536289 - DNA, 100 bp, Homo sapiens
agcggaggaaggtgaagtaggaccgaattcctgtgccgaagaggcctgcagtgggagagcagggtcacaccgacaaatctgaagcgggtttgccagggga

SEQ ID NO: 536290 - DNA, 100 bp, Homo sapiens
agtgccagagtgtatgcactttactacaaagatggacttctctgtacaggcagaatccagagaccacatttgaagtatatgttgaagtggcctatcccag

SEQ ID NO: 536291 - DNA, 100 bp, Homo sapiens
atgtatggagaatggctggtctcctactcccagatgcatccgtgtcagatgaatttcatcctttcatcgaagcacttctgccccacgtccgagcctttgc

SEQ ID NO: 536292 - DNA, 100 bp, Homo sapiens
ggaaaaatgcacttatgctgataaatatacccaaacaccctggagacgaattcctgatgaagtcattgctgtttccgaaaaggtgattgtgaagcttgaa

SEQ ID NO: 536293 - DNA, 51 bp, Homo sapiens
cggggaggtcacctgacgaggaggtcagccccagttgatgctgacagcagg

SEQ ID NO: 536294 - DNA, 100 bp, Homo sapiens
gggtactcggaaggcgcgggcaggagcctggcgaggatgcaccttcccctgccttggaaagccaagggcacgtgaagttgttgactggaggaaatatgaa

SEQ ID NO: 536295 - DNA, 82 bp, Homo sapiens
aggagcctgttccagaactgctggaagctgaggttatcaatactctggctgaccatcatcatcgtgggactgactttggtgg

SEQ ID NO: 536296 - DNA, 82 bp, Homo sapiens
ctgcaggcctcctacacctacctctctctgcacctcaggcaagtaggagtggctggaaagtttgttgagttttttggaagtg

SEQ ID NO: 536297 - DNA, 100 bp, Homo sapiens
ccgcttctggaacggcagcctctcccccagcatggtctgcctggcggccgactccaaggaccaggctccctgcaagccgctgccatggcccagacactgc

SEQ ID NO: 536298 - DNA, 100 bp, Homo sapiens
cgtcgtcgtacacgaagttgctggaagaaaatgagacagaagcagtgaccgtgcccacgccaagtggaagtagtggaggaagtggaagtcgagaaaacag

SEQ ID NO: 536299 - DNA, 87 bp, Homo sapiens
tgccggaggccatcgaggaagtgaagaagaatgtccagaaagagaagtgtatgacccgtctccagtatctccattcatctgctacta

SEQ ID NO: 536300 - DNA, 75 bp, Homo sapiens
gcctggcttaggaaggggagctgaggtccggggcccagttttccggagttgcgaataatcatgggccagactggg

SEQ ID NO: 536301 - DNA, 100 bp, Homo sapiens
gaattacttttcctccagcaggttctcaggatgaacgtgaagccagagaaaatgtgaagagagagcaagatgaggcctatcgcctttcacttgaggctga

SEQ ID NO: 536302 - DNA, 80 bp, Homo sapiens
cgcaaccccagatccatttacactttacagctctacagattctcccctgcccctggagaaggaggagcaggtccgacttc

SEQ ID NO: 536303 - DNA, 101 bp, Homo sapiens
cccgggagcgcgatgtggagcgcttctttaagggctacgggaagatcctggaggtggatctgaagaacggtattctgacaagtccctgtacacccagctgt

SEQ ID NO: 536304 - DNA, 100 bp, Homo sapiens
ctcagaattcatgattgaagaaatgcagctgtggatttctttaaccagatcaacatgttatatggaactattacagaattctgcactgaagcaagctgtc

SEQ ID NO: 536305 - DNA, 98 bp, Homo sapiens
tgataatgtggaggagatggactggctcataggatccagtgctgcctccttgtaccctgtgctcaactttctactctacgtgcctgagcttgcacact

SEQ ID NO: 536306 - DNA, 75 bp, Homo sapiens
gctgaatccagtaccaaaaacgtcaacaacagttttacgattcgggaactggagcctctcctctgtcacagtgac

SEQ ID NO: 536307 - DNA, 89 bp, Homo sapiens
gtgttccttccgctagtgatcctttgcaccctgcttggagacggacttgcttccggtgcaccttcgctctgccaggcgtctctgtgagc

SEQ ID NO: 536308 - DNA, 101 bp, Homo sapiens
ctgcgtggtggactgtggcaccggggagaagatgtcaaccggacactagaaggtggaaggaaacctcttcattatgcagcagattgtgggcagcttgaaat

SEQ ID NO: 536309 - DNA, 75 bp, Homo sapiens
attccatccctacggggctctatcactcaggctgaacaactttttaaagcaacaatgagttacctccttggaggg

SEQ ID NO: 536310 - DNA, 83 bp, Homo sapiens
ctattacccccagtatctgcaagccaagggggatatgagactttctactcggaatatcctgagtgttgcgtggatgtaaaacc

SEQ ID NO: 536311 - DNA, 100 bp, Homo sapiens
caaagacaggaggagtgggccctttgtgctttggcagcatgtaagcagctgtttgccaagaacccaggtcactgctaagaaagggtgccttcgggagaag

SEQ ID NO: 536312 - DNA, 101 bp, Homo sapiens
agaccaggctgtggaggagtggaatattgagaaggctgaggaactcagcaaccagctagctactcgagaggcagagatcctacaagaatccaggatgatga

SEQ ID NO: 536313 - DNA, 75 bp, Homo sapiens
ggtcccacgcagcctccaccacctgcccggaggacgggggccgctggttgcccggccactgcatggccatggggg

SEQ ID NO: 536314 - DNA, 100 bp, Homo sapiens
cagaggttcacaaaacaagtgtagtaggtacctgaaagaattccgcacagagcagtgcccactctttgtgcaacacaaatgcacgcagcatcggccctac

SEQ ID NO: 536315 - DNA, 73 bp, Homo sapiens
ctcatctgttccagggaggtgggattgaatatgtgcagcgggggctacagcgagtggggctagatccccagct

SEQ ID NO: 536316 - DNA, 90 bp, Homo sapiens
ttttgtttgattcctatagagacaatattgctggaaagtcctttcagaatcgacagccaccgcactgtgttcctgacacgtacagcaacg

SEQ ID NO: 536317 - DNA, 100 bp, Homo sapiens
caggatgtcaacatcactgtggccagcatccagggcattgtggatgcctaccgccaagccctgccccaagttcgcctctatggccctaccaactttgcac

SEQ ID NO: 536318 - DNA, 88 bp, Homo sapiens
cgctcctaagcctgcacagccgcggcggcagcagcagtgagaggacactcatgaggaccatgatacttccactgagaatacagacgag

SEQ ID NO: 536319 - DNA, 88 bp, Homo sapiens
catggctgactacctgctgtacaccctcaacaaacaccagcgctttggccgcggcgagtcctttgcacatgttggcaacacacgcatc

SEQ ID NO: 536320 - DNA, 76 bp, Homo sapiens
aagattgaagacatcaatggctgtccgaagaacagatcccaaatgggtgcaaatagctatgggcaacttggcctcg

SEQ ID NO: 536321 - DNA, 74 bp, Homo sapiens
caacgacacatttgacattgatccgatggtggttactgggtatcagctctgtgataacagcgtgggggtgctct

SEQ ID NO: 536322 - DNA, 51 bp, Homo sapiens
aaaagaaatcctgataagaactgctttcttggaactgcagttggctttttg

SEQ ID NO: 536323 - DNA, 100 bp, Homo sapiens
ctctgtgcctattcagcaattccctactggttaaactttgatgataaagttatgttaaagaaaatagaaatagataataaagtatcagatgaagaggata

SEQ ID NO: 536324 - DNA, 75 bp, Homo sapiens
ggaaatcctaatgacagtctccaaattcgcctccatctgtaccatggttgtggcagcactgcctgaaggtatgag

SEQ ID NO: 536325 - DNA, 100 bp, Homo sapiens
agactctccttgcttggaattctgcccactctgcggagttagcagtcacgacctccagcacaggctcaggctgcacgaagaaaaggttattaaagataga

SEQ ID NO: 536326 - DNA, 97 bp, Homo sapiens
ccctctcctacccagataccgatgttatactgatgtgtttttccatcgacagccctgatagtttagatcctactatgttgacagacatgatgaaagg

SEQ ID NO: 536327 - DNA, 83 bp, Homo sapiens
cattttactgtcaagacatttcttcggcattctgcaacagtgtgtagcccacaatgccctggagtgtgcacgagccatctacg

SEQ ID NO: 536328 - DNA, 80 bp, Homo sapiens
atctccactggacactggtcagaaacttctattaagacaagctttcccatgactgttaaagtcgatggtgtagctcaaga

SEQ ID NO: 536329 - DNA, 76 bp, Homo sapiens
ggcaggatgaggcgtgcaggcctgggtatgcactccagaaagctaataatagacttttgaagatcctcttagaagt

SEQ ID NO: 536330 - DNA, 90 bp, Homo sapiens
cccttcctgtcgctgacggcgactgcgggaggccagagtgatcagcagctggactgtgccttggacctaatgaggcgcctgcctccccag

SEQ ID NO: 536331 - DNA, 82 bp, Homo sapiens
cgcggcggaggacgcgcccggcgcccctgagccggccgagcggcgacggaccgcgagctgctgatgcaaggaatcccctggg

SEQ ID NO: 536332 - DNA, 98 bp, Homo sapiens
ggagcctccgctgcagcgcgatctgcgcgaccagaccggcccccccgagcccaaaatggagttaatcctgactgggagaagaaagtaattgagtattt

SEQ ID NO: 536333 - DNA, 74 bp, Homo sapiens
gccatggcagattcctccgggcagcaggttttgcaggctttggaggtactcccagtagcaccaccacctgagcc

SEQ ID NO: 536334 - DNA, 90 bp, Homo sapiens
cgagtttgaagagttccctgccgaagggaacctagaaaagttgttcttcatcgtggctcaacgggccttggtttcaacattgtaggagga

SEQ ID NO: 536335 - DNA, 74 bp, Homo sapiens
tttactctggggtcccggctgccctgtggcctcgctcctcggaggggaggaggccaaggagatgtgggaaaaga

SEQ ID NO: 536336 - DNA, 83 bp, Homo sapiens
gggggagtcgtaaacaaccctgaagagaacagccaggcctggccctgaatgaagccttgaagctcttcaagatgcactcccct

SEQ ID NO: 536337 - DNA, 75 bp, Homo sapiens
aaatctgttacttgatgaacttcagaagtggctgacaagattttgaaaaagaaagaataccctctttatataaat

SEQ ID NO: 536338 - DNA, 100 bp, Homo sapiens
actgaagctagcttatgctgttcgaggcaataaataatgacctggatgaccctgaaagaggaatgatttttgtctgctctgcaacccataaaaccaaatc

SEQ ID NO: 536339 - DNA, 99 bp, Homo sapiens
gaaaaagcactgtgatgactcattcaccccccaggagaagctgtggcagcagctcagaagaggacgactgcctgaagttacatttagagactgaaatca

SEQ ID NO: 536340 - DNA, 74 bp, Homo sapiens
cgacccccgtggccatgctgaagcggaggcggccgctgctcgaggaattagcttaccgaaaggagatggtgaga

SEQ ID NO: 536341 - DNA, 100 bp, Homo sapiens
gctccgcgcgccctcactgcagcccctgcgtcgccgggaccctcgcgcgcgaccgccgaatcgctcctgcagcagagattgccaacactcctgatagctg

SEQ ID NO: 536342 - DNA, 98 bp, Homo sapiens
caattttccaagtggcagattatggaatagttgcagatttatttaaggaatgatgagaagacagcagctgattacaagattttaggtggttcagtcct

SEQ ID NO: 536343 - DNA, 50 bp, Homo sapiens
agtaatatctggactttgaaattaatagactgccatcggataaagagtgg

SEQ ID NO: 536344 - DNA, 78 bp, Homo sapiens
cagttcgcccgtccccctgccccgttcacaatacctgatggccaaaagaaaggaagaaaatttttcctctcctaaaaa

SEQ ID NO: 536345 - DNA, 92 bp, Homo sapiens
tcggccttccgacgtgggcggtgggccccagccccacagaccagcccagcattcaggtgacttaagagattaaaattaatttggttgctgtt

SEQ ID NO: 536346 - DNA, 75 bp, Homo sapiens
agctgccgggctccttgcggaaggggattccacggaccaagtctgtagaggaagctggcgcgtatggcagccgag

SEQ ID NO: 536347 - DNA, 75 bp, Homo sapiens
cctggtcactagcggactcttcttcgccttcgaacctggctggaaatgagtacgacctgactggcctaagcacag

SEQ ID NO: 536348 - DNA, 101 bp, Homo sapiens
ccactatgcaaaatgtaacccatacatggattctccacaatcaatagctctagaggacaaaatcccagtccttggcacaaactcaggaaatggaagccgga

SEQ ID NO: 536349 - DNA, 88 bp, Homo sapiens
ccaggacccagggggccgccggagggcctgggccgagctgctggcggaaggagagttttacatggaagtggcttacagaaacttggcg

SEQ ID NO: 536350 - DNA, 101 bp, Homo sapiens
gcgtatcgatgagtttgaagcaatgtgtgactgcacagaaaagttacaaaacaaatttgactttttgcgctcacagttgaatgatatttcgtcatttaaga

SEQ ID NO: 536351 - DNA, 116 bp, Homo sapiens
ggaactcaggaacaaacattctgcacgcttcaagctctggtacacgctggacagagcccctgaaggcggctgagtgacagcccatcaatgaaaaaggagagcgagctgcctcgcag

SEQ ID NO: 536352 - DNA, 74 bp, Homo sapiens
ataggttgtcaaaattcacaaggcaaggtgactttgaaagactttgaagattatccaatgagaattttatatga

SEQ ID NO: 536353 - DNA, 97 bp, Homo sapiens
tatttgatgttgggtgtgaacaacatggtgaatatcgtttaacagatatgtgctacaaggtgagctgcctggaaatccctgggccctctggccccaa

SEQ ID NO: 536354 - DNA, 80 bp, Homo sapiens
aaagaagagaatggcaaagtatgagaaggctgagcgttgtggagaatcagaagccgcagatgagaagggttccatcgcct

SEQ ID NO: 536355 - DNA, 100 bp, Homo sapiens
atgcaaacccgtcacacagaccaaggccacttcttgcaaaccacatacacagcacaaagaatgtcagacaggtgaagaacaaattggttttgagctagtg

SEQ ID NO: 536356 - DNA, 98 bp, Homo sapiens
tttgttaaggattccaagtaactcttatttgtggatgattcaacagccacacaaagcagcaacattttttggatgcattgggatagataaatttgggg

SEQ ID NO: 536357 - DNA, 98 bp, Homo sapiens
ccaggttgccccgactcccaccgggactcctaccagcagcaacctcatcattgtggccgaggcagaggtcctgggcctatgtcaagaagtgcaaaaac

SEQ ID NO: 536358 - DNA, 95 bp, Homo sapiens
caaggtttgaaaagcagctggcctgcaagacatctcgagatctggcgtgttttatacagtttgaaaatgtcaacatttactatgggactcagcat

SEQ ID NO: 536359 - DNA, 83 bp, Homo sapiens
aaagataaaggcacaggacgtgagcagcagagttatggaggttttgatgactatggtggctataataattacggctatgggaa

SEQ ID NO: 536360 - DNA, 98 bp, Homo sapiens
ttggagtggacgtcattgccgggaacgagcgagtcgccgctgcagccctagtgactgcggcctgcatcccgtgtggcttcctgttgtggtgcatggcc

SEQ ID NO: 536361 - DNA, 100 bp, Homo sapiens
aaattcatcatctgaatctgatgacagttctctggatatgtctcttaaagcatttgatcatggaaaatatgagagccacacccgtgttcacacaggtgag

SEQ ID NO: 536362 - DNA, 101 bp, Homo sapiens
aaaaaaaagacctgctttgccctgggaaatagtaaccctgccaaatacatcagcttgtaggagacagagatctttaatctcatgaagtacgacagctacag

SEQ ID NO: 536363 - DNA, 98 bp, Homo sapiens
gctgttgttgctacacgtggatgtgaaatgagtcaagcggaactttgattacaaggaatttcatatactagtccctgcaggaagcatcacccaggctg

SEQ ID NO: 536364 - DNA, 80 bp, Homo sapiens
aaaagactgattggctcttcctcaatgcttgtgtgggccaaagcttacttgaggattgctgtggaagtggtaagaagatt

SEQ ID NO: 536365 - DNA, 92 bp, Homo sapiens
atacgactgaccctggagctgaaggccaggttttgcagtggtctgaggttaatgacaacaccaacacagcggggtcccctggggaggtgctc

SEQ ID NO: 536366 - DNA, 83 bp, Homo sapiens
ccgccgcgccgcccgtcgggcatggactcgggccgggacttcctgaccctgcacgcattgtcccagatatagccgttggtaca

SEQ ID NO: 536367 - DNA, 98 bp, Homo sapiens
acagcaagaggatcatccaccgagatctgaaagctggcaacgtgctgatgaccctcgagggagacatcaggctggcttcccacatcacaaactttgag

SEQ ID NO: 536368 - DNA, 75 bp, Homo sapiens
aaaatgccaaaacttataatgagcctggctctcaagtattcaaggaaagattcagatgaggcagacttggtgctg

SEQ ID NO: 536369 - DNA, 98 bp, Homo sapiens
attaatgccatgctcatggcaaaagggaagctgaaaccaactcagaatgcttctgagaagatgaggctgctgtcatttgtggtgttggctctatttgc

SEQ ID NO: 536370 - DNA, 100 bp, Homo sapiens
cttcaatgctgttaactggattgagtccagctcttgggatggaataaaggttggggagactacacctgacaaacttttcactcttatagaagtggaatgt

SEQ ID NO: 536371 - DNA, 50 bp, Homo sapiens
acaacttcgcccgggacttcatgattgtggattctctaagtgagctagag

SEQ ID NO: 536372 - DNA, 50 bp, Homo sapiens
tggatatgaaactggaagacatcctggtgccagtcacgaattgcccgaac

SEQ ID NO: 536373 - DNA, 83 bp, Homo sapiens
ggatgatcgaggttgtttgcaacgaccgtctggggaagaaggtccgcgttaaatgccccagaggtgatccgaatgcaggataa

SEQ ID NO: 536374 - DNA, 100 bp, Homo sapiens
cgcagcctagggcaacgtccaagtctccgaacagagccacacgactcccgctggctcaatggtggagctggaacgagccaagacgcagctgacatcaatg

SEQ ID NO: 536375 - DNA, 75 bp, Homo sapiens
tggaattgaagaatattcccaagtccttcacccggcgtacacagactttactaaaagagtacaaagaaagggata

SEQ ID NO: 536376 - DNA, 75 bp, Homo sapiens
caggctccctgcctccctgcgtggtggactgtggcaccgggcatggaagaggagatggttcgtgttacgcagtgg

SEQ ID NO: 536377 - DNA, 82 bp, Homo sapiens
gaacaggagccgctcttaggcgacacacctggaagcagatcttcctcagaactgtgatcctaacattcccctagttgctcag

SEQ ID NO: 536378 - DNA, 82 bp, Homo sapiens
gcgtctctctgctgcggcgcggggaccgctgtgctctcggaggaggcctcggtggtaccagaagaggaggggctgatgtgaa

SEQ ID NO: 536379 - DNA, 98 bp, Homo sapiens
acctggaccacggcgcagacgcgggcgagctgcggctcggacgccagcggacacgcgggcgaggtcactatcatatgacaaaggctttgccgcagttc

SEQ ID NO: 536380 - DNA, 98 bp, Homo sapiens
tgacattgccactgagcagccgtacaacttttggtgaccattgtgaggtagatattttgttctaattttccagatgaggaagctgagaccctaaaagg

SEQ ID NO: 536381 - DNA, 80 bp, Homo sapiens
accggctgacctcgctgtacgccgagcacccaggcgactgcctcatcttcaagacgttcatcttcactgacggggaagat

SEQ ID NO: 536382 - DNA, 74 bp, Homo sapiens
gagagtttttgtgaaggaggaatgttggacagtgacacacttaacccaggtgaaatgacaatggatgctctgtt

SEQ ID NO: 536383 - DNA, 83 bp, Homo sapiens
cgctgggctagtgctaggccacttcatagcttcggggatggtcaatcaggtgcttgaggaatccaaagccctcgtgcgctgca

SEQ ID NO: 536384 - DNA, 105 bp, Homo sapiens
catctatcattatgaattggatatcaagccagagaagtgcccgaggagagttaacagttaatgaccagccacggcgtccctgctgtgagctctggccgctgcctt

SEQ ID NO: 536385 - DNA, 74 bp, Homo sapiens
aaatatctccatgacaatcagatagttcaccgggacataaaggtttttgattggtcaaggagcacatgtagggg

SEQ ID NO: 536386 - DNA, 50 bp, Homo sapiens
cgaaggcgaagcggcacaacctgggcagaatccagagaccacatttgaag

SEQ ID NO: 536387 - DNA, 75 bp, Homo sapiens
aggcctcggactccgcggccggcccggcgcggcccagcgccctcaggtcctcagaatggttggaatgaccctcca

SEQ ID NO: 536388 - DNA, 98 bp, Homo sapiens
acaaaggaggatgttaaaagttacctgtttcggaatgcttttgtgctgctcacagtcaccgctgtcattgtgggtgtggggatattcagctttgccag

SEQ ID NO: 536389 - DNA, 87 bp, Homo sapiens
gtgaagtgctccgtcgcccttgcctccaggttgatgataattagaagcatgctttccactgaacttcccgacaacatttgttatgca

SEQ ID NO: 536390 - DNA, 98 bp, Homo sapiens
ctgcaactgtgatgtggggtactatgggccccagtgtcagtttggtgtgggtacgccacgctgcatcacgtcattgacaagtccacagaagaccggat

SEQ ID NO: 536391 - DNA, 75 bp, Homo sapiens
atttcacggacactgaaagcagagaccatggagcttcttggttaatgactccagagagtaagatcagattcgtcc

SEQ ID NO: 536392 - DNA, 101 bp, Homo sapiens
ctccatggcagcagcgcgggccagagcgcagcgccgagcgcggcccgggcgccatcgagccttggcggcggacgtgcaggccaagactaaggggctgcaga

SEQ ID NO: 536393 - DNA, 135 bp, Homo sapiens
agaacttgcaagaagatgggcattaagacagttgccatccacagtgatgttgatgctagttctaatgaagctcgactgagaattgtaaaaactcttgaagacattgatctgggccctactgaaaaatgtgtgaga

SEQ ID NO: 536394 - DNA, 95 bp, Homo sapiens
ccataaccagtcaccgagaaacacttatcagtgtgccatggggaaacaagccatgggtattcacaacattgtctgtgaccaagcgctctggggca

SEQ ID NO: 536395 - DNA, 99 bp, Homo sapiens
ctcgtcgggaagaatcgtttggtctcctgccgtgcccggaaatctggcattttttaaagtttgcgccccacaaagaggaaatattccaaaggtactcag

SEQ ID NO: 536396 - DNA, 75 bp, Homo sapiens
gctactgcgaagacagctggcagatgagacaaaaggacccagtgaaaggaatgacagcagatgactaaagccgcc

SEQ ID NO: 536397 - DNA, 97 bp, Homo sapiens
ggaagtccaagtcaaacgcagaaggactgcctcactgagcaaccaagagtggggaagctgaggcaggaagccctttagtcacttgccgaaggccacg

SEQ ID NO: 536398 - DNA, 83 bp, Homo sapiens
gcagcaaataattgtcagtctaacagaatcctgtcggagttgtagccatgccctagcgactgcatttgcctccagacttgtca

SEQ ID NO: 536399 - DNA, 50 bp, Homo sapiens
gagctggttggggtggaccagaaatcagacggagtctcgctctgtcgccc

SEQ ID NO: 536400 - DNA, 100 bp, Homo sapiens
gatccagaacaacccccacgccagctacagcgcccctccgcaggaacgaatttcatatacacctccagagagcccagtgccgagttacgcttcctcgacg

SEQ ID NO: 536401 - DNA, 74 bp, Homo sapiens
gtctgcgagccaggattcccgatgccatggacaatattaccaggcagaaccaattctacgatacccaagtcatc

SEQ ID NO: 536402 - DNA, 74 bp, Homo sapiens
ccgaaggagacagtgaatcctgttcagccagagaacaagaatgtgagcacttttcaggattagaagaggctgtg

SEQ ID NO: 536403 - DNA, 83 bp, Homo sapiens
ctgaagacttggatgaaaatatggattacaggttgatgtgggaggatttcagatgcatgccaggtttccactgattgccagaa

SEQ ID NO: 536404 - DNA, 73 bp, Homo sapiens
cagacatctacaaccttcgatctcctgacgagaggaacagcacagcatgctgggctctggatttaaagctgag

SEQ ID NO: 536405 - DNA, 98 bp, Homo sapiens
gtggatcacacgcgccggctgctgctactactaccactttgggctgatggcaactgcctgctatgggatggatgaagaagagaaccactatgtctcgc

SEQ ID NO: 536406 - DNA, 50 bp, Homo sapiens
ccccggccctcctggagccaaaaacactctggacctggaggaaactggcg

SEQ ID NO: 536407 - DNA, 98 bp, Homo sapiens
acgaatgcttgaagacagagatttattcgtaatgcgactcaaagctgcacggcagtctgtttatgaggtccctccttgtggtccatttctgggcacca

SEQ ID NO: 536408 - DNA, 100 bp, Homo sapiens
aacttcgctgagcagattggctgtgtggagttgcaccagcgtgcccgggagtacatctacatgcattttggggaggctgtaacagaagacaagtacgaaa

SEQ ID NO: 536409 - DNA, 50 bp, Homo sapiens
ctctcatcgaggcccaaaccgccaaggttactataacaacagtaccaagg

SEQ ID NO: 536410 - DNA, 98 bp, Homo sapiens
gaagagacatgagaccatagccaaacccccagatatccatttggggatgaagtctactttgacagctagcaaggcgacatgcaactgttgttgaatga

SEQ ID NO: 536411 - DNA, 76 bp, Homo sapiens
agatgctgccagggtccctgaagagggaagacacgcggaaacaggtgcagcttcaagcttaggaccacccaccatg

SEQ ID NO: 536412 - DNA, 78 bp, Homo sapiens
aggtggaaaaatgcacaaaatacatgcagaagatggtggcagatctggcgcctgtgtctggcagagctggtgtgagac

SEQ ID NO: 536413 - DNA, 75 bp, Homo sapiens
taccgcccctccgcttccagacattctcagctgtcaggtcctggacccaagccagaagcctctgcaaagcttcct

SEQ ID NO: 536414 - DNA, 75 bp, Homo sapiens
ttggctttccagagggcagtgtagagatgtggcctcagctgagatgctggagttcatgaaaagcgcgcctctgac

SEQ ID NO: 536415 - DNA, 75 bp, Homo sapiens
cttttccaatgtggaatcctgggccttcattgatagagctttggagccaaacccttctgatgatccaagggcaag

SEQ ID NO: 536416 - DNA, 100 bp, Homo sapiens
tcctttgcagttcacccttggaggaaactctgatgaggaagaaagtgcttcagaatctgaactttggaagggtccactaccagagacagatgaaaaatca

SEQ ID NO: 536417 - DNA, 98 bp, Homo sapiens
cgctgagcaggtgcagccgccacgctcacctgcaactgtggagatggctcagcgacttcttctgaggaggttcctggcctctgtcatctccaggaagc

SEQ ID NO: 536418 - DNA, 51 bp, Homo sapiens
cttcgtctcccaccgactgcctgtttaaggcaggacaagcgtttagaaagt

SEQ ID NO: 536419 - DNA, 50 bp, Homo sapiens
ccttggatcccaaatacattgatattgctccaagaagcccaagaaacatc

SEQ ID NO: 536420 - DNA, 75 bp, Homo sapiens
aggccaggaagaaggttctcaaacaaggtttgtccagaggggttgcgtttatccggtttgacaaacggtcggagg

SEQ ID NO: 536421 - DNA, 75 bp, Homo sapiens
ccgtggaattgaagcagttggtggcaaattaagggtacagctcgcagaaagaagaaggtggtacatagaacagcc

SEQ ID NO: 536422 - DNA, 80 bp, Homo sapiens
gcagaaggtctctggagacatcttcagcagaagtccattggaatattaagcccaggagttgctttggggatggctggaag

SEQ ID NO: 536423 - DNA, 73 bp, Homo sapiens
ccggggctgcactgccaccctgggcaacttcgatgaagcgccctcagttcagcaagccgccaggaggccacca

SEQ ID NO: 536424 - DNA, 96 bp, Homo sapiens
aaaaacgcttttcacgtcacctggagagatgcacagaaaatgtttcgatgaaagatcctccggacttattggacaggcagaaatgcctgaacgcct

SEQ ID NO: 536425 - DNA, 98 bp, Homo sapiens
cattgatggtctcaatgttgccaaaatgtttcctaaagttcgtgaatctcaactttggaagcatcagttcacagcagtaatgcacactgtacagataa

SEQ ID NO: 536426 - DNA, 100 bp, Homo sapiens
gccatcgccttggaccccgctcacggggtacctgctcttccgagacttctgcctgaaccacctggaggaggccaggcccttggtggaattctatgaggag

SEQ ID NO: 536427 - DNA, 75 bp, Homo sapiens
ggcacacagaattctctacatttgtgaaagtcagtttctgaggaatttcatcagatgagttttgatcatcctgag

SEQ ID NO: 536428 - DNA, 90 bp, Homo sapiens
gcgggccctgcgcgcctgatgggtcgaggcggacgcgcggctgcgtcaggtcacactgtgaacaagatgcgtaaacactcagattcagaa

SEQ ID NO: 536429 - DNA, 82 bp, Homo sapiens
tcgggagcgcaaggtcgccctcaaggccatgatcaaaacgagctgcagaggctggagacagagttgggccaacccgctgagc

SEQ ID NO: 536430 - DNA, 75 bp, Homo sapiens
ggacttcctccccagcctttgggcttctatccgcagagaggagatgaaggagttcagcagccagctggccggcca

SEQ ID NO: 536431 - DNA, 98 bp, Homo sapiens
tgaaacagagaaagataggcggccatggtccaaccttgaagcatccagtcctggatgagccaatagctgaagctgtctgtattatcgcagacacggat

SEQ ID NO: 536432 - DNA, 100 bp, Homo sapiens
agaaagtgaagctgtttcgggccagcgacccgctgctcagcgtcctcatgtggggggtaaaccactcggatcagtttgacaacttagaaaaacacacaca

SEQ ID NO: 536433 - DNA, 83 bp, Homo sapiens
gccgcatggaggccggctgaggagcgccgctgcctcgcctcgctacgagttccagggagctctgtcctggtgaccgtgcccgg

SEQ ID NO: 536434 - DNA, 100 bp, Homo sapiens
aggtacctgttccgatgctgctactgctgtttctggtgtcttgacaaatacctgctccatctcaaccagaaggaagaggcccagcagaagggactcgctg

SEQ ID NO: 536435 - DNA, 100 bp, Homo sapiens
caaagccccggccacctcggcctcttcctgttgcaccaggttcttcgaaaactgaagcagatgttgaacaacaagaaatgcactcggtgatggaaagaga

SEQ ID NO: 536436 - DNA, 82 bp, Homo sapiens
ggcgccggagacgatgccgttgtttaagaattgtttaagctgcatcaatggagcacatacagggagcttggaagacgatcag

SEQ ID NO: 536437 - DNA, 75 bp, Homo sapiens
cagggtactgggccagtcatttagccgggcgaaagtatcatatcaggatcatatccagagtcccaaacatttctg

SEQ ID NO: 536438 - DNA, 100 bp, Homo sapiens
aaggtcatccagaggcttgtggagttgatccacccgagccaggatgaagattgtctttggtgcaacactaacaaggcttgtctggactacccagttacaa

SEQ ID NO: 536439 - DNA, 75 bp, Homo sapiens
aaccatcgcagttggaagcccatggggcagatatggatatgtgtgtgccacaaaaattatgaaactgaggaaaat

SEQ ID NO: 536440 - DNA, 127 bp, Homo sapiens
tttaatagatgacaatgatctctaccgatgggaagtccttattattggccctccagatacactttaagactgcatgacctggtcctccccctggtcatgggtgtacagcagggtgaggtcctaggca

SEQ ID NO: 536441 - DNA, 100 bp, Homo sapiens
gctcgatgctggacatacttgaccggggtcatcctagggaaaacactatcctctgagatcccagatcatgagctgaagaaaaggtgactggtctcatgag

SEQ ID NO: 536442 - DNA, 100 bp, Homo sapiens
tattggccgacaaggaagtgaagaaggcgcatcactcccagctgcgcaaagcttgcgaggtggcgttaggttgatgataattagaagcatgctttccact

SEQ ID NO: 536443 - DNA, 100 bp, Homo sapiens
gtttgtcgccagaaggaagatggcggatctggaggagcagttgtctgatgaagagaaggaacaacttttcagcctaatagcaactcttatgtaaatcctg

SEQ ID NO: 536444 - DNA, 88 bp, Homo sapiens
gacttggacaacccgaggtcgctggccctggatcccaccaaggggatcccgctgcacaagttcacgtccatccgccggaccatgtcgg

SEQ ID NO: 536445 - DNA, 100 bp, Homo sapiens
acgaaatggattggagtgaaccggagaccccgaaaacggaagcgcagggagaaggaagaggtgtttgaaaaggtgtcatggagaaactccagctgggccc

SEQ ID NO: 536446 - DNA, 100 bp, Homo sapiens
gtcgccgcgggatttggagctgcctagcctcgcggtcggttctgaagaaagtctccaaatacattcaagagcagaatgagaagatctatgctccacaagg

SEQ ID NO: 536447 - DNA, 100 bp, Homo sapiens
gggagacactgcgaaagcaaaccgaggagaataacctgggtatcttgtggtctgaaagagaagaaattgaaactgcacaggcttacctagagtcatcaga

SEQ ID NO: 536448 - DNA, 50 bp, Homo sapiens
aagctccccacgtggttccgtgagccaaaaacctgtatatcatctccgtg

SEQ ID NO: 536449 - DNA, 100 bp, Homo sapiens
taatgtcaaaagaatctcagagattagtgggatttgccctcagaagagacctgacaattgcaataggacccactcttctgtttgtaaaggtgacccaagg

SEQ ID NO: 536450 - DNA, 100 bp, Homo sapiens
cctacgagacaagaagggcttcatcatcaagcagatgaaggaggatggcgcctgtctcttccgggctgtaggtgaaaagcaatcacagtgttaaaagaag

SEQ ID NO: 536451 - DNA, 83 bp, Homo sapiens
ggccaagggaccaaggtggaaatcaaacctgctggagccagttctgcttctcggcaaggagcgatttgctggtgtagacatcc

SEQ ID NO: 536452 - DNA, 50 bp, Homo sapiens
agcctgcggagcctgtggggcaggatgaagtgtcctcttgctagcaccaa

SEQ ID NO: 536453 - DNA, 100 bp, Homo sapiens
ttcctggagtgtaccctccaaatagcaaatgtacttggaaaatcacaatttcaatgggacagatgttacaagattttggaaaatttcttgggatgtttct

SEQ ID NO: 536454 - DNA, 90 bp, Homo sapiens
tgtcctccctcacctaccaacggcatagcaatcgcacagctgaggagtttacaggctggtaacctacatctttgtctacgagaatcccat

SEQ ID NO: 536455 - DNA, 75 bp, Homo sapiens
cagcgctgcctttccttatgaagaagacacaaaacgtactcaggaaaagtggggatttccaatgtgccactattt

SEQ ID NO: 536456 - DNA, 90 bp, Homo sapiens
gtacgagctttcgccaaagagcttttcctaggcaaaatcaagaaggtggtcctgccatcatggctgtcctctgcaaaggtctcctcgctc

SEQ ID NO: 536457 - DNA, 88 bp, Homo sapiens
cagctgaggatgaaggagaacatatttgccaatgatgattattccccaccttctaagagacaaagaccaacgagccaccacagccacc

SEQ ID NO: 536458 - DNA, 90 bp, Homo sapiens
gccgaggcggagccgctgtcctcgtccccagcggtcccgcccaacgcccgactctgtatgatctcgtgaaatcttgagagaaactgaatg

SEQ ID NO: 536459 - DNA, 75 bp, Homo sapiens
gaccggggcatctccaacatgctggatgtcaacggcctctggaaatcctcattgacgattcaatttgttgaaggc

SEQ ID NO: 536460 - DNA, 75 bp, Homo sapiens
ggaagaatgaatctggcacatggattcagtatggagaagaggaaacatggtagaatggtgcttacctcaagatat

SEQ ID NO: 536461 - DNA, 50 bp, Homo sapiens
gcgggaggaacatgacatcgcggagctctgcttatgataatgtcaacaaa

SEQ ID NO: 536462 - DNA, 101 bp, Homo sapiens
tactgaaagatatgaatcagagttcattggccaaggagtgccccctttcacagggacaagcagatcttttgaaatatgctaagaatgagacattggagaac

SEQ ID NO: 536463 - DNA, 75 bp, Homo sapiens
catctacttcacaggaattgccattttcctcaggttctgaatcttgtgcctggagaaccagagaggaccctggag

SEQ ID NO: 536464 - DNA, 90 bp, Homo sapiens
atctgatcctccacttcagagaacaggggtcctcactttacttatcaatgcagcctacaaacccagccgtgtccttcgggagctccagct

SEQ ID NO: 536465 - DNA, 101 bp, Homo sapiens
gctttggcataggatcagaaattctgaagaatctaagccagggcaagagtgctgacttcactaacttcgatcctcgtggcctccttcctgaatccttggat

SEQ ID NO: 536466 - DNA, 50 bp, Homo sapiens
gacacggcctgcatcgggcccacgctcagacagttgatattcataaagag

SEQ ID NO: 536467 - DNA, 75 bp, Homo sapiens
ggctaagatgctgccgactctgggcggcgaggaaggcgtctcccgggaactttatattgctgttggaatatctgg

SEQ ID NO: 536468 - DNA, 98 bp, Homo sapiens
ctgcacacaaggtcgtcctggctgcctgcagcgactacttcagatgatctgttacagactgtacagagcacatctggattagctattattctttttat

SEQ ID NO: 536469 - DNA, 71 bp, Homo sapiens
aatttgcttttgttcatatatcttttgcacaatttgaactgtcacaaggtttttggattcaaagcataaaa

SEQ ID NO: 536470 - DNA, 100 bp, Homo sapiens
agaagcccagcttttccatcctggagatctacaggatttatcaaatcgagtcactgtcaatgtgtggattctcatgccatataacttgtgtaaacaaagc

SEQ ID NO: 536471 - DNA, 100 bp, Homo sapiens
caaacagcggcgtttcacggtggcacatacatgtttcttatctcagtcatcactatggtgcttctgacgttgatgactgtcacactggatcctcctcaga

SEQ ID NO: 536472 - DNA, 75 bp, Homo sapiens
taatgctctgcatcatgctgcactaaggggaaatcccagacgaagttatacggaagcgtctcctcattgatggag

SEQ ID NO: 536473 - DNA, 100 bp, Homo sapiens
gaattccccacttgaactctgccgaattcctgtgccacctcctcctttagaaaactgatcttaatacaggcgactgataacgttcaatgaagcggacgaa

SEQ ID NO: 536474 - DNA, 99 bp, Homo sapiens
ggatactatggtgctccatttgaacataaggtgcagtgctttgaccccaaggaggaccggtggagcctgcggtcaccagcacccttctcacagcggtgt

SEQ ID NO: 536475 - DNA, 75 bp, Homo sapiens
ttacaaaccgaacttggccgcgcacatgcccgccgccgccctcaacgccgggggggccctcagcctcttggcctt

SEQ ID NO: 536476 - DNA, 104 bp, Homo sapiens
gtttaatgaccttgttatcagtgatggctcttctctggaagatcttgtggcttttattgagatggagacaagagaagatgcaatggcaatggttgaccattgtt

SEQ ID NO: 536477 - DNA, 100 bp, Homo sapiens
gggagctctcagtaaaattgcatgataaagttcataccgtagtagcatcaaacaatgggtcagtgttctcggatttccatttaaacagggttaatttgga

SEQ ID NO: 536478 - DNA, 100 bp, Homo sapiens
ctgcgggcccagcggcttggtgcgggagctggaggagctgcgctcggagaacgactatctcaaggagccgaggaggtgctgctgctggcccggcggacgg

SEQ ID NO: 536479 - DNA, 82 bp, Homo sapiens
tcagttggaagcagccgatccagcctgcggagcctgtggggcagggtatttgtggtgcagcagattcccaacagtaacctcc

SEQ ID NO: 536480 - DNA, 71 bp, Homo sapiens
aaaggtgaccaagcccaaagaggagaaagatgcttctaaggtaacaacatgctgtaccccaaggaagacaa

SEQ ID NO: 536481 - DNA, 100 bp, Homo sapiens
ccgaacgatacacacgttggatcaaccagctgacgccggagcagctcctaacccaggtcaaaatgcagatcttcgtgaaaacccttaccggcaagaccat

SEQ ID NO: 536482 - DNA, 71 bp, Homo sapiens
tcacactgcagaactgggttctggactttgggcgtcccattgccatggaagaggatcacctagcccgggta

SEQ ID NO: 536483 - DNA, 82 bp, Homo sapiens
aaaaaaggaggccaaagactttgtgtcacaacataatgaaagttgctcaagccaaactggaaatgataaaacctgaagaagt

SEQ ID NO: 536484 - DNA, 75 bp, Homo sapiens
cagacacttgtcctgaggttggattctttgatgtgttggggaatgacaggaggtgtgaaggaattacaagtccag

SEQ ID NO: 536485 - DNA, 83 bp, Homo sapiens
aaggagagtaaagtcagcatgagcaaaaactccaaactcctctccaccagcgccaagaggctgaccaactgactgaagagcag

SEQ ID NO: 536486 - DNA, 100 bp, Homo sapiens
ataatatagctggtattgaagagttacagctcttttgaggaagcttaagcagcaatccagggaaagtgttgaagaaaaacgacctcgattattaaaagcc

SEQ ID NO: 536487 - DNA, 100 bp, Homo sapiens
cagcactggggaaacgatccgctcccaaaacgagtgatcagcagctggactgtgccttggacctaatgaggcgcctgcctccccagcaaatcgagaaaaa

SEQ ID NO: 536488 - DNA, 98 bp, Homo sapiens
aacttcttcagaattagaaaggagctgcttcccaataaggaaacagaatcctatccatcttcttcaccgatatggtttgtggattctgaagacccaaa

SEQ ID NO: 536489 - DNA, 51 bp, Homo sapiens
cgcggcgcatcacggtgcgcgtggccggctaccggctctctgaccagttcc

SEQ ID NO: 536490 - DNA, 74 bp, Homo sapiens
ggcaaagcagctacacaaagagggtcatctcttctattgtacctgcagtgttttacctcaatcatatatccaca

SEQ ID NO: 536491 - DNA, 82 bp, Homo sapiens
gaagtagaggatgccgaggagaaaacagcaggcacccaagcgggcggcaggtcatactccctgtcacaaactccagctgaac

SEQ ID NO: 536492 - DNA, 100 bp, Homo sapiens
cagggctcgtcgcagtttcgcagccagggcagccaggcagagctgcacccgctgccccagctcaaagaaacatgggctgaggcttcatcttcgaaacccc

SEQ ID NO: 536493 - DNA, 100 bp, Homo sapiens
ctgatcgagaagtttgtagacacaccgaggaatttagaagctccagagatgccagtatattctgtaaagggccataaagaaattataaatgccatagatg

SEQ ID NO: 536494 - DNA, 50 bp, Homo sapiens
ggaagcccaaatattttatccaggaggagccatatattgaagaccatgtc

SEQ ID NO: 536495 - DNA, 100 bp, Homo sapiens
ttcgtcgtggcaacgttgctggtgacagcaaaaatgacccaccaatggaagcagctggcttcactgctcagattctacaggagagagttaaaaagacttg

SEQ ID NO: 536496 - DNA, 75 bp, Homo sapiens
cctcactgcagaggtgctggagctggcaggtcacaccgacaaatctgaagcgggtttgccaggggagtgtacccg

SEQ ID NO: 536497 - DNA, 100 bp, Homo sapiens
ctggcctgctgctggcccgcagggaactgtggctgcaccatctgtcttcatcttcccgccatctgatgagcagttgaaatctggaactgcctctgttgtg

SEQ ID NO: 536498 - DNA, 82 bp, Homo sapiens
gaaacatgtcaggcccaagaagcagcatgagatccggaggctgggagagggccctgtggtaggaggctggtacaaggttttg

SEQ ID NO: 536499 - DNA, 90 bp, Homo sapiens
cactttagaccctccacctaattgcagaacacacatgcaggacttgaaagatgttactaataatgtccactatgagaactacagaagcag

SEQ ID NO: 536500 - DNA, 97 bp, Homo sapiens
ggattacaatttgatcgctgggaattctccaccttaaagaaggtttatcaggtagaagatgtgtgtgaagaagaaatgccagaagagtcagatgaat

SEQ ID NO: 536501 - DNA, 74 bp, Homo sapiens
ctagaatgcatcagtgcccttgtggcgaatggggctcacgtcgagttctgattgcccaagagaaaatggcaaca

SEQ ID NO: 536502 - DNA, 100 bp, Homo sapiens
cgggccgcaccgccagggactggggtgagcggcccagagacggggtctgactgtgttacccaggctggtcttcaactcttggcctcaagtgatcctcctg

SEQ ID NO: 536503 - DNA, 80 bp, Homo sapiens
aatgttcaagtttaccaaaagagaggcaccgctggaacactaatgagtgaacgagataattgggagagacatgtcccaga

SEQ ID NO: 536504 - DNA, 51 bp, Homo sapiens
gccaaggtcttagcagaagatggtctctaattaacagaagatggcaaagcc

SEQ ID NO: 536505 - DNA, 90 bp, Homo sapiens
tcctggcccttgggtgtccagccctacccacaggccttcctgatgcgcttgcctgctccctggtctctctgcatggggaaggagtgttcc

SEQ ID NO: 536506 - DNA, 100 bp, Homo sapiens
tctttgaactggaccccgcgagcaccagagtcggcgtaactatcgcctgacaggtattggcataaaggatgtttccattgtgaggtctgcaagatggcac

SEQ ID NO: 536507 - DNA, 90 bp, Homo sapiens
ggcagttgcaggcgagcaggcgaggaatcgccgtggcgtcttggtgttctccacgctggttcgcagtgagaaggcaaccaaagtgcagga

SEQ ID NO: 536508 - DNA, 74 bp, Homo sapiens
cttttattttaagcttccacgtgtgagtgagaacatcacaggctggcatgtatgaagcagttaatgaagtttac

SEQ ID NO: 536509 - DNA, 90 bp, Homo sapiens
cgagaaaccatgagtgtaaggttaccccagagtatagacagtattctaccttgtaaatactgttatttgtatatactgtaaatgatgaca

SEQ ID NO: 536510 - DNA, 100 bp, Homo sapiens
gtcgaagcgagggtctgaagttcacgactactagaaggggaggggagtggaaaggctctcagtgaaaaaggctatggaaagggcaaatggaatggagctg

SEQ ID NO: 536511 - DNA, 90 bp, Homo sapiens
cttgaaaaagctgccctgagacggtgtcccgccgaaaggtacaccaggggttggaaaaaccacactaggcaaagaacttgcgtcaaaatc

SEQ ID NO: 536512 - DNA, 100 bp, Homo sapiens
taccgcaactctcagttcgagagtaaaggatttggtgctatggagaaatttttggtagaatataagagtgcagtggagaagaaactggcagagtacaaat

SEQ ID NO: 536513 - DNA, 96 bp, Homo sapiens
ctgaagtgggtgtacctgtttccgtctcccactttgacttgcacgaggagatgctgtgggtggggagccacggggaaaccttctggcgaattccag

SEQ ID NO: 536514 - DNA, 100 bp, Homo sapiens
tcgcgccacgctcagcagcatcagacacatgatccgcaagaacaagtaccgccccgacctgcgcatggctgatgaccatggttatggtgtttcttatatc

SEQ ID NO: 536515 - DNA, 100 bp, Homo sapiens
gttttaaatcaagatttaacattccaacacataaaaattatttatccaacagctcctcccaggattcagaatccatggctggaagaggtagtaaggccat

SEQ ID NO: 536516 - DNA, 80 bp, Homo sapiens
cgccaaacaatcagtttatgatgggaggccggtattataacagatggagtgaaggtacctgagcgcaggaaccatggtct

SEQ ID NO: 536517 - DNA, 51 bp, Homo sapiens
taaggattccaagtaactcttatttgcgggctacattgagagacctcagct

SEQ ID NO: 536518 - DNA, 100 bp, Homo sapiens
tcccgatgccacgttacatcaacacggagcatggaggcagtcaggactcgctcagcagcagcctgaaaacttgctacaagtatctcaatcagaccagtcg

SEQ ID NO: 536519 - DNA, 82 bp, Homo sapiens
agccgcggatctcaccgccgctcagggttgattcttcaccacactgaaaccattaggaaaaatccttgtggttaacagcaga

SEQ ID NO: 536520 - DNA, 81 bp, Homo sapiens
cgggcagcggctgcctgggcactatggaggtgaagagcaagaaactggcgatggaatatgagaggagccctctggaaagaa

SEQ ID NO: 536521 - DNA, 75 bp, Homo sapiens
atcgagtacatggcccccgaaatcatccgtagcaagacggggcatggcaagggcaacaaaccatggatttctctt

SEQ ID NO: 536522 - DNA, 99 bp, Homo sapiens
caaaattatatctcccaagaacaaccctcccaccattgtacaggacaaagtgcttgctctgatccagacatggagcccaaacctgcaaccaagaaggct

SEQ ID NO: 536523 - DNA, 98 bp, Homo sapiens
acctgtgcgcggctgcccaggagaacacccgggtgatagtggagatgatccatttcaaggacttgctgctgcacgagacctacctggaggaggagctc

SEQ ID NO: 536524 - DNA, 100 bp, Homo sapiens
gcctccctggtagctgggattacaggtatctcgggggagctttgtgccttgatggatcaagttcatcatatgcagcactcaaaatggcagcatccttcgg

SEQ ID NO: 536525 - DNA, 83 bp, Homo sapiens
aatatttaagaaagaagatgttaactttcaggtgccttagctggaccaattattgtggagccacatgtcacagcagtatgggg

SEQ ID NO: 536526 - DNA, 101 bp, Homo sapiens
ctaccgggctgggggcgacctttaccataggatgaagtaaccttgcattcggctgcaaggtgtactgtacgtacacagattggaaaggaattcctaagaag

SEQ ID NO: 536527 - DNA, 82 bp, Homo sapiens
tgaacaagggcctcagcctgcaacacataggccggccccacagcggcattggaggcaagtgaggcctatctggttggccttt

SEQ ID NO: 536528 - DNA, 100 bp, Homo sapiens
cagacgttttgaaaaaccaggacgaaaagatgtagatcttagcaaagcaatgtctcaagatggtgcttctcagttccaagaagtcattcggcaagagcta

SEQ ID NO: 536529 - DNA, 96 bp, Homo sapiens
gagagcagtaccctgatggagtcccttgcagcatctgtccgatctttcctgtttcccccactccattcccttcctatccatcccacagccagagga

SEQ ID NO: 536530 - DNA, 74 bp, Homo sapiens
ctcagcctgatgtcatttaccaaatccataaggcctgtttaaagaagaaaacccgtatgctagatttgaaaaca

SEQ ID NO: 536531 - DNA, 100 bp, Homo sapiens
aaggagctggaaggacaggaaccagaacccaggcccacggaggaagagccgggcagtccctggagcgggccaggtctggtgtggcagatgtggatagctg

SEQ ID NO: 536532 - DNA, 74 bp, Homo sapiens
tgctaatagtttcagatattgaaggcattgatcaatatgacagagatagcatcataaatgactttaagaatggg

SEQ ID NO: 536533 - DNA, 50 bp, Homo sapiens
gcaagtttctgcttagcaatgtcctttggaaaagtaccagcaaggagact

SEQ ID NO: 536534 - DNA, 75 bp, Homo sapiens
cggggacctcttcgtggcctcgcttcgtgctgcctgatgacagccaggccagccgccagcgtacaagggttgtgc

SEQ ID NO: 536535 - DNA, 90 bp, Homo sapiens
ccttgctctgggctgctccaggccaggccatgcggctgaactcctttgaacaactttgcatcaactacaccaatgagaagctgcagcagc

SEQ ID NO: 536536 - DNA, 88 bp, Homo sapiens
caacgagggactcggcctcggaggcgacccagaccacacagggacgtggctaaacgtgagggggcgtggccaagatggccgcgtgcgg

SEQ ID NO: 536537 - DNA, 96 bp, Homo sapiens
ggtacagacaatttttgctccaccaaacacttcagatatggaagctgtgttatgtcacgcatctgatgaagcgaattcagagaggcccagtaagag

SEQ ID NO: 536538 - DNA, 82 bp, Homo sapiens
gtcgccatggggcgaggcagcggcaccttcgagcgtctcctagctcaccatggatgatgatatcgccgcgctcgtcgtcgac

SEQ ID NO: 536539 - DNA, 74 bp, Homo sapiens
ggcttcaaaggctgtcgcaaggaggaaggatgaagatttgataaagtggaaggcactgtttgaggaagtccctg

SEQ ID NO: 536540 - DNA, 98 bp, Homo sapiens
gcgcccccggcgcgatgcccttcaggaaaggtgtgcttcccgcacagctgcagccatggggtctgaggaccacggcgcccagaaccccagctgtaaaa

SEQ ID NO: 536541 - DNA, 100 bp, Homo sapiens
ctcacccggcgactggccacagtgatcactcatgtcgaacgctttggataaacaagaagaattgacacctcttggagtccacttggcacgattacccgtt

SEQ ID NO: 536542 - DNA, 83 bp, Homo sapiens
gacggaaccgccacagcactcaagatttttagactctgaggagcagttggagctaatccacattatggaaatggaaaccaccg

SEQ ID NO: 536543 - DNA, 74 bp, Homo sapiens
aagagtcctgcatggtttcaagggacgtaccaggaggatggtgcccaggacagtcattttgtttactcattcag

SEQ ID NO: 536544 - DNA, 74 bp, Homo sapiens
gcagacggcgagacctcctgcacagaaaacaaccctttttgctgcacatgtaagtggagctgtgcttacctttg

SEQ ID NO: 536545 - DNA, 109 bp, Homo sapiens
ttcaaaagctggtattgaacaagaaggatattggttgccaggagatgagattcatcctgaggttagcattacacttctcccagtggagcccatgacttctgatcaggac

SEQ ID NO: 536546 - DNA, 100 bp, Homo sapiens
agaagtaccaggaggcgttggccaagggttatggaggttttgatgactatggtggctataataattacggctatgggaatgatggctttgatgacagaat

SEQ ID NO: 536547 - DNA, 100 bp, Homo sapiens
agcattcctgaaatacatccaggaaagacatggagattctcttaaaaaggacagagcgggatgccaccagcttgtccaaagggaagttccaggagctcct

SEQ ID NO: 536548 - DNA, 100 bp, Homo sapiens
caggttttagagacctgaaacatcacagaagcttctgagtggttctgaagattcaagagcagccattgtttgatgtcctgtgactgagaaaccaggcttt

SEQ ID NO: 536549 - DNA, 75 bp, Homo sapiens
gaaacaatggcatttacagaaagagtcaacagcagtggcaacaggtttcacgtggcaggatgactatactcagta

SEQ ID NO: 536550 - DNA, 100 bp, Homo sapiens
ctctacgcctcctacgtttacctgtccatggcaagtagcctgcagtatgaaatgctgctgctgacggattctatctccaaggaggacagctgctgggagc

SEQ ID NO: 536551 - DNA, 100 bp, Homo sapiens
cgttgggagtctcctgtatctagtcgccagagttgggagcttggatagctttcaccaacaatcaccagtggtttacacaacattgcaaggagcattgaaa

SEQ ID NO: 536552 - DNA, 120 bp, Homo sapiens
aattaaactttggccctgcgcctcgtccagcctaggttccacccttttctgggaacgtgagtatcaaccaagtccagagatcaacactttcctcatactatacactttatcataatgaga

SEQ ID NO: 536553 - DNA, 100 bp, Homo sapiens
cattgcccaaaaagtcagtgaccggatttatttaattgcccaactaccactgatgaagatatattggagtgactgctgaaattgcctttttgtttttaac

SEQ ID NO: 536554 - DNA, 100 bp, Homo sapiens
gaggcactgtctgaggagactacagcagcaaggtgtccctgccttcactgtgctccaacctgaaggtcccctggcagtgctgagggaccgagcccagcag

SEQ ID NO: 536555 - DNA, 97 bp, Homo sapiens
tgctggttcgggcagagtccgacgggtgtacaactatgagcctttgacacagctcaagaatgtcagagcaaattactatggaaaatacattgctcta

SEQ ID NO: 536556 - DNA, 98 bp, Homo sapiens
gccctgacttctcaaaaagcactgcacagaggaggaggcagcagaaccccatgatcccaatgaagatacagaatggaatgacattttaagagatttcg

SEQ ID NO: 536557 - DNA, 75 bp, Homo sapiens
ccaggtgtctgaatacatttcaaatactttcttaggttcatactttggaaacaaaagagcttatgcagaaaacac

SEQ ID NO: 536558 - DNA, 98 bp, Homo sapiens
ttgggcagcatgcagtgctttctggttttcaaagaagaatggaagaaaccatgaagcttgctacgatggaagacacagtggagtactgcctgttcctg

SEQ ID NO: 536559 - DNA, 75 bp, Homo sapiens
ggttttccttgcagtcgcctgctgctgtcgtcgggaggccagctgcgggccgtccagcggctgtgccacttctac

SEQ ID NO: 536560 - DNA, 101 bp, Homo sapiens
cagctgcagactttctcagaggagatagtgattatagagcacaaatccatcatctgcccaggctataatgcggtgctgcatattcatacctgtattgagga

SEQ ID NO: 536561 - DNA, 100 bp, Homo sapiens
tgtactgcttgagaacagaatacattgctgattatctcatgcaggtactgtgagaatagagatgtttcgaaatatgcagaatgcagaaatcatcagaaaa

SEQ ID NO: 536562 - DNA, 75 bp, Homo sapiens
cagcaactgaattccgagagcctcacagctctgctaaaaaacagccgtgttgaaatccttgtctcctgtagaccc

SEQ ID NO: 536563 - DNA, 83 bp, Homo sapiens
ggcgaggttcagactcttggagccagaagctacatgacccctaaacggtgattttacaacgagatgctgctctccatagggat

SEQ ID NO: 536564 - DNA, 101 bp, Homo sapiens
gcctcagccaggttctccagagatgtaaacactacacgtgaagagtggtgaaagggaacattgattactgaagtgccctggagagggaaagcactggtcaa

SEQ ID NO: 536565 - DNA, 97 bp, Homo sapiens
gtgggggtgtcctggtgcacccccagtgggtgctcacagctgcccattgcctaaagaatgtcctactgtccgtggcagagctgtactggcgatcttc

SEQ ID NO: 536566 - DNA, 83 bp, Homo sapiens
ccctcttctctaaaaatgatggtggtttggtgcacctcgatttggaggaagtagggcagggcccttatctggaaagaagtttg

SEQ ID NO: 536567 - DNA, 99 bp, Homo sapiens
caggaagtagaaagtctcagcagacccttcctgagggccgagcaacagtgtagtggcgtattccacatagcaaacagcatatgggtgattttggaagca

SEQ ID NO: 536568 - DNA, 83 bp, Homo sapiens
gatcttggcaaagcttctccctcagtatttagaccaggatttttagactctgaggagcagttggagctaatccacattatgga

SEQ ID NO: 536569 - DNA, 90 bp, Homo sapiens
atgtctaagctgtctgtgaatgcccctgaattttacccttcaggttattcttccagttacacacaataagagctaactgccatcaagagc

SEQ ID NO: 536570 - DNA, 50 bp, Homo sapiens
gtccacccaccgccgccgcctcccagaaagtttcctacactactgaggtt

SEQ ID NO: 536571 - DNA, 100 bp, Homo sapiens
agattttggggcaaagcctttccaactggacagcaccatgtccaccaaagcggagcagtaatcttccacaatctgtaattgaaaatgttggaggaaaaat

SEQ ID NO: 536572 - DNA, 100 bp, Homo sapiens
catttccagaaagccaaagagaggcttgaggccaagcaccgagagagaatgtcccaggagtctaccatggctcaagaatctcccaaaaattcagcagcag

SEQ ID NO: 536573 - DNA, 75 bp, Homo sapiens
aagacgaggatgatgcggaaattaaccccaaggtttattttcttgaaaaggctccaggcttcggcttggaaaatc

SEQ ID NO: 536574 - DNA, 75 bp, Homo sapiens
ccctggccgctcacccgtggaaagtacaggtcctgacagctgaccagtgtgcttttcttggagaaagaagaaaag

SEQ ID NO: 536575 - DNA, 50 bp, Homo sapiens
tggaacaatttgatgagctaggaggtacactggagccccatattttgcag

SEQ ID NO: 536576 - DNA, 82 bp, Homo sapiens
tttcccaagaccaaattaatgatcttcctctgatggcgctgcctccatgccatgccctctgccagttctatgtggtgaacag

SEQ ID NO: 536577 - DNA, 51 bp, Homo sapiens
tggcgctgaggtggcccgtggggcagtctgaagatgatgagaaactgaaaa

SEQ ID NO: 536578 - DNA, 82 bp, Homo sapiens
gtcttctaaccattccaaaatctctttcaggctagcttgtcactttctgcaaaggtttccctcagggagcctcctgctgcca

SEQ ID NO: 536579 - DNA, 100 bp, Homo sapiens
aagcacattgtttccagaatgaaaaggtcactgccatctggagtggatggacacacctggttgctcagacaggtaggtgatgctctgatgctgctgcctc

SEQ ID NO: 536580 - DNA, 75 bp, Homo sapiens
tcgggtctcgggggccgctctgggatcccggccaccagcaattgtccggtgagaagccctaccactgcaactggg

SEQ ID NO: 536581 - DNA, 100 bp, Homo sapiens
cagactcattgggactgctctagatcttcactatccaatacgagtgcttgtgatttcacgtatttttgctgaactcgtaaaagagacacttggatggtgg

SEQ ID NO: 536582 - DNA, 100 bp, Homo sapiens
cttgtatgtaccttcccagcaggcctttggttctgcatcaaaaatatcaacgatgaaagagtatttgaggacagtccagcttatctgccgaggattcccc

SEQ ID NO: 536583 - DNA, 90 bp, Homo sapiens
tgggaggagccgatactgagcttcttcctatttgccatggtcgtgagatggagaataaagaaactctcaaagggttgcacaagatggatg

SEQ ID NO: 536584 - DNA, 112 bp, Homo sapiens
ccgcagagagcgagagcacgaattccagagcaagcagcaggcggtacatggactatatcgcacaacaggtgctagttttgagaaggcccaacaggagtttgcaacaggtgtg

SEQ ID NO: 536585 - DNA, 100 bp, Homo sapiens
tctggacctggcctgctcattgactcgctggttgtcttcttgcctgccctgtgtcgtaaaatgggggtcccttactgcattatcaagggaaaggcaagac

SEQ ID NO: 536586 - DNA, 74 bp, Homo sapiens
atgccattcggtttttggttgggacgcagtctcttaaatatgataatcaggccgagacgcatccagagctttcg

SEQ ID NO: 536587 - DNA, 100 bp, Homo sapiens
gaaatctgaaaatgcccctggggagacacatgcacaagacagtggctgggagcccgagccccacacctgccgggcagcaggtgctggacgtcgacagctg

SEQ ID NO: 536588 - DNA, 100 bp, Homo sapiens
acattaaaactctgggcaacgtcacttacatgtcccaggtcctgattcagtgtgccggaagtgaggaaaagacagagtctctaatacagcaatatgaagc

SEQ ID NO: 536589 - DNA, 100 bp, Homo sapiens
tgggcgtgagccactgtgcccagtgaagggaatttggctacaaagcagatcgtattccttcagaggccagttatgtggaattcagctgctcaaacaccag

SEQ ID NO: 536590 - DNA, 74 bp, Homo sapiens
tgggattgagacattctcacctcctcctccgcctccaaagtcgcggtacttcgtactggatttcgaggctggca

SEQ ID NO: 536591 - DNA, 100 bp, Homo sapiens
gcgagcttcggagaagcagtggtgggttccatgtgatggtggagtaggaggcaggtctccgcgggtggctcctatggacggaaaacagtcttaagaggca

SEQ ID NO: 536592 - DNA, 96 bp, Homo sapiens
ttttaaatttcctccttgatgtctcatcagaattggagccgcttttcctctgcaatactggttatcaatactctggctgaccatcatcatcgtggg

SEQ ID NO: 536593 - DNA, 75 bp, Homo sapiens
gccgcgatcgtggggcccgcgaggcgggcagccggggcgtccagatattctctaagccgctttcatcatgggaga

SEQ ID NO: 536594 - DNA, 87 bp, Homo sapiens
ccgcgcgcccgcgccctccgcgcgacgccaggtgccctacgagacgctgaacaaacgctttcgcgccgctcagaagaacattgaccg

SEQ ID NO: 536595 - DNA, 101 bp, Homo sapiens
agctatccaggatgaaatccgttcagtgatcagacagatcacagctacggtgacatttctgccactgttggaagtttctttgagttggactatggatcagg

SEQ ID NO: 536596 - DNA, 99 bp, Homo sapiens
tgatggagtgacaggaaaaacagctggcatggaagtttgcttcagtgtccccaacagttcctgaattcttgaaaactcctccaactgcagatcagcctc

SEQ ID NO: 536597 - DNA, 83 bp, Homo sapiens
tggtttggacgccggcggagacgcgggcgaggttgaaatcacaaagattagacacctttttagataggtgttcttcagcacca

SEQ ID NO: 536598 - DNA, 89 bp, Homo sapiens
atggtggagagccaaccaccatcattagacaagggcacgaccataataacatccctgacttctgtgctgcacaatgacaaagaattccc

SEQ ID NO: 536599 - DNA, 120 bp, Homo sapiens
tgaagctgccgccgttgcctccgccgccaagagtgagcgagcggacccgcgatggaaaaagcttgtggtgaaggggggcaaaaaaaagaagcaagttctgaagttcactcttgattgcac

SEQ ID NO: 536600 - DNA, 75 bp, Homo sapiens
cttaccatcttcatcatgcacatcttcaagcatgctcagccaacacaagccatcagccccatgctcagctcccag

SEQ ID NO: 536601 - DNA, 101 bp, Homo sapiens
ggccgcggcggggaaaatggcggacgggaaggcgggagacgagaagcctgaaaagtcgcagcgagctggagccgccggagctattgacctgttgtattggc

SEQ ID NO: 536602 - DNA, 75 bp, Homo sapiens
ccctgcagccgcggaccgaggcagcggcggcacctgccggccgaggtgctatacttggtagatcagaaactcagg

SEQ ID NO: 536603 - DNA, 82 bp, Homo sapiens
ctcgcttgcagttcagcgaccacgaagaagaaaggagggcgcgggctaatgaccgagaatacaatgagaaattccagtatgc

SEQ ID NO: 536604 - DNA, 75 bp, Homo sapiens
tgcccctcaggctggaacttgccctgtctcctcgcagatgagaattcagaaggagctggcggacatcactttaga

SEQ ID NO: 536605 - DNA, 88 bp, Homo sapiens
gttcgtctcttacgtctgcggaagtgcagctgcctcagttcttagcgcagctgttcgggggtcttgtctggattttggttgcctcctc

SEQ ID NO: 536606 - DNA, 100 bp, Homo sapiens
caccgcacgccctgcaagggagggggtcctgatgacaacttaattgaaggtggaggaacaaaatttgtctgcaaacctggagccagaaacattaccgtca

SEQ ID NO: 536607 - DNA, 75 bp, Homo sapiens
gatatcgacgtcgtgatccagaagtccagagctgaggactgcctgtttgcagtccccaaagctccagagatagat

SEQ ID NO: 536608 - DNA, 101 bp, Homo sapiens
ttgtgcaggacaccgacatggaacagggactcactggggtgcctagaaagagccatgaagtttgcctttgaggaattccacctgtggtaccagtttgctct

SEQ ID NO: 536609 - DNA, 100 bp, Homo sapiens
agcccatccagactgtttgatgctgaacttcaccgttaaggttaatttggagtggcccctggagtcagtttcctacaccatccgaggccccacccagcac

SEQ ID NO: 536610 - DNA, 82 bp, Homo sapiens
gaagaactgaagaagctggagttgctcagacaggtatacatggactggtacgagaagttccaggacaggctcaacaagaagg

SEQ ID NO: 536611 - DNA, 74 bp, Homo sapiens
tcggatgttgtgttgcccgccaccatgagctacacagagcggttctggtgaggttggaaggatgcagccacccg

SEQ ID NO: 536612 - DNA, 133 bp, Homo sapiens
aaacaagaataggactcagtttatatgatgtcgctgggcaggggtaccttcgggaatctaatcattccgcgcacccacgttttcatacggacctgatggaaatggtttctctcttggatgcagtaaaaattgg

SEQ ID NO: 536613 - DNA, 135 bp, Homo sapiens
cctcttaagcgcagcgccattttagcaacgcagaagcccggcgccgggaagcctcagctcgcctgaagatgccatggacaatattaccaggcagaaccaattctacgatacccaagtcatcaaacaagaaaacga

SEQ ID NO: 536614 - DNA, 88 bp, Homo sapiens
agggctggaagatgtggcagccggccacggagcgcctgcaggttatactggagagctttgccagtccaagattgattactgcatccta

SEQ ID NO: 536615 - DNA, 100 bp, Homo sapiens
gacgacgaggaagacgccgaggcctgggccatggaactggcggacgtgggggcggcagccagctcgcaggtggaaagaggcaaaacctgatgaattaatg

SEQ ID NO: 536616 - DNA, 83 bp, Homo sapiens
ctgggtatgaataatgactttcctccaagagcacattgcctggtaagatggcagtgctcggaatgtgaccaggcagggagcag

SEQ ID NO: 536617 - DNA, 101 bp, Homo sapiens
ttggtgagcgtggggaatctggaagaggctggggagtctgtgtccttccagctgcagatacggaggcctcaggcccaggcccaaggccaagtgagagagcc

SEQ ID NO: 536618 - DNA, 100 bp, Homo sapiens
ccacaataaaagagacctctacttagctcagcaattcttaccttgtgtgatgaatgcagactctgctaccattttggctgtttggatcctcctttgaaaa

SEQ ID NO: 536619 - DNA, 90 bp, Homo sapiens
ctgcaagatgacactgaacatgaagaactacaagggctacgagaagaagccctactgcaacgcctggtgggcacggaggatgctcttctg

SEQ ID NO: 536620 - DNA, 75 bp, Homo sapiens
ataaagttatccaggagccacaaagtgagggctgcttccccaagcccacagtctgtaagaagggtctcatcctcc

SEQ ID NO: 536621 - DNA, 74 bp, Homo sapiens
agtggcagcagcggcggtggcggcagcaagaggatcaggttttaaaatcaaagatgggaaaatcggagaaaatt

SEQ ID NO: 536622 - DNA, 100 bp, Homo sapiens
gtagtagagcaggtgcgggttcaggttaccatgccagcaatgattccttttgagtttctgacagaagatagtggttttcatccaaataagtcaactactc

SEQ ID NO: 536623 - DNA, 75 bp, Homo sapiens
ctctgttcgtcaggaacgtggccgacgacaccagttgttgaatgttgggtcacgaagatctcaacctggccaaag

SEQ ID NO: 536624 - DNA, 90 bp, Homo sapiens
aaaaaaaaaaaaaaagaaagaaaactacaggcggggacggcttctcggaaataaaaagggtcagttggaggtagtttagtcactaaggcc

SEQ ID NO: 536625 - DNA, 100 bp, Homo sapiens
gaaaaagcaagagtttgttatatagcaatattcttactgattctccgggctctgcagctcttgacccggctggtattgtctctacagccaattcctctga

SEQ ID NO: 536626 - DNA, 83 bp, Homo sapiens
cagccttgggcctcgcgccggctatggccgtgccctggggctgagccctcagcgcccgggggctggagaaggccaggcagcag

SEQ ID NO: 536627 - DNA, 75 bp, Homo sapiens
aaatagactctgaagtaatatctggactttgaaattgtgggctaccctaatgttggtaagagttcaacaatcaac

SEQ ID NO: 536628 - DNA, 90 bp, Homo sapiens
ccctcgggatccctcaccccagccttcttcaccgcacagccaaggccacctttgatgccatttctaagacctacagctacctgacccccg

SEQ ID NO: 536629 - DNA, 100 bp, Homo sapiens
gccggagcccggaatcccgctcggagccagccagccgtcccgagctaccagcagcctccttctgaagaaataaaaacaggtgaggatgaagatgaggaag

SEQ ID NO: 536630 - DNA, 95 bp, Homo sapiens
caccgtgcccctgcccgcgaccatggcctcctccgaggtggcgcggcacctgaagtcaatgaaaggattctattttgcaaagctgtattatgaag

SEQ ID NO: 536631 - DNA, 74 bp, Homo sapiens
tctttggacgtgtggtcgtcaggagcacagcagtcccgagtgcagggctggtgacctcactgtcagagagctgg

SEQ ID NO: 536632 - DNA, 100 bp, Homo sapiens
agcaagagctttctggaagaaaggaaatgttaggatcactttattctggtgtttaaaattatccaactgccatagagctaaattcttttttggaaaattg

SEQ ID NO: 536633 - DNA, 74 bp, Homo sapiens
ggaaagcaaaggcgtcaggaatggttcttcctcagccgtttccctggggagatggtaaccatactctattccat

SEQ ID NO: 536634 - DNA, 75 bp, Homo sapiens
ccgagtctccgccgctgcgggcccgctccgacgcggaaggtacctgcacatgttgttctttgtcagtgctgtcaa

SEQ ID NO: 536635 - DNA, 100 bp, Homo sapiens
agactatgaatctctgttccaaatgctttgctgaatgcctaccgcaggaatgggatggcttttctagcctgctgatgtgacaactgtgatgtgcctgcaa

SEQ ID NO: 536636 - DNA, 82 bp, Homo sapiens
cgacctcgacgtcttgcctgtgtcccacttgttcgcggcctataggcaacagcattattgagaaaagcccttacagaagagt

SEQ ID NO: 536637 - DNA, 111 bp, Homo sapiens
gaagaaagtcatcgccatcgccactggctccctgcactgtgtgtgctgcacagaggatggtactccaaagattcaggtttactcacgtcatccagcagagaatggaaagtc

SEQ ID NO: 536638 - DNA, 76 bp, Homo sapiens
ggaaacagccagaccgagagcagcctgccggggcggagcccatctgctggcaaggctaagattagaacagctcata

SEQ ID NO: 536639 - DNA, 101 bp, Homo sapiens
gcccgctgctcggtggcaggagggccggcggagcgccatggcctgcatcctgaagatcgtcagtatttaaacagatcacatcatgcgtgagtacaagctag

SEQ ID NO: 536640 - DNA, 100 bp, Homo sapiens
ctcctggcccaagaatgtgaagaccaactatgttgtttggggataccccatgtttccccatcactcgaggagtctgggcagagactggactacaccgtgg

SEQ ID NO: 536641 - DNA, 134 bp, Homo sapiens
tggtccaggcgcggccgctaagaggagaccaagaggcgggggctgcacttgacaaccagcatgccgagatgatcatccgggaagcccacgggaccctcaggcgggcaggatgaacgactggcacaggatcttca

SEQ ID NO: 536642 - DNA, 100 bp, Homo sapiens
tgaaaagcagcagaagtgactcaaattttcaagtgccaaacggaggaatacctcgtatgcaacctcaggcttcagccactgtggccagaagagctccgaa

SEQ ID NO: 536643 - DNA, 74 bp, Homo sapiens
tttggtgctggcttactttcttctatcagtgaactcaaagagacggtggctcagggagtaaaggaaggccagtt

SEQ ID NO: 536644 - DNA, 75 bp, Homo sapiens
ctatgaggggcaggagcatgatgagctgagcttcaaggctgaacccagtgacttgattgtaaaaatttacagagc

SEQ ID NO: 536645 - DNA, 83 bp, Homo sapiens
ggaggaatccgagaagagcagagcggagggagccccagacacggattatatctgtccaagatgcgagtctggttttatcgagg

SEQ ID NO: 536646 - DNA, 101 bp, Homo sapiens
tcttgatcatatggattcatggacagctaaatttagaaatagtcattttctgaggatgaatggaatttactgtatgttgcagtaactcgagccaagaagcg

SEQ ID NO: 536647 - DNA, 83 bp, Homo sapiens
ctgagggtctcggggcgggcgccgcgggacctctccgggccatgggagttgataccaagttgaaattcactcttgagccatct

SEQ ID NO: 536648 - DNA, 75 bp, Homo sapiens
cagaagtccagagctgaggactgcctgtttgcaggagacgcaggtcagaatggaaatgggctgcagaccgggcag

SEQ ID NO: 536649 - DNA, 100 bp, Homo sapiens
ccttgaaagaagacattcagaaagcagatcttgttattagtcacgcaggctgtcacccttgacccaaactttctggatgcttatatcaatttaggaaatg

SEQ ID NO: 536650 - DNA, 74 bp, Homo sapiens
tggagtgcccccagcccagagcccggtgatgtagtcaaggtgatcgtctccgtccaggtattgatcctcctccc

SEQ ID NO: 536651 - DNA, 50 bp, Homo sapiens
gtctggacggctcatgccttgggagaccctgcagcgtcatggtgctggag

SEQ ID NO: 536652 - DNA, 80 bp, Homo sapiens
tccttcaagtacttggcagatcactctcttagcagcaaattgtggctactaatttgccccctgaagatcaagatggctct

SEQ ID NO: 536653 - DNA, 96 bp, Homo sapiens
gcctctcagccggccgggatggctaccacggccgagctcttcgagatttccatggtgtcagtgattcatattcctgataggacttataaactatcc

SEQ ID NO: 536654 - DNA, 50 bp, Homo sapiens
agacgatggaaaaggaaactttagtagagacggtatttcaccatgttagc

SEQ ID NO: 536655 - DNA, 75 bp, Homo sapiens
accagagacaggtgtgagcaaattgtagaggggtctccttatgccagggaccaggttaccctaacagcaggaagg

SEQ ID NO: 536656 - DNA, 82 bp, Homo sapiens
ggcggaggacgcgcccggcgcccctgagccggccgagcggcgacggaccgcgaggtgaagctcgtgtgtggagtgccacggt

SEQ ID NO: 536657 - DNA, 90 bp, Homo sapiens
ctggttgaatacctccctctccactcccatcttcaggttgtgtgctgctcatctccctactgaatcagatgcaccaaatcattatcaggc

SEQ ID NO: 536658 - DNA, 100 bp, Homo sapiens
tctttggaattccattcttttccttattcttctgatgtggatccaggtcagcccaaggccaaccccactgtcactctgttcccgccctcctctgaggagc

SEQ ID NO: 536659 - DNA, 100 bp, Homo sapiens
tgcttctgtggaagatgatgcttttatcaaggacattggctccctggattatcaagagtttgtagttgacattgaatccaggctgaggatggaaggtgtg

SEQ ID NO: 536660 - DNA, 75 bp, Homo sapiens
cattggccacctacagaaacaaaatgtcaacaaattgatgggcagcaattccatttccgtgagggcgtttctaga

SEQ ID NO: 536661 - DNA, 83 bp, Homo sapiens
agattttgctagagctgaaggctgtgataatgaggaagatcttcaaatgggcattcacaagattgcatccttcttcagcaaca

SEQ ID NO: 536662 - DNA, 83 bp, Homo sapiens
cttccaccggaagtgtccgatcggaatcagccctgtccgagaggagaataaaggcagccccgttgatgactgaaaatgacaaa

SEQ ID NO: 536663 - DNA, 150 bp, Homo sapiens
ggccaccatcgtgggcgtccgcaagaccgggcagatctggcccaacgatggcgagggcgccttccatggagacgcagggggttacactggggacatttattccaattctaacttgaagaataaaaacgacctctttgaatacaagtttgc

SEQ ID NO: 536664 - DNA, 100 bp, Homo sapiens
ttttacaaggagaaacccattgattggctcctggaccatattctctgggtgaaagtctgcaaccctgaaaaagatgcacacctacaggacttgggctgct

SEQ ID NO: 536665 - DNA, 50 bp, Homo sapiens
cacaagagcaccatactttgagggactttgcctcccgggccaaactggca

SEQ ID NO: 536666 - DNA, 144 bp, Homo sapiens
agccagatgaattctgggataagaaagtaacgcatttttgtttttggaaggagaaggatagacttggctttgagcctctacggcagacacatgcaggccaacccagaaccaccgaagaagaataatgacaaatcgaaaaagatc

SEQ ID NO: 536667 - DNA, 75 bp, Homo sapiens
agctggaaaatggtctgctctgcgaatcgcttcggaaccaaaaagaagcttcccagagccggggccaggagcccc

SEQ ID NO: 536668 - DNA, 96 bp, Homo sapiens
agtcctaccatgtcagccttcccagtagctgggaccacaggcacaatgattacaaagtggcttctcctgccctgagagccgtgggtaacatcgtca

SEQ ID NO: 536669 - DNA, 106 bp, Homo sapiens
tagtctttccgcttcttgaatttctctctgtaaaggaggcctgtctcctccctcctacacatttccagctcctgctgcagttattcctacagaagctgccatttac

SEQ ID NO: 536670 - DNA, 75 bp, Homo sapiens
agcaacgctgccggccctgggactccgaagctcggcccaggacccccagctttgtgtccctggtgatgttggaac

SEQ ID NO: 536671 - DNA, 100 bp, Homo sapiens
cactgatcccgtccctgacccacgagctgtcaaccaagataaaaagaacatgctgttttctacacgatgaggcgagtggtacgacagagcaagtttcggc

SEQ ID NO: 536672 - DNA, 100 bp, Homo sapiens
cgatgaagaggatgatgtttttggtgaaggtaaaacttccttttcctgtagatcaaatcacagatcttccaaggaacgatttccagatgatgattaaaat

SEQ ID NO: 536673 - DNA, 75 bp, Homo sapiens
ccatggcgaccaccgtcagcactcagcgcgggccggtctggtgaagctgggggttcactgcgtcacctgccagaa

SEQ ID NO: 536674 - DNA, 100 bp, Homo sapiens
ctgtgcttgagaccaacctgacgggtaccttctacatgtgcaaagcagattttaccaaatgttgcaagaactctggagttcttatggtagtaaaatgccg

SEQ ID NO: 536675 - DNA, 74 bp, Homo sapiens
cctacccaaggacagggggacagggctctgtctcgcacttcccagctcagcgacatgtcctcacctacatggag

SEQ ID NO: 536676 - DNA, 98 bp, Homo sapiens
caccctgcccctgccgaggcaggcgcccaccgccggcggtgatgcggctgtgaagccctagtcgggttttggccaaattgggcgagggcacaaaataa

SEQ ID NO: 536677 - DNA, 75 bp, Homo sapiens
caagatccacgctgacgcagagcggaaggagttggtgtctcacctttaactctccttatgctgggtgaaaacaaa

SEQ ID NO: 536678 - DNA, 100 bp, Homo sapiens
cacaaaatgtgctggttgatggtgttaagaaactctcagtttgtgtttctgagaaaggccagctgcgggccgtccagcggctgtgccacttctacagcgc

SEQ ID NO: 536679 - DNA, 90 bp, Homo sapiens
cccactgaggagtccaacatcaccatgcaggtgtttgaagtggtggaacgtgtagaagagttaagaaggaagtggccagtagcgtggggg

SEQ ID NO: 536680 - DNA, 98 bp, Homo sapiens
tccgcgctgcttccacccaacttcctgttaggcgggctggtccgagtctctgttttggaagctcaaccagtggctgatgattcacatgtttcactgcc

SEQ ID NO: 536681 - DNA, 80 bp, Homo sapiens
tcagtgcacaaaatggcgccctacagcctactggtgactcggctgcagattgtgggattagtgatatgcttttctaaaga

SEQ ID NO: 536682 - DNA, 100 bp, Homo sapiens
atcagccatcctggattggacagccaaagaggtgctgaaaaaatatttggagtccaaggaggatgtggctgatgcacttctacagactgatcagtcactc

SEQ ID NO: 536683 - DNA, 75 bp, Homo sapiens
ctttggtggcatctgcctaacgttcacttcactcacggtggagccgccaccaaaatgcagattttcgtgaaaacc

SEQ ID NO: 536684 - DNA, 75 bp, Homo sapiens
ttgttggcgtgtccctgcagcgaaggatcctggttggttaaacccatccagagtaatggctgcggccttacccag

SEQ ID NO: 536685 - DNA, 82 bp, Homo sapiens
caggaccatgaaactagtagaattcagctgaagggtgagtcgcaatgtatctgctgagcaaaaagatgaaaacaaagaagca

SEQ ID NO: 536686 - DNA, 82 bp, Homo sapiens
ttaacagactgcttttacacctacctgacccacctccatacattgatggaattcgaattaacagccctcattatttgactaa

SEQ ID NO: 536687 - DNA, 98 bp, Homo sapiens
caaaatgtggccaagacagaaccagtcagcattctacaaccccagaccaccgttaatccagatcgcatcaaacaagtcttatgaacttacccggaagg

SEQ ID NO: 536688 - DNA, 75 bp, Homo sapiens
ctggctaacctccacttccacattccagcccaagggaaagtccaagtgagacggtttaagcggaagcatcttact

SEQ ID NO: 536689 - DNA, 100 bp, Homo sapiens
gctggatgtccccctggatcttcacacagctgcttccattggccagtatgaagtggtgaaggagtgtgtgcagcgcatacacaagctgagggagaatgtc

SEQ ID NO: 536690 - DNA, 75 bp, Homo sapiens
cagtgttgatggtggtggtgctggtcatcaatgttactcaggtagagaactctcttgatagagcccaagcagcca

SEQ ID NO: 536691 - DNA, 89 bp, Homo sapiens
tgcatttcacagcactctgggcgaaaattggatgtgaaaatgaagccagaccgaggtgccgcagacccctgggaggcaccaacaccccg

SEQ ID NO: 536692 - DNA, 83 bp, Homo sapiens
gaagagcgacaagccgctggcagccgcggatctcaccgccgctcagggttaatgttgaagaaggaaaatgcggaagtcgtcat

SEQ ID NO: 536693 - DNA, 100 bp, Homo sapiens
accccctgtctccagatatttggatgtatgtgctcttagcctgcttgggagtcagctgtgtactctttgtgattgcaagatttggagtctcattctgtca

SEQ ID NO: 536694 - DNA, 98 bp, Homo sapiens
tcctgtgcatcacaagtctttgctattaaagcttatagcttcattgcaccatgtgtggcatttgggcgctgtttggcagtgatgattgcctttctgtt

SEQ ID NO: 536695 - DNA, 89 bp, Homo sapiens
gccctgggactccacgatgtatccatcaaccacttcctccaggtttagatcctgataagcatcttgggaaaaccctggatcaaatggag

SEQ ID NO: 536696 - DNA, 75 bp, Homo sapiens
tagacatttacgcggatgtcggcgaagagttcaaccagggcgtgatggtgggcatgggtcagaaggattcctatg

SEQ ID NO: 536697 - DNA, 96 bp, Homo sapiens
gccgggccctcttcgacagctacacaaatctggaacgggtggccgattactgcgagaacaactacatacagcgagtaaccagctcataaatcacat

SEQ ID NO: 536698 - DNA, 75 bp, Homo sapiens
gttggtgtcgacggatctctttacaagacgcacccacaaaatgtagacaaccaatttcctgggcaagctgctcca

SEQ ID NO: 536699 - DNA, 75 bp, Homo sapiens
ctttaggaactcaggattctacagatatatgcaagtgtggtcactgtcaaagattaacaccagaatggaagaaag

SEQ ID NO: 536700 - DNA, 98 bp, Homo sapiens
cagcacagtgcggcttctggaatggacagaggccgcggccccgcccccagggggcggcctgcgggctattgagggcacctacattgacaagaaatgcc

SEQ ID NO: 536701 - DNA, 82 bp, Homo sapiens
gccttcgagagctaccgcgccagacagctccagctccagaaatcccagtacctgcaactgggccccagccgaggccagtact

SEQ ID NO: 536702 - DNA, 88 bp, Homo sapiens
tgtgtctcttctaagctgaataaagctgttttggaactgtcaggtacctcaaagcgtaagctgatcccaaagaactaatcaagatggt

SEQ ID NO: 536703 - DNA, 100 bp, Homo sapiens
gttgccttctatgcaggatcttttggaagaagcatcctccagggacatgcaaatggatgaagcctgctgggagcgtgaatgacatggccctggatgcctt

SEQ ID NO: 536704 - DNA, 96 bp, Homo sapiens
agtcatttcacatcgaagccatgatttaaatatcggcgttaaggacaatggaaacttggtggacagtgaaatgaaatatttgggcagtcccattac

SEQ ID NO: 536705 - DNA, 100 bp, Homo sapiens
cgggaagagaagatcatcgagcatttcaaacggcaagagcggtgagcggggcgcctatgcctccttcgggagagacgcaggcgtgggcggcctgactcag

SEQ ID NO: 536706 - DNA, 74 bp, Homo sapiens
gcctggggggtggagcaaggcctgttggatcccagtttgctgatggccgccaaagttggagttcgtatgttgat

SEQ ID NO: 536707 - DNA, 98 bp, Homo sapiens
gggaggacaacaccctcatcatgaccactcgaggtggtaatcatgagggactaccagcacgagaatgtggtggagatgtacaacagctacctggtggg

SEQ ID NO: 536708 - DNA, 75 bp, Homo sapiens
cttcgttgagttcgaggacccgcggctatggtgaactaaacggtaatgctggagaaagagaaatatctttaaaga

SEQ ID NO: 536709 - DNA, 83 bp, Homo sapiens
gcgactgcggggacagcaacgtgatgcgggagagcggacctgcttttttaaaggctgcagaaaacttcactcttttggttaag

SEQ ID NO: 536710 - DNA, 82 bp, Homo sapiens
gacagctgctggtatcaaccgggctcccagccctagaccagctcttagatatggctcgtggacagcagaaaattcagtctca

SEQ ID NO: 536711 - DNA, 100 bp, Homo sapiens
gtgatgtctggtccatatgaactgaaagctctccacctccagggacaggatatggagcaacaaggaatgttgagtgcagctgcatctcttgggatgattc

SEQ ID NO: 536712 - DNA, 90 bp, Homo sapiens
gatcctggatgccacggatcaggaaagcctggagctgaagccaacctcccgagcagttgaagactgggatagtttccaagctattttgga

SEQ ID NO: 536713 - DNA, 75 bp, Homo sapiens
acggacagcccatcgtgtgaactatagagtttgtggacagatttatattgggctaccagggcatggtggacggag

SEQ ID NO: 536714 - DNA, 100 bp, Homo sapiens
tacaccttctgccccaaggccaaccagtgggaagccaaattggcagagaatgcttgtaccctggctgacctgacagagggtcaggttggcaagctactca

SEQ ID NO: 536715 - DNA, 75 bp, Homo sapiens
agcagccaggggcggacgaaaccatcggtagactccacaaggccttttccctcagaggagaccacagagaatgac

SEQ ID NO: 536716 - DNA, 75 bp, Homo sapiens
gaggcccccgacggagacaaggacgctggtcgatcacaccgctcatgtacccagcctccttcttcttctccgtgc

SEQ ID NO: 536717 - DNA, 90 bp, Homo sapiens
ctcagaggccgccatcaaccgccagatcaacctggagctctacgcctcctacgtttacctgtccatggaattgaatgatctggcacggga

SEQ ID NO: 536718 - DNA, 100 bp, Homo sapiens
ttctgggtgttgggcctgacgatcctgacctggtacgagcccggaacattcttcacaagaaagggtggctgaggtcctggaaggcaaaggagcagggaag

SEQ ID NO: 536719 - DNA, 90 bp, Homo sapiens
ccttccatcctgaagccctttccgctgtggacaggaaaacaggtgaccaagaatatggcccaggtgaccaaagccctggacaaggccctg

SEQ ID NO: 536720 - DNA, 74 bp, Homo sapiens
tggctattggcctctgctgaatggactttcagagtgattgagtgccaaacccaagtctgaaatccacgtgtcta

SEQ ID NO: 536721 - DNA, 82 bp, Homo sapiens
acatagtggagcaaatggtggctttcattgggtgctaactgccaaagaaaggaaaactcaaattgatgatagaaacaaattg

SEQ ID NO: 536722 - DNA, 74 bp, Homo sapiens
ctattggattccctggatttcctggcgccaatggagagaagggcggcaggtatgtgacactaaaagagatgcca

SEQ ID NO: 536723 - DNA, 75 bp, Homo sapiens
aacaccttaaacctcctctggattcaagttaaagctgtatgacaaaattaacacaaagtcttcaccacaaatcag

SEQ ID NO: 536724 - DNA, 51 bp, Homo sapiens
tactgtaaaggagatgggttagatgttattgacgagatgcctgaggctgcc

SEQ ID NO: 536725 - DNA, 88 bp, Homo sapiens
ttcctggcctgttgcagccatggtgcattgcagttgcgtgttgttcagaaagagtaaagccaatcccagctgaaggaatcaagtcaaa

SEQ ID NO: 536726 - DNA, 96 bp, Homo sapiens
ggatgccagtgccaaatttaaagagcttgaaaaacaggatgaagttgtctattacgatccatgtgaaagtccagaggaacttagtcattgactgtg

SEQ ID NO: 536727 - DNA, 100 bp, Homo sapiens
cctgctgcggcaccgcggcggcctttctcctgggaagacgaaagtgccagcgatgccgcccctctgcagaggtcccagtctctcccacactcggccaccg

SEQ ID NO: 536728 - DNA, 100 bp, Homo sapiens
ccagccatcaccctcgagagcccggacatcaagtacccgctgcggctcatcgaccgggaggaagcagagctgaggctggtaaagttcctgcctgagattt

SEQ ID NO: 536729 - DNA, 76 bp, Homo sapiens
aagtgcttggggatggagtgcctccaaaggttgctgagatcatgattctggaaggaggtggtgtaatgaatctcaa

SEQ ID NO: 536730 - DNA, 75 bp, Homo sapiens
ctgcgcgcctgatgggtcgaggcggacgcgcggctgcgtcaggggtctctctttttggcatgtcggccctgttac

SEQ ID NO: 536731 - DNA, 97 bp, Homo sapiens
ggagccgccgccatgggggcctgcctgggagcctgctccctgctcagctgcgagaacgagaaggctgcctgatcagagagtccctgaagaagattct

SEQ ID NO: 536732 - DNA, 100 bp, Homo sapiens
cccagatgataggaatcccatctcatttagatgttgtgactgtgacagactcactggggtttgtacatgctggggaggagccttcctttcaggggtgacc

SEQ ID NO: 536733 - DNA, 100 bp, Homo sapiens
aggcgctcatccacagagccacatctgttaggtacctgaaagaattccgcacagagcagtgcccactctttgtgcaacacaaatgcacgcagcatcggcc

SEQ ID NO: 536734 - DNA, 82 bp, Homo sapiens
ggcccgcgggtctacttcctcaaaggctaccggctctctgaccagttccacgacatcctcattcgaaagtttgacaggcagg

SEQ ID NO: 536735 - DNA, 100 bp, Homo sapiens
ccggaagtcaccattggagctcatcagactgaccgtgtcttacatcagttcagagagcgctcctttaccctcatcgtggaggcctgggactgggacaacg

SEQ ID NO: 536736 - DNA, 74 bp, Homo sapiens
ctcctctttcacctgccaggttcaagtgcaattgctggtatagttgatcagccgatgcagaacttccagaaaac

SEQ ID NO: 536737 - DNA, 75 bp, Homo sapiens
cttcagaaagtgaagaagtctgtaaaagcaatatataattctggtcaagaaggacagaataacgggctcccagat

SEQ ID NO: 536738 - DNA, 82 bp, Homo sapiens
ggcggctcagttgtccatgaccctgaaggtccaggagtacccgaccctcaagtgtactaatggtcacttgatgtgcgctggc

SEQ ID NO: 536739 - DNA, 100 bp, Homo sapiens
gctggtgcaatgcttgccttgggactaatgacatgcttgtcaggtggtgcaggaggcaaaggtgtctggggtacacctggacaggtgtatgatgtggagg

SEQ ID NO: 536740 - DNA, 100 bp, Homo sapiens
gacggctgacggctcacactatctttaatctcatgaagtacgacagctacagccgcttcttaaagtctgacttgtttttaaaacacaagcgaaccgagga

SEQ ID NO: 536741 - DNA, 90 bp, Homo sapiens
aaatgttcaaaggaacaacatctttaccatctcatctcaagaatggaggggacatccaacgggctcatagagtggtagctgagcttcagg

SEQ ID NO: 536742 - DNA, 100 bp, Homo sapiens
cagaagagaagggaaatggcaagggagcattccaggagagaaagtgacttctgacagctctctccatggaaggaggcggcggccgcgatgagccttcagc

SEQ ID NO: 536743 - DNA, 90 bp, Homo sapiens
tttaaccccaaaattgagtcctacgctgctgtgaatcacatatcccaactgtcagaggagcagtggatgattcaacagccacacaaagca

SEQ ID NO: 536744 - DNA, 75 bp, Homo sapiens
ggacaatcgcactttataccacctgcgattactgagcctgcagacagggggatttgcctgggaaggagaagtaga

SEQ ID NO: 536745 - DNA, 100 bp, Homo sapiens
aacgacgttccatctgtggaaggacctaccaaccaggccgtttgagcaaggaagacattgaacgtatggtccaggaagctgagaagtacaaagctgaaga

SEQ ID NO: 536746 - DNA, 90 bp, Homo sapiens
gatgctcactccaaagtctcagcagatcctgaggaggatgaaggggctggccctggaggccgagagtgagctggagagacaagacgaagc

SEQ ID NO: 536747 - DNA, 100 bp, Homo sapiens
cagtatggcgctatctctgccctcagtatcaacaatgattgctcaagacttctttgtggctttgctaaaggacaggaccagtttggacaacatataaaat

SEQ ID NO: 536748 - DNA, 100 bp, Homo sapiens
gacgacgtgtacctggacatcaccgcaacatggccaacgccctggccagcgccacttgcgagcgctgcaagggcggctttgcgcccgctgagaagatcgt

SEQ ID NO: 536749 - DNA, 82 bp, Homo sapiens
tccagcttggctacgtggtgcaagagtcaggccagaacttcagcaccctggctgagaagactgcctctgtcaccgggtccct

SEQ ID NO: 536750 - DNA, 75 bp, Homo sapiens
ctcggccccgggccccctggagctggacctgacggatcctgttcatcttcatcgacagcgaccacaccgacaacc

SEQ ID NO: 536751 - DNA, 90 bp, Homo sapiens
atttcttactttgttgtcaaatttcaagacacatctgaagatgcaaattgagacggttgaagaacagcaaggcatctacagatggacatc

SEQ ID NO: 536752 - DNA, 82 bp, Homo sapiens
ggaagctgatggtcatcttttccaaaccttcacggcatggtgcaactcccacctgcggaaggcaggcacacagatcgagaac

SEQ ID NO: 536753 - DNA, 83 bp, Homo sapiens
atttaacgagaaagagatgcgaaacaagttgcagagctacgtggacgcaggaactccagttttccggacagacttgatcacag

SEQ ID NO: 536754 - DNA, 88 bp, Homo sapiens
ccggacgccctatcgcaagcaggacccagatgatgtggtaccagttggccaaagaagagcctggtgttggtgcatgtgctttggacta

SEQ ID NO: 536755 - DNA, 90 bp, Homo sapiens
aggtcgcagggcggcctgcagctgggccgcggccgaggaggcagcgcgacctccgcacggttttatggcaggcacacaaagaaaccctca

SEQ ID NO: 536756 - DNA, 75 bp, Homo sapiens
ggggtcttcctgtggccctcaaacaaaaaatcactgcattacatcagcagaaatggagaagaagctcttggagga

SEQ ID NO: 536757 - DNA, 100 bp, Homo sapiens
agagatacacttactcagctgaatgcaaaatgggacagaattaatagaatgtacagtgatcggaaaggggttccctggggatacaaggcccccaaggtcc

SEQ ID NO: 536758 - DNA, 50 bp, Homo sapiens
cgaaggagaggccctagaaccaaacctgtggatttttgtatctaagttta

SEQ ID NO: 536759 - DNA, 74 bp, Homo sapiens
tccagaatgtcagcatggaggctgctgggcaggtcatgagtcaccatgctgtccctttccccccaacacatcgc

SEQ ID NO: 536760 - DNA, 100 bp, Homo sapiens
tggccagacatggcattctgcaggtggcagatgctggcccgcgagagacattgatgcattttgctgtgcggctgggactgctgaggttgacgtggttcct

SEQ ID NO: 536761 - DNA, 75 bp, Homo sapiens
gctgatgagagcctgtgagcccataattcagaacttctgccacggaaatgtttcaacgtgcgcaagcgttgcggc

SEQ ID NO: 536762 - DNA, 75 bp, Homo sapiens
aagaccgctttccatggagagtaaaggccggctggaaagtccccaagcgaaaaggaagaccagtgtctcatgcct

SEQ ID NO: 536763 - DNA, 74 bp, Homo sapiens
tattgatcctggctttggaatatataaggaatatcttatcaaattaggcaatacagaatgtcatcctgaacagt

SEQ ID NO: 536764 - DNA, 119 bp, Homo sapiens
aaggagaaaatccagaagagcaaaggcgatgatgccacattacctgctgaccggttccctgatgtgttacctgcttctgctactgatccaaactgcagaacttctcattcatccccaag

SEQ ID NO: 536765 - DNA, 82 bp, Homo sapiens
gtaagggctaggggatgccagttccttggaccaggccaaagcctcactgtttcaattgtggttctgaagaacaccaaatgaa

SEQ ID NO: 536766 - DNA, 100 bp, Homo sapiens
gcctgatgttgctaaatgtagacaatggttagagaagaattttccaaatgaatttgcaaaacttactgtagattcctcctgaagacacagcatccacccg

SEQ ID NO: 536767 - DNA, 74 bp, Homo sapiens
gacaagccaccactttgaaggtgctcaaattctgtctcagcttcagtgttcagatggcttaagcaaaatcagac

SEQ ID NO: 536768 - DNA, 88 bp, Homo sapiens
atgttggcggtccctgtgacctgtggagacacggccagatctgccctccacaaagttctcatatagatgtggttcgttttccatgtgt

SEQ ID NO: 536769 - DNA, 110 bp, Homo sapiens
gtgtatgtgcgcttcccagggatcttgagagtgaagatctcgaaggatttcatagttcattcggctcctaaagaagtagcagtgtccaaggaacaagaagagaaatctga

SEQ ID NO: 536770 - DNA, 78 bp, Homo sapiens
agtactctatatgaacaatccgtctggatcacggatgtaggaagtggaacgagggggaataatgtcactcacggaggt

SEQ ID NO: 536771 - DNA, 98 bp, Homo sapiens
ttggcatggtcaagatagacctgaaaaccaagtcttgtagtggagtggtagctgtagccatacctaatagacctcctgatgctgtacttacagatacc

SEQ ID NO: 536772 - DNA, 100 bp, Homo sapiens
aaggaggatgatgatgaggaagggaggatgatggtgaggcaggagaggaggacgaagaggaaatggtggaagcagcaggggaggatgagcgggagctggc

SEQ ID NO: 536773 - DNA, 100 bp, Homo sapiens
gaggcccatggagcaagataccaggctgtcattatttgtatcaaaaacaaagaatttgaaaaggcttcaaaaattttgaaaaaacatatgtccaaggacc

SEQ ID NO: 536774 - DNA, 82 bp, Homo sapiens
ctggccgccgttgcttacctgctgaaccttgtcctgaagcggtgtccctggccagtgtccttccacctgtccacaagcatgg

SEQ ID NO: 536775 - DNA, 100 bp, Homo sapiens
ctgggcctctgcattgcccgactccgtaggagcgcgggggcggctcctgctcttcctggactcctgagcagagaccttattgcaatatgcaagcaacaag

SEQ ID NO: 536776 - DNA, 100 bp, Homo sapiens
aaatggcagagaatacaaatttgatgtttcgtcagagttactagagattacaggctgtgccagccctggaaaaacagttacaattgttgttcgtggttct

SEQ ID NO: 536777 - DNA, 75 bp, Homo sapiens
agaaagcaggcgaacccgcggcgcaataacggtaaagaggatgaatatccaaagaagcccttggggcagcttcca

SEQ ID NO: 536778 - DNA, 90 bp, Homo sapiens
gttccatcagcctcggaatctcctcctggccttggttggggaagtgggggagctggcagaactcttgactccctggaggaaaagcggaag

SEQ ID NO: 536779 - DNA, 100 bp, Homo sapiens
gtgggatggatcagctgtgaaaaactctttggatgattctgccaaaaagatcaaattttctccggtggctaaaaagttgtttgtggtaactgcagtgagt

SEQ ID NO: 536780 - DNA, 100 bp, Homo sapiens
tcccagggatcttgagagtgaagatctcgaaggatttcatagctctggacttattggacaaaatgttgacattcaacccacacaagaggattgaagtaga

SEQ ID NO: 536781 - DNA, 90 bp, Homo sapiens
gttcagcaggtcctgttggagatgatagtttactgctagaccactagtggaaactatatttgaaaggggaatggctacatgctttgctta

SEQ ID NO: 536782 - DNA, 100 bp, Homo sapiens
cactgtacatgctttttattacaagactacggagcataggaggaaaattcatcatctgactgcttccccacaacaaagagaaatgatggatcaggcagct

SEQ ID NO: 536783 - DNA, 100 bp, Homo sapiens
gagggcgagcgaggaggatggcggagtcggggctcctgacgaaattgcctgtgttctacctgtactgatggatggcatacagagtcacccccaaaaacct

SEQ ID NO: 536784 - DNA, 100 bp, Homo sapiens
agacagcgattggacagaatttgtgaagatccacatgaagaccatgcccgccgccatgttcaggctcctcacgggtcaggagaccccgctgtacatctag

SEQ ID NO: 536785 - DNA, 88 bp, Homo sapiens
acttcaactatggcagcagcgtggcctccgccaccgtgcacatccgaatgggtagaaaatctggtgtattaactgtgaaaattttaga

SEQ ID NO: 536786 - DNA, 82 bp, Homo sapiens
aattagaagatgaacatttggcaaaaagggcaagacaaggtgaagaggataatgaccatcactggtgcaagctatatttaac

SEQ ID NO: 536787 - DNA, 83 bp, Homo sapiens
cccgcgtccagcacctacgtcccgctgccgtcgccgccgccaccatgcccaagagaaagatctctgttgaggagctggcgcgg

SEQ ID NO: 536788 - DNA, 49 bp, Homo sapiens
ggagttcaaaacccacacataattttctcccaaactggttggcttgact

SEQ ID NO: 536789 - DNA, 88 bp, Homo sapiens
gttaatttcatggtacatgagtggctatcatactggctattatatgggtgacacatctggagactacaggaaagtactgcttgttctc

SEQ ID NO: 536790 - DNA, 75 bp, Homo sapiens
gttggcaacgcgacacagagccagaataatgatctcctttgggaagactacgaggagaaactggctgaccaggct

SEQ ID NO: 536791 - DNA, 75 bp, Homo sapiens
ggggagagctgtttgtgggccagctgccctctgaggagatggtcatgacaggcatccgtgggctctgagaagctc

SEQ ID NO: 536792 - DNA, 100 bp, Homo sapiens
tatggtgacagactatggggcctttatcaaaatcccaggctgtcggaagcaaggaacacgtggccatcagtaatcatgagcaacccattcgcacaccttg

SEQ ID NO: 536793 - DNA, 82 bp, Homo sapiens
acaaaggctgccgagaaagtctagcctcctgtgcaaaggtcaaaatgaaggcctgtcatctttacttcagagtgttactggg

SEQ ID NO: 536794 - DNA, 100 bp, Homo sapiens
tgccgccgccgcgctccggaacagaaatatggctacacacacctttctgcaggagagctgcttcgtgatgaaaggaagaacccagattcacagtatggtg

SEQ ID NO: 536795 - DNA, 75 bp, Homo sapiens
cgccgcggctccggccctggccccgatggctctgtgcaacggagactccaagtgtttcctgaggttataggcggg

SEQ ID NO: 536796 - DNA, 100 bp, Homo sapiens
gactataccaaccagctgctccaggcaatgcagcgcgtctatggagcccaggtgcagtctttgcaagccacatttggaacttttgagtccatcttgagaa

SEQ ID NO: 536797 - DNA, 101 bp, Homo sapiens
gccaaggagatgtacagaatgggccaagctccactgttcagatgcaaaggaagtggttacctggaaggaaaggagctgcagaacttgatccaggagctcca

SEQ ID NO: 536798 - DNA, 96 bp, Homo sapiens
tgcgtgccgtgttccggagccagcagcagggaaaggggcgtattcgtcgaggaaactatccaggtccatcgtctcctgttgtagttcggttgcctt

SEQ ID NO: 536799 - DNA, 50 bp, Homo sapiens
gaatccctggccctgtctaatgcaacagaccgccaggaccttgaggaacc

SEQ ID NO: 536800 - DNA, 100 bp, Homo sapiens
ggatctttccggatcaatccagatggcagccagtcagtggtggagccctcagcagggagagcacctatcagcaatccaggaatgagtgaagcagggaact

SEQ ID NO: 536801 - DNA, 101 bp, Homo sapiens
ttacagagaacctaagtctgtttgcaaagcacctgaactgctctctgatgtaaaggatggagtaaatcaagcagcacctgcatttggatttggcagcagtc

SEQ ID NO: 536802 - DNA, 100 bp, Homo sapiens
gagccgggcagtccctggagcgggccagctgtgagccgtgagctttgaggcggtgggatgtgtcagcagaatgtctcctgcccccgagagcgaccccgag

SEQ ID NO: 536803 - DNA, 98 bp, Homo sapiens
aatgtattgactggagtgagagaagaaatgctgtggcatctgttgtcgcaggtatattgcttggaatacacgaagactctcaaaatcggaagaagctt

SEQ ID NO: 536804 - DNA, 98 bp, Homo sapiens
cggaccgcagtgccccaagagagttcctaatgtggatctaccacccctgtgttcatcgagattccggtctggacctcctggagaagaggcccaagtgg

SEQ ID NO: 536805 - DNA, 100 bp, Homo sapiens
gtaactatcgcctgacagggtatctgaagtaaaagggggtgattatccagggttttcgaagttacagagatcaaacaattgtagatcccttcagttcaaa

SEQ ID NO: 536806 - DNA, 100 bp, Homo sapiens
gagctcccggactttcaagatgggaccaaggttatgatgtgattgctcaagcccaatctgggactgggaaaacggccacatttgccatatcgattctgca

SEQ ID NO: 536807 - DNA, 82 bp, Homo sapiens
gacatttctgtggaagggtggagtttcactttgaaggcggctatgagaggttttcctccgagtacccagaattctgttctaa

SEQ ID NO: 536808 - DNA, 90 bp, Homo sapiens
gaagcagccgccctggagaaacagatcgatcgttctgaagtctccagcctgagttcagaggcccctgagacccctgagagcctgggcagt

SEQ ID NO: 536809 - DNA, 90 bp, Homo sapiens
ctgtgtggcactggcgcaggggacgtcggtgggcgcaggacgagcaaggggcggcgaagaggacccgcaggctgcaaggagcaacagcga

SEQ ID NO: 536810 - DNA, 90 bp, Homo sapiens
cacaagcgcatccaaccccggtagcaaactgatgacttttccgtgctgatttctttcaacctcgcattccccgtcggagccctttctaga

SEQ ID NO: 536811 - DNA, 82 bp, Homo sapiens
agggagcctggccttcggaacgctcctctgcattgccattgttctgagatggggtgttgctcgggctggtttcaaattcctg

SEQ ID NO: 536812 - DNA, 74 bp, Homo sapiens
caggttccagcgcccggcggcccagttcaaaaggtgatgacctatcaacagccattctcaaacagaagaaccgt

SEQ ID NO: 536813 - DNA, 100 bp, Homo sapiens
aaaactaaagcagtagagaattaccttatacagatggcaagatatggacaactaagtgagaaggaattagcagcaaaagtggttcagatgttttatgtgg

SEQ ID NO: 536814 - DNA, 100 bp, Homo sapiens
agatcgtgttggacattagctcccgagcgctggccttctggacatatcaggaacgagttgaagcagttaatatggctgaaggaatcattcacgacacaga

SEQ ID NO: 536815 - DNA, 100 bp, Homo sapiens
gtgcctgtgcttccggagcgagcaggaggacgagacgttgagaaagaagggccttaatggctgtgacagcccagaccccgatgcggacgattccgtaggt

SEQ ID NO: 536816 - DNA, 76 bp, Homo sapiens
acgccgccatccgggaggcccagggaaggtgatgggcagaatctgtttacgaaagacgtgacagtgatcgagggag

SEQ ID NO: 536817 - DNA, 83 bp, Homo sapiens
ctgccccctcacgaccgtggatgccctggattcagtgatctcttctccctggcggaggaatatgaggactcttccaccaagcc

SEQ ID NO: 536818 - DNA, 100 bp, Homo sapiens
ggcagtgtgaggagctgctatggtgctgagtttcctggtagagccggccgagctgaggcggtcgcggccatgaaggtgttgacagctcttctaccacaag

SEQ ID NO: 536819 - DNA, 100 bp, Homo sapiens
aatgtcacccagcacgtgcaaggacacaggaacctctccacgacgaaagtaggcggtacgaaccctaatggaggcagttttgaggaggtcctcagctcca

SEQ ID NO: 536820 - DNA, 73 bp, Homo sapiens
aatcatctgtaaacctgataacactgcatgaaatgttagaggcacgtctgagaatggtggatgtggtggagaa

SEQ ID NO: 536821 - DNA, 90 bp, Homo sapiens
caggagaccactgtggcacacctgtgctcaggccgccgctgcccagcagatcccgatctcccttcacacatctctgcaggcacaagctca

SEQ ID NO: 536822 - DNA, 98 bp, Homo sapiens
aaaagattttgctgtcaaagttgtgtcagtgaatacaaacaggttgatgctatgaaactgggagtaaaggaaatgaagaaggcatacaagcaagtgaa

SEQ ID NO: 536823 - DNA, 75 bp, Homo sapiens
ctccctcagcttccgccccaaaagactattgcccagaagaaaagatgtttggttttcacaagccaaagatgtacc

SEQ ID NO: 536824 - DNA, 98 bp, Homo sapiens
ttgactacaaagatatttcagagagcttcttactggatttcttcatggtgtccattttatttagcaagggccagatattcgaagcttacaacatggca

SEQ ID NO: 536825 - DNA, 98 bp, Homo sapiens
atggcttcccttccgttttcgcgtggttcttttgcaaggctacagaagaagtttccaaaaatctggttgccatgaaagaaattctgtatggcacaaat

SEQ ID NO: 536826 - DNA, 98 bp, Homo sapiens
accactggaaagtgaggaattttgaagtacaccgtggtgacattgtatcattggtattgttgtgtccactgtatcctggcttgcttgttctgcgaatt

SEQ ID NO: 536827 - DNA, 50 bp, Homo sapiens
cggaaaaggacgcaaagttctccggcgagacccctttgctgatgcaagta

SEQ ID NO: 536828 - DNA, 71 bp, Homo sapiens
tgtgggagtggacgggacactctacaagcttcatccacactgattggggccctggtcctgtctgtgggcat

SEQ ID NO: 536829 - DNA, 88 bp, Homo sapiens
ggcatcggctgcgagctcctcaagaatctcgtgctcaccggtttctcccacatcgacctgactggcacagcctccaggttggcgggct

SEQ ID NO: 536830 - DNA, 99 bp, Homo sapiens
ccgccatctttaccggctgtggctcagcatggtcagtgccgtttaacctttattgtggtggagtccaccccgctgtggaatcccagtcagaagttccag

SEQ ID NO: 536831 - DNA, 50 bp, Homo sapiens
cctcaggcgtgcgcggacggtgtgcgggttttgaggttttgctgaagata

SEQ ID NO: 536832 - DNA, 82 bp, Homo sapiens
gttagacagtgaatgtggaaaggagattgacagtcacaattttgtaataaggaagcaagatttccagatgtagcaaatgggt

SEQ ID NO: 536833 - DNA, 97 bp, Homo sapiens
tgtggagatggcggctcagaagataaacgaggggctggaacacctcgccaaagcagagaaatagatgagttccacccgttcatcgaggccctgctgc

SEQ ID NO: 536834 - DNA, 100 bp, Homo sapiens
gagaggagacttccttgcttctttggagaatgatatcaaaccagtgccagtcattgaaatcccaggttttggaaatctttctgctgtaaccatttgtgat

SEQ ID NO: 536835 - DNA, 100 bp, Homo sapiens
caaaattctacgttagagagactgaaaagacatctaatttcattgctcggcagggcaaggggacgcgagataaggtcctgatcagaatcatggtctcccg

SEQ ID NO: 536836 - DNA, 78 bp, Homo sapiens
gactggctgtgttattctgcatattgcagttcttgtcaatgacctggatacagcagttaaaacagttactggaggatt

SEQ ID NO: 536837 - DNA, 75 bp, Homo sapiens
tgttcctacaagtcttccagaggagttcttaatggctactgcagcactggggtgtcagttgttggtccgacccag

SEQ ID NO: 536838 - DNA, 100 bp, Homo sapiens
catatcatccacagcctagatgaagtcaatttcatacagaaccttgtgttttacattgaagctgcatataaaactgctctctggggagtgatcaaacaag

SEQ ID NO: 536839 - DNA, 83 bp, Homo sapiens
caagaactgaaaactctgagtgatgttcagaagtttgcagagataaatgggaatctaagggaggaaattatcaactgtgcaca

SEQ ID NO: 536840 - DNA, 100 bp, Homo sapiens
catgtctgcgagccaggattcccggttggtgttcgaggaagagacattgttgttcttggtgtggagaagaagtcagtggccaaactgcaggatgaaagaa

SEQ ID NO: 536841 - DNA, 100 bp, Homo sapiens
cgtcctcaagaaagtcctgtgccggcagctgtggccaacagcaacagagagagtccaggcagatttcaagctgatgtgtgataatgcaatgacatacaat

SEQ ID NO: 536842 - DNA, 82 bp, Homo sapiens
ggcgaatcacttataaatggcgccgaagcaggacccgaagcctaaattccaggagggtgagaagccctaccactgcaactgg

SEQ ID NO: 536843 - DNA, 83 bp, Homo sapiens
aaagaagtagaagaagatgaatacaaagctttctacaaatcattttcaaaggagtcgatagcagcagttggtgacgagatggc

SEQ ID NO: 536844 - DNA, 90 bp, Homo sapiens
tgccaaaaggaaatgcatctttatgtcagaaacacaaagcagcccaaccaaaggaacccctgaacagtgcccaagtgttgtctctttgtt

SEQ ID NO: 536845 - DNA, 82 bp, Homo sapiens
tctctacatcccatctcaatcagaattactagattttctctcaaactacgagctcctacagaagaagggaaaaaagagctgc

SEQ ID NO: 536846 - DNA, 98 bp, Homo sapiens
agaacatgatacaggagcttatagaaactaatcaacagcttaggtattaatctctggagaagacacatccacagttagcactttcttcagatgctgac

SEQ ID NO: 536847 - DNA, 89 bp, Homo sapiens
ttcagttgtggcggttgctggtcagtaacagccaagatgctgcggaatctgctgtactatactggcaattgctggagaagattttgcaa

SEQ ID NO: 536848 - DNA, 74 bp, Homo sapiens
cagaagactcctgcgaatctggtcccccggcagagggcagtagagatggccggcccaaggcctcggtggcgcga

SEQ ID NO: 536849 - DNA, 75 bp, Homo sapiens
tgaccgagaccgcggccgggaccgaggagccctgaggatgatgacaggaaggtccgaaggagagaaaaaaaccga

SEQ ID NO: 536850 - DNA, 76 bp, Homo sapiens
ggataacactgtacaagctttcaaagtcaatggtgtcaaattgagaaccaggtagatccccaccacctacagtaaa

SEQ ID NO: 536851 - DNA, 50 bp, Homo sapiens
aggaggaaggcgtgtgctgtggtgtactaatggtcacttgatgtgcgctg

SEQ ID NO: 536852 - DNA, 100 bp, Homo sapiens
gaggttcaggaaggattcctgagattccaggaggaagtactggcgaagtgctccatggtacaccagaggatcgcttcctggcagaatttgggagctgttt

SEQ ID NO: 536853 - DNA, 100 bp, Homo sapiens
ctggccagcacgctggactgcgagacggcccggctgcagcgagcgctggacggagaggaaagcgcttgggtgatggttgcagttttccaactcgccttgt

SEQ ID NO: 536854 - DNA, 75 bp, Homo sapiens
tctatcagtgggtcagaaaatggagatggctgcgcaccatctctgtgatcctgttcctcaacaagcaagatctgc

SEQ ID NO: 536855 - DNA, 103 bp, Homo sapiens
tgtggagcttcagcggcctggaggaggacgaggcgggcgagaccacagtccatgccatcactgccacccagaagactgtggatggcccctccgggaaactgtg

SEQ ID NO: 536856 - DNA, 90 bp, Homo sapiens
ggaggccatccggctgcgggaggaggccatcctgcagatggaggtgaccaagaatatggcccaggtgaccaaagccctggacaaggccct

SEQ ID NO: 536857 - DNA, 50 bp, Homo sapiens
ggatgatgccaaagttttattagatgtgccgtttgggggtgctaaagctg

SEQ ID NO: 536858 - DNA, 82 bp, Homo sapiens
acagggcgctcctgagaccctccagcgctgcctggaggagaatcaagagctccgagatcaacaggcggtccttcgggtcgga

SEQ ID NO: 536859 - DNA, 98 bp, Homo sapiens
ggaggaggaaaatattggtacttcaaacatgcaagttggaatggaggaatgcaggctcaggttggaatgccaggaagtggaccagtgtccatggaacg

SEQ ID NO: 536860 - DNA, 100 bp, Homo sapiens
acgagttcaacgcccacctggtttgtcgcatgtgctgtatggccctggaggctgcccgaatttgtgccaataagtacatggtaaaaagttgtggcaaaga

SEQ ID NO: 536861 - DNA, 90 bp, Homo sapiens
cggaacctgtggaagaacattgtggtcctgtgtgtgaactcacatatgaagatccatgagaaggaccctaacagtgccacagccacagcc

SEQ ID NO: 536862 - DNA, 100 bp, Homo sapiens
tgagctgccaacgatacctgaggggggttgttttgatgaaagtgaaagcatgaagaaagcagtgtcactgataaatgcaatagatacaggaagatttcca

SEQ ID NO: 536863 - DNA, 100 bp, Homo sapiens
gttacagctgctcatgaaccacttggcaaatactatactggcaattgctggagaagattttgcaattgttgcttctgatactcgattgagtgaagggttt

SEQ ID NO: 536864 - DNA, 75 bp, Homo sapiens
aggccatggaggacgaggagagacagaagaagctggaggccggcaaagccaagtgaactgaattcaaagctgcaa

SEQ ID NO: 536865 - DNA, 73 bp, Homo sapiens
ggaagaggtggccataccgttgaccgctcctccaactaaccagtgactgccaacagccagcccaatgtcgaat

SEQ ID NO: 536866 - DNA, 75 bp, Homo sapiens
cgggaggctccgcggagccgaggcgtggaggttgggtgggactatatcagcatacaagatagtaccagatgaaat

SEQ ID NO: 536867 - DNA, 100 bp, Homo sapiens
taacatcacactttggatctttgcagtcactgcaggcatgttcctctatgtagccttggtggatatgtggacatttgggagcaataaaaataagaagaaa

SEQ ID NO: 536868 - DNA, 100 bp, Homo sapiens
tatagaaggcggtcaccttctccttactatagtcgtggaggatacagatcacgttccagatctcgatcatactcacctcaatcagtgctgctgatgtaga

SEQ ID NO: 536869 - DNA, 100 bp, Homo sapiens
tttttatttggcagatctgaagggaaagctccagatactagagacccggtgagcctccattgataaaaggttggcttccttatcttggagtggtcctgaa

SEQ ID NO: 536870 - DNA, 133 bp, Homo sapiens
aaggtgagcggttcctggtagtaagcttgggaggtaggagttggcgagtagtagcgaggagacgaaggatttcaaatatgcgtgcattagagaatgattttttcaattctcccccaagaaaaactgttcggtt

SEQ ID NO: 536871 - DNA, 83 bp, Homo sapiens
ccaagaaccaaccctgccagcacctggaccttggacattcagacttcagaatgctctcatgcataagaattgctccatttgag

SEQ ID NO: 536872 - DNA, 51 bp, Homo sapiens
ggatgaggcgtgcaggcctgggtgcttacactccagagcccctcagcagtt

SEQ ID NO: 536873 - DNA, 98 bp, Homo sapiens
tgaaacctgggaaggtggtgcttgtcctggctggacgctactccggacgcaaagctgtcatcgtgaagtactcccctgccctcaacaagatgttttgc

SEQ ID NO: 536874 - DNA, 80 bp, Homo sapiens
caaggagctaaagcagcgtgcgttcagccctggggtggagcagttctggaggttttatagccacatggtacgtcctgggg

SEQ ID NO: 536875 - DNA, 51 bp, Homo sapiens
ctgaagggggactacaggttcgagagtcagcccaaggccaaccccactgtc

SEQ ID NO: 536876 - DNA, 75 bp, Homo sapiens
cacttgctctgcgctgaggtgctgggacagccatggtttcagacgccttgctcgaggttttgccctgctgaggat

SEQ ID NO: 536877 - DNA, 96 bp, Homo sapiens
agcaagagaatgtgcagtatgcttactgcagagtgggtctgggcatctgctacgacatgcggtttgcagagcttgcacaaatctacgcacagagag

SEQ ID NO: 536878 - DNA, 100 bp, Homo sapiens
caaagctgggagagactggaccagaccatgggcctgagcatcagggagtgaggattctttggacaccagcctgagagctcacggggtccatgccactaag

SEQ ID NO: 536879 - DNA, 82 bp, Homo sapiens
ccgtctggccgccggccacctggtccagctgcccgcaggggtggtcaaaatgcagatcttcgtgaaaacccttaccggcaag

SEQ ID NO: 536880 - DNA, 90 bp, Homo sapiens
tgcctcatcatggagctcattggtggcgtggtggccttgaccttccggaaccaggcataatcaccagcaacacccgggacaataatacgg

SEQ ID NO: 536881 - DNA, 100 bp, Homo sapiens
cgctctatagccaaggaaggcttcgagaagattagcaaaggtgctaatccagtggaaatcaggagaggagttggtaaaatattaaagaagatcaacaagg

SEQ ID NO: 536882 - DNA, 100 bp, Homo sapiens
cagcccccgaaggccctatcaggacatggagtatgaaagacgaatcctaatgtacctggctagctggtggtgagtaggggctttggggccaacttggtgg

SEQ ID NO: 536883 - DNA, 98 bp, Homo sapiens
tgctatggccctgtaccacactgaggagcgcggccagccctgctcgcagaattaccgcctcttctttaccaggcccagacatgtccgtccttgtaagt

SEQ ID NO: 536884 - DNA, 100 bp, Homo sapiens
aacacggaaactgagtatgggatctgatgatgctgcctacacacaaggtactacctttcccaagccaggtggtgtacaacagggtaggcaagtgtgggag

SEQ ID NO: 536885 - DNA, 83 bp, Homo sapiens
atttcatgtgcgatgatgaggaggactacgacctggtggcagatatgctgttggagctctgtgtcaccgagttggaggatgtg

SEQ ID NO: 536886 - DNA, 85 bp, Homo sapiens
agaagcagaattctcctccgctggacatagcgaggggctacgagtatgtgttggagccctcacccgtctccctgcctctggacag

SEQ ID NO: 536887 - DNA, 100 bp, Homo sapiens
taggggattctgcaccaacactgcacttaaataagggcacacctagtcagctggatcagctcctttgtggcagtaaagcagacacttgggatgcaaagac

SEQ ID NO: 536888 - DNA, 49 bp, Homo sapiens
cggacatgatcctctccgcctctcgagggtcaaagctgcgaaacctgtg

SEQ ID NO: 536889 - DNA, 83 bp, Homo sapiens
ttcctcctcctcctccacctccggcttttgggggatcactgtcctctctcggcagcaggtgaaagaaaatggcccgaaccaag

SEQ ID NO: 536890 - DNA, 97 bp, Homo sapiens
ggaatttgaagccctcatgcggatgctcgataatctggagcgcctggaccatgctgctgagcgcctactggcacggcctccacccgggctactacct

SEQ ID NO: 536891 - DNA, 100 bp, Homo sapiens
tcggagatcatttgggagatccaagagattcagtatcactcgctcccttgatgatcttgagctttcccagccagctgtaagcattgaaggacaggtatca

SEQ ID NO: 536892 - DNA, 100 bp, Homo sapiens
agaccacatctgtgtgcaaaccagaacaggtggccaaacaaattgttaaagatgccataatgctttgggaaaatggaattaatggcattttagcagatga

SEQ ID NO: 536893 - DNA, 90 bp, Homo sapiens
cagttcgctacacagcaatgcatcgaggttgtctgcattcaaaagagcattctattaaagctaccttaatttggcgcttatttttcttaa

SEQ ID NO: 536894 - DNA, 104 bp, Homo sapiens
ttgttaaggattccaagtaactcttatttggttcagcagactgtacaggatctttttggcagagccccaagtaaagctgtcaatcctgatgaggctgtggccat

SEQ ID NO: 536895 - DNA, 98 bp, Homo sapiens
tcatcttcttccttatacgtcaatgagcactatccacacgacaggcctacactctattcaaacagtttaaggaagaaatctctaaacgttttaaatca

SEQ ID NO: 536896 - DNA, 90 bp, Homo sapiens
ctgctattgaaagagagtatgcacagctctttcgacgtgtagcagcagctttgccgggaatggaaagcacacaggacagaagcagagaag

SEQ ID NO: 536897 - DNA, 75 bp, Homo sapiens
actgagaagcccggcgacggaggaacgcaggtctgctgccagacaagagtgagaatggtgaggcatatcagagaa

SEQ ID NO: 536898 - DNA, 100 bp, Homo sapiens
cagcaggcgctcaccatgttccctggagcacggggtcactctggtgcccattgaggagttcagcccggagttcgtggagccccgggtcagctgcatcagc

SEQ ID NO: 536899 - DNA, 100 bp, Homo sapiens
cagtaaccctgagacaaccacttctggtggttgccactcacctgaggatcccagcatcctggaaacctgtgccctaatcatgaagataatttgcttggag

SEQ ID NO: 536900 - DNA, 95 bp, Homo sapiens
gcggccctggcggtgctagaagaccggttccagccgaacatgacgaaaccagggaagtggtgtgccatgcacgtgcgtgtggcttacatgatcct

SEQ ID NO: 536901 - DNA, 51 bp, Homo sapiens
ccccacagtgcccggctcggctgcgtcaggatggctaaaggtgaccccaag

SEQ ID NO: 536902 - DNA, 82 bp, Homo sapiens
gccctgttggttccaatgctgggattggctgcttttcagtgaagacatttccacctggacacctgaccatgtgcctgccctg

SEQ ID NO: 536903 - DNA, 83 bp, Homo sapiens
tgtaaagggtatctgatcaagccaacaacagtgacggaatgcctccatacatgcgcattctacattctaaaggggagctcagt

SEQ ID NO: 536904 - DNA, 74 bp, Homo sapiens
ccgggcgcgggcagagcgcggcggcgcgggtgctggagaatctggtaaaagcaccattgtgaagcagatgagga

SEQ ID NO: 536905 - DNA, 95 bp, Homo sapiens
ctggttatagatggacaagagacgatcattctgcaagcaggcaacctgaatacaggagcaggggagagaagacagaagaggttggagaggtcagg

SEQ ID NO: 536906 - DNA, 100 bp, Homo sapiens
agttatccacggactggaagatcaaaagaggattcatgatgttgctatcaaaagttgagaaattgtcagaagaaatcatggagataatgcaaaatttaag

SEQ ID NO: 536907 - DNA, 74 bp, Homo sapiens
gatagcaaaagcttatgctgcatactgagaaactttgtacttttagtcagaggttccctctcccgtccatgtac

SEQ ID NO: 536908 - DNA, 100 bp, Homo sapiens
atttcttggaaccgtcacaatttccctcagaatcagagtttctcaaggactttggggatctcaagacagaggaacagcggaccgagaaagtcgttacgag

SEQ ID NO: 536909 - DNA, 101 bp, Homo sapiens
tctgcgtctgtgaggccaatgcaaatgaactgtggctgcaccatctgtcttcatcttcccgccatctgatgagcagttgaaatctggaactgcctctgttg

SEQ ID NO: 536910 - DNA, 98 bp, Homo sapiens
gacagtgaaaccctttgccatcgacatatttcctgtcaccaacaaagatttcaggacgactgggtttggattcagaagaggattattatacaccacaa

SEQ ID NO: 536911 - DNA, 100 bp, Homo sapiens
tgggcctgcaggtctctgtcgagcagcggacgccggtctctgttccgcaggatgggacatatcttcagggcctggagactgaagccacctatgacgcagc

SEQ ID NO: 536912 - DNA, 100 bp, Homo sapiens
cgaaagcagttgccatggagttgctctgagtaaccctgaggcagtgggacgccaagactggagaggaagcgactgcgggcgcattggagtgactgtctgg

SEQ ID NO: 536913 - DNA, 100 bp, Homo sapiens
gccgcggcgcggagaagacggccgccaagatggagaagaaggtgtctaagcgctcgcggaaggaggaggtagtaatgaaggtggtgcagctgctacccga

SEQ ID NO: 536914 - DNA, 90 bp, Homo sapiens
ggaacccgaagaagaaaggattcgttacagccagagattgattggtccagaaaagggcgtggtgcacctggcgacagcggccgtcctaaa

SEQ ID NO: 536915 - DNA, 73 bp, Homo sapiens
tgcactacaacaggaaaatcatattatagatggagtaaaggtatataacgagttcattctgccttcggagcga

SEQ ID NO: 536916 - DNA, 99 bp, Homo sapiens
tggaaaaccatataggtcgaaggctggacttgcatatcacctgaggtcagagcatgggcctgagttcattcaaaagtgcctgcagtctgagcctgctcg

SEQ ID NO: 536917 - DNA, 97 bp, Homo sapiens
caggtggggccggtgaagcagtgcttcgtggtgactgaaaaagtgccaggtggagctcaacaggaaagtcctagcggatctggccatctacgagcca

SEQ ID NO: 536918 - DNA, 101 bp, Homo sapiens
gtgcgcatttccattatgagaatgttgagttcggcagcatacagacctagaggatcaagacataatgggagcatttttagacaagccaaagatggaaaagc

SEQ ID NO: 536919 - DNA, 100 bp, Homo sapiens
cgttgacaaggcactgctttttcatgacggtgaacctggtgctgggggacggccggtccctgggcctcacgatccgtgggggagctgagtacggccttgg

SEQ ID NO: 536920 - DNA, 49 bp, Homo sapiens
tgtaccaacaccaatgtgaaaatcctcactatggatgggctcattgagg

SEQ ID NO: 536921 - DNA, 97 bp, Homo sapiens
attaaaagagcgaataaagtttatcacgccggggttgaaaggattgttgacaaaaggaaaaataaaaaagggaagacagagtatttggttcggtgga

SEQ ID NO: 536922 - DNA, 153 bp, Homo sapiens
gggccgcctgtggcagcgcctgcgcgacgcctttcccgaggaccggtccgaactggcgcaggggccgctgcggcaagccctctctgggagatggttcaggatggcattgacctcaagagcatcaagtggacccaacactagaagaatagggcc

SEQ ID NO: 536923 - DNA, 80 bp, Homo sapiens
gtccgagacacgcggtgaggcggcgacgggctccggtcacccacaaaagctgtatataatgccagacattggaatcatcc

SEQ ID NO: 536924 - DNA, 82 bp, Homo sapiens
aaaacctgaaccagtaactgaagtatctgcccctgtcaaatcattccagggatccatatggctttggagacagtcgagattc

SEQ ID NO: 536925 - DNA, 100 bp, Homo sapiens
ctggaacccctggagcaggaggaagcggtgattctccaggccttggagtccggcagcgtcttctcttgagggagcaatttggagaagagctggaacccag

SEQ ID NO: 536926 - DNA, 97 bp, Homo sapiens
ggatgttcggtgcagctgccagatccgctgatctagtgcttctcgaaaaaaaccttcaggcggcccatgggatatttggccttgacattaaaggcag

SEQ ID NO: 536927 - DNA, 90 bp, Homo sapiens
tgaacgtctggactctagggaccctgctgaatagctggggctacaggcgtgtgtcactgcgcccagaccaggtgataggtttgatcgaga

SEQ ID NO: 536928 - DNA, 50 bp, Homo sapiens
tggagttcacgactctgagtgctggaaaattgcctaagaattatgaccca

SEQ ID NO: 536929 - DNA, 88 bp, Homo sapiens
gatggccgttactccctttccagtgccatcaagttctccatcttctattgaggccatgtttttggtatactgtgcactggagaaagaa

SEQ ID NO: 536930 - DNA, 75 bp, Homo sapiens
agcagattacttccatcagtattgagccaggagttgaggtggagccgccaccaaaatgcagattttcgtgaaaac

SEQ ID NO: 536931 - DNA, 76 bp, Homo sapiens
cgaaacactgaaattttggcagtgatcgaactgtgagaatttggaaggctcgcaatttgcaagatggtcagatctc

SEQ ID NO: 536932 - DNA, 100 bp, Homo sapiens
ttcctggcctggaaccccgcggggaccctgctggcctcgtgcggcggcgaccggagaatccgcatctggggcacggaggcatcagaagagctaacaattg

SEQ ID NO: 536933 - DNA, 96 bp, Homo sapiens
cctgctgtcacgtcacctggcccctcaccatcaccatcctcatctctcttggaactgccattggatgtccagaatcccctgtagttgataatgttg

SEQ ID NO: 536934 - DNA, 98 bp, Homo sapiens
ccccgcccacttacctcacctctgcgccaggctgcggatgaggatgacaaggggatgaggaaaccactgttgctgcgattgccccggatatgccagag

SEQ ID NO: 536935 - DNA, 100 bp, Homo sapiens
ctttactgtgcagctcctgaaaggagagacacttgtgaacattcaagtgaagcaaaagcctttcatgattataccctggaagctgtcctgaatttcaaat

SEQ ID NO: 536936 - DNA, 75 bp, Homo sapiens
gcagagacagtagccatccagccaggtgaccaagaatatggcccaggtgaccaaagccctggacaaggccctgag

SEQ ID NO: 536937 - DNA, 50 bp, Homo sapiens
ctgccgtccccgctgctgtgcattgggacttaaccaccaccatgtcgagc

SEQ ID NO: 536938 - DNA, 74 bp, Homo sapiens
tagcaccccgagaaccgtcagtttgagccagatgcataagcagtactataatggatgtagacagcacaatttcc

SEQ ID NO: 536939 - DNA, 74 bp, Homo sapiens
tgacctgcctgtcgtcgtggtggccaacaagcagggaagatggaagagttgagtcaggccctggctagtagctt

SEQ ID NO: 536940 - DNA, 101 bp, Homo sapiens
gtgggtgtaatacatcatgaactgcaggccggcacagtcttcactaccgtagaagaccttggctccaagatactcctcacctgctccttgaatgacagcgc

SEQ ID NO: 536941 - DNA, 74 bp, Homo sapiens
agcaatttaaagatcctctccaagtggaaagaggcaaaacctgatgaattaatggattccaaattgagatgcgt

SEQ ID NO: 536942 - DNA, 83 bp, Homo sapiens
tgttaactacaacagaccatctgactgtctcgaggatgcctacggagctggctgcacttcagaatgtcagtgtgtggaggaga

SEQ ID NO: 536943 - DNA, 83 bp, Homo sapiens
ctcgtcgacatgagtgatgtggaggaaaacaacttcgagggcagagatccacctctgatgttcagtgaagactaccagaaaag

SEQ ID NO: 536944 - DNA, 97 bp, Homo sapiens
ctggctttcgtattcgttgttctcggcgggctgtggggcctccgcgccgcggccgttagtcatgtcgggtagtaagcattaataatgtctttcatct

SEQ ID NO: 536945 - DNA, 83 bp, Homo sapiens
ctttgccgatccgccgcccgtccacacccgccgccaggtcttgccccagaagctgcgggcacatccacgcctgaaatgcggcg

SEQ ID NO: 536946 - DNA, 73 bp, Homo sapiens
ggatatttgagagtccaactggcactgcctccaagactgcagagaatgccaccagtggggaaacattagaaga

SEQ ID NO: 536947 - DNA, 95 bp, Homo sapiens
tgtccagtggaagaccatctacatctcccacaggaagtgtcacacagcagtcaagtatgtcccaaacgtctgtgcaaaaggcagttgaagaagaa

SEQ ID NO: 536948 - DNA, 90 bp, Homo sapiens
ttctactgcatctcgacagcatctcgggtaacaaccgagcccctcctcgcagcattttaggtgatgggcaagtcagaaagtcagatggat

SEQ ID NO: 536949 - DNA, 100 bp, Homo sapiens
ctttcctgcttttggtttccctggcaggggttgaactgtggagtgtgtggatgccttcaattaagttgcagagttctgatggagagatatttgaagttga

SEQ ID NO: 536950 - DNA, 51 bp, Homo sapiens
tatctgttaacagactgcttttacacctacacgttggaacttgccaggaat

SEQ ID NO: 536951 - DNA, 98 bp, Homo sapiens
aagagagtgtgctggtgcctgtcggagaacatcgccaagcagcaacagctggcagcatcacccccggacagcaaggctgagtcatcactagagagtgg

SEQ ID NO: 536952 - DNA, 100 bp, Homo sapiens
gtcaagatgaactgcgcaaaaagctataccagacgtttaaggatcggggtatactggatacactcaaggctcgtggtcccaagaagcatctgaagcgggt

SEQ ID NO: 536953 - DNA, 76 bp, Homo sapiens
caaggaagtgaattcacaactatatagcaagcttacagtaagagtgctcatcatcactgtaggggacctttgaaag

SEQ ID NO: 536954 - DNA, 75 bp, Homo sapiens
ggagtctccgcgtcccgctcgctgggagagaggttgggcccgaaggcatcctgcagaacggggctgtggacgaca

SEQ ID NO: 536955 - DNA, 94 bp, Homo sapiens
gaggaaggaacgaggcaaggagctaaagcagcgtgcgttcagccctgggagttgtctgctggttctcagcttgaagaagattctgcagtcctta

SEQ ID NO: 536956 - DNA, 129 bp, Homo sapiens
atgaatactgctgaggactggggcctcattttggatatctgtgataaagttggtcagtctcgcactggaattgccctggtggaaaatattcctgaaggccttaactattcagaaaatgcaccatttcac

SEQ ID NO: 536957 - DNA, 75 bp, Homo sapiens
ctgagacccaagcagctcagtaaatgctggcctgtgggcggccccaagcaacagcagtgtacaaggtgtcagagt

SEQ ID NO: 536958 - DNA, 96 bp, Homo sapiens
gagctgagcgacccagcccgcgagcgagcatcatggcagaacaggatgtggaaaacgatcttttggattacgatgaagaggaagagccccaggctc

SEQ ID NO: 536959 - DNA, 50 bp, Homo sapiens
tacttcattgctccttcaggacatgggaactgtggctgcaccatctgtct

SEQ ID NO: 536960 - DNA, 112 bp, Homo sapiens
cgcaggggttcctccaagatggcggcgcagaggaggagcttgctgcagagtatttggagcaagaggtggtggtggccttcccccgaagaaatttggtaatcctggggagcgt

SEQ ID NO: 536961 - DNA, 100 bp, Homo sapiens
tcgctgtcgccgtcgccgtcgcccgaggtcccagcggctctaccagattgttgtggaggcctctcacccgcacaggttcctgatgaaaagttatgatcag

SEQ ID NO: 536962 - DNA, 85 bp, Homo sapiens
agtctctgtcctctgcatctggtggtcctggctctgccatatgacacccccgtgcccggctacatgaataacactgtcaacacca

SEQ ID NO: 536963 - DNA, 100 bp, Homo sapiens
attggaccccagaggtcatcccagctccagacgtggacacattttcttccaatgtgccggtggtggtgtgcacattgagccccggtatagacagttcccc

SEQ ID NO: 536964 - DNA, 83 bp, Homo sapiens
cccatacctgatccggagaatcgaggagctcaacaaggtaaggctggcctctctgcagtcagaggtctgagctctgccatggg

SEQ ID NO: 536965 - DNA, 106 bp, Homo sapiens
cacacactatggcgctgaaacggattaataaggtgttcttcaacggtgccaacgtccggcaggtggacgtgcccacgctgaccggagccttcggcatcctggcggc

SEQ ID NO: 536966 - DNA, 100 bp, Homo sapiens
ggggaagatttacctagctgccagcctggctttctccggaccccctgtttctggaacagaggagggtcagagaagcaaagaccgaagaggacggccctgc

SEQ ID NO: 536967 - DNA, 90 bp, Homo sapiens
aactacaaaagactcagagactatataagtagcttaaagatgacaccttgcattccctatttagatgctggcccgcgagagacattgatg

SEQ ID NO: 536968 - DNA, 106 bp, Homo sapiens
agggccacaaagtgaccaagaacgtgagcaagcccaggcacagccgacgccgcggggtctcggcgcggaagatggccggcggcgtggacggccccatcgggatccc

SEQ ID NO: 536969 - DNA, 75 bp, Homo sapiens
ctcagccgctgtgggctcctggggagatggaggggccggggctgggctcgcaggcaattgctggctactttgata

SEQ ID NO: 536970 - DNA, 75 bp, Homo sapiens
ccaaaatcagtgattctacatctcaagctcatattttgaagtgtttacgggcttcctgtgtccagtaccggttag

SEQ ID NO: 536971 - DNA, 96 bp, Homo sapiens
cgaccgggcgcaccgaccatggcctccaaatgccccaagtgcgacaagaccgtgtacttcgtgtcacatttgaagacgagcactgaggatgaggaa

SEQ ID NO: 536972 - DNA, 88 bp, Homo sapiens
ggttggtgcttcctgttcgcagctgcggcaggacactccggacgcaggcccggccaggagagttcgtctgcatcgagtgcggaaagag

SEQ ID NO: 536973 - DNA, 100 bp, Homo sapiens
ttccccacttccctgcactctcatcgctctcggcctcggcctcggcctccgacacggatgtagtaactggagttagtcccctgctcttcaggaaactcag

SEQ ID NO: 536974 - DNA, 74 bp, Homo sapiens
caagaccgctgtgtggaggtagccgcagcgccagcaccagtctgttaatgaccaaccaccctgcaccaaattta

SEQ ID NO: 536975 - DNA, 73 bp, Homo sapiens
aacagacaagacacttttcagaaagacagccggaagtcggtgcagcccacctcagaggagcgcatccccaaga

SEQ ID NO: 536976 - DNA, 100 bp, Homo sapiens
agagaatgtatgaagaacagtcacaggacagagcagtcattatggcgaaccttggctgctggatgctggttctctttgtggccacatggagtgacctggg

SEQ ID NO: 536977 - DNA, 133 bp, Homo sapiens
gccagtgaggcccgcagcaccgccagtgaatgccccagccttctcagcaccactgcagaggacagccttgctcctgtatgacagccccaaggcccggcaggaggtagaccatcactggcaggcttctggcggc

SEQ ID NO: 536978 - DNA, 49 bp, Homo sapiens
ttcttcttcgagtatttgtagaagggctgtgaacccaggcaggtccctg

SEQ ID NO: 536979 - DNA, 75 bp, Homo sapiens
atttacgcggatgtcggcgaagagttcaaccagggcacggccgagcagatgaggactgtgtggacgaccgggcca

SEQ ID NO: 536980 - DNA, 51 bp, Homo sapiens
tcgaaaagaaacaatgactatgattcttaaaatttacatagtacatgacga

SEQ ID NO: 536981 - DNA, 101 bp, Homo sapiens
cacacccctgtattctcctccgaaccccttcatgcccaaatcccggaaactccagcgtgtctccagccgtgtgcctccggagccagcgtggtggccataga

SEQ ID NO: 536982 - DNA, 74 bp, Homo sapiens
gccgaggcccggcggaggaggcggctccgggggaacccgccgccggcatgtattccactgatgagaacctgatc

SEQ ID NO: 536983 - DNA, 74 bp, Homo sapiens
tctctgccgtgaatcattcctgcagatgaaaaagtgtgacttggcagctgaattgggaagcacgtctactgctg

SEQ ID NO: 536984 - DNA, 98 bp, Homo sapiens
ggacttctcgatctctggaggcacctgttgcaagtgacagggcaccagctgagagacagaatttttggaagaacttaggaaagaaactaagaaaagac

SEQ ID NO: 536985 - DNA, 98 bp, Homo sapiens
cgccctcaccacccctatccagacggctgcccttcaagtaccagcaaagtgtttcatggatttcaaagctggaggcgccttatgtcacattcttgggg

SEQ ID NO: 536986 - DNA, 98 bp, Homo sapiens
ccaacatggcggaacgcaggagacacaagaagcggatccagcatcagaggctccttgaaatgctagatacagagaaggaactgttaaaagaaaaaata

SEQ ID NO: 536987 - DNA, 98 bp, Homo sapiens
ggtgtctacagagctgagtccattcacactggtttggaagttgcaatcaaaatgagtctgccccaaattctccaagaattggaagcccattgagccca

SEQ ID NO: 536988 - DNA, 83 bp, Homo sapiens
ctgggacaatggcagctgaccctgttgtgagtgctgtgtggatgagagcagggcaaacttgaagataaatcttttgactccag

SEQ ID NO: 536989 - DNA, 82 bp, Homo sapiens
gctcaacccctacccagatctcagagatcatcattaaacttatcaaggatatggcagcacgtttctgagattaagatggaag

SEQ ID NO: 536990 - DNA, 83 bp, Homo sapiens
ctttgccattattctcggggctttcatagcagctgggtggtgaagcagtattttccaatttgaagattcatttgaaggtggct

SEQ ID NO: 536991 - DNA, 83 bp, Homo sapiens
agactctaggcaggctggcaggcaacaccttaggaaactaatctggattcactccctctggttgatacccactcaaaaaggac

SEQ ID NO: 536992 - DNA, 97 bp, Homo sapiens
cagcaccgcagatgttgtcaaggtggcctaccaggaggccaggggtgtcgccatgaacaatgtggtggggcgcttgtgcaatgaatgtgctgacggc

SEQ ID NO: 536993 - DNA, 75 bp, Homo sapiens
acaagagactgcagtctcgcacagagacatgtagactgccaaagtgtatgggatgctttcaagggtgcatttatt

SEQ ID NO: 536994 - DNA, 90 bp, Homo sapiens
caaatagtacttcaagagcacagtcttatgtaagctctggacttattggacaaaatgttgacattcaacccacacaagaggattgaagta

SEQ ID NO: 536995 - DNA, 87 bp, Homo sapiens
ctaccactgctggcgctgaccttcatcacagacaacagcctggtggcagcgggtcccctcctaaccgcaagcgtcctgctaacgaga

SEQ ID NO: 536996 - DNA, 51 bp, Homo sapiens
ctaacaacctgccgaaagcccacacttggcatgttttccacaaatcctgcg

SEQ ID NO: 536997 - DNA, 75 bp, Homo sapiens
attctttaccacattttaagccaggaactgtggctgcaccatctgtcttcatcttcccgccatctgatgagcagt

SEQ ID NO: 536998 - DNA, 100 bp, Homo sapiens
taggtaatgtgtagttctcaatgcatcatgtcaggcagcttatgatgccaatttgtcccatggagcaagatcttgtgcaaaccctgagttgtttgtctat

SEQ ID NO: 536999 - DNA, 100 bp, Homo sapiens
gactttaagaaaggaatgaacatgtatttaaccaagttccaacaaaagaatgctgccgcaggagaaagctttgcagaattcagatctgcaggaactgatg

SEQ ID NO: 537000 - DNA, 82 bp, Homo sapiens
ctggctggccccaaggaagaggacatggaggtggacatacctgctgtgaaaggacgcccgtctcctctccctgaggatttca

SEQ ID NO: 537001 - DNA, 100 bp, Homo sapiens
gctgagacaccaagaggtggttaaagccatattggagtagcgaggaatctgattccaagcaaaaaccagattctctttgtggccagatgggtttgtatgg

SEQ ID NO: 537002 - DNA, 104 bp, Homo sapiens
ttgctcgatggctactctgtaatggcagatccagctccaggtcccacaggggctcttcttccccacgaaaaagatcttattcaagttcatcatcttctcctgag

SEQ ID NO: 537003 - DNA, 97 bp, Homo sapiens
tcggcggccgggagggagttgtcggcgccgcggccgctgcggacggacgctcgcctgccggctgagactacatgaggaaataattgacttttataac

SEQ ID NO: 537004 - DNA, 100 bp, Homo sapiens
tatctgaagcggctcccagtccctgaaagcattaccgggttcgctaggctcacagtgatgtcttggcattgcccattttcaagcaggaagattccagcct

SEQ ID NO: 537005 - DNA, 82 bp, Homo sapiens
tgctgcccggcaactgcaccctgtccgagttggagagtgctctgcagatggagccagctgccttccaggctttatattctgc

SEQ ID NO: 537006 - DNA, 75 bp, Homo sapiens
aatatctgattgggacaacattcagacccatttccagtcatgaatgcatcatcccattcagatgaaacctgcaga

SEQ ID NO: 537007 - DNA, 100 bp, Homo sapiens
gaagacaaaaactcaaggaacatctgttgagaagaaaaacgctttttgcatacaagcaggaaaatgagatgttatccagacggagtctcactctgttgcc

SEQ ID NO: 537008 - DNA, 99 bp, Homo sapiens
ggaaaacctaaccatgaagacttgaacttaatacagcaagaaagaccatcaagtttaccagtcatggaaaatggaagatttgcaaaatacaaatatttt

SEQ ID NO: 537009 - DNA, 90 bp, Homo sapiens
ttactgagaattttccacctcctgacacaacaccactcattgtgtgctgctcatctccctactgaatcagatgcaccaaatcattatcag

SEQ ID NO: 537010 - DNA, 88 bp, Homo sapiens
aagcagtcctcgcatctcagcctcccaaggagctgggacctcagagccctatgagtttgtctctctggaatggctgcaaaagtggttg

SEQ ID NO: 537011 - DNA, 80 bp, Homo sapiens
tcctccaggaggcatctcacaacgtccccaaccagagttccgagtcacttgctggtgggcagcctcacaaaaggagaaag

SEQ ID NO: 537012 - DNA, 83 bp, Homo sapiens
ttttgggctacgttactgtgacagaagccatcagacgggtctccgtctctccaccgggggcttcatccttccagggaggagaa

SEQ ID NO: 537013 - DNA, 100 bp, Homo sapiens
ctatggatgatcgagaggatctggtgtaccaggcgaagctggccgagcaggctgagcgatacgacggctcctgctccagcccagcccccagagagcagac

SEQ ID NO: 537014 - DNA, 100 bp, Homo sapiens
cggaaagcgcctttagtttcaaaaagttgctggatcagtgcgagaaccaggagctcgaggtagcacaggcggagtgcagcggaggcccctgccgctgccg

SEQ ID NO: 537015 - DNA, 108 bp, Homo sapiens
agaagtcggagcaaagaacttaccaccaagcagcatcatcatggacacagccattatgcctctgagtcgcttccctccaagaaggaccaggaggagggggtgatggag

SEQ ID NO: 537016 - DNA, 75 bp, Homo sapiens
cacagcaaccagcaccagatgaaggagcattcctcttggactggtgaattttcagctcgtttccttttgaagctg

SEQ ID NO: 537017 - DNA, 88 bp, Homo sapiens
ggaagctaaagctgtttctgaatgagacccaaacgcagggaggctaagaagtcccgcttgccaatcctaataaaaccatcccggtcat

SEQ ID NO: 537018 - DNA, 80 bp, Homo sapiens
ggcgagctgagcacctgtagtcaatcacacgcagatgccgacaaaaggatcaaggtggcgaagcccgtggtggagatgga

SEQ ID NO: 537019 - DNA, 96 bp, Homo sapiens
gcggcggctgggcgggagccccagaggctgttttggagtcagcggaagatcaccaaggccagggagtggttccaccgcactgtgaagattgactcg

SEQ ID NO: 537020 - DNA, 87 bp, Homo sapiens
ggcatcttcccggaatcagattcaaaggtggtcgtcggttttctgagggtacttcagctgacagagagattcagagaacgttaatgg

SEQ ID NO: 537021 - DNA, 51 bp, Homo sapiens
gaagagagcaatggacatcttttcagcaggccctcgggaccaaggatcacg

SEQ ID NO: 537022 - DNA, 83 bp, Homo sapiens
ggaagcatgtcaccaacccggccttcaccaaactccctggttggggtctgctaggtccccggaatgagttgtttgacgcagcc

SEQ ID NO: 537023 - DNA, 50 bp, Homo sapiens
gtgatgatagccagtcccgagagccaggtgaccgggttattgatgtggga

SEQ ID NO: 537024 - DNA, 99 bp, Homo sapiens
ggatatctttattgaagctcacctttgtctaaataaaggcggggtttcaccatgttgcccagactggtcttgaactcctgagcttaagcaatccacctg

SEQ ID NO: 537025 - DNA, 78 bp, Homo sapiens
gagcaggcactccttggagcaaaagcccactgacgctccaccgaaaggagacggtggctcagggagtaaaggaaggcc

SEQ ID NO: 537026 - DNA, 108 bp, Homo sapiens
ccgattgccaccgcaaagcctacagcaccaccagtattgccagcgtcgctggtctcctctgagcctccggcctccataagacccaaaacagatgacacctcttcccag

SEQ ID NO: 537027 - DNA, 82 bp, Homo sapiens
gcgccttcctcaacgacgcggacatggtcatgagctttgtgaacctgggctcacagaacatttcctgcctgttgctcacact

SEQ ID NO: 537028 - DNA, 80 bp, Homo sapiens
gagtccgcgacggtcgccgcccacggcgagtctattgcgtctgcagacatggatttcaaccagctggaggcattcttgac

SEQ ID NO: 537029 - DNA, 80 bp, Homo sapiens
atccagcctgcggagcctgtggggcagatctgtgtgcctgtggagtcctcaagccccctggtgatgagtaaccagaagga

SEQ ID NO: 537030 - DNA, 75 bp, Homo sapiens
tgaagcggggcgaaaaggacctgcgcctgggggaccgcgtgctggcccgccagctcatcctgcagtatggcttga

SEQ ID NO: 537031 - DNA, 100 bp, Homo sapiens
aagaagcaaaatcaacaagaccagcaccagatccaggttctagaacaaagtatcctcaggtgttccagatcgcgtatgtgattgtgaaggcagctaactc

SEQ ID NO: 537032 - DNA, 100 bp, Homo sapiens
gggaaggatggaagagctgctgttccttatccaccaaaagactcccaacctgatgaaatctcagagaagagcccagaaaatcaaggcaaacatttgttgc

SEQ ID NO: 537033 - DNA, 75 bp, Homo sapiens
ctaagcgaggggatcctcatgagttaagaaacatatttctacagtaacaaatgtggcaattattttggatctatc

SEQ ID NO: 537034 - DNA, 90 bp, Homo sapiens
atcgtctttccgtcctctgaggcgacggccgcggctgcacagtgcctccggagccagcgtggtggccatagacaacaagatcgaacaggc

SEQ ID NO: 537035 - DNA, 76 bp, Homo sapiens
gcagacacaactacgaggtggcgttccgcgggatcttgcagaggagagggtttcctatcgctgaagtgttcacgct

SEQ ID NO: 537036 - DNA, 75 bp, Homo sapiens
gtcatgagtcgcttcaagtttatcgggagaggtgatatccagcctcagttggacagtgctctccaagatgtcaat

SEQ ID NO: 537037 - DNA, 100 bp, Homo sapiens
ctggtgcttgatggtcgaggccatctcctgggccgcctggcggccatcgtggctaaacagccacccctttgctgtgaagttgcttgcgctctgtaagaaa

SEQ ID NO: 537038 - DNA, 100 bp, Homo sapiens
gtgccacctgctgcacccacgaatctgcccacccctcctgtaacccagcctgtttcacttcttgccattatgaatggtttttgattgatctcacaaagag

SEQ ID NO: 537039 - DNA, 76 bp, Homo sapiens
ggagtccagacatctgaaacttggtggtgtatgaggagagccgcatggtcagcctcacagccccctacgtgtcggg

SEQ ID NO: 537040 - DNA, 89 bp, Homo sapiens
gaatatcgagagcgtcatgaacccgagctatagagaaaggagatgagggggatatgagactttctactcggaatatcctgagtgttgcg

SEQ ID NO: 537041 - DNA, 75 bp, Homo sapiens
acaaaaccaacccgcagtggccgaccggagatagctaagatgccgcgcaggaggaagacgcgacatgtcaacatc

SEQ ID NO: 537042 - DNA, 100 bp, Homo sapiens
acaggatcagtaaagaaggaaaaagcagtaaagccagaggaaggtgaccaagaatatggcccaggtgaccaaagccctggacaaggccctgagcaccatg

SEQ ID NO: 537043 - DNA, 74 bp, Homo sapiens
aagcattttgcaacgtagtgttgccaatccagcatttttgaagttggatggcaagcatgtggtgtttggcaaag

SEQ ID NO: 537044 - DNA, 113 bp, Homo sapiens
aagcagccaggacagcagcatggatcttatcagcaggactcagagttctattctgggaactgacattgaccttcagactatagacaatgatatcgtcagcatggagattttct

SEQ ID NO: 537045 - DNA, 83 bp, Homo sapiens
agggattcagcactttgggcaagtggtgtccctggccagtgtccttccacctgtccacaagcatggggaacatcttcgccaac

SEQ ID NO: 537046 - DNA, 100 bp, Homo sapiens
cagccacatctggatgctgtgatgcctgcagtcaaaaagccctttcttcagcagttctattctcagctctccagtgaagaagccaagtcttctaaaggcc

SEQ ID NO: 537047 - DNA, 51 bp, Homo sapiens
gaccacccctgaagaaattgcacaggagtacaagcgcaagctagccagagt

SEQ ID NO: 537048 - DNA, 90 bp, Homo sapiens
cgccgcaccaggtcttgtagcagcgcctcctcgctgccacgtgccgtgggtacccagacattgagtggtgctggtctcctcaagatgttc

SEQ ID NO: 537049 - DNA, 100 bp, Homo sapiens
catggcttggagcacttcctattccactggattgggaaagaccatggcaggtgaagtgctgcggctgggtcagcttctacaactggacagacaacgctga

SEQ ID NO: 537050 - DNA, 98 bp, Homo sapiens
cgaggatgcggggctggtctgcaccgaagtggacatagagggcatggagtttggccctggtgagctggacagtgttggcagcagcagtgacgcggacg

SEQ ID NO: 537051 - DNA, 100 bp, Homo sapiens
tatgcagagacatgagatggtagccaacccctcagatggctcgttcggaacaccacctggatacggctgcgctgcagaccgggcagaggagcagcgccgg

SEQ ID NO: 537052 - DNA, 90 bp, Homo sapiens
ggagacacgccaaagctcccaagattacttctctaacaggatcaccagtttgctccacaaagcacaatgtctcgatcacgacaacccccc

SEQ ID NO: 537053 - DNA, 108 bp, Homo sapiens
agaagccatgcccctcaggctggaacttgccctgtctcctcgcagatgaggactactgttcgaagatttttggaagaatactgagaacggcataaagtgaagatcgac

SEQ ID NO: 537054 - DNA, 95 bp, Homo sapiens
ggagtctgatggaaagagataggcgcatctctggagttgatcgttactatgtgtcaaagattcttcaggagatgatgaaagagattgactatgat

SEQ ID NO: 537055 - DNA, 50 bp, Homo sapiens
agagcgcagccatcggtgcgctgcaggactgatcctttgaaatactccag

SEQ ID NO: 537056 - DNA, 100 bp, Homo sapiens
agacgctcaggctgtgttctcaggtgcgctacaaggaggagtttgagaagaacaagggcaaaggtttcagcgtagtggcagacacgcccgagctccagag

SEQ ID NO: 537057 - DNA, 100 bp, Homo sapiens
atttgctacagcatcccacattaagtcaacggtagtagccatggttatgtgggttccagtagtagaatatcaagaagaacacatttatgctccgctgcta

SEQ ID NO: 537058 - DNA, 123 bp, Homo sapiens
gcctcacgggaacaagcaaggagtcatatatccttcatatgatccatcttagtgaagaattaggatacaggtggcccgacgttggggcattcagaaaaacaggccagctatgaactatgataa

SEQ ID NO: 537059 - DNA, 100 bp, Homo sapiens
cttcatccgaaccctcagcctcaagccgctgctcttcgaacctcaagaaggcatgaagccagcccctgcagtgccgtccacccgcccctctgggcctgcc

SEQ ID NO: 537060 - DNA, 100 bp, Homo sapiens
cagcactgtaccccaggatgctgccaccatccccagctcagccatgcaggccccaacagggccgcgatgggcctcttggaacattggtgtgttcatctgc

SEQ ID NO: 537061 - DNA, 74 bp, Homo sapiens
taaatttcggtagccatggcacaagaatataatgtgtagcactttgtagtttaggtatttggatttgtgaagaa

SEQ ID NO: 537062 - DNA, 96 bp, Homo sapiens
ctcattttgattgtagtagcagtggagggtgctggaaatgtaaacaagaatagactgttcattcctgatggcttttagtctatactaacatattgt

SEQ ID NO: 537063 - DNA, 50 bp, Homo sapiens
ccgccctcgcctcacctggcgcagggtcctaaaaaggtggggacgctgtg

SEQ ID NO: 537064 - DNA, 80 bp, Homo sapiens
tccggcgccgaatcactgactggcacaggtgttgggattcatgatgttgctatcaaaagttgagaaattgtcagaagaaa

SEQ ID NO: 537065 - DNA, 90 bp, Homo sapiens
cggctagtacgcgaattggagaaaaagttcagtgggaagcatgtcgtctttatcgctcagtactacgacatttctgccaaaagtaactac

SEQ ID NO: 537066 - DNA, 88 bp, Homo sapiens
taattgggatgatgacaatgtagaggatgacttctctaatcagttacggacaaagccaaaggccccttgttagctggccatccctgcc

SEQ ID NO: 537067 - DNA, 74 bp, Homo sapiens
cttgatgagaaggacccacggcgtctgttcgaagggtgtccgcaatgttgccagtgtctgtctgcagattggct

SEQ ID NO: 537068 - DNA, 98 bp, Homo sapiens
tgctgatgaaagatgacggctccttctgcgtctgtgaggccaatgcaaatggtcatgatcagagttcgactcttgcccaacactctgttgaactgact

SEQ ID NO: 537069 - DNA, 74 bp, Homo sapiens
cgccataccttggaacagcataactggaacatagagatagaagatggtgagatttttgcaagtattaaccagaa

SEQ ID NO: 537070 - DNA, 75 bp, Homo sapiens
accccgcggccggacgacccaagcccgctgagcaggatgagggaacatcatttacagcgagcaatttcagcacag

SEQ ID NO: 537071 - DNA, 142 bp, Homo sapiens
gtttgacaggtcaaaactgaagaaaactaatactgaagaaaaaaatactcttccctcaaaggaaagcttgttagagtgctgtgcaagatgtctggtaggggccccctttgcttccctggtggccactggattgtgtttcttt

SEQ ID NO: 537072 - DNA, 100 bp, Homo sapiens
catctggcagccagtcatggacaccgtgatattgtacagaagatgtccagctcgccgctgtccaagaaacgtcgcgtgtccgggcctgatccaaagccgg

SEQ ID NO: 537073 - DNA, 97 bp, Homo sapiens
cagtaagaagggagcacggaacagattcaagctcagcaaaagctgatgaagcattgaaagccaaagaaagaaatgaggaagaagcaaagagaagaaa

SEQ ID NO: 537074 - DNA, 101 bp, Homo sapiens
tgctcttgaggttcacagatgatacctttgatccagaacttgcagcaacaatagcctctacggcagacacatgcaggccaacccagaaccaccgaagaaga

SEQ ID NO: 537075 - DNA, 100 bp, Homo sapiens
gctctggacaggtggtaaagacacttgtggggccaacatagccgaggtagaggtctccatccctgccaagctgcacaactccctcattggcaccaagggc

SEQ ID NO: 537076 - DNA, 98 bp, Homo sapiens
gggagctccctgcgaagagagagaaatttcagcagatttcaaggagccgccatccctgccagggaaggagaagccatccccgaagacagtctgtgggt

SEQ ID NO: 537077 - DNA, 100 bp, Homo sapiens
cttagatggagttttagaagtccgaaatgaacatttttggaccctaggttttggctcattggtatatgttgtcggtggctatgatgggcaaaacagactt

SEQ ID NO: 537078 - DNA, 100 bp, Homo sapiens
caggagccccaggcttctatccaggtgcaagccctacagaatttgggacctacggtatgtcttactgaaagaaagaaacatgcttctaaccctagagcag

SEQ ID NO: 537079 - DNA, 101 bp, Homo sapiens
ctctgaaagctagaagaaaaggtgtacttgcaagaaacctcaggacttgagtaacagcaacatggtgagtgaagatggcagagaggacgtgaccagcactc

SEQ ID NO: 537080 - DNA, 100 bp, Homo sapiens
ccggactgcgccgcccgaggccgtcggccgccgtcagcgagggcgccgagcaacttcggacccttgaacatctgtgaagaaatgactattctgcatggag

SEQ ID NO: 537081 - DNA, 76 bp, Homo sapiens
agacagccaacaaaatattcatggttcttgagtttcgtgtggctgatcaaagaaagaaggcatacgcagatttcta

SEQ ID NO: 537082 - DNA, 88 bp, Homo sapiens
gggcgggcgtccgcgtccggcacgcgagatggagcgccgtgatatgtgctgattagaaggctcacttgtgcagtgtggaggataacca

SEQ ID NO: 537083 - DNA, 75 bp, Homo sapiens
ttcaccatcacaccacctacagcccaggtggttggcgtgcttaagattcagtttctcccgtacatcccagtccag

SEQ ID NO: 537084 - DNA, 95 bp, Homo sapiens
aacctggaatttatgcaggatattttgattggaaggactgcctgcctccaacagatggccctgctgtggcaccagtgaccaacgggaacacaacg

SEQ ID NO: 537085 - DNA, 100 bp, Homo sapiens
gaagctgaggaggggagtaaattgaaaatattggggccatttagtaacttctttgcaagtgacaaccatgagtggaaaaaactaattatggttcagcact

SEQ ID NO: 537086 - DNA, 100 bp, Homo sapiens
tcgatcgaggacgacttcaactatggcagcagcgtggcctccgccaccgtgcacatccgaatgggcagagatcctacaagaatccaggatgatgatccca

SEQ ID NO: 537087 - DNA, 101 bp, Homo sapiens
ccccatccgaggagtcctcttcccaggtgctgccctccagctcacagatctattaatgagatgaagcggttggaagaaatgtcaaatatgtttcagagctc

SEQ ID NO: 537088 - DNA, 50 bp, Homo sapiens
gagagattatggttcttgatatggccaggatgtagatatgatggatcaga

SEQ ID NO: 537089 - DNA, 75 bp, Homo sapiens
attgggcttgacagctgcaaggagttactgaaggaatctggtggacagtaacaaactttggtgaaatttcaggaa

SEQ ID NO: 537090 - DNA, 50 bp, Homo sapiens
atgaggccaaaggcagttgtattgatttgttcagctggggcagagtcaac

SEQ ID NO: 537091 - DNA, 100 bp, Homo sapiens
cgcagcttttgtagagaagtgctgcaaggctgacgataaggagacctgctttgccgaggagggaaattatcgtttcatgaaactcttacttacacgcaga

SEQ ID NO: 537092 - DNA, 101 bp, Homo sapiens
ccgcccgtagcggaagccgcggcggacagaccctccgaaggcctggcggccagcgattgctgatctgtgcatgacagagtcttgctctgtctcccaggctg

SEQ ID NO: 537093 - DNA, 90 bp, Homo sapiens
acagacctcaggggaagaagctggacttcagccgtccaagggcagagcggcttgggtaaatccaccttaatcaacaccctcttcaaatcc

SEQ ID NO: 537094 - DNA, 98 bp, Homo sapiens
ctttttttttaattgtctttgtacctatgattgaaaacagtagttggtctatgacttttgaggaggctctccagcagaactatctcctactactcttt

SEQ ID NO: 537095 - DNA, 100 bp, Homo sapiens
taggagccccccgcggctgcggcgcaggtgccctcggcctgagtcgggatggagctgcctgctgtgaacctgaaggctggagtgcaatggcgcaatctcg

SEQ ID NO: 537096 - DNA, 51 bp, Homo sapiens
gtaccgtgtcgtccgcttcgagggcatgaccattcggcccctggtagacct

SEQ ID NO: 537097 - DNA, 83 bp, Homo sapiens
cgggctggagcctgacgagctggcgggaaggtgctcgggtcttcggggcactgggtcccatcggtccctcctcacctgggctc

SEQ ID NO: 537098 - DNA, 75 bp, Homo sapiens
atggagcctccagaaatgctgtttacatcatgctgatgacagcttcctggtcctcaccacagatggaattaactt

SEQ ID NO: 537099 - DNA, 97 bp, Homo sapiens
tgaagataaagccaggcaagggaccctggagaagaaggaagaagaagtaacttcagaggaggatgaggagaaagaagaagaagaagagaaggaagag

SEQ ID NO: 537100 - DNA, 105 bp, Homo sapiens
gttgacaccttttgacatgagcatccagccaccaaaaccctcaacaggggcatctctgagttcatcgtgatggctgcagacgccgagccactggagatcattctg

SEQ ID NO: 537101 - DNA, 100 bp, Homo sapiens
caggagagaagcgcggaagaaggcctccgtggaggccagattgaaggaatggaagttggatacactttgtgacttgtacgagacactgaccattacacag

SEQ ID NO: 537102 - DNA, 80 bp, Homo sapiens
aaagaatttcaggatcaccggtttctcctgcttcatctttatttgaaggtagacgcatcgaatttgcagaacaaataaat

SEQ ID NO: 537103 - DNA, 75 bp, Homo sapiens
attccaagtaactcttatttgttcttgcattggcataatgaggagcaggagggaaaaggcctttactagattctt

SEQ ID NO: 537104 - DNA, 74 bp, Homo sapiens
catcagtatatccatattaaaacgagatgacagaagccaaagtaattatggaacctattcacaacagatacaaa

SEQ ID NO: 537105 - DNA, 92 bp, Homo sapiens
cgcccacgcccagcagcagcagcaacaggaagatgttaccgagtacttcagtgaattccttagtgcaggggaacggagtcttgaattccagg

SEQ ID NO: 537106 - DNA, 95 bp, Homo sapiens
cagaatacaccttgcttctgtagaccagctccaacaggattccatggtagctgggatgttagggctcagatgaaggatttgggggcagagcactt

SEQ ID NO: 537107 - DNA, 75 bp, Homo sapiens
gctaagaggaagagaagcagagctgaagcaaagagttgaagcttttgaattgacacagcattgttggttttgcca

SEQ ID NO: 537108 - DNA, 100 bp, Homo sapiens
caacaatgagctttcccatttcttagaggagccagcaccgctctttgaccttgccatgcttgccttagatagtccagagagtggctggacagaggaagat

SEQ ID NO: 537109 - DNA, 101 bp, Homo sapiens
ctctatggccttggagaactgccccaaggatttgcaaggggttatggttttgtgaaattcacagatgaactggaacagaagcgagccctgacggagtgcca

SEQ ID NO: 537110 - DNA, 50 bp, Homo sapiens
gtggcatggaccacacccagcggaagaactctaatgaatcattgattgac

SEQ ID NO: 537111 - DNA, 82 bp, Homo sapiens
ccatcgacaagaaggcacctacaggtgatttggcttctgcacagttaggaggagcaccaaaccgatgggaggttttgtcagc

SEQ ID NO: 537112 - DNA, 96 bp, Homo sapiens
gttcgaggagtgcgtcaaggactccccgcgcttcagcttcggaaccaaaaagaagcttcccagagccggggccaggagccccaagcgccctctagc

SEQ ID NO: 537113 - DNA, 82 bp, Homo sapiens
gctcattggggcgttgaggaagcagtatagctgtgactatggatctggcagattctttatcctttgtggacttggaggaatt

SEQ ID NO: 537114 - DNA, 74 bp, Homo sapiens
ttccaagtggcagattatggaatagttgcagatttatttaaggtggacagtctagttgcaggaaaacaagctca

SEQ ID NO: 537115 - DNA, 50 bp, Homo sapiens
ccggccggggcaccgccggggacatggagccaagatggccgaataggaac

SEQ ID NO: 537116 - DNA, 139 bp, Homo sapiens
ctcagcgccaaggaggacgccagcaaagaagacgtcatcttcttctaaaagggccgtgactcaaggtggctggtgtcccgcgatggccacaggcgccctcctgccgtgctcgcgcccgtgcccgatgtcccggctggac

SEQ ID NO: 537117 - DNA, 100 bp, Homo sapiens
cgcaagcgaggcagccatgtcttatcccgctgatgattatgagtctgagtgtaaacaggaacatcgataagtagtgtaaaaacttgcacaatgaaatccg

SEQ ID NO: 537118 - DNA, 100 bp, Homo sapiens
tcttccctttcacctatgaaagcaaacgtatgggcatcatcgtgcgggtttacccaaggtccagcctagcccctaggcaccatgtcggacagtgatctag

SEQ ID NO: 537119 - DNA, 96 bp, Homo sapiens
tatgatgctgatggtgatggagattttgatgtggatgatgccaaagttttattagctgaacggaaaccaccgctctttaacatgaatgcgatgagt

SEQ ID NO: 537120 - DNA, 100 bp, Homo sapiens
cggcggctgagctccggcagagcgtgtctgaggccgtgcggggctccgtggtgctggattgtggataatatgcctgtaacgtggtgttacgatgttgaag

SEQ ID NO: 537121 - DNA, 90 bp, Homo sapiens
gctttgccatccccggctccagcttcctgggaaggtattcatgtaaatcaagaattactgcaaatatctccttgtatcacagagcagttc

SEQ ID NO: 537122 - DNA, 100 bp, Homo sapiens
cgtggtggtcattaagcggagatccggggaagctgctcgctgatctggccaggcgcctgggcctccactatgtggtctacagcggcctggagaacatcaa

SEQ ID NO: 537123 - DNA, 100 bp, Homo sapiens
gcttctggcagggcagcacggaccaccgcggggtccccggcaaggccctcagtctccgaggaggatctcaaggtcctgttttccagcaatgggggcgtcg

SEQ ID NO: 537124 - DNA, 100 bp, Homo sapiens
ttgcacttttgattgtgtattatggataccaaggaagagaagaaggaacggaaacaaagttattttgctcggcaatggacctcatcatgaccgttgctgt

SEQ ID NO: 537125 - DNA, 100 bp, Homo sapiens
gcaaattttaagaaacgagaatgtgtcttctttaccaaagattccaaggccactgagctggaggatggccacactgctcttaacactcactctgttagcc

SEQ ID NO: 537126 - DNA, 100 bp, Homo sapiens
tttgcctatggtcagacgggctcagggaagacatacaccatgggggaggccagtgtgggaatgggtaccacagaccatgtcatcgtcctggcgtccacga

SEQ ID NO: 537127 - DNA, 113 bp, Homo sapiens
ctccctgctgcataagaccttgtcagaggtgctctgtggatgtgtatagttttaaacccccactgcaagttggagcaaaaggccagttggctaaaacagctgaagaaatggaa

SEQ ID NO: 537128 - DNA, 100 bp, Homo sapiens
ccctcgctgctgcagcatgacgaggtggagacctacttccatgagtttggccacgtgatgcaccagctctgctcccaggagtctatgggtaaaacatcag

SEQ ID NO: 537129 - DNA, 90 bp, Homo sapiens
cctgaagccggcagcaccaagaggaccaatacgggcgcggaagccatcacctggatgcctacgtgggaagggacctcgaatgtgggaccc

SEQ ID NO: 537130 - DNA, 75 bp, Homo sapiens
aaaatgattttcctgttgcaatgcagggtagatacaacaagaattgaatactccattcctttaagagaaaactgg

SEQ ID NO: 537131 - DNA, 101 bp, Homo sapiens
tggacaaatacaagattcaggcgatcgacgccaccgactcttgtatcatgagcattggatttgatcacatgggtactccaaagattcaggtttactcacgt

SEQ ID NO: 537132 - DNA, 83 bp, Homo sapiens
aaggattccaagtaactcttatttggaggatttgttggtattgaggaaaacggtgaaatcctttttggctgtttgccagcagt

SEQ ID NO: 537133 - DNA, 99 bp, Homo sapiens
agcaatccctttgagtttccaagtcaggatatgtgcctttcagctttaaagagaattgaaggatcccatggtccattattgcctttaccaagtcgttac

SEQ ID NO: 537134 - DNA, 98 bp, Homo sapiens
gtggtgtcacgtggacttccagagggatgggcgaaaaggaacagctggaggaaatggaagaacgccagaggcagttaagaaatggggtgcaactccag

SEQ ID NO: 537135 - DNA, 90 bp, Homo sapiens
ctcgattggatgctgagctagtgaagtataaggatcagatcaagaagatgagagagggtcctgcaaagtgcgagtctggatccgagggcg

SEQ ID NO: 537136 - DNA, 109 bp, Homo sapiens
cacgccgcggcggggtgggtgcaagatgccgctgccggttcaggtgtttaacttgcaggtttggacttctcccactgagcatgacaagcactcgaaaggctaaatcaac

SEQ ID NO: 537137 - DNA, 82 bp, Homo sapiens
cctgcagcgggagctggacggcgagcgcgagcggcgcgagaaagtggaacacctgcagcaggagactgctgctctgaaaaag

SEQ ID NO: 537138 - DNA, 48 bp, Homo sapiens
gcagtgctcaaactcaccgaccaggtgtacaagggagaagaagccaca

SEQ ID NO: 537139 - DNA, 90 bp, Homo sapiens
cgcgggagcgcacggcgctatgcttcagccagatgatctcggagaagcagaaggcagaagagaaggagagggaagccctggaagccgcaa

SEQ ID NO: 537140 - DNA, 82 bp, Homo sapiens
cggagccatgccgtccaagggcccgctgcagtctgtgcaggtcttcggacgcaagaattcaaagaagctttttcactatttg

SEQ ID NO: 537141 - DNA, 117 bp, Homo sapiens
agaagtcgcgtgtctaggtgagtcgcggtgggtcctcgcttgcagttcagcgaccacgtttggtgccctggttgtcagatgttggaaagcagtaggacggaacatactcttcgtggt

SEQ ID NO: 537142 - DNA, 108 bp, Homo sapiens
gcctctctcctctgcaacctgataggatttggctacccagcctacatctcggttcaactacacgaatggaccatgaaacagccagtgttttgagttctagtagcacac

SEQ ID NO: 537143 - DNA, 99 bp, Homo sapiens
cttcaccaacgaccagtactacgtgtacttcggcaccgtccgcgactgctatgagggcatctctgggaagagccagatcctgtttgctctcgtcttcac

SEQ ID NO: 537144 - DNA, 100 bp, Homo sapiens
cgtggaagcgtttgctgccaccttctgcatcgtagactccgtgggaaggaggcttgtttaaactacggatgcttttcaaagatgattatccatcttcgcc

SEQ ID NO: 537145 - DNA, 98 bp, Homo sapiens
cggacgtgcggggcctgggcctcccggtccgcaagcaggtgccagaaccctgtggagcatcatgaactgggaagagtagctgagccccagagcctctc

SEQ ID NO: 537146 - DNA, 98 bp, Homo sapiens
ttttaattacttaaaacaccacgatgaaaagaaatacctgtgatttgctttctcggagcaaaagtctccaaagacaacaggccctccctctgccctcc

SEQ ID NO: 537147 - DNA, 82 bp, Homo sapiens
tatgcaggagagaatgagctcccgagccagtgggcagattcggtccatggttttttggtgaaatcattgatggcaaatttgg

SEQ ID NO: 537148 - DNA, 83 bp, Homo sapiens
ccaggagtcatcggacgccagaatctgcacatggattaattgatgtatgttgagtttatggagctgccttttggtggcttgct

SEQ ID NO: 537149 - DNA, 124 bp, Homo sapiens
cgcgcctctcgatgggcagctcgcacttgctcaacaagggcctgccgcttgttcatggcctcccacgggaacgacgccgcgagagccaggtttgagtccaaagtaccctccttctactaccggc

SEQ ID NO: 537150 - DNA, 100 bp, Homo sapiens
atgaaccggcttccggatgactacgacccctacgcggttgaagagcctagcgacgaggagccggctttgagcagatgaaatctatgggaacagcttgatt

SEQ ID NO: 537151 - DNA, 50 bp, Homo sapiens
tcagcacctgcttgtttggaaggagtatgctgctgctgttccgctttgcg

SEQ ID NO: 537152 - DNA, 100 bp, Homo sapiens
taccgtgggctcctacgacagctttgatgccccaagacctatgaggaccagcacagcagtgaggaggaggaggaagaggaagaggaagaggaaagcgagg

SEQ ID NO: 537153 - DNA, 99 bp, Homo sapiens
cagataaactccaacacgatcccggggctcaagtggcttaacaaggaagttattccaacttttgacatggctgtcaatgaaatcttctttgaccgttac

SEQ ID NO: 537154 - DNA, 82 bp, Homo sapiens
gaggagtcttctgccgtgcagtacttccagcccttccccaacagcaccaacttgctgcccacggagatcagccagtccctgc

SEQ ID NO: 537155 - DNA, 100 bp, Homo sapiens
tgtctgatggccccaatgagaagatccaggcagtcatagactccggagtctgccggagattggtagagctgctgatacacctggatttcattagcatcat

SEQ ID NO: 537156 - DNA, 75 bp, Homo sapiens
cgtcctggaattacttcaatcaagcagcctgcttctgcaaagtggtacgatcgaagggactatgtcttcattgaa

SEQ ID NO: 537157 - DNA, 74 bp, Homo sapiens
acatgcaacagtacgttttgctggtgttgtccctcccgtggcagattccagcagagggaacgctatccaaaaag

SEQ ID NO: 537158 - DNA, 91 bp, Homo sapiens
gccagacaaacagcccgcccgaccccgtcccgaccctggccgccccgagcggagcctggaggatgacgtagctttgccaaagacttagaag

SEQ ID NO: 537159 - DNA, 100 bp, Homo sapiens
tgggtttggaggccgcacctgcagcgagtgccaggaactcttctggggagaccccgacgtggagtgccgaggactcagcccaaaaccatgtttgcccaag

SEQ ID NO: 537160 - DNA, 100 bp, Homo sapiens
acacaaaccccaatctcagtggacaaggtcgctcaagccctcagttagaccctttgagaaaaagcccaaccatggaacaagcagtgcagaccgcctcagc

SEQ ID NO: 537161 - DNA, 82 bp, Homo sapiens
aaggcaacgacgttccatctgtggaaggacctaccaaccagtaataatttttcaccatgcatcggaaaaaggtggataaccg

SEQ ID NO: 537162 - DNA, 100 bp, Homo sapiens
gaagcctatggatttttccacaattagagagaaactaagtagtggacaggatgggcgtgttttgggcgtgctagaggtgtcacgctccattggggacggg

SEQ ID NO: 537163 - DNA, 80 bp, Homo sapiens
acaatccctcaaaaaagtgcttcagagtgagttttgtacagctattcgagagacactggcttcatgtcctattgaccgta

SEQ ID NO: 537164 - DNA, 75 bp, Homo sapiens
catcgtcaccgtgtgggagcgggagctgcggaaaggttctgactcagaagatcttttggaagaattgctgtgctg

SEQ ID NO: 537165 - DNA, 100 bp, Homo sapiens
ggagacttggatgaggtgaaagactatgtggccaagcttacatcacgagaaaaagcagccaaggattataaccagaaattgaaggagaaatttcagcatt

SEQ ID NO: 537166 - DNA, 98 bp, Homo sapiens
tgccaggagggccagccccacgtgctggaggcactttctccaccccagacttcaggactgagccccagcagctgacagccacagcaccaggtcggcag

SEQ ID NO: 537167 - DNA, 100 bp, Homo sapiens
tagagatggtgaagaagcaggtgcttatgatggacctaggactgctgaggacagcctcaaggatgggcaccagctgaaacaactgctgctgaaggccctg

SEQ ID NO: 537168 - DNA, 74 bp, Homo sapiens
tttaattttagggtcctttatatagaagggagagtagtctcaacagatcaccccccaacttgcccttcaagttc

SEQ ID NO: 537169 - DNA, 100 bp, Homo sapiens
aactaactccattcttaattgggcttccgttacaagatgaggtctgtgtatgctcacttccccatcaacgttgttatccaggagaatgggtctcttgttg

SEQ ID NO: 537170 - DNA, 82 bp, Homo sapiens
ctcggaggagcggctgctgctgctgctgctgctgctggtggcccctttgcagctctctatcaatatcagctcacatcattga

SEQ ID NO: 537171 - DNA, 100 bp, Homo sapiens
ttcagattctagttttgagaagaatgtggaaataacggagcaacttgctaatggcaggcattttacaaggatttgttaaggattccaagtaactcttatt

SEQ ID NO: 537172 - DNA, 75 bp, Homo sapiens
gacagaggcaccccggacagagacgtgaagcactgaatgctggcgcccatgcggctctacacgctctccaagcgc

SEQ ID NO: 537173 - DNA, 75 bp, Homo sapiens
catagaggcaagtgggggaggagcgttccttgtcctccctctgcacaagtgtaagaagaagcttgggaagctgcc

SEQ ID NO: 537174 - DNA, 83 bp, Homo sapiens
gtttgggaagatttcataaacaaagcaggaaagctgcagtcccagcttcgctgtgagccgtgagctttgaggcggtgggatgt

SEQ ID NO: 537175 - DNA, 75 bp, Homo sapiens
gtggaggattcacgggaactgaatttcaattggaagagaagttcaccatgtctattctcaagatccatgccaggg

SEQ ID NO: 537176 - DNA, 100 bp, Homo sapiens
tataattctactttgagtgctgtctccatgtttgatgtatctgagcaggcagagaaaggcaatgccagggtcaagcagctcaagaggcagctggaggagg

SEQ ID NO: 537177 - DNA, 97 bp, Homo sapiens
gacagctgttccttggccatcccaaagctattctgggggcaacagagatgcagctgtcttctcctcagtgctggcgctctgactacccttcccaaag

SEQ ID NO: 537178 - DNA, 75 bp, Homo sapiens
caggttgccttggaaaatgccaacgccgtgtctgaaggcggacctggtgaatgacctggggaacaaaggctacct

SEQ ID NO: 537179 - DNA, 76 bp, Homo sapiens
cttccatccgcctttgatcgtcttcctcttcagccatccagtaagactttgaccccgacgcaggcttcagtgattg

SEQ ID NO: 537180 - DNA, 100 bp, Homo sapiens
ggacacgcccggcttcggggaccagatcaacaatgacaactggtgtgccacggaccacaatgtggacaacaccacagagatgctgcaggagtggctggcg

SEQ ID NO: 537181 - DNA, 74 bp, Homo sapiens
ccggattcaggattcagatgaaccagcatgttgagccacaaagaattcaggtttatttatccagttttaccatt

SEQ ID NO: 537182 - DNA, 75 bp, Homo sapiens
aaggtgaaagtggagaaatcaggaagtgggaaaactcttgcctttgccatcccaatgattcatgcggtgttgcag

SEQ ID NO: 537183 - DNA, 75 bp, Homo sapiens
aggaggcctgttcataaaagatatcgaggatttagccggaaggttggacaattaaagatactgctgaaatcagtg

SEQ ID NO: 537184 - DNA, 82 bp, Homo sapiens
gaacaggcttcggcgaacacaaaggggcactatgaacgaagaggagcagtttgtaaacattgatttgaatgatgacaacatt

SEQ ID NO: 537185 - DNA, 50 bp, Homo sapiens
cgtctggccaagaatcagaggaagtgggctttcagttctgaaatggcaaa

SEQ ID NO: 537186 - DNA, 100 bp, Homo sapiens
gaatttttatggccttctcattcagctgctgctccgcatcctggaccccgcatatcccgagagttccaggatctctggcctcagttgtccttggttattg

SEQ ID NO: 537187 - DNA, 90 bp, Homo sapiens
actggacctccaaggaagccacgtgcagacatctacaaccttcgatctcctgacgagtatggagagtcggcttgactacactgtgtggag

SEQ ID NO: 537188 - DNA, 50 bp, Homo sapiens
gtgctgaagaaggcaacgctgaaaggatccttcctgagcgtttcctggca

SEQ ID NO: 537189 - DNA, 100 bp, Homo sapiens
accctaaaacttctcatgcaacatacttggcccaggaccattctggctgctgtctggacaagaagtcgtagggggtgagggtggaagctgggaaacccac

SEQ ID NO: 537190 - DNA, 73 bp, Homo sapiens
tttgttaaggattccaagtaactcttatttgattcttcgctgctgctgccttaccgccgagaaccaccacccg

SEQ ID NO: 537191 - DNA, 80 bp, Homo sapiens
cggagatggtgcagaagatggaggaggtgaaaggtgtagcagtcactcggcctacacccacagcatcgaccttgtgaacc

SEQ ID NO: 537192 - DNA, 75 bp, Homo sapiens
agcagacacggtggctactctgcctcggggacgaaagcagcaattctgtggtgttcttggtcacacatttatgga

SEQ ID NO: 537193 - DNA, 75 bp, Homo sapiens
gaaggccggccagcaagcttcaggacatgatccacatcgcggacaccaaggtcgccaggcgttatggggatttct

SEQ ID NO: 537194 - DNA, 75 bp, Homo sapiens
ggagctcactctcctgtccctggacctcatgcaccatattcacatgttgccggttgctgaaccaatccccatctg

SEQ ID NO: 537195 - DNA, 75 bp, Homo sapiens
cagccacaatgtgcctttgcaggggagcctgagagccacagcttgagaatgccagactgtcatcagagatgaata

SEQ ID NO: 537196 - DNA, 96 bp, Homo sapiens
aaagaatactattgttgccacaggagcacgaacttccaggagccggtgcagccgctgacacagcagcaggtggcgcagatgcagctgaagtactac

SEQ ID NO: 537197 - DNA, 100 bp, Homo sapiens
cagggtcaaaggagagcacaaccatcgcagttggaagcccatggggcagccgggtaacagatcttgtaaaccaacaacaaaccctggaggagaagatgcg

SEQ ID NO: 537198 - DNA, 96 bp, Homo sapiens
agggccctgcagatgtcgccaggaaagtggtgatccaggcaggaccaggctgcactgaagggacagagtgtgagagcattgtggaggaatacgagg

SEQ ID NO: 537199 - DNA, 100 bp, Homo sapiens
ctgggagctggaggaaccgcgcatttgatgagcttgttgaagcataccaagagcaggccaaaggacttctggatggcggggttgatatcttactcattga

SEQ ID NO: 537200 - DNA, 90 bp, Homo sapiens
gggagcccggcctcgtgcgccgcgctttgagggccacccgttcatcgtgcagttcaatgatggaaatgccgccgtggtgtccatgtgggt

SEQ ID NO: 537201 - DNA, 75 bp, Homo sapiens
taagaatattattagcacaagagcaccatactttgaggatcagtgtactgttacccggacatacctattccttca

SEQ ID NO: 537202 - DNA, 75 bp, Homo sapiens
tgggaagatttactttcgaagctataagctgcaagcatcaggacagcagagaccaaattcatcattgaatcctca

SEQ ID NO: 537203 - DNA, 83 bp, Homo sapiens
cgggaggtgaatttccatgtcaacatagtcctgagaaccatggagtctggcagtaccgccgccagtgaggaggcacgcagcct

SEQ ID NO: 537204 - DNA, 122 bp, Homo sapiens
cctggagagcctgcaggacggcgcggcagagtccccgtacgcctacagtaacgcaaacggggattcagcgtccgatcctttggaacagggactcacgtgaagcttccaggaccagctcccga

SEQ ID NO: 537205 - DNA, 96 bp, Homo sapiens
ctccccggggagcactactccgagaaggtgctgcagggtgcacagctgatcgccgtggcctcctcggaccccgcggcggcgggcgtggatgggtcg

SEQ ID NO: 537206 - DNA, 50 bp, Homo sapiens
cttgaggagacttcagaaacgagaactgctaatggcactgactcagcctt

SEQ ID NO: 537207 - DNA, 98 bp, Homo sapiens
agctgccgcgacacatccgcacccacacgggcgagaagccctacgagtgcaacatctgcaaggtccgcttcaccaggcgatcagtgggtgaccgcggc

SEQ ID NO: 537208 - DNA, 90 bp, Homo sapiens
agccgccaaaaatatgctgaggaggagttggagcagggcagtgcgggctctctgtgatcacactgctgcaagacctgaccagttgagctt

SEQ ID NO: 537209 - DNA, 90 bp, Homo sapiens
gcgcggctgggcgttcatctaccacgcctacgtcctacaaggagaagatgaaggagctgtcggtgctgtcgctcatctgctcctgcttct

SEQ ID NO: 537210 - DNA, 83 bp, Homo sapiens
cgaggggctccgggtcttccagagcgtgaagatcaagatcgcggcttctacgctccggcactctgagttcatcagcaaacgcc

SEQ ID NO: 537211 - DNA, 90 bp, Homo sapiens
gtacttctcgcagtccccgcgcgtggtcatccaggaggagcagcatcgatcccacgagaactgcctggacgctgccgcggacgacctgct

SEQ ID NO: 537212 - DNA, 89 bp, Homo sapiens
aaacttggaagctctgcaaagacctacgctccttcatctaatccatggaaaggtgctgatgggaagggtgcctgacaggggaggccggc

SEQ ID NO: 537213 - DNA, 98 bp, Homo sapiens
cgggtttgggctggaggtcgccatggggcgaggcagcggcaccttcgagcgtctcctaggcgggagtcatggatgtagatgctgaaagagagaagata

SEQ ID NO: 537214 - DNA, 98 bp, Homo sapiens
agacctttggggacaactaaagctgcgggatacaaagtcagcccaggcagacctccaggatgagccccaagagcctcaagaacccaacaaggtgcccc

SEQ ID NO: 537215 - DNA, 100 bp, Homo sapiens
acccacagcggggcggcggcggcggcggctgcggcccaatataggtacatgtcccagagcaagcacacggaggcccgggagctcatgtactcgggagccc

SEQ ID NO: 537216 - DNA, 83 bp, Homo sapiens
ctcagacgctggcgggcgcagtttctcacgacgggccgagcctgccactggtggcccagttgaaatccttcccttcctctacc

SEQ ID NO: 537217 - DNA, 75 bp, Homo sapiens
atgctttcaaacagtgtcaatacaaagatactctccccaaggaccggccagccttgcagctgtatgatccaggag

SEQ ID NO: 537218 - DNA, 75 bp, Homo sapiens
gagtttgtgtaaaacaaaaatattatggtctttgtgcacatttacatcaaggttcatatccagctttcagagtgg

SEQ ID NO: 537219 - DNA, 91 bp, Homo sapiens
agcaacgatgttagttcttcagattttgaagaagggccgtcgaggaaaagctcatttagaggcgagttttgaggaggtagagaacaacctg

SEQ ID NO: 537220 - DNA, 71 bp, Homo sapiens
atgttttacttcaagcaggggctgatttagaattgaatgatctggcacgggaccctccagcacagtgttca

SEQ ID NO: 537221 - DNA, 100 bp, Homo sapiens
gacgataccgatcctcagactccagtttctggcgcttagtgtaccacatcaaggcggcggcaggcgcggcgggaggctgaggctgacaagccccgaaggc

SEQ ID NO: 537222 - DNA, 96 bp, Homo sapiens
gaccccaaagttgcatttcctcgtcgagcgcaacccaaggaatcaaacattttaagtccagtgcaggatggaacaaagaaacctcagattgacagc

SEQ ID NO: 537223 - DNA, 98 bp, Homo sapiens
cgcgtcggctgagagcccacaggcccccacagaaacgcttcgttaagggactcaggcagtacgggaagaacttcttcagaattagaaaggagctgctt

SEQ ID NO: 537224 - DNA, 100 bp, Homo sapiens
gaaaactaggaatctatgatgctgatggtgatggagattttgatgtggatgatgccaaagttttattagatttgatggtagagtggtggcaaagcttcct

SEQ ID NO: 537225 - DNA, 75 bp, Homo sapiens
ttatattaatgttgagagagaggaatttggataaagagagggcagtgctactacaacgccggaaaagggaaaata

SEQ ID NO: 537226 - DNA, 75 bp, Homo sapiens
ctggctgaggaaatcgcctcccgagaagaagttgaggcgctatgtttgcatcgccagcttctatatattacggcc

SEQ ID NO: 537227 - DNA, 51 bp, Homo sapiens
ggttcttggcaggaatatggaagacaggttcatgcatgggagatctcagac

SEQ ID NO: 537228 - DNA, 74 bp, Homo sapiens
agacacccctgatgccatcattttctgcaccttcaggaacaggccctcgggaccaaggatcacgtcatgactcc

SEQ ID NO: 537229 - DNA, 83 bp, Homo sapiens
agcagattgggctgacaatgttcacccagtcagcttgaagagtttcaaatggaccctaccactgagaaatcaagatggcagtc

SEQ ID NO: 537230 - DNA, 90 bp, Homo sapiens
gctggtcccttggataagattcttcatggaagtgttggctatctcacaccaaggagtggggtagagatggggtttcaccacgttggccag

SEQ ID NO: 537231 - DNA, 82 bp, Homo sapiens
tatcatgctggccaagaagatcatcattaaggacggaggcacgaaattttactgcaggataaaactccaggataaaactgtc

SEQ ID NO: 537232 - DNA, 77 bp, Homo sapiens
cgcttcccctttccagagagccagaaagaagtatttctgggaaaagccagcttctgtttgcactggtcttcacaact

SEQ ID NO: 537233 - DNA, 100 bp, Homo sapiens
ggccaaccccttcttcgtgctgcagcgacgccggggccacggcaggggcggcggccttacggcaaaccagtccagctacgggggcccagccagccagcag

SEQ ID NO: 537234 - DNA, 80 bp, Homo sapiens
cagccaagctcgtggcctgcctctgcgtgcgtggatctaggatccggcttccaacatgtggcagctctgggcctccctct

SEQ ID NO: 537235 - DNA, 75 bp, Homo sapiens
cttcatatgcatgagctgcaggaatgttgaacaagagatttttcaatcaagactttggaactacgaagatggaag

SEQ ID NO: 537236 - DNA, 100 bp, Homo sapiens
cgcagacatggacaccaaacatttcctgccgctcgcgagcatgacctgggggaggacatctacgactgcgtcccgtgtgaggatggaggggacgacatct

SEQ ID NO: 537237 - DNA, 83 bp, Homo sapiens
gcctgctgctgaggaggccaccgaagctcggggacgcgaggagccggcgtggccctgggtgtcgtgaaaactacccctaaaag

SEQ ID NO: 537238 - DNA, 100 bp, Homo sapiens
cctcagttggaagcagccgatccagcctgcggagcctgtggggcaggttgtgaccgagattcccgacgagagagactgaggggaagagaggaaggagggg

SEQ ID NO: 537239 - DNA, 75 bp, Homo sapiens
taatccagcaggcaaccaaacctcaagttgaagtgttatcagaggaagaaggggaagaagaagaggaggaagaag

SEQ ID NO: 537240 - DNA, 100 bp, Homo sapiens
cagccacctctctcaactgtatagctatcctctttttaagggctgggagaactcaggaagcctggccagctgcgggccgtccagcggctgtgccacttct

SEQ ID NO: 537241 - DNA, 75 bp, Homo sapiens
ctgctgggcttcgtccagatcgggaaggagctgccatcagtcatgctcttaaacggggactgcccagagagcctg

SEQ ID NO: 537242 - DNA, 98 bp, Homo sapiens
acagatctcagagaaattggccatggaagctttggagcagtgtattttaacaactctgctcatggtgattacatgcaaaataacgagagcagcttaat

SEQ ID NO: 537243 - DNA, 90 bp, Homo sapiens
tgaataagtgggttcgttgtatttgtgacatctgtgggtttaatccaacagaagaaggttttgcgtccattcctccttcgtcgaattaag

SEQ ID NO: 537244 - DNA, 74 bp, Homo sapiens
gctcaatgggggaccacagcatgcacttccttccagcagctacacaggtggccaagactaagcagcagattgag

SEQ ID NO: 537245 - DNA, 105 bp, Homo sapiens
aaacatcgagtcactttgcctggacaggaggaaccctgtggacccccaaaagtacaagggcatatttaacggattctcagttacacttaaagaggatggtgttcg

SEQ ID NO: 537246 - DNA, 83 bp, Homo sapiens
cgcgccgtgcagcacatgcaccggcagaagccgcccatcatccacagggacctcaagacaatgcagatcttcgtgaagactct

SEQ ID NO: 537247 - DNA, 98 bp, Homo sapiens
ttggataagctggagtctattcctggattcaatgtcatccagagcccagagcagtattctgaagaagccaataatctcattgaagaatgtgaacaagc

SEQ ID NO: 537248 - DNA, 100 bp, Homo sapiens
ctcgcatcgcgcactttttggatcggcatctagtctttccgcttcttgaatttctctctgtaaaggaggtaccttaacatggggaatcttcttaaagttt

SEQ ID NO: 537249 - DNA, 82 bp, Homo sapiens
aaaaaaaattcatctgggcggtatctggaacttgatgtattcggaaggaagtgacattgtacctcagagtaatgagacagct

SEQ ID NO: 537250 - DNA, 90 bp, Homo sapiens
acttccctaatgccatcgagcacaccctgcaggatcccattgaagataccacgctgcatgtgtccttagtagtcatgtctccttaggctc

SEQ ID NO: 537251 - DNA, 75 bp, Homo sapiens
atgactacccacctagaagaggtgatgatagctttggagacacatcaaagctaagccagaagatttatcacattt

SEQ ID NO: 537252 - DNA, 51 bp, Homo sapiens
gcccagacggaaatgggccacgatccgtgattctaactgcaactatgaggc

SEQ ID NO: 537253 - DNA, 74 bp, Homo sapiens
gaagccatgaggccaaaggcagttgtattgtgtgcccaagagtgtaaacatcttcctgaatctctttatccaca

SEQ ID NO: 537254 - DNA, 82 bp, Homo sapiens
gacaggagcgtcccggtgcggctgcacgtctcgcggatcatgctatgaggacggggacttggttgccttttccagtgacgag

SEQ ID NO: 537255 - DNA, 73 bp, Homo sapiens
tcaggcctgccaaaagaaaagattgtgacagatcactggacccagcacctagatacactctggaaatgattaa

SEQ ID NO: 537256 - DNA, 75 bp, Homo sapiens
acaatggggacccgggacgacgagtacgactacctattcaaagctgcgtgcccagatgcgcgacctggcacgggg

SEQ ID NO: 537257 - DNA, 100 bp, Homo sapiens
gaagagcggccacagtagcggaaagcaccaggggcaacctgacagaggctgagaggccgctggccgccagcctggccctcacggctggcaccgccctcct

SEQ ID NO: 537258 - DNA, 75 bp, Homo sapiens
cccaagttgtcgacgaccgacagggtggtgaaagatgagtcagatgaagccccatgtgtatgatctgccagtaga

SEQ ID NO: 537259 - DNA, 100 bp, Homo sapiens
agcggcctcccgggaaggagcgccctggcggagaagactcgaacggctcccacagccgggcgttgggggaaaggccacggcatatgcctccaaggacggg

SEQ ID NO: 537260 - DNA, 100 bp, Homo sapiens
ctacaaagtcacattcaacgccgccacactgaagaaaattctcattttgtatgaccagtataagactccaatggagaacattgggctacaggactcactg

SEQ ID NO: 537261 - DNA, 51 bp, Homo sapiens
caagcccttctttctactttgccaggatcgcccggagcccacacccgtcct

SEQ ID NO: 537262 - DNA, 80 bp, Homo sapiens
ctccatgtgcagagaggcagggctctggagtgagtggagccaacctatttatgtggcccaagaagatgaaaggattgttc

SEQ ID NO: 537263 - DNA, 83 bp, Homo sapiens
gaggaaccggaccccggcagctgttttaaaatcaaagatgggaaaatcggagaaaattgcccttccccatggccagcttgttc

SEQ ID NO: 537264 - DNA, 115 bp, Homo sapiens
cggtgccctttccacccacctgggctgaggaccctgggccagcctatggagatggtgagaagccctaccactgcaactgggacggctgcggctggaagtttgcgcgctcagacga

SEQ ID NO: 537265 - DNA, 97 bp, Homo sapiens
ctggtggcaaagccagaccatgctggccggggtgcagtaccccagctccatcaacctcacgctgcacctgggtatggagatggtccacgtcctccca

SEQ ID NO: 537266 - DNA, 82 bp, Homo sapiens
gcggaggtgctgggagcgagttggctgttcccccagaagatcaatggaaggtggattccaaagagtgggcaagtgaggaccc

SEQ ID NO: 537267 - DNA, 100 bp, Homo sapiens
aatctccgcactgcaggccaggggcctggccagctacagagagagccaccaaccgctaaaatgcacgccatcatcgagcgcacggccagcttcgtgtgca

SEQ ID NO: 537268 - DNA, 100 bp, Homo sapiens
cagagtcattgcaggaagtggatgagttccacctcattttagagtatcaagcagagatgtggtcttgctatgttgcccaagctgatcttcaactcctggc

SEQ ID NO: 537269 - DNA, 75 bp, Homo sapiens
ggggccaggacgctggttcatacactccaaggagcgttacctgggtggcatcaaaaagcggcgccgaacgagaca

SEQ ID NO: 537270 - DNA, 92 bp, Homo sapiens
cttggagaggccgagggtttgatgaaggtggaggcagcgcggctctcaggtggatccataaagaacccagccaacccgcagagggaggggag

SEQ ID NO: 537271 - DNA, 100 bp, Homo sapiens
ctcatctttcaagaggactttagactaattgcagataattaagatgtaggtgcaaaaaactacagacatctctgtgctgtttattacaacaagaatcctg

SEQ ID NO: 537272 - DNA, 100 bp, Homo sapiens
ctcctggcttccctggtgctgttggtgctaaggccaaacgtaccaagaaagtcgggatcgtcggtaaatacgggacccgctatggggcctccctccggaa

SEQ ID NO: 537273 - DNA, 75 bp, Homo sapiens
tcccagatatagccgttggtacaaagcccgtggaccgggagcccgtggaccgggagccggtggtgtgccaccccg

SEQ ID NO: 537274 - DNA, 80 bp, Homo sapiens
gccggccgacccttcctgtcgctgacggcgactgcgggaggccaggtcaaaatgcagatcttcgtgaaaacccttaccgg

SEQ ID NO: 537275 - DNA, 100 bp, Homo sapiens
cgctgccgctatggatgatcgagaggatctggtgtaccaggcgaagctggccgagcaggctgagcgatacgacggggtcgctgtgatgaaattcaagaac

SEQ ID NO: 537276 - DNA, 100 bp, Homo sapiens
cagatatagccgttggtacaaagcaggttacgggcaggacttgagtggcttcggacagggcttctcagaccccagccagcagcctccttcctacgggggt

SEQ ID NO: 537277 - DNA, 82 bp, Homo sapiens
ctgagcctgttggaggaactggcccggaaacaggaggacaacactctgctccagccaaggtggtgagggcagctgttcctaa

SEQ ID NO: 537278 - DNA, 50 bp, Homo sapiens
cagagagctattattccctgtattaaaggagttaaagttcctcgtaattt

SEQ ID NO: 537279 - DNA, 99 bp, Homo sapiens
cttcatcgggccagagcattgcagaaacgtcatgaagattttgaagaagtggcacagacccaacatgagtgaagtttcctgcaagaaacgggacgacta

SEQ ID NO: 537280 - DNA, 100 bp, Homo sapiens
agaaattcttcaggtccacagtctggatggatgaaacaagaggaggaaacatctggacagggataagcactgttcaaaggatgccctacttgcaggatta

SEQ ID NO: 537281 - DNA, 75 bp, Homo sapiens
cctggacatcgatagggatgcagaggatcagaaccggtacctggatggcatggtcaaaatgcagatcttcgtgaa

SEQ ID NO: 537282 - DNA, 83 bp, Homo sapiens
agtattgcttgtgctcctaacaacctgtctcttggcgcattggagtgactgtctggcatcaccaagatgacactccacgccac

SEQ ID NO: 537283 - DNA, 75 bp, Homo sapiens
gaaccagcagaatttttgaacaggtattttgaaggtggcgtctcatctgtctacctctgggatctggatcatggc

SEQ ID NO: 537284 - DNA, 100 bp, Homo sapiens
gtggagcccaaagacccctggagacatgaacaagttgaaatcatcgcagaaggataaagttcgtcagtttatgatcttcacacaatctagtgaaaaaaca

SEQ ID NO: 537285 - DNA, 75 bp, Homo sapiens
ggtggtcgtgaaactgcttcccgaggagcattggaaggtaattaataaaatgtctccaacatctctaaagatcac

SEQ ID NO: 537286 - DNA, 100 bp, Homo sapiens
aaaagaaacccactcagggcaaccccctgccacctcagatatttaatggcgaccgatactgtggaatgagtgaccgaggaggtggcgttcctttgaggaa

SEQ ID NO: 537287 - DNA, 100 bp, Homo sapiens
acactagagacaaaggcaatgaggtgaacgcagaacggatatgaacgagactgccaaacaagaagatattttggaatccacaacagatgctgcagaatgg

SEQ ID NO: 537288 - DNA, 101 bp, Homo sapiens
agacggagaaggccccgccctccccggagcagctgccgagaggacggaagctcctgttttcttgtcagccgccagctgagggccattcgcagcttctccag

SEQ ID NO: 537289 - DNA, 100 bp, Homo sapiens
cggcggcgccaggacatggagctcgagaacatcgtggccaactcgctgctgctgaaagcgcgtcaagccaattgcatgatttctggcgtttggattactg

SEQ ID NO: 537290 - DNA, 90 bp, Homo sapiens
ctgtcgtatcctatatcatgcagagaaaagagatggaaacttacttgaagaaggttccttttgaggatggccacacagacaaccacttac

SEQ ID NO: 537291 - DNA, 100 bp, Homo sapiens
agataacggaggagatgatggatcaggcaaatgataaaaaagtggctgctattgaagccctaaatgatggtctgggaggggctgaacgtggtgaagacag

SEQ ID NO: 537292 - DNA, 100 bp, Homo sapiens
tccccgtcagcatcccagccgtgctcacggtggaaatgagttctcaacagtttcctcggttaggagccccttctaccgggctgagccaggccccttctca

SEQ ID NO: 537293 - DNA, 75 bp, Homo sapiens
gccttggaagtcaacactgtcacacctgtggccttgccgaagaactggaaaaagagaagtcaagggaacagatga

SEQ ID NO: 537294 - DNA, 75 bp, Homo sapiens
ttggaaagagaagatgctcggctgatgatgatgaataaggtatttggaggtactgtgcacaaaaaaagtgtcaga

SEQ ID NO: 537295 - DNA, 75 bp, Homo sapiens
caggaggagtatgtcaagcgagccctggcctctccttccgatgaaaagagaaaggaagaatggactacagccacc

SEQ ID NO: 537296 - DNA, 51 bp, Homo sapiens
acactgcatgttattccactcaggagctgtgattggtatagacgatgagga

SEQ ID NO: 537297 - DNA, 51 bp, Homo sapiens
gaagtccgtccatgtcaaagatgagaaatgcttcggttacccacagtcttt

SEQ ID NO: 537298 - DNA, 100 bp, Homo sapiens
ggaatatggcgctcttaggcagccgagcggagctggaagcggacgagatcttcaacttgctgctgagcttgggaagacattactggatcggaacacagag

SEQ ID NO: 537299 - DNA, 83 bp, Homo sapiens
gcccgagagcacagtggcactggattccacccatacacactctatactgtgaagggtaaaccagacttgaatacaacattgcc

SEQ ID NO: 537300 - DNA, 75 bp, Homo sapiens
tgcctcactgagcaaccaagatcttcaaaactgctgtggtccttgtgtataaagatggttccaaacagaagaaga

SEQ ID NO: 537301 - DNA, 82 bp, Homo sapiens
gaagcgtgtcgttctgcaccagcgccttgatcgagtacttgaggtttggtgcacctcgatttggaggaagtagggcagggcc

SEQ ID NO: 537302 - DNA, 90 bp, Homo sapiens
agcggcgagtttccgatttaaagctgagctgcgaggaaaatggcggcgggaggccttgaaccggggcattgctgctgtcaaggaggatgc

SEQ ID NO: 537303 - DNA, 75 bp, Homo sapiens
ccagaagtccagagctgaggactgcctgtttgcaggctgcctgctgtttcccggggagatcatgaaacgaggtcg

SEQ ID NO: 537304 - DNA, 82 bp, Homo sapiens
ctctgggtctccaggcccgcgaccgtccgccagtcgtcccgaggaagcactaagtaatatggatgattatgacaaaacctgc

SEQ ID NO: 537305 - DNA, 98 bp, Homo sapiens
ggcgaatgctgggagagtccgacgagcgctgcactaacgcaggatccggctgccgaaggtcctcgccagaattagaagtgcgtctcaccaaccagcca

SEQ ID NO: 537306 - DNA, 71 bp, Homo sapiens
ctcccgcctcatccgctacatacaccagtgggaggagtatgaacggtgccttagcgtttgtggacacttcg

SEQ ID NO: 537307 - DNA, 75 bp, Homo sapiens
caaagacaacagccagaagacgtctgtgtctgacacagcccttggcactgatgatgtatatgatgaaaaaggatg

SEQ ID NO: 537308 - DNA, 74 bp, Homo sapiens
ccgcagtcggcaaggagagacgtcgctgaggggcttgcctgaagcgagggatcttatgccttcattcatccggc

SEQ ID NO: 537309 - DNA, 100 bp, Homo sapiens
ctcagggcctgggagatattattgataatcctaaatgcccaggagatgttgattttcataatagtgactgggacattaagacaatcaccagctccttgaa

SEQ ID NO: 537310 - DNA, 100 bp, Homo sapiens
cgtgaacgacgacggccatgtgtccaacttcgtggagacagagcaggaccaggaagaaacaggctcctgccagcaccgacagcaacgaaaatgttcccac

SEQ ID NO: 537311 - DNA, 94 bp, Homo sapiens
tcagttggaagcagccgatccagcctgcggagcctgtggggcaggttgggcccgaaggcatcctgcagaacggggctgtggacgacagtgtagc

SEQ ID NO: 537312 - DNA, 90 bp, Homo sapiens
ttccatgatgatcattttctctctcgaatacgtgagaaagaggaattagcttaccgaaaggagatggtgagagctgacctaattaacaaa

SEQ ID NO: 537313 - DNA, 100 bp, Homo sapiens
gaaagagcccgtgaagatcgcggcgccggagttgcataagggagatgactccatgttttcgttggccctgaaatgccttatcagtctgtccaccatcatc

SEQ ID NO: 537314 - DNA, 82 bp, Homo sapiens
ccagtatcacttctgatgactccctggagcacactgacagttcaggccttggaaaaccattgcagagtgaatggaggctatt

SEQ ID NO: 537315 - DNA, 100 bp, Homo sapiens
gggaagagcttttccagggcgatgccttccatcagtcggatacacacatattcatcatcatgggtgcatcgctgagcattgaggatttcacagcatatgg

SEQ ID NO: 537316 - DNA, 76 bp, Homo sapiens
tccaagttcaaccaagccattcattgtgagcgccatattcagagcctgcagacccgagtgttagagctacagcaac

SEQ ID NO: 537317 - DNA, 75 bp, Homo sapiens
gctcatggaggtgtctgtgtctgtggccatgcagcagcccgccaccacctggcacacagcaggagtggacgactt

SEQ ID NO: 537318 - DNA, 100 bp, Homo sapiens
atccgggtgcggctccaccccttccacgtcatccgcatcaacaagatgttgtcctgtgctggggctgacagacaccctgacgtggaataagcccagtctc

SEQ ID NO: 537319 - DNA, 98 bp, Homo sapiens
ctcaatggaagaatctttgaaggacgacatagacagcctaaacccagttctcagggacaacccgcagcttcatgaggaagtgaaagtctgggtaaagg

SEQ ID NO: 537320 - DNA, 83 bp, Homo sapiens
gctgctgctgggggccttcccgccggccgccgccgcccgagtgatgtcttggcattgcccattttcaagcaggaagattccag

SEQ ID NO: 537321 - DNA, 90 bp, Homo sapiens
gtccagccttattacctctatggatccaagcgtcactggtgtaccgcctgccccagtcgtgggtggggcccaaactgccctggaaactcc

SEQ ID NO: 537322 - DNA, 74 bp, Homo sapiens
aaatcctcaaaaaatcttcttggttctgctacaagtggctttcttcctccagaagaaataaaagaaagatttga

SEQ ID NO: 537323 - DNA, 75 bp, Homo sapiens
tggcgggtggaggttcgagcgctgttctcgctccggagccgctgcacatttcgcaacatgaaccgtgaagaccgg

SEQ ID NO: 537324 - DNA, 83 bp, Homo sapiens
aaccaggtgcttggcaaaatcgagcgggccattgagagcgcctgctcgctgtgcccccgggttatgacgacccccaataaagg

SEQ ID NO: 537325 - DNA, 50 bp, Homo sapiens
gatcctggatgaggaggtgtttgaggttttgggatttgagattgacgcgg

SEQ ID NO: 537326 - DNA, 83 bp, Homo sapiens
tggaaggctacctgttgtctccgatccagaggatctgcaagtacccgctcctccttaagcggaaggagagttttacatggaag

SEQ ID NO: 537327 - DNA, 76 bp, Homo sapiens
cagacggctcacctgtgcgggatggaacaaaagcatcatggcagaacaggatgtggaaaacgatcttttggattac

SEQ ID NO: 537328 - DNA, 100 bp, Homo sapiens
gaagagaccaccaaacaggctttgtgtaactgctggttccttgcagctgccgcctcccttactctgtatccccggctcctgcgccgggtggtccctcctg

SEQ ID NO: 537329 - DNA, 51 bp, Homo sapiens
cggcctcggcctcggcctccgacacggggtattccctcagcggatactaca

SEQ ID NO: 537330 - DNA, 100 bp, Homo sapiens
tggcggatggccccaggtgtaagcgcagaaagcaggcgaacccgcggcgcaataacgattaacgtgacagtgtcaggtggacccacagccatcccacctc

SEQ ID NO: 537331 - DNA, 75 bp, Homo sapiens
caaaggctttgatgaatacatgaaggagctaggttaaacccatccagagtaatggctgcggccttacccaggacc

SEQ ID NO: 537332 - DNA, 74 bp, Homo sapiens
aaaccaacaccttcctgtgcagtcctgttggaatttatcggcttcagctccccaggaatatgattgaaaacagc

SEQ ID NO: 537333 - DNA, 96 bp, Homo sapiens
atggataccagcagccccggaccccccgattcaccaacgagccctagtgctggagaatctggtaaaagcaccattgtgaagcagatgaggatcctg

SEQ ID NO: 537334 - DNA, 100 bp, Homo sapiens
gcacttttgattgtgtattatggataccaaggaagagaagaaggaacggaaacaaagttattttgctcggctactttgacgcacacgctcttgccatgga

SEQ ID NO: 537335 - DNA, 100 bp, Homo sapiens
gtagaatccattgatcctgtcactgtcagtataaactcatggattgaactggaacttagtgatttggcccgtgaccctccagcacaatgttctgcaggtc

SEQ ID NO: 537336 - DNA, 100 bp, Homo sapiens
ttggtccctcaggctttcaacatcccacctcccatctatacttccagagcaagaattgactcgaataggggaagcagctcgagagtgtcgtagaaagaag

SEQ ID NO: 537337 - DNA, 98 bp, Homo sapiens
gctctctgggctttgttgaggcggcagtatgaccgggtttctttgatgcgacctcaggaaggagatgaggagctgcgggcgtctttggagacacagcg

SEQ ID NO: 537338 - DNA, 74 bp, Homo sapiens
gaacatcgaatcatggaatcccttgcatggctctcaatgggaaagggctccttcaagtatgcctgggtcttgga

SEQ ID NO: 537339 - DNA, 90 bp, Homo sapiens
caatcccatgggggacacgctggcctctgcaatggaccctgctctctattccagaggtggtgaggggatgcaaagaactacagggattgc

SEQ ID NO: 537340 - DNA, 82 bp, Homo sapiens
agcctcccgagtggctggaactacaggaatgagactacatacactaaaaaaccaaaaagcctaaaaaaagagatgatatttt

SEQ ID NO: 537341 - DNA, 100 bp, Homo sapiens
gcaccgggatcgtgaccgagaccgtgaccgagagcgtgaccgagagcgcgaatatcgtcatcgttagaaggatttcaaatatgcgtgcattagagaatga

SEQ ID NO: 537342 - DNA, 75 bp, Homo sapiens
cccggacatggccgccaacatgtacagggtcggaggctaccggctctctgaccagttccacgacatcctcattcg

SEQ ID NO: 537343 - DNA, 82 bp, Homo sapiens
gctatcgtggacgtcactggccctggtggggattgacagccacgggaagggctctccctacgaccacacacccggcatggcg

SEQ ID NO: 537344 - DNA, 100 bp, Homo sapiens
cccacggcccaccggaggagcctccagttcgtgggggtcaacggcgggagtggctgagcagtttgccatcgcggaagccaagctccgagcatggtcttcg

SEQ ID NO: 537345 - DNA, 100 bp, Homo sapiens
attaaaaatggagatatgatttctgctgttcaaaaaagtccctaaaggttgaatgatcctaaaatgtctgaaacggagcgccagtccatggaaagcgagc

SEQ ID NO: 537346 - DNA, 75 bp, Homo sapiens
attgtaagtgcagatggaacacaacaggccatttcataattctgaatcatgtctgataacggagaactggaagat

SEQ ID NO: 537347 - DNA, 100 bp, Homo sapiens
attctgaatcagagtcagaacctgaaagtgaatctgaatccagaagagtcactaaggtacatggactatatcgcacaacaggtgctagttttgagaaggc

SEQ ID NO: 537348 - DNA, 100 bp, Homo sapiens
tccagcagtcatggtcctggatttgcaaggctgaatagaagagatggttataaagcagcagagacaacacacaacatcaacaatgcatttggcccaggaa

SEQ ID NO: 537349 - DNA, 90 bp, Homo sapiens
acagccgtgtgtatcacagaagttataaagttattgctaagtgtgggaattttagctaagtcacagccaggggctttgggccgctgttac

SEQ ID NO: 537350 - DNA, 100 bp, Homo sapiens
tcgcttttcttcttctgcaacacggctacggtctacaagatctgcgcctggatgcagctcttggcagtggcctggtttgctttcgaccctggctcggcgc

SEQ ID NO: 537351 - DNA, 83 bp, Homo sapiens
caattgaccgacgggaagacacattttatgttgtctctttccgaagggataaggatgctaaattccgtctgattctaatagag

SEQ ID NO: 537352 - DNA, 140 bp, Homo sapiens
acccgggcgcagccggagccggtgccgcagctgcgatggccgtggccgtggggagaccgtctaccggcaattgtagtacttctcatgtccatggttaatgaaaggcagccatttgttttgcgctgtgctgttctctattg

SEQ ID NO: 537353 - DNA, 50 bp, Homo sapiens
tcgagttcaaagagaccctcggaacatgccagaagtgggtggagaactgt

SEQ ID NO: 537354 - DNA, 100 bp, Homo sapiens
accgacgggaagacacattttatgttgtctctttccgaaggaagtttccaagggtcacttgtgtctcgtccgtgggaagaccgggggagcccagaaggcc

SEQ ID NO: 537355 - DNA, 96 bp, Homo sapiens
ctcagccatcccctgctctacgtgaagctgctcatccaggtgactgtaggacgaggatttggtgtcacataccaactggtatcaaaaatctgcccc

SEQ ID NO: 537356 - DNA, 122 bp, Homo sapiens
atcaacgtcctccgggaccggagtcagaaccctccgcagagtaaagtggtgccaccgaacatcgcagaactgaagaatttggaggtgctcaacttttttaataaccaaatcgaggagctgcc

SEQ ID NO: 537357 - DNA, 82 bp, Homo sapiens
ggctgatctggtgtctcacatctgtaatcccagcacttggggaggctgaggcaagtcagaagaagctgatgatcaagcaggg

SEQ ID NO: 537358 - DNA, 100 bp, Homo sapiens
tattcgggtgggagtgacccgattttccagctggagaacacattcaaatcagttattgcacagattggacctggaggaactatcagttcagaactaaaac

SEQ ID NO: 537359 - DNA, 73 bp, Homo sapiens
taacaaaagctgctcagagtctcaatgaacttggttggtcatcattttatccaagcttgactgtggtacagca

SEQ ID NO: 537360 - DNA, 71 bp, Homo sapiens
ttgtcatgatgacagtgacaaggacctgcttcgctgccgtgtcctgacttctggaatctttgagaccaagt

SEQ ID NO: 537361 - DNA, 97 bp, Homo sapiens
ctgtttctatagaaactgggttggaagtcagagctgcacaaagggaaaggaataatccagaatggctactctgatctatgttgataaggaaaatgga

SEQ ID NO: 537362 - DNA, 100 bp, Homo sapiens
ggacacttgctcccatctactttcttctctagaatccacggccttgaaaagatcttttgaggtcgaggaggtcgagacacccaactccaccccaccccgg

SEQ ID NO: 537363 - DNA, 75 bp, Homo sapiens
gctaccactgcggctactgcgattccaaggagggcaaagcgtcctgcgggggcagcactgaaatacttaccaacg

SEQ ID NO: 537364 - DNA, 90 bp, Homo sapiens
ggtggaggtggagaaaggacgtttcaagggtgaagcttcttcagtaaacactgtggatttctttaaccagatcaacatgttatatggaac

SEQ ID NO: 537365 - DNA, 100 bp, Homo sapiens
aaatacagaagcacagtcagcaaaagcaaagacccctcggggctgctcatctctgtgatcaggtgaaaggtgtagcagtcactcggcctacacccacagc

SEQ ID NO: 537366 - DNA, 100 bp, Homo sapiens
caggacgccgctgaccaccctcaacacggatatcagcatcctgtccttgcaggtgagaagccatttaaatgtgatcagtgcagttatgtggcctctaatc

SEQ ID NO: 537367 - DNA, 101 bp, Homo sapiens
aagaagcgaaggaagtcaaatactcagctgcaagctttcttcctggtggcagatgacatcatggattcatcccttacccgccggggacagatctgctggta

SEQ ID NO: 537368 - DNA, 98 bp, Homo sapiens
tagcacagtgtctgatggagctttcctaccagaccctgaaattcacgcatcaggcgcgggaagcgtattaaaggtggaagaaggtccatatctttttc

SEQ ID NO: 537369 - DNA, 73 bp, Homo sapiens
agaatctccagtttttgacgggggccattcagcaactgggtggggtattggcatactccacacatctgtacca

SEQ ID NO: 537370 - DNA, 75 bp, Homo sapiens
accctatgagaacctcatttctcttccaagatgccatggacaatattaccaggcagaaccaattctacgataccc

SEQ ID NO: 537371 - DNA, 80 bp, Homo sapiens
tggagcctcagttggaagcagccgatccagcctgcggagcctgtggggcagggtgtgattactttagagtcccttggtaa

SEQ ID NO: 537372 - DNA, 100 bp, Homo sapiens
gtcccgtcggcgctggggacccgcgagcagctgcgggcctctcgggtgcttcttgtcggcttgaaaggacttggggctgaaattgccaagaatctcatct

SEQ ID NO: 537373 - DNA, 83 bp, Homo sapiens
atcatgctggccaagaagatcatcattaaggacggaggcacgaattcggttccctcaaaattataaaggcaggaaagctcaag

SEQ ID NO: 537374 - DNA, 100 bp, Homo sapiens
tgagcccaggccacagtaccctattcacgctctgtgcttgtgccaaggtgaggtcccagcttgaagagaaagaaaacaagaagttccctgtgtttaaggc

SEQ ID NO: 537375 - DNA, 100 bp, Homo sapiens
tctttcagagatggcagcagaagctgcatatcaaactgaaggacagaataacgggctcccagattcacaagccccaccaagaggatcaccccaggaacgc

SEQ ID NO: 537376 - DNA, 98 bp, Homo sapiens
tgaatgatgtatttgatcctgattctacccaagtacatatgatttcagctgcaatggcagttactccacaggatccgctgaacataggatgttgccac

SEQ ID NO: 537377 - DNA, 102 bp, Homo sapiens
cgacaagccgctggcagccgcggatctcaccgccgctcaggggatcgcttacacctgagacgaactacagaacagcacgtaccagaggtggaagtccaagtc

SEQ ID NO: 537378 - DNA, 100 bp, Homo sapiens
cacggttactgtgacctgactggagaaaaattatgtgtctgcaatgatagttggcaagtctaacaaagtgccagtggtgcagcaccctcaccatgtccac

SEQ ID NO: 537379 - DNA, 75 bp, Homo sapiens
aggctcgcgggcggcgggcccgggtttggaaatatcttgggatggagacagttttgtagaagtcatggctgcgcc

SEQ ID NO: 537380 - DNA, 87 bp, Homo sapiens
cgacctcagttgccacgtgcacatgctggtgccttccagtgacgttcaagtgtttctcacggatggaattctagtcagctgcaggcg

SEQ ID NO: 537381 - DNA, 82 bp, Homo sapiens
ggagccgcgcagccctcggagcacggttggtgttcgaggaagagacattgttgttcttggtgtggagaagaagtcagtggcc

SEQ ID NO: 537382 - DNA, 100 bp, Homo sapiens
ctccagcctgagccccagccaggacgagaggatgcggagcccgcagaacctccacagtcaagaggacggaagcgcaacaggaaaggagagaagaatggca

SEQ ID NO: 537383 - DNA, 50 bp, Homo sapiens
caacattcagacccatttccagtcatgaaggcagaggaggtggacacggt

SEQ ID NO: 537384 - DNA, 96 bp, Homo sapiens
gctacacagaatctacacagcaaagttaacctgacacagaaaatccttgtgcaaataaatgcttaaacccaccagcgaagccagaattgggatggg

SEQ ID NO: 537385 - DNA, 98 bp, Homo sapiens
agaagggctgcgggtgctcgtggtggcaaagaagtctcttgcagaggagcagtatcaggactttgaactggagaagaagcaggcgctccctccattcc

SEQ ID NO: 537386 - DNA, 100 bp, Homo sapiens
ctcggccgatgaagtgcagaggtttttttctggtccaatgaagcgtcaagtggcagtaaaatcaacccgaggctttgctcttaaatcaacccatgggatt

SEQ ID NO: 537387 - DNA, 89 bp, Homo sapiens
ggcgcgcgtgcggaggaccaggcgcggcgcggctgcggctgaggtgtcccaccggccttccgggttccagcgccaggcctggtgcctgc

SEQ ID NO: 537388 - DNA, 101 bp, Homo sapiens
tccgggccaagtacgagcgacaggagttcatctacccggagaagcaggagccctactcggcagagcactgcagtttcctcctgaaggctggctccggctct

SEQ ID NO: 537389 - DNA, 75 bp, Homo sapiens
gagtgccatggcggccgccctgggagcgagcggaggagcaggcgccggaggaagaaggtagataatgactataat

SEQ ID NO: 537390 - DNA, 100 bp, Homo sapiens
cacactcgcctcccctcggcacccccggccccggagctgcctggaggcggccgcactcgggtgctgcgagtggctgagatgctgcggtggaggggaggcc

SEQ ID NO: 537391 - DNA, 75 bp, Homo sapiens
acgcaagatgtacgaggagttcctcagcaaggtctccatcctagtacagaacctgctaaggccatcaaacctatt

SEQ ID NO: 537392 - DNA, 90 bp, Homo sapiens
gtgaaggatagagtatatcaaggtttactcctggcttgggggcattaggaagcactggaggctcttcgggaactaatggatctaacgcca

SEQ ID NO: 537393 - DNA, 127 bp, Homo sapiens
caaggaagggggggcggaaccagcctgcacgcgctggctccgggtgacagccgcgcgcctcggccaggaagccttatcagttgtgagtgaggaccagtcgttgtttgagtgtgcctacggaacgcca

SEQ ID NO: 537394 - DNA, 74 bp, Homo sapiens
ggagcgagctcaaggcggcgcggcggccactgggcgcagcacccagctcaccatggatgatgatatcgccgcgc

SEQ ID NO: 537395 - DNA, 83 bp, Homo sapiens
cgaggaggaagacgaatcgttaaacatctgaaagggtcagatttgcctgaggttgactgtacatacaaatattgagcatttcc

SEQ ID NO: 537396 - DNA, 75 bp, Homo sapiens
ctcgtgctgggatccgccaacgtggatgagaggatctcattgactcagatgagctgctggatccagaagatttga

SEQ ID NO: 537397 - DNA, 90 bp, Homo sapiens
tcttcggtctcctggggtcggcgccgagtgggaggatggcggaagcctccaggatcatgtggtatgtcagcaccaggggcgtagccccac

SEQ ID NO: 537398 - DNA, 101 bp, Homo sapiens
gtcgtggccggggcatgccccagccgaacatcatctggtctgcctgcagagacctcaaaaggtgtcccctttctgccgtgttcctaacattttgattcctg

SEQ ID NO: 537399 - DNA, 82 bp, Homo sapiens
cgctggtgcagccaccctcgctccctctgctcttcctcccttcgctcgcaccatgttccagggtctccctccactgctgtag

SEQ ID NO: 537400 - DNA, 74 bp, Homo sapiens
tctggttcagctcatacaacagcttcttagatatccatttggggatgaagtctactttgacagctagcaaggcg

SEQ ID NO: 537401 - DNA, 100 bp, Homo sapiens
cagctcctgggcgaatcccacatctgtttcaactctccgccgagggcgagcaggagcgagagtgtgtcgaggtgcttcaaggatgaccgcatcgtcttct

SEQ ID NO: 537402 - DNA, 100 bp, Homo sapiens
tcagattggagcatttgtgttgatgaagatgaaagagactgcagtcataccctaatgatcccagcaagataatgtcctgtcttctaagatgtgcatcaag

SEQ ID NO: 537403 - DNA, 74 bp, Homo sapiens
tcgtgggagggttggtgattatgctgtacgtcttccatagaaagagagccctcaggactgcccccggaccctgc

SEQ ID NO: 537404 - DNA, 100 bp, Homo sapiens
ataacacaacaagtttagggagtccatggccagaaaacttttggggaaggagctcattgccaagttagatcaggcagaaaaggagaaggtggatgctgct

SEQ ID NO: 537405 - DNA, 52 bp, Homo sapiens
aatctgatcgggtcttccttcatatccaaggttttgccatcaaggggggacg

SEQ ID NO: 537406 - DNA, 129 bp, Homo sapiens
agggctcgtccaactggtccctcagtcacacatgccagagattgctcaggaagcaatggaggaagggaaaaggccgaggcatcagcgtgtgaagaccgcaaagacgatcccgagtacagttgtgaacag

SEQ ID NO: 537407 - DNA, 50 bp, Homo sapiens
cgcgggaggaggcggcggcggcggcggtgtgcttggagcagtgttcaatg

SEQ ID NO: 537408 - DNA, 100 bp, Homo sapiens
agtttttatcaaacttatttttgtgatattctccagcatatcttttctgttgtgacagacacttcacatactgctggccctcgggaccaaggatcacgtc

SEQ ID NO: 537409 - DNA, 100 bp, Homo sapiens
gacatgcctgaggtcctcaagtccctgctggagcactctctgccttggccagagaagagaacagctgccgaacccttcagccctccgcgaggagactcag

SEQ ID NO: 537410 - DNA, 98 bp, Homo sapiens
ccgggatgccacacgctttaccttcgaggctggccgaggcgagtctggagccgggaaaaccgaaaacaccaagaaggtcattcagtacctggccgtgg

SEQ ID NO: 537411 - DNA, 75 bp, Homo sapiens
tcatcagagttggatatcatttggaggtgaccaagaatatggcccaggtgaccaaagccctggacaaggccctga

SEQ ID NO: 537412 - DNA, 98 bp, Homo sapiens
ggcgaaggaggaggcgttgccggatatcttcacagtcatcacttcttggagttggttaccttgcttctgtcaattccagtaacaagtgctcaccctgg

SEQ ID NO: 537413 - DNA, 75 bp, Homo sapiens
ataaagctgttttggaactgtcaggtacctcaaagccagagagagatcatcattgcctgaatttagctttgtgac

SEQ ID NO: 537414 - DNA, 80 bp, Homo sapiens
gatgtccccaaatggttctgtgcctcctatctatgtgcctcctggatatgccccacagccagatgacgtgtactactgtg

SEQ ID NO: 537415 - DNA, 83 bp, Homo sapiens
gccggggttcggtggcctctagtgagatctggaggttcaggaagatttgactgaagagaaaaaaagggaactggagcataatg

SEQ ID NO: 537416 - DNA, 80 bp, Homo sapiens
gcacataacggggttcgggtgtctcgtgtgtgaacatcacagggtgtttctgtggcctgggactggttagcaccaacaag

SEQ ID NO: 537417 - DNA, 75 bp, Homo sapiens
ggacagaaaaccacattgtttacacaggacattacctgttgattcttgggcaaggcccagaatttggtggacata

SEQ ID NO: 537418 - DNA, 128 bp, Homo sapiens
atgaaagaaggaagaacctggtgaggagcaaaatgctttcatgaatggcatttgagagtttgtattagacagcacccaagaaaacctcatttggctcgctgaaggatgaagaccggattttcaccaac

SEQ ID NO: 537419 - DNA, 124 bp, Homo sapiens
gccgatagtcttccttgtgcagaaggagagtttatcttccttcggcttaatgttcttcgtgagaatttctctgcaaagaatgtccaaaaattcatattcacattgatcgtatcgacaaaaaaga

SEQ ID NO: 537420 - DNA, 74 bp, Homo sapiens
ctccaggacacccctgaagccgagaaatgatattaataaggcagcggaaagaagaaatatgaatacggctccat

SEQ ID NO: 537421 - DNA, 100 bp, Homo sapiens
agaggcctctcccaaagcacctgcgcaggagacgaaaccagacagagggtcaagtttacagatgaccgtgtctgcaagagtcaccttctggactgctgcc

SEQ ID NO: 537422 - DNA, 82 bp, Homo sapiens
cagaacccgaccaacatccagaacttccagctgcccccagccggcacagtcttcactaccgtagaagaccttggctccaaga

SEQ ID NO: 537423 - DNA, 50 bp, Homo sapiens
caggacctgcagcatcccagagctttctgaaaaggatatgagcatgctcg

SEQ ID NO: 537424 - DNA, 50 bp, Homo sapiens
ccgaaggctctccatcgaaggcaacattgcacaacattctgaaatttttt

SEQ ID NO: 537425 - DNA, 74 bp, Homo sapiens
gctggacgactcggagatctcctgccacatccagatggcagaaacggtggacacaagcgaaatggtcaacggcg

SEQ ID NO: 537426 - DNA, 90 bp, Homo sapiens
gtcaccgtccagagccaaggtccagggggcaaggtcgtggttcctaaaagtaaagctttagaggccaccaaattggcaattgaagctggc

SEQ ID NO: 537427 - DNA, 51 bp, Homo sapiens
gaaagataaagcccttaaggacaagtatcctgtggagcacccagacaaatt

SEQ ID NO: 537428 - DNA, 101 bp, Homo sapiens
agtccccgtacggccacccggcggggcagctgcaatgactctccgcacggtattattgtcattgcaagcactattggcagctgcagagccagatgatccac

SEQ ID NO: 537429 - DNA, 100 bp, Homo sapiens
ttcattcaatgctacatatgtacagcctagaagaaaacagagagatgagcagcttctgagctacgagggcgtgagcgagttcttcacagacctcctgaac

SEQ ID NO: 537430 - DNA, 90 bp, Homo sapiens
gcaatgcaccgctcactaaactgccggtacaaagaacggcaccaggtgcagttgttagggcgaggcttcattgcaggcattgacctcaag

SEQ ID NO: 537431 - DNA, 98 bp, Homo sapiens
tcctcacggtcctcctggctgtgctcatatacacctggaaaatgtttcaacgtgcgcaagagttgcggtggcgggcagaggactaccacaaatgcaaa

SEQ ID NO: 537432 - DNA, 100 bp, Homo sapiens
gctccttcctggtcaagaagcatttcaacgcctccaaaaagccaaactacagcgaactggacacacatacaggtgctgacagctgcagaagaaattgtac

SEQ ID NO: 537433 - DNA, 100 bp, Homo sapiens
actgcagtagaattccttgtagataagcaactggattttttaactgaagatagtgcctttcagccctaccaggacctgcagagaaacgcctcctgatttt

SEQ ID NO: 537434 - DNA, 50 bp, Homo sapiens
caaattcatcccagaaatctaagagagctggagataagatgggtagactg

SEQ ID NO: 537435 - DNA, 82 bp, Homo sapiens
gaacaggactgttttattcttggggactggagatggccagttacttaagataacgaaggaggcccaacttcattcaataagg

SEQ ID NO: 537436 - DNA, 98 bp, Homo sapiens
gttgcacacactaggagatctcctcaaagaagtttgtccttctgctattgatcctgaagatgaaggcattttcaaagctggagcagagaggtctgaaa

SEQ ID NO: 537437 - DNA, 100 bp, Homo sapiens
ccaagacagagcgctactcctggcagtgcgtcaatcagagcgtcctgtgcggctggcgcccatgcggctctacacgctctccaagcgccactttgtcctc

SEQ ID NO: 537438 - DNA, 74 bp, Homo sapiens
gagcaggtggtgaagcgtgaggagctcttcatcgtcagcaaggtaaagaagctaagtggaagagtgtttcctcc

SEQ ID NO: 537439 - DNA, 100 bp, Homo sapiens
gcaaggtccgaactgatataacctaccctgctggattcatgggaaactatggtccaggaggcagtggaggaagtgggggttatggtgggaggagccgata

SEQ ID NO: 537440 - DNA, 51 bp, Homo sapiens
ggggttgcttgtcagtagcgggcaagtgtgaagcctcagtttaggtcatct

SEQ ID NO: 537441 - DNA, 90 bp, Homo sapiens
cttccactgccagcacccgccgtgccgcatgagcatcgcggagcttgacccgtccatcgctgtgggtgaagtgatgaacctcctgatgtt

SEQ ID NO: 537442 - DNA, 50 bp, Homo sapiens
caggacttgagtaacagcaacatggaacttagtgatttggcccgtgaccc

SEQ ID NO: 537443 - DNA, 100 bp, Homo sapiens
caccaatatccgacctagctttgccctgggcgctgcctatggcacagccaagagcggtaccggcattgcggccatgtctgtcatgcggccggagcagatc

SEQ ID NO: 537444 - DNA, 98 bp, Homo sapiens
atgaccacaaacagccatcaagagtactattaatcccgtagatgcaatatatcaacctagtcctttggaacctgtgatcagcacaatgccttcccaga

SEQ ID NO: 537445 - DNA, 51 bp, Homo sapiens
ggaggtctgcatccaggacactgcaattaagttggaatatgcaaggttggt

SEQ ID NO: 537446 - DNA, 100 bp, Homo sapiens
ctggaccggcaaattaaagcaattatgaaagaagtcattccttttttgaagtgttgctaacaaccacaagcagaatttgatgacggtggcaaaccttggt

SEQ ID NO: 537447 - DNA, 98 bp, Homo sapiens
tttggatatagaggtcgatggtggagtaggtcctgacactgtccataaatgtgcagagagtgaaccagaggaaatgcctccagaagcaaagatgagga

SEQ ID NO: 537448 - DNA, 97 bp, Homo sapiens
ggagtcctggcggtttttattaaggctgttcatgtgaaagggagtgcatccgccccaacccttttccccctcgtctcctgtgagaattccccgtcgg

SEQ ID NO: 537449 - DNA, 98 bp, Homo sapiens
tttgagcggcgctaccatgtcactgacccctttatccggcggctgggcctggaagcagagctgcaggtctatcagccacagtctctgcaagtttccaa

SEQ ID NO: 537450 - DNA, 75 bp, Homo sapiens
cggggaaccaaggagacgctcctggcactgcaggctttttggaaaggatataaacaacggaaggagtatatgcac

SEQ ID NO: 537451 - DNA, 75 bp, Homo sapiens
gacatggaaaacaaggaaaatggctctgtcggtgtaaaaaatgccggtggtggtgtgcacattgagccccggtat

SEQ ID NO: 537452 - DNA, 75 bp, Homo sapiens
ggcgctgtgtccccaagctccccgtcctcggatgccacttcaaatgaacaacaagagcttttctgtcagaagttg

SEQ ID NO: 537453 - DNA, 83 bp, Homo sapiens
ctttgtagttttgcgtgtgttgaaagtacaattctattgcacatcaatgatatcatcccagagctgagaagctccagctgctg

SEQ ID NO: 537454 - DNA, 73 bp, Homo sapiens
ccaatgctggggaacggaaaatgagggagttcaactctggaaattggagaattattacaaacaaggggtagag

SEQ ID NO: 537455 - DNA, 83 bp, Homo sapiens
cgcccagaggccggcgggagctccaggttcacctcctcctcctccaggttatcaatactctggctgaccatcatcatcgtggg

SEQ ID NO: 537456 - DNA, 100 bp, Homo sapiens
ctgccatcttctccgcgctatggctgcgttcggccgtcaggatatgctgcaggctgctagtcattatcgccaaaatagaaactctttgtatagaagagaa

SEQ ID NO: 537457 - DNA, 100 bp, Homo sapiens
gagaatggccagtcagcctgaggccaccgcgggacaccacctaggcccagcttctccccaccggaacatgaacattttgcagtactgcccctcttccgac

SEQ ID NO: 537458 - DNA, 49 bp, Homo sapiens
aggggccttgacaacacagagtttcaagtgtgtgcaggaacggagaata

SEQ ID NO: 537459 - DNA, 49 bp, Homo sapiens
tgttaaaacagaaggtgactcacgtggacccccaaaagtacaagggcat

SEQ ID NO: 537460 - DNA, 75 bp, Homo sapiens
ctgagtacgacagcctcaaacaggagctggagcagctcaaagaggatgacggaggctggacacccatgatctggg

SEQ ID NO: 537461 - DNA, 96 bp, Homo sapiens
ggataaaccacaaaatgggtaatatactatagacacgatgaggcgagtggtacgacagagcaagtttcggcatgtatttgggcaagcggtgaaaaa

SEQ ID NO: 537462 - DNA, 87 bp, Homo sapiens
gaagctcatccgcaaggtgtccacgtcgggtcagatccgacagaagaggctgggaggcggcagaatgcagccagaggagggcacagg

SEQ ID NO: 537463 - DNA, 75 bp, Homo sapiens
ctctcctacattataatgaagaggctgtccagataaatcccaaggtcaaggtgaagatgttcttaaagggtccca

SEQ ID NO: 537464 - DNA, 87 bp, Homo sapiens
ggagctgaactccacagagtcaggatgttcacgtcccagtatgcccactctgtaatacccccatcccagtaaaaaagggccagatac

SEQ ID NO: 537465 - DNA, 75 bp, Homo sapiens
tgtcttaggaccataccatgacaaggcattgctaccatttatgttcgttataagcaagttcatgctctgagtcct

SEQ ID NO: 537466 - DNA, 100 bp, Homo sapiens
tggctcccaggtgtctgagcacagcatcatcaaggacttcaccaagcagatgtttggaggccatgattaagtacctcacactgtggaagaaagaggagca

SEQ ID NO: 537467 - DNA, 74 bp, Homo sapiens
tccgatgacctcaagcttgcagcatcaggaggtgctggagaatctggtaaaagcaccattgtgaagcagatgag

SEQ ID NO: 537468 - DNA, 90 bp, Homo sapiens
cgacctcgacgtcttgcctgtgtcccacttgttcgcggcctataggagccatgtggctagaaatcctcctcacttcagtgctgggctttg

SEQ ID NO: 537469 - DNA, 50 bp, Homo sapiens
gcatcaagaaacccaagctgctgagatcatcagaaaagcccttactgagg

SEQ ID NO: 537470 - DNA, 75 bp, Homo sapiens
gggttgggctgtgacgctgctgctggggtcagatgccttcaattaagttgcagagttctgatggagagatatttg

SEQ ID NO: 537471 - DNA, 83 bp, Homo sapiens
gctgctcttcatcctcttctgcattgggatggacccctatggtgtagccgtgggtggaactgtggggcactgcctgtgcacgg

SEQ ID NO: 537472 - DNA, 101 bp, Homo sapiens
accgtttggcatcccgactgtaagcaatctacgaagaccgaggaaaagctgcgggtgcagctgctagcaaggaaaattatcttttcatatttaaatctgct

SEQ ID NO: 537473 - DNA, 95 bp, Homo sapiens
cgcaggcgcggaatctccgacttgccatggtcgtctttgtctgccgaaacgcttcgttaagggactcaggcagtacgggaagaacttcttcagaa

SEQ ID NO: 537474 - DNA, 100 bp, Homo sapiens
aacaacctcaccgtgcaccttcgcaagaagcaccagttcaagtggccctcagggcatccccgttttcggactccctggaggaaaagcggaagcggcagcg

SEQ ID NO: 537475 - DNA, 90 bp, Homo sapiens
agcggctccgcggcggggctgctacccaccagcatcctccaaagcactgaacgcccggcccaggtgaagcttatcacacagactttcagc

SEQ ID NO: 537476 - DNA, 95 bp, Homo sapiens
gtgcagcagccggccgacccagagtgtcccgcggcagtgctggtggccatggttcccgtagccagaaggagttgcccacagagcccccctacaca

SEQ ID NO: 537477 - DNA, 83 bp, Homo sapiens
tgtccagttcatccctgagccttgagctcccagtcgcagagctgaggcttcgaagacctcagaggacttctctcagcactcac

SEQ ID NO: 537478 - DNA, 90 bp, Homo sapiens
acgtgtataaatccaggaccaagagatcctctaccaccaaactctatcttgctaagcaggtggagatgaagaagagaatgatgagccacc

SEQ ID NO: 537479 - DNA, 100 bp, Homo sapiens
ccaccatatacaggagctcagactcaagcaggaagaagaagcactcctctctgaaatggatgtcacaggccaggcctttgaagacatgcaggagcaaaat

SEQ ID NO: 537480 - DNA, 75 bp, Homo sapiens
cttctctgcacagcatccctgtgacagtgtactaatggtcacttgatgtgcgctggctgttttatccacctacta

SEQ ID NO: 537481 - DNA, 99 bp, Homo sapiens
gagctcaagaaggtccttaacacagtcgtgaacaaacgttcatctgcagaagccagcggacgcctctgttcaacttgtgggttacctggctcatgagac

SEQ ID NO: 537482 - DNA, 98 bp, Homo sapiens
ttccctttggatgtagcaaggaagaaattgttcagttcttctcaggacatggtctgctatacagctcagactctcgtccgaatcctctcacatggtgg

SEQ ID NO: 537483 - DNA, 51 bp, Homo sapiens
gatcgcagaattccagctcacagattaactactgcaatgtgcaatgaagtg

SEQ ID NO: 537484 - DNA, 83 bp, Homo sapiens
ctcgggggcggcggccacgccaaggacgggtactaggttttgacaagcttgcatcatgcgtgagtataagctagtcgttcttg

SEQ ID NO: 537485 - DNA, 148 bp, Homo sapiens
ctgcatgtctggctacctcgtggacaagtttgcagatcgggagcgcaaggtcgccctcaaggccatgatcaaaacgggcaccaccacgaggcgatttgtgggccataccaaggatgtgctgagtgtggccttctcctctgacaaccgg

SEQ ID NO: 537486 - DNA, 116 bp, Homo sapiens
ggcgccttgcgcagcatcttctcccaaatggcgcagtgggacctcagggtttcccaaaccactccttatgatccagtgaatattcaagagagctacatttgaagcctgtacaaaag

SEQ ID NO: 537487 - DNA, 87 bp, Homo sapiens
gcttccctcaagagtaactacaaatgcttttgataaagagtacaagatggcatacgatcgtctcacacctagtcaagtcaagagtac

SEQ ID NO: 537488 - DNA, 101 bp, Homo sapiens
caatgtcgatgcttcagttatgttcaggaaatggagagacagtaaaggaaaagacaaagaatatgctgaaattattaggatgaagctggaggcagattcgt

SEQ ID NO: 537489 - DNA, 83 bp, Homo sapiens
tcttccatccccatcttacagatgtattaagaagcctcagatatctcttccaaacacatgatgaaggaggtcttgtcaacagg

SEQ ID NO: 537490 - DNA, 89 bp, Homo sapiens
accctggagcctcagttggaagcagccgatccagcctgcggagcctgtggggcagagatgagaagaatcagtccatcatagtcagtggg

SEQ ID NO: 537491 - DNA, 100 bp, Homo sapiens
ctgtgacagggtccaacagggcctggtccgtgtccggtcccccaaatctgtcgtccctgcccccaggatctccagtctatgtgctgaagaagcagcagcc

SEQ ID NO: 537492 - DNA, 100 bp, Homo sapiens
agcgactgcaggacatcctcactaacagcaagagccgctcagggtggctataacctgacatccatctcagagtccatggctgcctgcactcgctccctcc

SEQ ID NO: 537493 - DNA, 76 bp, Homo sapiens
atcctttgcaccctgcttggagacggacttgcttccggaggagatgaccgccgggttctgctatggcacatggaac

SEQ ID NO: 537494 - DNA, 100 bp, Homo sapiens
aggagtcagtttattactggaaaatggatgggaaagtaccagtctcagtgaggaggaggatgctgatggtgaatggattgatgtgcaacactcttccgat

SEQ ID NO: 537495 - DNA, 105 bp, Homo sapiens
gctgcacttgaggcccagaatgcactgcacaatattaaaactttacctgggattgtcctgggtcacataatgccagctgagcgtaaaaagccagcaagtatggaa

SEQ ID NO: 537496 - DNA, 90 bp, Homo sapiens
caatgctcaggtgagaggtgatagctatgaaagcggctgtttaggaagaacaggatgacgatgtcgataccaagaagcagaagaccgacg

SEQ ID NO: 537497 - DNA, 100 bp, Homo sapiens
gaatttcaagagagtaccattgggggtggctgtgttactgcaacgtgccacagttctgcgacagtctacctcggtacgaaaccacacaggtgtttgggag

SEQ ID NO: 537498 - DNA, 75 bp, Homo sapiens
ccgtgcagctcgccgcctaccgcaagaaatctactttcttcaatgtgttaaccaatagtcaggcttcagcagaaa

SEQ ID NO: 537499 - DNA, 83 bp, Homo sapiens
cattggaagacttgaaagaactcagtcctgatttgggaaaagactctactgatatatttccaagtattaggtcacttgataag

SEQ ID NO: 537500 - DNA, 90 bp, Homo sapiens
ccaatcttacaagtctcaagtcttctctgcagctttaccgggatcttctcttagaaatctacagaagtataggggagccagatagtttgt

SEQ ID NO: 537501 - DNA, 82 bp, Homo sapiens
tacggccctgtgggcctgggagctgcctctgaggaacacgccgcaggaactgtggctgcaccatctgtcttcatcttcccgc

SEQ ID NO: 537502 - DNA, 98 bp, Homo sapiens
accatgcagcggaggtgggtcttcgtgctgctcgacgtgctgtgcttactggtcgggagaatgtgtgcaagtgtggctatgcccagagccagcacatg

SEQ ID NO: 537503 - DNA, 71 bp, Homo sapiens
ggagccgaggcgcaggtggcgctggcccgtggaccgggagcccgtggaccgggagccggtggtgtgccacc

SEQ ID NO: 537504 - DNA, 90 bp, Homo sapiens
gcaagttctgagagccaaccagtacaaagagaaccacaaccgaactcagcagcaggtagaagcagagcaagaaaagcctaggcttctcga

SEQ ID NO: 537505 - DNA, 83 bp, Homo sapiens
gcccagtggggcattcgtcttggtaaacttggtgtgatgcctgatattgtcatgttacagaggcggatgccccaaaccttccg

SEQ ID NO: 537506 - DNA, 51 bp, Homo sapiens
tcaccctggccctcgcggtggctgcctttaatcactttgggaagcagtgac

SEQ ID NO: 537507 - DNA, 51 bp, Homo sapiens
tctttgattctccatatcacctacagagtatggtgtttgcgaaaacttgcg

SEQ ID NO: 537508 - DNA, 115 bp, Homo sapiens
ttaaaagttaaacccaggaagctttggatcagacttttgtgttgcagttcgggtgagaagccctaccactgcaactgggacggctgcggctggaagtttgcgcgctcagacgagc

SEQ ID NO: 537509 - DNA, 87 bp, Homo sapiens
ggtgacacgcttccctggattggggagtgcatccgccccaacccttttccccctcgtctcctgtgagaattccccgtcggatacgag

SEQ ID NO: 537510 - DNA, 100 bp, Homo sapiens
cgcttgtctcctttggaggccctgagctcaggaaggcacaaggaagagccaatgttttccacccataatcctttctgccgacccctagttccctctgctc

SEQ ID NO: 537511 - DNA, 100 bp, Homo sapiens
gactttgttcggtccacgggggcagaacctggtctggccagagacctgctggaaggtacttaagagattatggcatcagaaacccacaatgttaaaaaac

SEQ ID NO: 537512 - DNA, 100 bp, Homo sapiens
ctggagtctgcgaaggccgggacccggttccccggcccacagtgggggtgtgcaaacccgagagaactgggtgatctgcaactctttcaccatctgtaat

SEQ ID NO: 537513 - DNA, 100 bp, Homo sapiens
gccgtgcttctgcctaagaagaccgagagtcaccacaaggccaagggcaagtgatttgacaggttggagtcagttagctgctatgcactgtgttatgctg

SEQ ID NO: 537514 - DNA, 90 bp, Homo sapiens
ctttcattgcagtcaacttgttcacagagataattgacgaccttgccaacctagtggagaacacagatgaaaaacttcgcaatgaaacca

SEQ ID NO: 537515 - DNA, 100 bp, Homo sapiens
cttattcatcagtttgttgtgcttgtcaagatcaggaaaaggggaagatagtgatgtactcagtataaatgcagatgcttatgacagcgacatagaaggc

SEQ ID NO: 537516 - DNA, 75 bp, Homo sapiens
cgtttattcagcttgcacttcagctggcctattacagacttcatggacaggcaactgtactcctgatgatattgg

SEQ ID NO: 537517 - DNA, 76 bp, Homo sapiens
ccaaggggttcagcttattgacttctcaccttgtgaaaggttcatgggcgggggtggtgagagctgcagcctcatc

SEQ ID NO: 537518 - DNA, 87 bp, Homo sapiens
gggacccgcttcgaggccgctttggcgccaaatcctgaggtacatgtcccagagcaagcacacggaggcccgggagctcatgtactc

SEQ ID NO: 537519 - DNA, 100 bp, Homo sapiens
tacaggactgcggacaagggctggcaggtaaccaaggagcagtgaacagcagctactacagtagtggaagccgtgcatctatgggcgtgaacggaatggg

SEQ ID NO: 537520 - DNA, 100 bp, Homo sapiens
tgcccccggcctgcgctcccatccacacgctcggtacatgtcccagagcaagcacacggaggcccgggagctcatgtactcgggagccctgctcttcttc

SEQ ID NO: 537521 - DNA, 93 bp, Homo sapiens
cccagaccctggagcctcagttggaagcagccgatccagcctgcggagcctgtggggcagtgttctacgcagaaatagaagagctgaaactgg

SEQ ID NO: 537522 - DNA, 86 bp, Homo sapiens
gcgtctgccgctggattgtgataggaagcagagtgttcgtgtggattctgaacacgaccctctttgagagttgggagataatcggg

SEQ ID NO: 537523 - DNA, 96 bp, Homo sapiens
agaaaggtacctgggttcaactaaagcgccaggatgtacagttacccagcacgtgtacctcctcctcctcctattgctcgggctgtagtgccctcg

SEQ ID NO: 537524 - DNA, 74 bp, Homo sapiens
ctctccgcaccgcggcttaaatgatgtattttgtgatcgcagcgatgaaagtctcttgcatggcaccaagaatg

SEQ ID NO: 537525 - DNA, 99 bp, Homo sapiens
caaaatggagatgttgttgggcagcattcatttcctggcagagccacctccatagacatcgaagaagccaataggaccgtgtatttaaatgtatctcga

SEQ ID NO: 537526 - DNA, 100 bp, Homo sapiens
gcagcaaagattacaccaagatctgtgctgaccacaggaattggatctactagtgcaggagccaaaaacctgtatatcatctccgtgaaggggatcaagg

SEQ ID NO: 537527 - DNA, 100 bp, Homo sapiens
acaccagcggcagcatgcatctgatgctctctctccagtccttgctgaagagactttccgttacatgaatctcagtttccagactgctgctcgaatcttg

SEQ ID NO: 537528 - DNA, 80 bp, Homo sapiens
cgcgtttgaccccaactccgaggagcaaattcaacacccaacagcttccttaatagcaaaggtagcaacagcccaggatg

SEQ ID NO: 537529 - DNA, 74 bp, Homo sapiens
tgagagcttcacagtgcagcggcgagaatgccgggacattctgcttcctgtcatcaccaaagagctgaaggagc

SEQ ID NO: 537530 - DNA, 50 bp, Homo sapiens
cgcatctgcttccttctgcgaaagacagatttgaccagttttgggccatc

SEQ ID NO: 537531 - DNA, 90 bp, Homo sapiens
gcggtactacaagaacatcggtctgggcttcaagacacccaaggaggcaagtgtcgtggacttcgtactgctaggaagctccgtagtcac

SEQ ID NO: 537532 - DNA, 74 bp, Homo sapiens
tggtggcctttccctccagctctgtctatcctaccaagagctatgccaagaccaagacgagagccgaggtgcgg

SEQ ID NO: 537533 - DNA, 98 bp, Homo sapiens
ccgatactgagcttcttcctatttgccatggtcaatcaccttctgctgcttggatgggtggatttggtgctcagcctccccaaggacaagctcctccc

SEQ ID NO: 537534 - DNA, 75 bp, Homo sapiens
accaggcgaagctggccgagcaggctgagcgatacgacggctccagggagttccacgctgtccagttctctctgc

SEQ ID NO: 537535 - DNA, 83 bp, Homo sapiens
attcactcactttgcaatggaaggaattacatgaatgacagtcttcgaaccaatgtgtttgttcgatttcaaccagagactat

SEQ ID NO: 537536 - DNA, 75 bp, Homo sapiens
aaggatgacaccggagtttgacgaagaggtggtttttgagtgtcacccgcaactacctagactggctcacgtcca

SEQ ID NO: 537537 - DNA, 90 bp, Homo sapiens
cgccgtggccctccccggaatgattctcagagccggcaaggaggatacagcatgcatcagctccagggcaataaggaatatggcagtgaa

SEQ ID NO: 537538 - DNA, 100 bp, Homo sapiens
cacaaatgtttttctgttttgcctgaatacatgatttaaacaagagatttccacagaaggctgggctaagcagttccaagctttccatgtccaaggccct

SEQ ID NO: 537539 - DNA, 96 bp, Homo sapiens
gccagcggcactggctccgccgcccaaggtgtcatggagaaactccagctgggcccagagattctgcagcgggaaaatccaaggcttatttatgcc

SEQ ID NO: 537540 - DNA, 100 bp, Homo sapiens
tttaatattttccttactgctaaggagagaagtttgctgaggaatgccttcaagcacaaagtgatgaatgactgccttcaagtctcaagaaaacactttt

SEQ ID NO: 537541 - DNA, 75 bp, Homo sapiens
aacggaaaagagcaaatgcagcatttttgataggtgcctatgcagacaatcatatcctgattcagcccttcctcc

SEQ ID NO: 537542 - DNA, 75 bp, Homo sapiens
ggccggagcctggtaccgtcgaggtgtgccacggaccacaatgtggacaacaccacagagatgctgcaggagtgg

SEQ ID NO: 537543 - DNA, 82 bp, Homo sapiens
gcgaaaattggatgtgaaaatgaagccagaccgaggatttggacgtggcagagggagaggggcaggaaggttctcaacccaa

SEQ ID NO: 537544 - DNA, 98 bp, Homo sapiens
gcctgcaaagctgtacaagagatcatgcaggtttatgctaaaactatcgatgggcaacagactattattgcatgtattgaaagccaccagtttcagcc

SEQ ID NO: 537545 - DNA, 96 bp, Homo sapiens
gatcgtgaccgagaccgtgaccgagagcgtgaccgagagcgcgaatatcgtcatcgttagaagcacatggattaattgatgtatgttgagtttatg

SEQ ID NO: 537546 - DNA, 76 bp, Homo sapiens
gattgagattgaacaacttttggcaagggcaaatctaagtaggtctttgagagacacagcagtcaggctttctgag

SEQ ID NO: 537547 - DNA, 82 bp, Homo sapiens
cttaggctttccagcttgcactggaccagggtggaaagataaagtcagacctaaagccaaaaggaaagaagaaccaagctct

SEQ ID NO: 537548 - DNA, 100 bp, Homo sapiens
ctcggtctcccgccagcgcgtcgaaagcctgaggaaaaagcggccgcgaaaagcttttgacatcacctatgtgcgtctcaagttccacaccagccgcccg

SEQ ID NO: 537549 - DNA, 100 bp, Homo sapiens
tggtcaacattgatggaaaacaaatcaaactgcaaatctgggatacggaatcttctgcggcttgtccatagtgtgaataaaaactaaatcacatctataa

SEQ ID NO: 537550 - DNA, 75 bp, Homo sapiens
gggggcctctccagggagtgctctgttcacggctccatcgctgttagccctgggaggagcggggacactgaggac

SEQ ID NO: 537551 - DNA, 75 bp, Homo sapiens
aggaagaggagccgagcatctgggccgagaccattccgtatggagagccgggggttccagaaactttagcagttg

SEQ ID NO: 537552 - DNA, 100 bp, Homo sapiens
ataagattgaatgccaagcagaaaattacctaaatgcactctttcgaaagaaaggattctttctactaatccagatacttgttgaagtgctgactagttt

SEQ ID NO: 537553 - DNA, 83 bp, Homo sapiens
caactatggcagcagcgtggcctccgccaccgtgcacatccgaatggacaatgcagatcttcgtgaagactctgactggtaag

SEQ ID NO: 537554 - DNA, 97 bp, Homo sapiens
ctcgagcttctcagtcagtcctgcctcatcccagccatgtcatcttatctacgaaatgattcagctgcttgtgaattttctgagacggatgtaacaa

SEQ ID NO: 537555 - DNA, 116 bp, Homo sapiens
gcggctgccgagaaggagggaggggaaacacaaagccggctacgcgctgcgagatctttaatctcatgaagtacgacagctacagccgcttcttaaagtctgacttgtttttaaaa

SEQ ID NO: 537556 - DNA, 99 bp, Homo sapiens
ttgcctttgtattcaaggagaagtgtcctgtgcctgtgtgtcgaggcaggtcatttactgctctccgcagctctcctctcacagttacgatggactggc

SEQ ID NO: 537557 - DNA, 100 bp, Homo sapiens
catgatgtcaacaaccgtggctcacaagatgaaagagcacatgcagaaactgaggcccagcagagattgagtaacttatgcgagttgtcactcacctcac

SEQ ID NO: 537558 - DNA, 75 bp, Homo sapiens
gtcatttctgttccgcacaggcctgctgaactgggtgctttatataggacaacagcagttctgtagagagtttaa

SEQ ID NO: 537559 - DNA, 100 bp, Homo sapiens
cagtgagatcttttttgttaaagattgcccaccaaatgagcttgaacccagtgacttgattgtaaaaatttacagagcggaatcatatgctggtctccaa

SEQ ID NO: 537560 - DNA, 100 bp, Homo sapiens
aggcctttggcgacagtgaggaggacggagaggatgtgttcgaggtggagaagatcctggacatgaagaccgaggggacatttctcttgggaagttgtgc

SEQ ID NO: 537561 - DNA, 100 bp, Homo sapiens
gtcagtgtgaatttgtgacagctgcagttgctccccgcccccgagcagccgagcattcttcaggtcatctgaaccttctgagaaaacatggtcaacgtct

SEQ ID NO: 537562 - DNA, 83 bp, Homo sapiens
ctaccagccagatcaacacaattgataaatcatcggactcaggtacatctgtgagtgagaacaggtgtcaccttgaaggtggg

SEQ ID NO: 537563 - DNA, 96 bp, Homo sapiens
gcgggggcgaggttcgggctggttgttccgttgcgagctgcagctgcgatctctgtggtaggcccagagttatgcccagccaagtcttcagtatat

SEQ ID NO: 537564 - DNA, 100 bp, Homo sapiens
tctgaaagctagaagaaaaggtgtacttgcaagaaacctcaggacttgagtaacagcaacatggcttaactggcatgggctgagccccttgggctggcca

SEQ ID NO: 537565 - DNA, 75 bp, Homo sapiens
aagcgcggccagacctgcgtggtgcactacaccggacatttcattaccatccagaagtgtctcccactgaaggca

SEQ ID NO: 537566 - DNA, 51 bp, Homo sapiens
aatgatggggcagcaagtggccaaagtgcctggtgaagaatgtgatgggat

SEQ ID NO: 537567 - DNA, 97 bp, Homo sapiens
gcaatatatggttatacaagcagcatacaggaataccatatctgttcaaaccttgtactactcagctgatcacaagctgcttgatgggaacctacta

SEQ ID NO: 537568 - DNA, 100 bp, Homo sapiens
gctcggccgatgaagtgcagaggtttttttctgtgacattctgaaagttcccaaacctgaacctataccagagcctaaagaaccttctccggaaaaaaat

SEQ ID NO: 537569 - DNA, 75 bp, Homo sapiens
tgctggaaggggccagtctggagacagtcaaggccaagatcaaggctcgagatcttcgcgggaagaagaaggagg

SEQ ID NO: 537570 - DNA, 100 bp, Homo sapiens
agcctcaaaatgaagatggcacatggcccaggcagaccttgcagtcaaagttatttcttatgagggtcatggatatcccctatctaaacttggaaggacc

SEQ ID NO: 537571 - DNA, 101 bp, Homo sapiens
gtcccgtttccctctgtgcggcggccggcgggaccataagggcttaactcatatatttaacccccctccaaaaatcactgtgtgcccagtattctgcagac

SEQ ID NO: 537572 - DNA, 75 bp, Homo sapiens
tccccctgagttctcctctgaagattgccccaaagcggcctcacaccagagacgggttaagaagagggattggag

SEQ ID NO: 537573 - DNA, 100 bp, Homo sapiens
aggccgagaccggagcgccgctcgccgcagacttacttccccggctcagcagggaaaggtacccactgatggtaatgctggcctgctggctgaaccccag

SEQ ID NO: 537574 - DNA, 96 bp, Homo sapiens
ctgcgctctgcccggcgagtcgggctctggaggaaaagaaagtggccataaaatgcagtaaaaacaaatccagttcccaagaagctgtacaaatgc

SEQ ID NO: 537575 - DNA, 75 bp, Homo sapiens
ttttttcttccaattaaggaaagtgccacaagcactaacagctttgagagagaaaagaaccacagtggttgcaca

SEQ ID NO: 537576 - DNA, 118 bp, Homo sapiens
tattggtctgtgagcgaaaatatcccaggagagaatactactttgcaataacaatggaaaggtcatttcaatgaaacctgggaagaatgtgctcaaagggaaacctgggaagaagcag

SEQ ID NO: 537577 - DNA, 148 bp, Homo sapiens
tgtggagcccattcggatggtcagctgcaggaaggctcgcctatccaggcctggcaactcttcgtcaatgaggtgacgttcaagtgtttctcacggatggaattctagtcagctgcaggcgggaagccaggcgggtggagcccatggg

SEQ ID NO: 537578 - DNA, 83 bp, Homo sapiens
cgagatcttccgccactacgagatgatcggctgaatgtaacagaggaactaacgtccaacgacaagacgaggattctcaacgt

SEQ ID NO: 537579 - DNA, 98 bp, Homo sapiens
cttaaagggtctagaacctgaagttgcagctctttatttccctaaaaggttttgcactgctgtgtgtgtggctcaagcacgtacacccaacagagtca

SEQ ID NO: 537580 - DNA, 75 bp, Homo sapiens
aggtccaggcccagcagcaggcctggcagatcaagaatgctgcagccaatgtccttcgggaaacatggttaatct

SEQ ID NO: 537581 - DNA, 100 bp, Homo sapiens
gtgaagtagatgataaagatgatgatatccttctcaaccttgtgggatgtgaaaactctgttactgaaggttgcagagaacacatcttagaagatgaaaa

SEQ ID NO: 537582 - DNA, 100 bp, Homo sapiens
ggcgtgcatcatccacggggtgctgcagatcctgttccaggtgctggagaatctggtaaaagcaccattgtgaagcagatgaggatcctgcatgttaatg

SEQ ID NO: 537583 - DNA, 98 bp, Homo sapiens
ggcgacctcaagaagcagctccacgaaaggcagccgcggatcgccgcgctcagcgacaaacaactgtcgcctggttgggcccggaaatgggacgtcgc

SEQ ID NO: 537584 - DNA, 82 bp, Homo sapiens
gaggacacttgtttggctccaaccctagggcaattgaaggaacagactaaaaatcgtgtcctggaaggaaactacaggtact

SEQ ID NO: 537585 - DNA, 100 bp, Homo sapiens
tccggaagttagatgaattgtacggcacttggcgtaaagccgcttccctcaagagtaactacaattttaatcagctggatctgcctgcctatgagagctt

SEQ ID NO: 537586 - DNA, 87 bp, Homo sapiens
ggagcggagacctcgctgcgctcatggcgtcgcccgggtggtgctgtgggtcggcctgggcgtcctggtggtgagcactgtcaccac

SEQ ID NO: 537587 - DNA, 87 bp, Homo sapiens
gaaagttgaaggggacatgtatgaatctgcaaacaatcgaaacactatgtggctgccgtgtaagagtggaactgtcgaatggtgaaa

SEQ ID NO: 537588 - DNA, 82 bp, Homo sapiens
gccacgcagaagtcgcgtgtctaggagcggtggtgccccccccgggcacggggccatgtacaacgggatcgggctgccgacg

SEQ ID NO: 537589 - DNA, 78 bp, Homo sapiens
tgatgattatgctgtatatgtgagagagaatattcaggtgggatgcagatcttcgtgaagaccctgactggtaagacc

SEQ ID NO: 537590 - DNA, 75 bp, Homo sapiens
tttctcgactccatcttcgcggtagctgggaccgccgttcaggtcagcccaaggccaaccccactgtcactctgt

SEQ ID NO: 537591 - DNA, 74 bp, Homo sapiens
acagctgtacatccatgccatcttctccagccaccccagccagtggaaccaagccagcacaggccagccagaag

SEQ ID NO: 537592 - DNA, 51 bp, Homo sapiens
tctttctggcctggaggctatccagcccagaagtggacttccctgtccccc

SEQ ID NO: 537593 - DNA, 99 bp, Homo sapiens
ctgctcccatcattgatgtggtgcgatcgagcaagatatgtgaattacatcaaaacatcagaggttgtcagactgccctatcctctccaaatgaaatct

SEQ ID NO: 537594 - DNA, 101 bp, Homo sapiens
tgtcaattcctgatctcacaccaaagcaagttgacatgtggcaaacacgtcttagtacacatttggaccagtcctgcctctgttgtagaagacatgtggtg

SEQ ID NO: 537595 - DNA, 75 bp, Homo sapiens
gacccggggattcctcacagcgtctggcagacaaagctctgatggcaccaaatcttgactcctttggacgcgatc

SEQ ID NO: 537596 - DNA, 90 bp, Homo sapiens
gggcagaatacagagatatggaatcagatgccttattggaggaactggaacgctccacccttcaggacagtgatgaatattccaacccag

SEQ ID NO: 537597 - DNA, 50 bp, Homo sapiens
tgcccaagaaaatctcctcagaggaaaatcctgccttgcttcgttgggcc

SEQ ID NO: 537598 - DNA, 83 bp, Homo sapiens
ccggagactcgcggttgctacgcgcaccatggctggagcagggtttccaggcctgaggtgcccgccctggccccaggagaatg

SEQ ID NO: 537599 - DNA, 85 bp, Homo sapiens
accgggcccagcacagccagcaccgcacgccctgcaagggaggcaaaagtcaacaactctagcttaattggagtaggctatactc

SEQ ID NO: 537600 - DNA, 101 bp, Homo sapiens
aaggtggagccaccagcctctccctggcagtggagctactgctgtggttcaggcagccctatgcaaacccaggcaagaacgtgtagcaataaaacggatca

SEQ ID NO: 537601 - DNA, 98 bp, Homo sapiens
acaaatacaagctgatgcgacagattcgcatgtgcaaggacctgaagcatctcatctattatcgtttcaacacggtgggtcatgataactgggtacgt

SEQ ID NO: 537602 - DNA, 80 bp, Homo sapiens
gacagttactggaacatagagattttatagggtggttcttccagtacttggatacaatattcagtacccgaagaacaaag

SEQ ID NO: 537603 - DNA, 76 bp, Homo sapiens
gtctctactcagcctggagcaagatatcaacagtgatggtgtcctggatgagcaggagctggaggcactcttcacc

SEQ ID NO: 537604 - DNA, 75 bp, Homo sapiens
tgttggcagcaatgagcttgtgttccaggtgaagcatctgacgacaccaaaaagaagatgtacagctccatccta

SEQ ID NO: 537605 - DNA, 82 bp, Homo sapiens
gaagaccgcgcgcagggcctgcagcgggagctggacggcgagcgcgagcggcgcgagaaaacggagtctggctctgtcaccc

SEQ ID NO: 537606 - DNA, 50 bp, Homo sapiens
gtaaagaaagacgcagagttaaaggcgtgatatcagtatcaagataaaag

SEQ ID NO: 537607 - DNA, 82 bp, Homo sapiens
gtgagtcaggagctgtatgaccttaacgtggagctctccaaggtaatgagagatccaaacaccaagcgctccaggggctttg

SEQ ID NO: 537608 - DNA, 100 bp, Homo sapiens
gttactcgcacgcggatttggctggcgtcccgcgtgctggagaatctggtaaaagcaccattgtgaagcagatgaggatcctgcatgttaatgggtttaa

SEQ ID NO: 537609 - DNA, 74 bp, Homo sapiens
ataataagtattttcaatgtggagttctatgcaggattttgacattgctgggaactttgatcccatgatccctg

SEQ ID NO: 537610 - DNA, 82 bp, Homo sapiens
cagctgctgagttctcggtgaaggactttgtgttttatgccccacgtctgagaatcaacaagcggatcctgcagctctgcat

SEQ ID NO: 537611 - DNA, 83 bp, Homo sapiens
catcaaccgggccgtgccccagatgcccaccgggatggagaaggaggaggaatcggatattagaaatggctactccccagtca

SEQ ID NO: 537612 - DNA, 151 bp, Homo sapiens
aggccccactcacaatctccttgttcttcgtgggtgtgctgttgggctccttcatttcagggcagctgtcagacaggcccaagtctgttttggtggtctgagaggaaaaaagatgagcttctaaagttttgggaaaattatattttaatta

SEQ ID NO: 537613 - DNA, 114 bp, Homo sapiens
ctaccaccaactcgtccaactgacaagcccttgcgcctgcctctccaggatgtctacaaaattggtgctccagtggctgttggacaattatgagacagcagaaggagtgagcct

SEQ ID NO: 537614 - DNA, 75 bp, Homo sapiens
aatctctgttccaaatgctttgctggtcctaaaaacatcctgagtttctttggcctgccagaaagtcaccttcct

SEQ ID NO: 537615 - DNA, 97 bp, Homo sapiens
tcgccggcagtgctggggccgcgccacttccgcaaacaggtgcagaagtctcaggggatccagaactgcagccagtccttgctgggctgttcctgtc

SEQ ID NO: 537616 - DNA, 74 bp, Homo sapiens
agcggctggaatttgcgttttatgtcattgaacaggtggtgttcccactgatgaagagcaggcgactgggttgg

SEQ ID NO: 537617 - DNA, 90 bp, Homo sapiens
gctgaggatgacaaaaaagccttcataggtgcattgtcctgttttcacttttggcatgggtttatgctgagcctaccatgtatggggaga

SEQ ID NO: 537618 - DNA, 74 bp, Homo sapiens
gaaagtttcatctgtggatggagtattgacagaagcattaaaatgcgtggctcaggctagcaagaacagatcac

SEQ ID NO: 537619 - DNA, 74 bp, Homo sapiens
ctgcaccgacctcgacgtcttgcctgtgtcccacttgttcgcggcctatagcacctgaactcctggggggaccg

SEQ ID NO: 537620 - DNA, 100 bp, Homo sapiens
cttctctccccggacctttgctcaggaatctaccagcattaaacctttgagctaggttctcccatgggcaggtggtctctctggatgagctgcgcccctt

SEQ ID NO: 537621 - DNA, 50 bp, Homo sapiens
gttgaagattgtgaagcaatagcctaagtctgaacaacccagtcctgcca

SEQ ID NO: 537622 - DNA, 100 bp, Homo sapiens
ctccgatccgacggcctatctctgcagagagtgccatcatgaatccagcctctaaggtgatagctctgaaagacagctatgactatctccaaaatgcacc

SEQ ID NO: 537623 - DNA, 75 bp, Homo sapiens
gaagccttgaggacctactcacagataggaattgaagatcagcaagttgctcggatggaaaaactagctggtttg

SEQ ID NO: 537624 - DNA, 51 bp, Homo sapiens
aagctggaatgtcctgttgctggcatgtgagcagcagtgacagagtgggca

SEQ ID NO: 537625 - DNA, 74 bp, Homo sapiens
agggggtcatattagtgcttatctttttaaacaaggactcttcaggattttctgccgtctcttggcaaaaatgg

SEQ ID NO: 537626 - DNA, 82 bp, Homo sapiens
aacggaatgctggagtcagtggaagacggagctggtcggcccgaagtttgctggcctagacctgaactcttcagataatcag

SEQ ID NO: 537627 - DNA, 96 bp, Homo sapiens
gtgaaacgatcatcgagctaaaatatcgtgttgatgtggaagatgtcaagtttgtgatcaactatgactatccaaacagctcagaggattatgtgc

SEQ ID NO: 537628 - DNA, 82 bp, Homo sapiens
agtgcgggtgaggagtcgcgaggaagaggcggaaggcgccggaagaattatatccagatcgagagacagaagattctgaaag

SEQ ID NO: 537629 - DNA, 83 bp, Homo sapiens
agtgtggcaaccagatcggtgccaaggtactccaaagattcaggtttactcacgtcatccagcagagaatggaaagtcaaatt

SEQ ID NO: 537630 - DNA, 75 bp, Homo sapiens
gtgtgttggtggtcccggaacctctcgtaaaccagcttttggaaagaacaaacagtggatttgaagaatcagatt

SEQ ID NO: 537631 - DNA, 86 bp, Homo sapiens
ccgcgctctcagtcggagcgaagcggctggcggagcagaacggattgcaggatgtcggtgcagatctcttgtccatgtgccagcga

SEQ ID NO: 537632 - DNA, 89 bp, Homo sapiens
agggtttgagcatgccagagctgcctttggccaggttaacgtccctaaaacccgccggactttctgtaagaagtgtggcaagcaccaac

SEQ ID NO: 537633 - DNA, 90 bp, Homo sapiens
gaggttacgcagcaaaccatccagaagcctcctccagctggtgatctcgggtcccgtgcagcagtcgcctcacgccgcgctccccccggg

SEQ ID NO: 537634 - DNA, 75 bp, Homo sapiens
tcccacgccaaaccagaccccatggcctgctcagcctcagcggatgttgcttcagagtgtgaagtcaaatgcatg

SEQ ID NO: 537635 - DNA, 51 bp, Homo sapiens
cttcaccagctcttcagatcaatatgatgcttgtgaccacaccagaaaaat

SEQ ID NO: 537636 - DNA, 83 bp, Homo sapiens
ggcaaataacttttccttggagagtcataacatatcactgactgtttctcttcagcaacgggtagcagaattggaaaaaatta

SEQ ID NO: 537637 - DNA, 75 bp, Homo sapiens
tggggatgataattgttttcttcaaatccaaagttgcaggaccagctctgccccctaattataaaagcagtagtt

SEQ ID NO: 537638 - DNA, 90 bp, Homo sapiens
ggcaacagagtgaaggatttggttcacagagaagcagacgagttcactagacaagacccaacatgagtgaagtttcctgcaagaaacggg

SEQ ID NO: 537639 - DNA, 75 bp, Homo sapiens
gctggccaaagcctgcccagacggctcacctgtgcgggatggaacaaaagctggtcagtgagaaggtcggagggg

SEQ ID NO: 537640 - DNA, 100 bp, Homo sapiens
aactgccttcatcttgaaagaaaagtggtgacatctttactcattaacctgggaagccccgtaaaagaagttcgtagggctgccattcagtgtctccagg

SEQ ID NO: 537641 - DNA, 100 bp, Homo sapiens
cttttcctttcccatctaagttatatatcatgtgcatggcgaatttggaggaggaggagatgttaaagtaacccatcttgcaggacgacattgaagattg

SEQ ID NO: 537642 - DNA, 93 bp, Homo sapiens
gacttttggggggaaactaggtcgatggtcggcggcgcccggatgggcagctgagatgaagtggccattctgcctgcccctcagaacctctct

SEQ ID NO: 537643 - DNA, 88 bp, Homo sapiens
gccggagtgagaagcaagaaggccctggacacagcaatatctctgggctttcacaggcaaagcagagagcagaggttcttcagtccac

SEQ ID NO: 537644 - DNA, 75 bp, Homo sapiens
ccggccccgcgcgccccggcccggccccgcgaggaacttgctactaccagcaccatgccctaccaatatccagca

SEQ ID NO: 537645 - DNA, 74 bp, Homo sapiens
caagtgggacaactttctggcttttgaaaggctccttcttcaggttttcctcctccaccaggcgctccacctcc

SEQ ID NO: 537646 - DNA, 82 bp, Homo sapiens
gcttgtgtagcgtcagatccttgagtgataaaggagtagaggtgagaagccctaccactgcaactgggacggctgcggctgg

SEQ ID NO: 537647 - DNA, 75 bp, Homo sapiens
ccagtacctgcccaggaaactggttttaggagaagttttagcacaacttctgcttcttcccaaaaggagattaac

SEQ ID NO: 537648 - DNA, 100 bp, Homo sapiens
tggaatctgccttctactccatcgtgggactcagcagccttggtgctcaggtgccagatgcaaaggacatcaccttgaagatacagtttttgaggcttct

SEQ ID NO: 537649 - DNA, 83 bp, Homo sapiens
ctggtgaagtggaaaggatggcccccaaaatcacggatacacgactctagccaccagtgtgaccctgttaaaagcctcggaag

SEQ ID NO: 537650 - DNA, 74 bp, Homo sapiens
tatcgccgctgactgtgcccctgtggaaggaggattttttatcaagcagaaatgcatcgaacaacgagaatcaa

SEQ ID NO: 537651 - DNA, 91 bp, Homo sapiens
ggagctctccttgcagatcggtgacacagttcacatcctggagatgtacgagggacttaaagagagatctacttcagagccagcagtcccg

SEQ ID NO: 537652 - DNA, 83 bp, Homo sapiens
ctacaccatcgacaccgaaaactccaccgtagcccttgccaaaggacagagcgggatgccaccagcttgtccaaagggaagtt

SEQ ID NO: 537653 - DNA, 100 bp, Homo sapiens
gtcgtggccgtgttgctgatcgcctgggtggttgttggcgtgtccctgcagcgaaggatcctggctgttactgaggcggagacacgggtgatgattggct

SEQ ID NO: 537654 - DNA, 97 bp, Homo sapiens
agtgccgtgcgccgcagcccgggcccaggccccggcagcgcctgggacaagctgccttcctatttcaaggaaagacgccaaggtaattttgacccag

SEQ ID NO: 537655 - DNA, 87 bp, Homo sapiens
agcatggagagatagataaacgggctgctttgtaccgcctcagtggagactggaatcccttacacattgatcctaactttgctagtc

SEQ ID NO: 537656 - DNA, 98 bp, Homo sapiens
tcagaagaaagaagatgacttcctcaacaacgccatgtcctccctgtactcggctgttttggagtcagcggaagatcaccaaggccagggagtggttc

SEQ ID NO: 537657 - DNA, 100 bp, Homo sapiens
gtttgacaaaacataccaattcttgaatgacatccgagcgaaagagaaagagggtgtccgcaatgttgccagtgtctgtctgcagattggctacccaact

SEQ ID NO: 537658 - DNA, 82 bp, Homo sapiens
ggaacggaaacaaagttattttgctcgttagttgaatccatggacatgaaacccacagatatagagggttggcccggtgcag

SEQ ID NO: 537659 - DNA, 98 bp, Homo sapiens
atagaaggcaaactggctacccttatgtccactgaagaagggaggcctcactttgaactgatgcctggaatttgtcagaggaatggctgtgaatggat

SEQ ID NO: 537660 - DNA, 100 bp, Homo sapiens
ctattttattagtcttctactgccctacagctacagagcaggaatatgctgtggggtactggatacataagggaatgccatcagagaaggtggtcatggg

SEQ ID NO: 537661 - DNA, 83 bp, Homo sapiens
tgaagtcaccactgaggaggaattcaccctgttcgtctatgagatttctcccgaaggggaaaagtacaaacccttaattactg

SEQ ID NO: 537662 - DNA, 75 bp, Homo sapiens
tggtcctggccccggagctgttgctggacccctggcaggcgctgataaagcagtttgtgtccgacgtggcctggg

SEQ ID NO: 537663 - DNA, 80 bp, Homo sapiens
ctaattgatcagcagcagcagaaaatcattgccctgcagagtggtttacaagctggaacgtcaaggtcgtgggaaataaa

SEQ ID NO: 537664 - DNA, 101 bp, Homo sapiens
gaaaaagacaaatacaagtgaaaaaaatagactaatggattaacgtccctgtcgtgtgacattttctggttttgcactgattgcaaaaataaagtcctccg

SEQ ID NO: 537665 - DNA, 90 bp, Homo sapiens
tacccctacacattggcaccagctacatcaatccttgagtatcctattgaacctagtggtgtattagctgcaaatggtgtggtattagca

SEQ ID NO: 537666 - DNA, 100 bp, Homo sapiens
gtcatcctgctgcacctcctgaacatcttaaagaacctttggtatacatgaggaaagcacagagctgtaactgaagttcgtgaagtcaccagaaaatcag

SEQ ID NO: 537667 - DNA, 100 bp, Homo sapiens
cattgatgccacaaccataatagaatgtctacattcctggtgaaatcaaaattgctgtttctattgaagatgaagccaacaaggacctgcctccggccgc

SEQ ID NO: 537668 - DNA, 85 bp, Homo sapiens
aaagtgttcctgctcaaggaggaactggcctacttccagcgccacaggtggaattaagaaatctggcaaaaagtaagctgttcct

SEQ ID NO: 537669 - DNA, 130 bp, Homo sapiens
tgctccaatattacctcaaggattacagcctgaacaacagctacagttgtggaatgaggaaaattgcctaagaattatgacccaaaagttaccccagatccagaaagatggctgccaatgcgagaacgtt

SEQ ID NO: 537670 - DNA, 75 bp, Homo sapiens
tggcaattgtaaggccatcgattgttggtgccagttggaaagaaccttttccaagacgcggaagacgcggtgtat

SEQ ID NO: 537671 - DNA, 100 bp, Homo sapiens
gcgagccgcctgccccggtgcgcagacagagctattccagcaccagcagagccttgaaaagatcttttgaggtcgaggaggtcgagacacccaactccac

SEQ ID NO: 537672 - DNA, 82 bp, Homo sapiens
ccaccatcgagcagtatgccgccctggccacggggactctcttctggatgggggcttcgccaccttctcctcctgcttcccc

SEQ ID NO: 537673 - DNA, 100 bp, Homo sapiens
caacaagtacttctccaacattcactggtgcaactgcccaaagaaattcggagggcagcactgtgaaataggtgtgctaaagaggcagtacaccagtttc

SEQ ID NO: 537674 - DNA, 75 bp, Homo sapiens
cgagcaacttaagaaccagattcgaaatggtgaggttctggagaattgatgaggattatccagtgcaagttgcac

SEQ ID NO: 537675 - DNA, 75 bp, Homo sapiens
agtcactgcctgcgcagctccggccgcctggctccccatactagtcgccggtattggtcatcattgatgtgaagc

SEQ ID NO: 537676 - DNA, 100 bp, Homo sapiens
ccgggagcgacttgccgacgccatggccgagtcacctagccgggacgtcgtgggatccggaacagacaagttggatggcttgaggactggtactaaaagg

SEQ ID NO: 537677 - DNA, 50 bp, Homo sapiens
cccgagtgcagagcgggcagagaagctgaacggctctgctgtcctgggcc

SEQ ID NO: 537678 - DNA, 90 bp, Homo sapiens
ggctcgcggcgtctccggggaaagccgtggccccgagggcggatccgaggaaaatatttgcaatacctgccacgtccaaggttcagctga

SEQ ID NO: 537679 - DNA, 75 bp, Homo sapiens
aaaagtggaagcgaagccgaaaaaggcagcagcgaagccacagcctggcagctctgatcaggaaagtgaggaaca

SEQ ID NO: 537680 - DNA, 100 bp, Homo sapiens
aacatcacccacccatttgagtttgacttctatctgtgcagccacgcaggcatccagtttaattggttggggtcagataagaagaggagtgacaatcaag

SEQ ID NO: 537681 - DNA, 87 bp, Homo sapiens
ggagaccttcgagcaccccaacgtggtcaggccagaagcggactcctagaagaggggagcagcaaggatggaatgacagccgtgggc

SEQ ID NO: 537682 - DNA, 83 bp, Homo sapiens
aacgtgagggtgtaacttacaaaaagctgcatcttcctcccgtgaggctggccgagctccacgctgatctgaagatacaggag

SEQ ID NO: 537683 - DNA, 100 bp, Homo sapiens
aatcaacaaacttttgagtctggaaacttcgtggcttgcatgacagctattttacgacaaatggaagattaccattatgcccacttgatcaagacttttg

SEQ ID NO: 537684 - DNA, 99 bp, Homo sapiens
cattactttgctgtgaatgtgaagaatcagaaatctttactgattccaataaagaagacatagctcatccagcaagccgcctttggccgttcctcccac

SEQ ID NO: 537685 - DNA, 100 bp, Homo sapiens
gggtagtggcatttggacagtgggctggtgtggcagagaggatctgacgaactactctcaggcagtgttctcagtagtccgaactctaatatgagcagca

SEQ ID NO: 537686 - DNA, 75 bp, Homo sapiens
ctcctgggcgcgggcagccctctgccttcctggccgctcccaaatatagattcatgctggtcctggccagcaatc

SEQ ID NO: 537687 - DNA, 74 bp, Homo sapiens
caaagggcagtcggcggagcttcgccaaggctggcgcagtcgtttcttaaacaattaggtctacatcctaactg

SEQ ID NO: 537688 - DNA, 98 bp, Homo sapiens
taaagtcacccggcggccaaaggccagtgactaccaacgtttggaccagaagaccaccgctgaaacttcacttctacacagaggctttctttcccaga

SEQ ID NO: 537689 - DNA, 97 bp, Homo sapiens
accgccagcatggggagagaccagcgcgcggtggccggccctgccctacggcggacaccatgcggcttccgggtgcgatgccagctctggccctcaa

SEQ ID NO: 537690 - DNA, 74 bp, Homo sapiens
ctggctcggagcagcagcctctgaggcatctatcgagctgtgcctattcgagtcaatccaagagtgagtaatgt

SEQ ID NO: 537691 - DNA, 90 bp, Homo sapiens
aagaagtgccttttgcctcccaccgtgattctgaggcctccccaaccatgtgcaattgccggaaaagaggcataaactcggagaacccaa

SEQ ID NO: 537692 - DNA, 90 bp, Homo sapiens
ccgtgtccagcctgggacagacgtgggaaaaccagtgttctctggacatgaaaagcaaactgaatacaagtaaacaagcagaaaatggac

SEQ ID NO: 537693 - DNA, 100 bp, Homo sapiens
caaaggaagaaagaatttcggaaccctagggcagcctgtgagcagcaagctgtggctctgactctgcaggaggacagagcatccctgacgctttcagggg

SEQ ID NO: 537694 - DNA, 75 bp, Homo sapiens
gctgaaggagcctggtgagaagacaggctggctcattaacatgcatcctctcatgggcctcctgagtgacccaga

SEQ ID NO: 537695 - DNA, 90 bp, Homo sapiens
cttggcaaaatcgagcgggccattgacggttgatgatgaagcgccggccgtgtaaatgaagatcgggtgaggagcaggacgatgcccaag

SEQ ID NO: 537696 - DNA, 97 bp, Homo sapiens
gttgcatcaccatcaagtcaacatgcttcaagagaagagttgctggaaaaaacacatcaagtgtagaagacgtgttcaaaaatagaaaatactgccc

SEQ ID NO: 537697 - DNA, 50 bp, Homo sapiens
ctttgtttttcctgggaactgcaggtagctacagcaagctgggtagcagg

SEQ ID NO: 537698 - DNA, 100 bp, Homo sapiens
gaaaacgtagggaccacatcaaagacagctttcacagtttgcgggactcagtcccatcactccaaggagagaagggtaaaggcagcagtaatgctaacgc

SEQ ID NO: 537699 - DNA, 75 bp, Homo sapiens
tttaaaaagcagtgggctctggaacaacacggtgttcatcttttctacaggtgagttgggaatcagactcttgag

SEQ ID NO: 537700 - DNA, 96 bp, Homo sapiens
ctcggacggcgactccggggatggcgaagctgtgccatgcggagctgaatgccatcatgaacaaaaattcgaccgatgtgaaaggctgtagtatgt

SEQ ID NO: 537701 - DNA, 83 bp, Homo sapiens
cagaagatccagctttgttgaaaagcgaagccgttagtcccttaatacaaaggacttaattcagtgcacaaatgagatgaatg

SEQ ID NO: 537702 - DNA, 100 bp, Homo sapiens
cctcctcccccatgtaccacacctgtgtggccttcgcctggctgctcctggaacacctggagtgcctggtgtccaggcacgagaggtcactgcgcatgac

SEQ ID NO: 537703 - DNA, 98 bp, Homo sapiens
ctttccgcttcttgaatttctctctgtaaaggaggatgtaaagcaggagttaataaagttggttaaggcagcaggattttcatcttccacaacttcta

SEQ ID NO: 537704 - DNA, 90 bp, Homo sapiens
aggatccccaacggggaggccaacgtgaagaaggtttgccttcccggattgggcctacaagccagagtcgtcccctggctcaaggcagat

SEQ ID NO: 537705 - DNA, 98 bp, Homo sapiens
tttgtgcccatgaaaattgttctgctgatttacaggtttctgcaaagattgggtttttgaagcgaggattaaatccaccacacagggtgaaatctatc

SEQ ID NO: 537706 - DNA, 50 bp, Homo sapiens
tttgagtgcaactgccttccagctccagtaataaaccgattcacaaggcg

SEQ ID NO: 537707 - DNA, 85 bp, Homo sapiens
ccatcatagtcaactgcgtggaagagaagaaaaacacaccttgactttagtcagatacatcactgtctgttaaaggaaaccaagc

SEQ ID NO: 537708 - DNA, 100 bp, Homo sapiens
tgttaatgcactcctcattcctggaccagcaggcaaaacaaagctagagaaacaattccagttacaggtcggttcacccagaagccagggggcatctcag

SEQ ID NO: 537709 - DNA, 78 bp, Homo sapiens
gccgcaccatgccgctcctaagcctgcacagccgcggcggcagcagcagtgagagatcgcaccccctccctccctggc

SEQ ID NO: 537710 - DNA, 50 bp, Homo sapiens
gaaggctccgctcacgcccggtttgctggcctagacctgaactcttcaga

SEQ ID NO: 537711 - DNA, 83 bp, Homo sapiens
cctcaggccagtcgcctccaggccaagagggatccttcacccgtgtctgctgaataccactagaaacatacctgtaaccagag

SEQ ID NO: 537712 - DNA, 100 bp, Homo sapiens
ttcaagcagagactggtcttgaagagcagcttagcgaaagaaaccctctctgagttcttgggcacgttcatcttgattcttggtaaaatgcggctgacaa

SEQ ID NO: 537713 - DNA, 90 bp, Homo sapiens
ataagctatatactttggttacctatgtacctgttaccactttcaaaaacatcgctattgcggttccgaggcagtgggaagagatgcggc

SEQ ID NO: 537714 - DNA, 75 bp, Homo sapiens
gtgttgatcaggagtgaattcacagtctaccatgaattggaaggttgtttacattcagagctctatcaataagag

SEQ ID NO: 537715 - DNA, 98 bp, Homo sapiens
ccctcggcgagaagaccgtcttcgggcaagagctccgagtaggcatagaatgtcaagctaaccaggcgtccgctacttcagaagagtgtactgtcgca

SEQ ID NO: 537716 - DNA, 96 bp, Homo sapiens
ccgattccggatctcattgccacgcgcccccgacgaccgcccgacgtgcattcccggacctgaaggagaagaaggagaaggtggaggagaaggcaa

SEQ ID NO: 537717 - DNA, 51 bp, Homo sapiens
gtgttaaagtaacagatgatttagttgcaatggcagcagataaaagtgacg

SEQ ID NO: 537718 - DNA, 101 bp, Homo sapiens
cggtaacaccctttgtcgtagagtttggaggatgcaatgagagctccagagattatattggggttgccattttgtgaagccatagacatgtggtcattggg

SEQ ID NO: 537719 - DNA, 118 bp, Homo sapiens
tttctctgctgcaccgacctcgacgtcttgcctgtgtcccacttgttcgcggcctataggactggagactgatgcatgagggggctacggaggcgcaggagcggtggtgatggtctgg

SEQ ID NO: 537720 - DNA, 98 bp, Homo sapiens
aacaggaagatgaatgccagcgagcgggagctggcagcctgccagctgctcatctcccaggagtctccccaggacagtgctatcacccgggatattaa

SEQ ID NO: 537721 - DNA, 51 bp, Homo sapiens
ctcaacttggttattgtaaaaaaagagcctgtcatagggaactgcatggat

SEQ ID NO: 537722 - DNA, 100 bp, Homo sapiens
ccagcaattccattccaagccagtagattctgacagcgatgatgatcccttggaggcattcatggctgaagtggaggaagctgccacttttgctagagag

SEQ ID NO: 537723 - DNA, 151 bp, Homo sapiens
agaacatttacttaacacatcatgaaggctagtttggatgtggaggggaatagactccatctatccatatgagaattttgattcagctaaagttccatcagatgagtattgccctgcttgtagagagaagggaaagttaaaagccttaaag

SEQ ID NO: 537724 - DNA, 95 bp, Homo sapiens
aaaaggcctaagaattttggcattgctgccactgcagagccccgccatggaagacacgccgttggtgatatcgaagcagaagacggaggtggtgt

SEQ ID NO: 537725 - DNA, 89 bp, Homo sapiens
ggcgtttagagaaaatggcagacgatattgatattgaagcaatgcttgaggctccttacaagaagaatataggcccaaagcagcatcct

SEQ ID NO: 537726 - DNA, 74 bp, Homo sapiens
ccgacatcaagagctgcgagatccaacagtttttccagaggcctcaaatacagcctcctagagctaccatcccg

SEQ ID NO: 537727 - DNA, 97 bp, Homo sapiens
ccctcagagagaacagagagggtgataaggaagaagaccatgctgggaccttccagttgacatcacttgttagaagagcaactctgaaagaaaacga

SEQ ID NO: 537728 - DNA, 100 bp, Homo sapiens
tgaacaggttaatctgttggattctaatgcagttcatcacatcattcatgattttcagccgattccacgactcttctttgcgggagaacatacgatccgt

SEQ ID NO: 537729 - DNA, 82 bp, Homo sapiens
cagagactgaggacttaaatgaagccactgattagcaatttaaagatcctctccaagccaaatgggcggactgttgaagtgg

SEQ ID NO: 537730 - DNA, 100 bp, Homo sapiens
ttcggctgcagagttttgcccacgcttcgagacttagggagcagttatttatcagagagtctgatgctgaaagagaacagaacttgcctgtcacagttac

SEQ ID NO: 537731 - DNA, 83 bp, Homo sapiens
aacagggactgagctgtaaccgaatgggtaccacagaccatgtcatcgtcctggcgtccacgaaccgagctgacattttggac

SEQ ID NO: 537732 - DNA, 90 bp, Homo sapiens
tgatttctgcagctctgtgtgaaggtaaattcaactggaagggaactattaaagcaattctgaaacaggccccagacaatgaaataacca

SEQ ID NO: 537733 - DNA, 75 bp, Homo sapiens
gctgggctcgctgctgcggacgttcaagcagaggaaaggccatgtgaggacacagtgagaaggtggccgtctgca

SEQ ID NO: 537734 - DNA, 82 bp, Homo sapiens
catactcggataccagcgctcagcccacctgtgattatggtgaggctttccccgtctcggagcaccaccagcactcagacct

SEQ ID NO: 537735 - DNA, 100 bp, Homo sapiens
tcgcttcaccgagtgaccttgagcccagggcgacggtcagcttgttaattcctggctgcaggcttctcgtcagtgcctcgcaggatggtaaacttatcat

SEQ ID NO: 537736 - DNA, 82 bp, Homo sapiens
aacagagcaacccccggcagatcaagcgtctcggcgcggaagatggccggcggcgtggacggccccatcgggatcccgttcc

SEQ ID NO: 537737 - DNA, 75 bp, Homo sapiens
cgccagcctgcccgcctgctcgccggcgcccggagcccgctctggccggtttgatttcctctgcatgcctgtctt

SEQ ID NO: 537738 - DNA, 99 bp, Homo sapiens
tgcgtgatctaaaagctgttgggaaaaaattcatgcatgttttgtacccaaggaaaagtaatactcttttgagagattacggagtcttgctctgtcacc

SEQ ID NO: 537739 - DNA, 87 bp, Homo sapiens
cgccgtgagcgcccggagcggtccgcgagccaccgaggcccagatcaacaggcggtccttcgggtcggagtggacatcggatggtgg

SEQ ID NO: 537740 - DNA, 75 bp, Homo sapiens
ctgaaattcagagaggggaagtgatttgcctcagcttgtactaaatgaaagctcattagcatctacactgaagac

SEQ ID NO: 537741 - DNA, 101 bp, Homo sapiens
gctagctaaagaagttgatcctcaagataagtgccatagagttcatttccatttgccgtatcgatggcaattcttggatagaggcaaatgggaggatttgg

SEQ ID NO: 537742 - DNA, 73 bp, Homo sapiens
aagttcaaggatttctctttgggaaactaaagaactctaatgaatcattgattgaccagcactattttaccag

SEQ ID NO: 537743 - DNA, 83 bp, Homo sapiens
tgttgaaagaggaagatgttcactgaacagcagagaatttcaaaggaccttgctaatatctgtaagacggcagctacagcagg

SEQ ID NO: 537744 - DNA, 100 bp, Homo sapiens
cctggaggacggctgggacagcgagcccttcaccctggtggagcgagacggtcgtgttatcgctcccaagaaggcgcgcgtcgtgcagcagcaaaagctc

SEQ ID NO: 537745 - DNA, 97 bp, Homo sapiens
tcacttctgaggacaaggagccaaaggagcagcttcagaaggccatcagggaccgcgacgaggccattgcaaagttgataacactgatgctgagggg

SEQ ID NO: 537746 - DNA, 98 bp, Homo sapiens
atttgaagaacgggtaacagtggcctttatacgaacaatccagtgctcatcttcaaactctatcagcgggcaaagcatgtgtacagcgaggctgcgcg

SEQ ID NO: 537747 - DNA, 75 bp, Homo sapiens
tgatgtgatgctggagaccttgacacttatatcctccctggaatccacactggtgatagaccatacaaatgtgca

SEQ ID NO: 537748 - DNA, 75 bp, Homo sapiens
ggaaatgtgaatctcaggagagagcagccagagtgtcttatcgggacctcaaagaagtaactcctgaagggctcc

SEQ ID NO: 537749 - DNA, 107 bp, Homo sapiens
aaggaacgaggcaaggagctaaagcagcgtgcgttcagccctggggtggaagttaaacgagctgagcctcgggacagcaagagccaagcgccgggacagccaggtgc

SEQ ID NO: 537750 - DNA, 82 bp, Homo sapiens
ctccatctgaagagggctccaggcatccggtcctggtccctgctggttggctttatcctgtggataaacgcagagtgaacga

SEQ ID NO: 537751 - DNA, 75 bp, Homo sapiens
acttcttttttgagaaaggaaggaatatatcctgactgattagatgtggtactggatcttcctctgggctctctt

SEQ ID NO: 537752 - DNA, 100 bp, Homo sapiens
tgacttagtccgaacaattggaggagacctggtggaaaaggttgatctcatagacaagtttgtacatccaaaatcttggagaaattcattcaaggctttt

SEQ ID NO: 537753 - DNA, 50 bp, Homo sapiens
gaaacttattcacagttaccaaagctggatgcaaagtattgttcctgggt

SEQ ID NO: 537754 - DNA, 97 bp, Homo sapiens
ttcaggagactagacctcgtaattacattctctcggccagcgcctccgcggcccacgaggactcggagaagctgcgggagatcgtactgcccatgga

SEQ ID NO: 537755 - DNA, 88 bp, Homo sapiens
gaggacatctgggctgcgtgctgtgttgtcacaaagccaggaggaagaagaggaggatgaggaggctgcctcaaggtactatgttccc

SEQ ID NO: 537756 - DNA, 75 bp, Homo sapiens
gccctggcggagaagactcgaacggctcccacagccgggcgttgggggaaagtctattatcctcccagtccacaa

SEQ ID NO: 537757 - DNA, 74 bp, Homo sapiens
tccgagaaattataggtgatgaactagtccagagcatgctgtcaaggtcctttaattccaattttactactgta

SEQ ID NO: 537758 - DNA, 100 bp, Homo sapiens
ctgaactcaagtcaccgtggagctccgccgccccgaaactttcaccgcgagcggcctcaaggaataggttctcctagtgtctatcatgcagttatcgtca

SEQ ID NO: 537759 - DNA, 98 bp, Homo sapiens
cgacctgcagcaaataattgtcagtctaacagaatcctgtcggagttgtagccatgccctaggcacgcacagaggctgggctgcggtccagatgcgtt

SEQ ID NO: 537760 - DNA, 96 bp, Homo sapiens
atttgcatatggacaaacatcctctgggaagacacacacaatggaggtacggttcctggagcagcagaacaagatgctggagaccaagtggagcct

SEQ ID NO: 537761 - DNA, 98 bp, Homo sapiens
ccactctgttccctcctcaggaagtccttttattaccaggagtgtgtgccatatttaattgctatgggcacagacccagaacctgctatgcggaacaa

SEQ ID NO: 537762 - DNA, 75 bp, Homo sapiens
ccaggttatctctcaggctgctgtggttcatgccacagccaaaggagcagcatttctttctattactactatcta

SEQ ID NO: 537763 - DNA, 82 bp, Homo sapiens
caaaattgagaccactcatccaccgttgcctccagcccacccacctccagtggtttgctaagaaggccattttcaactctcc

SEQ ID NO: 537764 - DNA, 101 bp, Homo sapiens
cagtcaaccagttagatagtgaccactgggcacccattcattatgcatgctgcttcgatgtttttgaagcaggcatttgaaggagaataccctaaattatt

SEQ ID NO: 537765 - DNA, 98 bp, Homo sapiens
ctgaggaggggccccagcagcccccgaaggccctatcaggacatggagtatgaaagacgccgcggcccatggagcccgccggcccggcccccggccgc

SEQ ID NO: 537766 - DNA, 75 bp, Homo sapiens
gtgacgctgctgctggggtcagaatagacggttcatcaatgacatggtgaagatttattctatcacagccactaa

SEQ ID NO: 537767 - DNA, 75 bp, Homo sapiens
cctggtcttgctcggccgatgaagtgcagaggtttttttctggaaaacagctcaggcatgtttgctgcagaagag

SEQ ID NO: 537768 - DNA, 90 bp, Homo sapiens
gagacccggtagtaccgcccatgctgcagcgggaaagagaacagagagtcctggggacaggtctcctctgagcctccggcctccataaga

SEQ ID NO: 537769 - DNA, 75 bp, Homo sapiens
gccactgtggatgttgaccccaagtctccccagtattgccagatcttcgagtacttccgcagagacacagagaag

SEQ ID NO: 537770 - DNA, 99 bp, Homo sapiens
gatttttcatcttgtgaaagcagtccttgttcctatggcctaatgaacaacttccaggtcattgagactgcctcttctcaaagggacactgtcctcagc

SEQ ID NO: 537771 - DNA, 83 bp, Homo sapiens
ggtgaaatggagaggctggtcgcccaagtgcgcgcggagccatggttatcatgtcggagttcagcgcggaccccgcgggccag

SEQ ID NO: 537772 - DNA, 96 bp, Homo sapiens
ctggaaggtggcggtggtgaaggtgcaggccgttggggcggctcagaggcaggtcctcagaatggttggaatgaccctccagctttgaacagagta

SEQ ID NO: 537773 - DNA, 50 bp, Homo sapiens
ggggcccagttacccccagactggaagagacagggtcttgctctgttgcc

SEQ ID NO: 537774 - DNA, 75 bp, Homo sapiens
ctgacgcagtcgcccatccactgattctggaggtcagctgcaatttggaacctcacctgaggggcaatgtatatg

SEQ ID NO: 537775 - DNA, 83 bp, Homo sapiens
cgcggacctgcggactagcgaacccggaggaactgtggctgcaccatctgtcttcatcttcccgccatctgatgagcagttga

SEQ ID NO: 537776 - DNA, 100 bp, Homo sapiens
cctgactcatttgttgcattgtcaacatgccacggacttcagttgacatcatggacatatgtgagtccatcctggagaggaagcggcatgacagcgaaag

SEQ ID NO: 537777 - DNA, 90 bp, Homo sapiens
gacgatgaaaaagacacaagtgagagagacaatagtgaaggcaaaaactctaataaagactctgatggttaccataagcgaacagacagg

SEQ ID NO: 537778 - DNA, 96 bp, Homo sapiens
cccctgggcatcaccaacatagccatcgacttcggggagcaggaaatttacatgccacttatgtgatagaagtttcacagagaagtgggccctgaa

SEQ ID NO: 537779 - DNA, 75 bp, Homo sapiens
cacaacaacacattttgcagaggtaaacgctgcatttctacaacagccacctgtgcaggccctgcatgctctgta

SEQ ID NO: 537780 - DNA, 100 bp, Homo sapiens
agagctactactgccgctgccaccgtggctacactctggaccccaatggcaaaacctgcagccatcgagaacggctactttgtacactactttgcccccg

SEQ ID NO: 537781 - DNA, 51 bp, Homo sapiens
ggcagaatacagagatatggaatcaggtacagagccagatggactccttcg

SEQ ID NO: 537782 - DNA, 83 bp, Homo sapiens
aaaccatcaaaagagatccattggcacaggaggactcctgccctaagagccatagggaatatcgtcactggtacagatgaaca

SEQ ID NO: 537783 - DNA, 100 bp, Homo sapiens
gagatcctgatgaagttcgagcactaatatttaagaaagaagatgttaactttcagtgatatcagtatcaagataaaagtttggaatgggagaaaaattc

SEQ ID NO: 537784 - DNA, 75 bp, Homo sapiens
ctccactccgtcccccgcgggtctgctctgtgtgccatggacggcttttcctccgcaaccatgtctgacaaaccc

SEQ ID NO: 537785 - DNA, 82 bp, Homo sapiens
tttctccccaaaataaccattctccagatccaggtgacttaagagattaaaattaatttggttgctgttggttctgaacaaa

SEQ ID NO: 537786 - DNA, 74 bp, Homo sapiens
tgcctcagcctcccgggtagctgggactacaggatcaaaccagaagatgccatggactttggcatctcccttct

SEQ ID NO: 537787 - DNA, 75 bp, Homo sapiens
gctggttccaggacaacatcaatgtcttccacattaggcagcagcagcggaaccgcttaggcagtgggggaagcg

SEQ ID NO: 537788 - DNA, 95 bp, Homo sapiens
cggtgattgcagccccagacagccggcgctggctgtggtcggtgctggcggcggcgcttgggctctgacttgcaattgtgaccaaatatattaca

SEQ ID NO: 537789 - DNA, 101 bp, Homo sapiens
aaagcagctaccaaatgcttattttctgcttccaaaggtccagagcattcagctgtctcaaatgcaggcgcagcagcttactgatctggaacaaaaattag

SEQ ID NO: 537790 - DNA, 87 bp, Homo sapiens
tactccaggaagcacagagctgtaccagtacacggcccacgttgccagttttactttgaactcagaaggctgtaatagaagaccagg

SEQ ID NO: 537791 - DNA, 80 bp, Homo sapiens
gcccgccacgccgcccagcccggccccgcccgcgccggaagagccacgccgtgagacggtttaagcggaagcatcttact

SEQ ID NO: 537792 - DNA, 126 bp, Homo sapiens
ctaaatcacacttatccctcaatcaagtcagtgactggatcatctcctaaggtttcacctgctttgcatcagattcgaaatcagagcaaagcctctgggtctgggctctgtgagggagatgaagtg

SEQ ID NO: 537793 - DNA, 82 bp, Homo sapiens
cgggagcagccagcccgtgggcgagccgcccgcccgccgagcagccatgaggttagctttatacgtctacgaatatttactg

SEQ ID NO: 537794 - DNA, 100 bp, Homo sapiens
tgtctttctccgcggcgaaggtgaagagttgtcccagctcggcccgcgggggagccccgggagccgcacgttattttaccaagaaaatggtttgcacgac

SEQ ID NO: 537795 - DNA, 100 bp, Homo sapiens
ggcggcgcgggcccggcggcggcggcagcggggtccgggtccggagcgccacagagaggccccctttcatccctgaaggagtggtggctcgcaggaagag

SEQ ID NO: 537796 - DNA, 90 bp, Homo sapiens
gtctcttacgtctgcggaagtgcagctgcctcagttcttagcgcagggcagctgcaatgactctccgcacggtattattgtcattgcaag

SEQ ID NO: 537797 - DNA, 98 bp, Homo sapiens
catggagttcacagaagagtcgaggagggagctctgttgttgagcgagaagacgtaccagcccatttggtgaaagacattcgtaactattttcaagtg

SEQ ID NO: 537798 - DNA, 130 bp, Homo sapiens
actcccagagtttattcctcgttccttcttcagtcctgctcgtcggaggacccggttgccatggtgaaggaaaaagcttagaccatgctcagcctccaagcagccttgtcatcgacaaagaatctgaagt

SEQ ID NO: 537799 - DNA, 50 bp, Homo sapiens
taaaaatcaccagttactttaatgaccatgtcaaaatctgccgtgaagat

SEQ ID NO: 537800 - DNA, 100 bp, Homo sapiens
ctttggcaagacattatgattccttccttattgatttcaagatgcagcagcttttttatgagaattacgagcagaacaaaaaggggtacattagagatct

SEQ ID NO: 537801 - DNA, 100 bp, Homo sapiens
aactacctgccacccatccaacaactcccctcggacctcagtatgggctggaacctgacacttggcatgacagtggattaaagcaaggagagccaatcat

SEQ ID NO: 537802 - DNA, 82 bp, Homo sapiens
aacagattcctacacatgactatcagaaggtaattgacctgctgactgtgggcgagtctcggcagatggtagctgtggcaga

SEQ ID NO: 537803 - DNA, 100 bp, Homo sapiens
cagtcccgcgtactgagccagaagatttggagcaagaggtggtggtggccttcccccgaagaaatttggtaatcctggggagcgtttgcgtaaaaaaaag

SEQ ID NO: 537804 - DNA, 100 bp, Homo sapiens
ggatcccagccttttgaaggacttgaaaagtttgctgaaaccattgaaacaggtgaacctatgggtcgtggaacaaaagttatcctacacctgaaagaag

SEQ ID NO: 537805 - DNA, 51 bp, Homo sapiens
cttatccagatccccgaggaattaccaaggcttccgggtccagctggaatc

SEQ ID NO: 537806 - DNA, 98 bp, Homo sapiens
tcccccggcagggcggagaggagcggccggagtcagcgatggtgcccggcgaggagaaccaactggtcccgaaagagactccaagaactttcccctca

SEQ ID NO: 537807 - DNA, 100 bp, Homo sapiens
attattttgcaagccagatgagtaaccagagggcatgaaaggtgcgggagtatgagttaagaaaaaacaacttctcagatactggaaactttggttttgg

SEQ ID NO: 537808 - DNA, 75 bp, Homo sapiens
agttcagaagagccaaggaataaacatgcaatgaacccaaaagggtcaccatggagtaacaagtatgaccctccc

SEQ ID NO: 537809 - DNA, 89 bp, Homo sapiens
cgtttgagtgtgctcagatatcgtccatctcaggttttgcgcacagctgcttccagtatgccatccagaagaaatggccgctgtacatg

SEQ ID NO: 537810 - DNA, 82 bp, Homo sapiens
cttggtttcgggatctcggtgctgcagacggcgagacctcctgcacagccgagccgctgccgctcatggatttgtgccgtcg

SEQ ID NO: 537811 - DNA, 75 bp, Homo sapiens
cgagcacgagctgtgaggggattcacttgtgtgcggaactcctcggaaccatggaaccaacacctatacagcgtc

SEQ ID NO: 537812 - DNA, 75 bp, Homo sapiens
ggcaggaccagcgggcgggggcccacgaatcacccggaagttcaggctgaattctgaaggcaaacttgagcagac

SEQ ID NO: 537813 - DNA, 82 bp, Homo sapiens
ctgctggcgctctggctgtgctgcgcgacccccgcgcatggttgatgataattagaagcatgctttccactgaacttcccga

SEQ ID NO: 537814 - DNA, 83 bp, Homo sapiens
gatggatgcttaaagattattgatattggctccaataattgtggatactatgacttacaagcagtactaacacaccagggaag

SEQ ID NO: 537815 - DNA, 75 bp, Homo sapiens
gccatggagagcggcccgcgtgcggagctgggggcgggcgcacccccagtttgaaggatgacctctaggaagaaa

SEQ ID NO: 537816 - DNA, 100 bp, Homo sapiens
cgggtccagacccacgcggcgccagttctccggcgggaaggaaaaccgcgcagagagcactgtgacttctgccgtgttcaccgtgggagacaacgtggtt

SEQ ID NO: 537817 - DNA, 90 bp, Homo sapiens
cctgatgcgagtggccaatgaggagtcagagcacaatcaaggtgccgacgccaccgccgagcccatgatcctggaacagtacgtggtggt

SEQ ID NO: 537818 - DNA, 80 bp, Homo sapiens
gcggaaaccgaaggggagccatggcggctgacagtcgggaggagaaaggatccatgttctcacaagctatgaagaaatgg

SEQ ID NO: 537819 - DNA, 83 bp, Homo sapiens
ttcctgccattgtccacatcaatcatcagccattcctagagagaggcgatgggcctattgtgagatcggactggaactgttcg

SEQ ID NO: 537820 - DNA, 74 bp, Homo sapiens
cctaagcggagcagcctcaagagccgagccgagggaaggtctgtttctctaacaactttttatcgaacagcgag

SEQ ID NO: 537821 - DNA, 90 bp, Homo sapiens
gcgtccgaagtatgagtccactaacaaaagtccagaaactcgccagttaatagtattgtgtgaatatcacctctgccaggcaattaaccg

SEQ ID NO: 537822 - DNA, 73 bp, Homo sapiens
gaaaatggtgtgcacaggagccaagaggtcttgtggatgagcagcagaaagttcggaccatcagtgctttggc

SEQ ID NO: 537823 - DNA, 82 bp, Homo sapiens
agagataaaaataccagaaacatacccatttaatccccctaaggcctatggcatgtctgcgttacctttaaatctgataaaa

SEQ ID NO: 537824 - DNA, 100 bp, Homo sapiens
tgagagaaatcaatgacgtgtttgaaggaagacgaggtgcaacattagaggaaatcaatcagcactgggactggctggaacaaaatctcctccacacctt

SEQ ID NO: 537825 - DNA, 95 bp, Homo sapiens
caatgaggagaaattgaacctgtgccggaagtactacctggggggatgagtctttcctgggcacttatctaacaggaggagaaggagcatatctt

SEQ ID NO: 537826 - DNA, 100 bp, Homo sapiens
gctatggatgatcgagaggatctggtgtaccaggcgaagctggccgagcaggctgagcgatacgacgggaatgaaagctactggttgattttaaagtgcc

SEQ ID NO: 537827 - DNA, 75 bp, Homo sapiens
tttcgtggttcacccgctgccgggcaccgaggaccagctcaatgacagatgaaggatttgggggcagagcacttg

SEQ ID NO: 537828 - DNA, 100 bp, Homo sapiens
tgaccacgtattccatcacgtaaaccttgtggagatagattattttgggctacgttactgtgacagaagccatcagacgacttgggatgtagctttatca

SEQ ID NO: 537829 - DNA, 100 bp, Homo sapiens
caaggaaacctttccaacacagatgtccaagctgccaattttaatcgcttggatctaccaccatataagagttatgaacaactaaaggaaaaacttcttt

SEQ ID NO: 537830 - DNA, 100 bp, Homo sapiens
ccatgaacggatggatgtgatgcctgctagccaaaagggtgattttcttccacccccacctccacctctagatgattccagtgcccttccatctatctct

SEQ ID NO: 537831 - DNA, 75 bp, Homo sapiens
gcccgtcacccacctcatctttgacatggacggacttcttctggggctggttgatatgtgaagagccaacctgtc

SEQ ID NO: 537832 - DNA, 82 bp, Homo sapiens
ctggcttgtatggaagagttccagaagatgcatcaaattgcaatttggaggagaggcagcacaagcagaagcctgggcctgg

SEQ ID NO: 537833 - DNA, 75 bp, Homo sapiens
ctcagggccatctcagctataaacacaagaacttctggaggtttatattccggaagaacctgccctccactgccc

SEQ ID NO: 537834 - DNA, 100 bp, Homo sapiens
ggaacatgtacacctcatccctgtacgggtgcctggcctcgcttctgtcccatgacctagagtcccgcagggatgtgaagagagaagaaggagaggcctt

SEQ ID NO: 537835 - DNA, 75 bp, Homo sapiens
ccacagtgggggtgtgcaaacccgagagaactggatcgtcagtatttaaacagatcacatcatgcgtgagtacaa

SEQ ID NO: 537836 - DNA, 97 bp, Homo sapiens
cggggacgttgagtccccacagacctggaaattgcggcccctctttctcaacccagagcaaattgagacgtccgggaaacaattgaagatgttgaag

SEQ ID NO: 537837 - DNA, 150 bp, Homo sapiens
acagccaggcgggacgcgcacagtccctccacgcggaaagaagtaccttcgccggtcaccggctcctgcaggagctacagagacttctgaagtggagagtctgcgacctcctcggttcttcaatgaagatggagttatcagaccgtacag

SEQ ID NO: 537838 - DNA, 101 bp, Homo sapiens
tctcaatatctgtcttcggtggactccttcggcagtccacccaccgccgccgcctcccaggaagctcttcgtgggcggtcttgactggagcacgacccaag

SEQ ID NO: 537839 - DNA, 74 bp, Homo sapiens
gacccacactggcttttaaggaggacacccggacacctggaagctgggaaatgaggtcaggttcttgaaggttt

SEQ ID NO: 537840 - DNA, 82 bp, Homo sapiens
ttgaagcatttgttattgacgttggcagatgcactacctgaacactcccctgccaaaacctctgctgtgagcaatacaaaac

SEQ ID NO: 537841 - DNA, 75 bp, Homo sapiens
caggcaacatctacaggcaactggtgtatctctcctaaatgtgtgatcaaggaattaccaccaacagagaacagt

SEQ ID NO: 537842 - DNA, 124 bp, Homo sapiens
gccatgtcgggttattcgagtgaccgagaccgcggccgggaccgagggccaccagcttgggctccccacggagggcagcaagtgggacttggggaacccggctgtcaacctgtccacggtggca

SEQ ID NO: 537843 - DNA, 75 bp, Homo sapiens
ggaataccggctctcagcggctggatttggacatttggtgccatcttcagaagatccaggagtcctgggaatcgt

SEQ ID NO: 537844 - DNA, 75 bp, Homo sapiens
ggggagcgtccggagctagctggatcctctaggcagatgtacattgaagatgtcagtttctacatgtgggaagta

SEQ ID NO: 537845 - DNA, 82 bp, Homo sapiens
ttttctctggacttccccagaagaagattgtggttgaattcaggcagaagctcctcctggggtagagacagatcttattgat

SEQ ID NO: 537846 - DNA, 100 bp, Homo sapiens
atcctctggttccggggcctgaaccgtatccagactcagctcattgctatggacagtgctatcaccctgtggcagttccttcttcagctcctgcagaagc

SEQ ID NO: 537847 - DNA, 75 bp, Homo sapiens
tcctgggccacccctcctttcaggtcaagaaaaatggctacaaacttcctagcacatgagaagatctggttcgac

SEQ ID NO: 537848 - DNA, 100 bp, Homo sapiens
cctcgggggcggcggccacgccaaggacgggaactgtggctgcaccatctgtcttcatcttcccgccatctgatgagcagttgaaatctggaactgcctc

SEQ ID NO: 537849 - DNA, 130 bp, Homo sapiens
aggaaaatttttgtacatttccgaaacagtctccatctacctaggcctctcacaaatctgcaactatgtgggaccagcaaaggttattgttcagttggtcacaaatggaaaaaatatccacctgcatgcc

SEQ ID NO: 537850 - DNA, 82 bp, Homo sapiens
cttcaacagcagcaagcatttccacctctatggcagcaacgcctccctggcccagatctggaaggtagaaaagggaccagat

SEQ ID NO: 537851 - DNA, 80 bp, Homo sapiens
gatttgctcttacgtatttgtgtgacttgactcttcaaacacaaaggtgtgatgaatgcagactctgctaccattttggc

SEQ ID NO: 537852 - DNA, 100 bp, Homo sapiens
ctcacacatacgcttgcagctttgaggcaggagagggtagttgtgcttccctaggcatctgaatttcatttgaaaatgaaatgggctgcacagtctggag

SEQ ID NO: 537853 - DNA, 100 bp, Homo sapiens
tccggagccatgtcagaaggagtggacttgattgatatatatgctgacgaggagttcaaccagtcccttaagctcctaggatttttagatgttgaaaata

SEQ ID NO: 537854 - DNA, 90 bp, Homo sapiens
gctttggcatggtcaagatagacctgaaaaccaagtcttgtagtggagtgggctacttctacaagtccgaacagccagtccagcaaaatg

SEQ ID NO: 537855 - DNA, 50 bp, Homo sapiens
ggagtggccgttatggaacgcagggcaccatgccggtggaaaggatgcgc

SEQ ID NO: 537856 - DNA, 95 bp, Homo sapiens
gccagagttgtgggccgccgtcggcagcaagaacagagagagaggtggacagatctgagagatactgaggcagcatgatcccagtggccgagttc

SEQ ID NO: 537857 - DNA, 98 bp, Homo sapiens
acttccggcagagccggaagaccctctctttcgctgtttgagagtctctcggctcaaggaccgggagttgctgccaaacaaggtgaatccgacccaga

SEQ ID NO: 537858 - DNA, 100 bp, Homo sapiens
tatattttttgggggtggatttccttcagaagcccccaatgcatccaacttgaaaattgtaagaatggacaggacagctggatgtgtgactggaggggag

SEQ ID NO: 537859 - DNA, 100 bp, Homo sapiens
gaggggggagcggcgttggaggccaccgtttccaggccaaacgtaccaagaaagtcgggatcgtcggtaaatacgggacccgctatggggcctccctccg

SEQ ID NO: 537860 - DNA, 85 bp, Homo sapiens
cggtggcggggctgaagaagcagttctacaaggcgagccaggacaggcgacactaacaggtgaagatctcgggagaccatgacta

SEQ ID NO: 537861 - DNA, 75 bp, Homo sapiens
gtaaggatttcaacatgcctctgacaatctctagttgccagaacagataaagcccagtgtaagccagcctcagcc

SEQ ID NO: 537862 - DNA, 75 bp, Homo sapiens
cccaccctgcgccagagaccagataaacttggtgatccagctatttttcctgccgtaattgtggaacatgttcct

SEQ ID NO: 537863 - DNA, 74 bp, Homo sapiens
aaaggagaagaaggaagttgtggaagaggcagaaggccacaagctgtacaaggacctgaagaacttccttagtg

SEQ ID NO: 537864 - DNA, 75 bp, Homo sapiens
gagtgaccgagaccgcggccgggaccgaggagaactcggtggcggccaaatcgggaggctgcttcccgggctcgg

SEQ ID NO: 537865 - DNA, 74 bp, Homo sapiens
catttgagcatgacatccaggctctgggcacacaggtggtccattatggctgacatgcaaaatctggtagaaag

SEQ ID NO: 537866 - DNA, 100 bp, Homo sapiens
ggtaaatatgtaaagttacaaatatgggatacagcaggacaagaacgattcagttcctgagggaagacctcaattaccatgacccaacagtgaaacacag

SEQ ID NO: 537867 - DNA, 101 bp, Homo sapiens
ccgcgccgggccctgtcgcgaacctccggcgcgctgccccgccggaccgtgagctccaaacgagaatggaagccgctggaggaccgtagctgcacagacat

SEQ ID NO: 537868 - DNA, 50 bp, Homo sapiens
gccactcagagtcgcccgagaagcctacaggatgatgaggatctacaggc

SEQ ID NO: 537869 - DNA, 83 bp, Homo sapiens
gtccaactcagaggacgaggcctccttcaagtccgaggatgaatttttagatgtgatctactggttccgacagatcattgctg

SEQ ID NO: 537870 - DNA, 80 bp, Homo sapiens
gtccccaccactgcagccatgatctccttaacggacacgcagaaaatacaaacctggtcgatgtgatgatattttgaaat

SEQ ID NO: 537871 - DNA, 90 bp, Homo sapiens
ccttccggtcgctggtgcagcttcacctggccgggctgcgtcgcttcgatgccgcgcaggagaactgcgctatcctcaaggagctggtga

SEQ ID NO: 537872 - DNA, 76 bp, Homo sapiens
cggtttctcactgtgatgatgaagcatggtattggttgctctggcatctgaagaacttgccaaaggctggacccag

SEQ ID NO: 537873 - DNA, 51 bp, Homo sapiens
tctcaaatgccttctcatccccacatagtgatagaaattgaagatgcttca

SEQ ID NO: 537874 - DNA, 74 bp, Homo sapiens
aagcacctagtacctcctaccattgtcaactggtgcgagaagatgtactaaattcattgaataacaactttctt

SEQ ID NO: 537875 - DNA, 74 bp, Homo sapiens
ccgcaccgcaccctccacctcaggtgagactgtggagatgagaaggtggtggacactcgtgatggaatggaaat

SEQ ID NO: 537876 - DNA, 74 bp, Homo sapiens
atggacgctgacatcaatgtcacaaaagcggatgttgaaaagtgtgatgccattagtgtattggagaaagaaca

SEQ ID NO: 537877 - DNA, 100 bp, Homo sapiens
tgggagccctgatgatgtggaagggttttacagattcctgtggcaaattctaccaagcaacgataaaacagctagactttgtgaatgatacagagaagtc

SEQ ID NO: 537878 - DNA, 82 bp, Homo sapiens
gcctagtgcgccagggcctcaagtgcgatgattctgaaaaagagttccacgtcctcccttatcgagtctttgttccccttcc

SEQ ID NO: 537879 - DNA, 90 bp, Homo sapiens
gaaaaattcaagaagttgaaaaacgcttttcacgtcacctggagagatgcacaggttgtcggggccaaagtggtaacgaacgcccgcagc

SEQ ID NO: 537880 - DNA, 74 bp, Homo sapiens
gagaggcggcggcggcctcggctgaagaaagaagggttatgtggtccgaatcagtggtgggaacgacaaacaag

SEQ ID NO: 537881 - DNA, 89 bp, Homo sapiens
tcctgctcagtgtagcattaagaaaccaggcgatgcggaagaagctaatcttgtacttcaagaggaggaatcacgctcggaaacaatgg

SEQ ID NO: 537882 - DNA, 50 bp, Homo sapiens
ccagaattcatacaaagagtttcgaagcattcagcaaacaatggcaaggc

SEQ ID NO: 537883 - DNA, 90 bp, Homo sapiens
tcaacaacggatgaaaatgaagacgacattcagtttgtcagtgaagcccagaacctcatggccctcaccaatgtggacaccccattgaaa

SEQ ID NO: 537884 - DNA, 75 bp, Homo sapiens
tgggacctttgactgtttccggaagactctttttagagaggaagttctccagcagctgattgtaatgaatttgcc

SEQ ID NO: 537885 - DNA, 117 bp, Homo sapiens
gcagtctcttctgtggtgaacaactcgcgaaacaacactcctgagtgtctggctcctgtcgacttggtggtcaaaaaggacacctgctccacttcaccttttgccatgagtaaaagc

SEQ ID NO: 537886 - DNA, 83 bp, Homo sapiens
ctgcagaagagtgcagtgaggtgcctcagcatgagaaaattacagaatgtctgaaggggacagtgtgggagaatccgtccatg

SEQ ID NO: 537887 - DNA, 51 bp, Homo sapiens
aatgcttctgatacagttgaaagttcgtcaacaggcagagctcgccctgca

SEQ ID NO: 537888 - DNA, 103 bp, Homo sapiens
tcctgcctcagcctcccaagtagctgggattacagcatttgccatctatcaatcgctgccttattttgaatcatttggcacttattccaccaagctgcccttt

SEQ ID NO: 537889 - DNA, 100 bp, Homo sapiens
gggctgcatgggctctatcaaggaaaacaagtgtctgcttatgtcgcgacttgtttaagtatcactgcaatgctgacactgggaaattgctatttctgac

SEQ ID NO: 537890 - DNA, 75 bp, Homo sapiens
caggcgtgcgcggacggtgtgcggattgcccgtgaggcagaggctgccatctaccacttgcaattatttgaggaa

SEQ ID NO: 537891 - DNA, 98 bp, Homo sapiens
ggctaataatgctggcaaagtggaaaaatgtgcgaatcatgtcaaccctgccatggacttcacgcagactccacctgggatgttggctctggacaaca

SEQ ID NO: 537892 - DNA, 74 bp, Homo sapiens
cttcagatcactattcagaagaagtttttaaagacaattgttgcaaaagagaagtcctcaacttatatgtatat

SEQ ID NO: 537893 - DNA, 90 bp, Homo sapiens
cttcttgacatacatggagaatttcaggagactccagttggacatgatgcagtttccaaaactgatctgccgacaccccaggccatcgag

SEQ ID NO: 537894 - DNA, 85 bp, Homo sapiens
tggaccccagcgcccccagggacctcatcgacacctacctgctccacatggaaaaagagaaatccaacgcacacagtgaattcag

SEQ ID NO: 537895 - DNA, 98 bp, Homo sapiens
ttaactacgtggaaacatctgctaaaacacgagctaatgttgacaaggtatcattggaacatttcaagatcatcaaatcaaattccacagggattggt

SEQ ID NO: 537896 - DNA, 150 bp, Homo sapiens
agagaacattcaacgaccaaccagcctccccctgaagattctgccgctgattgctatcacttctgcagaatccagtgggcaccgaccgtcacgagctaacttcctggaagagctttccgtctattttcaaattctttaccgaagcctcag

SEQ ID NO: 537897 - DNA, 100 bp, Homo sapiens
tgtcaatgtctatggtgttgtgaagttctttaagcccccatatctaagcaaaggaactgaaatgcactcggtgatggaaagagagccactattctgaaga

SEQ ID NO: 537898 - DNA, 96 bp, Homo sapiens
gttaaggattccaagtaactcttatttgggaggaataagtttttttcatctgtaatttggaagccaagtcagtaacaaaatgaaaccagtaaagca

SEQ ID NO: 537899 - DNA, 100 bp, Homo sapiens
ccagcgagcgtcattgttgtctttctgggaactcattcccatgaggatacagacgtccctcaccagtgccagcttggggtctgcagatgagaactccgtg

SEQ ID NO: 537900 - DNA, 49 bp, Homo sapiens
aatcattctcaccttgtatgctttacgtcaaaatgcagatcttcgtgaa

SEQ ID NO: 537901 - DNA, 90 bp, Homo sapiens
tcacccgagggtcggctctaccaagtagggtcaacatatttcactggcacctattcacaagcttgaagaagctctgtatgaataccagcc

SEQ ID NO: 537902 - DNA, 100 bp, Homo sapiens
tggtacttagatttgattagctatggacaagattggaggaaatactataaagtggaacctcttgattttggcggcctccccatggccacccatggaccag

SEQ ID NO: 537903 - DNA, 96 bp, Homo sapiens
tgtcggaaagatgttttaatgattcttccatatgtggcaattgtccaagaaaagaggtcctgctgtactagccaccaaagcagctgctggtactaa

SEQ ID NO: 537904 - DNA, 82 bp, Homo sapiens
aatcttttgaattttttctccccgacaatgaagagggcctgaaaatcaggaaggcctgctttcttccccgggcgatgtgcag

SEQ ID NO: 537905 - DNA, 100 bp, Homo sapiens
aaacgtaggcctgcgtggcctggtggctggtggcataattggagccttgctgggcatcctgaggttagcattacacttctcccagtggagcccatgactt

SEQ ID NO: 537906 - DNA, 98 bp, Homo sapiens
tgtggagtggtttgaatatcgtaagcgcacgtttaaacatctcaaggtacccactgatggtaatgctggcctgctggctgaaccccagattgccatgt

SEQ ID NO: 537907 - DNA, 75 bp, Homo sapiens
ggctcgagagctcgccccgaacgggggtcttcctcctccgccgttgacaggtgaaagaacttgtcctggacaaca

SEQ ID NO: 537908 - DNA, 82 bp, Homo sapiens
ctgctcccttcgccttcgccctttccacctcgcggcagttcggcttataccagccagtttgtatcccttgtgatgtttgccc

SEQ ID NO: 537909 - DNA, 119 bp, Homo sapiens
cgccaaccgcaaccattgacgccatgtcgggttattcgagtgaccgagaccgcggccgggaccgagggccaagtacctggcccagatcattgtgatgggcgtgcaggtggtgggcaggg

SEQ ID NO: 537910 - DNA, 100 bp, Homo sapiens
aacagccaccttcagtatctcagtcctccagtgtttggatattcaggatgttggttcctgcaaacaagaactgaccctatcacctctgcctcacagtggg

SEQ ID NO: 537911 - DNA, 75 bp, Homo sapiens
tgttccagaactgcagtgaactctttaaaacacaggcaaagaacagagcagttcaccatttgcattatatagaac

SEQ ID NO: 537912 - DNA, 99 bp, Homo sapiens
ttttcctgtatgaagcggttggcaccactgaagtgaccgaatgagagttgagaattatggctgcaggaaaatttgcaagccttcccagaaacatgccgg

SEQ ID NO: 537913 - DNA, 90 bp, Homo sapiens
atctgctccagtgtctccagtaccagttctaccagcattggggctttccagctctcacagaaccttcagcatccccagctgccggtcttg

SEQ ID NO: 537914 - DNA, 99 bp, Homo sapiens
atgactgcttagaccacagcgacgaggacgactgccaggatgaggaagatgaggaaatggtggaatctaaagttggccaggactcagaactggaaaatc

SEQ ID NO: 537915 - DNA, 78 bp, Homo sapiens
tctgtggtccgtaggagccactatgaggagggccctgggaaggcatggattccgtgaaggaacaacacctaaacccaa

SEQ ID NO: 537916 - DNA, 145 bp, Homo sapiens
aagccgaggctccctgcagaggccaggcgtgctcagcacagaaggctcagcctgtgggtacctgcccaggtggcaagcgtggtgcccactgcacggaggatgcagccattaggtctctcggaggtttgtgtgctttgctgttccc

SEQ ID NO: 537917 - DNA, 98 bp, Homo sapiens
aggagtgcggcgcggcggccccgggaccaaggagattgttctctggggccggactgagaaatgcctgaaggagacgacggaggagatccggcagatgg

SEQ ID NO: 537918 - DNA, 88 bp, Homo sapiens
acccccagcggtgcacgctgctggtcagccagttccgctcctgtcagggcaccatgccggtggaaaggatgcgcatgcgcccgtggct

SEQ ID NO: 537919 - DNA, 102 bp, Homo sapiens
tggacatggacatgagccccctgaggccccagaactatcttttcggccaagaataaggagacgggtgctttggctgcggccaaagtcattgaaaccaagagt

SEQ ID NO: 537920 - DNA, 100 bp, Homo sapiens
agcgggtgcgtctgccgcagagtcggcacctgaaggacatggagatctgcttggctttgaggaagagtggcagtactgcctcactgcataagggatggga

SEQ ID NO: 537921 - DNA, 87 bp, Homo sapiens
aaatagactctgaagtaatatctggactttgaaattggccaggtctggattaatggctttaaccttggccgctattggccagcccgg

SEQ ID NO: 537922 - DNA, 98 bp, Homo sapiens
cgggcccagcggcttggtgcgggagctggaggagctgcgctcggagaacgactatctcaaggacccttgaacatctgtgaagaaatgactattctgca

SEQ ID NO: 537923 - DNA, 50 bp, Homo sapiens
ctccaacgattgagagcatttaaagatggctgtgtctggggcgtgtgcca

SEQ ID NO: 537924 - DNA, 100 bp, Homo sapiens
aaatcataagaaacaaaattcgagcaattggcaagatggcaagagtcttctctgttctcaggaggctcccagccctttcggattggttgagaaaagtggc

SEQ ID NO: 537925 - DNA, 98 bp, Homo sapiens
gaaaaatctgaggttatcaatgacgagcatatgtccatttggagaggccccatttcaagtgctcagtggctgctggtggctaccgaattggatacgtt

SEQ ID NO: 537926 - DNA, 50 bp, Homo sapiens
gacctcgagcatcactttcaaaccagatgttagtaggcaggaagaggcgg

SEQ ID NO: 537927 - DNA, 100 bp, Homo sapiens
gttatattccttttgggacgccaattgaagcactaagtaatatggatgattatgacaaaacctgcttggagtctgcattagttggtgtttgcaatatcgt

SEQ ID NO: 537928 - DNA, 100 bp, Homo sapiens
gtggataccttggcctttgacgggcggacctttgtcgagtacctcaacgctgtgaccgagagctacaggcctcgggcctccccggcagcgcggagctgac

SEQ ID NO: 537929 - DNA, 90 bp, Homo sapiens
gccgaggcgcaggtggcgctgggacggggaggtttactgcatcgacgcgcggttctacgggaacgtcagccggttcatcaaccaccactg

SEQ ID NO: 537930 - DNA, 90 bp, Homo sapiens
gacgccattggatgttttgtccagggcagcatctctggtgcatgctgatgacgaaaaactgcaagaagaaacacacgctgctgtgccccg

SEQ ID NO: 537931 - DNA, 95 bp, Homo sapiens
aaagcacaaggattctcgctgtgacagagacaacaccgagtatgagaagtttgttggcatccaaagctgttggggttgatggtgctgaaaaaaag

SEQ ID NO: 537932 - DNA, 96 bp, Homo sapiens
tgtgagccatcaggactccatcactcgtcttatggaggtgtctgtaactgagactgacatcaatttgccctatcttacaatggattcttctggacc

SEQ ID NO: 537933 - DNA, 75 bp, Homo sapiens
cagatggcagccagtcagtggtggagggcgagctgaggatcagtgtcctgcctgcctacctgtcctatgatgccc

SEQ ID NO: 537934 - DNA, 100 bp, Homo sapiens
gtgaccgagaccgcggccgggaccgagggttcagcttgttggtttagatgaggagagttcagagtttatttgcagaaacacctttgaccacccatacccc

SEQ ID NO: 537935 - DNA, 87 bp, Homo sapiens
ttgggactgccccggcaactccagggtgtctggtccacgacctatcctaggcgccatggtattagaaaactactcggatgctccaat

SEQ ID NO: 537936 - DNA, 90 bp, Homo sapiens
ccaggcataaaatcatctccatattctcaggcacagagaaagctccaaatgagaagatgaagcaagtgttaaagaagactatagaagaag

SEQ ID NO: 537937 - DNA, 100 bp, Homo sapiens
ctggacctggccctgcgaccccagtcatgggccagacctcggtgtccacgctgtccccgcagcccggcagcggcaccttggaagttgttttcaaccatat

SEQ ID NO: 537938 - DNA, 75 bp, Homo sapiens
acaagactggggctgctcccatcattgatgtggtgcgatcgttggtagctggcagtgttgtgatggcttttgaag

SEQ ID NO: 537939 - DNA, 100 bp, Homo sapiens
gcaaagcggggacccagaccctggagcctcagttggaagcagccgatccagcctgcggagcctgtggggcaggattgatttccagagacttatgttactt

SEQ ID NO: 537940 - DNA, 100 bp, Homo sapiens
gagcttgagatgctaggaagacttggcgctccattagcttccgcagtgagagccgccctgacatcctcgccccccgaccctggtccagaaatgccgcccc

SEQ ID NO: 537941 - DNA, 89 bp, Homo sapiens
gacacacgccgtctctgtgtcaggtcatgaatgaaaaacttcagcactgcatggaactaacagatctaatgcggaatcacctgaatgag

SEQ ID NO: 537942 - DNA, 100 bp, Homo sapiens
ctgactaaagcttgaaatgctacatttccaaggtgcgggagtatgagttaagaaaaaacaacttctcagatactggaaactttggttttgggatccagga

SEQ ID NO: 537943 - DNA, 100 bp, Homo sapiens
ggaggagcaacagaaacagaaagacctccaggagaagatcagtgggaagagtaaccagagagcacagagaaatgctggtgaaactggccaaacagaacac

SEQ ID NO: 537944 - DNA, 100 bp, Homo sapiens
gcgtccgcctcaggggccatggcgaagcacgagcagatcctggtcctcgatccgcccacagacctcaaattcaaagctcttttctgctgagcatgctgcc

SEQ ID NO: 537945 - DNA, 75 bp, Homo sapiens
actgaggccatctatccgatttcaaggaagccaaggggtgagacacagtaacctggttgaactctgcatctggaa

SEQ ID NO: 537946 - DNA, 83 bp, Homo sapiens
aggaaattcagcctcaaaaccgtcctgctgcttgctgaccaaatggtgtgcatcaccttcgaccaggccaacctgaccgtcaa

SEQ ID NO: 537947 - DNA, 82 bp, Homo sapiens
cgagtcgccgctgcagccctagtgactgcggcctgcatcccggatattagaaatggctactccccagtcaattttcatcttt

SEQ ID NO: 537948 - DNA, 89 bp, Homo sapiens
aaatatctggtctctcacttcaggaaaatctactgccatagttcacatacagctaagtcatacagcagatggaacaaaaaaaattacaa

SEQ ID NO: 537949 - DNA, 87 bp, Homo sapiens
agggacctgggactgctcacagccagatgccttcaattaagttgcagagttctgatggagagatatttgaagttgatgtggaaattg

SEQ ID NO: 537950 - DNA, 82 bp, Homo sapiens
tcaaagagaaaaggcaacatcctgtcacaggccatgctctggcaaaaacgtactccaaagattcaggtttactcacgtcatc

SEQ ID NO: 537951 - DNA, 82 bp, Homo sapiens
accgagaccgcggccgggaccgaggaaatttcagcagatttcaaggagccgccatccctgccagggaaggagaagccatccc

SEQ ID NO: 537952 - DNA, 75 bp, Homo sapiens
ggctacaaaggctccaccttccacagggtgatcccttccttcatgtgccaggctaaagaattacctccaaagcca

SEQ ID NO: 537953 - DNA, 83 bp, Homo sapiens
ggcgagcgcgagcggcgcgagaaagtccggtgtttgtggagctgcccgttgacgtgctgtacccctacttcatggtccagaag

SEQ ID NO: 537954 - DNA, 97 bp, Homo sapiens
cctgcagccttcccatgctatctgttgacatggaaaacaaggaaaatggctctgtcggtgtaaaaaacataagctgtggccatgactactgaagtag

SEQ ID NO: 537955 - DNA, 82 bp, Homo sapiens
ctcggcggccttgggggcggccctacgtagcctggcttctggggatggttgtgcgagctgttacgctggaaagaagatcctt

SEQ ID NO: 537956 - DNA, 74 bp, Homo sapiens
tcccgcctctgtcatttcctagagctgtggcctcggcctcagaatattctgttgacaagtgaatctccattggg

SEQ ID NO: 537957 - DNA, 50 bp, Homo sapiens
agctggtgattggagccctgcggaggttctgccggagacttccatttggc

SEQ ID NO: 537958 - DNA, 100 bp, Homo sapiens
gtggacctacctgataaataccctttcaaatctccatctataggtgtcatggagaaactccagctgggcccagagattctgcagcgggaaaatccaaggc

SEQ ID NO: 537959 - DNA, 101 bp, Homo sapiens
ggatcacctgcggaatggggtagatattaacacctgtaaccaggaaggtgggagtcaatcattttgacaagtctcctgaaaggaacagctagcaggaactg

SEQ ID NO: 537960 - DNA, 82 bp, Homo sapiens
cttacgacgggttggggatggcgtgcagcgcaaccacgagacggccttccaagcggaggaggagaaagagatggacctcccg

SEQ ID NO: 537961 - DNA, 50 bp, Homo sapiens
aaagaacttcttcccaaaatggcactgatagccattgggcgatacagcat

SEQ ID NO: 537962 - DNA, 75 bp, Homo sapiens
cgagcccgccttgtctgcggcgtgactggaggcccagttacgttatgatgatgaagtgaagcgggtggtggcaga

SEQ ID NO: 537963 - DNA, 100 bp, Homo sapiens
tgacctacaaggaatctgagggtgccctcaatgagcacatgaccagcttagcttctgtcctaaagctccagcggcgccatgagcaaatgaaaaagaattt

SEQ ID NO: 537964 - DNA, 100 bp, Homo sapiens
aaaaaactgaagcaattaatggaggaacatgatcaggcatctccatcaggatttcaaccagagatggatcctcccaagaaggtgaccacagtgattcaaa

SEQ ID NO: 537965 - DNA, 100 bp, Homo sapiens
caggtggttgcggagctggtaagacacatcttcggcctctgaggatgagggctctctgagacgccaagctgcgctctctgctgccttgcaacagagctta

SEQ ID NO: 537966 - DNA, 100 bp, Homo sapiens
cttgtcaggtggtggaggaaaaggcgctccgtcatggggatccagacgtctcaggggccagccaagcccccacccccaaggaagccactgcctgccgacc

SEQ ID NO: 537967 - DNA, 51 bp, Homo sapiens
ggaacttgctcgactgagagactcagatggagtttcgctcttgtcgcccag

SEQ ID NO: 537968 - DNA, 73 bp, Homo sapiens
ccaactctgcccttatggaattggacaaagtactaaggctcgtacgtctgcatcgattatcttacgtggggca

SEQ ID NO: 537969 - DNA, 100 bp, Homo sapiens
cttaccagtggataatagtctactgtccaattctgtttactctgaattaccatcagctgaagggaaaatgaaggctggactctgtgaagctgagcaggag

SEQ ID NO: 537970 - DNA, 82 bp, Homo sapiens
acagccggtccaaggcggtgcgctgggggccggggcgcgtcgcagcggagctggagtttgttcagatcatcatcatcgtggt

SEQ ID NO: 537971 - DNA, 95 bp, Homo sapiens
ggagaggttaaagagacccgttcagagtcctacagtggcagaaggtgcttcctggaggggcctgccccactgttcctgtgctgagttccaggaca

SEQ ID NO: 537972 - DNA, 83 bp, Homo sapiens
cgcggacatggtcatgagctttgtgaacctggtgcctccggagccagcgtggtggccatagacaacaagatcgaacaggccat

SEQ ID NO: 537973 - DNA, 76 bp, Homo sapiens
caaagtgctgactctggtaccattaaggcaaaattgcttagcagtgtctgcaaaaacgaatcttttcctacaacct

SEQ ID NO: 537974 - DNA, 100 bp, Homo sapiens
gtggaaggcgagttctcggaaggctacgatcctacagtggagaatagccagatctatggggatgtgctctacttcctgacagagcaccgcgacggattcc

SEQ ID NO: 537975 - DNA, 51 bp, Homo sapiens
gtggcctttaccttgctggagaaggtggcagtgctccttttggacttttct

SEQ ID NO: 537976 - DNA, 99 bp, Homo sapiens
caaaattctgaactcaggacttggcaaacagcacccaagaaaacctcatttggctcgctgaaggatgaagaccggattttcaccaacctgtacggccgc

SEQ ID NO: 537977 - DNA, 107 bp, Homo sapiens
ctcgggccggagcgtggccggacccccacccgccgaggggcccagggaggacgcggtgagaagccctaccactgcaactgggacggctgcggctggaagtttgcgcg

SEQ ID NO: 537978 - DNA, 83 bp, Homo sapiens
gagctcccccaagagccggaaagatttggcagctgatcggaagctctttcgtcttgtctccaatgactccttcatctctattc

SEQ ID NO: 537979 - DNA, 100 bp, Homo sapiens
caaagagcattgaagaattcttaaagtttcaaaattggcttcagtatcagacacagcacagcagccatctgaagagcaaagcaagtctcttgaaaaaccg

SEQ ID NO: 537980 - DNA, 83 bp, Homo sapiens
cgcgcgaccgccgaatcgctcctgcagcagagaccatgtctgcaaaggagaagtcgaagtttgaagatatggcaaaaagtgac

SEQ ID NO: 537981 - DNA, 83 bp, Homo sapiens
acggtacggccagcgagcccagcgagaaggccaagctggagcagatccgcagggacatccgagacttccggtctagcgcgggg

SEQ ID NO: 537982 - DNA, 100 bp, Homo sapiens
gaaaatgtgaaggccaagatccaggataaagaaggcatccctcccgaccagcagaggccgcttccaccctcagcggatgataatctcaagacaccttccg

SEQ ID NO: 537983 - DNA, 80 bp, Homo sapiens
taaatgagcctcttgccaaagtgtcccttttaaaagattctgccatgtaaatgtcagcttgagtggactccagctgagaa

SEQ ID NO: 537984 - DNA, 74 bp, Homo sapiens
cctgacttctcaaaaagcactgcacagaggaggaggcagcagaaccccatctcaagagcaagatgacgttctca

SEQ ID NO: 537985 - DNA, 100 bp, Homo sapiens
tattgcttgtaactcagcggattaccaagtacccagttttattccaaagaatattgcagtgtaccaaaggttggattagcagcatgccaaattgctagag

SEQ ID NO: 537986 - DNA, 95 bp, Homo sapiens
ttcgccgttaccttcttgctggcgttggtgggagccgtgctctacctctatccggttgagataagtcgaagagtgactctggaaaaactccctcc

SEQ ID NO: 537987 - DNA, 88 bp, Homo sapiens
attccaagtaactcttatttggatactggtatcgggatgacacaggaagagctggtgtccaacctggggacgattgccagatcggggt

SEQ ID NO: 537988 - DNA, 75 bp, Homo sapiens
tagcaaactttttaatgaggaaggttttttgattaactcaaaaccagagaatgcctgtgaacccatagtgcctcc

SEQ ID NO: 537989 - DNA, 88 bp, Homo sapiens
tatcttctgagaagaaagttcagtaattccctgaaaagtcaaggtacctgtgtgacaaggtcgtccctgggaacagggttaccatcat

SEQ ID NO: 537990 - DNA, 98 bp, Homo sapiens
ctggggcccccagaagtgatcgctcagctggagaacgcggctaaagttctgatggacccctcgtccagtcattgtggaacccatggagcagtttgatg

SEQ ID NO: 537991 - DNA, 82 bp, Homo sapiens
aaccccgagccgctggtgctacaggtcaatgtgacggtggactacattagaccagccagcccagccacagagacagtgcctg

SEQ ID NO: 537992 - DNA, 97 bp, Homo sapiens
ttaggagacagatggtccggaacttcagaaaaccactcattgttgcttcccctaagatgttactcaggctcccgctctggtagctgaagaacatctc

SEQ ID NO: 537993 - DNA, 90 bp, Homo sapiens
ggccaagaaggaagaccgggagctccaggacccattggagttggtgagcctggacagccaaggctgaggggatctggcggtggagcgcta

SEQ ID NO: 537994 - DNA, 80 bp, Homo sapiens
ccaggttcgtggctatcccactcttctctggttccgagatgggaaaaagcggccttcctcacacagactgtctgcctgga

SEQ ID NO: 537995 - DNA, 74 bp, Homo sapiens
ggaagtagcaaggctgacaccagattttcagtcaatgcatcatcggagcgactcaacatgggtgaaatcgagac

SEQ ID NO: 537996 - DNA, 75 bp, Homo sapiens
ccgagtcaactggcccggcaccgagttctctctggcatttcagaagatggacacaaagaagaaggaggaacagtt

SEQ ID NO: 537997 - DNA, 109 bp, Homo sapiens
tagaattcattgaaaacagctggtggacaaaattttgtggcgctctgcgtcccctgaagctgcagaagaaagatcagcaactggagcctaaaaaaagtaccagccctaa

SEQ ID NO: 537998 - DNA, 100 bp, Homo sapiens
ggcggtgttcccggctccgtggggccgtcttcccggcgagtccgcgacggtcgccgcccacggcgaggagctgcagaggctggagacagagttgggccaa

SEQ ID NO: 537999 - DNA, 96 bp, Homo sapiens
ggacacagcaatatctctgggctttcacaggttcctagaaggtgagcgcggacggtatgcaaagttgtgaatccagtggtgacagtgcggatgacc

SEQ ID NO: 538000 - DNA, 75 bp, Homo sapiens
gtcgcgcggaggcggaggcttgggcttgccaattctgtaactccttgggatatcttgctgagcttaattgcagct

SEQ ID NO: 538001 - DNA, 73 bp, Homo sapiens
ggcctgcacaccaagggcgcccttcccctggatacggtcactttctacaagacactacaacaacaggagtgca

SEQ ID NO: 538002 - DNA, 100 bp, Homo sapiens
aacaaccaccctggccttcaagttccatgccattgcagtgtcaactaggcctcagttacttttcagtttgcccaaattgagcccatctcaacatttggca

SEQ ID NO: 538003 - DNA, 96 bp, Homo sapiens
gcaaagggcacgtatagcattggtaaagaacgatcgtccagtggaggtcagaagacatgtcttcatctacatggcatctttccttacctctatgtg

SEQ ID NO: 538004 - DNA, 75 bp, Homo sapiens
cgctccccgagccgtgtttccttccatcgtcgggcgccccagacaccaggtaggtagagcaagaagatggtgttt

SEQ ID NO: 538005 - DNA, 98 bp, Homo sapiens
actatggcagttgcaaaatattcaggagaccgtcgttgccttgtatttccagagaacaggagaccaagacacattccaccccagtggggggtcccata

SEQ ID NO: 538006 - DNA, 74 bp, Homo sapiens
aagaagctccaagaattcaatgcccggcgtaagcttaaggtggccacgtcttttattagaacaatagagcttgg

SEQ ID NO: 538007 - DNA, 50 bp, Homo sapiens
cttcattccgcagcagcactccgacaggtagaagatgacagattattgag

SEQ ID NO: 538008 - DNA, 82 bp, Homo sapiens
atttattaaaggaagcacacctaagctggagaagcgactggaggagtggttggggaggacattgcctggcagtgactggaca

SEQ ID NO: 538009 - DNA, 100 bp, Homo sapiens
ggcaccgggatcgtgaccgagaccgtgaccgagagcgtgaccgagagcgcgaatatcgtcatcgttagaagaccagcatctcagacatgtcgaaaaagat

SEQ ID NO: 538010 - DNA, 98 bp, Homo sapiens
tgtcacttaaatatcatccagataaaggaggtgatgaggttatgttcatgaggatagcaaaagcttatgctgcaattcctagaggacctgtgcaacaa

SEQ ID NO: 538011 - DNA, 100 bp, Homo sapiens
cgacaggaggtcatctgtccttgtgccagctcgccagaggccctcactgtggccatccggaggccatgctgctcttcctcctctctgcactggtcctgct

SEQ ID NO: 538012 - DNA, 74 bp, Homo sapiens
caggaagcggatcgcgtggactggaagtcacactgcggcggtgcagcttcaagcttaggaccacccaccatgcc

SEQ ID NO: 538013 - DNA, 100 bp, Homo sapiens
ccggctgtagccaagaactattcggttctctacttccaacagaaggtggcccgacgttggggcattcagaaaaacaggccagctatgaactatgataaac

SEQ ID NO: 538014 - DNA, 128 bp, Homo sapiens
ctcctctgcgccggcccgctcactccgcccggccccagccctagcgctggccgcgaccccggcggggcttcggtggatggagaaaacaagccaaggccatcattgtattctctgcaaaattttgagga

SEQ ID NO: 538015 - DNA, 75 bp, Homo sapiens
ggcggccacggcatcctgtgctgtgggggctacgaggaaagggggatatgagactttctactcggaatatcctga

SEQ ID NO: 538016 - DNA, 75 bp, Homo sapiens
atttaatggaaaatcgcttggttaaaacctgacacttttaacaggagctgtcataaccctggggaaggcacagaa

SEQ ID NO: 538017 - DNA, 74 bp, Homo sapiens
aaaggtgcccttaaacaaaacaagaaattataaagagctctgatgggctatttgggtgatacccagtgcagtga

SEQ ID NO: 538018 - DNA, 101 bp, Homo sapiens
gaggaatttccgtgcctggccccatgggtccctgcaagtcatgaacaaaacgagaaagattatggaacatgggggggccaccttcatcaatgcctttgtga

SEQ ID NO: 538019 - DNA, 100 bp, Homo sapiens
taagggaacttgggaggatcccacctcagccttcgtgactagtgagatctgggttacttagcactttggttggagagaagtctgtgactcagagatggga

SEQ ID NO: 538020 - DNA, 116 bp, Homo sapiens
tagacttgccagaacagaacactattcacaaagattgcctgcagtttattgaaatttctgaataaattggcagaagaacgcagacagaagaaggaaacttaagatgtgcaaggaga

SEQ ID NO: 538021 - DNA, 98 bp, Homo sapiens
aacattgtagaagaaatggtgaacattgttgttggagatcgtaaaaaggaccttgtaaaactacaggcaggggaatatgtttctcttgggaaagtaga

SEQ ID NO: 538022 - DNA, 75 bp, Homo sapiens
gagcgaagagctgcttctgtatcttaaggttttgaaactaacatgaacataagtagccgagatgaccctagtacg

SEQ ID NO: 538023 - DNA, 143 bp, Homo sapiens
tccagatgaggtgatggcaacggccaacttcggcaagatccagatcgggatttacgtggagatcaagcgcagcgatgatgtccagggtgctgcagaaggacgcggagcaggagtcacagatgagagcggagatccaggacatg

SEQ ID NO: 538024 - DNA, 75 bp, Homo sapiens
ggaaaaggacgcaaagttctccggcgaggcagtgaaatcaactgtgcagaccatcactgttggaggagtgagcac

SEQ ID NO: 538025 - DNA, 98 bp, Homo sapiens
atgaagacttgaggcgaatggccgaatctctccggcaacgcggtaaaaatattgcttcggtgggtgacgcggtacagctgcccaagggcgttcgtaac

SEQ ID NO: 538026 - DNA, 50 bp, Homo sapiens
agaaacttcataaatatatgcaggtcatgtaatgtttgcagaaataaaaa

SEQ ID NO: 538027 - DNA, 73 bp, Homo sapiens
cgcggtggtcactgcgtggccctgtgtacccgaggtagacgaagagcggcggagtgcagcgggcagtgagaaa

SEQ ID NO: 538028 - DNA, 82 bp, Homo sapiens
tgcgcaagcgcaaccgtcggtgggtcggggatcggtcgcctgagaggtcaaaatgcagatcttcgtgaaaacccttaccggc

SEQ ID NO: 538029 - DNA, 98 bp, Homo sapiens
ccttggcaaatgcttcagatgcagaactctgtgacattgcaggaggtctcagcatgaaacagcagcagtggtgtgggatgactgccaaaatgggcacc

SEQ ID NO: 538030 - DNA, 76 bp, Homo sapiens
cagcgcgcggcaggcggcgagctcgggggccgcaggtataaagaaatatgaggccccaattggaacagcagcatgg

SEQ ID NO: 538031 - DNA, 74 bp, Homo sapiens
agggctgccagccagctatccccgagaacccgcccccaggcgcgggcggtgatgaactttgtggttcgctaccg

SEQ ID NO: 538032 - DNA, 88 bp, Homo sapiens
ctcagttcaggggaaacacagcaaggaaatgtgagccccaggctgcagaaggccgattcaacagtcattgagaagtggatggatggcg

SEQ ID NO: 538033 - DNA, 101 bp, Homo sapiens
tatatcaagccacaatttccatcaaaaagtgattaagcagagaatggagaagaaggttgattccaggagaataaaggcagccccgttgatgactgaaaatg

SEQ ID NO: 538034 - DNA, 95 bp, Homo sapiens
aagaggaggaagccatgcgtaggaaacgttcctggatccgaacactgccccctgacgacctagagagatcccggctcccagcccactgagtggct

SEQ ID NO: 538035 - DNA, 75 bp, Homo sapiens
agggggcagtcccgggagaacctgcggcggccggagcgttgtgtctgagtacagggcatctctgcagcagaggat

SEQ ID NO: 538036 - DNA, 75 bp, Homo sapiens
ccgccggagcttgaatcgttttgtgtgagttcttgatacgaatgaaaggccaagagtttgttgatgagattcaag

SEQ ID NO: 538037 - DNA, 98 bp, Homo sapiens
cgacatcaagttttcctctgcaggagacctgtcttctggttacctggatgatactaagcaggaaacagctaatgggcccacctcctgtctgcctccca

SEQ ID NO: 538038 - DNA, 100 bp, Homo sapiens
gtttggattaatatgtctctgttcagacaaggagccccaaactgtctcacagtcctcaaccacccagtctgggtgacccggtcgagcatttatcagagac

SEQ ID NO: 538039 - DNA, 86 bp, Homo sapiens
actgtagcacctcttcctcaggaaatgtccaccactgtttctcatcatcaccaaacggtgatgacaatgggaagaaggccaacaac

SEQ ID NO: 538040 - DNA, 76 bp, Homo sapiens
gtcaggcgtcaggctagtccgacgaagagtggattgttagaagatacagtgactttgatttgcttaacaacagctt

SEQ ID NO: 538041 - DNA, 100 bp, Homo sapiens
tggggctggacctgctggtgttcgcccacgaccatgttggttagtctgctgctaattggaattgctgcgtggggcattggcttcgggctgatttccagtc

SEQ ID NO: 538042 - DNA, 100 bp, Homo sapiens
ggatgctctctgccctgaatccttgggcctgtagtggtggagacacgcccagtggatgatcctactgctcccagcaacctctacatccaggaatgagtcc

SEQ ID NO: 538043 - DNA, 101 bp, Homo sapiens
taggagatggcaatttgcagtattacctgtacaattggaggtgtccaggtacagattctgaaaaggctggagtgcaatggcatgatctcggctcactgcaa

SEQ ID NO: 538044 - DNA, 75 bp, Homo sapiens
gcggagccttgagcagcagctgcaggaacataggcaatgaagagtctccattgaatgttttgggaggattgaaac

SEQ ID NO: 538045 - DNA, 88 bp, Homo sapiens
ctcatcagaaatgttacacacggagtatcaaactctgctgccaagggtcctaacctgattataaaacaaccagatgagttgctggaca

SEQ ID NO: 538046 - DNA, 98 bp, Homo sapiens
gcagaccaagtctgatgagaagctgttcctcgttctcttttttgataataagagaagttgaattcaattcgtcataatctgtccctacacagcaagtt

SEQ ID NO: 538047 - DNA, 100 bp, Homo sapiens
atttaacaaagctttggttgatccaggtattatacctgaagaaccttagccctcgggtgactgaaagagatcttgtgtcattgttcgctcggttccagga

SEQ ID NO: 538048 - DNA, 88 bp, Homo sapiens
tcgaggggctcagttgggtggactacggggagcgcgccgagctggatgactcggacgctggctgcaccttcgaggaggcaagtgaccc

SEQ ID NO: 538049 - DNA, 108 bp, Homo sapiens
gtttggaaagacccaggagaagccgcccaaagaactggtactccaaagattcaggtttactcacgtcatccagcagagaatggaaagtcaaatttcctgaattgctat

SEQ ID NO: 538050 - DNA, 90 bp, Homo sapiens
gccggagcctgccagagccaaggccaagctctccaagttcagcatccccaagcagggggaggataatttcttgagaggagataactcccg

SEQ ID NO: 538051 - DNA, 51 bp, Homo sapiens
caaggcgatggagtgtgtctggattgcccccgaggaattagcacttgttca

SEQ ID NO: 538052 - DNA, 100 bp, Homo sapiens
aaagaagattacaacagactgagaagagaagtggagcaccaggagactgcctatggacacattcagctaacgtattttagcaggtggagtgaggttgaag

SEQ ID NO: 538053 - DNA, 90 bp, Homo sapiens
cggagaaccagtaccggctgacctcgctgtacgccgagcacccaggcgactgcctcatcttcaagacaaagatcattccactcagcctgg

SEQ ID NO: 538054 - DNA, 82 bp, Homo sapiens
gtctctgtccccatctggttttagggggatatgagactttctactcggaatatcctgagtgttgcgtggatgtaaaacccat

SEQ ID NO: 538055 - DNA, 83 bp, Homo sapiens
aaggagaacacgctgcttcacctcttcgccggcgggtgtcccgacccaggctaagcttgagcatggctgagcaggagcccaca

SEQ ID NO: 538056 - DNA, 100 bp, Homo sapiens
gtgagactcacctttaaactagaacaagaccagctgtggattggcactaaaggggctggtggcagcagcgtcgtcataggtaatattggtgccctgatgg

SEQ ID NO: 538057 - DNA, 100 bp, Homo sapiens
gccaggaacacaacctcaccttgatcagagctacagagacttctgaagtggagagtctgcgacctcctcggttcttcaatgaagatggagttatcagacc

SEQ ID NO: 538058 - DNA, 101 bp, Homo sapiens
ccggctgcccctgtccttggagacctacctgatggggacgccaggtgtgcaggggcgtggcgcgtaggatgctgaaaacgccattcaacagatgggtggcc

SEQ ID NO: 538059 - DNA, 100 bp, Homo sapiens
aggaagaggaaagcaaaggagtcagggatggctcttcctcaggaattcattgaagagttgctgtctcccccttttgggggtttagtggcatttgtgaagg

SEQ ID NO: 538060 - DNA, 97 bp, Homo sapiens
cggcgacctcaagaagcagctccacgaaaggcagccgcggatcgccgcgctcagcgacaaacaaaaaccaatagagccatggcgactccctctgctg

SEQ ID NO: 538061 - DNA, 100 bp, Homo sapiens
tggattggctccaagtaagagcacagtgtatgtatccaacttgcctttttccctgacaaacaatgacttgtaccggaagtggtccaaaggcaaagttcgg

SEQ ID NO: 538062 - DNA, 100 bp, Homo sapiens
gaactcagacatctgcaaatcatggcaatttgaatcaacccatagaagtgacagcgctgtattcatttgaaggacagcagcctggggatttgaattttca

SEQ ID NO: 538063 - DNA, 74 bp, Homo sapiens
atggccccttcaagccggatcactaccgctactgagagccagctaccaagatgaatgaactaatggagaaatag

SEQ ID NO: 538064 - DNA, 75 bp, Homo sapiens
aaccatgacaggcatgttgtataaatgtacagcatatgctactttgattgaaaatgattcaaatccagaagttag

SEQ ID NO: 538065 - DNA, 75 bp, Homo sapiens
caaggatttccgggactacctcatgaggcgcctgtgtctggcagagctggtgtgagacgagacaatcctgccccg

SEQ ID NO: 538066 - DNA, 75 bp, Homo sapiens
ctttgggggcagcctgcagaggctgcgatggtgatggaatttcctgataatgtgttaaatctcgatggacatcag

SEQ ID NO: 538067 - DNA, 74 bp, Homo sapiens
acttcttaacccctagaccggtttttagtccattgactatgcagcctaatgatcgtcagtatttaaacagatca

SEQ ID NO: 538068 - DNA, 75 bp, Homo sapiens
gcctgacagctctgcggctcgggccctgaggtttcagaaggatcccacttggtcagagactggagaccgttatct

SEQ ID NO: 538069 - DNA, 101 bp, Homo sapiens
atcgtcccgctctgtgctgccgacatccaggaccagctaaagaagcgctttgcttacctgtccgagaatctggacgaggctagagaacagaaagaaaagag

SEQ ID NO: 538070 - DNA, 97 bp, Homo sapiens
caagtctgtctccacgctcatggtctctgccctgcagagcggctggcagatgtgcagctggaagctgccactgcagagccccgccatggaagacacg

SEQ ID NO: 538071 - DNA, 100 bp, Homo sapiens
tccaattttgctcaacttattgtgagagatgttggggatcagccaggtgaggtaggttattcaggctctcctgctgaagctcctccaagcaagtcaccat

SEQ ID NO: 538072 - DNA, 75 bp, Homo sapiens
aggaagctgcagatgtactttgtattttacaagcaggggctgcatcttcttcccagtttcaaggcttaccttccc

SEQ ID NO: 538073 - DNA, 75 bp, Homo sapiens
agccccgcgggaatgtcgacgaggagctgagattcctgacattcagacaactgacttgtaactgacttataactg

SEQ ID NO: 538074 - DNA, 50 bp, Homo sapiens
cctatttgaagaacttggaagtagtcgacagtcattttgtttactcattc

SEQ ID NO: 538075 - DNA, 100 bp, Homo sapiens
agaagagaaggatgatggtgaagctaaagaaatttctacacctacccattggtctaaacttgatccaaagacaatgaagtttgccatctcttggagcaag

SEQ ID NO: 538076 - DNA, 90 bp, Homo sapiens
ctctagtctttatgggaaacctcagcttgatgatgtatctcagcttggaactgcagttggctttttgctaccaccagttttagtacccaa

SEQ ID NO: 538077 - DNA, 75 bp, Homo sapiens
gtcctgaacctgttatcacctggagacaccttacaccaactgaaatggcttcagacatacctggatctgtgacgt

SEQ ID NO: 538078 - DNA, 75 bp, Homo sapiens
tgggttacaagcagcaagtgcgcggttggggccactgcgaggccgttttagaagtggtccaaaggcaaagttcgg

SEQ ID NO: 538079 - DNA, 90 bp, Homo sapiens
cctcaggccagtcgcctccaggccaagagggatccttcacccgtgtctgggcgaagctgtgctcaggcccgggctggacgcagagccaga

SEQ ID NO: 538080 - DNA, 100 bp, Homo sapiens
ccaccatggacagcttcgacttagccctgctccaggaatgggacctcgagtcactgtgcattccagttggcttttgagtggatacgtgcagtgagatcat

SEQ ID NO: 538081 - DNA, 100 bp, Homo sapiens
agaggatccagtgttcaccatcctggccccggaaggtcacagagatgcggcggaccctgacgcctgccagctccccagtgtcctcgcccagcaagcacgg

SEQ ID NO: 538082 - DNA, 75 bp, Homo sapiens
gcctcctgaggagctgggattacaggggaggagttgtgtggggtaatgacaatctcggactctccaagagaacag

SEQ ID NO: 538083 - DNA, 102 bp, Homo sapiens
caggaagcagaatattccttatatgcttcttggacacttaatgattgttggcaagaaatgtgctgctgatctgggcctgaataagggttatcgaatggtggt

SEQ ID NO: 538084 - DNA, 83 bp, Homo sapiens
tcccaagtttacttgatcgtacaagaatccaaaggactgcatgacacaccataggatatagtcaagaagcctttggacatggg

SEQ ID NO: 538085 - DNA, 100 bp, Homo sapiens
ccgaagaatcaaggctgggccggacccggtggcctggcaacagggaatagcgggttttgcagcaattgttgcatatggattatataaactgaagagcagg

SEQ ID NO: 538086 - DNA, 100 bp, Homo sapiens
agccttcttcgctgagtctctgcccagtgtgggagggcagatcattccccctgctggctacttctcccaagtggcagagatgcagcaccgaggcttcctc

SEQ ID NO: 538087 - DNA, 50 bp, Homo sapiens
ccgccaaagaccccgtccggtagttttcatatgagtccaacaagcaatga

SEQ ID NO: 538088 - DNA, 97 bp, Homo sapiens
tggagacaacagaaacagaaacgattgtggaaacaggtccatggaaataaaaggcacatgaacaagtgcattctctctcttagagaccttaaagtgg

SEQ ID NO: 538089 - DNA, 113 bp, Homo sapiens
tgaaaacgttaagtattttctaccaagctgggacttccaaagctgggaatcctattttttattatgttgcacggagaatgatgccaatgggtggaatgatgccacctggacca

SEQ ID NO: 538090 - DNA, 100 bp, Homo sapiens
ccaggagtcagggatcgtgaaggacgccagcatcatacaccggctgttcgaggccttgactgtaggacatgaaatctgctgtgatcacgccttgcagtca

SEQ ID NO: 538091 - DNA, 75 bp, Homo sapiens
cagatgtattaagaagcctcaggagactataaatattcaggaagagatagtttgatttttttggttgatgcctcc

SEQ ID NO: 538092 - DNA, 100 bp, Homo sapiens
aggcatggagcccgaggaggagccaagtgtggcagcagttcgtgaagtctgtgaggaggatcaaaatggtttcaatcccagaatactatgaaggcaagaa

SEQ ID NO: 538093 - DNA, 75 bp, Homo sapiens
tgaattgttctcagtttctcggtttatgtgctcttccaggctgtgcaacaagttattactaacctgctaattggg

SEQ ID NO: 538094 - DNA, 100 bp, Homo sapiens
agagtctccgcggtggaggtctgcgttgctcttgcttttcctcgctggggtgtacgaataactgaagtgaagtgatggactccgatttggagagtagtaa

SEQ ID NO: 538095 - DNA, 101 bp, Homo sapiens
gcgtcttcacccccaccattgaggcccgcacagcccagtccagtgggttcagtagaagaattccaaggccaagaacgaagcgtcatcctcatctccaccgt

SEQ ID NO: 538096 - DNA, 83 bp, Homo sapiens
caatcagcatttcacattcctcatggttggttcaaagggaggtggggaagacagggctccagctaccacaggacgggctctgg

SEQ ID NO: 538097 - DNA, 51 bp, Homo sapiens
ttcgagttcaaagagaccctcggaacgcgcattctacattctaaaggggag

SEQ ID NO: 538098 - DNA, 90 bp, Homo sapiens
gaggcatgatggtcgactacaagaagagggcggagcggagacgggagtattatgaaaagatcgagatgtaatcagtgtagagaaaaccgt

SEQ ID NO: 538099 - DNA, 83 bp, Homo sapiens
ccagagctgaggactgcctgtttgcaggctcgcttctcatatgtgcggatgaaatatcttttcttttcctggttagtggtttt

SEQ ID NO: 538100 - DNA, 50 bp, Homo sapiens
ttcttcaggaacagaacgaacagtatcatttccatccataatggtcccac

SEQ ID NO: 538101 - DNA, 124 bp, Homo sapiens
cggggcgctagcgttcgccttcagccaccatggggaatgggatgaacaagtactatactggcaattgctggagaagattttgcaattgttgcttctgatactcgattgagtgaagggttttcaa

SEQ ID NO: 538102 - DNA, 130 bp, Homo sapiens
tagccactttgcattgactggaaacaatggcatttacagaaagagtcaacagcagtggcaacagcttaacattggtatcccttccctgacaaagtgttgcaaccaacacgacaggtgctatgagacctgt

SEQ ID NO: 538103 - DNA, 100 bp, Homo sapiens
taccgtggccctggccaagcactggacagcggcgattggggccatggcacctgcaaggtgtttctcagcaagattgaggaccgtgtttcagggcgtgggg

SEQ ID NO: 538104 - DNA, 99 bp, Homo sapiens
gtggctttaaaatgtcaggaaatggcagagaactgaagacaactgttagttttgtggcttactgctgctccacccagtgtctgcagacttttgacctgc

SEQ ID NO: 538105 - DNA, 98 bp, Homo sapiens
ccgccgccatcatgagggaaatcgtgcacttgcaggccgggcagtgcggcaaccaaatcggcgccaagatcaggatcctcatgaccagccaaagagaa

SEQ ID NO: 538106 - DNA, 130 bp, Homo sapiens
ggactagttcgaactatgtggaggagatgtactgtgcttggctggaaaaccccaaaagtgtacataaggtcacactgcagaacagagtgatattgcaaaaagccaaattatcagtctacgtgcaaccacc

SEQ ID NO: 538107 - DNA, 100 bp, Homo sapiens
tggacatcgatagggatgcagaggatcagaaccggtacctggatggcatgggggatatgagactttctactcggaatatcctgagtgttgcgtggatgta

SEQ ID NO: 538108 - DNA, 90 bp, Homo sapiens
ttcacagacctcaatggctttcagggtcaaggaggaggtcaagttggcctgaatggacctctccagctctggcttcctgctgagtccctc

SEQ ID NO: 538109 - DNA, 110 bp, Homo sapiens
agcagtccctgaccttccagaacgtggtcttcaatgtcatttatcagagcgcggcggtcttcaagctctcagtgtgatgaatgcagactctgctaccattttggctgttt

SEQ ID NO: 538110 - DNA, 90 bp, Homo sapiens
cttgtagacctcgctggatcagaaagacagaagaaaaccaaggctgaaggggatcgtctaaaagagggtgtcagcatttgcaggtataca

SEQ ID NO: 538111 - DNA, 83 bp, Homo sapiens
ctgaggagcgggatctaacccaggagcagacagagaagctgctgcagtttcagacaatgcagatcttcgtgaagactctgact

SEQ ID NO: 538112 - DNA, 98 bp, Homo sapiens
aatgaagtccgagtcatacccccaggagtaagagcccatagcagtctgccagacaatagagcatatgggctcattggtgggcagtattacttatggga

SEQ ID NO: 538113 - DNA, 80 bp, Homo sapiens
gagcgcccgaggcgtctgggatggtgtgggaccgggtgtggtggacacaggcctattcatcaacatggctgagagagtct

SEQ ID NO: 538114 - DNA, 108 bp, Homo sapiens
ttttggggggaaactaggtcgatggtcggcggcgcccggatgggcagctgagggggatatgagactttctactcggaatatcctgagtgttgcgtggatgtaaaaccc

SEQ ID NO: 538115 - DNA, 50 bp, Homo sapiens
ggaccccctgggaagcctagaaaaatgctcagcaaaacccagcagctcag

SEQ ID NO: 538116 - DNA, 107 bp, Homo sapiens
cgcgtccgccccgcgagcacagagcctcgcctttgccgatccgccgcccgtccacacccgccgccaggtgagcgagtgctgtgctttcatgggcctcttctttatga

SEQ ID NO: 538117 - DNA, 73 bp, Homo sapiens
aggaaatggctctcagaggcaaggatgcgagtgttctgccagttctggataatccactgtccaagaaggttcg

SEQ ID NO: 538118 - DNA, 100 bp, Homo sapiens
tgctcctcctgaagtgtctttggtccaacgttgttccaggtactaggttttgacaagcttgcatcatgcgtgagtataagctagtcgttcttggctcagg

SEQ ID NO: 538119 - DNA, 74 bp, Homo sapiens
gcatcagacacatgatccgcaagaacaagtaccgccccgacctgcgcatgggccagagagtggctgagctgatc

SEQ ID NO: 538120 - DNA, 100 bp, Homo sapiens
gaaattcagagaggggaagtgatttgcctcagcttgtactgtacggaatggccacatcaaaagaatcactgataatgacatccagtccctggtgctagag

SEQ ID NO: 538121 - DNA, 73 bp, Homo sapiens
ccttgcactcctgaattttatcaaacacacttccagctggttggtggtgtggacccaaagcagttggctgttt

SEQ ID NO: 538122 - DNA, 89 bp, Homo sapiens
tgttctacctgctcaagaccgccttccccagcgtccagattgataggcagcagtttgaagaaacagttcgaactctaaataacctttat

SEQ ID NO: 538123 - DNA, 82 bp, Homo sapiens
atcaggatgaatgatgacccaagtatggaattgggtttgcctgggtacctttgctgaaagatggtagaatcatcacatttga

SEQ ID NO: 538124 - DNA, 100 bp, Homo sapiens
ttcctcatagaccttggatgtgggaggattgcattcagtctagttcctggttgccggctgaaataacctgaattcatctgtgccttattccagttcactc

SEQ ID NO: 538125 - DNA, 75 bp, Homo sapiens
caatgggggcaggagctgttggagctttgcagctgacctacatctcgaaggcctcctacacctacctctctctgg

SEQ ID NO: 538126 - DNA, 100 bp, Homo sapiens
ttccaggaacctctgttgccatcagcaactgtgatggtctggatggagggtacagagtctgcctacatcagctcctttgtctgtttctcttccgacaaac

SEQ ID NO: 538127 - DNA, 75 bp, Homo sapiens
ccctcgcgcgcgaccgccgaatcgctcctgcagcagagactcggtgaaatacctggagtgctcagctctcaccca

SEQ ID NO: 538128 - DNA, 100 bp, Homo sapiens
ataagtttttggtgaaataacaaagagaagaagaagaggacagtgctccagtgaaagtggaagaacaaaggaagatgagtcaggatagtgtccatcacac

SEQ ID NO: 538129 - DNA, 100 bp, Homo sapiens
gagagaaggaatccaccttcttacgctatggcagatctacggaatccagaggcagcattgtctccaaccttccgtagtgacagcccagtgcctactgcac

SEQ ID NO: 538130 - DNA, 100 bp, Homo sapiens
ccggctttggccctgcggctgctaccgtcgccgcggagaaattgttggatctggcagtctaggaatgcgctgataaagcagtttgtgtccgacgtggcct

SEQ ID NO: 538131 - DNA, 100 bp, Homo sapiens
ttccgggacgtggtccaagccgtgcgcgaccatgccttcacgaaaccagcctggacaccaagtctgtgtcagaaggccacctcaagaggaacatcgtggt

SEQ ID NO: 538132 - DNA, 100 bp, Homo sapiens
ccttccggttcgagatcagcttcgagtgcagtgaagccctggcggacgcctgatgtgtgagaagcggatattggcggcagtgaccagtgcgggacacccc

SEQ ID NO: 538133 - DNA, 100 bp, Homo sapiens
ccatgctgtacgccgccaaccctgggcagctcttcggccgcatccccatgcgcttctcggtgctgccaaaacagagtggagtacgagaaaagggtccgag

SEQ ID NO: 538134 - DNA, 75 bp, Homo sapiens
ccaaggcgccaggcaggacgacagcagcagcagcgcgtctccttcaggtgcctcaggaaggtctttccaccgacc

SEQ ID NO: 538135 - DNA, 97 bp, Homo sapiens
agtcccgaatccaggccatgaagcccatgaccaaggaggagtgggatgcccggcagagcatcatccgcaaggtcctgcaaccctggttccagtctgg

SEQ ID NO: 538136 - DNA, 83 bp, Homo sapiens
gaaataaaaatgaagttaagataagaagtaatctggaatcagaaagcactacgctaagggccaactcaccctatgcagcacag

SEQ ID NO: 538137 - DNA, 75 bp, Homo sapiens
agcgagcgatcgagcgagcgcgcgcgcgaaaactccgggcagacccatccctggaaggcatgtgtggcactgagc

SEQ ID NO: 538138 - DNA, 83 bp, Homo sapiens
cctcaggcctgcacggacggtgttggttgggggctgaaatctctttaatgatggagggaagcaggcagacgcgagtgtctcgg

SEQ ID NO: 538139 - DNA, 100 bp, Homo sapiens
tcccgtcccgcggtggttgctgctgctgccgctgctgctgggcctgaacgcagcacgagtacacgagacaggattgagaaaggagagattcaaattgtga

SEQ ID NO: 538140 - DNA, 100 bp, Homo sapiens
tcggagacacggtggaaacgcttatgaatatgcttttaaggctattaaccagggtggccttacatcagtagctgtcagagggaaagactgtgcagtaatt

SEQ ID NO: 538141 - DNA, 51 bp, Homo sapiens
gtccagctgctcgcccgtctacattgcttcgagagctgtgcccaggagtga

SEQ ID NO: 538142 - DNA, 90 bp, Homo sapiens
tcttcttcggcttcgaggagaataagtgcagtatgagctacatgtttgagtacccggagtatcaggcagcgtctatcccagactaccggg

SEQ ID NO: 538143 - DNA, 75 bp, Homo sapiens
gtcccggcactggctcttcagtcccttcaagtcactctggaatatagacccgtgatcgacaaaactttgaacgag

SEQ ID NO: 538144 - DNA, 100 bp, Homo sapiens
aaagatgaggatatcccactgttccccgtgcagacaaaatacatggatgtggtcaaggtgcacatcctcatgggctcctgttacaagaccaaaaaattcc

SEQ ID NO: 538145 - DNA, 83 bp, Homo sapiens
ctacgagctgtttctcatctttatactcttccagttactccacaggatccgctgaacataggatgttgccacaaaatctacct

SEQ ID NO: 538146 - DNA, 75 bp, Homo sapiens
gcagaagtcattttaaactatggacgactccgaggaacattgaggttgggagccacgtgtaccagtgtgtgttga

SEQ ID NO: 538147 - DNA, 100 bp, Homo sapiens
tcctacgaaagcctggtccacgccgtggccggagccgtgattgactggggcgactttggggtagaggcagtgtctgaggggactgactctggcatctctg

SEQ ID NO: 538148 - DNA, 100 bp, Homo sapiens
ctactcatctgtgagaacagaagctttatctgtgatagaattgctgcttaaaaaacttgaagctaaaaagacaaccccacttttgagcttcctgaaaaac

SEQ ID NO: 538149 - DNA, 83 bp, Homo sapiens
cccagccggacaccccccctcccttgacctacccggtttatttatgaaacagagcatcataatggcatagcagagttactgga

SEQ ID NO: 538150 - DNA, 100 bp, Homo sapiens
gtctggtcactcgctctcctctggggactgcagagaagcaggacctcgggccatggattcatgcccaagcacaaaacaacccatttaaagaagatgctcg

SEQ ID NO: 538151 - DNA, 101 bp, Homo sapiens
tttgaaactggacaatgtattactggactctgaaggccacattaaactcactgactacggcatgtgtaaggtgaccaagaatatggcccaggtgaccaaag

SEQ ID NO: 538152 - DNA, 100 bp, Homo sapiens
caagatggaggacaccacccaagctccatttatcttaaagaaattggacagcatatgaagacaggacatcacatatgaatgcacgatatgaagagcctgg

SEQ ID NO: 538153 - DNA, 100 bp, Homo sapiens
ggaataagtgctagtatcggacatgatcctcatcttttatacactcttagtgctgtccaggctcatgctgaagattcggttatggaccatcatttccgga

SEQ ID NO: 538154 - DNA, 75 bp, Homo sapiens
cggggctttcggagcagcggtgtgaggctgagggtaaaaagctgggattggtaggctgggtccagaacactgacc

SEQ ID NO: 538155 - DNA, 82 bp, Homo sapiens
ctcgggtggctctgaggtcgcctggggaccccagaaggcatctctgggaaaggacctggggctggtgaggggcccggaggag

SEQ ID NO: 538156 - DNA, 50 bp, Homo sapiens
aaatgaccctgaactggaccagcagggcagtcagggcgacagcaagaatg

SEQ ID NO: 538157 - DNA, 100 bp, Homo sapiens
cagtgtgagattcatggccacgcagtgctttgcaacgctaattagactcatgccacttgaggatattatcaactcactggtaacaacagtattcatgctc

SEQ ID NO: 538158 - DNA, 83 bp, Homo sapiens
tccggagtcagtcattttactgtcaagacatttcttcggcattctgcaacaggacagtactgcttttaaagagacagtgttag

SEQ ID NO: 538159 - DNA, 100 bp, Homo sapiens
cttcgtttttcgccgtcatgggcgcctcggccgccatggtcttcagcgtttgggagagcccatggtgactgcgtgagtggagcccagctgtgtggatgcc

SEQ ID NO: 538160 - DNA, 75 bp, Homo sapiens
taattttagggtcctttatatagaagggagagtagtaaggttcgtgatcctcgggccaattttgatcagtcccta

SEQ ID NO: 538161 - DNA, 100 bp, Homo sapiens
gtggttcttcatcgtgctattcctggtctacatcctgcgggtgcctttgaaaatcaacgacaacttgagcacaggccctcgggaccaaggatcacgtcat

SEQ ID NO: 538162 - DNA, 82 bp, Homo sapiens
atgtatacccagaagaaatgattgtggcattgagagaagctttgaacagttgaatttctgaatgaaaagctggaaaaaaggg

SEQ ID NO: 538163 - DNA, 112 bp, Homo sapiens
agagatcaaaggtgaagtcctctatctcggctactaccaatcagccttcgactgggatgatgaaacagccaaggttatatgtcaccacacccatctccattaggagccccag

SEQ ID NO: 538164 - DNA, 50 bp, Homo sapiens
tcgatggatagcattcactggaagaggacaatgcaataattgaaatttcc

SEQ ID NO: 538165 - DNA, 75 bp, Homo sapiens
gcggcggcggcggaggatgagcctgcagagcgcgcagtacctccgaacttactccagcaaaaggactgtaaacat

SEQ ID NO: 538166 - DNA, 83 bp, Homo sapiens
cccagaccctggagcctcagttggaagcagccgatccagcctgcggagcctgtggggcagtggtttgctaagaaggccatttt

SEQ ID NO: 538167 - DNA, 90 bp, Homo sapiens
tgagactttcacaataagagcagaggatggaacacttcagtgcattcaagacaccccaaagtcttgtactaagtcttctaaaagctccac

SEQ ID NO: 538168 - DNA, 99 bp, Homo sapiens
agtggatccatgccttagaagaaacaattcttcgacatactctccagcttcaaccacagacccctttgcttctgtttttgggaatgaatcatttggagg

SEQ ID NO: 538169 - DNA, 100 bp, Homo sapiens
caagcagttattaatgaagtttgtaggcacagaccgctgaatttggtcttcaggagacatatgaagcaaaaaggaatgaattcctgggagaactgcagaa

SEQ ID NO: 538170 - DNA, 78 bp, Homo sapiens
ggacagcgagcccttcaccctggtggagcgagacgcatcctggtggggaagaagttttaagggaacaagctggaggtg

SEQ ID NO: 538171 - DNA, 100 bp, Homo sapiens
gacacctcccaccatggacagcttcgacttagccctgctccaggaatgggacctcgagtcactgtgatttggtcgtattgggcgcctggtcaccagggct

SEQ ID NO: 538172 - DNA, 98 bp, Homo sapiens
gcaatggaattttggaacctacagagcagtgtgattgtggctataaagagggtactagatggaaacttgagaaaggactgcttattgataacagctaa

SEQ ID NO: 538173 - DNA, 100 bp, Homo sapiens
gaaaaatttggcagataatcattgggcaaaaacttgtgagggcgaaggtcgtattgaatggtgttgtaggccttcccttcttcttggtggtgttcttgag

SEQ ID NO: 538174 - DNA, 73 bp, Homo sapiens
aaagacccagtgaacaaatccgggggcaaggccaaaaagaagcaagctgagaaaatggtggcttatctccaag

SEQ ID NO: 538175 - DNA, 100 bp, Homo sapiens
cttactcgggagctggctgaagatggctactctggagttgagaggaacttcctgaagtgctccgaagacaacccgctctttgccggcatcgactgtgagg

SEQ ID NO: 538176 - DNA, 97 bp, Homo sapiens
agaccaccatcaacaatgagtacaactaccgctgctggaccacaaaccgctgccagaaaaatatcatggaaatcaggacagtggcagttggaattgt

SEQ ID NO: 538177 - DNA, 87 bp, Homo sapiens
aatgattttaaagttatgggactacaacagcagccacaggaaccttgaaacactcaccatgaaatggagcttacaggactggaagtt

SEQ ID NO: 538178 - DNA, 100 bp, Homo sapiens
cgtgtgcgaggagatcgccattatccccagcaaaaagctccgcaacaagatagcaggggacgtccagatcggtgacatcgtcacagtgggcgagtgccgg

SEQ ID NO: 538179 - DNA, 100 bp, Homo sapiens
tgcgcgtggaacggctgcttttggaagctcccctgggacctgtggccgccgcccacagaccatgctcctggggcgcctgacttcccagctgttgagggcc

SEQ ID NO: 538180 - DNA, 83 bp, Homo sapiens
cagctatgcatgctgcttttgatgtctgacaacgtggatcgttgttttgaaacgttgcaataaattgacagaccagaccctga

SEQ ID NO: 538181 - DNA, 98 bp, Homo sapiens
gagaaaagagaaatggagcaaaaacattccaccattcaacaaaagaaatgggacgtcggtcatcagatactgaagaagaaagcagaagcaagagaaaa

SEQ ID NO: 538182 - DNA, 75 bp, Homo sapiens
gccattgcgagcggcatctacctactggccttccactcccgagatgaagctcagacacagtactcgcagtgctta

SEQ ID NO: 538183 - DNA, 99 bp, Homo sapiens
ctctctgtgggcagcgtgctgctgacagtgaatgccacggaccccgactccctgcagcatcaaaccatcagaatttcgctaaggagtttgtgatcagtg

SEQ ID NO: 538184 - DNA, 100 bp, Homo sapiens
attgaagatgatgaaatggaaggaatttctcataaaagaagagtcagaaggaaaactttcgtttcagatttacttccgtaggtggcaagtgggagaaacc

SEQ ID NO: 538185 - DNA, 100 bp, Homo sapiens
gatgaattgtgctgatattgatattattacagcttcatatgcaccagaaggagatgaagaagttaaaatgcattttgctaatcagtcaatagaacctttg

SEQ ID NO: 538186 - DNA, 100 bp, Homo sapiens
ctcctagtagaaaaagttcttgggacaaacttcatttggttcttgattattacagacctctttctgaaaagcccggaattggtacaagccatgtttccca

SEQ ID NO: 538187 - DNA, 100 bp, Homo sapiens
cagaactgagcccaggccacagtaccctattcacgctctgtgcttgtgccaagactgctggagttaataccaccgacaaagagatggaggtgcttcactt

SEQ ID NO: 538188 - DNA, 82 bp, Homo sapiens
tcagttgctgctccgacgcggaccccagtaccaagaacactctgctccagccaaggtggtgagggcagctgttcctaaacag

SEQ ID NO: 538189 - DNA, 82 bp, Homo sapiens
ccgcagccccgggcacggcggaggcagcggagccctgggccatcggaccatggccaacctggagcgcaccttcatcgccatc

SEQ ID NO: 538190 - DNA, 100 bp, Homo sapiens
gtcatggcgagcacggtggtgaagtacctgaggctgtggaaaatctctgttctcacaaagtctccccaatgctctacaagcaactgcgtcaggcctgtga

SEQ ID NO: 538191 - DNA, 113 bp, Homo sapiens
tatactcctcccagtgacgggtctggagtgcgtgggggaccggctgttggcggggcgtgatggtgggcatgggtcagaaggattcctatgtgggcgacgaggcccagagcaag

SEQ ID NO: 538192 - DNA, 75 bp, Homo sapiens
ccgggcctgcggacgctatgcacagatgacatgaattggaatgctttagaatgggaccgagctgctgaagagctt

SEQ ID NO: 538193 - DNA, 75 bp, Homo sapiens
ctccctcgctcaggcgcgaccgcggcgttctctgaggtgctggagaatctggtaaaagcaccattgtgaagcaga

SEQ ID NO: 538194 - DNA, 108 bp, Homo sapiens
ctttcctgtccccaagccgttctagacgcgggtttttcttcccccagtccctcagctgctgctgctgctcaggaggtcagatctgccactgatggtaataccagcacc

SEQ ID NO: 538195 - DNA, 118 bp, Homo sapiens
tggttcaacagctccggctggaggccggactcaaccgcgtaaaatgagccccatgcacggttctatgcagctcagatagtgctaacattcgagtacctccattcactagacctcatct

SEQ ID NO: 538196 - DNA, 97 bp, Homo sapiens
ggaaccacgccctactgttgctcctactacgcttatattgggaatatcctctctgttatagttttgccgctggactcttccctcccttcccccaccc

SEQ ID NO: 538197 - DNA, 117 bp, Homo sapiens
gaggactgtgctgtgcctctctcgcccacattttccccaagcactctcaggaacctggcaacaggttctcttagaagcacaagatatggcagtgagagaccataacgtggaattcag

SEQ ID NO: 538198 - DNA, 104 bp, Homo sapiens
cagaacaacgtcaccgaaatccagggcatcccgggcgcggccagtggtgtcttcctggacttcccaagtaagaagcggaagaggagccgctggaaccaagacac

SEQ ID NO: 538199 - DNA, 75 bp, Homo sapiens
cgcgcgtgtgtgagcgcgccggaccaagcgggcccagaagcggccaagacaatgcaaactccagtgaacattccc

SEQ ID NO: 538200 - DNA, 75 bp, Homo sapiens
cagcctgatgtcatttaccaaatccataagggtatgacaaggcagcaaagattgctaagacagcacacaaaaatg

SEQ ID NO: 538201 - DNA, 75 bp, Homo sapiens
cggctttgaccgagaggctgctggagctcgtgtttggacgcaggtggcgagaggcgtgctgaccagtctgccagg

SEQ ID NO: 538202 - DNA, 83 bp, Homo sapiens
gccgccggagccgcgaggccaaggaagatcagttttcctgccatccaggctgctccctccttcagcaactcattcccacagat

SEQ ID NO: 538203 - DNA, 85 bp, Homo sapiens
caagaagactgagagtcaccacaaggccaaggcatcagacatcgatgagtcatcagtgatgcagctggccgagatgggtttcccg

SEQ ID NO: 538204 - DNA, 74 bp, Homo sapiens
gtggatttggggatggctataatgggtatggaggaggacctggaggtggccggcattcacaagaaggtggcccg

SEQ ID NO: 538205 - DNA, 75 bp, Homo sapiens
cgcgggtgtcgctgggctgtcggcctggaccttgcagccgcaatgggaccagttactctccacaagaaaattcac

SEQ ID NO: 538206 - DNA, 82 bp, Homo sapiens
ggaatgcatccaagagaatccctcaacatgctggccagctgcgggccgtccagcggctgtgccacttctacagcgccgtcat

SEQ ID NO: 538207 - DNA, 100 bp, Homo sapiens
ggaagttgtattcatcaataatgaaatgctgactaaggaacaaggtagtgggcagcagtcagtgacaggtgtaacctctgtggatgacagcaacagttac

SEQ ID NO: 538208 - DNA, 98 bp, Homo sapiens
aaagccagcctggcatactttgaagatcgtcatgggatgccttcaattaagttgcagagttctgatggagagatatttgaagttgatgtggaaattgc

SEQ ID NO: 538209 - DNA, 75 bp, Homo sapiens
ggatttcagcctgcacggatggtcttgaaacacaaatggtttttgcatttaaatcaaacggtattgagatggatt

SEQ ID NO: 538210 - DNA, 87 bp, Homo sapiens
gcccgagatgcagctgctgtccttgtgtccagcgggctgacgcacgaggcacacaggaaggaggtggagcaggtgtatctgcgctgt

SEQ ID NO: 538211 - DNA, 100 bp, Homo sapiens
ctggtaaacgcgttcaactggcggaagacctcagcaaagatgcaatctacacaatcccagtaaaaaacattcttgctgtggaaaaactggaagagagctc

SEQ ID NO: 538212 - DNA, 87 bp, Homo sapiens
gtctcaaactctatttgccaaaggaaacttgccttatcaccttcttgcttgcagacccttctcaggtgcagccagagagacactagc

SEQ ID NO: 538213 - DNA, 100 bp, Homo sapiens
gcgcgagggaggctacacgtgcgtctgccgcccgcgcttcaccgcccgtggaccgggagcccgtggaccgggagccggtggtgtgccaccccgacctgga

SEQ ID NO: 538214 - DNA, 136 bp, Homo sapiens
gacagcacaggtcacagtaaggccaaaaatgtgcatactcacagagttagagagagggatggtggttaaatgggccagggaaaactatcaccataacattggctcaccatattgcttacggttagcttctgctgat

SEQ ID NO: 538215 - DNA, 100 bp, Homo sapiens
ccaggccccaggcctcctgtgggacgccagtcaccagcaggagcagccaaccagcagcagccatcatggagcagcagctgtcgattcggcagaccgaagt

SEQ ID NO: 538216 - DNA, 100 bp, Homo sapiens
cgagaagctggacttcaggctgcacttcagctgcagctcctacttgatcaccactccctgctacagggagtgcctgcagggcaccatccgcaacagccag

SEQ ID NO: 538217 - DNA, 100 bp, Homo sapiens
cggctgcttgagatctgtttctggggcctctggcggtggcggcctggggcggcgcgacggctggtgcgcagacttaattcagtgcacaaatgagatgaat

SEQ ID NO: 538218 - DNA, 80 bp, Homo sapiens
atgattctcatcatggtggtaatactacagttgagaagaagagttgttcccatgactttgccgactaaagttctaagtgc

SEQ ID NO: 538219 - DNA, 83 bp, Homo sapiens
gcagaagccgagttcaacatcctcctggccaccgactcctacaaggttttgggatttgagattgacgcggtgaactctgtcca

SEQ ID NO: 538220 - DNA, 74 bp, Homo sapiens
cctgaaatacatccaggaaagacatggagattctcttaaaaaggcatctccttggaaacaatgccatctttgaa

SEQ ID NO: 538221 - DNA, 100 bp, Homo sapiens
gagtgctggggctttgaactccgagaggaggtggaccagaacttttggaactagtgccggcggctctccaccccccagaaaggcctaaagaatgtatttg

SEQ ID NO: 538222 - DNA, 100 bp, Homo sapiens
gtgctggtggcgttcgggccgcacccgcgcgctgaatcggagtgatagtgacagctccactctgtccaaaaagccaccttttgttcgaaactccctggag

SEQ ID NO: 538223 - DNA, 100 bp, Homo sapiens
aagtcttctcatttaaaagctcacctgaggactcacactgaaaataccagagcagagtgttcttcttctgcatgcctgcgcccacaatcccacgggagtg

SEQ ID NO: 538224 - DNA, 75 bp, Homo sapiens
cagccacatactatccgtttgttcaggaaccaccagtgacagagctgcacatggtccgtctaatgctgttggaga

SEQ ID NO: 538225 - DNA, 82 bp, Homo sapiens
catttttcagacagattttgaagatggaatccgtagcgcccagctcattgcctcagctaattatcaatgccctgtctcagag

SEQ ID NO: 538226 - DNA, 83 bp, Homo sapiens
gttttacaagatccactacctggacaccaccaccctcatcgagcctgcgcccaggttttaaaatcaaagatgggaaaatcgga

SEQ ID NO: 538227 - DNA, 100 bp, Homo sapiens
ggatgaagattcaccaaataagctatatactttggttacctatgtacctgttaccactttcaaaagacctctggtcctcaatcgagttcctctacgaaga

SEQ ID NO: 538228 - DNA, 83 bp, Homo sapiens
ggggccgctctgggatcccggccaccagcaattgtccgagatcctgaaggagctagacgagtgctacgagcgcttcagtcgcg

SEQ ID NO: 538229 - DNA, 83 bp, Homo sapiens
cttctggaagctactactacgtggtgcttggaaagttttcggctttgtgagaaaccttaccatcaaacacgatggccagcaac

SEQ ID NO: 538230 - DNA, 101 bp, Homo sapiens
ggggtcctggccatggcggctgcagctgctccgcctcccgtgaaggactgcgagattgagtgatgcttttgacatacaatatggagtagtggttattcgcc

SEQ ID NO: 538231 - DNA, 90 bp, Homo sapiens
ttatagctctgtatgagaaggacaacacctacttaggggctggctgtgggcaatggactctcctcctatgagcagaatgacaactccctg

SEQ ID NO: 538232 - DNA, 100 bp, Homo sapiens
ctgaatgatgctgtgggattttctagagtcattcacgccattgctaattcggctgtgaacccaggcaggtccctgttcctgctatacgccctcaagagct

SEQ ID NO: 538233 - DNA, 96 bp, Homo sapiens
cgggagacgagaagcctgaaaagtcgcagcgagctggagccgccggagggagtttggccgctggaaagtaaataaccttgcagttgagagaagaaa

SEQ ID NO: 538234 - DNA, 82 bp, Homo sapiens
caggtgatggataggagcaaccctgtaaaaccagccttagactatttttcaaacatccaagtggtaagaagttcagaagcaa

SEQ ID NO: 538235 - DNA, 98 bp, Homo sapiens
gcccaatgtctcctgcacgtgcaactgcaaacgctctttgttccagagcatggagatcaggcgccctgcgtccggcagaggaggcgagcatcccgctc

SEQ ID NO: 538236 - DNA, 74 bp, Homo sapiens
aacaaaaagaaatcattgaacacggcatcgagctggctctctttacctatgaaggcaacagcaatgacatccgc

SEQ ID NO: 538237 - DNA, 100 bp, Homo sapiens
cccaaaccaggagattgcgagggagcgatgcggtgcagcgcgaggcagaggaggtggacacggtggacgtctccggcgtgcccgcagaggtgctgtgcaa

SEQ ID NO: 538238 - DNA, 51 bp, Homo sapiens
tgacaacgtggatcgttgttttgaaacgtttatcaggtagaagatgtgtgt

SEQ ID NO: 538239 - DNA, 96 bp, Homo sapiens
gtcaaggagcccctcggctttgtgaaggtgctgcaatgggggccagtgtcattcaaagatgtggctgtggatttcacccaggaggagtggcggcaa

SEQ ID NO: 538240 - DNA, 97 bp, Homo sapiens
ggcccctcatgtaacctcagagatctgggcagttgtcgagatgtccacagaaggaggatttggtggtactagcagcagtgatgcccagcaaagccta

SEQ ID NO: 538241 - DNA, 75 bp, Homo sapiens
tgcacatccaggctggtcagtgtggcaaccagatcggtgccaaggattgaaagaaggtggcaagaggaagaagca

SEQ ID NO: 538242 - DNA, 100 bp, Homo sapiens
aggaaatacccagactgttactacaacctcgggcgtctgataacaacgaacttgatgcaagtgataggtttgccaaggtcagacctctcatcatccggat

SEQ ID NO: 538243 - DNA, 82 bp, Homo sapiens
ttttctgatgattcaaaaaatactttgtcttcatcacagctcttttgagacactggccaaaagaagaccctagacaagaaag

SEQ ID NO: 538244 - DNA, 95 bp, Homo sapiens
attgaagctttgttaggttctgctggtcacacaaccctcgggatcacacttatgattggcacaacgtgtttgattgctctgctatcagataaaga

SEQ ID NO: 538245 - DNA, 90 bp, Homo sapiens
ctgtgccaggaacaagggagtcctctgctcagcagacccgcccgtggctgcagcagtggtgtcccattttaatgactgcccagattccca

SEQ ID NO: 538246 - DNA, 101 bp, Homo sapiens
ggatgacgcaccagtcgtgcatgttcttggtgaagtcggccagcctgagcaagcggaggacctacgccggcctggccacctgcggcctgagacagtacagc

SEQ ID NO: 538247 - DNA, 50 bp, Homo sapiens
cagcggagccctgggccatcggtgtgatcccctgggcccgtttgttgtcg

SEQ ID NO: 538248 - DNA, 88 bp, Homo sapiens
cacctcatgcacctggaattggacatctcggactccaaaatcagagatgaagcactacccagtcttacccaagttcgaagagaaaacg

SEQ ID NO: 538249 - DNA, 100 bp, Homo sapiens
ccctggactccctggagaagcagatggaaaagactgacatcaatttgccctatcttacaatggattcttctggacccaagcatttgaatatgaagttgac

SEQ ID NO: 538250 - DNA, 100 bp, Homo sapiens
acaagcaagcatgcagcttactgcttgaaaggtgtcccgacccaggctaagcttgagcatggctgagcaggagcccacagccgagcagctggcccagatt

SEQ ID NO: 538251 - DNA, 75 bp, Homo sapiens
tcattgtattactcatcacagatcggaacggaggcctgtgtgtcaaatcaacagtgccttgacatctttccacac

SEQ ID NO: 538252 - DNA, 98 bp, Homo sapiens
gagaagtccagtttcttggaaggtcaacaccttcatgtccttcatattccccatggtggtcatctcggtcctgaacaccatcatcgccaacaagctga

SEQ ID NO: 538253 - DNA, 75 bp, Homo sapiens
aagcaaaaggcagactttttgatattcagagccttggaagtcaacactgtcaggccagtgggattccagtccaac

SEQ ID NO: 538254 - DNA, 96 bp, Homo sapiens
tcaagatagacattgaccccgaggagacggctactgcagcactggggtgtcagttgttggtccgacccagaacgcttcagttctgctctgcaagga

SEQ ID NO: 538255 - DNA, 100 bp, Homo sapiens
gatatgaagatcatgtcccaagatgccatgatgatcacggatgaggtcaagggtgcgcgactctgctctcaagaccccctggaggcccgccccctgcccc

SEQ ID NO: 538256 - DNA, 100 bp, Homo sapiens
aaggaagtaccaggacttgcacagggtctcagcttcttggaagtgaaagaccagctgctgctcatgtaccttatggatttgacccacctcattctggaca

SEQ ID NO: 538257 - DNA, 96 bp, Homo sapiens
ttaacatttgggagaaacacagccagaagcagcctgagggaactggcatgatagatgaagagttcactgttgcaagactctacattagcaaaatga

SEQ ID NO: 538258 - DNA, 100 bp, Homo sapiens
cagaaagcaggcgaacccgcggcgcaataacggtctggtgtggcagatgtggatagctggaccctcctgggtgcctctgcgttatgtcgtttggttgatg

SEQ ID NO: 538259 - DNA, 50 bp, Homo sapiens
agaagctgctctctgagaaaaagctggtaacaaggacgtctttgtgtgca

SEQ ID NO: 538260 - DNA, 100 bp, Homo sapiens
cttggattcagacgccgattcgcccaggtgtatgtggaatttgatgatcttgaatgggataaacgagagtgggttaaagtttatgaagatttttcaactt

SEQ ID NO: 538261 - DNA, 75 bp, Homo sapiens
atccgctgtcaacgacgccttgaagcgggacaaggacgcgatctatggatacccattgacaacatgaccaatgag

SEQ ID NO: 538262 - DNA, 83 bp, Homo sapiens
cgcgcggcggacgcgcccgggacgcgcggcggcaccgggaggccgggccgagcggtaaagagaaatgtgtatgaccttacaag

SEQ ID NO: 538263 - DNA, 75 bp, Homo sapiens
cctgggtcacttcctatcccatcccagcctcagttttctcattctgtccatgtgaatgtgctgtgtggaagagtt

SEQ ID NO: 538264 - DNA, 75 bp, Homo sapiens
ttcgcatgcctggggttacacctaaacaggtgacagatcagtcagtgaaagcatttgctgaacactgtcctgagc

SEQ ID NO: 538265 - DNA, 83 bp, Homo sapiens
gctaaacgtgccctactctgccccgggggagaggggcctagaagacagttcccaggaggccgaggacgaggcatcggggctgg

SEQ ID NO: 538266 - DNA, 82 bp, Homo sapiens
ggaccctgccattccggaggagggttacacatcattttggaatgactgtatatcatctggattacgtggctgtatgttaatt

SEQ ID NO: 538267 - DNA, 100 bp, Homo sapiens
gaaggcacagacgcacgggacaggagagcctgggcaagactggagaggtcattgattacaacggggaacgcacgctggatggttttaagaaattcctgga

SEQ ID NO: 538268 - DNA, 75 bp, Homo sapiens
gggcagtcctcgccggcgagttcagcgtacatgtcccagagcaagcacacggaggcccgggagctcatgtactcg

SEQ ID NO: 538269 - DNA, 123 bp, Homo sapiens
tccaataggacctcgggcctgctacgatgaaggcaaacgtgttgcagagaccatgtgctatgcctacatgaagcaggttgctgaaaagccaggagtcaaaatgactgagcgctttgactgcca

SEQ ID NO: 538270 - DNA, 75 bp, Homo sapiens
gtcaagggaacagatgagctcccaacccaagtcagcttgtggaaacctcgagggaccaatgtgggccgggagtgc

SEQ ID NO: 538271 - DNA, 75 bp, Homo sapiens
gttccccttgggatgtagtttttggaacatcaggtcatgcaagacaagataatctgccttccgaaaagagtgcag

SEQ ID NO: 538272 - DNA, 100 bp, Homo sapiens
gcaccgtgacctcaaaccagacaaacacagctccgaattgattccttctttagattagcacaacaggagaaagaagatgctaaacgtattaagagccaga

SEQ ID NO: 538273 - DNA, 100 bp, Homo sapiens
ctcatcgccaccagggtcttgggggcaccctaccaccaaggacatttattaacaggaatgctgcaggtacacggtcctcttctcgcacggcaatgccgtg

SEQ ID NO: 538274 - DNA, 83 bp, Homo sapiens
tggccagtgattcacgaaaacgcaaattgccatgtgatactccaggacaagggagctcagcctgaggaagaaaggcctggagt

SEQ ID NO: 538275 - DNA, 75 bp, Homo sapiens
tagtgaacgtggacaaagctgttgtctcagggagcacagaagctttactcatcagtcttaagtatggttgtttta

SEQ ID NO: 538276 - DNA, 50 bp, Homo sapiens
ctttcacagctcagtacctaagattggagctggagtgagccttccaggaa

SEQ ID NO: 538277 - DNA, 74 bp, Homo sapiens
ttcgtctcttacgtctgcggaagtgcagctgcctcagttcttagcgcaggtgaattttgaagtcttcatcagta

SEQ ID NO: 538278 - DNA, 90 bp, Homo sapiens
aggaagatcagtggatgggggtcaccgtccagagccaaggtccagggggcaaggtcgtggacctcaatacagtctccatcttcatatggt

SEQ ID NO: 538279 - DNA, 50 bp, Homo sapiens
cgaaagagaaacccggagggcgccgggctggagcagatccgcagggacat

SEQ ID NO: 538280 - DNA, 76 bp, Homo sapiens
tcagtgcctaccagacagcctttatctgccttgcctacaccgatttcttcctcccgctgctaagccgctgtccctc

SEQ ID NO: 538281 - DNA, 100 bp, Homo sapiens
atggatgaactgaatcatgattttcaagcacttgctctggagggaagagcgatgggagaggtgtaaagcaggccctctggctcaccaagaccaagttaat

SEQ ID NO: 538282 - DNA, 100 bp, Homo sapiens
gagactgtggagtttgatgttgttgaaggagaaaagggtggagagattcaaccagttagcgtgaaagttggagataaagttcttctcccagaatatggag

SEQ ID NO: 538283 - DNA, 75 bp, Homo sapiens
tattctaccaggcctggtgctggcctcctgtgatgggccttcgcactcccagttaagtgggcagaccaacatcca

SEQ ID NO: 538284 - DNA, 100 bp, Homo sapiens
cacctggacggctggggccacttgtggtcgccgggagagtggagactgctgcacggactctggaaccatgaacatatttgatcgaaagatcaactttgat

SEQ ID NO: 538285 - DNA, 87 bp, Homo sapiens
aagtatgaagaaagccatggtggagtatgaggtaagtaaggaggtctctgtaccatggctcgtacaaagcagactgcccgcaaatcg

SEQ ID NO: 538286 - DNA, 75 bp, Homo sapiens
gacggtttcgccggcagtctcgatgatgatgtgcctgcagatatggttgcagaagaatcaggtcctggtgcacaa

SEQ ID NO: 538287 - DNA, 51 bp, Homo sapiens
ctcatactctgttatagataaacaaggaaactactaaagttcctggggaag

SEQ ID NO: 538288 - DNA, 100 bp, Homo sapiens
gtgttcaatacacctcccacctgtcctcaggcatatcaaagggaagtagatcgagattcagatggtcacgtcagctttagagactttgaatatgccctga

SEQ ID NO: 538289 - DNA, 96 bp, Homo sapiens
gaaacaagccgtggaataggtgtatcaagtaatggtgcaaagcctgaagagttaaagttcctcgtaattttcgcttgttggaagaacttgaagaag

SEQ ID NO: 538290 - DNA, 75 bp, Homo sapiens
cggaagggtgatgtggctgcggcatcgccggcctcgctatggaagctgaatatggtgggcatgatcagatagatt

SEQ ID NO: 538291 - DNA, 83 bp, Homo sapiens
ggcaggagcgaccgtgaggacaggcttttgctctgcgacggctgcgatgcggggattttttatcaagcagaaatgcatcgaac

SEQ ID NO: 538292 - DNA, 82 bp, Homo sapiens
cctgaagccagtgggctggggactcacggccgggacactcagggcagctggtaggtgagtgctgtcctcggctcactttcct

SEQ ID NO: 538293 - DNA, 83 bp, Homo sapiens
cctggagcctcagttggaagcagccgatccagcctgcggagcctgtggggcagcttaccctgaaagaagcagatcccagttca

SEQ ID NO: 538294 - DNA, 90 bp, Homo sapiens
gagttcaagaagcattatggctattccctatattcagcaattaaaggagaaaatcctccacctccgggtttcataatgcatggaaatgtt

SEQ ID NO: 538295 - DNA, 95 bp, Homo sapiens
atgaaagctgtgctgcgcaaggctggaggcacgggccctggggaagagaagcagttcctggaggcactggaaatgtacaaagatgactggaacaa

SEQ ID NO: 538296 - DNA, 100 bp, Homo sapiens
ctggactctgaaggccacattaaactcactgactacggcatgtgtaagaaatttaagatccgcattgaagacccaccccgcagaaagcacatggtattcc

SEQ ID NO: 538297 - DNA, 50 bp, Homo sapiens
caggcatcatccgctatgcaattgggcctccttctgaagaaataaaaaca

SEQ ID NO: 538298 - DNA, 100 bp, Homo sapiens
atgacccaggcagaggaggaatcccgcaaccgaagcacaaaagttatcaaacccggtggaccatatgtaggtcctaggcctacttacaagcctccagtct

SEQ ID NO: 538299 - DNA, 100 bp, Homo sapiens
atcaaaaatacgcactaagtgtcatgatgaaggattcgcccaaaatgaggacttccctgcaggcagtggcactctggggacagaaggcccctccccacag

SEQ ID NO: 538300 - DNA, 75 bp, Homo sapiens
aaaggcaaaaatcccatctaccgcaactctcagttcgagagtaaagattaagatgttctacgaggagcatttgca

SEQ ID NO: 538301 - DNA, 101 bp, Homo sapiens
gaaacatgtgaacactcaagtgaagcaaaagccttccatgattacgatttccatttaaacagggttaatttggaagaatcttcaggagtggaaaactctcc

SEQ ID NO: 538302 - DNA, 120 bp, Homo sapiens
ctctcctgggaccctccaagagcactagtgtctagaaggcactaaggctcaggagcatctatcggctgcacgccaacatcaacacaggcgaagatggtctccaagcgcattgcccaggag

SEQ ID NO: 538303 - DNA, 90 bp, Homo sapiens
agaaaatcagaagtacagttttatctagccacatcttggagataaagtggagaattttcatgaagaacatgaaaagaatagtcaccatat

SEQ ID NO: 538304 - DNA, 82 bp, Homo sapiens
ctcaatatctgtcttcggtggactccttcggcagtccacccaccgccgccgcctcccaggcaatctgaaggcaaatcctgtt

SEQ ID NO: 538305 - DNA, 50 bp, Homo sapiens
gcctgaggaacatggaggccacgctaatgatggagtctcgctctgtcgcc

SEQ ID NO: 538306 - DNA, 100 bp, Homo sapiens
caattctgggtgactcagcttcgagcttgtgccaaataccacatggaaatgaattctaaggtttaactatagatcaacacatcatcttgcatctcatggg

SEQ ID NO: 538307 - DNA, 98 bp, Homo sapiens
tgcagacaagcgtgccgtgcgtgcttgtggccaagggaaggaagagaaatacccacctcggaaagacttggtccgagctgtgtccatccagacgggct

SEQ ID NO: 538308 - DNA, 100 bp, Homo sapiens
ttaggctggaagcgccttagaggagccatttttccaggtctctggacactatgggcacacgactcctcccagctctgtttcttgtcctcctggtattggg

SEQ ID NO: 538309 - DNA, 83 bp, Homo sapiens
aaataccaagcccgagaagacggaggaggactcagaggagtttttcagaagaagtgaagtcaagatgaagaaccatttgcttt

SEQ ID NO: 538310 - DNA, 100 bp, Homo sapiens
aagctcaagatggcggacaaaacgccaggcggatctcagaaggccagttcaaagcaactacacatatttctatatggacctttgggtctgcctctgatat

SEQ ID NO: 538311 - DNA, 83 bp, Homo sapiens
cagaccctggagcctcagttggaagcagccgatccagcctgcggagcctgtggggcaggttcatgcagcatcccaagaacttt

SEQ ID NO: 538312 - DNA, 100 bp, Homo sapiens
cagagtgcagagccgcctttccagcatgcaggggctgctcagagggacaagaagatgaggatgaagaggatgaagaagatgaagatgaagaagaggaaga

SEQ ID NO: 538313 - DNA, 97 bp, Homo sapiens
cgcgtcggcggccacggcagcgcccacggccactcccgccgcgcaggagtcgggcaccatcccaaagaagcgatatgatgcttcctggtgtgtttag

SEQ ID NO: 538314 - DNA, 138 bp, Homo sapiens
ctgttccaccttcagagcgtcacggcgtacgccctcatggggaaaatctccccggtgactttcaggagctcttgtccctggcaaagcgaaagcgcagtgactctgaggagaaggagccgcctgtgagtcagcctgcag

SEQ ID NO: 538315 - DNA, 82 bp, Homo sapiens
agcggagggagccccagacacggaaggatttgatgccctggatccctttattcccatcctggtttccaactataacccaaag

SEQ ID NO: 538316 - DNA, 119 bp, Homo sapiens
cgggtattggatgattggtagctaagactcccgaatacttcagaagtggggaaatggtggacgacatccttggagaaggcagcgacgacagcgacagcgagaagaggaggcctgaggag

SEQ ID NO: 538317 - DNA, 100 bp, Homo sapiens
tggcaattgacctcacctcaagcacacccaatggacagcatgcctcaccaagtcacatgacaagcagttcagagaagattcttcatgggaaatcaagttc

SEQ ID NO: 538318 - DNA, 85 bp, Homo sapiens
cggaccaattcgggaacaaatactactacatcccgcagtacaagaactggagagttggtactagaggacccaaagtacaactttg

SEQ ID NO: 538319 - DNA, 100 bp, Homo sapiens
gaagggaatggccaagggaaaacctcggaggtcgtcccaagcccctacccgggcggcccctgcgccccccagagggacccccaggaaatcaagagggctg

SEQ ID NO: 538320 - DNA, 100 bp, Homo sapiens
ctaaagcaccagtaaaatatggtgaactcattgtcttaggatattaataaggcagcggaaagaagaaatatgaatacggctccatcaagacccagcccca

SEQ ID NO: 538321 - DNA, 88 bp, Homo sapiens
cctgtcttcagatcttcacagcacagttcctgggaaggtggagccaccagcctctccctgaccctgcacttgatggaccagctggcac

SEQ ID NO: 538322 - DNA, 100 bp, Homo sapiens
ggtgtgtattactgctccgtggtctcagcccaggacctccaggggaacaatgaggcctacgcagagctcatcgtccttgctccatttatcttaaagaaat

SEQ ID NO: 538323 - DNA, 87 bp, Homo sapiens
ggagaagacgaaataacattagaatctgtgcttcgtggaaagtttgctgcagttgaatctggtatcaagtgtcactctctccaagtc

SEQ ID NO: 538324 - DNA, 50 bp, Homo sapiens
gacacaatgattgttcaggcaatttggagaaaactggttgtcctggatgt

SEQ ID NO: 538325 - DNA, 75 bp, Homo sapiens
atttctctccaggtgaagcagaaagggcagcatctcatcacggcagttgctgaccatctatttaagctgaagaca

SEQ ID NO: 538326 - DNA, 96 bp, Homo sapiens
tggttctgatgacaacactttaaaagtttggtcagcagtcacaggcaaatgatttgctgtcctctgaatacatagagagacacattgaacatggag

SEQ ID NO: 538327 - DNA, 75 bp, Homo sapiens
cagcctcgcgcgcccagttgccacctcgccgcttacaaacacgcagatggcaagaagattgatggcaggagggtc

SEQ ID NO: 538328 - DNA, 75 bp, Homo sapiens
cggcggcgcagttgcgagtgcagggtgagaaggactggcagaaatacgagactgctcggcggctgaaaaaatgtg

SEQ ID NO: 538329 - DNA, 74 bp, Homo sapiens
gaacagttaatcctcaatttaagcctgatctaacccctagaaacaggaaccggcgaatatttggcttgttgatg

SEQ ID NO: 538330 - DNA, 75 bp, Homo sapiens
accgagtgccccggggaagccattccccaccccccaggagttggtggtgaccccgcccagttggcccagaggatc

SEQ ID NO: 538331 - DNA, 83 bp, Homo sapiens
tagtagctgccttctgctctccagcgctctcagcaccaagtaactaggatttctacctcaaccgcgagacctatgcaaggacg

SEQ ID NO: 538332 - DNA, 96 bp, Homo sapiens
caagcacagctggcaaaaggtcttgtttaagtttgatgagaagagggcagtgcagcagctgagagcatgtggtgtcctggaaaccatccgaatcag

SEQ ID NO: 538333 - DNA, 100 bp, Homo sapiens
gcaagacactccaagtttggcatgaaagggccatttctgagcagtggaggtttcaagtaatccactaacaaccagttccaaattctgtcatcaaatcctg

SEQ ID NO: 538334 - DNA, 83 bp, Homo sapiens
atttggagtgtgcgtgcgcgccgagcgctgggattctgtccctgaccgtcttcacagtccaggtgatcttgactactgcttta

SEQ ID NO: 538335 - DNA, 58 bp, Homo sapiens
gcgcgagtgaggaaaggaggtactgtaggtcctcagaatggttggaatgaccctccag

SEQ ID NO: 538336 - DNA, 100 bp, Homo sapiens
ccgaaagccaacaaggaaatcctcgatatgccgctcctacgaggactgctgtggctccaggtgctgtgtgcgggccctctccatacagaggctgtggtac

SEQ ID NO: 538337 - DNA, 100 bp, Homo sapiens
cttctctagctctcagcggctgcgaagtctgtaaacctggtggccaagtacaaacacaagtgcgccttgcaaaaaaaaactttgacaaattgaagatgga

SEQ ID NO: 538338 - DNA, 98 bp, Homo sapiens
aggatacagcagaagcattagcagtgtgtgctgacttgataagaggcgcaaaagaaaagaatctcaaagtgaaaggaccagttcgaatgcctaccaag

SEQ ID NO: 538339 - DNA, 97 bp, Homo sapiens
tggctctgggagacctgctgcacatcgtcattgacatccctatcaatgtctacaaggaatctgcaagcagaatatgaccgtctaaagcagcagcacg

SEQ ID NO: 538340 - DNA, 83 bp, Homo sapiens
ggagggaagacgccctggtgctcaccaagcaagatgcatcactgtaagcgataccgctcccctgaaccagacccgtacctgag

SEQ ID NO: 538341 - DNA, 83 bp, Homo sapiens
cagaagggaggctccaagacctcatcaacaattaagctgtgctgttagcaacttgaagaaagtttcccttgagcttggtggca

SEQ ID NO: 538342 - DNA, 74 bp, Homo sapiens
tttgcttttgtgtattttgagagaatagatgactcaaaggaggattcctaccggaagcaggtggtcattgatgg

SEQ ID NO: 538343 - DNA, 99 bp, Homo sapiens
ctaaattcttcattgttggactattgtggttggcttctgttacgctaggaatatggcaaacgtgggcaaacgcagaggcgggaacaaactagccctcaa

SEQ ID NO: 538344 - DNA, 82 bp, Homo sapiens
gacgactcccttcacgtccaggccacctacatctcggagcctggagacacaggccccatccttcccaatggggacacttcag

SEQ ID NO: 538345 - DNA, 90 bp, Homo sapiens
gctcagagagtggcaacagtgtgaaaagactgaaaccggaccctgagccagatgacaagaatcaagactgccaggaactcctgccaccgc

SEQ ID NO: 538346 - DNA, 90 bp, Homo sapiens
caaggaaggcaagcctgcctgcttctgcatcgacagatagccgtcttcagcttgagccccatcactagcactgaacctaccagatgtatt

SEQ ID NO: 538347 - DNA, 83 bp, Homo sapiens
acccatcccaaatcagtctgaaagtacctgctatgaagtggcgctcctgaggaaggtgggagtcaatcattttgacaagtctc

SEQ ID NO: 538348 - DNA, 75 bp, Homo sapiens
cgccccagtgccgcggcgttctggagccgggactatatggccatttctgatgaactgcactacttggaggtctac

SEQ ID NO: 538349 - DNA, 75 bp, Homo sapiens
ccaggaagcgggtctctgccagttccccaacttcagctttagctgcagctgcctctgttcagccacttgcaacac

SEQ ID NO: 538350 - DNA, 100 bp, Homo sapiens
aactaagcgaggggatcctcatgagttaagaaacatatttctacaggaactgggaagtaacagccctccacagagaaactggaagggaattgctattgct

SEQ ID NO: 538351 - DNA, 75 bp, Homo sapiens
acatgctagagaaggaaagagagaggctgactcaacaggtacagcagttgcaaggagtttacagtttacaggaac

SEQ ID NO: 538352 - DNA, 100 bp, Homo sapiens
gctgtttctcatctttatactcttccaggctcttgtcaggatggtgaagctgttcatcggaaacctgccccgggaggctacagagcaggagattcgctca

SEQ ID NO: 538353 - DNA, 101 bp, Homo sapiens
caaggtggcctaccaggaggccaggggtgtcgccatgtctacgccttctccgtcggcagacctgctgggtctcggggctgccccccctgcccccgcgggcc

SEQ ID NO: 538354 - DNA, 74 bp, Homo sapiens
tgcaacacgtgcccctacgtgcacaacatcacccgcaagtcacgtgaactggaaatttcagtttattggcgtga

SEQ ID NO: 538355 - DNA, 49 bp, Homo sapiens
ttgagctcagccgacagggcaaagaggacgatgatgcttttgagcctgt

SEQ ID NO: 538356 - DNA, 100 bp, Homo sapiens
tgccgccggacgcctccattgtttgaccacaacaagggccggattctcacccagctggagaatgctggaggagaccttaaggatggccaccaccactatg

SEQ ID NO: 538357 - DNA, 51 bp, Homo sapiens
acccatattcttcctcacaagacgatgcttggaactgcagttggctttttg

SEQ ID NO: 538358 - DNA, 90 bp, Homo sapiens
agggcgccagctacttcatcgagatgttggcaaaggatgaactgatgaccatacttgagaaatgtttcaaggtttttaagtcttattgtg

SEQ ID NO: 538359 - DNA, 75 bp, Homo sapiens
ggctacgacttccactcatcctctgagtttgagattgtcaaggccataaaagaaatatgtgcagcgggggctaca

SEQ ID NO: 538360 - DNA, 80 bp, Homo sapiens
tagacctgaagacaaaaatccagaagtacaagcagtctgctatatgttctcctttcagccaagacctttcaccagtgcag

SEQ ID NO: 538361 - DNA, 76 bp, Homo sapiens
ttcccagcacgtttccctgaacctctccctgcaacaggagtacacagacttttgcagatcagatatttggaatatt

SEQ ID NO: 538362 - DNA, 76 bp, Homo sapiens
gatttgttaaggattccaagtaactcttatttggtgccagcgagatttcagattcctgtaaacctctaaagaaaag

SEQ ID NO: 538363 - DNA, 101 bp, Homo sapiens
attgaaactgtggctccaaactcgcctgctgcaattgcagatcttcagcggggagatcgacttatcgccattggagtgtccatgttagctgtagaagagta

SEQ ID NO: 538364 - DNA, 100 bp, Homo sapiens
cggcaagatgtccagtaatgtcccggcggatatggcaccaccttccatggtcaataatgaacaacgccagcatgcagagcacatattcttatcatttagg

SEQ ID NO: 538365 - DNA, 98 bp, Homo sapiens
tggacctggaggcgccgccgcgacagcagcagccatggaggacgagatgcccaagactctcttgaacatgcgaaagtgacacagacagagttgatgcg

SEQ ID NO: 538366 - DNA, 90 bp, Homo sapiens
cggctgaaacgaagagaagagagagagagagaagaaagggagaagctgaggagcacccagaggcctccattcaggctgttttttcagatg

SEQ ID NO: 538367 - DNA, 100 bp, Homo sapiens
tggggctgggctcgccagtcttggggacagtgtcagcaaagacaaggcactctctccacagcagccccaacaactagccctgcaccctgtctctctaacc

SEQ ID NO: 538368 - DNA, 154 bp, Homo sapiens
tcctactgtttctataaaaggaatacttacattgcccaaaccagtgcatttcaaatcttcagccaaggaaggttccaactgtacttttcccaacactggtgctcgtatcatgatgttcattggtggtcctgctactcaggggcctggaatggtg

SEQ ID NO: 538369 - DNA, 75 bp, Homo sapiens
tttgagctactgggctgtgagctgaacggaagcgtcagcccccgtagcacctctgttaccacgacttctagtgcc

SEQ ID NO: 538370 - DNA, 100 bp, Homo sapiens
gtgttccacacgggtgccggcatcagcactgcctctggcatccccgacttcagctgctggagccagttctgcttctcggcaaggagcgatttgctggtgt

SEQ ID NO: 538371 - DNA, 49 bp, Homo sapiens
acgacgaggaagaggaggtttctgagtgttcctttctgccgaaattctc

SEQ ID NO: 538372 - DNA, 50 bp, Homo sapiens
gggcttcgtccagatcgggaagggcattttccctgaagatgagatcccag

SEQ ID NO: 538373 - DNA, 83 bp, Homo sapiens
ccgacttcggaagtgttacgaagtgggaatggtgaagtgtgaattccacaaggcatatgcccagttggtcgatcttggcactc

SEQ ID NO: 538374 - DNA, 100 bp, Homo sapiens
gaacagctgcttcagtctgcaagtatggagctcaagttcttaattattcagaatgctgcggttttccaaggagttggatcagtcacttggtaccctctag

SEQ ID NO: 538375 - DNA, 96 bp, Homo sapiens
ccgagccagcgagccagcgagccgccgacccgccgagcaaaatggccatgttcgagctggtcacttccgaggcgtcctactacaagagtctgaacc

SEQ ID NO: 538376 - DNA, 153 bp, Homo sapiens
gcaccgccgaggacaaccgcagccacagcgcccacttctttgagtttctcaccaaggagctagccctgggccaggaccgattctgcccccgtggagactcccagagggaagcccccactcaacacccgctcccaggctccgcttctccgatgg

SEQ ID NO: 538377 - DNA, 75 bp, Homo sapiens
tacaaagtgaatgtcagtgagcgtctcgttcaatatgtcaagaagaacccagcaagtccctataaccttgcatat

SEQ ID NO: 538378 - DNA, 98 bp, Homo sapiens
gaaaattccccagtgttcgcagttgcaggtccaggtcaagacctcgtctccgttctcatagtcgtagcagtgaaaggtccagtcacagaagaacgcgt

SEQ ID NO: 538379 - DNA, 75 bp, Homo sapiens
cctggatgagcagagagctgtgaaatatctttggcttgcagccaacaatggggaatgtatcctgtcaggtataat

SEQ ID NO: 538380 - DNA, 87 bp, Homo sapiens
attttcctttggccaacgtgacagtttctacagcagtataatcactacaaatccaatgtggagattttcaaattgcaaccaaataaa

SEQ ID NO: 538381 - DNA, 100 bp, Homo sapiens
gtgtttgccatggaccccaggaatggttacatggagccccactaccggtaccgtgagggttttctctggaagcgtggccgggacaacgggcagtttttga

SEQ ID NO: 538382 - DNA, 97 bp, Homo sapiens
gctccacttggacaacaacaagttggccagggtgccctcagggctcccagacctcaagctcctccagatatgtgccactgtttccaacttttcatca

SEQ ID NO: 538383 - DNA, 75 bp, Homo sapiens
ggcaggagctgttggagctttgcagctgacctacatctcgaaggcagtttgaagagaacacatgaagaagaggat

SEQ ID NO: 538384 - DNA, 100 bp, Homo sapiens
tgagccgtaaccaggccaacccagaaaggctttctttctgagatttcacttccctgtcaactcttcagctcggtgctggagaatctggtaaaagcaccat

SEQ ID NO: 538385 - DNA, 100 bp, Homo sapiens
atgagtcgggccacgccttggtgggctggatgctggagcacacggaggccgtgatgaagggtttgagaaatactttaagaggagtggaaggaacacaaac

SEQ ID NO: 538386 - DNA, 75 bp, Homo sapiens
gccgccccgagcggagcctggaggtgccccctgataagtgccgatgtgccgtgggcagcatcctgagtgaaggtg

SEQ ID NO: 538387 - DNA, 98 bp, Homo sapiens
gggtgatatattcctgtattcttggacaagtacactggtgacatgtagctgtattcagagggacaagaatccttcaagaaacaggaaaaaactcctaa

SEQ ID NO: 538388 - DNA, 75 bp, Homo sapiens
gttctctcccctcactaccaatctgatcagattccatatggctctcatatcattccattccatctctgccaagat

SEQ ID NO: 538389 - DNA, 98 bp, Homo sapiens
cagaggttaatacaatccctggctttgatggagtagtcaagagggaagcctggagccacagatagaggacctgattagccggattaatgatcttcagc

SEQ ID NO: 538390 - DNA, 101 bp, Homo sapiens
tgccgctgccgccctgagtcactgcctgcgcagctccggccgcctggctccccatactagtcgccggctaatctagacgaaatccagatgagttcacctac

SEQ ID NO: 538391 - DNA, 89 bp, Homo sapiens
agcacgagtgcgggcagcagcagccccggggcccggagagagacgaggtcttgctacattgtccaggatggagaagtaggaattcttaa

SEQ ID NO: 538392 - DNA, 75 bp, Homo sapiens
tcattgacaaggaggacctgcacgacatgctggcctcgctggacttaattcagtgcacaaatgagatgaatgtga

SEQ ID NO: 538393 - DNA, 75 bp, Homo sapiens
ttttacaacttcttccagaaagaattcatcagcgatggcagtttcatagtattgacggagaactgagagaagacg

SEQ ID NO: 538394 - DNA, 100 bp, Homo sapiens
tagagatgtgatgttggagaactacagaaacctggtctccctagatcaattctgaattctatactggctggctagatcactggggccaacctcactccac

SEQ ID NO: 538395 - DNA, 83 bp, Homo sapiens
gttggcgagtagtagcgaggagacgaagggaaccagcggggaaactgaggctcggggtggagcgcaggattgtgggacgcgcc

SEQ ID NO: 538396 - DNA, 97 bp, Homo sapiens
acctgtgggtgtcagtggcgcaccatctgaaaacaacatcatgcagtggaatgcagttatatttgggtgattgagaactgtgttgctgctgctggat

SEQ ID NO: 538397 - DNA, 100 bp, Homo sapiens
agtccctagaactggcgattggacgatttgaaagtgaagatttgacctccatagttgaattgaatgatctggcacgggaccctccagcacagtgttcagc

SEQ ID NO: 538398 - DNA, 100 bp, Homo sapiens
ggacaagcagaagaagaaggtgtactcctttctattttaaagagccaagcctcagagatgtatgcagagaatatttccaaaatggtgggaagagaaaagc

SEQ ID NO: 538399 - DNA, 100 bp, Homo sapiens
acgcggatttggctggcgtcccgcgttcgatacaagaggctgttttcctagcgtggcttgctgcctttggtaagaacatgtcgtccatcttgccattcac

SEQ ID NO: 538400 - DNA, 82 bp, Homo sapiens
ccagatccatttacactttacagatcccatgacagattctgttgtcacgtctccttacagagtttgagcggtgctgaactgt

SEQ ID NO: 538401 - DNA, 100 bp, Homo sapiens
gatgacaatgtctttgttccaccagagtcattgcaggaagtggatgagttccacctcattttagagtatcaagcaggctttgtggatttgaccctccatg

SEQ ID NO: 538402 - DNA, 90 bp, Homo sapiens
gaatattcccatctcctgcctcctaatagctttgaggaaacttgggaaccgtgggtgctgttgccttggactgcaaagggaatgtagcct

SEQ ID NO: 538403 - DNA, 97 bp, Homo sapiens
tgaccgagagcgcgaatatcgtcatcgttagaaggtggcccatcccctgcacccctgcaccccaaacgcagcccgacgagcacgggggaggcggagc

SEQ ID NO: 538404 - DNA, 98 bp, Homo sapiens
gatttgaaaagtgtaatgaaaacaaatgacattgttcgatacagggtgtatgagctgtttcctctgcctctcctctacgttggaaaccacataagtgg

SEQ ID NO: 538405 - DNA, 75 bp, Homo sapiens
cttggccagccaactggacagcggagcacgatgattgataggagaacggcccttccagtgcaatcagtgcggggc

SEQ ID NO: 538406 - DNA, 100 bp, Homo sapiens
ttcctggcgcccgaactcgcccggccgggagccgccgcgggcaggacgcgcgctgcaggcaatgagaagcacgaccttcatgttacctcccagcagggca

SEQ ID NO: 538407 - DNA, 75 bp, Homo sapiens
tctggcccgaagccttcctttatcgctttcaggtctggatgtaccgactgcttttggaataaaaagattcccagg

SEQ ID NO: 538408 - DNA, 101 bp, Homo sapiens
cccgacactctgccaccttctccagcattgtgaaagaacctagaagtcggaatccggaagaagatcgaacatgacgtggtgatgaaagccagcagcagcct

SEQ ID NO: 538409 - DNA, 100 bp, Homo sapiens
cagtgttctccgctctcataggtcaggttctctacttaaaagacaatgactactgatgaaggtgccaagaacaatgaagaaagccccacagccactgttg

SEQ ID NO: 538410 - DNA, 75 bp, Homo sapiens
tcaactccaaccacgacggggccgacgagacctcagggacactgcaggtccgcctcctgggctgtgaacagttgc

SEQ ID NO: 538411 - DNA, 98 bp, Homo sapiens
atcatggcggctgcgctgttcgtgctgctgggattcgcgctgctgggcacccacggagcctccggggctgagcttggggcttccttggtcgcacccac

SEQ ID NO: 538412 - DNA, 100 bp, Homo sapiens
ttttcaggctggaataatttccaaacaactcagagatctttgtccttcaaggaaagtgaaaaggtttctgaatatccagcagtgattgtggagccagttc

SEQ ID NO: 538413 - DNA, 83 bp, Homo sapiens
tgggaacccaggccccgccgaggcggccaggagactgacaaactggaagatgagaaatctgggctgcagcgagagattgagga

SEQ ID NO: 538414 - DNA, 75 bp, Homo sapiens
gtgaatttccatgtcaacatagtcctgcatttgaagacatgctggagaacccactgaacagcacccagtggatga

SEQ ID NO: 538415 - DNA, 50 bp, Homo sapiens
ctgtggaggtgaagacattgtggaaacgggtatgcaggagattagaagcc

SEQ ID NO: 538416 - DNA, 82 bp, Homo sapiens
cccgggaggccgccggttttctccccgcttgccggggtggtcctcttccctttgtcggtatcatgatattagctggtttgac

SEQ ID NO: 538417 - DNA, 75 bp, Homo sapiens
ggaaaatgcaagaagactgatggagcaggcttgcaatattaaataacaaatgtggcaattattttggatctatca

SEQ ID NO: 538418 - DNA, 75 bp, Homo sapiens
agttgttgtctcggcagcgcccgcggagacgtgaagagctgtccagaccaaaacgaagaagacgttagccaaacc

SEQ ID NO: 538419 - DNA, 90 bp, Homo sapiens
ctaaagagcaagcctaactcaagccattggcacacagatctgttgggaaagataagaaagctattcaggcatcaattagacgtaataagg

SEQ ID NO: 538420 - DNA, 75 bp, Homo sapiens
atcattccaggcactcgccgcagcagccaagcaatggcaggtttagatcctgataagcatcttgggaaaaccctg

SEQ ID NO: 538421 - DNA, 74 bp, Homo sapiens
gccatatattgtacaatgaacagaggttggtccgagaagccaacaatggacatctacgagagggcaagtgccac

SEQ ID NO: 538422 - DNA, 83 bp, Homo sapiens
atggtgcaggcggtgggcaccttgcagacccagaccttcatgcagatactgaagtactctttcccagtgggactaagaaccag

SEQ ID NO: 538423 - DNA, 75 bp, Homo sapiens
ggggcagtttcctacatgctgttcttgtgatggattacagtttaaagacaatttctgtgatcaagttgtcatttg

SEQ ID NO: 538424 - DNA, 90 bp, Homo sapiens
agaacatgctcacatcttcaggtgcctcattcacatacgtcaaggaaattgagctccgggttgacaaatggtggggtaacagaaaggaac

SEQ ID NO: 538425 - DNA, 100 bp, Homo sapiens
aaaagagaaggtcaaacagctgaaggtatggcctcacaagtcttggtctacccaccatatgtttatcaaactcagtcaagtgccttttgtagtgtgaaga

SEQ ID NO: 538426 - DNA, 129 bp, Homo sapiens
atcaaaaccttccttggggatacaaacacaccttgaaccagattgatgaagtaaaggtgtggcctcagagtcacctaaggtcctgcgagtacaagggtcgacccccaaaggcaggggcagagccagcat

SEQ ID NO: 538427 - DNA, 82 bp, Homo sapiens
atcaccatgatgttggagcttcggcccggctctgtggtctgtgagtctgatgacaatctgggagtgtgctggcaggaagtgg

SEQ ID NO: 538428 - DNA, 100 bp, Homo sapiens
ggccgattcctggagcttctggactgagggccgcgatagggatgaggaagaaatgaccaaacgagatgacaaaagagatatcaacagatactgcaaggag

SEQ ID NO: 538429 - DNA, 82 bp, Homo sapiens
ggtgtctcgtgtgtgaacatcacagataacgaaggaggcccaacttcattcaataaggagcctgacggatttatcccagacg

SEQ ID NO: 538430 - DNA, 100 bp, Homo sapiens
tatgcccaccctccaactttgcgacggaaatgtgtcatcgaaagccaggagtaccagtaagtagccgggtgtcagcaaaaatccagcagcttgtcaatac

SEQ ID NO: 538431 - DNA, 83 bp, Homo sapiens
aggattatggatgaacgtaacagacaggaagcgcctcttggacgcgtgtgaccgatgcccagattgcacgaccacttctggag

SEQ ID NO: 538432 - DNA, 101 bp, Homo sapiens
ccacacgaaccgcaccaccagctggatcgacccgcgggacagggttgttgggggctttgacgtactgacagccatggagaatgtggagagtgaccccaaaa

SEQ ID NO: 538433 - DNA, 75 bp, Homo sapiens
gttggagaactatagcaatctggttttcttggtatcagaaagaatcttgtagttgcctgtggcagaagatccgac

SEQ ID NO: 538434 - DNA, 75 bp, Homo sapiens
ggaagttcttggctgcggggtgatggaacaacaactggtcaattcaggtgtccaaggcagctgcagatttgatgg

SEQ ID NO: 538435 - DNA, 100 bp, Homo sapiens
atcgacgtcgtgatccagaagtccagagctgaggactgcctgtttgcaggtattttaacagcagtgataacaatttacagtattggggattggattaccc

SEQ ID NO: 538436 - DNA, 75 bp, Homo sapiens
cctttcatccagagccagtgctgatataaagatgaagcgcagctgtataaagaagagcacctgaggaatcggcag

SEQ ID NO: 538437 - DNA, 89 bp, Homo sapiens
cagcgtgcctggttacagctgtttccacgtgcggtgctcgtcgggagtgatcacctaccctacagctgtttggggctcagctaagtgac

SEQ ID NO: 538438 - DNA, 50 bp, Homo sapiens
ggggaagcggcggcggcaaaggtactatactggcaattgctggagaagat

SEQ ID NO: 538439 - DNA, 100 bp, Homo sapiens
gccaagaaaaaaagacgaaagaagaagaagagcaaagggccttctgcaggttcctaaagagaaagatgaaatggtagagcaagagtttaaccggttgcta

SEQ ID NO: 538440 - DNA, 98 bp, Homo sapiens
aatacagctgcacctaaattctctgttccagaatctgtcatgaaggaaactctatatccaaaatatgaggccctaggcgagcccctttaccgggtgag

SEQ ID NO: 538441 - DNA, 101 bp, Homo sapiens
agagcacccaagatgaagatgctgttagcctttgcagtctcgacataagtgccccttcacagatgtagtcactacaaatcttaaattgcgaaatccatcgg

SEQ ID NO: 538442 - DNA, 80 bp, Homo sapiens
aggccagcggctcggcggtgagatcgtcagcgctgactccatgcaggacttctgcacggacctggccgtctccagtgcca

SEQ ID NO: 538443 - DNA, 100 bp, Homo sapiens
gaaagaacgacgaattgttctcattagggaacgaaaaggactgtaactcttgaccaggcaacagataatgcaaaaataattggaaaggcgatgctaaaca

SEQ ID NO: 538444 - DNA, 74 bp, Homo sapiens
gggcatcaccactctcatccagaccaccgtgggcatccggtggccttggataagggctgctcccaattccgcct

SEQ ID NO: 538445 - DNA, 85 bp, Homo sapiens
ggctctccagcaagaaggtggcaagaggaattacggaggttgagctggtccggaatccctaagccagtgcgtccaatgacgtgga

SEQ ID NO: 538446 - DNA, 72 bp, Homo sapiens
cacctggacaccttgttagatggaacctacaagcaggaaaatggctttgtaaagaagtttgaacctaaatct

SEQ ID NO: 538447 - DNA, 100 bp, Homo sapiens
agtcatttcacatcgaagccatgatttaaatatcggcgttaaggaactttatattgctgttggaatatctggagccatccaacatttagctgggatgaaa

SEQ ID NO: 538448 - DNA, 100 bp, Homo sapiens
cggggtcacccgctacgggaagcaggcctcgccacaggagaagacgttggttatgttgccagtgaaataacgatgagcgatgaggagcggattcagctaa

SEQ ID NO: 538449 - DNA, 93 bp, Homo sapiens
tgacatggaggatttgggagataaagctgtgtactgccgttgttggaggtccaaaaagcaccaagccaagtacacggagaataagctgaaggc

SEQ ID NO: 538450 - DNA, 145 bp, Homo sapiens
atggcccccagcatgggctcctctgtcaatgacgctttaaagagagataaagatgccatttatgggtactaggttttgacaagcttgcatcatgcgtgagtataagctagtcgttcttggctcaggaggcgttggaaagtctgct

SEQ ID NO: 538451 - DNA, 100 bp, Homo sapiens
caccacgagcgcctcttcaagccaggctccaagtagcctgtataccagcacggccagcatcaagctgtccagtcccgtgaaacgcccacggaaggagccc

SEQ ID NO: 538452 - DNA, 100 bp, Homo sapiens
agctggtggacaaaattttgtggcgctctgcgtcccctgaagatttcctcctctgatgctcctcttcagcctttggtatcctctccttctctgcaagctg

SEQ ID NO: 538453 - DNA, 89 bp, Homo sapiens
gtgacaatgaaattgaattgaagaaaattgcacgtaatcacccaaatgccaaaagtcattgtattcaaagaagaataagcaagaaagaa

SEQ ID NO: 538454 - DNA, 100 bp, Homo sapiens
gttccgtcatatccctctccacgacctcggtcgagcatgttcaccagggcccaggagcatgcaagttgtccccttggacaaacagatcacaatcatagat

SEQ ID NO: 538455 - DNA, 82 bp, Homo sapiens
tgcatatattttaagaaaaggcattgaggaactcaatcaaaccagtattcttttcacacagacgaagttatacggaagcgtc

SEQ ID NO: 538456 - DNA, 90 bp, Homo sapiens
gatgtcacccatttcatctgccaggctgctgtgcccaaggccggatcacctcaacagtcacgtcagacaagtgcactcaacagaacggcc

SEQ ID NO: 538457 - DNA, 100 bp, Homo sapiens
tcactcacaccttcttcaatccagaccgggagggttggctgctcaagctagatgagcctgaagtcttgacagaacctccaagtgccacaaccactactac

SEQ ID NO: 538458 - DNA, 96 bp, Homo sapiens
agctgcgccgcgccgcagtcggtcgtccgctggacaagcacgagggcgcgctcgagacgctcctgagctccagaaacatgacaaggaggactttcc

SEQ ID NO: 538459 - DNA, 100 bp, Homo sapiens
acttcaaagtgaaaatgacaacacatctcaagaaactcaaagaatcatactgtcaaagacagaacctcaagaaggcatgaagccagcccctgcagtgccg

SEQ ID NO: 538460 - DNA, 100 bp, Homo sapiens
tggatccagtgctactgctacaaataaggtggttgaccagattgacaccctgacctctgacctacagctggaggatgagatgactgacagctccaaaacg

SEQ ID NO: 538461 - DNA, 82 bp, Homo sapiens
actgttcaaaatcatgcgagtggggacagcttcttcctaggtattctcatgggagcagttataaaaattatagagtttaaaa

SEQ ID NO: 538462 - DNA, 75 bp, Homo sapiens
gggcaggatggctgcgttgacacgtcttatttaatccacatcatagggctggtgaattaccagatctctgtcaag

SEQ ID NO: 538463 - DNA, 100 bp, Homo sapiens
atgctgcaggaaatgaagggtcttggttttatattcatccgttctggaaactgagaagcgagggtgacaatgtgattgtagagaaggctccaaaagccag

SEQ ID NO: 538464 - DNA, 83 bp, Homo sapiens
ctctgaggagcggcgggcggcggcgcgcggacccaggcgcggatggcgaggccagcaggaagccatcttcgacaagagcacag

SEQ ID NO: 538465 - DNA, 75 bp, Homo sapiens
catactatccgtttgttcaggaaccaccagtgacagaattttctctgtgggcagttctttttgttttgggaagac

SEQ ID NO: 538466 - DNA, 98 bp, Homo sapiens
ttcaggaaaatgggttccatgagaagtgacatcctcctcgaatcaaaaggtcagtaacagatccaagagatggaaagagagtagcgctcaaaaagatg

SEQ ID NO: 538467 - DNA, 100 bp, Homo sapiens
cgagtctgaagtgaaccgcggcgacaagtacatcgccaagtttcagggagaagacacggtcgtgatcgcggaagacagtgacccgcccattcatgaaagt

SEQ ID NO: 538468 - DNA, 75 bp, Homo sapiens
ttacaggggctggtgaccgagcacgtcttcttactagacaagatagatcagatactgattcatcagcaaattgaa

SEQ ID NO: 538469 - DNA, 100 bp, Homo sapiens
aagcctcggtcactgcagccaccacactacgtgggctcataggcgaaagggaattgccttatttcgaatgagactttggactgtggacttctgagttgat

SEQ ID NO: 538470 - DNA, 96 bp, Homo sapiens
tcctcccgcccagcagttcctccacgcaggggctccggaatcgcccgaccgcacacgttgccaccctgaggttgttcgccgcaggacccagcggag

SEQ ID NO: 538471 - DNA, 75 bp, Homo sapiens
cacgcctgttgaagttttatgtaaggagcaactacagcgagccctagattttcgaaactcttcagctacttgccc

SEQ ID NO: 538472 - DNA, 95 bp, Homo sapiens
caaactacgttaagatgacgacagactcagatccaagtcaacagttgtatgctgatggtagcatatgtttagatatccttcagaatcgatggagt

SEQ ID NO: 538473 - DNA, 100 bp, Homo sapiens
tttgcattgactggaaacaatggcatttacagaaagagtcaacagcagtggcaacaggaattgaatgatctggcacgggaccctccagcacagtgttcag

SEQ ID NO: 538474 - DNA, 82 bp, Homo sapiens
agagggaggtgaccaaggaggagtacaaggacatcctgcgcaaggccgtgcagaagctgcatcttcctcccgtgaggctggc

SEQ ID NO: 538475 - DNA, 100 bp, Homo sapiens
taccagtttgcctgacttggactcagaaccttggatagaagttaaaaaaagacatcagccagccccagtgaaattgaggttgagtcagcagatactggag

SEQ ID NO: 538476 - DNA, 101 bp, Homo sapiens
ccctatgagtgaaagaattcaagaagtgagttgctgtttgctccataggcttacattagtgctaaggaaattcctgaagatgtagatatggaagaagaaaa

SEQ ID NO: 538477 - DNA, 100 bp, Homo sapiens
cgctccgaggagggaagcgaggcatttctggagggaatggtgggccgaggccctgaacgtgttccagcaggcggccgactggatcggcctggagtcgcgc

SEQ ID NO: 538478 - DNA, 74 bp, Homo sapiens
tgctcttctggatttagcatcaaccatctggatattgctccttcgacagtcattttgtttactcattcagccct

SEQ ID NO: 538479 - DNA, 100 bp, Homo sapiens
gggcgggtgaagatcggccactacattctgggtgacacgctgggggtcggcaccttcggcaaagtgaaggacgttgagaaagaagggccttaatggctgt

SEQ ID NO: 538480 - DNA, 83 bp, Homo sapiens
gccgcgggcggcgcggcccagctcgttccagctgatccagtgtctctttgggccacttcaggcggggccgagcaatgcaggag

SEQ ID NO: 538481 - DNA, 75 bp, Homo sapiens
ggcccggctcgacgccaatggatcaggatcctcatgaccagccaaagagaagaagaattaggaagcataaatcaa

SEQ ID NO: 538482 - DNA, 100 bp, Homo sapiens
gggccctctgcgacctggggccctgggtgaagtgctccgccgcccttgcctccaggttcgtgctggccgtgggcagcgccgtctttgatgccatgttcaa

SEQ ID NO: 538483 - DNA, 99 bp, Homo sapiens
aggcaagaactgaaaactctgagtgatgttcagaagtttgcagagataaatggtatgctatacctccggagcatggaaaacgacttgaaagactagctc

SEQ ID NO: 538484 - DNA, 50 bp, Homo sapiens
ctcccaaagtgctgggattgcagagtcaagaaaacttttaagctatttat

SEQ ID NO: 538485 - DNA, 99 bp, Homo sapiens
agacacgccgccgccgccgccgccgccggcgcggaaggacgaggctgaggcgagaaacgaggtgctttacaaggccaagtacggtccaatgtggatgtc

SEQ ID NO: 538486 - DNA, 50 bp, Homo sapiens
catcacaggggggagacacacgtgggtgaaacagtatccacagtggactc

SEQ ID NO: 538487 - DNA, 97 bp, Homo sapiens
gtagaggcagtggcgcttgagttggtcgggggcagcggcaggtggctccgctgccggatgggagtgccccagtgtgctggatgaagctggcgcatgc

SEQ ID NO: 538488 - DNA, 82 bp, Homo sapiens
ggagaaggaagcgagactcatacgcaacctcaatgggtcacagtaaatcgatccagtgtctgacggtgcataaaaacggcgg

SEQ ID NO: 538489 - DNA, 100 bp, Homo sapiens
atatgggaaacatgtctgcctctgatctcgatgttgctgacaggaccaaatttgataagagttgaaaacttcattgaagaaatgtgcacgtgaaacagct

SEQ ID NO: 538490 - DNA, 95 bp, Homo sapiens
tttgttaaggattccaagtaactcttatttggatgagagccactcagagtgggtgtcttgtgtccgcttctcgcccaacagcagcaaccctatca

SEQ ID NO: 538491 - DNA, 100 bp, Homo sapiens
aacctccggcgcgctgccccgccggaccgtgcatcttcatgatacagttaagaggaatcttgacagcgccacttcccctcagaatggcgatcaacagaat

SEQ ID NO: 538492 - DNA, 83 bp, Homo sapiens
ccgcgtccagcacctacgtcccgctgccgtcgccgccgccaccatgcccaagagaaagtttaagctatgaagaaggacatccc

SEQ ID NO: 538493 - DNA, 90 bp, Homo sapiens
ggagaaaccaggcagtggcaaacaggggctagtgacatttgaagatgtagctgtggatttcacccaggaggagtggcagtacctgaaccc

SEQ ID NO: 538494 - DNA, 87 bp, Homo sapiens
tccagcagcagcagtagctatggcagtggcagaagattttaattagaatttatccagttggcgaaggactttgaggatttccgtaaa

SEQ ID NO: 538495 - DNA, 75 bp, Homo sapiens
ccctcccctgcctccgaggcctgctggtgaacgaggtgttcaccatcgacgacaccctgcagaccctcaagctgc

SEQ ID NO: 538496 - DNA, 100 bp, Homo sapiens
ggggtctacaagatattgacactattattgatcatgctagtgttggatacaatgtctctttgctatatgaccttgaaaatcttccggcatccaaggattc

SEQ ID NO: 538497 - DNA, 103 bp, Homo sapiens
ggcccgcccaccagttcgcccgtccccctgccccgttcacaatgaccaagaatcgccttcagccctgtctggtgcatccttggcagaaagtgaggaggaaaac

SEQ ID NO: 538498 - DNA, 75 bp, Homo sapiens
agatctggagcatcggctgcaggggtcagtgatggagctgcttcaggaaacagagcaaatgcagcgttacaatca

SEQ ID NO: 538499 - DNA, 100 bp, Homo sapiens
ctttgggaagtggagcaccgatgatgtgcagatcaatgacatttccctgcaggggtcattgtcattcgaagatgtggctgtgggcttcaccagggaggag

SEQ ID NO: 538500 - DNA, 100 bp, Homo sapiens
ccagctccgctccatcacccacagctttgcgggaaggccttccgaagggccaagaccgaggataggtgtggccattggcgaccagatcctggacctcagc

SEQ ID NO: 538501 - DNA, 50 bp, Homo sapiens
gttcgatgacttcgtcacctatgaggttatgaagacagtatggagtttcc

SEQ ID NO: 538502 - DNA, 97 bp, Homo sapiens
gcgcagcatccctgccctgctgctgggcaacaagctggacatggctcagtacaggtatgaacgctgccgtccgtgccgtggtgcgcatgggtatcta

SEQ ID NO: 538503 - DNA, 98 bp, Homo sapiens
agagcgtgaccgagagcgcgaatatcgtcatcgttagaagcccgtgctttgaagaagaggagcacttcaaggtgctggtgaagatgaccgcccaggag

SEQ ID NO: 538504 - DNA, 99 bp, Homo sapiens
agaggagaatatccctgaaaaatatattttattcctgtggtgtaacctatgaaatagtatccaatataccaaaggacagtcattttgtttactcattca

SEQ ID NO: 538505 - DNA, 80 bp, Homo sapiens
gtcgggttattcgagtgaccgagaccgcggccgggaccgagggccactcttcacctccaccatgagcctggacatccaga

SEQ ID NO: 538506 - DNA, 100 bp, Homo sapiens
tgataaacaacagaggagaaaagcacggaacaattactgccaggggcacggtgcaccctgtgaccactgtcagcagtagcgacgtggagaaggcctacct

SEQ ID NO: 538507 - DNA, 100 bp, Homo sapiens
tccctgtgctttagactggagcaagacaaggcgcctctgtcgaagagccttctgctggtccccagtgccctctccctcctgctcgccctcctcctgcctc

SEQ ID NO: 538508 - DNA, 88 bp, Homo sapiens
ctgacgcggatccggtcgaaatagaaaacagtttcctccagcttatggaggcatatctgaggtgaatcaacctgccgaattgatgccc

SEQ ID NO: 538509 - DNA, 75 bp, Homo sapiens
ccagagctgcatcattccttggggcaaaatgtggacaagggatggaaaggcagatgtaaagtccctcatggcgaa

SEQ ID NO: 538510 - DNA, 74 bp, Homo sapiens
cttgggggtcagcatgctgaggatcctcttcctcctggaaatttgatgctgatccagttgaattatttgaaatt

SEQ ID NO: 538511 - DNA, 75 bp, Homo sapiens
gttgcaaaatattcaggagaccgtcgttgccttgtatttccagagaacaggccccagaggtgatccgaatgcagg

SEQ ID NO: 538512 - DNA, 100 bp, Homo sapiens
atcagtggaccacaacagacccagaaggtttttcttttcattagaaaccgcacagtaaaactggttagcattgatgcagcagaaatagcagatggcaacc

SEQ ID NO: 538513 - DNA, 100 bp, Homo sapiens
gaacaagactctcggctatggagtccccatgttgactatgtcttcagcagtggtgcagttatatgcagcagatcggaactgtatgtggtcaaagaagtgc

SEQ ID NO: 538514 - DNA, 100 bp, Homo sapiens
cgagcggaattccggcggctgccgtgactccagtgcaaattatagcatttgatgagctgaagactgattacaagaatcctatagaccagtgtaataccct

SEQ ID NO: 538515 - DNA, 98 bp, Homo sapiens
caaggactcagtgcttcggaaagccctgcatgacagcctgcatgactgttcacattgtttacaagtccttccactttctctctgaggcagaaagagca

SEQ ID NO: 538516 - DNA, 101 bp, Homo sapiens
ccggatggaaatcctaatgacagtctccaaattcgcctccatctgtaccatggatgaagtgtcctcttgctagcaccaataaaagatttctaattaacaca

SEQ ID NO: 538517 - DNA, 98 bp, Homo sapiens
gagatgtgaattccataaaaatggaagcatctaagaggcagtgaacactggcgcccacagcgaccgtggcagccatgtattacagctactacatgcta

SEQ ID NO: 538518 - DNA, 100 bp, Homo sapiens
agagcacttcccctttgccttcatcaggattatatgcgtcaggcaggagaagtgacttatgcagatgctcacaagggacgcaaaaatgaaggggtgattg

SEQ ID NO: 538519 - DNA, 100 bp, Homo sapiens
caacgacttcaagccacaggacttcctccggctgcagccctggtacctgacagtgtaaagaaggagctcctacaaagaataagaacattccttgctcagc

SEQ ID NO: 538520 - DNA, 100 bp, Homo sapiens
cttgcacagaaatctggaggcagtatcacctaacggttaaggctacctttccagataatccaacagctaaatcaccagtttccaagggcatttgcatcac

SEQ ID NO: 538521 - DNA, 75 bp, Homo sapiens
cctcgccgcttggaaagtgcagccttctacagagtgatagattcgtgtggcctttcaaatgattgtgaagtggtg

SEQ ID NO: 538522 - DNA, 50 bp, Homo sapiens
tgatggaacaacaactggtcaattcagggggctagagagctgaaggagag

SEQ ID NO: 538523 - DNA, 98 bp, Homo sapiens
cttgtccagttactctaacaagtctggagcttgtcgaccaggtttctacaaggcattggatggtaatatgaagtgtgctaagtgcccgcctcacagtt

SEQ ID NO: 538524 - DNA, 100 bp, Homo sapiens
tggacattgtgccctcaagctgtggcgctgcgatggtgactttgactgtgaggaccgaactgatgaagccaactgccgtagatgatgagctggagatcaa

SEQ ID NO: 538525 - DNA, 98 bp, Homo sapiens
gcaagagaaggcactcaagtttatgatcctgtattaaaagtaactctagcagtgtctgatcttcaaaagtccttgaactactggtgtaatctactggg

SEQ ID NO: 538526 - DNA, 100 bp, Homo sapiens
agatccctggaatatgaagagacacagtatggtagccacacccccaggcaaacgaatgcacgtgcagttgtccaccagccggcttaggactgcgcccggg

SEQ ID NO: 538527 - DNA, 50 bp, Homo sapiens
tgtggtccagggcagggccactccaggggatgccaacagacagatcagcg

SEQ ID NO: 538528 - DNA, 75 bp, Homo sapiens
gagcggcgccttctcagggctcgacagcctcagcaagctacccctctgccatgaaccagtccatcccagtggctc

SEQ ID NO: 538529 - DNA, 100 bp, Homo sapiens
aatgaaacagcccaacaggaaaaggaagcttaatatggattccaaagagcgtttggatcaggacggacgcttgctccatcaagtatgatggtgaaggatg

SEQ ID NO: 538530 - DNA, 90 bp, Homo sapiens
tctttatcatgatgtaacatcccttttgctcatccagatcttaatgatgccacaacccttacgcaaagtatcctagaaggaaaacatcac

SEQ ID NO: 538531 - DNA, 95 bp, Homo sapiens
ttgatccctaaaataatgagagaaaaggccaaagagaggtgttctgaacaagttcaaggttcaggaacaagtgcatcccactctctcagctaatg

SEQ ID NO: 538532 - DNA, 90 bp, Homo sapiens
gagttcaagaagaacactccagaggatgccctaaatgagaccagggaatcagagacaaagctgaaggagctcccaggagtgtgcaatgag

SEQ ID NO: 538533 - DNA, 98 bp, Homo sapiens
cttcgtgtcctgcgttccgggagcgccaacccctccagcggatccgaggtcgcaaagccacgctagatgagatccagacagtgcactctgaataccac

SEQ ID NO: 538534 - DNA, 100 bp, Homo sapiens
taaatctgtctgcagcccagacactgagagccgctttcatcaagaaaatcagaaagtgcagttgacagaagggtcacgttcacactacaatatcaattgc

SEQ ID NO: 538535 - DNA, 75 bp, Homo sapiens
cggaacaccattcttcgccaggccaggaatagaatagtgacagtggtacaggaaagaaagaaaaagaaaagaaaa

SEQ ID NO: 538536 - DNA, 75 bp, Homo sapiens
gtgccaagccatattcagcccatgaggaaatactatgtgaagtatgccggaaaacatttaaacgcaaagattacc

SEQ ID NO: 538537 - DNA, 96 bp, Homo sapiens
gccgggctggctgcggccgccctgggccgggccccaccggacgcgctgtgcttcgccgtgagccgctcgctgctgctgacgtgcctggtgccggcc

SEQ ID NO: 538538 - DNA, 75 bp, Homo sapiens
ccctgactaaagcttgaaatgctacatttccaagggcggcgactggcggcgcgatggacctgaccgggctcctgc

SEQ ID NO: 538539 - DNA, 75 bp, Homo sapiens
tttccctctccctttccctaaggtctataacttgacccaggagttcttccggcacgataaaccagtcaatgctga

SEQ ID NO: 538540 - DNA, 50 bp, Homo sapiens
acccttcattgcaagttcttatttgtaagcctccaccaggcggtgtgaag

SEQ ID NO: 538541 - DNA, 90 bp, Homo sapiens
tggagcggcgcagccggagtggggccgtgagatatgtcttgtcgttcaagacttgcaacactaaacgagaaattgacagcccttgaacgg

SEQ ID NO: 538542 - DNA, 82 bp, Homo sapiens
gcggttgtcagcccgcgaggcctcggaagaggagctgggcctggtgcacagagccagcatcacccgtgtccccttctacgac

SEQ ID NO: 538543 - DNA, 83 bp, Homo sapiens
gagaagatgaagaaacccagcttgatatgttgacctgcctagagctggaacgttacctccagagcgagccctgctatgtttca

SEQ ID NO: 538544 - DNA, 100 bp, Homo sapiens
gtactccaaaagtttcagtgatactctgaaaacgtattttaaagatggcaaccttctcaatgtgaagacgacacgaatgaagacccttatgataattgac

SEQ ID NO: 538545 - DNA, 100 bp, Homo sapiens
ccggattacttccaggatcatccgttcttccgaagatcctaatgaggacattgtggagagaaacatccgaattatgaggctgtgcagaaggtatcctgca

SEQ ID NO: 538546 - DNA, 98 bp, Homo sapiens
tgaacagtacccagggggagattcgtgtcggtcctagtcatcaggttatcaggacaccccatgggagagacttcgatgactctttagaaaaatgtgaa

SEQ ID NO: 538547 - DNA, 110 bp, Homo sapiens
tcatgatcgatacagtggcaatgttactatagaaaatattcatcaacctagagctgccaagaagcattcttcatctaaagataagttatccaagcattaggtgaacatct

SEQ ID NO: 538548 - DNA, 88 bp, Homo sapiens
tttatggaaaagatgcctcctgattccttgcagtctcatcctactcaagtgtggctctgtatccaacaacagtcttggagatctcatg

SEQ ID NO: 538549 - DNA, 98 bp, Homo sapiens
ccggatggagtccgtgagatgggttttagctgccgccggagtcgagcacaagcagcaggagacccagaatatctagagcagccatcaagaagtgattt

SEQ ID NO: 538550 - DNA, 99 bp, Homo sapiens
gagacgccatcagtttcgatggagtgaaattcagaaaggagagtcttgctttgtcgcccaggttggagtgcagtggcacgatctcggctcagtgcaacc

SEQ ID NO: 538551 - DNA, 82 bp, Homo sapiens
tgggctctgcctcaccacttgtctcagagaaactggcagacctttcacttcgtatccaacaaattgaaacaactctcaatat

SEQ ID NO: 538552 - DNA, 101 bp, Homo sapiens
gcaagaccgaattcagaaggatatcgacgtcgtgatccagaagtccagagctgaggactgcctgtttgcagatattaataaggcagcggaaagaagaaata

SEQ ID NO: 538553 - DNA, 50 bp, Homo sapiens
gattccacagtgtcctctggaaaatggattgaaagaaggtggcaagagga

SEQ ID NO: 538554 - DNA, 50 bp, Homo sapiens
cacactgcaggcctccgcgctcagtgtacgaggatgtcgtccaggaaaga

SEQ ID NO: 538555 - DNA, 132 bp, Homo sapiens
cccatgtcctatgactcagacctgggcacagcaaatgctgaggactcagaccagtctctgcaagaggcaattgaaggaacagactaaaaatcgtgtcctggaaggaaactacaggtactaccagggattttc

SEQ ID NO: 538556 - DNA, 100 bp, Homo sapiens
aggtccagccctgcgcagccgcccaccaagctgccagaagacgagccggacgcccaaggctacgagaggacgattgcaaagccaagtacaagaagctgga

SEQ ID NO: 538557 - DNA, 101 bp, Homo sapiens
ggtaggcatcatgttctgtttacttgaaccagtgagaagatggccgagcaagcaaggataagtgatattaccttccaaatgatgatggagaattttatcag

SEQ ID NO: 538558 - DNA, 101 bp, Homo sapiens
ctgaagctcattgccttcaaacccaaggacccagaccagccaaagaaacaaaaaatacttgtggaggagatggcccctctgaaaggagtacaggaacagca

SEQ ID NO: 538559 - DNA, 111 bp, Homo sapiens
cgagtagcagccgcaactggacggaggacatggaaggaggtaaaccgtcctattggcagggtacagatcttcactgcagacttatctgaaataccccgttgcaactgtaaa

SEQ ID NO: 538560 - DNA, 99 bp, Homo sapiens
cgggctttaggctggaagcgccttagaggagccatttttccagctgctggagccagttctgcttctcggcaaggagcgatttgctggtgtagacatccg

SEQ ID NO: 538561 - DNA, 89 bp, Homo sapiens
ttggtgccccggaggttctggagaacttggagactccgtgggaaggaggcttgtttaaactacggatgcttttcaaagatgattatcca

SEQ ID NO: 538562 - DNA, 99 bp, Homo sapiens
aattgttacaattggaaataaacctgtggagactatcggttttgactctattatgaaacagcaaagcagcgctggagagcgaggtggcttcaataagcc

SEQ ID NO: 538563 - DNA, 75 bp, Homo sapiens
tgaagaccccgacagtgaacagactaaggttcctgacggagacttcgcccttcatgtggtccaacctgggcattg

SEQ ID NO: 538564 - DNA, 100 bp, Homo sapiens
tggatcaaggtgctggccatgtcccagctggtggaatgcgtccccaacttttcggaggggaagaaccaggagggcggcctgaaggggcagaaaggggagc

SEQ ID NO: 538565 - DNA, 49 bp, Homo sapiens
gaagagtacaagctgatcctgtccacagcgtgctcttgctaaaactgga

SEQ ID NO: 538566 - DNA, 100 bp, Homo sapiens
ctttgtgtcccgagcgcccgagcactgtgagttagtggtggacctgtttgtgcgcacagtgctggtctgcctgacatgttaatggtgcaatgtaagaaac

SEQ ID NO: 538567 - DNA, 83 bp, Homo sapiens
ctgaaaatttacttctggatgccaatctgaatatcaaaatagcaggtgatgatgaacagtctacacagatggctgcaagttgg

SEQ ID NO: 538568 - DNA, 83 bp, Homo sapiens
ctttttcgtttttcggatgatgccttcaatactacctttatttccaccataggtacaatgactcttcttgcttttcacctaag

SEQ ID NO: 538569 - DNA, 100 bp, Homo sapiens
tatcgttggacccagaattgagatttacagccagttacttactcagaacctgcattttggtgttcgatagcatattatgaattaaatcagagggttggag

SEQ ID NO: 538570 - DNA, 51 bp, Homo sapiens
ctaagaatatgagaaacctgaatccagaagcatcagaagagctaacaattg

SEQ ID NO: 538571 - DNA, 95 bp, Homo sapiens
gtcttccccagctctgcagccacatactatccgtttgttcaggaaccaccagtgacagagtcaaggtcagcatctcctcgacgatcaagatctat

SEQ ID NO: 538572 - DNA, 121 bp, Homo sapiens
ggcggtcagagccgaacgcgagggcggcgcccggggactggagctgcgcgcaatagatttggtcgtattgggcgcctggtcaccagggctgcttttaactctggtaaagtggatattgttg

SEQ ID NO: 538573 - DNA, 74 bp, Homo sapiens
cctccgtctggatttccaaggaagaatttcctctgaagcaccgacatccacgacagcgatggcagttccagcag

SEQ ID NO: 538574 - DNA, 101 bp, Homo sapiens
ctggtcttcgatgcacaggagtggccgttatggaacgcaggcaggtgacagcagggacatgtctcgggagatgcaggatgtagacctcgctgaggtgaagc

SEQ ID NO: 538575 - DNA, 100 bp, Homo sapiens
aaaaaattcatctgggcggtatctggaacttgaaagttgaagttgatggtagtttaagtgatagccacgtatctcctccagccaaacgcactttgaaaca

SEQ ID NO: 538576 - DNA, 100 bp, Homo sapiens
cgaaggctatttcgccgctggcgtcaggactattttcacgttttaatgccgagagctgatgtagcccagcagttccagtatgctgtgcgggtgattggca

SEQ ID NO: 538577 - DNA, 74 bp, Homo sapiens
cccgaagacatctaccagatggctctcaaccagaccctccagaaagaaatccaggggcaccagcctcgcattga

SEQ ID NO: 538578 - DNA, 90 bp, Homo sapiens
cctacaacatggaccgggccgcggtccagaccaacatgagagacaatgtatgacaacatgtccacaatggtgtacataaaggaagacaag

SEQ ID NO: 538579 - DNA, 100 bp, Homo sapiens
agtgaccggggcatctccaacatgctggatgtcaacggcctctaaactcatcactgctatatatgcagattatgcccggagtttgaagaacctcggtttt

SEQ ID NO: 538580 - DNA, 82 bp, Homo sapiens
tcttgggactgggctcgatttgaggtggagatgacccctgagaagttcagtgtcttaatggagaagctctgtaaaaaggggc

SEQ ID NO: 538581 - DNA, 99 bp, Homo sapiens
ggcaccaaccccggcagtatgagcagctgctgtgacttactcgaagcctcgattggccacattttggtactacgccaaggttgagctggttcctcccac

SEQ ID NO: 538582 - DNA, 100 bp, Homo sapiens
gcactttgttgagaaggctgcagcagtctcgcccaagaacttcaaggtgaaaatgatcatgaagacatcagttctgctcagctgggagttccctgacaac

SEQ ID NO: 538583 - DNA, 100 bp, Homo sapiens
tgataacaccctgtaacagctgacacacgtcacatggagatgggcgtcaagaagttacctctcgtaccagccgctcaggagctcggtgtagaaactctat

SEQ ID NO: 538584 - DNA, 82 bp, Homo sapiens
aaggaaagaagaaggggaagaaaagaaggggaagaagatcaaaacccaccatgccccagcgctgctgggacatcgccttggg

SEQ ID NO: 538585 - DNA, 74 bp, Homo sapiens
tttttctggacttccaaatctcaagtgataagaccagcagaagcaggtgattttcttccacccccacctccacc

SEQ ID NO: 538586 - DNA, 50 bp, Homo sapiens
agctgaacattactcttccagaagagagcctgatccagggatgtctggat

SEQ ID NO: 538587 - DNA, 50 bp, Homo sapiens
tggacttcagaacacctcacaactttgtgaaatgcactcggtgatggaaa

SEQ ID NO: 538588 - DNA, 119 bp, Homo sapiens
gatgcccagcccataaccctggcacagtgcctggggctcccaagcagaccaccaagccagctcagcggggacccaggacacaactcagatgggaagttcatcgcccgggcacagcggat

SEQ ID NO: 538589 - DNA, 82 bp, Homo sapiens
caggagattgcgagggagcgatgcggtgcagcgcgagacttcagaacccactcctgagaacagcggagccaggcgcttagag

SEQ ID NO: 538590 - DNA, 83 bp, Homo sapiens
gcaacatttcaggaaaacagagaaagaagtgataggagggctctgtagcacttgcacctcctgcgccgccgccccccatccaa

SEQ ID NO: 538591 - DNA, 100 bp, Homo sapiens
tatcttaactgaggcacccaaaatggcattctgaaggcaaatcctgtttagacccaggcaaaggttcctggtgacccaggctctcatgagcagattgtcc

SEQ ID NO: 538592 - DNA, 97 bp, Homo sapiens
gatagagttcctgctgacttacgcttgtttgaggtaattctgaattgctcagctctgcagagtttattgcatttgctgagtagcccaaaggaatcta

SEQ ID NO: 538593 - DNA, 73 bp, Homo sapiens
ctgctattgtatatcacactaaaggaacgtcaaggtcgtgggaaataaaaggcagttctacacagactgcagc

SEQ ID NO: 538594 - DNA, 50 bp, Homo sapiens
agataaaagcccggatgaacttcaggctgctgaaaatatgacaagctgac

SEQ ID NO: 538595 - DNA, 50 bp, Homo sapiens
ctcccatcattgatgtggtgcgatcgcttttggaaaagaagaagagagtc

SEQ ID NO: 538596 - DNA, 75 bp, Homo sapiens
attacacagtgttaacaatgcatccacagaggaaaatgtttataggaggccttagctgggacactacaaagaaag

SEQ ID NO: 538597 - DNA, 99 bp, Homo sapiens
cggtgcccagcgttttcgcgccccaagagcaggaataccagcagttgcagaatgaagaagagtctggagaacctgaacaggctgcaggtgatgctcctc

SEQ ID NO: 538598 - DNA, 75 bp, Homo sapiens
aattctccaatacttacagtaatctcatattaacagttggatgaaaaatctgacaaacagtatgctgaaaattat

SEQ ID NO: 538599 - DNA, 100 bp, Homo sapiens
tactcttggacttccagactttcctttagatagtttagcagctgcggttcaaatcttgaatccacattcatctcaatggaaggatcctgccttaagtcaa

SEQ ID NO: 538600 - DNA, 75 bp, Homo sapiens
cctgggggattagccagaagcagagttcttggagtctctgcggagtccctgggccagatctcacagtgaaagctg

SEQ ID NO: 538601 - DNA, 90 bp, Homo sapiens
gctgactggaggctggcggacaggcgacagcgacctgcggcaggtatgtgtctgatttcaccagcactctccagtccatacgaaagaagt

SEQ ID NO: 538602 - DNA, 50 bp, Homo sapiens
aagacggccgagagccactgccagaatggggaaatggagagagaacctga

SEQ ID NO: 538603 - DNA, 75 bp, Homo sapiens
gattaatgaaactctagcaaatcaccctgagtgggcaaatggtggtgaccgcggtggcttcaaaaattttggtgg

SEQ ID NO: 538604 - DNA, 51 bp, Homo sapiens
tgttcacggctccatcgctgttagacccagatgatgtggtaccagttggcc

SEQ ID NO: 538605 - DNA, 75 bp, Homo sapiens
agggcacgaagcccccggcaaaggccaagactaaggggctgcagagcggggtggacattggcgtcaagtactcgg

SEQ ID NO: 538606 - DNA, 75 bp, Homo sapiens
ggcattgagggaagagtctgccaaggtcagaatggcggcagtggagcatcgtcattcttcaggattgccctactg

SEQ ID NO: 538607 - DNA, 74 bp, Homo sapiens
agctacagagacacaacccattgtttatgacccctcttcagtgaatgaaaagaagaggagggagcgggaagaaa

SEQ ID NO: 538608 - DNA, 100 bp, Homo sapiens
gcggcccgcgcggagcggacgcgcgtggcgctgcccggacagagcgggatgccaccagcttgtccaaagggaagttccaggagctcctggtgggcatcgt

SEQ ID NO: 538609 - DNA, 98 bp, Homo sapiens
gtcaatcagagcgtcctgtgcgcaggggaaatgctgtctgtagctgagcacttcctggagcagcagatgcacccaacagtggtgatcagtgcttaccg

SEQ ID NO: 538610 - DNA, 113 bp, Homo sapiens
gagagcgtgaccgagagcgcgaatatcgtcatcgttagaagattcagaatggacagtttagaagaacctcagaaaaaagtctttaaggctcgaaaaacgatgagagtgagtga

SEQ ID NO: 538611 - DNA, 83 bp, Homo sapiens
ggcgtttctgcgtctgccgtggacagcgaagctgctgcggttcctgagccggaggtaagaatgattgatgttggctgatattg

SEQ ID NO: 538612 - DNA, 101 bp, Homo sapiens
ggcccaagctactggtgccagaacacagagacagcagcccagtgcaatggggatatgagactttctactcggaatatcctgagtgttgcgtggatgtaaaa

SEQ ID NO: 538613 - DNA, 82 bp, Homo sapiens
cttggagagtcataacatatcactgactggaacgaatgatcacacactttgaaaggtccaaaatggagtaaggaatgggaag

SEQ ID NO: 538614 - DNA, 73 bp, Homo sapiens
cttgcagttgaaggagtataacacaggctcaaactgtccaggttgctgaagttgaaccacagtcacagccaca

SEQ ID NO: 538615 - DNA, 100 bp, Homo sapiens
aaggagcgcgtggaagccttcagcgacggagtctacgccatcgtggccacgcttctcatcctggacatctgctggcagccaggaggcaggagcagcgggc

SEQ ID NO: 538616 - DNA, 98 bp, Homo sapiens
ctgaggactgactggggttctgagactccctgtcccggaccgcaggagttcaaagaaggacgcagagccagccacacagccccacaggtcctctttag

SEQ ID NO: 538617 - DNA, 100 bp, Homo sapiens
gccgcatcaagtcaggcgagatctgcagtcttctcagtcacctacccgtcctcagacatctacctggtagtcaagggagagcctggggatgtacaggaga

SEQ ID NO: 538618 - DNA, 125 bp, Homo sapiens
gactgtgtcctactggagtgtgggcacatggttacctgcaccaagtgcggcaagcgcatgaaaagttactgtggcccatgtcctaaaaactggatatgttacaaaaataactgctaccaattttt

SEQ ID NO: 538619 - DNA, 100 bp, Homo sapiens
cttccaaagagaattccaaatcagaaaaaataagtgtgcccaaacaggctcttcgtcagattgggcagaggacgataagcactgcttcccgcaggcattt

SEQ ID NO: 538620 - DNA, 50 bp, Homo sapiens
gggtgcggcagtgcctggtacatggctgctctttggcgtaaattgcaatc

SEQ ID NO: 538621 - DNA, 75 bp, Homo sapiens
agagaggggagccggcgaggatcaaaatcttcgaaggaggatttctccacccaggtgaactcctccctcacctcc

SEQ ID NO: 538622 - DNA, 101 bp, Homo sapiens
tgaagaagaaatcatagacgatgatgatgatgacatcacccttacaggaggcaagtgaggcctatctggttggcctttttgaagacaccaacctgtgtgct

SEQ ID NO: 538623 - DNA, 75 bp, Homo sapiens
ccagggacccccagccccacaagccccagggtttcggggaagacgtggacggatactgcgacaccatcgtggctg

SEQ ID NO: 538624 - DNA, 75 bp, Homo sapiens
caggagttcatctacccggagaagcaggagccctactcggcagggcagcacgctgaggaaacgcaagatgtacga

SEQ ID NO: 538625 - DNA, 83 bp, Homo sapiens
tattgttacaattttttttcaagaactgccgtcttctttgcctgcactaatggatattgaggcaacaatgaactcggccctga

SEQ ID NO: 538626 - DNA, 100 bp, Homo sapiens
ccagagaccaggcgatggcatctgcactattcacagcggattcccaggggagggccccaaagctcatattcgtaagctggctgagtgcatccgctggtcg

SEQ ID NO: 538627 - DNA, 100 bp, Homo sapiens
acatttgacttggaagcaatgtttgaacaaactcgaagaacagctgtggaaagaagttgcaaaacactgggtgctgctgttttttcaaacgaaggaaaag

SEQ ID NO: 538628 - DNA, 75 bp, Homo sapiens
gcgcctcagcctgcgggagcccccggccggtgtggatgaggtcaccattgtcaacattttgaccaaccgcagcaa

SEQ ID NO: 538629 - DNA, 75 bp, Homo sapiens
gccggccgctagcgtcagcgccagccaggtaccctcttagtggcatgggtttaccaacatttaaagaatggatcc

SEQ ID NO: 538630 - DNA, 90 bp, Homo sapiens
aaagcgttggagaggtgttaccggaacggcggcgacaagggtgttcccgaactagagtgggtttgttggagactgaaccgttgcaaggaa

SEQ ID NO: 538631 - DNA, 100 bp, Homo sapiens
ctgccgcattgatagcagcgagagctggaggtgttgggtcgggagaccagccgttcgatcccgccgcagggtgactgtcgttcctacagttacgtgtgtg

SEQ ID NO: 538632 - DNA, 88 bp, Homo sapiens
cgaaagcggtgtccgggtgggtggcaggaggtggaaacagccgaaagaaaagcagccaggtgcacagccagagaacaacacatcacac

SEQ ID NO: 538633 - DNA, 90 bp, Homo sapiens
gcgggagcgggtaccgggcgcgggcagagcgcggcggcgcgggttttgatgaacacctggctttattcttgcaatgaagaaaggttctca

SEQ ID NO: 538634 - DNA, 75 bp, Homo sapiens
gacggataagagatattgatctgaaaagaggctttggttttgtgatgatgtcggagcaattccaataaagcactt

SEQ ID NO: 538635 - DNA, 96 bp, Homo sapiens
aggcgtgctggccggcgtggagagccgccagggctctatcaaggggctggtgtactccagcaacttccagaacaccttccaccatgaccacctcag

SEQ ID NO: 538636 - DNA, 76 bp, Homo sapiens
aacacaatgaacatgaagaccagcacagcctagatttggatttgcatctgctggtgatgatggaattgtagttgtg

SEQ ID NO: 538637 - DNA, 126 bp, Homo sapiens
cgagaccgtgaccgagagcgtgaccgagagcgcgaatatcgtcatcgttagaaggtcatggaatatcagcctggaggggacttgctgtcacttttgaatagatatgaggaccagttagatgaaaac

SEQ ID NO: 538638 - DNA, 82 bp, Homo sapiens
ttttcacttctgctgcactgctttcagcatgcaaatgaattttgataagaggcaacatgaagcaagaatccagcaaatggag

SEQ ID NO: 538639 - DNA, 100 bp, Homo sapiens
actgggactcggatttctctatctgatagaggtgtggtatctgtgcgctttgaagaagatgaagacaggaacttgtgtctaatagcatatccattgaaag

SEQ ID NO: 538640 - DNA, 100 bp, Homo sapiens
ggctggggctgcgacgagcaagcagcgggtcctggacgaggaagagtatatcgagatgagacaaaaggacccagtgaaaggaatgacagcagatgactaa

SEQ ID NO: 538641 - DNA, 74 bp, Homo sapiens
accagcaggatgatgacaaaggcaactgtgaggactaccttatgatttcctatgatcttaaatggggaagataa

SEQ ID NO: 538642 - DNA, 75 bp, Homo sapiens
gaccaagagggtgttcgactgctagagccgagcgaagctgatgtgctcgctctgcccatcttcaagcaggaggaa

SEQ ID NO: 538643 - DNA, 100 bp, Homo sapiens
catctattgttggaaaaaatcttctgtggattaactcagtggctcaacaggctgaagggaggaagtgagctcacaatgactcaagctgccacatagtgtt

SEQ ID NO: 538644 - DNA, 87 bp, Homo sapiens
ggaagcagggattccagtgccaagcaggaacgaatttcatatacacctccagagagcccagtgccgagttacgcttcctcgacgcca

SEQ ID NO: 538645 - DNA, 82 bp, Homo sapiens
atttgctacagcatcccacattaagtcaacggatatgctgcaggctgctagtcattatcgccaaaatagaaactctttgtat

SEQ ID NO: 538646 - DNA, 101 bp, Homo sapiens
gccgaggcctatttagtgctaatgactggcaatgtaaaacgcgaaccatggaacttctcacacagaactgggacctctcaaagaaactcaggattccggca

SEQ ID NO: 538647 - DNA, 80 bp, Homo sapiens
ctggcctgcggcgcctgggcgctctgaggaggcagtggagaaggtgacacagcacatccacggcctgtctgggaagaagg

SEQ ID NO: 538648 - DNA, 82 bp, Homo sapiens
agtgacatgtccagcatgaatcccgaataacctgcctagagctggaacgttacctccagagcgagccctgctatgtttcagc

SEQ ID NO: 538649 - DNA, 96 bp, Homo sapiens
ccaagttgtcgacgaccgacagggtggtgaaagagctagagccggtgcaggccacgcagaacaagacagggaagtatgtgccgccgagcctgcgcg

SEQ ID NO: 538650 - DNA, 75 bp, Homo sapiens
acacgaagtcaagcatttaattgacatcagaaacctcttgaccttgcccagggtgctgaaatgaaacacattctt

SEQ ID NO: 538651 - DNA, 51 bp, Homo sapiens
tttatcatcagacctcagaaagatatccaggaatgattttcagagtatttg

SEQ ID NO: 538652 - DNA, 100 bp, Homo sapiens
tgctgttgatgctggctttgttcccaatgacatgcaagttggacagacgggaaaaatagtagcaccagtactccaaagattcaggtttactcacgtcatc

SEQ ID NO: 538653 - DNA, 98 bp, Homo sapiens
gaaacacaagacagctgggggacttccatctggccaagatcaaggttcggaattactggacagctgatggcttgctgagacaaaggaaaacccactcc

SEQ ID NO: 538654 - DNA, 83 bp, Homo sapiens
ttgactacggcaaagtggccactcaggtgatgtgtccaatctagatcccaacttctcatttgaaggcaccaaactggatgtgg

SEQ ID NO: 538655 - DNA, 95 bp, Homo sapiens
agctccagtgtcccacttgcatcaagctgggcatccagggctcgtacttctgctcgcagtcctattttgtaacggattatgatccaaccattgaa

SEQ ID NO: 538656 - DNA, 85 bp, Homo sapiens
ggcgagaaagcacggggtgaaactgaccacagtgctcaccacccaccaccactgctatcatggtgaacttacttcagattgtgcg

SEQ ID NO: 538657 - DNA, 82 bp, Homo sapiens
aacagactgagcgcgtccaggcctgacagctctgcggctcgggccctgagagcagcccgacggccatggaggctgaagagac

SEQ ID NO: 538658 - DNA, 83 bp, Homo sapiens
atgcaatggtctcaatctctggaaaaacttcttgccaaccaaaaaactaatctggattcactccctctggttgatacccactc

SEQ ID NO: 538659 - DNA, 100 bp, Homo sapiens
ccagagcggcggaaggacagcacgagcaccccctctattatcctcccagtccacaacgctgaaccgtggctggacgaatgtttgaggtctgttttgcaac

SEQ ID NO: 538660 - DNA, 82 bp, Homo sapiens
acaagcccatgatcctgctggtgggccagtacagcaccggcaagaccaccttcatcagcctcccgcgacgatgcccctcaac

SEQ ID NO: 538661 - DNA, 100 bp, Homo sapiens
cctgacggcgtgaccgacccgagccggactcgctcagcagcagcctgaaaacttgctacaagtatctcaatcagaccagtcgcagtttcgcagctgttat

SEQ ID NO: 538662 - DNA, 60 bp, Homo sapiens
ggcgcccggatgggcagctgaggaagatccgttcagtgtccatcgtcctgaaactctttt

SEQ ID NO: 538663 - DNA, 49 bp, Homo sapiens
gcagtatcaacggagtctccgggggtttaatgaagaaattcattcgatg

SEQ ID NO: 538664 - DNA, 90 bp, Homo sapiens
tccttacttctagagtctggaatatttaaaaagaatgcaccacagtttaaagcaaatcatgctgaacttattttagctaacccgagtcca

SEQ ID NO: 538665 - DNA, 88 bp, Homo sapiens
tcgttatgacagccaaaaagcagagtttgctggacaaaggagtgatactacataggctgccattcgctgcaaggttgaacacccccat

SEQ ID NO: 538666 - DNA, 74 bp, Homo sapiens
cgtgaccgagagcgcgaatatcgtcatcgttagaaggttttgccagatcgaagtcatcctaaactgctgatgag

SEQ ID NO: 538667 - DNA, 100 bp, Homo sapiens
gaattagcaaatggagaagtgggaggcggtggaagaagatatccccatagcgaaagaacggacacatttcaccgtccgcctgaccgaggcgaagcccgtg

SEQ ID NO: 538668 - DNA, 75 bp, Homo sapiens
gaaacatgtgaacactcaagtgaagcaaaagccttccatgattacatcttgtagaaaatttcagctgtagccctt

SEQ ID NO: 538669 - DNA, 82 bp, Homo sapiens
ggccaaatctctacaaaagattggaccaattctagataccaatacagctattggaatcagatgcaaagatggtgttgtcttt

SEQ ID NO: 538670 - DNA, 104 bp, Homo sapiens
tgaagacttgctagttaggattttattactggcagcatgtatatcttttagtacaggggctcaggtccaggtggcaggggatatgctacccaactcaactgagc

SEQ ID NO: 538671 - DNA, 100 bp, Homo sapiens
tctctgtcttggcacctgcaggaaacaagctcctacttccagaaaaagtgctcctgggactccaggataccaggctctgactacacccggataacagaag

SEQ ID NO: 538672 - DNA, 96 bp, Homo sapiens
ataacactggagatcagcaccaaatcccacagaggcatctgaggtacaggtttgcagattccgccagcagcacagcaagctctacagatgagtggc

SEQ ID NO: 538673 - DNA, 83 bp, Homo sapiens
ctggagcccagcaacactcaatcctcctcctactgaaccggtttcatgtggacaggttcatctctaacaagtatttagtgaaa

SEQ ID NO: 538674 - DNA, 73 bp, Homo sapiens
ggggaaacgaaaattttcagcaggttattgttcaaaactacaactccattttgacactttctcacttgtaccg

SEQ ID NO: 538675 - DNA, 74 bp, Homo sapiens
ccctgaagagggaagacacgcggaaacagcatccatgagtatgttttctgatttcctgcagtcttttctgaagc

SEQ ID NO: 538676 - DNA, 80 bp, Homo sapiens
atttcttaacagccaaactgaatgcagaaaagctcaaagatttcaaaatcaggtgtggacactgccagcggctgcagccg

SEQ ID NO: 538677 - DNA, 100 bp, Homo sapiens
actgctggcagtgcccactgaggaggagccggactctgctgccaagagtggagagcgcaggctggattaccaggaggggcccccgggagtggagatttcc

SEQ ID NO: 538678 - DNA, 98 bp, Homo sapiens
agcagcatggcatttcagtcactggtttgcagagtccagtgaggctgcggcaggaagagaaacggcaacaggaggaaaccaaccgagtgaaagagcgc

SEQ ID NO: 538679 - DNA, 100 bp, Homo sapiens
agtcctggctggccaagttactggagccgatatcttgtggaagccctgaagccagagtatgtggcacctcttgtcctttggctttgtcacgagagttgtg

SEQ ID NO: 538680 - DNA, 50 bp, Homo sapiens
agagccctgcgatactattatgacaagaggctgaggggatctggcggtgg

SEQ ID NO: 538681 - DNA, 76 bp, Homo sapiens
tgcatttactgtcatcaagaactgtaatacttctggaatccagacagaatgtgatgagctactcctgggtcatgag

SEQ ID NO: 538682 - DNA, 90 bp, Homo sapiens
cctgttccaccttcagagcgtcacggcgtacgccctcatggggaaaatctccccggtgactttcagccggctcagttcggggaagctgca

SEQ ID NO: 538683 - DNA, 82 bp, Homo sapiens
tgcaagcgtcttcaaaggagccccacatgagcaggaggatgcattagcacaacaggcctttgaagaggctcggagaaggaca

SEQ ID NO: 538684 - DNA, 99 bp, Homo sapiens
tcggacagcggggccctgtctgccctgcagctagaggccatcacctacgcctgccagctatgccactgatctggtagtctgcgtggctcttggatgtga

SEQ ID NO: 538685 - DNA, 100 bp, Homo sapiens
gcatggaggagctggtgagcctcatcacacaggatccgcccctggacatggaggagaaggtccgcttcaagccctccctatcctgaagacattagctgag

SEQ ID NO: 538686 - DNA, 88 bp, Homo sapiens
ccctttcatcagaagacagagctttaaaatgcagcatgacgtatcccagactttactcaaggcaacactggacagtgttgtagaagaa

SEQ ID NO: 538687 - DNA, 50 bp, Homo sapiens
aaaggaagtaccaggacttgcacaggattatgtgctggccgtggaggcgt

SEQ ID NO: 538688 - DNA, 87 bp, Homo sapiens
tccatctcgcagtacagcggcaagatcaagcactggaaccgcttccgagaccttgccttgcgccatggactggcagccagacgagca

SEQ ID NO: 538689 - DNA, 89 bp, Homo sapiens
gtcagccttagcgtcactgtcgtcctctgcggcctctgccactggtgtcagcgcaaactgagtcctccctgctgctgtgtggacgacac

SEQ ID NO: 538690 - DNA, 76 bp, Homo sapiens
caactccaagctacagattccaatacctcattccctaagacttcaccatgaattttcaacccatgaaagtgcagcc

SEQ ID NO: 538691 - DNA, 100 bp, Homo sapiens
actatattggaaaaacctcaaaatatgatggtggttggacagtcagcatttgcagactttgggtcaacatatttcactggcacctattcacaagcttgaa

SEQ ID NO: 538692 - DNA, 83 bp, Homo sapiens
ttgagccagtccagaccctgctgctgtcttcaaagaagatgccttcaattaagttgcagagttctgatggagagatatttgaa

SEQ ID NO: 538693 - DNA, 100 bp, Homo sapiens
gagcgcggaatcggggagcgtccggagctagctggatcctctaggcagccactgccaaaaaatatggtgtctcgtctttgtgaatctaaaaaggtttgtg

SEQ ID NO: 538694 - DNA, 75 bp, Homo sapiens
aaactcaacttgctgggccggtgcaactattcgcagtccgagcgggtgaaaagttcggaccctttgctggagaga

SEQ ID NO: 538695 - DNA, 90 bp, Homo sapiens
cttttccgttgccggtgccggcctagcgtcctggaattacttcaatcaaataatgctctaccacaagaaaatggcctctcacctggggcc

SEQ ID NO: 538696 - DNA, 83 bp, Homo sapiens
ctaaagcagcgtgcgttcagccctgggagaaattcactgcatgtaactatgaccacgcatgattttatcagaagttgattaga

SEQ ID NO: 538697 - DNA, 90 bp, Homo sapiens
atcgatagctatgagaaggacgttgccaagattaaccaggacccccaggtctatgttaacaatgaatgggcaaccagtgttggggaagga

SEQ ID NO: 538698 - DNA, 100 bp, Homo sapiens
tgattggaagtttcctgaggcctccccacccatggagaactacacgatgaggcgagtggtacgacagagcaagtttcggcatgtatttgggcaagcggtg

SEQ ID NO: 538699 - DNA, 97 bp, Homo sapiens
atctgaagtatcattggccttgaggaagaagacatgctctacagtgctcagtctttgagtgtatgtggtagaagaccaaagaagagatgagctagga

SEQ ID NO: 538700 - DNA, 90 bp, Homo sapiens
gacgtcatcatgctgaccaccaatcagatccgtaaggatccctttgtggccttccacatcaacaagggccttgtgaagaagtatatgaac

SEQ ID NO: 538701 - DNA, 95 bp, Homo sapiens
taataatatacctctttcatttcctaattgactatgctgaattggtgtttatggcaatggatataccaaatgaaactttgacctttgaggatggc

SEQ ID NO: 538702 - DNA, 75 bp, Homo sapiens
agaaggttctagatgctaacaaggtccagatggctgtggaggccaagtttgtccaggacaccctgaaaggagacg

SEQ ID NO: 538703 - DNA, 82 bp, Homo sapiens
aacgagaggaaagaagtcccttatcacggtcgcaatggaagaagagatcgccgcgctggtcattgacaatggctccggcatg

SEQ ID NO: 538704 - DNA, 88 bp, Homo sapiens
aattttggaccagctttttcgtttcatttcctcactttgcgttgtagtcgtctcaaagggacgctgaccggaaaggagattgagattg

SEQ ID NO: 538705 - DNA, 75 bp, Homo sapiens
tgtgatgtttgcctggtctatagttggtatttcagtgtctgtagacaagatggaatcatctccatttaatagacg

SEQ ID NO: 538706 - DNA, 100 bp, Homo sapiens
gaactttttcaacaaagcaaggtcaatatgcagaaaatgctcccaggctcagccgtgctgctcttcctggccatgccaatgctcaccattgggggaatcc

SEQ ID NO: 538707 - DNA, 100 bp, Homo sapiens
taatgcttgatgggatgccggcagtcagagtcaaaacagagcttttggaatctgaacaaggggcagtaacagagaagaattttgaaacaaaagattttcg

SEQ ID NO: 538708 - DNA, 75 bp, Homo sapiens
tactttaagaaggataaagtaaatggagacaagctgtggttggttcttgagttgctgatagtccaactccaccgc

SEQ ID NO: 538709 - DNA, 83 bp, Homo sapiens
ccgccgccgcctctccttgctgcagccatggagagcatcagatccatgctgctgctgactcggagccccacagcttggcacag

SEQ ID NO: 538710 - DNA, 82 bp, Homo sapiens
ccggcgagggcgcgcggctggtgtccgccccgcccgaaaggtttggtgcacctcgatttggaggaagtagggcagggccctt

SEQ ID NO: 538711 - DNA, 100 bp, Homo sapiens
cctgcgaccccagtcggtgctccggggaggtcacctgacgaggagggacaagaatccttcaagaaacaggaaaaaactcctaaaacaccaaaaggaccta

SEQ ID NO: 538712 - DNA, 101 bp, Homo sapiens
gtttcttcatctacaacccgcgcttctggccgcgggaaggagagcaaattatgcgcacagccatgaagtataacctgggattggacctgagaacagctgcc

SEQ ID NO: 538713 - DNA, 98 bp, Homo sapiens
gctgcaggccaagcgcctcacgccggacctggtgcagttgcaggacgaggagcggaggcggcagcagcagttagaagagatgcgcaagcgggaagcgg

SEQ ID NO: 538714 - DNA, 82 bp, Homo sapiens
tcatgtcacgctgggtaatgaggatttgactgtgaagggtgaagctgacactagaaggcctggaggaagatgacgatgatag

SEQ ID NO: 538715 - DNA, 75 bp, Homo sapiens
ggagatctgatcctgattgcagaaccttccctgattacagaatcttggaatctcactctggtttgagacagaatc

SEQ ID NO: 538716 - DNA, 100 bp, Homo sapiens
acctctccttttccctctccctttccctaagggctgggtataagtaagcaagaagagggcctgggagaagagtctgacgagcaaggggaaggtagccaag

SEQ ID NO: 538717 - DNA, 100 bp, Homo sapiens
agaccttccccaatgactacaccctgtccttctgggttccaagcttgaactacccttgtggctggcaaaaggactttttgacaacaagcgacggatcctt

SEQ ID NO: 538718 - DNA, 88 bp, Homo sapiens
cagaagacattggccaagacgatcaccaaacagttgatgacagtgcaattttggattgccagttcagtgagttttatcatacgcctcc

SEQ ID NO: 538719 - DNA, 88 bp, Homo sapiens
cctgtacgggtgcctggcctcgcttctgtcccaatttaggcattggagatctaattcctgtggatgttaaccatttgaacatttgtaa

SEQ ID NO: 538720 - DNA, 82 bp, Homo sapiens
ctcagacctgggcacagcaaatgctgaggactcagaccagtctctgcaagagatgaccgagtgggagacagcagcaccagcg

SEQ ID NO: 538721 - DNA, 82 bp, Homo sapiens
cagaccctggagcctcagttggaagcagccgatccagcctgcggagcctgtggggcagttgcagatctgatctcttctgaac

SEQ ID NO: 538722 - DNA, 83 bp, Homo sapiens
cggagaagaatcacgcctctctgcatagcacagctggacactggattgggaaaatgaggtacgttagtgttcgcgattttaaa

SEQ ID NO: 538723 - DNA, 100 bp, Homo sapiens
gtacctcatccacagggcctcctgccagccccagcccctggagaggatgcagtctctgctggatgaaccgaatcctaacagtccagccaatagccaggca

SEQ ID NO: 538724 - DNA, 100 bp, Homo sapiens
ttttcctggctttgagcccctcacaccctggatccttgacctactaatggtgtcggacggcatgacaggcagcaatcctgtgtcccctgcctcatccagt

SEQ ID NO: 538725 - DNA, 98 bp, Homo sapiens
gttcaacatgatagagcagagtggaccaccccatgaacctcggttgtctgaaatgtatttcaattatgagacaaaaagtgcgttagaaacacttcaag

SEQ ID NO: 538726 - DNA, 50 bp, Homo sapiens
atgcaggaaattttgtggaacatggtggggagttatatttcagtgacgtc

SEQ ID NO: 538727 - DNA, 82 bp, Homo sapiens
gagcggccgaagcagctttgcgcaagagtgagccatggagctacgtgtggggaacaagtaccgcctgggacggaagatcggg

SEQ ID NO: 538728 - DNA, 98 bp, Homo sapiens
caagagcggcggtagcgcaggggagattacttttctggaagatctgaaactcagcaccgaggctctgctccccactctgagagtgatctaccagagca

SEQ ID NO: 538729 - DNA, 88 bp, Homo sapiens
gccctgcagaccctgtggtccacgcgggagcggaagcagttcatggcctcccacgggaacgacgccgcgagagccaggtttgagtcca

SEQ ID NO: 538730 - DNA, 90 bp, Homo sapiens
gtcagaggtacagagaagctgcctttttaggccgctcacatgaaaggcctgctggtgggtacccttgatgttgtgttggactccagcgcc

SEQ ID NO: 538731 - DNA, 90 bp, Homo sapiens
gcaagggccacggaagggccgtggactggtgggccctcggcatcctgatattcgagatgctttcggggtgaactgtcacccctacaactc

SEQ ID NO: 538732 - DNA, 98 bp, Homo sapiens
accaatgctcaagtgatggctggttttcaggaactcataaatgccacctcaacaattcagagttggaaaggtctttcaagttcatgagagaagctgag

SEQ ID NO: 538733 - DNA, 74 bp, Homo sapiens
aacaagtacattagagccgaggttcatggaccggccagccttgcagctgtatgatccaggagctcgcttccgag

SEQ ID NO: 538734 - DNA, 98 bp, Homo sapiens
accaaagtaatttgtaagcgttgcaaggtaatgttgggagagaccgtgtcatcagagagaaactcaaggagcggaaagactagatgccgatccaaaag

SEQ ID NO: 538735 - DNA, 75 bp, Homo sapiens
cagctactgaccacctttctcttcaacgtccaggatgcagcagtctcggccctggctgctctatgcagtgaatat

SEQ ID NO: 538736 - DNA, 83 bp, Homo sapiens
caagtgggagcactggaagtacgggcagttgcagtgttggagctaaaaatgagaagactttgggacatttcatgagtcattca

SEQ ID NO: 538737 - DNA, 102 bp, Homo sapiens
ttgaagatttgcataaagccaacattcgcaccgtcatggtcacagatgagcacaatgcctggactccccacccggccctgtttttatgatattgatttggac

SEQ ID NO: 538738 - DNA, 100 bp, Homo sapiens
atgatttatagctaagactccaggacacccctgaagccgagaaatggaggaatcttcgagtatgcggacggccccaacgcccaggtcatgaatgccgagg

SEQ ID NO: 538739 - DNA, 50 bp, Homo sapiens
ttcaggatgctggtttataccaaggacagaagtacatccaggaagccagg

SEQ ID NO: 538740 - DNA, 50 bp, Homo sapiens
ggaaccacacatgtattaagatttggtaatatttgaagctgaagtctcag

SEQ ID NO: 538741 - DNA, 75 bp, Homo sapiens
agcagttcctgcagcttccttgaggcctaatttgtagatatcctcaagaagattatgagtcattctcactaccgg

SEQ ID NO: 538742 - DNA, 90 bp, Homo sapiens
aaaccatgcaacagtcaaccttctgagctttcttcagagacctcagacactttttcaaaaatggcaatggtatcagaattcctcaagcag

SEQ ID NO: 538743 - DNA, 98 bp, Homo sapiens
gctcaagaagcagagagtctacctgcccgacgcgttcgtggagaggagcagcggttgctgttggaggagaaattattttcggacgggcgcggtggctc

SEQ ID NO: 538744 - DNA, 101 bp, Homo sapiens
ccgccgcgcgctgcgcgccggacccgctgcccctgccggcccggccgggtcgggcggcccaggctctgccaaggctgagaatgacaaacatctaagtgtag

SEQ ID NO: 538745 - DNA, 98 bp, Homo sapiens
cccatcttacagatgtattaagaagcctcagggccatgtgaaactttctgactttggtctttgcacaggactgaaaaaagcacataggacagaatttt

SEQ ID NO: 538746 - DNA, 75 bp, Homo sapiens
acagcagttcagaaagaggaaactggattcaggatgatgatgctgaagctatccttgctgcagacttcgaaattg

SEQ ID NO: 538747 - DNA, 90 bp, Homo sapiens
gaacgtggcttatgagtacctttgtcatttggaagaagcgaagagtgccggtggtggtgtgcacattgagccccggtatagacagttccc

SEQ ID NO: 538748 - DNA, 95 bp, Homo sapiens
attttagggtcctttatatagaagggagagtaggttccttctgaccaaggggacatggctctgaagatgatgagactggtgactcagcaagaata

SEQ ID NO: 538749 - DNA, 75 bp, Homo sapiens
ctctgctcttcagtacaatcctagaaatctgagctgtagaagggcatctgactcattatccgccagaccttcagt

SEQ ID NO: 538750 - DNA, 75 bp, Homo sapiens
tggagagtggctggcaagttcatagttgaagtattgataacaccaaggaactctatcacaatttgaaaagataag

SEQ ID NO: 538751 - DNA, 83 bp, Homo sapiens
cagaccctggagcctcagttggaagcagccgatccagcctgcggagcctgtggggcagttgagaagctgatgtctcctcgact

SEQ ID NO: 538752 - DNA, 93 bp, Homo sapiens
gccgctggcagccgcggatctcaccgccgctcaggctgcatcttcctcccgtgaggctggccgagctccacgctgatctgaagatacaggaga

SEQ ID NO: 538753 - DNA, 75 bp, Homo sapiens
gggacatggaaccaattcctgataatggtgattgaagatagtactggagtccgccgggtggtggtcacaccccag

SEQ ID NO: 538754 - DNA, 82 bp, Homo sapiens
gtattcttgtggatattgggcttgacagctgcaaggagttactgaaggactcagtggcctttgaggatgtggctgtgaactt

SEQ ID NO: 538755 - DNA, 100 bp, Homo sapiens
ccgagcccgtccggactcccccgatcccaggtttgcgtatatagagttctcagacaaagagtcagtgaggacttccttggccttagatgagtccctattt

SEQ ID NO: 538756 - DNA, 98 bp, Homo sapiens
gccgcgcacgccatgggagccgtgactgacgggtgctgaaaagtcacccaccacttcagctgaccttaagtcagacaaagccaactttacatcccagg

SEQ ID NO: 538757 - DNA, 83 bp, Homo sapiens
cagaagtctgtggagaccgcaaaaaggatccagtggggatattgtgatgactcagtctccactctccctgcccgtcacccctg

SEQ ID NO: 538758 - DNA, 82 bp, Homo sapiens
tcatctccctgctctggatcatcgaactgaataaatatggctacacacacctttctgcaggagagctgcttcgtgatgaaag

SEQ ID NO: 538759 - DNA, 100 bp, Homo sapiens
gggaacttttgccttagcaaatgagctctccacacaaggagatgcaagtcaggtgattgggcctcttactgaaggacagagaagaaatgtggcagtagtg

SEQ ID NO: 538760 - DNA, 113 bp, Homo sapiens
cggggagcgtggactacgagttggcgcccaagtccagaatccgcgcgcaccgcggaccctatctgcagatgttctgaatacctctgagaatagagattgattattcaaccagg

SEQ ID NO: 538761 - DNA, 101 bp, Homo sapiens
tcaaatcggctgattctgcatctggaaactgccttcatcttgaaagaaaaggagacccggtgagcctccattgataaaaggttggcttccttatcttggag

SEQ ID NO: 538762 - DNA, 100 bp, Homo sapiens
ctatctcctccctcttctcccgactatttggcaagaagcagatgcgcattttgatggacacaggcagccatgccgcgcagcccaacatccagcgaggacg

SEQ ID NO: 538763 - DNA, 98 bp, Homo sapiens
agttgcattcctttgagtcacataaggatgaaatattccaggttgtgccaaccatcttggagaaattcaaagagaagaaacctcaagtggtacaagcc

SEQ ID NO: 538764 - DNA, 100 bp, Homo sapiens
ggagaccatagctgcacagccagagctaaaaaagtccctgtacgccatcttctcccagtttggccagatcctggatatcctggtatcacggagcctgaag

SEQ ID NO: 538765 - DNA, 91 bp, Homo sapiens
gcctgtccccgggggcgccatggcgaccggagcgaacgccacgccgttgggagcaggccgggctctcgccatgggtcactgtcgcctctgc

SEQ ID NO: 538766 - DNA, 112 bp, Homo sapiens
ctggtcacctgtctggagcaaataaaagagccctgcaatttgaagatacatgagacagcagccaaacccccagccctactgccaataaagggaaaataagagatgctcatcg

SEQ ID NO: 538767 - DNA, 50 bp, Homo sapiens
ccagctacaaactctaggtttgaaagattcagagcattcttcactccaga

SEQ ID NO: 538768 - DNA, 100 bp, Homo sapiens
cttctctattcatcaatgtttgtagagacatagagctggtgatgctgctggagtggtggtcgggcacggaatgcaccatcttcacggacccgcgcgccta

SEQ ID NO: 538769 - DNA, 82 bp, Homo sapiens
agttgatcctcagcaattctgaggacaagagtattcgagtctgggatatgtctaagcgtttgcccgaccatctgtaagtcac

SEQ ID NO: 538770 - DNA, 100 bp, Homo sapiens
agggccgtcaagatcctcaagaagaagaagttgcgaaggatccccaacggggaggccaacgtgaagaagacagagcgggatgccaccagcttgtccaaag

SEQ ID NO: 538771 - DNA, 74 bp, Homo sapiens
agctgaacatgttgggagagaagcttcttggcagcaattccatttccgtgagggcgtttctagatgaagatgac

SEQ ID NO: 538772 - DNA, 90 bp, Homo sapiens
atttcgatctccgccctggggtcattgtcaggtgtgaaggaattacaagtccagaaggctcaaaatctatagtggaaggaatcatagagg

SEQ ID NO: 538773 - DNA, 95 bp, Homo sapiens
tctgaattgtgctgccttggccaaaagaggcatccgtgtcattctggaccttactcccaactaccggggtgagaactcgtggttctccactcagg

SEQ ID NO: 538774 - DNA, 50 bp, Homo sapiens
tctcgacagccttttactgtgaacagggtacaaacattgctgctgggaaa

SEQ ID NO: 538775 - DNA, 96 bp, Homo sapiens
agcgagatccgggccgtgaacgaaagcagtgacggaggagcttgtaccaccggtttccaatacttatctacaggaatcgccatgaccccagctctg

SEQ ID NO: 538776 - DNA, 99 bp, Homo sapiens
ctccaatccaggaacaagccccatgttctgcagcgtggcttcctttggtgccagctctttgtctagatatgaattgagaattcgttatttgccaaaagg

SEQ ID NO: 538777 - DNA, 97 bp, Homo sapiens
caatttgccagtgtttccacaatggaaccaattgttttacagtctgttccacatgatcattgtaataagtttgggagagcccatggtgactgcgtga

SEQ ID NO: 538778 - DNA, 80 bp, Homo sapiens
cgaggtgtgcagagtgctgagaccgatgccactgccgccaggagccctgtaacatcagccatcgtcaaccccaccgtgtt

SEQ ID NO: 538779 - DNA, 98 bp, Homo sapiens
ctcagcgggccctgtacagggatgtgatgctggagaactatgggaatctggtgtctgtggcttataggctttatactgtggtgcctcgcctggtcaag

SEQ ID NO: 538780 - DNA, 80 bp, Homo sapiens
ggaaccgtgctgccccgccccgctccacccgtgaggacaatgcagatcttcgtgaagactctgactggtaagaccatcac

SEQ ID NO: 538781 - DNA, 100 bp, Homo sapiens
agaaataatcaagagttgacatcataccagttttcggctttgtgagaaaccttaccatcaaacacgatggccagcaacgttaccaacaagacagatcctc

SEQ ID NO: 538782 - DNA, 75 bp, Homo sapiens
ttgttcaccgccaaccccttcgagcaagacgtggactaagaaaaatggctttgtcagcccaacagatacccagat

SEQ ID NO: 538783 - DNA, 100 bp, Homo sapiens
ccggctcctcgataaagtggagctgatgctgcccgagaaattgaggccgttgtacaaccatccagcagtatccggagtgtgatgcagaagtaccttgcag

SEQ ID NO: 538784 - DNA, 100 bp, Homo sapiens
aggcagcgcgggatcccagcctcaggcgtgcgcggacggtgtgcgggtcgttgaggacttccacatggagattggcacaggaccagactcaagacacaca

SEQ ID NO: 538785 - DNA, 75 bp, Homo sapiens
gtctgtccactgcctcccagcaacgcagttgcaccaccagcaccaccttccagtagtcagctctgccgttacttc

SEQ ID NO: 538786 - DNA, 50 bp, Homo sapiens
acctcctcctccacaggggagacagaggtatacactgaatatcctcgaag

SEQ ID NO: 538787 - DNA, 101 bp, Homo sapiens
ctacggctgttgccatgaggcgaggctagggaggacctcacttccccggggtgtaataatgttaactgaggaaacccagcgtttgctggcagaaccagttc

SEQ ID NO: 538788 - DNA, 100 bp, Homo sapiens
acattctctgagatctcagccctccggttcctgggcagagagaaagaacctagaagtcggaatccggaagaagatcgaacatgacgtggtgatgaaagcc

SEQ ID NO: 538789 - DNA, 75 bp, Homo sapiens
ctccaatgggcctttccagcccgtggtccttctccatattcgagtctgcgctcctcagaccaccggcaggtgaac

SEQ ID NO: 538790 - DNA, 80 bp, Homo sapiens
aatgtctgtctcaagatacaggacagctgtttgctcatcaacctcaactgtggatcgcttacacctgagacgaactacag

SEQ ID NO: 538791 - DNA, 83 bp, Homo sapiens
acgagatcttccgcaacctggagaacgccaagcgcttcgccatcgacataggtcagcccaaggccaaccccactgtcactctg

SEQ ID NO: 538792 - DNA, 99 bp, Homo sapiens
attgccatggctgctggaagaagtctcaaaaagctcccgactagctctagccggcccggtccttggactgaaagaatgcaccaggggctcggcagtgtg

SEQ ID NO: 538793 - DNA, 100 bp, Homo sapiens
ggcttcgttttcatgttgctggtggaccagattggtaactcccatgtgcattctactgacggggctttgttatgcacctaaagccatattggaagctcca

SEQ ID NO: 538794 - DNA, 75 bp, Homo sapiens
aaagggaccagatgctgccagcaaactgccactgggacaaggagactggctttcacagaggtttgggttgggttc

SEQ ID NO: 538795 - DNA, 50 bp, Homo sapiens
ctcgacctcctatgactctgcagttagatctagtgaaaagccatttgatg

SEQ ID NO: 538796 - DNA, 97 bp, Homo sapiens
gccaagcctgaagtcagcttagtgcgcgaggcttctcggcagatcgtggccggtggttctgcaggtctattattagcagaagatttttctgcatagt

SEQ ID NO: 538797 - DNA, 82 bp, Homo sapiens
atcacaagaagaagggtgcatacagcatggaggctctgtcggtggtgagcgacgaccagtccctctttgactcagcgtacgg

SEQ ID NO: 538798 - DNA, 100 bp, Homo sapiens
ctggtagcttcaaacagctcacagttaaggaattacatgaacgacagccttcgcaccgacgtcttcgtgcggttccagccagagagcatcgcctgtgcct

SEQ ID NO: 538799 - DNA, 102 bp, Homo sapiens
tcgaactatgtggaggagatgtactgtgcttggctggaaaaccccaaaagtgtacataaggtgctggagctggcaggtaatgcttctaaggatctcaaagta

SEQ ID NO: 538800 - DNA, 100 bp, Homo sapiens
tgggagtctccgcgtcccgctcgctgggagagaggtacctctccttttccctctccctttccctaaggtccccagtctatgtgaggatctcctgtcttct

SEQ ID NO: 538801 - DNA, 50 bp, Homo sapiens
tactgaaactcagtgcactctaggcctctgagcccaagctaagccatcat

SEQ ID NO: 538802 - DNA, 100 bp, Homo sapiens
ctcaggacaacccagatgtgcaacaaagtgcgatgatacctgatcagagaagcagtttgatgtactaaaggcttctcgattgggagacaggaaacctggg

SEQ ID NO: 538803 - DNA, 100 bp, Homo sapiens
agccaagctcatggcctgccactgcgtgcgtggaggtggaggaagcgtccctgggatcgagaggatgggtcctggcattgaccgcctcgggggtgccggc

SEQ ID NO: 538804 - DNA, 75 bp, Homo sapiens
ccatccagagcctgcacccttgcccggttacacatcattttggaatgactgtatatcatctggattacgtggctg

SEQ ID NO: 538805 - DNA, 75 bp, Homo sapiens
ccaccgctgccctcagctccgagtccagggcgagatgaggacggggacttggttgccttttccagtgacgaggaa

SEQ ID NO: 538806 - DNA, 75 bp, Homo sapiens
agagacgacaacccgggcctccgaggaggagccgatcactttctgtgaggaagccttcgtgtcccactaccgctc

SEQ ID NO: 538807 - DNA, 74 bp, Homo sapiens
gactgccgctgtgtacagcgcagccatcctggagtacctcaccgcagagatgttgatgcctaagaagaaccgga

SEQ ID NO: 538808 - DNA, 140 bp, Homo sapiens
cgggaccctggcccggtatggctgaagtcagcatcgaccagtccaagctgcctggagtcaaggaagtaagaatacccggacttcagatacgttaagcaagcaacagcagaccctgcgaatgcacatcgacatacccaggg

SEQ ID NO: 538809 - DNA, 100 bp, Homo sapiens
cagagagtgacatggtaccaggaactattttggtgacagaagaagaacttagtagatgcattgaggatgtgtttaagtttttcccaggtcatgagtctcg

SEQ ID NO: 538810 - DNA, 50 bp, Homo sapiens
ctagatgtgcagtgcgagcaggccttggaaatctacatttctgaaggaac

SEQ ID NO: 538811 - DNA, 90 bp, Homo sapiens
aggagtctagcagtgagcagtacgtgcctgatgtgttttataaggtggagcgaatcaaggagcgtgtggaggagaaagagggaatccccc

SEQ ID NO: 538812 - DNA, 75 bp, Homo sapiens
gagttggagcccttgtcccaaccagggctggataagaagggtttgtgaaacaggatctgataatcaacctcttgg

SEQ ID NO: 538813 - DNA, 90 bp, Homo sapiens
gaggactctgccaactttattaaatatgagctccttgaggagaatgaccagctgatccgctgtattgtggagtatcagaacaagggccgc

SEQ ID NO: 538814 - DNA, 74 bp, Homo sapiens
ttctttctcagatactagagctggccacactgcaggacattgggaagaaactggcgatggaatatgagaggagc

SEQ ID NO: 538815 - DNA, 87 bp, Homo sapiens
gcgcgggctcgagagctcgccccgaacgggggtcttcctcctccgccgttgacagggaaagcaggcaggatgggagagtcgccgata

SEQ ID NO: 538816 - DNA, 75 bp, Homo sapiens
ccaccttcagtatctcagtcctccagtgtttggatattcagggatgttctgttcttgaaggactgtgtaggccca

SEQ ID NO: 538817 - DNA, 75 bp, Homo sapiens
gcatttcctgaacgcgtgtacgtcatggaggatatcacattcaacgtgaagatctgtatttcagaacctgggaag

SEQ ID NO: 538818 - DNA, 74 bp, Homo sapiens
tttgggaagcatgtcaccaacccggccttcaccaaactccctctcaagactgcagtgcagatgacgacaacttc

SEQ ID NO: 538819 - DNA, 123 bp, Homo sapiens
gatgaggtcagagcgccccatggtgtggtgctgcctctttgtccgttcgcagaccagcatctcagacatgtcgaaaaagatgttttgatccctaaaataatgagagaaaaggccaaagagagg

SEQ ID NO: 538820 - DNA, 100 bp, Homo sapiens
gtgatgcgggcagcaggcccctcctgcgcacagggtttccaggcctgaggtgcccgccctggccccaggagaatgaaccagccgcagaggatggcgcctg

SEQ ID NO: 538821 - DNA, 95 bp, Homo sapiens
gcgcggcaggctgaggagaaagcggcgcgcggaggtgctggagaatctggtaaaagcaccattgtgaagcagatgaggatcctgcatgttaatgg

SEQ ID NO: 538822 - DNA, 74 bp, Homo sapiens
cctgccccgccggagcagcatcatcaagggccgttgctccagggagaactgcaaatatcttcatccacccccac

SEQ ID NO: 538823 - DNA, 75 bp, Homo sapiens
ccagcatggccgaagacacctattcacacagtgtgggcagaagaaaaagctagtgatcaacagtggcaatggagc

SEQ ID NO: 538824 - DNA, 88 bp, Homo sapiens
aaggcagccatctttagttcgtctttcctagagagggctggttgatatgtgaagagccaacctgtcgcaatcgaactcgtcaccttcc

SEQ ID NO: 538825 - DNA, 90 bp, Homo sapiens
gaagaaattcccacctgtcaaagagtacaagccagctgccatgttgtgagcacataccacatagctccatggagatgcccatgtgactgt

SEQ ID NO: 538826 - DNA, 75 bp, Homo sapiens
gaaattgttcagttcttctcagttgagaatgaaaatcattgcgattttgtgaaacttcgagagatgctgatccgc

SEQ ID NO: 538827 - DNA, 90 bp, Homo sapiens
aagaaaagaaaaagagaagaagatgaagaaacccagcttgatattgttgggaaatcctcattgacgattcaatttgttgaaggccaattt

SEQ ID NO: 538828 - DNA, 82 bp, Homo sapiens
gtctctctgctgcggcgcggggaccgctgtgctctcgatttggtcgtattgggcgcctggtcaccagggctgcttttaactc

SEQ ID NO: 538829 - DNA, 83 bp, Homo sapiens
gcgcagccgttaccgggacagcctgacgcagccatataaagatgaagcgcagctgtataaagaagagcacctgaggaatcggc

SEQ ID NO: 538830 - DNA, 82 bp, Homo sapiens
gagaggggagaaagcagccagggagaaaaagaagaacgcgatgaggaggaaactaattttgcacgatggcagtcaaatgaga

SEQ ID NO: 538831 - DNA, 74 bp, Homo sapiens
gcctgcagttcttcaccttgacgcttatgaacctctactttgcccagggatttgtatcgttgtgcccgtgtcag

SEQ ID NO: 538832 - DNA, 100 bp, Homo sapiens
tggaatatccctcagcctggtgagggtgatgttcgggaggaggccttgtccacaggctaatggaggttggcaggatgctactaccccttcatcagtgacc

SEQ ID NO: 538833 - DNA, 100 bp, Homo sapiens
acctgtcccacctggcggccatcgtcatcctgctgctgaagatctggaagacgcgctcctgcgccgtccagtcaacctgcaaccaaaacgagacttttta

SEQ ID NO: 538834 - DNA, 100 bp, Homo sapiens
agactttccggacagaacgtcctgtcaactcagctgccctctcccccaactatgaccatgattattacagtggtggctactatcctgcacaggacccggc

SEQ ID NO: 538835 - DNA, 83 bp, Homo sapiens
gagcgtgtggatttgagccgccgcattttttaaccctagatctcgcaatggcaccagcatgatatcattgatcattcctccca

SEQ ID NO: 538836 - DNA, 96 bp, Homo sapiens
gatagtgacaatgtccgattggccaggctgaccggttccctgatgtgttacctgcttctgctactgatccaaactgcagaacttctcattcatccc

SEQ ID NO: 538837 - DNA, 83 bp, Homo sapiens
ccaagggaccaaggtggaaatcaaacgcaaagcaacaatttctaatgatggggccacaattctgaaacttcttgatgttgtcc

SEQ ID NO: 538838 - DNA, 95 bp, Homo sapiens
cagcgacacagcctggatctcctccatcctgctggccatgctctacgggacagcgggctgacgcacgaggcacacaggaaggaggtggagcaggt

SEQ ID NO: 538839 - DNA, 90 bp, Homo sapiens
aagaactgattcctctcatcaagcctgttgtacaatggtagatggagtgatgattcttcctgtgcttatcatgattgctctcccctcccc

SEQ ID NO: 538840 - DNA, 90 bp, Homo sapiens
cagccttggaaagtcaggaccgcgacggcagcagagcagtgctccatacttgcttgcagtgcctacgtggctctggctttgggtgataac

SEQ ID NO: 538841 - DNA, 71 bp, Homo sapiens
ggagaaccttgcatgggcatcctatgatcagacaggtgcgggagatggaggcagagctggaggacgagagg

SEQ ID NO: 538842 - DNA, 90 bp, Homo sapiens
gtgtatgttccttctcacctccatcatatgctctttgaactatttaaggaaccttccctgtatactgtcaaagccatcctgattctggac

SEQ ID NO: 538843 - DNA, 49 bp, Homo sapiens
cagaaatacgtctttgcttctgtggaaaatgtttcaacgtgcgcaagag

SEQ ID NO: 538844 - DNA, 82 bp, Homo sapiens
cacatagacatttacgcggatgtcggcgaagagttcaaccagctcattgctatggacagtgctatcaccctgtggcagttcc

SEQ ID NO: 538845 - DNA, 90 bp, Homo sapiens
ctgtcattacatatgagatgagtctcttgaagactacagatggtgtttggcgatccgccgagaagttgttggccccaggagcatccctcg

SEQ ID NO: 538846 - DNA, 100 bp, Homo sapiens
gcagatccgctgtacttgcgtccgctacagtatgtcaatcgcttgccccagcacaggtctctaattaacagaagatggcaaagcccagccacagcagcta

SEQ ID NO: 538847 - DNA, 100 bp, Homo sapiens
ctctagtggcggaagccttcgtctcccagattgcaggttgctgttgaagaaatctggttgcagaacaccacggattgaattggaagagatgggaccctca

SEQ ID NO: 538848 - DNA, 100 bp, Homo sapiens
caagtaccgccccgacctgcgcatgaatcatgtccctaaggaggaagctggagctccacgaggggaggggccggccatcccaggagacaccccaccaccc

SEQ ID NO: 538849 - DNA, 75 bp, Homo sapiens
tttcttgaaccgaacagagtcaagtggaatcaaaggttcatcgttgggtcaattatgaatccatgctgaaagaat

SEQ ID NO: 538850 - DNA, 100 bp, Homo sapiens
tggtctgtctgctgtccaacagggatgattatttttatcagacgtactacaatgacgttagtcttccaaataaagtgactgaactgtcagatcaacaaga

SEQ ID NO: 538851 - DNA, 75 bp, Homo sapiens
aatgatcatcaaacagctatggtgatgattagagacatactaatgtacatgggatcatagacggtatttctatgt

SEQ ID NO: 538852 - DNA, 82 bp, Homo sapiens
gagacggcggccttcgaggaggtcatgaaggacctgagcctgacgcgggccgcgcgggtctcggcgcggaagatggccggcg

SEQ ID NO: 538853 - DNA, 75 bp, Homo sapiens
ctttgctaaacctgtgcctgaacattgtgcctcggcatagagaaggagacgtgccagaagatggaagaagacggg

SEQ ID NO: 538854 - DNA, 101 bp, Homo sapiens
tgatggaactgtttgacacaactgtagagcagctgtatagcatcttcactgtaaaggagctatgagcaggtcaccaatgaagacctcctgaccaactgcac

SEQ ID NO: 538855 - DNA, 95 bp, Homo sapiens
ctcagcctcctgagtagccgggactacaggctttatcctgtggataaacgcagagtgaacgagtttggggagtcctacgaggagaaggccacgcg

SEQ ID NO: 538856 - DNA, 100 bp, Homo sapiens
agaacctcaattctgttgatcttcaaaatgctgcagaaatgctcactgcaaaagtgaaagatttgagttctgtgaacctgcatttgttgttggtaattgc

SEQ ID NO: 538857 - DNA, 100 bp, Homo sapiens
ctgtactgtccaagtcagttcctgggtacaagattgaagatggaaaatccccaagacattttctcaagtaatggtggctgtctaagtgatatagttatag

SEQ ID NO: 538858 - DNA, 100 bp, Homo sapiens
gctgacgttgttcaacctggcccaggaccctcagtgcaaggagtggcagggcaggcgagaagcgcgcaggacccggaagtacctggaactgtacattgtg

SEQ ID NO: 538859 - DNA, 99 bp, Homo sapiens
gaacaaaaaaaggagatgcctggcagccccgctctctgcatcctcctccatcaaagaaaatgaagttatttggatttaaagaagatccatttgtattta

SEQ ID NO: 538860 - DNA, 100 bp, Homo sapiens
gccatctttagcttcacaaaggaaaagtcctgcaacatttttgacccccaacatggggctcaagaagcgatgcttgctctgtcaaggcacagcctattgt

SEQ ID NO: 538861 - DNA, 90 bp, Homo sapiens
ggcggatggcccccggtgcaagaggcgcaaacaagccaatcccaggaggaaaaacgcggaaatgagaaagcagagggagttctatcacaa

SEQ ID NO: 538862 - DNA, 100 bp, Homo sapiens
gcaggcccacggtctcggcgtagacggatacagacgtccctcaccagtgccagcttggggtctgcagatgagaactccgtggcccaggctgacgatagcc

SEQ ID NO: 538863 - DNA, 82 bp, Homo sapiens
acatgcacagcctggcgacggctgcggtgatctggtgccagctggtggaacagtgggtgatggcgtccctgctgcaagaccg

SEQ ID NO: 538864 - DNA, 82 bp, Homo sapiens
ggacggtaggagcctccgtgcggagaccactgttcaaggccacaggtgtgaatgacagaggtggtgccatccagcgcgctca

SEQ ID NO: 538865 - DNA, 90 bp, Homo sapiens
ctccaggctaacaaatttgtgcagtcatccgtccttggctcaggatttggagagcttgcaccaccaaaaatggcaaacatcaccagctcc

SEQ ID NO: 538866 - DNA, 100 bp, Homo sapiens
ctcacctctcatctttggaacgggagatgactttttgcattgaaacgactgtctcgaggatgcctacggagctggctgcacttcagaatgtcagtgtgtg

SEQ ID NO: 538867 - DNA, 75 bp, Homo sapiens
ccacaagtacttcctgtcggtcctggcggacccctacatgccagtcacacagcggcagtgataaagagcacaggg

SEQ ID NO: 538868 - DNA, 75 bp, Homo sapiens
cctcggaagagcgctcccaggagaaacaagaagttccaggttaaaggcagcctcagctcacggggcagttgatgg

SEQ ID NO: 538869 - DNA, 101 bp, Homo sapiens
cgtggaccacatagacatttacgcggatgtcggcgaagagttcaaccagcctgacatttaccccggtaactgctgggcatttaaaggctcccaggggtacc

SEQ ID NO: 538870 - DNA, 98 bp, Homo sapiens
aatcagcgccccggactgcaccagagccatggtcggttggatacactccagattggatatttctgctgagaaatgtaatgcgaatcagtccagatcag

SEQ ID NO: 538871 - DNA, 83 bp, Homo sapiens
ccgcgcgcagggcctgcagcgggagctggacggcgagcgcgagcggcgcgagaaagcagcctgcttctgcaaagtggtacgat

SEQ ID NO: 538872 - DNA, 100 bp, Homo sapiens
cctagatctttcttgaagacttgaattagattacagcgatggggacacagaaggtctttctggatataaggattctagtcatggtattgcagaaagcgca

SEQ ID NO: 538873 - DNA, 100 bp, Homo sapiens
gggaagacgcggggaagaggaggcggaaaaggacgcaaagttctccggcgaggatgatcggctgaatgtaacagaggaactaacgtccaacgacaagacg

SEQ ID NO: 538874 - DNA, 100 bp, Homo sapiens
atggaaggcagaggctgcgcagagaatggagagctgtgtctgaggagccttggaacattcacccagaccaagatcactccatggatgaaatgacagctgt

SEQ ID NO: 538875 - DNA, 149 bp, Homo sapiens
tggaaatcgacttcggtttcagttggagttggaatttgtgcaatgtttagccaacccaaattaccttaattagccttttgaatggactgatgtgttctaagcccgaagatccagtagaatacttggaaagttgtttacaaaaagtaaag

SEQ ID NO: 538876 - DNA, 75 bp, Homo sapiens
ctgaacttgcagatgtcttaacagagggtggtgacttcacacgccataatggcactggtggcaagtccatctatg

SEQ ID NO: 538877 - DNA, 75 bp, Homo sapiens
gcaagatggtactgtgatgttaccagttgagacatttgggaaatgatgaagtgcacattgtttggtcagagcata

SEQ ID NO: 538878 - DNA, 83 bp, Homo sapiens
agcagatctcttagcggcagatttctcagccatcactggtgcaagctatatttaacggagatcctgatgaagttcgagcacta

SEQ ID NO: 538879 - DNA, 100 bp, Homo sapiens
cttctgatgaaaattgagctgtccatgcagccatggaacccgggttacagcagtgagggggccacggctcaaggatagatcactgcgaccagaggaaatt

SEQ ID NO: 538880 - DNA, 82 bp, Homo sapiens
cagattttgaccaagcattttgtaaggaacatcatcttcagcgggctatttcagcacagcaggtgtatggcgagaagaggga

SEQ ID NO: 538881 - DNA, 90 bp, Homo sapiens
ccgcagcgcagtgacagtgcagaaccccggcgcggcccttgggcaagctgcctgtcctgctgcttggccgctcctcagagctgcggccgg

SEQ ID NO: 538882 - DNA, 90 bp, Homo sapiens
gagctacagatcacaaatgtgatggagaaactagaaaaactgcttttggaattatctctacagtgaagaaacctcggccatcagaaggag

SEQ ID NO: 538883 - DNA, 100 bp, Homo sapiens
cacggacgagatgatcaaacgcctgaagctctggacttattggacaaaatgttgacattcaacccacacaagaggattgaagtagaacaggctctggccc

SEQ ID NO: 538884 - DNA, 98 bp, Homo sapiens
ccgcgcagccgccggcgtcgccgccatggacctaggtgaccagcgccatgtccagccaggtggtgggcattgagcctctctacatcaaggcagagccg

SEQ ID NO: 538885 - DNA, 51 bp, Homo sapiens
cctcactcaaacagtaaacgaggtgtttggagaagagggattgaccctgaa

SEQ ID NO: 538886 - DNA, 101 bp, Homo sapiens
ctgatagtgaaattgagaccaactctgccacaagcaccatctttctgcaagctttcttcctggtggcagatgacatcatggattcatcccttacccgccgg

SEQ ID NO: 538887 - DNA, 98 bp, Homo sapiens
tcgagtggaacttcatcgactttgggctggacctacagccctgcatcgagctcatcgagcgaccggaagcccgaaagatgagatcaatacaggaaacc

SEQ ID NO: 538888 - DNA, 98 bp, Homo sapiens
gccaggccagccgggacggacgccgatgcccggggctgcgacggctgcagggcggacatgcagatcgtggacggcagtgcccagtgtccaggcctagc

SEQ ID NO: 538889 - DNA, 83 bp, Homo sapiens
gaggcgttgacctgccccttgtcctggccccgacctcctgccccccgaggtctgcagtctcctgaacccagcagccatctacg

SEQ ID NO: 538890 - DNA, 99 bp, Homo sapiens
ggaagatgcaagcggtttgggaccttgaacaaggcaaatatggttttggttgggagccacgtgtaccagtgtgtgttgatcttggcttgattcagtctg

SEQ ID NO: 538891 - DNA, 146 bp, Homo sapiens
ctcaaacgttgaaacacccacagactgccaagtgggacaactttctggcttttgaaaggctccttcttcaggcaaatcctgatcctaactgttgtcttggagtatttgggctgagcttgtacaccacagaaagagatctaagagaa

SEQ ID NO: 538892 - DNA, 100 bp, Homo sapiens
ccctagctcggcgtctaggaagcagcgctgcgggacgcccgcccggctccgggaccgcgggagaggctcatccaaaatagaggaagcatgcgaaatctac

SEQ ID NO: 538893 - DNA, 99 bp, Homo sapiens
caggaaaatgagatgttatccaggttctgcttggattctgctagacagacccgacaaagactgtctatcaactggtccaattttagcttgaaaaaagcc

SEQ ID NO: 538894 - DNA, 76 bp, Homo sapiens
atttgaacacctgaagctccccatcaagggaatgaacttcacaggaggagctttatctttatatactgcccttacc

SEQ ID NO: 538895 - DNA, 100 bp, Homo sapiens
gaagagcaagaccaaaatttgaacaggttaatctgttggattctaatgcagttcatcacatcattcatgattttcagagtgatggtgtgcaacaaacaac

SEQ ID NO: 538896 - DNA, 75 bp, Homo sapiens
ggtgattgaggacaagaccatcgagctcatggactccatcagaaagtttgagcgagagctgatgttggagcagca

SEQ ID NO: 538897 - DNA, 100 bp, Homo sapiens
attctccggggacccttccgtatctgcctaggcattttgctgtctcctcctaatacgatgcctgaaaacttcatgcctcctgttcccatcacatcaccaa

SEQ ID NO: 538898 - DNA, 100 bp, Homo sapiens
acctcttatttggacattgccaaaggcgctgtggagttattcttgaagaaactgccaagttttggaccttatctggaacagcgcaagaaaatcatagcag

SEQ ID NO: 538899 - DNA, 75 bp, Homo sapiens
tggatgtagaaaatgagcagatactgaatgtaaaccctgcagggtgtacaactatgagcctttgacacagctcaa

SEQ ID NO: 538900 - DNA, 100 bp, Homo sapiens
tctaccctggaggagattctggggcagtatcaacggagtctccgggactccagggaaatttagatggtctattgatcaactagctgtaataaatcctgta

SEQ ID NO: 538901 - DNA, 100 bp, Homo sapiens
agaagccaaacaggaggaggaagtggagggtgctaactgccaaagaaaggaaaactcaaattgatgatagaaacaaattgactgaacattttattattac

SEQ ID NO: 538902 - DNA, 50 bp, Homo sapiens
gacaacgtggatcgttgttttgaaacgataagttctgaacgtcgaaaaga

SEQ ID NO: 538903 - DNA, 82 bp, Homo sapiens
cgcggccccggcgccaagccgccgtcatcttcttcctgtgccaggactcctcctattttgaggacttctccaacatctccat

SEQ ID NO: 538904 - DNA, 82 bp, Homo sapiens
actgcgcagcctcttcgagcgccgcggacgcgtcatcgagtgtgacgtggtgaaagacaaatttacatgtattggagaccag

SEQ ID NO: 538905 - DNA, 82 bp, Homo sapiens
gctcattaaggacggctctctgctcattggggcgttgaggactgtctgcttttctgtggagactgcgggttgcagacaccag

SEQ ID NO: 538906 - DNA, 82 bp, Homo sapiens
aagtcgagtatctggtgaagtggaaaggatggcccccaaacctcttctgaaacagtctccctggagcaaccatcagagcagt

SEQ ID NO: 538907 - DNA, 74 bp, Homo sapiens
ggcagctccagcccggcccggcagcgacatggaagtacaagccagctgccatgttgtgagcacataccacatag

SEQ ID NO: 538908 - DNA, 50 bp, Homo sapiens
aaccgcccagatgtcttagtgctacagcctcctgacaaggtgatccgggc

SEQ ID NO: 538909 - DNA, 82 bp, Homo sapiens
actgggtgagttcatgcaaagcgctgagaacaggaccccccgcccccctataatgatccagccttttatgaagaatgcaaaa

SEQ ID NO: 538910 - DNA, 75 bp, Homo sapiens
caccatgttacgttgttcaacagatgggagaatgcaaagcaactgctcattagaagatgcagcacactgtcaaaa

SEQ ID NO: 538911 - DNA, 82 bp, Homo sapiens
ccgccgccaagagtgagcgagcggacccgcgatgggatatgatggatgatatctgtcaggagcaatttctagagctgtccta

SEQ ID NO: 538912 - DNA, 74 bp, Homo sapiens
cgagatggattccaacatcctgctagacttgttaagggaatgggtactgttcaaaaaggaatgccccacaagtg

SEQ ID NO: 538913 - DNA, 83 bp, Homo sapiens
gcacagccgcggcggcagcagcagtgagagacccctttgctgatgcaagtaagggtgatgacctgcttcctgctggcactgag

SEQ ID NO: 538914 - DNA, 100 bp, Homo sapiens
caatggttggccaccggactgagagaatgtgatcaatgggcaggactacgaagtgatgatgcagattgactgtcaggtgatggacaccaggatcctccat

SEQ ID NO: 538915 - DNA, 95 bp, Homo sapiens
ctggcagccacacatctcacctgctgggacagaaccggcatacattgaggctgctttgattatgcaggttctacaactgactgcagaccagattg

SEQ ID NO: 538916 - DNA, 82 bp, Homo sapiens
catccgcgaggcaggagagaggaggaggagtgcggcgcggcggccccgggaccaaggaggtctcggcgcggaagatggccgg

SEQ ID NO: 538917 - DNA, 101 bp, Homo sapiens
cgccttcacgaagctcggggagctgacgatgcagctgcatcccgtggccgactcttctcctgcggggtaagaatgattgatgttggctgatattggagtgc

SEQ ID NO: 538918 - DNA, 51 bp, Homo sapiens
ctggcacttatgtcctccctgggtacagtctttgcccgctgcctgattttt

SEQ ID NO: 538919 - DNA, 87 bp, Homo sapiens
ttttgcttctccataacgagatggtgtctggagtgtacaagtccgcggagcagggggaggtggatgaaattgattctgcagtaaaga

SEQ ID NO: 538920 - DNA, 82 bp, Homo sapiens
cagtcttcccgcgtccgccgattcctcctccttggtcgccgcgtccttggctggcgtcggagcgtgctttggacaccatgaa

SEQ ID NO: 538921 - DNA, 100 bp, Homo sapiens
caggattcggtgctggaccctgcagagcgtgctgtggtcagagtcgctgttttactttgaactcagaaggctgtaatagaagaccaggtggccgtcgcca

SEQ ID NO: 538922 - DNA, 83 bp, Homo sapiens
gcaagtaaatggacagttaatagagcctctgcagatatttccaagaggtgaatcaaaaactctggttttaagcaacctctcct

SEQ ID NO: 538923 - DNA, 100 bp, Homo sapiens
cgccaccgtgcacatccgaatgggatacattaattgtttggtcagaagcagagaactatgatttggctctgagttttcaggagaaagctggctgtgatga

SEQ ID NO: 538924 - DNA, 51 bp, Homo sapiens
ctctccctgatcttacgtgctcaagtacagtacgggtggctggcaagatgg

SEQ ID NO: 538925 - DNA, 51 bp, Homo sapiens
aatccattccatgggttttattcacagggctacttctacaagtccgaacag

SEQ ID NO: 538926 - DNA, 75 bp, Homo sapiens
attggatttaaaagacagtcctcgtcagcactgactttcagctatggaatcgtatgaagtgtaacagaacagact

SEQ ID NO: 538927 - DNA, 74 bp, Homo sapiens
tgacgctgagcgaggcggagaaggtgtacatcgtgcatggcgtccagattactcttgtctctgctgctcctggg

SEQ ID NO: 538928 - DNA, 75 bp, Homo sapiens
cgccgccgctgcagctgccgcgcgtggtgctttcttctgcgacctggtactcatctacctcatcaaaaagagaga

SEQ ID NO: 538929 - DNA, 100 bp, Homo sapiens
cggggcggtgccccaggacctagcgtgccccgactcggcttgcaagcaggacctgctggcctacctgcaacgcatcgccctctactgccaccagctgaac

SEQ ID NO: 538930 - DNA, 75 bp, Homo sapiens
aagaaagtggacaaagagaggagtcaggtttcccaggcagctgcagacttgaaacagttctgtctgcagaatgct

SEQ ID NO: 538931 - DNA, 74 bp, Homo sapiens
ccccagaaagaactggccgttgtggaaacccaagcttatcaggagggcagacttcaaaagctactaaaaatgaa

SEQ ID NO: 538932 - DNA, 75 bp, Homo sapiens
aaccacttccctcattagtgtggctgtcacaaatactatactggcaattgctggagaagattttgcaattgttgc

SEQ ID NO: 538933 - DNA, 102 bp, Homo sapiens
tctctcccggatcaccatgaagagctccatgcagaacaaatgcgttgcaagacctctttattgtgcaaagctgccatccatgcaggaataattgctgatgaa

SEQ ID NO: 538934 - DNA, 74 bp, Homo sapiens
ttgaagtagaagaagctgatgtctctgctggatgaaccgaatcctaacagtccagccaatagccaggcagcaca

SEQ ID NO: 538935 - DNA, 100 bp, Homo sapiens
aacttcttaattctgaacatgaagatgttcaggaacagctacttgtcaataccatgctttcctgtaatatttgtggtgaaacagtaacctcagaaccaga

SEQ ID NO: 538936 - DNA, 90 bp, Homo sapiens
ggacgaggagtcggaggagccgcgggcggcgcggcccagctcgttccaggttattcagcttctcaaggctggaaaagcgaaggaagtttc

SEQ ID NO: 538937 - DNA, 83 bp, Homo sapiens
atccacgactttccttcccatctattaagccagggccatgatccaaaggaaccagagcagttgagaaaactgtttattggtgg

SEQ ID NO: 538938 - DNA, 90 bp, Homo sapiens
ggaagaggaaattaactatctgtacttataaggatatgctgcaggctgctagtcattatcgccaaaatagaaactctttgtatagaagag

SEQ ID NO: 538939 - DNA, 97 bp, Homo sapiens
gagcgaggccaaccttcaggaggaggagagagttcctgtgagaacaagcgggcagacctggttttcatcattgacagctctcgcagtgtcaacaccc

SEQ ID NO: 538940 - DNA, 88 bp, Homo sapiens
tttgttctgtatcagaagacaatatcatgcaagtgtggcaaatggattggccatttgatgatggagctccaccccctaatcagatagt

SEQ ID NO: 538941 - DNA, 75 bp, Homo sapiens
gacagccctgtgtgacaccaagataagtaacgcattgatctggagaacattgtgtactacaaggacgacacccac

SEQ ID NO: 538942 - DNA, 75 bp, Homo sapiens
cgcgagcgccccgccatcgtcccggagtctgcactatggaaacaacctgtcaatccagctcaaggcacacatagc

SEQ ID NO: 538943 - DNA, 99 bp, Homo sapiens
ttttaagtgtggcatacaagaaagatgatgattattctccaccgtctaagagaccaaaggccaatgagctaccgcagccaccagtcccggaacccgcca

SEQ ID NO: 538944 - DNA, 96 bp, Homo sapiens
gtcgtgatccagaagtccagagctgaggactgcctgtttgcaggtgtggacactgccagcggctgcagccgacttggaatgacctgggagacaaat

SEQ ID NO: 538945 - DNA, 149 bp, Homo sapiens
ctggagtacacggaggaggaggtcctggagatggagcgcaaggaggagcaggccgaggccatatccgagcggttgacctgacagttcaagaaaaggagaaatatcttaatgtgtctcgctggttttgtcacattcagcattatccaggc

SEQ ID NO: 538946 - DNA, 96 bp, Homo sapiens
cgccgatggggccttccccgagtcaccaggagactaaagtccatcaaaaacatccagaaaattaccaagtctatgaaaatggtagcggcagcaaaa

SEQ ID NO: 538947 - DNA, 74 bp, Homo sapiens
ctcctctcagcagaagtccaggttcccatgcagtggcaccctgtgctgcgcacactaaagaaccgcattgaaga

SEQ ID NO: 538948 - DNA, 82 bp, Homo sapiens
tgagacccttcctggagaaccgggcccagcagcactggggtcttgggcgtctttggtactggcttttttaggggtctgcctg

SEQ ID NO: 538949 - DNA, 75 bp, Homo sapiens
aagccttatgtggcatatttcatcacaagttgctgaacttaaggataaaagaatcagagtgtctcaacccttgac

SEQ ID NO: 538950 - DNA, 82 bp, Homo sapiens
gggagggggggctccaaagccgaaagaggaggtccctacctgccacggataccagtcagtgtctcctttcctcttgggccgg

SEQ ID NO: 538951 - DNA, 100 bp, Homo sapiens
ctgcaaccttagcgacatcaggaagaacagggtcgaggatcgaggttcaacagagtttggaaaagatttctaaactggagcaggaaaaagaacattggat

SEQ ID NO: 538952 - DNA, 101 bp, Homo sapiens
cgacgctgctcaaaacctcgctccggaaaggggacacctgctgatgaagagtatgaagatggaattgaaaggacgtgtgacactctccttatgtgcattgt

SEQ ID NO: 538953 - DNA, 74 bp, Homo sapiens
gaagccacgtgcagacatctacaaccttcgatctcctgacgaatgctccagaaaacctagatgagcagattaag

SEQ ID NO: 538954 - DNA, 89 bp, Homo sapiens
cgagggccagctgacggagatggtgcagaagatggaggagatttaatccagagactgacttcactatagaacccacagttgtatcaatg

SEQ ID NO: 538955 - DNA, 97 bp, Homo sapiens
cccggcgggctgtggcaggagggcggcggcggcggctgcggtcgaagaaggggacgccgacaagagttctctgtggcccatgaccttcggcctggcc

SEQ ID NO: 538956 - DNA, 97 bp, Homo sapiens
cctcttgccctcctaacatcatgaccacaagtcttaaagaaagtgcagaagagatggtcaaaaacaaattggaaggaaaggataaactgaccccttg

SEQ ID NO: 538957 - DNA, 98 bp, Homo sapiens
gctgctgttgctgttctctgtccttggcccaggggctggttttgctgttactgctcagtgtagtcacaccttgaataagaaatggaaaaccttgggat

SEQ ID NO: 538958 - DNA, 100 bp, Homo sapiens
gcttttgtcctggaaggaaaaagatctaaagtcacccggcggccaaaggccagtgactaccaacgtttggaccagaagatccagatgcagaggtgtgcct

SEQ ID NO: 538959 - DNA, 100 bp, Homo sapiens
cttttctgactcctcatactcacctcccatccagcctggatcactgcgaaacctgctcgacggtgagatggagcactcagccgcgctccggcaagaggtg

SEQ ID NO: 538960 - DNA, 75 bp, Homo sapiens
gaagatttctggccagtggagagaggaattcctcaagacaccattccagagcggttccgccaccccagccgcaga

SEQ ID NO: 538961 - DNA, 75 bp, Homo sapiens
gtgcaacatctgcaaggtccgcttcaccagtgcagagcagagcgggcggaggaccccgggcgcgggcgcggacgg

SEQ ID NO: 538962 - DNA, 100 bp, Homo sapiens
tagtgctacttcatgacatcatccataccaaggagacgctgacacttgtgtttgaatatgtgtggacagaggactgcagaaaatcaacctatcctccttc

SEQ ID NO: 538963 - DNA, 100 bp, Homo sapiens
gttcgagccaccgccaggggtgaaggccaacatgctgaggacgttcagcagcattcccgtctcacggatatgcaaggtggttgtgtcaaaccgattggtg

SEQ ID NO: 538964 - DNA, 83 bp, Homo sapiens
ggttggggactcgaacccccgcttcgcagctcaggagcctgaggtccgaaagccatcactggtgcaagctatatttaacggag

SEQ ID NO: 538965 - DNA, 75 bp, Homo sapiens
cggctgtcaagctggcgcgccagagcggcatcgaggttatggaaacaaaggacatgctttacatcgtcactgaat

SEQ ID NO: 538966 - DNA, 80 bp, Homo sapiens
caattttcaggttgactaaaacatgggcggtaaattggcaggatgaggagcagcaaatcaaaagaggtgcctttaccaaa

SEQ ID NO: 538967 - DNA, 100 bp, Homo sapiens
tgatctgtcctgaatgtggcttggttgtaggttgcacaccgatgctccagaattgtgagggagccatactctacagctattccaccgaggataatactac

SEQ ID NO: 538968 - DNA, 101 bp, Homo sapiens
gtggaagcaggactgcgccgcgtcttcctcaagacagcccacctgaggatattgaccataaggactcatatctcattacaagaagcatcatggccgagcca

SEQ ID NO: 538969 - DNA, 90 bp, Homo sapiens
agtaaggctgaaatcattgaagtgcttggagtgcagaactgaaagaggtcggattgtttgtgctgaacgaactgtcctcttgcttcagaa

SEQ ID NO: 538970 - DNA, 75 bp, Homo sapiens
gatacacaaccacggaaggctaccttacatatctgaagagatggattaagaatgctttggattaaggattgtgga

SEQ ID NO: 538971 - DNA, 99 bp, Homo sapiens
ctttaaaacagtattacttgcgagcatatatcattacagactatatgggcatccgaaatgaaagtttcatgaaattagctgcagtagggacctggatgg

SEQ ID NO: 538972 - DNA, 74 bp, Homo sapiens
ataaaatttcatggagaagaaggccttgactacggaggggttgccaggtgccgtgagcgatgtggagatgcagg

SEQ ID NO: 538973 - DNA, 100 bp, Homo sapiens
cccaggccagccccagcagcaacagcagcacagaacctgctaaggctgcctcagacctgactgcctggttcagcctcttcgctgacctcgacccactctc

SEQ ID NO: 538974 - DNA, 98 bp, Homo sapiens
acaatgtgttatctaaaattggagaagtttgggcaagcaaagaacctataaatagcaccacacctttcaatagggaaagaatatggcaaagctgatgc

SEQ ID NO: 538975 - DNA, 83 bp, Homo sapiens
gcctttctacacttcgggctatgatgacaaacaggagagacagagccttggagagatttggcagctgatcggaagctctttcg

SEQ ID NO: 538976 - DNA, 75 bp, Homo sapiens
tcaacattgatctcctatttttggcttcaagattttgtgccaaccaggcgcagttgtgtagcagttgagtaatgc

SEQ ID NO: 538977 - DNA, 90 bp, Homo sapiens
gtatgctccatgtagatcacggccatcgatgcacccctcggagctaatagcggagatgagaaacagtgggtttgcactgaaacgaaatgt

SEQ ID NO: 538978 - DNA, 95 bp, Homo sapiens
tgatgcacgttccatccggcgctcagctgggcttgaggtggtattaaagataatcaaacattatcaagaagaaggacaaggaactgaagttgttc

SEQ ID NO: 538979 - DNA, 75 bp, Homo sapiens
gaggaagagaagcagagctgaagcaaagagttgaagcttttgaattaaatgagccgtcagactgctacagcatta

SEQ ID NO: 538980 - DNA, 75 bp, Homo sapiens
cgcagctgccccatgtgccagaaggagttcgcccccaggtgtttaatgacgaccttaccaagccaatcattgata

SEQ ID NO: 538981 - DNA, 74 bp, Homo sapiens
gaagaatggcagtgctcaaactcaccgaccaggttgcagatgaatacatgttttccctagaagagaataagaag

SEQ ID NO: 538982 - DNA, 90 bp, Homo sapiens
ggggcgcagagccaggcagcgcaggtacaccaggggttggaaaaaccacactaggcaaagaacttgcgtcaaaatcaggactgaaataca

SEQ ID NO: 538983 - DNA, 101 bp, Homo sapiens
caggcagttggttgggacccgctccaaccctcgattcatgatgttgctatcaaaagttgagaaattgtcagaagaaatcatggagataatgcaaaatttaa

SEQ ID NO: 538984 - DNA, 90 bp, Homo sapiens
cctggggctaggacagagcatgaccagacatggaaggtctttaatgtaactttaaatggttcaccaaaggatgctctaatggatgacagc

SEQ ID NO: 538985 - DNA, 75 bp, Homo sapiens
cagattcgcagtggtcgcttcttctccttgccctcagcagggagagcacctatcagcaatccaggaatgagtgaa

SEQ ID NO: 538986 - DNA, 99 bp, Homo sapiens
tttgaccaatttaaagaagcattaatactcatcttgtccagaactctgtcaaatgaagaacactttcaagaaccagaactctaagaaggagctgatgtg

SEQ ID NO: 538987 - DNA, 100 bp, Homo sapiens
ctcctgggaggtcatcgaaggctaccgggcccagcacagccagcaccgcacgccctgcaagggaggtctaaagacattgccctcacagagtgaaatgatg

SEQ ID NO: 538988 - DNA, 100 bp, Homo sapiens
aggccaaccgggagaaaatgactcaacatggcctgtatgagaagaaaaagacctcaagaaagcaacgaaaggaacgcaagaacagaatgaagaaagtcag

SEQ ID NO: 538989 - DNA, 75 bp, Homo sapiens
cgcagcggcgccattttgcccaaaccggtgaaagtgctgttaagccaagtgcaccggctgagagcattggacttg

SEQ ID NO: 538990 - DNA, 74 bp, Homo sapiens
tccgcttcttgaatttctctctgtaaaggagcttacatcacgagaaaaagcagccaaggattataaccagaaat

SEQ ID NO: 538991 - DNA, 83 bp, Homo sapiens
gtccggacagccgcgcgctgagggtctcggggcgggcgccgcgggacctctccgggccatggtgacatattcgatgccatgtt

SEQ ID NO: 538992 - DNA, 98 bp, Homo sapiens
cagaggccagtctgtttgcctcccaacgccatctgacccagtcaagttcagcagctgtgtggggaccaaggggacacaatatgagaccaacagcatgg

SEQ ID NO: 538993 - DNA, 100 bp, Homo sapiens
ggggccactgctgggccctgaggctgcaccaagtggcgaaggagccggctccaaggagcgcctggaccatgctgctgagcgcctactggcacggcctcca

SEQ ID NO: 538994 - DNA, 96 bp, Homo sapiens
gccgcccgggccccgcggctgccgcagcattcccgggaagacctggaatggccaaatatcaaggtgaagttcaaagtttgaaactggatgatgatt

SEQ ID NO: 538995 - DNA, 74 bp, Homo sapiens
aatgacccaccaatggaagcagctggcttcactgctcaggcggctgagccagaggccaactgcagaggaactgg

SEQ ID NO: 538996 - DNA, 85 bp, Homo sapiens
gggtgatttctgcatttccaactgagagtaaagccaatcccagctgaaggaatcaagtcaaatccttccaagcggcatagagacc

SEQ ID NO: 538997 - DNA, 74 bp, Homo sapiens
ccccagccagtaccagcgccgtggcgaggccttcttgggcagctttgtggccagcgggatggggccctcggcct

SEQ ID NO: 538998 - DNA, 100 bp, Homo sapiens
caaggacgaagacaaggacctcttccccctgctggaggtgaggatcccaaccccactgaacacaagcggggtgcaggtgatctgcatgaaggggaaggcc

SEQ ID NO: 538999 - DNA, 75 bp, Homo sapiens
gcggtctgggccttttgggcagcttttccggcctgacaacttcatctttgactgtaaactttgatttaacaaaga

SEQ ID NO: 539000 - DNA, 83 bp, Homo sapiens
cgcgccgacgcggggcccatggccaggaccaccagccagctggtatgacctggacgcgtgtgacattcaagaaaaatacccgg

SEQ ID NO: 539001 - DNA, 98 bp, Homo sapiens
ggcgacagcagccaggagtcatgagcgacagcggcgagcagaactacggcgagcgggttaaccccaaagattggctttccttggagtgaaatcaggaa

SEQ ID NO: 539002 - DNA, 89 bp, Homo sapiens
gtttggaaatgatacaattacctgcacgacacatggaaattggactaaattaccagaatgcaggggtgacccagggcctggtcatcggg

SEQ ID NO: 539003 - DNA, 83 bp, Homo sapiens
ggcgagcggctcctctgccagagcacaggaagtcctggagaacctgaaggaccgctggtaccaggcggacagcccccctgcag

SEQ ID NO: 539004 - DNA, 99 bp, Homo sapiens
tacatatggaggaaagtgggtcataaatcctagtggtggactgatttcaaagggacacccactaggcgctacaggactcagaattcatgattgaagaaa

SEQ ID NO: 539005 - DNA, 96 bp, Homo sapiens
gaaaagtattgcaagcaacagtagtcgctgttggatcgggttctaaaggaaaggccctggccaacgtcaacattgggagcctcatctgcaatgtag

SEQ ID NO: 539006 - DNA, 75 bp, Homo sapiens
ggggccgccgccgcgggccggagccgagcagccgtcggcagggtggacccccaaaagtacaagggcatatttaac

SEQ ID NO: 539007 - DNA, 90 bp, Homo sapiens
gtgactgccgcgcatgggactacggcatccgcgccggcctcgtccagaacgtggtcagcaagatttgagaatggcagtgagtttccctca

SEQ ID NO: 539008 - DNA, 83 bp, Homo sapiens
ctgaagcatgtagtgagatgttaccttcgactttcagataaccccagaatgtggacatgcttactcggggattgtggcccacc

SEQ ID NO: 539009 - DNA, 100 bp, Homo sapiens
taaggttaccccagagtatagacaggcaagcgctttgcttctggatcagctgacaaaagcgttattatctggacatcaaaactggaaggcattctgaagt

SEQ ID NO: 539010 - DNA, 139 bp, Homo sapiens
aagataaaaaggagcaaaagaaaaaagaatgggtcaaccaagaacgtcaaacactccaacgattgagagcatttaaagataaactgccaagttttggaccttatctggaacagcgcaagaaaatcatagcagaaaacaa

SEQ ID NO: 539011 - DNA, 80 bp, Homo sapiens
ttcgcggcaacctccgggactctgacggtgaccaacttattagaaaaggatattgatgatgttaagaagttcaaaccggg

SEQ ID NO: 539012 - DNA, 100 bp, Homo sapiens
ctttatgaaccagtgtatcccaaattgaagacccactagctattcttattctctttgatgaagccagatataatttattgaagggcttttatacagctcc

SEQ ID NO: 539013 - DNA, 89 bp, Homo sapiens
gtccctgctctgtgcgcgcctccatctgggccatggatgggtgctggagaatctggtaaaagcaccattgtgaagcagatgaggatcct

SEQ ID NO: 539014 - DNA, 75 bp, Homo sapiens
cattggagagagtggtattatggtgtaaacaacgattctttggaggacaggaagatgtcacccaagcgcatagct

SEQ ID NO: 539015 - DNA, 83 bp, Homo sapiens
gtgggagccgtgctctacctctatccggggagcttttggaagagtcccagatggaagcgaccaggctccggcagaaggcagag

SEQ ID NO: 539016 - DNA, 83 bp, Homo sapiens
caccgtggtagccgagggcggaggcgacactctcagaacaccttccaccatgaccacctcagcaagttcccacttaaataaag

SEQ ID NO: 539017 - DNA, 100 bp, Homo sapiens
gagagcattcacaaactgaaagaaaaagcgaagaaacggaagggtcgcggctttggctccggtgtgatgaatgcagactctgctaccattttggctgttt

SEQ ID NO: 539018 - DNA, 76 bp, Homo sapiens
aagtgtttcgaaaatgtgtgtgaattggatttgatcttccatatggataagtgcagcgtttaactgtcaaaaaatc

SEQ ID NO: 539019 - DNA, 51 bp, Homo sapiens
ttgggtttgaagaatcttctacatggtgctggagaatctggtaaaagcacc

SEQ ID NO: 539020 - DNA, 99 bp, Homo sapiens
ggttgggtgaacatcatgtacaatggactggatgctgttgctgtggaccagcagttcattatgctgacatatcttttcatgttggcctggctgggagtc

SEQ ID NO: 539021 - DNA, 119 bp, Homo sapiens
gaagaccgcgcgcagggcctgcagcgggagctggacggcgagcgcgagcggcgcgagaaagcgccatgtcagaaccggctggggatgtccgtcagaacccatgcggcagcaaggcctgc

SEQ ID NO: 539022 - DNA, 112 bp, Homo sapiens
aagtaacgcaggaacagaaaaccaaacaccacatgttgtctcttagaagtgggagctgaacggtgggtcccggtgaccgtgctccccggctgcgtgggctgcaggaccgtcg

SEQ ID NO: 539023 - DNA, 100 bp, Homo sapiens
ccgcaccgcgattacggggctgcccgccgggaaaccgtgcaggattggtggtgattttcatagccaaacttgcacacctacccctgtggagcgtgcaccc

SEQ ID NO: 539024 - DNA, 75 bp, Homo sapiens
cggctctaacggggctttctacaaggattggagaatccatgttgaccaaatgcaccagcacagaagtggaattga

SEQ ID NO: 539025 - DNA, 82 bp, Homo sapiens
ggctggttccccaacatgcctcaccctcatctatatcctttggcagctcacagagcccaaatcttgtgacaaaactcacaca

SEQ ID NO: 539026 - DNA, 87 bp, Homo sapiens
gatgaagaggtttcagggagcagcaagacaatcactgcagagataccagaataatcatgggccagactgggaagaaatctgagaagg

SEQ ID NO: 539027 - DNA, 100 bp, Homo sapiens
ccatcgaaaggagcaagagcaagatcaccgtgacatccgaggtgcctttctccaaaaggcgttcccgttgcccgctctctcccggaagcagaggacggtg

SEQ ID NO: 539028 - DNA, 98 bp, Homo sapiens
tgtggatgattatcgattacgggttgattgcactgccaacactaacacctgtaataaatatggagtcagtggatatccaaccctgaagatatttagag

SEQ ID NO: 539029 - DNA, 100 bp, Homo sapiens
tttattgagaaaggagctgtttccagtcatgaggctgtggtggatctttctgtttgaaagctgaatggctctatagtcaaggcaaggggagagcatatcg

SEQ ID NO: 539030 - DNA, 95 bp, Homo sapiens
gtggaggtggccgtggaggcagaggtggcatggggaattacatgaatgacagtcttcgaaccaatgtgtttgttcgatttcaaccagagactata

SEQ ID NO: 539031 - DNA, 51 bp, Homo sapiens
ggacgccgatgccgatgatggctgggcagtagagacgaggtttcgccatgt

SEQ ID NO: 539032 - DNA, 104 bp, Homo sapiens
cgaggttggtcatgaaagagattccttgcagagacagctcaacacggcacttccacagggatcgtgggactttaccagatcggtttgtaataacacctcgaaga

SEQ ID NO: 539033 - DNA, 75 bp, Homo sapiens
cccgggcacgacctctcggacacggtgcaggcagggaagcagtttaagtgcacggtgtgtgactacacagcggcc

SEQ ID NO: 539034 - DNA, 76 bp, Homo sapiens
aacacggagaccaccccagctacgaacagattcaggactcatctgatgatgtgagaagagttcagaggagggagaa

SEQ ID NO: 539035 - DNA, 75 bp, Homo sapiens
tggcctcgtgcggcggcgaccggagaatccgcatctggggcacggaggaaagaacattggagctatcatgtctgg

SEQ ID NO: 539036 - DNA, 97 bp, Homo sapiens
ccgggacacgcctagcgcgggctccagagacggtaaagaacaggtccaagaaaagctcaaagaaagcaaataccagcagcagcagtagcaacagcag

SEQ ID NO: 539037 - DNA, 82 bp, Homo sapiens
gtgaatctgttccctgctggaacaaattcaagcttcttggacacttaatgattgttggcaagaaatgtgctgctgatctggg

SEQ ID NO: 539038 - DNA, 90 bp, Homo sapiens
ccaagaaccaacccccaaattggctgggacaggagtcagtggatcggtggggaaaatgctgcttaccctgggccctgggctgtagaaaga

SEQ ID NO: 539039 - DNA, 100 bp, Homo sapiens
cacagtgctggcctctgacatctgtgaacagtttaacatcaacaagaggatgtctggggtgtccgcaatgttgccagtgtctgtctgcagattggctacc

SEQ ID NO: 539040 - DNA, 54 bp, Homo sapiens
caaccagtcccagtgagatgaaccaggtacctcagttggaaatgcagaaatcac

SEQ ID NO: 539041 - DNA, 80 bp, Homo sapiens
cttggactgagtcctgcaggacacagtaatctcaggggcgatataatcaatgaggtggtcctaaagttgctcaaggctgg

SEQ ID NO: 539042 - DNA, 100 bp, Homo sapiens
acctcgacacagtccctccctcggtttgcctactgaagagcttatcagagctctacttgggaaagttacttcttgctgcagattctgcgcaggatcggag

SEQ ID NO: 539043 - DNA, 100 bp, Homo sapiens
tcggcttggtgtggtgtgcggaggagctccaggcccgtcggcgcggaggccctggccaacgtcaacattgggagcctcatctgcaatgtaggggccggtg

SEQ ID NO: 539044 - DNA, 98 bp, Homo sapiens
ccaaactggaggatgcctatgtattccctggggatggcgcatcacacaccaaaggtcctggcattgatgtgcctgctccagacatgagcacaggtgag

SEQ ID NO: 539045 - DNA, 116 bp, Homo sapiens
ctgggatcctacgtgcatgaagatggacgaggtcctgtacagcatcgccgagaagaggccacaagaggaagctgaatgaagaggacgccgccagcgagtccagcagggagtccagc

SEQ ID NO: 539046 - DNA, 83 bp, Homo sapiens
cagcaaggtcggcagagcaaggggcttacgcagaaggacctggccacgcctcccgcgacgatgcccctcaacgttagcttcac

SEQ ID NO: 539047 - DNA, 80 bp, Homo sapiens
gtccttctccactttcgccagcccgtgccgcgagcgcggcctgcaggaggggccccttactggacacggcccgagcggat

SEQ ID NO: 539048 - DNA, 90 bp, Homo sapiens
gcggggaccctgctggcctcgtgcggcggcgaccggagaatccgcatctggggcacggaggggaagaaatgatttcccttggggatggag

SEQ ID NO: 539049 - DNA, 100 bp, Homo sapiens
ctctgcacagcaagcccaggctcattatcagataatgagtgtgtatatggcaactaccctgaaatacctttggaagaaatgccagatgcagatggagtag

SEQ ID NO: 539050 - DNA, 96 bp, Homo sapiens
gacgccgcgtgtacccggttgtcctcaggcgctgtcagccttgttgtcctcctggtgcgaagagctcggccgcctgctgctgctccgacatcagaa

SEQ ID NO: 539051 - DNA, 100 bp, Homo sapiens
cagtggtggggttgctacgcctggccattcggcttctccggagagaagagatcagtgctcagttcacagacattgggaccttcgagacagtgtggcaagt

SEQ ID NO: 539052 - DNA, 100 bp, Homo sapiens
cctgatccagctgcgaaagatccgagatcaacaccttgtgttctgacaacaaaggagattgtgacatattgctgggcctaacactaaggtgatgttagtt

SEQ ID NO: 539053 - DNA, 98 bp, Homo sapiens
gacaaaggtcgcctttgctactaccgcgactggctgctgcggcgcgaggttgtgtgtcgcagccctgtcggtgaataacttctgtgacaaccgcgaag

SEQ ID NO: 539054 - DNA, 100 bp, Homo sapiens
cctggggacgacttttacatcatcacggagaggtcctcaaagagggcagcgggctgttcccagatctcctggtgagggagacggaggccgtcatccacaa

SEQ ID NO: 539055 - DNA, 83 bp, Homo sapiens
tgagactcggggcgccagtccgggcaggggcagcgggagccggccggaattcaactagagggcagccttgtggatggccccga

SEQ ID NO: 539056 - DNA, 75 bp, Homo sapiens
accgcggccatcctgcaggcacagttgccgattacaggaattgaatgatctggcacgggaccctccagcacagtg

SEQ ID NO: 539057 - DNA, 100 bp, Homo sapiens
ggggctgcgagcgcggagggcgacgacgacgaagcgcagcatcccagccatcactcttccacctgctccttagagaagggaagatgagtgagtcgagctc

SEQ ID NO: 539058 - DNA, 89 bp, Homo sapiens
ttttcgccgtcatgggcgcctcggccgccatggtcttcagcggggatcctcttggtgtatgacatcaccaaccgctggtcctttgacgg

SEQ ID NO: 539059 - DNA, 75 bp, Homo sapiens
acatagagtaactccacagcatgtgtcttcaagagcttccctaaaagtggctgtttggtggccattctccgtccc

SEQ ID NO: 539060 - DNA, 87 bp, Homo sapiens
gtgggccacctcaaggcccacctgagccgcgtctaccccgagcgtccgaggggtctggttgctgcttacagtggtgacagtgacaat

SEQ ID NO: 539061 - DNA, 105 bp, Homo sapiens
gacggccgcggggactcggagctgagaggagctgctgctcggaccagcgcggtagctacagcaagctgggtagcaggcagatccaaaggatatcatgaagtttcc

SEQ ID NO: 539062 - DNA, 48 bp, Homo sapiens
gcggcggcgccatggcagggcttgcagcaatcatcctcttccagtggt

SEQ ID NO: 539063 - DNA, 110 bp, Homo sapiens
cagcctcctgagaagctgggactacaggtctccaggaaacctagagaaaaaccgttatggggatgtaccctgcctggaccaaactagagtgaagctaacaaagcgaagtg

SEQ ID NO: 539064 - DNA, 75 bp, Homo sapiens
aagaggcatgaactggtgaaggggccgaagaaggttgagaaggacgtggccgctttggagagtcagcctttatta

SEQ ID NO: 539065 - DNA, 101 bp, Homo sapiens
ctcactgacttcaagaatgaagccacggacccttgcggtgctggagaatctggtaaaagcaccattgtgaagcagatgaggatcctgcatgttaatgggtt

SEQ ID NO: 539066 - DNA, 100 bp, Homo sapiens
ctctaagaagctggacaagctggggatgaggggctctaacacctgtgagctaatctttgaagactgcaagattcctggccggaaggtggtggtcgtacgc

SEQ ID NO: 539067 - DNA, 100 bp, Homo sapiens
caactggattatactgtactgcccatgaaaaaggatgttgaccggacagcatccacccgttttgtcaagtgtgaaaagtgtcatcatttttttgttgtgc

SEQ ID NO: 539068 - DNA, 83 bp, Homo sapiens
ctcgtcgacatgagtgatgtggaggaaaacaacttcgagggcagagcattgtttccaagtcgtacgagtgccgtctaaaggga

SEQ ID NO: 539069 - DNA, 90 bp, Homo sapiens
ctctgggagcttctcagccattttccacagatcagtttgtgatggacgcctctgaccccacccagctctctgcatcctgtgtgcagctct

SEQ ID NO: 539070 - DNA, 83 bp, Homo sapiens
taacagactcaacacccagagatcttgattattccagaattcttcttgatgaactatcttctactaaacattgggcatctatg

SEQ ID NO: 539071 - DNA, 97 bp, Homo sapiens
tagaatatgcccagttcgctagtcaaacctgtgagttcaacatgatagagcagagtggaccaccccatgaacctcgtgcacagccagagaacaacac

SEQ ID NO: 539072 - DNA, 75 bp, Homo sapiens
ttgctgacacctacctgaaggacagcagcaagagctggacaacctgctgcatgagaagcggtacctgcgggcgct

SEQ ID NO: 539073 - DNA, 75 bp, Homo sapiens
cagaattagaaaggagctgcttcccaataaggaaacagtgtccctggccagtgtccttccacctgtccacaagca

SEQ ID NO: 539074 - DNA, 95 bp, Homo sapiens
cgtatctctcctggaactgctgcacatatatgttggcattgagtcaaaccatcttctcccaaggtttttgcaggccccaggcatggaagagctga

SEQ ID NO: 539075 - DNA, 100 bp, Homo sapiens
tggagcagtgcctgatcctgcaacacgagcatggcatggccccgcaggtcttcacccaggccctggagtgcatgcgcagctttctatgggaggattctcg

SEQ ID NO: 539076 - DNA, 100 bp, Homo sapiens
agggaggctgctggagtccctggggcagctttatcggaacctaaataccgccaggtttctaagcatgaattgaggaacagaagaagcagagcagatgatc

SEQ ID NO: 539077 - DNA, 90 bp, Homo sapiens
gttcagttggcaaaccagatatatgacttgagagaaaaggaacagttccgtaagctctttattggtggcttaagctttgaaaccacagaa

SEQ ID NO: 539078 - DNA, 74 bp, Homo sapiens
ccgggaggccccatcccgccaggtttctttcaggtgaaagaacttgtcctggacaacagtcggtcgaatgaagg

SEQ ID NO: 539079 - DNA, 50 bp, Homo sapiens
aaatcatacgcggcaggaccaagcaacaggctgaacccatcagaaccact

SEQ ID NO: 539080 - DNA, 75 bp, Homo sapiens
cttcgggaagcagggattccagtgccaagatgttcctcctgctgatcaagagaagctttttatccagaagttacg

SEQ ID NO: 539081 - DNA, 100 bp, Homo sapiens
tgtgttaccaagctgtttcctaccaggtcacacactgttgcagcgcagttacagctttcttcctggctaccataatgggtgtgagatttaagaggtccaa

SEQ ID NO: 539082 - DNA, 121 bp, Homo sapiens
tccgtggccttagctgtgctcgcgctactctctctttctggcctggaggctatccagccctcccgcgacgatgcccctcaacgttagcttcaccaacaggaactatgacctcgactacgac

SEQ ID NO: 539083 - DNA, 126 bp, Homo sapiens
ctttggccgcagtagtatagagctgaccaagatgctatgtgagatcttgaaagtgggcgagttgcgtgttccattgcctaaagaggagaacatttctgctcccttgatctccagctccccagtgaa

SEQ ID NO: 539084 - DNA, 90 bp, Homo sapiens
tgggccctgaggctgcaccaagtggcgaaggagccggctccaagcagtcctgcgttaactgcggccgggaggctatgagcgagtgcaccg

SEQ ID NO: 539085 - DNA, 98 bp, Homo sapiens
tttccatctcttcagagatgaaccagacaaagaaacagccttggtataatagcacgttagcatcaagacgaaaacgacttactgctcattttgaagac

SEQ ID NO: 539086 - DNA, 99 bp, Homo sapiens
gaggagctgtgcagccgcgaggaggcgcgggaggtgttcgagaacgaccccgagacgctttagccagggccctctgaaggatgcacccaacctcatctg

SEQ ID NO: 539087 - DNA, 72 bp, Homo sapiens
aggaggaagactggatgccaatgatcctgttttagtgccaaagaaccctgcgttcatggggaagatggttga

SEQ ID NO: 539088 - DNA, 108 bp, Homo sapiens
gggagatcgtgggcgagctgggcgacggcgccttcggcaaggtttacaagatgccttcaattaagttgcagagttctgatggagagatatttgaagttgatgtggaaa

SEQ ID NO: 539089 - DNA, 50 bp, Homo sapiens
agctgccctctaagaggcagatgcaggccagaagcggactcctagaagag

SEQ ID NO: 539090 - DNA, 98 bp, Homo sapiens
caccaccttggtggagaacaagaaagctcagctggtggtgattgcacacgacgtggatcccatcgagcaaatgtgccgagcttgaagaagaattgaaa

SEQ ID NO: 539091 - DNA, 71 bp, Homo sapiens
atggattgggtaaatgctgtttgtgccttctataataaaaaggatccagatgaagaaatggccaaaatcga

SEQ ID NO: 539092 - DNA, 98 bp, Homo sapiens
ttcgcttggtgtcctcctggcctcagcaacctgacaattctgtcgtgtcccgacggccaatgggaacgtggaggccaaagtggtgtgcttctaccgga

SEQ ID NO: 539093 - DNA, 108 bp, Homo sapiens
ggggagattacctgcttttgaagccagaaaaatgttatcttgtaaaaggaaatatttatccggttcaggaacaagtgcatcccactctctcagctaatgaagagtctc

SEQ ID NO: 539094 - DNA, 75 bp, Homo sapiens
gatcctcaaccaggcacaggctctggagaaccacactgagaggcatttcatccttcatgaagccattcaggattt

SEQ ID NO: 539095 - DNA, 98 bp, Homo sapiens
cgccctggagctgctagagatccggaagcacagccccgaggtgtgcgaagccaccaagataaaagaatcagagtgtctcaacccttgacaagaggacc

SEQ ID NO: 539096 - DNA, 100 bp, Homo sapiens
gcttgcagcccatttcgatgctgcgaaacggtgtacagtgccaccaacgtggagctggtgacacgcacacgcacggagcacctctctgatcaggacaagt

SEQ ID NO: 539097 - DNA, 75 bp, Homo sapiens
gcccaatgtgctctgggacctggttgacaggatagggtacatgtcccagagcaagcacacggaggcccgggagct

SEQ ID NO: 539098 - DNA, 116 bp, Homo sapiens
atgaagaccaatttttacgtctagatttccatgcccatggaagcaaagaacagtctgaacttgatcaagatttggatgatgttgaagaagtagaagaagaggaaactggtgaagaa

SEQ ID NO: 539099 - DNA, 95 bp, Homo sapiens
gggaccatcacgcagatccgcatcctcggggatcccaacaagccctcaggattcagaagtgttaaagctcctgtcactaaagtggctgcgtcgat

SEQ ID NO: 539100 - DNA, 100 bp, Homo sapiens
gtgactttgaacatgctggtgccgctagccaagctgtcctgcctggatattgatgatgttaagaagttcaaaccgggttacctggaagctactcttaatt

SEQ ID NO: 539101 - DNA, 82 bp, Homo sapiens
ggaataaacatgcaatgaacccaaaagggtacttccattcaaccaacccttggtgccaatggtgtgatattagacaaccagc

SEQ ID NO: 539102 - DNA, 97 bp, Homo sapiens
ctagactgcaattagccattgaggagagagatgaagcaattgcacgagccaagcatatggaaatgtctctaaaagtaaccttcatcaccctggtgtt

SEQ ID NO: 539103 - DNA, 74 bp, Homo sapiens
aactctcccgtcaacaccaagaatcaagctgtgaagggtcatgtaggtacaacagcaaccaagaagatcgatgt

SEQ ID NO: 539104 - DNA, 98 bp, Homo sapiens
agattggctgcctcatccgcttctatgcaggtgtcatggagaaactccagctgggcccagagattctgcagcgggaaaatccaaggcttatttatgcc

SEQ ID NO: 539105 - DNA, 90 bp, Homo sapiens
tcgctcttgtgccctagcaccccgagaaccgtcagtttgagccagatgtcaaataaagtgcccgtggtgcagccatcccatgcggtccat

SEQ ID NO: 539106 - DNA, 82 bp, Homo sapiens
gggggccgaactggccctggactacctctgcaggctccaggaggccagagctctactgaagcggcggcggccccgggggcca

SEQ ID NO: 539107 - DNA, 75 bp, Homo sapiens
tggtgaagtggaaaggatggcccccaaagcgccatgtcagaaccggctggggatgtccgtcagaacccatgcggc

SEQ ID NO: 539108 - DNA, 100 bp, Homo sapiens
ggctgagcggcgagtttccgatttaaagctgagctgcgaggaaaatggcggcgggagagtgcctggtgaagaatgtgatgggatcactagcatgtctgcg

SEQ ID NO: 539109 - DNA, 100 bp, Homo sapiens
gagctgactacagaggagcaggatttgcacccctcgctgggcttgctttggcaacagagtgcctgacccaggtcaggaactagcttctaaaaaatccctg

SEQ ID NO: 539110 - DNA, 110 bp, Homo sapiens
cgcgaagctggccaaagcctgcccagacggctcacctgtgcgggatggaacaaaagaacactctgctccagccaaggtggtgagggcagctgttcctaaacagcgcaaag

SEQ ID NO: 539111 - DNA, 50 bp, Homo sapiens
ggtgcggggagcggagccatggcctccgaggaaaatttgctgtggttaga

SEQ ID NO: 539112 - DNA, 98 bp, Homo sapiens
ggacaaaggaacaggtatctcaggaactcagcgagatgctgtacacagaccggcccgactggcagagtgtgatgcagtacgtggcccaaatctacaag

SEQ ID NO: 539113 - DNA, 75 bp, Homo sapiens
gatgtgaaaactctgttactgaagggacccgagctgatccagaaagccaacggtctccacggcttcatgaattgg

SEQ ID NO: 539114 - DNA, 100 bp, Homo sapiens
tgctgcaggcggcccactggcagttcgaggaatactcccccagttgcaagaggcgcaggaccgtggaagacttcaacaaattctgcacctttgtcttggc

SEQ ID NO: 539115 - DNA, 80 bp, Homo sapiens
cgccatcctgcagctgggcaacatctgcttctcctcctcagagaaccaaaaacttttgctagaaaatcagcttttacgag

SEQ ID NO: 539116 - DNA, 100 bp, Homo sapiens
catgagtggttccatgatgggaagtgacatggggaggctcagaagcaagaagaagatgaaagttgtgccgctgctgaggcgttgacagcgcctgaggatg

SEQ ID NO: 539117 - DNA, 75 bp, Homo sapiens
gcaagaggatggggccctggatgagggggaagggcctcaaagccagaaggtccaaggtgaatgcccgacgtccag

SEQ ID NO: 539118 - DNA, 100 bp, Homo sapiens
atgagtggaacatggctagcaggaatgcttactgttgcgtggttcgttattaacagggagctgcctcagccgccccccttgctgtcgccgcagaatgccc

SEQ ID NO: 539119 - DNA, 90 bp, Homo sapiens
gggacaccctggaagccaggaaatgaacccttaggagaaatcttgagagtggacagcaattgtgaagatcgccagagagttctgtgtttc

SEQ ID NO: 539120 - DNA, 50 bp, Homo sapiens
ccagcaatattgtccagatgaaggacgatgtcatgtggcctgtgttttgg

SEQ ID NO: 539121 - DNA, 76 bp, Homo sapiens
cttgtgatccatgggcgagtctacgatgtcacccgcttcctcaacgagaaagccattgatctggtgacgaaagcca

SEQ ID NO: 539122 - DNA, 83 bp, Homo sapiens
cagatagtggaatatcctccatccgttcttttaaggagccggtgaaacctgaagaaggcagagatatggcaaacaggattggc

SEQ ID NO: 539123 - DNA, 100 bp, Homo sapiens
aaaagatgatcacaattgaggaagcacttgctagggacttaaagcagcgtcttggccacaggttacagctcacagatctgttgatcaaaccagtgcagag

SEQ ID NO: 539124 - DNA, 82 bp, Homo sapiens
caacgggaagggccggcccgcctccctggccggggcgcagttcggaggttcaggtggctattatcatggaaaactaattttt

SEQ ID NO: 539125 - DNA, 100 bp, Homo sapiens
gcgccgtgtaactgtgaatctttcaaagtatcctagaaggaaaacatcaccatggctacagaaattggttctcctcctcgttttttccatatgccaaggt

SEQ ID NO: 539126 - DNA, 50 bp, Homo sapiens
ccaagatcaggaacctgccctgctggggaccagatgacgatgggaagaca

SEQ ID NO: 539127 - DNA, 75 bp, Homo sapiens
tgagcaaactcttcttctctgatcagtgcccagaacaaggaaacagaagatgattgaagaatcactgaagattaa

SEQ ID NO: 539128 - DNA, 48 bp, Homo sapiens
gggaacgctcacggactgtgtgataacaaagctttattcgtcatttcc

SEQ ID NO: 539129 - DNA, 80 bp, Homo sapiens
ggtttttcggatcatgtctggtggctccgcggattataacagacaccattcgcttttcacccaagatgatttgatgtctt

SEQ ID NO: 539130 - DNA, 75 bp, Homo sapiens
catttctatggtcctcctcacctatggccgctggcaggtctctaattaacagaagatggcaaagcccagccacag

SEQ ID NO: 539131 - DNA, 97 bp, Homo sapiens
ctcagaagacagagggttttcttttgaggcctccccatggccacccatggaccagtcggcattcacttcctcccttctgcggcccataaaagccctg

SEQ ID NO: 539132 - DNA, 83 bp, Homo sapiens
ataagagatgaagagacaggccaggtcaggctcaccaagcaggtaacacaagtggcaagacagccgggaacccctaccccatc

SEQ ID NO: 539133 - DNA, 75 bp, Homo sapiens
ggactgagtcctgcaggacacaggcatcattaagcaagctaatggaaacacttggtcaagcagaaccatattttg

SEQ ID NO: 539134 - DNA, 101 bp, Homo sapiens
gcgggaaatcgggctgaagcgactgagtccgcgatggagaatgagtccctggaacgccagatgcgtgaaatggaagagaactttgccgttgaagctgctaa

SEQ ID NO: 539135 - DNA, 83 bp, Homo sapiens
caacattcccaacagccaccaccaccaccagatggccggagcctcaacagaaagctcctttagttcctcctcctccaccgcca

SEQ ID NO: 539136 - DNA, 100 bp, Homo sapiens
cgtgtgacagtaactgaacattggtctaaagtctttccaaaaggtcaaggttcacaagacaggccgacggtcgcaaggtcctacggtcaagcatccggga

SEQ ID NO: 539137 - DNA, 101 bp, Homo sapiens
atttcggatcctttgcagcagtgcttcaaaaaagatgaggagaaggcagagcccccccaggctatgaatgccctgatgcggttgaaccagctgaagccagg

SEQ ID NO: 539138 - DNA, 100 bp, Homo sapiens
attgaataccttcaacccaatccaggctttgacacatcttcctcatcttcgaactcagcagcctcctcatccttcaaatttggtgtctcatcatcctctt

SEQ ID NO: 539139 - DNA, 75 bp, Homo sapiens
atgggttttccggaagccgccagatcccaagcaggtctgttccagcctctgattgtgtatcggggcaagatttgc

SEQ ID NO: 539140 - DNA, 100 bp, Homo sapiens
atcttctgccgcaccaggctcatcctgtccatcgtgtgcctgatgatcacgcagctggctggcttcagtggaccacctgccccctgtcatggctcagaac

SEQ ID NO: 539141 - DNA, 101 bp, Homo sapiens
gcgctactctctctttctggcctggaggctatccagcgaactttatattgctgttggaatatctggagccatccaacatttagctgggatgaaagacagca

SEQ ID NO: 539142 - DNA, 50 bp, Homo sapiens
tttggattatcacctgaactatttaaagggtggttctcttcccaaagtgg

SEQ ID NO: 539143 - DNA, 50 bp, Homo sapiens
cagctggtataattcatagagagccctctggcacaaatggaagaagaaag

SEQ ID NO: 539144 - DNA, 100 bp, Homo sapiens
atggtatcaagaaaccccgatcacaaagatacgaatctcttaaggggggtcaacagttgtcaccgacagatggctgagattgctgtgaatgccgtcctca

SEQ ID NO: 539145 - DNA, 96 bp, Homo sapiens
tagttcaaggtttggtggttgatatggaagttcggaaaactagcatcaaaattcccagcaacagatacaatgaggcttatgtacataaaagcgtga

SEQ ID NO: 539146 - DNA, 100 bp, Homo sapiens
gccaacgcctcggaccccgcctgggacttcgcctctgctctcttcttcgccagcacgctgatcaccaccgtgggctgaaactgccgccaaccggatctgt

SEQ ID NO: 539147 - DNA, 88 bp, Homo sapiens
gagaactcctacccctggccctacggccgacagacgacagccagctaaaggtgtggatgagcaaatacggctggagtgccgacgagtc

SEQ ID NO: 539148 - DNA, 74 bp, Homo sapiens
caagagtggagacaaagagatgagcagatctcttccctgaagaacaggctgaaaaaggtctccacaaccactgg

SEQ ID NO: 539149 - DNA, 82 bp, Homo sapiens
gcagaagaagtttagcagggcccaggagaaggctgaattcggtcagaagagaatccatctgaatagccagtttccaggcacc

SEQ ID NO: 539150 - DNA, 75 bp, Homo sapiens
cttcttcaaccccagcttcgccttcagctcgcacttcgaccccgcgctgtgcttcgccgtgagccgctcgctgct

SEQ ID NO: 539151 - DNA, 90 bp, Homo sapiens
cacatttgaagtatatgttgaagtggcctatcccaggacaggtggcactctttcagccaaagggaaaggacagtcccaaaccagagtgaa

SEQ ID NO: 539152 - DNA, 83 bp, Homo sapiens
cggagctgggcgcggattcgccgaggcaccgaggcactcagaggaggtaagtaaggaggtctctgtaccatggctcgtacaaa

SEQ ID NO: 539153 - DNA, 100 bp, Homo sapiens
ccgatttaaagctgagctgcgaggaaaatggcggcgggagactggtcgaattgacaaatcttaccctacagtatgtggccacacaggaccagtgctggac

SEQ ID NO: 539154 - DNA, 100 bp, Homo sapiens
ggagcgcgatgtggagcgcttctttaagggctacgggaagatcctggaggtggatctgaagaacggggcacctcgatttaaagatttccagcaacaggac

SEQ ID NO: 539155 - DNA, 100 bp, Homo sapiens
gcggaaaccagtggccacagcatctttgtctagccccagtgcagaattggcagagggggtcgatttgggaggaaaggtgtggctataaactttgttactg

SEQ ID NO: 539156 - DNA, 100 bp, Homo sapiens
agagcgagctgagtggttgtgtggtcgcgtctcggaaaccggtagcgcttgcagcatggtgtctgatgatttgtgagcctcaagtgactactctgtggaa

SEQ ID NO: 539157 - DNA, 50 bp, Homo sapiens
atgtcagaatccacatggatgggcttgtcaaaattcccaaaaatgatccc

SEQ ID NO: 539158 - DNA, 100 bp, Homo sapiens
gaggtttgctgagctggttggccctgtgatccctcaagactggtccacggagtgtatgaccacaaacagccatcaagctgcaggacaagttcgagcatct

SEQ ID NO: 539159 - DNA, 75 bp, Homo sapiens
acggcacagcagatcaacaagctggaggagctgtggaagtgagaaagatcagtctaaagaaaaggagaagaaagt

SEQ ID NO: 539160 - DNA, 97 bp, Homo sapiens
ttcggcttcaagctcctgtacccagatcactttcacctccttcgagattgcagcaggagagaagattcctttgagccaggaagaaataactctgcag

SEQ ID NO: 539161 - DNA, 101 bp, Homo sapiens
agaggaggaggagaagaaagcggagttcgagcggcagcgaaaaatacacgatgaggcgagtggtacgacagagcaagtttcggcatgtatttgggcaagcg

SEQ ID NO: 539162 - DNA, 98 bp, Homo sapiens
aaagaagccgattccagttcctgtatgatgttcagcttacagttgaacatgagtcttcttatgattagtgagaatgtaaaattggctcgtgaatatgc

SEQ ID NO: 539163 - DNA, 75 bp, Homo sapiens
tgcgcaaattcactccccagtacaaagggctgtgggctgcatactggccgagctgctggcgcacaggcctcttct

SEQ ID NO: 539164 - DNA, 100 bp, Homo sapiens
agctggacgagctggagaaggccatcaccacgcagaacgtcaacaccaagtgcatcaccatccccagagtgcctggaagagctgggatgtctggttgagt

SEQ ID NO: 539165 - DNA, 100 bp, Homo sapiens
ggtcgccggagccgcgccccaccccgccagctccagagccacgtacgccagatgacgtgtactactgtggaataaagtacatcaaagatgatgtcatctt

SEQ ID NO: 539166 - DNA, 100 bp, Homo sapiens
tgtgacagacacttcacatactgctgctgactggaaataccggcatgcaggattgatggccttatctgccattggtgaagggtgccaccagcaaatggaa

SEQ ID NO: 539167 - DNA, 100 bp, Homo sapiens
accccgcgggatacgcctcagcgcggtgatggaactgtactggaacaatgggagaagctggtagcttataggaagccaagatgaccagaatgtttttaaa

SEQ ID NO: 539168 - DNA, 74 bp, Homo sapiens
actccaaccagataaagattctgggaaatcagggctccttcttaactaaaggaggtgtgattgcctatatcagt

SEQ ID NO: 539169 - DNA, 75 bp, Homo sapiens
caatatctctgggctttcacaggtggtactttggaaaacttggccgaaaagatgctgagcgacagctattgtcct

SEQ ID NO: 539170 - DNA, 100 bp, Homo sapiens
tgctgcccagcacatggagcctgcacgcgcacggtttggccaaagaagcccccatactcccggtgaaaaaggattacagtttaaagacaatttctgtgat

SEQ ID NO: 539171 - DNA, 96 bp, Homo sapiens
catggccgtcatgccgactctcatacaggcgggcgccagtgcatcttctagagagtattatgagggaggccgaggacttcatgctccggacagaga

SEQ ID NO: 539172 - DNA, 87 bp, Homo sapiens
aaccccaaaagagccaaactcagctcgcccggtttctcggcgaatgacagcacaggaggaggaagccaagaatctggtgagcgaagc

SEQ ID NO: 539173 - DNA, 75 bp, Homo sapiens
ttcatcaaagacgtaatcaaagacggcaacgcgcttatcagcgctatgagaagattttttatcaagcagaaatgc

SEQ ID NO: 539174 - DNA, 60 bp, Homo sapiens
ggtccccgcgttcacagccccagcgcaggttttaaaatcaaagatgggaaaatcggagaa

SEQ ID NO: 539175 - DNA, 100 bp, Homo sapiens
ccctgtgaaggtgaaagtggagaaatcaggagaccccaagtggctgcacacggtactgggctccatccagcagaacatccactctccggccctgctcttt

SEQ ID NO: 539176 - DNA, 100 bp, Homo sapiens
tgcatacttgtgggaagattttgattatccatgagattacagttgtaacttcatagactcccaaagggaaattcttgctcctctggtgcaagtgtggtag

SEQ ID NO: 539177 - DNA, 98 bp, Homo sapiens
gctcgatctcagagctcagacacagagcagcagtcccctacaagcctccacctcctggatgccctcccaatgctgctcagcttgcagtcatgcaggga

SEQ ID NO: 539178 - DNA, 76 bp, Homo sapiens
aggagctgttagccaggctaggtgcctgcaggttgaagaactgagctctatctgattccacctgctcctacgaagc

SEQ ID NO: 539179 - DNA, 98 bp, Homo sapiens
ttggagccgtctgcaaagtgtccccggcaagaaggtgttggtaaatcatgcttattgctacagtttacagacaagaggtttcagccagtgcatgacct

SEQ ID NO: 539180 - DNA, 75 bp, Homo sapiens
cgcggctgtgcaagtacctgccagagaacgacctgaagtacatggactggacctgcctggagcccagcccagagc

SEQ ID NO: 539181 - DNA, 110 bp, Homo sapiens
ggaccggctgtatgattaggccacaatcttcaatgagtaaacatattcctcaaaatgatgcttcaacacccaggccaggtctctgcctcggaagtgagtgcttctgccat

SEQ ID NO: 539182 - DNA, 100 bp, Homo sapiens
ctgggagctggaggaaccgcggcaaatgaagaggattcttccagttctctagtgaaggatcacctttttcagcaagagacagttgttaccagtgagcctt

SEQ ID NO: 539183 - DNA, 83 bp, Homo sapiens
gaattgcctttgggactctgaaggctgaagcaaacagcggcacaacaagctgtggcgtcagcagacagacagcagcctccagc

SEQ ID NO: 539184 - DNA, 105 bp, Homo sapiens
ctccctatcataccacactcttcagcgaccacgcaggcactttcccggtccccagtaccatgcggagaccatcaagaatgtgcgcacagccacggaaagctttgc

SEQ ID NO: 539185 - DNA, 85 bp, Homo sapiens
gttccttccagtttggatatgacattggtgtgatcaatgcacctcaacagggatgtgtttggccaaatgggagagtggttacaac

SEQ ID NO: 539186 - DNA, 97 bp, Homo sapiens
atcagaatgatccccttctgccaggttccataggcagttcttaccaagaagatgtcgattccattctccaacacccactaccgaattccacaaggat

SEQ ID NO: 539187 - DNA, 75 bp, Homo sapiens
cgggggtggaggtggtgcctctggcagtgacgaggacgaagtgtccgaggaggctgaaccgtctgagcccagaag

SEQ ID NO: 539188 - DNA, 102 bp, Homo sapiens
tggaaccgttgattggagatatgcccttagttggagctttgtctatcttcttccttaggaaaccagcgattgaaaatgattgcatccaggacttcatgttcc

SEQ ID NO: 539189 - DNA, 51 bp, Homo sapiens
aggagctgaccaggaagacctactctcagccagcagatctcctgaaggttc

SEQ ID NO: 539190 - DNA, 101 bp, Homo sapiens
cgagcagccgtgggcagcggtggagcatgagtctggctgcttaacagagcgttccaaaaagaggactctccagctactttttattgcatcagtatgcagtg

SEQ ID NO: 539191 - DNA, 100 bp, Homo sapiens
caataggcagctatttcacacttcagatgctgaagcgagtccctgagctcccggaagggaaaaggccgaggcatcagcgtgtgaagaccgcaaagacgat

SEQ ID NO: 539192 - DNA, 87 bp, Homo sapiens
gggaatcctcatctccactcagcgggcccaggcgttcgtggcattcagggatgtggctgtgtacttcacccaggaggagtggaggtt

SEQ ID NO: 539193 - DNA, 100 bp, Homo sapiens
ctaggacaagactgtatgatagtgttagttccacagatggggaggacagtctagagagaaaggtcatagtgaaagtcaataatggcatcagagatttttc

SEQ ID NO: 539194 - DNA, 108 bp, Homo sapiens
agccgcaccatgccgctcctaagcctgcacagccgcggcggcagcagcagtgagagcaggttacgggcaggacttgagtggcttcggacagggcttctcagaccccag

SEQ ID NO: 539195 - DNA, 100 bp, Homo sapiens
agagggcttcgtgccctgtgcacgtttgccacctagtgaccaaactgaaacccagtgacttgattgtaaaaatttacagagcggaatcatatgctggtct

SEQ ID NO: 539196 - DNA, 100 bp, Homo sapiens
tggacaaaataagaaatgatttttgtaataaacagagtgacagcctcctgacaaggtgatccgggcgggccccgcaggaattttatcccctcaccggcct

SEQ ID NO: 539197 - DNA, 82 bp, Homo sapiens
tacggggagcgcgccgagctggatgactcggacgggagtgcatccgccccaacccttttccccctcgtctcctgtgagaatt

SEQ ID NO: 539198 - DNA, 82 bp, Homo sapiens
aaagatttactttcccatccgtgactcctggaatgcagatgaaagcacccccgccaagaagacagacattccctggcggctg

SEQ ID NO: 539199 - DNA, 95 bp, Homo sapiens
caggagctacaacttgtccacgacaccggctacttctcagctttaccatccctggaggagacctggcagcagggcagtgatcacaaccagattca

SEQ ID NO: 539200 - DNA, 97 bp, Homo sapiens
tctgcagaaagcagctccgagccccagaccagctctcaggatgactttgtgaccaagaatatggcccaggtgaccaaagccctggacaaggccctga

SEQ ID NO: 539201 - DNA, 101 bp, Homo sapiens
taaagtggaattgcatgggaaaatcatggaagttgattactcagtctctaaaaagctaagatgtggaattagaagaagctattagaagaagtcttgaggaa

SEQ ID NO: 539202 - DNA, 83 bp, Homo sapiens
cgacgaccacgtgcggaggaaggactcctcgctctatataggtgagcgagtgctgtgctttcatgggcctcttctttatgaag

SEQ ID NO: 539203 - DNA, 80 bp, Homo sapiens
cgtggacactgagccccagaaacgaaatacagaggagtcatcctcacctgttaggaacatgacctttgacctgccatcag

SEQ ID NO: 539204 - DNA, 80 bp, Homo sapiens
ggaaaatcgcaaggaagccgggtcaaaatgcagatcttcgtgaaaacccttaccggcaagaccatcacccttgaggtgga

SEQ ID NO: 539205 - DNA, 82 bp, Homo sapiens
ttgacgtgatggtgaacggcaaggtactggctgtgatcgaacttctcaaccctcagagacttagatcttccacctcactccc

SEQ ID NO: 539206 - DNA, 98 bp, Homo sapiens
catgggccctggcggtggacgagcaggaagctgcggctgagtcggatacagttgatatattagttggatggcatatagatcatactcagaaaccttcg

SEQ ID NO: 539207 - DNA, 96 bp, Homo sapiens
ttagaattcaacaaatataagtatacagcatctgtcctcatagcagggaagtgtttgtttatgtcagggctcagtgaggtccagctgaaccatatg

SEQ ID NO: 539208 - DNA, 102 bp, Homo sapiens
ttcttgggcgtcgttgtcaccatcgtctccgccttccagttcggagagaacaaaatccagtctcatagcagaggagaatataatgtttacagcaccttccag

SEQ ID NO: 539209 - DNA, 100 bp, Homo sapiens
gtgcagttgttccactagtaggcaaattaaagaaattttacgaattttctcagaggttaggcagaactggggctcccttgcatcttccagttacaaattc

SEQ ID NO: 539210 - DNA, 75 bp, Homo sapiens
ccatcaaccagggcaactatggaatgagctgaaagccagtggtggcgaaatcaaaattcataaaatggagcaaaa

SEQ ID NO: 539211 - DNA, 99 bp, Homo sapiens
ttgcattggcctccggcaggcgccccccgggggcgggaagctggctctcaactgtggtcaatgctgaccagatcctcgtcatcaaggatggctgcatcg

SEQ ID NO: 539212 - DNA, 82 bp, Homo sapiens
cttgcgggcccggaactacgagtacctgatccgcctcttccaggagtgggagcaattctgtggtgttcttggtcacacattt

SEQ ID NO: 539213 - DNA, 100 bp, Homo sapiens
ccatggacattggaaggggaagccccacatcagagctgttcagacgccatttggaatgaacaggaaaaggctgaactttttacagataagttttgtcaag

SEQ ID NO: 539214 - DNA, 75 bp, Homo sapiens
gcctcagccgcttggggcccgcacggaccctctacttcaaacgatgccaacgggactgcaaagccgccttttctc

SEQ ID NO: 539215 - DNA, 74 bp, Homo sapiens
cgttggctccagacaaataaacatggagtccatcttccacgagaaaggaaatggttgaccccatttgaccctgt

SEQ ID NO: 539216 - DNA, 82 bp, Homo sapiens
gtcgcgtgtctaggtgagtcgcggtgggtcctcgcttgcagttcagcgaccacggttgaaatcacaaagattagacaccttt

SEQ ID NO: 539217 - DNA, 100 bp, Homo sapiens
cagacatgtcttggagaaaacccatatatccgaatgaccatgctcgacagctgaccaaggccatgatgcgaaaggccacggccagccgcctggtcacgca

SEQ ID NO: 539218 - DNA, 98 bp, Homo sapiens
ttcgttacaagttatcctggtagagtgggcatgaaggcctcggaggcatgtgtgaatgagcttaaccagtggctgtctgcgctgcggaaggtgagcat

SEQ ID NO: 539219 - DNA, 75 bp, Homo sapiens
cactcaaggatcagttggctttagcaattgaggctgtgatcaatagccaggaatggactttgagccgctccattc

SEQ ID NO: 539220 - DNA, 100 bp, Homo sapiens
tcagcgcccggcagccttcgacgcgatgttccgccggagcttgaatcgttttataacagacgagtacctttggaaaggtcacgctctcgccacaatggag

SEQ ID NO: 539221 - DNA, 90 bp, Homo sapiens
ctttgatgctgttatggtttgcactggacatttcctgaatccccatttacctttggaagcctttcctgttgttgacctcctgtactggag

SEQ ID NO: 539222 - DNA, 75 bp, Homo sapiens
aggcacctggataaccttttgctaacaaaaacagtgaaaatgcctcgtgtaaaagcagctcaagctggaagacag

SEQ ID NO: 539223 - DNA, 89 bp, Homo sapiens
ggagctagctggatcctctaggcaggaactcaatgttcgaaaagttacactgtctacagataaaaacaagtatggcattcggctaaggg

SEQ ID NO: 539224 - DNA, 100 bp, Homo sapiens
ccgcctcgatgcaggaggacgaacaggcacctctgtgggcatatattgcttgtgcctgtggccttttcatttaccagtctttggatgctattgatgggaa

SEQ ID NO: 539225 - DNA, 127 bp, Homo sapiens
gtcggtcaggggtttgactggcagagtacggctgctgttggagttttgaaagctgtacaatttggtgaatggaatgttacgttcataacttactaaggattagtgtatattttccaaccttgaggca

SEQ ID NO: 539226 - DNA, 101 bp, Homo sapiens
ctgcccgccgccgattgaaaacactaatgaacttactgcgccatttgaaattcacacgcaccaacaaaatgggggtgaaatgacaatggatgctctgttgg

SEQ ID NO: 539227 - DNA, 50 bp, Homo sapiens
acggcatctgctttgaggccaaggttcaaaccttgtactactcagctgat

SEQ ID NO: 539228 - DNA, 98 bp, Homo sapiens
tctgctaacaccagatagtggaaagaaaccatgtgctgaaatgtttgacgacactgatggtttggccgaagaacagttgagaattgttgaagaacaaa

SEQ ID NO: 539229 - DNA, 50 bp, Homo sapiens
tcattgcctccagtaatcaagtgcttcacttctgtctgggcaacagctcc

SEQ ID NO: 539230 - DNA, 75 bp, Homo sapiens
tggcattttttgatgattgtgtagataaagattttaagagtggacttggtattaccataattcctatgaatgtag

SEQ ID NO: 539231 - DNA, 74 bp, Homo sapiens
tcatctttcacaaaggccttcacaaccgtcagcttttctttcgcaaaaagctgcttcactcatcccagatgctt

SEQ ID NO: 539232 - DNA, 83 bp, Homo sapiens
ctcaattacacttcgactctcaaagcaataccaggatagctgttgtttcagagaaagacacatcaccttcactttgggatatg

SEQ ID NO: 539233 - DNA, 74 bp, Homo sapiens
tctttagctgaaatacttctgaagagacgagttgtactgctgtcacaggaaatggacgctggattacaagcatg

SEQ ID NO: 539234 - DNA, 71 bp, Homo sapiens
cgggtggcggctcgggacggaggacgcgctagtgaaatctgaaatagagtactatgctatgttggctaaaa

SEQ ID NO: 539235 - DNA, 90 bp, Homo sapiens
ttattttttctcatggatgttcttcttcgagtatttgtagaaggcattaatcttatcactggtcatttagaggaaccaatgccaaacccc

SEQ ID NO: 539236 - DNA, 98 bp, Homo sapiens
tagtttcggaaggagacatcgaagcagggcgaggcgcagagggcgttgcggactcatgccccagtcggcagtgcgggaggcagtgaccttcaaggatg

SEQ ID NO: 539237 - DNA, 83 bp, Homo sapiens
atcttctcatgcacagaggcaacaaatggcaactttctgagaggactcacgaatggcagtggaagatacatctctgctgctcc

SEQ ID NO: 539238 - DNA, 100 bp, Homo sapiens
tctacgagctgtttctcatctttatactcttccagcaagagtgagccatggagctacgtgtggggaacaagtaccgcctgggacggaagatcgggagcgg

SEQ ID NO: 539239 - DNA, 82 bp, Homo sapiens
gttgacaaggcactgctttttcatgacgccagagactgctgctactttgaaacgtacgatagaggccctgatggacagagga

SEQ ID NO: 539240 - DNA, 75 bp, Homo sapiens
acgggagaatgattccgcgtctgtaatccagaggtaccgagcccctgaactgctgttgggaaccaccacgcagac

SEQ ID NO: 539241 - DNA, 109 bp, Homo sapiens
gccaaagagcttttcctaggcaaaatcaagaagctgcagatctgggacacggccggccaggagcggttccgcaccatcacccagagctactaccgcagtgccaatgggg

SEQ ID NO: 539242 - DNA, 101 bp, Homo sapiens
tgctgggtgagatggcagtgtgtgcaaaaaagcgccccccagcactgctagaggggttcaacatccgggagagcaccagctacattgaggaacacatagac

SEQ ID NO: 539243 - DNA, 95 bp, Homo sapiens
gaacgtgccatggagacgcttaacgctctttagtcaagagacggtgatgaagtttgtgccgcggtacagcctcgtcctagaactcagcgacagcg

SEQ ID NO: 539244 - DNA, 110 bp, Homo sapiens
cagaggggcctcccggtgtcctcgggatatcgccaatgtgatgcagaggctgcaagttgtattccctgaatgactataaaccacccatttcgaaagcgaaaatgacccaa

SEQ ID NO: 539245 - DNA, 88 bp, Homo sapiens
cttaaggaagtaaaatggcggacctggcgaacgaagggattttatattggaagacatggatcttgctgccaacgagatcagcatttat

SEQ ID NO: 539246 - DNA, 82 bp, Homo sapiens
ccgctcccccgatcctattcccagtcgtgttttaaaatcaaagatgggaaaatcggagaaaattgcccttccccatggccag

SEQ ID NO: 539247 - DNA, 126 bp, Homo sapiens
cagcgtcaccgtggggggcaagcagtacctcctaggactctatgacacggccggacaggagattttacccagtgagaacatgtttaggacacttttctacagtggaagaaaagcttctgtctgcag

SEQ ID NO: 539248 - DNA, 97 bp, Homo sapiens
ttgtgggcggtgccatgttcttcatcggtttcaccgcgctcgttatcatgtggcagaagcactatgctgcagaaccttggcctgaaaatgctacatt

SEQ ID NO: 539249 - DNA, 75 bp, Homo sapiens
aatttgatagtcattcgtaatcagcaggccaaagactcagaggtacaagaaaattccccaggacacagagctggt

SEQ ID NO: 539250 - DNA, 89 bp, Homo sapiens
gtgccagcacctttcggcttctgagacggcggcagcagcggcattcagagtgatgatgcgggtgtgctggttggtgagacaggacagcc

SEQ ID NO: 539251 - DNA, 98 bp, Homo sapiens
ccccaccgtgcagcggggcatcatcaagatgatttattcaggagattgagcatgctctgggtcttggcccagccaaacagtgtcctcttcgagagttt

SEQ ID NO: 539252 - DNA, 121 bp, Homo sapiens
cgcggagctgcagtttctaataacattgttgtccgcccatccaattatctttctcaaggaatagatctttctggaatagaagtgatagaaaatgatctactttttattgcaagagcccgac

SEQ ID NO: 539253 - DNA, 95 bp, Homo sapiens
gccctctgacctgcaggtattggcgatccatagctaagacgccaggtcccccggaaacctagaaatgatgtgccgtttgggggtgctaaagctgg

SEQ ID NO: 539254 - DNA, 75 bp, Homo sapiens
actctgtttacgttattatcaacacaggaccagcatgctacaagtgaaaactgatgagaaactgaatgtgtctga

SEQ ID NO: 539255 - DNA, 80 bp, Homo sapiens
ttatcatcagtgtgttagctttccccaatgtttcagcatcaggcaagtggctggatggtattcgaaaatggtattacaat

SEQ ID NO: 539256 - DNA, 100 bp, Homo sapiens
ctcacattcaagctgataggctgcgctaccggaatgtcatccagcgagtgattagtttgtgaagaaatatgggaacctttttagcttggagcttggtgac

SEQ ID NO: 539257 - DNA, 82 bp, Homo sapiens
tcgacaagtgggaagaccgatgggaatggttaagactgatatcctgtggagcacccagacaaattcctgaagtttggcatga

SEQ ID NO: 539258 - DNA, 90 bp, Homo sapiens
acaacgccttaacccaaggaagtgactcaaactgtgagaacttcaggttgggggccgtcccgctcctaaggcaggaagatggtggccgca

SEQ ID NO: 539259 - DNA, 100 bp, Homo sapiens
agggaaaagaaactatctgcaaaggaagattctcatgcacagattgaaaccctctgagatatcaaccccctaggacacattcagctaacgtattttagca

SEQ ID NO: 539260 - DNA, 75 bp, Homo sapiens
aaggaagtaaaatggcggacctggcgaacgaaggttatcaatactctggctgaccatcatcatcgtgggactgac

SEQ ID NO: 539261 - DNA, 100 bp, Homo sapiens
ctcacctcaagcacacccaatggacagcatgcctcaccaagtcacatgacaagcaatgtctagagtttctgcttcaaaatgatgcaaatccatctatccg

SEQ ID NO: 539262 - DNA, 100 bp, Homo sapiens
ttttgcaaccctctgcattccatctctatgagccaccatttggtagctggcagtgttgtgatggcttttgaagaagtatgcccggacagaatagatctga

SEQ ID NO: 539263 - DNA, 96 bp, Homo sapiens
ctgatgctgtggaacttgcaaatcgaagataaacattgacgatcttgaggatgaccctgtggtgaacggggagaggtctggctgtgcgctcacaga

SEQ ID NO: 539264 - DNA, 98 bp, Homo sapiens
ggagaagtggctgctctgcgcctcacggccagatcccagaacggccggtttgtgggcgatgctgaccttgaaagacagaaattttcagatttgaaact

SEQ ID NO: 539265 - DNA, 101 bp, Homo sapiens
ttgccgatttcatgactaaccagtgagtatgctgctgctgttccgctttgcgtcctcgctacaaacgcctggtggacaacatattccctgaagatccaaaa

SEQ ID NO: 539266 - DNA, 98 bp, Homo sapiens
atgcaaaagtgatgaaacagtccatttgtcataaagtaagatgcagctgtggcatgtcaaccagcttgcttccaatcagaagactatacaacctccta

SEQ ID NO: 539267 - DNA, 90 bp, Homo sapiens
gaatttcatattgtgtcaagtacaggagtttcaggtttggagtgttatgatgagttcagtcacctgtggactctgccacaatgtccccag

SEQ ID NO: 539268 - DNA, 96 bp, Homo sapiens
ctggatggaggggattttgtcagcttgtcgtcaaggtcatcttccacgatgttgctgtgctgacggataagctcttccccatcgtggaggccatgc

SEQ ID NO: 539269 - DNA, 100 bp, Homo sapiens
aagacagatgctaatagcaattcctgtatggcgactacccgaagctccctgaccgctcacagcatgagagagatccatggtatagctgggaccagccggg

SEQ ID NO: 539270 - DNA, 76 bp, Homo sapiens
cattaatatcaccaacaatgagagagtggttgtaaaaatcctgaagcctctactcttcatggatcttttggatgaa

SEQ ID NO: 539271 - DNA, 96 bp, Homo sapiens
cgtgcccaaagaggagggcgtcatcagcgtctccgaggacagggtgttttgaatgctgtatcaaatgcctggggggcattccctatgcctctctga

SEQ ID NO: 539272 - DNA, 75 bp, Homo sapiens
gggacggccggtcaggctcgccgccgagctgtacctggagtagaacagaaaaattattatgtctgtgttcccttg

SEQ ID NO: 539273 - DNA, 73 bp, Homo sapiens
tggagtgggcgcggaggcgaccgccatggcgttcctcaaactccgtgaccagttcaggacctcaaggggctcg

SEQ ID NO: 539274 - DNA, 75 bp, Homo sapiens
gaagggaggcttacgtgaaggtgtaaacaggaacatcgataagtagtgtaaaaacttgcacaatgaaatccgaag

SEQ ID NO: 539275 - DNA, 50 bp, Homo sapiens
cttgcagttgaaggagtataacacaggtgtccagagagtggacgaaggtg

SEQ ID NO: 539276 - DNA, 100 bp, Homo sapiens
cttcgggaaatccgaatgctcaagtttggtcagaaatcacatgtggagtgtgctcgattttctccagatggtcagtatttggtcactgggtctgttgatg

SEQ ID NO: 539277 - DNA, 83 bp, Homo sapiens
cctgatccggttcttggtgcccctgggcatcaccaacatagccatcgacttcggggagcagaattcagaaggagctggcggac

SEQ ID NO: 539278 - DNA, 50 bp, Homo sapiens
tggcccagtactaccggcccctgcatagatggggtcttgctatgttgccc

SEQ ID NO: 539279 - DNA, 51 bp, Homo sapiens
gctcatccgtcagctgaactagacccagtttctattccaaggacaatgaag

SEQ ID NO: 539280 - DNA, 97 bp, Homo sapiens
cttctaaaactggaatgacaggaatggcctcctcccttagctccctgttcttgggtcaaaatgcagatcttcgtgaaaacccttaccggcaagacca

SEQ ID NO: 539281 - DNA, 96 bp, Homo sapiens
gcggcttccatctctgaggcgagcgacgctatggatcccacaggccataaagaatgctgatgggagaaccattttcctaattttcaaattgttgag

SEQ ID NO: 539282 - DNA, 111 bp, Homo sapiens
ctgaaccagaagatcgagagcctaactttgcaaccattggtctgcaggacatcactttagatgatgagatgggctttcaccatattggccaagctggtcttgaactcctga

SEQ ID NO: 539283 - DNA, 100 bp, Homo sapiens
agaagacctcctttttccaggctttaggtatcaccactaaaatctccaggggcaccattgaaatcctgggcaataaaccttggatttccctgcccagggg

SEQ ID NO: 539284 - DNA, 88 bp, Homo sapiens
tttcggagtccggtactggagccaatcagcgcgggcagcgaaccgggggagcgaggcacggagcacatgcagacacaccaggccggcc

SEQ ID NO: 539285 - DNA, 75 bp, Homo sapiens
ggaggaatttgtggctggctggatctctggacagtcattttgtttactcattcagccctgttgcaggtcccaata

SEQ ID NO: 539286 - DNA, 82 bp, Homo sapiens
aagcggattccaaggaatccagcacccagtcagcttgaagagtttcaaatggaccctaccactgagaaatcaagatggcagt

SEQ ID NO: 539287 - DNA, 83 bp, Homo sapiens
cggcgagacgcgcgtgtgtgagcgcgccggaccaagcgggcccagaagcggataacgaaggaggcccaacttcattcaataag

SEQ ID NO: 539288 - DNA, 50 bp, Homo sapiens
agaagcaacacattgtcttctccaagctggagtgcaatggcgccatctcg

SEQ ID NO: 539289 - DNA, 92 bp, Homo sapiens
tattggcattcccattgctgtgcctacaccttcgccacccactattggaccaggttcctcatgccatgcacctgctgtcacccagcatgcac

SEQ ID NO: 539290 - DNA, 80 bp, Homo sapiens
acaaacgaatggacagaatcatggaatctcatttaaggtcagcttttgccaactgttttcaaatcacatgcatgggggat

SEQ ID NO: 539291 - DNA, 50 bp, Homo sapiens
caaaaacattccaccattcaacaaaaggtggagctgatcagaataatgtt

SEQ ID NO: 539292 - DNA, 75 bp, Homo sapiens
tcttcctctccctcgggacccaaggccacaaaggagagctccgtggagagaaggctgaccggttccctgatgtgt

SEQ ID NO: 539293 - DNA, 90 bp, Homo sapiens
gagccctatctcttcttgagaagctgggatttgaaggagctatcctgagatctgtactgctagtatagccgagaccatgtggtggaaggg

SEQ ID NO: 539294 - DNA, 98 bp, Homo sapiens
acagctgcgggagagccgggtaccggccgtggaagcggccaccgactactgtcagcagctgtgccaggagagcgaagacctggagaaacagaacgcgg

SEQ ID NO: 539295 - DNA, 101 bp, Homo sapiens
ggaaaacgaacaagttagtcgcagccagcaacgaggacctgaaggccaatgagtcacggttgaaggacattaacaaggtagctgaagacctggagtctgaa

SEQ ID NO: 539296 - DNA, 50 bp, Homo sapiens
cccgccccgtcgggcctcacgagggtgataaaagaaaatgtggctgaagt

SEQ ID NO: 539297 - DNA, 100 bp, Homo sapiens
atggcggcgcgatggagcagcgaaaacgtggttgtagagttccgtgactcccaggggaagccaaatataggccaagagcagcctgtggatgatgctgcag

SEQ ID NO: 539298 - DNA, 75 bp, Homo sapiens
ctcgtcccgctcgtcatggcctacccgggatacggaggagggggcccttaagtgagaagcaggaggctttgatga

SEQ ID NO: 539299 - DNA, 100 bp, Homo sapiens
caaatcctacaccttactttgaaacaccactgctggatgaaaaagaaagtcggcgtctgttccaacagatcctttctggtgtggattattgtcacaggca

SEQ ID NO: 539300 - DNA, 83 bp, Homo sapiens
attctgtctgtccacgatagtgccaggcctatgttggagggccatgaagcccccaggaggagaatcgagcaatctttttggaa

SEQ ID NO: 539301 - DNA, 83 bp, Homo sapiens
gaaatcgtgcacatccaggctggtcagtgtggcaaccagatcggtgccaaggtgtgatgaatgcagactctgctaccattttg

SEQ ID NO: 539302 - DNA, 100 bp, Homo sapiens
cgtggctgggatcggtatctgaccaaccaaaactcctgaaatacccactattgatcaggcatattcaaaactcagcaacagtatcactgtagaatgggct

SEQ ID NO: 539303 - DNA, 97 bp, Homo sapiens
tggagaagctgtgtagtgtggagcagcaccgcggaggcagccgccctggagcgggagctgctggaggattatcgctttgggcggcagcagctcgtgg

SEQ ID NO: 539304 - DNA, 50 bp, Homo sapiens
cacaggggaacacagccaactgttagatgacttcattgagaagcttaacc

SEQ ID NO: 539305 - DNA, 75 bp, Homo sapiens
ctgtcccgttgtcagagtggaagctttttcagccaaccaagtgccggagaagctggatgtggtggtaattggcag

SEQ ID NO: 539306 - DNA, 75 bp, Homo sapiens
gaacactaaagagaagattcaaccaaacccaccatcttctggtttcattgattcaaggcctcttccagatgtagc

SEQ ID NO: 539307 - DNA, 95 bp, Homo sapiens
gtccaaagcagtcgtaagaagaggtcccaatcccccactctttccgccctaatggaggtctccagtttcgccattgagacccagagcagcagttc

SEQ ID NO: 539308 - DNA, 75 bp, Homo sapiens
ctattctggcccagggcatactggatgcagtgctgggcctaaaggagataacatttatgaatggagatcaactat

SEQ ID NO: 539309 - DNA, 100 bp, Homo sapiens
aacttcctggcttacacggcggtccccacggtcctggtaacccccctgggcgcccttggagtaccgttcgggtgcgagaagccctacaacatatccctgg

SEQ ID NO: 539310 - DNA, 97 bp, Homo sapiens
ttcatttcccagatcatcatgaaggacacttaactattactattttggatgcaaaacggagcatgaacattgggatatttcttaagcaatttaagaa

SEQ ID NO: 539311 - DNA, 116 bp, Homo sapiens
ggatctattgaggtgcagctggtactaaaccaattgatcggtataacgtcaaaaatcctgtttgtcagatatatttttgccatcatggatcagtttggagatatattagaaggtga

SEQ ID NO: 539312 - DNA, 130 bp, Homo sapiens
cgggcacacaatgcccacctccgcggcccaccaccaaagctcatccctgtctctggaaagctggagaagagcctgtgtggtgcccctatctccttgttccaagggcctctcttgccttgaaagccttctt

SEQ ID NO: 539313 - DNA, 91 bp, Homo sapiens
ctcggcggcggcggagcgggcggcagagcagggcggcggcgactcgccttatgccagcctggaccatcttggaggcagtgtaggatcatgg

SEQ ID NO: 539314 - DNA, 75 bp, Homo sapiens
tcttctgacctccgcgcgacgtacccgccgccgccgttggctggaggaggtgaagtgaaatctgcaagagtcctg

SEQ ID NO: 539315 - DNA, 51 bp, Homo sapiens
tgggtcgaccattccaaaaaaatcgagggaagaatctgaacattctgaagg

SEQ ID NO: 539316 - DNA, 100 bp, Homo sapiens
cattaacagaaaagaagaggagaatgctaagcagagaatcagagatcattgatttcttcctgggggcctctctcaaggatgaggttttgaagattatgcc

SEQ ID NO: 539317 - DNA, 98 bp, Homo sapiens
ggaaaaggcaaaaatcccatctaccgcaactctcagttcgagagtaaaggtttggtgcacctcgatttggaggaagtagggcagggcccttatctgga

SEQ ID NO: 539318 - DNA, 80 bp, Homo sapiens
ccgctccgcagccccgggcacggcggaggcagcggagccctgggccatcgggcgaccattgacgaggtggagacggacgt

SEQ ID NO: 539319 - DNA, 83 bp, Homo sapiens
gtctgcgagccaggattcccgagatcctgaaggagctagacgagtgctacgagcgcttcagtcgcgagacagacggggcgcag

SEQ ID NO: 539320 - DNA, 110 bp, Homo sapiens
cctcggtctgggcttctctgaggcggcgagagatggtcaggtctggagctcgaccgggccagggatcataaagctgttggaagacgaccttttgataagatggcaacact

SEQ ID NO: 539321 - DNA, 71 bp, Homo sapiens
ggaattcagaacgtcagcacctgcaggttcagactgaagcgggtcacgggcgggtttaactccaagaacag

SEQ ID NO: 539322 - DNA, 96 bp, Homo sapiens
agcaccaaatgttgtctatacatatactggaaagagaattgcattatatattggaaatctaacatggttcttcaccaaaggacatggatgaaaatg

SEQ ID NO: 539323 - DNA, 96 bp, Homo sapiens
cacagtagaaccgatctcagccttgctgatcatctcgtacagcagcagaaaatgaccatgttacagggcttctggtacagttttcactgctactga

SEQ ID NO: 539324 - DNA, 82 bp, Homo sapiens
aggcgtccgttggccttcgtacccgtcttgattgagcaagagtgagccatggagctacgtgtggggaacaagtaccgcctgg

SEQ ID NO: 539325 - DNA, 105 bp, Homo sapiens
aagttcgtgtcgctgctgcaggaggccaaggacggcgttctggatctcaaagcgttctgcgtggtggtcctctcactggaagctacaggttacggcaggttcacc

SEQ ID NO: 539326 - DNA, 83 bp, Homo sapiens
tctgcctccctgccccagcccatcctctctaaccaagaaaaatggctacaaacttcctagcacatgagaagatctggttcgac

SEQ ID NO: 539327 - DNA, 100 bp, Homo sapiens
gaagaaagaaggtgggagcggagagcgcaggcgtggagattgtgaagacctttgagatttcagagcctgtgattactccaagtcagaggcagcagaagcc

SEQ ID NO: 539328 - DNA, 111 bp, Homo sapiens
ctggctcaggaacagggacagcacctcatcccctggatgggggaccacaagatcctcatcgacaggattctggttgatctgaaaaatgaagtttggtatcaaaaatgtcat

SEQ ID NO: 539329 - DNA, 100 bp, Homo sapiens
agcaattgactgagtagtcactgccccacccctgcctggagcctcacacatgactcgcctcctctcagtgaccacagtggactaaagaggatggacatag

SEQ ID NO: 539330 - DNA, 83 bp, Homo sapiens
ctgtgtccagccagggatacatgccctacctcaacaagtacatcctggacaagtggttgatatcacagcaagtatcctttccg

SEQ ID NO: 539331 - DNA, 100 bp, Homo sapiens
gcggaggcggaggcagaggtggaggcgctttgaaaggcctccggtgtggctgtctctgatggtgtcatcaaggtgttcaacgacatgaaggtgcgtaagt

SEQ ID NO: 539332 - DNA, 100 bp, Homo sapiens
tccactgtcctcatcctagtgggggttggcttgcccatttcctctaatggtaccaaaccaccactggatgcagatgtaaatttggaagcaattgctggtg

SEQ ID NO: 539333 - DNA, 96 bp, Homo sapiens
accagaagcagattgccaacattgaccgtattacaaagagccgggtgtgggctgagccctgcctgattgatgctgccaaggaggagtacaacgggg

SEQ ID NO: 539334 - DNA, 100 bp, Homo sapiens
aagagggcagagccgtgcatggggctgctccccaggacctgagcaggaacctggagttttcaggctgagtatgagtttatcagctctggtctctacctag

SEQ ID NO: 539335 - DNA, 51 bp, Homo sapiens
ggagtttttgggcacatgatggcagaacatccagtcatggataaaaatgag

SEQ ID NO: 539336 - DNA, 82 bp, Homo sapiens
tcagcagctcaactgcccagcgtgaccagtggccacctctgcagtgtcttccacaacctggttgcacctggacttgatatga

SEQ ID NO: 539337 - DNA, 100 bp, Homo sapiens
ggcgccgaggcggccacccgagacgcggcgcgcacgctccggcctgcgtcaccttcaggccattcagaggaggaaagagaggggaatatgaagtcagcca

SEQ ID NO: 539338 - DNA, 80 bp, Homo sapiens
ctggagtggggagaagcatcatggttcaacgatattagaaatggctactccccagtcaattttcatctttgcaatctgca

SEQ ID NO: 539339 - DNA, 88 bp, Homo sapiens
gcacagctcagagctggcgcccaaggaccttcgggagaaaaactgggaagcaatggaagcattggcatcaactgaaaaaatgctgcag

SEQ ID NO: 539340 - DNA, 74 bp, Homo sapiens
agtcattgaggactttccagcaaagggcaattgaaggaacagactaaaaatcgtgtcctggaaggaaactacag

SEQ ID NO: 539341 - DNA, 100 bp, Homo sapiens
caggaattgggatcgtgtcgctgcgcaacagggagctgccaccaccgtgtactgtgctgctgtcccagaactggagggtctgggagggatgtacttcaac

SEQ ID NO: 539342 - DNA, 96 bp, Homo sapiens
ccggtgcctggccctctagccccgctaccggactacatgtcggaggagaagctgcaggagaaaggtattgatgaagatgaccctactgctgatgat

SEQ ID NO: 539343 - DNA, 100 bp, Homo sapiens
aaacctttggcatttatccttattccgactatggcaattcttggaaatacttacactgtttcaataaaatcaagaacccctgaacagtgcccaagtgttg

SEQ ID NO: 539344 - DNA, 100 bp, Homo sapiens
ctgtgacctgcatgtactgggggattcgcagggaggatgtcgggacaccccggaagctgggaaatgatctcccttgagtttagaaatctggctgagaaat

SEQ ID NO: 539345 - DNA, 96 bp, Homo sapiens
acaggaagaagttggtacgggcactcttcatagttcctagacaaagtactgtaagattgatgttaaaggcatggtgttcaccccacttcatcagcg

SEQ ID NO: 539346 - DNA, 51 bp, Homo sapiens
ctccggggcagctccggcgggcggtgatcgtgcagtccggccgccacccca

SEQ ID NO: 539347 - DNA, 83 bp, Homo sapiens
aggagagcccttcagcgaggaagctacacttttcaccaaggaactggtgctgcagcgagagtacttggaccatgagactgttt

SEQ ID NO: 539348 - DNA, 75 bp, Homo sapiens
ttcatcaaggtgcagctgagggatggagacagcaactgtggctgagaatcaggctgaaagccgggcagcagtgga

SEQ ID NO: 539349 - DNA, 100 bp, Homo sapiens
ctgcttctgcatcgacagatagccgtcttcagcttgagccccatcactaggtgaaatgacaatggatgctctgttggctcgattgaaacttctgaatcca

SEQ ID NO: 539350 - DNA, 100 bp, Homo sapiens
ctactccctccccggactccgcggggtgaaaatcctatttataagagtgccgtaacaactgtggtcaatccgaagtatgagggaaaatgagtactgcccg

SEQ ID NO: 539351 - DNA, 98 bp, Homo sapiens
ccagcatcgacatggtttccgaagtcaacatgagttatttgaagagtaccacgatggtgagatctgattcaggaggacaagtttaccttgattatcac

SEQ ID NO: 539352 - DNA, 75 bp, Homo sapiens
tctcacctcgacggtgatttgcaggtgatcctgggtgtttggctgacctacagatacaggaaccagaaagacccc

SEQ ID NO: 539353 - DNA, 127 bp, Homo sapiens
cagaccctggagcctcagttggaagcagccgatccagcctgcggagcctgtggggcaggttatcaatactctggctgaccatcatcatcgtgggactgactttggtggaagtccttggttacatgtc

SEQ ID NO: 539354 - DNA, 83 bp, Homo sapiens
gtcggcgtgggcgtttgaggaagctggacaatgcagatcttcgtgaagactctgactggtaagaccatcaccctcgaggttga

SEQ ID NO: 539355 - DNA, 102 bp, Homo sapiens
ggaagcagctgaaagagctattgaaaaaatgaatggaatgctcctaaatgatcgcaaagtgtgttcgaaatccgcaccactgatgacctcactgaggcctgg

SEQ ID NO: 539356 - DNA, 75 bp, Homo sapiens
gggaccaaggtggaaatcaaacgagccatgtctgaccaggacgtttggaagatcatatccatgccagaggctctt

SEQ ID NO: 539357 - DNA, 51 bp, Homo sapiens
cccaagtgcattgcctttggaaacgaggccttgtgaaaaagggtaaagaac

SEQ ID NO: 539358 - DNA, 100 bp, Homo sapiens
atgactgccctctaaaggaagagaggttggaaagaaccatgactgtattcaggaaggcacatgaactgaagcttctgtcagaatgccaatacaagcagtt

SEQ ID NO: 539359 - DNA, 73 bp, Homo sapiens
cagggatcaaggactttgacttctggctgtctgaggtggaggcttccattctggtggcaaccggggtcgtggt

SEQ ID NO: 539360 - DNA, 75 bp, Homo sapiens
cgccgggtggagattctcagtgaaggaaatgaagtccgtactaggttttgacaagcttgcatcatgcgtgagtat

SEQ ID NO: 539361 - DNA, 98 bp, Homo sapiens
gcagctcagaagttcagcctggcccactccatgttggccatcagtggtcacctagacagcgacgatgataggagaaaaggaaatgtctgcagagttgg

SEQ ID NO: 539362 - DNA, 80 bp, Homo sapiens
agaaagccagatggctgaacatcagatggctcagcgacttcttctgaggaggttcctggcctctgtcatctccaggaagc

SEQ ID NO: 539363 - DNA, 100 bp, Homo sapiens
tgcacttcctgcagcacgagtgggcccgcttcgaggtggagagagcccagtgggaggtggagcgggcggagctgcaggggagcgtgttcaatacgtggaa

SEQ ID NO: 539364 - DNA, 100 bp, Homo sapiens
ccccaaaataaccattctccagatccagaacatgccgagtttttgcactgcaagtccaaaaagtttacagactttgatgaagtccggcaggagattgaag

SEQ ID NO: 539365 - DNA, 50 bp, Homo sapiens
tgggattcgccagctagctaattatgttaacgtccctaaaacccgccgga

SEQ ID NO: 539366 - DNA, 98 bp, Homo sapiens
agcgcccagctcattgcctcagctaagctacctcatccatgagtctgcctgctggagtgacacgctgcagcgctggttcttcctgccgcgccgcgcca

SEQ ID NO: 539367 - DNA, 96 bp, Homo sapiens
cgctcagcgaggaccgttagcagcaacagcttctgctcagaaatgaatactgcattgagggacggacttctggtcttcttcttcctaattgttccc

SEQ ID NO: 539368 - DNA, 100 bp, Homo sapiens
gatggcagcgacacaattgtctgtgacagtaacagtacttgggatcccccagttccaaagtgtcttaaaggcaccatacaggaagattacttgagagagc

SEQ ID NO: 539369 - DNA, 96 bp, Homo sapiens
agatatggacactctcttgctttatatcagatttatcagcaagactgttgaacgcataactgcccaagatgcctgtccctccccctccagcacccc

SEQ ID NO: 539370 - DNA, 75 bp, Homo sapiens
gtggcaggttgcagaggacagtgctatgctgggactcatgtatgtctactggactcagctcaacatgttccagac

SEQ ID NO: 539371 - DNA, 95 bp, Homo sapiens
cggcgagatcgagctcgagctgcagcggggtatcaatgagtcctacaagaaaaacctgatggccctgaagaagtttgtgatggtgaaattcctca

SEQ ID NO: 539372 - DNA, 100 bp, Homo sapiens
aagaaagctgcgttaatgtttgcaaatgcagaggaagaatttttctatgaggctgagtcatcactagagagtgggaagggcagcagcagcagagaatcca

SEQ ID NO: 539373 - DNA, 50 bp, Homo sapiens
ctcacatatggatactttcacagttcagggtctccgtctctccaccgggg

SEQ ID NO: 539374 - DNA, 50 bp, Homo sapiens
tcttgcaaacaagcagatatttgtgtgggcagctgcaatgactctccgca

SEQ ID NO: 539375 - DNA, 51 bp, Homo sapiens
atccagatgaggatatatccctgcctttgcaaaatgttagcacagtgctgc

SEQ ID NO: 539376 - DNA, 51 bp, Homo sapiens
ccggagggcactcttagaacaaaaggtgtgggcagaagaaaaagctagtga

SEQ ID NO: 539377 - DNA, 83 bp, Homo sapiens
ccgccgccgccgttggctggaggaggccccgtgtgggccgcggcccggccctcaccatggagtccatgttcgaggacgacatc

SEQ ID NO: 539378 - DNA, 98 bp, Homo sapiens
ggctcggtattccccttcctgctagtcctggtggatctgcagtacgaaggagtcagagtattcatcgaaaagaaagcacagctaacacttttaggaac

SEQ ID NO: 539379 - DNA, 88 bp, Homo sapiens
ttcgcagtggtcgcttcttctccttggcagctccctgaagcactccaccactctcaccaaccggcagcgagggaacgaggtgtcagct

SEQ ID NO: 539380 - DNA, 100 bp, Homo sapiens
cgcgcccggcgcccctgagccggccgagcggcgacggaccgcgaggtactctctgaagatggcagaagctcaccaagctgtggcctttcagttcacggtc

SEQ ID NO: 539381 - DNA, 78 bp, Homo sapiens
gcttcgagaagcgccacaagaacatgtctgtacacctgtccccctgcttcaggtacgcccctgtgggcatcatgttcc

SEQ ID NO: 539382 - DNA, 82 bp, Homo sapiens
gcgggatgccttgaaccaggccacgagccaggtggagagcaagagtgtggccatctggggccgtgtggtatttgccactcag

SEQ ID NO: 539383 - DNA, 128 bp, Homo sapiens
ctcctcggcttgcatttgtttctgctgaccgcgggccctgccctgggctggaacgaccctggtcgctacccacaggagaacaagggaacctacatcccagtgcctatagtctcagagttacaaagtgg

SEQ ID NO: 539384 - DNA, 98 bp, Homo sapiens
aacaccatggctgcggcggcccagctctctctgacacaggttcgatacaagaggctgttttcctagcgtggcttgctgcctttggtaagaacatgtcg

SEQ ID NO: 539385 - DNA, 82 bp, Homo sapiens
ctttgaatcaactgatgagacaattgcagaggattttgacacttcatgacatgtcattatttagagcaataatgaatattga

SEQ ID NO: 539386 - DNA, 100 bp, Homo sapiens
gagcgttctaaaggaaggcgtccgttggccttcgtacccgtcttgattgagcgattattggagccggaattggtggcacttcagcagcctattacctgcg

SEQ ID NO: 539387 - DNA, 75 bp, Homo sapiens
cgagaacaagcacagtcctgccgggtgttcatgaagtctgtgaagctggagtgggtgcaagacaacatcagggca

SEQ ID NO: 539388 - DNA, 100 bp, Homo sapiens
gagactctgtccttcatccgagacagcctggagaagagcgaccagctcactaagaacatgtttgcagacctgacagacgctgctgcccgcaacgcggagc

SEQ ID NO: 539389 - DNA, 83 bp, Homo sapiens
ctacgtcccgctgccgtcgccgccgccaccatgcccaagagaaaggtacctgccgtgggcagatctgagctttcttcttggac

SEQ ID NO: 539390 - DNA, 96 bp, Homo sapiens
gaaagcctatcagcatagttaaggtgatgctactaggaggtggagcctttgggaggtgattagttcatgaaagtggagccctcatgattgggatta

SEQ ID NO: 539391 - DNA, 90 bp, Homo sapiens
tcctcggaacggccacctcccagatgccttcaattaagttgcagagttctgatggagagatatttgaagttgatgtggaaattgccaaac

SEQ ID NO: 539392 - DNA, 110 bp, Homo sapiens
cgcccgccttccgccgtctcttcgagttcttcgtgctgctcaagggtttccaggcctgaggtgcccgccctggccccaggagaatgaaccagccgcagaggatggcgcct

SEQ ID NO: 539393 - DNA, 49 bp, Homo sapiens
ccggttgccgggcgcgggcgagaaagaatactctggagcagtgcaatgt

SEQ ID NO: 539394 - DNA, 98 bp, Homo sapiens
gccgagaccccagagaagagacgcagttactcatctcaagggcagggtctgggtctttatcgtcgcatttgtagccatgaagtgccatcttgcccaat

SEQ ID NO: 539395 - DNA, 74 bp, Homo sapiens
ctgaagagggacccattaatattggtggattgcagcaatttgctactgaggcccagaccttctctttccctttc

SEQ ID NO: 539396 - DNA, 100 bp, Homo sapiens
gggcgccggagccgaggcgagcgccgcgcgcaccactggttatgagaagacagatgatgtttcagagaagacctcactggctgaccaggaggaagtaagg

SEQ ID NO: 539397 - DNA, 74 bp, Homo sapiens
cagtaatcagatgtttgccatgaaagaaataaggcttcccaaggtcactcagctctatgtgccagcatccagac

SEQ ID NO: 539398 - DNA, 100 bp, Homo sapiens
gaagcaacaacctctcctcttcgtctccgccatcagctcggcagtcgcgaagcagcaaccatggtctcctctgagcctccggcctccataagacccaaaa

SEQ ID NO: 539399 - DNA, 101 bp, Homo sapiens
actcgcggcgcgcgtgaacgttgccgtcgccgccgcccgggacagcccggagatgagtataggatcaaaccagtggaagaggtcaaatacatgaaaaatgg

SEQ ID NO: 539400 - DNA, 82 bp, Homo sapiens
cgttgtaggggttacagaacagtcgttcccgcctcacaacctggcctatgtgcatgaattcaaattccgaagcatcttagcc

SEQ ID NO: 539401 - DNA, 100 bp, Homo sapiens
gctgcagaagaatattttgcctgctggaacctgctgtatctactcaagagtggaagttttcacagttgtctggcgccgggagtgagaccctaaaacaaag

SEQ ID NO: 539402 - DNA, 75 bp, Homo sapiens
ttttacaagaaaccaaacaagcctttgaaagatgtcataggatggatcctgagcttgaaaaaaaactgaaagaga

SEQ ID NO: 539403 - DNA, 101 bp, Homo sapiens
acttgtcgcatccctgggctctgcggagaaggaacccgagcagcccccggccctgtggaggaagggttggctgtgttccggccgcagagcaccgtctgcgt

SEQ ID NO: 539404 - DNA, 100 bp, Homo sapiens
cctacgatgagaactggttctacacgcgagctggtttgggccccatggtatccctgtgacagtatttcccaaaagggaatataaggataaaccagaagcc

SEQ ID NO: 539405 - DNA, 130 bp, Homo sapiens
tgggtgagcttgtttgtgtccctgtgggtggacgtggttggtgattggcaggatcctggtatccgctaacaggtgagaagccctaccactgcaactgggacggctgcggctggaagtttgcgcgctcaga

SEQ ID NO: 539406 - DNA, 75 bp, Homo sapiens
cgagtcctccctgttcatcattgcctccaagggtgtgaccgagtgttatgagtgtcatcctaagccgacccagag

SEQ ID NO: 539407 - DNA, 103 bp, Homo sapiens
gatcgacaagaccatgctggcaagtctgaaggtcaaatccagacatttaatgtggatgcaccatgccagaccgtggaagatttaacgaatggggttgtgatgg

SEQ ID NO: 539408 - DNA, 83 bp, Homo sapiens
ctgcagtacctgcagaaggtctctggagacatcttcagcagcttcgcggaacagctggtgctgtacctgaaggtggccgagct

SEQ ID NO: 539409 - DNA, 82 bp, Homo sapiens
agtcctagcgcctggcctgcgcgccgctgcccgcgccacaggattctcaaagttggattggtggaaacaatgaaccattgac

SEQ ID NO: 539410 - DNA, 75 bp, Homo sapiens
gaagacatgacacttacaagatggacagggatgataattgggcctccaagaactctagatctcgttagagcatta

SEQ ID NO: 539411 - DNA, 100 bp, Homo sapiens
gtcaacggtgacaagtgtgggaaccagcgcttctccaccaggatcacgtttgagtgtgctcagatatcgctcctgtgtcctaccgacctctccactgtat

SEQ ID NO: 539412 - DNA, 48 bp, Homo sapiens
aagggcaagggccaaaatgatgctgcaggacaagttcgagcatcttaa

SEQ ID NO: 539413 - DNA, 100 bp, Homo sapiens
ccttgtgcccgaggcccaggacagccaggtcaccagcaccaagaagtgtgaacatggctacgcctcttcattcccgtccatgccgagcccccgactgcag

SEQ ID NO: 539414 - DNA, 99 bp, Homo sapiens
cgcaaggtcaacctgggagtgggaggtggcgaatcttccgtgaactccatggccatgcgcatcgtgatgggcagctggtggctcttcacgctcattgtg

SEQ ID NO: 539415 - DNA, 96 bp, Homo sapiens
gtttttccagctcacccactgccagcagaggtctaactcatcttattactatggatttacaccagaaggaaattcagggcttcttcaatattcctg

SEQ ID NO: 539416 - DNA, 76 bp, Homo sapiens
catccgaggtgcctttctccaaaagatgtatcggcaagcagtgtaaacggaggacttggggaaaaaggaccacata

SEQ ID NO: 539417 - DNA, 90 bp, Homo sapiens
gacggtccccactttcccctgagcctcagcacctgcttgtttggaagacaagttggatggcttgaggactggtactaaaaggaaacgtga

SEQ ID NO: 539418 - DNA, 98 bp, Homo sapiens
ttttctttcaactatatttgagcatacccagcagacatccccccatccccaggaaatatccctaccacccatccactgatggtgcgccatgcagacca

SEQ ID NO: 539419 - DNA, 90 bp, Homo sapiens
ccaaccccgaacggggggagattctgctcacggaactgcagggggcaatggcggcttcctgtgttctactgcacactgggcagaagatgc

SEQ ID NO: 539420 - DNA, 100 bp, Homo sapiens
acccatctgaagggaggaaatagtggcaggtgacagtctgcatgtgcagttttcaggtggcacaagaatggctcaactctccaaatagagagaatttcta

SEQ ID NO: 539421 - DNA, 75 bp, Homo sapiens
cagcattcacaaaccaggaacggctagctttttgaccttccatccgaaaaataatttgggaggatatttttccaa

SEQ ID NO: 539422 - DNA, 82 bp, Homo sapiens
gcggagacttcaccaggggagatggcacaggagatgactgtccaagtgcctccaaagtgtacaaagcatcagattcagcaga

SEQ ID NO: 539423 - DNA, 100 bp, Homo sapiens
gaagtggaaggagcagaacgtgagggtgtaacttacaaaaaggttaaataggattgcgaatcaggtggccattcagcggaagaagcagtttgtggagcga

SEQ ID NO: 539424 - DNA, 87 bp, Homo sapiens
gagggtgccctcaatgagcacatgaccagcttagcttctgtcctaaaggtgtttctgcccagttttccttcatagtcagatgctctg

SEQ ID NO: 539425 - DNA, 98 bp, Homo sapiens
cgaagaggaagaccctcctgccaaaaggaaatgcatctttatgtcagaaacacaaagcagcccaaccaaaggttacatggacacagaacagtatgaag

SEQ ID NO: 539426 - DNA, 75 bp, Homo sapiens
cgtcagcactgactttcagctatggaatcggtcacaccgacaaatctgaagcgggtttgccaggggagtgtaccc

SEQ ID NO: 539427 - DNA, 74 bp, Homo sapiens
ctggttctggaatcctcagttcaaggctcatgcacaattagttcgagaagttgatgtggagaaggtgtctgctt

SEQ ID NO: 539428 - DNA, 99 bp, Homo sapiens
gtctctccagaaaatcttgtggacaaatccaggggaaggtgtatgtgctcaagaggccttatgtggatgagttcctgagacgcatgggggaactctttg

SEQ ID NO: 539429 - DNA, 97 bp, Homo sapiens
ccgagtggtctaaggcgccagactcaagctgtcaggacaggaaacctagccaagttcaaccaggtcctggatcagtttggggagaagtttcaagcag

SEQ ID NO: 539430 - DNA, 101 bp, Homo sapiens
ggggtgtgcaaacccgagagaactgggggacaccgtggtgtttaaggatggccagtactggatccgaggccggacctcagtggacatcatcaagactggag

SEQ ID NO: 539431 - DNA, 98 bp, Homo sapiens
acctgccgccgcccctcaccagacagatcgctgtcaaaaccctagagggtgtttgtgagatatggttgaccagtgaagacacgggggcttatggcaga

SEQ ID NO: 539432 - DNA, 90 bp, Homo sapiens
gaaaatgtggtttgccatttctacagagactccacattcagattggaaccattgttgacaatccagctgatttctaccattcacgaattc

SEQ ID NO: 539433 - DNA, 75 bp, Homo sapiens
ggaacgaggcaaggagctaaagcagcgtgcgttcagccctggggattgaaagaaggtggcaagaggaagaagcag

SEQ ID NO: 539434 - DNA, 100 bp, Homo sapiens
agaagtttatgaatgagttgcataaaattccatatattgatgatgttaagaagttcaaaccgggttacctggaagctactcttaattggtttagattata

SEQ ID NO: 539435 - DNA, 100 bp, Homo sapiens
cggggagctgcaggaaccagactgggggcgagctgagcacctgtagtcaatcacacgcagttcgatcctttggtacagaagacagaccgacagatcgtcc

SEQ ID NO: 539436 - DNA, 90 bp, Homo sapiens
ggtacaccaagaaagagacggttcaagggaattaccaggaggcgatgagccagggatgaaggtggctggagaagaggaccagctgaggaa

SEQ ID NO: 539437 - DNA, 100 bp, Homo sapiens
cgcacggcgtcacctccttctgccccaccctggtcacttccccaccggaggtttatcacaaggtgcagcggaactgctgcctgacgctctgcaacttcag

SEQ ID NO: 539438 - DNA, 99 bp, Homo sapiens
ttcctttactggttcaacaactacaggaaaggtaaaataccatgaagattttgaaaaaacaaaggggagaggctttactcccgtcgtggacgatcctgt

SEQ ID NO: 539439 - DNA, 98 bp, Homo sapiens
aaggccacagagtcggggtcttcacggttattcagcttctcaaggctggaaaagcgaaggaagtttcctacaatgcactagcctcacacataatctca

SEQ ID NO: 539440 - DNA, 50 bp, Homo sapiens
taaagagccaagcctcagagactatcatggtgaacttacttcagattgtg

SEQ ID NO: 539441 - DNA, 75 bp, Homo sapiens
ctctagaagtctggatgtcggtgggcctctgagatatgccgtttacggaatagtgaggcagactttcaataagga

SEQ ID NO: 539442 - DNA, 75 bp, Homo sapiens
catcgtgtggcaggaaacagaagatgatggggcgcctacccttcttcagcaagatgggaacagctgagtctgaag

SEQ ID NO: 539443 - DNA, 83 bp, Homo sapiens
cttgggcgggggatgtgagcgctgagcccttggcagtttgatgaaggccggaacaactttgaaggggaggtcaccaaggagaa

SEQ ID NO: 539444 - DNA, 90 bp, Homo sapiens
agttcagagagcatctggagctaattgtgaaaaatagtgcaacctacaatggcatcgttggcttcacagtatgactgatgatcctccaac

SEQ ID NO: 539445 - DNA, 100 bp, Homo sapiens
gctggcggacctcgggtcgcgcagtcagatcaaaggtccatcatcaaaacaccaaagactcaagacacagaagatgatgagggagctcagtggaattgta

SEQ ID NO: 539446 - DNA, 75 bp, Homo sapiens
ccgtgatgcaagctctcgagagtctcacggagacgcagcgctggaatcccatgggcggcttctgtgagaagctcc

SEQ ID NO: 539447 - DNA, 74 bp, Homo sapiens
ctgtccaggagctctgctctcccctccaggtgtacagagccagtgggccggatggagccactggcagaggccag

SEQ ID NO: 539448 - DNA, 100 bp, Homo sapiens
cagcccgacgcaaaccaaggatctggggatcttcgcactatcccaagattgtctaaagccccaggaaaaatggtggaaaattcaccgtcgccattgccag

SEQ ID NO: 539449 - DNA, 82 bp, Homo sapiens
gcctcctgctgctcctgtttgtgggccttagaaaatttacgtgtatacctgtgtgagaaaatcatagctgagagacattttg

SEQ ID NO: 539450 - DNA, 100 bp, Homo sapiens
cactgatttcatcctcaagtttccgcacaggaccagttgctcttctgtgatgactgcgatcgtggctaccacatgtactgtctcaccccgtccatgtctg

SEQ ID NO: 539451 - DNA, 83 bp, Homo sapiens
gaagcgtctgctcaggttgcagcaggagagaggttggatttggtctagggagtcccagaaagaagtagaaaaagagagagaag

SEQ ID NO: 539452 - DNA, 50 bp, Homo sapiens
agggtgttcttgacgattaatcaacaggctcaaactgctttttctgcaaa

SEQ ID NO: 539453 - DNA, 83 bp, Homo sapiens
caacaacggatgaaaatgaagacgacattcagtttgtcagtgttttgaacgaagaatgtgatcagaactggtacaaggcagag

SEQ ID NO: 539454 - DNA, 75 bp, Homo sapiens
cgcgctgcccgcactcctggtcctgctcggggctctgttcccaggtcagcccaaggctgccccctcggtcactct

SEQ ID NO: 539455 - DNA, 75 bp, Homo sapiens
ctgattttgaaacacctgggtctgggcttcccgggcgagcggtggtcttccgtgtgtgctaagatcgtgcagctc

SEQ ID NO: 539456 - DNA, 78 bp, Homo sapiens
tctcttcctgcttcatctctaaaggtccttctaggagagaggtgaaagaattgatagatgtcacatgtaccctgctgc

SEQ ID NO: 539457 - DNA, 82 bp, Homo sapiens
gcagaagtcgcgtgtctaggtgagtcgcggtgggtcctcgcttgcagttcagcgaccacgagtttgctctccaaagctcggg

SEQ ID NO: 539458 - DNA, 75 bp, Homo sapiens
gcttcagggagtcggaccagcttttcaaacaatacagatttggactgagcaacaaatttgaatctgaattccctt

SEQ ID NO: 539459 - DNA, 100 bp, Homo sapiens
caaaggcgcaagtcgagaggaaactgttgtgcctcttcatattggcgatcctgttgtgcttcaacggaccacaccaaaatgccatctcaaatggaacacg

SEQ ID NO: 539460 - DNA, 123 bp, Homo sapiens
tgccgcattgtggactggaaggaggactgcaattttgccctgggattatgtgtgacaatccaagaagccaaccaattaagaaccgaaaatacacatctggaaaaacagaccagagagctacaa

SEQ ID NO: 539461 - DNA, 75 bp, Homo sapiens
gctagagaagaacattaacattgttcgcaaacggggtggacaacaccacgggctccggggggtcctggcagccgc

SEQ ID NO: 539462 - DNA, 96 bp, Homo sapiens
tggtgatggactgcagctcagaaaggaacatactctcaaaatatttacttatatcaattcctggacacagagcggttgctgatgctattagaacaa

SEQ ID NO: 539463 - DNA, 75 bp, Homo sapiens
gccacggctttagcggtgtcttttgcgtggctgagaagaccaaagagcaagtgacaaatgttggaggagcagtgg

SEQ ID NO: 539464 - DNA, 74 bp, Homo sapiens
ctctcagacagcctcttcgtgtgggcaactgcgatgtctgtggactgtcttgggcagcatgcagtgctttctgg

SEQ ID NO: 539465 - DNA, 100 bp, Homo sapiens
cccagccgtgaagctgcatgaagagacgctgacctacctcaaccaaggagacagaagaaattctggcagatgtgctcaaggtggaagtcttcagacagac

SEQ ID NO: 539466 - DNA, 156 bp, Homo sapiens
tttgttggggagaagaggattggaggtgtcagtgttaaaggaacctctacaacgaaggtgaagccacggaagataaggtactccaaagattcaggtttactcacgtcatccagcagagaatggaaagtcaaatttcctgaattgctatgtgtctgg

SEQ ID NO: 539467 - DNA, 96 bp, Homo sapiens
acatgccatatgctcagccgggatacctatgagtgcacctgtcaagtcgggtttacagattggtggaacgagaatgcctacacgcagccacaggaa

SEQ ID NO: 539468 - DNA, 90 bp, Homo sapiens
ggcggccgcgaccccggccccggcctcggccgtggcgagcgggggcataaggaaatggtggcaggcacttcctcctaacaagaaggaagt

SEQ ID NO: 539469 - DNA, 75 bp, Homo sapiens
cgcccctggagcacatctttagagccatcctgatcaagaaaaccgacaggctgaccggttccctgatgtgttacc

SEQ ID NO: 539470 - DNA, 82 bp, Homo sapiens
ccaacgactcgacccagttcactgtggctggcaggatggtgaagaaagttggtgggccagtttattgctagagctgttggag

SEQ ID NO: 539471 - DNA, 75 bp, Homo sapiens
ggttcctgctttcacagaattattccagggtttatgtgtcaggctggaggcaaagctggaaaggacagtgggaag

SEQ ID NO: 539472 - DNA, 90 bp, Homo sapiens
gctaccactgtctgccaacccaatgaatttatcatggtgaaaatcctatttataagagtgccgtaacaactgtggtcaatccgaagtatg

SEQ ID NO: 539473 - DNA, 83 bp, Homo sapiens
gtcttctcgacatgtgtgtgggacaatgcagatcttcgtgaagactctgactggtaagaccatcaccctcgaggttgagccca

SEQ ID NO: 539474 - DNA, 100 bp, Homo sapiens
gtgagactgggtctggtaaaacaacacaggctaccaagcagtttctcgaagagattaacaagtggacagttcagtacaatgtttccccgctgtcttggaa

SEQ ID NO: 539475 - DNA, 51 bp, Homo sapiens
ccgccacccaaaccagtcaaaccaggaatccagatcttacataagatggaa

SEQ ID NO: 539476 - DNA, 50 bp, Homo sapiens
gaaagagtcaacagcagtggcaacagatatttcagcagttgaatcagttg

SEQ ID NO: 539477 - DNA, 75 bp, Homo sapiens
agtggaagcgaagccgaaaaaggcagcagcgaagagaggccaatgagacttgaaccctgagcctaagttgtcacc

SEQ ID NO: 539478 - DNA, 109 bp, Homo sapiens
acttcggcaagatccagatcgggatttacgtggagatcaagcgcagcgatggtggttgtggaggcagagaatcaggttataccttgaagggactggcataaaccctgta

SEQ ID NO: 539479 - DNA, 143 bp, Homo sapiens
cagggggctgtcgcccgaatgcaggaagaccgtgatgggagctgcagcacagtcgggggtgtaggttatggggatgcctgtgaggagccaccaacatttgaagctatggagctcattggtaaaccaaaaccctactatgagat

SEQ ID NO: 539480 - DNA, 94 bp, Homo sapiens
tcctgctgttgcggccgctgccccagggctgcggggacgccctgggcgctgcctatggcacagccaagagcggtaccggcattgcggccatgtc

SEQ ID NO: 539481 - DNA, 74 bp, Homo sapiens
tctattacttcagcaacagtccttcaaaggccatcatctctcagcaaggtgacatatttgtttttgacctggag

SEQ ID NO: 539482 - DNA, 100 bp, Homo sapiens
ggatacaatctcacctgagttcggaattcctcctgatcagcagagactgatctttgctggcaagcagctggaagatggacgtactttgtctgactacaat

SEQ ID NO: 539483 - DNA, 108 bp, Homo sapiens
ggtctgcaaaagatgattttacatccattattgggaaatgtcaaggtagatatagttgtaggtactccgggaagactagatgacttggtgtcaactggaaagctgaac

SEQ ID NO: 539484 - DNA, 100 bp, Homo sapiens
atgtggatgatgccaaagttttattaggacacattcagctaacgtattttagcaggtggagtgaggttgaagattcctgtgacagcgatgccatagagag

SEQ ID NO: 539485 - DNA, 100 bp, Homo sapiens
ggaacccaagcagtggcgaagggaatcgcaaggctcttccctgaccattttctactgtccctgcgcgagatcacatctccatgatccataggccctgccc

SEQ ID NO: 539486 - DNA, 90 bp, Homo sapiens
ttggggccgatgacttggtactgaccctgagcaacccccagatgtcattggagggtacagccgaggcctgcctggagccccagatcaccc

SEQ ID NO: 539487 - DNA, 51 bp, Homo sapiens
gccatggcggaagcagaggagcagtgcacttacatttcaatcgaccaagtt
